United States Patent Application Publication US 2005/0221354 A1 - sequence listing, part 4

SEQ ID NO: 95846 - DNA, 25 bp, probe
ttctaggtttcaaagatgctgtgag

SEQ ID NO: 95847 - DNA, 25 bp, probe
gattcaaaggttctaggtttcaaag

SEQ ID NO: 95848 - DNA, 25 bp, probe
gttctaggtttcaaagatgctgtga

SEQ ID NO: 95849 - DNA, 25 bp, probe
ttcaaaggttctaggtttcaaagat

SEQ ID NO: 95850 - DNA, 25 bp, probe
attcaaaggttctaggtttcaaaga

SEQ ID NO: 95851 - DNA, 25 bp, probe
agattcaaaggttctaggtttcaaa

SEQ ID NO: 95852 - DNA, 25 bp, probe
agatgctgtgagtctttggttctaa

SEQ ID NO: 95853 - DNA, 25 bp, probe
gacctgaaattccaaagtctctaat

SEQ ID NO: 95854 - DNA, 25 bp, probe
ttctaaggacctgaaattccaaagt

SEQ ID NO: 95855 - DNA, 25 bp, probe
gttctaaggacctgaaattccaaag

SEQ ID NO: 95856 - DNA, 25 bp, probe
taggtttcaaagatgctgtgagtct

SEQ ID NO: 95857 - DNA, 25 bp, probe
ctaggtttcaaagatgctgtgagtc

SEQ ID NO: 95858 - DNA, 25 bp, probe
ggacctgaaattccaaagtctctaa

SEQ ID NO: 95859 - DNA, 25 bp, probe
taaggacctgaaattccaaagtctc

SEQ ID NO: 95860 - DNA, 25 bp, probe
ctaaggacctgaaattccaaagtct

SEQ ID NO: 95861 - DNA, 25 bp, probe
tctaaggacctgaaattccaaagtc

SEQ ID NO: 95862 - DNA, 25 bp, probe
acctgaaattccaaagtctctaatt

SEQ ID NO: 95863 - DNA, 25 bp, probe
tctttggttctaaggacctgaaatt

SEQ ID NO: 95864 - DNA, 25 bp, probe
ctttggttctaaggacctgaaattc

SEQ ID NO: 95865 - DNA, 25 bp, probe
tctaggtttcaaagatgctgtgagt

SEQ ID NO: 95866 - DNA, 25 bp, probe
ggttctaggtttcaaagatgctgtg

SEQ ID NO: 95867 - DNA, 25 bp, probe
aggttctaggtttcaaagatgctgt

SEQ ID NO: 95868 - DNA, 25 bp, probe
aggacctgaaattccaaagtctcta

SEQ ID NO: 95869 - DNA, 25 bp, probe
agagtccaaggtttaaagagtctag

SEQ ID NO: 95870 - DNA, 25 bp, probe
ctagagtccaaggtttaaagagtct

SEQ ID NO: 95871 - DNA, 25 bp, probe
gtctttggttctaaggacctgaaat

SEQ ID NO: 95872 - DNA, 25 bp, probe
ggttctaaggacctgaaattccaaa

SEQ ID NO: 95873 - DNA, 25 bp, probe
tttggttctaaggacctgaaattcc

SEQ ID NO: 95874 - DNA, 25 bp, probe
cctgaaattccaaagtctctaattc

SEQ ID NO: 95875 - DNA, 25 bp, probe
atgctgtgagtctttggttctaagg

SEQ ID NO: 95876 - DNA, 25 bp, probe
agtagcatcaccttgaaagcagtag

SEQ ID NO: 95877 - DNA, 25 bp, probe
agtctttggttctaaggacctgaaa

SEQ ID NO: 95878 - DNA, 25 bp, probe
aagcagtagcatcaccatctgtaaa

SEQ ID NO: 95879 - DNA, 25 bp, probe
aaagcagtagcatcaccatctgtaa

SEQ ID NO: 95880 - DNA, 25 bp, probe
aaggacctgaaattccaaagtctct

SEQ ID NO: 95881 - DNA, 25 bp, probe
tggttctaaggacctgaaattccaa

SEQ ID NO: 95882 - DNA, 25 bp, probe
ttggttctaaggacctgaaattcca

SEQ ID NO: 95883 - DNA, 25 bp, probe
cagtagcatcaccttgaaagcagta

SEQ ID NO: 95884 - DNA, 25 bp, probe
gagtctttggttctaaggacctgaa

SEQ ID NO: 95885 - DNA, 25 bp, probe
gattgctagttgtgactgaagattc

SEQ ID NO: 95886 - DNA, 25 bp, probe
tgattgctagttgtgactgaagatt

SEQ ID NO: 95887 - DNA, 25 bp, probe
attgctagttgtgactgaagattca

SEQ ID NO: 95888 - DNA, 25 bp, probe
gtgattgctagttgtgactgaagat

SEQ ID NO: 95889 - DNA, 25 bp, probe
ttgctagttgtgactgaagattcaa

SEQ ID NO: 95890 - DNA, 25 bp, probe
tatttaatccttccatcccacgaaa

SEQ ID NO: 95891 - DNA, 25 bp, probe
ctatttaatccttccatcccacgaa

SEQ ID NO: 95892 - DNA, 25 bp, probe
tgctttctctagtctctatcccata

SEQ ID NO: 95893 - DNA, 25 bp, probe
gatacggtgattgctagttgtgact

SEQ ID NO: 95894 - DNA, 25 bp, probe
ctgctttctctagtctctatcccat

SEQ ID NO: 95895 - DNA, 25 bp, probe
ggtgattgctagttgtgactgaaga

SEQ ID NO: 95896 - DNA, 25 bp, probe
atacggtgattgctagttgtgactg

SEQ ID NO: 95897 - DNA, 25 bp, probe
tctgggatagaaatgtttaggagta

SEQ ID NO: 95898 - DNA, 25 bp, probe
tttctctagtctctatcccatagcg

SEQ ID NO: 95899 - DNA, 25 bp, probe
ctttctctagtctctatcccatagc

SEQ ID NO: 95900 - DNA, 25 bp, probe
gctttctctagtctctatcccatag

SEQ ID NO: 95901 - DNA, 25 bp, probe
tgggatagaaatgtttaggagtaag

SEQ ID NO: 95902 - DNA, 25 bp, probe
ctgggatagaaatgtttaggagtaa

SEQ ID NO: 95903 - DNA, 25 bp, probe
cagagagatgacagcacaagagttg

SEQ ID NO: 95904 - DNA, 25 bp, probe
ggatacggtgattgctagttgtgac

SEQ ID NO: 95905 - DNA, 25 bp, probe
gctatttaatccttccatcccacga

SEQ ID NO: 95906 - DNA, 25 bp, probe
cactgctttctctagtctctatccc

SEQ ID NO: 95907 - DNA, 25 bp, probe
ccactgctttctctagtctctatcc

SEQ ID NO: 95908 - DNA, 25 bp, probe
cccactgctttctctagtctctatc

SEQ ID NO: 95909 - DNA, 25 bp, probe
gggatagaaatgtttaggagtaaga

SEQ ID NO: 95910 - DNA, 25 bp, probe
taggagtaagaacaaagctgggata

SEQ ID NO: 95911 - DNA, 25 bp, probe
ttctctagtctctatcccatagcgt

SEQ ID NO: 95912 - DNA, 25 bp, probe
actgctttctctagtctctatccca

SEQ ID NO: 95913 - DNA, 25 bp, probe
tcccactgctttctctagtctctat

SEQ ID NO: 95914 - DNA, 25 bp, probe
ctagtctctatcccatagcgtgttc

SEQ ID NO: 95915 - DNA, 25 bp, probe
ttaggagtaagaacaaagctgggat

SEQ ID NO: 95916 - DNA, 25 bp, probe
tttaggagtaagaacaaagctggga

SEQ ID NO: 95917 - DNA, 25 bp, probe
tctagtctctatcccatagcgtgtt

SEQ ID NO: 95918 - DNA, 25 bp, probe
gtttaggagtaagaacaaagctggg

SEQ ID NO: 95919 - DNA, 25 bp, probe
tctctagtctctatcccatagcgtg

SEQ ID NO: 95920 - DNA, 25 bp, probe
tacggtgattgctagttgtgactga

SEQ ID NO: 95921 - DNA, 25 bp, probe
ccagagagatgacagcacaagagtt

SEQ ID NO: 95922 - DNA, 25 bp, probe
cggtgattgctagttgtgactgaag

SEQ ID NO: 95923 - DNA, 25 bp, probe
aggagtaagaacaaagctgggatac

SEQ ID NO: 95924 - DNA, 25 bp, probe
gcttctgggatagaaatgtttagga

SEQ ID NO: 95925 - DNA, 25 bp, probe
tgcttctgggatagaaatgtttagg

SEQ ID NO: 95926 - DNA, 25 bp, probe
agttgcttctgggatagaaatgttt

SEQ ID NO: 95927 - DNA, 25 bp, probe
gttgcttctgggatagaaatgttta

SEQ ID NO: 95928 - DNA, 25 bp, probe
ctctagtctctatcccatagcgtgt

SEQ ID NO: 95929 - DNA, 25 bp, probe
ttctatgacctcctcaacatattcg

SEQ ID NO: 95930 - DNA, 25 bp, probe
cagttctatgacctcctcaacatat

SEQ ID NO: 95931 - DNA, 25 bp, probe
gagacagagaagattacagtatgtg

SEQ ID NO: 95932 - DNA, 25 bp, probe
agagacagagaagattacagtatgt

SEQ ID NO: 95933 - DNA, 25 bp, probe
aagagacagagaagattacagtatg

SEQ ID NO: 95934 - DNA, 25 bp, probe
agttctatgacctcctcaacatatt

SEQ ID NO: 95935 - DNA, 25 bp, probe
gttctatgacctcctcaacatattc

SEQ ID NO: 95936 - DNA, 25 bp, probe
ccagttctatgacctcctcaacata

SEQ ID NO: 95937 - DNA, 25 bp, probe
tcaaagagacagagaagattacagt

SEQ ID NO: 95938 - DNA, 25 bp, probe
ctatgacctcctcaacatattcgag

SEQ ID NO: 95939 - DNA, 25 bp, probe
tctatgacctcctcaacatattcga

SEQ ID NO: 95940 - DNA, 25 bp, probe
cacactcaaagagacagagaagatt

SEQ ID NO: 95941 - DNA, 25 bp, probe
actcaaagagacagagaagattaca

SEQ ID NO: 95942 - DNA, 25 bp, probe
acactcaaagagacagagaagatta

SEQ ID NO: 95943 - DNA, 25 bp, probe
cactcaaagagacagagaagattac

SEQ ID NO: 95944 - DNA, 25 bp, probe
ctcaaagagacagagaagattacag

SEQ ID NO: 95945 - DNA, 25 bp, probe
caaagagacagagaagattacagta

SEQ ID NO: 95946 - DNA, 25 bp, probe
tatgacctcctcaacatattcgagc

SEQ ID NO: 95947 - DNA, 25 bp, probe
ccacactcaaagagacagagaagat

SEQ ID NO: 95948 - DNA, 25 bp, probe
aaaccacactcaaagagacagagaa

SEQ ID NO: 95949 - DNA, 25 bp, probe
atatttaatggtgactttgtggacc

SEQ ID NO: 95950 - DNA, 25 bp, probe
tatttaatggtgactttgtggaccg

SEQ ID NO: 95951 - DNA, 25 bp, probe
aaccacactcaaagagacagagaag

SEQ ID NO: 95952 - DNA, 25 bp, probe
gaaaccacactcaaagagacagaga

SEQ ID NO: 95953 - DNA, 25 bp, probe
tatatttaatggtgactttgtggac

SEQ ID NO: 95954 - DNA, 25 bp, probe
aaagagacagagaagattacagtat

SEQ ID NO: 95955 - DNA, 25 bp, probe
gccagttctatgacctcctcaacat

SEQ ID NO: 95956 - DNA, 25 bp, probe
atgacctcctcaacatattcgagct

SEQ ID NO: 95957 - DNA, 25 bp, probe
accacactcaaagagacagagaaga

SEQ ID NO: 95958 - DNA, 25 bp, probe
gattctggtacaggtcaaagaggtc

SEQ ID NO: 95959 - DNA, 25 bp, probe
tgtatttattcccctttaggtttgc

SEQ ID NO: 95960 - DNA, 25 bp, probe
ggaaaccacactcaaagagacagag

SEQ ID NO: 95961 - DNA, 25 bp, probe
cagattctggtacaggtcaaagagg

SEQ ID NO: 95962 - DNA, 25 bp, probe
atttaatggtgactttgtggaccga

SEQ ID NO: 95963 - DNA, 25 bp, probe
agattctggtacaggtcaaagaggt

SEQ ID NO: 95964 - DNA, 25 bp, probe
tcggagaccaacccctatatattta

SEQ ID NO: 95965 - DNA, 25 bp, probe
tacccagatcactttcacctccttc

SEQ ID NO: 95966 - DNA, 25 bp, probe
cggagaccaacccctatatatttaa

SEQ ID NO: 95967 - DNA, 25 bp, probe
ctcggagaccaacccctatatattt

SEQ ID NO: 95968 - DNA, 25 bp, probe
gtacccagatcactttcacctcctt

SEQ ID NO: 95969 - DNA, 25 bp, probe
agtttgtatttattcccctttaggt

SEQ ID NO: 95970 - DNA, 25 bp, probe
tttaatggtgactttgtggaccgag

SEQ ID NO: 95971 - DNA, 25 bp, probe
atatatttaatggtgactttgtgga

SEQ ID NO: 95972 - DNA, 25 bp, probe
atttattcccctttaggtttgcaga

SEQ ID NO: 95973 - DNA, 25 bp, probe
atgattatgtacttgaagtgaggca

SEQ ID NO: 95974 - DNA, 25 bp, probe
gatgattatgtacttgaagtgaggc

SEQ ID NO: 95975 - DNA, 25 bp, probe
ggatgattatgtacttgaagtgagg

SEQ ID NO: 95976 - DNA, 25 bp, probe
tcagtctagttctgttatctgttga

SEQ ID NO: 95977 - DNA, 25 bp, probe
atcttagaagctacacaggatgatt

SEQ ID NO: 95978 - DNA, 25 bp, probe
acattgtattgtgttacctaagtca

SEQ ID NO: 95979 - DNA, 25 bp, probe
tgacattgtattgtgttacctaagt

SEQ ID NO: 95980 - DNA, 25 bp, probe
caggatgattatgtacttgaagtga

SEQ ID NO: 95981 - DNA, 25 bp, probe
tgattatgtacttgaagtgaggcac

SEQ ID NO: 95982 - DNA, 25 bp, probe
acaggatgattatgtacttgaagtg

SEQ ID NO: 95983 - DNA, 25 bp, probe
cacaggatgattatgtacttgaagt

SEQ ID NO: 95984 - DNA, 25 bp, probe
acacaggatgattatgtacttgaag

SEQ ID NO: 95985 - DNA, 25 bp, probe
tcttagaagctacacaggatgatta

SEQ ID NO: 95986 - DNA, 25 bp, probe
ttatcttagaagctacacaggatga

SEQ ID NO: 95987 - DNA, 25 bp, probe
agttcattagctggtcttactctac

SEQ ID NO: 95988 - DNA, 25 bp, probe
gtagttcattagctggtcttactct

SEQ ID NO: 95989 - DNA, 25 bp, probe
tctgacattgtattgtgttacctaa

SEQ ID NO: 95990 - DNA, 25 bp, probe
ttctgacattgtattgtgttaccta

SEQ ID NO: 95991 - DNA, 25 bp, probe
aggatgattatgtacttgaagtgag

SEQ ID NO: 95992 - DNA, 25 bp, probe
gcagtatcagtttctctacaaagtg

SEQ ID NO: 95993 - DNA, 25 bp, probe
agcagtatcagtttctctacaaagt

SEQ ID NO: 95994 - DNA, 25 bp, probe
tatcttagaagctacacaggatgat

SEQ ID NO: 95995 - DNA, 25 bp, probe
agttctgttatctgttgatttccca

SEQ ID NO: 95996 - DNA, 25 bp, probe
cgtagttcattagctggtcttactc

SEQ ID NO: 95997 - DNA, 25 bp, probe
cattgtattgtgttacctaagtcat

SEQ ID NO: 95998 - DNA, 25 bp, probe
cagtctagttctgttatctgttgat

SEQ ID NO: 95999 - DNA, 25 bp, probe
atcagtctagttctgttatctgttg

SEQ ID NO: 96000 - DNA, 25 bp, probe
gttctgttatctgttgatttcccat

SEQ ID NO: 96001 - DNA, 25 bp, probe
agtctagttctgttatctgttgatt

SEQ ID NO: 96002 - DNA, 25 bp, probe
ctgacattgtattgtgttacctaag

SEQ ID NO: 96003 - DNA, 25 bp, probe
agatgagcctataaattgtgagagc

SEQ ID NO: 96004 - DNA, 25 bp, probe
ttctgttatctgttgatttcccatc

SEQ ID NO: 96005 - DNA, 25 bp, probe
ttagaagctacacaggatgattatg

SEQ ID NO: 96006 - DNA, 25 bp, probe
atggcagaagatgaatttgtttact

SEQ ID NO: 96007 - DNA, 25 bp, probe
gacattgtattgtgttacctaagtc

SEQ ID NO: 96008 - DNA, 25 bp, probe
tagaagctacacaggatgattatgt

SEQ ID NO: 96009 - DNA, 25 bp, probe
tgagaataacaccttaccaaacatt

SEQ ID NO: 96010 - DNA, 25 bp, probe
gctacacaggatgattatgtacttg

SEQ ID NO: 96011 - DNA, 25 bp, probe
cttagaagctacacaggatgattat

SEQ ID NO: 96012 - DNA, 25 bp, probe
tagttctgttatctgttgatttccc

SEQ ID NO: 96013 - DNA, 25 bp, probe
tgagcagtatcagtttctctacaaa

SEQ ID NO: 96014 - DNA, 25 bp, probe
ttgagcagtatcagtttctctacaa

SEQ ID NO: 96015 - DNA, 25 bp, probe
acgtagttcattagctggtcttact

SEQ ID NO: 96016 - DNA, 25 bp, probe
tagttcattagctggtcttactcta

SEQ ID NO: 96017 - DNA, 25 bp, probe
ctactcctattaaagaacctcgtcc

SEQ ID NO: 96018 - DNA, 25 bp, probe
cctactcctattaaagaacctcgtc

SEQ ID NO: 96019 - DNA, 25 bp, probe
tcctactcctattaaagaacctcgt

SEQ ID NO: 96020 - DNA, 25 bp, probe
ttcctactcctattaaagaacctcg

SEQ ID NO: 96021 - DNA, 25 bp, probe
tactcctattaaagaacctcgtccc

SEQ ID NO: 96022 - DNA, 25 bp, probe
catcatttgctctcctgaatttatg

SEQ ID NO: 96023 - DNA, 25 bp, probe
ctcctattaaagaacctcgtcccag

SEQ ID NO: 96024 - DNA, 25 bp, probe
agtgtcatatatttgttgagggcaa

SEQ ID NO: 96025 - DNA, 25 bp, probe
aagtgtcatatatttgttgagggca

SEQ ID NO: 96026 - DNA, 25 bp, probe
catttgctctcctgaatttatgagg

SEQ ID NO: 96027 - DNA, 25 bp, probe
tgctctcctgaatttatgaggttta

SEQ ID NO: 96028 - DNA, 25 bp, probe
atttgctctcctgaatttatgaggt

SEQ ID NO: 96029 - DNA, 25 bp, probe
ttgctctcctgaatttatgaggttt

SEQ ID NO: 96030 - DNA, 25 bp, probe
tttgctctcctgaatttatgaggtt

SEQ ID NO: 96031 - DNA, 25 bp, probe
taagtgtcatatatttgttgagggc

SEQ ID NO: 96032 - DNA, 25 bp, probe
cctccatctctagataagtgtcata

SEQ ID NO: 96033 - DNA, 25 bp, probe
gctctcctgaatttatgaggtttat

SEQ ID NO: 96034 - DNA, 25 bp, probe
cctattaaagaacctcgtcccagtg

SEQ ID NO: 96035 - DNA, 25 bp, probe
tttcctactcctattaaagaacctc

SEQ ID NO: 96036 - DNA, 25 bp, probe
tcctattaaagaacctcgtcccagt

SEQ ID NO: 96037 - DNA, 25 bp, probe
actcctattaaagaacctcgtccca

SEQ ID NO: 96038 - DNA, 25 bp, probe
tcttctcaagctgacttcctacctc

SEQ ID NO: 96039 - DNA, 25 bp, probe
gtgtcatatatttgttgagggcaaa

SEQ ID NO: 96040 - DNA, 25 bp, probe
tcatttgctctcctgaatttatgag

SEQ ID NO: 96041 - DNA, 25 bp, probe
ccctccatctctagataagtgtcat

SEQ ID NO: 96042 - DNA, 25 bp, probe
gcatcatttgctctcctgaatttat

SEQ ID NO: 96043 - DNA, 25 bp, probe
gtcttctcaagctgacttcctacct

SEQ ID NO: 96044 - DNA, 25 bp, probe
atcatttgctctcctgaatttatga

SEQ ID NO: 96045 - DNA, 25 bp, probe
ctccatctctagataagtgtcatat

SEQ ID NO: 96046 - DNA, 25 bp, probe
ctttcctactcctattaaagaacct

SEQ ID NO: 96047 - DNA, 25 bp, probe
aagactatggactggaaggcagaaa

SEQ ID NO: 96048 - DNA, 25 bp, probe
aaagactatggactggaaggcagaa

SEQ ID NO: 96049 - DNA, 25 bp, probe
cttctcaagctgacttcctacctcc

SEQ ID NO: 96050 - DNA, 25 bp, probe
ataagtgtcatatatttgttgaggg

SEQ ID NO: 96051 - DNA, 25 bp, probe
ctctcctgaatttatgaggtttatt

SEQ ID NO: 96052 - DNA, 25 bp, probe
agactatggactggaaggcagaaag

SEQ ID NO: 96053 - DNA, 25 bp, probe
tctcctgaatttatgaggtttattt

SEQ ID NO: 96054 - DNA, 25 bp, probe
gactatggactggaaggcagaaagt

SEQ ID NO: 96055 - DNA, 25 bp, probe
actatggactggaaggcagaaagtg

SEQ ID NO: 96056 - DNA, 25 bp, probe
tatttgttgagggcaaaagactatg

SEQ ID NO: 96057 - DNA, 25 bp, probe
ttgttgagggcaaaagactatggac

SEQ ID NO: 96058 - DNA, 25 bp, probe
tgtcatatatttgttgagggcaaaa

SEQ ID NO: 96059 - DNA, 25 bp, probe
tccatctctagataagtgtcatata

SEQ ID NO: 96060 - DNA, 25 bp, probe
atatttgttgagggcaaaagactat

SEQ ID NO: 96061 - DNA, 25 bp, probe
aatgtaaggattggcaactgtgtta

SEQ ID NO: 96062 - DNA, 25 bp, probe
ttatctcaataaccaggtcatcagg

SEQ ID NO: 96063 - DNA, 25 bp, probe
gaatgtaaggattggcaactgtgtt

SEQ ID NO: 96064 - DNA, 25 bp, probe
atgtaaggattggcaactgtgttac

SEQ ID NO: 96065 - DNA, 25 bp, probe
aggaatgtaaggattggcaactgtg

SEQ ID NO: 96066 - DNA, 25 bp, probe
gagacaggaatgtaaggattggcaa

SEQ ID NO: 96067 - DNA, 25 bp, probe
tatctcaataaccaggtcatcaggg

SEQ ID NO: 96068 - DNA, 25 bp, probe
tgtgttacctttcaagtttatctca

SEQ ID NO: 96069 - DNA, 25 bp, probe
caagtttatctcaataaccaggtca

SEQ ID NO: 96070 - DNA, 25 bp, probe
ggaatgtaaggattggcaactgtgt

SEQ ID NO: 96071 - DNA, 25 bp, probe
gtccatgctaagtctaacactcctg

SEQ ID NO: 96072 - DNA, 25 bp, probe
gtttatctcaataaccaggtcatca

SEQ ID NO: 96073 - DNA, 25 bp, probe
ctgtgttacctttcaagtttatctc

SEQ ID NO: 96074 - DNA, 25 bp, probe
tcaagtttatctcaataaccaggtc

SEQ ID NO: 96075 - DNA, 25 bp, probe
gacaggaatgtaaggattggcaact

SEQ ID NO: 96076 - DNA, 25 bp, probe
agacaggaatgtaaggattggcaac

SEQ ID NO: 96077 - DNA, 25 bp, probe
actgtgttacctttcaagtttatct

SEQ ID NO: 96078 - DNA, 25 bp, probe
tttatctcaataaccaggtcatcag

SEQ ID NO: 96079 - DNA, 25 bp, probe
agtttatctcaataaccaggtcatc

SEQ ID NO: 96080 - DNA, 25 bp, probe
cagagacaggaatgtaaggattggc

SEQ ID NO: 96081 - DNA, 25 bp, probe
gccagagacaggaatgtaaggattg

SEQ ID NO: 96082 - DNA, 25 bp, probe
ccagagacaggaatgtaaggattgg

SEQ ID NO: 96083 - DNA, 25 bp, probe
ttcaagtttatctcaataaccaggt

SEQ ID NO: 96084 - DNA, 25 bp, probe
attggcaactgtgttacctttcaag

SEQ ID NO: 96085 - DNA, 25 bp, probe
gattggcaactgtgttacctttcaa

SEQ ID NO: 96086 - DNA, 25 bp, probe
gtgttacctttcaagtttatctcaa

SEQ ID NO: 96087 - DNA, 25 bp, probe
gtaaggattggcaactgtgttacct

SEQ ID NO: 96088 - DNA, 25 bp, probe
caggaatgtaaggattggcaactgt

SEQ ID NO: 96089 - DNA, 25 bp, probe
acaggaatgtaaggattggcaactg

SEQ ID NO: 96090 - DNA, 25 bp, probe
aagtttatctcaataaccaggtcat

SEQ ID NO: 96091 - DNA, 25 bp, probe
agagacaggaatgtaaggattggca

SEQ ID NO: 96092 - DNA, 25 bp, probe
gtggtccatgctaagtctaacactc

SEQ ID NO: 96093 - DNA, 25 bp, probe
gagtggtccatgctaagtctaacac

SEQ ID NO: 96094 - DNA, 25 bp, probe
tgtaaggattggcaactgtgttacc

SEQ ID NO: 96095 - DNA, 25 bp, probe
tttcaagtttatctcaataaccagg

SEQ ID NO: 96096 - DNA, 25 bp, probe
cctttcaagtttatctcaataacca

SEQ ID NO: 96097 - DNA, 25 bp, probe
acctttcaagtttatctcaataacc

SEQ ID NO: 96098 - DNA, 25 bp, probe
atctcaataaccaggtcatcaggga

SEQ ID NO: 96099 - DNA, 25 bp, probe
ggtccatgctaagtctaacactcct

SEQ ID NO: 96100 - DNA, 25 bp, probe
tggtccatgctaagtctaacactcc

SEQ ID NO: 96101 - DNA, 25 bp, probe
tgttacctttcaagtttatctcaat

SEQ ID NO: 96102 - DNA, 25 bp, probe
ttggcaactgtgttacctttcaagt

SEQ ID NO: 96103 - DNA, 25 bp, probe
gcaactgtgttacctttcaagttta

SEQ ID NO: 96104 - DNA, 25 bp, probe
tccatgctaagtctaacactcctgg

SEQ ID NO: 96105 - DNA, 25 bp, probe
ctcattctgctggaactgatgtctg

SEQ ID NO: 96106 - DNA, 25 bp, probe
gaggtgtatgagggactggtaattg

SEQ ID NO: 96107 - DNA, 25 bp, probe
attctgctggaactgatgtctggag

SEQ ID NO: 96108 - DNA, 25 bp, probe
ggaggtgtatgagggactggtaatt

SEQ ID NO: 96109 - DNA, 25 bp, probe
cctcattctgctggaactgatgtct

SEQ ID NO: 96110 - DNA, 25 bp, probe
caagtttcgccatcagaacattgtg

SEQ ID NO: 96111 - DNA, 25 bp, probe
aggtgtatgagggactggtaattgg

SEQ ID NO: 96112 - DNA, 25 bp, probe
cattctgctggaactgatgtctgga

SEQ ID NO: 96113 - DNA, 25 bp, probe
ctacctggaggaaaatcacttcatc

SEQ ID NO: 96114 - DNA, 25 bp, probe
actacctggaggaaaatcacttcat

SEQ ID NO: 96115 - DNA, 25 bp, probe
tcattctgctggaactgatgtctgg

SEQ ID NO: 96116 - DNA, 25 bp, probe
ctcccattatgagcatccttcatct

SEQ ID NO: 96117 - DNA, 25 bp, probe
tctcccattatgagcatccttcatc

SEQ ID NO: 96118 - DNA, 25 bp, probe
ctctcccattatgagcatccttcat

SEQ ID NO: 96119 - DNA, 25 bp, probe
cactggattgctctcccattatgag

SEQ ID NO: 96120 - DNA, 25 bp, probe
tcccattatgagcatccttcatctg

SEQ ID NO: 96121 - DNA, 25 bp, probe
aaatcacttcatccacagggatatt

SEQ ID NO: 96122 - DNA, 25 bp, probe
aatcacttcatccacagggatattg

SEQ ID NO: 96123 - DNA, 25 bp, probe
cactacctggaggaaaatcacttca

SEQ ID NO: 96124 - DNA, 25 bp, probe
ctcatcatcagcaagtttcgccatc

SEQ ID NO: 96125 - DNA, 25 bp, probe
ccattatgagcatccttcatctggg

SEQ ID NO: 96126 - DNA, 25 bp, probe
cccattatgagcatccttcatctgg

SEQ ID NO: 96127 - DNA, 25 bp, probe
tacctggaggaaaatcacttcatcc

SEQ ID NO: 96128 - DNA, 25 bp, probe
cagcaagtttcgccatcagaacatt

SEQ ID NO: 96129 - DNA, 25 bp, probe
agcaagtttcgccatcagaacattg

SEQ ID NO: 96130 - DNA, 25 bp, probe
catcatcagcaagtttcgccatcag

SEQ ID NO: 96131 - DNA, 25 bp, probe
atcatcagcaagtttcgccatcaga

SEQ ID NO: 96132 - DNA, 25 bp, probe
gggaggtgtatgagggactggtaat

SEQ ID NO: 96133 - DNA, 25 bp, probe
cattatgagcatccttcatctgggc

SEQ ID NO: 96134 - DNA, 25 bp, probe
atcacttcatccacagggatattgc

SEQ ID NO: 96135 - DNA, 25 bp, probe
atgaagagtttcctgaggcacagtc

SEQ ID NO: 96136 - DNA, 25 bp, probe
ggtgtatgagggactggtaattggc

SEQ ID NO: 96137 - DNA, 25 bp, probe
aagtttcgccatcagaacattgtgc

SEQ ID NO: 96138 - DNA, 25 bp, probe
gcaagtttcgccatcagaacattgt

SEQ ID NO: 96139 - DNA, 25 bp, probe
catcagcaagtttcgccatcagaac

SEQ ID NO: 96140 - DNA, 25 bp, probe
tcatcagcaagtttcgccatcagaa

SEQ ID NO: 96141 - DNA, 25 bp, probe
tcatcatcagcaagtttcgccatca

SEQ ID NO: 96142 - DNA, 25 bp, probe
ccactacctggaggaaaatcacttc

SEQ ID NO: 96143 - DNA, 25 bp, probe
ctatcaagaccctgccagaactctg

SEQ ID NO: 96144 - DNA, 25 bp, probe
attatgagcatccttcatctgggca

SEQ ID NO: 96145 - DNA, 25 bp, probe
gacatgaagagtttcctgaggcaca

SEQ ID NO: 96146 - DNA, 25 bp, probe
aaaatcacttcatccacagggatat

SEQ ID NO: 96147 - DNA, 25 bp, probe
gaggaaaatcacttcatccacaggg

SEQ ID NO: 96148 - DNA, 25 bp, probe
ggaggaaaatcacttcatccacagg

SEQ ID NO: 96149 - DNA, 25 bp, probe
gttggtatctcaggtctgaatcttc

SEQ ID NO: 96150 - DNA, 25 bp, probe
ttggtatctcaggtctgaatcttca

SEQ ID NO: 96151 - DNA, 25 bp, probe
cttatacatcaacatcgagagagct

SEQ ID NO: 96152 - DNA, 25 bp, probe
ttatacatcaacatcgagagagctg

SEQ ID NO: 96153 - DNA, 25 bp, probe
tggtatctcaggtctgaatcttcac

SEQ ID NO: 96154 - DNA, 25 bp, probe
ggttggtatctcaggtctgaatctt

SEQ ID NO: 96155 - DNA, 25 bp, probe
tatacatcaacatcgagagagctga

SEQ ID NO: 96156 - DNA, 25 bp, probe
tatctcaggtctgaatcttcaccat

SEQ ID NO: 96157 - DNA, 25 bp, probe
gtatctcaggtctgaatcttcacca

SEQ ID NO: 96158 - DNA, 25 bp, probe
atacatcaacatcgagagagctgag

SEQ ID NO: 96159 - DNA, 25 bp, probe
tctgaatcttcaccatctttctgat

SEQ ID NO: 96160 - DNA, 25 bp, probe
gtctgaatcttcaccatctttctga

SEQ ID NO: 96161 - DNA, 25 bp, probe
atctcaggtctgaatcttcaccatc

SEQ ID NO: 96162 - DNA, 25 bp, probe
ctcaggtctgaatcttcaccatctt

SEQ ID NO: 96163 - DNA, 25 bp, probe
ggtatctcaggtctgaatcttcacc

SEQ ID NO: 96164 - DNA, 25 bp, probe
agagatgtccttgtaatattccctt

SEQ ID NO: 96165 - DNA, 25 bp, probe
cgaatggaactggagaacatcttgg

SEQ ID NO: 96166 - DNA, 25 bp, probe
aagagatgtccttgtaatattccct

SEQ ID NO: 96167 - DNA, 25 bp, probe
gagatgtccttgtaatattcccttt

SEQ ID NO: 96168 - DNA, 25 bp, probe
aatcttcaccatctttctgattccg

SEQ ID NO: 96169 - DNA, 25 bp, probe
aaagagatgtccttgtaatattccc

SEQ ID NO: 96170 - DNA, 25 bp, probe
tctcaggtctgaatcttcaccatct

SEQ ID NO: 96171 - DNA, 25 bp, probe
ctgaatcttcaccatctttctgatt

SEQ ID NO: 96172 - DNA, 25 bp, probe
ggtctgaatcttcaccatctttctg

SEQ ID NO: 96173 - DNA, 25 bp, probe
aggtctgaatcttcaccatctttct

SEQ ID NO: 96174 - DNA, 25 bp, probe
caggtctgaatcttcaccatctttc

SEQ ID NO: 96175 - DNA, 25 bp, probe
gcgaatggaactggagaacatcttg

SEQ ID NO: 96176 - DNA, 25 bp, probe
acgctaccaaatctcaaaatatcct

SEQ ID NO: 96177 - DNA, 25 bp, probe
cacgctaccaaatctcaaaatatcc

SEQ ID NO: 96178 - DNA, 25 bp, probe
tcaggtctgaatcttcaccatcttt

SEQ ID NO: 96179 - DNA, 25 bp, probe
atcttcaccatctttctgattccgc

SEQ ID NO: 96180 - DNA, 25 bp, probe
gcacgctaccaaatctcaaaatatc

SEQ ID NO: 96181 - DNA, 25 bp, probe
gaatggaactggagaacatcttggg

SEQ ID NO: 96182 - DNA, 25 bp, probe
cgctaccaaatctcaaaatatccta

SEQ ID NO: 96183 - DNA, 25 bp, probe
tgcgaatggaactggagaacatctt

SEQ ID NO: 96184 - DNA, 25 bp, probe
gttagggacatttccaagctgttag

SEQ ID NO: 96185 - DNA, 25 bp, probe
tacatcaacatcgagagagctgagg

SEQ ID NO: 96186 - DNA, 25 bp, probe
caacccttctaaacggtgaccttta

SEQ ID NO: 96187 - DNA, 25 bp, probe
caaatcacccaatcccagttcttcc

SEQ ID NO: 96188 - DNA, 25 bp, probe
ccaaatcacccaatcccagttcttc

SEQ ID NO: 96189 - DNA, 25 bp, probe
tagggacatttccaagctgttagtt

SEQ ID NO: 96190 - DNA, 25 bp, probe
ttagggacatttccaagctgttagt

SEQ ID NO: 96191 - DNA, 25 bp, probe
agcacgctaccaaatctcaaaatat

SEQ ID NO: 96192 - DNA, 25 bp, probe
aaatcacccaatcccagttcttcct

SEQ ID NO: 96193 - DNA, 25 bp, probe
aatggttcagacagaggatcaatat

SEQ ID NO: 96194 - DNA, 25 bp, probe
ggagatgaaggtggctatatcaatg

SEQ ID NO: 96195 - DNA, 25 bp, probe
gaatggttcagacagaggatcaata

SEQ ID NO: 96196 - DNA, 25 bp, probe
tcttggagatgaaggtggctatatc

SEQ ID NO: 96197 - DNA, 25 bp, probe
tggagatgaaggtggctatatcaat

SEQ ID NO: 96198 - DNA, 25 bp, probe
ttgatgatagcaagacattgttaca

SEQ ID NO: 96199 - DNA, 25 bp, probe
ttggagatgaaggtggctatatcaa

SEQ ID NO: 96200 - DNA, 25 bp, probe
atggttcagacagaggatcaatata

SEQ ID NO: 96201 - DNA, 25 bp, probe
tggttcagacagaggatcaatatat

SEQ ID NO: 96202 - DNA, 25 bp, probe
gagatgaaggtggctatatcaatgc

SEQ ID NO: 96203 - DNA, 25 bp, probe
gatagcaagacattgttacaaggac

SEQ ID NO: 96204 - DNA, 25 bp, probe
tgatagcaagacattgttacaagga

SEQ ID NO: 96205 - DNA, 25 bp, probe
atgatagcaagacattgttacaagg

SEQ ID NO: 96206 - DNA, 25 bp, probe
cttggagatgaaggtggctatatca

SEQ ID NO: 96207 - DNA, 25 bp, probe
ctcttggagatgaaggtggctatat

SEQ ID NO: 96208 - DNA, 25 bp, probe
tgatgatagcaagacattgttacaa

SEQ ID NO: 96209 - DNA, 25 bp, probe
tagcaagacattgttacaaggacat

SEQ ID NO: 96210 - DNA, 25 bp, probe
atagcaagacattgttacaaggaca

SEQ ID NO: 96211 - DNA, 25 bp, probe
gttacaaggacatggtgagtctatt

SEQ ID NO: 96212 - DNA, 25 bp, probe
gatgatagcaagacattgttacaag

SEQ ID NO: 96213 - DNA, 25 bp, probe
atcacagagcagcaagttcatacaa

SEQ ID NO: 96214 - DNA, 25 bp, probe
aagatcacagagcagcaagttcata

SEQ ID NO: 96215 - DNA, 25 bp, probe
tgttacaaggacatggtgagtctat

SEQ ID NO: 96216 - DNA, 25 bp, probe
aagacattgttacaaggacatggtg

SEQ ID NO: 96217 - DNA, 25 bp, probe
caagacattgttacaaggacatggt

SEQ ID NO: 96218 - DNA, 25 bp, probe
atttccatttctctccttaacctcc

SEQ ID NO: 96219 - DNA, 25 bp, probe
ttgttacaaggacatggtgagtcta

SEQ ID NO: 96220 - DNA, 25 bp, probe
catttccatttctctccttaacctc

SEQ ID NO: 96221 - DNA, 25 bp, probe
ggaatggttcagacagaggatcaat

SEQ ID NO: 96222 - DNA, 25 bp, probe
tgtctaattgggcaaactaaggaaa

SEQ ID NO: 96223 - DNA, 25 bp, probe
attaaaggcagcatttgatgatagc

SEQ ID NO: 96224 - DNA, 25 bp, probe
gatgattaaaggcagcatttgatga

SEQ ID NO: 96225 - DNA, 25 bp, probe
agcaagacattgttacaaggacatg

SEQ ID NO: 96226 - DNA, 25 bp, probe
atgattaaaggcagcatttgatgat

SEQ ID NO: 96227 - DNA, 25 bp, probe
atacttccctatgatgctacaagag

SEQ ID NO: 96228 - DNA, 25 bp, probe
gcatttccatttctctccttaacct

SEQ ID NO: 96229 - DNA, 25 bp, probe
ttagggatgattaaaggcagcattt

SEQ ID NO: 96230 - DNA, 25 bp, probe
gacattgttacaaggacatggtgag

SEQ ID NO: 96231 - DNA, 25 bp, probe
agcatttgatgatagcaagacattg

SEQ ID NO: 96232 - DNA, 25 bp, probe
cagcatttgatgatagcaagacatt

SEQ ID NO: 96233 - DNA, 25 bp, probe
tgattaaaggcagcatttgatgata

SEQ ID NO: 96234 - DNA, 25 bp, probe
acagagcagcaagttcatacaacat

SEQ ID NO: 96235 - DNA, 25 bp, probe
ggatgattaaaggcagcatttgatg

SEQ ID NO: 96236 - DNA, 25 bp, probe
tttccatttctctccttaacctcca

SEQ ID NO: 96237 - DNA, 25 bp, probe
ttgtaactgcttgccattaacttgc

SEQ ID NO: 96238 - DNA, 25 bp, probe
tttgtaactgcttgccattaacttg

SEQ ID NO: 96239 - DNA, 25 bp, probe
ttgccattaacttgctgctaaattc

SEQ ID NO: 96240 - DNA, 25 bp, probe
cttgccattaacttgctgctaaatt

SEQ ID NO: 96241 - DNA, 25 bp, probe
cttgctgctaaattcccaatgtatt

SEQ ID NO: 96242 - DNA, 25 bp, probe
ttaacttgctgctaaattcccaatg

SEQ ID NO: 96243 - DNA, 25 bp, probe
cattaacttgctgctaaattcccaa

SEQ ID NO: 96244 - DNA, 25 bp, probe
gtaactgcttgccattaacttgctg

SEQ ID NO: 96245 - DNA, 25 bp, probe
attaacttgctgctaaattcccaat

SEQ ID NO: 96246 - DNA, 25 bp, probe
gtgaagaagcaaagtaggagtgaag

SEQ ID NO: 96247 - DNA, 25 bp, probe
acttgctgctaaattcccaatgtat

SEQ ID NO: 96248 - DNA, 25 bp, probe
gctgctaaattcccaatgtattgat

SEQ ID NO: 96249 - DNA, 25 bp, probe
ttgctgctaaattcccaatgtattg

SEQ ID NO: 96250 - DNA, 25 bp, probe
tcaaattcttatgtttaggcacagc

SEQ ID NO: 96251 - DNA, 25 bp, probe
aacttgctgctaaattcccaatgta

SEQ ID NO: 96252 - DNA, 25 bp, probe
taacttgctgctaaattcccaatgt

SEQ ID NO: 96253 - DNA, 25 bp, probe
ccattaacttgctgctaaattccca

SEQ ID NO: 96254 - DNA, 25 bp, probe
tgctgctaaattcccaatgtattga

SEQ ID NO: 96255 - DNA, 25 bp, probe
tgtaactgcttgccattaacttgct

SEQ ID NO: 96256 - DNA, 25 bp, probe
acttcaaattcttatgtttaggcac

SEQ ID NO: 96257 - DNA, 25 bp, probe
cagaagtgcttcagtcattcacatg

SEQ ID NO: 96258 - DNA, 25 bp, probe
tgccattaacttgctgctaaattcc

SEQ ID NO: 96259 - DNA, 25 bp, probe
gaagttatcagtgcccacgactata

SEQ ID NO: 96260 - DNA, 25 bp, probe
ggtgaagaagcaaagtaggagtgaa

SEQ ID NO: 96261 - DNA, 25 bp, probe
ttcaaattcttatgtttaggcacag

SEQ ID NO: 96262 - DNA, 25 bp, probe
cttcaaattcttatgtttaggcaca

SEQ ID NO: 96263 - DNA, 25 bp, probe
ccaaatatagtaatggaggtgccaa

SEQ ID NO: 96264 - DNA, 25 bp, probe
aaattgaagctgcttatctccaaag

SEQ ID NO: 96265 - DNA, 25 bp, probe
catgtgggactcctatctatatggc

SEQ ID NO: 96266 - DNA, 25 bp, probe
ctgctaaattcccaatgtattgatt

SEQ ID NO: 96267 - DNA, 25 bp, probe
caaatatagtaatggaggtgccaaa

SEQ ID NO: 96268 - DNA, 25 bp, probe
gcttgccattaacttgctgctaaat

SEQ ID NO: 96269 - DNA, 25 bp, probe
aaagaaactctaaggttccctccag

SEQ ID NO: 96270 - DNA, 25 bp, probe
tgaagaagcaaagtaggagtgaagc

SEQ ID NO: 96271 - DNA, 25 bp, probe
cactttgcactagaagactttgtta

SEQ ID NO: 96272 - DNA, 25 bp, probe
caaattcttatgtttaggcacagct

SEQ ID NO: 96273 - DNA, 25 bp, probe
tgtttaggcacagctatttataggg

SEQ ID NO: 96274 - DNA, 25 bp, probe
actttgcactagaagactttgttag

SEQ ID NO: 96275 - DNA, 25 bp, probe
aatcaactcaagatgtacacgaagg

SEQ ID NO: 96276 - DNA, 25 bp, probe
gccattaacttgctgctaaattccc

SEQ ID NO: 96277 - DNA, 25 bp, probe
ctttgcactagaagactttgttaga

SEQ ID NO: 96278 - DNA, 25 bp, probe
ttgcactagaagactttgttagaaa

SEQ ID NO: 96279 - DNA, 25 bp, probe
tttgcactagaagactttgttagaa

SEQ ID NO: 96280 - DNA, 25 bp, probe
atagtaatggaggtgccaaataatt

SEQ ID NO: 96281 - DNA, 25 bp, probe
gagcctggaacattcctggattaag

SEQ ID NO: 96282 - DNA, 25 bp, probe
agagcctggaacattcctggattaa

SEQ ID NO: 96283 - DNA, 25 bp, probe
ggaacattcctggattaaggcgatc

SEQ ID NO: 96284 - DNA, 25 bp, probe
caagagaaataaaatactggcttcc

SEQ ID NO: 96285 - DNA, 25 bp, probe
tggaacattcctggattaaggcgat

SEQ ID NO: 96286 - DNA, 25 bp, probe
cagagcctggaacattcctggatta

SEQ ID NO: 96287 - DNA, 25 bp, probe
gaactacgacttcgacgaggagtac

SEQ ID NO: 96288 - DNA, 25 bp, probe
gcagccaagagaaataaaatactgg

SEQ ID NO: 96289 - DNA, 25 bp, probe
agcctggaacattcctggattaagg

SEQ ID NO: 96290 - DNA, 25 bp, probe
aagagaaataaaatactggcttcca

SEQ ID NO: 96291 - DNA, 25 bp, probe
tgaactacgacttcgacgaggagta

SEQ ID NO: 96292 - DNA, 25 bp, probe
ccaagagaaataaaatactggcttc

SEQ ID NO: 96293 - DNA, 25 bp, probe
ctggaacattcctggattaaggcga

SEQ ID NO: 96294 - DNA, 25 bp, probe
gaacattcctggattaaggcgatcc

SEQ ID NO: 96295 - DNA, 25 bp, probe
tgcagccaagagaaataaaatactg

SEQ ID NO: 96296 - DNA, 25 bp, probe
ctacgacttcgacgaggagtacttc

SEQ ID NO: 96297 - DNA, 25 bp, probe
tacgacttcgacgaggagtacttca

SEQ ID NO: 96298 - DNA, 25 bp, probe
actacgacttcgacgaggagtactt

SEQ ID NO: 96299 - DNA, 25 bp, probe
aactacgacttcgacgaggagtact

SEQ ID NO: 96300 - DNA, 25 bp, probe
tcaaagatcccaagcggagaatgac

SEQ ID NO: 96301 - DNA, 25 bp, probe
gtcaaagatcccaagcggagaatga

SEQ ID NO: 96302 - DNA, 25 bp, probe
aacattcctggattaaggcgatccg

SEQ ID NO: 96303 - DNA, 25 bp, probe
gagaaataaaatactggcttccaga

SEQ ID NO: 96304 - DNA, 25 bp, probe
agagaaataaaatactggcttccag

SEQ ID NO: 96305 - DNA, 25 bp, probe
agaaataaaatactggcttccagat

SEQ ID NO: 96306 - DNA, 25 bp, probe
gaaataaaatactggcttccagata

SEQ ID NO: 96307 - DNA, 25 bp, probe
ataaaatactggcttccagataaaa

SEQ ID NO: 96308 - DNA, 25 bp, probe
aataaaatactggcttccagataaa

SEQ ID NO: 96309 - DNA, 25 bp, probe
aaataaaatactggcttccagataa

SEQ ID NO: 96310 - DNA, 25 bp, probe
attcagtaatatctcagcagtcagg

SEQ ID NO: 96311 - DNA, 25 bp, probe
catccagagaatgaatgagttcctt

SEQ ID NO: 96312 - DNA, 25 bp, probe
caggtctcagatggaattacactag

SEQ ID NO: 96313 - DNA, 25 bp, probe
ctgctaagaagtgctgagaagttac

SEQ ID NO: 96314 - DNA, 25 bp, probe
aggtctcagatggaattacactaga

SEQ ID NO: 96315 - DNA, 25 bp, probe
aattcagtaatatctcagcagtcag

SEQ ID NO: 96316 - DNA, 25 bp, probe
gtctcagatggaattacactagagg

SEQ ID NO: 96317 - DNA, 25 bp, probe
ggtctcagatggaattacactagag

SEQ ID NO: 96318 - DNA, 25 bp, probe
ctaagaagtgctgagaagttactcg

SEQ ID NO: 96319 - DNA, 25 bp, probe
gctaagaagtgctgagaagttactc

SEQ ID NO: 96320 - DNA, 25 bp, probe
ttcagtaatatctcagcagtcaggc

SEQ ID NO: 96321 - DNA, 25 bp, probe
ccatccagagaatgaatgagttcct

SEQ ID NO: 96322 - DNA, 25 bp, probe
tgctaagaagtgctgagaagttact

SEQ ID NO: 96323 - DNA, 25 bp, probe
tctcagatggaattacactagaggc

SEQ ID NO: 96324 - DNA, 25 bp, probe
aaggacctagaagacagatggagtt

SEQ ID NO: 96325 - DNA, 25 bp, probe
gctgctaagaagtgctgagaagtta

SEQ ID NO: 96326 - DNA, 25 bp, probe
ggatttatggatacaacagcaaaca

SEQ ID NO: 96327 - DNA, 25 bp, probe
gggatttatggatacaacagcaaac

SEQ ID NO: 96328 - DNA, 25 bp, probe
cagaatgggagtttgaaagagagat

SEQ ID NO: 96329 - DNA, 25 bp, probe
ccaggtctcagatggaattacacta

SEQ ID NO: 96330 - DNA, 25 bp, probe
atccagagaatgaatgagttccttt

SEQ ID NO: 96331 - DNA, 25 bp, probe
gaatgaatgagttcctttaagtgcc

SEQ ID NO: 96332 - DNA, 25 bp, probe
agaatgaatgagttcctttaagtgc

SEQ ID NO: 96333 - DNA, 25 bp, probe
tccagagaatgaatgagttccttta

SEQ ID NO: 96334 - DNA, 25 bp, probe
taagaagtgctgagaagttactcgc

SEQ ID NO: 96335 - DNA, 25 bp, probe
aggacctagaagacagatggagttc

SEQ ID NO: 96336 - DNA, 25 bp, probe
aatgaatgagttcctttaagtgcca

SEQ ID NO: 96337 - DNA, 25 bp, probe
tctccaaggacctagaagacagatg

SEQ ID NO: 96338 - DNA, 25 bp, probe
ccagagaatgaatgagttcctttaa

SEQ ID NO: 96339 - DNA, 25 bp, probe
agaatgggagtttgaaagagagatc

SEQ ID NO: 96340 - DNA, 25 bp, probe
caaggacctagaagacagatggagt

SEQ ID NO: 96341 - DNA, 25 bp, probe
cattacacacatgcacacacatatg

SEQ ID NO: 96342 - DNA, 25 bp, probe
atgaatgagttcctttaagtgccac

SEQ ID NO: 96343 - DNA, 25 bp, probe
ctagttctccaaggacctagaagac

SEQ ID NO: 96344 - DNA, 25 bp, probe
gatttatggatacaacagcaaacat

SEQ ID NO: 96345 - DNA, 25 bp, probe
gggagtttgaaagagagatcatact

SEQ ID NO: 96346 - DNA, 25 bp, probe
tgggagtttgaaagagagatcatac

SEQ ID NO: 96347 - DNA, 25 bp, probe
aatgggagtttgaaagagagatcat

SEQ ID NO: 96348 - DNA, 25 bp, probe
gaatgggagtttgaaagagagatca

SEQ ID NO: 96349 - DNA, 25 bp, probe
aaattcagtaatatctcagcagtca

SEQ ID NO: 96350 - DNA, 25 bp, probe
tttgaaagagagatcatactccagc

SEQ ID NO: 96351 - DNA, 25 bp, probe
gacctagaagacagatggagttctc

SEQ ID NO: 96352 - DNA, 25 bp, probe
atgggagtttgaaagagagatcata

SEQ ID NO: 96353 - DNA, 25 bp, probe
tttatggatacaacagcaaacattt

SEQ ID NO: 96354 - DNA, 25 bp, probe
atataaataaagtgcgtccgtgctg

SEQ ID NO: 96355 - DNA, 25 bp, probe
catataaataaagtgcgtccgtgct

SEQ ID NO: 96356 - DNA, 25 bp, probe
acatataaataaagtgcgtccgtgc

SEQ ID NO: 96357 - DNA, 25 bp, probe
tacacatataaataaagtgcgtccg

SEQ ID NO: 96358 - DNA, 25 bp, probe
cacatataaataaagtgcgtccgtg

SEQ ID NO: 96359 - DNA, 25 bp, probe
acacatataaataaagtgcgtccgt

SEQ ID NO: 96360 - DNA, 25 bp, probe
gtacacatataaataaagtgcgtcc

SEQ ID NO: 96361 - DNA, 25 bp, probe
tataaataaagtgcgtccgtgctgc

SEQ ID NO: 96362 - DNA, 25 bp, probe
tgtacacatataaataaagtgcgtc

SEQ ID NO: 96363 - DNA, 25 bp, probe
atgtacacatataaataaagtgcgt

SEQ ID NO: 96364 - DNA, 25 bp, probe
tatgtacacatataaataaagtgcg

SEQ ID NO: 96365 - DNA, 25 bp, probe
tgcttcatcattaagtcctgtcatc

SEQ ID NO: 96366 - DNA, 25 bp, probe
ctgcttcatcattaagtcctgtcat

SEQ ID NO: 96367 - DNA, 25 bp, probe
gcttcatcattaagtcctgtcatcc

SEQ ID NO: 96368 - DNA, 25 bp, probe
cttctgtggaattacaagtgagaga

SEQ ID NO: 96369 - DNA, 25 bp, probe
ttctgtggaattacaagtgagagac

SEQ ID NO: 96370 - DNA, 25 bp, probe
tctgtggaattacaagtgagagaca

SEQ ID NO: 96371 - DNA, 25 bp, probe
ctgtggaattacaagtgagagacac

SEQ ID NO: 96372 - DNA, 25 bp, probe
cctgcttcatcattaagtcctgtca

SEQ ID NO: 96373 - DNA, 25 bp, probe
ctctgccaacatcctctgattctag

SEQ ID NO: 96374 - DNA, 25 bp, probe
catcattaagtcctgtcatccctac

SEQ ID NO: 96375 - DNA, 25 bp, probe
tcatcattaagtcctgtcatcccta

SEQ ID NO: 96376 - DNA, 25 bp, probe
aatcccagtcaaagaagttatgctt

SEQ ID NO: 96377 - DNA, 25 bp, probe
actctgccaacatcctctgattcta

SEQ ID NO: 96378 - DNA, 25 bp, probe
ctctgattctaggtgtggtgttgac

SEQ ID NO: 96379 - DNA, 25 bp, probe
caatcccagtcaaagaagttatgct

SEQ ID NO: 96380 - DNA, 25 bp, probe
ttcatcattaagtcctgtcatccct

SEQ ID NO: 96381 - DNA, 25 bp, probe
cttcatcattaagtcctgtcatccc

SEQ ID NO: 96382 - DNA, 25 bp, probe
atcattaagtcctgtcatccctacc

SEQ ID NO: 96383 - DNA, 25 bp, probe
ttgagtctgtttagtagtttccatc

SEQ ID NO: 96384 - DNA, 25 bp, probe
gattgagtctgtttagtagtttcca

SEQ ID NO: 96385 - DNA, 25 bp, probe
tgattgagtctgtttagtagtttcc

SEQ ID NO: 96386 - DNA, 25 bp, probe
acactattgaggaaagtcagtctac

SEQ ID NO: 96387 - DNA, 25 bp, probe
gccaagtgattgagtctgtttagta

SEQ ID NO: 96388 - DNA, 25 bp, probe
cactattgaggaaagtcagtctact

SEQ ID NO: 96389 - DNA, 25 bp, probe
ccaagtgattgagtctgtttagtag

SEQ ID NO: 96390 - DNA, 25 bp, probe
tgagtctgtttagtagtttccatca

SEQ ID NO: 96391 - DNA, 25 bp, probe
gattctaggtgtggtgttgactgtc

SEQ ID NO: 96392 - DNA, 25 bp, probe
ctgattctaggtgtggtgttgactg

SEQ ID NO: 96393 - DNA, 25 bp, probe
gagtctgtttagtagtttccatcat

SEQ ID NO: 96394 - DNA, 25 bp, probe
tttgccaagtgattgagtctgttta

SEQ ID NO: 96395 - DNA, 25 bp, probe
actattgaggaaagtcagtctactc

SEQ ID NO: 96396 - DNA, 25 bp, probe
tctgattctaggtgtggtgttgact

SEQ ID NO: 96397 - DNA, 25 bp, probe
caagtgattgagtctgtttagtagt

SEQ ID NO: 96398 - DNA, 25 bp, probe
ttgccaagtgattgagtctgtttag

SEQ ID NO: 96399 - DNA, 25 bp, probe
ccaatcccagtcaaagaagttatgc

SEQ ID NO: 96400 - DNA, 25 bp, probe
gccaatcccagtcaaagaagttatg

SEQ ID NO: 96401 - DNA, 25 bp, probe
agccaatcccagtcaaagaagttat

SEQ ID NO: 96402 - DNA, 25 bp, probe
agtctgtttagtagtttccatcatt

SEQ ID NO: 96403 - DNA, 25 bp, probe
attgagtctgtttagtagtttccat

SEQ ID NO: 96404 - DNA, 25 bp, probe
agtgattgagtctgtttagtagttt

SEQ ID NO: 96405 - DNA, 25 bp, probe
aagtgattgagtctgtttagtagtt

SEQ ID NO: 96406 - DNA, 25 bp, probe
gacactattgaggaaagtcagtcta

SEQ ID NO: 96407 - DNA, 25 bp, probe
caacatcctctgattctaggtgtgg

SEQ ID NO: 96408 - DNA, 25 bp, probe
ccaacatcctctgattctaggtgtg

SEQ ID NO: 96409 - DNA, 25 bp, probe
gactaggttctgtagagccaattag

SEQ ID NO: 96410 - DNA, 25 bp, probe
taggttctgtagagccaattagact

SEQ ID NO: 96411 - DNA, 25 bp, probe
tgactaggttctgtagagccaatta

SEQ ID NO: 96412 - DNA, 25 bp, probe
ttctgtagagccaattagacttgaa

SEQ ID NO: 96413 - DNA, 25 bp, probe
gttctgtagagccaattagacttga

SEQ ID NO: 96414 - DNA, 25 bp, probe
ctaggttctgtagagccaattagac

SEQ ID NO: 96415 - DNA, 25 bp, probe
aatactgcttaattgctgataccat

SEQ ID NO: 96416 - DNA, 25 bp, probe
actaggttctgtagagccaattaga

SEQ ID NO: 96417 - DNA, 25 bp, probe
aggttctgtagagccaattagactt

SEQ ID NO: 96418 - DNA, 25 bp, probe
ggttctgtagagccaattagacttg

SEQ ID NO: 96419 - DNA, 25 bp, probe
atgaattgtcacatctatccacact

SEQ ID NO: 96420 - DNA, 25 bp, probe
ctgactaggttctgtagagccaatt

SEQ ID NO: 96421 - DNA, 25 bp, probe
tactgcttaattgctgataccatat

SEQ ID NO: 96422 - DNA, 25 bp, probe
atactgcttaattgctgataccata

SEQ ID NO: 96423 - DNA, 25 bp, probe
attcagtgttccaagtctctgtgta

SEQ ID NO: 96424 - DNA, 25 bp, probe
cttgactacctactggtgtaatctc

SEQ ID NO: 96425 - DNA, 25 bp, probe
actacctactggtgtaatctcaatg

SEQ ID NO: 96426 - DNA, 25 bp, probe
tgactacctactggtgtaatctcaa

SEQ ID NO: 96427 - DNA, 25 bp, probe
ttgactacctactggtgtaatctca

SEQ ID NO: 96428 - DNA, 25 bp, probe
acttgactacctactggtgtaatct

SEQ ID NO: 96429 - DNA, 25 bp, probe
ctacctactggtgtaatctcaatgc

SEQ ID NO: 96430 - DNA, 25 bp, probe
gactacctactggtgtaatctcaat

SEQ ID NO: 96431 - DNA, 25 bp, probe
ttcagtgttccaagtctctgtgtaa

SEQ ID NO: 96432 - DNA, 25 bp, probe
attatgcaattcagtgttccaagtc

SEQ ID NO: 96433 - DNA, 25 bp, probe
tacttgactacctactggtgtaatc

SEQ ID NO: 96434 - DNA, 25 bp, probe
caattcagtgttccaagtctctgtg

SEQ ID NO: 96435 - DNA, 25 bp, probe
ttatgcaattcagtgttccaagtct

SEQ ID NO: 96436 - DNA, 25 bp, probe
gtacttgactacctactggtgtaat

SEQ ID NO: 96437 - DNA, 25 bp, probe
ctcccacctgaatttgtatatgact

SEQ ID NO: 96438 - DNA, 25 bp, probe
aatgctcccacctgaatttgtatat

SEQ ID NO: 96439 - DNA, 25 bp, probe
taatttgaggttagatgggaggatg

SEQ ID NO: 96440 - DNA, 25 bp, probe
tgataatttgaggttagatgggagg

SEQ ID NO: 96441 - DNA, 25 bp, probe
tcccacctgaatttgtatatgactg

SEQ ID NO: 96442 - DNA, 25 bp, probe
gataatttgaggttagatgggagga

SEQ ID NO: 96443 - DNA, 25 bp, probe
taaagatgctacttcccactgtatg

SEQ ID NO: 96444 - DNA, 25 bp, probe
gtaaagatgctacttcccactgtat

SEQ ID NO: 96445 - DNA, 25 bp, probe
ctgtatcactgccttcgtttatatt

SEQ ID NO: 96446 - DNA, 25 bp, probe
gctgtatcactgccttcgtttatat

SEQ ID NO: 96447 - DNA, 25 bp, probe
ttcatagtaagtgcgaagactgagc

SEQ ID NO: 96448 - DNA, 25 bp, probe
actgataatttgaggttagatggga

SEQ ID NO: 96449 - DNA, 25 bp, probe
caatactgcttaattgctgatacca

SEQ ID NO: 96450 - DNA, 25 bp, probe
tttgaggttagatgggaggatgaat

SEQ ID NO: 96451 - DNA, 25 bp, probe
atttgaggttagatgggaggatgaa

SEQ ID NO: 96452 - DNA, 25 bp, probe
tatgcaattcagtgttccaagtctc

SEQ ID NO: 96453 - DNA, 25 bp, probe
tttatttcatccagtttgttctccg

SEQ ID NO: 96454 - DNA, 25 bp, probe
accttccctccaaattcttcaataa

SEQ ID NO: 96455 - DNA, 25 bp, probe
aaccttccctccaaattcttcaata

SEQ ID NO: 96456 - DNA, 25 bp, probe
ccttccctccaaattcttcaataaa

SEQ ID NO: 96457 - DNA, 25 bp, probe
gaaccttccctccaaattcttcaat

SEQ ID NO: 96458 - DNA, 25 bp, probe
ctcgtgccatgatctgtatttaatg

SEQ ID NO: 96459 - DNA, 25 bp, probe
cctcgtgccatgatctgtatttaat

SEQ ID NO: 96460 - DNA, 25 bp, probe
atttatttcatccagtttgttctcc

SEQ ID NO: 96461 - DNA, 25 bp, probe
cagaggagcaaggtttaaatttgtt

SEQ ID NO: 96462 - DNA, 25 bp, probe
gattcacgtagggaaatgttaagga

SEQ ID NO: 96463 - DNA, 25 bp, probe
gacagaggagcaaggtttaaatttg

SEQ ID NO: 96464 - DNA, 25 bp, probe
attcacgtagggaaatgttaaggac

SEQ ID NO: 96465 - DNA, 25 bp, probe
ggacagaggagcaaggtttaaattt

SEQ ID NO: 96466 - DNA, 25 bp, probe
attgtgtattatgttgttcaaatgc

SEQ ID NO: 96467 - DNA, 25 bp, probe
agaggagcaaggtttaaatttgtta

SEQ ID NO: 96468 - DNA, 25 bp, probe
tcacgtagggaaatgttaaggactt

SEQ ID NO: 96469 - DNA, 25 bp, probe
acgtagggaaatgttaaggacttct

SEQ ID NO: 96470 - DNA, 25 bp, probe
cacgtagggaaatgttaaggacttc

SEQ ID NO: 96471 - DNA, 25 bp, probe
ctcagaacaatccgattcacgtagg

SEQ ID NO: 96472 - DNA, 25 bp, probe
cctcagaacaatccgattcacgtag

SEQ ID NO: 96473 - DNA, 25 bp, probe
ttcacgtagggaaatgttaaggact

SEQ ID NO: 96474 - DNA, 25 bp, probe
acagaggagcaaggtttaaatttgt

SEQ ID NO: 96475 - DNA, 25 bp, probe
tcaccagctatctgtcatctctctg

SEQ ID NO: 96476 - DNA, 25 bp, probe
gtcaccagctatctgtcatctctct

SEQ ID NO: 96477 - DNA, 25 bp, probe
cgattcacgtagggaaatgttaagg

SEQ ID NO: 96478 - DNA, 25 bp, probe
ccgattcacgtagggaaatgttaag

SEQ ID NO: 96479 - DNA, 25 bp, probe
tgcgggttttaatttatttcatcca

SEQ ID NO: 96480 - DNA, 25 bp, probe
tttaatctttgtgacaggaaagccc

SEQ ID NO: 96481 - DNA, 25 bp, probe
tcctgcgggttttaatttatttcat

SEQ ID NO: 96482 - DNA, 25 bp, probe
atcctgcgggttttaatttatttca

SEQ ID NO: 96483 - DNA, 25 bp, probe
gcgggttttaatttatttcatccag

SEQ ID NO: 96484 - DNA, 25 bp, probe
ctgcgggttttaatttatttcatcc

SEQ ID NO: 96485 - DNA, 25 bp, probe
cctgcgggttttaatttatttcatc

SEQ ID NO: 96486 - DNA, 25 bp, probe
ttgtgtattatgttgttcaaatgca

SEQ ID NO: 96487 - DNA, 25 bp, probe
tgtcaccagctatctgtcatctctc

SEQ ID NO: 96488 - DNA, 25 bp, probe
ctgtcaccagctatctgtcatctct

SEQ ID NO: 96489 - DNA, 25 bp, probe
tctgtcaccagctatctgtcatctc

SEQ ID NO: 96490 - DNA, 25 bp, probe
ttgttattgtgtattatgttgttca

SEQ ID NO: 96491 - DNA, 25 bp, probe
gaggagcaaggtttaaatttgttat

SEQ ID NO: 96492 - DNA, 25 bp, probe
actatcctgcgggttttaatttatt

SEQ ID NO: 96493 - DNA, 25 bp, probe
ccagatgcaacctcactatggtatg

SEQ ID NO: 96494 - DNA, 25 bp, probe
gcctcgtgccatgatctgtatttaa

SEQ ID NO: 96495 - DNA, 25 bp, probe
ggagcaaggtttaaatttgttattg

SEQ ID NO: 96496 - DNA, 25 bp, probe
ttatttcatccagtttgttctccgg

SEQ ID NO: 96497 - DNA, 25 bp, probe
gaagcattctgtggtcaagtaagtt

SEQ ID NO: 96498 - DNA, 25 bp, probe
atgaagcattctgtggtcaagtaag

SEQ ID NO: 96499 - DNA, 25 bp, probe
tgttagttacaggacaagttgtgaa

SEQ ID NO: 96500 - DNA, 25 bp, probe
tgaagcattctgtggtcaagtaagt

SEQ ID NO: 96501 - DNA, 25 bp, probe
gcattctgtggtcaagtaagtttag

SEQ ID NO: 96502 - DNA, 25 bp, probe
tggtaaatgacagtgggaaataaca

SEQ ID NO: 96503 - DNA, 25 bp, probe
tttgttggagaagaaagttggagta

SEQ ID NO: 96504 - DNA, 25 bp, probe
attctgtggtcaagtaagtttaggg

SEQ ID NO: 96505 - DNA, 25 bp, probe
cattctgtggtcaagtaagtttagg

SEQ ID NO: 96506 - DNA, 25 bp, probe
agcattctgtggtcaagtaagttta

SEQ ID NO: 96507 - DNA, 25 bp, probe
ttgttggagaagaaagttggagtag

SEQ ID NO: 96508 - DNA, 25 bp, probe
aagcattctgtggtcaagtaagttt

SEQ ID NO: 96509 - DNA, 25 bp, probe
gtattaacattccaatgaactagca

SEQ ID NO: 96510 - DNA, 25 bp, probe
ttctgtggtcaagtaagtttaggga

SEQ ID NO: 96511 - DNA, 25 bp, probe
aatgaagcattctgtggtcaagtaa

SEQ ID NO: 96512 - DNA, 25 bp, probe
tctgtggtcaagtaagtttagggag

SEQ ID NO: 96513 - DNA, 25 bp, probe
ttggagaagaaagttggagtaggag

SEQ ID NO: 96514 - DNA, 25 bp, probe
cactgtttatcaatgtcatttggct

SEQ ID NO: 96515 - DNA, 25 bp, probe
tgtattaacattccaatgaactagc

SEQ ID NO: 96516 - DNA, 25 bp, probe
gttggagaagaaagttggagtagga

SEQ ID NO: 96517 - DNA, 25 bp, probe
gagaagaaagttggagtaggagact

SEQ ID NO: 96518 - DNA, 25 bp, probe
aagaaacaggcttaactttgtgtaa

SEQ ID NO: 96519 - DNA, 25 bp, probe
gctattcatgtttcacttgctttgt

SEQ ID NO: 96520 - DNA, 25 bp, probe
ggagaagaaagttggagtaggagac

SEQ ID NO: 96521 - DNA, 25 bp, probe
actgtttatcaatgtcatttggcta

SEQ ID NO: 96522 - DNA, 25 bp, probe
ctggtaaatgacagtgggaaataac

SEQ ID NO: 96523 - DNA, 25 bp, probe
aacaggcttaactttgtgtaagaac

SEQ ID NO: 96524 - DNA, 25 bp, probe
gaaacaggcttaactttgtgtaaga

SEQ ID NO: 96525 - DNA, 25 bp, probe
agaaacaggcttaactttgtgtaag

SEQ ID NO: 96526 - DNA, 25 bp, probe
tgttggagaagaaagttggagtagg

SEQ ID NO: 96527 - DNA, 25 bp, probe
cctggtaaatgacagtgggaaataa

SEQ ID NO: 96528 - DNA, 25 bp, probe
aaacaggcttaactttgtgtaagaa

SEQ ID NO: 96529 - DNA, 25 bp, probe
acaggcttaactttgtgtaagaaca

SEQ ID NO: 96530 - DNA, 25 bp, probe
acactgtttatcaatgtcatttggc

SEQ ID NO: 96531 - DNA, 25 bp, probe
gtaaatgacagtgggaaataacacc

SEQ ID NO: 96532 - DNA, 25 bp, probe
ggtaaatgacagtgggaaataacac

SEQ ID NO: 96533 - DNA, 25 bp, probe
tggagaagaaagttggagtaggaga

SEQ ID NO: 96534 - DNA, 25 bp, probe
ttagggagctattcatgtttcactt

SEQ ID NO: 96535 - DNA, 25 bp, probe
tttagggagctattcatgtttcact

SEQ ID NO: 96536 - DNA, 25 bp, probe
gtttagggagctattcatgtttcac

SEQ ID NO: 96537 - DNA, 25 bp, probe
agtttagggagctattcatgtttca

SEQ ID NO: 96538 - DNA, 25 bp, probe
ggtcaagtaagtttagggagctatt

SEQ ID NO: 96539 - DNA, 25 bp, probe
agttggagtaggagactttcacaag

SEQ ID NO: 96540 - DNA, 25 bp, probe
gttagttacaggacaagttgtgaaa

SEQ ID NO: 96541 - DNA, 25 bp, probe
atctcgtggatagttcatggtaatt

SEQ ID NO: 96542 - DNA, 25 bp, probe
tacatgagcattagtaactgagcac

SEQ ID NO: 96543 - DNA, 25 bp, probe
gattatctcgtggatagttcatggt

SEQ ID NO: 96544 - DNA, 25 bp, probe
agattatctcgtggatagttcatgg

SEQ ID NO: 96545 - DNA, 25 bp, probe
ttatctcgtggatagttcatggtaa

SEQ ID NO: 96546 - DNA, 25 bp, probe
attagtaactgagcactagaggact

SEQ ID NO: 96547 - DNA, 25 bp, probe
cattagtaactgagcactagaggac

SEQ ID NO: 96548 - DNA, 25 bp, probe
atgagcattagtaactgagcactag

SEQ ID NO: 96549 - DNA, 25 bp, probe
ttagtaactgagcactagaggactt

SEQ ID NO: 96550 - DNA, 25 bp, probe
gagcattagtaactgagcactagag

SEQ ID NO: 96551 - DNA, 25 bp, probe
tatctcgtggatagttcatggtaat

SEQ ID NO: 96552 - DNA, 25 bp, probe
attatctcgtggatagttcatggta

SEQ ID NO: 96553 - DNA, 25 bp, probe
tgagcattagtaactgagcactaga

SEQ ID NO: 96554 - DNA, 25 bp, probe
ttacatgagcattagtaactgagca

SEQ ID NO: 96555 - DNA, 25 bp, probe
aaacagtagcacacaataaattcca

SEQ ID NO: 96556 - DNA, 25 bp, probe
catgagcattagtaactgagcacta

SEQ ID NO: 96557 - DNA, 25 bp, probe
acatgagcattagtaactgagcact

SEQ ID NO: 96558 - DNA, 25 bp, probe
aacagtagcacacaataaattccat

SEQ ID NO: 96559 - DNA, 25 bp, probe
cctatcattcctttcttctttgtca

SEQ ID NO: 96560 - DNA, 25 bp, probe
attgggaatttactgggtgttctaa

SEQ ID NO: 96561 - DNA, 25 bp, probe
gcattagtaactgagcactagagga

SEQ ID NO: 96562 - DNA, 25 bp, probe
agcattagtaactgagcactagagg

SEQ ID NO: 96563 - DNA, 25 bp, probe
tattgggaatttactgggtgttcta

SEQ ID NO: 96564 - DNA, 25 bp, probe
gtattgggaatttactgggtgttct

SEQ ID NO: 96565 - DNA, 25 bp, probe
tcctatcattcctttcttctttgtc

SEQ ID NO: 96566 - DNA, 25 bp, probe
ttgggaatttactgggtgttctaac

SEQ ID NO: 96567 - DNA, 25 bp, probe
atagtggtattgggaatttactggg

SEQ ID NO: 96568 - DNA, 25 bp, probe
taactgagcactagaggactttgaa

SEQ ID NO: 96569 - DNA, 25 bp, probe
ctcgtggatagttcatggtaatttg

SEQ ID NO: 96570 - DNA, 25 bp, probe
tctcgtggatagttcatggtaattt

SEQ ID NO: 96571 - DNA, 25 bp, probe
acagtagcacacaataaattccatg

SEQ ID NO: 96572 - DNA, 25 bp, probe
ttcctatcattcctttcttctttgt

SEQ ID NO: 96573 - DNA, 25 bp, probe
ggtattgggaatttactgggtgttc

SEQ ID NO: 96574 - DNA, 25 bp, probe
tagtggtattgggaatttactgggt

SEQ ID NO: 96575 - DNA, 25 bp, probe
acattgagggatattaggatattgc

SEQ ID NO: 96576 - DNA, 25 bp, probe
gcacattgagggatattaggatatt

SEQ ID NO: 96577 - DNA, 25 bp, probe
aactgagcactagaggactttgaat

SEQ ID NO: 96578 - DNA, 25 bp, probe
gtaactgagcactagaggactttga

SEQ ID NO: 96579 - DNA, 25 bp, probe
cattgagggatattaggatattgct

SEQ ID NO: 96580 - DNA, 25 bp, probe
taaacagtagcacacaataaattcc

SEQ ID NO: 96581 - DNA, 25 bp, probe
tcgtggatagttcatggtaatttga

SEQ ID NO: 96582 - DNA, 25 bp, probe
tggtattgggaatttactgggtgtt

SEQ ID NO: 96583 - DNA, 25 bp, probe
tagaggactttgaatgcctactgta

SEQ ID NO: 96584 - DNA, 25 bp, probe
cgtggatagttcatggtaatttgat

SEQ ID NO: 96585 - DNA, 25 bp, probe
tgacattgacatccagaagaccatc

SEQ ID NO: 96586 - DNA, 25 bp, probe
gtgacattgacatccagaagaccat

SEQ ID NO: 96587 - DNA, 25 bp, probe
cattgacatccagaagaccatccag

SEQ ID NO: 96588 - DNA, 25 bp, probe
gacattgacatccagaagaccatcc

SEQ ID NO: 96589 - DNA, 25 bp, probe
attgacatccagaagaccatccaga

SEQ ID NO: 96590 - DNA, 25 bp, probe
gactgtgacattgacatccagaaga

SEQ ID NO: 96591 - DNA, 25 bp, probe
ttgacatccagaagaccatccagat

SEQ ID NO: 96592 - DNA, 25 bp, probe
actgtgacattgacatccagaagac

SEQ ID NO: 96593 - DNA, 25 bp, probe
cgaatacaaactccgtaccttacag

SEQ ID NO: 96594 - DNA, 25 bp, probe
taaataaagccctgggatcactgaa

SEQ ID NO: 96595 - DNA, 25 bp, probe
acattgacatccagaagaccatcca

SEQ ID NO: 96596 - DNA, 25 bp, probe
aaccgaatacaaactccgtacctta

SEQ ID NO: 96597 - DNA, 25 bp, probe
ctgtgacattgacatccagaagacc

SEQ ID NO: 96598 - DNA, 25 bp, probe
gaatacaaactccgtaccttacagg

SEQ ID NO: 96599 - DNA, 25 bp, probe
gtaaataaagccctgggatcactga

SEQ ID NO: 96600 - DNA, 25 bp, probe
ccgaatacaaactccgtaccttaca

SEQ ID NO: 96601 - DNA, 25 bp, probe
accgaatacaaactccgtaccttac

SEQ ID NO: 96602 - DNA, 25 bp, probe
aaataaagccctgggatcactgaaa

SEQ ID NO: 96603 - DNA, 25 bp, probe
tgtaaataaagccctgggatcactg

SEQ ID NO: 96604 - DNA, 25 bp, probe
ggactgtgacattgacatccagaag

SEQ ID NO: 96605 - DNA, 25 bp, probe
gacacaaccgaatacaaactccgta

SEQ ID NO: 96606 - DNA, 25 bp, probe
catgacacaaccgaatacaaactcc

SEQ ID NO: 96607 - DNA, 25 bp, probe
tgtgacattgacatccagaagacca

SEQ ID NO: 96608 - DNA, 25 bp, probe
caaccgaatacaaactccgtacctt

SEQ ID NO: 96609 - DNA, 25 bp, probe
gcatgacacaaccgaatacaaactc

SEQ ID NO: 96610 - DNA, 25 bp, probe
gagcatgacacaaccgaatacaaac

SEQ ID NO: 96611 - DNA, 25 bp, probe
atgacacaaccgaatacaaactccg

SEQ ID NO: 96612 - DNA, 25 bp, probe
acacaaccgaatacaaactccgtac

SEQ ID NO: 96613 - DNA, 25 bp, probe
agcatgacacaaccgaatacaaact

SEQ ID NO: 96614 - DNA, 25 bp, probe
atcgacatgctcatggagaacatct

SEQ ID NO: 96615 - DNA, 25 bp, probe
catcgacatgctcatggagaacatc

SEQ ID NO: 96616 - DNA, 25 bp, probe
cacaaccgaatacaaactccgtacc

SEQ ID NO: 96617 - DNA, 25 bp, probe
tcatcgacatgctcatggagaacat

SEQ ID NO: 96618 - DNA, 25 bp, probe
acaaccgaatacaaactccgtacct

SEQ ID NO: 96619 - DNA, 25 bp, probe
ggagcatgacacaaccgaatacaaa

SEQ ID NO: 96620 - DNA, 25 bp, probe
aataaagccctgggatcactgaaaa

SEQ ID NO: 96621 - DNA, 25 bp, probe
tgacatccagaagaccatccagatg

SEQ ID NO: 96622 - DNA, 25 bp, probe
tgacacaaccgaatacaaactccgt

SEQ ID NO: 96623 - DNA, 25 bp, probe
caatggagacctgattcgggagatc

SEQ ID NO: 96624 - DNA, 25 bp, probe
catcattgtcatcgacatgctcatg

SEQ ID NO: 96625 - DNA, 25 bp, probe
gtcatcgacatgctcatggagaaca

SEQ ID NO: 96626 - DNA, 25 bp, probe
acaatggagacctgattcgggagat

SEQ ID NO: 96627 - DNA, 25 bp, probe
aatacaaactccgtaccttacaggt

SEQ ID NO: 96628 - DNA, 25 bp, probe
atcattgtcatcgacatgctcatgg

SEQ ID NO: 96629 - DNA, 25 bp, probe
gttacatcgtaggcatcaatcttgg

SEQ ID NO: 96630 - DNA, 25 bp, probe
ggttacatcgtaggcatcaatcttg

SEQ ID NO: 96631 - DNA, 25 bp, probe
ctccatcatcaagacttacgagatc

SEQ ID NO: 96632 - DNA, 25 bp, probe
gctccatcatcaagacttacgagat

SEQ ID NO: 96633 - DNA, 25 bp, probe
ctaagtaggcaggtaggatctgaag

SEQ ID NO: 96634 - DNA, 25 bp, probe
ctaaggaagaagggttacatcgtag

SEQ ID NO: 96635 - DNA, 25 bp, probe
tcaagttcaatgtggctgtcaagat

SEQ ID NO: 96636 - DNA, 25 bp, probe
ttccttactgaccaccaaataaacc

SEQ ID NO: 96637 - DNA, 25 bp, probe
taagtaggcaggtaggatctgaaga

SEQ ID NO: 96638 - DNA, 25 bp, probe
cttactgaccaccaaataaaccaca

SEQ ID NO: 96639 - DNA, 25 bp, probe
gttcaatgtggctgtcaagatcatc

SEQ ID NO: 96640 - DNA, 25 bp, probe
gttccttactgaccaccaaataaac

SEQ ID NO: 96641 - DNA, 25 bp, probe
cgttccttactgaccaccaaataaa

SEQ ID NO: 96642 - DNA, 25 bp, probe
caagttcaatgtggctgtcaagatc

SEQ ID NO: 96643 - DNA, 25 bp, probe
actaagtaggcaggtaggatctgaa

SEQ ID NO: 96644 - DNA, 25 bp, probe
aactaagtaggcaggtaggatctga

SEQ ID NO: 96645 - DNA, 25 bp, probe
taaggaagaagggttacatcgtagg

SEQ ID NO: 96646 - DNA, 25 bp, probe
cgtaaactaagtaggcaggtaggat

SEQ ID NO: 96647 - DNA, 25 bp, probe
taaactaagtaggcaggtaggatct

SEQ ID NO: 96648 - DNA, 25 bp, probe
gtaaactaagtaggcaggtaggatc

SEQ ID NO: 96649 - DNA, 25 bp, probe
agttcaatgtggctgtcaagatcat

SEQ ID NO: 96650 - DNA, 25 bp, probe
ccttactgaccaccaaataaaccac

SEQ ID NO: 96651 - DNA, 25 bp, probe
acctactgactttgtggagagattc

SEQ ID NO: 96652 - DNA, 25 bp, probe
ttacatcgtaggcatcaatcttggc

SEQ ID NO: 96653 - DNA, 25 bp, probe
aagttcaatgtggctgtcaagatca

SEQ ID NO: 96654 - DNA, 25 bp, probe
tccttactgaccaccaaataaacca

SEQ ID NO: 96655 - DNA, 25 bp, probe
aagtaggcaggtaggatctgaagaa

SEQ ID NO: 96656 - DNA, 25 bp, probe
ctcaagttcaatgtggctgtcaaga

SEQ ID NO: 96657 - DNA, 25 bp, probe
ttactgaccaccaaataaaccacag

SEQ ID NO: 96658 - DNA, 25 bp, probe
agtaggcaggtaggatctgaagaag

SEQ ID NO: 96659 - DNA, 25 bp, probe
gttccattagctttcttccacttag

SEQ ID NO: 96660 - DNA, 25 bp, probe
ggatctacatcatcatggagcttgg

SEQ ID NO: 96661 - DNA, 25 bp, probe
tccatcatcaagacttacgagatct

SEQ ID NO: 96662 - DNA, 25 bp, probe
cctaaggaagaagggttacatcgta

SEQ ID NO: 96663 - DNA, 25 bp, probe
gggttacatcgtaggcatcaatctt

SEQ ID NO: 96664 - DNA, 25 bp, probe
aagggttacatcgtaggcatcaatc

SEQ ID NO: 96665 - DNA, 25 bp, probe
gaagggttacatcgtaggcatcaat

SEQ ID NO: 96666 - DNA, 25 bp, probe
cgttccattagctttcttccactta

SEQ ID NO: 96667 - DNA, 25 bp, probe
tactgactttgtggagagattcctt

SEQ ID NO: 96668 - DNA, 25 bp, probe
gattacgttccattagctttcttcc

SEQ ID NO: 96669 - DNA, 25 bp, probe
aaactaagtaggcaggtaggatctg

SEQ ID NO: 96670 - DNA, 25 bp, probe
acttcaacatcaagctgtctgactt

SEQ ID NO: 96671 - DNA, 25 bp, probe
attacgttccattagctttcttcca

SEQ ID NO: 96672 - DNA, 25 bp, probe
tgattacgttccattagctttcttc

SEQ ID NO: 96673 - DNA, 25 bp, probe
cctctgcttgactgtatattatgga

SEQ ID NO: 96674 - DNA, 25 bp, probe
cgctgttaaggttcaagaatcaata

SEQ ID NO: 96675 - DNA, 25 bp, probe
acgctgttaaggttcaagaatcaat

SEQ ID NO: 96676 - DNA, 25 bp, probe
atgttgccattctgttagattgcta

SEQ ID NO: 96677 - DNA, 25 bp, probe
gctgttaaggttcaagaatcaatac

SEQ ID NO: 96678 - DNA, 25 bp, probe
attctctagcaatccacagtacaag

SEQ ID NO: 96679 - DNA, 25 bp, probe
ctgcttgactgtatattatggaact

SEQ ID NO: 96680 - DNA, 25 bp, probe
tctgcttgactgtatattatggaac

SEQ ID NO: 96681 - DNA, 25 bp, probe
tattctctagcaatccacagtacaa

SEQ ID NO: 96682 - DNA, 25 bp, probe
ttattctctagcaatccacagtaca

SEQ ID NO: 96683 - DNA, 25 bp, probe
aacgctgttaaggttcaagaatcaa

SEQ ID NO: 96684 - DNA, 25 bp, probe
ctctgcttgactgtatattatggaa

SEQ ID NO: 96685 - DNA, 25 bp, probe
tagcaatccacagtacaagaacaag

SEQ ID NO: 96686 - DNA, 25 bp, probe
ctagcaatccacagtacaagaacaa

SEQ ID NO: 96687 - DNA, 25 bp, probe
ctctagcaatccacagtacaagaac

SEQ ID NO: 96688 - DNA, 25 bp, probe
tctctagcaatccacagtacaagaa

SEQ ID NO: 96689 - DNA, 25 bp, probe
ttctctagcaatccacagtacaaga

SEQ ID NO: 96690 - DNA, 25 bp, probe
tgttgccattctgttagattgctaa

SEQ ID NO: 96691 - DNA, 25 bp, probe
caatccacagtacaagaacaagcaa

SEQ ID NO: 96692 - DNA, 25 bp, probe
tctagcaatccacagtacaagaaca

SEQ ID NO: 96693 - DNA, 25 bp, probe
tgcttgactgtatattatggaacta

SEQ ID NO: 96694 - DNA, 25 bp, probe
gcttcttgcagttaatctcgttatt

SEQ ID NO: 96695 - DNA, 25 bp, probe
cttgtcataattgttaaggtgttct

SEQ ID NO: 96696 - DNA, 25 bp, probe
attggaccgtttagaatgctatgta

SEQ ID NO: 96697 - DNA, 25 bp, probe
gcctatttctcctttcattgttgtt

SEQ ID NO: 96698 - DNA, 25 bp, probe
ttggaccgtttagaatgctatgtaa

SEQ ID NO: 96699 - DNA, 25 bp, probe
ttgggtctatctttggagtatttgt

SEQ ID NO: 96700 - DNA, 25 bp, probe
ccctctgcttgactgtatattatgg

SEQ ID NO: 96701 - DNA, 25 bp, probe
agcctatttctcctttcattgttgt

SEQ ID NO: 96702 - DNA, 25 bp, probe
aagcctatttctcctttcattgttg

SEQ ID NO: 96703 - DNA, 25 bp, probe
gaagcctatttctcctttcattgtt

SEQ ID NO: 96704 - DNA, 25 bp, probe
tgggtctatctttggagtatttgta

SEQ ID NO: 96705 - DNA, 25 bp, probe
gccctctgcttgactgtatattatg

SEQ ID NO: 96706 - DNA, 25 bp, probe
ctcaggtggtcttatttattggcaa

SEQ ID NO: 96707 - DNA, 25 bp, probe
ctgttaaggttcaagaatcaatact

SEQ ID NO: 96708 - DNA, 25 bp, probe
tttgggtctatctttggagtatttg

SEQ ID NO: 96709 - DNA, 25 bp, probe
attggagtctaatctttcaaggagg

SEQ ID NO: 96710 - DNA, 25 bp, probe
ggtggtcttatttattggcaacaaa

SEQ ID NO: 96711 - DNA, 25 bp, probe
tggaccgtttagaatgctatgtaaa

SEQ ID NO: 96712 - DNA, 25 bp, probe
tcaggtggtcttatttattggcaac

SEQ ID NO: 96713 - DNA, 25 bp, probe
tcaagaatcaatactttcaacccaa

SEQ ID NO: 96714 - DNA, 25 bp, probe
ttcaagaatcaatactttcaaccca

SEQ ID NO: 96715 - DNA, 25 bp, probe
aggtggtcttatttattggcaacaa

SEQ ID NO: 96716 - DNA, 25 bp, probe
caggtggtcttatttattggcaaca

SEQ ID NO: 96717 - DNA, 25 bp, probe
gagacagggcatttgagtttatatc

SEQ ID NO: 96718 - DNA, 25 bp, probe
ggagacagggcatttgagtttatat

SEQ ID NO: 96719 - DNA, 25 bp, probe
cacagtttggtccgttagaattaaa

SEQ ID NO: 96720 - DNA, 25 bp, probe
agacagggcatttgagtttatatct

SEQ ID NO: 96721 - DNA, 25 bp, probe
acagggcatttgagtttatatctct

SEQ ID NO: 96722 - DNA, 25 bp, probe
tggagacagggcatttgagtttata

SEQ ID NO: 96723 - DNA, 25 bp, probe
gacagggcatttgagtttatatctc

SEQ ID NO: 96724 - DNA, 25 bp, probe
cagggcatttgagtttatatctctc

SEQ ID NO: 96725 - DNA, 25 bp, probe
gcacagtttggtccgttagaattaa

SEQ ID NO: 96726 - DNA, 25 bp, probe
aactcttggtttcttcaacaggaga

SEQ ID NO: 96727 - DNA, 25 bp, probe
gtggagacagggcatttgagtttat

SEQ ID NO: 96728 - DNA, 25 bp, probe
cttggtttcttcaacaggagaattt

SEQ ID NO: 96729 - DNA, 25 bp, probe
tcttggtttcttcaacaggagaatt

SEQ ID NO: 96730 - DNA, 25 bp, probe
ggcacagtttggtccgttagaatta

SEQ ID NO: 96731 - DNA, 25 bp, probe
ctcttggtttcttcaacaggagaat

SEQ ID NO: 96732 - DNA, 25 bp, probe
cacaaactcttggtttcttcaacag

SEQ ID NO: 96733 - DNA, 25 bp, probe
aaactcttggtttcttcaacaggag

SEQ ID NO: 96734 - DNA, 25 bp, probe
gcatattttatttaatccccaccct

SEQ ID NO: 96735 - DNA, 25 bp, probe
gtgtttcttttggttccattgtttg

SEQ ID NO: 96736 - DNA, 25 bp, probe
tactgtgtttcttttggttccattg

SEQ ID NO: 96737 - DNA, 25 bp, probe
tgtgtttcttttggttccattgttt

SEQ ID NO: 96738 - DNA, 25 bp, probe
ttttactgtgtttcttttggttcca

SEQ ID NO: 96739 - DNA, 25 bp, probe
acagtttggtccgttagaattaaaa

SEQ ID NO: 96740 - DNA, 25 bp, probe
ttactgtgtttcttttggttccatt

SEQ ID NO: 96741 - DNA, 25 bp, probe
tttactgtgtttcttttggttccat

SEQ ID NO: 96742 - DNA, 25 bp, probe
caaactcttggtttcttcaacagga

SEQ ID NO: 96743 - DNA, 25 bp, probe
tggtccgttagaattaaaagttgaa

SEQ ID NO: 96744 - DNA, 25 bp, probe
ttggtccgttagaattaaaagttga

SEQ ID NO: 96745 - DNA, 25 bp, probe
agtttggtccgttagaattaaaagt

SEQ ID NO: 96746 - DNA, 25 bp, probe
ctgtgtttcttttggttccattgtt

SEQ ID NO: 96747 - DNA, 25 bp, probe
attttactgtgtttcttttggttcc

SEQ ID NO: 96748 - DNA, 25 bp, probe
acaaactcttggtttcttcaacagg

SEQ ID NO: 96749 - DNA, 25 bp, probe
cagtttggtccgttagaattaaaag

SEQ ID NO: 96750 - DNA, 25 bp, probe
actcttggtttcttcaacaggagaa

SEQ ID NO: 96751 - DNA, 25 bp, probe
tttggtccgttagaattaaaagttg

SEQ ID NO: 96752 - DNA, 25 bp, probe
gtttggtccgttagaattaaaagtt

SEQ ID NO: 96753 - DNA, 25 bp, probe
actgtgtttcttttggttccattgt

SEQ ID NO: 96754 - DNA, 25 bp, probe
ggtccgttagaattaaaagttgaat

SEQ ID NO: 96755 - DNA, 25 bp, probe
catattttatttaatccccaccctg

SEQ ID NO: 96756 - DNA, 25 bp, probe
gcacaaactcttggtttcttcaaca

SEQ ID NO: 96757 - DNA, 25 bp, probe
ctcacccacccacaatcctattctc

SEQ ID NO: 96758 - DNA, 25 bp, probe
agggcatttgagtttatatctctca

SEQ ID NO: 96759 - DNA, 25 bp, probe
tgtttcttttggttccattgtttgg

SEQ ID NO: 96760 - DNA, 25 bp, probe
tgcatattttatttaatccccaccc

SEQ ID NO: 96761 - DNA, 25 bp, probe
tgagagagaggaatatgagatgcta

SEQ ID NO: 96762 - DNA, 25 bp, probe
atgagagagaggaatatgagatgct

SEQ ID NO: 96763 - DNA, 25 bp, probe
gagagaggaatatgagatgctaact

SEQ ID NO: 96764 - DNA, 25 bp, probe
agagagaggaatatgagatgctaac

SEQ ID NO: 96765 - DNA, 25 bp, probe
gagagagaggaatatgagatgctaa

SEQ ID NO: 96766 - DNA, 25 bp, probe
tcacttgctatccattaagaagaca

SEQ ID NO: 96767 - DNA, 25 bp, probe
cacttgctatccattaagaagacat

SEQ ID NO: 96768 - DNA, 25 bp, probe
atcacttgctatccattaagaagac

SEQ ID NO: 96769 - DNA, 25 bp, probe
tgctatccattaagaagacattgaa

SEQ ID NO: 96770 - DNA, 25 bp, probe
ttgctatccattaagaagacattga

SEQ ID NO: 96771 - DNA, 25 bp, probe
agagaggaatatgagatgctaacta

SEQ ID NO: 96772 - DNA, 25 bp, probe
catgagagagaggaatatgagatgc

SEQ ID NO: 96773 - DNA, 25 bp, probe
acttgctatccattaagaagacatt

SEQ ID NO: 96774 - DNA, 25 bp, probe
cttgctatccattaagaagacattg

SEQ ID NO: 96775 - DNA, 25 bp, probe
gatcacttgctatccattaagaaga

SEQ ID NO: 96776 - DNA, 25 bp, probe
gagaggaatatgagatgctaactag

SEQ ID NO: 96777 - DNA, 25 bp, probe
attattgttgttgttgcagaggttc

SEQ ID NO: 96778 - DNA, 25 bp, probe
gaactctggtggtctccttacaatg

SEQ ID NO: 96779 - DNA, 25 bp, probe
ctaagtacaaggacagtattgagtt

SEQ ID NO: 96780 - DNA, 25 bp, probe
tattattgttgttgttgcagaggtt

SEQ ID NO: 96781 - DNA, 25 bp, probe
ttattattgttgttgttgcagaggt

SEQ ID NO: 96782 - DNA, 25 bp, probe
actttggtttggttaatacacagaa

SEQ ID NO: 96783 - DNA, 25 bp, probe
tacatgaactctggtggtctcctta

SEQ ID NO: 96784 - DNA, 25 bp, probe
agagtaatttggaagagtcagatga

SEQ ID NO: 96785 - DNA, 25 bp, probe
tgaactctggtggtctccttacaat

SEQ ID NO: 96786 - DNA, 25 bp, probe
atgaactctggtggtctccttacaa

SEQ ID NO: 96787 - DNA, 25 bp, probe
ggtgaagccaactttgattgttaaa

SEQ ID NO: 96788 - DNA, 25 bp, probe
attattattgttgttgttgcagagg

SEQ ID NO: 96789 - DNA, 25 bp, probe
aactttggtttggttaatacacaga

SEQ ID NO: 96790 - DNA, 25 bp, probe
tattgttgttgttgcagaggttctt

SEQ ID NO: 96791 - DNA, 25 bp, probe
ttattgttgttgttgcagaggttct

SEQ ID NO: 96792 - DNA, 25 bp, probe
tctactcagatggaaattggttgaa

SEQ ID NO: 96793 - DNA, 25 bp, probe
ctctactcagatggaaattggttga

SEQ ID NO: 96794 - DNA, 25 bp, probe
gtgaagccaactttgattgttaaat

SEQ ID NO: 96795 - DNA, 25 bp, probe
aagagtaatttggaagagtcagatg

SEQ ID NO: 96796 - DNA, 25 bp, probe
ctactcagatggaaattggttgaaa

SEQ ID NO: 96797 - DNA, 25 bp, probe
gagtaatttggaagagtcagatgat

SEQ ID NO: 96798 - DNA, 25 bp, probe
ctttggtttggttaatacacagaaa

SEQ ID NO: 96799 - DNA, 25 bp, probe
atacatgaactctggtggtctcctt

SEQ ID NO: 96800 - DNA, 25 bp, probe
aatacatgaactctggtggtctcct

SEQ ID NO: 96801 - DNA, 25 bp, probe
gctctactcagatggaaattggttg

SEQ ID NO: 96802 - DNA, 25 bp, probe
tgaagccaactttgattgttaaatt

SEQ ID NO: 96803 - DNA, 25 bp, probe
agtaatttggaagagtcagatgatc

SEQ ID NO: 96804 - DNA, 25 bp, probe
aaagagtaatttggaagagtcagat

SEQ ID NO: 96805 - DNA, 25 bp, probe
tagatatgactactgacctacctcg

SEQ ID NO: 96806 - DNA, 25 bp, probe
agatatgactactgacctacctcgc

SEQ ID NO: 96807 - DNA, 25 bp, probe
gatatgactactgacctacctcgca

SEQ ID NO: 96808 - DNA, 25 bp, probe
aggtctcaattctgaatagccagtg

SEQ ID NO: 96809 - DNA, 25 bp, probe
caggtctcaattctgaatagccagt

SEQ ID NO: 96810 - DNA, 25 bp, probe
tgtagatatgactactgacctacct

SEQ ID NO: 96811 - DNA, 25 bp, probe
ctgtagatatgactactgacctacc

SEQ ID NO: 96812 - DNA, 25 bp, probe
gtagatatgactactgacctacctc

SEQ ID NO: 96813 - DNA, 25 bp, probe
ctgaaccaggatctgcctattactg

SEQ ID NO: 96814 - DNA, 25 bp, probe
aagcaggtctcaattctgaatagcc

SEQ ID NO: 96815 - DNA, 25 bp, probe
atatgactactgacctacctcgcag

SEQ ID NO: 96816 - DNA, 25 bp, probe
actgtagatatgactactgacctac

SEQ ID NO: 96817 - DNA, 25 bp, probe
tactgggacttggcatttaggattc

SEQ ID NO: 96818 - DNA, 25 bp, probe
ggtctcaattctgaatagccagtgg

SEQ ID NO: 96819 - DNA, 25 bp, probe
gaggcataagctgatgtttgtaaag

SEQ ID NO: 96820 - DNA, 25 bp, probe
aactgtagatatgactactgaccta

SEQ ID NO: 96821 - DNA, 25 bp, probe
tgtaaataaacgtgctctctgaatg

SEQ ID NO: 96822 - DNA, 25 bp, probe
ctttgtaaataaacgtgctctctga

SEQ ID NO: 96823 - DNA, 25 bp, probe
gtaaataaacgtgctctctgaatgc

SEQ ID NO: 96824 - DNA, 25 bp, probe
tttgtaaataaacgtgctctctgaa

SEQ ID NO: 96825 - DNA, 25 bp, probe
gcaggtctcaattctgaatagccag

SEQ ID NO: 96826 - DNA, 25 bp, probe
ttgtaaataaacgtgctctctgaat

SEQ ID NO: 96827 - DNA, 25 bp, probe
gctttgtaaataaacgtgctctctg

SEQ ID NO: 96828 - DNA, 25 bp, probe
gtactgggacttggcatttaggatt

SEQ ID NO: 96829 - DNA, 25 bp, probe
ggaggcataagctgatgtttgtaaa

SEQ ID NO: 96830 - DNA, 25 bp, probe
gacttggcatttaggattccatctg

SEQ ID NO: 96831 - DNA, 25 bp, probe
taaataaacgtgctctctgaatgcc

SEQ ID NO: 96832 - DNA, 25 bp, probe
agcaggtctcaattctgaatagcca

SEQ ID NO: 96833 - DNA, 25 bp, probe
cccatctgtaaactgtagatatgac

SEQ ID NO: 96834 - DNA, 25 bp, probe
tcaatttccccatctgtaaactgta

SEQ ID NO: 96835 - DNA, 25 bp, probe
caatttccccatctgtaaactgtag

SEQ ID NO: 96836 - DNA, 25 bp, probe
cgctttgtaaataaacgtgctctct

SEQ ID NO: 96837 - DNA, 25 bp, probe
ctcaatttccccatctgtaaactgt

SEQ ID NO: 96838 - DNA, 25 bp, probe
aaactgtagatatgactactgacct

SEQ ID NO: 96839 - DNA, 25 bp, probe
aatttccccatctgtaaactgtaga

SEQ ID NO: 96840 - DNA, 25 bp, probe
gatgtactgggacttggcatttagg

SEQ ID NO: 96841 - DNA, 25 bp, probe
ggatgtactgggacttggcatttag

SEQ ID NO: 96842 - DNA, 25 bp, probe
gaaccaggatctgcctattactgct

SEQ ID NO: 96843 - DNA, 25 bp, probe
ggacttggcatttaggattccatct

SEQ ID NO: 96844 - DNA, 25 bp, probe
tgtactgggacttggcatttaggat

SEQ ID NO: 96845 - DNA, 25 bp, probe
ccatctgtaaactgtagatatgact

SEQ ID NO: 96846 - DNA, 25 bp, probe
cctcaatttccccatctgtaaactg

SEQ ID NO: 96847 - DNA, 25 bp, probe
gtctcaattctgaatagccagtggg

SEQ ID NO: 96848 - DNA, 25 bp, probe
gagatattttgctcactatccctcc

SEQ ID NO: 96849 - DNA, 25 bp, probe
gaaactgtgaattggagaaatggag

SEQ ID NO: 96850 - DNA, 25 bp, probe
gagaaactgtgaattggagaaatgg

SEQ ID NO: 96851 - DNA, 25 bp, probe
ggagaaactgtgaattggagaaatg

SEQ ID NO: 96852 - DNA, 25 bp, probe
agaaactgtgaattggagaaatgga

SEQ ID NO: 96853 - DNA, 25 bp, probe
tggagaaactgtgaattggagaaat

SEQ ID NO: 96854 - DNA, 25 bp, probe
atgctgtgctctacttcattgagta

SEQ ID NO: 96855 - DNA, 25 bp, probe
tgctgtgctctacttcattgagtaa

SEQ ID NO: 96856 - DNA, 25 bp, probe
aaactgtgaattggagaaatggagc

SEQ ID NO: 96857 - DNA, 25 bp, probe
catgctgtgctctacttcattgagt

SEQ ID NO: 96858 - DNA, 25 bp, probe
gctgtgctctacttcattgagtaaa

SEQ ID NO: 96859 - DNA, 25 bp, probe
attgtcctgtaagggtgttgaagat

SEQ ID NO: 96860 - DNA, 25 bp, probe
ccatgctgtgctctacttcattgag

SEQ ID NO: 96861 - DNA, 25 bp, probe
atgttattttgttgggttttgttcc

SEQ ID NO: 96862 - DNA, 25 bp, probe
ttgtcctgtaagggtgttgaagatg

SEQ ID NO: 96863 - DNA, 25 bp, probe
cattgtcctgtaagggtgttgaaga

SEQ ID NO: 96864 - DNA, 25 bp, probe
tcattgtcctgtaagggtgttgaag

SEQ ID NO: 96865 - DNA, 25 bp, probe
cttcattgtcctgtaagggtgttga

SEQ ID NO: 96866 - DNA, 25 bp, probe
aactgtgaattggagaaatggagct

SEQ ID NO: 96867 - DNA, 25 bp, probe
tttgtagatgctgtggctttgtgtt

SEQ ID NO: 96868 - DNA, 25 bp, probe
agatgttattttgttgggttttgtt

SEQ ID NO: 96869 - DNA, 25 bp, probe
aagatgttattttgttgggttttgt

SEQ ID NO: 96870 - DNA, 25 bp, probe
gatgttattttgttgggttttgttc

SEQ ID NO: 96871 - DNA, 25 bp, probe
cctaagaagatgttattttgttggg

SEQ ID NO: 96872 - DNA, 25 bp, probe
ccctaagaagatgttattttgttgg

SEQ ID NO: 96873 - DNA, 25 bp, probe
ctttgtagatgctgtggctttgtgt

SEQ ID NO: 96874 - DNA, 25 bp, probe
actttgtagatgctgtggctttgtg

SEQ ID NO: 96875 - DNA, 25 bp, probe
gaagatgttattttgttgggttttg

SEQ ID NO: 96876 - DNA, 25 bp, probe
agaagatgttattttgttgggtttt

SEQ ID NO: 96877 - DNA, 25 bp, probe
aagaagatgttattttgttgggttt

SEQ ID NO: 96878 - DNA, 25 bp, probe
ccaggttttccctaagaagatgtta

SEQ ID NO: 96879 - DNA, 25 bp, probe
ttgtagatgctgtggctttgtgttg

SEQ ID NO: 96880 - DNA, 25 bp, probe
ctaagaagatgttattttgttgggt

SEQ ID NO: 96881 - DNA, 25 bp, probe
attgagtaaaatcgagtgagaggtt

SEQ ID NO: 96882 - DNA, 25 bp, probe
ttgagtaaaatcgagtgagaggttc

SEQ ID NO: 96883 - DNA, 25 bp, probe
cattgagtaaaatcgagtgagaggt

SEQ ID NO: 96884 - DNA, 25 bp, probe
ttcattgtcctgtaagggtgttgaa

SEQ ID NO: 96885 - DNA, 25 bp, probe
caggttttccctaagaagatgttat

SEQ ID NO: 96886 - DNA, 25 bp, probe
tccctaagaagatgttattttgttg

SEQ ID NO: 96887 - DNA, 25 bp, probe
tgctctacttcattgagtaaaatcg

SEQ ID NO: 96888 - DNA, 25 bp, probe
ctgtgctctacttcattgagtaaaa

SEQ ID NO: 96889 - DNA, 25 bp, probe
tcattgagtaaaatcgagtgagagg

SEQ ID NO: 96890 - DNA, 25 bp, probe
taagaagatgttattttgttgggtt

SEQ ID NO: 96891 - DNA, 25 bp, probe
ggttttccctaagaagatgttattt

SEQ ID NO: 96892 - DNA, 25 bp, probe
acttcattgagtaaaatcgagtgag

SEQ ID NO: 96893 - DNA, 25 bp, probe
tgtgatacgcctaagtcctatgata

SEQ ID NO: 96894 - DNA, 25 bp, probe
gtgatacgcctaagtcctatgataa

SEQ ID NO: 96895 - DNA, 25 bp, probe
acgcctaagtcctatgataatgtta

SEQ ID NO: 96896 - DNA, 25 bp, probe
tacgcctaagtcctatgataatgtt

SEQ ID NO: 96897 - DNA, 25 bp, probe
atacgcctaagtcctatgataatgt

SEQ ID NO: 96898 - DNA, 25 bp, probe
ttgtgatacgcctaagtcctatgat

SEQ ID NO: 96899 - DNA, 25 bp, probe
acagatgaagaatgaagcctagtag

SEQ ID NO: 96900 - DNA, 25 bp, probe
cacagatgaagaatgaagcctagta

SEQ ID NO: 96901 - DNA, 25 bp, probe
tgatacgcctaagtcctatgataat

SEQ ID NO: 96902 - DNA, 25 bp, probe
cagatgaagaatgaagcctagtaga

SEQ ID NO: 96903 - DNA, 25 bp, probe
gatacgcctaagtcctatgataatg

SEQ ID NO: 96904 - DNA, 25 bp, probe
agatgaagaatgaagcctagtagaa

SEQ ID NO: 96905 - DNA, 25 bp, probe
gaagcctagtagaatatggacttgg

SEQ ID NO: 96906 - DNA, 25 bp, probe
tgaagcctagtagaatatggacttg

SEQ ID NO: 96907 - DNA, 25 bp, probe
gaatgaagcctagtagaatatggac

SEQ ID NO: 96908 - DNA, 25 bp, probe
agcctagtagaatatggacttggaa

SEQ ID NO: 96909 - DNA, 25 bp, probe
aagcctagtagaatatggacttgga

SEQ ID NO: 96910 - DNA, 25 bp, probe
agaatgaagcctagtagaatatgga

SEQ ID NO: 96911 - DNA, 25 bp, probe
cgcctaagtcctatgataatgttat

SEQ ID NO: 96912 - DNA, 25 bp, probe
atgaagcctagtagaatatggactt

SEQ ID NO: 96913 - DNA, 25 bp, probe
aatgaagcctagtagaatatggact

SEQ ID NO: 96914 - DNA, 25 bp, probe
gatgaagaatgaagcctagtagaat

SEQ ID NO: 96915 - DNA, 25 bp, probe
aagaatgaagcctagtagaatatgg

SEQ ID NO: 96916 - DNA, 25 bp, probe
atgttaagtgccattactactgtac

SEQ ID NO: 96917 - DNA, 25 bp, probe
caacctaatgaccataagactatca

SEQ ID NO: 96918 - DNA, 25 bp, probe
catgttaagtgccattactactgta

SEQ ID NO: 96919 - DNA, 25 bp, probe
cctatgataatgttatgcacgttgg

SEQ ID NO: 96920 - DNA, 25 bp, probe
agtcctatgataatgttatgcacgt

SEQ ID NO: 96921 - DNA, 25 bp, probe
acctaatgaccataagactatcaag

SEQ ID NO: 96922 - DNA, 25 bp, probe
tcaacctaatgaccataagactatc

SEQ ID NO: 96923 - DNA, 25 bp, probe
ctatgataatgttatgcacgttggc

SEQ ID NO: 96924 - DNA, 25 bp, probe
tcctatgataatgttatgcacgttg

SEQ ID NO: 96925 - DNA, 25 bp, probe
gtcctatgataatgttatgcacgtt

SEQ ID NO: 96926 - DNA, 25 bp, probe
accataagactatcaaggaaactgc

SEQ ID NO: 96927 - DNA, 25 bp, probe
cctaatgaccataagactatcaagg

SEQ ID NO: 96928 - DNA, 25 bp, probe
tatgataatgttatgcacgttggct

SEQ ID NO: 96929 - DNA, 25 bp, probe
aagtcctatgataatgttatgcacg

SEQ ID NO: 96930 - DNA, 25 bp, probe
gaccataagactatcaaggaaactg

SEQ ID NO: 96931 - DNA, 25 bp, probe
ctaatgaccataagactatcaagga

SEQ ID NO: 96932 - DNA, 25 bp, probe
gcacagatgaagaatgaagcctagt

SEQ ID NO: 96933 - DNA, 25 bp, probe
cttcaaatggcaaagaggaaacaaa

SEQ ID NO: 96934 - DNA, 25 bp, probe
tttgtgatacgcctaagtcctatga

SEQ ID NO: 96935 - DNA, 25 bp, probe
gtttgtgatacgcctaagtcctatg

SEQ ID NO: 96936 - DNA, 25 bp, probe
cctaagtcctatgataatgttatgc

SEQ ID NO: 96937 - DNA, 25 bp, probe
atcatttggtttcctcttggctttg

SEQ ID NO: 96938 - DNA, 25 bp, probe
catcatttggtttcctcttggcttt

SEQ ID NO: 96939 - DNA, 25 bp, probe
cattcaaggactcctctctttcttc

SEQ ID NO: 96940 - DNA, 25 bp, probe
attcaaggactcctctctttcttca

SEQ ID NO: 96941 - DNA, 25 bp, probe
cttggctttggggatacttctaaat

SEQ ID NO: 96942 - DNA, 25 bp, probe
ttggctttggggatacttctaaatt

SEQ ID NO: 96943 - DNA, 25 bp, probe
ttcaaggactcctctctttcttcac

SEQ ID NO: 96944 - DNA, 25 bp, probe
ccattcaaggactcctctctttctt

SEQ ID NO: 96945 - DNA, 25 bp, probe
ctcctccatcatttggtttcctctt

SEQ ID NO: 96946 - DNA, 25 bp, probe
tcttggctttggggatacttctaaa

SEQ ID NO: 96947 - DNA, 25 bp, probe
tcctccatcatttggtttcctcttg

SEQ ID NO: 96948 - DNA, 25 bp, probe
tcatttggtttcctcttggctttgg

SEQ ID NO: 96949 - DNA, 25 bp, probe
ctcttggctttggggatacttctaa

SEQ ID NO: 96950 - DNA, 25 bp, probe
ctctctggaatttgtgcctgatgtg

SEQ ID NO: 96951 - DNA, 25 bp, probe
gtctcctccatcatttggtttcctc

SEQ ID NO: 96952 - DNA, 25 bp, probe
tctcctccatcatttggtttcctct

SEQ ID NO: 96953 - DNA, 25 bp, probe
aaggactcctctctttcttcaccaa

SEQ ID NO: 96954 - DNA, 25 bp, probe
aacctctctggaatttgtgcctgat

SEQ ID NO: 96955 - DNA, 25 bp, probe
ctgtctcctccatcatttggtttcc

SEQ ID NO: 96956 - DNA, 25 bp, probe
cctgtctcctccatcatttggtttc

SEQ ID NO: 96957 - DNA, 25 bp, probe
tggggatacttctaaattttgggag

SEQ ID NO: 96958 - DNA, 25 bp, probe
ttggggatacttctaaattttggga

SEQ ID NO: 96959 - DNA, 25 bp, probe
gggatacttctaaattttgggagct

SEQ ID NO: 96960 - DNA, 25 bp, probe
tggctttggggatacttctaaattt

SEQ ID NO: 96961 - DNA, 25 bp, probe
ggctttggggatacttctaaatttt

SEQ ID NO: 96962 - DNA, 25 bp, probe
tttggggatacttctaaattttggg

SEQ ID NO: 96963 - DNA, 25 bp, probe
cctccatcatttggtttcctcttgg

SEQ ID NO: 96964 - DNA, 25 bp, probe
gctttggggatacttctaaattttg

SEQ ID NO: 96965 - DNA, 25 bp, probe
tgtctcctccatcatttggtttcct

SEQ ID NO: 96966 - DNA, 25 bp, probe
aggactcctctctttcttcaccaag

SEQ ID NO: 96967 - DNA, 25 bp, probe
tcaaggactcctctctttcttcacc

SEQ ID NO: 96968 - DNA, 25 bp, probe
ggggatacttctaaattttgggagc

SEQ ID NO: 96969 - DNA, 25 bp, probe
ccatcatttggtttcctcttggctt

SEQ ID NO: 96970 - DNA, 25 bp, probe
caaggactcctctctttcttcacca

SEQ ID NO: 96971 - DNA, 25 bp, probe
ggactcctctctttcttcaccaaga

SEQ ID NO: 96972 - DNA, 25 bp, probe
ctttggggatacttctaaattttgg

SEQ ID NO: 96973 - DNA, 25 bp, probe
gaacctctctggaatttgtgcctga

SEQ ID NO: 96974 - DNA, 25 bp, probe
catttggtttcctcttggctttggg

SEQ ID NO: 96975 - DNA, 25 bp, probe
cctctctggaatttgtgcctgatgt

SEQ ID NO: 96976 - DNA, 25 bp, probe
acctctctggaatttgtgcctgatg

SEQ ID NO: 96977 - DNA, 25 bp, probe
agaacctctctggaatttgtgcctg

SEQ ID NO: 96978 - DNA, 25 bp, probe
ctccatcatttggtttcctcttggc

SEQ ID NO: 96979 - DNA, 25 bp, probe
cctcttggctttggggatacttcta

SEQ ID NO: 96980 - DNA, 25 bp, probe
actcagaacctctctggaatttgtg

SEQ ID NO: 96981 - DNA, 25 bp, probe
tggaaacttgaggtcacttactaaa

SEQ ID NO: 96982 - DNA, 25 bp, probe
atggaaacttgaggtcacttactaa

SEQ ID NO: 96983 - DNA, 25 bp, probe
aatggaaacttgaggtcacttacta

SEQ ID NO: 96984 - DNA, 25 bp, probe
gaatggaaacttgaggtcacttact

SEQ ID NO: 96985 - DNA, 25 bp, probe
ggaaacttgaggtcacttactaaat

SEQ ID NO: 96986 - DNA, 25 bp, probe
ggaatggaaacttgaggtcacttac

SEQ ID NO: 96987 - DNA, 25 bp, probe
aggaatggaaacttgaggtcactta

SEQ ID NO: 96988 - DNA, 25 bp, probe
atgatgtgtagtttatttgtgcttt

SEQ ID NO: 96989 - DNA, 25 bp, probe
aatgatgtgtagtttatttgtgctt

SEQ ID NO: 96990 - DNA, 25 bp, probe
taacaccagtgtctgatgaaacatt

SEQ ID NO: 96991 - DNA, 25 bp, probe
tttgtaacaccagtgtctgatgaaa

SEQ ID NO: 96992 - DNA, 25 bp, probe
aaatgatgtgtagtttatttgtgct

SEQ ID NO: 96993 - DNA, 25 bp, probe
caggaatggaaacttgaggtcactt

SEQ ID NO: 96994 - DNA, 25 bp, probe
gtaacaccagtgtctgatgaaacat

SEQ ID NO: 96995 - DNA, 25 bp, probe
aacaccagtgtctgatgaaacattt

SEQ ID NO: 96996 - DNA, 25 bp, probe
ttgtaacaccagtgtctgatgaaac

SEQ ID NO: 96997 - DNA, 25 bp, probe
atttgtgcttttattgttttccctg

SEQ ID NO: 96998 - DNA, 25 bp, probe
gaaacttgaggtcacttactaaata

SEQ ID NO: 96999 - DNA, 25 bp, probe
tttgtgcttttattgttttccctgc

SEQ ID NO: 97000 - DNA, 25 bp, probe
tgtaacaccagtgtctgatgaaaca

SEQ ID NO: 97001 - DNA, 25 bp, probe
ccgaaccttacctatgttcatatat

SEQ ID NO: 97002 - DNA, 25 bp, probe
ataatgtaaagggatgtattctgag

SEQ ID NO: 97003 - DNA, 25 bp, probe
tgcctgttgaggagccaattaaatt

SEQ ID NO: 97004 - DNA, 25 bp, probe
ttgcctgttgaggagccaattaaat

SEQ ID NO: 97005 - DNA, 25 bp, probe
aaacctgctggaattttggaatttt

SEQ ID NO: 97006 - DNA, 25 bp, probe
cttttattgttttccctgcgtctca

SEQ ID NO: 97007 - DNA, 25 bp, probe
tatttgtgcttttattgttttccct

SEQ ID NO: 97008 - DNA, 25 bp, probe
tgatgtgtagtttatttgtgctttt

SEQ ID NO: 97009 - DNA, 25 bp, probe
taaatgatgtgtagtttatttgtgc

SEQ ID NO: 97010 - DNA, 25 bp, probe
gcctgttgaggagccaattaaattt

SEQ ID NO: 97011 - DNA, 25 bp, probe
aaaacctgctggaattttggaattt

SEQ ID NO: 97012 - DNA, 25 bp, probe
aataacttaccagtaaactcacttt

SEQ ID NO: 97013 - DNA, 25 bp, probe
aaataacttaccagtaaactcactt

SEQ ID NO: 97014 - DNA, 25 bp, probe
cccgaaccttacctatgttcatata

SEQ ID NO: 97015 - DNA, 25 bp, probe
aaacttgaggtcacttactaaatat

SEQ ID NO: 97016 - DNA, 25 bp, probe
atgttgagaatcatggacaaaacct

SEQ ID NO: 97017 - DNA, 25 bp, probe
ttatttgtgcttttattgttttccc

SEQ ID NO: 97018 - DNA, 25 bp, probe
ttttattgttttccctgcgtctcag

SEQ ID NO: 97019 - DNA, 25 bp, probe
ttttgtaacaccagtgtctgatgaa

SEQ ID NO: 97020 - DNA, 25 bp, probe
acttgaggtcacttactaaatatag

SEQ ID NO: 97021 - DNA, 25 bp, probe
tgttgagaatcatggacaaaacctg

SEQ ID NO: 97022 - DNA, 25 bp, probe
gttgcctgttgaggagccaattaaa

SEQ ID NO: 97023 - DNA, 25 bp, probe
tgttgcctgttgaggagccaattaa

SEQ ID NO: 97024 - DNA, 25 bp, probe
ttgttgcctgttgaggagccaatta

SEQ ID NO: 97025 - DNA, 25 bp, probe
cttcttatcattcatggcagattgt

SEQ ID NO: 97026 - DNA, 25 bp, probe
gcttcttatcattcatggcagattg

SEQ ID NO: 97027 - DNA, 25 bp, probe
ttcttatcattcatggcagattgtt

SEQ ID NO: 97028 - DNA, 25 bp, probe
tgatgtaacctggaaactatgcttt

SEQ ID NO: 97029 - DNA, 25 bp, probe
ttgatgtaacctggaaactatgctt

SEQ ID NO: 97030 - DNA, 25 bp, probe
cacttgatgtaacctggaaactatg

SEQ ID NO: 97031 - DNA, 25 bp, probe
cttgatgtaacctggaaactatgct

SEQ ID NO: 97032 - DNA, 25 bp, probe
tcacttgatgtaacctggaaactat

SEQ ID NO: 97033 - DNA, 25 bp, probe
acttgatgtaacctggaaactatgc

SEQ ID NO: 97034 - DNA, 25 bp, probe
gatgtaacctggaaactatgcttta

SEQ ID NO: 97035 - DNA, 25 bp, probe
aatcacttgatgtaacctggaaact

SEQ ID NO: 97036 - DNA, 25 bp, probe
aaatcacttgatgtaacctggaaac

SEQ ID NO: 97037 - DNA, 25 bp, probe
atcacttgatgtaacctggaaacta

SEQ ID NO: 97038 - DNA, 25 bp, probe
atatgtgctgcctttgcttcttatc

SEQ ID NO: 97039 - DNA, 25 bp, probe
gatatgtgctgcctttgcttcttat

SEQ ID NO: 97040 - DNA, 25 bp, probe
tatcattcatggcagattgtttgtg

SEQ ID NO: 97041 - DNA, 25 bp, probe
ttatcattcatggcagattgtttgt

SEQ ID NO: 97042 - DNA, 25 bp, probe
ctgcctttgcttcttatcattcatg

SEQ ID NO: 97043 - DNA, 25 bp, probe
gtttgtgctttcaacatttcatttg

SEQ ID NO: 97044 - DNA, 25 bp, probe
cttatcattcatggcagattgtttg

SEQ ID NO: 97045 - DNA, 25 bp, probe
gctgcctttgcttcttatcattcat

SEQ ID NO: 97046 - DNA, 25 bp, probe
taacctggaaactatgctttacatg

SEQ ID NO: 97047 - DNA, 25 bp, probe
tcttatcattcatggcagattgttt

SEQ ID NO: 97048 - DNA, 25 bp, probe
aacctggaaactatgctttacatgg

SEQ ID NO: 97049 - DNA, 25 bp, probe
tgcttcttatcattcatggcagatt

SEQ ID NO: 97050 - DNA, 25 bp, probe
ttgcttcttatcattcatggcagat

SEQ ID NO: 97051 - DNA, 25 bp, probe
tgcctttgcttcttatcattcatgg

SEQ ID NO: 97052 - DNA, 25 bp, probe
gtaacctggaaactatgctttacat

SEQ ID NO: 97053 - DNA, 25 bp, probe
atgtaacctggaaactatgctttac

SEQ ID NO: 97054 - DNA, 25 bp, probe
tatgtgctgcctttgcttcttatca

SEQ ID NO: 97055 - DNA, 25 bp, probe
tgatatgtgctgcctttgcttctta

SEQ ID NO: 97056 - DNA, 25 bp, probe
ggaagaaacttgcagatgatatgtg

SEQ ID NO: 97057 - DNA, 25 bp, probe
gtgctgcctttgcttcttatcattc

SEQ ID NO: 97058 - DNA, 25 bp, probe
ttgggaagaaacttgcagatgatat

SEQ ID NO: 97059 - DNA, 25 bp, probe
tttatagcttgggaagaaacttgca

SEQ ID NO: 97060 - DNA, 25 bp, probe
cttgggaagaaacttgcagatgata

SEQ ID NO: 97061 - DNA, 25 bp, probe
gggaagaaacttgcagatgatatgt

SEQ ID NO: 97062 - DNA, 25 bp, probe
tgggaagaaacttgcagatgatatg

SEQ ID NO: 97063 - DNA, 25 bp, probe
ttatagcttgggaagaaacttgcag

SEQ ID NO: 97064 - DNA, 25 bp, probe
tgctgcctttgcttcttatcattca

SEQ ID NO: 97065 - DNA, 25 bp, probe
atgatatgtgctgcctttgcttctt

SEQ ID NO: 97066 - DNA, 25 bp, probe
tgtgctgcctttgcttcttatcatt

SEQ ID NO: 97067 - DNA, 25 bp, probe
atgtgctgcctttgcttcttatcat

SEQ ID NO: 97068 - DNA, 25 bp, probe
tatagcttgggaagaaacttgcaga

SEQ ID NO: 97069 - DNA, 25 bp, probe
ttcttcctcctaatcaacaactcag

SEQ ID NO: 97070 - DNA, 25 bp, probe
tcttcctcctaatcaacaactcagc

SEQ ID NO: 97071 - DNA, 25 bp, probe
cttcctcctaatcaacaactcagca

SEQ ID NO: 97072 - DNA, 25 bp, probe
ttcctcctaatcaacaactcagcac

SEQ ID NO: 97073 - DNA, 25 bp, probe
tttcttcctcctaatcaacaactca

SEQ ID NO: 97074 - DNA, 25 bp, probe
ctttcttcctcctaatcaacaactc

SEQ ID NO: 97075 - DNA, 25 bp, probe
gctttcttcctcctaatcaacaact

SEQ ID NO: 97076 - DNA, 25 bp, probe
ggctttcttcctcctaatcaacaac

SEQ ID NO: 97077 - DNA, 25 bp, probe
gggctttcttcctcctaatcaacaa

SEQ ID NO: 97078 - DNA, 25 bp, probe
tcctcctaatcaacaactcagcacc

SEQ ID NO: 97079 - DNA, 25 bp, probe
attctccaaagctgctgatgtctat

SEQ ID NO: 97080 - DNA, 25 bp, probe
aggctacttcttttgctttgtttta

SEQ ID NO: 97081 - DNA, 25 bp, probe
gaggctacttcttttgctttgtttt

SEQ ID NO: 97082 - DNA, 25 bp, probe
ctaatcaacaactcagcaccgtgac

SEQ ID NO: 97083 - DNA, 25 bp, probe
ggctacttcttttgctttgttttaa

SEQ ID NO: 97084 - DNA, 25 bp, probe
ttctccaaagctgctgatgtctatg

SEQ ID NO: 97085 - DNA, 25 bp, probe
taatcaacaactcagcaccgtgact

SEQ ID NO: 97086 - DNA, 25 bp, probe
ctcctaatcaacaactcagcaccgt

SEQ ID NO: 97087 - DNA, 25 bp, probe
cattctccaaagctgctgatgtcta

SEQ ID NO: 97088 - DNA, 25 bp, probe
atttgggactgtttggtatgagctg

SEQ ID NO: 97089 - DNA, 25 bp, probe
catttgggactgtttggtatgagct

SEQ ID NO: 97090 - DNA, 25 bp, probe
cgaggctacttcttttgctttgttt

SEQ ID NO: 97091 - DNA, 25 bp, probe
tcctaatcaacaactcagcaccgtg

SEQ ID NO: 97092 - DNA, 25 bp, probe
cctaatcaacaactcagcaccgtga

SEQ ID NO: 97093 - DNA, 25 bp, probe
tgcatttgggactgtttggtatgag

SEQ ID NO: 97094 - DNA, 25 bp, probe
ctatgcatttgggactgtttggtat

SEQ ID NO: 97095 - DNA, 25 bp, probe
gcatttgggactgtttggtatgagc

SEQ ID NO: 97096 - DNA, 25 bp, probe
tatgcatttgggactgtttggtatg

SEQ ID NO: 97097 - DNA, 25 bp, probe
gctacttcttttgctttgttttaaa

SEQ ID NO: 97098 - DNA, 25 bp, probe
tctatgcatttgggactgtttggta

SEQ ID NO: 97099 - DNA, 25 bp, probe
gatgtctatgcatttgggactgttt

SEQ ID NO: 97100 - DNA, 25 bp, probe
atgtctatgcatttgggactgtttg

SEQ ID NO: 97101 - DNA, 25 bp, probe
tcgaggctacttcttttgctttgtt

SEQ ID NO: 97102 - DNA, 25 bp, probe
atgcatttgggactgtttggtatga

SEQ ID NO: 97103 - DNA, 25 bp, probe
tgatgtctatgcatttgggactgtt

SEQ ID NO: 97104 - DNA, 25 bp, probe
tgacttctgctaaaatgcaaaatga

SEQ ID NO: 97105 - DNA, 25 bp, probe
gtgacttctgctaaaatgcaaaatg

SEQ ID NO: 97106 - DNA, 25 bp, probe
ggggctttcttcctcctaatcaaca

SEQ ID NO: 97107 - DNA, 25 bp, probe
acttctgctaaaatgcaaaatgaga

SEQ ID NO: 97108 - DNA, 25 bp, probe
gacttctgctaaaatgcaaaatgag

SEQ ID NO: 97109 - DNA, 25 bp, probe
tctccaaagctgctgatgtctatgc

SEQ ID NO: 97110 - DNA, 25 bp, probe
tctgctaaaatgcaaaatgagatgc

SEQ ID NO: 97111 - DNA, 25 bp, probe
ttctgctaaaatgcaaaatgagatg

SEQ ID NO: 97112 - DNA, 25 bp, probe
cgtgacttctgctaaaatgcaaaat

SEQ ID NO: 97113 - DNA, 25 bp, probe
caaattgtgggtcaaagtaaatgta

SEQ ID NO: 97114 - DNA, 25 bp, probe
acaaattgtgggtcaaagtaaatgt

SEQ ID NO: 97115 - DNA, 25 bp, probe
gtcattctgaatctttgtatttgct

SEQ ID NO: 97116 - DNA, 25 bp, probe
agtcattctgaatctttgtatttgc

SEQ ID NO: 97117 - DNA, 25 bp, probe
aacaaattgtgggtcaaagtaaatg

SEQ ID NO: 97118 - DNA, 25 bp, probe
aaacaaattgtgggtcaaagtaaat

SEQ ID NO: 97119 - DNA, 25 bp, probe
aaattgtgggtcaaagtaaatgtat

SEQ ID NO: 97120 - DNA, 25 bp, probe
atgctattaagtcattctgaatctt

SEQ ID NO: 97121 - DNA, 25 bp, probe
tcattctgaatctttgtatttgctt

SEQ ID NO: 97122 - DNA, 25 bp, probe
acagcgagaccctagttaagagaaa

SEQ ID NO: 97123 - DNA, 25 bp, probe
catggcgaaaccctatctctacaaa

SEQ ID NO: 97124 - DNA, 25 bp, probe
tgcaaataggtatttcaaagctctt

SEQ ID NO: 97125 - DNA, 25 bp, probe
cattctgaatctttgtatttgcttt

SEQ ID NO: 97126 - DNA, 25 bp, probe
gcaaataggtatttcaaagctcttt

SEQ ID NO: 97127 - DNA, 25 bp, probe
tctgaatctttgtatttgcttttgc

SEQ ID NO: 97128 - DNA, 25 bp, probe
agtatgctattaagtcattctgaat

SEQ ID NO: 97129 - DNA, 25 bp, probe
caacatggcgaaaccctatctctac

SEQ ID NO: 97130 - DNA, 25 bp, probe
aattgtgggtcaaagtaaatgtata

SEQ ID NO: 97131 - DNA, 25 bp, probe
cacagcgagaccctagttaagagaa

SEQ ID NO: 97132 - DNA, 25 bp, probe
gtatgctattaagtcattctgaatc

SEQ ID NO: 97133 - DNA, 25 bp, probe
atgtaacaaaagttgaaaatcgggc

SEQ ID NO: 97134 - DNA, 25 bp, probe
aatgtaacaaaagttgaaaatcggg

SEQ ID NO: 97135 - DNA, 25 bp, probe
ctagaatatttgcctaattgggaat

SEQ ID NO: 97136 - DNA, 25 bp, probe
tatgctattaagtcattctgaatct

SEQ ID NO: 97137 - DNA, 25 bp, probe
atggcgaaaccctatctctacaaaa

SEQ ID NO: 97138 - DNA, 25 bp, probe
tgctattaagtcattctgaatcttt

SEQ ID NO: 97139 - DNA, 25 bp, probe
acatggcgaaaccctatctctacaa

SEQ ID NO: 97140 - DNA, 25 bp, probe
aacatggcgaaaccctatctctaca

SEQ ID NO: 97141 - DNA, 25 bp, probe
gctcttttcctaactggttaagtaa

SEQ ID NO: 97142 - DNA, 25 bp, probe
gctattaagtcattctgaatctttg

SEQ ID NO: 97143 - DNA, 25 bp, probe
caatgtaacaaaagttgaaaatcgg

SEQ ID NO: 97144 - DNA, 25 bp, probe
cagcgagaccctagttaagagaaaa

SEQ ID NO: 97145 - DNA, 25 bp, probe
tagtatgctattaagtcattctgaa

SEQ ID NO: 97146 - DNA, 25 bp, probe
ttagtatgctattaagtcattctga

SEQ ID NO: 97147 - DNA, 25 bp, probe
tcaaagctcttttcctaactggtta

SEQ ID NO: 97148 - DNA, 25 bp, probe
tctagaatatttgcctaattgggaa

SEQ ID NO: 97149 - DNA, 25 bp, probe
atttcaaagctcttttcctaactgg

SEQ ID NO: 97150 - DNA, 25 bp, probe
attgtgggtcaaagtaaatgtatac

SEQ ID NO: 97151 - DNA, 25 bp, probe
caaagctcttttcctaactggttaa

SEQ ID NO: 97152 - DNA, 25 bp, probe
ttcaaagctcttttcctaactggtt

SEQ ID NO: 97153 - DNA, 25 bp, probe
tttcaaagctcttttcctaactggt

SEQ ID NO: 97154 - DNA, 25 bp, probe
aaagctcttttcctaactggttaag

SEQ ID NO: 97155 - DNA, 25 bp, probe
aagtcattctgaatctttgtatttg

SEQ ID NO: 97156 - DNA, 25 bp, probe
aagctcttttcctaactggttaagt

SEQ ID NO: 97157 - DNA, 25 bp, probe
aatccaagatgacagatgaggagat

SEQ ID NO: 97158 - DNA, 25 bp, probe
cctcttcatagtgttgtgtttgttt

SEQ ID NO: 97159 - DNA, 25 bp, probe
ttcacttgcattgtcattagatgtc

SEQ ID NO: 97160 - DNA, 25 bp, probe
aatttatttgtaagcctgaatcgca

SEQ ID NO: 97161 - DNA, 25 bp, probe
ttgcattgtcattagatgtccagaa

SEQ ID NO: 97162 - DNA, 25 bp, probe
atccaagatgacagatgaggagatc

SEQ ID NO: 97163 - DNA, 25 bp, probe
cttgcattgtcattagatgtccaga

SEQ ID NO: 97164 - DNA, 25 bp, probe
cagcaatgttgaagtgaccataaag

SEQ ID NO: 97165 - DNA, 25 bp, probe
caaaggaagcaattaagaacagcag

SEQ ID NO: 97166 - DNA, 25 bp, probe
ccctcttcatagtgttgtgtttgtt

SEQ ID NO: 97167 - DNA, 25 bp, probe
acttgcattgtcattagatgtccag

SEQ ID NO: 97168 - DNA, 25 bp, probe
tcacttgcattgtcattagatgtcc

SEQ ID NO: 97169 - DNA, 25 bp, probe
ctccctcttcatagtgttgtgtttg

SEQ ID NO: 97170 - DNA, 25 bp, probe
gcaatgttgaagtgaccataaagtg

SEQ ID NO: 97171 - DNA, 25 bp, probe
agcaatgttgaagtgaccataaagt

SEQ ID NO: 97172 - DNA, 25 bp, probe
tttcctactccctcagattatgtaa

SEQ ID NO: 97173 - DNA, 25 bp, probe
cacttgcattgtcattagatgtcca

SEQ ID NO: 97174 - DNA, 25 bp, probe
taatttatttgtaagcctgaatcgc

SEQ ID NO: 97175 - DNA, 25 bp, probe
ttcctactccctcagattatgtaat

SEQ ID NO: 97176 - DNA, 25 bp, probe
tccctcttcatagtgttgtgtttgt

SEQ ID NO: 97177 - DNA, 25 bp, probe
tcctactccctcagattatgtaatt

SEQ ID NO: 97178 - DNA, 25 bp, probe
atttatttgtaagcctgaatcgcag

SEQ ID NO: 97179 - DNA, 25 bp, probe
caacagcaacccaagaaggaattaa

SEQ ID NO: 97180 - DNA, 25 bp, probe
cataaagcagatgaaccttcaacag

SEQ ID NO: 97181 - DNA, 25 bp, probe
actccctcttcatagtgttgtgttt

SEQ ID NO: 97182 - DNA, 25 bp, probe
aacagcaacccaagaaggaattaat

SEQ ID NO: 97183 - DNA, 25 bp, probe
ccataaagcagatgaaccttcaaca

SEQ ID NO: 97184 - DNA, 25 bp, probe
cctactccctcagattatgtaattt

SEQ ID NO: 97185 - DNA, 25 bp, probe
aaaggaagcaattaagaacagcagc

SEQ ID NO: 97186 - DNA, 25 bp, probe
caatgttgaagtgaccataaagtgg

SEQ ID NO: 97187 - DNA, 25 bp, probe
gcagcaatgttgaagtgaccataaa

SEQ ID NO: 97188 - DNA, 25 bp, probe
aaatccaagatgacagatgaggaga

SEQ ID NO: 97189 - DNA, 25 bp, probe
tcaacagcaacccaagaaggaatta

SEQ ID NO: 97190 - DNA, 25 bp, probe
ataaagcagatgaaccttcaacagc

SEQ ID NO: 97191 - DNA, 25 bp, probe
gcaaaggaagcaattaagaacagca

SEQ ID NO: 97192 - DNA, 25 bp, probe
tttcacttgcattgtcattagatgt

SEQ ID NO: 97193 - DNA, 25 bp, probe
tgcattgtcattagatgtccagaaa

SEQ ID NO: 97194 - DNA, 25 bp, probe
aaggaagcaattaagaacagcagcc

SEQ ID NO: 97195 - DNA, 25 bp, probe
ggcagcaatgttgaagtgaccataa

SEQ ID NO: 97196 - DNA, 25 bp, probe
tttatttgtaagcctgaatcgcagc

SEQ ID NO: 97197 - DNA, 25 bp, probe
ctccagcctgactcctctgattatc

SEQ ID NO: 97198 - DNA, 25 bp, probe
gtaatttatttgtaagcctgaatcg

SEQ ID NO: 97199 - DNA, 25 bp, probe
aaactccttacccaatgtgatgttt

SEQ ID NO: 97200 - DNA, 25 bp, probe
ttcaaacctccttcaaaactcctta

SEQ ID NO: 97201 - DNA, 25 bp, probe
ctacgagtcttctagcttcatgttc

SEQ ID NO: 97202 - DNA, 25 bp, probe
attcctacgagtcttctagcttcat

SEQ ID NO: 97203 - DNA, 25 bp, probe
gattcctacgagtcttctagcttca

SEQ ID NO: 97204 - DNA, 25 bp, probe
ctcctagatgacaatatgcagatcc

SEQ ID NO: 97205 - DNA, 25 bp, probe
ctctgctgctataactgaggatgag

SEQ ID NO: 97206 - DNA, 25 bp, probe
ttcctacgagtcttctagcttcatg

SEQ ID NO: 97207 - DNA, 25 bp, probe
ctagatgacaatatgcagatccgac

SEQ ID NO: 97208 - DNA, 25 bp, probe
tctcctagatgacaatatgcagatc

SEQ ID NO: 97209 - DNA, 25 bp, probe
gactctgctgctataactgaggatg

SEQ ID NO: 97210 - DNA, 25 bp, probe
agactctgctgctataactgaggat

SEQ ID NO: 97211 - DNA, 25 bp, probe
tagatgacaatatgcagatccgact

SEQ ID NO: 97212 - DNA, 25 bp, probe
ttctcctagatgacaatatgcagat

SEQ ID NO: 97213 - DNA, 25 bp, probe
attctcctagatgacaatatgcaga

SEQ ID NO: 97214 - DNA, 25 bp, probe
tacgagtcttctagcttcatgttcc

SEQ ID NO: 97215 - DNA, 25 bp, probe
cctacgagtcttctagcttcatgtt

SEQ ID NO: 97216 - DNA, 25 bp, probe
actctgctgctataactgaggatga

SEQ ID NO: 97217 - DNA, 25 bp, probe
cctagatgacaatatgcagatccga

SEQ ID NO: 97218 - DNA, 25 bp, probe
tcctagatgacaatatgcagatccg

SEQ ID NO: 97219 - DNA, 25 bp, probe
cgattcctacgagtcttctagcttc

SEQ ID NO: 97220 - DNA, 25 bp, probe
agatgacaatatgcagatccgactt

SEQ ID NO: 97221 - DNA, 25 bp, probe
tctgctgctataactgaggatgagg

SEQ ID NO: 97222 - DNA, 25 bp, probe
tcctacgagtcttctagcttcatgt

SEQ ID NO: 97223 - DNA, 25 bp, probe
gagactctgctgctataactgagga

SEQ ID NO: 97224 - DNA, 25 bp, probe
gagtcttctagcttcatgttcctgg

SEQ ID NO: 97225 - DNA, 25 bp, probe
taatgatcctgctaccctcttgaag

SEQ ID NO: 97226 - DNA, 25 bp, probe
ctaatgatcctgctaccctcttgaa

SEQ ID NO: 97227 - DNA, 25 bp, probe
cttctagcttcatgttcctggtgtt

SEQ ID NO: 97228 - DNA, 25 bp, probe
tattctcctagatgacaatatgcag

SEQ ID NO: 97229 - DNA, 25 bp, probe
cgagtcttctagcttcatgttcctg

SEQ ID NO: 97230 - DNA, 25 bp, probe
gtcttctagcttcatgttcctggtg

SEQ ID NO: 97231 - DNA, 25 bp, probe
agtcttctagcttcatgttcctggt

SEQ ID NO: 97232 - DNA, 25 bp, probe
atatgcagatccgactttcagattt

SEQ ID NO: 97233 - DNA, 25 bp, probe
aatatgcagatccgactttcagatt

SEQ ID NO: 97234 - DNA, 25 bp, probe
cactaatgatcctgctaccctcttg

SEQ ID NO: 97235 - DNA, 25 bp, probe
acgagtcttctagcttcatgttcct

SEQ ID NO: 97236 - DNA, 25 bp, probe
actaatgatcctgctaccctcttga

SEQ ID NO: 97237 - DNA, 25 bp, probe
tatgcagatccgactttcagatttc

SEQ ID NO: 97238 - DNA, 25 bp, probe
caatatgcagatccgactttcagat

SEQ ID NO: 97239 - DNA, 25 bp, probe
atgacaatatgcagatccgactttc

SEQ ID NO: 97240 - DNA, 25 bp, probe
gatgacaatatgcagatccgacttt

SEQ ID NO: 97241 - DNA, 25 bp, probe
tcttctagcttcatgttcctggtgt

SEQ ID NO: 97242 - DNA, 25 bp, probe
ggagactctgctgctataactgagg

SEQ ID NO: 97243 - DNA, 25 bp, probe
gacaatatgcagatccgactttcag

SEQ ID NO: 97244 - DNA, 25 bp, probe
tatgaaataaaatctgctacacgcc

SEQ ID NO: 97245 - DNA, 25 bp, probe
ctcctcaaccactctcctaatgatt

SEQ ID NO: 97246 - DNA, 25 bp, probe
tgtgaatctggaatattacctgtgt

SEQ ID NO: 97247 - DNA, 25 bp, probe
tctggaatattacctgtgtcatcaa

SEQ ID NO: 97248 - DNA, 25 bp, probe
tcctcaaccactctcctaatgattg

SEQ ID NO: 97249 - DNA, 25 bp, probe
atctggaatattacctgtgtcatca

SEQ ID NO: 97250 - DNA, 25 bp, probe
gtgaatctggaatattacctgtgtc

SEQ ID NO: 97251 - DNA, 25 bp, probe
gtactcctcaaccactctcctaatg

SEQ ID NO: 97252 - DNA, 25 bp, probe
tactcctcaaccactctcctaatga

SEQ ID NO: 97253 - DNA, 25 bp, probe
atgtgaatctggaatattacctgtg

SEQ ID NO: 97254 - DNA, 25 bp, probe
tgaatctggaatattacctgtgtca

SEQ ID NO: 97255 - DNA, 25 bp, probe
aatctggaatattacctgtgtcatc

SEQ ID NO: 97256 - DNA, 25 bp, probe
gaatctggaatattacctgtgtcat

SEQ ID NO: 97257 - DNA, 25 bp, probe
acctggaaatgtgaatctggaatat

SEQ ID NO: 97258 - DNA, 25 bp, probe
actcctcaaccactctcctaatgat

SEQ ID NO: 97259 - DNA, 25 bp, probe
tacctggaaatgtgaatctggaata

SEQ ID NO: 97260 - DNA, 25 bp, probe
ccaagttgtagatggaatagaagcc

SEQ ID NO: 97261 - DNA, 25 bp, probe
caaccactctcctaatgattggaac

SEQ ID NO: 97262 - DNA, 25 bp, probe
aatgtgaatctggaatattacctgt

SEQ ID NO: 97263 - DNA, 25 bp, probe
tcaaccactctcctaatgattggaa

SEQ ID NO: 97264 - DNA, 25 bp, probe
aagttgtagatggaatagaagccct

SEQ ID NO: 97265 - DNA, 25 bp, probe
accactctcctaatgattggaacaa

SEQ ID NO: 97266 - DNA, 25 bp, probe
aaccactctcctaatgattggaaca

SEQ ID NO: 97267 - DNA, 25 bp, probe
gtagatggaatagaagcccttgttg

SEQ ID NO: 97268 - DNA, 25 bp, probe
gttgtagatggaatagaagcccttg

SEQ ID NO: 97269 - DNA, 25 bp, probe
agttgtagatggaatagaagccctt

SEQ ID NO: 97270 - DNA, 25 bp, probe
caagttgtagatggaatagaagccc

SEQ ID NO: 97271 - DNA, 25 bp, probe
gtttgaatttctgccaggattgaat

SEQ ID NO: 97272 - DNA, 25 bp, probe
ctcaaccactctcctaatgattgga

SEQ ID NO: 97273 - DNA, 25 bp, probe
tgtagatggaatagaagcccttgtt

SEQ ID NO: 97274 - DNA, 25 bp, probe
ttgtagatggaatagaagcccttgt

SEQ ID NO: 97275 - DNA, 25 bp, probe
attacctgtgtcatcaaagtagtga

SEQ ID NO: 97276 - DNA, 25 bp, probe
aatgtaaacgaaggctgacttgatt

SEQ ID NO: 97277 - DNA, 25 bp, probe
aaatgtaaacgaaggctgacttgat

SEQ ID NO: 97278 - DNA, 25 bp, probe
tattacctgtgtcatcaaagtagtg

SEQ ID NO: 97279 - DNA, 25 bp, probe
gtacctggaaatgtgaatctggaat

SEQ ID NO: 97280 - DNA, 25 bp, probe
agtttgaatttctgccaggattgaa

SEQ ID NO: 97281 - DNA, 25 bp, probe
tttgaatttctgccaggattgaatt

SEQ ID NO: 97282 - DNA, 25 bp, probe
ctgacttgattgtgccatttagagg

SEQ ID NO: 97283 - DNA, 25 bp, probe
gagtttgaatttctgccaggattga

SEQ ID NO: 97284 - DNA, 25 bp, probe
atgtaaacgaaggctgacttgattg

SEQ ID NO: 97285 - DNA, 25 bp, probe
gaaatgtaaacgaaggctgacttga

SEQ ID NO: 97286 - DNA, 25 bp, probe
ttgaatttctgccaggattgaatta

SEQ ID NO: 97287 - DNA, 25 bp, probe
cttgattgtgccatttagagggaac

SEQ ID NO: 97288 - DNA, 25 bp, probe
tgaatttctgccaggattgaattat

SEQ ID NO: 97289 - DNA, 25 bp, probe
ggaagacagataatgaagtaggcaa

SEQ ID NO: 97290 - DNA, 25 bp, probe
acagaattgacggtattattggaga

SEQ ID NO: 97291 - DNA, 25 bp, probe
cagaattgacggtattattggagat

SEQ ID NO: 97292 - DNA, 25 bp, probe
tacagaattgacggtattattggag

SEQ ID NO: 97293 - DNA, 25 bp, probe
ttaccattgatctgtcttatgccat

SEQ ID NO: 97294 - DNA, 25 bp, probe
attaccattgatctgtcttatgcca

SEQ ID NO: 97295 - DNA, 25 bp, probe
cattaccattgatctgtcttatgcc

SEQ ID NO: 97296 - DNA, 25 bp, probe
ccattaccattgatctgtcttatgc

SEQ ID NO: 97297 - DNA, 25 bp, probe
taccattgatctgtcttatgccata

SEQ ID NO: 97298 - DNA, 25 bp, probe
agaattgacggtattattggagatt

SEQ ID NO: 97299 - DNA, 25 bp, probe
accattgatctgtcttatgccataa

SEQ ID NO: 97300 - DNA, 25 bp, probe
accattaccattgatctgtcttatg

SEQ ID NO: 97301 - DNA, 25 bp, probe
accaaggtgaagattgatagtccaa

SEQ ID NO: 97302 - DNA, 25 bp, probe
agagaccagagcaggattaataatt

SEQ ID NO: 97303 - DNA, 25 bp, probe
tgagcattgataggtcagtatatct

SEQ ID NO: 97304 - DNA, 25 bp, probe
ccattgatctgtcttatgccataat

SEQ ID NO: 97305 - DNA, 25 bp, probe
ttagagaccagagcaggattaataa

SEQ ID NO: 97306 - DNA, 25 bp, probe
aaccattaccattgatctgtcttat

SEQ ID NO: 97307 - DNA, 25 bp, probe
caggaccaaggtgaagattgatagt

SEQ ID NO: 97308 - DNA, 25 bp, probe
tagagaccagagcaggattaataat

SEQ ID NO: 97309 - DNA, 25 bp, probe
ttgagcattgataggtcagtatatc

SEQ ID NO: 97310 - DNA, 25 bp, probe
aggaccaaggtgaagattgatagtc

SEQ ID NO: 97311 - DNA, 25 bp, probe
ttgggaagacagataatgaagtagg

SEQ ID NO: 97312 - DNA, 25 bp, probe
ggttgggaagacagataatgaagta

SEQ ID NO: 97313 - DNA, 25 bp, probe
acagataatgaagtaggcaaagaga

SEQ ID NO: 97314 - DNA, 25 bp, probe
agacagataatgaagtaggcaaaga

SEQ ID NO: 97315 - DNA, 25 bp, probe
acatacactggttgataaagggaag

SEQ ID NO: 97316 - DNA, 25 bp, probe
tacatacactggttgataaagggaa

SEQ ID NO: 97317 - DNA, 25 bp, probe
ttgatctgtcttatgccataatctt

SEQ ID NO: 97318 - DNA, 25 bp, probe
gacagataatgaagtaggcaaagag

SEQ ID NO: 97319 - DNA, 25 bp, probe
atacatacactggttgataaaggga

SEQ ID NO: 97320 - DNA, 25 bp, probe
gaccaaggtgaagattgatagtcca

SEQ ID NO: 97321 - DNA, 25 bp, probe
gctgacagatttcccatttagtagt

SEQ ID NO: 97322 - DNA, 25 bp, probe
gaagacagataatgaagtaggcaaa

SEQ ID NO: 97323 - DNA, 25 bp, probe
gttgggaagacagataatgaagtag

SEQ ID NO: 97324 - DNA, 25 bp, probe
ttgtttagagaccagagcaggatta

SEQ ID NO: 97325 - DNA, 25 bp, probe
attgatctgtcttatgccataatct

SEQ ID NO: 97326 - DNA, 25 bp, probe
cattgatctgtcttatgccataatc

SEQ ID NO: 97327 - DNA, 25 bp, probe
aagacagataatgaagtaggcaaag

SEQ ID NO: 97328 - DNA, 25 bp, probe
tgtttagagaccagagcaggattaa

SEQ ID NO: 97329 - DNA, 25 bp, probe
gtgaagattgatagtccaaatgctt

SEQ ID NO: 97330 - DNA, 25 bp, probe
cagataatgaagtaggcaaagagaa

SEQ ID NO: 97331 - DNA, 25 bp, probe
aatacatacactggttgataaaggg

SEQ ID NO: 97332 - DNA, 25 bp, probe
atacagaattgacggtattattgga

SEQ ID NO: 97333 - DNA, 25 bp, probe
tgtagggttattagtccaaatgtga

SEQ ID NO: 97334 - DNA, 25 bp, probe
gtagggttattagtccaaatgtgat

SEQ ID NO: 97335 - DNA, 25 bp, probe
acaaccaagaacattatcttagtgg

SEQ ID NO: 97336 - DNA, 25 bp, probe
ttgtagggttattagtccaaatgtg

SEQ ID NO: 97337 - DNA, 25 bp, probe
tatttcagtctatcatggagcacaa

SEQ ID NO: 97338 - DNA, 25 bp, probe
ctatttcagtctatcatggagcaca

SEQ ID NO: 97339 - DNA, 25 bp, probe
caaccaagaacattatcttagtgga

SEQ ID NO: 97340 - DNA, 25 bp, probe
accaagaacattatcttagtggaag

SEQ ID NO: 97341 - DNA, 25 bp, probe
atttcagtctatcatggagcacaac

SEQ ID NO: 97342 - DNA, 25 bp, probe
aaccaagaacattatcttagtggaa

SEQ ID NO: 97343 - DNA, 25 bp, probe
gtggaagtgaatccttaaccctaaa

SEQ ID NO: 97344 - DNA, 25 bp, probe
tagggttattagtccaaatgtgatc

SEQ ID NO: 97345 - DNA, 25 bp, probe
attgtagggttattagtccaaatgt

SEQ ID NO: 97346 - DNA, 25 bp, probe
cgagctatttcagtctatcatggag

SEQ ID NO: 97347 - DNA, 25 bp, probe
agtggaagtgaatccttaaccctaa

SEQ ID NO: 97348 - DNA, 25 bp, probe
acgagctatttcagtctatcatgga

SEQ ID NO: 97349 - DNA, 25 bp, probe
catcttacagagtgcagtatgaaac

SEQ ID NO: 97350 - DNA, 25 bp, probe
cagtggaagtgaatccttaacccta

SEQ ID NO: 97351 - DNA, 25 bp, probe
ccatcttacagagtgcagtatgaaa

SEQ ID NO: 97352 - DNA, 25 bp, probe
atcttacagagtgcagtatgaaact

SEQ ID NO: 97353 - DNA, 25 bp, probe
gacgagctatttcagtctatcatgg

SEQ ID NO: 97354 - DNA, 25 bp, probe
tatgaaactcaccagcgagaacaaa

SEQ ID NO: 97355 - DNA, 25 bp, probe
aattgtagggttattagtccaaatg

SEQ ID NO: 97356 - DNA, 25 bp, probe
tttcctatccaaaatccttgtccaa

SEQ ID NO: 97357 - DNA, 25 bp, probe
cccatcttacagagtgcagtatgaa

SEQ ID NO: 97358 - DNA, 25 bp, probe
tttcagtctatcatggagcacaacg

SEQ ID NO: 97359 - DNA, 25 bp, probe
gtatgaaactcaccagcgagaacaa

SEQ ID NO: 97360 - DNA, 25 bp, probe
gctatttcagtctatcatggagcac

SEQ ID NO: 97361 - DNA, 25 bp, probe
gtttcctatccaaaatccttgtcca

SEQ ID NO: 97362 - DNA, 25 bp, probe
gagctatttcagtctatcatggagc

SEQ ID NO: 97363 - DNA, 25 bp, probe
agggttattagtccaaatgtgatca

SEQ ID NO: 97364 - DNA, 25 bp, probe
agctatttcagtctatcatggagca

SEQ ID NO: 97365 - DNA, 25 bp, probe
aaattgtagggttattagtccaaat

SEQ ID NO: 97366 - DNA, 25 bp, probe
ttcagtctatcatggagcacaacgt

SEQ ID NO: 97367 - DNA, 25 bp, probe
cagtatgaaactcaccagcgagaac

SEQ ID NO: 97368 - DNA, 25 bp, probe
ttcctatccaaaatccttgtccaag

SEQ ID NO: 97369 - DNA, 25 bp, probe
cgtttcctatccaaaatccttgtcc

SEQ ID NO: 97370 - DNA, 25 bp, probe
gggttattagtccaaatgtgatcaa

SEQ ID NO: 97371 - DNA, 25 bp, probe
aagatgaagacgagctatttcagtc

SEQ ID NO: 97372 - DNA, 25 bp, probe
gaagatgaagacgagctatttcagt

SEQ ID NO: 97373 - DNA, 25 bp, probe
tgaagatgaagacgagctatttcag

SEQ ID NO: 97374 - DNA, 25 bp, probe
tgaaaattgtagggttattagtcca

SEQ ID NO: 97375 - DNA, 25 bp, probe
gtgaagatgaagacgagctatttca

SEQ ID NO: 97376 - DNA, 25 bp, probe
tggaagtgaatccttaaccctaaaa

SEQ ID NO: 97377 - DNA, 25 bp, probe
aatacattcttcataccaggaccag

SEQ ID NO: 97378 - DNA, 25 bp, probe
cacagcaacaatgacttaaccatat

SEQ ID NO: 97379 - DNA, 25 bp, probe
tgtgtcagattaccagttataggaa

SEQ ID NO: 97380 - DNA, 25 bp, probe
ttgtgtcagattaccagttatagga

SEQ ID NO: 97381 - DNA, 25 bp, probe
atacattcttcataccaggaccaga

SEQ ID NO: 97382 - DNA, 25 bp, probe
acacagcaacaatgacttaaccata

SEQ ID NO: 97383 - DNA, 25 bp, probe
gtgtcagattaccagttataggaac

SEQ ID NO: 97384 - DNA, 25 bp, probe
tacattcttcataccaggaccagag

SEQ ID NO: 97385 - DNA, 25 bp, probe
acagcaacaatgacttaaccatata

SEQ ID NO: 97386 - DNA, 25 bp, probe
aacacagcaacaatgacttaaccat

SEQ ID NO: 97387 - DNA, 25 bp, probe
attgtgtcagattaccagttatagg

SEQ ID NO: 97388 - DNA, 25 bp, probe
aagtggagacagactgatgtgtata

SEQ ID NO: 97389 - DNA, 25 bp, probe
tgtcagattaccagttataggaaca

SEQ ID NO: 97390 - DNA, 25 bp, probe
gtcagattaccagttataggaacaa

SEQ ID NO: 97391 - DNA, 25 bp, probe
ggttgtgtagctgtgtcatgtatat

SEQ ID NO: 97392 - DNA, 25 bp, probe
cagcaacaatgacttaaccatataa

SEQ ID NO: 97393 - DNA, 25 bp, probe
agttattaatctggacattcgagga

SEQ ID NO: 97394 - DNA, 25 bp, probe
cattgtgtcagattaccagttatag

SEQ ID NO: 97395 - DNA, 25 bp, probe
ataggtaagaaacacagcaacaatg

SEQ ID NO: 97396 - DNA, 25 bp, probe
cataggtaagaaacacagcaacaat

SEQ ID NO: 97397 - DNA, 25 bp, probe
gctaaaggaagtgaatctgtattgg

SEQ ID NO: 97398 - DNA, 25 bp, probe
aaatacattcttcataccaggacca

SEQ ID NO: 97399 - DNA, 25 bp, probe
attcttcataccaggaccagaggaa

SEQ ID NO: 97400 - DNA, 25 bp, probe
gttgtgtagctgtgtcatgtatata

SEQ ID NO: 97401 - DNA, 25 bp, probe
aggttgtgtagctgtgtcatgtata

SEQ ID NO: 97402 - DNA, 25 bp, probe
taggtaagaaacacagcaacaatga

SEQ ID NO: 97403 - DNA, 25 bp, probe
tcataggtaagaaacacagcaacaa

SEQ ID NO: 97404 - DNA, 25 bp, probe
gaatgaaccttctgcaacatcttaa

SEQ ID NO: 97405 - DNA, 25 bp, probe
agaaacacagcaacaatgacttaac

SEQ ID NO: 97406 - DNA, 25 bp, probe
ctaaaggaagtgaatctgtattggg

SEQ ID NO: 97407 - DNA, 25 bp, probe
gttattaatctggacattcgaggaa

SEQ ID NO: 97408 - DNA, 25 bp, probe
atttacacacacctttctttagcat

SEQ ID NO: 97409 - DNA, 25 bp, probe
ttatgctggactctggaccatatac

SEQ ID NO: 97410 - DNA, 25 bp, probe
gggaatgctcagaaaggaaataatt

SEQ ID NO: 97411 - DNA, 25 bp, probe
acattgtgtcagattaccagttata

SEQ ID NO: 97412 - DNA, 25 bp, probe
aagaaacacagcaacaatgacttaa

SEQ ID NO: 97413 - DNA, 25 bp, probe
gtaagaaacacagcaacaatgactt

SEQ ID NO: 97414 - DNA, 25 bp, probe
tcagattaccagttataggaacaat

SEQ ID NO: 97415 - DNA, 25 bp, probe
gtcataggtaagaaacacagcaaca

SEQ ID NO: 97416 - DNA, 25 bp, probe
catgctacagttattaatctggaca

SEQ ID NO: 97417 - DNA, 25 bp, probe
tatttacacacacctttctttagca

SEQ ID NO: 97418 - DNA, 25 bp, probe
gaaacacagcaacaatgacttaacc

SEQ ID NO: 97419 - DNA, 25 bp, probe
ggaatgaaccttctgcaacatctta

SEQ ID NO: 97420 - DNA, 25 bp, probe
cagttattaatctggacattcgagg

SEQ ID NO: 97421 - DNA, 25 bp, probe
aaccttctctatcttgtccttcctt

SEQ ID NO: 97422 - DNA, 25 bp, probe
gaaccttctctatcttgtccttcct

SEQ ID NO: 97423 - DNA, 25 bp, probe
aggtgtgttccaatacaagtagatt

SEQ ID NO: 97424 - DNA, 25 bp, probe
attcaggtgtgttccaatacaagta

SEQ ID NO: 97425 - DNA, 25 bp, probe
caggtgtgttccaatacaagtagat

SEQ ID NO: 97426 - DNA, 25 bp, probe
ttcaggtgtgttccaatacaagtag

SEQ ID NO: 97427 - DNA, 25 bp, probe
ctgacagtaagaaccttctctatct

SEQ ID NO: 97428 - DNA, 25 bp, probe
agaaccttctctatcttgtccttcc

SEQ ID NO: 97429 - DNA, 25 bp, probe
tcaggtgtgttccaatacaagtaga

SEQ ID NO: 97430 - DNA, 25 bp, probe
cattcaggtgtgttccaatacaagt

SEQ ID NO: 97431 - DNA, 25 bp, probe
acattcaggtgtgttccaatacaag

SEQ ID NO: 97432 - DNA, 25 bp, probe
cactgacagtaagaaccttctctat

SEQ ID NO: 97433 - DNA, 25 bp, probe
acactgacagtaagaaccttctcta

SEQ ID NO: 97434 - DNA, 25 bp, probe
actgacagtaagaaccttctctatc

SEQ ID NO: 97435 - DNA, 25 bp, probe
gaacactgacagtaagaaccttctc

SEQ ID NO: 97436 - DNA, 25 bp, probe
gagagtggtaagttgcagatagaat

SEQ ID NO: 97437 - DNA, 25 bp, probe
agagtggtaagttgcagatagaatg

SEQ ID NO: 97438 - DNA, 25 bp, probe
aacactgacagtaagaaccttctct

SEQ ID NO: 97439 - DNA, 25 bp, probe
ttgtccttcctttctcattatagcc

SEQ ID NO: 97440 - DNA, 25 bp, probe
ccttctctatcttgtccttcctttc

SEQ ID NO: 97441 - DNA, 25 bp, probe
tctctatcttgtccttcctttctca

SEQ ID NO: 97442 - DNA, 25 bp, probe
ctctatcttgtccttcctttctcat

SEQ ID NO: 97443 - DNA, 25 bp, probe
ttctctatcttgtccttcctttctc

SEQ ID NO: 97444 - DNA, 25 bp, probe
cttctctatcttgtccttcctttct

SEQ ID NO: 97445 - DNA, 25 bp, probe
ttgagatttctttagtgcttgcttt

SEQ ID NO: 97446 - DNA, 25 bp, probe
attgagatttctttagtgcttgctt

SEQ ID NO: 97447 - DNA, 25 bp, probe
cttgtccttcctttctcattatagc

SEQ ID NO: 97448 - DNA, 25 bp, probe
accttctctatcttgtccttccttt

SEQ ID NO: 97449 - DNA, 25 bp, probe
tctatcttgtccttcctttctcatt

SEQ ID NO: 97450 - DNA, 25 bp, probe
aattgagatttctttagtgcttgct

SEQ ID NO: 97451 - DNA, 25 bp, probe
atgttagttctggatggatttggtg

SEQ ID NO: 97452 - DNA, 25 bp, probe
tgagagtggtaagttgcagatagaa

SEQ ID NO: 97453 - DNA, 25 bp, probe
ttgagagtggtaagttgcagataga

SEQ ID NO: 97454 - DNA, 25 bp, probe
ggtcacaataaagagtctccaaatt

SEQ ID NO: 97455 - DNA, 25 bp, probe
attagagactgcatgttagttctgg

SEQ ID NO: 97456 - DNA, 25 bp, probe
cattgactaccttctcatgctctga

SEQ ID NO: 97457 - DNA, 25 bp, probe
aagaaccttctctatcttgtccttc

SEQ ID NO: 97458 - DNA, 25 bp, probe
attaacttggatcttctaatggtcc

SEQ ID NO: 97459 - DNA, 25 bp, probe
tagagactgcatgttagttctggat

SEQ ID NO: 97460 - DNA, 25 bp, probe
gtaagaaccttctctatcttgtcct

SEQ ID NO: 97461 - DNA, 25 bp, probe
agtaagaaccttctctatcttgtcc

SEQ ID NO: 97462 - DNA, 25 bp, probe
ggaacactgacagtaagaaccttct

SEQ ID NO: 97463 - DNA, 25 bp, probe
aattagagactgcatgttagttctg

SEQ ID NO: 97464 - DNA, 25 bp, probe
ctctacttgtgtgatgtttcaggaa

SEQ ID NO: 97465 - DNA, 25 bp, probe
gcttgtatcaccatctccatatcat

SEQ ID NO: 97466 - DNA, 25 bp, probe
ctcattacctggctcactaactaac

SEQ ID NO: 97467 - DNA, 25 bp, probe
cctcattacctggctcactaactaa

SEQ ID NO: 97468 - DNA, 25 bp, probe
ttgtatcaccatctccatatcattg

SEQ ID NO: 97469 - DNA, 25 bp, probe
tgtatcaccatctccatatcattga

SEQ ID NO: 97470 - DNA, 25 bp, probe
cttgtatcaccatctccatatcatt

SEQ ID NO: 97471 - DNA, 25 bp, probe
tcattacctggctcactaactaacg

SEQ ID NO: 97472 - DNA, 25 bp, probe
gtatcaccatctccatatcattgag

SEQ ID NO: 97473 - DNA, 25 bp, probe
atgagtgagagagttcaggagagta

SEQ ID NO: 97474 - DNA, 25 bp, probe
cagcttgtatcaccatctccatatc

SEQ ID NO: 97475 - DNA, 25 bp, probe
tgagtgagagagttcaggagagtag

SEQ ID NO: 97476 - DNA, 25 bp, probe
agcttgtatcaccatctccatatca

SEQ ID NO: 97477 - DNA, 25 bp, probe
atattgatgacttgattagagacca

SEQ ID NO: 97478 - DNA, 25 bp, probe
acttatagatattgcacgacagact

SEQ ID NO: 97479 - DNA, 25 bp, probe
tattgatgacttgattagagaccaa

SEQ ID NO: 97480 - DNA, 25 bp, probe
aatgagtgagagagttcaggagagt

SEQ ID NO: 97481 - DNA, 25 bp, probe
cttatagatattgcacgacagactg

SEQ ID NO: 97482 - DNA, 25 bp, probe
aacttatagatattgcacgacagac

SEQ ID NO: 97483 - DNA, 25 bp, probe
agagagttcaggagagtagcaacaa

SEQ ID NO: 97484 - DNA, 25 bp, probe
ctgaaacaaatgagtgagagagttc

SEQ ID NO: 97485 - DNA, 25 bp, probe
ccagcttgtatcaccatctccatat

SEQ ID NO: 97486 - DNA, 25 bp, probe
gaaacaaatgagtgagagagttcag

SEQ ID NO: 97487 - DNA, 25 bp, probe
actgaaacaaatgagtgagagagtt

SEQ ID NO: 97488 - DNA, 25 bp, probe
ttgattagagaccaaggatttcgtg

SEQ ID NO: 97489 - DNA, 25 bp, probe
gtgaaagccttacagaaatctccag

SEQ ID NO: 97490 - DNA, 25 bp, probe
aaacaaatgagtgagagagttcagg

SEQ ID NO: 97491 - DNA, 25 bp, probe
gagagagttcaggagagtagcaaca

SEQ ID NO: 97492 - DNA, 25 bp, probe
atatcctactcttcatgggctattc

SEQ ID NO: 97493 - DNA, 25 bp, probe
tatcctactcttcatgggctattcc

SEQ ID NO: 97494 - DNA, 25 bp, probe
aaatgagtgagagagttcaggagag

SEQ ID NO: 97495 - DNA, 25 bp, probe
tgagagagttcaggagagtagcaac

SEQ ID NO: 97496 - DNA, 25 bp, probe
gtgagagagttcaggagagtagcaa

SEQ ID NO: 97497 - DNA, 25 bp, probe
gaatatcctactcttcatgggctat

SEQ ID NO: 97498 - DNA, 25 bp, probe
aacaaatgagtgagagagttcagga

SEQ ID NO: 97499 - DNA, 25 bp, probe
caaatgagtgagagagttcaggaga

SEQ ID NO: 97500 - DNA, 25 bp, probe
cattacctggctcactaactaacgt

SEQ ID NO: 97501 - DNA, 25 bp, probe
gagtgagagagttcaggagagtagc

SEQ ID NO: 97502 - DNA, 25 bp, probe
attacttacacgccaagtcaatcat

SEQ ID NO: 97503 - DNA, 25 bp, probe
aatgttgaatgtgacagcacctaca

SEQ ID NO: 97504 - DNA, 25 bp, probe
cttacagaaatctccaggacctcag

SEQ ID NO: 97505 - DNA, 25 bp, probe
aatatcctactcttcatgggctatt

SEQ ID NO: 97506 - DNA, 25 bp, probe
tccagcttgtatcaccatctccata

SEQ ID NO: 97507 - DNA, 25 bp, probe
gagagttcaggagagtagcaacaaa

SEQ ID NO: 97508 - DNA, 25 bp, probe
acaaatgagtgagagagttcaggag

SEQ ID NO: 97509 - DNA, 25 bp, probe
taatggttactacacatcacaggaa

SEQ ID NO: 97510 - DNA, 25 bp, probe
ggttactacacatcacaggaactta

SEQ ID NO: 97511 - DNA, 25 bp, probe
ataatggttactacacatcacagga

SEQ ID NO: 97512 - DNA, 25 bp, probe
aatggttactacacatcacaggaac

SEQ ID NO: 97513 - DNA, 25 bp, probe
ctgtaacattccatagagtgaagtg

SEQ ID NO: 97514 - DNA, 25 bp, probe
gttactacacatcacaggaacttag

SEQ ID NO: 97515 - DNA, 25 bp, probe
actgtaacattccatagagtgaagt

SEQ ID NO: 97516 - DNA, 25 bp, probe
cactgaagaactgtaacattccata

SEQ ID NO: 97517 - DNA, 25 bp, probe
attgctgaagacatacactaagaat

SEQ ID NO: 97518 - DNA, 25 bp, probe
ttgctgaagacatacactaagaatt

SEQ ID NO: 97519 - DNA, 25 bp, probe
agaactgtaacattccatagagtga

SEQ ID NO: 97520 - DNA, 25 bp, probe
atggttactacacatcacaggaact

SEQ ID NO: 97521 - DNA, 25 bp, probe
actgaagaactgtaacattccatag

SEQ ID NO: 97522 - DNA, 25 bp, probe
acactgaagaactgtaacattccat

SEQ ID NO: 97523 - DNA, 25 bp, probe
aattgtggtcagaattacagtatgc

SEQ ID NO: 97524 - DNA, 25 bp, probe
tggttactacacatcacaggaactt

SEQ ID NO: 97525 - DNA, 25 bp, probe
atcacactgaagaactgtaacattc

SEQ ID NO: 97526 - DNA, 25 bp, probe
tgaagaactgtaacattccatagag

SEQ ID NO: 97527 - DNA, 25 bp, probe
ctgaagaactgtaacattccataga

SEQ ID NO: 97528 - DNA, 25 bp, probe
tcacactgaagaactgtaacattcc

SEQ ID NO: 97529 - DNA, 25 bp, probe
aactgtaacattccatagagtgaag

SEQ ID NO: 97530 - DNA, 25 bp, probe
gaactgtaacattccatagagtgaa

SEQ ID NO: 97531 - DNA, 25 bp, probe
aagaactgtaacattccatagagtg

SEQ ID NO: 97532 - DNA, 25 bp, probe
tattgctgaagacatacactaagaa

SEQ ID NO: 97533 - DNA, 25 bp, probe
cacactgaagaactgtaacattcca

SEQ ID NO: 97534 - DNA, 25 bp, probe
catattgaaccacacaagtgcttaa

SEQ ID NO: 97535 - DNA, 25 bp, probe
tataatggttactacacatcacagg

SEQ ID NO: 97536 - DNA, 25 bp, probe
gaaccacacaagtgcttaattcatt

SEQ ID NO: 97537 - DNA, 25 bp, probe
attgaaccacacaagtgcttaattc

SEQ ID NO: 97538 - DNA, 25 bp, probe
gaagaactgtaacattccatagagt

SEQ ID NO: 97539 - DNA, 25 bp, probe
tattgaaccacacaagtgcttaatt

SEQ ID NO: 97540 - DNA, 25 bp, probe
aaccacacaagtgcttaattcattg

SEQ ID NO: 97541 - DNA, 25 bp, probe
atattgaaccacacaagtgcttaat

SEQ ID NO: 97542 - DNA, 25 bp, probe
gatcacactgaagaactgtaacatt

SEQ ID NO: 97543 - DNA, 25 bp, probe
atattgctgaagacatacactaaga

SEQ ID NO: 97544 - DNA, 25 bp, probe
catattgctgaagacatacactaag

SEQ ID NO: 97545 - DNA, 25 bp, probe
gtaacattccatagagtgaagtggt

SEQ ID NO: 97546 - DNA, 25 bp, probe
tgtaacattccatagagtgaagtgg

SEQ ID NO: 97547 - DNA, 25 bp, probe
taacattccatagagtgaagtggtt

SEQ ID NO: 97548 - DNA, 25 bp, probe
tcatattgctgaagacatacactaa

SEQ ID NO: 97549 - DNA, 25 bp, probe
aacattccatagagtgaagtggttc

SEQ ID NO: 97550 - DNA, 25 bp, probe
cagaatcctgtaagattgcttgtct

SEQ ID NO: 97551 - DNA, 25 bp, probe
ttactacacatcacaggaacttagt

SEQ ID NO: 97552 - DNA, 25 bp, probe
ctttagtatattcttgggtgtggct

SEQ ID NO: 97553 - DNA, 25 bp, probe
agtatctctctgcctatttattggg

SEQ ID NO: 97554 - DNA, 25 bp, probe
ataaagtgccagtttgcttagttct

SEQ ID NO: 97555 - DNA, 25 bp, probe
cataaagtgccagtttgcttagttc

SEQ ID NO: 97556 - DNA, 25 bp, probe
cggcgtgatgtcttcaataaattaa

SEQ ID NO: 97557 - DNA, 25 bp, probe
cttagttctcactgtctcctggtct

SEQ ID NO: 97558 - DNA, 25 bp, probe
taaagtgccagtttgcttagttctc

SEQ ID NO: 97559 - DNA, 25 bp, probe
ggcgtgatgtcttcaataaattaag

SEQ ID NO: 97560 - DNA, 25 bp, probe
ttagttctcactgtctcctggtctg

SEQ ID NO: 97561 - DNA, 25 bp, probe
ccataaagtgccagtttgcttagtt

SEQ ID NO: 97562 - DNA, 25 bp, probe
gcgtgatgtcttcaataaattaagt

SEQ ID NO: 97563 - DNA, 25 bp, probe
tatttaaactgttctgtgtgggtct

SEQ ID NO: 97564 - DNA, 25 bp, probe
cagtatctctctgcctatttattgg

SEQ ID NO: 97565 - DNA, 25 bp, probe
ttatttaaactgttctgtgtgggtc

SEQ ID NO: 97566 - DNA, 25 bp, probe
tttatttaaactgttctgtgtgggt

SEQ ID NO: 97567 - DNA, 25 bp, probe
gcggcgtgatgtcttcaataaatta

SEQ ID NO: 97568 - DNA, 25 bp, probe
atttaaactgttctgtgtgggtctg

SEQ ID NO: 97569 - DNA, 25 bp, probe
tttgcttagttctcactgtctcctg

SEQ ID NO: 97570 - DNA, 25 bp, probe
gtttgcttagttctcactgtctcct

SEQ ID NO: 97571 - DNA, 25 bp, probe
agtttgcttagttctcactgtctcc

SEQ ID NO: 97572 - DNA, 25 bp, probe
ttgcttagttctcactgtctcctgg

SEQ ID NO: 97573 - DNA, 25 bp, probe
aaagtgccagtttgcttagttctca

SEQ ID NO: 97574 - DNA, 25 bp, probe
gtatctctctgcctatttattgggg

SEQ ID NO: 97575 - DNA, 25 bp, probe
tagttctcactgtctcctggtctgt

SEQ ID NO: 97576 - DNA, 25 bp, probe
tatctctctgcctatttattggggt

SEQ ID NO: 97577 - DNA, 25 bp, probe
gcctatttattggggtgcctattta

SEQ ID NO: 97578 - DNA, 25 bp, probe
atttattggggtgcctatttattgg

SEQ ID NO: 97579 - DNA, 25 bp, probe
gggagagcaccttaatattattggg

SEQ ID NO: 97580 - DNA, 25 bp, probe
tttattggggtgcctatttattggg

SEQ ID NO: 97581 - DNA, 25 bp, probe
atctcagccataaagtgccagtttg

SEQ ID NO: 97582 - DNA, 25 bp, probe
aaagttatgagggtcagggcagtat

SEQ ID NO: 97583 - DNA, 25 bp, probe
gcttagttctcactgtctcctggtc

SEQ ID NO: 97584 - DNA, 25 bp, probe
gatctcagccataaagtgccagttt

SEQ ID NO: 97585 - DNA, 25 bp, probe
cctatttattggggtgcctatttat

SEQ ID NO: 97586 - DNA, 25 bp, probe
atctctctgcctatttattggggtg

SEQ ID NO: 97587 - DNA, 25 bp, probe
aagttatgagggtcagggcagtatc

SEQ ID NO: 97588 - DNA, 25 bp, probe
tttaaactgttctgtgtgggtctgg

SEQ ID NO: 97589 - DNA, 25 bp, probe
agggagagcaccttaatattattgg

SEQ ID NO: 97590 - DNA, 25 bp, probe
ggagggagagcaccttaatattatt

SEQ ID NO: 97591 - DNA, 25 bp, probe
gtttatttaaactgttctgtgtggg

SEQ ID NO: 97592 - DNA, 25 bp, probe
ggtttatttaaactgttctgtgtgg

SEQ ID NO: 97593 - DNA, 25 bp, probe
gggtttatttaaactgttctgtgtg

SEQ ID NO: 97594 - DNA, 25 bp, probe
tgcctatttattggggtgcctattt

SEQ ID NO: 97595 - DNA, 25 bp, probe
gggagggagagcaccttaatattat

SEQ ID NO: 97596 - DNA, 25 bp, probe
gagggagagcaccttaatattattg

SEQ ID NO: 97597 - DNA, 25 bp, probe
gggtgtgactcagtaaagtggattt

SEQ ID NO: 97598 - DNA, 25 bp, probe
tgggtgtgactcagtaaagtggatt

SEQ ID NO: 97599 - DNA, 25 bp, probe
ggtgtgactcagtaaagtggatttt

SEQ ID NO: 97600 - DNA, 25 bp, probe
ctgggtgtgactcagtaaagtggat

SEQ ID NO: 97601 - DNA, 25 bp, probe
gactctcacggtgacatgtttacag

SEQ ID NO: 97602 - DNA, 25 bp, probe
ggactctcacggtgacatgtttaca

SEQ ID NO: 97603 - DNA, 25 bp, probe
ctctcacggtgacatgtttacagct

SEQ ID NO: 97604 - DNA, 25 bp, probe
actctcacggtgacatgtttacagc

SEQ ID NO: 97605 - DNA, 25 bp, probe
gggactctcacggtgacatgtttac

SEQ ID NO: 97606 - DNA, 25 bp, probe
agttagaatgtgaggaaggaatgaa

SEQ ID NO: 97607 - DNA, 25 bp, probe
aagttagaatgtgaggaaggaatga

SEQ ID NO: 97608 - DNA, 25 bp, probe
caagttagaatgtgaggaaggaatg

SEQ ID NO: 97609 - DNA, 25 bp, probe
gttagaatgtgaggaaggaatgaac

SEQ ID NO: 97610 - DNA, 25 bp, probe
aacaagttagaatgtgaggaaggaa

SEQ ID NO: 97611 - DNA, 25 bp, probe
ttagaatgtgaggaaggaatgaaca

SEQ ID NO: 97612 - DNA, 25 bp, probe
acaagttagaatgtgaggaaggaat

SEQ ID NO: 97613 - DNA, 25 bp, probe
taacaagttagaatgtgaggaagga

SEQ ID NO: 97614 - DNA, 25 bp, probe
catagtccatacctgagtgctgtac

SEQ ID NO: 97615 - DNA, 25 bp, probe
gtacatagtccatacctgagtgctg

SEQ ID NO: 97616 - DNA, 25 bp, probe
ctaacaagttagaatgtgaggaagg

SEQ ID NO: 97617 - DNA, 25 bp, probe
acatagtccatacctgagtgctgta

SEQ ID NO: 97618 - DNA, 25 bp, probe
tacatagtccatacctgagtgctgt

SEQ ID NO: 97619 - DNA, 25 bp, probe
tagaatgtgaggaaggaatgaacat

SEQ ID NO: 97620 - DNA, 25 bp, probe
ctcagaggtgcttgtaaatgtcttg

SEQ ID NO: 97621 - DNA, 25 bp, probe
gtgaggaaggaatgaacatgagtgt

SEQ ID NO: 97622 - DNA, 25 bp, probe
tgtgaggaaggaatgaacatgagtg

SEQ ID NO: 97623 - DNA, 25 bp, probe
aaacgcctcttgtattgtcatgtac

SEQ ID NO: 97624 - DNA, 25 bp, probe
aatgtgaggaaggaatgaacatgag

SEQ ID NO: 97625 - DNA, 25 bp, probe
gaatgtgaggaaggaatgaacatga

SEQ ID NO: 97626 - DNA, 25 bp, probe
agaatgtgaggaaggaatgaacatg

SEQ ID NO: 97627 - DNA, 25 bp, probe
caaacgcctcttgtattgtcatgta

SEQ ID NO: 97628 - DNA, 25 bp, probe
atacctgagtgctgtacataagttg

SEQ ID NO: 97629 - DNA, 25 bp, probe
catacctgagtgctgtacataagtt

SEQ ID NO: 97630 - DNA, 25 bp, probe
cttaatttatatagtgaccaccgtg

SEQ ID NO: 97631 - DNA, 25 bp, probe
atgtgaggaaggaatgaacatgagt

SEQ ID NO: 97632 - DNA, 25 bp, probe
tcttaatttatatagtgaccaccgt

SEQ ID NO: 97633 - DNA, 25 bp, probe
tcagaggtgcttgtaaatgtcttgg

SEQ ID NO: 97634 - DNA, 25 bp, probe
tccatacctgagtgctgtacataag

SEQ ID NO: 97635 - DNA, 25 bp, probe
gaatgggctaacacaggagatgatg

SEQ ID NO: 97636 - DNA, 25 bp, probe
gaggtgcttgtaaatgtcttgggaa

SEQ ID NO: 97637 - DNA, 25 bp, probe
ttgtaaatgtcttgggaagaggttt

SEQ ID NO: 97638 - DNA, 25 bp, probe
taaatgtcttgggaagaggtttctg

SEQ ID NO: 97639 - DNA, 25 bp, probe
gtaaatgtcttgggaagaggtttct

SEQ ID NO: 97640 - DNA, 25 bp, probe
ccatacctgagtgctgtacataagt

SEQ ID NO: 97641 - DNA, 25 bp, probe
gtccatacctgagtgctgtacataa

SEQ ID NO: 97642 - DNA, 25 bp, probe
tgtaaatgtcttgggaagaggtttc

SEQ ID NO: 97643 - DNA, 25 bp, probe
cttgtaaatgtcttgggaagaggtt

SEQ ID NO: 97644 - DNA, 25 bp, probe
ctgagtgctgtacataagttgttct

SEQ ID NO: 97645 - DNA, 25 bp, probe
aggtgcttgtaaatgtcttgggaag

SEQ ID NO: 97646 - DNA, 25 bp, probe
taccttttccacctctcattgtttt

SEQ ID NO: 97647 - DNA, 25 bp, probe
ttaccttttccacctctcattgttt

SEQ ID NO: 97648 - DNA, 25 bp, probe
ttgtatgttaccttttccacctctc

SEQ ID NO: 97649 - DNA, 25 bp, probe
gagtgctgtacataagttgttctgt

SEQ ID NO: 97650 - DNA, 25 bp, probe
tgctcctagaagtcttaattgtgtt

SEQ ID NO: 97651 - DNA, 25 bp, probe
atgctcctagaagtcttaattgtgt

SEQ ID NO: 97652 - DNA, 25 bp, probe
aatgctcctagaagtcttaattgtg

SEQ ID NO: 97653 - DNA, 25 bp, probe
gcactaagacaagaacattctctca

SEQ ID NO: 97654 - DNA, 25 bp, probe
cactaagacaagaacattctctcat

SEQ ID NO: 97655 - DNA, 25 bp, probe
ttggaggtgcttgatctatctacaa

SEQ ID NO: 97656 - DNA, 25 bp, probe
gcatggaagtaattaaggtacatca

SEQ ID NO: 97657 - DNA, 25 bp, probe
tgtgtgcatggaagtaattaaggta

SEQ ID NO: 97658 - DNA, 25 bp, probe
gtgtgcatggaagtaattaaggtac

SEQ ID NO: 97659 - DNA, 25 bp, probe
ctgtctgtatctttggttatcctgt

SEQ ID NO: 97660 - DNA, 25 bp, probe
actgtctgtatctttggttatcctg

SEQ ID NO: 97661 - DNA, 25 bp, probe
cttctatttagccagcgtttattgt

SEQ ID NO: 97662 - DNA, 25 bp, probe
acttctatttagccagcgtttattg

SEQ ID NO: 97663 - DNA, 25 bp, probe
cacttctatttagccagcgtttatt

SEQ ID NO: 97664 - DNA, 25 bp, probe
tcaaggtaacaagagtatgtggcaa

SEQ ID NO: 97665 - DNA, 25 bp, probe
tgtctgtatctttggttatcctgtt

SEQ ID NO: 97666 - DNA, 25 bp, probe
cctacctagctgcatctataatgtc

SEQ ID NO: 97667 - DNA, 25 bp, probe
ctatttagccagcgtttattgtagt

SEQ ID NO: 97668 - DNA, 25 bp, probe
ttgtgtgcatggaagtaattaaggt

SEQ ID NO: 97669 - DNA, 25 bp, probe
cttgtgtgcatggaagtaattaagg

SEQ ID NO: 97670 - DNA, 25 bp, probe
ctacctagctgcatctataatgtca

SEQ ID NO: 97671 - DNA, 25 bp, probe
atgcactaagacaagaacattctct

SEQ ID NO: 97672 - DNA, 25 bp, probe
tctatttagccagcgtttattgtag

SEQ ID NO: 97673 - DNA, 25 bp, probe
tgctcactgtgtataggaatttgta

SEQ ID NO: 97674 - DNA, 25 bp, probe
tgcatctataatgtcagcttatcct

SEQ ID NO: 97675 - DNA, 25 bp, probe
gtgcatggaagtaattaaggtacat

SEQ ID NO: 97676 - DNA, 25 bp, probe
aacactcagcagacatttatctttg

SEQ ID NO: 97677 - DNA, 25 bp, probe
ctgtatctttggttatcctgtttga

SEQ ID NO: 97678 - DNA, 25 bp, probe
tctgtatctttggttatcctgtttg

SEQ ID NO: 97679 - DNA, 25 bp, probe
gtctgtatctttggttatcctgttt

SEQ ID NO: 97680 - DNA, 25 bp, probe
atttagccagcgtttattgtagtaa

SEQ ID NO: 97681 - DNA, 25 bp, probe
tgcactaagacaagaacattctctc

SEQ ID NO: 97682 - DNA, 25 bp, probe
tcagatggtgtcatttagtaaggat

SEQ ID NO: 97683 - DNA, 25 bp, probe
atcagatggtgtcatttagtaagga

SEQ ID NO: 97684 - DNA, 25 bp, probe
taagtaacgtgctcactgtgtatag

SEQ ID NO: 97685 - DNA, 25 bp, probe
ttaagtaacgtgctcactgtgtata

SEQ ID NO: 97686 - DNA, 25 bp, probe
tgcatggaagtaattaaggtacatc

SEQ ID NO: 97687 - DNA, 25 bp, probe
cgcagtctcttagaatttgtttcat

SEQ ID NO: 97688 - DNA, 25 bp, probe
catcgcagtctcttagaatttgttt

SEQ ID NO: 97689 - DNA, 25 bp, probe
tactgtctgtatctttggttatcct

SEQ ID NO: 97690 - DNA, 25 bp, probe
atcgcagtctcttagaatttgtttc

SEQ ID NO: 97691 - DNA, 25 bp, probe
ctcaaggtaacaagagtatgtggca

SEQ ID NO: 97692 - DNA, 25 bp, probe
aaacactcagcagacatttatcttt

SEQ ID NO: 97693 - DNA, 25 bp, probe
aacaccttctgctatgaaatcttcc

SEQ ID NO: 97694 - DNA, 25 bp, probe
aatggaagcgtgttacttacaaaga

SEQ ID NO: 97695 - DNA, 25 bp, probe
atggaagcgtgttacttacaaagag

SEQ ID NO: 97696 - DNA, 25 bp, probe
gtgttacttacaaagaggtgctcag

SEQ ID NO: 97697 - DNA, 25 bp, probe
gaagcgtgttacttacaaagaggtg

SEQ ID NO: 97698 - DNA, 25 bp, probe
ctgaactttctggacaagacctctg

SEQ ID NO: 97699 - DNA, 25 bp, probe
ttacttacaaagaggtgctcagctt

SEQ ID NO: 97700 - DNA, 25 bp, probe
cgtgttacttacaaagaggtgctca

SEQ ID NO: 97701 - DNA, 25 bp, probe
ggaagcgtgttacttacaaagaggt

SEQ ID NO: 97702 - DNA, 25 bp, probe
tggaagcgtgttacttacaaagagg

SEQ ID NO: 97703 - DNA, 25 bp, probe
tgttacttacaaagaggtgctcagc

SEQ ID NO: 97704 - DNA, 25 bp, probe
tacttacaaagaggtgctcagcttc

SEQ ID NO: 97705 - DNA, 25 bp, probe
gttacttacaaagaggtgctcagct

SEQ ID NO: 97706 - DNA, 25 bp, probe
cctgaactttctggacaagacctct

SEQ ID NO: 97707 - DNA, 25 bp, probe
aagcgtgttacttacaaagaggtgc

SEQ ID NO: 97708 - DNA, 25 bp, probe
tgaactttctggacaagacctctgg

SEQ ID NO: 97709 - DNA, 25 bp, probe
acctgaactttctggacaagacctc

SEQ ID NO: 97710 - DNA, 25 bp, probe
ttacaaagaggtgctcagcttcaag

SEQ ID NO: 97711 - DNA, 25 bp, probe
cttacaaagaggtgctcagcttcaa

SEQ ID NO: 97712 - DNA, 25 bp, probe
cacctgaactttctggacaagacct

SEQ ID NO: 97713 - DNA, 25 bp, probe
gcgtgttacttacaaagaggtgctc

SEQ ID NO: 97714 - DNA, 25 bp, probe
gaaatagacccttttgtagctccct

SEQ ID NO: 97715 - DNA, 25 bp, probe
aaatagacccttttgtagctccctg

SEQ ID NO: 97716 - DNA, 25 bp, probe
gagcacctgaactttctggacaaga

SEQ ID NO: 97717 - DNA, 25 bp, probe
agcacctgaactttctggacaagac

SEQ ID NO: 97718 - DNA, 25 bp, probe
acttacaaagaggtgctcagcttca

SEQ ID NO: 97719 - DNA, 25 bp, probe
atagacccttttgtagctccctgaa

SEQ ID NO: 97720 - DNA, 25 bp, probe
aatagacccttttgtagctccctga

SEQ ID NO: 97721 - DNA, 25 bp, probe
aggaaatagacccttttgtagctcc

SEQ ID NO: 97722 - DNA, 25 bp, probe
tagacccttttgtagctccctgaaa

SEQ ID NO: 97723 - DNA, 25 bp, probe
atcatggaggagcacctgaactttc

SEQ ID NO: 97724 - DNA, 25 bp, probe
ggaaatagacccttttgtagctccc

SEQ ID NO: 97725 - DNA, 25 bp, probe
catcatggaggagcacctgaacttt

SEQ ID NO: 97726 - DNA, 25 bp, probe
agcgtgttacttacaaagaggtgct

SEQ ID NO: 97727 - DNA, 25 bp, probe
tggaaggaaatagacccttttgtag

SEQ ID NO: 97728 - DNA, 25 bp, probe
ctggaaggaaatagacccttttgta

SEQ ID NO: 97729 - DNA, 25 bp, probe
ggaaggaaatagacccttttgtagc

SEQ ID NO: 97730 - DNA, 25 bp, probe
aaggaaatagacccttttgtagctc

SEQ ID NO: 97731 - DNA, 25 bp, probe
gaaggaaatagacccttttgtagct

SEQ ID NO: 97732 - DNA, 25 bp, probe
agacccttttgtagctccctgaaaa

SEQ ID NO: 97733 - DNA, 25 bp, probe
gctggaaggaaatagacccttttgt

SEQ ID NO: 97734 - DNA, 25 bp, probe
gtggctggaaggaaatagacccttt

SEQ ID NO: 97735 - DNA, 25 bp, probe
ggctggaaggaaatagacccttttg

SEQ ID NO: 97736 - DNA, 25 bp, probe
tggctggaaggaaatagaccctttt

SEQ ID NO: 97737 - DNA, 25 bp, probe
ttcaggagaatctacacgcatgtat

SEQ ID NO: 97738 - DNA, 25 bp, probe
tcaggagaatctacacgcatgtatg

SEQ ID NO: 97739 - DNA, 25 bp, probe
cttcaggagaatctacacgcatgta

SEQ ID NO: 97740 - DNA, 25 bp, probe
ccttcaggagaatctacacgcatgt

SEQ ID NO: 97741 - DNA, 25 bp, probe
caggagaatctacacgcatgtatgc

SEQ ID NO: 97742 - DNA, 25 bp, probe
aaagggagaggtctcagtggttaga

SEQ ID NO: 97743 - DNA, 25 bp, probe
caaagggagaggtctcagtggttag

SEQ ID NO: 97744 - DNA, 25 bp, probe
tcaaagggagaggtctcagtggtta

SEQ ID NO: 97745 - DNA, 25 bp, probe
aggagaatctacacgcatgtatgca

SEQ ID NO: 97746 - DNA, 25 bp, probe
aagggagaggtctcagtggttagag

SEQ ID NO: 97747 - DNA, 25 bp, probe
caaccaccaggtgtcaaatgagaaa

SEQ ID NO: 97748 - DNA, 25 bp, probe
gagaatctacacgcatgtatgcatg

SEQ ID NO: 97749 - DNA, 25 bp, probe
ggagaatctacacgcatgtatgcat

SEQ ID NO: 97750 - DNA, 25 bp, probe
aaccaccaggtgtcaaatgagaaaa

SEQ ID NO: 97751 - DNA, 25 bp, probe
acaaccaccaggtgtcaaatgagaa

SEQ ID NO: 97752 - DNA, 25 bp, probe
accaggtgtcaaatgagaaaagctg

SEQ ID NO: 97753 - DNA, 25 bp, probe
accaccaggtgtcaaatgagaaaag

SEQ ID NO: 97754 - DNA, 25 bp, probe
caccaggtgtcaaatgagaaaagct

SEQ ID NO: 97755 - DNA, 25 bp, probe
caaatgagaaaagctgcctggagtc

SEQ ID NO: 97756 - DNA, 25 bp, probe
gtcaaatgagaaaagctgcctggag

SEQ ID NO: 97757 - DNA, 25 bp, probe
aatgagaaaagctgcctggagtctt

SEQ ID NO: 97758 - DNA, 25 bp, probe
aaatgagaaaagctgcctggagtct

SEQ ID NO: 97759 - DNA, 25 bp, probe
tcaaatgagaaaagctgcctggagt

SEQ ID NO: 97760 - DNA, 25 bp, probe
gtgtcaaatgagaaaagctgcctgg

SEQ ID NO: 97761 - DNA, 25 bp, probe
ggtgtcaaatgagaaaagctgcctg

SEQ ID NO: 97762 - DNA, 25 bp, probe
tgtcaaatgagaaaagctgcctgga

SEQ ID NO: 97763 - DNA, 25 bp, probe
ccaccaggtgtcaaatgagaaaagc

SEQ ID NO: 97764 - DNA, 25 bp, probe
atgagaaaagctgcctggagtcttg

SEQ ID NO: 97765 - DNA, 25 bp, probe
caggtgtcaaatgagaaaagctgcc

SEQ ID NO: 97766 - DNA, 25 bp, probe
ccaggtgtcaaatgagaaaagctgc

SEQ ID NO: 97767 - DNA, 25 bp, probe
agactcaaagggagaggtctcagtg

SEQ ID NO: 97768 - DNA, 25 bp, probe
aggatggagctgatccagtaacctc

SEQ ID NO: 97769 - DNA, 25 bp, probe
aggtgtcaaatgagaaaagctgcct

SEQ ID NO: 97770 - DNA, 25 bp, probe
gacaaccaccaggtgtcaaatgaga

SEQ ID NO: 97771 - DNA, 25 bp, probe
ccaactgtgaatctgtaaataaggc

SEQ ID NO: 97772 - DNA, 25 bp, probe
cccaactgtgaatctgtaaataagg

SEQ ID NO: 97773 - DNA, 25 bp, probe
ccccaactgtgaatctgtaaataag

SEQ ID NO: 97774 - DNA, 25 bp, probe
caactgtgaatctgtaaataaggcc

SEQ ID NO: 97775 - DNA, 25 bp, probe
gaatctgtaaataaggcccaaggaa

SEQ ID NO: 97776 - DNA, 25 bp, probe
aatctgtaaataaggcccaaggaac

SEQ ID NO: 97777 - DNA, 25 bp, probe
tgtgaatctgtaaataaggcccaag

SEQ ID NO: 97778 - DNA, 25 bp, probe
ctgtgaatctgtaaataaggcccaa

SEQ ID NO: 97779 - DNA, 25 bp, probe
aactgtgaatctgtaaataaggccc

SEQ ID NO: 97780 - DNA, 25 bp, probe
tgaatctgtaaataaggcccaagga

SEQ ID NO: 97781 - DNA, 25 bp, probe
gtgaatctgtaaataaggcccaagg

SEQ ID NO: 97782 - DNA, 25 bp, probe
actgtgaatctgtaaataaggccca

SEQ ID NO: 97783 - DNA, 25 bp, probe
ctgtaaataaggcccaaggaacatg

SEQ ID NO: 97784 - DNA, 25 bp, probe
tctgtaaataaggcccaaggaacat

SEQ ID NO: 97785 - DNA, 25 bp, probe
atctgtaaataaggcccaaggaaca

SEQ ID NO: 97786 - DNA, 25 bp, probe
gtaaataaggcccaaggaacatgtc

SEQ ID NO: 97787 - DNA, 25 bp, probe
ggggagctgtttctattttatttat

SEQ ID NO: 97788 - DNA, 25 bp, probe
tgtaaataaggcccaaggaacatgt

SEQ ID NO: 97789 - DNA, 25 bp, probe
taaataaggcccaaggaacatgtcg

SEQ ID NO: 97790 - DNA, 25 bp, probe
gaccttctgtacggatttgctctcc

SEQ ID NO: 97791 - DNA, 25 bp, probe
gggagctgtttctattttatttatt

SEQ ID NO: 97792 - DNA, 25 bp, probe
tttctaccgtccttgtcataacttt

SEQ ID NO: 97793 - DNA, 25 bp, probe
ttctaccgtccttgtcataactttg

SEQ ID NO: 97794 - DNA, 25 bp, probe
aaatgggaagatacgaagaaagttt

SEQ ID NO: 97795 - DNA, 25 bp, probe
ctaccgtccttgtcataactttgtg

SEQ ID NO: 97796 - DNA, 25 bp, probe
tctaccgtccttgtcataactttgt

SEQ ID NO: 97797 - DNA, 25 bp, probe
aatgggaagatacgaagaaagtttc

SEQ ID NO: 97798 - DNA, 25 bp, probe
ctgtcaccaccaaactcaatcattt

SEQ ID NO: 97799 - DNA, 25 bp, probe
taccgtccttgtcataactttgtgt

SEQ ID NO: 97800 - DNA, 25 bp, probe
gtcataactttgtgttggagggaac

SEQ ID NO: 97801 - DNA, 25 bp, probe
cttgtcataactttgtgttggaggg

SEQ ID NO: 97802 - DNA, 25 bp, probe
tgtcataactttgtgttggagggaa

SEQ ID NO: 97803 - DNA, 25 bp, probe
ttgtcataactttgtgttggaggga

SEQ ID NO: 97804 - DNA, 25 bp, probe
tccttgtcataactttgtgttggag

SEQ ID NO: 97805 - DNA, 25 bp, probe
cgtccttgtcataactttgtgttgg

SEQ ID NO: 97806 - DNA, 25 bp, probe
ccgtccttgtcataactttgtgttg

SEQ ID NO: 97807 - DNA, 25 bp, probe
gtccttgtcataactttgtgttgga

SEQ ID NO: 97808 - DNA, 25 bp, probe
ttggcaatttggagagacaggattt

SEQ ID NO: 97809 - DNA, 25 bp, probe
ccttgtcataactttgtgttggagg

SEQ ID NO: 97810 - DNA, 25 bp, probe
accgtccttgtcataactttgtgtt

SEQ ID NO: 97811 - DNA, 25 bp, probe
tcataactttgtgttggagggaacc

SEQ ID NO: 97812 - DNA, 25 bp, probe
ttttctaccgtccttgtcataactt

SEQ ID NO: 97813 - DNA, 25 bp, probe
caaaatgggaagatacgaagaaagt

SEQ ID NO: 97814 - DNA, 25 bp, probe
tcaaaatgggaagatacgaagaaag

SEQ ID NO: 97815 - DNA, 25 bp, probe
tgcttggaggggttcttaaattata

SEQ ID NO: 97816 - DNA, 25 bp, probe
aaaatgggaagatacgaagaaagtt

SEQ ID NO: 97817 - DNA, 25 bp, probe
gttggcaatttggagagacaggatt

SEQ ID NO: 97818 - DNA, 25 bp, probe
catcaaaatgggaagatacgaagaa

SEQ ID NO: 97819 - DNA, 25 bp, probe
gtgcttggaggggttcttaaattat

SEQ ID NO: 97820 - DNA, 25 bp, probe
atcaaaatgggaagatacgaagaaa

SEQ ID NO: 97821 - DNA, 25 bp, probe
tgtcaccaccaaactcaatcatttt

SEQ ID NO: 97822 - DNA, 25 bp, probe
ataactttgtgttggagggaacctg

SEQ ID NO: 97823 - DNA, 25 bp, probe
cataactttgtgttggagggaacct

SEQ ID NO: 97824 - DNA, 25 bp, probe
gcttggaggggttcttaaattatat

SEQ ID NO: 97825 - DNA, 25 bp, probe
tggcaatttggagagacaggatttg

SEQ ID NO: 97826 - DNA, 25 bp, probe
ttctgccataataggaggggaaaat

SEQ ID NO: 97827 - DNA, 25 bp, probe
tctgccataataggaggggaaaatc

SEQ ID NO: 97828 - DNA, 25 bp, probe
gctgtcaccaccaaactcaatcatt

SEQ ID NO: 97829 - DNA, 25 bp, probe
gttggagggaacctgtttcactatg

SEQ ID NO: 97830 - DNA, 25 bp, probe
ctgccataataggaggggaaaatca

SEQ ID NO: 97831 - DNA, 25 bp, probe
tgccataataggaggggaaaatcac

SEQ ID NO: 97832 - DNA, 25 bp, probe
gttctgccataataggaggggaaaa

SEQ ID NO: 97833 - DNA, 25 bp, probe
tgttggagggaacctgtttcactat

SEQ ID NO: 97834 - DNA, 25 bp, probe
agttggcaatttggagagacaggat

SEQ ID NO: 97835 - DNA, 25 bp, probe
gcaatttggagagacaggatttggg

SEQ ID NO: 97836 - DNA, 25 bp, probe
atccaaataaagtgacattcccaaa

SEQ ID NO: 97837 - DNA, 25 bp, probe
aatccaaataaagtgacattcccaa

SEQ ID NO: 97838 - DNA, 25 bp, probe
tccaaataaagtgacattcccaaaa

SEQ ID NO: 97839 - DNA, 25 bp, probe
gtgccttagtgtctacttgcaggac

SEQ ID NO: 97840 - DNA, 25 bp, probe
cagagcaagacaataacatcacaag

SEQ ID NO: 97841 - DNA, 25 bp, probe
acagagcaagacaataacatcacaa

SEQ ID NO: 97842 - DNA, 25 bp, probe
agacacagagcaagacaataacatc

SEQ ID NO: 97843 - DNA, 25 bp, probe
gacacagagcaagacaataacatca

SEQ ID NO: 97844 - DNA, 25 bp, probe
cagacacagagcaagacaataacat

SEQ ID NO: 97845 - DNA, 25 bp, probe
gagattctgttcagcattcactaac

SEQ ID NO: 97846 - DNA, 25 bp, probe
cacagagcaagacaataacatcaca

SEQ ID NO: 97847 - DNA, 25 bp, probe
acacagagcaagacaataacatcac

SEQ ID NO: 97848 - DNA, 25 bp, probe
aacagacacagagcaagacaataac

SEQ ID NO: 97849 - DNA, 25 bp, probe
tgagattctgttcagcattcactaa

SEQ ID NO: 97850 - DNA, 25 bp, probe
agattctgttcagcattcactaacc

SEQ ID NO: 97851 - DNA, 25 bp, probe
agagcaagacaataacatcacaagc

SEQ ID NO: 97852 - DNA, 25 bp, probe
acagacacagagcaagacaataaca

SEQ ID NO: 97853 - DNA, 25 bp, probe
catccttgttggagtaagacagtaa

SEQ ID NO: 97854 - DNA, 25 bp, probe
gcaagacaataacatcacaagctaa

SEQ ID NO: 97855 - DNA, 25 bp, probe
acatccttgttggagtaagacagta

SEQ ID NO: 97856 - DNA, 25 bp, probe
tggagtaagacagtaaatatcagcc

SEQ ID NO: 97857 - DNA, 25 bp, probe
ggagtaagacagtaaatatcagcct

SEQ ID NO: 97858 - DNA, 25 bp, probe
aaacagacacagagcaagacaataa

SEQ ID NO: 97859 - DNA, 25 bp, probe
ttgtggttctttctcttcctaagtt

SEQ ID NO: 97860 - DNA, 25 bp, probe
tttgtggttctttctcttcctaagt

SEQ ID NO: 97861 - DNA, 25 bp, probe
gtaagacagtaaatatcagccttgc

SEQ ID NO: 97862 - DNA, 25 bp, probe
tgtggttctttctcttcctaagttc

SEQ ID NO: 97863 - DNA, 25 bp, probe
gatttgtggttctttctcttcctaa

SEQ ID NO: 97864 - DNA, 25 bp, probe
cctcttgggatgtcagaaatctaaa

SEQ ID NO: 97865 - DNA, 25 bp, probe
agatttgtggttctttctcttccta

SEQ ID NO: 97866 - DNA, 25 bp, probe
tagatttgtggttctttctcttcct

SEQ ID NO: 97867 - DNA, 25 bp, probe
gttctttctcttcctaagttcccag

SEQ ID NO: 97868 - DNA, 25 bp, probe
gtggttctttctcttcctaagttcc

SEQ ID NO: 97869 - DNA, 25 bp, probe
atttgtggttctttctcttcctaag

SEQ ID NO: 97870 - DNA, 25 bp, probe
aattgcctagatttgtggttctttc

SEQ ID NO: 97871 - DNA, 25 bp, probe
cctacataggattctcagtgctctg

SEQ ID NO: 97872 - DNA, 25 bp, probe
ttggagtaagacagtaaatatcagc

SEQ ID NO: 97873 - DNA, 25 bp, probe
attgcctagatttgtggttctttct

SEQ ID NO: 97874 - DNA, 25 bp, probe
ctagatttgtggttctttctcttcc

SEQ ID NO: 97875 - DNA, 25 bp, probe
cctagatttgtggttctttctcttc

SEQ ID NO: 97876 - DNA, 25 bp, probe
agtaagacagtaaatatcagccttg

SEQ ID NO: 97877 - DNA, 25 bp, probe
gcctagatttgtggttctttctctt

SEQ ID NO: 97878 - DNA, 25 bp, probe
ttgcctagatttgtggttctttctc

SEQ ID NO: 97879 - DNA, 25 bp, probe
ttagcattcactaagccctacatag

SEQ ID NO: 97880 - DNA, 25 bp, probe
actaaccctgtttagcattcactaa

SEQ ID NO: 97881 - DNA, 25 bp, probe
cattcactaaccctgtttagcattc

SEQ ID NO: 97882 - DNA, 25 bp, probe
attcactaaccctgtttagcattca

SEQ ID NO: 97883 - DNA, 25 bp, probe
tcaccaaaggagcaaagaggataaa

SEQ ID NO: 97884 - DNA, 25 bp, probe
ttaaccttttatcctgtgtctctcc

SEQ ID NO: 97885 - DNA, 25 bp, probe
taaccttttatcctgtgtctctccc

SEQ ID NO: 97886 - DNA, 25 bp, probe
tttaaccttttatcctgtgtctctc

SEQ ID NO: 97887 - DNA, 25 bp, probe
acttttaaccttttatcctgtgtct

SEQ ID NO: 97888 - DNA, 25 bp, probe
ttttaaccttttatcctgtgtctct

SEQ ID NO: 97889 - DNA, 25 bp, probe
cttttaaccttttatcctgtgtctc

SEQ ID NO: 97890 - DNA, 25 bp, probe
gcacttttaaccttttatcctgtgt

SEQ ID NO: 97891 - DNA, 25 bp, probe
cctctgcacttttaaccttttatcc

SEQ ID NO: 97892 - DNA, 25 bp, probe
ctgcacttttaaccttttatcctgt

SEQ ID NO: 97893 - DNA, 25 bp, probe
tctgcacttttaaccttttatcctg

SEQ ID NO: 97894 - DNA, 25 bp, probe
cacttttaaccttttatcctgtgtc

SEQ ID NO: 97895 - DNA, 25 bp, probe
gcctctgcacttttaaccttttatc

SEQ ID NO: 97896 - DNA, 25 bp, probe
ctctgcacttttaaccttttatcct

SEQ ID NO: 97897 - DNA, 25 bp, probe
tgcacttttaaccttttatcctgtg

SEQ ID NO: 97898 - DNA, 25 bp, probe
aaccttttatcctgtgtctctcccg

SEQ ID NO: 97899 - DNA, 25 bp, probe
ccttttatcctgtgtctctcccgtc

SEQ ID NO: 97900 - DNA, 25 bp, probe
tgcctctgcacttttaaccttttat

SEQ ID NO: 97901 - DNA, 25 bp, probe
ctgcctctgcacttttaacctttta

SEQ ID NO: 97902 - DNA, 25 bp, probe
cttttatcctgtgtctctcccgtcg

SEQ ID NO: 97903 - DNA, 25 bp, probe
accttttatcctgtgtctctcccgt

SEQ ID NO: 97904 - DNA, 25 bp, probe
tctgcctctgcacttttaacctttt

SEQ ID NO: 97905 - DNA, 25 bp, probe
ctctgcctggccgtgtctaataaaa

SEQ ID NO: 97906 - DNA, 25 bp, probe
aacatagagcagtacattcacgatc

SEQ ID NO: 97907 - DNA, 25 bp, probe
caacatagagcagtacattcacgat

SEQ ID NO: 97908 - DNA, 25 bp, probe
acatagagcagtacattcacgatct

SEQ ID NO: 97909 - DNA, 25 bp, probe
cagcaacatagagcagtacattcac

SEQ ID NO: 97910 - DNA, 25 bp, probe
catagagcagtacattcacgatctg

SEQ ID NO: 97911 - DNA, 25 bp, probe
gctcacagaaggaccacatttatat

SEQ ID NO: 97912 - DNA, 25 bp, probe
ctcacagaaggaccacatttatatt

SEQ ID NO: 97913 - DNA, 25 bp, probe
atagagcagtacattcacgatctgg

SEQ ID NO: 97914 - DNA, 25 bp, probe
tgctcacagaaggaccacatttata

SEQ ID NO: 97915 - DNA, 25 bp, probe
taacaggacgtattatctgatggac

SEQ ID NO: 97916 - DNA, 25 bp, probe
ctaacaggacgtattatctgatgga

SEQ ID NO: 97917 - DNA, 25 bp, probe
cctaacaggacgtattatctgatgg

SEQ ID NO: 97918 - DNA, 25 bp, probe
gcaacatagagcagtacattcacga

SEQ ID NO: 97919 - DNA, 25 bp, probe
agcaacatagagcagtacattcacg

SEQ ID NO: 97920 - DNA, 25 bp, probe
gcctaacaggacgtattatctgatg

SEQ ID NO: 97921 - DNA, 25 bp, probe
ttgctcacagaaggaccacatttat

SEQ ID NO: 97922 - DNA, 25 bp, probe
tagagcagtacattcacgatctgga

SEQ ID NO: 97923 - DNA, 25 bp, probe
gtggataagcggaagggtttatttg

SEQ ID NO: 97924 - DNA, 25 bp, probe
agtggataagcggaagggtttattt

SEQ ID NO: 97925 - DNA, 25 bp, probe
gcagcaacatagagcagtacattca

SEQ ID NO: 97926 - DNA, 25 bp, probe
aacaggacgtattatctgatggacc

SEQ ID NO: 97927 - DNA, 25 bp, probe
tcacagaaggaccacatttatatta

SEQ ID NO: 97928 - DNA, 25 bp, probe
cgcctaacaggacgtattatctgat

SEQ ID NO: 97929 - DNA, 25 bp, probe
cagtggataagcggaagggtttatt

SEQ ID NO: 97930 - DNA, 25 bp, probe
ggcagcaacatagagcagtacattc

SEQ ID NO: 97931 - DNA, 25 bp, probe
gttgctcacagaaggaccacattta

SEQ ID NO: 97932 - DNA, 25 bp, probe
aaactttctttgtccacacgcctaa

SEQ ID NO: 97933 - DNA, 25 bp, probe
cacagaaggaccacatttatattat

SEQ ID NO: 97934 - DNA, 25 bp, probe
aggcagcaacatagagcagtacatt

SEQ ID NO: 97935 - DNA, 25 bp, probe
acagaaggaccacatttatattatg

SEQ ID NO: 97936 - DNA, 25 bp, probe
tggataagcggaagggtttatttgc

SEQ ID NO: 97937 - DNA, 25 bp, probe
agcagtacattcacgatctggactc

SEQ ID NO: 97938 - DNA, 25 bp, probe
gagcagtacattcacgatctggact

SEQ ID NO: 97939 - DNA, 25 bp, probe
agagcagtacattcacgatctggac

SEQ ID NO: 97940 - DNA, 25 bp, probe
ctcgaactcctttgaactggactta

SEQ ID NO: 97941 - DNA, 25 bp, probe
aactttctttgtccacacgcctaac

SEQ ID NO: 97942 - DNA, 25 bp, probe
tcgaactcctttgaactggacttac

SEQ ID NO: 97943 - DNA, 25 bp, probe
gtacattcacgatctggactcgaac

SEQ ID NO: 97944 - DNA, 25 bp, probe
gaaattccttggtcacaagaacttc

SEQ ID NO: 97945 - DNA, 25 bp, probe
tacattcacgatctggactcgaact

SEQ ID NO: 97946 - DNA, 25 bp, probe
agtacattcacgatctggactcgaa

SEQ ID NO: 97947 - DNA, 25 bp, probe
caggcagcaacatagagcagtacat

SEQ ID NO: 97948 - DNA, 25 bp, probe
tgaaattccttggtcacaagaactt

SEQ ID NO: 97949 - DNA, 25 bp, probe
tttaaaactttctttgtccacacgc

SEQ ID NO: 97950 - DNA, 25 bp, probe
gacatattcaactcctctgctcttc

SEQ ID NO: 97951 - DNA, 25 bp, probe
atattcaactcctctgctcttccaa

SEQ ID NO: 97952 - DNA, 25 bp, probe
agtctgtctcattatgtgattcctg

SEQ ID NO: 97953 - DNA, 25 bp, probe
agacatattcaactcctctgctctt

SEQ ID NO: 97954 - DNA, 25 bp, probe
gagtctgtctcattatgtgattcct

SEQ ID NO: 97955 - DNA, 25 bp, probe
tggagtctgtctcattatgtgattc

SEQ ID NO: 97956 - DNA, 25 bp, probe
ctggagtctgtctcattatgtgatt

SEQ ID NO: 97957 - DNA, 25 bp, probe
gtctgtctcattatgtgattcctgg

SEQ ID NO: 97958 - DNA, 25 bp, probe
actggagtctgtctcattatgtgat

SEQ ID NO: 97959 - DNA, 25 bp, probe
ctgtctcattatgtgattcctggag

SEQ ID NO: 97960 - DNA, 25 bp, probe
tctgtctcattatgtgattcctgga

SEQ ID NO: 97961 - DNA, 25 bp, probe
catattcaactcctctgctcttcca

SEQ ID NO: 97962 - DNA, 25 bp, probe
acatattcaactcctctgctcttcc

SEQ ID NO: 97963 - DNA, 25 bp, probe
gagacatattcaactcctctgctct

SEQ ID NO: 97964 - DNA, 25 bp, probe
ggagtctgtctcattatgtgattcc

SEQ ID NO: 97965 - DNA, 25 bp, probe
tgtctcattatgtgattcctggagc

SEQ ID NO: 97966 - DNA, 25 bp, probe
ctctgtgcagtgttacgttagatag

SEQ ID NO: 97967 - DNA, 25 bp, probe
gactggagtctgtctcattatgtga

SEQ ID NO: 97968 - DNA, 25 bp, probe
tattcaactcctctgctcttccaaa

SEQ ID NO: 97969 - DNA, 25 bp, probe
ctcattatgtgattcctggagcctg

SEQ ID NO: 97970 - DNA, 25 bp, probe
gtctcattatgtgattcctggagcc

SEQ ID NO: 97971 - DNA, 25 bp, probe
tctcattatgtgattcctggagcct

SEQ ID NO: 97972 - DNA, 25 bp, probe
cattatgtgattcctggagcctgtg

SEQ ID NO: 97973 - DNA, 25 bp, probe
tgcagtgttacgttagatagctctc

SEQ ID NO: 97974 - DNA, 25 bp, probe
gtgcagtgttacgttagatagctct

SEQ ID NO: 97975 - DNA, 25 bp, probe
tgtgcagtgttacgttagatagctc

SEQ ID NO: 97976 - DNA, 25 bp, probe
ctgtgcagtgttacgttagatagct

SEQ ID NO: 97977 - DNA, 25 bp, probe
tcattatgtgattcctggagcctgt

SEQ ID NO: 97978 - DNA, 25 bp, probe
tctgtgcagtgttacgttagatagc

SEQ ID NO: 97979 - DNA, 25 bp, probe
gctctgtgcagtgttacgttagata

SEQ ID NO: 97980 - DNA, 25 bp, probe
attcaactcctctgctcttccaaac

SEQ ID NO: 97981 - DNA, 25 bp, probe
cagtgttacgttagatagctctcgc

SEQ ID NO: 97982 - DNA, 25 bp, probe
gcagtgttacgttagatagctctcg

SEQ ID NO: 97983 - DNA, 25 bp, probe
aacagaacttcaagtcggaggtcat

SEQ ID NO: 97984 - DNA, 25 bp, probe
gcaattttcaggagacatattcaac

SEQ ID NO: 97985 - DNA, 25 bp, probe
gaacttcaagtcggaggtcatggta

SEQ ID NO: 97986 - DNA, 25 bp, probe
aacttcaagtcggaggtcatggtac

SEQ ID NO: 97987 - DNA, 25 bp, probe
tgttacgttagatagctctcgcctg

SEQ ID NO: 97988 - DNA, 25 bp, probe
gtgttacgttagatagctctcgcct

SEQ ID NO: 97989 - DNA, 25 bp, probe
agtgttacgttagatagctctcgcc

SEQ ID NO: 97990 - DNA, 25 bp, probe
attatgtgattcctggagcctgtgc

SEQ ID NO: 97991 - DNA, 25 bp, probe
acagaacttcaagtcggaggtcatg

SEQ ID NO: 97992 - DNA, 25 bp, probe
caattttcaggagacatattcaact

SEQ ID NO: 97993 - DNA, 25 bp, probe
agactggagtctgtctcattatgtg

SEQ ID NO: 97994 - DNA, 25 bp, probe
caatcaatggatggtgctgtctatg

SEQ ID NO: 97995 - DNA, 25 bp, probe
acaatcaatggatggtgctgtctat

SEQ ID NO: 97996 - DNA, 25 bp, probe
gatcatcgacctcttcaagaacatc

SEQ ID NO: 97997 - DNA, 25 bp, probe
atcatcgacctcttcaagaacatct

SEQ ID NO: 97998 - DNA, 25 bp, probe
agatcatcgacctcttcaagaacat

SEQ ID NO: 97999 - DNA, 25 bp, probe
aatcaatggatggtgctgtctatgc

SEQ ID NO: 98000 - DNA, 25 bp, probe
cagatcatcgacctcttcaagaaca

SEQ ID NO: 98001 - DNA, 25 bp, probe
catattccctacctgtcttatttca

SEQ ID NO: 98002 - DNA, 25 bp, probe
attccctacctgtcttatttcatag

SEQ ID NO: 98003 - DNA, 25 bp, probe
gtgaagcgatgtggagttagtgaac

SEQ ID NO: 98004 - DNA, 25 bp, probe
acatattccctacctgtcttatttc

SEQ ID NO: 98005 - DNA, 25 bp, probe
catcgacctcttcaagaacatcttc

SEQ ID NO: 98006 - DNA, 25 bp, probe
tcatcgacctcttcaagaacatctt

SEQ ID NO: 98007 - DNA, 25 bp, probe
atattccctacctgtcttatttcat

SEQ ID NO: 98008 - DNA, 25 bp, probe
gcagatcatcgacctcttcaagaac

SEQ ID NO: 98009 - DNA, 25 bp, probe
cgacctcttcaagaacatcttccag

SEQ ID NO: 98010 - DNA, 25 bp, probe
atcgacctcttcaagaacatcttcc

SEQ ID NO: 98011 - DNA, 25 bp, probe
tattccctacctgtcttatttcata

SEQ ID NO: 98012 - DNA, 25 bp, probe
ttccctacctgtcttatttcatagg

SEQ ID NO: 98013 - DNA, 25 bp, probe
gacctcttcaagaacatcttccagc

SEQ ID NO: 98014 - DNA, 25 bp, probe
gaagcgatgtggagttagtgaactt

SEQ ID NO: 98015 - DNA, 25 bp, probe
cgatgtggagttagtgaacttgaaa

SEQ ID NO: 98016 - DNA, 25 bp, probe
ggtgaagcgatgtggagttagtgaa

SEQ ID NO: 98017 - DNA, 25 bp, probe
aaggtgaagcgatgtggagttagtg

SEQ ID NO: 98018 - DNA, 25 bp, probe
caaggtgaagcgatgtggagttagt

SEQ ID NO: 98019 - DNA, 25 bp, probe
tgcagatcatcgacctcttcaagaa

SEQ ID NO: 98020 - DNA, 25 bp, probe
tcaaggtgaagcgatgtggagttag

SEQ ID NO: 98021 - DNA, 25 bp, probe
gcgatgtggagttagtgaacttgaa

SEQ ID NO: 98022 - DNA, 25 bp, probe
aagcgatgtggagttagtgaacttg

SEQ ID NO: 98023 - DNA, 25 bp, probe
cctgtcttatttcataggtacatga

SEQ ID NO: 98024 - DNA, 25 bp, probe
tcgacctcttcaagaacatcttcca

SEQ ID NO: 98025 - DNA, 25 bp, probe
acctcttcaagaacatcttccagct

SEQ ID NO: 98026 - DNA, 25 bp, probe
agcgatgtggagttagtgaacttga

SEQ ID NO: 98027 - DNA, 25 bp, probe
tgaagcgatgtggagttagtgaact

SEQ ID NO: 98028 - DNA, 25 bp, probe
ttcaaggtgaagcgatgtggagtta

SEQ ID NO: 98029 - DNA, 25 bp, probe
tggacatattccctacctgtcttat

SEQ ID NO: 98030 - DNA, 25 bp, probe
gacaatcaatggatggtgctgtcta

SEQ ID NO: 98031 - DNA, 25 bp, probe
ggacatattccctacctgtcttatt

SEQ ID NO: 98032 - DNA, 25 bp, probe
ctggacatattccctacctgtctta

SEQ ID NO: 98033 - DNA, 25 bp, probe
gatgtggagttagtgaacttgaaaa

SEQ ID NO: 98034 - DNA, 25 bp, probe
tccctacctgtcttatttcataggt

SEQ ID NO: 98035 - DNA, 25 bp, probe
gacatattccctacctgtcttattt

SEQ ID NO: 98036 - DNA, 25 bp, probe
actggacatattccctacctgtctt

SEQ ID NO: 98037 - DNA, 25 bp, probe
atcaatggatggtgctgtctatgca

SEQ ID NO: 98038 - DNA, 25 bp, probe
gattattacgacacgccactatgac

SEQ ID NO: 98039 - DNA, 25 bp, probe
agattattacgacacgccactatga

SEQ ID NO: 98040 - DNA, 25 bp, probe
cagattattacgacacgccactatg

SEQ ID NO: 98041 - DNA, 25 bp, probe
ccagattattacgacacgccactat

SEQ ID NO: 98042 - DNA, 25 bp, probe
attattacgacacgccactatgacc

SEQ ID NO: 98043 - DNA, 25 bp, probe
gccatttacatacccagagttatac

SEQ ID NO: 98044 - DNA, 25 bp, probe
tggaagaggaggtcaaagaaatcat

SEQ ID NO: 98045 - DNA, 25 bp, probe
gctgattgagaatttccattgtaaa

SEQ ID NO: 98046 - DNA, 25 bp, probe
gctgccgttgctaaatgatttaata

SEQ ID NO: 98047 - DNA, 25 bp, probe
ctggaagaggaggtcaaagaaatca

SEQ ID NO: 98048 - DNA, 25 bp, probe
ggaagaggaggtcaaagaaatcatg

SEQ ID NO: 98049 - DNA, 25 bp, probe
ctgccgttgctaaatgatttaataa

SEQ ID NO: 98050 - DNA, 25 bp, probe
tccattgtaaatagctcagtgttgt

SEQ ID NO: 98051 - DNA, 25 bp, probe
ttccattgtaaatagctcagtgttg

SEQ ID NO: 98052 - DNA, 25 bp, probe
ttaagtcactgggattcactaattt

SEQ ID NO: 98053 - DNA, 25 bp, probe
ccattgtaaatagctcagtgttgta

SEQ ID NO: 98054 - DNA, 25 bp, probe
agctgattgagaatttccattgtaa

SEQ ID NO: 98055 - DNA, 25 bp, probe
tttccattgtaaatagctcagtgtt

SEQ ID NO: 98056 - DNA, 25 bp, probe
tgccgttgctaaatgatttaataat

SEQ ID NO: 98057 - DNA, 25 bp, probe
ccatttacatacccagagttatact

SEQ ID NO: 98058 - DNA, 25 bp, probe
agttatactcaagcagaatgcacaa

SEQ ID NO: 98059 - DNA, 25 bp, probe
atttccattgtaaatagctcagtgt

SEQ ID NO: 98060 - DNA, 25 bp, probe
tgctttactctgtcaggtgacttaa

SEQ ID NO: 98061 - DNA, 25 bp, probe
ttgctttactctgtcaggtgactta

SEQ ID NO: 98062 - DNA, 25 bp, probe
gctggaagaggaggtcaaagaaatc

SEQ ID NO: 98063 - DNA, 25 bp, probe
aggcttttgttttgttttgttttgt

SEQ ID NO: 98064 - DNA, 25 bp, probe
ccacaatcagcatggttgtatagtg

SEQ ID NO: 98065 - DNA, 25 bp, probe
ggcttttgttttgttttgttttgtt

SEQ ID NO: 98066 - DNA, 25 bp, probe
ttcccactttgacagacacttttaa

SEQ ID NO: 98067 - DNA, 25 bp, probe
cactgggattcactaattttctctg

SEQ ID NO: 98068 - DNA, 25 bp, probe
tcactgggattcactaattttctct

SEQ ID NO: 98069 - DNA, 25 bp, probe
gtcactgggattcactaattttctc

SEQ ID NO: 98070 - DNA, 25 bp, probe
aaggcttttgttttgttttgttttg

SEQ ID NO: 98071 - DNA, 25 bp, probe
ttaactgtgttccttactgctgcca

SEQ ID NO: 98072 - DNA, 25 bp, probe
cttcccactttgacagacactttta

SEQ ID NO: 98073 - DNA, 25 bp, probe
tgtaaatagctcagtgttgtatagt

SEQ ID NO: 98074 - DNA, 25 bp, probe
agacatttgtagaatatggagacta

SEQ ID NO: 98075 - DNA, 25 bp, probe
tagacatttgtagaatatggagact

SEQ ID NO: 98076 - DNA, 25 bp, probe
cttttaactgtgttccttactgctg

SEQ ID NO: 98077 - DNA, 25 bp, probe
acttttaactgtgttccttactgct

SEQ ID NO: 98078 - DNA, 25 bp, probe
gtaaatagctcagtgttgtatagtg

SEQ ID NO: 98079 - DNA, 25 bp, probe
cattgtaaatagctcagtgttgtat

SEQ ID NO: 98080 - DNA, 25 bp, probe
ggctgccgttgctaaatgatttaat

SEQ ID NO: 98081 - DNA, 25 bp, probe
aatagctcagtgttgtatagtgagg

SEQ ID NO: 98082 - DNA, 25 bp, probe
tgatatgagcagttagaagttggaa

SEQ ID NO: 98083 - DNA, 25 bp, probe
ttgatatgagcagttagaagttgga

SEQ ID NO: 98084 - DNA, 25 bp, probe
gagcagttagaagttggaataagca

SEQ ID NO: 98085 - DNA, 25 bp, probe
tgagcagttagaagttggaataagc

SEQ ID NO: 98086 - DNA, 25 bp, probe
atgagcagttagaagttggaataag

SEQ ID NO: 98087 - DNA, 25 bp, probe
gcagttagaagttggaataagcaat

SEQ ID NO: 98088 - DNA, 25 bp, probe
gatatgagcagttagaagttggaat

SEQ ID NO: 98089 - DNA, 25 bp, probe
agcagttagaagttggaataagcaa

SEQ ID NO: 98090 - DNA, 25 bp, probe
tatgagcagttagaagttggaataa

SEQ ID NO: 98091 - DNA, 25 bp, probe
atatgagcagttagaagttggaata

SEQ ID NO: 98092 - DNA, 25 bp, probe
tgtatgtcgattgaattgtactgga

SEQ ID NO: 98093 - DNA, 25 bp, probe
ttgtatgtcgattgaattgtactgg

SEQ ID NO: 98094 - DNA, 25 bp, probe
cagttagaagttggaataagcaatt

SEQ ID NO: 98095 - DNA, 25 bp, probe
atgtcgattgaattgtactggatac

SEQ ID NO: 98096 - DNA, 25 bp, probe
gtatgtcgattgaattgtactggat

SEQ ID NO: 98097 - DNA, 25 bp, probe
atagtcaggtaaacagttggtcaag

SEQ ID NO: 98098 - DNA, 25 bp, probe
gatagtcaggtaaacagttggtcaa

SEQ ID NO: 98099 - DNA, 25 bp, probe
tttgatatgagcagttagaagttgg

SEQ ID NO: 98100 - DNA, 25 bp, probe
aaagagaagtttgatatgagcagtt

SEQ ID NO: 98101 - DNA, 25 bp, probe
tagtcaggtaaacagttggtcaaga

SEQ ID NO: 98102 - DNA, 25 bp, probe
gggtagattatgatttaggaagcaa

SEQ ID NO: 98103 - DNA, 25 bp, probe
gagaagtttgatatgagcagttaga

SEQ ID NO: 98104 - DNA, 25 bp, probe
agagaagtttgatatgagcagttag

SEQ ID NO: 98105 - DNA, 25 bp, probe
gtttgatatgagcagttagaagttg

SEQ ID NO: 98106 - DNA, 25 bp, probe
agtttgatatgagcagttagaagtt

SEQ ID NO: 98107 - DNA, 25 bp, probe
aagtttgatatgagcagttagaagt

SEQ ID NO: 98108 - DNA, 25 bp, probe
attgtatgtcgattgaattgtactg

SEQ ID NO: 98109 - DNA, 25 bp, probe
cagttggtcaagactttgtaaagaa

SEQ ID NO: 98110 - DNA, 25 bp, probe
tatgtcgattgaattgtactggata

SEQ ID NO: 98111 - DNA, 25 bp, probe
aaacagttggtcaagactttgtaaa

SEQ ID NO: 98112 - DNA, 25 bp, probe
ggatagtcaggtaaacagttggtca

SEQ ID NO: 98113 - DNA, 25 bp, probe
gtaaacagttggtcaagactttgta

SEQ ID NO: 98114 - DNA, 25 bp, probe
agaagtttgatatgagcagttagaa

SEQ ID NO: 98115 - DNA, 25 bp, probe
aagagaagtttgatatgagcagtta

SEQ ID NO: 98116 - DNA, 25 bp, probe
taaagagaagtttgatatgagcagt

SEQ ID NO: 98117 - DNA, 25 bp, probe
aggtaaacagttggtcaagactttg

SEQ ID NO: 98118 - DNA, 25 bp, probe
caggtaaacagttggtcaagacttt

SEQ ID NO: 98119 - DNA, 25 bp, probe
ggtcaagactttgtaaagaaattgg

SEQ ID NO: 98120 - DNA, 25 bp, probe
agttggtcaagactttgtaaagaaa

SEQ ID NO: 98121 - DNA, 25 bp, probe
aacagttggtcaagactttgtaaag

SEQ ID NO: 98122 - DNA, 25 bp, probe
acagttggtcaagactttgtaaaga

SEQ ID NO: 98123 - DNA, 25 bp, probe
gaagtttgatatgagcagttagaag

SEQ ID NO: 98124 - DNA, 25 bp, probe
taaacagttggtcaagactttgtaa

SEQ ID NO: 98125 - DNA, 25 bp, probe
tgtcgattgaattgtactggataca

SEQ ID NO: 98126 - DNA, 25 bp, probe
ctgacaggacatcttacaagagaat

SEQ ID NO: 98127 - DNA, 25 bp, probe
tgacaggacatcttacaagagaatt

SEQ ID NO: 98128 - DNA, 25 bp, probe
agagtcatgtcttcttctccttaat

SEQ ID NO: 98129 - DNA, 25 bp, probe
gttataagcatcaatgtgacacttg

SEQ ID NO: 98130 - DNA, 25 bp, probe
tgttataagcatcaatgtgacactt

SEQ ID NO: 98131 - DNA, 25 bp, probe
ttgttataagcatcaatgtgacact

SEQ ID NO: 98132 - DNA, 25 bp, probe
ggcttatttgtaatgtaaaccacca

SEQ ID NO: 98133 - DNA, 25 bp, probe
atcgcagtgtttcagttctttattt

SEQ ID NO: 98134 - DNA, 25 bp, probe
aggcttatttgtaatgtaaaccacc

SEQ ID NO: 98135 - DNA, 25 bp, probe
ctatcgcagtgtttcagttctttat

SEQ ID NO: 98136 - DNA, 25 bp, probe
gctgacaggacatcttacaagagaa

SEQ ID NO: 98137 - DNA, 25 bp, probe
gagtcatgtcttcttctccttaatt

SEQ ID NO: 98138 - DNA, 25 bp, probe
tatcgcagtgtttcagttctttatt

SEQ ID NO: 98139 - DNA, 25 bp, probe
cctatcgcagtgtttcagttcttta

SEQ ID NO: 98140 - DNA, 25 bp, probe
caggcttatttgtaatgtaaaccac

SEQ ID NO: 98141 - DNA, 25 bp, probe
caggacatcttacaagagaatttgc

SEQ ID NO: 98142 - DNA, 25 bp, probe
agtcatgtcttcttctccttaatta

SEQ ID NO: 98143 - DNA, 25 bp, probe
tggagattaagagtcatgtcttctt

SEQ ID NO: 98144 - DNA, 25 bp, probe
acaggacatcttacaagagaatttg

SEQ ID NO: 98145 - DNA, 25 bp, probe
aagagtcatgtcttcttctccttaa

SEQ ID NO: 98146 - DNA, 25 bp, probe
ttaagagtcatgtcttcttctcctt

SEQ ID NO: 98147 - DNA, 25 bp, probe
gcttatttgtaatgtaaaccaccat

SEQ ID NO: 98148 - DNA, 25 bp, probe
gacaggacatcttacaagagaattt

SEQ ID NO: 98149 - DNA, 25 bp, probe
atggagattaagagtcatgtcttct

SEQ ID NO: 98150 - DNA, 25 bp, probe
acaggcttatttgtaatgtaaacca

SEQ ID NO: 98151 - DNA, 25 bp, probe
attaagagtcatgtcttcttctcct

SEQ ID NO: 98152 - DNA, 25 bp, probe
ggctgtgatgacgaatattatgaaa

SEQ ID NO: 98153 - DNA, 25 bp, probe
gattaagagtcatgtcttcttctcc

SEQ ID NO: 98154 - DNA, 25 bp, probe
ggagattaagagtcatgtcttcttc

SEQ ID NO: 98155 - DNA, 25 bp, probe
tgacgaatattatgaaatgtgcctt

SEQ ID NO: 98156 - DNA, 25 bp, probe
gggctgtgatgacgaatattatgaa

SEQ ID NO: 98157 - DNA, 25 bp, probe
tcctatcgcagtgtttcagttcttt

SEQ ID NO: 98158 - DNA, 25 bp, probe
ttcctatcgcagtgtttcagttctt

SEQ ID NO: 98159 - DNA, 25 bp, probe
tttcctatcgcagtgtttcagttct

SEQ ID NO: 98160 - DNA, 25 bp, probe
gcattcctgataattgtatgtattg

SEQ ID NO: 98161 - DNA, 25 bp, probe
atgacgaatattatgaaatgtgcct

SEQ ID NO: 98162 - DNA, 25 bp, probe
gggacattgtttgtttcttccatat

SEQ ID NO: 98163 - DNA, 25 bp, probe
gactctttcctctgaaccctgttag

SEQ ID NO: 98164 - DNA, 25 bp, probe
gatgacgaatattatgaaatgtgcc

SEQ ID NO: 98165 - DNA, 25 bp, probe
taagagtcatgtcttcttctcctta

SEQ ID NO: 98166 - DNA, 25 bp, probe
ttataagcatcaatgtgacacttgc

SEQ ID NO: 98167 - DNA, 25 bp, probe
ctgggctgtgatgacgaatattatg

SEQ ID NO: 98168 - DNA, 25 bp, probe
tctgggctgtgatgacgaatattat

SEQ ID NO: 98169 - DNA, 25 bp, probe
tgggacattgtttgtttcttccata

SEQ ID NO: 98170 - DNA, 25 bp, probe
cttcttggttctacttctcttctcc

SEQ ID NO: 98171 - DNA, 25 bp, probe
gcttcttggttctacttctcttctc

SEQ ID NO: 98172 - DNA, 25 bp, probe
ccgagagaattaagacagactgaat

SEQ ID NO: 98173 - DNA, 25 bp, probe
cattaactaccatcagcacaactct

SEQ ID NO: 98174 - DNA, 25 bp, probe
tcattaactaccatcagcacaactc

SEQ ID NO: 98175 - DNA, 25 bp, probe
ctcattaactaccatcagcacaact

SEQ ID NO: 98176 - DNA, 25 bp, probe
attaactaccatcagcacaactctg

SEQ ID NO: 98177 - DNA, 25 bp, probe
cgagagaattaagacagactgaatt

SEQ ID NO: 98178 - DNA, 25 bp, probe
agcttcttggttctacttctcttct

SEQ ID NO: 98179 - DNA, 25 bp, probe
ttcttggttctacttctcttctcca

SEQ ID NO: 98180 - DNA, 25 bp, probe
ttggttctacttctcttctccacaa

SEQ ID NO: 98181 - DNA, 25 bp, probe
attaagacagactgaatttgcgatg

SEQ ID NO: 98182 - DNA, 25 bp, probe
gttctacttctcttctccacaagcc

SEQ ID NO: 98183 - DNA, 25 bp, probe
ggttctacttctcttctccacaagc

SEQ ID NO: 98184 - DNA, 25 bp, probe
tcttggttctacttctcttctccac

SEQ ID NO: 98185 - DNA, 25 bp, probe
ctcatatccaggctcaaatatccag

SEQ ID NO: 98186 - DNA, 25 bp, probe
gactcatatccaggctcaaatatcc

SEQ ID NO: 98187 - DNA, 25 bp, probe
taagacagactgaatttgcgatgaa

SEQ ID NO: 98188 - DNA, 25 bp, probe
ttaagacagactgaatttgcgatga

SEQ ID NO: 98189 - DNA, 25 bp, probe
atttcccgagagaattaagacagac

SEQ ID NO: 98190 - DNA, 25 bp, probe
catatccaggctcaaatatccagtg

SEQ ID NO: 98191 - DNA, 25 bp, probe
tcatatccaggctcaaatatccagt

SEQ ID NO: 98192 - DNA, 25 bp, probe
actcatatccaggctcaaatatcca

SEQ ID NO: 98193 - DNA, 25 bp, probe
tggttctacttctcttctccacaag

SEQ ID NO: 98194 - DNA, 25 bp, probe
cttggttctacttctcttctccaca

SEQ ID NO: 98195 - DNA, 25 bp, probe
atatccaggctcaaatatccagtgt

SEQ ID NO: 98196 - DNA, 25 bp, probe
gccaagaaattattgtgcctgaaat

SEQ ID NO: 98197 - DNA, 25 bp, probe
gaaatggtgtcataaagatgggagg

SEQ ID NO: 98198 - DNA, 25 bp, probe
tgaaatggtgtcataaagatgggag

SEQ ID NO: 98199 - DNA, 25 bp, probe
tttcccgagagaattaagacagact

SEQ ID NO: 98200 - DNA, 25 bp, probe
aagacagactgaatttgcgatgaaa

SEQ ID NO: 98201 - DNA, 25 bp, probe
tttaggagggaggatgtaaatagcc

SEQ ID NO: 98202 - DNA, 25 bp, probe
aatttcccgagagaattaagacaga

SEQ ID NO: 98203 - DNA, 25 bp, probe
gaattaagacagactgaatttgcga

SEQ ID NO: 98204 - DNA, 25 bp, probe
agaattaagacagactgaatttgcg

SEQ ID NO: 98205 - DNA, 25 bp, probe
tatccaggctcaaatatccagtgtc

SEQ ID NO: 98206 - DNA, 25 bp, probe
ctcaaatatccagtgtctcaacaaa

SEQ ID NO: 98207 - DNA, 25 bp, probe
aattaagacagactgaatttgcgat

SEQ ID NO: 98208 - DNA, 25 bp, probe
cccgagagaattaagacagactgaa

SEQ ID NO: 98209 - DNA, 25 bp, probe
aatttggcaagaatgaaatggtgtc

SEQ ID NO: 98210 - DNA, 25 bp, probe
gaatttggcaagaatgaaatggtgt

SEQ ID NO: 98211 - DNA, 25 bp, probe
ttcccgagagaattaagacagactg

SEQ ID NO: 98212 - DNA, 25 bp, probe
ccaagaaattattgtgcctgaaatt

SEQ ID NO: 98213 - DNA, 25 bp, probe
gctcaaatatccagtgtctcaacaa

SEQ ID NO: 98214 - DNA, 25 bp, probe
ggagatcgtcacaatagtaacatca

SEQ ID NO: 98215 - DNA, 25 bp, probe
tggagatcgtcacaatagtaacatc

SEQ ID NO: 98216 - DNA, 25 bp, probe
atcgtcacaatagtaacatcatggt

SEQ ID NO: 98217 - DNA, 25 bp, probe
gatcgtcacaatagtaacatcatgg

SEQ ID NO: 98218 - DNA, 25 bp, probe
ttggagatcgtcacaatagtaacat

SEQ ID NO: 98219 - DNA, 25 bp, probe
cacaatccatgaacagcattagaat

SEQ ID NO: 98220 - DNA, 25 bp, probe
acaatccatgaacagcattagaatt

SEQ ID NO: 98221 - DNA, 25 bp, probe
gagatcgtcacaatagtaacatcat

SEQ ID NO: 98222 - DNA, 25 bp, probe
caggagatgtgttacaaggcttatc

SEQ ID NO: 98223 - DNA, 25 bp, probe
agatcgtcacaatagtaacatcatg

SEQ ID NO: 98224 - DNA, 25 bp, probe
tcaggagatgtgttacaaggcttat

SEQ ID NO: 98225 - DNA, 25 bp, probe
gctcattaacttaactgacattctc

SEQ ID NO: 98226 - DNA, 25 bp, probe
ttcaggagatgtgttacaaggctta

SEQ ID NO: 98227 - DNA, 25 bp, probe
tgttaccttatggttgtctgtcaat

SEQ ID NO: 98228 - DNA, 25 bp, probe
atgttaccttatggttgtctgtcaa

SEQ ID NO: 98229 - DNA, 25 bp, probe
aatgttaccttatggttgtctgtca

SEQ ID NO: 98230 - DNA, 25 bp, probe
gttaccttatggttgtctgtcaatc

SEQ ID NO: 98231 - DNA, 25 bp, probe
gaatgttaccttatggttgtctgtc

SEQ ID NO: 98232 - DNA, 25 bp, probe
ttaccttatggttgtctgtcaatcg

SEQ ID NO: 98233 - DNA, 25 bp, probe
cgaatgttaccttatggttgtctgt

SEQ ID NO: 98234 - DNA, 25 bp, probe
tgattagtaaaggagcccaagaatg

SEQ ID NO: 98235 - DNA, 25 bp, probe
tcgtcacaatagtaacatcatggtg

SEQ ID NO: 98236 - DNA, 25 bp, probe
gcacaatccatgaacagcattagaa

SEQ ID NO: 98237 - DNA, 25 bp, probe
tgaacagcattagaatttacagcaa

SEQ ID NO: 98238 - DNA, 25 bp, probe
tcaaagacaagaacaaaggagaaat

SEQ ID NO: 98239 - DNA, 25 bp, probe
ggagatgtgttacaaggcttatcta

SEQ ID NO: 98240 - DNA, 25 bp, probe
agcattagaatttacagcaagaaca

SEQ ID NO: 98241 - DNA, 25 bp, probe
acagcattagaatttacagcaagaa

SEQ ID NO: 98242 - DNA, 25 bp, probe
aacagcattagaatttacagcaaga

SEQ ID NO: 98243 - DNA, 25 bp, probe
acgatggacaactgtttcatataga

SEQ ID NO: 98244 - DNA, 25 bp, probe
agacgatggacaactgtttcatata

SEQ ID NO: 98245 - DNA, 25 bp, probe
actgttaataactctcagcaggcaa

SEQ ID NO: 98246 - DNA, 25 bp, probe
gacgatggacaactgtttcatatag

SEQ ID NO: 98247 - DNA, 25 bp, probe
aagacgatggacaactgtttcatat

SEQ ID NO: 98248 - DNA, 25 bp, probe
gcattagaatttacagcaagaacag

SEQ ID NO: 98249 - DNA, 25 bp, probe
cagcattagaatttacagcaagaac

SEQ ID NO: 98250 - DNA, 25 bp, probe
gaacagcattagaatttacagcaag

SEQ ID NO: 98251 - DNA, 25 bp, probe
attggagatcgtcacaatagtaaca

SEQ ID NO: 98252 - DNA, 25 bp, probe
ggaattggagatcgtcacaatagta

SEQ ID NO: 98253 - DNA, 25 bp, probe
atgaacagcattagaatttacagca

SEQ ID NO: 98254 - DNA, 25 bp, probe
aaagacgatggacaactgtttcata

SEQ ID NO: 98255 - DNA, 25 bp, probe
cttatggttgtctgtcaatcggtga

SEQ ID NO: 98256 - DNA, 25 bp, probe
agatgtgttacaaggcttatctagc

SEQ ID NO: 98257 - DNA, 25 bp, probe
agacaagagaatttgagaggtttca

SEQ ID NO: 98258 - DNA, 25 bp, probe
ataacccagtatttcatccctttcc

SEQ ID NO: 98259 - DNA, 25 bp, probe
tgtataacccagtatttcatccctt

SEQ ID NO: 98260 - DNA, 25 bp, probe
ttgtataacccagtatttcatccct

SEQ ID NO: 98261 - DNA, 25 bp, probe
taacccagtatttcatccctttcct

SEQ ID NO: 98262 - DNA, 25 bp, probe
gtataacccagtatttcatcccttt

SEQ ID NO: 98263 - DNA, 25 bp, probe
attgtataacccagtatttcatccc

SEQ ID NO: 98264 - DNA, 25 bp, probe
tataacccagtatttcatccctttc

SEQ ID NO: 98265 - DNA, 25 bp, probe
acatgcaacagtggattgtataacc

SEQ ID NO: 98266 - DNA, 25 bp, probe
cagtatttcatccctttcctgatcc

SEQ ID NO: 98267 - DNA, 25 bp, probe
ccagtatttcatccctttcctgatc

SEQ ID NO: 98268 - DNA, 25 bp, probe
caacagtggattgtataacccagta

SEQ ID NO: 98269 - DNA, 25 bp, probe
acagtggattgtataacccagtatt

SEQ ID NO: 98270 - DNA, 25 bp, probe
aacagtggattgtataacccagtat

SEQ ID NO: 98271 - DNA, 25 bp, probe
tacatgcaacagtggattgtataac

SEQ ID NO: 98272 - DNA, 25 bp, probe
ctacatgcaacagtggattgtataa

SEQ ID NO: 98273 - DNA, 25 bp, probe
gattgtataacccagtatttcatcc

SEQ ID NO: 98274 - DNA, 25 bp, probe
ggattgtataacccagtatttcatc

SEQ ID NO: 98275 - DNA, 25 bp, probe
cccagtatttcatccctttcctgat

SEQ ID NO: 98276 - DNA, 25 bp, probe
gctacatgcaacagtggattgtata

SEQ ID NO: 98277 - DNA, 25 bp, probe
gtggattgtataacccagtatttca

SEQ ID NO: 98278 - DNA, 25 bp, probe
cagtggattgtataacccagtattt

SEQ ID NO: 98279 - DNA, 25 bp, probe
agtggattgtataacccagtatttc

SEQ ID NO: 98280 - DNA, 25 bp, probe
aacccagtatttcatccctttcctg

SEQ ID NO: 98281 - DNA, 25 bp, probe
tggattgtataacccagtatttcat

SEQ ID NO: 98282 - DNA, 25 bp, probe
acccagtatttcatccctttcctga

SEQ ID NO: 98283 - DNA, 25 bp, probe
catgcaacagtggattgtataaccc

SEQ ID NO: 98284 - DNA, 25 bp, probe
acatccacggacctgagtttacttt

SEQ ID NO: 98285 - DNA, 25 bp, probe
gcaacagtggattgtataacccagt

SEQ ID NO: 98286 - DNA, 25 bp, probe
aaagtgttattttcaggctacatgc

SEQ ID NO: 98287 - DNA, 25 bp, probe
ggctacatgcaacagtggattgtat

SEQ ID NO: 98288 - DNA, 25 bp, probe
atgcaacagtggattgtataaccca

SEQ ID NO: 98289 - DNA, 25 bp, probe
ttaaagacacatccacggacctgag

SEQ ID NO: 98290 - DNA, 25 bp, probe
aaccacaacctgttcccactcaata

SEQ ID NO: 98291 - DNA, 25 bp, probe
ttattttcaggctacatgcaacagt

SEQ ID NO: 98292 - DNA, 25 bp, probe
tttaaagacacatccacggacctga

SEQ ID NO: 98293 - DNA, 25 bp, probe
gttattttcaggctacatgcaacag

SEQ ID NO: 98294 - DNA, 25 bp, probe
catccacggacctgagtttactttt

SEQ ID NO: 98295 - DNA, 25 bp, probe
cacatccacggacctgagtttactt

SEQ ID NO: 98296 - DNA, 25 bp, probe
ttcaggctacatgcaacagtggatt

SEQ ID NO: 98297 - DNA, 25 bp, probe
aaaagtgttattttcaggctacatg

SEQ ID NO: 98298 - DNA, 25 bp, probe
tattttcaggctacatgcaacagtg

SEQ ID NO: 98299 - DNA, 25 bp, probe
tgcaacagtggattgtataacccag

SEQ ID NO: 98300 - DNA, 25 bp, probe
gtgttattttcaggctacatgcaac

SEQ ID NO: 98301 - DNA, 25 bp, probe
agtgttattttcaggctacatgcaa

SEQ ID NO: 98302 - DNA, 25 bp, probe
gattcaacaccaaccagtccaacaa

SEQ ID NO: 98303 - DNA, 25 bp, probe
attcaacaccaaccagtccaacaac

SEQ ID NO: 98304 - DNA, 25 bp, probe
tctcaggattcaacaccaaccagtc

SEQ ID NO: 98305 - DNA, 25 bp, probe
ctctcaggattcaacaccaaccagt

SEQ ID NO: 98306 - DNA, 25 bp, probe
ggttctttcacaggcacgtttattt

SEQ ID NO: 98307 - DNA, 25 bp, probe
tggttctttcacaggcacgtttatt

SEQ ID NO: 98308 - DNA, 25 bp, probe
ttctttcacaggcacgtttattttg

SEQ ID NO: 98309 - DNA, 25 bp, probe
gttctttcacaggcacgtttatttt

SEQ ID NO: 98310 - DNA, 25 bp, probe
catcgagactctcatcgtccactac

SEQ ID NO: 98311 - DNA, 25 bp, probe
tcatcgagactctcatcgtccacta

SEQ ID NO: 98312 - DNA, 25 bp, probe
gtggttctttcacaggcacgtttat

SEQ ID NO: 98313 - DNA, 25 bp, probe
caggcacgtttattttgctgaaata

SEQ ID NO: 98314 - DNA, 25 bp, probe
acaggcacgtttattttgctgaaat

SEQ ID NO: 98315 - DNA, 25 bp, probe
ctttcacaggcacgtttattttgct

SEQ ID NO: 98316 - DNA, 25 bp, probe
tctttcacaggcacgtttattttgc

SEQ ID NO: 98317 - DNA, 25 bp, probe
cacaggcacgtttattttgctgaaa

SEQ ID NO: 98318 - DNA, 25 bp, probe
tttcacaggcacgtttattttgctg

SEQ ID NO: 98319 - DNA, 25 bp, probe
aggcacgtttattttgctgaaataa

SEQ ID NO: 98320 - DNA, 25 bp, probe
tcacaggcacgtttattttgctgaa

SEQ ID NO: 98321 - DNA, 25 bp, probe
ttcacaggcacgtttattttgctga

SEQ ID NO: 98322 - DNA, 25 bp, probe
tgtggttctttcacaggcacgttta

SEQ ID NO: 98323 - DNA, 25 bp, probe
ctgtgtcatcttctggagttatcaa

SEQ ID NO: 98324 - DNA, 25 bp, probe
tcagtacagatagcaattagtcagc

SEQ ID NO: 98325 - DNA, 25 bp, probe
ctcagataactcagtacagatagca

SEQ ID NO: 98326 - DNA, 25 bp, probe
cactgtgtcatcttctggagttatc

SEQ ID NO: 98327 - DNA, 25 bp, probe
actgtgtcatcttctggagttatca

SEQ ID NO: 98328 - DNA, 25 bp, probe
tcagataactcagtacagatagcaa

SEQ ID NO: 98329 - DNA, 25 bp, probe
ctcagtacagatagcaattagtcag

SEQ ID NO: 98330 - DNA, 25 bp, probe
tctcagataactcagtacagatagc

SEQ ID NO: 98331 - DNA, 25 bp, probe
tcatagacactgtgctaatgtgaat

SEQ ID NO: 98332 - DNA, 25 bp, probe
actcagtacagatagcaattagtca

SEQ ID NO: 98333 - DNA, 25 bp, probe
catagacactgtgctaatgtgaatt

SEQ ID NO: 98334 - DNA, 25 bp, probe
ctcatagacactgtgctaatgtgaa

SEQ ID NO: 98335 - DNA, 25 bp, probe
ttctcatagacactgtgctaatgtg

SEQ ID NO: 98336 - DNA, 25 bp, probe
aatgtaatgtaagacaccaacagaa

SEQ ID NO: 98337 - DNA, 25 bp, probe
tgattacaatggagtaaccgacaat

SEQ ID NO: 98338 - DNA, 25 bp, probe
ttgattacaatggagtaaccgacaa

SEQ ID NO: 98339 - DNA, 25 bp, probe
tctcatagacactgtgctaatgtga

SEQ ID NO: 98340 - DNA, 25 bp, probe
cagataactcagtacagatagcaat

SEQ ID NO: 98341 - DNA, 25 bp, probe
ctgtacctatcaggactatacctca

SEQ ID NO: 98342 - DNA, 25 bp, probe
actgtacctatcaggactatacctc

SEQ ID NO: 98343 - DNA, 25 bp, probe
aactgtacctatcaggactatacct

SEQ ID NO: 98344 - DNA, 25 bp, probe
tgtacctatcaggactatacctcat

SEQ ID NO: 98345 - DNA, 25 bp, probe
acaatcaagacaacacaagaattat

SEQ ID NO: 98346 - DNA, 25 bp, probe
atacaatcaagacaacacaagaatt

SEQ ID NO: 98347 - DNA, 25 bp, probe
gattacaatggagtaaccgacaata

SEQ ID NO: 98348 - DNA, 25 bp, probe
aactcagtacagatagcaattagtc

SEQ ID NO: 98349 - DNA, 25 bp, probe
tgtgtcatcttctggagttatcaaa

SEQ ID NO: 98350 - DNA, 25 bp, probe
tctctgaaatgggtaaaggacaaat

SEQ ID NO: 98351 - DNA, 25 bp, probe
agacaccaacagaaatgatatacct

SEQ ID NO: 98352 - DNA, 25 bp, probe
ctgtaactgtacctatcaggactat

SEQ ID NO: 98353 - DNA, 25 bp, probe
tctgaaatgggtaaaggacaaattg

SEQ ID NO: 98354 - DNA, 25 bp, probe
actgtagcaacataatatatggagc

SEQ ID NO: 98355 - DNA, 25 bp, probe
ttctctgaaatgggtaaaggacaaa

SEQ ID NO: 98356 - DNA, 25 bp, probe
ctctgaaatgggtaaaggacaaatt

SEQ ID NO: 98357 - DNA, 25 bp, probe
gtacctatcaggactatacctcatt

SEQ ID NO: 98358 - DNA, 25 bp, probe
cttctctgaaatgggtaaaggacaa

SEQ ID NO: 98359 - DNA, 25 bp, probe
caaatgctgtgaattactcttcctc

SEQ ID NO: 98360 - DNA, 25 bp, probe
aagacaccaacagaaatgatatacc

SEQ ID NO: 98361 - DNA, 25 bp, probe
attacaatggagtaaccgacaatat

SEQ ID NO: 98362 - DNA, 25 bp, probe
acactgtgtcatcttctggagttat

SEQ ID NO: 98363 - DNA, 25 bp, probe
gcacatattcataataacgagaaga

SEQ ID NO: 98364 - DNA, 25 bp, probe
agcacatattcataataacgagaag

SEQ ID NO: 98365 - DNA, 25 bp, probe
tacaatggagtaaccgacaatatat

SEQ ID NO: 98366 - DNA, 25 bp, probe
aaatgtatctcttgcctaaaggact

SEQ ID NO: 98367 - DNA, 25 bp, probe
ctcgtccacaatagtcaatcctaat

SEQ ID NO: 98368 - DNA, 25 bp, probe
tcgtccacaatagtcaatcctaatt

SEQ ID NO: 98369 - DNA, 25 bp, probe
cctcgtccacaatagtcaatcctaa

SEQ ID NO: 98370 - DNA, 25 bp, probe
atcacctcgtccacaatagtcaatc

SEQ ID NO: 98371 - DNA, 25 bp, probe
acactccactccatgttatattctg

SEQ ID NO: 98372 - DNA, 25 bp, probe
catcacctcgtccacaatagtcaat

SEQ ID NO: 98373 - DNA, 25 bp, probe
acctcgtccacaatagtcaatccta

SEQ ID NO: 98374 - DNA, 25 bp, probe
cttggctgttgtatttgaattgaga

SEQ ID NO: 98375 - DNA, 25 bp, probe
tggctgttgtatttgaattgagatt

SEQ ID NO: 98376 - DNA, 25 bp, probe
ttggctgttgtatttgaattgagat

SEQ ID NO: 98377 - DNA, 25 bp, probe
atagtcaatcctaattgtggtcctg

SEQ ID NO: 98378 - DNA, 25 bp, probe
cgtccacaatagtcaatcctaattg

SEQ ID NO: 98379 - DNA, 25 bp, probe
aatagtcaatcctaattgtggtcct

SEQ ID NO: 98380 - DNA, 25 bp, probe
caatagtcaatcctaattgtggtcc

SEQ ID NO: 98381 - DNA, 25 bp, probe
cactccactccatgttatattctgg

SEQ ID NO: 98382 - DNA, 25 bp, probe
ccttggctgttgtatttgaattgag

SEQ ID NO: 98383 - DNA, 25 bp, probe
ggctgttgtatttgaattgagattt

SEQ ID NO: 98384 - DNA, 25 bp, probe
ccctctcatttctgacatttgaaga

SEQ ID NO: 98385 - DNA, 25 bp, probe
accctctcatttctgacatttgaag

SEQ ID NO: 98386 - DNA, 25 bp, probe
gaccctctcatttctgacatttgaa

SEQ ID NO: 98387 - DNA, 25 bp, probe
gtggctacagagtggtaaacaaatc

SEQ ID NO: 98388 - DNA, 25 bp, probe
gctacagagtggtaaacaaatctca

SEQ ID NO: 98389 - DNA, 25 bp, probe
tcatcacctcgtccacaatagtcaa

SEQ ID NO: 98390 - DNA, 25 bp, probe
ttcatcacctcgtccacaatagtca

SEQ ID NO: 98391 - DNA, 25 bp, probe
ggctacagagtggtaaacaaatctc

SEQ ID NO: 98392 - DNA, 25 bp, probe
tggctacagagtggtaaacaaatct

SEQ ID NO: 98393 - DNA, 25 bp, probe
ctacagagtggtaaacaaatctcac

SEQ ID NO: 98394 - DNA, 25 bp, probe
ggatagttaggagctagggtagaat

SEQ ID NO: 98395 - DNA, 25 bp, probe
aatcctaattgtggtcctgcctctt

SEQ ID NO: 98396 - DNA, 25 bp, probe
tttcatcacctcgtccacaatagtc

SEQ ID NO: 98397 - DNA, 25 bp, probe
tagtcaatcctaattgtggtcctgc

SEQ ID NO: 98398 - DNA, 25 bp, probe
agagtggtaaacaaatctcaccttt

SEQ ID NO: 98399 - DNA, 25 bp, probe
tacagagtggtaaacaaatctcacc

SEQ ID NO: 98400 - DNA, 25 bp, probe
cgtataaatctttcttaaccgtgaa

SEQ ID NO: 98401 - DNA, 25 bp, probe
cagagtggtaaacaaatctcacctt

SEQ ID NO: 98402 - DNA, 25 bp, probe
gtttcatcacctcgtccacaatagt

SEQ ID NO: 98403 - DNA, 25 bp, probe
aacactccactccatgttatattct

SEQ ID NO: 98404 - DNA, 25 bp, probe
cacctcgtccacaatagtcaatcct

SEQ ID NO: 98405 - DNA, 25 bp, probe
tcacctcgtccacaatagtcaatcc

SEQ ID NO: 98406 - DNA, 25 bp, probe
ggaccctctcatttctgacatttga

SEQ ID NO: 98407 - DNA, 25 bp, probe
tttgggatagttaggagctagggta

SEQ ID NO: 98408 - DNA, 25 bp, probe
gggatagttaggagctagggtagaa

SEQ ID NO: 98409 - DNA, 25 bp, probe
acagagtggtaaacaaatctcacct

SEQ ID NO: 98410 - DNA, 25 bp, probe
gatagttaggagctagggtagaata

SEQ ID NO: 98411 - DNA, 25 bp, probe
caaatagatgctgggttatgagaac

SEQ ID NO: 98412 - DNA, 25 bp, probe
attgtctgcatcctgtccttgatat

SEQ ID NO: 98413 - DNA, 25 bp, probe
tttgtatttgtttgctgtgttcatg

SEQ ID NO: 98414 - DNA, 25 bp, probe
ttgtctgcatcctgtccttgatatt

SEQ ID NO: 98415 - DNA, 25 bp, probe
aattgtctgcatcctgtccttgata

SEQ ID NO: 98416 - DNA, 25 bp, probe
taattgtctgcatcctgtccttgat

SEQ ID NO: 98417 - DNA, 25 bp, probe
aatgctgaggaatgaatgtgtcaaa

SEQ ID NO: 98418 - DNA, 25 bp, probe
aaatgctgaggaatgaatgtgtcaa

SEQ ID NO: 98419 - DNA, 25 bp, probe
ttgtatttgtttgctgtgttcatgg

SEQ ID NO: 98420 - DNA, 25 bp, probe
aagggtccattatttcataagagtt

SEQ ID NO: 98421 - DNA, 25 bp, probe
aaagggtccattatttcataagagt

SEQ ID NO: 98422 - DNA, 25 bp, probe
atttgtcccattcttggagtagttt

SEQ ID NO: 98423 - DNA, 25 bp, probe
gtatttgtcccattcttggagtagt

SEQ ID NO: 98424 - DNA, 25 bp, probe
tatttgtcccattcttggagtagtt

SEQ ID NO: 98425 - DNA, 25 bp, probe
ccaaatagatgctgggttatgagaa

SEQ ID NO: 98426 - DNA, 25 bp, probe
tgtgtatattgactttcatgtcgtc

SEQ ID NO: 98427 - DNA, 25 bp, probe
ctgtgtatattgactttcatgtcgt

SEQ ID NO: 98428 - DNA, 25 bp, probe
actgtgtatattgactttcatgtcg

SEQ ID NO: 98429 - DNA, 25 bp, probe
gtaattgtctgcatcctgtccttga

SEQ ID NO: 98430 - DNA, 25 bp, probe
atgaatgaatgatactttgcactgg

SEQ ID NO: 98431 - DNA, 25 bp, probe
ctgtgttcatgggcaaagtaagtac

SEQ ID NO: 98432 - DNA, 25 bp, probe
cgtatttgtcccattcttggagtag

SEQ ID NO: 98433 - DNA, 25 bp, probe
catgaatgaatgatactttgcactg

SEQ ID NO: 98434 - DNA, 25 bp, probe
gggtccattatttcataagagttac

SEQ ID NO: 98435 - DNA, 25 bp, probe
tgtatttgtttgctgtgttcatggg

SEQ ID NO: 98436 - DNA, 25 bp, probe
agggtccattatttcataagagtta

SEQ ID NO: 98437 - DNA, 25 bp, probe
aatccacgtatttgtcccattcttg

SEQ ID NO: 98438 - DNA, 25 bp, probe
tgaatgaatgatactttgcactggg

SEQ ID NO: 98439 - DNA, 25 bp, probe
gcagttattttgagagtttggaaga

SEQ ID NO: 98440 - DNA, 25 bp, probe
aaatccacgtatttgtcccattctt

SEQ ID NO: 98441 - DNA, 25 bp, probe
tgtctgcatcctgtccttgatattt

SEQ ID NO: 98442 - DNA, 25 bp, probe
ttttgtatttgtttgctgtgttcat

SEQ ID NO: 98443 - DNA, 25 bp, probe
acatcgtaattgtctgcatcctgtc

SEQ ID NO: 98444 - DNA, 25 bp, probe
tttgagagtttggaagataattacc

SEQ ID NO: 98445 - DNA, 25 bp, probe
ggaatgaatgtgtcaaaatgggtta

SEQ ID NO: 98446 - DNA, 25 bp, probe
catcgtaattgtctgcatcctgtcc

SEQ ID NO: 98447 - DNA, 25 bp, probe
aactgtgtatattgactttcatgtc

SEQ ID NO: 98448 - DNA, 25 bp, probe
ctgaggaatgaatgtgtcaaaatgg

SEQ ID NO: 98449 - DNA, 25 bp, probe
aacagtataaataacttgacatcgt

SEQ ID NO: 98450 - DNA, 25 bp, probe
ttgagagtttggaagataattacca

SEQ ID NO: 98451 - DNA, 25 bp, probe
ataacttgacatcgtaattgtctgc

SEQ ID NO: 98452 - DNA, 25 bp, probe
atcgtaattgtctgcatcctgtcct

SEQ ID NO: 98453 - DNA, 25 bp, probe
gctgaggaatgaatgtgtcaaaatg

SEQ ID NO: 98454 - DNA, 25 bp, probe
gaatgaatgatactttgcactgggc

SEQ ID NO: 98455 - DNA, 25 bp, probe
atacctaattgtggatgatgattgc

SEQ ID NO: 98456 - DNA, 25 bp, probe
ttacctactgtgtcttggaatctag

SEQ ID NO: 98457 - DNA, 25 bp, probe
tacctaattgtggatgatgattgcg

SEQ ID NO: 98458 - DNA, 25 bp, probe
tacctactgtgtcttggaatctagc

SEQ ID NO: 98459 - DNA, 25 bp, probe
aatacctaattgtggatgatgattg

SEQ ID NO: 98460 - DNA, 25 bp, probe
tttacctactgtgtcttggaatcta

SEQ ID NO: 98461 - DNA, 25 bp, probe
tactgtgtcttggaatctagccgat

SEQ ID NO: 98462 - DNA, 25 bp, probe
ggtttgcttcctcagtaacatttct

SEQ ID NO: 98463 - DNA, 25 bp, probe
caggattgtgttgggttgaatatat

SEQ ID NO: 98464 - DNA, 25 bp, probe
gtttgcttcctcagtaacatttctg

SEQ ID NO: 98465 - DNA, 25 bp, probe
tttgcttcctcagtaacatttctgt

SEQ ID NO: 98466 - DNA, 25 bp, probe
tatatgattcacatgctaaagccag

SEQ ID NO: 98467 - DNA, 25 bp, probe
atatgattcacatgctaaagccagg

SEQ ID NO: 98468 - DNA, 25 bp, probe
ttaaacagtagcttagcatcagagg

SEQ ID NO: 98469 - DNA, 25 bp, probe
acctactgtgtcttggaatctagcc

SEQ ID NO: 98470 - DNA, 25 bp, probe
ttatatgattcacatgctaaagcca

SEQ ID NO: 98471 - DNA, 25 bp, probe
tgaatctcataattggaatatacgg

SEQ ID NO: 98472 - DNA, 25 bp, probe
gaatctcataattggaatatacgga

SEQ ID NO: 98473 - DNA, 25 bp, probe
ctactgtgtcttggaatctagccga

SEQ ID NO: 98474 - DNA, 25 bp, probe
aggtttgcttcctcagtaacatttc

SEQ ID NO: 98475 - DNA, 25 bp, probe
tttaaacagtagcttagcatcagag

SEQ ID NO: 98476 - DNA, 25 bp, probe
taaacagtagcttagcatcagaggt

SEQ ID NO: 98477 - DNA, 25 bp, probe
ccaggattgtgttgggttgaatata

SEQ ID NO: 98478 - DNA, 25 bp, probe
tatgattcacatgctaaagccagga

SEQ ID NO: 98479 - DNA, 25 bp, probe
atttaaacagtagcttagcatcaga

SEQ ID NO: 98480 - DNA, 25 bp, probe
cggaatatttaaacagtagcttagc

SEQ ID NO: 98481 - DNA, 25 bp, probe
gattcacatgctaaagccaggattg

SEQ ID NO: 98482 - DNA, 25 bp, probe
tttatatgattcacatgctaaagcc

SEQ ID NO: 98483 - DNA, 25 bp, probe
aatctcataattggaatatacggaa

SEQ ID NO: 98484 - DNA, 25 bp, probe
atgattcacatgctaaagccaggat

SEQ ID NO: 98485 - DNA, 25 bp, probe
aacagtagcttagcatcagaggttt

SEQ ID NO: 98486 - DNA, 25 bp, probe
aaacagtagcttagcatcagaggtt

SEQ ID NO: 98487 - DNA, 25 bp, probe
tgattcacatgctaaagccaggatt

SEQ ID NO: 98488 - DNA, 25 bp, probe
ttgtactgaatctcataattggaat

SEQ ID NO: 98489 - DNA, 25 bp, probe
ttttacctactgtgtcttggaatct

SEQ ID NO: 98490 - DNA, 25 bp, probe
atctcataattggaatatacggaat

SEQ ID NO: 98491 - DNA, 25 bp, probe
tagccgatggaaaatacctaattgt

SEQ ID NO: 98492 - DNA, 25 bp, probe
cttccgaatgggttttctatttgaa

SEQ ID NO: 98493 - DNA, 25 bp, probe
ctcttccgaatgggttttctatttg

SEQ ID NO: 98494 - DNA, 25 bp, probe
tcttccgaatgggttttctatttga

SEQ ID NO: 98495 - DNA, 25 bp, probe
acagtagcttagcatcagaggtttg

SEQ ID NO: 98496 - DNA, 25 bp, probe
ccgaatgggttttctatttgaacat

SEQ ID NO: 98497 - DNA, 25 bp, probe
ttccgaatgggttttctatttgaac

SEQ ID NO: 98498 - DNA, 25 bp, probe
cgatggaaaatacctaattgtggat

SEQ ID NO: 98499 - DNA, 25 bp, probe
ttgtgacatattcattgtgttaccg

SEQ ID NO: 98500 - DNA, 25 bp, probe
tattccataacatgctgatgagagg

SEQ ID NO: 98501 - DNA, 25 bp, probe
gtgacatattcattgtgttaccgta

SEQ ID NO: 98502 - DNA, 25 bp, probe
tgtgacatattcattgtgttaccgt

SEQ ID NO: 98503 - DNA, 25 bp, probe
gtattccataacatgctgatgagag

SEQ ID NO: 98504 - DNA, 25 bp, probe
ttatcaagaatgagtatggttgctt

SEQ ID NO: 98505 - DNA, 25 bp, probe
gttgtgacatattcattgtgttacc

SEQ ID NO: 98506 - DNA, 25 bp, probe
attatcaagaatgagtatggttgct

SEQ ID NO: 98507 - DNA, 25 bp, probe
tgacatattcattgtgttaccgtaa

SEQ ID NO: 98508 - DNA, 25 bp, probe
tgtattccataacatgctgatgaga

SEQ ID NO: 98509 - DNA, 25 bp, probe
ccttgtattccataacatgctgatg

SEQ ID NO: 98510 - DNA, 25 bp, probe
ttgtattccataacatgctgatgag

SEQ ID NO: 98511 - DNA, 25 bp, probe
cttgtattccataacatgctgatga

SEQ ID NO: 98512 - DNA, 25 bp, probe
ctcacggtttctttctttgctaaat

SEQ ID NO: 98513 - DNA, 25 bp, probe
agttgtgacatattcattgtgttac

SEQ ID NO: 98514 - DNA, 25 bp, probe
ggatttctcacggtttctttctttg

SEQ ID NO: 98515 - DNA, 25 bp, probe
tcacggtttctttctttgctaaatt

SEQ ID NO: 98516 - DNA, 25 bp, probe
tttcattgggatgtatggtttctct

SEQ ID NO: 98517 - DNA, 25 bp, probe
ctttcattgggatgtatggtttctc

SEQ ID NO: 98518 - DNA, 25 bp, probe
tctttcattgggatgtatggtttct

SEQ ID NO: 98519 - DNA, 25 bp, probe
gtctttcattgggatgtatggtttc

SEQ ID NO: 98520 - DNA, 25 bp, probe
gaactgtctttcattgggatgtatg

SEQ ID NO: 98521 - DNA, 25 bp, probe
ttcattgggatgtatggtttctctc

SEQ ID NO: 98522 - DNA, 25 bp, probe
ttctcacggtttctttctttgctaa

SEQ ID NO: 98523 - DNA, 25 bp, probe
tttctcacggtttctttctttgcta

SEQ ID NO: 98524 - DNA, 25 bp, probe
tctcacggtttctttctttgctaaa

SEQ ID NO: 98525 - DNA, 25 bp, probe
tgtctttcattgggatgtatggttt

SEQ ID NO: 98526 - DNA, 25 bp, probe
taactagaaccttgctttgtgaact

SEQ ID NO: 98527 - DNA, 25 bp, probe
gtaactagaaccttgctttgtgaac

SEQ ID NO: 98528 - DNA, 25 bp, probe
ctgtctttcattgggatgtatggtt

SEQ ID NO: 98529 - DNA, 25 bp, probe
aactgtctttcattgggatgtatgg

SEQ ID NO: 98530 - DNA, 25 bp, probe
gatttctcacggtttctttctttgc

SEQ ID NO: 98531 - DNA, 25 bp, probe
gggatgtatggtttctctcaatgtg

SEQ ID NO: 98532 - DNA, 25 bp, probe
tctctcaatgtgaaatctggaaact

SEQ ID NO: 98533 - DNA, 25 bp, probe
ttgggatgtatggtttctctcaatg

SEQ ID NO: 98534 - DNA, 25 bp, probe
cattgggatgtatggtttctctcaa

SEQ ID NO: 98535 - DNA, 25 bp, probe
tctcaatgtgaaatctggaaacttc

SEQ ID NO: 98536 - DNA, 25 bp, probe
ctctcaatgtgaaatctggaaactt

SEQ ID NO: 98537 - DNA, 25 bp, probe
ttctctcaatgtgaaatctggaaac

SEQ ID NO: 98538 - DNA, 25 bp, probe
atttctcacggtttctttctttgct

SEQ ID NO: 98539 - DNA, 25 bp, probe
ttaccgtaactagaaccttgctttg

SEQ ID NO: 98540 - DNA, 25 bp, probe
ggatgtatggtttctctcaatgtga

SEQ ID NO: 98541 - DNA, 25 bp, probe
gggatttctcacggtttctttcttt

SEQ ID NO: 98542 - DNA, 25 bp, probe
tgggatgtatggtttctctcaatgt

SEQ ID NO: 98543 - DNA, 25 bp, probe
ggtttccatatcctcagattcagaa

SEQ ID NO: 98544 - DNA, 25 bp, probe
aggtttccatatcctcagattcaga

SEQ ID NO: 98545 - DNA, 25 bp, probe
aggaccagtaaccaaggagaacaac

SEQ ID NO: 98546 - DNA, 25 bp, probe
caggaccagtaaccaaggagaacaa

SEQ ID NO: 98547 - DNA, 25 bp, probe
gtttccatatcctcagattcagaaa

SEQ ID NO: 98548 - DNA, 25 bp, probe
gatctttaatgcctctccagcttct

SEQ ID NO: 98549 - DNA, 25 bp, probe
catttcatcactcagtgtatgcgaa

SEQ ID NO: 98550 - DNA, 25 bp, probe
gtacatttcatcactcagtgtatgc

SEQ ID NO: 98551 - DNA, 25 bp, probe
atttcatcactcagtgtatgcgaaa

SEQ ID NO: 98552 - DNA, 25 bp, probe
aaaccagggatctttaatgcctctc

SEQ ID NO: 98553 - DNA, 25 bp, probe
tacatttcatcactcagtgtatgcg

SEQ ID NO: 98554 - DNA, 25 bp, probe
atcgtgcagttcaatgatggaaatg

SEQ ID NO: 98555 - DNA, 25 bp, probe
gtatgcgaaaacagccaaaagaaag

SEQ ID NO: 98556 - DNA, 25 bp, probe
acatttcatcactcagtgtatgcga

SEQ ID NO: 98557 - DNA, 25 bp, probe
ccatttgtacatttcatcactcagt

SEQ ID NO: 98558 - DNA, 25 bp, probe
gccatttgtacatttcatcactcag

SEQ ID NO: 98559 - DNA, 25 bp, probe
atctttaatgcctctccagcttctg

SEQ ID NO: 98560 - DNA, 25 bp, probe
ggaccagtaaccaaggagaacaacc

SEQ ID NO: 98561 - DNA, 25 bp, probe
agccatttgtacatttcatcactca

SEQ ID NO: 98562 - DNA, 25 bp, probe
cttgctcttgggaggtttccatatc

SEQ ID NO: 98563 - DNA, 25 bp, probe
gagccatttgtacatttcatcactc

SEQ ID NO: 98564 - DNA, 25 bp, probe
ggagccatttgtacatttcatcact

SEQ ID NO: 98565 - DNA, 25 bp, probe
tatgcgaaaacagccaaaagaaagg

SEQ ID NO: 98566 - DNA, 25 bp, probe
taggaatctcttttatggagcttgc

SEQ ID NO: 98567 - DNA, 25 bp, probe
tgtatgcgaaaacagccaaaagaaa

SEQ ID NO: 98568 - DNA, 25 bp, probe
ctcggagccatttgtacatttcatc

SEQ ID NO: 98569 - DNA, 25 bp, probe
atttgtacatttcatcactcagtgt

SEQ ID NO: 98570 - DNA, 25 bp, probe
ggatctttaatgcctctccagcttc

SEQ ID NO: 98571 - DNA, 25 bp, probe
ttaggaatctcttttatggagcttg

SEQ ID NO: 98572 - DNA, 25 bp, probe
ttcatcgtgcagttcaatgatggaa

SEQ ID NO: 98573 - DNA, 25 bp, probe
catttgtacatttcatcactcagtg

SEQ ID NO: 98574 - DNA, 25 bp, probe
gttctcggagccatttgtacatttc

SEQ ID NO: 98575 - DNA, 25 bp, probe
aatctcttttatggagcttgctctt

SEQ ID NO: 98576 - DNA, 25 bp, probe
gaatctcttttatggagcttgctct

SEQ ID NO: 98577 - DNA, 25 bp, probe
tctcggagccatttgtacatttcat

SEQ ID NO: 98578 - DNA, 25 bp, probe
aaaaccagggatctttaatgcctct

SEQ ID NO: 98579 - DNA, 25 bp, probe
cttaggaatctcttttatggagctt

SEQ ID NO: 98580 - DNA, 25 bp, probe
atctcttttatggagcttgctcttg

SEQ ID NO: 98581 - DNA, 25 bp, probe
ttcatcactcagtgtatgcgaaaac

SEQ ID NO: 98582 - DNA, 25 bp, probe
cggagccatttgtacatttcatcac

SEQ ID NO: 98583 - DNA, 25 bp, probe
ttctcggagccatttgtacatttca

SEQ ID NO: 98584 - DNA, 25 bp, probe
agttctcggagccatttgtacattt

SEQ ID NO: 98585 - DNA, 25 bp, probe
aggaatctcttttatggagcttgct

SEQ ID NO: 98586 - DNA, 25 bp, probe
tcggagccatttgtacatttcatca

SEQ ID NO: 98587 - DNA, 25 bp, probe
cggacactattatcactaagacctt

SEQ ID NO: 98588 - DNA, 25 bp, probe
acggacactattatcactaagacct

SEQ ID NO: 98589 - DNA, 25 bp, probe
tacggacactattatcactaagacc

SEQ ID NO: 98590 - DNA, 25 bp, probe
ttatcactaagaccttgttatggcg

SEQ ID NO: 98591 - DNA, 25 bp, probe
tatcactaagaccttgttatggcga

SEQ ID NO: 98592 - DNA, 25 bp, probe
attatcactaagaccttgttatggc

SEQ ID NO: 98593 - DNA, 25 bp, probe
ggacactattatcactaagaccttg

SEQ ID NO: 98594 - DNA, 25 bp, probe
caagtgcggaattggttaatactaa

SEQ ID NO: 98595 - DNA, 25 bp, probe
atcactaagaccttgttatggcgaa

SEQ ID NO: 98596 - DNA, 25 bp, probe
ttacggacactattatcactaagac

SEQ ID NO: 98597 - DNA, 25 bp, probe
ctgtactagacaaggttaccaagtg

SEQ ID NO: 98598 - DNA, 25 bp, probe
tctgtactagacaaggttaccaagt

SEQ ID NO: 98599 - DNA, 25 bp, probe
gcggaattggttaatactaacagag

SEQ ID NO: 98600 - DNA, 25 bp, probe
tgcggaattggttaatactaacaga

SEQ ID NO: 98601 - DNA, 25 bp, probe
gtgcggaattggttaatactaacag

SEQ ID NO: 98602 - DNA, 25 bp, probe
aagtgcggaattggttaatactaac

SEQ ID NO: 98603 - DNA, 25 bp, probe
agtgcggaattggttaatactaaca

SEQ ID NO: 98604 - DNA, 25 bp, probe
attctccattatgttcgtggtgtaa

SEQ ID NO: 98605 - DNA, 25 bp, probe
aattctccattatgttcgtggtgta

SEQ ID NO: 98606 - DNA, 25 bp, probe
tcactaagaccttgttatggcgaag

SEQ ID NO: 98607 - DNA, 25 bp, probe
tttgattgtgaagaagggagagtta

SEQ ID NO: 98608 - DNA, 25 bp, probe
atttgattgtgaagaagggagagtt

SEQ ID NO: 98609 - DNA, 25 bp, probe
ctttgggttggtttctttcctttaa

SEQ ID NO: 98610 - DNA, 25 bp, probe
tgattgtgaagaagggagagttaaa

SEQ ID NO: 98611 - DNA, 25 bp, probe
ttgattgtgaagaagggagagttaa

SEQ ID NO: 98612 - DNA, 25 bp, probe
tatagaggagccaaagagagatttc

SEQ ID NO: 98613 - DNA, 25 bp, probe
atactttgggttggtttctttcctt

SEQ ID NO: 98614 - DNA, 25 bp, probe
aatactttgggttggtttctttcct

SEQ ID NO: 98615 - DNA, 25 bp, probe
gacactattatcactaagaccttgt

SEQ ID NO: 98616 - DNA, 25 bp, probe
catatagaggagccaaagagagatt

SEQ ID NO: 98617 - DNA, 25 bp, probe
cggaattggttaatactaacagaga

SEQ ID NO: 98618 - DNA, 25 bp, probe
cagtgtttgtttgaattgtgtttgt

SEQ ID NO: 98619 - DNA, 25 bp, probe
actttgggttggtttctttccttta

SEQ ID NO: 98620 - DNA, 25 bp, probe
tactttgggttggtttctttccttt

SEQ ID NO: 98621 - DNA, 25 bp, probe
catttgattgtgaagaagggagagt

SEQ ID NO: 98622 - DNA, 25 bp, probe
atagaggagccaaagagagatttca

SEQ ID NO: 98623 - DNA, 25 bp, probe
tgttatggcgaagtctttagtcttt

SEQ ID NO: 98624 - DNA, 25 bp, probe
ttgttatggcgaagtctttagtctt

SEQ ID NO: 98625 - DNA, 25 bp, probe
gcatctggaactgactatataattg

SEQ ID NO: 98626 - DNA, 25 bp, probe
agtgtttgtttgaattgtgtttgtt

SEQ ID NO: 98627 - DNA, 25 bp, probe
cttgttatggcgaagtctttagtct

SEQ ID NO: 98628 - DNA, 25 bp, probe
tgtatttgtggtatcagtttggaaa

SEQ ID NO: 98629 - DNA, 25 bp, probe
gattgtgaagaagggagagttaaat

SEQ ID NO: 98630 - DNA, 25 bp, probe
atatagaggagccaaagagagattt

SEQ ID NO: 98631 - DNA, 25 bp, probe
agaatggacagtgaggacagttatg

SEQ ID NO: 98632 - DNA, 25 bp, probe
cagaatggacagtgaggacagttat

SEQ ID NO: 98633 - DNA, 25 bp, probe
gaatggacagtgaggacagttatgt

SEQ ID NO: 98634 - DNA, 25 bp, probe
acagaatggacagtgaggacagtta

SEQ ID NO: 98635 - DNA, 25 bp, probe
cagacctagcagtgacatctcattg

SEQ ID NO: 98636 - DNA, 25 bp, probe
agacctagcagtgacatctcattgt

SEQ ID NO: 98637 - DNA, 25 bp, probe
aagacagaatggacagtgaggacag

SEQ ID NO: 98638 - DNA, 25 bp, probe
gaagacagaatggacagtgaggaca

SEQ ID NO: 98639 - DNA, 25 bp, probe
gacagaatggacagtgaggacagtt

SEQ ID NO: 98640 - DNA, 25 bp, probe
ccagacctagcagtgacatctcatt

SEQ ID NO: 98641 - DNA, 25 bp, probe
ttaactcacatttatacagcagaaa

SEQ ID NO: 98642 - DNA, 25 bp, probe
aggactcacgttaactcacatttat

SEQ ID NO: 98643 - DNA, 25 bp, probe
ttaggactcacgttaactcacattt

SEQ ID NO: 98644 - DNA, 25 bp, probe
tttaggactcacgttaactcacatt

SEQ ID NO: 98645 - DNA, 25 bp, probe
cacgttaactcacatttatacagca

SEQ ID NO: 98646 - DNA, 25 bp, probe
acgttaactcacatttatacagcag

SEQ ID NO: 98647 - DNA, 25 bp, probe
tcacgttaactcacatttatacagc

SEQ ID NO: 98648 - DNA, 25 bp, probe
taggactcacgttaactcacattta

SEQ ID NO: 98649 - DNA, 25 bp, probe
cgttaactcacatttatacagcaga

SEQ ID NO: 98650 - DNA, 25 bp, probe
ggactcacgttaactcacatttata

SEQ ID NO: 98651 - DNA, 25 bp, probe
actcacgttaactcacatttataca

SEQ ID NO: 98652 - DNA, 25 bp, probe
agacagaatggacagtgaggacagt

SEQ ID NO: 98653 - DNA, 25 bp, probe
cgaagacagaatggacagtgaggac

SEQ ID NO: 98654 - DNA, 25 bp, probe
taactcacatttatacagcagaaat

SEQ ID NO: 98655 - DNA, 25 bp, probe
ctcacgttaactcacatttatacag

SEQ ID NO: 98656 - DNA, 25 bp, probe
gactcacgttaactcacatttatac

SEQ ID NO: 98657 - DNA, 25 bp, probe
cagaaatgctattttgtatgctgtt

SEQ ID NO: 98658 - DNA, 25 bp, probe
gttaactcacatttatacagcagaa

SEQ ID NO: 98659 - DNA, 25 bp, probe
aatggacagtgaggacagttatgtc

SEQ ID NO: 98660 - DNA, 25 bp, probe
ggacagtgaggacagttatgtcttg

SEQ ID NO: 98661 - DNA, 25 bp, probe
gacctagcagtgacatctcattgtc

SEQ ID NO: 98662 - DNA, 25 bp, probe
atggacagtgaggacagttatgtct

SEQ ID NO: 98663 - DNA, 25 bp, probe
tcgaagacagaatggacagtgagga

SEQ ID NO: 98664 - DNA, 25 bp, probe
ttttaggactcacgttaactcacat

SEQ ID NO: 98665 - DNA, 25 bp, probe
tggacagtgaggacagttatgtctt

SEQ ID NO: 98666 - DNA, 25 bp, probe
gcagaaatgctattttgtatgctgt

SEQ ID NO: 98667 - DNA, 25 bp, probe
gtcgaagacagaatggacagtgagg

SEQ ID NO: 98668 - DNA, 25 bp, probe
actcacatttatacagcagaaatgc

SEQ ID NO: 98669 - DNA, 25 bp, probe
gttctcaatacggtaccaaagatat

SEQ ID NO: 98670 - DNA, 25 bp, probe
ggttctcaatacggtaccaaagata

SEQ ID NO: 98671 - DNA, 25 bp, probe
acggtaccaaagatataatcaccta

SEQ ID NO: 98672 - DNA, 25 bp, probe
tacggtaccaaagatataatcacct

SEQ ID NO: 98673 - DNA, 25 bp, probe
aactcacatttatacagcagaaatg

SEQ ID NO: 98674 - DNA, 25 bp, probe
acctagcagtgacatctcattgtcc

SEQ ID NO: 98675 - DNA, 25 bp, probe
gaaactccgtctctaccaatataca

SEQ ID NO: 98676 - DNA, 25 bp, probe
tgaaactccgtctctaccaatatac

SEQ ID NO: 98677 - DNA, 25 bp, probe
gtgaaactccgtctctaccaatata

SEQ ID NO: 98678 - DNA, 25 bp, probe
aactccgtctctaccaatatacaaa

SEQ ID NO: 98679 - DNA, 25 bp, probe
aaactccgtctctaccaatatacaa

SEQ ID NO: 98680 - DNA, 25 bp, probe
caggacattcttgccgtattctcat

SEQ ID NO: 98681 - DNA, 25 bp, probe
aaagttacagtttacgcaggacatt

SEQ ID NO: 98682 - DNA, 25 bp, probe
ttacagtttacgcaggacattcttg

SEQ ID NO: 98683 - DNA, 25 bp, probe
gttacagtttacgcaggacattctt

SEQ ID NO: 98684 - DNA, 25 bp, probe
aagttacagtttacgcaggacattc

SEQ ID NO: 98685 - DNA, 25 bp, probe
tagtgaaactccgtctctaccaata

SEQ ID NO: 98686 - DNA, 25 bp, probe
agtgaaactccgtctctaccaatat

SEQ ID NO: 98687 - DNA, 25 bp, probe
atagtgaaactccgtctctaccaat

SEQ ID NO: 98688 - DNA, 25 bp, probe
caacatagtgaaactccgtctctac

SEQ ID NO: 98689 - DNA, 25 bp, probe
caaagttacagtttacgcaggacat

SEQ ID NO: 98690 - DNA, 25 bp, probe
caatatgcagcaatggtaagcgtaa

SEQ ID NO: 98691 - DNA, 25 bp, probe
catgatcccagataagtgtgtgttt

SEQ ID NO: 98692 - DNA, 25 bp, probe
aggacattcttgccgtattctcatg

SEQ ID NO: 98693 - DNA, 25 bp, probe
agttacagtttacgcaggacattct

SEQ ID NO: 98694 - DNA, 25 bp, probe
catagtgaaactccgtctctaccaa

SEQ ID NO: 98695 - DNA, 25 bp, probe
aacatagtgaaactccgtctctacc

SEQ ID NO: 98696 - DNA, 25 bp, probe
ccaacatagtgaaactccgtctcta

SEQ ID NO: 98697 - DNA, 25 bp, probe
tcaaagttacagtttacgcaggaca

SEQ ID NO: 98698 - DNA, 25 bp, probe
acaatatgcagcaatggtaagcgta

SEQ ID NO: 98699 - DNA, 25 bp, probe
acatagtgaaactccgtctctacca

SEQ ID NO: 98700 - DNA, 25 bp, probe
gtcaaagttacagtttacgcaggac

SEQ ID NO: 98701 - DNA, 25 bp, probe
acattcttgccgtattctcatgatc

SEQ ID NO: 98702 - DNA, 25 bp, probe
gacattcttgccgtattctcatgat

SEQ ID NO: 98703 - DNA, 25 bp, probe
aatatgcagcaatggtaagcgtaaa

SEQ ID NO: 98704 - DNA, 25 bp, probe
tgtcaaagttacagtttacgcagga

SEQ ID NO: 98705 - DNA, 25 bp, probe
actccgtctctaccaatatacaaaa

SEQ ID NO: 98706 - DNA, 25 bp, probe
cattcttgccgtattctcatgatcc

SEQ ID NO: 98707 - DNA, 25 bp, probe
atatgcagcaatggtaagcgtaaag

SEQ ID NO: 98708 - DNA, 25 bp, probe
caacaatatgcagcaatggtaagcg

SEQ ID NO: 98709 - DNA, 25 bp, probe
cttacgcctgtaatcctagcacttt

SEQ ID NO: 98710 - DNA, 25 bp, probe
tgatcccagataagtgtgtgtttta

SEQ ID NO: 98711 - DNA, 25 bp, probe
atgatcccagataagtgtgtgtttt

SEQ ID NO: 98712 - DNA, 25 bp, probe
ttacgcctgtaatcctagcactttg

SEQ ID NO: 98713 - DNA, 25 bp, probe
aacaatatgcagcaatggtaagcgt

SEQ ID NO: 98714 - DNA, 25 bp, probe
tcccagataagtgtgtgttttatac

SEQ ID NO: 98715 - DNA, 25 bp, probe
acacagagtttggtatgatatttaa

SEQ ID NO: 98716 - DNA, 25 bp, probe
cccagataagtgtgtgttttatact

SEQ ID NO: 98717 - DNA, 25 bp, probe
tgaagtcttttaacagtctctcttt

SEQ ID NO: 98718 - DNA, 25 bp, probe
gatcccagataagtgtgtgttttat

SEQ ID NO: 98719 - DNA, 25 bp, probe
ttggataacctgtaccgactggaag

SEQ ID NO: 98720 - DNA, 25 bp, probe
cttggataacctgtaccgactggaa

SEQ ID NO: 98721 - DNA, 25 bp, probe
caagtttctacaggaagcgaggatc

SEQ ID NO: 98722 - DNA, 25 bp, probe
gtccttggataacctgtaccgactg

SEQ ID NO: 98723 - DNA, 25 bp, probe
cagtccttggataacctgtaccgac

SEQ ID NO: 98724 - DNA, 25 bp, probe
ccaagtttctacaggaagcgaggat

SEQ ID NO: 98725 - DNA, 25 bp, probe
ctcatatgctgacagctcttcacag

SEQ ID NO: 98726 - DNA, 25 bp, probe
catatgctgacagctcttcacagtc

SEQ ID NO: 98727 - DNA, 25 bp, probe
aataaaaccacttgtgcccactgaa

SEQ ID NO: 98728 - DNA, 25 bp, probe
cgggcagaaacaataaaaccacttg

SEQ ID NO: 98729 - DNA, 25 bp, probe
ctcaaggccaagtttctacaggaag

SEQ ID NO: 98730 - DNA, 25 bp, probe
tcatatgctgacagctcttcacagt

SEQ ID NO: 98731 - DNA, 25 bp, probe
attcctttgctcatcgaccacctac

SEQ ID NO: 98732 - DNA, 25 bp, probe
cattcctttgctcatcgaccaccta

SEQ ID NO: 98733 - DNA, 25 bp, probe
atatgctgacagctcttcacagtcc

SEQ ID NO: 98734 - DNA, 25 bp, probe
caataaaaccacttgtgcccactga

SEQ ID NO: 98735 - DNA, 25 bp, probe
cagaaacaataaaaccacttgtgcc

SEQ ID NO: 98736 - DNA, 25 bp, probe
ggcagaaacaataaaaccacttgtg

SEQ ID NO: 98737 - DNA, 25 bp, probe
agtccttggataacctgtaccgact

SEQ ID NO: 98738 - DNA, 25 bp, probe
tcctcttccgggcagaaacaataaa

SEQ ID NO: 98739 - DNA, 25 bp, probe
ttcctcttccgggcagaaacaataa

SEQ ID NO: 98740 - DNA, 25 bp, probe
gcagaaacaataaaaccacttgtgc

SEQ ID NO: 98741 - DNA, 25 bp, probe
ctcttccgggcagaaacaataaaac

SEQ ID NO: 98742 - DNA, 25 bp, probe
agaaacaataaaaccacttgtgccc

SEQ ID NO: 98743 - DNA, 25 bp, probe
gggcagaaacaataaaaccacttgt

SEQ ID NO: 98744 - DNA, 25 bp, probe
tgacctcaaggccaagtttctacag

SEQ ID NO: 98745 - DNA, 25 bp, probe
ctgacctcaaggccaagtttctaca

SEQ ID NO: 98746 - DNA, 25 bp, probe
gaaacaataaaaccacttgtgccca

SEQ ID NO: 98747 - DNA, 25 bp, probe
gctcatatgctgacagctcttcaca

SEQ ID NO: 98748 - DNA, 25 bp, probe
cttcctcttccgggcagaaacaata

SEQ ID NO: 98749 - DNA, 25 bp, probe
aaacaataaaaccacttgtgcccac

SEQ ID NO: 98750 - DNA, 25 bp, probe
ggaaggctttcctagcattcctttg

SEQ ID NO: 98751 - DNA, 25 bp, probe
cctcttccgggcagaaacaataaaa

SEQ ID NO: 98752 - DNA, 25 bp, probe
cctcaaggccaagtttctacaggaa

SEQ ID NO: 98753 - DNA, 25 bp, probe
tcaaggccaagtttctacaggaagc

SEQ ID NO: 98754 - DNA, 25 bp, probe
tcttccgggcagaaacaataaaacc

SEQ ID NO: 98755 - DNA, 25 bp, probe
aacaataaaaccacttgtgcccact

SEQ ID NO: 98756 - DNA, 25 bp, probe
gaaggctttcctagcattcctttgc

SEQ ID NO: 98757 - DNA, 25 bp, probe
cttccgggcagaaacaataaaacca

SEQ ID NO: 98758 - DNA, 25 bp, probe
ccgggcagaaacaataaaaccactt

SEQ ID NO: 98759 - DNA, 25 bp, probe
ttccgggcagaaacaataaaaccac

SEQ ID NO: 98760 - DNA, 25 bp, probe
gacctcaaggccaagtttctacagg

SEQ ID NO: 98761 - DNA, 25 bp, probe
cctgacctcaaggccaagtttctac

SEQ ID NO: 98762 - DNA, 25 bp, probe
gggaaggctttcctagcattccttt

SEQ ID NO: 98763 - DNA, 25 bp, probe
ggaggtcatccattaggaattaaat

SEQ ID NO: 98764 - DNA, 25 bp, probe
taggaattaaattctccagcctcaa

SEQ ID NO: 98765 - DNA, 25 bp, probe
ttaggaattaaattctccagcctca

SEQ ID NO: 98766 - DNA, 25 bp, probe
ccattaggaattaaattctccagcc

SEQ ID NO: 98767 - DNA, 25 bp, probe
aggaattaaattctccagcctcaaa

SEQ ID NO: 98768 - DNA, 25 bp, probe
cattaggaattaaattctccagcct

SEQ ID NO: 98769 - DNA, 25 bp, probe
tccattaggaattaaattctccagc

SEQ ID NO: 98770 - DNA, 25 bp, probe
attaggaattaaattctccagcctc

SEQ ID NO: 98771 - DNA, 25 bp, probe
gaggtcatccattaggaattaaatt

SEQ ID NO: 98772 - DNA, 25 bp, probe
acctcaactgtgacaatcagcaaag

SEQ ID NO: 98773 - DNA, 25 bp, probe
ctggaggtcatccattaggaattaa

SEQ ID NO: 98774 - DNA, 25 bp, probe
gtgaccaccattctgcctcaatctt

SEQ ID NO: 98775 - DNA, 25 bp, probe
cctggaggtcatccattaggaatta

SEQ ID NO: 98776 - DNA, 25 bp, probe
cacctcaactgtgacaatcagcaaa

SEQ ID NO: 98777 - DNA, 25 bp, probe
catccattaggaattaaattctcca

SEQ ID NO: 98778 - DNA, 25 bp, probe
ggtcatccattaggaattaaattct

SEQ ID NO: 98779 - DNA, 25 bp, probe
aggtcatccattaggaattaaattc

SEQ ID NO: 98780 - DNA, 25 bp, probe
ggaattaaattctccagcctcaaaa

SEQ ID NO: 98781 - DNA, 25 bp, probe
tgaccaccattctgcctcaatcttt

SEQ ID NO: 98782 - DNA, 25 bp, probe
atccattaggaattaaattctccag

SEQ ID NO: 98783 - DNA, 25 bp, probe
tcatccattaggaattaaattctcc

SEQ ID NO: 98784 - DNA, 25 bp, probe
gaccaccattctgcctcaatctttt

SEQ ID NO: 98785 - DNA, 25 bp, probe
atcctggaggtcatccattaggaat

SEQ ID NO: 98786 - DNA, 25 bp, probe
tcctggaggtcatccattaggaatt

SEQ ID NO: 98787 - DNA, 25 bp, probe
aatcctggaggtcatccattaggaa

SEQ ID NO: 98788 - DNA, 25 bp, probe
tggaggtcatccattaggaattaaa

SEQ ID NO: 98789 - DNA, 25 bp, probe
ctcaactgtgacaatcagcaaagcc

SEQ ID NO: 98790 - DNA, 25 bp, probe
cctcaactgtgacaatcagcaaagc

SEQ ID NO: 98791 - DNA, 25 bp, probe
accaccattctgcctcaatcttttg

SEQ ID NO: 98792 - DNA, 25 bp, probe
gtcatccattaggaattaaattctc

SEQ ID NO: 98793 - DNA, 25 bp, probe
caatcctggaggtcatccattagga

SEQ ID NO: 98794 - DNA, 25 bp, probe
ctagagactgtagaccctggtggtg

SEQ ID NO: 98795 - DNA, 25 bp, probe
ccaatcctggaggtcatccattagg

SEQ ID NO: 98796 - DNA, 25 bp, probe
ccaccattctgcctcaatcttttgc

SEQ ID NO: 98797 - DNA, 25 bp, probe
cccaatcctggaggtcatccattag

SEQ ID NO: 98798 - DNA, 25 bp, probe
tcccaatcctggaggtcatccatta

SEQ ID NO: 98799 - DNA, 25 bp, probe
caccattctgcctcaatcttttgca

SEQ ID NO: 98800 - DNA, 25 bp, probe
ccattctgcctcaatcttttgcaag

SEQ ID NO: 98801 - DNA, 25 bp, probe
cattctgcctcaatcttttgcaagc

SEQ ID NO: 98802 - DNA, 25 bp, probe
accattctgcctcaatcttttgcaa

SEQ ID NO: 98803 - DNA, 25 bp, probe
attctgcctcaatcttttgcaagcc

SEQ ID NO: 98804 - DNA, 25 bp, probe
atccacttattgtaacaccagattg

SEQ ID NO: 98805 - DNA, 25 bp, probe
cttattgtaacaccagattgccaag

SEQ ID NO: 98806 - DNA, 25 bp, probe
tattgtaacaccagattgccaagaa

SEQ ID NO: 98807 - DNA, 25 bp, probe
ttattgtaacaccagattgccaaga

SEQ ID NO: 98808 - DNA, 25 bp, probe
tccacttattgtaacaccagattgc

SEQ ID NO: 98809 - DNA, 25 bp, probe
acttattgtaacaccagattgccaa

SEQ ID NO: 98810 - DNA, 25 bp, probe
cacttattgtaacaccagattgcca

SEQ ID NO: 98811 - DNA, 25 bp, probe
agatccacttattgtaacaccagat

SEQ ID NO: 98812 - DNA, 25 bp, probe
tgaagatccacttattgtaacacca

SEQ ID NO: 98813 - DNA, 25 bp, probe
aagatccacttattgtaacaccaga

SEQ ID NO: 98814 - DNA, 25 bp, probe
gaagatccacttattgtaacaccag

SEQ ID NO: 98815 - DNA, 25 bp, probe
gatccacttattgtaacaccagatt

SEQ ID NO: 98816 - DNA, 25 bp, probe
ttgaagatccacttattgtaacacc

SEQ ID NO: 98817 - DNA, 25 bp, probe
ccacttattgtaacaccagattgcc

SEQ ID NO: 98818 - DNA, 25 bp, probe
atgttctgatgatgatagagcttct

SEQ ID NO: 98819 - DNA, 25 bp, probe
ttagaaagtcagcccttagattcag

SEQ ID NO: 98820 - DNA, 25 bp, probe
gtcagcccttagattcagatagaag

SEQ ID NO: 98821 - DNA, 25 bp, probe
aaagtcagcccttagattcagatag

SEQ ID NO: 98822 - DNA, 25 bp, probe
gaaagtcagcccttagattcagata

SEQ ID NO: 98823 - DNA, 25 bp, probe
ccattagaaagtcagcccttagatt

SEQ ID NO: 98824 - DNA, 25 bp, probe
agtcagcccttagattcagatagaa

SEQ ID NO: 98825 - DNA, 25 bp, probe
aagtcagcccttagattcagataga

SEQ ID NO: 98826 - DNA, 25 bp, probe
attagaaagtcagcccttagattca

SEQ ID NO: 98827 - DNA, 25 bp, probe
tagaaagtcagcccttagattcaga

SEQ ID NO: 98828 - DNA, 25 bp, probe
cattagaaagtcagcccttagattc

SEQ ID NO: 98829 - DNA, 25 bp, probe
tccattagaaagtcagcccttagat

SEQ ID NO: 98830 - DNA, 25 bp, probe
agcccttagattcagatagaagcat

SEQ ID NO: 98831 - DNA, 25 bp, probe
attgaagatccacttattgtaacac

SEQ ID NO: 98832 - DNA, 25 bp, probe
agaaagtcagcccttagattcagat

SEQ ID NO: 98833 - DNA, 25 bp, probe
aagtccattagaaagtcagccctta

SEQ ID NO: 98834 - DNA, 25 bp, probe
taaccattgatgatacaaagagagc

SEQ ID NO: 98835 - DNA, 25 bp, probe
tatgttctgatgatgatagagcttc

SEQ ID NO: 98836 - DNA, 25 bp, probe
atctggatttagtctgtagcacaaa

SEQ ID NO: 98837 - DNA, 25 bp, probe
gtatctggatttagtctgtagcaca

SEQ ID NO: 98838 - DNA, 25 bp, probe
tcagcccttagattcagatagaagc

SEQ ID NO: 98839 - DNA, 25 bp, probe
attgtaacaccagattgccaagaaa

SEQ ID NO: 98840 - DNA, 25 bp, probe
agtccattagaaagtcagcccttag

SEQ ID NO: 98841 - DNA, 25 bp, probe
tatctggatttagtctgtagcacaa

SEQ ID NO: 98842 - DNA, 25 bp, probe
gtccattagaaagtcagcccttaga

SEQ ID NO: 98843 - DNA, 25 bp, probe
tgttctgatgatgatagagcttcta

SEQ ID NO: 98844 - DNA, 25 bp, probe
cagcccttagattcagatagaagca

SEQ ID NO: 98845 - DNA, 25 bp, probe
ctatgttctgatgatgatagagctt

SEQ ID NO: 98846 - DNA, 25 bp, probe
agttatctgataatgctcaaagtgc

SEQ ID NO: 98847 - DNA, 25 bp, probe
aaagtccattagaaagtcagccctt

SEQ ID NO: 98848 - DNA, 25 bp, probe
ctctggattaggtctctgttgactg

SEQ ID NO: 98849 - DNA, 25 bp, probe
gaactcctaacctcaagtgatcctc

SEQ ID NO: 98850 - DNA, 25 bp, probe
taaggttcaagacagatgggcatat

SEQ ID NO: 98851 - DNA, 25 bp, probe
ttaaggttcaagacagatgggcata

SEQ ID NO: 98852 - DNA, 25 bp, probe
gcaatttgttaaggttcaagacaga

SEQ ID NO: 98853 - DNA, 25 bp, probe
atttgttaaggttcaagacagatgg

SEQ ID NO: 98854 - DNA, 25 bp, probe
tttgttaaggttcaagacagatggg

SEQ ID NO: 98855 - DNA, 25 bp, probe
ctgatctcgaactcctaacctcaag

SEQ ID NO: 98856 - DNA, 25 bp, probe
ctcgaactcctaacctcaagtgatc

SEQ ID NO: 98857 - DNA, 25 bp, probe
gatctcgaactcctaacctcaagtg

SEQ ID NO: 98858 - DNA, 25 bp, probe
cctctggattaggtctctgttgact

SEQ ID NO: 98859 - DNA, 25 bp, probe
tctggattaggtctctgttgactgg

SEQ ID NO: 98860 - DNA, 25 bp, probe
aactcctaacctcaagtgatcctcc

SEQ ID NO: 98861 - DNA, 25 bp, probe
caaggaaccaaatttaagactctcg

SEQ ID NO: 98862 - DNA, 25 bp, probe
aagcaaggaaccaaatttaagactc

SEQ ID NO: 98863 - DNA, 25 bp, probe
gaagcaaggaaccaaatttaagact

SEQ ID NO: 98864 - DNA, 25 bp, probe
agaagcaaggaaccaaatttaagac

SEQ ID NO: 98865 - DNA, 25 bp, probe
gcaaggaaccaaatttaagactctc

SEQ ID NO: 98866 - DNA, 25 bp, probe
gaaccaaatttaagactctcgcatc

SEQ ID NO: 98867 - DNA, 25 bp, probe
ccaaagaagcaaggaaccaaattta

SEQ ID NO: 98868 - DNA, 25 bp, probe
tctcgaactcctaacctcaagtgat

SEQ ID NO: 98869 - DNA, 25 bp, probe
atctcgaactcctaacctcaagtga

SEQ ID NO: 98870 - DNA, 25 bp, probe
tgatctcgaactcctaacctcaagt

SEQ ID NO: 98871 - DNA, 25 bp, probe
agcaaggaaccaaatttaagactct

SEQ ID NO: 98872 - DNA, 25 bp, probe
aatttgttaaggttcaagacagatg

SEQ ID NO: 98873 - DNA, 25 bp, probe
caatttgttaaggttcaagacagat

SEQ ID NO: 98874 - DNA, 25 bp, probe
aagaagcaaggaaccaaatttaaga

SEQ ID NO: 98875 - DNA, 25 bp, probe
caaagaagcaaggaaccaaatttaa

SEQ ID NO: 98876 - DNA, 25 bp, probe
aaccaaatttaagactctcgcatct

SEQ ID NO: 98877 - DNA, 25 bp, probe
cgaactcctaacctcaagtgatcct

SEQ ID NO: 98878 - DNA, 25 bp, probe
atagagatgaggtttcaccatgatg

SEQ ID NO: 98879 - DNA, 25 bp, probe
aaagaagcaaggaaccaaatttaag

SEQ ID NO: 98880 - DNA, 25 bp, probe
aatagagatgaggtttcaccatgat

SEQ ID NO: 98881 - DNA, 25 bp, probe
aaggaaccaaatttaagactctcgc

SEQ ID NO: 98882 - DNA, 25 bp, probe
gttaaggttcaagacagatgggcat

SEQ ID NO: 98883 - DNA, 25 bp, probe
ggaaccaaatttaagactctcgcat

SEQ ID NO: 98884 - DNA, 25 bp, probe
taatagagatgaggtttcaccatga

SEQ ID NO: 98885 - DNA, 25 bp, probe
tgcaatttgttaaggttcaagacag

SEQ ID NO: 98886 - DNA, 25 bp, probe
agtttccttttctgtctctctcttt

SEQ ID NO: 98887 - DNA, 25 bp, probe
ttaatagagatgaggtttcaccatg

SEQ ID NO: 98888 - DNA, 25 bp, probe
gtttccttttctgtctctctctttt

SEQ ID NO: 98889 - DNA, 25 bp, probe
tttaatagagatgaggtttcaccat

SEQ ID NO: 98890 - DNA, 25 bp, probe
gattaggtctctgttgactggctgt

SEQ ID NO: 98891 - DNA, 25 bp, probe
tcgaactcctaacctcaagtgatcc

SEQ ID NO: 98892 - DNA, 25 bp, probe
gatatgtggacaaagaagaagatgc

SEQ ID NO: 98893 - DNA, 25 bp, probe
cgatatgtggacaaagaagaagatg

SEQ ID NO: 98894 - DNA, 25 bp, probe
acgatatgtggacaaagaagaagat

SEQ ID NO: 98895 - DNA, 25 bp, probe
gacgatatgtggacaaagaagaaga

SEQ ID NO: 98896 - DNA, 25 bp, probe
tgacgatatgtggacaaagaagaag

SEQ ID NO: 98897 - DNA, 25 bp, probe
gtgacgatatgtggacaaagaagaa

SEQ ID NO: 98898 - DNA, 25 bp, probe
taatgtgacgatatgtggacaaaga

SEQ ID NO: 98899 - DNA, 25 bp, probe
gtaatgtgacgatatgtggacaaag

SEQ ID NO: 98900 - DNA, 25 bp, probe
tgtaatgtgacgatatgtggacaaa

SEQ ID NO: 98901 - DNA, 25 bp, probe
tttgtaatgtgacgatatgtggaca

SEQ ID NO: 98902 - DNA, 25 bp, probe
aatgtgacgatatgtggacaaagaa

SEQ ID NO: 98903 - DNA, 25 bp, probe
atgtgacgatatgtggacaaagaag

SEQ ID NO: 98904 - DNA, 25 bp, probe
ctgaagcagagagcagatttaatat

SEQ ID NO: 98905 - DNA, 25 bp, probe
aagcagagagcagatttaatatagt

SEQ ID NO: 98906 - DNA, 25 bp, probe
tgaagcagagagcagatttaatata

SEQ ID NO: 98907 - DNA, 25 bp, probe
tgtgacgatatgtggacaaagaaga

SEQ ID NO: 98908 - DNA, 25 bp, probe
agaagaagatgcaggtttaagaagt

SEQ ID NO: 98909 - DNA, 25 bp, probe
acaaagaagaagatgcaggtttaag

SEQ ID NO: 98910 - DNA, 25 bp, probe
gacaaagaagaagatgcaggtttaa

SEQ ID NO: 98911 - DNA, 25 bp, probe
gaagaagatgcaggtttaagaagtt

SEQ ID NO: 98912 - DNA, 25 bp, probe
atatgtggacaaagaagaagatgca

SEQ ID NO: 98913 - DNA, 25 bp, probe
ttgtaatgtgacgatatgtggacaa

SEQ ID NO: 98914 - DNA, 25 bp, probe
caaagaagaagatgcaggtttaaga

SEQ ID NO: 98915 - DNA, 25 bp, probe
aagaagaagatgcaggtttaagaag

SEQ ID NO: 98916 - DNA, 25 bp, probe
gaagcagagagcagatttaatatag

SEQ ID NO: 98917 - DNA, 25 bp, probe
tatgtggacaaagaagaagatgcag

SEQ ID NO: 98918 - DNA, 25 bp, probe
aaagaagaagatgcaggtttaagaa

SEQ ID NO: 98919 - DNA, 25 bp, probe
ggacaaagaagaagatgcaggttta

SEQ ID NO: 98920 - DNA, 25 bp, probe
gtgaaagacacagttactaggataa

SEQ ID NO: 98921 - DNA, 25 bp, probe
agcagagagcagatttaatatagta

SEQ ID NO: 98922 - DNA, 25 bp, probe
aagaagatgcaggtttaagaagtta

SEQ ID NO: 98923 - DNA, 25 bp, probe
tgaaagacacagttactaggataac

SEQ ID NO: 98924 - DNA, 25 bp, probe
gctgaagcagagagcagatttaata

SEQ ID NO: 98925 - DNA, 25 bp, probe
ttttgtaatgtgacgatatgtggac

SEQ ID NO: 98926 - DNA, 25 bp, probe
agaagatgcaggtttaagaagttaa

SEQ ID NO: 98927 - DNA, 25 bp, probe
attttgtttctttggatttggggtg

SEQ ID NO: 98928 - DNA, 25 bp, probe
cattttgtttctttggatttggggt

SEQ ID NO: 98929 - DNA, 25 bp, probe
tttctgtgtaccaggttgcctaaat

SEQ ID NO: 98930 - DNA, 25 bp, probe
ctgtgtaccaggttgcctaaatcat

SEQ ID NO: 98931 - DNA, 25 bp, probe
ttctgtgtaccaggttgcctaaatc

SEQ ID NO: 98932 - DNA, 25 bp, probe
gcagagagcagatttaatatagtaa

SEQ ID NO: 98933 - DNA, 25 bp, probe
gaagatgcaggtttaagaagttaat

SEQ ID NO: 98934 - DNA, 25 bp, probe
ttaaggggtcccattttgtttcttt

SEQ ID NO: 98935 - DNA, 25 bp, probe
tggacaaagaagaagatgcaggttt

SEQ ID NO: 98936 - DNA, 25 bp, probe
tctgaatagtgtgtatgtgttggtt

SEQ ID NO: 98937 - DNA, 25 bp, probe
cctctctgaatagtgtgtatgtgtt

SEQ ID NO: 98938 - DNA, 25 bp, probe
tctctgaatagtgtgtatgtgttgg

SEQ ID NO: 98939 - DNA, 25 bp, probe
ctctgaatagtgtgtatgtgttggt

SEQ ID NO: 98940 - DNA, 25 bp, probe
ctctctgaatagtgtgtatgtgttg

SEQ ID NO: 98941 - DNA, 25 bp, probe
acctctctgaatagtgtgtatgtgt

SEQ ID NO: 98942 - DNA, 25 bp, probe
cctctattctcttgtgtctgtaagt

SEQ ID NO: 98943 - DNA, 25 bp, probe
ctctattctcttgtgtctgtaagtt

SEQ ID NO: 98944 - DNA, 25 bp, probe
cacctctctgaatagtgtgtatgtg

SEQ ID NO: 98945 - DNA, 25 bp, probe
ccacctctctgaatagtgtgtatgt

SEQ ID NO: 98946 - DNA, 25 bp, probe
ttctaccctctattctcttgtgtct

SEQ ID NO: 98947 - DNA, 25 bp, probe
cttctaccctctattctcttgtgtc

SEQ ID NO: 98948 - DNA, 25 bp, probe
tttcccttctaccctctattctctt

SEQ ID NO: 98949 - DNA, 25 bp, probe
atttcccttctaccctctattctct

SEQ ID NO: 98950 - DNA, 25 bp, probe
taccctctattctcttgtgtctgta

SEQ ID NO: 98951 - DNA, 25 bp, probe
ctgaatagtgtgtatgtgttggttt

SEQ ID NO: 98952 - DNA, 25 bp, probe
accctctattctcttgtgtctgtaa

SEQ ID NO: 98953 - DNA, 25 bp, probe
ttcccttctaccctctattctcttg

SEQ ID NO: 98954 - DNA, 25 bp, probe
tctaccctctattctcttgtgtctg

SEQ ID NO: 98955 - DNA, 25 bp, probe
tatcactgctttcctactctccttt

SEQ ID NO: 98956 - DNA, 25 bp, probe
ccctctattctcttgtgtctgtaag

SEQ ID NO: 98957 - DNA, 25 bp, probe
ctaccctctattctcttgtgtctgt

SEQ ID NO: 98958 - DNA, 25 bp, probe
ccttctaccctctattctcttgtgt

SEQ ID NO: 98959 - DNA, 25 bp, probe
agtgtgtatgtgttggtttattgat

SEQ ID NO: 98960 - DNA, 25 bp, probe
cttctctcctatcactgctttccta

SEQ ID NO: 98961 - DNA, 25 bp, probe
aatttcccttctaccctctattctc

SEQ ID NO: 98962 - DNA, 25 bp, probe
ctatcactgctttcctactctcctt

SEQ ID NO: 98963 - DNA, 25 bp, probe
ttctctcctatcactgctttcctac

SEQ ID NO: 98964 - DNA, 25 bp, probe
tagtgtgtatgtgttggtttattga

SEQ ID NO: 98965 - DNA, 25 bp, probe
tgaatagtgtgtatgtgttggttta

SEQ ID NO: 98966 - DNA, 25 bp, probe
cccttctaccctctattctcttgtg

SEQ ID NO: 98967 - DNA, 25 bp, probe
tcccttctaccctctattctcttgt

SEQ ID NO: 98968 - DNA, 25 bp, probe
tctattctcttgtgtctgtaagtta

SEQ ID NO: 98969 - DNA, 25 bp, probe
gtgtgtatgtgttggtttattgatt

SEQ ID NO: 98970 - DNA, 25 bp, probe
ctcctatcactgctttcctactctc

SEQ ID NO: 98971 - DNA, 25 bp, probe
ctctcctatcactgctttcctactc

SEQ ID NO: 98972 - DNA, 25 bp, probe
ctattctcttgtgtctgtaagttac

SEQ ID NO: 98973 - DNA, 25 bp, probe
cctcacttctctcctatcactgctt

SEQ ID NO: 98974 - DNA, 25 bp, probe
tcacttctctcctatcactgctttc

SEQ ID NO: 98975 - DNA, 25 bp, probe
ctcacttctctcctatcactgcttt

SEQ ID NO: 98976 - DNA, 25 bp, probe
tgtgtatgtgttggtttattgattc

SEQ ID NO: 98977 - DNA, 25 bp, probe
tctcctatcactgctttcctactct

SEQ ID NO: 98978 - DNA, 25 bp, probe
tctctcctatcactgctttcctact

SEQ ID NO: 98979 - DNA, 25 bp, probe
gtatgtgttggtttattgattctgt

SEQ ID NO: 98980 - DNA, 25 bp, probe
attctcaacatacctcaacttctgc

SEQ ID NO: 98981 - DNA, 25 bp, probe
aattctcaacatacctcaacttctg

SEQ ID NO: 98982 - DNA, 25 bp, probe
ttctcaacatacctcaacttctgcc

SEQ ID NO: 98983 - DNA, 25 bp, probe
cgaattctcaacatacctcaacttc

SEQ ID NO: 98984 - DNA, 25 bp, probe
ccgaattctcaacatacctcaactt

SEQ ID NO: 98985 - DNA, 25 bp, probe
ctccgaattctcaacatacctcaac

SEQ ID NO: 98986 - DNA, 25 bp, probe
gaattctcaacatacctcaacttct

SEQ ID NO: 98987 - DNA, 25 bp, probe
tccgaattctcaacatacctcaact

SEQ ID NO: 98988 - DNA, 25 bp, probe
cctccgaattctcaacatacctcaa

SEQ ID NO: 98989 - DNA, 25 bp, probe
ctatccctccgaattctcaacatac

SEQ ID NO: 98990 - DNA, 25 bp, probe
tctcaacatacctcaacttctgccg

SEQ ID NO: 98991 - DNA, 25 bp, probe
gaccagtgtttgcttagtgtcttca

SEQ ID NO: 98992 - DNA, 25 bp, probe
tatccctccgaattctcaacatacc

SEQ ID NO: 98993 - DNA, 25 bp, probe
cattggaccagtgtttgcttagtgt

SEQ ID NO: 98994 - DNA, 25 bp, probe
gctatccctccgaattctcaacata

SEQ ID NO: 98995 - DNA, 25 bp, probe
accagtgtttgcttagtgtcttcac

SEQ ID NO: 98996 - DNA, 25 bp, probe
attggaccagtgtttgcttagtgtc

SEQ ID NO: 98997 - DNA, 25 bp, probe
ggaccagtgtttgcttagtgtcttc

SEQ ID NO: 98998 - DNA, 25 bp, probe
ccattggaccagtgtttgcttagtg

SEQ ID NO: 98999 - DNA, 25 bp, probe
gacaagtgtgccatttgaccatctc

SEQ ID NO: 99000 - DNA, 25 bp, probe
atccctccgaattctcaacatacct

SEQ ID NO: 99001 - DNA, 25 bp, probe
tgtttgcttagtgtcttcactgtat

SEQ ID NO: 99002 - DNA, 25 bp, probe
gtttgcttagtgtcttcactgtatt

SEQ ID NO: 99003 - DNA, 25 bp, probe
cagacaagtgtgccatttgaccatc

SEQ ID NO: 99004 - DNA, 25 bp, probe
tggaccagtgtttgcttagtgtctt

SEQ ID NO: 99005 - DNA, 25 bp, probe
ttggaccagtgtttgcttagtgtct

SEQ ID NO: 99006 - DNA, 25 bp, probe
tttgcttagtgtcttcactgtattt

SEQ ID NO: 99007 - DNA, 25 bp, probe
gtgtttgcttagtgtcttcactgta

SEQ ID NO: 99008 - DNA, 25 bp, probe
agacaagtgtgccatttgaccatct

SEQ ID NO: 99009 - DNA, 25 bp, probe
tccctccgaattctcaacatacctc

SEQ ID NO: 99010 - DNA, 25 bp, probe
caatacttctcccagagcgatctcg

SEQ ID NO: 99011 - DNA, 25 bp, probe
ccctccgaattctcaacatacctca

SEQ ID NO: 99012 - DNA, 25 bp, probe
gcaatacttctcccagagcgatctc

SEQ ID NO: 99013 - DNA, 25 bp, probe
aaaggctatccctccgaattctcaa

SEQ ID NO: 99014 - DNA, 25 bp, probe
agtgtttgcttagtgtcttcactgt

SEQ ID NO: 99015 - DNA, 25 bp, probe
acagacaagtgtgccatttgaccat

SEQ ID NO: 99016 - DNA, 25 bp, probe
ggctatccctccgaattctcaacat

SEQ ID NO: 99017 - DNA, 25 bp, probe
ccagtgtttgcttagtgtcttcact

SEQ ID NO: 99018 - DNA, 25 bp, probe
aaggctatccctccgaattctcaac

SEQ ID NO: 99019 - DNA, 25 bp, probe
caaaggctatccctccgaattctca

SEQ ID NO: 99020 - DNA, 25 bp, probe
tgcttagtgtcttcactgtattttc

SEQ ID NO: 99021 - DNA, 25 bp, probe
gcttagtgtcttcactgtattttct

SEQ ID NO: 99022 - DNA, 25 bp, probe
ttgcttagtgtcttcactgtatttt

SEQ ID NO: 99023 - DNA, 25 bp, probe
aggctatccctccgaattctcaaca

SEQ ID NO: 99024 - DNA, 25 bp, probe
ttaggagacaatgaggaaggaggat

SEQ ID NO: 99025 - DNA, 25 bp, probe
attaggagacaatgaggaaggagga

SEQ ID NO: 99026 - DNA, 25 bp, probe
cagatggtggaggaatacacttatt

SEQ ID NO: 99027 - DNA, 25 bp, probe
caatgaggaaggaggatggattctg

SEQ ID NO: 99028 - DNA, 25 bp, probe
gacaatgaggaaggaggatggattc

SEQ ID NO: 99029 - DNA, 25 bp, probe
gtagttgggagtaagtttgtgaatg

SEQ ID NO: 99030 - DNA, 25 bp, probe
tgtagttgggagtaagtttgtgaat

SEQ ID NO: 99031 - DNA, 25 bp, probe
ttgtagttgggagtaagtttgtgaa

SEQ ID NO: 99032 - DNA, 25 bp, probe
tttgtagttgggagtaagtttgtga

SEQ ID NO: 99033 - DNA, 25 bp, probe
taggagacaatgaggaaggaggatg

SEQ ID NO: 99034 - DNA, 25 bp, probe
tagttgggagtaagtttgtgaatgg

SEQ ID NO: 99035 - DNA, 25 bp, probe
ttgggagtaagtttgtgaatggaaa

SEQ ID NO: 99036 - DNA, 25 bp, probe
agacaatgaggaaggaggatggatt

SEQ ID NO: 99037 - DNA, 25 bp, probe
acaatgaggaaggaggatggattct

SEQ ID NO: 99038 - DNA, 25 bp, probe
ccagatggtggaggaatacacttat

SEQ ID NO: 99039 - DNA, 25 bp, probe
cttacttgaatgaaagcacacttcg

SEQ ID NO: 99040 - DNA, 25 bp, probe
cacaaactgacaaattaaggaggtt

SEQ ID NO: 99041 - DNA, 25 bp, probe
gttgggagtaagtttgtgaatggaa

SEQ ID NO: 99042 - DNA, 25 bp, probe
tatgttgctgctggagatcaatgaa

SEQ ID NO: 99043 - DNA, 25 bp, probe
ccacaaactgacaaattaaggaggt

SEQ ID NO: 99044 - DNA, 25 bp, probe
acctcccacaaactgacaaattaag

SEQ ID NO: 99045 - DNA, 25 bp, probe
gagacaatgaggaaggaggatggat

SEQ ID NO: 99046 - DNA, 25 bp, probe
cacctcccacaaactgacaaattaa

SEQ ID NO: 99047 - DNA, 25 bp, probe
acaaactgacaaattaaggaggtta

SEQ ID NO: 99048 - DNA, 25 bp, probe
agttgggagtaagtttgtgaatgga

SEQ ID NO: 99049 - DNA, 25 bp, probe
cccacaaactgacaaattaaggagg

SEQ ID NO: 99050 - DNA, 25 bp, probe
ttacttgaatgaaagcacacttcgg

SEQ ID NO: 99051 - DNA, 25 bp, probe
aatgaggaaggaggatggattctgg

SEQ ID NO: 99052 - DNA, 25 bp, probe
agatggtggaggaatacacttattt

SEQ ID NO: 99053 - DNA, 25 bp, probe
cattaggagacaatgaggaaggagg

SEQ ID NO: 99054 - DNA, 25 bp, probe
ccattaggagacaatgaggaaggag

SEQ ID NO: 99055 - DNA, 25 bp, probe
accatcgtcatcgcttacttgaatg

SEQ ID NO: 99056 - DNA, 25 bp, probe
caccatcgtcatcgcttacttgaat

SEQ ID NO: 99057 - DNA, 25 bp, probe
actgacaaattaaggaggttaaaga

SEQ ID NO: 99058 - DNA, 25 bp, probe
catcgtcatcgcttacttgaatgaa

SEQ ID NO: 99059 - DNA, 25 bp, probe
tccattaggagacaatgaggaagga

SEQ ID NO: 99060 - DNA, 25 bp, probe
tcccacaaactgacaaattaaggag

SEQ ID NO: 99061 - DNA, 25 bp, probe
ctcccacaaactgacaaattaagga

SEQ ID NO: 99062 - DNA, 25 bp, probe
caaactgacaaattaaggaggttaa

SEQ ID NO: 99063 - DNA, 25 bp, probe
tcacctcccacaaactgacaaatta

SEQ ID NO: 99064 - DNA, 25 bp, probe
tggtggaggaatacacttatttatg

SEQ ID NO: 99065 - DNA, 25 bp, probe
ggtggaggaatacacttatttatga

SEQ ID NO: 99066 - DNA, 25 bp, probe
gatggtggaggaatacacttattta

SEQ ID NO: 99067 - DNA, 25 bp, probe
aactgacaaattaaggaggttaaag

SEQ ID NO: 99068 - DNA, 25 bp, probe
ttgagattaagaatgccaggaatat

SEQ ID NO: 99069 - DNA, 25 bp, probe
ctgctgactgccaataacattcttc

SEQ ID NO: 99070 - DNA, 25 bp, probe
taagaatgccaggaatattgtcatc

SEQ ID NO: 99071 - DNA, 25 bp, probe
attaagaatgccaggaatattgtca

SEQ ID NO: 99072 - DNA, 25 bp, probe
ctgccaataacattcttcgatctct

SEQ ID NO: 99073 - DNA, 25 bp, probe
ttaagaatgccaggaatattgtcat

SEQ ID NO: 99074 - DNA, 25 bp, probe
agattaagaatgccaggaatattgt

SEQ ID NO: 99075 - DNA, 25 bp, probe
tgccaataacattcttcgatctctg

SEQ ID NO: 99076 - DNA, 25 bp, probe
actgccaataacattcttcgatctc

SEQ ID NO: 99077 - DNA, 25 bp, probe
gactgccaataacattcttcgatct

SEQ ID NO: 99078 - DNA, 25 bp, probe
ttgccctgaccctaaataatacatt

SEQ ID NO: 99079 - DNA, 25 bp, probe
tttgccctgaccctaaataatacat

SEQ ID NO: 99080 - DNA, 25 bp, probe
taagaagtgcagcaggttaagaatt

SEQ ID NO: 99081 - DNA, 25 bp, probe
tgactgccaataacattcttcgatc

SEQ ID NO: 99082 - DNA, 25 bp, probe
ctgactgccaataacattcttcgat

SEQ ID NO: 99083 - DNA, 25 bp, probe
gattaagaatgccaggaatattgtc

SEQ ID NO: 99084 - DNA, 25 bp, probe
tgagattaagaatgccaggaatatt

SEQ ID NO: 99085 - DNA, 25 bp, probe
atggatagctcattaagaagtgcag

SEQ ID NO: 99086 - DNA, 25 bp, probe
ttaagaagtgcagcaggttaagaat

SEQ ID NO: 99087 - DNA, 25 bp, probe
attaagaagtgcagcaggttaagaa

SEQ ID NO: 99088 - DNA, 25 bp, probe
tgtatctatttgtggtgaatgtgtt

SEQ ID NO: 99089 - DNA, 25 bp, probe
ttgtatctatttgtggtgaatgtgt

SEQ ID NO: 99090 - DNA, 25 bp, probe
gagattaagaatgccaggaatattg

SEQ ID NO: 99091 - DNA, 25 bp, probe
cattaagaagtgcagcaggttaaga

SEQ ID NO: 99092 - DNA, 25 bp, probe
tcattaagaagtgcagcaggttaag

SEQ ID NO: 99093 - DNA, 25 bp, probe
ctcattaagaagtgcagcaggttaa

SEQ ID NO: 99094 - DNA, 25 bp, probe
aagaatgccaggaatattgtcatcc

SEQ ID NO: 99095 - DNA, 25 bp, probe
tgccctgaccctaaataatacattt

SEQ ID NO: 99096 - DNA, 25 bp, probe
atttgccctgaccctaaataataca

SEQ ID NO: 99097 - DNA, 25 bp, probe
tttgagattaagaatgccaggaata

SEQ ID NO: 99098 - DNA, 25 bp, probe
aatttgccctgaccctaaataatac

SEQ ID NO: 99099 - DNA, 25 bp, probe
gtatctatttgtggtgaatgtgttt

SEQ ID NO: 99100 - DNA, 25 bp, probe
caataacattcttcgatctctggga

SEQ ID NO: 99101 - DNA, 25 bp, probe
aacattcttcgatctctgggattta

SEQ ID NO: 99102 - DNA, 25 bp, probe
taacattcttcgatctctgggattt

SEQ ID NO: 99103 - DNA, 25 bp, probe
gcagtcatagaagagatttatttcc

SEQ ID NO: 99104 - DNA, 25 bp, probe
tgctgactgccaataacattcttcg

SEQ ID NO: 99105 - DNA, 25 bp, probe
acattcttcgatctctgggatttat

SEQ ID NO: 99106 - DNA, 25 bp, probe
ataacattcttcgatctctgggatt

SEQ ID NO: 99107 - DNA, 25 bp, probe
aataacattcttcgatctctgggat

SEQ ID NO: 99108 - DNA, 25 bp, probe
aatggatagctcattaagaagtgca

SEQ ID NO: 99109 - DNA, 25 bp, probe
attcttcgatctctgggatttatgc

SEQ ID NO: 99110 - DNA, 25 bp, probe
gccaataacattcttcgatctctgg

SEQ ID NO: 99111 - DNA, 25 bp, probe
cattcttcgatctctgggatttatg

SEQ ID NO: 99112 - DNA, 25 bp, probe
aatctattatcaactgctgcttcac

SEQ ID NO: 99113 - DNA, 25 bp, probe
atctattatcaactgctgcttcacc

SEQ ID NO: 99114 - DNA, 25 bp, probe
tggttcaagagaagttcagatacac

SEQ ID NO: 99115 - DNA, 25 bp, probe
atactgttgctatggtgatcttctc

SEQ ID NO: 99116 - DNA, 25 bp, probe
aatactgttgctatggtgatcttct

SEQ ID NO: 99117 - DNA, 25 bp, probe
tgaatactgttgctatggtgatctt

SEQ ID NO: 99118 - DNA, 25 bp, probe
ttgaatactgttgctatggtgatct

SEQ ID NO: 99119 - DNA, 25 bp, probe
ttgagtgaattgtgtacctgaagta

SEQ ID NO: 99120 - DNA, 25 bp, probe
gaatactgttgctatggtgatcttc

SEQ ID NO: 99121 - DNA, 25 bp, probe
cttgagtgaattgtgtacctgaagt

SEQ ID NO: 99122 - DNA, 25 bp, probe
tctattatcaactgctgcttcacca

SEQ ID NO: 99123 - DNA, 25 bp, probe
ctggttcaagagaagttcagataca

SEQ ID NO: 99124 - DNA, 25 bp, probe
tgctatggtgatcttctcaactatc

SEQ ID NO: 99125 - DNA, 25 bp, probe
gctatggtgatcttctcaactatct

SEQ ID NO: 99126 - DNA, 25 bp, probe
ttgctatggtgatcttctcaactat

SEQ ID NO: 99127 - DNA, 25 bp, probe
cctggttcaagagaagttcagatac

SEQ ID NO: 99128 - DNA, 25 bp, probe
tactgttgctatggtgatcttctca

SEQ ID NO: 99129 - DNA, 25 bp, probe
ctattatcaactgctgcttcaccag

SEQ ID NO: 99130 - DNA, 25 bp, probe
gcttgagtgaattgtgtacctgaag

SEQ ID NO: 99131 - DNA, 25 bp, probe
actgttgctatggtgatcttctcaa

SEQ ID NO: 99132 - DNA, 25 bp, probe
ggttcaagagaagttcagatacacc

SEQ ID NO: 99133 - DNA, 25 bp, probe
tattatcaactgctgcttcaccaga

SEQ ID NO: 99134 - DNA, 25 bp, probe
ctttccaatcacatccaaattccag

SEQ ID NO: 99135 - DNA, 25 bp, probe
gcctggttcaagagaagttcagata

SEQ ID NO: 99136 - DNA, 25 bp, probe
cactttccaatcacatccaaattcc

SEQ ID NO: 99137 - DNA, 25 bp, probe
ccactttccaatcacatccaaattc

SEQ ID NO: 99138 - DNA, 25 bp, probe
aaatctattatcaactgctgcttca

SEQ ID NO: 99139 - DNA, 25 bp, probe
actttccaatcacatccaaattcca

SEQ ID NO: 99140 - DNA, 25 bp, probe
gttcaagagaagttcagatacaccc

SEQ ID NO: 99141 - DNA, 25 bp, probe
atggtgatcttctcaactatctaag

SEQ ID NO: 99142 - DNA, 25 bp, probe
tgaactttattggagcattgatctg

SEQ ID NO: 99143 - DNA, 25 bp, probe
actgtcaggaccaatttacttgatt

SEQ ID NO: 99144 - DNA, 25 bp, probe
tttgaatactgttgctatggtgatc

SEQ ID NO: 99145 - DNA, 25 bp, probe
ctgtcaggaccaatttacttgattt

SEQ ID NO: 99146 - DNA, 25 bp, probe
atttcacaggacttggacagagatt

SEQ ID NO: 99147 - DNA, 25 bp, probe
cactgtcaggaccaatttacttgat

SEQ ID NO: 99148 - DNA, 25 bp, probe
aatttcacaggacttggacagagat

SEQ ID NO: 99149 - DNA, 25 bp, probe
tttcacaggacttggacagagattt

SEQ ID NO: 99150 - DNA, 25 bp, probe
cccactttccaatcacatccaaatt

SEQ ID NO: 99151 - DNA, 25 bp, probe
atgaactttattggagcattgatct

SEQ ID NO: 99152 - DNA, 25 bp, probe
ggcttgagtgaattgtgtacctgaa

SEQ ID NO: 99153 - DNA, 25 bp, probe
tgagtgaattgtgtacctgaagtac

SEQ ID NO: 99154 - DNA, 25 bp, probe
tggtgatcttctcaactatctaaga

SEQ ID NO: 99155 - DNA, 25 bp, probe
aagattcgtagaggaacaatttagt

SEQ ID NO: 99156 - DNA, 25 bp, probe
gtggaagattaaagggctgaatcat

SEQ ID NO: 99157 - DNA, 25 bp, probe
tggaagattaaagggctgaatcatg

SEQ ID NO: 99158 - DNA, 25 bp, probe
cgtggaagattaaagggctgaatca

SEQ ID NO: 99159 - DNA, 25 bp, probe
gagtgcgtatgaaagtgtgtgtctg

SEQ ID NO: 99160 - DNA, 25 bp, probe
gtgagtgcgtatgaaagtgtgtgtc

SEQ ID NO: 99161 - DNA, 25 bp, probe
tgagtgcgtatgaaagtgtgtgtct

SEQ ID NO: 99162 - DNA, 25 bp, probe
ccgtggaagattaaagggctgaatc

SEQ ID NO: 99163 - DNA, 25 bp, probe
gtgtgagtgcgtatgaaagtgtgtg

SEQ ID NO: 99164 - DNA, 25 bp, probe
caactgctcccgtggaagattaaag

SEQ ID NO: 99165 - DNA, 25 bp, probe
gaagattaaagggctgaatcatgaa

SEQ ID NO: 99166 - DNA, 25 bp, probe
ggaagattaaagggctgaatcatga

SEQ ID NO: 99167 - DNA, 25 bp, probe
aagattaaagggctgaatcatgaaa

SEQ ID NO: 99168 - DNA, 25 bp, probe
tcaactgctcccgtggaagattaaa

SEQ ID NO: 99169 - DNA, 25 bp, probe
tgtgagtgcgtatgaaagtgtgtgt

SEQ ID NO: 99170 - DNA, 25 bp, probe
ctcaactgctcccgtggaagattaa

SEQ ID NO: 99171 - DNA, 25 bp, probe
aactgctcccgtggaagattaaagg

SEQ ID NO: 99172 - DNA, 25 bp, probe
agattaaagggctgaatcatgaaaa

SEQ ID NO: 99173 - DNA, 25 bp, probe
cccgtggaagattaaagggctgaat

SEQ ID NO: 99174 - DNA, 25 bp, probe
ttaatgaatcaatagcagcgtccag

SEQ ID NO: 99175 - DNA, 25 bp, probe
taatgaatcaatagcagcgtccagt

SEQ ID NO: 99176 - DNA, 25 bp, probe
tttaatgaatcaatagcagcgtcca

SEQ ID NO: 99177 - DNA, 25 bp, probe
catctggtctcttgaataaaggtca

SEQ ID NO: 99178 - DNA, 25 bp, probe
ccatctggtctcttgaataaaggtc

SEQ ID NO: 99179 - DNA, 25 bp, probe
gaccttctgcgactatttgagtatg

SEQ ID NO: 99180 - DNA, 25 bp, probe
aatgaatcaatagcagcgtccagtc

SEQ ID NO: 99181 - DNA, 25 bp, probe
tactacgaccttctgcgactatttg

SEQ ID NO: 99182 - DNA, 25 bp, probe
caagagacgctacaacatcaaactg

SEQ ID NO: 99183 - DNA, 25 bp, probe
cccatctggtctcttgaataaaggt

SEQ ID NO: 99184 - DNA, 25 bp, probe
aacccatctggtctcttgaataaag

SEQ ID NO: 99185 - DNA, 25 bp, probe
caacccatctggtctcttgaataaa

SEQ ID NO: 99186 - DNA, 25 bp, probe
gtactacgaccttctgcgactattt

SEQ ID NO: 99187 - DNA, 25 bp, probe
accttctgcgactatttgagtatgg

SEQ ID NO: 99188 - DNA, 25 bp, probe
cgaccttctgcgactatttgagtat

SEQ ID NO: 99189 - DNA, 25 bp, probe
cagatgatggattgattgtacagaa

SEQ ID NO: 99190 - DNA, 25 bp, probe
ctacgaccttctgcgactatttgag

SEQ ID NO: 99191 - DNA, 25 bp, probe
ctatggtttctacgatgagtgcaag

SEQ ID NO: 99192 - DNA, 25 bp, probe
atctatggtttctacgatgagtgca

SEQ ID NO: 99193 - DNA, 25 bp, probe
acccatctggtctcttgaataaagg

SEQ ID NO: 99194 - DNA, 25 bp, probe
aagagacgctacaacatcaaactgt

SEQ ID NO: 99195 - DNA, 25 bp, probe
tctatggtttctacgatgagtgcaa

SEQ ID NO: 99196 - DNA, 25 bp, probe
caattccgccaaagccaagaaatag

SEQ ID NO: 99197 - DNA, 25 bp, probe
gaataaaggtcaaagctggattctc

SEQ ID NO: 99198 - DNA, 25 bp, probe
ctgctggcctataagatcaagtacc

SEQ ID NO: 99199 - DNA, 25 bp, probe
ttttaatgaatcaatagcagcgtcc

SEQ ID NO: 99200 - DNA, 25 bp, probe
tgaataaaggtcaaagctggattct

SEQ ID NO: 99201 - DNA, 25 bp, probe
tatggtttctacgatgagtgcaaga

SEQ ID NO: 99202 - DNA, 25 bp, probe
actacgaccttctgcgactatttga

SEQ ID NO: 99203 - DNA, 25 bp, probe
tctggtctcttgaataaaggtcaaa

SEQ ID NO: 99204 - DNA, 25 bp, probe
ctggtctcttgaataaaggtcaaag

SEQ ID NO: 99205 - DNA, 25 bp, probe
atctggtctcttgaataaaggtcaa

SEQ ID NO: 99206 - DNA, 25 bp, probe
ctatttgagtatggcggtttccctc

SEQ ID NO: 99207 - DNA, 25 bp, probe
ccagatgatggattgattgtacaga

SEQ ID NO: 99208 - DNA, 25 bp, probe
ctataagatcaagtaccccgagaac

SEQ ID NO: 99209 - DNA, 25 bp, probe
gactatttgagtatggcggtttccc

SEQ ID NO: 99210 - DNA, 25 bp, probe
tggtctcttgaataaaggtcaaagc

SEQ ID NO: 99211 - DNA, 25 bp, probe
gctgctggcctataagatcaagtac

SEQ ID NO: 99212 - DNA, 25 bp, probe
gcaacccatctggtctcttgaataa

SEQ ID NO: 99213 - DNA, 25 bp, probe
cctataagatcaagtaccccgagaa

SEQ ID NO: 99214 - DNA, 25 bp, probe
acgctacaacatcaaactgtggaaa

SEQ ID NO: 99215 - DNA, 25 bp, probe
agagacgctacaacatcaaactgtg

SEQ ID NO: 99216 - DNA, 25 bp, probe
gcaagagacgctacaacatcaaact

SEQ ID NO: 99217 - DNA, 25 bp, probe
ccttctgcgactatttgagtatggc

SEQ ID NO: 99218 - DNA, 25 bp, probe
tagtacctacatattgccagtgaga

SEQ ID NO: 99219 - DNA, 25 bp, probe
ttagtacctacatattgccagtgag

SEQ ID NO: 99220 - DNA, 25 bp, probe
cattagtacctacatattgccagtg

SEQ ID NO: 99221 - DNA, 25 bp, probe
agtacctacatattgccagtgagaa

SEQ ID NO: 99222 - DNA, 25 bp, probe
attagtacctacatattgccagtga

SEQ ID NO: 99223 - DNA, 25 bp, probe
gagacaggaggaataccaggttatt

SEQ ID NO: 99224 - DNA, 25 bp, probe
aaggaactcatacagcacaagagaa

SEQ ID NO: 99225 - DNA, 25 bp, probe
gcaagctgttattggtaagattagg

SEQ ID NO: 99226 - DNA, 25 bp, probe
cctagcaagctgttattggtaagat

SEQ ID NO: 99227 - DNA, 25 bp, probe
tcagtaataggatttggtttcagca

SEQ ID NO: 99228 - DNA, 25 bp, probe
gtcagtaataggatttggtttcagc

SEQ ID NO: 99229 - DNA, 25 bp, probe
tacctacatattgccagtgagaaac

SEQ ID NO: 99230 - DNA, 25 bp, probe
agcaagctgttattggtaagattag

SEQ ID NO: 99231 - DNA, 25 bp, probe
ctagcaagctgttattggtaagatt

SEQ ID NO: 99232 - DNA, 25 bp, probe
cagtaataggatttggtttcagcat

SEQ ID NO: 99233 - DNA, 25 bp, probe
agattattgatattctgtggagtga

SEQ ID NO: 99234 - DNA, 25 bp, probe
caagctgttattggtaagattaggt

SEQ ID NO: 99235 - DNA, 25 bp, probe
aagctgttattggtaagattaggtt

SEQ ID NO: 99236 - DNA, 25 bp, probe
ggagacaggaggaataccaggttat

SEQ ID NO: 99237 - DNA, 25 bp, probe
tgtcagtaataggatttggtttcag

SEQ ID NO: 99238 - DNA, 25 bp, probe
aataggatttggtttcagcattagt

SEQ ID NO: 99239 - DNA, 25 bp, probe
agtaataggatttggtttcagcatt

SEQ ID NO: 99240 - DNA, 25 bp, probe
gctgttattggtaagattaggttaa

SEQ ID NO: 99241 - DNA, 25 bp, probe
gtacctacatattgccagtgagaaa

SEQ ID NO: 99242 - DNA, 25 bp, probe
ttattgatattctgtggagtgatcc

SEQ ID NO: 99243 - DNA, 25 bp, probe
atgtcagtaataggatttggtttca

SEQ ID NO: 99244 - DNA, 25 bp, probe
tagcaagctgttattggtaagatta

SEQ ID NO: 99245 - DNA, 25 bp, probe
aaatcacaagtacagtcctttccaa

SEQ ID NO: 99246 - DNA, 25 bp, probe
gcatgaatgggaacagattattgat

SEQ ID NO: 99247 - DNA, 25 bp, probe
gagcatgaatgggaacagattattg

SEQ ID NO: 99248 - DNA, 25 bp, probe
agagcatgaatgggaacagattatt

SEQ ID NO: 99249 - DNA, 25 bp, probe
agcatgaatgggaacagattattga

SEQ ID NO: 99250 - DNA, 25 bp, probe
tgacctggaaatcatatttaatgcc

SEQ ID NO: 99251 - DNA, 25 bp, probe
taggatttggtttcagcattagtac

SEQ ID NO: 99252 - DNA, 25 bp, probe
gaaattcatagtcagtagcagagaa

SEQ ID NO: 99253 - DNA, 25 bp, probe
ataggatttggtttcagcattagta

SEQ ID NO: 99254 - DNA, 25 bp, probe
cagagcatgaatgggaacagattat

SEQ ID NO: 99255 - DNA, 25 bp, probe
aaccttggctaaacacaaatgagag

SEQ ID NO: 99256 - DNA, 25 bp, probe
gattattgatattctgtggagtgat

SEQ ID NO: 99257 - DNA, 25 bp, probe
aatcacaagtacagtcctttccaac

SEQ ID NO: 99258 - DNA, 25 bp, probe
caaatcacaagtacagtcctttcca

SEQ ID NO: 99259 - DNA, 25 bp, probe
agcattagtacctacatattgccag

SEQ ID NO: 99260 - DNA, 25 bp, probe
tcagcattagtacctacatattgcc

SEQ ID NO: 99261 - DNA, 25 bp, probe
agctgttattggtaagattaggtta

SEQ ID NO: 99262 - DNA, 25 bp, probe
ggaagaaccaattaacaccaatgaa

SEQ ID NO: 99263 - DNA, 25 bp, probe
ccaattaacaccaatgaatcaacca

SEQ ID NO: 99264 - DNA, 25 bp, probe
accaattaacaccaatgaatcaacc

SEQ ID NO: 99265 - DNA, 25 bp, probe
gacagaacaacaaggagaatacttc

SEQ ID NO: 99266 - DNA, 25 bp, probe
agaaccaattaacaccaatgaatca

SEQ ID NO: 99267 - DNA, 25 bp, probe
cgacagaacaacaaggagaatactt

SEQ ID NO: 99268 - DNA, 25 bp, probe
aaccaattaacaccaatgaatcaac

SEQ ID NO: 99269 - DNA, 25 bp, probe
gacgacagaacaacaaggagaatac

SEQ ID NO: 99270 - DNA, 25 bp, probe
gaaccaattaacaccaatgaatcaa

SEQ ID NO: 99271 - DNA, 25 bp, probe
aagaaccaattaacaccaatgaatc

SEQ ID NO: 99272 - DNA, 25 bp, probe
gaagaaccaattaacaccaatgaat

SEQ ID NO: 99273 - DNA, 25 bp, probe
acgacagaacaacaaggagaatact

SEQ ID NO: 99274 - DNA, 25 bp, probe
aagatagacgcttcatgttaaggac

SEQ ID NO: 99275 - DNA, 25 bp, probe
caagatagacgcttcatgttaagga

SEQ ID NO: 99276 - DNA, 25 bp, probe
ggacgacagaacaacaaggagaata

SEQ ID NO: 99277 - DNA, 25 bp, probe
ccaagatagacgcttcatgttaagg

SEQ ID NO: 99278 - DNA, 25 bp, probe
atggaagaaccaattaacaccaatg

SEQ ID NO: 99279 - DNA, 25 bp, probe
tggaagaaccaattaacaccaatga

SEQ ID NO: 99280 - DNA, 25 bp, probe
ttaaggacgacagaacaacaaggag

SEQ ID NO: 99281 - DNA, 25 bp, probe
ctgaatcacctctctcatggaagaa

SEQ ID NO: 99282 - DNA, 25 bp, probe
catggaagaaccaattaacaccaat

SEQ ID NO: 99283 - DNA, 25 bp, probe
ctctcatggaagaaccaattaacac

SEQ ID NO: 99284 - DNA, 25 bp, probe
tctctcatggaagaaccaattaaca

SEQ ID NO: 99285 - DNA, 25 bp, probe
cctctctcatggaagaaccaattaa

SEQ ID NO: 99286 - DNA, 25 bp, probe
ctctctcatggaagaaccaattaac

SEQ ID NO: 99287 - DNA, 25 bp, probe
tgaatcacctctctcatggaagaac

SEQ ID NO: 99288 - DNA, 25 bp, probe
tcatggaagaaccaattaacaccaa

SEQ ID NO: 99289 - DNA, 25 bp, probe
tctcatggaagaaccaattaacacc

SEQ ID NO: 99290 - DNA, 25 bp, probe
gttaaggacgacagaacaacaagga

SEQ ID NO: 99291 - DNA, 25 bp, probe
acctctctcatggaagaaccaatta

SEQ ID NO: 99292 - DNA, 25 bp, probe
acagaacaacaaggagaatacttct

SEQ ID NO: 99293 - DNA, 25 bp, probe
ctcatggaagaaccaattaacacca

SEQ ID NO: 99294 - DNA, 25 bp, probe
gatagacgcttcatgttaaggacga

SEQ ID NO: 99295 - DNA, 25 bp, probe
agatagacgcttcatgttaaggacg

SEQ ID NO: 99296 - DNA, 25 bp, probe
taaggacgacagaacaacaaggaga

SEQ ID NO: 99297 - DNA, 25 bp, probe
gaacaacaaggagaatacttctgct

SEQ ID NO: 99298 - DNA, 25 bp, probe
agaacaacaaggagaatacttctgc

SEQ ID NO: 99299 - DNA, 25 bp, probe
gaatcacctctctcatggaagaacc

SEQ ID NO: 99300 - DNA, 25 bp, probe
atagacgcttcatgttaaggacgac

SEQ ID NO: 99301 - DNA, 25 bp, probe
aacaacaaggagaatacttctgctg

SEQ ID NO: 99302 - DNA, 25 bp, probe
caacaaggagaatacttctgctgtg

SEQ ID NO: 99303 - DNA, 25 bp, probe
cccaagatagacgcttcatgttaag

SEQ ID NO: 99304 - DNA, 25 bp, probe
acaacaaggagaatacttctgctgt

SEQ ID NO: 99305 - DNA, 25 bp, probe
aggacgacagaacaacaaggagaat

SEQ ID NO: 99306 - DNA, 25 bp, probe
atagaagacaatgagtacacagcaa

SEQ ID NO: 99307 - DNA, 25 bp, probe
gatagaagacaatgagtacacagca

SEQ ID NO: 99308 - DNA, 25 bp, probe
tgatagaagacaatgagtacacagc

SEQ ID NO: 99309 - DNA, 25 bp, probe
tagaagacaatgagtacacagcaag

SEQ ID NO: 99310 - DNA, 25 bp, probe
gaagacaatgagtacacagcaagac

SEQ ID NO: 99311 - DNA, 25 bp, probe
agaagacaatgagtacacagcaaga

SEQ ID NO: 99312 - DNA, 25 bp, probe
ttgatagaagacaatgagtacacag

SEQ ID NO: 99313 - DNA, 25 bp, probe
gacaatgagtacacagcaagacaag

SEQ ID NO: 99314 - DNA, 25 bp, probe
agacaatgagtacacagcaagacaa

SEQ ID NO: 99315 - DNA, 25 bp, probe
aagacaatgagtacacagcaagaca

SEQ ID NO: 99316 - DNA, 25 bp, probe
caccgagtatatgaacaaaggaagt

SEQ ID NO: 99317 - DNA, 25 bp, probe
accgagtatatgaacaaaggaagtt

SEQ ID NO: 99318 - DNA, 25 bp, probe
ccgagtatatgaacaaaggaagttt

SEQ ID NO: 99319 - DNA, 25 bp, probe
tcaccgagtatatgaacaaaggaag

SEQ ID NO: 99320 - DNA, 25 bp, probe
tgaacaaaggaagtttactggattt

SEQ ID NO: 99321 - DNA, 25 bp, probe
ccgattgatagaagacaatgagtac

SEQ ID NO: 99322 - DNA, 25 bp, probe
acaaaggaagtttactggatttctt

SEQ ID NO: 99323 - DNA, 25 bp, probe
gtcaccgagtatatgaacaaaggaa

SEQ ID NO: 99324 - DNA, 25 bp, probe
aacaaaggaagtttactggatttct

SEQ ID NO: 99325 - DNA, 25 bp, probe
atgaacaaaggaagtttactggatt

SEQ ID NO: 99326 - DNA, 25 bp, probe
gaacaaaggaagtttactggatttc

SEQ ID NO: 99327 - DNA, 25 bp, probe
tacatcgtcaccgagtatatgaaca

SEQ ID NO: 99328 - DNA, 25 bp, probe
cgattgatagaagacaatgagtaca

SEQ ID NO: 99329 - DNA, 25 bp, probe
cgcatgaattatatccatagagatc

SEQ ID NO: 99330 - DNA, 25 bp, probe
caatgagtacacagcaagacaaggt

SEQ ID NO: 99331 - DNA, 25 bp, probe
acaatgagtacacagcaagacaagg

SEQ ID NO: 99332 - DNA, 25 bp, probe
tatgaacaaaggaagtttactggat

SEQ ID NO: 99333 - DNA, 25 bp, probe
atatgaacaaaggaagtttactgga

SEQ ID NO: 99334 - DNA, 25 bp, probe
acatcgtcaccgagtatatgaacaa

SEQ ID NO: 99335 - DNA, 25 bp, probe
ctgaaattaccaaatcttgtggaca

SEQ ID NO: 99336 - DNA, 25 bp, probe
tctgaaattaccaaatcttgtggac

SEQ ID NO: 99337 - DNA, 25 bp, probe
attgatagaagacaatgagtacaca

SEQ ID NO: 99338 - DNA, 25 bp, probe
gctctgaaattaccaaatcttgtgg

SEQ ID NO: 99339 - DNA, 25 bp, probe
agctctgaaattaccaaatcttgtg

SEQ ID NO: 99340 - DNA, 25 bp, probe
ctctgaaattaccaaatcttgtgga

SEQ ID NO: 99341 - DNA, 25 bp, probe
tgaaattaccaaatcttgtggacat

SEQ ID NO: 99342 - DNA, 25 bp, probe
cgtcaccgagtatatgaacaaagga

SEQ ID NO: 99343 - DNA, 25 bp, probe
gaatcttactcacagagctggtcac

SEQ ID NO: 99344 - DNA, 25 bp, probe
aaattaccaaatcttgtggacatgg

SEQ ID NO: 99345 - DNA, 25 bp, probe
aatgagtacacagcaagacaaggtg

SEQ ID NO: 99346 - DNA, 25 bp, probe
cccgattgatagaagacaatgagta

SEQ ID NO: 99347 - DNA, 25 bp, probe
caaaggaagtttactggatttctta

SEQ ID NO: 99348 - DNA, 25 bp, probe
gattgatagaagacaatgagtacac

SEQ ID NO: 99349 - DNA, 25 bp, probe
tgaattatatccatagagatctgcg

SEQ ID NO: 99350 - DNA, 25 bp, probe
gactgagacagagaagacaagtgaa

SEQ ID NO: 99351 - DNA, 25 bp, probe
gagactgagacagagaagacaagtg

SEQ ID NO: 99352 - DNA, 25 bp, probe
agactgagacagagaagacaagtga

SEQ ID NO: 99353 - DNA, 25 bp, probe
aggagactgagacagagaagacaag

SEQ ID NO: 99354 - DNA, 25 bp, probe
ctgagacagagaagacaagtgaaag

SEQ ID NO: 99355 - DNA, 25 bp, probe
actgagacagagaagacaagtgaaa

SEQ ID NO: 99356 - DNA, 25 bp, probe
ggagactgagacagagaagacaagt

SEQ ID NO: 99357 - DNA, 25 bp, probe
caggagactgagacagagaagacaa

SEQ ID NO: 99358 - DNA, 25 bp, probe
tgagacagagaagacaagtgaaagc

SEQ ID NO: 99359 - DNA, 25 bp, probe
ctagtcctcttagtcacacagcgag

SEQ ID NO: 99360 - DNA, 25 bp, probe
ctggctagtcctcttagtcacacag

SEQ ID NO: 99361 - DNA, 25 bp, probe
gtcctcttagtcacacagcgagtag

SEQ ID NO: 99362 - DNA, 25 bp, probe
ctcttagccagaaatgtcttgcctc

SEQ ID NO: 99363 - DNA, 25 bp, probe
gagacagagaagacaagtgaaagcg

SEQ ID NO: 99364 - DNA, 25 bp, probe
ctgtcctggctagtcctcttagtca

SEQ ID NO: 99365 - DNA, 25 bp, probe
ctgtttaccatgtcactgcctactg

SEQ ID NO: 99366 - DNA, 25 bp, probe
aatgtcttgcctctggtctctgaaa

SEQ ID NO: 99367 - DNA, 25 bp, probe
aaatgtcttgcctctggtctctgaa

SEQ ID NO: 99368 - DNA, 25 bp, probe
agtcctcttagtcacacagcgagta

SEQ ID NO: 99369 - DNA, 25 bp, probe
tagtcctcttagtcacacagcgagt

SEQ ID NO: 99370 - DNA, 25 bp, probe
tcttagccagaaatgtcttgcctct

SEQ ID NO: 99371 - DNA, 25 bp, probe
tcctggctagtcctcttagtcacac

SEQ ID NO: 99372 - DNA, 25 bp, probe
gtcctggctagtcctcttagtcaca

SEQ ID NO: 99373 - DNA, 25 bp, probe
tgtcctggctagtcctcttagtcac

SEQ ID NO: 99374 - DNA, 25 bp, probe
actgtcctggctagtcctcttagtc

SEQ ID NO: 99375 - DNA, 25 bp, probe
gaaatgtcttgcctctggtctctga

SEQ ID NO: 99376 - DNA, 25 bp, probe
cttcaggagactgagacagagaaga

SEQ ID NO: 99377 - DNA, 25 bp, probe
tcttcaggagactgagacagagaag

SEQ ID NO: 99378 - DNA, 25 bp, probe
ctcttcaggagactgagacagagaa

SEQ ID NO: 99379 - DNA, 25 bp, probe
tgtttaccatgtcactgcctactgt

SEQ ID NO: 99380 - DNA, 25 bp, probe
cctggctagtcctcttagtcacaca

SEQ ID NO: 99381 - DNA, 25 bp, probe
agaaatgtcttgcctctggtctctg

SEQ ID NO: 99382 - DNA, 25 bp, probe
ttcaggagactgagacagagaagac

SEQ ID NO: 99383 - DNA, 25 bp, probe
gtttaccatgtcactgcctactgtg

SEQ ID NO: 99384 - DNA, 25 bp, probe
gtgagtggttacctcaaagacaatt

SEQ ID NO: 99385 - DNA, 25 bp, probe
aatttccactagagttttgccctca

SEQ ID NO: 99386 - DNA, 25 bp, probe
gagtggttacctcaaagacaattgc

SEQ ID NO: 99387 - DNA, 25 bp, probe
atttccactagagttttgccctcag

SEQ ID NO: 99388 - DNA, 25 bp, probe
tcctcttagtcacacagcgagtagg

SEQ ID NO: 99389 - DNA, 25 bp, probe
aaatttccactagagttttgccctc

SEQ ID NO: 99390 - DNA, 25 bp, probe
ttacctcaaagacaattgcctccag

SEQ ID NO: 99391 - DNA, 25 bp, probe
ataagaaaccacaaaacgcatggaa

SEQ ID NO: 99392 - DNA, 25 bp, probe
gggataagaaaccacaaaacgcatg

SEQ ID NO: 99393 - DNA, 25 bp, probe
tcaggagactgagacagagaagaca

SEQ ID NO: 99394 - DNA, 25 bp, probe
tcaagatgcctcgttattgtctatt

SEQ ID NO: 99395 - DNA, 25 bp, probe
atcaagatgcctcgttattgtctat

SEQ ID NO: 99396 - DNA, 25 bp, probe
aatcaagatgcctcgttattgtcta

SEQ ID NO: 99397 - DNA, 25 bp, probe
gaatcaagatgcctcgttattgtct

SEQ ID NO: 99398 - DNA, 25 bp, probe
gaatcagatgtgtgttctcagtgaa

SEQ ID NO: 99399 - DNA, 25 bp, probe
atgaatcagatgtgtgttctcagtg

SEQ ID NO: 99400 - DNA, 25 bp, probe
aatatggattcgcattggagttcac

SEQ ID NO: 99401 - DNA, 25 bp, probe
ggtggacatgcttaatgacatctat

SEQ ID NO: 99402 - DNA, 25 bp, probe
ggaatcaagatgcctcgttattgtc

SEQ ID NO: 99403 - DNA, 25 bp, probe
catagccatcctgaagagaactgag

SEQ ID NO: 99404 - DNA, 25 bp, probe
tgaatcagatgtgtgttctcagtga

SEQ ID NO: 99405 - DNA, 25 bp, probe
gtggacatgcttaatgacatctata

SEQ ID NO: 99406 - DNA, 25 bp, probe
catgaatcagatgtgtgttctcagt

SEQ ID NO: 99407 - DNA, 25 bp, probe
atatggattcgcattggagttcact

SEQ ID NO: 99408 - DNA, 25 bp, probe
agttacaatctacttcagtgacatt

SEQ ID NO: 99409 - DNA, 25 bp, probe
tggtggacatgcttaatgacatcta

SEQ ID NO: 99410 - DNA, 25 bp, probe
atagccatcctgaagagaactgagt

SEQ ID NO: 99411 - DNA, 25 bp, probe
actggctttccttctgtattcataa

SEQ ID NO: 99412 - DNA, 25 bp, probe
ttactggctttccttctgtattcat

SEQ ID NO: 99413 - DNA, 25 bp, probe
tttactggctttccttctgtattca

SEQ ID NO: 99414 - DNA, 25 bp, probe
gtttactggctttccttctgtattc

SEQ ID NO: 99415 - DNA, 25 bp, probe
tgtttactggctttccttctgtatt

SEQ ID NO: 99416 - DNA, 25 bp, probe
ttgtttactggctttccttctgtat

SEQ ID NO: 99417 - DNA, 25 bp, probe
taaagggaagaggaaatgagactac

SEQ ID NO: 99418 - DNA, 25 bp, probe
tttgtttactggctttccttctgta

SEQ ID NO: 99419 - DNA, 25 bp, probe
tgagaggagaaacatacttaaaggg

SEQ ID NO: 99420 - DNA, 25 bp, probe
gagaggagaaacatacttaaaggga

SEQ ID NO: 99421 - DNA, 25 bp, probe
tactggctttccttctgtattcata

SEQ ID NO: 99422 - DNA, 25 bp, probe
gatgcctcgttattgtctatttgga

SEQ ID NO: 99423 - DNA, 25 bp, probe
cttaaagggaagaggaaatgagact

SEQ ID NO: 99424 - DNA, 25 bp, probe
ctggctttccttctgtattcataag

SEQ ID NO: 99425 - DNA, 25 bp, probe
acttaaagggaagaggaaatgagac

SEQ ID NO: 99426 - DNA, 25 bp, probe
tggacatgcttaatgacatctataa

SEQ ID NO: 99427 - DNA, 25 bp, probe
tggctttccttctgtattcataaga

SEQ ID NO: 99428 - DNA, 25 bp, probe
agaggagaaacatacttaaagggaa

SEQ ID NO: 99429 - DNA, 25 bp, probe
aagatgcctcgttattgtctatttg

SEQ ID NO: 99430 - DNA, 25 bp, probe
gtgagaggagaaacatacttaaagg

SEQ ID NO: 99431 - DNA, 25 bp, probe
cagacttaactttatgttgcttcca

SEQ ID NO: 99432 - DNA, 25 bp, probe
attgtctatttggagatacggtcaa

SEQ ID NO: 99433 - DNA, 25 bp, probe
ttaaagggaagaggaaatgagacta

SEQ ID NO: 99434 - DNA, 25 bp, probe
acttaactttatgttgcttccaagg

SEQ ID NO: 99435 - DNA, 25 bp, probe
taactttatgttgcttccaaggcta

SEQ ID NO: 99436 - DNA, 25 bp, probe
agatgtgtgttctcagtgaaataac

SEQ ID NO: 99437 - DNA, 25 bp, probe
cagatgtgtgttctcagtgaaataa

SEQ ID NO: 99438 - DNA, 25 bp, probe
ttcctctgtgaactgtgtgtgaatc

SEQ ID NO: 99439 - DNA, 25 bp, probe
cttcctctgtgaactgtgtgtgaat

SEQ ID NO: 99440 - DNA, 25 bp, probe
gaagattgaggttcctggacagatc

SEQ ID NO: 99441 - DNA, 25 bp, probe
ctctcatggtacttcctctgtgaac

SEQ ID NO: 99442 - DNA, 25 bp, probe
tacttcctctgtgaactgtgtgtga

SEQ ID NO: 99443 - DNA, 25 bp, probe
ctcatggtacttcctctgtgaactg

SEQ ID NO: 99444 - DNA, 25 bp, probe
tctcatggtacttcctctgtgaact

SEQ ID NO: 99445 - DNA, 25 bp, probe
cctctgtgaactgtgtgtgaatctg

SEQ ID NO: 99446 - DNA, 25 bp, probe
tcctctgtgaactgtgtgtgaatct

SEQ ID NO: 99447 - DNA, 25 bp, probe
ctgtgaactgtgtgtgaatctgctt

SEQ ID NO: 99448 - DNA, 25 bp, probe
catggtacttcctctgtgaactgtg

SEQ ID NO: 99449 - DNA, 25 bp, probe
gtacttcctctgtgaactgtgtgtg

SEQ ID NO: 99450 - DNA, 25 bp, probe
gagggaaattgtaaatcctgtgttt

SEQ ID NO: 99451 - DNA, 25 bp, probe
aagattgaggttcctggacagatca

SEQ ID NO: 99452 - DNA, 25 bp, probe
atggtacttcctctgtgaactgtgt

SEQ ID NO: 99453 - DNA, 25 bp, probe
tcatggtacttcctctgtgaactgt

SEQ ID NO: 99454 - DNA, 25 bp, probe
ggagggaaattgtaaatcctgtgtt

SEQ ID NO: 99455 - DNA, 25 bp, probe
ctctgtgaactgtgtgtgaatctgc

SEQ ID NO: 99456 - DNA, 25 bp, probe
cttcggagggaaattgtaaatcctg

SEQ ID NO: 99457 - DNA, 25 bp, probe
gggaaattgtaaatcctgtgtttca

SEQ ID NO: 99458 - DNA, 25 bp, probe
agggaaattgtaaatcctgtgtttc

SEQ ID NO: 99459 - DNA, 25 bp, probe
acttcctctgtgaactgtgtgtgaa

SEQ ID NO: 99460 - DNA, 25 bp, probe
ttcggagggaaattgtaaatcctgt

SEQ ID NO: 99461 - DNA, 25 bp, probe
agattgaggttcctggacagatcag

SEQ ID NO: 99462 - DNA, 25 bp, probe
tgtaaatcctgtgtttcattacttg

SEQ ID NO: 99463 - DNA, 25 bp, probe
tctgtgaactgtgtgtgaatctgct

SEQ ID NO: 99464 - DNA, 25 bp, probe
tgtgaactgtgtgtgaatctgcttt

SEQ ID NO: 99465 - DNA, 25 bp, probe
gctctcatggtacttcctctgtgaa

SEQ ID NO: 99466 - DNA, 25 bp, probe
ggaaattgtaaatcctgtgtttcat

SEQ ID NO: 99467 - DNA, 25 bp, probe
gtaaatcctgtgtttcattacttga

SEQ ID NO: 99468 - DNA, 25 bp, probe
ccttcggagggaaattgtaaatcct

SEQ ID NO: 99469 - DNA, 25 bp, probe
ggtacttcctctgtgaactgtgtgt

SEQ ID NO: 99470 - DNA, 25 bp, probe
tggtacttcctctgtgaactgtgtg

SEQ ID NO: 99471 - DNA, 25 bp, probe
tcggagggaaattgtaaatcctgtg

SEQ ID NO: 99472 - DNA, 25 bp, probe
atcctgtgtttcattacttgaatgt

SEQ ID NO: 99473 - DNA, 25 bp, probe
ttgtaaatcctgtgtttcattactt

SEQ ID NO: 99474 - DNA, 25 bp, probe
cggagggaaattgtaaatcctgtgt

SEQ ID NO: 99475 - DNA, 25 bp, probe
tcctgtgtttcattacttgaatgta

SEQ ID NO: 99476 - DNA, 25 bp, probe
attgtaaatcctgtgtttcattact

SEQ ID NO: 99477 - DNA, 25 bp, probe
cctgtgtttcattacttgaatgtag

SEQ ID NO: 99478 - DNA, 25 bp, probe
tgccttcggagggaaattgtaaatc

SEQ ID NO: 99479 - DNA, 25 bp, probe
ctgccttcggagggaaattgtaaat

SEQ ID NO: 99480 - DNA, 25 bp, probe
aatcctgtgtttcattacttgaatg

SEQ ID NO: 99481 - DNA, 25 bp, probe
tgaactgtgtgtgaatctgcttttc

SEQ ID NO: 99482 - DNA, 25 bp, probe
tagagttagtggaaggcaagttaag

SEQ ID NO: 99483 - DNA, 25 bp, probe
ttatagagttagtggaaggcaagtt

SEQ ID NO: 99484 - DNA, 25 bp, probe
atagagttagtggaaggcaagttaa

SEQ ID NO: 99485 - DNA, 25 bp, probe
gagttagtggaaggcaagttaagag

SEQ ID NO: 99486 - DNA, 25 bp, probe
tatagagttagtggaaggcaagtta

SEQ ID NO: 99487 - DNA, 25 bp, probe
agagttagtggaaggcaagttaaga

SEQ ID NO: 99488 - DNA, 25 bp, probe
caagttaagagccaatcactgatcc

SEQ ID NO: 99489 - DNA, 25 bp, probe
agttagtggaaggcaagttaagagc

SEQ ID NO: 99490 - DNA, 25 bp, probe
tttatagagttagtggaaggcaagt

SEQ ID NO: 99491 - DNA, 25 bp, probe
gcaagttaagagccaatcactgatc

SEQ ID NO: 99492 - DNA, 25 bp, probe
caagcgatgagcaaactctataaga

SEQ ID NO: 99493 - DNA, 25 bp, probe
acaagcgatgagcaaactctataag

SEQ ID NO: 99494 - DNA, 25 bp, probe
cacaagcgatgagcaaactctataa

SEQ ID NO: 99495 - DNA, 25 bp, probe
acagtttctacgtctatttaaggct

SEQ ID NO: 99496 - DNA, 25 bp, probe
ttctacgtctatttaaggctaggag

SEQ ID NO: 99497 - DNA, 25 bp, probe
tttctacgtctatttaaggctagga

SEQ ID NO: 99498 - DNA, 25 bp, probe
gtttctacgtctatttaaggctagg

SEQ ID NO: 99499 - DNA, 25 bp, probe
tacagtttctacgtctatttaaggc

SEQ ID NO: 99500 - DNA, 25 bp, probe
atctcacgagctttcctacatcttc

SEQ ID NO: 99501 - DNA, 25 bp, probe
aagttaagagccaatcactgatccc

SEQ ID NO: 99502 - DNA, 25 bp, probe
cagtttctacgtctatttaaggcta

SEQ ID NO: 99503 - DNA, 25 bp, probe
aagtgtttcttgagcatctggtctg

SEQ ID NO: 99504 - DNA, 25 bp, probe
agtttctacgtctatttaaggctag

SEQ ID NO: 99505 - DNA, 25 bp, probe
catctcacgagctttcctacatctt

SEQ ID NO: 99506 - DNA, 25 bp, probe
aacatctcacgagctttcctacatc

SEQ ID NO: 99507 - DNA, 25 bp, probe
ttttatagagttagtggaaggcaag

SEQ ID NO: 99508 - DNA, 25 bp, probe
gaacatctcacgagctttcctacat

SEQ ID NO: 99509 - DNA, 25 bp, probe
acttttatagagttagtggaaggca

SEQ ID NO: 99510 - DNA, 25 bp, probe
cttttatagagttagtggaaggcaa

SEQ ID NO: 99511 - DNA, 25 bp, probe
aacaataaaagccctttcttgagtt

SEQ ID NO: 99512 - DNA, 25 bp, probe
aaacaataaaagccctttcttgagt

SEQ ID NO: 99513 - DNA, 25 bp, probe
gcacaagcgatgagcaaactctata

SEQ ID NO: 99514 - DNA, 25 bp, probe
acaataaaagccctttcttgagtta

SEQ ID NO: 99515 - DNA, 25 bp, probe
aaaacaataaaagccctttcttgag

SEQ ID NO: 99516 - DNA, 25 bp, probe
aagcgatgagcaaactctataagag

SEQ ID NO: 99517 - DNA, 25 bp, probe
acatctcacgagctttcctacatct

SEQ ID NO: 99518 - DNA, 25 bp, probe
tctacgtctatttaaggctaggagc

SEQ ID NO: 99519 - DNA, 25 bp, probe
caataaaagccctttcttgagttaa

SEQ ID NO: 99520 - DNA, 25 bp, probe
cactggtacatgcatctgtaataca

SEQ ID NO: 99521 - DNA, 25 bp, probe
ttttgaatgtagcacaagcgatgag

SEQ ID NO: 99522 - DNA, 25 bp, probe
tctcacgagctttcctacatcttcc

SEQ ID NO: 99523 - DNA, 25 bp, probe
ataaaagccctttcttgagttaaaa

SEQ ID NO: 99524 - DNA, 25 bp, probe
aataaaagccctttcttgagttaaa

SEQ ID NO: 99525 - DNA, 25 bp, probe
ttcccagcacagcccaagattattt

SEQ ID NO: 99526 - DNA, 25 bp, probe
ttcatatctagcctggtcaacatag

SEQ ID NO: 99527 - DNA, 25 bp, probe
gttacattacctgacagacaagatg

SEQ ID NO: 99528 - DNA, 25 bp, probe
ttacattacctgacagacaagatgc

SEQ ID NO: 99529 - DNA, 25 bp, probe
atcattgctattgaaggaccagatt

SEQ ID NO: 99530 - DNA, 25 bp, probe
aatcattgctattgaaggaccagat

SEQ ID NO: 99531 - DNA, 25 bp, probe
gttcatatctagcctggtcaacata

SEQ ID NO: 99532 - DNA, 25 bp, probe
atatctagcctggtcaacatagcaa

SEQ ID NO: 99533 - DNA, 25 bp, probe
aagagttcatatctagcctggtcaa

SEQ ID NO: 99534 - DNA, 25 bp, probe
tacattacctgacagacaagatgct

SEQ ID NO: 99535 - DNA, 25 bp, probe
agttcatatctagcctggtcaacat

SEQ ID NO: 99536 - DNA, 25 bp, probe
tcatatctagcctggtcaacatagc

SEQ ID NO: 99537 - DNA, 25 bp, probe
atgaagaaggagaataacaaccgct

SEQ ID NO: 99538 - DNA, 25 bp, probe
agagttcatatctagcctggtcaac

SEQ ID NO: 99539 - DNA, 25 bp, probe
caagagttcatatctagcctggtca

SEQ ID NO: 99540 - DNA, 25 bp, probe
tatctagcctggtcaacatagcaag

SEQ ID NO: 99541 - DNA, 25 bp, probe
catatctagcctggtcaacatagca

SEQ ID NO: 99542 - DNA, 25 bp, probe
gagttcatatctagcctggtcaaca

SEQ ID NO: 99543 - DNA, 25 bp, probe
ggttacattacctgacagacaagat

SEQ ID NO: 99544 - DNA, 25 bp, probe
ccttatagtaatgtgctctggttac

SEQ ID NO: 99545 - DNA, 25 bp, probe
attacctgacagacaagatgctgaa

SEQ ID NO: 99546 - DNA, 25 bp, probe
ttgctattgaaggaccagatttagt

SEQ ID NO: 99547 - DNA, 25 bp, probe
ctggttacattacctgacagacaag

SEQ ID NO: 99548 - DNA, 25 bp, probe
cccttatagtaatgtgctctggtta

SEQ ID NO: 99549 - DNA, 25 bp, probe
catgaagaaggagaataacaaccgc

SEQ ID NO: 99550 - DNA, 25 bp, probe
tggttacattacctgacagacaaga

SEQ ID NO: 99551 - DNA, 25 bp, probe
cactataattcaaccaaaggctctg

SEQ ID NO: 99552 - DNA, 25 bp, probe
tcactataattcaaccaaaggctct

SEQ ID NO: 99553 - DNA, 25 bp, probe
cattgctattgaaggaccagattta

SEQ ID NO: 99554 - DNA, 25 bp, probe
ccttcaagactaaatgtaacactcc

SEQ ID NO: 99555 - DNA, 25 bp, probe
tgaagaaggagaataacaaccgctg

SEQ ID NO: 99556 - DNA, 25 bp, probe
attgctattgaaggaccagatttag

SEQ ID NO: 99557 - DNA, 25 bp, probe
tcaagactaaatgtaacactcctgc

SEQ ID NO: 99558 - DNA, 25 bp, probe
cttatagtaatgtgctctggttaca

SEQ ID NO: 99559 - DNA, 25 bp, probe
atcactataattcaaccaaaggctc

SEQ ID NO: 99560 - DNA, 25 bp, probe
caagatgctgaaacaaatgaccttc

SEQ ID NO: 99561 - DNA, 25 bp, probe
atttgagtttggagggattgactta

SEQ ID NO: 99562 - DNA, 25 bp, probe
ttcaagactaaatgtaacactcctg

SEQ ID NO: 99563 - DNA, 25 bp, probe
accttcaagactaaatgtaacactc

SEQ ID NO: 99564 - DNA, 25 bp, probe
gaccttcaagactaaatgtaacact

SEQ ID NO: 99565 - DNA, 25 bp, probe
actataattcaaccaaaggctctgc

SEQ ID NO: 99566 - DNA, 25 bp, probe
tcattgctattgaaggaccagattt

SEQ ID NO: 99567 - DNA, 25 bp, probe
aaatcattgctattgaaggaccaga

SEQ ID NO: 99568 - DNA, 25 bp, probe
ggatcactataattcaaccaaaggc

SEQ ID NO: 99569 - DNA, 25 bp, probe
aaagcctgggatcactataattcaa

SEQ ID NO: 99570 - DNA, 25 bp, probe
acttactcttctatgctatcactgc

SEQ ID NO: 99571 - DNA, 25 bp, probe
ggttattgacaggaaggaatgaatc

SEQ ID NO: 99572 - DNA, 25 bp, probe
gctcttacgaacataatggactctt

SEQ ID NO: 99573 - DNA, 25 bp, probe
tgctacttgttctctatgcctctaa

SEQ ID NO: 99574 - DNA, 25 bp, probe
ttgctcttacgaacataatggactc

SEQ ID NO: 99575 - DNA, 25 bp, probe
ctgctacttgttctctatgcctcta

SEQ ID NO: 99576 - DNA, 25 bp, probe
tgctcttacgaacataatggactct

SEQ ID NO: 99577 - DNA, 25 bp, probe
ctcttacgaacataatggactctta

SEQ ID NO: 99578 - DNA, 25 bp, probe
tgaagtgtacctgttcttgtctctt

SEQ ID NO: 99579 - DNA, 25 bp, probe
tattgacaggaaggaatgaatccaa

SEQ ID NO: 99580 - DNA, 25 bp, probe
ttattgacaggaaggaatgaatcca

SEQ ID NO: 99581 - DNA, 25 bp, probe
gttattgacaggaaggaatgaatcc

SEQ ID NO: 99582 - DNA, 25 bp, probe
aactgctacttgttctctatgcctc

SEQ ID NO: 99583 - DNA, 25 bp, probe
tcttacgaacataatggactcttaa

SEQ ID NO: 99584 - DNA, 25 bp, probe
attgacaggaaggaatgaatccaag

SEQ ID NO: 99585 - DNA, 25 bp, probe
ttgtgaagtgtacctgttcttgtct

SEQ ID NO: 99586 - DNA, 25 bp, probe
atggttatagagatgactgtagctt

SEQ ID NO: 99587 - DNA, 25 bp, probe
atatggttatagagatgactgtagc

SEQ ID NO: 99588 - DNA, 25 bp, probe
gccatacttactcttctatgctatc

SEQ ID NO: 99589 - DNA, 25 bp, probe
gtgaagtgtacctgttcttgtctct

SEQ ID NO: 99590 - DNA, 25 bp, probe
tacttactcttctatgctatcactg

SEQ ID NO: 99591 - DNA, 25 bp, probe
gctacttgttctctatgcctctaaa

SEQ ID NO: 99592 - DNA, 25 bp, probe
caactgctacttgttctctatgcct

SEQ ID NO: 99593 - DNA, 25 bp, probe
gagttgacctgacttccttcttgaa

SEQ ID NO: 99594 - DNA, 25 bp, probe
agtgacatacaaagaccaaggatta

SEQ ID NO: 99595 - DNA, 25 bp, probe
tttgctcttacgaacataatggact

SEQ ID NO: 99596 - DNA, 25 bp, probe
tgatactatgaggctgaaacaatcc

SEQ ID NO: 99597 - DNA, 25 bp, probe
gggttattgacaggaaggaatgaat

SEQ ID NO: 99598 - DNA, 25 bp, probe
caggaaggaatgaatccaagtgaag

SEQ ID NO: 99599 - DNA, 25 bp, probe
cagcagaaactatacaatgaaggaa

SEQ ID NO: 99600 - DNA, 25 bp, probe
ctgatactatgaggctgaaacaatc

SEQ ID NO: 99601 - DNA, 25 bp, probe
gctgatactatgaggctgaaacaat

SEQ ID NO: 99602 - DNA, 25 bp, probe
cagtgacatacaaagaccaaggatt

SEQ ID NO: 99603 - DNA, 25 bp, probe
tgacttccttcttgaaatgactgtt

SEQ ID NO: 99604 - DNA, 25 bp, probe
ttgagttgacctgacttccttcttg

SEQ ID NO: 99605 - DNA, 25 bp, probe
tgtgaagtgtacctgttcttgtctc

SEQ ID NO: 99606 - DNA, 25 bp, probe
gcagaaactatacaatgaaggaaga

SEQ ID NO: 99607 - DNA, 25 bp, probe
gcagcagaaactatacaatgaagga

SEQ ID NO: 99608 - DNA, 25 bp, probe
actgctacttgttctctatgcctct

SEQ ID NO: 99609 - DNA, 25 bp, probe
agcagaaactatacaatgaaggaag

SEQ ID NO: 99610 - DNA, 25 bp, probe
gtgacatacaaagaccaaggattat

SEQ ID NO: 99611 - DNA, 25 bp, probe
aagtagatcatgcagtgacatacaa

SEQ ID NO: 99612 - DNA, 25 bp, probe
ctgacttccttcttgaaatgactgt

SEQ ID NO: 99613 - DNA, 25 bp, probe
tatggttatagagatgactgtagct

SEQ ID NO: 99614 - DNA, 25 bp, probe
atgaagtgtcaccagtatctactac

SEQ ID NO: 99615 - DNA, 25 bp, probe
gtagatatggagatgaagaagacaa

SEQ ID NO: 99616 - DNA, 25 bp, probe
ttgtagatatggagatgaagaagac

SEQ ID NO: 99617 - DNA, 25 bp, probe
catgaagtgtcaccagtatctacta

SEQ ID NO: 99618 - DNA, 25 bp, probe
tgtagatatggagatgaagaagaca

SEQ ID NO: 99619 - DNA, 25 bp, probe
tgaagtgtcaccagtatctactact

SEQ ID NO: 99620 - DNA, 25 bp, probe
ccatgaagtgtcaccagtatctact

SEQ ID NO: 99621 - DNA, 25 bp, probe
ttgtccaaggaaatgtagaatcact

SEQ ID NO: 99622 - DNA, 25 bp, probe
gttgtccaaggaaatgtagaatcac

SEQ ID NO: 99623 - DNA, 25 bp, probe
gtgttgtccaaggaaatgtagaatc

SEQ ID NO: 99624 - DNA, 25 bp, probe
tgttgtccaaggaaatgtagaatca

SEQ ID NO: 99625 - DNA, 25 bp, probe
agtgttgtccaaggaaatgtagaat

SEQ ID NO: 99626 - DNA, 25 bp, probe
tgtccaaggaaatgtagaatcactt

SEQ ID NO: 99627 - DNA, 25 bp, probe
ccaaggaaatgtagaatcactttgt

SEQ ID NO: 99628 - DNA, 25 bp, probe
gtccaaggaaatgtagaatcacttt

SEQ ID NO: 99629 - DNA, 25 bp, probe
cagtgttgtccaaggaaatgtagaa

SEQ ID NO: 99630 - DNA, 25 bp, probe
tttgaagacaggaaagtggaggtta

SEQ ID NO: 99631 - DNA, 25 bp, probe
tccaaggaaatgtagaatcactttg

SEQ ID NO: 99632 - DNA, 25 bp, probe
agtatctactactgtgaagtcagct

SEQ ID NO: 99633 - DNA, 25 bp, probe
ttgaagacaggaaagtggaggttag

SEQ ID NO: 99634 - DNA, 25 bp, probe
tttacctgtcaataaagcagaagac

SEQ ID NO: 99635 - DNA, 25 bp, probe
cactttgtagatatggagatgaaga

SEQ ID NO: 99636 - DNA, 25 bp, probe
ttacctgtcaataaagcagaagacg

SEQ ID NO: 99637 - DNA, 25 bp, probe
acaatttacctgtcaataaagcaga

SEQ ID NO: 99638 - DNA, 25 bp, probe
gccatgaagtgtcaccagtatctac

SEQ ID NO: 99639 - DNA, 25 bp, probe
aggaaatgtagaatcactttgtaga

SEQ ID NO: 99640 - DNA, 25 bp, probe
ccttaagagaatagtaggaggtcct

SEQ ID NO: 99641 - DNA, 25 bp, probe
aggaccttaagagaatagtaggagg

SEQ ID NO: 99642 - DNA, 25 bp, probe
gaacaatttacctgtcaataaagca

SEQ ID NO: 99643 - DNA, 25 bp, probe
tgaacaatttacctgtcaataaagc

SEQ ID NO: 99644 - DNA, 25 bp, probe
agccatgaagtgtcaccagtatcta

SEQ ID NO: 99645 - DNA, 25 bp, probe
agatatggagatgaagaagacaaat

SEQ ID NO: 99646 - DNA, 25 bp, probe
tatagcattcccagtgtcactagaa

SEQ ID NO: 99647 - DNA, 25 bp, probe
tcactttgtagatatggagatgaag

SEQ ID NO: 99648 - DNA, 25 bp, probe
atttacctgtcaataaagcagaaga

SEQ ID NO: 99649 - DNA, 25 bp, probe
aacaatttacctgtcaataaagcag

SEQ ID NO: 99650 - DNA, 25 bp, probe
gatatggagatgaagaagacaaatc

SEQ ID NO: 99651 - DNA, 25 bp, probe
caatttacctgtcaataaagcagaa

SEQ ID NO: 99652 - DNA, 25 bp, probe
ccagtgttgtccaaggaaatgtaga

SEQ ID NO: 99653 - DNA, 25 bp, probe
gtcagaggcttgtgattaactgtgg

SEQ ID NO: 99654 - DNA, 25 bp, probe
actttgtagatatggagatgaagaa

SEQ ID NO: 99655 - DNA, 25 bp, probe
gaatcactttgtagatatggagatg

SEQ ID NO: 99656 - DNA, 25 bp, probe
gtgtcgtcagaggcttgtgattaac

SEQ ID NO: 99657 - DNA, 25 bp, probe
aatttacctgtcaataaagcagaag

SEQ ID NO: 99658 - DNA, 25 bp, probe
tagactacgaccaggtgaagatcaa

SEQ ID NO: 99659 - DNA, 25 bp, probe
gatcaaggacctgaagacctctaac

SEQ ID NO: 99660 - DNA, 25 bp, probe
agatcaaggacctgaagacctctaa

SEQ ID NO: 99661 - DNA, 25 bp, probe
aagatcaaggacctgaagacctcta

SEQ ID NO: 99662 - DNA, 25 bp, probe
atcaaggacctgaagacctctaaca

SEQ ID NO: 99663 - DNA, 25 bp, probe
caaggacctgaagacctctaacaac

SEQ ID NO: 99664 - DNA, 25 bp, probe
tcaaggacctgaagacctctaacaa

SEQ ID NO: 99665 - DNA, 25 bp, probe
gtagactacgaccaggtgaagatca

SEQ ID NO: 99666 - DNA, 25 bp, probe
aggtctctttctttactctgggtca

SEQ ID NO: 99667 - DNA, 25 bp, probe
acatccagatagtaataaacaccat

SEQ ID NO: 99668 - DNA, 25 bp, probe
gaggtctctttctttactctgggtc

SEQ ID NO: 99669 - DNA, 25 bp, probe
ctgaggtctctttctttactctggg

SEQ ID NO: 99670 - DNA, 25 bp, probe
cctgaggtctctttctttactctgg

SEQ ID NO: 99671 - DNA, 25 bp, probe
agactacgaccaggtgaagatcaag

SEQ ID NO: 99672 - DNA, 25 bp, probe
gaagatcaaggacctgaagacctct

SEQ ID NO: 99673 - DNA, 25 bp, probe
ggtctctttctttactctgggtcag

SEQ ID NO: 99674 - DNA, 25 bp, probe
tgaggtctctttctttactctgggt

SEQ ID NO: 99675 - DNA, 25 bp, probe
tacatccagatagtaataaacacca

SEQ ID NO: 99676 - DNA, 25 bp, probe
aaggacctgaagacctctaacaacc

SEQ ID NO: 99677 - DNA, 25 bp, probe
ccagatagtaataaacaccatttca

SEQ ID NO: 99678 - DNA, 25 bp, probe
ggaaaccctagaccatgtcagatag

SEQ ID NO: 99679 - DNA, 25 bp, probe
tgaagatcaaggacctgaagacctc

SEQ ID NO: 99680 - DNA, 25 bp, probe
ccattaacctgaggtctctttcttt

SEQ ID NO: 99681 - DNA, 25 bp, probe
taacctgaggtctctttctttactc

SEQ ID NO: 99682 - DNA, 25 bp, probe
aacctgaggtctctttctttactct

SEQ ID NO: 99683 - DNA, 25 bp, probe
ttaacctgaggtctctttctttact

SEQ ID NO: 99684 - DNA, 25 bp, probe
tccagatagtaataaacaccatttc

SEQ ID NO: 99685 - DNA, 25 bp, probe
catccagatagtaataaacaccatt

SEQ ID NO: 99686 - DNA, 25 bp, probe
tctgaacttaaggtgggagatattt

SEQ ID NO: 99687 - DNA, 25 bp, probe
gtgaagatcaaggacctgaagacct

SEQ ID NO: 99688 - DNA, 25 bp, probe
acctgaggtctctttctttactctg

SEQ ID NO: 99689 - DNA, 25 bp, probe
aagtcaggggctatcttttggtata

SEQ ID NO: 99690 - DNA, 25 bp, probe
tttcatctgaacttaaggtgggaga

SEQ ID NO: 99691 - DNA, 25 bp, probe
ggtagactacgaccaggtgaagatc

SEQ ID NO: 99692 - DNA, 25 bp, probe
cttcccatcttccacagagacatct

SEQ ID NO: 99693 - DNA, 25 bp, probe
attaacctgaggtctctttctttac

SEQ ID NO: 99694 - DNA, 25 bp, probe
cattaacctgaggtctctttcttta

SEQ ID NO: 99695 - DNA, 25 bp, probe
cccattaacctgaggtctctttctt

SEQ ID NO: 99696 - DNA, 25 bp, probe
ttcccattaacctgaggtctctttc

SEQ ID NO: 99697 - DNA, 25 bp, probe
cttcccattaacctgaggtctcttt

SEQ ID NO: 99698 - DNA, 25 bp, probe
ctaagtggcttcccattaacctgag

SEQ ID NO: 99699 - DNA, 25 bp, probe
ctacgaccaggtgaagatcaaggac

SEQ ID NO: 99700 - DNA, 25 bp, probe
gactacgaccaggtgaagatcaagg

SEQ ID NO: 99701 - DNA, 25 bp, probe
agggtgacttttcatctgaacttaa

SEQ ID NO: 99702 - DNA, 25 bp, probe
gtatgaacaagatgagcattctgtc

SEQ ID NO: 99703 - DNA, 25 bp, probe
ctgtatgaacaagatgagcattctg

SEQ ID NO: 99704 - DNA, 25 bp, probe
tatgaacaagatgagcattctgtca

SEQ ID NO: 99705 - DNA, 25 bp, probe
tgtatgaacaagatgagcattctgt

SEQ ID NO: 99706 - DNA, 25 bp, probe
atgaacaagatgagcattctgtcag

SEQ ID NO: 99707 - DNA, 25 bp, probe
gatcatctgaggtcaggagttctag

SEQ ID NO: 99708 - DNA, 25 bp, probe
gctgtatgaacaagatgagcattct

SEQ ID NO: 99709 - DNA, 25 bp, probe
gaacaagatgagcattctgtcaggt

SEQ ID NO: 99710 - DNA, 25 bp, probe
tgaacaagatgagcattctgtcagg

SEQ ID NO: 99711 - DNA, 25 bp, probe
ggatcatctgaggtcaggagttcta

SEQ ID NO: 99712 - DNA, 25 bp, probe
aacaagatgagcattctgtcaggtg

SEQ ID NO: 99713 - DNA, 25 bp, probe
caaacataagtggcacaggaaagag

SEQ ID NO: 99714 - DNA, 25 bp, probe
caagatgagcattctgtcaggtgtc

SEQ ID NO: 99715 - DNA, 25 bp, probe
atcatctgaggtcaggagttctaga

SEQ ID NO: 99716 - DNA, 25 bp, probe
aaaggaagtttgcactgtaacatat

SEQ ID NO: 99717 - DNA, 25 bp, probe
cgtgcctgtaatcctagctacttag

SEQ ID NO: 99718 - DNA, 25 bp, probe
cactgtaacatatgccatagcttgg

SEQ ID NO: 99719 - DNA, 25 bp, probe
aaacataagtggcacaggaaagagg

SEQ ID NO: 99720 - DNA, 25 bp, probe
aaattccaaacataagtggcacagg

SEQ ID NO: 99721 - DNA, 25 bp, probe
aaggaagtttgcactgtaacatatg

SEQ ID NO: 99722 - DNA, 25 bp, probe
acaagatgagcattctgtcaggtgt

SEQ ID NO: 99723 - DNA, 25 bp, probe
ttgaattgggacaaaaggaacattt

SEQ ID NO: 99724 - DNA, 25 bp, probe
gttgaattgggacaaaaggaacatt

SEQ ID NO: 99725 - DNA, 25 bp, probe
tcatctgaggtcaggagttctagac

SEQ ID NO: 99726 - DNA, 25 bp, probe
ctttgtatgcaaccttagctgatgg

SEQ ID NO: 99727 - DNA, 25 bp, probe
aattccaaacataagtggcacagga

SEQ ID NO: 99728 - DNA, 25 bp, probe
atgctgtctgtgaaaaggaagtttg

SEQ ID NO: 99729 - DNA, 25 bp, probe
tgaattgggacaaaaggaacatttt

SEQ ID NO: 99730 - DNA, 25 bp, probe
aattgggacaaaaggaacattttct

SEQ ID NO: 99731 - DNA, 25 bp, probe
gaattgggacaaaaggaacattttc

SEQ ID NO: 99732 - DNA, 25 bp, probe
tgggacaaaaggaacattttctaaa

SEQ ID NO: 99733 - DNA, 25 bp, probe
ttgggacaaaaggaacattttctaa

SEQ ID NO: 99734 - DNA, 25 bp, probe
attgggacaaaaggaacattttcta

SEQ ID NO: 99735 - DNA, 25 bp, probe
gcactgtaacatatgccatagcttg

SEQ ID NO: 99736 - DNA, 25 bp, probe
aagatgagcattctgtcaggtgtcg

SEQ ID NO: 99737 - DNA, 25 bp, probe
aaaattccaaacataagtggcacag

SEQ ID NO: 99738 - DNA, 25 bp, probe
gaaaattccaaacataagtggcaca

SEQ ID NO: 99739 - DNA, 25 bp, probe
ccaaacataagtggcacaggaaaga

SEQ ID NO: 99740 - DNA, 25 bp, probe
tccaaacataagtggcacaggaaag

SEQ ID NO: 99741 - DNA, 25 bp, probe
catgctgtctgtgaaaaggaagttt

SEQ ID NO: 99742 - DNA, 25 bp, probe
tgcactgtaacatatgccatagctt

SEQ ID NO: 99743 - DNA, 25 bp, probe
ttgcactgtaacatatgccatagct

SEQ ID NO: 99744 - DNA, 25 bp, probe
gtgcctgtaatcctagctacttagg

SEQ ID NO: 99745 - DNA, 25 bp, probe
gggacaaaaggaacattttctaaat

SEQ ID NO: 99746 - DNA, 25 bp, probe
gctcaccttctctatctatccaata

SEQ ID NO: 99747 - DNA, 25 bp, probe
ggctcaccttctctatctatccaat

SEQ ID NO: 99748 - DNA, 25 bp, probe
atcagtcagtcacacataagttcct

SEQ ID NO: 99749 - DNA, 25 bp, probe
aagtcattgaattaccactcctgat

SEQ ID NO: 99750 - DNA, 25 bp, probe
tcattgaattaccactcctgataca

SEQ ID NO: 99751 - DNA, 25 bp, probe
caagtcattgaattaccactcctga

SEQ ID NO: 99752 - DNA, 25 bp, probe
gtcattgaattaccactcctgatac

SEQ ID NO: 99753 - DNA, 25 bp, probe
agtcattgaattaccactcctgata

SEQ ID NO: 99754 - DNA, 25 bp, probe
attagtctccaagccattcagtgat

SEQ ID NO: 99755 - DNA, 25 bp, probe
cagtcagtcacacataagttccttg

SEQ ID NO: 99756 - DNA, 25 bp, probe
tcagtcagtcacacataagttcctt

SEQ ID NO: 99757 - DNA, 25 bp, probe
tcagtcacacataagttccttgtat

SEQ ID NO: 99758 - DNA, 25 bp, probe
gtcagtcacacataagttccttgta

SEQ ID NO: 99759 - DNA, 25 bp, probe
gatcagtcagtcacacataagttcc

SEQ ID NO: 99760 - DNA, 25 bp, probe
tgaggtaacttacagacattgtgtt

SEQ ID NO: 99761 - DNA, 25 bp, probe
atgaggtaacttacagacattgtgt

SEQ ID NO: 99762 - DNA, 25 bp, probe
ataattagtctccaagccattcagt

SEQ ID NO: 99763 - DNA, 25 bp, probe
gtatctgtctccaggtgaatgtaat

SEQ ID NO: 99764 - DNA, 25 bp, probe
aattagtctccaagccattcagtga

SEQ ID NO: 99765 - DNA, 25 bp, probe
taattagtctccaagccattcagtg

SEQ ID NO: 99766 - DNA, 25 bp, probe
tgtactactgtgaagtgtatgtgtg

SEQ ID NO: 99767 - DNA, 25 bp, probe
cagtcacacataagttccttgtatt

SEQ ID NO: 99768 - DNA, 25 bp, probe
ttgtactactgtgaagtgtatgtgt

SEQ ID NO: 99769 - DNA, 25 bp, probe
cattgaattaccactcctgatacag

SEQ ID NO: 99770 - DNA, 25 bp, probe
tatctgtctccaggtgaatgtaatt

SEQ ID NO: 99771 - DNA, 25 bp, probe
gtcacacataagttccttgtattct

SEQ ID NO: 99772 - DNA, 25 bp, probe
agtcacacataagttccttgtattc

SEQ ID NO: 99773 - DNA, 25 bp, probe
aataattagtctccaagccattcag

SEQ ID NO: 99774 - DNA, 25 bp, probe
catattctcaggtctctgtgtgtac

SEQ ID NO: 99775 - DNA, 25 bp, probe
tacagttgatctctagcacagacag

SEQ ID NO: 99776 - DNA, 25 bp, probe
agtacagttgatctctagcacagac

SEQ ID NO: 99777 - DNA, 25 bp, probe
gtactactgtgaagtgtatgtgtgc

SEQ ID NO: 99778 - DNA, 25 bp, probe
attgtactactgtgaagtgtatgtg

SEQ ID NO: 99779 - DNA, 25 bp, probe
gagtacagttgatctctagcacaga

SEQ ID NO: 99780 - DNA, 25 bp, probe
agtcagtcacacataagttccttgt

SEQ ID NO: 99781 - DNA, 25 bp, probe
gtacagttgatctctagcacagaca

SEQ ID NO: 99782 - DNA, 25 bp, probe
tatgaggtaacttacagacattgtg

SEQ ID NO: 99783 - DNA, 25 bp, probe
cctatgaggtaacttacagacattg

SEQ ID NO: 99784 - DNA, 25 bp, probe
ttagtctccaagccattcagtgatg

SEQ ID NO: 99785 - DNA, 25 bp, probe
tctgagagaagaacactgctgattg

SEQ ID NO: 99786 - DNA, 25 bp, probe
gcatattctcaggtctctgtgtgta

SEQ ID NO: 99787 - DNA, 25 bp, probe
ctatgaggtaacttacagacattgt

SEQ ID NO: 99788 - DNA, 25 bp, probe
cgtatctgtctccaggtgaatgtaa

SEQ ID NO: 99789 - DNA, 25 bp, probe
cacaggctcaccttctctatctatc

SEQ ID NO: 99790 - DNA, 25 bp, probe
ctgtctattattctggagtatgtgc

SEQ ID NO: 99791 - DNA, 25 bp, probe
ctagagagcctgcttcaagattaag

SEQ ID NO: 99792 - DNA, 25 bp, probe
tctgtctattattctggagtatgtg

SEQ ID NO: 99793 - DNA, 25 bp, probe
tgtctattattctggagtatgtgca

SEQ ID NO: 99794 - DNA, 25 bp, probe
atgatagtgtaaatggaaggcaaag

SEQ ID NO: 99795 - DNA, 25 bp, probe
attcttctgtctattattctggagt

SEQ ID NO: 99796 - DNA, 25 bp, probe
tagagagcctgcttcaagattaagg

SEQ ID NO: 99797 - DNA, 25 bp, probe
atagtgtaaatggaaggcaaagcat

SEQ ID NO: 99798 - DNA, 25 bp, probe
catcatcatacagaggtgaaccgtt

SEQ ID NO: 99799 - DNA, 25 bp, probe
gtctattattctggagtatgtgcaa

SEQ ID NO: 99800 - DNA, 25 bp, probe
gatagtgtaaatggaaggcaaagca

SEQ ID NO: 99801 - DNA, 25 bp, probe
tgatagtgtaaatggaaggcaaagc

SEQ ID NO: 99802 - DNA, 25 bp, probe
tctattattctggagtatgtgcaag

SEQ ID NO: 99803 - DNA, 25 bp, probe
ttctgtctattattctggagtatgt

SEQ ID NO: 99804 - DNA, 25 bp, probe
tatgatagtgtaaatggaaggcaaa

SEQ ID NO: 99805 - DNA, 25 bp, probe
ttatgatagtgtaaatggaaggcaa

SEQ ID NO: 99806 - DNA, 25 bp, probe
tagtgtaaatggaaggcaaagcatc

SEQ ID NO: 99807 - DNA, 25 bp, probe
ctattattctggagtatgtgcaaga

SEQ ID NO: 99808 - DNA, 25 bp, probe
ctattatccctcctcccaactgtac

SEQ ID NO: 99809 - DNA, 25 bp, probe
catcatacagaggtgaaccgtttag

SEQ ID NO: 99810 - DNA, 25 bp, probe
tttatgatagtgtaaatggaaggca

SEQ ID NO: 99811 - DNA, 25 bp, probe
ttcttctgtctattattctggagta

SEQ ID NO: 99812 - DNA, 25 bp, probe
tcatcatacagaggtgaaccgttta

SEQ ID NO: 99813 - DNA, 25 bp, probe
tctagagagcctgcttcaagattaa

SEQ ID NO: 99814 - DNA, 25 bp, probe
ttctagagagcctgcttcaagatta

SEQ ID NO: 99815 - DNA, 25 bp, probe
cttctgtctattattctggagtatg

SEQ ID NO: 99816 - DNA, 25 bp, probe
gtaaatggaaggcaaagcatcacat

SEQ ID NO: 99817 - DNA, 25 bp, probe
tcttctgtctattattctggagtat

SEQ ID NO: 99818 - DNA, 25 bp, probe
atcatcatacagaggtgaaccgttt

SEQ ID NO: 99819 - DNA, 25 bp, probe
atcatacagaggtgaaccgtttagg

SEQ ID NO: 99820 - DNA, 25 bp, probe
gaggctccacattcactttccataa

SEQ ID NO: 99821 - DNA, 25 bp, probe
gctattatccctcctcccaactgta

SEQ ID NO: 99822 - DNA, 25 bp, probe
aattcttctgtctattattctggag

SEQ ID NO: 99823 - DNA, 25 bp, probe
aggctccacattcactttccataag

SEQ ID NO: 99824 - DNA, 25 bp, probe
cttctagagagcctgcttcaagatt

SEQ ID NO: 99825 - DNA, 25 bp, probe
taaatggaaggcaaagcatcacatg

SEQ ID NO: 99826 - DNA, 25 bp, probe
ctcttccctgctattatccctcctc

SEQ ID NO: 99827 - DNA, 25 bp, probe
agtgtaaatggaaggcaaagcatca

SEQ ID NO: 99828 - DNA, 25 bp, probe
gtcatcactgaaacacaatgagaaa

SEQ ID NO: 99829 - DNA, 25 bp, probe
agtcatcactgaaacacaatgagaa

SEQ ID NO: 99830 - DNA, 25 bp, probe
cagatttgtttgttgtagtttatgt

SEQ ID NO: 99831 - DNA, 25 bp, probe
gacctcttccctgctattatccctc

SEQ ID NO: 99832 - DNA, 25 bp, probe
gagggtagcagaacaagacttttaa

SEQ ID NO: 99833 - DNA, 25 bp, probe
gaaacacaatgagaaaacagcatct

SEQ ID NO: 99834 - DNA, 25 bp, probe
gcagttattcgtaatgtcagatacc

SEQ ID NO: 99835 - DNA, 25 bp, probe
ttattcgtaatgtcagataccacct

SEQ ID NO: 99836 - DNA, 25 bp, probe
gttattcgtaatgtcagataccacc

SEQ ID NO: 99837 - DNA, 25 bp, probe
attcgtaatgtcagataccacctat

SEQ ID NO: 99838 - DNA, 25 bp, probe
tcgtaatgtcagataccacctataa

SEQ ID NO: 99839 - DNA, 25 bp, probe
ttcgtaatgtcagataccacctata

SEQ ID NO: 99840 - DNA, 25 bp, probe
tattcgtaatgtcagataccaccta

SEQ ID NO: 99841 - DNA, 25 bp, probe
agttattcgtaatgtcagataccac

SEQ ID NO: 99842 - DNA, 25 bp, probe
cagttattcgtaatgtcagatacca

SEQ ID NO: 99843 - DNA, 25 bp, probe
tatgctcttgtgtaatctacttgac

SEQ ID NO: 99844 - DNA, 25 bp, probe
aagtcataattcttcatcctccaag

SEQ ID NO: 99845 - DNA, 25 bp, probe
tgctcttgtgtaatctacttgacat

SEQ ID NO: 99846 - DNA, 25 bp, probe
atgctcttgtgtaatctacttgaca

SEQ ID NO: 99847 - DNA, 25 bp, probe
atatgttagaggcagttcacacaat

SEQ ID NO: 99848 - DNA, 25 bp, probe
aatatgttagaggcagttcacacaa

SEQ ID NO: 99849 - DNA, 25 bp, probe
gctcttgtgtaatctacttgacatc

SEQ ID NO: 99850 - DNA, 25 bp, probe
tatgttagaggcagttcacacaatc

SEQ ID NO: 99851 - DNA, 25 bp, probe
agtacatctacatggtaatggagtg

SEQ ID NO: 99852 - DNA, 25 bp, probe
cagtacatctacatggtaatggagt

SEQ ID NO: 99853 - DNA, 25 bp, probe
ttatgctcttgtgtaatctacttga

SEQ ID NO: 99854 - DNA, 25 bp, probe
ctcttgtgtaatctacttgacatca

SEQ ID NO: 99855 - DNA, 25 bp, probe
ggcactgtatatattgtagacttgt

SEQ ID NO: 99856 - DNA, 25 bp, probe
tggcactgtatatattgtagacttg

SEQ ID NO: 99857 - DNA, 25 bp, probe
tacatctacatggtaatggagtgtg

SEQ ID NO: 99858 - DNA, 25 bp, probe
gtacatctacatggtaatggagtgt

SEQ ID NO: 99859 - DNA, 25 bp, probe
atggcattgttcacagtgatcttaa

SEQ ID NO: 99860 - DNA, 25 bp, probe
atctacatggtaatggagtgtggaa

SEQ ID NO: 99861 - DNA, 25 bp, probe
actgttatactcttgaatccctgtg

SEQ ID NO: 99862 - DNA, 25 bp, probe
gactgttatactcttgaatccctgt

SEQ ID NO: 99863 - DNA, 25 bp, probe
ttagaggcagttcacacaatccatc

SEQ ID NO: 99864 - DNA, 25 bp, probe
gaatagtgggtggatagcaagtata

SEQ ID NO: 99865 - DNA, 25 bp, probe
ctgttatactcttgaatccctgtgg

SEQ ID NO: 99866 - DNA, 25 bp, probe
caagcaaggtatttcaggtgttaaa

SEQ ID NO: 99867 - DNA, 25 bp, probe
ttcaagcaaggtatttcaggtgtta

SEQ ID NO: 99868 - DNA, 25 bp, probe
gcaaccacttatggcactgtatata

SEQ ID NO: 99869 - DNA, 25 bp, probe
gtgggtggatagcaagtatattcta

SEQ ID NO: 99870 - DNA, 25 bp, probe
tagtgggtggatagcaagtatattc

SEQ ID NO: 99871 - DNA, 25 bp, probe
tattaaagcagataggaagtggagg

SEQ ID NO: 99872 - DNA, 25 bp, probe
tgcagttattcgtaatgtcagatac

SEQ ID NO: 99873 - DNA, 25 bp, probe
aatcacggaccagtacatctacatg

SEQ ID NO: 99874 - DNA, 25 bp, probe
agtgggtggatagcaagtatattct

SEQ ID NO: 99875 - DNA, 25 bp, probe
tcaagcaaggtatttcaggtgttaa

SEQ ID NO: 99876 - DNA, 25 bp, probe
catggcattgttcacagtgatctta

SEQ ID NO: 99877 - DNA, 25 bp, probe
tcttgtgtaatctacttgacatcat

SEQ ID NO: 99878 - DNA, 25 bp, probe
aatataggatagacactggacatgg

SEQ ID NO: 99879 - DNA, 25 bp, probe
atataggatagacactggacatggc

SEQ ID NO: 99880 - DNA, 25 bp, probe
aggcaggtaataataaaggttgagt

SEQ ID NO: 99881 - DNA, 25 bp, probe
acactaatatatggacctagcttga

SEQ ID NO: 99882 - DNA, 25 bp, probe
gggagaaatataggatagacactgg

SEQ ID NO: 99883 - DNA, 25 bp, probe
ggcaggtaataataaaggttgagtt

SEQ ID NO: 99884 - DNA, 25 bp, probe
cactaatatatggacctagcttgag

SEQ ID NO: 99885 - DNA, 25 bp, probe
gcactaggcaggtaataataaaggt

SEQ ID NO: 99886 - DNA, 25 bp, probe
ctaatatatggacctagcttgaggc

SEQ ID NO: 99887 - DNA, 25 bp, probe
ggagaaatataggatagacactgga

SEQ ID NO: 99888 - DNA, 25 bp, probe
gctagaacttctctaagcctatacg

SEQ ID NO: 99889 - DNA, 25 bp, probe
taatatatggacctagcttgaggca

SEQ ID NO: 99890 - DNA, 25 bp, probe
atatatggacctagcttgaggcaat

SEQ ID NO: 99891 - DNA, 25 bp, probe
actaatatatggacctagcttgagg

SEQ ID NO: 99892 - DNA, 25 bp, probe
agaaatataggatagacactggaca

SEQ ID NO: 99893 - DNA, 25 bp, probe
taggcaggtaataataaaggttgag

SEQ ID NO: 99894 - DNA, 25 bp, probe
tatatggacctagcttgaggcaatt

SEQ ID NO: 99895 - DNA, 25 bp, probe
aatatatggacctagcttgaggcaa

SEQ ID NO: 99896 - DNA, 25 bp, probe
actaggcaggtaataataaaggttg

SEQ ID NO: 99897 - DNA, 25 bp, probe
cactaggcaggtaataataaaggtt

SEQ ID NO: 99898 - DNA, 25 bp, probe
tctgtggagtaaatattgggattgg

SEQ ID NO: 99899 - DNA, 25 bp, probe
gagaaatataggatagacactggac

SEQ ID NO: 99900 - DNA, 25 bp, probe
ctaggcaggtaataataaaggttga

SEQ ID NO: 99901 - DNA, 25 bp, probe
cgtttctgtggagtaaatattggga

SEQ ID NO: 99902 - DNA, 25 bp, probe
ctagaacttctctaagcctatacgt

SEQ ID NO: 99903 - DNA, 25 bp, probe
gcaggtaataataaaggttgagttt

SEQ ID NO: 99904 - DNA, 25 bp, probe
tacactaatatatggacctagcttg

SEQ ID NO: 99905 - DNA, 25 bp, probe
ctgtggagtaaatattgggattggg

SEQ ID NO: 99906 - DNA, 25 bp, probe
ttctgtggagtaaatattgggattg

SEQ ID NO: 99907 - DNA, 25 bp, probe
gtttctgtggagtaaatattgggat

SEQ ID NO: 99908 - DNA, 25 bp, probe
tagaacttctctaagcctatacgtt

SEQ ID NO: 99909 - DNA, 25 bp, probe
gaaatataggatagacactggacat

SEQ ID NO: 99910 - DNA, 25 bp, probe
agctagaacttctctaagcctatac

SEQ ID NO: 99911 - DNA, 25 bp, probe
ttctctaagcctatacgtttctgtg

SEQ ID NO: 99912 - DNA, 25 bp, probe
gcctatacgtttctgtggagtaaat

SEQ ID NO: 99913 - DNA, 25 bp, probe
cttctctaagcctatacgtttctgt

SEQ ID NO: 99914 - DNA, 25 bp, probe
acttctctaagcctatacgtttctg

SEQ ID NO: 99915 - DNA, 25 bp, probe
tttctgtggagtaaatattgggatt

SEQ ID NO: 99916 - DNA, 25 bp, probe
taagcctatacgtttctgtggagta

SEQ ID NO: 99917 - DNA, 25 bp, probe
acgtttctgtggagtaaatattggg

SEQ ID NO: 99918 - DNA, 25 bp, probe
aaatataggatagacactggacatg

SEQ ID NO: 99919 - DNA, 25 bp, probe
ctctagtgtagctgccacattgatt

SEQ ID NO: 99920 - DNA, 25 bp, probe
tacgtttctgtggagtaaatattgg

SEQ ID NO: 99921 - DNA, 25 bp, probe
aacttctctaagcctatacgtttct

SEQ ID NO: 99922 - DNA, 25 bp, probe
ccttacctaagtatgtgattgacaa

SEQ ID NO: 99923 - DNA, 25 bp, probe
ggaaccacattgatattctactggc

SEQ ID NO: 99924 - DNA, 25 bp, probe
acccttacctaagtatgtgattgac

SEQ ID NO: 99925 - DNA, 25 bp, probe
atgatctgtacctaagctcagtatg

SEQ ID NO: 99926 - DNA, 25 bp, probe
catgatctgtacctaagctcagtat

SEQ ID NO: 99927 - DNA, 25 bp, probe
ggaacccttacctaagtatgtgatt

SEQ ID NO: 99928 - DNA, 25 bp, probe
aacccttacctaagtatgtgattga

SEQ ID NO: 99929 - DNA, 25 bp, probe
cagatcaactacagtagaaacagga

SEQ ID NO: 99930 - DNA, 25 bp, probe
tacagtagaaacaggatgctcaaca

SEQ ID NO: 99931 - DNA, 25 bp, probe
atcaactacagtagaaacaggatgc

SEQ ID NO: 99932 - DNA, 25 bp, probe
gaacccttacctaagtatgtgattg

SEQ ID NO: 99933 - DNA, 25 bp, probe
cagtagaaacaggatgctcaacaag

SEQ ID NO: 99934 - DNA, 25 bp, probe
ctacagtagaaacaggatgctcaac

SEQ ID NO: 99935 - DNA, 25 bp, probe
caactacagtagaaacaggatgctc

SEQ ID NO: 99936 - DNA, 25 bp, probe
agtagaaacaggatgctcaacaaga

SEQ ID NO: 99937 - DNA, 25 bp, probe
cccttacctaagtatgtgattgaca

SEQ ID NO: 99938 - DNA, 25 bp, probe
gatcaactacagtagaaacaggatg

SEQ ID NO: 99939 - DNA, 25 bp, probe
actacagtagaaacaggatgctcaa

SEQ ID NO: 99940 - DNA, 25 bp, probe
aactacagtagaaacaggatgctca

SEQ ID NO: 99941 - DNA, 25 bp, probe
tcaactacagtagaaacaggatgct

SEQ ID NO: 99942 - DNA, 25 bp, probe
agatcaactacagtagaaacaggat

SEQ ID NO: 99943 - DNA, 25 bp, probe
tgatctgtacctaagctcagtatgc

SEQ ID NO: 99944 - DNA, 25 bp, probe
gggaacccttacctaagtatgtgat

SEQ ID NO: 99945 - DNA, 25 bp, probe
atctgtacctaagctcagtatgcaa

SEQ ID NO: 99946 - DNA, 25 bp, probe
acagtagaaacaggatgctcaacaa

SEQ ID NO: 99947 - DNA, 25 bp, probe
tagaaacaggatgctcaacaagaga

SEQ ID NO: 99948 - DNA, 25 bp, probe
gtagaaacaggatgctcaacaagag

SEQ ID NO: 99949 - DNA, 25 bp, probe
gaaacaggatgctcaacaagagaaa

SEQ ID NO: 99950 - DNA, 25 bp, probe
gatctgtacctaagctcagtatgca

SEQ ID NO: 99951 - DNA, 25 bp, probe
gggaaccacattgatattctactgg

SEQ ID NO: 99952 - DNA, 25 bp, probe
agaaacaggatgctcaacaagagaa

SEQ ID NO: 99953 - DNA, 25 bp, probe
atgatgccactgaacagctatgaac

SEQ ID NO: 99954 - DNA, 25 bp, probe
catgatgccactgaacagctatgaa

SEQ ID NO: 99955 - DNA, 25 bp, probe
tcatgatctgtacctaagctcagta

SEQ ID NO: 99956 - DNA, 25 bp, probe
ggggaaccacattgatattctactg

SEQ ID NO: 99957 - DNA, 25 bp, probe
gaaccacattgatattctactggcc

SEQ ID NO: 99958 - DNA, 25 bp, probe
tctgtacctaagctcagtatgcaaa

SEQ ID NO: 99959 - DNA, 25 bp, probe
cttacctaagtatgtgattgacaaa

SEQ ID NO: 99960 - DNA, 25 bp, probe
aaacaggatgctcaacaagagaaaa

SEQ ID NO: 99961 - DNA, 25 bp, probe
tacctaagtatgtgattgacaaatc

SEQ ID NO: 99962 - DNA, 25 bp, probe
ttacctaagtatgtgattgacaaat

SEQ ID NO: 99963 - DNA, 25 bp, probe
tggggaaccacattgatattctact

SEQ ID NO: 99964 - DNA, 25 bp, probe
tgtacctaagctcagtatgcaaaag

SEQ ID NO: 99965 - DNA, 25 bp, probe
ccatgatgccactgaacagctatga

SEQ ID NO: 99966 - DNA, 25 bp, probe
gtgaagttacactgtaggacacaag

SEQ ID NO: 99967 - DNA, 25 bp, probe
gttgactctccttcccattgtttac

SEQ ID NO: 99968 - DNA, 25 bp, probe
cattgtttacagtgaaggtgtcatt

SEQ ID NO: 99969 - DNA, 25 bp, probe
attgtttacagtgaaggtgtcattc

SEQ ID NO: 99970 - DNA, 25 bp, probe
ttgactctccttcccattgtttaca

SEQ ID NO: 99971 - DNA, 25 bp, probe
tgaagttacactgtaggacacaagc

SEQ ID NO: 99972 - DNA, 25 bp, probe
tctccttcccattgtttacagtgaa

SEQ ID NO: 99973 - DNA, 25 bp, probe
cctgtgaagttacactgtaggacac

SEQ ID NO: 99974 - DNA, 25 bp, probe
ccattgtttacagtgaaggtgtcat

SEQ ID NO: 99975 - DNA, 25 bp, probe
ctctccttcccattgtttacagtga

SEQ ID NO: 99976 - DNA, 25 bp, probe
tgactctccttcccattgtttacag

SEQ ID NO: 99977 - DNA, 25 bp, probe
ggttgactctccttcccattgttta

SEQ ID NO: 99978 - DNA, 25 bp, probe
gaagttacactgtaggacacaagct

SEQ ID NO: 99979 - DNA, 25 bp, probe
gactctccttcccattgtttacagt

SEQ ID NO: 99980 - DNA, 25 bp, probe
aagttacactgtaggacacaagctg

SEQ ID NO: 99981 - DNA, 25 bp, probe
actctccttcccattgtttacagtg

SEQ ID NO: 99982 - DNA, 25 bp, probe
ttcccattgtttacagtgaaggtgt

SEQ ID NO: 99983 - DNA, 25 bp, probe
cagtatggtttcctcttcctctgtg

SEQ ID NO: 99984 - DNA, 25 bp, probe
attctccttcttccccttagtttac

SEQ ID NO: 99985 - DNA, 25 bp, probe
ctattctccttcttccccttagttt

SEQ ID NO: 99986 - DNA, 25 bp, probe
ttctccttcttccccttagtttact

SEQ ID NO: 99987 - DNA, 25 bp, probe
tcccattgtttacagtgaaggtgtc

SEQ ID NO: 99988 - DNA, 25 bp, probe
tctccttcttccccttagtttactc

SEQ ID NO: 99989 - DNA, 25 bp, probe
cccattgtttacagtgaaggtgtca

SEQ ID NO: 99990 - DNA, 25 bp, probe
gctattctccttcttccccttagtt

SEQ ID NO: 99991 - DNA, 25 bp, probe
ttgtttacagtgaaggtgtcattca

SEQ ID NO: 99992 - DNA, 25 bp, probe
ttccccttagtttactcctggtttt

SEQ ID NO: 99993 - DNA, 25 bp, probe
agttacactgtaggacacaagctgt

SEQ ID NO: 99994 - DNA, 25 bp, probe
tattctccttcttccccttagttta

SEQ ID NO: 99995 - DNA, 25 bp, probe
ctgctattctccttcttccccttag

SEQ ID NO: 99996 - DNA, 25 bp, probe
cttccccttagtttactcctggttt

SEQ ID NO: 99997 - DNA, 25 bp, probe
ctccttcttccccttagtttactcc

SEQ ID NO: 99998 - DNA, 25 bp, probe
tccctcctgtgaagttacactgtag

SEQ ID NO: 99999 - DNA, 25 bp, probe
ctccctcctgtgaagttacactgta

SEQ ID NO: 100000 - DNA, 25 bp, probe
cttcttccccttagtttactcctgg

SEQ ID NO: 100001 - DNA, 25 bp, probe
ccttcttccccttagtttactcctg

SEQ ID NO: 100002 - DNA, 25 bp, probe
tccttcttccccttagtttactcct

SEQ ID NO: 100003 - DNA, 25 bp, probe
agtatggtttcctcttcctctgtgc

SEQ ID NO: 100004 - DNA, 25 bp, probe
ctccttcccattgtttacagtgaag

SEQ ID NO: 100005 - DNA, 25 bp, probe
tgctattctccttcttccccttagt

SEQ ID NO: 100006 - DNA, 25 bp, probe
actgctattctccttcttcccctta

SEQ ID NO: 100007 - DNA, 25 bp, probe
tcttccccttagtttactcctggtt

SEQ ID NO: 100008 - DNA, 25 bp, probe
ttcttccccttagtttactcctggt

SEQ ID NO: 100009 - DNA, 25 bp, probe
cttcccattgtttacagtgaaggtg

SEQ ID NO: 100010 - DNA, 25 bp, probe
tacttgctgatggaagaatgaccta

SEQ ID NO: 100011 - DNA, 25 bp, probe
ttgacttaactcacaagagaactca

SEQ ID NO: 100012 - DNA, 25 bp, probe
acttaactcacaagagaactcatca

SEQ ID NO: 100013 - DNA, 25 bp, probe
tgacttaactcacaagagaactcat

SEQ ID NO: 100014 - DNA, 25 bp, probe
actcacaagagaactcatcataagt

SEQ ID NO: 100015 - DNA, 25 bp, probe
gacttaactcacaagagaactcatc

SEQ ID NO: 100016 - DNA, 25 bp, probe
aactcacaagagaactcatcataag

SEQ ID NO: 100017 - DNA, 25 bp, probe
cttaactcacaagagaactcatcat

SEQ ID NO: 100018 - DNA, 25 bp, probe
ttgctgatggaagaatgacctagtt

SEQ ID NO: 100019 - DNA, 25 bp, probe
tgatggaagaatgacctagttgctc

SEQ ID NO: 100020 - DNA, 25 bp, probe
ctgatggaagaatgacctagttgct

SEQ ID NO: 100021 - DNA, 25 bp, probe
accacagtgccagaatctattcatt

SEQ ID NO: 100022 - DNA, 25 bp, probe
ctcacaagagaactcatcataagta

SEQ ID NO: 100023 - DNA, 25 bp, probe
cttgctgatggaagaatgacctagt

SEQ ID NO: 100024 - DNA, 25 bp, probe
acttgctgatggaagaatgacctag

SEQ ID NO: 100025 - DNA, 25 bp, probe
tgctgatggaagaatgacctagttg

SEQ ID NO: 100026 - DNA, 25 bp, probe
cccaggacagtgaaacatagtaata

SEQ ID NO: 100027 - DNA, 25 bp, probe
tcacaagagaactcatcataagtac

SEQ ID NO: 100028 - DNA, 25 bp, probe
gaagaatgacctagttgctcctctc

SEQ ID NO: 100029 - DNA, 25 bp, probe
aggacagtgaaacatagtaatacca

SEQ ID NO: 100030 - DNA, 25 bp, probe
caggacagtgaaacatagtaatacc

SEQ ID NO: 100031 - DNA, 25 bp, probe
ccaggacagtgaaacatagtaatac

SEQ ID NO: 100032 - DNA, 25 bp, probe
gaccacagtgccagaatctattcat

SEQ ID NO: 100033 - DNA, 25 bp, probe
taactcacaagagaactcatcataa

SEQ ID NO: 100034 - DNA, 25 bp, probe
ttaactcacaagagaactcatcata

SEQ ID NO: 100035 - DNA, 25 bp, probe
tattcattctttcattggagacggt

SEQ ID NO: 100036 - DNA, 25 bp, probe
ctattcattctttcattggagacgg

SEQ ID NO: 100037 - DNA, 25 bp, probe
gtacttgctgatggaagaatgacct

SEQ ID NO: 100038 - DNA, 25 bp, probe
ccacagtgccagaatctattcattc

SEQ ID NO: 100039 - DNA, 25 bp, probe
attcattctttcattggagacggtt

SEQ ID NO: 100040 - DNA, 25 bp, probe
agacaccatgttgtatcagaataat

SEQ ID NO: 100041 - DNA, 25 bp, probe
tcccaggacagtgaaacatagtaat

SEQ ID NO: 100042 - DNA, 25 bp, probe
gctatccagattattaacagggttc

SEQ ID NO: 100043 - DNA, 25 bp, probe
ttcattctttcattggagacggttt

SEQ ID NO: 100044 - DNA, 25 bp, probe
tctattcattctttcattggagacg

SEQ ID NO: 100045 - DNA, 25 bp, probe
ctagtagggaggtttattcagatcg

SEQ ID NO: 100046 - DNA, 25 bp, probe
gctagtagggaggtttattcagatc

SEQ ID NO: 100047 - DNA, 25 bp, probe
ggaaggtctggtacatattggaaat

SEQ ID NO: 100048 - DNA, 25 bp, probe
ctagacaccatgttgtatcagaata

SEQ ID NO: 100049 - DNA, 25 bp, probe
ctatccagattattaacagggttcg

SEQ ID NO: 100050 - DNA, 25 bp, probe
gtcgtggagaacatggattaggatc

SEQ ID NO: 100051 - DNA, 25 bp, probe
agtaaatgcttccactaaactgaaa

SEQ ID NO: 100052 - DNA, 25 bp, probe
tttgtgccaataaatgacatcagaa

SEQ ID NO: 100053 - DNA, 25 bp, probe
cgctagtagggaggtttattcagat

SEQ ID NO: 100054 - DNA, 25 bp, probe
tgttccattccaatcatatccttct

SEQ ID NO: 100055 - DNA, 25 bp, probe
ttccattccaatcatatccttctcg

SEQ ID NO: 100056 - DNA, 25 bp, probe
ggtgtggatatggttctgagttata

SEQ ID NO: 100057 - DNA, 25 bp, probe
ccattccaatcatatccttctcgtt

SEQ ID NO: 100058 - DNA, 25 bp, probe
gttccattccaatcatatccttctc

SEQ ID NO: 100059 - DNA, 25 bp, probe
gaatcaatcaatccagtcaggtaat

SEQ ID NO: 100060 - DNA, 25 bp, probe
tggtgtggatatggttctgagttat

SEQ ID NO: 100061 - DNA, 25 bp, probe
atggtgtggatatggttctgagtta

SEQ ID NO: 100062 - DNA, 25 bp, probe
tccattccaatcatatccttctcgt

SEQ ID NO: 100063 - DNA, 25 bp, probe
tggatatggttctgagttatagtgt

SEQ ID NO: 100064 - DNA, 25 bp, probe
tgtggatatggttctgagttatagt

SEQ ID NO: 100065 - DNA, 25 bp, probe
actgtagtcactgctgagttaatag

SEQ ID NO: 100066 - DNA, 25 bp, probe
cactgtagtcactgctgagttaata

SEQ ID NO: 100067 - DNA, 25 bp, probe
tgaatcaatcaatccagtcaggtaa

SEQ ID NO: 100068 - DNA, 25 bp, probe
gtggatatggttctgagttatagtg

SEQ ID NO: 100069 - DNA, 25 bp, probe
gtgtggatatggttctgagttatag

SEQ ID NO: 100070 - DNA, 25 bp, probe
ttgttccattccaatcatatccttc

SEQ ID NO: 100071 - DNA, 25 bp, probe
ggatatggttctgagttatagtgtc

SEQ ID NO: 100072 - DNA, 25 bp, probe
aatcaatcaatccagtcaggtaatt

SEQ ID NO: 100073 - DNA, 25 bp, probe
attctagtaggtaagactgctgact

SEQ ID NO: 100074 - DNA, 25 bp, probe
aatggtgtggatatggttctgagtt

SEQ ID NO: 100075 - DNA, 25 bp, probe
ttctagtaggtaagactgctgactc

SEQ ID NO: 100076 - DNA, 25 bp, probe
ctctcagcaacttcatataagcatg

SEQ ID NO: 100077 - DNA, 25 bp, probe
aagttgattactgcctgtactctac

SEQ ID NO: 100078 - DNA, 25 bp, probe
tattctagtaggtaagactgctgac

SEQ ID NO: 100079 - DNA, 25 bp, probe
acttcatataagcatggtggtatct

SEQ ID NO: 100080 - DNA, 25 bp, probe
tctcagcaacttcatataagcatgg

SEQ ID NO: 100081 - DNA, 25 bp, probe
caacttcatataagcatggtggtat

SEQ ID NO: 100082 - DNA, 25 bp, probe
tctagtaggtaagactgctgactct

SEQ ID NO: 100083 - DNA, 25 bp, probe
gcaacttcatataagcatggtggta

SEQ ID NO: 100084 - DNA, 25 bp, probe
ctcagcaacttcatataagcatggt

SEQ ID NO: 100085 - DNA, 25 bp, probe
aacttcatataagcatggtggtatc

SEQ ID NO: 100086 - DNA, 25 bp, probe
gaagaggagaatggtgtggatatgg

SEQ ID NO: 100087 - DNA, 25 bp, probe
ggaagaggagaatggtgtggatatg

SEQ ID NO: 100088 - DNA, 25 bp, probe
tcagcaacttcatataagcatggtg

SEQ ID NO: 100089 - DNA, 25 bp, probe
gaatggtgtggatatggttctgagt

SEQ ID NO: 100090 - DNA, 25 bp, probe
cttcatataagcatggtggtatctt

SEQ ID NO: 100091 - DNA, 25 bp, probe
gatatggttctgagttatagtgtct

SEQ ID NO: 100092 - DNA, 25 bp, probe
atattctagtaggtaagactgctga

SEQ ID NO: 100093 - DNA, 25 bp, probe
gaggagaatggtgtggatatggttc

SEQ ID NO: 100094 - DNA, 25 bp, probe
aagaggacctcaaggatcaataatc

SEQ ID NO: 100095 - DNA, 25 bp, probe
gaagaggacctcaaggatcaataat

SEQ ID NO: 100096 - DNA, 25 bp, probe
tggttctgagttatagtgtcttatt

SEQ ID NO: 100097 - DNA, 25 bp, probe
agaagaggacctcaaggatcaataa

SEQ ID NO: 100098 - DNA, 25 bp, probe
gcaggatgttcactctatttattgg

SEQ ID NO: 100099 - DNA, 25 bp, probe
ggcaggatgttcactctatttattg

SEQ ID NO: 100100 - DNA, 25 bp, probe
gggcaggatgttcactctatttatt

SEQ ID NO: 100101 - DNA, 25 bp, probe
caggatgttcactctatttattggg

SEQ ID NO: 100102 - DNA, 25 bp, probe
tgggcaggatgttcactctatttat

SEQ ID NO: 100103 - DNA, 25 bp, probe
ctgggcaggatgttcactctattta

SEQ ID NO: 100104 - DNA, 25 bp, probe
acacttaacttattcctttgtaccc

SEQ ID NO: 100105 - DNA, 25 bp, probe
gggacacttaacttattcctttgta

SEQ ID NO: 100106 - DNA, 25 bp, probe
gacacttaacttattcctttgtacc

SEQ ID NO: 100107 - DNA, 25 bp, probe
ggatgttcactctatttattgggga

SEQ ID NO: 100108 - DNA, 25 bp, probe
aggatgttcactctatttattgggg

SEQ ID NO: 100109 - DNA, 25 bp, probe
gttcactctatttattggggaagga

SEQ ID NO: 100110 - DNA, 25 bp, probe
tgttcactctatttattggggaagg

SEQ ID NO: 100111 - DNA, 25 bp, probe
ggacacttaacttattcctttgtac

SEQ ID NO: 100112 - DNA, 25 bp, probe
acttaacttattcctttgtacccca

SEQ ID NO: 100113 - DNA, 25 bp, probe
gatgttcactctatttattggggaa

SEQ ID NO: 100114 - DNA, 25 bp, probe
ttcactctatttattggggaaggag

SEQ ID NO: 100115 - DNA, 25 bp, probe
cacttaacttattcctttgtacccc

SEQ ID NO: 100116 - DNA, 25 bp, probe
atgttcactctatttattggggaag

SEQ ID NO: 100117 - DNA, 25 bp, probe
cttaacttattcctttgtaccccag

SEQ ID NO: 100118 - DNA, 25 bp, probe
tcactctatttattggggaaggagg

SEQ ID NO: 100119 - DNA, 25 bp, probe
ctctatttattggggaaggagggag

SEQ ID NO: 100120 - DNA, 25 bp, probe
ggggacacttaacttattcctttgt

SEQ ID NO: 100121 - DNA, 25 bp, probe
ttaacttattcctttgtaccccagg

SEQ ID NO: 100122 - DNA, 25 bp, probe
actctatttattggggaaggaggga

SEQ ID NO: 100123 - DNA, 25 bp, probe
cactctatttattggggaaggaggg

SEQ ID NO: 100124 - DNA, 25 bp, probe
tctatttattggggaaggagggagg

SEQ ID NO: 100125 - DNA, 25 bp, probe
acaaaatggagcattaaaggtaacc

SEQ ID NO: 100126 - DNA, 25 bp, probe
gcacaaaatggagcattaaaggtaa

SEQ ID NO: 100127 - DNA, 25 bp, probe
caaaatggagcattaaaggtaaccc

SEQ ID NO: 100128 - DNA, 25 bp, probe
taacttattcctttgtaccccaggg

SEQ ID NO: 100129 - DNA, 25 bp, probe
cacaaaatggagcattaaaggtaac

SEQ ID NO: 100130 - DNA, 25 bp, probe
aaaatggagcattaaaggtaacccc

SEQ ID NO: 100131 - DNA, 25 bp, probe
atttggcacaaaatggagcattaaa

SEQ ID NO: 100132 - DNA, 25 bp, probe
gatttggcacaaaatggagcattaa

SEQ ID NO: 100133 - DNA, 25 bp, probe
tttggcacaaaatggagcattaaag

SEQ ID NO: 100134 - DNA, 25 bp, probe
ggcacaaaatggagcattaaaggta

SEQ ID NO: 100135 - DNA, 25 bp, probe
ctatttattggggaaggagggaggg

SEQ ID NO: 100136 - DNA, 25 bp, probe
aaatggagcattaaaggtaacccct

SEQ ID NO: 100137 - DNA, 25 bp, probe
aatggagcattaaaggtaacccctg

SEQ ID NO: 100138 - DNA, 25 bp, probe
ttggcacaaaatggagcattaaagg

SEQ ID NO: 100139 - DNA, 25 bp, probe
cctgggcaggatgttcactctattt

SEQ ID NO: 100140 - DNA, 25 bp, probe
ggatttggcacaaaatggagcatta

SEQ ID NO: 100141 - DNA, 25 bp, probe
tggcacaaaatggagcattaaaggt

SEQ ID NO: 100142 - DNA, 25 bp, probe
tttgctttatgggtttggcttgttt

SEQ ID NO: 100143 - DNA, 25 bp, probe
ttaatctctcgactgaatggacttt

SEQ ID NO: 100144 - DNA, 25 bp, probe
tttaatctctcgactgaatggactt

SEQ ID NO: 100145 - DNA, 25 bp, probe
taatctctcgactgaatggactttg

SEQ ID NO: 100146 - DNA, 25 bp, probe
ctatgggtttgctttggtgttgttt

SEQ ID NO: 100147 - DNA, 25 bp, probe
ttttcttttgctttatgggtttggc

SEQ ID NO: 100148 - DNA, 25 bp, probe
ttcttttgctttatgggtttggctt

SEQ ID NO: 100149 - DNA, 25 bp, probe
tttcttttgctttatgggtttggct

SEQ ID NO: 100150 - DNA, 25 bp, probe
cagttacctggttgctgttttaatt

SEQ ID NO: 100151 - DNA, 25 bp, probe
tatgggtttgctttggtgttgtttt

SEQ ID NO: 100152 - DNA, 25 bp, probe
aagaggggatgagttgtgtgaatac

SEQ ID NO: 100153 - DNA, 25 bp, probe
aatctctcgactgaatggactttgc

SEQ ID NO: 100154 - DNA, 25 bp, probe
agttacctggttgctgttttaatta

SEQ ID NO: 100155 - DNA, 25 bp, probe
gactgaatggactttgcacactttg

SEQ ID NO: 100156 - DNA, 25 bp, probe
ttgctttatgggtttggcttgtttt

SEQ ID NO: 100157 - DNA, 25 bp, probe
ttttgctttatgggtttggcttgtt

SEQ ID NO: 100158 - DNA, 25 bp, probe
ttttaatctctcgactgaatggact

SEQ ID NO: 100159 - DNA, 25 bp, probe
caagaggggatgagttgtgtgaata

SEQ ID NO: 100160 - DNA, 25 bp, probe
tcttttgctttatgggtttggcttg

SEQ ID NO: 100161 - DNA, 25 bp, probe
gatgagttgtgtgaataccccaaga

SEQ ID NO: 100162 - DNA, 25 bp, probe
cttttgctttatgggtttggcttgt

SEQ ID NO: 100163 - DNA, 25 bp, probe
atgagttgtgtgaataccccaagac

SEQ ID NO: 100164 - DNA, 25 bp, probe
gctatgggtttgctttggtgttgtt

SEQ ID NO: 100165 - DNA, 25 bp, probe
tttcttgcatggtttggagctgatc

SEQ ID NO: 100166 - DNA, 25 bp, probe
ggatgagttgtgtgaataccccaag

SEQ ID NO: 100167 - DNA, 25 bp, probe
atctctcgactgaatggactttgca

SEQ ID NO: 100168 - DNA, 25 bp, probe
actgaatggactttgcacactttgg

SEQ ID NO: 100169 - DNA, 25 bp, probe
agaggggatgagttgtgtgaatacc

SEQ ID NO: 100170 - DNA, 25 bp, probe
cgactgaatggactttgcacacttt

SEQ ID NO: 100171 - DNA, 25 bp, probe
tgagttgtgtgaataccccaagact

SEQ ID NO: 100172 - DNA, 25 bp, probe
gcagttacctggttgctgttttaat

SEQ ID NO: 100173 - DNA, 25 bp, probe
gttacctggttgctgttttaattaa

SEQ ID NO: 100174 - DNA, 25 bp, probe
tctctcgactgaatggactttgcac

SEQ ID NO: 100175 - DNA, 25 bp, probe
agttgtgtgaataccccaagactcc

SEQ ID NO: 100176 - DNA, 25 bp, probe
tcgactgaatggactttgcacactt

SEQ ID NO: 100177 - DNA, 25 bp, probe
ttttcttgcatggtttggagctgat

SEQ ID NO: 100178 - DNA, 25 bp, probe
ctctcgactgaatggactttgcaca

SEQ ID NO: 100179 - DNA, 25 bp, probe
gtgaataccccaagactcccatgag

SEQ ID NO: 100180 - DNA, 25 bp, probe
gttgtgtgaataccccaagactccc

SEQ ID NO: 100181 - DNA, 25 bp, probe
gtgtgaataccccaagactcccatg

SEQ ID NO: 100182 - DNA, 25 bp, probe
tgtgaataccccaagactcccatga

SEQ ID NO: 100183 - DNA, 25 bp, probe
gagttgtgtgaataccccaagactc

SEQ ID NO: 100184 - DNA, 25 bp, probe
ggcagttacctggttgctgttttaa

SEQ ID NO: 100185 - DNA, 25 bp, probe
acaagaggggatgagttgtgtgaat

SEQ ID NO: 100186 - DNA, 25 bp, probe
tctgacaagactgagagagttacat

SEQ ID NO: 100187 - DNA, 25 bp, probe
gttctgacaagactgagagagttac

SEQ ID NO: 100188 - DNA, 25 bp, probe
ttctgacaagactgagagagttaca

SEQ ID NO: 100189 - DNA, 25 bp, probe
aagtgtactcttggaatggattctt

SEQ ID NO: 100190 - DNA, 25 bp, probe
gcattaacttagtagaactgaacca

SEQ ID NO: 100191 - DNA, 25 bp, probe
tggatggtattgtagcatgtattgt

SEQ ID NO: 100192 - DNA, 25 bp, probe
gtggatggtattgtagcatgtattg

SEQ ID NO: 100193 - DNA, 25 bp, probe
tgtggatggtattgtagcatgtatt

SEQ ID NO: 100194 - DNA, 25 bp, probe
tgttctgacaagactgagagagtta

SEQ ID NO: 100195 - DNA, 25 bp, probe
ctgtggatggtattgtagcatgtat

SEQ ID NO: 100196 - DNA, 25 bp, probe
agcattaacttagtagaactgaacc

SEQ ID NO: 100197 - DNA, 25 bp, probe
tagtagaactgaaccaggagcatta

SEQ ID NO: 100198 - DNA, 25 bp, probe
ggatggtattgtagcatgtattgtt

SEQ ID NO: 100199 - DNA, 25 bp, probe
taacttagtagaactgaaccaggag

SEQ ID NO: 100200 - DNA, 25 bp, probe
caaggcagtcaagttaagacactaa

SEQ ID NO: 100201 - DNA, 25 bp, probe
gtagaactgaaccaggagcattaag

SEQ ID NO: 100202 - DNA, 25 bp, probe
ctgacaagactgagagagttacatg

SEQ ID NO: 100203 - DNA, 25 bp, probe
ttaacttagtagaactgaaccagga

SEQ ID NO: 100204 - DNA, 25 bp, probe
gtagttgccaataacctgaagaagc

SEQ ID NO: 100205 - DNA, 25 bp, probe
tagaactgaaccaggagcattaagt

SEQ ID NO: 100206 - DNA, 25 bp, probe
agtagaactgaaccaggagcattaa

SEQ ID NO: 100207 - DNA, 25 bp, probe
ttagtagaactgaaccaggagcatt

SEQ ID NO: 100208 - DNA, 25 bp, probe
attcaaggcagtcaagttaagacac

SEQ ID NO: 100209 - DNA, 25 bp, probe
cattcaaggcagtcaagttaagaca

SEQ ID NO: 100210 - DNA, 25 bp, probe
aaggcagtcaagttaagacactaac

SEQ ID NO: 100211 - DNA, 25 bp, probe
tcaaggcagtcaagttaagacacta

SEQ ID NO: 100212 - DNA, 25 bp, probe
cttagtagaactgaaccaggagcat

SEQ ID NO: 100213 - DNA, 25 bp, probe
aacttagtagaactgaaccaggagc

SEQ ID NO: 100214 - DNA, 25 bp, probe
caactgggtcctttattcatttctg

SEQ ID NO: 100215 - DNA, 25 bp, probe
gtgttctgacaagactgagagagtt

SEQ ID NO: 100216 - DNA, 25 bp, probe
acaactgggtcctttattcatttct

SEQ ID NO: 100217 - DNA, 25 bp, probe
cacaactgggtcctttattcatttc

SEQ ID NO: 100218 - DNA, 25 bp, probe
tttccatatactttgtcttgcctgt

SEQ ID NO: 100219 - DNA, 25 bp, probe
ttccatatactttgtcttgcctgta

SEQ ID NO: 100220 - DNA, 25 bp, probe
ttcctccatagcagaagttgtgttc

SEQ ID NO: 100221 - DNA, 25 bp, probe
ggatagattcaagacctttacctca

SEQ ID NO: 100222 - DNA, 25 bp, probe
attaacttagtagaactgaaccagg

SEQ ID NO: 100223 - DNA, 25 bp, probe
cctgtggatggtattgtagcatgta

SEQ ID NO: 100224 - DNA, 25 bp, probe
ccattcaaggcagtcaagttaagac

SEQ ID NO: 100225 - DNA, 25 bp, probe
aactgggtcctttattcatttctgg

SEQ ID NO: 100226 - DNA, 25 bp, probe
atatttcctccatagcagaagttgt

SEQ ID NO: 100227 - DNA, 25 bp, probe
agaagcattaacttagtagaactga

SEQ ID NO: 100228 - DNA, 25 bp, probe
tatttcctccatagcagaagttgtg

SEQ ID NO: 100229 - DNA, 25 bp, probe
ggtagttgccaataacctgaagaag

SEQ ID NO: 100230 - DNA, 25 bp, probe
attaaagagggtgggaaatctatgg

SEQ ID NO: 100231 - DNA, 25 bp, probe
taaagagggtgggaaatctatggtt

SEQ ID NO: 100232 - DNA, 25 bp, probe
ttaaagagggtgggaaatctatggt

SEQ ID NO: 100233 - DNA, 25 bp, probe
gacgtagagcagagaagagaacatt

SEQ ID NO: 100234 - DNA, 25 bp, probe
aaagagggtgggaaatctatggttt

SEQ ID NO: 100235 - DNA, 25 bp, probe
gtacccttacatataaacactggag

SEQ ID NO: 100236 - DNA, 25 bp, probe
gaagggattaaagagggtgggaaat

SEQ ID NO: 100237 - DNA, 25 bp, probe
tacccttacatataaacactggagg

SEQ ID NO: 100238 - DNA, 25 bp, probe
accagtacccttacatataaacact

SEQ ID NO: 100239 - DNA, 25 bp, probe
aaccagtacccttacatataaacac

SEQ ID NO: 100240 - DNA, 25 bp, probe
caaccagtacccttacatataaaca

SEQ ID NO: 100241 - DNA, 25 bp, probe
agtacccttacatataaacactgga

SEQ ID NO: 100242 - DNA, 25 bp, probe
tcaaccagtacccttacatataaac

SEQ ID NO: 100243 - DNA, 25 bp, probe
gtcaaccagtacccttacatataaa

SEQ ID NO: 100244 - DNA, 25 bp, probe
ggattaaagagggtgggaaatctat

SEQ ID NO: 100245 - DNA, 25 bp, probe
gattaaagagggtgggaaatctatg

SEQ ID NO: 100246 - DNA, 25 bp, probe
aggtcaaccagtacccttacatata

SEQ ID NO: 100247 - DNA, 25 bp, probe
ggtcaaccagtacccttacatataa

SEQ ID NO: 100248 - DNA, 25 bp, probe
gggattaaagagggtgggaaatcta

SEQ ID NO: 100249 - DNA, 25 bp, probe
acgtagagcagagaagagaacattt

SEQ ID NO: 100250 - DNA, 25 bp, probe
cttacatataaacactggaggggag

SEQ ID NO: 100251 - DNA, 25 bp, probe
taaaaggaagggattaaagagggtg

SEQ ID NO: 100252 - DNA, 25 bp, probe
ttatactgaagatgccgcacacaaa

SEQ ID NO: 100253 - DNA, 25 bp, probe
tttatactgaagatgccgcacacaa

SEQ ID NO: 100254 - DNA, 25 bp, probe
aagggattaaagagggtgggaaatc

SEQ ID NO: 100255 - DNA, 25 bp, probe
cgtagagcagagaagagaacatttt

SEQ ID NO: 100256 - DNA, 25 bp, probe
ttacatataaacactggaggggagg

SEQ ID NO: 100257 - DNA, 25 bp, probe
ggacgtagagcagagaagagaacat

SEQ ID NO: 100258 - DNA, 25 bp, probe
ttaaaaggaagggattaaagagggt

SEQ ID NO: 100259 - DNA, 25 bp, probe
agggattaaagagggtgggaaatct

SEQ ID NO: 100260 - DNA, 25 bp, probe
gaggacgtagagcagagaagagaac

SEQ ID NO: 100261 - DNA, 25 bp, probe
aagagggtgggaaatctatggtttt

SEQ ID NO: 100262 - DNA, 25 bp, probe
tatactgaagatgccgcacacaaac

SEQ ID NO: 100263 - DNA, 25 bp, probe
ggaagggattaaagagggtgggaaa

SEQ ID NO: 100264 - DNA, 25 bp, probe
aaaggaagggattaaagagggtggg

SEQ ID NO: 100265 - DNA, 25 bp, probe
aaaaggaagggattaaagagggtgg

SEQ ID NO: 100266 - DNA, 25 bp, probe
ccttacatataaacactggagggga

SEQ ID NO: 100267 - DNA, 25 bp, probe
tacatataaacactggaggggaggg

SEQ ID NO: 100268 - DNA, 25 bp, probe
aggacgtagagcagagaagagaaca

SEQ ID NO: 100269 - DNA, 25 bp, probe
cttttatactgaagatgccgcacac

SEQ ID NO: 100270 - DNA, 25 bp, probe
aaggtcaaccagtacccttacatat

SEQ ID NO: 100271 - DNA, 25 bp, probe
aggaagggattaaagagggtgggaa

SEQ ID NO: 100272 - DNA, 25 bp, probe
aaggaagggattaaagagggtggga

SEQ ID NO: 100273 - DNA, 25 bp, probe
ttttatactgaagatgccgcacaca

SEQ ID NO: 100274 - DNA, 25 bp, probe
ctccttatgttagcaatgatggtct

SEQ ID NO: 100275 - DNA, 25 bp, probe
tccttatgttagcaatgatggtcta

SEQ ID NO: 100276 - DNA, 25 bp, probe
atgttagcaatgatggtctaggaag

SEQ ID NO: 100277 - DNA, 25 bp, probe
tatgttagcaatgatggtctaggaa

SEQ ID NO: 100278 - DNA, 25 bp, probe
ttatgttagcaatgatggtctagga

SEQ ID NO: 100279 - DNA, 25 bp, probe
cttatgttagcaatgatggtctagg

SEQ ID NO: 100280 - DNA, 25 bp, probe
ccttatgttagcaatgatggtctag

SEQ ID NO: 100281 - DNA, 25 bp, probe
gattatcaagcaggagacacttacg

SEQ ID NO: 100282 - DNA, 25 bp, probe
taactatggtggtaacttacaggaa

SEQ ID NO: 100283 - DNA, 25 bp, probe
ataactatggtggtaacttacagga

SEQ ID NO: 100284 - DNA, 25 bp, probe
catattagcacatcaactggcagag

SEQ ID NO: 100285 - DNA, 25 bp, probe
tgattatcaagcaggagacacttac

SEQ ID NO: 100286 - DNA, 25 bp, probe
gacatattagcacatcaactggcag

SEQ ID NO: 100287 - DNA, 25 bp, probe
gacctggatattcacaaggatacag

SEQ ID NO: 100288 - DNA, 25 bp, probe
gcacaactataactatggtggtaac

SEQ ID NO: 100289 - DNA, 25 bp, probe
aaggacctggatattcacaaggata

SEQ ID NO: 100290 - DNA, 25 bp, probe
acatattagcacatcaactggcaga

SEQ ID NO: 100291 - DNA, 25 bp, probe
aggacctggatattcacaaggatac

SEQ ID NO: 100292 - DNA, 25 bp, probe
ccacttcagactacaaggacaactt

SEQ ID NO: 100293 - DNA, 25 bp, probe
acaactataactatggtggtaactt

SEQ ID NO: 100294 - DNA, 25 bp, probe
ttagcaatgatggtctaggaagcag

SEQ ID NO: 100295 - DNA, 25 bp, probe
ttagtggagacaaggaccatagatt

SEQ ID NO: 100296 - DNA, 25 bp, probe
ggacctggatattcacaaggataca

SEQ ID NO: 100297 - DNA, 25 bp, probe
aatgatggtctaggaagcagttctg

SEQ ID NO: 100298 - DNA, 25 bp, probe
caatgatggtctaggaagcagttct

SEQ ID NO: 100299 - DNA, 25 bp, probe
atattagcacatcaactggcagagg

SEQ ID NO: 100300 - DNA, 25 bp, probe
ttctttctcttctgctccttatgtt

SEQ ID NO: 100301 - DNA, 25 bp, probe
tcttctttctcttctgctccttatg

SEQ ID NO: 100302 - DNA, 25 bp, probe
ctcttctttctcttctgctccttat

SEQ ID NO: 100303 - DNA, 25 bp, probe
cttctttctcttctgctccttatgt

SEQ ID NO: 100304 - DNA, 25 bp, probe
gaaagggcactgatttatttggtat

SEQ ID NO: 100305 - DNA, 25 bp, probe
agaaagggcactgatttatttggta

SEQ ID NO: 100306 - DNA, 25 bp, probe
gttagcaatgatggtctaggaagca

SEQ ID NO: 100307 - DNA, 25 bp, probe
tgttagcaatgatggtctaggaagc

SEQ ID NO: 100308 - DNA, 25 bp, probe
tctttctcttctgctccttatgtta

SEQ ID NO: 100309 - DNA, 25 bp, probe
aagggcactgatttatttggtattt

SEQ ID NO: 100310 - DNA, 25 bp, probe
tataactatggtggtaacttacagg

SEQ ID NO: 100311 - DNA, 25 bp, probe
cacaactataactatggtggtaact

SEQ ID NO: 100312 - DNA, 25 bp, probe
aaagggcactgatttatttggtatt

SEQ ID NO: 100313 - DNA, 25 bp, probe
ctttctcttctgctccttatgttag

SEQ ID NO: 100314 - DNA, 25 bp, probe
aggaccatagatttgaatatagcca

SEQ ID NO: 100315 - DNA, 25 bp, probe
caaggacctggatattcacaaggat

SEQ ID NO: 100316 - DNA, 25 bp, probe
aactatggtggtaacttacaggaaa

SEQ ID NO: 100317 - DNA, 25 bp, probe
cacttcagactacaaggacaacttt

SEQ ID NO: 100318 - DNA, 25 bp, probe
atccttcagcaattctaatccactt

SEQ ID NO: 100319 - DNA, 25 bp, probe
aatccttcagcaattctaatccact

SEQ ID NO: 100320 - DNA, 25 bp, probe
gcacctatcaagaatcaagagaata

SEQ ID NO: 100321 - DNA, 25 bp, probe
catgattgagatgtacttgaggctt

SEQ ID NO: 100322 - DNA, 25 bp, probe
ttaacagttgatgtgacagtaagtt

SEQ ID NO: 100323 - DNA, 25 bp, probe
tgcacctatcaagaatcaagagaat

SEQ ID NO: 100324 - DNA, 25 bp, probe
atgcacctatcaagaatcaagagaa

SEQ ID NO: 100325 - DNA, 25 bp, probe
ttattctttctactgagggcattgt

SEQ ID NO: 100326 - DNA, 25 bp, probe
gattgaaagatgtggaaataggcag

SEQ ID NO: 100327 - DNA, 25 bp, probe
cctctcctagacttgacctagaata

SEQ ID NO: 100328 - DNA, 25 bp, probe
ctctgctgctatttccctacataat

SEQ ID NO: 100329 - DNA, 25 bp, probe
tattctttctactgagggcattgtc

SEQ ID NO: 100330 - DNA, 25 bp, probe
cagatggattgaaagatgtggaaat

SEQ ID NO: 100331 - DNA, 25 bp, probe
tatgcacctatcaagaatcaagaga

SEQ ID NO: 100332 - DNA, 25 bp, probe
tctgctgctatttccctacataatg

SEQ ID NO: 100333 - DNA, 25 bp, probe
ctatgcacctatcaagaatcaagag

SEQ ID NO: 100334 - DNA, 25 bp, probe
tttattctttctactgagggcattg

SEQ ID NO: 100335 - DNA, 25 bp, probe
atggattgaaagatgtggaaatagg

SEQ ID NO: 100336 - DNA, 25 bp, probe
tccttcagcaattctaatccacttt

SEQ ID NO: 100337 - DNA, 25 bp, probe
aaatccttcagcaattctaatccac

SEQ ID NO: 100338 - DNA, 25 bp, probe
tctctgctgctatttccctacataa

SEQ ID NO: 100339 - DNA, 25 bp, probe
ttctctgctgctatttccctacata

SEQ ID NO: 100340 - DNA, 25 bp, probe
tctatgcacctatcaagaatcaaga

SEQ ID NO: 100341 - DNA, 25 bp, probe
ctatttaaggagccagatggattga

SEQ ID NO: 100342 - DNA, 25 bp, probe
tatttaaggagccagatggattgaa

SEQ ID NO: 100343 - DNA, 25 bp, probe
atctactttgtcatttatccaccac

SEQ ID NO: 100344 - DNA, 25 bp, probe
atttaaggagccagatggattgaaa

SEQ ID NO: 100345 - DNA, 25 bp, probe
aaaggatttctatttgctgtcagtt

SEQ ID NO: 100346 - DNA, 25 bp, probe
ggattgaaagatgtggaaataggca

SEQ ID NO: 100347 - DNA, 25 bp, probe
tggattgaaagatgtggaaataggc

SEQ ID NO: 100348 - DNA, 25 bp, probe
gaaatccttcagcaattctaatcca

SEQ ID NO: 100349 - DNA, 25 bp, probe
gggaaatccttcagcaattctaatc

SEQ ID NO: 100350 - DNA, 25 bp, probe
ccttcagcaattctaatccactttg

SEQ ID NO: 100351 - DNA, 25 bp, probe
attctctgctgctatttccctacat

SEQ ID NO: 100352 - DNA, 25 bp, probe
tataatactgtcaaattgccacgat

SEQ ID NO: 100353 - DNA, 25 bp, probe
tttaaggagccagatggattgaaag

SEQ ID NO: 100354 - DNA, 25 bp, probe
ataatactgtcaaattgccacgatc

SEQ ID NO: 100355 - DNA, 25 bp, probe
atgattgagatgtacttgaggcttt

SEQ ID NO: 100356 - DNA, 25 bp, probe
actaaaggatttctatttgctgtca

SEQ ID NO: 100357 - DNA, 25 bp, probe
tcactaaaggatttctatttgctgt

SEQ ID NO: 100358 - DNA, 25 bp, probe
ccacgatctcactaaaggatttcta

SEQ ID NO: 100359 - DNA, 25 bp, probe
attctttctactgagggcattgtct

SEQ ID NO: 100360 - DNA, 25 bp, probe
taatactgtcaaattgccacgatct

SEQ ID NO: 100361 - DNA, 25 bp, probe
cactaaaggatttctatttgctgtc

SEQ ID NO: 100362 - DNA, 25 bp, probe
aatcagttatgccgtataggatgtc

SEQ ID NO: 100363 - DNA, 25 bp, probe
taatcagttatgccgtataggatgt

SEQ ID NO: 100364 - DNA, 25 bp, probe
tgtaatcagttatgccgtataggat

SEQ ID NO: 100365 - DNA, 25 bp, probe
gtaatcagttatgccgtataggatg

SEQ ID NO: 100366 - DNA, 25 bp, probe
atcagttatgccgtataggatgtca

SEQ ID NO: 100367 - DNA, 25 bp, probe
cagttatgccgtataggatgtcaga

SEQ ID NO: 100368 - DNA, 25 bp, probe
tcagttatgccgtataggatgtcag

SEQ ID NO: 100369 - DNA, 25 bp, probe
agttatgccgtataggatgtcagac

SEQ ID NO: 100370 - DNA, 25 bp, probe
ctgtaatcagttatgccgtatagga

SEQ ID NO: 100371 - DNA, 25 bp, probe
gctgtaatcagttatgccgtatagg

SEQ ID NO: 100372 - DNA, 25 bp, probe
ctcttcactcccaataactaatgct

SEQ ID NO: 100373 - DNA, 25 bp, probe
tctcttcactcccaataactaatgc

SEQ ID NO: 100374 - DNA, 25 bp, probe
gaggaacaggtggatgtatagcatt

SEQ ID NO: 100375 - DNA, 25 bp, probe
tataggatgtcagacaataccactg

SEQ ID NO: 100376 - DNA, 25 bp, probe
caaggtgtttccatttctcaatcag

SEQ ID NO: 100377 - DNA, 25 bp, probe
aaggtgtttccatttctcaatcagt

SEQ ID NO: 100378 - DNA, 25 bp, probe
tcactcccaataactaatgctaaga

SEQ ID NO: 100379 - DNA, 25 bp, probe
tcttcactcccaataactaatgcta

SEQ ID NO: 100380 - DNA, 25 bp, probe
atgccgtataggatgtcagacaata

SEQ ID NO: 100381 - DNA, 25 bp, probe
tatgccgtataggatgtcagacaat

SEQ ID NO: 100382 - DNA, 25 bp, probe
aaagagagaatgagggaaattgcta

SEQ ID NO: 100383 - DNA, 25 bp, probe
agagagaatgagggaaattgctatt

SEQ ID NO: 100384 - DNA, 25 bp, probe
aagagagaatgagggaaattgctat

SEQ ID NO: 100385 - DNA, 25 bp, probe
gtataggatgtcagacaataccact

SEQ ID NO: 100386 - DNA, 25 bp, probe
cgtataggatgtcagacaataccac

SEQ ID NO: 100387 - DNA, 25 bp, probe
ttcggaaacaagttattctcttcac

SEQ ID NO: 100388 - DNA, 25 bp, probe
ttatgccgtataggatgtcagacaa

SEQ ID NO: 100389 - DNA, 25 bp, probe
cttcggaaacaagttattctcttca

SEQ ID NO: 100390 - DNA, 25 bp, probe
cttaacattgacttcttggtttggg

SEQ ID NO: 100391 - DNA, 25 bp, probe
aggtgtttccatttctcaatcagtg

SEQ ID NO: 100392 - DNA, 25 bp, probe
cccaataactaatgctaagaaatgc

SEQ ID NO: 100393 - DNA, 25 bp, probe
cactcccaataactaatgctaagaa

SEQ ID NO: 100394 - DNA, 25 bp, probe
ttcactcccaataactaatgctaag

SEQ ID NO: 100395 - DNA, 25 bp, probe
cttcactcccaataactaatgctaa

SEQ ID NO: 100396 - DNA, 25 bp, probe
cttggcagcttaacattgacttctt

SEQ ID NO: 100397 - DNA, 25 bp, probe
ttcttggcagcttaacattgacttc

SEQ ID NO: 100398 - DNA, 25 bp, probe
cttcttggcagcttaacattgactt

SEQ ID NO: 100399 - DNA, 25 bp, probe
acaagttattctcttcactcccaat

SEQ ID NO: 100400 - DNA, 25 bp, probe
aacaagttattctcttcactcccaa

SEQ ID NO: 100401 - DNA, 25 bp, probe
aaacaagttattctcttcactccca

SEQ ID NO: 100402 - DNA, 25 bp, probe
cggaaacaagttattctcttcactc

SEQ ID NO: 100403 - DNA, 25 bp, probe
tcggaaacaagttattctcttcact

SEQ ID NO: 100404 - DNA, 25 bp, probe
gcttaacattgacttcttggtttgg

SEQ ID NO: 100405 - DNA, 25 bp, probe
gaaacaagttattctcttcactccc

SEQ ID NO: 100406 - DNA, 25 bp, probe
gaatgaggactgtgaactgaagatt

SEQ ID NO: 100407 - DNA, 25 bp, probe
aatgaggactgtgaactgaagattc

SEQ ID NO: 100408 - DNA, 25 bp, probe
gactgtgaactgaagattctggatt

SEQ ID NO: 100409 - DNA, 25 bp, probe
tgaatgaggactgtgaactgaagat

SEQ ID NO: 100410 - DNA, 25 bp, probe
atgaggactgtgaactgaagattct

SEQ ID NO: 100411 - DNA, 25 bp, probe
tctgtctcttctgttctctcctctt

SEQ ID NO: 100412 - DNA, 25 bp, probe
gtgaatgaggactgtgaactgaaga

SEQ ID NO: 100413 - DNA, 25 bp, probe
ggactgtgaactgaagattctggat

SEQ ID NO: 100414 - DNA, 25 bp, probe
tgaggactgtgaactgaagattctg

SEQ ID NO: 100415 - DNA, 25 bp, probe
ctctgtctcttctgttctctcctct

SEQ ID NO: 100416 - DNA, 25 bp, probe
tctctgtctcttctgttctctcctc

SEQ ID NO: 100417 - DNA, 25 bp, probe
gtctctgtctcttctgttctctcct

SEQ ID NO: 100418 - DNA, 25 bp, probe
agtctctgtctcttctgttctctcc

SEQ ID NO: 100419 - DNA, 25 bp, probe
tgtgaatgaggactgtgaactgaag

SEQ ID NO: 100420 - DNA, 25 bp, probe
ctgtgaatgaggactgtgaactgaa

SEQ ID NO: 100421 - DNA, 25 bp, probe
cagtctctgtctcttctgttctctc

SEQ ID NO: 100422 - DNA, 25 bp, probe
tccaaataaagtcacattctcaggt

SEQ ID NO: 100423 - DNA, 25 bp, probe
ttccaaataaagtcacattctcagg

SEQ ID NO: 100424 - DNA, 25 bp, probe
gatgctctaacgaattaccacaaac

SEQ ID NO: 100425 - DNA, 25 bp, probe
gaggactgtgaactgaagattctgg

SEQ ID NO: 100426 - DNA, 25 bp, probe
actgtgaactgaagattctggattt

SEQ ID NO: 100427 - DNA, 25 bp, probe
gattgaaacagcagaacttgattcc

SEQ ID NO: 100428 - DNA, 25 bp, probe
ggattgaaacagcagaacttgattc

SEQ ID NO: 100429 - DNA, 25 bp, probe
agttccaaataaagtcacattctca

SEQ ID NO: 100430 - DNA, 25 bp, probe
ctgtctcttctgttctctcctcttt

SEQ ID NO: 100431 - DNA, 25 bp, probe
tggattgaaacagcagaacttgatt

SEQ ID NO: 100432 - DNA, 25 bp, probe
gaaacagcagaacttgattccctta

SEQ ID NO: 100433 - DNA, 25 bp, probe
ttaacaacagtcattggatttaggg

SEQ ID NO: 100434 - DNA, 25 bp, probe
gttccaaataaagtcacattctcag

SEQ ID NO: 100435 - DNA, 25 bp, probe
ggatgctctaacgaattaccacaaa

SEQ ID NO: 100436 - DNA, 25 bp, probe
aggactgtgaactgaagattctgga

SEQ ID NO: 100437 - DNA, 25 bp, probe
aaacagcagaacttgattcccttac

SEQ ID NO: 100438 - DNA, 25 bp, probe
atgctctaacgaattaccacaaacc

SEQ ID NO: 100439 - DNA, 25 bp, probe
taacaacagtcattggatttagggc

SEQ ID NO: 100440 - DNA, 25 bp, probe
gtggattgaaacagcagaacttgat

SEQ ID NO: 100441 - DNA, 25 bp, probe
tagggatgctctaacgaattaccac

SEQ ID NO: 100442 - DNA, 25 bp, probe
ctagggatgctctaacgaattacca

SEQ ID NO: 100443 - DNA, 25 bp, probe
ccagtctctgtctcttctgttctct

SEQ ID NO: 100444 - DNA, 25 bp, probe
tccagtctctgtctcttctgttctc

SEQ ID NO: 100445 - DNA, 25 bp, probe
ctccagtctctgtctcttctgttct

SEQ ID NO: 100446 - DNA, 25 bp, probe
attgaaacagcagaacttgattccc

SEQ ID NO: 100447 - DNA, 25 bp, probe
gctctaacgaattaccacaaacctg

SEQ ID NO: 100448 - DNA, 25 bp, probe
atcactccagtctctgtctcttctg

SEQ ID NO: 100449 - DNA, 25 bp, probe
catcactccagtctctgtctcttct

SEQ ID NO: 100450 - DNA, 25 bp, probe
tactctcttcttctcataggtgtcc

SEQ ID NO: 100451 - DNA, 25 bp, probe
atactctcttcttctcataggtgtc

SEQ ID NO: 100452 - DNA, 25 bp, probe
gatactctcttcttctcataggtgt

SEQ ID NO: 100453 - DNA, 25 bp, probe
ctctcttcttctcataggtgtccag

SEQ ID NO: 100454 - DNA, 25 bp, probe
gcattgctgactgtgtatataggat

SEQ ID NO: 100455 - DNA, 25 bp, probe
agatactctcttcttctcataggtg

SEQ ID NO: 100456 - DNA, 25 bp, probe
actctcttcttctcataggtgtcca

SEQ ID NO: 100457 - DNA, 25 bp, probe
cagtgcttgatacaggaacaacatt

SEQ ID NO: 100458 - DNA, 25 bp, probe
cttcttctcataggtgtccagcatt

SEQ ID NO: 100459 - DNA, 25 bp, probe
ttcttctcataggtgtccagcattg

SEQ ID NO: 100460 - DNA, 25 bp, probe
cattgctgactgtgtatataggata

SEQ ID NO: 100461 - DNA, 25 bp, probe
ggcattgctgactgtgtatatagga

SEQ ID NO: 100462 - DNA, 25 bp, probe
acaggaacaacatttacaactcatt

SEQ ID NO: 100463 - DNA, 25 bp, probe
acagtgcttgatacaggaacaacat

SEQ ID NO: 100464 - DNA, 25 bp, probe
aacaacatttacaactcattccaga

SEQ ID NO: 100465 - DNA, 25 bp, probe
tacttaactgtttcaaagccaagac

SEQ ID NO: 100466 - DNA, 25 bp, probe
tcttcttctcataggtgtccagcat

SEQ ID NO: 100467 - DNA, 25 bp, probe
acaacatttacaactcattccagat

SEQ ID NO: 100468 - DNA, 25 bp, probe
tagatactctcttcttctcataggt

SEQ ID NO: 100469 - DNA, 25 bp, probe
cctcccatagatactctcttcttct

SEQ ID NO: 100470 - DNA, 25 bp, probe
tcctcccatagatactctcttcttc

SEQ ID NO: 100471 - DNA, 25 bp, probe
ctcctcccatagatactctcttctt

SEQ ID NO: 100472 - DNA, 25 bp, probe
aactcctcccatagatactctcttc

SEQ ID NO: 100473 - DNA, 25 bp, probe
tcccatagatactctcttcttctca

SEQ ID NO: 100474 - DNA, 25 bp, probe
caactcctcccatagatactctctt

SEQ ID NO: 100475 - DNA, 25 bp, probe
atttatttggttcccttcctattcc

SEQ ID NO: 100476 - DNA, 25 bp, probe
gcttgatacaggaacaacatttaca

SEQ ID NO: 100477 - DNA, 25 bp, probe
tgcttgatacaggaacaacatttac

SEQ ID NO: 100478 - DNA, 25 bp, probe
gtgcttgatacaggaacaacattta

SEQ ID NO: 100479 - DNA, 25 bp, probe
ttacttaactgtttcaaagccaaga

SEQ ID NO: 100480 - DNA, 25 bp, probe
tacaggaacaacatttacaactcat

SEQ ID NO: 100481 - DNA, 25 bp, probe
atacaggaacaacatttacaactca

SEQ ID NO: 100482 - DNA, 25 bp, probe
tgatacaggaacaacatttacaact

SEQ ID NO: 100483 - DNA, 25 bp, probe
gaacaacatttacaactcattccag

SEQ ID NO: 100484 - DNA, 25 bp, probe
caggaacaacatttacaactcattc

SEQ ID NO: 100485 - DNA, 25 bp, probe
gtacagttggcatggtagtatacaa

SEQ ID NO: 100486 - DNA, 25 bp, probe
ctcccatagatactctcttcttctc

SEQ ID NO: 100487 - DNA, 25 bp, probe
actcctcccatagatactctcttct

SEQ ID NO: 100488 - DNA, 25 bp, probe
ctcaactcctcccatagatactctc

SEQ ID NO: 100489 - DNA, 25 bp, probe
aacctggaggtcaatgttatgtatt

SEQ ID NO: 100490 - DNA, 25 bp, probe
ctaacctggaggtcaatgttatgta

SEQ ID NO: 100491 - DNA, 25 bp, probe
ttctaacctggaggtcaatgttatg

SEQ ID NO: 100492 - DNA, 25 bp, probe
tcaactcctcccatagatactctct

SEQ ID NO: 100493 - DNA, 25 bp, probe
atttacaactcattccagatcccag

SEQ ID NO: 100494 - DNA, 25 bp, probe
gaaagaagctcagaaaggacccctg

SEQ ID NO: 100495 - DNA, 25 bp, probe
gtatgagacagactattaccgcaag

SEQ ID NO: 100496 - DNA, 25 bp, probe
tatgagacagactattaccgcaagg

SEQ ID NO: 100497 - DNA, 25 bp, probe
tgtatgagacagactattaccgcaa

SEQ ID NO: 100498 - DNA, 25 bp, probe
gtgtatgagacagactattaccgca

SEQ ID NO: 100499 - DNA, 25 bp, probe
gacgtgtatgagacagactattacc

SEQ ID NO: 100500 - DNA, 25 bp, probe
ggacgtgtatgagacagactattac

SEQ ID NO: 100501 - DNA, 25 bp, probe
ttcacacacattctggacagcatac

SEQ ID NO: 100502 - DNA, 25 bp, probe
cgtgtatgagacagactattaccgc

SEQ ID NO: 100503 - DNA, 25 bp, probe
catctttcacacacattctggacag

SEQ ID NO: 100504 - DNA, 25 bp, probe
acgtgtatgagacagactattaccg

SEQ ID NO: 100505 - DNA, 25 bp, probe
tttcacacacattctggacagcata

SEQ ID NO: 100506 - DNA, 25 bp, probe
tcacacacattctggacagcataca

SEQ ID NO: 100507 - DNA, 25 bp, probe
cacacacattctggacagcatacag

SEQ ID NO: 100508 - DNA, 25 bp, probe
gggacgtgtatgagacagactatta

SEQ ID NO: 100509 - DNA, 25 bp, probe
atctttcacacacattctggacagc

SEQ ID NO: 100510 - DNA, 25 bp, probe
acacattctggacagcatacaggag

SEQ ID NO: 100511 - DNA, 25 bp, probe
atgagacagactattaccgcaaggg

SEQ ID NO: 100512 - DNA, 25 bp, probe
ctttcacacacattctggacagcat

SEQ ID NO: 100513 - DNA, 25 bp, probe
cattctggacagcatacaggaggag

SEQ ID NO: 100514 - DNA, 25 bp, probe
cacacattctggacagcatacagga

SEQ ID NO: 100515 - DNA, 25 bp, probe
ccatctttcacacacattctggaca

SEQ ID NO: 100516 - DNA, 25 bp, probe
acacacattctggacagcatacagg

SEQ ID NO: 100517 - DNA, 25 bp, probe
cacattctggacagcatacaggagg

SEQ ID NO: 100518 - DNA, 25 bp, probe
acattctggacagcatacaggagga

SEQ ID NO: 100519 - DNA, 25 bp, probe
cccatctttcacacacattctggac

SEQ ID NO: 100520 - DNA, 25 bp, probe
tctttcacacacattctggacagca

SEQ ID NO: 100521 - DNA, 25 bp, probe
cgggacgtgtatgagacagactatt

SEQ ID NO: 100522 - DNA, 25 bp, probe
gagacagactattaccgcaagggtg

SEQ ID NO: 100523 - DNA, 25 bp, probe
tcgggacgtgtatgagacagactat

SEQ ID NO: 100524 - DNA, 25 bp, probe
tgagacagactattaccgcaagggt

SEQ ID NO: 100525 - DNA, 25 bp, probe
ctcgggacgtgtatgagacagacta

SEQ ID NO: 100526 - DNA, 25 bp, probe
ctctccttctactacagcccggaat

SEQ ID NO: 100527 - DNA, 25 bp, probe
ctaccttgctgccaacaagtttgtg

SEQ ID NO: 100528 - DNA, 25 bp, probe
ctcaaagatgggatcttcaccaccc

SEQ ID NO: 100529 - DNA, 25 bp, probe
cctcaaagatgggatcttcaccacc

SEQ ID NO: 100530 - DNA, 25 bp, probe
ccctcaaagatgggatcttcaccac

SEQ ID NO: 100531 - DNA, 25 bp, probe
aaagtcaaatccaaggctgagacag

SEQ ID NO: 100532 - DNA, 25 bp, probe
caaagtcaaatccaaggctgagaca

SEQ ID NO: 100533 - DNA, 25 bp, probe
attttcatcagcttcttctctctcc

SEQ ID NO: 100534 - DNA, 25 bp, probe
cctctattttcatcagcttcttctc

SEQ ID NO: 100535 - DNA, 25 bp, probe
gcctctattttcatcagcttcttct

SEQ ID NO: 100536 - DNA, 25 bp, probe
cttcttctctctccccttgaacttg

SEQ ID NO: 100537 - DNA, 25 bp, probe
tattttcatcagcttcttctctctc

SEQ ID NO: 100538 - DNA, 25 bp, probe
ctattttcatcagcttcttctctct

SEQ ID NO: 100539 - DNA, 25 bp, probe
tctattttcatcagcttcttctctc

SEQ ID NO: 100540 - DNA, 25 bp, probe
ctctattttcatcagcttcttctct

SEQ ID NO: 100541 - DNA, 25 bp, probe
cagtcccagatgagcctctattttc

SEQ ID NO: 100542 - DNA, 25 bp, probe
ttctctctccccttgaacttggtaa

SEQ ID NO: 100543 - DNA, 25 bp, probe
ccaaagtcaaatccaaggctgagac

SEQ ID NO: 100544 - DNA, 25 bp, probe
gaacctggctctgacaagaagtctg

SEQ ID NO: 100545 - DNA, 25 bp, probe
aagtcaaatccaaggctgagacagt

SEQ ID NO: 100546 - DNA, 25 bp, probe
cttctctctccccttgaacttggta

SEQ ID NO: 100547 - DNA, 25 bp, probe
ttttcatcagcttcttctctctccc

SEQ ID NO: 100548 - DNA, 25 bp, probe
agtcccagatgagcctctattttca

SEQ ID NO: 100549 - DNA, 25 bp, probe
ttaaagcccaagctctgaagaagtc

SEQ ID NO: 100550 - DNA, 25 bp, probe
cttaaagcccaagctctgaagaagt

SEQ ID NO: 100551 - DNA, 25 bp, probe
tctctctccccttgaacttggtaac

SEQ ID NO: 100552 - DNA, 25 bp, probe
agtcaaatccaaggctgagacagtc

SEQ ID NO: 100553 - DNA, 25 bp, probe
ttcttctctctccccttgaacttgg

SEQ ID NO: 100554 - DNA, 25 bp, probe
agcctctattttcatcagcttcttc

SEQ ID NO: 100555 - DNA, 25 bp, probe
gagcctctattttcatcagcttctt

SEQ ID NO: 100556 - DNA, 25 bp, probe
atgagcctctattttcatcagcttc

SEQ ID NO: 100557 - DNA, 25 bp, probe
gtcccagatgagcctctattttcat

SEQ ID NO: 100558 - DNA, 25 bp, probe
gcttcttctctctccccttgaactt

SEQ ID NO: 100559 - DNA, 25 bp, probe
tgagcctctattttcatcagcttct

SEQ ID NO: 100560 - DNA, 25 bp, probe
taaagcccaagctctgaagaagtca

SEQ ID NO: 100561 - DNA, 25 bp, probe
ctctctccccttgaacttggtaacc

SEQ ID NO: 100562 - DNA, 25 bp, probe
tttcatcagcttcttctctctcccc

SEQ ID NO: 100563 - DNA, 25 bp, probe
gatgaggccaaagtcaaatccaagg

SEQ ID NO: 100564 - DNA, 25 bp, probe
gcagtcccagatgagcctctatttt

SEQ ID NO: 100565 - DNA, 25 bp, probe
ccttgaacttggtaacccacatggt

SEQ ID NO: 100566 - DNA, 25 bp, probe
tcttctctctccccttgaacttggt

SEQ ID NO: 100567 - DNA, 25 bp, probe
ttgaacttggtaacccacatggttc

SEQ ID NO: 100568 - DNA, 25 bp, probe
cttgaacttggtaacccacatggtt

SEQ ID NO: 100569 - DNA, 25 bp, probe
taggtggatgaggccaaagtcaaat

SEQ ID NO: 100570 - DNA, 25 bp, probe
gaacttggtaacccacatggttctc

SEQ ID NO: 100571 - DNA, 25 bp, probe
aaagcccaagctctgaagaagtcaa

SEQ ID NO: 100572 - DNA, 25 bp, probe
catcagcttcttctctctccccttg

SEQ ID NO: 100573 - DNA, 25 bp, probe
tcatcagcttcttctctctcccctt

SEQ ID NO: 100574 - DNA, 25 bp, probe
ttcatcagcttcttctctctcccct

SEQ ID NO: 100575 - DNA, 25 bp, probe
acaacgtgatgaagatcgcagactt

SEQ ID NO: 100576 - DNA, 25 bp, probe
caacgtgatgaagatcgcagacttc

SEQ ID NO: 100577 - DNA, 25 bp, probe
cttgtttgaccgagtctacactcac

SEQ ID NO: 100578 - DNA, 25 bp, probe
ccttgtttgaccgagtctacactca

SEQ ID NO: 100579 - DNA, 25 bp, probe
ttgtttgaccgagtctacactcacc

SEQ ID NO: 100580 - DNA, 25 bp, probe
gtttgaccgagtctacactcaccag

SEQ ID NO: 100581 - DNA, 25 bp, probe
tttgaccgagtctacactcaccaga

SEQ ID NO: 100582 - DNA, 25 bp, probe
tatctccacatctctgaagaagttg

SEQ ID NO: 100583 - DNA, 25 bp, probe
ctatctccacatctctgaagaagtt

SEQ ID NO: 100584 - DNA, 25 bp, probe
tcctatctccacatctctgaagaag

SEQ ID NO: 100585 - DNA, 25 bp, probe
ctcctatctccacatctctgaagaa

SEQ ID NO: 100586 - DNA, 25 bp, probe
cctatctccacatctctgaagaagt

SEQ ID NO: 100587 - DNA, 25 bp, probe
atctccacatctctgaagaagttga

SEQ ID NO: 100588 - DNA, 25 bp, probe
ttaagagatcgtaggcaattagaga

SEQ ID NO: 100589 - DNA, 25 bp, probe
taagagatcgtaggcaattagagat

SEQ ID NO: 100590 - DNA, 25 bp, probe
tctccacatctctgaagaagttgag

SEQ ID NO: 100591 - DNA, 25 bp, probe
cctcctatctccacatctctgaaga

SEQ ID NO: 100592 - DNA, 25 bp, probe
caattagagatcgaagcctcctatc

SEQ ID NO: 100593 - DNA, 25 bp, probe
ctccacatctctgaagaagttgagg

SEQ ID NO: 100594 - DNA, 25 bp, probe
ctggagttgatggaataaaggttgg

SEQ ID NO: 100595 - DNA, 25 bp, probe
gcaattagagatcgaagcctcctat

SEQ ID NO: 100596 - DNA, 25 bp, probe
aagagatcgtaggcaattagagatc

SEQ ID NO: 100597 - DNA, 25 bp, probe
aattagagatcgaagcctcctatct

SEQ ID NO: 100598 - DNA, 25 bp, probe
tttaagagatcgtaggcaattagag

SEQ ID NO: 100599 - DNA, 25 bp, probe
gcctcctatctccacatctctgaag

SEQ ID NO: 100600 - DNA, 25 bp, probe
gaagcctcctatctccacatctctg

SEQ ID NO: 100601 - DNA, 25 bp, probe
ctcttactgctgttctccctttctc

SEQ ID NO: 100602 - DNA, 25 bp, probe
agagatcgtaggcaattagagatcg

SEQ ID NO: 100603 - DNA, 25 bp, probe
tggagttgatggaataaaggttggg

SEQ ID NO: 100604 - DNA, 25 bp, probe
cctggagttgatggaataaaggttg

SEQ ID NO: 100605 - DNA, 25 bp, probe
gagagaatgacttctgccttcatct

SEQ ID NO: 100606 - DNA, 25 bp, probe
agcctcctatctccacatctctgaa

SEQ ID NO: 100607 - DNA, 25 bp, probe
aagcctcctatctccacatctctga

SEQ ID NO: 100608 - DNA, 25 bp, probe
tcctggagttgatggaataaaggtt

SEQ ID NO: 100609 - DNA, 25 bp, probe
agagaatgacttctgccttcatctg

SEQ ID NO: 100610 - DNA, 25 bp, probe
gatcgtaggcaattagagatcgaag

SEQ ID NO: 100611 - DNA, 25 bp, probe
agatcgtaggcaattagagatcgaa

SEQ ID NO: 100612 - DNA, 25 bp, probe
gagatcgtaggcaattagagatcga

SEQ ID NO: 100613 - DNA, 25 bp, probe
ggagagaatgacttctgccttcatc

SEQ ID NO: 100614 - DNA, 25 bp, probe
atcgtaggcaattagagatcgaagc

SEQ ID NO: 100615 - DNA, 25 bp, probe
tttcttcttgccaattttgttgttt

SEQ ID NO: 100616 - DNA, 25 bp, probe
ttttcttcttgccaattttgttgtt

SEQ ID NO: 100617 - DNA, 25 bp, probe
aacctcttactgctgttctcccttt

SEQ ID NO: 100618 - DNA, 25 bp, probe
tcttactgctgttctccctttctcc

SEQ ID NO: 100619 - DNA, 25 bp, probe
cctcttactgctgttctccctttct

SEQ ID NO: 100620 - DNA, 25 bp, probe
cctcaacctcttactgctgttctcc

SEQ ID NO: 100621 - DNA, 25 bp, probe
attttcttcttgccaattttgttgt

SEQ ID NO: 100622 - DNA, 25 bp, probe
gatcgaagcctcctatctccacatc

SEQ ID NO: 100623 - DNA, 25 bp, probe
tcttcttgccaattttgttgtttaa

SEQ ID NO: 100624 - DNA, 25 bp, probe
ttcttcttgccaattttgttgttta

SEQ ID NO: 100625 - DNA, 25 bp, probe
acctcttactgctgttctccctttc

SEQ ID NO: 100626 - DNA, 25 bp, probe
aagttggagtcactcttatgctgta

SEQ ID NO: 100627 - DNA, 25 bp, probe
agttggagtcactcttatgctgtac

SEQ ID NO: 100628 - DNA, 25 bp, probe
gtttctaaactggagactgtgtgtg

SEQ ID NO: 100629 - DNA, 25 bp, probe
ctcttatgctgtacccagtttctaa

SEQ ID NO: 100630 - DNA, 25 bp, probe
gtttccttgggagttgtcattaaag

SEQ ID NO: 100631 - DNA, 25 bp, probe
cttatgctgtacccagtttctaaac

SEQ ID NO: 100632 - DNA, 25 bp, probe
gttggagtcactcttatgctgtacc

SEQ ID NO: 100633 - DNA, 25 bp, probe
tcttatgctgtacccagtttctaaa

SEQ ID NO: 100634 - DNA, 25 bp, probe
agtttccttgggagttgtcattaaa

SEQ ID NO: 100635 - DNA, 25 bp, probe
actcttatgctgtacccagtttcta

SEQ ID NO: 100636 - DNA, 25 bp, probe
cagtttccttgggagttgtcattaa

SEQ ID NO: 100637 - DNA, 25 bp, probe
cactcttatgctgtacccagtttct

SEQ ID NO: 100638 - DNA, 25 bp, probe
tcactcttatgctgtacccagtttc

SEQ ID NO: 100639 - DNA, 25 bp, probe
tttctaaactggagactgtgtgtgc

SEQ ID NO: 100640 - DNA, 25 bp, probe
cttgggagttgtcattaaaggaaaa

SEQ ID NO: 100641 - DNA, 25 bp, probe
gtcactcttatgctgtacccagttt

SEQ ID NO: 100642 - DNA, 25 bp, probe
ccagtttccttgggagttgtcatta

SEQ ID NO: 100643 - DNA, 25 bp, probe
agtcactcttatgctgtacccagtt

SEQ ID NO: 100644 - DNA, 25 bp, probe
ttatgctgtacccagtttctaaact

SEQ ID NO: 100645 - DNA, 25 bp, probe
ctccaaaatgtgcctattgctagag

SEQ ID NO: 100646 - DNA, 25 bp, probe
gagtcactcttatgctgtacccagt

SEQ ID NO: 100647 - DNA, 25 bp, probe
agtttctaaactggagactgtgtgt

SEQ ID NO: 100648 - DNA, 25 bp, probe
ttggagtcactcttatgctgtaccc

SEQ ID NO: 100649 - DNA, 25 bp, probe
atctggtagaagggaaagcccatat

SEQ ID NO: 100650 - DNA, 25 bp, probe
ccttgggagttgtcattaaaggaaa

SEQ ID NO: 100651 - DNA, 25 bp, probe
tttccttgggagttgtcattaaagg

SEQ ID NO: 100652 - DNA, 25 bp, probe
cctccaaaatgtgcctattgctaga

SEQ ID NO: 100653 - DNA, 25 bp, probe
ttctaaactggagactgtgtgtgcc

SEQ ID NO: 100654 - DNA, 25 bp, probe
ccactccatctggtagaagggaaag

SEQ ID NO: 100655 - DNA, 25 bp, probe
ggagtcactcttatgctgtacccag

SEQ ID NO: 100656 - DNA, 25 bp, probe
cattgaaaagagctgaaggttgtgg

SEQ ID NO: 100657 - DNA, 25 bp, probe
catctggtagaagggaaagcccata

SEQ ID NO: 100658 - DNA, 25 bp, probe
tccaaaatgtgcctattgctagagc

SEQ ID NO: 100659 - DNA, 25 bp, probe
cactccatctggtagaagggaaagc

SEQ ID NO: 100660 - DNA, 25 bp, probe
ccctccaaaatgtgcctattgctag

SEQ ID NO: 100661 - DNA, 25 bp, probe
gtagaagggaaagcccatatgctac

SEQ ID NO: 100662 - DNA, 25 bp, probe
ctgcattgaaaagagctgaaggttg

SEQ ID NO: 100663 - DNA, 25 bp, probe
gcattgaaaagagctgaaggttgtg

SEQ ID NO: 100664 - DNA, 25 bp, probe
ccaaaatgtgcctattgctagagct

SEQ ID NO: 100665 - DNA, 25 bp, probe
agcatctccaagcagcttagagttg

SEQ ID NO: 100666 - DNA, 25 bp, probe
cagcatctccaagcagcttagagtt

SEQ ID NO: 100667 - DNA, 25 bp, probe
aacagcatctccaagcagcttagag

SEQ ID NO: 100668 - DNA, 25 bp, probe
tggagtcactcttatgctgtaccca

SEQ ID NO: 100669 - DNA, 25 bp, probe
gaaacagcatctccaagcagcttag

SEQ ID NO: 100670 - DNA, 25 bp, probe
gctctactaagacatcaacggaatt

SEQ ID NO: 100671 - DNA, 25 bp, probe
ctactaagacatcaacggaattagg

SEQ ID NO: 100672 - DNA, 25 bp, probe
ctctactaagacatcaacggaatta

SEQ ID NO: 100673 - DNA, 25 bp, probe
tctactaagacatcaacggaattag

SEQ ID NO: 100674 - DNA, 25 bp, probe
agctctactaagacatcaacggaat

SEQ ID NO: 100675 - DNA, 25 bp, probe
atttcatttcatcctggtcagtcta

SEQ ID NO: 100676 - DNA, 25 bp, probe
aagctctactaagacatcaacggaa

SEQ ID NO: 100677 - DNA, 25 bp, probe
tttcatttcatcctggtcagtctag

SEQ ID NO: 100678 - DNA, 25 bp, probe
aagaaagtaaactgcttatcccgag

SEQ ID NO: 100679 - DNA, 25 bp, probe
gaagaaagtaaactgcttatcccga

SEQ ID NO: 100680 - DNA, 25 bp, probe
catttcatttcatcctggtcagtct

SEQ ID NO: 100681 - DNA, 25 bp, probe
gaagctctactaagacatcaacgga

SEQ ID NO: 100682 - DNA, 25 bp, probe
agaagctctactaagacatcaacgg

SEQ ID NO: 100683 - DNA, 25 bp, probe
ccctcataatggaagaaagtaaact

SEQ ID NO: 100684 - DNA, 25 bp, probe
tagaagctctactaagacatcaacg

SEQ ID NO: 100685 - DNA, 25 bp, probe
tcataatggaagaaagtaaactgct

SEQ ID NO: 100686 - DNA, 25 bp, probe
ctcataatggaagaaagtaaactgc

SEQ ID NO: 100687 - DNA, 25 bp, probe
tactaagacatcaacggaattaggg

SEQ ID NO: 100688 - DNA, 25 bp, probe
tatcagtcatccagagaccgtttat

SEQ ID NO: 100689 - DNA, 25 bp, probe
cctcataatggaagaaagtaaactg

SEQ ID NO: 100690 - DNA, 25 bp, probe
cataatggaagaaagtaaactgctt

SEQ ID NO: 100691 - DNA, 25 bp, probe
tggaagaaagtaaactgcttatccc

SEQ ID NO: 100692 - DNA, 25 bp, probe
atcagtcatccagagaccgtttatt

SEQ ID NO: 100693 - DNA, 25 bp, probe
atggaagaaagtaaactgcttatcc

SEQ ID NO: 100694 - DNA, 25 bp, probe
gtatcagtcatccagagaccgttta

SEQ ID NO: 100695 - DNA, 25 bp, probe
aatggaagaaagtaaactgcttatc

SEQ ID NO: 100696 - DNA, 25 bp, probe
ttagaagctctactaagacatcaac

SEQ ID NO: 100697 - DNA, 25 bp, probe
ctggagaaccatttcatttcatcct

SEQ ID NO: 100698 - DNA, 25 bp, probe
ccactgaaggctgtgtttattcttt

SEQ ID NO: 100699 - DNA, 25 bp, probe
tggagaaccatttcatttcatcctg

SEQ ID NO: 100700 - DNA, 25 bp, probe
ggaagaaagtaaactgcttatcccg

SEQ ID NO: 100701 - DNA, 25 bp, probe
gtttattgcccaacacgttattctt

SEQ ID NO: 100702 - DNA, 25 bp, probe
tttattgcccaacacgttattcttg

SEQ ID NO: 100703 - DNA, 25 bp, probe
ctgtatcagtcatccagagaccgtt

SEQ ID NO: 100704 - DNA, 25 bp, probe
atccactgaaggctgtgtttattct

SEQ ID NO: 100705 - DNA, 25 bp, probe
catccactgaaggctgtgtttattc

SEQ ID NO: 100706 - DNA, 25 bp, probe
tcagtcatccagagaccgtttattg

SEQ ID NO: 100707 - DNA, 25 bp, probe
tcaagactgtgtgtgtggatttctc

SEQ ID NO: 100708 - DNA, 25 bp, probe
ggagaaccatttcatttcatcctgg

SEQ ID NO: 100709 - DNA, 25 bp, probe
cctggagaaccatttcatttcatcc

SEQ ID NO: 100710 - DNA, 25 bp, probe
ccctggagaaccatttcatttcatc

SEQ ID NO: 100711 - DNA, 25 bp, probe
tccactgaaggctgtgtttattctt

SEQ ID NO: 100712 - DNA, 25 bp, probe
ccatttcatttcatcctggtcagtc

SEQ ID NO: 100713 - DNA, 25 bp, probe
caagactgtgtgtgtggatttctca

SEQ ID NO: 100714 - DNA, 25 bp, probe
acaataagccagacaacacaatcaa

SEQ ID NO: 100715 - DNA, 25 bp, probe
agacaataagccagacaacacaatc

SEQ ID NO: 100716 - DNA, 25 bp, probe
cagacaataagccagacaacacaat

SEQ ID NO: 100717 - DNA, 25 bp, probe
gacaataagccagacaacacaatca

SEQ ID NO: 100718 - DNA, 25 bp, probe
ggatcagttaagtacacttgaagga

SEQ ID NO: 100719 - DNA, 25 bp, probe
tggatcagttaagtacacttgaagg

SEQ ID NO: 100720 - DNA, 25 bp, probe
tcatggatcagttaagtacacttga

SEQ ID NO: 100721 - DNA, 25 bp, probe
tctgagcagtcttgtaatattgttc

SEQ ID NO: 100722 - DNA, 25 bp, probe
cttctgagcagtcttgtaatattgt

SEQ ID NO: 100723 - DNA, 25 bp, probe
atggatcagttaagtacacttgaag

SEQ ID NO: 100724 - DNA, 25 bp, probe
atcagttaagtacacttgaaggaag

SEQ ID NO: 100725 - DNA, 25 bp, probe
gatcagttaagtacacttgaaggaa

SEQ ID NO: 100726 - DNA, 25 bp, probe
catggatcagttaagtacacttgaa

SEQ ID NO: 100727 - DNA, 25 bp, probe
ttcatggatcagttaagtacacttg

SEQ ID NO: 100728 - DNA, 25 bp, probe
ttctgagcagtcttgtaatattgtt

SEQ ID NO: 100729 - DNA, 25 bp, probe
atattgttcattcatattgacctgc

SEQ ID NO: 100730 - DNA, 25 bp, probe
ctgagcagtcttgtaatattgttca

SEQ ID NO: 100731 - DNA, 25 bp, probe
ttcacagacagacaataagccagac

SEQ ID NO: 100732 - DNA, 25 bp, probe
acagacaataagccagacaacacaa

SEQ ID NO: 100733 - DNA, 25 bp, probe
aataagccagacaacacaatcaaag

SEQ ID NO: 100734 - DNA, 25 bp, probe
caataagccagacaacacaatcaaa

SEQ ID NO: 100735 - DNA, 25 bp, probe
ctcacctttcacagacagacaataa

SEQ ID NO: 100736 - DNA, 25 bp, probe
agacagacaataagccagacaacac

SEQ ID NO: 100737 - DNA, 25 bp, probe
cagacagacaataagccagacaaca

SEQ ID NO: 100738 - DNA, 25 bp, probe
acagacagacaataagccagacaac

SEQ ID NO: 100739 - DNA, 25 bp, probe
cacagacagacaataagccagacaa

SEQ ID NO: 100740 - DNA, 25 bp, probe
tgagcagtcttgtaatattgttcat

SEQ ID NO: 100741 - DNA, 25 bp, probe
tccactcccatctttatgacatttc

SEQ ID NO: 100742 - DNA, 25 bp, probe
ctccactcccatctttatgacattt

SEQ ID NO: 100743 - DNA, 25 bp, probe
gcagtcttgtaatattgttcattca

SEQ ID NO: 100744 - DNA, 25 bp, probe
tactccactcccatctttatgacat

SEQ ID NO: 100745 - DNA, 25 bp, probe
tcacctttcacagacagacaataag

SEQ ID NO: 100746 - DNA, 25 bp, probe
catattgacctgcatctcatcattg

SEQ ID NO: 100747 - DNA, 25 bp, probe
tcatattgacctgcatctcatcatt

SEQ ID NO: 100748 - DNA, 25 bp, probe
ttcatattgacctgcatctcatcat

SEQ ID NO: 100749 - DNA, 25 bp, probe
attcatattgacctgcatctcatca

SEQ ID NO: 100750 - DNA, 25 bp, probe
cattcatattgacctgcatctcatc

SEQ ID NO: 100751 - DNA, 25 bp, probe
tcattcatattgacctgcatctcat

SEQ ID NO: 100752 - DNA, 25 bp, probe
gttcattcatattgacctgcatctc

SEQ ID NO: 100753 - DNA, 25 bp, probe
ttgttcattcatattgacctgcatc

SEQ ID NO: 100754 - DNA, 25 bp, probe
ttcattcatattgacctgcatctca

SEQ ID NO: 100755 - DNA, 25 bp, probe
tgttcattcatattgacctgcatct

SEQ ID NO: 100756 - DNA, 25 bp, probe
attgttcattcatattgacctgcat

SEQ ID NO: 100757 - DNA, 25 bp, probe
agcagtcttgtaatattgttcattc

SEQ ID NO: 100758 - DNA, 25 bp, probe
ggacaaagtgaatttaacctggaaa

SEQ ID NO: 100759 - DNA, 25 bp, probe
catcttggtactttaggttaatccc

SEQ ID NO: 100760 - DNA, 25 bp, probe
aggacaaagtgaatttaacctggaa

SEQ ID NO: 100761 - DNA, 25 bp, probe
atgaggacaaagtgaatttaacctg

SEQ ID NO: 100762 - DNA, 25 bp, probe
tactttaggttaatccctcaagcat

SEQ ID NO: 100763 - DNA, 25 bp, probe
gaggacaaagtgaatttaacctgga

SEQ ID NO: 100764 - DNA, 25 bp, probe
tgaggacaaagtgaatttaacctgg

SEQ ID NO: 100765 - DNA, 25 bp, probe
gtactttaggttaatccctcaagca

SEQ ID NO: 100766 - DNA, 25 bp, probe
tggtactttaggttaatccctcaag

SEQ ID NO: 100767 - DNA, 25 bp, probe
cttggtactttaggttaatccctca

SEQ ID NO: 100768 - DNA, 25 bp, probe
tcttggtactttaggttaatccctc

SEQ ID NO: 100769 - DNA, 25 bp, probe
ttatgaggacaaagtgaatttaacc

SEQ ID NO: 100770 - DNA, 25 bp, probe
ttggtactttaggttaatccctcaa

SEQ ID NO: 100771 - DNA, 25 bp, probe
ggtactttaggttaatccctcaagc

SEQ ID NO: 100772 - DNA, 25 bp, probe
ttaggttaatccctcaagcatgaaa

SEQ ID NO: 100773 - DNA, 25 bp, probe
tttaggttaatccctcaagcatgaa

SEQ ID NO: 100774 - DNA, 25 bp, probe
taggttaatccctcaagcatgaaag

SEQ ID NO: 100775 - DNA, 25 bp, probe
ctttaggttaatccctcaagcatga

SEQ ID NO: 100776 - DNA, 25 bp, probe
actttaggttaatccctcaagcatg

SEQ ID NO: 100777 - DNA, 25 bp, probe
atcttggtactttaggttaatccct

SEQ ID NO: 100778 - DNA, 25 bp, probe
gccatcttggtactttaggttaatc

SEQ ID NO: 100779 - DNA, 25 bp, probe
tatgaggacaaagtgaatttaacct

SEQ ID NO: 100780 - DNA, 25 bp, probe
cgccatcttggtactttaggttaat

SEQ ID NO: 100781 - DNA, 25 bp, probe
ccatcttggtactttaggttaatcc

SEQ ID NO: 100782 - DNA, 25 bp, probe
atttgtagcccttctgcccttaaat

SEQ ID NO: 100783 - DNA, 25 bp, probe
gatttgtagcccttctgcccttaaa

SEQ ID NO: 100784 - DNA, 25 bp, probe
ttaaataatcagcgggtgttggtga

SEQ ID NO: 100785 - DNA, 25 bp, probe
tttaaataatcagcgggtgttggtg

SEQ ID NO: 100786 - DNA, 25 bp, probe
tttgtagcccttctgcccttaaatg

SEQ ID NO: 100787 - DNA, 25 bp, probe
cctggaaaagaatgtatttgagagt

SEQ ID NO: 100788 - DNA, 25 bp, probe
acctggaaaagaatgtatttgagag

SEQ ID NO: 100789 - DNA, 25 bp, probe
aacctggaaaagaatgtatttgaga

SEQ ID NO: 100790 - DNA, 25 bp, probe
cttatgaggacaaagtgaatttaac

SEQ ID NO: 100791 - DNA, 25 bp, probe
acaaagtgaatttaacctggaaaag

SEQ ID NO: 100792 - DNA, 25 bp, probe
gacaaagtgaatttaacctggaaaa

SEQ ID NO: 100793 - DNA, 25 bp, probe
ccgccatcttggtactttaggttaa

SEQ ID NO: 100794 - DNA, 25 bp, probe
gtgaatttaacctggaaaagaatgt

SEQ ID NO: 100795 - DNA, 25 bp, probe
caaagtgaatttaacctggaaaaga

SEQ ID NO: 100796 - DNA, 25 bp, probe
tgatttgtagcccttctgcccttaa

SEQ ID NO: 100797 - DNA, 25 bp, probe
agtgaatttaacctggaaaagaatg

SEQ ID NO: 100798 - DNA, 25 bp, probe
gtgttggtgatttgtagcccttctg

SEQ ID NO: 100799 - DNA, 25 bp, probe
cttctgcccttaaatgcttccttgg

SEQ ID NO: 100800 - DNA, 25 bp, probe
ccttctgcccttaaatgcttccttg

SEQ ID NO: 100801 - DNA, 25 bp, probe
tcttttaaataatcagcgggtgttg

SEQ ID NO: 100802 - DNA, 25 bp, probe
agataaggagaaagaaagtacccag

SEQ ID NO: 100803 - DNA, 25 bp, probe
gataaggagaaagaaagtacccagc

SEQ ID NO: 100804 - DNA, 25 bp, probe
aagaaattctccactaagtctgacg

SEQ ID NO: 100805 - DNA, 25 bp, probe
aagataaggagaaagaaagtaccca

SEQ ID NO: 100806 - DNA, 25 bp, probe
caagataaggagaaagaaagtaccc

SEQ ID NO: 100807 - DNA, 25 bp, probe
gaagaaattctccactaagtctgac

SEQ ID NO: 100808 - DNA, 25 bp, probe
ataaggagaaagaaagtacccagca

SEQ ID NO: 100809 - DNA, 25 bp, probe
taaggagaaagaaagtacccagcaa

SEQ ID NO: 100810 - DNA, 25 bp, probe
ggagaaagaaagtacccagcaaatg

SEQ ID NO: 100811 - DNA, 25 bp, probe
tcaagataaggagaaagaaagtacc

SEQ ID NO: 100812 - DNA, 25 bp, probe
aggagaaagaaagtacccagcaaat

SEQ ID NO: 100813 - DNA, 25 bp, probe
aaggagaaagaaagtacccagcaaa

SEQ ID NO: 100814 - DNA, 25 bp, probe
agaaattctccactaagtctgacgt

SEQ ID NO: 100815 - DNA, 25 bp, probe
agaagaaattctccactaagtctga

SEQ ID NO: 100816 - DNA, 25 bp, probe
tcgccttcttagagttttattcctt

SEQ ID NO: 100817 - DNA, 25 bp, probe
cgccttcttagagttttattccttt

SEQ ID NO: 100818 - DNA, 25 bp, probe
gagaaagaaagtacccagcaaatgg

SEQ ID NO: 100819 - DNA, 25 bp, probe
gggcattttacaagaagtacgaatc

SEQ ID NO: 100820 - DNA, 25 bp, probe
ctcgccttcttagagttttattcct

SEQ ID NO: 100821 - DNA, 25 bp, probe
ggcattttacaagaagtacgaatct

SEQ ID NO: 100822 - DNA, 25 bp, probe
tgggcattttacaagaagtacgaat

SEQ ID NO: 100823 - DNA, 25 bp, probe
atgggcattttacaagaagtacgaa

SEQ ID NO: 100824 - DNA, 25 bp, probe
aatgggcattttacaagaagtacga

SEQ ID NO: 100825 - DNA, 25 bp, probe
ttcaagataaggagaaagaaagtac

SEQ ID NO: 100826 - DNA, 25 bp, probe
gccttcttagagttttattcctttc

SEQ ID NO: 100827 - DNA, 25 bp, probe
ctgaacctggaagatcatggacctg

SEQ ID NO: 100828 - DNA, 25 bp, probe
gactgaacctggaagatcatggacc

SEQ ID NO: 100829 - DNA, 25 bp, probe
ggactgaacctggaagatcatggac

SEQ ID NO: 100830 - DNA, 25 bp, probe
ccttcttagagttttattcctttcc

SEQ ID NO: 100831 - DNA, 25 bp, probe
aaatgggcattttacaagaagtacg

SEQ ID NO: 100832 - DNA, 25 bp, probe
gcaaatgggcattttacaagaagta

SEQ ID NO: 100833 - DNA, 25 bp, probe
caaatgggcattttacaagaagtac

SEQ ID NO: 100834 - DNA, 25 bp, probe
cagcaaatgggcattttacaagaag

SEQ ID NO: 100835 - DNA, 25 bp, probe
actgaacctggaagatcatggacct

SEQ ID NO: 100836 - DNA, 25 bp, probe
agcaaatgggcattttacaagaagt

SEQ ID NO: 100837 - DNA, 25 bp, probe
cttcttagagttttattcctttcct

SEQ ID NO: 100838 - DNA, 25 bp, probe
gcattttacaagaagtacgaatctt

SEQ ID NO: 100839 - DNA, 25 bp, probe
tttcaagataaggagaaagaaagta

SEQ ID NO: 100840 - DNA, 25 bp, probe
ctgaggccctgagagagaagaaatt

SEQ ID NO: 100841 - DNA, 25 bp, probe
tcttagagttttattcctttccttt

SEQ ID NO: 100842 - DNA, 25 bp, probe
ttcttagagttttattcctttcctt

SEQ ID NO: 100843 - DNA, 25 bp, probe
tgaggccctgagagagaagaaattc

SEQ ID NO: 100844 - DNA, 25 bp, probe
ccagcaaatgggcattttacaagaa

SEQ ID NO: 100845 - DNA, 25 bp, probe
cactcgccttcttagagttttattc

SEQ ID NO: 100846 - DNA, 25 bp, probe
aaccttagacaatcaatcagtcagt

SEQ ID NO: 100847 - DNA, 25 bp, probe
accttagacaatcaatcagtcagtc

SEQ ID NO: 100848 - DNA, 25 bp, probe
aaccagccacttctgaatacaatat

SEQ ID NO: 100849 - DNA, 25 bp, probe
ccagccacttctgaatacaatatgt

SEQ ID NO: 100850 - DNA, 25 bp, probe
accagccacttctgaatacaatatg

SEQ ID NO: 100851 - DNA, 25 bp, probe
cctggagttaatagagtgattcaca

SEQ ID NO: 100852 - DNA, 25 bp, probe
ttgagaatttagtccatagaggtcc

SEQ ID NO: 100853 - DNA, 25 bp, probe
gccacttctgaatacaatatgtagc

SEQ ID NO: 100854 - DNA, 25 bp, probe
tccctggagttaatagagtgattca

SEQ ID NO: 100855 - DNA, 25 bp, probe
ttccctggagttaatagagtgattc

SEQ ID NO: 100856 - DNA, 25 bp, probe
cttccctggagttaatagagtgatt

SEQ ID NO: 100857 - DNA, 25 bp, probe
gagacacttgggactactagagata

SEQ ID NO: 100858 - DNA, 25 bp, probe
tatgagacacttgggactactagag

SEQ ID NO: 100859 - DNA, 25 bp, probe
atatgagacacttgggactactaga

SEQ ID NO: 100860 - DNA, 25 bp, probe
aatgaaacaaacgcttagaacaaat

SEQ ID NO: 100861 - DNA, 25 bp, probe
gagaatttagtccatagaggtccct

SEQ ID NO: 100862 - DNA, 25 bp, probe
tgagaatttagtccatagaggtccc

SEQ ID NO: 100863 - DNA, 25 bp, probe
agacacttgggactactagagatat

SEQ ID NO: 100864 - DNA, 25 bp, probe
aaatatgagacacttgggactacta

SEQ ID NO: 100865 - DNA, 25 bp, probe
taaatatgagacacttgggactact

SEQ ID NO: 100866 - DNA, 25 bp, probe
cctatctagtcaactgggcataatg

SEQ ID NO: 100867 - DNA, 25 bp, probe
agaatttagtccatagaggtccctg

SEQ ID NO: 100868 - DNA, 25 bp, probe
tcttccctggagttaatagagtgat

SEQ ID NO: 100869 - DNA, 25 bp, probe
cttaatgaaacaaacgcttagaaca

SEQ ID NO: 100870 - DNA, 25 bp, probe
ttcttccctggagttaatagagtga

SEQ ID NO: 100871 - DNA, 25 bp, probe
aatatgagacacttgggactactag

SEQ ID NO: 100872 - DNA, 25 bp, probe
attcttccctggagttaatagagtg

SEQ ID NO: 100873 - DNA, 25 bp, probe
cattcttccctggagttaatagagt

SEQ ID NO: 100874 - DNA, 25 bp, probe
tcattcttccctggagttaatagag

SEQ ID NO: 100875 - DNA, 25 bp, probe
cagccacttctgaatacaatatgta

SEQ ID NO: 100876 - DNA, 25 bp, probe
gacacttgggactactagagatatt

SEQ ID NO: 100877 - DNA, 25 bp, probe
gagttccctcattcttattaccaga

SEQ ID NO: 100878 - DNA, 25 bp, probe
taatgaaacaaacgcttagaacaaa

SEQ ID NO: 100879 - DNA, 25 bp, probe
ctatctagtcaactgggcataatga

SEQ ID NO: 100880 - DNA, 25 bp, probe
ctggagttaatagagtgattcacaa

SEQ ID NO: 100881 - DNA, 25 bp, probe
ttaatgaaacaaacgcttagaacaa

SEQ ID NO: 100882 - DNA, 25 bp, probe
agccacttctgaatacaatatgtag

SEQ ID NO: 100883 - DNA, 25 bp, probe
gtctcattcttccctggagttaata

SEQ ID NO: 100884 - DNA, 25 bp, probe
tcttaatgaaacaaacgcttagaac

SEQ ID NO: 100885 - DNA, 25 bp, probe
gcaaagtacccttgagattgaattt

SEQ ID NO: 100886 - DNA, 25 bp, probe
ctcattcttccctggagttaataga

SEQ ID NO: 100887 - DNA, 25 bp, probe
tctcattcttccctggagttaatag

SEQ ID NO: 100888 - DNA, 25 bp, probe
atgaaacaaacgcttagaacaaata

SEQ ID NO: 100889 - DNA, 25 bp, probe
acacttgggactactagagatattt

SEQ ID NO: 100890 - DNA, 25 bp, probe
tcacattaccataccatcagatagc

SEQ ID NO: 100891 - DNA, 25 bp, probe
cacattaccataccatcagatagca

SEQ ID NO: 100892 - DNA, 25 bp, probe
acattaccataccatcagatagcat

SEQ ID NO: 100893 - DNA, 25 bp, probe
ggtgactcatcaatggatatgtgtt

SEQ ID NO: 100894 - DNA, 25 bp, probe
ttggtgactcatcaatggatatgtg

SEQ ID NO: 100895 - DNA, 25 bp, probe
ttcacattaccataccatcagatag

SEQ ID NO: 100896 - DNA, 25 bp, probe
cattaccataccatcagatagcatg

SEQ ID NO: 100897 - DNA, 25 bp, probe
attcttcagtgttcatatagcacct

SEQ ID NO: 100898 - DNA, 25 bp, probe
tggtgactcatcaatggatatgtgt

SEQ ID NO: 100899 - DNA, 25 bp, probe
ttcttcagtgttcatatagcacctg

SEQ ID NO: 100900 - DNA, 25 bp, probe
taattaacttcattgccgctggatt

SEQ ID NO: 100901 - DNA, 25 bp, probe
aattaacttcattgccgctggattc

SEQ ID NO: 100902 - DNA, 25 bp, probe
tattcttcagtgttcatatagcacc

SEQ ID NO: 100903 - DNA, 25 bp, probe
tttatactgatttgattgtgctggc

SEQ ID NO: 100904 - DNA, 25 bp, probe
gtgtgatactaaggtttgactgcta

SEQ ID NO: 100905 - DNA, 25 bp, probe
ccatttcacattaccataccatcag

SEQ ID NO: 100906 - DNA, 25 bp, probe
tgtgatactaaggtttgactgctat

SEQ ID NO: 100907 - DNA, 25 bp, probe
atttattgttcagccttatcccttg

SEQ ID NO: 100908 - DNA, 25 bp, probe
gacttagtatataggtgcagagaca

SEQ ID NO: 100909 - DNA, 25 bp, probe
tgacttagtatataggtgcagagac

SEQ ID NO: 100910 - DNA, 25 bp, probe
ctttaggaaacatacccaggaagta

SEQ ID NO: 100911 - DNA, 25 bp, probe
tactttaggaaacatacccaggaag

SEQ ID NO: 100912 - DNA, 25 bp, probe
tttattgttcagccttatcccttgg

SEQ ID NO: 100913 - DNA, 25 bp, probe
ggtgtttatactgatttgattgtgc

SEQ ID NO: 100914 - DNA, 25 bp, probe
tttggatgtatgatatgcttggttt

SEQ ID NO: 100915 - DNA, 25 bp, probe
atgtgtgatactaaggtttgactgc

SEQ ID NO: 100916 - DNA, 25 bp, probe
agacttattgtaggttcgtttgagc

SEQ ID NO: 100917 - DNA, 25 bp, probe
tatttcttagtggtcattgctctgc

SEQ ID NO: 100918 - DNA, 25 bp, probe
catttcacattaccataccatcaga

SEQ ID NO: 100919 - DNA, 25 bp, probe
atatttcttagtggtcattgctctg

SEQ ID NO: 100920 - DNA, 25 bp, probe
gtttatactgatttgattgtgctgg

SEQ ID NO: 100921 - DNA, 25 bp, probe
attaacttcattgccgctggattct

SEQ ID NO: 100922 - DNA, 25 bp, probe
atgccatttcacattaccataccat

SEQ ID NO: 100923 - DNA, 25 bp, probe
tcttcagtgttcatatagcacctgg

SEQ ID NO: 100924 - DNA, 25 bp, probe
agtaatgaactcagcattctgtact

SEQ ID NO: 100925 - DNA, 25 bp, probe
gccatttcacattaccataccatca

SEQ ID NO: 100926 - DNA, 25 bp, probe
tgccatttcacattaccataccatc

SEQ ID NO: 100927 - DNA, 25 bp, probe
tttggtgactcatcaatggatatgt

SEQ ID NO: 100928 - DNA, 25 bp, probe
agatttggtgactcatcaatggata

SEQ ID NO: 100929 - DNA, 25 bp, probe
aatttattgttcagccttatccctt

SEQ ID NO: 100930 - DNA, 25 bp, probe
tagacttattgtaggttcgtttgag

SEQ ID NO: 100931 - DNA, 25 bp, probe
gtaatgaactcagcattctgtactt

SEQ ID NO: 100932 - DNA, 25 bp, probe
aagtaatgaactcagcattctgtac

SEQ ID NO: 100933 - DNA, 25 bp, probe
ttgacttagtatataggtgcagaga

SEQ ID NO: 100934 - DNA, 25 bp, probe
ctcactctctctctctcttactctt

SEQ ID NO: 100935 - DNA, 25 bp, probe
ctctctcttactcttactgacatcg

SEQ ID NO: 100936 - DNA, 25 bp, probe
ctctcttactcttactgacatcgtg

SEQ ID NO: 100937 - DNA, 25 bp, probe
tctctcttactcttactgacatcgt

SEQ ID NO: 100938 - DNA, 25 bp, probe
ctctcactctctctctctcttactc

SEQ ID NO: 100939 - DNA, 25 bp, probe
taagcaatcactcattaccaccaat

SEQ ID NO: 100940 - DNA, 25 bp, probe
tctctctctcttactcttactgaca

SEQ ID NO: 100941 - DNA, 25 bp, probe
tctcactctctctctctcttactct

SEQ ID NO: 100942 - DNA, 25 bp, probe
ttaagcaatcactcattaccaccaa

SEQ ID NO: 100943 - DNA, 25 bp, probe
caatcactcattaccaccaatctgt

SEQ ID NO: 100944 - DNA, 25 bp, probe
ctctctctctcttactcttactgac

SEQ ID NO: 100945 - DNA, 25 bp, probe
cactctctctctctcttactcttac

SEQ ID NO: 100946 - DNA, 25 bp, probe
tctctctctctcttactcttactga

SEQ ID NO: 100947 - DNA, 25 bp, probe
actctctctctctcttactcttact

SEQ ID NO: 100948 - DNA, 25 bp, probe
tcactctctctctctcttactctta

SEQ ID NO: 100949 - DNA, 25 bp, probe
ctctctctctctcttactcttactg

SEQ ID NO: 100950 - DNA, 25 bp, probe
tctctctcttactcttactgacatc

SEQ ID NO: 100951 - DNA, 25 bp, probe
ctctctctcttactcttactgacat

SEQ ID NO: 100952 - DNA, 25 bp, probe
aagcaatcactcattaccaccaatc

SEQ ID NO: 100953 - DNA, 25 bp, probe
ctaaggaggactacagatgagatta

SEQ ID NO: 100954 - DNA, 25 bp, probe
ttgctctcactctctctctctctta

SEQ ID NO: 100955 - DNA, 25 bp, probe
tctcttactcttactgacatcgtgt

SEQ ID NO: 100956 - DNA, 25 bp, probe
gctctcactctctctctctcttact

SEQ ID NO: 100957 - DNA, 25 bp, probe
taaggaggactacagatgagattaa

SEQ ID NO: 100958 - DNA, 25 bp, probe
gttcaacactgtctctcaatcagat

SEQ ID NO: 100959 - DNA, 25 bp, probe
gcaatcactcattaccaccaatctg

SEQ ID NO: 100960 - DNA, 25 bp, probe
agcaatcactcattaccaccaatct

SEQ ID NO: 100961 - DNA, 25 bp, probe
tgctctcactctctctctctcttac

SEQ ID NO: 100962 - DNA, 25 bp, probe
cctaaggaggactacagatgagatt

SEQ ID NO: 100963 - DNA, 25 bp, probe
gagttcaacactgtctctcaatcag

SEQ ID NO: 100964 - DNA, 25 bp, probe
aacactgtctctcaatcagatcatc

SEQ ID NO: 100965 - DNA, 25 bp, probe
aatcactcattaccaccaatctgtg

SEQ ID NO: 100966 - DNA, 25 bp, probe
ttcaacactgtctctcaatcagatc

SEQ ID NO: 100967 - DNA, 25 bp, probe
caacactgtctctcaatcagatcat

SEQ ID NO: 100968 - DNA, 25 bp, probe
agttcaacactgtctctcaatcaga

SEQ ID NO: 100969 - DNA, 25 bp, probe
acactgtctctcaatcagatcatct

SEQ ID NO: 100970 - DNA, 25 bp, probe
ttggagttcaacactgtctctcaat

SEQ ID NO: 100971 - DNA, 25 bp, probe
caaggaagagcatgataactgtcag

SEQ ID NO: 100972 - DNA, 25 bp, probe
aaggaagagcatgataactgtcaga

SEQ ID NO: 100973 - DNA, 25 bp, probe
gttccaaggaagagcatgataactg

SEQ ID NO: 100974 - DNA, 25 bp, probe
tattcacagtacacgtcacagtatt

SEQ ID NO: 100975 - DNA, 25 bp, probe
ctattcacagtacacgtcacagtat

SEQ ID NO: 100976 - DNA, 25 bp, probe
tcaacactgtctctcaatcagatca

SEQ ID NO: 100977 - DNA, 25 bp, probe
gtctcttctattcacagtacacgtc

SEQ ID NO: 100978 - DNA, 25 bp, probe
gaaggtatagtggaatgagtgtgag

SEQ ID NO: 100979 - DNA, 25 bp, probe
gagaaggtatagtggaatgagtgtg

SEQ ID NO: 100980 - DNA, 25 bp, probe
tcgttcttgattagtatcgtgagtt

SEQ ID NO: 100981 - DNA, 25 bp, probe
atcgttcttgattagtatcgtgagt

SEQ ID NO: 100982 - DNA, 25 bp, probe
agaaggtatagtggaatgagtgtga

SEQ ID NO: 100983 - DNA, 25 bp, probe
ggagaaggtatagtggaatgagtgt

SEQ ID NO: 100984 - DNA, 25 bp, probe
gtatagtggaatgagtgtgagcatc

SEQ ID NO: 100985 - DNA, 25 bp, probe
gaagataataatgcctacctcagag

SEQ ID NO: 100986 - DNA, 25 bp, probe
tgaagataataatgcctacctcaga

SEQ ID NO: 100987 - DNA, 25 bp, probe
aaggtatagtggaatgagtgtgagc

SEQ ID NO: 100988 - DNA, 25 bp, probe
ggtatagtggaatgagtgtgagcat

SEQ ID NO: 100989 - DNA, 25 bp, probe
tatagtggaatgagtgtgagcatcg

SEQ ID NO: 100990 - DNA, 25 bp, probe
atgaagataataatgcctacctcag

SEQ ID NO: 100991 - DNA, 25 bp, probe
cctttatagcagcccgtatgatatt

SEQ ID NO: 100992 - DNA, 25 bp, probe
aatcgttcttgattagtatcgtgag

SEQ ID NO: 100993 - DNA, 25 bp, probe
aatgaagataataatgcctacctca

SEQ ID NO: 100994 - DNA, 25 bp, probe
cttgtgtgattgtgggaaattactt

SEQ ID NO: 100995 - DNA, 25 bp, probe
cgttcttgattagtatcgtgagttt

SEQ ID NO: 100996 - DNA, 25 bp, probe
tgtgattgtgggaaattacttaacc

SEQ ID NO: 100997 - DNA, 25 bp, probe
tacttgtgtgattgtgggaaattac

SEQ ID NO: 100998 - DNA, 25 bp, probe
aagggagaaggtatagtggaatgag

SEQ ID NO: 100999 - DNA, 25 bp, probe
aggtatagtggaatgagtgtgagca

SEQ ID NO: 101000 - DNA, 25 bp, probe
gtgattgtgggaaattacttaacct

SEQ ID NO: 101001 - DNA, 25 bp, probe
acttgtgtgattgtgggaaattact

SEQ ID NO: 101002 - DNA, 25 bp, probe
ctacttgtgtgattgtgggaaatta

SEQ ID NO: 101003 - DNA, 25 bp, probe
gaaattacttaacctcttcaagccc

SEQ ID NO: 101004 - DNA, 25 bp, probe
ggaaattacttaacctcttcaagcc

SEQ ID NO: 101005 - DNA, 25 bp, probe
gggaaattacttaacctcttcaagc

SEQ ID NO: 101006 - DNA, 25 bp, probe
tgtgggaaattacttaacctcttca

SEQ ID NO: 101007 - DNA, 25 bp, probe
acctttatagcagcccgtatgatat

SEQ ID NO: 101008 - DNA, 25 bp, probe
tgattgtgggaaattacttaacctc

SEQ ID NO: 101009 - DNA, 25 bp, probe
caagggagaaggtatagtggaatga

SEQ ID NO: 101010 - DNA, 25 bp, probe
tcaagggagaaggtatagtggaatg

SEQ ID NO: 101011 - DNA, 25 bp, probe
aagataataatgcctacctcagagg

SEQ ID NO: 101012 - DNA, 25 bp, probe
tgtgtgattgtgggaaattacttaa

SEQ ID NO: 101013 - DNA, 25 bp, probe
ttgtgtgattgtgggaaattactta

SEQ ID NO: 101014 - DNA, 25 bp, probe
gaaacagaatgaagcagaggaaact

SEQ ID NO: 101015 - DNA, 25 bp, probe
tagcagcccgtatgatattattcac

SEQ ID NO: 101016 - DNA, 25 bp, probe
gattgtgggaaattacttaacctct

SEQ ID NO: 101017 - DNA, 25 bp, probe
atagcagcccgtatgatattattca

SEQ ID NO: 101018 - DNA, 25 bp, probe
gtgggaaattacttaacctcttcaa

SEQ ID NO: 101019 - DNA, 25 bp, probe
ttgtgggaaattacttaacctcttc

SEQ ID NO: 101020 - DNA, 25 bp, probe
gtgtgattgtgggaaattacttaac

SEQ ID NO: 101021 - DNA, 25 bp, probe
cctacttgtgtgattgtgggaaatt

SEQ ID NO: 101022 - DNA, 25 bp, probe
ggagtcggttagtcattgatagaac

SEQ ID NO: 101023 - DNA, 25 bp, probe
gagtcggttagtcattgatagaact

SEQ ID NO: 101024 - DNA, 25 bp, probe
tcggttagtcattgatagaactact

SEQ ID NO: 101025 - DNA, 25 bp, probe
gtcggttagtcattgatagaactac

SEQ ID NO: 101026 - DNA, 25 bp, probe
agtcggttagtcattgatagaacta

SEQ ID NO: 101027 - DNA, 25 bp, probe
cggttagtcattgatagaactactt

SEQ ID NO: 101028 - DNA, 25 bp, probe
gggagtcggttagtcattgatagaa

SEQ ID NO: 101029 - DNA, 25 bp, probe
agtcattgatagaactactttgaaa

SEQ ID NO: 101030 - DNA, 25 bp, probe
atggggagtcggttagtcattgata

SEQ ID NO: 101031 - DNA, 25 bp, probe
ggttagtcattgatagaactacttt

SEQ ID NO: 101032 - DNA, 25 bp, probe
ggggagtcggttagtcattgataga

SEQ ID NO: 101033 - DNA, 25 bp, probe
tggggagtcggttagtcattgatag

SEQ ID NO: 101034 - DNA, 25 bp, probe
actttgaaaacaattcagtggtctt

SEQ ID NO: 101035 - DNA, 25 bp, probe
actactttgaaaacaattcagtggt

SEQ ID NO: 101036 - DNA, 25 bp, probe
tactttgaaaacaattcagtggtct

SEQ ID NO: 101037 - DNA, 25 bp, probe
ctactttgaaaacaattcagtggtc

SEQ ID NO: 101038 - DNA, 25 bp, probe
aactactttgaaaacaattcagtgg

SEQ ID NO: 101039 - DNA, 25 bp, probe
gaaaacaattcagtggtcttatttt

SEQ ID NO: 101040 - DNA, 25 bp, probe
gttagtcattgatagaactactttg

SEQ ID NO: 101041 - DNA, 25 bp, probe
gatggggagtcggttagtcattgat

SEQ ID NO: 101042 - DNA, 25 bp, probe
ctttgaaaacaattcagtggtctta

SEQ ID NO: 101043 - DNA, 25 bp, probe
tagtcattgatagaactactttgaa

SEQ ID NO: 101044 - DNA, 25 bp, probe
ttagtcattgatagaactactttga

SEQ ID NO: 101045 - DNA, 25 bp, probe
cattgatagaactactttgaaaaca

SEQ ID NO: 101046 - DNA, 25 bp, probe
tgaaaacaattcagtggtcttattt

SEQ ID NO: 101047 - DNA, 25 bp, probe
ttgaaaacaattcagtggtcttatt

SEQ ID NO: 101048 - DNA, 25 bp, probe
tttgaaaacaattcagtggtcttat

SEQ ID NO: 101049 - DNA, 25 bp, probe
gaactactttgaaaacaattcagtg

SEQ ID NO: 101050 - DNA, 25 bp, probe
agaactactttgaaaacaattcagt

SEQ ID NO: 101051 - DNA, 25 bp, probe
ctgggctgctgtagatgactacttg

SEQ ID NO: 101052 - DNA, 25 bp, probe
tctgggctgctgtagatgactactt

SEQ ID NO: 101053 - DNA, 25 bp, probe
tcattgatagaactactttgaaaac

SEQ ID NO: 101054 - DNA, 25 bp, probe
gtcattgatagaactactttgaaaa

SEQ ID NO: 101055 - DNA, 25 bp, probe
ttgatagaactactttgaaaacaat

SEQ ID NO: 101056 - DNA, 25 bp, probe
attgatagaactactttgaaaacaa

SEQ ID NO: 101057 - DNA, 25 bp, probe
tgatagaactactttgaaaacaatt

SEQ ID NO: 101058 - DNA, 25 bp, probe
tagaactactttgaaaacaattcag

SEQ ID NO: 101059 - DNA, 25 bp, probe
ctgtagatgactacttgggccatcg

SEQ ID NO: 101060 - DNA, 25 bp, probe
gctgtagatgactacttgggccatc

SEQ ID NO: 101061 - DNA, 25 bp, probe
atagaactactttgaaaacaattca

SEQ ID NO: 101062 - DNA, 25 bp, probe
aactgttaccagatagtgtttgtac

SEQ ID NO: 101063 - DNA, 25 bp, probe
gactgtgtcttgactacctttcaaa

SEQ ID NO: 101064 - DNA, 25 bp, probe
aaactgttaccagatagtgtttgta

SEQ ID NO: 101065 - DNA, 25 bp, probe
cttccagatgccttcccagttgtaa

SEQ ID NO: 101066 - DNA, 25 bp, probe
cgactgtgtcttgactacctttcaa

SEQ ID NO: 101067 - DNA, 25 bp, probe
attgagacaggggagagagaaagac

SEQ ID NO: 101068 - DNA, 25 bp, probe
cattgagacaggggagagagaaaga

SEQ ID NO: 101069 - DNA, 25 bp, probe
ttccagatgccttcccagttgtaac

SEQ ID NO: 101070 - DNA, 25 bp, probe
tcattgagacaggggagagagaaag

SEQ ID NO: 101071 - DNA, 25 bp, probe
aaaactgttaccagatagtgtttgt

SEQ ID NO: 101072 - DNA, 25 bp, probe
acaggggagagagaaagacaaagag

SEQ ID NO: 101073 - DNA, 25 bp, probe
gacaggggagagagaaagacaaaga

SEQ ID NO: 101074 - DNA, 25 bp, probe
agacaggggagagagaaagacaaag

SEQ ID NO: 101075 - DNA, 25 bp, probe
gagacaggggagagagaaagacaaa

SEQ ID NO: 101076 - DNA, 25 bp, probe
gactacctttcaaaaccagcactgt

SEQ ID NO: 101077 - DNA, 25 bp, probe
ctgtgtcttgactacctttcaaaac

SEQ ID NO: 101078 - DNA, 25 bp, probe
actgtgtcttgactacctttcaaaa

SEQ ID NO: 101079 - DNA, 25 bp, probe
tgactacctttcaaaaccagcactg

SEQ ID NO: 101080 - DNA, 25 bp, probe
tgtcttgactacctttcaaaaccag

SEQ ID NO: 101081 - DNA, 25 bp, probe
ctacctttcaaaaccagcactgtgt

SEQ ID NO: 101082 - DNA, 25 bp, probe
actacctttcaaaaccagcactgtg

SEQ ID NO: 101083 - DNA, 25 bp, probe
gtgtcttgactacctttcaaaacca

SEQ ID NO: 101084 - DNA, 25 bp, probe
tgtgtcttgactacctttcaaaacc

SEQ ID NO: 101085 - DNA, 25 bp, probe
gcgactgtgtcttgactacctttca

SEQ ID NO: 101086 - DNA, 25 bp, probe
gagagagaaagacaaagaggggacc

SEQ ID NO: 101087 - DNA, 25 bp, probe
ggagagagaaagacaaagaggggac

SEQ ID NO: 101088 - DNA, 25 bp, probe
caggggagagagaaagacaaagagg

SEQ ID NO: 101089 - DNA, 25 bp, probe
ctcattgagacaggggagagagaaa

SEQ ID NO: 101090 - DNA, 25 bp, probe
taaaactgttaccagatagtgtttg

SEQ ID NO: 101091 - DNA, 25 bp, probe
gtaaaactgttaccagatagtgttt

SEQ ID NO: 101092 - DNA, 25 bp, probe
gtcttgactacctttcaaaaccagc

SEQ ID NO: 101093 - DNA, 25 bp, probe
agagaaagacaaagaggggaccttc

SEQ ID NO: 101094 - DNA, 25 bp, probe
gagagaaagacaaagaggggacctt

SEQ ID NO: 101095 - DNA, 25 bp, probe
gaaagacaaagaggggaccttcttc

SEQ ID NO: 101096 - DNA, 25 bp, probe
tgagacaggggagagagaaagacaa

SEQ ID NO: 101097 - DNA, 25 bp, probe
ttgagacaggggagagagaaagaca

SEQ ID NO: 101098 - DNA, 25 bp, probe
cttgactacctttcaaaaccagcac

SEQ ID NO: 101099 - DNA, 25 bp, probe
tcttgactacctttcaaaaccagca

SEQ ID NO: 101100 - DNA, 25 bp, probe
tacctttcaaaaccagcactgtgtg

SEQ ID NO: 101101 - DNA, 25 bp, probe
ttgactacctttcaaaaccagcact

SEQ ID NO: 101102 - DNA, 25 bp, probe
agaaagacaaagaggggaccttctt

SEQ ID NO: 101103 - DNA, 25 bp, probe
gagaaagacaaagaggggaccttct

SEQ ID NO: 101104 - DNA, 25 bp, probe
agagagaaagacaaagaggggacct

SEQ ID NO: 101105 - DNA, 25 bp, probe
gggagagagaaagacaaagagggga

SEQ ID NO: 101106 - DNA, 25 bp, probe
gtatgttactggttgttgttgttgt

SEQ ID NO: 101107 - DNA, 25 bp, probe
tatgttactggttgttgttgttgtt

SEQ ID NO: 101108 - DNA, 25 bp, probe
ttactggttgttgttgttgttcttg

SEQ ID NO: 101109 - DNA, 25 bp, probe
gttactggttgttgttgttgttctt

SEQ ID NO: 101110 - DNA, 25 bp, probe
atgttactggttgttgttgttgttc

SEQ ID NO: 101111 - DNA, 25 bp, probe
tagttggttgaagtagcaagatgtt

SEQ ID NO: 101112 - DNA, 25 bp, probe
tactggttgttgttgttgttcttgt

SEQ ID NO: 101113 - DNA, 25 bp, probe
tgttactggttgttgttgttgttct

SEQ ID NO: 101114 - DNA, 25 bp, probe
catacttgaacttgtctcattccac

SEQ ID NO: 101115 - DNA, 25 bp, probe
tcatacttgaacttgtctcattcca

SEQ ID NO: 101116 - DNA, 25 bp, probe
gtcatacttgaacttgtctcattcc

SEQ ID NO: 101117 - DNA, 25 bp, probe
atacttgaacttgtctcattccacc

SEQ ID NO: 101118 - DNA, 25 bp, probe
gtagttggttgaagtagcaagatgt

SEQ ID NO: 101119 - DNA, 25 bp, probe
cttctgtgtgcttatgtctcttgtg

SEQ ID NO: 101120 - DNA, 25 bp, probe
aatgaggtagttggttgaagtagca

SEQ ID NO: 101121 - DNA, 25 bp, probe
agtcatacttgaacttgtctcattc

SEQ ID NO: 101122 - DNA, 25 bp, probe
aagagttcttcagatcatagaccaa

SEQ ID NO: 101123 - DNA, 25 bp, probe
ggtagttggttgaagtagcaagatg

SEQ ID NO: 101124 - DNA, 25 bp, probe
aggtagttggttgaagtagcaagat

SEQ ID NO: 101125 - DNA, 25 bp, probe
caatgaggtagttggttgaagtagc

SEQ ID NO: 101126 - DNA, 25 bp, probe
caatactgaagacctcattctgtca

SEQ ID NO: 101127 - DNA, 25 bp, probe
actggttgttgttgttgttcttgtt

SEQ ID NO: 101128 - DNA, 25 bp, probe
ttctgtgtgcttatgtctcttgtga

SEQ ID NO: 101129 - DNA, 25 bp, probe
aatactgaagacctcattctgtcat

SEQ ID NO: 101130 - DNA, 25 bp, probe
agttggttgaagtagcaagatgttg

SEQ ID NO: 101131 - DNA, 25 bp, probe
tacttgaacttgtctcattccacct

SEQ ID NO: 101132 - DNA, 25 bp, probe
aacttgtctcattccacctcttctc

SEQ ID NO: 101133 - DNA, 25 bp, probe
cttagtcatacttgaacttgtctca

SEQ ID NO: 101134 - DNA, 25 bp, probe
atgaggtagttggttgaagtagcaa

SEQ ID NO: 101135 - DNA, 25 bp, probe
gaacttgtctcattccacctcttct

SEQ ID NO: 101136 - DNA, 25 bp, probe
tcttagtcatacttgaacttgtctc

SEQ ID NO: 101137 - DNA, 25 bp, probe
gcaatactgaagacctcattctgtc

SEQ ID NO: 101138 - DNA, 25 bp, probe
tccttctgtgtgcttatgtctcttg

SEQ ID NO: 101139 - DNA, 25 bp, probe
gtccttctgtgtgcttatgtctctt

SEQ ID NO: 101140 - DNA, 25 bp, probe
cttgtctcattccacctcttctcag

SEQ ID NO: 101141 - DNA, 25 bp, probe
ttgaacttgtctcattccacctctt

SEQ ID NO: 101142 - DNA, 25 bp, probe
gaggtagttggttgaagtagcaaga

SEQ ID NO: 101143 - DNA, 25 bp, probe
atactgaagacctcattctgtcatg

SEQ ID NO: 101144 - DNA, 25 bp, probe
agtatgttactggttgttgttgttg

SEQ ID NO: 101145 - DNA, 25 bp, probe
ccttctgtgtgcttatgtctcttgt

SEQ ID NO: 101146 - DNA, 25 bp, probe
tgaggtagttggttgaagtagcaag

SEQ ID NO: 101147 - DNA, 25 bp, probe
tagtcatacttgaacttgtctcatt

SEQ ID NO: 101148 - DNA, 25 bp, probe
ttagtcatacttgaacttgtctcat

SEQ ID NO: 101149 - DNA, 25 bp, probe
gttggttgaagtagcaagatgttgg

SEQ ID NO: 101150 - DNA, 25 bp, probe
atgtgtatctttctgtccctttctt

SEQ ID NO: 101151 - DNA, 25 bp, probe
tgtccctttcttcctgcttatattt

SEQ ID NO: 101152 - DNA, 25 bp, probe
ctgtccctttcttcctgcttatatt

SEQ ID NO: 101153 - DNA, 25 bp, probe
tgtgtatctttctgtccctttcttc

SEQ ID NO: 101154 - DNA, 25 bp, probe
gatgtgtatctttctgtccctttct

SEQ ID NO: 101155 - DNA, 25 bp, probe
tgatgtgtatctttctgtccctttc

SEQ ID NO: 101156 - DNA, 25 bp, probe
ctgatgtgtatctttctgtcccttt

SEQ ID NO: 101157 - DNA, 25 bp, probe
gtatctttctgtccctttcttcctg

SEQ ID NO: 101158 - DNA, 25 bp, probe
aagtcaacagcctgatgtgtatctt

SEQ ID NO: 101159 - DNA, 25 bp, probe
tctgtccctttcttcctgcttatat

SEQ ID NO: 101160 - DNA, 25 bp, probe
gtatgatgtatttctgatggaagcc

SEQ ID NO: 101161 - DNA, 25 bp, probe
ggtatgatgtatttctgatggaagc

SEQ ID NO: 101162 - DNA, 25 bp, probe
ttctgtccctttcttcctgcttata

SEQ ID NO: 101163 - DNA, 25 bp, probe
tgtatctttctgtccctttcttcct

SEQ ID NO: 101164 - DNA, 25 bp, probe
gtgtatctttctgtccctttcttcc

SEQ ID NO: 101165 - DNA, 25 bp, probe
tatataccctttacccaccagagac

SEQ ID NO: 101166 - DNA, 25 bp, probe
gtccctttcttcctgcttatattta

SEQ ID NO: 101167 - DNA, 25 bp, probe
tttctgtccctttcttcctgcttat

SEQ ID NO: 101168 - DNA, 25 bp, probe
tccctttcttcctgcttatatttag

SEQ ID NO: 101169 - DNA, 25 bp, probe
ataaagtcaacagcctgatgtgtat

SEQ ID NO: 101170 - DNA, 25 bp, probe
aataaagtcaacagcctgatgtgta

SEQ ID NO: 101171 - DNA, 25 bp, probe
taaataaagtcaacagcctgatgtg

SEQ ID NO: 101172 - DNA, 25 bp, probe
ctaaataaagtcaacagcctgatgt

SEQ ID NO: 101173 - DNA, 25 bp, probe
cctgatgtgtatctttctgtccctt

SEQ ID NO: 101174 - DNA, 25 bp, probe
taaagtcaacagcctgatgtgtatc

SEQ ID NO: 101175 - DNA, 25 bp, probe
atatattaataccggcttcctgtcc

SEQ ID NO: 101176 - DNA, 25 bp, probe
aggtatgatgtatttctgatggaag

SEQ ID NO: 101177 - DNA, 25 bp, probe
atataccctttacccaccagagaca

SEQ ID NO: 101178 - DNA, 25 bp, probe
tatctttctgtccctttcttcctgc

SEQ ID NO: 101179 - DNA, 25 bp, probe
aaataaagtcaacagcctgatgtgt

SEQ ID NO: 101180 - DNA, 25 bp, probe
ctttctgtccctttcttcctgctta

SEQ ID NO: 101181 - DNA, 25 bp, probe
ccaacaaccaagctaaataaagtca

SEQ ID NO: 101182 - DNA, 25 bp, probe
accaacaaccaagctaaataaagtc

SEQ ID NO: 101183 - DNA, 25 bp, probe
caccaacaaccaagctaaataaagt

SEQ ID NO: 101184 - DNA, 25 bp, probe
tcaccaacaaccaagctaaataaag

SEQ ID NO: 101185 - DNA, 25 bp, probe
gtcaccaacaaccaagctaaataaa

SEQ ID NO: 101186 - DNA, 25 bp, probe
aaggtatgatgtatttctgatggaa

SEQ ID NO: 101187 - DNA, 25 bp, probe
ccctttcttcctgcttatatttagg

SEQ ID NO: 101188 - DNA, 25 bp, probe
acaaccaagctaaataaagtcaaca

SEQ ID NO: 101189 - DNA, 25 bp, probe
tatgatgtatttctgatggaagcca

SEQ ID NO: 101190 - DNA, 25 bp, probe
caaccaagctaaataaagtcaacag

SEQ ID NO: 101191 - DNA, 25 bp, probe
tcaacagcctgatgtgtatctttct

SEQ ID NO: 101192 - DNA, 25 bp, probe
gtcaacagcctgatgtgtatctttc

SEQ ID NO: 101193 - DNA, 25 bp, probe
aatatattaataccggcttcctgtc

SEQ ID NO: 101194 - DNA, 25 bp, probe
ttatagttgctgccatagagttgat

SEQ ID NO: 101195 - DNA, 25 bp, probe
attatagttgctgccatagagttga

SEQ ID NO: 101196 - DNA, 25 bp, probe
gattattcaaccacagagccttatg

SEQ ID NO: 101197 - DNA, 25 bp, probe
tgtattatagttgctgccatagagt

SEQ ID NO: 101198 - DNA, 25 bp, probe
tatagttgctgccatagagttgatg

SEQ ID NO: 101199 - DNA, 25 bp, probe
attattcaaccacagagccttatgc

SEQ ID NO: 101200 - DNA, 25 bp, probe
tattatagttgctgccatagagttg

SEQ ID NO: 101201 - DNA, 25 bp, probe
gtattatagttgctgccatagagtt

SEQ ID NO: 101202 - DNA, 25 bp, probe
tgattattcaaccacagagccttat

SEQ ID NO: 101203 - DNA, 25 bp, probe
atattcacaacttgaccagattagc

SEQ ID NO: 101204 - DNA, 25 bp, probe
atgtattatagttgctgccatagag

SEQ ID NO: 101205 - DNA, 25 bp, probe
ctgattattcaaccacagagcctta

SEQ ID NO: 101206 - DNA, 25 bp, probe
ctgaagacaattaagtccgttatgt

SEQ ID NO: 101207 - DNA, 25 bp, probe
actgaagacaattaagtccgttatg

SEQ ID NO: 101208 - DNA, 25 bp, probe
attcgttgaggtaatggtgctatgt

SEQ ID NO: 101209 - DNA, 25 bp, probe
tgaagacaattaagtccgttatgtt

SEQ ID NO: 101210 - DNA, 25 bp, probe
ttcgttgaggtaatggtgctatgtt

SEQ ID NO: 101211 - DNA, 25 bp, probe
cgtactgaagacaattaagtccgtt

SEQ ID NO: 101212 - DNA, 25 bp, probe
tattcacaacttgaccagattagct

SEQ ID NO: 101213 - DNA, 25 bp, probe
gtactgaagacaattaagtccgtta

SEQ ID NO: 101214 - DNA, 25 bp, probe
tactgaagacaattaagtccgttat

SEQ ID NO: 101215 - DNA, 25 bp, probe
acatgatgttagtgttgaactctta

SEQ ID NO: 101216 - DNA, 25 bp, probe
ttaggttaaagagcatctgtcaaca

SEQ ID NO: 101217 - DNA, 25 bp, probe
tgtttaggttaaagagcatctgtca

SEQ ID NO: 101218 - DNA, 25 bp, probe
tttaggttaaagagcatctgtcaac

SEQ ID NO: 101219 - DNA, 25 bp, probe
gtttaggttaaagagcatctgtcaa

SEQ ID NO: 101220 - DNA, 25 bp, probe
attagttctctattctcctattgct

SEQ ID NO: 101221 - DNA, 25 bp, probe
atgtttaggttaaagagcatctgtc

SEQ ID NO: 101222 - DNA, 25 bp, probe
attctcctattgctaaatgtgtgat

SEQ ID NO: 101223 - DNA, 25 bp, probe
attcacaacttgaccagattagctg

SEQ ID NO: 101224 - DNA, 25 bp, probe
aacagcttatagaacttgaactact

SEQ ID NO: 101225 - DNA, 25 bp, probe
actaacagaattgctaaagaaatgc

SEQ ID NO: 101226 - DNA, 25 bp, probe
aggactaacagaattgctaaagaaa

SEQ ID NO: 101227 - DNA, 25 bp, probe
aaggactaacagaattgctaaagaa

SEQ ID NO: 101228 - DNA, 25 bp, probe
aaaggactaacagaattgctaaaga

SEQ ID NO: 101229 - DNA, 25 bp, probe
aatgtttaggttaaagagcatctgt

SEQ ID NO: 101230 - DNA, 25 bp, probe
tcacgtactgaagacaattaagtcc

SEQ ID NO: 101231 - DNA, 25 bp, probe
ctttcacatctgatttctgtatggg

SEQ ID NO: 101232 - DNA, 25 bp, probe
gctttcacatctgatttctgtatgg

SEQ ID NO: 101233 - DNA, 25 bp, probe
taattatctggaaccagcaatcatt

SEQ ID NO: 101234 - DNA, 25 bp, probe
ttaattatctggaaccagcaatcat

SEQ ID NO: 101235 - DNA, 25 bp, probe
ataagcctcctttacactgaataag

SEQ ID NO: 101236 - DNA, 25 bp, probe
atttgctgattattcaaccacagag

SEQ ID NO: 101237 - DNA, 25 bp, probe
ttgttcattcgttgaggtaatggtg

SEQ ID NO: 101238 - DNA, 25 bp, probe
gcagtatatcaagaggctagaagaa

SEQ ID NO: 101239 - DNA, 25 bp, probe
aagaggcaggagaagataacagaag

SEQ ID NO: 101240 - DNA, 25 bp, probe
gatggaagaggagaagacagagatg

SEQ ID NO: 101241 - DNA, 25 bp, probe
agatggaagaggagaagacagagat

SEQ ID NO: 101242 - DNA, 25 bp, probe
agaagagtgtcagaacaatcagtta

SEQ ID NO: 101243 - DNA, 25 bp, probe
cagaagagtgtcagaacaatcagtt

SEQ ID NO: 101244 - DNA, 25 bp, probe
gaagagtgtcagaacaatcagttaa

SEQ ID NO: 101245 - DNA, 25 bp, probe
tggaagaggagaagacagagatgat

SEQ ID NO: 101246 - DNA, 25 bp, probe
atggaagaggagaagacagagatga

SEQ ID NO: 101247 - DNA, 25 bp, probe
aataccagaagcgagaacatattaa

SEQ ID NO: 101248 - DNA, 25 bp, probe
cagtatatcaagaggctagaagaag

SEQ ID NO: 101249 - DNA, 25 bp, probe
ggaagaggagaagacagagatgatc

SEQ ID NO: 101250 - DNA, 25 bp, probe
cagatggaagaggagaagacagaga

SEQ ID NO: 101251 - DNA, 25 bp, probe
tcagatggaagaggagaagacagag

SEQ ID NO: 101252 - DNA, 25 bp, probe
tgcagtatatcaagaggctagaaga

SEQ ID NO: 101253 - DNA, 25 bp, probe
gtgcagtatatcaagaggctagaag

SEQ ID NO: 101254 - DNA, 25 bp, probe
atttgatactcctctgtgaatgctc

SEQ ID NO: 101255 - DNA, 25 bp, probe
accagaagcgagaacatattaaact

SEQ ID NO: 101256 - DNA, 25 bp, probe
aatttgatactcctctgtgaatgct

SEQ ID NO: 101257 - DNA, 25 bp, probe
gaatttgatactcctctgtgaatgc

SEQ ID NO: 101258 - DNA, 25 bp, probe
ttgatactcctctgtgaatgctcct

SEQ ID NO: 101259 - DNA, 25 bp, probe
taccagaagcgagaacatattaaac

SEQ ID NO: 101260 - DNA, 25 bp, probe
aaagaggcaggagaagataacagaa

SEQ ID NO: 101261 - DNA, 25 bp, probe
gaagaggagaagacagagatgatcc

SEQ ID NO: 101262 - DNA, 25 bp, probe
agtatatcaagaggctagaagaagc

SEQ ID NO: 101263 - DNA, 25 bp, probe
ggcaggagaagataacagaagctaa

SEQ ID NO: 101264 - DNA, 25 bp, probe
ggtgcagtatatcaagaggctagaa

SEQ ID NO: 101265 - DNA, 25 bp, probe
gtatatcaagaggctagaagaagcg

SEQ ID NO: 101266 - DNA, 25 bp, probe
actcgtagagaaacacaaggaaata

SEQ ID NO: 101267 - DNA, 25 bp, probe
aactcgtagagaaacacaaggaaat

SEQ ID NO: 101268 - DNA, 25 bp, probe
ctcgtagagaaacacaaggaaatac

SEQ ID NO: 101269 - DNA, 25 bp, probe
aggaagtggtgcagtatatcaagag

SEQ ID NO: 101270 - DNA, 25 bp, probe
aagtcagatggaagaggagaagaca

SEQ ID NO: 101271 - DNA, 25 bp, probe
aaactcgtagagaaacacaaggaaa

SEQ ID NO: 101272 - DNA, 25 bp, probe
tgtcagaacaatcagttaaagaagc

SEQ ID NO: 101273 - DNA, 25 bp, probe
agaatttgatactcctctgtgaatg

SEQ ID NO: 101274 - DNA, 25 bp, probe
gcgagaacatattaaactgcttatt

SEQ ID NO: 101275 - DNA, 25 bp, probe
ataccagaagcgagaacatattaaa

SEQ ID NO: 101276 - DNA, 25 bp, probe
caggaagtggtgcagtatatcaaga

SEQ ID NO: 101277 - DNA, 25 bp, probe
ccagaagcgagaacatattaaactg

SEQ ID NO: 101278 - DNA, 25 bp, probe
atgaaaggaaagatcagtgaagaca

SEQ ID NO: 101279 - DNA, 25 bp, probe
gagtgtcagaacaatcagttaaaga

SEQ ID NO: 101280 - DNA, 25 bp, probe
agagtgtcagaacaatcagttaaag

SEQ ID NO: 101281 - DNA, 25 bp, probe
cagaagcgagaacatattaaactgc

SEQ ID NO: 101282 - DNA, 25 bp, probe
cttgtaatagatgctgtggttggat

SEQ ID NO: 101283 - DNA, 25 bp, probe
ttgtaatagatgctgtggttggatc

SEQ ID NO: 101284 - DNA, 25 bp, probe
acttgtaatagatgctgtggttgga

SEQ ID NO: 101285 - DNA, 25 bp, probe
taatagatgctgtggttggatcaag

SEQ ID NO: 101286 - DNA, 25 bp, probe
gtaatagatgctgtggttggatcaa

SEQ ID NO: 101287 - DNA, 25 bp, probe
tgtaatagatgctgtggttggatca

SEQ ID NO: 101288 - DNA, 25 bp, probe
cacttgtaatagatgctgtggttgg

SEQ ID NO: 101289 - DNA, 25 bp, probe
aatagatgctgtggttggatcaagg

SEQ ID NO: 101290 - DNA, 25 bp, probe
ggtgtttgacatccacttgtaatag

SEQ ID NO: 101291 - DNA, 25 bp, probe
gtgtttgacatccacttgtaataga

SEQ ID NO: 101292 - DNA, 25 bp, probe
gggtgtttgacatccacttgtaata

SEQ ID NO: 101293 - DNA, 25 bp, probe
ttgacatccacttgtaatagatgct

SEQ ID NO: 101294 - DNA, 25 bp, probe
gacatccacttgtaatagatgctgt

SEQ ID NO: 101295 - DNA, 25 bp, probe
tgacatccacttgtaatagatgctg

SEQ ID NO: 101296 - DNA, 25 bp, probe
tgtttgacatccacttgtaatagat

SEQ ID NO: 101297 - DNA, 25 bp, probe
acatccacttgtaatagatgctgtg

SEQ ID NO: 101298 - DNA, 25 bp, probe
ctgtggttggatcaaggactcattc

SEQ ID NO: 101299 - DNA, 25 bp, probe
atagatgctgtggttggatcaagga

SEQ ID NO: 101300 - DNA, 25 bp, probe
ggatcagtatcagacggaggatgag

SEQ ID NO: 101301 - DNA, 25 bp, probe
ctaaggttgtacagactcttgtgaa

SEQ ID NO: 101302 - DNA, 25 bp, probe
aaggttgtacagactcttgtgaata

SEQ ID NO: 101303 - DNA, 25 bp, probe
taaggttgtacagactcttgtgaat

SEQ ID NO: 101304 - DNA, 25 bp, probe
aggttgtacagactcttgtgaatat

SEQ ID NO: 101305 - DNA, 25 bp, probe
ggttgtacagactcttgtgaatatt

SEQ ID NO: 101306 - DNA, 25 bp, probe
ctggatcagtatcagacggaggatg

SEQ ID NO: 101307 - DNA, 25 bp, probe
gatcagtatcagacggaggatgagc

SEQ ID NO: 101308 - DNA, 25 bp, probe
cctaaggttgtacagactcttgtga

SEQ ID NO: 101309 - DNA, 25 bp, probe
tggatcagtatcagacggaggatga

SEQ ID NO: 101310 - DNA, 25 bp, probe
ctcacggtgtctctggatcagtatc

SEQ ID NO: 101311 - DNA, 25 bp, probe
tagatgctgtggttggatcaaggac

SEQ ID NO: 101312 - DNA, 25 bp, probe
tttgacatccacttgtaatagatgc

SEQ ID NO: 101313 - DNA, 25 bp, probe
gagaaaatacttcaaccagagcagg

SEQ ID NO: 101314 - DNA, 25 bp, probe
ggagaaaatacttcaaccagagcag

SEQ ID NO: 101315 - DNA, 25 bp, probe
cacggtgtctctggatcagtatcag

SEQ ID NO: 101316 - DNA, 25 bp, probe
ctgccttggagaaaatacttcaacc

SEQ ID NO: 101317 - DNA, 25 bp, probe
cctgccttggagaaaatacttcaac

SEQ ID NO: 101318 - DNA, 25 bp, probe
gtatcagacggaggatgagctgtac

SEQ ID NO: 101319 - DNA, 25 bp, probe
attcctgccttggagaaaatacttc

SEQ ID NO: 101320 - DNA, 25 bp, probe
cttggagaaaatacttcaaccagag

SEQ ID NO: 101321 - DNA, 25 bp, probe
gtttgacatccacttgtaatagatg

SEQ ID NO: 101322 - DNA, 25 bp, probe
agtatcagacggaggatgagctgta

SEQ ID NO: 101323 - DNA, 25 bp, probe
aaaatacttcaaccagagcagggag

SEQ ID NO: 101324 - DNA, 25 bp, probe
ccttggagaaaatacttcaaccaga

SEQ ID NO: 101325 - DNA, 25 bp, probe
cattcctgccttggagaaaatactt

SEQ ID NO: 101326 - DNA, 25 bp, probe
ccagcttgaacatctagaattccta

SEQ ID NO: 101327 - DNA, 25 bp, probe
aagtccagcttgaacatctagaatt

SEQ ID NO: 101328 - DNA, 25 bp, probe
aagaaagaaagagacttgccatgaa

SEQ ID NO: 101329 - DNA, 25 bp, probe
agtccagcttgaacatctagaattc

SEQ ID NO: 101330 - DNA, 25 bp, probe
agaaagaaagagacttgccatgaag

SEQ ID NO: 101331 - DNA, 25 bp, probe
gaagaaagaaagagacttgccatga

SEQ ID NO: 101332 - DNA, 25 bp, probe
ggagttaaacagcagcaacactaaa

SEQ ID NO: 101333 - DNA, 25 bp, probe
tccagcttgaacatctagaattcct

SEQ ID NO: 101334 - DNA, 25 bp, probe
gtccagcttgaacatctagaattcc

SEQ ID NO: 101335 - DNA, 25 bp, probe
aattcctagagaaacagaatgagca

SEQ ID NO: 101336 - DNA, 25 bp, probe
attcctagagaaacagaatgagcag

SEQ ID NO: 101337 - DNA, 25 bp, probe
tctggaagaaagaaagagacttgcc

SEQ ID NO: 101338 - DNA, 25 bp, probe
ggaagaaagaaagagacttgccatg

SEQ ID NO: 101339 - DNA, 25 bp, probe
ttcctagagaaacagaatgagcagg

SEQ ID NO: 101340 - DNA, 25 bp, probe
gaaagaaagagacttgccatgaagc

SEQ ID NO: 101341 - DNA, 25 bp, probe
cagcttgaacatctagaattcctag

SEQ ID NO: 101342 - DNA, 25 bp, probe
ttctggaagaaagaaagagacttgc

SEQ ID NO: 101343 - DNA, 25 bp, probe
tggaagaaagaaagagacttgccat

SEQ ID NO: 101344 - DNA, 25 bp, probe
aaagtccagcttgaacatctagaat

SEQ ID NO: 101345 - DNA, 25 bp, probe
gagttaaacagcagcaacactaaaa

SEQ ID NO: 101346 - DNA, 25 bp, probe
aagaataaagcagaacgggaaaggc

SEQ ID NO: 101347 - DNA, 25 bp, probe
gggagttaaacagcagcaacactaa

SEQ ID NO: 101348 - DNA, 25 bp, probe
ctggaagaaagaaagagacttgcca

SEQ ID NO: 101349 - DNA, 25 bp, probe
tagagaaacagaatgagcaggcgaa

SEQ ID NO: 101350 - DNA, 25 bp, probe
gaattcctagagaaacagaatgagc

SEQ ID NO: 101351 - DNA, 25 bp, probe
gatggtgaaattggaagccgagatg

SEQ ID NO: 101352 - DNA, 25 bp, probe
agatggtgaaattggaagccgagat

SEQ ID NO: 101353 - DNA, 25 bp, probe
agggagttaaacagcagcaacacta

SEQ ID NO: 101354 - DNA, 25 bp, probe
ctagagaaacagaatgagcaggcga

SEQ ID NO: 101355 - DNA, 25 bp, probe
agaattcctagagaaacagaatgag

SEQ ID NO: 101356 - DNA, 25 bp, probe
tcctagagaaacagaatgagcaggc

SEQ ID NO: 101357 - DNA, 25 bp, probe
aaaggcgagtcagggagttaaacag

SEQ ID NO: 101358 - DNA, 25 bp, probe
gaaaggcgagtcagggagttaaaca

SEQ ID NO: 101359 - DNA, 25 bp, probe
aaagaaagagacttgccatgaagca

SEQ ID NO: 101360 - DNA, 25 bp, probe
aaaagtccagcttgaacatctagaa

SEQ ID NO: 101361 - DNA, 25 bp, probe
atgcagcagatggtgaaattggaag

SEQ ID NO: 101362 - DNA, 25 bp, probe
gatgcagcagatggtgaaattggaa

SEQ ID NO: 101363 - DNA, 25 bp, probe
gagtcagggagttaaacagcagcaa

SEQ ID NO: 101364 - DNA, 25 bp, probe
agagaaacagaatgagcaggcgaag

SEQ ID NO: 101365 - DNA, 25 bp, probe
gtccaaagaaatggatcagttgaaa

SEQ ID NO: 101366 - DNA, 25 bp, probe
aagaaagagacttgccatgaagcag

SEQ ID NO: 101367 - DNA, 25 bp, probe
cagatggtgaaattggaagccgaga

SEQ ID NO: 101368 - DNA, 25 bp, probe
agtccaaagaaatggatcagttgaa

SEQ ID NO: 101369 - DNA, 25 bp, probe
ttgccatgaagcagtccaaagaaat

SEQ ID NO: 101370 - DNA, 25 bp, probe
gaggaagagaacacaaggaatgatt

SEQ ID NO: 101371 - DNA, 25 bp, probe
ttattcagaacgaggaagagaacac

SEQ ID NO: 101372 - DNA, 25 bp, probe
agagaacacaaggaatgattcaaga

SEQ ID NO: 101373 - DNA, 25 bp, probe
atattgtgtgtctcatctgtgaact

SEQ ID NO: 101374 - DNA, 25 bp, probe
aagagaacacaaggaatgattcaag

SEQ ID NO: 101375 - DNA, 25 bp, probe
gaagagaacacaaggaatgattcaa

SEQ ID NO: 101376 - DNA, 25 bp, probe
tgtatattgtgtgtctcatctgtga

SEQ ID NO: 101377 - DNA, 25 bp, probe
gagaacacaaggaatgattcaagat

SEQ ID NO: 101378 - DNA, 25 bp, probe
aggaagagaacacaaggaatgattc

SEQ ID NO: 101379 - DNA, 25 bp, probe
atgtatattgtgtgtctcatctgtg

SEQ ID NO: 101380 - DNA, 25 bp, probe
catcaatcaagattctaggtctcca

SEQ ID NO: 101381 - DNA, 25 bp, probe
agcatcaatcaagattctaggtctc

SEQ ID NO: 101382 - DNA, 25 bp, probe
tattcagaacgaggaagagaacaca

SEQ ID NO: 101383 - DNA, 25 bp, probe
tattgtgtgtctcatctgtgaactg

SEQ ID NO: 101384 - DNA, 25 bp, probe
ggaagagaacacaaggaatgattca

SEQ ID NO: 101385 - DNA, 25 bp, probe
atcaatcaagattctaggtctccaa

SEQ ID NO: 101386 - DNA, 25 bp, probe
gcatcaatcaagattctaggtctcc

SEQ ID NO: 101387 - DNA, 25 bp, probe
tagcatcaatcaagattctaggtct

SEQ ID NO: 101388 - DNA, 25 bp, probe
agaacacaaggaatgattcaagatc

SEQ ID NO: 101389 - DNA, 25 bp, probe
tatattgtgtgtctcatctgtgaac

SEQ ID NO: 101390 - DNA, 25 bp, probe
gtatattgtgtgtctcatctgtgaa

SEQ ID NO: 101391 - DNA, 25 bp, probe
ttagcatcaatcaagattctaggtc

SEQ ID NO: 101392 - DNA, 25 bp, probe
aatgtatattgtgtgtctcatctgt

SEQ ID NO: 101393 - DNA, 25 bp, probe
attcagaacgaggaagagaacacaa

SEQ ID NO: 101394 - DNA, 25 bp, probe
cgaggaagagaacacaaggaatgat

SEQ ID NO: 101395 - DNA, 25 bp, probe
attagcatcaatcaagattctaggt

SEQ ID NO: 101396 - DNA, 25 bp, probe
gaacacaaggaatgattcaagatcc

SEQ ID NO: 101397 - DNA, 25 bp, probe
gaacgaggaagagaacacaaggaat

SEQ ID NO: 101398 - DNA, 25 bp, probe
aacacaaggaatgattcaagatcca

SEQ ID NO: 101399 - DNA, 25 bp, probe
tttcagtcttggcatttcatttagg

SEQ ID NO: 101400 - DNA, 25 bp, probe
tcagtcttggcatttcatttaggat

SEQ ID NO: 101401 - DNA, 25 bp, probe
gtctttcagtcttggcatttcattt

SEQ ID NO: 101402 - DNA, 25 bp, probe
ttcagaacgaggaagagaacacaag

SEQ ID NO: 101403 - DNA, 25 bp, probe
ttcagtcttggcatttcatttagga

SEQ ID NO: 101404 - DNA, 25 bp, probe
tatttctgcctttaatctcccacaa

SEQ ID NO: 101405 - DNA, 25 bp, probe
ttatttctgcctttaatctcccaca

SEQ ID NO: 101406 - DNA, 25 bp, probe
cttatttctgcctttaatctcccac

SEQ ID NO: 101407 - DNA, 25 bp, probe
ccttatttctgcctttaatctccca

SEQ ID NO: 101408 - DNA, 25 bp, probe
aacgaggaagagaacacaaggaatg

SEQ ID NO: 101409 - DNA, 25 bp, probe
tctttcagtcttggcatttcattta

SEQ ID NO: 101410 - DNA, 25 bp, probe
gatttgattgaatgtttgctgaagt

SEQ ID NO: 101411 - DNA, 25 bp, probe
tttattcagaacgaggaagagaaca

SEQ ID NO: 101412 - DNA, 25 bp, probe
atctgtgaactgctttctgctatat

SEQ ID NO: 101413 - DNA, 25 bp, probe
acacaaggaatgattcaagatccac

SEQ ID NO: 101414 - DNA, 25 bp, probe
ggaagttgtgtcttatggagagaga

SEQ ID NO: 101415 - DNA, 25 bp, probe
aatagtaatgtgggaagttgtgtct

SEQ ID NO: 101416 - DNA, 25 bp, probe
gaatagtaatgtgggaagttgtgtc

SEQ ID NO: 101417 - DNA, 25 bp, probe
ggaatagtaatgtgggaagttgtgt

SEQ ID NO: 101418 - DNA, 25 bp, probe
gtaatgtgggaagttgtgtcttatg

SEQ ID NO: 101419 - DNA, 25 bp, probe
agtaatgtgggaagttgtgtcttat

SEQ ID NO: 101420 - DNA, 25 bp, probe
atagtaatgtgggaagttgtgtctt

SEQ ID NO: 101421 - DNA, 25 bp, probe
taatgtgggaagttgtgtcttatgg

SEQ ID NO: 101422 - DNA, 25 bp, probe
tagtaatgtgggaagttgtgtctta

SEQ ID NO: 101423 - DNA, 25 bp, probe
gatgtgattaaagcggtagaggaag

SEQ ID NO: 101424 - DNA, 25 bp, probe
agatgtgattaaagcggtagaggaa

SEQ ID NO: 101425 - DNA, 25 bp, probe
aagatgtgattaaagcggtagagga

SEQ ID NO: 101426 - DNA, 25 bp, probe
caagatgtgattaaagcggtagagg

SEQ ID NO: 101427 - DNA, 25 bp, probe
tcaagatgtgattaaagcggtagag

SEQ ID NO: 101428 - DNA, 25 bp, probe
aatgtgggaagttgtgtcttatgga

SEQ ID NO: 101429 - DNA, 25 bp, probe
atgtgattaaagcggtagaggaagg

SEQ ID NO: 101430 - DNA, 25 bp, probe
gggaagttgtgtcttatggagagag

SEQ ID NO: 101431 - DNA, 25 bp, probe
atgtgggaagttgtgtcttatggag

SEQ ID NO: 101432 - DNA, 25 bp, probe
tgggaagttgtgtcttatggagaga

SEQ ID NO: 101433 - DNA, 25 bp, probe
gtgggaagttgtgtcttatggagag

SEQ ID NO: 101434 - DNA, 25 bp, probe
ctactgggagatgaccaatcaagat

SEQ ID NO: 101435 - DNA, 25 bp, probe
tactgggagatgaccaatcaagatg

SEQ ID NO: 101436 - DNA, 25 bp, probe
gaagttgtgtcttatggagagagac

SEQ ID NO: 101437 - DNA, 25 bp, probe
atcaagatgtgattaaagcggtaga

SEQ ID NO: 101438 - DNA, 25 bp, probe
tgtgggaagttgtgtcttatggaga

SEQ ID NO: 101439 - DNA, 25 bp, probe
aagttgtgtcttatggagagagacc

SEQ ID NO: 101440 - DNA, 25 bp, probe
attaaagcggtagaggaaggctatc

SEQ ID NO: 101441 - DNA, 25 bp, probe
gattaaagcggtagaggaaggctat

SEQ ID NO: 101442 - DNA, 25 bp, probe
ctgggagatgaccaatcaagatgtg

SEQ ID NO: 101443 - DNA, 25 bp, probe
gggagatgaccaatcaagatgtgat

SEQ ID NO: 101444 - DNA, 25 bp, probe
catggattgtcctgctgctctctat

SEQ ID NO: 101445 - DNA, 25 bp, probe
cctactgggagatgaccaatcaaga

SEQ ID NO: 101446 - DNA, 25 bp, probe
tgggagatgaccaatcaagatgtga

SEQ ID NO: 101447 - DNA, 25 bp, probe
actgggagatgaccaatcaagatgt

SEQ ID NO: 101448 - DNA, 25 bp, probe
tgattaaagcggtagaggaaggcta

SEQ ID NO: 101449 - DNA, 25 bp, probe
tgtgattaaagcggtagaggaaggc

SEQ ID NO: 101450 - DNA, 25 bp, probe
ggagatgaccaatcaagatgtgatt

SEQ ID NO: 101451 - DNA, 25 bp, probe
ttgtgtcttatggagagagacccta

SEQ ID NO: 101452 - DNA, 25 bp, probe
gagatgaccaatcaagatgtgatta

SEQ ID NO: 101453 - DNA, 25 bp, probe
tgtcttatggagagagaccctactg

SEQ ID NO: 101454 - DNA, 25 bp, probe
gtgtcttatggagagagaccctact

SEQ ID NO: 101455 - DNA, 25 bp, probe
agatgaccaatcaagatgtgattaa

SEQ ID NO: 101456 - DNA, 25 bp, probe
tgtgtcttatggagagagaccctac

SEQ ID NO: 101457 - DNA, 25 bp, probe
ttaaagcggtagaggaaggctatcg

SEQ ID NO: 101458 - DNA, 25 bp, probe
ttaatacaatactcctcacctcagc

SEQ ID NO: 101459 - DNA, 25 bp, probe
gaagagcaagatgatgaagaagttc

SEQ ID NO: 101460 - DNA, 25 bp, probe
ggaagagcaagatgatgaagaagtt

SEQ ID NO: 101461 - DNA, 25 bp, probe
gtagatacttctgatggattctcgg

SEQ ID NO: 101462 - DNA, 25 bp, probe
ctgaagatgaggaagaagaggagaa

SEQ ID NO: 101463 - DNA, 25 bp, probe
gaggaagagcaagatgatgaagaag

SEQ ID NO: 101464 - DNA, 25 bp, probe
gaagaggaagagcaagatgatgaag

SEQ ID NO: 101465 - DNA, 25 bp, probe
taatacaatactcctcacctcagcc

SEQ ID NO: 101466 - DNA, 25 bp, probe
agaggaagagcaagatgatgaagaa

SEQ ID NO: 101467 - DNA, 25 bp, probe
aagaggaagagcaagatgatgaaga

SEQ ID NO: 101468 - DNA, 25 bp, probe
tacttctgatggattctcggcatta

SEQ ID NO: 101469 - DNA, 25 bp, probe
tcttaatacaatactcctcacctca

SEQ ID NO: 101470 - DNA, 25 bp, probe
aggaagagcaagatgatgaagaagt

SEQ ID NO: 101471 - DNA, 25 bp, probe
tgaagaggaagagcaagatgatgaa

SEQ ID NO: 101472 - DNA, 25 bp, probe
aagagcaagatgatgaagaagttct

SEQ ID NO: 101473 - DNA, 25 bp, probe
tagatacttctgatggattctcggc

SEQ ID NO: 101474 - DNA, 25 bp, probe
cttaatacaatactcctcacctcag

SEQ ID NO: 101475 - DNA, 25 bp, probe
agtagatacttctgatggattctcg

SEQ ID NO: 101476 - DNA, 25 bp, probe
cttctgatggattctcggcattaac

SEQ ID NO: 101477 - DNA, 25 bp, probe
atacttctgatggattctcggcatt

SEQ ID NO: 101478 - DNA, 25 bp, probe
tctgaagatgaggaagaagaggaga

SEQ ID NO: 101479 - DNA, 25 bp, probe
ttctgatggattctcggcattaact

SEQ ID NO: 101480 - DNA, 25 bp, probe
acttctgatggattctcggcattaa

SEQ ID NO: 101481 - DNA, 25 bp, probe
gtgaagaggaagagcaagatgatga

SEQ ID NO: 101482 - DNA, 25 bp, probe
agtgaagaggaagagcaagatgatg

SEQ ID NO: 101483 - DNA, 25 bp, probe
cagtgaagaggaagagcaagatgat

SEQ ID NO: 101484 - DNA, 25 bp, probe
ctgattctgattatgagcaggctaa

SEQ ID NO: 101485 - DNA, 25 bp, probe
gatacttctgatggattctcggcat

SEQ ID NO: 101486 - DNA, 25 bp, probe
tctgattctgattatgagcaggcta

SEQ ID NO: 101487 - DNA, 25 bp, probe
tctgatggattctcggcattaactc

SEQ ID NO: 101488 - DNA, 25 bp, probe
acagtagatacttctgatggattct

SEQ ID NO: 101489 - DNA, 25 bp, probe
atcttaatacaatactcctcacctc

SEQ ID NO: 101490 - DNA, 25 bp, probe
tgctccatttccttctaaacagtag

SEQ ID NO: 101491 - DNA, 25 bp, probe
gaagatgaggaagaagaggagaaac

SEQ ID NO: 101492 - DNA, 25 bp, probe
cagtagatacttctgatggattctc

SEQ ID NO: 101493 - DNA, 25 bp, probe
gtcattccatagtgcagatgtattg

SEQ ID NO: 101494 - DNA, 25 bp, probe
tgaagatgaggaagaagaggagaaa

SEQ ID NO: 101495 - DNA, 25 bp, probe
aagaagactttgaagcctacctatc

SEQ ID NO: 101496 - DNA, 25 bp, probe
ggtcattccatagtgcagatgtatt

SEQ ID NO: 101497 - DNA, 25 bp, probe
cattccatagtgcagatgtattgaa

SEQ ID NO: 101498 - DNA, 25 bp, probe
atgaggaagaagaggagaaacatag

SEQ ID NO: 101499 - DNA, 25 bp, probe
gatgaggaagaagaggagaaacata

SEQ ID NO: 101500 - DNA, 25 bp, probe
aagatgaggaagaagaggagaaaca

SEQ ID NO: 101501 - DNA, 25 bp, probe
ggaatgtcttacaacctgaggagag

SEQ ID NO: 101502 - DNA, 25 bp, probe
agaggatgagtaccagttctgttac

SEQ ID NO: 101503 - DNA, 25 bp, probe
gaggatgagtaccagttctgttacc

SEQ ID NO: 101504 - DNA, 25 bp, probe
aggatgagtaccagttctgttacca

SEQ ID NO: 101505 - DNA, 25 bp, probe
gatgagtaccagttctgttaccagg

SEQ ID NO: 101506 - DNA, 25 bp, probe
ggatgagtaccagttctgttaccag

SEQ ID NO: 101507 - DNA, 25 bp, probe
cagacagaggatgagtaccagttct

SEQ ID NO: 101508 - DNA, 25 bp, probe
cagaggatgagtaccagttctgtta

SEQ ID NO: 101509 - DNA, 25 bp, probe
gcagacagaggatgagtaccagttc

SEQ ID NO: 101510 - DNA, 25 bp, probe
aagtgcataagactaaggagcagtt

SEQ ID NO: 101511 - DNA, 25 bp, probe
atgagtaccagttctgttaccaggc

SEQ ID NO: 101512 - DNA, 25 bp, probe
agctttgaccactatgcaacctaaa

SEQ ID NO: 101513 - DNA, 25 bp, probe
caagtgcataagactaaggagcagt

SEQ ID NO: 101514 - DNA, 25 bp, probe
gcataagactaaggagcagtttggc

SEQ ID NO: 101515 - DNA, 25 bp, probe
ccaagtgcataagactaaggagcag

SEQ ID NO: 101516 - DNA, 25 bp, probe
agacagaggatgagtaccagttctg

SEQ ID NO: 101517 - DNA, 25 bp, probe
ctttgaccactatgcaacctaaagc

SEQ ID NO: 101518 - DNA, 25 bp, probe
gctttgaccactatgcaacctaaag

SEQ ID NO: 101519 - DNA, 25 bp, probe
tttgaccactatgcaacctaaagcc

SEQ ID NO: 101520 - DNA, 25 bp, probe
gtgcataagactaaggagcagtttg

SEQ ID NO: 101521 - DNA, 25 bp, probe
agtgcataagactaaggagcagttt

SEQ ID NO: 101522 - DNA, 25 bp, probe
catggtgcagacagaggatgagtac

SEQ ID NO: 101523 - DNA, 25 bp, probe
gaccactatgcaacctaaagccatg

SEQ ID NO: 101524 - DNA, 25 bp, probe
tgcagacagaggatgagtaccagtt

SEQ ID NO: 101525 - DNA, 25 bp, probe
tatgaaggcgtggtggacatctttc

SEQ ID NO: 101526 - DNA, 25 bp, probe
cataagactaaggagcagtttggcc

SEQ ID NO: 101527 - DNA, 25 bp, probe
tgcataagactaaggagcagtttgg

SEQ ID NO: 101528 - DNA, 25 bp, probe
gtatgaaggcgtggtggacatcttt

SEQ ID NO: 101529 - DNA, 25 bp, probe
tgaccactatgcaacctaaagccat

SEQ ID NO: 101530 - DNA, 25 bp, probe
aagctttgaccactatgcaacctaa

SEQ ID NO: 101531 - DNA, 25 bp, probe
ttcagacggtgaagatgctacgaac

SEQ ID NO: 101532 - DNA, 25 bp, probe
ttgaccactatgcaacctaaagcca

SEQ ID NO: 101533 - DNA, 25 bp, probe
gaagctttgaccactatgcaaccta

SEQ ID NO: 101534 - DNA, 25 bp, probe
ccttcaaatacttggcacattcccc

SEQ ID NO: 101535 - DNA, 25 bp, probe
tttcagacggtgaagatgctacgaa

SEQ ID NO: 101536 - DNA, 25 bp, probe
gtggacatctttcagacggtgaaga

SEQ ID NO: 101537 - DNA, 25 bp, probe
atctttcagacggtgaagatgctac

SEQ ID NO: 101538 - DNA, 25 bp, probe
ctttcagacggtgaagatgctacga

SEQ ID NO: 101539 - DNA, 25 bp, probe
tctttcagacggtgaagatgctacg

SEQ ID NO: 101540 - DNA, 25 bp, probe
gccaagtgcataagactaaggagca

SEQ ID NO: 101541 - DNA, 25 bp, probe
tacctcggaagctttgaccactatg

SEQ ID NO: 101542 - DNA, 25 bp, probe
gtacctcggaagctttgaccactat

SEQ ID NO: 101543 - DNA, 25 bp, probe
tggacatctttcagacggtgaagat

SEQ ID NO: 101544 - DNA, 25 bp, probe
gccttcaaatacttggcacattccc

SEQ ID NO: 101545 - DNA, 25 bp, probe
cgccttcaaatacttggcacattcc

SEQ ID NO: 101546 - DNA, 25 bp, probe
gaggttacttgtatatcgctattga

SEQ ID NO: 101547 - DNA, 25 bp, probe
gaactacagtgtctataccaccaag

SEQ ID NO: 101548 - DNA, 25 bp, probe
cttgtatatcgctattgaatatgcc

SEQ ID NO: 101549 - DNA, 25 bp, probe
aactacagtgtctataccaccaaga

SEQ ID NO: 101550 - DNA, 25 bp, probe
tgaactacagtgtctataccaccaa

SEQ ID NO: 101551 - DNA, 25 bp, probe
aggttacttgtatatcgctattgaa

SEQ ID NO: 101552 - DNA, 25 bp, probe
ctacagtgtctataccaccaagagt

SEQ ID NO: 101553 - DNA, 25 bp, probe
actacagtgtctataccaccaagag

SEQ ID NO: 101554 - DNA, 25 bp, probe
tctataccaccaagagtgatgtctg

SEQ ID NO: 101555 - DNA, 25 bp, probe
gtctataccaccaagagtgatgtct

SEQ ID NO: 101556 - DNA, 25 bp, probe
tacagtgtctataccaccaagagtg

SEQ ID NO: 101557 - DNA, 25 bp, probe
ctgaactacagtgtctataccacca

SEQ ID NO: 101558 - DNA, 25 bp, probe
tgtctataccaccaagagtgatgtc

SEQ ID NO: 101559 - DNA, 25 bp, probe
agtgtctataccaccaagagtgatg

SEQ ID NO: 101560 - DNA, 25 bp, probe
cagtgtctataccaccaagagtgat

SEQ ID NO: 101561 - DNA, 25 bp, probe
acttgtatatcgctattgaatatgc

SEQ ID NO: 101562 - DNA, 25 bp, probe
gagaggaggtttatgtgaagaagac

SEQ ID NO: 101563 - DNA, 25 bp, probe
gtgtctataccaccaagagtgatgt

SEQ ID NO: 101564 - DNA, 25 bp, probe
cctgaactacagtgtctataccacc

SEQ ID NO: 101565 - DNA, 25 bp, probe
ctgtaagaaccgaggttacttgtat

SEQ ID NO: 101566 - DNA, 25 bp, probe
ttgtatatcgctattgaatatgccc

SEQ ID NO: 101567 - DNA, 25 bp, probe
ggttacttgtatatcgctattgaat

SEQ ID NO: 101568 - DNA, 25 bp, probe
gaggtttatgtgaagaagacgatgg

SEQ ID NO: 101569 - DNA, 25 bp, probe
ggaggtttatgtgaagaagacgatg

SEQ ID NO: 101570 - DNA, 25 bp, probe
aggaggtttatgtgaagaagacgat

SEQ ID NO: 101571 - DNA, 25 bp, probe
ggagaggaggtttatgtgaagaaga

SEQ ID NO: 101572 - DNA, 25 bp, probe
ccgaggttacttgtatatcgctatt

SEQ ID NO: 101573 - DNA, 25 bp, probe
tgtaagaaccgaggttacttgtata

SEQ ID NO: 101574 - DNA, 25 bp, probe
cgaggttacttgtatatcgctattg

SEQ ID NO: 101575 - DNA, 25 bp, probe
taagaaccgaggttacttgtatatc

SEQ ID NO: 101576 - DNA, 25 bp, probe
accgaggttacttgtatatcgctat

SEQ ID NO: 101577 - DNA, 25 bp, probe
ctataccaccaagagtgatgtctgg

SEQ ID NO: 101578 - DNA, 25 bp, probe
acagtgtctataccaccaagagtga

SEQ ID NO: 101579 - DNA, 25 bp, probe
gaggaggtttatgtgaagaagacga

SEQ ID NO: 101580 - DNA, 25 bp, probe
agaggaggtttatgtgaagaagacg

SEQ ID NO: 101581 - DNA, 25 bp, probe
cctgtaagaaccgaggttacttgta

SEQ ID NO: 101582 - DNA, 25 bp, probe
gagtccctgaactacagtgtctata

SEQ ID NO: 101583 - DNA, 25 bp, probe
aagaaccgaggttacttgtatatcg

SEQ ID NO: 101584 - DNA, 25 bp, probe
agtccctgaactacagtgtctatac

SEQ ID NO: 101585 - DNA, 25 bp, probe
ctatcctgggcatccttctttctag

SEQ ID NO: 101586 - DNA, 25 bp, probe
gggagaggaggtttatgtgaagaag

SEQ ID NO: 101587 - DNA, 25 bp, probe
gtaagaaccgaggttacttgtatat

SEQ ID NO: 101588 - DNA, 25 bp, probe
aaccgaggttacttgtatatcgcta

SEQ ID NO: 101589 - DNA, 25 bp, probe
aggtttatgtgaagaagacgatggg

SEQ ID NO: 101590 - DNA, 25 bp, probe
cttgctcaggattacagatatggac

SEQ ID NO: 101591 - DNA, 25 bp, probe
taaggttcttcttgctcaggattac

SEQ ID NO: 101592 - DNA, 25 bp, probe
ttaaggttcttcttgctcaggatta

SEQ ID NO: 101593 - DNA, 25 bp, probe
ttcttgctcaggattacagatatgg

SEQ ID NO: 101594 - DNA, 25 bp, probe
aagcctagagagtcaatgttagaac

SEQ ID NO: 101595 - DNA, 25 bp, probe
ctcaggattacagatatggaccaac

SEQ ID NO: 101596 - DNA, 25 bp, probe
gttcttcttgctcaggattacagat

SEQ ID NO: 101597 - DNA, 25 bp, probe
tgtaatctgatatggaaggatagca

SEQ ID NO: 101598 - DNA, 25 bp, probe
gattacagatatggaccaacacctc

SEQ ID NO: 101599 - DNA, 25 bp, probe
tcttgctcaggattacagatatgga

SEQ ID NO: 101600 - DNA, 25 bp, probe
ttcttcttgctcaggattacagata

SEQ ID NO: 101601 - DNA, 25 bp, probe
cttcttgctcaggattacagatatg

SEQ ID NO: 101602 - DNA, 25 bp, probe
caggattacagatatggaccaacac

SEQ ID NO: 101603 - DNA, 25 bp, probe
tcaggattacagatatggaccaaca

SEQ ID NO: 101604 - DNA, 25 bp, probe
tcttcttgctcaggattacagatat

SEQ ID NO: 101605 - DNA, 25 bp, probe
taagcctagagagtcaatgttagaa

SEQ ID NO: 101606 - DNA, 25 bp, probe
ttgctcaggattacagatatggacc

SEQ ID NO: 101607 - DNA, 25 bp, probe
taatctgatatggaaggatagcagc

SEQ ID NO: 101608 - DNA, 25 bp, probe
aaggttcttcttgctcaggattaca

SEQ ID NO: 101609 - DNA, 25 bp, probe
ggattacagatatggaccaacacct

SEQ ID NO: 101610 - DNA, 25 bp, probe
aggattacagatatggaccaacacc

SEQ ID NO: 101611 - DNA, 25 bp, probe
ttaattagaaggtggaggagtcatt

SEQ ID NO: 101612 - DNA, 25 bp, probe
aggttcttcttgctcaggattacag

SEQ ID NO: 101613 - DNA, 25 bp, probe
gctcaggattacagatatggaccaa

SEQ ID NO: 101614 - DNA, 25 bp, probe
atgtaatctgatatggaaggatagc

SEQ ID NO: 101615 - DNA, 25 bp, probe
actaagcctagagagtcaatgttag

SEQ ID NO: 101616 - DNA, 25 bp, probe
ctaagcctagagagtcaatgttaga

SEQ ID NO: 101617 - DNA, 25 bp, probe
tagactaaggagactaagcctagag

SEQ ID NO: 101618 - DNA, 25 bp, probe
cgattagactaaggagactaagcct

SEQ ID NO: 101619 - DNA, 25 bp, probe
agttccgattagactaaggagacta

SEQ ID NO: 101620 - DNA, 25 bp, probe
ctacacatcctgagctaagacatac

SEQ ID NO: 101621 - DNA, 25 bp, probe
gtggagagcctcttctacaactata

SEQ ID NO: 101622 - DNA, 25 bp, probe
agagagtcaatgttagaacagtgaa

SEQ ID NO: 101623 - DNA, 25 bp, probe
gactaaggagactaagcctagagag

SEQ ID NO: 101624 - DNA, 25 bp, probe
cctagagagtcaatgttagaacagt

SEQ ID NO: 101625 - DNA, 25 bp, probe
ggttcttcttgctcaggattacaga

SEQ ID NO: 101626 - DNA, 25 bp, probe
tacacatcctgagctaagacatact

SEQ ID NO: 101627 - DNA, 25 bp, probe
gcatgagtatatgttcttggaatca

SEQ ID NO: 101628 - DNA, 25 bp, probe
ttagactaaggagactaagcctaga

SEQ ID NO: 101629 - DNA, 25 bp, probe
gcctagagagtcaatgttagaacag

SEQ ID NO: 101630 - DNA, 25 bp, probe
agactaaggagactaagcctagaga

SEQ ID NO: 101631 - DNA, 25 bp, probe
agcctagagagtcaatgttagaaca

SEQ ID NO: 101632 - DNA, 25 bp, probe
tccgattagactaaggagactaagc

SEQ ID NO: 101633 - DNA, 25 bp, probe
gttccgattagactaaggagactaa

SEQ ID NO: 101634 - DNA, 25 bp, probe
aatgagaagaccttggagcactata

SEQ ID NO: 101635 - DNA, 25 bp, probe
cagaggattatggcaatgagaagac

SEQ ID NO: 101636 - DNA, 25 bp, probe
atgagaagaccttggagcactatac

SEQ ID NO: 101637 - DNA, 25 bp, probe
tcagaggattatggcaatgagaaga

SEQ ID NO: 101638 - DNA, 25 bp, probe
agaggattatggcaatgagaagacc

SEQ ID NO: 101639 - DNA, 25 bp, probe
gattatggcaatgagaagaccttgg

SEQ ID NO: 101640 - DNA, 25 bp, probe
ggattatggcaatgagaagaccttg

SEQ ID NO: 101641 - DNA, 25 bp, probe
attatggcaatgagaagaccttgga

SEQ ID NO: 101642 - DNA, 25 bp, probe
tgtatgatgcctgtatggagacatt

SEQ ID NO: 101643 - DNA, 25 bp, probe
caatgagaagaccttggagcactat

SEQ ID NO: 101644 - DNA, 25 bp, probe
gtgctcttatttctacagttaccct

SEQ ID NO: 101645 - DNA, 25 bp, probe
agggtgctcttatttctacagttac

SEQ ID NO: 101646 - DNA, 25 bp, probe
ttatggcaatgagaagaccttggag

SEQ ID NO: 101647 - DNA, 25 bp, probe
aggattatggcaatgagaagacctt

SEQ ID NO: 101648 - DNA, 25 bp, probe
atattcggaacaggtgtatgatgcc

SEQ ID NO: 101649 - DNA, 25 bp, probe
gtgtatgatgcctgtatggagacat

SEQ ID NO: 101650 - DNA, 25 bp, probe
tttgtgaagtcttgtgctataaagg

SEQ ID NO: 101651 - DNA, 25 bp, probe
taggaaattagacaggtttacggaa

SEQ ID NO: 101652 - DNA, 25 bp, probe
ttaggaaattagacaggtttacgga

SEQ ID NO: 101653 - DNA, 25 bp, probe
gaggattatggcaatgagaagacct

SEQ ID NO: 101654 - DNA, 25 bp, probe
ttgtgaagtcttgtgctataaaggg

SEQ ID NO: 101655 - DNA, 25 bp, probe
ggaatgtcacctgaaattacttctt

SEQ ID NO: 101656 - DNA, 25 bp, probe
aggaaattagacaggtttacggaac

SEQ ID NO: 101657 - DNA, 25 bp, probe
attaggaaattagacaggtttacgg

SEQ ID NO: 101658 - DNA, 25 bp, probe
gagggtgctcttatttctacagtta

SEQ ID NO: 101659 - DNA, 25 bp, probe
tgagaagaccttggagcactatacc

SEQ ID NO: 101660 - DNA, 25 bp, probe
gatgacattaggaaattagacaggt

SEQ ID NO: 101661 - DNA, 25 bp, probe
catttgtgaagtcttgtgctataaa

SEQ ID NO: 101662 - DNA, 25 bp, probe
tatgatgcctgtatggagacatttg

SEQ ID NO: 101663 - DNA, 25 bp, probe
gtatgatgcctgtatggagacattt

SEQ ID NO: 101664 - DNA, 25 bp, probe
tgctcttatttctacagttaccctg

SEQ ID NO: 101665 - DNA, 25 bp, probe
tgacattaggaaattagacaggttt

SEQ ID NO: 101666 - DNA, 25 bp, probe
agatgacattaggaaattagacagg

SEQ ID NO: 101667 - DNA, 25 bp, probe
acatttgtgaagtcttgtgctataa

SEQ ID NO: 101668 - DNA, 25 bp, probe
aggaatgtcacctgaaattacttct

SEQ ID NO: 101669 - DNA, 25 bp, probe
atgacattaggaaattagacaggtt

SEQ ID NO: 101670 - DNA, 25 bp, probe
gaggaatgtcacctgaaattacttc

SEQ ID NO: 101671 - DNA, 25 bp, probe
atttgtgaagtcttgtgctataaag

SEQ ID NO: 101672 - DNA, 25 bp, probe
ggaggaatgtcacctgaaattactt

SEQ ID NO: 101673 - DNA, 25 bp, probe
gctcttatttctacagttaccctgc

SEQ ID NO: 101674 - DNA, 25 bp, probe
cattaggaaattagacaggtttacg

SEQ ID NO: 101675 - DNA, 25 bp, probe
atggaggaatgtcacctgaaattac

SEQ ID NO: 101676 - DNA, 25 bp, probe
taaagctgctgtgttgaaatatgaa

SEQ ID NO: 101677 - DNA, 25 bp, probe
tgtcacctgaaattacttctttaga

SEQ ID NO: 101678 - DNA, 25 bp, probe
cttgctttgtaaatatctgtggtcc

SEQ ID NO: 101679 - DNA, 25 bp, probe
gcttgctttgtaaatatctgtggtc

SEQ ID NO: 101680 - DNA, 25 bp, probe
gtaaatatctgtggtcccgatgtag

SEQ ID NO: 101681 - DNA, 25 bp, probe
ctttgtaaatatctgtggtcccgat

SEQ ID NO: 101682 - DNA, 25 bp, probe
taaatatctgtggtcccgatgtagt

SEQ ID NO: 101683 - DNA, 25 bp, probe
tttgtaaatatctgtggtcccgatg

SEQ ID NO: 101684 - DNA, 25 bp, probe
tgtaaatatctgtggtcccgatgta

SEQ ID NO: 101685 - DNA, 25 bp, probe
ttgctttgtaaatatctgtggtccc

SEQ ID NO: 101686 - DNA, 25 bp, probe
gtctgtatgaatgcctgtggttaaa

SEQ ID NO: 101687 - DNA, 25 bp, probe
cgtctgtatgaatgcctgtggttaa

SEQ ID NO: 101688 - DNA, 25 bp, probe
ttgtaaatatctgtggtcccgatgt

SEQ ID NO: 101689 - DNA, 25 bp, probe
gaggtggttactgtagtgtttgttg

SEQ ID NO: 101690 - DNA, 25 bp, probe
agaggtggttactgtagtgtttgtt

SEQ ID NO: 101691 - DNA, 25 bp, probe
aaatatctgtggtcccgatgtagtg

SEQ ID NO: 101692 - DNA, 25 bp, probe
gagaggtggttactgtagtgtttgt

SEQ ID NO: 101693 - DNA, 25 bp, probe
tttgtatcgccactgtatttgtgta

SEQ ID NO: 101694 - DNA, 25 bp, probe
gattggcactccgtctgtatgaatg

SEQ ID NO: 101695 - DNA, 25 bp, probe
gttactgtgtaagcgtgttggagta

SEQ ID NO: 101696 - DNA, 25 bp, probe
gccactgtatttgtgtactttaaca

SEQ ID NO: 101697 - DNA, 25 bp, probe
agcttgctttgtaaatatctgtggt

SEQ ID NO: 101698 - DNA, 25 bp, probe
ggttactgtagtgtttgttgccttg

SEQ ID NO: 101699 - DNA, 25 bp, probe
atcgccactgtatttgtgtacttta

SEQ ID NO: 101700 - DNA, 25 bp, probe
tatcgccactgtatttgtgtacttt

SEQ ID NO: 101701 - DNA, 25 bp, probe
cgccactgtatttgtgtactttaac

SEQ ID NO: 101702 - DNA, 25 bp, probe
tcgccactgtatttgtgtactttaa

SEQ ID NO: 101703 - DNA, 25 bp, probe
ttactgtgtaagcgtgttggagtac

SEQ ID NO: 101704 - DNA, 25 bp, probe
gtatcgccactgtatttgtgtactt

SEQ ID NO: 101705 - DNA, 25 bp, probe
tggttactgtagtgtttgttgcctt

SEQ ID NO: 101706 - DNA, 25 bp, probe
gctttgtaaatatctgtggtcccga

SEQ ID NO: 101707 - DNA, 25 bp, probe
ttgtatcgccactgtatttgtgtac

SEQ ID NO: 101708 - DNA, 25 bp, probe
gtttgtatcgccactgtatttgtgt

SEQ ID NO: 101709 - DNA, 25 bp, probe
ttactgtagtgtttgttgccttgct

SEQ ID NO: 101710 - DNA, 25 bp, probe
gttactgtagtgtttgttgccttgc

SEQ ID NO: 101711 - DNA, 25 bp, probe
cgagaggtggttactgtagtgtttg

SEQ ID NO: 101712 - DNA, 25 bp, probe
tgctttgtaaatatctgtggtcccg

SEQ ID NO: 101713 - DNA, 25 bp, probe
tgtatcgccactgtatttgtgtact

SEQ ID NO: 101714 - DNA, 25 bp, probe
gtggttactgtagtgtttgttgcct

SEQ ID NO: 101715 - DNA, 25 bp, probe
aggtggttactgtagtgtttgttgc

SEQ ID NO: 101716 - DNA, 25 bp, probe
ctgtatgaatgcctgtggttaaaac

SEQ ID NO: 101717 - DNA, 25 bp, probe
tctgtatgaatgcctgtggttaaaa

SEQ ID NO: 101718 - DNA, 25 bp, probe
ccgtctgtatgaatgcctgtggtta

SEQ ID NO: 101719 - DNA, 25 bp, probe
tgtgtactttaacaatcgtgtaaat

SEQ ID NO: 101720 - DNA, 25 bp, probe
tactgtagtgtttgttgccttgctg

SEQ ID NO: 101721 - DNA, 25 bp, probe
gattcaaggtggaagatgcgtttct

SEQ ID NO: 101722 - DNA, 25 bp, probe
ttactaggagacgccaatattcatg

SEQ ID NO: 101723 - DNA, 25 bp, probe
aatacctcagaaccagcgattcatt

SEQ ID NO: 101724 - DNA, 25 bp, probe
atacctcagaaccagcgattcattc

SEQ ID NO: 101725 - DNA, 25 bp, probe
atattcatggacacaccgaatctat

SEQ ID NO: 101726 - DNA, 25 bp, probe
aagtaaggttctcatttagcagaca

SEQ ID NO: 101727 - DNA, 25 bp, probe
tattcatggacacaccgaatctatg

SEQ ID NO: 101728 - DNA, 25 bp, probe
agtaaggttctcatttagcagacat

SEQ ID NO: 101729 - DNA, 25 bp, probe
gtaaggttctcatttagcagacatc

SEQ ID NO: 101730 - DNA, 25 bp, probe
caatacctcagaaccagcgattcat

SEQ ID NO: 101731 - DNA, 25 bp, probe
taaggttctcatttagcagacatcg

SEQ ID NO: 101732 - DNA, 25 bp, probe
aaagtaaggttctcatttagcagac

SEQ ID NO: 101733 - DNA, 25 bp, probe
aatattcatggacacaccgaatcta

SEQ ID NO: 101734 - DNA, 25 bp, probe
catctttactaggagacgccaatat

SEQ ID NO: 101735 - DNA, 25 bp, probe
catttagcagacatcgcaacaagta

SEQ ID NO: 101736 - DNA, 25 bp, probe
caatattcatggacacaccgaatct

SEQ ID NO: 101737 - DNA, 25 bp, probe
ctttactaggagacgccaatattca

SEQ ID NO: 101738 - DNA, 25 bp, probe
tttactaggagacgccaatattcat

SEQ ID NO: 101739 - DNA, 25 bp, probe
tactaggagacgccaatattcatgg

SEQ ID NO: 101740 - DNA, 25 bp, probe
gcaaatattcctttactaccacaca

SEQ ID NO: 101741 - DNA, 25 bp, probe
tgaagtttcactgtgtcttaccaag

SEQ ID NO: 101742 - DNA, 25 bp, probe
agcaaatattcctttactaccacac

SEQ ID NO: 101743 - DNA, 25 bp, probe
tctttactaggagacgccaatattc

SEQ ID NO: 101744 - DNA, 25 bp, probe
atttagcagacatcgcaacaagtac

SEQ ID NO: 101745 - DNA, 25 bp, probe
atctttactaggagacgccaatatt

SEQ ID NO: 101746 - DNA, 25 bp, probe
ccaatattcatggacacaccgaatc

SEQ ID NO: 101747 - DNA, 25 bp, probe
taaagtaaggttctcatttagcaga

SEQ ID NO: 101748 - DNA, 25 bp, probe
ctcatttagcagacatcgcaacaag

SEQ ID NO: 101749 - DNA, 25 bp, probe
gcatctttactaggagacgccaata

SEQ ID NO: 101750 - DNA, 25 bp, probe
gaagtttcactgtgtcttaccaagc

SEQ ID NO: 101751 - DNA, 25 bp, probe
atggacacaccgaatctatgatttc

SEQ ID NO: 101752 - DNA, 25 bp, probe
tcatggacacaccgaatctatgatt

SEQ ID NO: 101753 - DNA, 25 bp, probe
ttcatggacacaccgaatctatgat

SEQ ID NO: 101754 - DNA, 25 bp, probe
attcatggacacaccgaatctatga

SEQ ID NO: 101755 - DNA, 25 bp, probe
aagcaaatattcctttactaccaca

SEQ ID NO: 101756 - DNA, 25 bp, probe
gttctcatttagcagacatcgcaac

SEQ ID NO: 101757 - DNA, 25 bp, probe
gactcaaagcaagcatctttactag

SEQ ID NO: 101758 - DNA, 25 bp, probe
ggacacaccgaatctatgatttctg

SEQ ID NO: 101759 - DNA, 25 bp, probe
atgtcaattccaaatcatcctggtg

SEQ ID NO: 101760 - DNA, 25 bp, probe
ggatacccaatacctcctggatatg

SEQ ID NO: 101761 - DNA, 25 bp, probe
tgactcaaagcaagcatctttacta

SEQ ID NO: 101762 - DNA, 25 bp, probe
aagcaagcatctttactaggagacg

SEQ ID NO: 101763 - DNA, 25 bp, probe
gaagcaaatattcctttactaccac

SEQ ID NO: 101764 - DNA, 25 bp, probe
atcaatggatacccaatacctcctg

SEQ ID NO: 101765 - DNA, 25 bp, probe
catcaatggatacccaatacctcct

SEQ ID NO: 101766 - DNA, 25 bp, probe
gacaaagcgtattaaacagaacact

SEQ ID NO: 101767 - DNA, 25 bp, probe
agacaaagcgtattaaacagaacac

SEQ ID NO: 101768 - DNA, 25 bp, probe
cagacaaagcgtattaaacagaaca

SEQ ID NO: 101769 - DNA, 25 bp, probe
taccagacaaagcgtattaaacaga

SEQ ID NO: 101770 - DNA, 25 bp, probe
ctaccagacaaagcgtattaaacag

SEQ ID NO: 101771 - DNA, 25 bp, probe
cactaccagacaaagcgtattaaac

SEQ ID NO: 101772 - DNA, 25 bp, probe
actaccagacaaagcgtattaaaca

SEQ ID NO: 101773 - DNA, 25 bp, probe
ccagacaaagcgtattaaacagaac

SEQ ID NO: 101774 - DNA, 25 bp, probe
acaaagcgtattaaacagaacactt

SEQ ID NO: 101775 - DNA, 25 bp, probe
accagacaaagcgtattaaacagaa

SEQ ID NO: 101776 - DNA, 25 bp, probe
aaggatggatgaatggagaggacaa

SEQ ID NO: 101777 - DNA, 25 bp, probe
gcactaccagacaaagcgtattaaa

SEQ ID NO: 101778 - DNA, 25 bp, probe
aagcactaccagacaaagcgtatta

SEQ ID NO: 101779 - DNA, 25 bp, probe
agcactaccagacaaagcgtattaa

SEQ ID NO: 101780 - DNA, 25 bp, probe
caaggatggatgaatggagaggaca

SEQ ID NO: 101781 - DNA, 25 bp, probe
ccatccaaatgctgttgaaccatag

SEQ ID NO: 101782 - DNA, 25 bp, probe
gatggatgaatggagaggacaaagg

SEQ ID NO: 101783 - DNA, 25 bp, probe
ggatggatgaatggagaggacaaag

SEQ ID NO: 101784 - DNA, 25 bp, probe
ggctacaggaactgaatgtggattc

SEQ ID NO: 101785 - DNA, 25 bp, probe
caaagcgtattaaacagaacacttt

SEQ ID NO: 101786 - DNA, 25 bp, probe
accatccaaatgctgttgaaccata

SEQ ID NO: 101787 - DNA, 25 bp, probe
aggatggatgaatggagaggacaaa

SEQ ID NO: 101788 - DNA, 25 bp, probe
tggctacaggaactgaatgtggatt

SEQ ID NO: 101789 - DNA, 25 bp, probe
caagcactaccagacaaagcgtatt

SEQ ID NO: 101790 - DNA, 25 bp, probe
aagcgtattaaacagaacacttttg

SEQ ID NO: 101791 - DNA, 25 bp, probe
gtggctacaggaactgaatgtggat

SEQ ID NO: 101792 - DNA, 25 bp, probe
ccaaggatggatgaatggagaggac

SEQ ID NO: 101793 - DNA, 25 bp, probe
catccaaatgctgttgaaccatagc

SEQ ID NO: 101794 - DNA, 25 bp, probe
caccatccaaatgctgttgaaccat

SEQ ID NO: 101795 - DNA, 25 bp, probe
atggatgaatggagaggacaaaggc

SEQ ID NO: 101796 - DNA, 25 bp, probe
aaatgctgttgaaccatagcttcac

SEQ ID NO: 101797 - DNA, 25 bp, probe
caaatgctgttgaaccatagcttca

SEQ ID NO: 101798 - DNA, 25 bp, probe
aatgctgttgaaccatagcttcacc

SEQ ID NO: 101799 - DNA, 25 bp, probe
ccaaatgctgttgaaccatagcttc

SEQ ID NO: 101800 - DNA, 25 bp, probe
atccaaatgctgttgaaccatagct

SEQ ID NO: 101801 - DNA, 25 bp, probe
aaagcgtattaaacagaacactttt

SEQ ID NO: 101802 - DNA, 25 bp, probe
tccaaatgctgttgaaccatagctt

SEQ ID NO: 101803 - DNA, 25 bp, probe
ccaagcactaccagacaaagcgtat

SEQ ID NO: 101804 - DNA, 25 bp, probe
ttccagtgagagaaaccaaccacag

SEQ ID NO: 101805 - DNA, 25 bp, probe
gttccagtgagagaaaccaaccaca

SEQ ID NO: 101806 - DNA, 25 bp, probe
gctacaggaactgaatgtggattca

SEQ ID NO: 101807 - DNA, 25 bp, probe
tgagagctgaatgagggcatcatag

SEQ ID NO: 101808 - DNA, 25 bp, probe
ctgagagctgaatgagggcatcata

SEQ ID NO: 101809 - DNA, 25 bp, probe
gagagctgaatgagggcatcatagg

SEQ ID NO: 101810 - DNA, 25 bp, probe
gcaatatagagactgtgttcatgtg

SEQ ID NO: 101811 - DNA, 25 bp, probe
aattaggagtgctgataagaatgaa

SEQ ID NO: 101812 - DNA, 25 bp, probe
attaggagtgctgataagaatgaat

SEQ ID NO: 101813 - DNA, 25 bp, probe
caatatagagactgtgttcatgtgt

SEQ ID NO: 101814 - DNA, 25 bp, probe
gataagaatgaatatagatgctggc

SEQ ID NO: 101815 - DNA, 25 bp, probe
ttaggagtgctgataagaatgaata

SEQ ID NO: 101816 - DNA, 25 bp, probe
tgcaatatagagactgtgttcatgt

SEQ ID NO: 101817 - DNA, 25 bp, probe
agactgcaatatagagactgtgttc

SEQ ID NO: 101818 - DNA, 25 bp, probe
actgcaatatagagactgtgttcat

SEQ ID NO: 101819 - DNA, 25 bp, probe
ctgcaatatagagactgtgttcatg

SEQ ID NO: 101820 - DNA, 25 bp, probe
gactgcaatatagagactgtgttca

SEQ ID NO: 101821 - DNA, 25 bp, probe
tttagaaatgaacaaggcaggaaac

SEQ ID NO: 101822 - DNA, 25 bp, probe
aggaaagtagcaaggcataatgtaa

SEQ ID NO: 101823 - DNA, 25 bp, probe
aaggaaagtagcaaggcataatgta

SEQ ID NO: 101824 - DNA, 25 bp, probe
taaggaaagtagcaaggcataatgt

SEQ ID NO: 101825 - DNA, 25 bp, probe
ggaaagtagcaaggcataatgtaat

SEQ ID NO: 101826 - DNA, 25 bp, probe
ttaaggaaagtagcaaggcataatg

SEQ ID NO: 101827 - DNA, 25 bp, probe
aggagtgctgataagaatgaatata

SEQ ID NO: 101828 - DNA, 25 bp, probe
taggagtgctgataagaatgaatat

SEQ ID NO: 101829 - DNA, 25 bp, probe
tgaagaagaaattaggagtgctgat

SEQ ID NO: 101830 - DNA, 25 bp, probe
ttgaagaagaaattaggagtgctga

SEQ ID NO: 101831 - DNA, 25 bp, probe
atttagaaatgaacaaggcaggaaa

SEQ ID NO: 101832 - DNA, 25 bp, probe
tagaaatgaacaaggcaggaaacaa

SEQ ID NO: 101833 - DNA, 25 bp, probe
ttagaaatgaacaaggcaggaaaca

SEQ ID NO: 101834 - DNA, 25 bp, probe
attgaagaagaaattaggagtgctg

SEQ ID NO: 101835 - DNA, 25 bp, probe
cattgaagaagaaattaggagtgct

SEQ ID NO: 101836 - DNA, 25 bp, probe
agcattgaagaagaaattaggagtg

SEQ ID NO: 101837 - DNA, 25 bp, probe
tgctgataagaatgaatatagatgc

SEQ ID NO: 101838 - DNA, 25 bp, probe
ggagtgctgataagaatgaatatag

SEQ ID NO: 101839 - DNA, 25 bp, probe
tttaaggaaagtagcaaggcataat

SEQ ID NO: 101840 - DNA, 25 bp, probe
gtgtaaagactgagcagaactgaaa

SEQ ID NO: 101841 - DNA, 25 bp, probe
gtagcaaggcataatgtaatttagc

SEQ ID NO: 101842 - DNA, 25 bp, probe
aagcattgaagaagaaattaggagt

SEQ ID NO: 101843 - DNA, 25 bp, probe
tatttagaaatgaacaaggcaggaa

SEQ ID NO: 101844 - DNA, 25 bp, probe
ttatttagaaatgaacaaggcagga

SEQ ID NO: 101845 - DNA, 25 bp, probe
atatagagactgtgttcatgtgtaa

SEQ ID NO: 101846 - DNA, 25 bp, probe
aatatagagactgtgttcatgtgta

SEQ ID NO: 101847 - DNA, 25 bp, probe
ttcagactgcaatatagagactgtg

SEQ ID NO: 101848 - DNA, 25 bp, probe
cagactgcaatatagagactgtgtt

SEQ ID NO: 101849 - DNA, 25 bp, probe
agaaatgaacaaggcaggaaacaaa

SEQ ID NO: 101850 - DNA, 25 bp, probe
gaagaaattaggagtgctgataaga

SEQ ID NO: 101851 - DNA, 25 bp, probe
agaagaaattaggagtgctgataag

SEQ ID NO: 101852 - DNA, 25 bp, probe
gaagaagaaattaggagtgctgata

SEQ ID NO: 101853 - DNA, 25 bp, probe
acaagcattgaagaagaaattagga

SEQ ID NO: 101854 - DNA, 25 bp, probe
tgaggaacaagaagcaccactacag

SEQ ID NO: 101855 - DNA, 25 bp, probe
atctgagaaagttccggtcctataa

SEQ ID NO: 101856 - DNA, 25 bp, probe
gatctgagaaagttccggtcctata

SEQ ID NO: 101857 - DNA, 25 bp, probe
tctgagaaagttccggtcctataag

SEQ ID NO: 101858 - DNA, 25 bp, probe
gaggaacaagaagcaccactacagg

SEQ ID NO: 101859 - DNA, 25 bp, probe
ctgtgaggaacaagaagcaccacta

SEQ ID NO: 101860 - DNA, 25 bp, probe
gtgaggaacaagaagcaccactaca

SEQ ID NO: 101861 - DNA, 25 bp, probe
tgtgaggaacaagaagcaccactac

SEQ ID NO: 101862 - DNA, 25 bp, probe
agatctgagaaagttccggtcctat

SEQ ID NO: 101863 - DNA, 25 bp, probe
ctgagaaagttccggtcctataagg

SEQ ID NO: 101864 - DNA, 25 bp, probe
gaacaagaagcaccactacagggag

SEQ ID NO: 101865 - DNA, 25 bp, probe
tgagaaagttccggtcctataaggg

SEQ ID NO: 101866 - DNA, 25 bp, probe
ctataaggggacatcagtgcgagac

SEQ ID NO: 101867 - DNA, 25 bp, probe
gatggcttcgtccagtacttcacaa

SEQ ID NO: 101868 - DNA, 25 bp, probe
atggcttcgtccagtacttcacaaa

SEQ ID NO: 101869 - DNA, 25 bp, probe
gagaaagttccggtcctataagggg

SEQ ID NO: 101870 - DNA, 25 bp, probe
agaaagttccggtcctataagggga

SEQ ID NO: 101871 - DNA, 25 bp, probe
gaaagttccggtcctataaggggac

SEQ ID NO: 101872 - DNA, 25 bp, probe
aagttccggtcctataaggggacat

SEQ ID NO: 101873 - DNA, 25 bp, probe
aaagttccggtcctataaggggaca

SEQ ID NO: 101874 - DNA, 25 bp, probe
ttccggtcctataaggggacatcag

SEQ ID NO: 101875 - DNA, 25 bp, probe
agttccggtcctataaggggacatc

SEQ ID NO: 101876 - DNA, 25 bp, probe
gttccggtcctataaggggacatca

SEQ ID NO: 101877 - DNA, 25 bp, probe
cccaccatatgaattgtacagaata

SEQ ID NO: 101878 - DNA, 25 bp, probe
ccaccatatgaattgtacagaatat

SEQ ID NO: 101879 - DNA, 25 bp, probe
ctcaaccccaccatatgaattgtac

SEQ ID NO: 101880 - DNA, 25 bp, probe
ccccaccatatgaattgtacagaat

SEQ ID NO: 101881 - DNA, 25 bp, probe
cctcaaccccaccatatgaattgta

SEQ ID NO: 101882 - DNA, 25 bp, probe
accccaccatatgaattgtacagaa

SEQ ID NO: 101883 - DNA, 25 bp, probe
aaccccaccatatgaattgtacaga

SEQ ID NO: 101884 - DNA, 25 bp, probe
caaccccaccatatgaattgtacag

SEQ ID NO: 101885 - DNA, 25 bp, probe
caccatatgaattgtacagaatatt

SEQ ID NO: 101886 - DNA, 25 bp, probe
tcaaccccaccatatgaattgtaca

SEQ ID NO: 101887 - DNA, 25 bp, probe
ccctcaaccccaccatatgaattgt

SEQ ID NO: 101888 - DNA, 25 bp, probe
gtacatgttcgggtgtgggttctac

SEQ ID NO: 101889 - DNA, 25 bp, probe
cccctcaaccccaccatatgaattg

SEQ ID NO: 101890 - DNA, 25 bp, probe
agacaagttcaaggactacctagag

SEQ ID NO: 101891 - DNA, 25 bp, probe
ctcagacaagttcaaggactaccta

SEQ ID NO: 101892 - DNA, 25 bp, probe
gacaagttcaaggactacctagaga

SEQ ID NO: 101893 - DNA, 25 bp, probe
acaagttcaaggactacctagagac

SEQ ID NO: 101894 - DNA, 25 bp, probe
cagacaagttcaaggactacctaga

SEQ ID NO: 101895 - DNA, 25 bp, probe
tcagacaagttcaaggactacctag

SEQ ID NO: 101896 - DNA, 25 bp, probe
caagttcaaggactacctagagacc

SEQ ID NO: 101897 - DNA, 25 bp, probe
agttcaaggactacctagagaccat

SEQ ID NO: 101898 - DNA, 25 bp, probe
aagttcaaggactacctagagacca

SEQ ID NO: 101899 - DNA, 25 bp, probe
gttcaaggactacctagagaccatg

SEQ ID NO: 101900 - DNA, 25 bp, probe
gatcatcaccgaatacaacctgctc

SEQ ID NO: 101901 - DNA, 25 bp, probe
catcaccgaatacaacctgctcaag

SEQ ID NO: 101902 - DNA, 25 bp, probe
atcatcaccgaatacaacctgctca

SEQ ID NO: 101903 - DNA, 25 bp, probe
cctcagacaagttcaaggactacct

SEQ ID NO: 101904 - DNA, 25 bp, probe
tcatcaccgaatacaacctgctcaa

SEQ ID NO: 101905 - DNA, 25 bp, probe
ctcctactcagaatccgaggtgaag

SEQ ID NO: 101906 - DNA, 25 bp, probe
ctcagaatccgaggtgaaggactac

SEQ ID NO: 101907 - DNA, 25 bp, probe
ctactcagaatccgaggtgaaggac

SEQ ID NO: 101908 - DNA, 25 bp, probe
actcagaatccgaggtgaaggacta

SEQ ID NO: 101909 - DNA, 25 bp, probe
tactcagaatccgaggtgaaggact

SEQ ID NO: 101910 - DNA, 25 bp, probe
atcaccgaatacaacctgctcaagg

SEQ ID NO: 101911 - DNA, 25 bp, probe
tcctactcagaatccgaggtgaagg

SEQ ID NO: 101912 - DNA, 25 bp, probe
gacatctttgactgctgctacctga

SEQ ID NO: 101913 - DNA, 25 bp, probe
cctactcagaatccgaggtgaagga

SEQ ID NO: 101914 - DNA, 25 bp, probe
gactacctgtggcagatgttgagtg

SEQ ID NO: 101915 - DNA, 25 bp, probe
gaaggactacctgtggcagatgttg

SEQ ID NO: 101916 - DNA, 25 bp, probe
acatctttgactgctgctacctgac

SEQ ID NO: 101917 - DNA, 25 bp, probe
ccctcagacaagttcaaggactacc

SEQ ID NO: 101918 - DNA, 25 bp, probe
tcagaatccgaggtgaaggactacc

SEQ ID NO: 101919 - DNA, 25 bp, probe
tgatcatcaccgaatacaacctgct

SEQ ID NO: 101920 - DNA, 25 bp, probe
gccctcagacaagttcaaggactac

SEQ ID NO: 101921 - DNA, 25 bp, probe
ttcaaggactacctagagaccatgg

SEQ ID NO: 101922 - DNA, 25 bp, probe
tgccctcagacaagttcaaggacta

SEQ ID NO: 101923 - DNA, 25 bp, probe
tacattgtgcagtgcagcctagaag

SEQ ID NO: 101924 - DNA, 25 bp, probe
ctacattgtgcagtgcagcctagaa

SEQ ID NO: 101925 - DNA, 25 bp, probe
aaggactacctagagaccatggctc

SEQ ID NO: 101926 - DNA, 25 bp, probe
agaatccgaggtgaaggactacctg

SEQ ID NO: 101927 - DNA, 25 bp, probe
cagaatccgaggtgaaggactacct

SEQ ID NO: 101928 - DNA, 25 bp, probe
cctcctactcagaatccgaggtgaa

SEQ ID NO: 101929 - DNA, 25 bp, probe
ctacctagagaccatggctccagag

SEQ ID NO: 101930 - DNA, 25 bp, probe
caaggactacctagagaccatggct

SEQ ID NO: 101931 - DNA, 25 bp, probe
tcaaggactacctagagaccatggc

SEQ ID NO: 101932 - DNA, 25 bp, probe
cttcctccaatgctctctacttatt

SEQ ID NO: 101933 - DNA, 25 bp, probe
aagttgaagttctaatggcatctct

SEQ ID NO: 101934 - DNA, 25 bp, probe
tcttcctccaatgctctctacttat

SEQ ID NO: 101935 - DNA, 25 bp, probe
tcaatagatagcaacatcacctacc

SEQ ID NO: 101936 - DNA, 25 bp, probe
cctccaatgctctctacttattact

SEQ ID NO: 101937 - DNA, 25 bp, probe
tcctccaatgctctctacttattac

SEQ ID NO: 101938 - DNA, 25 bp, probe
agttgaagttctaatggcatctctt

SEQ ID NO: 101939 - DNA, 25 bp, probe
tccaatgctctctacttattactgt

SEQ ID NO: 101940 - DNA, 25 bp, probe
ctcttcctccaatgctctctactta

SEQ ID NO: 101941 - DNA, 25 bp, probe
taagttgaagttctaatggcatctc

SEQ ID NO: 101942 - DNA, 25 bp, probe
ttcctccaatgctctctacttatta

SEQ ID NO: 101943 - DNA, 25 bp, probe
ctccaatgctctctacttattactg

SEQ ID NO: 101944 - DNA, 25 bp, probe
gcttgttgagttcttatcatcatct

SEQ ID NO: 101945 - DNA, 25 bp, probe
ttaagttgaagttctaatggcatct

SEQ ID NO: 101946 - DNA, 25 bp, probe
aatcttgtctactcctcaactccaa

SEQ ID NO: 101947 - DNA, 25 bp, probe
gcctcatctcatatactgaacctat

SEQ ID NO: 101948 - DNA, 25 bp, probe
ttcaatagatagcaacatcacctac

SEQ ID NO: 101949 - DNA, 25 bp, probe
ccaatgctctctacttattactgta

SEQ ID NO: 101950 - DNA, 25 bp, probe
ttgagttcttatcatcatcttctcc

SEQ ID NO: 101951 - DNA, 25 bp, probe
tcctagagcttgttgagttcttatc

SEQ ID NO: 101952 - DNA, 25 bp, probe
attaagttgaagttctaatggcatc

SEQ ID NO: 101953 - DNA, 25 bp, probe
tgttgagttcttatcatcatcttct

SEQ ID NO: 101954 - DNA, 25 bp, probe
agagcttgttgagttcttatcatca

SEQ ID NO: 101955 - DNA, 25 bp, probe
cctagagcttgttgagttcttatca

SEQ ID NO: 101956 - DNA, 25 bp, probe
gaatgaaacctgaaccctttattgg

SEQ ID NO: 101957 - DNA, 25 bp, probe
tgaatgaaacctgaaccctttattg

SEQ ID NO: 101958 - DNA, 25 bp, probe
gtaataacatatctgccctcttcct

SEQ ID NO: 101959 - DNA, 25 bp, probe
ctcctagagcttgttgagttcttat

SEQ ID NO: 101960 - DNA, 25 bp, probe
agcttgttgagttcttatcatcatc

SEQ ID NO: 101961 - DNA, 25 bp, probe
gagcttgttgagttcttatcatcat

SEQ ID NO: 101962 - DNA, 25 bp, probe
taataacatatctgccctcttcctc

SEQ ID NO: 101963 - DNA, 25 bp, probe
tctcctagagcttgttgagttctta

SEQ ID NO: 101964 - DNA, 25 bp, probe
aatttgaatgaaacctgaacccttt

SEQ ID NO: 101965 - DNA, 25 bp, probe
tgcctaaacaatttgaatgaaacct

SEQ ID NO: 101966 - DNA, 25 bp, probe
caatttgaatgaaacctgaaccctt

SEQ ID NO: 101967 - DNA, 25 bp, probe
gcctaaacaatttgaatgaaacctg

SEQ ID NO: 101968 - DNA, 25 bp, probe
caatagatagcaacatcacctaccc

SEQ ID NO: 101969 - DNA, 25 bp, probe
gttgaagttctaatggcatctcttt

SEQ ID NO: 101970 - DNA, 25 bp, probe
ttgaatgaaacctgaaccctttatt

SEQ ID NO: 101971 - DNA, 25 bp, probe
tttgaatgaaacctgaaccctttat

SEQ ID NO: 101972 - DNA, 25 bp, probe
atttgaatgaaacctgaacccttta

SEQ ID NO: 101973 - DNA, 25 bp, probe
aacaatttgaatgaaacctgaaccc

SEQ ID NO: 101974 - DNA, 25 bp, probe
tgctctctacttattactgtattgt

SEQ ID NO: 101975 - DNA, 25 bp, probe
aaacaatttgaatgaaacctgaacc

SEQ ID NO: 101976 - DNA, 25 bp, probe
gatgaagtacctggaggagaagaac

SEQ ID NO: 101977 - DNA, 25 bp, probe
gataacctcctcatagctgacattg

SEQ ID NO: 101978 - DNA, 25 bp, probe
ataacctcctcatagctgacattga

SEQ ID NO: 101979 - DNA, 25 bp, probe
taacctcctcatagctgacattgaa

SEQ ID NO: 101980 - DNA, 25 bp, probe
atgaagtacctggaggagaagaact

SEQ ID NO: 101981 - DNA, 25 bp, probe
ctcctcatagctgacattgaacttg

SEQ ID NO: 101982 - DNA, 25 bp, probe
cagaagccctacaagaagatgaaag

SEQ ID NO: 101983 - DNA, 25 bp, probe
ggatgaagtacctggaggagaagaa

SEQ ID NO: 101984 - DNA, 25 bp, probe
cgataacctcctcatagctgacatt

SEQ ID NO: 101985 - DNA, 25 bp, probe
cctcctcatagctgacattgaactt

SEQ ID NO: 101986 - DNA, 25 bp, probe
tcctcatagctgacattgaacttgg

SEQ ID NO: 101987 - DNA, 25 bp, probe
aacctcctcatagctgacattgaac

SEQ ID NO: 101988 - DNA, 25 bp, probe
ccagaagccctacaagaagatgaaa

SEQ ID NO: 101989 - DNA, 25 bp, probe
tagatcaccagaataaacccagctt

SEQ ID NO: 101990 - DNA, 25 bp, probe
tcaggcgtagatcaccagaataaac

SEQ ID NO: 101991 - DNA, 25 bp, probe
gtcaggcgtagatcaccagaataaa

SEQ ID NO: 101992 - DNA, 25 bp, probe
gtagatcaccagaataaacccagct

SEQ ID NO: 101993 - DNA, 25 bp, probe
agaagccctacaagaagatgaaagg

SEQ ID NO: 101994 - DNA, 25 bp, probe
gtacctggaggagaagaactttgtg

SEQ ID NO: 101995 - DNA, 25 bp, probe
acctcctcatagctgacattgaact

SEQ ID NO: 101996 - DNA, 25 bp, probe
tgaagtacctggaggagaagaactt

SEQ ID NO: 101997 - DNA, 25 bp, probe
aataaacccagcttccctcttgaaa

SEQ ID NO: 101998 - DNA, 25 bp, probe
agtacctggaggagaagaactttgt

SEQ ID NO: 101999 - DNA, 25 bp, probe
gacaccctcaactcagatggataca

SEQ ID NO: 102000 - DNA, 25 bp, probe
cgtagatcaccagaataaacccagc

SEQ ID NO: 102001 - DNA, 25 bp, probe
gcgtagatcaccagaataaacccag

SEQ ID NO: 102002 - DNA, 25 bp, probe
caggcgtagatcaccagaataaacc

SEQ ID NO: 102003 - DNA, 25 bp, probe
agatcaccagaataaacccagcttc

SEQ ID NO: 102004 - DNA, 25 bp, probe
acaccctcaactcagatggatacac

SEQ ID NO: 102005 - DNA, 25 bp, probe
gaataaacccagcttccctcttgaa

SEQ ID NO: 102006 - DNA, 25 bp, probe
ggtcaggcgtagatcaccagaataa

SEQ ID NO: 102007 - DNA, 25 bp, probe
gaagtacctggaggagaagaacttt

SEQ ID NO: 102008 - DNA, 25 bp, probe
cctcatagctgacattgaacttggc

SEQ ID NO: 102009 - DNA, 25 bp, probe
ctcatagctgacattgaacttggct

SEQ ID NO: 102010 - DNA, 25 bp, probe
gcgataacctcctcatagctgacat

SEQ ID NO: 102011 - DNA, 25 bp, probe
aagtacctggaggagaagaactttg

SEQ ID NO: 102012 - DNA, 25 bp, probe
tcatagctgacattgaacttggctg

SEQ ID NO: 102013 - DNA, 25 bp, probe
gatcaccagaataaacccagcttcc

SEQ ID NO: 102014 - DNA, 25 bp, probe
agaataaacccagcttccctcttga

SEQ ID NO: 102015 - DNA, 25 bp, probe
cagaataaacccagcttccctcttg

SEQ ID NO: 102016 - DNA, 25 bp, probe
tacctggaggagaagaactttgtgc

SEQ ID NO: 102017 - DNA, 25 bp, probe
caccctcaactcagatggatacacc

SEQ ID NO: 102018 - DNA, 25 bp, probe
aggcgtagatcaccagaataaaccc

SEQ ID NO: 102019 - DNA, 25 bp, probe
cgacaccctcaactcagatggatac

SEQ ID NO: 102020 - DNA, 25 bp, probe
taggttctcggtacttaggacttga

SEQ ID NO: 102021 - DNA, 25 bp, probe
gtaggttctcggtacttaggacttg

SEQ ID NO: 102022 - DNA, 25 bp, probe
ggttctcggtacttaggacttgatc

SEQ ID NO: 102023 - DNA, 25 bp, probe
tggatcaagccaatacaagattctt

SEQ ID NO: 102024 - DNA, 25 bp, probe
aggttctcggtacttaggacttgat

SEQ ID NO: 102025 - DNA, 25 bp, probe
gaagagtaggttctcggtacttagg

SEQ ID NO: 102026 - DNA, 25 bp, probe
ggaagagtaggttctcggtacttag

SEQ ID NO: 102027 - DNA, 25 bp, probe
aagagtaggttctcggtacttagga

SEQ ID NO: 102028 - DNA, 25 bp, probe
ctctccttgctcgattacttcctac

SEQ ID NO: 102029 - DNA, 25 bp, probe
agtaggttctcggtacttaggactt

SEQ ID NO: 102030 - DNA, 25 bp, probe
gttctcggtacttaggacttgatcc

SEQ ID NO: 102031 - DNA, 25 bp, probe
ctccttgctcgattacttcctacag

SEQ ID NO: 102032 - DNA, 25 bp, probe
gagtaggttctcggtacttaggact

SEQ ID NO: 102033 - DNA, 25 bp, probe
agagtaggttctcggtacttaggac

SEQ ID NO: 102034 - DNA, 25 bp, probe
agtattaccaccagactgactccag

SEQ ID NO: 102035 - DNA, 25 bp, probe
tctccttgctcgattacttcctaca

SEQ ID NO: 102036 - DNA, 25 bp, probe
tttgaaataaagtccttagttagcc

SEQ ID NO: 102037 - DNA, 25 bp, probe
aacacgaaggatcatgtggtaactg

SEQ ID NO: 102038 - DNA, 25 bp, probe
ctgatagtggcatgattgaaccagt

SEQ ID NO: 102039 - DNA, 25 bp, probe
gaaatggaaggcaagaaacacgaag

SEQ ID NO: 102040 - DNA, 25 bp, probe
cttgctcgattacttcctacaggag

SEQ ID NO: 102041 - DNA, 25 bp, probe
catccatcaggtgaagaaacagtca

SEQ ID NO: 102042 - DNA, 25 bp, probe
tgatagtggcatgattgaaccagtg

SEQ ID NO: 102043 - DNA, 25 bp, probe
gtattaccaccagactgactccagg

SEQ ID NO: 102044 - DNA, 25 bp, probe
ccatccatcaggtgaagaaacagtc

SEQ ID NO: 102045 - DNA, 25 bp, probe
gtccatccatcaggtgaagaaacag

SEQ ID NO: 102046 - DNA, 25 bp, probe
gctctccttgctcgattacttccta

SEQ ID NO: 102047 - DNA, 25 bp, probe
gaaacacgaaggatcatgtggtaac

SEQ ID NO: 102048 - DNA, 25 bp, probe
tattaccaccagactgactccagga

SEQ ID NO: 102049 - DNA, 25 bp, probe
agaaacacgaaggatcatgtggtaa

SEQ ID NO: 102050 - DNA, 25 bp, probe
aagaaacacgaaggatcatgtggta

SEQ ID NO: 102051 - DNA, 25 bp, probe
gtttgaaataaagtccttagttagc

SEQ ID NO: 102052 - DNA, 25 bp, probe
gtgtccatccatcaggtgaagaaac

SEQ ID NO: 102053 - DNA, 25 bp, probe
aaacacgaaggatcatgtggtaact

SEQ ID NO: 102054 - DNA, 25 bp, probe
cctcctggtctgtgtcagtattacc

SEQ ID NO: 102055 - DNA, 25 bp, probe
tccatccatcaggtgaagaaacagt

SEQ ID NO: 102056 - DNA, 25 bp, probe
ggatcaagccaatacaagattcttg

SEQ ID NO: 102057 - DNA, 25 bp, probe
ctgtgtccatccatcaggtgaagaa

SEQ ID NO: 102058 - DNA, 25 bp, probe
gatagtggcatgattgaaccagtgg

SEQ ID NO: 102059 - DNA, 25 bp, probe
aaggatcatgtggtaactgcgagag

SEQ ID NO: 102060 - DNA, 25 bp, probe
gaaggatcatgtggtaactgcgaga

SEQ ID NO: 102061 - DNA, 25 bp, probe
ttggatcaagccaatacaagattct

SEQ ID NO: 102062 - DNA, 25 bp, probe
gggaagagtaggttctcggtactta

SEQ ID NO: 102063 - DNA, 25 bp, probe
aagggaaatggaaggcaagaaacac

SEQ ID NO: 102064 - DNA, 25 bp, probe
cttacgaggctacataacacatcta

SEQ ID NO: 102065 - DNA, 25 bp, probe
ttacgaggctacataacacatctat

SEQ ID NO: 102066 - DNA, 25 bp, probe
aattcctatgtccacacttaacctt

SEQ ID NO: 102067 - DNA, 25 bp, probe
tcttacgaggctacataacacatct

SEQ ID NO: 102068 - DNA, 25 bp, probe
cacataccaccaagttcaatgagaa

SEQ ID NO: 102069 - DNA, 25 bp, probe
ctcttacgaggctacataacacatc

SEQ ID NO: 102070 - DNA, 25 bp, probe
agagcagaagttagacactaaggat

SEQ ID NO: 102071 - DNA, 25 bp, probe
acagcagtattactataagcagttg

SEQ ID NO: 102072 - DNA, 25 bp, probe
cgaggctacataacacatctatgat

SEQ ID NO: 102073 - DNA, 25 bp, probe
tacgaggctacataacacatctatg

SEQ ID NO: 102074 - DNA, 25 bp, probe
gcagaagttagacactaaggatctc

SEQ ID NO: 102075 - DNA, 25 bp, probe
gagcagaagttagacactaaggatc

SEQ ID NO: 102076 - DNA, 25 bp, probe
acgaggctacataacacatctatga

SEQ ID NO: 102077 - DNA, 25 bp, probe
agcagaagttagacactaaggatct

SEQ ID NO: 102078 - DNA, 25 bp, probe
cagagcagaagttagacactaagga

SEQ ID NO: 102079 - DNA, 25 bp, probe
cagaagttagacactaaggatctct

SEQ ID NO: 102080 - DNA, 25 bp, probe
aagcagagcagaagttagacactaa

SEQ ID NO: 102081 - DNA, 25 bp, probe
aacagcagtattactataagcagtt

SEQ ID NO: 102082 - DNA, 25 bp, probe
taatcatttcagcagtagcgtctta

SEQ ID NO: 102083 - DNA, 25 bp, probe
ggaggttctaatcatttcagcagta

SEQ ID NO: 102084 - DNA, 25 bp, probe
agttgtttctttgtcagtttcagtt

SEQ ID NO: 102085 - DNA, 25 bp, probe
attaacttgttgaaactgtggcttt

SEQ ID NO: 102086 - DNA, 25 bp, probe
tttggaggttctaatcatttcagca

SEQ ID NO: 102087 - DNA, 25 bp, probe
agcagagcagaagttagacactaag

SEQ ID NO: 102088 - DNA, 25 bp, probe
agtagcgtcttaaacagcagtatta

SEQ ID NO: 102089 - DNA, 25 bp, probe
gtagcgtcttaaacagcagtattac

SEQ ID NO: 102090 - DNA, 25 bp, probe
gaggttctaatcatttcagcagtag

SEQ ID NO: 102091 - DNA, 25 bp, probe
agaagttagacactaaggatctctt

SEQ ID NO: 102092 - DNA, 25 bp, probe
taacttgttgaaactgtggctttaa

SEQ ID NO: 102093 - DNA, 25 bp, probe
ttaacttgttgaaactgtggcttta

SEQ ID NO: 102094 - DNA, 25 bp, probe
aattaacttgttgaaactgtggctt

SEQ ID NO: 102095 - DNA, 25 bp, probe
attcctatgtccacacttaaccttt

SEQ ID NO: 102096 - DNA, 25 bp, probe
aaattcctatgtccacacttaacct

SEQ ID NO: 102097 - DNA, 25 bp, probe
gagtgctttgaattgggaatatacc

SEQ ID NO: 102098 - DNA, 25 bp, probe
aggttctaatcatttcagcagtagc

SEQ ID NO: 102099 - DNA, 25 bp, probe
gaattaacttgttgaaactgtggct

SEQ ID NO: 102100 - DNA, 25 bp, probe
tatgtccacctaaattcctatgtcc

SEQ ID NO: 102101 - DNA, 25 bp, probe
aatcatttcagcagtagcgtcttaa

SEQ ID NO: 102102 - DNA, 25 bp, probe
cacctaaattcctatgtccacactt

SEQ ID NO: 102103 - DNA, 25 bp, probe
atcatttcagcagtagcgtcttaaa

SEQ ID NO: 102104 - DNA, 25 bp, probe
ttggaggttctaatcatttcagcag

SEQ ID NO: 102105 - DNA, 25 bp, probe
tagttgtttctttgtcagtttcagt

SEQ ID NO: 102106 - DNA, 25 bp, probe
tgagtgctttgaattgggaatatac

SEQ ID NO: 102107 - DNA, 25 bp, probe
tgaattaacttgttgaaactgtggc

SEQ ID NO: 102108 - DNA, 25 bp, probe
cctcttaatggcatagcaccaataa

SEQ ID NO: 102109 - DNA, 25 bp, probe
agaagagatgtctgaggaaggtcat

SEQ ID NO: 102110 - DNA, 25 bp, probe
agagaagagatgtctgaggaaggtc

SEQ ID NO: 102111 - DNA, 25 bp, probe
gagagaagagatgtctgaggaaggt

SEQ ID NO: 102112 - DNA, 25 bp, probe
gatgtctgaggaaggtcatgttctt

SEQ ID NO: 102113 - DNA, 25 bp, probe
acctcttaatggcatagcaccaata

SEQ ID NO: 102114 - DNA, 25 bp, probe
tagttgtgtttggaaagggagagaa

SEQ ID NO: 102115 - DNA, 25 bp, probe
gaagagatgtctgaggaaggtcatg

SEQ ID NO: 102116 - DNA, 25 bp, probe
gagaagagatgtctgaggaaggtca

SEQ ID NO: 102117 - DNA, 25 bp, probe
tttggaaagggagagaagagatgtc

SEQ ID NO: 102118 - DNA, 25 bp, probe
ttcctgtacttcatagctggagaat

SEQ ID NO: 102119 - DNA, 25 bp, probe
gagatgtctgaggaaggtcatgttc

SEQ ID NO: 102120 - DNA, 25 bp, probe
ggagagaagagatgtctgaggaagg

SEQ ID NO: 102121 - DNA, 25 bp, probe
gaaagggagagaagagatgtctgag

SEQ ID NO: 102122 - DNA, 25 bp, probe
cctgtacttcatagctggagaatgg

SEQ ID NO: 102123 - DNA, 25 bp, probe
gtttggaaagggagagaagagatgt

SEQ ID NO: 102124 - DNA, 25 bp, probe
tgtttggaaagggagagaagagatg

SEQ ID NO: 102125 - DNA, 25 bp, probe
gtgtttggaaagggagagaagagat

SEQ ID NO: 102126 - DNA, 25 bp, probe
gaagacctcttaatggcatagcacc

SEQ ID NO: 102127 - DNA, 25 bp, probe
ggaagacctcttaatggcatagcac

SEQ ID NO: 102128 - DNA, 25 bp, probe
tcctgtacttcatagctggagaatg

SEQ ID NO: 102129 - DNA, 25 bp, probe
agatgtctgaggaaggtcatgttct

SEQ ID NO: 102130 - DNA, 25 bp, probe
agagatgtctgaggaaggtcatgtt

SEQ ID NO: 102131 - DNA, 25 bp, probe
aagagatgtctgaggaaggtcatgt

SEQ ID NO: 102132 - DNA, 25 bp, probe
attctaagccctgttcagagacttc

SEQ ID NO: 102133 - DNA, 25 bp, probe
gattctaagccctgttcagagactt

SEQ ID NO: 102134 - DNA, 25 bp, probe
ctagttgtgtttggaaagggagaga

SEQ ID NO: 102135 - DNA, 25 bp, probe
ttctttcagcttatggcatttccta

SEQ ID NO: 102136 - DNA, 25 bp, probe
tttcagcttatggcatttcctagag

SEQ ID NO: 102137 - DNA, 25 bp, probe
ctttcagcttatggcatttcctaga

SEQ ID NO: 102138 - DNA, 25 bp, probe
tctttcagcttatggcatttcctag

SEQ ID NO: 102139 - DNA, 25 bp, probe
aatgactcctagttgtgtttggaaa

SEQ ID NO: 102140 - DNA, 25 bp, probe
aaatgactcctagttgtgtttggaa

SEQ ID NO: 102141 - DNA, 25 bp, probe
gaaggtcatgttctttcagcttatg

SEQ ID NO: 102142 - DNA, 25 bp, probe
caggaagacctcttaatggcatagc

SEQ ID NO: 102143 - DNA, 25 bp, probe
gcaggaagacctcttaatggcatag

SEQ ID NO: 102144 - DNA, 25 bp, probe
cgtaagcaggaagacctcttaatgg

SEQ ID NO: 102145 - DNA, 25 bp, probe
atgttctttcagcttatggcatttc

SEQ ID NO: 102146 - DNA, 25 bp, probe
ttgtgtttggaaagggagagaagag

SEQ ID NO: 102147 - DNA, 25 bp, probe
catgttctttcagcttatggcattt

SEQ ID NO: 102148 - DNA, 25 bp, probe
tttgtttcctgtacttcatagctgg

SEQ ID NO: 102149 - DNA, 25 bp, probe
cagcttatggcatttcctagagttt

SEQ ID NO: 102150 - DNA, 25 bp, probe
atgactcctagttgtgtttggaaag

SEQ ID NO: 102151 - DNA, 25 bp, probe
ctcttaatggcatagcaccaataaa

SEQ ID NO: 102152 - DNA, 25 bp, probe
caagatgagggacaagcataagaag

SEQ ID NO: 102153 - DNA, 25 bp, probe
gaaagagatgaacgagagggagaag

SEQ ID NO: 102154 - DNA, 25 bp, probe
aagatgagggacaagcataagaagg

SEQ ID NO: 102155 - DNA, 25 bp, probe
ccaagatgagggacaagcataagaa

SEQ ID NO: 102156 - DNA, 25 bp, probe
aagagatgaacgagagggagaagaa

SEQ ID NO: 102157 - DNA, 25 bp, probe
aaagagatgaacgagagggagaaga

SEQ ID NO: 102158 - DNA, 25 bp, probe
gatgagggacaagcataagaaggag

SEQ ID NO: 102159 - DNA, 25 bp, probe
tgaaagagatgaacgagagggagaa

SEQ ID NO: 102160 - DNA, 25 bp, probe
agagatgaacgagagggagaagaag

SEQ ID NO: 102161 - DNA, 25 bp, probe
agatgagggacaagcataagaagga

SEQ ID NO: 102162 - DNA, 25 bp, probe
ctgaaagagatgaacgagagggaga

SEQ ID NO: 102163 - DNA, 25 bp, probe
aagaggctgaaagagatgaacgaga

SEQ ID NO: 102164 - DNA, 25 bp, probe
caagaggctgaaagagatgaacgag

SEQ ID NO: 102165 - DNA, 25 bp, probe
gatgcaaacacaactcagttcaaga

SEQ ID NO: 102166 - DNA, 25 bp, probe
agaggctgaaagagatgaacgagag

SEQ ID NO: 102167 - DNA, 25 bp, probe
atgcaaacacaactcagttcaagag

SEQ ID NO: 102168 - DNA, 25 bp, probe
tgatgcaaacacaactcagttcaag

SEQ ID NO: 102169 - DNA, 25 bp, probe
cttgatgcaaacacaactcagttca

SEQ ID NO: 102170 - DNA, 25 bp, probe
gatgaacgagagggagaagaaggag

SEQ ID NO: 102171 - DNA, 25 bp, probe
gagatgaacgagagggagaagaagg

SEQ ID NO: 102172 - DNA, 25 bp, probe
atgagggacaagcataagaaggagg

SEQ ID NO: 102173 - DNA, 25 bp, probe
tcaagaggctgaaagagatgaacga

SEQ ID NO: 102174 - DNA, 25 bp, probe
agttcaagaggctgaaagagatgaa

SEQ ID NO: 102175 - DNA, 25 bp, probe
agatgaacgagagggagaagaagga

SEQ ID NO: 102176 - DNA, 25 bp, probe
caaacacaactcagttcaagaggct

SEQ ID NO: 102177 - DNA, 25 bp, probe
ccttgatgcaaacacaactcagttc

SEQ ID NO: 102178 - DNA, 25 bp, probe
cagttcaagaggctgaaagagatga

SEQ ID NO: 102179 - DNA, 25 bp, probe
aaacacaactcagttcaagaggctg

SEQ ID NO: 102180 - DNA, 25 bp, probe
tccttgatgcaaacacaactcagtt

SEQ ID NO: 102181 - DNA, 25 bp, probe
gccaagatgagggacaagcataaga

SEQ ID NO: 102182 - DNA, 25 bp, probe
gctgaaagagatgaacgagagggag

SEQ ID NO: 102183 - DNA, 25 bp, probe
gaggctgaaagagatgaacgagagg

SEQ ID NO: 102184 - DNA, 25 bp, probe
ttcaagaggctgaaagagatgaacg

SEQ ID NO: 102185 - DNA, 25 bp, probe
ttgatgcaaacacaactcagttcaa

SEQ ID NO: 102186 - DNA, 25 bp, probe
ctcagttcaagaggctgaaagagat

SEQ ID NO: 102187 - DNA, 25 bp, probe
tgcaaacacaactcagttcaagagg

SEQ ID NO: 102188 - DNA, 25 bp, probe
tcagttcaagaggctgaaagagatg

SEQ ID NO: 102189 - DNA, 25 bp, probe
gtccttgatgcaaacacaactcagt

SEQ ID NO: 102190 - DNA, 25 bp, probe
aactcagttcaagaggctgaaagag

SEQ ID NO: 102191 - DNA, 25 bp, probe
caactcagttcaagaggctgaaaga

SEQ ID NO: 102192 - DNA, 25 bp, probe
catcactgagtcagtcaactccatc

SEQ ID NO: 102193 - DNA, 25 bp, probe
acaactcagttcaagaggctgaaag

SEQ ID NO: 102194 - DNA, 25 bp, probe
acacaactcagttcaagaggctgaa

SEQ ID NO: 102195 - DNA, 25 bp, probe
aacacaactcagttcaagaggctga

SEQ ID NO: 102196 - DNA, 25 bp, probe
ctcattgatgacttcaggatctcag

SEQ ID NO: 102197 - DNA, 25 bp, probe
attgatgacttcaggatctcaggag

SEQ ID NO: 102198 - DNA, 25 bp, probe
cattgatgacttcaggatctcagga

SEQ ID NO: 102199 - DNA, 25 bp, probe
tcattgatgacttcaggatctcagg

SEQ ID NO: 102200 - DNA, 25 bp, probe
gctcattgatgacttcaggatctca

SEQ ID NO: 102201 - DNA, 25 bp, probe
ttgatgacttcaggatctcaggagt

SEQ ID NO: 102202 - DNA, 25 bp, probe
agctcattgatgacttcaggatctc

SEQ ID NO: 102203 - DNA, 25 bp, probe
cttcaggatctcaggagtcaatgga

SEQ ID NO: 102204 - DNA, 25 bp, probe
cagctcattgatgacttcaggatct

SEQ ID NO: 102205 - DNA, 25 bp, probe
cattgtccagctcattgatgacttc

SEQ ID NO: 102206 - DNA, 25 bp, probe
attgtccagctcattgatgacttca

SEQ ID NO: 102207 - DNA, 25 bp, probe
ttcaggatctcaggagtcaatggag

SEQ ID NO: 102208 - DNA, 25 bp, probe
acttcaggatctcaggagtcaatgg

SEQ ID NO: 102209 - DNA, 25 bp, probe
ccagctcattgatgacttcaggatc

SEQ ID NO: 102210 - DNA, 25 bp, probe
ttgtccagctcattgatgacttcag

SEQ ID NO: 102211 - DNA, 25 bp, probe
cctttcttaataaagtgtggactga

SEQ ID NO: 102212 - DNA, 25 bp, probe
tcctttcttaataaagtgtggactg

SEQ ID NO: 102213 - DNA, 25 bp, probe
caggatctcaggagtcaatggagtc

SEQ ID NO: 102214 - DNA, 25 bp, probe
ctcggagaaagtgtgtgtattcctt

SEQ ID NO: 102215 - DNA, 25 bp, probe
caagatcatccacacggacatcaag

SEQ ID NO: 102216 - DNA, 25 bp, probe
ccattgtccagctcattgatgactt

SEQ ID NO: 102217 - DNA, 25 bp, probe
ttcctttcttaataaagtgtggact

SEQ ID NO: 102218 - DNA, 25 bp, probe
tcggagaaagtgtgtgtattccttt

SEQ ID NO: 102219 - DNA, 25 bp, probe
gagaccattgtccagctcattgatg

SEQ ID NO: 102220 - DNA, 25 bp, probe
tcaggatctcaggagtcaatggagt

SEQ ID NO: 102221 - DNA, 25 bp, probe
tccagctcattgatgacttcaggat

SEQ ID NO: 102222 - DNA, 25 bp, probe
agagaccattgtccagctcattgat

SEQ ID NO: 102223 - DNA, 25 bp, probe
aagagagaccattgtccagctcatt

SEQ ID NO: 102224 - DNA, 25 bp, probe
attcctttcttaataaagtgtggac

SEQ ID NO: 102225 - DNA, 25 bp, probe
ctgaggactctggcttgagactaga

SEQ ID NO: 102226 - DNA, 25 bp, probe
gacttcaggatctcaggagtcaatg

SEQ ID NO: 102227 - DNA, 25 bp, probe
ctctcggagaaagtgtgtgtattcc

SEQ ID NO: 102228 - DNA, 25 bp, probe
agtgtgtgtattcctttcttaataa

SEQ ID NO: 102229 - DNA, 25 bp, probe
aagtgtgtgtattcctttcttaata

SEQ ID NO: 102230 - DNA, 25 bp, probe
gaccattgtccagctcattgatgac

SEQ ID NO: 102231 - DNA, 25 bp, probe
agaccattgtccagctcattgatga

SEQ ID NO: 102232 - DNA, 25 bp, probe
gctctcggagaaagtgtgtgtattc

SEQ ID NO: 102233 - DNA, 25 bp, probe
agctcctcaaatggatcatcaagtc

SEQ ID NO: 102234 - DNA, 25 bp, probe
tctcggagaaagtgtgtgtattcct

SEQ ID NO: 102235 - DNA, 25 bp, probe
tgaggactctggcttgagactagac

SEQ ID NO: 102236 - DNA, 25 bp, probe
cagctcctcaaatggatcatcaagt

SEQ ID NO: 102237 - DNA, 25 bp, probe
aaagtgtgtgtattcctttcttaat

SEQ ID NO: 102238 - DNA, 25 bp, probe
gctcctcaaatggatcatcaagtcc

SEQ ID NO: 102239 - DNA, 25 bp, probe
accattgtccagctcattgatgact

SEQ ID NO: 102240 - DNA, 25 bp, probe
tatagagattgtgtgtgtgtgtgtg

SEQ ID NO: 102241 - DNA, 25 bp, probe
cttctcttctgagtgaactgaggaa

SEQ ID NO: 102242 - DNA, 25 bp, probe
atagagattgtgtgtgtgtgtgtgt

SEQ ID NO: 102243 - DNA, 25 bp, probe
ctatagagattgtgtgtgtgtgtgt

SEQ ID NO: 102244 - DNA, 25 bp, probe
catgaagaagcggaacaagaagatc

SEQ ID NO: 102245 - DNA, 25 bp, probe
cctatagagattgtgtgtgtgtgtg

SEQ ID NO: 102246 - DNA, 25 bp, probe
tcctatagagattgtgtgtgtgtgt

SEQ ID NO: 102247 - DNA, 25 bp, probe
tagagattgtgtgtgtgtgtgtgtg

SEQ ID NO: 102248 - DNA, 25 bp, probe
ctcctatagagattgtgtgtgtgtg

SEQ ID NO: 102249 - DNA, 25 bp, probe
gtgaactgaggaaggtgcttagatg

SEQ ID NO: 102250 - DNA, 25 bp, probe
agtgaactgaggaaggtgcttagat

SEQ ID NO: 102251 - DNA, 25 bp, probe
gaacaagaagatcctggacaactgg

SEQ ID NO: 102252 - DNA, 25 bp, probe
tttctgtgcttgccaatagttgttt

SEQ ID NO: 102253 - DNA, 25 bp, probe
tttcttccttctgcccaagtaaagt

SEQ ID NO: 102254 - DNA, 25 bp, probe
ccatgaagaagcggaacaagaagat

SEQ ID NO: 102255 - DNA, 25 bp, probe
gagtgaactgaggaaggtgcttaga

SEQ ID NO: 102256 - DNA, 25 bp, probe
ctttctgtgcttgccaatagttgtt

SEQ ID NO: 102257 - DNA, 25 bp, probe
tctacaaccctcttctctcagtcac

SEQ ID NO: 102258 - DNA, 25 bp, probe
gtctacaaccctcttctctcagtca

SEQ ID NO: 102259 - DNA, 25 bp, probe
tgagtgaactgaggaaggtgcttag

SEQ ID NO: 102260 - DNA, 25 bp, probe
ctgagtgaactgaggaaggtgctta

SEQ ID NO: 102261 - DNA, 25 bp, probe
gcttctcttctgagtgaactgagga

SEQ ID NO: 102262 - DNA, 25 bp, probe
ttctcttctgagtgaactgaggaag

SEQ ID NO: 102263 - DNA, 25 bp, probe
gaactgaggaaggtgcttagatggt

SEQ ID NO: 102264 - DNA, 25 bp, probe
tgaactgaggaaggtgcttagatgg

SEQ ID NO: 102265 - DNA, 25 bp, probe
atgaagaagcggaacaagaagatcc

SEQ ID NO: 102266 - DNA, 25 bp, probe
aaccatgaagaagcggaacaagaag

SEQ ID NO: 102267 - DNA, 25 bp, probe
ttcttccttctgcccaagtaaagtg

SEQ ID NO: 102268 - DNA, 25 bp, probe
ggaacaagaagatcctggacaactg

SEQ ID NO: 102269 - DNA, 25 bp, probe
aactgaggaaggtgcttagatggtg

SEQ ID NO: 102270 - DNA, 25 bp, probe
aatagttgttttgttttgtggacct

SEQ ID NO: 102271 - DNA, 25 bp, probe
atagttgttttgttttgtggacctg

SEQ ID NO: 102272 - DNA, 25 bp, probe
ctgaggaaggtgcttagatggtgag

SEQ ID NO: 102273 - DNA, 25 bp, probe
aacaagaagatcctggacaactgga

SEQ ID NO: 102274 - DNA, 25 bp, probe
gaagaagcggaacaagaagatcctg

SEQ ID NO: 102275 - DNA, 25 bp, probe
ttgccaatagttgttttgttttgtg

SEQ ID NO: 102276 - DNA, 25 bp, probe
caatagttgttttgttttgtggacc

SEQ ID NO: 102277 - DNA, 25 bp, probe
cttgccaatagttgttttgttttgt

SEQ ID NO: 102278 - DNA, 25 bp, probe
ctctcctatagagattgtgtgtgtg

SEQ ID NO: 102279 - DNA, 25 bp, probe
cactctcctatagagattgtgtgtg

SEQ ID NO: 102280 - DNA, 25 bp, probe
tcactctcctatagagattgtgtgt

SEQ ID NO: 102281 - DNA, 25 bp, probe
ctcactctcctatagagattgtgtg

SEQ ID NO: 102282 - DNA, 25 bp, probe
actctcctatagagattgtgtgtgt

SEQ ID NO: 102283 - DNA, 25 bp, probe
cttccttctgcccaagtaaagtgac

SEQ ID NO: 102284 - DNA, 25 bp, probe
ctctctccttccttcttattgactg

SEQ ID NO: 102285 - DNA, 25 bp, probe
cctctctccttccttcttattgact

SEQ ID NO: 102286 - DNA, 25 bp, probe
tctctccttccttcttattgactgg

SEQ ID NO: 102287 - DNA, 25 bp, probe
ggagcatttcatttggagtgattat

SEQ ID NO: 102288 - DNA, 25 bp, probe
aggagcatttcatttggagtgatta

SEQ ID NO: 102289 - DNA, 25 bp, probe
ccctctctccttccttcttattgac

SEQ ID NO: 102290 - DNA, 25 bp, probe
gagcatttcatttggagtgattatg

SEQ ID NO: 102291 - DNA, 25 bp, probe
ctctccttccttcttattgactggg

SEQ ID NO: 102292 - DNA, 25 bp, probe
gaggagcatttcatttggagtgatt

SEQ ID NO: 102293 - DNA, 25 bp, probe
tcttgtgtcagaagtctagcctcag

SEQ ID NO: 102294 - DNA, 25 bp, probe
gaccaaaccaagctaggacattaaa

SEQ ID NO: 102295 - DNA, 25 bp, probe
ccttcttattgactgggagactgtg

SEQ ID NO: 102296 - DNA, 25 bp, probe
cttccttcttattgactgggagact

SEQ ID NO: 102297 - DNA, 25 bp, probe
ttccttcttattgactgggagactg

SEQ ID NO: 102298 - DNA, 25 bp, probe
agaccaaaccaagctaggacattaa

SEQ ID NO: 102299 - DNA, 25 bp, probe
aagaccaaaccaagctaggacatta

SEQ ID NO: 102300 - DNA, 25 bp, probe
gagttcctcaaattgaccaatagct

SEQ ID NO: 102301 - DNA, 25 bp, probe
agttcctcaaattgaccaatagctg

SEQ ID NO: 102302 - DNA, 25 bp, probe
cttcttattgactgggagactgtgc

SEQ ID NO: 102303 - DNA, 25 bp, probe
ggaggagcatttcatttggagtgat

SEQ ID NO: 102304 - DNA, 25 bp, probe
ccttccttcttattgactgggagac

SEQ ID NO: 102305 - DNA, 25 bp, probe
tccttccttcttattgactgggaga

SEQ ID NO: 102306 - DNA, 25 bp, probe
tctccttccttcttattgactggga

SEQ ID NO: 102307 - DNA, 25 bp, probe
atattttggataagggtctgtggtc

SEQ ID NO: 102308 - DNA, 25 bp, probe
tcatattttggataagggtctgtgg

SEQ ID NO: 102309 - DNA, 25 bp, probe
gctgctgctttcatattttggataa

SEQ ID NO: 102310 - DNA, 25 bp, probe
catattttggataagggtctgtggt

SEQ ID NO: 102311 - DNA, 25 bp, probe
ttcttgtgtcagaagtctagcctca

SEQ ID NO: 102312 - DNA, 25 bp, probe
tgctgctttcatattttggataagg

SEQ ID NO: 102313 - DNA, 25 bp, probe
gctgctttcatattttggataaggg

SEQ ID NO: 102314 - DNA, 25 bp, probe
agcatttcatttggagtgattatga

SEQ ID NO: 102315 - DNA, 25 bp, probe
tgctttcatattttggataagggtc

SEQ ID NO: 102316 - DNA, 25 bp, probe
ctgctttcatattttggataagggt

SEQ ID NO: 102317 - DNA, 25 bp, probe
ttcatattttggataagggtctgtg

SEQ ID NO: 102318 - DNA, 25 bp, probe
tccttcttattgactgggagactgt

SEQ ID NO: 102319 - DNA, 25 bp, probe
gctttcatattttggataagggtct

SEQ ID NO: 102320 - DNA, 25 bp, probe
ttcttattgactgggagactgtgct

SEQ ID NO: 102321 - DNA, 25 bp, probe
cttgtgtcagaagtctagcctcagg

SEQ ID NO: 102322 - DNA, 25 bp, probe
ctgctgctttcatattttggataag

SEQ ID NO: 102323 - DNA, 25 bp, probe
ttacaggttgagcttcaagatggtt

SEQ ID NO: 102324 - DNA, 25 bp, probe
gtgctctcgacagattcttcttgtg

SEQ ID NO: 102325 - DNA, 25 bp, probe
cagaagtctagcctcaggtttctac

SEQ ID NO: 102326 - DNA, 25 bp, probe
tcagaagtctagcctcaggtttcta

SEQ ID NO: 102327 - DNA, 25 bp, probe
gttcctcaaattgaccaatagctgc

SEQ ID NO: 102328 - DNA, 25 bp, probe
agtgaagtatggctgtaagtctcat

SEQ ID NO: 102329 - DNA, 25 bp, probe
aagtgaagtatggctgtaagtctca

SEQ ID NO: 102330 - DNA, 25 bp, probe
tgtaagtctcatggttcagtcctag

SEQ ID NO: 102331 - DNA, 25 bp, probe
gtgaagtatggctgtaagtctcatg

SEQ ID NO: 102332 - DNA, 25 bp, probe
aagtatggctgtaagtctcatggtt

SEQ ID NO: 102333 - DNA, 25 bp, probe
aaagtgaagtatggctgtaagtctc

SEQ ID NO: 102334 - DNA, 25 bp, probe
ctgtaagtctcatggttcagtccta

SEQ ID NO: 102335 - DNA, 25 bp, probe
agtatggctgtaagtctcatggttc

SEQ ID NO: 102336 - DNA, 25 bp, probe
gaagtatggctgtaagtctcatggt

SEQ ID NO: 102337 - DNA, 25 bp, probe
gtaagtctcatggttcagtcctagc

SEQ ID NO: 102338 - DNA, 25 bp, probe
gtatggctgtaagtctcatggttca

SEQ ID NO: 102339 - DNA, 25 bp, probe
tgaagtatggctgtaagtctcatgg

SEQ ID NO: 102340 - DNA, 25 bp, probe
cgtccaggttgtccttgagtaataa

SEQ ID NO: 102341 - DNA, 25 bp, probe
taagtctcatggttcagtcctagca

SEQ ID NO: 102342 - DNA, 25 bp, probe
aagtaggaggatcatttatgcttgg

SEQ ID NO: 102343 - DNA, 25 bp, probe
tatggctgtaagtctcatggttcag

SEQ ID NO: 102344 - DNA, 25 bp, probe
gaagtaggaggatcatttatgcttg

SEQ ID NO: 102345 - DNA, 25 bp, probe
ctcatggttcagtcctagcaagaag

SEQ ID NO: 102346 - DNA, 25 bp, probe
ctgaagtaggaggatcatttatgct

SEQ ID NO: 102347 - DNA, 25 bp, probe
tgaagtaggaggatcatttatgctt

SEQ ID NO: 102348 - DNA, 25 bp, probe
aggctgaagtaggaggatcatttat

SEQ ID NO: 102349 - DNA, 25 bp, probe
ggctgaagtaggaggatcatttatg

SEQ ID NO: 102350 - DNA, 25 bp, probe
taggaggatcatttatgcttgggag

SEQ ID NO: 102351 - DNA, 25 bp, probe
gtccaggttgtccttgagtaataaa

SEQ ID NO: 102352 - DNA, 25 bp, probe
agttctcatggtcagaagttctcat

SEQ ID NO: 102353 - DNA, 25 bp, probe
agtaggaggatcatttatgcttggg

SEQ ID NO: 102354 - DNA, 25 bp, probe
gctgaagtaggaggatcatttatgc

SEQ ID NO: 102355 - DNA, 25 bp, probe
gaggctgaagtaggaggatcattta

SEQ ID NO: 102356 - DNA, 25 bp, probe
tctcatggttcagtcctagcaagaa

SEQ ID NO: 102357 - DNA, 25 bp, probe
gtaggaggatcatttatgcttggga

SEQ ID NO: 102358 - DNA, 25 bp, probe
aagttctcatggtcagaagttctca

SEQ ID NO: 102359 - DNA, 25 bp, probe
cagaagcaagtcaggtttcatgtaa

SEQ ID NO: 102360 - DNA, 25 bp, probe
catgtcttcagaagcaagtcaggtt

SEQ ID NO: 102361 - DNA, 25 bp, probe
agaagcaagtcaggtttcatgtaac

SEQ ID NO: 102362 - DNA, 25 bp, probe
ctcctacctgcttacaatttggaaa

SEQ ID NO: 102363 - DNA, 25 bp, probe
aagtctcatggttcagtcctagcaa

SEQ ID NO: 102364 - DNA, 25 bp, probe
tcagtcctagcaagaagcgagaatt

SEQ ID NO: 102365 - DNA, 25 bp, probe
aaagtgatgaatttcagagctgatg

SEQ ID NO: 102366 - DNA, 25 bp, probe
gatgaatttcagagctgatgtgttc

SEQ ID NO: 102367 - DNA, 25 bp, probe
aagtgatgaatttcagagctgatgt

SEQ ID NO: 102368 - DNA, 25 bp, probe
ttcagtcctagcaagaagcgagaat

SEQ ID NO: 102369 - DNA, 25 bp, probe
tcagaagcaagtcaggtttcatgta

SEQ ID NO: 102370 - DNA, 25 bp, probe
tgatgaatttcagagctgatgtgtt

SEQ ID NO: 102371 - DNA, 25 bp, probe
tcttcagaagcaagtcaggtttcat

SEQ ID NO: 102372 - DNA, 25 bp, probe
caagaagtacgatgtgtggagcatg

SEQ ID NO: 102373 - DNA, 25 bp, probe
aagaagtacgatgtgtggagcatgg

SEQ ID NO: 102374 - DNA, 25 bp, probe
ccaagaagtacgatgtgtggagcat

SEQ ID NO: 102375 - DNA, 25 bp, probe
gttggaacctgcaataaactcgctg

SEQ ID NO: 102376 - DNA, 25 bp, probe
aacctgcaataaactcgctgttcct

SEQ ID NO: 102377 - DNA, 25 bp, probe
ctacgaccccaagaagtacgatgtg

SEQ ID NO: 102378 - DNA, 25 bp, probe
aagtcatgcatttcttgagcaccta

SEQ ID NO: 102379 - DNA, 25 bp, probe
gaacctgcaataaactcgctgttcc

SEQ ID NO: 102380 - DNA, 25 bp, probe
ggaacctgcaataaactcgctgttc

SEQ ID NO: 102381 - DNA, 25 bp, probe
gaagtcatgcatttcttgagcacct

SEQ ID NO: 102382 - DNA, 25 bp, probe
ggaagtcatgcatttcttgagcacc

SEQ ID NO: 102383 - DNA, 25 bp, probe
gggaagtcatgcatttcttgagcac

SEQ ID NO: 102384 - DNA, 25 bp, probe
agttatgagttgaagtcttgaatgc

SEQ ID NO: 102385 - DNA, 25 bp, probe
aatgttgatgtaagtaatgcggtta

SEQ ID NO: 102386 - DNA, 25 bp, probe
taatgttgatgtaagtaatgcggtt

SEQ ID NO: 102387 - DNA, 25 bp, probe
ataatgttgatgtaagtaatgcggt

SEQ ID NO: 102388 - DNA, 25 bp, probe
gcagcctagtcttgagaacataatt

SEQ ID NO: 102389 - DNA, 25 bp, probe
cataatgttgatgtaagtaatgcgg

SEQ ID NO: 102390 - DNA, 25 bp, probe
ccataatgttgatgtaagtaatgcg

SEQ ID NO: 102391 - DNA, 25 bp, probe
tatattgccgcagtaaccagttaat

SEQ ID NO: 102392 - DNA, 25 bp, probe
tatatattgccgcagtaaccagtta

SEQ ID NO: 102393 - DNA, 25 bp, probe
ggaagtggaagtataagtgaatgat

SEQ ID NO: 102394 - DNA, 25 bp, probe
atatattgccgcagtaaccagttaa

SEQ ID NO: 102395 - DNA, 25 bp, probe
atattgccgcagtaaccagttaata

SEQ ID NO: 102396 - DNA, 25 bp, probe
taatgcggttactgaatcataagaa

SEQ ID NO: 102397 - DNA, 25 bp, probe
tattgccgcagtaaccagttaataa

SEQ ID NO: 102398 - DNA, 25 bp, probe
gagttatgagttgaagtcttgaatg

SEQ ID NO: 102399 - DNA, 25 bp, probe
ttgccatgattaagagagaatgctt

SEQ ID NO: 102400 - DNA, 25 bp, probe
agagttatgagttgaagtcttgaat

SEQ ID NO: 102401 - DNA, 25 bp, probe
atgttgatgtaagtaatgcggttac

SEQ ID NO: 102402 - DNA, 25 bp, probe
gttgccatgattaagagagaatgct

SEQ ID NO: 102403 - DNA, 25 bp, probe
accataatgttgatgtaagtaatgc

SEQ ID NO: 102404 - DNA, 25 bp, probe
aatccatgaagtagtgtctgccata

SEQ ID NO: 102405 - DNA, 25 bp, probe
gtaatgcggttactgaatcataaga

SEQ ID NO: 102406 - DNA, 25 bp, probe
gttatgagttgaagtcttgaatgca

SEQ ID NO: 102407 - DNA, 25 bp, probe
ttatgagttgaagtcttgaatgcag

SEQ ID NO: 102408 - DNA, 25 bp, probe
gggaagtggaagtataagtgaatga

SEQ ID NO: 102409 - DNA, 25 bp, probe
agggaagtggaagtataagtgaatg

SEQ ID NO: 102410 - DNA, 25 bp, probe
ttagtgggatgatgtaaatagaggc

SEQ ID NO: 102411 - DNA, 25 bp, probe
cgtatgaatgaaaggattgatggtg

SEQ ID NO: 102412 - DNA, 25 bp, probe
atttgcgtttattgagagagaggat

SEQ ID NO: 102413 - DNA, 25 bp, probe
taaactattaccacacagcccataa

SEQ ID NO: 102414 - DNA, 25 bp, probe
aatgctttctattggagtttcagga

SEQ ID NO: 102415 - DNA, 25 bp, probe
aaactattaccacacagcccataaa

SEQ ID NO: 102416 - DNA, 25 bp, probe
aaagggaagtggaagtataagtgaa

SEQ ID NO: 102417 - DNA, 25 bp, probe
ccgttgccatgattaagagagaatg

SEQ ID NO: 102418 - DNA, 25 bp, probe
agtgggatgatgtaaatagaggcta

SEQ ID NO: 102419 - DNA, 25 bp, probe
tagtgggatgatgtaaatagaggct

SEQ ID NO: 102420 - DNA, 25 bp, probe
ttaaactattaccacacagcccata

SEQ ID NO: 102421 - DNA, 25 bp, probe
aagggaagtggaagtataagtgaat

SEQ ID NO: 102422 - DNA, 25 bp, probe
atccatgaagtagtgtctgccatac

SEQ ID NO: 102423 - DNA, 25 bp, probe
tgaatgaaaggattgatggtgattt

SEQ ID NO: 102424 - DNA, 25 bp, probe
tatgagttgaagtcttgaatgcagg

SEQ ID NO: 102425 - DNA, 25 bp, probe
gtatgaatgaaaggattgatggtga

SEQ ID NO: 102426 - DNA, 25 bp, probe
aatttggttacttgggtttggatac

SEQ ID NO: 102427 - DNA, 25 bp, probe
aatcttggaaggaaagtaagggaaa

SEQ ID NO: 102428 - DNA, 25 bp, probe
ggaaatgaagggaaaaggaaagatg

SEQ ID NO: 102429 - DNA, 25 bp, probe
tggaaatgaagggaaaaggaaagat

SEQ ID NO: 102430 - DNA, 25 bp, probe
gaaatgaagggaaaaggaaagatgc

SEQ ID NO: 102431 - DNA, 25 bp, probe
atgtggaaatgaagggaaaaggaaa

SEQ ID NO: 102432 - DNA, 25 bp, probe
gtggaaatgaagggaaaaggaaaga

SEQ ID NO: 102433 - DNA, 25 bp, probe
gatgtggaaatgaagggaaaaggaa

SEQ ID NO: 102434 - DNA, 25 bp, probe
tgtggaaatgaagggaaaaggaaag

SEQ ID NO: 102435 - DNA, 25 bp, probe
aaatgaagggaaaaggaaagatgcg

SEQ ID NO: 102436 - DNA, 25 bp, probe
atgaagggaaaaggaaagatgcgaa

SEQ ID NO: 102437 - DNA, 25 bp, probe
aatgaagggaaaaggaaagatgcga

SEQ ID NO: 102438 - DNA, 25 bp, probe
ggatgtggaaatgaagggaaaagga

SEQ ID NO: 102439 - DNA, 25 bp, probe
gaagggaaaaggaaagatgcgaaca

SEQ ID NO: 102440 - DNA, 25 bp, probe
tgaagggaaaaggaaagatgcgaac

SEQ ID NO: 102441 - DNA, 25 bp, probe
gggatgtggaaatgaagggaaaagg

SEQ ID NO: 102442 - DNA, 25 bp, probe
ggggatgtggaaatgaagggaaaag

SEQ ID NO: 102443 - DNA, 25 bp, probe
cacctacattatctcacttagtcct

SEQ ID NO: 102444 - DNA, 25 bp, probe
tcacctacattatctcacttagtcc

SEQ ID NO: 102445 - DNA, 25 bp, probe
gactacttggaactaggctcttatg

SEQ ID NO: 102446 - DNA, 25 bp, probe
ctacttggaactaggctcttatgtg

SEQ ID NO: 102447 - DNA, 25 bp, probe
tgactacttggaactaggctcttat

SEQ ID NO: 102448 - DNA, 25 bp, probe
ttgactacttggaactaggctctta

SEQ ID NO: 102449 - DNA, 25 bp, probe
actacttggaactaggctcttatgt

SEQ ID NO: 102450 - DNA, 25 bp, probe
tacttggaactaggctcttatgtgt

SEQ ID NO: 102451 - DNA, 25 bp, probe
taattcagcacttaactatgagcca

SEQ ID NO: 102452 - DNA, 25 bp, probe
acctacattatctcacttagtcctt

SEQ ID NO: 102453 - DNA, 25 bp, probe
ataattcagcacttaactatgagcc

SEQ ID NO: 102454 - DNA, 25 bp, probe
aattcagcacttaactatgagccag

SEQ ID NO: 102455 - DNA, 25 bp, probe
cttgactacttggaactaggctctt

SEQ ID NO: 102456 - DNA, 25 bp, probe
acttcacctacattatctcacttag

SEQ ID NO: 102457 - DNA, 25 bp, probe
ctcttgactacttggaactaggctc

SEQ ID NO: 102458 - DNA, 25 bp, probe
ttcacctacattatctcacttagtc

SEQ ID NO: 102459 - DNA, 25 bp, probe
cttcacctacattatctcacttagt

SEQ ID NO: 102460 - DNA, 25 bp, probe
acttggaactaggctcttatgtgtg

SEQ ID NO: 102461 - DNA, 25 bp, probe
caggctcttgactacttggaactag

SEQ ID NO: 102462 - DNA, 25 bp, probe
tcttgactacttggaactaggctct

SEQ ID NO: 102463 - DNA, 25 bp, probe
aacttcacctacattatctcactta

SEQ ID NO: 102464 - DNA, 25 bp, probe
ctgtgaagaaagaggttaggagtag

SEQ ID NO: 102465 - DNA, 25 bp, probe
ggcatcatactaaacttcacctaca

SEQ ID NO: 102466 - DNA, 25 bp, probe
tgtgaagaaagaggttaggagtaga

SEQ ID NO: 102467 - DNA, 25 bp, probe
attactctccatatcccttcctctc

SEQ ID NO: 102468 - DNA, 25 bp, probe
cataattcagcacttaactatgagc

SEQ ID NO: 102469 - DNA, 25 bp, probe
gtgaagaaagaggttaggagtagat

SEQ ID NO: 102470 - DNA, 25 bp, probe
gattactctccatatcccttcctct

SEQ ID NO: 102471 - DNA, 25 bp, probe
attcagcacttaactatgagccagg

SEQ ID NO: 102472 - DNA, 25 bp, probe
tcaggctcttgactacttggaacta

SEQ ID NO: 102473 - DNA, 25 bp, probe
aatctgtgaagaaagaggttaggag

SEQ ID NO: 102474 - DNA, 25 bp, probe
tctgtgaagaaagaggttaggagta

SEQ ID NO: 102475 - DNA, 25 bp, probe
aaatctgtgaagaaagaggttagga

SEQ ID NO: 102476 - DNA, 25 bp, probe
gcatcatactaaacttcacctacat

SEQ ID NO: 102477 - DNA, 25 bp, probe
atctgtgaagaaagaggttaggagt

SEQ ID NO: 102478 - DNA, 25 bp, probe
catcagactgtcaagaagaggaaag

SEQ ID NO: 102479 - DNA, 25 bp, probe
ttactctccatatcccttcctctca

SEQ ID NO: 102480 - DNA, 25 bp, probe
tctcacttagtcctttatcatcctt

SEQ ID NO: 102481 - DNA, 25 bp, probe
gagaccagcttagccaacatagtaa

SEQ ID NO: 102482 - DNA, 25 bp, probe
atctcacttagtcctttatcatcct

SEQ ID NO: 102483 - DNA, 25 bp, probe
tactctccatatcccttcctctcag

SEQ ID NO: 102484 - DNA, 25 bp, probe
aggctcttgactacttggaactagg

SEQ ID NO: 102485 - DNA, 25 bp, probe
aaacttcacctacattatctcactt

SEQ ID NO: 102486 - DNA, 25 bp, probe
tgaagaaagaggttaggagtagata

SEQ ID NO: 102487 - DNA, 25 bp, probe
gggttggaaacttagcactttatat

SEQ ID NO: 102488 - DNA, 25 bp, probe
ggttggaaacttagcactttatatt

SEQ ID NO: 102489 - DNA, 25 bp, probe
acagaacattcaggatatgtcaata

SEQ ID NO: 102490 - DNA, 25 bp, probe
tacagaacattcaggatatgtcaat

SEQ ID NO: 102491 - DNA, 25 bp, probe
atacagaacattcaggatatgtcaa

SEQ ID NO: 102492 - DNA, 25 bp, probe
ggggttggaaacttagcactttata

SEQ ID NO: 102493 - DNA, 25 bp, probe
tatacagaacattcaggatatgtca

SEQ ID NO: 102494 - DNA, 25 bp, probe
cagaacattcaggatatgtcaataa

SEQ ID NO: 102495 - DNA, 25 bp, probe
tgctacctcctcagagtttcagaag

SEQ ID NO: 102496 - DNA, 25 bp, probe
ctgctacctcctcagagtttcagaa

SEQ ID NO: 102497 - DNA, 25 bp, probe
gttggaaacttagcactttatattt

SEQ ID NO: 102498 - DNA, 25 bp, probe
aggggttggaaacttagcactttat

SEQ ID NO: 102499 - DNA, 25 bp, probe
ctacaagagtatccctgtggaggac

SEQ ID NO: 102500 - DNA, 25 bp, probe
ctacctcctcagagtttcagaagcc

SEQ ID NO: 102501 - DNA, 25 bp, probe
ttatacagaacattcaggatatgtc

SEQ ID NO: 102502 - DNA, 25 bp, probe
tttccgctacaagagtatccctgtg

SEQ ID NO: 102503 - DNA, 25 bp, probe
cttttccgctacaagagtatccctg

SEQ ID NO: 102504 - DNA, 25 bp, probe
caggggttggaaacttagcacttta

SEQ ID NO: 102505 - DNA, 25 bp, probe
tacaagagtatccctgtggaggaca

SEQ ID NO: 102506 - DNA, 25 bp, probe
cagaaatcagctagacgctataccg

SEQ ID NO: 102507 - DNA, 25 bp, probe
gcagaaatcagctagacgctatacc

SEQ ID NO: 102508 - DNA, 25 bp, probe
ggcagaaatcagctagacgctatac

SEQ ID NO: 102509 - DNA, 25 bp, probe
caagagtatccctgtggaggacaac

SEQ ID NO: 102510 - DNA, 25 bp, probe
atcctctggcagaaatcagctagac

SEQ ID NO: 102511 - DNA, 25 bp, probe
catcctctggcagaaatcagctaga

SEQ ID NO: 102512 - DNA, 25 bp, probe
caccatctgtctggcatacctcatg

SEQ ID NO: 102513 - DNA, 25 bp, probe
gaaatcagctagacgctataccgtg

SEQ ID NO: 102514 - DNA, 25 bp, probe
tggcagaaatcagctagacgctata

SEQ ID NO: 102515 - DNA, 25 bp, probe
ttttccgctacaagagtatccctgt

SEQ ID NO: 102516 - DNA, 25 bp, probe
agaaatcagctagacgctataccgt

SEQ ID NO: 102517 - DNA, 25 bp, probe
gacaaccagatggtggagatcagtg

SEQ ID NO: 102518 - DNA, 25 bp, probe
ccttttccgctacaagagtatccct

SEQ ID NO: 102519 - DNA, 25 bp, probe
agaacattcaggatatgtcaataaa

SEQ ID NO: 102520 - DNA, 25 bp, probe
acaagagtatccctgtggaggacaa

SEQ ID NO: 102521 - DNA, 25 bp, probe
gctacaagagtatccctgtggagga

SEQ ID NO: 102522 - DNA, 25 bp, probe
tttatacagaacattcaggatatgt

SEQ ID NO: 102523 - DNA, 25 bp, probe
gctacctcctcagagtttcagaagc

SEQ ID NO: 102524 - DNA, 25 bp, probe
aatcagctagacgctataccgtgga

SEQ ID NO: 102525 - DNA, 25 bp, probe
ccataggcttcattgactgggtgaa

SEQ ID NO: 102526 - DNA, 25 bp, probe
ctggcagaaatcagctagacgctat

SEQ ID NO: 102527 - DNA, 25 bp, probe
ccatcctctggcagaaatcagctag

SEQ ID NO: 102528 - DNA, 25 bp, probe
aaatcagctagacgctataccgtgg

SEQ ID NO: 102529 - DNA, 25 bp, probe
gaacattcaggatatgtcaataaaa

SEQ ID NO: 102530 - DNA, 25 bp, probe
gcgctggaaaattatttgtgctcag

SEQ ID NO: 102531 - DNA, 25 bp, probe
taactacttctctattggcgtggat

SEQ ID NO: 102532 - DNA, 25 bp, probe
ataactacttctctattggcgtgga

SEQ ID NO: 102533 - DNA, 25 bp, probe
aataactacttctctattggcgtgg

SEQ ID NO: 102534 - DNA, 25 bp, probe
gaggaggttatgaaggacagaatct

SEQ ID NO: 102535 - DNA, 25 bp, probe
acatctgaatccatcttctcaacat

SEQ ID NO: 102536 - DNA, 25 bp, probe
cacatctgaatccatcttctcaaca

SEQ ID NO: 102537 - DNA, 25 bp, probe
ccacatctgaatccatcttctcaac

SEQ ID NO: 102538 - DNA, 25 bp, probe
ggaggaggttatgaaggacagaatc

SEQ ID NO: 102539 - DNA, 25 bp, probe
catctgaatccatcttctcaacatg

SEQ ID NO: 102540 - DNA, 25 bp, probe
aactacttctctattggcgtggatg

SEQ ID NO: 102541 - DNA, 25 bp, probe
agaatgaagaacaagctatggtact

SEQ ID NO: 102542 - DNA, 25 bp, probe
cagaatgaagaacaagctatggtac

SEQ ID NO: 102543 - DNA, 25 bp, probe
gtaccagacctaagtgacaagagac

SEQ ID NO: 102544 - DNA, 25 bp, probe
atctgaatccatcttctcaacatgc

SEQ ID NO: 102545 - DNA, 25 bp, probe
taccagacctaagtgacaagagact

SEQ ID NO: 102546 - DNA, 25 bp, probe
gcagaatgaagaacaagctatggta

SEQ ID NO: 102547 - DNA, 25 bp, probe
gaatgaagaacaagctatggtactt

SEQ ID NO: 102548 - DNA, 25 bp, probe
gacctaagtgacaagagactggaag

SEQ ID NO: 102549 - DNA, 25 bp, probe
gttccttcaccctcacagtatttat

SEQ ID NO: 102550 - DNA, 25 bp, probe
ttccttcaccctcacagtatttatt

SEQ ID NO: 102551 - DNA, 25 bp, probe
ctaagtgacaagagactggaagtgg

SEQ ID NO: 102552 - DNA, 25 bp, probe
cctaagtgacaagagactggaagtg

SEQ ID NO: 102553 - DNA, 25 bp, probe
agacctaagtgacaagagactggaa

SEQ ID NO: 102554 - DNA, 25 bp, probe
ttgccacatctgaatccatcttctc

SEQ ID NO: 102555 - DNA, 25 bp, probe
cacttctcgtctttgtcaatcctaa

SEQ ID NO: 102556 - DNA, 25 bp, probe
tccttcaccctcacagtatttatta

SEQ ID NO: 102557 - DNA, 25 bp, probe
acttctcgtctttgtcaatcctaag

SEQ ID NO: 102558 - DNA, 25 bp, probe
aggaggttatgaaggacagaatctg

SEQ ID NO: 102559 - DNA, 25 bp, probe
tcaccctcacagtatttattatcct

SEQ ID NO: 102560 - DNA, 25 bp, probe
aatttgccacatctgaatccatctt

SEQ ID NO: 102561 - DNA, 25 bp, probe
acctaagtgacaagagactggaagt

SEQ ID NO: 102562 - DNA, 25 bp, probe
gccacatctgaatccatcttctcaa

SEQ ID NO: 102563 - DNA, 25 bp, probe
cattgaaagtgcctcatctgaataa

SEQ ID NO: 102564 - DNA, 25 bp, probe
acattgaaagtgcctcatctgaata

SEQ ID NO: 102565 - DNA, 25 bp, probe
tacattgaaagtgcctcatctgaat

SEQ ID NO: 102566 - DNA, 25 bp, probe
atacattgaaagtgcctcatctgaa

SEQ ID NO: 102567 - DNA, 25 bp, probe
gtgatacctcaacaaactgaagaaa

SEQ ID NO: 102568 - DNA, 25 bp, probe
tgtaccagacctaagtgacaagaga

SEQ ID NO: 102569 - DNA, 25 bp, probe
gtgtaccagacctaagtgacaagag

SEQ ID NO: 102570 - DNA, 25 bp, probe
aggatttagagatgagtaaagtggt

SEQ ID NO: 102571 - DNA, 25 bp, probe
attgaaagtgcctcatctgaataaa

SEQ ID NO: 102572 - DNA, 25 bp, probe
gaatttgccacatctgaatccatct

SEQ ID NO: 102573 - DNA, 25 bp, probe
catacattgaaagtgcctcatctga

SEQ ID NO: 102574 - DNA, 25 bp, probe
taagtgacaagagactggaagtggt

SEQ ID NO: 102575 - DNA, 25 bp, probe
tctaactcaagactgttctggaatg

SEQ ID NO: 102576 - DNA, 25 bp, probe
ctaactcaagactgttctggaatga

SEQ ID NO: 102577 - DNA, 25 bp, probe
cagcatctctgtcctcttgattaag

SEQ ID NO: 102578 - DNA, 25 bp, probe
actatgaggctagttcttgtctaac

SEQ ID NO: 102579 - DNA, 25 bp, probe
cttgattaagagattctccttccag

SEQ ID NO: 102580 - DNA, 25 bp, probe
ttgattaagagattctccttccagg

SEQ ID NO: 102581 - DNA, 25 bp, probe
gagtatgtatgtttacctgtgccta

SEQ ID NO: 102582 - DNA, 25 bp, probe
agtatgtatgtttacctgtgcctaa

SEQ ID NO: 102583 - DNA, 25 bp, probe
atgagtatgtatgtttacctgtgcc

SEQ ID NO: 102584 - DNA, 25 bp, probe
gccagagataagaatccaaactatg

SEQ ID NO: 102585 - DNA, 25 bp, probe
ccagcatctctgtcctcttgattaa

SEQ ID NO: 102586 - DNA, 25 bp, probe
agataagaatccaaactatgaggct

SEQ ID NO: 102587 - DNA, 25 bp, probe
gagataagaatccaaactatgaggc

SEQ ID NO: 102588 - DNA, 25 bp, probe
gtatgtatgtttacctgtgcctaat

SEQ ID NO: 102589 - DNA, 25 bp, probe
tgagtatgtatgtttacctgtgcct

SEQ ID NO: 102590 - DNA, 25 bp, probe
tgattaagagattctccttccaggc

SEQ ID NO: 102591 - DNA, 25 bp, probe
agcatctctgtcctcttgattaaga

SEQ ID NO: 102592 - DNA, 25 bp, probe
atgtatgtttacctgtgcctaataa

SEQ ID NO: 102593 - DNA, 25 bp, probe
catgagtatgtatgtttacctgtgc

SEQ ID NO: 102594 - DNA, 25 bp, probe
accatgagtatgtatgtttacctgt

SEQ ID NO: 102595 - DNA, 25 bp, probe
ccatgagtatgtatgtttacctgtg

SEQ ID NO: 102596 - DNA, 25 bp, probe
gataagaatccaaactatgaggcta

SEQ ID NO: 102597 - DNA, 25 bp, probe
ccagagataagaatccaaactatga

SEQ ID NO: 102598 - DNA, 25 bp, probe
tcttgattaagagattctccttcca

SEQ ID NO: 102599 - DNA, 25 bp, probe
tgtatgtttacctgtgcctaataaa

SEQ ID NO: 102600 - DNA, 25 bp, probe
atgtttacctgtgcctaataaagga

SEQ ID NO: 102601 - DNA, 25 bp, probe
gtttacctgtgcctaataaaggaga

SEQ ID NO: 102602 - DNA, 25 bp, probe
tatgaggctagttcttgtctaactc

SEQ ID NO: 102603 - DNA, 25 bp, probe
tttacctgtgcctaataaaggagaa

SEQ ID NO: 102604 - DNA, 25 bp, probe
tgtttacctgtgcctaataaaggag

SEQ ID NO: 102605 - DNA, 25 bp, probe
ctatgaggctagttcttgtctaact

SEQ ID NO: 102606 - DNA, 25 bp, probe
acctgtgcctaataaaggagaatta

SEQ ID NO: 102607 - DNA, 25 bp, probe
tacctgtgcctaataaaggagaatt

SEQ ID NO: 102608 - DNA, 25 bp, probe
ttacctgtgcctaataaaggagaat

SEQ ID NO: 102609 - DNA, 25 bp, probe
acaatccctttcacaaacaaaccag

SEQ ID NO: 102610 - DNA, 25 bp, probe
gacaatccctttcacaaacaaacca

SEQ ID NO: 102611 - DNA, 25 bp, probe
ataagaatccaaactatgaggctag

SEQ ID NO: 102612 - DNA, 25 bp, probe
agagataagaatccaaactatgagg

SEQ ID NO: 102613 - DNA, 25 bp, probe
gtatgtttacctgtgcctaataaag

SEQ ID NO: 102614 - DNA, 25 bp, probe
tatgtttacctgtgcctaataaagg

SEQ ID NO: 102615 - DNA, 25 bp, probe
aatcccaggtccatactctaggttt

SEQ ID NO: 102616 - DNA, 25 bp, probe
tatgtatgtttacctgtgcctaata

SEQ ID NO: 102617 - DNA, 25 bp, probe
cctgtgcctaataaaggagaattat

SEQ ID NO: 102618 - DNA, 25 bp, probe
taagaatccaaactatgaggctagt

SEQ ID NO: 102619 - DNA, 25 bp, probe
ctcttgtggaagtgtgtcttagtta

SEQ ID NO: 102620 - DNA, 25 bp, probe
tcttgtggaagtgtgtcttagttac

SEQ ID NO: 102621 - DNA, 25 bp, probe
aatgtatcttgagaggtaggagcag

SEQ ID NO: 102622 - DNA, 25 bp, probe
tggaagtgtgtcttagttacatcaa

SEQ ID NO: 102623 - DNA, 25 bp, probe
ttgtggaagtgtgtcttagttacat

SEQ ID NO: 102624 - DNA, 25 bp, probe
gtggaagtgtgtcttagttacatca

SEQ ID NO: 102625 - DNA, 25 bp, probe
tgtggaagtgtgtcttagttacatc

SEQ ID NO: 102626 - DNA, 25 bp, probe
ggaagtgtgtcttagttacatcaag

SEQ ID NO: 102627 - DNA, 25 bp, probe
cttgtggaagtgtgtcttagttaca

SEQ ID NO: 102628 - DNA, 25 bp, probe
atgtatcttgagaggtaggagcaga

SEQ ID NO: 102629 - DNA, 25 bp, probe
gctcctcagtcttgtaaatgtatct

SEQ ID NO: 102630 - DNA, 25 bp, probe
tcgcttacatcactttactccataa

SEQ ID NO: 102631 - DNA, 25 bp, probe
tgtatcttgagaggtaggagcagag

SEQ ID NO: 102632 - DNA, 25 bp, probe
tgctcctcagtcttgtaaatgtatc

SEQ ID NO: 102633 - DNA, 25 bp, probe
gtcgcttacatcactttactccata

SEQ ID NO: 102634 - DNA, 25 bp, probe
agaacaaagataaaccagcctcaat

SEQ ID NO: 102635 - DNA, 25 bp, probe
cgttgcttgtggatttatagtagtt

SEQ ID NO: 102636 - DNA, 25 bp, probe
gaacaaagataaaccagcctcaatc

SEQ ID NO: 102637 - DNA, 25 bp, probe
aaccgttgcttgtggatttatagta

SEQ ID NO: 102638 - DNA, 25 bp, probe
taaatgtatcttgagaggtaggagc

SEQ ID NO: 102639 - DNA, 25 bp, probe
aagaacaaagataaaccagcctcaa

SEQ ID NO: 102640 - DNA, 25 bp, probe
aaagaacaaagataaaccagcctca

SEQ ID NO: 102641 - DNA, 25 bp, probe
ccgttgcttgtggatttatagtagt

SEQ ID NO: 102642 - DNA, 25 bp, probe
accgttgcttgtggatttatagtag

SEQ ID NO: 102643 - DNA, 25 bp, probe
aaatgtatcttgagaggtaggagca

SEQ ID NO: 102644 - DNA, 25 bp, probe
gaaaggaaggaaggaaagaaggaag

SEQ ID NO: 102645 - DNA, 25 bp, probe
gaagaaaggaaggaaggaaagaagg

SEQ ID NO: 102646 - DNA, 25 bp, probe
ggaagaaaggaaggaaggaaagaag

SEQ ID NO: 102647 - DNA, 25 bp, probe
ctgaaatggtagacctgtaattgtg

SEQ ID NO: 102648 - DNA, 25 bp, probe
gctcttgtggaagtgtgtcttagtt

SEQ ID NO: 102649 - DNA, 25 bp, probe
actataaactctcttgttacagccc

SEQ ID NO: 102650 - DNA, 25 bp, probe
tgaaatggtagacctgtaattgtgg

SEQ ID NO: 102651 - DNA, 25 bp, probe
gcttgtggatttatagtagttcagt

SEQ ID NO: 102652 - DNA, 25 bp, probe
tgcttgtggatttatagtagttcag

SEQ ID NO: 102653 - DNA, 25 bp, probe
agaaaggaaggaaggaaagaaggaa

SEQ ID NO: 102654 - DNA, 25 bp, probe
aagaaaggaaggaaggaaagaagga

SEQ ID NO: 102655 - DNA, 25 bp, probe
aggaagaaaggaaggaaggaaagaa

SEQ ID NO: 102656 - DNA, 25 bp, probe
gctgaaatggtagacctgtaattgt

SEQ ID NO: 102657 - DNA, 25 bp, probe
aacaaagataaaccagcctcaatcc

SEQ ID NO: 102658 - DNA, 25 bp, probe
tgtaaatgtatcttgagaggtagga

SEQ ID NO: 102659 - DNA, 25 bp, probe
actgatctaaccctaaatccaactc

SEQ ID NO: 102660 - DNA, 25 bp, probe
gaaccgttgcttgtggatttatagt

SEQ ID NO: 102661 - DNA, 25 bp, probe
tgaaccgttgcttgtggatttatag

SEQ ID NO: 102662 - DNA, 25 bp, probe
ctgaaccgttgcttgtggatttata

SEQ ID NO: 102663 - DNA, 25 bp, probe
gttccttgtaacctcttcttcctag

SEQ ID NO: 102664 - DNA, 25 bp, probe
tacagtgattaagaggaaagcaagg

SEQ ID NO: 102665 - DNA, 25 bp, probe
acagtgattaagaggaaagcaaggg

SEQ ID NO: 102666 - DNA, 25 bp, probe
atcacttcaggtcaggagtttgaga

SEQ ID NO: 102667 - DNA, 25 bp, probe
gatcacttcaggtcaggagtttgag

SEQ ID NO: 102668 - DNA, 25 bp, probe
cagatcacttcaggtcaggagtttg

SEQ ID NO: 102669 - DNA, 25 bp, probe
agatcacttcaggtcaggagtttga

SEQ ID NO: 102670 - DNA, 25 bp, probe
cagtgattaagaggaaagcaagggc

SEQ ID NO: 102671 - DNA, 25 bp, probe
ggttccttgtaacctcttcttccta

SEQ ID NO: 102672 - DNA, 25 bp, probe
ttccttgtaacctcttcttcctagg

SEQ ID NO: 102673 - DNA, 25 bp, probe
tcacttcaggtcaggagtttgagac

SEQ ID NO: 102674 - DNA, 25 bp, probe
gcagatcacttcaggtcaggagttt

SEQ ID NO: 102675 - DNA, 25 bp, probe
agtgattaagaggaaagcaagggcg

SEQ ID NO: 102676 - DNA, 25 bp, probe
gctgtatgaaaagggtgggaatgtc

SEQ ID NO: 102677 - DNA, 25 bp, probe
ctgtatgaaaagggtgggaatgtcc

SEQ ID NO: 102678 - DNA, 25 bp, probe
tgtatgaaaagggtgggaatgtcca

SEQ ID NO: 102679 - DNA, 25 bp, probe
ctatgggctgtatgaaaagggtggg

SEQ ID NO: 102680 - DNA, 25 bp, probe
ggctgtatgaaaagggtgggaatgt

SEQ ID NO: 102681 - DNA, 25 bp, probe
cttgtaacctcttcttcctaggtcc

SEQ ID NO: 102682 - DNA, 25 bp, probe
ccttgtaacctcttcttcctaggtc

SEQ ID NO: 102683 - DNA, 25 bp, probe
ttgtaacctcttcttcctaggtcct

SEQ ID NO: 102684 - DNA, 25 bp, probe
tccttgtaacctcttcttcctaggt

SEQ ID NO: 102685 - DNA, 25 bp, probe
tgtaacctcttcttcctaggtcctg

SEQ ID NO: 102686 - DNA, 25 bp, probe
ccgctgcttttggaaagtcagaaaa

SEQ ID NO: 102687 - DNA, 25 bp, probe
gtaacctcttcttcctaggtcctgc

SEQ ID NO: 102688 - DNA, 25 bp, probe
taacctcttcttcctaggtcctgca

SEQ ID NO: 102689 - DNA, 25 bp, probe
cttcaggtcaggagtttgagaccag

SEQ ID NO: 102690 - DNA, 25 bp, probe
cacttcaggtcaggagtttgagacc

SEQ ID NO: 102691 - DNA, 25 bp, probe
ggaatgtccactggaaagaagggac

SEQ ID NO: 102692 - DNA, 25 bp, probe
acttcaggtcaggagtttgagacca

SEQ ID NO: 102693 - DNA, 25 bp, probe
gatgaagggaagtggactaaagtat

SEQ ID NO: 102694 - DNA, 25 bp, probe
agatgaagggaagtggactaaagta

SEQ ID NO: 102695 - DNA, 25 bp, probe
atgaagggaagtggactaaagtatt

SEQ ID NO: 102696 - DNA, 25 bp, probe
ggaagtggactaaagtattaaaccc

SEQ ID NO: 102697 - DNA, 25 bp, probe
gggaagtggactaaagtattaaacc

SEQ ID NO: 102698 - DNA, 25 bp, probe
agtggactaaagtattaaaccctct

SEQ ID NO: 102699 - DNA, 25 bp, probe
tgaagggaagtggactaaagtatta

SEQ ID NO: 102700 - DNA, 25 bp, probe
agagatgaagggaagtggactaaag

SEQ ID NO: 102701 - DNA, 25 bp, probe
ggcttgtactgctttgttgaataaa

SEQ ID NO: 102702 - DNA, 25 bp, probe
gagatgaagggaagtggactaaagt

SEQ ID NO: 102703 - DNA, 25 bp, probe
cagagatgaagggaagtggactaaa

SEQ ID NO: 102704 - DNA, 25 bp, probe
aggcttgtactgctttgttgaataa

SEQ ID NO: 102705 - DNA, 25 bp, probe
aagtggactaaagtattaaaccctc

SEQ ID NO: 102706 - DNA, 25 bp, probe
gaagtggactaaagtattaaaccct

SEQ ID NO: 102707 - DNA, 25 bp, probe
agggaagtggactaaagtattaaac

SEQ ID NO: 102708 - DNA, 25 bp, probe
gcttgtactgctttgttgaataaat

SEQ ID NO: 102709 - DNA, 25 bp, probe
ggactaaagtattaaaccctctagc

SEQ ID NO: 102710 - DNA, 25 bp, probe
ccattggctgaagacactgaagtag

SEQ ID NO: 102711 - DNA, 25 bp, probe
gaagggaagtggactaaagtattaa

SEQ ID NO: 102712 - DNA, 25 bp, probe
gaggcttgtactgctttgttgaata

SEQ ID NO: 102713 - DNA, 25 bp, probe
actgctttgttgaataaatgagttt

SEQ ID NO: 102714 - DNA, 25 bp, probe
tgtactgctttgttgaataaatgag

SEQ ID NO: 102715 - DNA, 25 bp, probe
gtattaaaccctctagctcccattg

SEQ ID NO: 102716 - DNA, 25 bp, probe
agtattaaaccctctagctcccatt

SEQ ID NO: 102717 - DNA, 25 bp, probe
aagtattaaaccctctagctcccat

SEQ ID NO: 102718 - DNA, 25 bp, probe
taaagtattaaaccctctagctccc

SEQ ID NO: 102719 - DNA, 25 bp, probe
aaagtattaaaccctctagctccca

SEQ ID NO: 102720 - DNA, 25 bp, probe
gtggactaaagtattaaaccctcta

SEQ ID NO: 102721 - DNA, 25 bp, probe
aagggaagtggactaaagtattaaa

SEQ ID NO: 102722 - DNA, 25 bp, probe
ttgtactgctttgttgaataaatga

SEQ ID NO: 102723 - DNA, 25 bp, probe
gtactgctttgttgaataaatgagt

SEQ ID NO: 102724 - DNA, 25 bp, probe
tattaaaccctctagctcccattgg

SEQ ID NO: 102725 - DNA, 25 bp, probe
cttgtactgctttgttgaataaatg

SEQ ID NO: 102726 - DNA, 25 bp, probe
tactgctttgttgaataaatgagtt

SEQ ID NO: 102727 - DNA, 25 bp, probe
ctaaagtattaaaccctctagctcc

SEQ ID NO: 102728 - DNA, 25 bp, probe
tggactaaagtattaaaccctctag

SEQ ID NO: 102729 - DNA, 25 bp, probe
ctatgagcaggagaaagcagtcttc

SEQ ID NO: 102730 - DNA, 25 bp, probe
gaaagcagtcttccagttctaccag

SEQ ID NO: 102731 - DNA, 25 bp, probe
actaaagtattaaaccctctagctc

SEQ ID NO: 102732 - DNA, 25 bp, probe
gactaaagtattaaaccctctagct

SEQ ID NO: 102733 - DNA, 25 bp, probe
ggaggcttgtactgctttgttgaat

SEQ ID NO: 102734 - DNA, 25 bp, probe
cattggctgaagacactgaagtagc

SEQ ID NO: 102735 - DNA, 25 bp, probe
ccagagatgaagggaagtggactaa

SEQ ID NO: 102736 - DNA, 25 bp, probe
tagtgagggttaattttagcttggc

SEQ ID NO: 102737 - DNA, 25 bp, probe
tagtccatccatattgtgtcagagt

SEQ ID NO: 102738 - DNA, 25 bp, probe
ctagtccatccatattgtgtcagag

SEQ ID NO: 102739 - DNA, 25 bp, probe
cctagtccatccatattgtgtcaga

SEQ ID NO: 102740 - DNA, 25 bp, probe
agtccatccatattgtgtcagagtg

SEQ ID NO: 102741 - DNA, 25 bp, probe
ggaattggtgattacagtagcactt

SEQ ID NO: 102742 - DNA, 25 bp, probe
catattgtgtcagagtgggattaac

SEQ ID NO: 102743 - DNA, 25 bp, probe
atattgtgtcagagtgggattaaca

SEQ ID NO: 102744 - DNA, 25 bp, probe
aagagtagttgctttcctggaattt

SEQ ID NO: 102745 - DNA, 25 bp, probe
aattggtgattacagtagcactttg

SEQ ID NO: 102746 - DNA, 25 bp, probe
ctccctagtccatccatattgtgtc

SEQ ID NO: 102747 - DNA, 25 bp, probe
gaattggtgattacagtagcacttt

SEQ ID NO: 102748 - DNA, 25 bp, probe
agagtagttgctttcctggaatttc

SEQ ID NO: 102749 - DNA, 25 bp, probe
gctgaggtaggagaattgcttgaac

SEQ ID NO: 102750 - DNA, 25 bp, probe
ccctagtccatccatattgtgtcag

SEQ ID NO: 102751 - DNA, 25 bp, probe
attggtgattacagtagcactttgg

SEQ ID NO: 102752 - DNA, 25 bp, probe
ccatattgtgtcagagtgggattaa

SEQ ID NO: 102753 - DNA, 25 bp, probe
gtccatccatattgtgtcagagtgg

SEQ ID NO: 102754 - DNA, 25 bp, probe
tccatattgtgtcagagtgggatta

SEQ ID NO: 102755 - DNA, 25 bp, probe
gtgattacagtagcactttgggaag

SEQ ID NO: 102756 - DNA, 25 bp, probe
aactgcactgaatgacactttattt

SEQ ID NO: 102757 - DNA, 25 bp, probe
caactgcactgaatgacactttatt

SEQ ID NO: 102758 - DNA, 25 bp, probe
tccctagtccatccatattgtgtca

SEQ ID NO: 102759 - DNA, 25 bp, probe
ctgaggtaggagaattgcttgaacc

SEQ ID NO: 102760 - DNA, 25 bp, probe
acaactgcactgaatgacactttat

SEQ ID NO: 102761 - DNA, 25 bp, probe
ctttggcttattatttagcactggg

SEQ ID NO: 102762 - DNA, 25 bp, probe
tttggctttggcttattatttagca

SEQ ID NO: 102763 - DNA, 25 bp, probe
tttggcttattatttagcactggga

SEQ ID NO: 102764 - DNA, 25 bp, probe
ttggctttggcttattatttagcac

SEQ ID NO: 102765 - DNA, 25 bp, probe
gacaactgcactgaatgacacttta

SEQ ID NO: 102766 - DNA, 25 bp, probe
catgcttggtattccatttggataa

SEQ ID NO: 102767 - DNA, 25 bp, probe
ttggcttattatttagcactgggag

SEQ ID NO: 102768 - DNA, 25 bp, probe
gctttggcttattatttagcactgg

SEQ ID NO: 102769 - DNA, 25 bp, probe
ggctttggcttattatttagcactg

SEQ ID NO: 102770 - DNA, 25 bp, probe
tggtattccatttggataatcagga

SEQ ID NO: 102771 - DNA, 25 bp, probe
gcttggtattccatttggataatca

SEQ ID NO: 102772 - DNA, 25 bp, probe
tgcttggtattccatttggataatc

SEQ ID NO: 102773 - DNA, 25 bp, probe
tggctttggcttattatttagcact

SEQ ID NO: 102774 - DNA, 25 bp, probe
cctccctagtccatccatattgtgt

SEQ ID NO: 102775 - DNA, 25 bp, probe
gaagcctccctagtccatccatatt

SEQ ID NO: 102776 - DNA, 25 bp, probe
gggaattggtgattacagtagcact

SEQ ID NO: 102777 - DNA, 25 bp, probe
aaagagtagttgctttcctggaatt

SEQ ID NO: 102778 - DNA, 25 bp, probe
gagtagttgctttcctggaatttcc

SEQ ID NO: 102779 - DNA, 25 bp, probe
ttggtattccatttggataatcagg

SEQ ID NO: 102780 - DNA, 25 bp, probe
atgcttggtattccatttggataat

SEQ ID NO: 102781 - DNA, 25 bp, probe
caataatgtgaatgctatgttctgg

SEQ ID NO: 102782 - DNA, 25 bp, probe
tacctaatggtctctacctaatgga

SEQ ID NO: 102783 - DNA, 25 bp, probe
cagactatggatgtgttctctaggc

SEQ ID NO: 102784 - DNA, 25 bp, probe
acctaatggtctctacctaatggac

SEQ ID NO: 102785 - DNA, 25 bp, probe
tcaataatgtgaatgctatgttctg

SEQ ID NO: 102786 - DNA, 25 bp, probe
ctctgtttcttcaatggttctcttc

SEQ ID NO: 102787 - DNA, 25 bp, probe
tctctgtttcttcaatggttctctt

SEQ ID NO: 102788 - DNA, 25 bp, probe
atctctgtttcttcaatggttctct

SEQ ID NO: 102789 - DNA, 25 bp, probe
tttcttcaatggttctcttcccttt

SEQ ID NO: 102790 - DNA, 25 bp, probe
caatctctgtttcttcaatggttct

SEQ ID NO: 102791 - DNA, 25 bp, probe
ttacctaatggtctctacctaatgg

SEQ ID NO: 102792 - DNA, 25 bp, probe
aatctctgtttcttcaatggttctc

SEQ ID NO: 102793 - DNA, 25 bp, probe
tctgtttcttcaatggttctcttcc

SEQ ID NO: 102794 - DNA, 25 bp, probe
ataatgtgaatgctatgttctggga

SEQ ID NO: 102795 - DNA, 25 bp, probe
taatgtgaatgctatgttctgggaa

SEQ ID NO: 102796 - DNA, 25 bp, probe
gtttcttcaatggttctcttccctt

SEQ ID NO: 102797 - DNA, 25 bp, probe
aataatgtgaatgctatgttctggg

SEQ ID NO: 102798 - DNA, 25 bp, probe
aatgtgaatgctatgttctgggaaa

SEQ ID NO: 102799 - DNA, 25 bp, probe
ccagactatggatgtgttctctagg

SEQ ID NO: 102800 - DNA, 25 bp, probe
tgctgtgaatctgaaagacttgaaa

SEQ ID NO: 102801 - DNA, 25 bp, probe
ctgtttcttcaatggttctcttccc

SEQ ID NO: 102802 - DNA, 25 bp, probe
cacaatctctgtttcttcaatggtt

SEQ ID NO: 102803 - DNA, 25 bp, probe
ctgctgtgaatctgaaagacttgaa

SEQ ID NO: 102804 - DNA, 25 bp, probe
acaatctctgtttcttcaatggttc

SEQ ID NO: 102805 - DNA, 25 bp, probe
tgtttcttcaatggttctcttccct

SEQ ID NO: 102806 - DNA, 25 bp, probe
acacaatctctgtttcttcaatggt

SEQ ID NO: 102807 - DNA, 25 bp, probe
acctaacccttccttatttagccta

SEQ ID NO: 102808 - DNA, 25 bp, probe
cctaacccttccttatttagcctag

SEQ ID NO: 102809 - DNA, 25 bp, probe
cacactcttgagtctctttacctaa

SEQ ID NO: 102810 - DNA, 25 bp, probe
actcttgagtctctttacctaatgg

SEQ ID NO: 102811 - DNA, 25 bp, probe
ctgaagttgctgctgtgaatctgaa

SEQ ID NO: 102812 - DNA, 25 bp, probe
acactcttgagtctctttacctaat

SEQ ID NO: 102813 - DNA, 25 bp, probe
tgagtctctttacctaatggtctct

SEQ ID NO: 102814 - DNA, 25 bp, probe
gtctctttacctaatggtctctacc

SEQ ID NO: 102815 - DNA, 25 bp, probe
ccacactcttgagtctctttaccta

SEQ ID NO: 102816 - DNA, 25 bp, probe
tctctttacctaatggtctctacct

SEQ ID NO: 102817 - DNA, 25 bp, probe
ttgagtctctttacctaatggtctc

SEQ ID NO: 102818 - DNA, 25 bp, probe
cttgagtctctttacctaatggtct

SEQ ID NO: 102819 - DNA, 25 bp, probe
tcttgagtctctttacctaatggtc

SEQ ID NO: 102820 - DNA, 25 bp, probe
ctcttgagtctctttacctaatggt

SEQ ID NO: 102821 - DNA, 25 bp, probe
cacctaacccttccttatttagcct

SEQ ID NO: 102822 - DNA, 25 bp, probe
cactcttgagtctctttacctaatg

SEQ ID NO: 102823 - DNA, 25 bp, probe
gaagttgctgctgtgaatctgaaag

SEQ ID NO: 102824 - DNA, 25 bp, probe
agtctctttacctaatggtctctac

SEQ ID NO: 102825 - DNA, 25 bp, probe
aacttactcgatgtcattgaccaag

SEQ ID NO: 102826 - DNA, 25 bp, probe
gggtgacatcttaattcctaaacta

SEQ ID NO: 102827 - DNA, 25 bp, probe
ctaccttagctgcatagtggaagag

SEQ ID NO: 102828 - DNA, 25 bp, probe
agtttaaccacactttgatttgggt

SEQ ID NO: 102829 - DNA, 25 bp, probe
atgtcattgaccaagcaagactgaa

SEQ ID NO: 102830 - DNA, 25 bp, probe
aagatgttctctagccttccaccag

SEQ ID NO: 102831 - DNA, 25 bp, probe
gtgacatcttaattcctaaactacc

SEQ ID NO: 102832 - DNA, 25 bp, probe
ggtgacatcttaattcctaaactac

SEQ ID NO: 102833 - DNA, 25 bp, probe
tgacatcttaattcctaaactacct

SEQ ID NO: 102834 - DNA, 25 bp, probe
ttactcgatgtcattgaccaagcaa

SEQ ID NO: 102835 - DNA, 25 bp, probe
aactaccttagctgcatagtggaag

SEQ ID NO: 102836 - DNA, 25 bp, probe
accacactttgatttgggttcattt

SEQ ID NO: 102837 - DNA, 25 bp, probe
gatgtcattgaccaagcaagactga

SEQ ID NO: 102838 - DNA, 25 bp, probe
aaacttactcgatgtcattgaccaa

SEQ ID NO: 102839 - DNA, 25 bp, probe
ttagctgcatagtggaagaggagag

SEQ ID NO: 102840 - DNA, 25 bp, probe
ttcctaaactaccttagctgcatag

SEQ ID NO: 102841 - DNA, 25 bp, probe
aattcctaaactaccttagctgcat

SEQ ID NO: 102842 - DNA, 25 bp, probe
ttgaagatgttctctagccttccac

SEQ ID NO: 102843 - DNA, 25 bp, probe
tcacattaagatacgttctaaaggg

SEQ ID NO: 102844 - DNA, 25 bp, probe
taattcctaaactaccttagctgca

SEQ ID NO: 102845 - DNA, 25 bp, probe
ttaattcctaaactaccttagctgc

SEQ ID NO: 102846 - DNA, 25 bp, probe
cttagctgcatagtggaagaggaga

SEQ ID NO: 102847 - DNA, 25 bp, probe
attcctaaactaccttagctgcata

SEQ ID NO: 102848 - DNA, 25 bp, probe
tactcgatgtcattgaccaagcaag

SEQ ID NO: 102849 - DNA, 25 bp, probe
cttactcgatgtcattgaccaagca

SEQ ID NO: 102850 - DNA, 25 bp, probe
acttactcgatgtcattgaccaagc

SEQ ID NO: 102851 - DNA, 25 bp, probe
ggggtgacatcttaattcctaaact

SEQ ID NO: 102852 - DNA, 25 bp, probe
actaccttagctgcatagtggaaga

SEQ ID NO: 102853 - DNA, 25 bp, probe
aagtttaaccacactttgatttggg

SEQ ID NO: 102854 - DNA, 25 bp, probe
ctaaactaccttagctgcatagtgg

SEQ ID NO: 102855 - DNA, 25 bp, probe
cctaaactaccttagctgcatagtg

SEQ ID NO: 102856 - DNA, 25 bp, probe
tcctaaactaccttagctgcatagt

SEQ ID NO: 102857 - DNA, 25 bp, probe
atgttcacattaagatacgttctaa

SEQ ID NO: 102858 - DNA, 25 bp, probe
ttatgttcacattaagatacgttct

SEQ ID NO: 102859 - DNA, 25 bp, probe
taaactaccttagctgcatagtgga

SEQ ID NO: 102860 - DNA, 25 bp, probe
gacatcttaattcctaaactacctt

SEQ ID NO: 102861 - DNA, 25 bp, probe
taccttagctgcatagtggaagagg

SEQ ID NO: 102862 - DNA, 25 bp, probe
tcattgaccaagcaagactgaaaat

SEQ ID NO: 102863 - DNA, 25 bp, probe
taagtttaaccacactttgatttgg

SEQ ID NO: 102864 - DNA, 25 bp, probe
aaactaccttagctgcatagtggaa

SEQ ID NO: 102865 - DNA, 25 bp, probe
aggggtgacatcttaattcctaaac

SEQ ID NO: 102866 - DNA, 25 bp, probe
caaggggtgacatcttaattcctaa

SEQ ID NO: 102867 - DNA, 25 bp, probe
aaggggtgacatcttaattcctaaa

SEQ ID NO: 102868 - DNA, 25 bp, probe
tttgaagatgttctctagccttcca

SEQ ID NO: 102869 - DNA, 25 bp, probe
ttaaggactcttcataaggactctt

SEQ ID NO: 102870 - DNA, 25 bp, probe
aaggactcttcataaggactcttaa

SEQ ID NO: 102871 - DNA, 25 bp, probe
gtttaggcttctgtgtgtttgtaat

SEQ ID NO: 102872 - DNA, 25 bp, probe
catgcttgaactgtagtaatgttag

SEQ ID NO: 102873 - DNA, 25 bp, probe
cttctgtgtgtttgtaatatgctct

SEQ ID NO: 102874 - DNA, 25 bp, probe
gcttctgtgtgtttgtaatatgctc

SEQ ID NO: 102875 - DNA, 25 bp, probe
taaggactcttcataaggactctta

SEQ ID NO: 102876 - DNA, 25 bp, probe
taggcttctgtgtgtttgtaatatg

SEQ ID NO: 102877 - DNA, 25 bp, probe
tgtttaggcttctgtgtgtttgtaa

SEQ ID NO: 102878 - DNA, 25 bp, probe
aatgtgaccataactgtttaggctt

SEQ ID NO: 102879 - DNA, 25 bp, probe
aaatgtgaccataactgtttaggct

SEQ ID NO: 102880 - DNA, 25 bp, probe
tgaactgtagtaatgttagcttgtt

SEQ ID NO: 102881 - DNA, 25 bp, probe
ttgaactgtagtaatgttagcttgt

SEQ ID NO: 102882 - DNA, 25 bp, probe
ataactgtttaggcttctgtgtgtt

SEQ ID NO: 102883 - DNA, 25 bp, probe
cataactgtttaggcttctgtgtgt

SEQ ID NO: 102884 - DNA, 25 bp, probe
taactgtttaggcttctgtgtgttt

SEQ ID NO: 102885 - DNA, 25 bp, probe
tttaggcttctgtgtgtttgtaata

SEQ ID NO: 102886 - DNA, 25 bp, probe
ctgtttaggcttctgtgtgtttgta

SEQ ID NO: 102887 - DNA, 25 bp, probe
atgtgaccataactgtttaggcttc

SEQ ID NO: 102888 - DNA, 25 bp, probe
aactgtagtaatgttagcttgttct

SEQ ID NO: 102889 - DNA, 25 bp, probe
gtcgtacatttgtttgagtcgttta

SEQ ID NO: 102890 - DNA, 25 bp, probe
atgcttgaactgtagtaatgttagc

SEQ ID NO: 102891 - DNA, 25 bp, probe
ttaggcttctgtgtgtttgtaatat

SEQ ID NO: 102892 - DNA, 25 bp, probe
gaccataactgtttaggcttctgtg

SEQ ID NO: 102893 - DNA, 25 bp, probe
gtgaccataactgtttaggcttctg

SEQ ID NO: 102894 - DNA, 25 bp, probe
cttgaactgtagtaatgttagcttg

SEQ ID NO: 102895 - DNA, 25 bp, probe
tcgtacatttgtttgagtcgtttat

SEQ ID NO: 102896 - DNA, 25 bp, probe
tttaaggactcttcataaggactct

SEQ ID NO: 102897 - DNA, 25 bp, probe
tctgtgtgtttgtaatatgctctaa

SEQ ID NO: 102898 - DNA, 25 bp, probe
ttctgtgtgtttgtaatatgctcta

SEQ ID NO: 102899 - DNA, 25 bp, probe
ggcttctgtgtgtttgtaatatgct

SEQ ID NO: 102900 - DNA, 25 bp, probe
aggcttctgtgtgtttgtaatatgc

SEQ ID NO: 102901 - DNA, 25 bp, probe
tcagccaaatgtttatttcacacaa

SEQ ID NO: 102902 - DNA, 25 bp, probe
ttcagccaaatgtttatttcacaca

SEQ ID NO: 102903 - DNA, 25 bp, probe
acttcagccaaatgtttatttcaca

SEQ ID NO: 102904 - DNA, 25 bp, probe
cgtacatttgtttgagtcgtttatg

SEQ ID NO: 102905 - DNA, 25 bp, probe
ccataactgtttaggcttctgtgtg

SEQ ID NO: 102906 - DNA, 25 bp, probe
cttcagccaaatgtttatttcacac

SEQ ID NO: 102907 - DNA, 25 bp, probe
cacttcagccaaatgtttatttcac

SEQ ID NO: 102908 - DNA, 25 bp, probe
cagccaaatgtttatttcacacaaa

SEQ ID NO: 102909 - DNA, 25 bp, probe
tgaccataactgtttaggcttctgt

SEQ ID NO: 102910 - DNA, 25 bp, probe
tgtgaccataactgtttaggcttct

SEQ ID NO: 102911 - DNA, 25 bp, probe
ttgcacatgcttgaactgtagtaat

SEQ ID NO: 102912 - DNA, 25 bp, probe
actgtagtaatgttagcttgttcta

SEQ ID NO: 102913 - DNA, 25 bp, probe
gagtgctccagttaagacagtaatt

SEQ ID NO: 102914 - DNA, 25 bp, probe
tgagtgctccagttaagacagtaat

SEQ ID NO: 102915 - DNA, 25 bp, probe
ttgagtgctccagttaagacagtaa

SEQ ID NO: 102916 - DNA, 25 bp, probe
gactaagcacaattagatgacaagt

SEQ ID NO: 102917 - DNA, 25 bp, probe
tgactaagcacaattagatgacaag

SEQ ID NO: 102918 - DNA, 25 bp, probe
acagagcattaagttgtaactgaga

SEQ ID NO: 102919 - DNA, 25 bp, probe
actaagcacaattagatgacaagtt

SEQ ID NO: 102920 - DNA, 25 bp, probe
ttgactaagcacaattagatgacaa

SEQ ID NO: 102921 - DNA, 25 bp, probe
aacagagcattaagttgtaactgag

SEQ ID NO: 102922 - DNA, 25 bp, probe
cctaacagagcattaagttgtaact

SEQ ID NO: 102923 - DNA, 25 bp, probe
cagagcattaagttgtaactgagat

SEQ ID NO: 102924 - DNA, 25 bp, probe
gagcattaagttgtaactgagattg

SEQ ID NO: 102925 - DNA, 25 bp, probe
agagcattaagttgtaactgagatt

SEQ ID NO: 102926 - DNA, 25 bp, probe
gatacatcaccctaacagagcatta

SEQ ID NO: 102927 - DNA, 25 bp, probe
atatcccattcaggtttcagagttt

SEQ ID NO: 102928 - DNA, 25 bp, probe
agaagaagggcaaagataagaacaa

SEQ ID NO: 102929 - DNA, 25 bp, probe
ggctggctttatttctaactcctta

SEQ ID NO: 102930 - DNA, 25 bp, probe
gaagaagggcaaagataagaacaat

SEQ ID NO: 102931 - DNA, 25 bp, probe
aatgctgctttctggtgtatattct

SEQ ID NO: 102932 - DNA, 25 bp, probe
caatgctgctttctggtgtatattc

SEQ ID NO: 102933 - DNA, 25 bp, probe
tacatcaccctaacagagcattaag

SEQ ID NO: 102934 - DNA, 25 bp, probe
gcaagactgaatgtgactgtaaata

SEQ ID NO: 102935 - DNA, 25 bp, probe
tcagaagaagggcaaagataagaac

SEQ ID NO: 102936 - DNA, 25 bp, probe
agcaagactgaatgtgactgtaaat

SEQ ID NO: 102937 - DNA, 25 bp, probe
atacatcaccctaacagagcattaa

SEQ ID NO: 102938 - DNA, 25 bp, probe
ccaacactttctgatttcttctaca

SEQ ID NO: 102939 - DNA, 25 bp, probe
accaacactttctgatttcttctac

SEQ ID NO: 102940 - DNA, 25 bp, probe
agtgctccagttaagacagtaattt

SEQ ID NO: 102941 - DNA, 25 bp, probe
tatatcccattcaggtttcagagtt

SEQ ID NO: 102942 - DNA, 25 bp, probe
aagcaagactgaatgtgactgtaaa

SEQ ID NO: 102943 - DNA, 25 bp, probe
aaagcaagactgaatgtgactgtaa

SEQ ID NO: 102944 - DNA, 25 bp, probe
ttcagaagaagggcaaagataagaa

SEQ ID NO: 102945 - DNA, 25 bp, probe
atgctgctttctggtgtatattctc

SEQ ID NO: 102946 - DNA, 25 bp, probe
cagaagaagggcaaagataagaaca

SEQ ID NO: 102947 - DNA, 25 bp, probe
taattctgttcatcatttcactccg

SEQ ID NO: 102948 - DNA, 25 bp, probe
gctggctttatttctaactccttat

SEQ ID NO: 102949 - DNA, 25 bp, probe
taacagagcattaagttgtaactga

SEQ ID NO: 102950 - DNA, 25 bp, probe
tgtctacaccaggtttgaaataagt

SEQ ID NO: 102951 - DNA, 25 bp, probe
cgcaggttatttgattaagataggt

SEQ ID NO: 102952 - DNA, 25 bp, probe
gttcagaagaagggcaaagataaga

SEQ ID NO: 102953 - DNA, 25 bp, probe
gaagaaataaagaggcaaagggtca

SEQ ID NO: 102954 - DNA, 25 bp, probe
tgaagaaataaagaggcaaagggtc

SEQ ID NO: 102955 - DNA, 25 bp, probe
ctgaagaaataaagaggcaaagggt

SEQ ID NO: 102956 - DNA, 25 bp, probe
aaacctttcctacagttcctatgaa

SEQ ID NO: 102957 - DNA, 25 bp, probe
aactgtaacagccttaatggaagac

SEQ ID NO: 102958 - DNA, 25 bp, probe
tgtaacagccttaatggaagaccaa

SEQ ID NO: 102959 - DNA, 25 bp, probe
actgtaacagccttaatggaagacc

SEQ ID NO: 102960 - DNA, 25 bp, probe
taacagccttaatggaagaccaaat

SEQ ID NO: 102961 - DNA, 25 bp, probe
gtttaactgtttctttgtacgtggt

SEQ ID NO: 102962 - DNA, 25 bp, probe
aaactgtaacagccttaatggaaga

SEQ ID NO: 102963 - DNA, 25 bp, probe
gtaacagccttaatggaagaccaaa

SEQ ID NO: 102964 - DNA, 25 bp, probe
ctgtaacagccttaatggaagacca

SEQ ID NO: 102965 - DNA, 25 bp, probe
aactgtttctttgtacgtggtttac

SEQ ID NO: 102966 - DNA, 25 bp, probe
taaactgtaacagccttaatggaag

SEQ ID NO: 102967 - DNA, 25 bp, probe
ttaactgtttctttgtacgtggttt

SEQ ID NO: 102968 - DNA, 25 bp, probe
tttaactgtttctttgtacgtggtt

SEQ ID NO: 102969 - DNA, 25 bp, probe
cgtaactttaaactgtaacagcctt

SEQ ID NO: 102970 - DNA, 25 bp, probe
aacagccttaatggaagaccaaatg

SEQ ID NO: 102971 - DNA, 25 bp, probe
ttaaactgtaacagccttaatggaa

SEQ ID NO: 102972 - DNA, 25 bp, probe
taactgtttctttgtacgtggttta

SEQ ID NO: 102973 - DNA, 25 bp, probe
tttaaactgtaacagccttaatgga

SEQ ID NO: 102974 - DNA, 25 bp, probe
tttgtacgtttaactgtttctttgt

SEQ ID NO: 102975 - DNA, 25 bp, probe
acgtaactttaaactgtaacagcct

SEQ ID NO: 102976 - DNA, 25 bp, probe
gacttgaatgtggctgtcactcttc

SEQ ID NO: 102977 - DNA, 25 bp, probe
ctttaaactgtaacagccttaatgg

SEQ ID NO: 102978 - DNA, 25 bp, probe
tacaaagttttctattaacgctgcc

SEQ ID NO: 102979 - DNA, 25 bp, probe
agacttgaatgtggctgtcactctt

SEQ ID NO: 102980 - DNA, 25 bp, probe
actttaaactgtaacagccttaatg

SEQ ID NO: 102981 - DNA, 25 bp, probe
ttgtacgtttaactgtttctttgta

SEQ ID NO: 102982 - DNA, 25 bp, probe
gccttaatggaagaccaaatggttt

SEQ ID NO: 102983 - DNA, 25 bp, probe
gtacaaagttttctattaacgctgc

SEQ ID NO: 102984 - DNA, 25 bp, probe
gtaactttaaactgtaacagcctta

SEQ ID NO: 102985 - DNA, 25 bp, probe
gagacttgaatgtggctgtcactct

SEQ ID NO: 102986 - DNA, 25 bp, probe
acagccttaatggaagaccaaatgg

SEQ ID NO: 102987 - DNA, 25 bp, probe
acaaagttttctattaacgctgccc

SEQ ID NO: 102988 - DNA, 25 bp, probe
aactttaaactgtaacagccttaat

SEQ ID NO: 102989 - DNA, 25 bp, probe
agccttaatggaagaccaaatggtt

SEQ ID NO: 102990 - DNA, 25 bp, probe
gatccagaatcaaaagctcaagagt

SEQ ID NO: 102991 - DNA, 25 bp, probe
tacgtaactttaaactgtaacagcc

SEQ ID NO: 102992 - DNA, 25 bp, probe
atccagaatcaaaagctcaagagtg

SEQ ID NO: 102993 - DNA, 25 bp, probe
gtacgtttaactgtttctttgtacg

SEQ ID NO: 102994 - DNA, 25 bp, probe
cgtttaactgtttctttgtacgtgg

SEQ ID NO: 102995 - DNA, 25 bp, probe
ttataacctggacgtgagctgtcag

SEQ ID NO: 102996 - DNA, 25 bp, probe
cttataacctggacgtgagctgtca

SEQ ID NO: 102997 - DNA, 25 bp, probe
gaccagatacattccgtgtacatca

SEQ ID NO: 102998 - DNA, 25 bp, probe
accagatacattccgtgtacatcac

SEQ ID NO: 102999 - DNA, 25 bp, probe
taactttaaactgtaacagccttaa

SEQ ID NO: 103000 - DNA, 25 bp, probe
acttgaatgtggctgtcactcttcc

SEQ ID NO: 103001 - DNA, 25 bp, probe
agacagaaccaaattatctccatct

SEQ ID NO: 103002 - DNA, 25 bp, probe
aaagtaatcccagatgacaaccaga

SEQ ID NO: 103003 - DNA, 25 bp, probe
gacagaaccaaattatctccatctt

SEQ ID NO: 103004 - DNA, 25 bp, probe
aagacagaaccaaattatctccatc

SEQ ID NO: 103005 - DNA, 25 bp, probe
gaagacagaaccaaattatctccat

SEQ ID NO: 103006 - DNA, 25 bp, probe
acagaaccaaattatctccatcttt

SEQ ID NO: 103007 - DNA, 25 bp, probe
aagtaatcccagatgacaaccagac

SEQ ID NO: 103008 - DNA, 25 bp, probe
ggaagacagaaccaaattatctcca

SEQ ID NO: 103009 - DNA, 25 bp, probe
ttaaagctgatagagattggagtgc

SEQ ID NO: 103010 - DNA, 25 bp, probe
tggaagacagaaccaaattatctcc

SEQ ID NO: 103011 - DNA, 25 bp, probe
tttaaagctgatagagattggagtg

SEQ ID NO: 103012 - DNA, 25 bp, probe
atatcactccgatgacacagacacc

SEQ ID NO: 103013 - DNA, 25 bp, probe
taaagctgatagagattggagtgca

SEQ ID NO: 103014 - DNA, 25 bp, probe
gatatcactccgatgacacagacac

SEQ ID NO: 103015 - DNA, 25 bp, probe
taaaagtaatcccagatgacaacca

SEQ ID NO: 103016 - DNA, 25 bp, probe
gtaaaagtaatcccagatgacaacc

SEQ ID NO: 103017 - DNA, 25 bp, probe
aaaagtaatcccagatgacaaccag

SEQ ID NO: 103018 - DNA, 25 bp, probe
ccagaagtaaaagtaatcccagatg

SEQ ID NO: 103019 - DNA, 25 bp, probe
agtaaaagtaatcccagatgacaac

SEQ ID NO: 103020 - DNA, 25 bp, probe
aagtagccgcatttgattttcattt

SEQ ID NO: 103021 - DNA, 25 bp, probe
gaagtaaaagtaatcccagatgaca

SEQ ID NO: 103022 - DNA, 25 bp, probe
aagctgatagagattggagtgcaaa

SEQ ID NO: 103023 - DNA, 25 bp, probe
aaagctgatagagattggagtgcaa

SEQ ID NO: 103024 - DNA, 25 bp, probe
agtagccgcatttgattttcatttc

SEQ ID NO: 103025 - DNA, 25 bp, probe
gaagtagccgcatttgattttcatt

SEQ ID NO: 103026 - DNA, 25 bp, probe
agaagtaaaagtaatcccagatgac

SEQ ID NO: 103027 - DNA, 25 bp, probe
cagaagtaaaagtaatcccagatga

SEQ ID NO: 103028 - DNA, 25 bp, probe
gtactccagtgaggaagcagaactt

SEQ ID NO: 103029 - DNA, 25 bp, probe
aagtaaaagtaatcccagatgacaa

SEQ ID NO: 103030 - DNA, 25 bp, probe
agtaatcccagatgacaaccagacg

SEQ ID NO: 103031 - DNA, 25 bp, probe
agctgatagagattggagtgcaaac

SEQ ID NO: 103032 - DNA, 25 bp, probe
tactccagtgaggaagcagaacttt

SEQ ID NO: 103033 - DNA, 25 bp, probe
gacagtggtatggttcttgcctcag

SEQ ID NO: 103034 - DNA, 25 bp, probe
gtagccgcatttgattttcatttcg

SEQ ID NO: 103035 - DNA, 25 bp, probe
tggtatggttcttgcctcagaagag

SEQ ID NO: 103036 - DNA, 25 bp, probe
tatcactccgatgacacagacacca

SEQ ID NO: 103037 - DNA, 25 bp, probe
ggatatcactccgatgacacagaca

SEQ ID NO: 103038 - DNA, 25 bp, probe
cagacggacagtggtatggttcttg

SEQ ID NO: 103039 - DNA, 25 bp, probe
cagtgaggaagcagaacttttaaag

SEQ ID NO: 103040 - DNA, 25 bp, probe
cagaaccaaattatctccatctttt

SEQ ID NO: 103041 - DNA, 25 bp, probe
gcatttgattttcatttcgacaaca

SEQ ID NO: 103042 - DNA, 25 bp, probe
ggaagtagccgcatttgattttcat

SEQ ID NO: 103043 - DNA, 25 bp, probe
agaagagctgaaaactttggaagac

SEQ ID NO: 103044 - DNA, 25 bp, probe
cgcatttgattttcatttcgacaac

SEQ ID NO: 103045 - DNA, 25 bp, probe
ctatctgggtagaggtagtgtgagt

SEQ ID NO: 103046 - DNA, 25 bp, probe
tatctgggtagaggtagtgtgagtg

SEQ ID NO: 103047 - DNA, 25 bp, probe
gtagaggtagtgtgagtgtggtgtg

SEQ ID NO: 103048 - DNA, 25 bp, probe
ctgcggatcaagaagacactacaaa

SEQ ID NO: 103049 - DNA, 25 bp, probe
cctatctgggtagaggtagtgtgag

SEQ ID NO: 103050 - DNA, 25 bp, probe
tagaggtagtgtgagtgtggtgtgt

SEQ ID NO: 103051 - DNA, 25 bp, probe
atctgggtagaggtagtgtgagtgt

SEQ ID NO: 103052 - DNA, 25 bp, probe
gctgcggatcaagaagacactacaa

SEQ ID NO: 103053 - DNA, 25 bp, probe
tgcggatcaagaagacactacaaaa

SEQ ID NO: 103054 - DNA, 25 bp, probe
tctgggtagaggtagtgtgagtgtg

SEQ ID NO: 103055 - DNA, 25 bp, probe
ccctatctgggtagaggtagtgtga

SEQ ID NO: 103056 - DNA, 25 bp, probe
caaaagaggctccagagtcagagtg

SEQ ID NO: 103057 - DNA, 25 bp, probe
gtatatgtgtgtgtgtatgtgtgtg

SEQ ID NO: 103058 - DNA, 25 bp, probe
gtgtatatgtgtgtgtgtatgtgtg

SEQ ID NO: 103059 - DNA, 25 bp, probe
gtgtgtatatgtgtgtgtgtatgtg

SEQ ID NO: 103060 - DNA, 25 bp, probe
gtgtgtgtatatgtgtgtgtgtatg

SEQ ID NO: 103061 - DNA, 25 bp, probe
tatatgtgtgtgtgtatgtgtgtgt

SEQ ID NO: 103062 - DNA, 25 bp, probe
tgtatatgtgtgtgtgtatgtgtgt

SEQ ID NO: 103063 - DNA, 25 bp, probe
tgtgtatatgtgtgtgtgtatgtgt

SEQ ID NO: 103064 - DNA, 25 bp, probe
tgtgtgtatatgtgtgtgtgtatgt

SEQ ID NO: 103065 - DNA, 25 bp, probe
tgtgtgtgtatatgtgtgtgtgtat

SEQ ID NO: 103066 - DNA, 25 bp, probe
gtgtgtgtgtatatgtgtgtgtgta

SEQ ID NO: 103067 - DNA, 25 bp, probe
atatgtgtgtgtgtatgtgtgtgtg

SEQ ID NO: 103068 - DNA, 25 bp, probe
tatgtgtgtgtgtatgtgtgtgtgt

SEQ ID NO: 103069 - DNA, 25 bp, probe
ttatcccttagccaacattcctatc

SEQ ID NO: 103070 - DNA, 25 bp, probe
gattatcccttagccaacattccta

SEQ ID NO: 103071 - DNA, 25 bp, probe
tatcccttagccaacattcctatct

SEQ ID NO: 103072 - DNA, 25 bp, probe
tctccaataatgtgcctttaactct

SEQ ID NO: 103073 - DNA, 25 bp, probe
gtgtgtgtgtgtttaatagttctgt

SEQ ID NO: 103074 - DNA, 25 bp, probe
tgtgtgtgtgtgtttaatagttctg

SEQ ID NO: 103075 - DNA, 25 bp, probe
gtgtgtatgtgtgtgtgtgtttaat

SEQ ID NO: 103076 - DNA, 25 bp, probe
attatcccttagccaacattcctat

SEQ ID NO: 103077 - DNA, 25 bp, probe
ttctccaataatgtgcctttaactc

SEQ ID NO: 103078 - DNA, 25 bp, probe
tgtgtgtgtgtttaatagttctgtt

SEQ ID NO: 103079 - DNA, 25 bp, probe
catagcatgtgattccagattcctg

SEQ ID NO: 103080 - DNA, 25 bp, probe
atgtgtgtgtgtgtttaatagttct

SEQ ID NO: 103081 - DNA, 25 bp, probe
tgtgtatgtgtgtgtgtgtttaata

SEQ ID NO: 103082 - DNA, 25 bp, probe
tttctccaataatgtgcctttaact

SEQ ID NO: 103083 - DNA, 25 bp, probe
ccatagcatgtgattccagattcct

SEQ ID NO: 103084 - DNA, 25 bp, probe
tgtatgtgtgtgtgtgtttaatagt

SEQ ID NO: 103085 - DNA, 25 bp, probe
tgtgtgtatgtgtgtgtgtgtttaa

SEQ ID NO: 103086 - DNA, 25 bp, probe
ctccaataatgtgcctttaactcta

SEQ ID NO: 103087 - DNA, 25 bp, probe
ggtgtgtgtgtatatgtgtgtgtgt

SEQ ID NO: 103088 - DNA, 25 bp, probe
gtgtatgtgtgtgtgtgtttaatag

SEQ ID NO: 103089 - DNA, 25 bp, probe
atgtgtgtgtgtatgtgtgtgtgtg

SEQ ID NO: 103090 - DNA, 25 bp, probe
atcccttagccaacattcctatctg

SEQ ID NO: 103091 - DNA, 25 bp, probe
tccaataatgtgcctttaactctag

SEQ ID NO: 103092 - DNA, 25 bp, probe
gtgtgtgtttaatagttctgtttgt

SEQ ID NO: 103093 - DNA, 25 bp, probe
tgtgtgtgtttaatagttctgtttg

SEQ ID NO: 103094 - DNA, 25 bp, probe
gtgtgtgtgtttaatagttctgttt

SEQ ID NO: 103095 - DNA, 25 bp, probe
gtgtgtgtatgtgtgtgtgtgttta

SEQ ID NO: 103096 - DNA, 25 bp, probe
gtatgtgtgtgtgtgtttaatagtt

SEQ ID NO: 103097 - DNA, 25 bp, probe
ataatgtgcctttaactctagggac

SEQ ID NO: 103098 - DNA, 25 bp, probe
tcaactgagagctaaagagactaga

SEQ ID NO: 103099 - DNA, 25 bp, probe
aataatgtgcctttaactctaggga

SEQ ID NO: 103100 - DNA, 25 bp, probe
caataatgtgcctttaactctaggg

SEQ ID NO: 103101 - DNA, 25 bp, probe
tgaagaggatgactgagacattatg

SEQ ID NO: 103102 - DNA, 25 bp, probe
cttgaagaggatgactgagacatta

SEQ ID NO: 103103 - DNA, 25 bp, probe
gaagaggatgactgagacattatgg

SEQ ID NO: 103104 - DNA, 25 bp, probe
ttgaagaggatgactgagacattat

SEQ ID NO: 103105 - DNA, 25 bp, probe
ccatccaggacttctcttacacttg

SEQ ID NO: 103106 - DNA, 25 bp, probe
taaacaagaataaagtggaagcagg

SEQ ID NO: 103107 - DNA, 25 bp, probe
gaatgagatagaaaggctgaaggac

SEQ ID NO: 103108 - DNA, 25 bp, probe
attccatccaggacttctcttacac

SEQ ID NO: 103109 - DNA, 25 bp, probe
cattccatccaggacttctcttaca

SEQ ID NO: 103110 - DNA, 25 bp, probe
aaacaagaataaagtggaagcaggt

SEQ ID NO: 103111 - DNA, 25 bp, probe
gagatagaaaggctgaaggacaaag

SEQ ID NO: 103112 - DNA, 25 bp, probe
ccttgaagaggatgactgagacatt

SEQ ID NO: 103113 - DNA, 25 bp, probe
gtggaatgagatagaaaggctgaag

SEQ ID NO: 103114 - DNA, 25 bp, probe
tgtaaacaagaataaagtggaagca

SEQ ID NO: 103115 - DNA, 25 bp, probe
gtaaacaagaataaagtggaagcag

SEQ ID NO: 103116 - DNA, 25 bp, probe
gccaacatactacccaaatctgaaa

SEQ ID NO: 103117 - DNA, 25 bp, probe
gtgtaaacaagaataaagtggaagc

SEQ ID NO: 103118 - DNA, 25 bp, probe
atgagatagaaaggctgaaggacaa

SEQ ID NO: 103119 - DNA, 25 bp, probe
aatgagatagaaaggctgaaggaca

SEQ ID NO: 103120 - DNA, 25 bp, probe
aacaagaataaagtggaagcaggtt

SEQ ID NO: 103121 - DNA, 25 bp, probe
tgagatagaaaggctgaaggacaaa

SEQ ID NO: 103122 - DNA, 25 bp, probe
tgtggaatgagatagaaaggctgaa

SEQ ID NO: 103123 - DNA, 25 bp, probe
ggaatgagatagaaaggctgaagga

SEQ ID NO: 103124 - DNA, 25 bp, probe
ccattccatccaggacttctcttac

SEQ ID NO: 103125 - DNA, 25 bp, probe
aagaggatgactgagacattatggg

SEQ ID NO: 103126 - DNA, 25 bp, probe
aggtacgctgtggaatgagatagaa

SEQ ID NO: 103127 - DNA, 25 bp, probe
tggaatgagatagaaaggctgaagg

SEQ ID NO: 103128 - DNA, 25 bp, probe
gtacgctgtggaatgagatagaaag

SEQ ID NO: 103129 - DNA, 25 bp, probe
ctgtggaatgagatagaaaggctga

SEQ ID NO: 103130 - DNA, 25 bp, probe
tacgctgtggaatgagatagaaagg

SEQ ID NO: 103131 - DNA, 25 bp, probe
acaagaataaagtggaagcaggttg

SEQ ID NO: 103132 - DNA, 25 bp, probe
tccatccaggacttctcttacactt

SEQ ID NO: 103133 - DNA, 25 bp, probe
ttccatccaggacttctcttacact

SEQ ID NO: 103134 - DNA, 25 bp, probe
agatagaaaggctgaaggacaaagg

SEQ ID NO: 103135 - DNA, 25 bp, probe
ctgctgctaccattcttcaagagag

SEQ ID NO: 103136 - DNA, 25 bp, probe
aataaagtggaagcaggttggtgta

SEQ ID NO: 103137 - DNA, 25 bp, probe
catccaggacttctcttacacttgg

SEQ ID NO: 103138 - DNA, 25 bp, probe
aagggttacatgatggacacttcta

SEQ ID NO: 103139 - DNA, 25 bp, probe
aagaataaagtggaagcaggttggt

SEQ ID NO: 103140 - DNA, 25 bp, probe
gaggtacgctgtggaatgagataga

SEQ ID NO: 103141 - DNA, 25 bp, probe
agaggtacgctgtggaatgagatag

SEQ ID NO: 103142 - DNA, 25 bp, probe
gagaggtacgctgtggaatgagata

SEQ ID NO: 103143 - DNA, 25 bp, probe
agggttacatgatggacacttctac

SEQ ID NO: 103144 - DNA, 25 bp, probe
caagaataaagtggaagcaggttgg

SEQ ID NO: 103145 - DNA, 25 bp, probe
ggctcttacctcatagaccttcaag

SEQ ID NO: 103146 - DNA, 25 bp, probe
ctcttacctcatagaccttcaagga

SEQ ID NO: 103147 - DNA, 25 bp, probe
tcttacctcatagaccttcaaggac

SEQ ID NO: 103148 - DNA, 25 bp, probe
ttacctcatagaccttcaaggacag

SEQ ID NO: 103149 - DNA, 25 bp, probe
cttacctcatagaccttcaaggaca

SEQ ID NO: 103150 - DNA, 25 bp, probe
ctcatagaccttcaaggacagagac

SEQ ID NO: 103151 - DNA, 25 bp, probe
tacctcatagaccttcaaggacaga

SEQ ID NO: 103152 - DNA, 25 bp, probe
gctcttacctcatagaccttcaagg

SEQ ID NO: 103153 - DNA, 25 bp, probe
gccttcttcccattcatatttattt

SEQ ID NO: 103154 - DNA, 25 bp, probe
cctcatagaccttcaaggacagaga

SEQ ID NO: 103155 - DNA, 25 bp, probe
tcatagaccttcaaggacagagacc

SEQ ID NO: 103156 - DNA, 25 bp, probe
acctcatagaccttcaaggacagag

SEQ ID NO: 103157 - DNA, 25 bp, probe
tgtctgtctgccacaaggaaataaa

SEQ ID NO: 103158 - DNA, 25 bp, probe
gggctcttacctcatagaccttcaa

SEQ ID NO: 103159 - DNA, 25 bp, probe
ctgtctgtctgccacaaggaaataa

SEQ ID NO: 103160 - DNA, 25 bp, probe
ggccttcttcccattcatatttatt

SEQ ID NO: 103161 - DNA, 25 bp, probe
ctgggctcttacctcatagaccttc

SEQ ID NO: 103162 - DNA, 25 bp, probe
tctgtctgtctgccacaaggaaata

SEQ ID NO: 103163 - DNA, 25 bp, probe
ggagaagtggagaggaaaaggaatc

SEQ ID NO: 103164 - DNA, 25 bp, probe
gtctgtctgccacaaggaaataaaa

SEQ ID NO: 103165 - DNA, 25 bp, probe
tggccttcttcccattcatatttat

SEQ ID NO: 103166 - DNA, 25 bp, probe
ttggccttcttcccattcatattta

SEQ ID NO: 103167 - DNA, 25 bp, probe
gagaagtggagaggaaaaggaatcg

SEQ ID NO: 103168 - DNA, 25 bp, probe
gaatggagaagtggagaggaaaagg

SEQ ID NO: 103169 - DNA, 25 bp, probe
ggaatggagaagtggagaggaaaag

SEQ ID NO: 103170 - DNA, 25 bp, probe
tgggctcttacctcatagaccttca

SEQ ID NO: 103171 - DNA, 25 bp, probe
tttggccttcttcccattcatattt

SEQ ID NO: 103172 - DNA, 25 bp, probe
ctttggccttcttcccattcatatt

SEQ ID NO: 103173 - DNA, 25 bp, probe
tggagaagtggagaggaaaaggaat

SEQ ID NO: 103174 - DNA, 25 bp, probe
atggagaagtggagaggaaaaggaa

SEQ ID NO: 103175 - DNA, 25 bp, probe
aatggagaagtggagaggaaaagga

SEQ ID NO: 103176 - DNA, 25 bp, probe
catagaccttcaaggacagagaccc

SEQ ID NO: 103177 - DNA, 25 bp, probe
cttttatgaagtttccccttccatc

SEQ ID NO: 103178 - DNA, 25 bp, probe
acttttatgaagtttccccttccat

SEQ ID NO: 103179 - DNA, 25 bp, probe
attgacttttatgaagtttcccctt

SEQ ID NO: 103180 - DNA, 25 bp, probe
gaagtggagaggaaaaggaatcgag

SEQ ID NO: 103181 - DNA, 25 bp, probe
ttgacttttatgaagtttccccttc

SEQ ID NO: 103182 - DNA, 25 bp, probe
ttttatgaagtttccccttccatcc

SEQ ID NO: 103183 - DNA, 25 bp, probe
gacttttatgaagtttccccttcca

SEQ ID NO: 103184 - DNA, 25 bp, probe
tgacttttatgaagtttccccttcc

SEQ ID NO: 103185 - DNA, 25 bp, probe
cctttggccttcttcccattcatat

SEQ ID NO: 103186 - DNA, 25 bp, probe
gggaatggagaagtggagaggaaaa

SEQ ID NO: 103187 - DNA, 25 bp, probe
agaagtggagaggaaaaggaatcga

SEQ ID NO: 103188 - DNA, 25 bp, probe
catccctcagaggagaaatgtggag

SEQ ID NO: 103189 - DNA, 25 bp, probe
ttaatacactgctatggaggacttg

SEQ ID NO: 103190 - DNA, 25 bp, probe
cttaatacactgctatggaggactt

SEQ ID NO: 103191 - DNA, 25 bp, probe
gcaatacagaccatcaagcaataca

SEQ ID NO: 103192 - DNA, 25 bp, probe
taatacactgctatggaggacttgg

SEQ ID NO: 103193 - DNA, 25 bp, probe
caccagtgttatcaacttgaatgta

SEQ ID NO: 103194 - DNA, 25 bp, probe
ggcaatacagaccatcaagcaatac

SEQ ID NO: 103195 - DNA, 25 bp, probe
aaccaccagtgttatcaacttgaat

SEQ ID NO: 103196 - DNA, 25 bp, probe
aaccttaatacactgctatggagga

SEQ ID NO: 103197 - DNA, 25 bp, probe
aatatcaccagagcaagccatagac

SEQ ID NO: 103198 - DNA, 25 bp, probe
caatatcaccagagcaagccataga

SEQ ID NO: 103199 - DNA, 25 bp, probe
accagtgttatcaacttgaatgtaa

SEQ ID NO: 103200 - DNA, 25 bp, probe
ccaccagtgttatcaacttgaatgt

SEQ ID NO: 103201 - DNA, 25 bp, probe
accaccagtgttatcaacttgaatg

SEQ ID NO: 103202 - DNA, 25 bp, probe
ccttaatacactgctatggaggact

SEQ ID NO: 103203 - DNA, 25 bp, probe
acaatatcaccagagcaagccatag

SEQ ID NO: 103204 - DNA, 25 bp, probe
tcctactatacctgtctgacacaat

SEQ ID NO: 103205 - DNA, 25 bp, probe
tatacctgtctgacacaatatcacc

SEQ ID NO: 103206 - DNA, 25 bp, probe
accttaatacactgctatggaggac

SEQ ID NO: 103207 - DNA, 25 bp, probe
aataatggaagagcttacaacctgc

SEQ ID NO: 103208 - DNA, 25 bp, probe
ctcctactatacctgtctgacacaa

SEQ ID NO: 103209 - DNA, 25 bp, probe
tttgtattgaaatgaaaccaccagt

SEQ ID NO: 103210 - DNA, 25 bp, probe
cctactatacctgtctgacacaata

SEQ ID NO: 103211 - DNA, 25 bp, probe
cacaatatcaccagagcaagccata

SEQ ID NO: 103212 - DNA, 25 bp, probe
atacctgtctgacacaatatcacca

SEQ ID NO: 103213 - DNA, 25 bp, probe
actatacctgtctgacacaatatca

SEQ ID NO: 103214 - DNA, 25 bp, probe
attagctgcacatctatcatcaaga

SEQ ID NO: 103215 - DNA, 25 bp, probe
ttgtattgaaatgaaaccaccagtg

SEQ ID NO: 103216 - DNA, 25 bp, probe
ttagctgcacatctatcatcaagag

SEQ ID NO: 103217 - DNA, 25 bp, probe
ctatacctgtctgacacaatatcac

SEQ ID NO: 103218 - DNA, 25 bp, probe
ttgaaatgaaaccaccagtgttatc

SEQ ID NO: 103219 - DNA, 25 bp, probe
tagctgcacatctatcatcaagaga

SEQ ID NO: 103220 - DNA, 25 bp, probe
gtattgaaatgaaaccaccagtgtt

SEQ ID NO: 103221 - DNA, 25 bp, probe
tgtattgaaatgaaaccaccagtgt

SEQ ID NO: 103222 - DNA, 25 bp, probe
attgaaatgaaaccaccagtgttat

SEQ ID NO: 103223 - DNA, 25 bp, probe
aaatgaaaccaccagtgttatcaac

SEQ ID NO: 103224 - DNA, 25 bp, probe
gaaatgaaaccaccagtgttatcaa

SEQ ID NO: 103225 - DNA, 25 bp, probe
tacctgtctgacacaatatcaccag

SEQ ID NO: 103226 - DNA, 25 bp, probe
atatcaccagagcaagccatagaca

SEQ ID NO: 103227 - DNA, 25 bp, probe
atgaaaccaccagtgttatcaactt

SEQ ID NO: 103228 - DNA, 25 bp, probe
aatgaaaccaccagtgttatcaact

SEQ ID NO: 103229 - DNA, 25 bp, probe
tgaaatgaaaccaccagtgttatca

SEQ ID NO: 103230 - DNA, 25 bp, probe
tattgaaatgaaaccaccagtgtta

SEQ ID NO: 103231 - DNA, 25 bp, probe
aaaccttaatacactgctatggagg

SEQ ID NO: 103232 - DNA, 25 bp, probe
atgtcagttctctagcataatttgt

SEQ ID NO: 103233 - DNA, 25 bp, probe
aagaggttaagagagaagagagtca

SEQ ID NO: 103234 - DNA, 25 bp, probe
caagaggttaagagagaagagagtc

SEQ ID NO: 103235 - DNA, 25 bp, probe
acaagaggttaagagagaagagagt

SEQ ID NO: 103236 - DNA, 25 bp, probe
agaggttaagagagaagagagtcag

SEQ ID NO: 103237 - DNA, 25 bp, probe
caacaagaggttaagagagaagaga

SEQ ID NO: 103238 - DNA, 25 bp, probe
ttaagagagaagagagtcagcaaca

SEQ ID NO: 103239 - DNA, 25 bp, probe
aacaagaggttaagagagaagagag

SEQ ID NO: 103240 - DNA, 25 bp, probe
gttaagagagaagagagtcagcaac

SEQ ID NO: 103241 - DNA, 25 bp, probe
taagagagaagagagtcagcaacag

SEQ ID NO: 103242 - DNA, 25 bp, probe
agtatgacaacaacaagttcaagac

SEQ ID NO: 103243 - DNA, 25 bp, probe
gagtatgacaacaacaagttcaaga

SEQ ID NO: 103244 - DNA, 25 bp, probe
gcaacaagaggttaagagagaagag

SEQ ID NO: 103245 - DNA, 25 bp, probe
cgagtatgacaacaacaagttcaag

SEQ ID NO: 103246 - DNA, 25 bp, probe
aagacgacggttgtgaatgataatg

SEQ ID NO: 103247 - DNA, 25 bp, probe
tatgacaacaacaagttcaagacga

SEQ ID NO: 103248 - DNA, 25 bp, probe
gtatgacaacaacaagttcaagacg

SEQ ID NO: 103249 - DNA, 25 bp, probe
ggttaagagagaagagagtcagcaa

SEQ ID NO: 103250 - DNA, 25 bp, probe
gaggttaagagagaagagagtcagc

SEQ ID NO: 103251 - DNA, 25 bp, probe
caagacgacggttgtgaatgataat

SEQ ID NO: 103252 - DNA, 25 bp, probe
ccgagtatgacaacaacaagttcaa

SEQ ID NO: 103253 - DNA, 25 bp, probe
gaagattgacaccaaggagaacaac

SEQ ID NO: 103254 - DNA, 25 bp, probe
aggttaagagagaagagagtcagca

SEQ ID NO: 103255 - DNA, 25 bp, probe
caccaaggagaacaacatgaagtac

SEQ ID NO: 103256 - DNA, 25 bp, probe
atgacaacaacaagttcaagacgac

SEQ ID NO: 103257 - DNA, 25 bp, probe
agattgacaccaaggagaacaacat

SEQ ID NO: 103258 - DNA, 25 bp, probe
acaccaaggagaacaacatgaagta

SEQ ID NO: 103259 - DNA, 25 bp, probe
aagattgacaccaaggagaacaaca

SEQ ID NO: 103260 - DNA, 25 bp, probe
gataagtacatgcagatgaatcacg

SEQ ID NO: 103261 - DNA, 25 bp, probe
tatgtgtgtaagggtattgtgtgtg

SEQ ID NO: 103262 - DNA, 25 bp, probe
gtatgtgtgtaagggtattgtgtgt

SEQ ID NO: 103263 - DNA, 25 bp, probe
tcaagacgacggttgtgaatgataa

SEQ ID NO: 103264 - DNA, 25 bp, probe
aatgcaacaagaggttaagagagaa

SEQ ID NO: 103265 - DNA, 25 bp, probe
cgctttgtggtttatgaagaagata

SEQ ID NO: 103266 - DNA, 25 bp, probe
acaggagaaggtgacatttgaaatt

SEQ ID NO: 103267 - DNA, 25 bp, probe
atgcaacaagaggttaagagagaag

SEQ ID NO: 103268 - DNA, 25 bp, probe
ccattaaagcagtcaaatcaggatt

SEQ ID NO: 103269 - DNA, 25 bp, probe
ttaaagcagtcaaatcaggattcag

SEQ ID NO: 103270 - DNA, 25 bp, probe
agacgacggttgtgaatgataatgg

SEQ ID NO: 103271 - DNA, 25 bp, probe
agataagtacatgcagatgaatcac

SEQ ID NO: 103272 - DNA, 25 bp, probe
cagataagtacatgcagatgaatca

SEQ ID NO: 103273 - DNA, 25 bp, probe
ggtatgtgtgtaagggtattgtgtg

SEQ ID NO: 103274 - DNA, 25 bp, probe
cccattaaagcagtcaaatcaggat

SEQ ID NO: 103275 - DNA, 25 bp, probe
gattgacaccaaggagaacaacatg

SEQ ID NO: 103276 - DNA, 25 bp, probe
tcatcttggacaactttcttaactt

SEQ ID NO: 103277 - DNA, 25 bp, probe
tcagttgagcatctaggaagtatta

SEQ ID NO: 103278 - DNA, 25 bp, probe
cagttgagcatctaggaagtattaa

SEQ ID NO: 103279 - DNA, 25 bp, probe
ctcagttgagcatctaggaagtatt

SEQ ID NO: 103280 - DNA, 25 bp, probe
cctcagttgagcatctaggaagtat

SEQ ID NO: 103281 - DNA, 25 bp, probe
agttgagcatctaggaagtattaaa

SEQ ID NO: 103282 - DNA, 25 bp, probe
tgtctaggtagcaacaggtatcgag

SEQ ID NO: 103283 - DNA, 25 bp, probe
cccagacgcagaacaataaaataaa

SEQ ID NO: 103284 - DNA, 25 bp, probe
acccagacgcagaacaataaaataa

SEQ ID NO: 103285 - DNA, 25 bp, probe
aacccagacgcagaacaataaaata

SEQ ID NO: 103286 - DNA, 25 bp, probe
tttgtttctttcttaaagccacttt

SEQ ID NO: 103287 - DNA, 25 bp, probe
ctaggtagcaacaggtatcgaggac

SEQ ID NO: 103288 - DNA, 25 bp, probe
gtctaggtagcaacaggtatcgagg

SEQ ID NO: 103289 - DNA, 25 bp, probe
gtgtctaggtagcaacaggtatcga

SEQ ID NO: 103290 - DNA, 25 bp, probe
gcctcagttgagcatctaggaagta

SEQ ID NO: 103291 - DNA, 25 bp, probe
tctaggtagcaacaggtatcgagga

SEQ ID NO: 103292 - DNA, 25 bp, probe
ccagacgcagaacaataaaataaat

SEQ ID NO: 103293 - DNA, 25 bp, probe
cgcagaacaataaaataaattccgt

SEQ ID NO: 103294 - DNA, 25 bp, probe
acgcagaacaataaaataaattccg

SEQ ID NO: 103295 - DNA, 25 bp, probe
ggtgtctaggtagcaacaggtatcg

SEQ ID NO: 103296 - DNA, 25 bp, probe
taaaataaattccgtactccccacc

SEQ ID NO: 103297 - DNA, 25 bp, probe
aaacccagacgcagaacaataaaat

SEQ ID NO: 103298 - DNA, 25 bp, probe
taggtagcaacaggtatcgaggact

SEQ ID NO: 103299 - DNA, 25 bp, probe
ataaaataaattccgtactccccac

SEQ ID NO: 103300 - DNA, 25 bp, probe
ccaaacccagacgcagaacaataaa

SEQ ID NO: 103301 - DNA, 25 bp, probe
gtagcaacaggtatcgaggactctc

SEQ ID NO: 103302 - DNA, 25 bp, probe
aataaaataaattccgtactcccca

SEQ ID NO: 103303 - DNA, 25 bp, probe
caaacccagacgcagaacaataaaa

SEQ ID NO: 103304 - DNA, 25 bp, probe
caataaaataaattccgtactcccc

SEQ ID NO: 103305 - DNA, 25 bp, probe
gacgcagaacaataaaataaattcc

SEQ ID NO: 103306 - DNA, 25 bp, probe
tcttaaagccactttagtgagaagc

SEQ ID NO: 103307 - DNA, 25 bp, probe
ttcttaaagccactttagtgagaag

SEQ ID NO: 103308 - DNA, 25 bp, probe
ctttcttaaagccactttagtgaga

SEQ ID NO: 103309 - DNA, 25 bp, probe
tctttcttaaagccactttagtgag

SEQ ID NO: 103310 - DNA, 25 bp, probe
gggtgtctaggtagcaacaggtatc

SEQ ID NO: 103311 - DNA, 25 bp, probe
cattttgtcactttgcctcagttga

SEQ ID NO: 103312 - DNA, 25 bp, probe
gcatctaggaagtattaaaactgtg

SEQ ID NO: 103313 - DNA, 25 bp, probe
ttaaagccactttagtgagaagcag

SEQ ID NO: 103314 - DNA, 25 bp, probe
cttaaagccactttagtgagaagca

SEQ ID NO: 103315 - DNA, 25 bp, probe
ctaggaagtattaaaactgtgaagc

SEQ ID NO: 103316 - DNA, 25 bp, probe
agcatctaggaagtattaaaactgt

SEQ ID NO: 103317 - DNA, 25 bp, probe
tttcttaaagccactttagtgagaa

SEQ ID NO: 103318 - DNA, 25 bp, probe
ttctttcttaaagccactttagtga

SEQ ID NO: 103319 - DNA, 25 bp, probe
acaataaaataaattccgtactccc

SEQ ID NO: 103320 - DNA, 25 bp, probe
cagacgcagaacaataaaataaatt

SEQ ID NO: 103321 - DNA, 25 bp, probe
attagaatgattccaacactgctct

SEQ ID NO: 103322 - DNA, 25 bp, probe
tgaagcattagaatgattccaacac

SEQ ID NO: 103323 - DNA, 25 bp, probe
atcctgaagcattagaatgattcca

SEQ ID NO: 103324 - DNA, 25 bp, probe
ttagaatgattccaacactgctctt

SEQ ID NO: 103325 - DNA, 25 bp, probe
cattagaatgattccaacactgctc

SEQ ID NO: 103326 - DNA, 25 bp, probe
aagcattagaatgattccaacactg

SEQ ID NO: 103327 - DNA, 25 bp, probe
cctgaagcattagaatgattccaac

SEQ ID NO: 103328 - DNA, 25 bp, probe
tcctgaagcattagaatgattccaa

SEQ ID NO: 103329 - DNA, 25 bp, probe
catcctgaagcattagaatgattcc

SEQ ID NO: 103330 - DNA, 25 bp, probe
ttctatcttctctaggctcaggtac

SEQ ID NO: 103331 - DNA, 25 bp, probe
gaagcattagaatgattccaacact

SEQ ID NO: 103332 - DNA, 25 bp, probe
ctgaagcattagaatgattccaaca

SEQ ID NO: 103333 - DNA, 25 bp, probe
gcatcctgaagcattagaatgattc

SEQ ID NO: 103334 - DNA, 25 bp, probe
tagaatgattccaacactgctcttc

SEQ ID NO: 103335 - DNA, 25 bp, probe
aacagttcaagaagtctaggatgag

SEQ ID NO: 103336 - DNA, 25 bp, probe
tctatcttctctaggctcaggtact

SEQ ID NO: 103337 - DNA, 25 bp, probe
atcacagtcttccttcctcttcaag

SEQ ID NO: 103338 - DNA, 25 bp, probe
ggcatcctgaagcattagaatgatt

SEQ ID NO: 103339 - DNA, 25 bp, probe
catcacagtcttccttcctcttcaa

SEQ ID NO: 103340 - DNA, 25 bp, probe
ctcatcacagtcttccttcctcttc

SEQ ID NO: 103341 - DNA, 25 bp, probe
agaagtatcaagcgtccttagtcac

SEQ ID NO: 103342 - DNA, 25 bp, probe
cagaagtatcaagcgtccttagtca

SEQ ID NO: 103343 - DNA, 25 bp, probe
acagttcaagaagtctaggatgagg

SEQ ID NO: 103344 - DNA, 25 bp, probe
gaagtatcaagcgtccttagtcaca

SEQ ID NO: 103345 - DNA, 25 bp, probe
gaatgattccaacactgctcttctg

SEQ ID NO: 103346 - DNA, 25 bp, probe
ctatcttctctaggctcaggtactg

SEQ ID NO: 103347 - DNA, 25 bp, probe
aagtatcaagcgtccttagtcacac

SEQ ID NO: 103348 - DNA, 25 bp, probe
tcatcacagtcttccttcctcttca

SEQ ID NO: 103349 - DNA, 25 bp, probe
ctggctgacctttctatcttctcta

SEQ ID NO: 103350 - DNA, 25 bp, probe
atgaggcatcctgaagcattagaat

SEQ ID NO: 103351 - DNA, 25 bp, probe
acaaacagttcaagaagtctaggat

SEQ ID NO: 103352 - DNA, 25 bp, probe
tttctatcttctctaggctcaggta

SEQ ID NO: 103353 - DNA, 25 bp, probe
caaacagttcaagaagtctaggatg

SEQ ID NO: 103354 - DNA, 25 bp, probe
tacaaacagttcaagaagtctagga

SEQ ID NO: 103355 - DNA, 25 bp, probe
ctttctatcttctctaggctcaggt

SEQ ID NO: 103356 - DNA, 25 bp, probe
catctacaaacagttcaagaagtct

SEQ ID NO: 103357 - DNA, 25 bp, probe
tcatctacaaacagttcaagaagtc

SEQ ID NO: 103358 - DNA, 25 bp, probe
cagttcaagaagtctaggatgaggc

SEQ ID NO: 103359 - DNA, 25 bp, probe
aggcatcctgaagcattagaatgat

SEQ ID NO: 103360 - DNA, 25 bp, probe
ctacaaacagttcaagaagtctagg

SEQ ID NO: 103361 - DNA, 25 bp, probe
tggctgacctttctatcttctctag

SEQ ID NO: 103362 - DNA, 25 bp, probe
ttcatctacaaacagttcaagaagt

SEQ ID NO: 103363 - DNA, 25 bp, probe
gcagaagtatcaagcgtccttagtc

SEQ ID NO: 103364 - DNA, 25 bp, probe
ttctttctatgcttggtctgactga

SEQ ID NO: 103365 - DNA, 25 bp, probe
ctaattacctaaccagcttgtattg

SEQ ID NO: 103366 - DNA, 25 bp, probe
aattacctaaccagcttgtattggc

SEQ ID NO: 103367 - DNA, 25 bp, probe
taattacctaaccagcttgtattgg

SEQ ID NO: 103368 - DNA, 25 bp, probe
ggctaattacctaaccagcttgtat

SEQ ID NO: 103369 - DNA, 25 bp, probe
gctaattacctaaccagcttgtatt

SEQ ID NO: 103370 - DNA, 25 bp, probe
ttcttcaagggctaattacctaacc

SEQ ID NO: 103371 - DNA, 25 bp, probe
cttcaagggctaattacctaaccag

SEQ ID NO: 103372 - DNA, 25 bp, probe
tcttcaagggctaattacctaacca

SEQ ID NO: 103373 - DNA, 25 bp, probe
attcttcaagggctaattacctaac

SEQ ID NO: 103374 - DNA, 25 bp, probe
aattcttcaagggctaattacctaa

SEQ ID NO: 103375 - DNA, 25 bp, probe
gggctaattacctaaccagcttgta

SEQ ID NO: 103376 - DNA, 25 bp, probe
attacctaaccagcttgtattggcc

SEQ ID NO: 103377 - DNA, 25 bp, probe
ttcaagggctaattacctaaccagc

SEQ ID NO: 103378 - DNA, 25 bp, probe
gaattcttcaagggctaattaccta

SEQ ID NO: 103379 - DNA, 25 bp, probe
gccatctggaatatgcattaaatga

SEQ ID NO: 103380 - DNA, 25 bp, probe
ggccatctggaatatgcattaaatg

SEQ ID NO: 103381 - DNA, 25 bp, probe
aagggctaattacctaaccagcttg

SEQ ID NO: 103382 - DNA, 25 bp, probe
caagggctaattacctaaccagctt

SEQ ID NO: 103383 - DNA, 25 bp, probe
ccatctggaatatgcattaaatgac

SEQ ID NO: 103384 - DNA, 25 bp, probe
tcaagggctaattacctaaccagct

SEQ ID NO: 103385 - DNA, 25 bp, probe
agggctaattacctaaccagcttgt

SEQ ID NO: 103386 - DNA, 25 bp, probe
catctggaatatgcattaaatgact

SEQ ID NO: 103387 - DNA, 25 bp, probe
tctggaatatgcattaaatgacttt

SEQ ID NO: 103388 - DNA, 25 bp, probe
atctggaatatgcattaaatgactt

SEQ ID NO: 103389 - DNA, 25 bp, probe
ctggaatatgcattaaatgactttt

SEQ ID NO: 103390 - DNA, 25 bp, probe
ttccaagacagtaagagttcaagta

SEQ ID NO: 103391 - DNA, 25 bp, probe
cttccaagacagtaagagttcaagt

SEQ ID NO: 103392 - DNA, 25 bp, probe
tccaagacagtaagagttcaagtac

SEQ ID NO: 103393 - DNA, 25 bp, probe
ccaagacagtaagagttcaagtaca

SEQ ID NO: 103394 - DNA, 25 bp, probe
gcttccaagacagtaagagttcaag

SEQ ID NO: 103395 - DNA, 25 bp, probe
caagacagtaagagttcaagtacat

SEQ ID NO: 103396 - DNA, 25 bp, probe
agacagtaagagttcaagtacattg

SEQ ID NO: 103397 - DNA, 25 bp, probe
aatgctgactcttatcaccatcaca

SEQ ID NO: 103398 - DNA, 25 bp, probe
aagacagtaagagttcaagtacatt

SEQ ID NO: 103399 - DNA, 25 bp, probe
ctcttgctatccatctacgtgtatt

SEQ ID NO: 103400 - DNA, 25 bp, probe
ggcttccaagacagtaagagttcaa

SEQ ID NO: 103401 - DNA, 25 bp, probe
accaaggaaataaacaggaaggaaa

SEQ ID NO: 103402 - DNA, 25 bp, probe
aagtcaccaaggaaataaacaggaa

SEQ ID NO: 103403 - DNA, 25 bp, probe
ccaaggaaataaacaggaaggaaat

SEQ ID NO: 103404 - DNA, 25 bp, probe
taaactcctcttgctatccatctac

SEQ ID NO: 103405 - DNA, 25 bp, probe
cttgctatccatctacgtgtattac

SEQ ID NO: 103406 - DNA, 25 bp, probe
agtcaccaaggaaataaacaggaag

SEQ ID NO: 103407 - DNA, 25 bp, probe
tcttgctatccatctacgtgtatta

SEQ ID NO: 103408 - DNA, 25 bp, probe
caccaaggaaataaacaggaaggaa

SEQ ID NO: 103409 - DNA, 25 bp, probe
caagtcaccaaggaaataaacagga

SEQ ID NO: 103410 - DNA, 25 bp, probe
atgctgactcttatcaccatcacac

SEQ ID NO: 103411 - DNA, 25 bp, probe
accaagtcaccaaggaaataaacag

SEQ ID NO: 103412 - DNA, 25 bp, probe
cctcttgctatccatctacgtgtat

SEQ ID NO: 103413 - DNA, 25 bp, probe
gatagaagttctccaggacaagcag

SEQ ID NO: 103414 - DNA, 25 bp, probe
ttaaactcctcttgctatccatcta

SEQ ID NO: 103415 - DNA, 25 bp, probe
caaggaaataaacaggaaggaaatc

SEQ ID NO: 103416 - DNA, 25 bp, probe
tgctatccatctacgtgtattacag

SEQ ID NO: 103417 - DNA, 25 bp, probe
gctatccatctacgtgtattacaga

SEQ ID NO: 103418 - DNA, 25 bp, probe
gtcaccaaggaaataaacaggaagg

SEQ ID NO: 103419 - DNA, 25 bp, probe
ttgctatccatctacgtgtattaca

SEQ ID NO: 103420 - DNA, 25 bp, probe
ggataacttgccaggaatgagtctc

SEQ ID NO: 103421 - DNA, 25 bp, probe
tccatctacgtgtattacagacatt

SEQ ID NO: 103422 - DNA, 25 bp, probe
ctgactcttatcaccatcacaccag

SEQ ID NO: 103423 - DNA, 25 bp, probe
tcaccaaggaaataaacaggaagga

SEQ ID NO: 103424 - DNA, 25 bp, probe
ccatctacgtgtattacagacattc

SEQ ID NO: 103425 - DNA, 25 bp, probe
atccatctacgtgtattacagacat

SEQ ID NO: 103426 - DNA, 25 bp, probe
aaatgctgactcttatcaccatcac

SEQ ID NO: 103427 - DNA, 25 bp, probe
ctgaatctttgctaggaactgtgag

SEQ ID NO: 103428 - DNA, 25 bp, probe
aaactcctcttgctatccatctacg

SEQ ID NO: 103429 - DNA, 25 bp, probe
ccaagtcaccaaggaaataaacagg

SEQ ID NO: 103430 - DNA, 25 bp, probe
attgtaaacccacagtatctagcag

SEQ ID NO: 103431 - DNA, 25 bp, probe
gattgtaaacccacagtatctagca

SEQ ID NO: 103432 - DNA, 25 bp, probe
tgattgtaaacccacagtatctagc

SEQ ID NO: 103433 - DNA, 25 bp, probe
tatccatctacgtgtattacagaca

SEQ ID NO: 103434 - DNA, 25 bp, probe
gaggaaggatgctgtagtatatgaa

SEQ ID NO: 103435 - DNA, 25 bp, probe
ggaggaaggatgctgtagtatatga

SEQ ID NO: 103436 - DNA, 25 bp, probe
agcatatcgtggttctgtaacaata

SEQ ID NO: 103437 - DNA, 25 bp, probe
tagcatatcgtggttctgtaacaat

SEQ ID NO: 103438 - DNA, 25 bp, probe
gtggttctgtaacaatatcaaggac

SEQ ID NO: 103439 - DNA, 25 bp, probe
ttagcatatcgtggttctgtaacaa

SEQ ID NO: 103440 - DNA, 25 bp, probe
gcatatcgtggttctgtaacaatat

SEQ ID NO: 103441 - DNA, 25 bp, probe
cgtggttctgtaacaatatcaagga

SEQ ID NO: 103442 - DNA, 25 bp, probe
tcgtggttctgtaacaatatcaagg

SEQ ID NO: 103443 - DNA, 25 bp, probe
atcgtggttctgtaacaatatcaag

SEQ ID NO: 103444 - DNA, 25 bp, probe
tctgtaacaatatcaaggaccagtg

SEQ ID NO: 103445 - DNA, 25 bp, probe
ttctgtaacaatatcaaggaccagt

SEQ ID NO: 103446 - DNA, 25 bp, probe
gttctgtaacaatatcaaggaccag

SEQ ID NO: 103447 - DNA, 25 bp, probe
tatcgtggttctgtaacaatatcaa

SEQ ID NO: 103448 - DNA, 25 bp, probe
atatcgtggttctgtaacaatatca

SEQ ID NO: 103449 - DNA, 25 bp, probe
catatcgtggttctgtaacaatatc

SEQ ID NO: 103450 - DNA, 25 bp, probe
ggttctgtaacaatatcaaggacca

SEQ ID NO: 103451 - DNA, 25 bp, probe
tggttctgtaacaatatcaaggacc

SEQ ID NO: 103452 - DNA, 25 bp, probe
ctgtaacaatatcaaggaccagtgc

SEQ ID NO: 103453 - DNA, 25 bp, probe
ccttattgttgactgctttgttctt

SEQ ID NO: 103454 - DNA, 25 bp, probe
ttccttattgttgactgctttgttc

SEQ ID NO: 103455 - DNA, 25 bp, probe
tttccttattgttgactgctttgtt

SEQ ID NO: 103456 - DNA, 25 bp, probe
gtttccttattgttgactgctttgt

SEQ ID NO: 103457 - DNA, 25 bp, probe
tccttattgttgactgctttgttct

SEQ ID NO: 103458 - DNA, 25 bp, probe
catttagcatatcgtggttctgtaa

SEQ ID NO: 103459 - DNA, 25 bp, probe
tattgttgactgctttgttctttgc

SEQ ID NO: 103460 - DNA, 25 bp, probe
ttattgttgactgctttgttctttg

SEQ ID NO: 103461 - DNA, 25 bp, probe
ggtttccttattgttgactgctttg

SEQ ID NO: 103462 - DNA, 25 bp, probe
aggaaggatgctgtagtatatgaaa

SEQ ID NO: 103463 - DNA, 25 bp, probe
gataggctaccagtgtgtgtttatg

SEQ ID NO: 103464 - DNA, 25 bp, probe
cttattgttgactgctttgttcttt

SEQ ID NO: 103465 - DNA, 25 bp, probe
tggtttccttattgttgactgcttt

SEQ ID NO: 103466 - DNA, 25 bp, probe
ttggtttccttattgttgactgctt

SEQ ID NO: 103467 - DNA, 25 bp, probe
atttagcatatcgtggttctgtaac

SEQ ID NO: 103468 - DNA, 25 bp, probe
tagggaggaaggatgctgtagtata

SEQ ID NO: 103469 - DNA, 25 bp, probe
tttagcatatcgtggttctgtaaca

SEQ ID NO: 103470 - DNA, 25 bp, probe
gcatttagcatatcgtggttctgta

SEQ ID NO: 103471 - DNA, 25 bp, probe
ttgtggttctaatcataatggtaca

SEQ ID NO: 103472 - DNA, 25 bp, probe
tgataggctaccagtgtgtgtttat

SEQ ID NO: 103473 - DNA, 25 bp, probe
ttctttgccttgtccttccctataa

SEQ ID NO: 103474 - DNA, 25 bp, probe
tctttgccttgtccttccctataaa

SEQ ID NO: 103475 - DNA, 25 bp, probe
aatatcaaggaccagtgcagaatct

SEQ ID NO: 103476 - DNA, 25 bp, probe
caatatcaaggaccagtgcagaatc

SEQ ID NO: 103477 - DNA, 25 bp, probe
taacaatatcaaggaccagtgcaga

SEQ ID NO: 103478 - DNA, 25 bp, probe
taactctttcggaaataacacctca

SEQ ID NO: 103479 - DNA, 25 bp, probe
ttaactctttcggaaataacacctc

SEQ ID NO: 103480 - DNA, 25 bp, probe
tttgagaaacaggagttgatgaacc

SEQ ID NO: 103481 - DNA, 25 bp, probe
aactctttcggaaataacacctcac

SEQ ID NO: 103482 - DNA, 25 bp, probe
tttaactctttcggaaataacacct

SEQ ID NO: 103483 - DNA, 25 bp, probe
ttatttctggctcttcggatgtctt

SEQ ID NO: 103484 - DNA, 25 bp, probe
tttatttctggctcttcggatgtct

SEQ ID NO: 103485 - DNA, 25 bp, probe
ctctttcggaaataacacctcacag

SEQ ID NO: 103486 - DNA, 25 bp, probe
tatttctggctcttcggatgtcttc

SEQ ID NO: 103487 - DNA, 25 bp, probe
tagctttagtctttctgttcccatt

SEQ ID NO: 103488 - DNA, 25 bp, probe
ctagctttagtctttctgttcccat

SEQ ID NO: 103489 - DNA, 25 bp, probe
agctttagtctttctgttcccattt

SEQ ID NO: 103490 - DNA, 25 bp, probe
actctttcggaaataacacctcaca

SEQ ID NO: 103491 - DNA, 25 bp, probe
ttctggctcttcggatgtcttctag

SEQ ID NO: 103492 - DNA, 25 bp, probe
tctgagcattgataatgttctatct

SEQ ID NO: 103493 - DNA, 25 bp, probe
tagacatttactatcactgcacctg

SEQ ID NO: 103494 - DNA, 25 bp, probe
ctagacatttactatcactgcacct

SEQ ID NO: 103495 - DNA, 25 bp, probe
tctggaatttctgagtgagtccttt

SEQ ID NO: 103496 - DNA, 25 bp, probe
gagaaacaggagttgatgaacccat

SEQ ID NO: 103497 - DNA, 25 bp, probe
tttactatcactgcacctgaagaaa

SEQ ID NO: 103498 - DNA, 25 bp, probe
atttactatcactgcacctgaagaa

SEQ ID NO: 103499 - DNA, 25 bp, probe
tttatggtgtcctccctctgtgaat

SEQ ID NO: 103500 - DNA, 25 bp, probe
catttactatcactgcacctgaaga

SEQ ID NO: 103501 - DNA, 25 bp, probe
ttgagaaacaggagttgatgaaccc

SEQ ID NO: 103502 - DNA, 25 bp, probe
acatttactatcactgcacctgaag

SEQ ID NO: 103503 - DNA, 25 bp, probe
gacatttactatcactgcacctgaa

SEQ ID NO: 103504 - DNA, 25 bp, probe
tttctggctcttcggatgtcttcta

SEQ ID NO: 103505 - DNA, 25 bp, probe
gtttgagaaacaggagttgatgaac

SEQ ID NO: 103506 - DNA, 25 bp, probe
gtctggaatttctgagtgagtcctt

SEQ ID NO: 103507 - DNA, 25 bp, probe
gctttagtctttctgttcccatttt

SEQ ID NO: 103508 - DNA, 25 bp, probe
atctgagcattgataatgttctatc

SEQ ID NO: 103509 - DNA, 25 bp, probe
ttttctctgagcacaaagttttagg

SEQ ID NO: 103510 - DNA, 25 bp, probe
agacatttactatcactgcacctga

SEQ ID NO: 103511 - DNA, 25 bp, probe
tctagacatttactatcactgcacc

SEQ ID NO: 103512 - DNA, 25 bp, probe
tctttcggaaataacacctcacagc

SEQ ID NO: 103513 - DNA, 25 bp, probe
ttttatttctggctcttcggatgtc

SEQ ID NO: 103514 - DNA, 25 bp, probe
atttctggctcttcggatgtcttct

SEQ ID NO: 103515 - DNA, 25 bp, probe
ttatggtgtcctccctctgtgaatg

SEQ ID NO: 103516 - DNA, 25 bp, probe
aatctgagcattgataatgttctat

SEQ ID NO: 103517 - DNA, 25 bp, probe
tttcggaaataacacctcacagcag

SEQ ID NO: 103518 - DNA, 25 bp, probe
ctttcggaaataacacctcacagca

SEQ ID NO: 103519 - DNA, 25 bp, probe
ttctagacatttactatcactgcac

SEQ ID NO: 103520 - DNA, 25 bp, probe
ctgagcattgataatgttctatcta

SEQ ID NO: 103521 - DNA, 25 bp, probe
cttctagacatttactatcactgca

SEQ ID NO: 103522 - DNA, 25 bp, probe
ttagtgtggcagaataataacatca

SEQ ID NO: 103523 - DNA, 25 bp, probe
atgagccttactgtatttagtgtgg

SEQ ID NO: 103524 - DNA, 25 bp, probe
aatgagccttactgtatttagtgtg

SEQ ID NO: 103525 - DNA, 25 bp, probe
caatgagccttactgtatttagtgt

SEQ ID NO: 103526 - DNA, 25 bp, probe
ccttactgtatttagtgtggcagaa

SEQ ID NO: 103527 - DNA, 25 bp, probe
acaatgagccttactgtatttagtg

SEQ ID NO: 103528 - DNA, 25 bp, probe
gcatttacagattggtgtcaaagac

SEQ ID NO: 103529 - DNA, 25 bp, probe
tacatgaggacaatgctttaagttt

SEQ ID NO: 103530 - DNA, 25 bp, probe
cttactgtatttagtgtggcagaat

SEQ ID NO: 103531 - DNA, 25 bp, probe
atacatgaggacaatgctttaagtt

SEQ ID NO: 103532 - DNA, 25 bp, probe
aatacatgaggacaatgctttaagt

SEQ ID NO: 103533 - DNA, 25 bp, probe
actgtatttagtgtggcagaataat

SEQ ID NO: 103534 - DNA, 25 bp, probe
tttatggttcatgttatatcctccc

SEQ ID NO: 103535 - DNA, 25 bp, probe
cgcatttacagattggtgtcaaaga

SEQ ID NO: 103536 - DNA, 25 bp, probe
aaatacatgaggacaatgctttaag

SEQ ID NO: 103537 - DNA, 25 bp, probe
acgcatttacagattggtgtcaaag

SEQ ID NO: 103538 - DNA, 25 bp, probe
tactgtatttagtgtggcagaataa

SEQ ID NO: 103539 - DNA, 25 bp, probe
ttactgtatttagtgtggcagaata

SEQ ID NO: 103540 - DNA, 25 bp, probe
tttagtgtggcagaataataacatc

SEQ ID NO: 103541 - DNA, 25 bp, probe
cacgcatttacagattggtgtcaaa

SEQ ID NO: 103542 - DNA, 25 bp, probe
aagtacaatgagccttactgtattt

SEQ ID NO: 103543 - DNA, 25 bp, probe
aaagtacaatgagccttactgtatt

SEQ ID NO: 103544 - DNA, 25 bp, probe
atttagtgtggcagaataataacat

SEQ ID NO: 103545 - DNA, 25 bp, probe
tgtatttagtgtggcagaataataa

SEQ ID NO: 103546 - DNA, 25 bp, probe
ctgtatttagtgtggcagaataata

SEQ ID NO: 103547 - DNA, 25 bp, probe
ttatggttcatgttatatcctcccc

SEQ ID NO: 103548 - DNA, 25 bp, probe
tacaatgagccttactgtatttagt

SEQ ID NO: 103549 - DNA, 25 bp, probe
acatgaggacaatgctttaagtttt

SEQ ID NO: 103550 - DNA, 25 bp, probe
agtacaatgagccttactgtattta

SEQ ID NO: 103551 - DNA, 25 bp, probe
tgtgttctaaaagtacaatgagcct

SEQ ID NO: 103552 - DNA, 25 bp, probe
gtatttagtgtggcagaataataac

SEQ ID NO: 103553 - DNA, 25 bp, probe
gtgttctaaaagtacaatgagcctt

SEQ ID NO: 103554 - DNA, 25 bp, probe
gtacaatgagccttactgtatttag

SEQ ID NO: 103555 - DNA, 25 bp, probe
tatttagtgtggcagaataataaca

SEQ ID NO: 103556 - DNA, 25 bp, probe
gttctaaaagtacaatgagccttac

SEQ ID NO: 103557 - DNA, 25 bp, probe
tgttctaaaagtacaatgagcctta

SEQ ID NO: 103558 - DNA, 25 bp, probe
tatggttcatgttatatcctcccca

SEQ ID NO: 103559 - DNA, 25 bp, probe
ctaaaagtacaatgagccttactgt

SEQ ID NO: 103560 - DNA, 25 bp, probe
tctaaaagtacaatgagccttactg

SEQ ID NO: 103561 - DNA, 25 bp, probe
ggtgtcaaagacattcactatgttt

SEQ ID NO: 103562 - DNA, 25 bp, probe
agattggtgtcaaagacattcacta

SEQ ID NO: 103563 - DNA, 25 bp, probe
catttacagattggtgtcaaagaca

SEQ ID NO: 103564 - DNA, 25 bp, probe
attggtgtcaaagacattcactatg

SEQ ID NO: 103565 - DNA, 25 bp, probe
tacagattggtgtcaaagacattca

SEQ ID NO: 103566 - DNA, 25 bp, probe
aatatgaagaaccaagagtgtgact

SEQ ID NO: 103567 - DNA, 25 bp, probe
gtgtgagagaatctatcaacctgtt

SEQ ID NO: 103568 - DNA, 25 bp, probe
atatgaagaaccaagagtgtgactg

SEQ ID NO: 103569 - DNA, 25 bp, probe
ctgtgtgagagaatctatcaacctg

SEQ ID NO: 103570 - DNA, 25 bp, probe
gagtgtattcttctcttctccgatt

SEQ ID NO: 103571 - DNA, 25 bp, probe
aatgagtgtattcttctcttctccg

SEQ ID NO: 103572 - DNA, 25 bp, probe
tgagtgtattcttctcttctccgat

SEQ ID NO: 103573 - DNA, 25 bp, probe
atgagtgtattcttctcttctccga

SEQ ID NO: 103574 - DNA, 25 bp, probe
tgtgtgagagaatctatcaacctgt

SEQ ID NO: 103575 - DNA, 25 bp, probe
ttgaacgctgtgtgagagaatctat

SEQ ID NO: 103576 - DNA, 25 bp, probe
attgaacgctgtgtgagagaatcta

SEQ ID NO: 103577 - DNA, 25 bp, probe
caacagcacagttcttcatatccac

SEQ ID NO: 103578 - DNA, 25 bp, probe
caccaacagcacagttcttcatatc

SEQ ID NO: 103579 - DNA, 25 bp, probe
aacgctgtgtgagagaatctatcaa

SEQ ID NO: 103580 - DNA, 25 bp, probe
gctgtgtgagagaatctatcaacct

SEQ ID NO: 103581 - DNA, 25 bp, probe
tgaacgctgtgtgagagaatctatc

SEQ ID NO: 103582 - DNA, 25 bp, probe
attcttctcttctccgatttaccag

SEQ ID NO: 103583 - DNA, 25 bp, probe
gaacgctgtgtgagagaatctatca

SEQ ID NO: 103584 - DNA, 25 bp, probe
agtgtattcttctcttctccgattt

SEQ ID NO: 103585 - DNA, 25 bp, probe
tggctaatggctttaatgagtgtat

SEQ ID NO: 103586 - DNA, 25 bp, probe
ttggctaatggctttaatgagtgta

SEQ ID NO: 103587 - DNA, 25 bp, probe
aaatatgaagaaccaagagtgtgac

SEQ ID NO: 103588 - DNA, 25 bp, probe
caaatatgaagaaccaagagtgtga

SEQ ID NO: 103589 - DNA, 25 bp, probe
agtaactcatttcacccaaacaaga

SEQ ID NO: 103590 - DNA, 25 bp, probe
ggctaatggctttaatgagtgtatt

SEQ ID NO: 103591 - DNA, 25 bp, probe
taatgagtgtattcttctcttctcc

SEQ ID NO: 103592 - DNA, 25 bp, probe
gtaactcatttcacccaaacaagaa

SEQ ID NO: 103593 - DNA, 25 bp, probe
tattcttctcttctccgatttacca

SEQ ID NO: 103594 - DNA, 25 bp, probe
tgggataccttactacttgggaatt

SEQ ID NO: 103595 - DNA, 25 bp, probe
ctgggataccttactacttgggaat

SEQ ID NO: 103596 - DNA, 25 bp, probe
tagtaactcatttcacccaaacaag

SEQ ID NO: 103597 - DNA, 25 bp, probe
ccattctgtattggagtagcaattc

SEQ ID NO: 103598 - DNA, 25 bp, probe
acgctgtgtgagagaatctatcaac

SEQ ID NO: 103599 - DNA, 25 bp, probe
tctgtattggagtagcaattcttca

SEQ ID NO: 103600 - DNA, 25 bp, probe
aactagatgtccagattgttgcatt

SEQ ID NO: 103601 - DNA, 25 bp, probe
tttaccagaaattgacattgaacgc

SEQ ID NO: 103602 - DNA, 25 bp, probe
ctgtattggagtagcaattcttcag

SEQ ID NO: 103603 - DNA, 25 bp, probe
gtattcttctcttctccgatttacc

SEQ ID NO: 103604 - DNA, 25 bp, probe
tatgaagaaccaagagtgtgactgc

SEQ ID NO: 103605 - DNA, 25 bp, probe
aattcctctttcccattctgtattg

SEQ ID NO: 103606 - DNA, 25 bp, probe
tttggctaatggctttaatgagtgt

SEQ ID NO: 103607 - DNA, 25 bp, probe
ttagtaactcatttcacccaaacaa

SEQ ID NO: 103608 - DNA, 25 bp, probe
tttagtaactcatttcacccaaaca

SEQ ID NO: 103609 - DNA, 25 bp, probe
tattggagtagcaattcttcagcag

SEQ ID NO: 103610 - DNA, 25 bp, probe
acctaatgtatattctccttgagcc

SEQ ID NO: 103611 - DNA, 25 bp, probe
cacctgaacctaatgtatattctcc

SEQ ID NO: 103612 - DNA, 25 bp, probe
acctgaacctaatgtatattctcct

SEQ ID NO: 103613 - DNA, 25 bp, probe
tgtcacctgaacctaatgtatattc

SEQ ID NO: 103614 - DNA, 25 bp, probe
gtcacctgaacctaatgtatattct

SEQ ID NO: 103615 - DNA, 25 bp, probe
ttgtcacctgaacctaatgtatatt

SEQ ID NO: 103616 - DNA, 25 bp, probe
aacctaatgtatattctccttgagc

SEQ ID NO: 103617 - DNA, 25 bp, probe
cctgaacctaatgtatattctcctt

SEQ ID NO: 103618 - DNA, 25 bp, probe
tcacctgaacctaatgtatattctc

SEQ ID NO: 103619 - DNA, 25 bp, probe
aaagagggaggctgaaatgtttatt

SEQ ID NO: 103620 - DNA, 25 bp, probe
ctgaaatgtttattctgcttctccc

SEQ ID NO: 103621 - DNA, 25 bp, probe
gaaagagggaggctgaaatgtttat

SEQ ID NO: 103622 - DNA, 25 bp, probe
gctgaaatgtttattctgcttctcc

SEQ ID NO: 103623 - DNA, 25 bp, probe
ggctgaaatgtttattctgcttctc

SEQ ID NO: 103624 - DNA, 25 bp, probe
gaggctgaaatgtttattctgcttc

SEQ ID NO: 103625 - DNA, 25 bp, probe
aggctgaaatgtttattctgcttct

SEQ ID NO: 103626 - DNA, 25 bp, probe
aagagggaggctgaaatgtttattc

SEQ ID NO: 103627 - DNA, 25 bp, probe
tgaacctaatgtatattctccttga

SEQ ID NO: 103628 - DNA, 25 bp, probe
cctaatgtatattctccttgagccc

SEQ ID NO: 103629 - DNA, 25 bp, probe
aaatgtttattctgcttctcccgtg

SEQ ID NO: 103630 - DNA, 25 bp, probe
ctgaacctaatgtatattctccttg

SEQ ID NO: 103631 - DNA, 25 bp, probe
gaaatgtttattctgcttctcccgt

SEQ ID NO: 103632 - DNA, 25 bp, probe
tgaaatgtttattctgcttctcccg

SEQ ID NO: 103633 - DNA, 25 bp, probe
gagggaggctgaaatgtttattctg

SEQ ID NO: 103634 - DNA, 25 bp, probe
agagggaggctgaaatgtttattct

SEQ ID NO: 103635 - DNA, 25 bp, probe
attatttgtcacctgaacctaatgt

SEQ ID NO: 103636 - DNA, 25 bp, probe
ggaggctgaaatgtttattctgctt

SEQ ID NO: 103637 - DNA, 25 bp, probe
ttatttgtcacctgaacctaatgta

SEQ ID NO: 103638 - DNA, 25 bp, probe
cttctccttcattctctgtgaacat

SEQ ID NO: 103639 - DNA, 25 bp, probe
ggagggtgaggtgtaattatttgtc

SEQ ID NO: 103640 - DNA, 25 bp, probe
tttgtcacctgaacctaatgtatat

SEQ ID NO: 103641 - DNA, 25 bp, probe
atttgtcacctgaacctaatgtata

SEQ ID NO: 103642 - DNA, 25 bp, probe
tatttgtcacctgaacctaatgtat

SEQ ID NO: 103643 - DNA, 25 bp, probe
gtggagggtgaggtgtaattatttg

SEQ ID NO: 103644 - DNA, 25 bp, probe
gtttattctgcttctcccgtgtttc

SEQ ID NO: 103645 - DNA, 25 bp, probe
gagggtgaggtgtaattatttgtca

SEQ ID NO: 103646 - DNA, 25 bp, probe
ttattctgcttctcccgtgtttcat

SEQ ID NO: 103647 - DNA, 25 bp, probe
ttctccttcattctctgtgaacatg

SEQ ID NO: 103648 - DNA, 25 bp, probe
tggagggtgaggtgtaattatttgt

SEQ ID NO: 103649 - DNA, 25 bp, probe
tgtggagggtgaggtgtaattattt

SEQ ID NO: 103650 - DNA, 25 bp, probe
tttattctgcttctcccgtgtttca

SEQ ID NO: 103651 - DNA, 25 bp, probe
gaacctaatgtatattctccttgag

SEQ ID NO: 103652 - DNA, 25 bp, probe
atgtttattctgcttctcccgtgtt

SEQ ID NO: 103653 - DNA, 25 bp, probe
aatgtttattctgcttctcccgtgt

SEQ ID NO: 103654 - DNA, 25 bp, probe
tgtgtaaggtgtcttaatactgtcc

SEQ ID NO: 103655 - DNA, 25 bp, probe
gtgtaaggtgtcttaatactgtcct

SEQ ID NO: 103656 - DNA, 25 bp, probe
ttgtgtaaggtgtcttaatactgtc

SEQ ID NO: 103657 - DNA, 25 bp, probe
catcatagcaataacattcccactg

SEQ ID NO: 103658 - DNA, 25 bp, probe
tcatcatagcaataacattcccact

SEQ ID NO: 103659 - DNA, 25 bp, probe
ctcatcatagcaataacattcccac

SEQ ID NO: 103660 - DNA, 25 bp, probe
cctcatcatagcaataacattccca

SEQ ID NO: 103661 - DNA, 25 bp, probe
ttaaacacaaacagacctcagaatc

SEQ ID NO: 103662 - DNA, 25 bp, probe
gattaaacacaaacagacctcagaa

SEQ ID NO: 103663 - DNA, 25 bp, probe
taaacacaaacagacctcagaatct

SEQ ID NO: 103664 - DNA, 25 bp, probe
gtctttattacccaagtcttctccc

SEQ ID NO: 103665 - DNA, 25 bp, probe
cgtctttattacccaagtcttctcc

SEQ ID NO: 103666 - DNA, 25 bp, probe
ccctcatcatagcaataacattccc

SEQ ID NO: 103667 - DNA, 25 bp, probe
attaaacacaaacagacctcagaat

SEQ ID NO: 103668 - DNA, 25 bp, probe
tgattaaacacaaacagacctcaga

SEQ ID NO: 103669 - DNA, 25 bp, probe
tctttattacccaagtcttctcccg

SEQ ID NO: 103670 - DNA, 25 bp, probe
tttattacccaagtcttctcccgtc

SEQ ID NO: 103671 - DNA, 25 bp, probe
ctttattacccaagtcttctcccgt

SEQ ID NO: 103672 - DNA, 25 bp, probe
ccagaattggttgtaaatactttgc

SEQ ID NO: 103673 - DNA, 25 bp, probe
tagatttcagatgactatgcagagg

SEQ ID NO: 103674 - DNA, 25 bp, probe
tttgtgtaaggtgtcttaatactgt

SEQ ID NO: 103675 - DNA, 25 bp, probe
tcctttcatacgtctttattaccca

SEQ ID NO: 103676 - DNA, 25 bp, probe
tgtagatttcagatgactatgcaga

SEQ ID NO: 103677 - DNA, 25 bp, probe
gtctccatgtgcgtccatatttaac

SEQ ID NO: 103678 - DNA, 25 bp, probe
acgtctttattacccaagtcttctc

SEQ ID NO: 103679 - DNA, 25 bp, probe
gtagatttcagatgactatgcagag

SEQ ID NO: 103680 - DNA, 25 bp, probe
tcatacgtctttattacccaagtct

SEQ ID NO: 103681 - DNA, 25 bp, probe
tacgtctttattacccaagtcttct

SEQ ID NO: 103682 - DNA, 25 bp, probe
gggtatccagaattggttgtaaata

SEQ ID NO: 103683 - DNA, 25 bp, probe
cctttcatacgtctttattacccaa

SEQ ID NO: 103684 - DNA, 25 bp, probe
ttgtagatttcagatgactatgcag

SEQ ID NO: 103685 - DNA, 25 bp, probe
tgtctccatgtgcgtccatatttaa

SEQ ID NO: 103686 - DNA, 25 bp, probe
cagaattggttgtaaatactttgca

SEQ ID NO: 103687 - DNA, 25 bp, probe
ctttgtgtaaggtgtcttaatactg

SEQ ID NO: 103688 - DNA, 25 bp, probe
ttcctttcatacgtctttattaccc

SEQ ID NO: 103689 - DNA, 25 bp, probe
catacgtctttattacccaagtctt

SEQ ID NO: 103690 - DNA, 25 bp, probe
ttcatacgtctttattacccaagtc

SEQ ID NO: 103691 - DNA, 25 bp, probe
tttgtagatttcagatgactatgca

SEQ ID NO: 103692 - DNA, 25 bp, probe
atacgtctttattacccaagtcttc

SEQ ID NO: 103693 - DNA, 25 bp, probe
tctccatgtgcgtccatatttaaca

SEQ ID NO: 103694 - DNA, 25 bp, probe
tttcatacgtctttattacccaagt

SEQ ID NO: 103695 - DNA, 25 bp, probe
tccagaattggttgtaaatactttg

SEQ ID NO: 103696 - DNA, 25 bp, probe
ggtatccagaattggttgtaaatac

SEQ ID NO: 103697 - DNA, 25 bp, probe
ttattacccaagtcttctcccgtcc

SEQ ID NO: 103698 - DNA, 25 bp, probe
tcttactgccgattgcttattactt

SEQ ID NO: 103699 - DNA, 25 bp, probe
ttcttactgccgattgcttattact

SEQ ID NO: 103700 - DNA, 25 bp, probe
cttactgccgattgcttattactta

SEQ ID NO: 103701 - DNA, 25 bp, probe
tgccgattgcttattacttaattgt

SEQ ID NO: 103702 - DNA, 25 bp, probe
actgccgattgcttattacttaatt

SEQ ID NO: 103703 - DNA, 25 bp, probe
ctgccgattgcttattacttaattg

SEQ ID NO: 103704 - DNA, 25 bp, probe
ttactgccgattgcttattacttaa

SEQ ID NO: 103705 - DNA, 25 bp, probe
tactgccgattgcttattacttaat

SEQ ID NO: 103706 - DNA, 25 bp, probe
gccgattgcttattacttaattgtt

SEQ ID NO: 103707 - DNA, 25 bp, probe
catttcttactgccgattgcttatt

SEQ ID NO: 103708 - DNA, 25 bp, probe
ttatacatttcttactgccgattgc

SEQ ID NO: 103709 - DNA, 25 bp, probe
tttcttactgccgattgcttattac

SEQ ID NO: 103710 - DNA, 25 bp, probe
tatacatttcttactgccgattgct

SEQ ID NO: 103711 - DNA, 25 bp, probe
tacatttcttactgccgattgctta

SEQ ID NO: 103712 - DNA, 25 bp, probe
atttcttactgccgattgcttatta

SEQ ID NO: 103713 - DNA, 25 bp, probe
acatttcttactgccgattgcttat

SEQ ID NO: 103714 - DNA, 25 bp, probe
atacatttcttactgccgattgctt

SEQ ID NO: 103715 - DNA, 25 bp, probe
agttagtgtttgagttgaagtgtta

SEQ ID NO: 103716 - DNA, 25 bp, probe
tagttagtgtttgagttgaagtgtt

SEQ ID NO: 103717 - DNA, 25 bp, probe
ccgattgcttattacttaattgttc

SEQ ID NO: 103718 - DNA, 25 bp, probe
gttatacatttcttactgccgattg

SEQ ID NO: 103719 - DNA, 25 bp, probe
ctagttagtgtttgagttgaagtgt

SEQ ID NO: 103720 - DNA, 25 bp, probe
tcagtttatcatcgttgactctttg

SEQ ID NO: 103721 - DNA, 25 bp, probe
cagtttatcatcgttgactctttgc

SEQ ID NO: 103722 - DNA, 25 bp, probe
tctagttagtgtttgagttgaagtg

SEQ ID NO: 103723 - DNA, 25 bp, probe
agtgttatacatttcttactgccga

SEQ ID NO: 103724 - DNA, 25 bp, probe
aagtgttatacatttcttactgccg

SEQ ID NO: 103725 - DNA, 25 bp, probe
gtgttatacatttcttactgccgat

SEQ ID NO: 103726 - DNA, 25 bp, probe
ttcagtttatcatcgttgactcttt

SEQ ID NO: 103727 - DNA, 25 bp, probe
tttcagtttatcatcgttgactctt

SEQ ID NO: 103728 - DNA, 25 bp, probe
gttagtgtttgagttgaagtgttat

SEQ ID NO: 103729 - DNA, 25 bp, probe
tgttatacatttcttactgccgatt

SEQ ID NO: 103730 - DNA, 25 bp, probe
agtgtttgagttgaagtgttataca

SEQ ID NO: 103731 - DNA, 25 bp, probe
ttctagttagtgtttgagttgaagt

SEQ ID NO: 103732 - DNA, 25 bp, probe
cgattgcttattacttaattgttca

SEQ ID NO: 103733 - DNA, 25 bp, probe
gaagtgttatacatttcttactgcc

SEQ ID NO: 103734 - DNA, 25 bp, probe
gtgtttgagttgaagtgttatacat

SEQ ID NO: 103735 - DNA, 25 bp, probe
tagtgtttgagttgaagtgttatac

SEQ ID NO: 103736 - DNA, 25 bp, probe
tttctagttagtgtttgagttgaag

SEQ ID NO: 103737 - DNA, 25 bp, probe
tgaagtgttatacatttcttactgc

SEQ ID NO: 103738 - DNA, 25 bp, probe
agtttatcatcgttgactctttgca

SEQ ID NO: 103739 - DNA, 25 bp, probe
ttctttgttctttacgttgttcatt

SEQ ID NO: 103740 - DNA, 25 bp, probe
aattctttgttctttacgttgttca

SEQ ID NO: 103741 - DNA, 25 bp, probe
agccattttcagtttatcatcgttg

SEQ ID NO: 103742 - DNA, 25 bp, probe
acaaatgagatatgggatatggtgc

SEQ ID NO: 103743 - DNA, 25 bp, probe
tgacaaatgagatatgggatatggt

SEQ ID NO: 103744 - DNA, 25 bp, probe
gacaaatgagatatgggatatggtg

SEQ ID NO: 103745 - DNA, 25 bp, probe
ctgacaaatgagatatgggatatgg

SEQ ID NO: 103746 - DNA, 25 bp, probe
gttctttccactgacaaatgagata

SEQ ID NO: 103747 - DNA, 25 bp, probe
ctcatcttgaattgttcccgtaatc

SEQ ID NO: 103748 - DNA, 25 bp, probe
tctcatcttgaattgttcccgtaat

SEQ ID NO: 103749 - DNA, 25 bp, probe
atctcatcttgaattgttcccgtaa

SEQ ID NO: 103750 - DNA, 25 bp, probe
aatctcatcttgaattgttcccgta

SEQ ID NO: 103751 - DNA, 25 bp, probe
cccatccaaatctcatcttgaattg

SEQ ID NO: 103752 - DNA, 25 bp, probe
ccaaatctcatcttgaattgttccc

SEQ ID NO: 103753 - DNA, 25 bp, probe
ccatccaaatctcatcttgaattgt

SEQ ID NO: 103754 - DNA, 25 bp, probe
tccaaatctcatcttgaattgttcc

SEQ ID NO: 103755 - DNA, 25 bp, probe
tctttccactgacaaatgagatatg

SEQ ID NO: 103756 - DNA, 25 bp, probe
gcattaagtcaacaaatccctagtt

SEQ ID NO: 103757 - DNA, 25 bp, probe
caaatctcatcttgaattgttcccg

SEQ ID NO: 103758 - DNA, 25 bp, probe
aaatctcatcttgaattgttcccgt

SEQ ID NO: 103759 - DNA, 25 bp, probe
tcatcttgaattgttcccgtaatcc

SEQ ID NO: 103760 - DNA, 25 bp, probe
actgacaaatgagatatgggatatg

SEQ ID NO: 103761 - DNA, 25 bp, probe
cactgacaaatgagatatgggatat

SEQ ID NO: 103762 - DNA, 25 bp, probe
tgttctttccactgacaaatgagat

SEQ ID NO: 103763 - DNA, 25 bp, probe
ttctttccactgacaaatgagatat

SEQ ID NO: 103764 - DNA, 25 bp, probe
catcttgaattgttcccgtaatccc

SEQ ID NO: 103765 - DNA, 25 bp, probe
atctgtgttctttccactgacaaat

SEQ ID NO: 103766 - DNA, 25 bp, probe
aatctgtgttctttccactgacaaa

SEQ ID NO: 103767 - DNA, 25 bp, probe
aaatctgtgttctttccactgacaa

SEQ ID NO: 103768 - DNA, 25 bp, probe
catccaaatctcatcttgaattgtt

SEQ ID NO: 103769 - DNA, 25 bp, probe
ctataaggctagtacctgctttgtt

SEQ ID NO: 103770 - DNA, 25 bp, probe
tataaggctagtacctgctttgttg

SEQ ID NO: 103771 - DNA, 25 bp, probe
ccactgacaaatgagatatgggata

SEQ ID NO: 103772 - DNA, 25 bp, probe
atccaaatctcatcttgaattgttc

SEQ ID NO: 103773 - DNA, 25 bp, probe
ctttccactgacaaatgagatatgg

SEQ ID NO: 103774 - DNA, 25 bp, probe
gtgttctttccactgacaaatgaga

SEQ ID NO: 103775 - DNA, 25 bp, probe
tttccactgacaaatgagatatggg

SEQ ID NO: 103776 - DNA, 25 bp, probe
gtgcattaagtcaacaaatccctag

SEQ ID NO: 103777 - DNA, 25 bp, probe
tgtgttctttccactgacaaatgag

SEQ ID NO: 103778 - DNA, 25 bp, probe
ctgtgttctttccactgacaaatga

SEQ ID NO: 103779 - DNA, 25 bp, probe
tctgtgttctttccactgacaaatg

SEQ ID NO: 103780 - DNA, 25 bp, probe
caaatctgtgttctttccactgaca

SEQ ID NO: 103781 - DNA, 25 bp, probe
tgcattaagtcaacaaatccctagt

SEQ ID NO: 103782 - DNA, 25 bp, probe
gccatgctgaactgtgagttattaa

SEQ ID NO: 103783 - DNA, 25 bp, probe
tatgggatatggtgcatctttacag

SEQ ID NO: 103784 - DNA, 25 bp, probe
aaatgagatatgggatatggtgcat

SEQ ID NO: 103785 - DNA, 25 bp, probe
tccactgacaaatgagatatgggat

SEQ ID NO: 103786 - DNA, 25 bp, probe
tatcagagttacagttgtcagtgaa

SEQ ID NO: 103787 - DNA, 25 bp, probe
atatcagagttacagttgtcagtga

SEQ ID NO: 103788 - DNA, 25 bp, probe
cttgatccactgttgctcttagaag

SEQ ID NO: 103789 - DNA, 25 bp, probe
tatgtcctagcttagccattcagaa

SEQ ID NO: 103790 - DNA, 25 bp, probe
tatttcttctctcccaactttagcc

SEQ ID NO: 103791 - DNA, 25 bp, probe
ttctctcttggtatttcttctctcc

SEQ ID NO: 103792 - DNA, 25 bp, probe
gtatttcttctctcccaactttagc

SEQ ID NO: 103793 - DNA, 25 bp, probe
atccattgatttatctcctcctgtc

SEQ ID NO: 103794 - DNA, 25 bp, probe
aagtatgtcctagcttagccattca

SEQ ID NO: 103795 - DNA, 25 bp, probe
tgtcttctctcttggtatttcttct

SEQ ID NO: 103796 - DNA, 25 bp, probe
ttgatccactgttgctcttagaagg

SEQ ID NO: 103797 - DNA, 25 bp, probe
tctctcttggtatttcttctctccc

SEQ ID NO: 103798 - DNA, 25 bp, probe
ggtatttcttctctcccaactttag

SEQ ID NO: 103799 - DNA, 25 bp, probe
agtatgtcctagcttagccattcag

SEQ ID NO: 103800 - DNA, 25 bp, probe
gtatgtcctagcttagccattcaga

SEQ ID NO: 103801 - DNA, 25 bp, probe
gtcttctctcttggtatttcttctc

SEQ ID NO: 103802 - DNA, 25 bp, probe
cctagcttagccattcagaagagaa

SEQ ID NO: 103803 - DNA, 25 bp, probe
tcttctctcttggtatttcttctct

SEQ ID NO: 103804 - DNA, 25 bp, probe
ttgtcttctctcttggtatttcttc

SEQ ID NO: 103805 - DNA, 25 bp, probe
gttgtcagtgaaactactttggatt

SEQ ID NO: 103806 - DNA, 25 bp, probe
atcagagttacagttgtcagtgaaa

SEQ ID NO: 103807 - DNA, 25 bp, probe
cttctctcttggtatttcttctctc

SEQ ID NO: 103808 - DNA, 25 bp, probe
ctgccaatgggaactcaatttattc

SEQ ID NO: 103809 - DNA, 25 bp, probe
tccattgatttatctcctcctgtcc

SEQ ID NO: 103810 - DNA, 25 bp, probe
atgtcctagcttagccattcagaag

SEQ ID NO: 103811 - DNA, 25 bp, probe
ttgtcagtgaaactactttggattt

SEQ ID NO: 103812 - DNA, 25 bp, probe
tcagagttacagttgtcagtgaaac

SEQ ID NO: 103813 - DNA, 25 bp, probe
tcttctctcccaactttagccattt

SEQ ID NO: 103814 - DNA, 25 bp, probe
ttcttctctcccaactttagccatt

SEQ ID NO: 103815 - DNA, 25 bp, probe
tttcttctctcccaactttagccat

SEQ ID NO: 103816 - DNA, 25 bp, probe
atttcttctctcccaactttagcca

SEQ ID NO: 103817 - DNA, 25 bp, probe
tttgtcttctctcttggtatttctt

SEQ ID NO: 103818 - DNA, 25 bp, probe
gcttgatccactgttgctcttagaa

SEQ ID NO: 103819 - DNA, 25 bp, probe
gtcctagcttagccattcagaagag

SEQ ID NO: 103820 - DNA, 25 bp, probe
actcaatttattcctgggaacctaa

SEQ ID NO: 103821 - DNA, 25 bp, probe
aactcaatttattcctgggaaccta

SEQ ID NO: 103822 - DNA, 25 bp, probe
tcctagcttagccattcagaagaga

SEQ ID NO: 103823 - DNA, 25 bp, probe
aatttattcctgggaacctaacgag

SEQ ID NO: 103824 - DNA, 25 bp, probe
ctcaatttattcctgggaacctaac

SEQ ID NO: 103825 - DNA, 25 bp, probe
gaactcaatttattcctgggaacct

SEQ ID NO: 103826 - DNA, 25 bp, probe
caatttattcctgggaacctaacga

SEQ ID NO: 103827 - DNA, 25 bp, probe
tcaatttattcctgggaacctaacg

SEQ ID NO: 103828 - DNA, 25 bp, probe
cacctttagaggaatttcgtcagaa

SEQ ID NO: 103829 - DNA, 25 bp, probe
ccattgatttatctcctcctgtccc

SEQ ID NO: 103830 - DNA, 25 bp, probe
ctcatcatctctgttatacacctgt

SEQ ID NO: 103831 - DNA, 25 bp, probe
tctcatcatctctgttatacacctg

SEQ ID NO: 103832 - DNA, 25 bp, probe
ttctcatcatctctgttatacacct

SEQ ID NO: 103833 - DNA, 25 bp, probe
tcatcatctctgttatacacctgta

SEQ ID NO: 103834 - DNA, 25 bp, probe
attctcatcatctctgttatacacc

SEQ ID NO: 103835 - DNA, 25 bp, probe
aaagaagtaaacatcaggagtcagc

SEQ ID NO: 103836 - DNA, 25 bp, probe
ttatgaagaaggctttgttaaaccc

SEQ ID NO: 103837 - DNA, 25 bp, probe
tccaaacacctagtcaatacagatt

SEQ ID NO: 103838 - DNA, 25 bp, probe
atccaaacacctagtcaatacagat

SEQ ID NO: 103839 - DNA, 25 bp, probe
gatccaaacacctagtcaatacaga

SEQ ID NO: 103840 - DNA, 25 bp, probe
ccaaacacctagtcaatacagattt

SEQ ID NO: 103841 - DNA, 25 bp, probe
tcatctctgttatacacctgtatca

SEQ ID NO: 103842 - DNA, 25 bp, probe
aaactgctttcccttatgttcactg

SEQ ID NO: 103843 - DNA, 25 bp, probe
atgatgatccaaacacctagtcaat

SEQ ID NO: 103844 - DNA, 25 bp, probe
tgatccaaacacctagtcaatacag

SEQ ID NO: 103845 - DNA, 25 bp, probe
atgatccaaacacctagtcaataca

SEQ ID NO: 103846 - DNA, 25 bp, probe
tgctccgaacaaatagtaaataact

SEQ ID NO: 103847 - DNA, 25 bp, probe
tgatgatccaaacacctagtcaata

SEQ ID NO: 103848 - DNA, 25 bp, probe
gctccgaacaaatagtaaataactg

SEQ ID NO: 103849 - DNA, 25 bp, probe
tttatgaagaaggctttgttaaacc

SEQ ID NO: 103850 - DNA, 25 bp, probe
gatgatccaaacacctagtcaatac

SEQ ID NO: 103851 - DNA, 25 bp, probe
tatgaagaaggctttgttaaaccct

SEQ ID NO: 103852 - DNA, 25 bp, probe
ttgctccgaacaaatagtaaataac

SEQ ID NO: 103853 - DNA, 25 bp, probe
catgatgatccaaacacctagtcaa

SEQ ID NO: 103854 - DNA, 25 bp, probe
atctctgttatacacctgtatcatg

SEQ ID NO: 103855 - DNA, 25 bp, probe
catctctgttatacacctgtatcat

SEQ ID NO: 103856 - DNA, 25 bp, probe
catcatctctgttatacacctgtat

SEQ ID NO: 103857 - DNA, 25 bp, probe
acccttaacaacatcaacaaataaa

SEQ ID NO: 103858 - DNA, 25 bp, probe
aacccttaacaacatcaacaaataa

SEQ ID NO: 103859 - DNA, 25 bp, probe
aaacccttaacaacatcaacaaata

SEQ ID NO: 103860 - DNA, 25 bp, probe
taaacccttaacaacatcaacaaat

SEQ ID NO: 103861 - DNA, 25 bp, probe
ttaaacccttaacaacatcaacaaa

SEQ ID NO: 103862 - DNA, 25 bp, probe
aaacacctagtcaatacagatttgt

SEQ ID NO: 103863 - DNA, 25 bp, probe
atcatctctgttatacacctgtatc

SEQ ID NO: 103864 - DNA, 25 bp, probe
aattctcatcatctctgttatacac

SEQ ID NO: 103865 - DNA, 25 bp, probe
aactgctttcccttatgttcactgt

SEQ ID NO: 103866 - DNA, 25 bp, probe
aagaagtaaacatcaggagtcagct

SEQ ID NO: 103867 - DNA, 25 bp, probe
aagtttatgaagaaggctttgttaa

SEQ ID NO: 103868 - DNA, 25 bp, probe
agtttatgaagaaggctttgttaaa

SEQ ID NO: 103869 - DNA, 25 bp, probe
tgagtatgttcagggtaatttatga

SEQ ID NO: 103870 - DNA, 25 bp, probe
tttcccttatgttcactgtgccata

SEQ ID NO: 103871 - DNA, 25 bp, probe
tgaaagtttatgaagaaggctttgt

SEQ ID NO: 103872 - DNA, 25 bp, probe
aactcatgtatttgaagactgtttc

SEQ ID NO: 103873 - DNA, 25 bp, probe
ccgaacaaatagtaaataactgagt

SEQ ID NO: 103874 - DNA, 25 bp, probe
tctaagcatgtagccagttaaggaa

SEQ ID NO: 103875 - DNA, 25 bp, probe
ttctaagcatgtagccagttaagga

SEQ ID NO: 103876 - DNA, 25 bp, probe
atgtagccagttaaggaaagaaaga

SEQ ID NO: 103877 - DNA, 25 bp, probe
catgtagccagttaaggaaagaaag

SEQ ID NO: 103878 - DNA, 25 bp, probe
gtttctaagcatgtagccagttaag

SEQ ID NO: 103879 - DNA, 25 bp, probe
agtttctaagcatgtagccagttaa

SEQ ID NO: 103880 - DNA, 25 bp, probe
aagaaatgtgttgctagttacccaa

SEQ ID NO: 103881 - DNA, 25 bp, probe
taagcatgtagccagttaaggaaag

SEQ ID NO: 103882 - DNA, 25 bp, probe
ctaagcatgtagccagttaaggaaa

SEQ ID NO: 103883 - DNA, 25 bp, probe
tttctaagcatgtagccagttaagg

SEQ ID NO: 103884 - DNA, 25 bp, probe
cagtttctaagcatgtagccagtta

SEQ ID NO: 103885 - DNA, 25 bp, probe
caagaaatgtgttgctagttaccca

SEQ ID NO: 103886 - DNA, 25 bp, probe
gcatgtagccagttaaggaaagaaa

SEQ ID NO: 103887 - DNA, 25 bp, probe
agcatgtagccagttaaggaaagaa

SEQ ID NO: 103888 - DNA, 25 bp, probe
aagcatgtagccagttaaggaaaga

SEQ ID NO: 103889 - DNA, 25 bp, probe
ttgatgtgggaagcattctcctatg

SEQ ID NO: 103890 - DNA, 25 bp, probe
gttgatgtgggaagcattctcctat

SEQ ID NO: 103891 - DNA, 25 bp, probe
gcagtttctaagcatgtagccagtt

SEQ ID NO: 103892 - DNA, 25 bp, probe
gagtgttgatgtgggaagcattctc

SEQ ID NO: 103893 - DNA, 25 bp, probe
gtacttggaggagagcaattttgtg

SEQ ID NO: 103894 - DNA, 25 bp, probe
tgttgatgtgggaagcattctccta

SEQ ID NO: 103895 - DNA, 25 bp, probe
agaaatgtgttgctagttacccaac

SEQ ID NO: 103896 - DNA, 25 bp, probe
atgtctggagctttggagtgttgat

SEQ ID NO: 103897 - DNA, 25 bp, probe
ttggagtgttgatgtgggaagcatt

SEQ ID NO: 103898 - DNA, 25 bp, probe
tttggagtgttgatgtgggaagcat

SEQ ID NO: 103899 - DNA, 25 bp, probe
ggagtgttgatgtgggaagcattct

SEQ ID NO: 103900 - DNA, 25 bp, probe
accagtgcagtttctaagcatgtag

SEQ ID NO: 103901 - DNA, 25 bp, probe
gaccagtgcagtttctaagcatgta

SEQ ID NO: 103902 - DNA, 25 bp, probe
gagatctggctgcaagaaatgtgtt

SEQ ID NO: 103903 - DNA, 25 bp, probe
gatgtctggagctttggagtgttga

SEQ ID NO: 103904 - DNA, 25 bp, probe
gtgttgatgtgggaagcattctcct

SEQ ID NO: 103905 - DNA, 25 bp, probe
agtgttgatgtgggaagcattctcc

SEQ ID NO: 103906 - DNA, 25 bp, probe
tctggagctttggagtgttgatgtg

SEQ ID NO: 103907 - DNA, 25 bp, probe
gtctggagctttggagtgttgatgt

SEQ ID NO: 103908 - DNA, 25 bp, probe
tgtctggagctttggagtgttgatg

SEQ ID NO: 103909 - DNA, 25 bp, probe
agatctggctgcaagaaatgtgttg

SEQ ID NO: 103910 - DNA, 25 bp, probe
cagagatctggctgcaagaaatgtg

SEQ ID NO: 103911 - DNA, 25 bp, probe
cacagagatctggctgcaagaaatg

SEQ ID NO: 103912 - DNA, 25 bp, probe
agagatctggctgcaagaaatgtgt

SEQ ID NO: 103913 - DNA, 25 bp, probe
ctgcaagaaatgtgttgctagttac

SEQ ID NO: 103914 - DNA, 25 bp, probe
gtgcagtttctaagcatgtagccag

SEQ ID NO: 103915 - DNA, 25 bp, probe
cagtgcagtttctaagcatgtagcc

SEQ ID NO: 103916 - DNA, 25 bp, probe
ccagtgcagtttctaagcatgtagc

SEQ ID NO: 103917 - DNA, 25 bp, probe
acagagatctggctgcaagaaatgt

SEQ ID NO: 103918 - DNA, 25 bp, probe
tctgtaactgttgagatgtatgtgc

SEQ ID NO: 103919 - DNA, 25 bp, probe
ggtgagcagttagagtaggtgaatt

SEQ ID NO: 103920 - DNA, 25 bp, probe
tagtgctgcttctgaagttatctct

SEQ ID NO: 103921 - DNA, 25 bp, probe
gtagtgctgcttctgaagttatctc

SEQ ID NO: 103922 - DNA, 25 bp, probe
gataggattgcctgcttagatgata

SEQ ID NO: 103923 - DNA, 25 bp, probe
ataggattgcctgcttagatgataa

SEQ ID NO: 103924 - DNA, 25 bp, probe
tgataggattgcctgcttagatgat

SEQ ID NO: 103925 - DNA, 25 bp, probe
aggtgagcagttagagtaggtgaat

SEQ ID NO: 103926 - DNA, 25 bp, probe
aatgccaaataatcttccaggtagt

SEQ ID NO: 103927 - DNA, 25 bp, probe
aataatcttccaggtagtgctgctt

SEQ ID NO: 103928 - DNA, 25 bp, probe
aaatgccaaataatcttccaggtag

SEQ ID NO: 103929 - DNA, 25 bp, probe
gtaactgttgagatgtatgtgcatg

SEQ ID NO: 103930 - DNA, 25 bp, probe
atgccaaataatcttccaggtagtg

SEQ ID NO: 103931 - DNA, 25 bp, probe
taactgttgagatgtatgtgcatgt

SEQ ID NO: 103932 - DNA, 25 bp, probe
tgtaactgttgagatgtatgtgcat

SEQ ID NO: 103933 - DNA, 25 bp, probe
agcagttagagtaggtgaatttgtt

SEQ ID NO: 103934 - DNA, 25 bp, probe
ctgataggattgcctgcttagatga

SEQ ID NO: 103935 - DNA, 25 bp, probe
ggtagtgctgcttctgaagttatct

SEQ ID NO: 103936 - DNA, 25 bp, probe
aggtagtgctgcttctgaagttatc

SEQ ID NO: 103937 - DNA, 25 bp, probe
ctgtaactgttgagatgtatgtgca

SEQ ID NO: 103938 - DNA, 25 bp, probe
gcagttagagtaggtgaatttgttt

SEQ ID NO: 103939 - DNA, 25 bp, probe
gagcagttagagtaggtgaatttgt

SEQ ID NO: 103940 - DNA, 25 bp, probe
tgagcagttagagtaggtgaatttg

SEQ ID NO: 103941 - DNA, 25 bp, probe
gtgagcagttagagtaggtgaattt

SEQ ID NO: 103942 - DNA, 25 bp, probe
catttcaggtgagcagttagagtag

SEQ ID NO: 103943 - DNA, 25 bp, probe
tagaaatagcaaacctgtcagcatt

SEQ ID NO: 103944 - DNA, 25 bp, probe
ttagaaatagcaaacctgtcagcat

SEQ ID NO: 103945 - DNA, 25 bp, probe
ttaaatgccaaataatcttccaggt

SEQ ID NO: 103946 - DNA, 25 bp, probe
ataatcttccaggtagtgctgcttc

SEQ ID NO: 103947 - DNA, 25 bp, probe
gaaggctgtcgatgataggttagaa

SEQ ID NO: 103948 - DNA, 25 bp, probe
ttgaaggctgtcgatgataggttag

SEQ ID NO: 103949 - DNA, 25 bp, probe
cttgaaggctgtcgatgataggtta

SEQ ID NO: 103950 - DNA, 25 bp, probe
atctgtaactgttgagatgtatgtg

SEQ ID NO: 103951 - DNA, 25 bp, probe
gtttctcatcatctgtaactgttga

SEQ ID NO: 103952 - DNA, 25 bp, probe
taaatgccaaataatcttccaggta

SEQ ID NO: 103953 - DNA, 25 bp, probe
gggagttgatggaaccaaatagaaa

SEQ ID NO: 103954 - DNA, 25 bp, probe
aactgttgagatgtatgtgcatgtg

SEQ ID NO: 103955 - DNA, 25 bp, probe
atttcaggtgagcagttagagtagg

SEQ ID NO: 103956 - DNA, 25 bp, probe
tcatttcaggtgagcagttagagta

SEQ ID NO: 103957 - DNA, 25 bp, probe
caggtgagcagttagagtaggtgaa

SEQ ID NO: 103958 - DNA, 25 bp, probe
gttagaaatagcaaacctgtcagca

SEQ ID NO: 103959 - DNA, 25 bp, probe
ttcaggtgagcagttagagtaggtg

SEQ ID NO: 103960 - DNA, 25 bp, probe
tttgttcaagatcatttcaggtgag

SEQ ID NO: 103961 - DNA, 25 bp, probe
caggtagtgctgcttctgaagttat

SEQ ID NO: 103962 - DNA, 25 bp, probe
atctccaagtctcaacatcctatca

SEQ ID NO: 103963 - DNA, 25 bp, probe
aacctccaatgtctctctgaactta

SEQ ID NO: 103964 - DNA, 25 bp, probe
acctccaatgtctctctgaacttaa

SEQ ID NO: 103965 - DNA, 25 bp, probe
tctccaagtctcaacatcctatcag

SEQ ID NO: 103966 - DNA, 25 bp, probe
ctccaagtctcaacatcctatcagt

SEQ ID NO: 103967 - DNA, 25 bp, probe
gatctccaagtctcaacatcctatc

SEQ ID NO: 103968 - DNA, 25 bp, probe
tccaagtctcaacatcctatcagtg

SEQ ID NO: 103969 - DNA, 25 bp, probe
catccatctcagcatcaacacaatt

SEQ ID NO: 103970 - DNA, 25 bp, probe
tgatctccaagtctcaacatcctat

SEQ ID NO: 103971 - DNA, 25 bp, probe
gaacctccaatgtctctctgaactt

SEQ ID NO: 103972 - DNA, 25 bp, probe
cataagagtaggctacagaggtgac

SEQ ID NO: 103973 - DNA, 25 bp, probe
gtcataagagtaggctacagaggtg

SEQ ID NO: 103974 - DNA, 25 bp, probe
caagtctcaacatcctatcagtgac

SEQ ID NO: 103975 - DNA, 25 bp, probe
atgtgtcataagagtaggctacaga

SEQ ID NO: 103976 - DNA, 25 bp, probe
ccaagtctcaacatcctatcagtga

SEQ ID NO: 103977 - DNA, 25 bp, probe
tctcaacatcctatcagtgactctg

SEQ ID NO: 103978 - DNA, 25 bp, probe
gtctcaacatcctatcagtgactct

SEQ ID NO: 103979 - DNA, 25 bp, probe
ctgatctccaagtctcaacatccta

SEQ ID NO: 103980 - DNA, 25 bp, probe
tgtgtcataagagtaggctacagag

SEQ ID NO: 103981 - DNA, 25 bp, probe
taacatgaacataagtgcttagctg

SEQ ID NO: 103982 - DNA, 25 bp, probe
tcatccatctcagcatcaacacaat

SEQ ID NO: 103983 - DNA, 25 bp, probe
catgtgtcataagagtaggctacag

SEQ ID NO: 103984 - DNA, 25 bp, probe
tcataagagtaggctacagaggtga

SEQ ID NO: 103985 - DNA, 25 bp, probe
gtgtcataagagtaggctacagagg

SEQ ID NO: 103986 - DNA, 25 bp, probe
ataacatgaacataagtgcttagct

SEQ ID NO: 103987 - DNA, 25 bp, probe
tttatgacagacaaagaaagaagcc

SEQ ID NO: 103988 - DNA, 25 bp, probe
tggcatttatgacagacaaagaaag

SEQ ID NO: 103989 - DNA, 25 bp, probe
ggcatttatgacagacaaagaaaga

SEQ ID NO: 103990 - DNA, 25 bp, probe
cctccaatgtctctctgaacttaaa

SEQ ID NO: 103991 - DNA, 25 bp, probe
ccatgtgtcataagagtaggctaca

SEQ ID NO: 103992 - DNA, 25 bp, probe
tgtcataagagtaggctacagaggt

SEQ ID NO: 103993 - DNA, 25 bp, probe
ataagagtaggctacagaggtgacc

SEQ ID NO: 103994 - DNA, 25 bp, probe
ctccaatgtctctctgaacttaaag

SEQ ID NO: 103995 - DNA, 25 bp, probe
aaagaaagaacaaggactctggtta

SEQ ID NO: 103996 - DNA, 25 bp, probe
ttatgacagacaaagaaagaagccc

SEQ ID NO: 103997 - DNA, 25 bp, probe
aagaaagaacaaggactctggttac

SEQ ID NO: 103998 - DNA, 25 bp, probe
tccaatgtctctctgaacttaaaga

SEQ ID NO: 103999 - DNA, 25 bp, probe
ctcatccatctcagcatcaacacaa

SEQ ID NO: 104000 - DNA, 25 bp, probe
gatgatttccctaatgcttctgctt

SEQ ID NO: 104001 - DNA, 25 bp, probe
atccatctcagcatcaacacaattt

SEQ ID NO: 104002 - DNA, 25 bp, probe
aacatgaacataagtgcttagctgc

SEQ ID NO: 104003 - DNA, 25 bp, probe
atgatttccctaatgcttctgcttg

SEQ ID NO: 104004 - DNA, 25 bp, probe
tataacatgaacataagtgcttagc

SEQ ID NO: 104005 - DNA, 25 bp, probe
gcatttatgacagacaaagaaagaa

SEQ ID NO: 104006 - DNA, 25 bp, probe
ctaggcattgtgaataggtaggtag

SEQ ID NO: 104007 - DNA, 25 bp, probe
tctaggcattgtgaataggtaggta

SEQ ID NO: 104008 - DNA, 25 bp, probe
taggcattgtgaataggtaggtagc

SEQ ID NO: 104009 - DNA, 25 bp, probe
ttctaggcattgtgaataggtaggt

SEQ ID NO: 104010 - DNA, 25 bp, probe
agtgaattacacatcctcttgttct

SEQ ID NO: 104011 - DNA, 25 bp, probe
cagtgaattacacatcctcttgttc

SEQ ID NO: 104012 - DNA, 25 bp, probe
tcagtgaattacacatcctcttgtt

SEQ ID NO: 104013 - DNA, 25 bp, probe
gtgaattacacatcctcttgttctt

SEQ ID NO: 104014 - DNA, 25 bp, probe
ttcagtgaattacacatcctcttgt

SEQ ID NO: 104015 - DNA, 25 bp, probe
agatcagctaatacttctctcaaca

SEQ ID NO: 104016 - DNA, 25 bp, probe
tgaattacacatcctcttgttctta

SEQ ID NO: 104017 - DNA, 25 bp, probe
agtctacctccctctttgtaaatca

SEQ ID NO: 104018 - DNA, 25 bp, probe
gatcagctaatacttctctcaacaa

SEQ ID NO: 104019 - DNA, 25 bp, probe
aatcattgaggtctcctgagaagaa

SEQ ID NO: 104020 - DNA, 25 bp, probe
ctttatgaagagaagggaaactgtc

SEQ ID NO: 104021 - DNA, 25 bp, probe
tttatgaagagaagggaaactgtct

SEQ ID NO: 104022 - DNA, 25 bp, probe
gtctacctccctctttgtaaatcaa

SEQ ID NO: 104023 - DNA, 25 bp, probe
gctttatgaagagaagggaaactgt

SEQ ID NO: 104024 - DNA, 25 bp, probe
tttctaggcattgtgaataggtagg

SEQ ID NO: 104025 - DNA, 25 bp, probe
ctgagaagaaagacacttgtgactt

SEQ ID NO: 104026 - DNA, 25 bp, probe
ttatgaagagaagggaaactgtcta

SEQ ID NO: 104027 - DNA, 25 bp, probe
gagtctacctccctctttgtaaatc

SEQ ID NO: 104028 - DNA, 25 bp, probe
caagagaaatgatcctatccaaagc

SEQ ID NO: 104029 - DNA, 25 bp, probe
tatgaagagaagggaaactgtctag

SEQ ID NO: 104030 - DNA, 25 bp, probe
tccaagagaaatgatcctatccaaa

SEQ ID NO: 104031 - DNA, 25 bp, probe
aagagaagggaaactgtctaggatt

SEQ ID NO: 104032 - DNA, 25 bp, probe
ccaagagaaatgatcctatccaaag

SEQ ID NO: 104033 - DNA, 25 bp, probe
atccaagagaaatgatcctatccaa

SEQ ID NO: 104034 - DNA, 25 bp, probe
aatccaagagaaatgatcctatcca

SEQ ID NO: 104035 - DNA, 25 bp, probe
aaatggaatttggagagagcatcat

SEQ ID NO: 104036 - DNA, 25 bp, probe
agagaagggaaactgtctaggattc

SEQ ID NO: 104037 - DNA, 25 bp, probe
gaagagaagggaaactgtctaggat

SEQ ID NO: 104038 - DNA, 25 bp, probe
gaattacacatcctcttgttcttaa

SEQ ID NO: 104039 - DNA, 25 bp, probe
attcagtgaattacacatcctcttg

SEQ ID NO: 104040 - DNA, 25 bp, probe
atgaagagaagggaaactgtctagg

SEQ ID NO: 104041 - DNA, 25 bp, probe
gagaagggaaactgtctaggattca

SEQ ID NO: 104042 - DNA, 25 bp, probe
cgagtctacctccctctttgtaaat

SEQ ID NO: 104043 - DNA, 25 bp, probe
cattgtgaataggtaggtagctagt

SEQ ID NO: 104044 - DNA, 25 bp, probe
gcattgtgaataggtaggtagctag

SEQ ID NO: 104045 - DNA, 25 bp, probe
gagagagcatcatgtcagagaacag

SEQ ID NO: 104046 - DNA, 25 bp, probe
aaatccaagagaaatgatcctatcc

SEQ ID NO: 104047 - DNA, 25 bp, probe
ttggagagagcatcatgtcagagaa

SEQ ID NO: 104048 - DNA, 25 bp, probe
attgtgaataggtaggtagctagtc

SEQ ID NO: 104049 - DNA, 25 bp, probe
aatggaatttggagagagcatcatg

SEQ ID NO: 104050 - DNA, 25 bp, probe
gaagcagccttactattcatagaag

SEQ ID NO: 104051 - DNA, 25 bp, probe
ctgccatgtgtaagttgtaaggatt

SEQ ID NO: 104052 - DNA, 25 bp, probe
tgccatgtgtaagttgtaaggattg

SEQ ID NO: 104053 - DNA, 25 bp, probe
ccatgtgtaagttgtaaggattgcc

SEQ ID NO: 104054 - DNA, 25 bp, probe
atgaggaaataatgggaaaggttga

SEQ ID NO: 104055 - DNA, 25 bp, probe
gatgaggaaataatgggaaaggttg

SEQ ID NO: 104056 - DNA, 25 bp, probe
agatgaggaaataatgggaaaggtt

SEQ ID NO: 104057 - DNA, 25 bp, probe
aagatgaggaaataatgggaaaggt

SEQ ID NO: 104058 - DNA, 25 bp, probe
tactctttggctttgtttgtttgtt

SEQ ID NO: 104059 - DNA, 25 bp, probe
tgaggaaataatgggaaaggttgaa

SEQ ID NO: 104060 - DNA, 25 bp, probe
gaggaaataatgggaaaggttgaat

SEQ ID NO: 104061 - DNA, 25 bp, probe
actctttggctttgtttgtttgttt

SEQ ID NO: 104062 - DNA, 25 bp, probe
aagttcaatatggagaggattgctt

SEQ ID NO: 104063 - DNA, 25 bp, probe
catgtgtaagttgtaaggattgcct

SEQ ID NO: 104064 - DNA, 25 bp, probe
agttcaatatggagaggattgcttc

SEQ ID NO: 104065 - DNA, 25 bp, probe
tcatagaagggctagaataggagaa

SEQ ID NO: 104066 - DNA, 25 bp, probe
caagttcaatatggagaggattgct

SEQ ID NO: 104067 - DNA, 25 bp, probe
tcaagttcaatatggagaggattgc

SEQ ID NO: 104068 - DNA, 25 bp, probe
ctcaagttcaatatggagaggattg

SEQ ID NO: 104069 - DNA, 25 bp, probe
aggaaataatgggaaaggttgaatt

SEQ ID NO: 104070 - DNA, 25 bp, probe
gccatgtgtaagttgtaaggattgc

SEQ ID NO: 104071 - DNA, 25 bp, probe
catagaagggctagaataggagaaa

SEQ ID NO: 104072 - DNA, 25 bp, probe
ttcatagaagggctagaataggaga

SEQ ID NO: 104073 - DNA, 25 bp, probe
atgtactctttggctttgtttgttt

SEQ ID NO: 104074 - DNA, 25 bp, probe
aatgtactctttggctttgtttgtt

SEQ ID NO: 104075 - DNA, 25 bp, probe
agttctttctcgtgggtaaatatac

SEQ ID NO: 104076 - DNA, 25 bp, probe
taagatgaggaaataatgggaaagg

SEQ ID NO: 104077 - DNA, 25 bp, probe
aggagtgaagtaattgacagggaaa

SEQ ID NO: 104078 - DNA, 25 bp, probe
aaggagtgaagtaattgacagggaa

SEQ ID NO: 104079 - DNA, 25 bp, probe
taatgtactctttggctttgtttgt

SEQ ID NO: 104080 - DNA, 25 bp, probe
atgataaataaccaggaagcattgc

SEQ ID NO: 104081 - DNA, 25 bp, probe
gtactctttggctttgtttgtttgt

SEQ ID NO: 104082 - DNA, 25 bp, probe
tgtactctttggctttgtttgtttg

SEQ ID NO: 104083 - DNA, 25 bp, probe
gttcaatatggagaggattgcttcc

SEQ ID NO: 104084 - DNA, 25 bp, probe
agttcctagcaagttgactaaacag

SEQ ID NO: 104085 - DNA, 25 bp, probe
gagttcctagcaagttgactaaaca

SEQ ID NO: 104086 - DNA, 25 bp, probe
aaagttctttctcgtgggtaaatat

SEQ ID NO: 104087 - DNA, 25 bp, probe
gtgaagcagccttactattcataga

SEQ ID NO: 104088 - DNA, 25 bp, probe
agtgaagcagccttactattcatag

SEQ ID NO: 104089 - DNA, 25 bp, probe
ttaatgtactctttggctttgtttg

SEQ ID NO: 104090 - DNA, 25 bp, probe
gttaatgtactctttggctttgttt

SEQ ID NO: 104091 - DNA, 25 bp, probe
cagtgaagcagccttactattcata

SEQ ID NO: 104092 - DNA, 25 bp, probe
atcaaggagtgaagtaattgacagg

SEQ ID NO: 104093 - DNA, 25 bp, probe
tgaagcagccttactattcatagaa

SEQ ID NO: 104094 - DNA, 25 bp, probe
ttctggtttctcttagttcttctct

SEQ ID NO: 104095 - DNA, 25 bp, probe
tttctggtttctcttagttcttctc

SEQ ID NO: 104096 - DNA, 25 bp, probe
tctggtttctcttagttcttctcta

SEQ ID NO: 104097 - DNA, 25 bp, probe
tgatttctggtttctcttagttctt

SEQ ID NO: 104098 - DNA, 25 bp, probe
atgatttctggtttctcttagttct

SEQ ID NO: 104099 - DNA, 25 bp, probe
atttctggtttctcttagttcttct

SEQ ID NO: 104100 - DNA, 25 bp, probe
gatttctggtttctcttagttcttc

SEQ ID NO: 104101 - DNA, 25 bp, probe
caaatgatttctggtttctcttagt

SEQ ID NO: 104102 - DNA, 25 bp, probe
acaaatgatttctggtttctcttag

SEQ ID NO: 104103 - DNA, 25 bp, probe
aatgatttctggtttctcttagttc

SEQ ID NO: 104104 - DNA, 25 bp, probe
ggtttctcttagttcttctctaaca

SEQ ID NO: 104105 - DNA, 25 bp, probe
tggtttctcttagttcttctctaac

SEQ ID NO: 104106 - DNA, 25 bp, probe
tatagactttgaagtgaccctccac

SEQ ID NO: 104107 - DNA, 25 bp, probe
aagaggcaagctatagactttgaag

SEQ ID NO: 104108 - DNA, 25 bp, probe
gcacatctaaagaggcaagctatag

SEQ ID NO: 104109 - DNA, 25 bp, probe
ttacaaatgatttctggtttctctt

SEQ ID NO: 104110 - DNA, 25 bp, probe
tttacaaatgatttctggtttctct

SEQ ID NO: 104111 - DNA, 25 bp, probe
ctggtttctcttagttcttctctaa

SEQ ID NO: 104112 - DNA, 25 bp, probe
aagctatagactttgaagtgaccct

SEQ ID NO: 104113 - DNA, 25 bp, probe
caagctatagactttgaagtgaccc

SEQ ID NO: 104114 - DNA, 25 bp, probe
ctatagactttgaagtgaccctcca

SEQ ID NO: 104115 - DNA, 25 bp, probe
tctcttagttcttctctaacatagt

SEQ ID NO: 104116 - DNA, 25 bp, probe
gaggcaagctatagactttgaagtg

SEQ ID NO: 104117 - DNA, 25 bp, probe
agaggcaagctatagactttgaagt

SEQ ID NO: 104118 - DNA, 25 bp, probe
aaatgatttctggtttctcttagtt

SEQ ID NO: 104119 - DNA, 25 bp, probe
agctatagactttgaagtgaccctc

SEQ ID NO: 104120 - DNA, 25 bp, probe
ggcacatctaaagaggcaagctata

SEQ ID NO: 104121 - DNA, 25 bp, probe
gcaagctatagactttgaagtgacc

SEQ ID NO: 104122 - DNA, 25 bp, probe
ggcaagctatagactttgaagtgac

SEQ ID NO: 104123 - DNA, 25 bp, probe
aggcaagctatagactttgaagtga

SEQ ID NO: 104124 - DNA, 25 bp, probe
acatctaaagaggcaagctatagac

SEQ ID NO: 104125 - DNA, 25 bp, probe
cacatctaaagaggcaagctataga

SEQ ID NO: 104126 - DNA, 25 bp, probe
catctaaagaggcaagctatagact

SEQ ID NO: 104127 - DNA, 25 bp, probe
atctaaagaggcaagctatagactt

SEQ ID NO: 104128 - DNA, 25 bp, probe
tacaaatgatttctggtttctctta

SEQ ID NO: 104129 - DNA, 25 bp, probe
aacatagtactttctttccagcaaa

SEQ ID NO: 104130 - DNA, 25 bp, probe
aaagaggcaagctatagactttgaa

SEQ ID NO: 104131 - DNA, 25 bp, probe
taaagaggcaagctatagactttga

SEQ ID NO: 104132 - DNA, 25 bp, probe
gctatagactttgaagtgaccctcc

SEQ ID NO: 104133 - DNA, 25 bp, probe
ctaaagaggcaagctatagactttg

SEQ ID NO: 104134 - DNA, 25 bp, probe
ctaacatagtactttctttccagca

SEQ ID NO: 104135 - DNA, 25 bp, probe
tctaaagaggcaagctatagacttt

SEQ ID NO: 104136 - DNA, 25 bp, probe
tctaacatagtactttctttccagc

SEQ ID NO: 104137 - DNA, 25 bp, probe
taacatagtactttctttccagcaa

SEQ ID NO: 104138 - DNA, 25 bp, probe
gctcagactattacaataacaccac

SEQ ID NO: 104139 - DNA, 25 bp, probe
agactattacaataacaccacctga

SEQ ID NO: 104140 - DNA, 25 bp, probe
tcagactattacaataacaccacct

SEQ ID NO: 104141 - DNA, 25 bp, probe
ctcagactattacaataacaccacc

SEQ ID NO: 104142 - DNA, 25 bp, probe
gactattacaataacaccacctgaa

SEQ ID NO: 104143 - DNA, 25 bp, probe
cagactattacaataacaccacctg

SEQ ID NO: 104144 - DNA, 25 bp, probe
agctcagactattacaataacacca

SEQ ID NO: 104145 - DNA, 25 bp, probe
cagctcagactattacaataacacc

SEQ ID NO: 104146 - DNA, 25 bp, probe
acagctcagactattacaataacac

SEQ ID NO: 104147 - DNA, 25 bp, probe
ggattaaatgtggaattgaacgact

SEQ ID NO: 104148 - DNA, 25 bp, probe
tggattaaatgtggaattgaacgac

SEQ ID NO: 104149 - DNA, 25 bp, probe
ttggctttggattaaatgtggaatt

SEQ ID NO: 104150 - DNA, 25 bp, probe
ggctttggattaaatgtggaattga

SEQ ID NO: 104151 - DNA, 25 bp, probe
ttaaatgtggaattgaacgactacc

SEQ ID NO: 104152 - DNA, 25 bp, probe
ttggattaaatgtggaattgaacga

SEQ ID NO: 104153 - DNA, 25 bp, probe
tggctttggattaaatgtggaattg

SEQ ID NO: 104154 - DNA, 25 bp, probe
taaatgtggaattgaacgactaccc

SEQ ID NO: 104155 - DNA, 25 bp, probe
tttggattaaatgtggaattgaacg

SEQ ID NO: 104156 - DNA, 25 bp, probe
gctttggattaaatgtggaattgaa

SEQ ID NO: 104157 - DNA, 25 bp, probe
actattacaataacaccacctgaaa

SEQ ID NO: 104158 - DNA, 25 bp, probe
attaaatgtggaattgaacgactac

SEQ ID NO: 104159 - DNA, 25 bp, probe
tacagctcagactattacaataaca

SEQ ID NO: 104160 - DNA, 25 bp, probe
gattaaatgtggaattgaacgacta

SEQ ID NO: 104161 - DNA, 25 bp, probe
cgttaactcgaattctcacaaggaa

SEQ ID NO: 104162 - DNA, 25 bp, probe
ctttggattaaatgtggaattgaac

SEQ ID NO: 104163 - DNA, 25 bp, probe
attaaagctcaaggtgcatttcaaa

SEQ ID NO: 104164 - DNA, 25 bp, probe
tgatgaagaatttacagctcagact

SEQ ID NO: 104165 - DNA, 25 bp, probe
aattgaacgactacccagaagtgtt

SEQ ID NO: 104166 - DNA, 25 bp, probe
ttgatgaagaatttacagctcagac

SEQ ID NO: 104167 - DNA, 25 bp, probe
cattaaagctcaaggtgcatttcaa

SEQ ID NO: 104168 - DNA, 25 bp, probe
ttaaagctcaaggtgcatttcaaac

SEQ ID NO: 104169 - DNA, 25 bp, probe
acgttaactcgaattctcacaagga

SEQ ID NO: 104170 - DNA, 25 bp, probe
cacgttaactcgaattctcacaagg

SEQ ID NO: 104171 - DNA, 25 bp, probe
tttgatgaagaatttacagctcaga

SEQ ID NO: 104172 - DNA, 25 bp, probe
gaattgaacgactacccagaagtgt

SEQ ID NO: 104173 - DNA, 25 bp, probe
taaagctcaaggtgcatttcaaact

SEQ ID NO: 104174 - DNA, 25 bp, probe
gatgaagaatttacagctcagacta

SEQ ID NO: 104175 - DNA, 25 bp, probe
ttacagctcagactattacaataac

SEQ ID NO: 104176 - DNA, 25 bp, probe
gcacgttaactcgaattctcacaag

SEQ ID NO: 104177 - DNA, 25 bp, probe
tgaagaatttacagctcagactatt

SEQ ID NO: 104178 - DNA, 25 bp, probe
aacctcaagtaacatctgagacaga

SEQ ID NO: 104179 - DNA, 25 bp, probe
agaatttacagctcagactattaca

SEQ ID NO: 104180 - DNA, 25 bp, probe
atgaagaatttacagctcagactat

SEQ ID NO: 104181 - DNA, 25 bp, probe
gttaactcgaattctcacaaggaaa

SEQ ID NO: 104182 - DNA, 25 bp, probe
aaggaggcttccaactgaatatgag

SEQ ID NO: 104183 - DNA, 25 bp, probe
caaggaggcttccaactgaatatga

SEQ ID NO: 104184 - DNA, 25 bp, probe
ggaggcttccaactgaatatgagag

SEQ ID NO: 104185 - DNA, 25 bp, probe
acaaggaggcttccaactgaatatg

SEQ ID NO: 104186 - DNA, 25 bp, probe
cacaaggaggcttccaactgaatat

SEQ ID NO: 104187 - DNA, 25 bp, probe
aggaggcttccaactgaatatgaga

SEQ ID NO: 104188 - DNA, 25 bp, probe
tcacaaggaggcttccaactgaata

SEQ ID NO: 104189 - DNA, 25 bp, probe
ttaacttcaaaactcacaaggaggc

SEQ ID NO: 104190 - DNA, 25 bp, probe
taacttcaaaactcacaaggaggct

SEQ ID NO: 104191 - DNA, 25 bp, probe
ctcacaaggaggcttccaactgaat

SEQ ID NO: 104192 - DNA, 25 bp, probe
aacttcaaaactcacaaggaggctt

SEQ ID NO: 104193 - DNA, 25 bp, probe
acttcaaaactcacaaggaggcttc

SEQ ID NO: 104194 - DNA, 25 bp, probe
cttcaaaactcacaaggaggcttcc

SEQ ID NO: 104195 - DNA, 25 bp, probe
caaaactcacaaggaggcttccaac

SEQ ID NO: 104196 - DNA, 25 bp, probe
aaaactcacaaggaggcttccaact

SEQ ID NO: 104197 - DNA, 25 bp, probe
tcaaaactcacaaggaggcttccaa

SEQ ID NO: 104198 - DNA, 25 bp, probe
ttcaaaactcacaaggaggcttcca

SEQ ID NO: 104199 - DNA, 25 bp, probe
gggcacttaatttgtaaacttctga

SEQ ID NO: 104200 - DNA, 25 bp, probe
agggcacttaatttgtaaacttctg

SEQ ID NO: 104201 - DNA, 25 bp, probe
tgaaagggcacttaatttgtaaact

SEQ ID NO: 104202 - DNA, 25 bp, probe
aagggcacttaatttgtaaacttct

SEQ ID NO: 104203 - DNA, 25 bp, probe
ctgaaagggcacttaatttgtaaac

SEQ ID NO: 104204 - DNA, 25 bp, probe
ggcacttaatttgtaaacttctgaa

SEQ ID NO: 104205 - DNA, 25 bp, probe
aaagggcacttaatttgtaaacttc

SEQ ID NO: 104206 - DNA, 25 bp, probe
gaaagggcacttaatttgtaaactt

SEQ ID NO: 104207 - DNA, 25 bp, probe
cctgaaagggcacttaatttgtaaa

SEQ ID NO: 104208 - DNA, 25 bp, probe
atcctgaaagggcacttaatttgta

SEQ ID NO: 104209 - DNA, 25 bp, probe
tcctgaaagggcacttaatttgtaa

SEQ ID NO: 104210 - DNA, 25 bp, probe
gaatcctgaaagggcacttaatttg

SEQ ID NO: 104211 - DNA, 25 bp, probe
aatcctgaaagggcacttaatttgt

SEQ ID NO: 104212 - DNA, 25 bp, probe
atttgtaaacttctgaagactgaga

SEQ ID NO: 104213 - DNA, 25 bp, probe
ggaatcctgaaagggcacttaattt

SEQ ID NO: 104214 - DNA, 25 bp, probe
cctagtgtgactggaatcctgaaag

SEQ ID NO: 104215 - DNA, 25 bp, probe
aatttgtaaacttctgaagactgag

SEQ ID NO: 104216 - DNA, 25 bp, probe
tggaatcctgaaagggcacttaatt

SEQ ID NO: 104217 - DNA, 25 bp, probe
tgtaaacttctgaagactgagaact

SEQ ID NO: 104218 - DNA, 25 bp, probe
gcacttaatttgtaaacttctgaag

SEQ ID NO: 104219 - DNA, 25 bp, probe
ttgtaaacttctgaagactgagaac

SEQ ID NO: 104220 - DNA, 25 bp, probe
ctagtgtgactggaatcctgaaagg

SEQ ID NO: 104221 - DNA, 25 bp, probe
ctggaatcctgaaagggcacttaat

SEQ ID NO: 104222 - DNA, 25 bp, probe
tttgtaaacttctgaagactgagaa

SEQ ID NO: 104223 - DNA, 25 bp, probe
taatttgtaaacttctgaagactga

SEQ ID NO: 104224 - DNA, 25 bp, probe
ccctagtgtgactggaatcctgaaa

SEQ ID NO: 104225 - DNA, 25 bp, probe
tagtgtgactggaatcctgaaaggg

SEQ ID NO: 104226 - DNA, 25 bp, probe
actggaatcctgaaagggcacttaa

SEQ ID NO: 104227 - DNA, 25 bp, probe
ttaatttgtaaacttctgaagactg

SEQ ID NO: 104228 - DNA, 25 bp, probe
acttaatttgtaaacttctgaagac

SEQ ID NO: 104229 - DNA, 25 bp, probe
cacttaatttgtaaacttctgaaga

SEQ ID NO: 104230 - DNA, 25 bp, probe
gactggaatcctgaaagggcactta

SEQ ID NO: 104231 - DNA, 25 bp, probe
cttaatttgtaaacttctgaagact

SEQ ID NO: 104232 - DNA, 25 bp, probe
tccctagtgtgactggaatcctgaa

SEQ ID NO: 104233 - DNA, 25 bp, probe
gtccctagtgtgactggaatcctga

SEQ ID NO: 104234 - DNA, 25 bp, probe
atggagtccctagtgtgactggaat

SEQ ID NO: 104235 - DNA, 25 bp, probe
gagtccctagtgtgactggaatcct

SEQ ID NO: 104236 - DNA, 25 bp, probe
agtccctagtgtgactggaatcctg

SEQ ID NO: 104237 - DNA, 25 bp, probe
tggagtccctagtgtgactggaatc

SEQ ID NO: 104238 - DNA, 25 bp, probe
cttcagtgcggatctactaccagta

SEQ ID NO: 104239 - DNA, 25 bp, probe
ttcagtgcggatctactaccagtac

SEQ ID NO: 104240 - DNA, 25 bp, probe
tcagtgcggatctactaccagtacc

SEQ ID NO: 104241 - DNA, 25 bp, probe
gaagccatggaaatacaagtcaaag

SEQ ID NO: 104242 - DNA, 25 bp, probe
aagccatggaaatacaagtcaaagg

SEQ ID NO: 104243 - DNA, 25 bp, probe
ggaagccatggaaatacaagtcaaa

SEQ ID NO: 104244 - DNA, 25 bp, probe
gatgattactcggacaccgtgaagg

SEQ ID NO: 104245 - DNA, 25 bp, probe
ggatgattactcggacaccgtgaag

SEQ ID NO: 104246 - DNA, 25 bp, probe
agccatggaaatacaagtcaaaggg

SEQ ID NO: 104247 - DNA, 25 bp, probe
gggaagccatggaaatacaagtcaa

SEQ ID NO: 104248 - DNA, 25 bp, probe
cagatgctgatgctgaggatgatca

SEQ ID NO: 104249 - DNA, 25 bp, probe
ccatggaaatacaagtcaaaggggt

SEQ ID NO: 104250 - DNA, 25 bp, probe
cttcttccagcagtacttggtggag

SEQ ID NO: 104251 - DNA, 25 bp, probe
gccatggaaatacaagtcaaagggg

SEQ ID NO: 104252 - DNA, 25 bp, probe
aggggaagccatggaaatacaagtc

SEQ ID NO: 104253 - DNA, 25 bp, probe
gaggggaagccatggaaatacaagt

SEQ ID NO: 104254 - DNA, 25 bp, probe
ggggaagccatggaaatacaagtca

SEQ ID NO: 104255 - DNA, 25 bp, probe
ggaggggaagccatggaaatacaag

SEQ ID NO: 104256 - DNA, 25 bp, probe
aaggtctgttgttgaattgtactct

SEQ ID NO: 104257 - DNA, 25 bp, probe
aggtctgttgttgaattgtactctg

SEQ ID NO: 104258 - DNA, 25 bp, probe
gtctgttgttgaattgtactctgcc

SEQ ID NO: 104259 - DNA, 25 bp, probe
ggtctgttgttgaattgtactctgc

SEQ ID NO: 104260 - DNA, 25 bp, probe
atgtaaaggtctgttgttgaattgt

SEQ ID NO: 104261 - DNA, 25 bp, probe
tgtaaaggtctgttgttgaattgta

SEQ ID NO: 104262 - DNA, 25 bp, probe
aaaggtctgttgttgaattgtactc

SEQ ID NO: 104263 - DNA, 25 bp, probe
ttcatctttgttcacttgaggcttt

SEQ ID NO: 104264 - DNA, 25 bp, probe
tttcatctttgttcacttgaggctt

SEQ ID NO: 104265 - DNA, 25 bp, probe
catgtaaaggtctgttgttgaattg

SEQ ID NO: 104266 - DNA, 25 bp, probe
taaaggtctgttgttgaattgtact

SEQ ID NO: 104267 - DNA, 25 bp, probe
gtaaaggtctgttgttgaattgtac

SEQ ID NO: 104268 - DNA, 25 bp, probe
tcatctttgttcacttgaggctttc

SEQ ID NO: 104269 - DNA, 25 bp, probe
catctttgttcacttgaggctttcc

SEQ ID NO: 104270 - DNA, 25 bp, probe
atctttgttcacttgaggctttccc

SEQ ID NO: 104271 - DNA, 25 bp, probe
tctgttgttgaattgtactctgccc

SEQ ID NO: 104272 - DNA, 25 bp, probe
tgttttcatctttgttcacttgagg

SEQ ID NO: 104273 - DNA, 25 bp, probe
caggacagttcatggtaatgttgcc

SEQ ID NO: 104274 - DNA, 25 bp, probe
tgcaggacagttcatggtaatgttg

SEQ ID NO: 104275 - DNA, 25 bp, probe
gtgcaggacagttcatggtaatgtt

SEQ ID NO: 104276 - DNA, 25 bp, probe
cttggcaaaattggatttcttcaaa

SEQ ID NO: 104277 - DNA, 25 bp, probe
ttttcatctttgttcacttgaggct

SEQ ID NO: 104278 - DNA, 25 bp, probe
gttttcatctttgttcacttgaggc

SEQ ID NO: 104279 - DNA, 25 bp, probe
ccttggcaaaattggatttcttcaa

SEQ ID NO: 104280 - DNA, 25 bp, probe
ttggcaaaattggatttcttcaaaa

SEQ ID NO: 104281 - DNA, 25 bp, probe
gtgttttcatctttgttcacttgag

SEQ ID NO: 104282 - DNA, 25 bp, probe
cgtgttttcatctttgttcacttga

SEQ ID NO: 104283 - DNA, 25 bp, probe
cttttcccaccgtgttttcatcttt

SEQ ID NO: 104284 - DNA, 25 bp, probe
gttcatggtaatgttgccctctgag

SEQ ID NO: 104285 - DNA, 25 bp, probe
ccgtgttttcatctttgttcacttg

SEQ ID NO: 104286 - DNA, 25 bp, probe
gtgtgcaggacagttcatggtaatg

SEQ ID NO: 104287 - DNA, 25 bp, probe
ttttcccaccgtgttttcatctttg

SEQ ID NO: 104288 - DNA, 25 bp, probe
accgtgttttcatctttgttcactt

SEQ ID NO: 104289 - DNA, 25 bp, probe
agttcatggtaatgttgccctctga

SEQ ID NO: 104290 - DNA, 25 bp, probe
gacagttcatggtaatgttgccctc

SEQ ID NO: 104291 - DNA, 25 bp, probe
acatgtaaaggtctgttgttgaatt

SEQ ID NO: 104292 - DNA, 25 bp, probe
cagttcatggtaatgttgccctctg

SEQ ID NO: 104293 - DNA, 25 bp, probe
caccgtgttttcatctttgttcact

SEQ ID NO: 104294 - DNA, 25 bp, probe
tgtgcaggacagttcatggtaatgt

SEQ ID NO: 104295 - DNA, 25 bp, probe
tgtgtgcaggacagttcatggtaat

SEQ ID NO: 104296 - DNA, 25 bp, probe
acagttcatggtaatgttgccctct

SEQ ID NO: 104297 - DNA, 25 bp, probe
ttcccaccgtgttttcatctttgtt

SEQ ID NO: 104298 - DNA, 25 bp, probe
tttcccaccgtgttttcatctttgt

SEQ ID NO: 104299 - DNA, 25 bp, probe
gcaggacagttcatggtaatgttgc

SEQ ID NO: 104300 - DNA, 25 bp, probe
ctggagatggagaatggctattggt

SEQ ID NO: 104301 - DNA, 25 bp, probe
gagatggagaatggctattggtggt

SEQ ID NO: 104302 - DNA, 25 bp, probe
tggagatggagaatggctattggtg

SEQ ID NO: 104303 - DNA, 25 bp, probe
agatggagaatggctattggtggtg

SEQ ID NO: 104304 - DNA, 25 bp, probe
tcctggagatggagaatggctattg

SEQ ID NO: 104305 - DNA, 25 bp, probe
gtcctggagatggagaatggctatt

SEQ ID NO: 104306 - DNA, 25 bp, probe
cctggagatggagaatggctattgg

SEQ ID NO: 104307 - DNA, 25 bp, probe
ggagatggagaatggctattggtgg

SEQ ID NO: 104308 - DNA, 25 bp, probe
tgtcctggagatggagaatggctat

SEQ ID NO: 104309 - DNA, 25 bp, probe
cagaggacagagcagaggatctttc

SEQ ID NO: 104310 - DNA, 25 bp, probe
ctgtcctggagatggagaatggcta

SEQ ID NO: 104311 - DNA, 25 bp, probe
gaggatctttccaaccacatctgct

SEQ ID NO: 104312 - DNA, 25 bp, probe
agaggatctttccaaccacatctgc

SEQ ID NO: 104313 - DNA, 25 bp, probe
gcagaggatctttccaaccacatct

SEQ ID NO: 104314 - DNA, 25 bp, probe
agcagaggatctttccaaccacatc

SEQ ID NO: 104315 - DNA, 25 bp, probe
gagcagaggatctttccaaccacat

SEQ ID NO: 104316 - DNA, 25 bp, probe
cagaggatctttccaaccacatctg

SEQ ID NO: 104317 - DNA, 25 bp, probe
gctcttcaaattcaccatcggcatg

SEQ ID NO: 104318 - DNA, 25 bp, probe
aggatctttccaaccacatctgctg

SEQ ID NO: 104319 - DNA, 25 bp, probe
gatggtgcctctgaggaaaactatg

SEQ ID NO: 104320 - DNA, 25 bp, probe
gacagagcagaggatctttccaacc

SEQ ID NO: 104321 - DNA, 25 bp, probe
ggacagagcagaggatctttccaac

SEQ ID NO: 104322 - DNA, 25 bp, probe
agctcttcaaattcaccatcggcat

SEQ ID NO: 104323 - DNA, 25 bp, probe
aggacagagcagaggatctttccaa

SEQ ID NO: 104324 - DNA, 25 bp, probe
tctctgtcctggagatggagaatgg

SEQ ID NO: 104325 - DNA, 25 bp, probe
cagagcagaggatctttccaaccac

SEQ ID NO: 104326 - DNA, 25 bp, probe
agaggacagagcagaggatctttcc

SEQ ID NO: 104327 - DNA, 25 bp, probe
atggtgcctctgaggaaaactatgt

SEQ ID NO: 104328 - DNA, 25 bp, probe
cttggagctcttcaaattcaccatc

SEQ ID NO: 104329 - DNA, 25 bp, probe
ggatggtgcctctgaggaaaactat

SEQ ID NO: 104330 - DNA, 25 bp, probe
ctcttcaaattcaccatcggcatgg

SEQ ID NO: 104331 - DNA, 25 bp, probe
ctccttggagctcttcaaattcacc

SEQ ID NO: 104332 - DNA, 25 bp, probe
cctccttggagctcttcaaattcac

SEQ ID NO: 104333 - DNA, 25 bp, probe
tggtgcctctgaggaaaactatgtg

SEQ ID NO: 104334 - DNA, 25 bp, probe
ccttggagctcttcaaattcaccat

SEQ ID NO: 104335 - DNA, 25 bp, probe
ttggagctcttcaaattcaccatcg

SEQ ID NO: 104336 - DNA, 25 bp, probe
aggatggtgcctctgaggaaaacta

SEQ ID NO: 104337 - DNA, 25 bp, probe
tccttggagctcttcaaattcacca

SEQ ID NO: 104338 - DNA, 25 bp, probe
gcctccttggagctcttcaaattca

SEQ ID NO: 104339 - DNA, 25 bp, probe
aagcctccttggagctcttcaaatt

SEQ ID NO: 104340 - DNA, 25 bp, probe
agcctccttggagctcttcaaattc

SEQ ID NO: 104341 - DNA, 25 bp, probe
tggagctcttcaaattcaccatcgg

SEQ ID NO: 104342 - DNA, 25 bp, probe
gaagcctccttggagctcttcaaat

SEQ ID NO: 104343 - DNA, 25 bp, probe
cctatgccatgaagcagtacgaatg

SEQ ID NO: 104344 - DNA, 25 bp, probe
ctatgccatgaagcagtacgaatgc

SEQ ID NO: 104345 - DNA, 25 bp, probe
tatgccatgaagcagtacgaatgca

SEQ ID NO: 104346 - DNA, 25 bp, probe
taactacagtggcattaggacttac

SEQ ID NO: 104347 - DNA, 25 bp, probe
gtaactacagtggcattaggactta

SEQ ID NO: 104348 - DNA, 25 bp, probe
agtaactacagtggcattaggactt

SEQ ID NO: 104349 - DNA, 25 bp, probe
cagtaactacagtggcattaggact

SEQ ID NO: 104350 - DNA, 25 bp, probe
aactacagtggcattaggacttacc

SEQ ID NO: 104351 - DNA, 25 bp, probe
ctgagggaaagagagaagattagtg

SEQ ID NO: 104352 - DNA, 25 bp, probe
atgtatttctcttacctgcttctgc

SEQ ID NO: 104353 - DNA, 25 bp, probe
aacctgagggaaagagagaagatta

SEQ ID NO: 104354 - DNA, 25 bp, probe
aatgtatttctcttacctgcttctg

SEQ ID NO: 104355 - DNA, 25 bp, probe
cctgagggaaagagagaagattagt

SEQ ID NO: 104356 - DNA, 25 bp, probe
acctgagggaaagagagaagattag

SEQ ID NO: 104357 - DNA, 25 bp, probe
gagggaaagagagaagattagtgct

SEQ ID NO: 104358 - DNA, 25 bp, probe
aaacctgagggaaagagagaagatt

SEQ ID NO: 104359 - DNA, 25 bp, probe
tatttctcttacctgcttctgcctt

SEQ ID NO: 104360 - DNA, 25 bp, probe
tgagggaaagagagaagattagtgc

SEQ ID NO: 104361 - DNA, 25 bp, probe
caaacctgagggaaagagagaagat

SEQ ID NO: 104362 - DNA, 25 bp, probe
ctccagtaactacagtggcattagg

SEQ ID NO: 104363 - DNA, 25 bp, probe
agggaaagagagaagattagtgctc

SEQ ID NO: 104364 - DNA, 25 bp, probe
aggatgggatatagacttctaatgt

SEQ ID NO: 104365 - DNA, 25 bp, probe
gtatttctcttacctgcttctgcct

SEQ ID NO: 104366 - DNA, 25 bp, probe
ccagtaactacagtggcattaggac

SEQ ID NO: 104367 - DNA, 25 bp, probe
caggatgggatatagacttctaatg

SEQ ID NO: 104368 - DNA, 25 bp, probe
tcaggatgggatatagacttctaat

SEQ ID NO: 104369 - DNA, 25 bp, probe
tccagtaactacagtggcattagga

SEQ ID NO: 104370 - DNA, 25 bp, probe
tgtatttctcttacctgcttctgcc

SEQ ID NO: 104371 - DNA, 25 bp, probe
taatgtatttctcttacctgcttct

SEQ ID NO: 104372 - DNA, 25 bp, probe
tctaatgtatttctcttacctgctt

SEQ ID NO: 104373 - DNA, 25 bp, probe
ttctaatgtatttctcttacctgct

SEQ ID NO: 104374 - DNA, 25 bp, probe
gctccagtaactacagtggcattag

SEQ ID NO: 104375 - DNA, 25 bp, probe
ctaatgtatttctcttacctgcttc

SEQ ID NO: 104376 - DNA, 25 bp, probe
cttctaatgtatttctcttacctgc

SEQ ID NO: 104377 - DNA, 25 bp, probe
actacagtggcattaggacttaccg

SEQ ID NO: 104378 - DNA, 25 bp, probe
atttctcttacctgcttctgccttg

SEQ ID NO: 104379 - DNA, 25 bp, probe
gaaagagagaagattagtgctcggg

SEQ ID NO: 104380 - DNA, 25 bp, probe
ggaaagagagaagattagtgctcgg

SEQ ID NO: 104381 - DNA, 25 bp, probe
gggaaagagagaagattagtgctcg

SEQ ID NO: 104382 - DNA, 25 bp, probe
ggatgggatatagacttctaatgta

SEQ ID NO: 104383 - DNA, 25 bp, probe
acttctaatgtatttctcttacctg

SEQ ID NO: 104384 - DNA, 25 bp, probe
tgctccagtaactacagtggcatta

SEQ ID NO: 104385 - DNA, 25 bp, probe
gcaaacctgagggaaagagagaaga

SEQ ID NO: 104386 - DNA, 25 bp, probe
agcaaacctgagggaaagagagaag

SEQ ID NO: 104387 - DNA, 25 bp, probe
gacttctaatgtatttctcttacct

SEQ ID NO: 104388 - DNA, 25 bp, probe
ctacagtggcattaggacttaccgc

SEQ ID NO: 104389 - DNA, 25 bp, probe
agacttctaatgtatttctcttacc

SEQ ID NO: 104390 - DNA, 25 bp, probe
ctggatgtgtattcgtaacctcata

SEQ ID NO: 104391 - DNA, 25 bp, probe
tggatgtgtattcgtaacctcataa

SEQ ID NO: 104392 - DNA, 25 bp, probe
tatgaagacctctgttgtacctgta

SEQ ID NO: 104393 - DNA, 25 bp, probe
gaagacctctgttgtacctgtaata

SEQ ID NO: 104394 - DNA, 25 bp, probe
aactggatgtgtattcgtaacctca

SEQ ID NO: 104395 - DNA, 25 bp, probe
tgtatataagactgttcctgccttc

SEQ ID NO: 104396 - DNA, 25 bp, probe
acttgtatataagactgttcctgcc

SEQ ID NO: 104397 - DNA, 25 bp, probe
cttgtatataagactgttcctgcct

SEQ ID NO: 104398 - DNA, 25 bp, probe
ggatgtgtattcgtaacctcataat

SEQ ID NO: 104399 - DNA, 25 bp, probe
actggatgtgtattcgtaacctcat

SEQ ID NO: 104400 - DNA, 25 bp, probe
aagacctctgttgtacctgtaataa

SEQ ID NO: 104401 - DNA, 25 bp, probe
ttgtatataagactgttcctgcctt

SEQ ID NO: 104402 - DNA, 25 bp, probe
gtatataagactgttcctgccttcg

SEQ ID NO: 104403 - DNA, 25 bp, probe
tgaagacctctgttgtacctgtaat

SEQ ID NO: 104404 - DNA, 25 bp, probe
atgaagacctctgttgtacctgtaa

SEQ ID NO: 104405 - DNA, 25 bp, probe
ttatgaagacctctgttgtacctgt

SEQ ID NO: 104406 - DNA, 25 bp, probe
tatataagactgttcctgccttcgg

SEQ ID NO: 104407 - DNA, 25 bp, probe
tacttgtatataagactgttcctgc

SEQ ID NO: 104408 - DNA, 25 bp, probe
aaactggatgtgtattcgtaacctc

SEQ ID NO: 104409 - DNA, 25 bp, probe
acttcatatcatgtgcaatgttgtg

SEQ ID NO: 104410 - DNA, 25 bp, probe
tacttcatatcatgtgcaatgttgt

SEQ ID NO: 104411 - DNA, 25 bp, probe
cttcatatcatgtgcaatgttgtgg

SEQ ID NO: 104412 - DNA, 25 bp, probe
gaaactggatgtgtattcgtaacct

SEQ ID NO: 104413 - DNA, 25 bp, probe
gatgtgtattcgtaacctcataatt

SEQ ID NO: 104414 - DNA, 25 bp, probe
gcaactatttatgaagacctctgtt

SEQ ID NO: 104415 - DNA, 25 bp, probe
atgctattattcagaatgccaaagt

SEQ ID NO: 104416 - DNA, 25 bp, probe
tttatgaagacctctgttgtacctg

SEQ ID NO: 104417 - DNA, 25 bp, probe
atttatgaagacctctgttgtacct

SEQ ID NO: 104418 - DNA, 25 bp, probe
attatgctattattcagaatgccaa

SEQ ID NO: 104419 - DNA, 25 bp, probe
agacctctgttgtacctgtaataaa

SEQ ID NO: 104420 - DNA, 25 bp, probe
atataagactgttcctgccttcggt

SEQ ID NO: 104421 - DNA, 25 bp, probe
tgctattattcagaatgccaaagta

SEQ ID NO: 104422 - DNA, 25 bp, probe
ttacttcatatcatgtgcaatgttg

SEQ ID NO: 104423 - DNA, 25 bp, probe
gacctctgttgtacctgtaataaat

SEQ ID NO: 104424 - DNA, 25 bp, probe
aactatttatgaagacctctgttgt

SEQ ID NO: 104425 - DNA, 25 bp, probe
tatttatgaagacctctgttgtacc

SEQ ID NO: 104426 - DNA, 25 bp, probe
gccttacttgtatataagactgttc

SEQ ID NO: 104427 - DNA, 25 bp, probe
aatcagtctggacatttactacttt

SEQ ID NO: 104428 - DNA, 25 bp, probe
catatcatgtgcaatgttgtggctt

SEQ ID NO: 104429 - DNA, 25 bp, probe
ttcatatcatgtgcaatgttgtggc

SEQ ID NO: 104430 - DNA, 25 bp, probe
cttcgtatggtgagctttatggttt

SEQ ID NO: 104431 - DNA, 25 bp, probe
gctattattcagaatgccaaagtat

SEQ ID NO: 104432 - DNA, 25 bp, probe
tatgctattattcagaatgccaaag

SEQ ID NO: 104433 - DNA, 25 bp, probe
tgcaactatttatgaagacctctgt

SEQ ID NO: 104434 - DNA, 25 bp, probe
atgttaggagatgccaagacgaata

SEQ ID NO: 104435 - DNA, 25 bp, probe
gctcctgaagttaggtcattactaa

SEQ ID NO: 104436 - DNA, 25 bp, probe
tgttaggagatgccaagacgaatac

SEQ ID NO: 104437 - DNA, 25 bp, probe
ccaagtctacttcactaatgacgat

SEQ ID NO: 104438 - DNA, 25 bp, probe
aaccaagtctacttcactaatgacg

SEQ ID NO: 104439 - DNA, 25 bp, probe
aagtctacttcactaatgacgatgc

SEQ ID NO: 104440 - DNA, 25 bp, probe
caagtctacttcactaatgacgatg

SEQ ID NO: 104441 - DNA, 25 bp, probe
accaagtctacttcactaatgacga

SEQ ID NO: 104442 - DNA, 25 bp, probe
cgctcctgaagttaggtcattacta

SEQ ID NO: 104443 - DNA, 25 bp, probe
caataaattatggctcttcacctgg

SEQ ID NO: 104444 - DNA, 25 bp, probe
gcaataaattatggctcttcacctg

SEQ ID NO: 104445 - DNA, 25 bp, probe
gttaggagatgccaagacgaatacc

SEQ ID NO: 104446 - DNA, 25 bp, probe
agtctacttcactaatgacgatgcc

SEQ ID NO: 104447 - DNA, 25 bp, probe
aataaattatggctcttcacctggg

SEQ ID NO: 104448 - DNA, 25 bp, probe
tatttacttgaaagatgggtctccg

SEQ ID NO: 104449 - DNA, 25 bp, probe
tttatgctgctgaaatcattcttgg

SEQ ID NO: 104450 - DNA, 25 bp, probe
ttatgctgctgaaatcattcttggt

SEQ ID NO: 104451 - DNA, 25 bp, probe
gacaaagatggacatatcaagatcg

SEQ ID NO: 104452 - DNA, 25 bp, probe
cagacaagtaatcactaacccgttt

SEQ ID NO: 104453 - DNA, 25 bp, probe
gacctgaagctagataacatcctgt

SEQ ID NO: 104454 - DNA, 25 bp, probe
ttatttacttgaaagatgggtctcc

SEQ ID NO: 104455 - DNA, 25 bp, probe
gagatgccaagacgaataccttctg

SEQ ID NO: 104456 - DNA, 25 bp, probe
tatgctgctgaaatcattcttggtc

SEQ ID NO: 104457 - DNA, 25 bp, probe
aagaaacactcaacaataaagactg

SEQ ID NO: 104458 - DNA, 25 bp, probe
agaaacactcaacaataaagactga

SEQ ID NO: 104459 - DNA, 25 bp, probe
acaaagatggacatatcaagatcgc

SEQ ID NO: 104460 - DNA, 25 bp, probe
caacaataaagactgagacccgttc

SEQ ID NO: 104461 - DNA, 25 bp, probe
cctgttagacaaagatggacatatc

SEQ ID NO: 104462 - DNA, 25 bp, probe
catgttaggagatgccaagacgaat

SEQ ID NO: 104463 - DNA, 25 bp, probe
gcagaaaccaagtctacttcactaa

SEQ ID NO: 104464 - DNA, 25 bp, probe
agacaaagatggacatatcaagatc

SEQ ID NO: 104465 - DNA, 25 bp, probe
gacgctcctgaagttaggtcattac

SEQ ID NO: 104466 - DNA, 25 bp, probe
agcagaaaccaagtctacttcacta

SEQ ID NO: 104467 - DNA, 25 bp, probe
tagcagaaaccaagtctacttcact

SEQ ID NO: 104468 - DNA, 25 bp, probe
ctgttagacaaagatggacatatca

SEQ ID NO: 104469 - DNA, 25 bp, probe
agacgctcctgaagttaggtcatta

SEQ ID NO: 104470 - DNA, 25 bp, probe
taggagatgccaagacgaatacctt

SEQ ID NO: 104471 - DNA, 25 bp, probe
ttaggagatgccaagacgaatacct

SEQ ID NO: 104472 - DNA, 25 bp, probe
gatgccaagacgaataccttctgtg

SEQ ID NO: 104473 - DNA, 25 bp, probe
gttatttacttgaaagatgggtctc

SEQ ID NO: 104474 - DNA, 25 bp, probe
gaaaccaagtctacttcactaatga

SEQ ID NO: 104475 - DNA, 25 bp, probe
agaaaccaagtctacttcactaatg

SEQ ID NO: 104476 - DNA, 25 bp, probe
cagaaaccaagtctacttcactaat

SEQ ID NO: 104477 - DNA, 25 bp, probe
tcctgttagacaaagatggacatat

SEQ ID NO: 104478 - DNA, 25 bp, probe
gaagttgtgagatattggatgtgtg

SEQ ID NO: 104479 - DNA, 25 bp, probe
agaagttgtgagatattggatgtgt

SEQ ID NO: 104480 - DNA, 25 bp, probe
gtgagatattggatgtgtggctatt

SEQ ID NO: 104481 - DNA, 25 bp, probe
aagttgtgagatattggatgtgtgg

SEQ ID NO: 104482 - DNA, 25 bp, probe
ttgaagagattatggagaagtctgg

SEQ ID NO: 104483 - DNA, 25 bp, probe
ggttgaagagattatggagaagtct

SEQ ID NO: 104484 - DNA, 25 bp, probe
gttgaagagattatggagaagtctg

SEQ ID NO: 104485 - DNA, 25 bp, probe
aagattcagagttggataagcactt

SEQ ID NO: 104486 - DNA, 25 bp, probe
tgtgagatattggatgtgtggctat

SEQ ID NO: 104487 - DNA, 25 bp, probe
tagaagttgtgagatattggatgtg

SEQ ID NO: 104488 - DNA, 25 bp, probe
agattcagagttggataagcacttg

SEQ ID NO: 104489 - DNA, 25 bp, probe
ttgtgagatattggatgtgtggcta

SEQ ID NO: 104490 - DNA, 25 bp, probe
tagtagactgaatccacatagagaa

SEQ ID NO: 104491 - DNA, 25 bp, probe
tgaagagattatggagaagtctggc

SEQ ID NO: 104492 - DNA, 25 bp, probe
cagagttggataagcacttggaatc

SEQ ID NO: 104493 - DNA, 25 bp, probe
gattcagagttggataagcacttgg

SEQ ID NO: 104494 - DNA, 25 bp, probe
atagtagactgaatccacatagaga

SEQ ID NO: 104495 - DNA, 25 bp, probe
ttagaagttgtgagatattggatgt

SEQ ID NO: 104496 - DNA, 25 bp, probe
gagttggataagcacttggaatcac

SEQ ID NO: 104497 - DNA, 25 bp, probe
agagttggataagcacttggaatca

SEQ ID NO: 104498 - DNA, 25 bp, probe
tcagagttggataagcacttggaat

SEQ ID NO: 104499 - DNA, 25 bp, probe
attcagagttggataagcacttgga

SEQ ID NO: 104500 - DNA, 25 bp, probe
ttcagagttggataagcacttggaa

SEQ ID NO: 104501 - DNA, 25 bp, probe
tgagatattggatgtgtggctattt

SEQ ID NO: 104502 - DNA, 25 bp, probe
gggttgaagagattatggagaagtc

SEQ ID NO: 104503 - DNA, 25 bp, probe
gaagagattatggagaagtctggcg

SEQ ID NO: 104504 - DNA, 25 bp, probe
ctgtatagcctaactacacacatca

SEQ ID NO: 104505 - DNA, 25 bp, probe
gttgtgagatattggatgtgtggct

SEQ ID NO: 104506 - DNA, 25 bp, probe
agttgtgagatattggatgtgtggc

SEQ ID NO: 104507 - DNA, 25 bp, probe
tctgtatagcctaactacacacatc

SEQ ID NO: 104508 - DNA, 25 bp, probe
gctgtttatagtagactgaatccac

SEQ ID NO: 104509 - DNA, 25 bp, probe
tgtatagcctaactacacacatcaa

SEQ ID NO: 104510 - DNA, 25 bp, probe
ttcacattgtatgccagaaattagg

SEQ ID NO: 104511 - DNA, 25 bp, probe
ttctgtatagcctaactacacacat

SEQ ID NO: 104512 - DNA, 25 bp, probe
attctgtatagcctaactacacaca

SEQ ID NO: 104513 - DNA, 25 bp, probe
agtagactgaatccacatagagaaa

SEQ ID NO: 104514 - DNA, 25 bp, probe
gtagactgaatccacatagagaaag

SEQ ID NO: 104515 - DNA, 25 bp, probe
aaagattcagagttggataagcact

SEQ ID NO: 104516 - DNA, 25 bp, probe
aagagattatggagaagtctggcga

SEQ ID NO: 104517 - DNA, 25 bp, probe
ggatgataatttgtgtgttgtttga

SEQ ID NO: 104518 - DNA, 25 bp, probe
tgtcaaccaagtgtttagaatgaaa

SEQ ID NO: 104519 - DNA, 25 bp, probe
gtatagcctaactacacacatcaaa

SEQ ID NO: 104520 - DNA, 25 bp, probe
aggatgataatttgtgtgttgtttg

SEQ ID NO: 104521 - DNA, 25 bp, probe
atgtcaaccaagtgtttagaatgaa

SEQ ID NO: 104522 - DNA, 25 bp, probe
cataaggaaagcaatgactgttctt

SEQ ID NO: 104523 - DNA, 25 bp, probe
ataaggaaagcaatgactgttcttg

SEQ ID NO: 104524 - DNA, 25 bp, probe
gaggattctcataaggaaagcaatg

SEQ ID NO: 104525 - DNA, 25 bp, probe
agaggattctcataaggaaagcaat

SEQ ID NO: 104526 - DNA, 25 bp, probe
aagaggattctcataaggaaagcaa

SEQ ID NO: 104527 - DNA, 25 bp, probe
aaagaggattctcataaggaaagca

SEQ ID NO: 104528 - DNA, 25 bp, probe
taaagaggattctcataaggaaagc

SEQ ID NO: 104529 - DNA, 25 bp, probe
ctcataaggaaagcaatgactgttc

SEQ ID NO: 104530 - DNA, 25 bp, probe
ggattctcataaggaaagcaatgac

SEQ ID NO: 104531 - DNA, 25 bp, probe
aggattctcataaggaaagcaatga

SEQ ID NO: 104532 - DNA, 25 bp, probe
tcataaggaaagcaatgactgttct

SEQ ID NO: 104533 - DNA, 25 bp, probe
tctcataaggaaagcaatgactgtt

SEQ ID NO: 104534 - DNA, 25 bp, probe
ttctcataaggaaagcaatgactgt

SEQ ID NO: 104535 - DNA, 25 bp, probe
attctcataaggaaagcaatgactg

SEQ ID NO: 104536 - DNA, 25 bp, probe
gattctcataaggaaagcaatgact

SEQ ID NO: 104537 - DNA, 25 bp, probe
cagagccaagaaacactttcagaaa

SEQ ID NO: 104538 - DNA, 25 bp, probe
ttaaagaggattctcataaggaaag

SEQ ID NO: 104539 - DNA, 25 bp, probe
ggagattcatgcgatgtgtccaatc

SEQ ID NO: 104540 - DNA, 25 bp, probe
ccagagccaagaaacactttcagaa

SEQ ID NO: 104541 - DNA, 25 bp, probe
aaaacaaatgtgaaggggagagaca

SEQ ID NO: 104542 - DNA, 25 bp, probe
agagccaagaaacactttcagaaaa

SEQ ID NO: 104543 - DNA, 25 bp, probe
caccaagaaaacatgcaactcaaac

SEQ ID NO: 104544 - DNA, 25 bp, probe
tcaccaagaaaacatgcaactcaaa

SEQ ID NO: 104545 - DNA, 25 bp, probe
aaacaaatgtgaaggggagagacag

SEQ ID NO: 104546 - DNA, 25 bp, probe
caagaaaacatgcaactcaaacgac

SEQ ID NO: 104547 - DNA, 25 bp, probe
gtcaccaagaaaacatgcaactcaa

SEQ ID NO: 104548 - DNA, 25 bp, probe
tttaaagaggattctcataaggaaa

SEQ ID NO: 104549 - DNA, 25 bp, probe
ccaatcggagacaaaagcagtttct

SEQ ID NO: 104550 - DNA, 25 bp, probe
aaacatgcaactcaaacgacggaaa

SEQ ID NO: 104551 - DNA, 25 bp, probe
gggcgggaaatacaaggaatatttt

SEQ ID NO: 104552 - DNA, 25 bp, probe
ccaagaaaacatgcaactcaaacga

SEQ ID NO: 104553 - DNA, 25 bp, probe
accaagaaaacatgcaactcaaacg

SEQ ID NO: 104554 - DNA, 25 bp, probe
gacaaaagcagtttctctccaactc

SEQ ID NO: 104555 - DNA, 25 bp, probe
aagaaaacatgcaactcaaacgacg

SEQ ID NO: 104556 - DNA, 25 bp, probe
agacaaaagcagtttctctccaact

SEQ ID NO: 104557 - DNA, 25 bp, probe
tccaatcggagacaaaagcagtttc

SEQ ID NO: 104558 - DNA, 25 bp, probe
aaagcagtttctctccaactccctc

SEQ ID NO: 104559 - DNA, 25 bp, probe
gtccaatcggagacaaaagcagttt

SEQ ID NO: 104560 - DNA, 25 bp, probe
gagacaaaagcagtttctctccaac

SEQ ID NO: 104561 - DNA, 25 bp, probe
ggggcgggaaatacaaggaatattt

SEQ ID NO: 104562 - DNA, 25 bp, probe
aacaaatgtgaaggggagagacagg

SEQ ID NO: 104563 - DNA, 25 bp, probe
acaaaagcagtttctctccaactcc

SEQ ID NO: 104564 - DNA, 25 bp, probe
aatcggagacaaaagcagtttctct

SEQ ID NO: 104565 - DNA, 25 bp, probe
caatcggagacaaaagcagtttctc

SEQ ID NO: 104566 - DNA, 25 bp, probe
gaatatggcattctctcagtccaac

SEQ ID NO: 104567 - DNA, 25 bp, probe
tgaatatggcattctctcagtccaa

SEQ ID NO: 104568 - DNA, 25 bp, probe
gtgaatatggcattctctcagtcca

SEQ ID NO: 104569 - DNA, 25 bp, probe
aatatggcattctctcagtccaacc

SEQ ID NO: 104570 - DNA, 25 bp, probe
cgtgaatatggcattctctcagtcc

SEQ ID NO: 104571 - DNA, 25 bp, probe
acgtgaatatggcattctctcagtc

SEQ ID NO: 104572 - DNA, 25 bp, probe
atatggcattctctcagtccaaccc

SEQ ID NO: 104573 - DNA, 25 bp, probe
tatggcattctctcagtccaaccct

SEQ ID NO: 104574 - DNA, 25 bp, probe
aacgatagtaattcacagtcctcag

SEQ ID NO: 104575 - DNA, 25 bp, probe
acgatagtaattcacagtcctcaga

SEQ ID NO: 104576 - DNA, 25 bp, probe
atagtaattcacagtcctcagaagc

SEQ ID NO: 104577 - DNA, 25 bp, probe
cgatagtaattcacagtcctcagaa

SEQ ID NO: 104578 - DNA, 25 bp, probe
taacgatagtaattcacagtcctca

SEQ ID NO: 104579 - DNA, 25 bp, probe
taattcacagtcctcagaagcctat

SEQ ID NO: 104580 - DNA, 25 bp, probe
aatcagagtatcattgtcttcctcc

SEQ ID NO: 104581 - DNA, 25 bp, probe
tgaatcagagtatcattgtcttcct

SEQ ID NO: 104582 - DNA, 25 bp, probe
cagagtatcattgtcttcctccaag

SEQ ID NO: 104583 - DNA, 25 bp, probe
atcagagtatcattgtcttcctcca

SEQ ID NO: 104584 - DNA, 25 bp, probe
gatagtaattcacagtcctcagaag

SEQ ID NO: 104585 - DNA, 25 bp, probe
tcagagtatcattgtcttcctccaa

SEQ ID NO: 104586 - DNA, 25 bp, probe
ttaacgatagtaattcacagtcctc

SEQ ID NO: 104587 - DNA, 25 bp, probe
ttgaatcagagtatcattgtcttcc

SEQ ID NO: 104588 - DNA, 25 bp, probe
aattcacagtcctcagaagcctatt

SEQ ID NO: 104589 - DNA, 25 bp, probe
gaatcagagtatcattgtcttcctc

SEQ ID NO: 104590 - DNA, 25 bp, probe
gtaattcacagtcctcagaagccta

SEQ ID NO: 104591 - DNA, 25 bp, probe
tagtaattcacagtcctcagaagcc

SEQ ID NO: 104592 - DNA, 25 bp, probe
gaggataccaacttgatagcagagg

SEQ ID NO: 104593 - DNA, 25 bp, probe
ggaggataccaacttgatagcagag

SEQ ID NO: 104594 - DNA, 25 bp, probe
aggtatcctaactatgttggaggta

SEQ ID NO: 104595 - DNA, 25 bp, probe
caggaggataccaacttgatagcag

SEQ ID NO: 104596 - DNA, 25 bp, probe
aggaggataccaacttgatagcaga

SEQ ID NO: 104597 - DNA, 25 bp, probe
agagtatcattgtcttcctccaagg

SEQ ID NO: 104598 - DNA, 25 bp, probe
ggtatcctaactatgttggaggtat

SEQ ID NO: 104599 - DNA, 25 bp, probe
tcttgaatcagagtatcattgtctt

SEQ ID NO: 104600 - DNA, 25 bp, probe
cttgaatcagagtatcattgtcttc

SEQ ID NO: 104601 - DNA, 25 bp, probe
atgtttgccattctcataagtgttt

SEQ ID NO: 104602 - DNA, 25 bp, probe
ttgaacttgatctttgtgacttgtg

SEQ ID NO: 104603 - DNA, 25 bp, probe
tttgaacttgatctttgtgacttgt

SEQ ID NO: 104604 - DNA, 25 bp, probe
agtaattcacagtcctcagaagcct

SEQ ID NO: 104605 - DNA, 25 bp, probe
agtgttagagaggcttacaaatgtt

SEQ ID NO: 104606 - DNA, 25 bp, probe
gtgttagagaggcttacaaatgttt

SEQ ID NO: 104607 - DNA, 25 bp, probe
attcacagtcctcagaagcctattt

SEQ ID NO: 104608 - DNA, 25 bp, probe
ttcctttgttgattcaattcctgtg

SEQ ID NO: 104609 - DNA, 25 bp, probe
tagtgttagagaggcttacaaatgt

SEQ ID NO: 104610 - DNA, 25 bp, probe
tttcctttgttgattcaattcctgt

SEQ ID NO: 104611 - DNA, 25 bp, probe
gttagagaggcttacaaatgtttgc

SEQ ID NO: 104612 - DNA, 25 bp, probe
ttgccaggaggataccaacttgata

SEQ ID NO: 104613 - DNA, 25 bp, probe
cctttgttgattcaattcctgtgat

SEQ ID NO: 104614 - DNA, 25 bp, probe
ccaggaggataccaacttgatagca

SEQ ID NO: 104615 - DNA, 25 bp, probe
tgccaggaggataccaacttgatag

SEQ ID NO: 104616 - DNA, 25 bp, probe
gtatcctaactatgttggaggtatt

SEQ ID NO: 104617 - DNA, 25 bp, probe
taggtatcctaactatgttggaggt

SEQ ID NO: 104618 - DNA, 25 bp, probe
atggacaattctatgacctcaaaga

SEQ ID NO: 104619 - DNA, 25 bp, probe
tggacaattctatgacctcaaagag

SEQ ID NO: 104620 - DNA, 25 bp, probe
aggtctatggcttctacgatgagtg

SEQ ID NO: 104621 - DNA, 25 bp, probe
caggtctatggcttctacgatgagt

SEQ ID NO: 104622 - DNA, 25 bp, probe
catggacaattctatgacctcaaag

SEQ ID NO: 104623 - DNA, 25 bp, probe
ggacaattctatgacctcaaagagc

SEQ ID NO: 104624 - DNA, 25 bp, probe
aattctatgacctcaaagagctgtt

SEQ ID NO: 104625 - DNA, 25 bp, probe
attctatgacctcaaagagctgttc

SEQ ID NO: 104626 - DNA, 25 bp, probe
gacaattctatgacctcaaagagct

SEQ ID NO: 104627 - DNA, 25 bp, probe
cttgaaccatgaagtttccaataat

SEQ ID NO: 104628 - DNA, 25 bp, probe
caattctatgacctcaaagagctgt

SEQ ID NO: 104629 - DNA, 25 bp, probe
acaattctatgacctcaaagagctg

SEQ ID NO: 104630 - DNA, 25 bp, probe
tgaaccatgaagtttccaataattt

SEQ ID NO: 104631 - DNA, 25 bp, probe
ttgaaccatgaagtttccaataatt

SEQ ID NO: 104632 - DNA, 25 bp, probe
ttctatgacctcaaagagctgttca

SEQ ID NO: 104633 - DNA, 25 bp, probe
tatgacctcaaagagctgttcagag

SEQ ID NO: 104634 - DNA, 25 bp, probe
ctatgacctcaaagagctgttcaga

SEQ ID NO: 104635 - DNA, 25 bp, probe
tctatgacctcaaagagctgttcag

SEQ ID NO: 104636 - DNA, 25 bp, probe
gcaggtctatggcttctacgatgag

SEQ ID NO: 104637 - DNA, 25 bp, probe
ctatcctgatcgcatcacactgatc

SEQ ID NO: 104638 - DNA, 25 bp, probe
ctactgcactgagatctttgactac

SEQ ID NO: 104639 - DNA, 25 bp, probe
cacttgaaccatgaagtttccaata

SEQ ID NO: 104640 - DNA, 25 bp, probe
ttaaggttcgctatcctgatcgcat

SEQ ID NO: 104641 - DNA, 25 bp, probe
acttgaaccatgaagtttccaataa

SEQ ID NO: 104642 - DNA, 25 bp, probe
gagagatcttggtagaggagagcaa

SEQ ID NO: 104643 - DNA, 25 bp, probe
ggtctatggcttctacgatgagtgc

SEQ ID NO: 104644 - DNA, 25 bp, probe
gacctcaaagagctgttcagagtag

SEQ ID NO: 104645 - DNA, 25 bp, probe
cacttaaggttcgctatcctgatcg

SEQ ID NO: 104646 - DNA, 25 bp, probe
agagatcttggtagaggagagcaac

SEQ ID NO: 104647 - DNA, 25 bp, probe
ctcaaagagctgttcagagtaggtg

SEQ ID NO: 104648 - DNA, 25 bp, probe
tactgcactgagatctttgactacc

SEQ ID NO: 104649 - DNA, 25 bp, probe
cagagagatcttggtagaggagagc

SEQ ID NO: 104650 - DNA, 25 bp, probe
gatcacgcaggtctatggcttctac

SEQ ID NO: 104651 - DNA, 25 bp, probe
ccacttgaaccatgaagtttccaat

SEQ ID NO: 104652 - DNA, 25 bp, probe
cctgagaccaactacctcttcatgg

SEQ ID NO: 104653 - DNA, 25 bp, probe
taaggttcgctatcctgatcgcatc

SEQ ID NO: 104654 - DNA, 25 bp, probe
gcacttaaggttcgctatcctgatc

SEQ ID NO: 104655 - DNA, 25 bp, probe
gctactgcactgagatctttgacta

SEQ ID NO: 104656 - DNA, 25 bp, probe
ccagagagatcttggtagaggagag

SEQ ID NO: 104657 - DNA, 25 bp, probe
taaggccagagagatcttggtagag

SEQ ID NO: 104658 - DNA, 25 bp, probe
ctaaggccagagagatcttggtaga

SEQ ID NO: 104659 - DNA, 25 bp, probe
tgacctcaaagagctgttcagagta

SEQ ID NO: 104660 - DNA, 25 bp, probe
ctcatcaaggagagcgaagtcaagg

SEQ ID NO: 104661 - DNA, 25 bp, probe
agagagatcttggtagaggagagca

SEQ ID NO: 104662 - DNA, 25 bp, probe
caatgacaggacctggaatgtactg

SEQ ID NO: 104663 - DNA, 25 bp, probe
aatgacaggacctggaatgtactgg

SEQ ID NO: 104664 - DNA, 25 bp, probe
gtcgtcacggttaaagagaaatggg

SEQ ID NO: 104665 - DNA, 25 bp, probe
gtcacggttaaagagaaatgggctc

SEQ ID NO: 104666 - DNA, 25 bp, probe
ccaatgacaggacctggaatgtact

SEQ ID NO: 104667 - DNA, 25 bp, probe
ggatttgcactaatgttcctctccc

SEQ ID NO: 104668 - DNA, 25 bp, probe
taggatttgcactaatgttcctctc

SEQ ID NO: 104669 - DNA, 25 bp, probe
ctaggatttgcactaatgttcctct

SEQ ID NO: 104670 - DNA, 25 bp, probe
gctaggatttgcactaatgttcctc

SEQ ID NO: 104671 - DNA, 25 bp, probe
tcacggttaaagagaaatgggctcg

SEQ ID NO: 104672 - DNA, 25 bp, probe
cgtcgtcacggttaaagagaaatgg

SEQ ID NO: 104673 - DNA, 25 bp, probe
gatttgcactaatgttcctctcccc

SEQ ID NO: 104674 - DNA, 25 bp, probe
aggatttgcactaatgttcctctcc

SEQ ID NO: 104675 - DNA, 25 bp, probe
gcgtcgtcacggttaaagagaaatg

SEQ ID NO: 104676 - DNA, 25 bp, probe
cccaatgacaggacctggaatgtac

SEQ ID NO: 104677 - DNA, 25 bp, probe
cgctaggatttgcactaatgttcct

SEQ ID NO: 104678 - DNA, 25 bp, probe
ggcgctaggatttgcactaatgttc

SEQ ID NO: 104679 - DNA, 25 bp, probe
acggttaaagagaaatgggctcgtc

SEQ ID NO: 104680 - DNA, 25 bp, probe
atttgcactaatgttcctctccccg

SEQ ID NO: 104681 - DNA, 25 bp, probe
gcgctaggatttgcactaatgttcc

SEQ ID NO: 104682 - DNA, 25 bp, probe
ctatctacctggaatctctctctca

SEQ ID NO: 104683 - DNA, 25 bp, probe
tatgctatctacctggaatctctct

SEQ ID NO: 104684 - DNA, 25 bp, probe
tatctacctggaatctctctctcaa

SEQ ID NO: 104685 - DNA, 25 bp, probe
atgctatctacctggaatctctctc

SEQ ID NO: 104686 - DNA, 25 bp, probe
atctacctggaatctctctctcaac

SEQ ID NO: 104687 - DNA, 25 bp, probe
gctatctacctggaatctctctctc

SEQ ID NO: 104688 - DNA, 25 bp, probe
ctacctggaatctctctctcaacaa

SEQ ID NO: 104689 - DNA, 25 bp, probe
atatgctatctacctggaatctctc

SEQ ID NO: 104690 - DNA, 25 bp, probe
tgctatctacctggaatctctctct

SEQ ID NO: 104691 - DNA, 25 bp, probe
ttgtagcaactctgaagtatcaaga

SEQ ID NO: 104692 - DNA, 25 bp, probe
gaagacttgtcagaccatcaatctc

SEQ ID NO: 104693 - DNA, 25 bp, probe
tgccacacagaatgtatgtatgtaa

SEQ ID NO: 104694 - DNA, 25 bp, probe
tctacctggaatctctctctcaaca

SEQ ID NO: 104695 - DNA, 25 bp, probe
gatgtagaagaagacagacttgctt

SEQ ID NO: 104696 - DNA, 25 bp, probe
gccacacagaatgtatgtatgtaat

SEQ ID NO: 104697 - DNA, 25 bp, probe
gacttgtcagaccatcaatctcttg

SEQ ID NO: 104698 - DNA, 25 bp, probe
agacttgtcagaccatcaatctctt

SEQ ID NO: 104699 - DNA, 25 bp, probe
aagacttgtcagaccatcaatctct

SEQ ID NO: 104700 - DNA, 25 bp, probe
tgatatgctatctacctggaatctc

SEQ ID NO: 104701 - DNA, 25 bp, probe
ctggatgtagaagaagacagacttg

SEQ ID NO: 104702 - DNA, 25 bp, probe
tgccttcaggaatgatataatctgt

SEQ ID NO: 104703 - DNA, 25 bp, probe
ctgccacacagaatgtatgtatgta

SEQ ID NO: 104704 - DNA, 25 bp, probe
gatatgctatctacctggaatctct

SEQ ID NO: 104705 - DNA, 25 bp, probe
gccttcaggaatgatataatctgtc

SEQ ID NO: 104706 - DNA, 25 bp, probe
tgaagacttgtcagaccatcaatct

SEQ ID NO: 104707 - DNA, 25 bp, probe
ttgatatgctatctacctggaatct

SEQ ID NO: 104708 - DNA, 25 bp, probe
cttcgtatggatagaggtggaatgg

SEQ ID NO: 104709 - DNA, 25 bp, probe
tcattgaagacttgtcagaccatca

SEQ ID NO: 104710 - DNA, 25 bp, probe
aggtatatgccttcaggaatgatat

SEQ ID NO: 104711 - DNA, 25 bp, probe
atgccttcaggaatgatataatctg

SEQ ID NO: 104712 - DNA, 25 bp, probe
cattcgtattatgtgttagatgctt

SEQ ID NO: 104713 - DNA, 25 bp, probe
gctccagaactctatccactgtatt

SEQ ID NO: 104714 - DNA, 25 bp, probe
gtcattgaagacttgtcagaccatc

SEQ ID NO: 104715 - DNA, 25 bp, probe
ttccagctccttgtgtatatgaatg

SEQ ID NO: 104716 - DNA, 25 bp, probe
ggatgtagaagaagacagacttgct

SEQ ID NO: 104717 - DNA, 25 bp, probe
gagctgctgaagacattcgtattat

SEQ ID NO: 104718 - DNA, 25 bp, probe
tcagttaccagaatcttgctgctaa

SEQ ID NO: 104719 - DNA, 25 bp, probe
tgctattacctttctcagttaccag

SEQ ID NO: 104720 - DNA, 25 bp, probe
agtgctattacctttctcagttacc

SEQ ID NO: 104721 - DNA, 25 bp, probe
gtgctattacctttctcagttacca

SEQ ID NO: 104722 - DNA, 25 bp, probe
ccttcaggaatgatataatctgtcc

SEQ ID NO: 104723 - DNA, 25 bp, probe
agctgctgaagacattcgtattatg

SEQ ID NO: 104724 - DNA, 25 bp, probe
gctggatgtagaagaagacagactt

SEQ ID NO: 104725 - DNA, 25 bp, probe
actgggcaacatatttaagatttcc

SEQ ID NO: 104726 - DNA, 25 bp, probe
attctcaagagcacacaggattaag

SEQ ID NO: 104727 - DNA, 25 bp, probe
cattctcaagagcacacaggattaa

SEQ ID NO: 104728 - DNA, 25 bp, probe
tgttcacacttcttcagtaatgtct

SEQ ID NO: 104729 - DNA, 25 bp, probe
gttcacacttcttcagtaatgtctg

SEQ ID NO: 104730 - DNA, 25 bp, probe
acattctcaagagcacacaggatta

SEQ ID NO: 104731 - DNA, 25 bp, probe
ccaagaactacgtgaagattaagct

SEQ ID NO: 104732 - DNA, 25 bp, probe
tccaagaactacgtgaagattaagc

SEQ ID NO: 104733 - DNA, 25 bp, probe
gtgttcacacttcttcagtaatgtc

SEQ ID NO: 104734 - DNA, 25 bp, probe
ttggtgttcacacttcttcagtaat

SEQ ID NO: 104735 - DNA, 25 bp, probe
ttccaagaactacgtgaagattaag

SEQ ID NO: 104736 - DNA, 25 bp, probe
ggtgttcacacttcttcagtaatgt

SEQ ID NO: 104737 - DNA, 25 bp, probe
tggtgttcacacttcttcagtaatg

SEQ ID NO: 104738 - DNA, 25 bp, probe
cacattctcaagagcacacaggatt

SEQ ID NO: 104739 - DNA, 25 bp, probe
ctttcaccagccatgtcttaaatac

SEQ ID NO: 104740 - DNA, 25 bp, probe
acgcatttggataccttgtgatttc

SEQ ID NO: 104741 - DNA, 25 bp, probe
agtaatgtctgaacttgaaagccac

SEQ ID NO: 104742 - DNA, 25 bp, probe
tttactgtcccaaatgtgagattgc

SEQ ID NO: 104743 - DNA, 25 bp, probe
aatgaagaggccaataatatgaagg

SEQ ID NO: 104744 - DNA, 25 bp, probe
gtaatgtctgaacttgaaagccaca

SEQ ID NO: 104745 - DNA, 25 bp, probe
taatgtctgaacttgaaagccacag

SEQ ID NO: 104746 - DNA, 25 bp, probe
cagtaatgtctgaacttgaaagcca

SEQ ID NO: 104747 - DNA, 25 bp, probe
ctgtggtggatttcacttacaagaa

SEQ ID NO: 104748 - DNA, 25 bp, probe
tttcaccagccatgtcttaaataca

SEQ ID NO: 104749 - DNA, 25 bp, probe
aaagtctatcaaacagcaagcactg

SEQ ID NO: 104750 - DNA, 25 bp, probe
tgatttccaagaactacgtgaagat

SEQ ID NO: 104751 - DNA, 25 bp, probe
aatacattaagacaacacatttggt

SEQ ID NO: 104752 - DNA, 25 bp, probe
atacattaagacaacacatttggtg

SEQ ID NO: 104753 - DNA, 25 bp, probe
gatttccaagaactacgtgaagatt

SEQ ID NO: 104754 - DNA, 25 bp, probe
atttggtgttcacacttcttcagta

SEQ ID NO: 104755 - DNA, 25 bp, probe
tttggtgttcacacttcttcagtaa

SEQ ID NO: 104756 - DNA, 25 bp, probe
gtgatttccaagaactacgtgaaga

SEQ ID NO: 104757 - DNA, 25 bp, probe
tgtggtggatttcacttacaagaaa

SEQ ID NO: 104758 - DNA, 25 bp, probe
ttgtgatttccaagaactacgtgaa

SEQ ID NO: 104759 - DNA, 25 bp, probe
tgtgatttccaagaactacgtgaag

SEQ ID NO: 104760 - DNA, 25 bp, probe
cacgcatttggataccttgtgattt

SEQ ID NO: 104761 - DNA, 25 bp, probe
ttcacacttcttcagtaatgtctga

SEQ ID NO: 104762 - DNA, 25 bp, probe
tttccaagaactacgtgaagattaa

SEQ ID NO: 104763 - DNA, 25 bp, probe
ctatcaaacagcaagcactgacaag

SEQ ID NO: 104764 - DNA, 25 bp, probe
aagtctatcaaacagcaagcactga

SEQ ID NO: 104765 - DNA, 25 bp, probe
ttatggcaaaagtctatcaaacagc

SEQ ID NO: 104766 - DNA, 25 bp, probe
tgtgtttgattttgtttgatttccc

SEQ ID NO: 104767 - DNA, 25 bp, probe
caagaactacgtgaagattaagctt

SEQ ID NO: 104768 - DNA, 25 bp, probe
ttgattttgtttgatttccctctgc

SEQ ID NO: 104769 - DNA, 25 bp, probe
atttccaagaactacgtgaagatta

SEQ ID NO: 104770 - DNA, 25 bp, probe
taatcgctattgttcatgtatcgtg

SEQ ID NO: 104771 - DNA, 25 bp, probe
ttaatcgctattgttcatgtatcgt

SEQ ID NO: 104772 - DNA, 25 bp, probe
gtgctaggatcattggattcagttc

SEQ ID NO: 104773 - DNA, 25 bp, probe
tattgttcatgtatcgtgctggaag

SEQ ID NO: 104774 - DNA, 25 bp, probe
ctattgttcatgtatcgtgctggaa

SEQ ID NO: 104775 - DNA, 25 bp, probe
agtgctaggatcattggattcagtt

SEQ ID NO: 104776 - DNA, 25 bp, probe
ttcagtgctaggatcattggattca

SEQ ID NO: 104777 - DNA, 25 bp, probe
ctggaagagctacatagtcatcatt

SEQ ID NO: 104778 - DNA, 25 bp, probe
taaccaggactatgtagaagtagaa

SEQ ID NO: 104779 - DNA, 25 bp, probe
ttaaccaggactatgtagaagtaga

SEQ ID NO: 104780 - DNA, 25 bp, probe
ttgtgagcactaactattggcagaa

SEQ ID NO: 104781 - DNA, 25 bp, probe
tctggaagagctacatagtcatcat

SEQ ID NO: 104782 - DNA, 25 bp, probe
tcagtgctaggatcattggattcag

SEQ ID NO: 104783 - DNA, 25 bp, probe
tggaagagctacatagtcatcatta

SEQ ID NO: 104784 - DNA, 25 bp, probe
taccaggtatgatctgacttcagtt

SEQ ID NO: 104785 - DNA, 25 bp, probe
ttaccaggtatgatctgacttcagt

SEQ ID NO: 104786 - DNA, 25 bp, probe
aatcgctattgttcatgtatcgtgc

SEQ ID NO: 104787 - DNA, 25 bp, probe
ccacagtattaatcgctattgttca

SEQ ID NO: 104788 - DNA, 25 bp, probe
accacagtattaatcgctattgttc

SEQ ID NO: 104789 - DNA, 25 bp, probe
cagtgctaggatcattggattcagt

SEQ ID NO: 104790 - DNA, 25 bp, probe
caggtatgatctgacttcagttgtg

SEQ ID NO: 104791 - DNA, 25 bp, probe
ggaagagctacatagtcatcattag

SEQ ID NO: 104792 - DNA, 25 bp, probe
gaggatgaattagcaagagggtatt

SEQ ID NO: 104793 - DNA, 25 bp, probe
tagaggatgaattagcaagagggta

SEQ ID NO: 104794 - DNA, 25 bp, probe
aggatgaattagcaagagggtattt

SEQ ID NO: 104795 - DNA, 25 bp, probe
gtaccacagtattaatcgctattgt

SEQ ID NO: 104796 - DNA, 25 bp, probe
tgtaccacagtattaatcgctattg

SEQ ID NO: 104797 - DNA, 25 bp, probe
agaggatgaattagcaagagggtat

SEQ ID NO: 104798 - DNA, 25 bp, probe
tttgtgttgcttgttggatgaattt

SEQ ID NO: 104799 - DNA, 25 bp, probe
attaatcgctattgttcatgtatcg

SEQ ID NO: 104800 - DNA, 25 bp, probe
ttgtgttgcttgttggatgaatttg

SEQ ID NO: 104801 - DNA, 25 bp, probe
cagtattaatcgctattgttcatgt

SEQ ID NO: 104802 - DNA, 25 bp, probe
ctttctcaaatgggtacaatgttcc

SEQ ID NO: 104803 - DNA, 25 bp, probe
cctttctcaaatgggtacaatgttc

SEQ ID NO: 104804 - DNA, 25 bp, probe
atcgctattgttcatgtatcgtgct

SEQ ID NO: 104805 - DNA, 25 bp, probe
atttcagtgctaggatcattggatt

SEQ ID NO: 104806 - DNA, 25 bp, probe
aatttcagtgctaggatcattggat

SEQ ID NO: 104807 - DNA, 25 bp, probe
accaggactatgtagaagtagaaag

SEQ ID NO: 104808 - DNA, 25 bp, probe
ccaggtatgatctgacttcagttgt

SEQ ID NO: 104809 - DNA, 25 bp, probe
accaggtatgatctgacttcagttg

SEQ ID NO: 104810 - DNA, 25 bp, probe
gaagagctacatagtcatcattagt

SEQ ID NO: 104811 - DNA, 25 bp, probe
ctagaggatgaattagcaagagggt

SEQ ID NO: 104812 - DNA, 25 bp, probe
taccacagtattaatcgctattgtt

SEQ ID NO: 104813 - DNA, 25 bp, probe
ttgtaccacagtattaatcgctatt

SEQ ID NO: 104814 - DNA, 25 bp, probe
cacagcattcctccatcttagatag

SEQ ID NO: 104815 - DNA, 25 bp, probe
acagcattcctccatcttagataga

SEQ ID NO: 104816 - DNA, 25 bp, probe
ccacagcattcctccatcttagata

SEQ ID NO: 104817 - DNA, 25 bp, probe
tgcctacttgtaatttctaactcct

SEQ ID NO: 104818 - DNA, 25 bp, probe
ataggacaattcacttcattgacca

SEQ ID NO: 104819 - DNA, 25 bp, probe
cagcattcctccatcttagatagat

SEQ ID NO: 104820 - DNA, 25 bp, probe
cgtagagatgattcggatttgacaa

SEQ ID NO: 104821 - DNA, 25 bp, probe
taggacaattcacttcattgaccag

SEQ ID NO: 104822 - DNA, 25 bp, probe
aataggacaattcacttcattgacc

SEQ ID NO: 104823 - DNA, 25 bp, probe
cccagaaataggacaattcacttca

SEQ ID NO: 104824 - DNA, 25 bp, probe
aataacatttgagtatccgattcgc

SEQ ID NO: 104825 - DNA, 25 bp, probe
ccagaaataggacaattcacttcat

SEQ ID NO: 104826 - DNA, 25 bp, probe
atgcctacttgtaatttctaactcc

SEQ ID NO: 104827 - DNA, 25 bp, probe
taagcacgtagagatgattcggatt

SEQ ID NO: 104828 - DNA, 25 bp, probe
gacaattcacttcattgaccaggat

SEQ ID NO: 104829 - DNA, 25 bp, probe
gcctacttgtaatttctaactcctt

SEQ ID NO: 104830 - DNA, 25 bp, probe
gtagagatgattcggatttgacaaa

SEQ ID NO: 104831 - DNA, 25 bp, probe
acaattcacttcattgaccaggatg

SEQ ID NO: 104832 - DNA, 25 bp, probe
aattcacttcattgaccaggatgat

SEQ ID NO: 104833 - DNA, 25 bp, probe
ataacatttgagtatccgattcgcc

SEQ ID NO: 104834 - DNA, 25 bp, probe
ctaagcacgtagagatgattcggat

SEQ ID NO: 104835 - DNA, 25 bp, probe
attcacttcattgaccaggatgatc

SEQ ID NO: 104836 - DNA, 25 bp, probe
caattcacttcattgaccaggatga

SEQ ID NO: 104837 - DNA, 25 bp, probe
catggtattgtaatgaatatctgct

SEQ ID NO: 104838 - DNA, 25 bp, probe
acatggtattgtaatgaatatctgc

SEQ ID NO: 104839 - DNA, 25 bp, probe
tgcttatgtctctacatggtattgt

SEQ ID NO: 104840 - DNA, 25 bp, probe
aacctaagcacgtagagatgattcg

SEQ ID NO: 104841 - DNA, 25 bp, probe
tttgacatcatgtaaacctaagcac

SEQ ID NO: 104842 - DNA, 25 bp, probe
atggtattgtaatgaatatctgctt

SEQ ID NO: 104843 - DNA, 25 bp, probe
atcttagatagatggtactctccaa

SEQ ID NO: 104844 - DNA, 25 bp, probe
cagaaataggacaattcacttcatt

SEQ ID NO: 104845 - DNA, 25 bp, probe
ttgcttatgtctctacatggtattg

SEQ ID NO: 104846 - DNA, 25 bp, probe
gtaaacctaagcacgtagagatgat

SEQ ID NO: 104847 - DNA, 25 bp, probe
taaacctaagcacgtagagatgatt

SEQ ID NO: 104848 - DNA, 25 bp, probe
atgtaaacctaagcacgtagagatg

SEQ ID NO: 104849 - DNA, 25 bp, probe
catgtaaacctaagcacgtagagat

SEQ ID NO: 104850 - DNA, 25 bp, probe
atcatgtaaacctaagcacgtagag

SEQ ID NO: 104851 - DNA, 25 bp, probe
taacatttgagtatccgattcgcca

SEQ ID NO: 104852 - DNA, 25 bp, probe
aaacctaagcacgtagagatgattc

SEQ ID NO: 104853 - DNA, 25 bp, probe
catcatgtaaacctaagcacgtaga

SEQ ID NO: 104854 - DNA, 25 bp, probe
tagatagatggtactctccaaaggc

SEQ ID NO: 104855 - DNA, 25 bp, probe
ttgacatcatgtaaacctaagcacg

SEQ ID NO: 104856 - DNA, 25 bp, probe
tgtctctacatggtattgtaatgaa

SEQ ID NO: 104857 - DNA, 25 bp, probe
aaataacatttgagtatccgattcg

SEQ ID NO: 104858 - DNA, 25 bp, probe
agactatgattggtgtgaagatgat

SEQ ID NO: 104859 - DNA, 25 bp, probe
tagactatgattggtgtgaagatga

SEQ ID NO: 104860 - DNA, 25 bp, probe
gactatgattggtgtgaagatgatt

SEQ ID NO: 104861 - DNA, 25 bp, probe
caacaggaacagacaagttaatgac

SEQ ID NO: 104862 - DNA, 25 bp, probe
ttcaacaggaacagacaagttaatg

SEQ ID NO: 104863 - DNA, 25 bp, probe
aacaggaacagacaagttaatgaca

SEQ ID NO: 104864 - DNA, 25 bp, probe
aagactccagttaataagaaccagc

SEQ ID NO: 104865 - DNA, 25 bp, probe
aataattggagtctggaagatgtga

SEQ ID NO: 104866 - DNA, 25 bp, probe
actccagttaataagaaccagcata

SEQ ID NO: 104867 - DNA, 25 bp, probe
gactccagttaataagaaccagcat

SEQ ID NO: 104868 - DNA, 25 bp, probe
acaggaacagacaagttaatgacag

SEQ ID NO: 104869 - DNA, 25 bp, probe
tcaacaggaacagacaagttaatga

SEQ ID NO: 104870 - DNA, 25 bp, probe
aattcaacaggaacagacaagttaa

SEQ ID NO: 104871 - DNA, 25 bp, probe
attcaacaggaacagacaagttaat

SEQ ID NO: 104872 - DNA, 25 bp, probe
ccatctgtcattatgttactgtctt

SEQ ID NO: 104873 - DNA, 25 bp, probe
ccagttaataagaaccagcataaga

SEQ ID NO: 104874 - DNA, 25 bp, probe
tccagttaataagaaccagcataag

SEQ ID NO: 104875 - DNA, 25 bp, probe
ctccagttaataagaaccagcataa

SEQ ID NO: 104876 - DNA, 25 bp, probe
agactccagttaataagaaccagca

SEQ ID NO: 104877 - DNA, 25 bp, probe
caggaacagacaagttaatgacagg

SEQ ID NO: 104878 - DNA, 25 bp, probe
atagactatgattggtgtgaagatg

SEQ ID NO: 104879 - DNA, 25 bp, probe
ataattggagtctggaagatgtgac

SEQ ID NO: 104880 - DNA, 25 bp, probe
ggaacagacaagttaatgacaggtg

SEQ ID NO: 104881 - DNA, 25 bp, probe
aggaacagacaagttaatgacaggt

SEQ ID NO: 104882 - DNA, 25 bp, probe
gaacagacaagttaatgacaggtgt

SEQ ID NO: 104883 - DNA, 25 bp, probe
aatagactatgattggtgtgaagat

SEQ ID NO: 104884 - DNA, 25 bp, probe
agttaataagaaccagcataagaga

SEQ ID NO: 104885 - DNA, 25 bp, probe
cagttaataagaaccagcataagag

SEQ ID NO: 104886 - DNA, 25 bp, probe
gttggataaggttatcactgtgctc

SEQ ID NO: 104887 - DNA, 25 bp, probe
attagtgaatccagatcaactgttg

SEQ ID NO: 104888 - DNA, 25 bp, probe
taataagaaccagcataagagagaa

SEQ ID NO: 104889 - DNA, 25 bp, probe
tctaaatcaagcccatctgtcatta

SEQ ID NO: 104890 - DNA, 25 bp, probe
atctaaatcaagcccatctgtcatt

SEQ ID NO: 104891 - DNA, 25 bp, probe
aatctaaatcaagcccatctgtcat

SEQ ID NO: 104892 - DNA, 25 bp, probe
ttaataagaaccagcataagagaga

SEQ ID NO: 104893 - DNA, 25 bp, probe
agattagtgaatccagatcaactgt

SEQ ID NO: 104894 - DNA, 25 bp, probe
taattggagtctggaagatgtgacc

SEQ ID NO: 104895 - DNA, 25 bp, probe
agccaaagactccagttaataagaa

SEQ ID NO: 104896 - DNA, 25 bp, probe
gaatctaaatcaagcccatctgtca

SEQ ID NO: 104897 - DNA, 25 bp, probe
agaaccagcataagagagaaatact

SEQ ID NO: 104898 - DNA, 25 bp, probe
gtgcctgaaagaaactccaattaaa

SEQ ID NO: 104899 - DNA, 25 bp, probe
gttaataagaaccagcataagagag

SEQ ID NO: 104900 - DNA, 25 bp, probe
cccatctgtcattatgttactgtct

SEQ ID NO: 104901 - DNA, 25 bp, probe
atcaagcccatctgtcattatgtta

SEQ ID NO: 104902 - DNA, 25 bp, probe
ccatctacatcatcacggagttcat

SEQ ID NO: 104903 - DNA, 25 bp, probe
catctacatcatcacggagttcatg

SEQ ID NO: 104904 - DNA, 25 bp, probe
ggagataccgtgaaacattacaaga

SEQ ID NO: 104905 - DNA, 25 bp, probe
gagataccgtgaaacattacaagat

SEQ ID NO: 104906 - DNA, 25 bp, probe
atctacatcatcacggagttcatgg

SEQ ID NO: 104907 - DNA, 25 bp, probe
gggagataccgtgaaacattacaag

SEQ ID NO: 104908 - DNA, 25 bp, probe
gataccgtgaaacattacaagatcc

SEQ ID NO: 104909 - DNA, 25 bp, probe
agggagataccgtgaaacattacaa

SEQ ID NO: 104910 - DNA, 25 bp, probe
agataccgtgaaacattacaagatc

SEQ ID NO: 104911 - DNA, 25 bp, probe
ataccgtgaaacattacaagatccg

SEQ ID NO: 104912 - DNA, 25 bp, probe
tgtgatttggaagggaaactttcaa

SEQ ID NO: 104913 - DNA, 25 bp, probe
cagggagataccgtgaaacattaca

SEQ ID NO: 104914 - DNA, 25 bp, probe
cccaagttgatatttctatttcctg

SEQ ID NO: 104915 - DNA, 25 bp, probe
ctgtgatttggaagggaaactttca

SEQ ID NO: 104916 - DNA, 25 bp, probe
tatttctatttcctggaatggttgg

SEQ ID NO: 104917 - DNA, 25 bp, probe
cttcatcgagcagaggaactacatc

SEQ ID NO: 104918 - DNA, 25 bp, probe
tctatttcctggaatggttggattt

SEQ ID NO: 104919 - DNA, 25 bp, probe
ttctatttcctggaatggttggatt

SEQ ID NO: 104920 - DNA, 25 bp, probe
tttctatttcctggaatggttggat

SEQ ID NO: 104921 - DNA, 25 bp, probe
atttctatttcctggaatggttgga

SEQ ID NO: 104922 - DNA, 25 bp, probe
tgcaatccacaatctgacattctca

SEQ ID NO: 104923 - DNA, 25 bp, probe
gctgtgatttggaagggaaactttc

SEQ ID NO: 104924 - DNA, 25 bp, probe
tgatatttctatttcctggaatggt

SEQ ID NO: 104925 - DNA, 25 bp, probe
gagaccactaaaggaagctactctt

SEQ ID NO: 104926 - DNA, 25 bp, probe
cctggaatggttggattttagttac

SEQ ID NO: 104927 - DNA, 25 bp, probe
ggaatggttggattttagttacagc

SEQ ID NO: 104928 - DNA, 25 bp, probe
gtgatttggaagggaaactttcaaa

SEQ ID NO: 104929 - DNA, 25 bp, probe
caagttgatatttctatttcctgga

SEQ ID NO: 104930 - DNA, 25 bp, probe
gtaggttggactggaaaatctcttt

SEQ ID NO: 104931 - DNA, 25 bp, probe
tggaatggttggattttagttacag

SEQ ID NO: 104932 - DNA, 25 bp, probe
ctggaatggttggattttagttaca

SEQ ID NO: 104933 - DNA, 25 bp, probe
gcagggagataccgtgaaacattac

SEQ ID NO: 104934 - DNA, 25 bp, probe
ccaagttgatatttctatttcctgg

SEQ ID NO: 104935 - DNA, 25 bp, probe
atatttctatttcctggaatggttg

SEQ ID NO: 104936 - DNA, 25 bp, probe
caatccacaatctgacattctcagg

SEQ ID NO: 104937 - DNA, 25 bp, probe
ctcattgacttctcagcccagattg

SEQ ID NO: 104938 - DNA, 25 bp, probe
atccacaatctgacattctcaggaa

SEQ ID NO: 104939 - DNA, 25 bp, probe
aatccacaatctgacattctcagga

SEQ ID NO: 104940 - DNA, 25 bp, probe
ccccaagttgatatttctatttcct

SEQ ID NO: 104941 - DNA, 25 bp, probe
cattgccaaaactcattgacttctc

SEQ ID NO: 104942 - DNA, 25 bp, probe
cactaaaggaagctactctttgtcc

SEQ ID NO: 104943 - DNA, 25 bp, probe
ccactaaaggaagctactctttgtc

SEQ ID NO: 104944 - DNA, 25 bp, probe
gaccactaaaggaagctactctttg

SEQ ID NO: 104945 - DNA, 25 bp, probe
agaccactaaaggaagctactcttt

SEQ ID NO: 104946 - DNA, 25 bp, probe
ttgtatctggatctctgttatgtgc

SEQ ID NO: 104947 - DNA, 25 bp, probe
ttattaaccacaatgacgacctgtt

SEQ ID NO: 104948 - DNA, 25 bp, probe
aatgttattaaccacaatgacgacc

SEQ ID NO: 104949 - DNA, 25 bp, probe
atgttattaaccacaatgacgacct

SEQ ID NO: 104950 - DNA, 25 bp, probe
gttattaaccacaatgacgacctgt

SEQ ID NO: 104951 - DNA, 25 bp, probe
tgttattaaccacaatgacgacctg

SEQ ID NO: 104952 - DNA, 25 bp, probe
tgtatctggatctctgttatgtgcc

SEQ ID NO: 104953 - DNA, 25 bp, probe
atactttatgtctttgctcaccctc

SEQ ID NO: 104954 - DNA, 25 bp, probe
gatactttatgtctttgctcaccct

SEQ ID NO: 104955 - DNA, 25 bp, probe
tatctggatctctgttatgtgccat

SEQ ID NO: 104956 - DNA, 25 bp, probe
aaatctaggtttgttactggcttca

SEQ ID NO: 104957 - DNA, 25 bp, probe
gatggttgtattcctcactttgatg

SEQ ID NO: 104958 - DNA, 25 bp, probe
agatggttgtattcctcactttgat

SEQ ID NO: 104959 - DNA, 25 bp, probe
aagatggttgtattcctcactttga

SEQ ID NO: 104960 - DNA, 25 bp, probe
gttgtattcctcactttgatgttgt

SEQ ID NO: 104961 - DNA, 25 bp, probe
ggttgtattcctcactttgatgttg

SEQ ID NO: 104962 - DNA, 25 bp, probe
ctgatactttatgtctttgctcacc

SEQ ID NO: 104963 - DNA, 25 bp, probe
atggttgtattcctcactttgatgt

SEQ ID NO: 104964 - DNA, 25 bp, probe
tactttatgtctttgctcaccctca

SEQ ID NO: 104965 - DNA, 25 bp, probe
tgttcatttgtatctggatctctgt

SEQ ID NO: 104966 - DNA, 25 bp, probe
tggttgtattcctcactttgatgtt

SEQ ID NO: 104967 - DNA, 25 bp, probe
gcaagatgtttgtggaaatgttcat

SEQ ID NO: 104968 - DNA, 25 bp, probe
aaggtgactcacattgttacacatg

SEQ ID NO: 104969 - DNA, 25 bp, probe
tgatactttatgtctttgctcaccc

SEQ ID NO: 104970 - DNA, 25 bp, probe
tgtattcctcactttgatgttgttt

SEQ ID NO: 104971 - DNA, 25 bp, probe
ttgtattcctcactttgatgttgtt

SEQ ID NO: 104972 - DNA, 25 bp, probe
atctggatctctgttatgtgccatt

SEQ ID NO: 104973 - DNA, 25 bp, probe
ctttatgtctttgctcaccctcatc

SEQ ID NO: 104974 - DNA, 25 bp, probe
tctgatactttatgtctttgctcac

SEQ ID NO: 104975 - DNA, 25 bp, probe
gtatctggatctctgttatgtgcca

SEQ ID NO: 104976 - DNA, 25 bp, probe
gttcatttgtatctggatctctgtt

SEQ ID NO: 104977 - DNA, 25 bp, probe
tattaaccacaatgacgacctgttt

SEQ ID NO: 104978 - DNA, 25 bp, probe
caagatgtttgtggaaatgttcatt

SEQ ID NO: 104979 - DNA, 25 bp, probe
atgttcatttgtatctggatctctg

SEQ ID NO: 104980 - DNA, 25 bp, probe
gtgactcacattgttacacatgctt

SEQ ID NO: 104981 - DNA, 25 bp, probe
taggtttgttactggcttcagaaag

SEQ ID NO: 104982 - DNA, 25 bp, probe
tttgtatctggatctctgttatgtg

SEQ ID NO: 104983 - DNA, 25 bp, probe
actttatgtctttgctcaccctcat

SEQ ID NO: 104984 - DNA, 25 bp, probe
aatctaggtttgttactggcttcag

SEQ ID NO: 104985 - DNA, 25 bp, probe
ttctgatactttatgtctttgctca

SEQ ID NO: 104986 - DNA, 25 bp, probe
gaaacaacacagtcactctagcaag

SEQ ID NO: 104987 - DNA, 25 bp, probe
ctaggtttgttactggcttcagaaa

SEQ ID NO: 104988 - DNA, 25 bp, probe
tttgatttaaccaagaagacggctg

SEQ ID NO: 104989 - DNA, 25 bp, probe
gtttctgatactttatgtctttgct

SEQ ID NO: 104990 - DNA, 25 bp, probe
ttccatcttgtagccattcattgta

SEQ ID NO: 104991 - DNA, 25 bp, probe
tgctctattcacagtaacattctct

SEQ ID NO: 104992 - DNA, 25 bp, probe
gtgagaatgagaggaagaagaatgg

SEQ ID NO: 104993 - DNA, 25 bp, probe
gacttccatcttgtagccattcatt

SEQ ID NO: 104994 - DNA, 25 bp, probe
cgtgagaatgagaggaagaagaatg

SEQ ID NO: 104995 - DNA, 25 bp, probe
cttccatcttgtagccattcattgt

SEQ ID NO: 104996 - DNA, 25 bp, probe
acttccatcttgtagccattcattg

SEQ ID NO: 104997 - DNA, 25 bp, probe
atcttgtagccattcattgtacctc

SEQ ID NO: 104998 - DNA, 25 bp, probe
catcttgtagccattcattgtacct

SEQ ID NO: 104999 - DNA, 25 bp, probe
ttaccgtgagaatgagaggaagaag

SEQ ID NO: 105000 - DNA, 25 bp, probe
tccatcttgtagccattcattgtac

SEQ ID NO: 105001 - DNA, 25 bp, probe
ccgtgagaatgagaggaagaagaat

SEQ ID NO: 105002 - DNA, 25 bp, probe
gctctattcacagtaacattctctg

SEQ ID NO: 105003 - DNA, 25 bp, probe
ttgtagccattcattgtacctcaag

SEQ ID NO: 105004 - DNA, 25 bp, probe
cttgtagccattcattgtacctcaa

SEQ ID NO: 105005 - DNA, 25 bp, probe
gtgctctattcacagtaacattctc

SEQ ID NO: 105006 - DNA, 25 bp, probe
tcttgtagccattcattgtacctca

SEQ ID NO: 105007 - DNA, 25 bp, probe
ccatcttgtagccattcattgtacc

SEQ ID NO: 105008 - DNA, 25 bp, probe
taccgtgagaatgagaggaagaaga

SEQ ID NO: 105009 - DNA, 25 bp, probe
atctactgtgagaagtccttggatc

SEQ ID NO: 105010 - DNA, 25 bp, probe
gatctactgtgagaagtccttggat

SEQ ID NO: 105011 - DNA, 25 bp, probe
tgacttccatcttgtagccattcat

SEQ ID NO: 105012 - DNA, 25 bp, probe
ctactgtgagaagtccttggatcaa

SEQ ID NO: 105013 - DNA, 25 bp, probe
ctgatacactcctaccatgcctaag

SEQ ID NO: 105014 - DNA, 25 bp, probe
caatggatcactgatacactcctac

SEQ ID NO: 105015 - DNA, 25 bp, probe
tttagcctcttgggatacattcttc

SEQ ID NO: 105016 - DNA, 25 bp, probe
ctttagcctcttgggatacattctt

SEQ ID NO: 105017 - DNA, 25 bp, probe
atctttagcctcttgggatacattc

SEQ ID NO: 105018 - DNA, 25 bp, probe
aatctttagcctcttgggatacatt

SEQ ID NO: 105019 - DNA, 25 bp, probe
aaatctttagcctcttgggatacat

SEQ ID NO: 105020 - DNA, 25 bp, probe
ctgacttccatcttgtagccattca

SEQ ID NO: 105021 - DNA, 25 bp, probe
tctttagcctcttgggatacattct

SEQ ID NO: 105022 - DNA, 25 bp, probe
ctctctcttgtatttgttaaaggcg

SEQ ID NO: 105023 - DNA, 25 bp, probe
aatggatcactgatacactcctacc

SEQ ID NO: 105024 - DNA, 25 bp, probe
atacattcttccaggcttctccttc

SEQ ID NO: 105025 - DNA, 25 bp, probe
gatacattcttccaggcttctcctt

SEQ ID NO: 105026 - DNA, 25 bp, probe
gaatgagaggaagaagaatgggaac

SEQ ID NO: 105027 - DNA, 25 bp, probe
agaatgagaggaagaagaatgggaa

SEQ ID NO: 105028 - DNA, 25 bp, probe
ctctcttgtatttgttaaaggcgtg

SEQ ID NO: 105029 - DNA, 25 bp, probe
tctctcttgtatttgttaaaggcgt

SEQ ID NO: 105030 - DNA, 25 bp, probe
aatgagaggaagaagaatgggaact

SEQ ID NO: 105031 - DNA, 25 bp, probe
aatttacaggaacctttgctctttc

SEQ ID NO: 105032 - DNA, 25 bp, probe
tcaaatctttagcctcttgggatac

SEQ ID NO: 105033 - DNA, 25 bp, probe
cttgtatttgttaaaggcgtggaag

SEQ ID NO: 105034 - DNA, 25 bp, probe
gacttggagagtggatgatattcag

SEQ ID NO: 105035 - DNA, 25 bp, probe
acttggagagtggatgatattcagg

SEQ ID NO: 105036 - DNA, 25 bp, probe
ggacttggagagtggatgatattca

SEQ ID NO: 105037 - DNA, 25 bp, probe
gttcaggttgacttgtgtccttata

SEQ ID NO: 105038 - DNA, 25 bp, probe
tagttcaggttgacttgtgtcctta

SEQ ID NO: 105039 - DNA, 25 bp, probe
cctaatcactttaccttcctccaaa

SEQ ID NO: 105040 - DNA, 25 bp, probe
ttcaggttgacttgtgtccttataa

SEQ ID NO: 105041 - DNA, 25 bp, probe
agttcaggttgacttgtgtccttat

SEQ ID NO: 105042 - DNA, 25 bp, probe
tcactttaccttcctccaaattacc

SEQ ID NO: 105043 - DNA, 25 bp, probe
ctttaccttcctccaaattacccaa

SEQ ID NO: 105044 - DNA, 25 bp, probe
ttagttcaggttgacttgtgtcctt

SEQ ID NO: 105045 - DNA, 25 bp, probe
agaccctaatcactttaccttcctc

SEQ ID NO: 105046 - DNA, 25 bp, probe
gagaccctaatcactttaccttcct

SEQ ID NO: 105047 - DNA, 25 bp, probe
ctcagctattatgcaacagatcagg

SEQ ID NO: 105048 - DNA, 25 bp, probe
cctcagctattatgcaacagatcag

SEQ ID NO: 105049 - DNA, 25 bp, probe
tttaccttcctccaaattacccaac

SEQ ID NO: 105050 - DNA, 25 bp, probe
cttggagagtggatgatattcaggc

SEQ ID NO: 105051 - DNA, 25 bp, probe
ttgagaccctaatcactttaccttc

SEQ ID NO: 105052 - DNA, 25 bp, probe
ctgagactttgttgagttctttctg

SEQ ID NO: 105053 - DNA, 25 bp, probe
gactgagactttgttgagttctttc

SEQ ID NO: 105054 - DNA, 25 bp, probe
ctaatcactttaccttcctccaaat

SEQ ID NO: 105055 - DNA, 25 bp, probe
actgagactttgttgagttctttct

SEQ ID NO: 105056 - DNA, 25 bp, probe
attaggactgagactttgttgagtt

SEQ ID NO: 105057 - DNA, 25 bp, probe
tcattaggactgagactttgttgag

SEQ ID NO: 105058 - DNA, 25 bp, probe
ttcattaggactgagactttgttga

SEQ ID NO: 105059 - DNA, 25 bp, probe
ccttcctccaaattacccaacatac

SEQ ID NO: 105060 - DNA, 25 bp, probe
cactttaccttcctccaaattaccc

SEQ ID NO: 105061 - DNA, 25 bp, probe
atcactttaccttcctccaaattac

SEQ ID NO: 105062 - DNA, 25 bp, probe
ttaggactgagactttgttgagttc

SEQ ID NO: 105063 - DNA, 25 bp, probe
cttcattaggactgagactttgttg

SEQ ID NO: 105064 - DNA, 25 bp, probe
tttgagaccctaatcactttacctt

SEQ ID NO: 105065 - DNA, 25 bp, probe
cattaggactgagactttgttgagt

SEQ ID NO: 105066 - DNA, 25 bp, probe
gtatttagttcaggttgacttgtgt

SEQ ID NO: 105067 - DNA, 25 bp, probe
tgtatttagttcaggttgacttgtg

SEQ ID NO: 105068 - DNA, 25 bp, probe
ccctaatcactttaccttcctccaa

SEQ ID NO: 105069 - DNA, 25 bp, probe
cccaacatacggtaaacaacatttg

SEQ ID NO: 105070 - DNA, 25 bp, probe
actttaccttcctccaaattaccca

SEQ ID NO: 105071 - DNA, 25 bp, probe
taggactgagactttgttgagttct

SEQ ID NO: 105072 - DNA, 25 bp, probe
gcttcattaggactgagactttgtt

SEQ ID NO: 105073 - DNA, 25 bp, probe
cttcctccaaattacccaacatacg

SEQ ID NO: 105074 - DNA, 25 bp, probe
accttcctccaaattacccaacata

SEQ ID NO: 105075 - DNA, 25 bp, probe
taccttcctccaaattacccaacat

SEQ ID NO: 105076 - DNA, 25 bp, probe
ttggagagtggatgatattcaggct

SEQ ID NO: 105077 - DNA, 25 bp, probe
tgagactttgttgagttctttctgg

SEQ ID NO: 105078 - DNA, 25 bp, probe
tagtcagagattcagtaagtgcctt

SEQ ID NO: 105079 - DNA, 25 bp, probe
ttcagtaagtgccttggaacaatat

SEQ ID NO: 105080 - DNA, 25 bp, probe
attcagtaagtgccttggaacaata

SEQ ID NO: 105081 - DNA, 25 bp, probe
attgttcatcctaattgttcctgtt

SEQ ID NO: 105082 - DNA, 25 bp, probe
ctagtcagagattcagtaagtgcct

SEQ ID NO: 105083 - DNA, 25 bp, probe
gattcagtaagtgccttggaacaat

SEQ ID NO: 105084 - DNA, 25 bp, probe
tctagtcagagattcagtaagtgcc

SEQ ID NO: 105085 - DNA, 25 bp, probe
aattgttcatcctaattgttcctgt

SEQ ID NO: 105086 - DNA, 25 bp, probe
agtcagagattcagtaagtgccttg

SEQ ID NO: 105087 - DNA, 25 bp, probe
tcagtaagtgccttggaacaatatt

SEQ ID NO: 105088 - DNA, 25 bp, probe
agattcagtaagtgccttggaacaa

SEQ ID NO: 105089 - DNA, 25 bp, probe
agagattcagtaagtgccttggaac

SEQ ID NO: 105090 - DNA, 25 bp, probe
cagagattcagtaagtgccttggaa

SEQ ID NO: 105091 - DNA, 25 bp, probe
gagattcagtaagtgccttggaaca

SEQ ID NO: 105092 - DNA, 25 bp, probe
atctagtcagagattcagtaagtgc

SEQ ID NO: 105093 - DNA, 25 bp, probe
ttgtaaattatttgccctggagttt

SEQ ID NO: 105094 - DNA, 25 bp, probe
tttgtaaattatttgccctggagtt

SEQ ID NO: 105095 - DNA, 25 bp, probe
ttgttcatcctaattgttcctgttt

SEQ ID NO: 105096 - DNA, 25 bp, probe
atttgtaaattatttgccctggagt

SEQ ID NO: 105097 - DNA, 25 bp, probe
tattgccttaatgtctcttaaccct

SEQ ID NO: 105098 - DNA, 25 bp, probe
attattgccttaatgtctcttaacc

SEQ ID NO: 105099 - DNA, 25 bp, probe
attgccttaatgtctcttaaccctg

SEQ ID NO: 105100 - DNA, 25 bp, probe
gaactcaagtgggattagaagacta

SEQ ID NO: 105101 - DNA, 25 bp, probe
ctcaagtgggattagaagactatca

SEQ ID NO: 105102 - DNA, 25 bp, probe
actcaagtgggattagaagactatc

SEQ ID NO: 105103 - DNA, 25 bp, probe
tcagagattcagtaagtgccttgga

SEQ ID NO: 105104 - DNA, 25 bp, probe
gtcagagattcagtaagtgccttgg

SEQ ID NO: 105105 - DNA, 25 bp, probe
taattgttcatcctaattgttcctg

SEQ ID NO: 105106 - DNA, 25 bp, probe
ttattgccttaatgtctcttaaccc

SEQ ID NO: 105107 - DNA, 25 bp, probe
tcaagtgggattagaagactatcaa

SEQ ID NO: 105108 - DNA, 25 bp, probe
aactcaagtgggattagaagactat

SEQ ID NO: 105109 - DNA, 25 bp, probe
tgaactcaagtgggattagaagact

SEQ ID NO: 105110 - DNA, 25 bp, probe
gcatggtctaaatctttgtgtactt

SEQ ID NO: 105111 - DNA, 25 bp, probe
caagtattattgccttaatgtctct

SEQ ID NO: 105112 - DNA, 25 bp, probe
tcaagtattattgccttaatgtctc

SEQ ID NO: 105113 - DNA, 25 bp, probe
tttgaactcaagtgggattagaaga

SEQ ID NO: 105114 - DNA, 25 bp, probe
attgaattctcttagcttgtgtgtg

SEQ ID NO: 105115 - DNA, 25 bp, probe
gcaggttatcagagatcaaagattg

SEQ ID NO: 105116 - DNA, 25 bp, probe
catctagtcagagattcagtaagtg

SEQ ID NO: 105117 - DNA, 25 bp, probe
ttgaactcaagtgggattagaagac

SEQ ID NO: 105118 - DNA, 25 bp, probe
ctaattgttcatcctaattgttcct

SEQ ID NO: 105119 - DNA, 25 bp, probe
tctaattgttcatcctaattgttcc

SEQ ID NO: 105120 - DNA, 25 bp, probe
cagtctaattgttcatcctaattgt

SEQ ID NO: 105121 - DNA, 25 bp, probe
acagtctaattgttcatcctaattg

SEQ ID NO: 105122 - DNA, 25 bp, probe
gagagcatcctgtaccgtaagttca

SEQ ID NO: 105123 - DNA, 25 bp, probe
agagcatcctgtaccgtaagttcac

SEQ ID NO: 105124 - DNA, 25 bp, probe
gactggtggtcaagattggtgattt

SEQ ID NO: 105125 - DNA, 25 bp, probe
cgagagcatcctgtaccgtaagttc

SEQ ID NO: 105126 - DNA, 25 bp, probe
ggactggtggtcaagattggtgatt

SEQ ID NO: 105127 - DNA, 25 bp, probe
catcctgtaccgtaagttcaccacc

SEQ ID NO: 105128 - DNA, 25 bp, probe
gagcatcctgtaccgtaagttcacc

SEQ ID NO: 105129 - DNA, 25 bp, probe
ctggtggtcaagattggtgattttg

SEQ ID NO: 105130 - DNA, 25 bp, probe
tcaagattggtgattttggcatgag

SEQ ID NO: 105131 - DNA, 25 bp, probe
actggtggtcaagattggtgatttt

SEQ ID NO: 105132 - DNA, 25 bp, probe
ctacagcaccgactattaccgtgtg

SEQ ID NO: 105133 - DNA, 25 bp, probe
gtcaagattggtgattttggcatga

SEQ ID NO: 105134 - DNA, 25 bp, probe
tggtcaagattggtgattttggcat

SEQ ID NO: 105135 - DNA, 25 bp, probe
ggtcaagattggtgattttggcatg

SEQ ID NO: 105136 - DNA, 25 bp, probe
gtgattttggcatgagcagggatat

SEQ ID NO: 105137 - DNA, 25 bp, probe
tggtggtcaagattggtgattttgg

SEQ ID NO: 105138 - DNA, 25 bp, probe
caagattggtgattttggcatgagc

SEQ ID NO: 105139 - DNA, 25 bp, probe
aagattggtgattttggcatgagca

SEQ ID NO: 105140 - DNA, 25 bp, probe
tgattttggcatgagcagggatatc

SEQ ID NO: 105141 - DNA, 25 bp, probe
gtggtcaagattggtgattttggca

SEQ ID NO: 105142 - DNA, 25 bp, probe
agattggtgattttggcatgagcag

SEQ ID NO: 105143 - DNA, 25 bp, probe
ggtggtcaagattggtgattttggc

SEQ ID NO: 105144 - DNA, 25 bp, probe
gattggtgattttggcatgagcagg

SEQ ID NO: 105145 - DNA, 25 bp, probe
ggtgattttggcatgagcagggata

SEQ ID NO: 105146 - DNA, 25 bp, probe
gataaagacggattctaaggactct

SEQ ID NO: 105147 - DNA, 25 bp, probe
cgataaagacggattctaaggactc

SEQ ID NO: 105148 - DNA, 25 bp, probe
aaagacggattctaaggactctaaa

SEQ ID NO: 105149 - DNA, 25 bp, probe
taaagacggattctaaggactctaa

SEQ ID NO: 105150 - DNA, 25 bp, probe
ataaagacggattctaaggactcta

SEQ ID NO: 105151 - DNA, 25 bp, probe
aagacggattctaaggactctaaaa

SEQ ID NO: 105152 - DNA, 25 bp, probe
ccgataaagacggattctaaggact

SEQ ID NO: 105153 - DNA, 25 bp, probe
cccgataaagacggattctaaggac

SEQ ID NO: 105154 - DNA, 25 bp, probe
atcgcccgataaagacggattctaa

SEQ ID NO: 105155 - DNA, 25 bp, probe
gcccgataaagacggattctaagga

SEQ ID NO: 105156 - DNA, 25 bp, probe
gatcgcccgataaagacggattcta

SEQ ID NO: 105157 - DNA, 25 bp, probe
tcgcccgataaagacggattctaag

SEQ ID NO: 105158 - DNA, 25 bp, probe
atgatcgcccgataaagacggattc

SEQ ID NO: 105159 - DNA, 25 bp, probe
gatgatcgcccgataaagacggatt

SEQ ID NO: 105160 - DNA, 25 bp, probe
cgcccgataaagacggattctaagg

SEQ ID NO: 105161 - DNA, 25 bp, probe
cacctaggactgaggacagagagtg

SEQ ID NO: 105162 - DNA, 25 bp, probe
ttacttggacaacttcgtaggtagc

SEQ ID NO: 105163 - DNA, 25 bp, probe
aacttcgtaggtagccttaacttct

SEQ ID NO: 105164 - DNA, 25 bp, probe
caacttcgtaggtagccttaacttc

SEQ ID NO: 105165 - DNA, 25 bp, probe
acaacttcgtaggtagccttaactt

SEQ ID NO: 105166 - DNA, 25 bp, probe
taatgctttattctcaaatgctggg

SEQ ID NO: 105167 - DNA, 25 bp, probe
tgtaaatgtctgtagcactttcttg

SEQ ID NO: 105168 - DNA, 25 bp, probe
acttcgtaggtagccttaacttctg

SEQ ID NO: 105169 - DNA, 25 bp, probe
tttacttggacaacttcgtaggtag

SEQ ID NO: 105170 - DNA, 25 bp, probe
atttacttggacaacttcgtaggta

SEQ ID NO: 105171 - DNA, 25 bp, probe
gcataatttacttggacaacttcgt

SEQ ID NO: 105172 - DNA, 25 bp, probe
agcataatttacttggacaacttcg

SEQ ID NO: 105173 - DNA, 25 bp, probe
accttgtttgtcagtgatttagatg

SEQ ID NO: 105174 - DNA, 25 bp, probe
aatttacttggacaacttcgtaggt

SEQ ID NO: 105175 - DNA, 25 bp, probe
gacaacttcgtaggtagccttaact

SEQ ID NO: 105176 - DNA, 25 bp, probe
gaaccttgtttgtcagtgatttaga

SEQ ID NO: 105177 - DNA, 25 bp, probe
atgtaaatgtctgtagcactttctt

SEQ ID NO: 105178 - DNA, 25 bp, probe
aatgtaaatgtctgtagcactttct

SEQ ID NO: 105179 - DNA, 25 bp, probe
taatttacttggacaacttcgtagg

SEQ ID NO: 105180 - DNA, 25 bp, probe
atgctttattctcaaatgctgggtt

SEQ ID NO: 105181 - DNA, 25 bp, probe
aatgctttattctcaaatgctgggt

SEQ ID NO: 105182 - DNA, 25 bp, probe
tgaaccttgtttgtcagtgatttag

SEQ ID NO: 105183 - DNA, 25 bp, probe
ataaactgtactttgctgtctgaga

SEQ ID NO: 105184 - DNA, 25 bp, probe
ccttgtttgtcagtgatttagatga

SEQ ID NO: 105185 - DNA, 25 bp, probe
aaccttgtttgtcagtgatttagat

SEQ ID NO: 105186 - DNA, 25 bp, probe
ttaatgctttattctcaaatgctgg

SEQ ID NO: 105187 - DNA, 25 bp, probe
cttcgtaggtagccttaacttctgg

SEQ ID NO: 105188 - DNA, 25 bp, probe
aaatgtaaatgtctgtagcactttc

SEQ ID NO: 105189 - DNA, 25 bp, probe
tataaactgtactttgctgtctgag

SEQ ID NO: 105190 - DNA, 25 bp, probe
aagcataatttacttggacaacttc

SEQ ID NO: 105191 - DNA, 25 bp, probe
taaatgtaactttgtgggaacactg

SEQ ID NO: 105192 - DNA, 25 bp, probe
actttgtgggaacactgattcatat

SEQ ID NO: 105193 - DNA, 25 bp, probe
ctttgtgggaacactgattcatatt

SEQ ID NO: 105194 - DNA, 25 bp, probe
aactttgtgggaacactgattcata

SEQ ID NO: 105195 - DNA, 25 bp, probe
taactttgtgggaacactgattcat

SEQ ID NO: 105196 - DNA, 25 bp, probe
tgggaacactgattcatatttagaa

SEQ ID NO: 105197 - DNA, 25 bp, probe
ggacaacttcgtaggtagccttaac

SEQ ID NO: 105198 - DNA, 25 bp, probe
atgtaactttgtgggaacactgatt

SEQ ID NO: 105199 - DNA, 25 bp, probe
aatgtaactttgtgggaacactgat

SEQ ID NO: 105200 - DNA, 25 bp, probe
tttgtgggaacactgattcatattt

SEQ ID NO: 105201 - DNA, 25 bp, probe
aaatgtaactttgtgggaacactga

SEQ ID NO: 105202 - DNA, 25 bp, probe
ttaaatgtaactttgtgggaacact

SEQ ID NO: 105203 - DNA, 25 bp, probe
tacttggacaacttcgtaggtagcc

SEQ ID NO: 105204 - DNA, 25 bp, probe
tgtgggaacactgattcatatttag

SEQ ID NO: 105205 - DNA, 25 bp, probe
tggacaacttcgtaggtagccttaa

SEQ ID NO: 105206 - DNA, 25 bp, probe
gaagaggaagaagagtgaaacaaag

SEQ ID NO: 105207 - DNA, 25 bp, probe
ggaagaggaagaagagtgaaacaaa

SEQ ID NO: 105208 - DNA, 25 bp, probe
actagaatctgaagaagatgtgtcc

SEQ ID NO: 105209 - DNA, 25 bp, probe
aagaggaagaagagtgaaacaaagc

SEQ ID NO: 105210 - DNA, 25 bp, probe
gaagagtgaaacaaagccagagaaa

SEQ ID NO: 105211 - DNA, 25 bp, probe
aactagaatctgaagaagatgtgtc

SEQ ID NO: 105212 - DNA, 25 bp, probe
gaagaagagtgaaacaaagccagag

SEQ ID NO: 105213 - DNA, 25 bp, probe
agaagagtgaaacaaagccagagaa

SEQ ID NO: 105214 - DNA, 25 bp, probe
aagaagagtgaaacaaagccagaga

SEQ ID NO: 105215 - DNA, 25 bp, probe
gggaagaggaagaagagtgaaacaa

SEQ ID NO: 105216 - DNA, 25 bp, probe
agaggaagaagagtgaaacaaagcc

SEQ ID NO: 105217 - DNA, 25 bp, probe
ctagaatctgaagaagatgtgtccc

SEQ ID NO: 105218 - DNA, 25 bp, probe
ggaagaagagtgaaacaaagccaga

SEQ ID NO: 105219 - DNA, 25 bp, probe
aggaagaagagtgaaacaaagccag

SEQ ID NO: 105220 - DNA, 25 bp, probe
gaggaagaagagtgaaacaaagcca

SEQ ID NO: 105221 - DNA, 25 bp, probe
tagaatctgaagaagatgtgtccca

SEQ ID NO: 105222 - DNA, 25 bp, probe
gaatctgaagaagatgtgtcccaag

SEQ ID NO: 105223 - DNA, 25 bp, probe
agaatctgaagaagatgtgtcccaa

SEQ ID NO: 105224 - DNA, 25 bp, probe
aagagtgaaacaaagccagagaaaa

SEQ ID NO: 105225 - DNA, 25 bp, probe
aaactagaatctgaagaagatgtgt

SEQ ID NO: 105226 - DNA, 25 bp, probe
agagtgaaacaaagccagagaaaag

SEQ ID NO: 105227 - DNA, 25 bp, probe
aatctgaagaagatgtgtcccaagc

SEQ ID NO: 105228 - DNA, 25 bp, probe
ctgtgagagccattggaagactgtc

SEQ ID NO: 105229 - DNA, 25 bp, probe
gaaacaaagccagagaaaagcagtt

SEQ ID NO: 105230 - DNA, 25 bp, probe
gagtgaaacaaagccagagaaaagc

SEQ ID NO: 105231 - DNA, 25 bp, probe
aaggggaagaggaagaagagtgaaa

SEQ ID NO: 105232 - DNA, 25 bp, probe
gtgaaacaaagccagagaaaagcag

SEQ ID NO: 105233 - DNA, 25 bp, probe
gaaggggaagaggaagaagagtgaa

SEQ ID NO: 105234 - DNA, 25 bp, probe
tcattgtggaaacgatggaggaagg

SEQ ID NO: 105235 - DNA, 25 bp, probe
tgaaacaaagccagagaaaagcagt

SEQ ID NO: 105236 - DNA, 25 bp, probe
agtgaaacaaagccagagaaaagca

SEQ ID NO: 105237 - DNA, 25 bp, probe
aggggaagaggaagaagagtgaaac

SEQ ID NO: 105238 - DNA, 25 bp, probe
attgtggaaacgatggaggaaggtg

SEQ ID NO: 105239 - DNA, 25 bp, probe
cattgtggaaacgatggaggaaggt

SEQ ID NO: 105240 - DNA, 25 bp, probe
gcagtttctaagtcatattaaaagg

SEQ ID NO: 105241 - DNA, 25 bp, probe
aaagcagtttctaagtcatattaaa

SEQ ID NO: 105242 - DNA, 25 bp, probe
ggggaagaggaagaagagtgaaaca

SEQ ID NO: 105243 - DNA, 25 bp, probe
aaacaaagccagagaaaagcagttt

SEQ ID NO: 105244 - DNA, 25 bp, probe
aggactatttctctaaaactcaaaa

SEQ ID NO: 105245 - DNA, 25 bp, probe
aaggactatttctctaaaactcaaa

SEQ ID NO: 105246 - DNA, 25 bp, probe
aaaggactatttctctaaaactcaa

SEQ ID NO: 105247 - DNA, 25 bp, probe
aaaaggactatttctctaaaactca

SEQ ID NO: 105248 - DNA, 25 bp, probe
aacaaagccagagaaaagcagtttc

SEQ ID NO: 105249 - DNA, 25 bp, probe
atctgaagaagatgtgtcccaagct

SEQ ID NO: 105250 - DNA, 25 bp, probe
gaataccttctcacctacatcaatg

SEQ ID NO: 105251 - DNA, 25 bp, probe
aataccttctcacctacatcaatga

SEQ ID NO: 105252 - DNA, 25 bp, probe
gacaatccaagagtgaaccagaatg

SEQ ID NO: 105253 - DNA, 25 bp, probe
atctgcctagtgttactgatattcg

SEQ ID NO: 105254 - DNA, 25 bp, probe
gatgctattcggatgatagtcagag

SEQ ID NO: 105255 - DNA, 25 bp, probe
ctagagtatgttgaagaagatggac

SEQ ID NO: 105256 - DNA, 25 bp, probe
gaactgtgaatatacttcctgaagg

SEQ ID NO: 105257 - DNA, 25 bp, probe
tagagtatgttgaagaagatggaca

SEQ ID NO: 105258 - DNA, 25 bp, probe
atgctattcggatgatagtcagagg

SEQ ID NO: 105259 - DNA, 25 bp, probe
ggatgctattcggatgatagtcaga

SEQ ID NO: 105260 - DNA, 25 bp, probe
gatctgcctagtgttactgatattc

SEQ ID NO: 105261 - DNA, 25 bp, probe
acagcccaaagagcagtatttatta

SEQ ID NO: 105262 - DNA, 25 bp, probe
tatttattacagcccaaagagcagt

SEQ ID NO: 105263 - DNA, 25 bp, probe
tacagcccaaagagcagtatttatt

SEQ ID NO: 105264 - DNA, 25 bp, probe
ttacagcccaaagagcagtatttat

SEQ ID NO: 105265 - DNA, 25 bp, probe
attacagcccaaagagcagtattta

SEQ ID NO: 105266 - DNA, 25 bp, probe
tattacagcccaaagagcagtattt

SEQ ID NO: 105267 - DNA, 25 bp, probe
ttattacagcccaaagagcagtatt

SEQ ID NO: 105268 - DNA, 25 bp, probe
tttattacagcccaaagagcagtat

SEQ ID NO: 105269 - DNA, 25 bp, probe
atttattacagcccaaagagcagta

SEQ ID NO: 105270 - DNA, 25 bp, probe
cctaatgatgctctttaatgatggc

SEQ ID NO: 105271 - DNA, 25 bp, probe
gccctaatgatgctctttaatgatg

SEQ ID NO: 105272 - DNA, 25 bp, probe
ttatttattacagcccaaagagcag

SEQ ID NO: 105273 - DNA, 25 bp, probe
taaaccgttggcaataaagagtatg

SEQ ID NO: 105274 - DNA, 25 bp, probe
aggactttggaactgtgaatatact

SEQ ID NO: 105275 - DNA, 25 bp, probe
ccctaatgatgctctttaatgatgg

SEQ ID NO: 105276 - DNA, 25 bp, probe
gcccaaagagcagtatttattatca

SEQ ID NO: 105277 - DNA, 25 bp, probe
cagcccaaagagcagtatttattat

SEQ ID NO: 105278 - DNA, 25 bp, probe
gaggactttggaactgtgaatatac

SEQ ID NO: 105279 - DNA, 25 bp, probe
tctgcctagtgttactgatattcga

SEQ ID NO: 105280 - DNA, 25 bp, probe
agaggactttggaactgtgaatata

SEQ ID NO: 105281 - DNA, 25 bp, probe
tttatttattacagcccaaagagca

SEQ ID NO: 105282 - DNA, 25 bp, probe
agcccaaagagcagtatttattatc

SEQ ID NO: 105283 - DNA, 25 bp, probe
accgttggcaataaagagtatgaaa

SEQ ID NO: 105284 - DNA, 25 bp, probe
aaccgttggcaataaagagtatgaa

SEQ ID NO: 105285 - DNA, 25 bp, probe
aaaccgttggcaataaagagtatga

SEQ ID NO: 105286 - DNA, 25 bp, probe
ttaaaccgttggcaataaagagtat

SEQ ID NO: 105287 - DNA, 25 bp, probe
ggactttggaactgtgaatatactt

SEQ ID NO: 105288 - DNA, 25 bp, probe
ctaaggcatacagttcttgactttg

SEQ ID NO: 105289 - DNA, 25 bp, probe
ggctaaggcatacagttcttgactt

SEQ ID NO: 105290 - DNA, 25 bp, probe
catacagttcttgactttggacaat

SEQ ID NO: 105291 - DNA, 25 bp, probe
aacaggctaaggcatacagttcttg

SEQ ID NO: 105292 - DNA, 25 bp, probe
atacagttcttgactttggacaatc

SEQ ID NO: 105293 - DNA, 25 bp, probe
aagaataccttctcacctacatcaa

SEQ ID NO: 105294 - DNA, 25 bp, probe
agaggcttatactggaataatggaa

SEQ ID NO: 105295 - DNA, 25 bp, probe
ggcttatactggaataatggaatgt

SEQ ID NO: 105296 - DNA, 25 bp, probe
catggaggaatctgttacaataagc

SEQ ID NO: 105297 - DNA, 25 bp, probe
aggcttatactggaataatggaatg

SEQ ID NO: 105298 - DNA, 25 bp, probe
acagaggcttatactggaataatgg

SEQ ID NO: 105299 - DNA, 25 bp, probe
cagaggcttatactggaataatgga

SEQ ID NO: 105300 - DNA, 25 bp, probe
cagacagaggcttatactggaataa

SEQ ID NO: 105301 - DNA, 25 bp, probe
gaggcttatactggaataatggaat

SEQ ID NO: 105302 - DNA, 25 bp, probe
acagacagaggcttatactggaata

SEQ ID NO: 105303 - DNA, 25 bp, probe
acagctatagagatgactactacag

SEQ ID NO: 105304 - DNA, 25 bp, probe
gacagaggcttatactggaataatg

SEQ ID NO: 105305 - DNA, 25 bp, probe
agacagaggcttatactggaataat

SEQ ID NO: 105306 - DNA, 25 bp, probe
aacagacagaggcttatactggaat

SEQ ID NO: 105307 - DNA, 25 bp, probe
cagctatagagatgactactacaga

SEQ ID NO: 105308 - DNA, 25 bp, probe
atggaggaatctgttacaataagct

SEQ ID NO: 105309 - DNA, 25 bp, probe
attcaaacagacagaggcttatact

SEQ ID NO: 105310 - DNA, 25 bp, probe
cattcaaacagacagaggcttatac

SEQ ID NO: 105311 - DNA, 25 bp, probe
tcattcaaacagacagaggcttata

SEQ ID NO: 105312 - DNA, 25 bp, probe
ggaggaatctgttacaataagctct

SEQ ID NO: 105313 - DNA, 25 bp, probe
acatggaggaatctgttacaataag

SEQ ID NO: 105314 - DNA, 25 bp, probe
tggaggaatctgttacaataagctc

SEQ ID NO: 105315 - DNA, 25 bp, probe
aggaatctgttacaataagctcttg

SEQ ID NO: 105316 - DNA, 25 bp, probe
gcttatactggaataatggaatgtt

SEQ ID NO: 105317 - DNA, 25 bp, probe
tacagctatagagatgactactaca

SEQ ID NO: 105318 - DNA, 25 bp, probe
gaggaatctgttacaataagctctt

SEQ ID NO: 105319 - DNA, 25 bp, probe
gtacagctatagagatgactactac

SEQ ID NO: 105320 - DNA, 25 bp, probe
aattgaaattctggctgtggatcta

SEQ ID NO: 105321 - DNA, 25 bp, probe
attaaattctaagaagaggctgggt

SEQ ID NO: 105322 - DNA, 25 bp, probe
ttaaattctaagaagaggctgggtg

SEQ ID NO: 105323 - DNA, 25 bp, probe
tgaaattgaaattctggctgtggat

SEQ ID NO: 105324 - DNA, 25 bp, probe
ctcattcaaacagacagaggcttat

SEQ ID NO: 105325 - DNA, 25 bp, probe
aaaggtgtctgtgctatttctgtac

SEQ ID NO: 105326 - DNA, 25 bp, probe
attgaaattctggctgtggatctac

SEQ ID NO: 105327 - DNA, 25 bp, probe
aaattgaaattctggctgtggatct

SEQ ID NO: 105328 - DNA, 25 bp, probe
gaaattgaaattctggctgtggatc

SEQ ID NO: 105329 - DNA, 25 bp, probe
atactggaataatggaatgttgtac

SEQ ID NO: 105330 - DNA, 25 bp, probe
aattaaattctaagaagaggctggg

SEQ ID NO: 105331 - DNA, 25 bp, probe
ttcaaacagacagaggcttatactg

SEQ ID NO: 105332 - DNA, 25 bp, probe
agctatagagatgactactacagaa

SEQ ID NO: 105333 - DNA, 25 bp, probe
aagaactgtcgttaacctcattcaa

SEQ ID NO: 105334 - DNA, 25 bp, probe
caagaggaattacaagagtactgca

SEQ ID NO: 105335 - DNA, 25 bp, probe
cagtgaaattgaaattctggctgtg

SEQ ID NO: 105336 - DNA, 25 bp, probe
aaacagacagaggcttatactggaa

SEQ ID NO: 105337 - DNA, 25 bp, probe
gtgaaattgaaattctggctgtgga

SEQ ID NO: 105338 - DNA, 25 bp, probe
taagatcgttctctgcctcacatag

SEQ ID NO: 105339 - DNA, 25 bp, probe
gtaagatcgttctctgcctcacata

SEQ ID NO: 105340 - DNA, 25 bp, probe
aatgtaagatcgttctctgcctcac

SEQ ID NO: 105341 - DNA, 25 bp, probe
ctcaaactcctgacctcaagtaatc

SEQ ID NO: 105342 - DNA, 25 bp, probe
ttctctgcctcacatagcttacaag

SEQ ID NO: 105343 - DNA, 25 bp, probe
tctcaaactcctgacctcaagtaat

SEQ ID NO: 105344 - DNA, 25 bp, probe
gttctctgcctcacatagcttacaa

SEQ ID NO: 105345 - DNA, 25 bp, probe
aagaagaggcgagaaactagacaaa

SEQ ID NO: 105346 - DNA, 25 bp, probe
aaagaagaggcgagaaactagacaa

SEQ ID NO: 105347 - DNA, 25 bp, probe
tttggctttggaactctttgaacaa

SEQ ID NO: 105348 - DNA, 25 bp, probe
tcaaactcctgacctcaagtaatcc

SEQ ID NO: 105349 - DNA, 25 bp, probe
cccagcctcatctctttgttctaaa

SEQ ID NO: 105350 - DNA, 25 bp, probe
agaagaggcgagaaactagacaaag

SEQ ID NO: 105351 - DNA, 25 bp, probe
aaactcctgacctcaagtaatccac

SEQ ID NO: 105352 - DNA, 25 bp, probe
caaactcctgacctcaagtaatcca

SEQ ID NO: 105353 - DNA, 25 bp, probe
attctgtgataaagggaccttggaa

SEQ ID NO: 105354 - DNA, 25 bp, probe
aattctgtgataaagggaccttgga

SEQ ID NO: 105355 - DNA, 25 bp, probe
gctggagaaatatggtactcattaa

SEQ ID NO: 105356 - DNA, 25 bp, probe
tagttcaaggtcaaagactaagtgc

SEQ ID NO: 105357 - DNA, 25 bp, probe
aaatgtaagatcgttctctgcctca

SEQ ID NO: 105358 - DNA, 25 bp, probe
aactcctgacctcaagtaatccacc

SEQ ID NO: 105359 - DNA, 25 bp, probe
ttggaactctttgaacaaataacaa

SEQ ID NO: 105360 - DNA, 25 bp, probe
ctcctgacctcaagtaatccacctg

SEQ ID NO: 105361 - DNA, 25 bp, probe
gtgataaagggaccttggaacaatg

SEQ ID NO: 105362 - DNA, 25 bp, probe
atcgttctctgcctcacatagctta

SEQ ID NO: 105363 - DNA, 25 bp, probe
ataaagggaccttggaacaatggat

SEQ ID NO: 105364 - DNA, 25 bp, probe
atagttcaaggtcaaagactaagtg

SEQ ID NO: 105365 - DNA, 25 bp, probe
agctggagaaatatggtactcatta

SEQ ID NO: 105366 - DNA, 25 bp, probe
taaagggaccttggaacaatggatt

SEQ ID NO: 105367 - DNA, 25 bp, probe
gaagaggcgagaaactagacaaagt

SEQ ID NO: 105368 - DNA, 25 bp, probe
tgtaagatcgttctctgcctcacat

SEQ ID NO: 105369 - DNA, 25 bp, probe
atgtaagatcgttctctgcctcaca

SEQ ID NO: 105370 - DNA, 25 bp, probe
ttctgtgataaagggaccttggaac

SEQ ID NO: 105371 - DNA, 25 bp, probe
ccagcctcatctctttgttctaaag

SEQ ID NO: 105372 - DNA, 25 bp, probe
aattcatagagatcttaagccaagt

SEQ ID NO: 105373 - DNA, 25 bp, probe
gaacaaataacaaaaggggtggatt

SEQ ID NO: 105374 - DNA, 25 bp, probe
gataaagggaccttggaacaatgga

SEQ ID NO: 105375 - DNA, 25 bp, probe
tgtgataaagggaccttggaacaat

SEQ ID NO: 105376 - DNA, 25 bp, probe
ggctttggaactctttgaacaaata

SEQ ID NO: 105377 - DNA, 25 bp, probe
aaatctgctagggaatatcaataga

SEQ ID NO: 105378 - DNA, 25 bp, probe
ccaaatggaattctgtgataaaggg

SEQ ID NO: 105379 - DNA, 25 bp, probe
aatagttcaaggtcaaagactaagt

SEQ ID NO: 105380 - DNA, 25 bp, probe
aacaaataacaaaaggggtggatta

SEQ ID NO: 105381 - DNA, 25 bp, probe
tgaacaaataacaaaaggggtggat

SEQ ID NO: 105382 - DNA, 25 bp, probe
aatcgtagtgcttgtacttacctcg

SEQ ID NO: 105383 - DNA, 25 bp, probe
aaatcgtagtgcttgtacttacctc

SEQ ID NO: 105384 - DNA, 25 bp, probe
gaaatcgtagtgcttgtacttacct

SEQ ID NO: 105385 - DNA, 25 bp, probe
gtagtgcttgtacttacctcgcttc

SEQ ID NO: 105386 - DNA, 25 bp, probe
cgaaatcgtagtgcttgtacttacc

SEQ ID NO: 105387 - DNA, 25 bp, probe
ccgaaatcgtagtgcttgtacttac

SEQ ID NO: 105388 - DNA, 25 bp, probe
cccgaaatcgtagtgcttgtactta

SEQ ID NO: 105389 - DNA, 25 bp, probe
tagtgcttgtacttacctcgcttcc

SEQ ID NO: 105390 - DNA, 25 bp, probe
ctctcctcatgctgtttagtgatgg

SEQ ID NO: 105391 - DNA, 25 bp, probe
atcgtagtgcttgtacttacctcgc

SEQ ID NO: 105392 - DNA, 25 bp, probe
cgtagtgcttgtacttacctcgctt

SEQ ID NO: 105393 - DNA, 25 bp, probe
gctctcctcatgctgtttagtgatg

SEQ ID NO: 105394 - DNA, 25 bp, probe
tctccaagataagccttgagcctta

SEQ ID NO: 105395 - DNA, 25 bp, probe
atctccaagataagccttgagcctt

SEQ ID NO: 105396 - DNA, 25 bp, probe
cttcctaccccatctccaagataag

SEQ ID NO: 105397 - DNA, 25 bp, probe
ggctctcctcatgctgtttagtgat

SEQ ID NO: 105398 - DNA, 25 bp, probe
atcaggctctcctcatgctgtttag

SEQ ID NO: 105399 - DNA, 25 bp, probe
gatcaggctctcctcatgctgttta

SEQ ID NO: 105400 - DNA, 25 bp, probe
tctcctcatgctgtttagtgatggc

SEQ ID NO: 105401 - DNA, 25 bp, probe
catctccaagataagccttgagcct

SEQ ID NO: 105402 - DNA, 25 bp, probe
ctaccccatctccaagataagcctt

SEQ ID NO: 105403 - DNA, 25 bp, probe
ttcctaccccatctccaagataagc

SEQ ID NO: 105404 - DNA, 25 bp, probe
gcttcctaccccatctccaagataa

SEQ ID NO: 105405 - DNA, 25 bp, probe
cagggaatcaagggaccagctttac

SEQ ID NO: 105406 - DNA, 25 bp, probe
ccatctccaagataagccttgagcc

SEQ ID NO: 105407 - DNA, 25 bp, probe
gggaatcaagggaccagctttactg

SEQ ID NO: 105408 - DNA, 25 bp, probe
ctcctcatgctgtttagtgatggca

SEQ ID NO: 105409 - DNA, 25 bp, probe
ctcatgctgtttagtgatggcactg

SEQ ID NO: 105410 - DNA, 25 bp, probe
tcctcatgctgtttagtgatggcac

SEQ ID NO: 105411 - DNA, 25 bp, probe
taccccatctccaagataagccttg

SEQ ID NO: 105412 - DNA, 25 bp, probe
catgctgtttagtgatggcactgtc

SEQ ID NO: 105413 - DNA, 25 bp, probe
cccatctccaagataagccttgagc

SEQ ID NO: 105414 - DNA, 25 bp, probe
cctaccccatctccaagataagcct

SEQ ID NO: 105415 - DNA, 25 bp, probe
tcctaccccatctccaagataagcc

SEQ ID NO: 105416 - DNA, 25 bp, probe
ggcttcctaccccatctccaagata

SEQ ID NO: 105417 - DNA, 25 bp, probe
tcatgctgtttagtgatggcactgt

SEQ ID NO: 105418 - DNA, 25 bp, probe
cctcatgctgtttagtgatggcact

SEQ ID NO: 105419 - DNA, 25 bp, probe
aatcaagggaccagctttactggag

SEQ ID NO: 105420 - DNA, 25 bp, probe
gaatcaagggaccagctttactgga

SEQ ID NO: 105421 - DNA, 25 bp, probe
ccccatctccaagataagccttgag

SEQ ID NO: 105422 - DNA, 25 bp, probe
cttgtgacttttgtggcccgaaatc

SEQ ID NO: 105423 - DNA, 25 bp, probe
aagggaccagctttactggagtttg

SEQ ID NO: 105424 - DNA, 25 bp, probe
caagggaccagctttactggagttt

SEQ ID NO: 105425 - DNA, 25 bp, probe
accccatctccaagataagccttga

SEQ ID NO: 105426 - DNA, 25 bp, probe
ggaatcaagggaccagctttactgg

SEQ ID NO: 105427 - DNA, 25 bp, probe
taaggaagctggagaactcaatgta

SEQ ID NO: 105428 - DNA, 25 bp, probe
tcataaggaagctggagaactcaat

SEQ ID NO: 105429 - DNA, 25 bp, probe
cataaggaagctggagaactcaatg

SEQ ID NO: 105430 - DNA, 25 bp, probe
ataaggaagctggagaactcaatgt

SEQ ID NO: 105431 - DNA, 25 bp, probe
ttcataaggaagctggagaactcaa

SEQ ID NO: 105432 - DNA, 25 bp, probe
tcttgttcataaggaagctggagaa

SEQ ID NO: 105433 - DNA, 25 bp, probe
aaggaagctggagaactcaatgtaa

SEQ ID NO: 105434 - DNA, 25 bp, probe
ttattggaatgggagaggaaggaaa

SEQ ID NO: 105435 - DNA, 25 bp, probe
aggaaagtcttgttcataaggaagc

SEQ ID NO: 105436 - DNA, 25 bp, probe
ctttgctctttagaacccagtgaaa

SEQ ID NO: 105437 - DNA, 25 bp, probe
aagtcttgttcataaggaagctgga

SEQ ID NO: 105438 - DNA, 25 bp, probe
gctaggaaagtcttgttcataagga

SEQ ID NO: 105439 - DNA, 25 bp, probe
tattggaatgggagaggaaggaaag

SEQ ID NO: 105440 - DNA, 25 bp, probe
ggctaggaaagtcttgttcataagg

SEQ ID NO: 105441 - DNA, 25 bp, probe
gggctaggaaagtcttgttcataag

SEQ ID NO: 105442 - DNA, 25 bp, probe
agtcttgttcataaggaagctggag

SEQ ID NO: 105443 - DNA, 25 bp, probe
gtcttgttcataaggaagctggaga

SEQ ID NO: 105444 - DNA, 25 bp, probe
gttattggaatgggagaggaaggaa

SEQ ID NO: 105445 - DNA, 25 bp, probe
taggaaagtcttgttcataaggaag

SEQ ID NO: 105446 - DNA, 25 bp, probe
agggctaggaaagtcttgttcataa

SEQ ID NO: 105447 - DNA, 25 bp, probe
agaccatgctttcctgtttatctat

SEQ ID NO: 105448 - DNA, 25 bp, probe
tctttgctctttagaacccagtgaa

SEQ ID NO: 105449 - DNA, 25 bp, probe
accatgctttcctgtttatctatac

SEQ ID NO: 105450 - DNA, 25 bp, probe
ctaggaaagtcttgttcataaggaa

SEQ ID NO: 105451 - DNA, 25 bp, probe
gagggctaggaaagtcttgttcata

SEQ ID NO: 105452 - DNA, 25 bp, probe
ccatgctttcctgtttatctatact

SEQ ID NO: 105453 - DNA, 25 bp, probe
gaccatgctttcctgtttatctata

SEQ ID NO: 105454 - DNA, 25 bp, probe
atgctttcctgtttatctatactca

SEQ ID NO: 105455 - DNA, 25 bp, probe
aatcaaacccatctgtaatttcgag

SEQ ID NO: 105456 - DNA, 25 bp, probe
gtaatgaggatgagggctaggaaag

SEQ ID NO: 105457 - DNA, 25 bp, probe
atcaaacccatctgtaatttcgagt

SEQ ID NO: 105458 - DNA, 25 bp, probe
gaaagtcttgttcataaggaagctg

SEQ ID NO: 105459 - DNA, 25 bp, probe
agttattggaatgggagaggaagga

SEQ ID NO: 105460 - DNA, 25 bp, probe
cagttattggaatgggagaggaagg

SEQ ID NO: 105461 - DNA, 25 bp, probe
cagaccatgctttcctgtttatcta

SEQ ID NO: 105462 - DNA, 25 bp, probe
ggaaagtcttgttcataaggaagct

SEQ ID NO: 105463 - DNA, 25 bp, probe
tgctgcatttaactggttatttctt

SEQ ID NO: 105464 - DNA, 25 bp, probe
gtgctgcatttaactggttatttct

SEQ ID NO: 105465 - DNA, 25 bp, probe
gtgcaactctttcttatgataggtc

SEQ ID NO: 105466 - DNA, 25 bp, probe
taatgaggatgagggctaggaaagt

SEQ ID NO: 105467 - DNA, 25 bp, probe
agtaatgaggatgagggctaggaaa

SEQ ID NO: 105468 - DNA, 25 bp, probe
gctttcctgtttatctatactcagt

SEQ ID NO: 105469 - DNA, 25 bp, probe
tgctttcctgtttatctatactcag

SEQ ID NO: 105470 - DNA, 25 bp, probe
gctgcatttaactggttatttcttg

SEQ ID NO: 105471 - DNA, 25 bp, probe
ctctgacttggtatatgctcatctg

SEQ ID NO: 105472 - DNA, 25 bp, probe
tctgacttggtatatgctcatctga

SEQ ID NO: 105473 - DNA, 25 bp, probe
ttcctctgacttggtatatgctcat

SEQ ID NO: 105474 - DNA, 25 bp, probe
cctctgacttggtatatgctcatct

SEQ ID NO: 105475 - DNA, 25 bp, probe
tcctctgacttggtatatgctcatc

SEQ ID NO: 105476 - DNA, 25 bp, probe
tatatgctcatctgagtgacggata

SEQ ID NO: 105477 - DNA, 25 bp, probe
ctgacttggtatatgctcatctgag

SEQ ID NO: 105478 - DNA, 25 bp, probe
cttggtatatgctcatctgagtgac

SEQ ID NO: 105479 - DNA, 25 bp, probe
gacttggtatatgctcatctgagtg

SEQ ID NO: 105480 - DNA, 25 bp, probe
atatgctcatctgagtgacggatat

SEQ ID NO: 105481 - DNA, 25 bp, probe
acttggtatatgctcatctgagtga

SEQ ID NO: 105482 - DNA, 25 bp, probe
tgacttggtatatgctcatctgagt

SEQ ID NO: 105483 - DNA, 25 bp, probe
ttgataaacaccagaacagaagaca

SEQ ID NO: 105484 - DNA, 25 bp, probe
tttgataaacaccagaacagaagac

SEQ ID NO: 105485 - DNA, 25 bp, probe
gataaacaccagaacagaagacagt

SEQ ID NO: 105486 - DNA, 25 bp, probe
tgataaacaccagaacagaagacag

SEQ ID NO: 105487 - DNA, 25 bp, probe
ttgtttcctctgacttggtatatgc

SEQ ID NO: 105488 - DNA, 25 bp, probe
ctaaacaccaatttcttcctgcttt

SEQ ID NO: 105489 - DNA, 25 bp, probe
atctgagtgacggatatgtgaaatt

SEQ ID NO: 105490 - DNA, 25 bp, probe
gtttcctctgacttggtatatgctc

SEQ ID NO: 105491 - DNA, 25 bp, probe
catctgagtgacggatatgtgaaat

SEQ ID NO: 105492 - DNA, 25 bp, probe
tatgctcatctgagtgacggatatg

SEQ ID NO: 105493 - DNA, 25 bp, probe
gtatatgctcatctgagtgacggat

SEQ ID NO: 105494 - DNA, 25 bp, probe
tttgtttcctctgacttggtatatg

SEQ ID NO: 105495 - DNA, 25 bp, probe
ctcatctgagtgacggatatgtgaa

SEQ ID NO: 105496 - DNA, 25 bp, probe
tgtttcctctgacttggtatatgct

SEQ ID NO: 105497 - DNA, 25 bp, probe
ttggtatatgctcatctgagtgacg

SEQ ID NO: 105498 - DNA, 25 bp, probe
tttaatttgtgaacttctgaaggca

SEQ ID NO: 105499 - DNA, 25 bp, probe
ttgtagaactggttagtcaaatggc

SEQ ID NO: 105500 - DNA, 25 bp, probe
tttcctctgacttggtatatgctca

SEQ ID NO: 105501 - DNA, 25 bp, probe
ttaatttgtgaacttctgaaggcat

SEQ ID NO: 105502 - DNA, 25 bp, probe
taatttgtgaacttctgaaggcatg

SEQ ID NO: 105503 - DNA, 25 bp, probe
tcatctgagtgacggatatgtgaaa

SEQ ID NO: 105504 - DNA, 25 bp, probe
aacaccagaacagaagacagtgatg

SEQ ID NO: 105505 - DNA, 25 bp, probe
gctaaacaccaatttcttcctgctt

SEQ ID NO: 105506 - DNA, 25 bp, probe
ataaacaccagaacagaagacagtg

SEQ ID NO: 105507 - DNA, 25 bp, probe
aatttgtgaacttctgaaggcatga

SEQ ID NO: 105508 - DNA, 25 bp, probe
atttgtgaacttctgaaggcatgag

SEQ ID NO: 105509 - DNA, 25 bp, probe
ctgagtgacggatatgtgaaatttg

SEQ ID NO: 105510 - DNA, 25 bp, probe
tctgagtgacggatatgtgaaattt

SEQ ID NO: 105511 - DNA, 25 bp, probe
tgagtgacggatatgtgaaatttgt

SEQ ID NO: 105512 - DNA, 25 bp, probe
gtgacggatatgtgaaatttgtaga

SEQ ID NO: 105513 - DNA, 25 bp, probe
agtgacggatatgtgaaatttgtag

SEQ ID NO: 105514 - DNA, 25 bp, probe
gagtgacggatatgtgaaatttgta

SEQ ID NO: 105515 - DNA, 25 bp, probe
gaggttatgaagagcattgaggatg

SEQ ID NO: 105516 - DNA, 25 bp, probe
aatcaggaggttatgaagagcattg

SEQ ID NO: 105517 - DNA, 25 bp, probe
caatcaggaggttatgaagagcatt

SEQ ID NO: 105518 - DNA, 25 bp, probe
acctcagtaatcacaattatgtcca

SEQ ID NO: 105519 - DNA, 25 bp, probe
gatgagcaatcaggaggttatgaag

SEQ ID NO: 105520 - DNA, 25 bp, probe
ctcagtaatcacaattatgtccacc

SEQ ID NO: 105521 - DNA, 25 bp, probe
cctcagtaatcacaattatgtccac

SEQ ID NO: 105522 - DNA, 25 bp, probe
tcagtaatcacaattatgtccaccg

SEQ ID NO: 105523 - DNA, 25 bp, probe
atcaggaggttatgaagagcattga

SEQ ID NO: 105524 - DNA, 25 bp, probe
atgagcaatcaggaggttatgaaga

SEQ ID NO: 105525 - DNA, 25 bp, probe
agatgagcaatcaggaggttatgaa

SEQ ID NO: 105526 - DNA, 25 bp, probe
ggaggttatgaagagcattgaggat

SEQ ID NO: 105527 - DNA, 25 bp, probe
gcatgaactacctcagtaatcacaa

SEQ ID NO: 105528 - DNA, 25 bp, probe
gagatgagcaatcaggaggttatga

SEQ ID NO: 105529 - DNA, 25 bp, probe
aggttatgaagagcattgaggatgg

SEQ ID NO: 105530 - DNA, 25 bp, probe
tcaggaggttatgaagagcattgag

SEQ ID NO: 105531 - DNA, 25 bp, probe
tgagcaatcaggaggttatgaagag

SEQ ID NO: 105532 - DNA, 25 bp, probe
atgaactacctcagtaatcacaatt

SEQ ID NO: 105533 - DNA, 25 bp, probe
tacctcagtaatcacaattatgtcc

SEQ ID NO: 105534 - DNA, 25 bp, probe
catgaactacctcagtaatcacaat

SEQ ID NO: 105535 - DNA, 25 bp, probe
acactgtcataggagaaggagagtt

SEQ ID NO: 105536 - DNA, 25 bp, probe
atctggcatgaactacctcagtaat

SEQ ID NO: 105537 - DNA, 25 bp, probe
tcacagaatttatggagaatggagc

SEQ ID NO: 105538 - DNA, 25 bp, probe
tgaactacctcagtaatcacaatta

SEQ ID NO: 105539 - DNA, 25 bp, probe
aggaggttatgaagagcattgagga

SEQ ID NO: 105540 - DNA, 25 bp, probe
caggaggttatgaagagcattgagg

SEQ ID NO: 105541 - DNA, 25 bp, probe
ggagatgagcaatcaggaggttatg

SEQ ID NO: 105542 - DNA, 25 bp, probe
actacctcagtaatcacaattatgt

SEQ ID NO: 105543 - DNA, 25 bp, probe
tctggcatgaactacctcagtaatc

SEQ ID NO: 105544 - DNA, 25 bp, probe
ttatgaagagcattgaggatgggta

SEQ ID NO: 105545 - DNA, 25 bp, probe
ggcatgaactacctcagtaatcaca

SEQ ID NO: 105546 - DNA, 25 bp, probe
tggcatgaactacctcagtaatcac

SEQ ID NO: 105547 - DNA, 25 bp, probe
atcacagaatttatggagaatggag

SEQ ID NO: 105548 - DNA, 25 bp, probe
catcacagaatttatggagaatgga

SEQ ID NO: 105549 - DNA, 25 bp, probe
tcatcacagaatttatggagaatgg

SEQ ID NO: 105550 - DNA, 25 bp, probe
gcaatcaggaggttatgaagagcat

SEQ ID NO: 105551 - DNA, 25 bp, probe
ctggcatgaactacctcagtaatca

SEQ ID NO: 105552 - DNA, 25 bp, probe
catctggcatgaactacctcagtaa

SEQ ID NO: 105553 - DNA, 25 bp, probe
cacagaatttatggagaatggagcc

SEQ ID NO: 105554 - DNA, 25 bp, probe
ctacctcagtaatcacaattatgtc

SEQ ID NO: 105555 - DNA, 25 bp, probe
ctgtcataggagaaggagagtttgg

SEQ ID NO: 105556 - DNA, 25 bp, probe
gatgactttgatggcacatacgaaa

SEQ ID NO: 105557 - DNA, 25 bp, probe
actgtcataggagaaggagagtttg

SEQ ID NO: 105558 - DNA, 25 bp, probe
cactgtcataggagaaggagagttt

SEQ ID NO: 105559 - DNA, 25 bp, probe
tgttctatacgagtgaccgattatg

SEQ ID NO: 105560 - DNA, 25 bp, probe
ctgttctatacgagtgaccgattat

SEQ ID NO: 105561 - DNA, 25 bp, probe
tctatacgagtgaccgattatgctt

SEQ ID NO: 105562 - DNA, 25 bp, probe
ttctatacgagtgaccgattatgct

SEQ ID NO: 105563 - DNA, 25 bp, probe
gttctatacgagtgaccgattatgc

SEQ ID NO: 105564 - DNA, 25 bp, probe
atactgttctatacgagtgaccgat

SEQ ID NO: 105565 - DNA, 25 bp, probe
actgttctatacgagtgaccgatta

SEQ ID NO: 105566 - DNA, 25 bp, probe
tactgttctatacgagtgaccgatt

SEQ ID NO: 105567 - DNA, 25 bp, probe
aatactgttctatacgagtgaccga

SEQ ID NO: 105568 - DNA, 25 bp, probe
caatactgttctatacgagtgaccg

SEQ ID NO: 105569 - DNA, 25 bp, probe
acaatactgttctatacgagtgacc

SEQ ID NO: 105570 - DNA, 25 bp, probe
tacagaactcacagtacctatgact

SEQ ID NO: 105571 - DNA, 25 bp, probe
atacagaactcacagtacctatgac

SEQ ID NO: 105572 - DNA, 25 bp, probe
acagaactcacagtacctatgactt

SEQ ID NO: 105573 - DNA, 25 bp, probe
tatacgagtgaccgattatgctttc

SEQ ID NO: 105574 - DNA, 25 bp, probe
ctatacgagtgaccgattatgcttt

SEQ ID NO: 105575 - DNA, 25 bp, probe
tatacagaactcacagtacctatga

SEQ ID NO: 105576 - DNA, 25 bp, probe
ctacattctttattctgcggtgaag

SEQ ID NO: 105577 - DNA, 25 bp, probe
tacattctttattctgcggtgaagt

SEQ ID NO: 105578 - DNA, 25 bp, probe
aaggaactaacttactgtccaccag

SEQ ID NO: 105579 - DNA, 25 bp, probe
cctaaagccaaagtttctgttgaat

SEQ ID NO: 105580 - DNA, 25 bp, probe
attctttattctgcggtgaagttga

SEQ ID NO: 105581 - DNA, 25 bp, probe
cattctttattctgcggtgaagttg

SEQ ID NO: 105582 - DNA, 25 bp, probe
tttcctaaagccaaagtttctgttg

SEQ ID NO: 105583 - DNA, 25 bp, probe
cctacattctttattctgcggtgaa

SEQ ID NO: 105584 - DNA, 25 bp, probe
agccaaagtttctgttgaattatgt

SEQ ID NO: 105585 - DNA, 25 bp, probe
acattctttattctgcggtgaagtt

SEQ ID NO: 105586 - DNA, 25 bp, probe
tcctaaagccaaagtttctgttgaa

SEQ ID NO: 105587 - DNA, 25 bp, probe
ttcctaaagccaaagtttctgttga

SEQ ID NO: 105588 - DNA, 25 bp, probe
gccaaagtttctgttgaattatgtt

SEQ ID NO: 105589 - DNA, 25 bp, probe
ttctttattctgcggtgaagttgag

SEQ ID NO: 105590 - DNA, 25 bp, probe
ttatacagaactcacagtacctatg

SEQ ID NO: 105591 - DNA, 25 bp, probe
aagccaaagtttctgttgaattatg

SEQ ID NO: 105592 - DNA, 25 bp, probe
atacgagtgaccgattatgctttct

SEQ ID NO: 105593 - DNA, 25 bp, probe
ctaaagccaaagtttctgttgaatt

SEQ ID NO: 105594 - DNA, 25 bp, probe
cagaactcacagtacctatgacttt

SEQ ID NO: 105595 - DNA, 25 bp, probe
tacgagtgaccgattatgctttctt

SEQ ID NO: 105596 - DNA, 25 bp, probe
gagtgaccgattatgctttctttgg

SEQ ID NO: 105597 - DNA, 25 bp, probe
aaagccaaagtttctgttgaattat

SEQ ID NO: 105598 - DNA, 25 bp, probe
aacaaaggaactaacttactgtcca

SEQ ID NO: 105599 - DNA, 25 bp, probe
acaaaggaactaacttactgtccac

SEQ ID NO: 105600 - DNA, 25 bp, probe
cgagtgaccgattatgctttctttg

SEQ ID NO: 105601 - DNA, 25 bp, probe
aaacaaaggaactaacttactgtcc

SEQ ID NO: 105602 - DNA, 25 bp, probe
caaaggaactaacttactgtccacc

SEQ ID NO: 105603 - DNA, 25 bp, probe
tgtatcaggaggtatagtggaagaa

SEQ ID NO: 105604 - DNA, 25 bp, probe
atgtgtatcaggaggtatagtggaa

SEQ ID NO: 105605 - DNA, 25 bp, probe
aggagatgtgtatcaggaggtatag

SEQ ID NO: 105606 - DNA, 25 bp, probe
gtgtatcaggaggtatagtggaaga

SEQ ID NO: 105607 - DNA, 25 bp, probe
ggagatgtgtatcaggaggtatagt

SEQ ID NO: 105608 - DNA, 25 bp, probe
gagatgtgtatcaggaggtatagtg

SEQ ID NO: 105609 - DNA, 25 bp, probe
tgtgtatcaggaggtatagtggaag

SEQ ID NO: 105610 - DNA, 25 bp, probe
gatgtgtatcaggaggtatagtgga

SEQ ID NO: 105611 - DNA, 25 bp, probe
agatgtgtatcaggaggtatagtgg

SEQ ID NO: 105612 - DNA, 25 bp, probe
gtatcaggaggtatagtggaagaat

SEQ ID NO: 105613 - DNA, 25 bp, probe
taggagatgtgtatcaggaggtata

SEQ ID NO: 105614 - DNA, 25 bp, probe
ctaggagatgtgtatcaggaggtat

SEQ ID NO: 105615 - DNA, 25 bp, probe
atcaggaggtatagtggaagaatac

SEQ ID NO: 105616 - DNA, 25 bp, probe
tatcaggaggtatagtggaagaata

SEQ ID NO: 105617 - DNA, 25 bp, probe
gctaggagatgtgtatcaggaggta

SEQ ID NO: 105618 - DNA, 25 bp, probe
agacatcaaataagcatccacagta

SEQ ID NO: 105619 - DNA, 25 bp, probe
aaagacatcaaataagcatccacag

SEQ ID NO: 105620 - DNA, 25 bp, probe
aagacatcaaataagcatccacagt

SEQ ID NO: 105621 - DNA, 25 bp, probe
aataagcatccacagtacaagcctt

SEQ ID NO: 105622 - DNA, 25 bp, probe
gagattgtgtgcatcaagaagttac

SEQ ID NO: 105623 - DNA, 25 bp, probe
cagtgatgagtgtctaaggcagatg

SEQ ID NO: 105624 - DNA, 25 bp, probe
ggtaacttgttcaagatatgatgca

SEQ ID NO: 105625 - DNA, 25 bp, probe
aaggagagattgatccatgtctgtt

SEQ ID NO: 105626 - DNA, 25 bp, probe
gacatcaaataagcatccacagtac

SEQ ID NO: 105627 - DNA, 25 bp, probe
catcaaataagcatccacagtacaa

SEQ ID NO: 105628 - DNA, 25 bp, probe
agaaggagagattgatccatgtctg

SEQ ID NO: 105629 - DNA, 25 bp, probe
cagaaggagagattgatccatgtct

SEQ ID NO: 105630 - DNA, 25 bp, probe
acatcaaataagcatccacagtaca

SEQ ID NO: 105631 - DNA, 25 bp, probe
ggagattgtgtgcatcaagaagtta

SEQ ID NO: 105632 - DNA, 25 bp, probe
atcaaataagcatccacagtacaag

SEQ ID NO: 105633 - DNA, 25 bp, probe
gaaggagagattgatccatgtctgt

SEQ ID NO: 105634 - DNA, 25 bp, probe
ttgctaggagatgtgtatcaggagg

SEQ ID NO: 105635 - DNA, 25 bp, probe
ccaggacattaaactctgataggag

SEQ ID NO: 105636 - DNA, 25 bp, probe
agattgtgtgcatcaagaagttacg

SEQ ID NO: 105637 - DNA, 25 bp, probe
agagattgatccatgtctgtttgta

SEQ ID NO: 105638 - DNA, 25 bp, probe
gagattgatccatgtctgtttgtag

SEQ ID NO: 105639 - DNA, 25 bp, probe
agattgatccatgtctgtttgtagg

SEQ ID NO: 105640 - DNA, 25 bp, probe
caggacattaaactctgataggaga

SEQ ID NO: 105641 - DNA, 25 bp, probe
gagagattgatccatgtctgtttgt

SEQ ID NO: 105642 - DNA, 25 bp, probe
tcaaataagcatccacagtacaagc

SEQ ID NO: 105643 - DNA, 25 bp, probe
gggtaacttgttcaagatatgatgc

SEQ ID NO: 105644 - DNA, 25 bp, probe
atccacagtacaagccttgaacatc

SEQ ID NO: 105645 - DNA, 25 bp, probe
ataagcatccacagtacaagccttg

SEQ ID NO: 105646 - DNA, 25 bp, probe
cccaggacattaaactctgatagga

SEQ ID NO: 105647 - DNA, 25 bp, probe
caagacatcaatgacaagaggttcc

SEQ ID NO: 105648 - DNA, 25 bp, probe
aagacatcaatgacaagaggttcca

SEQ ID NO: 105649 - DNA, 25 bp, probe
gcaagacatcaatgacaagaggttc

SEQ ID NO: 105650 - DNA, 25 bp, probe
actatgtggcaactcagatgacttc

SEQ ID NO: 105651 - DNA, 25 bp, probe
agacatcaatgacaagaggttccag

SEQ ID NO: 105652 - DNA, 25 bp, probe
ttcctcctaaatcaagcatctttct

SEQ ID NO: 105653 - DNA, 25 bp, probe
cttcctcctaaatcaagcatctttc

SEQ ID NO: 105654 - DNA, 25 bp, probe
tcctcctaaatcaagcatctttctg

SEQ ID NO: 105655 - DNA, 25 bp, probe
ctcctaaatcaagcatctttctgtt

SEQ ID NO: 105656 - DNA, 25 bp, probe
cctcctaaatcaagcatctttctgt

SEQ ID NO: 105657 - DNA, 25 bp, probe
ctatgtggcaactcagatgacttcc

SEQ ID NO: 105658 - DNA, 25 bp, probe
atcaatgacaagaggttccaggaga

SEQ ID NO: 105659 - DNA, 25 bp, probe
catcaatgacaagaggttccaggag

SEQ ID NO: 105660 - DNA, 25 bp, probe
aaatcaagcatctttctgttactga

SEQ ID NO: 105661 - DNA, 25 bp, probe
gacatcaatgacaagaggttccagg

SEQ ID NO: 105662 - DNA, 25 bp, probe
cctaaatcaagcatctttctgttac

SEQ ID NO: 105663 - DNA, 25 bp, probe
tcctaaatcaagcatctttctgtta

SEQ ID NO: 105664 - DNA, 25 bp, probe
tatgtggcaactcagatgacttcct

SEQ ID NO: 105665 - DNA, 25 bp, probe
cactatgtggcaactcagatgactt

SEQ ID NO: 105666 - DNA, 25 bp, probe
ttatgctggacacagtgacactatg

SEQ ID NO: 105667 - DNA, 25 bp, probe
acatcaatgacaagaggttccagga

SEQ ID NO: 105668 - DNA, 25 bp, probe
taaatcaagcatctttctgttactg

SEQ ID NO: 105669 - DNA, 25 bp, probe
attgcatactctaagatctccaagc

SEQ ID NO: 105670 - DNA, 25 bp, probe
ccaaagagatgactgtcacttacat

SEQ ID NO: 105671 - DNA, 25 bp, probe
ctccaaagagatgactgtcacttac

SEQ ID NO: 105672 - DNA, 25 bp, probe
ctaaatcaagcatctttctgttact

SEQ ID NO: 105673 - DNA, 25 bp, probe
gattgcatactctaagatctccaag

SEQ ID NO: 105674 - DNA, 25 bp, probe
tgcaagacatcaatgacaagaggtt

SEQ ID NO: 105675 - DNA, 25 bp, probe
tcaatgacaagaggttccaggagac

SEQ ID NO: 105676 - DNA, 25 bp, probe
gacactatgtggcaactcagatgac

SEQ ID NO: 105677 - DNA, 25 bp, probe
tccaaagagatgactgtcacttaca

SEQ ID NO: 105678 - DNA, 25 bp, probe
gtgtgcaagacatcaatgacaagag

SEQ ID NO: 105679 - DNA, 25 bp, probe
gtgacactatgtggcaactcagatg

SEQ ID NO: 105680 - DNA, 25 bp, probe
acactatgtggcaactcagatgact

SEQ ID NO: 105681 - DNA, 25 bp, probe
tgacactatgtggcaactcagatga

SEQ ID NO: 105682 - DNA, 25 bp, probe
aagagatgactgtcacttacatcga

SEQ ID NO: 105683 - DNA, 25 bp, probe
tttatgctggacacagtgacactat

SEQ ID NO: 105684 - DNA, 25 bp, probe
tatgctggacacagtgacactatgt

SEQ ID NO: 105685 - DNA, 25 bp, probe
gctccaaagagatgactgtcactta

SEQ ID NO: 105686 - DNA, 25 bp, probe
gtgcaagacatcaatgacaagaggt

SEQ ID NO: 105687 - DNA, 25 bp, probe
agagatgactgtcacttacatcgag

SEQ ID NO: 105688 - DNA, 25 bp, probe
ttgcatactctaagatctccaagcg

SEQ ID NO: 105689 - DNA, 25 bp, probe
cagattgcatactctaagatctcca

SEQ ID NO: 105690 - DNA, 25 bp, probe
ccagattgcatactctaagatctcc

SEQ ID NO: 105691 - DNA, 25 bp, probe
aattacaccagagagacagagtcct

SEQ ID NO: 105692 - DNA, 25 bp, probe
attacaccagagagacagagtcctc

SEQ ID NO: 105693 - DNA, 25 bp, probe
attcccaaagctcttaattctccat

SEQ ID NO: 105694 - DNA, 25 bp, probe
tcccaaagctcttaattctccataa

SEQ ID NO: 105695 - DNA, 25 bp, probe
ttcccaaagctcttaattctccata

SEQ ID NO: 105696 - DNA, 25 bp, probe
cccaaagctcttaattctccataaa

SEQ ID NO: 105697 - DNA, 25 bp, probe
cattcccaaagctcttaattctcca

SEQ ID NO: 105698 - DNA, 25 bp, probe
aaattacaccagagagacagagtcc

SEQ ID NO: 105699 - DNA, 25 bp, probe
tataaaggacatcctcatcatcacg

SEQ ID NO: 105700 - DNA, 25 bp, probe
gaacagggtgattgaggaaagtgaa

SEQ ID NO: 105701 - DNA, 25 bp, probe
aacagggtgattgaggaaagtgaac

SEQ ID NO: 105702 - DNA, 25 bp, probe
gcattcccaaagctcttaattctcc

SEQ ID NO: 105703 - DNA, 25 bp, probe
atataaaggacatcctcatcatcac

SEQ ID NO: 105704 - DNA, 25 bp, probe
ataaaggacatcctcatcatcacgg

SEQ ID NO: 105705 - DNA, 25 bp, probe
aacaatataaaggacatcctcatca

SEQ ID NO: 105706 - DNA, 25 bp, probe
acaatataaaggacatcctcatcat

SEQ ID NO: 105707 - DNA, 25 bp, probe
ggagtgtggacttaggaaaacaata

SEQ ID NO: 105708 - DNA, 25 bp, probe
aaaattacaccagagagacagagtc

SEQ ID NO: 105709 - DNA, 25 bp, probe
cataaaatgggctttcctctgtctg

SEQ ID NO: 105710 - DNA, 25 bp, probe
aatataaaggacatcctcatcatca

SEQ ID NO: 105711 - DNA, 25 bp, probe
agcattcccaaagctcttaattctc

SEQ ID NO: 105712 - DNA, 25 bp, probe
ttacaccagagagacagagtcctcc

SEQ ID NO: 105713 - DNA, 25 bp, probe
gagtgtggacttaggaaaacaatat

SEQ ID NO: 105714 - DNA, 25 bp, probe
attgggaacagggtgattgaggaaa

SEQ ID NO: 105715 - DNA, 25 bp, probe
cagcattcccaaagctcttaattct

SEQ ID NO: 105716 - DNA, 25 bp, probe
caatataaaggacatcctcatcatc

SEQ ID NO: 105717 - DNA, 25 bp, probe
aaacaatataaaggacatcctcatc

SEQ ID NO: 105718 - DNA, 25 bp, probe
gtgattgaggaaagtgaaccttggg

SEQ ID NO: 105719 - DNA, 25 bp, probe
ggaacagggtgattgaggaaagtga

SEQ ID NO: 105720 - DNA, 25 bp, probe
ccagcattcccaaagctcttaattc

SEQ ID NO: 105721 - DNA, 25 bp, probe
agtgtggacttaggaaaacaatata

SEQ ID NO: 105722 - DNA, 25 bp, probe
gattgaggaaagtgaaccttgggtg

SEQ ID NO: 105723 - DNA, 25 bp, probe
ggtgattgaggaaagtgaaccttgg

SEQ ID NO: 105724 - DNA, 25 bp, probe
gggtgattgaggaaagtgaaccttg

SEQ ID NO: 105725 - DNA, 25 bp, probe
ttgggaacagggtgattgaggaaag

SEQ ID NO: 105726 - DNA, 25 bp, probe
cattgggaacagggtgattgaggaa

SEQ ID NO: 105727 - DNA, 25 bp, probe
gggagtgtggacttaggaaaacaat

SEQ ID NO: 105728 - DNA, 25 bp, probe
tccagcattcccaaagctcttaatt

SEQ ID NO: 105729 - DNA, 25 bp, probe
agggtgattgaggaaagtgaacctt

SEQ ID NO: 105730 - DNA, 25 bp, probe
ataaaatgggctttcctctgtctgc

SEQ ID NO: 105731 - DNA, 25 bp, probe
ccaaagctcttaattctccataaaa

SEQ ID NO: 105732 - DNA, 25 bp, probe
taaaggacatcctcatcatcacggg

SEQ ID NO: 105733 - DNA, 25 bp, probe
tggacttaggaaaacaatataaagg

SEQ ID NO: 105734 - DNA, 25 bp, probe
tgattgaggaaagtgaaccttgggt

SEQ ID NO: 105735 - DNA, 25 bp, probe
gtcatcagatactcagaggctgtat

SEQ ID NO: 105736 - DNA, 25 bp, probe
aggacaggtcatcagatactcagag

SEQ ID NO: 105737 - DNA, 25 bp, probe
gactcaaactaacaatggcttcaac

SEQ ID NO: 105738 - DNA, 25 bp, probe
tgacagagatgtaacaagctcatag

SEQ ID NO: 105739 - DNA, 25 bp, probe
caggacaggtcatcagatactcaga

SEQ ID NO: 105740 - DNA, 25 bp, probe
gacagagatgtaacaagctcatagg

SEQ ID NO: 105741 - DNA, 25 bp, probe
ttaggtttgctacaagatggttact

SEQ ID NO: 105742 - DNA, 25 bp, probe
gttaggtttgctacaagatggttac

SEQ ID NO: 105743 - DNA, 25 bp, probe
taggtttgctacaagatggttactg

SEQ ID NO: 105744 - DNA, 25 bp, probe
aaactaacaatggcttcaacgagaa

SEQ ID NO: 105745 - DNA, 25 bp, probe
tgttaggtttgctacaagatggtta

SEQ ID NO: 105746 - DNA, 25 bp, probe
cttccaatgttaggtttgctacaag

SEQ ID NO: 105747 - DNA, 25 bp, probe
caatgttaggtttgctacaagatgg

SEQ ID NO: 105748 - DNA, 25 bp, probe
ccaatgttaggtttgctacaagatg

SEQ ID NO: 105749 - DNA, 25 bp, probe
tccaatgttaggtttgctacaagat

SEQ ID NO: 105750 - DNA, 25 bp, probe
atgttaggtttgctacaagatggtt

SEQ ID NO: 105751 - DNA, 25 bp, probe
aatgttaggtttgctacaagatggt

SEQ ID NO: 105752 - DNA, 25 bp, probe
ttccaatgttaggtttgctacaaga

SEQ ID NO: 105753 - DNA, 25 bp, probe
caaactaacaatggcttcaacgaga

SEQ ID NO: 105754 - DNA, 25 bp, probe
tcaaactaacaatggcttcaacgag

SEQ ID NO: 105755 - DNA, 25 bp, probe
ctcaaactaacaatggcttcaacga

SEQ ID NO: 105756 - DNA, 25 bp, probe
cgactcaaactaacaatggcttcaa

SEQ ID NO: 105757 - DNA, 25 bp, probe
gtttgctacaagatggttactggag

SEQ ID NO: 105758 - DNA, 25 bp, probe
ggacaggtcatcagatactcagagg

SEQ ID NO: 105759 - DNA, 25 bp, probe
ggtcatcagatactcagaggctgta

SEQ ID NO: 105760 - DNA, 25 bp, probe
actcaaactaacaatggcttcaacg

SEQ ID NO: 105761 - DNA, 25 bp, probe
taggaagagcgactcaaactaacaa

SEQ ID NO: 105762 - DNA, 25 bp, probe
tgtaacaagctcatagggtatcaat

SEQ ID NO: 105763 - DNA, 25 bp, probe
gatgtaacaagctcatagggtatca

SEQ ID NO: 105764 - DNA, 25 bp, probe
agatgtaacaagctcatagggtatc

SEQ ID NO: 105765 - DNA, 25 bp, probe
atgtaacaagctcatagggtatcaa

SEQ ID NO: 105766 - DNA, 25 bp, probe
aatgacagagatgtaacaagctcat

SEQ ID NO: 105767 - DNA, 25 bp, probe
atgacagagatgtaacaagctcata

SEQ ID NO: 105768 - DNA, 25 bp, probe
gaagagcgactcaaactaacaatgg

SEQ ID NO: 105769 - DNA, 25 bp, probe
ggaagagcgactcaaactaacaatg

SEQ ID NO: 105770 - DNA, 25 bp, probe
acaagctcatagggtatcaatatct

SEQ ID NO: 105771 - DNA, 25 bp, probe
gcttccaatgttaggtttgctacaa

SEQ ID NO: 105772 - DNA, 25 bp, probe
cttgacaaatggcttccaatgttag

SEQ ID NO: 105773 - DNA, 25 bp, probe
ggtacgtgactatccctaataacaa

SEQ ID NO: 105774 - DNA, 25 bp, probe
aggaagagcgactcaaactaacaat

SEQ ID NO: 105775 - DNA, 25 bp, probe
ctaggaagagcgactcaaactaaca

SEQ ID NO: 105776 - DNA, 25 bp, probe
gagatgtaacaagctcatagggtat

SEQ ID NO: 105777 - DNA, 25 bp, probe
gacaggtcatcagatactcagaggc

SEQ ID NO: 105778 - DNA, 25 bp, probe
caagctcatagggtatcaatatctc

SEQ ID NO: 105779 - DNA, 25 bp, probe
ccagaaccatgagatgtatgactat

SEQ ID NO: 105780 - DNA, 25 bp, probe
tccagaaccatgagatgtatgacta

SEQ ID NO: 105781 - DNA, 25 bp, probe
acttggcttctggtcttgatgtatt

SEQ ID NO: 105782 - DNA, 25 bp, probe
tattgaagttcatggtggatattgc

SEQ ID NO: 105783 - DNA, 25 bp, probe
gtcttccttaccaagtgaactccat

SEQ ID NO: 105784 - DNA, 25 bp, probe
cagaaccatgagatgtatgactatc

SEQ ID NO: 105785 - DNA, 25 bp, probe
ttgtcttccttaccaagtgaactcc

SEQ ID NO: 105786 - DNA, 25 bp, probe
atggagtatctgagcaacaggaatt

SEQ ID NO: 105787 - DNA, 25 bp, probe
aatggagtatctgagcaacaggaat

SEQ ID NO: 105788 - DNA, 25 bp, probe
attgaagttcatggtggatattgcc

SEQ ID NO: 105789 - DNA, 25 bp, probe
tgcctggatgaactgtatgaaataa

SEQ ID NO: 105790 - DNA, 25 bp, probe
ctgcctggatgaactgtatgaaata

SEQ ID NO: 105791 - DNA, 25 bp, probe
aaagcaccagatgaatgttgttaag

SEQ ID NO: 105792 - DNA, 25 bp, probe
gcctggatgaactgtatgaaataat

SEQ ID NO: 105793 - DNA, 25 bp, probe
aagatttacagtggcgattattacc

SEQ ID NO: 105794 - DNA, 25 bp, probe
agatttacagtggcgattattaccg

SEQ ID NO: 105795 - DNA, 25 bp, probe
tcttccttaccaagtgaactccatg

SEQ ID NO: 105796 - DNA, 25 bp, probe
gcttctggtcttgatgtatttgata

SEQ ID NO: 105797 - DNA, 25 bp, probe
ggcttctggtcttgatgtatttgat

SEQ ID NO: 105798 - DNA, 25 bp, probe
tctaagaagatttacagtggcgatt

SEQ ID NO: 105799 - DNA, 25 bp, probe
aagaagatttacagtggcgattatt

SEQ ID NO: 105800 - DNA, 25 bp, probe
ctctaagaagatttacagtggcgat

SEQ ID NO: 105801 - DNA, 25 bp, probe
cttggcttctggtcttgatgtattt

SEQ ID NO: 105802 - DNA, 25 bp, probe
ctaagaagatttacagtggcgatta

SEQ ID NO: 105803 - DNA, 25 bp, probe
gaatggagtatctgagcaacaggaa

SEQ ID NO: 105804 - DNA, 25 bp, probe
cctctctaagaagatttacagtggc

SEQ ID NO: 105805 - DNA, 25 bp, probe
gcctctctaagaagatttacagtgg

SEQ ID NO: 105806 - DNA, 25 bp, probe
gaagactgcctggatgaactgtatg

SEQ ID NO: 105807 - DNA, 25 bp, probe
atttgtcttccttaccaagtgaact

SEQ ID NO: 105808 - DNA, 25 bp, probe
caaagcaccagatgaatgttgttaa

SEQ ID NO: 105809 - DNA, 25 bp, probe
gtccagaaccatgagatgtatgact

SEQ ID NO: 105810 - DNA, 25 bp, probe
ttggcttctggtcttgatgtatttg

SEQ ID NO: 105811 - DNA, 25 bp, probe
ctctctaagaagatttacagtggcg

SEQ ID NO: 105812 - DNA, 25 bp, probe
gacttggcttctggtcttgatgtat

SEQ ID NO: 105813 - DNA, 25 bp, probe
tttgtcttccttaccaagtgaactc

SEQ ID NO: 105814 - DNA, 25 bp, probe
tatttgtcttccttaccaagtgaac

SEQ ID NO: 105815 - DNA, 25 bp, probe
gtatttgtcttccttaccaagtgaa

SEQ ID NO: 105816 - DNA, 25 bp, probe
tctctaagaagatttacagtggcga

SEQ ID NO: 105817 - DNA, 25 bp, probe
gaagatttacagtggcgattattac

SEQ ID NO: 105818 - DNA, 25 bp, probe
tgtcttccttaccaagtgaactcca

SEQ ID NO: 105819 - DNA, 25 bp, probe
agaagatttacagtggcgattatta

SEQ ID NO: 105820 - DNA, 25 bp, probe
taagaagatttacagtggcgattat

SEQ ID NO: 105821 - DNA, 25 bp, probe
agactgcctggatgaactgtatgaa

SEQ ID NO: 105822 - DNA, 25 bp, probe
aagactgcctggatgaactgtatga

SEQ ID NO: 105823 - DNA, 25 bp, probe
atagccttattagttgtgtggttga

SEQ ID NO: 105824 - DNA, 25 bp, probe
cctgtgattatgtatagccttggaa

SEQ ID NO: 105825 - DNA, 25 bp, probe
ttcctgtgattatgtatagccttgg

SEQ ID NO: 105826 - DNA, 25 bp, probe
atctgttgtggcattctatcttgta

SEQ ID NO: 105827 - DNA, 25 bp, probe
atcatctgttgtggcattctatctt

SEQ ID NO: 105828 - DNA, 25 bp, probe
aatcatctgttgtggcattctatct

SEQ ID NO: 105829 - DNA, 25 bp, probe
tctgttgtggcattctatcttgtag

SEQ ID NO: 105830 - DNA, 25 bp, probe
gtgattatgtatagccttggaatgg

SEQ ID NO: 105831 - DNA, 25 bp, probe
tagccttattagttgtgtggttgac

SEQ ID NO: 105832 - DNA, 25 bp, probe
taatcatctgttgtggcattctatc

SEQ ID NO: 105833 - DNA, 25 bp, probe
tcatctgttgtggcattctatcttg

SEQ ID NO: 105834 - DNA, 25 bp, probe
gataatcatctgttgtggcattcta

SEQ ID NO: 105835 - DNA, 25 bp, probe
catctgttgtggcattctatcttgt

SEQ ID NO: 105836 - DNA, 25 bp, probe
tgtgattatgtatagccttggaatg

SEQ ID NO: 105837 - DNA, 25 bp, probe
tatagccttattagttgtgtggttg

SEQ ID NO: 105838 - DNA, 25 bp, probe
gttgtggcattctatcttgtaggac

SEQ ID NO: 105839 - DNA, 25 bp, probe
ctgttgtggcattctatcttgtagg

SEQ ID NO: 105840 - DNA, 25 bp, probe
ctgtgattatgtatagccttggaat

SEQ ID NO: 105841 - DNA, 25 bp, probe
atgtacttctggcaattctatctgt

SEQ ID NO: 105842 - DNA, 25 bp, probe
tgttgtggcattctatcttgtagga

SEQ ID NO: 105843 - DNA, 25 bp, probe
ataatcatctgttgtggcattctat

SEQ ID NO: 105844 - DNA, 25 bp, probe
tgtacttctggcaattctatctgta

SEQ ID NO: 105845 - DNA, 25 bp, probe
gcattctatcttgtaggacactgta

SEQ ID NO: 105846 - DNA, 25 bp, probe
ttgtatgtcatagtatgtcgtcaca

SEQ ID NO: 105847 - DNA, 25 bp, probe
ttatagccttattagttgtgtggtt

SEQ ID NO: 105848 - DNA, 25 bp, probe
gatagtgagcgtaacatctgtatta

SEQ ID NO: 105849 - DNA, 25 bp, probe
attatagccttattagttgtgtggt

SEQ ID NO: 105850 - DNA, 25 bp, probe
tatgtacttctggcaattctatctg

SEQ ID NO: 105851 - DNA, 25 bp, probe
aagaatagctgtgagaccgaattaa

SEQ ID NO: 105852 - DNA, 25 bp, probe
ttaagaatagctgtgagaccgaatt

SEQ ID NO: 105853 - DNA, 25 bp, probe
gtacttctggcaattctatctgtat

SEQ ID NO: 105854 - DNA, 25 bp, probe
atagtgagcgtaacatctgtattaa

SEQ ID NO: 105855 - DNA, 25 bp, probe
taagaatagctgtgagaccgaatta

SEQ ID NO: 105856 - DNA, 25 bp, probe
ttgtggcattctatcttgtaggaca

SEQ ID NO: 105857 - DNA, 25 bp, probe
tcctgtgattatgtatagccttgga

SEQ ID NO: 105858 - DNA, 25 bp, probe
tacttctggcaattctatctgtatt

SEQ ID NO: 105859 - DNA, 25 bp, probe
tatcttgtaggacactgtatattgc

SEQ ID NO: 105860 - DNA, 25 bp, probe
tatgagaatagatgtgtgggtgaag

SEQ ID NO: 105861 - DNA, 25 bp, probe
ggcattctatcttgtaggacactgt

SEQ ID NO: 105862 - DNA, 25 bp, probe
tggcattctatcttgtaggacactg

SEQ ID NO: 105863 - DNA, 25 bp, probe
cactgactctgctactttaggataa

SEQ ID NO: 105864 - DNA, 25 bp, probe
acactgactctgctactttaggata

SEQ ID NO: 105865 - DNA, 25 bp, probe
tgtatgtcatagtatgtcgtcacat

SEQ ID NO: 105866 - DNA, 25 bp, probe
cttcaagtacacactgactctgcta

SEQ ID NO: 105867 - DNA, 25 bp, probe
cataagatgaacactggagaagaat

SEQ ID NO: 105868 - DNA, 25 bp, probe
agatgaacactggagaagaatatca

SEQ ID NO: 105869 - DNA, 25 bp, probe
ccatcaggctgttattatgaaggaa

SEQ ID NO: 105870 - DNA, 25 bp, probe
aagatgaacactggagaagaatatc

SEQ ID NO: 105871 - DNA, 25 bp, probe
ggttattcattattcctcagattgc

SEQ ID NO: 105872 - DNA, 25 bp, probe
catcaggctgttattatgaaggaat

SEQ ID NO: 105873 - DNA, 25 bp, probe
tgtgtcaactgagagtcatatacat

SEQ ID NO: 105874 - DNA, 25 bp, probe
atgtgtcaactgagagtcatataca

SEQ ID NO: 105875 - DNA, 25 bp, probe
gatgaacactggagaagaatatcaa

SEQ ID NO: 105876 - DNA, 25 bp, probe
aatgagaggagaacagtaggattgc

SEQ ID NO: 105877 - DNA, 25 bp, probe
gcaggacagtcaaggtgatatataa

SEQ ID NO: 105878 - DNA, 25 bp, probe
atcaggctgttattatgaaggaatt

SEQ ID NO: 105879 - DNA, 25 bp, probe
gtgtcaactgagagtcatatacatt

SEQ ID NO: 105880 - DNA, 25 bp, probe
agtatgtgtcaactgagagtcatat

SEQ ID NO: 105881 - DNA, 25 bp, probe
ttctgtacttcagtatgtgtcaact

SEQ ID NO: 105882 - DNA, 25 bp, probe
agtggttattcattattcctcagat

SEQ ID NO: 105883 - DNA, 25 bp, probe
gagtggttattcattattcctcaga

SEQ ID NO: 105884 - DNA, 25 bp, probe
agagtggttattcattattcctcag

SEQ ID NO: 105885 - DNA, 25 bp, probe
atgagaggagaacagtaggattgct

SEQ ID NO: 105886 - DNA, 25 bp, probe
aaatgagaggagaacagtaggattg

SEQ ID NO: 105887 - DNA, 25 bp, probe
gttattcattattcctcagattgct

SEQ ID NO: 105888 - DNA, 25 bp, probe
ataagatgaacactggagaagaata

SEQ ID NO: 105889 - DNA, 25 bp, probe
taagatgaacactggagaagaatat

SEQ ID NO: 105890 - DNA, 25 bp, probe
tgtctaatagcccataaagtctgag

SEQ ID NO: 105891 - DNA, 25 bp, probe
aacggatgagttattatctatggaa

SEQ ID NO: 105892 - DNA, 25 bp, probe
gcccataaagtctgagaaataggta

SEQ ID NO: 105893 - DNA, 25 bp, probe
acttgattgtacttggagtaattgc

SEQ ID NO: 105894 - DNA, 25 bp, probe
tagcccataaagtctgagaaatagg

SEQ ID NO: 105895 - DNA, 25 bp, probe
gtcgatcaagagaatcaacagatga

SEQ ID NO: 105896 - DNA, 25 bp, probe
acagactcttcatattcagatgcaa

SEQ ID NO: 105897 - DNA, 25 bp, probe
aacagactcttcatattcagatgca

SEQ ID NO: 105898 - DNA, 25 bp, probe
tataatttcctcactgcctggtaaa

SEQ ID NO: 105899 - DNA, 25 bp, probe
atacaatgttatcaaccaactgcac

SEQ ID NO: 105900 - DNA, 25 bp, probe
atataatttcctcactgcctggtaa

SEQ ID NO: 105901 - DNA, 25 bp, probe
aatacaatgttatcaaccaactgca

SEQ ID NO: 105902 - DNA, 25 bp, probe
atgtgagaaatgtctaatagcccat

SEQ ID NO: 105903 - DNA, 25 bp, probe
aatgtgagaaatgtctaatagccca

SEQ ID NO: 105904 - DNA, 25 bp, probe
atgtcgatcaagagaatcaacagat

SEQ ID NO: 105905 - DNA, 25 bp, probe
aatgtcgatcaagagaatcaacaga

SEQ ID NO: 105906 - DNA, 25 bp, probe
tatgaaggaatttgattgctttgct

SEQ ID NO: 105907 - DNA, 25 bp, probe
gtctaatagcccataaagtctgaga

SEQ ID NO: 105908 - DNA, 25 bp, probe
agcccataaagtctgagaaataggt

SEQ ID NO: 105909 - DNA, 25 bp, probe
tgtgagaaatgtctaatagcccata

SEQ ID NO: 105910 - DNA, 25 bp, probe
tggttattcattattcctcagattg

SEQ ID NO: 105911 - DNA, 25 bp, probe
attcttctccagtgttcatcttatg

SEQ ID NO: 105912 - DNA, 25 bp, probe
tgatattcttctccagtgttcatct

SEQ ID NO: 105913 - DNA, 25 bp, probe
gatattcttctccagtgttcatctt

SEQ ID NO: 105914 - DNA, 25 bp, probe
ttccttcataataacagcctgatgg

SEQ ID NO: 105915 - DNA, 25 bp, probe
gcaatctgaggaataatgaataacc

SEQ ID NO: 105916 - DNA, 25 bp, probe
attccttcataataacagcctgatg

SEQ ID NO: 105917 - DNA, 25 bp, probe
ttgatattcttctccagtgttcatc

SEQ ID NO: 105918 - DNA, 25 bp, probe
ttatatatcaccttgactgtcctgc

SEQ ID NO: 105919 - DNA, 25 bp, probe
aattccttcataataacagcctgat

SEQ ID NO: 105920 - DNA, 25 bp, probe
atctgaggaataatgaataaccact

SEQ ID NO: 105921 - DNA, 25 bp, probe
ctgaggaataatgaataaccactct

SEQ ID NO: 105922 - DNA, 25 bp, probe
tctgaggaataatgaataaccactc

SEQ ID NO: 105923 - DNA, 25 bp, probe
tattcttctccagtgttcatcttat

SEQ ID NO: 105924 - DNA, 25 bp, probe
agcaatctgaggaataatgaataac

SEQ ID NO: 105925 - DNA, 25 bp, probe
atattcttctccagtgttcatctta

SEQ ID NO: 105926 - DNA, 25 bp, probe
tgcatctgaatatgaagagtctgtt

SEQ ID NO: 105927 - DNA, 25 bp, probe
ttgcatctgaatatgaagagtctgt

SEQ ID NO: 105928 - DNA, 25 bp, probe
tcatctgttgattctcttgatcgac

SEQ ID NO: 105929 - DNA, 25 bp, probe
gtgcagttggttgataacattgtat

SEQ ID NO: 105930 - DNA, 25 bp, probe
tttaccaggcagtgaggaaattata

SEQ ID NO: 105931 - DNA, 25 bp, probe
ttaccaggcagtgaggaaattatat

SEQ ID NO: 105932 - DNA, 25 bp, probe
tgcagttggttgataacattgtatt

SEQ ID NO: 105933 - DNA, 25 bp, probe
atctgttgattctcttgatcgacat

SEQ ID NO: 105934 - DNA, 25 bp, probe
tctgttgattctcttgatcgacatt

SEQ ID NO: 105935 - DNA, 25 bp, probe
agcaaagcaatcaaattccttcata

SEQ ID NO: 105936 - DNA, 25 bp, probe
aatctgaggaataatgaataaccac

SEQ ID NO: 105937 - DNA, 25 bp, probe
caatctgaggaataatgaataacca

SEQ ID NO: 105938 - DNA, 25 bp, probe
gcatctgaatatgaagagtctgttt

SEQ ID NO: 105939 - DNA, 25 bp, probe
attatatatcaccttgactgtcctg

SEQ ID NO: 105940 - DNA, 25 bp, probe
catctgttgattctcttgatcgaca

SEQ ID NO: 105941 - DNA, 25 bp, probe
tatatatcaccttgactgtcctgca

SEQ ID NO: 105942 - DNA, 25 bp, probe
gcaaagcaatcaaattccttcataa

SEQ ID NO: 105943 - DNA, 25 bp, probe
accactctaatcagtaaacaggaaa

SEQ ID NO: 105944 - DNA, 25 bp, probe
aaccactctaatcagtaaacaggaa

SEQ ID NO: 105945 - DNA, 25 bp, probe
gccaactttatcctatcacttgaat

SEQ ID NO: 105946 - DNA, 25 bp, probe
ttcataataacagcctgatgggatt

SEQ ID NO: 105947 - DNA, 25 bp, probe
cagcaaagcaatcaaattccttcat

SEQ ID NO: 105948 - DNA, 25 bp, probe
tcataataacagcctgatgggattc

SEQ ID NO: 105949 - DNA, 25 bp, probe
cttcataataacagcctgatgggat

SEQ ID NO: 105950 - DNA, 25 bp, probe
gattgtgcagttggttgataacatt

SEQ ID NO: 105951 - DNA, 25 bp, probe
tcaaattccttcataataacagcct

SEQ ID NO: 105952 - DNA, 25 bp, probe
cataataacagcctgatgggattca

SEQ ID NO: 105953 - DNA, 25 bp, probe
caaattccttcataataacagcctg

SEQ ID NO: 105954 - DNA, 25 bp, probe
aaatagtcttcaagtttccaacgca

SEQ ID NO: 105955 - DNA, 25 bp, probe
ggacaagaaggatacaaggtaagtt

SEQ ID NO: 105956 - DNA, 25 bp, probe
cacaatatccaatgaagaaggtctc

SEQ ID NO: 105957 - DNA, 25 bp, probe
acaatatccaatgaagaaggtctca

SEQ ID NO: 105958 - DNA, 25 bp, probe
tcacaatatccaatgaagaaggtct

SEQ ID NO: 105959 - DNA, 25 bp, probe
ttggaccatgaatgatatgctagaa

SEQ ID NO: 105960 - DNA, 25 bp, probe
tggaccatgaatgatatgctagaat

SEQ ID NO: 105961 - DNA, 25 bp, probe
attggaccatgaatgatatgctaga

SEQ ID NO: 105962 - DNA, 25 bp, probe
ggattggaccatgaatgatatgcta

SEQ ID NO: 105963 - DNA, 25 bp, probe
gattggaccatgaatgatatgctag

SEQ ID NO: 105964 - DNA, 25 bp, probe
tgaagaaggtctcattatctccatg

SEQ ID NO: 105965 - DNA, 25 bp, probe
tcaactgtctattgtcacatgatga

SEQ ID NO: 105966 - DNA, 25 bp, probe
actcaactgtctattgtcacatgat

SEQ ID NO: 105967 - DNA, 25 bp, probe
aactcaactgtctattgtcacatga

SEQ ID NO: 105968 - DNA, 25 bp, probe
ctcaactgtctattgtcacatgatg

SEQ ID NO: 105969 - DNA, 25 bp, probe
caactgtctattgtcacatgatgaa

SEQ ID NO: 105970 - DNA, 25 bp, probe
ttaactcaactgtctattgtcacat

SEQ ID NO: 105971 - DNA, 25 bp, probe
aggattggaccatgaatgatatgct

SEQ ID NO: 105972 - DNA, 25 bp, probe
caggattggaccatgaatgatatgc

SEQ ID NO: 105973 - DNA, 25 bp, probe
gcaggattggaccatgaatgatatg

SEQ ID NO: 105974 - DNA, 25 bp, probe
taactcaactgtctattgtcacatg

SEQ ID NO: 105975 - DNA, 25 bp, probe
acaggaaatacagagatgaacaact

SEQ ID NO: 105976 - DNA, 25 bp, probe
tttctcagggtatagtcaatatgcc

SEQ ID NO: 105977 - DNA, 25 bp, probe
ggaccatgaatgatatgctagaata

SEQ ID NO: 105978 - DNA, 25 bp, probe
aaggatacaaggtaagtttcagtgg

SEQ ID NO: 105979 - DNA, 25 bp, probe
aaatacagagatgaacaactttgcc

SEQ ID NO: 105980 - DNA, 25 bp, probe
cttcctttcttccacaaacacatat

SEQ ID NO: 105981 - DNA, 25 bp, probe
aactgtctattgtcacatgatgaat

SEQ ID NO: 105982 - DNA, 25 bp, probe
atacagagatgaacaactttgcctt

SEQ ID NO: 105983 - DNA, 25 bp, probe
aatacagagatgaacaactttgcct

SEQ ID NO: 105984 - DNA, 25 bp, probe
ggatacaaggtaagtttcagtggag

SEQ ID NO: 105985 - DNA, 25 bp, probe
ttcctttcttccacaaacacatatt

SEQ ID NO: 105986 - DNA, 25 bp, probe
caggaaatacagagatgaacaactt

SEQ ID NO: 105987 - DNA, 25 bp, probe
gaaggatacaaggtaagtttcagtg

SEQ ID NO: 105988 - DNA, 25 bp, probe
ccttcctttcttccacaaacacata

SEQ ID NO: 105989 - DNA, 25 bp, probe
ggcaagctggagttaataatctata

SEQ ID NO: 105990 - DNA, 25 bp, probe
aggatacaaggtaagtttcagtgga

SEQ ID NO: 105991 - DNA, 25 bp, probe
agaaggatacaaggtaagtttcagt

SEQ ID NO: 105992 - DNA, 25 bp, probe
gaaatacagagatgaacaactttgc

SEQ ID NO: 105993 - DNA, 25 bp, probe
ggttctacaggaaatacagagatga

SEQ ID NO: 105994 - DNA, 25 bp, probe
aggttctacaggaaatacagagatg

SEQ ID NO: 105995 - DNA, 25 bp, probe
cagttgccaaagaatctaggaaatt

SEQ ID NO: 105996 - DNA, 25 bp, probe
ctttctcagggtatagtcaatatgc

SEQ ID NO: 105997 - DNA, 25 bp, probe
tcagttgccaaagaatctaggaaat

SEQ ID NO: 105998 - DNA, 25 bp, probe
atcagttgccaaagaatctaggaaa

SEQ ID NO: 105999 - DNA, 25 bp, probe
agcatgactgtagataaggatagca

SEQ ID NO: 106000 - DNA, 25 bp, probe
cagtattgccatgaaccatatatcg

SEQ ID NO: 106001 - DNA, 25 bp, probe
atgactgtagataaggatagcagca

SEQ ID NO: 106002 - DNA, 25 bp, probe
ggagattatgttgacagaggatatt

SEQ ID NO: 106003 - DNA, 25 bp, probe
tgactgtagataaggatagcagcaa

SEQ ID NO: 106004 - DNA, 25 bp, probe
acagtattgccatgaaccatatatc

SEQ ID NO: 106005 - DNA, 25 bp, probe
acattaacacctcgtgaatacaatt

SEQ ID NO: 106006 - DNA, 25 bp, probe
aacattaacacctcgtgaatacaat

SEQ ID NO: 106007 - DNA, 25 bp, probe
gtacagtattgccatgaaccatata

SEQ ID NO: 106008 - DNA, 25 bp, probe
tactcagcatgactgtagataagga

SEQ ID NO: 106009 - DNA, 25 bp, probe
ttactcagcatgactgtagataagg

SEQ ID NO: 106010 - DNA, 25 bp, probe
gccatgaaccatatatcgacctaat

SEQ ID NO: 106011 - DNA, 25 bp, probe
gtattgccatgaaccatatatcgac

SEQ ID NO: 106012 - DNA, 25 bp, probe
agtattgccatgaaccatatatcga

SEQ ID NO: 106013 - DNA, 25 bp, probe
catgactgtagataaggatagcagc

SEQ ID NO: 106014 - DNA, 25 bp, probe
gcatgactgtagataaggatagcag

SEQ ID NO: 106015 - DNA, 25 bp, probe
cagcatgactgtagataaggatagc

SEQ ID NO: 106016 - DNA, 25 bp, probe
tattgccatgaaccatatatcgacc

SEQ ID NO: 106017 - DNA, 25 bp, probe
tcagcatgactgtagataaggatag

SEQ ID NO: 106018 - DNA, 25 bp, probe
ctcagcatgactgtagataaggata

SEQ ID NO: 106019 - DNA, 25 bp, probe
actcagcatgactgtagataaggat

SEQ ID NO: 106020 - DNA, 25 bp, probe
tgttgacagaggatattattcagtt

SEQ ID NO: 106021 - DNA, 25 bp, probe
tttattccctactcaaatctcagcc

SEQ ID NO: 106022 - DNA, 25 bp, probe
gttattgtcagaacctggtgagttg

SEQ ID NO: 106023 - DNA, 25 bp, probe
gtttattccctactcaaatctcagc

SEQ ID NO: 106024 - DNA, 25 bp, probe
ccatgaaccatatatcgacctaatg

SEQ ID NO: 106025 - DNA, 25 bp, probe
agataaggatagcagcaaacaatca

SEQ ID NO: 106026 - DNA, 25 bp, probe
gataaggatagcagcaaacaatcat

SEQ ID NO: 106027 - DNA, 25 bp, probe
ttgacagaggatattattcagttga

SEQ ID NO: 106028 - DNA, 25 bp, probe
gttgacagaggatattattcagttg

SEQ ID NO: 106029 - DNA, 25 bp, probe
ttatgggagattatgttgacagagg

SEQ ID NO: 106030 - DNA, 25 bp, probe
tattgtcagaacctggtgagttgtt

SEQ ID NO: 106031 - DNA, 25 bp, probe
ttattgtcagaacctggtgagttgt

SEQ ID NO: 106032 - DNA, 25 bp, probe
tgttattgtcagaacctggtgagtt

SEQ ID NO: 106033 - DNA, 25 bp, probe
ttgttattgtcagaacctggtgagt

SEQ ID NO: 106034 - DNA, 25 bp, probe
atgttgacagaggatattattcagt

SEQ ID NO: 106035 - DNA, 25 bp, probe
tgggagattatgttgacagaggata

SEQ ID NO: 106036 - DNA, 25 bp, probe
tatgggagattatgttgacagagga

SEQ ID NO: 106037 - DNA, 25 bp, probe
gtagataaggatagcagcaaacaat

SEQ ID NO: 106038 - DNA, 25 bp, probe
gggagattatgttgacagaggatat

SEQ ID NO: 106039 - DNA, 25 bp, probe
ataaggatagcagcaaacaatcatt

SEQ ID NO: 106040 - DNA, 25 bp, probe
tgccatgaaccatatatcgacctaa

SEQ ID NO: 106041 - DNA, 25 bp, probe
ttgccatgaaccatatatcgaccta

SEQ ID NO: 106042 - DNA, 25 bp, probe
ggcaaatcaccagatacaaattact

SEQ ID NO: 106043 - DNA, 25 bp, probe
gatcttcgtggtcatcaaagacaaa

SEQ ID NO: 106044 - DNA, 25 bp, probe
atcttcgtggtcatcaaagacaaac

SEQ ID NO: 106045 - DNA, 25 bp, probe
tggtcatcaaagacaaacctctgag

SEQ ID NO: 106046 - DNA, 25 bp, probe
gtggtcatcaaagacaaacctctga

SEQ ID NO: 106047 - DNA, 25 bp, probe
gtcatcaaagacaaacctctgagct

SEQ ID NO: 106048 - DNA, 25 bp, probe
ttcgtggtcatcaaagacaaacctc

SEQ ID NO: 106049 - DNA, 25 bp, probe
cttcgtggtcatcaaagacaaacct

SEQ ID NO: 106050 - DNA, 25 bp, probe
caactccatcaagaacagctttctg

SEQ ID NO: 106051 - DNA, 25 bp, probe
tcaactccatcaagaacagctttct

SEQ ID NO: 106052 - DNA, 25 bp, probe
ggtcatcaaagacaaacctctgagc

SEQ ID NO: 106053 - DNA, 25 bp, probe
tcttcgtggtcatcaaagacaaacc

SEQ ID NO: 106054 - DNA, 25 bp, probe
cgtggtcatcaaagacaaacctctg

SEQ ID NO: 106055 - DNA, 25 bp, probe
tcgtggtcatcaaagacaaacctct

SEQ ID NO: 106056 - DNA, 25 bp, probe
aactccatcaagaacagctttctgg

SEQ ID NO: 106057 - DNA, 25 bp, probe
agtcctggtttgggaacttcatcag

SEQ ID NO: 106058 - DNA, 25 bp, probe
agatcttcgtggtcatcaaagacaa

SEQ ID NO: 106059 - DNA, 25 bp, probe
gaacttcatcagcctggagaaggag

SEQ ID NO: 106060 - DNA, 25 bp, probe
gagcagatcttcgtggtcatcaaag

SEQ ID NO: 106061 - DNA, 25 bp, probe
aagtcctggtttgggaacttcatca

SEQ ID NO: 106062 - DNA, 25 bp, probe
cagatcttcgtggtcatcaaagaca

SEQ ID NO: 106063 - DNA, 25 bp, probe
gagtatgtccaacctgacaccagag

SEQ ID NO: 106064 - DNA, 25 bp, probe
gagagtatgtccaacctgacaccag

SEQ ID NO: 106065 - DNA, 25 bp, probe
tcatcaaagacaaacctctgagctc

SEQ ID NO: 106066 - DNA, 25 bp, probe
gtatgtccaacctgacaccagagtc

SEQ ID NO: 106067 - DNA, 25 bp, probe
agagtatgtccaacctgacaccaga

SEQ ID NO: 106068 - DNA, 25 bp, probe
actccatcaagaacagctttctggg

SEQ ID NO: 106069 - DNA, 25 bp, probe
cgaagaagtcctggtttgggaactt

SEQ ID NO: 106070 - DNA, 25 bp, probe
gcagatcttcgtggtcatcaaagac

SEQ ID NO: 106071 - DNA, 25 bp, probe
ggagcagatcttcgtggtcatcaaa

SEQ ID NO: 106072 - DNA, 25 bp, probe
agcagatcttcgtggtcatcaaaga

SEQ ID NO: 106073 - DNA, 25 bp, probe
agtatgtccaacctgacaccagagt

SEQ ID NO: 106074 - DNA, 25 bp, probe
caaagacaaacctctgagctccatc

SEQ ID NO: 106075 - DNA, 25 bp, probe
catcaaagacaaacctctgagctcc

SEQ ID NO: 106076 - DNA, 25 bp, probe
aagacaaacctctgagctccatcaa

SEQ ID NO: 106077 - DNA, 25 bp, probe
aaagacaaacctctgagctccatca

SEQ ID NO: 106078 - DNA, 25 bp, probe
tcaaagacaaacctctgagctccat

SEQ ID NO: 106079 - DNA, 25 bp, probe
atcaaagacaaacctctgagctcca

SEQ ID NO: 106080 - DNA, 25 bp, probe
agacaaacctctgagctccatcaag

SEQ ID NO: 106081 - DNA, 25 bp, probe
gacaaacctctgagctccatcaagg

SEQ ID NO: 106082 - DNA, 25 bp, probe
aatggtatagtggaggattacaagc

SEQ ID NO: 106083 - DNA, 25 bp, probe
gcaatggtatagtggaggattacaa

SEQ ID NO: 106084 - DNA, 25 bp, probe
gagcaatggtatagtggaggattac

SEQ ID NO: 106085 - DNA, 25 bp, probe
tgagcaatggtatagtggaggatta

SEQ ID NO: 106086 - DNA, 25 bp, probe
agcaatggtatagtggaggattaca

SEQ ID NO: 106087 - DNA, 25 bp, probe
gaagatatgaggaaggtagtctgtg

SEQ ID NO: 106088 - DNA, 25 bp, probe
tgaagatatgaggaaggtagtctgt

SEQ ID NO: 106089 - DNA, 25 bp, probe
aagatatgaggaaggtagtctgtgt

SEQ ID NO: 106090 - DNA, 25 bp, probe
ttgaagatatgaggaaggtagtctg

SEQ ID NO: 106091 - DNA, 25 bp, probe
caatggtatagtggaggattacaag

SEQ ID NO: 106092 - DNA, 25 bp, probe
atggtatagtggaggattacaagcc

SEQ ID NO: 106093 - DNA, 25 bp, probe
gtgagcaatggtatagtggaggatt

SEQ ID NO: 106094 - DNA, 25 bp, probe
gatggtgagcaatggtatagtggag

SEQ ID NO: 106095 - DNA, 25 bp, probe
attccttacttgcactgttactctt

SEQ ID NO: 106096 - DNA, 25 bp, probe
tcttcagaattatccattacgtgca

SEQ ID NO: 106097 - DNA, 25 bp, probe
tccttacttgcactgttactcttaa

SEQ ID NO: 106098 - DNA, 25 bp, probe
ttccttacttgcactgttactctta

SEQ ID NO: 106099 - DNA, 25 bp, probe
cttcagaattatccattacgtgcat

SEQ ID NO: 106100 - DNA, 25 bp, probe
ctggtctgtctttggataataggaa

SEQ ID NO: 106101 - DNA, 25 bp, probe
tattgcctgtgcttctcttctttat

SEQ ID NO: 106102 - DNA, 25 bp, probe
atattgcctgtgcttctcttcttta

SEQ ID NO: 106103 - DNA, 25 bp, probe
actggtctgtctttggataatagga

SEQ ID NO: 106104 - DNA, 25 bp, probe
cactggtctgtctttggataatagg

SEQ ID NO: 106105 - DNA, 25 bp, probe
cattccttacttgcactgttactct

SEQ ID NO: 106106 - DNA, 25 bp, probe
ttcagaattatccattacgtgcatt

SEQ ID NO: 106107 - DNA, 25 bp, probe
tggtctgtctttggataataggaat

SEQ ID NO: 106108 - DNA, 25 bp, probe
ttcttcagaattatccattacgtgc

SEQ ID NO: 106109 - DNA, 25 bp, probe
attgcctgtgcttctcttctttatt

SEQ ID NO: 106110 - DNA, 25 bp, probe
ccttacttgcactgttactcttaat

SEQ ID NO: 106111 - DNA, 25 bp, probe
tacaatgatgccgaacattaggaat

SEQ ID NO: 106112 - DNA, 25 bp, probe
ttacaatgatgccgaacattaggaa

SEQ ID NO: 106113 - DNA, 25 bp, probe
caatgatgccgaacattaggaattg

SEQ ID NO: 106114 - DNA, 25 bp, probe
gctaatgaaagaatgctggtatcaa

SEQ ID NO: 106115 - DNA, 25 bp, probe
aatgatgccgaacattaggaattgt

SEQ ID NO: 106116 - DNA, 25 bp, probe
acaatgatgccgaacattaggaatt

SEQ ID NO: 106117 - DNA, 25 bp, probe
ttgcctgtgcttctcttctttattg

SEQ ID NO: 106118 - DNA, 25 bp, probe
tcatagtgtcaagaaggaagatttg

SEQ ID NO: 106119 - DNA, 25 bp, probe
tttgaagatatgaggaaggtagtct

SEQ ID NO: 106120 - DNA, 25 bp, probe
ttgtatgtgtgtagactgtaacttt

SEQ ID NO: 106121 - DNA, 25 bp, probe
tttgtatgtgtgtagactgtaactt

SEQ ID NO: 106122 - DNA, 25 bp, probe
ggtctgtctttggataataggaatt

SEQ ID NO: 106123 - DNA, 25 bp, probe
atttgtatgtgtgtagactgtaact

SEQ ID NO: 106124 - DNA, 25 bp, probe
ttcatagtgtcaagaaggaagattt

SEQ ID NO: 106125 - DNA, 25 bp, probe
tttcatagtgtcaagaaggaagatt

SEQ ID NO: 106126 - DNA, 25 bp, probe
ctgatggacgaccttctgaacaaaa

SEQ ID NO: 106127 - DNA, 25 bp, probe
tagcttgctcaacaggtgaccttac

SEQ ID NO: 106128 - DNA, 25 bp, probe
gtagcttgctcaacaggtgacctta

SEQ ID NO: 106129 - DNA, 25 bp, probe
tgatggacgaccttctgaacaaaac

SEQ ID NO: 106130 - DNA, 25 bp, probe
atcagtgtggtagcttgctcaacag

SEQ ID NO: 106131 - DNA, 25 bp, probe
gatggacgaccttctgaacaaaacc

SEQ ID NO: 106132 - DNA, 25 bp, probe
cgaccttctgaacaaaacccgttac

SEQ ID NO: 106133 - DNA, 25 bp, probe
acgaccttctgaacaaaacccgtta

SEQ ID NO: 106134 - DNA, 25 bp, probe
attctgcctccttggtcacattatt

SEQ ID NO: 106135 - DNA, 25 bp, probe
aattctgcctccttggtcacattat

SEQ ID NO: 106136 - DNA, 25 bp, probe
catcaaatctcatcatctccatcct

SEQ ID NO: 106137 - DNA, 25 bp, probe
tcatcaaatctcatcatctccatcc

SEQ ID NO: 106138 - DNA, 25 bp, probe
tatatgggatagaaatggcagcaaa

SEQ ID NO: 106139 - DNA, 25 bp, probe
ttatatgggatagaaatggcagcaa

SEQ ID NO: 106140 - DNA, 25 bp, probe
tcaaatctcatcatctccatccttt

SEQ ID NO: 106141 - DNA, 25 bp, probe
atcaaatctcatcatctccatcctt

SEQ ID NO: 106142 - DNA, 25 bp, probe
gttatatgggatagaaatggcagca

SEQ ID NO: 106143 - DNA, 25 bp, probe
tgttatatgggatagaaatggcagc

SEQ ID NO: 106144 - DNA, 25 bp, probe
ggcagaatcatcaaatctcatcatc

SEQ ID NO: 106145 - DNA, 25 bp, probe
tggcagaatcatcaaatctcatcat

SEQ ID NO: 106146 - DNA, 25 bp, probe
atggcagaatcatcaaatctcatca

SEQ ID NO: 106147 - DNA, 25 bp, probe
gaatcatcaaatctcatcatctcca

SEQ ID NO: 106148 - DNA, 25 bp, probe
gcagaatcatcaaatctcatcatct

SEQ ID NO: 106149 - DNA, 25 bp, probe
ttgttatatgggatagaaatggcag

SEQ ID NO: 106150 - DNA, 25 bp, probe
atcatcaaatctcatcatctccatc

SEQ ID NO: 106151 - DNA, 25 bp, probe
cttcatctacagcctgaggaacaag

SEQ ID NO: 106152 - DNA, 25 bp, probe
tttcattcctctctgggtttcgtat

SEQ ID NO: 106153 - DNA, 25 bp, probe
tttgttatatgggatagaaatggca

SEQ ID NO: 106154 - DNA, 25 bp, probe
agaatcatcaaatctcatcatctcc

SEQ ID NO: 106155 - DNA, 25 bp, probe
catcagatgggaagtataaagcctt

SEQ ID NO: 106156 - DNA, 25 bp, probe
aatcatcaaatctcatcatctccat

SEQ ID NO: 106157 - DNA, 25 bp, probe
catggcagaatcatcaaatctcatc

SEQ ID NO: 106158 - DNA, 25 bp, probe
ctttcattcctctctgggtttcgta

SEQ ID NO: 106159 - DNA, 25 bp, probe
ttctgcctccttggtcacattattt

SEQ ID NO: 106160 - DNA, 25 bp, probe
ttcattcctctctgggtttcgtatg

SEQ ID NO: 106161 - DNA, 25 bp, probe
ctgaggaacaaggacattcaaagtg

SEQ ID NO: 106162 - DNA, 25 bp, probe
aaattctgcctccttggtcacatta

SEQ ID NO: 106163 - DNA, 25 bp, probe
cagaatcatcaaatctcatcatctc

SEQ ID NO: 106164 - DNA, 25 bp, probe
gcatggcagaatcatcaaatctcat

SEQ ID NO: 106165 - DNA, 25 bp, probe
cattcctctctgggtttcgtatgtg

SEQ ID NO: 106166 - DNA, 25 bp, probe
tttggttgcttgatggctttcattc

SEQ ID NO: 106167 - DNA, 25 bp, probe
tcattcctctctgggtttcgtatgt

SEQ ID NO: 106168 - DNA, 25 bp, probe
attattttggttgcttgatggcttt

SEQ ID NO: 106169 - DNA, 25 bp, probe
ctccttggtcacattattttggttg

SEQ ID NO: 106170 - DNA, 25 bp, probe
cttggtcacattattttggttgctt

SEQ ID NO: 106171 - DNA, 25 bp, probe
tatgggatagaaatggcagcaaaat

SEQ ID NO: 106172 - DNA, 25 bp, probe
atatgggatagaaatggcagcaaaa

SEQ ID NO: 106173 - DNA, 25 bp, probe
ttggtcacattattttggttgcttg

SEQ ID NO: 106174 - DNA, 25 bp, probe
caaatctcatcatctccatcctttt

SEQ ID NO: 106175 - DNA, 25 bp, probe
ttattttggttgcttgatggctttc

SEQ ID NO: 106176 - DNA, 25 bp, probe
cctccttggtcacattattttggtt

SEQ ID NO: 106177 - DNA, 25 bp, probe
cattattttggttgcttgatggctt

SEQ ID NO: 106178 - DNA, 25 bp, probe
aatgaggtcataatccttagtgagg

SEQ ID NO: 106179 - DNA, 25 bp, probe
tcaatgaggtcataatccttagtga

SEQ ID NO: 106180 - DNA, 25 bp, probe
caatgaggtcataatccttagtgag

SEQ ID NO: 106181 - DNA, 25 bp, probe
ctcaatgaggtcataatccttagtg

SEQ ID NO: 106182 - DNA, 25 bp, probe
gacaatgccatcactcacttcttct

SEQ ID NO: 106183 - DNA, 25 bp, probe
agacaatgccatcactcacttcttc

SEQ ID NO: 106184 - DNA, 25 bp, probe
acaatgccatcactcacttcttctg

SEQ ID NO: 106185 - DNA, 25 bp, probe
cagacaatgccatcactcacttctt

SEQ ID NO: 106186 - DNA, 25 bp, probe
tatacagtagtgactcccatgctaa

SEQ ID NO: 106187 - DNA, 25 bp, probe
ccatgctaaaccctttcatctacag

SEQ ID NO: 106188 - DNA, 25 bp, probe
atacagtagtgactcccatgctaaa

SEQ ID NO: 106189 - DNA, 25 bp, probe
taaaccctttcatctacagcctgag

SEQ ID NO: 106190 - DNA, 25 bp, probe
ctaaaccctttcatctacagcctga

SEQ ID NO: 106191 - DNA, 25 bp, probe
atgaggtcataatccttagtgaggg

SEQ ID NO: 106192 - DNA, 25 bp, probe
ctcccatgctaaaccctttcatcta

SEQ ID NO: 106193 - DNA, 25 bp, probe
tacagtagtgactcccatgctaaac

SEQ ID NO: 106194 - DNA, 25 bp, probe
gaggtcataatccttagtgagggtg

SEQ ID NO: 106195 - DNA, 25 bp, probe
tcccatgctaaaccctttcatctac

SEQ ID NO: 106196 - DNA, 25 bp, probe
tgaggtcataatccttagtgagggt

SEQ ID NO: 106197 - DNA, 25 bp, probe
cccatgctaaaccctttcatctaca

SEQ ID NO: 106198 - DNA, 25 bp, probe
caatgccatcactcacttcttctgc

SEQ ID NO: 106199 - DNA, 25 bp, probe
gtatacagtagtgactcccatgcta

SEQ ID NO: 106200 - DNA, 25 bp, probe
ctttcatctacagcctgaggaacag

SEQ ID NO: 106201 - DNA, 25 bp, probe
tagtgactcccatgctaaacccttt

SEQ ID NO: 106202 - DNA, 25 bp, probe
gactcccatgctaaaccctttcatc

SEQ ID NO: 106203 - DNA, 25 bp, probe
catgctaaaccctttcatctacagc

SEQ ID NO: 106204 - DNA, 25 bp, probe
actcccatgctaaaccctttcatct

SEQ ID NO: 106205 - DNA, 25 bp, probe
aggtcataatccttagtgagggtgc

SEQ ID NO: 106206 - DNA, 25 bp, probe
atgctaaaccctttcatctacagcc

SEQ ID NO: 106207 - DNA, 25 bp, probe
gtagtgactcccatgctaaaccctt

SEQ ID NO: 106208 - DNA, 25 bp, probe
tgactcccatgctaaaccctttcat

SEQ ID NO: 106209 - DNA, 25 bp, probe
gctaaaccctttcatctacagcctg

SEQ ID NO: 106210 - DNA, 25 bp, probe
cctttcatctacagcctgaggaaca

SEQ ID NO: 106211 - DNA, 25 bp, probe
acagtagtgactcccatgctaaacc

SEQ ID NO: 106212 - DNA, 25 bp, probe
catcactcacttcttctgcgatgtg

SEQ ID NO: 106213 - DNA, 25 bp, probe
aaaccctttcatctacagcctgagg

SEQ ID NO: 106214 - DNA, 25 bp, probe
agtgactcccatgctaaaccctttc

SEQ ID NO: 106215 - DNA, 25 bp, probe
tgctaaaccctttcatctacagcct

SEQ ID NO: 106216 - DNA, 25 bp, probe
aaagtaattggcagggtggtgtttt

SEQ ID NO: 106217 - DNA, 25 bp, probe
aaaagtaattggcagggtggtgttt

SEQ ID NO: 106218 - DNA, 25 bp, probe
ggtcataatccttagtgagggtgcc

SEQ ID NO: 106219 - DNA, 25 bp, probe
ccctttcatctacagcctgaggaac

SEQ ID NO: 106220 - DNA, 25 bp, probe
cagtagtgactcccatgctaaaccc

SEQ ID NO: 106221 - DNA, 25 bp, probe
gtcataatccttagtgagggtgccc

SEQ ID NO: 106222 - DNA, 25 bp, probe
tgaccatatctgctacttcctctac

SEQ ID NO: 106223 - DNA, 25 bp, probe
gaccatatctgctacttcctctacc

SEQ ID NO: 106224 - DNA, 25 bp, probe
aggacctgaattgtatcatcaacat

SEQ ID NO: 106225 - DNA, 25 bp, probe
gaggacctgaattgtatcatcaaca

SEQ ID NO: 106226 - DNA, 25 bp, probe
accatatctgctacttcctctacca

SEQ ID NO: 106227 - DNA, 25 bp, probe
ggaggacctgaattgtatcatcaac

SEQ ID NO: 106228 - DNA, 25 bp, probe
ggacctgaattgtatcatcaacatg

SEQ ID NO: 106229 - DNA, 25 bp, probe
aggaggacctgaattgtatcatcaa

SEQ ID NO: 106230 - DNA, 25 bp, probe
ccatatctgctacttcctctaccag

SEQ ID NO: 106231 - DNA, 25 bp, probe
cctccctgacccgtctaatatataa

SEQ ID NO: 106232 - DNA, 25 bp, probe
ctccctgacccgtctaatatataaa

SEQ ID NO: 106233 - DNA, 25 bp, probe
acctccctgacccgtctaatatata

SEQ ID NO: 106234 - DNA, 25 bp, probe
tgaattgtatcatcaacatgaaggc

SEQ ID NO: 106235 - DNA, 25 bp, probe
gacctgaattgtatcatcaacatga

SEQ ID NO: 106236 - DNA, 25 bp, probe
tccctgacccgtctaatatataaat

SEQ ID NO: 106237 - DNA, 25 bp, probe
acctgaattgtatcatcaacatgaa

SEQ ID NO: 106238 - DNA, 25 bp, probe
ctgaattgtatcatcaacatgaagg

SEQ ID NO: 106239 - DNA, 25 bp, probe
cctgaattgtatcatcaacatgaag

SEQ ID NO: 106240 - DNA, 25 bp, probe
aataaacggatcacagtggaggaag

SEQ ID NO: 106241 - DNA, 25 bp, probe
ctataccaagtccatcgacatctgg

SEQ ID NO: 106242 - DNA, 25 bp, probe
gctataccaagtccatcgacatctg

SEQ ID NO: 106243 - DNA, 25 bp, probe
ctgctacttcctctaccagatcctg

SEQ ID NO: 106244 - DNA, 25 bp, probe
cacctccctgacccgtctaatatat

SEQ ID NO: 106245 - DNA, 25 bp, probe
caataaacggatcacagtggaggaa

SEQ ID NO: 106246 - DNA, 25 bp, probe
ctgcgaccttaagatttgtgatttc

SEQ ID NO: 106247 - DNA, 25 bp, probe
catatctgctacttcctctaccaga

SEQ ID NO: 106248 - DNA, 25 bp, probe
ccctgacccgtctaatatataaata

SEQ ID NO: 106249 - DNA, 25 bp, probe
taacctttaaccccaataaacggat

SEQ ID NO: 106250 - DNA, 25 bp, probe
ttaacctttaaccccaataaacgga

SEQ ID NO: 106251 - DNA, 25 bp, probe
cctgcgaccttaagatttgtgattt

SEQ ID NO: 106252 - DNA, 25 bp, probe
catggagctggatgacctacctaag

SEQ ID NO: 106253 - DNA, 25 bp, probe
gaattgtatcatcaacatgaaggcc

SEQ ID NO: 106254 - DNA, 25 bp, probe
agactgttagaaaatggacactgtg

SEQ ID NO: 106255 - DNA, 25 bp, probe
ggctataccaagtccatcgacatct

SEQ ID NO: 106256 - DNA, 25 bp, probe
cagactgttagaaaatggacactgt

SEQ ID NO: 106257 - DNA, 25 bp, probe
tgaactccaagggctataccaagtc

SEQ ID NO: 106258 - DNA, 25 bp, probe
ctgaactccaagggctataccaagt

SEQ ID NO: 106259 - DNA, 25 bp, probe
atcatgctgaactccaagggctata

SEQ ID NO: 106260 - DNA, 25 bp, probe
aacctttaaccccaataaacggatc

SEQ ID NO: 106261 - DNA, 25 bp, probe
tttaaccccaataaacggatcacag

SEQ ID NO: 106262 - DNA, 25 bp, probe
ctttaaccccaataaacggatcaca

SEQ ID NO: 106263 - DNA, 25 bp, probe
ctccaagggctataccaagtccatc

SEQ ID NO: 106264 - DNA, 25 bp, probe
acctgcgaccttaagatttgtgatt

SEQ ID NO: 106265 - DNA, 25 bp, probe
ttaaccccaataaacggatcacagt

SEQ ID NO: 106266 - DNA, 25 bp, probe
cttcttcccttcctttaactcagag

SEQ ID NO: 106267 - DNA, 25 bp, probe
ccttcttcccttcctttaactcaga

SEQ ID NO: 106268 - DNA, 25 bp, probe
ttcttcccttcctttaactcagagg

SEQ ID NO: 106269 - DNA, 25 bp, probe
gccttcttcccttcctttaactcag

SEQ ID NO: 106270 - DNA, 25 bp, probe
ctccaccttcagctctttatctctc

SEQ ID NO: 106271 - DNA, 25 bp, probe
gagccttcttcccttcctttaactc

SEQ ID NO: 106272 - DNA, 25 bp, probe
agccttcttcccttcctttaactca

SEQ ID NO: 106273 - DNA, 25 bp, probe
ccaccttcagctctttatctctcag

SEQ ID NO: 106274 - DNA, 25 bp, probe
tctttatctctcagcctcctctgtc

SEQ ID NO: 106275 - DNA, 25 bp, probe
ctctttatctctcagcctcctctgt

SEQ ID NO: 106276 - DNA, 25 bp, probe
agaaaatggctaacaccttcagtag

SEQ ID NO: 106277 - DNA, 25 bp, probe
gagaaaatggctaacaccttcagta

SEQ ID NO: 106278 - DNA, 25 bp, probe
ggaagatagatgcccagagaaaatg

SEQ ID NO: 106279 - DNA, 25 bp, probe
tccaccttcagctctttatctctca

SEQ ID NO: 106280 - DNA, 25 bp, probe
catggaagatagatgcccagagaaa

SEQ ID NO: 106281 - DNA, 25 bp, probe
atgacctctgcctcctttaaccaaa

SEQ ID NO: 106282 - DNA, 25 bp, probe
cagagaaaatggctaacaccttcag

SEQ ID NO: 106283 - DNA, 25 bp, probe
agagaaaatggctaacaccttcagt

SEQ ID NO: 106284 - DNA, 25 bp, probe
tcatggaagatagatgcccagagaa

SEQ ID NO: 106285 - DNA, 25 bp, probe
ttcatggaagatagatgcccagaga

SEQ ID NO: 106286 - DNA, 25 bp, probe
ctttatctctcagcctcctctgtcc

SEQ ID NO: 106287 - DNA, 25 bp, probe
ttggagccttcttcccttcctttaa

SEQ ID NO: 106288 - DNA, 25 bp, probe
tcttcccttcctttaactcagaggc

SEQ ID NO: 106289 - DNA, 25 bp, probe
gaagatagatgcccagagaaaatgg

SEQ ID NO: 106290 - DNA, 25 bp, probe
cttcagctctttatctctcagcctc

SEQ ID NO: 106291 - DNA, 25 bp, probe
tggaagatagatgcccagagaaaat

SEQ ID NO: 106292 - DNA, 25 bp, probe
atggaagatagatgcccagagaaaa

SEQ ID NO: 106293 - DNA, 25 bp, probe
cttcatggaagatagatgcccagag

SEQ ID NO: 106294 - DNA, 25 bp, probe
ggagccttcttcccttcctttaact

SEQ ID NO: 106295 - DNA, 25 bp, probe
cttggagccttcttcccttccttta

SEQ ID NO: 106296 - DNA, 25 bp, probe
ctcctttaaccaaagcctcaagtcc

SEQ ID NO: 106297 - DNA, 25 bp, probe
cctcctttaaccaaagcctcaagtc

SEQ ID NO: 106298 - DNA, 25 bp, probe
caccttcagctctttatctctcagc

SEQ ID NO: 106299 - DNA, 25 bp, probe
tggagccttcttcccttcctttaac

SEQ ID NO: 106300 - DNA, 25 bp, probe
catgacctctgcctcctttaaccaa

SEQ ID NO: 106301 - DNA, 25 bp, probe
gctctttatctctcagcctcctctg

SEQ ID NO: 106302 - DNA, 25 bp, probe
ccagagaaaatggctaacaccttca

SEQ ID NO: 106303 - DNA, 25 bp, probe
caatgtacacttggagaaggcacac

SEQ ID NO: 106304 - DNA, 25 bp, probe
ttcagctctttatctctcagcctcc

SEQ ID NO: 106305 - DNA, 25 bp, probe
ccttcagctctttatctctcagcct

SEQ ID NO: 106306 - DNA, 25 bp, probe
tttatctctcagcctcctctgtccc

SEQ ID NO: 106307 - DNA, 25 bp, probe
cttcccttcctttaactcagaggcg

SEQ ID NO: 106308 - DNA, 25 bp, probe
accttcagctctttatctctcagcc

SEQ ID NO: 106309 - DNA, 25 bp, probe
gctccaccttcagctctttatctct

SEQ ID NO: 106310 - DNA, 25 bp, probe
ttgtgtgctgaatccttgaatactc

SEQ ID NO: 106311 - DNA, 25 bp, probe
tgttgataattgttgaagttgtgtc

SEQ ID NO: 106312 - DNA, 25 bp, probe
gttgataattgttgaagttgtgtca

SEQ ID NO: 106313 - DNA, 25 bp, probe
atgttgataattgttgaagttgtgt

SEQ ID NO: 106314 - DNA, 25 bp, probe
gataattgttgaagttgtgtcatgg

SEQ ID NO: 106315 - DNA, 25 bp, probe
tgtgtgctgaatccttgaatactca

SEQ ID NO: 106316 - DNA, 25 bp, probe
tggtgtaatgttgataattgttgaa

SEQ ID NO: 106317 - DNA, 25 bp, probe
ttgataattgttgaagttgtgtcat

SEQ ID NO: 106318 - DNA, 25 bp, probe
tgataattgttgaagttgtgtcatg

SEQ ID NO: 106319 - DNA, 25 bp, probe
cctgcttacctctgatggatataaa

SEQ ID NO: 106320 - DNA, 25 bp, probe
ctttgtgtgctgaatccttgaatac

SEQ ID NO: 106321 - DNA, 25 bp, probe
atggtgtaatgttgataattgttga

SEQ ID NO: 106322 - DNA, 25 bp, probe
tttgtgtgctgaatccttgaatact

SEQ ID NO: 106323 - DNA, 25 bp, probe
actttgtgtgctgaatccttgaata

SEQ ID NO: 106324 - DNA, 25 bp, probe
aatgttgataattgttgaagttgtg

SEQ ID NO: 106325 - DNA, 25 bp, probe
ccctgcttacctctgatggatataa

SEQ ID NO: 106326 - DNA, 25 bp, probe
ggtgtaatgttgataattgttgaag

SEQ ID NO: 106327 - DNA, 25 bp, probe
agaatggtgtaatgttgataattgt

SEQ ID NO: 106328 - DNA, 25 bp, probe
agtgacatttggttctgggaatatg

SEQ ID NO: 106329 - DNA, 25 bp, probe
ttagtgatacatacttgtgaaggaa

SEQ ID NO: 106330 - DNA, 25 bp, probe
tgcttacctctgatggatataaaga

SEQ ID NO: 106331 - DNA, 25 bp, probe
tactcaattcagtgacatttggttc

SEQ ID NO: 106332 - DNA, 25 bp, probe
ctgcttacctctgatggatataaag

SEQ ID NO: 106333 - DNA, 25 bp, probe
acctctgatggatataaagatggaa

SEQ ID NO: 106334 - DNA, 25 bp, probe
tgggaatatgtagaaagagtcttgg

SEQ ID NO: 106335 - DNA, 25 bp, probe
actcaattcagtgacatttggttct

SEQ ID NO: 106336 - DNA, 25 bp, probe
gggaatatgtagaaagagtcttggg

SEQ ID NO: 106337 - DNA, 25 bp, probe
attagtgatacatacttgtgaagga

SEQ ID NO: 106338 - DNA, 25 bp, probe
gggaggtttaagtttctggttatat

SEQ ID NO: 106339 - DNA, 25 bp, probe
atggatataaagatggaagaatggg

SEQ ID NO: 106340 - DNA, 25 bp, probe
atactcaattcagtgacatttggtt

SEQ ID NO: 106341 - DNA, 25 bp, probe
aatactcaattcagtgacatttggt

SEQ ID NO: 106342 - DNA, 25 bp, probe
cctctgatggatataaagatggaag

SEQ ID NO: 106343 - DNA, 25 bp, probe
accctgcttacctctgatggatata

SEQ ID NO: 106344 - DNA, 25 bp, probe
aatggtgtaatgttgataattgttg

SEQ ID NO: 106345 - DNA, 25 bp, probe
ctcaattcagtgacatttggttctg

SEQ ID NO: 106346 - DNA, 25 bp, probe
acaagaatggtgtaatgttgataat

SEQ ID NO: 106347 - DNA, 25 bp, probe
gcacatttctaggtacatcaatttc

SEQ ID NO: 106348 - DNA, 25 bp, probe
ctgggaatatgtagaaagagtcttg

SEQ ID NO: 106349 - DNA, 25 bp, probe
gtgctgaatccttgaatactcaatt

SEQ ID NO: 106350 - DNA, 25 bp, probe
tctgggaatatgtagaaagagtctt

SEQ ID NO: 106351 - DNA, 25 bp, probe
tgtgctgaatccttgaatactcaat

SEQ ID NO: 106352 - DNA, 25 bp, probe
tgctgaatccttgaatactcaattc

SEQ ID NO: 106353 - DNA, 25 bp, probe
ataattgttgaagttgtgtcatggg

SEQ ID NO: 106354 - DNA, 25 bp, probe
tgagtatgtatggatgcgtggatat

SEQ ID NO: 106355 - DNA, 25 bp, probe
gtgtgtgtgtgagtatgtatggatg

SEQ ID NO: 106356 - DNA, 25 bp, probe
tgtgtgtgtgtgagtatgtatggat

SEQ ID NO: 106357 - DNA, 25 bp, probe
gtgagtatgtatggatgcgtggata

SEQ ID NO: 106358 - DNA, 25 bp, probe
ctgtgtgtgtgtgagtatgtatgga

SEQ ID NO: 106359 - DNA, 25 bp, probe
tgtgtgtgtgagtatgtatggatgc

SEQ ID NO: 106360 - DNA, 25 bp, probe
gtatgtgcgtgcatgtgtatataag

SEQ ID NO: 106361 - DNA, 25 bp, probe
atatctgtgtatatgcccgtatgtg

SEQ ID NO: 106362 - DNA, 25 bp, probe
gagtatgtatggatgcgtggatatc

SEQ ID NO: 106363 - DNA, 25 bp, probe
gtcactgttctaatgctggcaattc

SEQ ID NO: 106364 - DNA, 25 bp, probe
gtatgtatggatgcgtggatatctg

SEQ ID NO: 106365 - DNA, 25 bp, probe
agtatgtatggatgcgtggatatct

SEQ ID NO: 106366 - DNA, 25 bp, probe
ggatgcgtggatatctgtgtatatg

SEQ ID NO: 106367 - DNA, 25 bp, probe
atggatgcgtggatatctgtgtata

SEQ ID NO: 106368 - DNA, 25 bp, probe
tatggatgcgtggatatctgtgtat

SEQ ID NO: 106369 - DNA, 25 bp, probe
tatgtatggatgcgtggatatctgt

SEQ ID NO: 106370 - DNA, 25 bp, probe
tggatgcgtggatatctgtgtatat

SEQ ID NO: 106371 - DNA, 25 bp, probe
cgatgacaatgagtatgcctacctc

SEQ ID NO: 106372 - DNA, 25 bp, probe
tatgtgcgtgcatgtgtatataagc

SEQ ID NO: 106373 - DNA, 25 bp, probe
cgtatgtgcgtgcatgtgtatataa

SEQ ID NO: 106374 - DNA, 25 bp, probe
tcactgttctaatgctggcaattca

SEQ ID NO: 106375 - DNA, 25 bp, probe
agtcactgttctaatgctggcaatt

SEQ ID NO: 106376 - DNA, 25 bp, probe
gatgcgtggatatctgtgtatatgc

SEQ ID NO: 106377 - DNA, 25 bp, probe
cactgttctaatgctggcaattcag

SEQ ID NO: 106378 - DNA, 25 bp, probe
gtatggatgcgtggatatctgtgta

SEQ ID NO: 106379 - DNA, 25 bp, probe
tgtgagtatgtatggatgcgtggat

SEQ ID NO: 106380 - DNA, 25 bp, probe
gctgtgtgtgtgtgagtatgtatgg

SEQ ID NO: 106381 - DNA, 25 bp, probe
ggctgtgtgtgtgtgagtatgtatg

SEQ ID NO: 106382 - DNA, 25 bp, probe
tatctgtgtatatgcccgtatgtgc

SEQ ID NO: 106383 - DNA, 25 bp, probe
gtgtgtgagtatgtatggatgcgtg

SEQ ID NO: 106384 - DNA, 25 bp, probe
gtgtgtgtgagtatgtatggatgcg

SEQ ID NO: 106385 - DNA, 25 bp, probe
aggctgtgtgtgtgtgagtatgtat

SEQ ID NO: 106386 - DNA, 25 bp, probe
cctacctcaaagccatcatcttctt

SEQ ID NO: 106387 - DNA, 25 bp, probe
atgggaacaaggcaatggtctattt

SEQ ID NO: 106388 - DNA, 25 bp, probe
aatgggaacaaggcaatggtctatt

SEQ ID NO: 106389 - DNA, 25 bp, probe
aaatgggaacaaggcaatggtctat

SEQ ID NO: 106390 - DNA, 25 bp, probe
caaggcaatggtctatttgttcagg

SEQ ID NO: 106391 - DNA, 25 bp, probe
atgtatggatgcgtggatatctgtg

SEQ ID NO: 106392 - DNA, 25 bp, probe
atgcgtggatatctgtgtatatgcc

SEQ ID NO: 106393 - DNA, 25 bp, probe
tgtgtgtgagtatgtatggatgcgt

SEQ ID NO: 106394 - DNA, 25 bp, probe
tcgatgacaatgagtatgcctacct

SEQ ID NO: 106395 - DNA, 25 bp, probe
gatatctgtgtatatgcccgtatgt

SEQ ID NO: 106396 - DNA, 25 bp, probe
ggatatctgtgtatatgcccgtatg

SEQ ID NO: 106397 - DNA, 25 bp, probe
tggatatctgtgtatatgcccgtat

SEQ ID NO: 106398 - DNA, 25 bp, probe
aacaatcggagacctatacagaaga

SEQ ID NO: 106399 - DNA, 25 bp, probe
acaatcggagacctatacagaagat

SEQ ID NO: 106400 - DNA, 25 bp, probe
accaatgacagacttagacatacaa

SEQ ID NO: 106401 - DNA, 25 bp, probe
tctatctcagaagacagcagtagta

SEQ ID NO: 106402 - DNA, 25 bp, probe
atctatctcagaagacagcagtagt

SEQ ID NO: 106403 - DNA, 25 bp, probe
caatcggagacctatacagaagata

SEQ ID NO: 106404 - DNA, 25 bp, probe
ttgctaagtctgctaatcttctgtg

SEQ ID NO: 106405 - DNA, 25 bp, probe
tatctcagaagacagcagtagtaac

SEQ ID NO: 106406 - DNA, 25 bp, probe
atctcagaagacagcagtagtaaca

SEQ ID NO: 106407 - DNA, 25 bp, probe
ctatctcagaagacagcagtagtaa

SEQ ID NO: 106408 - DNA, 25 bp, probe
taccaatgacagacttagacataca

SEQ ID NO: 106409 - DNA, 25 bp, probe
caggaggaagtatcaatgatggatt

SEQ ID NO: 106410 - DNA, 25 bp, probe
ccaatgacagacttagacatacaat

SEQ ID NO: 106411 - DNA, 25 bp, probe
gtcatcaccaggaggaagtatcaat

SEQ ID NO: 106412 - DNA, 25 bp, probe
aatgtcatcaccaggaggaagtatc

SEQ ID NO: 106413 - DNA, 25 bp, probe
tctcagaagacagcagtagtaacag

SEQ ID NO: 106414 - DNA, 25 bp, probe
gatctatctcagaagacagcagtag

SEQ ID NO: 106415 - DNA, 25 bp, probe
aatcggagacctatacagaagatat

SEQ ID NO: 106416 - DNA, 25 bp, probe
tcatcaccaggaggaagtatcaatg

SEQ ID NO: 106417 - DNA, 25 bp, probe
caatgtcatcaccaggaggaagtat

SEQ ID NO: 106418 - DNA, 25 bp, probe
ttgtcactggatacattcagaacta

SEQ ID NO: 106419 - DNA, 25 bp, probe
gtaccaatgacagacttagacatac

SEQ ID NO: 106420 - DNA, 25 bp, probe
ctagtaccaatgacagacttagaca

SEQ ID NO: 106421 - DNA, 25 bp, probe
tgtcactggatacattcagaactag

SEQ ID NO: 106422 - DNA, 25 bp, probe
cggagacctatacagaagatataac

SEQ ID NO: 106423 - DNA, 25 bp, probe
catcaccaggaggaagtatcaatga

SEQ ID NO: 106424 - DNA, 25 bp, probe
tcggagacctatacagaagatataa

SEQ ID NO: 106425 - DNA, 25 bp, probe
agtaccaatgacagacttagacata

SEQ ID NO: 106426 - DNA, 25 bp, probe
tagtaccaatgacagacttagacat

SEQ ID NO: 106427 - DNA, 25 bp, probe
attgtcaatgtgatcctggttatgc

SEQ ID NO: 106428 - DNA, 25 bp, probe
atcggagacctatacagaagatata

SEQ ID NO: 106429 - DNA, 25 bp, probe
tcaccaggaggaagtatcaatgatg

SEQ ID NO: 106430 - DNA, 25 bp, probe
atgtcatcaccaggaggaagtatca

SEQ ID NO: 106431 - DNA, 25 bp, probe
aaacaatcggagacctatacagaag

SEQ ID NO: 106432 - DNA, 25 bp, probe
ggaaagattgtttgtcactggatac

SEQ ID NO: 106433 - DNA, 25 bp, probe
tagacaagaagaaatgggtaacagg

SEQ ID NO: 106434 - DNA, 25 bp, probe
tggaaagattgtttgtcactggata

SEQ ID NO: 106435 - DNA, 25 bp, probe
aaggatattaccaagaaactcacga

SEQ ID NO: 106436 - DNA, 25 bp, probe
aggatattaccaagaaactcacgat

SEQ ID NO: 106437 - DNA, 25 bp, probe
tcggatgaagaaaggatattaccaa

SEQ ID NO: 106438 - DNA, 25 bp, probe
ggagaaatagacaagaagaaatggg

SEQ ID NO: 106439 - DNA, 25 bp, probe
cggatgaagaaaggatattaccaag

SEQ ID NO: 106440 - DNA, 25 bp, probe
ctcagaagacagcagtagtaacagc

SEQ ID NO: 106441 - DNA, 25 bp, probe
tgtcatcaccaggaggaagtatcaa

SEQ ID NO: 106442 - DNA, 25 bp, probe
ttccactacactatgatcctgacta

SEQ ID NO: 106443 - DNA, 25 bp, probe
ccactacactatgatcctgactaga

SEQ ID NO: 106444 - DNA, 25 bp, probe
tccactacactatgatcctgactag

SEQ ID NO: 106445 - DNA, 25 bp, probe
tacactatgatcctgactagaatgc

SEQ ID NO: 106446 - DNA, 25 bp, probe
ctatgatcctgactagaatgctgtg

SEQ ID NO: 106447 - DNA, 25 bp, probe
cactatgatcctgactagaatgctg

SEQ ID NO: 106448 - DNA, 25 bp, probe
actatgatcctgactagaatgctgt

SEQ ID NO: 106449 - DNA, 25 bp, probe
acactatgatcctgactagaatgct

SEQ ID NO: 106450 - DNA, 25 bp, probe
tatgatcctgactagaatgctgtgt

SEQ ID NO: 106451 - DNA, 25 bp, probe
cactacactatgatcctgactagaa

SEQ ID NO: 106452 - DNA, 25 bp, probe
actacactatgatcctgactagaat

SEQ ID NO: 106453 - DNA, 25 bp, probe
ctacactatgatcctgactagaatg

SEQ ID NO: 106454 - DNA, 25 bp, probe
gactagaatgctgtgtgtcaagatg

SEQ ID NO: 106455 - DNA, 25 bp, probe
atgatcctgactagaatgctgtgtg

SEQ ID NO: 106456 - DNA, 25 bp, probe
cttatgattcacacagaaggtgctg

SEQ ID NO: 106457 - DNA, 25 bp, probe
tagaatgctgtgtgtcaagatggtg

SEQ ID NO: 106458 - DNA, 25 bp, probe
ctagaatgctgtgtgtcaagatggt

SEQ ID NO: 106459 - DNA, 25 bp, probe
actagaatgctgtgtgtcaagatgg

SEQ ID NO: 106460 - DNA, 25 bp, probe
aacacccttatgattcacacagaag

SEQ ID NO: 106461 - DNA, 25 bp, probe
caacacccttatgattcacacagaa

SEQ ID NO: 106462 - DNA, 25 bp, probe
ctttccactacactatgatcctgac

SEQ ID NO: 106463 - DNA, 25 bp, probe
ctacctcaacacccttatgattcac

SEQ ID NO: 106464 - DNA, 25 bp, probe
tttccactacactatgatcctgact

SEQ ID NO: 106465 - DNA, 25 bp, probe
tacctcaacacccttatgattcaca

SEQ ID NO: 106466 - DNA, 25 bp, probe
cctttccactacactatgatcctga

SEQ ID NO: 106467 - DNA, 25 bp, probe
ctcaacacccttatgattcacacag

SEQ ID NO: 106468 - DNA, 25 bp, probe
cctacctcaacacccttatgattca

SEQ ID NO: 106469 - DNA, 25 bp, probe
acctacctcaacacccttatgattc

SEQ ID NO: 106470 - DNA, 25 bp, probe
tcaacacccttatgattcacacaga

SEQ ID NO: 106471 - DNA, 25 bp, probe
cacctacctcaacacccttatgatt

SEQ ID NO: 106472 - DNA, 25 bp, probe
tgatcctgactagaatgctgtgtgt

SEQ ID NO: 106473 - DNA, 25 bp, probe
gtgacctctacgctctgatgaagat

SEQ ID NO: 106474 - DNA, 25 bp, probe
gatcctgactagaatgctgtgtgtc

SEQ ID NO: 106475 - DNA, 25 bp, probe
ccaactaatcttctgtgcagataac

SEQ ID NO: 106476 - DNA, 25 bp, probe
ccctttccactacactatgatcctg

SEQ ID NO: 106477 - DNA, 25 bp, probe
tgacctctacgctctgatgaagatc

SEQ ID NO: 106478 - DNA, 25 bp, probe
caactaatcttctgtgcagataaca

SEQ ID NO: 106479 - DNA, 25 bp, probe
gccaactaatcttctgtgcagataa

SEQ ID NO: 106480 - DNA, 25 bp, probe
accctttccactacactatgatcct

SEQ ID NO: 106481 - DNA, 25 bp, probe
caccctttccactacactatgatcc

SEQ ID NO: 106482 - DNA, 25 bp, probe
ccaccctttccactacactatgatc

SEQ ID NO: 106483 - DNA, 25 bp, probe
gaaggtgctgttgtaatcagtggag

SEQ ID NO: 106484 - DNA, 25 bp, probe
cctcaacacccttatgattcacaca

SEQ ID NO: 106485 - DNA, 25 bp, probe
acctcaacacccttatgattcacac

SEQ ID NO: 106486 - DNA, 25 bp, probe
tctcttatactgtcatcctggtgat

SEQ ID NO: 106487 - DNA, 25 bp, probe
atctcttatactgtcatcctggtga

SEQ ID NO: 106488 - DNA, 25 bp, probe
cctcctccttctgatctcttatact

SEQ ID NO: 106489 - DNA, 25 bp, probe
tcctcctccttctgatctcttatac

SEQ ID NO: 106490 - DNA, 25 bp, probe
tcctccttctgatctcttatactgt

SEQ ID NO: 106491 - DNA, 25 bp, probe
gatctcttatactgtcatcctggtg

SEQ ID NO: 106492 - DNA, 25 bp, probe
cctccttctgatctcttatactgtc

SEQ ID NO: 106493 - DNA, 25 bp, probe
ttcctcctccttctgatctcttata

SEQ ID NO: 106494 - DNA, 25 bp, probe
tagttatcatctggttcctcctcct

SEQ ID NO: 106495 - DNA, 25 bp, probe
ctcctccttctgatctcttatactg

SEQ ID NO: 106496 - DNA, 25 bp, probe
gttcctcctccttctgatctcttat

SEQ ID NO: 106497 - DNA, 25 bp, probe
ctagttatcatctggttcctcctcc

SEQ ID NO: 106498 - DNA, 25 bp, probe
tgatctcttatactgtcatcctggt

SEQ ID NO: 106499 - DNA, 25 bp, probe
ctgatctcttatactgtcatcctgg

SEQ ID NO: 106500 - DNA, 25 bp, probe
gttatcatctggttcctcctccttc

SEQ ID NO: 106501 - DNA, 25 bp, probe
ttatcatctggttcctcctccttct

SEQ ID NO: 106502 - DNA, 25 bp, probe
tctgatctcttatactgtcatcctg

SEQ ID NO: 106503 - DNA, 25 bp, probe
ctccttctgatctcttatactgtca

SEQ ID NO: 106504 - DNA, 25 bp, probe
gctagttatcatctggttcctcctc

SEQ ID NO: 106505 - DNA, 25 bp, probe
agttatcatctggttcctcctcctt

SEQ ID NO: 106506 - DNA, 25 bp, probe
ctgctagttatcatctggttcctcc

SEQ ID NO: 106507 - DNA, 25 bp, probe
ttctgatctcttatactgtcatcct

SEQ ID NO: 106508 - DNA, 25 bp, probe
tccttctgatctcttatactgtcat

SEQ ID NO: 106509 - DNA, 25 bp, probe
attgtccaactggctctgatacttc

SEQ ID NO: 106510 - DNA, 25 bp, probe
tatcatctggttcctcctccttctg

SEQ ID NO: 106511 - DNA, 25 bp, probe
tgctagttatcatctggttcctcct

SEQ ID NO: 106512 - DNA, 25 bp, probe
cttctgatctcttatactgtcatcc

SEQ ID NO: 106513 - DNA, 25 bp, probe
ccttctgatctcttatactgtcatc

SEQ ID NO: 106514 - DNA, 25 bp, probe
ggttcctcctccttctgatctctta

SEQ ID NO: 106515 - DNA, 25 bp, probe
gctgctagttatcatctggttcctc

SEQ ID NO: 106516 - DNA, 25 bp, probe
agataacttctactgtgatgttccc

SEQ ID NO: 106517 - DNA, 25 bp, probe
cattgtccaactggctctgatactt

SEQ ID NO: 106518 - DNA, 25 bp, probe
tagataacttctactgtgatgttcc

SEQ ID NO: 106519 - DNA, 25 bp, probe
ctcttatactgtcatcctggtgatg

SEQ ID NO: 106520 - DNA, 25 bp, probe
ccctgtatctatatctatacctggc

SEQ ID NO: 106521 - DNA, 25 bp, probe
ggctgctagttatcatctggttcct

SEQ ID NO: 106522 - DNA, 25 bp, probe
tcatagataacttctactgtgatgt

SEQ ID NO: 106523 - DNA, 25 bp, probe
catctggttcctcctccttctgatc

SEQ ID NO: 106524 - DNA, 25 bp, probe
cttatactgtcatcctggtgatgct

SEQ ID NO: 106525 - DNA, 25 bp, probe
tcttatactgtcatcctggtgatgc

SEQ ID NO: 106526 - DNA, 25 bp, probe
cctgtatctatatctatacctggcc

SEQ ID NO: 106527 - DNA, 25 bp, probe
atctggttcctcctccttctgatct

SEQ ID NO: 106528 - DNA, 25 bp, probe
tatgtcaccatcatgaacactcaat

SEQ ID NO: 106529 - DNA, 25 bp, probe
ttatactgtcatcctggtgatgctg

SEQ ID NO: 106530 - DNA, 25 bp, probe
ttgttgttgtgagcattgatattgg

SEQ ID NO: 106531 - DNA, 25 bp, probe
gttgttgtgagcattgatattggtg

SEQ ID NO: 106532 - DNA, 25 bp, probe
ttgttgtgagcattgatattggtgt

SEQ ID NO: 106533 - DNA, 25 bp, probe
tgttgttgtgagcattgatattggt

SEQ ID NO: 106534 - DNA, 25 bp, probe
tgttgtgagcattgatattggtgtg

SEQ ID NO: 106535 - DNA, 25 bp, probe
ccaataaccttgtcaaccactacat

SEQ ID NO: 106536 - DNA, 25 bp, probe
caataaccttgtcaaccactacatg

SEQ ID NO: 106537 - DNA, 25 bp, probe
cctatgtgaatgagcttgtagtgtt

SEQ ID NO: 106538 - DNA, 25 bp, probe
tgtcttccctattctataccactgt

SEQ ID NO: 106539 - DNA, 25 bp, probe
attctctccagcatcttccacattg

SEQ ID NO: 106540 - DNA, 25 bp, probe
cattctctccagcatcttccacatt

SEQ ID NO: 106541 - DNA, 25 bp, probe
tgtttgttgttgtgagcattgatat

SEQ ID NO: 106542 - DNA, 25 bp, probe
cttctgtgccaataaccttgtcaac

SEQ ID NO: 106543 - DNA, 25 bp, probe
tctccagcatcttccacattgattc

SEQ ID NO: 106544 - DNA, 25 bp, probe
ctctccagcatcttccacattgatt

SEQ ID NO: 106545 - DNA, 25 bp, probe
ccacagtcactatcttcatttccta

SEQ ID NO: 106546 - DNA, 25 bp, probe
gtgtttgttgttgtgagcattgata

SEQ ID NO: 106547 - DNA, 25 bp, probe
tcatttcctatgctctcattctctc

SEQ ID NO: 106548 - DNA, 25 bp, probe
tttgttgttgtgagcattgatattg

SEQ ID NO: 106549 - DNA, 25 bp, probe
gtttgttgttgtgagcattgatatt

SEQ ID NO: 106550 - DNA, 25 bp, probe
acctatgtgaatgagcttgtagtgt

SEQ ID NO: 106551 - DNA, 25 bp, probe
gtcttccctattctataccactgtg

SEQ ID NO: 106552 - DNA, 25 bp, probe
ttcatttcctatgctctcattctct

SEQ ID NO: 106553 - DNA, 25 bp, probe
tcttcatttcctatgctctcattct

SEQ ID NO: 106554 - DNA, 25 bp, probe
cttcatttcctatgctctcattctc

SEQ ID NO: 106555 - DNA, 25 bp, probe
catttcctatgctctcattctctcc

SEQ ID NO: 106556 - DNA, 25 bp, probe
gtcactatcttcatttcctatgctc

SEQ ID NO: 106557 - DNA, 25 bp, probe
agtcactatcttcatttcctatgct

SEQ ID NO: 106558 - DNA, 25 bp, probe
cagtcactatcttcatttcctatgc

SEQ ID NO: 106559 - DNA, 25 bp, probe
atttcctatgctctcattctctcca

SEQ ID NO: 106560 - DNA, 25 bp, probe
actatcttcatttcctatgctctca

SEQ ID NO: 106561 - DNA, 25 bp, probe
tcactatcttcatttcctatgctct

SEQ ID NO: 106562 - DNA, 25 bp, probe
gtagtgtttgttgttgtgagcattg

SEQ ID NO: 106563 - DNA, 25 bp, probe
cactatcttcatttcctatgctctc

SEQ ID NO: 106564 - DNA, 25 bp, probe
atcttcatttcctatgctctcattc

SEQ ID NO: 106565 - DNA, 25 bp, probe
tagtgtttgttgttgtgagcattga

SEQ ID NO: 106566 - DNA, 25 bp, probe
tgtagtgtttgttgttgtgagcatt

SEQ ID NO: 106567 - DNA, 25 bp, probe
ttgtagtgtttgttgttgtgagcat

SEQ ID NO: 106568 - DNA, 25 bp, probe
tttcctatgctctcattctctccag

SEQ ID NO: 106569 - DNA, 25 bp, probe
cacctatgtgaatgagcttgtagtg

SEQ ID NO: 106570 - DNA, 25 bp, probe
cacagtcactatcttcatttcctat

SEQ ID NO: 106571 - DNA, 25 bp, probe
tgccaataaccttgtcaaccactac

SEQ ID NO: 106572 - DNA, 25 bp, probe
agtgtttgttgttgtgagcattgat

SEQ ID NO: 106573 - DNA, 25 bp, probe
tcattctctccagcatcttccacat

SEQ ID NO: 106574 - DNA, 25 bp, probe
tacagtcagtatcaattctggaaga

SEQ ID NO: 106575 - DNA, 25 bp, probe
ccatacagtcagtatcaattctgga

SEQ ID NO: 106576 - DNA, 25 bp, probe
tccatacagtcagtatcaattctgg

SEQ ID NO: 106577 - DNA, 25 bp, probe
ataattgcagtagctctaacaggtt

SEQ ID NO: 106578 - DNA, 25 bp, probe
aataattgcagtagctctaacaggt

SEQ ID NO: 106579 - DNA, 25 bp, probe
ctacaacattgtccttctcctgaac

SEQ ID NO: 106580 - DNA, 25 bp, probe
catacagtcagtatcaattctggaa

SEQ ID NO: 106581 - DNA, 25 bp, probe
ttccatacagtcagtatcaattctg

SEQ ID NO: 106582 - DNA, 25 bp, probe
gaataattgcagtagctctaacagg

SEQ ID NO: 106583 - DNA, 25 bp, probe
taattgcagtagctctaacaggttg

SEQ ID NO: 106584 - DNA, 25 bp, probe
atacagtcagtatcaattctggaag

SEQ ID NO: 106585 - DNA, 25 bp, probe
tgaataattgcagtagctctaacag

SEQ ID NO: 106586 - DNA, 25 bp, probe
tacaacattgtccttctcctgaaca

SEQ ID NO: 106587 - DNA, 25 bp, probe
acagtcagtatcaattctggaagaa

SEQ ID NO: 106588 - DNA, 25 bp, probe
cctacaacattgtccttctcctgaa

SEQ ID NO: 106589 - DNA, 25 bp, probe
cctgaataattgcagtagctctaac

SEQ ID NO: 106590 - DNA, 25 bp, probe
gcctgaataattgcagtagctctaa

SEQ ID NO: 106591 - DNA, 25 bp, probe
ctgaataattgcagtagctctaaca

SEQ ID NO: 106592 - DNA, 25 bp, probe
cattgtccttctcctgaacaccttc

SEQ ID NO: 106593 - DNA, 25 bp, probe
gaaactacctcttagtcttcttcca

SEQ ID NO: 106594 - DNA, 25 bp, probe
acaacattgtccttctcctgaacac

SEQ ID NO: 106595 - DNA, 25 bp, probe
aactacctcttagtcttcttccaaa

SEQ ID NO: 106596 - DNA, 25 bp, probe
aaactacctcttagtcttcttccaa

SEQ ID NO: 106597 - DNA, 25 bp, probe
gttcagaaactacctcttagtcttc

SEQ ID NO: 106598 - DNA, 25 bp, probe
aattgcagtagctctaacaggttgg

SEQ ID NO: 106599 - DNA, 25 bp, probe
tcatctgctactcgggaatcctaaa

SEQ ID NO: 106600 - DNA, 25 bp, probe
caacattgtccttctcctgaacacc

SEQ ID NO: 106601 - DNA, 25 bp, probe
acattgtccttctcctgaacacctt

SEQ ID NO: 106602 - DNA, 25 bp, probe
aacattgtccttctcctgaacacct

SEQ ID NO: 106603 - DNA, 25 bp, probe
tttccatacagtcagtatcaattct

SEQ ID NO: 106604 - DNA, 25 bp, probe
agaaactacctcttagtcttcttcc

SEQ ID NO: 106605 - DNA, 25 bp, probe
tgattgtttattttctcttctgggc

SEQ ID NO: 106606 - DNA, 25 bp, probe
attgtttattttctcttctgggctc

SEQ ID NO: 106607 - DNA, 25 bp, probe
gattgtttattttctcttctgggct

SEQ ID NO: 106608 - DNA, 25 bp, probe
ctctaacaggttggaccaagctatg

SEQ ID NO: 106609 - DNA, 25 bp, probe
tacctcttagtcttcttccaaaagc

SEQ ID NO: 106610 - DNA, 25 bp, probe
cttagtcttcttccaaaagcacatt

SEQ ID NO: 106611 - DNA, 25 bp, probe
tcttagtcttcttccaaaagcacat

SEQ ID NO: 106612 - DNA, 25 bp, probe
tcagaaactacctcttagtcttctt

SEQ ID NO: 106613 - DNA, 25 bp, probe
ttcagaaactacctcttagtcttct

SEQ ID NO: 106614 - DNA, 25 bp, probe
ttgtttattttctcttctgggctcc

SEQ ID NO: 106615 - DNA, 25 bp, probe
attgtccttctcctgaacaccttcc

SEQ ID NO: 106616 - DNA, 25 bp, probe
ttagtcttcttccaaaagcacattg

SEQ ID NO: 106617 - DNA, 25 bp, probe
ctcttagtcttcttccaaaagcaca

SEQ ID NO: 106618 - DNA, 25 bp, probe
aatccaccctacaccaaccaaactt

SEQ ID NO: 106619 - DNA, 25 bp, probe
tgggaggatcaagctagacttcaag

SEQ ID NO: 106620 - DNA, 25 bp, probe
ctgggaggatcaagctagacttcaa

SEQ ID NO: 106621 - DNA, 25 bp, probe
ggaggatcaagctagacttcaaggc

SEQ ID NO: 106622 - DNA, 25 bp, probe
atccaccctacaccaaccaaacttc

SEQ ID NO: 106623 - DNA, 25 bp, probe
gaggatcaagctagacttcaaggcg

SEQ ID NO: 106624 - DNA, 25 bp, probe
caatccaccctacaccaaccaaact

SEQ ID NO: 106625 - DNA, 25 bp, probe
gggaggatcaagctagacttcaagg

SEQ ID NO: 106626 - DNA, 25 bp, probe
cttcggttacggcatagcctatgta

SEQ ID NO: 106627 - DNA, 25 bp, probe
ttcggttacggcatagcctatgtac

SEQ ID NO: 106628 - DNA, 25 bp, probe
cctgggaggatcaagctagacttca

SEQ ID NO: 106629 - DNA, 25 bp, probe
aacttcggttacggcatagcctatg

SEQ ID NO: 106630 - DNA, 25 bp, probe
cctacaccaaccaaacttcggttac

SEQ ID NO: 106631 - DNA, 25 bp, probe
aaacttcggttacggcatagcctat

SEQ ID NO: 106632 - DNA, 25 bp, probe
ctacaccaaccaaacttcggttacg

SEQ ID NO: 106633 - DNA, 25 bp, probe
ctttcctgggaggatcaagctagac

SEQ ID NO: 106634 - DNA, 25 bp, probe
caaccaaacttcggttacggcatag

SEQ ID NO: 106635 - DNA, 25 bp, probe
ttcctgggaggatcaagctagactt

SEQ ID NO: 106636 - DNA, 25 bp, probe
tttcctgggaggatcaagctagact

SEQ ID NO: 106637 - DNA, 25 bp, probe
ccctacaccaaccaaacttcggtta

SEQ ID NO: 106638 - DNA, 25 bp, probe
caaacttcggttacggcatagccta

SEQ ID NO: 106639 - DNA, 25 bp, probe
tcctgggaggatcaagctagacttc

SEQ ID NO: 106640 - DNA, 25 bp, probe
cctttcctgggaggatcaagctaga

SEQ ID NO: 106641 - DNA, 25 bp, probe
gagaacctgtgctctaagtgaatac

SEQ ID NO: 106642 - DNA, 25 bp, probe
agaacctgtgctctaagtgaatact

SEQ ID NO: 106643 - DNA, 25 bp, probe
tgagaacctgtgctctaagtgaata

SEQ ID NO: 106644 - DNA, 25 bp, probe
ggaatatgtaagtcaggagttagaa

SEQ ID NO: 106645 - DNA, 25 bp, probe
aagatgaagagaagctgagaagaag

SEQ ID NO: 106646 - DNA, 25 bp, probe
gaagatgaagagaagctgagaagaa

SEQ ID NO: 106647 - DNA, 25 bp, probe
ttgagaacctgtgctctaagtgaat

SEQ ID NO: 106648 - DNA, 25 bp, probe
tagctgagaggaagatgaagagaag

SEQ ID NO: 106649 - DNA, 25 bp, probe
gtagctgagaggaagatgaagagaa

SEQ ID NO: 106650 - DNA, 25 bp, probe
gagtagctgagaggaagatgaagag

SEQ ID NO: 106651 - DNA, 25 bp, probe
gggaatatgtaagtcaggagttaga

SEQ ID NO: 106652 - DNA, 25 bp, probe
agggaatatgtaagtcaggagttag

SEQ ID NO: 106653 - DNA, 25 bp, probe
ggaagatgaagagaagctgagaaga

SEQ ID NO: 106654 - DNA, 25 bp, probe
aggaagatgaagagaagctgagaag

SEQ ID NO: 106655 - DNA, 25 bp, probe
gaggaagatgaagagaagctgagaa

SEQ ID NO: 106656 - DNA, 25 bp, probe
agtagctgagaggaagatgaagaga

SEQ ID NO: 106657 - DNA, 25 bp, probe
gagaggaagatgaagagaagctgag

SEQ ID NO: 106658 - DNA, 25 bp, probe
atagggaatatgtaagtcaggagtt

SEQ ID NO: 106659 - DNA, 25 bp, probe
aacgagggataattcaaactgacaa

SEQ ID NO: 106660 - DNA, 25 bp, probe
ggataattcaaactgacaacctgtg

SEQ ID NO: 106661 - DNA, 25 bp, probe
gaacgagggataattcaaactgaca

SEQ ID NO: 106662 - DNA, 25 bp, probe
agaggaagatgaagagaagctgaga

SEQ ID NO: 106663 - DNA, 25 bp, probe
ctgagaggaagatgaagagaagctg

SEQ ID NO: 106664 - DNA, 25 bp, probe
acgagggataattcaaactgacaac

SEQ ID NO: 106665 - DNA, 25 bp, probe
gataattcaaactgacaacctgtgc

SEQ ID NO: 106666 - DNA, 25 bp, probe
tagggaatatgtaagtcaggagtta

SEQ ID NO: 106667 - DNA, 25 bp, probe
ctctaagtgaatacttggaagtcgt

SEQ ID NO: 106668 - DNA, 25 bp, probe
tctaagtgaatacttggaagtcgtt

SEQ ID NO: 106669 - DNA, 25 bp, probe
tgctctaagtgaatacttggaagtc

SEQ ID NO: 106670 - DNA, 25 bp, probe
gggataattcaaactgacaacctgt

SEQ ID NO: 106671 - DNA, 25 bp, probe
gtgctctaagtgaatacttggaagt

SEQ ID NO: 106672 - DNA, 25 bp, probe
tgtgctctaagtgaatacttggaag

SEQ ID NO: 106673 - DNA, 25 bp, probe
ctgtgctctaagtgaatacttggaa

SEQ ID NO: 106674 - DNA, 25 bp, probe
gaacctgtgctctaagtgaatactt

SEQ ID NO: 106675 - DNA, 25 bp, probe
aaggcatagggaatatgtaagtcag

SEQ ID NO: 106676 - DNA, 25 bp, probe
gcatagggaatatgtaagtcaggag

SEQ ID NO: 106677 - DNA, 25 bp, probe
cagtgtaaggcatagggaatatgta

SEQ ID NO: 106678 - DNA, 25 bp, probe
tgagaggaagatgaagagaagctga

SEQ ID NO: 106679 - DNA, 25 bp, probe
aacctgtgctctaagtgaatacttg

SEQ ID NO: 106680 - DNA, 25 bp, probe
gagggataattcaaactgacaacct

SEQ ID NO: 106681 - DNA, 25 bp, probe
catagggaatatgtaagtcaggagt

SEQ ID NO: 106682 - DNA, 25 bp, probe
agggataattcaaactgacaacctg

SEQ ID NO: 106683 - DNA, 25 bp, probe
ggagtagctgagaggaagatgaaga

SEQ ID NO: 106684 - DNA, 25 bp, probe
aggagtagctgagaggaagatgaag

SEQ ID NO: 106685 - DNA, 25 bp, probe
atggtaatcattctcaggtgttctc

SEQ ID NO: 106686 - DNA, 25 bp, probe
tggtaatcattctcaggtgttctca

SEQ ID NO: 106687 - DNA, 25 bp, probe
gctaggctaagtcaacaacagaata

SEQ ID NO: 106688 - DNA, 25 bp, probe
ctaggctaagtcaacaacagaataa

SEQ ID NO: 106689 - DNA, 25 bp, probe
aatgatggcatctactcaaggtatt

SEQ ID NO: 106690 - DNA, 25 bp, probe
gaatgatggcatctactcaaggtat

SEQ ID NO: 106691 - DNA, 25 bp, probe
tcaagaatgatggcatctactcaag

SEQ ID NO: 106692 - DNA, 25 bp, probe
ttctgtatgaattgtggaacatcac

SEQ ID NO: 106693 - DNA, 25 bp, probe
gtcaagaatgatggcatctactcaa

SEQ ID NO: 106694 - DNA, 25 bp, probe
agaatgatggcatctactcaaggta

SEQ ID NO: 106695 - DNA, 25 bp, probe
ggtaatcattctcaggtgttctcac

SEQ ID NO: 106696 - DNA, 25 bp, probe
ctgtcaagaatgatggcatctactc

SEQ ID NO: 106697 - DNA, 25 bp, probe
caagaatgatggcatctactcaagg

SEQ ID NO: 106698 - DNA, 25 bp, probe
tctgtcaagaatgatggcatctact

SEQ ID NO: 106699 - DNA, 25 bp, probe
tacttctggtctgatacctaaggag

SEQ ID NO: 106700 - DNA, 25 bp, probe
atacttctggtctgatacctaagga

SEQ ID NO: 106701 - DNA, 25 bp, probe
aagaatgatggcatctactcaaggt

SEQ ID NO: 106702 - DNA, 25 bp, probe
tgtcaagaatgatggcatctactca

SEQ ID NO: 106703 - DNA, 25 bp, probe
aatacttctggtctgatacctaagg

SEQ ID NO: 106704 - DNA, 25 bp, probe
attatactgaacccatccaaacctg

SEQ ID NO: 106705 - DNA, 25 bp, probe
agcaactaactttattcctccacag

SEQ ID NO: 106706 - DNA, 25 bp, probe
aggctaagtcaacaacagaataaag

SEQ ID NO: 106707 - DNA, 25 bp, probe
aattatactgaacccatccaaacct

SEQ ID NO: 106708 - DNA, 25 bp, probe
caagcaactaactttattcctccac

SEQ ID NO: 106709 - DNA, 25 bp, probe
cacaagcaactaactttattcctcc

SEQ ID NO: 106710 - DNA, 25 bp, probe
aagcaactaactttattcctccaca

SEQ ID NO: 106711 - DNA, 25 bp, probe
acaagcaactaactttattcctcca

SEQ ID NO: 106712 - DNA, 25 bp, probe
aatggtaatcattctcaggtgttct

SEQ ID NO: 106713 - DNA, 25 bp, probe
cctaatggtaatcattctcaggtgt

SEQ ID NO: 106714 - DNA, 25 bp, probe
tcctaatggtaatcattctcaggtg

SEQ ID NO: 106715 - DNA, 25 bp, probe
cctcctaatggtaatcattctcagg

SEQ ID NO: 106716 - DNA, 25 bp, probe
ataagtaaacatttcctggacctcc

SEQ ID NO: 106717 - DNA, 25 bp, probe
ctcctaatggtaatcattctcaggt

SEQ ID NO: 106718 - DNA, 25 bp, probe
gcacaagcaactaactttattcctc

SEQ ID NO: 106719 - DNA, 25 bp, probe
aaattatactgaacccatccaaacc

SEQ ID NO: 106720 - DNA, 25 bp, probe
gcctcctaatggtaatcattctcag

SEQ ID NO: 106721 - DNA, 25 bp, probe
tttcctgtctttgaataatccactc

SEQ ID NO: 106722 - DNA, 25 bp, probe
tatactgaacccatccaaacctgaa

SEQ ID NO: 106723 - DNA, 25 bp, probe
ttatactgaacccatccaaacctga

SEQ ID NO: 106724 - DNA, 25 bp, probe
gtgcctcctaatggtaatcattctc

SEQ ID NO: 106725 - DNA, 25 bp, probe
gagtgcctcctaatggtaatcattc

SEQ ID NO: 106726 - DNA, 25 bp, probe
ttcctgtctttgaataatccactca

SEQ ID NO: 106727 - DNA, 25 bp, probe
tcctgtctttgaataatccactcat

SEQ ID NO: 106728 - DNA, 25 bp, probe
gaggctaagtttcaaggagatcata

SEQ ID NO: 106729 - DNA, 25 bp, probe
aggaggtctctaagaatataagtgg

SEQ ID NO: 106730 - DNA, 25 bp, probe
gctcttatattgccatttcttccac

SEQ ID NO: 106731 - DNA, 25 bp, probe
ctcttatattgccatttcttccaca

SEQ ID NO: 106732 - DNA, 25 bp, probe
ggaggtctctaagaatataagtggg

SEQ ID NO: 106733 - DNA, 25 bp, probe
cgtggtcctaatcttctgaacttgg

SEQ ID NO: 106734 - DNA, 25 bp, probe
aaattcttctccactttctagccag

SEQ ID NO: 106735 - DNA, 25 bp, probe
tttggattcttatggacaatgaccc

SEQ ID NO: 106736 - DNA, 25 bp, probe
gtggtcctaatcttctgaacttggc

SEQ ID NO: 106737 - DNA, 25 bp, probe
tcttatattgccatttcttccacaa

SEQ ID NO: 106738 - DNA, 25 bp, probe
cttatattgccatttcttccacaag

SEQ ID NO: 106739 - DNA, 25 bp, probe
aattcttctccactttctagccaga

SEQ ID NO: 106740 - DNA, 25 bp, probe
aatttctcacaaaggatgcccaaag

SEQ ID NO: 106741 - DNA, 25 bp, probe
gaatttctcacaaaggatgcccaaa

SEQ ID NO: 106742 - DNA, 25 bp, probe
cagagttgaagacagagctacacag

SEQ ID NO: 106743 - DNA, 25 bp, probe
cagctcttatattgccatttcttcc

SEQ ID NO: 106744 - DNA, 25 bp, probe
acgtggtcctaatcttctgaacttg

SEQ ID NO: 106745 - DNA, 25 bp, probe
agctcttatattgccatttcttcca

SEQ ID NO: 106746 - DNA, 25 bp, probe
acagctcttatattgccatttcttc

SEQ ID NO: 106747 - DNA, 25 bp, probe
gacagctcttatattgccatttctt

SEQ ID NO: 106748 - DNA, 25 bp, probe
taggaggtctctaagaatataagtg

SEQ ID NO: 106749 - DNA, 25 bp, probe
agacagctcttatattgccatttct

SEQ ID NO: 106750 - DNA, 25 bp, probe
ggaagacagctcttatattgccatt

SEQ ID NO: 106751 - DNA, 25 bp, probe
aatggaagacagctcttatattgcc

SEQ ID NO: 106752 - DNA, 25 bp, probe
attcttctccactttctagccagag

SEQ ID NO: 106753 - DNA, 25 bp, probe
gattcttatggacaatgacccagtg

SEQ ID NO: 106754 - DNA, 25 bp, probe
tttctcacaaaggatgcccaaagat

SEQ ID NO: 106755 - DNA, 25 bp, probe
atttctcacaaaggatgcccaaaga

SEQ ID NO: 106756 - DNA, 25 bp, probe
tggaagacagctcttatattgccat

SEQ ID NO: 106757 - DNA, 25 bp, probe
atggaagacagctcttatattgcca

SEQ ID NO: 106758 - DNA, 25 bp, probe
ctaggaggtctctaagaatataagt

SEQ ID NO: 106759 - DNA, 25 bp, probe
gagagaagagaatgcacaaacagag

SEQ ID NO: 106760 - DNA, 25 bp, probe
ttggattcttatggacaatgaccca

SEQ ID NO: 106761 - DNA, 25 bp, probe
tatgggagagaagagaatgcacaaa

SEQ ID NO: 106762 - DNA, 25 bp, probe
tatattgccatttcttccacaagag

SEQ ID NO: 106763 - DNA, 25 bp, probe
tctaggaggtctctaagaatataag

SEQ ID NO: 106764 - DNA, 25 bp, probe
agagttgaagacagagctacacagg

SEQ ID NO: 106765 - DNA, 25 bp, probe
ttatattgccatttcttccacaaga

SEQ ID NO: 106766 - DNA, 25 bp, probe
tgaatttctcacaaaggatgcccaa

SEQ ID NO: 106767 - DNA, 25 bp, probe
ggattcttatggacaatgacccagt

SEQ ID NO: 106768 - DNA, 25 bp, probe
tggattcttatggacaatgacccag

SEQ ID NO: 106769 - DNA, 25 bp, probe
aaaattcttctccactttctagcca

SEQ ID NO: 106770 - DNA, 25 bp, probe
tggtcctaatcttctgaacttggcg

SEQ ID NO: 106771 - DNA, 25 bp, probe
ttctcacaaaggatgcccaaagatg

SEQ ID NO: 106772 - DNA, 25 bp, probe
gaggtctctaagaatataagtgggg

SEQ ID NO: 106773 - DNA, 25 bp, probe
caaatatgcccattatcccaacaag

SEQ ID NO: 106774 - DNA, 25 bp, probe
aaatatgcccattatcccaacaagc

SEQ ID NO: 106775 - DNA, 25 bp, probe
agtacaacgactatggctgttactg

SEQ ID NO: 106776 - DNA, 25 bp, probe
cagtacaacgactatggctgttact

SEQ ID NO: 106777 - DNA, 25 bp, probe
gatgatcgagaagatgacaggcaag

SEQ ID NO: 106778 - DNA, 25 bp, probe
gtacaacgactatggctgttactgc

SEQ ID NO: 106779 - DNA, 25 bp, probe
gcagtacaacgactatggctgttac

SEQ ID NO: 106780 - DNA, 25 bp, probe
aatatgcccattatcccaacaagct

SEQ ID NO: 106781 - DNA, 25 bp, probe
atgatcgagaagatgacaggcaagt

SEQ ID NO: 106782 - DNA, 25 bp, probe
tgatgatcgagaagatgacaggcaa

SEQ ID NO: 106783 - DNA, 25 bp, probe
aagtatcttttctctgtcagcgaac

SEQ ID NO: 106784 - DNA, 25 bp, probe
tacaaccgcaaatatgcccattatc

SEQ ID NO: 106785 - DNA, 25 bp, probe
ctacaaccgcaaatatgcccattat

SEQ ID NO: 106786 - DNA, 25 bp, probe
atatgcccattatcccaacaagctg

SEQ ID NO: 106787 - DNA, 25 bp, probe
gcaaatatgcccattatcccaacaa

SEQ ID NO: 106788 - DNA, 25 bp, probe
ctttcttctgctgccttttatgctc

SEQ ID NO: 106789 - DNA, 25 bp, probe
gtgatgatcgagaagatgacaggca

SEQ ID NO: 106790 - DNA, 25 bp, probe
tacaacgactatggctgttactgcg

SEQ ID NO: 106791 - DNA, 25 bp, probe
tgcagtacaacgactatggctgtta

SEQ ID NO: 106792 - DNA, 25 bp, probe
ctgctttcttctgctgccttttatg

SEQ ID NO: 106793 - DNA, 25 bp, probe
aaagtatcttttctctgtcagcgaa

SEQ ID NO: 106794 - DNA, 25 bp, probe
tgatcgagaagatgacaggcaagtc

SEQ ID NO: 106795 - DNA, 25 bp, probe
agtatcttttctctgtcagcgaacg

SEQ ID NO: 106796 - DNA, 25 bp, probe
gagcccaaactggaaaagtatcttt

SEQ ID NO: 106797 - DNA, 25 bp, probe
ggtgatgatcgagaagatgacaggc

SEQ ID NO: 106798 - DNA, 25 bp, probe
tgagcccaaactggaaaagtatctt

SEQ ID NO: 106799 - DNA, 25 bp, probe
cctacaaccgcaaatatgcccatta

SEQ ID NO: 106800 - DNA, 25 bp, probe
tttcttctgctgccttttatgctcc

SEQ ID NO: 106801 - DNA, 25 bp, probe
gatcgagaagatgacaggcaagtcc

SEQ ID NO: 106802 - DNA, 25 bp, probe
gggtgatgatcgagaagatgacagg

SEQ ID NO: 106803 - DNA, 25 bp, probe
tatgcccattatcccaacaagctgt

SEQ ID NO: 106804 - DNA, 25 bp, probe
gtgagcccaaactggaaaagtatct

SEQ ID NO: 106805 - DNA, 25 bp, probe
cgcaaatatgcccattatcccaaca

SEQ ID NO: 106806 - DNA, 25 bp, probe
acaaccgcaaatatgcccattatcc

SEQ ID NO: 106807 - DNA, 25 bp, probe
tgtgagcccaaactggaaaagtatc

SEQ ID NO: 106808 - DNA, 25 bp, probe
ctgtgagcccaaactggaaaagtat

SEQ ID NO: 106809 - DNA, 25 bp, probe
tatcttttctctgtcagcgaacgtg

SEQ ID NO: 106810 - DNA, 25 bp, probe
gtatcttttctctgtcagcgaacgt

SEQ ID NO: 106811 - DNA, 25 bp, probe
gtttggggtgatgatcgagaagatg

SEQ ID NO: 106812 - DNA, 25 bp, probe
cttctgctgccttttatgctccttg

SEQ ID NO: 106813 - DNA, 25 bp, probe
gctttcttctgctgccttttatgct

SEQ ID NO: 106814 - DNA, 25 bp, probe
tttggggtgatgatcgagaagatga

SEQ ID NO: 106815 - DNA, 25 bp, probe
agtttggggtgatgatcgagaagat

SEQ ID NO: 106816 - DNA, 25 bp, probe
tcttctgctgccttttatgctcctt

SEQ ID NO: 106817 - DNA, 25 bp, probe
actctctaaatctggtgtatgggta

SEQ ID NO: 106818 - DNA, 25 bp, probe
ttgactctctaaatctggtgtatgg

SEQ ID NO: 106819 - DNA, 25 bp, probe
acacagtcctacaaatacagattcg

SEQ ID NO: 106820 - DNA, 25 bp, probe
cacacagtcctacaaatacagattc

SEQ ID NO: 106821 - DNA, 25 bp, probe
ctctctaaatctggtgtatgggtat

SEQ ID NO: 106822 - DNA, 25 bp, probe
taccaatactttcccaacatcctct

SEQ ID NO: 106823 - DNA, 25 bp, probe
gcacacagtcctacaaatacagatt

SEQ ID NO: 106824 - DNA, 25 bp, probe
tctctaaatctggtgtatgggtatt

SEQ ID NO: 106825 - DNA, 25 bp, probe
gactctctaaatctggtgtatgggt

SEQ ID NO: 106826 - DNA, 25 bp, probe
tgactctctaaatctggtgtatggg

SEQ ID NO: 106827 - DNA, 25 bp, probe
caaattgactctctaaatctggtgt

SEQ ID NO: 106828 - DNA, 25 bp, probe
cacagtcctacaaatacagattcgc

SEQ ID NO: 106829 - DNA, 25 bp, probe
gagccaaattgactctctaaatctg

SEQ ID NO: 106830 - DNA, 25 bp, probe
attgactctctaaatctggtgtatg

SEQ ID NO: 106831 - DNA, 25 bp, probe
gtaccaatactttcccaacatcctc

SEQ ID NO: 106832 - DNA, 25 bp, probe
cgatcagattatcatcaccaccacc

SEQ ID NO: 106833 - DNA, 25 bp, probe
cattcgcacacagtcctacaaatac

SEQ ID NO: 106834 - DNA, 25 bp, probe
accaatactttcccaacatcctctg

SEQ ID NO: 106835 - DNA, 25 bp, probe
aatactttcccaacatcctctgctc

SEQ ID NO: 106836 - DNA, 25 bp, probe
attcgcacacagtcctacaaataca

SEQ ID NO: 106837 - DNA, 25 bp, probe
acattcgcacacagtcctacaaata

SEQ ID NO: 106838 - DNA, 25 bp, probe
aaattgactctctaaatctggtgta

SEQ ID NO: 106839 - DNA, 25 bp, probe
ctctaaatctggtgtatgggtatta

SEQ ID NO: 106840 - DNA, 25 bp, probe
gtctactgcctcaagagaaacctac

SEQ ID NO: 106841 - DNA, 25 bp, probe
aattgactctctaaatctggtgtat

SEQ ID NO: 106842 - DNA, 25 bp, probe
ccaaattgactctctaaatctggtg

SEQ ID NO: 106843 - DNA, 25 bp, probe
gcgatcagattatcatcaccaccac

SEQ ID NO: 106844 - DNA, 25 bp, probe
gactctggtcataggacttggtagg

SEQ ID NO: 106845 - DNA, 25 bp, probe
caatactttcccaacatcctctgct

SEQ ID NO: 106846 - DNA, 25 bp, probe
agccaaattgactctctaaatctgg

SEQ ID NO: 106847 - DNA, 25 bp, probe
gccaaattgactctctaaatctggt

SEQ ID NO: 106848 - DNA, 25 bp, probe
cgcacacagtcctacaaatacagat

SEQ ID NO: 106849 - DNA, 25 bp, probe
tacaacccacagtaccaatactttc

SEQ ID NO: 106850 - DNA, 25 bp, probe
ctacaacccacagtaccaatacttt

SEQ ID NO: 106851 - DNA, 25 bp, probe
tttacgcaagaagagccaaattgac

SEQ ID NO: 106852 - DNA, 25 bp, probe
acagtaccaatactttcccaacatc

SEQ ID NO: 106853 - DNA, 25 bp, probe
ctgcgatcagattatcatcaccacc

SEQ ID NO: 106854 - DNA, 25 bp, probe
cacagtaccaatactttcccaacat

SEQ ID NO: 106855 - DNA, 25 bp, probe
ttcgcacacagtcctacaaatacag

SEQ ID NO: 106856 - DNA, 25 bp, probe
atcagattatcatcaccaccaccct

SEQ ID NO: 106857 - DNA, 25 bp, probe
agatgcacttacttctcagcttctg

SEQ ID NO: 106858 - DNA, 25 bp, probe
tgcgatcagattatcatcaccacca

SEQ ID NO: 106859 - DNA, 25 bp, probe
agtaccaatactttcccaacatcct

SEQ ID NO: 106860 - DNA, 25 bp, probe
cagtaccaatactttcccaacatcc

SEQ ID NO: 106861 - DNA, 25 bp, probe
gatgattcaagagcaaggattactg

SEQ ID NO: 106862 - DNA, 25 bp, probe
agatgattcaagagcaaggattact

SEQ ID NO: 106863 - DNA, 25 bp, probe
tagatgattcaagagcaaggattac

SEQ ID NO: 106864 - DNA, 25 bp, probe
aatagatgattcaagagcaaggatt

SEQ ID NO: 106865 - DNA, 25 bp, probe
ggaagtgctaaccatgtatagagtg

SEQ ID NO: 106866 - DNA, 25 bp, probe
atagatgattcaagagcaaggatta

SEQ ID NO: 106867 - DNA, 25 bp, probe
ccatcataggtaagtgagacagcaa

SEQ ID NO: 106868 - DNA, 25 bp, probe
ctataaggaagagagaagctgtctg

SEQ ID NO: 106869 - DNA, 25 bp, probe
ataaggaagagagaagctgtctgta

SEQ ID NO: 106870 - DNA, 25 bp, probe
tataaggaagagagaagctgtctgt

SEQ ID NO: 106871 - DNA, 25 bp, probe
catattcttgttcagcttgcactaa

SEQ ID NO: 106872 - DNA, 25 bp, probe
tcttgttcagcttgcactaatctat

SEQ ID NO: 106873 - DNA, 25 bp, probe
tattcttgttcagcttgcactaatc

SEQ ID NO: 106874 - DNA, 25 bp, probe
ttcttgttcagcttgcactaatcta

SEQ ID NO: 106875 - DNA, 25 bp, probe
aggtaagtgagacagcaaatagatg

SEQ ID NO: 106876 - DNA, 25 bp, probe
ggtaagtgagacagcaaatagatga

SEQ ID NO: 106877 - DNA, 25 bp, probe
cagcaaatagatgattcaagagcaa

SEQ ID NO: 106878 - DNA, 25 bp, probe
agcaaatagatgattcaagagcaag

SEQ ID NO: 106879 - DNA, 25 bp, probe
gacagcaaatagatgattcaagagc

SEQ ID NO: 106880 - DNA, 25 bp, probe
aagtgagacagcaaatagatgattc

SEQ ID NO: 106881 - DNA, 25 bp, probe
attcttgttcagcttgcactaatct

SEQ ID NO: 106882 - DNA, 25 bp, probe
atattcttgttcagcttgcactaat

SEQ ID NO: 106883 - DNA, 25 bp, probe
taaggaagagagaagctgtctgtac

SEQ ID NO: 106884 - DNA, 25 bp, probe
gcaaatagatgattcaagagcaagg

SEQ ID NO: 106885 - DNA, 25 bp, probe
cttgttcagcttgcactaatctata

SEQ ID NO: 106886 - DNA, 25 bp, probe
taggtaagtgagacagcaaatagat

SEQ ID NO: 106887 - DNA, 25 bp, probe
ataggtaagtgagacagcaaataga

SEQ ID NO: 106888 - DNA, 25 bp, probe
cataggtaagtgagacagcaaatag

SEQ ID NO: 106889 - DNA, 25 bp, probe
acagcaaatagatgattcaagagca

SEQ ID NO: 106890 - DNA, 25 bp, probe
caaatagatgattcaagagcaagga

SEQ ID NO: 106891 - DNA, 25 bp, probe
ccatattcttgttcagcttgcacta

SEQ ID NO: 106892 - DNA, 25 bp, probe
aatgggagtaagagaacaatttggg

SEQ ID NO: 106893 - DNA, 25 bp, probe
gaagtgctaaccatgtatagagtgg

SEQ ID NO: 106894 - DNA, 25 bp, probe
agacagcaaatagatgattcaagag

SEQ ID NO: 106895 - DNA, 25 bp, probe
gagacagcaaatagatgattcaaga

SEQ ID NO: 106896 - DNA, 25 bp, probe
gtaagtgagacagcaaatagatgat

SEQ ID NO: 106897 - DNA, 25 bp, probe
agtgagacagcaaatagatgattca

SEQ ID NO: 106898 - DNA, 25 bp, probe
atcataggtaagtgagacagcaaat

SEQ ID NO: 106899 - DNA, 25 bp, probe
ttgttcagcttgcactaatctatat

SEQ ID NO: 106900 - DNA, 25 bp, probe
gtgagacagcaaatagatgattcaa

SEQ ID NO: 106901 - DNA, 25 bp, probe
catcataggtaagtgagacagcaaa

SEQ ID NO: 106902 - DNA, 25 bp, probe
cctataaggaagagagaagctgtct

SEQ ID NO: 106903 - DNA, 25 bp, probe
gtgatacttgggaggtaggaagaaa

SEQ ID NO: 106904 - DNA, 25 bp, probe
tgagacagcaaatagatgattcaag

SEQ ID NO: 106905 - DNA, 25 bp, probe
aacagatacacagagttctcagacc

SEQ ID NO: 106906 - DNA, 25 bp, probe
cataaccacagccaagcagattaac

SEQ ID NO: 106907 - DNA, 25 bp, probe
ctagtcagacatgatcctccagatt

SEQ ID NO: 106908 - DNA, 25 bp, probe
tagtcagacatgatcctccagattg

SEQ ID NO: 106909 - DNA, 25 bp, probe
atgatcctccagattgacagacaag

SEQ ID NO: 106910 - DNA, 25 bp, probe
aatgagtacacatctccagctattc

SEQ ID NO: 106911 - DNA, 25 bp, probe
atcaaagttaaagtttctcagggtg

SEQ ID NO: 106912 - DNA, 25 bp, probe
acagagcagattcaagaaagaagat

SEQ ID NO: 106913 - DNA, 25 bp, probe
atgagtacacatctccagctattca

SEQ ID NO: 106914 - DNA, 25 bp, probe
tacacatctccagctattcagacag

SEQ ID NO: 106915 - DNA, 25 bp, probe
agtacacatctccagctattcagac

SEQ ID NO: 106916 - DNA, 25 bp, probe
tcaaagttaaagtttctcagggtgg

SEQ ID NO: 106917 - DNA, 25 bp, probe
atcttgatgtcttgatggatggacc

SEQ ID NO: 106918 - DNA, 25 bp, probe
cacagagcagattcaagaaagaaga

SEQ ID NO: 106919 - DNA, 25 bp, probe
gagtacacatctccagctattcaga

SEQ ID NO: 106920 - DNA, 25 bp, probe
catgatcctccagattgacagacaa

SEQ ID NO: 106921 - DNA, 25 bp, probe
gtacacatctccagctattcagaca

SEQ ID NO: 106922 - DNA, 25 bp, probe
ggatcaaagttaaagtttctcaggg

SEQ ID NO: 106923 - DNA, 25 bp, probe
gcctggatcaaagttaaagtttctc

SEQ ID NO: 106924 - DNA, 25 bp, probe
tgagtacacatctccagctattcag

SEQ ID NO: 106925 - DNA, 25 bp, probe
gacatgatcctccagattgacagac

SEQ ID NO: 106926 - DNA, 25 bp, probe
agacatgatcctccagattgacaga

SEQ ID NO: 106927 - DNA, 25 bp, probe
cagacatgatcctccagattgacag

SEQ ID NO: 106928 - DNA, 25 bp, probe
agagcagattcaagaaagaagatca

SEQ ID NO: 106929 - DNA, 25 bp, probe
gatcaaagttaaagtttctcagggt

SEQ ID NO: 106930 - DNA, 25 bp, probe
tggatcaaagttaaagtttctcagg

SEQ ID NO: 106931 - DNA, 25 bp, probe
cctggatcaaagttaaagtttctca

SEQ ID NO: 106932 - DNA, 25 bp, probe
gagcagattcaagaaagaagatcag

SEQ ID NO: 106933 - DNA, 25 bp, probe
cagagcagattcaagaaagaagatc

SEQ ID NO: 106934 - DNA, 25 bp, probe
ataaccacagccaagcagattaacc

SEQ ID NO: 106935 - DNA, 25 bp, probe
attcaagaaagaagatcaggaaggg

SEQ ID NO: 106936 - DNA, 25 bp, probe
gattcaagaaagaagatcaggaagg

SEQ ID NO: 106937 - DNA, 25 bp, probe
agacagactcctaaccaaccagatg

SEQ ID NO: 106938 - DNA, 25 bp, probe
cagacagactcctaaccaaccagat

SEQ ID NO: 106939 - DNA, 25 bp, probe
gcagattcaagaaagaagatcagga

SEQ ID NO: 106940 - DNA, 25 bp, probe
agcagattcaagaaagaagatcagg

SEQ ID NO: 106941 - DNA, 25 bp, probe
aaagttaaagtttctcagggtggga

SEQ ID NO: 106942 - DNA, 25 bp, probe
caaagttaaagtttctcagggtggg

SEQ ID NO: 106943 - DNA, 25 bp, probe
agtcagacatgatcctccagattga

SEQ ID NO: 106944 - DNA, 25 bp, probe
cagattcaagaaagaagatcaggaa

SEQ ID NO: 106945 - DNA, 25 bp, probe
aagttaaagtttctcagggtgggaa

SEQ ID NO: 106946 - DNA, 25 bp, probe
gatcctccagattgacagacaagtc

SEQ ID NO: 106947 - DNA, 25 bp, probe
agattcaagaaagaagatcaggaag

SEQ ID NO: 106948 - DNA, 25 bp, probe
tgatcctccagattgacagacaagt

SEQ ID NO: 106949 - DNA, 25 bp, probe
ttctgtatctccctcaataaagcct

SEQ ID NO: 106950 - DNA, 25 bp, probe
cttctgtatctccctcaataaagcc

SEQ ID NO: 106951 - DNA, 25 bp, probe
tctgtatctccctcaataaagcctc

SEQ ID NO: 106952 - DNA, 25 bp, probe
cgcttctgtatctccctcaataaag

SEQ ID NO: 106953 - DNA, 25 bp, probe
ccgcttctgtatctccctcaataaa

SEQ ID NO: 106954 - DNA, 25 bp, probe
gtatctccctcaataaagcctcctg

SEQ ID NO: 106955 - DNA, 25 bp, probe
ctgtatctccctcaataaagcctcc

SEQ ID NO: 106956 - DNA, 25 bp, probe
atcaacaactttgtcaggtactaca

SEQ ID NO: 106957 - DNA, 25 bp, probe
catcaacaactttgtcaggtactac

SEQ ID NO: 106958 - DNA, 25 bp, probe
tcatcaacaactttgtcaggtacta

SEQ ID NO: 106959 - DNA, 25 bp, probe
atcatcaacaactttgtcaggtact

SEQ ID NO: 106960 - DNA, 25 bp, probe
catcatcaacaactttgtcaggtac

SEQ ID NO: 106961 - DNA, 25 bp, probe
tgtatctccctcaataaagcctcct

SEQ ID NO: 106962 - DNA, 25 bp, probe
ccatcatcaacaactttgtcaggta

SEQ ID NO: 106963 - DNA, 25 bp, probe
taagactcctctatgttgcctgctg

SEQ ID NO: 106964 - DNA, 25 bp, probe
gtaagactcctctatgttgcctgct

SEQ ID NO: 106965 - DNA, 25 bp, probe
tatctccctcaataaagcctcctgc

SEQ ID NO: 106966 - DNA, 25 bp, probe
cccgcttctgtatctccctcaataa

SEQ ID NO: 106967 - DNA, 25 bp, probe
catcagcttcttgtgtggtgtcatc

SEQ ID NO: 106968 - DNA, 25 bp, probe
atccagagaccctgtttaagagcat

SEQ ID NO: 106969 - DNA, 25 bp, probe
ggtaagactcctctatgttgcctgc

SEQ ID NO: 106970 - DNA, 25 bp, probe
caactttgtcaggtactacaacaag

SEQ ID NO: 106971 - DNA, 25 bp, probe
caacaactttgtcaggtactacaac

SEQ ID NO: 106972 - DNA, 25 bp, probe
tcaacaactttgtcaggtactacaa

SEQ ID NO: 106973 - DNA, 25 bp, probe
acaactttgtcaggtactacaacaa

SEQ ID NO: 106974 - DNA, 25 bp, probe
aacaactttgtcaggtactacaaca

SEQ ID NO: 106975 - DNA, 25 bp, probe
aactttgtcaggtactacaacaagc

SEQ ID NO: 106976 - DNA, 25 bp, probe
cccatcatcaacaactttgtcaggt

SEQ ID NO: 106977 - DNA, 25 bp, probe
tccagagaccctgtttaagagcatc

SEQ ID NO: 106978 - DNA, 25 bp, probe
gggtaagactcctctatgttgcctg

SEQ ID NO: 106979 - DNA, 25 bp, probe
ctgggtaagactcctctatgttgcc

SEQ ID NO: 106980 - DNA, 25 bp, probe
ggctgggtaagactcctctatgttg

SEQ ID NO: 106981 - DNA, 25 bp, probe
ctttgtcaggtactacaacaagcag

SEQ ID NO: 106982 - DNA, 25 bp, probe
caaggctgggtaagactcctctatg

SEQ ID NO: 106983 - DNA, 25 bp, probe
catccagagaccctgtttaagagca

SEQ ID NO: 106984 - DNA, 25 bp, probe
tgggtaagactcctctatgttgcct

SEQ ID NO: 106985 - DNA, 25 bp, probe
actttgtcaggtactacaacaagca

SEQ ID NO: 106986 - DNA, 25 bp, probe
gctgggtaagactcctctatgttgc

SEQ ID NO: 106987 - DNA, 25 bp, probe
catccaccccatcatcaacaacttt

SEQ ID NO: 106988 - DNA, 25 bp, probe
aggctgggtaagactcctctatgtt

SEQ ID NO: 106989 - DNA, 25 bp, probe
aaggctgggtaagactcctctatgt

SEQ ID NO: 106990 - DNA, 25 bp, probe
atccaccccatcatcaacaactttg

SEQ ID NO: 106991 - DNA, 25 bp, probe
cagagaccctgtttaagagcatccc

SEQ ID NO: 106992 - DNA, 25 bp, probe
ccagagaccctgtttaagagcatcc

SEQ ID NO: 106993 - DNA, 25 bp, probe
caaattgccttcagccctaacatag

SEQ ID NO: 106994 - DNA, 25 bp, probe
aaattgccttcagccctaacatagt

SEQ ID NO: 106995 - DNA, 25 bp, probe
aattgccttcagccctaacatagtg

SEQ ID NO: 106996 - DNA, 25 bp, probe
ccaaattgccttcagccctaacata

SEQ ID NO: 106997 - DNA, 25 bp, probe
aagaataagaattcaattgtggacc

SEQ ID NO: 106998 - DNA, 25 bp, probe
agactgctgtcatcaccaacaaatg

SEQ ID NO: 106999 - DNA, 25 bp, probe
cagactgctgtcatcaccaacaaat

SEQ ID NO: 107000 - DNA, 25 bp, probe
attgccttcagccctaacatagtgt

SEQ ID NO: 107001 - DNA, 25 bp, probe
agaataagaattcaattgtggaccc

SEQ ID NO: 107002 - DNA, 25 bp, probe
caagaataagaattcaattgtggac

SEQ ID NO: 107003 - DNA, 25 bp, probe
ttgccttcagccctaacatagtgtc

SEQ ID NO: 107004 - DNA, 25 bp, probe
acaagaataagaattcaattgtgga

SEQ ID NO: 107005 - DNA, 25 bp, probe
cttcagccctaacatagtgtctgct

SEQ ID NO: 107006 - DNA, 25 bp, probe
gactgctgtcatcaccaacaaatgg

SEQ ID NO: 107007 - DNA, 25 bp, probe
ccttcagccctaacatagtgtctgc

SEQ ID NO: 107008 - DNA, 25 bp, probe
gccttcagccctaacatagtgtctg

SEQ ID NO: 107009 - DNA, 25 bp, probe
gtcatcaccaacaaatggtttcaac

SEQ ID NO: 107010 - DNA, 25 bp, probe
aacaagaataagaattcaattgtgg

SEQ ID NO: 107011 - DNA, 25 bp, probe
gaataagaattcaattgtggacccc

SEQ ID NO: 107012 - DNA, 25 bp, probe
ataagaattcaattgtggaccccaa

SEQ ID NO: 107013 - DNA, 25 bp, probe
aataagaattcaattgtggacccca

SEQ ID NO: 107014 - DNA, 25 bp, probe
tgtcatcaccaacaaatggtttcaa

SEQ ID NO: 107015 - DNA, 25 bp, probe
taagaattcaattgtggaccccaaa

SEQ ID NO: 107016 - DNA, 25 bp, probe
ctgtcatcaccaacaaatggtttca

SEQ ID NO: 107017 - DNA, 25 bp, probe
tcatcaccaacaaatggtttcaacc

SEQ ID NO: 107018 - DNA, 25 bp, probe
aagaattcaattgtggaccccaaag

SEQ ID NO: 107019 - DNA, 25 bp, probe
cccaaagtgacagtggagatccatg

SEQ ID NO: 107020 - DNA, 25 bp, probe
caacaagaataagaattcaattgtg

SEQ ID NO: 107021 - DNA, 25 bp, probe
gaattcaattgtggaccccaaagtg

SEQ ID NO: 107022 - DNA, 25 bp, probe
catcaccaacaaatggtttcaaccc

SEQ ID NO: 107023 - DNA, 25 bp, probe
agaattcaattgtggaccccaaagt

SEQ ID NO: 107024 - DNA, 25 bp, probe
gctgtcatcaccaacaaatggtttc

SEQ ID NO: 107025 - DNA, 25 bp, probe
caccaacaaatggtttcaacccatg

SEQ ID NO: 107026 - DNA, 25 bp, probe
aattcaattgtggaccccaaagtga

SEQ ID NO: 107027 - DNA, 25 bp, probe
tcaccaacaaatggtttcaacccat

SEQ ID NO: 107028 - DNA, 25 bp, probe
atcaccaacaaatggtttcaaccca

SEQ ID NO: 107029 - DNA, 25 bp, probe
gtgaagatctccctccaggactagg

SEQ ID NO: 107030 - DNA, 25 bp, probe
tgctgtcatcaccaacaaatggttt

SEQ ID NO: 107031 - DNA, 25 bp, probe
attcaattgtggaccccaaagtgac

SEQ ID NO: 107032 - DNA, 25 bp, probe
ctgctgtcatcaccaacaaatggtt

SEQ ID NO: 107033 - DNA, 25 bp, probe
ttcaattgtggaccccaaagtgaca

SEQ ID NO: 107034 - DNA, 25 bp, probe
actgctgtcatcaccaacaaatggt

SEQ ID NO: 107035 - DNA, 25 bp, probe
caacaaatggtttcaacccatggtg

SEQ ID NO: 107036 - DNA, 25 bp, probe
ccaaagtgacagtggagatccatgg

SEQ ID NO: 107037 - DNA, 25 bp, probe
ctagataagaatatccaccagtcgg

SEQ ID NO: 107038 - DNA, 25 bp, probe
gacattagagacatctacgacttcc

SEQ ID NO: 107039 - DNA, 25 bp, probe
ggacattagagacatctacgacttc

SEQ ID NO: 107040 - DNA, 25 bp, probe
aggacattagagacatctacgactt

SEQ ID NO: 107041 - DNA, 25 bp, probe
gaggacattagagacatctacgact

SEQ ID NO: 107042 - DNA, 25 bp, probe
tagataagaatatccaccagtcggt

SEQ ID NO: 107043 - DNA, 25 bp, probe
attagagacatctacgacttccgag

SEQ ID NO: 107044 - DNA, 25 bp, probe
tgagtgagcagatcaagaagaactt

SEQ ID NO: 107045 - DNA, 25 bp, probe
cattagagacatctacgacttccga

SEQ ID NO: 107046 - DNA, 25 bp, probe
acattagagacatctacgacttccg

SEQ ID NO: 107047 - DNA, 25 bp, probe
ggaggacattagagacatctacgac

SEQ ID NO: 107048 - DNA, 25 bp, probe
ttagagacatctacgacttccgaga

SEQ ID NO: 107049 - DNA, 25 bp, probe
gtgagtgagcagatcaagaagaact

SEQ ID NO: 107050 - DNA, 25 bp, probe
tagagacatctacgacttccgagat

SEQ ID NO: 107051 - DNA, 25 bp, probe
ctctgactctgccaaagatttcatc

SEQ ID NO: 107052 - DNA, 25 bp, probe
gagtgagcagatcaagaagaacttt

SEQ ID NO: 107053 - DNA, 25 bp, probe
agatcaagaagaactttgccaagag

SEQ ID NO: 107054 - DNA, 25 bp, probe
agtgagcagatcaagaagaactttg

SEQ ID NO: 107055 - DNA, 25 bp, probe
tctctgactctgccaaagatttcat

SEQ ID NO: 107056 - DNA, 25 bp, probe
cagatcaagaagaactttgccaaga

SEQ ID NO: 107057 - DNA, 25 bp, probe
attgcaggagatacagctctagata

SEQ ID NO: 107058 - DNA, 25 bp, probe
ttgcaggagatacagctctagataa

SEQ ID NO: 107059 - DNA, 25 bp, probe
cggaggacattagagacatctacga

SEQ ID NO: 107060 - DNA, 25 bp, probe
gcaggagatacagctctagataaga

SEQ ID NO: 107061 - DNA, 25 bp, probe
tgcaggagatacagctctagataag

SEQ ID NO: 107062 - DNA, 25 bp, probe
ggtgagtgagcagatcaagaagaac

SEQ ID NO: 107063 - DNA, 25 bp, probe
gctctagataagaatatccaccagt

SEQ ID NO: 107064 - DNA, 25 bp, probe
cagctctagataagaatatccacca

SEQ ID NO: 107065 - DNA, 25 bp, probe
acagctctagataagaatatccacc

SEQ ID NO: 107066 - DNA, 25 bp, probe
tctagataagaatatccaccagtcg

SEQ ID NO: 107067 - DNA, 25 bp, probe
caggagatacagctctagataagaa

SEQ ID NO: 107068 - DNA, 25 bp, probe
agctctagataagaatatccaccag

SEQ ID NO: 107069 - DNA, 25 bp, probe
gattgcaggagatacagctctagat

SEQ ID NO: 107070 - DNA, 25 bp, probe
atggattgcaggagatacagctcta

SEQ ID NO: 107071 - DNA, 25 bp, probe
tctgactctgccaaagatttcatcc

SEQ ID NO: 107072 - DNA, 25 bp, probe
gatcaagaagaactttgccaagagc

SEQ ID NO: 107073 - DNA, 25 bp, probe
aggagatacagctctagataagaat

SEQ ID NO: 107074 - DNA, 25 bp, probe
catctctgactctgccaaagatttc

SEQ ID NO: 107075 - DNA, 25 bp, probe
ctctagataagaatatccaccagtc

SEQ ID NO: 107076 - DNA, 25 bp, probe
atctctgactctgccaaagatttca

SEQ ID NO: 107077 - DNA, 25 bp, probe
tggattgcaggagatacagctctag

SEQ ID NO: 107078 - DNA, 25 bp, probe
acatctctgactctgccaaagattt

SEQ ID NO: 107079 - DNA, 25 bp, probe
atctacgacttccgagatgttctgg

SEQ ID NO: 107080 - DNA, 25 bp, probe
ggcggaggacattagagacatctac

SEQ ID NO: 107081 - DNA, 25 bp, probe
agagcggagaaactgggatttattt

SEQ ID NO: 107082 - DNA, 25 bp, probe
gagagcggagaaactgggatttatt

SEQ ID NO: 107083 - DNA, 25 bp, probe
ctgtatttccattcttgggtttctg

SEQ ID NO: 107084 - DNA, 25 bp, probe
gctgtatttccattcttgggtttct

SEQ ID NO: 107085 - DNA, 25 bp, probe
tgtatttccattcttgggtttctgc

SEQ ID NO: 107086 - DNA, 25 bp, probe
gttccagagaatttgcacaaagttc

SEQ ID NO: 107087 - DNA, 25 bp, probe
ttcctgcctatggtgagatcagatg

SEQ ID NO: 107088 - DNA, 25 bp, probe
ctttgagtgacaacttctccgtgaa

SEQ ID NO: 107089 - DNA, 25 bp, probe
aagctgtatttccattcttgggttt

SEQ ID NO: 107090 - DNA, 25 bp, probe
aaagctgtatttccattcttgggtt

SEQ ID NO: 107091 - DNA, 25 bp, probe
ttccagagaatttgcacaaagttcc

SEQ ID NO: 107092 - DNA, 25 bp, probe
gaatttgcacaaagttccctctgta

SEQ ID NO: 107093 - DNA, 25 bp, probe
gagcggagaaactgggatttatttt

SEQ ID NO: 107094 - DNA, 25 bp, probe
gtatttccattcttgggtttctgcg

SEQ ID NO: 107095 - DNA, 25 bp, probe
agctgtatttccattcttgggtttc

SEQ ID NO: 107096 - DNA, 25 bp, probe
tcaaattggtgtcataatattgtgt

SEQ ID NO: 107097 - DNA, 25 bp, probe
aatttgcacaaagttccctctgtac

SEQ ID NO: 107098 - DNA, 25 bp, probe
ggttccagagaatttgcacaaagtt

SEQ ID NO: 107099 - DNA, 25 bp, probe
tttgagtgacaacttctccgtgaac

SEQ ID NO: 107100 - DNA, 25 bp, probe
tttcctgcctatggtgagatcagat

SEQ ID NO: 107101 - DNA, 25 bp, probe
gaaagctgtatttccattcttgggt

SEQ ID NO: 107102 - DNA, 25 bp, probe
cttgttattttccaggaaccttctc

SEQ ID NO: 107103 - DNA, 25 bp, probe
acttgttattttccaggaaccttct

SEQ ID NO: 107104 - DNA, 25 bp, probe
cacttgttattttccaggaaccttc

SEQ ID NO: 107105 - DNA, 25 bp, probe
gagaatttgcacaaagttccctctg

SEQ ID NO: 107106 - DNA, 25 bp, probe
cagagaatttgcacaaagttccctc

SEQ ID NO: 107107 - DNA, 25 bp, probe
gtcgtcctttgagtgacaacttctc

SEQ ID NO: 107108 - DNA, 25 bp, probe
ggagagcggagaaactgggatttat

SEQ ID NO: 107109 - DNA, 25 bp, probe
ctgcctatggtgagatcagatgtgg

SEQ ID NO: 107110 - DNA, 25 bp, probe
cctgcctatggtgagatcagatgtg

SEQ ID NO: 107111 - DNA, 25 bp, probe
gttggtttcttggtcgtcctttgag

SEQ ID NO: 107112 - DNA, 25 bp, probe
catagcacaccttagatgtggtatt

SEQ ID NO: 107113 - DNA, 25 bp, probe
ttgagtgacaacttctccgtgaacc

SEQ ID NO: 107114 - DNA, 25 bp, probe
ctggttccagagaatttgcacaaag

SEQ ID NO: 107115 - DNA, 25 bp, probe
tcctgcctatggtgagatcagatgt

SEQ ID NO: 107116 - DNA, 25 bp, probe
ggaaccttctcctggtgtctacatg

SEQ ID NO: 107117 - DNA, 25 bp, probe
ttcaaattggtgtcataatattgtg

SEQ ID NO: 107118 - DNA, 25 bp, probe
tggttccagagaatttgcacaaagt

SEQ ID NO: 107119 - DNA, 25 bp, probe
agaatttgcacaaagttccctctgt

SEQ ID NO: 107120 - DNA, 25 bp, probe
gtttcttggtcgtcctttgagtgac

SEQ ID NO: 107121 - DNA, 25 bp, probe
gcacttgttattttccaggaacctt

SEQ ID NO: 107122 - DNA, 25 bp, probe
agaattttctgagactgaagggaaa

SEQ ID NO: 107123 - DNA, 25 bp, probe
ttggtttcttggtcgtcctttgagt

SEQ ID NO: 107124 - DNA, 25 bp, probe
gtttcctgcctatggtgagatcaga

SEQ ID NO: 107125 - DNA, 25 bp, probe
tgtcgtcataattcctgctattgtt

SEQ ID NO: 107126 - DNA, 25 bp, probe
acagaacagaataatatgaagcagg

SEQ ID NO: 107127 - DNA, 25 bp, probe
ggacagaacagaataatatgaagca

SEQ ID NO: 107128 - DNA, 25 bp, probe
tggacagaacagaataatatgaagc

SEQ ID NO: 107129 - DNA, 25 bp, probe
atgtcgtcataattcctgctattgt

SEQ ID NO: 107130 - DNA, 25 bp, probe
gtcgtcataattcctgctattgtta

SEQ ID NO: 107131 - DNA, 25 bp, probe
cagaacagaataatatgaagcagga

SEQ ID NO: 107132 - DNA, 25 bp, probe
tcgtcataattcctgctattgttaa

SEQ ID NO: 107133 - DNA, 25 bp, probe
gacagaacagaataatatgaagcag

SEQ ID NO: 107134 - DNA, 25 bp, probe
agaacagaataatatgaagcaggat

SEQ ID NO: 107135 - DNA, 25 bp, probe
ttactgagccttaatccaccaagtt

SEQ ID NO: 107136 - DNA, 25 bp, probe
cagaataatatgaagcaggatcaca

SEQ ID NO: 107137 - DNA, 25 bp, probe
acagaataatatgaagcaggatcac

SEQ ID NO: 107138 - DNA, 25 bp, probe
cgtcataattcctgctattgttaat

SEQ ID NO: 107139 - DNA, 25 bp, probe
tatgtcgtcataattcctgctattg

SEQ ID NO: 107140 - DNA, 25 bp, probe
ttgtttgattactgtttactgagcc

SEQ ID NO: 107141 - DNA, 25 bp, probe
agaataatatgaagcaggatcacaa

SEQ ID NO: 107142 - DNA, 25 bp, probe
aacagaataatatgaagcaggatca

SEQ ID NO: 107143 - DNA, 25 bp, probe
agcagtaggagaaacaaatgacata

SEQ ID NO: 107144 - DNA, 25 bp, probe
tgtttgattactgtttactgagcct

SEQ ID NO: 107145 - DNA, 25 bp, probe
tttatatctctttggcgtttcccta

SEQ ID NO: 107146 - DNA, 25 bp, probe
taatgtttgtctcctgaagtttgtc

SEQ ID NO: 107147 - DNA, 25 bp, probe
gtttgattactgtttactgagcctt

SEQ ID NO: 107148 - DNA, 25 bp, probe
ttatatctctttggcgtttccctac

SEQ ID NO: 107149 - DNA, 25 bp, probe
tactgtttactgagccttaatccac

SEQ ID NO: 107150 - DNA, 25 bp, probe
ttactgtttactgagccttaatcca

SEQ ID NO: 107151 - DNA, 25 bp, probe
gaacagaataatatgaagcaggatc

SEQ ID NO: 107152 - DNA, 25 bp, probe
aagcagtaggagaaacaaatgacat

SEQ ID NO: 107153 - DNA, 25 bp, probe
aatgtttgtctcctgaagtttgtct

SEQ ID NO: 107154 - DNA, 25 bp, probe
gcagtaggagaaacaaatgacataa

SEQ ID NO: 107155 - DNA, 25 bp, probe
aaagcagtaggagaaacaaatgaca

SEQ ID NO: 107156 - DNA, 25 bp, probe
gaggaggatgaatttgatagagagg

SEQ ID NO: 107157 - DNA, 25 bp, probe
cataatatgtcgtcataattcctgc

SEQ ID NO: 107158 - DNA, 25 bp, probe
aggaggatgaatttgatagagaggt

SEQ ID NO: 107159 - DNA, 25 bp, probe
actttggctttcatattctctttgt

SEQ ID NO: 107160 - DNA, 25 bp, probe
tgagccttaatccaccaagtttata

SEQ ID NO: 107161 - DNA, 25 bp, probe
atatgtcgtcataattcctgctatt

SEQ ID NO: 107162 - DNA, 25 bp, probe
aatatgtcgtcataattcctgctat

SEQ ID NO: 107163 - DNA, 25 bp, probe
ataatatgtcgtcataattcctgct

SEQ ID NO: 107164 - DNA, 25 bp, probe
ttaatgtttgtctcctgaagtttgt

SEQ ID NO: 107165 - DNA, 25 bp, probe
ctttggctttcatattctctttgtg

SEQ ID NO: 107166 - DNA, 25 bp, probe
tgctgccagaattaaagacctattt

SEQ ID NO: 107167 - DNA, 25 bp, probe
atgtttgtctcctgaagtttgtctt

SEQ ID NO: 107168 - DNA, 25 bp, probe
ggaggatgaatttgatagagaggta

SEQ ID NO: 107169 - DNA, 25 bp, probe
tgattaacttgtcagtgtctgtatt

SEQ ID NO: 107170 - DNA, 25 bp, probe
ttgagtgaagcgtatttgaagtaac

SEQ ID NO: 107171 - DNA, 25 bp, probe
gttgagtgaagcgtatttgaagtaa

SEQ ID NO: 107172 - DNA, 25 bp, probe
attgttgagtgaagcgtatttgaag

SEQ ID NO: 107173 - DNA, 25 bp, probe
cattgttgagtgaagcgtatttgaa

SEQ ID NO: 107174 - DNA, 25 bp, probe
tgttgagtgaagcgtatttgaagta

SEQ ID NO: 107175 - DNA, 25 bp, probe
tgaagcgtatttgaagtaactgaga

SEQ ID NO: 107176 - DNA, 25 bp, probe
gtgaagcgtatttgaagtaactgag

SEQ ID NO: 107177 - DNA, 25 bp, probe
gaagcgtatttgaagtaactgagaa

SEQ ID NO: 107178 - DNA, 25 bp, probe
gaaaccgcttattgacacagaattt

SEQ ID NO: 107179 - DNA, 25 bp, probe
aagcgtatttgaagtaactgagaat

SEQ ID NO: 107180 - DNA, 25 bp, probe
ttgttgagtgaagcgtatttgaagt

SEQ ID NO: 107181 - DNA, 25 bp, probe
aactgaaacaaagattaaccaaggt

SEQ ID NO: 107182 - DNA, 25 bp, probe
agcgtatttgaagtaactgagaatt

SEQ ID NO: 107183 - DNA, 25 bp, probe
aatttctgaaaccgcttattgacac

SEQ ID NO: 107184 - DNA, 25 bp, probe
gagtgaagcgtatttgaagtaactg

SEQ ID NO: 107185 - DNA, 25 bp, probe
agtgaagcgtatttgaagtaactga

SEQ ID NO: 107186 - DNA, 25 bp, probe
tgagtgaagcgtatttgaagtaact

SEQ ID NO: 107187 - DNA, 25 bp, probe
atttccattgttgagtgaagcgtat

SEQ ID NO: 107188 - DNA, 25 bp, probe
tgaaaccgcttattgacacagaatt

SEQ ID NO: 107189 - DNA, 25 bp, probe
ttccattgttgagtgaagcgtattt

SEQ ID NO: 107190 - DNA, 25 bp, probe
tttccattgttgagtgaagcgtatt

SEQ ID NO: 107191 - DNA, 25 bp, probe
aaactgaaacaaagattaaccaagg

SEQ ID NO: 107192 - DNA, 25 bp, probe
gaatcttggctgagtatgagtccat

SEQ ID NO: 107193 - DNA, 25 bp, probe
atttctgaaaccgcttattgacaca

SEQ ID NO: 107194 - DNA, 25 bp, probe
ttgaagtaactgagaattaccatgt

SEQ ID NO: 107195 - DNA, 25 bp, probe
ccattgttgagtgaagcgtatttga

SEQ ID NO: 107196 - DNA, 25 bp, probe
tccattgttgagtgaagcgtatttg

SEQ ID NO: 107197 - DNA, 25 bp, probe
gcagcagaaactgaaacaaagatta

SEQ ID NO: 107198 - DNA, 25 bp, probe
gcagaaactgaaacaaagattaacc

SEQ ID NO: 107199 - DNA, 25 bp, probe
tgatcctatgactgacatcaactaa

SEQ ID NO: 107200 - DNA, 25 bp, probe
catttccattgttgagtgaagcgta

SEQ ID NO: 107201 - DNA, 25 bp, probe
atgccatttccattgttgagtgaag

SEQ ID NO: 107202 - DNA, 25 bp, probe
actgaaacaaagattaaccaaggtt

SEQ ID NO: 107203 - DNA, 25 bp, probe
aagaggaagactcagttgggaaatt

SEQ ID NO: 107204 - DNA, 25 bp, probe
tgaaacaaagattaaccaaggttga

SEQ ID NO: 107205 - DNA, 25 bp, probe
aatcttggctgagtatgagtccatg

SEQ ID NO: 107206 - DNA, 25 bp, probe
agcagaaactgaaacaaagattaac

SEQ ID NO: 107207 - DNA, 25 bp, probe
cagcagaaactgaaacaaagattaa

SEQ ID NO: 107208 - DNA, 25 bp, probe
agaaactgaaacaaagattaaccaa

SEQ ID NO: 107209 - DNA, 25 bp, probe
acaaagattaaccaaggttgagaaa

SEQ ID NO: 107210 - DNA, 25 bp, probe
aacaaagattaaccaaggttgagaa

SEQ ID NO: 107211 - DNA, 25 bp, probe
aaacaaagattaaccaaggttgaga

SEQ ID NO: 107212 - DNA, 25 bp, probe
ctgaaacaaagattaaccaaggttg

SEQ ID NO: 107213 - DNA, 25 bp, probe
gcagtggcttaatgtttgaaattat

SEQ ID NO: 107214 - DNA, 25 bp, probe
ttgcagtggcttaatgtttgaaatt

SEQ ID NO: 107215 - DNA, 25 bp, probe
tttgcagtggcttaatgtttgaaat

SEQ ID NO: 107216 - DNA, 25 bp, probe
tgcagtggcttaatgtttgaaatta

SEQ ID NO: 107217 - DNA, 25 bp, probe
ctttgcagtggcttaatgtttgaaa

SEQ ID NO: 107218 - DNA, 25 bp, probe
tttctttgcagtggcttaatgtttg

SEQ ID NO: 107219 - DNA, 25 bp, probe
gtttctttgcagtggcttaatgttt

SEQ ID NO: 107220 - DNA, 25 bp, probe
ttgtcttggatattcttgaaagttt

SEQ ID NO: 107221 - DNA, 25 bp, probe
tttgtcttggatattcttgaaagtt

SEQ ID NO: 107222 - DNA, 25 bp, probe
gatgtttctttgcagtggcttaatg

SEQ ID NO: 107223 - DNA, 25 bp, probe
agatgtttctttgcagtggcttaat

SEQ ID NO: 107224 - DNA, 25 bp, probe
tctttgcagtggcttaatgtttgaa

SEQ ID NO: 107225 - DNA, 25 bp, probe
ttctttgcagtggcttaatgtttga

SEQ ID NO: 107226 - DNA, 25 bp, probe
atgtttctttgcagtggcttaatgt

SEQ ID NO: 107227 - DNA, 25 bp, probe
cagtggcttaatgtttgaaattatt

SEQ ID NO: 107228 - DNA, 25 bp, probe
tgtttctttgcagtggcttaatgtt

SEQ ID NO: 107229 - DNA, 25 bp, probe
cttcattgagagttttgtcttggat

SEQ ID NO: 107230 - DNA, 25 bp, probe
cagatgtttctttgcagtggcttaa

SEQ ID NO: 107231 - DNA, 25 bp, probe
acttcattgagagttttgtcttgga

SEQ ID NO: 107232 - DNA, 25 bp, probe
cacttcattgagagttttgtcttgg

SEQ ID NO: 107233 - DNA, 25 bp, probe
tgtcttggatattcttgaaagttta

SEQ ID NO: 107234 - DNA, 25 bp, probe
ttcattgagagttttgtcttggata

SEQ ID NO: 107235 - DNA, 25 bp, probe
tcattgagagttttgtcttggatat

SEQ ID NO: 107236 - DNA, 25 bp, probe
agagttttgtcttggatattcttga

SEQ ID NO: 107237 - DNA, 25 bp, probe
tgagagttttgtcttggatattctt

SEQ ID NO: 107238 - DNA, 25 bp, probe
ttgagagttttgtcttggatattct

SEQ ID NO: 107239 - DNA, 25 bp, probe
agtggcttaatgtttgaaattattt

SEQ ID NO: 107240 - DNA, 25 bp, probe
gagagttttgtcttggatattcttg

SEQ ID NO: 107241 - DNA, 25 bp, probe
tcagatgtttctttgcagtggctta

SEQ ID NO: 107242 - DNA, 25 bp, probe
gagttttgtcttggatattcttgaa

SEQ ID NO: 107243 - DNA, 25 bp, probe
cattgagagttttgtcttggatatt

SEQ ID NO: 107244 - DNA, 25 bp, probe
ttacatcagatgtttctttgcagtg

SEQ ID NO: 107245 - DNA, 25 bp, probe
cttacatcagatgtttctttgcagt

SEQ ID NO: 107246 - DNA, 25 bp, probe
tcttacatcagatgtttctttgcag

SEQ ID NO: 107247 - DNA, 25 bp, probe
ttcttacatcagatgtttctttgca

SEQ ID NO: 107248 - DNA, 25 bp, probe
tgtttgaaattattttgtggctttt

SEQ ID NO: 107249 - DNA, 25 bp, probe
agttttgtcttggatattcttgaaa

SEQ ID NO: 107250 - DNA, 25 bp, probe
attgagagttttgtcttggatattc

SEQ ID NO: 107251 - DNA, 25 bp, probe
atgtttgaaattattttgtggcttt

SEQ ID NO: 107252 - DNA, 25 bp, probe
aatgtttgaaattattttgtggctt

SEQ ID NO: 107253 - DNA, 25 bp, probe
atcagatgtttctttgcagtggctt

SEQ ID NO: 107254 - DNA, 25 bp, probe
ttttgtcttggatattcttgaaagt

SEQ ID NO: 107255 - DNA, 25 bp, probe
tacatcagatgtttctttgcagtgg

SEQ ID NO: 107256 - DNA, 25 bp, probe
tttcttacatcagatgtttctttgc

SEQ ID NO: 107257 - DNA, 25 bp, probe
catcatctctcccaacttcagcttc

SEQ ID NO: 107258 - DNA, 25 bp, probe
gaagcatcatctctcccaacttcag

SEQ ID NO: 107259 - DNA, 25 bp, probe
aagcatcatctctcccaacttcagc

SEQ ID NO: 107260 - DNA, 25 bp, probe
gcatcatctctcccaacttcagctt

SEQ ID NO: 107261 - DNA, 25 bp, probe
cgaagcatcatctctcccaacttca

SEQ ID NO: 107262 - DNA, 25 bp, probe
aagccatatcctgacagaagaagaa

SEQ ID NO: 107263 - DNA, 25 bp, probe
gaagccatatcctgacagaagaaga

SEQ ID NO: 107264 - DNA, 25 bp, probe
agaagccatatcctgacagaagaag

SEQ ID NO: 107265 - DNA, 25 bp, probe
gatattccctgcctcctacatattt

SEQ ID NO: 107266 - DNA, 25 bp, probe
cagaagccatatcctgacagaagaa

SEQ ID NO: 107267 - DNA, 25 bp, probe
tgatattccctgcctcctacatatt

SEQ ID NO: 107268 - DNA, 25 bp, probe
ttgatattccctgcctcctacatat

SEQ ID NO: 107269 - DNA, 25 bp, probe
atgccattgacaaatactctaggtt

SEQ ID NO: 107270 - DNA, 25 bp, probe
gttgatattccctgcctcctacata

SEQ ID NO: 107271 - DNA, 25 bp, probe
gccatatcctgacagaagaagaaag

SEQ ID NO: 107272 - DNA, 25 bp, probe
gacagaagaagaaaggcaagacaaa

SEQ ID NO: 107273 - DNA, 25 bp, probe
agccatatcctgacagaagaagaaa

SEQ ID NO: 107274 - DNA, 25 bp, probe
gccattgacaaatactctaggttga

SEQ ID NO: 107275 - DNA, 25 bp, probe
gaatacccatgccattgacaaatac

SEQ ID NO: 107276 - DNA, 25 bp, probe
agaatacccatgccattgacaaata

SEQ ID NO: 107277 - DNA, 25 bp, probe
aatacccatgccattgacaaatact

SEQ ID NO: 107278 - DNA, 25 bp, probe
tgccattgacaaatactctaggttg

SEQ ID NO: 107279 - DNA, 25 bp, probe
catgccattgacaaatactctaggt

SEQ ID NO: 107280 - DNA, 25 bp, probe
atacccatgccattgacaaatactc

SEQ ID NO: 107281 - DNA, 25 bp, probe
ccattgacaaatactctaggttgat

SEQ ID NO: 107282 - DNA, 25 bp, probe
ccatatcctgacagaagaagaaagg

SEQ ID NO: 107283 - DNA, 25 bp, probe
ccatgccattgacaaatactctagg

SEQ ID NO: 107284 - DNA, 25 bp, probe
cccatgccattgacaaatactctag

SEQ ID NO: 107285 - DNA, 25 bp, probe
aatactctaggttgatattccctgc

SEQ ID NO: 107286 - DNA, 25 bp, probe
tgacagaagaagaaaggcaagacaa

SEQ ID NO: 107287 - DNA, 25 bp, probe
catatcctgacagaagaagaaaggc

SEQ ID NO: 107288 - DNA, 25 bp, probe
cagaatacccatgccattgacaaat

SEQ ID NO: 107289 - DNA, 25 bp, probe
tatcttccagaatacccatgccatt

SEQ ID NO: 107290 - DNA, 25 bp, probe
atactctaggttgatattccctgcc

SEQ ID NO: 107291 - DNA, 25 bp, probe
atatcctgacagaagaagaaaggca

SEQ ID NO: 107292 - DNA, 25 bp, probe
acccatgccattgacaaatactcta

SEQ ID NO: 107293 - DNA, 25 bp, probe
tacccatgccattgacaaatactct

SEQ ID NO: 107294 - DNA, 25 bp, probe
tttcgtatcttccagaatacccatg

SEQ ID NO: 107295 - DNA, 25 bp, probe
tatcctgacagaagaagaaaggcaa

SEQ ID NO: 107296 - DNA, 25 bp, probe
acaaatactctaggttgatattccc

SEQ ID NO: 107297 - DNA, 25 bp, probe
ccagaagccatatcctgacagaaga

SEQ ID NO: 107298 - DNA, 25 bp, probe
ctgacagaagaagaaaggcaagaca

SEQ ID NO: 107299 - DNA, 25 bp, probe
gttcctagaagagggcatagacatc

SEQ ID NO: 107300 - DNA, 25 bp, probe
tactctaggttgatattccctgcct

SEQ ID NO: 107301 - DNA, 25 bp, probe
tcaacttaatttattggtcagtgtt

SEQ ID NO: 107302 - DNA, 25 bp, probe
ttcaacttaatttattggtcagtgt

SEQ ID NO: 107303 - DNA, 25 bp, probe
agaagaaaggcaagacaaaatagtg

SEQ ID NO: 107304 - DNA, 25 bp, probe
cagaagaagaaaggcaagacaaaat

SEQ ID NO: 107305 - DNA, 25 bp, probe
aaatactctaggttgatattccctg

SEQ ID NO: 107306 - DNA, 25 bp, probe
atttattcctttgccatcactctct

SEQ ID NO: 107307 - DNA, 25 bp, probe
catttattcctttgccatcactctc

SEQ ID NO: 107308 - DNA, 25 bp, probe
gacatttattcctttgccatcactc

SEQ ID NO: 107309 - DNA, 25 bp, probe
acatttattcctttgccatcactct

SEQ ID NO: 107310 - DNA, 25 bp, probe
aattagtgacttcggttgctctgag

SEQ ID NO: 107311 - DNA, 25 bp, probe
tttattcctttgccatcactctctg

SEQ ID NO: 107312 - DNA, 25 bp, probe
cagttaagtttgggaaagtgtctca

SEQ ID NO: 107313 - DNA, 25 bp, probe
taagtttgggaaagtgtctcaagta

SEQ ID NO: 107314 - DNA, 25 bp, probe
gttaagtttgggaaagtgtctcaag

SEQ ID NO: 107315 - DNA, 25 bp, probe
ttaagtttgggaaagtgtctcaagt

SEQ ID NO: 107316 - DNA, 25 bp, probe
agttaagtttgggaaagtgtctcaa

SEQ ID NO: 107317 - DNA, 25 bp, probe
gaggacagttaagtttgggaaagtg

SEQ ID NO: 107318 - DNA, 25 bp, probe
cgacatttattcctttgccatcact

SEQ ID NO: 107319 - DNA, 25 bp, probe
attagtgacttcggttgctctgaga

SEQ ID NO: 107320 - DNA, 25 bp, probe
acagttaagtttgggaaagtgtctc

SEQ ID NO: 107321 - DNA, 25 bp, probe
aagtttgggaaagtgtctcaagtac

SEQ ID NO: 107322 - DNA, 25 bp, probe
ttagtgacttcggttgctctgagaa

SEQ ID NO: 107323 - DNA, 25 bp, probe
aaattagtgacttcggttgctctga

SEQ ID NO: 107324 - DNA, 25 bp, probe
ggttgctctgagaagttggaagatc

SEQ ID NO: 107325 - DNA, 25 bp, probe
gtctcaagtactcactagatgttgt

SEQ ID NO: 107326 - DNA, 25 bp, probe
tgtctcaagtactcactagatgttg

SEQ ID NO: 107327 - DNA, 25 bp, probe
ggaggacagttaagtttgggaaagt

SEQ ID NO: 107328 - DNA, 25 bp, probe
tggaggacagttaagtttgggaaag

SEQ ID NO: 107329 - DNA, 25 bp, probe
ccgacatttattcctttgccatcac

SEQ ID NO: 107330 - DNA, 25 bp, probe
aggacagttaagtttgggaaagtgt

SEQ ID NO: 107331 - DNA, 25 bp, probe
tctcaagtactcactagatgttgtg

SEQ ID NO: 107332 - DNA, 25 bp, probe
gtgtctcaagtactcactagatgtt

SEQ ID NO: 107333 - DNA, 25 bp, probe
cctaaagccgacatttattcctttg

SEQ ID NO: 107334 - DNA, 25 bp, probe
ctaaagccgacatttattcctttgc

SEQ ID NO: 107335 - DNA, 25 bp, probe
ccctaaagccgacatttattccttt

SEQ ID NO: 107336 - DNA, 25 bp, probe
gatctcacctctttgaaagctgaac

SEQ ID NO: 107337 - DNA, 25 bp, probe
ctggaggacagttaagtttgggaaa

SEQ ID NO: 107338 - DNA, 25 bp, probe
gatcagtgagcaggatgtctgtaaa

SEQ ID NO: 107339 - DNA, 25 bp, probe
catcactctctggcaaatgactacc

SEQ ID NO: 107340 - DNA, 25 bp, probe
taaaattagtgacttcggttgctct

SEQ ID NO: 107341 - DNA, 25 bp, probe
gtaaaattagtgacttcggttgctc

SEQ ID NO: 107342 - DNA, 25 bp, probe
atctcacctctttgaaagctgaact

SEQ ID NO: 107343 - DNA, 25 bp, probe
ctgtaaaattagtgacttcggttgc

SEQ ID NO: 107344 - DNA, 25 bp, probe
tctgtaaaattagtgacttcggttg

SEQ ID NO: 107345 - DNA, 25 bp, probe
ttgctctgagaagttggaagatctg

SEQ ID NO: 107346 - DNA, 25 bp, probe
gttgctctgagaagttggaagatct

SEQ ID NO: 107347 - DNA, 25 bp, probe
tgtaaaattagtgacttcggttgct

SEQ ID NO: 107348 - DNA, 25 bp, probe
ttattcctttgccatcactctctgg

SEQ ID NO: 107349 - DNA, 25 bp, probe
aagccgacatttattcctttgccat

SEQ ID NO: 107350 - DNA, 25 bp, probe
accacttactaagagaggatgaatg

SEQ ID NO: 107351 - DNA, 25 bp, probe
caccacttactaagagaggatgaat

SEQ ID NO: 107352 - DNA, 25 bp, probe
ccacttactaagagaggatgaatga

SEQ ID NO: 107353 - DNA, 25 bp, probe
gcaccacttactaagagaggatgaa

SEQ ID NO: 107354 - DNA, 25 bp, probe
cacttactaagagaggatgaatgaa

SEQ ID NO: 107355 - DNA, 25 bp, probe
cagatatttggaggaacagaaacac

SEQ ID NO: 107356 - DNA, 25 bp, probe
gaacaggcaccacttactaagagag

SEQ ID NO: 107357 - DNA, 25 bp, probe
agatatttggaggaacagaaacacc

SEQ ID NO: 107358 - DNA, 25 bp, probe
catgaagatcctcaacaagcagaag

SEQ ID NO: 107359 - DNA, 25 bp, probe
ctgaacaggcaccacttactaagag

SEQ ID NO: 107360 - DNA, 25 bp, probe
cttgtatctaatttcatcctcaccc

SEQ ID NO: 107361 - DNA, 25 bp, probe
ccttgtatctaatttcatcctcacc

SEQ ID NO: 107362 - DNA, 25 bp, probe
catctatgagaagaaggtggaagct

SEQ ID NO: 107363 - DNA, 25 bp, probe
cccagagttccttgtatctaatttc

SEQ ID NO: 107364 - DNA, 25 bp, probe
atctatgagaagaaggtggaagctc

SEQ ID NO: 107365 - DNA, 25 bp, probe
tgaacaggcaccacttactaagaga

SEQ ID NO: 107366 - DNA, 25 bp, probe
gatcgccatctatgagaagaaggtg

SEQ ID NO: 107367 - DNA, 25 bp, probe
tccttgtatctaatttcatcctcac

SEQ ID NO: 107368 - DNA, 25 bp, probe
ccagagttccttgtatctaatttca

SEQ ID NO: 107369 - DNA, 25 bp, probe
ggcaccacttactaagagaggatga

SEQ ID NO: 107370 - DNA, 25 bp, probe
aggcaccacttactaagagaggatg

SEQ ID NO: 107371 - DNA, 25 bp, probe
caggcaccacttactaagagaggat

SEQ ID NO: 107372 - DNA, 25 bp, probe
ccatctatgagaagaaggtggaagc

SEQ ID NO: 107373 - DNA, 25 bp, probe
gccatctatgagaagaaggtggaag

SEQ ID NO: 107374 - DNA, 25 bp, probe
atgaagatcctcaacaagcagaagg

SEQ ID NO: 107375 - DNA, 25 bp, probe
ccatgaagatcctcaacaagcagaa

SEQ ID NO: 107376 - DNA, 25 bp, probe
caagcagaaggtggtgaagatgaag

SEQ ID NO: 107377 - DNA, 25 bp, probe
ctggatcgccatctatgagaagaag

SEQ ID NO: 107378 - DNA, 25 bp, probe
catcaatgagaagtgtgccaaggag

SEQ ID NO: 107379 - DNA, 25 bp, probe
ccagatatttggaggaacagaaaca

SEQ ID NO: 107380 - DNA, 25 bp, probe
aacaggcaccacttactaagagagg

SEQ ID NO: 107381 - DNA, 25 bp, probe
ttccttgtatctaatttcatcctca

SEQ ID NO: 107382 - DNA, 25 bp, probe
agttccttgtatctaatttcatcct

SEQ ID NO: 107383 - DNA, 25 bp, probe
atatttggaggaacagaaacaccag

SEQ ID NO: 107384 - DNA, 25 bp, probe
gatatttggaggaacagaaacacca

SEQ ID NO: 107385 - DNA, 25 bp, probe
gttccttgtatctaatttcatcctc

SEQ ID NO: 107386 - DNA, 25 bp, probe
gagttccttgtatctaatttcatcc

SEQ ID NO: 107387 - DNA, 25 bp, probe
taaacgagtttctcagctctattca

SEQ ID NO: 107388 - DNA, 25 bp, probe
cccagatatttggaggaacagaaac

SEQ ID NO: 107389 - DNA, 25 bp, probe
taactttgacgactacgaggaggaa

SEQ ID NO: 107390 - DNA, 25 bp, probe
aaacgagtttctcagctctattcag

SEQ ID NO: 107391 - DNA, 25 bp, probe
ctacgccatgaagatcctcaacaag

SEQ ID NO: 107392 - DNA, 25 bp, probe
ttaaacgagtttctcagctctattc

SEQ ID NO: 107393 - DNA, 25 bp, probe
acttactaagagaggatgaatgaaa

SEQ ID NO: 107394 - DNA, 25 bp, probe
agaatgagtctctgtatggaagaac

SEQ ID NO: 107395 - DNA, 25 bp, probe
aagaatgagtctctgtatggaagaa

SEQ ID NO: 107396 - DNA, 25 bp, probe
gaatgagtctctgtatggaagaaca

SEQ ID NO: 107397 - DNA, 25 bp, probe
aatgagtctctgtatggaagaacaa

SEQ ID NO: 107398 - DNA, 25 bp, probe
gaatcaccgactactgaatctccta

SEQ ID NO: 107399 - DNA, 25 bp, probe
aatcaccgactactgaatctcctac

SEQ ID NO: 107400 - DNA, 25 bp, probe
ttagttgtagaagcaggtgtgtctc

SEQ ID NO: 107401 - DNA, 25 bp, probe
cttagttgtagaagcaggtgtgtct

SEQ ID NO: 107402 - DNA, 25 bp, probe
tcaccgactactgaatctcctacat

SEQ ID NO: 107403 - DNA, 25 bp, probe
atcaccgactactgaatctcctaca

SEQ ID NO: 107404 - DNA, 25 bp, probe
tcctccacttgaaaccttatgattt

SEQ ID NO: 107405 - DNA, 25 bp, probe
ctcctccacttgaaaccttatgatt

SEQ ID NO: 107406 - DNA, 25 bp, probe
caccgactactgaatctcctacatg

SEQ ID NO: 107407 - DNA, 25 bp, probe
aagagcttctagtaattgaaccatg

SEQ ID NO: 107408 - DNA, 25 bp, probe
ctggaatcaccgactactgaatctc

SEQ ID NO: 107409 - DNA, 25 bp, probe
ggattcctaacgattcaaattaccg

SEQ ID NO: 107410 - DNA, 25 bp, probe
gactggaatcaccgactactgaatc

SEQ ID NO: 107411 - DNA, 25 bp, probe
tagttgtagaagcaggtgtgtctct

SEQ ID NO: 107412 - DNA, 25 bp, probe
aaagaatgagtctctgtatggaaga

SEQ ID NO: 107413 - DNA, 25 bp, probe
catttcaaaggagaggatcagacta

SEQ ID NO: 107414 - DNA, 25 bp, probe
tttcaaaggagaggatcagactatc

SEQ ID NO: 107415 - DNA, 25 bp, probe
ctctgtatggaagaacaaatgtgtg

SEQ ID NO: 107416 - DNA, 25 bp, probe
tctctgtatggaagaacaaatgtgt

SEQ ID NO: 107417 - DNA, 25 bp, probe
gtctctgtatggaagaacaaatgtg

SEQ ID NO: 107418 - DNA, 25 bp, probe
agtctctgtatggaagaacaaatgt

SEQ ID NO: 107419 - DNA, 25 bp, probe
actggaatcaccgactactgaatct

SEQ ID NO: 107420 - DNA, 25 bp, probe
ttcaaaggagaggatcagactatct

SEQ ID NO: 107421 - DNA, 25 bp, probe
tgagtctctgtatggaagaacaaat

SEQ ID NO: 107422 - DNA, 25 bp, probe
atgagtctctgtatggaagaacaaa

SEQ ID NO: 107423 - DNA, 25 bp, probe
atttcaaaggagaggatcagactat

SEQ ID NO: 107424 - DNA, 25 bp, probe
gagtctctgtatggaagaacaaatg

SEQ ID NO: 107425 - DNA, 25 bp, probe
gttgtagaagcaggtgtgtctcttg

SEQ ID NO: 107426 - DNA, 25 bp, probe
agttgtagaagcaggtgtgtctctt

SEQ ID NO: 107427 - DNA, 25 bp, probe
gctcctccacttgaaaccttatgat

SEQ ID NO: 107428 - DNA, 25 bp, probe
taaagaatgagtctctgtatggaag

SEQ ID NO: 107429 - DNA, 25 bp, probe
catctaaatattccgaatgtttggc

SEQ ID NO: 107430 - DNA, 25 bp, probe
tctgtatggaagaacaaatgtgtgc

SEQ ID NO: 107431 - DNA, 25 bp, probe
acagtgtcatctaaatattccgaat

SEQ ID NO: 107432 - DNA, 25 bp, probe
tctcaggattcctaacgattcaaat

SEQ ID NO: 107433 - DNA, 25 bp, probe
ttctcaggattcctaacgattcaaa

SEQ ID NO: 107434 - DNA, 25 bp, probe
tttctcaggattcctaacgattcaa

SEQ ID NO: 107435 - DNA, 25 bp, probe
gcatttcaaaggagaggatcagact

SEQ ID NO: 107436 - DNA, 25 bp, probe
gtttctcaggattcctaacgattca

SEQ ID NO: 107437 - DNA, 25 bp, probe
tgtttctcaggattcctaacgattc

SEQ ID NO: 107438 - DNA, 25 bp, probe
ttgaagaagtaaggagtcgtgtatg

SEQ ID NO: 107439 - DNA, 25 bp, probe
aagaagtaaggagtcgtgtatggta

SEQ ID NO: 107440 - DNA, 25 bp, probe
agaagtaaggagtcgtgtatggtag

SEQ ID NO: 107441 - DNA, 25 bp, probe
gaagaagtaaggagtcgtgtatggt

SEQ ID NO: 107442 - DNA, 25 bp, probe
tgaagaagtaaggagtcgtgtatgg

SEQ ID NO: 107443 - DNA, 25 bp, probe
gaagtaaggagtcgtgtatggtagg

SEQ ID NO: 107444 - DNA, 25 bp, probe
cttacttaacctgaagctagacgag

SEQ ID NO: 107445 - DNA, 25 bp, probe
ttcttacttaacctgaagctagacg

SEQ ID NO: 107446 - DNA, 25 bp, probe
tcttacttaacctgaagctagacga

SEQ ID NO: 107447 - DNA, 25 bp, probe
tttgaagaagtaaggagtcgtgtat

SEQ ID NO: 107448 - DNA, 25 bp, probe
ctacagagcagacagttaagagaaa

SEQ ID NO: 107449 - DNA, 25 bp, probe
agagcagacagttaagagaaatgag

SEQ ID NO: 107450 - DNA, 25 bp, probe
cagagcagacagttaagagaaatga

SEQ ID NO: 107451 - DNA, 25 bp, probe
tacagagcagacagttaagagaaat

SEQ ID NO: 107452 - DNA, 25 bp, probe
acagagcagacagttaagagaaatg

SEQ ID NO: 107453 - DNA, 25 bp, probe
ctttgaagaagtaaggagtcgtgta

SEQ ID NO: 107454 - DNA, 25 bp, probe
gtgtatggtagggtaagtgagagag

SEQ ID NO: 107455 - DNA, 25 bp, probe
tacataaacaagtcctcagtggttg

SEQ ID NO: 107456 - DNA, 25 bp, probe
gcaagaacaaggtacataaacaagt

SEQ ID NO: 107457 - DNA, 25 bp, probe
gctttgatcccttcttacttaacct

SEQ ID NO: 107458 - DNA, 25 bp, probe
tttgatcccttcttacttaacctga

SEQ ID NO: 107459 - DNA, 25 bp, probe
tgctttgatcccttcttacttaacc

SEQ ID NO: 107460 - DNA, 25 bp, probe
aagaacaaggtacataaacaagtcc

SEQ ID NO: 107461 - DNA, 25 bp, probe
gagcagacagttaagagaaatgagc

SEQ ID NO: 107462 - DNA, 25 bp, probe
ctttgatcccttcttacttaacctg

SEQ ID NO: 107463 - DNA, 25 bp, probe
atgctttgatcccttcttacttaac

SEQ ID NO: 107464 - DNA, 25 bp, probe
ttgatcccttcttacttaacctgaa

SEQ ID NO: 107465 - DNA, 25 bp, probe
aatcctgcaagaacaaggtacataa

SEQ ID NO: 107466 - DNA, 25 bp, probe
taaggagtcgtgtatggtagggtaa

SEQ ID NO: 107467 - DNA, 25 bp, probe
gtacataaacaagtcctcagtggtt

SEQ ID NO: 107468 - DNA, 25 bp, probe
gtttccctctcagattgtaccattg

SEQ ID NO: 107469 - DNA, 25 bp, probe
tttccaatgctttgatcccttctta

SEQ ID NO: 107470 - DNA, 25 bp, probe
caatgctttgatcccttcttactta

SEQ ID NO: 107471 - DNA, 25 bp, probe
caatcctgcaagaacaaggtacata

SEQ ID NO: 107472 - DNA, 25 bp, probe
tgtttccctctcagattgtaccatt

SEQ ID NO: 107473 - DNA, 25 bp, probe
ttgtttccctctcagattgtaccat

SEQ ID NO: 107474 - DNA, 25 bp, probe
caccttgtttccctctcagattgta

SEQ ID NO: 107475 - DNA, 25 bp, probe
aatgctttgatcccttcttacttaa

SEQ ID NO: 107476 - DNA, 25 bp, probe
caagaacaaggtacataaacaagtc

SEQ ID NO: 107477 - DNA, 25 bp, probe
tgtatggtagggtaagtgagagagg

SEQ ID NO: 107478 - DNA, 25 bp, probe
ccaatgctttgatcccttcttactt

SEQ ID NO: 107479 - DNA, 25 bp, probe
ttccaatgctttgatcccttcttac

SEQ ID NO: 107480 - DNA, 25 bp, probe
tttccctctcagattgtaccattga

SEQ ID NO: 107481 - DNA, 25 bp, probe
gctacagagcagacagttaagagaa

SEQ ID NO: 107482 - DNA, 25 bp, probe
gtctctggatttctagcacattact

SEQ ID NO: 107483 - DNA, 25 bp, probe
tctctggatttctagcacattacta

SEQ ID NO: 107484 - DNA, 25 bp, probe
tgtctctggatttctagcacattac

SEQ ID NO: 107485 - DNA, 25 bp, probe
ctctggatttctagcacattactaa

SEQ ID NO: 107486 - DNA, 25 bp, probe
atccttgatgtcatagttgagtgca

SEQ ID NO: 107487 - DNA, 25 bp, probe
gtgtctctggatttctagcacatta

SEQ ID NO: 107488 - DNA, 25 bp, probe
ctctcatccttgatgtcatagttga

SEQ ID NO: 107489 - DNA, 25 bp, probe
tcatccttgatgtcatagttgagtg

SEQ ID NO: 107490 - DNA, 25 bp, probe
cctctcatccttgatgtcatagttg

SEQ ID NO: 107491 - DNA, 25 bp, probe
tctggatttctagcacattactaaa

SEQ ID NO: 107492 - DNA, 25 bp, probe
tacactggtggtttgtttcctagaa

SEQ ID NO: 107493 - DNA, 25 bp, probe
cattgtgtctctggatttctagcac

SEQ ID NO: 107494 - DNA, 25 bp, probe
catccttgatgtcatagttgagtgc

SEQ ID NO: 107495 - DNA, 25 bp, probe
aacccattgtgtctctggatttcta

SEQ ID NO: 107496 - DNA, 25 bp, probe
ctcatccttgatgtcatagttgagt

SEQ ID NO: 107497 - DNA, 25 bp, probe
tctcatccttgatgtcatagttgag

SEQ ID NO: 107498 - DNA, 25 bp, probe
acccattgtgtctctggatttctag

SEQ ID NO: 107499 - DNA, 25 bp, probe
gtacactggtggtttgtttcctaga

SEQ ID NO: 107500 - DNA, 25 bp, probe
tccagagcgagttaatgtgtccatc

SEQ ID NO: 107501 - DNA, 25 bp, probe
ccagagcgagttaatgtgtccatct

SEQ ID NO: 107502 - DNA, 25 bp, probe
aaacccattgtgtctctggatttct

SEQ ID NO: 107503 - DNA, 25 bp, probe
ccattgtgtctctggatttctagca

SEQ ID NO: 107504 - DNA, 25 bp, probe
gtccagagcgagttaatgtgtccat

SEQ ID NO: 107505 - DNA, 25 bp, probe
tctagcacattactaaaagagcctc

SEQ ID NO: 107506 - DNA, 25 bp, probe
ttctagcacattactaaaagagcct

SEQ ID NO: 107507 - DNA, 25 bp, probe
tttctagcacattactaaaagagcc

SEQ ID NO: 107508 - DNA, 25 bp, probe
acactggtggtttgtttcctagaaa

SEQ ID NO: 107509 - DNA, 25 bp, probe
gtcattgaggttagggacagctatc

SEQ ID NO: 107510 - DNA, 25 bp, probe
ctagcacattactaaaagagcctct

SEQ ID NO: 107511 - DNA, 25 bp, probe
tagcacattactaaaagagcctctg

SEQ ID NO: 107512 - DNA, 25 bp, probe
ttcctagaaaacccattgtgtctct

SEQ ID NO: 107513 - DNA, 25 bp, probe
gagttaatgtgtccatctgcccaac

SEQ ID NO: 107514 - DNA, 25 bp, probe
ccctctcatccttgatgtcatagtt

SEQ ID NO: 107515 - DNA, 25 bp, probe
cccattgtgtctctggatttctagc

SEQ ID NO: 107516 - DNA, 25 bp, probe
agagcgagttaatgtgtccatctgc

SEQ ID NO: 107517 - DNA, 25 bp, probe
tcctagaaaacccattgtgtctctg

SEQ ID NO: 107518 - DNA, 25 bp, probe
atttctagcacattactaaaagagc

SEQ ID NO: 107519 - DNA, 25 bp, probe
tagaaaacccattgtgtctctggat

SEQ ID NO: 107520 - DNA, 25 bp, probe
ttactccaccatgcggacaatcatt

SEQ ID NO: 107521 - DNA, 25 bp, probe
aaaacccattgtgtctctggatttc

SEQ ID NO: 107522 - DNA, 25 bp, probe
gaaaacccattgtgtctctggattt

SEQ ID NO: 107523 - DNA, 25 bp, probe
tttcctagaaaacccattgtgtctc

SEQ ID NO: 107524 - DNA, 25 bp, probe
tggatttctagcacattactaaaag

SEQ ID NO: 107525 - DNA, 25 bp, probe
ctggatttctagcacattactaaaa

SEQ ID NO: 107526 - DNA, 25 bp, probe
tccaggatcatcaatgctattaaca

SEQ ID NO: 107527 - DNA, 25 bp, probe
ccaggatcatcaatgctattaacag

SEQ ID NO: 107528 - DNA, 25 bp, probe
caggatcatcaatgctattaacagt

SEQ ID NO: 107529 - DNA, 25 bp, probe
ccaatccttccacatactgttaaga

SEQ ID NO: 107530 - DNA, 25 bp, probe
aaccaatccttccacatactgttaa

SEQ ID NO: 107531 - DNA, 25 bp, probe
accaatccttccacatactgttaag

SEQ ID NO: 107532 - DNA, 25 bp, probe
gaaccaatccttccacatactgtta

SEQ ID NO: 107533 - DNA, 25 bp, probe
atcaatgctattaacagtatcaggt

SEQ ID NO: 107534 - DNA, 25 bp, probe
atccaggatcatcaatgctattaac

SEQ ID NO: 107535 - DNA, 25 bp, probe
tactgttaagatgtagacttggaac

SEQ ID NO: 107536 - DNA, 25 bp, probe
aatccttccacatactgttaagatg

SEQ ID NO: 107537 - DNA, 25 bp, probe
caatccttccacatactgttaagat

SEQ ID NO: 107538 - DNA, 25 bp, probe
catactgttaagatgtagacttgga

SEQ ID NO: 107539 - DNA, 25 bp, probe
catcaatgctattaacagtatcagg

SEQ ID NO: 107540 - DNA, 25 bp, probe
ccagcaccacctcatactaagaatt

SEQ ID NO: 107541 - DNA, 25 bp, probe
aatccaggatcatcaatgctattaa

SEQ ID NO: 107542 - DNA, 25 bp, probe
tcaatgctattaacagtatcaggta

SEQ ID NO: 107543 - DNA, 25 bp, probe
attcctcactctgacatgacagtat

SEQ ID NO: 107544 - DNA, 25 bp, probe
gctgtcattcagttactcttaattc

SEQ ID NO: 107545 - DNA, 25 bp, probe
tgaaccaatccttccacatactgtt

SEQ ID NO: 107546 - DNA, 25 bp, probe
ttcctcactctgacatgacagtatt

SEQ ID NO: 107547 - DNA, 25 bp, probe
aattcctcactctgacatgacagta

SEQ ID NO: 107548 - DNA, 25 bp, probe
aggatcatcaatgctattaacagta

SEQ ID NO: 107549 - DNA, 25 bp, probe
aatcaaagtagactaaagcagccat

SEQ ID NO: 107550 - DNA, 25 bp, probe
aaatcaaagtagactaaagcagcca

SEQ ID NO: 107551 - DNA, 25 bp, probe
atactgttaagatgtagacttggaa

SEQ ID NO: 107552 - DNA, 25 bp, probe
atcaaagtagactaaagcagccatc

SEQ ID NO: 107553 - DNA, 25 bp, probe
ctgaaccaatccttccacatactgt

SEQ ID NO: 107554 - DNA, 25 bp, probe
cctgaaccaatccttccacatactg

SEQ ID NO: 107555 - DNA, 25 bp, probe
caaagtagactaaagcagccatctt

SEQ ID NO: 107556 - DNA, 25 bp, probe
tcatcaatgctattaacagtatcag

SEQ ID NO: 107557 - DNA, 25 bp, probe
caatgctattaacagtatcaggtaa

SEQ ID NO: 107558 - DNA, 25 bp, probe
ttaagatgtagacttggaacaaagc

SEQ ID NO: 107559 - DNA, 25 bp, probe
ccacctcatactaagaattcctcac

SEQ ID NO: 107560 - DNA, 25 bp, probe
caccacctcatactaagaattcctc

SEQ ID NO: 107561 - DNA, 25 bp, probe
cacctcatactaagaattcctcact

SEQ ID NO: 107562 - DNA, 25 bp, probe
ctaggaggcagtcaataaatacatg

SEQ ID NO: 107563 - DNA, 25 bp, probe
accacctcatactaagaattcctca

SEQ ID NO: 107564 - DNA, 25 bp, probe
tcaaagtagactaaagcagccatct

SEQ ID NO: 107565 - DNA, 25 bp, probe
acctcatactaagaattcctcactc

SEQ ID NO: 107566 - DNA, 25 bp, probe
agctgtcattcagttactcttaatt

SEQ ID NO: 107567 - DNA, 25 bp, probe
ggatcatcaatgctattaacagtat

SEQ ID NO: 107568 - DNA, 25 bp, probe
agaatataaaggaagcctgaaccaa

SEQ ID NO: 107569 - DNA, 25 bp, probe
atccttccacatactgttaagatgt

SEQ ID NO: 107570 - DNA, 25 bp, probe
ttcctctactatgagcaagtctgag

SEQ ID NO: 107571 - DNA, 25 bp, probe
atagacaggtcaatatcagaactgc

SEQ ID NO: 107572 - DNA, 25 bp, probe
gttcctctactatgagcaagtctga

SEQ ID NO: 107573 - DNA, 25 bp, probe
agttcctctactatgagcaagtctg

SEQ ID NO: 107574 - DNA, 25 bp, probe
cagttcctctactatgagcaagtct

SEQ ID NO: 107575 - DNA, 25 bp, probe
caggtcaatatcagaactgccaatt

SEQ ID NO: 107576 - DNA, 25 bp, probe
agtacatggagatcgaagaggatat

SEQ ID NO: 107577 - DNA, 25 bp, probe
tatgagcaagtctgagtacatggag

SEQ ID NO: 107578 - DNA, 25 bp, probe
ctatgagcaagtctgagtacatgga

SEQ ID NO: 107579 - DNA, 25 bp, probe
tcctctactatgagcaagtctgagt

SEQ ID NO: 107580 - DNA, 25 bp, probe
catggagatcgaagaggatatgaat

SEQ ID NO: 107581 - DNA, 25 bp, probe
tacatggagatcgaagaggatatga

SEQ ID NO: 107582 - DNA, 25 bp, probe
gtacatggagatcgaagaggatatg

SEQ ID NO: 107583 - DNA, 25 bp, probe
gagtacatggagatcgaagaggata

SEQ ID NO: 107584 - DNA, 25 bp, probe
cctctactatgagcaagtctgagta

SEQ ID NO: 107585 - DNA, 25 bp, probe
tagacaggtcaatatcagaactgcc

SEQ ID NO: 107586 - DNA, 25 bp, probe
ccattatagacaggtcaatatcaga

SEQ ID NO: 107587 - DNA, 25 bp, probe
taataagagcaagctactgaccgat

SEQ ID NO: 107588 - DNA, 25 bp, probe
acatggagatcgaagaggatatgaa

SEQ ID NO: 107589 - DNA, 25 bp, probe
aatagcatagcccattatagacagg

SEQ ID NO: 107590 - DNA, 25 bp, probe
tctactatgagcaagtctgagtaca

SEQ ID NO: 107591 - DNA, 25 bp, probe
ctctactatgagcaagtctgagtac

SEQ ID NO: 107592 - DNA, 25 bp, probe
ttaataagagcaagctactgaccga

SEQ ID NO: 107593 - DNA, 25 bp, probe
gttaataagagcaagctactgaccg

SEQ ID NO: 107594 - DNA, 25 bp, probe
cgttaataagagcaagctactgacc

SEQ ID NO: 107595 - DNA, 25 bp, probe
atagcatagcccattatagacaggt

SEQ ID NO: 107596 - DNA, 25 bp, probe
ctactatgagcaagtctgagtacat

SEQ ID NO: 107597 - DNA, 25 bp, probe
actatgagcaagtctgagtacatgg

SEQ ID NO: 107598 - DNA, 25 bp, probe
tggagatcgaagaggatatgaataa

SEQ ID NO: 107599 - DNA, 25 bp, probe
ccaatttcaactatttctaccaccg

SEQ ID NO: 107600 - DNA, 25 bp, probe
gcccattatagacaggtcaatatca

SEQ ID NO: 107601 - DNA, 25 bp, probe
catagcccattatagacaggtcaat

SEQ ID NO: 107602 - DNA, 25 bp, probe
agcccattatagacaggtcaatatc

SEQ ID NO: 107603 - DNA, 25 bp, probe
tactatgagcaagtctgagtacatg

SEQ ID NO: 107604 - DNA, 25 bp, probe
caatttcaactatttctaccaccga

SEQ ID NO: 107605 - DNA, 25 bp, probe
acaggtcaatatcagaactgccaat

SEQ ID NO: 107606 - DNA, 25 bp, probe
atggagatcgaagaggatatgaata

SEQ ID NO: 107607 - DNA, 25 bp, probe
atttcaactatttctaccaccgaga

SEQ ID NO: 107608 - DNA, 25 bp, probe
aatttcaactatttctaccaccgag

SEQ ID NO: 107609 - DNA, 25 bp, probe
tccaatttcaactatttctaccacc

SEQ ID NO: 107610 - DNA, 25 bp, probe
aagtctgagtacatggagatcgaag

SEQ ID NO: 107611 - DNA, 25 bp, probe
gcgttaataagagcaagctactgac

SEQ ID NO: 107612 - DNA, 25 bp, probe
tagcatagcccattatagacaggtc

SEQ ID NO: 107613 - DNA, 25 bp, probe
gagcaagtctgagtacatggagatc

SEQ ID NO: 107614 - DNA, 25 bp, probe
gtctccaacttcaactacttctacc

SEQ ID NO: 107615 - DNA, 25 bp, probe
ctccaacttcaactacttctaccac

SEQ ID NO: 107616 - DNA, 25 bp, probe
tctccaacttcaactacttctacca

SEQ ID NO: 107617 - DNA, 25 bp, probe
cgtctccaacttcaactacttctac

SEQ ID NO: 107618 - DNA, 25 bp, probe
tcgtctccaacttcaactacttcta

SEQ ID NO: 107619 - DNA, 25 bp, probe
atcgtctccaacttcaactacttct

SEQ ID NO: 107620 - DNA, 25 bp, probe
catcgtctccaacttcaactacttc

SEQ ID NO: 107621 - DNA, 25 bp, probe
agagattatgtaactcctccatcca

SEQ ID NO: 107622 - DNA, 25 bp, probe
tcatcgtctccaacttcaactactt

SEQ ID NO: 107623 - DNA, 25 bp, probe
ccaagagattatgtaactcctccat

SEQ ID NO: 107624 - DNA, 25 bp, probe
gagattatgtaactcctccatccat

SEQ ID NO: 107625 - DNA, 25 bp, probe
aagagattatgtaactcctccatcc

SEQ ID NO: 107626 - DNA, 25 bp, probe
tccaacttcaactacttctaccacc

SEQ ID NO: 107627 - DNA, 25 bp, probe
attatgtaactcctccatccatgtg

SEQ ID NO: 107628 - DNA, 25 bp, probe
gattatgtaactcctccatccatgt

SEQ ID NO: 107629 - DNA, 25 bp, probe
agattatgtaactcctccatccatg

SEQ ID NO: 107630 - DNA, 25 bp, probe
caagagattatgtaactcctccatc

SEQ ID NO: 107631 - DNA, 25 bp, probe
gtcatcgtctccaacttcaactact

SEQ ID NO: 107632 - DNA, 25 bp, probe
ttatgtaactcctccatccatgtgt

SEQ ID NO: 107633 - DNA, 25 bp, probe
tatgtaactcctccatccatgtgtt

SEQ ID NO: 107634 - DNA, 25 bp, probe
gatgtatttgtagccagtctcctat

SEQ ID NO: 107635 - DNA, 25 bp, probe
tatttgtagccagtctcctataccc

SEQ ID NO: 107636 - DNA, 25 bp, probe
ccaacttcaactacttctaccaccg

SEQ ID NO: 107637 - DNA, 25 bp, probe
ctgctcatcttcttcctcttcatcg

SEQ ID NO: 107638 - DNA, 25 bp, probe
aatgatattggaggaatacttctga

SEQ ID NO: 107639 - DNA, 25 bp, probe
ctgtgagatggatgtatttgtagcc

SEQ ID NO: 107640 - DNA, 25 bp, probe
atgtaactcctccatccatgtgttc

SEQ ID NO: 107641 - DNA, 25 bp, probe
ggatatctacattataccgcagagt

SEQ ID NO: 107642 - DNA, 25 bp, probe
tggatatctacattataccgcagag

SEQ ID NO: 107643 - DNA, 25 bp, probe
acatggatatctacattataccgca

SEQ ID NO: 107644 - DNA, 25 bp, probe
atgtatttgtagccagtctcctata

SEQ ID NO: 107645 - DNA, 25 bp, probe
cttgctgaacatggatatctacatt

SEQ ID NO: 107646 - DNA, 25 bp, probe
gcttgctgaacatggatatctacat

SEQ ID NO: 107647 - DNA, 25 bp, probe
atgatattggaggaatacttctgat

SEQ ID NO: 107648 - DNA, 25 bp, probe
gctgctcatcttcttcctcttcatc

SEQ ID NO: 107649 - DNA, 25 bp, probe
cgctgtgagatggatgtatttgtag

SEQ ID NO: 107650 - DNA, 25 bp, probe
tatttgaagtcacactgtaacctca

SEQ ID NO: 107651 - DNA, 25 bp, probe
agtatttgaagtcacactgtaacct

SEQ ID NO: 107652 - DNA, 25 bp, probe
gtatttgaagtcacactgtaacctc

SEQ ID NO: 107653 - DNA, 25 bp, probe
gagtatttgaagtcacactgtaacc

SEQ ID NO: 107654 - DNA, 25 bp, probe
catggatatctacattataccgcag

SEQ ID NO: 107655 - DNA, 25 bp, probe
ccagatcccaagagattatgtaact

SEQ ID NO: 107656 - DNA, 25 bp, probe
cccagatcccaagagattatgtaac

SEQ ID NO: 107657 - DNA, 25 bp, probe
atggatatctacattataccgcaga

SEQ ID NO: 107658 - DNA, 25 bp, probe
ggttctaggtatcttaatgtgtgga

SEQ ID NO: 107659 - DNA, 25 bp, probe
aggttctaggtatcttaatgtgtgg

SEQ ID NO: 107660 - DNA, 25 bp, probe
gttctaggtatcttaatgtgtggat

SEQ ID NO: 107661 - DNA, 25 bp, probe
aaggttctaggtatcttaatgtgtg

SEQ ID NO: 107662 - DNA, 25 bp, probe
tagagctgtgagagaatgaagatga

SEQ ID NO: 107663 - DNA, 25 bp, probe
gtagagctgtgagagaatgaagatg

SEQ ID NO: 107664 - DNA, 25 bp, probe
gaaggttctaggtatcttaatgtgt

SEQ ID NO: 107665 - DNA, 25 bp, probe
ctgctaaatgtaaatgccttctcaa

SEQ ID NO: 107666 - DNA, 25 bp, probe
cacttgaatcttgctgctaaatgta

SEQ ID NO: 107667 - DNA, 25 bp, probe
gaatcttgctgctaaatgtaaatgc

SEQ ID NO: 107668 - DNA, 25 bp, probe
tgctaaatgtaaatgccttctcaaa

SEQ ID NO: 107669 - DNA, 25 bp, probe
aatcttgctgctaaatgtaaatgcc

SEQ ID NO: 107670 - DNA, 25 bp, probe
acttgaatcttgctgctaaatgtaa

SEQ ID NO: 107671 - DNA, 25 bp, probe
agaaggttctaggtatcttaatgtg

SEQ ID NO: 107672 - DNA, 25 bp, probe
agagctgtgagagaatgaagatgag

SEQ ID NO: 107673 - DNA, 25 bp, probe
cttgctgctaaatgtaaatgccttc

SEQ ID NO: 107674 - DNA, 25 bp, probe
cttctcaaatgacagattccagttc

SEQ ID NO: 107675 - DNA, 25 bp, probe
aaatgccttctcaaatgacagattc

SEQ ID NO: 107676 - DNA, 25 bp, probe
gtaaatgccttctcaaatgacagat

SEQ ID NO: 107677 - DNA, 25 bp, probe
atcttgctgctaaatgtaaatgcct

SEQ ID NO: 107678 - DNA, 25 bp, probe
cgtagagctgtgagagaatgaagat

SEQ ID NO: 107679 - DNA, 25 bp, probe
tcacttgaatcttgctgctaaatgt

SEQ ID NO: 107680 - DNA, 25 bp, probe
ttgctgctaaatgtaaatgccttct

SEQ ID NO: 107681 - DNA, 25 bp, probe
tcttgctgctaaatgtaaatgcctt

SEQ ID NO: 107682 - DNA, 25 bp, probe
tgaatcttgctgctaaatgtaaatg

SEQ ID NO: 107683 - DNA, 25 bp, probe
aaatgtaaatgccttctcaaatgac

SEQ ID NO: 107684 - DNA, 25 bp, probe
ttctcaaatgacagattccagttcc

SEQ ID NO: 107685 - DNA, 25 bp, probe
ccttctcaaatgacagattccagtt

SEQ ID NO: 107686 - DNA, 25 bp, probe
taaatgccttctcaaatgacagatt

SEQ ID NO: 107687 - DNA, 25 bp, probe
gctaaatgtaaatgccttctcaaat

SEQ ID NO: 107688 - DNA, 25 bp, probe
cttgaatcttgctgctaaatgtaaa

SEQ ID NO: 107689 - DNA, 25 bp, probe
ttcacttgaatcttgctgctaaatg

SEQ ID NO: 107690 - DNA, 25 bp, probe
tttcacttgaatcttgctgctaaat

SEQ ID NO: 107691 - DNA, 25 bp, probe
ctttcacttgaatcttgctgctaaa

SEQ ID NO: 107692 - DNA, 25 bp, probe
atgtaaatgccttctcaaatgacag

SEQ ID NO: 107693 - DNA, 25 bp, probe
gctgctaaatgtaaatgccttctca

SEQ ID NO: 107694 - DNA, 25 bp, probe
tgctgctaaatgtaaatgccttctc

SEQ ID NO: 107695 - DNA, 25 bp, probe
aatgccttctcaaatgacagattcc

SEQ ID NO: 107696 - DNA, 25 bp, probe
attccagttcccattcaacagagta

SEQ ID NO: 107697 - DNA, 25 bp, probe
aatgtaaatgccttctcaaatgaca

SEQ ID NO: 107698 - DNA, 25 bp, probe
tgtaaatgccttctcaaatgacaga

SEQ ID NO: 107699 - DNA, 25 bp, probe
gcactgacaaagtatagaaggttct

SEQ ID NO: 107700 - DNA, 25 bp, probe
actttcacttgaatcttgctgctaa

SEQ ID NO: 107701 - DNA, 25 bp, probe
gaacagggactttcacttgaatctt

SEQ ID NO: 107702 - DNA, 25 bp, probe
ggataatgctgttgcctcatctata

SEQ ID NO: 107703 - DNA, 25 bp, probe
ataatgctgttgcctcatctataac

SEQ ID NO: 107704 - DNA, 25 bp, probe
gataatgctgttgcctcatctataa

SEQ ID NO: 107705 - DNA, 25 bp, probe
ctaactggaagcatgtaggagaatc

SEQ ID NO: 107706 - DNA, 25 bp, probe
tggataatgctgttgcctcatctat

SEQ ID NO: 107707 - DNA, 25 bp, probe
ttggataatgctgttgcctcatcta

SEQ ID NO: 107708 - DNA, 25 bp, probe
cattataactgaaggagaaggtgcc

SEQ ID NO: 107709 - DNA, 25 bp, probe
tcattataactgaaggagaaggtgc

SEQ ID NO: 107710 - DNA, 25 bp, probe
gaatgtgtggcagatttagtgaaag

SEQ ID NO: 107711 - DNA, 25 bp, probe
atttgtctttgtaatgtcaccacct

SEQ ID NO: 107712 - DNA, 25 bp, probe
tttgtctttgtaatgtcaccacctt

SEQ ID NO: 107713 - DNA, 25 bp, probe
catcagaaggagaaggaaggagact

SEQ ID NO: 107714 - DNA, 25 bp, probe
atcattataactgaaggagaaggtg

SEQ ID NO: 107715 - DNA, 25 bp, probe
gtttgtcaagtcaaccaatgtagaa

SEQ ID NO: 107716 - DNA, 25 bp, probe
aagtttgtcaagtcaaccaatgtag

SEQ ID NO: 107717 - DNA, 25 bp, probe
gaagtttgtcaagtcaaccaatgta

SEQ ID NO: 107718 - DNA, 25 bp, probe
ttgtaagttgctaaacgagtcaatc

SEQ ID NO: 107719 - DNA, 25 bp, probe
cttgtaagttgctaaacgagtcaat

SEQ ID NO: 107720 - DNA, 25 bp, probe
ttgtcaagtcaaccaatgtagaaag

SEQ ID NO: 107721 - DNA, 25 bp, probe
agtttgtcaagtcaaccaatgtaga

SEQ ID NO: 107722 - DNA, 25 bp, probe
ttgtctttgtaatgtcaccaccttc

SEQ ID NO: 107723 - DNA, 25 bp, probe
tttgtcaagtcaaccaatgtagaaa

SEQ ID NO: 107724 - DNA, 25 bp, probe
atcagaaggagaaggaaggagactc

SEQ ID NO: 107725 - DNA, 25 bp, probe
cagaagtttgtcaagtcaaccaatg

SEQ ID NO: 107726 - DNA, 25 bp, probe
cttggataatgctgttgcctcatct

SEQ ID NO: 107727 - DNA, 25 bp, probe
actcacccaagcatatataactagc

SEQ ID NO: 107728 - DNA, 25 bp, probe
tgtcaagtcaaccaatgtagaaagc

SEQ ID NO: 107729 - DNA, 25 bp, probe
ggaatgtgtggcagatttagtgaaa

SEQ ID NO: 107730 - DNA, 25 bp, probe
agaagtttgtcaagtcaaccaatgt

SEQ ID NO: 107731 - DNA, 25 bp, probe
cctgctgaatgatttccaaagagaa

SEQ ID NO: 107732 - DNA, 25 bp, probe
tgtaagttgctaaacgagtcaatcc

SEQ ID NO: 107733 - DNA, 25 bp, probe
taactggaagcatgtaggagaatcc

SEQ ID NO: 107734 - DNA, 25 bp, probe
tgactcacccaagcatatataacta

SEQ ID NO: 107735 - DNA, 25 bp, probe
aaacacttgtaagttgctaaacgag

SEQ ID NO: 107736 - DNA, 25 bp, probe
actcctggaaatatcagttactcag

SEQ ID NO: 107737 - DNA, 25 bp, probe
ccagaagtttgtcaagtcaaccaat

SEQ ID NO: 107738 - DNA, 25 bp, probe
ctcctggaaatatcagttactcagc

SEQ ID NO: 107739 - DNA, 25 bp, probe
acttgtaagttgctaaacgagtcaa

SEQ ID NO: 107740 - DNA, 25 bp, probe
aaagtttgccagaagtttgtcaagt

SEQ ID NO: 107741 - DNA, 25 bp, probe
aatgtgtggcagatttagtgaaagc

SEQ ID NO: 107742 - DNA, 25 bp, probe
gactcacccaagcatatataactag

SEQ ID NO: 107743 - DNA, 25 bp, probe
gtaagttgctaaacgagtcaatccc

SEQ ID NO: 107744 - DNA, 25 bp, probe
gatatggcagcgaaaggatgtaaac

SEQ ID NO: 107745 - DNA, 25 bp, probe
agatatggcagcgaaaggatgtaaa

SEQ ID NO: 107746 - DNA, 25 bp, probe
aagagtgttggtgtgtaggtagatt

SEQ ID NO: 107747 - DNA, 25 bp, probe
agagtgttggtgtgtaggtagattc

SEQ ID NO: 107748 - DNA, 25 bp, probe
aacattaagctaccaagatcctgaa

SEQ ID NO: 107749 - DNA, 25 bp, probe
ttaagctaccaagatcctgaatgtc

SEQ ID NO: 107750 - DNA, 25 bp, probe
attaagctaccaagatcctgaatgt

SEQ ID NO: 107751 - DNA, 25 bp, probe
acattaagctaccaagatcctgaat

SEQ ID NO: 107752 - DNA, 25 bp, probe
ggtgtgtaggtagattccatattaa

SEQ ID NO: 107753 - DNA, 25 bp, probe
gagtgttggtgtgtaggtagattcc

SEQ ID NO: 107754 - DNA, 25 bp, probe
taatatagctctcttatggtggtgg

SEQ ID NO: 107755 - DNA, 25 bp, probe
tgaatgtcagagatgtactcagagg

SEQ ID NO: 107756 - DNA, 25 bp, probe
taacattaagctaccaagatcctga

SEQ ID NO: 107757 - DNA, 25 bp, probe
ctaacattaagctaccaagatcctg

SEQ ID NO: 107758 - DNA, 25 bp, probe
gttggtgtgtaggtagattccatat

SEQ ID NO: 107759 - DNA, 25 bp, probe
ccatattaatgaggaacactgaact

SEQ ID NO: 107760 - DNA, 25 bp, probe
ttggtgtgtaggtagattccatatt

SEQ ID NO: 107761 - DNA, 25 bp, probe
tcattatggcagtgtatctatgtaa

SEQ ID NO: 107762 - DNA, 25 bp, probe
tgttggtgtgtaggtagattccata

SEQ ID NO: 107763 - DNA, 25 bp, probe
tctaacattaagctaccaagatcct

SEQ ID NO: 107764 - DNA, 25 bp, probe
tgtatcattatggcagtgtatctat

SEQ ID NO: 107765 - DNA, 25 bp, probe
tataaagcaaagcactattccaagg

SEQ ID NO: 107766 - DNA, 25 bp, probe
tttaccgtagccctcatctaactta

SEQ ID NO: 107767 - DNA, 25 bp, probe
atcattatggcagtgtatctatgta

SEQ ID NO: 107768 - DNA, 25 bp, probe
tatcattatggcagtgtatctatgt

SEQ ID NO: 107769 - DNA, 25 bp, probe
atgtatcattatggcagtgtatcta

SEQ ID NO: 107770 - DNA, 25 bp, probe
tatgtatcattatggcagtgtatct

SEQ ID NO: 107771 - DNA, 25 bp, probe
taagtggtggtgttctttaaggaat

SEQ ID NO: 107772 - DNA, 25 bp, probe
ctgactacattggtgtatccagatt

SEQ ID NO: 107773 - DNA, 25 bp, probe
tgactacattggtgtatccagattg

SEQ ID NO: 107774 - DNA, 25 bp, probe
taagctaccaagatcctgaatgtca

SEQ ID NO: 107775 - DNA, 25 bp, probe
tggtgtgtaggtagattccatatta

SEQ ID NO: 107776 - DNA, 25 bp, probe
tcctttctttctctgaattactgct

SEQ ID NO: 107777 - DNA, 25 bp, probe
gcatcgtgtaaatcatctctgtaga

SEQ ID NO: 107778 - DNA, 25 bp, probe
aatgaatatgtgatttgctccagat

SEQ ID NO: 107779 - DNA, 25 bp, probe
ttctaacattaagctaccaagatcc

SEQ ID NO: 107780 - DNA, 25 bp, probe
tcttgagtaatcagatggaatgcaa

SEQ ID NO: 107781 - DNA, 25 bp, probe
aatatagctctcttatggtggtggc

SEQ ID NO: 107782 - DNA, 25 bp, probe
tggtggtgttctttaaggaatttct

SEQ ID NO: 107783 - DNA, 25 bp, probe
gtggtggtgttctttaaggaatttc

SEQ ID NO: 107784 - DNA, 25 bp, probe
aaagagtgttggtgtgtaggtagat

SEQ ID NO: 107785 - DNA, 25 bp, probe
ttaagtggtggtgttctttaaggaa

SEQ ID NO: 107786 - DNA, 25 bp, probe
attaagtggtggtgttctttaagga

SEQ ID NO: 107787 - DNA, 25 bp, probe
ctacattggtgtatccagattgctt

SEQ ID NO: 107788 - DNA, 25 bp, probe
aatcttgagtaatcagatggaatgc

SEQ ID NO: 107789 - DNA, 25 bp, probe
caatgaatatgtgatttgctccaga

SEQ ID NO: 107790 - DNA, 25 bp, probe
ttcgctacattacaagacacatcat

SEQ ID NO: 107791 - DNA, 25 bp, probe
attcgctacattacaagacacatca

SEQ ID NO: 107792 - DNA, 25 bp, probe
tattcgctacattacaagacacatc

SEQ ID NO: 107793 - DNA, 25 bp, probe
ctattcgctacattacaagacacat

SEQ ID NO: 107794 - DNA, 25 bp, probe
tctattcgctacattacaagacaca

SEQ ID NO: 107795 - DNA, 25 bp, probe
ttaacagactaagttgctaacctca

SEQ ID NO: 107796 - DNA, 25 bp, probe
ttggctgtatgactgaagtaataac

SEQ ID NO: 107797 - DNA, 25 bp, probe
gttggctgtatgactgaagtaataa

SEQ ID NO: 107798 - DNA, 25 bp, probe
aacagactaagttgctaacctcaat

SEQ ID NO: 107799 - DNA, 25 bp, probe
taacagactaagttgctaacctcaa

SEQ ID NO: 107800 - DNA, 25 bp, probe
acagactaagttgctaacctcaatt

SEQ ID NO: 107801 - DNA, 25 bp, probe
ttctattcgctacattacaagacac

SEQ ID NO: 107802 - DNA, 25 bp, probe
tggctgtatgactgaagtaataact

SEQ ID NO: 107803 - DNA, 25 bp, probe
agttggctgtatgactgaagtaata

SEQ ID NO: 107804 - DNA, 25 bp, probe
ggctgtatgactgaagtaataactg

SEQ ID NO: 107805 - DNA, 25 bp, probe
cacacatatatctgatggcacctat

SEQ ID NO: 107806 - DNA, 25 bp, probe
atgtagacaggtacttcactcagaa

SEQ ID NO: 107807 - DNA, 25 bp, probe
taacacacatatatctgatggcacc

SEQ ID NO: 107808 - DNA, 25 bp, probe
ttaacacacatatatctgatggcac

SEQ ID NO: 107809 - DNA, 25 bp, probe
attctattcgctacattacaagaca

SEQ ID NO: 107810 - DNA, 25 bp, probe
acacacatatatctgatggcaccta

SEQ ID NO: 107811 - DNA, 25 bp, probe
gctgtatgactgaagtaataactga

SEQ ID NO: 107812 - DNA, 25 bp, probe
acacatatatctgatggcacctata

SEQ ID NO: 107813 - DNA, 25 bp, probe
catgtagacaggtacttcactcaga

SEQ ID NO: 107814 - DNA, 25 bp, probe
tcatgtagacaggtacttcactcag

SEQ ID NO: 107815 - DNA, 25 bp, probe
tcgctacattacaagacacatcatg

SEQ ID NO: 107816 - DNA, 25 bp, probe
gattctattcgctacattacaagac

SEQ ID NO: 107817 - DNA, 25 bp, probe
aacacacatatatctgatggcacct

SEQ ID NO: 107818 - DNA, 25 bp, probe
cacatatatctgatggcacctataa

SEQ ID NO: 107819 - DNA, 25 bp, probe
agtcatgtagacaggtacttcactc

SEQ ID NO: 107820 - DNA, 25 bp, probe
gtgaggttgttgaagattggaaatt

SEQ ID NO: 107821 - DNA, 25 bp, probe
gtcatgtagacaggtacttcactca

SEQ ID NO: 107822 - DNA, 25 bp, probe
tgaggttgttgaagattggaaattc

SEQ ID NO: 107823 - DNA, 25 bp, probe
gctttaacagactaagttgctaacc

SEQ ID NO: 107824 - DNA, 25 bp, probe
tgactgaagtaataactgatgagat

SEQ ID NO: 107825 - DNA, 25 bp, probe
atgactgaagtaataactgatgaga

SEQ ID NO: 107826 - DNA, 25 bp, probe
gatgtccgtgaggttgttgaagatt

SEQ ID NO: 107827 - DNA, 25 bp, probe
cagactaagttgctaacctcaattt

SEQ ID NO: 107828 - DNA, 25 bp, probe
tttaacagactaagttgctaacctc

SEQ ID NO: 107829 - DNA, 25 bp, probe
ctttaacagactaagttgctaacct

SEQ ID NO: 107830 - DNA, 25 bp, probe
tagacaggtacttcactcagaaaga

SEQ ID NO: 107831 - DNA, 25 bp, probe
gtagacaggtacttcactcagaaag

SEQ ID NO: 107832 - DNA, 25 bp, probe
cgattctattcgctacattacaaga

SEQ ID NO: 107833 - DNA, 25 bp, probe
aacagatgatccatttgaacagttg

SEQ ID NO: 107834 - DNA, 25 bp, probe
ttaactatcgcaccattgaagaatc

SEQ ID NO: 107835 - DNA, 25 bp, probe
aattgtatcttcacctggttcctac

SEQ ID NO: 107836 - DNA, 25 bp, probe
taactatcgcaccattgaagaatca

SEQ ID NO: 107837 - DNA, 25 bp, probe
ttgaagaatcagcagccaataacat

SEQ ID NO: 107838 - DNA, 25 bp, probe
aactatcgcaccattgaagaatcag

SEQ ID NO: 107839 - DNA, 25 bp, probe
tgaagaatcagcagccaataacatc

SEQ ID NO: 107840 - DNA, 25 bp, probe
gaagaatcagcagccaataacatcg

SEQ ID NO: 107841 - DNA, 25 bp, probe
agctcaacatctacttccaagaatt

SEQ ID NO: 107842 - DNA, 25 bp, probe
aagctcaacatctacttccaagaat

SEQ ID NO: 107843 - DNA, 25 bp, probe
aacttctacagtgactacaacacga

SEQ ID NO: 107844 - DNA, 25 bp, probe
caagctcaacatctacttccaagaa

SEQ ID NO: 107845 - DNA, 25 bp, probe
ccaagaatttaactatcgcaccatt

SEQ ID NO: 107846 - DNA, 25 bp, probe
tccaagaatttaactatcgcaccat

SEQ ID NO: 107847 - DNA, 25 bp, probe
aattgtcaagctcaacatctacttc

SEQ ID NO: 107848 - DNA, 25 bp, probe
gaattgtcaagctcaacatctactt

SEQ ID NO: 107849 - DNA, 25 bp, probe
aagaatcagcagccaataacatcgt

SEQ ID NO: 107850 - DNA, 25 bp, probe
tttaactatcgcaccattgaagaat

SEQ ID NO: 107851 - DNA, 25 bp, probe
atttaactatcgcaccattgaagaa

SEQ ID NO: 107852 - DNA, 25 bp, probe
gtcaagctcaacatctacttccaag

SEQ ID NO: 107853 - DNA, 25 bp, probe
aaattgtatcttcacctggttccta

SEQ ID NO: 107854 - DNA, 25 bp, probe
taaattgtatcttcacctggttcct

SEQ ID NO: 107855 - DNA, 25 bp, probe
aatttaactatcgcaccattgaaga

SEQ ID NO: 107856 - DNA, 25 bp, probe
agaatttaactatcgcaccattgaa

SEQ ID NO: 107857 - DNA, 25 bp, probe
aagaatttaactatcgcaccattga

SEQ ID NO: 107858 - DNA, 25 bp, probe
cttccaagaatttaactatcgcacc

SEQ ID NO: 107859 - DNA, 25 bp, probe
acttccaagaatttaactatcgcac

SEQ ID NO: 107860 - DNA, 25 bp, probe
tcaagctcaacatctacttccaaga

SEQ ID NO: 107861 - DNA, 25 bp, probe
attgtcaagctcaacatctacttcc

SEQ ID NO: 107862 - DNA, 25 bp, probe
ggaattgtcaagctcaacatctact

SEQ ID NO: 107863 - DNA, 25 bp, probe
attgtatcttcacctggttcctacc

SEQ ID NO: 107864 - DNA, 25 bp, probe
gaatttaactatcgcaccattgaag

SEQ ID NO: 107865 - DNA, 25 bp, probe
ttccaagaatttaactatcgcacca

SEQ ID NO: 107866 - DNA, 25 bp, probe
gctcaacatctacttccaagaattt

SEQ ID NO: 107867 - DNA, 25 bp, probe
cattgaagaatcagcagccaataac

SEQ ID NO: 107868 - DNA, 25 bp, probe
acttctacagtgactacaacacgac

SEQ ID NO: 107869 - DNA, 25 bp, probe
attgaagaatcagcagccaataaca

SEQ ID NO: 107870 - DNA, 25 bp, probe
ataaattgtatcttcacctggttcc

SEQ ID NO: 107871 - DNA, 25 bp, probe
caagaatttaactatcgcaccattg

SEQ ID NO: 107872 - DNA, 25 bp, probe
ctacagtgactacaacacgacctac

SEQ ID NO: 107873 - DNA, 25 bp, probe
tctacagtgactacaacacgaccta

SEQ ID NO: 107874 - DNA, 25 bp, probe
ggaataaattgtatcttcacctggt

SEQ ID NO: 107875 - DNA, 25 bp, probe
gaatcagcagccaataacatcgtct

SEQ ID NO: 107876 - DNA, 25 bp, probe
agaatcagcagccaataacatcgtc

SEQ ID NO: 107877 - DNA, 25 bp, probe
tacagtgactacaacacgacctact

SEQ ID NO: 107878 - DNA, 25 bp, probe
ttattcacttgtgtgtgtacctgtg

SEQ ID NO: 107879 - DNA, 25 bp, probe
actccttccatctcttccttcagaa

SEQ ID NO: 107880 - DNA, 25 bp, probe
atgtatgtgtgcttgagtgtgtgaa

SEQ ID NO: 107881 - DNA, 25 bp, probe
acagttcttacaataaaccctcctt

SEQ ID NO: 107882 - DNA, 25 bp, probe
ttgattggatattctcctcggactg

SEQ ID NO: 107883 - DNA, 25 bp, probe
agttcttacaataaaccctccttgg

SEQ ID NO: 107884 - DNA, 25 bp, probe
cagttcttacaataaaccctccttg

SEQ ID NO: 107885 - DNA, 25 bp, probe
tacagttcttacaataaaccctcct

SEQ ID NO: 107886 - DNA, 25 bp, probe
cagagttgtctttattgtccaccat

SEQ ID NO: 107887 - DNA, 25 bp, probe
gtatagctgtgtgtgtgttcaagtg

SEQ ID NO: 107888 - DNA, 25 bp, probe
gtgtatagctgtgtgtgtgttcaag

SEQ ID NO: 107889 - DNA, 25 bp, probe
atatgtgtatatatgtgtgccctgg

SEQ ID NO: 107890 - DNA, 25 bp, probe
tatgtgtatatatgtgtgccctgga

SEQ ID NO: 107891 - DNA, 25 bp, probe
cactccttccatctcttccttcaga

SEQ ID NO: 107892 - DNA, 25 bp, probe
tgtatagctgtgtgtgtgttcaagt

SEQ ID NO: 107893 - DNA, 25 bp, probe
gtacagttcttacaataaaccctcc

SEQ ID NO: 107894 - DNA, 25 bp, probe
gattggatattctcctcggactgtg

SEQ ID NO: 107895 - DNA, 25 bp, probe
ttccttcagaagtttcgtctaatgg

SEQ ID NO: 107896 - DNA, 25 bp, probe
tgtgtatagctgtgtgtgtgttcaa

SEQ ID NO: 107897 - DNA, 25 bp, probe
tatatatgtgtgccctggactgttt

SEQ ID NO: 107898 - DNA, 25 bp, probe
tgtatgtgtgcttgagtgtgtgaac

SEQ ID NO: 107899 - DNA, 25 bp, probe
agagttgtctttattgtccaccatg

SEQ ID NO: 107900 - DNA, 25 bp, probe
ctggatttattcacttgtgtgtgta

SEQ ID NO: 107901 - DNA, 25 bp, probe
tgattggatattctcctcggactgt

SEQ ID NO: 107902 - DNA, 25 bp, probe
tattcacttgtgtgtgtacctgtgg

SEQ ID NO: 107903 - DNA, 25 bp, probe
cctgctgctcagtaagaagattctc

SEQ ID NO: 107904 - DNA, 25 bp, probe
gacctgctgctcagtaagaagattc

SEQ ID NO: 107905 - DNA, 25 bp, probe
tctgtttgattggatattctcctcg

SEQ ID NO: 107906 - DNA, 25 bp, probe
ggatttattcacttgtgtgtgtacc

SEQ ID NO: 107907 - DNA, 25 bp, probe
ctccactccttccatctcttccttc

SEQ ID NO: 107908 - DNA, 25 bp, probe
atttattcacttgtgtgtgtacctg

SEQ ID NO: 107909 - DNA, 25 bp, probe
tggatttattcacttgtgtgtgtac

SEQ ID NO: 107910 - DNA, 25 bp, probe
tttattcacttgtgtgtgtacctgt

SEQ ID NO: 107911 - DNA, 25 bp, probe
gatttattcacttgtgtgtgtacct

SEQ ID NO: 107912 - DNA, 25 bp, probe
attggatattctcctcggactgtgt

SEQ ID NO: 107913 - DNA, 25 bp, probe
ttcttacaataaaccctccttggtg

SEQ ID NO: 107914 - DNA, 25 bp, probe
gttcttacaataaaccctccttggt

SEQ ID NO: 107915 - DNA, 25 bp, probe
gtatatatgtgtgccctggactgtt

SEQ ID NO: 107916 - DNA, 25 bp, probe
gtttgattggatattctcctcggac

SEQ ID NO: 107917 - DNA, 25 bp, probe
ctgtttgattggatattctcctcgg

SEQ ID NO: 107918 - DNA, 25 bp, probe
gtgactgtatgtgtgtgtgtgaacc

SEQ ID NO: 107919 - DNA, 25 bp, probe
gatcctaagaatgtacagttgagct

SEQ ID NO: 107920 - DNA, 25 bp, probe
tttgattggatattctcctcggact

SEQ ID NO: 107921 - DNA, 25 bp, probe
atgtgtatatatgtgtgccctggac

SEQ ID NO: 107922 - DNA, 25 bp, probe
ctgatatatgctgctcttggttcta

SEQ ID NO: 107923 - DNA, 25 bp, probe
ggttattggtctgatatatgctgct

SEQ ID NO: 107924 - DNA, 25 bp, probe
aagtagttctagtgtggtcgttata

SEQ ID NO: 107925 - DNA, 25 bp, probe
ttaatgatggtgtacctggtgattg

SEQ ID NO: 107926 - DNA, 25 bp, probe
tgatatatgctgctcttggttctat

SEQ ID NO: 107927 - DNA, 25 bp, probe
tattggtctgatatatgctgctctt

SEQ ID NO: 107928 - DNA, 25 bp, probe
ttattggtctgatatatgctgctct

SEQ ID NO: 107929 - DNA, 25 bp, probe
gttattggtctgatatatgctgctc

SEQ ID NO: 107930 - DNA, 25 bp, probe
gtggttattggtctgatatatgctg

SEQ ID NO: 107931 - DNA, 25 bp, probe
attggtctgatatatgctgctcttg

SEQ ID NO: 107932 - DNA, 25 bp, probe
tggttattggtctgatatatgctgc

SEQ ID NO: 107933 - DNA, 25 bp, probe
agtggttattggtctgatatatgct

SEQ ID NO: 107934 - DNA, 25 bp, probe
tctgatatatgctgctcttggttct

SEQ ID NO: 107935 - DNA, 25 bp, probe
gtctgatatatgctgctcttggttc

SEQ ID NO: 107936 - DNA, 25 bp, probe
taatgatggtgtacctggtgattgt

SEQ ID NO: 107937 - DNA, 25 bp, probe
agtagttctagtgtggtcgttataa

SEQ ID NO: 107938 - DNA, 25 bp, probe
atgatggtgtacctggtgattgtaa

SEQ ID NO: 107939 - DNA, 25 bp, probe
aatgatggtgtacctggtgattgta

SEQ ID NO: 107940 - DNA, 25 bp, probe
tagtggttattggtctgatatatgc

SEQ ID NO: 107941 - DNA, 25 bp, probe
gatatatgctgctcttggttctata

SEQ ID NO: 107942 - DNA, 25 bp, probe
ttctcatgccattagctctctacaa

SEQ ID NO: 107943 - DNA, 25 bp, probe
cgtaagcaataagtaaccctctaac

SEQ ID NO: 107944 - DNA, 25 bp, probe
ggtctgatatatgctgctcttggtt

SEQ ID NO: 107945 - DNA, 25 bp, probe
ttggtctgatatatgctgctcttgg

SEQ ID NO: 107946 - DNA, 25 bp, probe
atgctgctcttggttctataaacta

SEQ ID NO: 107947 - DNA, 25 bp, probe
tatgctgctcttggttctataaact

SEQ ID NO: 107948 - DNA, 25 bp, probe
aagtagttcccttcagttcaaatcc

SEQ ID NO: 107949 - DNA, 25 bp, probe
taaagcaaagtagttctagtgtggt

SEQ ID NO: 107950 - DNA, 25 bp, probe
agtagttcccttcagttcaaatcct

SEQ ID NO: 107951 - DNA, 25 bp, probe
caaagtagttctagtgtggtcgtta

SEQ ID NO: 107952 - DNA, 25 bp, probe
atatatgctgctcttggttctataa

SEQ ID NO: 107953 - DNA, 25 bp, probe
aaagtagttctagtgtggtcgttat

SEQ ID NO: 107954 - DNA, 25 bp, probe
atatgctgctcttggttctataaac

SEQ ID NO: 107955 - DNA, 25 bp, probe
aaagcaaagtagttctagtgtggtc

SEQ ID NO: 107956 - DNA, 25 bp, probe
tttaatgatggtgtacctggtgatt

SEQ ID NO: 107957 - DNA, 25 bp, probe
atttaatgatggtgtacctggtgat

SEQ ID NO: 107958 - DNA, 25 bp, probe
tgtatttaatgatggtgtacctggt

SEQ ID NO: 107959 - DNA, 25 bp, probe
tgctgctcttggttctataaactag

SEQ ID NO: 107960 - DNA, 25 bp, probe
tatttaatgatggtgtacctggtga

SEQ ID NO: 107961 - DNA, 25 bp, probe
gtatttaatgatggtgtacctggtg

SEQ ID NO: 107962 - DNA, 25 bp, probe
ataaagcaaagtagttctagtgtgg

SEQ ID NO: 107963 - DNA, 25 bp, probe
ttctctcttaacgccactggtgata

SEQ ID NO: 107964 - DNA, 25 bp, probe
ttgtatttaatgatggtgtacctgg

SEQ ID NO: 107965 - DNA, 25 bp, probe
ttaactcatttctcatgccattagc

SEQ ID NO: 107966 - DNA, 25 bp, probe
attcaacttctccaacaatgtgatg

SEQ ID NO: 107967 - DNA, 25 bp, probe
aattcaacttctccaacaatgtgat

SEQ ID NO: 107968 - DNA, 25 bp, probe
tagagttcctagattacctcactgg

SEQ ID NO: 107969 - DNA, 25 bp, probe
cctgtagagttcctagattacctca

SEQ ID NO: 107970 - DNA, 25 bp, probe
tgtagagttcctagattacctcact

SEQ ID NO: 107971 - DNA, 25 bp, probe
gtagagttcctagattacctcactg

SEQ ID NO: 107972 - DNA, 25 bp, probe
ctgtagagttcctagattacctcac

SEQ ID NO: 107973 - DNA, 25 bp, probe
ggtggcgtgataggaattaatattg

SEQ ID NO: 107974 - DNA, 25 bp, probe
ttgaatggaactgtgatcttgataa

SEQ ID NO: 107975 - DNA, 25 bp, probe
ccaagatatgtattctctgacactc

SEQ ID NO: 107976 - DNA, 25 bp, probe
gtggcgtgataggaattaatattga

SEQ ID NO: 107977 - DNA, 25 bp, probe
attgaatggaactgtgatcttgata

SEQ ID NO: 107978 - DNA, 25 bp, probe
tattgaatggaactgtgatcttgat

SEQ ID NO: 107979 - DNA, 25 bp, probe
atattgaatggaactgtgatcttga

SEQ ID NO: 107980 - DNA, 25 bp, probe
tggcgtgataggaattaatattgaa

SEQ ID NO: 107981 - DNA, 25 bp, probe
tagattacctcactgggaatagcat

SEQ ID NO: 107982 - DNA, 25 bp, probe
ttcagatttgccagatattaccgag

SEQ ID NO: 107983 - DNA, 25 bp, probe
cttcagatttgccagatattaccga

SEQ ID NO: 107984 - DNA, 25 bp, probe
caaattcaacttctccaacaatgtg

SEQ ID NO: 107985 - DNA, 25 bp, probe
ccaaattcaacttctccaacaatgt

SEQ ID NO: 107986 - DNA, 25 bp, probe
caagatatgtattctctgacactct

SEQ ID NO: 107987 - DNA, 25 bp, probe
acttcagatttgccagatattaccg

SEQ ID NO: 107988 - DNA, 25 bp, probe
aacttcagatttgccagatattacc

SEQ ID NO: 107989 - DNA, 25 bp, probe
tttcataaagaaccacatccgtttc

SEQ ID NO: 107990 - DNA, 25 bp, probe
gattacctcactgggaatagcattg

SEQ ID NO: 107991 - DNA, 25 bp, probe
agattacctcactgggaatagcatt

SEQ ID NO: 107992 - DNA, 25 bp, probe
cccaaattcaacttctccaacaatg

SEQ ID NO: 107993 - DNA, 25 bp, probe
cagatttgccagatattaccgagac

SEQ ID NO: 107994 - DNA, 25 bp, probe
tcagatttgccagatattaccgaga

SEQ ID NO: 107995 - DNA, 25 bp, probe
ctgcccaagatatgtattctctgac

SEQ ID NO: 107996 - DNA, 25 bp, probe
ttcaacttctccaacaatgtgatgg

SEQ ID NO: 107997 - DNA, 25 bp, probe
gtgacaagaagtacgaggaagtgag

SEQ ID NO: 107998 - DNA, 25 bp, probe
ttagccgtctggacaataaactttc

SEQ ID NO: 107999 - DNA, 25 bp, probe
aatattgaatggaactgtgatcttg

SEQ ID NO: 108000 - DNA, 25 bp, probe
aaattcaacttctccaacaatgtga

SEQ ID NO: 108001 - DNA, 25 bp, probe
ctagattacctcactgggaatagca

SEQ ID NO: 108002 - DNA, 25 bp, probe
gtattctctgacactcttatttggt

SEQ ID NO: 108003 - DNA, 25 bp, probe
attacctcactgggaatagcattgt

SEQ ID NO: 108004 - DNA, 25 bp, probe
ccgtctggacaataaactttcaaag

SEQ ID NO: 108005 - DNA, 25 bp, probe
tttagccgtctggacaataaacttt

SEQ ID NO: 108006 - DNA, 25 bp, probe
aatggaactgtgatcttgataaagc

SEQ ID NO: 108007 - DNA, 25 bp, probe
ttcataaagaaccacatccgtttcc

SEQ ID NO: 108008 - DNA, 25 bp, probe
cccaagatatgtattctctgacact

SEQ ID NO: 108009 - DNA, 25 bp, probe
ggcgtgataggaattaatattgaat

SEQ ID NO: 108010 - DNA, 25 bp, probe
ctaaacagtttggatggtcagtctc

SEQ ID NO: 108011 - DNA, 25 bp, probe
ttactaaacagtttggatggtcagt

SEQ ID NO: 108012 - DNA, 25 bp, probe
tactaaacagtttggatggtcagtc

SEQ ID NO: 108013 - DNA, 25 bp, probe
cactttactaaacagtttggatggt

SEQ ID NO: 108014 - DNA, 25 bp, probe
tttactaaacagtttggatggtcag

SEQ ID NO: 108015 - DNA, 25 bp, probe
ctttactaaacagtttggatggtca

SEQ ID NO: 108016 - DNA, 25 bp, probe
actttactaaacagtttggatggtc

SEQ ID NO: 108017 - DNA, 25 bp, probe
tcactttactaaacagtttggatgg

SEQ ID NO: 108018 - DNA, 25 bp, probe
aaacagtttggatggtcagtctcta

SEQ ID NO: 108019 - DNA, 25 bp, probe
taaacagtttggatggtcagtctct

SEQ ID NO: 108020 - DNA, 25 bp, probe
aacagtttggatggtcagtctctac

SEQ ID NO: 108021 - DNA, 25 bp, probe
aatctcctaacagactttcaggttt

SEQ ID NO: 108022 - DNA, 25 bp, probe
gaatctcctaacagactttcaggtt

SEQ ID NO: 108023 - DNA, 25 bp, probe
actcactttactaaacagtttggat

SEQ ID NO: 108024 - DNA, 25 bp, probe
actaaacagtttggatggtcagtct

SEQ ID NO: 108025 - DNA, 25 bp, probe
ctcactttactaaacagtttggatg

SEQ ID NO: 108026 - DNA, 25 bp, probe
tactcactttactaaacagtttgga

SEQ ID NO: 108027 - DNA, 25 bp, probe
acagtttggatggtcagtctctact

SEQ ID NO: 108028 - DNA, 25 bp, probe
ttactcactttactaaacagtttgg

SEQ ID NO: 108029 - DNA, 25 bp, probe
agtgaatctcctaacagactttcag

SEQ ID NO: 108030 - DNA, 25 bp, probe
aagtgaatctcctaacagactttca

SEQ ID NO: 108031 - DNA, 25 bp, probe
ccaagtgaatctcctaacagacttt

SEQ ID NO: 108032 - DNA, 25 bp, probe
caagtgaatctcctaacagactttc

SEQ ID NO: 108033 - DNA, 25 bp, probe
gtgaatctcctaacagactttcagg

SEQ ID NO: 108034 - DNA, 25 bp, probe
tgaatctcctaacagactttcaggt

SEQ ID NO: 108035 - DNA, 25 bp, probe
agacagaatttcactcttctcaccc

SEQ ID NO: 108036 - DNA, 25 bp, probe
gcccttgttttctttgattttattc

SEQ ID NO: 108037 - DNA, 25 bp, probe
acagaatttcactcttctcacccag

SEQ ID NO: 108038 - DNA, 25 bp, probe
gacagaatttcactcttctcaccca

SEQ ID NO: 108039 - DNA, 25 bp, probe
atctcctaacagactttcaggtttt

SEQ ID NO: 108040 - DNA, 25 bp, probe
cccaagtgaatctcctaacagactt

SEQ ID NO: 108041 - DNA, 25 bp, probe
ttttaatagatatggggtttcgcca

SEQ ID NO: 108042 - DNA, 25 bp, probe
tttgagacagaatttcactcttctc

SEQ ID NO: 108043 - DNA, 25 bp, probe
gagacagaatttcactcttctcacc

SEQ ID NO: 108044 - DNA, 25 bp, probe
cagaatttcactcttctcacccagg

SEQ ID NO: 108045 - DNA, 25 bp, probe
gaatttcactcttctcacccaggct

SEQ ID NO: 108046 - DNA, 25 bp, probe
tttactcactttactaaacagtttg

SEQ ID NO: 108047 - DNA, 25 bp, probe
aatttcactcttctcacccaggctg

SEQ ID NO: 108048 - DNA, 25 bp, probe
ttttgagacagaatttcactcttct

SEQ ID NO: 108049 - DNA, 25 bp, probe
cccttgttttctttgattttattct

SEQ ID NO: 108050 - DNA, 25 bp, probe
tccccaagtgaatctcctaacagac

SEQ ID NO: 108051 - DNA, 25 bp, probe
gtccccaagtgaatctcctaacaga

SEQ ID NO: 108052 - DNA, 25 bp, probe
ttaggcccttgttttctttgatttt

SEQ ID NO: 108053 - DNA, 25 bp, probe
aggcccttgttttctttgattttat

SEQ ID NO: 108054 - DNA, 25 bp, probe
tggcttctctcctcagacttctatt

SEQ ID NO: 108055 - DNA, 25 bp, probe
tcagacactacatgatgactcaagg

SEQ ID NO: 108056 - DNA, 25 bp, probe
ggcttctctcctcagacttctattt

SEQ ID NO: 108057 - DNA, 25 bp, probe
gccaataataaagacatttcctacc

SEQ ID NO: 108058 - DNA, 25 bp, probe
ctggcttctctcctcagacttctat

SEQ ID NO: 108059 - DNA, 25 bp, probe
cacgtaacctatgtcagacactaca

SEQ ID NO: 108060 - DNA, 25 bp, probe
acacgtaacctatgtcagacactac

SEQ ID NO: 108061 - DNA, 25 bp, probe
aacctatgtcagacactacatgatg

SEQ ID NO: 108062 - DNA, 25 bp, probe
gtaacctatgtcagacactacatga

SEQ ID NO: 108063 - DNA, 25 bp, probe
acatgatgactcaaggccaataata

SEQ ID NO: 108064 - DNA, 25 bp, probe
tacatgatgactcaaggccaataat

SEQ ID NO: 108065 - DNA, 25 bp, probe
cagacactacatgatgactcaaggc

SEQ ID NO: 108066 - DNA, 25 bp, probe
acctatgtcagacactacatgatga

SEQ ID NO: 108067 - DNA, 25 bp, probe
ctacatgatgactcaaggccaataa

SEQ ID NO: 108068 - DNA, 25 bp, probe
cgtaacctatgtcagacactacatg

SEQ ID NO: 108069 - DNA, 25 bp, probe
catgatgactcaaggccaataataa

SEQ ID NO: 108070 - DNA, 25 bp, probe
taacctatgtcagacactacatgat

SEQ ID NO: 108071 - DNA, 25 bp, probe
aataataaagacatttcctacctgc

SEQ ID NO: 108072 - DNA, 25 bp, probe
actacatgatgactcaaggccaata

SEQ ID NO: 108073 - DNA, 25 bp, probe
tatgtcagacactacatgatgactc

SEQ ID NO: 108074 - DNA, 25 bp, probe
ctatgtcagacactacatgatgact

SEQ ID NO: 108075 - DNA, 25 bp, probe
atgtcagacactacatgatgactca

SEQ ID NO: 108076 - DNA, 25 bp, probe
acgtaacctatgtcagacactacat

SEQ ID NO: 108077 - DNA, 25 bp, probe
gcttctctcctcagacttctatttt

SEQ ID NO: 108078 - DNA, 25 bp, probe
ccaataataaagacatttcctacct

SEQ ID NO: 108079 - DNA, 25 bp, probe
tgactcaaggccaataataaagaca

SEQ ID NO: 108080 - DNA, 25 bp, probe
gactcaaggccaataataaagacat

SEQ ID NO: 108081 - DNA, 25 bp, probe
atgactcaaggccaataataaagac

SEQ ID NO: 108082 - DNA, 25 bp, probe
gatgactcaaggccaataataaaga

SEQ ID NO: 108083 - DNA, 25 bp, probe
agatcctctggacacgtaacctatg

SEQ ID NO: 108084 - DNA, 25 bp, probe
cctatgtcagacactacatgatgac

SEQ ID NO: 108085 - DNA, 25 bp, probe
caaggccaataataaagacatttcc

SEQ ID NO: 108086 - DNA, 25 bp, probe
actcaaggccaataataaagacatt

SEQ ID NO: 108087 - DNA, 25 bp, probe
cactacatgatgactcaaggccaat

SEQ ID NO: 108088 - DNA, 25 bp, probe
gtcagacactacatgatgactcaag

SEQ ID NO: 108089 - DNA, 25 bp, probe
gatcctctggacacgtaacctatgt

SEQ ID NO: 108090 - DNA, 25 bp, probe
tgatgactcaaggccaataataaag

SEQ ID NO: 108091 - DNA, 25 bp, probe
tgtcagacactacatgatgactcaa

SEQ ID NO: 108092 - DNA, 25 bp, probe
ggccaataataaagacatttcctac

SEQ ID NO: 108093 - DNA, 25 bp, probe
atgatgactcaaggccaataataaa

SEQ ID NO: 108094 - DNA, 25 bp, probe
tcaaggccaataataaagacatttc

SEQ ID NO: 108095 - DNA, 25 bp, probe
caataataaagacatttcctacctg

SEQ ID NO: 108096 - DNA, 25 bp, probe
ctcaaggccaataataaagacattt

SEQ ID NO: 108097 - DNA, 25 bp, probe
aaggccaataataaagacatttcct

SEQ ID NO: 108098 - DNA, 25 bp, probe
aggatttggtccctcaactatcacc

SEQ ID NO: 108099 - DNA, 25 bp, probe
atttggtccctcaactatcacccag

SEQ ID NO: 108100 - DNA, 25 bp, probe
gatttggtccctcaactatcaccca

SEQ ID NO: 108101 - DNA, 25 bp, probe
ggatttggtccctcaactatcaccc

SEQ ID NO: 108102 - DNA, 25 bp, probe
gagaggatttggtccctcaactatc

SEQ ID NO: 108103 - DNA, 25 bp, probe
gaggatttggtccctcaactatcac

SEQ ID NO: 108104 - DNA, 25 bp, probe
agaggatttggtccctcaactatca

SEQ ID NO: 108105 - DNA, 25 bp, probe
ggagaggatttggtccctcaactat

SEQ ID NO: 108106 - DNA, 25 bp, probe
cttctgagttgtgctacaccaatat

SEQ ID NO: 108107 - DNA, 25 bp, probe
acttcaataacatgagtggcagatc

SEQ ID NO: 108108 - DNA, 25 bp, probe
gacttcaataacatgagtggcagat

SEQ ID NO: 108109 - DNA, 25 bp, probe
tcttctgagttgtgctacaccaata

SEQ ID NO: 108110 - DNA, 25 bp, probe
catacctaatctgttgagtttgtgc

SEQ ID NO: 108111 - DNA, 25 bp, probe
ttctgagttgtgctacaccaatatt

SEQ ID NO: 108112 - DNA, 25 bp, probe
aagactctcagagaatagacaacta

SEQ ID NO: 108113 - DNA, 25 bp, probe
agactctcagagaatagacaactat

SEQ ID NO: 108114 - DNA, 25 bp, probe
tttaacgccaaagaaagactctcag

SEQ ID NO: 108115 - DNA, 25 bp, probe
acaccttctgtttctttgcttattt

SEQ ID NO: 108116 - DNA, 25 bp, probe
tcatacctaatctgttgagtttgtg

SEQ ID NO: 108117 - DNA, 25 bp, probe
gtcatacctaatctgttgagtttgt

SEQ ID NO: 108118 - DNA, 25 bp, probe
tgtcatacctaatctgttgagtttg

SEQ ID NO: 108119 - DNA, 25 bp, probe
atcttacaactgagagtgatctgca

SEQ ID NO: 108120 - DNA, 25 bp, probe
ctttgtcatacctaatctgttgagt

SEQ ID NO: 108121 - DNA, 25 bp, probe
tacaccttctgtttctttgcttatt

SEQ ID NO: 108122 - DNA, 25 bp, probe
tctttgtcatacctaatctgttgag

SEQ ID NO: 108123 - DNA, 25 bp, probe
ggacttcaataacatgagtggcaga

SEQ ID NO: 108124 - DNA, 25 bp, probe
ttagggacttcaataacatgagtgg

SEQ ID NO: 108125 - DNA, 25 bp, probe
gtacaccttctgtttctttgcttat

SEQ ID NO: 108126 - DNA, 25 bp, probe
gtcttctgagttgtgctacaccaat

SEQ ID NO: 108127 - DNA, 25 bp, probe
gatcttacaactgagagtgatctgc

SEQ ID NO: 108128 - DNA, 25 bp, probe
gccaaagaaagactctcagagaata

SEQ ID NO: 108129 - DNA, 25 bp, probe
ttaacgccaaagaaagactctcaga

SEQ ID NO: 108130 - DNA, 25 bp, probe
ttgtcatacctaatctgttgagttt

SEQ ID NO: 108131 - DNA, 25 bp, probe
tttgtcatacctaatctgttgagtt

SEQ ID NO: 108132 - DNA, 25 bp, probe
ttctttgtcatacctaatctgttga

SEQ ID NO: 108133 - DNA, 25 bp, probe
tttagggacttcaataacatgagtg

SEQ ID NO: 108134 - DNA, 25 bp, probe
ttccagttgtttaatttccattggg

SEQ ID NO: 108135 - DNA, 25 bp, probe
aaagactctcagagaatagacaact

SEQ ID NO: 108136 - DNA, 25 bp, probe
ttcaataacatgagtggcagatctt

SEQ ID NO: 108137 - DNA, 25 bp, probe
ggtggtttgtcttgacatttgaata

SEQ ID NO: 108138 - DNA, 25 bp, probe
gaaagactctcagagaatagacaac

SEQ ID NO: 108139 - DNA, 25 bp, probe
ccaaagaaagactctcagagaatag

SEQ ID NO: 108140 - DNA, 25 bp, probe
tttctttgtcatacctaatctgttg

SEQ ID NO: 108141 - DNA, 25 bp, probe
agaaagactctcagagaatagacaa

SEQ ID NO: 108142 - DNA, 25 bp, probe
aagaaagactctcagagaatagaca

SEQ ID NO: 108143 - DNA, 25 bp, probe
cttcaataacatgagtggcagatct

SEQ ID NO: 108144 - DNA, 25 bp, probe
atacctaatctgttgagtttgtgca

SEQ ID NO: 108145 - DNA, 25 bp, probe
ttaatttccattgggtgggttcttt

SEQ ID NO: 108146 - DNA, 25 bp, probe
tttaatttccattgggtgggttctt

SEQ ID NO: 108147 - DNA, 25 bp, probe
cagttgtttaatttccattgggtgg

SEQ ID NO: 108148 - DNA, 25 bp, probe
ccagttgtttaatttccattgggtg

SEQ ID NO: 108149 - DNA, 25 bp, probe
tccagttgtttaatttccattgggt

SEQ ID NO: 108150 - DNA, 25 bp, probe
ttaagttacaagagaccacatccac

SEQ ID NO: 108151 - DNA, 25 bp, probe
gagaaggaagatggaaggtaagttc

SEQ ID NO: 108152 - DNA, 25 bp, probe
tgagaaggaagatggaaggtaagtt

SEQ ID NO: 108153 - DNA, 25 bp, probe
ttgtgagaaggaagatggaaggtaa

SEQ ID NO: 108154 - DNA, 25 bp, probe
gaaggaagatggaaggtaagttctg

SEQ ID NO: 108155 - DNA, 25 bp, probe
gtgagaaggaagatggaaggtaagt

SEQ ID NO: 108156 - DNA, 25 bp, probe
tgtgagaaggaagatggaaggtaag

SEQ ID NO: 108157 - DNA, 25 bp, probe
aaggaagatggaaggtaagttctgt

SEQ ID NO: 108158 - DNA, 25 bp, probe
cagtagagagcgatattggagtctt

SEQ ID NO: 108159 - DNA, 25 bp, probe
taagttacaagagaccacatccacc

SEQ ID NO: 108160 - DNA, 25 bp, probe
cttgtgagaaggaagatggaaggta

SEQ ID NO: 108161 - DNA, 25 bp, probe
aggaagatggaaggtaagttctgtc

SEQ ID NO: 108162 - DNA, 25 bp, probe
atggaaggtaagttctgtcgttctt

SEQ ID NO: 108163 - DNA, 25 bp, probe
ccacaaggaagaagagaagagactt

SEQ ID NO: 108164 - DNA, 25 bp, probe
aagatggaaggtaagttctgtcgtt

SEQ ID NO: 108165 - DNA, 25 bp, probe
ctatgactaactggaagaggacacg

SEQ ID NO: 108166 - DNA, 25 bp, probe
gatggaaggtaagttctgtcgttct

SEQ ID NO: 108167 - DNA, 25 bp, probe
gaccacaaggaagaagagaagagac

SEQ ID NO: 108168 - DNA, 25 bp, probe
agatggaaggtaagttctgtcgttc

SEQ ID NO: 108169 - DNA, 25 bp, probe
gaagatggaaggtaagttctgtcgt

SEQ ID NO: 108170 - DNA, 25 bp, probe
accacaaggaagaagagaagagact

SEQ ID NO: 108171 - DNA, 25 bp, probe
gaatggacaagaagccaacttagaa

SEQ ID NO: 108172 - DNA, 25 bp, probe
cctatgactaactggaagaggacac

SEQ ID NO: 108173 - DNA, 25 bp, probe
gacaagaagccaacttagaaagaag

SEQ ID NO: 108174 - DNA, 25 bp, probe
ggaagatggaaggtaagttctgtcg

SEQ ID NO: 108175 - DNA, 25 bp, probe
caagcagtagagagcgatattggag

SEQ ID NO: 108176 - DNA, 25 bp, probe
agtagagagcgatattggagtcttt

SEQ ID NO: 108177 - DNA, 25 bp, probe
aagcagtagagagcgatattggagt

SEQ ID NO: 108178 - DNA, 25 bp, probe
acaagaagccaacttagaaagaagg

SEQ ID NO: 108179 - DNA, 25 bp, probe
ggacaagaagccaacttagaaagaa

SEQ ID NO: 108180 - DNA, 25 bp, probe
ccatcaaaccagtgaatttctcaat

SEQ ID NO: 108181 - DNA, 25 bp, probe
aaaccagtgaatttctcaatcttgc

SEQ ID NO: 108182 - DNA, 25 bp, probe
agaaggaagatggaaggtaagttct

SEQ ID NO: 108183 - DNA, 25 bp, probe
gaatttctcaatcttgcctcacagt

SEQ ID NO: 108184 - DNA, 25 bp, probe
cttaagttacaagagaccacatcca

SEQ ID NO: 108185 - DNA, 25 bp, probe
aaacccaagtcttagttgctacaag

SEQ ID NO: 108186 - DNA, 25 bp, probe
caaaccagtgaatttctcaatcttg

SEQ ID NO: 108187 - DNA, 25 bp, probe
tcaaaccagtgaatttctcaatctt

SEQ ID NO: 108188 - DNA, 25 bp, probe
gaaggtaagttctgtcgttctttcc

SEQ ID NO: 108189 - DNA, 25 bp, probe
ggaaggtaagttctgtcgttctttc

SEQ ID NO: 108190 - DNA, 25 bp, probe
atcaaaccagtgaatttctcaatct

SEQ ID NO: 108191 - DNA, 25 bp, probe
catcaaaccagtgaatttctcaatc

SEQ ID NO: 108192 - DNA, 25 bp, probe
caaacccaagtcttagttgctacaa

SEQ ID NO: 108193 - DNA, 25 bp, probe
caagaagccaacttagaaagaaggg

SEQ ID NO: 108194 - DNA, 25 bp, probe
ttgtatcttgttgtatgactgccat

SEQ ID NO: 108195 - DNA, 25 bp, probe
tatcttgttgtatgactgccatgag

SEQ ID NO: 108196 - DNA, 25 bp, probe
gtatcttgttgtatgactgccatga

SEQ ID NO: 108197 - DNA, 25 bp, probe
tgtatgatgtatgagaagacagagt

SEQ ID NO: 108198 - DNA, 25 bp, probe
tgtatcttgttgtatgactgccatg

SEQ ID NO: 108199 - DNA, 25 bp, probe
gtatgatgtatgagaagacagagtc

SEQ ID NO: 108200 - DNA, 25 bp, probe
gaagtgagcaaataaagtgaggaag

SEQ ID NO: 108201 - DNA, 25 bp, probe
gacagaagtgagcaaataaagtgag

SEQ ID NO: 108202 - DNA, 25 bp, probe
gtgagcaaataaagtgaggaagaaa

SEQ ID NO: 108203 - DNA, 25 bp, probe
ttgtatgatgtatgagaagacagag

SEQ ID NO: 108204 - DNA, 25 bp, probe
agtgagcaaataaagtgaggaagaa

SEQ ID NO: 108205 - DNA, 25 bp, probe
aagtgagcaaataaagtgaggaaga

SEQ ID NO: 108206 - DNA, 25 bp, probe
agaagtgagcaaataaagtgaggaa

SEQ ID NO: 108207 - DNA, 25 bp, probe
tgacagaagtgagcaaataaagtga

SEQ ID NO: 108208 - DNA, 25 bp, probe
gtgacagaagtgagcaaataaagtg

SEQ ID NO: 108209 - DNA, 25 bp, probe
tttgtatcttgttgtatgactgcca

SEQ ID NO: 108210 - DNA, 25 bp, probe
cagaagtgagcaaataaagtgagga

SEQ ID NO: 108211 - DNA, 25 bp, probe
tgagcaaataaagtgaggaagaaat

SEQ ID NO: 108212 - DNA, 25 bp, probe
acagaagtgagcaaataaagtgagg

SEQ ID NO: 108213 - DNA, 25 bp, probe
cttgttgtatgactgccatgagttc

SEQ ID NO: 108214 - DNA, 25 bp, probe
agcaaataaagtgaggaagaaatct

SEQ ID NO: 108215 - DNA, 25 bp, probe
atcttgttgtatgactgccatgagt

SEQ ID NO: 108216 - DNA, 25 bp, probe
gagcaaataaagtgaggaagaaatc

SEQ ID NO: 108217 - DNA, 25 bp, probe
attgtatgatgtatgagaagacaga

SEQ ID NO: 108218 - DNA, 25 bp, probe
tcttgttgtatgactgccatgagtt

SEQ ID NO: 108219 - DNA, 25 bp, probe
cgtgacagaagtgagcaaataaagt

SEQ ID NO: 108220 - DNA, 25 bp, probe
aattgtatgatgtatgagaagacag

SEQ ID NO: 108221 - DNA, 25 bp, probe
gcaaataaagtgaggaagaaatcta

SEQ ID NO: 108222 - DNA, 25 bp, probe
ttgttgtatgactgccatgagttcc

SEQ ID NO: 108223 - DNA, 25 bp, probe
ggcttatactagctcctgacttagg

SEQ ID NO: 108224 - DNA, 25 bp, probe
gcgtgacagaagtgagcaaataaag

SEQ ID NO: 108225 - DNA, 25 bp, probe
gttccaccagaaagccactctattt

SEQ ID NO: 108226 - DNA, 25 bp, probe
tatgagaagacagagtctcctagtt

SEQ ID NO: 108227 - DNA, 25 bp, probe
gtatgagaagacagagtctcctagt

SEQ ID NO: 108228 - DNA, 25 bp, probe
tgtatgagaagacagagtctcctag

SEQ ID NO: 108229 - DNA, 25 bp, probe
atgtatgagaagacagagtctccta

SEQ ID NO: 108230 - DNA, 25 bp, probe
atgatgtatgagaagacagagtctc

SEQ ID NO: 108231 - DNA, 25 bp, probe
ttttgtatcttgttgtatgactgcc

SEQ ID NO: 108232 - DNA, 25 bp, probe
gatgtatgagaagacagagtctcct

SEQ ID NO: 108233 - DNA, 25 bp, probe
gttgtatgactgccatgagttccac

SEQ ID NO: 108234 - DNA, 25 bp, probe
tgatgtatgagaagacagagtctcc

SEQ ID NO: 108235 - DNA, 25 bp, probe
gttttgtatcttgttgtatgactgc

SEQ ID NO: 108236 - DNA, 25 bp, probe
tatgatgtatgagaagacagagtct

SEQ ID NO: 108237 - DNA, 25 bp, probe
tgttcactggggattctttcttttg

SEQ ID NO: 108238 - DNA, 25 bp, probe
aagaagacagaagaggcagaataag

SEQ ID NO: 108239 - DNA, 25 bp, probe
gaagaagacagaagaggcagaataa

SEQ ID NO: 108240 - DNA, 25 bp, probe
agatggagatgctatcaagaagaag

SEQ ID NO: 108241 - DNA, 25 bp, probe
gatggagatgctatcaagaagaagt

SEQ ID NO: 108242 - DNA, 25 bp, probe
atggagatgctatcaagaagaagtt

SEQ ID NO: 108243 - DNA, 25 bp, probe
aagatggagatgctatcaagaagaa

SEQ ID NO: 108244 - DNA, 25 bp, probe
gaagaggcagaataaggaagaagac

SEQ ID NO: 108245 - DNA, 25 bp, probe
agaagaggcagaataaggaagaaga

SEQ ID NO: 108246 - DNA, 25 bp, probe
cagaagaggcagaataaggaagaag

SEQ ID NO: 108247 - DNA, 25 bp, probe
acagaagaggcagaataaggaagaa

SEQ ID NO: 108248 - DNA, 25 bp, probe
aagacagaagaggcagaataaggaa

SEQ ID NO: 108249 - DNA, 25 bp, probe
gacagaagaggcagaataaggaaga

SEQ ID NO: 108250 - DNA, 25 bp, probe
agacagaagaggcagaataaggaag

SEQ ID NO: 108251 - DNA, 25 bp, probe
gaagacagaagaggcagaataagga

SEQ ID NO: 108252 - DNA, 25 bp, probe
agaagacagaagaggcagaataagg

SEQ ID NO: 108253 - DNA, 25 bp, probe
cgaagaagacagaagaggcagaata

SEQ ID NO: 108254 - DNA, 25 bp, probe
aagaggcagaataaggaagaagacg

SEQ ID NO: 108255 - DNA, 25 bp, probe
atcacatacaagatcattcggcatg

SEQ ID NO: 108256 - DNA, 25 bp, probe
agaataaggaagaagacgttactcg

SEQ ID NO: 108257 - DNA, 25 bp, probe
gcagaataaggaagaagacgttact

SEQ ID NO: 108258 - DNA, 25 bp, probe
tggagatgctatcaagaagaagttt

SEQ ID NO: 108259 - DNA, 25 bp, probe
aaagatggagatgctatcaagaaga

SEQ ID NO: 108260 - DNA, 25 bp, probe
cagaataaggaagaagacgttactc

SEQ ID NO: 108261 - DNA, 25 bp, probe
gatgctatcaagaagaagtttgtgg

SEQ ID NO: 108262 - DNA, 25 bp, probe
ggcagaataaggaagaagacgttac

SEQ ID NO: 108263 - DNA, 25 bp, probe
ggagatgctatcaagaagaagtttg

SEQ ID NO: 108264 - DNA, 25 bp, probe
atgctatcaagaagaagtttgtgga

SEQ ID NO: 108265 - DNA, 25 bp, probe
aggcagaataaggaagaagacgtta

SEQ ID NO: 108266 - DNA, 25 bp, probe
cactttgacagaggagaagattgag

SEQ ID NO: 108267 - DNA, 25 bp, probe
tgaagatgtccacaagaaatagatg

SEQ ID NO: 108268 - DNA, 25 bp, probe
agatgctatcaagaagaagtttgtg

SEQ ID NO: 108269 - DNA, 25 bp, probe
atcactttgacagaggagaagattg

SEQ ID NO: 108270 - DNA, 25 bp, probe
gagatgctatcaagaagaagtttgt

SEQ ID NO: 108271 - DNA, 25 bp, probe
tatcactttgacagaggagaagatt

SEQ ID NO: 108272 - DNA, 25 bp, probe
tgctatcaagaagaagtttgtggac

SEQ ID NO: 108273 - DNA, 25 bp, probe
atatcactttgacagaggagaagat

SEQ ID NO: 108274 - DNA, 25 bp, probe
tcactttgacagaggagaagattga

SEQ ID NO: 108275 - DNA, 25 bp, probe
gcatgaagatgtccacaagaaatag

SEQ ID NO: 108276 - DNA, 25 bp, probe
ctatcaagaagaagtttgtggaccg

SEQ ID NO: 108277 - DNA, 25 bp, probe
actttgacagaggagaagattgagg

SEQ ID NO: 108278 - DNA, 25 bp, probe
atgaagatgtccacaagaaatagat

SEQ ID NO: 108279 - DNA, 25 bp, probe
atacaagatcattcggcatgaagat

SEQ ID NO: 108280 - DNA, 25 bp, probe
tatatcactttgacagaggagaaga

SEQ ID NO: 108281 - DNA, 25 bp, probe
caagaaatagatgtgccctacagac

SEQ ID NO: 108282 - DNA, 25 bp, probe
ttaactaactcatgttcattcagcg

SEQ ID NO: 108283 - DNA, 25 bp, probe
taactaactcatgttcattcagcgt

SEQ ID NO: 108284 - DNA, 25 bp, probe
aagaagagagaccgagctaattaac

SEQ ID NO: 108285 - DNA, 25 bp, probe
gagagaccgagctaattaactaact

SEQ ID NO: 108286 - DNA, 25 bp, probe
agagagaccgagctaattaactaac

SEQ ID NO: 108287 - DNA, 25 bp, probe
gaagagagaccgagctaattaacta

SEQ ID NO: 108288 - DNA, 25 bp, probe
agaagagagaccgagctaattaact

SEQ ID NO: 108289 - DNA, 25 bp, probe
aagagagaccgagctaattaactaa

SEQ ID NO: 108290 - DNA, 25 bp, probe
aactaactcatgttcattcagcgtg

SEQ ID NO: 108291 - DNA, 25 bp, probe
gagaccgagctaattaactaactca

SEQ ID NO: 108292 - DNA, 25 bp, probe
accgagctaattaactaactcatgt

SEQ ID NO: 108293 - DNA, 25 bp, probe
agagaccgagctaattaactaactc

SEQ ID NO: 108294 - DNA, 25 bp, probe
atgccttgaaaccagaaatctaatc

SEQ ID NO: 108295 - DNA, 25 bp, probe
gaccgagctaattaactaactcatg

SEQ ID NO: 108296 - DNA, 25 bp, probe
agaccgagctaattaactaactcat

SEQ ID NO: 108297 - DNA, 25 bp, probe
taatctctgtttaggtgcctctact

SEQ ID NO: 108298 - DNA, 25 bp, probe
gccttgaaaccagaaatctaatctc

SEQ ID NO: 108299 - DNA, 25 bp, probe
ccgagctaattaactaactcatgtt

SEQ ID NO: 108300 - DNA, 25 bp, probe
tgccttgaaaccagaaatctaatct

SEQ ID NO: 108301 - DNA, 25 bp, probe
attaactaactcatgttcattcagc

SEQ ID NO: 108302 - DNA, 25 bp, probe
aatctctgtttaggtgcctctactt

SEQ ID NO: 108303 - DNA, 25 bp, probe
ctttgccatcaagaaacattcagac

SEQ ID NO: 108304 - DNA, 25 bp, probe
catgccttgaaaccagaaatctaat

SEQ ID NO: 108305 - DNA, 25 bp, probe
ccttgaaaccagaaatctaatctct

SEQ ID NO: 108306 - DNA, 25 bp, probe
atctctgtttaggtgcctctacttg

SEQ ID NO: 108307 - DNA, 25 bp, probe
acatgccttgaaaccagaaatctaa

SEQ ID NO: 108308 - DNA, 25 bp, probe
ctaatctctgtttaggtgcctctac

SEQ ID NO: 108309 - DNA, 25 bp, probe
tctaatctctgtttaggtgcctcta

SEQ ID NO: 108310 - DNA, 25 bp, probe
aatctaatctctgtttaggtgcctc

SEQ ID NO: 108311 - DNA, 25 bp, probe
aaatctaatctctgtttaggtgcct

SEQ ID NO: 108312 - DNA, 25 bp, probe
gaaatctaatctctgtttaggtgcc

SEQ ID NO: 108313 - DNA, 25 bp, probe
cgagctaattaactaactcatgttc

SEQ ID NO: 108314 - DNA, 25 bp, probe
atctaatctctgtttaggtgcctct

SEQ ID NO: 108315 - DNA, 25 bp, probe
gacatgccttgaaaccagaaatcta

SEQ ID NO: 108316 - DNA, 25 bp, probe
atcaagaaacattcagaccagggaa

SEQ ID NO: 108317 - DNA, 25 bp, probe
gaaagaagagagaccgagctaatta

SEQ ID NO: 108318 - DNA, 25 bp, probe
aaagaagagagaccgagctaattaa

SEQ ID NO: 108319 - DNA, 25 bp, probe
agaaatctaatctctgtttaggtgc

SEQ ID NO: 108320 - DNA, 25 bp, probe
tttgccatcaagaaacattcagacc

SEQ ID NO: 108321 - DNA, 25 bp, probe
tctttgaacacacctctctcctttc

SEQ ID NO: 108322 - DNA, 25 bp, probe
gtctttgaacacacctctctccttt

SEQ ID NO: 108323 - DNA, 25 bp, probe
taactcatgttcattcagcgtgctt

SEQ ID NO: 108324 - DNA, 25 bp, probe
cagaagcattacccataggtcttaa

SEQ ID NO: 108325 - DNA, 25 bp, probe
gctttgccatcaagaaacattcaga

SEQ ID NO: 108326 - DNA, 25 bp, probe
tagaatgtcagtccaatctccaatg

SEQ ID NO: 108327 - DNA, 25 bp, probe
gtagaatgtcagtccaatctccaat

SEQ ID NO: 108328 - DNA, 25 bp, probe
cataacacaggagaattggaaggag

SEQ ID NO: 108329 - DNA, 25 bp, probe
ctctaaccataacacaggagaattg

SEQ ID NO: 108330 - DNA, 25 bp, probe
gaatgtcagtccaatctccaatgag

SEQ ID NO: 108331 - DNA, 25 bp, probe
cgaccatgtgccatatatcaattat

SEQ ID NO: 108332 - DNA, 25 bp, probe
ttcctcatggcttcatctctatctt

SEQ ID NO: 108333 - DNA, 25 bp, probe
agaatgtcagtccaatctccaatga

SEQ ID NO: 108334 - DNA, 25 bp, probe
ggtagaatgtcagtccaatctccaa

SEQ ID NO: 108335 - DNA, 25 bp, probe
tcatacattagacagtatcagccaa

SEQ ID NO: 108336 - DNA, 25 bp, probe
ttcatacattagacagtatcagcca

SEQ ID NO: 108337 - DNA, 25 bp, probe
gttcatacattagacagtatcagcc

SEQ ID NO: 108338 - DNA, 25 bp, probe
taaccataacacaggagaattggaa

SEQ ID NO: 108339 - DNA, 25 bp, probe
ctaaccataacacaggagaattgga

SEQ ID NO: 108340 - DNA, 25 bp, probe
tctaaccataacacaggagaattgg

SEQ ID NO: 108341 - DNA, 25 bp, probe
tcgaccatgtgccatatatcaatta

SEQ ID NO: 108342 - DNA, 25 bp, probe
tatcgaccatgtgccatatatcaat

SEQ ID NO: 108343 - DNA, 25 bp, probe
ataacacaggagaattggaaggagc

SEQ ID NO: 108344 - DNA, 25 bp, probe
atcgaccatgtgccatatatcaatt

SEQ ID NO: 108345 - DNA, 25 bp, probe
gtatcgaccatgtgccatatatcaa

SEQ ID NO: 108346 - DNA, 25 bp, probe
ttgaagtgcagctattatgtggtat

SEQ ID NO: 108347 - DNA, 25 bp, probe
aaccataacacaggagaattggaag

SEQ ID NO: 108348 - DNA, 25 bp, probe
ctcttccctattatctttccctgtg

SEQ ID NO: 108349 - DNA, 25 bp, probe
tctcttccctattatctttccctgt

SEQ ID NO: 108350 - DNA, 25 bp, probe
tgaagtgcagctattatgtggtatc

SEQ ID NO: 108351 - DNA, 25 bp, probe
tcttccctattatctttccctgtgt

SEQ ID NO: 108352 - DNA, 25 bp, probe
aagagaatcctgtcgtttaatgcta

SEQ ID NO: 108353 - DNA, 25 bp, probe
agagaatcctgtcgtttaatgctat

SEQ ID NO: 108354 - DNA, 25 bp, probe
agttcatacattagacagtatcagc

SEQ ID NO: 108355 - DNA, 25 bp, probe
cttccctattatctttccctgtgta

SEQ ID NO: 108356 - DNA, 25 bp, probe
gtgtatcgaccatgtgccatatatc

SEQ ID NO: 108357 - DNA, 25 bp, probe
atctcttccctattatctttccctg

SEQ ID NO: 108358 - DNA, 25 bp, probe
catctcttccctattatctttccct

SEQ ID NO: 108359 - DNA, 25 bp, probe
tcatctcttccctattatctttccc

SEQ ID NO: 108360 - DNA, 25 bp, probe
ccctcatctcttccctattatcttt

SEQ ID NO: 108361 - DNA, 25 bp, probe
tgtatcgaccatgtgccatatatca

SEQ ID NO: 108362 - DNA, 25 bp, probe
gaagtgcagctattatgtggtatcc

SEQ ID NO: 108363 - DNA, 25 bp, probe
aaccaagagaatcctgtcgtttaat

SEQ ID NO: 108364 - DNA, 25 bp, probe
accaagagaatcctgtcgtttaatg

SEQ ID NO: 108365 - DNA, 25 bp, probe
tcatctagtgagaccaacttactaa

SEQ ID NO: 108366 - DNA, 25 bp, probe
tcctcctttctacccataaattaca

SEQ ID NO: 108367 - DNA, 25 bp, probe
tgtgtatcgaccatgtgccatatat

SEQ ID NO: 108368 - DNA, 25 bp, probe
atgtgtatcgaccatgtgccatata

SEQ ID NO: 108369 - DNA, 25 bp, probe
caagagaatcctgtcgtttaatgct

SEQ ID NO: 108370 - DNA, 25 bp, probe
cacatcagtaccatcctcttagaag

SEQ ID NO: 108371 - DNA, 25 bp, probe
acatcagtaccatcctcttagaaga

SEQ ID NO: 108372 - DNA, 25 bp, probe
aatagatactggtgacgacgaagac

SEQ ID NO: 108373 - DNA, 25 bp, probe
gcggttaataatgcctgtgaactaa

SEQ ID NO: 108374 - DNA, 25 bp, probe
catcagtaccatcctcttagaagaa

SEQ ID NO: 108375 - DNA, 25 bp, probe
gcacatcagtaccatcctcttagaa

SEQ ID NO: 108376 - DNA, 25 bp, probe
atagatactggtgacgacgaagact

SEQ ID NO: 108377 - DNA, 25 bp, probe
aatgcggttaataatgcctgtgaac

SEQ ID NO: 108378 - DNA, 25 bp, probe
tgcggttaataatgcctgtgaacta

SEQ ID NO: 108379 - DNA, 25 bp, probe
gaagagattgaaatggaagaagtgg

SEQ ID NO: 108380 - DNA, 25 bp, probe
aagagattgaaatggaagaagtggt

SEQ ID NO: 108381 - DNA, 25 bp, probe
tagatactggtgacgacgaagactt

SEQ ID NO: 108382 - DNA, 25 bp, probe
agaaactggagatgctatacaatga

SEQ ID NO: 108383 - DNA, 25 bp, probe
cagcacatcagtaccatcctcttag

SEQ ID NO: 108384 - DNA, 25 bp, probe
atacaatgaaatcaccaagacacag

SEQ ID NO: 108385 - DNA, 25 bp, probe
gctatacaatgaaatcaccaagaca

SEQ ID NO: 108386 - DNA, 25 bp, probe
tgctatacaatgaaatcaccaagac

SEQ ID NO: 108387 - DNA, 25 bp, probe
ggagatgctatacaatgaaatcacc

SEQ ID NO: 108388 - DNA, 25 bp, probe
agcacatcagtaccatcctcttaga

SEQ ID NO: 108389 - DNA, 25 bp, probe
agagattgaaatggaagaagtggtg

SEQ ID NO: 108390 - DNA, 25 bp, probe
agaagagattgaaatggaagaagtg

SEQ ID NO: 108391 - DNA, 25 bp, probe
gaaatagatactggtgacgacgaag

SEQ ID NO: 108392 - DNA, 25 bp, probe
gaaactggagatgctatacaatgaa

SEQ ID NO: 108393 - DNA, 25 bp, probe
gagattgaaatggaagaagtggtgt

SEQ ID NO: 108394 - DNA, 25 bp, probe
cggttaataatgcctgtgaactaaa

SEQ ID NO: 108395 - DNA, 25 bp, probe
aaatagatactggtgacgacgaaga

SEQ ID NO: 108396 - DNA, 25 bp, probe
gagatgctatacaatgaaatcacca

SEQ ID NO: 108397 - DNA, 25 bp, probe
tggagatgctatacaatgaaatcac

SEQ ID NO: 108398 - DNA, 25 bp, probe
agattgaaatggaagaagtggtgtg

SEQ ID NO: 108399 - DNA, 25 bp, probe
actggagatgctatacaatgaaatc

SEQ ID NO: 108400 - DNA, 25 bp, probe
aaactggagatgctatacaatgaaa

SEQ ID NO: 108401 - DNA, 25 bp, probe
ctggagatgctatacaatgaaatca

SEQ ID NO: 108402 - DNA, 25 bp, probe
atgcggttaataatgcctgtgaact

SEQ ID NO: 108403 - DNA, 25 bp, probe
tgaaatagatactggtgacgacgaa

SEQ ID NO: 108404 - DNA, 25 bp, probe
tgaagaagagattgaaatggaagaa

SEQ ID NO: 108405 - DNA, 25 bp, probe
atgctatacaatgaaatcaccaaga

SEQ ID NO: 108406 - DNA, 25 bp, probe
attgaaatggaagaagtggtgtgtc

SEQ ID NO: 108407 - DNA, 25 bp, probe
gattgaaatggaagaagtggtgtgt

SEQ ID NO: 108408 - DNA, 25 bp, probe
aagaagagattgaaatggaagaagt

SEQ ID NO: 108409 - DNA, 25 bp, probe
aactggagatgctatacaatgaaat

SEQ ID NO: 108410 - DNA, 25 bp, probe
agatgctatacaatgaaatcaccaa

SEQ ID NO: 108411 - DNA, 25 bp, probe
tatacaatgaaatcaccaagacaca

SEQ ID NO: 108412 - DNA, 25 bp, probe
atgaagaagagattgaaatggaaga

SEQ ID NO: 108413 - DNA, 25 bp, probe
gatgctatacaatgaaatcaccaag

SEQ ID NO: 108414 - DNA, 25 bp, probe
ttatggactctcagacactcagaag

SEQ ID NO: 108415 - DNA, 25 bp, probe
ggaatggagaatattggtggaatct

SEQ ID NO: 108416 - DNA, 25 bp, probe
gaatggagaatattggtggaatctt

SEQ ID NO: 108417 - DNA, 25 bp, probe
ctttgtggttcttatttgtggctta

SEQ ID NO: 108418 - DNA, 25 bp, probe
aatctttgtggttcttatttgtggc

SEQ ID NO: 108419 - DNA, 25 bp, probe
tgtggttcttatttgtggcttaatc

SEQ ID NO: 108420 - DNA, 25 bp, probe
tttgtggttcttatttgtggcttaa

SEQ ID NO: 108421 - DNA, 25 bp, probe
ttgtggttcttatttgtggcttaat

SEQ ID NO: 108422 - DNA, 25 bp, probe
gttcttatttgtggcttaatcgtgg

SEQ ID NO: 108423 - DNA, 25 bp, probe
ggttcttatttgtggcttaatcgtg

SEQ ID NO: 108424 - DNA, 25 bp, probe
gtggttcttatttgtggcttaatcg

SEQ ID NO: 108425 - DNA, 25 bp, probe
ggtggaatctttgtggttcttattt

SEQ ID NO: 108426 - DNA, 25 bp, probe
atattggtggaatctttgtggttct

SEQ ID NO: 108427 - DNA, 25 bp, probe
atctttgtggttcttatttgtggct

SEQ ID NO: 108428 - DNA, 25 bp, probe
tggtggaatctttgtggttcttatt

SEQ ID NO: 108429 - DNA, 25 bp, probe
ttggtggaatctttgtggttcttat

SEQ ID NO: 108430 - DNA, 25 bp, probe
attggtggaatctttgtggttctta

SEQ ID NO: 108431 - DNA, 25 bp, probe
tattggtggaatctttgtggttctt

SEQ ID NO: 108432 - DNA, 25 bp, probe
tggttcttatttgtggcttaatcgt

SEQ ID NO: 108433 - DNA, 25 bp, probe
tctttgtggttcttatttgtggctt

SEQ ID NO: 108434 - DNA, 25 bp, probe
tggaatctttgtggttcttatttgt

SEQ ID NO: 108435 - DNA, 25 bp, probe
tttatggactctcagacactcagaa

SEQ ID NO: 108436 - DNA, 25 bp, probe
gaatctttgtggttcttatttgtgg

SEQ ID NO: 108437 - DNA, 25 bp, probe
ggaatctttgtggttcttatttgtg

SEQ ID NO: 108438 - DNA, 25 bp, probe
gtggaatctttgtggttcttatttg

SEQ ID NO: 108439 - DNA, 25 bp, probe
tatggactctcagacactcagaagc

SEQ ID NO: 108440 - DNA, 25 bp, probe
ttcttatttgtggcttaatcgtggc

SEQ ID NO: 108441 - DNA, 25 bp, probe
gaatattggtggaatctttgtggtt

SEQ ID NO: 108442 - DNA, 25 bp, probe
aatattggtggaatctttgtggttc

SEQ ID NO: 108443 - DNA, 25 bp, probe
gagaatattggtggaatctttgtgg

SEQ ID NO: 108444 - DNA, 25 bp, probe
ggagaatattggtggaatctttgtg

SEQ ID NO: 108445 - DNA, 25 bp, probe
tggagaatattggtggaatctttgt

SEQ ID NO: 108446 - DNA, 25 bp, probe
agaatattggtggaatctttgtggt

SEQ ID NO: 108447 - DNA, 25 bp, probe
gggaatggagaatattggtggaatc

SEQ ID NO: 108448 - DNA, 25 bp, probe
atggagaatattggtggaatctttg

SEQ ID NO: 108449 - DNA, 25 bp, probe
tgggaatggagaatattggtggaat

SEQ ID NO: 108450 - DNA, 25 bp, probe
aatggagaatattggtggaatcttt

SEQ ID NO: 108451 - DNA, 25 bp, probe
gactctcagacactcagaagcaact

SEQ ID NO: 108452 - DNA, 25 bp, probe
aaggaggaagatcacagagctaaag

SEQ ID NO: 108453 - DNA, 25 bp, probe
ctgggaatggagaatattggtggaa

SEQ ID NO: 108454 - DNA, 25 bp, probe
caaggaggaagatcacagagctaaa

SEQ ID NO: 108455 - DNA, 25 bp, probe
ccaaggaggaagatcacagagctaa

SEQ ID NO: 108456 - DNA, 25 bp, probe
ttttatggactctcagacactcaga

SEQ ID NO: 108457 - DNA, 25 bp, probe
actctcagacactcagaagcaactg

SEQ ID NO: 108458 - DNA, 25 bp, probe
cctgaagatatggaaccacttgaat

SEQ ID NO: 108459 - DNA, 25 bp, probe
ctgaagatatggaaccacttgaatt

SEQ ID NO: 108460 - DNA, 25 bp, probe
gaacatctcgtgaagagcataactt

SEQ ID NO: 108461 - DNA, 25 bp, probe
aacatctcgtgaagagcataacttg

SEQ ID NO: 108462 - DNA, 25 bp, probe
agaacatctcgtgaagagcataact

SEQ ID NO: 108463 - DNA, 25 bp, probe
cagaacatctcgtgaagagcataac

SEQ ID NO: 108464 - DNA, 25 bp, probe
tgaagatatggaaccacttgaatta

SEQ ID NO: 108465 - DNA, 25 bp, probe
ttcctctatgatggagaagtatgaa

SEQ ID NO: 108466 - DNA, 25 bp, probe
attcctctatgatggagaagtatga

SEQ ID NO: 108467 - DNA, 25 bp, probe
tgataccaagaaacttaactaccgt

SEQ ID NO: 108468 - DNA, 25 bp, probe
gtgataccaagaaacttaactaccg

SEQ ID NO: 108469 - DNA, 25 bp, probe
aaattcccaaacatctcttatcctg

SEQ ID NO: 108470 - DNA, 25 bp, probe
ccagaacatctcgtgaagagcataa

SEQ ID NO: 108471 - DNA, 25 bp, probe
aattcccaaacatctcttatcctgc

SEQ ID NO: 108472 - DNA, 25 bp, probe
aattgcatacatagagacgtgaagc

SEQ ID NO: 108473 - DNA, 25 bp, probe
gaagatatggaaccacttgaattaa

SEQ ID NO: 108474 - DNA, 25 bp, probe
gataccaagaaacttaactaccgtt

SEQ ID NO: 108475 - DNA, 25 bp, probe
acatctcgtgaagagcataacttgg

SEQ ID NO: 108476 - DNA, 25 bp, probe
tgtgataccaagaaacttaactacc

SEQ ID NO: 108477 - DNA, 25 bp, probe
atcagagaaatagaggatttggcaa

SEQ ID NO: 108478 - DNA, 25 bp, probe
aagaacacaacaaaccaacaaggaa

SEQ ID NO: 108479 - DNA, 25 bp, probe
aaagaacacaacaaaccaacaagga

SEQ ID NO: 108480 - DNA, 25 bp, probe
catcagagaaatagaggatttggca

SEQ ID NO: 108481 - DNA, 25 bp, probe
acatcagagaaatagaggatttggc

SEQ ID NO: 108482 - DNA, 25 bp, probe
ctgctttacagaaacatccaagttg

SEQ ID NO: 108483 - DNA, 25 bp, probe
tcagagaaatagaggatttggcaaa

SEQ ID NO: 108484 - DNA, 25 bp, probe
gaacacaacaaaccaacaaggaaga

SEQ ID NO: 108485 - DNA, 25 bp, probe
agaacacaacaaaccaacaaggaag

SEQ ID NO: 108486 - DNA, 25 bp, probe
actgctttacagaaacatccaagtt

SEQ ID NO: 108487 - DNA, 25 bp, probe
aacatcagagaaatagaggatttgg

SEQ ID NO: 108488 - DNA, 25 bp, probe
caattgcatacatagagacgtgaag

SEQ ID NO: 108489 - DNA, 25 bp, probe
aaacatttaaaggagctaggagaca

SEQ ID NO: 108490 - DNA, 25 bp, probe
aacatttaaaggagctaggagacat

SEQ ID NO: 108491 - DNA, 25 bp, probe
caaacatttaaaggagctaggagac

SEQ ID NO: 108492 - DNA, 25 bp, probe
caacaaggaagaccctaagaaagag

SEQ ID NO: 108493 - DNA, 25 bp, probe
acaattgcatacatagagacgtgaa

SEQ ID NO: 108494 - DNA, 25 bp, probe
ccaaacatttaaaggagctaggaga

SEQ ID NO: 108495 - DNA, 25 bp, probe
gtactactgtgataccaagaaactt

SEQ ID NO: 108496 - DNA, 25 bp, probe
ttaaaggagctaggagacatgattt

SEQ ID NO: 108497 - DNA, 25 bp, probe
tttaaaggagctaggagacatgatt

SEQ ID NO: 108498 - DNA, 25 bp, probe
aacacaacaaaccaacaaggaagac

SEQ ID NO: 108499 - DNA, 25 bp, probe
aacacaattgcatacatagagacgt

SEQ ID NO: 108500 - DNA, 25 bp, probe
atttaaaggagctaggagacatgat

SEQ ID NO: 108501 - DNA, 25 bp, probe
catttaaaggagctaggagacatga

SEQ ID NO: 108502 - DNA, 25 bp, probe
tcacctccatcttccacaccttttc

SEQ ID NO: 108503 - DNA, 25 bp, probe
gtcacctccatcttccacacctttt

SEQ ID NO: 108504 - DNA, 25 bp, probe
ctagcctagaatcctagcctagaag

SEQ ID NO: 108505 - DNA, 25 bp, probe
cctagcctagaatcctagcctagaa

SEQ ID NO: 108506 - DNA, 25 bp, probe
tagcctagaatcctagcctagaagc

SEQ ID NO: 108507 - DNA, 25 bp, probe
ccaagatgaatgtgggaatcagaaa

SEQ ID NO: 108508 - DNA, 25 bp, probe
taccaagatgaatgtgggaatcaga

SEQ ID NO: 108509 - DNA, 25 bp, probe
gtaccaagatgaatgtgggaatcag

SEQ ID NO: 108510 - DNA, 25 bp, probe
accaagatgaatgtgggaatcagaa

SEQ ID NO: 108511 - DNA, 25 bp, probe
caagatgaatgtgggaatcagaaaa

SEQ ID NO: 108512 - DNA, 25 bp, probe
tagaatcctagcctagaagccctct

SEQ ID NO: 108513 - DNA, 25 bp, probe
gcctagcctagaatcctagcctaga

SEQ ID NO: 108514 - DNA, 25 bp, probe
ctagaatcctagcctagaagccctc

SEQ ID NO: 108515 - DNA, 25 bp, probe
gacaactctctagggacacctgtac

SEQ ID NO: 108516 - DNA, 25 bp, probe
aatcctagcctagaagccctctctc

SEQ ID NO: 108517 - DNA, 25 bp, probe
gaatcctagcctagaagccctctct

SEQ ID NO: 108518 - DNA, 25 bp, probe
agaatcctagcctagaagccctctc

SEQ ID NO: 108519 - DNA, 25 bp, probe
agcctagaatcctagcctagaagcc

SEQ ID NO: 108520 - DNA, 25 bp, probe
cctagaatcctagcctagaagccct

SEQ ID NO: 108521 - DNA, 25 bp, probe
ggacaactctctagggacacctgta

SEQ ID NO: 108522 - DNA, 25 bp, probe
aactctctagggacacctgtaccag

SEQ ID NO: 108523 - DNA, 25 bp, probe
caactctctagggacacctgtacca

SEQ ID NO: 108524 - DNA, 25 bp, probe
acaactctctagggacacctgtacc

SEQ ID NO: 108525 - DNA, 25 bp, probe
agctcagtgagggacaactctctag

SEQ ID NO: 108526 - DNA, 25 bp, probe
ctcagtgagggacaactctctaggg

SEQ ID NO: 108527 - DNA, 25 bp, probe
ggtaccaagatgaatgtgggaatca

SEQ ID NO: 108528 - DNA, 25 bp, probe
gggtaccaagatgaatgtgggaatc

SEQ ID NO: 108529 - DNA, 25 bp, probe
tgggtaccaagatgaatgtgggaat

SEQ ID NO: 108530 - DNA, 25 bp, probe
ggcctagcctagaatcctagcctag

SEQ ID NO: 108531 - DNA, 25 bp, probe
ctgggtaccaagatgaatgtgggaa

SEQ ID NO: 108532 - DNA, 25 bp, probe
gagctcagtgagggacaactctcta

SEQ ID NO: 108533 - DNA, 25 bp, probe
gtgatccagttctaagtgtcatctt

SEQ ID NO: 108534 - DNA, 25 bp, probe
aagtgatccagttctaagtgtcatc

SEQ ID NO: 108535 - DNA, 25 bp, probe
caagtgatccagttctaagtgtcat

SEQ ID NO: 108536 - DNA, 25 bp, probe
agtgatccagttctaagtgtcatct

SEQ ID NO: 108537 - DNA, 25 bp, probe
aagaagattgtgctaaggcttgagt

SEQ ID NO: 108538 - DNA, 25 bp, probe
gatctaagagaatgctggctattaa

SEQ ID NO: 108539 - DNA, 25 bp, probe
aactgggaggagataagaagagaaa

SEQ ID NO: 108540 - DNA, 25 bp, probe
tttgaactgggaggagataagaaga

SEQ ID NO: 108541 - DNA, 25 bp, probe
actgggaggagataagaagagaaag

SEQ ID NO: 108542 - DNA, 25 bp, probe
gaactgggaggagataagaagagaa

SEQ ID NO: 108543 - DNA, 25 bp, probe
ccaagtgatccagttctaagtgtca

SEQ ID NO: 108544 - DNA, 25 bp, probe
ttgaactgggaggagataagaagag

SEQ ID NO: 108545 - DNA, 25 bp, probe
agaagattgtgctaaggcttgagtg

SEQ ID NO: 108546 - DNA, 25 bp, probe
ctgggaggagataagaagagaaagg

SEQ ID NO: 108547 - DNA, 25 bp, probe
ataaagtgacacagtacaagaaggg

SEQ ID NO: 108548 - DNA, 25 bp, probe
cataaagtgacacagtacaagaagg

SEQ ID NO: 108549 - DNA, 25 bp, probe
ccataaagtgacacagtacaagaag

SEQ ID NO: 108550 - DNA, 25 bp, probe
cccataaagtgacacagtacaagaa

SEQ ID NO: 108551 - DNA, 25 bp, probe
aaagaagattgtgctaaggcttgag

SEQ ID NO: 108552 - DNA, 25 bp, probe
tgaactgggaggagataagaagaga

SEQ ID NO: 108553 - DNA, 25 bp, probe
tgatccagttctaagtgtcatcttt

SEQ ID NO: 108554 - DNA, 25 bp, probe
caaagaagattgtgctaaggcttga

SEQ ID NO: 108555 - DNA, 25 bp, probe
gccaagtgatccagttctaagtgtc

SEQ ID NO: 108556 - DNA, 25 bp, probe
atctaagagaatgctggctattaaa

SEQ ID NO: 108557 - DNA, 25 bp, probe
agatctaagagaatgctggctatta

SEQ ID NO: 108558 - DNA, 25 bp, probe
tgggaggagataagaagagaaaggg

SEQ ID NO: 108559 - DNA, 25 bp, probe
cagatctaagagaatgctggctatt

SEQ ID NO: 108560 - DNA, 25 bp, probe
taaagtgacacagtacaagaagggc

SEQ ID NO: 108561 - DNA, 25 bp, probe
ttttgaactgggaggagataagaag

SEQ ID NO: 108562 - DNA, 25 bp, probe
cattttgaactgggaggagataaga

SEQ ID NO: 108563 - DNA, 25 bp, probe
attttgaactgggaggagataagaa

SEQ ID NO: 108564 - DNA, 25 bp, probe
gagaatgctggctattaaaagatgc

SEQ ID NO: 108565 - DNA, 25 bp, probe
gaagattgtgctaaggcttgagtgc

SEQ ID NO: 108566 - DNA, 25 bp, probe
agagaatgctggctattaaaagatg

SEQ ID NO: 108567 - DNA, 25 bp, probe
ttatgacaggaagcagagtggctat

SEQ ID NO: 108568 - DNA, 25 bp, probe
gcattttgaactgggaggagataag

SEQ ID NO: 108569 - DNA, 25 bp, probe
aagagaatgctggctattaaaagat

SEQ ID NO: 108570 - DNA, 25 bp, probe
gggaggagataagaagagaaagggc

SEQ ID NO: 108571 - DNA, 25 bp, probe
agcattttgaactgggaggagataa

SEQ ID NO: 108572 - DNA, 25 bp, probe
aagcattttgaactgggaggagata

SEQ ID NO: 108573 - DNA, 25 bp, probe
taagagaatgctggctattaaaaga

SEQ ID NO: 108574 - DNA, 25 bp, probe
ataagaagagaaagggccaagtgat

SEQ ID NO: 108575 - DNA, 25 bp, probe
cacagtacaagaagggcaaggattc

SEQ ID NO: 108576 - DNA, 25 bp, probe
gatccagttctaagtgtcatctttt

SEQ ID NO: 108577 - DNA, 25 bp, probe
gaatccagtgtagaagttgagaaga

SEQ ID NO: 108578 - DNA, 25 bp, probe
agaatccagtgtagaagttgagaag

SEQ ID NO: 108579 - DNA, 25 bp, probe
aatccagtgtagaagttgagaagaa

SEQ ID NO: 108580 - DNA, 25 bp, probe
aagaatccagtgtagaagttgagaa

SEQ ID NO: 108581 - DNA, 25 bp, probe
atccagtgtagaagttgagaagaac

SEQ ID NO: 108582 - DNA, 25 bp, probe
aaagaatccagtgtagaagttgaga

SEQ ID NO: 108583 - DNA, 25 bp, probe
agaaagaatccagtgtagaagttga

SEQ ID NO: 108584 - DNA, 25 bp, probe
gatttccctacttgctgtattctca

SEQ ID NO: 108585 - DNA, 25 bp, probe
gaaagaatccagtgtagaagttgag

SEQ ID NO: 108586 - DNA, 25 bp, probe
aaggatctggttcaacatagcacaa

SEQ ID NO: 108587 - DNA, 25 bp, probe
aagaaagaatccagtgtagaagttg

SEQ ID NO: 108588 - DNA, 25 bp, probe
tcgagtcttaggttactgtcatcaa

SEQ ID NO: 108589 - DNA, 25 bp, probe
aatacaatggtatgttattgccagg

SEQ ID NO: 108590 - DNA, 25 bp, probe
gttctggataaggtcactgtcctag

SEQ ID NO: 108591 - DNA, 25 bp, probe
gaagaaagaatccagtgtagaagtt

SEQ ID NO: 108592 - DNA, 25 bp, probe
ggatttccctacttgctgtattctc

SEQ ID NO: 108593 - DNA, 25 bp, probe
ttgaataagaaagccagcagaactc

SEQ ID NO: 108594 - DNA, 25 bp, probe
cgagtcttaggttactgtcatcaaa

SEQ ID NO: 108595 - DNA, 25 bp, probe
atctgtgtgatggttccattgatgt

SEQ ID NO: 108596 - DNA, 25 bp, probe
tagaactaaatatggaggtcctgag

SEQ ID NO: 108597 - DNA, 25 bp, probe
caacatagcacaaacccttaggaaa

SEQ ID NO: 108598 - DNA, 25 bp, probe
cttgaataagaaagccagcagaact

SEQ ID NO: 108599 - DNA, 25 bp, probe
gaaggatctggttcaacatagcaca

SEQ ID NO: 108600 - DNA, 25 bp, probe
aactaaatatggaggtcctgagcat

SEQ ID NO: 108601 - DNA, 25 bp, probe
gagtcttaggttactgtcatcaaag

SEQ ID NO: 108602 - DNA, 25 bp, probe
agaactaaatatggaggtcctgagc

SEQ ID NO: 108603 - DNA, 25 bp, probe
ttagaactaaatatggaggtcctga

SEQ ID NO: 108604 - DNA, 25 bp, probe
aaggtgggatctaggaagaaagaat

SEQ ID NO: 108605 - DNA, 25 bp, probe
agtaggtgtttgggaatatgggaag

SEQ ID NO: 108606 - DNA, 25 bp, probe
tgcctgacagaataaagaacagtat

SEQ ID NO: 108607 - DNA, 25 bp, probe
taggttactgtcatcaaagacttgg

SEQ ID NO: 108608 - DNA, 25 bp, probe
cctacttgctgtattctcagtttct

SEQ ID NO: 108609 - DNA, 25 bp, probe
atttccctacttgctgtattctcag

SEQ ID NO: 108610 - DNA, 25 bp, probe
gaactaaatatggaggtcctgagca

SEQ ID NO: 108611 - DNA, 25 bp, probe
aaaggtgggatctaggaagaaagaa

SEQ ID NO: 108612 - DNA, 25 bp, probe
gttactgtcatcaaagacttgggat

SEQ ID NO: 108613 - DNA, 25 bp, probe
gtgcctgacagaataaagaacagta

SEQ ID NO: 108614 - DNA, 25 bp, probe
ctggaaggatctggttcaacatagc

SEQ ID NO: 108615 - DNA, 25 bp, probe
gctggaaggatctggttcaacatag

SEQ ID NO: 108616 - DNA, 25 bp, probe
gcctgacagaataaagaacagtatt

SEQ ID NO: 108617 - DNA, 25 bp, probe
aggtgggatctaggaagaaagaatc

SEQ ID NO: 108618 - DNA, 25 bp, probe
cagtaggtgtttgggaatatgggaa

SEQ ID NO: 108619 - DNA, 25 bp, probe
gaacctcactttacagggataagag

SEQ ID NO: 108620 - DNA, 25 bp, probe
ctgaacctcactttacagggataag

SEQ ID NO: 108621 - DNA, 25 bp, probe
ggctctagttaaagtgtgtatccat

SEQ ID NO: 108622 - DNA, 25 bp, probe
atggctctagttaaagtgtgtatcc

SEQ ID NO: 108623 - DNA, 25 bp, probe
gtctttcaagtaagtttgccttctt

SEQ ID NO: 108624 - DNA, 25 bp, probe
tttcctgtctttcaagtaagtttgc

SEQ ID NO: 108625 - DNA, 25 bp, probe
ctgtctttcaagtaagtttgccttc

SEQ ID NO: 108626 - DNA, 25 bp, probe
tgtctttcaagtaagtttgccttct

SEQ ID NO: 108627 - DNA, 25 bp, probe
cagatggctctagttaaagtgtgta

SEQ ID NO: 108628 - DNA, 25 bp, probe
tttgccttcttatccctagatgaaa

SEQ ID NO: 108629 - DNA, 25 bp, probe
gtttgccttcttatccctagatgaa

SEQ ID NO: 108630 - DNA, 25 bp, probe
aagtttgccttcttatccctagatg

SEQ ID NO: 108631 - DNA, 25 bp, probe
agtcaatttcctgtctttcaagtaa

SEQ ID NO: 108632 - DNA, 25 bp, probe
aaatcttagaatctacaggtctccc

SEQ ID NO: 108633 - DNA, 25 bp, probe
gatggctctagttaaagtgtgtatc

SEQ ID NO: 108634 - DNA, 25 bp, probe
agatggctctagttaaagtgtgtat

SEQ ID NO: 108635 - DNA, 25 bp, probe
agtttgccttcttatccctagatga

SEQ ID NO: 108636 - DNA, 25 bp, probe
tcaatttcctgtctttcaagtaagt

SEQ ID NO: 108637 - DNA, 25 bp, probe
aagtcaatttcctgtctttcaagta

SEQ ID NO: 108638 - DNA, 25 bp, probe
cagacagatggctctagttaaagtg

SEQ ID NO: 108639 - DNA, 25 bp, probe
tcaactttaattggaggacaagaaa

SEQ ID NO: 108640 - DNA, 25 bp, probe
ctcaactttaattggaggacaagaa

SEQ ID NO: 108641 - DNA, 25 bp, probe
gctctagttaaagtgtgtatccatg

SEQ ID NO: 108642 - DNA, 25 bp, probe
gtcaatttcctgtctttcaagtaag

SEQ ID NO: 108643 - DNA, 25 bp, probe
cctgtctttcaagtaagtttgcctt

SEQ ID NO: 108644 - DNA, 25 bp, probe
ttcctgtctttcaagtaagtttgcc

SEQ ID NO: 108645 - DNA, 25 bp, probe
gctcaactttaattggaggacaaga

SEQ ID NO: 108646 - DNA, 25 bp, probe
aagtaagtttgccttcttatcccta

SEQ ID NO: 108647 - DNA, 25 bp, probe
caagtaagtttgccttcttatccct

SEQ ID NO: 108648 - DNA, 25 bp, probe
tcaagtaagtttgccttcttatccc

SEQ ID NO: 108649 - DNA, 25 bp, probe
ttcaagtaagtttgccttcttatcc

SEQ ID NO: 108650 - DNA, 25 bp, probe
gtaagtttgccttcttatccctaga

SEQ ID NO: 108651 - DNA, 25 bp, probe
agtaagtttgccttcttatccctag

SEQ ID NO: 108652 - DNA, 25 bp, probe
aatcttagaatctacaggtctccct

SEQ ID NO: 108653 - DNA, 25 bp, probe
atcttagaatctacaggtctccctc

SEQ ID NO: 108654 - DNA, 25 bp, probe
caatttcctgtctttcaagtaagtt

SEQ ID NO: 108655 - DNA, 25 bp, probe
gacagatggctctagttaaagtgtg

SEQ ID NO: 108656 - DNA, 25 bp, probe
agacagatggctctagttaaagtgt

SEQ ID NO: 108657 - DNA, 25 bp, probe
aggtactctgctcatagaaatctta

SEQ ID NO: 108658 - DNA, 25 bp, probe
caggtactctgctcatagaaatctt

SEQ ID NO: 108659 - DNA, 25 bp, probe
cttagaatctacaggtctccctctc

SEQ ID NO: 108660 - DNA, 25 bp, probe
ctctttcagtctctgtctctctctc

SEQ ID NO: 108661 - DNA, 25 bp, probe
ctctctttcagtctctgtctctctc

SEQ ID NO: 108662 - DNA, 25 bp, probe
taagtttgccttcttatccctagat

SEQ ID NO: 108663 - DNA, 25 bp, probe
tctttcaagtaagtttgccttctta

SEQ ID NO: 108664 - DNA, 25 bp, probe
atttcctgtctttcaagtaagtttg

SEQ ID NO: 108665 - DNA, 25 bp, probe
tactctagtaacctggaggatctga

SEQ ID NO: 108666 - DNA, 25 bp, probe
gtactctagtaacctggaggatctg

SEQ ID NO: 108667 - DNA, 25 bp, probe
ctctagtaacctggaggatctgatc

SEQ ID NO: 108668 - DNA, 25 bp, probe
actctagtaacctggaggatctgat

SEQ ID NO: 108669 - DNA, 25 bp, probe
gggtgaaataaaggcatactgtctt

SEQ ID NO: 108670 - DNA, 25 bp, probe
aacgatctctacacactctttgatg

SEQ ID NO: 108671 - DNA, 25 bp, probe
atctctacacactctttgatgccat

SEQ ID NO: 108672 - DNA, 25 bp, probe
tgggtgaaataaaggcatactgtct

SEQ ID NO: 108673 - DNA, 25 bp, probe
gtgggtgaaataaaggcatactgtc

SEQ ID NO: 108674 - DNA, 25 bp, probe
ccatcatcatgcaagaagtagtgtg

SEQ ID NO: 108675 - DNA, 25 bp, probe
caacgatctctacacactctttgat

SEQ ID NO: 108676 - DNA, 25 bp, probe
ctcaacgatctctacacactctttg

SEQ ID NO: 108677 - DNA, 25 bp, probe
gtactttagtgacattgtgggcttc

SEQ ID NO: 108678 - DNA, 25 bp, probe
tactttagtgacattgtgggcttca

SEQ ID NO: 108679 - DNA, 25 bp, probe
tgctcaacgatctctacacactctt

SEQ ID NO: 108680 - DNA, 25 bp, probe
gatctctacacactctttgatgcca

SEQ ID NO: 108681 - DNA, 25 bp, probe
agtactctagtaacctggaggatct

SEQ ID NO: 108682 - DNA, 25 bp, probe
tctctacacactctttgatgccatc

SEQ ID NO: 108683 - DNA, 25 bp, probe
ggtgggtgaaataaaggcatactgt

SEQ ID NO: 108684 - DNA, 25 bp, probe
ctgctcaacgatctctacacactct

SEQ ID NO: 108685 - DNA, 25 bp, probe
cagtactctagtaacctggaggatc

SEQ ID NO: 108686 - DNA, 25 bp, probe
gctcaacgatctctacacactcttt

SEQ ID NO: 108687 - DNA, 25 bp, probe
gagtgtatcctcctgatgaagcagt

SEQ ID NO: 108688 - DNA, 25 bp, probe
acgatctctacacactctttgatgc

SEQ ID NO: 108689 - DNA, 25 bp, probe
tgtactttagtgacattgtgggctt

SEQ ID NO: 108690 - DNA, 25 bp, probe
agtgtatcctcctgatgaagcagtg

SEQ ID NO: 108691 - DNA, 25 bp, probe
gagggtgggtgaaataaaggcatac

SEQ ID NO: 108692 - DNA, 25 bp, probe
gccatcatcatgcaagaagtagtgt

SEQ ID NO: 108693 - DNA, 25 bp, probe
tgtcgagtgtatcctcctgatgaag

SEQ ID NO: 108694 - DNA, 25 bp, probe
ctgtcgagtgtatcctcctgatgaa

SEQ ID NO: 108695 - DNA, 25 bp, probe
ctgtactttagtgacattgtgggct

SEQ ID NO: 108696 - DNA, 25 bp, probe
gggtgggtgaaataaaggcatactg

SEQ ID NO: 108697 - DNA, 25 bp, probe
agggtgggtgaaataaaggcatact

SEQ ID NO: 108698 - DNA, 25 bp, probe
cgatctctacacactctttgatgcc

SEQ ID NO: 108699 - DNA, 25 bp, probe
actgtactttagtgacattgtgggc

SEQ ID NO: 108700 - DNA, 25 bp, probe
gaagacgaacatcattgactcgatg

SEQ ID NO: 108701 - DNA, 25 bp, probe
tcaacgatctctacacactctttga

SEQ ID NO: 108702 - DNA, 25 bp, probe
tttgagcaagtgacactgtacttta

SEQ ID NO: 108703 - DNA, 25 bp, probe
ggaagacgaacatcattgactcgat

SEQ ID NO: 108704 - DNA, 25 bp, probe
gcagtactctagtaacctggaggat

SEQ ID NO: 108705 - DNA, 25 bp, probe
ttgagcaagtgacactgtactttag

SEQ ID NO: 108706 - DNA, 25 bp, probe
cgagtgtatcctcctgatgaagcag

SEQ ID NO: 108707 - DNA, 25 bp, probe
cctgctcaacgatctctacacactc

SEQ ID NO: 108708 - DNA, 25 bp, probe
catcatcatgcaagaagtagtgtgc

SEQ ID NO: 108709 - DNA, 25 bp, probe
tataaccatcgcacaacatacagaa

SEQ ID NO: 108710 - DNA, 25 bp, probe
atataaccatcgcacaacatacaga

SEQ ID NO: 108711 - DNA, 25 bp, probe
atctatctgattccattccttccac

SEQ ID NO: 108712 - DNA, 25 bp, probe
catctatctgattccattccttcca

SEQ ID NO: 108713 - DNA, 25 bp, probe
tcttcctccatctatctgattccat

SEQ ID NO: 108714 - DNA, 25 bp, probe
tccatctatctgattccattccttc

SEQ ID NO: 108715 - DNA, 25 bp, probe
ctccatctatctgattccattcctt

SEQ ID NO: 108716 - DNA, 25 bp, probe
ttcctccatctatctgattccattc

SEQ ID NO: 108717 - DNA, 25 bp, probe
cttcctccatctatctgattccatt

SEQ ID NO: 108718 - DNA, 25 bp, probe
ccatctatctgattccattccttcc

SEQ ID NO: 108719 - DNA, 25 bp, probe
ttcttcctccatctatctgattcca

SEQ ID NO: 108720 - DNA, 25 bp, probe
attcttcctccatctatctgattcc

SEQ ID NO: 108721 - DNA, 25 bp, probe
ctatctgattccattccttccacac

SEQ ID NO: 108722 - DNA, 25 bp, probe
tctatctgattccattccttccaca

SEQ ID NO: 108723 - DNA, 25 bp, probe
cctccatctatctgattccattcct

SEQ ID NO: 108724 - DNA, 25 bp, probe
tcctccatctatctgattccattcc

SEQ ID NO: 108725 - DNA, 25 bp, probe
acattgtcattattcttcctccatc

SEQ ID NO: 108726 - DNA, 25 bp, probe
cattgtcattattcttcctccatct

SEQ ID NO: 108727 - DNA, 25 bp, probe
ataaccatcgcacaacatacagaac

SEQ ID NO: 108728 - DNA, 25 bp, probe
ccatcagtagcaatacaaggttata

SEQ ID NO: 108729 - DNA, 25 bp, probe
tatataaccatcgcacaacatacag

SEQ ID NO: 108730 - DNA, 25 bp, probe
tatcatacagttagtgttgccagtg

SEQ ID NO: 108731 - DNA, 25 bp, probe
tatctgattccattccttccacacc

SEQ ID NO: 108732 - DNA, 25 bp, probe
gtatcatacagttagtgttgccagt

SEQ ID NO: 108733 - DNA, 25 bp, probe
tgtcattattcttcctccatctatc

SEQ ID NO: 108734 - DNA, 25 bp, probe
tcagtagcaatacaaggttatacat

SEQ ID NO: 108735 - DNA, 25 bp, probe
atcagtagcaatacaaggttataca

SEQ ID NO: 108736 - DNA, 25 bp, probe
cattattcttcctccatctatctga

SEQ ID NO: 108737 - DNA, 25 bp, probe
tcattattcttcctccatctatctg

SEQ ID NO: 108738 - DNA, 25 bp, probe
gtcattattcttcctccatctatct

SEQ ID NO: 108739 - DNA, 25 bp, probe
catcagtagcaatacaaggttatac

SEQ ID NO: 108740 - DNA, 25 bp, probe
gtatataaccatcgcacaacataca

SEQ ID NO: 108741 - DNA, 25 bp, probe
tgtatataaccatcgcacaacatac

SEQ ID NO: 108742 - DNA, 25 bp, probe
atcatacagttagtgttgccagtga

SEQ ID NO: 108743 - DNA, 25 bp, probe
atttcttctattgtgcttctttggg

SEQ ID NO: 108744 - DNA, 25 bp, probe
tttgcgtctatttcttctattgtgc

SEQ ID NO: 108745 - DNA, 25 bp, probe
ttgtcattattcttcctccatctat

SEQ ID NO: 108746 - DNA, 25 bp, probe
attgtcattattcttcctccatcta

SEQ ID NO: 108747 - DNA, 25 bp, probe
tcatacagttagtgttgccagtgaa

SEQ ID NO: 108748 - DNA, 25 bp, probe
gcgtctatttcttctattgtgcttc

SEQ ID NO: 108749 - DNA, 25 bp, probe
cccatcagtagcaatacaaggttat

SEQ ID NO: 108750 - DNA, 25 bp, probe
tattcttcctccatctatctgattc

SEQ ID NO: 108751 - DNA, 25 bp, probe
tgcgtctatttcttctattgtgctt

SEQ ID NO: 108752 - DNA, 25 bp, probe
ttgcgtctatttcttctattgtgct

SEQ ID NO: 108753 - DNA, 25 bp, probe
ttcaataccaggaagttatgccaac

SEQ ID NO: 108754 - DNA, 25 bp, probe
taataatctgagaatgccagtgtca

SEQ ID NO: 108755 - DNA, 25 bp, probe
gaattgtaacaggaatgcttctctg

SEQ ID NO: 108756 - DNA, 25 bp, probe
gttggcttagataacttgtaccgtt

SEQ ID NO: 108757 - DNA, 25 bp, probe
ttaataatctgagaatgccagtgtc

SEQ ID NO: 108758 - DNA, 25 bp, probe
aataatctgagaatgccagtgtcac

SEQ ID NO: 108759 - DNA, 25 bp, probe
acttacacaattcagttaagatgct

SEQ ID NO: 108760 - DNA, 25 bp, probe
gcctgcctacaatattctcattatt

SEQ ID NO: 108761 - DNA, 25 bp, probe
atctcttagtggttacattgccatt

SEQ ID NO: 108762 - DNA, 25 bp, probe
aatctcttagtggttacattgccat

SEQ ID NO: 108763 - DNA, 25 bp, probe
ccaaggacaacaagatacaaatacc

SEQ ID NO: 108764 - DNA, 25 bp, probe
gaaaccaaggacaacaagatacaaa

SEQ ID NO: 108765 - DNA, 25 bp, probe
acaaggcaaatagaaatcaacaaca

SEQ ID NO: 108766 - DNA, 25 bp, probe
aggcaaatagaaatcaacaacaact

SEQ ID NO: 108767 - DNA, 25 bp, probe
agaaaccaaggacaacaagatacaa

SEQ ID NO: 108768 - DNA, 25 bp, probe
ggcaaatagaaatcaacaacaactc

SEQ ID NO: 108769 - DNA, 25 bp, probe
cagcagtaatacaaggcaaatagaa

SEQ ID NO: 108770 - DNA, 25 bp, probe
aaaccaaggacaacaagatacaaat

SEQ ID NO: 108771 - DNA, 25 bp, probe
ataatctgagaatgccagtgtcaca

SEQ ID NO: 108772 - DNA, 25 bp, probe
accaaggacaacaagatacaaatac

SEQ ID NO: 108773 - DNA, 25 bp, probe
aatataaattatgagtgcgggacca

SEQ ID NO: 108774 - DNA, 25 bp, probe
cttacacaattcagttaagatgctt

SEQ ID NO: 108775 - DNA, 25 bp, probe
ccagggatgatttaaggatgtttga

SEQ ID NO: 108776 - DNA, 25 bp, probe
aaggcaaatagaaatcaacaacaac

SEQ ID NO: 108777 - DNA, 25 bp, probe
caaggcaaatagaaatcaacaacaa

SEQ ID NO: 108778 - DNA, 25 bp, probe
cagggatgatttaaggatgtttgat

SEQ ID NO: 108779 - DNA, 25 bp, probe
taaatctcttagtggttacattgcc

SEQ ID NO: 108780 - DNA, 25 bp, probe
cagaaaccaaggacaacaagataca

SEQ ID NO: 108781 - DNA, 25 bp, probe
acagaaaccaaggacaacaagatac

SEQ ID NO: 108782 - DNA, 25 bp, probe
cacagaaaccaaggacaacaagata

SEQ ID NO: 108783 - DNA, 25 bp, probe
gcaaatagaaatcaacaacaactca

SEQ ID NO: 108784 - DNA, 25 bp, probe
taatctgagaatgccagtgtcacaa

SEQ ID NO: 108785 - DNA, 25 bp, probe
atcttgtcaaggaacttcagagcat

SEQ ID NO: 108786 - DNA, 25 bp, probe
agaatgatctatcactgacgttgaa

SEQ ID NO: 108787 - DNA, 25 bp, probe
gagaatgatctatcactgacgttga

SEQ ID NO: 108788 - DNA, 25 bp, probe
agagaatgatctatcactgacgttg

SEQ ID NO: 108789 - DNA, 25 bp, probe
agcagtaatacaaggcaaatagaaa

SEQ ID NO: 108790 - DNA, 25 bp, probe
gttgggtgtttcaagagttaaatct

SEQ ID NO: 108791 - DNA, 25 bp, probe
agttgggtgtttcaagagttaaatc

SEQ ID NO: 108792 - DNA, 25 bp, probe
gagttgggtgtttcaagagttaaat

SEQ ID NO: 108793 - DNA, 25 bp, probe
aaccaaggacaacaagatacaaata

SEQ ID NO: 108794 - DNA, 25 bp, probe
gcagcagtaatacaaggcaaataga

SEQ ID NO: 108795 - DNA, 25 bp, probe
agcagcagtaatacaaggcaaatag

SEQ ID NO: 108796 - DNA, 25 bp, probe
ttcctgttcctagaagtaaagtcac

SEQ ID NO: 108797 - DNA, 25 bp, probe
ccacatactaggtgctcaattcatg

SEQ ID NO: 108798 - DNA, 25 bp, probe
cataatggatacacagaggttgcag

SEQ ID NO: 108799 - DNA, 25 bp, probe
cacatactaggtgctcaattcatgc

SEQ ID NO: 108800 - DNA, 25 bp, probe
gaatgacactctcaaattgttcctg

SEQ ID NO: 108801 - DNA, 25 bp, probe
tgaatgacactctcaaattgttcct

SEQ ID NO: 108802 - DNA, 25 bp, probe
acatactaggtgctcaattcatgcc

SEQ ID NO: 108803 - DNA, 25 bp, probe
aatgacactctcaaattgttcctgg

SEQ ID NO: 108804 - DNA, 25 bp, probe
atactaggtgctcaattcatgcctg

SEQ ID NO: 108805 - DNA, 25 bp, probe
catactaggtgctcaattcatgcct

SEQ ID NO: 108806 - DNA, 25 bp, probe
ataatggatacacagaggttgcagc

SEQ ID NO: 108807 - DNA, 25 bp, probe
tttcccacatactaggtgctcaatt

SEQ ID NO: 108808 - DNA, 25 bp, probe
tggcaaatggaacttctctgatctc

SEQ ID NO: 108809 - DNA, 25 bp, probe
cccacatactaggtgctcaattcat

SEQ ID NO: 108810 - DNA, 25 bp, probe
ttcccacatactaggtgctcaattc

SEQ ID NO: 108811 - DNA, 25 bp, probe
gacactctcaaattgttcctgggat

SEQ ID NO: 108812 - DNA, 25 bp, probe
gtggcaaatggaacttctctgatct

SEQ ID NO: 108813 - DNA, 25 bp, probe
gagtggcaaatggaacttctctgat

SEQ ID NO: 108814 - DNA, 25 bp, probe
atgacactctcaaattgttcctggg

SEQ ID NO: 108815 - DNA, 25 bp, probe
ccataatggatacacagaggttgca

SEQ ID NO: 108816 - DNA, 25 bp, probe
cctcagtaaagcatttgcacaagaa

SEQ ID NO: 108817 - DNA, 25 bp, probe
ttgaatgacactctcaaattgttcc

SEQ ID NO: 108818 - DNA, 25 bp, probe
acactctcaaattgttcctgggatc

SEQ ID NO: 108819 - DNA, 25 bp, probe
ggttgaatgacactctcaaattgtt

SEQ ID NO: 108820 - DNA, 25 bp, probe
gttgaatgacactctcaaattgttc

SEQ ID NO: 108821 - DNA, 25 bp, probe
tactaggtgctcaattcatgcctgt

SEQ ID NO: 108822 - DNA, 25 bp, probe
agtggcaaatggaacttctctgatc

SEQ ID NO: 108823 - DNA, 25 bp, probe
cctagagtggcaaatggaacttctc

SEQ ID NO: 108824 - DNA, 25 bp, probe
ctgggttgaatgacactctcaaatt

SEQ ID NO: 108825 - DNA, 25 bp, probe
gggttgaatgacactctcaaattgt

SEQ ID NO: 108826 - DNA, 25 bp, probe
tgggttgaatgacactctcaaattg

SEQ ID NO: 108827 - DNA, 25 bp, probe
cactctcaaattgttcctgggatcg

SEQ ID NO: 108828 - DNA, 25 bp, probe
taatggatacacagaggttgcagca

SEQ ID NO: 108829 - DNA, 25 bp, probe
tcccacatactaggtgctcaattca

SEQ ID NO: 108830 - DNA, 25 bp, probe
gtgagcccataatggatacacagag

SEQ ID NO: 108831 - DNA, 25 bp, probe
tctgggttgaatgacactctcaaat

SEQ ID NO: 108832 - DNA, 25 bp, probe
caatctgcctccttcccctaaatac

SEQ ID NO: 108833 - DNA, 25 bp, probe
cctaaatactgccctggtctagtgg

SEQ ID NO: 108834 - DNA, 25 bp, probe
ccctaaatactgccctggtctagtg

SEQ ID NO: 108835 - DNA, 25 bp, probe
gcaaatggaacttctctgatctccc

SEQ ID NO: 108836 - DNA, 25 bp, probe
ggcaaatggaacttctctgatctcc

SEQ ID NO: 108837 - DNA, 25 bp, probe
aaagtactccctcagtaaagcattt

SEQ ID NO: 108838 - DNA, 25 bp, probe
aatctgcctccttcccctaaatact

SEQ ID NO: 108839 - DNA, 25 bp, probe
tgacactctcaaattgttcctggga

SEQ ID NO: 108840 - DNA, 25 bp, probe
gaaagtactccctcagtaaagcatt

SEQ ID NO: 108841 - DNA, 25 bp, probe
caatggctataaactgaattaggca

SEQ ID NO: 108842 - DNA, 25 bp, probe
acaatggctataaactgaattaggc

SEQ ID NO: 108843 - DNA, 25 bp, probe
aatggctataaactgaattaggcag

SEQ ID NO: 108844 - DNA, 25 bp, probe
gacaatggctataaactgaattagg

SEQ ID NO: 108845 - DNA, 25 bp, probe
agacaatggctataaactgaattag

SEQ ID NO: 108846 - DNA, 25 bp, probe
cagacaatggctataaactgaatta

SEQ ID NO: 108847 - DNA, 25 bp, probe
taatgttttgctactcttgtcagac

SEQ ID NO: 108848 - DNA, 25 bp, probe
ctactcttgtcagacaatggctata

SEQ ID NO: 108849 - DNA, 25 bp, probe
gataatgttttgctactcttgtcag

SEQ ID NO: 108850 - DNA, 25 bp, probe
tactcttgtcagacaatggctataa

SEQ ID NO: 108851 - DNA, 25 bp, probe
ataatgttttgctactcttgtcaga

SEQ ID NO: 108852 - DNA, 25 bp, probe
tgataatgttttgctactcttgtca

SEQ ID NO: 108853 - DNA, 25 bp, probe
ttgataatgttttgctactcttgtc

SEQ ID NO: 108854 - DNA, 25 bp, probe
attgataatgttttgctactcttgt

SEQ ID NO: 108855 - DNA, 25 bp, probe
aatgttttgctactcttgtcagaca

SEQ ID NO: 108856 - DNA, 25 bp, probe
tgtcagacaatggctataaactgaa

SEQ ID NO: 108857 - DNA, 25 bp, probe
gtcagacaatggctataaactgaat

SEQ ID NO: 108858 - DNA, 25 bp, probe
gctactcttgtcagacaatggctat

SEQ ID NO: 108859 - DNA, 25 bp, probe
tcagacaatggctataaactgaatt

SEQ ID NO: 108860 - DNA, 25 bp, probe
cttgtcagacaatggctataaactg

SEQ ID NO: 108861 - DNA, 25 bp, probe
tcttgtcagacaatggctataaact

SEQ ID NO: 108862 - DNA, 25 bp, probe
ctcttgtcagacaatggctataaac

SEQ ID NO: 108863 - DNA, 25 bp, probe
actcttgtcagacaatggctataaa

SEQ ID NO: 108864 - DNA, 25 bp, probe
atggctataaactgaattaggcagt

SEQ ID NO: 108865 - DNA, 25 bp, probe
ggctataaactgaattaggcagtct

SEQ ID NO: 108866 - DNA, 25 bp, probe
tggctataaactgaattaggcagtc

SEQ ID NO: 108867 - DNA, 25 bp, probe
gctataaactgaattaggcagtctt

SEQ ID NO: 108868 - DNA, 25 bp, probe
ttgtcagacaatggctataaactga

SEQ ID NO: 108869 - DNA, 25 bp, probe
tgctactcttgtcagacaatggcta

SEQ ID NO: 108870 - DNA, 25 bp, probe
tattgataatgttttgctactcttg

SEQ ID NO: 108871 - DNA, 25 bp, probe
ttgctactcttgtcagacaatggct

SEQ ID NO: 108872 - DNA, 25 bp, probe
atgatgtacaaactaaggactattt

SEQ ID NO: 108873 - DNA, 25 bp, probe
aatgatgtacaaactaaggactatt

SEQ ID NO: 108874 - DNA, 25 bp, probe
aaatgatgtacaaactaaggactat

SEQ ID NO: 108875 - DNA, 25 bp, probe
gttttgctactcttgtcagacaatg

SEQ ID NO: 108876 - DNA, 25 bp, probe
caaaatgatgtacaaactaaggact

SEQ ID NO: 108877 - DNA, 25 bp, probe
tgttttgctactcttgtcagacaat

SEQ ID NO: 108878 - DNA, 25 bp, probe
atgttttgctactcttgtcagacaa

SEQ ID NO: 108879 - DNA, 25 bp, probe
tttgctactcttgtcagacaatggc

SEQ ID NO: 108880 - DNA, 25 bp, probe
acaaaatgatgtacaaactaaggac

SEQ ID NO: 108881 - DNA, 25 bp, probe
ggactatttattgataatgttttgc

SEQ ID NO: 108882 - DNA, 25 bp, probe
ttttgctactcttgtcagacaatgg

SEQ ID NO: 108883 - DNA, 25 bp, probe
ctataaactgaattaggcagtctta

SEQ ID NO: 108884 - DNA, 25 bp, probe
ttattgataatgttttgctactctt

SEQ ID NO: 108885 - DNA, 25 bp, probe
gtagtgctaataactctcctgtctg

SEQ ID NO: 108886 - DNA, 25 bp, probe
gagttcctgatggcattagtcatat

SEQ ID NO: 108887 - DNA, 25 bp, probe
tattcatacctctgagttcctgatg

SEQ ID NO: 108888 - DNA, 25 bp, probe
ttcctgatggcattagtcatatagt

SEQ ID NO: 108889 - DNA, 25 bp, probe
agttcctgatggcattagtcatata

SEQ ID NO: 108890 - DNA, 25 bp, probe
cctattcatacctctgagttcctga

SEQ ID NO: 108891 - DNA, 25 bp, probe
ctattcatacctctgagttcctgat

SEQ ID NO: 108892 - DNA, 25 bp, probe
ggtagtgctaataactctcctgtct

SEQ ID NO: 108893 - DNA, 25 bp, probe
gttcctgatggcattagtcatatag

SEQ ID NO: 108894 - DNA, 25 bp, probe
tacttcttcaccaggtcattgattg

SEQ ID NO: 108895 - DNA, 25 bp, probe
tgagttcctgatggcattagtcata

SEQ ID NO: 108896 - DNA, 25 bp, probe
atcggtagtgctaataactctcctg

SEQ ID NO: 108897 - DNA, 25 bp, probe
catcggtagtgctaataactctcct

SEQ ID NO: 108898 - DNA, 25 bp, probe
cttgtacttcttcaccaggtcattg

SEQ ID NO: 108899 - DNA, 25 bp, probe
tagtgctaataactctcctgtctgc

SEQ ID NO: 108900 - DNA, 25 bp, probe
gtacttcttcaccaggtcattgatt

SEQ ID NO: 108901 - DNA, 25 bp, probe
tcctgatggcattagtcatatagta

SEQ ID NO: 108902 - DNA, 25 bp, probe
attcatacctctgagttcctgatgg

SEQ ID NO: 108903 - DNA, 25 bp, probe
atatactcggacgacatcttctgta

SEQ ID NO: 108904 - DNA, 25 bp, probe
tgtacttcttcaccaggtcattgat

SEQ ID NO: 108905 - DNA, 25 bp, probe
tatactcggacgacatcttctgtac

SEQ ID NO: 108906 - DNA, 25 bp, probe
cggtagtgctaataactctcctgtc

SEQ ID NO: 108907 - DNA, 25 bp, probe
ttgtacttcttcaccaggtcattga

SEQ ID NO: 108908 - DNA, 25 bp, probe
cctgatggcattagtcatatagtaa

SEQ ID NO: 108909 - DNA, 25 bp, probe
ctgagttcctgatggcattagtcat

SEQ ID NO: 108910 - DNA, 25 bp, probe
gaagaataactgaaggctggaccat

SEQ ID NO: 108911 - DNA, 25 bp, probe
gggtatgaagaatgtatagggcaat

SEQ ID NO: 108912 - DNA, 25 bp, probe
ctctgagttcctgatggcattagtc

SEQ ID NO: 108913 - DNA, 25 bp, probe
tacctctgagttcctgatggcatta

SEQ ID NO: 108914 - DNA, 25 bp, probe
catatactcggacgacatcttctgt

SEQ ID NO: 108915 - DNA, 25 bp, probe
taataactctcctgtctgcaaccta

SEQ ID NO: 108916 - DNA, 25 bp, probe
tttccacaaatgcttagagttacca

SEQ ID NO: 108917 - DNA, 25 bp, probe
tcggtagtgctaataactctcctgt

SEQ ID NO: 108918 - DNA, 25 bp, probe
agtgaagaataactgaaggctggac

SEQ ID NO: 108919 - DNA, 25 bp, probe
aattccaaagcccttaaataaacgg

SEQ ID NO: 108920 - DNA, 25 bp, probe
acttggttcaattaagattggttgg

SEQ ID NO: 108921 - DNA, 25 bp, probe
agtaacaaattccaaagcccttaaa

SEQ ID NO: 108922 - DNA, 25 bp, probe
tgatggcattagtcatatagtaaca

SEQ ID NO: 108923 - DNA, 25 bp, probe
cagacttggttcaattaagattggt

SEQ ID NO: 108924 - DNA, 25 bp, probe
ttccacaaatgcttagagttaccac

SEQ ID NO: 108925 - DNA, 25 bp, probe
ggtgaatgtgtaaactggcataaac

SEQ ID NO: 108926 - DNA, 25 bp, probe
aataactctcctgtctgcaacctaa

SEQ ID NO: 108927 - DNA, 25 bp, probe
tcagacttggttcaattaagattgg

SEQ ID NO: 108928 - DNA, 25 bp, probe
tggtgaatgtgtaaactggcataaa

SEQ ID NO: 108929 - DNA, 25 bp, probe
aaggatggatggatataatgtatgc

SEQ ID NO: 108930 - DNA, 25 bp, probe
ttctaccactgtattaacaccacaa

SEQ ID NO: 108931 - DNA, 25 bp, probe
attctaccactgtattaacaccaca

SEQ ID NO: 108932 - DNA, 25 bp, probe
ctaccactgtattaacaccacaact

SEQ ID NO: 108933 - DNA, 25 bp, probe
tctaccactgtattaacaccacaac

SEQ ID NO: 108934 - DNA, 25 bp, probe
taccactgtattaacaccacaactg

SEQ ID NO: 108935 - DNA, 25 bp, probe
aattctaccactgtattaacaccac

SEQ ID NO: 108936 - DNA, 25 bp, probe
ggaactccagcctaagtatgaagaa

SEQ ID NO: 108937 - DNA, 25 bp, probe
tggatataatgtatgcagcagttga

SEQ ID NO: 108938 - DNA, 25 bp, probe
atggatggatataatgtatgcagca

SEQ ID NO: 108939 - DNA, 25 bp, probe
gatggatggatataatgtatgcagc

SEQ ID NO: 108940 - DNA, 25 bp, probe
ggatggatataatgtatgcagcagt

SEQ ID NO: 108941 - DNA, 25 bp, probe
tggatggatataatgtatgcagcag

SEQ ID NO: 108942 - DNA, 25 bp, probe
ttctggtttgtcttatattctggct

SEQ ID NO: 108943 - DNA, 25 bp, probe
cttctggtttgtcttatattctggc

SEQ ID NO: 108944 - DNA, 25 bp, probe
gcttctggtttgtcttatattctgg

SEQ ID NO: 108945 - DNA, 25 bp, probe
tataatgtatgcagcagttgattcc

SEQ ID NO: 108946 - DNA, 25 bp, probe
atggatataatgtatgcagcagttg

SEQ ID NO: 108947 - DNA, 25 bp, probe
tgtaggatttgggtatctctctttg

SEQ ID NO: 108948 - DNA, 25 bp, probe
ataatgtatgcagcagttgattcca

SEQ ID NO: 108949 - DNA, 25 bp, probe
aggatggatggatataatgtatgca

SEQ ID NO: 108950 - DNA, 25 bp, probe
ctccagcctaagtatgaagaaagtc

SEQ ID NO: 108951 - DNA, 25 bp, probe
ggatataatgtatgcagcagttgat

SEQ ID NO: 108952 - DNA, 25 bp, probe
gatggatataatgtatgcagcagtt

SEQ ID NO: 108953 - DNA, 25 bp, probe
tgtgcttctggtttgtcttatattc

SEQ ID NO: 108954 - DNA, 25 bp, probe
ggatggatggatataatgtatgcag

SEQ ID NO: 108955 - DNA, 25 bp, probe
tctggtttgtcttatattctggcta

SEQ ID NO: 108956 - DNA, 25 bp, probe
tttcatcatctttgggtccttcttc

SEQ ID NO: 108957 - DNA, 25 bp, probe
gatttgggtatctctctttgcttca

SEQ ID NO: 108958 - DNA, 25 bp, probe
tgcttctggtttgtcttatattctg

SEQ ID NO: 108959 - DNA, 25 bp, probe
gtgcttctggtttgtcttatattct

SEQ ID NO: 108960 - DNA, 25 bp, probe
taggatttgggtatctctctttgct

SEQ ID NO: 108961 - DNA, 25 bp, probe
gtaggatttgggtatctctctttgc

SEQ ID NO: 108962 - DNA, 25 bp, probe
gaatgtgcttctggtttgtcttata

SEQ ID NO: 108963 - DNA, 25 bp, probe
atgtaggatttgggtatctctcttt

SEQ ID NO: 108964 - DNA, 25 bp, probe
aatgtaggatttgggtatctctctt

SEQ ID NO: 108965 - DNA, 25 bp, probe
tcgaagacgtgaataatcatactga

SEQ ID NO: 108966 - DNA, 25 bp, probe
tgacatcgaagacgtgaataatcat

SEQ ID NO: 108967 - DNA, 25 bp, probe
tgaatgtgcttctggtttgtcttat

SEQ ID NO: 108968 - DNA, 25 bp, probe
atgaatgtgcttctggtttgtctta

SEQ ID NO: 108969 - DNA, 25 bp, probe
taatgtatgcagcagttgattccag

SEQ ID NO: 108970 - DNA, 25 bp, probe
atgtgcttctggtttgtcttatatt

SEQ ID NO: 108971 - DNA, 25 bp, probe
aatgtgcttctggtttgtcttatat

SEQ ID NO: 108972 - DNA, 25 bp, probe
atttgggtatctctctttgcttcaa

SEQ ID NO: 108973 - DNA, 25 bp, probe
tggttagtgttaatgatcctgtctt

SEQ ID NO: 108974 - DNA, 25 bp, probe
cctgatggttagtgttaatgatcct

SEQ ID NO: 108975 - DNA, 25 bp, probe
tgatggttagtgttaatgatcctgt

SEQ ID NO: 108976 - DNA, 25 bp, probe
atggttagtgttaatgatcctgtct

SEQ ID NO: 108977 - DNA, 25 bp, probe
gatggttagtgttaatgatcctgtc

SEQ ID NO: 108978 - DNA, 25 bp, probe
ctgatggttagtgttaatgatcctg

SEQ ID NO: 108979 - DNA, 25 bp, probe
gcctgatggttagtgttaatgatcc

SEQ ID NO: 108980 - DNA, 25 bp, probe
ggttagtgttaatgatcctgtctta

SEQ ID NO: 108981 - DNA, 25 bp, probe
ttagtgttaatgatcctgtcttagg

SEQ ID NO: 108982 - DNA, 25 bp, probe
gttagtgttaatgatcctgtcttag

SEQ ID NO: 108983 - DNA, 25 bp, probe
cttgcacaaggatatggaagttctg

SEQ ID NO: 108984 - DNA, 25 bp, probe
tagtgttaatgatcctgtcttaggg

SEQ ID NO: 108985 - DNA, 25 bp, probe
ggcctgatggttagtgttaatgatc

SEQ ID NO: 108986 - DNA, 25 bp, probe
atagcttgggagactggacattaaa

SEQ ID NO: 108987 - DNA, 25 bp, probe
aatagcttgggagactggacattaa

SEQ ID NO: 108988 - DNA, 25 bp, probe
aaatagcttgggagactggacatta

SEQ ID NO: 108989 - DNA, 25 bp, probe
gatttctccttcttcttggtcctgg

SEQ ID NO: 108990 - DNA, 25 bp, probe
ttgcacaaggatatggaagttctgt

SEQ ID NO: 108991 - DNA, 25 bp, probe
atatggaagttctgtcccaggaaat

SEQ ID NO: 108992 - DNA, 25 bp, probe
gcacaaggatatggaagttctgtcc

SEQ ID NO: 108993 - DNA, 25 bp, probe
ttaatgatcctgtcttagggcagag

SEQ ID NO: 108994 - DNA, 25 bp, probe
tatggaagttctgtcccaggaaatt

SEQ ID NO: 108995 - DNA, 25 bp, probe
gttaatgatcctgtcttagggcaga

SEQ ID NO: 108996 - DNA, 25 bp, probe
gaatatgcacttgcacaaggatatg

SEQ ID NO: 108997 - DNA, 25 bp, probe
agaatatgcacttgcacaaggatat

SEQ ID NO: 108998 - DNA, 25 bp, probe
tgcacaaggatatggaagttctgtc

SEQ ID NO: 108999 - DNA, 25 bp, probe
aagaatatgcacttgcacaaggata

SEQ ID NO: 109000 - DNA, 25 bp, probe
tgttaatgatcctgtcttagggcag

SEQ ID NO: 109001 - DNA, 25 bp, probe
agtgttaatgatcctgtcttagggc

SEQ ID NO: 109002 - DNA, 25 bp, probe
tagcttgggagactggacattaaag

SEQ ID NO: 109003 - DNA, 25 bp, probe
aaatcaaatagcttgggagactgga

SEQ ID NO: 109004 - DNA, 25 bp, probe
gatatggaagttctgtcccaggaaa

SEQ ID NO: 109005 - DNA, 25 bp, probe
tgtgtgtgtgtgtgtaaaggctatg

SEQ ID NO: 109006 - DNA, 25 bp, probe
gtgtgtgtgtgtgtgtaaaggctat

SEQ ID NO: 109007 - DNA, 25 bp, probe
gtgttaatgatcctgtcttagggca

SEQ ID NO: 109008 - DNA, 25 bp, probe
aatatgcacttgcacaaggatatgg

SEQ ID NO: 109009 - DNA, 25 bp, probe
aatcaaatagcttgggagactggac

SEQ ID NO: 109010 - DNA, 25 bp, probe
caaggatatggaagttctgtcccag

SEQ ID NO: 109011 - DNA, 25 bp, probe
ggatttctccttcttcttggtcctg

SEQ ID NO: 109012 - DNA, 25 bp, probe
cagggatttctccttcttcttggtc

SEQ ID NO: 109013 - DNA, 25 bp, probe
cacaaggatatggaagttctgtccc

SEQ ID NO: 109014 - DNA, 25 bp, probe
acttgcacaaggatatggaagttct

SEQ ID NO: 109015 - DNA, 25 bp, probe
cacttgcacaaggatatggaagttc

SEQ ID NO: 109016 - DNA, 25 bp, probe
caaatagcttgggagactggacatt

SEQ ID NO: 109017 - DNA, 25 bp, probe
tatcttcatcaccaatgtcacctac

SEQ ID NO: 109018 - DNA, 25 bp, probe
ctatcttcatcaccaatgtcaccta

SEQ ID NO: 109019 - DNA, 25 bp, probe
tctgtctatcttcatcaccaatgtc

SEQ ID NO: 109020 - DNA, 25 bp, probe
ctgtctatcttcatcaccaatgtca

SEQ ID NO: 109021 - DNA, 25 bp, probe
atctgtctatcttcatcaccaatgt

SEQ ID NO: 109022 - DNA, 25 bp, probe
tgtctatcttcatcaccaatgtcac

SEQ ID NO: 109023 - DNA, 25 bp, probe
tctatcttcatcaccaatgtcacct

SEQ ID NO: 109024 - DNA, 25 bp, probe
gtctatcttcatcaccaatgtcacc

SEQ ID NO: 109025 - DNA, 25 bp, probe
ggatctgtctatcttcatcaccaat

SEQ ID NO: 109026 - DNA, 25 bp, probe
aggatctgtctatcttcatcaccaa

SEQ ID NO: 109027 - DNA, 25 bp, probe
gatctgtctatcttcatcaccaatg

SEQ ID NO: 109028 - DNA, 25 bp, probe
atcttcatcaccaatgtcacctaca

SEQ ID NO: 109029 - DNA, 25 bp, probe
cttcatcaccaatgtcacctacaac

SEQ ID NO: 109030 - DNA, 25 bp, probe
tcttcatcaccaatgtcacctacaa

SEQ ID NO: 109031 - DNA, 25 bp, probe
caggatctgtctatcttcatcacca

SEQ ID NO: 109032 - DNA, 25 bp, probe
gatgtatgtgctcattgtggtgttg

SEQ ID NO: 109033 - DNA, 25 bp, probe
caagaagatccacattgaggtagtg

SEQ ID NO: 109034 - DNA, 25 bp, probe
cctcgtctctttacagaagtagttt

SEQ ID NO: 109035 - DNA, 25 bp, probe
gagatgatttactgctacaagaaga

SEQ ID NO: 109036 - DNA, 25 bp, probe
agagatgatttactgctacaagaag

SEQ ID NO: 109037 - DNA, 25 bp, probe
atgtatgtgctcattgtggtgttga

SEQ ID NO: 109038 - DNA, 25 bp, probe
tgatgtatgtgctcattgtggtgtt

SEQ ID NO: 109039 - DNA, 25 bp, probe
gatttactgctacaagaagatcgct

SEQ ID NO: 109040 - DNA, 25 bp, probe
atgatttactgctacaagaagatcg

SEQ ID NO: 109041 - DNA, 25 bp, probe
atttactgctacaagaagatcgctg

SEQ ID NO: 109042 - DNA, 25 bp, probe
ttcatcaccaatgtcacctacaacc

SEQ ID NO: 109043 - DNA, 25 bp, probe
tgatttactgctacaagaagatcgc

SEQ ID NO: 109044 - DNA, 25 bp, probe
gcaggatctgtctatcttcatcacc

SEQ ID NO: 109045 - DNA, 25 bp, probe
agatgatttactgctacaagaagat

SEQ ID NO: 109046 - DNA, 25 bp, probe
gcctcgtctctttacagaagtagtt

SEQ ID NO: 109047 - DNA, 25 bp, probe
gtcaagaagatccacattgaggtag

SEQ ID NO: 109048 - DNA, 25 bp, probe
tcaagaagatccacattgaggtagt

SEQ ID NO: 109049 - DNA, 25 bp, probe
cagagatgatttactgctacaagaa

SEQ ID NO: 109050 - DNA, 25 bp, probe
attcagcctcgtctctttacagaag

SEQ ID NO: 109051 - DNA, 25 bp, probe
tgcaggatctgtctatcttcatcac

SEQ ID NO: 109052 - DNA, 25 bp, probe
cagcctcgtctctttacagaagtag

SEQ ID NO: 109053 - DNA, 25 bp, probe
catgaaataaagactcttggacttg

SEQ ID NO: 109054 - DNA, 25 bp, probe
cattcagcctcgtctctttacagaa

SEQ ID NO: 109055 - DNA, 25 bp, probe
tgtatgtgctcattgtggtgttgac

SEQ ID NO: 109056 - DNA, 25 bp, probe
agcctcgtctctttacagaagtagt

SEQ ID NO: 109057 - DNA, 25 bp, probe
tcagcctcgtctctttacagaagta

SEQ ID NO: 109058 - DNA, 25 bp, probe
gatgatttactgctacaagaagatc

SEQ ID NO: 109059 - DNA, 25 bp, probe
catcaccaatgtcacctacaaccac

SEQ ID NO: 109060 - DNA, 25 bp, probe
cgtcaagaagatccacattgaggta

SEQ ID NO: 109061 - DNA, 25 bp, probe
gagtcatttgatgtgattctggatg

SEQ ID NO: 109062 - DNA, 25 bp, probe
ggagtcatttgatgtgattctggat

SEQ ID NO: 109063 - DNA, 25 bp, probe
ccgtacagatgatggcatatgataa

SEQ ID NO: 109064 - DNA, 25 bp, probe
tacagatgatggcatatgataagct

SEQ ID NO: 109065 - DNA, 25 bp, probe
gtacagatgatggcatatgataagc

SEQ ID NO: 109066 - DNA, 25 bp, probe
cgtacagatgatggcatatgataag

SEQ ID NO: 109067 - DNA, 25 bp, probe
atgatggcatatgataagctggttc

SEQ ID NO: 109068 - DNA, 25 bp, probe
gatgatggcatatgataagctggtt

SEQ ID NO: 109069 - DNA, 25 bp, probe
accgtacagatgatggcatatgata

SEQ ID NO: 109070 - DNA, 25 bp, probe
agatgatggcatatgataagctggt

SEQ ID NO: 109071 - DNA, 25 bp, probe
ttgatgtgattctggatgagaacca

SEQ ID NO: 109072 - DNA, 25 bp, probe
acagatgatggcatatgataagctg

SEQ ID NO: 109073 - DNA, 25 bp, probe
cagatgatggcatatgataagctgg

SEQ ID NO: 109074 - DNA, 25 bp, probe
gatggcatatgataagctggttcag

SEQ ID NO: 109075 - DNA, 25 bp, probe
gaccgtacagatgatggcatatgat

SEQ ID NO: 109076 - DNA, 25 bp, probe
tgatggcatatgataagctggttca

SEQ ID NO: 109077 - DNA, 25 bp, probe
atggcatatgataagctggttcagt

SEQ ID NO: 109078 - DNA, 25 bp, probe
cggagtcatttgatgtgattctgga

SEQ ID NO: 109079 - DNA, 25 bp, probe
atttgatgtgattctggatgagaac

SEQ ID NO: 109080 - DNA, 25 bp, probe
catttgatgtgattctggatgagaa

SEQ ID NO: 109081 - DNA, 25 bp, probe
tttgatgtgattctggatgagaacc

SEQ ID NO: 109082 - DNA, 25 bp, probe
tcatttgatgtgattctggatgaga

SEQ ID NO: 109083 - DNA, 25 bp, probe
gtcatttgatgtgattctggatgag

SEQ ID NO: 109084 - DNA, 25 bp, probe
agtcatttgatgtgattctggatga

SEQ ID NO: 109085 - DNA, 25 bp, probe
tggcatatgataagctggttcagtg

SEQ ID NO: 109086 - DNA, 25 bp, probe
cctgaccgtacagatgatggcatat

SEQ ID NO: 109087 - DNA, 25 bp, probe
tgaccgtacagatgatggcatatga

SEQ ID NO: 109088 - DNA, 25 bp, probe
ctgaccgtacagatgatggcatatg

SEQ ID NO: 109089 - DNA, 25 bp, probe
caaagtgtcctcaccaaaggtactc

SEQ ID NO: 109090 - DNA, 25 bp, probe
gtcaaagtgtcctcaccaaaggtac

SEQ ID NO: 109091 - DNA, 25 bp, probe
tcaaagtgtcctcaccaaaggtact

SEQ ID NO: 109092 - DNA, 25 bp, probe
tgtcaaagtgtcctcaccaaaggta

SEQ ID NO: 109093 - DNA, 25 bp, probe
atcatcgtctttgtcaaagtgtcct

SEQ ID NO: 109094 - DNA, 25 bp, probe
catcatcgtctttgtcaaagtgtcc

SEQ ID NO: 109095 - DNA, 25 bp, probe
ccatcatcgtctttgtcaaagtgtc

SEQ ID NO: 109096 - DNA, 25 bp, probe
acctgaccgtacagatgatggcata

SEQ ID NO: 109097 - DNA, 25 bp, probe
tttgtcaaagtgtcctcaccaaagg

SEQ ID NO: 109098 - DNA, 25 bp, probe
accggagtcatttgatgtgattctg

SEQ ID NO: 109099 - DNA, 25 bp, probe
tcatcgtctttgtcaaagtgtcctc

SEQ ID NO: 109100 - DNA, 25 bp, probe
tctttgtcaaagtgtcctcaccaaa

SEQ ID NO: 109101 - DNA, 25 bp, probe
aaagtgtcctcaccaaaggtactcc

SEQ ID NO: 109102 - DNA, 25 bp, probe
atcgtctttgtcaaagtgtcctcac

SEQ ID NO: 109103 - DNA, 25 bp, probe
catcgtctttgtcaaagtgtcctca

SEQ ID NO: 109104 - DNA, 25 bp, probe
catatgataagctggttcagtgccc

SEQ ID NO: 109105 - DNA, 25 bp, probe
ataccaagaagatgaatgctgaagg

SEQ ID NO: 109106 - DNA, 25 bp, probe
aatctctccatctgtaattcctcac

SEQ ID NO: 109107 - DNA, 25 bp, probe
tataccaagaagatgaatgctgaag

SEQ ID NO: 109108 - DNA, 25 bp, probe
atctctccatctgtaattcctcacc

SEQ ID NO: 109109 - DNA, 25 bp, probe
taccaagaagatgaatgctgaagga

SEQ ID NO: 109110 - DNA, 25 bp, probe
atataccaagaagatgaatgctgaa

SEQ ID NO: 109111 - DNA, 25 bp, probe
aatataccaagaagatgaatgctga

SEQ ID NO: 109112 - DNA, 25 bp, probe
caagaagatgaatgctgaaggaacc

SEQ ID NO: 109113 - DNA, 25 bp, probe
ccaagaagatgaatgctgaaggaac

SEQ ID NO: 109114 - DNA, 25 bp, probe
gaagatgaatgctgaaggaaccaac

SEQ ID NO: 109115 - DNA, 25 bp, probe
agaagatgaatgctgaaggaaccaa

SEQ ID NO: 109116 - DNA, 25 bp, probe
aagaagatgaatgctgaaggaacca

SEQ ID NO: 109117 - DNA, 25 bp, probe
accaagaagatgaatgctgaaggaa

SEQ ID NO: 109118 - DNA, 25 bp, probe
gaatctctccatctgtaattcctca

SEQ ID NO: 109119 - DNA, 25 bp, probe
aagatgaatgctgaaggaaccaaca

SEQ ID NO: 109120 - DNA, 25 bp, probe
agtttgactcttcatcgttcatcta

SEQ ID NO: 109121 - DNA, 25 bp, probe
cagtttgactcttcatcgttcatct

SEQ ID NO: 109122 - DNA, 25 bp, probe
tttgactcttcatcgttcatctagg

SEQ ID NO: 109123 - DNA, 25 bp, probe
gtttgactcttcatcgttcatctag

SEQ ID NO: 109124 - DNA, 25 bp, probe
acaaatataccaagaagatgaatgc

SEQ ID NO: 109125 - DNA, 25 bp, probe
ttgactcttcatcgttcatctaggg

SEQ ID NO: 109126 - DNA, 25 bp, probe
agatgaatgctgaaggaaccaacag

SEQ ID NO: 109127 - DNA, 25 bp, probe
aaatataccaagaagatgaatgctg

SEQ ID NO: 109128 - DNA, 25 bp, probe
caaatataccaagaagatgaatgct

SEQ ID NO: 109129 - DNA, 25 bp, probe
gctggatgaacaaatataccaagaa

SEQ ID NO: 109130 - DNA, 25 bp, probe
cttccaccgttgttagtatcatggt

SEQ ID NO: 109131 - DNA, 25 bp, probe
gcagtttgactcttcatcgttcatc

SEQ ID NO: 109132 - DNA, 25 bp, probe
atgaatgctgaaggaaccaacagtc

SEQ ID NO: 109133 - DNA, 25 bp, probe
gatgaatgctgaaggaaccaacagt

SEQ ID NO: 109134 - DNA, 25 bp, probe
gtcaggaaagagaatacttgcagag

SEQ ID NO: 109135 - DNA, 25 bp, probe
tctccatctgtaattcctcaccctc

SEQ ID NO: 109136 - DNA, 25 bp, probe
ctctccatctgtaattcctcaccct

SEQ ID NO: 109137 - DNA, 25 bp, probe
tctctccatctgtaattcctcaccc

SEQ ID NO: 109138 - DNA, 25 bp, probe
ggatgaacaaatataccaagaagat

SEQ ID NO: 109139 - DNA, 25 bp, probe
ccttccaccgttgttagtatcatgg

SEQ ID NO: 109140 - DNA, 25 bp, probe
caggagctggatgaacaaatatacc

SEQ ID NO: 109141 - DNA, 25 bp, probe
ctccatctgtaattcctcaccctca

SEQ ID NO: 109142 - DNA, 25 bp, probe
tggatgaacaaatataccaagaaga

SEQ ID NO: 109143 - DNA, 25 bp, probe
agctggatgaacaaatataccaaga

SEQ ID NO: 109144 - DNA, 25 bp, probe
gagctggatgaacaaatataccaag

SEQ ID NO: 109145 - DNA, 25 bp, probe
agctggtcaggaaagagaatacttg

SEQ ID NO: 109146 - DNA, 25 bp, probe
ctgttcctgttactgttgggtcttg

SEQ ID NO: 109147 - DNA, 25 bp, probe
acccttccaccgttgttagtatcat

SEQ ID NO: 109148 - DNA, 25 bp, probe
ggagctggatgaacaaatataccaa

SEQ ID NO: 109149 - DNA, 25 bp, probe
aatggcaatcaagagagtctaatat

SEQ ID NO: 109150 - DNA, 25 bp, probe
gatatcgtactgaggtaacttccac

SEQ ID NO: 109151 - DNA, 25 bp, probe
ttgatatcgtactgaggtaacttcc

SEQ ID NO: 109152 - DNA, 25 bp, probe
tgatatcgtactgaggtaacttcca

SEQ ID NO: 109153 - DNA, 25 bp, probe
atggcaatcaagagagtctaatata

SEQ ID NO: 109154 - DNA, 25 bp, probe
aataattcaccagaccagaagccac

SEQ ID NO: 109155 - DNA, 25 bp, probe
caataattcaccagaccagaagcca

SEQ ID NO: 109156 - DNA, 25 bp, probe
tggcaatcaagagagtctaatatat

SEQ ID NO: 109157 - DNA, 25 bp, probe
aaatggcaatcaagagagtctaata

SEQ ID NO: 109158 - DNA, 25 bp, probe
actctgtatactgtatcagcagctt

SEQ ID NO: 109159 - DNA, 25 bp, probe
aactctgtatactgtatcagcagct

SEQ ID NO: 109160 - DNA, 25 bp, probe
ataattcaccagaccagaagccact

SEQ ID NO: 109161 - DNA, 25 bp, probe
atatcgtactgaggtaacttccacg

SEQ ID NO: 109162 - DNA, 25 bp, probe
ccgcaataattcaccagaccagaag

SEQ ID NO: 109163 - DNA, 25 bp, probe
atactgtatcagcagctttgtgtaa

SEQ ID NO: 109164 - DNA, 25 bp, probe
tatactgtatcagcagctttgtgta

SEQ ID NO: 109165 - DNA, 25 bp, probe
tactgtatcagcagctttgtgtaaa

SEQ ID NO: 109166 - DNA, 25 bp, probe
tctttgatatcgtactgaggtaact

SEQ ID NO: 109167 - DNA, 25 bp, probe
gcaataattcaccagaccagaagcc

SEQ ID NO: 109168 - DNA, 25 bp, probe
tccgcaataattcaccagaccagaa

SEQ ID NO: 109169 - DNA, 25 bp, probe
ctatttgtaacttggggatggtctc

SEQ ID NO: 109170 - DNA, 25 bp, probe
tttgatatcgtactgaggtaacttc

SEQ ID NO: 109171 - DNA, 25 bp, probe
ctttgatatcgtactgaggtaactt

SEQ ID NO: 109172 - DNA, 25 bp, probe
ctctgtatactgtatcagcagcttt

SEQ ID NO: 109173 - DNA, 25 bp, probe
tctgtatactgtatcagcagctttg

SEQ ID NO: 109174 - DNA, 25 bp, probe
aaactctgtatactgtatcagcagc

SEQ ID NO: 109175 - DNA, 25 bp, probe
ctgtatactgtatcagcagctttgt

SEQ ID NO: 109176 - DNA, 25 bp, probe
atctttgatatcgtactgaggtaac

SEQ ID NO: 109177 - DNA, 25 bp, probe
gtatactgtatcagcagctttgtgt

SEQ ID NO: 109178 - DNA, 25 bp, probe
tgtatactgtatcagcagctttgtg

SEQ ID NO: 109179 - DNA, 25 bp, probe
cgcaataattcaccagaccagaagc

SEQ ID NO: 109180 - DNA, 25 bp, probe
ctccgcaataattcaccagaccaga

SEQ ID NO: 109181 - DNA, 25 bp, probe
cttcgcagatctttgatatcgtact

SEQ ID NO: 109182 - DNA, 25 bp, probe
gatctttgatatcgtactgaggtaa

SEQ ID NO: 109183 - DNA, 25 bp, probe
aaaatggcaatcaagagagtctaat

SEQ ID NO: 109184 - DNA, 25 bp, probe
tcttcgcagatctttgatatcgtac

SEQ ID NO: 109185 - DNA, 25 bp, probe
agatctttgatatcgtactgaggta

SEQ ID NO: 109186 - DNA, 25 bp, probe
taattcaccagaccagaagccactg

SEQ ID NO: 109187 - DNA, 25 bp, probe
cagatctttgatatcgtactgaggt

SEQ ID NO: 109188 - DNA, 25 bp, probe
ttcgcagatctttgatatcgtactg

SEQ ID NO: 109189 - DNA, 25 bp, probe
gcagatctttgatatcgtactgagg

SEQ ID NO: 109190 - DNA, 25 bp, probe
gctatttgtaacttggggatggtct

SEQ ID NO: 109191 - DNA, 25 bp, probe
atcgtactgaggtaacttccacgta

SEQ ID NO: 109192 - DNA, 25 bp, probe
tatcgtactgaggtaacttccacgt

SEQ ID NO: 109193 - DNA, 25 bp, probe
aaataaactccaagcagccagtagc

SEQ ID NO: 109194 - DNA, 25 bp, probe
aaaataaactccaagcagccagtag

SEQ ID NO: 109195 - DNA, 25 bp, probe
gaaaataaactccaagcagccagta

SEQ ID NO: 109196 - DNA, 25 bp, probe
caccaagcggaaaataaactccaag

SEQ ID NO: 109197 - DNA, 25 bp, probe
caagcggaaaataaactccaagcag

SEQ ID NO: 109198 - DNA, 25 bp, probe
aataaactccaagcagccagtagcc

SEQ ID NO: 109199 - DNA, 25 bp, probe
ggaaaataaactccaagcagccagt

SEQ ID NO: 109200 - DNA, 25 bp, probe
ccaagcggaaaataaactccaagca

SEQ ID NO: 109201 - DNA, 25 bp, probe
accaagcggaaaataaactccaagc

SEQ ID NO: 109202 - DNA, 25 bp, probe
ctggcaccaagcggaaaataaactc

SEQ ID NO: 109203 - DNA, 25 bp, probe
gcaccaagcggaaaataaactccaa

SEQ ID NO: 109204 - DNA, 25 bp, probe
cggaaaataaactccaagcagccag

SEQ ID NO: 109205 - DNA, 25 bp, probe
aagcggaaaataaactccaagcagc

SEQ ID NO: 109206 - DNA, 25 bp, probe
ctagctttcctgacacctggaactg

SEQ ID NO: 109207 - DNA, 25 bp, probe
aagagagagagatattgactgctgg

SEQ ID NO: 109208 - DNA, 25 bp, probe
gttcactcttctattcgccatcttc

SEQ ID NO: 109209 - DNA, 25 bp, probe
aatagaggatgaggacttgaaggtg

SEQ ID NO: 109210 - DNA, 25 bp, probe
agttcactcttctattcgccatctt

SEQ ID NO: 109211 - DNA, 25 bp, probe
ttcactcttctattcgccatcttcc

SEQ ID NO: 109212 - DNA, 25 bp, probe
tctatgaacgccttcggtcaattaa

SEQ ID NO: 109213 - DNA, 25 bp, probe
attcaggaggtggtaaatcttcaaa

SEQ ID NO: 109214 - DNA, 25 bp, probe
cagaaatagaggatgaggacttgaa

SEQ ID NO: 109215 - DNA, 25 bp, probe
aaagagagagagatattgactgctg

SEQ ID NO: 109216 - DNA, 25 bp, probe
agtctggatctgaactgttgcttaa

SEQ ID NO: 109217 - DNA, 25 bp, probe
gaaatagaggatgaggacttgaagg

SEQ ID NO: 109218 - DNA, 25 bp, probe
agaaatagaggatgaggacttgaag

SEQ ID NO: 109219 - DNA, 25 bp, probe
aactgttgcttaaagagagagagat

SEQ ID NO: 109220 - DNA, 25 bp, probe
gaactgttgcttaaagagagagaga

SEQ ID NO: 109221 - DNA, 25 bp, probe
cattcaggaggtggtaaatcttcaa

SEQ ID NO: 109222 - DNA, 25 bp, probe
tgaactgttgcttaaagagagagag

SEQ ID NO: 109223 - DNA, 25 bp, probe
ctgaactgttgcttaaagagagaga

SEQ ID NO: 109224 - DNA, 25 bp, probe
ttcaggaggtggtaaatcttcaaac

SEQ ID NO: 109225 - DNA, 25 bp, probe
tggtccagagagtaatcagtgctta

SEQ ID NO: 109226 - DNA, 25 bp, probe
aaatagaggatgaggacttgaaggt

SEQ ID NO: 109227 - DNA, 25 bp, probe
aaatcttcaaacccagcagaataag

SEQ ID NO: 109228 - DNA, 25 bp, probe
atagaggatgaggacttgaaggtgg

SEQ ID NO: 109229 - DNA, 25 bp, probe
actgttgcttaaagagagagagata

SEQ ID NO: 109230 - DNA, 25 bp, probe
atctgaactgttgcttaaagagaga

SEQ ID NO: 109231 - DNA, 25 bp, probe
acaaggtgacaacttcttatctttc

SEQ ID NO: 109232 - DNA, 25 bp, probe
ccttcggtcaattaaagatagcaaa

SEQ ID NO: 109233 - DNA, 25 bp, probe
tctgaactgttgcttaaagagagag

SEQ ID NO: 109234 - DNA, 25 bp, probe
gtaaatcttcaaacccagcagaata

SEQ ID NO: 109235 - DNA, 25 bp, probe
ctctatgaacgccttcggtcaatta

SEQ ID NO: 109236 - DNA, 25 bp, probe
agagagtaatcagtgcttaccacac

SEQ ID NO: 109237 - DNA, 25 bp, probe
cagagagtaatcagtgcttaccaca

SEQ ID NO: 109238 - DNA, 25 bp, probe
agcttgtgagactgatgtatcttca

SEQ ID NO: 109239 - DNA, 25 bp, probe
aacaaggtgacaacttcttatcttt

SEQ ID NO: 109240 - DNA, 25 bp, probe
tcagaaatagaggatgaggacttga

SEQ ID NO: 109241 - DNA, 25 bp, probe
atcagaaatagaggatgaggacttg

SEQ ID NO: 109242 - DNA, 25 bp, probe
tgaatcagaaatagaggatgaggac

SEQ ID NO: 109243 - DNA, 25 bp, probe
taaagagagagagatattgactgct

SEQ ID NO: 109244 - DNA, 25 bp, probe
acattcaggaggtggtaaatcttca

SEQ ID NO: 109245 - DNA, 25 bp, probe
gagttcactcttctattcgccatct

SEQ ID NO: 109246 - DNA, 25 bp, probe
gaatcagaaatagaggatgaggact

SEQ ID NO: 109247 - DNA, 25 bp, probe
aatcttcaaacccagcagaataagg

SEQ ID NO: 109248 - DNA, 25 bp, probe
cagcttgtgagactgatgtatcttc

SEQ ID NO: 109249 - DNA, 25 bp, probe
caaggtgacaacttcttatctttca

SEQ ID NO: 109250 - DNA, 25 bp, probe
taaatcttcaaacccagcagaataa

SEQ ID NO: 109251 - DNA, 25 bp, probe
tggaaactaaggctttactcatcag

SEQ ID NO: 109252 - DNA, 25 bp, probe
atggaaactaaggctttactcatca

SEQ ID NO: 109253 - DNA, 25 bp, probe
taactgttactcaagccaccacatt

SEQ ID NO: 109254 - DNA, 25 bp, probe
aactaaggctttactcatcagtctt

SEQ ID NO: 109255 - DNA, 25 bp, probe
aaactaaggctttactcatcagtct

SEQ ID NO: 109256 - DNA, 25 bp, probe
agttaatgcccactgaaagaaattc

SEQ ID NO: 109257 - DNA, 25 bp, probe
ggaaactaaggctttactcatcagt

SEQ ID NO: 109258 - DNA, 25 bp, probe
gaaactaaggctttactcatcagtc

SEQ ID NO: 109259 - DNA, 25 bp, probe
caacatggaaactaaggctttactc

SEQ ID NO: 109260 - DNA, 25 bp, probe
ctcaacatggaaactaaggctttac

SEQ ID NO: 109261 - DNA, 25 bp, probe
aacatggaaactaaggctttactca

SEQ ID NO: 109262 - DNA, 25 bp, probe
tcaacatggaaactaaggctttact

SEQ ID NO: 109263 - DNA, 25 bp, probe
catggaaactaaggctttactcatc

SEQ ID NO: 109264 - DNA, 25 bp, probe
acatggaaactaaggctttactcat

SEQ ID NO: 109265 - DNA, 25 bp, probe
actcatcagtcttaagtatggttgt

SEQ ID NO: 109266 - DNA, 25 bp, probe
ctcatcagtcttaagtatggttgtt

SEQ ID NO: 109267 - DNA, 25 bp, probe
aattgggagatactgatacttgttt

SEQ ID NO: 109268 - DNA, 25 bp, probe
actaaggctttactcatcagtctta

SEQ ID NO: 109269 - DNA, 25 bp, probe
atgaagctaaatggacagttaatgc

SEQ ID NO: 109270 - DNA, 25 bp, probe
ctaaggctttactcatcagtcttaa

SEQ ID NO: 109271 - DNA, 25 bp, probe
ttcatctcctcaacatggaaactaa

SEQ ID NO: 109272 - DNA, 25 bp, probe
tcatctcctcaacatggaaactaag

SEQ ID NO: 109273 - DNA, 25 bp, probe
cttcatctcctcaacatggaaacta

SEQ ID NO: 109274 - DNA, 25 bp, probe
tgaagctaaatggacagttaatgcc

SEQ ID NO: 109275 - DNA, 25 bp, probe
cctcaacatggaaactaaggcttta

SEQ ID NO: 109276 - DNA, 25 bp, probe
catctcctcaacatggaaactaagg

SEQ ID NO: 109277 - DNA, 25 bp, probe
aaactgttaatgaagctaaatggac

SEQ ID NO: 109278 - DNA, 25 bp, probe
tgttaatgaagctaaatggacagtt

SEQ ID NO: 109279 - DNA, 25 bp, probe
aactgttaatgaagctaaatggaca

SEQ ID NO: 109280 - DNA, 25 bp, probe
gatcacctgaagtcagagttcaaga

SEQ ID NO: 109281 - DNA, 25 bp, probe
aatgaagctaaatggacagttaatg

SEQ ID NO: 109282 - DNA, 25 bp, probe
gacttcatctcctcaacatggaaac

SEQ ID NO: 109283 - DNA, 25 bp, probe
atcacctgaagtcagagttcaagac

SEQ ID NO: 109284 - DNA, 25 bp, probe
gaagctaaatggacagttaatgccc

SEQ ID NO: 109285 - DNA, 25 bp, probe
acttcatctcctcaacatggaaact

SEQ ID NO: 109286 - DNA, 25 bp, probe
gtctcgtggtaaaactgttaatgaa

SEQ ID NO: 109287 - DNA, 25 bp, probe
gtaactgttactcaagccaccacat

SEQ ID NO: 109288 - DNA, 25 bp, probe
ctcgtggtaaaactgttaatgaagc

SEQ ID NO: 109289 - DNA, 25 bp, probe
tctcgtggtaaaactgttaatgaag

SEQ ID NO: 109290 - DNA, 25 bp, probe
aaggctttactcatcagtcttaagt

SEQ ID NO: 109291 - DNA, 25 bp, probe
ttaagtatggttgttttatgtggca

SEQ ID NO: 109292 - DNA, 25 bp, probe
tactcatcagtcttaagtatggttg

SEQ ID NO: 109293 - DNA, 25 bp, probe
ggtctcgtggtaaaactgttaatga

SEQ ID NO: 109294 - DNA, 25 bp, probe
ctggtctcgtggtaaaactgttaat

SEQ ID NO: 109295 - DNA, 25 bp, probe
gttcatccaattaggcatccttctt

SEQ ID NO: 109296 - DNA, 25 bp, probe
cgcaaataagaaaccaagggataaa

SEQ ID NO: 109297 - DNA, 25 bp, probe
acgcaaataagaaaccaagggataa

SEQ ID NO: 109298 - DNA, 25 bp, probe
acttacgttcatccaattaggcatc

SEQ ID NO: 109299 - DNA, 25 bp, probe
aacttacgttcatccaattaggcat

SEQ ID NO: 109300 - DNA, 25 bp, probe
cacgcaaataagaaaccaagggata

SEQ ID NO: 109301 - DNA, 25 bp, probe
cttacgttcatccaattaggcatcc

SEQ ID NO: 109302 - DNA, 25 bp, probe
cttctttgccagattcatccctaag

SEQ ID NO: 109303 - DNA, 25 bp, probe
tactccacatacaatgtaagtgctt

SEQ ID NO: 109304 - DNA, 25 bp, probe
ttactccacatacaatgtaagtgct

SEQ ID NO: 109305 - DNA, 25 bp, probe
caactcaaattcagatgatcctcaa

SEQ ID NO: 109306 - DNA, 25 bp, probe
ttcatccaattaggcatccttcttt

SEQ ID NO: 109307 - DNA, 25 bp, probe
taaatcctctctacttgactcaggg

SEQ ID NO: 109308 - DNA, 25 bp, probe
ttaaatcctctctacttgactcagg

SEQ ID NO: 109309 - DNA, 25 bp, probe
cgttcatccaattaggcatccttct

SEQ ID NO: 109310 - DNA, 25 bp, probe
ctgtaggaatcgtgggtcttcatag

SEQ ID NO: 109311 - DNA, 25 bp, probe
gcaactcaaattcagatgatcctca

SEQ ID NO: 109312 - DNA, 25 bp, probe
tcatccaattaggcatccttctttg

SEQ ID NO: 109313 - DNA, 25 bp, probe
gtcttcataggcatgtttctgatcc

SEQ ID NO: 109314 - DNA, 25 bp, probe
ggtcttcataggcatgtttctgatc

SEQ ID NO: 109315 - DNA, 25 bp, probe
ccttctttgccagattcatccctaa

SEQ ID NO: 109316 - DNA, 25 bp, probe
tacgttcatccaattaggcatcctt

SEQ ID NO: 109317 - DNA, 25 bp, probe
ttacgttcatccaattaggcatcct

SEQ ID NO: 109318 - DNA, 25 bp, probe
actgtaggaatcgtgggtcttcata

SEQ ID NO: 109319 - DNA, 25 bp, probe
tcatggatgcaactcaaattcagat

SEQ ID NO: 109320 - DNA, 25 bp, probe
cttccacgcaaataagaaaccaagg

SEQ ID NO: 109321 - DNA, 25 bp, probe
ccttccacgcaaataagaaaccaag

SEQ ID NO: 109322 - DNA, 25 bp, probe
ttcatggatgcaactcaaattcaga

SEQ ID NO: 109323 - DNA, 25 bp, probe
gttaggaaactccaatttctcttgc

SEQ ID NO: 109324 - DNA, 25 bp, probe
catggatgcaactcaaattcagatg

SEQ ID NO: 109325 - DNA, 25 bp, probe
tggtcttccagggaaataatcattt

SEQ ID NO: 109326 - DNA, 25 bp, probe
tgttaggaaactccaatttctcttg

SEQ ID NO: 109327 - DNA, 25 bp, probe
gatgcaactcaaattcagatgatcc

SEQ ID NO: 109328 - DNA, 25 bp, probe
ggatgcaactcaaattcagatgatc

SEQ ID NO: 109329 - DNA, 25 bp, probe
cttcataggcatgtttctgatcctg

SEQ ID NO: 109330 - DNA, 25 bp, probe
tcttcataggcatgtttctgatcct

SEQ ID NO: 109331 - DNA, 25 bp, probe
aaacttacgttcatccaattaggca

SEQ ID NO: 109332 - DNA, 25 bp, probe
atgcaactcaaattcagatgatcct

SEQ ID NO: 109333 - DNA, 25 bp, probe
gttcatggatgcaactcaaattcag

SEQ ID NO: 109334 - DNA, 25 bp, probe
ctgttcatggatgcaactcaaattc

SEQ ID NO: 109335 - DNA, 25 bp, probe
ccagattcatccctaagcactgtag

SEQ ID NO: 109336 - DNA, 25 bp, probe
catggagactcctatttactgcttt

SEQ ID NO: 109337 - DNA, 25 bp, probe
tggatgcaactcaaattcagatgat

SEQ ID NO: 109338 - DNA, 25 bp, probe
atggatgcaactcaaattcagatga

SEQ ID NO: 109339 - DNA, 25 bp, probe
cctcttccctcttgatgatgtcttt

SEQ ID NO: 109340 - DNA, 25 bp, probe
ggtctcccatctcctactttatgac

SEQ ID NO: 109341 - DNA, 25 bp, probe
caggtctcccatctcctactttatg

SEQ ID NO: 109342 - DNA, 25 bp, probe
atctcctactttatgacgccctctt

SEQ ID NO: 109343 - DNA, 25 bp, probe
aggtctcccatctcctactttatga

SEQ ID NO: 109344 - DNA, 25 bp, probe
gtctcccatctcctactttatgacg

SEQ ID NO: 109345 - DNA, 25 bp, probe
tctcctactttatgacgccctcttc

SEQ ID NO: 109346 - DNA, 25 bp, probe
cacagaatgttagagctgacaggac

SEQ ID NO: 109347 - DNA, 25 bp, probe
tcttccctcttgatgatgtcttttc

SEQ ID NO: 109348 - DNA, 25 bp, probe
ctcttccctcttgatgatgtctttt

SEQ ID NO: 109349 - DNA, 25 bp, probe
ccaggtctcccatctcctactttat

SEQ ID NO: 109350 - DNA, 25 bp, probe
ccctcttccctcttgatgatgtctt

SEQ ID NO: 109351 - DNA, 25 bp, probe
catctcctactttatgacgccctct

SEQ ID NO: 109352 - DNA, 25 bp, probe
tctcccatctcctactttatgacgc

SEQ ID NO: 109353 - DNA, 25 bp, probe
cttccctcttgatgatgtcttttca

SEQ ID NO: 109354 - DNA, 25 bp, probe
tgatgatgtcttttcaaagcaaatg

SEQ ID NO: 109355 - DNA, 25 bp, probe
gaggtagccttcaatcactggactc

SEQ ID NO: 109356 - DNA, 25 bp, probe
gatgatgtcttttcaaagcaaatga

SEQ ID NO: 109357 - DNA, 25 bp, probe
ctactttatgacgccctcttccctc

SEQ ID NO: 109358 - DNA, 25 bp, probe
ctcctactttatgacgccctcttcc

SEQ ID NO: 109359 - DNA, 25 bp, probe
acagaatgttagagctgacaggacc

SEQ ID NO: 109360 - DNA, 25 bp, probe
accaggtctcccatctcctacttta

SEQ ID NO: 109361 - DNA, 25 bp, probe
ccatctcctactttatgacgccctc

SEQ ID NO: 109362 - DNA, 25 bp, probe
ctcccatctcctactttatgacgcc

SEQ ID NO: 109363 - DNA, 25 bp, probe
tagccttcaatcactggactccatg

SEQ ID NO: 109364 - DNA, 25 bp, probe
gtagccttcaatcactggactccat

SEQ ID NO: 109365 - DNA, 25 bp, probe
tactttatgacgccctcttccctct

SEQ ID NO: 109366 - DNA, 25 bp, probe
ctttatgacgccctcttccctcttg

SEQ ID NO: 109367 - DNA, 25 bp, probe
ctcttgatgatgtcttttcaaagca

SEQ ID NO: 109368 - DNA, 25 bp, probe
ccctcttgatgatgtcttttcaaag

SEQ ID NO: 109369 - DNA, 25 bp, probe
tcttgatgatgtcttttcaaagcaa

SEQ ID NO: 109370 - DNA, 25 bp, probe
tccctcttgatgatgtcttttcaaa

SEQ ID NO: 109371 - DNA, 25 bp, probe
ttccctcttgatgatgtcttttcaa

SEQ ID NO: 109372 - DNA, 25 bp, probe
cctcttgatgatgtcttttcaaagc

SEQ ID NO: 109373 - DNA, 25 bp, probe
atgtcttttcaaagcaaatgaagtg

SEQ ID NO: 109374 - DNA, 25 bp, probe
tttcaaagcaaatgaagtgcctttt

SEQ ID NO: 109375 - DNA, 25 bp, probe
ttttcaaagcaaatgaagtgccttt

SEQ ID NO: 109376 - DNA, 25 bp, probe
gatgtcttttcaaagcaaatgaagt

SEQ ID NO: 109377 - DNA, 25 bp, probe
tgatgtcttttcaaagcaaatgaag

SEQ ID NO: 109378 - DNA, 25 bp, probe
cttgatgatgtcttttcaaagcaaa

SEQ ID NO: 109379 - DNA, 25 bp, probe
gaatgttagagctgacaggaccctt

SEQ ID NO: 109380 - DNA, 25 bp, probe
ttatgacgccctcttccctcttgat

SEQ ID NO: 109381 - DNA, 25 bp, probe
ttcaaagcaaatgaagtgccttttc

SEQ ID NO: 109382 - DNA, 25 bp, probe
cttttcaaagcaaatgaagtgcctt

SEQ ID NO: 109383 - DNA, 25 bp, probe
agttggtagtaggtatggttctcat

SEQ ID NO: 109384 - DNA, 25 bp, probe
ttggagttggtagtaggtatggttc

SEQ ID NO: 109385 - DNA, 25 bp, probe
gagttggtagtaggtatggttctca

SEQ ID NO: 109386 - DNA, 25 bp, probe
tggagttggtagtaggtatggttct

SEQ ID NO: 109387 - DNA, 25 bp, probe
ggagttggtagtaggtatggttctc

SEQ ID NO: 109388 - DNA, 25 bp, probe
gttggtagtaggtatggttctcata

SEQ ID NO: 109389 - DNA, 25 bp, probe
ctcatctcctaagtagctcttcaga

SEQ ID NO: 109390 - DNA, 25 bp, probe
agattggatttggagttggtagtag

SEQ ID NO: 109391 - DNA, 25 bp, probe
acatagattggatttggagttggta

SEQ ID NO: 109392 - DNA, 25 bp, probe
acacaagaaataaacagaatggtcc

SEQ ID NO: 109393 - DNA, 25 bp, probe
gatttggagttggtagtaggtatgg

SEQ ID NO: 109394 - DNA, 25 bp, probe
ggatttggagttggtagtaggtatg

SEQ ID NO: 109395 - DNA, 25 bp, probe
cacaagaaataaacagaatggtcct

SEQ ID NO: 109396 - DNA, 25 bp, probe
tggatttggagttggtagtaggtat

SEQ ID NO: 109397 - DNA, 25 bp, probe
atagattggatttggagttggtagt

SEQ ID NO: 109398 - DNA, 25 bp, probe
taaacagaatggtccttaacagagt

SEQ ID NO: 109399 - DNA, 25 bp, probe
ttggatttggagttggtagtaggta

SEQ ID NO: 109400 - DNA, 25 bp, probe
catagattggatttggagttggtag

SEQ ID NO: 109401 - DNA, 25 bp, probe
atctcctaagtagctcttcagagtc

SEQ ID NO: 109402 - DNA, 25 bp, probe
tcatctcctaagtagctcttcagag

SEQ ID NO: 109403 - DNA, 25 bp, probe
atttggagttggtagtaggtatggt

SEQ ID NO: 109404 - DNA, 25 bp, probe
gattggatttggagttggtagtagg

SEQ ID NO: 109405 - DNA, 25 bp, probe
aaatgtaacaaccagtcaaagaagc

SEQ ID NO: 109406 - DNA, 25 bp, probe
catctcctaagtagctcttcagagt

SEQ ID NO: 109407 - DNA, 25 bp, probe
tttggagttggtagtaggtatggtt

SEQ ID NO: 109408 - DNA, 25 bp, probe
tagattggatttggagttggtagta

SEQ ID NO: 109409 - DNA, 25 bp, probe
tttctcttcgttccagataccaaat

SEQ ID NO: 109410 - DNA, 25 bp, probe
aacatagattggatttggagttggt

SEQ ID NO: 109411 - DNA, 25 bp, probe
aacagaatggtccttaacagagttt

SEQ ID NO: 109412 - DNA, 25 bp, probe
aaacagaatggtccttaacagagtt

SEQ ID NO: 109413 - DNA, 25 bp, probe
tctcttcgttccagataccaaataa

SEQ ID NO: 109414 - DNA, 25 bp, probe
ttctcttcgttccagataccaaata

SEQ ID NO: 109415 - DNA, 25 bp, probe
attggatttggagttggtagtaggt

SEQ ID NO: 109416 - DNA, 25 bp, probe
gtgaacaacatagattggatttgga

SEQ ID NO: 109417 - DNA, 25 bp, probe
agtgaacaacatagattggatttgg

SEQ ID NO: 109418 - DNA, 25 bp, probe
acagaatggtccttaacagagtttg

SEQ ID NO: 109419 - DNA, 25 bp, probe
gaacaacatagattggatttggagt

SEQ ID NO: 109420 - DNA, 25 bp, probe
tgaacaacatagattggatttggag

SEQ ID NO: 109421 - DNA, 25 bp, probe
tctcctaagtagctcttcagagtct

SEQ ID NO: 109422 - DNA, 25 bp, probe
aatatgtgctcatctcctaagtagc

SEQ ID NO: 109423 - DNA, 25 bp, probe
acaagaaataaacagaatggtcctt

SEQ ID NO: 109424 - DNA, 25 bp, probe
aatgtaacaaccagtcaaagaagca

SEQ ID NO: 109425 - DNA, 25 bp, probe
ctcttcgttccagataccaaataaa

SEQ ID NO: 109426 - DNA, 25 bp, probe
ataaacagaatggtccttaacagag

SEQ ID NO: 109427 - DNA, 25 bp, probe
ccatacacattatctccagaggtta

SEQ ID NO: 109428 - DNA, 25 bp, probe
ttaccatacacattatctccagagg

SEQ ID NO: 109429 - DNA, 25 bp, probe
cttaccatacacattatctccagag

SEQ ID NO: 109430 - DNA, 25 bp, probe
tcttaccatacacattatctccaga

SEQ ID NO: 109431 - DNA, 25 bp, probe
gaactcattcatacctgtagagcac

SEQ ID NO: 109432 - DNA, 25 bp, probe
ctgtagagcacgaatccaagtagat

SEQ ID NO: 109433 - DNA, 25 bp, probe
ttcttaccatacacattatctccag

SEQ ID NO: 109434 - DNA, 25 bp, probe
catacacattatctccagaggttat

SEQ ID NO: 109435 - DNA, 25 bp, probe
aatgtcaggtcaatgaatatcagat

SEQ ID NO: 109436 - DNA, 25 bp, probe
taccatacacattatctccagaggt

SEQ ID NO: 109437 - DNA, 25 bp, probe
tacctgtagagcacgaatccaagta

SEQ ID NO: 109438 - DNA, 25 bp, probe
accatacacattatctccagaggtt

SEQ ID NO: 109439 - DNA, 25 bp, probe
ctcattcatacctgtagagcacgaa

SEQ ID NO: 109440 - DNA, 25 bp, probe
aagcagaaggtaaataatgtcaggt

SEQ ID NO: 109441 - DNA, 25 bp, probe
gtttgggtgtttgatagataaagca

SEQ ID NO: 109442 - DNA, 25 bp, probe
agtttgggtgtttgatagataaagc

SEQ ID NO: 109443 - DNA, 25 bp, probe
agcagaaggtaaataatgtcaggtc

SEQ ID NO: 109444 - DNA, 25 bp, probe
aaagcagaaggtaaataatgtcagg

SEQ ID NO: 109445 - DNA, 25 bp, probe
taatgtcaggtcaatgaatatcaga

SEQ ID NO: 109446 - DNA, 25 bp, probe
gcagaaggtaaataatgtcaggtca

SEQ ID NO: 109447 - DNA, 25 bp, probe
gtagagcacgaatccaagtagattg

SEQ ID NO: 109448 - DNA, 25 bp, probe
cattcatacctgtagagcacgaatc

SEQ ID NO: 109449 - DNA, 25 bp, probe
aactcattcatacctgtagagcacg

SEQ ID NO: 109450 - DNA, 25 bp, probe
catacctgtagagcacgaatccaag

SEQ ID NO: 109451 - DNA, 25 bp, probe
tagagcacgaatccaagtagattgt

SEQ ID NO: 109452 - DNA, 25 bp, probe
tgtagagcacgaatccaagtagatt

SEQ ID NO: 109453 - DNA, 25 bp, probe
cagaaggtaaataatgtcaggtcaa

SEQ ID NO: 109454 - DNA, 25 bp, probe
cttcacatccactgggcatataata

SEQ ID NO: 109455 - DNA, 25 bp, probe
ttcacatccactgggcatataatat

SEQ ID NO: 109456 - DNA, 25 bp, probe
ccctacattctactagccaatcaaa

SEQ ID NO: 109457 - DNA, 25 bp, probe
gttatcaccaaacagcaaaccatag

SEQ ID NO: 109458 - DNA, 25 bp, probe
tcattcatacctgtagagcacgaat

SEQ ID NO: 109459 - DNA, 25 bp, probe
atacacattatctccagaggttatt

SEQ ID NO: 109460 - DNA, 25 bp, probe
ctactagccaatcaaagacaaagag

SEQ ID NO: 109461 - DNA, 25 bp, probe
atgtcaggtcaatgaatatcagata

SEQ ID NO: 109462 - DNA, 25 bp, probe
ttatcaccaaacagcaaaccatagg

SEQ ID NO: 109463 - DNA, 25 bp, probe
accctacattctactagccaatcaa

SEQ ID NO: 109464 - DNA, 25 bp, probe
ttcaccctacattctactagccaat

SEQ ID NO: 109465 - DNA, 25 bp, probe
ttaatagctgtaaggaagaacctgc

SEQ ID NO: 109466 - DNA, 25 bp, probe
acattctactagccaatcaaagaca

SEQ ID NO: 109467 - DNA, 25 bp, probe
cctacattctactagccaatcaaag

SEQ ID NO: 109468 - DNA, 25 bp, probe
tctactagccaatcaaagacaaaga

SEQ ID NO: 109469 - DNA, 25 bp, probe
tttcaccctacattctactagccaa

SEQ ID NO: 109470 - DNA, 25 bp, probe
acttaatagctgtaaggaagaacct

SEQ ID NO: 109471 - DNA, 25 bp, probe
tacaataaggctcatcagtggtatc

SEQ ID NO: 109472 - DNA, 25 bp, probe
gttgcctcttactcattcatcatct

SEQ ID NO: 109473 - DNA, 25 bp, probe
ttacaataaggctcatcagtggtat

SEQ ID NO: 109474 - DNA, 25 bp, probe
tgcctcttactcattcatcatctaa

SEQ ID NO: 109475 - DNA, 25 bp, probe
ttgcctcttactcattcatcatcta

SEQ ID NO: 109476 - DNA, 25 bp, probe
gcctcttactcattcatcatctaac

SEQ ID NO: 109477 - DNA, 25 bp, probe
agttgcctcttactcattcatcatc

SEQ ID NO: 109478 - DNA, 25 bp, probe
cagttgcctcttactcattcatcat

SEQ ID NO: 109479 - DNA, 25 bp, probe
gtatccagttgcctcttactcattc

SEQ ID NO: 109480 - DNA, 25 bp, probe
tatatcatggctacacactcacaag

SEQ ID NO: 109481 - DNA, 25 bp, probe
gtatatcatggctacacactcacaa

SEQ ID NO: 109482 - DNA, 25 bp, probe
tatccagttgcctcttactcattca

SEQ ID NO: 109483 - DNA, 25 bp, probe
cttacaataaggctcatcagtggta

SEQ ID NO: 109484 - DNA, 25 bp, probe
cctcttactcattcatcatctaaca

SEQ ID NO: 109485 - DNA, 25 bp, probe
acaataaggctcatcagtggtatcc

SEQ ID NO: 109486 - DNA, 25 bp, probe
tacacttacaataaggctcatcagt

SEQ ID NO: 109487 - DNA, 25 bp, probe
ccaattacacttacaataaggctca

SEQ ID NO: 109488 - DNA, 25 bp, probe
atccagttgcctcttactcattcat

SEQ ID NO: 109489 - DNA, 25 bp, probe
tgaacctgttgtatatcatggctac

SEQ ID NO: 109490 - DNA, 25 bp, probe
ttacacttacaataaggctcatcag

SEQ ID NO: 109491 - DNA, 25 bp, probe
ggtatccagttgcctcttactcatt

SEQ ID NO: 109492 - DNA, 25 bp, probe
ataagcgtggagacaatcaagacaa

SEQ ID NO: 109493 - DNA, 25 bp, probe
acttacaataaggctcatcagtggt

SEQ ID NO: 109494 - DNA, 25 bp, probe
aaggttatcgtcgtattcctctgtt

SEQ ID NO: 109495 - DNA, 25 bp, probe
tccagttgcctcttactcattcatc

SEQ ID NO: 109496 - DNA, 25 bp, probe
ctgcttcactgtttgtttatgtttg

SEQ ID NO: 109497 - DNA, 25 bp, probe
ttggtacgtcagataacagctaatg

SEQ ID NO: 109498 - DNA, 25 bp, probe
gataagcgtggagacaatcaagaca

SEQ ID NO: 109499 - DNA, 25 bp, probe
ggtcaaggtttaatagcaggaaatg

SEQ ID NO: 109500 - DNA, 25 bp, probe
aggtcaaggtttaatagcaggaaat

SEQ ID NO: 109501 - DNA, 25 bp, probe
attacacttacaataaggctcatca

SEQ ID NO: 109502 - DNA, 25 bp, probe
cctgcttcactgtttgtttatgttt

SEQ ID NO: 109503 - DNA, 25 bp, probe
aaggtcaaggtttaatagcaggaaa

SEQ ID NO: 109504 - DNA, 25 bp, probe
ccagttgcctcttactcattcatca

SEQ ID NO: 109505 - DNA, 25 bp, probe
gcttcactgtttgtttatgtttggt

SEQ ID NO: 109506 - DNA, 25 bp, probe
tgcttcactgtttgtttatgtttgg

SEQ ID NO: 109507 - DNA, 25 bp, probe
actcattcatcatctaacaaaggtg

SEQ ID NO: 109508 - DNA, 25 bp, probe
gaaggtcaaggtttaatagcaggaa

SEQ ID NO: 109509 - DNA, 25 bp, probe
actgttatccaagctatacacaagt

SEQ ID NO: 109510 - DNA, 25 bp, probe
taagcgtggagacaatcaagacaag

SEQ ID NO: 109511 - DNA, 25 bp, probe
atgaacaaaggttatcgtcgtattc

SEQ ID NO: 109512 - DNA, 25 bp, probe
atgaagcagcagactcgtgtaatta

SEQ ID NO: 109513 - DNA, 25 bp, probe
ggtacgtcagataacagctaatgat

SEQ ID NO: 109514 - DNA, 25 bp, probe
aatgaagcagcagactcgtgtaatt

SEQ ID NO: 109515 - DNA, 25 bp, probe
atatcacttcatagacttgctggaa

SEQ ID NO: 109516 - DNA, 25 bp, probe
aacatcaatacctcagcttcttcag

SEQ ID NO: 109517 - DNA, 25 bp, probe
caacatcaatacctcagcttcttca

SEQ ID NO: 109518 - DNA, 25 bp, probe
gatatcacttcatagacttgctgga

SEQ ID NO: 109519 - DNA, 25 bp, probe
aggatatcacttcatagacttgctg

SEQ ID NO: 109520 - DNA, 25 bp, probe
gaggatatcacttcatagacttgct

SEQ ID NO: 109521 - DNA, 25 bp, probe
ggacccagaattaacccatacaaat

SEQ ID NO: 109522 - DNA, 25 bp, probe
aaagaatgaaatctggagaggatgt

SEQ ID NO: 109523 - DNA, 25 bp, probe
gaatgaaatctggagaggatgtgag

SEQ ID NO: 109524 - DNA, 25 bp, probe
ggatatcacttcatagacttgctgg

SEQ ID NO: 109525 - DNA, 25 bp, probe
gacccagaattaacccatacaaatg

SEQ ID NO: 109526 - DNA, 25 bp, probe
aagaatgaaatctggagaggatgtg

SEQ ID NO: 109527 - DNA, 25 bp, probe
acccagaattaacccatacaaatgt

SEQ ID NO: 109528 - DNA, 25 bp, probe
tgaggatatcacttcatagacttgc

SEQ ID NO: 109529 - DNA, 25 bp, probe
agaatgaaatctggagaggatgtga

SEQ ID NO: 109530 - DNA, 25 bp, probe
gcatcaaagtcaaacagatccatat

SEQ ID NO: 109531 - DNA, 25 bp, probe
gcaacatcaatacctcagcttcttc

SEQ ID NO: 109532 - DNA, 25 bp, probe
agcatcaaagtcaaacagatccata

SEQ ID NO: 109533 - DNA, 25 bp, probe
tagcatcaaagtcaaacagatccat

SEQ ID NO: 109534 - DNA, 25 bp, probe
ttagcatcaaagtcaaacagatcca

SEQ ID NO: 109535 - DNA, 25 bp, probe
cttagcatcaaagtcaaacagatcc

SEQ ID NO: 109536 - DNA, 25 bp, probe
cccagaattaacccatacaaatgta

SEQ ID NO: 109537 - DNA, 25 bp, probe
aatgaaatctggagaggatgtgagg

SEQ ID NO: 109538 - DNA, 25 bp, probe
ttcttcagcaacttcatcaagtaag

SEQ ID NO: 109539 - DNA, 25 bp, probe
cttcttcagcaacttcatcaagtaa

SEQ ID NO: 109540 - DNA, 25 bp, probe
tcttcagcaacttcatcaagtaagg

SEQ ID NO: 109541 - DNA, 25 bp, probe
aatggcagcaacatcaatacctcag

SEQ ID NO: 109542 - DNA, 25 bp, probe
tatcacttcatagacttgctggaag

SEQ ID NO: 109543 - DNA, 25 bp, probe
cctaccacatgaggatatcacttca

SEQ ID NO: 109544 - DNA, 25 bp, probe
acctaccacatgaggatatcacttc

SEQ ID NO: 109545 - DNA, 25 bp, probe
gcttcttcagcaacttcatcaagta

SEQ ID NO: 109546 - DNA, 25 bp, probe
ccagaattaacccatacaaatgtac

SEQ ID NO: 109547 - DNA, 25 bp, probe
cacctaccacatgaggatatcactt

SEQ ID NO: 109548 - DNA, 25 bp, probe
atgaaatctggagaggatgtgagga

SEQ ID NO: 109549 - DNA, 25 bp, probe
atagacttgctggaagggttcattg

SEQ ID NO: 109550 - DNA, 25 bp, probe
catagacttgctggaagggttcatt

SEQ ID NO: 109551 - DNA, 25 bp, probe
catcaaagtcaaacagatccatatt

SEQ ID NO: 109552 - DNA, 25 bp, probe
atcaaagtcaaacagatccatattc

SEQ ID NO: 109553 - DNA, 25 bp, probe
accacatgaggatatcacttcatag

SEQ ID NO: 109554 - DNA, 25 bp, probe
ctaccacatgaggatatcacttcat

SEQ ID NO: 109555 - DNA, 25 bp, probe
tggacccagaattaacccatacaaa

SEQ ID NO: 109556 - DNA, 25 bp, probe
ccacatgaggatatcacttcataga

SEQ ID NO: 109557 - DNA, 25 bp, probe
aaatctggagaggatgtgaggagag

SEQ ID NO: 109558 - DNA, 25 bp, probe
gaaatctggagaggatgtgaggaga

SEQ ID NO: 109559 - DNA, 25 bp, probe
agctagagtatgacaaggtgccata

SEQ ID NO: 109560 - DNA, 25 bp, probe
gagctagagtatgacaaggtgccat

SEQ ID NO: 109561 - DNA, 25 bp, probe
gacatcttcacctttgaccgtacag

SEQ ID NO: 109562 - DNA, 25 bp, probe
catctttccctccaaggtttgtctg

SEQ ID NO: 109563 - DNA, 25 bp, probe
cagacatctttccctccaaggtttg

SEQ ID NO: 109564 - DNA, 25 bp, probe
ctatgcagacatctttccctccaag

SEQ ID NO: 109565 - DNA, 25 bp, probe
acatctttccctccaaggtttgtct

SEQ ID NO: 109566 - DNA, 25 bp, probe
agacatctttccctccaaggtttgt

SEQ ID NO: 109567 - DNA, 25 bp, probe
ggacatcttcacctttgaccgtaca

SEQ ID NO: 109568 - DNA, 25 bp, probe
acatcttcacctttgaccgtacagg

SEQ ID NO: 109569 - DNA, 25 bp, probe
tatgcagacatctttccctccaagg

SEQ ID NO: 109570 - DNA, 25 bp, probe
gctatgcagacatctttccctccaa

SEQ ID NO: 109571 - DNA, 25 bp, probe
gctagagtatgacaaggtgccatac

SEQ ID NO: 109572 - DNA, 25 bp, probe
atctttccctccaaggtttgtctgc

SEQ ID NO: 109573 - DNA, 25 bp, probe
gcagacatctttccctccaaggttt

SEQ ID NO: 109574 - DNA, 25 bp, probe
gggacatcttcacctttgaccgtac

SEQ ID NO: 109575 - DNA, 25 bp, probe
ctttgaccgtacaggtacagaagcc

SEQ ID NO: 109576 - DNA, 25 bp, probe
cctttgaccgtacaggtacagaagc

SEQ ID NO: 109577 - DNA, 25 bp, probe
gacatctttccctccaaggtttgtc

SEQ ID NO: 109578 - DNA, 25 bp, probe
atcttcacctttgaccgtacaggta

SEQ ID NO: 109579 - DNA, 25 bp, probe
ttggggagctagagtatgacaaggt

SEQ ID NO: 109580 - DNA, 25 bp, probe
acctttgaccgtacaggtacagaag

SEQ ID NO: 109581 - DNA, 25 bp, probe
tcttcacctttgaccgtacaggtac

SEQ ID NO: 109582 - DNA, 25 bp, probe
gtatgacaaggtgccatactcctcc

SEQ ID NO: 109583 - DNA, 25 bp, probe
tggggagctagagtatgacaaggtg

SEQ ID NO: 109584 - DNA, 25 bp, probe
cacctttgaccgtacaggtacagaa

SEQ ID NO: 109585 - DNA, 25 bp, probe
ttcacctttgaccgtacaggtacag

SEQ ID NO: 109586 - DNA, 25 bp, probe
cttcacctttgaccgtacaggtaca

SEQ ID NO: 109587 - DNA, 25 bp, probe
cttggggagctagagtatgacaagg

SEQ ID NO: 109588 - DNA, 25 bp, probe
catcttcacctttgaccgtacaggt

SEQ ID NO: 109589 - DNA, 25 bp, probe
tcacctttgaccgtacaggtacaga

SEQ ID NO: 109590 - DNA, 25 bp, probe
tgcttggggagctagagtatgacaa

SEQ ID NO: 109591 - DNA, 25 bp, probe
gcttggggagctagagtatgacaag

SEQ ID NO: 109592 - DNA, 25 bp, probe
ctctttcaggaccatggcttcttcc

SEQ ID NO: 109593 - DNA, 25 bp, probe
ctcctacatctgttctcgctactac

SEQ ID NO: 109594 - DNA, 25 bp, probe
tctcctacatctgttctcgctacta

SEQ ID NO: 109595 - DNA, 25 bp, probe
ctcctgtgtcccttgtaaatagaac

SEQ ID NO: 109596 - DNA, 25 bp, probe
tcctacatctgttctcgctactacc

SEQ ID NO: 109597 - DNA, 25 bp, probe
agttcaagttccctcagattaaagc

SEQ ID NO: 109598 - DNA, 25 bp, probe
gtctcctacatctgttctcgctact

SEQ ID NO: 109599 - DNA, 25 bp, probe
cctcctgtgtcccttgtaaatagaa

SEQ ID NO: 109600 - DNA, 25 bp, probe
gagttcaagttccctcagattaaag

SEQ ID NO: 109601 - DNA, 25 bp, probe
ctagactagagggcagaggtaaatg

SEQ ID NO: 109602 - DNA, 25 bp, probe
tcctgtgtcccttgtaaatagaacc

SEQ ID NO: 109603 - DNA, 25 bp, probe
gtcttagtttccacagtaaggtttg

SEQ ID NO: 109604 - DNA, 25 bp, probe
tgtcttagtttccacagtaaggttt

SEQ ID NO: 109605 - DNA, 25 bp, probe
atgtcttagtttccacagtaaggtt

SEQ ID NO: 109606 - DNA, 25 bp, probe
gatgtcttagtttccacagtaaggt

SEQ ID NO: 109607 - DNA, 25 bp, probe
tgatgtcttagtttccacagtaagg

SEQ ID NO: 109608 - DNA, 25 bp, probe
cctgatgtcttagtttccacagtaa

SEQ ID NO: 109609 - DNA, 25 bp, probe
gtacagacctccgttcaataaatta

SEQ ID NO: 109610 - DNA, 25 bp, probe
tagactagagggcagaggtaaatga

SEQ ID NO: 109611 - DNA, 25 bp, probe
cctgtgtcccttgtaaatagaacca

SEQ ID NO: 109612 - DNA, 25 bp, probe
ctgatgtcttagtttccacagtaag

SEQ ID NO: 109613 - DNA, 25 bp, probe
tcctgatgtcttagtttccacagta

SEQ ID NO: 109614 - DNA, 25 bp, probe
acagacctccgttcaataaattatt

SEQ ID NO: 109615 - DNA, 25 bp, probe
ctgtgtcccttgtaaatagaaccag

SEQ ID NO: 109616 - DNA, 25 bp, probe
tacagacctccgttcaataaattat

SEQ ID NO: 109617 - DNA, 25 bp, probe
tcttagtttccacagtaaggtttgc

SEQ ID NO: 109618 - DNA, 25 bp, probe
ggagttcaagttccctcagattaaa

SEQ ID NO: 109619 - DNA, 25 bp, probe
ttcaagttccctcagattaaagctc

SEQ ID NO: 109620 - DNA, 25 bp, probe
cttctttgatgaactgcgatgtctg

SEQ ID NO: 109621 - DNA, 25 bp, probe
tgtctcctacatctgttctcgctac

SEQ ID NO: 109622 - DNA, 25 bp, probe
gttcaagttccctcagattaaagct

SEQ ID NO: 109623 - DNA, 25 bp, probe
tgtgtcccttgtaaatagaaccagc

SEQ ID NO: 109624 - DNA, 25 bp, probe
ctcctgatgtcttagtttccacagt

SEQ ID NO: 109625 - DNA, 25 bp, probe
cttagtttccacagtaaggtttgcc

SEQ ID NO: 109626 - DNA, 25 bp, probe
caagttccctcagattaaagctcac

SEQ ID NO: 109627 - DNA, 25 bp, probe
tcaagttccctcagattaaagctca

SEQ ID NO: 109628 - DNA, 25 bp, probe
cctacatctgttctcgctactaccg

SEQ ID NO: 109629 - DNA, 25 bp, probe
agactagagggcagaggtaaatgag

SEQ ID NO: 109630 - DNA, 25 bp, probe
ctcatctttggagccactgattaca

SEQ ID NO: 109631 - DNA, 25 bp, probe
ccctcctgtgtcccttgtaaataga

SEQ ID NO: 109632 - DNA, 25 bp, probe
ttagtttccacagtaaggtttgcct

SEQ ID NO: 109633 - DNA, 25 bp, probe
ccattcttatccctcctcacttgag

SEQ ID NO: 109634 - DNA, 25 bp, probe
cggagttcaagttccctcagattaa

SEQ ID NO: 109635 - DNA, 25 bp, probe
gtgtcccttgtaaatagaaccagcc

SEQ ID NO: 109636 - DNA, 25 bp, probe
cctagactagagggcagaggtaaat

SEQ ID NO: 109637 - DNA, 25 bp, probe
taaaggtttgggcatggagaacatt

SEQ ID NO: 109638 - DNA, 25 bp, probe
ctaaaggtttgggcatggagaacat

SEQ ID NO: 109639 - DNA, 25 bp, probe
aaaggtttgggcatggagaacattg

SEQ ID NO: 109640 - DNA, 25 bp, probe
aattcatatggtccacacggaggtc

SEQ ID NO: 109641 - DNA, 25 bp, probe
ttcgtggcggtcatggaattcatat

SEQ ID NO: 109642 - DNA, 25 bp, probe
gtcatggaattcatatggtccacac

SEQ ID NO: 109643 - DNA, 25 bp, probe
gaattcatatggtccacacggaggt

SEQ ID NO: 109644 - DNA, 25 bp, probe
tggcggtcatggaattcatatggtc

SEQ ID NO: 109645 - DNA, 25 bp, probe
gagctaaaggtttgggcatggagaa

SEQ ID NO: 109646 - DNA, 25 bp, probe
ggtcatggaattcatatggtccaca

SEQ ID NO: 109647 - DNA, 25 bp, probe
ggaattcatatggtccacacggagg

SEQ ID NO: 109648 - DNA, 25 bp, probe
tcatggaattcatatggtccacacg

SEQ ID NO: 109649 - DNA, 25 bp, probe
cggtcatggaattcatatggtccac

SEQ ID NO: 109650 - DNA, 25 bp, probe
gcatggagaacattggtggcatttt

SEQ ID NO: 109651 - DNA, 25 bp, probe
catggaattcatatggtccacacgg

SEQ ID NO: 109652 - DNA, 25 bp, probe
atggaattcatatggtccacacgga

SEQ ID NO: 109653 - DNA, 25 bp, probe
tggaattcatatggtccacacggag

SEQ ID NO: 109654 - DNA, 25 bp, probe
gcggtcatggaattcatatggtcca

SEQ ID NO: 109655 - DNA, 25 bp, probe
ctactctctggctctttccaaacta

SEQ ID NO: 109656 - DNA, 25 bp, probe
tactctctggctctttccaaactag

SEQ ID NO: 109657 - DNA, 25 bp, probe
ctctctggctctttccaaactagaa

SEQ ID NO: 109658 - DNA, 25 bp, probe
tctctggctctttccaaactagaaa

SEQ ID NO: 109659 - DNA, 25 bp, probe
actctctggctctttccaaactaga

SEQ ID NO: 109660 - DNA, 25 bp, probe
ctagaaaagagggagcgagagaatg

SEQ ID NO: 109661 - DNA, 25 bp, probe
actagaaaagagggagcgagagaat

SEQ ID NO: 109662 - DNA, 25 bp, probe
tctggctctttccaaactagaaaag

SEQ ID NO: 109663 - DNA, 25 bp, probe
ctctggctctttccaaactagaaaa

SEQ ID NO: 109664 - DNA, 25 bp, probe
tgaaggactacatgatcaccatcac

SEQ ID NO: 109665 - DNA, 25 bp, probe
aactagaaaagagggagcgagagaa

SEQ ID NO: 109666 - DNA, 25 bp, probe
aaactagaaaagagggagcgagaga

SEQ ID NO: 109667 - DNA, 25 bp, probe
caaactagaaaagagggagcgagag

SEQ ID NO: 109668 - DNA, 25 bp, probe
ctttccaaactagaaaagagggagc

SEQ ID NO: 109669 - DNA, 25 bp, probe
gaaggactacatgatcaccatcacc

SEQ ID NO: 109670 - DNA, 25 bp, probe
tagaaaagagggagcgagagaatgg

SEQ ID NO: 109671 - DNA, 25 bp, probe
gctactctctggctctttccaaact

SEQ ID NO: 109672 - DNA, 25 bp, probe
tttccaaactagaaaagagggagcg

SEQ ID NO: 109673 - DNA, 25 bp, probe
ccaaactagaaaagagggagcgaga

SEQ ID NO: 109674 - DNA, 25 bp, probe
gtgaaggactacatgatcaccatca

SEQ ID NO: 109675 - DNA, 25 bp, probe
ttccaaactagaaaagagggagcga

SEQ ID NO: 109676 - DNA, 25 bp, probe
agctactctctggctctttccaaac

SEQ ID NO: 109677 - DNA, 25 bp, probe
cagctactctctggctctttccaaa

SEQ ID NO: 109678 - DNA, 25 bp, probe
gtacctctgtgccatgaaaatcacc

SEQ ID NO: 109679 - DNA, 25 bp, probe
tccaaactagaaaagagggagcgag

SEQ ID NO: 109680 - DNA, 25 bp, probe
cttcgtgaaggactacatgatcacc

SEQ ID NO: 109681 - DNA, 25 bp, probe
ccttcgtgaaggactacatgatcac

SEQ ID NO: 109682 - DNA, 25 bp, probe
cgtgaaggactacatgatcaccatc

SEQ ID NO: 109683 - DNA, 25 bp, probe
tcgtgaaggactacatgatcaccat

SEQ ID NO: 109684 - DNA, 25 bp, probe
ttcgtgaaggactacatgatcacca

SEQ ID NO: 109685 - DNA, 25 bp, probe
aaggacagctactctctggctcttt

SEQ ID NO: 109686 - DNA, 25 bp, probe
tctttccaaactagaaaagagggag

SEQ ID NO: 109687 - DNA, 25 bp, probe
aaggactacatgatcaccatcaccc

SEQ ID NO: 109688 - DNA, 25 bp, probe
ctggctctttccaaactagaaaaga

SEQ ID NO: 109689 - DNA, 25 bp, probe
tacctctgtgccatgaaaatcaccg

SEQ ID NO: 109690 - DNA, 25 bp, probe
ggtacctctgtgccatgaaaatcac

SEQ ID NO: 109691 - DNA, 25 bp, probe
gggtacctctgtgccatgaaaatca

SEQ ID NO: 109692 - DNA, 25 bp, probe
agattagagaggactacacatcagg

SEQ ID NO: 109693 - DNA, 25 bp, probe
aagattagagaggactacacatcag

SEQ ID NO: 109694 - DNA, 25 bp, probe
actacctgttactattatctgtgct

SEQ ID NO: 109695 - DNA, 25 bp, probe
agttctcctatcttctccattctag

SEQ ID NO: 109696 - DNA, 25 bp, probe
cgagttctcctatcttctccattct

SEQ ID NO: 109697 - DNA, 25 bp, probe
ctacctgttactattatctgtgctt

SEQ ID NO: 109698 - DNA, 25 bp, probe
gagttctcctatcttctccattcta

SEQ ID NO: 109699 - DNA, 25 bp, probe
gattattcttccagtagttgaacac

SEQ ID NO: 109700 - DNA, 25 bp, probe
attattcttccagtagttgaacact

SEQ ID NO: 109701 - DNA, 25 bp, probe
ctagacttcagaacatgctggataa

SEQ ID NO: 109702 - DNA, 25 bp, probe
tactacctgttactattatctgtgc

SEQ ID NO: 109703 - DNA, 25 bp, probe
ccactcaatgacatcatgttagtct

SEQ ID NO: 109704 - DNA, 25 bp, probe
cactcaatgacatcatgttagtctt

SEQ ID NO: 109705 - DNA, 25 bp, probe
cacaaagattagagaggactacaca

SEQ ID NO: 109706 - DNA, 25 bp, probe
gcaacaaacataccctttatctctg

SEQ ID NO: 109707 - DNA, 25 bp, probe
agggcttgatttattgtttgttgat

SEQ ID NO: 109708 - DNA, 25 bp, probe
cagggcttgatttattgtttgttga

SEQ ID NO: 109709 - DNA, 25 bp, probe
tcacaaagattagagaggactacac

SEQ ID NO: 109710 - DNA, 25 bp, probe
ggattattcttccagtagttgaaca

SEQ ID NO: 109711 - DNA, 25 bp, probe
gggcttgatttattgtttgttgatt

SEQ ID NO: 109712 - DNA, 25 bp, probe
acaaagattagagaggactacacat

SEQ ID NO: 109713 - DNA, 25 bp, probe
tcgagttctcctatcttctccattc

SEQ ID NO: 109714 - DNA, 25 bp, probe
tgatagttgactttggatacaaggt

SEQ ID NO: 109715 - DNA, 25 bp, probe
aaagattagagaggactacacatca

SEQ ID NO: 109716 - DNA, 25 bp, probe
atcacaaagattagagaggactaca

SEQ ID NO: 109717 - DNA, 25 bp, probe
gtgatagttgactttggatacaagg

SEQ ID NO: 109718 - DNA, 25 bp, probe
gattagagaggactacacatcaggg

SEQ ID NO: 109719 - DNA, 25 bp, probe
tagttgactttggatacaaggtttg

SEQ ID NO: 109720 - DNA, 25 bp, probe
tcagggcttgatttattgtttgttg

SEQ ID NO: 109721 - DNA, 25 bp, probe
acatagtaactcttatggagaccta

SEQ ID NO: 109722 - DNA, 25 bp, probe
tacatagtaactcttatggagacct

SEQ ID NO: 109723 - DNA, 25 bp, probe
aaagtatgtcttgtttgtagccaat

SEQ ID NO: 109724 - DNA, 25 bp, probe
caaagattagagaggactacacatc

SEQ ID NO: 109725 - DNA, 25 bp, probe
gcagtgatagttgactttggataca

SEQ ID NO: 109726 - DNA, 25 bp, probe
ttaaagtatgtcttgtttgtagcca

SEQ ID NO: 109727 - DNA, 25 bp, probe
gctgctcaaatcatttaagaaggag

SEQ ID NO: 109728 - DNA, 25 bp, probe
gatagttgactttggatacaaggtt

SEQ ID NO: 109729 - DNA, 25 bp, probe
ctgctcaaatcatttaagaaggagt

SEQ ID NO: 109730 - DNA, 25 bp, probe
ctacatagtaactcttatggagacc

SEQ ID NO: 109731 - DNA, 25 bp, probe
catcatgttagtctttggttgctta

SEQ ID NO: 109732 - DNA, 25 bp, probe
cagtgatagttgactttggatacaa

SEQ ID NO: 109733 - DNA, 25 bp, probe
taaagtatgtcttgtttgtagccaa

SEQ ID NO: 109734 - DNA, 25 bp, probe
agttgactttggatacaaggtttgg

SEQ ID NO: 109735 - DNA, 25 bp, probe
tgctcaaatcatttaagaaggagtt

SEQ ID NO: 109736 - DNA, 25 bp, probe
cggataatagaggagttggcagatg

SEQ ID NO: 109737 - DNA, 25 bp, probe
acggataatagaggagttggcagat

SEQ ID NO: 109738 - DNA, 25 bp, probe
ggataatagaggagttggcagatgc

SEQ ID NO: 109739 - DNA, 25 bp, probe
cacggataatagaggagttggcaga

SEQ ID NO: 109740 - DNA, 25 bp, probe
acagccacggataatagaggagttg

SEQ ID NO: 109741 - DNA, 25 bp, probe
cacagccacggataatagaggagtt

SEQ ID NO: 109742 - DNA, 25 bp, probe
ccacggataatagaggagttggcag

SEQ ID NO: 109743 - DNA, 25 bp, probe
cagccacggataatagaggagttgg

SEQ ID NO: 109744 - DNA, 25 bp, probe
acatccagattattcacaccgatag

SEQ ID NO: 109745 - DNA, 25 bp, probe
aacatccagattattcacaccgata

SEQ ID NO: 109746 - DNA, 25 bp, probe
agattattcacaccgatagcaacac

SEQ ID NO: 109747 - DNA, 25 bp, probe
cagattattcacaccgatagcaaca

SEQ ID NO: 109748 - DNA, 25 bp, probe
gaacatccagattattcacaccgat

SEQ ID NO: 109749 - DNA, 25 bp, probe
ctaccaagtgaacatccagattatt

SEQ ID NO: 109750 - DNA, 25 bp, probe
gactaccaagtgaacatccagatta

SEQ ID NO: 109751 - DNA, 25 bp, probe
catccagattattcacaccgatagc

SEQ ID NO: 109752 - DNA, 25 bp, probe
actaccaagtgaacatccagattat

SEQ ID NO: 109753 - DNA, 25 bp, probe
taccaagtgaacatccagattattc

SEQ ID NO: 109754 - DNA, 25 bp, probe
atccagattattcacaccgatagca

SEQ ID NO: 109755 - DNA, 25 bp, probe
ccagattattcacaccgatagcaac

SEQ ID NO: 109756 - DNA, 25 bp, probe
tccagattattcacaccgatagcaa

SEQ ID NO: 109757 - DNA, 25 bp, probe
gattattcacaccgatagcaacacc

SEQ ID NO: 109758 - DNA, 25 bp, probe
cgactaccaagtgaacatccagatt

SEQ ID NO: 109759 - DNA, 25 bp, probe
attattcacaccgatagcaacaccg

SEQ ID NO: 109760 - DNA, 25 bp, probe
accaagtgaacatccagattattca

SEQ ID NO: 109761 - DNA, 25 bp, probe
atttgcgattcccatttctctgcta

SEQ ID NO: 109762 - DNA, 25 bp, probe
taaataaagaaacaaatgcacctgc

SEQ ID NO: 109763 - DNA, 25 bp, probe
tgaacatccagattattcacaccga

SEQ ID NO: 109764 - DNA, 25 bp, probe
ccgactaccaagtgaacatccagat

SEQ ID NO: 109765 - DNA, 25 bp, probe
tttgcgattcccatttctctgctag

SEQ ID NO: 109766 - DNA, 25 bp, probe
ttattcacaccgatagcaacaccgt

SEQ ID NO: 109767 - DNA, 25 bp, probe
ttccttttgttcctgtccgtttatc

SEQ ID NO: 109768 - DNA, 25 bp, probe
gttccttttgttcctgtccgtttat

SEQ ID NO: 109769 - DNA, 25 bp, probe
tattcacaccgatagcaacaccgtc

SEQ ID NO: 109770 - DNA, 25 bp, probe
ttaaataaagaaacaaatgcacctg

SEQ ID NO: 109771 - DNA, 25 bp, probe
tccttttgttcctgtccgtttatca

SEQ ID NO: 109772 - DNA, 25 bp, probe
catttgcgattcccatttctctgct

SEQ ID NO: 109773 - DNA, 25 bp, probe
ccttttgttcctgtccgtttatcag

SEQ ID NO: 109774 - DNA, 25 bp, probe
tttaaataaagaaacaaatgcacct

SEQ ID NO: 109775 - DNA, 25 bp, probe
caccgactaccaagtgaacatccag

SEQ ID NO: 109776 - DNA, 25 bp, probe
cgttccttttgttcctgtccgttta

SEQ ID NO: 109777 - DNA, 25 bp, probe
ttgcgattcccatttctctgctagg

SEQ ID NO: 109778 - DNA, 25 bp, probe
tgcatttgcgattcccatttctctg

SEQ ID NO: 109779 - DNA, 25 bp, probe
ctgtggagacaatccctcaggacta

SEQ ID NO: 109780 - DNA, 25 bp, probe
tgtggagacaatccctcaggactag

SEQ ID NO: 109781 - DNA, 25 bp, probe
gcgattcccatttctctgctaggag

SEQ ID NO: 109782 - DNA, 25 bp, probe
caagacctgcttcaccttttgctac

SEQ ID NO: 109783 - DNA, 25 bp, probe
gattcccatttctctgctaggagcc

SEQ ID NO: 109784 - DNA, 25 bp, probe
atgcatttgcgattcccatttctct

SEQ ID NO: 109785 - DNA, 25 bp, probe
cgattcccatttctctgctaggagc

SEQ ID NO: 109786 - DNA, 25 bp, probe
ttttaaataaagaaacaaatgcacc

SEQ ID NO: 109787 - DNA, 25 bp, probe
agatccccgaggtcatcttctacac

SEQ ID NO: 109788 - DNA, 25 bp, probe
tgctctctcttatgtggtacaatac

SEQ ID NO: 109789 - DNA, 25 bp, probe
gatgctctctcttatgtggtacaat

SEQ ID NO: 109790 - DNA, 25 bp, probe
atgctctctcttatgtggtacaata

SEQ ID NO: 109791 - DNA, 25 bp, probe
tgatgctctctcttatgtggtacaa

SEQ ID NO: 109792 - DNA, 25 bp, probe
ggtgatgctctctcttatgtggtac

SEQ ID NO: 109793 - DNA, 25 bp, probe
gtgatgctctctcttatgtggtaca

SEQ ID NO: 109794 - DNA, 25 bp, probe
catgaatgctgtttgtggtacttaa

SEQ ID NO: 109795 - DNA, 25 bp, probe
atcattatgtgatactggcagattg

SEQ ID NO: 109796 - DNA, 25 bp, probe
tcattatgtgatactggcagattgc

SEQ ID NO: 109797 - DNA, 25 bp, probe
acatgaatgctgtttgtggtactta

SEQ ID NO: 109798 - DNA, 25 bp, probe
gctctctcttatgtggtacaatacc

SEQ ID NO: 109799 - DNA, 25 bp, probe
attcagttggattatcattatgtga

SEQ ID NO: 109800 - DNA, 25 bp, probe
gatgagggtgatgctctctcttatg

SEQ ID NO: 109801 - DNA, 25 bp, probe
tgatgagggtgatgctctctcttat

SEQ ID NO: 109802 - DNA, 25 bp, probe
gaatgctgtttgtggtacttaagaa

SEQ ID NO: 109803 - DNA, 25 bp, probe
atgaatgctgtttgtggtacttaag

SEQ ID NO: 109804 - DNA, 25 bp, probe
ttgatgagggtgatgctctctctta

SEQ ID NO: 109805 - DNA, 25 bp, probe
tgaatgctgtttgtggtacttaaga

SEQ ID NO: 109806 - DNA, 25 bp, probe
tgctgtttgtggtacttaagaaatt

SEQ ID NO: 109807 - DNA, 25 bp, probe
aatgctgtttgtggtacttaagaaa

SEQ ID NO: 109808 - DNA, 25 bp, probe
atgagggtgatgctctctcttatgt

SEQ ID NO: 109809 - DNA, 25 bp, probe
atgctgtttgtggtacttaagaaat

SEQ ID NO: 109810 - DNA, 25 bp, probe
gggtgatgctctctcttatgtggta

SEQ ID NO: 109811 - DNA, 25 bp, probe
attatgtgatactggcagattgcag

SEQ ID NO: 109812 - DNA, 25 bp, probe
aattcagttggattatcattatgtg

SEQ ID NO: 109813 - DNA, 25 bp, probe
attactgaatcattggttttgcctg

SEQ ID NO: 109814 - DNA, 25 bp, probe
cattatgtgatactggcagattgca

SEQ ID NO: 109815 - DNA, 25 bp, probe
tattactgaatcattggttttgcct

SEQ ID NO: 109816 - DNA, 25 bp, probe
ggattatcattatgtgatactggca

SEQ ID NO: 109817 - DNA, 25 bp, probe
tggattatcattatgtgatactggc

SEQ ID NO: 109818 - DNA, 25 bp, probe
tttgatgagggtgatgctctctctt

SEQ ID NO: 109819 - DNA, 25 bp, probe
gctgtttgtggtacttaagaaatta

SEQ ID NO: 109820 - DNA, 25 bp, probe
atattactgaatcattggttttgcc

SEQ ID NO: 109821 - DNA, 25 bp, probe
gtaatttaacagccccagatattgt

SEQ ID NO: 109822 - DNA, 25 bp, probe
tgtaatttaacagccccagatattg

SEQ ID NO: 109823 - DNA, 25 bp, probe
aaaatgtaatttaacagccccagat

SEQ ID NO: 109824 - DNA, 25 bp, probe
catttgaacatgaatgctgtttgtg

SEQ ID NO: 109825 - DNA, 25 bp, probe
tgagggtgatgctctctcttatgtg

SEQ ID NO: 109826 - DNA, 25 bp, probe
acatttgaacatgaatgctgtttgt

SEQ ID NO: 109827 - DNA, 25 bp, probe
taaaatgtaatttaacagccccaga

SEQ ID NO: 109828 - DNA, 25 bp, probe
aaatgtaatttaacagccccagata

SEQ ID NO: 109829 - DNA, 25 bp, probe
atttgaacatgaatgctgtttgtgg

SEQ ID NO: 109830 - DNA, 25 bp, probe
ttcagttggattatcattatgtgat

SEQ ID NO: 109831 - DNA, 25 bp, probe
ttactgaatcattggttttgcctgc

SEQ ID NO: 109832 - DNA, 25 bp, probe
aataattgaaggcactgaagttgtc

SEQ ID NO: 109833 - DNA, 25 bp, probe
ataattgaaggcactgaagttgtcc

SEQ ID NO: 109834 - DNA, 25 bp, probe
taattgaaggcactgaagttgtcca

SEQ ID NO: 109835 - DNA, 25 bp, probe
agaataagcagaaagtaggaccaag

SEQ ID NO: 109836 - DNA, 25 bp, probe
gaataagcagaaagtaggaccaagt

SEQ ID NO: 109837 - DNA, 25 bp, probe
cagaataagcagaaagtaggaccaa

SEQ ID NO: 109838 - DNA, 25 bp, probe
aataagcagaaagtaggaccaagtg

SEQ ID NO: 109839 - DNA, 25 bp, probe
aaataattgaaggcactgaagttgt

SEQ ID NO: 109840 - DNA, 25 bp, probe
ttcagaataagcagaaagtaggacc

SEQ ID NO: 109841 - DNA, 25 bp, probe
tcagaataagcagaaagtaggacca

SEQ ID NO: 109842 - DNA, 25 bp, probe
gttgtccaggaaattcagaataagc

SEQ ID NO: 109843 - DNA, 25 bp, probe
ttgtccaggaaattcagaataagca

SEQ ID NO: 109844 - DNA, 25 bp, probe
gggattgtgaaggtgtggaaataaa

SEQ ID NO: 109845 - DNA, 25 bp, probe
taagcagaaagtaggaccaagtgat

SEQ ID NO: 109846 - DNA, 25 bp, probe
ataagcagaaagtaggaccaagtga

SEQ ID NO: 109847 - DNA, 25 bp, probe
gtccaggaaattcagaataagcaga

SEQ ID NO: 109848 - DNA, 25 bp, probe
tccaggaaattcagaataagcagaa

SEQ ID NO: 109849 - DNA, 25 bp, probe
ccaggaaattcagaataagcagaaa

SEQ ID NO: 109850 - DNA, 25 bp, probe
tgtccaggaaattcagaataagcag

SEQ ID NO: 109851 - DNA, 25 bp, probe
agttgtccaggaaattcagaataag

SEQ ID NO: 109852 - DNA, 25 bp, probe
gaagttgtccaggaaattcagaata

SEQ ID NO: 109853 - DNA, 25 bp, probe
aagttgtccaggaaattcagaataa

SEQ ID NO: 109854 - DNA, 25 bp, probe
aggaaattcagaataagcagaaagt

SEQ ID NO: 109855 - DNA, 25 bp, probe
actgactgactaaatgacacccaaa

SEQ ID NO: 109856 - DNA, 25 bp, probe
attcagaataagcagaaagtaggac

SEQ ID NO: 109857 - DNA, 25 bp, probe
cttcatcgtaactgcttctagagat

SEQ ID NO: 109858 - DNA, 25 bp, probe
caggaaattcagaataagcagaaag

SEQ ID NO: 109859 - DNA, 25 bp, probe
atgggattgtgaaggtgtggaaata

SEQ ID NO: 109860 - DNA, 25 bp, probe
atgactgactgactaaatgacaccc

SEQ ID NO: 109861 - DNA, 25 bp, probe
cagaaagtaggaccaagtgatgaca

SEQ ID NO: 109862 - DNA, 25 bp, probe
tgggattgtgaaggtgtggaaataa

SEQ ID NO: 109863 - DNA, 25 bp, probe
gactgactgactaaatgacacccaa

SEQ ID NO: 109864 - DNA, 25 bp, probe
catgactgactgactaaatgacacc

SEQ ID NO: 109865 - DNA, 25 bp, probe
aattcagaataagcagaaagtagga

SEQ ID NO: 109866 - DNA, 25 bp, probe
aagcagaaagtaggaccaagtgatg

SEQ ID NO: 109867 - DNA, 25 bp, probe
ctagagatgggattgtgaaggtgtg

SEQ ID NO: 109868 - DNA, 25 bp, probe
gcttcatcgtaactgcttctagaga

SEQ ID NO: 109869 - DNA, 25 bp, probe
ggaaattcagaataagcagaaagta

SEQ ID NO: 109870 - DNA, 25 bp, probe
agagaacagattcatttgcttaatt

SEQ ID NO: 109871 - DNA, 25 bp, probe
aaattcagaataagcagaaagtagg

SEQ ID NO: 109872 - DNA, 25 bp, probe
aattgaaggcactgaagttgtccag

SEQ ID NO: 109873 - DNA, 25 bp, probe
agaaagtaggaccaagtgatgacac

SEQ ID NO: 109874 - DNA, 25 bp, probe
gatgggattgtgaaggtgtggaaat

SEQ ID NO: 109875 - DNA, 25 bp, probe
ctagagaacagattcatttgcttaa

SEQ ID NO: 109876 - DNA, 25 bp, probe
ggtgtgtcttatagtgatggttgta

SEQ ID NO: 109877 - DNA, 25 bp, probe
agtgatggtgtgtcttatagtgatg

SEQ ID NO: 109878 - DNA, 25 bp, probe
cagtgatggtgtgtcttatagtgat

SEQ ID NO: 109879 - DNA, 25 bp, probe
gatggtgtgtcttatagtgatggtt

SEQ ID NO: 109880 - DNA, 25 bp, probe
ctcatctccttccttaatcttcctg

SEQ ID NO: 109881 - DNA, 25 bp, probe
tctcatctccttccttaatcttcct

SEQ ID NO: 109882 - DNA, 25 bp, probe
gtctcatctccttccttaatcttcc

SEQ ID NO: 109883 - DNA, 25 bp, probe
ggtctcatctccttccttaatcttc

SEQ ID NO: 109884 - DNA, 25 bp, probe
atggtgtgtcttatagtgatggttg

SEQ ID NO: 109885 - DNA, 25 bp, probe
tagtgatggttgtaatggtgaatgg

SEQ ID NO: 109886 - DNA, 25 bp, probe
tggtctcatctccttccttaatctt

SEQ ID NO: 109887 - DNA, 25 bp, probe
atagtgatggttgtaatggtgaatg

SEQ ID NO: 109888 - DNA, 25 bp, probe
ctcagtgatggtgtgtcttatagtg

SEQ ID NO: 109889 - DNA, 25 bp, probe
gtgatggtgtgtcttatagtgatgg

SEQ ID NO: 109890 - DNA, 25 bp, probe
ttcctcagtgatggtgtgtcttata

SEQ ID NO: 109891 - DNA, 25 bp, probe
tgatggtgtgtcttatagtgatggt

SEQ ID NO: 109892 - DNA, 25 bp, probe
gtgtgtcttatagtgatggttgtaa

SEQ ID NO: 109893 - DNA, 25 bp, probe
tcatctccttccttaatcttcctgg

SEQ ID NO: 109894 - DNA, 25 bp, probe
gtggtctcatctccttccttaatct

SEQ ID NO: 109895 - DNA, 25 bp, probe
agtggtctcatctccttccttaatc

SEQ ID NO: 109896 - DNA, 25 bp, probe
tcctcagtgatggtgtgtcttatag

SEQ ID NO: 109897 - DNA, 25 bp, probe
atctccttccttaatcttcctggtg

SEQ ID NO: 109898 - DNA, 25 bp, probe
catctccttccttaatcttcctggt

SEQ ID NO: 109899 - DNA, 25 bp, probe
cttatagtgatggttgtaatggtga

SEQ ID NO: 109900 - DNA, 25 bp, probe
tcttatagtgatggttgtaatggtg

SEQ ID NO: 109901 - DNA, 25 bp, probe
gtcttatagtgatggttgtaatggt

SEQ ID NO: 109902 - DNA, 25 bp, probe
tgtcttatagtgatggttgtaatgg

SEQ ID NO: 109903 - DNA, 25 bp, probe
tggtgtgtcttatagtgatggttgt

SEQ ID NO: 109904 - DNA, 25 bp, probe
cctcagtgatggtgtgtcttatagt

SEQ ID NO: 109905 - DNA, 25 bp, probe
gcagaatatagagtggtctcatctc

SEQ ID NO: 109906 - DNA, 25 bp, probe
ttgaagcagaatatagagtggtctc

SEQ ID NO: 109907 - DNA, 25 bp, probe
agcagaatatagagtggtctcatct

SEQ ID NO: 109908 - DNA, 25 bp, probe
aagcagaatatagagtggtctcatc

SEQ ID NO: 109909 - DNA, 25 bp, probe
gaagcagaatatagagtggtctcat

SEQ ID NO: 109910 - DNA, 25 bp, probe
atatagagtggtctcatctccttcc

SEQ ID NO: 109911 - DNA, 25 bp, probe
tcagtgatggtgtgtcttatagtga

SEQ ID NO: 109912 - DNA, 25 bp, probe
agaatatagagtggtctcatctcct

SEQ ID NO: 109913 - DNA, 25 bp, probe
cagaatatagagtggtctcatctcc

SEQ ID NO: 109914 - DNA, 25 bp, probe
tgaagcagaatatagagtggtctca

SEQ ID NO: 109915 - DNA, 25 bp, probe
gcagattcaatgttcttgttacaga

SEQ ID NO: 109916 - DNA, 25 bp, probe
aatatagagtggtctcatctccttc

SEQ ID NO: 109917 - DNA, 25 bp, probe
gaatatagagtggtctcatctcctt

SEQ ID NO: 109918 - DNA, 25 bp, probe
gaatcatccttaatcaccttgaaga

SEQ ID NO: 109919 - DNA, 25 bp, probe
tatagagtggtctcatctccttcct

SEQ ID NO: 109920 - DNA, 25 bp, probe
gtcaggaatccacatggtgtaataa

SEQ ID NO: 109921 - DNA, 25 bp, probe
agtcaggaatccacatggtgtaata

SEQ ID NO: 109922 - DNA, 25 bp, probe
atggtgtaataaagagactgggctt

SEQ ID NO: 109923 - DNA, 25 bp, probe
ctcatgcctataatcccaacacttt

SEQ ID NO: 109924 - DNA, 25 bp, probe
cagtcaggaatccacatggtgtaat

SEQ ID NO: 109925 - DNA, 25 bp, probe
tcatgcctataatcccaacactttg

SEQ ID NO: 109926 - DNA, 25 bp, probe
acataaagcagtcaggaatccacat

SEQ ID NO: 109927 - DNA, 25 bp, probe
tccacatggtgtaataaagagactg

SEQ ID NO: 109928 - DNA, 25 bp, probe
aggaatccacatggtgtaataaaga

SEQ ID NO: 109929 - DNA, 25 bp, probe
caggaatccacatggtgtaataaag

SEQ ID NO: 109930 - DNA, 25 bp, probe
tcaggaatccacatggtgtaataaa

SEQ ID NO: 109931 - DNA, 25 bp, probe
atccacatggtgtaataaagagact

SEQ ID NO: 109932 - DNA, 25 bp, probe
ggaatccacatggtgtaataaagag

SEQ ID NO: 109933 - DNA, 25 bp, probe
cataaagcagtcaggaatccacatg

SEQ ID NO: 109934 - DNA, 25 bp, probe
cacatggtgtaataaagagactggg

SEQ ID NO: 109935 - DNA, 25 bp, probe
catggtgtaataaagagactgggct

SEQ ID NO: 109936 - DNA, 25 bp, probe
aatccacatggtgtaataaagagac

SEQ ID NO: 109937 - DNA, 25 bp, probe
gaatccacatggtgtaataaagaga

SEQ ID NO: 109938 - DNA, 25 bp, probe
ccacatggtgtaataaagagactgg

SEQ ID NO: 109939 - DNA, 25 bp, probe
cacataaagcagtcaggaatccaca

SEQ ID NO: 109940 - DNA, 25 bp, probe
ataaagcagtcaggaatccacatgg

SEQ ID NO: 109941 - DNA, 25 bp, probe
gctcatgcctataatcccaacactt

SEQ ID NO: 109942 - DNA, 25 bp, probe
tggtgtaataaagagactgggcttt

SEQ ID NO: 109943 - DNA, 25 bp, probe
acatggtgtaataaagagactgggc

SEQ ID NO: 109944 - DNA, 25 bp, probe
gagaattgcttgaacccaggagatg

SEQ ID NO: 109945 - DNA, 25 bp, probe
ccacataaagcagtcaggaatccac

SEQ ID NO: 109946 - DNA, 25 bp, probe
aaaatacaaaattagcagggcatgg

SEQ ID NO: 109947 - DNA, 25 bp, probe
aaatacaaaattagcagggcatggt

SEQ ID NO: 109948 - DNA, 25 bp, probe
gtcccacataaagcagtcaggaatc

SEQ ID NO: 109949 - DNA, 25 bp, probe
ggtgtaataaagagactgggcttta

SEQ ID NO: 109950 - DNA, 25 bp, probe
tgtaataaagagactgggctttagc

SEQ ID NO: 109951 - DNA, 25 bp, probe
gtgtaataaagagactgggctttag

SEQ ID NO: 109952 - DNA, 25 bp, probe
taaagcagtcaggaatccacatggt

SEQ ID NO: 109953 - DNA, 25 bp, probe
aatacaaaattagcagggcatggtg

SEQ ID NO: 109954 - DNA, 25 bp, probe
ggagaattgcttgaacccaggagat

SEQ ID NO: 109955 - DNA, 25 bp, probe
cccacataaagcagtcaggaatcca

SEQ ID NO: 109956 - DNA, 25 bp, probe
gcagtcaggaatccacatggtgtaa

SEQ ID NO: 109957 - DNA, 25 bp, probe
agttcaacaccagcatgaccaacat

SEQ ID NO: 109958 - DNA, 25 bp, probe
cctataatcccaacactttggaagg

SEQ ID NO: 109959 - DNA, 25 bp, probe
tcccacataaagcagtcaggaatcc

SEQ ID NO: 109960 - DNA, 25 bp, probe
gacaaggattgggtcccacataaag

SEQ ID NO: 109961 - DNA, 25 bp, probe
ctataatcccaacactttggaaggc

SEQ ID NO: 109962 - DNA, 25 bp, probe
gcctataatcccaacactttggaag

SEQ ID NO: 109963 - DNA, 25 bp, probe
catctactacctgctggagaaaggc

SEQ ID NO: 109964 - DNA, 25 bp, probe
cctgttgcccaataaatttaagaga

SEQ ID NO: 109965 - DNA, 25 bp, probe
ttgcccaataaatttaagagagtcc

SEQ ID NO: 109966 - DNA, 25 bp, probe
tgcccaataaatttaagagagtccc

SEQ ID NO: 109967 - DNA, 25 bp, probe
gcctgttgcccaataaatttaagag

SEQ ID NO: 109968 - DNA, 25 bp, probe
tgttgcccaataaatttaagagagt

SEQ ID NO: 109969 - DNA, 25 bp, probe
agcctgttgcccaataaatttaaga

SEQ ID NO: 109970 - DNA, 25 bp, probe
cagcctgttgcccaataaatttaag

SEQ ID NO: 109971 - DNA, 25 bp, probe
gttgcccaataaatttaagagagtc

SEQ ID NO: 109972 - DNA, 25 bp, probe
ctgttgcccaataaatttaagagag

SEQ ID NO: 109973 - DNA, 25 bp, probe
gcccaataaatttaagagagtcccc

SEQ ID NO: 109974 - DNA, 25 bp, probe
gcagcctgttgcccaataaatttaa

SEQ ID NO: 109975 - DNA, 25 bp, probe
ggcagtggagacagatttagatata

SEQ ID NO: 109976 - DNA, 25 bp, probe
aggcagtggagacagatttagatat

SEQ ID NO: 109977 - DNA, 25 bp, probe
gaggcagtggagacagatttagata

SEQ ID NO: 109978 - DNA, 25 bp, probe
cagtggagacagatttagatatagc

SEQ ID NO: 109979 - DNA, 25 bp, probe
gcagtggagacagatttagatatag

SEQ ID NO: 109980 - DNA, 25 bp, probe
atgcctggctgatgtttatatgttt

SEQ ID NO: 109981 - DNA, 25 bp, probe
aaagtgctgggattactggtatgaa

SEQ ID NO: 109982 - DNA, 25 bp, probe
cagatttagatatagctcaggaccc

SEQ ID NO: 109983 - DNA, 25 bp, probe
acagatttagatatagctcaggacc

SEQ ID NO: 109984 - DNA, 25 bp, probe
catgcctggctgatgtttatatgtt

SEQ ID NO: 109985 - DNA, 25 bp, probe
aagtgctgggattactggtatgaac

SEQ ID NO: 109986 - DNA, 25 bp, probe
caaagtgctgggattactggtatga

SEQ ID NO: 109987 - DNA, 25 bp, probe
ctggacatgaagttcacctactgtg

SEQ ID NO: 109988 - DNA, 25 bp, probe
agtggagacagatttagatatagct

SEQ ID NO: 109989 - DNA, 25 bp, probe
tgaggcagtggagacagatttagat

SEQ ID NO: 109990 - DNA, 25 bp, probe
gacagatttagatatagctcaggac

SEQ ID NO: 109991 - DNA, 25 bp, probe
agacagatttagatatagctcagga

SEQ ID NO: 109992 - DNA, 25 bp, probe
tatgttttgtagagacgaggtttca

SEQ ID NO: 109993 - DNA, 25 bp, probe
tggagacagatttagatatagctca

SEQ ID NO: 109994 - DNA, 25 bp, probe
cctggctgatgtttatatgttttgt

SEQ ID NO: 109995 - DNA, 25 bp, probe
tcatgcctggctgatgtttatatgt

SEQ ID NO: 109996 - DNA, 25 bp, probe
gtggagacagatttagatatagctc

SEQ ID NO: 109997 - DNA, 25 bp, probe
atatgttttgtagagacgaggtttc

SEQ ID NO: 109998 - DNA, 25 bp, probe
gagacagatttagatatagctcagg

SEQ ID NO: 109999 - DNA, 25 bp, probe
ggagacagatttagatatagctcag

SEQ ID NO: 110000 - DNA, 25 bp, probe
atgttttgtagagacgaggtttcac

SEQ ID NO: 110001 - DNA, 25 bp, probe
cctggacatgaagttcacctactgt

SEQ ID NO: 110002 - DNA, 25 bp, probe
gcccgacagtaaatatgttttgaat

SEQ ID NO: 110003 - DNA, 25 bp, probe
atcatgcctggctgatgtttatatg

SEQ ID NO: 110004 - DNA, 25 bp, probe
cccgacagtaaatatgttttgaatg

SEQ ID NO: 110005 - DNA, 25 bp, probe
tatatgttttgtagagacgaggttt

SEQ ID NO: 110006 - DNA, 25 bp, probe
ttatatgttttgtagagacgaggtt

SEQ ID NO: 110007 - DNA, 25 bp, probe
tttatatgttttgtagagacgaggt

SEQ ID NO: 110008 - DNA, 25 bp, probe
gcctggctgatgtttatatgttttg

SEQ ID NO: 110009 - DNA, 25 bp, probe
tttgtagagacgaggtttcaccatg

SEQ ID NO: 110010 - DNA, 25 bp, probe
tggctgatgtttatatgttttgtag

SEQ ID NO: 110011 - DNA, 25 bp, probe
ctggctgatgtttatatgttttgta

SEQ ID NO: 110012 - DNA, 25 bp, probe
tgcctggctgatgtttatatgtttt

SEQ ID NO: 110013 - DNA, 25 bp, probe
ctgaggcagtggagacagatttaga

SEQ ID NO: 110014 - DNA, 25 bp, probe
gtttatatgttttgtagagacgagg

SEQ ID NO: 110015 - DNA, 25 bp, probe
agatttagatatagctcaggacccc

SEQ ID NO: 110016 - DNA, 25 bp, probe
atttagatatagctcaggaccccag

SEQ ID NO: 110017 - DNA, 25 bp, probe
gatttagatatagctcaggacccca

SEQ ID NO: 110018 - DNA, 25 bp, probe
ccaaagtgctgggattactggtatg

SEQ ID NO: 110019 - DNA, 25 bp, probe
agatatgattgtgatgagagacagc

SEQ ID NO: 110020 - DNA, 25 bp, probe
aagatatgattgtgatgagagacag

SEQ ID NO: 110021 - DNA, 25 bp, probe
tgtgataaatgggtttgctaatgtg

SEQ ID NO: 110022 - DNA, 25 bp, probe
gtgtgataaatgggtttgctaatgt

SEQ ID NO: 110023 - DNA, 25 bp, probe
tgtgtgataaatgggtttgctaatg

SEQ ID NO: 110024 - DNA, 25 bp, probe
gtgtgtgataaatgggtttgctaat

SEQ ID NO: 110025 - DNA, 25 bp, probe
gcgaattaaagcagaaggcattata

SEQ ID NO: 110026 - DNA, 25 bp, probe
atattggagcgaattaaagcagaag

SEQ ID NO: 110027 - DNA, 25 bp, probe
atgtgtgtgataaatgggtttgcta

SEQ ID NO: 110028 - DNA, 25 bp, probe
atatgattgtgatgagagacagctt

SEQ ID NO: 110029 - DNA, 25 bp, probe
gatatgattgtgatgagagacagct

SEQ ID NO: 110030 - DNA, 25 bp, probe
gataaatgggtttgctaatgtgctg

SEQ ID NO: 110031 - DNA, 25 bp, probe
tgtgtgtgataaatgggtttgctaa

SEQ ID NO: 110032 - DNA, 25 bp, probe
caagccactaacagagaactttaat

SEQ ID NO: 110033 - DNA, 25 bp, probe
tgataaatgggtttgctaatgtgct

SEQ ID NO: 110034 - DNA, 25 bp, probe
gtgataaatgggtttgctaatgtgc

SEQ ID NO: 110035 - DNA, 25 bp, probe
aaatgttgcttgatggtgaaattgg

SEQ ID NO: 110036 - DNA, 25 bp, probe
ataaatgggtttgctaatgtgctgt

SEQ ID NO: 110037 - DNA, 25 bp, probe
taaatgggtttgctaatgtgctgtt

SEQ ID NO: 110038 - DNA, 25 bp, probe
agcgaattaaagcagaaggcattat

SEQ ID NO: 110039 - DNA, 25 bp, probe
tattggagcgaattaaagcagaagg

SEQ ID NO: 110040 - DNA, 25 bp, probe
gcaagccactaacagagaactttaa

SEQ ID NO: 110041 - DNA, 25 bp, probe
gagcgaattaaagcagaaggcatta

SEQ ID NO: 110042 - DNA, 25 bp, probe
aatgttgcttgatggtgaaattgga

SEQ ID NO: 110043 - DNA, 25 bp, probe
agccactaacagagaactttaataa

SEQ ID NO: 110044 - DNA, 25 bp, probe
cgaattaaagcagaaggcattatat

SEQ ID NO: 110045 - DNA, 25 bp, probe
aatattggagcgaattaaagcagaa

SEQ ID NO: 110046 - DNA, 25 bp, probe
aaatgggtttgctaatgtgctgttt

SEQ ID NO: 110047 - DNA, 25 bp, probe
aagccactaacagagaactttaata

SEQ ID NO: 110048 - DNA, 25 bp, probe
atgttgcttgatggtgaaattggag

SEQ ID NO: 110049 - DNA, 25 bp, probe
aaacgattgatcttgtggcttatgg

SEQ ID NO: 110050 - DNA, 25 bp, probe
aaagatatgattgtgatgagagaca

SEQ ID NO: 110051 - DNA, 25 bp, probe
tatgattgtgatgagagacagcttt

SEQ ID NO: 110052 - DNA, 25 bp, probe
gccactaacagagaactttaataat

SEQ ID NO: 110053 - DNA, 25 bp, probe
actacacagagtacaattaaaccat

SEQ ID NO: 110054 - DNA, 25 bp, probe
gcagaaggcattatatatactacac

SEQ ID NO: 110055 - DNA, 25 bp, probe
catgtgtgtgataaatgggtttgct

SEQ ID NO: 110056 - DNA, 25 bp, probe
agcagaaggcattatatatactaca

SEQ ID NO: 110057 - DNA, 25 bp, probe
acatccttctggacatttagaacat

SEQ ID NO: 110058 - DNA, 25 bp, probe
agacatccttctggacatttagaac

SEQ ID NO: 110059 - DNA, 25 bp, probe
gacatccttctggacatttagaaca

SEQ ID NO: 110060 - DNA, 25 bp, probe
atgattgtgatgagagacagctttg

SEQ ID NO: 110061 - DNA, 25 bp, probe
gatgcaagccactaacagagaactt

SEQ ID NO: 110062 - DNA, 25 bp, probe
aaaatgttgcttgatggtgaaattg

SEQ ID NO: 110063 - DNA, 25 bp, probe
gatgcagtgaactgtggctgtatat

SEQ ID NO: 110064 - DNA, 25 bp, probe
atgcagtgaactgtggctgtatatg

SEQ ID NO: 110065 - DNA, 25 bp, probe
agatgcagtgaactgtggctgtata

SEQ ID NO: 110066 - DNA, 25 bp, probe
agtgaactgtggctgtatatgcatg

SEQ ID NO: 110067 - DNA, 25 bp, probe
cagtgaactgtggctgtatatgcat

SEQ ID NO: 110068 - DNA, 25 bp, probe
cagatgcagtgaactgtggctgtat

SEQ ID NO: 110069 - DNA, 25 bp, probe
caacttcaaaacagatgcagtgaac

SEQ ID NO: 110070 - DNA, 25 bp, probe
aacttcaaaacagatgcagtgaact

SEQ ID NO: 110071 - DNA, 25 bp, probe
acttcaaaacagatgcagtgaactg

SEQ ID NO: 110072 - DNA, 25 bp, probe
gcaacttcaaaacagatgcagtgaa

SEQ ID NO: 110073 - DNA, 25 bp, probe
cttcaaaacagatgcagtgaactgt

SEQ ID NO: 110074 - DNA, 25 bp, probe
ttcaaaacagatgcagtgaactgtg

SEQ ID NO: 110075 - DNA, 25 bp, probe
cactttgcaacttcaaaacagatgc

SEQ ID NO: 110076 - DNA, 25 bp, probe
gcactttgcaacttcaaaacagatg

SEQ ID NO: 110077 - DNA, 25 bp, probe
agcactttgcaacttcaaaacagat

SEQ ID NO: 110078 - DNA, 25 bp, probe
atgagcagcactttgcaacttcaaa

SEQ ID NO: 110079 - DNA, 25 bp, probe
aatgagcagcactttgcaacttcaa

SEQ ID NO: 110080 - DNA, 25 bp, probe
ttgaatgagcagcactttgcaactt

SEQ ID NO: 110081 - DNA, 25 bp, probe
tcaaaacagatgcagtgaactgtgg

SEQ ID NO: 110082 - DNA, 25 bp, probe
cagcactttgcaacttcaaaacaga

SEQ ID NO: 110083 - DNA, 25 bp, probe
gaatgagcagcactttgcaacttca

SEQ ID NO: 110084 - DNA, 25 bp, probe
tgaatgagcagcactttgcaacttc

SEQ ID NO: 110085 - DNA, 25 bp, probe
cttgaatgagcagcactttgcaact

SEQ ID NO: 110086 - DNA, 25 bp, probe
acttgaatgagcagcactttgcaac

SEQ ID NO: 110087 - DNA, 25 bp, probe
gagcagcactttgcaacttcaaaac

SEQ ID NO: 110088 - DNA, 25 bp, probe
gcagcactttgcaacttcaaaacag

SEQ ID NO: 110089 - DNA, 25 bp, probe
tgagcagcactttgcaacttcaaaa

SEQ ID NO: 110090 - DNA, 25 bp, probe
agcagcactttgcaacttcaaaaca

SEQ ID NO: 110091 - DNA, 25 bp, probe
tacaatctcagaggttggtcaatta

SEQ ID NO: 110092 - DNA, 25 bp, probe
acaatctcagaggttggtcaattac

SEQ ID NO: 110093 - DNA, 25 bp, probe
ggagtgatggtggaagataatgtac

SEQ ID NO: 110094 - DNA, 25 bp, probe
tggtggaagataatgtactactgaa

SEQ ID NO: 110095 - DNA, 25 bp, probe
gtgatggtggaagataatgtactac

SEQ ID NO: 110096 - DNA, 25 bp, probe
atggtggaagataatgtactactga

SEQ ID NO: 110097 - DNA, 25 bp, probe
tgatggtggaagataatgtactact

SEQ ID NO: 110098 - DNA, 25 bp, probe
gtacaatctcagaggttggtcaatt

SEQ ID NO: 110099 - DNA, 25 bp, probe
gagtgatggtggaagataatgtact

SEQ ID NO: 110100 - DNA, 25 bp, probe
ggtggaagataatgtactactgaag

SEQ ID NO: 110101 - DNA, 25 bp, probe
gatggtggaagataatgtactactg

SEQ ID NO: 110102 - DNA, 25 bp, probe
agtgatggtggaagataatgtacta

SEQ ID NO: 110103 - DNA, 25 bp, probe
gtggaagataatgtactactgaaga

SEQ ID NO: 110104 - DNA, 25 bp, probe
caatctcagaggttggtcaattacc

SEQ ID NO: 110105 - DNA, 25 bp, probe
ggtacaatctcagaggttggtcaat

SEQ ID NO: 110106 - DNA, 25 bp, probe
gggagtgatggtggaagataatgta

SEQ ID NO: 110107 - DNA, 25 bp, probe
gtagatttgaagtacagtggtgaaa

SEQ ID NO: 110108 - DNA, 25 bp, probe
tccgacaggttaaagaaattattca

SEQ ID NO: 110109 - DNA, 25 bp, probe
ctttattagttccactgttgctcag

SEQ ID NO: 110110 - DNA, 25 bp, probe
gctttattagttccactgttgctca

SEQ ID NO: 110111 - DNA, 25 bp, probe
gtccgacaggttaaagaaattattc

SEQ ID NO: 110112 - DNA, 25 bp, probe
aatctcagaggttggtcaattaccg

SEQ ID NO: 110113 - DNA, 25 bp, probe
tggaagataatgtactactgaagat

SEQ ID NO: 110114 - DNA, 25 bp, probe
aggtacaatctcagaggttggtcaa

SEQ ID NO: 110115 - DNA, 25 bp, probe
aaggtacaatctcagaggttggtca

SEQ ID NO: 110116 - DNA, 25 bp, probe
gtgaaaggtacaatctcagaggttg

SEQ ID NO: 110117 - DNA, 25 bp, probe
ggaagataatgtactactgaagatg

SEQ ID NO: 110118 - DNA, 25 bp, probe
tgaagatgtaatgtagctttccact

SEQ ID NO: 110119 - DNA, 25 bp, probe
actgaagatgtaatgtagctttcca

SEQ ID NO: 110120 - DNA, 25 bp, probe
gaagatgtaatgtagctttccactg

SEQ ID NO: 110121 - DNA, 25 bp, probe
ctgaagatgtaatgtagctttccac

SEQ ID NO: 110122 - DNA, 25 bp, probe
ttattagttccactgttgctcagcc

SEQ ID NO: 110123 - DNA, 25 bp, probe
tgtactactgaagatgtaatgtagc

SEQ ID NO: 110124 - DNA, 25 bp, probe
ccgacaggttaaagaaattattcat

SEQ ID NO: 110125 - DNA, 25 bp, probe
atttgatgacactttcgagaagaac

SEQ ID NO: 110126 - DNA, 25 bp, probe
aagatgtaatgtagctttccactgg

SEQ ID NO: 110127 - DNA, 25 bp, probe
tttattagttccactgttgctcagc

SEQ ID NO: 110128 - DNA, 25 bp, probe
aatttgatgacactttcgagaagaa

SEQ ID NO: 110129 - DNA, 25 bp, probe
tgtgaaaggtacaatctcagaggtt

SEQ ID NO: 110130 - DNA, 25 bp, probe
aagagctttattagttccactgttg

SEQ ID NO: 110131 - DNA, 25 bp, probe
gtgggagtgatggtggaagataatg

SEQ ID NO: 110132 - DNA, 25 bp, probe
aaatttgatgacactttcgagaaga

SEQ ID NO: 110133 - DNA, 25 bp, probe
aaaggtacaatctcagaggttggtc

SEQ ID NO: 110134 - DNA, 25 bp, probe
gaaaggtacaatctcagaggttggt

SEQ ID NO: 110135 - DNA, 25 bp, probe
aacactaatggaaggtaacagaagg

SEQ ID NO: 110136 - DNA, 25 bp, probe
actcctcgtacaatgctattcttag

SEQ ID NO: 110137 - DNA, 25 bp, probe
cactcctcgtacaatgctattctta

SEQ ID NO: 110138 - DNA, 25 bp, probe
taacactaatggaaggtaacagaag

SEQ ID NO: 110139 - DNA, 25 bp, probe
agttagccaagacattatccaccaa

SEQ ID NO: 110140 - DNA, 25 bp, probe
cataacactaatggaaggtaacaga

SEQ ID NO: 110141 - DNA, 25 bp, probe
gaacagacctgccataacactaatg

SEQ ID NO: 110142 - DNA, 25 bp, probe
gttgctgtatggaactcatgttatg

SEQ ID NO: 110143 - DNA, 25 bp, probe
tgaacagacctgccataacactaat

SEQ ID NO: 110144 - DNA, 25 bp, probe
ctgtatggaactcatgttatgctct

SEQ ID NO: 110145 - DNA, 25 bp, probe
tgtatggaactcatgttatgctcta

SEQ ID NO: 110146 - DNA, 25 bp, probe
atgaacagacctgccataacactaa

SEQ ID NO: 110147 - DNA, 25 bp, probe
ataacactaatggaaggtaacagaa

SEQ ID NO: 110148 - DNA, 25 bp, probe
cagttagccaagacattatccacca

SEQ ID NO: 110149 - DNA, 25 bp, probe
ctaatggaaggtaacagaaggcgaa

SEQ ID NO: 110150 - DNA, 25 bp, probe
acactaatggaaggtaacagaaggc

SEQ ID NO: 110151 - DNA, 25 bp, probe
aacctaatgttagaaccgcatcctt

SEQ ID NO: 110152 - DNA, 25 bp, probe
cctcgtacaatgctattcttaggtt

SEQ ID NO: 110153 - DNA, 25 bp, probe
gatgaacagacctgccataacacta

SEQ ID NO: 110154 - DNA, 25 bp, probe
ctcctcgtacaatgctattcttagg

SEQ ID NO: 110155 - DNA, 25 bp, probe
gtatggaactcatgttatgctctaa

SEQ ID NO: 110156 - DNA, 25 bp, probe
ttgctgtatggaactcatgttatgc

SEQ ID NO: 110157 - DNA, 25 bp, probe
gctgtatggaactcatgttatgctc

SEQ ID NO: 110158 - DNA, 25 bp, probe
tcctcgtacaatgctattcttaggt

SEQ ID NO: 110159 - DNA, 25 bp, probe
tttcttatgacttgtttccactcct

SEQ ID NO: 110160 - DNA, 25 bp, probe
gtttcttatgacttgtttccactcc

SEQ ID NO: 110161 - DNA, 25 bp, probe
taatggaaggtaacagaaggcgaac

SEQ ID NO: 110162 - DNA, 25 bp, probe
ttagccaagacattatccaccaaat

SEQ ID NO: 110163 - DNA, 25 bp, probe
ttcttatgacttgtttccactcctc

SEQ ID NO: 110164 - DNA, 25 bp, probe
tggtaaagaatgtgtgtggtaaatc

SEQ ID NO: 110165 - DNA, 25 bp, probe
tgtttcttatgacttgtttccactc

SEQ ID NO: 110166 - DNA, 25 bp, probe
gagaaacaacaacacagtcacattt

SEQ ID NO: 110167 - DNA, 25 bp, probe
ccactcctcgtacaatgctattctt

SEQ ID NO: 110168 - DNA, 25 bp, probe
ttccactcctcgtacaatgctattc

SEQ ID NO: 110169 - DNA, 25 bp, probe
tagccaagacattatccaccaaatt

SEQ ID NO: 110170 - DNA, 25 bp, probe
gtgtgtaatgaagtggttctttgat

SEQ ID NO: 110171 - DNA, 25 bp, probe
ttgtgtgtaatgaagtggttctttg

SEQ ID NO: 110172 - DNA, 25 bp, probe
acaatgctattcttaggtttctacg

SEQ ID NO: 110173 - DNA, 25 bp, probe
tttgtgtgtaatgaagtggttcttt

SEQ ID NO: 110174 - DNA, 25 bp, probe
atggtaaagaatgtgtgtggtaaat

SEQ ID NO: 110175 - DNA, 25 bp, probe
atgtttcttatgacttgtttccact

SEQ ID NO: 110176 - DNA, 25 bp, probe
gacttgtttacatcatttcacggaa

SEQ ID NO: 110177 - DNA, 25 bp, probe
tgtgtgtaatgaagtggttctttga

SEQ ID NO: 110178 - DNA, 25 bp, probe
aagacattatccaccaaattgcttt

SEQ ID NO: 110179 - DNA, 25 bp, probe
agattggagaaggcttgtattagtc

SEQ ID NO: 110180 - DNA, 25 bp, probe
aagattggagaaggcttgtattagt

SEQ ID NO: 110181 - DNA, 25 bp, probe
agaagattggagaaggcttgtatta

SEQ ID NO: 110182 - DNA, 25 bp, probe
gaagattggagaaggcttgtattag

SEQ ID NO: 110183 - DNA, 25 bp, probe
cagaagattggagaaggcttgtatt

SEQ ID NO: 110184 - DNA, 25 bp, probe
tgaagataatgagtacacagcaagg

SEQ ID NO: 110185 - DNA, 25 bp, probe
gccttgctagagtaattgaagataa

SEQ ID NO: 110186 - DNA, 25 bp, probe
ttgaagataatgagtacacagcaag

SEQ ID NO: 110187 - DNA, 25 bp, probe
aattgaagataatgagtacacagca

SEQ ID NO: 110188 - DNA, 25 bp, probe
attgaagataatgagtacacagcaa

SEQ ID NO: 110189 - DNA, 25 bp, probe
gattggagaaggcttgtattagtcc

SEQ ID NO: 110190 - DNA, 25 bp, probe
gcagaagattggagaaggcttgtat

SEQ ID NO: 110191 - DNA, 25 bp, probe
taattgaagataatgagtacacagc

SEQ ID NO: 110192 - DNA, 25 bp, probe
gataatgagtacacagcaagggaag

SEQ ID NO: 110193 - DNA, 25 bp, probe
gaagataatgagtacacagcaaggg

SEQ ID NO: 110194 - DNA, 25 bp, probe
cagcgacatgattaaacattaccaa

SEQ ID NO: 110195 - DNA, 25 bp, probe
agcgacatgattaaacattaccaaa

SEQ ID NO: 110196 - DNA, 25 bp, probe
agataatgagtacacagcaagggaa

SEQ ID NO: 110197 - DNA, 25 bp, probe
aagataatgagtacacagcaaggga

SEQ ID NO: 110198 - DNA, 25 bp, probe
ggccttgctagagtaattgaagata

SEQ ID NO: 110199 - DNA, 25 bp, probe
tcagcgacatgattaaacattacca

SEQ ID NO: 110200 - DNA, 25 bp, probe
ccttgctagagtaattgaagataat

SEQ ID NO: 110201 - DNA, 25 bp, probe
gctagagtaattgaagataatgagt

SEQ ID NO: 110202 - DNA, 25 bp, probe
tgctagagtaattgaagataatgag

SEQ ID NO: 110203 - DNA, 25 bp, probe
tggccttgctagagtaattgaagat

SEQ ID NO: 110204 - DNA, 25 bp, probe
ttggccttgctagagtaattgaaga

SEQ ID NO: 110205 - DNA, 25 bp, probe
ttgtattagtcccaagccacagaag

SEQ ID NO: 110206 - DNA, 25 bp, probe
attggagaaggcttgtattagtccc

SEQ ID NO: 110207 - DNA, 25 bp, probe
ttgctagagtaattgaagataatga

SEQ ID NO: 110208 - DNA, 25 bp, probe
attaaacattaccaaaagcaggcag

SEQ ID NO: 110209 - DNA, 25 bp, probe
gattaaacattaccaaaagcaggca

SEQ ID NO: 110210 - DNA, 25 bp, probe
tgattaaacattaccaaaagcaggc

SEQ ID NO: 110211 - DNA, 25 bp, probe
agtaattgaagataatgagtacaca

SEQ ID NO: 110212 - DNA, 25 bp, probe
taaacattaccaaaagcaggcagat

SEQ ID NO: 110213 - DNA, 25 bp, probe
atcagcgacatgattaaacattacc

SEQ ID NO: 110214 - DNA, 25 bp, probe
ctgtatcagcgacatgattaaacat

SEQ ID NO: 110215 - DNA, 25 bp, probe
cttgctagagtaattgaagataatg

SEQ ID NO: 110216 - DNA, 25 bp, probe
tgtatcagcgacatgattaaacatt

SEQ ID NO: 110217 - DNA, 25 bp, probe
ttaaacattaccaaaagcaggcaga

SEQ ID NO: 110218 - DNA, 25 bp, probe
cctgtatcagcgacatgattaaaca

SEQ ID NO: 110219 - DNA, 25 bp, probe
gtaattgaagataatgagtacacag

SEQ ID NO: 110220 - DNA, 25 bp, probe
atgattaaacattaccaaaagcagg

SEQ ID NO: 110221 - DNA, 25 bp, probe
tttggccttgctagagtaattgaag

SEQ ID NO: 110222 - DNA, 25 bp, probe
atgggataaagatgcctgggagatc

SEQ ID NO: 110223 - DNA, 25 bp, probe
gttcaaggctatgacagtctgctac

SEQ ID NO: 110224 - DNA, 25 bp, probe
ttcaaggctatgacagtctgctacg

SEQ ID NO: 110225 - DNA, 25 bp, probe
cgttcaaggctatgacagtctgcta

SEQ ID NO: 110226 - DNA, 25 bp, probe
gacagtctgctacgcaaaacatttt

SEQ ID NO: 110227 - DNA, 25 bp, probe
tatgacagtctgctacgcaaaacat

SEQ ID NO: 110228 - DNA, 25 bp, probe
ctatgacagtctgctacgcaaaaca

SEQ ID NO: 110229 - DNA, 25 bp, probe
atgacagtctgctacgcaaaacatt

SEQ ID NO: 110230 - DNA, 25 bp, probe
tgacagtctgctacgcaaaacattt

SEQ ID NO: 110231 - DNA, 25 bp, probe
gctatgacagtctgctacgcaaaac

SEQ ID NO: 110232 - DNA, 25 bp, probe
aagatacaatggaagtcagtagcag

SEQ ID NO: 110233 - DNA, 25 bp, probe
gatacaatggaagtcagtagcagtg

SEQ ID NO: 110234 - DNA, 25 bp, probe
agatacaatggaagtcagtagcagt

SEQ ID NO: 110235 - DNA, 25 bp, probe
cattgagacttgtgtagatgcttct

SEQ ID NO: 110236 - DNA, 25 bp, probe
aatagcattgagacttgtgtagatg

SEQ ID NO: 110237 - DNA, 25 bp, probe
ggaagtcagtagcagtgttgaatag

SEQ ID NO: 110238 - DNA, 25 bp, probe
tggaagtcagtagcagtgttgaata

SEQ ID NO: 110239 - DNA, 25 bp, probe
atcttacaatcaacacctgtcacac

SEQ ID NO: 110240 - DNA, 25 bp, probe
catcttacaatcaacacctgtcaca

SEQ ID NO: 110241 - DNA, 25 bp, probe
gacttgtgtagatgcttctcagaac

SEQ ID NO: 110242 - DNA, 25 bp, probe
agacttgtgtagatgcttctcagaa

SEQ ID NO: 110243 - DNA, 25 bp, probe
gaagtcagtagcagtgttgaatagc

SEQ ID NO: 110244 - DNA, 25 bp, probe
cttgtgtagatgcttctcagaacat

SEQ ID NO: 110245 - DNA, 25 bp, probe
atacaatggaagtcagtagcagtgt

SEQ ID NO: 110246 - DNA, 25 bp, probe
ccatcttacaatcaacacctgtcac

SEQ ID NO: 110247 - DNA, 25 bp, probe
gtgtagatgcttctcagaacatgaa

SEQ ID NO: 110248 - DNA, 25 bp, probe
atggaagtcagtagcagtgttgaat

SEQ ID NO: 110249 - DNA, 25 bp, probe
tacaatggaagtcagtagcagtgtt

SEQ ID NO: 110250 - DNA, 25 bp, probe
ttgtgtagatgcttctcagaacatg

SEQ ID NO: 110251 - DNA, 25 bp, probe
aatggaagtcagtagcagtgttgaa

SEQ ID NO: 110252 - DNA, 25 bp, probe
aaagatacaatggaagtcagtagca

SEQ ID NO: 110253 - DNA, 25 bp, probe
caaagatacaatggaagtcagtagc

SEQ ID NO: 110254 - DNA, 25 bp, probe
cttctctgtctttgccaatagtttc

SEQ ID NO: 110255 - DNA, 25 bp, probe
tgtctttgccaatagtttcatcttc

SEQ ID NO: 110256 - DNA, 25 bp, probe
ctgtctttgccaatagtttcatctt

SEQ ID NO: 110257 - DNA, 25 bp, probe
ctctgtctttgccaatagtttcatc

SEQ ID NO: 110258 - DNA, 25 bp, probe
gtctttgccaatagtttcatcttcc

SEQ ID NO: 110259 - DNA, 25 bp, probe
tctgtctttgccaatagtttcatct

SEQ ID NO: 110260 - DNA, 25 bp, probe
tctctgtctttgccaatagtttcat

SEQ ID NO: 110261 - DNA, 25 bp, probe
acttgtgtagatgcttctcagaaca

SEQ ID NO: 110262 - DNA, 25 bp, probe
aatcaaattggaaatctgtaacgca

SEQ ID NO: 110263 - DNA, 25 bp, probe
ttctctgtctttgccaatagtttca

SEQ ID NO: 110264 - DNA, 25 bp, probe
atcacttctctgtctttgccaatag

SEQ ID NO: 110265 - DNA, 25 bp, probe
tgtgtagatgcttctcagaacatga

SEQ ID NO: 110266 - DNA, 25 bp, probe
aaatcaaattggaaatctgtaacgc

SEQ ID NO: 110267 - DNA, 25 bp, probe
aactttatgaggatgaaatgggttc

SEQ ID NO: 110268 - DNA, 25 bp, probe
acttctctgtctttgccaatagttt

SEQ ID NO: 110269 - DNA, 25 bp, probe
aaactttatgaggatgaaatgggtt

SEQ ID NO: 110270 - DNA, 25 bp, probe
caatggaagtcagtagcagtgttga

SEQ ID NO: 110271 - DNA, 25 bp, probe
aaatagcattgagacttgtgtagat

SEQ ID NO: 110272 - DNA, 25 bp, probe
tttgccaatagtttcatcttccgag

SEQ ID NO: 110273 - DNA, 25 bp, probe
ctttgccaatagtttcatcttccga

SEQ ID NO: 110274 - DNA, 25 bp, probe
tctttgccaatagtttcatcttccg

SEQ ID NO: 110275 - DNA, 25 bp, probe
gatcacttctctgtctttgccaata

SEQ ID NO: 110276 - DNA, 25 bp, probe
atgttctactggatcatctacaaga

SEQ ID NO: 110277 - DNA, 25 bp, probe
catgttctactggatcatctacaag

SEQ ID NO: 110278 - DNA, 25 bp, probe
ccctattagaatatgctgccgttaa

SEQ ID NO: 110279 - DNA, 25 bp, probe
ctctttgtgttctcagccctattag

SEQ ID NO: 110280 - DNA, 25 bp, probe
ctttaacttctctgcctatgggatg

SEQ ID NO: 110281 - DNA, 25 bp, probe
ggaatagcacaggaatctgagagac

SEQ ID NO: 110282 - DNA, 25 bp, probe
tctttgtgttctcagccctattaga

SEQ ID NO: 110283 - DNA, 25 bp, probe
tactggatcatctacaagattgtcc

SEQ ID NO: 110284 - DNA, 25 bp, probe
tgttctactggatcatctacaagat

SEQ ID NO: 110285 - DNA, 25 bp, probe
ggatcatctacaagattgtccgtag

SEQ ID NO: 110286 - DNA, 25 bp, probe
tggatcatctacaagattgtccgta

SEQ ID NO: 110287 - DNA, 25 bp, probe
cctattagaatatgctgccgttaac

SEQ ID NO: 110288 - DNA, 25 bp, probe
tctactggatcatctacaagattgt

SEQ ID NO: 110289 - DNA, 25 bp, probe
ctactggatcatctacaagattgtc

SEQ ID NO: 110290 - DNA, 25 bp, probe
tttaacttctctgcctatgggatgg

SEQ ID NO: 110291 - DNA, 25 bp, probe
ttaactttgtgtctcggcaacataa

SEQ ID NO: 110292 - DNA, 25 bp, probe
ctattagaatatgctgccgttaact

SEQ ID NO: 110293 - DNA, 25 bp, probe
gctttaacttctctgcctatgggat

SEQ ID NO: 110294 - DNA, 25 bp, probe
taactttgtgtctcggcaacataag

SEQ ID NO: 110295 - DNA, 25 bp, probe
ttctactggatcatctacaagattg

SEQ ID NO: 110296 - DNA, 25 bp, probe
gttctactggatcatctacaagatt

SEQ ID NO: 110297 - DNA, 25 bp, probe
tattagaatatgctgccgttaactt

SEQ ID NO: 110298 - DNA, 25 bp, probe
gccctattagaatatgctgccgtta

SEQ ID NO: 110299 - DNA, 25 bp, probe
ctggatcatctacaagattgtccgt

SEQ ID NO: 110300 - DNA, 25 bp, probe
actggatcatctacaagattgtccg

SEQ ID NO: 110301 - DNA, 25 bp, probe
gttctcagccctattagaatatgct

SEQ ID NO: 110302 - DNA, 25 bp, probe
tgttctcagccctattagaatatgc

SEQ ID NO: 110303 - DNA, 25 bp, probe
tttgtgttctcagccctattagaat

SEQ ID NO: 110304 - DNA, 25 bp, probe
ctttgtgttctcagccctattagaa

SEQ ID NO: 110305 - DNA, 25 bp, probe
ttgtgttctcagccctattagaata

SEQ ID NO: 110306 - DNA, 25 bp, probe
tgtgttctcagccctattagaatat

SEQ ID NO: 110307 - DNA, 25 bp, probe
gtgttctcagccctattagaatatg

SEQ ID NO: 110308 - DNA, 25 bp, probe
ttagaatatgctgccgttaactttg

SEQ ID NO: 110309 - DNA, 25 bp, probe
tagaatatgctgccgttaactttgt

SEQ ID NO: 110310 - DNA, 25 bp, probe
attagaatatgctgccgttaacttt

SEQ ID NO: 110311 - DNA, 25 bp, probe
ttaacttctctgcctatgggatggg

SEQ ID NO: 110312 - DNA, 25 bp, probe
acatgttctactggatcatctacaa

SEQ ID NO: 110313 - DNA, 25 bp, probe
tgtgaaagccattgacatttggatg

SEQ ID NO: 110314 - DNA, 25 bp, probe
ctatgtgaaagccattgacatttgg

SEQ ID NO: 110315 - DNA, 25 bp, probe
cctatgtgaaagccattgacatttg

SEQ ID NO: 110316 - DNA, 25 bp, probe
tcctatgtgaaagccattgacattt

SEQ ID NO: 110317 - DNA, 25 bp, probe
tatgtgaaagccattgacatttgga

SEQ ID NO: 110318 - DNA, 25 bp, probe
gggaatagcacaggaatctgagaga

SEQ ID NO: 110319 - DNA, 25 bp, probe
gtcctatgtgaaagccattgacatt

SEQ ID NO: 110320 - DNA, 25 bp, probe
taggatagaggagtgttaatggtca

SEQ ID NO: 110321 - DNA, 25 bp, probe
ataggatagaggagtgttaatggtc

SEQ ID NO: 110322 - DNA, 25 bp, probe
aataggatagaggagtgttaatggt

SEQ ID NO: 110323 - DNA, 25 bp, probe
tacagtaggaacacataactctagc

SEQ ID NO: 110324 - DNA, 25 bp, probe
ctcctgtacttgaccacattgaatt

SEQ ID NO: 110325 - DNA, 25 bp, probe
aggatagaggagtgttaatggtcac

SEQ ID NO: 110326 - DNA, 25 bp, probe
aactataagataacccagcagcaaa

SEQ ID NO: 110327 - DNA, 25 bp, probe
aaactataagataacccagcagcaa

SEQ ID NO: 110328 - DNA, 25 bp, probe
tctcctgtacttgaccacattgaat

SEQ ID NO: 110329 - DNA, 25 bp, probe
taaactataagataacccagcagca

SEQ ID NO: 110330 - DNA, 25 bp, probe
acagtaggaacacataactctagct

SEQ ID NO: 110331 - DNA, 25 bp, probe
gtacagtaggaacacataactctag

SEQ ID NO: 110332 - DNA, 25 bp, probe
ttctcctgtacttgaccacattgaa

SEQ ID NO: 110333 - DNA, 25 bp, probe
ctaaactataagataacccagcagc

SEQ ID NO: 110334 - DNA, 25 bp, probe
acctaaactataagataacccagca

SEQ ID NO: 110335 - DNA, 25 bp, probe
cggaaatacatcagggagaatcttg

SEQ ID NO: 110336 - DNA, 25 bp, probe
cagtaggaacacataactctagctg

SEQ ID NO: 110337 - DNA, 25 bp, probe
cctaaactataagataacccagcag

SEQ ID NO: 110338 - DNA, 25 bp, probe
gacctaaactataagataacccagc

SEQ ID NO: 110339 - DNA, 25 bp, probe
acttgaccacattgaatttaaggat

SEQ ID NO: 110340 - DNA, 25 bp, probe
agtaggaacacataactctagctgc

SEQ ID NO: 110341 - DNA, 25 bp, probe
ggaaatacatcagggagaatcttgt

SEQ ID NO: 110342 - DNA, 25 bp, probe
tacttgaccacattgaatttaagga

SEQ ID NO: 110343 - DNA, 25 bp, probe
gtaggaacacataactctagctgcc

SEQ ID NO: 110344 - DNA, 25 bp, probe
cttgaccacattgaatttaaggatt

SEQ ID NO: 110345 - DNA, 25 bp, probe
tcctgtacttgaccacattgaattt

SEQ ID NO: 110346 - DNA, 25 bp, probe
gtgacctaaactataagataaccca

SEQ ID NO: 110347 - DNA, 25 bp, probe
gtacttgaccacattgaatttaagg

SEQ ID NO: 110348 - DNA, 25 bp, probe
cctgtacttgaccacattgaattta

SEQ ID NO: 110349 - DNA, 25 bp, probe
aaataggatagaggagtgttaatgg

SEQ ID NO: 110350 - DNA, 25 bp, probe
ttgaccacattgaatttaaggattt

SEQ ID NO: 110351 - DNA, 25 bp, probe
tgacctaaactataagataacccag

SEQ ID NO: 110352 - DNA, 25 bp, probe
attcaccaatttctactggatatgc

SEQ ID NO: 110353 - DNA, 25 bp, probe
atatctgaaatgacccagtggactc

SEQ ID NO: 110354 - DNA, 25 bp, probe
tttctcctgtacttgaccacattga

SEQ ID NO: 110355 - DNA, 25 bp, probe
gtttctcctgtacttgaccacattg

SEQ ID NO: 110356 - DNA, 25 bp, probe
atcttgactaattcattgttacgtc

SEQ ID NO: 110357 - DNA, 25 bp, probe
tgtttctcctgtacttgaccacatt

SEQ ID NO: 110358 - DNA, 25 bp, probe
agtgacctaaactataagataaccc

SEQ ID NO: 110359 - DNA, 25 bp, probe
tttccaagaagttgaatcaaagccg

SEQ ID NO: 110360 - DNA, 25 bp, probe
tgtacttgaccacattgaatttaag

SEQ ID NO: 110361 - DNA, 25 bp, probe
ctgtacttgaccacattgaatttaa

SEQ ID NO: 110362 - DNA, 25 bp, probe
tgaccacattgaatttaaggattta

SEQ ID NO: 110363 - DNA, 25 bp, probe
ctttccaagaagttgaatcaaagcc

SEQ ID NO: 110364 - DNA, 25 bp, probe
ttaagaaccactgacaatgtaactc

SEQ ID NO: 110365 - DNA, 25 bp, probe
taagaaccactgacaatgtaactct

SEQ ID NO: 110366 - DNA, 25 bp, probe
gaaccactgacaatgtaactctctc

SEQ ID NO: 110367 - DNA, 25 bp, probe
aagaaccactgacaatgtaactctc

SEQ ID NO: 110368 - DNA, 25 bp, probe
agaaccactgacaatgtaactctct

SEQ ID NO: 110369 - DNA, 25 bp, probe
accactgacaatgtaactctctcat

SEQ ID NO: 110370 - DNA, 25 bp, probe
aaccactgacaatgtaactctctca

SEQ ID NO: 110371 - DNA, 25 bp, probe
gttaagaaccactgacaatgtaact

SEQ ID NO: 110372 - DNA, 25 bp, probe
agttaagaaccactgacaatgtaac

SEQ ID NO: 110373 - DNA, 25 bp, probe
aagtccacttcagttaagaaccact

SEQ ID NO: 110374 - DNA, 25 bp, probe
aatgctcagcttctcactagactat

SEQ ID NO: 110375 - DNA, 25 bp, probe
ctcagcttctcactagactatctcc

SEQ ID NO: 110376 - DNA, 25 bp, probe
atgctcagcttctcactagactatc

SEQ ID NO: 110377 - DNA, 25 bp, probe
cctcacaatcttcacaaagtagaac

SEQ ID NO: 110378 - DNA, 25 bp, probe
acctcacaatcttcacaaagtagaa

SEQ ID NO: 110379 - DNA, 25 bp, probe
ccactgacaatgtaactctctcatt

SEQ ID NO: 110380 - DNA, 25 bp, probe
cacctcacaatcttcacaaagtaga

SEQ ID NO: 110381 - DNA, 25 bp, probe
aacatacaatcaagtttgctggaaa

SEQ ID NO: 110382 - DNA, 25 bp, probe
gaacatacaatcaagtttgctggaa

SEQ ID NO: 110383 - DNA, 25 bp, probe
gagaacatacaatcaagtttgctgg

SEQ ID NO: 110384 - DNA, 25 bp, probe
gctcagcttctcactagactatctc

SEQ ID NO: 110385 - DNA, 25 bp, probe
tttagtagacacagggtttctccat

SEQ ID NO: 110386 - DNA, 25 bp, probe
agaacatacaatcaagtttgctgga

SEQ ID NO: 110387 - DNA, 25 bp, probe
caatgctcagcttctcactagacta

SEQ ID NO: 110388 - DNA, 25 bp, probe
gcttctcactagactatctccctta

SEQ ID NO: 110389 - DNA, 25 bp, probe
cgagaacatacaatcaagtttgctg

SEQ ID NO: 110390 - DNA, 25 bp, probe
ccacctcacaatcttcacaaagtag

SEQ ID NO: 110391 - DNA, 25 bp, probe
ctcacaatcttcacaaagtagaact

SEQ ID NO: 110392 - DNA, 25 bp, probe
actagactatctcccttattctcca

SEQ ID NO: 110393 - DNA, 25 bp, probe
actatctcccttattctccatgtga

SEQ ID NO: 110394 - DNA, 25 bp, probe
gactatctcccttattctccatgtg

SEQ ID NO: 110395 - DNA, 25 bp, probe
taaagtccacttcagttaagaacca

SEQ ID NO: 110396 - DNA, 25 bp, probe
cactagactatctcccttattctcc

SEQ ID NO: 110397 - DNA, 25 bp, probe
ctaaagtccacttcagttaagaacc

SEQ ID NO: 110398 - DNA, 25 bp, probe
ctccatgtgaaactttatgctgaaa

SEQ ID NO: 110399 - DNA, 25 bp, probe
tcccttattctccatgtgaaacttt

SEQ ID NO: 110400 - DNA, 25 bp, probe
attctccatgtgaaactttatgctg

SEQ ID NO: 110401 - DNA, 25 bp, probe
atctcccttattctccatgtgaaac

SEQ ID NO: 110402 - DNA, 25 bp, probe
ctcccttattctccatgtgaaactt

SEQ ID NO: 110403 - DNA, 25 bp, probe
tgctcagcttctcactagactatct

SEQ ID NO: 110404 - DNA, 25 bp, probe
atcagaatcacctgtgtatttcagt

SEQ ID NO: 110405 - DNA, 25 bp, probe
agactatctcccttattctccatgt

SEQ ID NO: 110406 - DNA, 25 bp, probe
catcagaatcacctgtgtatttcag

SEQ ID NO: 110407 - DNA, 25 bp, probe
tctccatgtgaaactttatgctgaa

SEQ ID NO: 110408 - DNA, 25 bp, probe
gatcacttgagcctattagttggag

SEQ ID NO: 110409 - DNA, 25 bp, probe
gaggatcacttgagcctattagttg

SEQ ID NO: 110410 - DNA, 25 bp, probe
ggatcacttgagcctattagttgga

SEQ ID NO: 110411 - DNA, 25 bp, probe
atcacttgagcctattagttggagg

SEQ ID NO: 110412 - DNA, 25 bp, probe
ggaggatcacttgagcctattagtt

SEQ ID NO: 110413 - DNA, 25 bp, probe
aggatcacttgagcctattagttgg

SEQ ID NO: 110414 - DNA, 25 bp, probe
caggaggatcacttgagcctattag

SEQ ID NO: 110415 - DNA, 25 bp, probe
aggaggatcacttgagcctattagt

SEQ ID NO: 110416 - DNA, 25 bp, probe
caagtaagaagtctgagtccctgag

SEQ ID NO: 110417 - DNA, 25 bp, probe
aagtaagaagtctgagtccctgaga

SEQ ID NO: 110418 - DNA, 25 bp, probe
aaggacacttgaaggtactcaggtt

SEQ ID NO: 110419 - DNA, 25 bp, probe
gatggtggaagcagttcacttaaag

SEQ ID NO: 110420 - DNA, 25 bp, probe
ccaagtaagaagtctgagtccctga

SEQ ID NO: 110421 - DNA, 25 bp, probe
gcaggaggatcacttgagcctatta

SEQ ID NO: 110422 - DNA, 25 bp, probe
ggacacttgaaggtactcaggtttc

SEQ ID NO: 110423 - DNA, 25 bp, probe
tggatggtggaagcagttcacttaa

SEQ ID NO: 110424 - DNA, 25 bp, probe
ctgtccctggtctcttaaaagaaaa

SEQ ID NO: 110425 - DNA, 25 bp, probe
aggacacttgaaggtactcaggttt

SEQ ID NO: 110426 - DNA, 25 bp, probe
atggtggaagcagttcacttaaagg

SEQ ID NO: 110427 - DNA, 25 bp, probe
ggatggtggaagcagttcacttaaa

SEQ ID NO: 110428 - DNA, 25 bp, probe
ttcacttaaaggccatgagttactc

SEQ ID NO: 110429 - DNA, 25 bp, probe
gttcacttaaaggccatgagttact

SEQ ID NO: 110430 - DNA, 25 bp, probe
agttcacttaaaggccatgagttac

SEQ ID NO: 110431 - DNA, 25 bp, probe
cagttcacttaaaggccatgagtta

SEQ ID NO: 110432 - DNA, 25 bp, probe
acttgaaggtactcaggtttcagag

SEQ ID NO: 110433 - DNA, 25 bp, probe
actgtccctggtctcttaaaagaaa

SEQ ID NO: 110434 - DNA, 25 bp, probe
cccaagtaagaagtctgagtccctg

SEQ ID NO: 110435 - DNA, 25 bp, probe
ctggatggtggaagcagttcactta

SEQ ID NO: 110436 - DNA, 25 bp, probe
cacttgaaggtactcaggtttcaga

SEQ ID NO: 110437 - DNA, 25 bp, probe
acacttgaaggtactcaggtttcag

SEQ ID NO: 110438 - DNA, 25 bp, probe
gacacttgaaggtactcaggtttca

SEQ ID NO: 110439 - DNA, 25 bp, probe
cactgtccctggtctcttaaaagaa

SEQ ID NO: 110440 - DNA, 25 bp, probe
tcacttaaaggccatgagttactcg

SEQ ID NO: 110441 - DNA, 25 bp, probe
cttgaaggtactcaggtttcagagc

SEQ ID NO: 110442 - DNA, 25 bp, probe
caaggacacttgaaggtactcaggt

SEQ ID NO: 110443 - DNA, 25 bp, probe
agtaagaagtctgagtccctgagac

SEQ ID NO: 110444 - DNA, 25 bp, probe
aagcagttcacttaaaggccatgag

SEQ ID NO: 110445 - DNA, 25 bp, probe
cacttaaaggccatgagttactcgg

SEQ ID NO: 110446 - DNA, 25 bp, probe
gaagcagttcacttaaaggccatga

SEQ ID NO: 110447 - DNA, 25 bp, probe
gtactcaggtttcagagcccaagtc

SEQ ID NO: 110448 - DNA, 25 bp, probe
tactcaggtttcagagcccaagtca

SEQ ID NO: 110449 - DNA, 25 bp, probe
gcagttcacttaaaggccatgagtt

SEQ ID NO: 110450 - DNA, 25 bp, probe
ttgaaggtactcaggtttcagagcc

SEQ ID NO: 110451 - DNA, 25 bp, probe
gtaagaagtctgagtccctgagacc

SEQ ID NO: 110452 - DNA, 25 bp, probe
actctgtgaactttatttaaggaca

SEQ ID NO: 110453 - DNA, 25 bp, probe
ctttagccttagcagtgggtatgag

SEQ ID NO: 110454 - DNA, 25 bp, probe
ttcctttagccttagcagtgggtat

SEQ ID NO: 110455 - DNA, 25 bp, probe
tttcctttagccttagcagtgggta

SEQ ID NO: 110456 - DNA, 25 bp, probe
ctctgtgaactttatttaaggacat

SEQ ID NO: 110457 - DNA, 25 bp, probe
tactctgtgaactttatttaaggac

SEQ ID NO: 110458 - DNA, 25 bp, probe
cctttagccttagcagtgggtatga

SEQ ID NO: 110459 - DNA, 25 bp, probe
tcctttagccttagcagtgggtatg

SEQ ID NO: 110460 - DNA, 25 bp, probe
tgtgaactttatttaaggacattct

SEQ ID NO: 110461 - DNA, 25 bp, probe
tctgtgaactttatttaaggacatt

SEQ ID NO: 110462 - DNA, 25 bp, probe
ctgtgaactttatttaaggacattc

SEQ ID NO: 110463 - DNA, 25 bp, probe
ctctctgttgtacactttcaatcaa

SEQ ID NO: 110464 - DNA, 25 bp, probe
gtgaactttatttaaggacattctt

SEQ ID NO: 110465 - DNA, 25 bp, probe
ttactctgtgaactttatttaagga

SEQ ID NO: 110466 - DNA, 25 bp, probe
tttagccttagcagtgggtatgagg

SEQ ID NO: 110467 - DNA, 25 bp, probe
gctctctgttgtacactttcaatca

SEQ ID NO: 110468 - DNA, 25 bp, probe
cgctctctgttgtacactttcaatc

SEQ ID NO: 110469 - DNA, 25 bp, probe
tttactctgtgaactttatttaagg

SEQ ID NO: 110470 - DNA, 25 bp, probe
tgaactttatttaaggacattcttt

SEQ ID NO: 110471 - DNA, 25 bp, probe
ttagccttagcagtgggtatgaggt

SEQ ID NO: 110472 - DNA, 25 bp, probe
ttttcctttagccttagcagtgggt

SEQ ID NO: 110473 - DNA, 25 bp, probe
ccgctctctgttgtacactttcaat

SEQ ID NO: 110474 - DNA, 25 bp, probe
tctctgttgtacactttcaatcaac

SEQ ID NO: 110475 - DNA, 25 bp, probe
gacctgagactgagttttgtctttt

SEQ ID NO: 110476 - DNA, 25 bp, probe
gttgtacactttcaatcaacacttt

SEQ ID NO: 110477 - DNA, 25 bp, probe
ttgtacactttcaatcaacactttt

SEQ ID NO: 110478 - DNA, 25 bp, probe
cacctagactgttttctgagccctc

SEQ ID NO: 110479 - DNA, 25 bp, probe
ctgcccacctagactgttttctgag

SEQ ID NO: 110480 - DNA, 25 bp, probe
ggacctgagactgagttttgtcttt

SEQ ID NO: 110481 - DNA, 25 bp, probe
cccgctctctgttgtacactttcaa

SEQ ID NO: 110482 - DNA, 25 bp, probe
cggacctgagactgagttttgtctt

SEQ ID NO: 110483 - DNA, 25 bp, probe
ttcttagtgtctggatgttcttacg

SEQ ID NO: 110484 - DNA, 25 bp, probe
tatctcttcacagtaatcaagcctc

SEQ ID NO: 110485 - DNA, 25 bp, probe
ttatctcttcacagtaatcaagcct

SEQ ID NO: 110486 - DNA, 25 bp, probe
cttatctcttcacagtaatcaagcc

SEQ ID NO: 110487 - DNA, 25 bp, probe
gttgtatgtcatctcttctctagca

SEQ ID NO: 110488 - DNA, 25 bp, probe
ttgtatgtcatctcttctctagcag

SEQ ID NO: 110489 - DNA, 25 bp, probe
agttgtatgtcatctcttctctagc

SEQ ID NO: 110490 - DNA, 25 bp, probe
tatgtcatctcttctctagcaggaa

SEQ ID NO: 110491 - DNA, 25 bp, probe
gtatgtcatctcttctctagcagga

SEQ ID NO: 110492 - DNA, 25 bp, probe
gtcatctcttctctagcaggaattg

SEQ ID NO: 110493 - DNA, 25 bp, probe
tgtatgtcatctcttctctagcagg

SEQ ID NO: 110494 - DNA, 25 bp, probe
atgtcatctcttctctagcaggaat

SEQ ID NO: 110495 - DNA, 25 bp, probe
atctcttcacagtaatcaagcctca

SEQ ID NO: 110496 - DNA, 25 bp, probe
tgtcatctcttctctagcaggaatt

SEQ ID NO: 110497 - DNA, 25 bp, probe
atcagtagttggcttgtgttacatt

SEQ ID NO: 110498 - DNA, 25 bp, probe
acttatctcttcacagtaatcaagc

SEQ ID NO: 110499 - DNA, 25 bp, probe
tcatctcttctctagcaggaattgg

SEQ ID NO: 110500 - DNA, 25 bp, probe
cagatcagtagttggcttgtgttac

SEQ ID NO: 110501 - DNA, 25 bp, probe
cttagttgtatgtcatctcttctct

SEQ ID NO: 110502 - DNA, 25 bp, probe
tcttagttgtatgtcatctcttctc

SEQ ID NO: 110503 - DNA, 25 bp, probe
tctcttcacagtaatcaagcctcac

SEQ ID NO: 110504 - DNA, 25 bp, probe
gatcagtagttggcttgtgttacat

SEQ ID NO: 110505 - DNA, 25 bp, probe
ttcaatatggactcatcatagccag

SEQ ID NO: 110506 - DNA, 25 bp, probe
cagacactacatgaacacgaatgag

SEQ ID NO: 110507 - DNA, 25 bp, probe
agttcttagttgtatgtcatctctt

SEQ ID NO: 110508 - DNA, 25 bp, probe
aagttcttagttgtatgtcatctct

SEQ ID NO: 110509 - DNA, 25 bp, probe
caatatggactcatcatagccagtt

SEQ ID NO: 110510 - DNA, 25 bp, probe
gttcttagttgtatgtcatctcttc

SEQ ID NO: 110511 - DNA, 25 bp, probe
gtaatcaagcctcacgtaattcatg

SEQ ID NO: 110512 - DNA, 25 bp, probe
agtaatcaagcctcacgtaattcat

SEQ ID NO: 110513 - DNA, 25 bp, probe
agggcaagaactataaacactcatt

SEQ ID NO: 110514 - DNA, 25 bp, probe
gatgagagggcaagaactataaaca

SEQ ID NO: 110515 - DNA, 25 bp, probe
ttcttagttgtatgtcatctcttct

SEQ ID NO: 110516 - DNA, 25 bp, probe
tcaatatggactcatcatagccagt

SEQ ID NO: 110517 - DNA, 25 bp, probe
atgagagggcaagaactataaacac

SEQ ID NO: 110518 - DNA, 25 bp, probe
tgacttatctcttcacagtaatcaa

SEQ ID NO: 110519 - DNA, 25 bp, probe
ttgacttatctcttcacagtaatca

SEQ ID NO: 110520 - DNA, 25 bp, probe
ggatgagagggcaagaactataaac

SEQ ID NO: 110521 - DNA, 25 bp, probe
aggatgagagggcaagaactataaa

SEQ ID NO: 110522 - DNA, 25 bp, probe
cagtaatcaagcctcacgtaattca

SEQ ID NO: 110523 - DNA, 25 bp, probe
acagtaatcaagcctcacgtaattc

SEQ ID NO: 110524 - DNA, 25 bp, probe
acagacactacatgaacacgaatga

SEQ ID NO: 110525 - DNA, 25 bp, probe
cacagacactacatgaacacgaatg

SEQ ID NO: 110526 - DNA, 25 bp, probe
agatcagtagttggcttgtgttaca

SEQ ID NO: 110527 - DNA, 25 bp, probe
tggtaagcgactgtcatcaagtaag

SEQ ID NO: 110528 - DNA, 25 bp, probe
ctggtaagcgactgtcatcaagtaa

SEQ ID NO: 110529 - DNA, 25 bp, probe
ggtaagcgactgtcatcaagtaagg

SEQ ID NO: 110530 - DNA, 25 bp, probe
actggtaagcgactgtcatcaagta

SEQ ID NO: 110531 - DNA, 25 bp, probe
cgaagtctggatgggttactacaaa

SEQ ID NO: 110532 - DNA, 25 bp, probe
gtaagcgactgtcatcaagtaaggc

SEQ ID NO: 110533 - DNA, 25 bp, probe
cttcatttgtagagggctgtaacag

SEQ ID NO: 110534 - DNA, 25 bp, probe
agtaaggtgttcaggactggtaagc

SEQ ID NO: 110535 - DNA, 25 bp, probe
ttcatttgtagagggctgtaacagt

SEQ ID NO: 110536 - DNA, 25 bp, probe
gcttcatttgtagagggctgtaaca

SEQ ID NO: 110537 - DNA, 25 bp, probe
gaagtctggatgggttactacaaaa

SEQ ID NO: 110538 - DNA, 25 bp, probe
atttgtagagggctgtaacagtgac

SEQ ID NO: 110539 - DNA, 25 bp, probe
catttgtagagggctgtaacagtga

SEQ ID NO: 110540 - DNA, 25 bp, probe
tcatttgtagagggctgtaacagtg

SEQ ID NO: 110541 - DNA, 25 bp, probe
cgcttcatttgtagagggctgtaac

SEQ ID NO: 110542 - DNA, 25 bp, probe
gactggtaagcgactgtcatcaagt

SEQ ID NO: 110543 - DNA, 25 bp, probe
gtaaggtgttcaggactggtaagcg

SEQ ID NO: 110544 - DNA, 25 bp, probe
cagtaaggtgttcaggactggtaag

SEQ ID NO: 110545 - DNA, 25 bp, probe
gcgaagtctggatgggttactacaa

SEQ ID NO: 110546 - DNA, 25 bp, probe
tttctgcaataaagtcacgagcgtt

SEQ ID NO: 110547 - DNA, 25 bp, probe
ccgcttcatttgtagagggctgtaa

SEQ ID NO: 110548 - DNA, 25 bp, probe
ttctgcaataaagtcacgagcgttc

SEQ ID NO: 110549 - DNA, 25 bp, probe
ctctctgtgccgcttcatttgtaga

SEQ ID NO: 110550 - DNA, 25 bp, probe
tttgtagagggctgtaacagtgacc

SEQ ID NO: 110551 - DNA, 25 bp, probe
agcccatctacattgtcaccgagta

SEQ ID NO: 110552 - DNA, 25 bp, probe
gcccatctacattgtcaccgagtac

SEQ ID NO: 110553 - DNA, 25 bp, probe
taagcgactgtcatcaagtaaggcc

SEQ ID NO: 110554 - DNA, 25 bp, probe
tactaagccccagtaaggtgttcag

SEQ ID NO: 110555 - DNA, 25 bp, probe
gaaccatgtctccagaagcctttct

SEQ ID NO: 110556 - DNA, 25 bp, probe
ttgtagagggctgtaacagtgacct

SEQ ID NO: 110557 - DNA, 25 bp, probe
ttttctgcaataaagtcacgagcgt

SEQ ID NO: 110558 - DNA, 25 bp, probe
gtactaagccccagtaaggtgttca

SEQ ID NO: 110559 - DNA, 25 bp, probe
ggcttttctgcaataaagtcacgag

SEQ ID NO: 110560 - DNA, 25 bp, probe
cttttctgcaataaagtcacgagcg

SEQ ID NO: 110561 - DNA, 25 bp, probe
gcttttctgcaataaagtcacgagc

SEQ ID NO: 110562 - DNA, 25 bp, probe
tctctgtgccgcttcatttgtagag

SEQ ID NO: 110563 - DNA, 25 bp, probe
agtactaagccccagtaaggtgttc

SEQ ID NO: 110564 - DNA, 25 bp, probe
gagtactaagccccagtaaggtgtt

SEQ ID NO: 110565 - DNA, 25 bp, probe
gggcttttctgcaataaagtcacga

SEQ ID NO: 110566 - DNA, 25 bp, probe
ggggcttttctgcaataaagtcacg

SEQ ID NO: 110567 - DNA, 25 bp, probe
cggggcttttctgcaataaagtcac

SEQ ID NO: 110568 - DNA, 25 bp, probe
cttttctcagacccggaatccagtg

SEQ ID NO: 110569 - DNA, 25 bp, probe
ggagtactaagccccagtaaggtgt

SEQ ID NO: 110570 - DNA, 25 bp, probe
gatgaaatcgttagcaccttaggag

SEQ ID NO: 110571 - DNA, 25 bp, probe
ttcgatgaaatcgttagcaccttag

SEQ ID NO: 110572 - DNA, 25 bp, probe
cttcgatgaaatcgttagcacctta

SEQ ID NO: 110573 - DNA, 25 bp, probe
ggacatttagccgctcatcttcgat

SEQ ID NO: 110574 - DNA, 25 bp, probe
catcttcgatgaaatcgttagcacc

SEQ ID NO: 110575 - DNA, 25 bp, probe
atcttcgatgaaatcgttagcacct

SEQ ID NO: 110576 - DNA, 25 bp, probe
cgatgaaatcgttagcaccttagga

SEQ ID NO: 110577 - DNA, 25 bp, probe
tcttcgatgaaatcgttagcacctt

SEQ ID NO: 110578 - DNA, 25 bp, probe
tcgatgaaatcgttagcaccttagg

SEQ ID NO: 110579 - DNA, 25 bp, probe
gacatttagccgctcatcttcgatg

SEQ ID NO: 110580 - DNA, 25 bp, probe
tgaaactgtctatgcactacattct

SEQ ID NO: 110581 - DNA, 25 bp, probe
ctgtctatgcactacattctgctag

SEQ ID NO: 110582 - DNA, 25 bp, probe
gaaactgtctatgcactacattctg

SEQ ID NO: 110583 - DNA, 25 bp, probe
cctctgtgctgtgaaactgtctatg

SEQ ID NO: 110584 - DNA, 25 bp, probe
actgtctatgcactacattctgcta

SEQ ID NO: 110585 - DNA, 25 bp, probe
gtgaaactgtctatgcactacattc

SEQ ID NO: 110586 - DNA, 25 bp, probe
tgtgaaactgtctatgcactacatt

SEQ ID NO: 110587 - DNA, 25 bp, probe
ctgtgaaactgtctatgcactacat

SEQ ID NO: 110588 - DNA, 25 bp, probe
ctcctcttcaagtaaacgccaagtc

SEQ ID NO: 110589 - DNA, 25 bp, probe
aactgtctatgcactacattctgct

SEQ ID NO: 110590 - DNA, 25 bp, probe
ctctgtgctgtgaaactgtctatgc

SEQ ID NO: 110591 - DNA, 25 bp, probe
cctcttcaagtaaacgccaagtcac

SEQ ID NO: 110592 - DNA, 25 bp, probe
ccctctgtgctgtgaaactgtctat

SEQ ID NO: 110593 - DNA, 25 bp, probe
tcctcttcaagtaaacgccaagtca

SEQ ID NO: 110594 - DNA, 25 bp, probe
aaactgtctatgcactacattctgc

SEQ ID NO: 110595 - DNA, 25 bp, probe
gctgtgaaactgtctatgcactaca

SEQ ID NO: 110596 - DNA, 25 bp, probe
tagctcctcttcaagtaaacgccaa

SEQ ID NO: 110597 - DNA, 25 bp, probe
ctagctcctcttcaagtaaacgcca

SEQ ID NO: 110598 - DNA, 25 bp, probe
tccctctgtgctgtgaaactgtcta

SEQ ID NO: 110599 - DNA, 25 bp, probe
tgctgtgaaactgtctatgcactac

SEQ ID NO: 110600 - DNA, 25 bp, probe
agctcctcttcaagtaaacgccaag

SEQ ID NO: 110601 - DNA, 25 bp, probe
aatagtgccaaggaagccttctgag

SEQ ID NO: 110602 - DNA, 25 bp, probe
tctgtgctgtgaaactgtctatgca

SEQ ID NO: 110603 - DNA, 25 bp, probe
cagggtagtagatggcattgaagac

SEQ ID NO: 110604 - DNA, 25 bp, probe
tagtagatggcattgaagacggctg

SEQ ID NO: 110605 - DNA, 25 bp, probe
gtagtagatggcattgaagacggct

SEQ ID NO: 110606 - DNA, 25 bp, probe
agggtagtagatggcattgaagacg

SEQ ID NO: 110607 - DNA, 25 bp, probe
ccagggtagtagatggcattgaaga

SEQ ID NO: 110608 - DNA, 25 bp, probe
aaggaacacagacacactggacaag

SEQ ID NO: 110609 - DNA, 25 bp, probe
caaggaacacagacacactggacaa

SEQ ID NO: 110610 - DNA, 25 bp, probe
gggtagtagatggcattgaagacgg

SEQ ID NO: 110611 - DNA, 25 bp, probe
cccagggtagtagatggcattgaag

SEQ ID NO: 110612 - DNA, 25 bp, probe
actctcagagaggataggctggatc

SEQ ID NO: 110613 - DNA, 25 bp, probe
gactctcagagaggataggctggat

SEQ ID NO: 110614 - DNA, 25 bp, probe
ctgcctctacctgtccccaaatttt

SEQ ID NO: 110615 - DNA, 25 bp, probe
ctcctgactctcagagaggataggc

SEQ ID NO: 110616 - DNA, 25 bp, probe
gctcctgactctcagagaggatagg

SEQ ID NO: 110617 - DNA, 25 bp, probe
ggctcctgactctcagagaggatag

SEQ ID NO: 110618 - DNA, 25 bp, probe
ctgactctcagagaggataggctgg

SEQ ID NO: 110619 - DNA, 25 bp, probe
cctgactctcagagaggataggctg

SEQ ID NO: 110620 - DNA, 25 bp, probe
tcctgactctcagagaggataggct

SEQ ID NO: 110621 - DNA, 25 bp, probe
ctctcagagaggataggctggatcc

SEQ ID NO: 110622 - DNA, 25 bp, probe
tctctgaatgccttcgcctgtataa

SEQ ID NO: 110623 - DNA, 25 bp, probe
aatgccttcgcctgtataaagagtt

SEQ ID NO: 110624 - DNA, 25 bp, probe
cttcgcctgtataaagagttggact

SEQ ID NO: 110625 - DNA, 25 bp, probe
gaatgccttcgcctgtataaagagt

SEQ ID NO: 110626 - DNA, 25 bp, probe
tgaatgccttcgcctgtataaagag

SEQ ID NO: 110627 - DNA, 25 bp, probe
ctgaatgccttcgcctgtataaaga

SEQ ID NO: 110628 - DNA, 25 bp, probe
tctgaatgccttcgcctgtataaag

SEQ ID NO: 110629 - DNA, 25 bp, probe
ctctgaatgccttcgcctgtataaa

SEQ ID NO: 110630 - DNA, 25 bp, probe
gtctctgaatgccttcgcctgtata

SEQ ID NO: 110631 - DNA, 25 bp, probe
ccttcgcctgtataaagagttggac

SEQ ID NO: 110632 - DNA, 25 bp, probe
atgccttcgcctgtataaagagttg

SEQ ID NO: 110633 - DNA, 25 bp, probe
ttcctcaccatcccattaaagaccg

SEQ ID NO: 110634 - DNA, 25 bp, probe
gccttcgcctgtataaagagttgga

SEQ ID NO: 110635 - DNA, 25 bp, probe
ttcgcctgtataaagagttggactc

SEQ ID NO: 110636 - DNA, 25 bp, probe
tgccttcgcctgtataaagagttgg

SEQ ID NO: 110637 - DNA, 25 bp, probe
ggaagaaagagcatttattaggcac

SEQ ID NO: 110638 - DNA, 25 bp, probe
aagaaagagcatttattaggcactg

SEQ ID NO: 110639 - DNA, 25 bp, probe
agaaagagcatttattaggcactgt

SEQ ID NO: 110640 - DNA, 25 bp, probe
cctttataccgactcagattcctta

SEQ ID NO: 110641 - DNA, 25 bp, probe
gaagaaagagcatttattaggcact

SEQ ID NO: 110642 - DNA, 25 bp, probe
tcctttataccgactcagattcctt

SEQ ID NO: 110643 - DNA, 25 bp, probe
agcatttattaggcactgtagcaat

SEQ ID NO: 110644 - DNA, 25 bp, probe
gcatttattaggcactgtagcaatt

SEQ ID NO: 110645 - DNA, 25 bp, probe
gaaagagcatttattaggcactgta

SEQ ID NO: 110646 - DNA, 25 bp, probe
aaagagcatttattaggcactgtag

SEQ ID NO: 110647 - DNA, 25 bp, probe
ttgggaagaaagagcatttattagg

SEQ ID NO: 110648 - DNA, 25 bp, probe
gggaagaaagagcatttattaggca

SEQ ID NO: 110649 - DNA, 25 bp, probe
tgggaagaaagagcatttattaggc

SEQ ID NO: 110650 - DNA, 25 bp, probe
aagagcatttattaggcactgtagc

SEQ ID NO: 110651 - DNA, 25 bp, probe
gcaattcagtggtctagtcctttat

SEQ ID NO: 110652 - DNA, 25 bp, probe
aaagagaccctgaataagaagagca

SEQ ID NO: 110653 - DNA, 25 bp, probe
gagcatttattaggcactgtagcaa

SEQ ID NO: 110654 - DNA, 25 bp, probe
aagaattgggaagaaagagcattta

SEQ ID NO: 110655 - DNA, 25 bp, probe
gaatcatccatccgtctacagctaa

SEQ ID NO: 110656 - DNA, 25 bp, probe
caagaattgggaagaaagagcattt

SEQ ID NO: 110657 - DNA, 25 bp, probe
ttataccgactcagattccttaagc

SEQ ID NO: 110658 - DNA, 25 bp, probe
tcttggtattcacttgggtttgata

SEQ ID NO: 110659 - DNA, 25 bp, probe
agaattgggaagaaagagcatttat

SEQ ID NO: 110660 - DNA, 25 bp, probe
ttcttggtattcacttgggtttgat

SEQ ID NO: 110661 - DNA, 25 bp, probe
cttgggtttgataattgatctgagc

SEQ ID NO: 110662 - DNA, 25 bp, probe
tataccgactcagattccttaagca

SEQ ID NO: 110663 - DNA, 25 bp, probe
cttggtattcacttgggtttgataa

SEQ ID NO: 110664 - DNA, 25 bp, probe
ttctacttggtgtttgttctctgga

SEQ ID NO: 110665 - DNA, 25 bp, probe
gttctacttggtgtttgttctctgg

SEQ ID NO: 110666 - DNA, 25 bp, probe
agttctacttggtgtttgttctctg

SEQ ID NO: 110667 - DNA, 25 bp, probe
ctgagttctacttggtgtttgttct

SEQ ID NO: 110668 - DNA, 25 bp, probe
gagttctacttggtgtttgttctct

SEQ ID NO: 110669 - DNA, 25 bp, probe
cacttgggtttgataattgatctga

SEQ ID NO: 110670 - DNA, 25 bp, probe
cttagattgcctccatctcaatgtg

SEQ ID NO: 110671 - DNA, 25 bp, probe
cttcttggtattcacttgggtttga

SEQ ID NO: 110672 - DNA, 25 bp, probe
tgagttctacttggtgtttgttctc

SEQ ID NO: 110673 - DNA, 25 bp, probe
acttgggtttgataattgatctgag

SEQ ID NO: 110674 - DNA, 25 bp, probe
ataccgactcagattccttaagcat

SEQ ID NO: 110675 - DNA, 25 bp, probe
atttattaggcactgtagcaatttg

SEQ ID NO: 110676 - DNA, 25 bp, probe
catttattaggcactgtagcaattt

SEQ ID NO: 110677 - DNA, 25 bp, probe
tagattgcctccatctcaatgtgaa

SEQ ID NO: 110678 - DNA, 25 bp, probe
ttagattgcctccatctcaatgtga

SEQ ID NO: 110679 - DNA, 25 bp, probe
agagcatttattaggcactgtagca

SEQ ID NO: 110680 - DNA, 25 bp, probe
ttggtattcacttgggtttgataat

SEQ ID NO: 110681 - DNA, 25 bp, probe
gtcatagttcacctgtctcttatct

SEQ ID NO: 110682 - DNA, 25 bp, probe
agtcatagttcacctgtctcttatc

SEQ ID NO: 110683 - DNA, 25 bp, probe
tgtctcttatctattcacttctggt

SEQ ID NO: 110684 - DNA, 25 bp, probe
tcacctgtctcttatctattcactt

SEQ ID NO: 110685 - DNA, 25 bp, probe
ttcacctgtctcttatctattcact

SEQ ID NO: 110686 - DNA, 25 bp, probe
gttcacctgtctcttatctattcac

SEQ ID NO: 110687 - DNA, 25 bp, probe
agttcacctgtctcttatctattca

SEQ ID NO: 110688 - DNA, 25 bp, probe
accattatcaagagttgtaggatgc

SEQ ID NO: 110689 - DNA, 25 bp, probe
cacctgtctcttatctattcacttc

SEQ ID NO: 110690 - DNA, 25 bp, probe
ctgaccattatcaagagttgtagga

SEQ ID NO: 110691 - DNA, 25 bp, probe
tctgaccattatcaagagttgtagg

SEQ ID NO: 110692 - DNA, 25 bp, probe
acctgtctcttatctattcacttct

SEQ ID NO: 110693 - DNA, 25 bp, probe
gaccattatcaagagttgtaggatg

SEQ ID NO: 110694 - DNA, 25 bp, probe
ctgtctcttatctattcacttctgg

SEQ ID NO: 110695 - DNA, 25 bp, probe
cctgtctcttatctattcacttctg

SEQ ID NO: 110696 - DNA, 25 bp, probe
tgaccattatcaagagttgtaggat

SEQ ID NO: 110697 - DNA, 25 bp, probe
ccagcgtacacaatgagatattcta

SEQ ID NO: 110698 - DNA, 25 bp, probe
tcatagttcacctgtctcttatcta

SEQ ID NO: 110699 - DNA, 25 bp, probe
cagtcatagttcacctgtctcttat

SEQ ID NO: 110700 - DNA, 25 bp, probe
cagcgtacacaatgagatattctaa

SEQ ID NO: 110701 - DNA, 25 bp, probe
tctcttatctattcacttctggtgc

SEQ ID NO: 110702 - DNA, 25 bp, probe
ttctgaccattatcaagagttgtag

SEQ ID NO: 110703 - DNA, 25 bp, probe
gtatctcacctgtcatggatgaatt

SEQ ID NO: 110704 - DNA, 25 bp, probe
atagccagcgtacacaatgagatat

SEQ ID NO: 110705 - DNA, 25 bp, probe
ctcttatctattcacttctggtgcc

SEQ ID NO: 110706 - DNA, 25 bp, probe
agcaagctcaggagaatgtaattaa

SEQ ID NO: 110707 - DNA, 25 bp, probe
tagccagcgtacacaatgagatatt

SEQ ID NO: 110708 - DNA, 25 bp, probe
aatagccagcgtacacaatgagata

SEQ ID NO: 110709 - DNA, 25 bp, probe
catgccaacacttctgtaattgatc

SEQ ID NO: 110710 - DNA, 25 bp, probe
tgtatctcacctgtcatggatgaat

SEQ ID NO: 110711 - DNA, 25 bp, probe
cttatctattcacttctggtgccac

SEQ ID NO: 110712 - DNA, 25 bp, probe
tcttatctattcacttctggtgcca

SEQ ID NO: 110713 - DNA, 25 bp, probe
ttctcatgccaacacttctgtaatt

SEQ ID NO: 110714 - DNA, 25 bp, probe
ttgtatctcacctgtcatggatgaa

SEQ ID NO: 110715 - DNA, 25 bp, probe
tcatgccaacacttctgtaattgat

SEQ ID NO: 110716 - DNA, 25 bp, probe
gtctcttatctattcacttctggtg

SEQ ID NO: 110717 - DNA, 25 bp, probe
aacaaggtaacagtcatagttcacc

SEQ ID NO: 110718 - DNA, 25 bp, probe
cttctcatgccaacacttctgtaat

SEQ ID NO: 110719 - DNA, 25 bp, probe
tatctattcacttctggtgccacaa

SEQ ID NO: 110720 - DNA, 25 bp, probe
ttatctattcacttctggtgccaca

SEQ ID NO: 110721 - DNA, 25 bp, probe
gcatctgttgatttctgaccattat

SEQ ID NO: 110722 - DNA, 25 bp, probe
ctcatgccaacacttctgtaattga

SEQ ID NO: 110723 - DNA, 25 bp, probe
tctcatgccaacacttctgtaattg

SEQ ID NO: 110724 - DNA, 25 bp, probe
tagttcacctgtctcttatctattc

SEQ ID NO: 110725 - DNA, 25 bp, probe
gaatgagaactatgaaccaggaagg

SEQ ID NO: 110726 - DNA, 25 bp, probe
ggaatgagaactatgaaccaggaag

SEQ ID NO: 110727 - DNA, 25 bp, probe
aatgagaactatgaaccaggaagga

SEQ ID NO: 110728 - DNA, 25 bp, probe
gaactatgaaccaggaaggagagat

SEQ ID NO: 110729 - DNA, 25 bp, probe
atgagaactatgaaccaggaaggag

SEQ ID NO: 110730 - DNA, 25 bp, probe
gagaactatgaaccaggaaggagag

SEQ ID NO: 110731 - DNA, 25 bp, probe
aactatgaaccaggaaggagagatc

SEQ ID NO: 110732 - DNA, 25 bp, probe
agaactatgaaccaggaaggagaga

SEQ ID NO: 110733 - DNA, 25 bp, probe
tgagaactatgaaccaggaaggaga

SEQ ID NO: 110734 - DNA, 25 bp, probe
atcgcttcctttcttagattctcag

SEQ ID NO: 110735 - DNA, 25 bp, probe
tgtatcgcttcctttcttagattct

SEQ ID NO: 110736 - DNA, 25 bp, probe
cctgtatcgcttcctttcttagatt

SEQ ID NO: 110737 - DNA, 25 bp, probe
ctgtatcgcttcctttcttagattc

SEQ ID NO: 110738 - DNA, 25 bp, probe
tatcgcttcctttcttagattctca

SEQ ID NO: 110739 - DNA, 25 bp, probe
gtatcgcttcctttcttagattctc

SEQ ID NO: 110740 - DNA, 25 bp, probe
ctcttgacactcacaatctcgttca

SEQ ID NO: 110741 - DNA, 25 bp, probe
ttgggtcttcagatcataaactacg

SEQ ID NO: 110742 - DNA, 25 bp, probe
acttgggtcttcagatcataaacta

SEQ ID NO: 110743 - DNA, 25 bp, probe
tcttgacactcacaatctcgttcac

SEQ ID NO: 110744 - DNA, 25 bp, probe
tattccctcttgacactcacaatct

SEQ ID NO: 110745 - DNA, 25 bp, probe
gtattccctcttgacactcacaatc

SEQ ID NO: 110746 - DNA, 25 bp, probe
cttgggtcttcagatcataaactac

SEQ ID NO: 110747 - DNA, 25 bp, probe
gggaatgagaactatgaaccaggaa

SEQ ID NO: 110748 - DNA, 25 bp, probe
gcctttatcagattcatagatgagc

SEQ ID NO: 110749 - DNA, 25 bp, probe
cctcttgacactcacaatctcgttc

SEQ ID NO: 110750 - DNA, 25 bp, probe
gacttgggtcttcagatcataaact

SEQ ID NO: 110751 - DNA, 25 bp, probe
catcccaaattgtctccagttgaag

SEQ ID NO: 110752 - DNA, 25 bp, probe
gcctgtatcgcttcctttcttagat

SEQ ID NO: 110753 - DNA, 25 bp, probe
cagcaatgtcaccttgtagcctatg

SEQ ID NO: 110754 - DNA, 25 bp, probe
attccctcttgacactcacaatctc

SEQ ID NO: 110755 - DNA, 25 bp, probe
ggacttgggtcttcagatcataaac

SEQ ID NO: 110756 - DNA, 25 bp, probe
cagcaggatggtgaagtagtaaact

SEQ ID NO: 110757 - DNA, 25 bp, probe
actatgaaccaggaaggagagatcc

SEQ ID NO: 110758 - DNA, 25 bp, probe
cgtattccctcttgacactcacaat

SEQ ID NO: 110759 - DNA, 25 bp, probe
gtttcttctaagggaggaggacatg

SEQ ID NO: 110760 - DNA, 25 bp, probe
cttgacactcacaatctcgttcacc

SEQ ID NO: 110761 - DNA, 25 bp, probe
tgggtcttcagatcataaactacgt

SEQ ID NO: 110762 - DNA, 25 bp, probe
agcaggatggtgaagtagtaaactg

SEQ ID NO: 110763 - DNA, 25 bp, probe
acatcccaaattgtctccagttgaa

SEQ ID NO: 110764 - DNA, 25 bp, probe
aacatcccaaattgtctccagttga

SEQ ID NO: 110765 - DNA, 25 bp, probe
aaataaatgtactttgcaccacttc

SEQ ID NO: 110766 - DNA, 25 bp, probe
caaattgtctccagttgaaggaagg

SEQ ID NO: 110767 - DNA, 25 bp, probe
ccaaattgtctccagttgaaggaag

SEQ ID NO: 110768 - DNA, 25 bp, probe
gggacttgggtcttcagatcataaa

SEQ ID NO: 110769 - DNA, 25 bp, probe
ctgttagatgccgatgtgtgtaatg

SEQ ID NO: 110770 - DNA, 25 bp, probe
gttagatgccgatgtgtgtaatgtg

SEQ ID NO: 110771 - DNA, 25 bp, probe
ttacatgccactattaagctgctaa

SEQ ID NO: 110772 - DNA, 25 bp, probe
aagtgccttagactcttgccatatt

SEQ ID NO: 110773 - DNA, 25 bp, probe
tgttagatgccgatgtgtgtaatgt

SEQ ID NO: 110774 - DNA, 25 bp, probe
ggtatctatatgaacttgacacagt

SEQ ID NO: 110775 - DNA, 25 bp, probe
ccactattaagctgctaattgttcc

SEQ ID NO: 110776 - DNA, 25 bp, probe
attaagctgctaattgttcctgttg

SEQ ID NO: 110777 - DNA, 25 bp, probe
tacatgccactattaagctgctaat

SEQ ID NO: 110778 - DNA, 25 bp, probe
gccactattaagctgctaattgttc

SEQ ID NO: 110779 - DNA, 25 bp, probe
catgccactattaagctgctaattg

SEQ ID NO: 110780 - DNA, 25 bp, probe
aaggttggattgtgttagaggaatc

SEQ ID NO: 110781 - DNA, 25 bp, probe
atgccactattaagctgctaattgt

SEQ ID NO: 110782 - DNA, 25 bp, probe
acatgccactattaagctgctaatt

SEQ ID NO: 110783 - DNA, 25 bp, probe
gaagtgccttagactcttgccatat

SEQ ID NO: 110784 - DNA, 25 bp, probe
ctattaagctgctaattgttcctgt

SEQ ID NO: 110785 - DNA, 25 bp, probe
actattaagctgctaattgttcctg

SEQ ID NO: 110786 - DNA, 25 bp, probe
cactattaagctgctaattgttcct

SEQ ID NO: 110787 - DNA, 25 bp, probe
taaaggttggattgtgttagaggaa

SEQ ID NO: 110788 - DNA, 25 bp, probe
tgccactattaagctgctaattgtt

SEQ ID NO: 110789 - DNA, 25 bp, probe
aaaggttggattgtgttagaggaat

SEQ ID NO: 110790 - DNA, 25 bp, probe
gaagaactacacgtaacatcatcat

SEQ ID NO: 110791 - DNA, 25 bp, probe
tattaagctgctaattgttcctgtt

SEQ ID NO: 110792 - DNA, 25 bp, probe
tgtcacatttactttggtcctctat

SEQ ID NO: 110793 - DNA, 25 bp, probe
ttaagctgctaattgttcctgttgg

SEQ ID NO: 110794 - DNA, 25 bp, probe
gtcacatttactttggtcctctatg

SEQ ID NO: 110795 - DNA, 25 bp, probe
gtgtcacatttactttggtcctcta

SEQ ID NO: 110796 - DNA, 25 bp, probe
tgaagaactacacgtaacatcatca

SEQ ID NO: 110797 - DNA, 25 bp, probe
aagaactacacgtaacatcatcatt

SEQ ID NO: 110798 - DNA, 25 bp, probe
agggtatctatatgaacttgacaca

SEQ ID NO: 110799 - DNA, 25 bp, probe
ttagatgccgatgtgtgtaatgtgg

SEQ ID NO: 110800 - DNA, 25 bp, probe
ccgaggttcatttgattgattgtat

SEQ ID NO: 110801 - DNA, 25 bp, probe
ccatgaagaactacacgtaacatca

SEQ ID NO: 110802 - DNA, 25 bp, probe
gggtatctatatgaacttgacacag

SEQ ID NO: 110803 - DNA, 25 bp, probe
aatgtttgaagtgccttagactctt

SEQ ID NO: 110804 - DNA, 25 bp, probe
aaatgtttgaagtgccttagactct

SEQ ID NO: 110805 - DNA, 25 bp, probe
taaatgtttgaagtgccttagactc

SEQ ID NO: 110806 - DNA, 25 bp, probe
gaggttcatttgattgattgtatgc

SEQ ID NO: 110807 - DNA, 25 bp, probe
tagccctttatttacatgccactat

SEQ ID NO: 110808 - DNA, 25 bp, probe
atagccctttatttacatgccacta

SEQ ID NO: 110809 - DNA, 25 bp, probe
gtgtaatgtggatcaccagaacaag

SEQ ID NO: 110810 - DNA, 25 bp, probe
ttaaatgtttgaagtgccttagact

SEQ ID NO: 110811 - DNA, 25 bp, probe
cgaggttcatttgattgattgtatg

SEQ ID NO: 110812 - DNA, 25 bp, probe
aaggacatcgctgttcttctgtatg

SEQ ID NO: 110813 - DNA, 25 bp, probe
ggtgtggaagcatgatatgtactat

SEQ ID NO: 110814 - DNA, 25 bp, probe
aggtgtggaagcatgatatgtacta

SEQ ID NO: 110815 - DNA, 25 bp, probe
aaggtgtggaagcatgatatgtact

SEQ ID NO: 110816 - DNA, 25 bp, probe
gtgtggaagcatgatatgtactata

SEQ ID NO: 110817 - DNA, 25 bp, probe
tatgtactttgtccttcagcaagaa

SEQ ID NO: 110818 - DNA, 25 bp, probe
ttatgtactttgtccttcagcaaga

SEQ ID NO: 110819 - DNA, 25 bp, probe
tttatgtactttgtccttcagcaag

SEQ ID NO: 110820 - DNA, 25 bp, probe
atgtactttgtccttcagcaagaaa

SEQ ID NO: 110821 - DNA, 25 bp, probe
tgtggaagcatgatatgtactatag

SEQ ID NO: 110822 - DNA, 25 bp, probe
gaaaggtgtggaagcatgatatgta

SEQ ID NO: 110823 - DNA, 25 bp, probe
caagaaaggtgtggaagcatgatat

SEQ ID NO: 110824 - DNA, 25 bp, probe
aaaggtgtggaagcatgatatgtac

SEQ ID NO: 110825 - DNA, 25 bp, probe
aagaaaggtgtggaagcatgatatg

SEQ ID NO: 110826 - DNA, 25 bp, probe
agaaaggtgtggaagcatgatatgt

SEQ ID NO: 110827 - DNA, 25 bp, probe
tgtactttgtccttcagcaagaaag

SEQ ID NO: 110828 - DNA, 25 bp, probe
gtactaaacagcttccttcagatct

SEQ ID NO: 110829 - DNA, 25 bp, probe
agtactaaacagcttccttcagatc

SEQ ID NO: 110830 - DNA, 25 bp, probe
gagtactaaacagcttccttcagat

SEQ ID NO: 110831 - DNA, 25 bp, probe
agagtactaaacagcttccttcaga

SEQ ID NO: 110832 - DNA, 25 bp, probe
cagagtactaaacagcttccttcag

SEQ ID NO: 110833 - DNA, 25 bp, probe
ggcattttatgtactttgtccttca

SEQ ID NO: 110834 - DNA, 25 bp, probe
attttatgtactttgtccttcagca

SEQ ID NO: 110835 - DNA, 25 bp, probe
cggcattttatgtactttgtccttc

SEQ ID NO: 110836 - DNA, 25 bp, probe
gcaagaaaggtgtggaagcatgata

SEQ ID NO: 110837 - DNA, 25 bp, probe
ttttatgtactttgtccttcagcaa

SEQ ID NO: 110838 - DNA, 25 bp, probe
cattttatgtactttgtccttcagc

SEQ ID NO: 110839 - DNA, 25 bp, probe
gcattttatgtactttgtccttcag

SEQ ID NO: 110840 - DNA, 25 bp, probe
gatgtgatcctgccagagtactaaa

SEQ ID NO: 110841 - DNA, 25 bp, probe
ccagagtactaaacagcttccttca

SEQ ID NO: 110842 - DNA, 25 bp, probe
atgtgatcctgccagagtactaaac

SEQ ID NO: 110843 - DNA, 25 bp, probe
gccagagtactaaacagcttccttc

SEQ ID NO: 110844 - DNA, 25 bp, probe
tggaagcatgatatgtactatagtg

SEQ ID NO: 110845 - DNA, 25 bp, probe
gtggaagcatgatatgtactatagt

SEQ ID NO: 110846 - DNA, 25 bp, probe
gtgatcctgccagagtactaaacag

SEQ ID NO: 110847 - DNA, 25 bp, probe
gtactttgtccttcagcaagaaagg

SEQ ID NO: 110848 - DNA, 25 bp, probe
ggaagcatgatatgtactatagtga

SEQ ID NO: 110849 - DNA, 25 bp, probe
tgtgatcctgccagagtactaaaca

SEQ ID NO: 110850 - DNA, 25 bp, probe
tactttgtccttcagcaagaaaggt

SEQ ID NO: 110851 - DNA, 25 bp, probe
ttcagcaagaaaggtgtggaagcat

SEQ ID NO: 110852 - DNA, 25 bp, probe
tgccagagtactaaacagcttcctt

SEQ ID NO: 110853 - DNA, 25 bp, probe
aaacaccggcattttatgtactttg

SEQ ID NO: 110854 - DNA, 25 bp, probe
caaacaccggcattttatgtacttt

SEQ ID NO: 110855 - DNA, 25 bp, probe
ccggcattttatgtactttgtcctt

SEQ ID NO: 110856 - DNA, 25 bp, probe
agcaagaaaggtgtggaagcatgat

SEQ ID NO: 110857 - DNA, 25 bp, probe
actcaatgtactgtaataatcgcaa

SEQ ID NO: 110858 - DNA, 25 bp, probe
ttatgtcagtagtcaccttgctcac

SEQ ID NO: 110859 - DNA, 25 bp, probe
tactcaatgtactgtaataatcgca

SEQ ID NO: 110860 - DNA, 25 bp, probe
attatacttctgacctttgggcttt

SEQ ID NO: 110861 - DNA, 25 bp, probe
ggaagataaagatggtcacacaaac

SEQ ID NO: 110862 - DNA, 25 bp, probe
agataaagatggtcacacaaacagt

SEQ ID NO: 110863 - DNA, 25 bp, probe
aagataaagatggtcacacaaacag

SEQ ID NO: 110864 - DNA, 25 bp, probe
gaagataaagatggtcacacaaaca

SEQ ID NO: 110865 - DNA, 25 bp, probe
gataaagatggtcacacaaacagtt

SEQ ID NO: 110866 - DNA, 25 bp, probe
atttatgtcagtagtcaccttgctc

SEQ ID NO: 110867 - DNA, 25 bp, probe
ttatacttctgacctttgggctttc

SEQ ID NO: 110868 - DNA, 25 bp, probe
gcatagagacctttaagcaaactac

SEQ ID NO: 110869 - DNA, 25 bp, probe
ctttaagcaaactactacagccaac

SEQ ID NO: 110870 - DNA, 25 bp, probe
cattatacttctgacctttgggctt

SEQ ID NO: 110871 - DNA, 25 bp, probe
tttaagcaaactactacagccaact

SEQ ID NO: 110872 - DNA, 25 bp, probe
agagacctttaagcaaactactaca

SEQ ID NO: 110873 - DNA, 25 bp, probe
aatttatgtcagtagtcaccttgct

SEQ ID NO: 110874 - DNA, 25 bp, probe
atacctctaaagaattgctgctact

SEQ ID NO: 110875 - DNA, 25 bp, probe
gggaagataaagatggtcacacaaa

SEQ ID NO: 110876 - DNA, 25 bp, probe
agacctttaagcaaactactacagc

SEQ ID NO: 110877 - DNA, 25 bp, probe
gagacctttaagcaaactactacag

SEQ ID NO: 110878 - DNA, 25 bp, probe
ttaagcaaactactacagccaactc

SEQ ID NO: 110879 - DNA, 25 bp, probe
tacctctaaagaattgctgctactt

SEQ ID NO: 110880 - DNA, 25 bp, probe
aattaacctctcaaagcacagaatg

SEQ ID NO: 110881 - DNA, 25 bp, probe
cctttaagcaaactactacagccaa

SEQ ID NO: 110882 - DNA, 25 bp, probe
gaattaacctctcaaagcacagaat

SEQ ID NO: 110883 - DNA, 25 bp, probe
taatttatgtcagtagtcaccttgc

SEQ ID NO: 110884 - DNA, 25 bp, probe
tatacttctgacctttgggctttct

SEQ ID NO: 110885 - DNA, 25 bp, probe
gtcacacaaacagtttccataaaga

SEQ ID NO: 110886 - DNA, 25 bp, probe
taaagatggtcacacaaacagtttc

SEQ ID NO: 110887 - DNA, 25 bp, probe
ttctctctagtttacttgtgtgtgc

SEQ ID NO: 110888 - DNA, 25 bp, probe
tctatacctctaaagaattgctgct

SEQ ID NO: 110889 - DNA, 25 bp, probe
ataaagatggtcacacaaacagttt

SEQ ID NO: 110890 - DNA, 25 bp, probe
ctctatacctctaaagaattgctgc

SEQ ID NO: 110891 - DNA, 25 bp, probe
gatgaattaacctctcaaagcacag

SEQ ID NO: 110892 - DNA, 25 bp, probe
tttatgtcagtagtcaccttgctca

SEQ ID NO: 110893 - DNA, 25 bp, probe
tcacagggatcaacgaatagtaaat

SEQ ID NO: 110894 - DNA, 25 bp, probe
atgaattaacctctcaaagcacaga

SEQ ID NO: 110895 - DNA, 25 bp, probe
agatgaattaacctctcaaagcaca

SEQ ID NO: 110896 - DNA, 25 bp, probe
ggtcacacaaacagtttccataaag

SEQ ID NO: 110897 - DNA, 25 bp, probe
ttacttgtgtgtgcatacatctcat

SEQ ID NO: 110898 - DNA, 25 bp, probe
ttcattatacttctgacctttgggc

SEQ ID NO: 110899 - DNA, 25 bp, probe
tcacacaaacagtttccataaagat

SEQ ID NO: 110900 - DNA, 25 bp, probe
tgaattaacctctcaaagcacagaa

SEQ ID NO: 110901 - DNA, 25 bp, probe
ccaagggtttgagtaaatacaaaga

SEQ ID NO: 110902 - DNA, 25 bp, probe
tccaagggtttgagtaaatacaaag

SEQ ID NO: 110903 - DNA, 25 bp, probe
ctccaagggtttgagtaaatacaaa

SEQ ID NO: 110904 - DNA, 25 bp, probe
gggtttgagtaaatacaaagactga

SEQ ID NO: 110905 - DNA, 25 bp, probe
agggtttgagtaaatacaaagactg

SEQ ID NO: 110906 - DNA, 25 bp, probe
aagggtttgagtaaatacaaagact

SEQ ID NO: 110907 - DNA, 25 bp, probe
caagggtttgagtaaatacaaagac

SEQ ID NO: 110908 - DNA, 25 bp, probe
tgagtaaatacaaagactgaagaaa

SEQ ID NO: 110909 - DNA, 25 bp, probe
ttgagtaaatacaaagactgaagaa

SEQ ID NO: 110910 - DNA, 25 bp, probe
ggtttgagtaaatacaaagactgaa

SEQ ID NO: 110911 - DNA, 25 bp, probe
actccaagggtttgagtaaatacaa

SEQ ID NO: 110912 - DNA, 25 bp, probe
aactccaagggtttgagtaaataca

SEQ ID NO: 110913 - DNA, 25 bp, probe
agaaactccaagggtttgagtaaat

SEQ ID NO: 110914 - DNA, 25 bp, probe
aagaaactccaagggtttgagtaaa

SEQ ID NO: 110915 - DNA, 25 bp, probe
aaactccaagggtttgagtaaatac

SEQ ID NO: 110916 - DNA, 25 bp, probe
gaagaaactccaagggtttgagtaa

SEQ ID NO: 110917 - DNA, 25 bp, probe
gaaactccaagggtttgagtaaata

SEQ ID NO: 110918 - DNA, 25 bp, probe
tgaagaaactccaagggtttgagta

SEQ ID NO: 110919 - DNA, 25 bp, probe
atgaagaaactccaagggtttgagt

SEQ ID NO: 110920 - DNA, 25 bp, probe
gagtaaatacaaagactgaagaaat

SEQ ID NO: 110921 - DNA, 25 bp, probe
gtttgagtaaatacaaagactgaag

SEQ ID NO: 110922 - DNA, 25 bp, probe
tttgagtaaatacaaagactgaaga

SEQ ID NO: 110923 - DNA, 25 bp, probe
aaatttcacagcagtttattaatgt

SEQ ID NO: 110924 - DNA, 25 bp, probe
aatttcacagcagtttattaatgta

SEQ ID NO: 110925 - DNA, 25 bp, probe
atttcacagcagtttattaatgtat

SEQ ID NO: 110926 - DNA, 25 bp, probe
aacttataaatatttctccagcaaa

SEQ ID NO: 110927 - DNA, 25 bp, probe
aaacttataaatatttctccagcaa

SEQ ID NO: 110928 - DNA, 25 bp, probe
ctgtcatcttccacgtcatcttcac

SEQ ID NO: 110929 - DNA, 25 bp, probe
cactgtcatcttccacgtcatcttc

SEQ ID NO: 110930 - DNA, 25 bp, probe
gtcatcttccacgtcatcttcacac

SEQ ID NO: 110931 - DNA, 25 bp, probe
actgtcatcttccacgtcatcttca

SEQ ID NO: 110932 - DNA, 25 bp, probe
gacggagatcgagttcatgtacaag

SEQ ID NO: 110933 - DNA, 25 bp, probe
tgtcatcttccacgtcatcttcaca

SEQ ID NO: 110934 - DNA, 25 bp, probe
gagatcgagttcatgtacaagcctg

SEQ ID NO: 110935 - DNA, 25 bp, probe
ctggacggagatcgagttcatgtac

SEQ ID NO: 110936 - DNA, 25 bp, probe
atcttccacgtcatcttcacaccag

SEQ ID NO: 110937 - DNA, 25 bp, probe
tcatcttccacgtcatcttcacacc

SEQ ID NO: 110938 - DNA, 25 bp, probe
gactcccactattgcctctgtgatt

SEQ ID NO: 110939 - DNA, 25 bp, probe
caggcagtttggactacaggagaaa

SEQ ID NO: 110940 - DNA, 25 bp, probe
catcttccacgtcatcttcacacca

SEQ ID NO: 110941 - DNA, 25 bp, probe
actcccactattgcctctgtgattg

SEQ ID NO: 110942 - DNA, 25 bp, probe
gaaagaagtagctgtgttctcccag

SEQ ID NO: 110943 - DNA, 25 bp, probe
actggacggagatcgagttcatgta

SEQ ID NO: 110944 - DNA, 25 bp, probe
ggagatcgagttcatgtacaagcct

SEQ ID NO: 110945 - DNA, 25 bp, probe
ggacggagatcgagttcatgtacaa

SEQ ID NO: 110946 - DNA, 25 bp, probe
gcactgtcatcttccacgtcatctt

SEQ ID NO: 110947 - DNA, 25 bp, probe
aagcactgtcatcttccacgtcatc

SEQ ID NO: 110948 - DNA, 25 bp, probe
cagtttggactacaggagaaaagcc

SEQ ID NO: 110949 - DNA, 25 bp, probe
ggcagtttggactacaggagaaaag

SEQ ID NO: 110950 - DNA, 25 bp, probe
agatcgagttcatgtacaagcctgg

SEQ ID NO: 110951 - DNA, 25 bp, probe
tttagatctgggcaccaataaaggc

SEQ ID NO: 110952 - DNA, 25 bp, probe
tcaggcagtttggactacaggagaa

SEQ ID NO: 110953 - DNA, 25 bp, probe
aggcagtttggactacaggagaaaa

SEQ ID NO: 110954 - DNA, 25 bp, probe
ctttagatctgggcaccaataaagg

SEQ ID NO: 110955 - DNA, 25 bp, probe
cctttagatctgggcaccaataaag

SEQ ID NO: 110956 - DNA, 25 bp, probe
acggagatcgagttcatgtacaagc

SEQ ID NO: 110957 - DNA, 25 bp, probe
ccctttagatctgggcaccaataaa

SEQ ID NO: 110958 - DNA, 25 bp, probe
gcagtttggactacaggagaaaagc

SEQ ID NO: 110959 - DNA, 25 bp, probe
ctcccactattgcctctgtgattgg

SEQ ID NO: 110960 - DNA, 25 bp, probe
agtttggactacaggagaaaagccc

SEQ ID NO: 110961 - DNA, 25 bp, probe
tggacggagatcgagttcatgtaca

SEQ ID NO: 110962 - DNA, 25 bp, probe
cgaaagaagtagctgtgttctccca

SEQ ID NO: 110963 - DNA, 25 bp, probe
gaagcactgtcatcttccacgtcat

SEQ ID NO: 110964 - DNA, 25 bp, probe
tttggactacaggagaaaagcccac

SEQ ID NO: 110965 - DNA, 25 bp, probe
gtttggactacaggagaaaagccca

SEQ ID NO: 110966 - DNA, 25 bp, probe
ttagatctgggcaccaataaaggcg

SEQ ID NO: 110967 - DNA, 25 bp, probe
cgtcactcacaagtttctgtttata

SEQ ID NO: 110968 - DNA, 25 bp, probe
gtaacagactgccacatacacactc

SEQ ID NO: 110969 - DNA, 25 bp, probe
gtcactgtaacagactgccacatac

SEQ ID NO: 110970 - DNA, 25 bp, probe
gtcactcacaagtttctgtttatat

SEQ ID NO: 110971 - DNA, 25 bp, probe
acgtcactcacaagtttctgtttat

SEQ ID NO: 110972 - DNA, 25 bp, probe
taacagactgccacatacacactcg

SEQ ID NO: 110973 - DNA, 25 bp, probe
cacgtcactcacaagtttctgttta

SEQ ID NO: 110974 - DNA, 25 bp, probe
gtctcctcttccaaagaaagtcaga

SEQ ID NO: 110975 - DNA, 25 bp, probe
tcactcacaagtttctgtttatatt

SEQ ID NO: 110976 - DNA, 25 bp, probe
tgtctcctcttccaaagaaagtcag

SEQ ID NO: 110977 - DNA, 25 bp, probe
ctgtctcctcttccaaagaaagtca

SEQ ID NO: 110978 - DNA, 25 bp, probe
catacacactcggtctcacactcac

SEQ ID NO: 110979 - DNA, 25 bp, probe
cacatacacactcggtctcacactc

SEQ ID NO: 110980 - DNA, 25 bp, probe
ctttatgtgtgtgggtgaaactggg

SEQ ID NO: 110981 - DNA, 25 bp, probe
cctttatgtgtgtgggtgaaactgg

SEQ ID NO: 110982 - DNA, 25 bp, probe
tgtaacagactgccacatacacact

SEQ ID NO: 110983 - DNA, 25 bp, probe
ctgtaacagactgccacatacacac

SEQ ID NO: 110984 - DNA, 25 bp, probe
cactgtaacagactgccacatacac

SEQ ID NO: 110985 - DNA, 25 bp, probe
tcactgtaacagactgccacataca

SEQ ID NO: 110986 - DNA, 25 bp, probe
cctgtctcctcttccaaagaaagtc

SEQ ID NO: 110987 - DNA, 25 bp, probe
tctcctcttccaaagaaagtcagag

SEQ ID NO: 110988 - DNA, 25 bp, probe
actgtaacagactgccacatacaca

SEQ ID NO: 110989 - DNA, 25 bp, probe
cactcacaagtttctgtttatattt

SEQ ID NO: 110990 - DNA, 25 bp, probe
tttggttccgttcaatttgggtttt

SEQ ID NO: 110991 - DNA, 25 bp, probe
ttttggttccgttcaatttgggttt

SEQ ID NO: 110992 - DNA, 25 bp, probe
tttatgtgtgtgggtgaaactgggt

SEQ ID NO: 110993 - DNA, 25 bp, probe
actcacaagtttctgtttatatttc

SEQ ID NO: 110994 - DNA, 25 bp, probe
ctagggtttggagtctggactaagc

SEQ ID NO: 110995 - DNA, 25 bp, probe
cccacagagatctatgtttcttata

SEQ ID NO: 110996 - DNA, 25 bp, probe
gttttggttccgttcaatttgggtt

SEQ ID NO: 110997 - DNA, 25 bp, probe
tttaactttacagggtcagttccgc

SEQ ID NO: 110998 - DNA, 25 bp, probe
agtcactgtaacagactgccacata

SEQ ID NO: 110999 - DNA, 25 bp, probe
acaagtttctgtttatatttctagc

SEQ ID NO: 111000 - DNA, 25 bp, probe
ctcacaagtttctgtttatatttct

SEQ ID NO: 111001 - DNA, 25 bp, probe
ccctgtctcctcttccaaagaaagt

SEQ ID NO: 111002 - DNA, 25 bp, probe
accctgtctcctcttccaaagaaag

SEQ ID NO: 111003 - DNA, 25 bp, probe
ccacgtcactcacaagtttctgttt

SEQ ID NO: 111004 - DNA, 25 bp, probe
ttttaactttacagggtcagttccg

SEQ ID NO: 111005 - DNA, 25 bp, probe
catccacgtcactcacaagtttctg

SEQ ID NO: 111006 - DNA, 25 bp, probe
cttccaaagaaagtcagaggccatc

SEQ ID NO: 111007 - DNA, 25 bp, probe
gtgggttttggttccgttcaatttg

SEQ ID NO: 111008 - DNA, 25 bp, probe
tagggtttggagtctggactaagct

SEQ ID NO: 111009 - DNA, 25 bp, probe
aaagtctcctgtcctgccctttatg

SEQ ID NO: 111010 - DNA, 25 bp, probe
caaagtctcctgtcctgccctttat

SEQ ID NO: 111011 - DNA, 25 bp, probe
gcaggagaaagagttcaaatacacg

SEQ ID NO: 111012 - DNA, 25 bp, probe
gatgcaggagaaagagttcaaatac

SEQ ID NO: 111013 - DNA, 25 bp, probe
atgcaggagaaagagttcaaataca

SEQ ID NO: 111014 - DNA, 25 bp, probe
caggagaaagagttcaaatacacgt

SEQ ID NO: 111015 - DNA, 25 bp, probe
cgatgcaggagaaagagttcaaata

SEQ ID NO: 111016 - DNA, 25 bp, probe
tgcaggagaaagagttcaaatacac

SEQ ID NO: 111017 - DNA, 25 bp, probe
gcgatgcaggagaaagagttcaaat

SEQ ID NO: 111018 - DNA, 25 bp, probe
agatcgaggactttctggaggagac

SEQ ID NO: 111019 - DNA, 25 bp, probe
gtcgcccaataaaggcatctttgtc

SEQ ID NO: 111020 - DNA, 25 bp, probe
ctgtcgcccaataaaggcatctttg

SEQ ID NO: 111021 - DNA, 25 bp, probe
caacgacgttttccacaagttctcc

SEQ ID NO: 111022 - DNA, 25 bp, probe
tctgtcgcccaataaaggcatcttt

SEQ ID NO: 111023 - DNA, 25 bp, probe
acaagttctccgcgttcatcaagaa

SEQ ID NO: 111024 - DNA, 25 bp, probe
cagatcgaggactttctggaggaga

SEQ ID NO: 111025 - DNA, 25 bp, probe
tatatagagtctgcctccaatcctg

SEQ ID NO: 111026 - DNA, 25 bp, probe
atatatagagtctgcctccaatcct

SEQ ID NO: 111027 - DNA, 25 bp, probe
tgactgtttattaagcacctactgt

SEQ ID NO: 111028 - DNA, 25 bp, probe
atcccattgactgtttattaagcac

SEQ ID NO: 111029 - DNA, 25 bp, probe
ccattgactgtttattaagcaccta

SEQ ID NO: 111030 - DNA, 25 bp, probe
ttgactgtttattaagcacctactg

SEQ ID NO: 111031 - DNA, 25 bp, probe
aatcccattgactgtttattaagca

SEQ ID NO: 111032 - DNA, 25 bp, probe
cccattgactgtttattaagcacct

SEQ ID NO: 111033 - DNA, 25 bp, probe
tcccattgactgtttattaagcacc

SEQ ID NO: 111034 - DNA, 25 bp, probe
gtaaacaattcctctcacccacaaa

SEQ ID NO: 111035 - DNA, 25 bp, probe
tgtttacaagactaatcccattgac

SEQ ID NO: 111036 - DNA, 25 bp, probe
gtgtttacaagactaatcccattga

SEQ ID NO: 111037 - DNA, 25 bp, probe
caagactaatcccattgactgttta

SEQ ID NO: 111038 - DNA, 25 bp, probe
tttacaagactaatcccattgactg

SEQ ID NO: 111039 - DNA, 25 bp, probe
gtttacaagactaatcccattgact

SEQ ID NO: 111040 - DNA, 25 bp, probe
cattgactgtttattaagcacctac

SEQ ID NO: 111041 - DNA, 25 bp, probe
acaagactaatcccattgactgttt

SEQ ID NO: 111042 - DNA, 25 bp, probe
attgactgtttattaagcacctact

SEQ ID NO: 111043 - DNA, 25 bp, probe
tacaagactaatcccattgactgtt

SEQ ID NO: 111044 - DNA, 25 bp, probe
ttacaagactaatcccattgactgt

SEQ ID NO: 111045 - DNA, 25 bp, probe
tgtgtttacaagactaatcccattg

SEQ ID NO: 111046 - DNA, 25 bp, probe
agactaatcccattgactgtttatt

SEQ ID NO: 111047 - DNA, 25 bp, probe
aagactaatcccattgactgtttat

SEQ ID NO: 111048 - DNA, 25 bp, probe
tatatatagagtctgcctccaatcc

SEQ ID NO: 111049 - DNA, 25 bp, probe
ctgtttattaagcacctactgtgtg

SEQ ID NO: 111050 - DNA, 25 bp, probe
actgtttattaagcacctactgtgt

SEQ ID NO: 111051 - DNA, 25 bp, probe
gactgtttattaagcacctactgtg

SEQ ID NO: 111052 - DNA, 25 bp, probe
atatagagtctgcctccaatcctgc

SEQ ID NO: 111053 - DNA, 25 bp, probe
gagctttgatggatgaataggtgtt

SEQ ID NO: 111054 - DNA, 25 bp, probe
agctttgatggatgaataggtgttc

SEQ ID NO: 111055 - DNA, 25 bp, probe
taatcccattgactgtttattaagc

SEQ ID NO: 111056 - DNA, 25 bp, probe
gagtgtccgtaaacaattcctctca

SEQ ID NO: 111057 - DNA, 25 bp, probe
tttataagcgatagccgtactgagc

SEQ ID NO: 111058 - DNA, 25 bp, probe
cgtaaacaattcctctcacccacaa

SEQ ID NO: 111059 - DNA, 25 bp, probe
catcacctccattttacagacaaag

SEQ ID NO: 111060 - DNA, 25 bp, probe
tcatcacctccattttacagacaaa

SEQ ID NO: 111061 - DNA, 25 bp, probe
ctggagctttgatggatgaataggt

SEQ ID NO: 111062 - DNA, 25 bp, probe
taaacaattcctctcacccacaaaa

SEQ ID NO: 111063 - DNA, 25 bp, probe
ttataagcgatagccgtactgagcc

SEQ ID NO: 111064 - DNA, 25 bp, probe
agtgtccgtaaacaattcctctcac

SEQ ID NO: 111065 - DNA, 25 bp, probe
tttaagtgttttgtgttacctggtc

SEQ ID NO: 111066 - DNA, 25 bp, probe
ctttgatggatgaataggtgttcac

SEQ ID NO: 111067 - DNA, 25 bp, probe
ttaagtgttttgtgttacctggtct

SEQ ID NO: 111068 - DNA, 25 bp, probe
ggagctttgatggatgaataggtgt

SEQ ID NO: 111069 - DNA, 25 bp, probe
agttccagcagctttatgggaatat

SEQ ID NO: 111070 - DNA, 25 bp, probe
gagttccagcagctttatgggaata

SEQ ID NO: 111071 - DNA, 25 bp, probe
tgagttccagcagctttatgggaat

SEQ ID NO: 111072 - DNA, 25 bp, probe
atgagttccagcagctttatgggaa

SEQ ID NO: 111073 - DNA, 25 bp, probe
ataccttgcttcttcaccagttatg

SEQ ID NO: 111074 - DNA, 25 bp, probe
cataccttgcttcttcaccagttat

SEQ ID NO: 111075 - DNA, 25 bp, probe
tgtgattagtatgctatgctatgga

SEQ ID NO: 111076 - DNA, 25 bp, probe
ccaccttctatctaagacaatcacg

SEQ ID NO: 111077 - DNA, 25 bp, probe
gacagatgattcacagagagagact

SEQ ID NO: 111078 - DNA, 25 bp, probe
cttctatctaagacaatcacgctgg

SEQ ID NO: 111079 - DNA, 25 bp, probe
ccttctatctaagacaatcacgctg

SEQ ID NO: 111080 - DNA, 25 bp, probe
ccttgcttcttcaccagttatgata

SEQ ID NO: 111081 - DNA, 25 bp, probe
atgtgattagtatgctatgctatgg

SEQ ID NO: 111082 - DNA, 25 bp, probe
gtgattagtatgctatgctatggaa

SEQ ID NO: 111083 - DNA, 25 bp, probe
accttctatctaagacaatcacgct

SEQ ID NO: 111084 - DNA, 25 bp, probe
caccttctatctaagacaatcacgc

SEQ ID NO: 111085 - DNA, 25 bp, probe
cttgcttcttcaccagttatgataa

SEQ ID NO: 111086 - DNA, 25 bp, probe
acataccttgcttcttcaccagtta

SEQ ID NO: 111087 - DNA, 25 bp, probe
aactcactagatgccaatgacatac

SEQ ID NO: 111088 - DNA, 25 bp, probe
caactcactagatgccaatgacata

SEQ ID NO: 111089 - DNA, 25 bp, probe
tgacagatgattcacagagagagac

SEQ ID NO: 111090 - DNA, 25 bp, probe
taccttgcttcttcaccagttatga

SEQ ID NO: 111091 - DNA, 25 bp, probe
cactagatgccaatgacataccttg

SEQ ID NO: 111092 - DNA, 25 bp, probe
tcactagatgccaatgacatacctt

SEQ ID NO: 111093 - DNA, 25 bp, probe
tgtgattctatgtgattagtatgct

SEQ ID NO: 111094 - DNA, 25 bp, probe
ctgacagatgattcacagagagaga

SEQ ID NO: 111095 - DNA, 25 bp, probe
tgattagtatgctatgctatggaat

SEQ ID NO: 111096 - DNA, 25 bp, probe
ttatgataaccaagaatgtctccat

SEQ ID NO: 111097 - DNA, 25 bp, probe
accttgcttcttcaccagttatgat

SEQ ID NO: 111098 - DNA, 25 bp, probe
caatgacataccttgcttcttcacc

SEQ ID NO: 111099 - DNA, 25 bp, probe
ccaatgacataccttgcttcttcac

SEQ ID NO: 111100 - DNA, 25 bp, probe
acagatgattcacagagagagactg

SEQ ID NO: 111101 - DNA, 25 bp, probe
actgacagatgattcacagagagag

SEQ ID NO: 111102 - DNA, 25 bp, probe
ttctatgtgattagtatgctatgct

SEQ ID NO: 111103 - DNA, 25 bp, probe
ctcactagatgccaatgacatacct

SEQ ID NO: 111104 - DNA, 25 bp, probe
tagatgccaatgacataccttgctt

SEQ ID NO: 111105 - DNA, 25 bp, probe
tcaactcactagatgccaatgacat

SEQ ID NO: 111106 - DNA, 25 bp, probe
cactgacagatgattcacagagaga

SEQ ID NO: 111107 - DNA, 25 bp, probe
actcactagatgccaatgacatacc

SEQ ID NO: 111108 - DNA, 25 bp, probe
atttctcgttctttactgggtctaa

SEQ ID NO: 111109 - DNA, 25 bp, probe
catttctcgttctttactgggtcta

SEQ ID NO: 111110 - DNA, 25 bp, probe
aatgacataccttgcttcttcacca

SEQ ID NO: 111111 - DNA, 25 bp, probe
agcccataatctctttgaaggttta

SEQ ID NO: 111112 - DNA, 25 bp, probe
tagcccataatctctttgaaggttt

SEQ ID NO: 111113 - DNA, 25 bp, probe
ttagcccataatctctttgaaggtt

SEQ ID NO: 111114 - DNA, 25 bp, probe
tttagcccataatctctttgaaggt

SEQ ID NO: 111115 - DNA, 25 bp, probe
gacataccttgcttcttcaccagtt

SEQ ID NO: 111116 - DNA, 25 bp, probe
aagtcattcagttatcactacagat

SEQ ID NO: 111117 - DNA, 25 bp, probe
tatcttctacctgaaccttcttcct

SEQ ID NO: 111118 - DNA, 25 bp, probe
ctatcttctacctgaaccttcttcc

SEQ ID NO: 111119 - DNA, 25 bp, probe
cctatcttctacctgaaccttcttc

SEQ ID NO: 111120 - DNA, 25 bp, probe
atcttctacctgaaccttcttcctc

SEQ ID NO: 111121 - DNA, 25 bp, probe
ttctacctgaaccttcttcctcttc

SEQ ID NO: 111122 - DNA, 25 bp, probe
cttctacctgaaccttcttcctctt

SEQ ID NO: 111123 - DNA, 25 bp, probe
tcttctacctgaaccttcttcctct

SEQ ID NO: 111124 - DNA, 25 bp, probe
taaccacccaatcattctaaagcag

SEQ ID NO: 111125 - DNA, 25 bp, probe
ctaaccacccaatcattctaaagca

SEQ ID NO: 111126 - DNA, 25 bp, probe
ccctaaccacccaatcattctaaag

SEQ ID NO: 111127 - DNA, 25 bp, probe
tctacctgaaccttcttcctcttcc

SEQ ID NO: 111128 - DNA, 25 bp, probe
tccctaaccacccaatcattctaaa

SEQ ID NO: 111129 - DNA, 25 bp, probe
ttccctaaccacccaatcattctaa

SEQ ID NO: 111130 - DNA, 25 bp, probe
ccctatcttctacctgaaccttctt

SEQ ID NO: 111131 - DNA, 25 bp, probe
ttccctatcttctacctgaaccttc

SEQ ID NO: 111132 - DNA, 25 bp, probe
cttccctatcttctacctgaacctt

SEQ ID NO: 111133 - DNA, 25 bp, probe
aaagtgctaggattacaagtgtgag

SEQ ID NO: 111134 - DNA, 25 bp, probe
cctaaccacccaatcattctaaagc

SEQ ID NO: 111135 - DNA, 25 bp, probe
caaagtgctaggattacaagtgtga

SEQ ID NO: 111136 - DNA, 25 bp, probe
cttccctaaccacccaatcattcta

SEQ ID NO: 111137 - DNA, 25 bp, probe
tccctatcttctacctgaaccttct

SEQ ID NO: 111138 - DNA, 25 bp, probe
ttcctcacacacttctagattcttc

SEQ ID NO: 111139 - DNA, 25 bp, probe
gttcctcacacacttctagattctt

SEQ ID NO: 111140 - DNA, 25 bp, probe
gataaagatgacttcgtagcagcac

SEQ ID NO: 111141 - DNA, 25 bp, probe
ccaaagtgctaggattacaagtgtg

SEQ ID NO: 111142 - DNA, 25 bp, probe
aatcattctaaagcagcctccctac

SEQ ID NO: 111143 - DNA, 25 bp, probe
caatcattctaaagcagcctcccta

SEQ ID NO: 111144 - DNA, 25 bp, probe
tcctcacacacttctagattcttcc

SEQ ID NO: 111145 - DNA, 25 bp, probe
agttcctcacacacttctagattct

SEQ ID NO: 111146 - DNA, 25 bp, probe
cagttcctcacacacttctagattc

SEQ ID NO: 111147 - DNA, 25 bp, probe
ttgtccagttcctcacacacttcta

SEQ ID NO: 111148 - DNA, 25 bp, probe
ctccatcaccatctctctccacttc

SEQ ID NO: 111149 - DNA, 25 bp, probe
ccttccctatcttctacctgaacct

SEQ ID NO: 111150 - DNA, 25 bp, probe
tttaaacggagtcttgctatatcgc

SEQ ID NO: 111151 - DNA, 25 bp, probe
ttaaacggagtcttgctatatcgcc

SEQ ID NO: 111152 - DNA, 25 bp, probe
ggataaagatgacttcgtagcagca

SEQ ID NO: 111153 - DNA, 25 bp, probe
cccaaagtgctaggattacaagtgt

SEQ ID NO: 111154 - DNA, 25 bp, probe
ccagttcctcacacacttctagatt

SEQ ID NO: 111155 - DNA, 25 bp, probe
ataaagatgacttcgtagcagcacc

SEQ ID NO: 111156 - DNA, 25 bp, probe
tgtccagttcctcacacacttctag

SEQ ID NO: 111157 - DNA, 25 bp, probe
tctccatcaccatctctctccactt

SEQ ID NO: 111158 - DNA, 25 bp, probe
aagtgctaggattacaagtgtgagc

SEQ ID NO: 111159 - DNA, 25 bp, probe
atcattctaaagcagcctccctaca

SEQ ID NO: 111160 - DNA, 25 bp, probe
ctcccaaagtgctaggattacaagt

SEQ ID NO: 111161 - DNA, 25 bp, probe
actattcacacaggaggtattcttg

SEQ ID NO: 111162 - DNA, 25 bp, probe
gactattcacacaggaggtattctt

SEQ ID NO: 111163 - DNA, 25 bp, probe
ctattcacacaggaggtattcttgg

SEQ ID NO: 111164 - DNA, 25 bp, probe
tattcacacaggaggtattcttgga

SEQ ID NO: 111165 - DNA, 25 bp, probe
aattactccagactctcctatccag

SEQ ID NO: 111166 - DNA, 25 bp, probe
ggactattcacacaggaggtattct

SEQ ID NO: 111167 - DNA, 25 bp, probe
aggactattcacacaggaggtattc

SEQ ID NO: 111168 - DNA, 25 bp, probe
gaggactattcacacaggaggtatt

SEQ ID NO: 111169 - DNA, 25 bp, probe
attcacacaggaggtattcttggaa

SEQ ID NO: 111170 - DNA, 25 bp, probe
agaggactattcacacaggaggtat

SEQ ID NO: 111171 - DNA, 25 bp, probe
taattactccagactctcctatcca

SEQ ID NO: 111172 - DNA, 25 bp, probe
ttctgactagacttgtgatatgcgt

SEQ ID NO: 111173 - DNA, 25 bp, probe
ccttataattactccagactctcct

SEQ ID NO: 111174 - DNA, 25 bp, probe
tccttataattactccagactctcc

SEQ ID NO: 111175 - DNA, 25 bp, probe
gagaggactattcacacaggaggta

SEQ ID NO: 111176 - DNA, 25 bp, probe
ataattactccagactctcctatcc

SEQ ID NO: 111177 - DNA, 25 bp, probe
actagacttgtgatatgcgtgtgtt

SEQ ID NO: 111178 - DNA, 25 bp, probe
attactccagactctcctatccagc

SEQ ID NO: 111179 - DNA, 25 bp, probe
ctgactagacttgtgatatgcgtgt

SEQ ID NO: 111180 - DNA, 25 bp, probe
tctgactagacttgtgatatgcgtg

SEQ ID NO: 111181 - DNA, 25 bp, probe
agttcaggtctaatcaggtttcttt

SEQ ID NO: 111182 - DNA, 25 bp, probe
cttgtgatatgcgtgtgtttatgta

SEQ ID NO: 111183 - DNA, 25 bp, probe
tagacttgtgatatgcgtgtgttta

SEQ ID NO: 111184 - DNA, 25 bp, probe
caggaggtattcttggaatgtgaag

SEQ ID NO: 111185 - DNA, 25 bp, probe
gactagacttgtgatatgcgtgtgt

SEQ ID NO: 111186 - DNA, 25 bp, probe
tgactagacttgtgatatgcgtgtg

SEQ ID NO: 111187 - DNA, 25 bp, probe
attgctgtttacctctttgctgata

SEQ ID NO: 111188 - DNA, 25 bp, probe
gacttgtgatatgcgtgtgtttatg

SEQ ID NO: 111189 - DNA, 25 bp, probe
agacttgtgatatgcgtgtgtttat

SEQ ID NO: 111190 - DNA, 25 bp, probe
ttgctgtttacctctttgctgataa

SEQ ID NO: 111191 - DNA, 25 bp, probe
tagttcaggtctaatcaggtttctt

SEQ ID NO: 111192 - DNA, 25 bp, probe
tttgttatgttctgttattgaccca

SEQ ID NO: 111193 - DNA, 25 bp, probe
acaggaggtattcttggaatgtgaa

SEQ ID NO: 111194 - DNA, 25 bp, probe
ttcacacaggaggtattcttggaat

SEQ ID NO: 111195 - DNA, 25 bp, probe
gctgtttacctctttgctgataaat

SEQ ID NO: 111196 - DNA, 25 bp, probe
acttgtgatatgcgtgtgtttatgt

SEQ ID NO: 111197 - DNA, 25 bp, probe
tttagaactgaagcattgagaactt

SEQ ID NO: 111198 - DNA, 25 bp, probe
gttcaggtctaatcaggtttcttta

SEQ ID NO: 111199 - DNA, 25 bp, probe
ttatgttctgttattgacccaaagg

SEQ ID NO: 111200 - DNA, 25 bp, probe
ttgtgatatgcgtgtgtttatgtac

SEQ ID NO: 111201 - DNA, 25 bp, probe
tgctgtttacctctttgctgataaa

SEQ ID NO: 111202 - DNA, 25 bp, probe
tttctgactagacttgtgatatgcg

SEQ ID NO: 111203 - DNA, 25 bp, probe
ctttctgactagacttgtgatatgc

SEQ ID NO: 111204 - DNA, 25 bp, probe
tgttatgttctgttattgacccaaa

SEQ ID NO: 111205 - DNA, 25 bp, probe
ttttgtacctggtgaccccttttca

SEQ ID NO: 111206 - DNA, 25 bp, probe
tgattcggctgtctcagactctttt

SEQ ID NO: 111207 - DNA, 25 bp, probe
ttgaatgtgattttaaagagtgaaa

SEQ ID NO: 111208 - DNA, 25 bp, probe
tttgaatgtgattttaaagagtgaa

SEQ ID NO: 111209 - DNA, 25 bp, probe
ttttgaatgtgattttaaagagtga

SEQ ID NO: 111210 - DNA, 25 bp, probe
ctgattcggctgtctcagactcttt

SEQ ID NO: 111211 - DNA, 25 bp, probe
tttgtacctggtgaccccttttcag

SEQ ID NO: 111212 - DNA, 25 bp, probe
tgaatgtgattttaaagagtgaaaa

SEQ ID NO: 111213 - DNA, 25 bp, probe
gggagactgagatggaaataaagag

SEQ ID NO: 111214 - DNA, 25 bp, probe
ggagactgagatggaaataaagaga

SEQ ID NO: 111215 - DNA, 25 bp, probe
actgagatggaaataaagagactgt

SEQ ID NO: 111216 - DNA, 25 bp, probe
tgagatggaaataaagagactgtcg

SEQ ID NO: 111217 - DNA, 25 bp, probe
gactgagatggaaataaagagactg

SEQ ID NO: 111218 - DNA, 25 bp, probe
agactgagatggaaataaagagact

SEQ ID NO: 111219 - DNA, 25 bp, probe
gagactgagatggaaataaagagac

SEQ ID NO: 111220 - DNA, 25 bp, probe
ctgagatggaaataaagagactgtc

SEQ ID NO: 111221 - DNA, 25 bp, probe
ggtctgagaagatggaaactgttag

SEQ ID NO: 111222 - DNA, 25 bp, probe
ttgagaggaacaaatgtggtatctg

SEQ ID NO: 111223 - DNA, 25 bp, probe
gagatggaaataaagagactgtcgc

SEQ ID NO: 111224 - DNA, 25 bp, probe
gtctgagaagatggaaactgttagc

SEQ ID NO: 111225 - DNA, 25 bp, probe
agatggaaataaagagactgtcgca

SEQ ID NO: 111226 - DNA, 25 bp, probe
cggtctgagaagatggaaactgtta

SEQ ID NO: 111227 - DNA, 25 bp, probe
tgagaggaacaaatgtggtatctgg

SEQ ID NO: 111228 - DNA, 25 bp, probe
gatggaaataaagagactgtcgcag

SEQ ID NO: 111229 - DNA, 25 bp, probe
tctgagaagatggaaactgttagcg

SEQ ID NO: 111230 - DNA, 25 bp, probe
gagaggaacaaatgtggtatctggg

SEQ ID NO: 111231 - DNA, 25 bp, probe
tttgagaggaacaaatgtggtatct

SEQ ID NO: 111232 - DNA, 25 bp, probe
ctttgagaggaacaaatgtggtatc

SEQ ID NO: 111233 - DNA, 25 bp, probe
cctgcccgcttttgtaatttattta

SEQ ID NO: 111234 - DNA, 25 bp, probe
ctgagaagatggaaactgttagcgg

SEQ ID NO: 111235 - DNA, 25 bp, probe
cctttgagaggaacaaatgtggtat

SEQ ID NO: 111236 - DNA, 25 bp, probe
aagtacagaggttcaaggcaacact

SEQ ID NO: 111237 - DNA, 25 bp, probe
ggggagactgagatggaaataaaga

SEQ ID NO: 111238 - DNA, 25 bp, probe
aggggagactgagatggaaataaag

SEQ ID NO: 111239 - DNA, 25 bp, probe
ctgcccgcttttgtaatttatttat

SEQ ID NO: 111240 - DNA, 25 bp, probe
aaagtacagaggttcaaggcaacac

SEQ ID NO: 111241 - DNA, 25 bp, probe
caaagtacagaggttcaaggcaaca

SEQ ID NO: 111242 - DNA, 25 bp, probe
tgcccgcttttgtaatttatttatt

SEQ ID NO: 111243 - DNA, 25 bp, probe
gtccagcaaagtacagaggttcaag

SEQ ID NO: 111244 - DNA, 25 bp, probe
atggaaataaagagactgtcgcagc

SEQ ID NO: 111245 - DNA, 25 bp, probe
gatgtccagcaaagtacagaggttc

SEQ ID NO: 111246 - DNA, 25 bp, probe
caaaattgagattccccttttccac

SEQ ID NO: 111247 - DNA, 25 bp, probe
gtcaaaattgagattccccttttcc

SEQ ID NO: 111248 - DNA, 25 bp, probe
gaagatggaaactgttagcggctac

SEQ ID NO: 111249 - DNA, 25 bp, probe
agaagatggaaactgttagcggcta

SEQ ID NO: 111250 - DNA, 25 bp, probe
ttataaactctctgctgctgagctt

SEQ ID NO: 111251 - DNA, 25 bp, probe
gcccgcttttgtaatttatttattt

SEQ ID NO: 111252 - DNA, 25 bp, probe
ccctgcccgcttttgtaatttattt

SEQ ID NO: 111253 - DNA, 25 bp, probe
caggggagactgagatggaaataaa

SEQ ID NO: 111254 - DNA, 25 bp, probe
tcaaaattgagattccccttttcca

SEQ ID NO: 111255 - DNA, 25 bp, probe
ttatttataaactctctgctgctga

SEQ ID NO: 111256 - DNA, 25 bp, probe
cgtcaaaattgagattccccttttc

SEQ ID NO: 111257 - DNA, 25 bp, probe
ctcacttctaatcctgtactcactg

SEQ ID NO: 111258 - DNA, 25 bp, probe
cttctaatcctgtactcactgtgtc

SEQ ID NO: 111259 - DNA, 25 bp, probe
tctaatcctgtactcactgtgtctt

SEQ ID NO: 111260 - DNA, 25 bp, probe
ttctaatcctgtactcactgtgtct

SEQ ID NO: 111261 - DNA, 25 bp, probe
tcacttctaatcctgtactcactgt

SEQ ID NO: 111262 - DNA, 25 bp, probe
acttctaatcctgtactcactgtgt

SEQ ID NO: 111263 - DNA, 25 bp, probe
ttaatctggctgagaatctaagttc

SEQ ID NO: 111264 - DNA, 25 bp, probe
ttactcctctgctctaacattgttg

SEQ ID NO: 111265 - DNA, 25 bp, probe
gctcacttctaatcctgtactcact

SEQ ID NO: 111266 - DNA, 25 bp, probe
ttgctattaatctggctgagaatct

SEQ ID NO: 111267 - DNA, 25 bp, probe
tgctattaatctggctgagaatcta

SEQ ID NO: 111268 - DNA, 25 bp, probe
cacttctaatcctgtactcactgtg

SEQ ID NO: 111269 - DNA, 25 bp, probe
tgtatcctcatgctcatcatctcag

SEQ ID NO: 111270 - DNA, 25 bp, probe
ctgtatcctcatgctcatcatctca

SEQ ID NO: 111271 - DNA, 25 bp, probe
agttactcctctgctctaacattgt

SEQ ID NO: 111272 - DNA, 25 bp, probe
aagcctaacagaacaggtagaactt

SEQ ID NO: 111273 - DNA, 25 bp, probe
cagtagaaatgcctttgaatggttt

SEQ ID NO: 111274 - DNA, 25 bp, probe
gttactcctctgctctaacattgtt

SEQ ID NO: 111275 - DNA, 25 bp, probe
agctcacttctaatcctgtactcac

SEQ ID NO: 111276 - DNA, 25 bp, probe
taatcttatcaacattgtgggaggt

SEQ ID NO: 111277 - DNA, 25 bp, probe
gaagcctaacagaacaggtagaact

SEQ ID NO: 111278 - DNA, 25 bp, probe
ctgaagcctaacagaacaggtagaa

SEQ ID NO: 111279 - DNA, 25 bp, probe
gagttactcctctgctctaacattg

SEQ ID NO: 111280 - DNA, 25 bp, probe
gctattaatctggctgagaatctaa

SEQ ID NO: 111281 - DNA, 25 bp, probe
tataacctgagttactcctctgctc

SEQ ID NO: 111282 - DNA, 25 bp, probe
tgagttactcctctgctctaacatt

SEQ ID NO: 111283 - DNA, 25 bp, probe
acagtataacctgagttactcctct

SEQ ID NO: 111284 - DNA, 25 bp, probe
aatcttatcaacattgtgggaggtc

SEQ ID NO: 111285 - DNA, 25 bp, probe
cagtataacctgagttactcctctg

SEQ ID NO: 111286 - DNA, 25 bp, probe
tctaacattgttgcagaagaactag

SEQ ID NO: 111287 - DNA, 25 bp, probe
ctctaacattgttgcagaagaacta

SEQ ID NO: 111288 - DNA, 25 bp, probe
cctgtatcctcatgctcatcatctc

SEQ ID NO: 111289 - DNA, 25 bp, probe
ttgtatttccacctagccttgtaaa

SEQ ID NO: 111290 - DNA, 25 bp, probe
tttgtatttccacctagccttgtaa

SEQ ID NO: 111291 - DNA, 25 bp, probe
gtataacctgagttactcctctgct

SEQ ID NO: 111292 - DNA, 25 bp, probe
ggcaagtatttgatggtttccttaa

SEQ ID NO: 111293 - DNA, 25 bp, probe
ctttgtatttccacctagccttgta

SEQ ID NO: 111294 - DNA, 25 bp, probe
agcctaacagaacaggtagaacttg

SEQ ID NO: 111295 - DNA, 25 bp, probe
tgaagcctaacagaacaggtagaac

SEQ ID NO: 111296 - DNA, 25 bp, probe
ctgagttactcctctgctctaacat

SEQ ID NO: 111297 - DNA, 25 bp, probe
ctgagaatctaagttctgtgcctta

SEQ ID NO: 111298 - DNA, 25 bp, probe
aatctggctgagaatctaagttctg

SEQ ID NO: 111299 - DNA, 25 bp, probe
tctcacatcccaccttcctataaac

SEQ ID NO: 111300 - DNA, 25 bp, probe
gtctcacatcccaccttcctataaa

SEQ ID NO: 111301 - DNA, 25 bp, probe
aacacaaccatctacacacatctac

SEQ ID NO: 111302 - DNA, 25 bp, probe
cacaaccatctacacacatctacac

SEQ ID NO: 111303 - DNA, 25 bp, probe
actactacaagcagaagaagttcaa

SEQ ID NO: 111304 - DNA, 25 bp, probe
cactactacaagcagaagaagttca

SEQ ID NO: 111305 - DNA, 25 bp, probe
acacaaccatctacacacatctaca

SEQ ID NO: 111306 - DNA, 25 bp, probe
taagaggcactactacaagcagaag

SEQ ID NO: 111307 - DNA, 25 bp, probe
ctaagaggcactactacaagcagaa

SEQ ID NO: 111308 - DNA, 25 bp, probe
gcactactacaagcagaagaagttc

SEQ ID NO: 111309 - DNA, 25 bp, probe
acaaccatctacacacatctacacc

SEQ ID NO: 111310 - DNA, 25 bp, probe
aaacacaaccatctacacacatcta

SEQ ID NO: 111311 - DNA, 25 bp, probe
gaggcactactacaagcagaagaag

SEQ ID NO: 111312 - DNA, 25 bp, probe
tacaataaagggaatgaggacaaac

SEQ ID NO: 111313 - DNA, 25 bp, probe
tacaagcagaagaagttcaaatacg

SEQ ID NO: 111314 - DNA, 25 bp, probe
ggcactactacaagcagaagaagtt

SEQ ID NO: 111315 - DNA, 25 bp, probe
agaggcactactacaagcagaagaa

SEQ ID NO: 111316 - DNA, 25 bp, probe
aagaggcactactacaagcagaaga

SEQ ID NO: 111317 - DNA, 25 bp, probe
caaacacaaccatctacacacatct

SEQ ID NO: 111318 - DNA, 25 bp, probe
gagtacaataaagggaatgaggaca

SEQ ID NO: 111319 - DNA, 25 bp, probe
agtacaataaagggaatgaggacaa

SEQ ID NO: 111320 - DNA, 25 bp, probe
ggagtacaataaagggaatgaggac

SEQ ID NO: 111321 - DNA, 25 bp, probe
aagaaagttctattagacagccctg

SEQ ID NO: 111322 - DNA, 25 bp, probe
aaagaaagttctattagacagccct

SEQ ID NO: 111323 - DNA, 25 bp, probe
caaagaaagttctattagacagccc

SEQ ID NO: 111324 - DNA, 25 bp, probe
ctactacaagcagaagaagttcaaa

SEQ ID NO: 111325 - DNA, 25 bp, probe
tggagtacaataaagggaatgagga

SEQ ID NO: 111326 - DNA, 25 bp, probe
gtggagtacaataaagggaatgagg

SEQ ID NO: 111327 - DNA, 25 bp, probe
ggtggagtacaataaagggaatgag

SEQ ID NO: 111328 - DNA, 25 bp, probe
gtacaataaagggaatgaggacaaa

SEQ ID NO: 111329 - DNA, 25 bp, probe
ctacaagcagaagaagttcaaatac

SEQ ID NO: 111330 - DNA, 25 bp, probe
tcaaagaaagttctattagacagcc

SEQ ID NO: 111331 - DNA, 25 bp, probe
ctcagtagatacgtgtggttagtgg

SEQ ID NO: 111332 - DNA, 25 bp, probe
ccatgaatccttactcagctacctc

SEQ ID NO: 111333 - DNA, 25 bp, probe
actacaagcagaagaagttcaaata

SEQ ID NO: 111334 - DNA, 25 bp, probe
tactacaagcagaagaagttcaaat

SEQ ID NO: 111335 - DNA, 25 bp, probe
gaagaagttcaaatacgctgaggac

SEQ ID NO: 111336 - DNA, 25 bp, probe
agaagaagttcaaatacgctgagga

SEQ ID NO: 111337 - DNA, 25 bp, probe
ctgctcagtagatacgtgtggttag

SEQ ID NO: 111338 - DNA, 25 bp, probe
aggcactactacaagcagaagaagt

SEQ ID NO: 111339 - DNA, 25 bp, probe
catgaatccttactcagctacctcg

SEQ ID NO: 111340 - DNA, 25 bp, probe
tctgggacctaagtttaagaagtgc

SEQ ID NO: 111341 - DNA, 25 bp, probe
cacatttcaactgctcagtagatac

SEQ ID NO: 111342 - DNA, 25 bp, probe
acaagcagaagaagttcaaatacgc

SEQ ID NO: 111343 - DNA, 25 bp, probe
gggtggagtacaataaagggaatga

SEQ ID NO: 111344 - DNA, 25 bp, probe
ccacatttcaactgctcagtagata

SEQ ID NO: 111345 - DNA, 25 bp, probe
gattctggagaacttccttcacaag

SEQ ID NO: 111346 - DNA, 25 bp, probe
tgattctggagaacttccttcacaa

SEQ ID NO: 111347 - DNA, 25 bp, probe
ctgattctggagaacttccttcaca

SEQ ID NO: 111348 - DNA, 25 bp, probe
cctgattctggagaacttccttcac

SEQ ID NO: 111349 - DNA, 25 bp, probe
ttatagctgcttcagtgagaattcc

SEQ ID NO: 111350 - DNA, 25 bp, probe
attctggagaacttccttcacaagt

SEQ ID NO: 111351 - DNA, 25 bp, probe
ttctggagaacttccttcacaagtg

SEQ ID NO: 111352 - DNA, 25 bp, probe
tttatagctgcttcagtgagaattc

SEQ ID NO: 111353 - DNA, 25 bp, probe
tatagctgcttcagtgagaattccc

SEQ ID NO: 111354 - DNA, 25 bp, probe
tcttttatagctgcttcagtgagaa

SEQ ID NO: 111355 - DNA, 25 bp, probe
ttcttttatagctgcttcagtgaga

SEQ ID NO: 111356 - DNA, 25 bp, probe
tttcttttatagctgcttcagtgag

SEQ ID NO: 111357 - DNA, 25 bp, probe
ctttcttttatagctgcttcagtga

SEQ ID NO: 111358 - DNA, 25 bp, probe
cttttatagctgcttcagtgagaat

SEQ ID NO: 111359 - DNA, 25 bp, probe
ctgttcagggatattctggaggagc

SEQ ID NO: 111360 - DNA, 25 bp, probe
ttttatagctgcttcagtgagaatt

SEQ ID NO: 111361 - DNA, 25 bp, probe
tctggagaacttccttcacaagtgg

SEQ ID NO: 111362 - DNA, 25 bp, probe
cctgttcagggatattctggaggag

SEQ ID NO: 111363 - DNA, 25 bp, probe
gctttcttttatagctgcttcagtg

SEQ ID NO: 111364 - DNA, 25 bp, probe
cccaacaaccatctacagaacagct

SEQ ID NO: 111365 - DNA, 25 bp, probe
atagctgcttcagtgagaattccct

SEQ ID NO: 111366 - DNA, 25 bp, probe
cgctttcttttatagctgcttcagt

SEQ ID NO: 111367 - DNA, 25 bp, probe
ctccgctttcttttatagctgcttc

SEQ ID NO: 111368 - DNA, 25 bp, probe
agctcctgttcagggatattctgga

SEQ ID NO: 111369 - DNA, 25 bp, probe
tagctgcttcagtgagaattccctc

SEQ ID NO: 111370 - DNA, 25 bp, probe
ccgctttcttttatagctgcttcag

SEQ ID NO: 111371 - DNA, 25 bp, probe
tccgctttcttttatagctgcttca

SEQ ID NO: 111372 - DNA, 25 bp, probe
cctccgctttcttttatagctgctt

SEQ ID NO: 111373 - DNA, 25 bp, probe
gagaacttccttcacaagtgggacc

SEQ ID NO: 111374 - DNA, 25 bp, probe
ggagaacttccttcacaagtgggac

SEQ ID NO: 111375 - DNA, 25 bp, probe
ctggagaacttccttcacaagtggg

SEQ ID NO: 111376 - DNA, 25 bp, probe
ctccacagggacctttcagacaaaa

SEQ ID NO: 111377 - DNA, 25 bp, probe
tcctgttcagggatattctggagga

SEQ ID NO: 111378 - DNA, 25 bp, probe
ctcctgttcagggatattctggagg

SEQ ID NO: 111379 - DNA, 25 bp, probe
gctcctgttcagggatattctggag

SEQ ID NO: 111380 - DNA, 25 bp, probe
gagctcctgttcagggatattctgg

SEQ ID NO: 111381 - DNA, 25 bp, probe
ccctccgctttcttttatagctgct

SEQ ID NO: 111382 - DNA, 25 bp, probe
ccagatcaacagcaacctcttcatg

SEQ ID NO: 111383 - DNA, 25 bp, probe
caaggagtacaatgcccagatcaac

SEQ ID NO: 111384 - DNA, 25 bp, probe
agatcaacagcaacctcttcatgag

SEQ ID NO: 111385 - DNA, 25 bp, probe
aaggagtacaatgcccagatcaaca

SEQ ID NO: 111386 - DNA, 25 bp, probe
cagatcaacagcaacctcttcatga

SEQ ID NO: 111387 - DNA, 25 bp, probe
ttgaacaaggacggttcttacacag

SEQ ID NO: 111388 - DNA, 25 bp, probe
cttgaacaaggacggttcttacaca

SEQ ID NO: 111389 - DNA, 25 bp, probe
aggagtacaatgcccagatcaacag

SEQ ID NO: 111390 - DNA, 25 bp, probe
caacctcttcatgagcttgaacaag

SEQ ID NO: 111391 - DNA, 25 bp, probe
cccagatcaacagcaacctcttcat

SEQ ID NO: 111392 - DNA, 25 bp, probe
gagcttgaacaaggacggttcttac

SEQ ID NO: 111393 - DNA, 25 bp, probe
gcttgaacaaggacggttcttacac

SEQ ID NO: 111394 - DNA, 25 bp, probe
gatcaacagcaacctcttcatgagc

SEQ ID NO: 111395 - DNA, 25 bp, probe
aacctcttcatgagcttgaacaagg

SEQ ID NO: 111396 - DNA, 25 bp, probe
tgagcttgaacaaggacggttctta

SEQ ID NO: 111397 - DNA, 25 bp, probe
cctcttcatgagcttgaacaaggac

SEQ ID NO: 111398 - DNA, 25 bp, probe
agcttgaacaaggacggttcttaca

SEQ ID NO: 111399 - DNA, 25 bp, probe
tgaacaaggacggttcttacacagg

SEQ ID NO: 111400 - DNA, 25 bp, probe
gaaaatgactctggggaggtgaact

SEQ ID NO: 111401 - DNA, 25 bp, probe
ctcttcatgagcttgaacaaggacg

SEQ ID NO: 111402 - DNA, 25 bp, probe
acctcttcatgagcttgaacaagga

SEQ ID NO: 111403 - DNA, 25 bp, probe
atgagcttgaacaaggacggttctt

SEQ ID NO: 111404 - DNA, 25 bp, probe
gcaacctcttcatgagcttgaacaa

SEQ ID NO: 111405 - DNA, 25 bp, probe
gtacaatgcccagatcaacagcaac

SEQ ID NO: 111406 - DNA, 25 bp, probe
aaaatgactctggggaggtgaactg

SEQ ID NO: 111407 - DNA, 25 bp, probe
agtacaatgcccagatcaacagcaa

SEQ ID NO: 111408 - DNA, 25 bp, probe
atcaacagcaacctcttcatgagct

SEQ ID NO: 111409 - DNA, 25 bp, probe
caacagcaacctcttcatgagcttg

SEQ ID NO: 111410 - DNA, 25 bp, probe
cagcaacctcttcatgagcttgaac

SEQ ID NO: 111411 - DNA, 25 bp, probe
aacagcaacctcttcatgagcttga

SEQ ID NO: 111412 - DNA, 25 bp, probe
tcaacagcaacctcttcatgagctt

SEQ ID NO: 111413 - DNA, 25 bp, probe
gagtacaatgcccagatcaacagca

SEQ ID NO: 111414 - DNA, 25 bp, probe
agcaacctcttcatgagcttgaaca

SEQ ID NO: 111415 - DNA, 25 bp, probe
acagcaacctcttcatgagcttgaa

SEQ ID NO: 111416 - DNA, 25 bp, probe
ttcatgagcttgaacaaggacggtt

SEQ ID NO: 111417 - DNA, 25 bp, probe
tcttcatgagcttgaacaaggacgg

SEQ ID NO: 111418 - DNA, 25 bp, probe
ctactcctggtgaagatgctatgaa

SEQ ID NO: 111419 - DNA, 25 bp, probe
ctggtgaagatgctatgaacattgt

SEQ ID NO: 111420 - DNA, 25 bp, probe
tactcctggtgaagatgctatgaac

SEQ ID NO: 111421 - DNA, 25 bp, probe
aatagcaagagaactagaagtggag

SEQ ID NO: 111422 - DNA, 25 bp, probe
tagagatgtgaccgaattgctgtaa

SEQ ID NO: 111423 - DNA, 25 bp, probe
gtgaagatgctatgaacattgttga

SEQ ID NO: 111424 - DNA, 25 bp, probe
cctggtgaagatgctatgaacattg

SEQ ID NO: 111425 - DNA, 25 bp, probe
ggtgaagatgctatgaacattgttg

SEQ ID NO: 111426 - DNA, 25 bp, probe
ttcatgtgacttacttgcttgtatt

SEQ ID NO: 111427 - DNA, 25 bp, probe
aattcatgtgacttacttgcttgta

SEQ ID NO: 111428 - DNA, 25 bp, probe
tgaagatgctatgaacattgttgaa

SEQ ID NO: 111429 - DNA, 25 bp, probe
tcctggtgaagatgctatgaacatt

SEQ ID NO: 111430 - DNA, 25 bp, probe
attcatgtgacttacttgcttgtat

SEQ ID NO: 111431 - DNA, 25 bp, probe
tggtgaagatgctatgaacattgtt

SEQ ID NO: 111432 - DNA, 25 bp, probe
atagcaagagaactagaagtggagg

SEQ ID NO: 111433 - DNA, 25 bp, probe
gtgccagaagaactatcaacttgtg

SEQ ID NO: 111434 - DNA, 25 bp, probe
tctactcctggtgaagatgctatga

SEQ ID NO: 111435 - DNA, 25 bp, probe
ctcctggtgaagatgctatgaacat

SEQ ID NO: 111436 - DNA, 25 bp, probe
ctagagatgtgaccgaattgctgta

SEQ ID NO: 111437 - DNA, 25 bp, probe
agtgccagaagaactatcaacttgt

SEQ ID NO: 111438 - DNA, 25 bp, probe
ttagtgccagaagaactatcaactt

SEQ ID NO: 111439 - DNA, 25 bp, probe
tagtgccagaagaactatcaacttg

SEQ ID NO: 111440 - DNA, 25 bp, probe
cagaagaactatcaacttgtggctg

SEQ ID NO: 111441 - DNA, 25 bp, probe
gtgacttacttgcttgtatttggtt

SEQ ID NO: 111442 - DNA, 25 bp, probe
atgtgacttacttgcttgtatttgg

SEQ ID NO: 111443 - DNA, 25 bp, probe
aagtgatgcgtatttctgagttatg

SEQ ID NO: 111444 - DNA, 25 bp, probe
agaagaactatcaacttgtggctgg

SEQ ID NO: 111445 - DNA, 25 bp, probe
tgacttacttgcttgtatttggttt

SEQ ID NO: 111446 - DNA, 25 bp, probe
actctgtcaactccaaattcctatt

SEQ ID NO: 111447 - DNA, 25 bp, probe
aactctgtcaactccaaattcctat

SEQ ID NO: 111448 - DNA, 25 bp, probe
aaactctgtcaactccaaattccta

SEQ ID NO: 111449 - DNA, 25 bp, probe
tgtgacttacttgcttgtatttggt

SEQ ID NO: 111450 - DNA, 25 bp, probe
ttcagaggaggaaggaactgtagat

SEQ ID NO: 111451 - DNA, 25 bp, probe
tgagttatgcctgtatttaagaagc

SEQ ID NO: 111452 - DNA, 25 bp, probe
cgtatttctgagttatgcctgtatt

SEQ ID NO: 111453 - DNA, 25 bp, probe
gcgtatttctgagttatgcctgtat

SEQ ID NO: 111454 - DNA, 25 bp, probe
aaagtgatgcgtatttctgagttat

SEQ ID NO: 111455 - DNA, 25 bp, probe
agtatgaaccatgttatatgcagtg

SEQ ID NO: 111456 - DNA, 25 bp, probe
cagtatgaaccatgttatatgcagt

SEQ ID NO: 111457 - DNA, 25 bp, probe
aatctactcctggtgaagatgctat

SEQ ID NO: 111458 - DNA, 25 bp, probe
gcaaacttcactgttgtcttacttt

SEQ ID NO: 111459 - DNA, 25 bp, probe
aatggaatctactcctggtgaagat

SEQ ID NO: 111460 - DNA, 25 bp, probe
tacttgcttgtatttggtttattgc

SEQ ID NO: 111461 - DNA, 25 bp, probe
taactcagatgacagtggatttctc

SEQ ID NO: 111462 - DNA, 25 bp, probe
aatctgtgcttcataatagtgtgtg

SEQ ID NO: 111463 - DNA, 25 bp, probe
tcttaatcgctcacttcaactcatt

SEQ ID NO: 111464 - DNA, 25 bp, probe
atctgtgcttcataatagtgtgtgg

SEQ ID NO: 111465 - DNA, 25 bp, probe
ctcttaatcgctcacttcaactcat

SEQ ID NO: 111466 - DNA, 25 bp, probe
gaatctgtgcttcataatagtgtgt

SEQ ID NO: 111467 - DNA, 25 bp, probe
gtctcttaatcgctcacttcaactc

SEQ ID NO: 111468 - DNA, 25 bp, probe
tctcttaatcgctcacttcaactca

SEQ ID NO: 111469 - DNA, 25 bp, probe
tgtctcttaatcgctcacttcaact

SEQ ID NO: 111470 - DNA, 25 bp, probe
cttcataatagtgtgtggcatgtat

SEQ ID NO: 111471 - DNA, 25 bp, probe
gcttcataatagtgtgtggcatgta

SEQ ID NO: 111472 - DNA, 25 bp, probe
ttaacattctgaagatggtgctgtg

SEQ ID NO: 111473 - DNA, 25 bp, probe
cataatagtgtgtggcatgtatgtg

SEQ ID NO: 111474 - DNA, 25 bp, probe
tcataatagtgtgtggcatgtatgt

SEQ ID NO: 111475 - DNA, 25 bp, probe
ggaagatagaaaggagagaaggttt

SEQ ID NO: 111476 - DNA, 25 bp, probe
atggaagatagaaaggagagaaggt

SEQ ID NO: 111477 - DNA, 25 bp, probe
tgctaatggaagatagaaaggagag

SEQ ID NO: 111478 - DNA, 25 bp, probe
ttcataatagtgtgtggcatgtatg

SEQ ID NO: 111479 - DNA, 25 bp, probe
aatggaagatagaaaggagagaagg

SEQ ID NO: 111480 - DNA, 25 bp, probe
taatcgctcacttcaactcatttct

SEQ ID NO: 111481 - DNA, 25 bp, probe
tggaagatagaaaggagagaaggtt

SEQ ID NO: 111482 - DNA, 25 bp, probe
gctaatggaagatagaaaggagaga

SEQ ID NO: 111483 - DNA, 25 bp, probe
ttaatcgctcacttcaactcatttc

SEQ ID NO: 111484 - DNA, 25 bp, probe
cttaatcgctcacttcaactcattt

SEQ ID NO: 111485 - DNA, 25 bp, probe
gtgctttgtcctgtatttggtttaa

SEQ ID NO: 111486 - DNA, 25 bp, probe
ggttgacttgggatgacatattaca

SEQ ID NO: 111487 - DNA, 25 bp, probe
gctcacttcaactcatttcttctaa

SEQ ID NO: 111488 - DNA, 25 bp, probe
ttgctaatggaagatagaaaggaga

SEQ ID NO: 111489 - DNA, 25 bp, probe
tgctttgtcctgtatttggtttaat

SEQ ID NO: 111490 - DNA, 25 bp, probe
gtgtctcttaatcgctcacttcaac

SEQ ID NO: 111491 - DNA, 25 bp, probe
gctttgtcctgtatttggtttaatg

SEQ ID NO: 111492 - DNA, 25 bp, probe
cgctcacttcaactcatttcttcta

SEQ ID NO: 111493 - DNA, 25 bp, probe
taacattctgaagatggtgctgtgt

SEQ ID NO: 111494 - DNA, 25 bp, probe
aatcgctcacttcaactcatttctt

SEQ ID NO: 111495 - DNA, 25 bp, probe
gggttgacttgggatgacatattac

SEQ ID NO: 111496 - DNA, 25 bp, probe
aaagtccagtttgtgtctcttaatc

SEQ ID NO: 111497 - DNA, 25 bp, probe
tctgtgcttcataatagtgtgtggc

SEQ ID NO: 111498 - DNA, 25 bp, probe
tttgctaatggaagatagaaaggag

SEQ ID NO: 111499 - DNA, 25 bp, probe
tttccttgtttgagtatttctgtct

SEQ ID NO: 111500 - DNA, 25 bp, probe
cggatttgactgcctgtatatgttt

SEQ ID NO: 111501 - DNA, 25 bp, probe
gttgacttgggatgacatattacat

SEQ ID NO: 111502 - DNA, 25 bp, probe
tgtgtctcttaatcgctcacttcaa

SEQ ID NO: 111503 - DNA, 25 bp, probe
ttgtgtctcttaatcgctcacttca

SEQ ID NO: 111504 - DNA, 25 bp, probe
aagtccagtttgtgtctcttaatcg

SEQ ID NO: 111505 - DNA, 25 bp, probe
atcgctcacttcaactcatttcttc

SEQ ID NO: 111506 - DNA, 25 bp, probe
ttcctattctgtatccttaccttgg

SEQ ID NO: 111507 - DNA, 25 bp, probe
ctgatataagagaggatggtgttgc

SEQ ID NO: 111508 - DNA, 25 bp, probe
ttaattctcacaaccaaccagtcat

SEQ ID NO: 111509 - DNA, 25 bp, probe
cctattctgtatccttaccttggtc

SEQ ID NO: 111510 - DNA, 25 bp, probe
tcctattctgtatccttaccttggt

SEQ ID NO: 111511 - DNA, 25 bp, probe
ctattctgtatccttaccttggtca

SEQ ID NO: 111512 - DNA, 25 bp, probe
tattctgtatccttaccttggtcat

SEQ ID NO: 111513 - DNA, 25 bp, probe
ctgtatccttaccttggtcatgtta

SEQ ID NO: 111514 - DNA, 25 bp, probe
attctgtatccttaccttggtcatg

SEQ ID NO: 111515 - DNA, 25 bp, probe
aagaagtcagtatagaaccactagc

SEQ ID NO: 111516 - DNA, 25 bp, probe
gtcagtatagaaccactagcgaata

SEQ ID NO: 111517 - DNA, 25 bp, probe
tgtatccttaccttggtcatgttaa

SEQ ID NO: 111518 - DNA, 25 bp, probe
tcagtatagaaccactagcgaatag

SEQ ID NO: 111519 - DNA, 25 bp, probe
agtcagtatagaaccactagcgaat

SEQ ID NO: 111520 - DNA, 25 bp, probe
aagtcagtatagaaccactagcgaa

SEQ ID NO: 111521 - DNA, 25 bp, probe
tctgtatccttaccttggtcatgtt

SEQ ID NO: 111522 - DNA, 25 bp, probe
ttctgtatccttaccttggtcatgt

SEQ ID NO: 111523 - DNA, 25 bp, probe
taattctcacaaccaaccagtcatg

SEQ ID NO: 111524 - DNA, 25 bp, probe
tactctggcttgagcacttctatat

SEQ ID NO: 111525 - DNA, 25 bp, probe
cattggaattgactgatctctgtgg

SEQ ID NO: 111526 - DNA, 25 bp, probe
cctgatataagagaggatggtgttg

SEQ ID NO: 111527 - DNA, 25 bp, probe
gaagtcagtatagaaccactagcga

SEQ ID NO: 111528 - DNA, 25 bp, probe
agaagtcagtatagaaccactagcg

SEQ ID NO: 111529 - DNA, 25 bp, probe
aacattggaattgactgatctctgt

SEQ ID NO: 111530 - DNA, 25 bp, probe
tgaatatgtactgagctaggagact

SEQ ID NO: 111531 - DNA, 25 bp, probe
gtgaatatgtactgagctaggagac

SEQ ID NO: 111532 - DNA, 25 bp, probe
attggaattgactgatctctgtggt

SEQ ID NO: 111533 - DNA, 25 bp, probe
aaggtgaatatgtactgagctagga

SEQ ID NO: 111534 - DNA, 25 bp, probe
caaggtgaatatgtactgagctagg

SEQ ID NO: 111535 - DNA, 25 bp, probe
ctactctggcttgagcacttctata

SEQ ID NO: 111536 - DNA, 25 bp, probe
acattggaattgactgatctctgtg

SEQ ID NO: 111537 - DNA, 25 bp, probe
taattattgtgaagtggagagcctc

SEQ ID NO: 111538 - DNA, 25 bp, probe
gtatccttaccttggtcatgttaat

SEQ ID NO: 111539 - DNA, 25 bp, probe
attattgtgaagtggagagcctcaa

SEQ ID NO: 111540 - DNA, 25 bp, probe
aatatgtactgagctaggagacttc

SEQ ID NO: 111541 - DNA, 25 bp, probe
gaatatgtactgagctaggagactt

SEQ ID NO: 111542 - DNA, 25 bp, probe
aattattgtgaagtggagagcctca

SEQ ID NO: 111543 - DNA, 25 bp, probe
ggtgaatatgtactgagctaggaga

SEQ ID NO: 111544 - DNA, 25 bp, probe
aggtgaatatgtactgagctaggag

SEQ ID NO: 111545 - DNA, 25 bp, probe
gcaaggtgaatatgtactgagctag

SEQ ID NO: 111546 - DNA, 25 bp, probe
ttggaattgactgatctctgtggtt

SEQ ID NO: 111547 - DNA, 25 bp, probe
tattcctattcgacactggcttcta

SEQ ID NO: 111548 - DNA, 25 bp, probe
tatccttaccttggtcatgttaatg

SEQ ID NO: 111549 - DNA, 25 bp, probe
gctcagattcatctaatcctcaact

SEQ ID NO: 111550 - DNA, 25 bp, probe
atatgtggctgtgaacttgaatgaa

SEQ ID NO: 111551 - DNA, 25 bp, probe
aatatgtggctgtgaacttgaatga

SEQ ID NO: 111552 - DNA, 25 bp, probe
tatgtggctgtgaacttgaatgaac

SEQ ID NO: 111553 - DNA, 25 bp, probe
cgtgctggtttctttgttactattt

SEQ ID NO: 111554 - DNA, 25 bp, probe
aaatatgtggctgtgaacttgaatg

SEQ ID NO: 111555 - DNA, 25 bp, probe
tgctggtttctttgttactatttgt

SEQ ID NO: 111556 - DNA, 25 bp, probe
gtgctggtttctttgttactatttg

SEQ ID NO: 111557 - DNA, 25 bp, probe
aacactgctcaaactttctgctatt

SEQ ID NO: 111558 - DNA, 25 bp, probe
gctggtttctttgttactatttgtt

SEQ ID NO: 111559 - DNA, 25 bp, probe
ccgtgctggtttctttgttactatt

SEQ ID NO: 111560 - DNA, 25 bp, probe
gaatgaacactgctcaaactttctg

SEQ ID NO: 111561 - DNA, 25 bp, probe
ctgtgaacttgaatgaacactgctc

SEQ ID NO: 111562 - DNA, 25 bp, probe
tgaatgaacactgctcaaactttct

SEQ ID NO: 111563 - DNA, 25 bp, probe
gaacactgctcaaactttctgctat

SEQ ID NO: 111564 - DNA, 25 bp, probe
acactgctcaaactttctgctattg

SEQ ID NO: 111565 - DNA, 25 bp, probe
atgtggctgtgaacttgaatgaaca

SEQ ID NO: 111566 - DNA, 25 bp, probe
tgtgaacttgaatgaacactgctca

SEQ ID NO: 111567 - DNA, 25 bp, probe
gtttctttgttactatttgtttggg

SEQ ID NO: 111568 - DNA, 25 bp, probe
ggtttctttgttactatttgtttgg

SEQ ID NO: 111569 - DNA, 25 bp, probe
ctatgtgaagcctaatttacctgca

SEQ ID NO: 111570 - DNA, 25 bp, probe
cactgctcaaactttctgctattgg

SEQ ID NO: 111571 - DNA, 25 bp, probe
aatgaacactgctcaaactttctgc

SEQ ID NO: 111572 - DNA, 25 bp, probe
gtgaacttgaatgaacactgctcaa

SEQ ID NO: 111573 - DNA, 25 bp, probe
tgaacactgctcaaactttctgcta

SEQ ID NO: 111574 - DNA, 25 bp, probe
cccgtgctggtttctttgttactat

SEQ ID NO: 111575 - DNA, 25 bp, probe
tggtttctttgttactatttgtttg

SEQ ID NO: 111576 - DNA, 25 bp, probe
gttttattcttggtgttttcagtgc

SEQ ID NO: 111577 - DNA, 25 bp, probe
gcgtttgttttattcttggtgtttt

SEQ ID NO: 111578 - DNA, 25 bp, probe
tgtttggggttttgttttagttctt

SEQ ID NO: 111579 - DNA, 25 bp, probe
ttgtttggggttttgttttagttct

SEQ ID NO: 111580 - DNA, 25 bp, probe
aaaatatgtggctgtgaacttgaat

SEQ ID NO: 111581 - DNA, 25 bp, probe
tgttactatttgtttggggttttgt

SEQ ID NO: 111582 - DNA, 25 bp, probe
tttgtttggggttttgttttagttc

SEQ ID NO: 111583 - DNA, 25 bp, probe
gtttggggttttgttttagttcttt

SEQ ID NO: 111584 - DNA, 25 bp, probe
tctttgttactatttgtttggggtt

SEQ ID NO: 111585 - DNA, 25 bp, probe
ttctttgttactatttgtttggggt

SEQ ID NO: 111586 - DNA, 25 bp, probe
ctggtttctttgttactatttgttt

SEQ ID NO: 111587 - DNA, 25 bp, probe
tggctgtgaacttgaatgaacactg

SEQ ID NO: 111588 - DNA, 25 bp, probe
gtggctgtgaacttgaatgaacact

SEQ ID NO: 111589 - DNA, 25 bp, probe
tgttttattcttggtgttttcagtg

SEQ ID NO: 111590 - DNA, 25 bp, probe
atttgtttggggttttgttttagtt

SEQ ID NO: 111591 - DNA, 25 bp, probe
ctggctggactcctgtttacttcta

SEQ ID NO: 111592 - DNA, 25 bp, probe
ggcgtttgttttattcttggtgttt

SEQ ID NO: 111593 - DNA, 25 bp, probe
gttactatttgtttggggttttgtt

SEQ ID NO: 111594 - DNA, 25 bp, probe
ttcataataccagtgtgatgtcagg

SEQ ID NO: 111595 - DNA, 25 bp, probe
tcttcataataccagtgtgatgtca

SEQ ID NO: 111596 - DNA, 25 bp, probe
ttctcatcttcataataccagtgtg

SEQ ID NO: 111597 - DNA, 25 bp, probe
cttcataataccagtgtgatgtcag

SEQ ID NO: 111598 - DNA, 25 bp, probe
tctcatcttcataataccagtgtga

SEQ ID NO: 111599 - DNA, 25 bp, probe
atcttcataataccagtgtgatgtc

SEQ ID NO: 111600 - DNA, 25 bp, probe
ctcatcttcataataccagtgtgat

SEQ ID NO: 111601 - DNA, 25 bp, probe
tcataataccagtgtgatgtcaggc

SEQ ID NO: 111602 - DNA, 25 bp, probe
tctcacagttgtttctcatcttcat

SEQ ID NO: 111603 - DNA, 25 bp, probe
ctctcacagttgtttctcatcttca

SEQ ID NO: 111604 - DNA, 25 bp, probe
ctcacagttgtttctcatcttcata

SEQ ID NO: 111605 - DNA, 25 bp, probe
tggtagaacactttcaaagaggttt

SEQ ID NO: 111606 - DNA, 25 bp, probe
tcacagttgtttctcatcttcataa

SEQ ID NO: 111607 - DNA, 25 bp, probe
gctctcacagttgtttctcatcttc

SEQ ID NO: 111608 - DNA, 25 bp, probe
tttctcatcttcataataccagtgt

SEQ ID NO: 111609 - DNA, 25 bp, probe
tgtttctcatcttcataataccagt

SEQ ID NO: 111610 - DNA, 25 bp, probe
gtttctcatcttcataataccagtg

SEQ ID NO: 111611 - DNA, 25 bp, probe
cacagttgtttctcatcttcataat

SEQ ID NO: 111612 - DNA, 25 bp, probe
gtggtagaacactttcaaagaggtt

SEQ ID NO: 111613 - DNA, 25 bp, probe
catcttcataataccagtgtgatgt

SEQ ID NO: 111614 - DNA, 25 bp, probe
gttgtttctcatcttcataatacca

SEQ ID NO: 111615 - DNA, 25 bp, probe
tcatcttcataataccagtgtgatg

SEQ ID NO: 111616 - DNA, 25 bp, probe
ggctctcacagttgtttctcatctt

SEQ ID NO: 111617 - DNA, 25 bp, probe
aatcaggctctcacagttgtttctc

SEQ ID NO: 111618 - DNA, 25 bp, probe
ttgtttctcatcttcataataccag

SEQ ID NO: 111619 - DNA, 25 bp, probe
agttgtttctcatcttcataatacc

SEQ ID NO: 111620 - DNA, 25 bp, probe
tgtggtagaacactttcaaagaggt

SEQ ID NO: 111621 - DNA, 25 bp, probe
aagtacaatcagggtgtggtagaac

SEQ ID NO: 111622 - DNA, 25 bp, probe
caagtacaatcagggtgtggtagaa

SEQ ID NO: 111623 - DNA, 25 bp, probe
ggtagaacactttcaaagaggtttg

SEQ ID NO: 111624 - DNA, 25 bp, probe
ctcaagtacaatcagggtgtggtag

SEQ ID NO: 111625 - DNA, 25 bp, probe
caatcaggctctcacagttgtttct

SEQ ID NO: 111626 - DNA, 25 bp, probe
caggctctcacagttgtttctcatc

SEQ ID NO: 111627 - DNA, 25 bp, probe
tcaagtacaatcagggtgtggtaga

SEQ ID NO: 111628 - DNA, 25 bp, probe
aaactcaagtacaatcagggtgtgg

SEQ ID NO: 111629 - DNA, 25 bp, probe
aggctctcacagttgtttctcatct

SEQ ID NO: 111630 - DNA, 25 bp, probe
ttaaaactcaagtacaatcagggtg

SEQ ID NO: 111631 - DNA, 25 bp, probe
agtacaatcagggtgtggtagaaca

SEQ ID NO: 111632 - DNA, 25 bp, probe
actcaagtacaatcagggtgtggta

SEQ ID NO: 111633 - DNA, 25 bp, probe
cagttgtttctcatcttcataatac

SEQ ID NO: 111634 - DNA, 25 bp, probe
acagttgtttctcatcttcataata

SEQ ID NO: 111635 - DNA, 25 bp, probe
tcaggctctcacagttgtttctcat

SEQ ID NO: 111636 - DNA, 25 bp, probe
atcaggctctcacagttgtttctca

SEQ ID NO: 111637 - DNA, 25 bp, probe
cataataccagtgtgatgtcaggcc

SEQ ID NO: 111638 - DNA, 25 bp, probe
attgattgagactgtaggaactgtg

SEQ ID NO: 111639 - DNA, 25 bp, probe
cattgattgagactgtaggaactgt

SEQ ID NO: 111640 - DNA, 25 bp, probe
attgaatcaggtaacactaacggat

SEQ ID NO: 111641 - DNA, 25 bp, probe
aattgaatcaggtaacactaacgga

SEQ ID NO: 111642 - DNA, 25 bp, probe
tgttcattgattgagactgtaggaa

SEQ ID NO: 111643 - DNA, 25 bp, probe
tcattgattgagactgtaggaactg

SEQ ID NO: 111644 - DNA, 25 bp, probe
ctgttcattgattgagactgtagga

SEQ ID NO: 111645 - DNA, 25 bp, probe
ttcattgattgagactgtaggaact

SEQ ID NO: 111646 - DNA, 25 bp, probe
ttgattgagactgtaggaactgtgt

SEQ ID NO: 111647 - DNA, 25 bp, probe
gattgagactgtaggaactgtgttg

SEQ ID NO: 111648 - DNA, 25 bp, probe
aatcaggtaacactaacggatcaag

SEQ ID NO: 111649 - DNA, 25 bp, probe
gaatcaggtaacactaacggatcaa

SEQ ID NO: 111650 - DNA, 25 bp, probe
ttgaatcaggtaacactaacggatc

SEQ ID NO: 111651 - DNA, 25 bp, probe
tgattgagactgtaggaactgtgtt

SEQ ID NO: 111652 - DNA, 25 bp, probe
gtaggaactgtgttggttggtattg

SEQ ID NO: 111653 - DNA, 25 bp, probe
gctgttcattgattgagactgtagg

SEQ ID NO: 111654 - DNA, 25 bp, probe
ggctgttcattgattgagactgtag

SEQ ID NO: 111655 - DNA, 25 bp, probe
tgtaggaactgtgttggttggtatt

SEQ ID NO: 111656 - DNA, 25 bp, probe
tgaatcaggtaacactaacggatca

SEQ ID NO: 111657 - DNA, 25 bp, probe
ctgtaggaactgtgttggttggtat

SEQ ID NO: 111658 - DNA, 25 bp, probe
attgagactgtaggaactgtgttgg

SEQ ID NO: 111659 - DNA, 25 bp, probe
tggctgttcattgattgagactgta

SEQ ID NO: 111660 - DNA, 25 bp, probe
atcaggtaacactaacggatcaagg

SEQ ID NO: 111661 - DNA, 25 bp, probe
cttggctgttcattgattgagactg

SEQ ID NO: 111662 - DNA, 25 bp, probe
taggaactgtgttggttggtattgg

SEQ ID NO: 111663 - DNA, 25 bp, probe
tcttggctgttcattgattgagact

SEQ ID NO: 111664 - DNA, 25 bp, probe
gttggtcttggctgttcattgattg

SEQ ID NO: 111665 - DNA, 25 bp, probe
gttggttggtattggtggtggtatt

SEQ ID NO: 111666 - DNA, 25 bp, probe
agacttaaatctctctcctatctgc

SEQ ID NO: 111667 - DNA, 25 bp, probe
tgacaaagacttaaatctctctcct

SEQ ID NO: 111668 - DNA, 25 bp, probe
gtgacaaagacttaaatctctctcc

SEQ ID NO: 111669 - DNA, 25 bp, probe
agttggtcttggctgttcattgatt

SEQ ID NO: 111670 - DNA, 25 bp, probe
gcttcagtgacaaagacttaaatct

SEQ ID NO: 111671 - DNA, 25 bp, probe
ttggctgttcattgattgagactgt

SEQ ID NO: 111672 - DNA, 25 bp, probe
atgatccattaaatgccttcctact

SEQ ID NO: 111673 - DNA, 25 bp, probe
tgatccattaaatgccttcctactc

SEQ ID NO: 111674 - DNA, 25 bp, probe
gagactgtaggaactgtgttggttg

SEQ ID NO: 111675 - DNA, 25 bp, probe
ttggtcttggctgttcattgattga

SEQ ID NO: 111676 - DNA, 25 bp, probe
tttccatgatccattaaatgccttc

SEQ ID NO: 111677 - DNA, 25 bp, probe
gtttccatgatccattaaatgcctt

SEQ ID NO: 111678 - DNA, 25 bp, probe
catgatccattaaatgccttcctac

SEQ ID NO: 111679 - DNA, 25 bp, probe
gagttggtcttggctgttcattgat

SEQ ID NO: 111680 - DNA, 25 bp, probe
gatccattaaatgccttcctactcc

SEQ ID NO: 111681 - DNA, 25 bp, probe
ccatgatccattaaatgccttccta

SEQ ID NO: 111682 - DNA, 25 bp, probe
gtctcacctcaacttcttcacatta

SEQ ID NO: 111683 - DNA, 25 bp, probe
tctcacctcaacttcttcacattaa

SEQ ID NO: 111684 - DNA, 25 bp, probe
ggtgatgtggtagatccttatgtct

SEQ ID NO: 111685 - DNA, 25 bp, probe
tcgtaacaacttatgacatgatgat

SEQ ID NO: 111686 - DNA, 25 bp, probe
atcgtaacaacttatgacatgatga

SEQ ID NO: 111687 - DNA, 25 bp, probe
tcacctcagaagtaagacaactgtt

SEQ ID NO: 111688 - DNA, 25 bp, probe
gatcgtaacaacttatgacatgatg

SEQ ID NO: 111689 - DNA, 25 bp, probe
aagatcgtaacaacttatgacatga

SEQ ID NO: 111690 - DNA, 25 bp, probe
agatcgtaacaacttatgacatgat

SEQ ID NO: 111691 - DNA, 25 bp, probe
acaacttatgacatgatgattcagt

SEQ ID NO: 111692 - DNA, 25 bp, probe
ctcacctcagaagtaagacaactgt

SEQ ID NO: 111693 - DNA, 25 bp, probe
taagaaagacaggaaggaggagtat

SEQ ID NO: 111694 - DNA, 25 bp, probe
ataagaaagacaggaaggaggagta

SEQ ID NO: 111695 - DNA, 25 bp, probe
aaagataagaaagacaggaaggagg

SEQ ID NO: 111696 - DNA, 25 bp, probe
aacttatgacatgatgattcagtcc

SEQ ID NO: 111697 - DNA, 25 bp, probe
gtgatgtggtagatccttatgtcta

SEQ ID NO: 111698 - DNA, 25 bp, probe
aagataagaaagacaggaaggagga

SEQ ID NO: 111699 - DNA, 25 bp, probe
cgtaacaacttatgacatgatgatt

SEQ ID NO: 111700 - DNA, 25 bp, probe
aggtgatgtggtagatccttatgtc

SEQ ID NO: 111701 - DNA, 25 bp, probe
aagaaagacaggaaggaggagtatt

SEQ ID NO: 111702 - DNA, 25 bp, probe
agaaagacaggaaggaggagtattt

SEQ ID NO: 111703 - DNA, 25 bp, probe
ctcacctcaacttcttcacattaaa

SEQ ID NO: 111704 - DNA, 25 bp, probe
agataagaaagacaggaaggaggag

SEQ ID NO: 111705 - DNA, 25 bp, probe
tgtggtagatccttatgtctatgtt

SEQ ID NO: 111706 - DNA, 25 bp, probe
gataagaaagacaggaaggaggagt

SEQ ID NO: 111707 - DNA, 25 bp, probe
tggtagatccttatgtctatgttga

SEQ ID NO: 111708 - DNA, 25 bp, probe
gtggtagatccttatgtctatgttg

SEQ ID NO: 111709 - DNA, 25 bp, probe
atgtggtagatccttatgtctatgt

SEQ ID NO: 111710 - DNA, 25 bp, probe
tgatgtggtagatccttatgtctat

SEQ ID NO: 111711 - DNA, 25 bp, probe
caacttatgacatgatgattcagtc

SEQ ID NO: 111712 - DNA, 25 bp, probe
cctcacctcagaagtaagacaactg

SEQ ID NO: 111713 - DNA, 25 bp, probe
aacaacttatgacatgatgattcag

SEQ ID NO: 111714 - DNA, 25 bp, probe
gatgtggtagatccttatgtctatg

SEQ ID NO: 111715 - DNA, 25 bp, probe
ctaatctttgctgtcttcaacatcc

SEQ ID NO: 111716 - DNA, 25 bp, probe
taatctttgctgtcttcaacatcca

SEQ ID NO: 111717 - DNA, 25 bp, probe
gctaatctttgctgtcttcaacatc

SEQ ID NO: 111718 - DNA, 25 bp, probe
aaattagccagatgtagaatccctg

SEQ ID NO: 111719 - DNA, 25 bp, probe
tgctaatctttgctgtcttcaacat

SEQ ID NO: 111720 - DNA, 25 bp, probe
cacctcagaagtaagacaactgttt

SEQ ID NO: 111721 - DNA, 25 bp, probe
ggtagatccttatgtctatgttgaa

SEQ ID NO: 111722 - DNA, 25 bp, probe
taaagataagaaagacaggaaggag

SEQ ID NO: 111723 - DNA, 25 bp, probe
atccttatgtctatgttgaaatcca

SEQ ID NO: 111724 - DNA, 25 bp, probe
aatctttgctgtcttcaacatccaa

SEQ ID NO: 111725 - DNA, 25 bp, probe
attagccagatgtagaatccctgtt

SEQ ID NO: 111726 - DNA, 25 bp, probe
attgaactacctgctaattcttgcc

SEQ ID NO: 111727 - DNA, 25 bp, probe
aattgaactacctgctaattcttgc

SEQ ID NO: 111728 - DNA, 25 bp, probe
ttaacagcatgacttcttacagagc

SEQ ID NO: 111729 - DNA, 25 bp, probe
ttgtagctcgtaaggtagtaattgg

SEQ ID NO: 111730 - DNA, 25 bp, probe
gtagctcgtaaggtagtaattggta

SEQ ID NO: 111731 - DNA, 25 bp, probe
agctcgtaaggtagtaattggtatt

SEQ ID NO: 111732 - DNA, 25 bp, probe
tgtagctcgtaaggtagtaattggt

SEQ ID NO: 111733 - DNA, 25 bp, probe
ttaacactcattaacacactactgt

SEQ ID NO: 111734 - DNA, 25 bp, probe
tagctcgtaaggtagtaattggtat

SEQ ID NO: 111735 - DNA, 25 bp, probe
gctacttgaaggcgtaactggtatt

SEQ ID NO: 111736 - DNA, 25 bp, probe
attgaggatgccatatttgagatgt

SEQ ID NO: 111737 - DNA, 25 bp, probe
ctacttgaaggcgtaactggtattt

SEQ ID NO: 111738 - DNA, 25 bp, probe
cgtaactggtatttcttgtgtgttt

SEQ ID NO: 111739 - DNA, 25 bp, probe
tacttgaaggcgtaactggtatttc

SEQ ID NO: 111740 - DNA, 25 bp, probe
ttgaggatgccatatttgagatgtc

SEQ ID NO: 111741 - DNA, 25 bp, probe
tcccagcatttgaaggttattgttt

SEQ ID NO: 111742 - DNA, 25 bp, probe
aattgaggatgccatatttgagatg

SEQ ID NO: 111743 - DNA, 25 bp, probe
gatgccatatttgagatgtcagttt

SEQ ID NO: 111744 - DNA, 25 bp, probe
gagtagaaactggagatgacttgtt

SEQ ID NO: 111745 - DNA, 25 bp, probe
gctcgtaaggtagtaattggtattt

SEQ ID NO: 111746 - DNA, 25 bp, probe
cttgaaggcgtaactggtatttctt

SEQ ID NO: 111747 - DNA, 25 bp, probe
ctcccagcatttgaaggttattgtt

SEQ ID NO: 111748 - DNA, 25 bp, probe
agagtagaaactggagatgacttgt

SEQ ID NO: 111749 - DNA, 25 bp, probe
ttgaaggcgtaactggtatttcttg

SEQ ID NO: 111750 - DNA, 25 bp, probe
ggatgccatatttgagatgtcagtt

SEQ ID NO: 111751 - DNA, 25 bp, probe
gcatattggttataggtttgtgttt

SEQ ID NO: 111752 - DNA, 25 bp, probe
gaggatgccatatttgagatgtcag

SEQ ID NO: 111753 - DNA, 25 bp, probe
taattgaactacctgctaattcttg

SEQ ID NO: 111754 - DNA, 25 bp, probe
ttgaactacctgctaattcttgccg

SEQ ID NO: 111755 - DNA, 25 bp, probe
cagagtagaaactggagatgacttg

SEQ ID NO: 111756 - DNA, 25 bp, probe
aaattgaggatgccatatttgagat

SEQ ID NO: 111757 - DNA, 25 bp, probe
acagagtagaaactggagatgactt

SEQ ID NO: 111758 - DNA, 25 bp, probe
tttaacagcatgacttcttacagag

SEQ ID NO: 111759 - DNA, 25 bp, probe
gcgtaactggtatttcttgtgtgtt

SEQ ID NO: 111760 - DNA, 25 bp, probe
gaaggcgtaactggtatttcttgtg

SEQ ID NO: 111761 - DNA, 25 bp, probe
cactcccagcatttgaaggttattg

SEQ ID NO: 111762 - DNA, 25 bp, probe
aggatgccatatttgagatgtcagt

SEQ ID NO: 111763 - DNA, 25 bp, probe
tgaggatgccatatttgagatgtca

SEQ ID NO: 111764 - DNA, 25 bp, probe
acttgaaggcgtaactggtatttct

SEQ ID NO: 111765 - DNA, 25 bp, probe
gacagagtagaaactggagatgact

SEQ ID NO: 111766 - DNA, 25 bp, probe
ctgatttgtagctcgtaaggtagta

SEQ ID NO: 111767 - DNA, 25 bp, probe
tgatttgtagctcgtaaggtagtaa

SEQ ID NO: 111768 - DNA, 25 bp, probe
tgaaggcgtaactggtatttcttgt

SEQ ID NO: 111769 - DNA, 25 bp, probe
actcccagcatttgaaggttattgt

SEQ ID NO: 111770 - DNA, 25 bp, probe
cacacacacacatacacagagactc

SEQ ID NO: 111771 - DNA, 25 bp, probe
gtaaataatgacagaatggagtggg

SEQ ID NO: 111772 - DNA, 25 bp, probe
cacacacacatacacagagactctt

SEQ ID NO: 111773 - DNA, 25 bp, probe
acacacacacatacacagagactct

SEQ ID NO: 111774 - DNA, 25 bp, probe
catggatgaagacattgctcacaag

SEQ ID NO: 111775 - DNA, 25 bp, probe
acacatacacagagactctttcatt

SEQ ID NO: 111776 - DNA, 25 bp, probe
cacacatacacagagactctttcat

SEQ ID NO: 111777 - DNA, 25 bp, probe
tcatggatgaagacattgctcacaa

SEQ ID NO: 111778 - DNA, 25 bp, probe
tgtaaataatgacagaatggagtgg

SEQ ID NO: 111779 - DNA, 25 bp, probe
cacatacacagagactctttcattt

SEQ ID NO: 111780 - DNA, 25 bp, probe
cacacacatacacagagactctttc

SEQ ID NO: 111781 - DNA, 25 bp, probe
gaacagcctcatggatgaagacatt

SEQ ID NO: 111782 - DNA, 25 bp, probe
acacacatacacagagactctttca

SEQ ID NO: 111783 - DNA, 25 bp, probe
tgtgtaaataatgacagaatggagt

SEQ ID NO: 111784 - DNA, 25 bp, probe
ctcatggatgaagacattgctcaca

SEQ ID NO: 111785 - DNA, 25 bp, probe
acacacacatacacagagactcttt

SEQ ID NO: 111786 - DNA, 25 bp, probe
gtgtaaataatgacagaatggagtg

SEQ ID NO: 111787 - DNA, 25 bp, probe
aacagcctcatggatgaagacattg

SEQ ID NO: 111788 - DNA, 25 bp, probe
cctcatggatgaagacattgctcac

SEQ ID NO: 111789 - DNA, 25 bp, probe
taaataatgacagaatggagtgggg

SEQ ID NO: 111790 - DNA, 25 bp, probe
tacaagaaaacaacaacacaaacca

SEQ ID NO: 111791 - DNA, 25 bp, probe
aatggagtggggtaaaagtgtattt

SEQ ID NO: 111792 - DNA, 25 bp, probe
ccaaggaggacaaagaagtgaactt

SEQ ID NO: 111793 - DNA, 25 bp, probe
atgtgtaaataatgacagaatggag

SEQ ID NO: 111794 - DNA, 25 bp, probe
gaatggagtggggtaaaagtgtatt

SEQ ID NO: 111795 - DNA, 25 bp, probe
gcacacacacacatacacagagact

SEQ ID NO: 111796 - DNA, 25 bp, probe
aaacaacaacacaaaccacacacac

SEQ ID NO: 111797 - DNA, 25 bp, probe
aaggaggacaaagaagtgaacttgg

SEQ ID NO: 111798 - DNA, 25 bp, probe
atacaagaaaacaacaacacaaacc

SEQ ID NO: 111799 - DNA, 25 bp, probe
ataatgacagaatggagtggggtaa

SEQ ID NO: 111800 - DNA, 25 bp, probe
aataatgacagaatggagtggggta

SEQ ID NO: 111801 - DNA, 25 bp, probe
tgaacagcctcatggatgaagacat

SEQ ID NO: 111802 - DNA, 25 bp, probe
agaatggagtggggtaaaagtgtat

SEQ ID NO: 111803 - DNA, 25 bp, probe
taatgacagaatggagtggggtaaa

SEQ ID NO: 111804 - DNA, 25 bp, probe
aagaaaacaacaacacaaaccacac

SEQ ID NO: 111805 - DNA, 25 bp, probe
caagaaaacaacaacacaaaccaca

SEQ ID NO: 111806 - DNA, 25 bp, probe
acaagaaaacaacaacacaaaccac

SEQ ID NO: 111807 - DNA, 25 bp, probe
ggaggacaaagaagtgaacttggag

SEQ ID NO: 111808 - DNA, 25 bp, probe
aaataatgacagaatggagtggggt

SEQ ID NO: 111809 - DNA, 25 bp, probe
aatgacagaatggagtggggtaaaa

SEQ ID NO: 111810 - DNA, 25 bp, probe
cagaatggagtggggtaaaagtgta

SEQ ID NO: 111811 - DNA, 25 bp, probe
atggagtggggtaaaagtgtatttt

SEQ ID NO: 111812 - DNA, 25 bp, probe
aggaggacaaagaagtgaacttgga

SEQ ID NO: 111813 - DNA, 25 bp, probe
gagtggggtaaaagtgtattttgaa

SEQ ID NO: 111814 - DNA, 25 bp, probe
ttctaatttggtggtgtttctttgt

SEQ ID NO: 111815 - DNA, 25 bp, probe
gggatacttctaatttggtggtgtt

SEQ ID NO: 111816 - DNA, 25 bp, probe
ttgggatacttctaatttggtggtg

SEQ ID NO: 111817 - DNA, 25 bp, probe
gttgggatacttctaatttggtggt

SEQ ID NO: 111818 - DNA, 25 bp, probe
tgttgggatacttctaatttggtgg

SEQ ID NO: 111819 - DNA, 25 bp, probe
acttctaatttggtggtgtttcttt

SEQ ID NO: 111820 - DNA, 25 bp, probe
ggatacttctaatttggtggtgttt

SEQ ID NO: 111821 - DNA, 25 bp, probe
cttctaatttggtggtgtttctttg

SEQ ID NO: 111822 - DNA, 25 bp, probe
atgttgggatacttctaatttggtg

SEQ ID NO: 111823 - DNA, 25 bp, probe
tctaatttggtggtgtttctttgta

SEQ ID NO: 111824 - DNA, 25 bp, probe
ttcagtcaaatgttgggatacttct

SEQ ID NO: 111825 - DNA, 25 bp, probe
tcagtcaaatgttgggatacttcta

SEQ ID NO: 111826 - DNA, 25 bp, probe
attcagtcaaatgttgggatacttc

SEQ ID NO: 111827 - DNA, 25 bp, probe
aaccattaatattccttcttggctg

SEQ ID NO: 111828 - DNA, 25 bp, probe
accattaatattccttcttggctgg

SEQ ID NO: 111829 - DNA, 25 bp, probe
tacttctaatttggtggtgtttctt

SEQ ID NO: 111830 - DNA, 25 bp, probe
tgggatacttctaatttggtggtgt

SEQ ID NO: 111831 - DNA, 25 bp, probe
aatgttgggatacttctaatttggt

SEQ ID NO: 111832 - DNA, 25 bp, probe
atacttctaatttggtggtgtttct

SEQ ID NO: 111833 - DNA, 25 bp, probe
gttgaactacatttgttgatccctt

SEQ ID NO: 111834 - DNA, 25 bp, probe
cagtcaaatgttgggatacttctaa

SEQ ID NO: 111835 - DNA, 25 bp, probe
ctaatttggtggtgtttctttgtac

SEQ ID NO: 111836 - DNA, 25 bp, probe
gatacttctaatttggtggtgtttc

SEQ ID NO: 111837 - DNA, 25 bp, probe
ttgaactacatttgttgatcccttt

SEQ ID NO: 111838 - DNA, 25 bp, probe
agttgaactacatttgttgatccct

SEQ ID NO: 111839 - DNA, 25 bp, probe
aagttgaactacatttgttgatccc

SEQ ID NO: 111840 - DNA, 25 bp, probe
attaatattccttcttggctgggtg

SEQ ID NO: 111841 - DNA, 25 bp, probe
cattaatattccttcttggctgggt

SEQ ID NO: 111842 - DNA, 25 bp, probe
agtcaaatgttgggatacttctaat

SEQ ID NO: 111843 - DNA, 25 bp, probe
cattcagtcaaatgttgggatactt

SEQ ID NO: 111844 - DNA, 25 bp, probe
gtcaaatgttgggatacttctaatt

SEQ ID NO: 111845 - DNA, 25 bp, probe
aaatgttgggatacttctaatttgg

SEQ ID NO: 111846 - DNA, 25 bp, probe
taagttgaactacatttgttgatcc

SEQ ID NO: 111847 - DNA, 25 bp, probe
cccttttctcatcttacccctttat

SEQ ID NO: 111848 - DNA, 25 bp, probe
tcccttttctcatcttaccccttta

SEQ ID NO: 111849 - DNA, 25 bp, probe
aaaccattaatattccttcttggct

SEQ ID NO: 111850 - DNA, 25 bp, probe
tttatgccacctactgaaaagaaaa

SEQ ID NO: 111851 - DNA, 25 bp, probe
agtgcaactgtttagtcatgtgttt

SEQ ID NO: 111852 - DNA, 25 bp, probe
cttttctcatcttacccctttatgc

SEQ ID NO: 111853 - DNA, 25 bp, probe
ccattaatattccttcttggctggg

SEQ ID NO: 111854 - DNA, 25 bp, probe
gaaaccattaatattccttcttggc

SEQ ID NO: 111855 - DNA, 25 bp, probe
ttttctcatcttacccctttatgcc

SEQ ID NO: 111856 - DNA, 25 bp, probe
ccttttctcatcttacccctttatg

SEQ ID NO: 111857 - DNA, 25 bp, probe
atcccttttctcatcttaccccttt

SEQ ID NO: 111858 - DNA, 25 bp, probe
cagcattagaaggtgattagagagt

SEQ ID NO: 111859 - DNA, 25 bp, probe
acagcattagaaggtgattagagag

SEQ ID NO: 111860 - DNA, 25 bp, probe
agcattagaaggtgattagagagtc

SEQ ID NO: 111861 - DNA, 25 bp, probe
ggtgattagagagtctgttgatgaa

SEQ ID NO: 111862 - DNA, 25 bp, probe
aaggtgattagagagtctgttgatg

SEQ ID NO: 111863 - DNA, 25 bp, probe
gaaggtgattagagagtctgttgat

SEQ ID NO: 111864 - DNA, 25 bp, probe
gcattagaaggtgattagagagtct

SEQ ID NO: 111865 - DNA, 25 bp, probe
tacagcattagaaggtgattagaga

SEQ ID NO: 111866 - DNA, 25 bp, probe
agaaggtgattagagagtctgttga

SEQ ID NO: 111867 - DNA, 25 bp, probe
aggtgattagagagtctgttgatga

SEQ ID NO: 111868 - DNA, 25 bp, probe
tagaaggtgattagagagtctgttg

SEQ ID NO: 111869 - DNA, 25 bp, probe
cagtaagtacagcattagaaggtga

SEQ ID NO: 111870 - DNA, 25 bp, probe
tagcagtaagtacagcattagaagg

SEQ ID NO: 111871 - DNA, 25 bp, probe
agtaagtacagcattagaaggtgat

SEQ ID NO: 111872 - DNA, 25 bp, probe
ttagaaggtgattagagagtctgtt

SEQ ID NO: 111873 - DNA, 25 bp, probe
agtacagcattagaaggtgattaga

SEQ ID NO: 111874 - DNA, 25 bp, probe
attagaaggtgattagagagtctgt

SEQ ID NO: 111875 - DNA, 25 bp, probe
gtacagcattagaaggtgattagag

SEQ ID NO: 111876 - DNA, 25 bp, probe
atacctcactgtctcgtctgtctat

SEQ ID NO: 111877 - DNA, 25 bp, probe
cattagaaggtgattagagagtctg

SEQ ID NO: 111878 - DNA, 25 bp, probe
gtaagtacagcattagaaggtgatt

SEQ ID NO: 111879 - DNA, 25 bp, probe
gcagtaagtacagcattagaaggtg

SEQ ID NO: 111880 - DNA, 25 bp, probe
agcagtaagtacagcattagaaggt

SEQ ID NO: 111881 - DNA, 25 bp, probe
aagtacagcattagaaggtgattag

SEQ ID NO: 111882 - DNA, 25 bp, probe
atagcagtaagtacagcattagaag

SEQ ID NO: 111883 - DNA, 25 bp, probe
ccatgccgttcttctgtgtaatatt

SEQ ID NO: 111884 - DNA, 25 bp, probe
ctcctatagcagtaagtacagcatt

SEQ ID NO: 111885 - DNA, 25 bp, probe
tctcctatagcagtaagtacagcat

SEQ ID NO: 111886 - DNA, 25 bp, probe
ttctcctatagcagtaagtacagca

SEQ ID NO: 111887 - DNA, 25 bp, probe
tacctcactgtctcgtctgtctatg

SEQ ID NO: 111888 - DNA, 25 bp, probe
catacctcactgtctcgtctgtcta

SEQ ID NO: 111889 - DNA, 25 bp, probe
gtgtttgtgtgggataaatactacc

SEQ ID NO: 111890 - DNA, 25 bp, probe
ggtgtttgtgtgggataaatactac

SEQ ID NO: 111891 - DNA, 25 bp, probe
gggtgtttgtgtgggataaatacta

SEQ ID NO: 111892 - DNA, 25 bp, probe
gtccatcaacacacaaattcgtaaa

SEQ ID NO: 111893 - DNA, 25 bp, probe
gccaagtatcctacgttacaacaat

SEQ ID NO: 111894 - DNA, 25 bp, probe
tcctatagcagtaagtacagcatta

SEQ ID NO: 111895 - DNA, 25 bp, probe
ttatggtgccaagtatcctacgtta

SEQ ID NO: 111896 - DNA, 25 bp, probe
cctatagcagtaagtacagcattag

SEQ ID NO: 111897 - DNA, 25 bp, probe
ccaagtatcctacgttacaacaata

SEQ ID NO: 111898 - DNA, 25 bp, probe
taagtacagcattagaaggtgatta

SEQ ID NO: 111899 - DNA, 25 bp, probe
tgggagaaatagaaatagcctagtt

SEQ ID NO: 111900 - DNA, 25 bp, probe
tatagcagtaagtacagcattagaa

SEQ ID NO: 111901 - DNA, 25 bp, probe
tgattagagagtctgttgatgaaac

SEQ ID NO: 111902 - DNA, 25 bp, probe
tcttactctctcttaccgtcttcat

SEQ ID NO: 111903 - DNA, 25 bp, probe
gtcttactctctcttaccgtcttca

SEQ ID NO: 111904 - DNA, 25 bp, probe
taacagtcttactctctcttaccgt

SEQ ID NO: 111905 - DNA, 25 bp, probe
agtcttactctctcttaccgtcttc

SEQ ID NO: 111906 - DNA, 25 bp, probe
ataacagtcttactctctcttaccg

SEQ ID NO: 111907 - DNA, 25 bp, probe
cttactctctcttaccgtcttcatg

SEQ ID NO: 111908 - DNA, 25 bp, probe
cagtcttactctctcttaccgtctt

SEQ ID NO: 111909 - DNA, 25 bp, probe
aacagtcttactctctcttaccgtc

SEQ ID NO: 111910 - DNA, 25 bp, probe
acagtcttactctctcttaccgtct

SEQ ID NO: 111911 - DNA, 25 bp, probe
ttactctctcttaccgtcttcatgc

SEQ ID NO: 111912 - DNA, 25 bp, probe
gataacagtcttactctctcttacc

SEQ ID NO: 111913 - DNA, 25 bp, probe
ggataacagtcttactctctcttac

SEQ ID NO: 111914 - DNA, 25 bp, probe
ttgcttacggtttctttgttacttt

SEQ ID NO: 111915 - DNA, 25 bp, probe
ccagactcactaaatcctttccaat

SEQ ID NO: 111916 - DNA, 25 bp, probe
tcagcactttgtttcatattctcag

SEQ ID NO: 111917 - DNA, 25 bp, probe
ctcagcactttgtttcatattctca

SEQ ID NO: 111918 - DNA, 25 bp, probe
gttgcttacggtttctttgttactt

SEQ ID NO: 111919 - DNA, 25 bp, probe
cagcactttgtttcatattctcaga

SEQ ID NO: 111920 - DNA, 25 bp, probe
tctcagcactttgtttcatattctc

SEQ ID NO: 111921 - DNA, 25 bp, probe
aaaccagactcactaaatcctttcc

SEQ ID NO: 111922 - DNA, 25 bp, probe
tgcttacggtttctttgttacttta

SEQ ID NO: 111923 - DNA, 25 bp, probe
ctttgtttcatattctcagatgggc

SEQ ID NO: 111924 - DNA, 25 bp, probe
tttgtttcatattctcagatgggct

SEQ ID NO: 111925 - DNA, 25 bp, probe
gtagaatctcagcactttgtttcat

SEQ ID NO: 111926 - DNA, 25 bp, probe
acggtttctttgttactttaggtag

SEQ ID NO: 111927 - DNA, 25 bp, probe
caagaggagtgaaaggttctatgag

SEQ ID NO: 111928 - DNA, 25 bp, probe
gcttacggtttctttgttactttag

SEQ ID NO: 111929 - DNA, 25 bp, probe
tgttgcttacggtttctttgttact

SEQ ID NO: 111930 - DNA, 25 bp, probe
gtgttgcttacggtttctttgttac

SEQ ID NO: 111931 - DNA, 25 bp, probe
atctcagcactttgtttcatattct

SEQ ID NO: 111932 - DNA, 25 bp, probe
tactctctcttaccgtcttcatgct

SEQ ID NO: 111933 - DNA, 25 bp, probe
aagaggagtgaaaggttctatgagt

SEQ ID NO: 111934 - DNA, 25 bp, probe
actttgtttcatattctcagatggg

SEQ ID NO: 111935 - DNA, 25 bp, probe
agcactttgtttcatattctcagat

SEQ ID NO: 111936 - DNA, 25 bp, probe
ttacggtttctttgttactttaggt

SEQ ID NO: 111937 - DNA, 25 bp, probe
accagactcactaaatcctttccaa

SEQ ID NO: 111938 - DNA, 25 bp, probe
aaccagactcactaaatcctttcca

SEQ ID NO: 111939 - DNA, 25 bp, probe
taaaccagactcactaaatcctttc

SEQ ID NO: 111940 - DNA, 25 bp, probe
gcactttgtttcatattctcagatg

SEQ ID NO: 111941 - DNA, 25 bp, probe
agtagaatctcagcactttgtttca

SEQ ID NO: 111942 - DNA, 25 bp, probe
taggtagtagaatctcagcactttg

SEQ ID NO: 111943 - DNA, 25 bp, probe
actttaggtagtagaatctcagcac

SEQ ID NO: 111944 - DNA, 25 bp, probe
ggtagtagaatctcagcactttgtt

SEQ ID NO: 111945 - DNA, 25 bp, probe
agaatctcagcactttgtttcatat

SEQ ID NO: 111946 - DNA, 25 bp, probe
aagcctatccataccaccatcctaa

SEQ ID NO: 111947 - DNA, 25 bp, probe
gagatcattaagattacagaacagc

SEQ ID NO: 111948 - DNA, 25 bp, probe
caagcctatccataccaccatccta

SEQ ID NO: 111949 - DNA, 25 bp, probe
aggagatcattaagattacagaaca

SEQ ID NO: 111950 - DNA, 25 bp, probe
acaggagatcattaagattacagaa

SEQ ID NO: 111951 - DNA, 25 bp, probe
aacaggagatcattaagattacaga

SEQ ID NO: 111952 - DNA, 25 bp, probe
agatcattaagattacagaacagct

SEQ ID NO: 111953 - DNA, 25 bp, probe
ggagatcattaagattacagaacag

SEQ ID NO: 111954 - DNA, 25 bp, probe
caggagatcattaagattacagaac

SEQ ID NO: 111955 - DNA, 25 bp, probe
ctatccataccaccatcctaaaccc

SEQ ID NO: 111956 - DNA, 25 bp, probe
cctatccataccaccatcctaaacc

SEQ ID NO: 111957 - DNA, 25 bp, probe
caagaacagcaagcctatccatacc

SEQ ID NO: 111958 - DNA, 25 bp, probe
ccaagaacagcaagcctatccatac

SEQ ID NO: 111959 - DNA, 25 bp, probe
tccaagaacagcaagcctatccata

SEQ ID NO: 111960 - DNA, 25 bp, probe
ttactttgagaatctcctgtccaag

SEQ ID NO: 111961 - DNA, 25 bp, probe
tttactttgagaatctcctgtccaa

SEQ ID NO: 111962 - DNA, 25 bp, probe
tatccataccaccatcctaaaccca

SEQ ID NO: 111963 - DNA, 25 bp, probe
aagaacagcaagcctatccatacca

SEQ ID NO: 111964 - DNA, 25 bp, probe
gcctatccataccaccatcctaaac

SEQ ID NO: 111965 - DNA, 25 bp, probe
agcctatccataccaccatcctaaa

SEQ ID NO: 111966 - DNA, 25 bp, probe
tactttgagaatctcctgtccaaga

SEQ ID NO: 111967 - DNA, 25 bp, probe
ctttgagaatctcctgtccaagaac

SEQ ID NO: 111968 - DNA, 25 bp, probe
actttgagaatctcctgtccaagaa

SEQ ID NO: 111969 - DNA, 25 bp, probe
tttgagaatctcctgtccaagaaca

SEQ ID NO: 111970 - DNA, 25 bp, probe
agaacagcaagcctatccataccac

SEQ ID NO: 111971 - DNA, 25 bp, probe
gcgaaaacaggagatcattaagatt

SEQ ID NO: 111972 - DNA, 25 bp, probe
tgcgaaaacaggagatcattaagat

SEQ ID NO: 111973 - DNA, 25 bp, probe
aaacaggagatcattaagattacag

SEQ ID NO: 111974 - DNA, 25 bp, probe
atgcgaaaacaggagatcattaaga

SEQ ID NO: 111975 - DNA, 25 bp, probe
gtccaagaacagcaagcctatccat

SEQ ID NO: 111976 - DNA, 25 bp, probe
catgcgaaaacaggagatcattaag

SEQ ID NO: 111977 - DNA, 25 bp, probe
cctacacgaagatttgtgatccagg

SEQ ID NO: 111978 - DNA, 25 bp, probe
cagcaagcctatccataccaccatc

SEQ ID NO: 111979 - DNA, 25 bp, probe
ttttactttgagaatctcctgtcca

SEQ ID NO: 111980 - DNA, 25 bp, probe
gttttactttgagaatctcctgtcc

SEQ ID NO: 111981 - DNA, 25 bp, probe
ccatgcgaaaacaggagatcattaa

SEQ ID NO: 111982 - DNA, 25 bp, probe
agttttactttgagaatctcctgtc

SEQ ID NO: 111983 - DNA, 25 bp, probe
ttgagaatctcctgtccaagaacag

SEQ ID NO: 111984 - DNA, 25 bp, probe
ctacacgaagatttgtgatccaggc

SEQ ID NO: 111985 - DNA, 25 bp, probe
gcctacacgaagatttgtgatccag

SEQ ID NO: 111986 - DNA, 25 bp, probe
cgaaaacaggagatcattaagatta

SEQ ID NO: 111987 - DNA, 25 bp, probe
gaatctcctgtccaagaacagcaag

SEQ ID NO: 111988 - DNA, 25 bp, probe
aagttttactttgagaatctcctgt

SEQ ID NO: 111989 - DNA, 25 bp, probe
gccatgcgaaaacaggagatcatta

SEQ ID NO: 111990 - DNA, 25 bp, probe
actatcactccattacaccatcaag

SEQ ID NO: 111991 - DNA, 25 bp, probe
tactatcactccattacaccatcaa

SEQ ID NO: 111992 - DNA, 25 bp, probe
aacaggactgacagaataagactta

SEQ ID NO: 111993 - DNA, 25 bp, probe
tatcactccattacaccatcaagtc

SEQ ID NO: 111994 - DNA, 25 bp, probe
ctatcactccattacaccatcaagt

SEQ ID NO: 111995 - DNA, 25 bp, probe
aacctaatcttatcttccaagtggc

SEQ ID NO: 111996 - DNA, 25 bp, probe
gtactatcactccattacaccatca

SEQ ID NO: 111997 - DNA, 25 bp, probe
cgtactatcactccattacaccatc

SEQ ID NO: 111998 - DNA, 25 bp, probe
acaggactgacagaataagacttat

SEQ ID NO: 111999 - DNA, 25 bp, probe
caggactgacagaataagacttatc

SEQ ID NO: 112000 - DNA, 25 bp, probe
ctccattacaccatcaagtcctctg

SEQ ID NO: 112001 - DNA, 25 bp, probe
atcactccattacaccatcaagtcc

SEQ ID NO: 112002 - DNA, 25 bp, probe
taacgtactatcactccattacacc

SEQ ID NO: 112003 - DNA, 25 bp, probe
tgtccattcttcatctttccactaa

SEQ ID NO: 112004 - DNA, 25 bp, probe
ggactgacagaataagacttatcca

SEQ ID NO: 112005 - DNA, 25 bp, probe
ccactaacgtactatcactccatta

SEQ ID NO: 112006 - DNA, 25 bp, probe
gtccattcttcatctttccactaac

SEQ ID NO: 112007 - DNA, 25 bp, probe
tggatggcaaacctaatcttatctt

SEQ ID NO: 112008 - DNA, 25 bp, probe
atggatggcaaacctaatcttatct

SEQ ID NO: 112009 - DNA, 25 bp, probe
aggactgacagaataagacttatcc

SEQ ID NO: 112010 - DNA, 25 bp, probe
tccactaacgtactatcactccatt

SEQ ID NO: 112011 - DNA, 25 bp, probe
ttccactaacgtactatcactccat

SEQ ID NO: 112012 - DNA, 25 bp, probe
gatggcaaacctaatcttatcttcc

SEQ ID NO: 112013 - DNA, 25 bp, probe
ggatggcaaacctaatcttatcttc

SEQ ID NO: 112014 - DNA, 25 bp, probe
gactgacagaataagacttatccat

SEQ ID NO: 112015 - DNA, 25 bp, probe
tccattcttcatctttccactaacg

SEQ ID NO: 112016 - DNA, 25 bp, probe
aaacaggactgacagaataagactt

SEQ ID NO: 112017 - DNA, 25 bp, probe
gaaacaggactgacagaataagact

SEQ ID NO: 112018 - DNA, 25 bp, probe
atgtccattcttcatctttccacta

SEQ ID NO: 112019 - DNA, 25 bp, probe
ggcaaacctaatcttatcttccaag

SEQ ID NO: 112020 - DNA, 25 bp, probe
tgaaacaggactgacagaataagac

SEQ ID NO: 112021 - DNA, 25 bp, probe
acgtactatcactccattacaccat

SEQ ID NO: 112022 - DNA, 25 bp, probe
aacgtactatcactccattacacca

SEQ ID NO: 112023 - DNA, 25 bp, probe
actaacgtactatcactccattaca

SEQ ID NO: 112024 - DNA, 25 bp, probe
gcaaacctaatcttatcttccaagt

SEQ ID NO: 112025 - DNA, 25 bp, probe
ctaacgtactatcactccattacac

SEQ ID NO: 112026 - DNA, 25 bp, probe
cactaacgtactatcactccattac

SEQ ID NO: 112027 - DNA, 25 bp, probe
cactccattacaccatcaagtcctc

SEQ ID NO: 112028 - DNA, 25 bp, probe
attaaatacacccagccagttatgc

SEQ ID NO: 112029 - DNA, 25 bp, probe
tattaaatacacccagccagttatg

SEQ ID NO: 112030 - DNA, 25 bp, probe
ggttccaaaggtgaatatcaaatca

SEQ ID NO: 112031 - DNA, 25 bp, probe
actgacagaataagacttatccatt

SEQ ID NO: 112032 - DNA, 25 bp, probe
aatgtccattcttcatctttccact

SEQ ID NO: 112033 - DNA, 25 bp, probe
aggttccaaaggtgaatatcaaatc

SEQ ID NO: 112034 - DNA, 25 bp, probe
aataccacagtcattagccttcttc

SEQ ID NO: 112035 - DNA, 25 bp, probe
gaataccacagtcattagccttctt

SEQ ID NO: 112036 - DNA, 25 bp, probe
ataccacagtcattagccttcttct

SEQ ID NO: 112037 - DNA, 25 bp, probe
gatatgacaatccgtccttccttag

SEQ ID NO: 112038 - DNA, 25 bp, probe
tatgatggatcagaatggaatgacg

SEQ ID NO: 112039 - DNA, 25 bp, probe
atatgacaatccgtccttccttaga

SEQ ID NO: 112040 - DNA, 25 bp, probe
ggaataccacagtcattagccttct

SEQ ID NO: 112041 - DNA, 25 bp, probe
tatgacaatccgtccttccttagaa

SEQ ID NO: 112042 - DNA, 25 bp, probe
tgtagatatgatggatcagaatgga

SEQ ID NO: 112043 - DNA, 25 bp, probe
atatgatggatcagaatggaatgac

SEQ ID NO: 112044 - DNA, 25 bp, probe
gatatgatggatcagaatggaatga

SEQ ID NO: 112045 - DNA, 25 bp, probe
agatatgatggatcagaatggaatg

SEQ ID NO: 112046 - DNA, 25 bp, probe
gttatttggctggttgggtttatag

SEQ ID NO: 112047 - DNA, 25 bp, probe
agttatttggctggttgggtttata

SEQ ID NO: 112048 - DNA, 25 bp, probe
tagttatttggctggttgggtttat

SEQ ID NO: 112049 - DNA, 25 bp, probe
taccacagtcattagccttcttctg

SEQ ID NO: 112050 - DNA, 25 bp, probe
ctttaatgtgggcagcatatagaac

SEQ ID NO: 112051 - DNA, 25 bp, probe
atgtagatatgatggatcagaatgg

SEQ ID NO: 112052 - DNA, 25 bp, probe
attcttggctcattaaagggctaat

SEQ ID NO: 112053 - DNA, 25 bp, probe
gtagatatgatggatcagaatggaa

SEQ ID NO: 112054 - DNA, 25 bp, probe
cctttaatgtgggcagcatatagaa

SEQ ID NO: 112055 - DNA, 25 bp, probe
attaaagggctaatgtatggtggtg

SEQ ID NO: 112056 - DNA, 25 bp, probe
gattcttggctcattaaagggctaa

SEQ ID NO: 112057 - DNA, 25 bp, probe
ctagttatttggctggttgggttta

SEQ ID NO: 112058 - DNA, 25 bp, probe
tagcagggaataccacagtcattag

SEQ ID NO: 112059 - DNA, 25 bp, probe
cacagtcattagccttcttctggaa

SEQ ID NO: 112060 - DNA, 25 bp, probe
ggatgtagatatgatggatcagaat

SEQ ID NO: 112061 - DNA, 25 bp, probe
atcagaatggaatgacgcctttaat

SEQ ID NO: 112062 - DNA, 25 bp, probe
ttcggcagaaagtaatgttaggaac

SEQ ID NO: 112063 - DNA, 25 bp, probe
tattgattcttggctcattaaaggg

SEQ ID NO: 112064 - DNA, 25 bp, probe
taaagggctaatgtatggtggtgtt

SEQ ID NO: 112065 - DNA, 25 bp, probe
tttaatgtgggcagcatatagaaca

SEQ ID NO: 112066 - DNA, 25 bp, probe
gggctacagtacagtttctttcaaa

SEQ ID NO: 112067 - DNA, 25 bp, probe
tttgggctacagtacagtttctttc

SEQ ID NO: 112068 - DNA, 25 bp, probe
ttaaagggctaatgtatggtggtgt

SEQ ID NO: 112069 - DNA, 25 bp, probe
agaatggaatgacgcctttaatgtg

SEQ ID NO: 112070 - DNA, 25 bp, probe
cagaatggaatgacgcctttaatgt

SEQ ID NO: 112071 - DNA, 25 bp, probe
ctagcagggaataccacagtcatta

SEQ ID NO: 112072 - DNA, 25 bp, probe
gtttgggctacagtacagtttcttt

SEQ ID NO: 112073 - DNA, 25 bp, probe
ggcagaaagtaatgttaggaactcc

SEQ ID NO: 112074 - DNA, 25 bp, probe
ctttcctagttatttggctggttgg

SEQ ID NO: 112075 - DNA, 25 bp, probe
cctttcctagttatttggctggttg

SEQ ID NO: 112076 - DNA, 25 bp, probe
tcctttcctagttatttggctggtt

SEQ ID NO: 112077 - DNA, 25 bp, probe
tcagaatggaatgacgcctttaatg

SEQ ID NO: 112078 - DNA, 25 bp, probe
ttctgagtcattcatggtatctctc

SEQ ID NO: 112079 - DNA, 25 bp, probe
attctgagtcattcatggtatctct

SEQ ID NO: 112080 - DNA, 25 bp, probe
tttcctttactttctcacctctgtt

SEQ ID NO: 112081 - DNA, 25 bp, probe
atttcctttactttctcacctctgt

SEQ ID NO: 112082 - DNA, 25 bp, probe
catttagaaactggatttgggaacc

SEQ ID NO: 112083 - DNA, 25 bp, probe
acatttagaaactggatttgggaac

SEQ ID NO: 112084 - DNA, 25 bp, probe
ttcctttactttctcacctctgttg

SEQ ID NO: 112085 - DNA, 25 bp, probe
aattctgagtcattcatggtatctc

SEQ ID NO: 112086 - DNA, 25 bp, probe
acctttaacttgcctcttactcttt

SEQ ID NO: 112087 - DNA, 25 bp, probe
ggattacagagcccaataaaggatt

SEQ ID NO: 112088 - DNA, 25 bp, probe
cctttaacttgcctcttactctttg

SEQ ID NO: 112089 - DNA, 25 bp, probe
ctttaacttgcctcttactctttgc

SEQ ID NO: 112090 - DNA, 25 bp, probe
atcccaccctaacacttaacatatt

SEQ ID NO: 112091 - DNA, 25 bp, probe
tacctttaacttgcctcttactctt

SEQ ID NO: 112092 - DNA, 25 bp, probe
ttacctttaacttgcctcttactct

SEQ ID NO: 112093 - DNA, 25 bp, probe
ctatcccaccctaacacttaacata

SEQ ID NO: 112094 - DNA, 25 bp, probe
gattacagagcccaataaaggattt

SEQ ID NO: 112095 - DNA, 25 bp, probe
tttcctatcccaccctaacacttaa

SEQ ID NO: 112096 - DNA, 25 bp, probe
aacatttagaaactggatttgggaa

SEQ ID NO: 112097 - DNA, 25 bp, probe
aaacatttagaaactggatttggga

SEQ ID NO: 112098 - DNA, 25 bp, probe
atatagaaagcccaagaggagactt

SEQ ID NO: 112099 - DNA, 25 bp, probe
ctttcctatcccaccctaacactta

SEQ ID NO: 112100 - DNA, 25 bp, probe
gaaacatttagaaactggatttggg

SEQ ID NO: 112101 - DNA, 25 bp, probe
cccaccctaacacttaacatattac

SEQ ID NO: 112102 - DNA, 25 bp, probe
tcccaccctaacacttaacatatta

SEQ ID NO: 112103 - DNA, 25 bp, probe
aaggagttctggtgacaagctatac

SEQ ID NO: 112104 - DNA, 25 bp, probe
caaggagttctggtgacaagctata

SEQ ID NO: 112105 - DNA, 25 bp, probe
tatcccaccctaacacttaacatat

SEQ ID NO: 112106 - DNA, 25 bp, probe
tgcctcgtacaattaatagtgatat

SEQ ID NO: 112107 - DNA, 25 bp, probe
tatatagaaagcccaagaggagact

SEQ ID NO: 112108 - DNA, 25 bp, probe
tttaacttgcctcttactctttgcc

SEQ ID NO: 112109 - DNA, 25 bp, probe
ttcctatcccaccctaacacttaac

SEQ ID NO: 112110 - DNA, 25 bp, probe
ttgcctcgtacaattaatagtgata

SEQ ID NO: 112111 - DNA, 25 bp, probe
cctttactttctcacctctgttgaa

SEQ ID NO: 112112 - DNA, 25 bp, probe
attacctttaacttgcctcttactc

SEQ ID NO: 112113 - DNA, 25 bp, probe
cctatcccaccctaacacttaacat

SEQ ID NO: 112114 - DNA, 25 bp, probe
ttatatagaaagcccaagaggagac

SEQ ID NO: 112115 - DNA, 25 bp, probe
tgtttatatagaaagcccaagagga

SEQ ID NO: 112116 - DNA, 25 bp, probe
tgaaacatttagaaactggatttgg

SEQ ID NO: 112117 - DNA, 25 bp, probe
tatttcctttactttctcacctctg

SEQ ID NO: 112118 - DNA, 25 bp, probe
gttctggtgacaagctatacctaat

SEQ ID NO: 112119 - DNA, 25 bp, probe
ggctgaatgagtatatttgaattgg

SEQ ID NO: 112120 - DNA, 25 bp, probe
atttagaaactggatttgggaaccc

SEQ ID NO: 112121 - DNA, 25 bp, probe
ttctggtgacaagctatacctaatt

SEQ ID NO: 112122 - DNA, 25 bp, probe
agcaactaggtacaatgtctatcag

SEQ ID NO: 112123 - DNA, 25 bp, probe
aagcaactaggtacaatgtctatca

SEQ ID NO: 112124 - DNA, 25 bp, probe
caactaggtacaatgtctatcagga

SEQ ID NO: 112125 - DNA, 25 bp, probe
gcaactaggtacaatgtctatcagg

SEQ ID NO: 112126 - DNA, 25 bp, probe
caagcaactaggtacaatgtctatc

SEQ ID NO: 112127 - DNA, 25 bp, probe
gcaagcaactaggtacaatgtctat

SEQ ID NO: 112128 - DNA, 25 bp, probe
aactaggtacaatgtctatcaggaa

SEQ ID NO: 112129 - DNA, 25 bp, probe
ctaggcacattactctctgaacgaa

SEQ ID NO: 112130 - DNA, 25 bp, probe
caccatacgatctgtgtaagtaaga

SEQ ID NO: 112131 - DNA, 25 bp, probe
ccaccatacgatctgtgtaagtaag

SEQ ID NO: 112132 - DNA, 25 bp, probe
caggactgtctccataacatcattg

SEQ ID NO: 112133 - DNA, 25 bp, probe
tccaccatacgatctgtgtaagtaa

SEQ ID NO: 112134 - DNA, 25 bp, probe
ctctttagtctttgtcccttccttt

SEQ ID NO: 112135 - DNA, 25 bp, probe
tttctctttagtctttgtcccttcc

SEQ ID NO: 112136 - DNA, 25 bp, probe
cctttctctttagtctttgtccctt

SEQ ID NO: 112137 - DNA, 25 bp, probe
atattgagctaggcacattactctc

SEQ ID NO: 112138 - DNA, 25 bp, probe
aatattgagctaggcacattactct

SEQ ID NO: 112139 - DNA, 25 bp, probe
ctttctctttagtctttgtcccttc

SEQ ID NO: 112140 - DNA, 25 bp, probe
tattgagctaggcacattactctct

SEQ ID NO: 112141 - DNA, 25 bp, probe
ggcaagcaactaggtacaatgtcta

SEQ ID NO: 112142 - DNA, 25 bp, probe
tctctttagtctttgtcccttcctt

SEQ ID NO: 112143 - DNA, 25 bp, probe
ttctctttagtctttgtcccttcct

SEQ ID NO: 112144 - DNA, 25 bp, probe
ttcaatctcattgtcactggatagt

SEQ ID NO: 112145 - DNA, 25 bp, probe
cttgccctttctctttagtctttgt

SEQ ID NO: 112146 - DNA, 25 bp, probe
gtccaccatacgatctgtgtaagta

SEQ ID NO: 112147 - DNA, 25 bp, probe
ttgccctttctctttagtctttgtc

SEQ ID NO: 112148 - DNA, 25 bp, probe
tacaatgtctatcaggaaagcaaag

SEQ ID NO: 112149 - DNA, 25 bp, probe
gcacattactctctgaacgaaattc

SEQ ID NO: 112150 - DNA, 25 bp, probe
ccaggactgtctccataacatcatt

SEQ ID NO: 112151 - DNA, 25 bp, probe
taggtacaatgtctatcaggaaagc

SEQ ID NO: 112152 - DNA, 25 bp, probe
ttatcccacttgccctttctcttta

SEQ ID NO: 112153 - DNA, 25 bp, probe
accatacgatctgtgtaagtaagat

SEQ ID NO: 112154 - DNA, 25 bp, probe
taggcacattactctctgaacgaaa

SEQ ID NO: 112155 - DNA, 25 bp, probe
tactccaggactgtctccataacat

SEQ ID NO: 112156 - DNA, 25 bp, probe
gtaagattatcccacttgccctttc

SEQ ID NO: 112157 - DNA, 25 bp, probe
tcttattaaggaagagtgttggtct

SEQ ID NO: 112158 - DNA, 25 bp, probe
gtacaatgtctatcaggaaagcaaa

SEQ ID NO: 112159 - DNA, 25 bp, probe
aggactgtctccataacatcattgg

SEQ ID NO: 112160 - DNA, 25 bp, probe
ggtacaatgtctatcaggaaagcaa

SEQ ID NO: 112161 - DNA, 25 bp, probe
taagattatcccacttgccctttct

SEQ ID NO: 112162 - DNA, 25 bp, probe
ggcacattactctctgaacgaaatt

SEQ ID NO: 112163 - DNA, 25 bp, probe
ccctttctctttagtctttgtccct

SEQ ID NO: 112164 - DNA, 25 bp, probe
acttgccctttctctttagtctttg

SEQ ID NO: 112165 - DNA, 25 bp, probe
cacttgccctttctctttagtcttt

SEQ ID NO: 112166 - DNA, 25 bp, probe
tggattcttcacttgttaaggtagt

SEQ ID NO: 112167 - DNA, 25 bp, probe
atggattcttcacttgttaaggtag

SEQ ID NO: 112168 - DNA, 25 bp, probe
catggattcttcacttgttaaggta

SEQ ID NO: 112169 - DNA, 25 bp, probe
ggattcttcacttgttaaggtagta

SEQ ID NO: 112170 - DNA, 25 bp, probe
acatggattcttcacttgttaaggt

SEQ ID NO: 112171 - DNA, 25 bp, probe
ttaaggtagtaacactctggtacag

SEQ ID NO: 112172 - DNA, 25 bp, probe
gttaaggtagtaacactctggtaca

SEQ ID NO: 112173 - DNA, 25 bp, probe
tacatggattcttcacttgttaagg

SEQ ID NO: 112174 - DNA, 25 bp, probe
gattcttcacttgttaaggtagtaa

SEQ ID NO: 112175 - DNA, 25 bp, probe
attcttcacttgttaaggtagtaac

SEQ ID NO: 112176 - DNA, 25 bp, probe
taaggtagtaacactctggtacaga

SEQ ID NO: 112177 - DNA, 25 bp, probe
aaggtagtaacactctggtacagat

SEQ ID NO: 112178 - DNA, 25 bp, probe
aggtagtaacactctggtacagatc

SEQ ID NO: 112179 - DNA, 25 bp, probe
cttgttaaggtagtaacactctggt

SEQ ID NO: 112180 - DNA, 25 bp, probe
acttgttaaggtagtaacactctgg

SEQ ID NO: 112181 - DNA, 25 bp, probe
tgttaaggtagtaacactctggtac

SEQ ID NO: 112182 - DNA, 25 bp, probe
cacttgttaaggtagtaacactctg

SEQ ID NO: 112183 - DNA, 25 bp, probe
tcacttgttaaggtagtaacactct

SEQ ID NO: 112184 - DNA, 25 bp, probe
ttgttaaggtagtaacactctggta

SEQ ID NO: 112185 - DNA, 25 bp, probe
gtagtaacactctggtacagatctc

SEQ ID NO: 112186 - DNA, 25 bp, probe
ttcacttgttaaggtagtaacactc

SEQ ID NO: 112187 - DNA, 25 bp, probe
cttcacttgttaaggtagtaacact

SEQ ID NO: 112188 - DNA, 25 bp, probe
tcttcacttgttaaggtagtaacac

SEQ ID NO: 112189 - DNA, 25 bp, probe
tagtaacactctggtacagatctcc

SEQ ID NO: 112190 - DNA, 25 bp, probe
ggtagtaacactctggtacagatct

SEQ ID NO: 112191 - DNA, 25 bp, probe
ttcttcacttgttaaggtagtaaca

SEQ ID NO: 112192 - DNA, 25 bp, probe
agtaacactctggtacagatctcca

SEQ ID NO: 112193 - DNA, 25 bp, probe
gtaacactctggtacagatctccag

SEQ ID NO: 112194 - DNA, 25 bp, probe
attgattgtctgccattgttgataa

SEQ ID NO: 112195 - DNA, 25 bp, probe
ctaattgattgtctgccattgttga

SEQ ID NO: 112196 - DNA, 25 bp, probe
tgtgtgtcagtgcgtattgtaataa

SEQ ID NO: 112197 - DNA, 25 bp, probe
ttgtgtgtcagtgcgtattgtaata

SEQ ID NO: 112198 - DNA, 25 bp, probe
aattgattgtctgccattgttgata

SEQ ID NO: 112199 - DNA, 25 bp, probe
taattgattgtctgccattgttgat

SEQ ID NO: 112200 - DNA, 25 bp, probe
ttctatctacattctattctgcgga

SEQ ID NO: 112201 - DNA, 25 bp, probe
aacaactgatgccacaatgactatt

SEQ ID NO: 112202 - DNA, 25 bp, probe
attgtgtgtcagtgcgtattgtaat

SEQ ID NO: 112203 - DNA, 25 bp, probe
tatatggacatagcacagatgaacc

SEQ ID NO: 112204 - DNA, 25 bp, probe
tctatctacattctattctgcggat

SEQ ID NO: 112205 - DNA, 25 bp, probe
ctatctacattctattctgcggatg

SEQ ID NO: 112206 - DNA, 25 bp, probe
aattgtgtgtcagtgcgtattgtaa

SEQ ID NO: 112207 - DNA, 25 bp, probe
gctaattgattgtctgccattgttg

SEQ ID NO: 112208 - DNA, 25 bp, probe
attctatctacattctattctgcgg

SEQ ID NO: 112209 - DNA, 25 bp, probe
ctatatggacatagcacagatgaac

SEQ ID NO: 112210 - DNA, 25 bp, probe
tctatatggacatagcacagatgaa

SEQ ID NO: 112211 - DNA, 25 bp, probe
ttctatatggacatagcacagatga

SEQ ID NO: 112212 - DNA, 25 bp, probe
attatagtgacatagagtagttggc

SEQ ID NO: 112213 - DNA, 25 bp, probe
ccttctcagctcacttcaataacta

SEQ ID NO: 112214 - DNA, 25 bp, probe
ctccttctcagctcacttcaataac

SEQ ID NO: 112215 - DNA, 25 bp, probe
tccttctcagctcacttcaataact

SEQ ID NO: 112216 - DNA, 25 bp, probe
tctattctgcggatgttatttctgt

SEQ ID NO: 112217 - DNA, 25 bp, probe
ttgattgtctgccattgttgataaa

SEQ ID NO: 112218 - DNA, 25 bp, probe
gtgtgtcagtgcgtattgtaataaa

SEQ ID NO: 112219 - DNA, 25 bp, probe
ctattctgcggatgttatttctgtt

SEQ ID NO: 112220 - DNA, 25 bp, probe
aattctcaaggttccatagtatctt

SEQ ID NO: 112221 - DNA, 25 bp, probe
cttctcagctcacttcaataactat

SEQ ID NO: 112222 - DNA, 25 bp, probe
ttctattctgcggatgttatttctg

SEQ ID NO: 112223 - DNA, 25 bp, probe
tctgacgggatttctatatggacat

SEQ ID NO: 112224 - DNA, 25 bp, probe
tatctgacgggatttctatatggac

SEQ ID NO: 112225 - DNA, 25 bp, probe
gactgaatatctgacgggatttcta

SEQ ID NO: 112226 - DNA, 25 bp, probe
atctgacgggatttctatatggaca

SEQ ID NO: 112227 - DNA, 25 bp, probe
tctgcggatgttatttctgttatac

SEQ ID NO: 112228 - DNA, 25 bp, probe
ttgtgaaagaactctgagaattagc

SEQ ID NO: 112229 - DNA, 25 bp, probe
attctgcggatgttatttctgttat

SEQ ID NO: 112230 - DNA, 25 bp, probe
ctgacgggatttctatatggacata

SEQ ID NO: 112231 - DNA, 25 bp, probe
gtagactgaatatctgacgggattt

SEQ ID NO: 112232 - DNA, 25 bp, probe
gattgtctgccattgttgataaact

SEQ ID NO: 112233 - DNA, 25 bp, probe
tagactgaatatctgacgggatttc

SEQ ID NO: 112234 - DNA, 25 bp, probe
attgtctgccattgttgataaactg

SEQ ID NO: 112235 - DNA, 25 bp, probe
tgattgtctgccattgttgataaac

SEQ ID NO: 112236 - DNA, 25 bp, probe
aaacaactgatgccacaatgactat

SEQ ID NO: 112237 - DNA, 25 bp, probe
ctgccattgttgataaactgttcta

SEQ ID NO: 112238 - DNA, 25 bp, probe
ctcagtccttagatgtagtttcacc

SEQ ID NO: 112239 - DNA, 25 bp, probe
attctgtaaactgtccctccctaat

SEQ ID NO: 112240 - DNA, 25 bp, probe
gagggagggactttgaatttgatat

SEQ ID NO: 112241 - DNA, 25 bp, probe
gggagggactttgaatttgatatga

SEQ ID NO: 112242 - DNA, 25 bp, probe
agggagggactttgaatttgatatg

SEQ ID NO: 112243 - DNA, 25 bp, probe
agtccttagatgtagtttcacccaa

SEQ ID NO: 112244 - DNA, 25 bp, probe
ccttagatgtagtttcacccaagag

SEQ ID NO: 112245 - DNA, 25 bp, probe
gatgaacggaccataaatgtgttac

SEQ ID NO: 112246 - DNA, 25 bp, probe
agatgaacggaccataaatgtgtta

SEQ ID NO: 112247 - DNA, 25 bp, probe
atgaacggaccataaatgtgttact

SEQ ID NO: 112248 - DNA, 25 bp, probe
tccttagatgtagtttcacccaaga

SEQ ID NO: 112249 - DNA, 25 bp, probe
gtccttagatgtagtttcacccaag

SEQ ID NO: 112250 - DNA, 25 bp, probe
ttctgtaaactgtccctccctaatt

SEQ ID NO: 112251 - DNA, 25 bp, probe
ggagggactttgaatttgatatgaa

SEQ ID NO: 112252 - DNA, 25 bp, probe
aaacctatttagtctggagccaaag

SEQ ID NO: 112253 - DNA, 25 bp, probe
cttagatgtagtttcacccaagagc

SEQ ID NO: 112254 - DNA, 25 bp, probe
cataaatgtgttactggctttgtgc

SEQ ID NO: 112255 - DNA, 25 bp, probe
tcagtccttagatgtagtttcaccc

SEQ ID NO: 112256 - DNA, 25 bp, probe
agactgactcccttatctcttcata

SEQ ID NO: 112257 - DNA, 25 bp, probe
actcagtccttagatgtagtttcac

SEQ ID NO: 112258 - DNA, 25 bp, probe
ttagatgtagtttcacccaagagca

SEQ ID NO: 112259 - DNA, 25 bp, probe
tctgtaaactgtccctccctaattc

SEQ ID NO: 112260 - DNA, 25 bp, probe
cataaacctatttagtctggagcca

SEQ ID NO: 112261 - DNA, 25 bp, probe
cattctgtaaactgtccctccctaa

SEQ ID NO: 112262 - DNA, 25 bp, probe
taaacctatttagtctggagccaaa

SEQ ID NO: 112263 - DNA, 25 bp, probe
tagatgtagtttcacccaagagcat

SEQ ID NO: 112264 - DNA, 25 bp, probe
cagtccttagatgtagtttcaccca

SEQ ID NO: 112265 - DNA, 25 bp, probe
tgaacggaccataaatgtgttactg

SEQ ID NO: 112266 - DNA, 25 bp, probe
ataaacctatttagtctggagccaa

SEQ ID NO: 112267 - DNA, 25 bp, probe
gactgactcccttatctcttcatat

SEQ ID NO: 112268 - DNA, 25 bp, probe
taaactgtccctccctaattccaag

SEQ ID NO: 112269 - DNA, 25 bp, probe
cagatgaacggaccataaatgtgtt

SEQ ID NO: 112270 - DNA, 25 bp, probe
ggctggattggagtggtgattattc

SEQ ID NO: 112271 - DNA, 25 bp, probe
tattatgacctatatgctcctgatt

SEQ ID NO: 112272 - DNA, 25 bp, probe
ttattatgacctatatgctcctgat

SEQ ID NO: 112273 - DNA, 25 bp, probe
gtaaactgtccctccctaattccaa

SEQ ID NO: 112274 - DNA, 25 bp, probe
actgactcccttatctcttcatatt

SEQ ID NO: 112275 - DNA, 25 bp, probe
ctatttagtctggagccaaagggat

SEQ ID NO: 112276 - DNA, 25 bp, probe
ggagggagggactttgaatttgata

SEQ ID NO: 112277 - DNA, 25 bp, probe
tgactcccttatctcttcatattct

SEQ ID NO: 112278 - DNA, 25 bp, probe
tatttagtctggagccaaagggatg

SEQ ID NO: 112279 - DNA, 25 bp, probe
atctcctttctcgggaattgtattt

SEQ ID NO: 112280 - DNA, 25 bp, probe
gtatctcctttctcgggaattgtat

SEQ ID NO: 112281 - DNA, 25 bp, probe
aggctggattggagtggtgattatt

SEQ ID NO: 112282 - DNA, 25 bp, probe
atatccacacaatgaataacagcca

SEQ ID NO: 112283 - DNA, 25 bp, probe
gattcagtcttcttccagttgctaa

SEQ ID NO: 112284 - DNA, 25 bp, probe
agaagactgaccttaccaactacta

SEQ ID NO: 112285 - DNA, 25 bp, probe
atgagaagactgaccttaccaacta

SEQ ID NO: 112286 - DNA, 25 bp, probe
tatatccacacaatgaataacagcc

SEQ ID NO: 112287 - DNA, 25 bp, probe
atagattcagtcttcttccagttgc

SEQ ID NO: 112288 - DNA, 25 bp, probe
tatccacacaatgaataacagccac

SEQ ID NO: 112289 - DNA, 25 bp, probe
gaagactgaccttaccaactactag

SEQ ID NO: 112290 - DNA, 25 bp, probe
gagaagactgaccttaccaactact

SEQ ID NO: 112291 - DNA, 25 bp, probe
aatgagaagactgaccttaccaact

SEQ ID NO: 112292 - DNA, 25 bp, probe
tgagaagactgaccttaccaactac

SEQ ID NO: 112293 - DNA, 25 bp, probe
tgtatagattcagtcttcttccagt

SEQ ID NO: 112294 - DNA, 25 bp, probe
agattcagtcttcttccagttgcta

SEQ ID NO: 112295 - DNA, 25 bp, probe
tagattcagtcttcttccagttgct

SEQ ID NO: 112296 - DNA, 25 bp, probe
gtatatccacacaatgaataacagc

SEQ ID NO: 112297 - DNA, 25 bp, probe
tggattcagttgctactagaacata

SEQ ID NO: 112298 - DNA, 25 bp, probe
actattcatacacgaacaacatgga

SEQ ID NO: 112299 - DNA, 25 bp, probe
aactattcatacacgaacaacatgg

SEQ ID NO: 112300 - DNA, 25 bp, probe
tattcatacacgaacaacatggatg

SEQ ID NO: 112301 - DNA, 25 bp, probe
aagactgaccttaccaactactagc

SEQ ID NO: 112302 - DNA, 25 bp, probe
ctattcatacacgaacaacatggat

SEQ ID NO: 112303 - DNA, 25 bp, probe
ctggattcagttgctactagaacat

SEQ ID NO: 112304 - DNA, 25 bp, probe
gaactattcatacacgaacaacatg

SEQ ID NO: 112305 - DNA, 25 bp, probe
tatagattcagtcttcttccagttg

SEQ ID NO: 112306 - DNA, 25 bp, probe
gtatagattcagtcttcttccagtt

SEQ ID NO: 112307 - DNA, 25 bp, probe
ttgtatagattcagtcttcttccag

SEQ ID NO: 112308 - DNA, 25 bp, probe
cttgtatagattcagtcttcttcca

SEQ ID NO: 112309 - DNA, 25 bp, probe
attcatacacgaacaacatggatgg

SEQ ID NO: 112310 - DNA, 25 bp, probe
ggattcagttgctactagaacatat

SEQ ID NO: 112311 - DNA, 25 bp, probe
tcttgtatagattcagtcttcttcc

SEQ ID NO: 112312 - DNA, 25 bp, probe
attcagtcttcttccagttgctaaa

SEQ ID NO: 112313 - DNA, 25 bp, probe
atccacacaatgaataacagccaca

SEQ ID NO: 112314 - DNA, 25 bp, probe
tagatgtttacccagcagaaattca

SEQ ID NO: 112315 - DNA, 25 bp, probe
ccaaagaattaggctgaatgaaaga

SEQ ID NO: 112316 - DNA, 25 bp, probe
gatgtttacccagcagaaattcaag

SEQ ID NO: 112317 - DNA, 25 bp, probe
aaagacaccagtaaccttcatttca

SEQ ID NO: 112318 - DNA, 25 bp, probe
ttacccagcagaaattcaagcatat

SEQ ID NO: 112319 - DNA, 25 bp, probe
aaattagcatcacttgaccctattg

SEQ ID NO: 112320 - DNA, 25 bp, probe
aaatgagaagactgaccttaccaac

SEQ ID NO: 112321 - DNA, 25 bp, probe
ccctattgaccactttctctttgaa

SEQ ID NO: 112322 - DNA, 25 bp, probe
tttacccagcagaaattcaagcata

SEQ ID NO: 112323 - DNA, 25 bp, probe
agatgtttacccagcagaaattcaa

SEQ ID NO: 112324 - DNA, 25 bp, probe
ctagatgtttacccagcagaaattc

SEQ ID NO: 112325 - DNA, 25 bp, probe
gaccctattgaccactttctctttg

SEQ ID NO: 112326 - DNA, 25 bp, probe
ttgttgtctgtgtctgtctgaataa

SEQ ID NO: 112327 - DNA, 25 bp, probe
tgttgtctgtgtctgtctgaataac

SEQ ID NO: 112328 - DNA, 25 bp, probe
ttgtgattctcagactaacttccag

SEQ ID NO: 112329 - DNA, 25 bp, probe
cttgtgattctcagactaacttcca

SEQ ID NO: 112330 - DNA, 25 bp, probe
tcttgtgattctcagactaacttcc

SEQ ID NO: 112331 - DNA, 25 bp, probe
ttgtctgtgtctgtctgaataacct

SEQ ID NO: 112332 - DNA, 25 bp, probe
tgtgattctcagactaacttccaga

SEQ ID NO: 112333 - DNA, 25 bp, probe
gtatatatgtgaacagtgagatggc

SEQ ID NO: 112334 - DNA, 25 bp, probe
tctgtgatacattatccgactaagg

SEQ ID NO: 112335 - DNA, 25 bp, probe
gttgtctgtgtctgtctgaataacc

SEQ ID NO: 112336 - DNA, 25 bp, probe
gaatccagcctctgttagatatgtc

SEQ ID NO: 112337 - DNA, 25 bp, probe
tgtctgtgtctgtctgaataacctg

SEQ ID NO: 112338 - DNA, 25 bp, probe
ctgtataatcggcttctggagtgaa

SEQ ID NO: 112339 - DNA, 25 bp, probe
tgtgatacattatccgactaaggac

SEQ ID NO: 112340 - DNA, 25 bp, probe
gtgatacattatccgactaaggact

SEQ ID NO: 112341 - DNA, 25 bp, probe
ctgtgatacattatccgactaagga

SEQ ID NO: 112342 - DNA, 25 bp, probe
ttggcaatattaccttgacagaatc

SEQ ID NO: 112343 - DNA, 25 bp, probe
atacattatccgactaaggactctg

SEQ ID NO: 112344 - DNA, 25 bp, probe
tgatacattatccgactaaggactc

SEQ ID NO: 112345 - DNA, 25 bp, probe
tggcaatattaccttgacagaatca

SEQ ID NO: 112346 - DNA, 25 bp, probe
tacattatccgactaaggactctgg

SEQ ID NO: 112347 - DNA, 25 bp, probe
ctgtctgaataacctgcgtgtctaa

SEQ ID NO: 112348 - DNA, 25 bp, probe
aatccagcctctgttagatatgtcc

SEQ ID NO: 112349 - DNA, 25 bp, probe
gatacattatccgactaaggactct

SEQ ID NO: 112350 - DNA, 25 bp, probe
ggcaatattaccttgacagaatcat

SEQ ID NO: 112351 - DNA, 25 bp, probe
ggaatccagcctctgttagatatgt

SEQ ID NO: 112352 - DNA, 25 bp, probe
gtctgtataatcggcttctggagtg

SEQ ID NO: 112353 - DNA, 25 bp, probe
attggcaatattaccttgacagaat

SEQ ID NO: 112354 - DNA, 25 bp, probe
tctgtataatcggcttctggagtga

SEQ ID NO: 112355 - DNA, 25 bp, probe
tttgttgtctgtgtctgtctgaata

SEQ ID NO: 112356 - DNA, 25 bp, probe
atctgtgatacattatccgactaag

SEQ ID NO: 112357 - DNA, 25 bp, probe
cgtgaaatgtgaatgattattggca

SEQ ID NO: 112358 - DNA, 25 bp, probe
ctaagagaagaaagataaggaggct

SEQ ID NO: 112359 - DNA, 25 bp, probe
cgtgtatatatgtgaacagtgagat

SEQ ID NO: 112360 - DNA, 25 bp, probe
tttgtgctttgaagagagtgaattt

SEQ ID NO: 112361 - DNA, 25 bp, probe
gcaatattaccttgacagaatcatg

SEQ ID NO: 112362 - DNA, 25 bp, probe
ctttgtgctttgaagagagtgaatt

SEQ ID NO: 112363 - DNA, 25 bp, probe
tattggcaatattaccttgacagaa

SEQ ID NO: 112364 - DNA, 25 bp, probe
ttattggcaatattaccttgacaga

SEQ ID NO: 112365 - DNA, 25 bp, probe
gtgaaatgtgaatgattattggcaa

SEQ ID NO: 112366 - DNA, 25 bp, probe
tgtatatatgtgaacagtgagatgg

SEQ ID NO: 112367 - DNA, 25 bp, probe
tctaagagaagaaagataaggaggc

SEQ ID NO: 112368 - DNA, 25 bp, probe
gtgattctcagactaacttccagaa

SEQ ID NO: 112369 - DNA, 25 bp, probe
gaaatcaggtggttaaacgggtaaa

SEQ ID NO: 112370 - DNA, 25 bp, probe
ccatgatagagaacttcaatgccaa

SEQ ID NO: 112371 - DNA, 25 bp, probe
cgagccatgatagagaacttcaatg

SEQ ID NO: 112372 - DNA, 25 bp, probe
agagaacttcaatgccaaatatgtc

SEQ ID NO: 112373 - DNA, 25 bp, probe
ccgagaactaccagatgaaatacta

SEQ ID NO: 112374 - DNA, 25 bp, probe
gaacttcaatgccaaatatgtctcc

SEQ ID NO: 112375 - DNA, 25 bp, probe
gagccatgatagagaacttcaatgc

SEQ ID NO: 112376 - DNA, 25 bp, probe
ctcttacattgctgaggacgagaat

SEQ ID NO: 112377 - DNA, 25 bp, probe
agaacttcaatgccaaatatgtctc

SEQ ID NO: 112378 - DNA, 25 bp, probe
gagaacttcaatgccaaatatgtct

SEQ ID NO: 112379 - DNA, 25 bp, probe
ctctattccaacaccctcaactttc

SEQ ID NO: 112380 - DNA, 25 bp, probe
cgagaactaccagatgaaatactac

SEQ ID NO: 112381 - DNA, 25 bp, probe
ctattccaacaccctcaactttcag

SEQ ID NO: 112382 - DNA, 25 bp, probe
aacttcaatgccaaatatgtctccc

SEQ ID NO: 112383 - DNA, 25 bp, probe
tagagaacttcaatgccaaatatgt

SEQ ID NO: 112384 - DNA, 25 bp, probe
cccgagaactaccagatgaaatact

SEQ ID NO: 112385 - DNA, 25 bp, probe
tcgagccatgatagagaacttcaat

SEQ ID NO: 112386 - DNA, 25 bp, probe
accagatgaaatactacttctacca

SEQ ID NO: 112387 - DNA, 25 bp, probe
tattccaacaccctcaactttcaga

SEQ ID NO: 112388 - DNA, 25 bp, probe
tctattccaacaccctcaactttca

SEQ ID NO: 112389 - DNA, 25 bp, probe
cttcaatgccaaatatgtctccctg

SEQ ID NO: 112390 - DNA, 25 bp, probe
atgatagagaacttcaatgccaaat

SEQ ID NO: 112391 - DNA, 25 bp, probe
acttcaatgccaaatatgtctccct

SEQ ID NO: 112392 - DNA, 25 bp, probe
tgatagagaacttcaatgccaaata

SEQ ID NO: 112393 - DNA, 25 bp, probe
attccaacaccctcaactttcagat

SEQ ID NO: 112394 - DNA, 25 bp, probe
catgatagagaacttcaatgccaaa

SEQ ID NO: 112395 - DNA, 25 bp, probe
cctctattccaacaccctcaacttt

SEQ ID NO: 112396 - DNA, 25 bp, probe
agccatgatagagaacttcaatgcc

SEQ ID NO: 112397 - DNA, 25 bp, probe
gagaactaccagatgaaatactact

SEQ ID NO: 112398 - DNA, 25 bp, probe
atagagaacttcaatgccaaatatg

SEQ ID NO: 112399 - DNA, 25 bp, probe
gccatgatagagaacttcaatgcca

SEQ ID NO: 112400 - DNA, 25 bp, probe
ccagatgaaatactacttctaccat

SEQ ID NO: 112401 - DNA, 25 bp, probe
tcttacattgctgaggacgagaatg

SEQ ID NO: 112402 - DNA, 25 bp, probe
gatagagaacttcaatgccaaatat

SEQ ID NO: 112403 - DNA, 25 bp, probe
catggacatatcacctcattggctg

SEQ ID NO: 112404 - DNA, 25 bp, probe
gcccgagaactaccagatgaaatac

SEQ ID NO: 112405 - DNA, 25 bp, probe
agaactaccagatgaaatactactt

SEQ ID NO: 112406 - DNA, 25 bp, probe
taccagatgaaatactacttctacc

SEQ ID NO: 112407 - DNA, 25 bp, probe
atggacatatcacctcattggctgt

SEQ ID NO: 112408 - DNA, 25 bp, probe
ttccaacaccctcaactttcagatc

SEQ ID NO: 112409 - DNA, 25 bp, probe
acctctattccaacaccctcaactt

SEQ ID NO: 112410 - DNA, 25 bp, probe
aactaccagatgaaatactacttct

SEQ ID NO: 112411 - DNA, 25 bp, probe
tgcccgagaactaccagatgaaata

SEQ ID NO: 112412 - DNA, 25 bp, probe
gaactaccagatgaaatactacttc

SEQ ID NO: 112413 - DNA, 25 bp, probe
agtgaagtggagcccaaatactatg

SEQ ID NO: 112414 - DNA, 25 bp, probe
ttagagaagatggatatgaccagtg

SEQ ID NO: 112415 - DNA, 25 bp, probe
tagagaagatggatatgaccagtgg

SEQ ID NO: 112416 - DNA, 25 bp, probe
ggagagacagttggattctttagag

SEQ ID NO: 112417 - DNA, 25 bp, probe
gagagacagttggattctttagaga

SEQ ID NO: 112418 - DNA, 25 bp, probe
gattcctaatcactcagagcagtct

SEQ ID NO: 112419 - DNA, 25 bp, probe
aggagagacagttggattctttaga

SEQ ID NO: 112420 - DNA, 25 bp, probe
caggagagacagttggattctttag

SEQ ID NO: 112421 - DNA, 25 bp, probe
gaagatggatatgaccagtggctat

SEQ ID NO: 112422 - DNA, 25 bp, probe
aagatggatatgaccagtggctatg

SEQ ID NO: 112423 - DNA, 25 bp, probe
ggattcctaatcactcagagcagtc

SEQ ID NO: 112424 - DNA, 25 bp, probe
agaagatggatatgaccagtggcta

SEQ ID NO: 112425 - DNA, 25 bp, probe
gcaggagagacagttggattcttta

SEQ ID NO: 112426 - DNA, 25 bp, probe
tttagagaagatggatatgaccagt

SEQ ID NO: 112427 - DNA, 25 bp, probe
gagagggattcctaatcactcagag

SEQ ID NO: 112428 - DNA, 25 bp, probe
ctttagagaagatggatatgaccag

SEQ ID NO: 112429 - DNA, 25 bp, probe
agatggatatgaccagtggctatgg

SEQ ID NO: 112430 - DNA, 25 bp, probe
cagttggattctttagagaagatgg

SEQ ID NO: 112431 - DNA, 25 bp, probe
agttggattctttagagaagatgga

SEQ ID NO: 112432 - DNA, 25 bp, probe
agacagttggattctttagagaaga

SEQ ID NO: 112433 - DNA, 25 bp, probe
agagacagttggattctttagagaa

SEQ ID NO: 112434 - DNA, 25 bp, probe
gagacagttggattctttagagaag

SEQ ID NO: 112435 - DNA, 25 bp, probe
gagaagatggatatgaccagtggct

SEQ ID NO: 112436 - DNA, 25 bp, probe
agagaagatggatatgaccagtggc

SEQ ID NO: 112437 - DNA, 25 bp, probe
tctttagagaagatggatatgacca

SEQ ID NO: 112438 - DNA, 25 bp, probe
acagttggattctttagagaagatg

SEQ ID NO: 112439 - DNA, 25 bp, probe
gttggattctttagagaagatggat

SEQ ID NO: 112440 - DNA, 25 bp, probe
gacagttggattctttagagaagat

SEQ ID NO: 112441 - DNA, 25 bp, probe
attcctaatcactcagagcagtctg

SEQ ID NO: 112442 - DNA, 25 bp, probe
ttctttagagaagatggatatgacc

SEQ ID NO: 112443 - DNA, 25 bp, probe
agagggattcctaatcactcagagc

SEQ ID NO: 112444 - DNA, 25 bp, probe
agggattcctaatcactcagagcag

SEQ ID NO: 112445 - DNA, 25 bp, probe
gagggattcctaatcactcagagca

SEQ ID NO: 112446 - DNA, 25 bp, probe
ttcctaatcactcagagcagtctgt

SEQ ID NO: 112447 - DNA, 25 bp, probe
gggattcctaatcactcagagcagt

SEQ ID NO: 112448 - DNA, 25 bp, probe
ttggattctttagagaagatggata

SEQ ID NO: 112449 - DNA, 25 bp, probe
ggcaggagagacagttggattcttt

SEQ ID NO: 112450 - DNA, 25 bp, probe
ctaatcactcagagcagtctgtgac

SEQ ID NO: 112451 - DNA, 25 bp, probe
tggattctttagagaagatggatat

SEQ ID NO: 112452 - DNA, 25 bp, probe
ggattctttagagaagatggatatg

SEQ ID NO: 112453 - DNA, 25 bp, probe
tgagagggattcctaatcactcaga

SEQ ID NO: 112454 - DNA, 25 bp, probe
gatggatatgaccagtggctatggc

SEQ ID NO: 112455 - DNA, 25 bp, probe
atcactcagagcagtctgtgactta

SEQ ID NO: 112456 - DNA, 25 bp, probe
taatcactcagagcagtctgtgact

SEQ ID NO: 112457 - DNA, 25 bp, probe
tcctaatcactcagagcagtctgtg

SEQ ID NO: 112458 - DNA, 25 bp, probe
tatttctgctctggaataaagttgc

SEQ ID NO: 112459 - DNA, 25 bp, probe
tttgtactttgtggagagaatgtgt

SEQ ID NO: 112460 - DNA, 25 bp, probe
agaatacttgaagaaacagagtggc

SEQ ID NO: 112461 - DNA, 25 bp, probe
aagaatacttgaagaaacagagtgg

SEQ ID NO: 112462 - DNA, 25 bp, probe
ggataagtttctattctgtcagtgt

SEQ ID NO: 112463 - DNA, 25 bp, probe
tggataagtttctattctgtcagtg

SEQ ID NO: 112464 - DNA, 25 bp, probe
ttgtactttgtggagagaatgtgtg

SEQ ID NO: 112465 - DNA, 25 bp, probe
tactttgtggagagaatgtgtgtgt

SEQ ID NO: 112466 - DNA, 25 bp, probe
aaatgacttatttctgctctggaat

SEQ ID NO: 112467 - DNA, 25 bp, probe
aatgacttatttctgctctggaata

SEQ ID NO: 112468 - DNA, 25 bp, probe
gagtccatcaagatgcagcagtata

SEQ ID NO: 112469 - DNA, 25 bp, probe
gtactttgtggagagaatgtgtgtg

SEQ ID NO: 112470 - DNA, 25 bp, probe
ttggataagtttctattctgtcagt

SEQ ID NO: 112471 - DNA, 25 bp, probe
tgtactttgtggagagaatgtgtgt

SEQ ID NO: 112472 - DNA, 25 bp, probe
agtccatcaagatgcagcagtatac

SEQ ID NO: 112473 - DNA, 25 bp, probe
ataaagttgcagatgattcaaaccg

SEQ ID NO: 112474 - DNA, 25 bp, probe
agtttctattctgtcagtgttaaag

SEQ ID NO: 112475 - DNA, 25 bp, probe
gtttctattctgtcagtgttaaaga

SEQ ID NO: 112476 - DNA, 25 bp, probe
gataagtttctattctgtcagtgtt

SEQ ID NO: 112477 - DNA, 25 bp, probe
cttcggacagacatatgggatattc

SEQ ID NO: 112478 - DNA, 25 bp, probe
aataaagttgcagatgattcaaacc

SEQ ID NO: 112479 - DNA, 25 bp, probe
ctttgtggagagaatgtgtgtgtgt

SEQ ID NO: 112480 - DNA, 25 bp, probe
actttgtggagagaatgtgtgtgtg

SEQ ID NO: 112481 - DNA, 25 bp, probe
tttggataagtttctattctgtcag

SEQ ID NO: 112482 - DNA, 25 bp, probe
catcaagatgcagcagtatacggag

SEQ ID NO: 112483 - DNA, 25 bp, probe
aagtttctattctgtcagtgttaaa

SEQ ID NO: 112484 - DNA, 25 bp, probe
tttgtggagagaatgtgtgtgtgtg

SEQ ID NO: 112485 - DNA, 25 bp, probe
ctggaataaagttgcagatgattca

SEQ ID NO: 112486 - DNA, 25 bp, probe
aagatgcttggttgtgttgaggttt

SEQ ID NO: 112487 - DNA, 25 bp, probe
tgacttatttctgctctggaataaa

SEQ ID NO: 112488 - DNA, 25 bp, probe
ccttcggacagacatatgggatatt

SEQ ID NO: 112489 - DNA, 25 bp, probe
gccactggggactttatttatttct

SEQ ID NO: 112490 - DNA, 25 bp, probe
ttttgtactttgtggagagaatgtg

SEQ ID NO: 112491 - DNA, 25 bp, probe
tggaataaagttgcagatgattcaa

SEQ ID NO: 112492 - DNA, 25 bp, probe
gtccatcaagatgcagcagtatacg

SEQ ID NO: 112493 - DNA, 25 bp, probe
atgacttatttctgctctggaataa

SEQ ID NO: 112494 - DNA, 25 bp, probe
gacttatttctgctctggaataaag

SEQ ID NO: 112495 - DNA, 25 bp, probe
attttgtactttgtggagagaatgt

SEQ ID NO: 112496 - DNA, 25 bp, probe
ctgtccctctagtgccttctttaga

SEQ ID NO: 112497 - DNA, 25 bp, probe
ggaataaagttgcagatgattcaaa

SEQ ID NO: 112498 - DNA, 25 bp, probe
aaaatgacttatttctgctctggaa

SEQ ID NO: 112499 - DNA, 25 bp, probe
ccactggggactttatttatttcta

SEQ ID NO: 112500 - DNA, 25 bp, probe
gaccaacgacgacatcaagaggatt

SEQ ID NO: 112501 - DNA, 25 bp, probe
atttatttctagttctttcctcccc

SEQ ID NO: 112502 - DNA, 25 bp, probe
atgatggttaagaggagagactact

SEQ ID NO: 112503 - DNA, 25 bp, probe
gaagatgatggttaagaggagagac

SEQ ID NO: 112504 - DNA, 25 bp, probe
agaagatgatggttaagaggagaga

SEQ ID NO: 112505 - DNA, 25 bp, probe
gagaagatgatggttaagaggagag

SEQ ID NO: 112506 - DNA, 25 bp, probe
gatgatggttaagaggagagactac

SEQ ID NO: 112507 - DNA, 25 bp, probe
agatgatggttaagaggagagacta

SEQ ID NO: 112508 - DNA, 25 bp, probe
aagatgatggttaagaggagagact

SEQ ID NO: 112509 - DNA, 25 bp, probe
gatggttaagaggagagactacttg

SEQ ID NO: 112510 - DNA, 25 bp, probe
tgatggttaagaggagagactactt

SEQ ID NO: 112511 - DNA, 25 bp, probe
ggagaagatgatggttaagaggaga

SEQ ID NO: 112512 - DNA, 25 bp, probe
tggagaagatgatggttaagaggag

SEQ ID NO: 112513 - DNA, 25 bp, probe
ctggagaagatgatggttaagagga

SEQ ID NO: 112514 - DNA, 25 bp, probe
atggttaagaggagagactacttgg

SEQ ID NO: 112515 - DNA, 25 bp, probe
gttaagaggagagactacttggacc

SEQ ID NO: 112516 - DNA, 25 bp, probe
ggttaagaggagagactacttggac

SEQ ID NO: 112517 - DNA, 25 bp, probe
tggttaagaggagagactacttgga

SEQ ID NO: 112518 - DNA, 25 bp, probe
taagaggagagactacttggacctt

SEQ ID NO: 112519 - DNA, 25 bp, probe
ttaagaggagagactacttggacct

SEQ ID NO: 112520 - DNA, 25 bp, probe
actatccttcctctctgtgatgctt

SEQ ID NO: 112521 - DNA, 25 bp, probe
aagacctggagaagatgatggttaa

SEQ ID NO: 112522 - DNA, 25 bp, probe
acctggagaagatgatggttaagag

SEQ ID NO: 112523 - DNA, 25 bp, probe
gacctggagaagatgatggttaaga

SEQ ID NO: 112524 - DNA, 25 bp, probe
agacctggagaagatgatggttaag

SEQ ID NO: 112525 - DNA, 25 bp, probe
cctggagaagatgatggttaagagg

SEQ ID NO: 112526 - DNA, 25 bp, probe
ctccatctgactccctgatttatga

SEQ ID NO: 112527 - DNA, 25 bp, probe
cactccatctgactccctgatttat

SEQ ID NO: 112528 - DNA, 25 bp, probe
tccatctgactccctgatttatgac

SEQ ID NO: 112529 - DNA, 25 bp, probe
actccatctgactccctgatttatg

SEQ ID NO: 112530 - DNA, 25 bp, probe
ctatccttcctctctgtgatgcttt

SEQ ID NO: 112531 - DNA, 25 bp, probe
atctgactccctgatttatgacgac

SEQ ID NO: 112532 - DNA, 25 bp, probe
catctgactccctgatttatgacga

SEQ ID NO: 112533 - DNA, 25 bp, probe
aagaggagagactacttggaccttg

SEQ ID NO: 112534 - DNA, 25 bp, probe
acaaactctatggtagaatttccca

SEQ ID NO: 112535 - DNA, 25 bp, probe
aacaaactctatggtagaatttccc

SEQ ID NO: 112536 - DNA, 25 bp, probe
aaagacctggagaagatgatggtta

SEQ ID NO: 112537 - DNA, 25 bp, probe
cactatccttcctctctgtgatgct

SEQ ID NO: 112538 - DNA, 25 bp, probe
ccatctgactccctgatttatgacg

SEQ ID NO: 112539 - DNA, 25 bp, probe
catatctacaccacgcaaagtgatg

SEQ ID NO: 112540 - DNA, 25 bp, probe
tcatatctacaccacgcaaagtgat

SEQ ID NO: 112541 - DNA, 25 bp, probe
atcatatctacaccacgcaaagtga

SEQ ID NO: 112542 - DNA, 25 bp, probe
gatcatatctacaccacgcaaagtg

SEQ ID NO: 112543 - DNA, 25 bp, probe
atatctacaccacgcaaagtgatgt

SEQ ID NO: 112544 - DNA, 25 bp, probe
ccactccatctgactccctgattta

SEQ ID NO: 112545 - DNA, 25 bp, probe
tatctacaccacgcaaagtgatgta

SEQ ID NO: 112546 - DNA, 25 bp, probe
atagccatcacttagtaaccacaga

SEQ ID NO: 112547 - DNA, 25 bp, probe
catagccatcacttagtaaccacag

SEQ ID NO: 112548 - DNA, 25 bp, probe
tagccatcacttagtaaccacagaa

SEQ ID NO: 112549 - DNA, 25 bp, probe
tctgaccttagtagcaacatccaat

SEQ ID NO: 112550 - DNA, 25 bp, probe
agtcttatggagtcttatgatggat

SEQ ID NO: 112551 - DNA, 25 bp, probe
agattctcagagtgattcattgtgt

SEQ ID NO: 112552 - DNA, 25 bp, probe
aagtcttatggagtcttatgatgga

SEQ ID NO: 112553 - DNA, 25 bp, probe
cggtgttcggaagataattgtacta

SEQ ID NO: 112554 - DNA, 25 bp, probe
ctgaccttagtagcaacatccaatg

SEQ ID NO: 112555 - DNA, 25 bp, probe
ccttggaatagattctcagagtgat

SEQ ID NO: 112556 - DNA, 25 bp, probe
atatcggtgttcggaagataattgt

SEQ ID NO: 112557 - DNA, 25 bp, probe
catatcggtgttcggaagataattg

SEQ ID NO: 112558 - DNA, 25 bp, probe
tatcggtgttcggaagataattgta

SEQ ID NO: 112559 - DNA, 25 bp, probe
atcggtgttcggaagataattgtac

SEQ ID NO: 112560 - DNA, 25 bp, probe
ctctgaccttagtagcaacatccaa

SEQ ID NO: 112561 - DNA, 25 bp, probe
ccatatcggtgttcggaagataatt

SEQ ID NO: 112562 - DNA, 25 bp, probe
gattctcagagtgattcattgtgta

SEQ ID NO: 112563 - DNA, 25 bp, probe
acacatcagaactcatacaggagaa

SEQ ID NO: 112564 - DNA, 25 bp, probe
aacacatcagaactcatacaggaga

SEQ ID NO: 112565 - DNA, 25 bp, probe
gtcttatggagtcttatgatggatt

SEQ ID NO: 112566 - DNA, 25 bp, probe
ggtgttcggaagataattgtactaa

SEQ ID NO: 112567 - DNA, 25 bp, probe
actcagcatgtcaacatatctcaag

SEQ ID NO: 112568 - DNA, 25 bp, probe
tagattctcagagtgattcattgtg

SEQ ID NO: 112569 - DNA, 25 bp, probe
attctcagagtgattcattgtgtac

SEQ ID NO: 112570 - DNA, 25 bp, probe
gacctctgaccttagtagcaacatc

SEQ ID NO: 112571 - DNA, 25 bp, probe
tcggtgttcggaagataattgtact

SEQ ID NO: 112572 - DNA, 25 bp, probe
taatcctcagaacaatggagcaata

SEQ ID NO: 112573 - DNA, 25 bp, probe
aatcctcagaacaatggagcaataa

SEQ ID NO: 112574 - DNA, 25 bp, probe
ttaatcctcagaacaatggagcaat

SEQ ID NO: 112575 - DNA, 25 bp, probe
gaagaagccatcagaatagcgtcta

SEQ ID NO: 112576 - DNA, 25 bp, probe
agcatagccatcacttagtaaccac

SEQ ID NO: 112577 - DNA, 25 bp, probe
cagcatagccatcacttagtaacca

SEQ ID NO: 112578 - DNA, 25 bp, probe
cttggaatagattctcagagtgatt

SEQ ID NO: 112579 - DNA, 25 bp, probe
gcatagccatcacttagtaaccaca

SEQ ID NO: 112580 - DNA, 25 bp, probe
tgttcggaagataattgtactaagt

SEQ ID NO: 112581 - DNA, 25 bp, probe
aagaagccatcagaatagcgtctag

SEQ ID NO: 112582 - DNA, 25 bp, probe
agacctctgaccttagtagcaacat

SEQ ID NO: 112583 - DNA, 25 bp, probe
gactcagcatgtcaacatatctcaa

SEQ ID NO: 112584 - DNA, 25 bp, probe
aatctggactgagtcaacaagttac

SEQ ID NO: 112585 - DNA, 25 bp, probe
caatctggactgagtcaacaagtta

SEQ ID NO: 112586 - DNA, 25 bp, probe
agcagcatagccatcacttagtaac

SEQ ID NO: 112587 - DNA, 25 bp, probe
cagcagcatagccatcacttagtaa

SEQ ID NO: 112588 - DNA, 25 bp, probe
tggaatagattctcagagtgattca

SEQ ID NO: 112589 - DNA, 25 bp, probe
acagaaacacatcagaactcataca

SEQ ID NO: 112590 - DNA, 25 bp, probe
ggagttacttctatgcctgattaca

SEQ ID NO: 112591 - DNA, 25 bp, probe
gttacttctatgcctgattacaagc

SEQ ID NO: 112592 - DNA, 25 bp, probe
ttacttctatgcctgattacaagcc

SEQ ID NO: 112593 - DNA, 25 bp, probe
gagttacttctatgcctgattacaa

SEQ ID NO: 112594 - DNA, 25 bp, probe
tacttctatgcctgattacaagcca

SEQ ID NO: 112595 - DNA, 25 bp, probe
agttacttctatgcctgattacaag

SEQ ID NO: 112596 - DNA, 25 bp, probe
cttctatgcctgattacaagccaag

SEQ ID NO: 112597 - DNA, 25 bp, probe
tctatgcctgattacaagccaagtt

SEQ ID NO: 112598 - DNA, 25 bp, probe
ttctatgcctgattacaagccaagt

SEQ ID NO: 112599 - DNA, 25 bp, probe
aggagttacttctatgcctgattac

SEQ ID NO: 112600 - DNA, 25 bp, probe
acttctatgcctgattacaagccaa

SEQ ID NO: 112601 - DNA, 25 bp, probe
acctcagaatctgcttattaacaca

SEQ ID NO: 112602 - DNA, 25 bp, probe
cctcagaatctgcttattaacacag

SEQ ID NO: 112603 - DNA, 25 bp, probe
aacctcagaatctgcttattaacac

SEQ ID NO: 112604 - DNA, 25 bp, probe
ctattccctggagattctgagattg

SEQ ID NO: 112605 - DNA, 25 bp, probe
tattccctggagattctgagattga

SEQ ID NO: 112606 - DNA, 25 bp, probe
cctattccctggagattctgagatt

SEQ ID NO: 112607 - DNA, 25 bp, probe
tatgcctgattacaagccaagtttc

SEQ ID NO: 112608 - DNA, 25 bp, probe
ctatgcctgattacaagccaagttt

SEQ ID NO: 112609 - DNA, 25 bp, probe
attccctggagattctgagattgac

SEQ ID NO: 112610 - DNA, 25 bp, probe
atctcaagaaattcatggatgcctc

SEQ ID NO: 112611 - DNA, 25 bp, probe
gatctcaagaaattcatggatgcct

SEQ ID NO: 112612 - DNA, 25 bp, probe
agattctgagattgaccagctcttc

SEQ ID NO: 112613 - DNA, 25 bp, probe
gagattctgagattgaccagctctt

SEQ ID NO: 112614 - DNA, 25 bp, probe
atgaagatggacggagcttgttatc

SEQ ID NO: 112615 - DNA, 25 bp, probe
gatgaagatggacggagcttgttat

SEQ ID NO: 112616 - DNA, 25 bp, probe
accttaaacctcagaatctgcttat

SEQ ID NO: 112617 - DNA, 25 bp, probe
gaccttaaacctcagaatctgctta

SEQ ID NO: 112618 - DNA, 25 bp, probe
cctcatcaagagctatctgttccag

SEQ ID NO: 112619 - DNA, 25 bp, probe
ccctattccctggagattctgagat

SEQ ID NO: 112620 - DNA, 25 bp, probe
ctcaagaaattcatggatgcctctg

SEQ ID NO: 112621 - DNA, 25 bp, probe
tctcaagaaattcatggatgcctct

SEQ ID NO: 112622 - DNA, 25 bp, probe
ccttaaacctcagaatctgcttatt

SEQ ID NO: 112623 - DNA, 25 bp, probe
aaacctcagaatctgcttattaaca

SEQ ID NO: 112624 - DNA, 25 bp, probe
agaccttaaacctcagaatctgctt

SEQ ID NO: 112625 - DNA, 25 bp, probe
gattctgagattgaccagctcttcc

SEQ ID NO: 112626 - DNA, 25 bp, probe
caccgagaccttaaacctcagaatc

SEQ ID NO: 112627 - DNA, 25 bp, probe
cagaatctgcttattaacacagagg

SEQ ID NO: 112628 - DNA, 25 bp, probe
gagaccttaaacctcagaatctgct

SEQ ID NO: 112629 - DNA, 25 bp, probe
accgagaccttaaacctcagaatct

SEQ ID NO: 112630 - DNA, 25 bp, probe
tcagaatctgcttattaacacagag

SEQ ID NO: 112631 - DNA, 25 bp, probe
ctcagaatctgcttattaacacaga

SEQ ID NO: 112632 - DNA, 25 bp, probe
aagatctcaagaaattcatggatgc

SEQ ID NO: 112633 - DNA, 25 bp, probe
gcaccaagatctcaagaaattcatg

SEQ ID NO: 112634 - DNA, 25 bp, probe
gctctgtcagccttactatatactg

SEQ ID NO: 112635 - DNA, 25 bp, probe
cgctctgtcagccttactatatact

SEQ ID NO: 112636 - DNA, 25 bp, probe
ccgctctgtcagccttactatatac

SEQ ID NO: 112637 - DNA, 25 bp, probe
accgctctgtcagccttactatata

SEQ ID NO: 112638 - DNA, 25 bp, probe
aaccgctctgtcagccttactatat

SEQ ID NO: 112639 - DNA, 25 bp, probe
ctctgtcagccttactatatactga

SEQ ID NO: 112640 - DNA, 25 bp, probe
gaaccgctctgtcagccttactata

SEQ ID NO: 112641 - DNA, 25 bp, probe
attggaaagaaaatgaaccgctctg

SEQ ID NO: 112642 - DNA, 25 bp, probe
gaaagaaaatgaaccgctctgtcag

SEQ ID NO: 112643 - DNA, 25 bp, probe
ttggaaagaaaatgaaccgctctgt

SEQ ID NO: 112644 - DNA, 25 bp, probe
tggaaagaaaatgaaccgctctgtc

SEQ ID NO: 112645 - DNA, 25 bp, probe
ggaaagaaaatgaaccgctctgtca

SEQ ID NO: 112646 - DNA, 25 bp, probe
aaagaaaatgaaccgctctgtcagc

SEQ ID NO: 112647 - DNA, 25 bp, probe
aaaatgaaccgctctgtcagcctta

SEQ ID NO: 112648 - DNA, 25 bp, probe
cttgccttgtaatcaacagagagag

SEQ ID NO: 112649 - DNA, 25 bp, probe
ggatcagagaacttgccagatagaa

SEQ ID NO: 112650 - DNA, 25 bp, probe
tgccttgtaatcaacagagagagaa

SEQ ID NO: 112651 - DNA, 25 bp, probe
ttgccttgtaatcaacagagagaga

SEQ ID NO: 112652 - DNA, 25 bp, probe
tcaacagagagagaaactaaacaca

SEQ ID NO: 112653 - DNA, 25 bp, probe
atttggttgagagggttattggaaa

SEQ ID NO: 112654 - DNA, 25 bp, probe
cagagagagaaactaaacacatacg

SEQ ID NO: 112655 - DNA, 25 bp, probe
caggatcagagaacttgccagatag

SEQ ID NO: 112656 - DNA, 25 bp, probe
caacagagagagaaactaaacacat

SEQ ID NO: 112657 - DNA, 25 bp, probe
tagcatttggttgagagggttattg

SEQ ID NO: 112658 - DNA, 25 bp, probe
aggatcagagaacttgccagataga

SEQ ID NO: 112659 - DNA, 25 bp, probe
tttggttgagagggttattggaaag

SEQ ID NO: 112660 - DNA, 25 bp, probe
atcaacagagagagaaactaaacac

SEQ ID NO: 112661 - DNA, 25 bp, probe
catttggttgagagggttattggaa

SEQ ID NO: 112662 - DNA, 25 bp, probe
tgagaagtgaaataagaacctagca

SEQ ID NO: 112663 - DNA, 25 bp, probe
agatggtctgagaagtgaaataaga

SEQ ID NO: 112664 - DNA, 25 bp, probe
ctagcatttggttgagagggttatt

SEQ ID NO: 112665 - DNA, 25 bp, probe
ctgagaagtgaaataagaacctagc

SEQ ID NO: 112666 - DNA, 25 bp, probe
atggtctgagaagtgaaataagaac

SEQ ID NO: 112667 - DNA, 25 bp, probe
gatcagagaacttgccagatagaaa

SEQ ID NO: 112668 - DNA, 25 bp, probe
acagagagagaaactaaacacatac

SEQ ID NO: 112669 - DNA, 25 bp, probe
gatggtctgagaagtgaaataagaa

SEQ ID NO: 112670 - DNA, 25 bp, probe
gagaagatgacaatgccaatcatag

SEQ ID NO: 112671 - DNA, 25 bp, probe
gagaagtgaaataagaacctagcat

SEQ ID NO: 112672 - DNA, 25 bp, probe
aatcaacagagagagaaactaaaca

SEQ ID NO: 112673 - DNA, 25 bp, probe
gcaagacaacaggatcagagaactt

SEQ ID NO: 112674 - DNA, 25 bp, probe
ccttgtaatcaacagagagagaaac

SEQ ID NO: 112675 - DNA, 25 bp, probe
acaggatcagagaacttgccagata

SEQ ID NO: 112676 - DNA, 25 bp, probe
gccttgtaatcaacagagagagaaa

SEQ ID NO: 112677 - DNA, 25 bp, probe
agaagatgacaatgccaatcatagg

SEQ ID NO: 112678 - DNA, 25 bp, probe
ggagaagatgacaatgccaatcata

SEQ ID NO: 112679 - DNA, 25 bp, probe
aagacaacaggatcagagaacttgc

SEQ ID NO: 112680 - DNA, 25 bp, probe
ttgctctatttggctcctaacagtt

SEQ ID NO: 112681 - DNA, 25 bp, probe
gcttgccttgtaatcaacagagaga

SEQ ID NO: 112682 - DNA, 25 bp, probe
agtgaaataagaacctagcatttgg

SEQ ID NO: 112683 - DNA, 25 bp, probe
agaagtgaaataagaacctagcatt

SEQ ID NO: 112684 - DNA, 25 bp, probe
gtaagatggtgcttgctctatttgg

SEQ ID NO: 112685 - DNA, 25 bp, probe
atggagaagatgacaatgccaatca

SEQ ID NO: 112686 - DNA, 25 bp, probe
gtctgagaagtgaaataagaaccta

SEQ ID NO: 112687 - DNA, 25 bp, probe
cttgtaatcaacagagagagaaact

SEQ ID NO: 112688 - DNA, 25 bp, probe
aacagagagagaaactaaacacata

SEQ ID NO: 112689 - DNA, 25 bp, probe
catggagaagatgacaatgccaatc

SEQ ID NO: 112690 - DNA, 25 bp, probe
ccacctaagttctcttcgcttaaag

SEQ ID NO: 112691 - DNA, 25 bp, probe
cttgctctatttggctcctaacagt

SEQ ID NO: 112692 - DNA, 25 bp, probe
ggtacagacagaggatcaatatcag

SEQ ID NO: 112693 - DNA, 25 bp, probe
tggtacagacagaggatcaatatca

SEQ ID NO: 112694 - DNA, 25 bp, probe
gtacagacagaggatcaatatcagt

SEQ ID NO: 112695 - DNA, 25 bp, probe
atggtacagacagaggatcaatatc

SEQ ID NO: 112696 - DNA, 25 bp, probe
ctatggtacagacagaggatcaata

SEQ ID NO: 112697 - DNA, 25 bp, probe
tacagacagaggatcaatatcagtt

SEQ ID NO: 112698 - DNA, 25 bp, probe
gctatggtacagacagaggatcaat

SEQ ID NO: 112699 - DNA, 25 bp, probe
tatggtacagacagaggatcaatat

SEQ ID NO: 112700 - DNA, 25 bp, probe
ctgtgcttcatttctaactgtgtaa

SEQ ID NO: 112701 - DNA, 25 bp, probe
tattgtaaagatactgctgacctgt

SEQ ID NO: 112702 - DNA, 25 bp, probe
attgtaaagatactgctgacctgtg

SEQ ID NO: 112703 - DNA, 25 bp, probe
tgtgcttcatttctaactgtgtaaa

SEQ ID NO: 112704 - DNA, 25 bp, probe
cctgtgcttcatttctaactgtgta

SEQ ID NO: 112705 - DNA, 25 bp, probe
tgcttcatttctaactgtgtaaact

SEQ ID NO: 112706 - DNA, 25 bp, probe
gtgcttcatttctaactgtgtaaac

SEQ ID NO: 112707 - DNA, 25 bp, probe
aattattccaggtggaccaagaatt

SEQ ID NO: 112708 - DNA, 25 bp, probe
acagacagaggatcaatatcagttt

SEQ ID NO: 112709 - DNA, 25 bp, probe
gcttcatttctaactgtgtaaactt

SEQ ID NO: 112710 - DNA, 25 bp, probe
agctatggtacagacagaggatcaa

SEQ ID NO: 112711 - DNA, 25 bp, probe
gacctgtgcttcatttctaactgtg

SEQ ID NO: 112712 - DNA, 25 bp, probe
ctgacctgtgcttcatttctaactg

SEQ ID NO: 112713 - DNA, 25 bp, probe
gtattgtaaagatactgctgacctg

SEQ ID NO: 112714 - DNA, 25 bp, probe
acctgtgcttcatttctaactgtgt

SEQ ID NO: 112715 - DNA, 25 bp, probe
acttagtgggactattacacacaaa

SEQ ID NO: 112716 - DNA, 25 bp, probe
gctaacaactacttagtgggactat

SEQ ID NO: 112717 - DNA, 25 bp, probe
taaagatactgctgacctgtgcttc

SEQ ID NO: 112718 - DNA, 25 bp, probe
ctacttagtgggactattacacaca

SEQ ID NO: 112719 - DNA, 25 bp, probe
actacttagtgggactattacacac

SEQ ID NO: 112720 - DNA, 25 bp, probe
tgacctgtgcttcatttctaactgt

SEQ ID NO: 112721 - DNA, 25 bp, probe
cagctatggtacagacagaggatca

SEQ ID NO: 112722 - DNA, 25 bp, probe
ccttcttaacttctagctaacaact

SEQ ID NO: 112723 - DNA, 25 bp, probe
tccttcttaacttctagctaacaac

SEQ ID NO: 112724 - DNA, 25 bp, probe
gtccttcttaacttctagctaacaa

SEQ ID NO: 112725 - DNA, 25 bp, probe
tacttagtgggactattacacacaa

SEQ ID NO: 112726 - DNA, 25 bp, probe
agtccttcttaacttctagctaaca

SEQ ID NO: 112727 - DNA, 25 bp, probe
gtaaagatactgctgacctgtgctt

SEQ ID NO: 112728 - DNA, 25 bp, probe
aactacttagtgggactattacaca

SEQ ID NO: 112729 - DNA, 25 bp, probe
acaactacttagtgggactattaca

SEQ ID NO: 112730 - DNA, 25 bp, probe
ttgtaaagatactgctgacctgtgc

SEQ ID NO: 112731 - DNA, 25 bp, probe
caactacttagtgggactattacac

SEQ ID NO: 112732 - DNA, 25 bp, probe
attattccaggtggaccaagaattc

SEQ ID NO: 112733 - DNA, 25 bp, probe
gcacttgagaagtccttcttaactt

SEQ ID NO: 112734 - DNA, 25 bp, probe
agatactgctgacctgtgcttcatt

SEQ ID NO: 112735 - DNA, 25 bp, probe
aagatactgctgacctgtgcttcat

SEQ ID NO: 112736 - DNA, 25 bp, probe
ttaaggagtgtggtaaatatgtgct

SEQ ID NO: 112737 - DNA, 25 bp, probe
taaggagtgtggtaaatatgtgctc

SEQ ID NO: 112738 - DNA, 25 bp, probe
ctcggtacaggttgtaagttctaca

SEQ ID NO: 112739 - DNA, 25 bp, probe
gatcaaacagagaagcacatcaaca

SEQ ID NO: 112740 - DNA, 25 bp, probe
agtagaagtgatggatgaaaccaag

SEQ ID NO: 112741 - DNA, 25 bp, probe
tagaagtgatggatgaaaccaagtg

SEQ ID NO: 112742 - DNA, 25 bp, probe
gtagaagtgatggatgaaaccaagt

SEQ ID NO: 112743 - DNA, 25 bp, probe
cttaaggagtgtggtaaatatgtgc

SEQ ID NO: 112744 - DNA, 25 bp, probe
gctcggtacaggttgtaagttctac

SEQ ID NO: 112745 - DNA, 25 bp, probe
tcttaaggagtgtggtaaatatgtg

SEQ ID NO: 112746 - DNA, 25 bp, probe
gtaaatatgtgctccgcttttgttg

SEQ ID NO: 112747 - DNA, 25 bp, probe
ttccatagaacattttccagaagtt

SEQ ID NO: 112748 - DNA, 25 bp, probe
gtgtggtaaatatgtgctccgcttt

SEQ ID NO: 112749 - DNA, 25 bp, probe
ggctcggtacaggttgtaagttcta

SEQ ID NO: 112750 - DNA, 25 bp, probe
ggtaaatatgtgctccgcttttgtt

SEQ ID NO: 112751 - DNA, 25 bp, probe
tctccgtgaaatcatggtacagtca

SEQ ID NO: 112752 - DNA, 25 bp, probe
atcttaaggagtgtggtaaatatgt

SEQ ID NO: 112753 - DNA, 25 bp, probe
gaagtgatggatgaaaccaagtgct

SEQ ID NO: 112754 - DNA, 25 bp, probe
agaagtgatggatgaaaccaagtgc

SEQ ID NO: 112755 - DNA, 25 bp, probe
tcggtacaggttgtaagttctacaa

SEQ ID NO: 112756 - DNA, 25 bp, probe
taaatatgtgctccgcttttgttgc

SEQ ID NO: 112757 - DNA, 25 bp, probe
gtggtaaatatgtgctccgcttttg

SEQ ID NO: 112758 - DNA, 25 bp, probe
agtgtggtaaatatgtgctccgctt

SEQ ID NO: 112759 - DNA, 25 bp, probe
aagtgatggatgaaaccaagtgctg

SEQ ID NO: 112760 - DNA, 25 bp, probe
tggtaaatatgtgctccgcttttgt

SEQ ID NO: 112761 - DNA, 25 bp, probe
tgtggtaaatatgtgctccgctttt

SEQ ID NO: 112762 - DNA, 25 bp, probe
acaggttgtaagttctacaaatgga

SEQ ID NO: 112763 - DNA, 25 bp, probe
gagtgtggtaaatatgtgctccgct

SEQ ID NO: 112764 - DNA, 25 bp, probe
cggtacaggttgtaagttctacaaa

SEQ ID NO: 112765 - DNA, 25 bp, probe
atgagtgctttgcccatcagtgaat

SEQ ID NO: 112766 - DNA, 25 bp, probe
tacaggttgtaagttctacaaatgg

SEQ ID NO: 112767 - DNA, 25 bp, probe
ggtacaggttgtaagttctacaaat

SEQ ID NO: 112768 - DNA, 25 bp, probe
tgatcaaacagagaagcacatcaac

SEQ ID NO: 112769 - DNA, 25 bp, probe
gtgatcaaacagagaagcacatcaa

SEQ ID NO: 112770 - DNA, 25 bp, probe
aagatcctgctttgtgatcaaacag

SEQ ID NO: 112771 - DNA, 25 bp, probe
gttccatagaacattttccagaagt

SEQ ID NO: 112772 - DNA, 25 bp, probe
tccatagaacattttccagaagttc

SEQ ID NO: 112773 - DNA, 25 bp, probe
agttccatagaacattttccagaag

SEQ ID NO: 112774 - DNA, 25 bp, probe
caagatcctgctttgtgatcaaaca

SEQ ID NO: 112775 - DNA, 25 bp, probe
ttttgtcaaaacatgagtgctttgc

SEQ ID NO: 112776 - DNA, 25 bp, probe
cctgctttgtgatcaaacagagaag

SEQ ID NO: 112777 - DNA, 25 bp, probe
gtacaggttgtaagttctacaaatg

SEQ ID NO: 112778 - DNA, 25 bp, probe
gatcctgctttgtgatcaaacagag

SEQ ID NO: 112779 - DNA, 25 bp, probe
tgaaatcatggtacagtcactgccc

SEQ ID NO: 112780 - DNA, 25 bp, probe
cgacctgtccttcaatgttgataat

SEQ ID NO: 112781 - DNA, 25 bp, probe
gacctgtccttcaatgttgataata

SEQ ID NO: 112782 - DNA, 25 bp, probe
acctgtccttcaatgttgataataa

SEQ ID NO: 112783 - DNA, 25 bp, probe
aatgtcattgaaagccttattacgc

SEQ ID NO: 112784 - DNA, 25 bp, probe
tcgacctgtccttcaatgttgataa

SEQ ID NO: 112785 - DNA, 25 bp, probe
tgttgataataaatgtctcagccaa

SEQ ID NO: 112786 - DNA, 25 bp, probe
aaatgtcattgaaagccttattacg

SEQ ID NO: 112787 - DNA, 25 bp, probe
atgttgataataaatgtctcagcca

SEQ ID NO: 112788 - DNA, 25 bp, probe
caaatcagtcggttgaaattcagag

SEQ ID NO: 112789 - DNA, 25 bp, probe
ctcgacctgtccttcaatgttgata

SEQ ID NO: 112790 - DNA, 25 bp, probe
aaatcagtcggttgaaattcagagg

SEQ ID NO: 112791 - DNA, 25 bp, probe
gttgataataaatgtctcagccaaa

SEQ ID NO: 112792 - DNA, 25 bp, probe
tcagatcctttcaataaacaagact

SEQ ID NO: 112793 - DNA, 25 bp, probe
aatgttgataataaatgtctcagcc

SEQ ID NO: 112794 - DNA, 25 bp, probe
gtcgtctgccattcaatgtttacat

SEQ ID NO: 112795 - DNA, 25 bp, probe
ttgaaattcagaggagtcagaatga

SEQ ID NO: 112796 - DNA, 25 bp, probe
gttgaaattcagaggagtcagaatg

SEQ ID NO: 112797 - DNA, 25 bp, probe
tgtattaaatgtcattgaaagcctt

SEQ ID NO: 112798 - DNA, 25 bp, probe
gagtcgtctgccattcaatgtttac

SEQ ID NO: 112799 - DNA, 25 bp, probe
ggttgaaattcagaggagtcagaat

SEQ ID NO: 112800 - DNA, 25 bp, probe
aatcagtcggttgaaattcagagga

SEQ ID NO: 112801 - DNA, 25 bp, probe
cagatcctttcaataaacaagactt

SEQ ID NO: 112802 - DNA, 25 bp, probe
ttcagatcctttcaataaacaagac

SEQ ID NO: 112803 - DNA, 25 bp, probe
gcaaatcagtcggttgaaattcaga

SEQ ID NO: 112804 - DNA, 25 bp, probe
atgtattaaatgtcattgaaagcct

SEQ ID NO: 112805 - DNA, 25 bp, probe
atcagtcggttgaaattcagaggag

SEQ ID NO: 112806 - DNA, 25 bp, probe
tgctcccaggaaggtagtttaaatc

SEQ ID NO: 112807 - DNA, 25 bp, probe
tttacatttatgttctgcaagacgc

SEQ ID NO: 112808 - DNA, 25 bp, probe
gtttacatttatgttctgcaagacg

SEQ ID NO: 112809 - DNA, 25 bp, probe
agtcgtctgccattcaatgtttaca

SEQ ID NO: 112810 - DNA, 25 bp, probe
agatcctttcaataaacaagacttg

SEQ ID NO: 112811 - DNA, 25 bp, probe
atgtcattgaaagccttattacgct

SEQ ID NO: 112812 - DNA, 25 bp, probe
cctgtccttcaatgttgataataaa

SEQ ID NO: 112813 - DNA, 25 bp, probe
cggttgaaattcagaggagtcagaa

SEQ ID NO: 112814 - DNA, 25 bp, probe
caatgttgataataaatgtctcagc

SEQ ID NO: 112815 - DNA, 25 bp, probe
ttacatttatgttctgcaagacgct

SEQ ID NO: 112816 - DNA, 25 bp, probe
gataaggaaggcacaagacgttctc

SEQ ID NO: 112817 - DNA, 25 bp, probe
tttgttctgctcagtttctggagag

SEQ ID NO: 112818 - DNA, 25 bp, probe
tttcagatcctttcaataaacaaga

SEQ ID NO: 112819 - DNA, 25 bp, probe
tgtttacatttatgttctgcaagac

SEQ ID NO: 112820 - DNA, 25 bp, probe
taaactttctgaagtgctgatgtac

SEQ ID NO: 112821 - DNA, 25 bp, probe
ggagtcgtctgccattcaatgttta

SEQ ID NO: 112822 - DNA, 25 bp, probe
gaatgactcgacctgtccttcaatg

SEQ ID NO: 112823 - DNA, 25 bp, probe
agaatgactcgacctgtccttcaat

SEQ ID NO: 112824 - DNA, 25 bp, probe
atatactcttctcctccgatctcac

SEQ ID NO: 112825 - DNA, 25 bp, probe
catatactcttctcctccgatctca

SEQ ID NO: 112826 - DNA, 25 bp, probe
tcagcatatactcttctcctccgat

SEQ ID NO: 112827 - DNA, 25 bp, probe
tatactcttctcctccgatctcaca

SEQ ID NO: 112828 - DNA, 25 bp, probe
gcatatactcttctcctccgatctc

SEQ ID NO: 112829 - DNA, 25 bp, probe
agcatatactcttctcctccgatct

SEQ ID NO: 112830 - DNA, 25 bp, probe
cagcatatactcttctcctccgatc

SEQ ID NO: 112831 - DNA, 25 bp, probe
ctcagcatatactcttctcctccga

SEQ ID NO: 112832 - DNA, 25 bp, probe
agcctcagcatatactcttctcctc

SEQ ID NO: 112833 - DNA, 25 bp, probe
aatggtcttaatggtgctcacttta

SEQ ID NO: 112834 - DNA, 25 bp, probe
atactcttctcctccgatctcacag

SEQ ID NO: 112835 - DNA, 25 bp, probe
atggtcttaatggtgctcactttag

SEQ ID NO: 112836 - DNA, 25 bp, probe
aaatggtcttaatggtgctcacttt

SEQ ID NO: 112837 - DNA, 25 bp, probe
caggagccacttaagagattattgt

SEQ ID NO: 112838 - DNA, 25 bp, probe
taccaggagccacttaagagattat

SEQ ID NO: 112839 - DNA, 25 bp, probe
ccaggagccacttaagagattattg

SEQ ID NO: 112840 - DNA, 25 bp, probe
ctaccaggagccacttaagagatta

SEQ ID NO: 112841 - DNA, 25 bp, probe
gagcctcagcatatactcttctcct

SEQ ID NO: 112842 - DNA, 25 bp, probe
tgtatgagtcgtgtgtaatttatgt

SEQ ID NO: 112843 - DNA, 25 bp, probe
cttgccattaagaagtcccataacc

SEQ ID NO: 112844 - DNA, 25 bp, probe
accaggagccacttaagagattatt

SEQ ID NO: 112845 - DNA, 25 bp, probe
acaatgtgaatcctacagtttccag

SEQ ID NO: 112846 - DNA, 25 bp, probe
cctcagcatatactcttctcctccg

SEQ ID NO: 112847 - DNA, 25 bp, probe
gcctcagcatatactcttctcctcc

SEQ ID NO: 112848 - DNA, 25 bp, probe
aggagccacttaagagattattgtg

SEQ ID NO: 112849 - DNA, 25 bp, probe
ttcatgtatgagtcgtgtgtaattt

SEQ ID NO: 112850 - DNA, 25 bp, probe
tttcatgtatgagtcgtgtgtaatt

SEQ ID NO: 112851 - DNA, 25 bp, probe
atccttcttcccttcatcaccaaag

SEQ ID NO: 112852 - DNA, 25 bp, probe
ccacttaagagattattgtgctgtt

SEQ ID NO: 112853 - DNA, 25 bp, probe
gaagacagaagctcttactgacttg

SEQ ID NO: 112854 - DNA, 25 bp, probe
ttgccattaagaagtcccataaccc

SEQ ID NO: 112855 - DNA, 25 bp, probe
caatgtgaatcctacagtttccagg

SEQ ID NO: 112856 - DNA, 25 bp, probe
gccacttaagagattattgtgctgt

SEQ ID NO: 112857 - DNA, 25 bp, probe
atgtatgagtcgtgtgtaatttatg

SEQ ID NO: 112858 - DNA, 25 bp, probe
tgaagacagaagctcttactgactt

SEQ ID NO: 112859 - DNA, 25 bp, probe
aatgtgaatcctacagtttccaggt

SEQ ID NO: 112860 - DNA, 25 bp, probe
atccaaataaatacccactttcaaa

SEQ ID NO: 112861 - DNA, 25 bp, probe
aatccaaataaatacccactttcaa

SEQ ID NO: 112862 - DNA, 25 bp, probe
aaatccaaataaatacccactttca

SEQ ID NO: 112863 - DNA, 25 bp, probe
cattcaaagctacccgaactatgtt

SEQ ID NO: 112864 - DNA, 25 bp, probe
gatccttcttcccttcatcaccaaa

SEQ ID NO: 112865 - DNA, 25 bp, probe
tcatgtatgagtcgtgtgtaattta

SEQ ID NO: 112866 - DNA, 25 bp, probe
attcaaagctacccgaactatgttg

SEQ ID NO: 112867 - DNA, 25 bp, probe
gacactcatcctttctcacacttcc

SEQ ID NO: 112868 - DNA, 25 bp, probe
ggtggcagagttatgaggtaagaag

SEQ ID NO: 112869 - DNA, 25 bp, probe
attgaggaaatgcgaaaggttgtat

SEQ ID NO: 112870 - DNA, 25 bp, probe
gtggcagagttatgaggtaagaagc

SEQ ID NO: 112871 - DNA, 25 bp, probe
tggtggcagagttatgaggtaagaa

SEQ ID NO: 112872 - DNA, 25 bp, probe
gaggagtccatgaagaatatcagct

SEQ ID NO: 112873 - DNA, 25 bp, probe
atattacgacttagtgccctctgac

SEQ ID NO: 112874 - DNA, 25 bp, probe
catattacgacttagtgccctctga

SEQ ID NO: 112875 - DNA, 25 bp, probe
gaaatgcgaaaggttgtatgtgatc

SEQ ID NO: 112876 - DNA, 25 bp, probe
tggagttcacagcctagaagaagaa

SEQ ID NO: 112877 - DNA, 25 bp, probe
ttggagttcacagcctagaagaaga

SEQ ID NO: 112878 - DNA, 25 bp, probe
ttgaggaaatgcgaaaggttgtatg

SEQ ID NO: 112879 - DNA, 25 bp, probe
ggaaatgcgaaaggttgtatgtgat

SEQ ID NO: 112880 - DNA, 25 bp, probe
atttggagttcacagcctagaagaa

SEQ ID NO: 112881 - DNA, 25 bp, probe
ctttgactcctttaaatgtgctgat

SEQ ID NO: 112882 - DNA, 25 bp, probe
aaatgtgctgatatttatgccctcg

SEQ ID NO: 112883 - DNA, 25 bp, probe
ggaggagtccatgaagaatatcagc

SEQ ID NO: 112884 - DNA, 25 bp, probe
actttgactcctttaaatgtgctga

SEQ ID NO: 112885 - DNA, 25 bp, probe
ccatattacgacttagtgccctctg

SEQ ID NO: 112886 - DNA, 25 bp, probe
gaggaaatgcgaaaggttgtatgtg

SEQ ID NO: 112887 - DNA, 25 bp, probe
ggagttcacagcctagaagaagaaa

SEQ ID NO: 112888 - DNA, 25 bp, probe
tttgactcctttaaatgtgctgata

SEQ ID NO: 112889 - DNA, 25 bp, probe
tttggagttcacagcctagaagaag

SEQ ID NO: 112890 - DNA, 25 bp, probe
tgactcctttaaatgtgctgatatt

SEQ ID NO: 112891 - DNA, 25 bp, probe
ttgactcctttaaatgtgctgatat

SEQ ID NO: 112892 - DNA, 25 bp, probe
tggcagagttatgaggtaagaagct

SEQ ID NO: 112893 - DNA, 25 bp, probe
aggaaatgcgaaaggttgtatgtga

SEQ ID NO: 112894 - DNA, 25 bp, probe
tgaggaaatgcgaaaggttgtatgt

SEQ ID NO: 112895 - DNA, 25 bp, probe
catttggagttcacagcctagaaga

SEQ ID NO: 112896 - DNA, 25 bp, probe
tatattgggagattgctcgaagatg

SEQ ID NO: 112897 - DNA, 25 bp, probe
gtatattgggagattgctcgaagat

SEQ ID NO: 112898 - DNA, 25 bp, probe
ctggtggcagagttatgaggtaaga

SEQ ID NO: 112899 - DNA, 25 bp, probe
ttgtatattgggagattgctcgaag

SEQ ID NO: 112900 - DNA, 25 bp, probe
cttgtatattgggagattgctcgaa

SEQ ID NO: 112901 - DNA, 25 bp, probe
tgaaacactttgactcctttaaatg

SEQ ID NO: 112902 - DNA, 25 bp, probe
cagagttatgaggtaagaagctggc

SEQ ID NO: 112903 - DNA, 25 bp, probe
gcagagttatgaggtaagaagctgg

SEQ ID NO: 112904 - DNA, 25 bp, probe
ggcagagttatgaggtaagaagctg

SEQ ID NO: 112905 - DNA, 25 bp, probe
aacactttgactcctttaaatgtgc

SEQ ID NO: 112906 - DNA, 25 bp, probe
actggtggcagagttatgaggtaag

SEQ ID NO: 112907 - DNA, 25 bp, probe
tgtatattgggagattgctcgaaga

SEQ ID NO: 112908 - DNA, 25 bp, probe
aatgtgctgatatttatgccctcgg

SEQ ID NO: 112909 - DNA, 25 bp, probe
cactttgactcctttaaatgtgctg

SEQ ID NO: 112910 - DNA, 25 bp, probe
taaatgtgctgatatttatgccctc

SEQ ID NO: 112911 - DNA, 25 bp, probe
acactttgactcctttaaatgtgct

SEQ ID NO: 112912 - DNA, 25 bp, probe
ccataccgacatctacaactaatct

SEQ ID NO: 112913 - DNA, 25 bp, probe
ctcattcttcctaacaagcaatctg

SEQ ID NO: 112914 - DNA, 25 bp, probe
tacctcattcttcctaacaagcaat

SEQ ID NO: 112915 - DNA, 25 bp, probe
ttacctcattcttcctaacaagcaa

SEQ ID NO: 112916 - DNA, 25 bp, probe
attacctcattcttcctaacaagca

SEQ ID NO: 112917 - DNA, 25 bp, probe
cctcattcttcctaacaagcaatct

SEQ ID NO: 112918 - DNA, 25 bp, probe
tcattcttcctaacaagcaatctgg

SEQ ID NO: 112919 - DNA, 25 bp, probe
acctcattcttcctaacaagcaatc

SEQ ID NO: 112920 - DNA, 25 bp, probe
aattacctcattcttcctaacaagc

SEQ ID NO: 112921 - DNA, 25 bp, probe
cataccgacatctacaactaatctt

SEQ ID NO: 112922 - DNA, 25 bp, probe
aactaatctttcccatcaactctgt

SEQ ID NO: 112923 - DNA, 25 bp, probe
acaactaatctttcccatcaactct

SEQ ID NO: 112924 - DNA, 25 bp, probe
tggaatagagaaacctaaagaagca

SEQ ID NO: 112925 - DNA, 25 bp, probe
caactaatctttcccatcaactctg

SEQ ID NO: 112926 - DNA, 25 bp, probe
cgacatctacaactaatctttccca

SEQ ID NO: 112927 - DNA, 25 bp, probe
accgacatctacaactaatctttcc

SEQ ID NO: 112928 - DNA, 25 bp, probe
agagaaacctaaagaagcatcatcc

SEQ ID NO: 112929 - DNA, 25 bp, probe
ctaatctttcccatcaactctgtgt

SEQ ID NO: 112930 - DNA, 25 bp, probe
actaatctttcccatcaactctgtg

SEQ ID NO: 112931 - DNA, 25 bp, probe
cccataccgacatctacaactaatc

SEQ ID NO: 112932 - DNA, 25 bp, probe
taatctttcccatcaactctgtgtg

SEQ ID NO: 112933 - DNA, 25 bp, probe
tcccataccgacatctacaactaat

SEQ ID NO: 112934 - DNA, 25 bp, probe
atcccataccgacatctacaactaa

SEQ ID NO: 112935 - DNA, 25 bp, probe
aatcccataccgacatctacaacta

SEQ ID NO: 112936 - DNA, 25 bp, probe
ttcataagcctttggtatctttcct

SEQ ID NO: 112937 - DNA, 25 bp, probe
aaagattagggaaagagacttgacc

SEQ ID NO: 112938 - DNA, 25 bp, probe
ggcttggaatagagaaacctaaaga

SEQ ID NO: 112939 - DNA, 25 bp, probe
ccgacatctacaactaatctttccc

SEQ ID NO: 112940 - DNA, 25 bp, probe
tcataagcctttggtatctttcctg

SEQ ID NO: 112941 - DNA, 25 bp, probe
cagcaaagattagggaaagagactt

SEQ ID NO: 112942 - DNA, 25 bp, probe
tttcataagcctttggtatctttcc

SEQ ID NO: 112943 - DNA, 25 bp, probe
ttggaatagagaaacctaaagaagc

SEQ ID NO: 112944 - DNA, 25 bp, probe
aaagccaagggaaggataaatcaag

SEQ ID NO: 112945 - DNA, 25 bp, probe
gagaaacctaaagaagcatcatccc

SEQ ID NO: 112946 - DNA, 25 bp, probe
ggaatagagaaacctaaagaagcat

SEQ ID NO: 112947 - DNA, 25 bp, probe
gggcttggaatagagaaacctaaag

SEQ ID NO: 112948 - DNA, 25 bp, probe
caaagattagggaaagagacttgac

SEQ ID NO: 112949 - DNA, 25 bp, probe
gcaaagattagggaaagagacttga

SEQ ID NO: 112950 - DNA, 25 bp, probe
agcaaagattagggaaagagacttg

SEQ ID NO: 112951 - DNA, 25 bp, probe
tacaactaatctttcccatcaactc

SEQ ID NO: 112952 - DNA, 25 bp, probe
ctacaactaatctttcccatcaact

SEQ ID NO: 112953 - DNA, 25 bp, probe
tctacaactaatctttcccatcaac

SEQ ID NO: 112954 - DNA, 25 bp, probe
cccactggtataaatacatctctct

SEQ ID NO: 112955 - DNA, 25 bp, probe
caaagccaagggaaggataaatcaa

SEQ ID NO: 112956 - DNA, 25 bp, probe
atcacagcctcatcattagcaactt

SEQ ID NO: 112957 - DNA, 25 bp, probe
aatcacagcctcatcattagcaact

SEQ ID NO: 112958 - DNA, 25 bp, probe
agtaactgccaagtaagattaagaa

SEQ ID NO: 112959 - DNA, 25 bp, probe
aagtaactgccaagtaagattaaga

SEQ ID NO: 112960 - DNA, 25 bp, probe
ctaagccataaactgtctcacctaa

SEQ ID NO: 112961 - DNA, 25 bp, probe
ctcacctaaacaagatagacctcaa

SEQ ID NO: 112962 - DNA, 25 bp, probe
taagccataaactgtctcacctaaa

SEQ ID NO: 112963 - DNA, 25 bp, probe
acagcctcatcattagcaactttat

SEQ ID NO: 112964 - DNA, 25 bp, probe
tcacctaaacaagatagacctcaat

SEQ ID NO: 112965 - DNA, 25 bp, probe
aagccataaactgtctcacctaaac

SEQ ID NO: 112966 - DNA, 25 bp, probe
cagcctcatcattagcaactttata

SEQ ID NO: 112967 - DNA, 25 bp, probe
tctcacctaaacaagatagacctca

SEQ ID NO: 112968 - DNA, 25 bp, probe
cacagcctcatcattagcaacttta

SEQ ID NO: 112969 - DNA, 25 bp, probe
cttcttccctaagccataaactgtc

SEQ ID NO: 112970 - DNA, 25 bp, probe
cctaagccataaactgtctcaccta

SEQ ID NO: 112971 - DNA, 25 bp, probe
ttcttccctaagccataaactgtct

SEQ ID NO: 112972 - DNA, 25 bp, probe
aataagttgagcatttctggagtat

SEQ ID NO: 112973 - DNA, 25 bp, probe
agttgagcatttctggagtatattt

SEQ ID NO: 112974 - DNA, 25 bp, probe
aagttgagcatttctggagtatatt

SEQ ID NO: 112975 - DNA, 25 bp, probe
ccataaactgtctcacctaaacaag

SEQ ID NO: 112976 - DNA, 25 bp, probe
aaatcacagcctcatcattagcaac

SEQ ID NO: 112977 - DNA, 25 bp, probe
gttgagcatttctggagtatatttc

SEQ ID NO: 112978 - DNA, 25 bp, probe
agcctcatcattagcaactttatat

SEQ ID NO: 112979 - DNA, 25 bp, probe
agagattgtgatggtgataatttga

SEQ ID NO: 112980 - DNA, 25 bp, probe
ttgagcatttctggagtatatttct

SEQ ID NO: 112981 - DNA, 25 bp, probe
tcttccctaagccataaactgtctc

SEQ ID NO: 112982 - DNA, 25 bp, probe
aactgtctcacctaaacaagataga

SEQ ID NO: 112983 - DNA, 25 bp, probe
cacctaaacaagatagacctcaata

SEQ ID NO: 112984 - DNA, 25 bp, probe
ttccctaagccataaactgtctcac

SEQ ID NO: 112985 - DNA, 25 bp, probe
taacccacattctgttcaggatact

SEQ ID NO: 112986 - DNA, 25 bp, probe
gtaacccacattctgttcaggatac

SEQ ID NO: 112987 - DNA, 25 bp, probe
agtaacccacattctgttcaggata

SEQ ID NO: 112988 - DNA, 25 bp, probe
gccataaactgtctcacctaaacaa

SEQ ID NO: 112989 - DNA, 25 bp, probe
cttccctaagccataaactgtctca

SEQ ID NO: 112990 - DNA, 25 bp, probe
cataaactgtctcacctaaacaaga

SEQ ID NO: 112991 - DNA, 25 bp, probe
gagcatttctggagtatatttctca

SEQ ID NO: 112992 - DNA, 25 bp, probe
tgagcatttctggagtatatttctc

SEQ ID NO: 112993 - DNA, 25 bp, probe
aaactgtctcacctaaacaagatag

SEQ ID NO: 112994 - DNA, 25 bp, probe
aaataagttgagcatttctggagta

SEQ ID NO: 112995 - DNA, 25 bp, probe
aagacataatatttctccacctggc

SEQ ID NO: 112996 - DNA, 25 bp, probe
gacataatatttctccacctggcag

SEQ ID NO: 112997 - DNA, 25 bp, probe
ataagttgagcatttctggagtata

SEQ ID NO: 112998 - DNA, 25 bp, probe
taagttgagcatttctggagtatat

SEQ ID NO: 112999 - DNA, 25 bp, probe
gagattgtgatggtgataatttgaa

SEQ ID NO: 113000 - DNA, 25 bp, probe
caatggattaccgacagtgactaag

SEQ ID NO: 113001 - DNA, 25 bp, probe
acaatggattaccgacagtgactaa

SEQ ID NO: 113002 - DNA, 25 bp, probe
atagacaacacatacatgaacgaac

SEQ ID NO: 113003 - DNA, 25 bp, probe
catagacaacacatacatgaacgaa

SEQ ID NO: 113004 - DNA, 25 bp, probe
ccatagacaacacatacatgaacga

SEQ ID NO: 113005 - DNA, 25 bp, probe
aatggattaccgacagtgactaagg

SEQ ID NO: 113006 - DNA, 25 bp, probe
agccatagacaacacatacatgaac

SEQ ID NO: 113007 - DNA, 25 bp, probe
cagccatagacaacacatacatgaa

SEQ ID NO: 113008 - DNA, 25 bp, probe
tagacaacacatacatgaacgaacg

SEQ ID NO: 113009 - DNA, 25 bp, probe
aagcagccatagacaacacatacat

SEQ ID NO: 113010 - DNA, 25 bp, probe
aaccaatttactgatgaatgaagcc

SEQ ID NO: 113011 - DNA, 25 bp, probe
caccaaccaatttactgatgaatga

SEQ ID NO: 113012 - DNA, 25 bp, probe
ccaccaaccaatttactgatgaatg

SEQ ID NO: 113013 - DNA, 25 bp, probe
caaccaatttactgatgaatgaagc

SEQ ID NO: 113014 - DNA, 25 bp, probe
attgatgatttctgaactgaagcct

SEQ ID NO: 113015 - DNA, 25 bp, probe
aattgatgatttctgaactgaagcc

SEQ ID NO: 113016 - DNA, 25 bp, probe
accaaccaatttactgatgaatgaa

SEQ ID NO: 113017 - DNA, 25 bp, probe
gccatagacaacacatacatgaacg

SEQ ID NO: 113018 - DNA, 25 bp, probe
ttgatgatttctgaactgaagcctt

SEQ ID NO: 113019 - DNA, 25 bp, probe
gcaaattctgacaaatgaacaagac

SEQ ID NO: 113020 - DNA, 25 bp, probe
agcaaattctgacaaatgaacaaga

SEQ ID NO: 113021 - DNA, 25 bp, probe
aagcaagaagttaaagagtgaacat

SEQ ID NO: 113022 - DNA, 25 bp, probe
gacaaatgaacaagacatcaaacct

SEQ ID NO: 113023 - DNA, 25 bp, probe
ccaaccaatttactgatgaatgaag

SEQ ID NO: 113024 - DNA, 25 bp, probe
acaaatgaacaagacatcaaacctg

SEQ ID NO: 113025 - DNA, 25 bp, probe
tgacaaatgaacaagacatcaaacc

SEQ ID NO: 113026 - DNA, 25 bp, probe
cacaatggattaccgacagtgacta

SEQ ID NO: 113027 - DNA, 25 bp, probe
ctgacaaatgaacaagacatcaaac

SEQ ID NO: 113028 - DNA, 25 bp, probe
tctgacaaatgaacaagacatcaaa

SEQ ID NO: 113029 - DNA, 25 bp, probe
ttctgacaaatgaacaagacatcaa

SEQ ID NO: 113030 - DNA, 25 bp, probe
attctgacaaatgaacaagacatca

SEQ ID NO: 113031 - DNA, 25 bp, probe
ccaatttactgatgaatgaagccca

SEQ ID NO: 113032 - DNA, 25 bp, probe
accaatttactgatgaatgaagccc

SEQ ID NO: 113033 - DNA, 25 bp, probe
taagcaagaagttaaagagtgaaca

SEQ ID NO: 113034 - DNA, 25 bp, probe
caaattctgacaaatgaacaagaca

SEQ ID NO: 113035 - DNA, 25 bp, probe
caaatgaacaagacatcaaacctgt

SEQ ID NO: 113036 - DNA, 25 bp, probe
cagcaaattctgacaaatgaacaag

SEQ ID NO: 113037 - DNA, 25 bp, probe
aaagaatgaatgtaggaaacaacca

SEQ ID NO: 113038 - DNA, 25 bp, probe
caatttactgatgaatgaagcccag

SEQ ID NO: 113039 - DNA, 25 bp, probe
agcaagaagttaaagagtgaacatg

SEQ ID NO: 113040 - DNA, 25 bp, probe
aattctgacaaatgaacaagacatc

SEQ ID NO: 113041 - DNA, 25 bp, probe
agttaaagagtgaacatggtggaaa

SEQ ID NO: 113042 - DNA, 25 bp, probe
aagttaaagagtgaacatggtggaa

SEQ ID NO: 113043 - DNA, 25 bp, probe
gccaccaaccaatttactgatgaat

SEQ ID NO: 113044 - DNA, 25 bp, probe
gcacagtcttctaagtcacattatt

SEQ ID NO: 113045 - DNA, 25 bp, probe
ttaaggatagtagaatcgccactgt

SEQ ID NO: 113046 - DNA, 25 bp, probe
taaggatagtagaatcgccactgtc

SEQ ID NO: 113047 - DNA, 25 bp, probe
tcttctaagtcacattattctcaca

SEQ ID NO: 113048 - DNA, 25 bp, probe
cacagtcttctaagtcacattattc

SEQ ID NO: 113049 - DNA, 25 bp, probe
acagtcttctaagtcacattattct

SEQ ID NO: 113050 - DNA, 25 bp, probe
gtcttctaagtcacattattctcac

SEQ ID NO: 113051 - DNA, 25 bp, probe
tgcacagtcttctaagtcacattat

SEQ ID NO: 113052 - DNA, 25 bp, probe
gtcacattattctcacaaatccagg

SEQ ID NO: 113053 - DNA, 25 bp, probe
ctgcacagtcttctaagtcacatta

SEQ ID NO: 113054 - DNA, 25 bp, probe
agtcttctaagtcacattattctca

SEQ ID NO: 113055 - DNA, 25 bp, probe
ggcgaaggactttatagacaaacta

SEQ ID NO: 113056 - DNA, 25 bp, probe
acattattctcacaaatccaggcat

SEQ ID NO: 113057 - DNA, 25 bp, probe
gcgaaggactttatagacaaactac

SEQ ID NO: 113058 - DNA, 25 bp, probe
cattattctcacaaatccaggcata

SEQ ID NO: 113059 - DNA, 25 bp, probe
agtcacattattctcacaaatccag

SEQ ID NO: 113060 - DNA, 25 bp, probe
cagtcttctaagtcacattattctc

SEQ ID NO: 113061 - DNA, 25 bp, probe
tcacattattctcacaaatccaggc

SEQ ID NO: 113062 - DNA, 25 bp, probe
aagtcacattattctcacaaatcca

SEQ ID NO: 113063 - DNA, 25 bp, probe
cttctaagtcacattattctcacaa

SEQ ID NO: 113064 - DNA, 25 bp, probe
aaggatagtagaatcgccactgtct

SEQ ID NO: 113065 - DNA, 25 bp, probe
cacattattctcacaaatccaggca

SEQ ID NO: 113066 - DNA, 25 bp, probe
atctgcacagtcttctaagtcacat

SEQ ID NO: 113067 - DNA, 25 bp, probe
cttggcgaaggactttatagacaaa

SEQ ID NO: 113068 - DNA, 25 bp, probe
attattctcacaaatccaggcatat

SEQ ID NO: 113069 - DNA, 25 bp, probe
tctgcacagtcttctaagtcacatt

SEQ ID NO: 113070 - DNA, 25 bp, probe
ttggcgaaggactttatagacaaac

SEQ ID NO: 113071 - DNA, 25 bp, probe
cgaaggactttatagacaaactact

SEQ ID NO: 113072 - DNA, 25 bp, probe
tggcgaaggactttatagacaaact

SEQ ID NO: 113073 - DNA, 25 bp, probe
aacttaaggatagtagaatcgccac

SEQ ID NO: 113074 - DNA, 25 bp, probe
cttaaggatagtagaatcgccactg

SEQ ID NO: 113075 - DNA, 25 bp, probe
acttaaggatagtagaatcgccact

SEQ ID NO: 113076 - DNA, 25 bp, probe
gatctgcacagtcttctaagtcaca

SEQ ID NO: 113077 - DNA, 25 bp, probe
acttggcgaaggactttatagacaa

SEQ ID NO: 113078 - DNA, 25 bp, probe
aggatagtagaatcgccactgtctg

SEQ ID NO: 113079 - DNA, 25 bp, probe
cacttggcgaaggactttatagaca

SEQ ID NO: 113080 - DNA, 25 bp, probe
ggatctgcacagtcttctaagtcac

SEQ ID NO: 113081 - DNA, 25 bp, probe
taagtcacattattctcacaaatcc

SEQ ID NO: 113082 - DNA, 25 bp, probe
aaggactttatagacaaactactga

SEQ ID NO: 113083 - DNA, 25 bp, probe
gaaggactttatagacaaactactg

SEQ ID NO: 113084 - DNA, 25 bp, probe
tggatctgcacagtcttctaagtca

SEQ ID NO: 113085 - DNA, 25 bp, probe
aggactttatagacaaactactgat

SEQ ID NO: 113086 - DNA, 25 bp, probe
ctggatctgcacagtcttctaagtc

SEQ ID NO: 113087 - DNA, 25 bp, probe
tggagcaagagaaacttaaggatag

SEQ ID NO: 113088 - DNA, 25 bp, probe
ctaacattaatagaaggcatggctc

SEQ ID NO: 113089 - DNA, 25 bp, probe
taacattaatagaaggcatggctcc

SEQ ID NO: 113090 - DNA, 25 bp, probe
ttgactccaatcagtgataccagac

SEQ ID NO: 113091 - DNA, 25 bp, probe
gaaactctctccctgctgtatatta

SEQ ID NO: 113092 - DNA, 25 bp, probe
actctctccctgctgtatattaaag

SEQ ID NO: 113093 - DNA, 25 bp, probe
ttatcacttccctccctttagaaac

SEQ ID NO: 113094 - DNA, 25 bp, probe
cttatcacttccctccctttagaaa

SEQ ID NO: 113095 - DNA, 25 bp, probe
tgtgtaagtgtttgtttccaggata

SEQ ID NO: 113096 - DNA, 25 bp, probe
tagaaactctctccctgctgtatat

SEQ ID NO: 113097 - DNA, 25 bp, probe
ttagaaactctctccctgctgtata

SEQ ID NO: 113098 - DNA, 25 bp, probe
tatcacttccctccctttagaaact

SEQ ID NO: 113099 - DNA, 25 bp, probe
aactctctccctgctgtatattaaa

SEQ ID NO: 113100 - DNA, 25 bp, probe
aaactctctccctgctgtatattaa

SEQ ID NO: 113101 - DNA, 25 bp, probe
atctcatgctcagccttatcacttc

SEQ ID NO: 113102 - DNA, 25 bp, probe
aatcagtgataccagaccacattga

SEQ ID NO: 113103 - DNA, 25 bp, probe
tatattaaagggagcaggtggagag

SEQ ID NO: 113104 - DNA, 25 bp, probe
tctaacattaatagaaggcatggct

SEQ ID NO: 113105 - DNA, 25 bp, probe
ctctaacattaatagaaggcatggc

SEQ ID NO: 113106 - DNA, 25 bp, probe
agaaactctctccctgctgtatatt

SEQ ID NO: 113107 - DNA, 25 bp, probe
gtgtaagtgtttgtttccaggatat

SEQ ID NO: 113108 - DNA, 25 bp, probe
gtatattaaagggagcaggtggaga

SEQ ID NO: 113109 - DNA, 25 bp, probe
tttagaaactctctccctgctgtat

SEQ ID NO: 113110 - DNA, 25 bp, probe
ccttatcacttccctccctttagaa

SEQ ID NO: 113111 - DNA, 25 bp, probe
ttgtgttgctcagtgtgtaagtgtt

SEQ ID NO: 113112 - DNA, 25 bp, probe
tcagtgtgtaagtgtttgtttccag

SEQ ID NO: 113113 - DNA, 25 bp, probe
ctcagtgtgtaagtgtttgtttcca

SEQ ID NO: 113114 - DNA, 25 bp, probe
ttgctcagtgtgtaagtgtttgttt

SEQ ID NO: 113115 - DNA, 25 bp, probe
tgtatattaaagggagcaggtggag

SEQ ID NO: 113116 - DNA, 25 bp, probe
catctcatgctcagccttatcactt

SEQ ID NO: 113117 - DNA, 25 bp, probe
tgtaagtgtttgtttccaggatatt

SEQ ID NO: 113118 - DNA, 25 bp, probe
cttgttcgtgtagcttcagaagttc

SEQ ID NO: 113119 - DNA, 25 bp, probe
aaaccatttctttgctatcctctgc

SEQ ID NO: 113120 - DNA, 25 bp, probe
ctttagaaactctctccctgctgta

SEQ ID NO: 113121 - DNA, 25 bp, probe
catttctttgctatcctctgccttc

SEQ ID NO: 113122 - DNA, 25 bp, probe
gtgtgtaagtgtttgtttccaggat

SEQ ID NO: 113123 - DNA, 25 bp, probe
atcagtgataccagaccacattgac

SEQ ID NO: 113124 - DNA, 25 bp, probe
atcacttccctccctttagaaactc

SEQ ID NO: 113125 - DNA, 25 bp, probe
caatcagtgataccagaccacattg

SEQ ID NO: 113126 - DNA, 25 bp, probe
tttactaaagcacagttagacccaa

SEQ ID NO: 113127 - DNA, 25 bp, probe
tgctcagtgtgtaagtgtttgtttc

SEQ ID NO: 113128 - DNA, 25 bp, probe
ttactaaagcacagttagacccaag

SEQ ID NO: 113129 - DNA, 25 bp, probe
cttccctccctttagaaactctctc

SEQ ID NO: 113130 - DNA, 25 bp, probe
ccaatcagtgataccagaccacatt

SEQ ID NO: 113131 - DNA, 25 bp, probe
tctctaacattaatagaaggcatgg

SEQ ID NO: 113132 - DNA, 25 bp, probe
acaagcaataactctctacaggaat

SEQ ID NO: 113133 - DNA, 25 bp, probe
gacaagcaataactctctacaggaa

SEQ ID NO: 113134 - DNA, 25 bp, probe
ggacaagcaataactctctacagga

SEQ ID NO: 113135 - DNA, 25 bp, probe
aggacaagcaataactctctacagg

SEQ ID NO: 113136 - DNA, 25 bp, probe
gaggacaagcaataactctctacag

SEQ ID NO: 113137 - DNA, 25 bp, probe
caagcaataactctctacaggaata

SEQ ID NO: 113138 - DNA, 25 bp, probe
ggaggacaagcaataactctctaca

SEQ ID NO: 113139 - DNA, 25 bp, probe
aagcaataactctctacaggaatat

SEQ ID NO: 113140 - DNA, 25 bp, probe
gtctctcttctgctgtctctcctac

SEQ ID NO: 113141 - DNA, 25 bp, probe
agcaataactctctacaggaatata

SEQ ID NO: 113142 - DNA, 25 bp, probe
gttgactacgagcagatcaagataa

SEQ ID NO: 113143 - DNA, 25 bp, probe
tacctgtcttctggctctctctgta

SEQ ID NO: 113144 - DNA, 25 bp, probe
gggaggacaagcaataactctctac

SEQ ID NO: 113145 - DNA, 25 bp, probe
cgttgactacgagcagatcaagata

SEQ ID NO: 113146 - DNA, 25 bp, probe
ctctcttctgctgtctctcctacct

SEQ ID NO: 113147 - DNA, 25 bp, probe
tctctcttctgctgtctctcctacc

SEQ ID NO: 113148 - DNA, 25 bp, probe
ttctgctgtctctcctacctgtctt

SEQ ID NO: 113149 - DNA, 25 bp, probe
tctcttctgctgtctctcctacctg

SEQ ID NO: 113150 - DNA, 25 bp, probe
cgtctctcttctgctgtctctccta

SEQ ID NO: 113151 - DNA, 25 bp, probe
gcaataactctctacaggaatatat

SEQ ID NO: 113152 - DNA, 25 bp, probe
ttgactacgagcagatcaagataaa

SEQ ID NO: 113153 - DNA, 25 bp, probe
ctctgtctctcacgtctctcttctg

SEQ ID NO: 113154 - DNA, 25 bp, probe
gtctctgtctctcacgtctctcttc

SEQ ID NO: 113155 - DNA, 25 bp, probe
tctctgtctctcacgtctctcttct

SEQ ID NO: 113156 - DNA, 25 bp, probe
ctacctgtcttctggctctctctgt

SEQ ID NO: 113157 - DNA, 25 bp, probe
ctgctgtctctcctacctgtcttct

SEQ ID NO: 113158 - DNA, 25 bp, probe
tctgctgtctctcctacctgtcttc

SEQ ID NO: 113159 - DNA, 25 bp, probe
cttctgctgtctctcctacctgtct

SEQ ID NO: 113160 - DNA, 25 bp, probe
tcttctgctgtctctcctacctgtc

SEQ ID NO: 113161 - DNA, 25 bp, probe
ctcttctgctgtctctcctacctgt

SEQ ID NO: 113162 - DNA, 25 bp, probe
ttgttgtctctgtctctcacgtctc

SEQ ID NO: 113163 - DNA, 25 bp, probe
cttgttgtctctgtctctcacgtct

SEQ ID NO: 113164 - DNA, 25 bp, probe
tgactacgagcagatcaagataaaa

SEQ ID NO: 113165 - DNA, 25 bp, probe
gttgtctctgtctctcacgtctctc

SEQ ID NO: 113166 - DNA, 25 bp, probe
cgggaggacaagcaataactctcta

SEQ ID NO: 113167 - DNA, 25 bp, probe
tgctgtctctcctacctgtcttctg

SEQ ID NO: 113168 - DNA, 25 bp, probe
tgtctctgtctctcacgtctctctt

SEQ ID NO: 113169 - DNA, 25 bp, probe
ttgtctctgtctctcacgtctctct

SEQ ID NO: 113170 - DNA, 25 bp, probe
acctgtcttctggctctctctgtac

SEQ ID NO: 113171 - DNA, 25 bp, probe
tgttgtctctgtctctcacgtctct

SEQ ID NO: 113172 - DNA, 25 bp, probe
ccttgttgtctctgtctctcacgtc

SEQ ID NO: 113173 - DNA, 25 bp, probe
tcttctggctctctctgtacccttc

SEQ ID NO: 113174 - DNA, 25 bp, probe
gtcttctggctctctctgtaccctt

SEQ ID NO: 113175 - DNA, 25 bp, probe
gaagagacagaactgtccacatctg

SEQ ID NO: 113176 - DNA, 25 bp, probe
gaacattccttccatagccagcaat

SEQ ID NO: 113177 - DNA, 25 bp, probe
tcgtagtaagaagaccacacacctg

SEQ ID NO: 113178 - DNA, 25 bp, probe
attccttccatagccagcaatgttg

SEQ ID NO: 113179 - DNA, 25 bp, probe
ctccagccttaatttgaaagcagac

SEQ ID NO: 113180 - DNA, 25 bp, probe
ttccatagccagcaatgttgtcaag

SEQ ID NO: 113181 - DNA, 25 bp, probe
cttccatagccagcaatgttgtcaa

SEQ ID NO: 113182 - DNA, 25 bp, probe
cttaatttgaaagcagacgacggac

SEQ ID NO: 113183 - DNA, 25 bp, probe
ttaatttgaaagcagacgacggact

SEQ ID NO: 113184 - DNA, 25 bp, probe
cagccttaatttgaaagcagacgac

SEQ ID NO: 113185 - DNA, 25 bp, probe
caacacgaacattccttccatagcc

SEQ ID NO: 113186 - DNA, 25 bp, probe
ccaacacgaacattccttccatagc

SEQ ID NO: 113187 - DNA, 25 bp, probe
gtcgtagtaagaagaccacacacct

SEQ ID NO: 113188 - DNA, 25 bp, probe
catagccagcaatgttgtcaaggtc

SEQ ID NO: 113189 - DNA, 25 bp, probe
atagccagcaatgttgtcaaggtct

SEQ ID NO: 113190 - DNA, 25 bp, probe
aacacgaacattccttccatagcca

SEQ ID NO: 113191 - DNA, 25 bp, probe
ccttaatttgaaagcagacgacgga

SEQ ID NO: 113192 - DNA, 25 bp, probe
cccaacacgaacattccttccatag

SEQ ID NO: 113193 - DNA, 25 bp, probe
cattccttccatagccagcaatgtt

SEQ ID NO: 113194 - DNA, 25 bp, probe
aacattccttccatagccagcaatg

SEQ ID NO: 113195 - DNA, 25 bp, probe
gtagtaagaagaccacacacctgcc

SEQ ID NO: 113196 - DNA, 25 bp, probe
ttccttccatagccagcaatgttgt

SEQ ID NO: 113197 - DNA, 25 bp, probe
agtcgctccagccttaatttgaaag

SEQ ID NO: 113198 - DNA, 25 bp, probe
ccagccttaatttgaaagcagacga

SEQ ID NO: 113199 - DNA, 25 bp, probe
tccagccttaatttgaaagcagacg

SEQ ID NO: 113200 - DNA, 25 bp, probe
cagtcgctccagccttaatttgaaa

SEQ ID NO: 113201 - DNA, 25 bp, probe
acacgaacattccttccatagccag

SEQ ID NO: 113202 - DNA, 25 bp, probe
taatttgaaagcagacgacggactg

SEQ ID NO: 113203 - DNA, 25 bp, probe
tagccagcaatgttgtcaaggtctc

SEQ ID NO: 113204 - DNA, 25 bp, probe
cgtagtaagaagaccacacacctgc

SEQ ID NO: 113205 - DNA, 25 bp, probe
agccttaatttgaaagcagacgacg

SEQ ID NO: 113206 - DNA, 25 bp, probe
tccttccatagccagcaatgttgtc

SEQ ID NO: 113207 - DNA, 25 bp, probe
cgtcgtagtaagaagaccacacacc

SEQ ID NO: 113208 - DNA, 25 bp, probe
ccgtcgtagtaagaagaccacacac

SEQ ID NO: 113209 - DNA, 25 bp, probe
gctccagccttaatttgaaagcaga

SEQ ID NO: 113210 - DNA, 25 bp, probe
gccttaatttgaaagcagacgacgg

SEQ ID NO: 113211 - DNA, 25 bp, probe
catagccctgtgatactgcatctca

SEQ ID NO: 113212 - DNA, 25 bp, probe
acatagccctgtgatactgcatctc

SEQ ID NO: 113213 - DNA, 25 bp, probe
gacatagccctgtgatactgcatct

SEQ ID NO: 113214 - DNA, 25 bp, probe
gactgagaccaaactgcaaaacatc

SEQ ID NO: 113215 - DNA, 25 bp, probe
attgtacccctagcactgagacttg

SEQ ID NO: 113216 - DNA, 25 bp, probe
cattgtacccctagcactgagactt

SEQ ID NO: 113217 - DNA, 25 bp, probe
aatttgaaagcagacgacggactga

SEQ ID NO: 113218 - DNA, 25 bp, probe
cccaattctaacctgccagctactc

SEQ ID NO: 113219 - DNA, 25 bp, probe
caaactgcaaaacatcccagatcac

SEQ ID NO: 113220 - DNA, 25 bp, probe
cagtcacagaggagaataagaaaga

SEQ ID NO: 113221 - DNA, 25 bp, probe
ccagtcacagaggagaataagaaag

SEQ ID NO: 113222 - DNA, 25 bp, probe
agtcacagaggagaataagaaagaa

SEQ ID NO: 113223 - DNA, 25 bp, probe
tatgagtcctatgagaagctctacg

SEQ ID NO: 113224 - DNA, 25 bp, probe
tgccagtcacagaggagaataagaa

SEQ ID NO: 113225 - DNA, 25 bp, probe
atatgagtcctatgagaagctctac

SEQ ID NO: 113226 - DNA, 25 bp, probe
gtcacagaggagaataagaaagaat

SEQ ID NO: 113227 - DNA, 25 bp, probe
acagaggagaataagaaagaatacg

SEQ ID NO: 113228 - DNA, 25 bp, probe
gtcctatgagaagctctacgagaag

SEQ ID NO: 113229 - DNA, 25 bp, probe
agtcctatgagaagctctacgagaa

SEQ ID NO: 113230 - DNA, 25 bp, probe
atgagtcctatgagaagctctacga

SEQ ID NO: 113231 - DNA, 25 bp, probe
gccagtcacagaggagaataagaaa

SEQ ID NO: 113232 - DNA, 25 bp, probe
aactggaggtttatgagaggaatcg

SEQ ID NO: 113233 - DNA, 25 bp, probe
gagtcctatgagaagctctacgaga

SEQ ID NO: 113234 - DNA, 25 bp, probe
attccaccatatgagtcctatgaga

SEQ ID NO: 113235 - DNA, 25 bp, probe
cattccaccatatgagtcctatgag

SEQ ID NO: 113236 - DNA, 25 bp, probe
ttccaccatatgagtcctatgagaa

SEQ ID NO: 113237 - DNA, 25 bp, probe
gacattccaccatatgagtcctatg

SEQ ID NO: 113238 - DNA, 25 bp, probe
acattccaccatatgagtcctatga

SEQ ID NO: 113239 - DNA, 25 bp, probe
ccatatgagtcctatgagaagctct

SEQ ID NO: 113240 - DNA, 25 bp, probe
tccaccatatgagtcctatgagaag

SEQ ID NO: 113241 - DNA, 25 bp, probe
tgagtcctatgagaagctctacgag

SEQ ID NO: 113242 - DNA, 25 bp, probe
accatatgagtcctatgagaagctc

SEQ ID NO: 113243 - DNA, 25 bp, probe
catatgagtcctatgagaagctcta

SEQ ID NO: 113244 - DNA, 25 bp, probe
caccatatgagtcctatgagaagct

SEQ ID NO: 113245 - DNA, 25 bp, probe
cgacattccaccatatgagtcctat

SEQ ID NO: 113246 - DNA, 25 bp, probe
cacagaggagaataagaaagaatac

SEQ ID NO: 113247 - DNA, 25 bp, probe
tggaggtttatgagaggaatcgaag

SEQ ID NO: 113248 - DNA, 25 bp, probe
ctggaggtttatgagaggaatcgaa

SEQ ID NO: 113249 - DNA, 25 bp, probe
tcacagaggagaataagaaagaata

SEQ ID NO: 113250 - DNA, 25 bp, probe
aaactggaggtttatgagaggaatc

SEQ ID NO: 113251 - DNA, 25 bp, probe
cagaggagaataagaaagaatacgt

SEQ ID NO: 113252 - DNA, 25 bp, probe
gtgccagtcacagaggagaataaga

SEQ ID NO: 113253 - DNA, 25 bp, probe
ccaccatatgagtcctatgagaagc

SEQ ID NO: 113254 - DNA, 25 bp, probe
ggataaaatagacttgaacgactgg

SEQ ID NO: 113255 - DNA, 25 bp, probe
cctggataaaatagacttgaacgac

SEQ ID NO: 113256 - DNA, 25 bp, probe
gcctggataaaatagacttgaacga

SEQ ID NO: 113257 - DNA, 25 bp, probe
agaggagaataagaaagaatacgtc

SEQ ID NO: 113258 - DNA, 25 bp, probe
tggataaaatagacttgaacgactg

SEQ ID NO: 113259 - DNA, 25 bp, probe
agaataagaaagaatacgtccggtt

SEQ ID NO: 113260 - DNA, 25 bp, probe
tcgacattccaccatatgagtccta

SEQ ID NO: 113261 - DNA, 25 bp, probe
gaataagaaagaatacgtccggttg

SEQ ID NO: 113262 - DNA, 25 bp, probe
aggagaataagaaagaatacgtccg

SEQ ID NO: 113263 - DNA, 25 bp, probe
ataagaaagaatacgtccggttgta

SEQ ID NO: 113264 - DNA, 25 bp, probe
aagtggagagaggaaagagtaaatg

SEQ ID NO: 113265 - DNA, 25 bp, probe
gaagtggagagaggaaagagtaaat

SEQ ID NO: 113266 - DNA, 25 bp, probe
agaagtggagagaggaaagagtaaa

SEQ ID NO: 113267 - DNA, 25 bp, probe
gtggagagaggaaagagtaaatgtg

SEQ ID NO: 113268 - DNA, 25 bp, probe
agtggagagaggaaagagtaaatgt

SEQ ID NO: 113269 - DNA, 25 bp, probe
taatatctgtttgaggcatagagca

SEQ ID NO: 113270 - DNA, 25 bp, probe
aatatctgtttgaggcatagagcaa

SEQ ID NO: 113271 - DNA, 25 bp, probe
atatctgtttgaggcatagagcaac

SEQ ID NO: 113272 - DNA, 25 bp, probe
ttaatatctgtttgaggcatagagc

SEQ ID NO: 113273 - DNA, 25 bp, probe
ttaaactttcaaaggttggacaagg

SEQ ID NO: 113274 - DNA, 25 bp, probe
acttaaactttcaaaggttggacaa

SEQ ID NO: 113275 - DNA, 25 bp, probe
aacttaaactttcaaaggttggaca

SEQ ID NO: 113276 - DNA, 25 bp, probe
tttcaaaggttggacaagggaatac

SEQ ID NO: 113277 - DNA, 25 bp, probe
atatttctcctagaccctacagcac

SEQ ID NO: 113278 - DNA, 25 bp, probe
catatttctcctagaccctacagca

SEQ ID NO: 113279 - DNA, 25 bp, probe
catgactatacgctaagagaactta

SEQ ID NO: 113280 - DNA, 25 bp, probe
cttaaactttcaaaggttggacaag

SEQ ID NO: 113281 - DNA, 25 bp, probe
gaacttaaactttcaaaggttggac

SEQ ID NO: 113282 - DNA, 25 bp, probe
ctttcaaaggttggacaagggaata

SEQ ID NO: 113283 - DNA, 25 bp, probe
agaacttaaactttcaaaggttgga

SEQ ID NO: 113284 - DNA, 25 bp, probe
tatctgtttgaggcatagagcaact

SEQ ID NO: 113285 - DNA, 25 bp, probe
atgactatacgctaagagaacttaa

SEQ ID NO: 113286 - DNA, 25 bp, probe
ggcatatttctcctagaccctacag

SEQ ID NO: 113287 - DNA, 25 bp, probe
taaactttcaaaggttggacaaggg

SEQ ID NO: 113288 - DNA, 25 bp, probe
acgctaagagaacttaaactttcaa

SEQ ID NO: 113289 - DNA, 25 bp, probe
tatttctcctagaccctacagcact

SEQ ID NO: 113290 - DNA, 25 bp, probe
aaggcatatttctcctagaccctac

SEQ ID NO: 113291 - DNA, 25 bp, probe
caaggcatatttctcctagacccta

SEQ ID NO: 113292 - DNA, 25 bp, probe
gcaaagactaagtcagcattatctc

SEQ ID NO: 113293 - DNA, 25 bp, probe
agcaaagactaagtcagcattatct

SEQ ID NO: 113294 - DNA, 25 bp, probe
cagcaaagactaagtcagcattatc

SEQ ID NO: 113295 - DNA, 25 bp, probe
acagcaaagactaagtcagcattat

SEQ ID NO: 113296 - DNA, 25 bp, probe
gcatatttctcctagaccctacagc

SEQ ID NO: 113297 - DNA, 25 bp, probe
tacgctaagagaacttaaactttca

SEQ ID NO: 113298 - DNA, 25 bp, probe
aacagcaaagactaagtcagcatta

SEQ ID NO: 113299 - DNA, 25 bp, probe
cgctaagagaacttaaactttcaaa

SEQ ID NO: 113300 - DNA, 25 bp, probe
ttgatcccaaggcatatttctccta

SEQ ID NO: 113301 - DNA, 25 bp, probe
atcccaaggcatatttctcctagac

SEQ ID NO: 113302 - DNA, 25 bp, probe
tacctacccactcctagctctttaa

SEQ ID NO: 113303 - DNA, 25 bp, probe
ttacctacccactcctagctcttta

SEQ ID NO: 113304 - DNA, 25 bp, probe
gatcccaaggcatatttctcctaga

SEQ ID NO: 113305 - DNA, 25 bp, probe
aaacagcaaagactaagtcagcatt

SEQ ID NO: 113306 - DNA, 25 bp, probe
tgatcccaaggcatatttctcctag

SEQ ID NO: 113307 - DNA, 25 bp, probe
tcatgactatacgctaagagaactt

SEQ ID NO: 113308 - DNA, 25 bp, probe
ggaagccactgtcaatgattagatc

SEQ ID NO: 113309 - DNA, 25 bp, probe
gaagccactgtcaatgattagatcg

SEQ ID NO: 113310 - DNA, 25 bp, probe
aacaacctatgtcactgactcagat

SEQ ID NO: 113311 - DNA, 25 bp, probe
ccatcacaacaacctatgtcactga

SEQ ID NO: 113312 - DNA, 25 bp, probe
tggaagccactgtcaatgattagat

SEQ ID NO: 113313 - DNA, 25 bp, probe
catcacaacaacctatgtcactgac

SEQ ID NO: 113314 - DNA, 25 bp, probe
aagccactgtcaatgattagatcgg

SEQ ID NO: 113315 - DNA, 25 bp, probe
atcacaacaacctatgtcactgact

SEQ ID NO: 113316 - DNA, 25 bp, probe
acaacctatgtcactgactcagatg

SEQ ID NO: 113317 - DNA, 25 bp, probe
cacctaagaatgtttacatgccaaa

SEQ ID NO: 113318 - DNA, 25 bp, probe
gaagccacctaagaatgtttacatg

SEQ ID NO: 113319 - DNA, 25 bp, probe
ggaagccacctaagaatgtttacat

SEQ ID NO: 113320 - DNA, 25 bp, probe
caacaacctatgtcactgactcaga

SEQ ID NO: 113321 - DNA, 25 bp, probe
ctggaagccactgtcaatgattaga

SEQ ID NO: 113322 - DNA, 25 bp, probe
acaacaacctatgtcactgactcag

SEQ ID NO: 113323 - DNA, 25 bp, probe
tcacaacaacctatgtcactgactc

SEQ ID NO: 113324 - DNA, 25 bp, probe
ccacctaagaatgtttacatgccaa

SEQ ID NO: 113325 - DNA, 25 bp, probe
actgtcaatgattagatcgggtctc

SEQ ID NO: 113326 - DNA, 25 bp, probe
cacaacaacctatgtcactgactca

SEQ ID NO: 113327 - DNA, 25 bp, probe
aagccacctaagaatgtttacatgc

SEQ ID NO: 113328 - DNA, 25 bp, probe
gggaagtagccatcacaccattaaa

SEQ ID NO: 113329 - DNA, 25 bp, probe
cactgtcaatgattagatcgggtct

SEQ ID NO: 113330 - DNA, 25 bp, probe
gggaagccacctaagaatgtttaca

SEQ ID NO: 113331 - DNA, 25 bp, probe
caacctatgtcactgactcagatgc

SEQ ID NO: 113332 - DNA, 25 bp, probe
cctggaagccactgtcaatgattag

SEQ ID NO: 113333 - DNA, 25 bp, probe
caatgattagatcgggtctcggaag

SEQ ID NO: 113334 - DNA, 25 bp, probe
ctgtcaatgattagatcgggtctcg

SEQ ID NO: 113335 - DNA, 25 bp, probe
acctaagaatgtttacatgccaaac

SEQ ID NO: 113336 - DNA, 25 bp, probe
aagggaagtagccatcacaccatta

SEQ ID NO: 113337 - DNA, 25 bp, probe
ccactgtcaatgattagatcgggtc

SEQ ID NO: 113338 - DNA, 25 bp, probe
agggaagtagccatcacaccattaa

SEQ ID NO: 113339 - DNA, 25 bp, probe
ggaagtagccatcacaccattaaaa

SEQ ID NO: 113340 - DNA, 25 bp, probe
cgggaagccacctaagaatgtttac

SEQ ID NO: 113341 - DNA, 25 bp, probe
tcaatgattagatcgggtctcggaa

SEQ ID NO: 113342 - DNA, 25 bp, probe
tcgggaagccacctaagaatgttta

SEQ ID NO: 113343 - DNA, 25 bp, probe
aacctatgtcactgactcagatgca

SEQ ID NO: 113344 - DNA, 25 bp, probe
agccacctaagaatgtttacatgcc

SEQ ID NO: 113345 - DNA, 25 bp, probe
cccatcacaacaacctatgtcactg

SEQ ID NO: 113346 - DNA, 25 bp, probe
gccacctaagaatgtttacatgcca

SEQ ID NO: 113347 - DNA, 25 bp, probe
aatgattagatcgggtctcggaagg

SEQ ID NO: 113348 - DNA, 25 bp, probe
gtcaatgattagatcgggtctcgga

SEQ ID NO: 113349 - DNA, 25 bp, probe
acctatgtcactgactcagatgcag

SEQ ID NO: 113350 - DNA, 25 bp, probe
tgtcaatgattagatcgggtctcgg

SEQ ID NO: 113351 - DNA, 25 bp, probe
ctgagcattcattctctccaccagg

SEQ ID NO: 113352 - DNA, 25 bp, probe
atcaacttcaacaactactaccagg

SEQ ID NO: 113353 - DNA, 25 bp, probe
catcaacttcaacaactactaccag

SEQ ID NO: 113354 - DNA, 25 bp, probe
gcatcaacttcaacaactactacca

SEQ ID NO: 113355 - DNA, 25 bp, probe
caacttcaacaactactaccaggac

SEQ ID NO: 113356 - DNA, 25 bp, probe
tcaacttcaacaactactaccagga

SEQ ID NO: 113357 - DNA, 25 bp, probe
cgcatcaacttcaacaactactacc

SEQ ID NO: 113358 - DNA, 25 bp, probe
aacttcaacaactactaccaggacg

SEQ ID NO: 113359 - DNA, 25 bp, probe
gtactactcccactttctcttcaaa

SEQ ID NO: 113360 - DNA, 25 bp, probe
agcagtcctacaacaccttcaagta

SEQ ID NO: 113361 - DNA, 25 bp, probe
gcagtcctacaacaccttcaagtac

SEQ ID NO: 113362 - DNA, 25 bp, probe
gtcctacaacaccttcaagtactac

SEQ ID NO: 113363 - DNA, 25 bp, probe
ctacaacaccttcaagtactactcc

SEQ ID NO: 113364 - DNA, 25 bp, probe
cctacaacaccttcaagtactactc

SEQ ID NO: 113365 - DNA, 25 bp, probe
tcctacaacaccttcaagtactact

SEQ ID NO: 113366 - DNA, 25 bp, probe
agtcctacaacaccttcaagtacta

SEQ ID NO: 113367 - DNA, 25 bp, probe
tactactcccactttctcttcaaag

SEQ ID NO: 113368 - DNA, 25 bp, probe
cagtcctacaacaccttcaagtact

SEQ ID NO: 113369 - DNA, 25 bp, probe
acttcaacaactactaccaggacgc

SEQ ID NO: 113370 - DNA, 25 bp, probe
cagcagtcctacaacaccttcaagt

SEQ ID NO: 113371 - DNA, 25 bp, probe
agtactactcccactttctcttcaa

SEQ ID NO: 113372 - DNA, 25 bp, probe
ctttctcttcaaagtggtgaccaag

SEQ ID NO: 113373 - DNA, 25 bp, probe
tacaacaccttcaagtactactccc

SEQ ID NO: 113374 - DNA, 25 bp, probe
cctctcaactcacaggaagacacag

SEQ ID NO: 113375 - DNA, 25 bp, probe
cttcaacaactactaccaggacgcc

SEQ ID NO: 113376 - DNA, 25 bp, probe
ctctcaactcacaggaagacacagc

SEQ ID NO: 113377 - DNA, 25 bp, probe
gcgcatcaacttcaacaactactac

SEQ ID NO: 113378 - DNA, 25 bp, probe
caacaccttcaagtactactcccac

SEQ ID NO: 113379 - DNA, 25 bp, probe
aacaccttcaagtactactcccact

SEQ ID NO: 113380 - DNA, 25 bp, probe
caagtactactcccactttctcttc

SEQ ID NO: 113381 - DNA, 25 bp, probe
cttcaagtactactcccactttctc

SEQ ID NO: 113382 - DNA, 25 bp, probe
aagtactactcccactttctcttca

SEQ ID NO: 113383 - DNA, 25 bp, probe
tcaagtactactcccactttctctt

SEQ ID NO: 113384 - DNA, 25 bp, probe
ttcaagtactactcccactttctct

SEQ ID NO: 113385 - DNA, 25 bp, probe
acaacaccttcaagtactactccca

SEQ ID NO: 113386 - DNA, 25 bp, probe
tttctcttcaaagtggtgaccaagc

SEQ ID NO: 113387 - DNA, 25 bp, probe
gacactgaggacctctctccaaatt

SEQ ID NO: 113388 - DNA, 25 bp, probe
ccttcaagtactactcccactttct

SEQ ID NO: 113389 - DNA, 25 bp, probe
acactgaggacctctctccaaattg

SEQ ID NO: 113390 - DNA, 25 bp, probe
accttcaagtactactcccactttc

SEQ ID NO: 113391 - DNA, 25 bp, probe
catgaacgtcatccacagcatcttc

SEQ ID NO: 113392 - DNA, 25 bp, probe
caccttcaagtactactcccacttt

SEQ ID NO: 113393 - DNA, 25 bp, probe
ttctcttcaaagtggtgaccaagct

SEQ ID NO: 113394 - DNA, 25 bp, probe
actggcctctcaacattgtcatcac

SEQ ID NO: 113395 - DNA, 25 bp, probe
atgaacgtcatccacagcatcttca

SEQ ID NO: 113396 - DNA, 25 bp, probe
ccacagtagacctagttccaggatc

SEQ ID NO: 113397 - DNA, 25 bp, probe
atgggagcattctcaaaggctttag

SEQ ID NO: 113398 - DNA, 25 bp, probe
cttgctgccacagtagacctagttc

SEQ ID NO: 113399 - DNA, 25 bp, probe
ctgtgaaatacaaggttcccttctg

SEQ ID NO: 113400 - DNA, 25 bp, probe
catgggagcattctcaaaggcttta

SEQ ID NO: 113401 - DNA, 25 bp, probe
gccacagtagacctagttccaggat

SEQ ID NO: 113402 - DNA, 25 bp, probe
atctcagacccacctttcagcctta

SEQ ID NO: 113403 - DNA, 25 bp, probe
agtagacctagttccaggatccatg

SEQ ID NO: 113404 - DNA, 25 bp, probe
cagtagacctagttccaggatccat

SEQ ID NO: 113405 - DNA, 25 bp, probe
tctcagacccacctttcagccttaa

SEQ ID NO: 113406 - DNA, 25 bp, probe
cctgtgaaatacaaggttcccttct

SEQ ID NO: 113407 - DNA, 25 bp, probe
ggttcatctcagacccacctttcag

SEQ ID NO: 113408 - DNA, 25 bp, probe
cacagtagacctagttccaggatcc

SEQ ID NO: 113409 - DNA, 25 bp, probe
tgtgaaatacaaggttcccttctgc

SEQ ID NO: 113410 - DNA, 25 bp, probe
acagtagacctagttccaggatcca

SEQ ID NO: 113411 - DNA, 25 bp, probe
ctcagacccacctttcagccttaag

SEQ ID NO: 113412 - DNA, 25 bp, probe
gcctgtgaaatacaaggttcccttc

SEQ ID NO: 113413 - DNA, 25 bp, probe
gtagacctagttccaggatccatgg

SEQ ID NO: 113414 - DNA, 25 bp, probe
attctcaaaggctttagccctggac

SEQ ID NO: 113415 - DNA, 25 bp, probe
cattctcaaaggctttagccctgga

SEQ ID NO: 113416 - DNA, 25 bp, probe
caggttcatctcagacccacctttc

SEQ ID NO: 113417 - DNA, 25 bp, probe
aggatccatgggagcattctcaaag

SEQ ID NO: 113418 - DNA, 25 bp, probe
tagacctagttccaggatccatggg

SEQ ID NO: 113419 - DNA, 25 bp, probe
caggatccatgggagcattctcaaa

SEQ ID NO: 113420 - DNA, 25 bp, probe
gagcattctcaaaggctttagccct

SEQ ID NO: 113421 - DNA, 25 bp, probe
aggttcatctcagacccacctttca

SEQ ID NO: 113422 - DNA, 25 bp, probe
ggcctgtgaaatacaaggttccctt

SEQ ID NO: 113423 - DNA, 25 bp, probe
tagttccaggatccatgggagcatt

SEQ ID NO: 113424 - DNA, 25 bp, probe
aagacactaatggttcatcctctat

SEQ ID NO: 113425 - DNA, 25 bp, probe
agacactaatggttcatcctctata

SEQ ID NO: 113426 - DNA, 25 bp, probe
gttgctgaggatgtcacatataaga

SEQ ID NO: 113427 - DNA, 25 bp, probe
ccgctattggtataattcagatcat

SEQ ID NO: 113428 - DNA, 25 bp, probe
actaatggttcatcctctataaggc

SEQ ID NO: 113429 - DNA, 25 bp, probe
ttgttgctgaggatgtcacatataa

SEQ ID NO: 113430 - DNA, 25 bp, probe
tgttgctgaggatgtcacatataag

SEQ ID NO: 113431 - DNA, 25 bp, probe
cttgttgctgaggatgtcacatata

SEQ ID NO: 113432 - DNA, 25 bp, probe
ttgctgaggatgtcacatataagac

SEQ ID NO: 113433 - DNA, 25 bp, probe
acactaatggttcatcctctataag

SEQ ID NO: 113434 - DNA, 25 bp, probe
gacactaatggttcatcctctataa

SEQ ID NO: 113435 - DNA, 25 bp, probe
cactaatggttcatcctctataagg

SEQ ID NO: 113436 - DNA, 25 bp, probe
gcttgtttctctccattgctattaa

SEQ ID NO: 113437 - DNA, 25 bp, probe
ggcttgtttctctccattgctatta

SEQ ID NO: 113438 - DNA, 25 bp, probe
gaaagacactaatggttcatcctct

SEQ ID NO: 113439 - DNA, 25 bp, probe
ttattcctggtaatacagctcagtg

SEQ ID NO: 113440 - DNA, 25 bp, probe
attattcctggtaatacagctcagt

SEQ ID NO: 113441 - DNA, 25 bp, probe
aaagacactaatggttcatcctcta

SEQ ID NO: 113442 - DNA, 25 bp, probe
tattcctggtaatacagctcagtgt

SEQ ID NO: 113443 - DNA, 25 bp, probe
cccgctattggtataattcagatca

SEQ ID NO: 113444 - DNA, 25 bp, probe
taggcttgtttctctccattgctat

SEQ ID NO: 113445 - DNA, 25 bp, probe
ataggcttgtttctctccattgcta

SEQ ID NO: 113446 - DNA, 25 bp, probe
cgctattggtataattcagatcatt

SEQ ID NO: 113447 - DNA, 25 bp, probe
gatcaaacctgaaagacactaatgg

SEQ ID NO: 113448 - DNA, 25 bp, probe
ggatcaaacctgaaagacactaatg

SEQ ID NO: 113449 - DNA, 25 bp, probe
tccaagttgataactcttccatgtt

SEQ ID NO: 113450 - DNA, 25 bp, probe
ttccaagttgataactcttccatgt

SEQ ID NO: 113451 - DNA, 25 bp, probe
attcctggtaatacagctcagtgtc

SEQ ID NO: 113452 - DNA, 25 bp, probe
aggcttgtttctctccattgctatt

SEQ ID NO: 113453 - DNA, 25 bp, probe
cttgtttctctccattgctattaaa

SEQ ID NO: 113454 - DNA, 25 bp, probe
gttgataactcttccatgtttcaca

SEQ ID NO: 113455 - DNA, 25 bp, probe
aggatcaaacctgaaagacactaat

SEQ ID NO: 113456 - DNA, 25 bp, probe
gtcacatataagacaggatcaaacc

SEQ ID NO: 113457 - DNA, 25 bp, probe
attccaagttgataactcttccatg

SEQ ID NO: 113458 - DNA, 25 bp, probe
cctggtaatacagctcagtgtcatt

SEQ ID NO: 113459 - DNA, 25 bp, probe
atcaaacctgaaagacactaatggt

SEQ ID NO: 113460 - DNA, 25 bp, probe
gtattccaagttgataactcttcca

SEQ ID NO: 113461 - DNA, 25 bp, probe
tgtattccaagttgataactcttcc

SEQ ID NO: 113462 - DNA, 25 bp, probe
tcacatataagacaggatcaaacct

SEQ ID NO: 113463 - DNA, 25 bp, probe
tattattcctggtaatacagctcag

SEQ ID NO: 113464 - DNA, 25 bp, probe
gcttgttgctgaggatgtcacatat

SEQ ID NO: 113465 - DNA, 25 bp, probe
tttgtgattcactttaacctgatgg

SEQ ID NO: 113466 - DNA, 25 bp, probe
cataggcttgtttctctccattgct

SEQ ID NO: 113467 - DNA, 25 bp, probe
ctaatggttcatcctctataaggcc

SEQ ID NO: 113468 - DNA, 25 bp, probe
ctcaaattcttcctggagaggtgat

SEQ ID NO: 113469 - DNA, 25 bp, probe
tcaaattcttcctggagaggtgatg

SEQ ID NO: 113470 - DNA, 25 bp, probe
caaattcttcctggagaggtgatgg

SEQ ID NO: 113471 - DNA, 25 bp, probe
gaggactacgtcgatctaggtgtga

SEQ ID NO: 113472 - DNA, 25 bp, probe
aaggaggactacgtcgatctaggtg

SEQ ID NO: 113473 - DNA, 25 bp, probe
caaggaggactacgtcgatctaggt

SEQ ID NO: 113474 - DNA, 25 bp, probe
accaaggaggactacgtcgatctag

SEQ ID NO: 113475 - DNA, 25 bp, probe
gaccaaggaggactacgtcgatcta

SEQ ID NO: 113476 - DNA, 25 bp, probe
tctcaaattcttcctggagaggtga

SEQ ID NO: 113477 - DNA, 25 bp, probe
aaattcttcctggagaggtgatggc

SEQ ID NO: 113478 - DNA, 25 bp, probe
aggactacgtcgatctaggtgtgac

SEQ ID NO: 113479 - DNA, 25 bp, probe
tctgacccctgactgtcattctctc

SEQ ID NO: 113480 - DNA, 25 bp, probe
ctctgacccctgactgtcattctct

SEQ ID NO: 113481 - DNA, 25 bp, probe
ctaaggagttattgaagcacaagtt

SEQ ID NO: 113482 - DNA, 25 bp, probe
tttgctatttggaagtgattgaagg

SEQ ID NO: 113483 - DNA, 25 bp, probe
atcggacttggacagaaataagatg

SEQ ID NO: 113484 - DNA, 25 bp, probe
catcggacttggacagaaataagat

SEQ ID NO: 113485 - DNA, 25 bp, probe
cggacttggacagaaataagatgaa

SEQ ID NO: 113486 - DNA, 25 bp, probe
ggacttggacagaaataagatgaaa

SEQ ID NO: 113487 - DNA, 25 bp, probe
ttgctatttggaagtgattgaaggg

SEQ ID NO: 113488 - DNA, 25 bp, probe
gaagcacaagtttatactacgcaat

SEQ ID NO: 113489 - DNA, 25 bp, probe
attgaagcacaagtttatactacgc

SEQ ID NO: 113490 - DNA, 25 bp, probe
cttctgaactcgggtttcttagtaa

SEQ ID NO: 113491 - DNA, 25 bp, probe
aagcacaagtttatactacgcaatg

SEQ ID NO: 113492 - DNA, 25 bp, probe
ttggacagaaataagatgaaagaca

SEQ ID NO: 113493 - DNA, 25 bp, probe
ttctgaactcgggtttcttagtaag

SEQ ID NO: 113494 - DNA, 25 bp, probe
ccacctgacagtacataaagaagtt

SEQ ID NO: 113495 - DNA, 25 bp, probe
aaggagttattgaagcacaagttta

SEQ ID NO: 113496 - DNA, 25 bp, probe
taaggagttattgaagcacaagttt

SEQ ID NO: 113497 - DNA, 25 bp, probe
tcggacttggacagaaataagatga

SEQ ID NO: 113498 - DNA, 25 bp, probe
tgaagcacaagtttatactacgcaa

SEQ ID NO: 113499 - DNA, 25 bp, probe
ttgaagcacaagtttatactacgca

SEQ ID NO: 113500 - DNA, 25 bp, probe
aggagttattgaagcacaagtttat

SEQ ID NO: 113501 - DNA, 25 bp, probe
cacctgacagtacataaagaagttt

SEQ ID NO: 113502 - DNA, 25 bp, probe
gcctttctctcagtgtttatctaca

SEQ ID NO: 113503 - DNA, 25 bp, probe
gatccctccctcctttgatactaaa

SEQ ID NO: 113504 - DNA, 25 bp, probe
gctaaggagttattgaagcacaagt

SEQ ID NO: 113505 - DNA, 25 bp, probe
tatgcttctgaactcgggtttctta

SEQ ID NO: 113506 - DNA, 25 bp, probe
tggacagaaataagatgaaagacat

SEQ ID NO: 113507 - DNA, 25 bp, probe
atgatctacttggctgccttcaatt

SEQ ID NO: 113508 - DNA, 25 bp, probe
aatgatctacttggctgccttcaat

SEQ ID NO: 113509 - DNA, 25 bp, probe
acttggacagaaataagatgaaaga

SEQ ID NO: 113510 - DNA, 25 bp, probe
tagacccactgctaaggagttattg

SEQ ID NO: 113511 - DNA, 25 bp, probe
ttagacccactgctaaggagttatt

SEQ ID NO: 113512 - DNA, 25 bp, probe
tttagacccactgctaaggagttat

SEQ ID NO: 113513 - DNA, 25 bp, probe
cttggacagaaataagatgaaagac

SEQ ID NO: 113514 - DNA, 25 bp, probe
gacttggacagaaataagatgaaag

SEQ ID NO: 113515 - DNA, 25 bp, probe
tcccacctgacagtacataaagaag

SEQ ID NO: 113516 - DNA, 25 bp, probe
cccacctgacagtacataaagaagt

SEQ ID NO: 113517 - DNA, 25 bp, probe
cctttctctcagtgtttatctacaa

SEQ ID NO: 113518 - DNA, 25 bp, probe
ctttagacccactgctaaggagtta

SEQ ID NO: 113519 - DNA, 25 bp, probe
ctacaattatttctcctctgtttgc

SEQ ID NO: 113520 - DNA, 25 bp, probe
ttatgcttctgaactcgggtttctt

SEQ ID NO: 113521 - DNA, 25 bp, probe
tttatgcttctgaactcgggtttct

SEQ ID NO: 113522 - DNA, 25 bp, probe
gtttatgcttctgaactcgggtttc

SEQ ID NO: 113523 - DNA, 25 bp, probe
acccactgctaaggagttattgaag

SEQ ID NO: 113524 - DNA, 25 bp, probe
gacccactgctaaggagttattgaa

SEQ ID NO: 113525 - DNA, 25 bp, probe
tgtttacccattcctttatccatcc

SEQ ID NO: 113526 - DNA, 25 bp, probe
cctctcctactctacagcattaaag

SEQ ID NO: 113527 - DNA, 25 bp, probe
ttgtttacccattcctttatccatc

SEQ ID NO: 113528 - DNA, 25 bp, probe
tttacccattcctttatccatccct

SEQ ID NO: 113529 - DNA, 25 bp, probe
gtttacccattcctttatccatccc

SEQ ID NO: 113530 - DNA, 25 bp, probe
ccctctcctactctacagcattaaa

SEQ ID NO: 113531 - DNA, 25 bp, probe
tctcctactctacagcattaaagac

SEQ ID NO: 113532 - DNA, 25 bp, probe
ctcctactctacagcattaaagact

SEQ ID NO: 113533 - DNA, 25 bp, probe
tttgtttacccattcctttatccat

SEQ ID NO: 113534 - DNA, 25 bp, probe
ctctcctactctacagcattaaaga

SEQ ID NO: 113535 - DNA, 25 bp, probe
ttacccattcctttatccatccctc

SEQ ID NO: 113536 - DNA, 25 bp, probe
ttcaggtaaggagacaggaggagta

SEQ ID NO: 113537 - DNA, 25 bp, probe
tcctactctacagcattaaagactg

SEQ ID NO: 113538 - DNA, 25 bp, probe
tcaggtaaggagacaggaggagtag

SEQ ID NO: 113539 - DNA, 25 bp, probe
tacccattcctttatccatccctcc

SEQ ID NO: 113540 - DNA, 25 bp, probe
gtaaggagacaggaggagtaggagg

SEQ ID NO: 113541 - DNA, 25 bp, probe
ggtaaggagacaggaggagtaggag

SEQ ID NO: 113542 - DNA, 25 bp, probe
taaggagacaggaggagtaggagga

SEQ ID NO: 113543 - DNA, 25 bp, probe
gcgtttacctttagagttttgtttt

SEQ ID NO: 113544 - DNA, 25 bp, probe
tggctgaatccttgtgtgatatttt

SEQ ID NO: 113545 - DNA, 25 bp, probe
cttggtgtgtgggagaagttttata

SEQ ID NO: 113546 - DNA, 25 bp, probe
aagagtagtcctttaccaccctcac

SEQ ID NO: 113547 - DNA, 25 bp, probe
caagagtagtcctttaccaccctca

SEQ ID NO: 113548 - DNA, 25 bp, probe
acaagagtagtcctttaccaccctc

SEQ ID NO: 113549 - DNA, 25 bp, probe
caggtaaggagacaggaggagtagg

SEQ ID NO: 113550 - DNA, 25 bp, probe
ttttgtttacccattcctttatcca

SEQ ID NO: 113551 - DNA, 25 bp, probe
aggtaaggagacaggaggagtagga

SEQ ID NO: 113552 - DNA, 25 bp, probe
gacaagagtagtcctttaccaccct

SEQ ID NO: 113553 - DNA, 25 bp, probe
tttccttctgagtttgctgttggtg

SEQ ID NO: 113554 - DNA, 25 bp, probe
tgtgtgggagaagttttataattgc

SEQ ID NO: 113555 - DNA, 25 bp, probe
tggtgtgtgggagaagttttataat

SEQ ID NO: 113556 - DNA, 25 bp, probe
ttggtgtgtgggagaagttttataa

SEQ ID NO: 113557 - DNA, 25 bp, probe
gtgtgggagaagttttataattgct

SEQ ID NO: 113558 - DNA, 25 bp, probe
tcttcgcttgtttatttattcattt

SEQ ID NO: 113559 - DNA, 25 bp, probe
ttcttcgcttgtttatttattcatt

SEQ ID NO: 113560 - DNA, 25 bp, probe
tttcttcgcttgtttatttattcat

SEQ ID NO: 113561 - DNA, 25 bp, probe
ggtgtgtgggagaagttttataatt

SEQ ID NO: 113562 - DNA, 25 bp, probe
gtagtcctttaccaccctcactctg

SEQ ID NO: 113563 - DNA, 25 bp, probe
tttcaggtaaggagacaggaggagt

SEQ ID NO: 113564 - DNA, 25 bp, probe
tcttggtgtgtgggagaagttttat

SEQ ID NO: 113565 - DNA, 25 bp, probe
cgtttacctttagagttttgttttg

SEQ ID NO: 113566 - DNA, 25 bp, probe
attttgtttacccattcctttatcc

SEQ ID NO: 113567 - DNA, 25 bp, probe
agtagtcctttaccaccctcactct

SEQ ID NO: 113568 - DNA, 25 bp, probe
tgtgggagaagttttataattgctt

SEQ ID NO: 113569 - DNA, 25 bp, probe
ccaaccaattcaattaatgtcttca

SEQ ID NO: 113570 - DNA, 25 bp, probe
tccaaccaattcaattaatgtcttc

SEQ ID NO: 113571 - DNA, 25 bp, probe
gatccaaccaattcaattaatgtct

SEQ ID NO: 113572 - DNA, 25 bp, probe
catttccatcagtgaagaatcaacc

SEQ ID NO: 113573 - DNA, 25 bp, probe
gcatttccatcagtgaagaatcaac

SEQ ID NO: 113574 - DNA, 25 bp, probe
atccaaccaattcaattaatgtctt

SEQ ID NO: 113575 - DNA, 25 bp, probe
atcaggagaacaagagtaaacccag

SEQ ID NO: 113576 - DNA, 25 bp, probe
ttcttcctcaccaatgacattcttt

SEQ ID NO: 113577 - DNA, 25 bp, probe
tttcttcctcaccaatgacattctt

SEQ ID NO: 113578 - DNA, 25 bp, probe
tcatattgaagaagagatgtacctt

SEQ ID NO: 113579 - DNA, 25 bp, probe
catcaggagaacaagagtaaaccca

SEQ ID NO: 113580 - DNA, 25 bp, probe
atttccatcagtgaagaatcaaccg

SEQ ID NO: 113581 - DNA, 25 bp, probe
tgatgttcaacagaagtgaagacaa

SEQ ID NO: 113582 - DNA, 25 bp, probe
aaggaggtagagggaagaaacagaa

SEQ ID NO: 113583 - DNA, 25 bp, probe
actgtggaatgtactggagagactg

SEQ ID NO: 113584 - DNA, 25 bp, probe
cactgtggaatgtactggagagact

SEQ ID NO: 113585 - DNA, 25 bp, probe
gtgatgttcaacagaagtgaagaca

SEQ ID NO: 113586 - DNA, 25 bp, probe
aaggtgatgttcaacagaagtgaag

SEQ ID NO: 113587 - DNA, 25 bp, probe
ctcctgagtctccagatgttgttct

SEQ ID NO: 113588 - DNA, 25 bp, probe
gaatgtactggagagactggcttct

SEQ ID NO: 113589 - DNA, 25 bp, probe
aggaggtagagggaagaaacagaag

SEQ ID NO: 113590 - DNA, 25 bp, probe
gaaggaggtagagggaagaaacaga

SEQ ID NO: 113591 - DNA, 25 bp, probe
tgccgtgggaaaccaaatatataat

SEQ ID NO: 113592 - DNA, 25 bp, probe
atgccgtgggaaaccaaatatataa

SEQ ID NO: 113593 - DNA, 25 bp, probe
gtagagggaagaaacagaagcagtg

SEQ ID NO: 113594 - DNA, 25 bp, probe
caaccaattcaattaatgtcttcat

SEQ ID NO: 113595 - DNA, 25 bp, probe
gccgtgggaaaccaaatatataata

SEQ ID NO: 113596 - DNA, 25 bp, probe
gatgccgtgggaaaccaaatatata

SEQ ID NO: 113597 - DNA, 25 bp, probe
ggtgatgttcaacagaagtgaagac

SEQ ID NO: 113598 - DNA, 25 bp, probe
aggtgatgttcaacagaagtgaaga

SEQ ID NO: 113599 - DNA, 25 bp, probe
gcaatctccatttctcagtgacaga

SEQ ID NO: 113600 - DNA, 25 bp, probe
aatctccatttctcagtgacagaag

SEQ ID NO: 113601 - DNA, 25 bp, probe
caatctccatttctcagtgacagaa

SEQ ID NO: 113602 - DNA, 25 bp, probe
ctgtggaatgtactggagagactgg

SEQ ID NO: 113603 - DNA, 25 bp, probe
tgcatttccatcagtgaagaatcaa

SEQ ID NO: 113604 - DNA, 25 bp, probe
gcatcaggagaacaagagtaaaccc

SEQ ID NO: 113605 - DNA, 25 bp, probe
gatgttgttctgtcagttgccaaag

SEQ ID NO: 113606 - DNA, 25 bp, probe
atatgcatcaggagaacaagagtaa

SEQ ID NO: 113607 - DNA, 25 bp, probe
aatatgcatcaggagaacaagagta

SEQ ID NO: 113608 - DNA, 25 bp, probe
aacaatatgcatcaggagaacaaga

SEQ ID NO: 113609 - DNA, 25 bp, probe
acattcttttcttttctcctttcgt

SEQ ID NO: 113610 - DNA, 25 bp, probe
catgactcctgtagggaagtttctt

SEQ ID NO: 113611 - DNA, 25 bp, probe
cagaagtgaagacaaaacaatatgc

SEQ ID NO: 113612 - DNA, 25 bp, probe
caatatgcatcaggagaacaagagt

SEQ ID NO: 113613 - DNA, 25 bp, probe
cttcaaagacgaggtaaggtgcaag

SEQ ID NO: 113614 - DNA, 25 bp, probe
gatgaggtcttcggctttgttcaga

SEQ ID NO: 113615 - DNA, 25 bp, probe
tcttcaaagacgaggtaaggtgcaa

SEQ ID NO: 113616 - DNA, 25 bp, probe
ttcaaagacgaggtaaggtgcaagt

SEQ ID NO: 113617 - DNA, 25 bp, probe
tatcgaaagattccgcaggaagatt

SEQ ID NO: 113618 - DNA, 25 bp, probe
ctcttcaaagacgaggtaaggtgca

SEQ ID NO: 113619 - DNA, 25 bp, probe
gtatcgaaagattccgcaggaagat

SEQ ID NO: 113620 - DNA, 25 bp, probe
atcgaaagattccgcaggaagattt

SEQ ID NO: 113621 - DNA, 25 bp, probe
aagtatcgaaagattccgcaggaag

SEQ ID NO: 113622 - DNA, 25 bp, probe
gaagtatcgaaagattccgcaggaa

SEQ ID NO: 113623 - DNA, 25 bp, probe
aaagattccgcaggaagatttccag

SEQ ID NO: 113624 - DNA, 25 bp, probe
gaaagattccgcaggaagatttcca

SEQ ID NO: 113625 - DNA, 25 bp, probe
tcaaagacgaggtaaggtgcaagtg

SEQ ID NO: 113626 - DNA, 25 bp, probe
tcgaaagattccgcaggaagatttc

SEQ ID NO: 113627 - DNA, 25 bp, probe
aagattccgcaggaagatttccaga

SEQ ID NO: 113628 - DNA, 25 bp, probe
agtatcgaaagattccgcaggaaga

SEQ ID NO: 113629 - DNA, 25 bp, probe
cgaagtatcgaaagattccgcagga

SEQ ID NO: 113630 - DNA, 25 bp, probe
tccgaagtatcgaaagattccgcag

SEQ ID NO: 113631 - DNA, 25 bp, probe
ctccgaagtatcgaaagattccgca

SEQ ID NO: 113632 - DNA, 25 bp, probe
ccctccgaagtatcgaaagattccg

SEQ ID NO: 113633 - DNA, 25 bp, probe
cgaaagattccgcaggaagatttcc

SEQ ID NO: 113634 - DNA, 25 bp, probe
gccctccgaagtatcgaaagattcc

SEQ ID NO: 113635 - DNA, 25 bp, probe
agattccgcaggaagatttccagac

SEQ ID NO: 113636 - DNA, 25 bp, probe
atgaggtcttcggctttgttcagac

SEQ ID NO: 113637 - DNA, 25 bp, probe
ctttgttcagaccctgacaggttgt

SEQ ID NO: 113638 - DNA, 25 bp, probe
tttgttcagaccctgacaggttgtg

SEQ ID NO: 113639 - DNA, 25 bp, probe
cctcttcaaagacgaggtaaggtgc

SEQ ID NO: 113640 - DNA, 25 bp, probe
gcctcttcaaagacgaggtaaggtg

SEQ ID NO: 113641 - DNA, 25 bp, probe
caaccttttcataggagatgcaaac

SEQ ID NO: 113642 - DNA, 25 bp, probe
aaccttttcataggagatgcaaaca

SEQ ID NO: 113643 - DNA, 25 bp, probe
accttttcataggagatgcaaacag

SEQ ID NO: 113644 - DNA, 25 bp, probe
ccaaccttttcataggagatgcaaa

SEQ ID NO: 113645 - DNA, 25 bp, probe
ccttttcataggagatgcaaacagc

SEQ ID NO: 113646 - DNA, 25 bp, probe
cccaaccttttcataggagatgcaa

SEQ ID NO: 113647 - DNA, 25 bp, probe
cttttcataggagatgcaaacagca

SEQ ID NO: 113648 - DNA, 25 bp, probe
ttttcataggagatgcaaacagcat

SEQ ID NO: 113649 - DNA, 25 bp, probe
gtatttctctccagccgtgatcttg

SEQ ID NO: 113650 - DNA, 25 bp, probe
agtatttctctccagccgtgatctt

SEQ ID NO: 113651 - DNA, 25 bp, probe
ccaccacctcagtatttctctccag

SEQ ID NO: 113652 - DNA, 25 bp, probe
ctcagtatttctctccagccgtgat

SEQ ID NO: 113653 - DNA, 25 bp, probe
cagtatttctctccagccgtgatct

SEQ ID NO: 113654 - DNA, 25 bp, probe
tcagtatttctctccagccgtgatc

SEQ ID NO: 113655 - DNA, 25 bp, probe
caccacctcagtatttctctccagc

SEQ ID NO: 113656 - DNA, 25 bp, probe
tatttctctccagccgtgatcttgc

SEQ ID NO: 113657 - DNA, 25 bp, probe
gtgccaccacctcagtatttctctc

SEQ ID NO: 113658 - DNA, 25 bp, probe
catcttcagcaagttcacctccaag

SEQ ID NO: 113659 - DNA, 25 bp, probe
atcttcagcaagttcacctccaagt

SEQ ID NO: 113660 - DNA, 25 bp, probe
tcttcagcaagttcacctccaagtt

SEQ ID NO: 113661 - DNA, 25 bp, probe
cagcaagttcacctccaagtttgta

SEQ ID NO: 113662 - DNA, 25 bp, probe
cttcagcaagttcacctccaagttt

SEQ ID NO: 113663 - DNA, 25 bp, probe
agcaagttcacctccaagtttgtac

SEQ ID NO: 113664 - DNA, 25 bp, probe
ttcagcaagttcacctccaagtttg

SEQ ID NO: 113665 - DNA, 25 bp, probe
caagttcacctccaagtttgtacgc

SEQ ID NO: 113666 - DNA, 25 bp, probe
gcaagttcacctccaagtttgtacg

SEQ ID NO: 113667 - DNA, 25 bp, probe
tcagcaagttcacctccaagtttgt

SEQ ID NO: 113668 - DNA, 25 bp, probe
aagttcacctccaagtttgtacgca

SEQ ID NO: 113669 - DNA, 25 bp, probe
ccagcacaaatcgaagcaggaattc

SEQ ID NO: 113670 - DNA, 25 bp, probe
gctcctatgataatctaatgccact

SEQ ID NO: 113671 - DNA, 25 bp, probe
cctatgataatctaatgccactgct

SEQ ID NO: 113672 - DNA, 25 bp, probe
tcctatgataatctaatgccactgc

SEQ ID NO: 113673 - DNA, 25 bp, probe
aactcaccataatgtagaatcagca

SEQ ID NO: 113674 - DNA, 25 bp, probe
tatgataatctaatgccactgctga

SEQ ID NO: 113675 - DNA, 25 bp, probe
caactcaccataatgtagaatcagc

SEQ ID NO: 113676 - DNA, 25 bp, probe
actcaccataatgtagaatcagcag

SEQ ID NO: 113677 - DNA, 25 bp, probe
atgataatctaatgccactgctgat

SEQ ID NO: 113678 - DNA, 25 bp, probe
ctatgataatctaatgccactgctg

SEQ ID NO: 113679 - DNA, 25 bp, probe
caccataatgtagaatcagcaggag

SEQ ID NO: 113680 - DNA, 25 bp, probe
ctcaccataatgtagaatcagcagg

SEQ ID NO: 113681 - DNA, 25 bp, probe
atcaggcattagattctcataagga

SEQ ID NO: 113682 - DNA, 25 bp, probe
catcaggcattagattctcataagg

SEQ ID NO: 113683 - DNA, 25 bp, probe
tcaccataatgtagaatcagcagga

SEQ ID NO: 113684 - DNA, 25 bp, probe
ctcctatgataatctaatgccactg

SEQ ID NO: 113685 - DNA, 25 bp, probe
aggcattagattctcataaggagtg

SEQ ID NO: 113686 - DNA, 25 bp, probe
caggcattagattctcataaggagt

SEQ ID NO: 113687 - DNA, 25 bp, probe
tcaggcattagattctcataaggag

SEQ ID NO: 113688 - DNA, 25 bp, probe
gataatctaatgccactgctgatct

SEQ ID NO: 113689 - DNA, 25 bp, probe
ataatctaatgccactgctgatctg

SEQ ID NO: 113690 - DNA, 25 bp, probe
tgataatctaatgccactgctgatc

SEQ ID NO: 113691 - DNA, 25 bp, probe
cagatcatcaggcattagattctca

SEQ ID NO: 113692 - DNA, 25 bp, probe
acagatcatcaggcattagattctc

SEQ ID NO: 113693 - DNA, 25 bp, probe
gacagatcatcaggcattagattct

SEQ ID NO: 113694 - DNA, 25 bp, probe
tcatcaggcattagattctcataag

SEQ ID NO: 113695 - DNA, 25 bp, probe
agatcatcaggcattagattctcat

SEQ ID NO: 113696 - DNA, 25 bp, probe
ctgtgtcatgtgctaattcctagag

SEQ ID NO: 113697 - DNA, 25 bp, probe
tgacagatcatcaggcattagattc

SEQ ID NO: 113698 - DNA, 25 bp, probe
atgtcatcaggctccagttattctc

SEQ ID NO: 113699 - DNA, 25 bp, probe
gtgacagatcatcaggcattagatt

SEQ ID NO: 113700 - DNA, 25 bp, probe
taatctaatgccactgctgatctga

SEQ ID NO: 113701 - DNA, 25 bp, probe
acaactcaccataatgtagaatcag

SEQ ID NO: 113702 - DNA, 25 bp, probe
agtgacagatcatcaggcattagat

SEQ ID NO: 113703 - DNA, 25 bp, probe
accataatgtagaatcagcaggagc

SEQ ID NO: 113704 - DNA, 25 bp, probe
atcatcaggcattagattctcataa

SEQ ID NO: 113705 - DNA, 25 bp, probe
gatcatcaggcattagattctcata

SEQ ID NO: 113706 - DNA, 25 bp, probe
catcaggctccagttattctccatc

SEQ ID NO: 113707 - DNA, 25 bp, probe
gatgtcatcaggctccagttattct

SEQ ID NO: 113708 - DNA, 25 bp, probe
cctgtgtcatgtgctaattcctaga

SEQ ID NO: 113709 - DNA, 25 bp, probe
atcaggctccagttattctccatct

SEQ ID NO: 113710 - DNA, 25 bp, probe
gggagtggctgtaaatatagatgaa

SEQ ID NO: 113711 - DNA, 25 bp, probe
ttgggctcctatgataatctaatgc

SEQ ID NO: 113712 - DNA, 25 bp, probe
cagtgacagatcatcaggcattaga

SEQ ID NO: 113713 - DNA, 25 bp, probe
tcatcaggctccagttattctccat

SEQ ID NO: 113714 - DNA, 25 bp, probe
caagacatgctttaaatgtggttcc

SEQ ID NO: 113715 - DNA, 25 bp, probe
ccaagacatgctttaaatgtggttc

SEQ ID NO: 113716 - DNA, 25 bp, probe
aagacatgctttaaatgtggttccc

SEQ ID NO: 113717 - DNA, 25 bp, probe
cccaagacatgctttaaatgtggtt

SEQ ID NO: 113718 - DNA, 25 bp, probe
cagcccaagacatgctttaaatgtg

SEQ ID NO: 113719 - DNA, 25 bp, probe
agacatgctttaaatgtggttcccg

SEQ ID NO: 113720 - DNA, 25 bp, probe
agcccaagacatgctttaaatgtgg

SEQ ID NO: 113721 - DNA, 25 bp, probe
catgctttaaatgtggttcccggac

SEQ ID NO: 113722 - DNA, 25 bp, probe
gcccaagacatgctttaaatgtggt

SEQ ID NO: 113723 - DNA, 25 bp, probe
gcagcccaagacatgctttaaatgt

SEQ ID NO: 113724 - DNA, 25 bp, probe
gacatgctttaaatgtggttcccgg

SEQ ID NO: 113725 - DNA, 25 bp, probe
acatgctttaaatgtggttcccgga

SEQ ID NO: 113726 - DNA, 25 bp, probe
gaacttcctggtcctagatgtcttc

SEQ ID NO: 113727 - DNA, 25 bp, probe
acttcctggtcctagatgtcttctt

SEQ ID NO: 113728 - DNA, 25 bp, probe
aacttcctggtcctagatgtcttct

SEQ ID NO: 113729 - DNA, 25 bp, probe
agaacttcctggtcctagatgtctt

SEQ ID NO: 113730 - DNA, 25 bp, probe
cgagattgggaataaagaggcataa

SEQ ID NO: 113731 - DNA, 25 bp, probe
agattgggaataaagaggcataaag

SEQ ID NO: 113732 - DNA, 25 bp, probe
gagattgggaataaagaggcataaa

SEQ ID NO: 113733 - DNA, 25 bp, probe
gagaacttcctggtcctagatgtct

SEQ ID NO: 113734 - DNA, 25 bp, probe
acgagattgggaataaagaggcata

SEQ ID NO: 113735 - DNA, 25 bp, probe
taaagtgctgacgagattgggaata

SEQ ID NO: 113736 - DNA, 25 bp, probe
tataaagtgctgacgagattgggaa

SEQ ID NO: 113737 - DNA, 25 bp, probe
gatacagatgtagaaggtgggtagg

SEQ ID NO: 113738 - DNA, 25 bp, probe
ggatacagatgtagaaggtgggtag

SEQ ID NO: 113739 - DNA, 25 bp, probe
cttcctggtcctagatgtcttcttt

SEQ ID NO: 113740 - DNA, 25 bp, probe
ataaagtgctgacgagattgggaat

SEQ ID NO: 113741 - DNA, 25 bp, probe
ttcctggtcctagatgtcttctttg

SEQ ID NO: 113742 - DNA, 25 bp, probe
aagtgctgacgagattgggaataaa

SEQ ID NO: 113743 - DNA, 25 bp, probe
aaagtgctgacgagattgggaataa

SEQ ID NO: 113744 - DNA, 25 bp, probe
gacgagattgggaataaagaggcat

SEQ ID NO: 113745 - DNA, 25 bp, probe
tgctgacgagattgggaataaagag

SEQ ID NO: 113746 - DNA, 25 bp, probe
ggagatcctcgactacatctatgag

SEQ ID NO: 113747 - DNA, 25 bp, probe
cctggtcctagatgtcttctttgag

SEQ ID NO: 113748 - DNA, 25 bp, probe
ttataaagtgctgacgagattggga

SEQ ID NO: 113749 - DNA, 25 bp, probe
ctggagatcctcgactacatctatg

SEQ ID NO: 113750 - DNA, 25 bp, probe
gtgctgacgagattgggaataaaga

SEQ ID NO: 113751 - DNA, 25 bp, probe
agtgctgacgagattgggaataaag

SEQ ID NO: 113752 - DNA, 25 bp, probe
tggagatcctcgactacatctatga

SEQ ID NO: 113753 - DNA, 25 bp, probe
atacagatgtagaaggtgggtaggg

SEQ ID NO: 113754 - DNA, 25 bp, probe
gggatacagatgtagaaggtgggta

SEQ ID NO: 113755 - DNA, 25 bp, probe
tcctggtcctagatgtcttctttga

SEQ ID NO: 113756 - DNA, 25 bp, probe
ctcgactacatctatgaggtgtcct

SEQ ID NO: 113757 - DNA, 25 bp, probe
ctggtcctagatgtcttctttgagg

SEQ ID NO: 113758 - DNA, 25 bp, probe
ctgacgagattgggaataaagaggc

SEQ ID NO: 113759 - DNA, 25 bp, probe
gctgacgagattgggaataaagagg

SEQ ID NO: 113760 - DNA, 25 bp, probe
tacaaccgcaacgagacctacatac

SEQ ID NO: 113761 - DNA, 25 bp, probe
cgactacatctatgaggtgtcctgg

SEQ ID NO: 113762 - DNA, 25 bp, probe
tcgactacatctatgaggtgtcctg

SEQ ID NO: 113763 - DNA, 25 bp, probe
ggagaacttcctggtcctagatgtc

SEQ ID NO: 113764 - DNA, 25 bp, probe
tctctccctccagtctgattttata

SEQ ID NO: 113765 - DNA, 25 bp, probe
ctacatctatgaggtgtcctgggat

SEQ ID NO: 113766 - DNA, 25 bp, probe
ctctctccctccagtctgattttat

SEQ ID NO: 113767 - DNA, 25 bp, probe
tacatctatgaggtgtcctgggatc

SEQ ID NO: 113768 - DNA, 25 bp, probe
gctggagatcctcgactacatctat

SEQ ID NO: 113769 - DNA, 25 bp, probe
gtacaaccgcaacgagacctacata

SEQ ID NO: 113770 - DNA, 25 bp, probe
tgaagagtgcaaggatgtgaacaag

SEQ ID NO: 113771 - DNA, 25 bp, probe
ctgaagagtgcaaggatgtgaacaa

SEQ ID NO: 113772 - DNA, 25 bp, probe
gaagagtgcaaggatgtgaacaagg

SEQ ID NO: 113773 - DNA, 25 bp, probe
gagccggaagttatttattgggaac

SEQ ID NO: 113774 - DNA, 25 bp, probe
gagacggagccggaagttatttatt

SEQ ID NO: 113775 - DNA, 25 bp, probe
aagagtgcaaggatgtgaacaaggt

SEQ ID NO: 113776 - DNA, 25 bp, probe
ggagccggaagttatttattgggaa

SEQ ID NO: 113777 - DNA, 25 bp, probe
agacggagccggaagttatttattg

SEQ ID NO: 113778 - DNA, 25 bp, probe
agccggaagttatttattgggaacc

SEQ ID NO: 113779 - DNA, 25 bp, probe
agagtgcaaggatgtgaacaaggtc

SEQ ID NO: 113780 - DNA, 25 bp, probe
ggaagttatttattgggaacccctg

SEQ ID NO: 113781 - DNA, 25 bp, probe
tgagacggagccggaagttatttat

SEQ ID NO: 113782 - DNA, 25 bp, probe
gacggagccggaagttatttattgg

SEQ ID NO: 113783 - DNA, 25 bp, probe
gaagttatttattgggaacccctgc

SEQ ID NO: 113784 - DNA, 25 bp, probe
cctgaagagtgcaaggatgtgaaca

SEQ ID NO: 113785 - DNA, 25 bp, probe
ccctggtgctcaaatttcagttctg

SEQ ID NO: 113786 - DNA, 25 bp, probe
gccggaagttatttattgggaaccc

SEQ ID NO: 113787 - DNA, 25 bp, probe
cggaagttatttattgggaacccct

SEQ ID NO: 113788 - DNA, 25 bp, probe
gtgagacggagccggaagttattta

SEQ ID NO: 113789 - DNA, 25 bp, probe
cctggtgctcaaatttcagttctgc

SEQ ID NO: 113790 - DNA, 25 bp, probe
cggagccggaagttatttattggga

SEQ ID NO: 113791 - DNA, 25 bp, probe
aagttatttattgggaacccctgca

SEQ ID NO: 113792 - DNA, 25 bp, probe
ctggtgctcaaatttcagttctgca

SEQ ID NO: 113793 - DNA, 25 bp, probe
acggagccggaagttatttattggg

SEQ ID NO: 113794 - DNA, 25 bp, probe
ccggaagttatttattgggaacccc

SEQ ID NO: 113795 - DNA, 25 bp, probe
gttagtgatgctggagaagagaata

SEQ ID NO: 113796 - DNA, 25 bp, probe
ttagtgatgctggagaagagaatat

SEQ ID NO: 113797 - DNA, 25 bp, probe
tgttagtgatgctggagaagagaat

SEQ ID NO: 113798 - DNA, 25 bp, probe
ttatatacctcattctgacacctgc

SEQ ID NO: 113799 - DNA, 25 bp, probe
gctggagaagagaatattactggtt

SEQ ID NO: 113800 - DNA, 25 bp, probe
atgctggagaagagaatattactgg

SEQ ID NO: 113801 - DNA, 25 bp, probe
gtgttagtgatgctggagaagagaa

SEQ ID NO: 113802 - DNA, 25 bp, probe
gtgatgctggagaagagaatattac

SEQ ID NO: 113803 - DNA, 25 bp, probe
tgctggagaagagaatattactggt

SEQ ID NO: 113804 - DNA, 25 bp, probe
tgatgctggagaagagaatattact

SEQ ID NO: 113805 - DNA, 25 bp, probe
agtgatgctggagaagagaatatta

SEQ ID NO: 113806 - DNA, 25 bp, probe
tagtgatgctggagaagagaatatt

SEQ ID NO: 113807 - DNA, 25 bp, probe
gatgctggagaagagaatattactg

SEQ ID NO: 113808 - DNA, 25 bp, probe
aagaaccattagaaagggctcatta

SEQ ID NO: 113809 - DNA, 25 bp, probe
agcaatcaaagaaccattagaaagg

SEQ ID NO: 113810 - DNA, 25 bp, probe
agaaccattagaaagggctcattaa

SEQ ID NO: 113811 - DNA, 25 bp, probe
aaagaaccattagaaagggctcatt

SEQ ID NO: 113812 - DNA, 25 bp, probe
aatcaaagaaccattagaaagggct

SEQ ID NO: 113813 - DNA, 25 bp, probe
caatcaaagaaccattagaaagggc

SEQ ID NO: 113814 - DNA, 25 bp, probe
gcaatcaaagaaccattagaaaggg

SEQ ID NO: 113815 - DNA, 25 bp, probe
aactcataaagcaatcaaagaacca

SEQ ID NO: 113816 - DNA, 25 bp, probe
gaaccattagaaagggctcattaag

SEQ ID NO: 113817 - DNA, 25 bp, probe
actcataaagcaatcaaagaaccat

SEQ ID NO: 113818 - DNA, 25 bp, probe
ccctaactcataaagcaatcaaaga

SEQ ID NO: 113819 - DNA, 25 bp, probe
atcaaagaaccattagaaagggctc

SEQ ID NO: 113820 - DNA, 25 bp, probe
caaagaaccattagaaagggctcat

SEQ ID NO: 113821 - DNA, 25 bp, probe
tacctcattctgacacctgcatata

SEQ ID NO: 113822 - DNA, 25 bp, probe
tatacctcattctgacacctgcata

SEQ ID NO: 113823 - DNA, 25 bp, probe
tatatacctcattctgacacctgca

SEQ ID NO: 113824 - DNA, 25 bp, probe
aagcaatcaaagaaccattagaaag

SEQ ID NO: 113825 - DNA, 25 bp, probe
ctcataaagcaatcaaagaaccatt

SEQ ID NO: 113826 - DNA, 25 bp, probe
atacctcattctgacacctgcatat

SEQ ID NO: 113827 - DNA, 25 bp, probe
atatacctcattctgacacctgcat

SEQ ID NO: 113828 - DNA, 25 bp, probe
cttggtgttagtgatgctggagaag

SEQ ID NO: 113829 - DNA, 25 bp, probe
tcaaagaaccattagaaagggctca

SEQ ID NO: 113830 - DNA, 25 bp, probe
aaagcaatcaaagaaccattagaaa

SEQ ID NO: 113831 - DNA, 25 bp, probe
gaggcaaggtaataaagcacttcag

SEQ ID NO: 113832 - DNA, 25 bp, probe
cagaggcaaggtaataaagcacttc

SEQ ID NO: 113833 - DNA, 25 bp, probe
catatagtgtgggaaattgctctgc

SEQ ID NO: 113834 - DNA, 25 bp, probe
ctcattctgacacctgcatatagtg

SEQ ID NO: 113835 - DNA, 25 bp, probe
taactcataaagcaatcaaagaacc

SEQ ID NO: 113836 - DNA, 25 bp, probe
cctcattctgacacctgcatatagt

SEQ ID NO: 113837 - DNA, 25 bp, probe
acctcattctgacacctgcatatag

SEQ ID NO: 113838 - DNA, 25 bp, probe
ttggtgttagtgatgctggagaaga

SEQ ID NO: 113839 - DNA, 25 bp, probe
ttcgagagtatagaaccgttcattc

SEQ ID NO: 113840 - DNA, 25 bp, probe
cttcgagagtatagaaccgttcatt

SEQ ID NO: 113841 - DNA, 25 bp, probe
tcttcgagagtatagaaccgttcat

SEQ ID NO: 113842 - DNA, 25 bp, probe
atcatacaagtttgacatcgggaag

SEQ ID NO: 113843 - DNA, 25 bp, probe
cgagagtatagaaccgttcattctt

SEQ ID NO: 113844 - DNA, 25 bp, probe
agtatagaaccgttcattcttgctt

SEQ ID NO: 113845 - DNA, 25 bp, probe
gagtatagaaccgttcattcttgct

SEQ ID NO: 113846 - DNA, 25 bp, probe
agagtatagaaccgttcattcttgc

SEQ ID NO: 113847 - DNA, 25 bp, probe
catcatacaagtttgacatcgggaa

SEQ ID NO: 113848 - DNA, 25 bp, probe
cctcccatcatacaagtttgacatc

SEQ ID NO: 113849 - DNA, 25 bp, probe
gagagtatagaaccgttcattcttg

SEQ ID NO: 113850 - DNA, 25 bp, probe
ttcattcttgctttgtgtcccattc

SEQ ID NO: 113851 - DNA, 25 bp, probe
gtagaccgtttgcttctttaactcc

SEQ ID NO: 113852 - DNA, 25 bp, probe
ctcccatcatacaagtttgacatcg

SEQ ID NO: 113853 - DNA, 25 bp, probe
tcctcccatcatacaagtttgacat

SEQ ID NO: 113854 - DNA, 25 bp, probe
ttcctcccatcatacaagtttgaca

SEQ ID NO: 113855 - DNA, 25 bp, probe
aaatgtagtctttgaatgtgtgaaa

SEQ ID NO: 113856 - DNA, 25 bp, probe
gttcattcttgctttgtgtcccatt

SEQ ID NO: 113857 - DNA, 25 bp, probe
tagaccgtttgcttctttaactcca

SEQ ID NO: 113858 - DNA, 25 bp, probe
ttgtgtcccattccatctcttgaaa

SEQ ID NO: 113859 - DNA, 25 bp, probe
tttgtgtcccattccatctcttgaa

SEQ ID NO: 113860 - DNA, 25 bp, probe
cgtagaccgtttgcttctttaactc

SEQ ID NO: 113861 - DNA, 25 bp, probe
caagcctattgtgtgaaaccatctc

SEQ ID NO: 113862 - DNA, 25 bp, probe
agcctattgtgtgaaaccatctcat

SEQ ID NO: 113863 - DNA, 25 bp, probe
tcgagagtatagaaccgttcattct

SEQ ID NO: 113864 - DNA, 25 bp, probe
ctttgtgtcccattccatctcttga

SEQ ID NO: 113865 - DNA, 25 bp, probe
gggtttctttcttcgagagtataga

SEQ ID NO: 113866 - DNA, 25 bp, probe
ttcttcgagagtatagaaccgttca

SEQ ID NO: 113867 - DNA, 25 bp, probe
cgggtttctttcttcgagagtatag

SEQ ID NO: 113868 - DNA, 25 bp, probe
aagcctattgtgtgaaaccatctca

SEQ ID NO: 113869 - DNA, 25 bp, probe
catctgctccgtttcttgaagtttg

SEQ ID NO: 113870 - DNA, 25 bp, probe
atacaagtttgacatcgggaaggac

SEQ ID NO: 113871 - DNA, 25 bp, probe
catacaagtttgacatcgggaagga

SEQ ID NO: 113872 - DNA, 25 bp, probe
attcttgctttgtgtcccattccat

SEQ ID NO: 113873 - DNA, 25 bp, probe
tctagggacattcaatctagtcttt

SEQ ID NO: 113874 - DNA, 25 bp, probe
gcctattgtgtgaaaccatctcatg

SEQ ID NO: 113875 - DNA, 25 bp, probe
atctagggacattcaatctagtctt

SEQ ID NO: 113876 - DNA, 25 bp, probe
aatctagggacattcaatctagtct

SEQ ID NO: 113877 - DNA, 25 bp, probe
tcatacaagtttgacatcgggaagg

SEQ ID NO: 113878 - DNA, 25 bp, probe
ccatcatacaagtttgacatcggga

SEQ ID NO: 113879 - DNA, 25 bp, probe
tcccatcatacaagtttgacatcgg

SEQ ID NO: 113880 - DNA, 25 bp, probe
gtttcttgaagtttgctgaacgagg

SEQ ID NO: 113881 - DNA, 25 bp, probe
ctccgtttcttgaagtttgctgaac

SEQ ID NO: 113882 - DNA, 25 bp, probe
tttcttgaagtttgctgaacgagga

SEQ ID NO: 113883 - DNA, 25 bp, probe
ttatgttgaatccaataagccttcc

SEQ ID NO: 113884 - DNA, 25 bp, probe
acttgaaggacaatagagatcatct

SEQ ID NO: 113885 - DNA, 25 bp, probe
aacttgaaggacaatagagatcatc

SEQ ID NO: 113886 - DNA, 25 bp, probe
attatgttgaatccaataagccttc

SEQ ID NO: 113887 - DNA, 25 bp, probe
gaggatgtcaatgtttatttcagca

SEQ ID NO: 113888 - DNA, 25 bp, probe
tgtcaatgtttatttcagcaaagga

SEQ ID NO: 113889 - DNA, 25 bp, probe
aggatgtcaatgtttatttcagcaa

SEQ ID NO: 113890 - DNA, 25 bp, probe
ctgccactatctttagagccaataa

SEQ ID NO: 113891 - DNA, 25 bp, probe
tcaatgtttatttcagcaaaggacg

SEQ ID NO: 113892 - DNA, 25 bp, probe
aatactaccaagagggagagatttc

SEQ ID NO: 113893 - DNA, 25 bp, probe
gaatactaccaagagggagagattt

SEQ ID NO: 113894 - DNA, 25 bp, probe
ggaatactaccaagagggagagatt

SEQ ID NO: 113895 - DNA, 25 bp, probe
ctttatcttgtttgacgaagtgagt

SEQ ID NO: 113896 - DNA, 25 bp, probe
ctacaacaatggcaactataccctc

SEQ ID NO: 113897 - DNA, 25 bp, probe
atgtcaatgtttatttcagcaaagg

SEQ ID NO: 113898 - DNA, 25 bp, probe
ggatgtcaatgtttatttcagcaaa

SEQ ID NO: 113899 - DNA, 25 bp, probe
ccactacaacaatggcaactatacc

SEQ ID NO: 113900 - DNA, 25 bp, probe
tgccactatctttagagccaataaa

SEQ ID NO: 113901 - DNA, 25 bp, probe
aagatcatccatgtggaatactacc

SEQ ID NO: 113902 - DNA, 25 bp, probe
aattatgttgaatccaataagcctt

SEQ ID NO: 113903 - DNA, 25 bp, probe
tgaggatgtcaatgtttatttcagc

SEQ ID NO: 113904 - DNA, 25 bp, probe
tgaaggacaatagagatcatctagt

SEQ ID NO: 113905 - DNA, 25 bp, probe
tatgttgaatccaataagccttccc

SEQ ID NO: 113906 - DNA, 25 bp, probe
cactacaacaatggcaactataccc

SEQ ID NO: 113907 - DNA, 25 bp, probe
atcatccatgtggaatactaccaag

SEQ ID NO: 113908 - DNA, 25 bp, probe
gatcatccatgtggaatactaccaa

SEQ ID NO: 113909 - DNA, 25 bp, probe
ccaagatcatccatgtggaatacta

SEQ ID NO: 113910 - DNA, 25 bp, probe
caagatcatccatgtggaatactac

SEQ ID NO: 113911 - DNA, 25 bp, probe
tatatatgaggaacctgaggtccag

SEQ ID NO: 113912 - DNA, 25 bp, probe
tacaacaatggcaactataccctca

SEQ ID NO: 113913 - DNA, 25 bp, probe
actacaacaatggcaactataccct

SEQ ID NO: 113914 - DNA, 25 bp, probe
catccatgtggaatactaccaagag

SEQ ID NO: 113915 - DNA, 25 bp, probe
agatcatccatgtggaatactacca

SEQ ID NO: 113916 - DNA, 25 bp, probe
tcatccatgtggaatactaccaaga

SEQ ID NO: 113917 - DNA, 25 bp, probe
cctgccactatctttagagccaata

SEQ ID NO: 113918 - DNA, 25 bp, probe
ctctaggcattgttctctttggatc

SEQ ID NO: 113919 - DNA, 25 bp, probe
gaaggacaatagagatcatctagtc

SEQ ID NO: 113920 - DNA, 25 bp, probe
tttatcttgtttgacgaagtgagtc

SEQ ID NO: 113921 - DNA, 25 bp, probe
gtcaatgtttatttcagcaaaggac

SEQ ID NO: 113922 - DNA, 25 bp, probe
catgggatattaaacttgaaggaca

SEQ ID NO: 113923 - DNA, 25 bp, probe
gatgtcaatgtttatttcagcaaag

SEQ ID NO: 113924 - DNA, 25 bp, probe
ttatcttgtttgacgaagtgagtcc

SEQ ID NO: 113925 - DNA, 25 bp, probe
atccatgtggaatactaccaagagg

SEQ ID NO: 113926 - DNA, 25 bp, probe
tgggatattaaacttgaaggacaat

SEQ ID NO: 113927 - DNA, 25 bp, probe
ctagtgttaccagtaatccattcac

SEQ ID NO: 113928 - DNA, 25 bp, probe
aatcttcccaccacattcttacatt

SEQ ID NO: 113929 - DNA, 25 bp, probe
atcttcccaccacattcttacattg

SEQ ID NO: 113930 - DNA, 25 bp, probe
caatcttcccaccacattcttacat

SEQ ID NO: 113931 - DNA, 25 bp, probe
catcaagagtggaatggaaactttg

SEQ ID NO: 113932 - DNA, 25 bp, probe
atcaagagtggaatggaaactttgg

SEQ ID NO: 113933 - DNA, 25 bp, probe
gcatcaagagtggaatggaaacttt

SEQ ID NO: 113934 - DNA, 25 bp, probe
ccaatcttcccaccacattcttaca

SEQ ID NO: 113935 - DNA, 25 bp, probe
accaatcttcccaccacattcttac

SEQ ID NO: 113936 - DNA, 25 bp, probe
actagtgttaccagtaatccattca

SEQ ID NO: 113937 - DNA, 25 bp, probe
cacattcttacattgcagcatcacc

SEQ ID NO: 113938 - DNA, 25 bp, probe
ccacattcttacattgcagcatcac

SEQ ID NO: 113939 - DNA, 25 bp, probe
caccacattcttacattgcagcatc

SEQ ID NO: 113940 - DNA, 25 bp, probe
acattcttacattgcagcatcacct

SEQ ID NO: 113941 - DNA, 25 bp, probe
catcacctgcatatactggatttcc

SEQ ID NO: 113942 - DNA, 25 bp, probe
accacattcttacattgcagcatca

SEQ ID NO: 113943 - DNA, 25 bp, probe
tcttcccaccacattcttacattgc

SEQ ID NO: 113944 - DNA, 25 bp, probe
cattcttacattgcagcatcacctg

SEQ ID NO: 113945 - DNA, 25 bp, probe
tcctactagtgttaccagtaatcca

SEQ ID NO: 113946 - DNA, 25 bp, probe
catatactggatttccactgagtcc

SEQ ID NO: 113947 - DNA, 25 bp, probe
cctactagtgttaccagtaatccat

SEQ ID NO: 113948 - DNA, 25 bp, probe
agcaagcttatattcctactagtgt

SEQ ID NO: 113949 - DNA, 25 bp, probe
acagcaagcttatattcctactagt

SEQ ID NO: 113950 - DNA, 25 bp, probe
gcatatactggatttccactgagtc

SEQ ID NO: 113951 - DNA, 25 bp, probe
ttcctactagtgttaccagtaatcc

SEQ ID NO: 113952 - DNA, 25 bp, probe
cagcaagcttatattcctactagtg

SEQ ID NO: 113953 - DNA, 25 bp, probe
agacagcaagcttatattcctacta

SEQ ID NO: 113954 - DNA, 25 bp, probe
gcttatattcctactagtgttacca

SEQ ID NO: 113955 - DNA, 25 bp, probe
tcaagagtggaatggaaactttggg

SEQ ID NO: 113956 - DNA, 25 bp, probe
gacagcaagcttatattcctactag

SEQ ID NO: 113957 - DNA, 25 bp, probe
agcttatattcctactagtgttacc

SEQ ID NO: 113958 - DNA, 25 bp, probe
gcaagcttatattcctactagtgtt

SEQ ID NO: 113959 - DNA, 25 bp, probe
ggcatcaagagtggaatggaaactt

SEQ ID NO: 113960 - DNA, 25 bp, probe
ctgcatatactggatttccactgag

SEQ ID NO: 113961 - DNA, 25 bp, probe
agtgttaccagtaatccattcactc

SEQ ID NO: 113962 - DNA, 25 bp, probe
tagtgttaccagtaatccattcact

SEQ ID NO: 113963 - DNA, 25 bp, probe
tgcatatactggatttccactgagt

SEQ ID NO: 113964 - DNA, 25 bp, probe
atcacctgcatatactggatttcca

SEQ ID NO: 113965 - DNA, 25 bp, probe
gatttccactgagtccaacaaaact

SEQ ID NO: 113966 - DNA, 25 bp, probe
ccaccacattcttacattgcagcat

SEQ ID NO: 113967 - DNA, 25 bp, probe
tactagtgttaccagtaatccattc

SEQ ID NO: 113968 - DNA, 25 bp, probe
ctactagtgttaccagtaatccatt

SEQ ID NO: 113969 - DNA, 25 bp, probe
ccagccattaataaaaggacgatct

SEQ ID NO: 113970 - DNA, 25 bp, probe
atatgccagccattaataaaaggac

SEQ ID NO: 113971 - DNA, 25 bp, probe
agtacattctacattccgttcatgg

SEQ ID NO: 113972 - DNA, 25 bp, probe
acaatgattctgttaccttgactgg

SEQ ID NO: 113973 - DNA, 25 bp, probe
aagtacattctacattccgttcatg

SEQ ID NO: 113974 - DNA, 25 bp, probe
gcaagacatctctaataacgagtac

SEQ ID NO: 113975 - DNA, 25 bp, probe
ctattccacatacaaccagacctcc

SEQ ID NO: 113976 - DNA, 25 bp, probe
cctattccacatacaaccagacctc

SEQ ID NO: 113977 - DNA, 25 bp, probe
tccagataatgtgatactgtctctt

SEQ ID NO: 113978 - DNA, 25 bp, probe
catccagataatgtgatactgtctc

SEQ ID NO: 113979 - DNA, 25 bp, probe
atccagataatgtgatactgtctct

SEQ ID NO: 113980 - DNA, 25 bp, probe
gcacactacttcgatctcacaatta

SEQ ID NO: 113981 - DNA, 25 bp, probe
acttcgatctcacaattatcaacaa

SEQ ID NO: 113982 - DNA, 25 bp, probe
cacactacttcgatctcacaattat

SEQ ID NO: 113983 - DNA, 25 bp, probe
attgtcatgtccgaatagataggag

SEQ ID NO: 113984 - DNA, 25 bp, probe
aatgtgatactgtctctttgaagca

SEQ ID NO: 113985 - DNA, 25 bp, probe
cgatctcacaattatcaacaatgaa

SEQ ID NO: 113986 - DNA, 25 bp, probe
ttattgtcatgtccgaatagatagg

SEQ ID NO: 113987 - DNA, 25 bp, probe
tattccacatacaaccagacctcca

SEQ ID NO: 113988 - DNA, 25 bp, probe
cactacttcgatctcacaattatca

SEQ ID NO: 113989 - DNA, 25 bp, probe
acactacttcgatctcacaattatc

SEQ ID NO: 113990 - DNA, 25 bp, probe
catgtccgaatagataggaggagaa

SEQ ID NO: 113991 - DNA, 25 bp, probe
ttagagatttgaagttgggtcttga

SEQ ID NO: 113992 - DNA, 25 bp, probe
taatgtgatactgtctctttgaagc

SEQ ID NO: 113993 - DNA, 25 bp, probe
tttagagatttgaagttgggtcttg

SEQ ID NO: 113994 - DNA, 25 bp, probe
tagagatttgaagttgggtcttgac

SEQ ID NO: 113995 - DNA, 25 bp, probe
atgcaagacatctctaataacgagt

SEQ ID NO: 113996 - DNA, 25 bp, probe
ttgtcatgtccgaatagataggagg

SEQ ID NO: 113997 - DNA, 25 bp, probe
tattgtcatgtccgaatagatagga

SEQ ID NO: 113998 - DNA, 25 bp, probe
tcgatctcacaattatcaacaatga

SEQ ID NO: 113999 - DNA, 25 bp, probe
atacaaccagacctccaaagaaaga

SEQ ID NO: 114000 - DNA, 25 bp, probe
catacaaccagacctccaaagaaag

SEQ ID NO: 114001 - DNA, 25 bp, probe
taccctattccacatacaaccagac

SEQ ID NO: 114002 - DNA, 25 bp, probe
tacttcgatctcacaattatcaaca

SEQ ID NO: 114003 - DNA, 25 bp, probe
atatgcacactacttcgatctcaca

SEQ ID NO: 114004 - DNA, 25 bp, probe
tgcaagacatctctaataacgagta

SEQ ID NO: 114005 - DNA, 25 bp, probe
tacagagaacatatgcacactactt

SEQ ID NO: 114006 - DNA, 25 bp, probe
ttacagagaacatatgcacactact

SEQ ID NO: 114007 - DNA, 25 bp, probe
ttgaagttgggtcttgactcttaat

SEQ ID NO: 114008 - DNA, 25 bp, probe
tttgaagttgggtcttgactcttaa

SEQ ID NO: 114009 - DNA, 25 bp, probe
atttgaagttgggtcttgactctta

SEQ ID NO: 114010 - DNA, 25 bp, probe
ttcgatctcacaattatcaacaatg

SEQ ID NO: 114011 - DNA, 25 bp, probe
aacatatgcacactacttcgatctc

SEQ ID NO: 114012 - DNA, 25 bp, probe
cttacagagaacatatgcacactac

SEQ ID NO: 114013 - DNA, 25 bp, probe
tcatgtccgaatagataggaggaga

SEQ ID NO: 114014 - DNA, 25 bp, probe
gtcatgtccgaatagataggaggag

SEQ ID NO: 114015 - DNA, 25 bp, probe
tagtgacatagcttaccagtagacc

SEQ ID NO: 114016 - DNA, 25 bp, probe
atagtgacatagcttaccagtagac

SEQ ID NO: 114017 - DNA, 25 bp, probe
actgttgcttaattatgatggaaga

SEQ ID NO: 114018 - DNA, 25 bp, probe
gtgacatagcttaccagtagacctt

SEQ ID NO: 114019 - DNA, 25 bp, probe
tctactgttgcttaattatgatgga

SEQ ID NO: 114020 - DNA, 25 bp, probe
attgtatctgacatcagctctgttc

SEQ ID NO: 114021 - DNA, 25 bp, probe
cattgtatctgacatcagctctgtt

SEQ ID NO: 114022 - DNA, 25 bp, probe
aacattgtatctgacatcagctctg

SEQ ID NO: 114023 - DNA, 25 bp, probe
agtgacatagcttaccagtagacct

SEQ ID NO: 114024 - DNA, 25 bp, probe
tatagtgacatagcttaccagtaga

SEQ ID NO: 114025 - DNA, 25 bp, probe
gtatctgacatcagctctgttcatg

SEQ ID NO: 114026 - DNA, 25 bp, probe
tgtatctgacatcagctctgttcat

SEQ ID NO: 114027 - DNA, 25 bp, probe
ctgttgcttaattatgatggaagat

SEQ ID NO: 114028 - DNA, 25 bp, probe
acattgtcattcctagatgaatcct

SEQ ID NO: 114029 - DNA, 25 bp, probe
ctactgttgcttaattatgatggaa

SEQ ID NO: 114030 - DNA, 25 bp, probe
ttctactgttgcttaattatgatgg

SEQ ID NO: 114031 - DNA, 25 bp, probe
ttgtatctgacatcagctctgttca

SEQ ID NO: 114032 - DNA, 25 bp, probe
cctagatgaatcctttgaagtaaca

SEQ ID NO: 114033 - DNA, 25 bp, probe
acattgtatctgacatcagctctgt

SEQ ID NO: 114034 - DNA, 25 bp, probe
aacattgtcattcctagatgaatcc

SEQ ID NO: 114035 - DNA, 25 bp, probe
tactgttgcttaattatgatggaag

SEQ ID NO: 114036 - DNA, 25 bp, probe
ctcagagtccctgctaatgtaattg

SEQ ID NO: 114037 - DNA, 25 bp, probe
aagataacattgtcattcctagatg

SEQ ID NO: 114038 - DNA, 25 bp, probe
cattgtcattcctagatgaatcctt

SEQ ID NO: 114039 - DNA, 25 bp, probe
gtatatagtgacatagcttaccagt

SEQ ID NO: 114040 - DNA, 25 bp, probe
cagtagacctttaatggagacatgc

SEQ ID NO: 114041 - DNA, 25 bp, probe
tcctagatgaatcctttgaagtaac

SEQ ID NO: 114042 - DNA, 25 bp, probe
tcctattcttccaaatgagatgaaa

SEQ ID NO: 114043 - DNA, 25 bp, probe
ttcctattcttccaaatgagatgaa

SEQ ID NO: 114044 - DNA, 25 bp, probe
tttcctattcttccaaatgagatga

SEQ ID NO: 114045 - DNA, 25 bp, probe
tacatattacagcatgacaagctca

SEQ ID NO: 114046 - DNA, 25 bp, probe
gtacatattacagcatgacaagctc

SEQ ID NO: 114047 - DNA, 25 bp, probe
aactgctaatttgtgatccaacatg

SEQ ID NO: 114048 - DNA, 25 bp, probe
gacatagcttaccagtagaccttta

SEQ ID NO: 114049 - DNA, 25 bp, probe
taactgctaatttgtgatccaacat

SEQ ID NO: 114050 - DNA, 25 bp, probe
ataactgctaatttgtgatccaaca

SEQ ID NO: 114051 - DNA, 25 bp, probe
taattatgagtcagcccgaaaggat

SEQ ID NO: 114052 - DNA, 25 bp, probe
acatattacagcatgacaagctcaa

SEQ ID NO: 114053 - DNA, 25 bp, probe
tgacatagcttaccagtagaccttt

SEQ ID NO: 114054 - DNA, 25 bp, probe
taccagtagacctttaatggagaca

SEQ ID NO: 114055 - DNA, 25 bp, probe
ttaccagtagacctttaatggagac

SEQ ID NO: 114056 - DNA, 25 bp, probe
acatagcttaccagtagacctttaa

SEQ ID NO: 114057 - DNA, 25 bp, probe
atatagtgacatagcttaccagtag

SEQ ID NO: 114058 - DNA, 25 bp, probe
gcttaccagtagacctttaatggag

SEQ ID NO: 114059 - DNA, 25 bp, probe
gatttgtttagactgaaggaagacg

SEQ ID NO: 114060 - DNA, 25 bp, probe
agttgcctttcctctttgtagttag

SEQ ID NO: 114061 - DNA, 25 bp, probe
atcagcagatgaatgtgttaagcac

SEQ ID NO: 114062 - DNA, 25 bp, probe
ttaaagcacaaagagagggactaac

SEQ ID NO: 114063 - DNA, 25 bp, probe
gcttgatttgtttagactgaaggaa

SEQ ID NO: 114064 - DNA, 25 bp, probe
aagttgcctttcctctttgtagtta

SEQ ID NO: 114065 - DNA, 25 bp, probe
taagttgcctttcctctttgtagtt

SEQ ID NO: 114066 - DNA, 25 bp, probe
tgatttgtttagactgaaggaagac

SEQ ID NO: 114067 - DNA, 25 bp, probe
tttcctctttgtagttagcgttcag

SEQ ID NO: 114068 - DNA, 25 bp, probe
ctttcctctttgtagttagcgttca

SEQ ID NO: 114069 - DNA, 25 bp, probe
ttaagttgcctttcctctttgtagt

SEQ ID NO: 114070 - DNA, 25 bp, probe
cttaaagcacaaagagagggactaa

SEQ ID NO: 114071 - DNA, 25 bp, probe
aaagcatcttccttaaagcacaaag

SEQ ID NO: 114072 - DNA, 25 bp, probe
tttaagttgcctttcctctttgtag

SEQ ID NO: 114073 - DNA, 25 bp, probe
ctttaagttgcctttcctctttgta

SEQ ID NO: 114074 - DNA, 25 bp, probe
caaagcatcttccttaaagcacaaa

SEQ ID NO: 114075 - DNA, 25 bp, probe
taaagcacaaagagagggactaact

SEQ ID NO: 114076 - DNA, 25 bp, probe
ggcttgatttgtttagactgaagga

SEQ ID NO: 114077 - DNA, 25 bp, probe
cctttcctctttgtagttagcgttc

SEQ ID NO: 114078 - DNA, 25 bp, probe
ttgatttgtttagactgaaggaaga

SEQ ID NO: 114079 - DNA, 25 bp, probe
cctttaagttgcctttcctctttgt

SEQ ID NO: 114080 - DNA, 25 bp, probe
acctttaagttgcctttcctctttg

SEQ ID NO: 114081 - DNA, 25 bp, probe
cacctttaagttgcctttcctcttt

SEQ ID NO: 114082 - DNA, 25 bp, probe
acaaagcatcttccttaaagcacaa

SEQ ID NO: 114083 - DNA, 25 bp, probe
ttattcctgctcgtgcttaagattg

SEQ ID NO: 114084 - DNA, 25 bp, probe
taagcacaaagcatcttccttaaag

SEQ ID NO: 114085 - DNA, 25 bp, probe
gttgcctttcctctttgtagttagc

SEQ ID NO: 114086 - DNA, 25 bp, probe
cttgatttgtttagactgaaggaag

SEQ ID NO: 114087 - DNA, 25 bp, probe
aaacacctttaagttgcctttcctc

SEQ ID NO: 114088 - DNA, 25 bp, probe
gttgtttattcctgctcgtgcttaa

SEQ ID NO: 114089 - DNA, 25 bp, probe
gggcttgatttgtttagactgaagg

SEQ ID NO: 114090 - DNA, 25 bp, probe
tgttaagcacaaagcatcttcctta

SEQ ID NO: 114091 - DNA, 25 bp, probe
ctgctcgtgcttaagattgatgatt

SEQ ID NO: 114092 - DNA, 25 bp, probe
cacaaagcatcttccttaaagcaca

SEQ ID NO: 114093 - DNA, 25 bp, probe
cttcttctgggagttgtttattcct

SEQ ID NO: 114094 - DNA, 25 bp, probe
ttcttctgggagttgtttattcctg

SEQ ID NO: 114095 - DNA, 25 bp, probe
tattcctgctcgtgcttaagattga

SEQ ID NO: 114096 - DNA, 25 bp, probe
aaagcacaaagagagggactaactg

SEQ ID NO: 114097 - DNA, 25 bp, probe
agcttcttctgggagttgtttattc

SEQ ID NO: 114098 - DNA, 25 bp, probe
agttgtttattcctgctcgtgctta

SEQ ID NO: 114099 - DNA, 25 bp, probe
acacctttaagttgcctttcctctt

SEQ ID NO: 114100 - DNA, 25 bp, probe
aagcacaaagcatcttccttaaagc

SEQ ID NO: 114101 - DNA, 25 bp, probe
aaatccaggaagaatgaattaagct

SEQ ID NO: 114102 - DNA, 25 bp, probe
aacacctttaagttgcctttcctct

SEQ ID NO: 114103 - DNA, 25 bp, probe
accgttactctgatgaattgaatga

SEQ ID NO: 114104 - DNA, 25 bp, probe
ggcaagtaatccaggtatgagaatc

SEQ ID NO: 114105 - DNA, 25 bp, probe
ccgttactctgatgaattgaatgaa

SEQ ID NO: 114106 - DNA, 25 bp, probe
ttccataccgttactctgatgaatt

SEQ ID NO: 114107 - DNA, 25 bp, probe
aattccataccgttactctgatgaa

SEQ ID NO: 114108 - DNA, 25 bp, probe
ccataccgttactctgatgaattga

SEQ ID NO: 114109 - DNA, 25 bp, probe
tccataccgttactctgatgaattg

SEQ ID NO: 114110 - DNA, 25 bp, probe
taccgttactctgatgaattgaatg

SEQ ID NO: 114111 - DNA, 25 bp, probe
tatgagaatcaacttggtcaacaga

SEQ ID NO: 114112 - DNA, 25 bp, probe
gtatgagaatcaacttggtcaacag

SEQ ID NO: 114113 - DNA, 25 bp, probe
gcaagtaatccaggtatgagaatca

SEQ ID NO: 114114 - DNA, 25 bp, probe
cataccgttactctgatgaattgaa

SEQ ID NO: 114115 - DNA, 25 bp, probe
atgagaatcaacttggtcaacagaa

SEQ ID NO: 114116 - DNA, 25 bp, probe
aggtatgagaatcaacttggtcaac

SEQ ID NO: 114117 - DNA, 25 bp, probe
caggtatgagaatcaacttggtcaa

SEQ ID NO: 114118 - DNA, 25 bp, probe
ggtatgagaatcaacttggtcaaca

SEQ ID NO: 114119 - DNA, 25 bp, probe
agtaatccaggtatgagaatcaact

SEQ ID NO: 114120 - DNA, 25 bp, probe
tgagaatcaacttggtcaacagaag

SEQ ID NO: 114121 - DNA, 25 bp, probe
ataccgttactctgatgaattgaat

SEQ ID NO: 114122 - DNA, 25 bp, probe
taatccaggtatgagaatcaacttg

SEQ ID NO: 114123 - DNA, 25 bp, probe
gtaatccaggtatgagaatcaactt

SEQ ID NO: 114124 - DNA, 25 bp, probe
aagtaatccaggtatgagaatcaac

SEQ ID NO: 114125 - DNA, 25 bp, probe
caagtaatccaggtatgagaatcaa

SEQ ID NO: 114126 - DNA, 25 bp, probe
aagttcctgtctctggcaagtaatc

SEQ ID NO: 114127 - DNA, 25 bp, probe
gagaatcaacttggtcaacagaagc

SEQ ID NO: 114128 - DNA, 25 bp, probe
gaagttcctgtctctggcaagtaat

SEQ ID NO: 114129 - DNA, 25 bp, probe
acctgaggcaatgagtcatagaatt

SEQ ID NO: 114130 - DNA, 25 bp, probe
attccataccgttactctgatgaat

SEQ ID NO: 114131 - DNA, 25 bp, probe
aatccaggtatgagaatcaacttgg

SEQ ID NO: 114132 - DNA, 25 bp, probe
atagacctgaggcaatgagtcatag

SEQ ID NO: 114133 - DNA, 25 bp, probe
agaagaaagattggagcagaaagaa

SEQ ID NO: 114134 - DNA, 25 bp, probe
aagagaagaaagattggagcagaaa

SEQ ID NO: 114135 - DNA, 25 bp, probe
gaagaaagattggagcagaaagaac

SEQ ID NO: 114136 - DNA, 25 bp, probe
catagacctgaggcaatgagtcata

SEQ ID NO: 114137 - DNA, 25 bp, probe
agagaagaaagattggagcagaaag

SEQ ID NO: 114138 - DNA, 25 bp, probe
aatgaatcgcatgtcctacaatgag

SEQ ID NO: 114139 - DNA, 25 bp, probe
aagaaagattggagcagaaagaaca

SEQ ID NO: 114140 - DNA, 25 bp, probe
gagaagaaagattggagcagaaaga

SEQ ID NO: 114141 - DNA, 25 bp, probe
atccaggtatgagaatcaacttggt

SEQ ID NO: 114142 - DNA, 25 bp, probe
tgagaaccctttaatagcagatttg

SEQ ID NO: 114143 - DNA, 25 bp, probe
tggcaagtaatccaggtatgagaat

SEQ ID NO: 114144 - DNA, 25 bp, probe
agaaagattggagcagaaagaacag

SEQ ID NO: 114145 - DNA, 25 bp, probe
tcttgagaaccctttaatagcagat

SEQ ID NO: 114146 - DNA, 25 bp, probe
cttgagaaccctttaatagcagatt

SEQ ID NO: 114147 - DNA, 25 bp, probe
gattgcgagagatgtgtgttgatac

SEQ ID NO: 114148 - DNA, 25 bp, probe
ggattgcgagagatgtgtgttgata

SEQ ID NO: 114149 - DNA, 25 bp, probe
gtctagtctatgcagtcgagttctc

SEQ ID NO: 114150 - DNA, 25 bp, probe
gtaatggaggacactttgtgatttc

SEQ ID NO: 114151 - DNA, 25 bp, probe
gacactttgtgatttccattaaggc

SEQ ID NO: 114152 - DNA, 25 bp, probe
ggacactttgtgatttccattaagg

SEQ ID NO: 114153 - DNA, 25 bp, probe
aggacactttgtgatttccattaag

SEQ ID NO: 114154 - DNA, 25 bp, probe
gaggacactttgtgatttccattaa

SEQ ID NO: 114155 - DNA, 25 bp, probe
ggaggacactttgtgatttccatta

SEQ ID NO: 114156 - DNA, 25 bp, probe
taatggaggacactttgtgatttcc

SEQ ID NO: 114157 - DNA, 25 bp, probe
cgtaatggaggacactttgtgattt

SEQ ID NO: 114158 - DNA, 25 bp, probe
gccaagaagaggaccaacatcattc

SEQ ID NO: 114159 - DNA, 25 bp, probe
atggtctagtctatgcagtcgagtt

SEQ ID NO: 114160 - DNA, 25 bp, probe
tctagtctatgcagtcgagttctcc

SEQ ID NO: 114161 - DNA, 25 bp, probe
ccaagaagaggaccaacatcattcc

SEQ ID NO: 114162 - DNA, 25 bp, probe
ggtctagtctatgcagtcgagttct

SEQ ID NO: 114163 - DNA, 25 bp, probe
aggattgcgagagatgtgtgttgat

SEQ ID NO: 114164 - DNA, 25 bp, probe
gatggtctagtctatgcagtcgagt

SEQ ID NO: 114165 - DNA, 25 bp, probe
aatggtggatgtgatctttgctgat

SEQ ID NO: 114166 - DNA, 25 bp, probe
tggtctagtctatgcagtcgagttc

SEQ ID NO: 114167 - DNA, 25 bp, probe
aaagatgcaacaggagaacatgaag

SEQ ID NO: 114168 - DNA, 25 bp, probe
cttgagccatatgaaagagaccatg

SEQ ID NO: 114169 - DNA, 25 bp, probe
atggtggatgtgatctttgctgatg

SEQ ID NO: 114170 - DNA, 25 bp, probe
aagatgcaacaggagaacatgaagc

SEQ ID NO: 114171 - DNA, 25 bp, probe
ggatggtctagtctatgcagtcgag

SEQ ID NO: 114172 - DNA, 25 bp, probe
ctttgtgatttccattaaggccaac

SEQ ID NO: 114173 - DNA, 25 bp, probe
tttgtgatttccattaaggccaact

SEQ ID NO: 114174 - DNA, 25 bp, probe
actttgtgatttccattaaggccaa

SEQ ID NO: 114175 - DNA, 25 bp, probe
ccttgagccatatgaaagagaccat

SEQ ID NO: 114176 - DNA, 25 bp, probe
caatggtggatgtgatctttgctga

SEQ ID NO: 114177 - DNA, 25 bp, probe
ttgacccttgagccatatgaaagag

SEQ ID NO: 114178 - DNA, 25 bp, probe
caggattgcgagagatgtgtgttga

SEQ ID NO: 114179 - DNA, 25 bp, probe
tcaggattgcgagagatgtgtgttg

SEQ ID NO: 114180 - DNA, 25 bp, probe
gtcaggattgcgagagatgtgtgtt

SEQ ID NO: 114181 - DNA, 25 bp, probe
gcgtaatggaggacactttgtgatt

SEQ ID NO: 114182 - DNA, 25 bp, probe
gttgacccttgagccatatgaaaga

SEQ ID NO: 114183 - DNA, 25 bp, probe
agttgacccttgagccatatgaaag

SEQ ID NO: 114184 - DNA, 25 bp, probe
gatttccattaaggccaactgcatt

SEQ ID NO: 114185 - DNA, 25 bp, probe
ttgtgatttccattaaggccaactg

SEQ ID NO: 114186 - DNA, 25 bp, probe
gaccaacatcattcctgtgatcgag

SEQ ID NO: 114187 - DNA, 25 bp, probe
cagttgacccttgagccatatgaaa

SEQ ID NO: 114188 - DNA, 25 bp, probe
atcgcaatggtggatgtgatctttg

SEQ ID NO: 114189 - DNA, 25 bp, probe
gacccttgagccatatgaaagagac

SEQ ID NO: 114190 - DNA, 25 bp, probe
gtggatgtgatctttgctgatgtgg

SEQ ID NO: 114191 - DNA, 25 bp, probe
ttctcggaactgaactgaactcttt

SEQ ID NO: 114192 - DNA, 25 bp, probe
tttctcggaactgaactgaactctt

SEQ ID NO: 114193 - DNA, 25 bp, probe
ctttctcggaactgaactgaactct

SEQ ID NO: 114194 - DNA, 25 bp, probe
cctttctcggaactgaactgaactc

SEQ ID NO: 114195 - DNA, 25 bp, probe
ggttgagaatggaatcctctgtgga

SEQ ID NO: 114196 - DNA, 25 bp, probe
ttgagaatggaatcctctgtggatg

SEQ ID NO: 114197 - DNA, 25 bp, probe
gttgagaatggaatcctctgtggat

SEQ ID NO: 114198 - DNA, 25 bp, probe
ctcggaactgaactgaactcttttg

SEQ ID NO: 114199 - DNA, 25 bp, probe
tctcggaactgaactgaactctttt

SEQ ID NO: 114200 - DNA, 25 bp, probe
gagaatggaatcctctgtggatgac

SEQ ID NO: 114201 - DNA, 25 bp, probe
tgagaatggaatcctctgtggatga

SEQ ID NO: 114202 - DNA, 25 bp, probe
cagaagaggggttgagaatggaatc

SEQ ID NO: 114203 - DNA, 25 bp, probe
tcggaactgaactgaactcttttgg

SEQ ID NO: 114204 - DNA, 25 bp, probe
gcgtggcattttcacattatttaaa

SEQ ID NO: 114205 - DNA, 25 bp, probe
tcagaagaggggttgagaatggaat

SEQ ID NO: 114206 - DNA, 25 bp, probe
gcctttctcggaactgaactgaact

SEQ ID NO: 114207 - DNA, 25 bp, probe
agaatggaatcctctgtggatgacg

SEQ ID NO: 114208 - DNA, 25 bp, probe
agaagaggggttgagaatggaatcc

SEQ ID NO: 114209 - DNA, 25 bp, probe
cgtggcattttcacattatttaaaa

SEQ ID NO: 114210 - DNA, 25 bp, probe
cggaactgaactgaactcttttggg

SEQ ID NO: 114211 - DNA, 25 bp, probe
gggttgagaatggaatcctctgtgg

SEQ ID NO: 114212 - DNA, 25 bp, probe
ggaactgaactgaactcttttgggc

SEQ ID NO: 114213 - DNA, 25 bp, probe
gaagaggggttgagaatggaatcct

SEQ ID NO: 114214 - DNA, 25 bp, probe
gaatggaatcctctgtggatgacgg

SEQ ID NO: 114215 - DNA, 25 bp, probe
cgcgtggcattttcacattatttaa

SEQ ID NO: 114216 - DNA, 25 bp, probe
tcgcgtggcattttcacattattta

SEQ ID NO: 114217 - DNA, 25 bp, probe
ggggttgagaatggaatcctctgtg

SEQ ID NO: 114218 - DNA, 25 bp, probe
aggggttgagaatggaatcctctgt

SEQ ID NO: 114219 - DNA, 25 bp, probe
gaactgaactgaactcttttgggcc

SEQ ID NO: 114220 - DNA, 25 bp, probe
ttcgcgtggcattttcacattattt

SEQ ID NO: 114221 - DNA, 25 bp, probe
ctcagaagaggggttgagaatggaa

SEQ ID NO: 114222 - DNA, 25 bp, probe
cttcgcgtggcattttcacattatt

SEQ ID NO: 114223 - DNA, 25 bp, probe
aactgaactgaactcttttgggcct

SEQ ID NO: 114224 - DNA, 25 bp, probe
aagaggggttgagaatggaatcctc

SEQ ID NO: 114225 - DNA, 25 bp, probe
ccttcgcgtggcattttcacattat

SEQ ID NO: 114226 - DNA, 25 bp, probe
gaggggttgagaatggaatcctctg

SEQ ID NO: 114227 - DNA, 25 bp, probe
aagttggagttcgtatgttgatgac

SEQ ID NO: 114228 - DNA, 25 bp, probe
ctcatcttagaccacagactgactt

SEQ ID NO: 114229 - DNA, 25 bp, probe
gcttattgagaccatcatagagatc

SEQ ID NO: 114230 - DNA, 25 bp, probe
cttattgagaccatcatagagatcg

SEQ ID NO: 114231 - DNA, 25 bp, probe
tgtaacatgagcttattgagaccat

SEQ ID NO: 114232 - DNA, 25 bp, probe
atgtaacatgagcttattgagacca

SEQ ID NO: 114233 - DNA, 25 bp, probe
gtaacatgagcttattgagaccatc

SEQ ID NO: 114234 - DNA, 25 bp, probe
tgagcttattgagaccatcatagag

SEQ ID NO: 114235 - DNA, 25 bp, probe
taacatgagcttattgagaccatca

SEQ ID NO: 114236 - DNA, 25 bp, probe
gagcttattgagaccatcatagaga

SEQ ID NO: 114237 - DNA, 25 bp, probe
tttgttggtgttatgggaatgagat

SEQ ID NO: 114238 - DNA, 25 bp, probe
agttggagttcgtatgttgatgaca

SEQ ID NO: 114239 - DNA, 25 bp, probe
aaagttggagttcgtatgttgatga

SEQ ID NO: 114240 - DNA, 25 bp, probe
agaccacagactgactttgaaatta

SEQ ID NO: 114241 - DNA, 25 bp, probe
tagaccacagactgactttgaaatt

SEQ ID NO: 114242 - DNA, 25 bp, probe
ttagaccacagactgactttgaaat

SEQ ID NO: 114243 - DNA, 25 bp, probe
ctgattagcagaagtcatgttccag

SEQ ID NO: 114244 - DNA, 25 bp, probe
accacagactgactttgaaattatg

SEQ ID NO: 114245 - DNA, 25 bp, probe
cttagaccacagactgactttgaaa

SEQ ID NO: 114246 - DNA, 25 bp, probe
agcttattgagaccatcatagagat

SEQ ID NO: 114247 - DNA, 25 bp, probe
gaccacagactgactttgaaattat

SEQ ID NO: 114248 - DNA, 25 bp, probe
ggaatgagatcctactactatggaa

SEQ ID NO: 114249 - DNA, 25 bp, probe
ttattgagaccatcatagagatcga

SEQ ID NO: 114250 - DNA, 25 bp, probe
caaagttggagttcgtatgttgatg

SEQ ID NO: 114251 - DNA, 25 bp, probe
atcttagaccacagactgactttga

SEQ ID NO: 114252 - DNA, 25 bp, probe
catcttagaccacagactgactttg

SEQ ID NO: 114253 - DNA, 25 bp, probe
tcttagaccacagactgactttgaa

SEQ ID NO: 114254 - DNA, 25 bp, probe
ttgttggtgttatgggaatgagatc

SEQ ID NO: 114255 - DNA, 25 bp, probe
ccacagactgactttgaaattatgt

SEQ ID NO: 114256 - DNA, 25 bp, probe
tcatcttagaccacagactgacttt

SEQ ID NO: 114257 - DNA, 25 bp, probe
ttgctcatcttagaccacagactga

SEQ ID NO: 114258 - DNA, 25 bp, probe
cgtatgttgatgacatctgattagc

SEQ ID NO: 114259 - DNA, 25 bp, probe
agttcgtatgttgatgacatctgat

SEQ ID NO: 114260 - DNA, 25 bp, probe
gttcgtatgttgatgacatctgatt

SEQ ID NO: 114261 - DNA, 25 bp, probe
gagttcgtatgttgatgacatctga

SEQ ID NO: 114262 - DNA, 25 bp, probe
gtatgttgatgacatctgattagca

SEQ ID NO: 114263 - DNA, 25 bp, probe
atgttaggtgttgacattgagaacc

SEQ ID NO: 114264 - DNA, 25 bp, probe
ttggagttcgtatgttgatgacatc

SEQ ID NO: 114265 - DNA, 25 bp, probe
aattcatgcctgtaggtttaattgc

SEQ ID NO: 114266 - DNA, 25 bp, probe
tatgttgatgacatctgattagcag

SEQ ID NO: 114267 - DNA, 25 bp, probe
gttggagttcgtatgttgatgacat

SEQ ID NO: 114268 - DNA, 25 bp, probe
tgattagcagaagtcatgttccagc

SEQ ID NO: 114269 - DNA, 25 bp, probe
tcgtatgttgatgacatctgattag

SEQ ID NO: 114270 - DNA, 25 bp, probe
gctcatcttagaccacagactgact

SEQ ID NO: 114271 - DNA, 25 bp, probe
aggtcatctgagtatcattaagagt

SEQ ID NO: 114272 - DNA, 25 bp, probe
ccaggtcatctgagtatcattaaga

SEQ ID NO: 114273 - DNA, 25 bp, probe
gccaggtcatctgagtatcattaag

SEQ ID NO: 114274 - DNA, 25 bp, probe
agccaggtcatctgagtatcattaa

SEQ ID NO: 114275 - DNA, 25 bp, probe
cagccaggtcatctgagtatcatta

SEQ ID NO: 114276 - DNA, 25 bp, probe
caggtcatctgagtatcattaagag

SEQ ID NO: 114277 - DNA, 25 bp, probe
atgtatgtatcatggcggaagagtt

SEQ ID NO: 114278 - DNA, 25 bp, probe
gagtagtgatgggaagattacagtc

SEQ ID NO: 114279 - DNA, 25 bp, probe
agagtagtgatgggaagattacagt

SEQ ID NO: 114280 - DNA, 25 bp, probe
aagagtagtgatgggaagattacag

SEQ ID NO: 114281 - DNA, 25 bp, probe
agtagtgatgggaagattacagtct

SEQ ID NO: 114282 - DNA, 25 bp, probe
tagtgatgggaagattacagtctga

SEQ ID NO: 114283 - DNA, 25 bp, probe
gtagtgatgggaagattacagtctg

SEQ ID NO: 114284 - DNA, 25 bp, probe
ggtcatctgagtatcattaagagta

SEQ ID NO: 114285 - DNA, 25 bp, probe
taagagtagtgatgggaagattaca

SEQ ID NO: 114286 - DNA, 25 bp, probe
ttggtgttgcttatgaggaaggttc

SEQ ID NO: 114287 - DNA, 25 bp, probe
tgtatgtatcatggcggaagagttg

SEQ ID NO: 114288 - DNA, 25 bp, probe
tcattaagagtagtgatgggaagat

SEQ ID NO: 114289 - DNA, 25 bp, probe
agtgatgggaagattacagtctgag

SEQ ID NO: 114290 - DNA, 25 bp, probe
cattaagagtagtgatgggaagatt

SEQ ID NO: 114291 - DNA, 25 bp, probe
gttggtgttgcttatgaggaaggtt

SEQ ID NO: 114292 - DNA, 25 bp, probe
ttaagagtagtgatgggaagattac

SEQ ID NO: 114293 - DNA, 25 bp, probe
gtatgtatcatggcggaagagttgg

SEQ ID NO: 114294 - DNA, 25 bp, probe
ggtgttgcttatgaggaaggttcag

SEQ ID NO: 114295 - DNA, 25 bp, probe
cagttggtgttgcttatgaggaagg

SEQ ID NO: 114296 - DNA, 25 bp, probe
catctgagtatcattaagagtagtg

SEQ ID NO: 114297 - DNA, 25 bp, probe
gtgatgggaagattacagtctgagg

SEQ ID NO: 114298 - DNA, 25 bp, probe
atctgagtatcattaagagtagtga

SEQ ID NO: 114299 - DNA, 25 bp, probe
tcatctgagtatcattaagagtagt

SEQ ID NO: 114300 - DNA, 25 bp, probe
gtcatctgagtatcattaagagtag

SEQ ID NO: 114301 - DNA, 25 bp, probe
agttggtgttgcttatgaggaaggt

SEQ ID NO: 114302 - DNA, 25 bp, probe
tgagtatcattaagagtagtgatgg

SEQ ID NO: 114303 - DNA, 25 bp, probe
attaagagtagtgatgggaagatta

SEQ ID NO: 114304 - DNA, 25 bp, probe
tggtgttgcttatgaggaaggttca

SEQ ID NO: 114305 - DNA, 25 bp, probe
ctagagtggtttccatctcacagag

SEQ ID NO: 114306 - DNA, 25 bp, probe
tgatgggaagattacagtctgaggg

SEQ ID NO: 114307 - DNA, 25 bp, probe
ttccatctcacagagaatcagacag

SEQ ID NO: 114308 - DNA, 25 bp, probe
cttatgaggaaggttcagccttatc

SEQ ID NO: 114309 - DNA, 25 bp, probe
atcattaagagtagtgatgggaaga

SEQ ID NO: 114310 - DNA, 25 bp, probe
agtatcattaagagtagtgatggga

SEQ ID NO: 114311 - DNA, 25 bp, probe
gagtatcattaagagtagtgatggg

SEQ ID NO: 114312 - DNA, 25 bp, probe
catgtatgtatcatggcggaagagt

SEQ ID NO: 114313 - DNA, 25 bp, probe
ttatgaggaaggttcagccttatcc

SEQ ID NO: 114314 - DNA, 25 bp, probe
gcagccaggtcatctgagtatcatt

SEQ ID NO: 114315 - DNA, 25 bp, probe
ttattaaactgatgggactttgtgt

SEQ ID NO: 114316 - DNA, 25 bp, probe
tattaaactgatgggactttgtgtt

SEQ ID NO: 114317 - DNA, 25 bp, probe
tgttattaaactgatgggactttgt

SEQ ID NO: 114318 - DNA, 25 bp, probe
gttattaaactgatgggactttgtg

SEQ ID NO: 114319 - DNA, 25 bp, probe
cagtccttcagtaacaccagtgtaa

SEQ ID NO: 114320 - DNA, 25 bp, probe
gggagaatctataccttgttccttt

SEQ ID NO: 114321 - DNA, 25 bp, probe
tgggagaatctataccttgttcctt

SEQ ID NO: 114322 - DNA, 25 bp, probe
ttgttattaaactgatgggactttg

SEQ ID NO: 114323 - DNA, 25 bp, probe
gtgggagaatctataccttgttcct

SEQ ID NO: 114324 - DNA, 25 bp, probe
agcggtccacattagagttgaaatt

SEQ ID NO: 114325 - DNA, 25 bp, probe
tggtgggagaatctataccttgttc

SEQ ID NO: 114326 - DNA, 25 bp, probe
ctggtgggagaatctataccttgtt

SEQ ID NO: 114327 - DNA, 25 bp, probe
cttgaggagaaattgtgaagctaca

SEQ ID NO: 114328 - DNA, 25 bp, probe
agtccttcagtaacaccagtgtaaa

SEQ ID NO: 114329 - DNA, 25 bp, probe
tttctggtgggagaatctatacctt

SEQ ID NO: 114330 - DNA, 25 bp, probe
attaaactgatgggactttgtgttt

SEQ ID NO: 114331 - DNA, 25 bp, probe
cagcggtccacattagagttgaaat

SEQ ID NO: 114332 - DNA, 25 bp, probe
cctttaataaagcgaggtagggtac

SEQ ID NO: 114333 - DNA, 25 bp, probe
attgttattaaactgatgggacttt

SEQ ID NO: 114334 - DNA, 25 bp, probe
gcggtccacattagagttgaaattt

SEQ ID NO: 114335 - DNA, 25 bp, probe
ggtgggagaatctataccttgttcc

SEQ ID NO: 114336 - DNA, 25 bp, probe
ttgaggagaaattgtgaagctacac

SEQ ID NO: 114337 - DNA, 25 bp, probe
tctggtgggagaatctataccttgt

SEQ ID NO: 114338 - DNA, 25 bp, probe
ttctggtgggagaatctataccttg

SEQ ID NO: 114339 - DNA, 25 bp, probe
ctttaataaagcgaggtagggtacg

SEQ ID NO: 114340 - DNA, 25 bp, probe
ggagaatctataccttgttccttta

SEQ ID NO: 114341 - DNA, 25 bp, probe
atctataccttgttcctttataggc

SEQ ID NO: 114342 - DNA, 25 bp, probe
tattgttattaaactgatgggactt

SEQ ID NO: 114343 - DNA, 25 bp, probe
ttattgttattaaactgatgggact

SEQ ID NO: 114344 - DNA, 25 bp, probe
gcagtccttcagtaacaccagtgta

SEQ ID NO: 114345 - DNA, 25 bp, probe
acctcttgtcattctaaatatcttt

SEQ ID NO: 114346 - DNA, 25 bp, probe
atgatttccagcggtccacattaga

SEQ ID NO: 114347 - DNA, 25 bp, probe
tataccttgttcctttataggccaa

SEQ ID NO: 114348 - DNA, 25 bp, probe
atttccagcggtccacattagagtt

SEQ ID NO: 114349 - DNA, 25 bp, probe
gagaatctataccttgttcctttat

SEQ ID NO: 114350 - DNA, 25 bp, probe
aaatgatttccagcggtccacatta

SEQ ID NO: 114351 - DNA, 25 bp, probe
cggtccacattagagttgaaatttt

SEQ ID NO: 114352 - DNA, 25 bp, probe
tccttcagtaacaccagtgtaaaag

SEQ ID NO: 114353 - DNA, 25 bp, probe
gtccttcagtaacaccagtgtaaaa

SEQ ID NO: 114354 - DNA, 25 bp, probe
ttagagttgaaattttctggtggga

SEQ ID NO: 114355 - DNA, 25 bp, probe
tgttttctaatacctcttgtcattc

SEQ ID NO: 114356 - DNA, 25 bp, probe
attagagttgaaattttctggtggg

SEQ ID NO: 114357 - DNA, 25 bp, probe
tagagttgaaattttctggtgggag

SEQ ID NO: 114358 - DNA, 25 bp, probe
aatgatttccagcggtccacattag

SEQ ID NO: 114359 - DNA, 25 bp, probe
aactcgcttatctccatatcaacat

SEQ ID NO: 114360 - DNA, 25 bp, probe
gaactcgcttatctccatatcaaca

SEQ ID NO: 114361 - DNA, 25 bp, probe
tgatggtaagttcttgaatgtgagg

SEQ ID NO: 114362 - DNA, 25 bp, probe
actcgcttatctccatatcaacata

SEQ ID NO: 114363 - DNA, 25 bp, probe
atgatggtaagttcttgaatgtgag

SEQ ID NO: 114364 - DNA, 25 bp, probe
gcacatctcatcatatagtacagct

SEQ ID NO: 114365 - DNA, 25 bp, probe
agacttagaatatctgacctgatgc

SEQ ID NO: 114366 - DNA, 25 bp, probe
cctatgatggtaagttcttgaatgt

SEQ ID NO: 114367 - DNA, 25 bp, probe
atgaactcgcttatctccatatcaa

SEQ ID NO: 114368 - DNA, 25 bp, probe
tgaactcgcttatctccatatcaac

SEQ ID NO: 114369 - DNA, 25 bp, probe
tgcacatctcatcatatagtacagc

SEQ ID NO: 114370 - DNA, 25 bp, probe
ctcgcttatctccatatcaacataa

SEQ ID NO: 114371 - DNA, 25 bp, probe
acatgaactcgcttatctccatatc

SEQ ID NO: 114372 - DNA, 25 bp, probe
gacatgaactcgcttatctccatat

SEQ ID NO: 114373 - DNA, 25 bp, probe
tatgatggtaagttcttgaatgtga

SEQ ID NO: 114374 - DNA, 25 bp, probe
atgaatgacatgaactcgcttatct

SEQ ID NO: 114375 - DNA, 25 bp, probe
agatatgaatgacatgaactcgctt

SEQ ID NO: 114376 - DNA, 25 bp, probe
aagatatgaatgacatgaactcgct

SEQ ID NO: 114377 - DNA, 25 bp, probe
ttcagtctgtctctaagatgcttac

SEQ ID NO: 114378 - DNA, 25 bp, probe
tgaatgacatgaactcgcttatctc

SEQ ID NO: 114379 - DNA, 25 bp, probe
tcagtctgtctctaagatgcttact

SEQ ID NO: 114380 - DNA, 25 bp, probe
tatgaatgacatgaactcgcttatc

SEQ ID NO: 114381 - DNA, 25 bp, probe
gatatgaatgacatgaactcgctta

SEQ ID NO: 114382 - DNA, 25 bp, probe
taagatatgaatgacatgaactcgc

SEQ ID NO: 114383 - DNA, 25 bp, probe
ctatgatggtaagttcttgaatgtg

SEQ ID NO: 114384 - DNA, 25 bp, probe
ctgtctctaagatgcttactactga

SEQ ID NO: 114385 - DNA, 25 bp, probe
tctgtctctaagatgcttactactg

SEQ ID NO: 114386 - DNA, 25 bp, probe
gtctgtctctaagatgcttactact

SEQ ID NO: 114387 - DNA, 25 bp, probe
agtctgtctctaagatgcttactac

SEQ ID NO: 114388 - DNA, 25 bp, probe
cagtctgtctctaagatgcttacta

SEQ ID NO: 114389 - DNA, 25 bp, probe
catgaactcgcttatctccatatca

SEQ ID NO: 114390 - DNA, 25 bp, probe
tgtctctaagatgcttactactgaa

SEQ ID NO: 114391 - DNA, 25 bp, probe
gaatgacatgaactcgcttatctcc

SEQ ID NO: 114392 - DNA, 25 bp, probe
tgacatgaactcgcttatctccata

SEQ ID NO: 114393 - DNA, 25 bp, probe
atatgaatgacatgaactcgcttat

SEQ ID NO: 114394 - DNA, 25 bp, probe
tgattatgacacttctgaagctaga

SEQ ID NO: 114395 - DNA, 25 bp, probe
atgacatgaactcgcttatctccat

SEQ ID NO: 114396 - DNA, 25 bp, probe
aatgacatgaactcgcttatctcca

SEQ ID NO: 114397 - DNA, 25 bp, probe
aacataaaccagaagaggcatacat

SEQ ID NO: 114398 - DNA, 25 bp, probe
atcaacataaaccagaagaggcata

SEQ ID NO: 114399 - DNA, 25 bp, probe
tatcaacataaaccagaagaggcat

SEQ ID NO: 114400 - DNA, 25 bp, probe
atatcaacataaaccagaagaggca

SEQ ID NO: 114401 - DNA, 25 bp, probe
gtccctatgatggtaagttcttgaa

SEQ ID NO: 114402 - DNA, 25 bp, probe
catatcaacataaaccagaagaggc

SEQ ID NO: 114403 - DNA, 25 bp, probe
cattcagtacctgcttcttccagag

SEQ ID NO: 114404 - DNA, 25 bp, probe
attcagtacctgcttcttccagaga

SEQ ID NO: 114405 - DNA, 25 bp, probe
tacctgcttcttccagagaaataaa

SEQ ID NO: 114406 - DNA, 25 bp, probe
ctgcttcttccagagaaataaagtt

SEQ ID NO: 114407 - DNA, 25 bp, probe
cctgcttcttccagagaaataaagt

SEQ ID NO: 114408 - DNA, 25 bp, probe
acctgcttcttccagagaaataaag

SEQ ID NO: 114409 - DNA, 25 bp, probe
gtacctgcttcttccagagaaataa

SEQ ID NO: 114410 - DNA, 25 bp, probe
agtacctgcttcttccagagaaata

SEQ ID NO: 114411 - DNA, 25 bp, probe
ttcagtacctgcttcttccagagaa

SEQ ID NO: 114412 - DNA, 25 bp, probe
tgcttcttccagagaaataaagtta

SEQ ID NO: 114413 - DNA, 25 bp, probe
gcttcttccagagaaataaagttag

SEQ ID NO: 114414 - DNA, 25 bp, probe
cagtacctgcttcttccagagaaat

SEQ ID NO: 114415 - DNA, 25 bp, probe
tcttccagagaaataaagttagttt

SEQ ID NO: 114416 - DNA, 25 bp, probe
tcagtacctgcttcttccagagaaa

SEQ ID NO: 114417 - DNA, 25 bp, probe
cttcttccagagaaataaagttagt

SEQ ID NO: 114418 - DNA, 25 bp, probe
gcattcagtacctgcttcttccaga

SEQ ID NO: 114419 - DNA, 25 bp, probe
ttcttccagagaaataaagttagtt

SEQ ID NO: 114420 - DNA, 25 bp, probe
cttccagagaaataaagttagtttc

SEQ ID NO: 114421 - DNA, 25 bp, probe
ttccagagaaataaagttagtttct

SEQ ID NO: 114422 - DNA, 25 bp, probe
tccagagaaataaagttagtttcta

SEQ ID NO: 114423 - DNA, 25 bp, probe
ttttgttcctggctttcagaaaacc

SEQ ID NO: 114424 - DNA, 25 bp, probe
ggttttgttcctggctttcagaaaa

SEQ ID NO: 114425 - DNA, 25 bp, probe
ctttcagaaaaccaacgccaagatc

SEQ ID NO: 114426 - DNA, 25 bp, probe
aggttttgttcctggctttcagaaa

SEQ ID NO: 114427 - DNA, 25 bp, probe
gaggttttgttcctggctttcagaa

SEQ ID NO: 114428 - DNA, 25 bp, probe
ttgttcctggctttcagaaaaccaa

SEQ ID NO: 114429 - DNA, 25 bp, probe
tttgttcctggctttcagaaaacca

SEQ ID NO: 114430 - DNA, 25 bp, probe
tttcagaaaaccaacgccaagatcc

SEQ ID NO: 114431 - DNA, 25 bp, probe
caaaaccagcaattgtaaatacttt

SEQ ID NO: 114432 - DNA, 25 bp, probe
tgttcctggctttcagaaaaccaac

SEQ ID NO: 114433 - DNA, 25 bp, probe
gctttcagaaaaccaacgccaagat

SEQ ID NO: 114434 - DNA, 25 bp, probe
gcacaaaaccagcaattgtaaatac

SEQ ID NO: 114435 - DNA, 25 bp, probe
tgcacaaaaccagcaattgtaaata

SEQ ID NO: 114436 - DNA, 25 bp, probe
cacaaaaccagcaattgtaaatact

SEQ ID NO: 114437 - DNA, 25 bp, probe
ctgcacaaaaccagcaattgtaaat

SEQ ID NO: 114438 - DNA, 25 bp, probe
cactccttagtgacttgaccctgtc

SEQ ID NO: 114439 - DNA, 25 bp, probe
aaaaccagcaattgtaaatactttt

SEQ ID NO: 114440 - DNA, 25 bp, probe
acaaaaccagcaattgtaaatactt

SEQ ID NO: 114441 - DNA, 25 bp, probe
tctgcacaaaaccagcaattgtaaa

SEQ ID NO: 114442 - DNA, 25 bp, probe
ttctgcacaaaaccagcaattgtaa

SEQ ID NO: 114443 - DNA, 25 bp, probe
tttctgcacaaaaccagcaattgta

SEQ ID NO: 114444 - DNA, 25 bp, probe
gttcctggctttcagaaaaccaacg

SEQ ID NO: 114445 - DNA, 25 bp, probe
gttttgttcctggctttcagaaaac

SEQ ID NO: 114446 - DNA, 25 bp, probe
ctttctgcacaaaaccagcaattgt

SEQ ID NO: 114447 - DNA, 25 bp, probe
cctttctgcacaaaaccagcaattg

SEQ ID NO: 114448 - DNA, 25 bp, probe
ccctttctgcacaaaaccagcaatt

SEQ ID NO: 114449 - DNA, 25 bp, probe
aatgttatgtggaggaggacgaata

SEQ ID NO: 114450 - DNA, 25 bp, probe
atgttatgtggaggaggacgaataa

SEQ ID NO: 114451 - DNA, 25 bp, probe
caatttcaaatgtaaccctccagtg

SEQ ID NO: 114452 - DNA, 25 bp, probe
tgagattgtggaggaatttgagaag

SEQ ID NO: 114453 - DNA, 25 bp, probe
ctgagattgtggaggaatttgagaa

SEQ ID NO: 114454 - DNA, 25 bp, probe
gttatgtggaggaggacgaataaat

SEQ ID NO: 114455 - DNA, 25 bp, probe
ctagaacacttccaggtcaacttcc

SEQ ID NO: 114456 - DNA, 25 bp, probe
ttatgtggaggaggacgaataaatt

SEQ ID NO: 114457 - DNA, 25 bp, probe
ccaatttcaaatgtaaccctccagt

SEQ ID NO: 114458 - DNA, 25 bp, probe
accaatttcaaatgtaaccctccag

SEQ ID NO: 114459 - DNA, 25 bp, probe
caccaatttcaaatgtaaccctcca

SEQ ID NO: 114460 - DNA, 25 bp, probe
aatttcaaatgtaaccctccagtgg

SEQ ID NO: 114461 - DNA, 25 bp, probe
tgttatgtggaggaggacgaataaa

SEQ ID NO: 114462 - DNA, 25 bp, probe
gacaccaatttcaaatgtaaccctc

SEQ ID NO: 114463 - DNA, 25 bp, probe
aaatgttatgtggaggaggacgaat

SEQ ID NO: 114464 - DNA, 25 bp, probe
ttacgaagctcagaatctagaacac

SEQ ID NO: 114465 - DNA, 25 bp, probe
gagattgtggaggaatttgagaagc

SEQ ID NO: 114466 - DNA, 25 bp, probe
tacgaagctcagaatctagaacact

SEQ ID NO: 114467 - DNA, 25 bp, probe
gttacgaagctcagaatctagaaca

SEQ ID NO: 114468 - DNA, 25 bp, probe
atatggacctgctgctgatgaagat

SEQ ID NO: 114469 - DNA, 25 bp, probe
gaatctagaacacttccaggtcaac

SEQ ID NO: 114470 - DNA, 25 bp, probe
agaatctagaacacttccaggtcaa

SEQ ID NO: 114471 - DNA, 25 bp, probe
acaccaatttcaaatgtaaccctcc

SEQ ID NO: 114472 - DNA, 25 bp, probe
ggacaccaatttcaaatgtaaccct

SEQ ID NO: 114473 - DNA, 25 bp, probe
atctagaacacttccaggtcaactt

SEQ ID NO: 114474 - DNA, 25 bp, probe
aatctagaacacttccaggtcaact

SEQ ID NO: 114475 - DNA, 25 bp, probe
aagctcagaatctagaacacttcca

SEQ ID NO: 114476 - DNA, 25 bp, probe
cgttacgaagctcagaatctagaac

SEQ ID NO: 114477 - DNA, 25 bp, probe
tatggacctgctgctgatgaagatt

SEQ ID NO: 114478 - DNA, 25 bp, probe
tcagaatctagaacacttccaggtc

SEQ ID NO: 114479 - DNA, 25 bp, probe
ctcagaatctagaacacttccaggt

SEQ ID NO: 114480 - DNA, 25 bp, probe
tatgtggaggaggacgaataaattt

SEQ ID NO: 114481 - DNA, 25 bp, probe
cagaatctagaacacttccaggtca

SEQ ID NO: 114482 - DNA, 25 bp, probe
acgaagctcagaatctagaacactt

SEQ ID NO: 114483 - DNA, 25 bp, probe
agctcagaatctagaacacttccag

SEQ ID NO: 114484 - DNA, 25 bp, probe
tctagaacacttccaggtcaacttc

SEQ ID NO: 114485 - DNA, 25 bp, probe
cctgagattgtggaggaatttgaga

SEQ ID NO: 114486 - DNA, 25 bp, probe
tagaacacttccaggtcaacttccg

SEQ ID NO: 114487 - DNA, 25 bp, probe
gattgtggaggaatttgagaagctg

SEQ ID NO: 114488 - DNA, 25 bp, probe
agattgtggaggaatttgagaagct

SEQ ID NO: 114489 - DNA, 25 bp, probe
tgggacaccaatttcaaatgtaacc

SEQ ID NO: 114490 - DNA, 25 bp, probe
gcgttacgaagctcagaatctagaa

SEQ ID NO: 114491 - DNA, 25 bp, probe
gctcagaatctagaacacttccagg

SEQ ID NO: 114492 - DNA, 25 bp, probe
ttgtggaggaatttgagaagctgat

SEQ ID NO: 114493 - DNA, 25 bp, probe
ctacccaagctgaacaacctctacc

SEQ ID NO: 114494 - DNA, 25 bp, probe
cctacccaagctgaacaacctctac

SEQ ID NO: 114495 - DNA, 25 bp, probe
tacccaagctgaacaacctctacct

SEQ ID NO: 114496 - DNA, 25 bp, probe
acctacccaagctgaacaacctcta

SEQ ID NO: 114497 - DNA, 25 bp, probe
catctccagactcaaggactcccat

SEQ ID NO: 114498 - DNA, 25 bp, probe
atctccagactcaaggactcccatg

SEQ ID NO: 114499 - DNA, 25 bp, probe
ctgcttactcaacttgtgtcttaat

SEQ ID NO: 114500 - DNA, 25 bp, probe
tgcttactcaacttgtgtcttaatt

SEQ ID NO: 114501 - DNA, 25 bp, probe
gctgcttactcaacttgtgtcttaa

SEQ ID NO: 114502 - DNA, 25 bp, probe
agaagaggtcagcaataatgtcact

SEQ ID NO: 114503 - DNA, 25 bp, probe
cagaagaggtcagcaataatgtcac

SEQ ID NO: 114504 - DNA, 25 bp, probe
cacacagaagaggtcagcaataatg

SEQ ID NO: 114505 - DNA, 25 bp, probe
tcacacagaagaggtcagcaataat

SEQ ID NO: 114506 - DNA, 25 bp, probe
cacagaagaggtcagcaataatgtc

SEQ ID NO: 114507 - DNA, 25 bp, probe
gaagaggtcagcaataatgtcactg

SEQ ID NO: 114508 - DNA, 25 bp, probe
acagaagaggtcagcaataatgtca

SEQ ID NO: 114509 - DNA, 25 bp, probe
acacagaagaggtcagcaataatgt

SEQ ID NO: 114510 - DNA, 25 bp, probe
ggctgcttactcaacttgtgtctta

SEQ ID NO: 114511 - DNA, 25 bp, probe
aagaggtcagcaataatgtcactgt

SEQ ID NO: 114512 - DNA, 25 bp, probe
ctcacacagaagaggtcagcaataa

SEQ ID NO: 114513 - DNA, 25 bp, probe
gcttactcaacttgtgtcttaatta

SEQ ID NO: 114514 - DNA, 25 bp, probe
agaggtcagcaataatgtcactgtg

SEQ ID NO: 114515 - DNA, 25 bp, probe
gaggtcagcaataatgtcactgtgg

SEQ ID NO: 114516 - DNA, 25 bp, probe
aggctgcttactcaacttgtgtctt

SEQ ID NO: 114517 - DNA, 25 bp, probe
gtcagcaataatgtcactgtggacc

SEQ ID NO: 114518 - DNA, 25 bp, probe
ggtcagcaataatgtcactgtggac

SEQ ID NO: 114519 - DNA, 25 bp, probe
aggtcagcaataatgtcactgtgga

SEQ ID NO: 114520 - DNA, 25 bp, probe
caactgagaagcatggcctagatag

SEQ ID NO: 114521 - DNA, 25 bp, probe
ctacacctgtgaccaaggcttatgt

SEQ ID NO: 114522 - DNA, 25 bp, probe
tacacctgtgaccaaggcttatgtg

SEQ ID NO: 114523 - DNA, 25 bp, probe
gaggctgcttactcaacttgtgtct

SEQ ID NO: 114524 - DNA, 25 bp, probe
cctacacctgtgaccaaggcttatg

SEQ ID NO: 114525 - DNA, 25 bp, probe
caaggcttatgtggtcaggactgag

SEQ ID NO: 114526 - DNA, 25 bp, probe
aactgagaagcatggcctagatagg

SEQ ID NO: 114527 - DNA, 25 bp, probe
atcactcttataccaagggcaagcg

SEQ ID NO: 114528 - DNA, 25 bp, probe
cttaaaacttgggagaggagcactc

SEQ ID NO: 114529 - DNA, 25 bp, probe
ccaactgagaagcatggcctagata

SEQ ID NO: 114530 - DNA, 25 bp, probe
ttaaaacttgggagaggagcactca

SEQ ID NO: 114531 - DNA, 25 bp, probe
tcagcaataatgtcactgtggaccc

SEQ ID NO: 114532 - DNA, 25 bp, probe
agcaataatgtcactgtggacccag

SEQ ID NO: 114533 - DNA, 25 bp, probe
cagcaataatgtcactgtggaccca

SEQ ID NO: 114534 - DNA, 25 bp, probe
cttactcaacttgtgtcttaattaa

SEQ ID NO: 114535 - DNA, 25 bp, probe
taaaacttgggagaggagcactcag

SEQ ID NO: 114536 - DNA, 25 bp, probe
ttaattaaaagtgacagaggaaacc

SEQ ID NO: 114537 - DNA, 25 bp, probe
caataatgtcactgtggacccagtc

SEQ ID NO: 114538 - DNA, 25 bp, probe
ccttaaaacttgggagaggagcact

SEQ ID NO: 114539 - DNA, 25 bp, probe
aataatgtcactgtggacccagtct

SEQ ID NO: 114540 - DNA, 25 bp, probe
ataatgtcactgtggacccagtctc

SEQ ID NO: 114541 - DNA, 25 bp, probe
cctcacacagaagaggtcagcaata

SEQ ID NO: 114542 - DNA, 25 bp, probe
gtcttaattaaaagtgacagaggaa

SEQ ID NO: 114543 - DNA, 25 bp, probe
acttgaatcttggactgaaccttag

SEQ ID NO: 114544 - DNA, 25 bp, probe
cacttgaatcttggactgaacctta

SEQ ID NO: 114545 - DNA, 25 bp, probe
gattaacatcgctatcactcttgac

SEQ ID NO: 114546 - DNA, 25 bp, probe
cttgaatcttggactgaaccttagt

SEQ ID NO: 114547 - DNA, 25 bp, probe
attaacatcgctatcactcttgacc

SEQ ID NO: 114548 - DNA, 25 bp, probe
ttgaatcttggactgaaccttagtg

SEQ ID NO: 114549 - DNA, 25 bp, probe
gaatcttggactgaaccttagtgag

SEQ ID NO: 114550 - DNA, 25 bp, probe
tgaatcttggactgaaccttagtga

SEQ ID NO: 114551 - DNA, 25 bp, probe
aacatcgctatcactcttgacctta

SEQ ID NO: 114552 - DNA, 25 bp, probe
taacatcgctatcactcttgacctt

SEQ ID NO: 114553 - DNA, 25 bp, probe
ttaacatcgctatcactcttgacct

SEQ ID NO: 114554 - DNA, 25 bp, probe
atcgctatcactcttgaccttactc

SEQ ID NO: 114555 - DNA, 25 bp, probe
gatgctagattaatgtcaggaccat

SEQ ID NO: 114556 - DNA, 25 bp, probe
catcgctatcactcttgaccttact

SEQ ID NO: 114557 - DNA, 25 bp, probe
tctaacttctgtgcctgttaatcat

SEQ ID NO: 114558 - DNA, 25 bp, probe
gtctaacttctgtgcctgttaatca

SEQ ID NO: 114559 - DNA, 25 bp, probe
tgtctaacttctgtgcctgttaatc

SEQ ID NO: 114560 - DNA, 25 bp, probe
gtgtctaacttctgtgcctgttaat

SEQ ID NO: 114561 - DNA, 25 bp, probe
acatcgctatcactcttgaccttac

SEQ ID NO: 114562 - DNA, 25 bp, probe
ctaacttctgtgcctgttaatcatg

SEQ ID NO: 114563 - DNA, 25 bp, probe
ggatgctagattaatgtcaggacca

SEQ ID NO: 114564 - DNA, 25 bp, probe
aatcttggactgaaccttagtgagg

SEQ ID NO: 114565 - DNA, 25 bp, probe
atgcctcacacttcacatcagaatt

SEQ ID NO: 114566 - DNA, 25 bp, probe
taacttctgtgcctgttaatcatgg

SEQ ID NO: 114567 - DNA, 25 bp, probe
agtgtctaacttctgtgcctgttaa

SEQ ID NO: 114568 - DNA, 25 bp, probe
tgattaacatcgctatcactcttga

SEQ ID NO: 114569 - DNA, 25 bp, probe
gcacttgaatcttggactgaacctt

SEQ ID NO: 114570 - DNA, 25 bp, probe
ttgattaacatcgctatcactcttg

SEQ ID NO: 114571 - DNA, 25 bp, probe
atgctagattaatgtcaggaccatt

SEQ ID NO: 114572 - DNA, 25 bp, probe
cctcacacttcacatcagaatttct

SEQ ID NO: 114573 - DNA, 25 bp, probe
tcgctatcactcttgaccttactcc

SEQ ID NO: 114574 - DNA, 25 bp, probe
aagtagtaagctgtgaggctattct

SEQ ID NO: 114575 - DNA, 25 bp, probe
gcctcacacttcacatcagaatttc

SEQ ID NO: 114576 - DNA, 25 bp, probe
catgcctcacacttcacatcagaat

SEQ ID NO: 114577 - DNA, 25 bp, probe
agggatgctagattaatgtcaggac

SEQ ID NO: 114578 - DNA, 25 bp, probe
cagggatgctagattaatgtcagga

SEQ ID NO: 114579 - DNA, 25 bp, probe
aagtgtctaacttctgtgcctgtta

SEQ ID NO: 114580 - DNA, 25 bp, probe
agtagtaagctgtgaggctattctg

SEQ ID NO: 114581 - DNA, 25 bp, probe
ggtgagacagaacaatccctaaagg

SEQ ID NO: 114582 - DNA, 25 bp, probe
taatgtcaggaccatttctcttctg

SEQ ID NO: 114583 - DNA, 25 bp, probe
ttaatgtcaggaccatttctcttct

SEQ ID NO: 114584 - DNA, 25 bp, probe
tgcctcacacttcacatcagaattt

SEQ ID NO: 114585 - DNA, 25 bp, probe
aaaggaggttggcaactaaagacat

SEQ ID NO: 114586 - DNA, 25 bp, probe
gggatgctagattaatgtcaggacc

SEQ ID NO: 114587 - DNA, 25 bp, probe
gtcctgactgtcctacaatatcatt

SEQ ID NO: 114588 - DNA, 25 bp, probe
tgtcctgactgtcctacaatatcat

SEQ ID NO: 114589 - DNA, 25 bp, probe
gtgtcctgactgtcctacaatatca

SEQ ID NO: 114590 - DNA, 25 bp, probe
ggcttaacattaagtattccttggc

SEQ ID NO: 114591 - DNA, 25 bp, probe
ggtgtcctgactgtcctacaatatc

SEQ ID NO: 114592 - DNA, 25 bp, probe
caaatgttctttcctttcatcctca

SEQ ID NO: 114593 - DNA, 25 bp, probe
ccaaatgttctttcctttcatcctc

SEQ ID NO: 114594 - DNA, 25 bp, probe
aggcttaacattaagtattccttgg

SEQ ID NO: 114595 - DNA, 25 bp, probe
aaatgttctttcctttcatcctcag

SEQ ID NO: 114596 - DNA, 25 bp, probe
ccaggagaaagaaggcttaacatta

SEQ ID NO: 114597 - DNA, 25 bp, probe
caggagaaagaaggcttaacattaa

SEQ ID NO: 114598 - DNA, 25 bp, probe
cccaaatgttctttcctttcatcct

SEQ ID NO: 114599 - DNA, 25 bp, probe
aggtgtcctgactgtcctacaatat

SEQ ID NO: 114600 - DNA, 25 bp, probe
aatgttctttcctttcatcctcagc

SEQ ID NO: 114601 - DNA, 25 bp, probe
tcctgactgtcctacaatatcattt

SEQ ID NO: 114602 - DNA, 25 bp, probe
agaaggcttaacattaagtattcct

SEQ ID NO: 114603 - DNA, 25 bp, probe
gttctttcctttcatcctcagcaag

SEQ ID NO: 114604 - DNA, 25 bp, probe
ctttggactccttgtttgcctttag

SEQ ID NO: 114605 - DNA, 25 bp, probe
ttctttcctttcatcctcagcaagt

SEQ ID NO: 114606 - DNA, 25 bp, probe
atgttctttcctttcatcctcagca

SEQ ID NO: 114607 - DNA, 25 bp, probe
atcagcaagacaatgacactggaag

SEQ ID NO: 114608 - DNA, 25 bp, probe
tgttctttcctttcatcctcagcaa

SEQ ID NO: 114609 - DNA, 25 bp, probe
aagaaggcttaacattaagtattcc

SEQ ID NO: 114610 - DNA, 25 bp, probe
ggagaaagaaggcttaacattaagt

SEQ ID NO: 114611 - DNA, 25 bp, probe
aggagaaagaaggcttaacattaag

SEQ ID NO: 114612 - DNA, 25 bp, probe
gcaagtgctgagtctgtgaataaag

SEQ ID NO: 114613 - DNA, 25 bp, probe
gcttaacattaagtattccttggcc

SEQ ID NO: 114614 - DNA, 25 bp, probe
catcagcaagacaatgacactggaa

SEQ ID NO: 114615 - DNA, 25 bp, probe
tctttcctttcatcctcagcaagtg

SEQ ID NO: 114616 - DNA, 25 bp, probe
atactctccaggattgtccacaaat

SEQ ID NO: 114617 - DNA, 25 bp, probe
caagcatcagcaagacaatgacact

SEQ ID NO: 114618 - DNA, 25 bp, probe
cctacaatatcattttcctgggagt

SEQ ID NO: 114619 - DNA, 25 bp, probe
ctaggcatactctccaggattgtcc

SEQ ID NO: 114620 - DNA, 25 bp, probe
tacaatatcattttcctgggagtgg

SEQ ID NO: 114621 - DNA, 25 bp, probe
aagcatcagcaagacaatgacactg

SEQ ID NO: 114622 - DNA, 25 bp, probe
tactctccaggattgtccacaaatg

SEQ ID NO: 114623 - DNA, 25 bp, probe
catactctccaggattgtccacaaa

SEQ ID NO: 114624 - DNA, 25 bp, probe
ctacaatatcattttcctgggagtg

SEQ ID NO: 114625 - DNA, 25 bp, probe
ttaacattaagtattccttggccca

SEQ ID NO: 114626 - DNA, 25 bp, probe
taacattaagtattccttggcccag

SEQ ID NO: 114627 - DNA, 25 bp, probe
tgtcctacaatatcattttcctggg

SEQ ID NO: 114628 - DNA, 25 bp, probe
ctgtcctacaatatcattttcctgg

SEQ ID NO: 114629 - DNA, 25 bp, probe
taggcatactctccaggattgtcca

SEQ ID NO: 114630 - DNA, 25 bp, probe
caagtgctgagtctgtgaataaagc

SEQ ID NO: 114631 - DNA, 25 bp, probe
atctatcctggattctgaactcttc

SEQ ID NO: 114632 - DNA, 25 bp, probe
cttggatactcacattaggaggacc

SEQ ID NO: 114633 - DNA, 25 bp, probe
atgcttggatactcacattaggagg

SEQ ID NO: 114634 - DNA, 25 bp, probe
catgcttggatactcacattaggag

SEQ ID NO: 114635 - DNA, 25 bp, probe
tatctatcctggattctgaactctt

SEQ ID NO: 114636 - DNA, 25 bp, probe
ttctcaagtgaacactctcaggata

SEQ ID NO: 114637 - DNA, 25 bp, probe
catatctatcctggattctgaactc

SEQ ID NO: 114638 - DNA, 25 bp, probe
atatctatcctggattctgaactct

SEQ ID NO: 114639 - DNA, 25 bp, probe
tctcaagtgaacactctcaggatac

SEQ ID NO: 114640 - DNA, 25 bp, probe
gcttggatactcacattaggaggac

SEQ ID NO: 114641 - DNA, 25 bp, probe
ggatactcacattaggaggaccatg

SEQ ID NO: 114642 - DNA, 25 bp, probe
gattaggctgaagtggcttagaagg

SEQ ID NO: 114643 - DNA, 25 bp, probe
ggattaggctgaagtggcttagaag

SEQ ID NO: 114644 - DNA, 25 bp, probe
ccatatctatcctggattctgaact

SEQ ID NO: 114645 - DNA, 25 bp, probe
tttccctctgtagtttctcaagtga

SEQ ID NO: 114646 - DNA, 25 bp, probe
tgcttggatactcacattaggagga

SEQ ID NO: 114647 - DNA, 25 bp, probe
gcccaagaaacataaacatataacc

SEQ ID NO: 114648 - DNA, 25 bp, probe
tctaccaatctctgttgaaagaagc

SEQ ID NO: 114649 - DNA, 25 bp, probe
tgttacctttccatctagcaagttc

SEQ ID NO: 114650 - DNA, 25 bp, probe
ctgttacctttccatctagcaagtt

SEQ ID NO: 114651 - DNA, 25 bp, probe
ttccctctgtagtttctcaagtgaa

SEQ ID NO: 114652 - DNA, 25 bp, probe
ctctgttacctttccatctagcaag

SEQ ID NO: 114653 - DNA, 25 bp, probe
ctcaagtgaacactctcaggatacc

SEQ ID NO: 114654 - DNA, 25 bp, probe
agaaacataaacatataaccaccca

SEQ ID NO: 114655 - DNA, 25 bp, probe
tggatactcacattaggaggaccat

SEQ ID NO: 114656 - DNA, 25 bp, probe
gttacctttccatctagcaagttcc

SEQ ID NO: 114657 - DNA, 25 bp, probe
ctccctctgttacctttccatctag

SEQ ID NO: 114658 - DNA, 25 bp, probe
tctgttacctttccatctagcaagt

SEQ ID NO: 114659 - DNA, 25 bp, probe
ctaccaatctctgttgaaagaagcc

SEQ ID NO: 114660 - DNA, 25 bp, probe
acatataaccacccatatctatcct

SEQ ID NO: 114661 - DNA, 25 bp, probe
tgtgctttcagaaatacaggaatct

SEQ ID NO: 114662 - DNA, 25 bp, probe
ttggatactcacattaggaggacca

SEQ ID NO: 114663 - DNA, 25 bp, probe
aatttggagtgactaacacaagttg

SEQ ID NO: 114664 - DNA, 25 bp, probe
caatttggagtgactaacacaagtt

SEQ ID NO: 114665 - DNA, 25 bp, probe
catataaccacccatatctatcctg

SEQ ID NO: 114666 - DNA, 25 bp, probe
ttcaatttggagtgactaacacaag

SEQ ID NO: 114667 - DNA, 25 bp, probe
cttcaatttggagtgactaacacaa

SEQ ID NO: 114668 - DNA, 25 bp, probe
tcttcaatttggagtgactaacaca

SEQ ID NO: 114669 - DNA, 25 bp, probe
ctcttcaatttggagtgactaacac

SEQ ID NO: 114670 - DNA, 25 bp, probe
tccctctgtagtttctcaagtgaac

SEQ ID NO: 114671 - DNA, 25 bp, probe
tcaatttggagtgactaacacaagt

SEQ ID NO: 114672 - DNA, 25 bp, probe
cctctgtagtttctcaagtgaacac

SEQ ID NO: 114673 - DNA, 25 bp, probe
ccatgcttggatactcacattagga

SEQ ID NO: 114674 - DNA, 25 bp, probe
atcctggattctgaactcttcaatt

SEQ ID NO: 114675 - DNA, 25 bp, probe
atgaccttatggctgagagttgaat

SEQ ID NO: 114676 - DNA, 25 bp, probe
gaccttatggctgagagttgaattg

SEQ ID NO: 114677 - DNA, 25 bp, probe
aatgaccttatggctgagagttgaa

SEQ ID NO: 114678 - DNA, 25 bp, probe
tgtggttcagtattcattgatctca

SEQ ID NO: 114679 - DNA, 25 bp, probe
cttatggctgagagttgaattgtgg

SEQ ID NO: 114680 - DNA, 25 bp, probe
ccttatggctgagagttgaattgtg

SEQ ID NO: 114681 - DNA, 25 bp, probe
tgaccttatggctgagagttgaatt

SEQ ID NO: 114682 - DNA, 25 bp, probe
tggttcagtattcattgatctcact

SEQ ID NO: 114683 - DNA, 25 bp, probe
ttgtggttcagtattcattgatctc

SEQ ID NO: 114684 - DNA, 25 bp, probe
accttatggctgagagttgaattgt

SEQ ID NO: 114685 - DNA, 25 bp, probe
tatggctgagagttgaattgtggtt

SEQ ID NO: 114686 - DNA, 25 bp, probe
ttatggctgagagttgaattgtggt

SEQ ID NO: 114687 - DNA, 25 bp, probe
attgtggttcagtattcattgatct

SEQ ID NO: 114688 - DNA, 25 bp, probe
gtggttcagtattcattgatctcac

SEQ ID NO: 114689 - DNA, 25 bp, probe
caatgaccttatggctgagagttga

SEQ ID NO: 114690 - DNA, 25 bp, probe
ctgtgtttgagagatttcctgttag

SEQ ID NO: 114691 - DNA, 25 bp, probe
aattgtggttcagtattcattgatc

SEQ ID NO: 114692 - DNA, 25 bp, probe
tctgtgtttgagagatttcctgtta

SEQ ID NO: 114693 - DNA, 25 bp, probe
agcatttctgtgtttgagagatttc

SEQ ID NO: 114694 - DNA, 25 bp, probe
agaactcccttcaaacacaaagatt

SEQ ID NO: 114695 - DNA, 25 bp, probe
ttctgtgtttgagagatttcctgtt

SEQ ID NO: 114696 - DNA, 25 bp, probe
tttctgtgtttgagagatttcctgt

SEQ ID NO: 114697 - DNA, 25 bp, probe
atttctgtgtttgagagatttcctg

SEQ ID NO: 114698 - DNA, 25 bp, probe
catttctgtgtttgagagatttcct

SEQ ID NO: 114699 - DNA, 25 bp, probe
ttaaccaatgaccttatggctgaga

SEQ ID NO: 114700 - DNA, 25 bp, probe
gcatttctgtgtttgagagatttcc

SEQ ID NO: 114701 - DNA, 25 bp, probe
ttcgtctgaaagtgaactctcataa

SEQ ID NO: 114702 - DNA, 25 bp, probe
tcgtctgaaagtgaactctcataat

SEQ ID NO: 114703 - DNA, 25 bp, probe
cttcgtctgaaagtgaactctcata

SEQ ID NO: 114704 - DNA, 25 bp, probe
gaactcccttcaaacacaaagattg

SEQ ID NO: 114705 - DNA, 25 bp, probe
agacatttagcaatcctgacattaa

SEQ ID NO: 114706 - DNA, 25 bp, probe
cagaactcccttcaaacacaaagat

SEQ ID NO: 114707 - DNA, 25 bp, probe
atcagaactcccttcaaacacaaag

SEQ ID NO: 114708 - DNA, 25 bp, probe
taaccaatgaccttatggctgagag

SEQ ID NO: 114709 - DNA, 25 bp, probe
cgtctgaaagtgaactctcataatt

SEQ ID NO: 114710 - DNA, 25 bp, probe
gaattgtggttcagtattcattgat

SEQ ID NO: 114711 - DNA, 25 bp, probe
catcagaactcccttcaaacacaaa

SEQ ID NO: 114712 - DNA, 25 bp, probe
cagcatttctgtgtttgagagattt

SEQ ID NO: 114713 - DNA, 25 bp, probe
tgagagttgaattgtggttcagtat

SEQ ID NO: 114714 - DNA, 25 bp, probe
acagacatttagcaatcctgacatt

SEQ ID NO: 114715 - DNA, 25 bp, probe
aacagacatttagcaatcctgacat

SEQ ID NO: 114716 - DNA, 25 bp, probe
taaacagacatttagcaatcctgac

SEQ ID NO: 114717 - DNA, 25 bp, probe
agataaacagacatttagcaatcct

SEQ ID NO: 114718 - DNA, 25 bp, probe
cagacatttagcaatcctgacatta

SEQ ID NO: 114719 - DNA, 25 bp, probe
ttactaactaccagcattgagaaca

SEQ ID NO: 114720 - DNA, 25 bp, probe
tactaactaccagcattgagaacat

SEQ ID NO: 114721 - DNA, 25 bp, probe
tatatctgtaagaatggaaggctgg

SEQ ID NO: 114722 - DNA, 25 bp, probe
tatctgtaagaatggaaggctggat

SEQ ID NO: 114723 - DNA, 25 bp, probe
atatctgtaagaatggaaggctgga

SEQ ID NO: 114724 - DNA, 25 bp, probe
taccagcattgagaacatgaagata

SEQ ID NO: 114725 - DNA, 25 bp, probe
taactaccagcattgagaacatgaa

SEQ ID NO: 114726 - DNA, 25 bp, probe
accagcattgagaacatgaagatat

SEQ ID NO: 114727 - DNA, 25 bp, probe
ccagcattgagaacatgaagatatt

SEQ ID NO: 114728 - DNA, 25 bp, probe
ctaactaccagcattgagaacatga

SEQ ID NO: 114729 - DNA, 25 bp, probe
ttatatctgtaagaatggaaggctg

SEQ ID NO: 114730 - DNA, 25 bp, probe
actaactaccagcattgagaacatg

SEQ ID NO: 114731 - DNA, 25 bp, probe
ctaccagcattgagaacatgaagat

SEQ ID NO: 114732 - DNA, 25 bp, probe
atggtgatggaatatgtctcaggag

SEQ ID NO: 114733 - DNA, 25 bp, probe
ttcatggtgatggaatatgtctcag

SEQ ID NO: 114734 - DNA, 25 bp, probe
aactaccagcattgagaacatgaag

SEQ ID NO: 114735 - DNA, 25 bp, probe
ctgtaagaatggaaggctggatgaa

SEQ ID NO: 114736 - DNA, 25 bp, probe
atctgtaagaatggaaggctggatg

SEQ ID NO: 114737 - DNA, 25 bp, probe
gtgatggaatatgtctcaggaggag

SEQ ID NO: 114738 - DNA, 25 bp, probe
actaccagcattgagaacatgaaga

SEQ ID NO: 114739 - DNA, 25 bp, probe
gtgaagatactcaatcgacagaaga

SEQ ID NO: 114740 - DNA, 25 bp, probe
cctctcaatttactaactaccagca

SEQ ID NO: 114741 - DNA, 25 bp, probe
acctctcaatttactaactaccagc

SEQ ID NO: 114742 - DNA, 25 bp, probe
attatatctgtaagaatggaaggct

SEQ ID NO: 114743 - DNA, 25 bp, probe
tgaagatactcaatcgacagaagat

SEQ ID NO: 114744 - DNA, 25 bp, probe
gtgagtaaggcaggagtacctaatt

SEQ ID NO: 114745 - DNA, 25 bp, probe
catggtgatggaatatgtctcagga

SEQ ID NO: 114746 - DNA, 25 bp, probe
tcatggtgatggaatatgtctcagg

SEQ ID NO: 114747 - DNA, 25 bp, probe
gtccatagagatttgaaacctgaaa

SEQ ID NO: 114748 - DNA, 25 bp, probe
tttactaactaccagcattgagaac

SEQ ID NO: 114749 - DNA, 25 bp, probe
accagaagtaatttcaggaagagac

SEQ ID NO: 114750 - DNA, 25 bp, probe
caccagaagtaatttcaggaagaga

SEQ ID NO: 114751 - DNA, 25 bp, probe
tgtgaagatactcaatcgacagaag

SEQ ID NO: 114752 - DNA, 25 bp, probe
gtagctgtgaagatactcaatcgac

SEQ ID NO: 114753 - DNA, 25 bp, probe
gattatatctgtaagaatggaaggc

SEQ ID NO: 114754 - DNA, 25 bp, probe
atggagactgtggaaagttgttatt

SEQ ID NO: 114755 - DNA, 25 bp, probe
tggagactgtggaaagttgttattt

SEQ ID NO: 114756 - DNA, 25 bp, probe
ccagaagtaatttcaggaagagact

SEQ ID NO: 114757 - DNA, 25 bp, probe
actctttgtccttcactatactact

SEQ ID NO: 114758 - DNA, 25 bp, probe
tagctgtgaagatactcaatcgaca

SEQ ID NO: 114759 - DNA, 25 bp, probe
ggagactgtggaaagttgttattta

SEQ ID NO: 114760 - DNA, 25 bp, probe
ctctttgtccttcactatactactg

SEQ ID NO: 114761 - DNA, 25 bp, probe
ctctcaatttactaactaccagcat

SEQ ID NO: 114762 - DNA, 25 bp, probe
tctgtaagaatggaaggctggatga

SEQ ID NO: 114763 - DNA, 25 bp, probe
atgaatggaagaaacacactattgg

SEQ ID NO: 114764 - DNA, 25 bp, probe
tgaatggaagaaacacactattggt

SEQ ID NO: 114765 - DNA, 25 bp, probe
tttagagtccttccctgtaacattg

SEQ ID NO: 114766 - DNA, 25 bp, probe
atctcagtgacaatgatctgcttct

SEQ ID NO: 114767 - DNA, 25 bp, probe
gaatggaagaaacacactattggtt

SEQ ID NO: 114768 - DNA, 25 bp, probe
agcagttacagaaacagaattgatg

SEQ ID NO: 114769 - DNA, 25 bp, probe
gaagcagttacagaaacagaattga

SEQ ID NO: 114770 - DNA, 25 bp, probe
tgaagcagttacagaaacagaattg

SEQ ID NO: 114771 - DNA, 25 bp, probe
aagcagttacagaaacagaattgat

SEQ ID NO: 114772 - DNA, 25 bp, probe
atgaagcagttacagaaacagaatt

SEQ ID NO: 114773 - DNA, 25 bp, probe
ctttagaagactcaggaggagaaac

SEQ ID NO: 114774 - DNA, 25 bp, probe
tttagaagactcaggaggagaaact

SEQ ID NO: 114775 - DNA, 25 bp, probe
tgcaagagaatattaatggtagctt

SEQ ID NO: 114776 - DNA, 25 bp, probe
gttacagaaacagaattgatgtgct

SEQ ID NO: 114777 - DNA, 25 bp, probe
agttacagaaacagaattgatgtgc

SEQ ID NO: 114778 - DNA, 25 bp, probe
gcagttacagaaacagaattgatgt

SEQ ID NO: 114779 - DNA, 25 bp, probe
ttagagtccttccctgtaacattgg

SEQ ID NO: 114780 - DNA, 25 bp, probe
ttacagaaacagaattgatgtgctg

SEQ ID NO: 114781 - DNA, 25 bp, probe
tctcagtgacaatgatctgcttctg

SEQ ID NO: 114782 - DNA, 25 bp, probe
catgaagcagttacagaaacagaat

SEQ ID NO: 114783 - DNA, 25 bp, probe
atcccaaataatgtcggcttacaaa

SEQ ID NO: 114784 - DNA, 25 bp, probe
aatcccaaataatgtcggcttacaa

SEQ ID NO: 114785 - DNA, 25 bp, probe
gaaacagaattgatgtgctgctaaa

SEQ ID NO: 114786 - DNA, 25 bp, probe
gaaacagcaatcccaaataatgtcg

SEQ ID NO: 114787 - DNA, 25 bp, probe
catgaatggaagaaacacactattg

SEQ ID NO: 114788 - DNA, 25 bp, probe
cagttacagaaacagaattgatgtg

SEQ ID NO: 114789 - DNA, 25 bp, probe
agaaacagaattgatgtgctgctaa

SEQ ID NO: 114790 - DNA, 25 bp, probe
ttagaagactcaggaggagaaactg

SEQ ID NO: 114791 - DNA, 25 bp, probe
gctttagaagactcaggaggagaaa

SEQ ID NO: 114792 - DNA, 25 bp, probe
cagtgacaatgatctgcttctggat

SEQ ID NO: 114793 - DNA, 25 bp, probe
caatcccaaataatgtcggcttaca

SEQ ID NO: 114794 - DNA, 25 bp, probe
ccatgaagcagttacagaaacagaa

SEQ ID NO: 114795 - DNA, 25 bp, probe
ggaaacagcaatcccaaataatgtc

SEQ ID NO: 114796 - DNA, 25 bp, probe
taatggtagctttagaagactcagg

SEQ ID NO: 114797 - DNA, 25 bp, probe
gatctcagtgacaatgatctgcttc

SEQ ID NO: 114798 - DNA, 25 bp, probe
ttggttgccagtcatacaaattaaa

SEQ ID NO: 114799 - DNA, 25 bp, probe
gcaatcccaaataatgtcggcttac

SEQ ID NO: 114800 - DNA, 25 bp, probe
aatggtagctttagaagactcagga

SEQ ID NO: 114801 - DNA, 25 bp, probe
cagaaacagaattgatgtgctgcta

SEQ ID NO: 114802 - DNA, 25 bp, probe
atggtagctttagaagactcaggag

SEQ ID NO: 114803 - DNA, 25 bp, probe
tacagaaacagaattgatgtgctgc

SEQ ID NO: 114804 - DNA, 25 bp, probe
aaacagcaatcccaaataatgtcgg

SEQ ID NO: 114805 - DNA, 25 bp, probe
tggaaacagcaatcccaaataatgt

SEQ ID NO: 114806 - DNA, 25 bp, probe
agtccttccctgtaacattggattt

SEQ ID NO: 114807 - DNA, 25 bp, probe
aaggaccagaaccaggaatactata

SEQ ID NO: 114808 - DNA, 25 bp, probe
taaggaccagaaccaggaatactat

SEQ ID NO: 114809 - DNA, 25 bp, probe
gaccagaaccaggaatactatatcg

SEQ ID NO: 114810 - DNA, 25 bp, probe
aggaccagaaccaggaatactatat

SEQ ID NO: 114811 - DNA, 25 bp, probe
ggaccagaaccaggaatactatatc

SEQ ID NO: 114812 - DNA, 25 bp, probe
ttaaggaccagaaccaggaatacta

SEQ ID NO: 114813 - DNA, 25 bp, probe
accagaaccaggaatactatatcga

SEQ ID NO: 114814 - DNA, 25 bp, probe
ccagaaccaggaatactatatcgaa

SEQ ID NO: 114815 - DNA, 25 bp, probe
gttggtttaatgcctttatttctct

SEQ ID NO: 114816 - DNA, 25 bp, probe
agttggtttaatgcctttatttctc

SEQ ID NO: 114817 - DNA, 25 bp, probe
aagttggtttaatgcctttatttct

SEQ ID NO: 114818 - DNA, 25 bp, probe
tggtttaatgcctttatttctcttt

SEQ ID NO: 114819 - DNA, 25 bp, probe
ttggtttaatgcctttatttctctt

SEQ ID NO: 114820 - DNA, 25 bp, probe
cagaaccaggaatactatatcgaaa

SEQ ID NO: 114821 - DNA, 25 bp, probe
ggtttaatgcctttatttctcttta

SEQ ID NO: 114822 - DNA, 25 bp, probe
aaagttggtttaatgcctttatttc

SEQ ID NO: 114823 - DNA, 25 bp, probe
atgcctttatttctctttaaggacc

SEQ ID NO: 114824 - DNA, 25 bp, probe
agaaccaggaatactatatcgaaaa

SEQ ID NO: 114825 - DNA, 25 bp, probe
aatgcctttatttctctttaaggac

SEQ ID NO: 114826 - DNA, 25 bp, probe
gtgtgtgtttattttatgatattgc

SEQ ID NO: 114827 - DNA, 25 bp, probe
aaaagttggtttaatgcctttattt

SEQ ID NO: 114828 - DNA, 25 bp, probe
cttcaaggacaataagatgttaaaa

SEQ ID NO: 114829 - DNA, 25 bp, probe
taatgcctttatttctctttaagga

SEQ ID NO: 114830 - DNA, 25 bp, probe
ttaatgcctttatttctctttaagg

SEQ ID NO: 114831 - DNA, 25 bp, probe
aattcagaacagaagccatgtatct

SEQ ID NO: 114832 - DNA, 25 bp, probe
attcagaacagaagccatgtatctc

SEQ ID NO: 114833 - DNA, 25 bp, probe
ttcagaacagaagccatgtatctcc

SEQ ID NO: 114834 - DNA, 25 bp, probe
gaattcagaacagaagccatgtatc

SEQ ID NO: 114835 - DNA, 25 bp, probe
catggagcttgtgttctcagaatct

SEQ ID NO: 114836 - DNA, 25 bp, probe
atggagcttgtgttctcagaatctg

SEQ ID NO: 114837 - DNA, 25 bp, probe
atcaacaaaactgagcaaggaagat

SEQ ID NO: 114838 - DNA, 25 bp, probe
cttgtgttctcagaatctgatgctt

SEQ ID NO: 114839 - DNA, 25 bp, probe
tcaacaaaactgagcaaggaagatc

SEQ ID NO: 114840 - DNA, 25 bp, probe
gatcaacaaaactgagcaaggaaga

SEQ ID NO: 114841 - DNA, 25 bp, probe
gagcttgtgttctcagaatctgatg

SEQ ID NO: 114842 - DNA, 25 bp, probe
tcagaacagaagccatgtatctccc

SEQ ID NO: 114843 - DNA, 25 bp, probe
ggagcttgtgttctcagaatctgat

SEQ ID NO: 114844 - DNA, 25 bp, probe
caacaaaactgagcaaggaagatcc

SEQ ID NO: 114845 - DNA, 25 bp, probe
gaatctgatgctttctgatcaacaa

SEQ ID NO: 114846 - DNA, 25 bp, probe
ttgtgttctcagaatctgatgcttt

SEQ ID NO: 114847 - DNA, 25 bp, probe
aatctgatgctttctgatcaacaaa

SEQ ID NO: 114848 - DNA, 25 bp, probe
agaatctgatgctttctgatcaaca

SEQ ID NO: 114849 - DNA, 25 bp, probe
gtgttctcagaatctgatgctttct

SEQ ID NO: 114850 - DNA, 25 bp, probe
tgtgttctcagaatctgatgctttc

SEQ ID NO: 114851 - DNA, 25 bp, probe
aaactgagcaaggaagatcccaaca

SEQ ID NO: 114852 - DNA, 25 bp, probe
gcttgtgttctcagaatctgatgct

SEQ ID NO: 114853 - DNA, 25 bp, probe
agcttgtgttctcagaatctgatgc

SEQ ID NO: 114854 - DNA, 25 bp, probe
atgctttctgatcaacaaaactgag

SEQ ID NO: 114855 - DNA, 25 bp, probe
gatgctttctgatcaacaaaactga

SEQ ID NO: 114856 - DNA, 25 bp, probe
tttctgatcaacaaaactgagcaag

SEQ ID NO: 114857 - DNA, 25 bp, probe
ctttctgatcaacaaaactgagcaa

SEQ ID NO: 114858 - DNA, 25 bp, probe
tggagcttgtgttctcagaatctga

SEQ ID NO: 114859 - DNA, 25 bp, probe
aaaactgagcaaggaagatcccaac

SEQ ID NO: 114860 - DNA, 25 bp, probe
caaaactgagcaaggaagatcccaa

SEQ ID NO: 114861 - DNA, 25 bp, probe
aacaaaactgagcaaggaagatccc

SEQ ID NO: 114862 - DNA, 25 bp, probe
aactgagcaaggaagatcccaacac

SEQ ID NO: 114863 - DNA, 25 bp, probe
tgatcaacaaaactgagcaaggaag

SEQ ID NO: 114864 - DNA, 25 bp, probe
ctgatcaacaaaactgagcaaggaa

SEQ ID NO: 114865 - DNA, 25 bp, probe
ttctgatcaacaaaactgagcaagg

SEQ ID NO: 114866 - DNA, 25 bp, probe
ccatggagcttgtgttctcagaatc

SEQ ID NO: 114867 - DNA, 25 bp, probe
tctgatcaacaaaactgagcaagga

SEQ ID NO: 114868 - DNA, 25 bp, probe
ctgatgctttctgatcaacaaaact

SEQ ID NO: 114869 - DNA, 25 bp, probe
tctgatgctttctgatcaacaaaac

SEQ ID NO: 114870 - DNA, 25 bp, probe
tgatgctttctgatcaacaaaactg

SEQ ID NO: 114871 - DNA, 25 bp, probe
atctgatgctttctgatcaacaaaa

SEQ ID NO: 114872 - DNA, 25 bp, probe
accatggagcttgtgttctcagaat

SEQ ID NO: 114873 - DNA, 25 bp, probe
acaaaactgagcaaggaagatccca

SEQ ID NO: 114874 - DNA, 25 bp, probe
cagaacagaagccatgtatctcccc

SEQ ID NO: 114875 - DNA, 25 bp, probe
aatgtgatgtctgaagataatgctg

SEQ ID NO: 114876 - DNA, 25 bp, probe
gaatgtgatgtctgaagataatgct

SEQ ID NO: 114877 - DNA, 25 bp, probe
cattgtcctcaccttgttatacctg

SEQ ID NO: 114878 - DNA, 25 bp, probe
agaatgtgatgtctgaagataatgc

SEQ ID NO: 114879 - DNA, 25 bp, probe
atgtgatgtctgaagataatgctgc

SEQ ID NO: 114880 - DNA, 25 bp, probe
aatgatcctgaacactctgaacttg

SEQ ID NO: 114881 - DNA, 25 bp, probe
gctagaatgtgatgtctgaagataa

SEQ ID NO: 114882 - DNA, 25 bp, probe
atgatcctgaacactctgaacttga

SEQ ID NO: 114883 - DNA, 25 bp, probe
acttgatgtcaattctaactgtgtt

SEQ ID NO: 114884 - DNA, 25 bp, probe
aacttgatgtcaattctaactgtgt

SEQ ID NO: 114885 - DNA, 25 bp, probe
tagtcctgcggtgatattctatctg

SEQ ID NO: 114886 - DNA, 25 bp, probe
gtagtcctgcggtgatattctatct

SEQ ID NO: 114887 - DNA, 25 bp, probe
tgccatagttcagctaattgtagtt

SEQ ID NO: 114888 - DNA, 25 bp, probe
ttgccatagttcagctaattgtagt

SEQ ID NO: 114889 - DNA, 25 bp, probe
ctaactgtgttaatgaagagcaacc

SEQ ID NO: 114890 - DNA, 25 bp, probe
attgtcctcaccttgttatacctgc

SEQ ID NO: 114891 - DNA, 25 bp, probe
gcattgtcctcaccttgttatacct

SEQ ID NO: 114892 - DNA, 25 bp, probe
taactgtgttaatgaagagcaacca

SEQ ID NO: 114893 - DNA, 25 bp, probe
tctaactgtgttaatgaagagcaac

SEQ ID NO: 114894 - DNA, 25 bp, probe
gagctagaatgtgatgtctgaagat

SEQ ID NO: 114895 - DNA, 25 bp, probe
aactgtgttaatgaagagcaaccag

SEQ ID NO: 114896 - DNA, 25 bp, probe
ctgtgttaatgaagagcaaccagag

SEQ ID NO: 114897 - DNA, 25 bp, probe
ttctaactgtgttaatgaagagcaa

SEQ ID NO: 114898 - DNA, 25 bp, probe
agctagaatgtgatgtctgaagata

SEQ ID NO: 114899 - DNA, 25 bp, probe
agagctagaatgtgatgtctgaaga

SEQ ID NO: 114900 - DNA, 25 bp, probe
catataagcagcatttacggtagtg

SEQ ID NO: 114901 - DNA, 25 bp, probe
aatctgtaagaatctgaaggacatt

SEQ ID NO: 114902 - DNA, 25 bp, probe
acatataagcagcatttacggtagt

SEQ ID NO: 114903 - DNA, 25 bp, probe
attctaactgtgttaatgaagagca

SEQ ID NO: 114904 - DNA, 25 bp, probe
tgatcctgaacactctgaacttgac

SEQ ID NO: 114905 - DNA, 25 bp, probe
atataagcagcatttacggtagtgg

SEQ ID NO: 114906 - DNA, 25 bp, probe
cgtagtcctgcggtgatattctatc

SEQ ID NO: 114907 - DNA, 25 bp, probe
gccctaatttcctattgatttctgt

SEQ ID NO: 114908 - DNA, 25 bp, probe
tgccctaatttcctattgatttctg

SEQ ID NO: 114909 - DNA, 25 bp, probe
atttctgggtttcttgtgtggattt

SEQ ID NO: 114910 - DNA, 25 bp, probe
actgtgttaatgaagagcaaccaga

SEQ ID NO: 114911 - DNA, 25 bp, probe
aatacatataagcagcatttacggt

SEQ ID NO: 114912 - DNA, 25 bp, probe
tgtgttaatgaagagcaaccagagg

SEQ ID NO: 114913 - DNA, 25 bp, probe
aagaatctgaaggacatttacgaaa

SEQ ID NO: 114914 - DNA, 25 bp, probe
tacatataagcagcatttacggtag

SEQ ID NO: 114915 - DNA, 25 bp, probe
acggtagtggcattctacttattaa

SEQ ID NO: 114916 - DNA, 25 bp, probe
ttacggtagtggcattctacttatt

SEQ ID NO: 114917 - DNA, 25 bp, probe
gaagaaaggctttatgttcaaggac

SEQ ID NO: 114918 - DNA, 25 bp, probe
acaattactgtaaggctaattcacg

SEQ ID NO: 114919 - DNA, 25 bp, probe
ctcttaatgcctgttctgcttattg

SEQ ID NO: 114920 - DNA, 25 bp, probe
cctcttaatgcctgttctgcttatt

SEQ ID NO: 114921 - DNA, 25 bp, probe
tcttaatgcctgttctgcttattgg

SEQ ID NO: 114922 - DNA, 25 bp, probe
attatcctcttaatgcctgttctgc

SEQ ID NO: 114923 - DNA, 25 bp, probe
aattatcctcttaatgcctgttctg

SEQ ID NO: 114924 - DNA, 25 bp, probe
tcctcttaatgcctgttctgcttat

SEQ ID NO: 114925 - DNA, 25 bp, probe
atcctcttaatgcctgttctgctta

SEQ ID NO: 114926 - DNA, 25 bp, probe
tatcctcttaatgcctgttctgctt

SEQ ID NO: 114927 - DNA, 25 bp, probe
ttatcctcttaatgcctgttctgct

SEQ ID NO: 114928 - DNA, 25 bp, probe
gttaatgctacagattgttatggct

SEQ ID NO: 114929 - DNA, 25 bp, probe
agttaatgctacagattgttatggc

SEQ ID NO: 114930 - DNA, 25 bp, probe
ctgaagaagaggatctgagttatct

SEQ ID NO: 114931 - DNA, 25 bp, probe
ttaatgctacagattgttatggctg

SEQ ID NO: 114932 - DNA, 25 bp, probe
ttaacgactggattctatcttcatt

SEQ ID NO: 114933 - DNA, 25 bp, probe
gttgtagtctccacttcagtcagaa

SEQ ID NO: 114934 - DNA, 25 bp, probe
cctgaagaagaggatctgagttatc

SEQ ID NO: 114935 - DNA, 25 bp, probe
ctcttgtacgaatgctacttgatgc

SEQ ID NO: 114936 - DNA, 25 bp, probe
gctcttgtacgaatgctacttgatg

SEQ ID NO: 114937 - DNA, 25 bp, probe
ttgttgtagtctccacttcagtcag

SEQ ID NO: 114938 - DNA, 25 bp, probe
agttgttgtagtctccacttcagtc

SEQ ID NO: 114939 - DNA, 25 bp, probe
atggtatcaaagacaaagcagaatg

SEQ ID NO: 114940 - DNA, 25 bp, probe
ttctgcttattgggtatttcctcat

SEQ ID NO: 114941 - DNA, 25 bp, probe
gaagaaatgctaatgtcaacctcaa

SEQ ID NO: 114942 - DNA, 25 bp, probe
cttgtacgaatgctacttgatgctg

SEQ ID NO: 114943 - DNA, 25 bp, probe
tcttgtacgaatgctacttgatgct

SEQ ID NO: 114944 - DNA, 25 bp, probe
gaatggtatttgtgtatgtgtgtgg

SEQ ID NO: 114945 - DNA, 25 bp, probe
agaatggtatttgtgtatgtgtgtg

SEQ ID NO: 114946 - DNA, 25 bp, probe
cagaatggtatttgtgtatgtgtgt

SEQ ID NO: 114947 - DNA, 25 bp, probe
gttgttgtagtctccacttcagtca

SEQ ID NO: 114948 - DNA, 25 bp, probe
agaagaaatgctaatgtcaacctca

SEQ ID NO: 114949 - DNA, 25 bp, probe
aagaagaaatgctaatgtcaacctc

SEQ ID NO: 114950 - DNA, 25 bp, probe
aagaaatgctaatgtcaacctcaaa

SEQ ID NO: 114951 - DNA, 25 bp, probe
gttctgcttattgggtatttcctca

SEQ ID NO: 114952 - DNA, 25 bp, probe
tgttctgcttattgggtatttcctc

SEQ ID NO: 114953 - DNA, 25 bp, probe
ctgttctgcttattgggtatttcct

SEQ ID NO: 114954 - DNA, 25 bp, probe
gattgttatggctgtaccgcattac

SEQ ID NO: 114955 - DNA, 25 bp, probe
agattgttatggctgtaccgcatta

SEQ ID NO: 114956 - DNA, 25 bp, probe
tgggcttagagattcacaagtaaat

SEQ ID NO: 114957 - DNA, 25 bp, probe
cctttgagtattgagcagaagaatc

SEQ ID NO: 114958 - DNA, 25 bp, probe
tcatcagaaatacctccagaagatt

SEQ ID NO: 114959 - DNA, 25 bp, probe
tatttgtgtatgtgtgtgggcttag

SEQ ID NO: 114960 - DNA, 25 bp, probe
tcagaaatacctccagaagattcaa

SEQ ID NO: 114961 - DNA, 25 bp, probe
gtcgaagttaatgctacagattgtt

SEQ ID NO: 114962 - DNA, 25 bp, probe
cgaagttaatgctacagattgttat

SEQ ID NO: 114963 - DNA, 25 bp, probe
actctatgccctcacactccttctc

SEQ ID NO: 114964 - DNA, 25 bp, probe
gactctatgccctcacactccttct

SEQ ID NO: 114965 - DNA, 25 bp, probe
tgcagatgtaatgaagttaaggatc

SEQ ID NO: 114966 - DNA, 25 bp, probe
ttgcagatgtaatgaagttaaggat

SEQ ID NO: 114967 - DNA, 25 bp, probe
gtaatgaagttaaggatctttcgcc

SEQ ID NO: 114968 - DNA, 25 bp, probe
taatgaagttaaggatctttcgcca

SEQ ID NO: 114969 - DNA, 25 bp, probe
tgtaatgaagttaaggatctttcgc

SEQ ID NO: 114970 - DNA, 25 bp, probe
gcagatgtaatgaagttaaggatct

SEQ ID NO: 114971 - DNA, 25 bp, probe
aatgaagttaaggatctttcgccag

SEQ ID NO: 114972 - DNA, 25 bp, probe
tcaccagactttcaaggagatactg

SEQ ID NO: 114973 - DNA, 25 bp, probe
gtcaccagactttcaaggagatact

SEQ ID NO: 114974 - DNA, 25 bp, probe
ggctttgcagatgtaatgaagttaa

SEQ ID NO: 114975 - DNA, 25 bp, probe
tttgcagatgtaatgaagttaagga

SEQ ID NO: 114976 - DNA, 25 bp, probe
gctttgcagatgtaatgaagttaag

SEQ ID NO: 114977 - DNA, 25 bp, probe
catggagaagaggtagcaagagagg

SEQ ID NO: 114978 - DNA, 25 bp, probe
ctttgcagatgtaatgaagttaagg

SEQ ID NO: 114979 - DNA, 25 bp, probe
gggctttgcagatgtaatgaagtta

SEQ ID NO: 114980 - DNA, 25 bp, probe
aagttaaggatctttcgccaggaag

SEQ ID NO: 114981 - DNA, 25 bp, probe
gaagttaaggatctttcgccaggaa

SEQ ID NO: 114982 - DNA, 25 bp, probe
atgaagttaaggatctttcgccagg

SEQ ID NO: 114983 - DNA, 25 bp, probe
atgtaatgaagttaaggatctttcg

SEQ ID NO: 114984 - DNA, 25 bp, probe
tgtataacagaagagcaggtgacgg

SEQ ID NO: 114985 - DNA, 25 bp, probe
cgtcaccagactttcaaggagatac

SEQ ID NO: 114986 - DNA, 25 bp, probe
ccagtcattgaaacaccaaaactat

SEQ ID NO: 114987 - DNA, 25 bp, probe
aacctgtcaaaattaccttgtatgg

SEQ ID NO: 114988 - DNA, 25 bp, probe
ctctaagggaataaatttgtgttgt

SEQ ID NO: 114989 - DNA, 25 bp, probe
actctaagggaataaatttgtgttg

SEQ ID NO: 114990 - DNA, 25 bp, probe
cagatgtaatgaagttaaggatctt

SEQ ID NO: 114991 - DNA, 25 bp, probe
ggaacctgtcaaaattaccttgtat

SEQ ID NO: 114992 - DNA, 25 bp, probe
ctctcaccagcacttagacagacac

SEQ ID NO: 114993 - DNA, 25 bp, probe
caccagactttcaaggagatactgc

SEQ ID NO: 114994 - DNA, 25 bp, probe
gaactctaagggaataaatttgtgt

SEQ ID NO: 114995 - DNA, 25 bp, probe
ggaggtgaagcagatcatccatatg

SEQ ID NO: 114996 - DNA, 25 bp, probe
gcatggagaagaggtagcaagagag

SEQ ID NO: 114997 - DNA, 25 bp, probe
gagcatggagaagaggtagcaagag

SEQ ID NO: 114998 - DNA, 25 bp, probe
acctgtcaaaattaccttgtatggc

SEQ ID NO: 114999 - DNA, 25 bp, probe
cagtcattgaaacaccaaaactatt

SEQ ID NO: 115000 - DNA, 25 bp, probe
tctaagggaataaatttgtgttgtt

SEQ ID NO: 115001 - DNA, 25 bp, probe
gaacctgtcaaaattaccttgtatg

SEQ ID NO: 115002 - DNA, 25 bp, probe
cccagtcattgaaacaccaaaacta

SEQ ID NO: 115003 - DNA, 25 bp, probe
aagattatcccagcttgttcaggag

SEQ ID NO: 115004 - DNA, 25 bp, probe
gaagattatcccagcttgttcagga

SEQ ID NO: 115005 - DNA, 25 bp, probe
aggaagattatcccagcttgttcag

SEQ ID NO: 115006 - DNA, 25 bp, probe
aggaacctgtcaaaattaccttgta

SEQ ID NO: 115007 - DNA, 25 bp, probe
agaactctaagggaataaatttgtg

SEQ ID NO: 115008 - DNA, 25 bp, probe
atcatccatatgctgagggagtatc

SEQ ID NO: 115009 - DNA, 25 bp, probe
tgcctataatatgctggttgtgtat

SEQ ID NO: 115010 - DNA, 25 bp, probe
atgcctataatatgctggttgtgta

SEQ ID NO: 115011 - DNA, 25 bp, probe
cctataatatgctggttgtgtatgc

SEQ ID NO: 115012 - DNA, 25 bp, probe
gcctataatatgctggttgtgtatg

SEQ ID NO: 115013 - DNA, 25 bp, probe
tatgttgtgtctaatctccttctga

SEQ ID NO: 115014 - DNA, 25 bp, probe
ctataatatgctggttgtgtatgct

SEQ ID NO: 115015 - DNA, 25 bp, probe
tataatatgctggttgtgtatgctt

SEQ ID NO: 115016 - DNA, 25 bp, probe
atgttgtgtctaatctccttctgag

SEQ ID NO: 115017 - DNA, 25 bp, probe
atatgttgtgtctaatctccttctg

SEQ ID NO: 115018 - DNA, 25 bp, probe
ttatgaagaagtctgaagaacgcct

SEQ ID NO: 115019 - DNA, 25 bp, probe
tatgaagaagtctgaagaacgcctt

SEQ ID NO: 115020 - DNA, 25 bp, probe
gttatgaagaagtctgaagaacgcc

SEQ ID NO: 115021 - DNA, 25 bp, probe
ggttatgaagaagtctgaagaacgc

SEQ ID NO: 115022 - DNA, 25 bp, probe
ttacatgcctataatatgctggttg

SEQ ID NO: 115023 - DNA, 25 bp, probe
catgcctataatatgctggttgtgt

SEQ ID NO: 115024 - DNA, 25 bp, probe
tacatgcctataatatgctggttgt

SEQ ID NO: 115025 - DNA, 25 bp, probe
acatgcctataatatgctggttgtg

SEQ ID NO: 115026 - DNA, 25 bp, probe
taatatgctggttgtgtatgctttg

SEQ ID NO: 115027 - DNA, 25 bp, probe
gtgggttatgaagaagtctgaagaa

SEQ ID NO: 115028 - DNA, 25 bp, probe
cagtgatgcccaaattgatttatgt

SEQ ID NO: 115029 - DNA, 25 bp, probe
ataatatgctggttgtgtatgcttt

SEQ ID NO: 115030 - DNA, 25 bp, probe
tgggttatgaagaagtctgaagaac

SEQ ID NO: 115031 - DNA, 25 bp, probe
tcgtcaaactagaaccaggatttaa

SEQ ID NO: 115032 - DNA, 25 bp, probe
ttaaatcgtcaaactagaaccagga

SEQ ID NO: 115033 - DNA, 25 bp, probe
agtgatgcccaaattgatttatgta

SEQ ID NO: 115034 - DNA, 25 bp, probe
ccagtgatgcccaaattgatttatg

SEQ ID NO: 115035 - DNA, 25 bp, probe
atcgtcaaactagaaccaggattta

SEQ ID NO: 115036 - DNA, 25 bp, probe
taaatcgtcaaactagaaccaggat

SEQ ID NO: 115037 - DNA, 25 bp, probe
cgtcaaactagaaccaggatttaat

SEQ ID NO: 115038 - DNA, 25 bp, probe
aatatgctggttgtgtatgctttgt

SEQ ID NO: 115039 - DNA, 25 bp, probe
accatatgttgtgtctaatctcctt

SEQ ID NO: 115040 - DNA, 25 bp, probe
tgatttatgtaataagaacgggcaa

SEQ ID NO: 115041 - DNA, 25 bp, probe
ttgatttatgtaataagaacgggca

SEQ ID NO: 115042 - DNA, 25 bp, probe
ccaagtgaagatccatttaagaaca

SEQ ID NO: 115043 - DNA, 25 bp, probe
ccatatgttgtgtctaatctccttc

SEQ ID NO: 115044 - DNA, 25 bp, probe
gggttatgaagaagtctgaagaacg

SEQ ID NO: 115045 - DNA, 25 bp, probe
gtgatgcccaaattgatttatgtaa

SEQ ID NO: 115046 - DNA, 25 bp, probe
gtgccaagtttcttacaacaattaa

SEQ ID NO: 115047 - DNA, 25 bp, probe
tccaagtgaagatccatttaagaac

SEQ ID NO: 115048 - DNA, 25 bp, probe
tgtgccaagtttcttacaacaatta

SEQ ID NO: 115049 - DNA, 25 bp, probe
ttatgtaataagaacgggcaaacag

SEQ ID NO: 115050 - DNA, 25 bp, probe
atatgctggttgtgtatgctttgtc

SEQ ID NO: 115051 - DNA, 25 bp, probe
taccatatgttgtgtctaatctcct

SEQ ID NO: 115052 - DNA, 25 bp, probe
ctgtgccaagtttcttacaacaatt

SEQ ID NO: 115053 - DNA, 25 bp, probe
agattctggcattagtgtagattcc

SEQ ID NO: 115054 - DNA, 25 bp, probe
ctcctagattctggcattagtgtag

SEQ ID NO: 115055 - DNA, 25 bp, probe
tcctagattctggcattagtgtaga

SEQ ID NO: 115056 - DNA, 25 bp, probe
cctagattctggcattagtgtagat

SEQ ID NO: 115057 - DNA, 25 bp, probe
gctcctagattctggcattagtgta

SEQ ID NO: 115058 - DNA, 25 bp, probe
tagattctggcattagtgtagattc

SEQ ID NO: 115059 - DNA, 25 bp, probe
attctggcattagtgtagattccaa

SEQ ID NO: 115060 - DNA, 25 bp, probe
gattctggcattagtgtagattcca

SEQ ID NO: 115061 - DNA, 25 bp, probe
ctagattctggcattagtgtagatt

SEQ ID NO: 115062 - DNA, 25 bp, probe
ctggcattagtgtagattccaactt

SEQ ID NO: 115063 - DNA, 25 bp, probe
ttctggcattagtgtagattccaac

SEQ ID NO: 115064 - DNA, 25 bp, probe
tatgtatgctgctagtgttgccaat

SEQ ID NO: 115065 - DNA, 25 bp, probe
aatttaagaaagcaatgaccatcgg

SEQ ID NO: 115066 - DNA, 25 bp, probe
tctggcattagtgtagattccaact

SEQ ID NO: 115067 - DNA, 25 bp, probe
atttaagaaagcaatgaccatcgga

SEQ ID NO: 115068 - DNA, 25 bp, probe
ttatgtatgctgctagtgttgccaa

SEQ ID NO: 115069 - DNA, 25 bp, probe
gatcttgaagtgtgtagaactacta

SEQ ID NO: 115070 - DNA, 25 bp, probe
ggcattagtgtagattccaactttc

SEQ ID NO: 115071 - DNA, 25 bp, probe
gcattagtgtagattccaactttca

SEQ ID NO: 115072 - DNA, 25 bp, probe
tttaagaaagcaatgaccatcggag

SEQ ID NO: 115073 - DNA, 25 bp, probe
atccaaatgttgcttgtaggcttta

SEQ ID NO: 115074 - DNA, 25 bp, probe
ccaaatgttgcttgtaggctttaac

SEQ ID NO: 115075 - DNA, 25 bp, probe
cttatgtatgctgctagtgttgcca

SEQ ID NO: 115076 - DNA, 25 bp, probe
tccaaatgttgcttgtaggctttaa

SEQ ID NO: 115077 - DNA, 25 bp, probe
tcttgaagtgtgtagaactactact

SEQ ID NO: 115078 - DNA, 25 bp, probe
agtgtagattccaactttcagtatg

SEQ ID NO: 115079 - DNA, 25 bp, probe
ttcaagaaatgctgatccaaatgtt

SEQ ID NO: 115080 - DNA, 25 bp, probe
tttcaagaaatgctgatccaaatgt

SEQ ID NO: 115081 - DNA, 25 bp, probe
actttcaagaaatgctgatccaaat

SEQ ID NO: 115082 - DNA, 25 bp, probe
ctactttcaagaaatgctgatccaa

SEQ ID NO: 115083 - DNA, 25 bp, probe
actactttcaagaaatgctgatcca

SEQ ID NO: 115084 - DNA, 25 bp, probe
taagaaagcaatgaccatcggagat

SEQ ID NO: 115085 - DNA, 25 bp, probe
caaatgttgcttgtaggctttaacg

SEQ ID NO: 115086 - DNA, 25 bp, probe
tcaagaaatgctgatccaaatgttg

SEQ ID NO: 115087 - DNA, 25 bp, probe
ctttcaagaaatgctgatccaaatg

SEQ ID NO: 115088 - DNA, 25 bp, probe
tactttcaagaaatgctgatccaaa

SEQ ID NO: 115089 - DNA, 25 bp, probe
ttaagaaagcaatgaccatcggaga

SEQ ID NO: 115090 - DNA, 25 bp, probe
tactactttcaagaaatgctgatcc

SEQ ID NO: 115091 - DNA, 25 bp, probe
gaactactactttcaagaaatgctg

SEQ ID NO: 115092 - DNA, 25 bp, probe
agaactactactttcaagaaatgct

SEQ ID NO: 115093 - DNA, 25 bp, probe
tcaacagctaactaaagaagacact

SEQ ID NO: 115094 - DNA, 25 bp, probe
aactactactttcaagaaatgctga

SEQ ID NO: 115095 - DNA, 25 bp, probe
attagtgtagattccaactttcagt

SEQ ID NO: 115096 - DNA, 25 bp, probe
aatgctgatccaaatgttgcttgta

SEQ ID NO: 115097 - DNA, 25 bp, probe
atagattagaaatgaccacaggaca

SEQ ID NO: 115098 - DNA, 25 bp, probe
tagattagaaatgaccacaggacat

SEQ ID NO: 115099 - DNA, 25 bp, probe
gcccaagattactgtcaatgtctat

SEQ ID NO: 115100 - DNA, 25 bp, probe
tgcccaagattactgtcaatgtcta

SEQ ID NO: 115101 - DNA, 25 bp, probe
agattagaaatgaccacaggacatg

SEQ ID NO: 115102 - DNA, 25 bp, probe
cccaagattactgtcaatgtctata

SEQ ID NO: 115103 - DNA, 25 bp, probe
tatagattagaaatgaccacaggac

SEQ ID NO: 115104 - DNA, 25 bp, probe
aaccagagatcgtgttgagagaaga

SEQ ID NO: 115105 - DNA, 25 bp, probe
atgcccaagattactgtcaatgtct

SEQ ID NO: 115106 - DNA, 25 bp, probe
accagagatcgtgttgagagaagag

SEQ ID NO: 115107 - DNA, 25 bp, probe
gattagaaatgaccacaggacatgc

SEQ ID NO: 115108 - DNA, 25 bp, probe
ccaagattactgtcaatgtctatag

SEQ ID NO: 115109 - DNA, 25 bp, probe
atatggaaattgctgggcttctgag

SEQ ID NO: 115110 - DNA, 25 bp, probe
ccagagatcgtgttgagagaagagg

SEQ ID NO: 115111 - DNA, 25 bp, probe
ctatagattagaaatgaccacagga

SEQ ID NO: 115112 - DNA, 25 bp, probe
attagaaatgaccacaggacatgca

SEQ ID NO: 115113 - DNA, 25 bp, probe
ttagaaatgaccacaggacatgcaa

SEQ ID NO: 115114 - DNA, 25 bp, probe
gagatcgtgttgagagaagagggtt

SEQ ID NO: 115115 - DNA, 25 bp, probe
tatggaaattgctgggcttctgaga

SEQ ID NO: 115116 - DNA, 25 bp, probe
agatcgtgttgagagaagagggttc

SEQ ID NO: 115117 - DNA, 25 bp, probe
tagaaatgaccacaggacatgcaac

SEQ ID NO: 115118 - DNA, 25 bp, probe
cagagatcgtgttgagagaagaggg

SEQ ID NO: 115119 - DNA, 25 bp, probe
caaccagagatcgtgttgagagaag

SEQ ID NO: 115120 - DNA, 25 bp, probe
catatggaaattgctgggcttctga

SEQ ID NO: 115121 - DNA, 25 bp, probe
agagatcgtgttgagagaagagggt

SEQ ID NO: 115122 - DNA, 25 bp, probe
gatcgtgttgagagaagagggttct

SEQ ID NO: 115123 - DNA, 25 bp, probe
atcgtgttgagagaagagggttctg

SEQ ID NO: 115124 - DNA, 25 bp, probe
atggaaattgctgggcttctgagag

SEQ ID NO: 115125 - DNA, 25 bp, probe
caagattactgtcaatgtctataga

SEQ ID NO: 115126 - DNA, 25 bp, probe
gcaaccagagatcgtgttgagagaa

SEQ ID NO: 115127 - DNA, 25 bp, probe
tctatagattagaaatgaccacagg

SEQ ID NO: 115128 - DNA, 25 bp, probe
tgtctatagattagaaatgaccaca

SEQ ID NO: 115129 - DNA, 25 bp, probe
atgcaaccagagatcgtgttgagag

SEQ ID NO: 115130 - DNA, 25 bp, probe
gtctatagattagaaatgaccacag

SEQ ID NO: 115131 - DNA, 25 bp, probe
catgcaaccagagatcgtgttgaga

SEQ ID NO: 115132 - DNA, 25 bp, probe
agattactgtcaatgtctatagatt

SEQ ID NO: 115133 - DNA, 25 bp, probe
aagattactgtcaatgtctatagat

SEQ ID NO: 115134 - DNA, 25 bp, probe
atgtctatagattagaaatgaccac

SEQ ID NO: 115135 - DNA, 25 bp, probe
aatgtctatagattagaaatgacca

SEQ ID NO: 115136 - DNA, 25 bp, probe
actgtcaatgtctatagattagaaa

SEQ ID NO: 115137 - DNA, 25 bp, probe
caatgtctatagattagaaatgacc

SEQ ID NO: 115138 - DNA, 25 bp, probe
agtgaatgttctggatgatacaagt

SEQ ID NO: 115139 - DNA, 25 bp, probe
tcagtgaatgttctggatgatacaa

SEQ ID NO: 115140 - DNA, 25 bp, probe
cagtgaatgttctggatgatacaag

SEQ ID NO: 115141 - DNA, 25 bp, probe
gaatgttctggatgatacaagtagg

SEQ ID NO: 115142 - DNA, 25 bp, probe
gtgaatgttctggatgatacaagta

SEQ ID NO: 115143 - DNA, 25 bp, probe
ttcagtgaatgttctggatgataca

SEQ ID NO: 115144 - DNA, 25 bp, probe
tgaatgttctggatgatacaagtag

SEQ ID NO: 115145 - DNA, 25 bp, probe
aatgttctggatgatacaagtaggg

SEQ ID NO: 115146 - DNA, 25 bp, probe
cctacttggtttcagtgaatgttct

SEQ ID NO: 115147 - DNA, 25 bp, probe
caagtacaaagagattagtcacaga

SEQ ID NO: 115148 - DNA, 25 bp, probe
tcaagtacaaagagattagtcacag

SEQ ID NO: 115149 - DNA, 25 bp, probe
tgctagatgtcatcaagtacaaaga

SEQ ID NO: 115150 - DNA, 25 bp, probe
atctatcgcatgtgccttcatcatc

SEQ ID NO: 115151 - DNA, 25 bp, probe
ctacttggtttcagtgaatgttctg

SEQ ID NO: 115152 - DNA, 25 bp, probe
gctagatgtcatcaagtacaaagag

SEQ ID NO: 115153 - DNA, 25 bp, probe
agtacaaagagattagtcacagatg

SEQ ID NO: 115154 - DNA, 25 bp, probe
ttgctagatgtcatcaagtacaaag

SEQ ID NO: 115155 - DNA, 25 bp, probe
tcaagaagtcattatctcaaactga

SEQ ID NO: 115156 - DNA, 25 bp, probe
tttcagtgaatgttctggatgatac

SEQ ID NO: 115157 - DNA, 25 bp, probe
gtttcagtgaatgttctggatgata

SEQ ID NO: 115158 - DNA, 25 bp, probe
ggatttacctacttggtttcagtga

SEQ ID NO: 115159 - DNA, 25 bp, probe
gcctcatccctacaacaatgtttat

SEQ ID NO: 115160 - DNA, 25 bp, probe
acagatcaagaagtcattatctcaa

SEQ ID NO: 115161 - DNA, 25 bp, probe
catctatcgcatgtgccttcatcat

SEQ ID NO: 115162 - DNA, 25 bp, probe
tacttggtttcagtgaatgttctgg

SEQ ID NO: 115163 - DNA, 25 bp, probe
ggtttcagtgaatgttctggatgat

SEQ ID NO: 115164 - DNA, 25 bp, probe
cttggtttcagtgaatgttctggat

SEQ ID NO: 115165 - DNA, 25 bp, probe
atgttctggatgatacaagtagggc

SEQ ID NO: 115166 - DNA, 25 bp, probe
gtacaaagagattagtcacagatgt

SEQ ID NO: 115167 - DNA, 25 bp, probe
tacctacttggtttcagtgaatgtt

SEQ ID NO: 115168 - DNA, 25 bp, probe
ttacctacttggtttcagtgaatgt

SEQ ID NO: 115169 - DNA, 25 bp, probe
atcaagtacaaagagattagtcaca

SEQ ID NO: 115170 - DNA, 25 bp, probe
gggatttacctacttggtttcagtg

SEQ ID NO: 115171 - DNA, 25 bp, probe
gtgggatttacctacttggtttcag

SEQ ID NO: 115172 - DNA, 25 bp, probe
tttacctacttggtttcagtgaatg

SEQ ID NO: 115173 - DNA, 25 bp, probe
cctcatccctacaacaatgtttata

SEQ ID NO: 115174 - DNA, 25 bp, probe
ttggtttcagtgaatgttctggatg

SEQ ID NO: 115175 - DNA, 25 bp, probe
gatttacctacttggtttcagtgaa

SEQ ID NO: 115176 - DNA, 25 bp, probe
tgggatttacctacttggtttcagt

SEQ ID NO: 115177 - DNA, 25 bp, probe
catcaagtacaaagagattagtcac

SEQ ID NO: 115178 - DNA, 25 bp, probe
tcatcaagtacaaagagattagtca

SEQ ID NO: 115179 - DNA, 25 bp, probe
aagtacaaagagattagtcacagat

SEQ ID NO: 115180 - DNA, 25 bp, probe
agcctcatccctacaacaatgttta

SEQ ID NO: 115181 - DNA, 25 bp, probe
acctacttggtttcagtgaatgttc

SEQ ID NO: 115182 - DNA, 25 bp, probe
acaatgtctaggagagagaagtcta

SEQ ID NO: 115183 - DNA, 25 bp, probe
caatgtctaggagagagaagtctaa

SEQ ID NO: 115184 - DNA, 25 bp, probe
ctgggtgagatgtggaataacttaa

SEQ ID NO: 115185 - DNA, 25 bp, probe
gacaatgtctaggagagagaagtct

SEQ ID NO: 115186 - DNA, 25 bp, probe
aattcagcagtgttgtaaggaatcc

SEQ ID NO: 115187 - DNA, 25 bp, probe
ctgtgcagctatagaagtagaggaa

SEQ ID NO: 115188 - DNA, 25 bp, probe
ctctcctgtgcagctatagaagtag

SEQ ID NO: 115189 - DNA, 25 bp, probe
tgaagtggcaaaggtggataaagta

SEQ ID NO: 115190 - DNA, 25 bp, probe
gatgaagtggcaaaggtggataaag

SEQ ID NO: 115191 - DNA, 25 bp, probe
tgtttgggaaatgaaggattataga

SEQ ID NO: 115192 - DNA, 25 bp, probe
tctcctgtgcagctatagaagtaga

SEQ ID NO: 115193 - DNA, 25 bp, probe
gggaaatgaaggattatagatcagc

SEQ ID NO: 115194 - DNA, 25 bp, probe
aagaattcagcagtgttgtaaggaa

SEQ ID NO: 115195 - DNA, 25 bp, probe
ctcctgtgcagctatagaagtagag

SEQ ID NO: 115196 - DNA, 25 bp, probe
gctgggtgagatgtggaataactta

SEQ ID NO: 115197 - DNA, 25 bp, probe
agaaagatgttgctgactcccttag

SEQ ID NO: 115198 - DNA, 25 bp, probe
gaagtggcaaaggtggataaagtac

SEQ ID NO: 115199 - DNA, 25 bp, probe
gaagaattcagcagtgttgtaagga

SEQ ID NO: 115200 - DNA, 25 bp, probe
agaagtagaggaaattcatcccaaa

SEQ ID NO: 115201 - DNA, 25 bp, probe
atgaaggattatagatcagctaagg

SEQ ID NO: 115202 - DNA, 25 bp, probe
tgtctaggagagagaagtctaaatt

SEQ ID NO: 115203 - DNA, 25 bp, probe
aatgtctaggagagagaagtctaaa

SEQ ID NO: 115204 - DNA, 25 bp, probe
aggattatagatcagctaagggagg

SEQ ID NO: 115205 - DNA, 25 bp, probe
attatagatcagctaagggaggcaa

SEQ ID NO: 115206 - DNA, 25 bp, probe
atgaagtggcaaaggtggataaagt

SEQ ID NO: 115207 - DNA, 25 bp, probe
tgatgaagtggcaaaggtggataaa

SEQ ID NO: 115208 - DNA, 25 bp, probe
tggaagaattcagcagtgttgtaag

SEQ ID NO: 115209 - DNA, 25 bp, probe
atgtctaggagagagaagtctaaat

SEQ ID NO: 115210 - DNA, 25 bp, probe
tagaagtagaggaaattcatcccaa

SEQ ID NO: 115211 - DNA, 25 bp, probe
gaagtctaaatttgatgaagtggca

SEQ ID NO: 115212 - DNA, 25 bp, probe
agaagtctaaatttgatgaagtggc

SEQ ID NO: 115213 - DNA, 25 bp, probe
aaggattatagatcagctaagggag

SEQ ID NO: 115214 - DNA, 25 bp, probe
gaaggattatagatcagctaaggga

SEQ ID NO: 115215 - DNA, 25 bp, probe
gattatagatcagctaagggaggca

SEQ ID NO: 115216 - DNA, 25 bp, probe
atagaagtagaggaaattcatccca

SEQ ID NO: 115217 - DNA, 25 bp, probe
gtgcagctatagaagtagaggaaat

SEQ ID NO: 115218 - DNA, 25 bp, probe
gagaaagatgttgctgactccctta

SEQ ID NO: 115219 - DNA, 25 bp, probe
ttatagatcagctaagggaggcaag

SEQ ID NO: 115220 - DNA, 25 bp, probe
tgcagctatagaagtagaggaaatt

SEQ ID NO: 115221 - DNA, 25 bp, probe
taagtaacagtgaaatgcaaccttg

SEQ ID NO: 115222 - DNA, 25 bp, probe
tgaaggattatagatcagctaaggg

SEQ ID NO: 115223 - DNA, 25 bp, probe
gtaaggaatccctcaggtttcaaac

SEQ ID NO: 115224 - DNA, 25 bp, probe
gaaagatgttgctgactcccttagt

SEQ ID NO: 115225 - DNA, 25 bp, probe
atgtttgggaaatgaaggattatag

SEQ ID NO: 115226 - DNA, 25 bp, probe
tattaagcaaacttgatgtgtggac

SEQ ID NO: 115227 - DNA, 25 bp, probe
acctattaagcaaacttgatgtgtg

SEQ ID NO: 115228 - DNA, 25 bp, probe
ctattaagcaaacttgatgtgtgga

SEQ ID NO: 115229 - DNA, 25 bp, probe
cctattaagcaaacttgatgtgtgg

SEQ ID NO: 115230 - DNA, 25 bp, probe
gacctattaagcaaacttgatgtgt

SEQ ID NO: 115231 - DNA, 25 bp, probe
agacctattaagcaaacttgatgtg

SEQ ID NO: 115232 - DNA, 25 bp, probe
gagacctattaagcaaacttgatgt

SEQ ID NO: 115233 - DNA, 25 bp, probe
agagacctattaagcaaacttgatg

SEQ ID NO: 115234 - DNA, 25 bp, probe
gaacagacatctccgcttcttcaat

SEQ ID NO: 115235 - DNA, 25 bp, probe
aagagacctattaagcaaacttgat

SEQ ID NO: 115236 - DNA, 25 bp, probe
aacagacatctccgcttcttcaatg

SEQ ID NO: 115237 - DNA, 25 bp, probe
attaagcaaacttgatgtgtggacc

SEQ ID NO: 115238 - DNA, 25 bp, probe
tcaatgaagacactggagggaaatt

SEQ ID NO: 115239 - DNA, 25 bp, probe
cagacatctccgcttcttcaatgaa

SEQ ID NO: 115240 - DNA, 25 bp, probe
taagagacctattaagcaaacttga

SEQ ID NO: 115241 - DNA, 25 bp, probe
ttcaatgaagacactggagggaaat

SEQ ID NO: 115242 - DNA, 25 bp, probe
gaagacactggagggaaattgctta

SEQ ID NO: 115243 - DNA, 25 bp, probe
ttaagcaaacttgatgtgtggacct

SEQ ID NO: 115244 - DNA, 25 bp, probe
acagacatctccgcttcttcaatga

SEQ ID NO: 115245 - DNA, 25 bp, probe
aagacactggagggaaattgcttac

SEQ ID NO: 115246 - DNA, 25 bp, probe
ttcaagctctgtactgtgggtttaa

SEQ ID NO: 115247 - DNA, 25 bp, probe
ttaagagacctattaagcaaacttg

SEQ ID NO: 115248 - DNA, 25 bp, probe
tcaagctctgtactgtgggtttaag

SEQ ID NO: 115249 - DNA, 25 bp, probe
cttcaagctctgtactgtgggttta

SEQ ID NO: 115250 - DNA, 25 bp, probe
aatgaagacactggagggaaattgc

SEQ ID NO: 115251 - DNA, 25 bp, probe
acactggagggaaattgcttacaag

SEQ ID NO: 115252 - DNA, 25 bp, probe
gacactggagggaaattgcttacaa

SEQ ID NO: 115253 - DNA, 25 bp, probe
taagcaaacttgatgtgtggacctg

SEQ ID NO: 115254 - DNA, 25 bp, probe
ctctgtactgtgggtttaagccttg

SEQ ID NO: 115255 - DNA, 25 bp, probe
caatgaagacactggagggaaattg

SEQ ID NO: 115256 - DNA, 25 bp, probe
agacactggagggaaattgcttaca

SEQ ID NO: 115257 - DNA, 25 bp, probe
gattctataaggccaactgcacaaa

SEQ ID NO: 115258 - DNA, 25 bp, probe
tacaaggcgcttaagagacctatta

SEQ ID NO: 115259 - DNA, 25 bp, probe
cactggagggaaattgcttacaagg

SEQ ID NO: 115260 - DNA, 25 bp, probe
cgattctataaggccaactgcacaa

SEQ ID NO: 115261 - DNA, 25 bp, probe
ctacaggaaatacagggacaggctc

SEQ ID NO: 115262 - DNA, 25 bp, probe
acaaggcgcttaagagacctattaa

SEQ ID NO: 115263 - DNA, 25 bp, probe
ttacaaggcgcttaagagacctatt

SEQ ID NO: 115264 - DNA, 25 bp, probe
atgaagacactggagggaaattgct

SEQ ID NO: 115265 - DNA, 25 bp, probe
cttacaaggcgcttaagagacctat

SEQ ID NO: 115266 - DNA, 25 bp, probe
agacatctccgcttcttcaatgaag

SEQ ID NO: 115267 - DNA, 25 bp, probe
tgaagacactggagggaaattgctt

SEQ ID NO: 115268 - DNA, 25 bp, probe
ggaacagacatctccgcttcttcaa

SEQ ID NO: 115269 - DNA, 25 bp, probe
gtttaagccttgcacctctggatac

SEQ ID NO: 115270 - DNA, 25 bp, probe
gattcatccttctcacctaacactg

SEQ ID NO: 115271 - DNA, 25 bp, probe
attcatccttctcacctaacactgg

SEQ ID NO: 115272 - DNA, 25 bp, probe
cgattcatccttctcacctaacact

SEQ ID NO: 115273 - DNA, 25 bp, probe
cttcgattcatccttctcacctaac

SEQ ID NO: 115274 - DNA, 25 bp, probe
aatggaacaccgacaatacactagg

SEQ ID NO: 115275 - DNA, 25 bp, probe
ttcgattcatccttctcacctaaca

SEQ ID NO: 115276 - DNA, 25 bp, probe
ccttcgattcatccttctcacctaa

SEQ ID NO: 115277 - DNA, 25 bp, probe
aaatggaacaccgacaatacactag

SEQ ID NO: 115278 - DNA, 25 bp, probe
tcgattcatccttctcacctaacac

SEQ ID NO: 115279 - DNA, 25 bp, probe
aattccagcttcacactaatgtctg

SEQ ID NO: 115280 - DNA, 25 bp, probe
atctgagaatggattggaatttaca

SEQ ID NO: 115281 - DNA, 25 bp, probe
gacaatacactaggcacccagatta

SEQ ID NO: 115282 - DNA, 25 bp, probe
attccagcttcacactaatgtctga

SEQ ID NO: 115283 - DNA, 25 bp, probe
acaatacactaggcacccagattac

SEQ ID NO: 115284 - DNA, 25 bp, probe
accttcgattcatccttctcaccta

SEQ ID NO: 115285 - DNA, 25 bp, probe
agttggctacaagactgatgaattc

SEQ ID NO: 115286 - DNA, 25 bp, probe
atgtcttcaccaaaggttatggatt

SEQ ID NO: 115287 - DNA, 25 bp, probe
tgtcttcaccaaaggttatggattt

SEQ ID NO: 115288 - DNA, 25 bp, probe
attggaatttacaagctcagactct

SEQ ID NO: 115289 - DNA, 25 bp, probe
gattggaatttacaagctcagactc

SEQ ID NO: 115290 - DNA, 25 bp, probe
atggattggaatttacaagctcaga

SEQ ID NO: 115291 - DNA, 25 bp, probe
gatgtcttcaccaaaggttatggat

SEQ ID NO: 115292 - DNA, 25 bp, probe
gaattccagcttcacactaatgtct

SEQ ID NO: 115293 - DNA, 25 bp, probe
tacaagactgatgaattccagcttc

SEQ ID NO: 115294 - DNA, 25 bp, probe
ctacaagactgatgaattccagctt

SEQ ID NO: 115295 - DNA, 25 bp, probe
ggattggaatttacaagctcagact

SEQ ID NO: 115296 - DNA, 25 bp, probe
caatacactaggcacccagattacc

SEQ ID NO: 115297 - DNA, 25 bp, probe
ctgaccttcgattcatccttctcac

SEQ ID NO: 115298 - DNA, 25 bp, probe
aggttatggatttggcttaataaag

SEQ ID NO: 115299 - DNA, 25 bp, probe
gttggctacaagactgatgaattcc

SEQ ID NO: 115300 - DNA, 25 bp, probe
tggattggaatttacaagctcagac

SEQ ID NO: 115301 - DNA, 25 bp, probe
gtacaagtgggaacacatcaatctg

SEQ ID NO: 115302 - DNA, 25 bp, probe
ttggaatttacaagctcagactctg

SEQ ID NO: 115303 - DNA, 25 bp, probe
cagattaccgtggaagatcagcttg

SEQ ID NO: 115304 - DNA, 25 bp, probe
aaggttatggatttggcttaataaa

SEQ ID NO: 115305 - DNA, 25 bp, probe
aaaggttatggatttggcttaataa

SEQ ID NO: 115306 - DNA, 25 bp, probe
agagaccacaagtatctacaattgg

SEQ ID NO: 115307 - DNA, 25 bp, probe
aaaatggaacaccgacaatacacta

SEQ ID NO: 115308 - DNA, 25 bp, probe
gtcttcaccaaaggttatggatttg

SEQ ID NO: 115309 - DNA, 25 bp, probe
tacaagtgggaacacatcaatctgg

SEQ ID NO: 115310 - DNA, 25 bp, probe
ggatgtcttcaccaaaggttatgga

SEQ ID NO: 115311 - DNA, 25 bp, probe
agggatgtcttcaccaaaggttatg

SEQ ID NO: 115312 - DNA, 25 bp, probe
cagggatgtcttcaccaaaggttat

SEQ ID NO: 115313 - DNA, 25 bp, probe
gaccttcgattcatccttctcacct

SEQ ID NO: 115314 - DNA, 25 bp, probe
ttacagattctcttccaggattctt

SEQ ID NO: 115315 - DNA, 25 bp, probe
attacagattctcttccaggattct

SEQ ID NO: 115316 - DNA, 25 bp, probe
agattacagattctcttccaggatt

SEQ ID NO: 115317 - DNA, 25 bp, probe
gattacagattctcttccaggattc

SEQ ID NO: 115318 - DNA, 25 bp, probe
acttcgagcttcacactaataacaa

SEQ ID NO: 115319 - DNA, 25 bp, probe
cttcgagcttcacactaataacaat

SEQ ID NO: 115320 - DNA, 25 bp, probe
gacttcgagcttcacactaataaca

SEQ ID NO: 115321 - DNA, 25 bp, probe
tataaacggtcaatcacaggaaaca

SEQ ID NO: 115322 - DNA, 25 bp, probe
ccaaatataaacggtcaatcacagg

SEQ ID NO: 115323 - DNA, 25 bp, probe
atataaacggtcaatcacaggaaac

SEQ ID NO: 115324 - DNA, 25 bp, probe
caaatataaacggtcaatcacagga

SEQ ID NO: 115325 - DNA, 25 bp, probe
ggacttcgagcttcacactaataac

SEQ ID NO: 115326 - DNA, 25 bp, probe
ctcttccaggattctttgtttgttt

SEQ ID NO: 115327 - DNA, 25 bp, probe
ataaacggtcaatcacaggaaacaa

SEQ ID NO: 115328 - DNA, 25 bp, probe
gaatttggaggctcagtttatcaga

SEQ ID NO: 115329 - DNA, 25 bp, probe
agaatttggaggctcagtttatcag

SEQ ID NO: 115330 - DNA, 25 bp, probe
tcgagcttcacactaataacaataa

SEQ ID NO: 115331 - DNA, 25 bp, probe
ttcgagcttcacactaataacaata

SEQ ID NO: 115332 - DNA, 25 bp, probe
tctcttccaggattctttgtttgtt

SEQ ID NO: 115333 - DNA, 25 bp, probe
ttctcttccaggattctttgtttgt

SEQ ID NO: 115334 - DNA, 25 bp, probe
attctcttccaggattctttgtttg

SEQ ID NO: 115335 - DNA, 25 bp, probe
aagctgacaaggaataactgtatgg

SEQ ID NO: 115336 - DNA, 25 bp, probe
taaacggtcaatcacaggaaacaaa

SEQ ID NO: 115337 - DNA, 25 bp, probe
cagaatttggaggctcagtttatca

SEQ ID NO: 115338 - DNA, 25 bp, probe
gattctcttccaggattctttgttt

SEQ ID NO: 115339 - DNA, 25 bp, probe
aatataaacggtcaatcacaggaaa

SEQ ID NO: 115340 - DNA, 25 bp, probe
aaatataaacggtcaatcacaggaa

SEQ ID NO: 115341 - DNA, 25 bp, probe
agattctcttccaggattctttgtt

SEQ ID NO: 115342 - DNA, 25 bp, probe
cagattctcttccaggattctttgt

SEQ ID NO: 115343 - DNA, 25 bp, probe
acagattctcttccaggattctttg

SEQ ID NO: 115344 - DNA, 25 bp, probe
tcttccaggattctttgtttgttta

SEQ ID NO: 115345 - DNA, 25 bp, probe
ggctcagtttatcagagggatttaa

SEQ ID NO: 115346 - DNA, 25 bp, probe
gcttcacactaataacaataatggg

SEQ ID NO: 115347 - DNA, 25 bp, probe
tacagattctcttccaggattcttt

SEQ ID NO: 115348 - DNA, 25 bp, probe
gctcagtttatcagagggatttaac

SEQ ID NO: 115349 - DNA, 25 bp, probe
cttccaggattctttgtttgtttag

SEQ ID NO: 115350 - DNA, 25 bp, probe
aggctcagtttatcagagggattta

SEQ ID NO: 115351 - DNA, 25 bp, probe
aatttggaggctcagtttatcagag

SEQ ID NO: 115352 - DNA, 25 bp, probe
cgagcttcacactaataacaataat

SEQ ID NO: 115353 - DNA, 25 bp, probe
cataaaccttgcttgtgatgttaat

SEQ ID NO: 115354 - DNA, 25 bp, probe
tttcaacatctggttcatttaatgc

SEQ ID NO: 115355 - DNA, 25 bp, probe
gacaaggaataactgtatgggctac

SEQ ID NO: 115356 - DNA, 25 bp, probe
tcttcatcatatgttaaccttggca

SEQ ID NO: 115357 - DNA, 25 bp, probe
cttcatcatatgttaaccttggcaa

SEQ ID NO: 115358 - DNA, 25 bp, probe
ttctgattctactattggcaagagg

SEQ ID NO: 115359 - DNA, 25 bp, probe
gattctactattggcaagaggagag

SEQ ID NO: 115360 - DNA, 25 bp, probe
ctgattctactattggcaagaggag

SEQ ID NO: 115361 - DNA, 25 bp, probe
tgattctactattggcaagaggaga

SEQ ID NO: 115362 - DNA, 25 bp, probe
tctgattctactattggcaagagga

SEQ ID NO: 115363 - DNA, 25 bp, probe
attctactattggcaagaggagagc

SEQ ID NO: 115364 - DNA, 25 bp, probe
cagaacaggtataggatttgacact

SEQ ID NO: 115365 - DNA, 25 bp, probe
gacagaacaggtataggatttgaca

SEQ ID NO: 115366 - DNA, 25 bp, probe
tgacagaacaggtataggatttgac

SEQ ID NO: 115367 - DNA, 25 bp, probe
acagaacaggtataggatttgacac

SEQ ID NO: 115368 - DNA, 25 bp, probe
ttgacagaacaggtataggatttga

SEQ ID NO: 115369 - DNA, 25 bp, probe
tgaaattgacagaacaggtatagga

SEQ ID NO: 115370 - DNA, 25 bp, probe
aaagaatgaaattgacagaacaggt

SEQ ID NO: 115371 - DNA, 25 bp, probe
gctagtaacaaaggtagtggtaaga

SEQ ID NO: 115372 - DNA, 25 bp, probe
ggctagtaacaaaggtagtggtaag

SEQ ID NO: 115373 - DNA, 25 bp, probe
attgacagaacaggtataggatttg

SEQ ID NO: 115374 - DNA, 25 bp, probe
ccacaaagaatgaaattgacagaac

SEQ ID NO: 115375 - DNA, 25 bp, probe
gccacaaagaatgaaattgacagaa

SEQ ID NO: 115376 - DNA, 25 bp, probe
atgaaattgacagaacaggtatagg

SEQ ID NO: 115377 - DNA, 25 bp, probe
aagaatgaaattgacagaacaggta

SEQ ID NO: 115378 - DNA, 25 bp, probe
gaaacagggctagtaacaaaggtag

SEQ ID NO: 115379 - DNA, 25 bp, probe
caaagaatgaaattgacagaacagg

SEQ ID NO: 115380 - DNA, 25 bp, probe
tttctgattctactattggcaagag

SEQ ID NO: 115381 - DNA, 25 bp, probe
agaatgaaattgacagaacaggtat

SEQ ID NO: 115382 - DNA, 25 bp, probe
gaaattgacagaacaggtataggat

SEQ ID NO: 115383 - DNA, 25 bp, probe
aaacagggctagtaacaaaggtagt

SEQ ID NO: 115384 - DNA, 25 bp, probe
cacaaagaatgaaattgacagaaca

SEQ ID NO: 115385 - DNA, 25 bp, probe
tataggatttgacactgccagagac

SEQ ID NO: 115386 - DNA, 25 bp, probe
gtataggatttgacactgccagaga

SEQ ID NO: 115387 - DNA, 25 bp, probe
agaacaggtataggatttgacactg

SEQ ID NO: 115388 - DNA, 25 bp, probe
acaaagaatgaaattgacagaacag

SEQ ID NO: 115389 - DNA, 25 bp, probe
gggctagtaacaaaggtagtggtaa

SEQ ID NO: 115390 - DNA, 25 bp, probe
aattgacagaacaggtataggattt

SEQ ID NO: 115391 - DNA, 25 bp, probe
aaattgacagaacaggtataggatt

SEQ ID NO: 115392 - DNA, 25 bp, probe
gagaagctggaggcatatctacttg

SEQ ID NO: 115393 - DNA, 25 bp, probe
gaacaggtataggatttgacactgc

SEQ ID NO: 115394 - DNA, 25 bp, probe
tccattagctataattcagtcacgt

SEQ ID NO: 115395 - DNA, 25 bp, probe
cgcacattccattagctataattca

SEQ ID NO: 115396 - DNA, 25 bp, probe
tctactattggcaagaggagagctt

SEQ ID NO: 115397 - DNA, 25 bp, probe
ttctactattggcaagaggagagct

SEQ ID NO: 115398 - DNA, 25 bp, probe
aacagggctagtaacaaaggtagtg

SEQ ID NO: 115399 - DNA, 25 bp, probe
ctagtaacaaaggtagtggtaagaa

SEQ ID NO: 115400 - DNA, 25 bp, probe
agggctagtaacaaaggtagtggta

SEQ ID NO: 115401 - DNA, 25 bp, probe
tagtaacaaaggtagtggtaagaaa

SEQ ID NO: 115402 - DNA, 25 bp, probe
tcttcttgtgcttctccataatgat

SEQ ID NO: 115403 - DNA, 25 bp, probe
atcttcttgtgcttctccataatga

SEQ ID NO: 115404 - DNA, 25 bp, probe
ccatcttcttgtgcttctccataat

SEQ ID NO: 115405 - DNA, 25 bp, probe
tgactattatcggatacacacttgg

SEQ ID NO: 115406 - DNA, 25 bp, probe
catcttcttgtgcttctccataatg

SEQ ID NO: 115407 - DNA, 25 bp, probe
tcttgtgcttctccataatgataga

SEQ ID NO: 115408 - DNA, 25 bp, probe
ttcttgtgcttctccataatgatag

SEQ ID NO: 115409 - DNA, 25 bp, probe
cttcttgtgcttctccataatgata

SEQ ID NO: 115410 - DNA, 25 bp, probe
tgtgcttctccataatgatagagtt

SEQ ID NO: 115411 - DNA, 25 bp, probe
ttgtgcttctccataatgatagagt

SEQ ID NO: 115412 - DNA, 25 bp, probe
cttgtgcttctccataatgatagag

SEQ ID NO: 115413 - DNA, 25 bp, probe
ggtgactattatcggatacacactt

SEQ ID NO: 115414 - DNA, 25 bp, probe
ctggtgactattatcggatacacac

SEQ ID NO: 115415 - DNA, 25 bp, probe
tggtgactattatcggatacacact

SEQ ID NO: 115416 - DNA, 25 bp, probe
gtgactattatcggatacacacttg

SEQ ID NO: 115417 - DNA, 25 bp, probe
gtggctggtgactattatcggatac

SEQ ID NO: 115418 - DNA, 25 bp, probe
aagttcttcatggtcaccttcatca

SEQ ID NO: 115419 - DNA, 25 bp, probe
tggctggtgactattatcggataca

SEQ ID NO: 115420 - DNA, 25 bp, probe
tgtggctggtgactattatcggata

SEQ ID NO: 115421 - DNA, 25 bp, probe
ctattatcggatacacacttgggat

SEQ ID NO: 115422 - DNA, 25 bp, probe
gactattatcggatacacacttggg

SEQ ID NO: 115423 - DNA, 25 bp, probe
gccatcttcttgtgcttctccataa

SEQ ID NO: 115424 - DNA, 25 bp, probe
gctggtgactattatcggatacaca

SEQ ID NO: 115425 - DNA, 25 bp, probe
actattatcggatacacacttggga

SEQ ID NO: 115426 - DNA, 25 bp, probe
tattatcggatacacacttgggatc

SEQ ID NO: 115427 - DNA, 25 bp, probe
agttcttcatggtcaccttcatcac

SEQ ID NO: 115428 - DNA, 25 bp, probe
ggctggtgactattatcggatacac

SEQ ID NO: 115429 - DNA, 25 bp, probe
gtgcttctccataatgatagagttt

SEQ ID NO: 115430 - DNA, 25 bp, probe
tatggatcaacagtgaagatcaaca

SEQ ID NO: 115431 - DNA, 25 bp, probe
ttatggatcaacagtgaagatcaac

SEQ ID NO: 115432 - DNA, 25 bp, probe
atggatcaacagtgaagatcaacag

SEQ ID NO: 115433 - DNA, 25 bp, probe
catggtgtggctggtgactattatc

SEQ ID NO: 115434 - DNA, 25 bp, probe
gttaattatggatcaacagtgaaga

SEQ ID NO: 115435 - DNA, 25 bp, probe
attatggatcaacagtgaagatcaa

SEQ ID NO: 115436 - DNA, 25 bp, probe
aattatggatcaacagtgaagatca

SEQ ID NO: 115437 - DNA, 25 bp, probe
ctgtgttctcctacatcatggtgtg

SEQ ID NO: 115438 - DNA, 25 bp, probe
gatgtcatcatgggcattactttcc

SEQ ID NO: 115439 - DNA, 25 bp, probe
ggatgtcatcatgggcattactttc

SEQ ID NO: 115440 - DNA, 25 bp, probe
atgtcatcatgggcattactttcct

SEQ ID NO: 115441 - DNA, 25 bp, probe
gtgtggctggtgactattatcggat

SEQ ID NO: 115442 - DNA, 25 bp, probe
gatcgctgtgttctcctacatcatg

SEQ ID NO: 115443 - DNA, 25 bp, probe
gaagttcttcatggtcaccttcatc

SEQ ID NO: 115444 - DNA, 25 bp, probe
tcatggtgtggctggtgactattat

SEQ ID NO: 115445 - DNA, 25 bp, probe
atcatggtgtggctggtgactatta

SEQ ID NO: 115446 - DNA, 25 bp, probe
aggactcaacgatactctggacaag

SEQ ID NO: 115447 - DNA, 25 bp, probe
aaagattgaggaatttctggaggca

SEQ ID NO: 115448 - DNA, 25 bp, probe
tacctgtccacatgatgaggagatc

SEQ ID NO: 115449 - DNA, 25 bp, probe
ctacctgtccacatgatgaggagat

SEQ ID NO: 115450 - DNA, 25 bp, probe
caggactcaacgatactctggacaa

SEQ ID NO: 115451 - DNA, 25 bp, probe
ctgaagaacaaccacaggtgaaatt

SEQ ID NO: 115452 - DNA, 25 bp, probe
ggactcaacgatactctggacaagg

SEQ ID NO: 115453 - DNA, 25 bp, probe
tgaagaacaaccacaggtgaaattg

SEQ ID NO: 115454 - DNA, 25 bp, probe
ttttagacagttactcaacatcccc

SEQ ID NO: 115455 - DNA, 25 bp, probe
gttttagacagttactcaacatccc

SEQ ID NO: 115456 - DNA, 25 bp, probe
ggttttagacagttactcaacatcc

SEQ ID NO: 115457 - DNA, 25 bp, probe
atagacacccaaaagattgaggaat

SEQ ID NO: 115458 - DNA, 25 bp, probe
caaaagattgaggaatttctggagg

SEQ ID NO: 115459 - DNA, 25 bp, probe
tagacacccaaaagattgaggaatt

SEQ ID NO: 115460 - DNA, 25 bp, probe
catagacacccaaaagattgaggaa

SEQ ID NO: 115461 - DNA, 25 bp, probe
cacccaaaagattgaggaatttctg

SEQ ID NO: 115462 - DNA, 25 bp, probe
gacacccaaaagattgaggaatttc

SEQ ID NO: 115463 - DNA, 25 bp, probe
gaaggttttagacagttactcaaca

SEQ ID NO: 115464 - DNA, 25 bp, probe
acacccaaaagattgaggaatttct

SEQ ID NO: 115465 - DNA, 25 bp, probe
agacacccaaaagattgaggaattt

SEQ ID NO: 115466 - DNA, 25 bp, probe
acacatagacacccaaaagattgag

SEQ ID NO: 115467 - DNA, 25 bp, probe
ttcaaatgcaggactcaacgatact

SEQ ID NO: 115468 - DNA, 25 bp, probe
aggttttagacagttactcaacatc

SEQ ID NO: 115469 - DNA, 25 bp, probe
cacacatagacacccaaaagattga

SEQ ID NO: 115470 - DNA, 25 bp, probe
gttcaaatgcaggactcaacgatac

SEQ ID NO: 115471 - DNA, 25 bp, probe
tgaaggttttagacagttactcaac

SEQ ID NO: 115472 - DNA, 25 bp, probe
aaaagattgaggaatttctggaggc

SEQ ID NO: 115473 - DNA, 25 bp, probe
acatagacacccaaaagattgagga

SEQ ID NO: 115474 - DNA, 25 bp, probe
cacatagacacccaaaagattgagg

SEQ ID NO: 115475 - DNA, 25 bp, probe
aaggttttagacagttactcaacat

SEQ ID NO: 115476 - DNA, 25 bp, probe
cctgaaggttttagacagttactca

SEQ ID NO: 115477 - DNA, 25 bp, probe
caaatgcaggactcaacgatactct

SEQ ID NO: 115478 - DNA, 25 bp, probe
tcaaatgcaggactcaacgatactc

SEQ ID NO: 115479 - DNA, 25 bp, probe
atgatgaggagatcaaactggtctg

SEQ ID NO: 115480 - DNA, 25 bp, probe
agttcaaatgcaggactcaacgata

SEQ ID NO: 115481 - DNA, 25 bp, probe
ccctgaaggttttagacagttactc

SEQ ID NO: 115482 - DNA, 25 bp, probe
catgatgaggagatcaaactggtct

SEQ ID NO: 115483 - DNA, 25 bp, probe
ctgaaggttttagacagttactcaa

SEQ ID NO: 115484 - DNA, 25 bp, probe
gaagaacaaccacaggtgaaattgc

SEQ ID NO: 115485 - DNA, 25 bp, probe
acatgatgaggagatcaaactggtc

SEQ ID NO: 115486 - DNA, 25 bp, probe
tccacatgatgaggagatcaaactg

SEQ ID NO: 115487 - DNA, 25 bp, probe
gtccacatgatgaggagatcaaact

SEQ ID NO: 115488 - DNA, 25 bp, probe
ctgtccacatgatgaggagatcaaa

SEQ ID NO: 115489 - DNA, 25 bp, probe
ccaaaagattgaggaatttctggag

SEQ ID NO: 115490 - DNA, 25 bp, probe
ttaagtggaagtgcaaccaaccatc

SEQ ID NO: 115491 - DNA, 25 bp, probe
tttaagtggaagtgcaaccaaccat

SEQ ID NO: 115492 - DNA, 25 bp, probe
cattctagaccgactcctgctcatg

SEQ ID NO: 115493 - DNA, 25 bp, probe
gattttaagtggaagtgcaaccaac

SEQ ID NO: 115494 - DNA, 25 bp, probe
ggattttaagtggaagtgcaaccaa

SEQ ID NO: 115495 - DNA, 25 bp, probe
attttaagtggaagtgcaaccaacc

SEQ ID NO: 115496 - DNA, 25 bp, probe
ctagacaactgctcccagctagaac

SEQ ID NO: 115497 - DNA, 25 bp, probe
ttttaagtggaagtgcaaccaacca

SEQ ID NO: 115498 - DNA, 25 bp, probe
ggggattttaagtggaagtgcaacc

SEQ ID NO: 115499 - DNA, 25 bp, probe
gggattttaagtggaagtgcaacca

SEQ ID NO: 115500 - DNA, 25 bp, probe
tctagacaactgctcccagctagaa

SEQ ID NO: 115501 - DNA, 25 bp, probe
ttcattcatcattatcgttgtcctg

SEQ ID NO: 115502 - DNA, 25 bp, probe
tcattcatcattatcgttgtcctgc

SEQ ID NO: 115503 - DNA, 25 bp, probe
cattcatcattatcgttgtcctgcc

SEQ ID NO: 115504 - DNA, 25 bp, probe
ttgtcctgccacatatcctaatgaa

SEQ ID NO: 115505 - DNA, 25 bp, probe
cattatcgttgtcctgccacatatc

SEQ ID NO: 115506 - DNA, 25 bp, probe
attcatcattatcgttgtcctgcca

SEQ ID NO: 115507 - DNA, 25 bp, probe
tcattatcgttgtcctgccacatat

SEQ ID NO: 115508 - DNA, 25 bp, probe
atcattatcgttgtcctgccacata

SEQ ID NO: 115509 - DNA, 25 bp, probe
gttgtcctgccacatatcctaatga

SEQ ID NO: 115510 - DNA, 25 bp, probe
gtcctgccacatatcctaatgaaat

SEQ ID NO: 115511 - DNA, 25 bp, probe
tcctgccacatatcctaatgaaatg

SEQ ID NO: 115512 - DNA, 25 bp, probe
tttcattcatcattatcgttgtcct

SEQ ID NO: 115513 - DNA, 25 bp, probe
caatgactttgagagagtgaacttt

SEQ ID NO: 115514 - DNA, 25 bp, probe
attatcgttgtcctgccacatatcc

SEQ ID NO: 115515 - DNA, 25 bp, probe
ccaatgactttgagagagtgaactt

SEQ ID NO: 115516 - DNA, 25 bp, probe
tatcgttgtcctgccacatatccta

SEQ ID NO: 115517 - DNA, 25 bp, probe
ttcatcattatcgttgtcctgccac

SEQ ID NO: 115518 - DNA, 25 bp, probe
atcccaatgactttgagagagtgaa

SEQ ID NO: 115519 - DNA, 25 bp, probe
aatcccaatgactttgagagagtga

SEQ ID NO: 115520 - DNA, 25 bp, probe
caatcccaatgactttgagagagtg

SEQ ID NO: 115521 - DNA, 25 bp, probe
tgataggtttagggtacactcagac

SEQ ID NO: 115522 - DNA, 25 bp, probe
tcagaccgtaaagccaagtatcaag

SEQ ID NO: 115523 - DNA, 25 bp, probe
ctcagaccgtaaagccaagtatcaa

SEQ ID NO: 115524 - DNA, 25 bp, probe
tgtcctgccacatatcctaatgaaa

SEQ ID NO: 115525 - DNA, 25 bp, probe
catcattatcgttgtcctgccacat

SEQ ID NO: 115526 - DNA, 25 bp, probe
cgttgtcctgccacatatcctaatg

SEQ ID NO: 115527 - DNA, 25 bp, probe
tcgttgtcctgccacatatcctaat

SEQ ID NO: 115528 - DNA, 25 bp, probe
atcgttgtcctgccacatatcctaa

SEQ ID NO: 115529 - DNA, 25 bp, probe
ttatcgttgtcctgccacatatcct

SEQ ID NO: 115530 - DNA, 25 bp, probe
cccaatgactttgagagagtgaact

SEQ ID NO: 115531 - DNA, 25 bp, probe
tcccaatgactttgagagagtgaac

SEQ ID NO: 115532 - DNA, 25 bp, probe
ccaatcccaatgactttgagagagt

SEQ ID NO: 115533 - DNA, 25 bp, probe
cctgccacatatcctaatgaaatgg

SEQ ID NO: 115534 - DNA, 25 bp, probe
ctagcctgataggtttagggtacac

SEQ ID NO: 115535 - DNA, 25 bp, probe
aagagatccgacggaataatagcag

SEQ ID NO: 115536 - DNA, 25 bp, probe
tagcctgataggtttagggtacact

SEQ ID NO: 115537 - DNA, 25 bp, probe
gataggtttagggtacactcagacc

SEQ ID NO: 115538 - DNA, 25 bp, probe
tttagggtacactcagaccgtaaag

SEQ ID NO: 115539 - DNA, 25 bp, probe
cactcagaccgtaaagccaagtatc

SEQ ID NO: 115540 - DNA, 25 bp, probe
ccaaatgtgagcatgaggaaacaaa

SEQ ID NO: 115541 - DNA, 25 bp, probe
gtttagggtacactcagaccgtaaa

SEQ ID NO: 115542 - DNA, 25 bp, probe
tacactcagaccgtaaagccaagta

SEQ ID NO: 115543 - DNA, 25 bp, probe
tcatcattatcgttgtcctgccaca

SEQ ID NO: 115544 - DNA, 25 bp, probe
atgactttgagagagtgaacttttc

SEQ ID NO: 115545 - DNA, 25 bp, probe
aacagaacaatgaagatgactacct

SEQ ID NO: 115546 - DNA, 25 bp, probe
ggcgagatcagtatccttaacatta

SEQ ID NO: 115547 - DNA, 25 bp, probe
aatgaagatgactacctgtctgatg

SEQ ID NO: 115548 - DNA, 25 bp, probe
caatgaagatgactacctgtctgat

SEQ ID NO: 115549 - DNA, 25 bp, probe
gaacaatgaagatgactacctgtct

SEQ ID NO: 115550 - DNA, 25 bp, probe
agaacaatgaagatgactacctgtc

SEQ ID NO: 115551 - DNA, 25 bp, probe
aacaatgaagatgactacctgtctg

SEQ ID NO: 115552 - DNA, 25 bp, probe
cagaacaatgaagatgactacctgt

SEQ ID NO: 115553 - DNA, 25 bp, probe
acagaacaatgaagatgactacctg

SEQ ID NO: 115554 - DNA, 25 bp, probe
gcgagatcagtatccttaacattaa

SEQ ID NO: 115555 - DNA, 25 bp, probe
tggcgagatcagtatccttaacatt

SEQ ID NO: 115556 - DNA, 25 bp, probe
ttggcgagatcagtatccttaacat

SEQ ID NO: 115557 - DNA, 25 bp, probe
acaatgaagatgactacctgtctga

SEQ ID NO: 115558 - DNA, 25 bp, probe
ctgcttgtccaaggatgatcttatg

SEQ ID NO: 115559 - DNA, 25 bp, probe
tctgcttgtccaaggatgatcttat

SEQ ID NO: 115560 - DNA, 25 bp, probe
atgaagatgactacctgtctgatgg

SEQ ID NO: 115561 - DNA, 25 bp, probe
ttctgcttgtccaaggatgatctta

SEQ ID NO: 115562 - DNA, 25 bp, probe
atcttatggaagctgtgactgagta

SEQ ID NO: 115563 - DNA, 25 bp, probe
accaagatgaaacagaacaatgaag

SEQ ID NO: 115564 - DNA, 25 bp, probe
ggaaaccaagatgaaacagaacaat

SEQ ID NO: 115565 - DNA, 25 bp, probe
ccaagatgaaacagaacaatgaaga

SEQ ID NO: 115566 - DNA, 25 bp, probe
aaccaagatgaaacagaacaatgaa

SEQ ID NO: 115567 - DNA, 25 bp, probe
aaaccaagatgaaacagaacaatga

SEQ ID NO: 115568 - DNA, 25 bp, probe
gaaaccaagatgaaacagaacaatg

SEQ ID NO: 115569 - DNA, 25 bp, probe
gatgatcttatggaagctgtgactg

SEQ ID NO: 115570 - DNA, 25 bp, probe
aaacagaacaatgaagatgactacc

SEQ ID NO: 115571 - DNA, 25 bp, probe
atgatcttatggaagctgtgactga

SEQ ID NO: 115572 - DNA, 25 bp, probe
aaggatgatcttatggaagctgtga

SEQ ID NO: 115573 - DNA, 25 bp, probe
caaggatgatcttatggaagctgtg

SEQ ID NO: 115574 - DNA, 25 bp, probe
atgaaacagaacaatgaagatgact

SEQ ID NO: 115575 - DNA, 25 bp, probe
gatgaaacagaacaatgaagatgac

SEQ ID NO: 115576 - DNA, 25 bp, probe
agatgaaacagaacaatgaagatga

SEQ ID NO: 115577 - DNA, 25 bp, probe
tcttatggaagctgtgactgagtac

SEQ ID NO: 115578 - DNA, 25 bp, probe
tgaaacagaacaatgaagatgacta

SEQ ID NO: 115579 - DNA, 25 bp, probe
gatcttatggaagctgtgactgagt

SEQ ID NO: 115580 - DNA, 25 bp, probe
tgatcttatggaagctgtgactgag

SEQ ID NO: 115581 - DNA, 25 bp, probe
ggatgatcttatggaagctgtgact

SEQ ID NO: 115582 - DNA, 25 bp, probe
aggatgatcttatggaagctgtgac

SEQ ID NO: 115583 - DNA, 25 bp, probe
gaaacagaacaatgaagatgactac

SEQ ID NO: 115584 - DNA, 25 bp, probe
gatgatggtgtgactcagtatgctc

SEQ ID NO: 115585 - DNA, 25 bp, probe
cttctgcttgtccaaggatgatctt

SEQ ID NO: 115586 - DNA, 25 bp, probe
aagatgaaacagaacaatgaagatg

SEQ ID NO: 115587 - DNA, 25 bp, probe
caagatgaaacagaacaatgaagat

SEQ ID NO: 115588 - DNA, 25 bp, probe
ctttggcgagatcagtatccttaac

SEQ ID NO: 115589 - DNA, 25 bp, probe
tggagtctatgatgttacaatggtc

SEQ ID NO: 115590 - DNA, 25 bp, probe
gttcaacctctactcctactacatt

SEQ ID NO: 115591 - DNA, 25 bp, probe
aatgttcaacctctactcctactac

SEQ ID NO: 115592 - DNA, 25 bp, probe
atggagtctatgatgttacaatggt

SEQ ID NO: 115593 - DNA, 25 bp, probe
aacctctactcctactacattgatg

SEQ ID NO: 115594 - DNA, 25 bp, probe
gaatgttcaacctctactcctacta

SEQ ID NO: 115595 - DNA, 25 bp, probe
ttcaacctctactcctactacattg

SEQ ID NO: 115596 - DNA, 25 bp, probe
atgattggaatgttcaacctctact

SEQ ID NO: 115597 - DNA, 25 bp, probe
ggagtctatgatgttacaatggtca

SEQ ID NO: 115598 - DNA, 25 bp, probe
tgattggaatgttcaacctctactc

SEQ ID NO: 115599 - DNA, 25 bp, probe
caacctctactcctactacattgat

SEQ ID NO: 115600 - DNA, 25 bp, probe
atcttcaggttcatgctcatattca

SEQ ID NO: 115601 - DNA, 25 bp, probe
tgttcaacctctactcctactacat

SEQ ID NO: 115602 - DNA, 25 bp, probe
atgttcaacctctactcctactaca

SEQ ID NO: 115603 - DNA, 25 bp, probe
tcttcaggttcatgctcatattcat

SEQ ID NO: 115604 - DNA, 25 bp, probe
catcttcaggttcatgctcatattc

SEQ ID NO: 115605 - DNA, 25 bp, probe
acatcttcaggttcatgctcatatt

SEQ ID NO: 115606 - DNA, 25 bp, probe
tatgattggaatgttcaacctctac

SEQ ID NO: 115607 - DNA, 25 bp, probe
cttcaggttcatgctcatattcatt

SEQ ID NO: 115608 - DNA, 25 bp, probe
gacatcttcaggttcatgctcatat

SEQ ID NO: 115609 - DNA, 25 bp, probe
tatggagtctatgatgttacaatgg

SEQ ID NO: 115610 - DNA, 25 bp, probe
acctctactcctactacattgatgt

SEQ ID NO: 115611 - DNA, 25 bp, probe
agacatcttcaggttcatgctcata

SEQ ID NO: 115612 - DNA, 25 bp, probe
ttggaatgttcaacctctactccta

SEQ ID NO: 115613 - DNA, 25 bp, probe
ttatgattggaatgttcaacctcta

SEQ ID NO: 115614 - DNA, 25 bp, probe
ttcaggttcatgctcatattcatta

SEQ ID NO: 115615 - DNA, 25 bp, probe
gattggaatgttcaacctctactcc

SEQ ID NO: 115616 - DNA, 25 bp, probe
ggaatgttcaacctctactcctact

SEQ ID NO: 115617 - DNA, 25 bp, probe
tcaggttcatgctcatattcattat

SEQ ID NO: 115618 - DNA, 25 bp, probe
attggaatgttcaacctctactcct

SEQ ID NO: 115619 - DNA, 25 bp, probe
ggttcatgctcatattcattatggt

SEQ ID NO: 115620 - DNA, 25 bp, probe
tggaatgttcaacctctactcctac

SEQ ID NO: 115621 - DNA, 25 bp, probe
aggttcatgctcatattcattatgg

SEQ ID NO: 115622 - DNA, 25 bp, probe
aagacatcttcaggttcatgctcat

SEQ ID NO: 115623 - DNA, 25 bp, probe
tcatgctcatattcattatggtgtt

SEQ ID NO: 115624 - DNA, 25 bp, probe
ttcatgctcatattcattatggtgt

SEQ ID NO: 115625 - DNA, 25 bp, probe
gttcatgctcatattcattatggtg

SEQ ID NO: 115626 - DNA, 25 bp, probe
agtgaaatcagtggtcatcaactat

SEQ ID NO: 115627 - DNA, 25 bp, probe
cctttatgattggaatgttcaacct

SEQ ID NO: 115628 - DNA, 25 bp, probe
caggttcatgctcatattcattatg

SEQ ID NO: 115629 - DNA, 25 bp, probe
cagtgaaatcagtggtcatcaacta

SEQ ID NO: 115630 - DNA, 25 bp, probe
gcctttatgattggaatgttcaacc

SEQ ID NO: 115631 - DNA, 25 bp, probe
gtgaaatcagtggtcatcaactata

SEQ ID NO: 115632 - DNA, 25 bp, probe
tttatgattggaatgttcaacctct

SEQ ID NO: 115633 - DNA, 25 bp, probe
ttaccagaaggtgaacaagaagttg

SEQ ID NO: 115634 - DNA, 25 bp, probe
agaaggtgaacaagaagttggagac

SEQ ID NO: 115635 - DNA, 25 bp, probe
cagaaggtgaacaagaagttggaga

SEQ ID NO: 115636 - DNA, 25 bp, probe
atctgctagggatcttgatttgaaa

SEQ ID NO: 115637 - DNA, 25 bp, probe
tgataggtttaggatacactcagac

SEQ ID NO: 115638 - DNA, 25 bp, probe
aaatctgaggatggatcggagttta

SEQ ID NO: 115639 - DNA, 25 bp, probe
taaagtgaacaactccagcctgata

SEQ ID NO: 115640 - DNA, 25 bp, probe
taccagaaggtgaacaagaagttgg

SEQ ID NO: 115641 - DNA, 25 bp, probe
agcctgataggtttaggatacactc

SEQ ID NO: 115642 - DNA, 25 bp, probe
aatctgaggatggatcggagtttac

SEQ ID NO: 115643 - DNA, 25 bp, probe
gcctgataggtttaggatacactca

SEQ ID NO: 115644 - DNA, 25 bp, probe
cagcctgataggtttaggatacact

SEQ ID NO: 115645 - DNA, 25 bp, probe
catttaccagaaggtgaacaagaag

SEQ ID NO: 115646 - DNA, 25 bp, probe
gataggtttaggatacactcagacc

SEQ ID NO: 115647 - DNA, 25 bp, probe
atttaccagaaggtgaacaagaagt

SEQ ID NO: 115648 - DNA, 25 bp, probe
tttaccagaaggtgaacaagaagtt

SEQ ID NO: 115649 - DNA, 25 bp, probe
ataggtttaggatacactcagaccc

SEQ ID NO: 115650 - DNA, 25 bp, probe
ccatttaccagaaggtgaacaagaa

SEQ ID NO: 115651 - DNA, 25 bp, probe
aatctgctagggatcttgatttgaa

SEQ ID NO: 115652 - DNA, 25 bp, probe
gaaatctgaggatggatcggagttt

SEQ ID NO: 115653 - DNA, 25 bp, probe
ctccagcctgataggtttaggatac

SEQ ID NO: 115654 - DNA, 25 bp, probe
acaatacactaggcaccgagatgag

SEQ ID NO: 115655 - DNA, 25 bp, probe
gacaatacactaggcaccgagatga

SEQ ID NO: 115656 - DNA, 25 bp, probe
ctccatttaccagaaggtgaacaag

SEQ ID NO: 115657 - DNA, 25 bp, probe
taggtttaggatacactcagaccct

SEQ ID NO: 115658 - DNA, 25 bp, probe
ccagcctgataggtttaggatacac

SEQ ID NO: 115659 - DNA, 25 bp, probe
aacaactccagcctgataggtttag

SEQ ID NO: 115660 - DNA, 25 bp, probe
gaacaactccagcctgataggttta

SEQ ID NO: 115661 - DNA, 25 bp, probe
cttctccactaaagtgaacaactcc

SEQ ID NO: 115662 - DNA, 25 bp, probe
ctgaggatggatcggagtttacaag

SEQ ID NO: 115663 - DNA, 25 bp, probe
actccagcctgataggtttaggata

SEQ ID NO: 115664 - DNA, 25 bp, probe
aaagtgaacaactccagcctgatag

SEQ ID NO: 115665 - DNA, 25 bp, probe
ctaaagtgaacaactccagcctgat

SEQ ID NO: 115666 - DNA, 25 bp, probe
tccatttaccagaaggtgaacaaga

SEQ ID NO: 115667 - DNA, 25 bp, probe
gaaggtgaacaagaagttggagacc

SEQ ID NO: 115668 - DNA, 25 bp, probe
ccagaaggtgaacaagaagttggag

SEQ ID NO: 115669 - DNA, 25 bp, probe
atctgaggatggatcggagtttaca

SEQ ID NO: 115670 - DNA, 25 bp, probe
tccagcctgataggtttaggataca

SEQ ID NO: 115671 - DNA, 25 bp, probe
ttctccactaaagtgaacaactcca

SEQ ID NO: 115672 - DNA, 25 bp, probe
tctgaggatggatcggagtttacaa

SEQ ID NO: 115673 - DNA, 25 bp, probe
gcttctccactaaagtgaacaactc

SEQ ID NO: 115674 - DNA, 25 bp, probe
ttgaaaacgaaatctgaggatggat

SEQ ID NO: 115675 - DNA, 25 bp, probe
tttgaaaacgaaatctgaggatgga

SEQ ID NO: 115676 - DNA, 25 bp, probe
ctgcttctccactaaagtgaacaac

SEQ ID NO: 115677 - DNA, 25 bp, probe
gtgttcctgtcagtcattgagtatg

SEQ ID NO: 115678 - DNA, 25 bp, probe
tgtgttcctgtcagtcattgagtat

SEQ ID NO: 115679 - DNA, 25 bp, probe
ttgtgttcctgtcagtcattgagta

SEQ ID NO: 115680 - DNA, 25 bp, probe
tatagcagcacaggttggtacaata

SEQ ID NO: 115681 - DNA, 25 bp, probe
aaacctatttcccagccatattgat

SEQ ID NO: 115682 - DNA, 25 bp, probe
aatgtactcactgtcttggtcactg

SEQ ID NO: 115683 - DNA, 25 bp, probe
ggaaacaattcaagaagacaggaaa

SEQ ID NO: 115684 - DNA, 25 bp, probe
aaacaattcaagaagacaggaaagc

SEQ ID NO: 115685 - DNA, 25 bp, probe
aacctatttcccagccatattgatg

SEQ ID NO: 115686 - DNA, 25 bp, probe
ttaaatgtactcactgtcttggtca

SEQ ID NO: 115687 - DNA, 25 bp, probe
tgttcctgtcagtcattgagtatgc

SEQ ID NO: 115688 - DNA, 25 bp, probe
caaacctatttcccagccatattga

SEQ ID NO: 115689 - DNA, 25 bp, probe
taaatgtactcactgtcttggtcac

SEQ ID NO: 115690 - DNA, 25 bp, probe
atagcagcacaggttggtacaatag

SEQ ID NO: 115691 - DNA, 25 bp, probe
cttaaatgtactcactgtcttggtc

SEQ ID NO: 115692 - DNA, 25 bp, probe
gaaacaattcaagaagacaggaaag

SEQ ID NO: 115693 - DNA, 25 bp, probe
tttcatcaactttgtgctaaggagg

SEQ ID NO: 115694 - DNA, 25 bp, probe
gcttaaatgtactcactgtcttggt

SEQ ID NO: 115695 - DNA, 25 bp, probe
atgatgagaaagggctggaatgtta

SEQ ID NO: 115696 - DNA, 25 bp, probe
cggaaacaattcaagaagacaggaa

SEQ ID NO: 115697 - DNA, 25 bp, probe
gaagagcggaaacaattcaagaaga

SEQ ID NO: 115698 - DNA, 25 bp, probe
ctctttgtgttcctgtcagtcattg

SEQ ID NO: 115699 - DNA, 25 bp, probe
aagagcggaaacaattcaagaagac

SEQ ID NO: 115700 - DNA, 25 bp, probe
catattgatggtgatgctttcatgg

SEQ ID NO: 115701 - DNA, 25 bp, probe
aaatgtactcactgtcttggtcact

SEQ ID NO: 115702 - DNA, 25 bp, probe
tgatgagaaagggctggaatgttag

SEQ ID NO: 115703 - DNA, 25 bp, probe
agcttaaatgtactcactgtcttgg

SEQ ID NO: 115704 - DNA, 25 bp, probe
ctttgtgttcctgtcagtcattgag

SEQ ID NO: 115705 - DNA, 25 bp, probe
ctggaaggacagtatctctttactt

SEQ ID NO: 115706 - DNA, 25 bp, probe
atattgatggtgatgctttcatggg

SEQ ID NO: 115707 - DNA, 25 bp, probe
gcaaacctatttcccagccatattg

SEQ ID NO: 115708 - DNA, 25 bp, probe
ctatagcagcacaggttggtacaat

SEQ ID NO: 115709 - DNA, 25 bp, probe
cctggaaggacagtatctctttact

SEQ ID NO: 115710 - DNA, 25 bp, probe
aacaattcaagaagacaggaaagct

SEQ ID NO: 115711 - DNA, 25 bp, probe
tctttgtgttcctgtcagtcattga

SEQ ID NO: 115712 - DNA, 25 bp, probe
gagcggaaacaattcaagaagacag

SEQ ID NO: 115713 - DNA, 25 bp, probe
ggaagagcggaaacaattcaagaag

SEQ ID NO: 115714 - DNA, 25 bp, probe
ccctggaaggacagtatctctttac

SEQ ID NO: 115715 - DNA, 25 bp, probe
tatccctggaaggacagtatctctt

SEQ ID NO: 115716 - DNA, 25 bp, probe
tttgtgttcctgtcagtcattgagt

SEQ ID NO: 115717 - DNA, 25 bp, probe
gatgatgagaaagggctggaatgtt

SEQ ID NO: 115718 - DNA, 25 bp, probe
cctctttgtgttcctgtcagtcatt

SEQ ID NO: 115719 - DNA, 25 bp, probe
ttcctgtcagtcattgagtatgcag

SEQ ID NO: 115720 - DNA, 25 bp, probe
gttcctgtcagtcattgagtatgca

SEQ ID NO: 115721 - DNA, 25 bp, probe
ataagaacaagaaccacaacctgaa

SEQ ID NO: 115722 - DNA, 25 bp, probe
aataagaacaagaaccacaacctga

SEQ ID NO: 115723 - DNA, 25 bp, probe
tcatcataccagttggaatcacatt

SEQ ID NO: 115724 - DNA, 25 bp, probe
tagtcatcataccagttggaatcac

SEQ ID NO: 115725 - DNA, 25 bp, probe
ctagtcatcataccagttggaatca

SEQ ID NO: 115726 - DNA, 25 bp, probe
tctagtcatcataccagttggaatc

SEQ ID NO: 115727 - DNA, 25 bp, probe
gtcatcataccagttggaatcacat

SEQ ID NO: 115728 - DNA, 25 bp, probe
aatctagtcatcataccagttggaa

SEQ ID NO: 115729 - DNA, 25 bp, probe
atctagtcatcataccagttggaat

SEQ ID NO: 115730 - DNA, 25 bp, probe
agtcatcataccagttggaatcaca

SEQ ID NO: 115731 - DNA, 25 bp, probe
atcataccagttggaatcacattct

SEQ ID NO: 115732 - DNA, 25 bp, probe
catcataccagttggaatcacattc

SEQ ID NO: 115733 - DNA, 25 bp, probe
tcataccagttggaatcacattctt

SEQ ID NO: 115734 - DNA, 25 bp, probe
aaataagaacaagaaccacaacctg

SEQ ID NO: 115735 - DNA, 25 bp, probe
taagaacaagaaccacaacctgaaa

SEQ ID NO: 115736 - DNA, 25 bp, probe
attctcagtctcttgcgtttattac

SEQ ID NO: 115737 - DNA, 25 bp, probe
aaattctcagtctcttgcgtttatt

SEQ ID NO: 115738 - DNA, 25 bp, probe
attctttacagagcaaacaacaaca

SEQ ID NO: 115739 - DNA, 25 bp, probe
acattctttacagagcaaacaacaa

SEQ ID NO: 115740 - DNA, 25 bp, probe
tcacattctttacagagcaaacaac

SEQ ID NO: 115741 - DNA, 25 bp, probe
cattctttacagagcaaacaacaac

SEQ ID NO: 115742 - DNA, 25 bp, probe
cacattctttacagagcaaacaaca

SEQ ID NO: 115743 - DNA, 25 bp, probe
atcacattctttacagagcaaacaa

SEQ ID NO: 115744 - DNA, 25 bp, probe
aatcacattctttacagagcaaaca

SEQ ID NO: 115745 - DNA, 25 bp, probe
ttctttacagagcaaacaacaacac

SEQ ID NO: 115746 - DNA, 25 bp, probe
aaatctagtcatcataccagttgga

SEQ ID NO: 115747 - DNA, 25 bp, probe
agatacatacatcaatgggaagaga

SEQ ID NO: 115748 - DNA, 25 bp, probe
gaaatctagtcatcataccagttgg

SEQ ID NO: 115749 - DNA, 25 bp, probe
ggaaatctagtcatcataccagttg

SEQ ID NO: 115750 - DNA, 25 bp, probe
aattctcagtctcttgcgtttatta

SEQ ID NO: 115751 - DNA, 25 bp, probe
aggaatggattctgaagtttacaag

SEQ ID NO: 115752 - DNA, 25 bp, probe
aatggattctgaagtttacaagaca

SEQ ID NO: 115753 - DNA, 25 bp, probe
tttacagagcaaacaacaacaccat

SEQ ID NO: 115754 - DNA, 25 bp, probe
ggaatggattctgaagtttacaaga

SEQ ID NO: 115755 - DNA, 25 bp, probe
ttgtggttgacttcatctcatccat

SEQ ID NO: 115756 - DNA, 25 bp, probe
aaggaatggattctgaagtttacaa

SEQ ID NO: 115757 - DNA, 25 bp, probe
aaaggaatggattctgaagtttaca

SEQ ID NO: 115758 - DNA, 25 bp, probe
gatacatacatcaatgggaagagaa

SEQ ID NO: 115759 - DNA, 25 bp, probe
gtcaatgaagacagttctgaaatca

SEQ ID NO: 115760 - DNA, 25 bp, probe
ttcaatgtggcatcagatacagttt

SEQ ID NO: 115761 - DNA, 25 bp, probe
tttcaatgtggcatcagatacagtt

SEQ ID NO: 115762 - DNA, 25 bp, probe
tgaagacagttctgaaatcatcctg

SEQ ID NO: 115763 - DNA, 25 bp, probe
atggttggaaatctagtcatcatac

SEQ ID NO: 115764 - DNA, 25 bp, probe
atggattctgaagtttacaagacag

SEQ ID NO: 115765 - DNA, 25 bp, probe
atcagcgtttctactcctccctctt

SEQ ID NO: 115766 - DNA, 25 bp, probe
aaacatcagcgtttctactcctccc

SEQ ID NO: 115767 - DNA, 25 bp, probe
gaggtcctgatgaacacctacagtg

SEQ ID NO: 115768 - DNA, 25 bp, probe
catcgaggtcctgatgaacacctac

SEQ ID NO: 115769 - DNA, 25 bp, probe
ggattttgagggcgtgctctactag

SEQ ID NO: 115770 - DNA, 25 bp, probe
aggtcctgatgaacacctacagtgt

SEQ ID NO: 115771 - DNA, 25 bp, probe
atcgaggtcctgatgaacacctaca

SEQ ID NO: 115772 - DNA, 25 bp, probe
tgagaatgaccaataaccaaggaat

SEQ ID NO: 115773 - DNA, 25 bp, probe
ctgagaatgaccaataaccaaggaa

SEQ ID NO: 115774 - DNA, 25 bp, probe
cacttatcctctgagaatgaccaat

SEQ ID NO: 115775 - DNA, 25 bp, probe
tatcctctgagaatgaccaataacc

SEQ ID NO: 115776 - DNA, 25 bp, probe
gagaatgaccaataaccaaggaatt

SEQ ID NO: 115777 - DNA, 25 bp, probe
ctctgagaatgaccaataaccaagg

SEQ ID NO: 115778 - DNA, 25 bp, probe
cctctgagaatgaccaataaccaag

SEQ ID NO: 115779 - DNA, 25 bp, probe
acacttatcctctgagaatgaccaa

SEQ ID NO: 115780 - DNA, 25 bp, probe
atcctctgagaatgaccaataacca

SEQ ID NO: 115781 - DNA, 25 bp, probe
tctgagaatgaccaataaccaagga

SEQ ID NO: 115782 - DNA, 25 bp, probe
acttatcctctgagaatgaccaata

SEQ ID NO: 115783 - DNA, 25 bp, probe
atcacacttatcctctgagaatgac

SEQ ID NO: 115784 - DNA, 25 bp, probe
tcctctgagaatgaccaataaccaa

SEQ ID NO: 115785 - DNA, 25 bp, probe
caatgtaagagatacggcacttctg

SEQ ID NO: 115786 - DNA, 25 bp, probe
cacacttatcctctgagaatgacca

SEQ ID NO: 115787 - DNA, 25 bp, probe
attctgtctactgctgttatgactt

SEQ ID NO: 115788 - DNA, 25 bp, probe
aattctgtctactgctgttatgact

SEQ ID NO: 115789 - DNA, 25 bp, probe
ttctgtctactgctgttatgacttg

SEQ ID NO: 115790 - DNA, 25 bp, probe
tcacacttatcctctgagaatgacc

SEQ ID NO: 115791 - DNA, 25 bp, probe
tatcacacttatcctctgagaatga

SEQ ID NO: 115792 - DNA, 25 bp, probe
ctgttatgacttggcatatacctct

SEQ ID NO: 115793 - DNA, 25 bp, probe
ttatcctctgagaatgaccaataac

SEQ ID NO: 115794 - DNA, 25 bp, probe
tgttatgacttggcatatacctctt

SEQ ID NO: 115795 - DNA, 25 bp, probe
ttatgacttggcatatacctcttga

SEQ ID NO: 115796 - DNA, 25 bp, probe
gttatgacttggcatatacctcttg

SEQ ID NO: 115797 - DNA, 25 bp, probe
cttatcctctgagaatgaccaataa

SEQ ID NO: 115798 - DNA, 25 bp, probe
gctgttatgacttggcatatacctc

SEQ ID NO: 115799 - DNA, 25 bp, probe
ttatcacacttatcctctgagaatg

SEQ ID NO: 115800 - DNA, 25 bp, probe
aatgtaagagatacggcacttctgg

SEQ ID NO: 115801 - DNA, 25 bp, probe
ggctactttatcacacttatcctct

SEQ ID NO: 115802 - DNA, 25 bp, probe
tctgtctactgctgttatgacttgg

SEQ ID NO: 115803 - DNA, 25 bp, probe
ccaggctactttatcacacttatcc

SEQ ID NO: 115804 - DNA, 25 bp, probe
tttatggtgagaaatacaaacagca

SEQ ID NO: 115805 - DNA, 25 bp, probe
gctactttatcacacttatcctctg

SEQ ID NO: 115806 - DNA, 25 bp, probe
tgagaaatacaaacagcacttgaag

SEQ ID NO: 115807 - DNA, 25 bp, probe
gcaatgtaagagatacggcacttct

SEQ ID NO: 115808 - DNA, 25 bp, probe
aaatacaaacagcacttgaagcaat

SEQ ID NO: 115809 - DNA, 25 bp, probe
aatacaaacagcacttgaagcaatt

SEQ ID NO: 115810 - DNA, 25 bp, probe
atacaaacagcacttgaagcaattc

SEQ ID NO: 115811 - DNA, 25 bp, probe
gaaatacaaacagcacttgaagcaa

SEQ ID NO: 115812 - DNA, 25 bp, probe
ctccaatttatatgtaccttcagcg

SEQ ID NO: 115813 - DNA, 25 bp, probe
gagaaatacaaacagcacttgaagc

SEQ ID NO: 115814 - DNA, 25 bp, probe
atggaattctgtctactgctgttat

SEQ ID NO: 115815 - DNA, 25 bp, probe
atatggaattctgtctactgctgtt

SEQ ID NO: 115816 - DNA, 25 bp, probe
gctaatcagtcaatacaagtcacat

SEQ ID NO: 115817 - DNA, 25 bp, probe
atggagtggagtatctgaagaatga

SEQ ID NO: 115818 - DNA, 25 bp, probe
gatggagtggagtatctgaagaatg

SEQ ID NO: 115819 - DNA, 25 bp, probe
tggagtggagtatctgaagaatgat

SEQ ID NO: 115820 - DNA, 25 bp, probe
tgatggagtggagtatctgaagaat

SEQ ID NO: 115821 - DNA, 25 bp, probe
ctgatggagtggagtatctgaagaa

SEQ ID NO: 115822 - DNA, 25 bp, probe
ggagtggagtatctgaagaatgatc

SEQ ID NO: 115823 - DNA, 25 bp, probe
tggattatgaagtgtcaatagatgc

SEQ ID NO: 115824 - DNA, 25 bp, probe
atatgagaaggtacaatgttccagc

SEQ ID NO: 115825 - DNA, 25 bp, probe
ggattatgaagtgtcaatagatgct

SEQ ID NO: 115826 - DNA, 25 bp, probe
taatcagtcaatacaagtcacatgg

SEQ ID NO: 115827 - DNA, 25 bp, probe
aagcgaacacactattggagactta

SEQ ID NO: 115828 - DNA, 25 bp, probe
cagtgctgaagattatgtgagacaa

SEQ ID NO: 115829 - DNA, 25 bp, probe
agctaatcagtcaatacaagtcaca

SEQ ID NO: 115830 - DNA, 25 bp, probe
attatgaagtgtcaatagatgctga

SEQ ID NO: 115831 - DNA, 25 bp, probe
aacatatccgagctaatcagtcaat

SEQ ID NO: 115832 - DNA, 25 bp, probe
gagctaatcagtcaatacaagtcac

SEQ ID NO: 115833 - DNA, 25 bp, probe
atccgagctaatcagtcaatacaag

SEQ ID NO: 115834 - DNA, 25 bp, probe
tatccgagctaatcagtcaatacaa

SEQ ID NO: 115835 - DNA, 25 bp, probe
cgagctaatcagtcaatacaagtca

SEQ ID NO: 115836 - DNA, 25 bp, probe
caacatatccgagctaatcagtcaa

SEQ ID NO: 115837 - DNA, 25 bp, probe
atatccgagctaatcagtcaataca

SEQ ID NO: 115838 - DNA, 25 bp, probe
acatatccgagctaatcagtcaata

SEQ ID NO: 115839 - DNA, 25 bp, probe
gattatgaagtgtcaatagatgctg

SEQ ID NO: 115840 - DNA, 25 bp, probe
agcgaacacactattggagacttac

SEQ ID NO: 115841 - DNA, 25 bp, probe
catatccgagctaatcagtcaatac

SEQ ID NO: 115842 - DNA, 25 bp, probe
gagtggagtatctgaagaatgatcc

SEQ ID NO: 115843 - DNA, 25 bp, probe
ccgagctaatcagtcaatacaagtc

SEQ ID NO: 115844 - DNA, 25 bp, probe
tatatgagaaggtacaatgttccag

SEQ ID NO: 115845 - DNA, 25 bp, probe
tccgagctaatcagtcaatacaagt

SEQ ID NO: 115846 - DNA, 25 bp, probe
ctaactctacctggacacacagaag

SEQ ID NO: 115847 - DNA, 25 bp, probe
ctaatcagtcaatacaagtcacatg

SEQ ID NO: 115848 - DNA, 25 bp, probe
cctgatggagtggagtatctgaaga

SEQ ID NO: 115849 - DNA, 25 bp, probe
ttctggattatgaagtgtcaataga

SEQ ID NO: 115850 - DNA, 25 bp, probe
tatgagaaggtacaatgttccagcc

SEQ ID NO: 115851 - DNA, 25 bp, probe
ctggattatgaagtgtcaatagatg

SEQ ID NO: 115852 - DNA, 25 bp, probe
tctggattatgaagtgtcaatagat

SEQ ID NO: 115853 - DNA, 25 bp, probe
ggagacttaccaacacaattattaa

SEQ ID NO: 115854 - DNA, 25 bp, probe
gaagcgaacacactattggagactt

SEQ ID NO: 115855 - DNA, 25 bp, probe
gactcagaacctaactctacctgga

SEQ ID NO: 115856 - DNA, 25 bp, probe
aagaatgatccagagaaactagacg

SEQ ID NO: 115857 - DNA, 25 bp, probe
ccaacatatccgagctaatcagtca

SEQ ID NO: 115858 - DNA, 25 bp, probe
gaagccatttgccatagaaggatac

SEQ ID NO: 115859 - DNA, 25 bp, probe
agaacctaactctacctggacacac

SEQ ID NO: 115860 - DNA, 25 bp, probe
cagtaggcattggagtatattcagc

SEQ ID NO: 115861 - DNA, 25 bp, probe
gtaacactaataggattggcaccag

SEQ ID NO: 115862 - DNA, 25 bp, probe
ggcagcattaacagttctacacatt

SEQ ID NO: 115863 - DNA, 25 bp, probe
attcctgataatccagtaggcattg

SEQ ID NO: 115864 - DNA, 25 bp, probe
cattcctgataatccagtaggcatt

SEQ ID NO: 115865 - DNA, 25 bp, probe
atgacattcctgataatccagtagg

SEQ ID NO: 115866 - DNA, 25 bp, probe
agtaacactaataggattggcacca

SEQ ID NO: 115867 - DNA, 25 bp, probe
taacactaataggattggcaccagg

SEQ ID NO: 115868 - DNA, 25 bp, probe
tctatgacattcctgataatccagt

SEQ ID NO: 115869 - DNA, 25 bp, probe
aggcagcattaacagttctacacat

SEQ ID NO: 115870 - DNA, 25 bp, probe
acattcctgataatccagtaggcat

SEQ ID NO: 115871 - DNA, 25 bp, probe
tagtaacactaataggattggcacc

SEQ ID NO: 115872 - DNA, 25 bp, probe
agtaggcattggagtatattcagct

SEQ ID NO: 115873 - DNA, 25 bp, probe
ccagtaggcattggagtatattcag

SEQ ID NO: 115874 - DNA, 25 bp, probe
gtagtaacactaataggattggcac

SEQ ID NO: 115875 - DNA, 25 bp, probe
agtagtaacactaataggattggca

SEQ ID NO: 115876 - DNA, 25 bp, probe
taaagacagagaaaggcatagatgg

SEQ ID NO: 115877 - DNA, 25 bp, probe
tgatagcctttcctaatccatacac

SEQ ID NO: 115878 - DNA, 25 bp, probe
gtgatagcctttcctaatccataca

SEQ ID NO: 115879 - DNA, 25 bp, probe
tgtgatagcctttcctaatccatac

SEQ ID NO: 115880 - DNA, 25 bp, probe
gcagcattaacagttctacacattt

SEQ ID NO: 115881 - DNA, 25 bp, probe
ctgtgatagcctttcctaatccata

SEQ ID NO: 115882 - DNA, 25 bp, probe
gatagcctttcctaatccatacacc

SEQ ID NO: 115883 - DNA, 25 bp, probe
aatcattatcgttgcagccattatg

SEQ ID NO: 115884 - DNA, 25 bp, probe
gtaaagacagagaaaggcatagatg

SEQ ID NO: 115885 - DNA, 25 bp, probe
gacattcctgataatccagtaggca

SEQ ID NO: 115886 - DNA, 25 bp, probe
tgacattcctgataatccagtaggc

SEQ ID NO: 115887 - DNA, 25 bp, probe
ttctatgacattcctgataatccag

SEQ ID NO: 115888 - DNA, 25 bp, probe
gtaggcattggagtatattcagctc

SEQ ID NO: 115889 - DNA, 25 bp, probe
atagcctttcctaatccatacacca

SEQ ID NO: 115890 - DNA, 25 bp, probe
atggaggcagcattaacagttctac

SEQ ID NO: 115891 - DNA, 25 bp, probe
aatcctcttctctttgtgactacca

SEQ ID NO: 115892 - DNA, 25 bp, probe
gaatcctcttctctttgtgactacc

SEQ ID NO: 115893 - DNA, 25 bp, probe
taggcattggagtatattcagctca

SEQ ID NO: 115894 - DNA, 25 bp, probe
gaggcagcattaacagttctacaca

SEQ ID NO: 115895 - DNA, 25 bp, probe
aagacagagaaaggcatagatggat

SEQ ID NO: 115896 - DNA, 25 bp, probe
gtcaggttacaaatggctagtagta

SEQ ID NO: 115897 - DNA, 25 bp, probe
ggagtatattcagctcaatgcacta

SEQ ID NO: 115898 - DNA, 25 bp, probe
aaagacagagaaaggcatagatgga

SEQ ID NO: 115899 - DNA, 25 bp, probe
ggaatcctcttctctttgtgactac

SEQ ID NO: 115900 - DNA, 25 bp, probe
ctaatccatacaccagggtaaacac

SEQ ID NO: 115901 - DNA, 25 bp, probe
tggaatcctcttctctttgtgacta

SEQ ID NO: 115902 - DNA, 25 bp, probe
tagcctttcctaatccatacaccag

SEQ ID NO: 115903 - DNA, 25 bp, probe
atcctcttctctttgtgactaccaa

SEQ ID NO: 115904 - DNA, 25 bp, probe
aagaagctggaagaagagaggtgag

SEQ ID NO: 115905 - DNA, 25 bp, probe
gaagaagctggaagaagagaggtga

SEQ ID NO: 115906 - DNA, 25 bp, probe
ggaagaagctggaagaagagaggtg

SEQ ID NO: 115907 - DNA, 25 bp, probe
caccaagtctttcaacgtgatgttc

SEQ ID NO: 115908 - DNA, 25 bp, probe
accaagtctttcaacgtgatgttcc

SEQ ID NO: 115909 - DNA, 25 bp, probe
ctcggagctactggctgagattaag

SEQ ID NO: 115910 - DNA, 25 bp, probe
ccaagtctttcaacgtgatgttccc

SEQ ID NO: 115911 - DNA, 25 bp, probe
gtctttcaacgtgatgttcccgatg

SEQ ID NO: 115912 - DNA, 25 bp, probe
gagctactggctgagattaaggcag

SEQ ID NO: 115913 - DNA, 25 bp, probe
agtctttcaacgtgatgttcccgat

SEQ ID NO: 115914 - DNA, 25 bp, probe
actcggagctactggctgagattaa

SEQ ID NO: 115915 - DNA, 25 bp, probe
aactcggagctactggctgagatta

SEQ ID NO: 115916 - DNA, 25 bp, probe
caagtctttcaacgtgatgttcccg

SEQ ID NO: 115917 - DNA, 25 bp, probe
aagtctttcaacgtgatgttcccga

SEQ ID NO: 115918 - DNA, 25 bp, probe
gcaccaagtctttcaacgtgatgtt

SEQ ID NO: 115919 - DNA, 25 bp, probe
cagcaccaagtctttcaacgtgatg

SEQ ID NO: 115920 - DNA, 25 bp, probe
acagtcttctgaatatgccgttaag

SEQ ID NO: 115921 - DNA, 25 bp, probe
gacagtcttctgaatatgccgttaa

SEQ ID NO: 115922 - DNA, 25 bp, probe
cttctgaatatgccgttaagccatc

SEQ ID NO: 115923 - DNA, 25 bp, probe
gaatatgccgttaagccatcagttc

SEQ ID NO: 115924 - DNA, 25 bp, probe
tcttctgaatatgccgttaagccat

SEQ ID NO: 115925 - DNA, 25 bp, probe
cagtcttctgaatatgccgttaagc

SEQ ID NO: 115926 - DNA, 25 bp, probe
tttcatcttgctcaactttctcatc

SEQ ID NO: 115927 - DNA, 25 bp, probe
ccttgccttcatttgtgttctttag

SEQ ID NO: 115928 - DNA, 25 bp, probe
ttcatcttgctcaactttctcatca

SEQ ID NO: 115929 - DNA, 25 bp, probe
aatatgccgttaagccatcagttca

SEQ ID NO: 115930 - DNA, 25 bp, probe
ttctgaatatgccgttaagccatca

SEQ ID NO: 115931 - DNA, 25 bp, probe
tccttgccttcatttgtgttcttta

SEQ ID NO: 115932 - DNA, 25 bp, probe
gtttcatcttgctcaactttctcat

SEQ ID NO: 115933 - DNA, 25 bp, probe
atgtttcatcttgctcaactttctc

SEQ ID NO: 115934 - DNA, 25 bp, probe
gctttaatgtttcatcttgctcaac

SEQ ID NO: 115935 - DNA, 25 bp, probe
agacagtcttctgaatatgccgtta

SEQ ID NO: 115936 - DNA, 25 bp, probe
aatgtttcatcttgctcaactttct

SEQ ID NO: 115937 - DNA, 25 bp, probe
agtcttctgaatatgccgttaagcc

SEQ ID NO: 115938 - DNA, 25 bp, probe
cttgccttcatttgtgttctttagc

SEQ ID NO: 115939 - DNA, 25 bp, probe
tcatcttgctcaactttctcatcac

SEQ ID NO: 115940 - DNA, 25 bp, probe
tgaatatgccgttaagccatcagtt

SEQ ID NO: 115941 - DNA, 25 bp, probe
tgtttcatcttgctcaactttctca

SEQ ID NO: 115942 - DNA, 25 bp, probe
gtcttctgaatatgccgttaagcca

SEQ ID NO: 115943 - DNA, 25 bp, probe
gccacatttcttaatctgctcttca

SEQ ID NO: 115944 - DNA, 25 bp, probe
tgccacatttcttaatctgctcttc

SEQ ID NO: 115945 - DNA, 25 bp, probe
ctgccacatttcttaatctgctctt

SEQ ID NO: 115946 - DNA, 25 bp, probe
atatgccgttaagccatcagttcag

SEQ ID NO: 115947 - DNA, 25 bp, probe
ctctgccacatttcttaatctgctc

SEQ ID NO: 115948 - DNA, 25 bp, probe
ccacatttcttaatctgctcttcag

SEQ ID NO: 115949 - DNA, 25 bp, probe
taatgtttcatcttgctcaactttc

SEQ ID NO: 115950 - DNA, 25 bp, probe
ctttaatgtttcatcttgctcaact

SEQ ID NO: 115951 - DNA, 25 bp, probe
acccttcagacctttcagacataag

SEQ ID NO: 115952 - DNA, 25 bp, probe
catcttgctcaactttctcatcacc

SEQ ID NO: 115953 - DNA, 25 bp, probe
cacccttcagacctttcagacataa

SEQ ID NO: 115954 - DNA, 25 bp, probe
tctgccacatttcttaatctgctct

SEQ ID NO: 115955 - DNA, 25 bp, probe
atcttgctcaactttctcatcacct

SEQ ID NO: 115956 - DNA, 25 bp, probe
ccgttaagccatcagttcaggaatc

SEQ ID NO: 115957 - DNA, 25 bp, probe
ttaatgtttcatcttgctcaacttt

SEQ ID NO: 115958 - DNA, 25 bp, probe
tttaatgtttcatcttgctcaactt

SEQ ID NO: 115959 - DNA, 25 bp, probe
gtccttgccttcatttgtgttcttt

SEQ ID NO: 115960 - DNA, 25 bp, probe
gccttcatttgtgttctttagcttt

SEQ ID NO: 115961 - DNA, 25 bp, probe
tcttgctcaactttctcatcacctc

SEQ ID NO: 115962 - DNA, 25 bp, probe
cgttaagccatcagttcaggaatcg

SEQ ID NO: 115963 - DNA, 25 bp, probe
cttcagacctttcagacataagctc

SEQ ID NO: 115964 - DNA, 25 bp, probe
gtcctcagtcactacatcactcaag

SEQ ID NO: 115965 - DNA, 25 bp, probe
tcctcagtcactacatcactcaagt

SEQ ID NO: 115966 - DNA, 25 bp, probe
cgtcctcagtcactacatcactcaa

SEQ ID NO: 115967 - DNA, 25 bp, probe
acagagctgaccaagaccatatctc

SEQ ID NO: 115968 - DNA, 25 bp, probe
cacagagctgaccaagaccatatct

SEQ ID NO: 115969 - DNA, 25 bp, probe
tcacagagctgaccaagaccatatc

SEQ ID NO: 115970 - DNA, 25 bp, probe
ctcacagagctgaccaagaccatat

SEQ ID NO: 115971 - DNA, 25 bp, probe
attgtgaggacccaggaatcatcag

SEQ ID NO: 115972 - DNA, 25 bp, probe
ctagttcatagggagcaggaagcag

SEQ ID NO: 115973 - DNA, 25 bp, probe
gaccaagaccatatctcgactgcaa

SEQ ID NO: 115974 - DNA, 25 bp, probe
agttcatttgctgttgctgttcctg

SEQ ID NO: 115975 - DNA, 25 bp, probe
cagagctgaccaagaccatatctcg

SEQ ID NO: 115976 - DNA, 25 bp, probe
gagctgaccaagaccatatctcgac

SEQ ID NO: 115977 - DNA, 25 bp, probe
ccaagaccatatctcgactgcaaag

SEQ ID NO: 115978 - DNA, 25 bp, probe
cctcagtcactacatcactcaagtg

SEQ ID NO: 115979 - DNA, 25 bp, probe
agagctgaccaagaccatatctcga

SEQ ID NO: 115980 - DNA, 25 bp, probe
tagttcatagggagcaggaagcaga

SEQ ID NO: 115981 - DNA, 25 bp, probe
ctgaccaagaccatatctcgactgc

SEQ ID NO: 115982 - DNA, 25 bp, probe
gctgaccaagaccatatctcgactg

SEQ ID NO: 115983 - DNA, 25 bp, probe
agctgaccaagaccatatctcgact

SEQ ID NO: 115984 - DNA, 25 bp, probe
gattgtgaggacccaggaatcatca

SEQ ID NO: 115985 - DNA, 25 bp, probe
caaaaccaagaagccagactatccc

SEQ ID NO: 115986 - DNA, 25 bp, probe
ctcagtcactacatcactcaagtgc

SEQ ID NO: 115987 - DNA, 25 bp, probe
cagttcatttgctgttgctgttcct

SEQ ID NO: 115988 - DNA, 25 bp, probe
caagaccatatctcgactgcaaagc

SEQ ID NO: 115989 - DNA, 25 bp, probe
actcacagagctgaccaagaccata

SEQ ID NO: 115990 - DNA, 25 bp, probe
accaagaccatatctcgactgcaaa

SEQ ID NO: 115991 - DNA, 25 bp, probe
agctcatgtgctagttcatagggag

SEQ ID NO: 115992 - DNA, 25 bp, probe
gcaaaaccaagaagccagactatcc

SEQ ID NO: 115993 - DNA, 25 bp, probe
ggattgtgaggacccaggaatcatc

SEQ ID NO: 115994 - DNA, 25 bp, probe
cagctcatgtgctagttcataggga

SEQ ID NO: 115995 - DNA, 25 bp, probe
tcagtcactacatcactcaagtgca

SEQ ID NO: 115996 - DNA, 25 bp, probe
aaaaccaagaagccagactatcccc

SEQ ID NO: 115997 - DNA, 25 bp, probe
tgcaaaaccaagaagccagactatc

SEQ ID NO: 115998 - DNA, 25 bp, probe
gactgagaggaggtcctgatacagt

SEQ ID NO: 115999 - DNA, 25 bp, probe
ctgcaaaaccaagaagccagactat

SEQ ID NO: 116000 - DNA, 25 bp, probe
actgagaggaggtcctgatacagtg

SEQ ID NO: 116001 - DNA, 25 bp, probe
ccagctcatgtgctagttcataggg

SEQ ID NO: 116002 - DNA, 25 bp, probe
cccagctcatgtgctagttcatagg

SEQ ID NO: 116003 - DNA, 25 bp, probe
gatccctacttttgccaatcccagg

SEQ ID NO: 116004 - DNA, 25 bp, probe
ctgttcctgctgcaaaaccaagaag

SEQ ID NO: 116005 - DNA, 25 bp, probe
ggactgagaggaggtcctgatacag

SEQ ID NO: 116006 - DNA, 25 bp, probe
ccccagctcatgtgctagttcatag

SEQ ID NO: 116007 - DNA, 25 bp, probe
aaagatctgggcaacagactcacag

SEQ ID NO: 116008 - DNA, 25 bp, probe
tattagacaactcttcaggttccac

SEQ ID NO: 116009 - DNA, 25 bp, probe
tatgtgattggttgttctaacttgc

SEQ ID NO: 116010 - DNA, 25 bp, probe
atattagacaactcttcaggttcca

SEQ ID NO: 116011 - DNA, 25 bp, probe
catattagacaactcttcaggttcc

SEQ ID NO: 116012 - DNA, 25 bp, probe
cttcaggttccacatggtatagtta

SEQ ID NO: 116013 - DNA, 25 bp, probe
ttcaggttccacatggtatagttac

SEQ ID NO: 116014 - DNA, 25 bp, probe
gttccacatggtatagttactgagt

SEQ ID NO: 116015 - DNA, 25 bp, probe
ccgattcatattagacaactcttca

SEQ ID NO: 116016 - DNA, 25 bp, probe
ttccacatggtatagttactgagtc

SEQ ID NO: 116017 - DNA, 25 bp, probe
ggttccacatggtatagttactgag

SEQ ID NO: 116018 - DNA, 25 bp, probe
ttagacaactcttcaggttccacat

SEQ ID NO: 116019 - DNA, 25 bp, probe
attagacaactcttcaggttccaca

SEQ ID NO: 116020 - DNA, 25 bp, probe
aggttccacatggtatagttactga

SEQ ID NO: 116021 - DNA, 25 bp, probe
tcaggttccacatggtatagttact

SEQ ID NO: 116022 - DNA, 25 bp, probe
tcttcaggttccacatggtatagtt

SEQ ID NO: 116023 - DNA, 25 bp, probe
tccacatggtatagttactgagtcc

SEQ ID NO: 116024 - DNA, 25 bp, probe
tcatattagacaactcttcaggttc

SEQ ID NO: 116025 - DNA, 25 bp, probe
ctacctattatgtgaggacagttgt

SEQ ID NO: 116026 - DNA, 25 bp, probe
actacctattatgtgaggacagttg

SEQ ID NO: 116027 - DNA, 25 bp, probe
caactacctattatgtgaggacagt

SEQ ID NO: 116028 - DNA, 25 bp, probe
acaactacctattatgtgaggacag

SEQ ID NO: 116029 - DNA, 25 bp, probe
atgtgattggttgttctaacttgcc

SEQ ID NO: 116030 - DNA, 25 bp, probe
aactcttcaggttccacatggtata

SEQ ID NO: 116031 - DNA, 25 bp, probe
ctcttcaggttccacatggtatagt

SEQ ID NO: 116032 - DNA, 25 bp, probe
actcttcaggttccacatggtatag

SEQ ID NO: 116033 - DNA, 25 bp, probe
tacctattatgtgaggacagttgtt

SEQ ID NO: 116034 - DNA, 25 bp, probe
aacaactacctattatgtgaggaca

SEQ ID NO: 116035 - DNA, 25 bp, probe
ttatgtgattggttgttctaacttg

SEQ ID NO: 116036 - DNA, 25 bp, probe
ttcatattagacaactcttcaggtt

SEQ ID NO: 116037 - DNA, 25 bp, probe
caggttccacatggtatagttactg

SEQ ID NO: 116038 - DNA, 25 bp, probe
attcatattagacaactcttcaggt

SEQ ID NO: 116039 - DNA, 25 bp, probe
cgattcatattagacaactcttcag

SEQ ID NO: 116040 - DNA, 25 bp, probe
gttctaacttgccctataaatgtgc

SEQ ID NO: 116041 - DNA, 25 bp, probe
cagttgtttatgtgattggttgttc

SEQ ID NO: 116042 - DNA, 25 bp, probe
agttgtttatgtgattggttgttct

SEQ ID NO: 116043 - DNA, 25 bp, probe
tgttctaacttgccctataaatgtg

SEQ ID NO: 116044 - DNA, 25 bp, probe
gtaggttaagaggtcagcattgagg

SEQ ID NO: 116045 - DNA, 25 bp, probe
catggtatagttactgagtccactt

SEQ ID NO: 116046 - DNA, 25 bp, probe
acatggtatagttactgagtccact

SEQ ID NO: 116047 - DNA, 25 bp, probe
cacatggtatagttactgagtccac

SEQ ID NO: 116048 - DNA, 25 bp, probe
tggttgttctaacttgccctataaa

SEQ ID NO: 116049 - DNA, 25 bp, probe
ttggttgttctaacttgccctataa

SEQ ID NO: 116050 - DNA, 25 bp, probe
attggttgttctaacttgccctata

SEQ ID NO: 116051 - DNA, 25 bp, probe
aaacccgattcatattagacaactc

SEQ ID NO: 116052 - DNA, 25 bp, probe
cctatgtctgtctctaccttcaatg

SEQ ID NO: 116053 - DNA, 25 bp, probe
tcctatgtctgtctctaccttcaat

SEQ ID NO: 116054 - DNA, 25 bp, probe
ctatgtctgtctctaccttcaatgc

SEQ ID NO: 116055 - DNA, 25 bp, probe
ctcctcctgataatgtagacctgaa

SEQ ID NO: 116056 - DNA, 25 bp, probe
caatgctcctcctgataatgtagac

SEQ ID NO: 116057 - DNA, 25 bp, probe
tcctcctgataatgtagacctgaac

SEQ ID NO: 116058 - DNA, 25 bp, probe
tatgtctgtctctaccttcaatgct

SEQ ID NO: 116059 - DNA, 25 bp, probe
gtcctatgtctgtctctaccttcaa

SEQ ID NO: 116060 - DNA, 25 bp, probe
attgaattgctatggaagacttgtt

SEQ ID NO: 116061 - DNA, 25 bp, probe
cattgaattgctatggaagacttgt

SEQ ID NO: 116062 - DNA, 25 bp, probe
acattgaattgctatggaagacttg

SEQ ID NO: 116063 - DNA, 25 bp, probe
ttcaatgctcctcctgataatgtag

SEQ ID NO: 116064 - DNA, 25 bp, probe
cttcaatgctcctcctgataatgta

SEQ ID NO: 116065 - DNA, 25 bp, probe
aatgctcctcctgataatgtagacc

SEQ ID NO: 116066 - DNA, 25 bp, probe
tcaatgctcctcctgataatgtaga

SEQ ID NO: 116067 - DNA, 25 bp, probe
agtcctatgtctgtctctaccttca

SEQ ID NO: 116068 - DNA, 25 bp, probe
taccttcaatgctcctcctgataat

SEQ ID NO: 116069 - DNA, 25 bp, probe
tacattgaattgctatggaagactt

SEQ ID NO: 116070 - DNA, 25 bp, probe
ttcttcagtcctatgtctgtctcta

SEQ ID NO: 116071 - DNA, 25 bp, probe
atacattgaattgctatggaagact

SEQ ID NO: 116072 - DNA, 25 bp, probe
attcttcagtcctatgtctgtctct

SEQ ID NO: 116073 - DNA, 25 bp, probe
tgtattcttcagtcctatgtctgtc

SEQ ID NO: 116074 - DNA, 25 bp, probe
atgtctgtctctaccttcaatgctc

SEQ ID NO: 116075 - DNA, 25 bp, probe
tcttcagtcctatgtctgtctctac

SEQ ID NO: 116076 - DNA, 25 bp, probe
gtattcttcagtcctatgtctgtct

SEQ ID NO: 116077 - DNA, 25 bp, probe
ctaccttcaatgctcctcctgataa

SEQ ID NO: 116078 - DNA, 25 bp, probe
ttgtattcttcagtcctatgtctgt

SEQ ID NO: 116079 - DNA, 25 bp, probe
tattcttcagtcctatgtctgtctc

SEQ ID NO: 116080 - DNA, 25 bp, probe
cctcctgataatgtagacctgaaca

SEQ ID NO: 116081 - DNA, 25 bp, probe
atgctcctcctgataatgtagacct

SEQ ID NO: 116082 - DNA, 25 bp, probe
tgtagacctgaacatacttgtgtat

SEQ ID NO: 116083 - DNA, 25 bp, probe
cagtcctatgtctgtctctaccttc

SEQ ID NO: 116084 - DNA, 25 bp, probe
cttcagtcctatgtctgtctctacc

SEQ ID NO: 116085 - DNA, 25 bp, probe
tctaccttcaatgctcctcctgata

SEQ ID NO: 116086 - DNA, 25 bp, probe
tcagtcctatgtctgtctctacctt

SEQ ID NO: 116087 - DNA, 25 bp, probe
ttcagtcctatgtctgtctctacct

SEQ ID NO: 116088 - DNA, 25 bp, probe
catacattgaattgctatggaagac

SEQ ID NO: 116089 - DNA, 25 bp, probe
ccttcaatgctcctcctgataatgt

SEQ ID NO: 116090 - DNA, 25 bp, probe
accttcaatgctcctcctgataatg

SEQ ID NO: 116091 - DNA, 25 bp, probe
tttagtgctccctacaaatacgaat

SEQ ID NO: 116092 - DNA, 25 bp, probe
gctcctcctgataatgtagacctga

SEQ ID NO: 116093 - DNA, 25 bp, probe
tcatacattgaattgctatggaaga

SEQ ID NO: 116094 - DNA, 25 bp, probe
gtagacctgaacatacttgtgtatt

SEQ ID NO: 116095 - DNA, 25 bp, probe
ttagtgctccctacaaatacgaatc

SEQ ID NO: 116096 - DNA, 25 bp, probe
cggaacaataagcagcatatctatc

SEQ ID NO: 116097 - DNA, 25 bp, probe
aagcagcatatctatctcagaagac

SEQ ID NO: 116098 - DNA, 25 bp, probe
catatctatctcagaagacagcagc

SEQ ID NO: 116099 - DNA, 25 bp, probe
gcatatctatctcagaagacagcag

SEQ ID NO: 116100 - DNA, 25 bp, probe
cagcatatctatctcagaagacagc

SEQ ID NO: 116101 - DNA, 25 bp, probe
gcagcatatctatctcagaagacag

SEQ ID NO: 116102 - DNA, 25 bp, probe
atatctatctcagaagacagcagca

SEQ ID NO: 116103 - DNA, 25 bp, probe
agcatatctatctcagaagacagca

SEQ ID NO: 116104 - DNA, 25 bp, probe
agcagcatatctatctcagaagaca

SEQ ID NO: 116105 - DNA, 25 bp, probe
gcggaacaataagcagcatatctat

SEQ ID NO: 116106 - DNA, 25 bp, probe
ggaacaataagcagcatatctatct

SEQ ID NO: 116107 - DNA, 25 bp, probe
caggttatgtagattccaaggatgc

SEQ ID NO: 116108 - DNA, 25 bp, probe
taagcagcatatctatctcagaaga

SEQ ID NO: 116109 - DNA, 25 bp, probe
acaataagcagcatatctatctcag

SEQ ID NO: 116110 - DNA, 25 bp, probe
tatctatctcagaagacagcagcag

SEQ ID NO: 116111 - DNA, 25 bp, probe
tcaacacaggttatgtagattccaa

SEQ ID NO: 116112 - DNA, 25 bp, probe
gaacaacaacgagtcacagagttaa

SEQ ID NO: 116113 - DNA, 25 bp, probe
caacacaggttatgtagattccaag

SEQ ID NO: 116114 - DNA, 25 bp, probe
aacacaggttatgtagattccaagg

SEQ ID NO: 116115 - DNA, 25 bp, probe
gtcaacacaggttatgtagattcca

SEQ ID NO: 116116 - DNA, 25 bp, probe
tggtcaacacaggttatgtagattc

SEQ ID NO: 116117 - DNA, 25 bp, probe
acaggttatgtagattccaaggatg

SEQ ID NO: 116118 - DNA, 25 bp, probe
cacaggttatgtagattccaaggat

SEQ ID NO: 116119 - DNA, 25 bp, probe
aacaataagcagcatatctatctca

SEQ ID NO: 116120 - DNA, 25 bp, probe
ggtcaacacaggttatgtagattcc

SEQ ID NO: 116121 - DNA, 25 bp, probe
caataagcagcatatctatctcaga

SEQ ID NO: 116122 - DNA, 25 bp, probe
acacaggttatgtagattccaagga

SEQ ID NO: 116123 - DNA, 25 bp, probe
gtggtcaacacaggttatgtagatt

SEQ ID NO: 116124 - DNA, 25 bp, probe
ataagcagcatatctatctcagaag

SEQ ID NO: 116125 - DNA, 25 bp, probe
gaacaataagcagcatatctatctc

SEQ ID NO: 116126 - DNA, 25 bp, probe
aataagcagcatatctatctcagaa

SEQ ID NO: 116127 - DNA, 25 bp, probe
gatggatttaggcttacggtagaaa

SEQ ID NO: 116128 - DNA, 25 bp, probe
aatgatggatttaggcttacggtag

SEQ ID NO: 116129 - DNA, 25 bp, probe
aaggatattaccaagaaactcacca

SEQ ID NO: 116130 - DNA, 25 bp, probe
cagagttaaagtagcccaagtgata

SEQ ID NO: 116131 - DNA, 25 bp, probe
ttaatgatggatttaggcttacggt

SEQ ID NO: 116132 - DNA, 25 bp, probe
ggagtgtttaatgatggatttaggc

SEQ ID NO: 116133 - DNA, 25 bp, probe
aggaggagtgtttaatgatggattt

SEQ ID NO: 116134 - DNA, 25 bp, probe
ggttatgtagattccaaggatgcaa

SEQ ID NO: 116135 - DNA, 25 bp, probe
aggatattaccaagaaactcaccat

SEQ ID NO: 116136 - DNA, 25 bp, probe
taatgatggatttaggcttacggta

SEQ ID NO: 116137 - DNA, 25 bp, probe
caggaggagtgtttaatgatggatt

SEQ ID NO: 116138 - DNA, 25 bp, probe
cattgtcagtgtgatcctggttatg

SEQ ID NO: 116139 - DNA, 25 bp, probe
agagttaaagtagcccaagtgataa

SEQ ID NO: 116140 - DNA, 25 bp, probe
cttcgccctatagtgagtcgtatta

SEQ ID NO: 116141 - DNA, 25 bp, probe
tcttcgccctatagtgagtcgtatt

SEQ ID NO: 116142 - DNA, 25 bp, probe
ttcttcgccctatagtgagtcgtat

SEQ ID NO: 116143 - DNA, 25 bp, probe
attcttcgccctatagtgagtcgta

SEQ ID NO: 116144 - DNA, 25 bp, probe
aattcttcgccctatagtgagtcgt

SEQ ID NO: 116145 - DNA, 25 bp, probe
gaattcttcgccctatagtgagtcg

SEQ ID NO: 116146 - DNA, 25 bp, probe
tcgccctatagtgagtcgtattacg

SEQ ID NO: 116147 - DNA, 25 bp, probe
tttgatccgaattcttcgccctata

SEQ ID NO: 116148 - DNA, 25 bp, probe
cgccctatagtgagtcgtattacgc

SEQ ID NO: 116149 - DNA, 25 bp, probe
ttgatccgaattcttcgccctatag

SEQ ID NO: 116150 - DNA, 25 bp, probe
cgaattcttcgccctatagtgagtc

SEQ ID NO: 116151 - DNA, 25 bp, probe
ctatagtgagtcgtattacgcggcc

SEQ ID NO: 116152 - DNA, 25 bp, probe
cctatagtgagtcgtattacgcggc

SEQ ID NO: 116153 - DNA, 25 bp, probe
gatccgaattcttcgccctatagtg

SEQ ID NO: 116154 - DNA, 25 bp, probe
ctttgatccgaattcttcgccctat

SEQ ID NO: 116155 - DNA, 25 bp, probe
atccgaattcttcgccctatagtga

SEQ ID NO: 116156 - DNA, 25 bp, probe
tgatccgaattcttcgccctatagt

SEQ ID NO: 116157 - DNA, 25 bp, probe
ccctatagtgagtcgtattacgcgg

SEQ ID NO: 116158 - DNA, 25 bp, probe
tccgaattcttcgccctatagtgag

SEQ ID NO: 116159 - DNA, 25 bp, probe
ccgaattcttcgccctatagtgagt

SEQ ID NO: 116160 - DNA, 25 bp, probe
gccctatagtgagtcgtattacgcg

SEQ ID NO: 116161 - DNA, 25 bp, probe
catgctttgatccgaattcttcgcc

SEQ ID NO: 116162 - DNA, 25 bp, probe
tctctcttctctatctctcagtgtc

SEQ ID NO: 116163 - DNA, 25 bp, probe
gtctctcttctctatctctcagtgt

SEQ ID NO: 116164 - DNA, 25 bp, probe
tgtctctcttctctatctctcagtg

SEQ ID NO: 116165 - DNA, 25 bp, probe
ctctatctctcagtgtcctcatctt

SEQ ID NO: 116166 - DNA, 25 bp, probe
ttctctatctctcagtgtcctcatc

SEQ ID NO: 116167 - DNA, 25 bp, probe
cttctctatctctcagtgtcctcat

SEQ ID NO: 116168 - DNA, 25 bp, probe
ttctgtctctcttctctatctctca

SEQ ID NO: 116169 - DNA, 25 bp, probe
ctcttctctatctctcagtgtcctc

SEQ ID NO: 116170 - DNA, 25 bp, probe
ctctcttctctatctctcagtgtcc

SEQ ID NO: 116171 - DNA, 25 bp, probe
tctctatctctcagtgtcctcatct

SEQ ID NO: 116172 - DNA, 25 bp, probe
tctcttctctatctctcagtgtcct

SEQ ID NO: 116173 - DNA, 25 bp, probe
tcttctctatctctcagtgtcctca

SEQ ID NO: 116174 - DNA, 25 bp, probe
tgtcatctcggttcttgtatctctc

SEQ ID NO: 116175 - DNA, 25 bp, probe
ctgtcatctcggttcttgtatctct

SEQ ID NO: 116176 - DNA, 25 bp, probe
tctgtcatctcggttcttgtatctc

SEQ ID NO: 116177 - DNA, 25 bp, probe
ctctgtcatctcggttcttgtatct

SEQ ID NO: 116178 - DNA, 25 bp, probe
tctctgtctctctctctgaagtctt

SEQ ID NO: 116179 - DNA, 25 bp, probe
cacttctctctccacatctctcttc

SEQ ID NO: 116180 - DNA, 25 bp, probe
ctgtctctcttctctatctctcagt

SEQ ID NO: 116181 - DNA, 25 bp, probe
tctgtctctcttctctatctctcag

SEQ ID NO: 116182 - DNA, 25 bp, probe
gtctctgtctctctctctgaagtct

SEQ ID NO: 116183 - DNA, 25 bp, probe
agtctctgtctctctctctgaagtc

SEQ ID NO: 116184 - DNA, 25 bp, probe
catctcggttcttgtatctctcctg

SEQ ID NO: 116185 - DNA, 25 bp, probe
gtcatctcggttcttgtatctctcc

SEQ ID NO: 116186 - DNA, 25 bp, probe
tcatctcggttcttgtatctctcct

SEQ ID NO: 116187 - DNA, 25 bp, probe
atctcggttcttgtatctctcctgt

SEQ ID NO: 116188 - DNA, 25 bp, probe
cctctgtcatctcggttcttgtatc

SEQ ID NO: 116189 - DNA, 25 bp, probe
ttctctctccacatctctcttcctc

SEQ ID NO: 116190 - DNA, 25 bp, probe
cttctctctccacatctctcttcct

SEQ ID NO: 116191 - DNA, 25 bp, probe
tctcggttcttgtatctctcctgtt

SEQ ID NO: 116192 - DNA, 25 bp, probe
tcctctgtcatctcggttcttgtat

SEQ ID NO: 116193 - DNA, 25 bp, probe
ctctgtcttcctgtcctagtctctt

SEQ ID NO: 116194 - DNA, 25 bp, probe
acttctctctccacatctctcttcc

SEQ ID NO: 116195 - DNA, 25 bp, probe
tctatctctcagtgtcctcatcttt

SEQ ID NO: 116196 - DNA, 25 bp, probe
ctctgtctctctctctgaagtcttt

SEQ ID NO: 116197 - DNA, 25 bp, probe
ctccacatctctcttcctcctcatt

SEQ ID NO: 116198 - DNA, 25 bp, probe
ccacttctctctccacatctctctt

SEQ ID NO: 116199 - DNA, 25 bp, probe
tctctgaagtctttctgtctctctt

SEQ ID NO: 116200 - DNA, 25 bp, probe
gtctttctgtctctcttctctatct

SEQ ID NO: 116201 - DNA, 25 bp, probe
agtctttctgtctctcttctctatc

SEQ ID NO: 116202 - DNA, 25 bp, probe
acatctctcttcctcctcatttctc

SEQ ID NO: 116203 - DNA, 25 bp, probe
ctctctgaagtctttctgtctctct

SEQ ID NO: 116204 - DNA, 25 bp, probe
tctctctgaagtctttctgtctctc

SEQ ID NO: 116205 - DNA, 25 bp, probe
ctctctctgaagtctttctgtctct

SEQ ID NO: 116206 - DNA, 25 bp, probe
gaacattacagtccaatggtatgct

SEQ ID NO: 116207 - DNA, 25 bp, probe
aacattacagtccaatggtatgctg

SEQ ID NO: 116208 - DNA, 25 bp, probe
ggaacattacagtccaatggtatgc

SEQ ID NO: 116209 - DNA, 25 bp, probe
gcaaagttctcagttatctaaagct

SEQ ID NO: 116210 - DNA, 25 bp, probe
tgcaaagttctcagttatctaaagc

SEQ ID NO: 116211 - DNA, 25 bp, probe
acctgttggagactctgattgtcat

SEQ ID NO: 116212 - DNA, 25 bp, probe
cctgttggagactctgattgtcatg

SEQ ID NO: 116213 - DNA, 25 bp, probe
ccaatggtatgctggagagttactc

SEQ ID NO: 116214 - DNA, 25 bp, probe
acattacagtccaatggtatgctgg

SEQ ID NO: 116215 - DNA, 25 bp, probe
agttactctgcaaagttctcagtta

SEQ ID NO: 116216 - DNA, 25 bp, probe
actctgcaaagttctcagttatcta

SEQ ID NO: 116217 - DNA, 25 bp, probe
tactctgcaaagttctcagttatct

SEQ ID NO: 116218 - DNA, 25 bp, probe
gttactctgcaaagttctcagttat

SEQ ID NO: 116219 - DNA, 25 bp, probe
gagttactctgcaaagttctcagtt

SEQ ID NO: 116220 - DNA, 25 bp, probe
ctgttggagactctgattgtcatgc

SEQ ID NO: 116221 - DNA, 25 bp, probe
ttactctgcaaagttctcagttatc

SEQ ID NO: 116222 - DNA, 25 bp, probe
ctctgcaaagttctcagttatctaa

SEQ ID NO: 116223 - DNA, 25 bp, probe
tctgcaaagttctcagttatctaaa

SEQ ID NO: 116224 - DNA, 25 bp, probe
ctgcaaagttctcagttatctaaag

SEQ ID NO: 116225 - DNA, 25 bp, probe
aatggtatgctggagagttactctg

SEQ ID NO: 116226 - DNA, 25 bp, probe
caatggtatgctggagagttactct

SEQ ID NO: 116227 - DNA, 25 bp, probe
tggaacattacagtccaatggtatg

SEQ ID NO: 116228 - DNA, 25 bp, probe
gtggaacattacagtccaatggtat

SEQ ID NO: 116229 - DNA, 25 bp, probe
gactctgattgtcatgccactggat

SEQ ID NO: 116230 - DNA, 25 bp, probe
actctgattgtcatgccactggatg

SEQ ID NO: 116231 - DNA, 25 bp, probe
tgtggaacattacagtccaatggta

SEQ ID NO: 116232 - DNA, 25 bp, probe
gatgtggaacattacagtccaatgg

SEQ ID NO: 116233 - DNA, 25 bp, probe
ggatgtggaacattacagtccaatg

SEQ ID NO: 116234 - DNA, 25 bp, probe
tgttggagactctgattgtcatgcc

SEQ ID NO: 116235 - DNA, 25 bp, probe
gatgggatgtggaacattacagtcc

SEQ ID NO: 116236 - DNA, 25 bp, probe
ggatgggatgtggaacattacagtc

SEQ ID NO: 116237 - DNA, 25 bp, probe
ctggatgggatgtggaacattacag

SEQ ID NO: 116238 - DNA, 25 bp, probe
attacagtccaatggtatgctggag

SEQ ID NO: 116239 - DNA, 25 bp, probe
ttggagactctgattgtcatgccac

SEQ ID NO: 116240 - DNA, 25 bp, probe
gttggagactctgattgtcatgcca

SEQ ID NO: 116241 - DNA, 25 bp, probe
gagagttactctgcaaagttctcag

SEQ ID NO: 116242 - DNA, 25 bp, probe
atgtggaacattacagtccaatggt

SEQ ID NO: 116243 - DNA, 25 bp, probe
agagttactctgcaaagttctcagt

SEQ ID NO: 116244 - DNA, 25 bp, probe
cactggatgggatgtggaacattac

SEQ ID NO: 116245 - DNA, 25 bp, probe
cattacagtccaatggtatgctgga

SEQ ID NO: 116246 - DNA, 25 bp, probe
tggatgggatgtggaacattacagt

SEQ ID NO: 116247 - DNA, 25 bp, probe
actggatgggatgtggaacattaca

SEQ ID NO: 116248 - DNA, 25 bp, probe
ctggagagttactctgcaaagttct

SEQ ID NO: 116249 - DNA, 25 bp, probe
tccaatggtatgctggagagttact

SEQ ID NO: 116250 - DNA, 25 bp, probe
ttaagactacacaggttgttatgtt

SEQ ID NO: 116251 - DNA, 25 bp, probe
tgtatttgtttgtacggaccataaa

SEQ ID NO: 116252 - DNA, 25 bp, probe
ttgtatttgtttgtacggaccataa

SEQ ID NO: 116253 - DNA, 25 bp, probe
tttgtatttgtttgtacggaccata

SEQ ID NO: 116254 - DNA, 25 bp, probe
aagactacacaggttgttatgtttg

SEQ ID NO: 116255 - DNA, 25 bp, probe
tacggaccataaatataactgtagc

SEQ ID NO: 116256 - DNA, 25 bp, probe
tacacaggttgttatgtttggtcaa

SEQ ID NO: 116257 - DNA, 25 bp, probe
agactacacaggttgttatgtttgg

SEQ ID NO: 116258 - DNA, 25 bp, probe
gctttaagactacacaggttgttat

SEQ ID NO: 116259 - DNA, 25 bp, probe
ctacacaggttgttatgtttggtca

SEQ ID NO: 116260 - DNA, 25 bp, probe
actacacaggttgttatgtttggtc

SEQ ID NO: 116261 - DNA, 25 bp, probe
gactacacaggttgttatgtttggt

SEQ ID NO: 116262 - DNA, 25 bp, probe
acggaccataaatataactgtagct

SEQ ID NO: 116263 - DNA, 25 bp, probe
caagaatggtgaagtggtggtacag

SEQ ID NO: 116264 - DNA, 25 bp, probe
taagactacacaggttgttatgttt

SEQ ID NO: 116265 - DNA, 25 bp, probe
tttaagactacacaggttgttatgt

SEQ ID NO: 116266 - DNA, 25 bp, probe
ttgtacggaccataaatataactgt

SEQ ID NO: 116267 - DNA, 25 bp, probe
cggaccataaatataactgtagctt

SEQ ID NO: 116268 - DNA, 25 bp, probe
agctttaagactacacaggttgtta

SEQ ID NO: 116269 - DNA, 25 bp, probe
tagctttaagactacacaggttgtt

SEQ ID NO: 116270 - DNA, 25 bp, probe
ctttaagactacacaggttgttatg

SEQ ID NO: 116271 - DNA, 25 bp, probe
gctagtgtgcagatatttccctaac

SEQ ID NO: 116272 - DNA, 25 bp, probe
aagaatggtgaagtggtggtacagt

SEQ ID NO: 116273 - DNA, 25 bp, probe
gtatttgtttgtacggaccataaat

SEQ ID NO: 116274 - DNA, 25 bp, probe
ctagtgtgcagatatttccctaaca

SEQ ID NO: 116275 - DNA, 25 bp, probe
tagtgtgcagatatttccctaacat

SEQ ID NO: 116276 - DNA, 25 bp, probe
tgtacggaccataaatataactgta

SEQ ID NO: 116277 - DNA, 25 bp, probe
agtgtgcagatatttccctaacatg

SEQ ID NO: 116278 - DNA, 25 bp, probe
tgtttgtacggaccataaatataac

SEQ ID NO: 116279 - DNA, 25 bp, probe
tttgtacggaccataaatataactg

SEQ ID NO: 116280 - DNA, 25 bp, probe
tttgtagcatgtttgactttccaaa

SEQ ID NO: 116281 - DNA, 25 bp, probe
gtttgtacggaccataaatataact

SEQ ID NO: 116282 - DNA, 25 bp, probe
gtacggaccataaatataactgtag

SEQ ID NO: 116283 - DNA, 25 bp, probe
atttgtttgtacggaccataaatat

SEQ ID NO: 116284 - DNA, 25 bp, probe
ttttgtatttgtttgtacggaccat

SEQ ID NO: 116285 - DNA, 25 bp, probe
agaatggtgaagtggtggtacagtg

SEQ ID NO: 116286 - DNA, 25 bp, probe
gtagctttaagactacacaggttgt

SEQ ID NO: 116287 - DNA, 25 bp, probe
gtttccagcatctttcagatttccc

SEQ ID NO: 116288 - DNA, 25 bp, probe
cttttgtagcatgtttgactttcca

SEQ ID NO: 116289 - DNA, 25 bp, probe
ttgtttgtacggaccataaatataa

SEQ ID NO: 116290 - DNA, 25 bp, probe
tttgtttgtacggaccataaatata

SEQ ID NO: 116291 - DNA, 25 bp, probe
cgtttccagcatctttcagatttcc

SEQ ID NO: 116292 - DNA, 25 bp, probe
ttttgtagcatgtttgactttccaa

SEQ ID NO: 116293 - DNA, 25 bp, probe
ggaccataaatataactgtagcttt

SEQ ID NO: 116294 - DNA, 25 bp, probe
ggtaaggtaatgaatctctccatct

SEQ ID NO: 116295 - DNA, 25 bp, probe
taaggtaatgaatctctccatctgg

SEQ ID NO: 116296 - DNA, 25 bp, probe
gtaaggtaatgaatctctccatctg

SEQ ID NO: 116297 - DNA, 25 bp, probe
gtgattgatagactacacaagaagt

SEQ ID NO: 116298 - DNA, 25 bp, probe
gaagggtaaggtaatgaatctctcc

SEQ ID NO: 116299 - DNA, 25 bp, probe
tataatacatagagcacagagccct

SEQ ID NO: 116300 - DNA, 25 bp, probe
aggtttcttatcactttctctttgc

SEQ ID NO: 116301 - DNA, 25 bp, probe
atataatacatagagcacagagccc

SEQ ID NO: 116302 - DNA, 25 bp, probe
aagggtaaggtaatgaatctctcca

SEQ ID NO: 116303 - DNA, 25 bp, probe
cccataatatcaactttccctccta

SEQ ID NO: 116304 - DNA, 25 bp, probe
gggtaaggtaatgaatctctccatc

SEQ ID NO: 116305 - DNA, 25 bp, probe
agggtaaggtaatgaatctctccat

SEQ ID NO: 116306 - DNA, 25 bp, probe
ataatacatagagcacagagccctt

SEQ ID NO: 116307 - DNA, 25 bp, probe
tatataatacatagagcacagagcc

SEQ ID NO: 116308 - DNA, 25 bp, probe
taatacatagagcacagagcccttt

SEQ ID NO: 116309 - DNA, 25 bp, probe
ctttgcccataatatcaactttccc

SEQ ID NO: 116310 - DNA, 25 bp, probe
cctttgcccataatatcaactttcc

SEQ ID NO: 116311 - DNA, 25 bp, probe
ccctttgcccataatatcaactttc

SEQ ID NO: 116312 - DNA, 25 bp, probe
agaagggtaaggtaatgaatctctc

SEQ ID NO: 116313 - DNA, 25 bp, probe
tttgcccataatatcaactttccct

SEQ ID NO: 116314 - DNA, 25 bp, probe
tgaagaagggtaaggtaatgaatct

SEQ ID NO: 116315 - DNA, 25 bp, probe
ccatctgggaatgattaacacaaat

SEQ ID NO: 116316 - DNA, 25 bp, probe
ttgcccataatatcaactttccctc

SEQ ID NO: 116317 - DNA, 25 bp, probe
aagaagggtaaggtaatgaatctct

SEQ ID NO: 116318 - DNA, 25 bp, probe
catctgggaatgattaacacaaatg

SEQ ID NO: 116319 - DNA, 25 bp, probe
atgaagaagggtaaggtaatgaatc

SEQ ID NO: 116320 - DNA, 25 bp, probe
gaagaagggtaaggtaatgaatctc

SEQ ID NO: 116321 - DNA, 25 bp, probe
ggcatattagcaattagagttgtat

SEQ ID NO: 116322 - DNA, 25 bp, probe
gggcatattagcaattagagttgta

SEQ ID NO: 116323 - DNA, 25 bp, probe
aaggtaatgaatctctccatctggg

SEQ ID NO: 116324 - DNA, 25 bp, probe
gcccataatatcaactttccctcct

SEQ ID NO: 116325 - DNA, 25 bp, probe
atctgggaatgattaacacaaatgt

SEQ ID NO: 116326 - DNA, 25 bp, probe
gccctttgcccataatatcaacttt

SEQ ID NO: 116327 - DNA, 25 bp, probe
tgcccataatatcaactttccctcc

SEQ ID NO: 116328 - DNA, 25 bp, probe
tgtaggtttcttatcactttctctt

SEQ ID NO: 116329 - DNA, 25 bp, probe
ccataatatcaactttccctcctat

SEQ ID NO: 116330 - DNA, 25 bp, probe
tctgacctcatataacacattatgt

SEQ ID NO: 116331 - DNA, 25 bp, probe
atctctccatctgggaatgattaac

SEQ ID NO: 116332 - DNA, 25 bp, probe
taatgaatctctccatctgggaatg

SEQ ID NO: 116333 - DNA, 25 bp, probe
gtaatgaatctctccatctgggaat

SEQ ID NO: 116334 - DNA, 25 bp, probe
tccatctgggaatgattaacacaaa

SEQ ID NO: 116335 - DNA, 25 bp, probe
ctccatctgggaatgattaacacaa

SEQ ID NO: 116336 - DNA, 25 bp, probe
aatacatagagcacagagccctttg

SEQ ID NO: 116337 - DNA, 25 bp, probe
atgtaggtttcttatcactttctct

SEQ ID NO: 116338 - DNA, 25 bp, probe
taccggaaccgagacttccgctaca

SEQ ID NO: 116339 - DNA, 25 bp, probe
cagttttccccgagcagtaattggc

SEQ ID NO: 116340 - DNA, 25 bp, probe
agaaaacccttacactttggctatg

SEQ ID NO: 116341 - DNA, 25 bp, probe
gtttactagactgaagttttgaagt

SEQ ID NO: 116342 - DNA, 25 bp, probe
ggggtggaaaatcagttgttaccat

SEQ ID NO: 116343 - DNA, 25 bp, probe
aacctgccacggatcgaatggtact

SEQ ID NO: 116344 - DNA, 25 bp, probe
aacctgccacggatcgaatggtact

SEQ ID NO: 116345 - DNA, 25 bp, probe
atacctggagggcaacaatttcgtg

SEQ ID NO: 116346 - DNA, 25 bp, probe
atacctggagggcaacaatttcgtg

SEQ ID NO: 116347 - DNA, 25 bp, probe
aatcccccaggagaacatctttgac

SEQ ID NO: 116348 - DNA, 25 bp, probe
taaaccctttgatacttttagccag

SEQ ID NO: 116349 - DNA, 25 bp, probe
aacgacccttacacagttagaagca

SEQ ID NO: 116350 - DNA, 25 bp, probe
ctgccaaaacaatgcccgtaagatg

SEQ ID NO: 116351 - DNA, 25 bp, probe
ccctactgtagtcactaccagtacc

SEQ ID NO: 116352 - DNA, 25 bp, probe
tcgggaactccataccgaactccga

SEQ ID NO: 116353 - DNA, 25 bp, probe
cgaaaaccaccatgggaaacagaat

SEQ ID NO: 116354 - DNA, 25 bp, probe
aaaagcccctggtggcggtcaatag

SEQ ID NO: 116355 - DNA, 25 bp, probe
aaaagcccctggtggcggtcaatag

SEQ ID NO: 116356 - DNA, 25 bp, probe
agaagggcgtttgctttggtttcat

SEQ ID NO: 116357 - DNA, 25 bp, probe
tggtacccggttgctacggtgaaat

SEQ ID NO: 116358 - DNA, 25 bp, probe
tggtaaagggggtggcttggtcaca

SEQ ID NO: 116359 - DNA, 25 bp, probe
cgggaaggagcacaaggggaaatca

SEQ ID NO: 116360 - DNA, 25 bp, probe
cgactgggggttgcaagggaacaga

SEQ ID NO: 116361 - DNA, 25 bp, probe
accagtctgcggtttagggggtcag

SEQ ID NO: 116362 - DNA, 25 bp, probe
accagtctgcggtttagggggtcag

SEQ ID NO: 116363 - DNA, 25 bp, probe
agtcgtccaggtgccgtacctggag

SEQ ID NO: 116364 - DNA, 25 bp, probe
ggtcgttcaaccaggttttgtgagg

SEQ ID NO: 116365 - DNA, 25 bp, probe
ggaacagttttgatgggtactgggt

SEQ ID NO: 116366 - DNA, 25 bp, probe
cgagggtaagggcggggcaactgct

SEQ ID NO: 116367 - DNA, 25 bp, probe
gtgaagtaaaagagggacccctgcg

SEQ ID NO: 116368 - DNA, 25 bp, probe
gtgaagtaaaagagggacccctgcg

SEQ ID NO: 116369 - DNA, 25 bp, probe
gtgaagtaaaagagggacccctgcg

SEQ ID NO: 116370 - DNA, 25 bp, probe
ctgaggttaaaggagccgcacgtta

SEQ ID NO: 116371 - DNA, 25 bp, probe
tccaagtaaaagtgccaaaactaca

SEQ ID NO: 116372 - DNA, 25 bp, probe
ttacctgtaacatgtttaaattaag

SEQ ID NO: 116373 - DNA, 25 bp, probe
attcgagctcaacggtttaccctcg

SEQ ID NO: 116374 - DNA, 25 bp, probe
accgcctcaaggtgtttaacggcat

SEQ ID NO: 116375 - DNA, 25 bp, probe
aaattccgggagcagtttaaggctg

SEQ ID NO: 116376 - DNA, 25 bp, probe
aggcttccaagcattactttaacct

SEQ ID NO: 116377 - DNA, 25 bp, probe
aggttgtaggaataagtttctaatg

SEQ ID NO: 116378 - DNA, 25 bp, probe
gttgtttagggtgcccttacttcag

SEQ ID NO: 116379 - DNA, 25 bp, probe
tttagttgggaagcctccttttgag

SEQ ID NO: 116380 - DNA, 25 bp, probe
cttttttaggatgaaggttctggag

SEQ ID NO: 116381 - DNA, 25 bp, probe
cctttttccgacagatgtcgtcggg

SEQ ID NO: 116382 - DNA, 25 bp, probe
actttttcaaagaggtggacgagtg

SEQ ID NO: 116383 - DNA, 25 bp, probe
cttttaaagttcatgggtgagggat

SEQ ID NO: 116384 - DNA, 25 bp, probe
cttccccaagtgcggggagtacaag

SEQ ID NO: 116385 - DNA, 25 bp, probe
gcgaaatcctggcggggaaggaacg

SEQ ID NO: 116386 - DNA, 25 bp, probe
cgcctttcggggatccgagggactg

SEQ ID NO: 116387 - DNA, 25 bp, probe
cgacccttgggacaccaacgagtgc

SEQ ID NO: 116388 - DNA, 25 bp, probe
aggcccttacggcgagagtcggaga

SEQ ID NO: 116389 - DNA, 25 bp, probe
aggcccttacggcgagagtcggaga

SEQ ID NO: 116390 - DNA, 25 bp, probe
aacctgtttcttctcaaagggccag

SEQ ID NO: 116391 - DNA, 25 bp, probe
agaacgtatttagccattacccacg

SEQ ID NO: 116392 - DNA, 25 bp, probe
acttcgtaggtagccttaacttctg

SEQ ID NO: 116393 - DNA, 25 bp, probe
aaatggaaagccgccgaacctatct

SEQ ID NO: 116394 - DNA, 25 bp, probe
gagggtgaaattcaacccccttgct

SEQ ID NO: 116395 - DNA, 25 bp, probe
aaactggaccatctgcaagcccagt

SEQ ID NO: 116396 - DNA, 25 bp, probe
gaaaaggttaaatacctgtgttcag

SEQ ID NO: 116397 - DNA, 25 bp, probe
gaaaaggttaaatacctgtgttcag

SEQ ID NO: 116398 - DNA, 25 bp, probe
cccccgctttaacacggagatggag

SEQ ID NO: 116399 - DNA, 25 bp, probe
taaaaagctttctgggtcgggtgtg

SEQ ID NO: 116400 - DNA, 25 bp, probe
agacagggtacctgactatcggggg

SEQ ID NO: 116401 - DNA, 25 bp, probe
ggaaagtttaggcactagttgggag

SEQ ID NO: 116402 - DNA, 25 bp, probe
ggaaagtttaggcactagttgggag

SEQ ID NO: 116403 - DNA, 25 bp, probe
tgtaaagtttaacacggtttgacag

SEQ ID NO: 116404 - DNA, 25 bp, probe
aaaggtcctatacaagtcagttaag

SEQ ID NO: 116405 - DNA, 25 bp, probe
caacgagttcccagaggaacttaag

SEQ ID NO: 116406 - DNA, 25 bp, probe
agacggtaagggcagagaagtttca

SEQ ID NO: 116407 - DNA, 25 bp, probe
gaaaaataacccagaaagtgttgag

SEQ ID NO: 116408 - DNA, 25 bp, probe
aaggaaacggcctcaaaaggctgag

SEQ ID NO: 116409 - DNA, 25 bp, probe
aagggtaaagtctgttcgggccatg

SEQ ID NO: 116410 - DNA, 25 bp, probe
acgggttgaattcacattccctgac

SEQ ID NO: 116411 - DNA, 25 bp, probe
atcatgggggtcttaaccccagtga

SEQ ID NO: 116412 - DNA, 25 bp, probe
gaatgaccccaacagacctacgggt

SEQ ID NO: 116413 - DNA, 25 bp, probe
gaatgaccccaacagacctacgggt

SEQ ID NO: 116414 - DNA, 25 bp, probe
agacctaccagacaacggtccggct

SEQ ID NO: 116415 - DNA, 25 bp, probe
aacgctaaaagacaccaggttactg

SEQ ID NO: 116416 - DNA, 25 bp, probe
aactcgttaaagcaaagcgctaagt

SEQ ID NO: 116417 - DNA, 25 bp, probe
atgaatggctttcaaaaccgtaagc

SEQ ID NO: 116418 - DNA, 25 bp, probe
atgtattgatttctaggaaccccca

SEQ ID NO: 116419 - DNA, 25 bp, probe
aggctttatgttcaaggacctttgc

SEQ ID NO: 116420 - DNA, 25 bp, probe
aggaattaaccctgtgtcctcagtc

SEQ ID NO: 116421 - DNA, 25 bp, probe
agggttaaactatatggtacttgct

SEQ ID NO: 116422 - DNA, 25 bp, probe
cagggctagtaacaaaggtagtggt

SEQ ID NO: 116423 - DNA, 25 bp, probe
agtccttgcctttgaagggtatgtc

SEQ ID NO: 116424 - DNA, 25 bp, probe
acccccctttgtattatagtcatgc

SEQ ID NO: 116425 - DNA, 25 bp, probe
cgcccgcttcggcggtttggatatt

SEQ ID NO: 116426 - DNA, 25 bp, probe
cgcccgcttcggcggtttggatatt

SEQ ID NO: 116427 - DNA, 25 bp, probe
accacagcccggaggggaatggatt

SEQ ID NO: 116428 - DNA, 25 bp, probe
acctccccctctgtgaggggagcca

SEQ ID NO: 116429 - DNA, 25 bp, probe
ccaacaacccttgaagtaggtacag

SEQ ID NO: 116430 - DNA, 25 bp, probe
aaaccttgccttgaaatttacacag

SEQ ID NO: 116431 - DNA, 25 bp, probe
agacccttccctgtattttcagaag

SEQ ID NO: 116432 - DNA, 25 bp, probe
ttgggtttacctgctgttaagaaag

SEQ ID NO: 116433 - DNA, 25 bp, probe
cggaacgaaatagcttatttgaata

SEQ ID NO: 116434 - DNA, 25 bp, probe
gccactccaaactcgcttaggtaga

SEQ ID NO: 116435 - DNA, 25 bp, probe
gaaccaaaggacacgggccaaactg

SEQ ID NO: 116436 - DNA, 25 bp, probe
gaaccaaaggacacgggccaaactg

SEQ ID NO: 116437 - DNA, 25 bp, probe
tggttaaccggcactacgccaagat

SEQ ID NO: 116438 - DNA, 25 bp, probe
tggttaaccggcactacgccaagat

SEQ ID NO: 116439 - DNA, 25 bp, probe
ttacttcctccagaatattccgttc

SEQ ID NO: 116440 - DNA, 25 bp, probe
ttacttcctccagaatattccgttc

SEQ ID NO: 116441 - DNA, 25 bp, probe
actattctcgccgcaaaaacgttcg

SEQ ID NO: 116442 - DNA, 25 bp, probe
ggtttccagtccactgaaacaccct

SEQ ID NO: 116443 - DNA, 25 bp, probe
gttttcctttacaccaactgtcaat

SEQ ID NO: 116444 - DNA, 25 bp, probe
gttacctttctacaaccaggaccat

SEQ ID NO: 116445 - DNA, 25 bp, probe
ggtagcccttttcatttacaaatct

SEQ ID NO: 116446 - DNA, 25 bp, probe
ccccccaaaactgattacaactgct

SEQ ID NO: 116447 - DNA, 25 bp, probe
acccccaacacgtggaacacacgct

SEQ ID NO: 116448 - DNA, 25 bp, probe
acaagggtaccgtggccatcaaggt

SEQ ID NO: 116449 - DNA, 25 bp, probe
ccaaggttaccaactacctagactg

SEQ ID NO: 116450 - DNA, 25 bp, probe
ggaacgaaaccagcgtcctattcca

SEQ ID NO: 116451 - DNA, 25 bp, probe
agaaccaagaactctaactgtccca

SEQ ID NO: 116452 - DNA, 25 bp, probe
ataaaatagacttgaacgactggaa

SEQ ID NO: 116453 - DNA, 25 bp, probe
gggacttagtacttacgacttcatt

SEQ ID NO: 116454 - DNA, 25 bp, probe
gggacttagtacttacgacttcatt

SEQ ID NO: 116455 - DNA, 25 bp, probe
gggacttagtacttacgacttcatt

SEQ ID NO: 116456 - DNA, 25 bp, probe
tgctgaaatccgacgactacgaccc

SEQ ID NO: 116457 - DNA, 25 bp, probe
tgctgaaatccgacgactacgaccc

SEQ ID NO: 116458 - DNA, 25 bp, probe
ctgaaatccgacgactacgacccgg

SEQ ID NO: 116459 - DNA, 25 bp, probe
ctgaaatccgacgactacgacccgg

SEQ ID NO: 116460 - DNA, 25 bp, probe
ctgggccgtttggcaaaacccactg

SEQ ID NO: 116461 - DNA, 25 bp, probe
ctgggccgtttggcaaaacccactg

SEQ ID NO: 116462 - DNA, 25 bp, probe
aagtccttagtgcaaaccaccattg

SEQ ID NO: 116463 - DNA, 25 bp, probe
aagtccttagtgcaaaccaccattg

SEQ ID NO: 116464 - DNA, 25 bp, probe
ataatccttagtgagggtgccctgg

SEQ ID NO: 116465 - DNA, 25 bp, probe
agattcccgactgtggcggttagca

SEQ ID NO: 116466 - DNA, 25 bp, probe
cttctgcctataccctggggtaagt

SEQ ID NO: 116467 - DNA, 25 bp, probe
cgcctactcttcagggtctaaagat

SEQ ID NO: 116468 - DNA, 25 bp, probe
ctttaaccttagagcttggacagtc

SEQ ID NO: 116469 - DNA, 25 bp, probe
aggaacccgaagtggggagcacctg

SEQ ID NO: 116470 - DNA, 25 bp, probe
caaaagaactaagaggcccagccct

SEQ ID NO: 116471 - DNA, 25 bp, probe
agaataaaagaagagaccaagacac

SEQ ID NO: 116472 - DNA, 25 bp, probe
atgccgaaaagttcaaaaattcact

SEQ ID NO: 116473 - DNA, 25 bp, probe
atgccgaaaagttcaaaaattcact

SEQ ID NO: 116474 - DNA, 25 bp, probe
atgccgaaaagttcaaaaattcact

SEQ ID NO: 116475 - DNA, 25 bp, probe
atcaagaaacgtgtgaaaactccct

SEQ ID NO: 116476 - DNA, 25 bp, probe
caaggccaacctgtcccaagtggcc

SEQ ID NO: 116477 - DNA, 25 bp, probe
cgggcctatggtgtcccagtaaagc

SEQ ID NO: 116478 - DNA, 25 bp, probe
cgggcctatggtgtcccagtaaagc

SEQ ID NO: 116479 - DNA, 25 bp, probe
tccccacgaaatgaccaactaccgc

SEQ ID NO: 116480 - DNA, 25 bp, probe
ttacgtggtgacacggtactaccgg

SEQ ID NO: 116481 - DNA, 25 bp, probe
aaaggaggacaacagttcccaccag

SEQ ID NO: 116482 - DNA, 25 bp, probe
aaataggtacagagacgtcagtccc

SEQ ID NO: 116483 - DNA, 25 bp, probe
gccaaatgggttgttagtagtgcca

SEQ ID NO: 116484 - DNA, 25 bp, probe
gtaactagtaacattttattctttg

SEQ ID NO: 116485 - DNA, 25 bp, probe
agtgcaaagtagattcgtagttagt

SEQ ID NO: 116486 - DNA, 25 bp, probe
gggaacttcggagagctcagattag

SEQ ID NO: 116487 - DNA, 25 bp, probe
aggatttgtccgagaccttcaaggt

SEQ ID NO: 116488 - DNA, 25 bp, probe
aagtttaacgaagcacttccgactg

SEQ ID NO: 116489 - DNA, 25 bp, probe
cacaggttaaccgtcagacttccgg

SEQ ID NO: 116490 - DNA, 25 bp, probe
ttcaaggcgaacaccgtcttcgaga

SEQ ID NO: 116491 - DNA, 25 bp, probe
ttcaaggcgaacaccgtcttcgaga

SEQ ID NO: 116492 - DNA, 25 bp, probe
tgtgccgggaacacccggagggact

SEQ ID NO: 116493 - DNA, 25 bp, probe
gggcacctgaggagactttggggac

SEQ ID NO: 116494 - DNA, 25 bp, probe
gggcacctgaggagactttggggac

SEQ ID NO: 116495 - DNA, 25 bp, probe
cgtgcaaatcggagacccggaaact

SEQ ID NO: 116496 - DNA, 25 bp, probe
tcggcttttgactggaccgagtgac

SEQ ID NO: 116497 - DNA, 25 bp, probe
cgactattaccgtgtgggaggccgc

SEQ ID NO: 116498 - DNA, 25 bp, probe
ctttttccgcgtgtcggaggagcag

SEQ ID NO: 116499 - DNA, 25 bp, probe
cgctggtgaccggttacttgggaag

SEQ ID NO: 116500 - DNA, 25 bp, probe
gcgttgaactccaccaacggggagc

SEQ ID NO: 116501 - DNA, 25 bp, probe
tttgaaattcccccacttgggagct

SEQ ID NO: 116502 - DNA, 25 bp, probe
ctgggcgttaacagcctttggagtc

SEQ ID NO: 116503 - DNA, 25 bp, probe
ctacaggggattgtgttttgtcact

SEQ ID NO: 116504 - DNA, 25 bp, probe
ctaatttgacttcgtttttaggatg

SEQ ID NO: 116505 - DNA, 25 bp, probe
gtaaggagtcgtgtatggtagggta

SEQ ID NO: 116506 - DNA, 25 bp, probe
gtacggagtaactgtccaaaagcca

SEQ ID NO: 116507 - DNA, 25 bp, probe
gtacggagtaactgtccaaaagcca

SEQ ID NO: 116508 - DNA, 25 bp, probe
gtacggagtaactgtccaaaagcca

SEQ ID NO: 116509 - DNA, 25 bp, probe
gcgggtagtattgttcccgttgcgc

SEQ ID NO: 116510 - DNA, 25 bp, probe
gggacctgaaggtttccaacttgct

SEQ ID NO: 116511 - DNA, 25 bp, probe
agcgacctttggggaccaagttgtg

SEQ ID NO: 116512 - DNA, 25 bp, probe
accctcttcttgcgaaaggttctct

SEQ ID NO: 116513 - DNA, 25 bp, probe
acctggaacctagaggcctttctct

SEQ ID NO: 116514 - DNA, 25 bp, probe
acccaaaccggcaggtgcgattttg

SEQ ID NO: 116515 - DNA, 25 bp, probe
aacagccgggggctggtctattccg

SEQ ID NO: 116516 - DNA, 25 bp, probe
ataagaaggaggcggaactgacgga

SEQ ID NO: 116517 - DNA, 25 bp, probe
agaatttggggcaggaaatactttg

SEQ ID NO: 116518 - DNA, 25 bp, probe
cgggtctcggaagggaagtagccat

SEQ ID NO: 116519 - DNA, 25 bp, probe
ccgggctacggaaggaggggacatg

SEQ ID NO: 116520 - DNA, 25 bp, probe
agggtgaaagtgattatgggaatca

SEQ ID NO: 116521 - DNA, 25 bp, probe
agggtgacaacgctaactggaaaga

SEQ ID NO: 116522 - DNA, 25 bp, probe
aggggtttctggcaagggaacagca

SEQ ID NO: 116523 - DNA, 25 bp, probe
gaggataatttctctaagttaacag

SEQ ID NO: 116524 - DNA, 25 bp, probe
gaggataatttctctaagttaacag

SEQ ID NO: 116525 - DNA, 25 bp, probe
agtgctaaatttgtagggtaggcta

SEQ ID NO: 116526 - DNA, 25 bp, probe
aggctactttatcacacttatcctc

SEQ ID NO: 116527 - DNA, 25 bp, probe
agacgactcggaggaccttaagcca

SEQ ID NO: 116528 - DNA, 25 bp, probe
aaggactaattgtactttgaggcca

SEQ ID NO: 116529 - DNA, 25 bp, probe
gaaggaaaattctccttactgggat

SEQ ID NO: 116530 - DNA, 25 bp, probe
aggcgggatttcgccgtattggcca

SEQ ID NO: 116531 - DNA, 25 bp, probe
aggttgcggttagccgagatcgcgc

SEQ ID NO: 116532 - DNA, 25 bp, probe
acaccagggtaagatgggtcgtggg

SEQ ID NO: 116533 - DNA, 25 bp, probe
accctggaaaacagacgggtctgag

SEQ ID NO: 116534 - DNA, 25 bp, probe
aaggattgaatgtgaaacgggggca

SEQ ID NO: 116535 - DNA, 25 bp, probe
aggagttacgtagagagggtggcca

SEQ ID NO: 116536 - DNA, 25 bp, probe
acctattacgactccatgggtggga

SEQ ID NO: 116537 - DNA, 25 bp, probe
agatctgtaccgtgacgggctgggg

SEQ ID NO: 116538 - DNA, 25 bp, probe
agcaggtcatcgagaacgcggggga

SEQ ID NO: 116539 - DNA, 25 bp, probe
acagttactccgtaccttactgaga

SEQ ID NO: 116540 - DNA, 25 bp, probe
gaatttaaatggtgcctacctaacg

SEQ ID NO: 116541 - DNA, 25 bp, probe
gccaaaggaggacatcctacctacc

SEQ ID NO: 116542 - DNA, 25 bp, probe
gccaaaggaggacatcctacctacc

SEQ ID NO: 116543 - DNA, 25 bp, probe
gccattaagggatattagtaccgta

SEQ ID NO: 116544 - DNA, 25 bp, probe
cgctggtgaccggttacttgggaag

SEQ ID NO: 116545 - DNA, 25 bp, probe
atcagtggccctcataactggagta

SEQ ID NO: 116546 - DNA, 25 bp, probe
aaacgccgaatatccagggccaact

SEQ ID NO: 116547 - DNA, 25 bp, probe
atacccctagtatctggctgggttt

SEQ ID NO: 116548 - DNA, 25 bp, probe
aatcgaactagaaaatcgcctcgtt

SEQ ID NO: 116549 - DNA, 25 bp, probe
cttctggactggataaccaacctcc

SEQ ID NO: 116550 - DNA, 25 bp, probe
cgtcggaaggtttagcgagccccat

SEQ ID NO: 116551 - DNA, 25 bp, probe
ccgtggaaggttctggggatccctg

SEQ ID NO: 116552 - DNA, 25 bp, probe
ctgggaaaacgtctcaggtggcctc

SEQ ID NO: 116553 - DNA, 25 bp, probe
cttggaaagctcaggggtaggccca

SEQ ID NO: 116554 - DNA, 25 bp, probe
atacgtcaactggctcaatggtccc

SEQ ID NO: 116555 - DNA, 25 bp, probe
aacgatactgttcacgttgccgttg

SEQ ID NO: 116556 - DNA, 25 bp, probe
ctgcttgtagctcttaaggttcgtt

SEQ ID NO: 116557 - DNA, 25 bp, probe
attggttcctgcagaaattattctt

SEQ ID NO: 116558 - DNA, 25 bp, probe
atggatggccccagaaacaattttt

SEQ ID NO: 116559 - DNA, 25 bp, probe
aggaagggcctacagcccatttctc

SEQ ID NO: 116560 - DNA, 25 bp, probe
aggaagggcctacagcccatttctc

SEQ ID NO: 116561 - DNA, 25 bp, probe
agctaaggtaatgaacatctttttc

SEQ ID NO: 116562 - DNA, 25 bp, probe
aggcaagggtcagaaactttcctgg

SEQ ID NO: 116563 - DNA, 25 bp, probe
aggcaagggtcagaaactttcctgg

SEQ ID NO: 116564 - DNA, 25 bp, probe
agtaagcggcaacaagggtccgtgg

SEQ ID NO: 116565 - DNA, 25 bp, probe
agtaactacattgacgggcacaccc

SEQ ID NO: 116566 - DNA, 25 bp, probe
agtacataaaggtgcctgttaccga

SEQ ID NO: 116567 - DNA, 25 bp, probe
agtacataaaggtgcctgttaccga

SEQ ID NO: 116568 - DNA, 25 bp, probe
ccattaacaaagcgggctttgccgt

SEQ ID NO: 116569 - DNA, 25 bp, probe
caattcgaaaacaaccgtcctgctg

SEQ ID NO: 116570 - DNA, 25 bp, probe
aaattaaaacctgcctttctgccag

SEQ ID NO: 116571 - DNA, 25 bp, probe
aaataataaaccaccctgttctgtg

SEQ ID NO: 116572 - DNA, 25 bp, probe
atttggaaaagtgtggccgggtgcg

SEQ ID NO: 116573 - DNA, 25 bp, probe
attggttttgggagggcgaggactg

SEQ ID NO: 116574 - DNA, 25 bp, probe
gggtttgtttggagccaaggggctg

SEQ ID NO: 116575 - DNA, 25 bp, probe
gggactttaattattccaagcggct

SEQ ID NO: 116576 - DNA, 25 bp, probe
agtaatttgaatatccaaagggttg

SEQ ID NO: 116577 - DNA, 25 bp, probe
aaactttggacatcgtaaagactag

SEQ ID NO: 116578 - DNA, 25 bp, probe
aaactttggacatcgtaaagactag

SEQ ID NO: 116579 - DNA, 25 bp, probe
aaacctcaggtcacgtccgaggtcg

SEQ ID NO: 116580 - DNA, 25 bp, probe
aaacctcaggtcacgtccgaggtcg

SEQ ID NO: 116581 - DNA, 25 bp, probe
aaacctcaggtcacgtccgaggtcg

SEQ ID NO: 116582 - DNA, 25 bp, probe
aaacttaactatcttccagggctct

SEQ ID NO: 116583 - DNA, 25 bp, probe
aaaagaaagccacatttagggctat

SEQ ID NO: 116584 - DNA, 25 bp, probe
tcccatttaaccaggtctaggtctt

SEQ ID NO: 116585 - DNA, 25 bp, probe
acagacttttccagggtggtccttg

SEQ ID NO: 116586 - DNA, 25 bp, probe
agagacctaccagacaacggtccgg

SEQ ID NO: 116587 - DNA, 25 bp, probe
agccgtgttccagaagccggtcaag

SEQ ID NO: 116588 - DNA, 25 bp, probe
agccgtgttccagaagccggtcaag

SEQ ID NO: 116589 - DNA, 25 bp, probe
atcaagttccaaccattaaggtcca

SEQ ID NO: 116590 - DNA, 25 bp, probe
atacagggtaagcaccagggacaat

SEQ ID NO: 116591 - DNA, 25 bp, probe
ataagggtactatatgtgggtagta

SEQ ID NO: 116592 - DNA, 25 bp, probe
accaacgttcaagcagttggtagaa

SEQ ID NO: 116593 - DNA, 25 bp, probe
cgacgacgcctacaggttcgtgaag

SEQ ID NO: 116594 - DNA, 25 bp, probe
cttcgattcttatcatggttcgggc

SEQ ID NO: 116595 - DNA, 25 bp, probe
cttcctgctccgtgggaaccacgag

SEQ ID NO: 116596 - DNA, 25 bp, probe
cttgccattccgagtgaagaaaacc

SEQ ID NO: 116597 - DNA, 25 bp, probe
ctagcgtacatctaaggaaaaccgt

SEQ ID NO: 116598 - DNA, 25 bp, probe
acctgtagcctgtgaagaaacctta

SEQ ID NO: 116599 - DNA, 25 bp, probe
agcaactacctacaaaagattctaa

SEQ ID NO: 116600 - DNA, 25 bp, probe
agaattaaccttaagaccagttcat

SEQ ID NO: 116601 - DNA, 25 bp, probe
aattaaccttaagaccagttcatag

SEQ ID NO: 116602 - DNA, 25 bp, probe
aagaaaccctaagacagcgagaact

SEQ ID NO: 116603 - DNA, 25 bp, probe
aggagaacccaatgtttcgtatatc

SEQ ID NO: 116604 - DNA, 25 bp, probe
agtctgaacccttgttttctgaaat

SEQ ID NO: 116605 - DNA, 25 bp, probe
agtcatggtacgtttcctaaagata

SEQ ID NO: 116606 - DNA, 25 bp, probe
accggatacagatacccaaaaagat

SEQ ID NO: 116607 - DNA, 25 bp, probe
tgtccaggaccgtctacctaaaaat

SEQ ID NO: 116608 - DNA, 25 bp, probe
cctcgggaagccacctaagaatgtt

SEQ ID NO: 116609 - DNA, 25 bp, probe
agctctgggatagcccttccaaatc

SEQ ID NO: 116610 - DNA, 25 bp, probe
accaagcctggtgtctataccaaag

SEQ ID NO: 116611 - DNA, 25 bp, probe
atcaaagtttttcacagacctacgg

SEQ ID NO: 116612 - DNA, 25 bp, probe
aaatgggtccttcaacaccttagtg

SEQ ID NO: 116613 - DNA, 25 bp, probe
agtttggacctctgaaaggttggag

SEQ ID NO: 116614 - DNA, 25 bp, probe
aatggtagacctgtaattgtgggaa

SEQ ID NO: 116615 - DNA, 25 bp, probe
agaggtccctggagaaggggcccag

SEQ ID NO: 116616 - DNA, 25 bp, probe
ctgcccccgggagaggggcctacag

SEQ ID NO: 116617 - DNA, 25 bp, probe
ctgcccgggaagagggtatgatcga

SEQ ID NO: 116618 - DNA, 25 bp, probe
cagtcgggttacaggcgagttccct

SEQ ID NO: 116619 - DNA, 25 bp, probe
aacttactgtccaccagtttataca

SEQ ID NO: 116620 - DNA, 25 bp, probe
aacttactgtccaccagtttataca

SEQ ID NO: 116621 - DNA, 25 bp, probe
aggttcctttctgtccattgaaaca

SEQ ID NO: 116622 - DNA, 25 bp, probe
atttattaatttgtaccttaagcat

SEQ ID NO: 116623 - DNA, 25 bp, probe
ctggggtaaatgtgtacctaatgaa

SEQ ID NO: 116624 - DNA, 25 bp, probe
ctggggtagggtcataccacaggga

SEQ ID NO: 116625 - DNA, 25 bp, probe
cctagaaaggttcaattctacttca

SEQ ID NO: 116626 - DNA, 25 bp, probe
acctagcaaggctcaactttaattg

SEQ ID NO: 116627 - DNA, 25 bp, probe
acctagcaaggctcaactttaattg

SEQ ID NO: 116628 - DNA, 25 bp, probe
tccctgggggaagccctggatttca

SEQ ID NO: 116629 - DNA, 25 bp, probe
ctaccgtggaatgtccctggagtac

SEQ ID NO: 116630 - DNA, 25 bp, probe
aaccctgggggtcacagtggtagca

SEQ ID NO: 116631 - DNA, 25 bp, probe
aaccctttgaagctccgagcactta

SEQ ID NO: 116632 - DNA, 25 bp, probe
ccgacgcattcggaattccggaatt

SEQ ID NO: 116633 - DNA, 25 bp, probe
ctggttgtttggttagggctgaatg

SEQ ID NO: 116634 - DNA, 25 bp, probe
ctgggagttttggtggagtccgatg

SEQ ID NO: 116635 - DNA, 25 bp, probe
agacgctcttttctaagtggcgtgt

SEQ ID NO: 116636 - DNA, 25 bp, probe
caggagtattttcttcttgggtggg

SEQ ID NO: 116637 - DNA, 25 bp, probe
ggggttggttagctttgcagggtga

SEQ ID NO: 116638 - DNA, 25 bp, probe
agtttgtatgacgcgtggtcaggtt

SEQ ID NO: 116639 - DNA, 25 bp, probe
aggctggataccacctggaggtttt

SEQ ID NO: 116640 - DNA, 25 bp, probe
taggcccaaactgccttcgtttggt

SEQ ID NO: 116641 - DNA, 25 bp, probe
aggctagtacctgctttgttggggt

SEQ ID NO: 116642 - DNA, 25 bp, probe
aggaggaaccggaggtctgcgagga

SEQ ID NO: 116643 - DNA, 25 bp, probe
agaaaggcccggagttagggctgag

SEQ ID NO: 116644 - DNA, 25 bp, probe
aggaaaccctccagattacagggag

SEQ ID NO: 116645 - DNA, 25 bp, probe
aaaccccaacctcagttgaggccag

SEQ ID NO: 116646 - DNA, 25 bp, probe
tctaaccccaaagaagcaaggccaa

SEQ ID NO: 116647 - DNA, 25 bp, probe
gtgaaaatactgaaaaacgaggcca

SEQ ID NO: 116648 - DNA, 25 bp, probe
ataagagaattagaccccagggagt

SEQ ID NO: 116649 - DNA, 25 bp, probe
aaaggatgttggtgttccacgtgtt

SEQ ID NO: 116650 - DNA, 25 bp, probe
aaaggaggttggcaactaaagacat

SEQ ID NO: 116651 - DNA, 25 bp, probe
aagctggggtgctgggcttaagggc

SEQ ID NO: 116652 - DNA, 25 bp, probe
ccctggtggttgagtttaaggagct

SEQ ID NO: 116653 - DNA, 25 bp, probe
accgagggctggcgttttggaatgc

SEQ ID NO: 116654 - DNA, 25 bp, probe
agccccagggggagtggcgggctgt

SEQ ID NO: 116655 - DNA, 25 bp, probe
agccccagggggagtggcgggctgt

SEQ ID NO: 116656 - DNA, 25 bp, probe
agacaggaagggcctttggccgcct

SEQ ID NO: 116657 - DNA, 25 bp, probe
aagcggggaagactccattccagtc

SEQ ID NO: 116658 - DNA, 25 bp, probe
ccaggggaaaagtgcctcatagtta

SEQ ID NO: 116659 - DNA, 25 bp, probe
ccaggggaaaagtgcctcatagtta

SEQ ID NO: 116660 - DNA, 25 bp, probe
acgggttacaactggttcattctga

SEQ ID NO: 116661 - DNA, 25 bp, probe
accgccattaccattttccatggga

SEQ ID NO: 116662 - DNA, 25 bp, probe
accgccattaccattttccatggga

SEQ ID NO: 116663 - DNA, 25 bp, probe
accttcggccgagttgtacaatgtg

SEQ ID NO: 116664 - DNA, 25 bp, probe
atctcttccagcagaaagtcctcgg

SEQ ID NO: 116665 - DNA, 25 bp, probe
ccgtagccacggcagtgtttttggt

SEQ ID NO: 116666 - DNA, 25 bp, probe
actattccctgacagttatttttgc

SEQ ID NO: 116667 - DNA, 25 bp, probe
attatgtggactgaaccgacttttc

SEQ ID NO: 116668 - DNA, 25 bp, probe
atttaggacctggaggtacctggat

SEQ ID NO: 116669 - DNA, 25 bp, probe
attggggacgggcagtacaagcgct

SEQ ID NO: 116670 - DNA, 25 bp, probe
actgggtggggtgaggaccactcct

SEQ ID NO: 116671 - DNA, 25 bp, probe
attacgggtgttgaaggtgtcttca

SEQ ID NO: 116672 - DNA, 25 bp, probe
cttaagggcgatgcctgggtttaca

SEQ ID NO: 116673 - DNA, 25 bp, probe
cttccaataccccagtagcttttat

SEQ ID NO: 116674 - DNA, 25 bp, probe
cgttgttggaccggctacgtaagca

SEQ ID NO: 116675 - DNA, 25 bp, probe
cgttttgtgaccactgtgggtcact

SEQ ID NO: 116676 - DNA, 25 bp, probe
gttatacgtaccacggattctcttt

SEQ ID NO: 116677 - DNA, 25 bp, probe
attaacccactcatttagtaatgta

SEQ ID NO: 116678 - DNA, 25 bp, probe
caaaaccctcaataaagtccacgag

SEQ ID NO: 116679 - DNA, 25 bp, probe
atttcaccaccataaaacccttgag

SEQ ID NO: 116680 - DNA, 25 bp, probe
agctagaacttatcaaacccttttg

SEQ ID NO: 116681 - DNA, 25 bp, probe
ggaccaactgtatacattacccttg

SEQ ID NO: 116682 - DNA, 25 bp, probe
gcagttcgaactttaattaccattg

SEQ ID NO: 116683 - DNA, 25 bp, probe
agatcctaactttgggtcccatcat

SEQ ID NO: 116684 - DNA, 25 bp, probe
ttaactacgggacattcaccatcaa

SEQ ID NO: 116685 - DNA, 25 bp, probe
atacctacttccagataaccacaaa

SEQ ID NO: 116686 - DNA, 25 bp, probe
atcgtccttttatcaaacccaagct

SEQ ID NO: 116687 - DNA, 25 bp, probe
atttccctttggagacacaacaggc

SEQ ID NO: 116688 - DNA, 25 bp, probe
ataaaccgttttgggccattgcctg

SEQ ID NO: 116689 - DNA, 25 bp, probe
atagcccttggtgtgggttttatct

SEQ ID NO: 116690 - DNA, 25 bp, probe
attgggtctgggatgaagtatttat

SEQ ID NO: 116691 - DNA, 25 bp, probe
gttggccatggtgaaagggtttgat

SEQ ID NO: 116692 - DNA, 25 bp, probe
tgggtgggggaatagtagacttgaa

SEQ ID NO: 116693 - DNA, 25 bp, probe
gtagttggggtagattatgatttag

SEQ ID NO: 116694 - DNA, 25 bp, probe
atacgggggcctctatgaattaaag

SEQ ID NO: 116695 - DNA, 25 bp, probe
atacccaagtacattctaattacca

SEQ ID NO: 116696 - DNA, 25 bp, probe
agaccaaaaaatgtaaccgattcat

SEQ ID NO: 116697 - DNA, 25 bp, probe
attaaaaacagtataaccattcatt

SEQ ID NO: 116698 - DNA, 25 bp, probe
aggaaattaactatctgtacttata

SEQ ID NO: 116699 - DNA, 25 bp, probe
gaaaaattagtctgtggatttaaca

SEQ ID NO: 116700 - DNA, 25 bp, probe
cttaaattttatcagagagttgcaa

SEQ ID NO: 116701 - DNA, 25 bp, probe
attactttttagccgaggttatgat

SEQ ID NO: 116702 - DNA, 25 bp, probe
ttaatccgctggtgaccggttactt

SEQ ID NO: 116703 - DNA, 25 bp, probe
ttaatccgctggtgaccggttactt

SEQ ID NO: 116704 - DNA, 25 bp, probe
tgtaagaccaggtggtaccttagta

SEQ ID NO: 116705 - DNA, 25 bp, probe
agctaagtagcgaaggtaccttgga

SEQ ID NO: 116706 - DNA, 25 bp, probe
agtgtgattaggcgttaacttttca

SEQ ID NO: 116707 - DNA, 25 bp, probe
agttggttcgttctgtactgttact

SEQ ID NO: 116708 - DNA, 25 bp, probe
gattatgtttcgaggggaagtacgt

SEQ ID NO: 116709 - DNA, 25 bp, probe
gattatgtttcgaggggaagtacgt

SEQ ID NO: 116710 - DNA, 25 bp, probe
atataattgctggctggtgggttgc

SEQ ID NO: 116711 - DNA, 25 bp, probe
atagtagttcctgaagtgttcactt

SEQ ID NO: 116712 - DNA, 25 bp, probe
ctcgatcagtttcctaagggcccga

SEQ ID NO: 116713 - DNA, 25 bp, probe
ctcgatcagtttcctaagggcccga

SEQ ID NO: 116714 - DNA, 25 bp, probe
gtcgtattgggcgcctggtcaccag

SEQ ID NO: 116715 - DNA, 25 bp, probe
gctggtaggacctccgagtaaaaag

SEQ ID NO: 116716 - DNA, 25 bp, probe
gctggtaggacctccgagtaaaaag

SEQ ID NO: 116717 - DNA, 25 bp, probe
ttagatcgggtctcggaagggaagt

SEQ ID NO: 116718 - DNA, 25 bp, probe
ttcggggaggtgtggatggggtact

SEQ ID NO: 116719 - DNA, 25 bp, probe
ttccaggggttctggcgggagtctc

SEQ ID NO: 116720 - DNA, 25 bp, probe
ctccaaagttcctttgaggggtctg

SEQ ID NO: 116721 - DNA, 25 bp, probe
acacaaaggggatcataaagttaga

SEQ ID NO: 116722 - DNA, 25 bp, probe
accagtgaagggtctgaaaggttgg

SEQ ID NO: 116723 - DNA, 25 bp, probe
accgtcttgggccagaacgacacgg

SEQ ID NO: 116724 - DNA, 25 bp, probe
atacgatccgggtgaaggactcctt

SEQ ID NO: 116725 - DNA, 25 bp, probe
aacgacgactttgaattgactccta

SEQ ID NO: 116726 - DNA, 25 bp, probe
aaaaccatctttcaacgaactatat

SEQ ID NO: 116727 - DNA, 25 bp, probe
aagtaccactactcccggagaagat

SEQ ID NO: 116728 - DNA, 25 bp, probe
aggtgccaaattctaccgtggaatg

SEQ ID NO: 116729 - DNA, 25 bp, probe
gggctccgtaccctaaaatgtcact

SEQ ID NO: 116730 - DNA, 25 bp, probe
cggcctatcgggcttaccagaactg

SEQ ID NO: 116731 - DNA, 25 bp, probe
cggcctatcgggcttaccagaactg

SEQ ID NO: 116732 - DNA, 25 bp, probe
accctgtggggtatagccggcacat

SEQ ID NO: 116733 - DNA, 25 bp, probe
atcctaggtaggggtggctggggca

SEQ ID NO: 116734 - DNA, 25 bp, probe
atccaaggaatagactccttcgtga

SEQ ID NO: 116735 - DNA, 25 bp, probe
aggcaaagaaggcaacggttgctcc

SEQ ID NO: 116736 - DNA, 25 bp, probe
actgcaaccaacagtaaggacttac

SEQ ID NO: 116737 - DNA, 25 bp, probe
atagaacctgggctacattcctaac

SEQ ID NO: 116738 - DNA, 25 bp, probe
caaggacacggtctacaccgacttc

SEQ ID NO: 116739 - DNA, 25 bp, probe
aaagaacggctcctgtcgaatgggt

SEQ ID NO: 116740 - DNA, 25 bp, probe
atcaaaagggctatgggaagggcag

SEQ ID NO: 116741 - DNA, 25 bp, probe
gttttggcggctgtggaaggggatc

SEQ ID NO: 116742 - DNA, 25 bp, probe
attccgcggactgaagggcaggacc

SEQ ID NO: 116743 - DNA, 25 bp, probe
atataaaggactcaaacgcgtggaa

SEQ ID NO: 116744 - DNA, 25 bp, probe
gttcagtcggaacaaagtttccagt

SEQ ID NO: 116745 - DNA, 25 bp, probe
cttcaaggcgaacaccgtcttcgag

SEQ ID NO: 116746 - DNA, 25 bp, probe
cttcaaggcgaacaccgtcttcgag

SEQ ID NO: 116747 - DNA, 25 bp, probe
cttcaaacgaaatggctcggccagg

SEQ ID NO: 116748 - DNA, 25 bp, probe
ctgtaaagctggaaagggacgaact

SEQ ID NO: 116749 - DNA, 25 bp, probe
cttccgactggaaaccgagtgaact

SEQ ID NO: 116750 - DNA, 25 bp, probe
cttctcgccgggatcccgggtgatt

SEQ ID NO: 116751 - DNA, 25 bp, probe
cttccaaatgttcttcctggggtct

SEQ ID NO: 116752 - DNA, 25 bp, probe
atataaaaatcgtggactttggctt

SEQ ID NO: 116753 - DNA, 25 bp, probe
atataaaaatcgtggactttggctt

SEQ ID NO: 116754 - DNA, 25 bp, probe
ctaaccaaatcctgacctattggga

SEQ ID NO: 116755 - DNA, 25 bp, probe
ccgacccaacagcggcttttgggag

SEQ ID NO: 116756 - DNA, 25 bp, probe
cgtgtcccgaactggtgttgggaag

SEQ ID NO: 116757 - DNA, 25 bp, probe
cgtgtcccgaactggtgttgggaag

SEQ ID NO: 116758 - DNA, 25 bp, probe
tgtttccccgactggggcagggtgt

SEQ ID NO: 116759 - DNA, 25 bp, probe
tttccgggggcttacggagctggtg

SEQ ID NO: 116760 - DNA, 25 bp, probe
cgtcttgggccagaacgacacgggc

SEQ ID NO: 116761 - DNA, 25 bp, probe
agtttgcggctctgaaaaactgaag

SEQ ID NO: 116762 - DNA, 25 bp, probe
aggtatggggcggcaaaacctatca

SEQ ID NO: 116763 - DNA, 25 bp, probe
atcgtatggggtgacaccgcctagc

SEQ ID NO: 116764 - DNA, 25 bp, probe
agagattggagtgcaaaccggtagc

SEQ ID NO: 116765 - DNA, 25 bp, probe
aggattgaatgtgaaacgggggcac

SEQ ID NO: 116766 - DNA, 25 bp, probe
aggttcaagccatagagttggggcc

SEQ ID NO: 116767 - DNA, 25 bp, probe
aggctgaccagagccggttgacttc

SEQ ID NO: 116768 - DNA, 25 bp, probe
aacataacgacccaggccaggtttg

SEQ ID NO: 116769 - DNA, 25 bp, probe
agtaaacacaagaggacaggttaag

SEQ ID NO: 116770 - DNA, 25 bp, probe
agttaaccttggtgacaagtatcac

SEQ ID NO: 116771 - DNA, 25 bp, probe
cttgtaactttcaaagaaagccatc

SEQ ID NO: 116772 - DNA, 25 bp, probe
gttctatttctatcccaaactaagc

SEQ ID NO: 116773 - DNA, 25 bp, probe
gttctatttctatcccaaactaagc

SEQ ID NO: 116774 - DNA, 25 bp, probe
cttctttgcttctccaaccaaaaca

SEQ ID NO: 116775 - DNA, 25 bp, probe
ctttaagttcccagaccaatataca

SEQ ID NO: 116776 - DNA, 25 bp, probe
atgttttgacacacccctaagtaca

SEQ ID NO: 116777 - DNA, 25 bp, probe
atatggttctcctactaactagctt

SEQ ID NO: 116778 - DNA, 25 bp, probe
attattattcggcataatggacttg

SEQ ID NO: 116779 - DNA, 25 bp, probe
attattattcggcataatggacttg

SEQ ID NO: 116780 - DNA, 25 bp, probe
ataaggacttggctgcgcgtaactg

SEQ ID NO: 116781 - DNA, 25 bp, probe
acgtggcgttggtggggacactggt

SEQ ID NO: 116782 - DNA, 25 bp, probe
gtaggcaagtagctctggggccacc

SEQ ID NO: 116783 - DNA, 25 bp, probe
ctatggtagggggagagggacctgc

SEQ ID NO: 116784 - DNA, 25 bp, probe
ataggctgcagaaggcggggttcac

SEQ ID NO: 116785 - DNA, 25 bp, probe
atagagatgttgtggtcgatttaca

SEQ ID NO: 116786 - DNA, 25 bp, probe
ataacgtggcagacctttttacagg

SEQ ID NO: 116787 - DNA, 25 bp, probe
atcaaacttcgacattttgaagagc

SEQ ID NO: 116788 - DNA, 25 bp, probe
atagcgacttagtgttctaaataat

SEQ ID NO: 116789 - DNA, 25 bp, probe
atcactacttaagctaattaatatt

SEQ ID NO: 116790 - DNA, 25 bp, probe
atcacccaaataggaaacgactaga

SEQ ID NO: 116791 - DNA, 25 bp, probe
atcacccaaataggaaacgactaga

SEQ ID NO: 116792 - DNA, 25 bp, probe
acacccgaaaggcaaggacgggcag

SEQ ID NO: 116793 - DNA, 25 bp, probe
acacccgaaaggcaaggacgggcag

SEQ ID NO: 116794 - DNA, 25 bp, probe
agggctcggaagagtaggaaccgct

SEQ ID NO: 116795 - DNA, 25 bp, probe
aggaccctgaagagttgtccccagc

SEQ ID NO: 116796 - DNA, 25 bp, probe
aggccccttagtctgtatggatgcc

SEQ ID NO: 116797 - DNA, 25 bp, probe
cgtcccccaaacatgttgtacattt

SEQ ID NO: 116798 - DNA, 25 bp, probe
atttccaccaaacattatttcctct

SEQ ID NO: 116799 - DNA, 25 bp, probe
agtttcaggaaacagttcaacactc

SEQ ID NO: 116800 - DNA, 25 bp, probe
agtttcaggaaacagttcaacactc

SEQ ID NO: 116801 - DNA, 25 bp, probe
attttagcaaaacagtccaggccaa

SEQ ID NO: 116802 - DNA, 25 bp, probe
ctttaaacctatcttccaggcagcc

SEQ ID NO: 116803 - DNA, 25 bp, probe
cttggtaacctttaccagctccagc

SEQ ID NO: 116804 - DNA, 25 bp, probe
cttcgaattctactgactcgaccca

SEQ ID NO: 116805 - DNA, 25 bp, probe
agatcgagtgatcttgccccagacc

SEQ ID NO: 116806 - DNA, 25 bp, probe
attctggataaatccccaagcccct

SEQ ID NO: 116807 - DNA, 25 bp, probe
attcggacaatcgaccgaaagcaag

SEQ ID NO: 116808 - DNA, 25 bp, probe
atttgggaactcagttgcatcctac

SEQ ID NO: 116809 - DNA, 25 bp, probe
atgggggagacctcaagttccacat

SEQ ID NO: 116810 - DNA, 25 bp, probe
atcgggaagccctaatccagttcct

SEQ ID NO: 116811 - DNA, 25 bp, probe
acgtaggtaacatgtggtttcttgc

SEQ ID NO: 116812 - DNA, 25 bp, probe
aggccagttaactctggggactggg

SEQ ID NO: 116813 - DNA, 25 bp, probe
cgggcggtaaagaggtgaaaggatg

SEQ ID NO: 116814 - DNA, 25 bp, probe
gtttgcggattacacgttgaaagga

SEQ ID NO: 116815 - DNA, 25 bp, probe
tttggttttgactcacctgaaagtt

SEQ ID NO: 116816 - DNA, 25 bp, probe
aatggttaagatgtacttgactagt

SEQ ID NO: 116817 - DNA, 25 bp, probe
aatggttaagatgtacttgactagt

SEQ ID NO: 116818 - DNA, 25 bp, probe
attgatcttaatagttggcttaaaa

SEQ ID NO: 116819 - DNA, 25 bp, probe
actgaaaattggacgtgcctttacg

SEQ ID NO: 116820 - DNA, 25 bp, probe
ctgtcaaaattggaggttcgtctgg

SEQ ID NO: 116821 - DNA, 25 bp, probe
ttttaaagggatcctcgtccaggcg

SEQ ID NO: 116822 - DNA, 25 bp, probe
gttggaagacggcttccctaaccag

SEQ ID NO: 116823 - DNA, 25 bp, probe
aatggacgacgataatccaccaccg

SEQ ID NO: 116824 - DNA, 25 bp, probe
aactgacgaagaagcaactaagtta

SEQ ID NO: 116825 - DNA, 25 bp, probe
aggctacgaaactttctccagcttt

SEQ ID NO: 116826 - DNA, 25 bp, probe
aggaaagtgttctcctgggtttgtg

SEQ ID NO: 116827 - DNA, 25 bp, probe
accccgtgtagctcggggcttggtg

SEQ ID NO: 116828 - DNA, 25 bp, probe
accccgtgtagctcggggcttggtg

SEQ ID NO: 116829 - DNA, 25 bp, probe
accaacttgatagcagagggggttt

SEQ ID NO: 116830 - DNA, 25 bp, probe
atcccatttaaccaggtctaggtct

SEQ ID NO: 116831 - DNA, 25 bp, probe
attgccttctagtgagttccaggtc

SEQ ID NO: 116832 - DNA, 25 bp, probe
attgccttctagtgagttccaggtc

SEQ ID NO: 116833 - DNA, 25 bp, probe
atcttttcttcctgttcctagaagt

SEQ ID NO: 116834 - DNA, 25 bp, probe
atcccttcccggatgatccgaaaga

SEQ ID NO: 116835 - DNA, 25 bp, probe
atccccgcccggatgaagagggctg

SEQ ID NO: 116836 - DNA, 25 bp, probe
atccccgcccggatgaagagggctg

SEQ ID NO: 116837 - DNA, 25 bp, probe
accaacggggagctgaatgcggacg

SEQ ID NO: 116838 - DNA, 25 bp, probe
aggaacgtcaaagaaagcgccgctc

SEQ ID NO: 116839 - DNA, 25 bp, probe
agtaacgtttgtagaagatactagt

SEQ ID NO: 116840 - DNA, 25 bp, probe
gaggttccctttgtgattaccagat

SEQ ID NO: 116841 - DNA, 25 bp, probe
gaggttccctttgtgattaccagat

SEQ ID NO: 116842 - DNA, 25 bp, probe
agggacccttgaagtctggactctt

SEQ ID NO: 116843 - DNA, 25 bp, probe
aggagacccttgtggttgactaggg

SEQ ID NO: 116844 - DNA, 25 bp, probe
atgggacaccttgtggtccccaaat

SEQ ID NO: 116845 - DNA, 25 bp, probe
tttgagtcggttcaggtcacccaat

SEQ ID NO: 116846 - DNA, 25 bp, probe
tttacaccttttatagaccccagat

SEQ ID NO: 116847 - DNA, 25 bp, probe
gttaattttcttgttacacccactg

SEQ ID NO: 116848 - DNA, 25 bp, probe
gttgaacgtcacatctttaacccac

SEQ ID NO: 116849 - DNA, 25 bp, probe
attaaataaccctgaagactccaca

SEQ ID NO: 116850 - DNA, 25 bp, probe
ataaatttacccgtcaatcaactga

SEQ ID NO: 116851 - DNA, 25 bp, probe
attcaggcattagcaattcgtcgac

SEQ ID NO: 116852 - DNA, 25 bp, probe
attcaggcattagcaattcgtcgac

SEQ ID NO: 116853 - DNA, 25 bp, probe
atgtcagccgtggttgcattttaga

SEQ ID NO: 116854 - DNA, 25 bp, probe
atgtcagccgtggttgcattttaga

SEQ ID NO: 116855 - DNA, 25 bp, probe
atccgacgggaacatctccaacaga

SEQ ID NO: 116856 - DNA, 25 bp, probe
atccgacgggaacatctccaacaga

SEQ ID NO: 116857 - DNA, 25 bp, probe
atcataggggaaactaccgacaact

SEQ ID NO: 116858 - DNA, 25 bp, probe
aacagggcagttcattccaaatcca

SEQ ID NO: 116859 - DNA, 25 bp, probe
caaaggagttacattcttacccagg

SEQ ID NO: 116860 - DNA, 25 bp, probe
atatagggcttcctttggtatcaaa

SEQ ID NO: 116861 - DNA, 25 bp, probe
attagtggcagagaatttgtaacct

SEQ ID NO: 116862 - DNA, 25 bp, probe
cttgaggctggagcccttgaaaggt

SEQ ID NO: 116863 - DNA, 25 bp, probe
cttggtccgacatgccttgaaacca

SEQ ID NO: 116864 - DNA, 25 bp, probe
cttggtccgacatgccttgaaacca

SEQ ID NO: 116865 - DNA, 25 bp, probe
cttggagccgacacgggagtaccag

SEQ ID NO: 116866 - DNA, 25 bp, probe
cttggagccgacacgggagtaccag

SEQ ID NO: 116867 - DNA, 25 bp, probe
cttagccggaggggacgtggccaag

SEQ ID NO: 116868 - DNA, 25 bp, probe
attggccggacagggacgttcattg

SEQ ID NO: 116869 - DNA, 25 bp, probe
attcgtgggaacagcgcagtacgtt

SEQ ID NO: 116870 - DNA, 25 bp, probe
atcttttgggagccccaatagagct

SEQ ID NO: 116871 - DNA, 25 bp, probe
agtgttcggccctcagagaaggatc

SEQ ID NO: 116872 - DNA, 25 bp, probe
attggtacccccgacagaaaatatg

SEQ ID NO: 116873 - DNA, 25 bp, probe
attagccccctatctggcaaggaaa

SEQ ID NO: 116874 - DNA, 25 bp, probe
attagccccctatctggcaaggaaa

SEQ ID NO: 116875 - DNA, 25 bp, probe
attagatcgggtctcggaagggaag

SEQ ID NO: 116876 - DNA, 25 bp, probe
atgggaggggagttcttactggtga

SEQ ID NO: 116877 - DNA, 25 bp, probe
attgggggccagatggggctgttca

SEQ ID NO: 116878 - DNA, 25 bp, probe
atagtcgggcaatcttgtgtcgtta

SEQ ID NO: 116879 - DNA, 25 bp, probe
atcagattcggacaatcgaccgaaa

SEQ ID NO: 116880 - DNA, 25 bp, probe
atcggccagggctccaagagaaaag

SEQ ID NO: 116881 - DNA, 25 bp, probe
atgtggacccacgcaaagatagcga

SEQ ID NO: 116882 - DNA, 25 bp, probe
atggtaccctttgaatataggggtg

SEQ ID NO: 116883 - DNA, 25 bp, probe
catggtacgtttcctaaagataggg

SEQ ID NO: 116884 - DNA, 25 bp, probe
aggttgtttcccataatagaactgc

SEQ ID NO: 116885 - DNA, 25 bp, probe
aggatttatgtacagtaggaacaca

SEQ ID NO: 116886 - DNA, 25 bp, probe
aggatttatgtacagtaggaacaca

SEQ ID NO: 116887 - DNA, 25 bp, probe
attattttctgagacttggattaat

SEQ ID NO: 116888 - DNA, 25 bp, probe
attgttttcaacactgtccttaaag

SEQ ID NO: 116889 - DNA, 25 bp, probe
attgtttccaccatttactcaacat

SEQ ID NO: 116890 - DNA, 25 bp, probe
attgtttacacaacgattactcgaa

SEQ ID NO: 116891 - DNA, 25 bp, probe
cttggccatgaatatcctttgtcct

SEQ ID NO: 116892 - DNA, 25 bp, probe
ataggcggacgagagtttggcgcat

SEQ ID NO: 116893 - DNA, 25 bp, probe
attggaagccgagatggaccgcaga

SEQ ID NO: 116894 - DNA, 25 bp, probe
attaaggcacatccttggactaagg

SEQ ID NO: 116895 - DNA, 25 bp, probe
attattaagtccagagagaaagatg

SEQ ID NO: 116896 - DNA, 25 bp, probe
attcttacaccctgtgtaaaatgga

SEQ ID NO: 116897 - DNA, 25 bp, probe
aactaggactcctcctatcaaagcc

SEQ ID NO: 116898 - DNA, 25 bp, probe
aactaggactcctcctatcaaagcc

SEQ ID NO: 116899 - DNA, 25 bp, probe
atacgggttgcctcacgcaaatgta

SEQ ID NO: 116900 - DNA, 25 bp, probe
atacggtttgaacagcatgaaactt

SEQ ID NO: 116901 - DNA, 25 bp, probe
attgggattttacatctggattttt

SEQ ID NO: 116902 - DNA, 25 bp, probe
ataagaaacttccgtctgggcattc

SEQ ID NO: 116903 - DNA, 25 bp, probe
attcggcccttcatcctggagggcc

SEQ ID NO: 116904 - DNA, 25 bp, probe
attcggactcggacctagaggaggc

SEQ ID NO: 116905 - DNA, 25 bp, probe
attccaacctacattagaaggtcta

SEQ ID NO: 116906 - DNA, 25 bp, probe
aagtgcaaagtagattcgtagttag

SEQ ID NO: 116907 - DNA, 25 bp, probe
agggtactatatgtgggtagtattc

SEQ ID NO: 116908 - DNA, 25 bp, probe
agtggtactatgaggtcggggcatt

SEQ ID NO: 116909 - DNA, 25 bp, probe
ataggtcagtgaaagggcaagtagt

SEQ ID NO: 116910 - DNA, 25 bp, probe
ataggtcagtgaaagggcaagtagt

SEQ ID NO: 116911 - DNA, 25 bp, probe
ctcgactcaagaaggttaacatttt

SEQ ID NO: 116912 - DNA, 25 bp, probe
gttagccgatttgtaacctggcatt

SEQ ID NO: 116913 - DNA, 25 bp, probe
agtaccagttctgttaccaggcggc

SEQ ID NO: 116914 - DNA, 25 bp, probe
attacctggctcactaactaacgtg

SEQ ID NO: 116915 - DNA, 25 bp, probe
attcaagtgtgatactaacagtacc

SEQ ID NO: 116916 - DNA, 25 bp, probe
atgcctttgtaggggtcaagttccg

SEQ ID NO: 116917 - DNA, 25 bp, probe
atctgtccagttggggtaggtttgg

SEQ ID NO: 116918 - DNA, 25 bp, probe
attatccggtggctttagccgtgca

SEQ ID NO: 116919 - DNA, 25 bp, probe
actggccacagtatttaaccttgca

SEQ ID NO: 116920 - DNA, 25 bp, probe
actggccacagtatttaaccttgca

SEQ ID NO: 116921 - DNA, 25 bp, probe
attggccaggctgatttcaaacgcc

SEQ ID NO: 116922 - DNA, 25 bp, probe
attggtcattctgcagtgcactgca

SEQ ID NO: 116923 - DNA, 25 bp, probe
attggaattgcttatgaaggaaaag

SEQ ID NO: 116924 - DNA, 25 bp, probe
atagtgctataccaaaagggccaag

SEQ ID NO: 116925 - DNA, 25 bp, probe
atagcgttcaactttgaggcgggtg

SEQ ID NO: 116926 - DNA, 25 bp, probe
attcagttacaggagcgagagcgag

SEQ ID NO: 116927 - DNA, 25 bp, probe
atctcagtaaggtacggagtaactg

SEQ ID NO: 116928 - DNA, 25 bp, probe
attagtaactgagcactagaggact

SEQ ID NO: 116929 - DNA, 25 bp, probe
atctggaacgtcaccttggtcacag

SEQ ID NO: 116930 - DNA, 25 bp, probe
atctggaacgtcaccttggtcacag

SEQ ID NO: 116931 - DNA, 25 bp, probe
attgtacgaacttccaggcctacag

SEQ ID NO: 116932 - DNA, 25 bp, probe
cttgtcaccaacataaccctttatc

SEQ ID NO: 116933 - DNA, 25 bp, probe
ataggaccgatgataatacgttttc

SEQ ID NO: 116934 - DNA, 25 bp, probe
atagccctgcttactaaaagtatta

SEQ ID NO: 116935 - DNA, 25 bp, probe
atatggaatctttctaaccctagct

SEQ ID NO: 116936 - DNA, 25 bp, probe
attggaatagttcaagccgggcgca

SEQ ID NO: 116937 - DNA, 25 bp, probe
atgctgggaagtgctaggcagggct

SEQ ID NO: 116938 - DNA, 25 bp, probe
atcgggaaggagcacaaggggaaat

SEQ ID NO: 116939 - DNA, 25 bp, probe
atcggcccagggcttgggtgtagaa

SEQ ID NO: 116940 - DNA, 25 bp, probe
atcggcccagggcttgggtgtagaa

SEQ ID NO: 116941 - DNA, 25 bp, probe
atcccactcggtgctgttgggtagg

SEQ ID NO: 116942 - DNA, 25 bp, probe
attggccttggtacttatggcagaa

SEQ ID NO: 116943 - DNA, 25 bp, probe
attggccttggtacttatggcagaa

SEQ ID NO: 116944 - DNA, 25 bp, probe
attgtcccagactcgaagccgaggc

SEQ ID NO: 116945 - DNA, 25 bp, probe
attgtcccagactcgaagccgaggc

SEQ ID NO: 116946 - DNA, 25 bp, probe
attgtcccagactcgaagccgaggc

SEQ ID NO: 116947 - DNA, 25 bp, probe
cttggctctggaagaggaaccgggc

SEQ ID NO: 116948 - DNA, 25 bp, probe
attgtggatggcatgggcattacgg

SEQ ID NO: 116949 - DNA, 25 bp, probe
attgtgggattgctagctttccctc

SEQ ID NO: 116950 - DNA, 25 bp, probe
attgtgggattgctagctttccctc

SEQ ID NO: 116951 - DNA, 25 bp, probe
attggaggactcctttgaggccctc

SEQ ID NO: 116952 - DNA, 25 bp, probe
attggaggactcctttgaggccctc

SEQ ID NO: 116953 - DNA, 25 bp, probe
attggggactttgggatggcacgag

SEQ ID NO: 116954 - DNA, 25 bp, probe
atcggatacacacttgggatcccgg

SEQ ID NO: 116955 - DNA, 25 bp, probe
ataggaaaccctccagattacaggg

SEQ ID NO: 116956 - DNA, 25 bp, probe
atagcaaagccatcagccaagataa

SEQ ID NO: 116957 - DNA, 25 bp, probe
atatgaactgcctgacaaagaattc

SEQ ID NO: 116958 - DNA, 25 bp, probe
cttggcccaagtttatggcctggag

SEQ ID NO: 116959 - DNA, 25 bp, probe
gttggattccatcgtttggtttagc

SEQ ID NO: 116960 - DNA, 25 bp, probe
agtagtgggtcgtcttgtttctagc

SEQ ID NO: 116961 - DNA, 25 bp, probe
agtagtgggtcgtcttgtttctagc

SEQ ID NO: 116962 - DNA, 25 bp, probe
aggccagtggggtctggtttgcaaa

SEQ ID NO: 116963 - DNA, 25 bp, probe
aggaatgtctgggaagttactctca

SEQ ID NO: 116964 - DNA, 25 bp, probe
agtgaacttggagcaggtccaccgg

SEQ ID NO: 116965 - DNA, 25 bp, probe
atggtacgtaatgagttcccctgag

SEQ ID NO: 116966 - DNA, 25 bp, probe
atcgaccatggatggtttcctccaa

SEQ ID NO: 116967 - DNA, 25 bp, probe
atcgaccatggatggtttcctccaa

SEQ ID NO: 116968 - DNA, 25 bp, probe
atcgaatctgggtgtttcaaagaca

SEQ ID NO: 116969 - DNA, 25 bp, probe
aggatacggacctcttaaagcacac

SEQ ID NO: 116970 - DNA, 25 bp, probe
aggataaattccgcttagacctgtc

SEQ ID NO: 116971 - DNA, 25 bp, probe
aagctatagttctctttagccccga

SEQ ID NO: 116972 - DNA, 25 bp, probe
tgacctataacctgtaggaaaccga

SEQ ID NO: 116973 - DNA, 25 bp, probe
tgacctataacctgtaggaaaccga

SEQ ID NO: 116974 - DNA, 25 bp, probe
atgccccagacgaggaggacaaccc

SEQ ID NO: 116975 - DNA, 25 bp, probe
atccaccccggatgggaaagccagc

SEQ ID NO: 116976 - DNA, 25 bp, probe
atccaccccggatgggaaagccagc

SEQ ID NO: 116977 - DNA, 25 bp, probe
acgaccctcggcagggagataccgt

SEQ ID NO: 116978 - DNA, 25 bp, probe
atctaccgggccagttattaccgca

SEQ ID NO: 116979 - DNA, 25 bp, probe
atcctccgttcctggtgtataacaa

SEQ ID NO: 116980 - DNA, 25 bp, probe
atcctccgttcctggtgtataacaa

SEQ ID NO: 116981 - DNA, 25 bp, probe
gaggaccgtttctgttgcaaagtaa

SEQ ID NO: 116982 - DNA, 25 bp, probe
acgactacggtctggacaactttga

SEQ ID NO: 116983 - DNA, 25 bp, probe
ccagaccgagttggggccaactttg

SEQ ID NO: 116984 - DNA, 25 bp, probe
cgcccagtactacgggtacctgtgg

SEQ ID NO: 116985 - DNA, 25 bp, probe
cgcccagtactacgggtacctgtgg

SEQ ID NO: 116986 - DNA, 25 bp, probe
acctcaggggacaggtacctggtgt

SEQ ID NO: 116987 - DNA, 25 bp, probe
acctcaggggacaggtacctggtgt

SEQ ID NO: 116988 - DNA, 25 bp, probe
atgggttggggcagttacctggttg

SEQ ID NO: 116989 - DNA, 25 bp, probe
aggaaacggaggcttcacctggtgt

SEQ ID NO: 116990 - DNA, 25 bp, probe
aggtcaagtgggtgttcacctggcc

SEQ ID NO: 116991 - DNA, 25 bp, probe
aactaaatgtagagcttccctgccc

SEQ ID NO: 116992 - DNA, 25 bp, probe
aaattaaattgagtgttcaaagcca

SEQ ID NO: 116993 - DNA, 25 bp, probe
aagaattatgttctttccaaccctg

SEQ ID NO: 116994 - DNA, 25 bp, probe
acagattaacctgttcccaactcct

SEQ ID NO: 116995 - DNA, 25 bp, probe
acagattaacctgttcccaactcct

SEQ ID NO: 116996 - DNA, 25 bp, probe
accattcaacttagttcccaaaatg

SEQ ID NO: 116997 - DNA, 25 bp, probe
acctttccaactggatcccaaacat

SEQ ID NO: 116998 - DNA, 25 bp, probe
acctaccgctacagcaaccgatatt

SEQ ID NO: 116999 - DNA, 25 bp, probe
ccttccctgtacaccaaggtggtgc

SEQ ID NO: 117000 - DNA, 25 bp, probe
cgctaccacgaagacattttcgggc

SEQ ID NO: 117001 - DNA, 25 bp, probe
ctctgaaaaacagcctttagggact

SEQ ID NO: 117002 - DNA, 25 bp, probe
gcctttaagggtgatttggggatgc

SEQ ID NO: 117003 - DNA, 25 bp, probe
gcctttaagggtgatttggggatgc

SEQ ID NO: 117004 - DNA, 25 bp, probe
gttgtttcacatctggttagggggc

SEQ ID NO: 117005 - DNA, 25 bp, probe
atagcaggttcctggtttgggggct

SEQ ID NO: 117006 - DNA, 25 bp, probe
atagcaggttcctggtttgggggct

SEQ ID NO: 117007 - DNA, 25 bp, probe
atacaacttcccacaggtgggccgc

SEQ ID NO: 117008 - DNA, 25 bp, probe
atctaacttcccagggggcaggcac

SEQ ID NO: 117009 - DNA, 25 bp, probe
gagtacaaggccacgggggggccag

SEQ ID NO: 117010 - DNA, 25 bp, probe
acaaaacagccagcgggcgggaact

SEQ ID NO: 117011 - DNA, 25 bp, probe
aaataccccaccagaatgtcacaat

SEQ ID NO: 117012 - DNA, 25 bp, probe
attaaccacgcacccaggttagact

SEQ ID NO: 117013 - DNA, 25 bp, probe
attgacgcgacgctcacaggagggc

SEQ ID NO: 117014 - DNA, 25 bp, probe
attgacagggatcacactggggcct

SEQ ID NO: 117015 - DNA, 25 bp, probe
atacgctggagtccacgtgaggcct

SEQ ID NO: 117016 - DNA, 25 bp, probe
atcacctggtggaggtaccgttggt

SEQ ID NO: 117017 - DNA, 25 bp, probe
attcctggattaaggcgatccggcg

SEQ ID NO: 117018 - DNA, 25 bp, probe
attcctgggaacctaacgaggagag

SEQ ID NO: 117019 - DNA, 25 bp, probe
atccccctaagagtcaccgaggagg

SEQ ID NO: 117020 - DNA, 25 bp, probe
atccccctaagagtcaccgaggagg

SEQ ID NO: 117021 - DNA, 25 bp, probe
ccccctaagagtcaccgaggaggct

SEQ ID NO: 117022 - DNA, 25 bp, probe
ctcccctaaactgactggacggctg

SEQ ID NO: 117023 - DNA, 25 bp, probe
ctcacggtaaaaataggtgactttg

SEQ ID NO: 117024 - DNA, 25 bp, probe
ctactgggacatgttaggcccttgt

SEQ ID NO: 117025 - DNA, 25 bp, probe
ctttgaacctttggaggccgttgat

SEQ ID NO: 117026 - DNA, 25 bp, probe
ttcgtcccctttgcagggagttaca

SEQ ID NO: 117027 - DNA, 25 bp, probe
atcttccccaagtgcggggagtaca

SEQ ID NO: 117028 - DNA, 25 bp, probe
acttcagcccacgcgggaagttcaa

SEQ ID NO: 117029 - DNA, 25 bp, probe
cacttaggcccctgggacaatgacc

SEQ ID NO: 117030 - DNA, 25 bp, probe
actttgggcccagaaactcaaccat

SEQ ID NO: 117031 - DNA, 25 bp, probe
actttgggtactgcgacctcaacta

SEQ ID NO: 117032 - DNA, 25 bp, probe
agttggggccactgaactccaagat

SEQ ID NO: 117033 - DNA, 25 bp, probe
atttggagtcccttgaatcaaccag

SEQ ID NO: 117034 - DNA, 25 bp, probe
atttgctcggcttttgactggaccg

SEQ ID NO: 117035 - DNA, 25 bp, probe
attactaggatatgtgacgcagcca

SEQ ID NO: 117036 - DNA, 25 bp, probe
aggcctacgaattggccgactacag

SEQ ID NO: 117037 - DNA, 25 bp, probe
aggcccaccgaagggtactgaagag

SEQ ID NO: 117038 - DNA, 25 bp, probe
ataacttcctgatgggtactgggcg

SEQ ID NO: 117039 - DNA, 25 bp, probe
atgaacgaaaacaggtgactttgga

SEQ ID NO: 117040 - DNA, 25 bp, probe
atgaacgaaaacaggtgactttgga

SEQ ID NO: 117041 - DNA, 25 bp, probe
atccgacccaacagcggcttttggg

SEQ ID NO: 117042 - DNA, 25 bp, probe
agttacaccaatctgaagtttatgg

SEQ ID NO: 117043 - DNA, 25 bp, probe
agctcctaccaacgtcggtaacttg

SEQ ID NO: 117044 - DNA, 25 bp, probe
actccaacgaagtggttaccttgtg

SEQ ID NO: 117045 - DNA, 25 bp, probe
actccaacgaagtggttaccttgtg

SEQ ID NO: 117046 - DNA, 25 bp, probe
actccaaggttctggaggcccattt

SEQ ID NO: 117047 - DNA, 25 bp, probe
atcccaaccttctggaccagtaggt

SEQ ID NO: 117048 - DNA, 25 bp, probe
atcccaaaccagtggcaaagttgtg

SEQ ID NO: 117049 - DNA, 25 bp, probe
atcccaaaccagtggcaaagttgtg

SEQ ID NO: 117050 - DNA, 25 bp, probe
cttccaatacgacagccgaactctg

SEQ ID NO: 117051 - DNA, 25 bp, probe
attccaatgtcatgacgtcaaactt

SEQ ID NO: 117052 - DNA, 25 bp, probe
attggccttaagtgtctagagcatc

SEQ ID NO: 117053 - DNA, 25 bp, probe
attggccttctacagctattactga

SEQ ID NO: 117054 - DNA, 25 bp, probe
cttggcctatccggcgcagtaatta

SEQ ID NO: 117055 - DNA, 25 bp, probe
attagcactagcctccaggttttac

SEQ ID NO: 117056 - DNA, 25 bp, probe
attagacactggaggtttttaacag

SEQ ID NO: 117057 - DNA, 25 bp, probe
aaatgagactatgcgtttttataaa

SEQ ID NO: 117058 - DNA, 25 bp, probe
aaatgagactatgcgtttttataaa

SEQ ID NO: 117059 - DNA, 25 bp, probe
ataggcacagtagcccttctggtag

SEQ ID NO: 117060 - DNA, 25 bp, probe
accctcgtagatgccctttgtagga

SEQ ID NO: 117061 - DNA, 25 bp, probe
cgaggtcaggagatcgacaccatcc

SEQ ID NO: 117062 - DNA, 25 bp, probe
cagttggctaagagaggtttccgaa

SEQ ID NO: 117063 - DNA, 25 bp, probe
cagtggacttaatcggttgacccta

SEQ ID NO: 117064 - DNA, 25 bp, probe
atgtggcccttatgggtggttccca

SEQ ID NO: 117065 - DNA, 25 bp, probe
aggaccctctgatgggacggtactg

SEQ ID NO: 117066 - DNA, 25 bp, probe
aggactcctcgatggtcgtggaaaa

SEQ ID NO: 117067 - DNA, 25 bp, probe
aggccagagccgtgttagtgtgaac

SEQ ID NO: 117068 - DNA, 25 bp, probe
attgccaggaagtctttacctaagg

SEQ ID NO: 117069 - DNA, 25 bp, probe
attacaagccaagtttccccaagtg

SEQ ID NO: 117070 - DNA, 25 bp, probe
atagatcaaccaattcctacagccc

SEQ ID NO: 117071 - DNA, 25 bp, probe
atatagcaatggcacgtcaaacccc

SEQ ID NO: 117072 - DNA, 25 bp, probe
atataaatgggcttcccacccacaa

SEQ ID NO: 117073 - DNA, 25 bp, probe
attaacggtggagaacccagctgag

SEQ ID NO: 117074 - DNA, 25 bp, probe
atgaccaacgggaaaaagccagtct

SEQ ID NO: 117075 - DNA, 25 bp, probe
attgacaacgtgaaaacttacaggt

SEQ ID NO: 117076 - DNA, 25 bp, probe
attgacaacgtgaaaacttacaggt

SEQ ID NO: 117077 - DNA, 25 bp, probe
atcttcacctttgaccgtacaggta

SEQ ID NO: 117078 - DNA, 25 bp, probe
actggccctacggctcgggccagtg

SEQ ID NO: 117079 - DNA, 25 bp, probe
actaacgccactgatggcggccgtc

SEQ ID NO: 117080 - DNA, 25 bp, probe
attacagcccttgagcgtggttatc

SEQ ID NO: 117081 - DNA, 25 bp, probe
attgacatgggcatcaacactttta

SEQ ID NO: 117082 - DNA, 25 bp, probe
attgcaatagtgaggcagactttca

SEQ ID NO: 117083 - DNA, 25 bp, probe
attgccgtgttggccagactggtct

SEQ ID NO: 117084 - DNA, 25 bp, probe
aggcccttatgacatggtgttccaa

SEQ ID NO: 117085 - DNA, 25 bp, probe
agcacgttcaattcctggtttacca

SEQ ID NO: 117086 - DNA, 25 bp, probe
aacgtacggctcctggtttacagag

SEQ ID NO: 117087 - DNA, 25 bp, probe
aacgtacggctcctggtttacagag

SEQ ID NO: 117088 - DNA, 25 bp, probe
agtcttaccagtgctggtttaaaca

SEQ ID NO: 117089 - DNA, 25 bp, probe
cttccaaacagctgggtttaaatat

SEQ ID NO: 117090 - DNA, 25 bp, probe
cttcaagttaccatattttccaaat

SEQ ID NO: 117091 - DNA, 25 bp, probe
ataaagtactccatgtttgggaaat

SEQ ID NO: 117092 - DNA, 25 bp, probe
attccaagccttattttgagtaaat

SEQ ID NO: 117093 - DNA, 25 bp, probe
attcgaaggcttatgggtctccaga

SEQ ID NO: 117094 - DNA, 25 bp, probe
attcgaaggcttatgggtctccaga

SEQ ID NO: 117095 - DNA, 25 bp, probe
attggcaactgtgttacctttcaag

SEQ ID NO: 117096 - DNA, 25 bp, probe
attgcagaaggtgttcctttctcac

SEQ ID NO: 117097 - DNA, 25 bp, probe
attgcagaaggtgttcctttctcac

SEQ ID NO: 117098 - DNA, 25 bp, probe
attggacaagttatgcctaatagca

SEQ ID NO: 117099 - DNA, 25 bp, probe
attggacaagttatgcctaatagca

SEQ ID NO: 117100 - DNA, 25 bp, probe
atcttacgaggcttgccctacaacc

SEQ ID NO: 117101 - DNA, 25 bp, probe
atcttatggaactctttagaattgg

SEQ ID NO: 117102 - DNA, 25 bp, probe
atttgggatactgttctgggggagg

SEQ ID NO: 117103 - DNA, 25 bp, probe
attgtggttactgttctacggtctt

SEQ ID NO: 117104 - DNA, 25 bp, probe
attgtgtacttagctttttcctctc

SEQ ID NO: 117105 - DNA, 25 bp, probe
attggtatatttgtaaagcgcctta

SEQ ID NO: 117106 - DNA, 25 bp, probe
atcggtttctgtatgcgaagttgct

SEQ ID NO: 117107 - DNA, 25 bp, probe
agactgtccctgaaacctagtactg

SEQ ID NO: 117108 - DNA, 25 bp, probe
gagtttcccattaggcccattaggg

SEQ ID NO: 117109 - DNA, 25 bp, probe
attgtttggaatgggccgttaggag

SEQ ID NO: 117110 - DNA, 25 bp, probe
atgggttggaaagcctcttcgagca

SEQ ID NO: 117111 - DNA, 25 bp, probe
attgtccggagatacctactcaggc

SEQ ID NO: 117112 - DNA, 25 bp, probe
attggcgggaatcacctgaaacagc

SEQ ID NO: 117113 - DNA, 25 bp, probe
attccgaggggcacatcaaaatcgc

SEQ ID NO: 117114 - DNA, 25 bp, probe
attcacgagcatcgatgcacacaat

SEQ ID NO: 117115 - DNA, 25 bp, probe
attgagagagaggatgtgccatcat

SEQ ID NO: 117116 - DNA, 25 bp, probe
attgtattgaggacatggcatttga

SEQ ID NO: 117117 - DNA, 25 bp, probe
attgtattgaggacatggcatttga

SEQ ID NO: 117118 - DNA, 25 bp, probe
attccattcagtgctgccttcactg

SEQ ID NO: 117119 - DNA, 25 bp, probe
attggcttctgtgggccagtgggga

SEQ ID NO: 117120 - DNA, 25 bp, probe
attggctctggggcccaagggattg

SEQ ID NO: 117121 - DNA, 25 bp, probe
attggctttggggactatgttgttg

SEQ ID NO: 117122 - DNA, 25 bp, probe
attggtttgagtgccctttgctatt

SEQ ID NO: 117123 - DNA, 25 bp, probe
attggtgttggtggctctgtttgcc

SEQ ID NO: 117124 - DNA, 25 bp, probe
attgtttatcttggtcttttggatt

SEQ ID NO: 117125 - DNA, 25 bp, probe
attgtttatcttggtcttttggatt

SEQ ID NO: 117126 - DNA, 25 bp, probe
attgttccttatatcgttaaatctt

SEQ ID NO: 117127 - DNA, 25 bp, probe
aggtcctatacaagtcagttaagga

SEQ ID NO: 117128 - DNA, 25 bp, probe
attggtgattacagtagcactttgg

SEQ ID NO: 117129 - DNA, 25 bp, probe
attgtgtgttttgtgtactcctgtg

SEQ ID NO: 117130 - DNA, 25 bp, probe
atagtgggtttacatactcaactcc

SEQ ID NO: 117131 - DNA, 25 bp, probe
attgatgatgaaattacagaagcca

SEQ ID NO: 117132 - DNA, 25 bp, probe
attggattttgtcgcagtcacgatc

SEQ ID NO: 117133 - DNA, 25 bp, probe
attggaagctccacattggcactct

SEQ ID NO: 117134 - DNA, 25 bp, probe
attgtgacacggcctttggcctttc

SEQ ID NO: 117135 - DNA, 25 bp, probe
attgtggccagtttagagttctatt

SEQ ID NO: 117136 - DNA, 25 bp, probe
attgtggccagtttagagttctatt

SEQ ID NO: 117137 - DNA, 25 bp, probe
attgatgcctttgctcaggtctttc

SEQ ID NO: 117138 - DNA, 25 bp, probe
attgtgcttccaggcaagaactttg

SEQ ID NO: 117139 - DNA, 25 bp, probe
attggccatacagggaggttcattg

SEQ ID NO: 117140 - DNA, 25 bp, probe
attgggcatccaacaaagttatgtt

SEQ ID NO: 117141 - DNA, 25 bp, probe
attgggcatccaacaaagttatgtt

SEQ ID NO: 117142 - DNA, 25 bp, probe
attggactccctggtggttgagttt

SEQ ID NO: 117143 - DNA, 25 bp, probe
attgtcactcccaaggctgattgac

SEQ ID NO: 117144 - DNA, 25 bp, probe
attggcatgatgctcaccttcaatg

SEQ ID NO: 117145 - DNA, 25 bp, probe
attggcatgactcctcttatgaggg

SEQ ID NO: 117146 - DNA, 25 bp, probe
atcagggactggcttaggtgtctcc

SEQ ID NO: 117147 - DNA, 25 bp, probe
cattgaggaaggctatcggttaccc

SEQ ID NO: 117148 - DNA, 25 bp, probe
attggtacaagggatcagcttttcc

SEQ ID NO: 117149 - DNA, 25 bp, probe
attggtaaacagttggttgttctgg

SEQ ID NO: 117150 - DNA, 25 bp, probe
attggtgagcacctttgcattatgt

SEQ ID NO: 117151 - DNA, 25 bp, probe
attgtaagagttctgtcatgcagtc

SEQ ID NO: 117152 - DNA, 25 bp, probe
attgtaacaggaatgcttctctgtc

SEQ ID NO: 117153 - DNA, 25 bp, probe
agggaacaagacacggctgggttgg

SEQ ID NO: 117154 - DNA, 25 bp, probe
aagagaaaagccacggaccgttgca

SEQ ID NO: 117155 - DNA, 25 bp, probe
agagataaacggcacggcgctttta

SEQ ID NO: 117156 - DNA, 25 bp, probe
agagataaacggcacggcgctttta

SEQ ID NO: 117157 - DNA, 25 bp, probe
attataaccgagggctggcgttttg

SEQ ID NO: 117158 - DNA, 25 bp, probe
atgtttgaccgctccgaggtctatg

SEQ ID NO: 117159 - DNA, 25 bp, probe
attttggttttgcccggatcattgg

SEQ ID NO: 117160 - DNA, 25 bp, probe
attgttttttagccatagaatcttc

SEQ ID NO: 117161 - DNA, 25 bp, probe
attagtcttggttctgaaacttctc

SEQ ID NO: 117162 - DNA, 25 bp, probe
atagctgttcggattgagaactctt

SEQ ID NO: 117163 - DNA, 25 bp, probe
atatgtcaacggtggggacctcatg

SEQ ID NO: 117164 - DNA, 25 bp, probe
attggatactctgtaagtaggaggt

SEQ ID NO: 117165 - DNA, 25 bp, probe
attgtgtggcctggtgggtcagggg

SEQ ID NO: 117166 - DNA, 25 bp, probe
attggacagcgaggctgtgcccagg

SEQ ID NO: 117167 - DNA, 25 bp, probe
attgtacatgtgctcagactccacc

SEQ ID NO: 117168 - DNA, 25 bp, probe
attgtacatgtgctcagactccacc

SEQ ID NO: 117169 - DNA, 25 bp, probe
attgtgaccctggcagaacaaccct

SEQ ID NO: 117170 - DNA, 25 bp, probe
attgttagcttaggaggcacaccct

SEQ ID NO: 117171 - DNA, 25 bp, probe
atggagggtatctggatcaacccga

SEQ ID NO: 117172 - DNA, 25 bp, probe
attagaggtccttgagtagaaccaa

SEQ ID NO: 117173 - DNA, 25 bp, probe
attgggattcctttggtaactgcca

SEQ ID NO: 117174 - DNA, 25 bp, probe
attggtggtcctttggagttctgct

SEQ ID NO: 117175 - DNA, 25 bp, probe
attggtggttttaggtgtgcatcgc

SEQ ID NO: 117176 - DNA, 25 bp, probe
attgcttgaggattttggcttctag

SEQ ID NO: 117177 - DNA, 25 bp, probe
attgcaatgatcaacagttcactcc

SEQ ID NO: 117178 - DNA, 25 bp, probe
attgatattctactggccatgatgc

SEQ ID NO: 117179 - DNA, 25 bp, probe
attgaccagctgaagcgcatcatgg

SEQ ID NO: 117180 - DNA, 25 bp, probe
attcgctcgcaaagacttgcgccat

SEQ ID NO: 117181 - DNA, 25 bp, probe
attcgctcgcaaagacttgcgccat

SEQ ID NO: 117182 - DNA, 25 bp, probe
attgtagcgaaggcactgggtgcac

SEQ ID NO: 117183 - DNA, 25 bp, probe
attgcatatgggaccctggactccg

SEQ ID NO: 117184 - DNA, 25 bp, probe
attacagttgacgcggccggcgaat

SEQ ID NO: 117185 - DNA, 25 bp, probe
attaagttttcctctgtgcaaattt

SEQ ID NO: 117186 - DNA, 25 bp, probe
atgtaactttactccctcaatatgt

SEQ ID NO: 117187 - DNA, 25 bp, probe
agtaccttaagcaccgcaatatcgt

SEQ ID NO: 117188 - DNA, 25 bp, probe
agtcaccgaaagagagcgcctatct

SEQ ID NO: 117189 - DNA, 25 bp, probe
agtaagcgaaagagccggcctgtga

SEQ ID NO: 117190 - DNA, 25 bp, probe
attagagataaacggcacggcgctt

SEQ ID NO: 117191 - DNA, 25 bp, probe
attagagataaacggcacggcgctt

SEQ ID NO: 117192 - DNA, 25 bp, probe
attggtgaagaattggtgaggctgt

SEQ ID NO: 117193 - DNA, 25 bp, probe
attggatacagatatgaacgtgcat

SEQ ID NO: 117194 - DNA, 25 bp, probe
attggagacatatagctcagatgga

SEQ ID NO: 117195 - DNA, 25 bp, probe
attggagtctaatctttcaaggagg

SEQ ID NO: 117196 - DNA, 25 bp, probe
attgttgtctttgctttcggagtgg

SEQ ID NO: 117197 - DNA, 25 bp, probe
attttattgactgcgtcagggaagg

SEQ ID NO: 117198 - DNA, 25 bp, probe
atttgaatttgatcttagggaatgg

SEQ ID NO: 117199 - DNA, 25 bp, probe
attctgaatattaacggtggtgaaa

SEQ ID NO: 117200 - DNA, 25 bp, probe
attgtgttttattcgtgtcccatag

SEQ ID NO: 117201 - DNA, 25 bp, probe
atatggttcaatttacgactgccta

SEQ ID NO: 117202 - DNA, 25 bp, probe
attggattcaactttagtcctctcc

SEQ ID NO: 117203 - DNA, 25 bp, probe
attggagaaggcttgtattagtccc

SEQ ID NO: 117204 - DNA, 25 bp, probe
attggacgagactttgttggacaaa

SEQ ID NO: 117205 - DNA, 25 bp, probe
attggacttccttggtttggacaca

SEQ ID NO: 117206 - DNA, 25 bp, probe
ataagccacctctgtaatcggatcc

SEQ ID NO: 117207 - DNA, 25 bp, probe
attacccactcactaacttggacct

SEQ ID NO: 117208 - DNA, 25 bp, probe
attaatgacgccttcaacctggcca

SEQ ID NO: 117209 - DNA, 25 bp, probe
attagtcattgcgggaccgcgtgga

SEQ ID NO: 117210 - DNA, 25 bp, probe
attgaggttaggaacccggcatgcc

SEQ ID NO: 117211 - DNA, 25 bp, probe
attgatggttagcgaggccgtgcag

SEQ ID NO: 117212 - DNA, 25 bp, probe
attgtgggtctgagatgccctttga

SEQ ID NO: 117213 - DNA, 25 bp, probe
attcggccttatacatctggtctta

SEQ ID NO: 117214 - DNA, 25 bp, probe
ctttccacttaaacgtgtcccatga

SEQ ID NO: 117215 - DNA, 25 bp, probe
attcccagttaaaaggctccagaat

SEQ ID NO: 117216 - DNA, 25 bp, probe
attgcgaagtctagaaaggctaaaa

SEQ ID NO: 117217 - DNA, 25 bp, probe
attgagaagagtaaaagtccaccag

SEQ ID NO: 117218 - DNA, 25 bp, probe
ataggtaggtagctagtcacacttt

SEQ ID NO: 117219 - DNA, 25 bp, probe
attgttcaagtagccccagatttag

SEQ ID NO: 117220 - DNA, 25 bp, probe
attgttcaagtagccccagatttag

SEQ ID NO: 117221 - DNA, 25 bp, probe
atatattacagtcaccccataaaaa

SEQ ID NO: 117222 - DNA, 25 bp, probe
attcataacgtgtatctttaagaaa

SEQ ID NO: 117223 - DNA, 25 bp, probe
attgctgacacatgagactaacacg

SEQ ID NO: 117224 - DNA, 25 bp, probe
attgctggcaactgacttgtcatta

SEQ ID NO: 117225 - DNA, 25 bp, probe
attgctggcaactgacttgtcatta

SEQ ID NO: 117226 - DNA, 25 bp, probe
attgtggaatcatcatcgcccagga

SEQ ID NO: 117227 - DNA, 25 bp, probe
attggagaggatgccgcctgcatcg

SEQ ID NO: 117228 - DNA, 25 bp, probe
attggagaggatgccgcctgcatcg

SEQ ID NO: 117229 - DNA, 25 bp, probe
attggagaggatgccgcctgcatcg

SEQ ID NO: 117230 - DNA, 25 bp, probe
attggagaggatgccgcctgcatcg

SEQ ID NO: 117231 - DNA, 25 bp, probe
attggagaggatgccgcctgcatcg

SEQ ID NO: 117232 - DNA, 25 bp, probe
attggaggttgctgacctgtgcgat

SEQ ID NO: 117233 - DNA, 25 bp, probe
attcttggtctctgaacttggcgtc

SEQ ID NO: 117234 - DNA, 25 bp, probe
attggtgagttcagtagctttggta

SEQ ID NO: 117235 - DNA, 25 bp, probe
attggggttggtgaatttggtacag

SEQ ID NO: 117236 - DNA, 25 bp, probe
attggggttggtgaatttggtacag

SEQ ID NO: 117237 - DNA, 25 bp, probe
attggctggagtggctgggtttggc

SEQ ID NO: 117238 - DNA, 25 bp, probe
attggctggagtggctgggtttggc

SEQ ID NO: 117239 - DNA, 25 bp, probe
attgggaagggcacctgtgctggtt

SEQ ID NO: 117240 - DNA, 25 bp, probe
attgtaaattgacacgtgtttggtc

SEQ ID NO: 117241 - DNA, 25 bp, probe
attgttgtttgccatactttgtctg

SEQ ID NO: 117242 - DNA, 25 bp, probe
attgatgctatctcctaattacttg

SEQ ID NO: 117243 - DNA, 25 bp, probe
attggcaaatgccctgtcttactgt

SEQ ID NO: 117244 - DNA, 25 bp, probe
attgtcatatacccggttcagcctg

SEQ ID NO: 117245 - DNA, 25 bp, probe
attgcattagagcacggagtccgtc

SEQ ID NO: 117246 - DNA, 25 bp, probe
attgttgccaggggtgaggccgtgc

SEQ ID NO: 117247 - DNA, 25 bp, probe
attgttgccaaagagatgtaaagtt

SEQ ID NO: 117248 - DNA, 25 bp, probe
attgtgtcagattaccagttatagg

SEQ ID NO: 117249 - DNA, 25 bp, probe
attgcctgctcattagcctgttgat

SEQ ID NO: 117250 - DNA, 25 bp, probe
attgcccttattgtttttgcctaca

SEQ ID NO: 117251 - DNA, 25 bp, probe
attgcacggtcaaaattattaccaa

SEQ ID NO: 117252 - DNA, 25 bp, probe
attgacatggttctatattttatta

SEQ ID NO: 117253 - DNA, 25 bp, probe
attgatagcttacttttttctcata

SEQ ID NO: 117254 - DNA, 25 bp, probe
attgatagcttacttttttctcata

SEQ ID NO: 117255 - DNA, 25 bp, probe
attgtcccatttattgtgtcactga

SEQ ID NO: 117256 - DNA, 25 bp, probe
attggatcttttagtgtggctccgg

SEQ ID NO: 117257 - DNA, 25 bp, probe
attggatcttttagtgtggctccgg

SEQ ID NO: 117258 - DNA, 25 bp, probe
attgaaataatgcggggtctgcggc

SEQ ID NO: 117259 - DNA, 25 bp, probe
attgaaatcgcttgaccggtcttgt

SEQ ID NO: 117260 - DNA, 25 bp, probe
attgtgaccagcagcaggctttttt

SEQ ID NO: 117261 - DNA, 25 bp, probe
attccaccgaggccctggataatgt

SEQ ID NO: 117262 - DNA, 25 bp, probe
attccaatccagggcgggatcctga

SEQ ID NO: 117263 - DNA, 25 bp, probe
attctgcacctcaaaggggatccct

SEQ ID NO: 117264 - DNA, 25 bp, probe
atgaccccttacgtggtgacacggt

SEQ ID NO: 117265 - DNA, 25 bp, probe
ataccccattgaaatcgtgccaggg

SEQ ID NO: 117266 - DNA, 25 bp, probe
ataccccattgaaatcgtgccaggg

SEQ ID NO: 117267 - DNA, 25 bp, probe
ataccccattgaaatcgtgccaggg

SEQ ID NO: 117268 - DNA, 25 bp, probe
atatcgcccctgagatcctacaggg

SEQ ID NO: 117269 - DNA, 25 bp, probe
attcgccggggatgttggcaggatg

SEQ ID NO: 117270 - DNA, 25 bp, probe
attaggccttgggcaggggcaggga

SEQ ID NO: 117271 - DNA, 25 bp, probe
attaggccttgggcaggggcaggga

SEQ ID NO: 117272 - DNA, 25 bp, probe
attagctgggtgtggtggtgggggt

SEQ ID NO: 117273 - DNA, 25 bp, probe
attcattcggtatggttttccctgt

SEQ ID NO: 117274 - DNA, 25 bp, probe
attccaagcccagggtttggctcct

SEQ ID NO: 117275 - DNA, 25 bp, probe
attccaagcccagggtttggctcct

SEQ ID NO: 117276 - DNA, 25 bp, probe
attccccagcttgggaaatagccct

SEQ ID NO: 117277 - DNA, 25 bp, probe
attcccgactgtggcggttagcatt

SEQ ID NO: 117278 - DNA, 25 bp, probe
attcctgtgcacccggggtgacaag

SEQ ID NO: 117279 - DNA, 25 bp, probe
attccagaaacatatgggctgataa

SEQ ID NO: 117280 - DNA, 25 bp, probe
attggaataactcacagggatatta

SEQ ID NO: 117281 - DNA, 25 bp, probe
atatgtgccattgttacaggagatt

SEQ ID NO: 117282 - DNA, 25 bp, probe
ataggccttatgatatgcacgaatt

SEQ ID NO: 117283 - DNA, 25 bp, probe
attggcactgtccgatatgccagca

SEQ ID NO: 117284 - DNA, 25 bp, probe
attggcatctaccggacagagagcc

SEQ ID NO: 117285 - DNA, 25 bp, probe
attggcatctaccggacagagagcc

SEQ ID NO: 117286 - DNA, 25 bp, probe
attggttcagcaagagaggcagacc

SEQ ID NO: 117287 - DNA, 25 bp, probe
attgtgctgtgggcgtgagccgatc

SEQ ID NO: 117288 - DNA, 25 bp, probe
attgtgctgtgggcgtgagccgatc

SEQ ID NO: 117289 - DNA, 25 bp, probe
attgtgctgtgggcgtgagccgatc

SEQ ID NO: 117290 - DNA, 25 bp, probe
attgtgctgtgggcgtgagccgatc

SEQ ID NO: 117291 - DNA, 25 bp, probe
attgtgctgtgggcgtgagccgatc

SEQ ID NO: 117292 - DNA, 25 bp, probe
attagaagcctcgtaccaatcatct

SEQ ID NO: 117293 - DNA, 25 bp, probe
atatgcaagactctcaaggagtact

SEQ ID NO: 117294 - DNA, 25 bp, probe
attgctgaactgttcttcaggccca

SEQ ID NO: 117295 - DNA, 25 bp, probe
attgtgacttggctcaagcgccact

SEQ ID NO: 117296 - DNA, 25 bp, probe
attgttctttcgtcagaagcctttt

SEQ ID NO: 117297 - DNA, 25 bp, probe
attgtacaatacttcagactgtttt

SEQ ID NO: 117298 - DNA, 25 bp, probe
attgtcgcaagtcacagaattattt

SEQ ID NO: 117299 - DNA, 25 bp, probe
atctccgccaggctaaaagccttgg

SEQ ID NO: 117300 - DNA, 25 bp, probe
attcaccacagtgcatcaaaaccct

SEQ ID NO: 117301 - DNA, 25 bp, probe
attcaagacagtccaacaactccca

SEQ ID NO: 117302 - DNA, 25 bp, probe
atacaagggtactctattccttata

SEQ ID NO: 117303 - DNA, 25 bp, probe
attccaaagtctctaattctattaa

SEQ ID NO: 117304 - DNA, 25 bp, probe
attccaaagtctctaattctattaa

SEQ ID NO: 117305 - DNA, 25 bp, probe
attccaaacctctgctagttcagat

SEQ ID NO: 117306 - DNA, 25 bp, probe
attccttcacctttgaacttcgaga

SEQ ID NO: 117307 - DNA, 25 bp, probe
attccggatcttcaaactctccagg

SEQ ID NO: 117308 - DNA, 25 bp, probe
attccggttatttaagtcatttctg

SEQ ID NO: 117309 - DNA, 25 bp, probe
attccggttatttaagtcatttctg

SEQ ID NO: 117310 - DNA, 25 bp, probe
attcttcacttcttggggttttcag

SEQ ID NO: 117311 - DNA, 25 bp, probe
attgttatctccttttggcttatgt

SEQ ID NO: 117312 - DNA, 25 bp, probe
attggatactcctcttatttattat

SEQ ID NO: 117313 - DNA, 25 bp, probe
attggatactcctcttatttattat

SEQ ID NO: 117314 - DNA, 25 bp, probe
attggaagctgcgctcgattctatt

SEQ ID NO: 117315 - DNA, 25 bp, probe
attggaagtgctgtatttaagatca

SEQ ID NO: 117316 - DNA, 25 bp, probe
attgtgcaagcttttcctaataaac

SEQ ID NO: 117317 - DNA, 25 bp, probe
attgatgcagtcttctattctaaaa

SEQ ID NO: 117318 - DNA, 25 bp, probe
attgaagcatttgtgtcggttaaaa

SEQ ID NO: 117319 - DNA, 25 bp, probe
attgaagcatttgtgtcggttaaaa

SEQ ID NO: 117320 - DNA, 25 bp, probe
attacatcgttcatccggtggaaac

SEQ ID NO: 117321 - DNA, 25 bp, probe
atctacactttcattctggggttcc

SEQ ID NO: 117322 - DNA, 25 bp, probe
ctttccttctgggtggggagttctg

SEQ ID NO: 117323 - DNA, 25 bp, probe
attgttgcttcgcagggggatttgt

SEQ ID NO: 117324 - DNA, 25 bp, probe
atatcaggctcccagggtttaatgt

SEQ ID NO: 117325 - DNA, 25 bp, probe
attagagtactgcaatcttgtaagt

SEQ ID NO: 117326 - DNA, 25 bp, probe
attggttactggctttgttacatca

SEQ ID NO: 117327 - DNA, 25 bp, probe
attggtctctctaggtttttatata

SEQ ID NO: 117328 - DNA, 25 bp, probe
attttcaccaagccttttcataatc

SEQ ID NO: 117329 - DNA, 25 bp, probe
attgattcacttactgactttgcat

SEQ ID NO: 117330 - DNA, 25 bp, probe
attgactgactttgggttctgtgcc

SEQ ID NO: 117331 - DNA, 25 bp, probe
attgtcgtgcatgtgggatgtattt

SEQ ID NO: 117332 - DNA, 25 bp, probe
attgtgcctatgataaattcacata

SEQ ID NO: 117333 - DNA, 25 bp, probe
attgtgcctatgataaattcacata

SEQ ID NO: 117334 - DNA, 25 bp, probe
attgtgggagaaacatcattcctca

SEQ ID NO: 117335 - DNA, 25 bp, probe
attgtggtgagcgatcctgactcca

SEQ ID NO: 117336 - DNA, 25 bp, probe
attgtttgagcaacttggatgccag

SEQ ID NO: 117337 - DNA, 25 bp, probe
attggagggcaagtctggtgccagc

SEQ ID NO: 117338 - DNA, 25 bp, probe
attgaagtgcgctctttgcaatcca

SEQ ID NO: 117339 - DNA, 25 bp, probe
attgaaacccagggtcgtcacgctg

SEQ ID NO: 117340 - DNA, 25 bp, probe
attgccaacctcggagatagtcggg

SEQ ID NO: 117341 - DNA, 25 bp, probe
attggcaaccatttcaatgagtttg

SEQ ID NO: 117342 - DNA, 25 bp, probe
attccaaattgagtaatcaggtgtc

SEQ ID NO: 117343 - DNA, 25 bp, probe
attccatttggataatcaggaagcc

SEQ ID NO: 117344 - DNA, 25 bp, probe
atatctattttttcaacggacccat

SEQ ID NO: 117345 - DNA, 25 bp, probe
attctggatttttactacaggccct

SEQ ID NO: 117346 - DNA, 25 bp, probe
attcaagaattatgactcatcggtc

SEQ ID NO: 117347 - DNA, 25 bp, probe
attctaccatttctgccactggtgt

SEQ ID NO: 117348 - DNA, 25 bp, probe
attgttcagaagacctccctgtgag

SEQ ID NO: 117349 - DNA, 25 bp, probe
attgcttcaaacacccaaattgtct

SEQ ID NO: 117350 - DNA, 25 bp, probe
attctctgaataggtcccaaactta

SEQ ID NO: 117351 - DNA, 25 bp, probe
atttgtaacggggtcaccacagcca

SEQ ID NO: 117352 - DNA, 25 bp, probe
attttgacagggccgtcaccgaata

SEQ ID NO: 117353 - DNA, 25 bp, probe
attgtttcaaggcactccctttgca

SEQ ID NO: 117354 - DNA, 25 bp, probe
attgcttccaaacagctgggtttaa

SEQ ID NO: 117355 - DNA, 25 bp, probe
attgtaccaaagacagtggtggtcc

SEQ ID NO: 117356 - DNA, 25 bp, probe
atatagaccaggttcagaagggttc

SEQ ID NO: 117357 - DNA, 25 bp, probe
attacctgctggatcaaaggaccat

SEQ ID NO: 117358 - DNA, 25 bp, probe
attgccgctcggaaacacatggaca

SEQ ID NO: 117359 - DNA, 25 bp, probe
attgcccaaggttgaagcaatgaat

SEQ ID NO: 117360 - DNA, 25 bp, probe
attccacgaggcattgagaaaacta

SEQ ID NO: 117361 - DNA, 25 bp, probe
attgcagcgcgggcgttggaagaac

SEQ ID NO: 117362 - DNA, 25 bp, probe
attgcccgtaggttaagaggtcagc

SEQ ID NO: 117363 - DNA, 25 bp, probe
attcccctagagtaaacgcgcgtga

SEQ ID NO: 117364 - DNA, 25 bp, probe
attcccatcaaagacatcaaggaaa

SEQ ID NO: 117365 - DNA, 25 bp, probe
attcccatcaaagacatcaaggaaa

SEQ ID NO: 117366 - DNA, 25 bp, probe
attgccctcaacgaccactttgtca

SEQ ID NO: 117367 - DNA, 25 bp, probe
attccctggttatactttgtcaata

SEQ ID NO: 117368 - DNA, 25 bp, probe
attgtacgtgtttacagttgggaat

SEQ ID NO: 117369 - DNA, 25 bp, probe
attgtccctgtttcaaactgagtaa

SEQ ID NO: 117370 - DNA, 25 bp, probe
attggaccgtttagaatgctatgta

SEQ ID NO: 117371 - DNA, 25 bp, probe
attgtgacagcgtatgtgatgactg

SEQ ID NO: 117372 - DNA, 25 bp, probe
attgcattcgaaaacaccaaatacc

SEQ ID NO: 117373 - DNA, 25 bp, probe
attctgacttcagatccccaaatcc

SEQ ID NO: 117374 - DNA, 25 bp, probe
attctgacttcagatccccaaatcc

SEQ ID NO: 117375 - DNA, 25 bp, probe
attatgaccaaatctccgataagac

SEQ ID NO: 117376 - DNA, 25 bp, probe
attggtacaaatccgctctgataaa

SEQ ID NO: 117377 - DNA, 25 bp, probe
attgtgatcaaaagggctatgggaa

SEQ ID NO: 117378 - DNA, 25 bp, probe
attgaatcaccaaggcctgggatca

SEQ ID NO: 117379 - DNA, 25 bp, probe
attggaaacgggaatgcgaatcaga

SEQ ID NO: 117380 - DNA, 25 bp, probe
attcgaaacgaagtagccaacagga

SEQ ID NO: 117381 - DNA, 25 bp, probe
attgtgtccctgtattaccaaaata

SEQ ID NO: 117382 - DNA, 25 bp, probe
attgtacacacgtttgagacgactg

SEQ ID NO: 117383 - DNA, 25 bp, probe
attgaaaacatgcttaaccactagc

SEQ ID NO: 117384 - DNA, 25 bp, probe
atctaccaactgtttagggccctga

SEQ ID NO: 117385 - DNA, 25 bp, probe
attatgctaatatagtaggggttga

SEQ ID NO: 117386 - DNA, 25 bp, probe
attgtgccaatttcatgtgggggct

SEQ ID NO: 117387 - DNA, 25 bp, probe
attctgccactcctgacagggtgac

SEQ ID NO: 117388 - DNA, 25 bp, probe
atagtgcacgctctgatcaggggtg

SEQ ID NO: 117389 - DNA, 25 bp, probe
attgtgcactgcaggtagagggtgg

SEQ ID NO: 117390 - DNA, 25 bp, probe
attgtcaacaccctagataagatga

SEQ ID NO: 117391 - DNA, 25 bp, probe
attgaccctcacctgaataagggac

SEQ ID NO: 117392 - DNA, 25 bp, probe
attgataacaacatcactacaagta

SEQ ID NO: 117393 - DNA, 25 bp, probe
attaacaactcccacatccaggaag

SEQ ID NO: 117394 - DNA, 25 bp, probe
attaacaactcccacatccaggaag

SEQ ID NO: 117395 - DNA, 25 bp, probe
ataaaaaaccccgcagagagagcag

SEQ ID NO: 117396 - DNA, 25 bp, probe
attcaatatgaatccccctgtaatg

SEQ ID NO: 117397 - DNA, 25 bp, probe
attggcatacaatactgcctttaat

SEQ ID NO: 117398 - DNA, 25 bp, probe
attgactaactgagctccttcactt

SEQ ID NO: 117399 - DNA, 25 bp, probe
attgactaactgagctccttcactt

SEQ ID NO: 117400 - DNA, 25 bp, probe
attagaaagtcagcccttagattca

SEQ ID NO: 117401 - DNA, 25 bp, probe
agttggaagtacagtttcaaggatg

SEQ ID NO: 117402 - DNA, 25 bp, probe
agtggcctagggagtttccaaatgg

SEQ ID NO: 117403 - DNA, 25 bp, probe
tttccccagggcagtaggtcaaacg

SEQ ID NO: 117404 - DNA, 25 bp, probe
attcgctcccgggggaagtcacaga

SEQ ID NO: 117405 - DNA, 25 bp, probe
attcctcctcaaaccagttgtacag

SEQ ID NO: 117406 - DNA, 25 bp, probe
atatcctcctaaatccgttgcaaag

SEQ ID NO: 117407 - DNA, 25 bp, probe
atatcctcctaaatccgttgcaaag

SEQ ID NO: 117408 - DNA, 25 bp, probe
attcgtcctaaaacactggagtatg

SEQ ID NO: 117409 - DNA, 25 bp, probe
atttctggtaagagcctgaagtttt

SEQ ID NO: 117410 - DNA, 25 bp, probe
attgttggtcaagaaaccagtttct

SEQ ID NO: 117411 - DNA, 25 bp, probe
atagcttgggaagaaacttgcagat

SEQ ID NO: 117412 - DNA, 25 bp, probe
atcgctatggaatgggaacgtctgt

SEQ ID NO: 117413 - DNA, 25 bp, probe
atcgctatggaatgggaacgtctgt

SEQ ID NO: 117414 - DNA, 25 bp, probe
attggcagggatggtgaaacccctt

SEQ ID NO: 117415 - DNA, 25 bp, probe
attgggggcatgctacaagccctca

SEQ ID NO: 117416 - DNA, 25 bp, probe
attgcgggcgctctagaggataaca

SEQ ID NO: 117417 - DNA, 25 bp, probe
attggaggcctttgcagcggcctac

SEQ ID NO: 117418 - DNA, 25 bp, probe
attggggcagagagcgaagtgtact

SEQ ID NO: 117419 - DNA, 25 bp, probe
attgagaggtgggggatgctgagga

SEQ ID NO: 117420 - DNA, 25 bp, probe
attggtggtgtggagatggtgctgc

SEQ ID NO: 117421 - DNA, 25 bp, probe
attggcggattggagatgccacccc

SEQ ID NO: 117422 - DNA, 25 bp, probe
attgttggcatggtgagattaacac

SEQ ID NO: 117423 - DNA, 25 bp, probe
attatttgaccggatctacacccac

SEQ ID NO: 117424 - DNA, 25 bp, probe
attatttgaccggatctacacccac

SEQ ID NO: 117425 - DNA, 25 bp, probe
attacgtcatccagactactcgaaa

SEQ ID NO: 117426 - DNA, 25 bp, probe
attggcgataccaggaattcagcaa

SEQ ID NO: 117427 - DNA, 25 bp, probe
attgggaagctcaatgatacaaaca

SEQ ID NO: 117428 - DNA, 25 bp, probe
attgaaggcctcatcttcatcaaca

SEQ ID NO: 117429 - DNA, 25 bp, probe
attggaggaatacttctgataattt

SEQ ID NO: 117430 - DNA, 25 bp, probe
attggaaacccttcatgaagcactg

SEQ ID NO: 117431 - DNA, 25 bp, probe
attgtgatacaagattctgcacctc

SEQ ID NO: 117432 - DNA, 25 bp, probe
attgatccaaaggacctgaccttct

SEQ ID NO: 117433 - DNA, 25 bp, probe
attgatctggaagggactcctcctc

SEQ ID NO: 117434 - DNA, 25 bp, probe
attggggagaaggacctgcgcctcc

SEQ ID NO: 117435 - DNA, 25 bp, probe
attggaggacagctgacttccatct

SEQ ID NO: 117436 - DNA, 25 bp, probe
attcggtaagtttctccacatcttc

SEQ ID NO: 117437 - DNA, 25 bp, probe
attccgtgactttttaaatcgctgt

SEQ ID NO: 117438 - DNA, 25 bp, probe
attcctgctattgttaataacctta

SEQ ID NO: 117439 - DNA, 25 bp, probe
attcctgccttggagaaaatacttc

SEQ ID NO: 117440 - DNA, 25 bp, probe
atgctaacacttcaaattattcgta

SEQ ID NO: 117441 - DNA, 25 bp, probe
attaacaaagcgggctttgccgtca

SEQ ID NO: 117442 - DNA, 25 bp, probe
attactcagaaggggtaatgctcca

SEQ ID NO: 117443 - DNA, 25 bp, probe
attgatacagaaaaggtcctctcca

SEQ ID NO: 117444 - DNA, 25 bp, probe
attgggcgttcatgagatcctcttc

SEQ ID NO: 117445 - DNA, 25 bp, probe
attgttctcttcagaaccctatctg

SEQ ID NO: 117446 - DNA, 25 bp, probe
attgtctgcctttaaaatccttcct

SEQ ID NO: 117447 - DNA, 25 bp, probe
attgtctcataatcaaatatcgctt

SEQ ID NO: 117448 - DNA, 25 bp, probe
attgtctcatgaccaaatccacgct

SEQ ID NO: 117449 - DNA, 25 bp, probe
attgttgatgaggattcgcccgtcc

SEQ ID NO: 117450 - DNA, 25 bp, probe
attgttatgactggtacactctggc

SEQ ID NO: 117451 - DNA, 25 bp, probe
attgtatataccctcatcaccaaga

SEQ ID NO: 117452 - DNA, 25 bp, probe
attgaatttcccgatattccagaga

SEQ ID NO: 117453 - DNA, 25 bp, probe
attgcaattattccccatgaacgag

SEQ ID NO: 117454 - DNA, 25 bp, probe
attgcaattattccccatgaacgag

SEQ ID NO: 117455 - DNA, 25 bp, probe
attgacattttccctgccaaggaga

SEQ ID NO: 117456 - DNA, 25 bp, probe
attgtactctgcccctggaagcaga

SEQ ID NO: 117457 - DNA, 25 bp, probe
attgtactctgcccctggaagcaga

SEQ ID NO: 117458 - DNA, 25 bp, probe
attgggtcccacataaagcagtcag

SEQ ID NO: 117459 - DNA, 25 bp, probe
attagtccccagtgcaaagcagcca

SEQ ID NO: 117460 - DNA, 25 bp, probe
attgcatctccgccaggctaaaagc

SEQ ID NO: 117461 - DNA, 25 bp, probe
attgcctcaccctgaggacatcagc

SEQ ID NO: 117462 - DNA, 25 bp, probe
attgttcccctaagtggattggctt

SEQ ID NO: 117463 - DNA, 25 bp, probe
attggatcctacatagggatctgaa

SEQ ID NO: 117464 - DNA, 25 bp, probe
attggattttccaactccatctgta

SEQ ID NO: 117465 - DNA, 25 bp, probe
attggcattgttgctggaatcatct

SEQ ID NO: 117466 - DNA, 25 bp, probe
attgactttcatgtcgtcatgcatc

SEQ ID NO: 117467 - DNA, 25 bp, probe
attatgatcttgtaccttctgaccc

SEQ ID NO: 117468 - DNA, 25 bp, probe
attatgatcttgtaccttctgaccc

SEQ ID NO: 117469 - DNA, 25 bp, probe
attggatatctgtcccttcagacat

SEQ ID NO: 117470 - DNA, 25 bp, probe
attgaactcttctctgtatgcacta

SEQ ID NO: 117471 - DNA, 25 bp, probe
attgtcactccatggattaaccagg

SEQ ID NO: 117472 - DNA, 25 bp, probe
attccctcgacaaattgaaaactga

SEQ ID NO: 117473 - DNA, 25 bp, probe
attcacctctttccacttaaacgtg

SEQ ID NO: 117474 - DNA, 25 bp, probe
attaccaccttctgctatggaatct

SEQ ID NO: 117475 - DNA, 25 bp, probe
attgaccccaggggtgtgctggact

SEQ ID NO: 117476 - DNA, 25 bp, probe
attccaccacttgtgtccatggagc

SEQ ID NO: 117477 - DNA, 25 bp, probe
attgtgcccaatctggagccagagg

SEQ ID NO: 117478 - DNA, 25 bp, probe
attgtgggcactctgtgtgccattg

SEQ ID NO: 117479 - DNA, 25 bp, probe
attgggagatctagtgtctgccctc

SEQ ID NO: 117480 - DNA, 25 bp, probe
attggtggcatttttatcgtgctca

SEQ ID NO: 117481 - DNA, 25 bp, probe
attgggctgcttgctgtatgagtta

SEQ ID NO: 117482 - DNA, 25 bp, probe
attgaggatgacgctgatgtggagt

SEQ ID NO: 117483 - DNA, 25 bp, probe
attgggcatgatttctgggagcact

SEQ ID NO: 117484 - DNA, 25 bp, probe
attgagcagtactcagcaggccacc

SEQ ID NO: 117485 - DNA, 25 bp, probe
attgagcagtactcagcaggccacc

SEQ ID NO: 117486 - DNA, 25 bp, probe
attggaggcaatcccagcacctcca

SEQ ID NO: 117487 - DNA, 25 bp, probe
attgggagaacccagacatcatgtc

SEQ ID NO: 117488 - DNA, 25 bp, probe
attgctacgatactccgagaagtac

SEQ ID NO: 117489 - DNA, 25 bp, probe
attcataaagagaccggccagattg

SEQ ID NO: 117490 - DNA, 25 bp, probe
atatttaaggaccccagagctaggc

SEQ ID NO: 117491 - DNA, 25 bp, probe
attctttccatgacacccaagggtc

SEQ ID NO: 117492 - DNA, 25 bp, probe
attcctcccaacagctcaaaattag

SEQ ID NO: 117493 - DNA, 25 bp, probe
attcctcccaacagctcaaaattag

SEQ ID NO: 117494 - DNA, 25 bp, probe
attcccgacgacacatatacatatg

SEQ ID NO: 117495 - DNA, 25 bp, probe
atatcaccgacctccttatgtgaga

SEQ ID NO: 117496 - DNA, 25 bp, probe
attcctaggccctgttcatgtggga

SEQ ID NO: 117497 - DNA, 25 bp, probe
attcctaggccctgttcatgtggga

SEQ ID NO: 117498 - DNA, 25 bp, probe
atctcactgttgcctttggttaggg

SEQ ID NO: 117499 - DNA, 25 bp, probe
attgatcagcttgtgtatggtttag

SEQ ID NO: 117500 - DNA, 25 bp, probe
attggcagctgtgaccagattatct

SEQ ID NO: 117501 - DNA, 25 bp, probe
attgtcactgtcatcagaatctgtc

SEQ ID NO: 117502 - DNA, 25 bp, probe
atcgtactggtaaaatgcattcaaa

SEQ ID NO: 117503 - DNA, 25 bp, probe
attgtttggttgccagtcatacaaa

SEQ ID NO: 117504 - DNA, 25 bp, probe
attgtaatgctggttcagctataca

SEQ ID NO: 117505 - DNA, 25 bp, probe
attctgttcagcattcactaaccct

SEQ ID NO: 117506 - DNA, 25 bp, probe
attgtaacagcaacttgtcaaacct

SEQ ID NO: 117507 - DNA, 25 bp, probe
attggtacataggcttctattacct

SEQ ID NO: 117508 - DNA, 25 bp, probe
attggctcatgaaggttcttctcaa

SEQ ID NO: 117509 - DNA, 25 bp, probe
attggccagcatctgtttatcaaat

SEQ ID NO: 117510 - DNA, 25 bp, probe
attgctgctctctgttattacactc

SEQ ID NO: 117511 - DNA, 25 bp, probe
attgctgcatggaaattgatgtaca

SEQ ID NO: 117512 - DNA, 25 bp, probe
attgccaggccagcagatctgacta

SEQ ID NO: 117513 - DNA, 25 bp, probe
attgccaggccagcagatctgacta

SEQ ID NO: 117514 - DNA, 25 bp, probe
attccatgtctgggatgacttcaca

SEQ ID NO: 117515 - DNA, 25 bp, probe
attggccatctggaatatgcattaa

SEQ ID NO: 117516 - DNA, 25 bp, probe
attgatatctctgacatttctggaa

SEQ ID NO: 117517 - DNA, 25 bp, probe
attgatatctctgacatttctggaa

SEQ ID NO: 117518 - DNA, 25 bp, probe
attgtgattgaaggcattccaggaa

SEQ ID NO: 117519 - DNA, 25 bp, probe
attgttgtgcaatgcaatcacagga

SEQ ID NO: 117520 - DNA, 25 bp, probe
attgtgttttaggtcagatgcagaa

SEQ ID NO: 117521 - DNA, 25 bp, probe
attggcaatgtttcgatagacagca

SEQ ID NO: 117522 - DNA, 25 bp, probe
attgagcacattttcctaaggccct

SEQ ID NO: 117523 - DNA, 25 bp, probe
attggcacaccctactacatgagcc

SEQ ID NO: 117524 - DNA, 25 bp, probe
attggcacaccctactacatgagcc

SEQ ID NO: 117525 - DNA, 25 bp, probe
attggcaacctattctcactaagat

SEQ ID NO: 117526 - DNA, 25 bp, probe
attggtacctgttgtcttaatgcat

SEQ ID NO: 117527 - DNA, 25 bp, probe
attggtacctgttgtcttaatgcat

SEQ ID NO: 117528 - DNA, 25 bp, probe
attggctaccagagcagttacagag

SEQ ID NO: 117529 - DNA, 25 bp, probe
ataggctggtcctacatgtattagg

SEQ ID NO: 117530 - DNA, 25 bp, probe
attgttcttacttgattatataatg

SEQ ID NO: 117531 - DNA, 25 bp, probe
attgttatacacagctttatgatat

SEQ ID NO: 117532 - DNA, 25 bp, probe
attggtatatacccttctggacact

SEQ ID NO: 117533 - DNA, 25 bp, probe
attgccttgtgtccgttggaaccat

SEQ ID NO: 117534 - DNA, 25 bp, probe
attgccatattacaacatggtaccg

SEQ ID NO: 117535 - DNA, 25 bp, probe
attgcctaaaggaaaagagatcatc

SEQ ID NO: 117536 - DNA, 25 bp, probe
attgtccataaggaattcgatgatg

SEQ ID NO: 117537 - DNA, 25 bp, probe
attggcctattggcaagatcgcatg

SEQ ID NO: 117538 - DNA, 25 bp, probe
attgacgacctggatgctgaagctg

SEQ ID NO: 117539 - DNA, 25 bp, probe
attgtccaactggctctgatacttc

SEQ ID NO: 117540 - DNA, 25 bp, probe
attgtccaactggctctgatacttc

SEQ ID NO: 117541 - DNA, 25 bp, probe
attgatcacatatcctgtgaactcc

SEQ ID NO: 117542 - DNA, 25 bp, probe
attgtccatagagatctgacaccaa

SEQ ID NO: 117543 - DNA, 25 bp, probe
attgcttgatacttttgacaacaaa

SEQ ID NO: 117544 - DNA, 25 bp, probe
attgcttgagacctagcaatcagtc

SEQ ID NO: 117545 - DNA, 25 bp, probe
attgccgagacacaagacgacggtg

SEQ ID NO: 117546 - DNA, 25 bp, probe
attgacgagacagagtaccatgcag

SEQ ID NO: 117547 - DNA, 25 bp, probe
attgtcagaaggcaggaacatgcta

SEQ ID NO: 117548 - DNA, 25 bp, probe
attgtgtactcccagacaaatctga

SEQ ID NO: 117549 - DNA, 25 bp, probe
attgtgaaacaatgccagaatcttt

SEQ ID NO: 117550 - DNA, 25 bp, probe
attgcaggagacacactagtactat

SEQ ID NO: 117551 - DNA, 25 bp, probe
attgcacaggaaaacgtgttctaat

SEQ ID NO: 117552 - DNA, 25 bp, probe
attccagctccaatagcgtatatta

SEQ ID NO: 117553 - DNA, 25 bp, probe
atatgctcatctgagtgacggatat

SEQ ID NO: 117554 - DNA, 25 bp, probe
attgcatatgcatagttcccatgtt

SEQ ID NO: 117555 - DNA, 25 bp, probe
attgcaatttaacaccagagttttg

SEQ ID NO: 117556 - DNA, 25 bp, probe
attgatttttaaacagcaggttgtg

SEQ ID NO: 117557 - DNA, 25 bp, probe
attgactttggatcaagctgttatg

SEQ ID NO: 117558 - DNA, 25 bp, probe
attgaatgggtgaacaacactgctg

SEQ ID NO: 117559 - DNA, 25 bp, probe
attgaatgctcaggtatccaccgca

SEQ ID NO: 117560 - DNA, 25 bp, probe
attgatggtctggattccaccactt

SEQ ID NO: 117561 - DNA, 25 bp, probe
attacctcggataccacaagtgctt

SEQ ID NO: 117562 - DNA, 25 bp, probe
attcctccagtgacctgtcaaggct

SEQ ID NO: 117563 - DNA, 25 bp, probe
attcctccagtgacctgtcaaggct

SEQ ID NO: 117564 - DNA, 25 bp, probe
cttcacctttgaccgtacaggtaca

SEQ ID NO: 117565 - DNA, 25 bp, probe
attcagttttggtgtcctggaaagc

SEQ ID NO: 117566 - DNA, 25 bp, probe
attcattttttatcccaagaggcct

SEQ ID NO: 117567 - DNA, 25 bp, probe
attcattttttatcccaagaggcct

SEQ ID NO: 117568 - DNA, 25 bp, probe
attgattttattgactgcgtcaggg

SEQ ID NO: 117569 - DNA, 25 bp, probe
attgtatgtcgattgaattgtactg

SEQ ID NO: 117570 - DNA, 25 bp, probe
attggtggctgttggattctgactg

SEQ ID NO: 117571 - DNA, 25 bp, probe
attgttagtctcttgattcataatg

SEQ ID NO: 117572 - DNA, 25 bp, probe
attgttagtctcttgattcataatg

SEQ ID NO: 117573 - DNA, 25 bp, probe
attgttcagtatttttaattgtcac

SEQ ID NO: 117574 - DNA, 25 bp, probe
attgtgtactcccttgtacttgtca

SEQ ID NO: 117575 - DNA, 25 bp, probe
attgctttaggcctggagactttca

SEQ ID NO: 117576 - DNA, 25 bp, probe
attgctagcttccatgtgaaacttt

SEQ ID NO: 117577 - DNA, 25 bp, probe
attgaacttcggccattattttatt

SEQ ID NO: 117578 - DNA, 25 bp, probe
attgacacagatgatctctttcttt

SEQ ID NO: 117579 - DNA, 25 bp, probe
attcccattcactttgattttctac

SEQ ID NO: 117580 - DNA, 25 bp, probe
attccatcttacattagtgattcca

SEQ ID NO: 117581 - DNA, 25 bp, probe
attgcatccaagacttatcagtctt

SEQ ID NO: 117582 - DNA, 25 bp, probe
attgtcaatcatacattgaattgct

SEQ ID NO: 117583 - DNA, 25 bp, probe
attgtgttactactgatatatgcta

SEQ ID NO: 117584 - DNA, 25 bp, probe
attggtttgctctgatcattgctga

SEQ ID NO: 117585 - DNA, 25 bp, probe
attgagatttctttagtgcttgctt

SEQ ID NO: 117586 - DNA, 25 bp, probe
aggcctttcttttggtggcagctaa

SEQ ID NO: 117587 - DNA, 25 bp, probe
aggcctttcttttggtggcagctaa

SEQ ID NO: 117588 - DNA, 25 bp, probe
attccattctcgtggaggagtttcc

SEQ ID NO: 117589 - DNA, 25 bp, probe
attcgcacgagtagtgggtcgtctt

SEQ ID NO: 117590 - DNA, 25 bp, probe
attacaggatctatgtaggtgttga

SEQ ID NO: 117591 - DNA, 25 bp, probe
attgacgagacacttactggtttaa

SEQ ID NO: 117592 - DNA, 25 bp, probe
attgacgagacacttactggtttaa

SEQ ID NO: 117593 - DNA, 25 bp, probe
atatcagggaacatgaatggtttaa

SEQ ID NO: 117594 - DNA, 25 bp, probe
atgacagggaacaggaaggtggccc

SEQ ID NO: 117595 - DNA, 25 bp, probe
ataagaaaaccagcaacggccgcct

SEQ ID NO: 117596 - DNA, 25 bp, probe
ataagaaaaccagcaacggccgcct

SEQ ID NO: 117597 - DNA, 25 bp, probe
attcttaaacgagaagccccggctg

SEQ ID NO: 117598 - DNA, 25 bp, probe
gatcctttaaagataaaccacttgc

SEQ ID NO: 117599 - DNA, 25 bp, probe
gatcctttaaagataaaccacttgc

SEQ ID NO: 117600 - DNA, 25 bp, probe
attcatttaagacaagagacccctg

SEQ ID NO: 117601 - DNA, 25 bp, probe
attgcagtgctggaatcggaagaac

SEQ ID NO: 117602 - DNA, 25 bp, probe
attgttcaaaattggagatgtacac

SEQ ID NO: 117603 - DNA, 25 bp, probe
attgttcttagatgatggagtccat

SEQ ID NO: 117604 - DNA, 25 bp, probe
attgttgatgtagccaagttcacat

SEQ ID NO: 117605 - DNA, 25 bp, probe
attgttgtggtaaccaggctgcgat

SEQ ID NO: 117606 - DNA, 25 bp, probe
attgatgtgtgtctaggcaggacct

SEQ ID NO: 117607 - DNA, 25 bp, probe
attatgtagctacgagatggtaccg

SEQ ID NO: 117608 - DNA, 25 bp, probe
attaggaaatgctgttaacctggca

SEQ ID NO: 117609 - DNA, 25 bp, probe
attgaggaaatgcgaaaggttgtat

SEQ ID NO: 117610 - DNA, 25 bp, probe
attcagctggtagggaaagactctg

SEQ ID NO: 117611 - DNA, 25 bp, probe
attcacgtgaaatgacagaaacgca

SEQ ID NO: 117612 - DNA, 25 bp, probe
attcacgtgaaatgacagaaacgca

SEQ ID NO: 117613 - DNA, 25 bp, probe
attgaggtgtaattgcacaagtaaa

SEQ ID NO: 117614 - DNA, 25 bp, probe
atatgccgttaagccatcagttcag

SEQ ID NO: 117615 - DNA, 25 bp, probe
attccttccatagccagcaatgttg

SEQ ID NO: 117616 - DNA, 25 bp, probe
attaaaccagccttctgcagtgggt

SEQ ID NO: 117617 - DNA, 25 bp, probe
attcaaacgcactgctctgagaggc

SEQ ID NO: 117618 - DNA, 25 bp, probe
attctcagaggacttggcaagggcc

SEQ ID NO: 117619 - DNA, 25 bp, probe
attgtcaagggcaatgcccgcctgc

SEQ ID NO: 117620 - DNA, 25 bp, probe
attgtcaagaagctgccatacctgc

SEQ ID NO: 117621 - DNA, 25 bp, probe
attccaagtcatatgcctagtctgc

SEQ ID NO: 117622 - DNA, 25 bp, probe
attccaagtcatatgcctagtctgc

SEQ ID NO: 117623 - DNA, 25 bp, probe
attctgcaggttcatctcagaccca

SEQ ID NO: 117624 - DNA, 25 bp, probe
attccatttcgagttcagatccgtt

SEQ ID NO: 117625 - DNA, 25 bp, probe
attaattccgatactagtttgcttt

SEQ ID NO: 117626 - DNA, 25 bp, probe
agtacattcctgttattttctgggt

SEQ ID NO: 117627 - DNA, 25 bp, probe
attacaggctctttaatccatctgg

SEQ ID NO: 117628 - DNA, 25 bp, probe
attccagtcttgaatttcctccagg

SEQ ID NO: 117629 - DNA, 25 bp, probe
attccagttcccattcaacagagta

SEQ ID NO: 117630 - DNA, 25 bp, probe
attcaggttttctctagagcaaaac

SEQ ID NO: 117631 - DNA, 25 bp, probe
attggagatttttcctctgcgtaga

SEQ ID NO: 117632 - DNA, 25 bp, probe
attgaagatttgtacagccggctgg

SEQ ID NO: 117633 - DNA, 25 bp, probe
attgaagatttgtacagccggctgg

SEQ ID NO: 117634 - DNA, 25 bp, probe
attgacagcagtgcaaagcccctct

SEQ ID NO: 117635 - DNA, 25 bp, probe
attgaagatgcatccaaccctctgc

SEQ ID NO: 117636 - DNA, 25 bp, probe
attgacctcgagacgacctctctgc

SEQ ID NO: 117637 - DNA, 25 bp, probe
attggcagccggagtcactgcctgg

SEQ ID NO: 117638 - DNA, 25 bp, probe
attccagccctgtattgagtgagct

SEQ ID NO: 117639 - DNA, 25 bp, probe
attccagctagtgtcagcagtggga

SEQ ID NO: 117640 - DNA, 25 bp, probe
attccagctagtgtcagcagtggga

SEQ ID NO: 117641 - DNA, 25 bp, probe
atataagctgaactctattatgggg

SEQ ID NO: 117642 - DNA, 25 bp, probe
attaacagaaattcatatttggtgt

SEQ ID NO: 117643 - DNA, 25 bp, probe
atttacggctagtcaattgttcttg

SEQ ID NO: 117644 - DNA, 25 bp, probe
atttacggctagtcaattgttcttg

SEQ ID NO: 117645 - DNA, 25 bp, probe
attaacgttcaccacagatcttctt

SEQ ID NO: 117646 - DNA, 25 bp, probe
attgaattgctatggaagacttgtt

SEQ ID NO: 117647 - DNA, 25 bp, probe
attgaattgctatggaagacttgtt

SEQ ID NO: 117648 - DNA, 25 bp, probe
attgataatgttttgctactcttgt

SEQ ID NO: 117649 - DNA, 25 bp, probe
attggtgtgttttgtatcttgcttg

SEQ ID NO: 117650 - DNA, 25 bp, probe
attggtctgatatatgctgctcttg

SEQ ID NO: 117651 - DNA, 25 bp, probe
attggtctgatatatgctgctcttg

SEQ ID NO: 117652 - DNA, 25 bp, probe
attggtcagtgttttcctaggggct

SEQ ID NO: 117653 - DNA, 25 bp, probe
attagtaaattgcttctgagggtct

SEQ ID NO: 117654 - DNA, 25 bp, probe
attctgtacatatggtttaggtcac

SEQ ID NO: 117655 - DNA, 25 bp, probe
attctgtacatatggtttaggtcac

SEQ ID NO: 117656 - DNA, 25 bp, probe
attgtgtttatgtggcttaagctga

SEQ ID NO: 117657 - DNA, 25 bp, probe
attgtgttttgtcactctagaagag

SEQ ID NO: 117658 - DNA, 25 bp, probe
attgtgctcttttctaatccaaagg

SEQ ID NO: 117659 - DNA, 25 bp, probe
attcgttgcctttgcaatcctaggg

SEQ ID NO: 117660 - DNA, 25 bp, probe
attcgtgtgactacagtacctggta

SEQ ID NO: 117661 - DNA, 25 bp, probe
attccaggtgcaagcagtccgaggc

SEQ ID NO: 117662 - DNA, 25 bp, probe
attccaggtgcaagcagtccgaggc

SEQ ID NO: 117663 - DNA, 25 bp, probe
attccagatgctgagagtgaccagg

SEQ ID NO: 117664 - DNA, 25 bp, probe
attccatgatcctgataggcaaggt

SEQ ID NO: 117665 - DNA, 25 bp, probe
attatcgacatctttgaagctgggg

SEQ ID NO: 117666 - DNA, 25 bp, probe
attccagagcactgctccagtgggg

SEQ ID NO: 117667 - DNA, 25 bp, probe
attaacgcgttcgcagttgcagcga

SEQ ID NO: 117668 - DNA, 25 bp, probe
attactgccgtaaccctgatggtga

SEQ ID NO: 117669 - DNA, 25 bp, probe
attccgctcgccacaaatatgggta

SEQ ID NO: 117670 - DNA, 25 bp, probe
attcctcagggaaaattagtgttga

SEQ ID NO: 117671 - DNA, 25 bp, probe
attccgaaacataatatcaatttta

SEQ ID NO: 117672 - DNA, 25 bp, probe
attctcgaaattggaggactccttt

SEQ ID NO: 117673 - DNA, 25 bp, probe
attgctggaataattaggtctccaa

SEQ ID NO: 117674 - DNA, 25 bp, probe
attgctgtaataaaaggcctgacat

SEQ ID NO: 117675 - DNA, 25 bp, probe
attggggattacagctgtcatgaat

SEQ ID NO: 117676 - DNA, 25 bp, probe
attgctgagccttactgggttgaaa

SEQ ID NO: 117677 - DNA, 25 bp, probe
attgtcctgtaagggtgttgaagat

SEQ ID NO: 117678 - DNA, 25 bp, probe
attgtctgtctgaggatgagttaag

SEQ ID NO: 117679 - DNA, 25 bp, probe
attgttttgctaaatatgttaattg

SEQ ID NO: 117680 - DNA, 25 bp, probe
attgtctctttaaaatgctgctgaa

SEQ ID NO: 117681 - DNA, 25 bp, probe
attgaatccatttatcaagctatga

SEQ ID NO: 117682 - DNA, 25 bp, probe
attgaattcttggatgcagtggcag

SEQ ID NO: 117683 - DNA, 25 bp, probe
attgtgagttggggcactggctgtg

SEQ ID NO: 117684 - DNA, 25 bp, probe
attgtggcagctgggccacaggctg

SEQ ID NO: 117685 - DNA, 25 bp, probe
attgtccagatgggcactgctgtgg

SEQ ID NO: 117686 - DNA, 25 bp, probe
attgttactgaagctggtggcgtgc

SEQ ID NO: 117687 - DNA, 25 bp, probe
attgttactgaagctggtggcgtgc

SEQ ID NO: 117688 - DNA, 25 bp, probe
attgttaagaccgtggaggcagctg

SEQ ID NO: 117689 - DNA, 25 bp, probe
atatgtaattgcagcgtggggtggg

SEQ ID NO: 117690 - DNA, 25 bp, probe
attgaaattctggcttgggatgctg

SEQ ID NO: 117691 - DNA, 25 bp, probe
attgagcaaccagctctgggctcag

SEQ ID NO: 117692 - DNA, 25 bp, probe
attgtcacccaggctggagtgcaat

SEQ ID NO: 117693 - DNA, 25 bp, probe
attgtcacccaggctggagtgcaat

SEQ ID NO: 117694 - DNA, 25 bp, probe
attgtcatcaccttttgagtaatta

SEQ ID NO: 117695 - DNA, 25 bp, probe
attgcgcaacacctttagggagatt

SEQ ID NO: 117696 - DNA, 25 bp, probe
attgcgcaacacctttagggagatt

SEQ ID NO: 117697 - DNA, 25 bp, probe
attccaaaagctataatgtgccact

SEQ ID NO: 117698 - DNA, 25 bp, probe
attccaaaagctataatgtgccact

SEQ ID NO: 117699 - DNA, 25 bp, probe
attgactaaagcattccagtgtcct

SEQ ID NO: 117700 - DNA, 25 bp, probe
attgaaatccgttctctatttgcct

SEQ ID NO: 117701 - DNA, 25 bp, probe
attgaattctcttagcttgtgtgtg

SEQ ID NO: 117702 - DNA, 25 bp, probe
attgataatgctgaagctcttcttg

SEQ ID NO: 117703 - DNA, 25 bp, probe
attgacaagtaccaggctttgatgg

SEQ ID NO: 117704 - DNA, 25 bp, probe
attaattgtccctgtttcaaactga

SEQ ID NO: 117705 - DNA, 25 bp, probe
attgtaaatcctgtgtttcattact

SEQ ID NO: 117706 - DNA, 25 bp, probe
attgtagaacttctctctctgctaa

SEQ ID NO: 117707 - DNA, 25 bp, probe
attgggaccagtcatttcctaagct

SEQ ID NO: 117708 - DNA, 25 bp, probe
attgggatcacgtgttacctgctac

SEQ ID NO: 117709 - DNA, 25 bp, probe
attcagggcccatgtgtgacctgct

SEQ ID NO: 117710 - DNA, 25 bp, probe
attgcacccacataggtaactcttc

SEQ ID NO: 117711 - DNA, 25 bp, probe
attgcacaccagcaaaggcaactct

SEQ ID NO: 117712 - DNA, 25 bp, probe
attgaatcctggagagagcacagcc

SEQ ID NO: 117713 - DNA, 25 bp, probe
attgcataccggatacagataccca

SEQ ID NO: 117714 - DNA, 25 bp, probe
attataccaggcaatgggatacgaa

SEQ ID NO: 117715 - DNA, 25 bp, probe
attccacctacatgaggtactgaga

SEQ ID NO: 117716 - DNA, 25 bp, probe
attccactcttcggagttgcagtta

SEQ ID NO: 117717 - DNA, 25 bp, probe
attgcttcactggccagagcttagt

SEQ ID NO: 117718 - DNA, 25 bp, probe
attgttcctgttttcatctagtcag

SEQ ID NO: 117719 - DNA, 25 bp, probe
attgtctcacgtattttctgggctc

SEQ ID NO: 117720 - DNA, 25 bp, probe
attgatccatgtctgtttgtaggac

SEQ ID NO: 117721 - DNA, 25 bp, probe
attatcctgtggcgttgcctggaca

SEQ ID NO: 117722 - DNA, 25 bp, probe
attgacctggagcacctccatagac

SEQ ID NO: 117723 - DNA, 25 bp, probe
attgacttgagactaactagcaaaa

SEQ ID NO: 117724 - DNA, 25 bp, probe
attgagaatatctatgatttacaga

SEQ ID NO: 117725 - DNA, 25 bp, probe
attgatagcatttattgtgataagt

SEQ ID NO: 117726 - DNA, 25 bp, probe
attgattgtattatgctgctcactg

SEQ ID NO: 117727 - DNA, 25 bp, probe
attgatcagttttatgccgcattgt

SEQ ID NO: 117728 - DNA, 25 bp, probe
attgtcaagttctatggagtgtgcg

SEQ ID NO: 117729 - DNA, 25 bp, probe
attgactcctaccatggagctgtgg

SEQ ID NO: 117730 - DNA, 25 bp, probe
attgactctctaaatctggtgtatg

SEQ ID NO: 117731 - DNA, 25 bp, probe
attgtgattctgaattcttggatat

SEQ ID NO: 117732 - DNA, 25 bp, probe
attgtattgcttattcattatagct

SEQ ID NO: 117733 - DNA, 25 bp, probe
attgatattcccaccatctatcaga

SEQ ID NO: 117734 - DNA, 25 bp, probe
attgatatctcggatacaatagagg

SEQ ID NO: 117735 - DNA, 25 bp, probe
attgagcttcatcatgaccagaagc

SEQ ID NO: 117736 - DNA, 25 bp, probe
attcatgtctctcagagcactgcaa

SEQ ID NO: 117737 - DNA, 25 bp, probe
attgctgataatggaggcctgcggg

SEQ ID NO: 117738 - DNA, 25 bp, probe
attgtcaacatgcagggcgagccca

SEQ ID NO: 117739 - DNA, 25 bp, probe
attacaagcggaggcgctgccgcgc

SEQ ID NO: 117740 - DNA, 25 bp, probe
attccaggggatgagctacctggag

SEQ ID NO: 117741 - DNA, 25 bp, probe
attcaagaagactcgctaccaggct

SEQ ID NO: 117742 - DNA, 25 bp, probe
attgcacagtaggatgtggaacctg

SEQ ID NO: 117743 - DNA, 25 bp, probe
attgaagctgaaatggtagacctgt

SEQ ID NO: 117744 - DNA, 25 bp, probe
attgaggcttacagtaggagtgaga

SEQ ID NO: 117745 - DNA, 25 bp, probe
attacgcttcagagataccaatggg

SEQ ID NO: 117746 - DNA, 25 bp, probe
attcgtgcccaagaaccagagagtg

SEQ ID NO: 117747 - DNA, 25 bp, probe
attctgtccaacaaacacacacggg

SEQ ID NO: 117748 - DNA, 25 bp, probe
attgggccacatatgtcaaccggga

SEQ ID NO: 117749 - DNA, 25 bp, probe
attgtgagccgccaatatcatcacc

SEQ ID NO: 117750 - DNA, 25 bp, probe
attgctgcaactggcaaacctgccg

SEQ ID NO: 117751 - DNA, 25 bp, probe
attctaacttgagatcagtggcgga

SEQ ID NO: 117752 - DNA, 25 bp, probe
attctaacttgagatcagtggcgga

SEQ ID NO: 117753 - DNA, 25 bp, probe
attctaataagaggatcagccgggt

SEQ ID NO: 117754 - DNA, 25 bp, probe
attcaaaaaactccaggctggcagc

SEQ ID NO: 117755 - DNA, 25 bp, probe
attgaattaaaacagctgcgacaac

SEQ ID NO: 117756 - DNA, 25 bp, probe
attgatttcaacaaagatggccaca

SEQ ID NO: 117757 - DNA, 25 bp, probe
attgtagtaaccaatatgtgcagta

SEQ ID NO: 117758 - DNA, 25 bp, probe
attgtactaatcattatgtatctac

SEQ ID NO: 117759 - DNA, 25 bp, probe
attgtactaatcattatgtatctac

SEQ ID NO: 117760 - DNA, 25 bp, probe
attgtacccactaattgcattggaa

SEQ ID NO: 117761 - DNA, 25 bp, probe
atttacccacacgtgtcctgaagac

SEQ ID NO: 117762 - DNA, 25 bp, probe
attgtaccccaaaattctgcataga

SEQ ID NO: 117763 - DNA, 25 bp, probe
atctaagctcccacaatttcttacg

SEQ ID NO: 117764 - DNA, 25 bp, probe
atctctactaccacaaggaaaatag

SEQ ID NO: 117765 - DNA, 25 bp, probe
attctggtgaccagcagcggacaaa

SEQ ID NO: 117766 - DNA, 25 bp, probe
attctctgtacgcccagggaaagcg

SEQ ID NO: 117767 - DNA, 25 bp, probe
attttgtgggtggagggccagagtg

SEQ ID NO: 117768 - DNA, 25 bp, probe
attcttagttgttcagttgccaagg

SEQ ID NO: 117769 - DNA, 25 bp, probe
attctcatggtacatggttgtctga

SEQ ID NO: 117770 - DNA, 25 bp, probe
attctcatggtacatggttgtctga

SEQ ID NO: 117771 - DNA, 25 bp, probe
attgctgaggtctgagcagggcctg

SEQ ID NO: 117772 - DNA, 25 bp, probe
attgagggtgcggacgcgtcatcac

SEQ ID NO: 117773 - DNA, 25 bp, probe
attgagggtgcggacgcgtcatcac

SEQ ID NO: 117774 - DNA, 25 bp, probe
attgaaccgatggaggctgtatcag

SEQ ID NO: 117775 - DNA, 25 bp, probe
attgtatcctatgaactcaatagaa

SEQ ID NO: 117776 - DNA, 25 bp, probe
attgctattcttcaactccaagaag

SEQ ID NO: 117777 - DNA, 25 bp, probe
attgtttctctattatctgaaaaaa

SEQ ID NO: 117778 - DNA, 25 bp, probe
attgtttcgcataattctgaatgta

SEQ ID NO: 117779 - DNA, 25 bp, probe
attgttgtataatttcgagatttgt

SEQ ID NO: 117780 - DNA, 25 bp, probe
attgttgtataatttcgagatttgt

SEQ ID NO: 117781 - DNA, 25 bp, probe
attgtttaaagaatctactatactt

SEQ ID NO: 117782 - DNA, 25 bp, probe
atatttttaagagatcgtaggcaat

SEQ ID NO: 117783 - DNA, 25 bp, probe
atactgttaaaagctggtgggagtt

SEQ ID NO: 117784 - DNA, 25 bp, probe
atacggtaaacaacatttgtgcaga

SEQ ID NO: 117785 - DNA, 25 bp, probe
ataggaggagaatacttgaagcagt

SEQ ID NO: 117786 - DNA, 25 bp, probe
attctggggtcatcctgagaaggtc

SEQ ID NO: 117787 - DNA, 25 bp, probe
attgctggggtcagctcgttactca

SEQ ID NO: 117788 - DNA, 25 bp, probe
attcgtggtctcagcggatggacaa

SEQ ID NO: 117789 - DNA, 25 bp, probe
attcagtggtccaggattctgtaat

SEQ ID NO: 117790 - DNA, 25 bp, probe
attaggttgaaacatatctcttatc

SEQ ID NO: 117791 - DNA, 25 bp, probe
attagggtatatgaatattttgcaa

SEQ ID NO: 117792 - DNA, 25 bp, probe
aggggcagttcacaattttcaccat

SEQ ID NO: 117793 - DNA, 25 bp, probe
atgggggaccaccttgtttatggca

SEQ ID NO: 117794 - DNA, 25 bp, probe
attcggaaaccctttttgtggcatg

SEQ ID NO: 117795 - DNA, 25 bp, probe
attcggaaaccctttttgtggcatg

SEQ ID NO: 117796 - DNA, 25 bp, probe
attgctgtggaacctcttttggagg

SEQ ID NO: 117797 - DNA, 25 bp, probe
attgcaatggaacatctgagttttg

SEQ ID NO: 117798 - DNA, 25 bp, probe
attccaggggccatgcaggagcttg

SEQ ID NO: 117799 - DNA, 25 bp, probe
attccaagggccacatgcgagtatt

SEQ ID NO: 117800 - DNA, 25 bp, probe
attccaaggacctcacgatggtgct

SEQ ID NO: 117801 - DNA, 25 bp, probe
attcacacggaggattaccggctgc

SEQ ID NO: 117802 - DNA, 25 bp, probe
attctccggattttatctcagagga

SEQ ID NO: 117803 - DNA, 25 bp, probe
attcccttattcatttcaagagctc

SEQ ID NO: 117804 - DNA, 25 bp, probe
attccactataaacttttaggcctg

SEQ ID NO: 117805 - DNA, 25 bp, probe
attccactataaacttttaggcctg

SEQ ID NO: 117806 - DNA, 25 bp, probe
attctctttgaacctttggaggccg

SEQ ID NO: 117807 - DNA, 25 bp, probe
attgcctttgtagtgctttcggccc

SEQ ID NO: 117808 - DNA, 25 bp, probe
attgaatgtgtggggtttcccctca

SEQ ID NO: 117809 - DNA, 25 bp, probe
attgaaatgttcgttttctcctgcc

SEQ ID NO: 117810 - DNA, 25 bp, probe
attgacccttgggtctttgccatcc

SEQ ID NO: 117811 - DNA, 25 bp, probe
attgatccctggagctttgtgtcag

SEQ ID NO: 117812 - DNA, 25 bp, probe
attgaagtatggaagcttagtgccc

SEQ ID NO: 117813 - DNA, 25 bp, probe
attgaagtatggaagcttagtgccc

SEQ ID NO: 117814 - DNA, 25 bp, probe
attcaactgagtaagtctgaacctc

SEQ ID NO: 117815 - DNA, 25 bp, probe
attccaccagttggtcttgggctgc

SEQ ID NO: 117816 - DNA, 25 bp, probe
attccactcagaacctctctggaat

SEQ ID NO: 117817 - DNA, 25 bp, probe
attgcaaccatagccttatggggag

SEQ ID NO: 117818 - DNA, 25 bp, probe
attcgcaccattgcggtcgcgcgga

SEQ ID NO: 117819 - DNA, 25 bp, probe
attcccaaaccggtggagcagtgat

SEQ ID NO: 117820 - DNA, 25 bp, probe
attcccaagcccatgagtccttgaa

SEQ ID NO: 117821 - DNA, 25 bp, probe
attgcccaacacgttattcttgctg

SEQ ID NO: 117822 - DNA, 25 bp, probe
attccacccatggcaaattccatgg

SEQ ID NO: 117823 - DNA, 25 bp, probe
attcgcaagcctgatactctccagg

SEQ ID NO: 117824 - DNA, 25 bp, probe
atacccaggcatgaacaaccgggag

SEQ ID NO: 117825 - DNA, 25 bp, probe
atacccaggcatgaacaaccgggag

SEQ ID NO: 117826 - DNA, 25 bp, probe
attaccggatccagggccgggcagt

SEQ ID NO: 117827 - DNA, 25 bp, probe
attaccggatccagggccgggcagt

SEQ ID NO: 117828 - DNA, 25 bp, probe
attaccggatccagggccgggcagt

SEQ ID NO: 117829 - DNA, 25 bp, probe
attaccggatccagggccgggcagt

SEQ ID NO: 117830 - DNA, 25 bp, probe
attactgggaccaggacccaccaga

SEQ ID NO: 117831 - DNA, 25 bp, probe
attcctgggtgctcaagttccagcc

SEQ ID NO: 117832 - DNA, 25 bp, probe
attacttgcctatctgacttcatac

SEQ ID NO: 117833 - DNA, 25 bp, probe
attccttccaatgagagattataac

SEQ ID NO: 117834 - DNA, 25 bp, probe
attccttccaatgagagattataac

SEQ ID NO: 117835 - DNA, 25 bp, probe
attcctcccagtgacaatatggaat

SEQ ID NO: 117836 - DNA, 25 bp, probe
attcactccctaaccaaaggaatag

SEQ ID NO: 117837 - DNA, 25 bp, probe
aacccaccttacatacaggattgtg

SEQ ID NO: 117838 - DNA, 25 bp, probe
attgccaaccttacatgaacgcttt

SEQ ID NO: 117839 - DNA, 25 bp, probe
attgccaaccttacatgaacgcttt

SEQ ID NO: 117840 - DNA, 25 bp, probe
attgcacattccattaaaagctcag

SEQ ID NO: 117841 - DNA, 25 bp, probe
attccagtcattaaaagattgctac

SEQ ID NO: 117842 - DNA, 25 bp, probe
attgccaaatttgatatgttgcact

SEQ ID NO: 117843 - DNA, 25 bp, probe
attgaggacattctggttctgcact

SEQ ID NO: 117844 - DNA, 25 bp, probe
attgcggagcgtctgggatgcacac

SEQ ID NO: 117845 - DNA, 25 bp, probe
attgcggtcgcgcggatcatgatgc

SEQ ID NO: 117846 - DNA, 25 bp, probe
attgatgagtgccgggcccatgatc

SEQ ID NO: 117847 - DNA, 25 bp, probe
attgatgaggccttgtcccagaact

SEQ ID NO: 117848 - DNA, 25 bp, probe
attgaaaaattcatgccagaactga

SEQ ID NO: 117849 - DNA, 25 bp, probe
attgaaaaattcatgccagaactga

SEQ ID NO: 117850 - DNA, 25 bp, probe
attgcaaatactgcccgcaaagctc

SEQ ID NO: 117851 - DNA, 25 bp, probe
attgcagaatttacctcaagaactc

SEQ ID NO: 117852 - DNA, 25 bp, probe
attgctgcacaattacccaagatat

SEQ ID NO: 117853 - DNA, 25 bp, probe
attgctgcacaattacccaagatat

SEQ ID NO: 117854 - DNA, 25 bp, probe
attctacaacaagctcaaaatctgc

SEQ ID NO: 117855 - DNA, 25 bp, probe
attgaccaagcaagactgaaaatgc

SEQ ID NO: 117856 - DNA, 25 bp, probe
attgcccatggctgggaacatgacc

SEQ ID NO: 117857 - DNA, 25 bp, probe
attcctgggctccagttatatgccc

SEQ ID NO: 117858 - DNA, 25 bp, probe
attgcttgggttggtcaaatgtctt

SEQ ID NO: 117859 - DNA, 25 bp, probe
attgtattttctagacaattctcta

SEQ ID NO: 117860 - DNA, 25 bp, probe
attccattttccagaattgcctgtc

SEQ ID NO: 117861 - DNA, 25 bp, probe
attccattttccagaattgcctgtc

SEQ ID NO: 117862 - DNA, 25 bp, probe
attccatttctggaagtgactttgg

SEQ ID NO: 117863 - DNA, 25 bp, probe
atcccttctacccggaagttgagct

SEQ ID NO: 117864 - DNA, 25 bp, probe
atcccttcttacttaacctgaagct

SEQ ID NO: 117865 - DNA, 25 bp, probe
attcgtagttagtttagcctacgct

SEQ ID NO: 117866 - DNA, 25 bp, probe
attcgtagatcaatgtttaactcag

SEQ ID NO: 117867 - DNA, 25 bp, probe
attccatatattagcatttagtcca

SEQ ID NO: 117868 - DNA, 25 bp, probe
attcctaattcctgtatgttatcca

SEQ ID NO: 117869 - DNA, 25 bp, probe
attgcctagcttgccgtaatgattc

SEQ ID NO: 117870 - DNA, 25 bp, probe
attgactatcttcacagtaataata

SEQ ID NO: 117871 - DNA, 25 bp, probe
attgccttcctgcacaaaaaccata

SEQ ID NO: 117872 - DNA, 25 bp, probe
attacattcactcatcggaaacgct

SEQ ID NO: 117873 - DNA, 25 bp, probe
attgaaaatgcattagggaaaactt

SEQ ID NO: 117874 - DNA, 25 bp, probe
attcaaagtgttctgggacaagctg

SEQ ID NO: 117875 - DNA, 25 bp, probe
attcttttttattggcggctccatg

SEQ ID NO: 117876 - DNA, 25 bp, probe
attctggttttttggaggtctgtct

SEQ ID NO: 117877 - DNA, 25 bp, probe
attctggttttttggaggtctgtct

SEQ ID NO: 117878 - DNA, 25 bp, probe
attcttgcttctttagtgggttact

SEQ ID NO: 117879 - DNA, 25 bp, probe
attgctgtggtttgtggggctatgg

SEQ ID NO: 117880 - DNA, 25 bp, probe
attgctggctggtgggttgcaagaa

SEQ ID NO: 117881 - DNA, 25 bp, probe
attctcaaatgctgggttgaaaaat

SEQ ID NO: 117882 - DNA, 25 bp, probe
attctgctccttaaggttaacaatt

SEQ ID NO: 117883 - DNA, 25 bp, probe
attctctcacttaattttcccaatg

SEQ ID NO: 117884 - DNA, 25 bp, probe
attgttcatcctaattgttcctgtt

SEQ ID NO: 117885 - DNA, 25 bp, probe
atttccacttggtgtttggttcctg

SEQ ID NO: 117886 - DNA, 25 bp, probe
attttggttggcgcttttgttggct

SEQ ID NO: 117887 - DNA, 25 bp, probe
atttttgactttgctagtttgtggc

SEQ ID NO: 117888 - DNA, 25 bp, probe
attcttcgatctctgggatttatgc

SEQ ID NO: 117889 - DNA, 25 bp, probe
attctgttgacatcgctggaagttc

SEQ ID NO: 117890 - DNA, 25 bp, probe
attgcctgggccaagtggcaggttg

SEQ ID NO: 117891 - DNA, 25 bp, probe
attgcctgtgtggcacaatggagaa

SEQ ID NO: 117892 - DNA, 25 bp, probe
attgactgggcaacactgcaggaca

SEQ ID NO: 117893 - DNA, 25 bp, probe
attgattggagcgctctgatggaca

SEQ ID NO: 117894 - DNA, 25 bp, probe
attgttggctgggcacagtggctca

SEQ ID NO: 117895 - DNA, 25 bp, probe
attcccagcgagccaagggctcttc

SEQ ID NO: 117896 - DNA, 25 bp, probe
attgcctactcatgctattgggttc

SEQ ID NO: 117897 - DNA, 25 bp, probe
attgcctcacagttgtttgtttaca

SEQ ID NO: 117898 - DNA, 25 bp, probe
attgcacacctgtttaactttgact

SEQ ID NO: 117899 - DNA, 25 bp, probe
attaacttgttgaaactgtggcttt

SEQ ID NO: 117900 - DNA, 25 bp, probe
attgcaagtgtattcaaacaatggc

SEQ ID NO: 117901 - DNA, 25 bp, probe
attctcagtgtttcaaatgcaaatg

SEQ ID NO: 117902 - DNA, 25 bp, probe
attccaggtgttggtacatatgatg

SEQ ID NO: 117903 - DNA, 25 bp, probe
attccgttgctgtcggcagtttggg

SEQ ID NO: 117904 - DNA, 25 bp, probe
attgctcgtatggccctagcattac

SEQ ID NO: 117905 - DNA, 25 bp, probe
attgcttttgacctcaagctgtgac

SEQ ID NO: 117906 - DNA, 25 bp, probe
attgctgattcttcgtgcacaggaa

SEQ ID NO: 117907 - DNA, 25 bp, probe
attgcttgtcaagggccattaccac

SEQ ID NO: 117908 - DNA, 25 bp, probe
attgctgtgtcccagaggaaagtgc

SEQ ID NO: 117909 - DNA, 25 bp, probe
attctgctgtcggaaagcgacgtgg

SEQ ID NO: 117910 - DNA, 25 bp, probe
attgatggcgaggcggaggacgggg

SEQ ID NO: 117911 - DNA, 25 bp, probe
attcatgggctgcggaggactgggc

SEQ ID NO: 117912 - DNA, 25 bp, probe
attcatgggctgcggaggactgggc

SEQ ID NO: 117913 - DNA, 25 bp, probe
atttggggcgtcagggtggtgccag

SEQ ID NO: 117914 - DNA, 25 bp, probe
atagttggggtcatagatgtttcct

SEQ ID NO: 117915 - DNA, 25 bp, probe
atagcttggattccctaggtctttc

SEQ ID NO: 117916 - DNA, 25 bp, probe
attctggaagctccctagaatctcc

SEQ ID NO: 117917 - DNA, 25 bp, probe
attcgtattgcgccgctagaggtga

SEQ ID NO: 117918 - DNA, 25 bp, probe
attcgctactacgagaacagtatgg

SEQ ID NO: 117919 - DNA, 25 bp, probe
attcctcccacaggaagaaatgtac

SEQ ID NO: 117920 - DNA, 25 bp, probe
attcttccaacagaaggcaagaaaa

SEQ ID NO: 117921 - DNA, 25 bp, probe
attttggattcagcacagtaagcaa

SEQ ID NO: 117922 - DNA, 25 bp, probe
attgcattgttattacagagaaagc

SEQ ID NO: 117923 - DNA, 25 bp, probe
attgcttgtggtacctgataatcag

SEQ ID NO: 117924 - DNA, 25 bp, probe
attgcttgtggtacctgataatcag

SEQ ID NO: 117925 - DNA, 25 bp, probe
atctgcattcagctggtataattca

SEQ ID NO: 117926 - DNA, 25 bp, probe
attgctgctcagaatatcatataat

SEQ ID NO: 117927 - DNA, 25 bp, probe
attgagcgcatgaattccatccacc

SEQ ID NO: 117928 - DNA, 25 bp, probe
attgatggattcttccatcctgccg

SEQ ID NO: 117929 - DNA, 25 bp, probe
attgatctgtcttatgccataatct

SEQ ID NO: 117930 - DNA, 25 bp, probe
attgacttctatagccatcttttcc

SEQ ID NO: 117931 - DNA, 25 bp, probe
attgaatgatttagagatttttaga

SEQ ID NO: 117932 - DNA, 25 bp, probe
attgcaagatttaaaccattctgat

SEQ ID NO: 117933 - DNA, 25 bp, probe
attgctaactatatacccatctctg

SEQ ID NO: 117934 - DNA, 25 bp, probe
attctaaattatttcctcaccatcc

SEQ ID NO: 117935 - DNA, 25 bp, probe
attctaaattatttcctcaccatcc

SEQ ID NO: 117936 - DNA, 25 bp, probe
attaatgccattatccctgaattcc

SEQ ID NO: 117937 - DNA, 25 bp, probe
attgcaagccacacttctagagatt

SEQ ID NO: 117938 - DNA, 25 bp, probe
attgaatccctttttgatcatatct

SEQ ID NO: 117939 - DNA, 25 bp, probe
attgaattctctttctcatagcctc

SEQ ID NO: 117940 - DNA, 25 bp, probe
attgaactcatctaactagcctcca

SEQ ID NO: 117941 - DNA, 25 bp, probe
attgaccttctcaaaaccatccaca

SEQ ID NO: 117942 - DNA, 25 bp, probe
attgaaccaccaaaccctatcaatc

SEQ ID NO: 117943 - DNA, 25 bp, probe
attgaaccaccaaaccctatcaatc

SEQ ID NO: 117944 - DNA, 25 bp, probe
attccaccccaggaacggtcatgaa

SEQ ID NO: 117945 - DNA, 25 bp, probe
atttcaacgccgactacaggaagaa

SEQ ID NO: 117946 - DNA, 25 bp, probe
atatcccaagccctttagggctaca

SEQ ID NO: 117947 - DNA, 25 bp, probe
attcctcaggccatcgtcatggagt

SEQ ID NO: 117948 - DNA, 25 bp, probe
attctcctgggactggctatgatgg

SEQ ID NO: 117949 - DNA, 25 bp, probe
attcccctggagtgtgaagctgacc

SEQ ID NO: 117950 - DNA, 25 bp, probe
attcccctggagtgtgaagctgacc

SEQ ID NO: 117951 - DNA, 25 bp, probe
attcccctgggtgtgcacacagggc

SEQ ID NO: 117952 - DNA, 25 bp, probe
attgcaactggcctggccgcaacag

SEQ ID NO: 117953 - DNA, 25 bp, probe
attcaattgtggaccccaaagtgac

SEQ ID NO: 117954 - DNA, 25 bp, probe
attcaacttagttcccaaaatgagc

SEQ ID NO: 117955 - DNA, 25 bp, probe
attcaaataatccattccaaaatac

SEQ ID NO: 117956 - DNA, 25 bp, probe
attcaaataatccattccaaaatac

SEQ ID NO: 117957 - DNA, 25 bp, probe
attacaataacaccacctgaaaaat

SEQ ID NO: 117958 - DNA, 25 bp, probe
attgacttcaaacagcttaacttcc

SEQ ID NO: 117959 - DNA, 25 bp, probe
attagctgtcaaacctcctaacttc

SEQ ID NO: 117960 - DNA, 25 bp, probe
attagccttccagccactgagaatt

SEQ ID NO: 117961 - DNA, 25 bp, probe
attaccatttccagatttgagtttg

SEQ ID NO: 117962 - DNA, 25 bp, probe
attagccttgtctttgattttatgg

SEQ ID NO: 117963 - DNA, 25 bp, probe
attaaatagtcactagtattgctaa

SEQ ID NO: 117964 - DNA, 25 bp, probe
attagttcccctgggattctgaata

SEQ ID NO: 117965 - DNA, 25 bp, probe
attagttcccctgggattctgaata

SEQ ID NO: 117966 - DNA, 25 bp, probe
attaggcccctctattttcaggata

SEQ ID NO: 117967 - DNA, 25 bp, probe
attagaccttttatttagagattat

SEQ ID NO: 117968 - DNA, 25 bp, probe
attctggttgttattttagacataa

SEQ ID NO: 117969 - DNA, 25 bp, probe
attgctggttctatttaatggacat

SEQ ID NO: 117970 - DNA, 25 bp, probe
attctggttataatttacaactgtt

SEQ ID NO: 117971 - DNA, 25 bp, probe
attcttttgtaatttaaatggctgc

SEQ ID NO: 117972 - DNA, 25 bp, probe
attgcgttgtggaattgggaagggc

SEQ ID NO: 117973 - DNA, 25 bp, probe
attgccttgtagatgtggagggctg

SEQ ID NO: 117974 - DNA, 25 bp, probe
attccttgatcatatctgaagtggt

SEQ ID NO: 117975 - DNA, 25 bp, probe
attcttgtggcatcattataaggct

SEQ ID NO: 117976 - DNA, 25 bp, probe
attgctgtccgcttctagaaagagt

SEQ ID NO: 117977 - DNA, 25 bp, probe
attgctctcccattatgagcatcct

SEQ ID NO: 117978 - DNA, 25 bp, probe
attgcccctgaatcagatagctgtc

SEQ ID NO: 117979 - DNA, 25 bp, probe
attaccaaggcatcacatgagcatg

SEQ ID NO: 117980 - DNA, 25 bp, probe
attaccctgccattcatgtgtatcc

SEQ ID NO: 117981 - DNA, 25 bp, probe
attcacggtgcacatgctggcattc

SEQ ID NO: 117982 - DNA, 25 bp, probe
attcctggcatgacactctagtgac

SEQ ID NO: 117983 - DNA, 25 bp, probe
attgcttggatgacagtcaccgaca

SEQ ID NO: 117984 - DNA, 25 bp, probe
attgctctgagtcagaagctggagc

SEQ ID NO: 117985 - DNA, 25 bp, probe
attctcatcagtcgcaatgattcag

SEQ ID NO: 117986 - DNA, 25 bp, probe
attccatgatgcttgcctggacatg

SEQ ID NO: 117987 - DNA, 25 bp, probe
attgccaacactcctgatagctgaa

SEQ ID NO: 117988 - DNA, 25 bp, probe
attgcacagaacttccatagcaaat

SEQ ID NO: 117989 - DNA, 25 bp, probe
attcaatggaatatctacaaaagtt

SEQ ID NO: 117990 - DNA, 25 bp, probe
attactgaaatcctgcgagcaagaa

SEQ ID NO: 117991 - DNA, 25 bp, probe
attgcctaaatcagcgtcaacatgc

SEQ ID NO: 117992 - DNA, 25 bp, probe
attcctaaactaccttagctgcata

SEQ ID NO: 117993 - DNA, 25 bp, probe
attccaagaaatccaccttctgctc

SEQ ID NO: 117994 - DNA, 25 bp, probe
attccaagaaatccaccttctgctc

SEQ ID NO: 117995 - DNA, 25 bp, probe
attccaagaaatccaccttctgctc

SEQ ID NO: 117996 - DNA, 25 bp, probe
attctttggaattctccttctgtcc

SEQ ID NO: 117997 - DNA, 25 bp, probe
attgcttggtattcattacttcatg

SEQ ID NO: 117998 - DNA, 25 bp, probe
attctcttgccattttactacactg

SEQ ID NO: 117999 - DNA, 25 bp, probe
attctctctccatttggaattacaa

SEQ ID NO: 118000 - DNA, 25 bp, probe
attccatgttgatttaattctaaga

SEQ ID NO: 118001 - DNA, 25 bp, probe
attccaactaatcatcatcttcaag

SEQ ID NO: 118002 - DNA, 25 bp, probe
attccaaatatgagatgcattgtta

SEQ ID NO: 118003 - DNA, 25 bp, probe
attgcataatcaatgctggctgata

SEQ ID NO: 118004 - DNA, 25 bp, probe
attgctagtgcaactactgctccat

SEQ ID NO: 118005 - DNA, 25 bp, probe
attgctatgtcatttccatcttctg

SEQ ID NO: 118006 - DNA, 25 bp, probe
attgctatgtcatttccatcttctg

SEQ ID NO: 118007 - DNA, 25 bp, probe
attgctcagggactcatctttccct

SEQ ID NO: 118008 - DNA, 25 bp, probe
attgccgctggattctgttcagcct

SEQ ID NO: 118009 - DNA, 25 bp, probe
attgccctatgcactgttagcatga

SEQ ID NO: 118010 - DNA, 25 bp, probe
attgcttcatacacatgtggacatg

SEQ ID NO: 118011 - DNA, 25 bp, probe
attgcttcatacacatgtggacatg

SEQ ID NO: 118012 - DNA, 25 bp, probe
attgcagtaatcatcacttacaggt

SEQ ID NO: 118013 - DNA, 25 bp, probe
attgcattattcacactttcaaact

SEQ ID NO: 118014 - DNA, 25 bp, probe
attgcattattcacactttcaaact

SEQ ID NO: 118015 - DNA, 25 bp, probe
attactaacatagctttaaatcttt

SEQ ID NO: 118016 - DNA, 25 bp, probe
attcaccaaaaagttcatataattt

SEQ ID NO: 118017 - DNA, 25 bp, probe
attcatcacaactaactccatcgga

SEQ ID NO: 118018 - DNA, 25 bp, probe
attccagccacatatcacaaacgac

SEQ ID NO: 118019 - DNA, 25 bp, probe
attgcctccaaaatagccaacgagc

SEQ ID NO: 118020 - DNA, 25 bp, probe
attgcttccaaaattgccaatgagc

SEQ ID NO: 118021 - DNA, 25 bp, probe
attgcttccaaaattgccaatgagc

SEQ ID NO: 118022 - DNA, 25 bp, probe
attctatccatgactttgcgcaagc

SEQ ID NO: 118023 - DNA, 25 bp, probe
attctatccatgactttgcgcaagc

SEQ ID NO: 118024 - DNA, 25 bp, probe
attgcgactaactttctgcaggttt

SEQ ID NO: 118025 - DNA, 25 bp, probe
attgcgactaactttctgcaggttt

SEQ ID NO: 118026 - DNA, 25 bp, probe
attgaataatccttgttagagttat

SEQ ID NO: 118027 - DNA, 25 bp, probe
atataatcctcccgtaaagcttcat

SEQ ID NO: 118028 - DNA, 25 bp, probe
atataatcctcccgtaaagcttcat

SEQ ID NO: 118029 - DNA, 25 bp, probe
attaattaaaagttacagctgtcat

SEQ ID NO: 118030 - DNA, 25 bp, probe
attaactaaaatctatgtgcttttc

SEQ ID NO: 118031 - DNA, 25 bp, probe
attccctcaaaaattagtccttgct

SEQ ID NO: 118032 - DNA, 25 bp, probe
attcccttaaatttgtatggcactg

SEQ ID NO: 118033 - DNA, 25 bp, probe
atttccttaaactgtgtggactgtg

SEQ ID NO: 118034 - DNA, 25 bp, probe
attaccaaagactcgatctatgact

SEQ ID NO: 118035 - DNA, 25 bp, probe
attaccaaagactcgatctatgact

SEQ ID NO: 118036 - DNA, 25 bp, probe
attcctcagatatcaactatcaaac

SEQ ID NO: 118037 - DNA, 25 bp, probe
attcctcagattgctgaatcccatc

SEQ ID NO: 118038 - DNA, 25 bp, probe
attgcattgcagaaggtgttccttt

SEQ ID NO: 118039 - DNA, 25 bp, probe
attgcattgcagaaggtgttccttt

SEQ ID NO: 118040 - DNA, 25 bp, probe
attctgacagcatagtttcacttgt

SEQ ID NO: 118041 - DNA, 25 bp, probe
attctgcacgatctgtatatagtac

SEQ ID NO: 118042 - DNA, 25 bp, probe
attccagcagtgaatgctagacaga

SEQ ID NO: 118043 - DNA, 25 bp, probe
attccatgcagtgtcttgctggcag

SEQ ID NO: 118044 - DNA, 25 bp, probe
attgccatatgatttctagctgcca

SEQ ID NO: 118045 - DNA, 25 bp, probe
attccattgaattctcagatacaga

SEQ ID NO: 118046 - DNA, 25 bp, probe
attcatagggtgtccatgcacacat

SEQ ID NO: 118047 - DNA, 25 bp, probe
attacaagagtactgcagacatcat

SEQ ID NO: 118048 - DNA, 25 bp, probe
attcagcaagcaacaaggcaataga

SEQ ID NO: 118049 - DNA, 25 bp, probe
attgctgaactcttaggcacatcaa

SEQ ID NO: 118050 - DNA, 25 bp, probe
attgcgctacagctaggccgcatgc

SEQ ID NO: 118051 - DNA, 25 bp, probe
attgcatatttgctatgtcctcagt

SEQ ID NO: 118052 - DNA, 25 bp, probe
attgctgtgtatctgatagctcttt

SEQ ID NO: 118053 - DNA, 25 bp, probe
attgctgtgtatctgatagctcttt

SEQ ID NO: 118054 - DNA, 25 bp, probe
attgcttattcattatagctattcg

SEQ ID NO: 118055 - DNA, 25 bp, probe
attgctactttttcactttggattt

SEQ ID NO: 118056 - DNA, 25 bp, probe
attgccattttctattctttgggga

SEQ ID NO: 118057 - DNA, 25 bp, probe
attcttttgcccacacttgggagca

SEQ ID NO: 118058 - DNA, 25 bp, probe
attctttggcctacctataactgga

SEQ ID NO: 118059 - DNA, 25 bp, probe
attatcatccccttctttcaaagga

SEQ ID NO: 118060 - DNA, 25 bp, probe
attgcttccctcatctcagtaggga

SEQ ID NO: 118061 - DNA, 25 bp, probe
attgcctcttctaaaagctactgag

SEQ ID NO: 118062 - DNA, 25 bp, probe
attgcctctgtcttaaagaatttga

SEQ ID NO: 118063 - DNA, 25 bp, probe
attgcttggacttaactagttatca

SEQ ID NO: 118064 - DNA, 25 bp, probe
attgctgttccttaatttgattaat

SEQ ID NO: 118065 - DNA, 25 bp, probe
attgctgttccttaatttgattaat

SEQ ID NO: 118066 - DNA, 25 bp, probe
attccttctgcctatatttagtaat

SEQ ID NO: 118067 - DNA, 25 bp, probe
attccatttcacaatctgttttgtt

SEQ ID NO: 118068 - DNA, 25 bp, probe
attgcctttgataattcttactgtt

SEQ ID NO: 118069 - DNA, 25 bp, probe
attgcagcttataatggttacaaat

SEQ ID NO: 118070 - DNA, 25 bp, probe
attcagcttcacggtgatgaaaaac

SEQ ID NO: 118071 - DNA, 25 bp, probe
attgcctgcttagatgataaaatga

SEQ ID NO: 118072 - DNA, 25 bp, probe
attcctgataatccagtaggcattg

SEQ ID NO: 118073 - DNA, 25 bp, probe
attctcgtcacactacatagacata

SEQ ID NO: 118074 - DNA, 25 bp, probe
attccagacacagtagaagcacaca

SEQ ID NO: 118075 - DNA, 25 bp, probe
attccaccaccaataatcatctcat

SEQ ID NO: 118076 - DNA, 25 bp, probe
attccatagcccctaatgttatgac

SEQ ID NO: 118077 - DNA, 25 bp, probe
attctcatgatcccagataagtgtg

SEQ ID NO: 118078 - DNA, 25 bp, probe
attccatggcaccgtcaaggctgag

SEQ ID NO: 118079 - DNA, 25 bp, probe
attccatggcaccgtcaaggctgag

SEQ ID NO: 118080 - DNA, 25 bp, probe
attccgtgatcacccaagtgctgaa

SEQ ID NO: 118081 - DNA, 25 bp, probe
attccgtgatcacccaagtgctgaa

SEQ ID NO: 118082 - DNA, 25 bp, probe
attcatgcgatgtgtccaatcggag

SEQ ID NO: 118083 - DNA, 25 bp, probe
attatgcactgacatgaccctgggt

SEQ ID NO: 118084 - DNA, 25 bp, probe
attcatgccctgaataccactgagg

SEQ ID NO: 118085 - DNA, 25 bp, probe
attcatgccctgaataccactgagg

SEQ ID NO: 118086 - DNA, 25 bp, probe
attgctgtcactgtcacgattatgg

SEQ ID NO: 118087 - DNA, 25 bp, probe
attgctggcagcattcagttaagag

SEQ ID NO: 118088 - DNA, 25 bp, probe
attgctgctgaccagttgtcttaga

SEQ ID NO: 118089 - DNA, 25 bp, probe
atacgtgatgggcttcttgaaggac

SEQ ID NO: 118090 - DNA, 25 bp, probe
atacgtgatgggcttcttgaaggac

SEQ ID NO: 118091 - DNA, 25 bp, probe
atactttgggtgcatttggaaacca

SEQ ID NO: 118092 - DNA, 25 bp, probe
accattttggctgtttggatcctcc

SEQ ID NO: 118093 - DNA, 25 bp, probe
attctattttgcgtttcttacctgc

SEQ ID NO: 118094 - DNA, 25 bp, probe
attccatatctttgttttaaccagt

SEQ ID NO: 118095 - DNA, 25 bp, probe
attccatttcattgtgacctactcc

SEQ ID NO: 118096 - DNA, 25 bp, probe
attccacttacaattcctaatcttg

SEQ ID NO: 118097 - DNA, 25 bp, probe
attgccatctattgaaattctcgtc

SEQ ID NO: 118098 - DNA, 25 bp, probe
attgcgcaatgccataaatttcttc

SEQ ID NO: 118099 - DNA, 25 bp, probe
attgcgcaatgccataaatttcttc

SEQ ID NO: 118100 - DNA, 25 bp, probe
attctcactggcgaaattccattcg

SEQ ID NO: 118101 - DNA, 25 bp, probe
attctactggccatgatgccactga

SEQ ID NO: 118102 - DNA, 25 bp, probe
atttacaggtgcagtcaccgaaaga

SEQ ID NO: 118103 - DNA, 25 bp, probe
attcttcagggagtgtcacctcaaa

SEQ ID NO: 118104 - DNA, 25 bp, probe
attcttcaaagcatggcactgaaaa

SEQ ID NO: 118105 - DNA, 25 bp, probe
attgctgaaatccgacgactacgac

SEQ ID NO: 118106 - DNA, 25 bp, probe
attaaaacggactcatctctggccc

SEQ ID NO: 118107 - DNA, 25 bp, probe
attaaaacggactcatctctggccc

SEQ ID NO: 118108 - DNA, 25 bp, probe
attaataatcctggccaactctcgt

SEQ ID NO: 118109 - DNA, 25 bp, probe
attaataatcctggccaactctcgt

SEQ ID NO: 118110 - DNA, 25 bp, probe
attatactacctggccagaatttgg

SEQ ID NO: 118111 - DNA, 25 bp, probe
attaactgacgaagaagcaactaag

SEQ ID NO: 118112 - DNA, 25 bp, probe
attaaccacaataaggcatgatctg

SEQ ID NO: 118113 - DNA, 25 bp, probe
attacagcgtcatcaaggagtcaga

SEQ ID NO: 118114 - DNA, 25 bp, probe
attccagcagaattctcaggagtct

SEQ ID NO: 118115 - DNA, 25 bp, probe
attacacatattagccacgagtttt

SEQ ID NO: 118116 - DNA, 25 bp, probe
attactcaaatacatgaactctggt

SEQ ID NO: 118117 - DNA, 25 bp, probe
attccttcataataacagcctgatg

SEQ ID NO: 118118 - DNA, 25 bp, probe
attcacttgaatgagaaacgtgttt

SEQ ID NO: 118119 - DNA, 25 bp, probe
attaattgaatctagtatatgcggg

SEQ ID NO: 118120 - DNA, 25 bp, probe
attactttcatcaatgctaatccga

SEQ ID NO: 118121 - DNA, 25 bp, probe
attcacttttatttagcaccaggga

SEQ ID NO: 118122 - DNA, 25 bp, probe
attcctttctatcctacaacaagag

SEQ ID NO: 118123 - DNA, 25 bp, probe
attcctctatgctattttcaccaag

SEQ ID NO: 118124 - DNA, 25 bp, probe
attcccttgaatcagtagccaggat

SEQ ID NO: 118125 - DNA, 25 bp, probe
attccgcttagacctgtcggatgaa

SEQ ID NO: 118126 - DNA, 25 bp, probe
attccctggtgtccttcttagagat

SEQ ID NO: 118127 - DNA, 25 bp, probe
attaacttggatcttctaatggtcc

SEQ ID NO: 118128 - DNA, 25 bp, probe
attaattattctcattcttaggtgc

SEQ ID NO: 118129 - DNA, 25 bp, probe
cttcctaagtcccatttcttggtca

SEQ ID NO: 118130 - DNA, 25 bp, probe
attccaaagtcatggttctctggtg

SEQ ID NO: 118131 - DNA, 25 bp, probe
attccgaatgtttggccttctgaga

SEQ ID NO: 118132 - DNA, 25 bp, probe
attcctttattgggcgttcatgaga

SEQ ID NO: 118133 - DNA, 25 bp, probe
attgcctatgtattcctgatgttta

SEQ ID NO: 118134 - DNA, 25 bp, probe
attctatggaacgctcatgatcttt

SEQ ID NO: 118135 - DNA, 25 bp, probe
attcctgtcgacgctaacttctata

SEQ ID NO: 118136 - DNA, 25 bp, probe
attccggttgatgctaacttctaca

SEQ ID NO: 118137 - DNA, 25 bp, probe
attacagtgggggcatttctttata

SEQ ID NO: 118138 - DNA, 25 bp, probe
agaccataaactggactctgctgga

SEQ ID NO: 118139 - DNA, 25 bp, probe
attaggcagggtctgtcctgtggcc

SEQ ID NO: 118140 - DNA, 25 bp, probe
attaagaggattgctgtcctccccg

SEQ ID NO: 118141 - DNA, 25 bp, probe
attataaagtcatctcttctctgcc

SEQ ID NO: 118142 - DNA, 25 bp, probe
attgccatccgcaatcctttgagat

SEQ ID NO: 118143 - DNA, 25 bp, probe
attccacctactttgaatgatgtgt

SEQ ID NO: 118144 - DNA, 25 bp, probe
attccacctactttgaatgatgtgt

SEQ ID NO: 118145 - DNA, 25 bp, probe
attcacctttctcctagaatgctgt

SEQ ID NO: 118146 - DNA, 25 bp, probe
attccttgtctctgaatgactctgt

SEQ ID NO: 118147 - DNA, 25 bp, probe
attactgtttcatgactgactgact

SEQ ID NO: 118148 - DNA, 25 bp, probe
attactgtttcatgactgactgact

SEQ ID NO: 118149 - DNA, 25 bp, probe
attacattctgatcatgagccctgg

SEQ ID NO: 118150 - DNA, 25 bp, probe
attcaattatcttcatgaaggagga

SEQ ID NO: 118151 - DNA, 25 bp, probe
attcctttgctgttgactggtggtc

SEQ ID NO: 118152 - DNA, 25 bp, probe
attccattctcgtggaggagtttcc

SEQ ID NO: 118153 - DNA, 25 bp, probe
attctcaccttgtggggcatgtttg

SEQ ID NO: 118154 - DNA, 25 bp, probe
attctcactaagatggggtttatgt

SEQ ID NO: 118155 - DNA, 25 bp, probe
attgccaaaagaacgtgttttatgg

SEQ ID NO: 118156 - DNA, 25 bp, probe
attccacaaatcttacctctttagg

SEQ ID NO: 118157 - DNA, 25 bp, probe
attcccatgttgttaactatttagg

SEQ ID NO: 118158 - DNA, 25 bp, probe
attcgccatgtacttgaactactgt

SEQ ID NO: 118159 - DNA, 25 bp, probe
attcatgccagaactgaaagctaaa

SEQ ID NO: 118160 - DNA, 25 bp, probe
attcatgaagaaactgcaaccaaca

SEQ ID NO: 118161 - DNA, 25 bp, probe
attcagtcagacacgaaatccaact

SEQ ID NO: 118162 - DNA, 25 bp, probe
attcaacaaccaggagaacgccatc

SEQ ID NO: 118163 - DNA, 25 bp, probe
attaataaaaggacgatctgcccct

SEQ ID NO: 118164 - DNA, 25 bp, probe
attaattccaagggcataccccgct

SEQ ID NO: 118165 - DNA, 25 bp, probe
attacggccaggagatacaaccagc

SEQ ID NO: 118166 - DNA, 25 bp, probe
attaccaaagacagaccaatcaact

SEQ ID NO: 118167 - DNA, 25 bp, probe
attactgccacagcaagggaatcat

SEQ ID NO: 118168 - DNA, 25 bp, probe
attcctgcagccacctgtggaaacc

SEQ ID NO: 118169 - DNA, 25 bp, probe
attctctaggggccatcaggaaaca

SEQ ID NO: 118170 - DNA, 25 bp, probe
attactgcagagaaacacggaaact

SEQ ID NO: 118171 - DNA, 25 bp, probe
attcactcatcggaaacgctgaccc

SEQ ID NO: 118172 - DNA, 25 bp, probe
attcctgacttacatttgcactggc

SEQ ID NO: 118173 - DNA, 25 bp, probe
attcagggtttggattagcagtgga

SEQ ID NO: 118174 - DNA, 25 bp, probe
attactgagtatatgcaaaagggca

SEQ ID NO: 118175 - DNA, 25 bp, probe
attatttgtcaggtccaaaggtcgt

SEQ ID NO: 118176 - DNA, 25 bp, probe
atctcattttacacaaagggaagtc

SEQ ID NO: 118177 - DNA, 25 bp, probe
attagatttactgctaatgaggaca

SEQ ID NO: 118178 - DNA, 25 bp, probe
attcgatttcaacctaatgaccata

SEQ ID NO: 118179 - DNA, 25 bp, probe
attcaatttatacctagcactttat

SEQ ID NO: 118180 - DNA, 25 bp, probe
attcctttactaccacacatgtcaa

SEQ ID NO: 118181 - DNA, 25 bp, probe
attccttctgcacatgaggccagta

SEQ ID NO: 118182 - DNA, 25 bp, probe
attcaccatcggcatgggcgagctg

SEQ ID NO: 118183 - DNA, 25 bp, probe
attcacctgccgaagctgtctgagc

SEQ ID NO: 118184 - DNA, 25 bp, probe
attcctctggcaataccatgtcagc

SEQ ID NO: 118185 - DNA, 25 bp, probe
attctcacaggtttccagtcagctt

SEQ ID NO: 118186 - DNA, 25 bp, probe
attccaagtgcttatccaactctga

SEQ ID NO: 118187 - DNA, 25 bp, probe
attccaagtgcttatccaactctga

SEQ ID NO: 118188 - DNA, 25 bp, probe
attctcaaatgcggcttcgctttgt

SEQ ID NO: 118189 - DNA, 25 bp, probe
attctcaaatgcggcttcgctttgt

SEQ ID NO: 118190 - DNA, 25 bp, probe
attccgatactagtttgctttgctg

SEQ ID NO: 118191 - DNA, 25 bp, probe
attctggcttctatttctatgtgag

SEQ ID NO: 118192 - DNA, 25 bp, probe
attccagtttacaatcactaggatg

SEQ ID NO: 118193 - DNA, 25 bp, probe
attccagtttacgtcgaagcacatg

SEQ ID NO: 118194 - DNA, 25 bp, probe
attccagtttacgtcgaagcacatg

SEQ ID NO: 118195 - DNA, 25 bp, probe
attccagatattgcacttgaaccag

SEQ ID NO: 118196 - DNA, 25 bp, probe
attacagctattggcaaataaacga

SEQ ID NO: 118197 - DNA, 25 bp, probe
attagcagctttgactgcagcatta

SEQ ID NO: 118198 - DNA, 25 bp, probe
attcacatgcttcagcaccagttcc

SEQ ID NO: 118199 - DNA, 25 bp, probe
attcacatgcttcagcaccagttcc

SEQ ID NO: 118200 - DNA, 25 bp, probe
attcctgctgtattgaccagtctcc

SEQ ID NO: 118201 - DNA, 25 bp, probe
attcagctgctgggtgtccattgcc

SEQ ID NO: 118202 - DNA, 25 bp, probe
attctctgctgtggtatcagtgggc

SEQ ID NO: 118203 - DNA, 25 bp, probe
attcctctggctcaagtggagagtt

SEQ ID NO: 118204 - DNA, 25 bp, probe
atatcccgagtgctgcgtggaagta

SEQ ID NO: 118205 - DNA, 25 bp, probe
attcctgaggtgcagcggggaggag

SEQ ID NO: 118206 - DNA, 25 bp, probe
attacgggttgacttgggatgacat

SEQ ID NO: 118207 - DNA, 25 bp, probe
attaagacgctgaaggagggaacca

SEQ ID NO: 118208 - DNA, 25 bp, probe
attcaagcccaaagtgtgtggcaaa

SEQ ID NO: 118209 - DNA, 25 bp, probe
attaatcacgcgatgttgactgcac

SEQ ID NO: 118210 - DNA, 25 bp, probe
attaattcctgggcatggactacca

SEQ ID NO: 118211 - DNA, 25 bp, probe
attaattcctgggcatggactacca

SEQ ID NO: 118212 - DNA, 25 bp, probe
attcaattcctcggctgaactagcc

SEQ ID NO: 118213 - DNA, 25 bp, probe
attaaccccgcagttcactactgca

SEQ ID NO: 118214 - DNA, 25 bp, probe
attaacttaacagttcccagctgga

SEQ ID NO: 118215 - DNA, 25 bp, probe
attcatgacttagagtcctgccgtg

SEQ ID NO: 118216 - DNA, 25 bp, probe
attcagacgctgacatcagatcaca

SEQ ID NO: 118217 - DNA, 25 bp, probe
attagtcatgcagtcatatggcagc

SEQ ID NO: 118218 - DNA, 25 bp, probe
attctgctgagcaagtgtggctgct

SEQ ID NO: 118219 - DNA, 25 bp, probe
attctgtggcattgtgtcttgctag

SEQ ID NO: 118220 - DNA, 25 bp, probe
attctggatcatttcttgtgtgagt

SEQ ID NO: 118221 - DNA, 25 bp, probe
attccatatgcatctgtgtgtgtag

SEQ ID NO: 118222 - DNA, 25 bp, probe
attctcatcatctctgttatacacc

SEQ ID NO: 118223 - DNA, 25 bp, probe
attcttatgacgaaaatgacatccg

SEQ ID NO: 118224 - DNA, 25 bp, probe
attcctcaacttatagatcatcact

SEQ ID NO: 118225 - DNA, 25 bp, probe
attcctcaacttatagatcatcact

SEQ ID NO: 118226 - DNA, 25 bp, probe
attccatacttattattgatgataa

SEQ ID NO: 118227 - DNA, 25 bp, probe
attccatacttattattgatgataa

SEQ ID NO: 118228 - DNA, 25 bp, probe
attccataccgttactctgatgaat

SEQ ID NO: 118229 - DNA, 25 bp, probe
attaataccagttcatattggaaat

SEQ ID NO: 118230 - DNA, 25 bp, probe
attactgaatagtcccagctggaga

SEQ ID NO: 118231 - DNA, 25 bp, probe
attaatgcgttggcccacgtagcaa

SEQ ID NO: 118232 - DNA, 25 bp, probe
attcatagtgtttcccacgtggcag

SEQ ID NO: 118233 - DNA, 25 bp, probe
attatcctgttctgctacgtggaga

SEQ ID NO: 118234 - DNA, 25 bp, probe
attcatccgttgtatcagaaagcga

SEQ ID NO: 118235 - DNA, 25 bp, probe
attccctgtatctatatctatacct

SEQ ID NO: 118236 - DNA, 25 bp, probe
attccctgtatctatatctatacct

SEQ ID NO: 118237 - DNA, 25 bp, probe
attcctttaggaatgctgtgtgtct

SEQ ID NO: 118238 - DNA, 25 bp, probe
attccttttggactgattctgacat

SEQ ID NO: 118239 - DNA, 25 bp, probe
attccttttggactgattctgacat

SEQ ID NO: 118240 - DNA, 25 bp, probe
attccgtgattaagctttgtgactt

SEQ ID NO: 118241 - DNA, 25 bp, probe
aggctggtggtaacttttgaattat

SEQ ID NO: 118242 - DNA, 25 bp, probe
agttcagtcgaaagcttttaagtat

SEQ ID NO: 118243 - DNA, 25 bp, probe
atattacctgtaacatgtttaaatt

SEQ ID NO: 118244 - DNA, 25 bp, probe
attccatccttcacttatgtaacat

SEQ ID NO: 118245 - DNA, 25 bp, probe
attccatcccatcatcttggtacta

SEQ ID NO: 118246 - DNA, 25 bp, probe
attccatgacccaagcatatggatt

SEQ ID NO: 118247 - DNA, 25 bp, probe
attcgtgacagtggacatctagttc

SEQ ID NO: 118248 - DNA, 25 bp, probe
attcgtgcacactgcacacggtgtc

SEQ ID NO: 118249 - DNA, 25 bp, probe
attcctccatgatgagcagcgtggt

SEQ ID NO: 118250 - DNA, 25 bp, probe
attcgtcctgtaggtgctgtggtgg

SEQ ID NO: 118251 - DNA, 25 bp, probe
attcctcaaggctgtgcgaggtgag

SEQ ID NO: 118252 - DNA, 25 bp, probe
attcctcaaggctgtgcgaggtgag

SEQ ID NO: 118253 - DNA, 25 bp, probe
attcctaatcaacatggagtggaga

SEQ ID NO: 118254 - DNA, 25 bp, probe
attcctaatcaacatggagtggaga

SEQ ID NO: 118255 - DNA, 25 bp, probe
attcctctacacagatgtggtagag

SEQ ID NO: 118256 - DNA, 25 bp, probe
atatcacctacacggagggtgggga

SEQ ID NO: 118257 - DNA, 25 bp, probe
attcaccttccgaaggttctttgat

SEQ ID NO: 118258 - DNA, 25 bp, probe
attcttcgtcgtgagatgtttgttt

SEQ ID NO: 118259 - DNA, 25 bp, probe
attctcccacttttgatggatatgt

SEQ ID NO: 118260 - DNA, 25 bp, probe
attcccaccgtcctatgagagtgtc

SEQ ID NO: 118261 - DNA, 25 bp, probe
attcccaccgtcctatgagagtgtc

SEQ ID NO: 118262 - DNA, 25 bp, probe
attcccaccattattaatctggcca

SEQ ID NO: 118263 - DNA, 25 bp, probe
attcccaaagctcttaattctccat

SEQ ID NO: 118264 - DNA, 25 bp, probe
attaaattgtgtccctgtattacca

SEQ ID NO: 118265 - DNA, 25 bp, probe
attaaattgtgtccctgtattacca

SEQ ID NO: 118266 - DNA, 25 bp, probe
attcagacattaactggcttgttca

SEQ ID NO: 118267 - DNA, 25 bp, probe
attcagacgtactggcttctgtttc

SEQ ID NO: 118268 - DNA, 25 bp, probe
attacatggtacctgagttctgctt

SEQ ID NO: 118269 - DNA, 25 bp, probe
attacaagccaccgttctacgatgt

SEQ ID NO: 118270 - DNA, 25 bp, probe
attcgcaaaatcggttcattcgatg

SEQ ID NO: 118271 - DNA, 25 bp, probe
attcggaaagccttgtcatttgaca

SEQ ID NO: 118272 - DNA, 25 bp, probe
attcggaaagcttttgcttcgcctc

SEQ ID NO: 118273 - DNA, 25 bp, probe
attcaggaatatctgttcccagccc

SEQ ID NO: 118274 - DNA, 25 bp, probe
atctgaggccgatgtttccggtatg

SEQ ID NO: 118275 - DNA, 25 bp, probe
atctgaggccgatgtttccggtatg

SEQ ID NO: 118276 - DNA, 25 bp, probe
accacggcaggttttccgcgatgat

SEQ ID NO: 118277 - DNA, 25 bp, probe
attccctaggtctttccaggatgca

SEQ ID NO: 118278 - DNA, 25 bp, probe
attcccgtggagttgtccatcgtga

SEQ ID NO: 118279 - DNA, 25 bp, probe
attctaccgtggaatgtccctggag

SEQ ID NO: 118280 - DNA, 25 bp, probe
attcaaccttgccacagtagcgtaa

SEQ ID NO: 118281 - DNA, 25 bp, probe
attcccactgtgtccatctatggta

SEQ ID NO: 118282 - DNA, 25 bp, probe
attctgcccttgtatctttgcagtc

SEQ ID NO: 118283 - DNA, 25 bp, probe
attctgcctcaatcttttgcaagcc

SEQ ID NO: 118284 - DNA, 25 bp, probe
atactgcttcatattattttaccta

SEQ ID NO: 118285 - DNA, 25 bp, probe
attcatttctgggctaatttcaaaa

SEQ ID NO: 118286 - DNA, 25 bp, probe
attcagtatggaccccttccaataa

SEQ ID NO: 118287 - DNA, 25 bp, probe
attacttgagcgagcacttcctgaa

SEQ ID NO: 118288 - DNA, 25 bp, probe
attacatgagcccagaggtcatcct

SEQ ID NO: 118289 - DNA, 25 bp, probe
attacagtccaatggtatgctggag

SEQ ID NO: 118290 - DNA, 25 bp, probe
attcctgtccagtggctaagatgca

SEQ ID NO: 118291 - DNA, 25 bp, probe
attcctggtaatacagctcagtgtc

SEQ ID NO: 118292 - DNA, 25 bp, probe
attcggagtgatttaccactgcaca

SEQ ID NO: 118293 - DNA, 25 bp, probe
attctagagtgaacttccacaccat

SEQ ID NO: 118294 - DNA, 25 bp, probe
attcttgcactgtgctgaaccaagt

SEQ ID NO: 118295 - DNA, 25 bp, probe
attcagtctctgtgtaatcatctga

SEQ ID NO: 118296 - DNA, 25 bp, probe
attcagctttgttgcaacttctatt

SEQ ID NO: 118297 - DNA, 25 bp, probe
attcatgttgtaaccgcttcatatg

SEQ ID NO: 118298 - DNA, 25 bp, probe
attcatgtcttgacccagtcatata

SEQ ID NO: 118299 - DNA, 25 bp, probe
attcattctgctagcactccaagca

SEQ ID NO: 118300 - DNA, 25 bp, probe
attcattcgagatgctctctcaacc

SEQ ID NO: 118301 - DNA, 25 bp, probe
atatcagtggacgacgccttacagc

SEQ ID NO: 118302 - DNA, 25 bp, probe
atatcaggatgctgagggcccacca

SEQ ID NO: 118303 - DNA, 25 bp, probe
atatcaggatgctgagggcccacca

SEQ ID NO: 118304 - DNA, 25 bp, probe
attcaggagaactggtcgccatcaa

SEQ ID NO: 118305 - DNA, 25 bp, probe
attcaggaaacctgtgccgccatgc

SEQ ID NO: 118306 - DNA, 25 bp, probe
attcagggagctgcaaatgccctct

SEQ ID NO: 118307 - DNA, 25 bp, probe
attcaggcgaattccataccgttac

SEQ ID NO: 118308 - DNA, 25 bp, probe
attcaggcaccatccaaatgctgtt

SEQ ID NO: 118309 - DNA, 25 bp, probe
attcaatgcccggcgtaagcttaag

SEQ ID NO: 118310 - DNA, 25 bp, probe
attcctgctcgtgcttaagattgat

SEQ ID NO: 118311 - DNA, 25 bp, probe
attcttactgttctgaaattaggaa

SEQ ID NO: 118312 - DNA, 25 bp, probe
attcattaggttttaactgaatgga

SEQ ID NO: 118313 - DNA, 25 bp, probe
attcagataccttcaacaactgcaa

SEQ ID NO: 118314 - DNA, 25 bp, probe
attctgaattctggaggctatatca

SEQ ID NO: 118315 - DNA, 25 bp, probe
attctcacatacctgaggcagccca

SEQ ID NO: 118316 - DNA, 25 bp, probe
attctggagacagtcagcatccgcc

SEQ ID NO: 118317 - DNA, 25 bp, probe
attagatgaacagcgcacagccacg

SEQ ID NO: 118318 - DNA, 25 bp, probe
attaagaccacggagcagctcatcg

SEQ ID NO: 118319 - DNA, 25 bp, probe
attacatgtatctgaggcagctatt

SEQ ID NO: 118320 - DNA, 25 bp, probe
attaatgcctacgatgacagtcaaa

SEQ ID NO: 118321 - DNA, 25 bp, probe
attaaagctacctcctaaactatag

SEQ ID NO: 118322 - DNA, 25 bp, probe
attaaaatacctgatctaaccgatg

SEQ ID NO: 118323 - DNA, 25 bp, probe
attcaaaaacctaatcattccacca

SEQ ID NO: 118324 - DNA, 25 bp, probe
attcaaaaacctaatcattccacca

SEQ ID NO: 118325 - DNA, 25 bp, probe
attcgaacatatgcagttattccac

SEQ ID NO: 118326 - DNA, 25 bp, probe
attcgagcctcaaaatttgctgcac

SEQ ID NO: 118327 - DNA, 25 bp, probe
attcttctccaagagtgcttgcatc

SEQ ID NO: 118328 - DNA, 25 bp, probe
attcttctccaagagtgcttgcatc

SEQ ID NO: 118329 - DNA, 25 bp, probe
attctgttggcctaagtgcctcttc

SEQ ID NO: 118330 - DNA, 25 bp, probe
attatgctttcctaatggagtcaac

SEQ ID NO: 118331 - DNA, 25 bp, probe
attctgtatgttttcatgggtcagg

SEQ ID NO: 118332 - DNA, 25 bp, probe
attcctgagtcttccagagcctaag

SEQ ID NO: 118333 - DNA, 25 bp, probe
attcctgagtcttccagagcctaag

SEQ ID NO: 118334 - DNA, 25 bp, probe
attcgtgagtcacctggaggccaag

SEQ ID NO: 118335 - DNA, 25 bp, probe
attctgtggtacatgcagagaccaa

SEQ ID NO: 118336 - DNA, 25 bp, probe
attcaagaggaatcgcagatcccaa

SEQ ID NO: 118337 - DNA, 25 bp, probe
attcaatagcagtgacgcgctctcc

SEQ ID NO: 118338 - DNA, 25 bp, probe
attcagtgcaagtcaacgtccagcc

SEQ ID NO: 118339 - DNA, 25 bp, probe
attcagtcggaatggcgctcagcag

SEQ ID NO: 118340 - DNA, 25 bp, probe
attcctgtggaatgactgtcacaca

SEQ ID NO: 118341 - DNA, 25 bp, probe
attctctgtggctgcaacggcatga

SEQ ID NO: 118342 - DNA, 25 bp, probe
attctctgtggctgcaacggcatga

SEQ ID NO: 118343 - DNA, 25 bp, probe
attctggctggctcaaaggtagtga

SEQ ID NO: 118344 - DNA, 25 bp, probe
attctggtaccacaggcagtttgaa

SEQ ID NO: 118345 - DNA, 25 bp, probe
attctggaagcattttctgacttta

SEQ ID NO: 118346 - DNA, 25 bp, probe
attcgtgctatcttttaatctttta

SEQ ID NO: 118347 - DNA, 25 bp, probe
attctgtgacatactttttttttct

SEQ ID NO: 118348 - DNA, 25 bp, probe
attatagaaattttgccttgttgcc

SEQ ID NO: 118349 - DNA, 25 bp, probe
atattaggaataactgcgtggggtt

SEQ ID NO: 118350 - DNA, 25 bp, probe
atattaggaataactgcgtggggtt

SEQ ID NO: 118351 - DNA, 25 bp, probe
atttaggaattcctctgttttatgg

SEQ ID NO: 118352 - DNA, 25 bp, probe
attaatggaattggattttgtcaca

SEQ ID NO: 118353 - DNA, 25 bp, probe
attcacattccctgactttgtaaca

SEQ ID NO: 118354 - DNA, 25 bp, probe
gttcagttcgtatacttcgtaagaa

SEQ ID NO: 118355 - DNA, 25 bp, probe
attcagtatttagcaattctgtaaa

SEQ ID NO: 118356 - DNA, 25 bp, probe
attcagtatttagcaattctgtaaa

SEQ ID NO: 118357 - DNA, 25 bp, probe
attctgtaaacctaatgtctgtata

SEQ ID NO: 118358 - DNA, 25 bp, probe
attttaacctcatcagccgtcagga

SEQ ID NO: 118359 - DNA, 25 bp, probe
atttttacctactgtgtcttggaat

SEQ ID NO: 118360 - DNA, 25 bp, probe
attttggaagtgctgggttgggaag

SEQ ID NO: 118361 - DNA, 25 bp, probe
attttggaagtgctgggttgggaag

SEQ ID NO: 118362 - DNA, 25 bp, probe
attcttggagagtggggttctgggg

SEQ ID NO: 118363 - DNA, 25 bp, probe
attctgttggtctggtttactggga

SEQ ID NO: 118364 - DNA, 25 bp, probe
attctgttggtctggtttactggga

SEQ ID NO: 118365 - DNA, 25 bp, probe
attcagttgttagtgtgtcttagtg

SEQ ID NO: 118366 - DNA, 25 bp, probe
attagttgttaatgtctgtgacaaa

SEQ ID NO: 118367 - DNA, 25 bp, probe
attagttgttaatgtctgtgacaaa

SEQ ID NO: 118368 - DNA, 25 bp, probe
attctttttcattgggtgatgtcag

SEQ ID NO: 118369 - DNA, 25 bp, probe
attcgttatacggaagatgatgaac

SEQ ID NO: 118370 - DNA, 25 bp, probe
attctttacaccaaagtatgaactg

SEQ ID NO: 118371 - DNA, 25 bp, probe
attcttcttggtctactgtgaactc

SEQ ID NO: 118372 - DNA, 25 bp, probe
attcttctgtggcagttatcttacc

SEQ ID NO: 118373 - DNA, 25 bp, probe
attatcgctgggcatttttcatggc

SEQ ID NO: 118374 - DNA, 25 bp, probe
attcaccgtgtgctttatgaccagc

SEQ ID NO: 118375 - DNA, 25 bp, probe
attcaccgtgtgctttatgaccagc

SEQ ID NO: 118376 - DNA, 25 bp, probe
attccctatgggttctgtgaccact

SEQ ID NO: 118377 - DNA, 25 bp, probe
attccctatgggttctgtgaccact

SEQ ID NO: 118378 - DNA, 25 bp, probe
attctttgcagccagagttggacaa

SEQ ID NO: 118379 - DNA, 25 bp, probe
attcatctagcagacagctctggac

SEQ ID NO: 118380 - DNA, 25 bp, probe
attcaaagcagatcaccattgcgat

SEQ ID NO: 118381 - DNA, 25 bp, probe
attaaacatatcatccttggagagg

SEQ ID NO: 118382 - DNA, 25 bp, probe
attaaacatatcatccttggagagg

SEQ ID NO: 118383 - DNA, 25 bp, probe
atttaaatacatcatctggccaggc

SEQ ID NO: 118384 - DNA, 25 bp, probe
atttaaatacatcatctggccaggc

SEQ ID NO: 118385 - DNA, 25 bp, probe
attaaaaatctgcatcttccactat

SEQ ID NO: 118386 - DNA, 25 bp, probe
attaccatgcagtcaggattctcca

SEQ ID NO: 118387 - DNA, 25 bp, probe
attctcaagcaatatgatcatccca

SEQ ID NO: 118388 - DNA, 25 bp, probe
attctcaagcaatatgatcatccca

SEQ ID NO: 118389 - DNA, 25 bp, probe
attctcacactattatgcaaattca

SEQ ID NO: 118390 - DNA, 25 bp, probe
attctggcaatcattaaagtgcata

SEQ ID NO: 118391 - DNA, 25 bp, probe
attctcacctctattaagctgctga

SEQ ID NO: 118392 - DNA, 25 bp, probe
attcaccgcgatcttaaatgtgaca

SEQ ID NO: 118393 - DNA, 25 bp, probe
attcaccggatccttgacaacttta

SEQ ID NO: 118394 - DNA, 25 bp, probe
attcaccggatccttgacaacttta

SEQ ID NO: 118395 - DNA, 25 bp, probe
attctgtgggtccgataatatcttt

SEQ ID NO: 118396 - DNA, 25 bp, probe
attagctggggagatactgtcctta

SEQ ID NO: 118397 - DNA, 25 bp, probe
attactgggaattatagtgtgcgat

SEQ ID NO: 118398 - DNA, 25 bp, probe
atatcctggggtaaagattgatgaa

SEQ ID NO: 118399 - DNA, 25 bp, probe
attcttgggtgtggctatattacaa

SEQ ID NO: 118400 - DNA, 25 bp, probe
attcttgggtgtggctatattacaa

SEQ ID NO: 118401 - DNA, 25 bp, probe
atttttggattacttactcaagttg

SEQ ID NO: 118402 - DNA, 25 bp, probe
atattttgtattctggaccacttac

SEQ ID NO: 118403 - DNA, 25 bp, probe
attctatattttaatggatctactg

SEQ ID NO: 118404 - DNA, 25 bp, probe
attcgatgcatttttatagaaacac

SEQ ID NO: 118405 - DNA, 25 bp, probe
attctgcatagattatttagtataa

SEQ ID NO: 118406 - DNA, 25 bp, probe
attctgcatagattatttagtataa

SEQ ID NO: 118407 - DNA, 25 bp, probe
attacacagattatacagctctaag

SEQ ID NO: 118408 - DNA, 25 bp, probe
attctcaagagcacacaggattaag

SEQ ID NO: 118409 - DNA, 25 bp, probe
attcagagtaacacaggattcactg

SEQ ID NO: 118410 - DNA, 25 bp, probe
attcgaggaattggccgctgtcact

SEQ ID NO: 118411 - DNA, 25 bp, probe
attcggtcaattgtcactgtcatca

SEQ ID NO: 118412 - DNA, 25 bp, probe
attcggtcaattgtcactgtcatca

SEQ ID NO: 118413 - DNA, 25 bp, probe
attcacagtaacattctctgtccag

SEQ ID NO: 118414 - DNA, 25 bp, probe
attcagctaacgcttccagaccgcg

SEQ ID NO: 118415 - DNA, 25 bp, probe
attcattacccactcactaacttgg

SEQ ID NO: 118416 - DNA, 25 bp, probe
attattaaatagtcactagtattgc

SEQ ID NO: 118417 - DNA, 25 bp, probe
attcactaagccctacataggattc

SEQ ID NO: 118418 - DNA, 25 bp, probe
attcgatgagacctgtacccgattt

SEQ ID NO: 118419 - DNA, 25 bp, probe
attttgaagtggatgcccgtcttgc

SEQ ID NO: 118420 - DNA, 25 bp, probe
atttctaggtcgtgctacaacttcc

SEQ ID NO: 118421 - DNA, 25 bp, probe
attactgagggccaccaaatagcct

SEQ ID NO: 118422 - DNA, 25 bp, probe
attcttcaggaccaccaactggcaa

SEQ ID NO: 118423 - DNA, 25 bp, probe
attcttcaggaccaccaactggcaa

SEQ ID NO: 118424 - DNA, 25 bp, probe
attcttcaggaccaccaactggcaa

SEQ ID NO: 118425 - DNA, 25 bp, probe
attcttcatttcctcagaactagaa

SEQ ID NO: 118426 - DNA, 25 bp, probe
attcttctctctcatattactcaaa

SEQ ID NO: 118427 - DNA, 25 bp, probe
attcttctcttgctgtaacacttga

SEQ ID NO: 118428 - DNA, 25 bp, probe
attcttttgatgttgtaaacgtact

SEQ ID NO: 118429 - DNA, 25 bp, probe
attcttttgatgttgtaaacgtact

SEQ ID NO: 118430 - DNA, 25 bp, probe
attcttagtcatattaaatctgtag

SEQ ID NO: 118431 - DNA, 25 bp, probe
attaaagtgcatagatttctatctt

SEQ ID NO: 118432 - DNA, 25 bp, probe
attaaatgtgagatttcttctttga

SEQ ID NO: 118433 - DNA, 25 bp, probe
agtactattgaatgtattactttac

SEQ ID NO: 118434 - DNA, 25 bp, probe
agtactattgaatgtattactttac

SEQ ID NO: 118435 - DNA, 25 bp, probe
attactttaggactgtgtagttgta

SEQ ID NO: 118436 - DNA, 25 bp, probe
attactttggggttgctgcaacagt

SEQ ID NO: 118437 - DNA, 25 bp, probe
atctacatcgtcgggggctacaact

SEQ ID NO: 118438 - DNA, 25 bp, probe
atctacatcgtcgggggctacaact

SEQ ID NO: 118439 - DNA, 25 bp, probe
attaatctttggggagacaccctat

SEQ ID NO: 118440 - DNA, 25 bp, probe
atctagatttttccggaccaaccat

SEQ ID NO: 118441 - DNA, 25 bp, probe
attagatgttttccttgggatttat

SEQ ID NO: 118442 - DNA, 25 bp, probe
attaatgctttggttctgggttgtt

SEQ ID NO: 118443 - DNA, 25 bp, probe
attcattctttcattggagacggtt

SEQ ID NO: 118444 - DNA, 25 bp, probe
atttttcttatggggcagaagcctg

SEQ ID NO: 118445 - DNA, 25 bp, probe
attctctttgagtggtggaaactgg

SEQ ID NO: 118446 - DNA, 25 bp, probe
attctccttgatgatcgtggacaca

SEQ ID NO: 118447 - DNA, 25 bp, probe
attctcctttagacagtgggcatta

SEQ ID NO: 118448 - DNA, 25 bp, probe
attcttgtttataacagtgccttaa

SEQ ID NO: 118449 - DNA, 25 bp, probe
attctccattatgttcgtggtgtaa

SEQ ID NO: 118450 - DNA, 25 bp, probe
attctcctattgctaaatgtgtgat

SEQ ID NO: 118451 - DNA, 25 bp, probe
attctctctagtttacttgtgtgtg

SEQ ID NO: 118452 - DNA, 25 bp, probe
attcttctgacttaggattggcctt

SEQ ID NO: 118453 - DNA, 25 bp, probe
attctattaccatgcagtcaggatt

SEQ ID NO: 118454 - DNA, 25 bp, probe
attctatggcaccctcagttgggtc

SEQ ID NO: 118455 - DNA, 25 bp, probe
attctcctgcccaggcattggaggc

SEQ ID NO: 118456 - DNA, 25 bp, probe
attctcttgtccaggcatcagaggc

SEQ ID NO: 118457 - DNA, 25 bp, probe
attcttgttgccacagctggagctc

SEQ ID NO: 118458 - DNA, 25 bp, probe
attctgtggctcagcacacaggact

SEQ ID NO: 118459 - DNA, 25 bp, probe
attttcagctgcagaaccagcctcc

SEQ ID NO: 118460 - DNA, 25 bp, probe
attcttacttatttcatcgttactt

SEQ ID NO: 118461 - DNA, 25 bp, probe
attcttacttatttcatcgttactt

SEQ ID NO: 118462 - DNA, 25 bp, probe
attaccatttattacatcgttcatc

SEQ ID NO: 118463 - DNA, 25 bp, probe
attagccattccgaaatctgtgtaa

SEQ ID NO: 118464 - DNA, 25 bp, probe
attacattgctcctgaaattttaag

SEQ ID NO: 118465 - DNA, 25 bp, probe
attctcagtctcttgcgtttattac

SEQ ID NO: 118466 - DNA, 25 bp, probe
attctcagtctcttgcgtttattac

SEQ ID NO: 118467 - DNA, 25 bp, probe
attctcattcttaggtgcattttat

SEQ ID NO: 118468 - DNA, 25 bp, probe
attctcttattctcagattttctcc

SEQ ID NO: 118469 - DNA, 25 bp, probe
attctattatatatgcagactttct

SEQ ID NO: 118470 - DNA, 25 bp, probe
attctattatatatgcagactttct

SEQ ID NO: 118471 - DNA, 25 bp, probe
attctattcattatgccttaccatg

SEQ ID NO: 118472 - DNA, 25 bp, probe
attctattcattatgccttaccatg

SEQ ID NO: 118473 - DNA, 25 bp, probe
attctgtacactgaccttaggcatg

SEQ ID NO: 118474 - DNA, 25 bp, probe
attatattcatcgtgaccttcgggc

SEQ ID NO: 118475 - DNA, 25 bp, probe
atttgtctcaggcaccgtgcaaggc

SEQ ID NO: 118476 - DNA, 25 bp, probe
attcttccatcctgccggatgagtg

SEQ ID NO: 118477 - DNA, 25 bp, probe
attcttaatgaattcactggcatga

SEQ ID NO: 118478 - DNA, 25 bp, probe
attcttaatgaattcactggcatga

SEQ ID NO: 118479 - DNA, 25 bp, probe
attcttaatgtttctaggaactatc

SEQ ID NO: 118480 - DNA, 25 bp, probe
attctgtgattgattttggtcctcc

SEQ ID NO: 118481 - DNA, 25 bp, probe
attctgtacatgatgctgtcggggc

SEQ ID NO: 118482 - DNA, 25 bp, probe
attcttacatggacagcaccaggag

SEQ ID NO: 118483 - DNA, 25 bp, probe
attcttccatcaactcatggcaggg

SEQ ID NO: 118484 - DNA, 25 bp, probe
attcttccacatatgctggctgctg

SEQ ID NO: 118485 - DNA, 25 bp, probe
attcttctactgattcagtcagaca

SEQ ID NO: 118486 - DNA, 25 bp, probe
attctttcacttaccagaaagacct

SEQ ID NO: 118487 - DNA, 25 bp, probe
attctttccttaaaattcatgattt

SEQ ID NO: 118488 - DNA, 25 bp, probe
attctttcctttcaattatagtgac

SEQ ID NO: 118489 - DNA, 25 bp, probe
attcttgtcctaaagcaattgaagt

SEQ ID NO: 118490 - DNA, 25 bp, probe
attatggatccggatgagcaattgg

SEQ ID NO: 118491 - DNA, 25 bp, probe
attatggatccggatgagcaattgg

SEQ ID NO: 118492 - DNA, 25 bp, probe
attaggtctctgttgactggctgtg

SEQ ID NO: 118493 - DNA, 25 bp, probe
attcagttctgtggtgcatctgagc

SEQ ID NO: 118494 - DNA, 25 bp, probe
attcatgcttcttgtggtctggact

SEQ ID NO: 118495 - DNA, 25 bp, probe
attctgaattcttggatattactta

SEQ ID NO: 118496 - DNA, 25 bp, probe
attctgaatctttgtatttgctttt

SEQ ID NO: 118497 - DNA, 25 bp, probe
attcaaatcgcttttctggctgact

SEQ ID NO: 118498 - DNA, 25 bp, probe
attcaaatgctcttttccctataac

SEQ ID NO: 118499 - DNA, 25 bp, probe
attcaaatgctcttttccctataac

SEQ ID NO: 118500 - DNA, 25 bp, probe
attagcatgtttattccctcactac

SEQ ID NO: 118501 - DNA, 25 bp, probe
attcagagaactatactaccctcac

SEQ ID NO: 118502 - DNA, 25 bp, probe
attcaagcactcttaaaaccactta

SEQ ID NO: 118503 - DNA, 25 bp, probe
attcaagcactcttaaaaccactta

SEQ ID NO: 118504 - DNA, 25 bp, probe
attctagcgctcccaaaaaagcact

SEQ ID NO: 118505 - DNA, 25 bp, probe
attcatgaccccaaagaatcacacc

SEQ ID NO: 118506 - DNA, 25 bp, probe
attctgaattccatgcacagatacc

SEQ ID NO: 118507 - DNA, 25 bp, probe
atttgagtatccgattcgccatcac

SEQ ID NO: 118508 - DNA, 25 bp, probe
attaacttcctgtatgctgcaactc

SEQ ID NO: 118509 - DNA, 25 bp, probe
attaaagggctgaatcatgaaaaaa

SEQ ID NO: 118510 - DNA, 25 bp, probe
atttactgggtgttctaacaataag

SEQ ID NO: 118511 - DNA, 25 bp, probe
attaactggcctgatctaacaatga

SEQ ID NO: 118512 - DNA, 25 bp, probe
attaactgggatgatctcattaata

SEQ ID NO: 118513 - DNA, 25 bp, probe
attattcttaatgtctgtaaaaacg

SEQ ID NO: 118514 - DNA, 25 bp, probe
atttatcctttgtttcaccaaccag

SEQ ID NO: 118515 - DNA, 25 bp, probe
attacagcctgtatttgccaaaaca

SEQ ID NO: 118516 - DNA, 25 bp, probe
attacagtctgaattgagtgctgag

SEQ ID NO: 118517 - DNA, 25 bp, probe
attcagactctgatggtgatggcaa

SEQ ID NO: 118518 - DNA, 25 bp, probe
attcagactctgatggtgatggcaa

SEQ ID NO: 118519 - DNA, 25 bp, probe
attagcacatcaactggcagaggca

SEQ ID NO: 118520 - DNA, 25 bp, probe
attagacagatgacggctgctcgaa

SEQ ID NO: 118521 - DNA, 25 bp, probe
attcagcagaggacagtgttgccaa

SEQ ID NO: 118522 - DNA, 25 bp, probe
attagcagaagcaaatgtcatgcag

SEQ ID NO: 118523 - DNA, 25 bp, probe
atatagaacagcatcagttcaaact

SEQ ID NO: 118524 - DNA, 25 bp, probe
attaaacacacccatacaaacattg

SEQ ID NO: 118525 - DNA, 25 bp, probe
attcatttaacccataacatgagtt

SEQ ID NO: 118526 - DNA, 25 bp, probe
attagatctagacaagaacatacat

SEQ ID NO: 118527 - DNA, 25 bp, probe
attaggagtgctgataagaatgaat

SEQ ID NO: 118528 - DNA, 25 bp, probe
attcaggttctcccaaagatgacat

SEQ ID NO: 118529 - DNA, 25 bp, probe
attaggatattgctcaaaattatat

SEQ ID NO: 118530 - DNA, 25 bp, probe
attagggcatttacaaaactattgt

SEQ ID NO: 118531 - DNA, 25 bp, probe
attacggcttttctattgctgtatg

SEQ ID NO: 118532 - DNA, 25 bp, probe
attcagtggcaatttttcttggtat

SEQ ID NO: 118533 - DNA, 25 bp, probe
attcagtggtcttatttttgggtga

SEQ ID NO: 118534 - DNA, 25 bp, probe
attcagtccttgcctttgaagggta

SEQ ID NO: 118535 - DNA, 25 bp, probe
attagttctctgctgttgggtggct

SEQ ID NO: 118536 - DNA, 25 bp, probe
attagttctctgctgttgggtggct

SEQ ID NO: 118537 - DNA, 25 bp, probe
attcactgtctctgttggtggtaca

SEQ ID NO: 118538 - DNA, 25 bp, probe
attcactgtcttatctgcagaaatt

SEQ ID NO: 118539 - DNA, 25 bp, probe
attctatgtgcttttatcagaaagt

SEQ ID NO: 118540 - DNA, 25 bp, probe
attcatattcatttgtatccaaggt

SEQ ID NO: 118541 - DNA, 25 bp, probe
attcagaagcacctgaactccacgg

SEQ ID NO: 118542 - DNA, 25 bp, probe
attacatacatcataagctccagcc

SEQ ID NO: 118543 - DNA, 25 bp, probe
attcaaagatctcgaactccatgat

SEQ ID NO: 118544 - DNA, 25 bp, probe
attagccagatgtagaatccctgtt

SEQ ID NO: 118545 - DNA, 25 bp, probe
attagcggagtgcgcatggcctgtt

SEQ ID NO: 118546 - DNA, 25 bp, probe
attcagggcactcatgatccaggac

SEQ ID NO: 118547 - DNA, 25 bp, probe
attatgtggtcgctgaccggaccga

SEQ ID NO: 118548 - DNA, 25 bp, probe
attaatgagatggtggactggatga

SEQ ID NO: 118549 - DNA, 25 bp, probe
attaatgagatggtggactggatga

SEQ ID NO: 118550 - DNA, 25 bp, probe
attacaggatgacagcagccgagac

SEQ ID NO: 118551 - DNA, 25 bp, probe
attcacagagacctagcagcacgca

SEQ ID NO: 118552 - DNA, 25 bp, probe
attcatagagatcttaagccaagta

SEQ ID NO: 118553 - DNA, 25 bp, probe
attcatagagacattaagccagaga

SEQ ID NO: 118554 - DNA, 25 bp, probe
attcacagagatattaagccagaga

SEQ ID NO: 118555 - DNA, 25 bp, probe
attcactaggttcgaatccagagag

SEQ ID NO: 118556 - DNA, 25 bp, probe
attacttagtatatatctaggcaac

SEQ ID NO: 118557 - DNA, 25 bp, probe
attagctgcttctatgtttcatagt

SEQ ID NO: 118558 - DNA, 25 bp, probe
attatctttcttgatactttccaaa

SEQ ID NO: 118559 - DNA, 25 bp, probe
attcatttgtttgcttgtgttctac

SEQ ID NO: 118560 - DNA, 25 bp, probe
attatattatattccatttgttttc

SEQ ID NO: 118561 - DNA, 25 bp, probe
attcattcaaatgctcttttcccta

SEQ ID NO: 118562 - DNA, 25 bp, probe
attttccacaacttttgacctgtga

SEQ ID NO: 118563 - DNA, 25 bp, probe
attttctaccctaatttcactggag

SEQ ID NO: 118564 - DNA, 25 bp, probe
atttcccagtttactcttagtgaag

SEQ ID NO: 118565 - DNA, 25 bp, probe
attcacttcagtttttgttattgta

SEQ ID NO: 118566 - DNA, 25 bp, probe
attacttgaatgtagttatctattg

SEQ ID NO: 118567 - DNA, 25 bp, probe
attaaatactgtggttgcctctatg

SEQ ID NO: 118568 - DNA, 25 bp, probe
attctatttgttattgctactatgt

SEQ ID NO: 118569 - DNA, 25 bp, probe
attctactatttatgtgatcctttt

SEQ ID NO: 118570 - DNA, 25 bp, probe
attctatgctagtttctttctatgt

SEQ ID NO: 118571 - DNA, 25 bp, probe
attctatgctagtttctttctatgt

SEQ ID NO: 118572 - DNA, 25 bp, probe
attcattcagtgctcattttcttgg

SEQ ID NO: 118573 - DNA, 25 bp, probe
attattctgggtttaggtgtcagct

SEQ ID NO: 118574 - DNA, 25 bp, probe
attattctgggtttaggtgtcagct

SEQ ID NO: 118575 - DNA, 25 bp, probe
attattcttgtttataacagtgcct

SEQ ID NO: 118576 - DNA, 25 bp, probe
attctttttctctcaagagttccat

SEQ ID NO: 118577 - DNA, 25 bp, probe
attctttgttctttacgttgttcat

SEQ ID NO: 118578 - DNA, 25 bp, probe
attctatatttcgtgtcatcttttt

SEQ ID NO: 118579 - DNA, 25 bp, probe
attcttttacatggcttctttaatg

SEQ ID NO: 118580 - DNA, 25 bp, probe
attcttttacatggcttctttaatg

SEQ ID NO: 118581 - DNA, 25 bp, probe
attcattatacatggcttcttttat

SEQ ID NO: 118582 - DNA, 25 bp, probe
atatcttaagcaggtttgttttcag

SEQ ID NO: 118583 - DNA, 25 bp, probe
attcatgtacagtaaatttgttata

SEQ ID NO: 118584 - DNA, 25 bp, probe
attcttggatattacttatgtctaa

SEQ ID NO: 118585 - DNA, 25 bp, probe
attctttgattgtcatcttattgct

SEQ ID NO: 118586 - DNA, 25 bp, probe
attcttctgaacaacactcattgcc

SEQ ID NO: 118587 - DNA, 25 bp, probe
attttctgaagctcttgaagcctcc

SEQ ID NO: 118588 - DNA, 25 bp, probe
atttgcaggacacttttacaggccc

SEQ ID NO: 118589 - DNA, 25 bp, probe
ataggcacaagattttcaacagggc

SEQ ID NO: 118590 - DNA, 25 bp, probe
attagcacataatctaaaagatgga

SEQ ID NO: 118591 - DNA, 25 bp, probe
attatcacattctgccattaaggga

SEQ ID NO: 118592 - DNA, 25 bp, probe
attatacatccattgcaagaacagt

SEQ ID NO: 118593 - DNA, 25 bp, probe
attacacatccatcatgaacaggaa

SEQ ID NO: 118594 - DNA, 25 bp, probe
attacacatccatcatgaacaggaa

SEQ ID NO: 118595 - DNA, 25 bp, probe
atttaatcctagtaacagtgccatg

SEQ ID NO: 118596 - DNA, 25 bp, probe
atttgaataccataccttgctggaa

SEQ ID NO: 118597 - DNA, 25 bp, probe
atttaattccccactattagcaggc

SEQ ID NO: 118598 - DNA, 25 bp, probe
attacaattccaaccatctttacat

SEQ ID NO: 118599 - DNA, 25 bp, probe
attactattccataactccagacat

SEQ ID NO: 118600 - DNA, 25 bp, probe
attactattccataactccagacat

SEQ ID NO: 118601 - DNA, 25 bp, probe
attactatgtcttttgattcccaat

SEQ ID NO: 118602 - DNA, 25 bp, probe
attacactgtctttttgccatcaaa

SEQ ID NO: 118603 - DNA, 25 bp, probe
attatgccagtttctgttctctcac

SEQ ID NO: 118604 - DNA, 25 bp, probe
attcatggcagattgtttgtgcttt

SEQ ID NO: 118605 - DNA, 25 bp, probe
attcttcatgaaatgtgttttgtct

SEQ ID NO: 118606 - DNA, 25 bp, probe
attcttgatgacttggagctctttc

SEQ ID NO: 118607 - DNA, 25 bp, probe
attcttcagatcttctcagtgaatt

SEQ ID NO: 118608 - DNA, 25 bp, probe
attcttaacattgcagcaatcacct

SEQ ID NO: 118609 - DNA, 25 bp, probe
attacttggcattcacagcacatca

SEQ ID NO: 118610 - DNA, 25 bp, probe
attacatgttgcttccagacatact

SEQ ID NO: 118611 - DNA, 25 bp, probe
attaagttgcttaggaatattccca

SEQ ID NO: 118612 - DNA, 25 bp, probe
attaagttgcttaggaatattccca

SEQ ID NO: 118613 - DNA, 25 bp, probe
atttatagcttacggaatgattcca

SEQ ID NO: 118614 - DNA, 25 bp, probe
attcagtagtgttaagtatgtcgcc

SEQ ID NO: 118615 - DNA, 25 bp, probe
attaaagatgtgcaacctatgcgcc

SEQ ID NO: 118616 - DNA, 25 bp, probe
attcaaggcattgagaatgtacctg

SEQ ID NO: 118617 - DNA, 25 bp, probe
attcaagtgcattaaagtctacaat

SEQ ID NO: 118618 - DNA, 25 bp, probe
attcattatgatcaacagacctcac

SEQ ID NO: 118619 - DNA, 25 bp, probe
attcattgctttaaagacctcttta

SEQ ID NO: 118620 - DNA, 25 bp, probe
attttctttgaaatggcttctggaa

SEQ ID NO: 118621 - DNA, 25 bp, probe
atttccgtggctatggcttgggcca

SEQ ID NO: 118622 - DNA, 25 bp, probe
atttccgtgacatggctttggggag

SEQ ID NO: 118623 - DNA, 25 bp, probe
atttcttgtgtagcgttcttaggaa

SEQ ID NO: 118624 - DNA, 25 bp, probe
attttctggtactctgtgaaagaag

SEQ ID NO: 118625 - DNA, 25 bp, probe
attaggggctacagtggcaaggaga

SEQ ID NO: 118626 - DNA, 25 bp, probe
attacttcctacaggagcacggcag

SEQ ID NO: 118627 - DNA, 25 bp, probe
attttctccaaacaagatcacagca

SEQ ID NO: 118628 - DNA, 25 bp, probe
atttctactacatctaatgaccaca

SEQ ID NO: 118629 - DNA, 25 bp, probe
atttcgagatggcaccacaaccaag

SEQ ID NO: 118630 - DNA, 25 bp, probe
atttcagttccattacggaccaatg

SEQ ID NO: 118631 - DNA, 25 bp, probe
attatattgtctcaacatggtccat

SEQ ID NO: 118632 - DNA, 25 bp, probe
attaatcttaaatcatgtacttttt

SEQ ID NO: 118633 - DNA, 25 bp, probe
attaatcctatatgtaatgatcatt

SEQ ID NO: 118634 - DNA, 25 bp, probe
attcagtccttcttggaagactact

SEQ ID NO: 118635 - DNA, 25 bp, probe
attcagtccttcttggaagactact

SEQ ID NO: 118636 - DNA, 25 bp, probe
attttgccttgaatggaacctacta

SEQ ID NO: 118637 - DNA, 25 bp, probe
attttgccttgaatggaacctacta

SEQ ID NO: 118638 - DNA, 25 bp, probe
attttcacaggaagctaccacgcct

SEQ ID NO: 118639 - DNA, 25 bp, probe
attttcaagctttcaaatcctccct

SEQ ID NO: 118640 - DNA, 25 bp, probe
atttatagcacctcagacattccca

SEQ ID NO: 118641 - DNA, 25 bp, probe
attttcagggcagatggtccccaag

SEQ ID NO: 118642 - DNA, 25 bp, probe
atttctcgtggcaagaagggagctc

SEQ ID NO: 118643 - DNA, 25 bp, probe
atttctcgtggcaagaagggagctc

SEQ ID NO: 118644 - DNA, 25 bp, probe
atattgcttggagatgaggggcagc

SEQ ID NO: 118645 - DNA, 25 bp, probe
attacctgtgaactgcagtggggca

SEQ ID NO: 118646 - DNA, 25 bp, probe
attagctgtgagatgcctgtgagag

SEQ ID NO: 118647 - DNA, 25 bp, probe
attacatgagcgagcacttgctgaa

SEQ ID NO: 118648 - DNA, 25 bp, probe
attagatgacagcgacttggcaata

SEQ ID NO: 118649 - DNA, 25 bp, probe
attatctgaactggactagtgaaaa

SEQ ID NO: 118650 - DNA, 25 bp, probe
attagtgatacatacttgtgaagga

SEQ ID NO: 118651 - DNA, 25 bp, probe
attagtgatacatacttgtgaagga

SEQ ID NO: 118652 - DNA, 25 bp, probe
atttcgaacaaattcttgagaacgc

SEQ ID NO: 118653 - DNA, 25 bp, probe
attatcgggaaccatttgtgcaacg

SEQ ID NO: 118654 - DNA, 25 bp, probe
attcatggggaactccatttcagca

SEQ ID NO: 118655 - DNA, 25 bp, probe
attcagggacattctccattcaaaa

SEQ ID NO: 118656 - DNA, 25 bp, probe
attcagtgtgaagctcttgtcagaa

SEQ ID NO: 118657 - DNA, 25 bp, probe
attagtgatatagtgctgtttaagc

SEQ ID NO: 118658 - DNA, 25 bp, probe
attagtgatatagtgctgtttaagc

SEQ ID NO: 118659 - DNA, 25 bp, probe
attcaatgtaatgggatttcctgca

SEQ ID NO: 118660 - DNA, 25 bp, probe
attaagtatacgtatttttatatgt

SEQ ID NO: 118661 - DNA, 25 bp, probe
atttgatgttagcgtataaattagt

SEQ ID NO: 118662 - DNA, 25 bp, probe
atttgatgtcttagagaaacttgga

SEQ ID NO: 118663 - DNA, 25 bp, probe
attacatgctcctggaaattttaag

SEQ ID NO: 118664 - DNA, 25 bp, probe
attactgcaccatgtttacttcaaa

SEQ ID NO: 118665 - DNA, 25 bp, probe
attcactgctccttttgtgaaacca

SEQ ID NO: 118666 - DNA, 25 bp, probe
attattcaagcactcttaaaaccac

SEQ ID NO: 118667 - DNA, 25 bp, probe
attattcaagcactcttaaaaccac

SEQ ID NO: 118668 - DNA, 25 bp, probe
attttctgagacttggattaattca

SEQ ID NO: 118669 - DNA, 25 bp, probe
attttctatcccagagtcaggccaa

SEQ ID NO: 118670 - DNA, 25 bp, probe
atttttccgcaaatcagtcggttga

SEQ ID NO: 118671 - DNA, 25 bp, probe
atttttccagaagcccactattgcc

SEQ ID NO: 118672 - DNA, 25 bp, probe
attttctccacaaaggccctggtgg

SEQ ID NO: 118673 - DNA, 25 bp, probe
attttctccacaaaggccctggtgg

SEQ ID NO: 118674 - DNA, 25 bp, probe
attattcttccataagaccatgtgg

SEQ ID NO: 118675 - DNA, 25 bp, probe
attcactttcactggtgcacactga

SEQ ID NO: 118676 - DNA, 25 bp, probe
attcactttcactggtgcacactga

SEQ ID NO: 118677 - DNA, 25 bp, probe
attcaagtgtagctgggcacacatg

SEQ ID NO: 118678 - DNA, 25 bp, probe
attcaggattggttcagtggcagca

SEQ ID NO: 118679 - DNA, 25 bp, probe
attcacagattccagccagtggctg

SEQ ID NO: 118680 - DNA, 25 bp, probe
attcacatgctaaagccaggattgt

SEQ ID NO: 118681 - DNA, 25 bp, probe
attcatcttcaaagcacaactctat

SEQ ID NO: 118682 - DNA, 25 bp, probe
attcatcttcaaagactaatccaag

SEQ ID NO: 118683 - DNA, 25 bp, probe
attcatcttcaaagactaatccaag

SEQ ID NO: 118684 - DNA, 25 bp, probe
attacctgcatcagcactatatcct

SEQ ID NO: 118685 - DNA, 25 bp, probe
attacctgcatcagcactatatcct

SEQ ID NO: 118686 - DNA, 25 bp, probe
attcacaatgcattccttataaata

SEQ ID NO: 118687 - DNA, 25 bp, probe
attacctcattcttcctaacaagca

SEQ ID NO: 118688 - DNA, 25 bp, probe
attacctcattcttcctaacaagca

SEQ ID NO: 118689 - DNA, 25 bp, probe
attacccataggtcttaagatgcaa

SEQ ID NO: 118690 - DNA, 25 bp, probe
attacccataggtcttaagatgcaa

SEQ ID NO: 118691 - DNA, 25 bp, probe
atttagcctaggagtaagagaacac

SEQ ID NO: 118692 - DNA, 25 bp, probe
atttggactcgtttaccgagacatc

SEQ ID NO: 118693 - DNA, 25 bp, probe
atttcggcatttctttccagacatc

SEQ ID NO: 118694 - DNA, 25 bp, probe
atataggtgttttttgtcctggtat

SEQ ID NO: 118695 - DNA, 25 bp, probe
attcatggcttttttaatccatggt

SEQ ID NO: 118696 - DNA, 25 bp, probe
attcatgtattatgattaaatctga

SEQ ID NO: 118697 - DNA, 25 bp, probe
attcagtgcatttcctcttgatttg

SEQ ID NO: 118698 - DNA, 25 bp, probe
attcagatcattttagcttgttgct

SEQ ID NO: 118699 - DNA, 25 bp, probe
attcagcatcctttatctgtgactt

SEQ ID NO: 118700 - DNA, 25 bp, probe
attcaaactttgtctgatgacttta

SEQ ID NO: 118701 - DNA, 25 bp, probe
attcaagtatttttatcatgctatt

SEQ ID NO: 118702 - DNA, 25 bp, probe
attaatgtcatgttgcttgtcgctt

SEQ ID NO: 118703 - DNA, 25 bp, probe
attaatgatgcctttctgatcttga

SEQ ID NO: 118704 - DNA, 25 bp, probe
attaatgatgcctttctgatcttga

SEQ ID NO: 118705 - DNA, 25 bp, probe
attaaagcagctccctgcttcatca

SEQ ID NO: 118706 - DNA, 25 bp, probe
attatacattctcgactttggggat

SEQ ID NO: 118707 - DNA, 25 bp, probe
attatacattctcgactttggggat

SEQ ID NO: 118708 - DNA, 25 bp, probe
attaatctttccctgttaggctgat

SEQ ID NO: 118709 - DNA, 25 bp, probe
attattctttcccaggtgatgggaa

SEQ ID NO: 118710 - DNA, 25 bp, probe
attagctctgttggcaagggtctgg

SEQ ID NO: 118711 - DNA, 25 bp, probe
attatcctgattatggggtctcctg

SEQ ID NO: 118712 - DNA, 25 bp, probe
attatcctgattatggggtctcctg

SEQ ID NO: 118713 - DNA, 25 bp, probe
attttctgattaagagccagggcca

SEQ ID NO: 118714 - DNA, 25 bp, probe
attttgtatttggcaactgtgggca

SEQ ID NO: 118715 - DNA, 25 bp, probe
atttatgttgtgtgccagtctggtc

SEQ ID NO: 118716 - DNA, 25 bp, probe
attacaatcggaacacattcagctg

SEQ ID NO: 118717 - DNA, 25 bp, probe
attaacagcagggtcacttctcatt

SEQ ID NO: 118718 - DNA, 25 bp, probe
attaccaggggtttggccattgctt

SEQ ID NO: 118719 - DNA, 25 bp, probe
atttttaggtctctgtccattgctt

SEQ ID NO: 118720 - DNA, 25 bp, probe
acttttaagtccagctattcattag

SEQ ID NO: 118721 - DNA, 25 bp, probe
attttggcaagtctttcgtctttgc

SEQ ID NO: 118722 - DNA, 25 bp, probe
attttggcacgatgaattatttttg

SEQ ID NO: 118723 - DNA, 25 bp, probe
attaggctgccgtatatactactat

SEQ ID NO: 118724 - DNA, 25 bp, probe
attatccaactgttatactaccaga

SEQ ID NO: 118725 - DNA, 25 bp, probe
attatgccaagctgataactactga

SEQ ID NO: 118726 - DNA, 25 bp, probe
attaccgagcaccagaagtcatcct

SEQ ID NO: 118727 - DNA, 25 bp, probe
attaaccagcactgtgttcattttc

SEQ ID NO: 118728 - DNA, 25 bp, probe
attagcctcacaatggtgcaccgtt

SEQ ID NO: 118729 - DNA, 25 bp, probe
attacgacagcaagggcattggttg

SEQ ID NO: 118730 - DNA, 25 bp, probe
attacccagcacctggaatggatcc

SEQ ID NO: 118731 - DNA, 25 bp, probe
attacaccaatgcttcagatgggct

SEQ ID NO: 118732 - DNA, 25 bp, probe
attaccacctgacctgcagggatgt

SEQ ID NO: 118733 - DNA, 25 bp, probe
attatcccagcttgttcaggagggc

SEQ ID NO: 118734 - DNA, 25 bp, probe
attcacctccgagctcaggagaggc

SEQ ID NO: 118735 - DNA, 25 bp, probe
attagcctcgcctctgaggaagcgc

SEQ ID NO: 118736 - DNA, 25 bp, probe
attactgcctttgctgggcaaccaa

SEQ ID NO: 118737 - DNA, 25 bp, probe
attcacctttatgcatgggcaccaa

SEQ ID NO: 118738 - DNA, 25 bp, probe
attcacctttatgcatgggcaccaa

SEQ ID NO: 118739 - DNA, 25 bp, probe
attaccttaatatgcaagactctca

SEQ ID NO: 118740 - DNA, 25 bp, probe
attaagttcatccctgcaaggatct

SEQ ID NO: 118741 - DNA, 25 bp, probe
attaagagtcaatctgcaagccatt

SEQ ID NO: 118742 - DNA, 25 bp, probe
attaactgtatagctgaaccagcat

SEQ ID NO: 118743 - DNA, 25 bp, probe
attaactgtatagctgaaccagcat

SEQ ID NO: 118744 - DNA, 25 bp, probe
atttactatatcttcgacagctaca

SEQ ID NO: 118745 - DNA, 25 bp, probe
atttcctggacattgggcctatatt

SEQ ID NO: 118746 - DNA, 25 bp, probe
atctcttcggcacggtgccgtacat

SEQ ID NO: 118747 - DNA, 25 bp, probe
atctcttcggcacggtgccgtacat

SEQ ID NO: 118748 - DNA, 25 bp, probe
attatctcggacacatcttgtgaca

SEQ ID NO: 118749 - DNA, 25 bp, probe
attttcggaagctggggacacggca

SEQ ID NO: 118750 - DNA, 25 bp, probe
attttaggaacttattcagacacgt

SEQ ID NO: 118751 - DNA, 25 bp, probe
atttcggtataataatcgtgagcgt

SEQ ID NO: 118752 - DNA, 25 bp, probe
atttctggaatttaagtcgtgtgtt

SEQ ID NO: 118753 - DNA, 25 bp, probe
attttagacattcctcgtcagtatt

SEQ ID NO: 118754 - DNA, 25 bp, probe
attttacatcctctggttgccatat

SEQ ID NO: 118755 - DNA, 25 bp, probe
atttatcaatcccgttttgacatgt

SEQ ID NO: 118756 - DNA, 25 bp, probe
attaaatacccacatttgacataaa

SEQ ID NO: 118757 - DNA, 25 bp, probe
attaaatacccacatttgacataaa

SEQ ID NO: 118758 - DNA, 25 bp, probe
attaagcataccacgtagtcactaa

SEQ ID NO: 118759 - DNA, 25 bp, probe
attacacaacagatgccatagagca

SEQ ID NO: 118760 - DNA, 25 bp, probe
attacacaccttagctataagaaaa

SEQ ID NO: 118761 - DNA, 25 bp, probe
attatgaaaatgtgctggaaagaaa

SEQ ID NO: 118762 - DNA, 25 bp, probe
attatgaaaatgtgctggaaagaaa

SEQ ID NO: 118763 - DNA, 25 bp, probe
attatacccatctaccaaaagcaga

SEQ ID NO: 118764 - DNA, 25 bp, probe
attatacctactttacccatgatga

SEQ ID NO: 118765 - DNA, 25 bp, probe
attaccacgacatttaacatcaata

SEQ ID NO: 118766 - DNA, 25 bp, probe
attacgaatagaattgaatgccgaa

SEQ ID NO: 118767 - DNA, 25 bp, probe
attagccattggcattgttgctgga

SEQ ID NO: 118768 - DNA, 25 bp, probe
atctacagctttctcggggagacct

SEQ ID NO: 118769 - DNA, 25 bp, probe
atctatgcctttgtcggggagaagt

SEQ ID NO: 118770 - DNA, 25 bp, probe
atttacttctttgtgggaagcagta

SEQ ID NO: 118771 - DNA, 25 bp, probe
atttagccctaagattggaagaatg

SEQ ID NO: 118772 - DNA, 25 bp, probe
atttagccagcgtttattgtagtaa

SEQ ID NO: 118773 - DNA, 25 bp, probe
attaggaagtgtttatgttgtttat

SEQ ID NO: 118774 - DNA, 25 bp, probe
attactaactctgggattttcattt

SEQ ID NO: 118775 - DNA, 25 bp, probe
attactaagctctgtgattttggtt

SEQ ID NO: 118776 - DNA, 25 bp, probe
attactcagatactcgtggctttgc

SEQ ID NO: 118777 - DNA, 25 bp, probe
attagtcacagatattggctttgct

SEQ ID NO: 118778 - DNA, 25 bp, probe
attagatactgttatgtcccccaag

SEQ ID NO: 118779 - DNA, 25 bp, probe
attaattctagtagtctccccatgg

SEQ ID NO: 118780 - DNA, 25 bp, probe
attaatactactagcttccagacaa

SEQ ID NO: 118781 - DNA, 25 bp, probe
attagatttctcatttgccaataat

SEQ ID NO: 118782 - DNA, 25 bp, probe
attacatctttaatttggcagaaat

SEQ ID NO: 118783 - DNA, 25 bp, probe
attacgattattattcagcagcaca

SEQ ID NO: 118784 - DNA, 25 bp, probe
attaccatcttttttgcatggataa

SEQ ID NO: 118785 - DNA, 25 bp, probe
attattatctgtctcttgtagtaca

SEQ ID NO: 118786 - DNA, 25 bp, probe
atttatgatgcccagttggaagaaa

SEQ ID NO: 118787 - DNA, 25 bp, probe
atttgaggccgaagaaggagacata

SEQ ID NO: 118788 - DNA, 25 bp, probe
atatggtgtgaggtgggaggacaca

SEQ ID NO: 118789 - DNA, 25 bp, probe
attactggactctgaaggccacatt

SEQ ID NO: 118790 - DNA, 25 bp, probe
attacagtaacgtagggtcagctat

SEQ ID NO: 118791 - DNA, 25 bp, probe
attaggaaacaaagttctagcattt

SEQ ID NO: 118792 - DNA, 25 bp, probe
attagaaccctaatgttcaggaaga

SEQ ID NO: 118793 - DNA, 25 bp, probe
attcaagaccctacatggtcctact

SEQ ID NO: 118794 - DNA, 25 bp, probe
attcaaacagacagaggcttatact

SEQ ID NO: 118795 - DNA, 25 bp, probe
attcaaacagtctcaggaaatcaaa

SEQ ID NO: 118796 - DNA, 25 bp, probe
atttacatcgtcacggagtacatga

SEQ ID NO: 118797 - DNA, 25 bp, probe
attacctgtgtcatcaaagtagtga

SEQ ID NO: 118798 - DNA, 25 bp, probe
attaccggtcgatgcaacgagtgat

SEQ ID NO: 118799 - DNA, 25 bp, probe
attacctggaccagctgacccagat

SEQ ID NO: 118800 - DNA, 25 bp, probe
attacctggaccagctgacccagat

SEQ ID NO: 118801 - DNA, 25 bp, probe
attagcgagtgagaacatccccagc

SEQ ID NO: 118802 - DNA, 25 bp, probe
attactggtatgaaccaccacgccc

SEQ ID NO: 118803 - DNA, 25 bp, probe
attacaggtgtgcaccaccacaccc

SEQ ID NO: 118804 - DNA, 25 bp, probe
attacaggcgtaagccactgcgccc

SEQ ID NO: 118805 - DNA, 25 bp, probe
attacattgggaaccactgtgcctg

SEQ ID NO: 118806 - DNA, 25 bp, probe
attacaggcacgtgccaccatgtct

SEQ ID NO: 118807 - DNA, 25 bp, probe
atttcaacatcctcaatcctgttat

SEQ ID NO: 118808 - DNA, 25 bp, probe
atttgatcaccttccaaacatttag

SEQ ID NO: 118809 - DNA, 25 bp, probe
attaacacctgcctcatgtcagttt

SEQ ID NO: 118810 - DNA, 25 bp, probe
attcaaacctgcatattgtgatttt

SEQ ID NO: 118811 - DNA, 25 bp, probe
attaataccatgacatcttgcttat

SEQ ID NO: 118812 - DNA, 25 bp, probe
attaataccatgacatcttgcttat

SEQ ID NO: 118813 - DNA, 25 bp, probe
attacacctcatccatcgatgtttg

SEQ ID NO: 118814 - DNA, 25 bp, probe
attaagatctctaatctgttttgag

SEQ ID NO: 118815 - DNA, 25 bp, probe
atttctgtgtcaaactgtttagcaa

SEQ ID NO: 118816 - DNA, 25 bp, probe
atttctggcttatggtttggcagca

SEQ ID NO: 118817 - DNA, 25 bp, probe
atattcgagctcaacggtttaccct

SEQ ID NO: 118818 - DNA, 25 bp, probe
atatacgaattgacagtgttatccc

SEQ ID NO: 118819 - DNA, 25 bp, probe
atttctggaggcagtgctgttcccc

SEQ ID NO: 118820 - DNA, 25 bp, probe
attatcgctacgggtggtcttttgc

SEQ ID NO: 118821 - DNA, 25 bp, probe
attatcgctacgggtggtcttttgc

SEQ ID NO: 118822 - DNA, 25 bp, probe
attaccattcgatgttcttttattc

SEQ ID NO: 118823 - DNA, 25 bp, probe
atagtccgattgcgttatttcttct

SEQ ID NO: 118824 - DNA, 25 bp, probe
atttcacgggagatttcttgttgct

SEQ ID NO: 118825 - DNA, 25 bp, probe
attatctggaggtctcatttcttgt

SEQ ID NO: 118826 - DNA, 25 bp, probe
attacatgcagtcttatatttttcc

SEQ ID NO: 118827 - DNA, 25 bp, probe
attaccaaagtgatatgtattccaa

SEQ ID NO: 118828 - DNA, 25 bp, probe
atctacgacaatgttctggtcccaa

SEQ ID NO: 118829 - DNA, 25 bp, probe
cttcaggaagttacttggttcccat

SEQ ID NO: 118830 - DNA, 25 bp, probe
cttcaggaagttacttggttcccat

SEQ ID NO: 118831 - DNA, 25 bp, probe
attaggtcagatttttagcttccct

SEQ ID NO: 118832 - DNA, 25 bp, probe
attaggctaatgctgtgttgtctcc

SEQ ID NO: 118833 - DNA, 25 bp, probe
attaatgcagaatgttatcttcagc

SEQ ID NO: 118834 - DNA, 25 bp, probe
atatgaaagaacttgtacctatcac

SEQ ID NO: 118835 - DNA, 25 bp, probe
attaactgcaacattgaccttctca

SEQ ID NO: 118836 - DNA, 25 bp, probe
atttactctatgcattaactctccc

SEQ ID NO: 118837 - DNA, 25 bp, probe
attattttcatgtatgctcgacctc

SEQ ID NO: 118838 - DNA, 25 bp, probe
attaatgtctcaaagctgtgcagtc

SEQ ID NO: 118839 - DNA, 25 bp, probe
attaatgtctcaaagctgtgcagtc

SEQ ID NO: 118840 - DNA, 25 bp, probe
attttgtgcacagagatctggctgc

SEQ ID NO: 118841 - DNA, 25 bp, probe
attttggaggatagactgtgcagtg

SEQ ID NO: 118842 - DNA, 25 bp, probe
attatggggtggaagctctcaaata

SEQ ID NO: 118843 - DNA, 25 bp, probe
attaggccgaggtaaatacagtgaa

SEQ ID NO: 118844 - DNA, 25 bp, probe
attaggccgaggtaaatacagtgaa

SEQ ID NO: 118845 - DNA, 25 bp, probe
attactgcacgggcaacaaaggatg

SEQ ID NO: 118846 - DNA, 25 bp, probe
ataactggcgggcacagggtcaggt

SEQ ID NO: 118847 - DNA, 25 bp, probe
ataacttcgaagccatagggtggag

SEQ ID NO: 118848 - DNA, 25 bp, probe
atgttgttcaaatgcattttggggg

SEQ ID NO: 118849 - DNA, 25 bp, probe
atttgtttgaaccacattctgggga

SEQ ID NO: 118850 - DNA, 25 bp, probe
attattcttagaacactttcaatgg

SEQ ID NO: 118851 - DNA, 25 bp, probe
attttctgtgcagccactgttaagc

SEQ ID NO: 118852 - DNA, 25 bp, probe
attttgcagccagaccgatgtgtat

SEQ ID NO: 118853 - DNA, 25 bp, probe
attttgcagccagaccgatgtgtat

SEQ ID NO: 118854 - DNA, 25 bp, probe
attttgtcacagcaactgaagtcac

SEQ ID NO: 118855 - DNA, 25 bp, probe
attttgtatcatcgtgcctatagcc

SEQ ID NO: 118856 - DNA, 25 bp, probe
attttgtatcatcgtgcctatagcc

SEQ ID NO: 118857 - DNA, 25 bp, probe
attatatctcagtgtatcggagcct

SEQ ID NO: 118858 - DNA, 25 bp, probe
atatattgccgcagtaaccagttaa

SEQ ID NO: 118859 - DNA, 25 bp, probe
attttccacggaaacagaactcgat

SEQ ID NO: 118860 - DNA, 25 bp, probe
atttccccagaaacctgtaatcagt

SEQ ID NO: 118861 - DNA, 25 bp, probe
attatccctcatgtgatgcctgtaa

SEQ ID NO: 118862 - DNA, 25 bp, probe
attatccctcatgtgatgcctgtaa

SEQ ID NO: 118863 - DNA, 25 bp, probe
attaccgcatctatgtcacagctaa

SEQ ID NO: 118864 - DNA, 25 bp, probe
attaagccatgcatgtctaagtacg

SEQ ID NO: 118865 - DNA, 25 bp, probe
attaagacagcacttatattgtaca

SEQ ID NO: 118866 - DNA, 25 bp, probe
atttcaacaacactatactaacaag

SEQ ID NO: 118867 - DNA, 25 bp, probe
atttcagtcaagcctgtgaccccaa

SEQ ID NO: 118868 - DNA, 25 bp, probe
atttcagtcaagcctgtgaccccaa

SEQ ID NO: 118869 - DNA, 25 bp, probe
atttcagtcaagcctgtgaccccaa

SEQ ID NO: 118870 - DNA, 25 bp, probe
atttcacaatgactgctgaggaatc

SEQ ID NO: 118871 - DNA, 25 bp, probe
attaagcagatagtcaaagaactgt

SEQ ID NO: 118872 - DNA, 25 bp, probe
attattcagcaaggccaaagacttt

SEQ ID NO: 118873 - DNA, 25 bp, probe
attattcagcaaggccaaagacttt

SEQ ID NO: 118874 - DNA, 25 bp, probe
attatctctgagtccaccagaagtt

SEQ ID NO: 118875 - DNA, 25 bp, probe
attacttctctctatctggaattta

SEQ ID NO: 118876 - DNA, 25 bp, probe
attacttctttagatgacattagga

SEQ ID NO: 118877 - DNA, 25 bp, probe
attagcttctagaaaatagctgcta

SEQ ID NO: 118878 - DNA, 25 bp, probe
attatgatgttaacaactcagccat

SEQ ID NO: 118879 - DNA, 25 bp, probe
atttaaccttgcacatgcatgctca

SEQ ID NO: 118880 - DNA, 25 bp, probe
atttaaccttgcacatgcatgctca

SEQ ID NO: 118881 - DNA, 25 bp, probe
atttaaccagtcactattgatggac

SEQ ID NO: 118882 - DNA, 25 bp, probe
atttaaatcctctctacttgactca

SEQ ID NO: 118883 - DNA, 25 bp, probe
attttgtattctggaccacttactg

SEQ ID NO: 118884 - DNA, 25 bp, probe
attttggctttcacaatttatcttt

SEQ ID NO: 118885 - DNA, 25 bp, probe
attttggttttatttcttgtcacat

SEQ ID NO: 118886 - DNA, 25 bp, probe
atttttttggtatttattcatcagg

SEQ ID NO: 118887 - DNA, 25 bp, probe
attatttattaatgcgttcccagtc

SEQ ID NO: 118888 - DNA, 25 bp, probe
attatttattaatgcgttcccagtc

SEQ ID NO: 118889 - DNA, 25 bp, probe
atttaatattcctggcataccttta

SEQ ID NO: 118890 - DNA, 25 bp, probe
atttgcaatattcctttgggcctct

SEQ ID NO: 118891 - DNA, 25 bp, probe
atttgatttctgcattttggccctc

SEQ ID NO: 118892 - DNA, 25 bp, probe
atttattttggcaagtctttcgtct

SEQ ID NO: 118893 - DNA, 25 bp, probe
atttttggtgaatgtgggtagtcat

SEQ ID NO: 118894 - DNA, 25 bp, probe
atttcctgggaattggtaaacatca

SEQ ID NO: 118895 - DNA, 25 bp, probe
atgttcttgggactctgtggtacct

SEQ ID NO: 118896 - DNA, 25 bp, probe
atttcattgtggccctgaaggttct

SEQ ID NO: 118897 - DNA, 25 bp, probe
attttctttccaggcatagcagttc

SEQ ID NO: 118898 - DNA, 25 bp, probe
atttctctttcacggaacaatccca

SEQ ID NO: 118899 - DNA, 25 bp, probe
atattgttgtactggacccagcccc

SEQ ID NO: 118900 - DNA, 25 bp, probe
attttgtggacagagccccagtcac

SEQ ID NO: 118901 - DNA, 25 bp, probe
atctgcattgggaagtcggccaccc

SEQ ID NO: 118902 - DNA, 25 bp, probe
atctgcattgggaagtcggccaccc

SEQ ID NO: 118903 - DNA, 25 bp, probe
atcgttgttggaccggctacgtaag

SEQ ID NO: 118904 - DNA, 25 bp, probe
attttttataaccgctacactacag

SEQ ID NO: 118905 - DNA, 25 bp, probe
attatgttttgacacacccctaagt

SEQ ID NO: 118906 - DNA, 25 bp, probe
attatgttttgacacacccctaagt

SEQ ID NO: 118907 - DNA, 25 bp, probe
attattgttatacacagctttatga

SEQ ID NO: 118908 - DNA, 25 bp, probe
attagtttctcactaggcatgtctt

SEQ ID NO: 118909 - DNA, 25 bp, probe
attagtttattcttgtggcatcatt

SEQ ID NO: 118910 - DNA, 25 bp, probe
attatggtgtttgtgatgactattt

SEQ ID NO: 118911 - DNA, 25 bp, probe
attatggttttgctttttgattctt

SEQ ID NO: 118912 - DNA, 25 bp, probe
atttgtgcttttattgttttccctg

SEQ ID NO: 118913 - DNA, 25 bp, probe
atttgttatttcatggttaccgtat

SEQ ID NO: 118914 - DNA, 25 bp, probe
atttctagtataaatgggtacctgt

SEQ ID NO: 118915 - DNA, 25 bp, probe
atttctagtataaatgggtacctgt

SEQ ID NO: 118916 - DNA, 25 bp, probe
atttcaagtattttaattgcacctt

SEQ ID NO: 118917 - DNA, 25 bp, probe
atttatcccatatatagttcagcct

SEQ ID NO: 118918 - DNA, 25 bp, probe
atttaccagaatagtcttccaccag

SEQ ID NO: 118919 - DNA, 25 bp, probe
atttaaaaatcagcatctgggccag

SEQ ID NO: 118920 - DNA, 25 bp, probe
atttgtagaaacgctctggcaaaga

SEQ ID NO: 118921 - DNA, 25 bp, probe
attagctaaaaccttccatgtcaag

SEQ ID NO: 118922 - DNA, 25 bp, probe
attactaaaagagcctctgctttgt

SEQ ID NO: 118923 - DNA, 25 bp, probe
attacttaaaatacacatcccagca

SEQ ID NO: 118924 - DNA, 25 bp, probe
attactgtttaattgacatactcag

SEQ ID NO: 118925 - DNA, 25 bp, probe
attactgttcttctacatgtgactg

SEQ ID NO: 118926 - DNA, 25 bp, probe
attattgactttgtacagtctgctt

SEQ ID NO: 118927 - DNA, 25 bp, probe
attattactttgaaggatgtctttg

SEQ ID NO: 118928 - DNA, 25 bp, probe
attataaagttgcagaaatttggtg

SEQ ID NO: 118929 - DNA, 25 bp, probe
atttttatgcttctgaaactgaggc

SEQ ID NO: 118930 - DNA, 25 bp, probe
attattatagctacctgttaaagaa

SEQ ID NO: 118931 - DNA, 25 bp, probe
atttgtttgtacggaccataaatat

SEQ ID NO: 118932 - DNA, 25 bp, probe
atttttactacaggcccttcaatat

SEQ ID NO: 118933 - DNA, 25 bp, probe
attataggactttgcctcgtacaat

SEQ ID NO: 118934 - DNA, 25 bp, probe
attttggccacttgtaggtatcagt

SEQ ID NO: 118935 - DNA, 25 bp, probe
atacttgtccctctaagtcatttag

SEQ ID NO: 118936 - DNA, 25 bp, probe
atatcttttcctctttaatagtagt

SEQ ID NO: 118937 - DNA, 25 bp, probe
attattattcccattctacatacta

SEQ ID NO: 118938 - DNA, 25 bp, probe
attactttgaccactcttcagagaa

SEQ ID NO: 118939 - DNA, 25 bp, probe
attaccatcgaccttctgttgaaga

SEQ ID NO: 118940 - DNA, 25 bp, probe
attaccatcgaccttctgttgaaga

SEQ ID NO: 118941 - DNA, 25 bp, probe
attacccagtctcatctgtgtacac

SEQ ID NO: 118942 - DNA, 25 bp, probe
atttgccaagtacgttggtaccgct

SEQ ID NO: 118943 - DNA, 25 bp, probe
atttgccaagtacgttggtaccgct

SEQ ID NO: 118944 - DNA, 25 bp, probe
attttgtgaaatagttggtatccct

SEQ ID NO: 118945 - DNA, 25 bp, probe
attttgtacaattcattaaaggcta

SEQ ID NO: 118946 - DNA, 25 bp, probe
attagttaatgttaccaaaatctgt

SEQ ID NO: 118947 - DNA, 25 bp, probe
attagctctcactttcaagaagcaa

SEQ ID NO: 118948 - DNA, 25 bp, probe
attacatacatctttcaatgtccaa

SEQ ID NO: 118949 - DNA, 25 bp, probe
attacatacatcttggaattccaaa

SEQ ID NO: 118950 - DNA, 25 bp, probe
attacgtcatgcaggaacatcgcaa

SEQ ID NO: 118951 - DNA, 25 bp, probe
attacagtatgtggggacacccatg

SEQ ID NO: 118952 - DNA, 25 bp, probe
attatcatgtatgttggacccagat

SEQ ID NO: 118953 - DNA, 25 bp, probe
atttctgattcagtatggacccctt

SEQ ID NO: 118954 - DNA, 25 bp, probe
attatacattcacatggacggcccg

SEQ ID NO: 118955 - DNA, 25 bp, probe
atttgacctacttgctggggtacag

SEQ ID NO: 118956 - DNA, 25 bp, probe
atttatcctaatactggggaacaat

SEQ ID NO: 118957 - DNA, 25 bp, probe
atttatcctaatactggggaacaat

SEQ ID NO: 118958 - DNA, 25 bp, probe
attttcctactctgcaagtggacga

SEQ ID NO: 118959 - DNA, 25 bp, probe
attttccatttgttgagacttacac

SEQ ID NO: 118960 - DNA, 25 bp, probe
atttctggctttcccagactagaaa

SEQ ID NO: 118961 - DNA, 25 bp, probe
attttgccttggaatcatgattaca

SEQ ID NO: 118962 - DNA, 25 bp, probe
attttgcctgtgcataggagcaatt

SEQ ID NO: 118963 - DNA, 25 bp, probe
attttccgctggtgtatcagttagt

SEQ ID NO: 118964 - DNA, 25 bp, probe
attttcagcctgtgtttacctgagt

SEQ ID NO: 118965 - DNA, 25 bp, probe
attttcccaatcattttctctagtg

SEQ ID NO: 118966 - DNA, 25 bp, probe
attattccacatatttttccttgaa

SEQ ID NO: 118967 - DNA, 25 bp, probe
atttgcccagatattggtgtcctta

SEQ ID NO: 118968 - DNA, 25 bp, probe
atttactagattctagcaccgctgt

SEQ ID NO: 118969 - DNA, 25 bp, probe
atttccaggcttctcagataccagc

SEQ ID NO: 118970 - DNA, 25 bp, probe
atttcagaaggtcatcagattgtga

SEQ ID NO: 118971 - DNA, 25 bp, probe
atatgtaaatgtgttagcactgata

SEQ ID NO: 118972 - DNA, 25 bp, probe
atttcaatgagtttgcaggcgtgaa

SEQ ID NO: 118973 - DNA, 25 bp, probe
attatttatggatcaggctgctgca

SEQ ID NO: 118974 - DNA, 25 bp, probe
attatgttttgatcactgctgcttg

SEQ ID NO: 118975 - DNA, 25 bp, probe
attatttttgctacactcattttat

SEQ ID NO: 118976 - DNA, 25 bp, probe
attactttgtttcacatgatttcag

SEQ ID NO: 118977 - DNA, 25 bp, probe
attacttaattgttcatgttttcag

SEQ ID NO: 118978 - DNA, 25 bp, probe
attacttaattgttcatgttttcag

SEQ ID NO: 118979 - DNA, 25 bp, probe
attatttaagcgtctctgtttacct

SEQ ID NO: 118980 - DNA, 25 bp, probe
attatctataacctactgtctcgcc

SEQ ID NO: 118981 - DNA, 25 bp, probe
attttcaagaggaacatatgcctga

SEQ ID NO: 118982 - DNA, 25 bp, probe
attagtaacaggaactgaggcgata

SEQ ID NO: 118983 - DNA, 25 bp, probe
attactaaagcatagctaggtcatt

SEQ ID NO: 118984 - DNA, 25 bp, probe
atttcttaacatgagctccagttta

SEQ ID NO: 118985 - DNA, 25 bp, probe
atttctgtaagaagacactccatgt

SEQ ID NO: 118986 - DNA, 25 bp, probe
attttctgataaatgccaaacatgt

SEQ ID NO: 118987 - DNA, 25 bp, probe
attttctgataaatgccaaacatgt

SEQ ID NO: 118988 - DNA, 25 bp, probe
attattgctgcaactggcaaacctg

SEQ ID NO: 118989 - DNA, 25 bp, probe
attatatcctacacaatgatccttc

SEQ ID NO: 118990 - DNA, 25 bp, probe
attatgtgacttgtagcttcctctg

SEQ ID NO: 118991 - DNA, 25 bp, probe
attattattgtggatactggccctt

SEQ ID NO: 118992 - DNA, 25 bp, probe
attttcactttgtactggcaggctc

SEQ ID NO: 118993 - DNA, 25 bp, probe
attttatcttgtccgtgaagatgta

SEQ ID NO: 118994 - DNA, 25 bp, probe
atttgtgactctttcctaaagccaa

SEQ ID NO: 118995 - DNA, 25 bp, probe
atttcatacctatcatcttaagtag

SEQ ID NO: 118996 - DNA, 25 bp, probe
atttacactagttacttagacaagt

SEQ ID NO: 118997 - DNA, 25 bp, probe
atttccactgagaggcctagacatg

SEQ ID NO: 118998 - DNA, 25 bp, probe
atttcacaagactggcttcaggcat

SEQ ID NO: 118999 - DNA, 25 bp, probe
atttctaagagcttggtgtagggca

SEQ ID NO: 119000 - DNA, 25 bp, probe
atttctctgcatgggttggtcagga

SEQ ID NO: 119001 - DNA, 25 bp, probe
atttttgcccagtcgttctggacca

SEQ ID NO: 119002 - DNA, 25 bp, probe
attttagtccagtgatgtccatgtc

SEQ ID NO: 119003 - DNA, 25 bp, probe
attttcattccagtgctgaatccgt

SEQ ID NO: 119004 - DNA, 25 bp, probe
attattcttgcactgtgctgaacca

SEQ ID NO: 119005 - DNA, 25 bp, probe
attatgtgctgtgcgtggtgaccat

SEQ ID NO: 119006 - DNA, 25 bp, probe
attattgcagtagatgttgccaaag

SEQ ID NO: 119007 - DNA, 25 bp, probe
attttcagctactatttgaatattc

SEQ ID NO: 119008 - DNA, 25 bp, probe
attttcaccacgatcgattagactg

SEQ ID NO: 119009 - DNA, 25 bp, probe
attactaaaagaaccaccagatctg

SEQ ID NO: 119010 - DNA, 25 bp, probe
attaccaaaataacacagcaccgtg

SEQ ID NO: 119011 - DNA, 25 bp, probe
atttccaaaaacatacctctgacag

SEQ ID NO: 119012 - DNA, 25 bp, probe
atatttaaaataccttcagcctaag

SEQ ID NO: 119013 - DNA, 25 bp, probe
atagtatcaaattgtttctaaccaa

SEQ ID NO: 119014 - DNA, 25 bp, probe
atatcaatgaagatttttaattaca

SEQ ID NO: 119015 - DNA, 25 bp, probe
atatacgtagtcatgtttatgttga

SEQ ID NO: 119016 - DNA, 25 bp, probe
atttcagctcccaagtttagttcag

SEQ ID NO: 119017 - DNA, 25 bp, probe
atttagcgtcacagttgtggtcatt

SEQ ID NO: 119018 - DNA, 25 bp, probe
agggatggctccagttggggatcca

SEQ ID NO: 119019 - DNA, 25 bp, probe
agggatggctccagttggggatcca

SEQ ID NO: 119020 - DNA, 25 bp, probe
agggaagtcattctaaagagtccaa

SEQ ID NO: 119021 - DNA, 25 bp, probe
aggggttatccctgaaacctgcata

SEQ ID NO: 119022 - DNA, 25 bp, probe
atggggaaattccaccaacatccag

SEQ ID NO: 119023 - DNA, 25 bp, probe
atagaggtggctacagacgcacctc

SEQ ID NO: 119024 - DNA, 25 bp, probe
atatgagggcctacaagccacctgc

SEQ ID NO: 119025 - DNA, 25 bp, probe
attacgagcagaaagatccatcttg

SEQ ID NO: 119026 - DNA, 25 bp, probe
attactgagcagcatataccctctc

SEQ ID NO: 119027 - DNA, 25 bp, probe
attatggatcagcaaccagcactgc

SEQ ID NO: 119028 - DNA, 25 bp, probe
atttgagccagggaaacctccaggg

SEQ ID NO: 119029 - DNA, 25 bp, probe
atttcagccaggacattaggaccac

SEQ ID NO: 119030 - DNA, 25 bp, probe
atttcactgtcgacaagaggacatc

SEQ ID NO: 119031 - DNA, 25 bp, probe
atattccctggatcgagaacataat

SEQ ID NO: 119032 - DNA, 25 bp, probe
atattccctggatcgagaacataat

SEQ ID NO: 119033 - DNA, 25 bp, probe
atattcccaattttcgaagtcagta

SEQ ID NO: 119034 - DNA, 25 bp, probe
atttccaaataactgcagcacttgg

SEQ ID NO: 119035 - DNA, 25 bp, probe
atttctatatcaggacagcaactgg

SEQ ID NO: 119036 - DNA, 25 bp, probe
atttctgaagtggactctttggtgg

SEQ ID NO: 119037 - DNA, 25 bp, probe
attttaggctgctcttttgctgttg

SEQ ID NO: 119038 - DNA, 25 bp, probe
attattacaggatctatgtaggtgt

SEQ ID NO: 119039 - DNA, 25 bp, probe
atttttctggatgcttgccaaggca

SEQ ID NO: 119040 - DNA, 25 bp, probe
atttcatccggaagccgccaagtga

SEQ ID NO: 119041 - DNA, 25 bp, probe
atttcaccggcaacaccaagagggt

SEQ ID NO: 119042 - DNA, 25 bp, probe
atttcaaggtgcatacattcagagg

SEQ ID NO: 119043 - DNA, 25 bp, probe
atttccagcggtccacattagagtt

SEQ ID NO: 119044 - DNA, 25 bp, probe
atttatgattggctacttgggctat

SEQ ID NO: 119045 - DNA, 25 bp, probe
attttgtatggctttttggttatgt

SEQ ID NO: 119046 - DNA, 25 bp, probe
atttttatggctatgttggagtttt

SEQ ID NO: 119047 - DNA, 25 bp, probe
attttctctagtatccttggtattc

SEQ ID NO: 119048 - DNA, 25 bp, probe
attttcttttctcattatgttactt

SEQ ID NO: 119049 - DNA, 25 bp, probe
attttctacttctggtcatgcttac

SEQ ID NO: 119050 - DNA, 25 bp, probe
atttttacttcagagatggaatact

SEQ ID NO: 119051 - DNA, 25 bp, probe
atttttacttcagagatggaatact

SEQ ID NO: 119052 - DNA, 25 bp, probe
attttgtttctcgtcagcataaaga

SEQ ID NO: 119053 - DNA, 25 bp, probe
attttgtttgtgtccacagaaatca

SEQ ID NO: 119054 - DNA, 25 bp, probe
attatagttctgttaccaagaataa

SEQ ID NO: 119055 - DNA, 25 bp, probe
attatggctcttttactatcaagtc

SEQ ID NO: 119056 - DNA, 25 bp, probe
attatctgtctcttgtagtacaatg

SEQ ID NO: 119057 - DNA, 25 bp, probe
attatttctccttggatacagatac

SEQ ID NO: 119058 - DNA, 25 bp, probe
attatctttgccagttggagtgctg

SEQ ID NO: 119059 - DNA, 25 bp, probe
attatgctttctattttgagatcat

SEQ ID NO: 119060 - DNA, 25 bp, probe
attttgctttagatcttgaatacat

SEQ ID NO: 119061 - DNA, 25 bp, probe
atttatttgtccacttgaagccata

SEQ ID NO: 119062 - DNA, 25 bp, probe
atttactttctctttagaagtgcac

SEQ ID NO: 119063 - DNA, 25 bp, probe
atttactgttctttgtcgatgctat

SEQ ID NO: 119064 - DNA, 25 bp, probe
atttgggttgcttctgctaagtaat

SEQ ID NO: 119065 - DNA, 25 bp, probe
atttgaaatggttcctccaggagag

SEQ ID NO: 119066 - DNA, 25 bp, probe
atttttagcacttctcaccagagag

SEQ ID NO: 119067 - DNA, 25 bp, probe
attttgtgcacagattcccgactgt

SEQ ID NO: 119068 - DNA, 25 bp, probe
atttagatcctggtttcataacttc

SEQ ID NO: 119069 - DNA, 25 bp, probe
atttagtcccagaaataaactgaga

SEQ ID NO: 119070 - DNA, 25 bp, probe
atttgagttccaatccaaaactgtc

SEQ ID NO: 119071 - DNA, 25 bp, probe
attttcttcctcaccaatgacattc

SEQ ID NO: 119072 - DNA, 25 bp, probe
attttcttcacttgcaggcaaactt

SEQ ID NO: 119073 - DNA, 25 bp, probe
atattttattcttaggaaacatcct

SEQ ID NO: 119074 - DNA, 25 bp, probe
atttatttcctgggttcatagacct

SEQ ID NO: 119075 - DNA, 25 bp, probe
attttcttactgctttatagtgact

SEQ ID NO: 119076 - DNA, 25 bp, probe
attttcttactgcagctctctggaa

SEQ ID NO: 119077 - DNA, 25 bp, probe
attattcttacaccctgtgtaaaat

SEQ ID NO: 119078 - DNA, 25 bp, probe
attttcctcctcactgttaataatc

SEQ ID NO: 119079 - DNA, 25 bp, probe
attttctctctgttactgtaaaata

SEQ ID NO: 119080 - DNA, 25 bp, probe
attttctcactattggtgtacctta

SEQ ID NO: 119081 - DNA, 25 bp, probe
attttaactcttggtcatcagcctt

SEQ ID NO: 119082 - DNA, 25 bp, probe
atttctacacctgtgtctagtcctc

SEQ ID NO: 119083 - DNA, 25 bp, probe
attatctacaccgtgggccatagca

SEQ ID NO: 119084 - DNA, 25 bp, probe
attagtgacttcggttgctctgaga

SEQ ID NO: 119085 - DNA, 25 bp, probe
attttacttatactatgccagagag

SEQ ID NO: 119086 - DNA, 25 bp, probe
attttacttatactatgccagagag

SEQ ID NO: 119087 - DNA, 25 bp, probe
attttatcagagagttgcaaaaaaa

SEQ ID NO: 119088 - DNA, 25 bp, probe
atttaatggagctgtacaaagtcat

SEQ ID NO: 119089 - DNA, 25 bp, probe
atttttgtgatgtgtaccatactgt

SEQ ID NO: 119090 - DNA, 25 bp, probe
attttgtgaagtgaacaatactttg

SEQ ID NO: 119091 - DNA, 25 bp, probe
atttttaatttgatcagaactgtta

SEQ ID NO: 119092 - DNA, 25 bp, probe
attttctatagattttagtactatt

SEQ ID NO: 119093 - DNA, 25 bp, probe
attttctatagattttagtactatt

SEQ ID NO: 119094 - DNA, 25 bp, probe
attattctcattcttaggtgcattt

SEQ ID NO: 119095 - DNA, 25 bp, probe
attatcctgattcttaattattata

SEQ ID NO: 119096 - DNA, 25 bp, probe
attatcctgattcttaattattata

SEQ ID NO: 119097 - DNA, 25 bp, probe
atttcatcgttacttaattttgcat

SEQ ID NO: 119098 - DNA, 25 bp, probe
atttcatcgttacttaattttgcat

SEQ ID NO: 119099 - DNA, 25 bp, probe
attatctctttgatctacttgcctc

SEQ ID NO: 119100 - DNA, 25 bp, probe
attatcttctatatcttcaggcgcg

SEQ ID NO: 119101 - DNA, 25 bp, probe
attatcattccaactttcagctgta

SEQ ID NO: 119102 - DNA, 25 bp, probe
atatagatctcagtcaacattcact

SEQ ID NO: 119103 - DNA, 25 bp, probe
attatgaccatggaacagctcacaa

SEQ ID NO: 119104 - DNA, 25 bp, probe
attattctgcaggttcatctcagac

SEQ ID NO: 119105 - DNA, 25 bp, probe
attagctgcacatctatcatcaaga

SEQ ID NO: 119106 - DNA, 25 bp, probe
attattgagcttcatcatgaccaga

SEQ ID NO: 119107 - DNA, 25 bp, probe
attatatgatttgtctgcactcagt

SEQ ID NO: 119108 - DNA, 25 bp, probe
attagtgctcggggtcaccatgatg

SEQ ID NO: 119109 - DNA, 25 bp, probe
attagttggagtgtccctgctgttt

SEQ ID NO: 119110 - DNA, 25 bp, probe
attagttggagtgtccctgctgttt

SEQ ID NO: 119111 - DNA, 25 bp, probe
atttgggtaggtgacctgcttggat

SEQ ID NO: 119112 - DNA, 25 bp, probe
accttggggcttgacttttgtatag

SEQ ID NO: 119113 - DNA, 25 bp, probe
accttgtgggatcaccttttcccag

SEQ ID NO: 119114 - DNA, 25 bp, probe
atgaaagggcgtctccctttccttg

SEQ ID NO: 119115 - DNA, 25 bp, probe
atataagagccctgggtcatttaca

SEQ ID NO: 119116 - DNA, 25 bp, probe
attagaccccagggagtgacctctc

SEQ ID NO: 119117 - DNA, 25 bp, probe
atttggggctcagaaggccctgctc

SEQ ID NO: 119118 - DNA, 25 bp, probe
atttctctggttgaagagcagaaca

SEQ ID NO: 119119 - DNA, 25 bp, probe
atttctctggttgaagagcagaaca

SEQ ID NO: 119120 - DNA, 25 bp, probe
attatctctatttttcagatgagga

SEQ ID NO: 119121 - DNA, 25 bp, probe
attattgctatgtcatttccatctt

SEQ ID NO: 119122 - DNA, 25 bp, probe
attattcatagtttaagtcttttat

SEQ ID NO: 119123 - DNA, 25 bp, probe
attattcatagtttaagtcttttat

SEQ ID NO: 119124 - DNA, 25 bp, probe
attatgatctacacccgtttcttaa

SEQ ID NO: 119125 - DNA, 25 bp, probe
attttgtacacctccttctatgtaa

SEQ ID NO: 119126 - DNA, 25 bp, probe
attttgtacacctccttctatgtaa

SEQ ID NO: 119127 - DNA, 25 bp, probe
atttttaatcctgtctgtttgttgc

SEQ ID NO: 119128 - DNA, 25 bp, probe
atttttatgttcttggctttgtgtt

SEQ ID NO: 119129 - DNA, 25 bp, probe
atttccaagtattgtgactttgttt

SEQ ID NO: 119130 - DNA, 25 bp, probe
attatccaagtatgtctcctgtgta

SEQ ID NO: 119131 - DNA, 25 bp, probe
attatccaagtatgtctcctgtgta

SEQ ID NO: 119132 - DNA, 25 bp, probe
attagtaagtgctctcaactgcgta

SEQ ID NO: 119133 - DNA, 25 bp, probe
attatcaatttctcatagacactgt

SEQ ID NO: 119134 - DNA, 25 bp, probe
attatttccatcttctatgccattg

SEQ ID NO: 119135 - DNA, 25 bp, probe
attatttccatcttctatgccattg

SEQ ID NO: 119136 - DNA, 25 bp, probe
attatttgatattcttctccagtgt

SEQ ID NO: 119137 - DNA, 25 bp, probe
atatttgtgtattttcctggattta

SEQ ID NO: 119138 - DNA, 25 bp, probe
attatttgtgtgatttctgtgttat

SEQ ID NO: 119139 - DNA, 25 bp, probe
attatttgtgatcatgttgtctttc

SEQ ID NO: 119140 - DNA, 25 bp, probe
atttgttgctccgagagtgtttctc

SEQ ID NO: 119141 - DNA, 25 bp, probe
atttttgaggcgaaggcgtctgtct

SEQ ID NO: 119142 - DNA, 25 bp, probe
attttctacggttgcaaactgctga

SEQ ID NO: 119143 - DNA, 25 bp, probe
atttttacgctgaatgaacatttat

SEQ ID NO: 119144 - DNA, 25 bp, probe
atttttcacctaagtcatctttgag

SEQ ID NO: 119145 - DNA, 25 bp, probe
atttaacaccagagttttgtggttg

SEQ ID NO: 119146 - DNA, 25 bp, probe
atatgtgcacaagcagggttggggg

SEQ ID NO: 119147 - DNA, 25 bp, probe
atttcacacctcaggctcgtggtgg

SEQ ID NO: 119148 - DNA, 25 bp, probe
atttctgtccagaaaatagggtgga

SEQ ID NO: 119149 - DNA, 25 bp, probe
attatttctgtgtaccatatggagt

SEQ ID NO: 119150 - DNA, 25 bp, probe
attatggctcatgaccgctatgtgg

SEQ ID NO: 119151 - DNA, 25 bp, probe
atttgcctgcattaccggtcgatgc

SEQ ID NO: 119152 - DNA, 25 bp, probe
attatggtctaagagcgctcaggct

SEQ ID NO: 119153 - DNA, 25 bp, probe
atttctgttcaacatcgtcaggatc

SEQ ID NO: 119154 - DNA, 25 bp, probe
atttttgtgaagcacagtgagtgac

SEQ ID NO: 119155 - DNA, 25 bp, probe
atttacgtcaatacacagttgctgg

SEQ ID NO: 119156 - DNA, 25 bp, probe
atttatctaccaacacatatccagt

SEQ ID NO: 119157 - DNA, 25 bp, probe
atttattcgtgcttcaaatcacagt

SEQ ID NO: 119158 - DNA, 25 bp, probe
attattcctggtaatacagctcagt

SEQ ID NO: 119159 - DNA, 25 bp, probe
attattgaatgggtgaacaacactg

SEQ ID NO: 119160 - DNA, 25 bp, probe
atttgattaggattgaacagttcag

SEQ ID NO: 119161 - DNA, 25 bp, probe
atttattaggcactgtagcaatttg

SEQ ID NO: 119162 - DNA, 25 bp, probe
atttgttgaccacacaattcttgat

SEQ ID NO: 119163 - DNA, 25 bp, probe
attatgttattattacactgtcttt

SEQ ID NO: 119164 - DNA, 25 bp, probe
attatcttttacaatcatttcattt

SEQ ID NO: 119165 - DNA, 25 bp, probe
attatcttttacaatcatttcattt

SEQ ID NO: 119166 - DNA, 25 bp, probe
attatgctttctttggcctacattc

SEQ ID NO: 119167 - DNA, 25 bp, probe
attatgctttctttggcctacattc

SEQ ID NO: 119168 - DNA, 25 bp, probe
atttgtaatatgttggcttcctttt

SEQ ID NO: 119169 - DNA, 25 bp, probe
atttgtaatatgttggcttcctttt

SEQ ID NO: 119170 - DNA, 25 bp, probe
attttgaacaaggtgcttcgcttct

SEQ ID NO: 119171 - DNA, 25 bp, probe
attttaattcagttgttagtgtgtc

SEQ ID NO: 119172 - DNA, 25 bp, probe
attttcaatctatgacttgactggt

SEQ ID NO: 119173 - DNA, 25 bp, probe
attttagttttgatgttctgaggtt

SEQ ID NO: 119174 - DNA, 25 bp, probe
atttatggtcttctgttttgaagct

SEQ ID NO: 119175 - DNA, 25 bp, probe
attttctggcttgtcattctgtaca

SEQ ID NO: 119176 - DNA, 25 bp, probe
attttgtctgccatgtcatttatga

SEQ ID NO: 119177 - DNA, 25 bp, probe
attttgatcccaaggcatatttctc

SEQ ID NO: 119178 - DNA, 25 bp, probe
atttgtaccttaagcatttcccagc

SEQ ID NO: 119179 - DNA, 25 bp, probe
attttatcttttaccatatcccagt

SEQ ID NO: 119180 - DNA, 25 bp, probe
attattatcttttacaatcatttca

SEQ ID NO: 119181 - DNA, 25 bp, probe
attattctgctaatatacctagatt

SEQ ID NO: 119182 - DNA, 25 bp, probe
attattgcttcaaacacccaaattg

SEQ ID NO: 119183 - DNA, 25 bp, probe
atttatgttctataccccagcattc

SEQ ID NO: 119184 - DNA, 25 bp, probe
attttctgtgtatacccatcagtga

SEQ ID NO: 119185 - DNA, 25 bp, probe
atattgttgctggatcaacttacct

SEQ ID NO: 119186 - DNA, 25 bp, probe
atattgtggatggcatgggcattac

SEQ ID NO: 119187 - DNA, 25 bp, probe
atttgctgggtacgtgactatccct

SEQ ID NO: 119188 - DNA, 25 bp, probe
attttgtggggccagtctgatcacg

SEQ ID NO: 119189 - DNA, 25 bp, probe
attttgccagtgactagtccatgtc

SEQ ID NO: 119190 - DNA, 25 bp, probe
atttttcactagcgtacatctaagg

SEQ ID NO: 119191 - DNA, 25 bp, probe
atttagtcacatttggtagacaaca

SEQ ID NO: 119192 - DNA, 25 bp, probe
atttcccagctgtgtaaaaacaata

SEQ ID NO: 119193 - DNA, 25 bp, probe
attatcgaagtgtgtatcaaaagag

SEQ ID NO: 119194 - DNA, 25 bp, probe
atttcgttgctgtcggtggaagata

SEQ ID NO: 119195 - DNA, 25 bp, probe
attttgttctacatgaggactcata

SEQ ID NO: 119196 - DNA, 25 bp, probe
atttttctttcaacagtgacatgat

SEQ ID NO: 119197 - DNA, 25 bp, probe
attttatctatgaattcttacagtt

SEQ ID NO: 119198 - DNA, 25 bp, probe
attttactagctttttcattgtctt

SEQ ID NO: 119199 - DNA, 25 bp, probe
attttcactcagaagcatgttcatt

SEQ ID NO: 119200 - DNA, 25 bp, probe
attttcactcagaagcatgttcatt

SEQ ID NO: 119201 - DNA, 25 bp, probe
attattcccataaggatcatctctc

SEQ ID NO: 119202 - DNA, 25 bp, probe
attatctgaccaatagtacacacac

SEQ ID NO: 119203 - DNA, 25 bp, probe
attttgcacaaatatccaccacttt

SEQ ID NO: 119204 - DNA, 25 bp, probe
atttaaggaaacaacatcccataat

SEQ ID NO: 119205 - DNA, 25 bp, probe
atcttcaaggaagcaggtcaccaag

SEQ ID NO: 119206 - DNA, 25 bp, probe
atttccagcaacacaggtgacccga

SEQ ID NO: 119207 - DNA, 25 bp, probe
atttcacacaaaacggatgtaacat

SEQ ID NO: 119208 - DNA, 25 bp, probe
atttccaggatcaaccgtggaagat

SEQ ID NO: 119209 - DNA, 25 bp, probe
atttcactggacagcccagggagtg

SEQ ID NO: 119210 - DNA, 25 bp, probe
atttcgtgaggcggcagccaggtgg

SEQ ID NO: 119211 - DNA, 25 bp, probe
atttcgtgaagagccaggttgctgt

SEQ ID NO: 119212 - DNA, 25 bp, probe
atttcattaagatctctaatctgtt

SEQ ID NO: 119213 - DNA, 25 bp, probe
attatctgtaaaagcattatttggt

SEQ ID NO: 119214 - DNA, 25 bp, probe
atttggctccacaaatgtatttgga

SEQ ID NO: 119215 - DNA, 25 bp, probe
atttggctccacaaatgtatttgga

SEQ ID NO: 119216 - DNA, 25 bp, probe
atttgctctcctgaatttatgaggt

SEQ ID NO: 119217 - DNA, 25 bp, probe
attatcacggatgcaatttatgttg

SEQ ID NO: 119218 - DNA, 25 bp, probe
attatacatggcttcttttatgaat

SEQ ID NO: 119219 - DNA, 25 bp, probe
attattatttcttttgttacatcta

SEQ ID NO: 119220 - DNA, 25 bp, probe
atcttaatttgatcttgtagaccca

SEQ ID NO: 119221 - DNA, 25 bp, probe
attttatatctatgctttcagactc

SEQ ID NO: 119222 - DNA, 25 bp, probe
attatctgatgtgatgcctgttgag

SEQ ID NO: 119223 - DNA, 25 bp, probe
atatcatggatttctgagctgtatc

SEQ ID NO: 119224 - DNA, 25 bp, probe
atatcagagttacagttgtcagtga

SEQ ID NO: 119225 - DNA, 25 bp, probe
atttgacttcagccaggtgaactgg

SEQ ID NO: 119226 - DNA, 25 bp, probe
atttactgctaatgaggacattcgt

SEQ ID NO: 119227 - DNA, 25 bp, probe
atttattgtaccaaagacagtggtg

SEQ ID NO: 119228 - DNA, 25 bp, probe
attttattcgtcattacctggcaga

SEQ ID NO: 119229 - DNA, 25 bp, probe
atatctgtgttcatctaaaccggaa

SEQ ID NO: 119230 - DNA, 25 bp, probe
atttggaacagtctacaagggaaag

SEQ ID NO: 119231 - DNA, 25 bp, probe
atttggtacagtctacaagtgcatt

SEQ ID NO: 119232 - DNA, 25 bp, probe
attttgtcgcagtcacgatcaactt

SEQ ID NO: 119233 - DNA, 25 bp, probe
atttatgcttgctgcacagacatat

SEQ ID NO: 119234 - DNA, 25 bp, probe
attttgttcaccgagatctggccac

SEQ ID NO: 119235 - DNA, 25 bp, probe
attttgttcaccgagatctggccac

SEQ ID NO: 119236 - DNA, 25 bp, probe
attttgttcaccgagatctggccac

SEQ ID NO: 119237 - DNA, 25 bp, probe
attttgtggccctagataggatggc

SEQ ID NO: 119238 - DNA, 25 bp, probe
attttgtggccctagataggatggc

SEQ ID NO: 119239 - DNA, 25 bp, probe
atttagtgacctaattgaagatgtc

SEQ ID NO: 119240 - DNA, 25 bp, probe
atttactccctggggaagatgccat

SEQ ID NO: 119241 - DNA, 25 bp, probe
attatacagccaggtgggaagcagc

SEQ ID NO: 119242 - DNA, 25 bp, probe
attattcatagagatctgaaagcag

SEQ ID NO: 119243 - DNA, 25 bp, probe
attttcaaacactatgacacagacc

SEQ ID NO: 119244 - DNA, 25 bp, probe
attttggttagctatgcaaagtcat

SEQ ID NO: 119245 - DNA, 25 bp, probe
atttctggttatgtcaaggctctgg

SEQ ID NO: 119246 - DNA, 25 bp, probe
atttccacattgattaaagctgctg

SEQ ID NO: 119247 - DNA, 25 bp, probe
atttccctatgcaaggtacagcctt

SEQ ID NO: 119248 - DNA, 25 bp, probe
attttctccagcaggatcacagtta

SEQ ID NO: 119249 - DNA, 25 bp, probe
attttctgcctaagtgctacgtgat

SEQ ID NO: 119250 - DNA, 25 bp, probe
atttttcagtacttctacagaattt

SEQ ID NO: 119251 - DNA, 25 bp, probe
atttttaaagcttctacgcagattt

SEQ ID NO: 119252 - DNA, 25 bp, probe
atttgttcatagcctacatcaccaa

SEQ ID NO: 119253 - DNA, 25 bp, probe
atatcatattcaacgtaccattcac

SEQ ID NO: 119254 - DNA, 25 bp, probe
attataccacagaatatcatcattt

SEQ ID NO: 119255 - DNA, 25 bp, probe
attttctctagagtcagtcattatg

SEQ ID NO: 119256 - DNA, 25 bp, probe
attttcactagattcaactttacaa

SEQ ID NO: 119257 - DNA, 25 bp, probe
atttccacttgctttcctaatgaag

SEQ ID NO: 119258 - DNA, 25 bp, probe
atttcaattatccattcttataaga

SEQ ID NO: 119259 - DNA, 25 bp, probe
attttattatgttgtctttatcgac

SEQ ID NO: 119260 - DNA, 25 bp, probe
atttaatctagaattcattttaacg

SEQ ID NO: 119261 - DNA, 25 bp, probe
atttaatctagaattcattttaacg

SEQ ID NO: 119262 - DNA, 25 bp, probe
atttaggaacatatgctcatttgag

SEQ ID NO: 119263 - DNA, 25 bp, probe
atttcaagcacttttgcacatttag

SEQ ID NO: 119264 - DNA, 25 bp, probe
attatataactctttgagcctttat

SEQ ID NO: 119265 - DNA, 25 bp, probe
attttgatgacctttagctatctta

SEQ ID NO: 119266 - DNA, 25 bp, probe
attttgtgagacttttcctgcactg

SEQ ID NO: 119267 - DNA, 25 bp, probe
attttgatgatgaatttacctcaga

SEQ ID NO: 119268 - DNA, 25 bp, probe
attttatggcagtcttatgtgcaaa

SEQ ID NO: 119269 - DNA, 25 bp, probe
atttgcaaatggtcctgatgataca

SEQ ID NO: 119270 - DNA, 25 bp, probe
atttcactggtccatctatatttaa

SEQ ID NO: 119271 - DNA, 25 bp, probe
attttctggccttctatggggtagc

SEQ ID NO: 119272 - DNA, 25 bp, probe
agttttggcctaaatgagtcgtatt

SEQ ID NO: 119273 - DNA, 25 bp, probe
atttagtacccaaatcgtcttatat

SEQ ID NO: 119274 - DNA, 25 bp, probe
atttttgtaccatattgctcttaaa

SEQ ID NO: 119275 - DNA, 25 bp, probe
atttctgttacataaagtctttcaa

SEQ ID NO: 119276 - DNA, 25 bp, probe
attattggtacatgtgggcttttaa

SEQ ID NO: 119277 - DNA, 25 bp, probe
atttctatgttatgccggtggttaa

SEQ ID NO: 119278 - DNA, 25 bp, probe
atttttctgtgtaccaggttgccta

SEQ ID NO: 119279 - DNA, 25 bp, probe
attttctctggacccagttatgctt

SEQ ID NO: 119280 - DNA, 25 bp, probe
atttttggagcatgcactgccagtt

SEQ ID NO: 119281 - DNA, 25 bp, probe
atttatggaagacactgcctgcttt

SEQ ID NO: 119282 - DNA, 25 bp, probe
atttattgacagactttgcagcctt

SEQ ID NO: 119283 - DNA, 25 bp, probe
atttttgatgcagttctcactcctt

SEQ ID NO: 119284 - DNA, 25 bp, probe
attttgacatcagtgcctacttctc

SEQ ID NO: 119285 - DNA, 25 bp, probe
atttctacatagtcagctacttctg

SEQ ID NO: 119286 - DNA, 25 bp, probe
atttgtacagtgtcgctttttgaat

SEQ ID NO: 119287 - DNA, 25 bp, probe
atttggatccagtggttgttacatt

SEQ ID NO: 119288 - DNA, 25 bp, probe
atttgcaatccactacgttattcct

SEQ ID NO: 119289 - DNA, 25 bp, probe
atttgctaagcactgaatttgtctc

SEQ ID NO: 119290 - DNA, 25 bp, probe
atttcctaagctacatatggccatc

SEQ ID NO: 119291 - DNA, 25 bp, probe
atttcactaggcatttggcaattct

SEQ ID NO: 119292 - DNA, 25 bp, probe
atttcactcaggggcactgtggttg

SEQ ID NO: 119293 - DNA, 25 bp, probe
atttcccaggtgtctgtgggatctg

SEQ ID NO: 119294 - DNA, 25 bp, probe
atttcccaggtgtctgtgggatctg

SEQ ID NO: 119295 - DNA, 25 bp, probe
attttgcactggtttatggcgattg

SEQ ID NO: 119296 - DNA, 25 bp, probe
attttcactgcattttgcatgggat

SEQ ID NO: 119297 - DNA, 25 bp, probe
atttctgcaagcgttgcctggatgc

SEQ ID NO: 119298 - DNA, 25 bp, probe
atttcacagaagtgcctgagacgcg

SEQ ID NO: 119299 - DNA, 25 bp, probe
atttgcacagaggaaagcgggtgcc

SEQ ID NO: 119300 - DNA, 25 bp, probe
atttctcatgacaaaactggcccca

SEQ ID NO: 119301 - DNA, 25 bp, probe
attttatgtagagagggcgccacac

SEQ ID NO: 119302 - DNA, 25 bp, probe
atttctggaaagccagggcctccac

SEQ ID NO: 119303 - DNA, 25 bp, probe
atttcggataactccagcagctcca

SEQ ID NO: 119304 - DNA, 25 bp, probe
atttcgagtgggtggagctcttgct

SEQ ID NO: 119305 - DNA, 25 bp, probe
atttcttgttaatttagccttctgt

SEQ ID NO: 119306 - DNA, 25 bp, probe
attttctgattcatgttagactttg

SEQ ID NO: 119307 - DNA, 25 bp, probe
attttctgtatgatgttactttatg

SEQ ID NO: 119308 - DNA, 25 bp, probe
attttggtcatagcattcacttttg

SEQ ID NO: 119309 - DNA, 25 bp, probe
attttagagcataccagtactcagt

SEQ ID NO: 119310 - DNA, 25 bp, probe
atttcataatggaccaggatcggct

SEQ ID NO: 119311 - DNA, 25 bp, probe
attttcaatggccacgcgactatca

SEQ ID NO: 119312 - DNA, 25 bp, probe
attattgactacttagctgagttca

SEQ ID NO: 119313 - DNA, 25 bp, probe
atttgtatgctaaatgaggaggtac

SEQ ID NO: 119314 - DNA, 25 bp, probe
attttgagcattgataggtcagtat

SEQ ID NO: 119315 - DNA, 25 bp, probe
atttcaggattcttcgaggagtaaa

SEQ ID NO: 119316 - DNA, 25 bp, probe
atttcaggacatctcggaggaggcc

SEQ ID NO: 119317 - DNA, 25 bp, probe
atttcaggattgccttccaggagct

SEQ ID NO: 119318 - DNA, 25 bp, probe
atttatattcatcttccactgtgct

SEQ ID NO: 119319 - DNA, 25 bp, probe
atttatattatgtggatcctgtcaa

SEQ ID NO: 119320 - DNA, 25 bp, probe
atttgtatgctcattgaactttaag

SEQ ID NO: 119321 - DNA, 25 bp, probe
attttgatcctttgtactctataat

SEQ ID NO: 119322 - DNA, 25 bp, probe
atttagcatccctggaaatcataat

SEQ ID NO: 119323 - DNA, 25 bp, probe
atttggcaactgtgggcaataatat

SEQ ID NO: 119324 - DNA, 25 bp, probe
atttgaaggttttgagtatatcaat

SEQ ID NO: 119325 - DNA, 25 bp, probe
atttgcacagggattggaacatgat

SEQ ID NO: 119326 - DNA, 25 bp, probe
atttaagctggatttgggggcataa

SEQ ID NO: 119327 - DNA, 25 bp, probe
atattagggaattagggggaagatg

SEQ ID NO: 119328 - DNA, 25 bp, probe
atattggcacgaataggtagcggaa

SEQ ID NO: 119329 - DNA, 25 bp, probe
atataaccaaaacatatccagatga

SEQ ID NO: 119330 - DNA, 25 bp, probe
atacaacaaagcctctaatcctgat

SEQ ID NO: 119331 - DNA, 25 bp, probe
atatagccaggagctgctgaatttg

SEQ ID NO: 119332 - DNA, 25 bp, probe
atattgccagatgttaatactgtaa

SEQ ID NO: 119333 - DNA, 25 bp, probe
atattgccagatgttaatactgtaa

SEQ ID NO: 119334 - DNA, 25 bp, probe
atatttccctttagaacttcaagat

SEQ ID NO: 119335 - DNA, 25 bp, probe
attttgcacctgatctaatactaaa

SEQ ID NO: 119336 - DNA, 25 bp, probe
attttgcacctgatctaatactaaa

SEQ ID NO: 119337 - DNA, 25 bp, probe
attttgtccttttcattagtattat

SEQ ID NO: 119338 - DNA, 25 bp, probe
attttgtccttttcattagtattat

SEQ ID NO: 119339 - DNA, 25 bp, probe
atttttcctatattgcattaatttt

SEQ ID NO: 119340 - DNA, 25 bp, probe
attttgtgtataatgtgctttattt

SEQ ID NO: 119341 - DNA, 25 bp, probe
attttctagacaattctctatttta

SEQ ID NO: 119342 - DNA, 25 bp, probe
attttaatgacaatcttatttcaaa

SEQ ID NO: 119343 - DNA, 25 bp, probe
attttatgtactttgtccttcagca

SEQ ID NO: 119344 - DNA, 25 bp, probe
attttaaacttgctggattcatgca

SEQ ID NO: 119345 - DNA, 25 bp, probe
atttttataaatctgagcattgata

SEQ ID NO: 119346 - DNA, 25 bp, probe
atttttttagctcatgactctgcaa

SEQ ID NO: 119347 - DNA, 25 bp, probe
attttattgtatcctatgaactcaa

SEQ ID NO: 119348 - DNA, 25 bp, probe
attttatgctggactctggaccata

SEQ ID NO: 119349 - DNA, 25 bp, probe
attttcagctgaggctctgagaact

SEQ ID NO: 119350 - DNA, 25 bp, probe
atttacatcatcaccgagtacatgg

SEQ ID NO: 119351 - DNA, 25 bp, probe
atttaccactgcacagaggagcggc

SEQ ID NO: 119352 - DNA, 25 bp, probe
atatggggcctcgcgaggcaaggct

SEQ ID NO: 119353 - DNA, 25 bp, probe
atatggggcctcgcgaggcaaggct

SEQ ID NO: 119354 - DNA, 25 bp, probe
ttctggggacttgcgggggttgtca

SEQ ID NO: 119355 - DNA, 25 bp, probe
cttggggacgtatgtggccgtcttc

SEQ ID NO: 119356 - DNA, 25 bp, probe
cttggggacgtatgtggccgtcttc

SEQ ID NO: 119357 - DNA, 25 bp, probe
atttgggacatgtgggtcccacatg

SEQ ID NO: 119358 - DNA, 25 bp, probe
atttcggcctgtccaggtatgtcct

SEQ ID NO: 119359 - DNA, 25 bp, probe
attttacatctaacaggtatcattc

SEQ ID NO: 119360 - DNA, 25 bp, probe
atttagagcacttaatggtctctgt

SEQ ID NO: 119361 - DNA, 25 bp, probe
atttcgatcctcgtcaggtgcaggt

SEQ ID NO: 119362 - DNA, 25 bp, probe
atttgtacttctgcggtgctggttt

SEQ ID NO: 119363 - DNA, 25 bp, probe
atttgtagtgatgctccggtgtgag

SEQ ID NO: 119364 - DNA, 25 bp, probe
atttccgatgagttcctggtacagt

SEQ ID NO: 119365 - DNA, 25 bp, probe
atttccgatgagttcctggtacagt

SEQ ID NO: 119366 - DNA, 25 bp, probe
atttcaaggagaagcccctacgtct

SEQ ID NO: 119367 - DNA, 25 bp, probe
atatagaagagaaagcccccaggcc

SEQ ID NO: 119368 - DNA, 25 bp, probe
atatttaaggtcgccttcagctcct

SEQ ID NO: 119369 - DNA, 25 bp, probe
atatttaaggtcgccttcagctcct

SEQ ID NO: 119370 - DNA, 25 bp, probe
atattgtgaacgagccacctcctaa

SEQ ID NO: 119371 - DNA, 25 bp, probe
atattgtgaacgagccacctcctaa

SEQ ID NO: 119372 - DNA, 25 bp, probe
attttgaacgttgagacattctggc

SEQ ID NO: 119373 - DNA, 25 bp, probe
atttgaaacgttatgatgacctggc

SEQ ID NO: 119374 - DNA, 25 bp, probe
atttgcaaccagtttcagatgtcct

SEQ ID NO: 119375 - DNA, 25 bp, probe
atttgaagactgtttcatgctttgc

SEQ ID NO: 119376 - DNA, 25 bp, probe
attttgatggtgtctgtgacatttc

SEQ ID NO: 119377 - DNA, 25 bp, probe
attttcttgcatgctggcacattta

SEQ ID NO: 119378 - DNA, 25 bp, probe
atttacttgccattactcaattgat

SEQ ID NO: 119379 - DNA, 25 bp, probe
atttacttgccattactcaattgat

SEQ ID NO: 119380 - DNA, 25 bp, probe
atttagctgctcgaaactgcatgtt

SEQ ID NO: 119381 - DNA, 25 bp, probe
atttcagttcactgttcagtttagc

SEQ ID NO: 119382 - DNA, 25 bp, probe
atttctggaatctgattgagtctcc

SEQ ID NO: 119383 - DNA, 25 bp, probe
atttctggaatctgattgagtctcc

SEQ ID NO: 119384 - DNA, 25 bp, probe
atttctaaatcccatcttgatatac

SEQ ID NO: 119385 - DNA, 25 bp, probe
atttcttactgccgattgcttatta

SEQ ID NO: 119386 - DNA, 25 bp, probe
attttctgttgacattcttttggtg

SEQ ID NO: 119387 - DNA, 25 bp, probe
attttatttagcgatctttgtattt

SEQ ID NO: 119388 - DNA, 25 bp, probe
attttagatctgatttattcttctt

SEQ ID NO: 119389 - DNA, 25 bp, probe
attttcctcatgattttttctcttt

SEQ ID NO: 119390 - DNA, 25 bp, probe
atttctctgcgtcctaattttttgt

SEQ ID NO: 119391 - DNA, 25 bp, probe
atttctctactgtctcagtttacat

SEQ ID NO: 119392 - DNA, 25 bp, probe
atttctaaataccactttcctcatc

SEQ ID NO: 119393 - DNA, 25 bp, probe
attttaaagagctaccttcagctat

SEQ ID NO: 119394 - DNA, 25 bp, probe
attttgaagggttctcgtatgtcaa

SEQ ID NO: 119395 - DNA, 25 bp, probe
atttgggagatggctcgtcgttgta

SEQ ID NO: 119396 - DNA, 25 bp, probe
atttgggagagggctgcaggtgctg

SEQ ID NO: 119397 - DNA, 25 bp, probe
atttgggagagggctgcaggtgctg

SEQ ID NO: 119398 - DNA, 25 bp, probe
atttggagaggtttgcgcctgtcaa

SEQ ID NO: 119399 - DNA, 25 bp, probe
atttgggaggcttctcattctggct

SEQ ID NO: 119400 - DNA, 25 bp, probe
atttgacggagcttgataccatcct

SEQ ID NO: 119401 - DNA, 25 bp, probe
atttgtcggaaaccagcactctcaa

SEQ ID NO: 119402 - DNA, 25 bp, probe
atcattctcagataggggcacccaa

SEQ ID NO: 119403 - DNA, 25 bp, probe
atattcaacatctggggcacattca

SEQ ID NO: 119404 - DNA, 25 bp, probe
atattcagtctctgtgtaatcatct

SEQ ID NO: 119405 - DNA, 25 bp, probe
atttaggcatctctggcatgccact

SEQ ID NO: 119406 - DNA, 25 bp, probe
atttgcaggatccgtctgtgcacat

SEQ ID NO: 119407 - DNA, 25 bp, probe
atattaggctcacacagtacatgga

SEQ ID NO: 119408 - DNA, 25 bp, probe
atttacagctcagactattacaata

SEQ ID NO: 119409 - DNA, 25 bp, probe
atttatcagctgtggcatattacct

SEQ ID NO: 119410 - DNA, 25 bp, probe
atattaccaggggtttggccattgc

SEQ ID NO: 119411 - DNA, 25 bp, probe
atatttccaggggatagtggtgtgg

SEQ ID NO: 119412 - DNA, 25 bp, probe
atatttgtgcggggtatgggggtgg

SEQ ID NO: 119413 - DNA, 25 bp, probe
atattgcaggggagttacagggtta

SEQ ID NO: 119414 - DNA, 25 bp, probe
atttcctgtgccaggtatacgcgtt

SEQ ID NO: 119415 - DNA, 25 bp, probe
atttcctgatcccgatgttagaaat

SEQ ID NO: 119416 - DNA, 25 bp, probe
atttcctgcaaccagtaaggacaac

SEQ ID NO: 119417 - DNA, 25 bp, probe
atttgtagcaactctgaagtatcaa

SEQ ID NO: 119418 - DNA, 25 bp, probe
atttgtacttctgttagttcaccaa

SEQ ID NO: 119419 - DNA, 25 bp, probe
atttgtttcttatctcagtcatcac

SEQ ID NO: 119420 - DNA, 25 bp, probe
atttttatcagttacacatgatcat

SEQ ID NO: 119421 - DNA, 25 bp, probe
atttttaatgtgtacacctgctcta

SEQ ID NO: 119422 - DNA, 25 bp, probe
atttttaatgtgtacacctgctcta

SEQ ID NO: 119423 - DNA, 25 bp, probe
atttttatctttaatcctgacatta

SEQ ID NO: 119424 - DNA, 25 bp, probe
atttctttctgactagacttgtgat

SEQ ID NO: 119425 - DNA, 25 bp, probe
atttgctgtttccatgaggcttgtg

SEQ ID NO: 119426 - DNA, 25 bp, probe
atttcagtttcaggcatgaccatgt

SEQ ID NO: 119427 - DNA, 25 bp, probe
atttccgtctctggtgtagctgatg

SEQ ID NO: 119428 - DNA, 25 bp, probe
atttcccttgctagtgtgcagatat

SEQ ID NO: 119429 - DNA, 25 bp, probe
atttcagctctgtatttgtggtatc

SEQ ID NO: 119430 - DNA, 25 bp, probe
atttcaggcatttctgctttgtgac

SEQ ID NO: 119431 - DNA, 25 bp, probe
atttagatcatttagctgatggcta

SEQ ID NO: 119432 - DNA, 25 bp, probe
atttaatcaatctttgtgcctcaac

SEQ ID NO: 119433 - DNA, 25 bp, probe
atttatgacaagctgtatcactgcc

SEQ ID NO: 119434 - DNA, 25 bp, probe
atttatgggatgcctggatcattca

SEQ ID NO: 119435 - DNA, 25 bp, probe
atttatgggatgcctggatcattca

SEQ ID NO: 119436 - DNA, 25 bp, probe
atttatcgagtgcctctgtttgcct

SEQ ID NO: 119437 - DNA, 25 bp, probe
attttcagatgatcacagtcgtgtt

SEQ ID NO: 119438 - DNA, 25 bp, probe
attttcagatgatcacagtcgtgtt

SEQ ID NO: 119439 - DNA, 25 bp, probe
atttgacaatgaacatctgaggctg

SEQ ID NO: 119440 - DNA, 25 bp, probe
atttacctatacggaggctgatgag

SEQ ID NO: 119441 - DNA, 25 bp, probe
atttcagctcaattcaggaagttat

SEQ ID NO: 119442 - DNA, 25 bp, probe
atttcatttttctcatagttaattt

SEQ ID NO: 119443 - DNA, 25 bp, probe
atttcttcatttcagcaatgttaca

SEQ ID NO: 119444 - DNA, 25 bp, probe
atttctcaatttcttgtttaaagtg

SEQ ID NO: 119445 - DNA, 25 bp, probe
atttaaatttttggtgtgttcacat

SEQ ID NO: 119446 - DNA, 25 bp, probe
atttaaatcttatccttgtatcttt

SEQ ID NO: 119447 - DNA, 25 bp, probe
atttaaatcttatccttgtatcttt

SEQ ID NO: 119448 - DNA, 25 bp, probe
atttgtgttctttagctttaatgtt

SEQ ID NO: 119449 - DNA, 25 bp, probe
atttgtgttctttagctttaatgtt

SEQ ID NO: 119450 - DNA, 25 bp, probe
atttgctttgtttactgctagtata

SEQ ID NO: 119451 - DNA, 25 bp, probe
atttatcctgtgaaactggctttat

SEQ ID NO: 119452 - DNA, 25 bp, probe
atttatcctgtgaaactggctttat

SEQ ID NO: 119453 - DNA, 25 bp, probe
attttttggtcatggagcataatgt

SEQ ID NO: 119454 - DNA, 25 bp, probe
atttgtttggaatcgtgccactgct

SEQ ID NO: 119455 - DNA, 25 bp, probe
atttatttaaaaccttgcacgcatt

SEQ ID NO: 119456 - DNA, 25 bp, probe
atttatttaaaaccttgcacgcatt

SEQ ID NO: 119457 - DNA, 25 bp, probe
attttttgtgaatggttgcaaagtg

SEQ ID NO: 119458 - DNA, 25 bp, probe
acttcctgattggtcgacaaggcaa

SEQ ID NO: 119459 - DNA, 25 bp, probe
attttttgttttttgtctcagcatc

SEQ ID NO: 119460 - DNA, 25 bp, probe
atttcttttttgtaatgtgacgata

SEQ ID NO: 119461 - DNA, 25 bp, probe
ataccttttcatataaattccataa

SEQ ID NO: 119462 - DNA, 25 bp, probe
atttctttacatactcaaaaccaag

SEQ ID NO: 119463 - DNA, 25 bp, probe
atttctttacatactcaaaaccaag

SEQ ID NO: 119464 - DNA, 25 bp, probe
atttttatgatcttacaaacctgca

SEQ ID NO: 119465 - DNA, 25 bp, probe
atttattggcagcccacgaacacct

SEQ ID NO: 119466 - DNA, 25 bp, probe
atttttgtcacggaaagcatcctct

SEQ ID NO: 119467 - DNA, 25 bp, probe
atttttagccaggtactctgctcat

SEQ ID NO: 119468 - DNA, 25 bp, probe
atttttagccaggtactctgctcat

SEQ ID NO: 119469 - DNA, 25 bp, probe
atcttagatagatggtactctccaa

SEQ ID NO: 119470 - DNA, 25 bp, probe
atttgaaaaacttcactgcccagaa

SEQ ID NO: 119471 - DNA, 25 bp, probe
atttaccataagggactgtgccaga

SEQ ID NO: 119472 - DNA, 25 bp, probe
atttcccatcaagtggacatccctg

SEQ ID NO: 119473 - DNA, 25 bp, probe
atttctacacagtgggaactctgac

SEQ ID NO: 119474 - DNA, 25 bp, probe
atttcagacacgtgagagagagctc

SEQ ID NO: 119475 - DNA, 25 bp, probe
atttcctcacgtgcaggacagctct

SEQ ID NO: 119476 - DNA, 25 bp, probe
ataaccactagtctggtcagttaat

SEQ ID NO: 119477 - DNA, 25 bp, probe
atattacttagtctgctttgttaaa

SEQ ID NO: 119478 - DNA, 25 bp, probe
atttttgtaggcctgcattgtatta

SEQ ID NO: 119479 - DNA, 25 bp, probe
atttttgctaagttatttgtctttg

SEQ ID NO: 119480 - DNA, 25 bp, probe
atttattgataatgttttgctactc

SEQ ID NO: 119481 - DNA, 25 bp, probe
atttcattccattctattgtttaca

SEQ ID NO: 119482 - DNA, 25 bp, probe
atttatgttctattcatcttttgaa

SEQ ID NO: 119483 - DNA, 25 bp, probe
atttgaataccatctttctatgaaa

SEQ ID NO: 119484 - DNA, 25 bp, probe
atttgaataccatctttctatgaaa

SEQ ID NO: 119485 - DNA, 25 bp, probe
atttggacaagacatttctgaaacc

SEQ ID NO: 119486 - DNA, 25 bp, probe
attttacaagagaatctctctgcta

SEQ ID NO: 119487 - DNA, 25 bp, probe
atttatacaaacatatcttctgcat

SEQ ID NO: 119488 - DNA, 25 bp, probe
atttatacaaacatatcttctgcat

SEQ ID NO: 119489 - DNA, 25 bp, probe
atttcatttaagagatcatttcatt

SEQ ID NO: 119490 - DNA, 25 bp, probe
atttttcttatgagttttctaatca

SEQ ID NO: 119491 - DNA, 25 bp, probe
attttattattttgccttactaatg

SEQ ID NO: 119492 - DNA, 25 bp, probe
attttattatctgggacatatttaa

SEQ ID NO: 119493 - DNA, 25 bp, probe
attttattgactgggcaacactgca

SEQ ID NO: 119494 - DNA, 25 bp, probe
attttatggcccagccatcagcatg

SEQ ID NO: 119495 - DNA, 25 bp, probe
attttataggcatggccatagaaat

SEQ ID NO: 119496 - DNA, 25 bp, probe
atttctaagctcaaagctcatcaaa

SEQ ID NO: 119497 - DNA, 25 bp, probe
atttaacacctaggcctgcaaattc

SEQ ID NO: 119498 - DNA, 25 bp, probe
tgtttgacctctgtgaccgaacatt

SEQ ID NO: 119499 - DNA, 25 bp, probe
gtggatggccgtgtttcggaatgtc

SEQ ID NO: 119500 - DNA, 25 bp, probe
atttggctcttggtttctggaattc

SEQ ID NO: 119501 - DNA, 25 bp, probe
atttggctcttggtttctggaattc

SEQ ID NO: 119502 - DNA, 25 bp, probe
atttgctcttgttttattgtcagtt

SEQ ID NO: 119503 - DNA, 25 bp, probe
atttacttggcattttaggacatgt

SEQ ID NO: 119504 - DNA, 25 bp, probe
atttggattggattttgttaatgca

SEQ ID NO: 119505 - DNA, 25 bp, probe
atttcctagagttttgttgaagcaa

SEQ ID NO: 119506 - DNA, 25 bp, probe
atttcctagagttttgttgaagcaa

SEQ ID NO: 119507 - DNA, 25 bp, probe
atttctccagcaaatttgaggaagc

SEQ ID NO: 119508 - DNA, 25 bp, probe
atttttgcctaaatggagtatacct

SEQ ID NO: 119509 - DNA, 25 bp, probe
atttttgtcattactatagaaaact

SEQ ID NO: 119510 - DNA, 25 bp, probe
atttgatttattacttcccaatatt

SEQ ID NO: 119511 - DNA, 25 bp, probe
atttatttttgtaacaccagtgtct

SEQ ID NO: 119512 - DNA, 25 bp, probe
atttgttttctaatacctcttgtca

SEQ ID NO: 119513 - DNA, 25 bp, probe
atttatgtttgtttttctcttgtca

SEQ ID NO: 119514 - DNA, 25 bp, probe
atttattattttatttattgatcaa

SEQ ID NO: 119515 - DNA, 25 bp, probe
atttatttgctcttgttttattgtc

SEQ ID NO: 119516 - DNA, 25 bp, probe
atttaattgcccatgatatgtattt

SEQ ID NO: 119517 - DNA, 25 bp, probe
atattccttcctatacattgtttac

SEQ ID NO: 119518 - DNA, 25 bp, probe
atttaattcagctagtacaggtcct

SEQ ID NO: 119519 - DNA, 25 bp, probe
atttttccagcccgaaggatctgtc

SEQ ID NO: 119520 - DNA, 25 bp, probe
atttgtttagactgaaggaagacgt

SEQ ID NO: 119521 - DNA, 25 bp, probe
atatttattacatcggggcaaattt

SEQ ID NO: 119522 - DNA, 25 bp, probe
atttcttctactccagtggtgagaa

SEQ ID NO: 119523 - DNA, 25 bp, probe
atttgtcctgactctgtgtataagc

SEQ ID NO: 119524 - DNA, 25 bp, probe
atttatgtctgagtgacttggataa

SEQ ID NO: 119525 - DNA, 25 bp, probe
atttcagtgctaggatcattggatt

SEQ ID NO: 119526 - DNA, 25 bp, probe
atttcagtgccatacatgttattgt

SEQ ID NO: 119527 - DNA, 25 bp, probe
atttctgcacagttaagtttatgag

SEQ ID NO: 119528 - DNA, 25 bp, probe
atttctgcatggtctaaatctttgt

SEQ ID NO: 119529 - DNA, 25 bp, probe
atttctttgatctgctcttttgtca

SEQ ID NO: 119530 - DNA, 25 bp, probe
atttcttctatctaataataattat

SEQ ID NO: 119531 - DNA, 25 bp, probe
atttgctctcgaaaatgttaatcta

SEQ ID NO: 119532 - DNA, 25 bp, probe
atttatctcagaaaggttcctgtgt

SEQ ID NO: 119533 - DNA, 25 bp, probe
atttgaacagttggctgtatgactg

SEQ ID NO: 119534 - DNA, 25 bp, probe
atttgataccagttgagtagaatgt

SEQ ID NO: 119535 - DNA, 25 bp, probe
atattgaaatcgttgaagcgagaga

SEQ ID NO: 119536 - DNA, 25 bp, probe
atatggaacggctctcagcggagca

SEQ ID NO: 119537 - DNA, 25 bp, probe
atattaacattctctccgtgaaatc

SEQ ID NO: 119538 - DNA, 25 bp, probe
atataatatatatgtccctggtaca

SEQ ID NO: 119539 - DNA, 25 bp, probe
atataatatatatgtccctggtaca

SEQ ID NO: 119540 - DNA, 25 bp, probe
atttgaatatgatctcccataattt

SEQ ID NO: 119541 - DNA, 25 bp, probe
atttgaaaactccactatagttcat

SEQ ID NO: 119542 - DNA, 25 bp, probe
atattgtgaaaagctcttggttgca

SEQ ID NO: 119543 - DNA, 25 bp, probe
atatttgtatcagcttttgtgctaa

SEQ ID NO: 119544 - DNA, 25 bp, probe
atttcttcacccttttgtcaaattg

SEQ ID NO: 119545 - DNA, 25 bp, probe
atattttccggctttatgtcagtat

SEQ ID NO: 119546 - DNA, 25 bp, probe
atattgttccctaatttgccagtgg

SEQ ID NO: 119547 - DNA, 25 bp, probe
atattcttccatcaactcatggcag

SEQ ID NO: 119548 - DNA, 25 bp, probe
atattttgccacgtcacatccaatt

SEQ ID NO: 119549 - DNA, 25 bp, probe
atttattacatcgttcatccggtgg

SEQ ID NO: 119550 - DNA, 25 bp, probe
atttcttgactatttcaccatgttg

SEQ ID NO: 119551 - DNA, 25 bp, probe
atttctatactattcatctcctgtc

SEQ ID NO: 119552 - DNA, 25 bp, probe
atatgatgcatatctcattcattac

SEQ ID NO: 119553 - DNA, 25 bp, probe
atttcataatgccttcagtaccgac

SEQ ID NO: 119554 - DNA, 25 bp, probe
atattcgaaggcatcaaacacccca

SEQ ID NO: 119555 - DNA, 25 bp, probe
atatttatagtcacaagagcccagc

SEQ ID NO: 119556 - DNA, 25 bp, probe
atatttacctatacggaggctgatg

SEQ ID NO: 119557 - DNA, 25 bp, probe
atttcataccatggaggaaggctct

SEQ ID NO: 119558 - DNA, 25 bp, probe
atttgcagatactgagcccaggcct

SEQ ID NO: 119559 - DNA, 25 bp, probe
atttgcagatactgagcccaggcct

SEQ ID NO: 119560 - DNA, 25 bp, probe
atttcagcaaaggacgtcatggctt

SEQ ID NO: 119561 - DNA, 25 bp, probe
atttcacaagagggtgttatgcata

SEQ ID NO: 119562 - DNA, 25 bp, probe
atatctataaactgttaatgctgag

SEQ ID NO: 119563 - DNA, 25 bp, probe
atatctataaactgttaatgctgag

SEQ ID NO: 119564 - DNA, 25 bp, probe
atatcctcagaccaggtggaattac

SEQ ID NO: 119565 - DNA, 25 bp, probe
atttctagctgccatggtggttagg

SEQ ID NO: 119566 - DNA, 25 bp, probe
atttcatcactgcagcgtggctgat

SEQ ID NO: 119567 - DNA, 25 bp, probe
atttcatcactcagtgtatgcgaaa

SEQ ID NO: 119568 - DNA, 25 bp, probe
atttatcattcaggcatgtcgggga

SEQ ID NO: 119569 - DNA, 25 bp, probe
atttatctatacggtggtccagcat

SEQ ID NO: 119570 - DNA, 25 bp, probe
atttatatatacatgaagccacaga

SEQ ID NO: 119571 - DNA, 25 bp, probe
atttagtgtggcagaataataacat

SEQ ID NO: 119572 - DNA, 25 bp, probe
atttgaagtacagtggtgaaaacat

SEQ ID NO: 119573 - DNA, 25 bp, probe
atgttaagtaacactcaaccatcag

SEQ ID NO: 119574 - DNA, 25 bp, probe
atgttaagtaacactcaaccatcag

SEQ ID NO: 119575 - DNA, 25 bp, probe
atttaagtaattttgccatcctagg

SEQ ID NO: 119576 - DNA, 25 bp, probe
atatttttaaatttctcagccatca

SEQ ID NO: 119577 - DNA, 25 bp, probe
atattatttatggacctctggccaa

SEQ ID NO: 119578 - DNA, 25 bp, probe
atattaagttttcctctgtgcaaat

SEQ ID NO: 119579 - DNA, 25 bp, probe
ataaagtcttttgctccgctgacat

SEQ ID NO: 119580 - DNA, 25 bp, probe
atagttgtctttagtctacaggact

SEQ ID NO: 119581 - DNA, 25 bp, probe
ataggtgcctttaccaatggtctct

SEQ ID NO: 119582 - DNA, 25 bp, probe
ataggtgcctttaccaatggtctct

SEQ ID NO: 119583 - DNA, 25 bp, probe
ataggtctgctttgggaaggtacta

SEQ ID NO: 119584 - DNA, 25 bp, probe
atacgcctctttgcaaaggacctca

SEQ ID NO: 119585 - DNA, 25 bp, probe
atacgcctctttgcaaaggacctca

SEQ ID NO: 119586 - DNA, 25 bp, probe
atacggacctcttaaagcacacccg

SEQ ID NO: 119587 - DNA, 25 bp, probe
atatgtggccctatgtaagcccctc

SEQ ID NO: 119588 - DNA, 25 bp, probe
atagcaggagttattaaccagccat

SEQ ID NO: 119589 - DNA, 25 bp, probe
ataggcaaggtttacacagcacaga

SEQ ID NO: 119590 - DNA, 25 bp, probe
ataggagagggatacagcacccctg

SEQ ID NO: 119591 - DNA, 25 bp, probe
atagggacggacacatcaagctcac

SEQ ID NO: 119592 - DNA, 25 bp, probe
ataggaagctggcaccactcagctc

SEQ ID NO: 119593 - DNA, 25 bp, probe
atttgagagaagccacgctgtcctc

SEQ ID NO: 119594 - DNA, 25 bp, probe
atttcagagtgagcatcagcgacct

SEQ ID NO: 119595 - DNA, 25 bp, probe
atttcagagtgagcatcagcgacct

SEQ ID NO: 119596 - DNA, 25 bp, probe
atattcagagtaacacaggattcac

SEQ ID NO: 119597 - DNA, 25 bp, probe
atattacactataacatggaacaat

SEQ ID NO: 119598 - DNA, 25 bp, probe
atttcccatgactacatggaaattc

SEQ ID NO: 119599 - DNA, 25 bp, probe
atttcttcattctgctgagcaagtg

SEQ ID NO: 119600 - DNA, 25 bp, probe
atatgccttcttgtctgacaacttc

SEQ ID NO: 119601 - DNA, 25 bp, probe
atatgcactctggtaccttaatttt

SEQ ID NO: 119602 - DNA, 25 bp, probe
atatcactgcaacacctacaagttt

SEQ ID NO: 119603 - DNA, 25 bp, probe
atttagcttctaggatccaagtttc

SEQ ID NO: 119604 - DNA, 25 bp, probe
atttcctggtgaggtccaagctgtt

SEQ ID NO: 119605 - DNA, 25 bp, probe
atttcgccgtattggccaggctgat

SEQ ID NO: 119606 - DNA, 25 bp, probe
atttcagccaataggagccagccag

SEQ ID NO: 119607 - DNA, 25 bp, probe
atttcaccaaaggagcaaagaggat

SEQ ID NO: 119608 - DNA, 25 bp, probe
atttctccacctggcagaaaagtaa

SEQ ID NO: 119609 - DNA, 25 bp, probe
atttacacattgaggaataaggaca

SEQ ID NO: 119610 - DNA, 25 bp, probe
atttgaccatctcgggaagtgagga

SEQ ID NO: 119611 - DNA, 25 bp, probe
atttaccatcatgtatccagtagtg

SEQ ID NO: 119612 - DNA, 25 bp, probe
atttactcacattcacacgcgattg

SEQ ID NO: 119613 - DNA, 25 bp, probe
atttggctcacaaacaggcaccaga

SEQ ID NO: 119614 - DNA, 25 bp, probe
atttgcctctactacgtcaggcaga

SEQ ID NO: 119615 - DNA, 25 bp, probe
atatttccaactacagtctggtgat

SEQ ID NO: 119616 - DNA, 25 bp, probe
atattgaaacactacagcgcaggat

SEQ ID NO: 119617 - DNA, 25 bp, probe
atttgcaaataaggagccatatgaa

SEQ ID NO: 119618 - DNA, 25 bp, probe
atttgcaaataaggagccatatgaa

SEQ ID NO: 119619 - DNA, 25 bp, probe
atagtcgcttcctggctaatgagat

SEQ ID NO: 119620 - DNA, 25 bp, probe
atttctcttccagctgctaaaaggc

SEQ ID NO: 119621 - DNA, 25 bp, probe
atttctttccagacatctaataaac

SEQ ID NO: 119622 - DNA, 25 bp, probe
atttctttgatacctctagagaaac

SEQ ID NO: 119623 - DNA, 25 bp, probe
atttcttcctacctgctaggacaag

SEQ ID NO: 119624 - DNA, 25 bp, probe
atttcttcttaaatgtagtacatta

SEQ ID NO: 119625 - DNA, 25 bp, probe
atttcttcttaaatgtagtacatta

SEQ ID NO: 119626 - DNA, 25 bp, probe
atattttgcttctggtagtaaggag

SEQ ID NO: 119627 - DNA, 25 bp, probe
atagctaggttgtggcagagtaagg

SEQ ID NO: 119628 - DNA, 25 bp, probe
atactagtttgctttgctgaccaaa

SEQ ID NO: 119629 - DNA, 25 bp, probe
ataccacaagtgctttcccaagaat

SEQ ID NO: 119630 - DNA, 25 bp, probe
ataccaaagtctgccactacttgga

SEQ ID NO: 119631 - DNA, 25 bp, probe
atacctggggtatcctatcttgtac

SEQ ID NO: 119632 - DNA, 25 bp, probe
atacctggggtatcctatcttgtac

SEQ ID NO: 119633 - DNA, 25 bp, probe
atactttgtggttaaaatacttgat

SEQ ID NO: 119634 - DNA, 25 bp, probe
atatttggacctttaaacagcttgt

SEQ ID NO: 119635 - DNA, 25 bp, probe
atatttggacctttaaacagcttgt

SEQ ID NO: 119636 - DNA, 25 bp, probe
atatctcttatcttacgaaaaaatg

SEQ ID NO: 119637 - DNA, 25 bp, probe
atttcctaattctggtaaatatgcc

SEQ ID NO: 119638 - DNA, 25 bp, probe
atttccataaatggggtcgagaatc

SEQ ID NO: 119639 - DNA, 25 bp, probe
atttccataagtggagcctctccgt

SEQ ID NO: 119640 - DNA, 25 bp, probe
atttcatcatctttgaggctgctcc

SEQ ID NO: 119641 - DNA, 25 bp, probe
atttcacatttccatggcatgcact

SEQ ID NO: 119642 - DNA, 25 bp, probe
atttcacatttccatggcatgcact

SEQ ID NO: 119643 - DNA, 25 bp, probe
atttccattgtgaccagcagcaggc

SEQ ID NO: 119644 - DNA, 25 bp, probe
atttgctaattgacagcactggtca

SEQ ID NO: 119645 - DNA, 25 bp, probe
atttgtaagatgacagatgatgctg

SEQ ID NO: 119646 - DNA, 25 bp, probe
atatgatgtccgctctgatgtctgg

SEQ ID NO: 119647 - DNA, 25 bp, probe
atattgtcatcctttgagctgctga

SEQ ID NO: 119648 - DNA, 25 bp, probe
ataagctgcccatctcagcagctgt

SEQ ID NO: 119649 - DNA, 25 bp, probe
atatattggccttctacagctatta

SEQ ID NO: 119650 - DNA, 25 bp, probe
atatttgccctagaatgccagctag

SEQ ID NO: 119651 - DNA, 25 bp, probe
atttgttccacaggatgtgccacca

SEQ ID NO: 119652 - DNA, 25 bp, probe
atttgtatccaaggtgctgaatctt

SEQ ID NO: 119653 - DNA, 25 bp, probe
atttcttcacaaattgcaaatccgc

SEQ ID NO: 119654 - DNA, 25 bp, probe
atttctgtaaactgcctgtccatgc

SEQ ID NO: 119655 - DNA, 25 bp, probe
atttctatgaaatcgcgcttcttga

SEQ ID NO: 119656 - DNA, 25 bp, probe
atttctatgaaatcgtcgcttcttg

SEQ ID NO: 119657 - DNA, 25 bp, probe
atttctctaagaccattcgcgattt

SEQ ID NO: 119658 - DNA, 25 bp, probe
atttctcttataattctcacttatt

SEQ ID NO: 119659 - DNA, 25 bp, probe
atttccttgcataatccctttaaca

SEQ ID NO: 119660 - DNA, 25 bp, probe
atttcctatgcgaatttctcccaat

SEQ ID NO: 119661 - DNA, 25 bp, probe
atttccttcagttatactttcaatg

SEQ ID NO: 119662 - DNA, 25 bp, probe
atttcatcgaaattatttattcatt

SEQ ID NO: 119663 - DNA, 25 bp, probe
atttcacagcagtttattaatgtat

SEQ ID NO: 119664 - DNA, 25 bp, probe
atttcccatgcatttactagattct

SEQ ID NO: 119665 - DNA, 25 bp, probe
atttggccgcatttatcatcatagt

SEQ ID NO: 119666 - DNA, 25 bp, probe
atttgaggccattaatatcaccaac

SEQ ID NO: 119667 - DNA, 25 bp, probe
atttgggagcaaaaatccacagtga

SEQ ID NO: 119668 - DNA, 25 bp, probe
atttctgagacatttaatcatgcca

SEQ ID NO: 119669 - DNA, 25 bp, probe
atttgccagcagataaatcatgccc

SEQ ID NO: 119670 - DNA, 25 bp, probe
atttgcatacattcttcaagatccc

SEQ ID NO: 119671 - DNA, 25 bp, probe
atttcatcatgaatattttgagcac

SEQ ID NO: 119672 - DNA, 25 bp, probe
ataccagcttgcaatgggtcagcac

SEQ ID NO: 119673 - DNA, 25 bp, probe
atatcacagggcttgtgcattcaga

SEQ ID NO: 119674 - DNA, 25 bp, probe
atatagagtggtctcatctccttcc

SEQ ID NO: 119675 - DNA, 25 bp, probe
atttcatgtgggggctcatcgccca

SEQ ID NO: 119676 - DNA, 25 bp, probe
atatcctgatggaggctccacacta

SEQ ID NO: 119677 - DNA, 25 bp, probe
agccttatattaggcccctctattt

SEQ ID NO: 119678 - DNA, 25 bp, probe
agaggatattggagcccctttttgt

SEQ ID NO: 119679 - DNA, 25 bp, probe
caatgggattttcaccctttactct

SEQ ID NO: 119680 - DNA, 25 bp, probe
atattgttcccacaaccttattctc

SEQ ID NO: 119681 - DNA, 25 bp, probe
atattggggacaccaactgtcttcc

SEQ ID NO: 119682 - DNA, 25 bp, probe
atttggtggactttatcttgctggg

SEQ ID NO: 119683 - DNA, 25 bp, probe
atttgtgctggattcctgattgcct

SEQ ID NO: 119684 - DNA, 25 bp, probe
atttgcatgttaactgtaggccaat

SEQ ID NO: 119685 - DNA, 25 bp, probe
atttcatttcactctagcctacata

SEQ ID NO: 119686 - DNA, 25 bp, probe
atttgtttacagttagactatctga

SEQ ID NO: 119687 - DNA, 25 bp, probe
atttcttttgacttagagtattaat

SEQ ID NO: 119688 - DNA, 25 bp, probe
atttcttatatgactctagtgtttc

SEQ ID NO: 119689 - DNA, 25 bp, probe
atttgctcaataactctactcattt

SEQ ID NO: 119690 - DNA, 25 bp, probe
atttgtgcaaacgactgtgtcactt

SEQ ID NO: 119691 - DNA, 25 bp, probe
atttggataacttgcttgtgagatt

SEQ ID NO: 119692 - DNA, 25 bp, probe
atttggctatactgatgtttgtgtt

SEQ ID NO: 119693 - DNA, 25 bp, probe
atatttctacgctggtattgtctgt

SEQ ID NO: 119694 - DNA, 25 bp, probe
atattattcagctcgagtacttgtc

SEQ ID NO: 119695 - DNA, 25 bp, probe
atatcctggcactgaggtcactctg

SEQ ID NO: 119696 - DNA, 25 bp, probe
atatacaggagtcagctgaagctgg

SEQ ID NO: 119697 - DNA, 25 bp, probe
atatacaggagtcagctgaagctgg

SEQ ID NO: 119698 - DNA, 25 bp, probe
atatgagaggaacgggagatatgag

SEQ ID NO: 119699 - DNA, 25 bp, probe
atatgcagactgcagggcttgaaat

SEQ ID NO: 119700 - DNA, 25 bp, probe
atatggacatggcaggccgatttgg

SEQ ID NO: 119701 - DNA, 25 bp, probe
atttgagctggcaatgggcgattat

SEQ ID NO: 119702 - DNA, 25 bp, probe
atttgtcatggatggagggtatctg

SEQ ID NO: 119703 - DNA, 25 bp, probe
atatctcctggctggatgggtttgg

SEQ ID NO: 119704 - DNA, 25 bp, probe
atattggtggccggtggttttgtgc

SEQ ID NO: 119705 - DNA, 25 bp, probe
atttggtgtaggtaggtctgtttgc

SEQ ID NO: 119706 - DNA, 25 bp, probe
atattggttagaatttggctttggg

SEQ ID NO: 119707 - DNA, 25 bp, probe
atttggtcatgaagctttcctatgg

SEQ ID NO: 119708 - DNA, 25 bp, probe
atttggtcatgaagctttcctatgg

SEQ ID NO: 119709 - DNA, 25 bp, probe
atttggtacacacttgaccttctgt

SEQ ID NO: 119710 - DNA, 25 bp, probe
atttggtacacacttgaccttctgt

SEQ ID NO: 119711 - DNA, 25 bp, probe
atttgaccactctggactgttctgt

SEQ ID NO: 119712 - DNA, 25 bp, probe
atttccccatcgagactgtggtgtg

SEQ ID NO: 119713 - DNA, 25 bp, probe
atttcctccatagcagaagttgtgt

SEQ ID NO: 119714 - DNA, 25 bp, probe
atttcctctgatactataagctttt

SEQ ID NO: 119715 - DNA, 25 bp, probe
atttcctctatataaggtggcatat

SEQ ID NO: 119716 - DNA, 25 bp, probe
atttcagcagctcaaacaggtggta

SEQ ID NO: 119717 - DNA, 25 bp, probe
atttcagcagctcaaacaggtggta

SEQ ID NO: 119718 - DNA, 25 bp, probe
atttcatagtgaatacaagtgtgga

SEQ ID NO: 119719 - DNA, 25 bp, probe
atttcatagtgaatacaagtgtgga

SEQ ID NO: 119720 - DNA, 25 bp, probe
atttctctggagaacaaacagatga

SEQ ID NO: 119721 - DNA, 25 bp, probe
atttctcatttgccaataataatac

SEQ ID NO: 119722 - DNA, 25 bp, probe
atttctcttggctttagatgacatt

SEQ ID NO: 119723 - DNA, 25 bp, probe
atttctcttggctttagatgacatt

SEQ ID NO: 119724 - DNA, 25 bp, probe
atttcagtaggctttatgctgtgtt

SEQ ID NO: 119725 - DNA, 25 bp, probe
atttcagtaggctttatgctgtgtt

SEQ ID NO: 119726 - DNA, 25 bp, probe
atttgcctcagccacagaatttgta

SEQ ID NO: 119727 - DNA, 25 bp, probe
atactacctggccagaatttggagt

SEQ ID NO: 119728 - DNA, 25 bp, probe
atagatacctgtttgactttgaggt

SEQ ID NO: 119729 - DNA, 25 bp, probe
atttcattgtattctcactttgagg

SEQ ID NO: 119730 - DNA, 25 bp, probe
atagtgcaaatttgccagcttggag

SEQ ID NO: 119731 - DNA, 25 bp, probe
atattgcaattcaagccatccatga

SEQ ID NO: 119732 - DNA, 25 bp, probe
atttgacatcatccccactatgatc

SEQ ID NO: 119733 - DNA, 25 bp, probe
atttgacatcatccccactatgatc

SEQ ID NO: 119734 - DNA, 25 bp, probe
atttgaatatcagccagctactttt

SEQ ID NO: 119735 - DNA, 25 bp, probe
atataggcattcttccagtgtggtt

SEQ ID NO: 119736 - DNA, 25 bp, probe
atatgggaatttaacttactcaagc

SEQ ID NO: 119737 - DNA, 25 bp, probe
atgagcgaaattgtctttactaaac

SEQ ID NO: 119738 - DNA, 25 bp, probe
atttgtaatcatggttttactgaag

SEQ ID NO: 119739 - DNA, 25 bp, probe
atttctaactccttatgtttgaaga

SEQ ID NO: 119740 - DNA, 25 bp, probe
atttctgaaaccgcttattgacaca

SEQ ID NO: 119741 - DNA, 25 bp, probe
atttctgaaaccgcttattgacaca

SEQ ID NO: 119742 - DNA, 25 bp, probe
atttcataaattggctcctttccca

SEQ ID NO: 119743 - DNA, 25 bp, probe
atttcttcagttttcttttcttgca

SEQ ID NO: 119744 - DNA, 25 bp, probe
atttctactggatatgcattttctt

SEQ ID NO: 119745 - DNA, 25 bp, probe
atttctcagctataaattgcgctct

SEQ ID NO: 119746 - DNA, 25 bp, probe
atattctcattattaacttcctcta

SEQ ID NO: 119747 - DNA, 25 bp, probe
atatacttgtaaaaccaccgcattc

SEQ ID NO: 119748 - DNA, 25 bp, probe
atatttttgctaggagccccagctt

SEQ ID NO: 119749 - DNA, 25 bp, probe
atatttatggaagacactgcctgct

SEQ ID NO: 119750 - DNA, 25 bp, probe
atattacggatatggctgctactgt

SEQ ID NO: 119751 - DNA, 25 bp, probe
atattacggatatggctgctactgt

SEQ ID NO: 119752 - DNA, 25 bp, probe
atttgggatgattcaggctctgaca

SEQ ID NO: 119753 - DNA, 25 bp, probe
atttgctggagtgctggctccacgc

SEQ ID NO: 119754 - DNA, 25 bp, probe
atttctggcagtgcaggcattacta

SEQ ID NO: 119755 - DNA, 25 bp, probe
atttctggcaaaatggcactgaatc

SEQ ID NO: 119756 - DNA, 25 bp, probe
atttctgtgaacatgtatgaagata

SEQ ID NO: 119757 - DNA, 25 bp, probe
atttctggagagcttatgaccaatg

SEQ ID NO: 119758 - DNA, 25 bp, probe
atttctggagagcttatgaccaatg

SEQ ID NO: 119759 - DNA, 25 bp, probe
atttctgtatagttttcacctctga

SEQ ID NO: 119760 - DNA, 25 bp, probe
atttctgtgtttgcattccactgct

SEQ ID NO: 119761 - DNA, 25 bp, probe
atttgctttttgctaacaatgctct

SEQ ID NO: 119762 - DNA, 25 bp, probe
atttgctctgcatgtggtaacttgt

SEQ ID NO: 119763 - DNA, 25 bp, probe
atttgctctgcatgtggtaacttgt

SEQ ID NO: 119764 - DNA, 25 bp, probe
atttgtctgccaatagaaacatttg

SEQ ID NO: 119765 - DNA, 25 bp, probe
atttgtctgccaatagaaacatttg

SEQ ID NO: 119766 - DNA, 25 bp, probe
atttgtccacaatgatcaactacgc

SEQ ID NO: 119767 - DNA, 25 bp, probe
atttgagccacagtataccactcct

SEQ ID NO: 119768 - DNA, 25 bp, probe
atatatgaccacgctcacccgcatg

SEQ ID NO: 119769 - DNA, 25 bp, probe
atattcatcagcagactcaaaagtc

SEQ ID NO: 119770 - DNA, 25 bp, probe
atttgtagcatcaactagaataatc

SEQ ID NO: 119771 - DNA, 25 bp, probe
atttctcagactttggaaaatgcat

SEQ ID NO: 119772 - DNA, 25 bp, probe
atttctcagactttggaaaatgcat

SEQ ID NO: 119773 - DNA, 25 bp, probe
atattctcaagttctgggcacacag

SEQ ID NO: 119774 - DNA, 25 bp, probe
atattctggggcttggagaccgtca

SEQ ID NO: 119775 - DNA, 25 bp, probe
atttctgactgcagggagaggccta

SEQ ID NO: 119776 - DNA, 25 bp, probe
atatttttgaggcgaaggcgtctgt

SEQ ID NO: 119777 - DNA, 25 bp, probe
atatgggttgaataaaatgtgtctt

SEQ ID NO: 119778 - DNA, 25 bp, probe
atatgggtttcttaataatgggatt

SEQ ID NO: 119779 - DNA, 25 bp, probe
atatgggtttcttaataatgggatt

SEQ ID NO: 119780 - DNA, 25 bp, probe
atgccggtggttaatgtggacggtt

SEQ ID NO: 119781 - DNA, 25 bp, probe
acccgaggcattatttgaccggatc

SEQ ID NO: 119782 - DNA, 25 bp, probe
aattcaaggattgtttaaaggtctg

SEQ ID NO: 119783 - DNA, 25 bp, probe
atattcctggcatacctttaaggta

SEQ ID NO: 119784 - DNA, 25 bp, probe
atttccatatgttagccatttcctg

SEQ ID NO: 119785 - DNA, 25 bp, probe
atattccttgtaggttcttcactca

SEQ ID NO: 119786 - DNA, 25 bp, probe
atattcaattctagcttttaagcca

SEQ ID NO: 119787 - DNA, 25 bp, probe
atattcaattctagcttttaagcca

SEQ ID NO: 119788 - DNA, 25 bp, probe
atattgaataatccttgttagagtt

SEQ ID NO: 119789 - DNA, 25 bp, probe
atttgaagatatcccgttagaagaa

SEQ ID NO: 119790 - DNA, 25 bp, probe
atttgacagtattcctagaagaact

SEQ ID NO: 119791 - DNA, 25 bp, probe
acttaggataacttagaaaggctag

SEQ ID NO: 119792 - DNA, 25 bp, probe
atatcttcgttatgtaagaaggcta

SEQ ID NO: 119793 - DNA, 25 bp, probe
atttgttttactcagcaggtgtgcc

SEQ ID NO: 119794 - DNA, 25 bp, probe
atattgaattctcttagcttgtgtg

SEQ ID NO: 119795 - DNA, 25 bp, probe
atttgtgatttggttaatctgtata

SEQ ID NO: 119796 - DNA, 25 bp, probe
atttgctttgcaccttatcatttca

SEQ ID NO: 119797 - DNA, 25 bp, probe
atttctctatgccatctagactgat

SEQ ID NO: 119798 - DNA, 25 bp, probe
atttcccatgcacctaatgctgtga

SEQ ID NO: 119799 - DNA, 25 bp, probe
atattcttgcagcccatcagatcat

SEQ ID NO: 119800 - DNA, 25 bp, probe
atattctctgctcactgaacatctc

SEQ ID NO: 119801 - DNA, 25 bp, probe
atattctggtgccgctgaaaatcca

SEQ ID NO: 119802 - DNA, 25 bp, probe
atatctgtggtcccgatgtagtgcc

SEQ ID NO: 119803 - DNA, 25 bp, probe
atattcggaacaggtgtatgatgcc

SEQ ID NO: 119804 - DNA, 25 bp, probe
atatcccaaacagatggcagagctg

SEQ ID NO: 119805 - DNA, 25 bp, probe
atatcccaaacagatggcagagctg

SEQ ID NO: 119806 - DNA, 25 bp, probe
atatctcaacggcctcggcaattgt

SEQ ID NO: 119807 - DNA, 25 bp, probe
atttctacacagccacggaagggca

SEQ ID NO: 119808 - DNA, 25 bp, probe
atttctacacagccacggaagggca

SEQ ID NO: 119809 - DNA, 25 bp, probe
atttctggcctgacctggaaggtga

SEQ ID NO: 119810 - DNA, 25 bp, probe
atttctggcctgacctggaaggtga

SEQ ID NO: 119811 - DNA, 25 bp, probe
atattcagtccttcttggaagacta

SEQ ID NO: 119812 - DNA, 25 bp, probe
atattcagtccttcttggaagacta

SEQ ID NO: 119813 - DNA, 25 bp, probe
atattcatatcctcttgtcaaatct

SEQ ID NO: 119814 - DNA, 25 bp, probe
atatttgtcgatatttccatcatta

SEQ ID NO: 119815 - DNA, 25 bp, probe
atatttgtcgatatttccatcatta

SEQ ID NO: 119816 - DNA, 25 bp, probe
atttgtccagtcattgtgccacaac

SEQ ID NO: 119817 - DNA, 25 bp, probe
atttgcatacagtgttcctacagcc

SEQ ID NO: 119818 - DNA, 25 bp, probe
atatctgcaccgagttccataggca

SEQ ID NO: 119819 - DNA, 25 bp, probe
atattcattttactgccactgtgga

SEQ ID NO: 119820 - DNA, 25 bp, probe
atattttctgtgcagccactgttaa

SEQ ID NO: 119821 - DNA, 25 bp, probe
atttctggcaggctggaagctctaa

SEQ ID NO: 119822 - DNA, 25 bp, probe
atttcggcagaaagtaatgttagga

SEQ ID NO: 119823 - DNA, 25 bp, probe
atttctggcaggaagtcttgttagt

SEQ ID NO: 119824 - DNA, 25 bp, probe
atgtctcggcattaatccgtttatg

SEQ ID NO: 119825 - DNA, 25 bp, probe
atatttacttactctgtttatgaat

SEQ ID NO: 119826 - DNA, 25 bp, probe
atatttacttactctgtttatgaat

SEQ ID NO: 119827 - DNA, 25 bp, probe
atatttatgcttaggtcttttcaaa

SEQ ID NO: 119828 - DNA, 25 bp, probe
atttggatgcttattcttttagtct

SEQ ID NO: 119829 - DNA, 25 bp, probe
atttggcatgctcatttacttcata

SEQ ID NO: 119830 - DNA, 25 bp, probe
atattggcaacctattctcactaag

SEQ ID NO: 119831 - DNA, 25 bp, probe
atattgggactgtttcacagcacaa

SEQ ID NO: 119832 - DNA, 25 bp, probe
atttgtggtctaccttcagcaagtg

SEQ ID NO: 119833 - DNA, 25 bp, probe
atttgagagctcaccttgcagcaga

SEQ ID NO: 119834 - DNA, 25 bp, probe
atatttgcttggcaacacgacttga

SEQ ID NO: 119835 - DNA, 25 bp, probe
atatttgcttggcaacacgacttga

SEQ ID NO: 119836 - DNA, 25 bp, probe
atcttcctggtataccgacttacat

SEQ ID NO: 119837 - DNA, 25 bp, probe
atttccatttacttaagacttaatg

SEQ ID NO: 119838 - DNA, 25 bp, probe
atttcctcttatcaacaacttgtga

SEQ ID NO: 119839 - DNA, 25 bp, probe
atattcgtttacaattgaacttcga

SEQ ID NO: 119840 - DNA, 25 bp, probe
atattcttttacatggcttctttaa

SEQ ID NO: 119841 - DNA, 25 bp, probe
atattcttttacatggcttctttaa

SEQ ID NO: 119842 - DNA, 25 bp, probe
atattgtattgtgtctggttcctgt

SEQ ID NO: 119843 - DNA, 25 bp, probe
atttgtgttgaacccagtttcattc

SEQ ID NO: 119844 - DNA, 25 bp, probe
atttctgttcagactcaagttttta

SEQ ID NO: 119845 - DNA, 25 bp, probe
atttgctgttcgacaagagcttgaa

SEQ ID NO: 119846 - DNA, 25 bp, probe
atttgcttggcaacacgacttgaaa

SEQ ID NO: 119847 - DNA, 25 bp, probe
atttgcttggcaacacgacttgaaa

SEQ ID NO: 119848 - DNA, 25 bp, probe
atttgctatgcgttatggaattgaa

SEQ ID NO: 119849 - DNA, 25 bp, probe
atttgttggttgtcgaatatcatca

SEQ ID NO: 119850 - DNA, 25 bp, probe
atttgcagcttgcggcggaatcaca

SEQ ID NO: 119851 - DNA, 25 bp, probe
atttgccgacagagcactgatcaac

SEQ ID NO: 119852 - DNA, 25 bp, probe
atttcgcgatggacagactcacaac

SEQ ID NO: 119853 - DNA, 25 bp, probe
atatctcaggagctcaacatggaac

SEQ ID NO: 119854 - DNA, 25 bp, probe
atatacaatagtactggcattcaga

SEQ ID NO: 119855 - DNA, 25 bp, probe
atatacaatagtactggcattcaga

SEQ ID NO: 119856 - DNA, 25 bp, probe
atataaatataccgacatgatcaaa

SEQ ID NO: 119857 - DNA, 25 bp, probe
atataaatataccgacatgatcaaa

SEQ ID NO: 119858 - DNA, 25 bp, probe
atacaatattggggacaccaactgt

SEQ ID NO: 119859 - DNA, 25 bp, probe
ataaatttgtcacaagcaccagcct

SEQ ID NO: 119860 - DNA, 25 bp, probe
ataaatttgtcacaagcaccagcct

SEQ ID NO: 119861 - DNA, 25 bp, probe
atatagtgctataccaaaagggcca

SEQ ID NO: 119862 - DNA, 25 bp, probe
atatagacctatgataaataaccag

SEQ ID NO: 119863 - DNA, 25 bp, probe
atattacctctgtataaaattcttc

SEQ ID NO: 119864 - DNA, 25 bp, probe
atatctcagcttgggaatttttttc

SEQ ID NO: 119865 - DNA, 25 bp, probe
atatctcagcttgggaatttttttc

SEQ ID NO: 119866 - DNA, 25 bp, probe
atattcacatatgggcagatgtcca

SEQ ID NO: 119867 - DNA, 25 bp, probe
atattcacatatgggcagatgtcca

SEQ ID NO: 119868 - DNA, 25 bp, probe
atatcctcattgctgcgatcatgtc

SEQ ID NO: 119869 - DNA, 25 bp, probe
atatgagctatgtgcatcgtgatct

SEQ ID NO: 119870 - DNA, 25 bp, probe
atatcagtgagggcatcttgtcttt

SEQ ID NO: 119871 - DNA, 25 bp, probe
atatcagtgagggcatcttgtcttt

SEQ ID NO: 119872 - DNA, 25 bp, probe
atatgcatgaagcttctgtttattg

SEQ ID NO: 119873 - DNA, 25 bp, probe
atattaatgttgactgttaattctt

SEQ ID NO: 119874 - DNA, 25 bp, probe
atattagccttgtctttgattttat

SEQ ID NO: 119875 - DNA, 25 bp, probe
atatcatcagccagttccttttgtt

SEQ ID NO: 119876 - DNA, 25 bp, probe
atatgaacatactttcctatttctg

SEQ ID NO: 119877 - DNA, 25 bp, probe
agtaaaaacactgctatacctcctt

SEQ ID NO: 119878 - DNA, 25 bp, probe
atatgataaaaagcttgtacctcct

SEQ ID NO: 119879 - DNA, 25 bp, probe
atagttaatacaggtttacagttca

SEQ ID NO: 119880 - DNA, 25 bp, probe
atgattttccacttttaaagttcat

SEQ ID NO: 119881 - DNA, 25 bp, probe
atgattttccacttttaaagttcat

SEQ ID NO: 119882 - DNA, 25 bp, probe
atattaccaacctttaaagactgat

SEQ ID NO: 119883 - DNA, 25 bp, probe
atatcacatgcctacattttacaaa

SEQ ID NO: 119884 - DNA, 25 bp, probe
atatgaagccctttattgacatggt

SEQ ID NO: 119885 - DNA, 25 bp, probe
atatcaagccctctgcaaaagatga

SEQ ID NO: 119886 - DNA, 25 bp, probe
atatcaagccctctgcaaaagatga

SEQ ID NO: 119887 - DNA, 25 bp, probe
atatgccagccattaataaaaggac

SEQ ID NO: 119888 - DNA, 25 bp, probe
atatcctcagattcagaaaaaccag

SEQ ID NO: 119889 - DNA, 25 bp, probe
atattctagatgtcatggatgaaga

SEQ ID NO: 119890 - DNA, 25 bp, probe
atattgtctgactgcattgaaatgc

SEQ ID NO: 119891 - DNA, 25 bp, probe
atattatgcatgcccacaggaaagc

SEQ ID NO: 119892 - DNA, 25 bp, probe
atatcttatcgctaaagaacaggca

SEQ ID NO: 119893 - DNA, 25 bp, probe
atatcttatcgctaaagaacaggca

SEQ ID NO: 119894 - DNA, 25 bp, probe
atattatcatccctaatgtagcagg

SEQ ID NO: 119895 - DNA, 25 bp, probe
atattatcatccctaatgtagcagg

SEQ ID NO: 119896 - DNA, 25 bp, probe
atatgtagcatcacaaactcgaacc

SEQ ID NO: 119897 - DNA, 25 bp, probe
atatgtagcaatcaaactggaacca

SEQ ID NO: 119898 - DNA, 25 bp, probe
atatgccaaggtgaagcttatccca

SEQ ID NO: 119899 - DNA, 25 bp, probe
atatgccgaggagaacttcaaaacc

SEQ ID NO: 119900 - DNA, 25 bp, probe
atttgccagtgggaactcctaaatc

SEQ ID NO: 119901 - DNA, 25 bp, probe
atttgactgtgagaactcatcgaaa

SEQ ID NO: 119902 - DNA, 25 bp, probe
atatctgacctgatgcaaatcgcta

SEQ ID NO: 119903 - DNA, 25 bp, probe
atatgctgaaacatccacacattgt

SEQ ID NO: 119904 - DNA, 25 bp, probe
atatatatgaccatgtctgaaatgt

SEQ ID NO: 119905 - DNA, 25 bp, probe
atattatggcagaagtatgtagagc

SEQ ID NO: 119906 - DNA, 25 bp, probe
atatggaggagaagtttatggcaac

SEQ ID NO: 119907 - DNA, 25 bp, probe
atatggaggagaagtttatggcaac

SEQ ID NO: 119908 - DNA, 25 bp, probe
atatggagaggatcattacattgaa

SEQ ID NO: 119909 - DNA, 25 bp, probe
atagtcgacgctacattgatgagta

SEQ ID NO: 119910 - DNA, 25 bp, probe
atttgtgatccaacatgtacagtat

SEQ ID NO: 119911 - DNA, 25 bp, probe
atttgtacacataaccatcaatgaa

SEQ ID NO: 119912 - DNA, 25 bp, probe
atttgtgtcaatacccgaaatgatg

SEQ ID NO: 119913 - DNA, 25 bp, probe
atatatttgcttcccccaaattgct

SEQ ID NO: 119914 - DNA, 25 bp, probe
atctagtttacttcctaaatttcag

SEQ ID NO: 119915 - DNA, 25 bp, probe
atctagtttacttcctaaatttcag

SEQ ID NO: 119916 - DNA, 25 bp, probe
atagttttcacctctgagaattaca

SEQ ID NO: 119917 - DNA, 25 bp, probe
ctcagtttacccacccattaaatgg

SEQ ID NO: 119918 - DNA, 25 bp, probe
atcttttaccatatcccagtgaagt

SEQ ID NO: 119919 - DNA, 25 bp, probe
atttgttagatcacatcgccgataa

SEQ ID NO: 119920 - DNA, 25 bp, probe
atttgcattaaaaactggtgctggt

SEQ ID NO: 119921 - DNA, 25 bp, probe
atatggtgtacacaacggcgctggt

SEQ ID NO: 119922 - DNA, 25 bp, probe
atttgtgataatgaagaggccttgg

SEQ ID NO: 119923 - DNA, 25 bp, probe
atttgtgataatgaagaggccttgg

SEQ ID NO: 119924 - DNA, 25 bp, probe
atttgtgcatcagaaaatgcagcct

SEQ ID NO: 119925 - DNA, 25 bp, probe
atttgtgcatcagaaaatgcagcct

SEQ ID NO: 119926 - DNA, 25 bp, probe
atttggatgcctggacaatttgctc

SEQ ID NO: 119927 - DNA, 25 bp, probe
atttggagttcaacactgtctctca

SEQ ID NO: 119928 - DNA, 25 bp, probe
atttgagtttatatctctcatgcat

SEQ ID NO: 119929 - DNA, 25 bp, probe
atttgattttagttcaccacattca

SEQ ID NO: 119930 - DNA, 25 bp, probe
atttgcaacttatatcgccagtcca

SEQ ID NO: 119931 - DNA, 25 bp, probe
atattcaactttcatggactgcccc

SEQ ID NO: 119932 - DNA, 25 bp, probe
atattacagccagtttggggcccct

SEQ ID NO: 119933 - DNA, 25 bp, probe
atatcatgatcacagtgattcccga

SEQ ID NO: 119934 - DNA, 25 bp, probe
atatctgatactgtatctgggctga

SEQ ID NO: 119935 - DNA, 25 bp, probe
atatacaactgctctggggtgcaag

SEQ ID NO: 119936 - DNA, 25 bp, probe
atataaactcaagtgcctgctacac

SEQ ID NO: 119937 - DNA, 25 bp, probe
atatcacaacccagaagtaaccacc

SEQ ID NO: 119938 - DNA, 25 bp, probe
ataccgaggcaagagggcgaccact

SEQ ID NO: 119939 - DNA, 25 bp, probe
atatccaagaaaggactgggaagct

SEQ ID NO: 119940 - DNA, 25 bp, probe
atatcctactaataagcctcaccta

SEQ ID NO: 119941 - DNA, 25 bp, probe
atatgcagcgacaaagaaaacttcc

SEQ ID NO: 119942 - DNA, 25 bp, probe
atatccgacatgaagccagtgactt

SEQ ID NO: 119943 - DNA, 25 bp, probe
atatacaccatggaacactatgtgt

SEQ ID NO: 119944 - DNA, 25 bp, probe
atatgttctgggccaacttgttggt

SEQ ID NO: 119945 - DNA, 25 bp, probe
atattgtgtggtctggttcctgtgt

SEQ ID NO: 119946 - DNA, 25 bp, probe
atattgtgggtctgagatgcccttt

SEQ ID NO: 119947 - DNA, 25 bp, probe
atttgttgggcatgatgtcctgttg

SEQ ID NO: 119948 - DNA, 25 bp, probe
atttgttgggcatgatgtcctgttg

SEQ ID NO: 119949 - DNA, 25 bp, probe
atatttatggagcaggtgcctggag

SEQ ID NO: 119950 - DNA, 25 bp, probe
atattttgtatcatcgtgcctatag

SEQ ID NO: 119951 - DNA, 25 bp, probe
atattttgtatttggcaactgtggg

SEQ ID NO: 119952 - DNA, 25 bp, probe
atactagtgttcatagaacgtaggt

SEQ ID NO: 119953 - DNA, 25 bp, probe
atagtggtgtggatcagttggtaga

SEQ ID NO: 119954 - DNA, 25 bp, probe
atcaggagggagctagcactggacg

SEQ ID NO: 119955 - DNA, 25 bp, probe
atatggcaatggtagtcagcacgtg

SEQ ID NO: 119956 - DNA, 25 bp, probe
atatgagattgttctctggcagccg

SEQ ID NO: 119957 - DNA, 25 bp, probe
atatggtggtgcactggatcctgct

SEQ ID NO: 119958 - DNA, 25 bp, probe
atatgaggcagggccgtacgctgct

SEQ ID NO: 119959 - DNA, 25 bp, probe
atatgaggcagggccgtacgctgct

SEQ ID NO: 119960 - DNA, 25 bp, probe
atatggccagactatcaggcccatt

SEQ ID NO: 119961 - DNA, 25 bp, probe
atttgacagagctaaggccaaagaa

SEQ ID NO: 119962 - DNA, 25 bp, probe
atttgaatttattgaccacacagta

SEQ ID NO: 119963 - DNA, 25 bp, probe
atattcctttactaccacacatgtc

SEQ ID NO: 119964 - DNA, 25 bp, probe
atataccgtgtataccatgcactat

SEQ ID NO: 119965 - DNA, 25 bp, probe
ataaacggtcaatcacaggaaacaa

SEQ ID NO: 119966 - DNA, 25 bp, probe
ataacaattgtatagtagggataaa

SEQ ID NO: 119967 - DNA, 25 bp, probe
ataccaagtggatagtagaacttat

SEQ ID NO: 119968 - DNA, 25 bp, probe
ataccaaatgaaactttgacctttg

SEQ ID NO: 119969 - DNA, 25 bp, probe
ataccaagagcacggctgaagactc

SEQ ID NO: 119970 - DNA, 25 bp, probe
ataccaggacacttacaaaccccat

SEQ ID NO: 119971 - DNA, 25 bp, probe
atatctccgaagttaaaatctgtaa

SEQ ID NO: 119972 - DNA, 25 bp, probe
atacctagcactttataaatttatg

SEQ ID NO: 119973 - DNA, 25 bp, probe
atataaacccctcagacagtttgct

SEQ ID NO: 119974 - DNA, 25 bp, probe
atcaaaaccctccttgaattgggct

SEQ ID NO: 119975 - DNA, 25 bp, probe
atcaaacaccccaatctggttcggt

SEQ ID NO: 119976 - DNA, 25 bp, probe
atataaaaagtgcatctgttttgtt

SEQ ID NO: 119977 - DNA, 25 bp, probe
atcccaaaccagctattcttttcat

SEQ ID NO: 119978 - DNA, 25 bp, probe
ataccaggactatgggtctttgtct

SEQ ID NO: 119979 - DNA, 25 bp, probe
ataagtggactatggtcgtcttaat

SEQ ID NO: 119980 - DNA, 25 bp, probe
atagttggagtctctgactgtttaa

SEQ ID NO: 119981 - DNA, 25 bp, probe
atatttggctttagatggttttaat

SEQ ID NO: 119982 - DNA, 25 bp, probe
ataatcacagacactatggttttaa

SEQ ID NO: 119983 - DNA, 25 bp, probe
atattcgcaaaatcggttcattcga

SEQ ID NO: 119984 - DNA, 25 bp, probe
atatattcgcaaaatcggttcattc

SEQ ID NO: 119985 - DNA, 25 bp, probe
atatttctcataattctgcagagac

SEQ ID NO: 119986 - DNA, 25 bp, probe
atatgcctccagaagtgttggacga

SEQ ID NO: 119987 - DNA, 25 bp, probe
atatacccagacattgtgcgacttc

SEQ ID NO: 119988 - DNA, 25 bp, probe
atataccccaaattgtgtatatatc

SEQ ID NO: 119989 - DNA, 25 bp, probe
ataacccacgaaaggctgaaaagca

SEQ ID NO: 119990 - DNA, 25 bp, probe
atataacccgcctgcagtggaaagt

SEQ ID NO: 119991 - DNA, 25 bp, probe
atataacccgcctgcagtggaaagt

SEQ ID NO: 119992 - DNA, 25 bp, probe
ataaatccctgtatcgtggaccttt

SEQ ID NO: 119993 - DNA, 25 bp, probe
gttacggctgctgtccggaaagttt

SEQ ID NO: 119994 - DNA, 25 bp, probe
gttagggatcggcagggaccacttc

SEQ ID NO: 119995 - DNA, 25 bp, probe
gtttgggaccgaggtggagcccgag

SEQ ID NO: 119996 - DNA, 25 bp, probe
ataggaggcccaggagggagcccca

SEQ ID NO: 119997 - DNA, 25 bp, probe
ataggagaagggtcgggccagccca

SEQ ID NO: 119998 - DNA, 25 bp, probe
atatcaggacagcaactgggccagc

SEQ ID NO: 119999 - DNA, 25 bp, probe
atatagtatcacaaatctgtagtag

SEQ ID NO: 120000 - DNA, 25 bp, probe
atttgtacactatctggcacatatg

SEQ ID NO: 120001 - DNA, 25 bp, probe
atttgtacatttcatcactcagtgt

SEQ ID NO: 120002 - DNA, 25 bp, probe
atattgtacaatacttcagactgtt

SEQ ID NO: 120003 - DNA, 25 bp, probe
atttgtgaatgatgcttgctgcctg

SEQ ID NO: 120004 - DNA, 25 bp, probe
atttgtcctaatctgctgccagaat

SEQ ID NO: 120005 - DNA, 25 bp, probe
atgaagtcctgattccttccaaggc

SEQ ID NO: 120006 - DNA, 25 bp, probe
ataggggtgtatgagctccagaggc

SEQ ID NO: 120007 - DNA, 25 bp, probe
atatggaggtttcccaccagaagcc

SEQ ID NO: 120008 - DNA, 25 bp, probe
gatcatgtacagctgctggcacgag

SEQ ID NO: 120009 - DNA, 25 bp, probe
atatgtgaaaagtcgcccaaaatgc

SEQ ID NO: 120010 - DNA, 25 bp, probe
atactgaaaaacgaggccaatgacc

SEQ ID NO: 120011 - DNA, 25 bp, probe
atagggaaaccaagtcagacgacac

SEQ ID NO: 120012 - DNA, 25 bp, probe
atagtggattcagaacttgacgttc

SEQ ID NO: 120013 - DNA, 25 bp, probe
atagggcaatgcgtgtgaccttcgg

SEQ ID NO: 120014 - DNA, 25 bp, probe
ataggactgtctagtgtcacttttt

SEQ ID NO: 120015 - DNA, 25 bp, probe
atagatactgtgaagctgctcgctc

SEQ ID NO: 120016 - DNA, 25 bp, probe
atagatactgtgaagctgctcgctc

SEQ ID NO: 120017 - DNA, 25 bp, probe
atagatactgtgaagctgctcgctc

SEQ ID NO: 120018 - DNA, 25 bp, probe
atagatgaagcttcagctcgcctgc

SEQ ID NO: 120019 - DNA, 25 bp, probe
ataggcaatgctcagcttctcacta

SEQ ID NO: 120020 - DNA, 25 bp, probe
atagctcagatggaatgctttacat

SEQ ID NO: 120021 - DNA, 25 bp, probe
atatgtgcagtatacgttgaatgta

SEQ ID NO: 120022 - DNA, 25 bp, probe
atttggctatcatgcacctgagtat

SEQ ID NO: 120023 - DNA, 25 bp, probe
atttggctatcatgcacctgagtat

SEQ ID NO: 120024 - DNA, 25 bp, probe
atatctgtgctctaataacgatgta

SEQ ID NO: 120025 - DNA, 25 bp, probe
atattgtcattgtcacaacaattaa

SEQ ID NO: 120026 - DNA, 25 bp, probe
atattggccttctacagctattact

SEQ ID NO: 120027 - DNA, 25 bp, probe
atatttcctttatgtgtttctccag

SEQ ID NO: 120028 - DNA, 25 bp, probe
atatttccatcattaaatttttcct

SEQ ID NO: 120029 - DNA, 25 bp, probe
atatttctactaaatgtttttgtat

SEQ ID NO: 120030 - DNA, 25 bp, probe
atattcttaataacctcatattggt

SEQ ID NO: 120031 - DNA, 25 bp, probe
agtttagaataagcgcattatccaa

SEQ ID NO: 120032 - DNA, 25 bp, probe
atagttaaagaagacatttgccaac

SEQ ID NO: 120033 - DNA, 25 bp, probe
atacggaaagggaacaagcagccaa

SEQ ID NO: 120034 - DNA, 25 bp, probe
ataggtgacaacggcaaaccatcca

SEQ ID NO: 120035 - DNA, 25 bp, probe
ataggggcacagcccaatgacccca

SEQ ID NO: 120036 - DNA, 25 bp, probe
ataggggcacagcccaatgacccca

SEQ ID NO: 120037 - DNA, 25 bp, probe
atattgggaagctcaatgatacaaa

SEQ ID NO: 120038 - DNA, 25 bp, probe
atttggcatcaagttaacatcacac

SEQ ID NO: 120039 - DNA, 25 bp, probe
atattggattgcttgtcatacaccc

SEQ ID NO: 120040 - DNA, 25 bp, probe
atattggattgcttgtcatacaccc

SEQ ID NO: 120041 - DNA, 25 bp, probe
atatctggatatctgctggaagcct

SEQ ID NO: 120042 - DNA, 25 bp, probe
atatatgaccatgtctgaaatgtca

SEQ ID NO: 120043 - DNA, 25 bp, probe
atatgtactgcaggcccagatagat

SEQ ID NO: 120044 - DNA, 25 bp, probe
atatgctaggctgcactctgctaat

SEQ ID NO: 120045 - DNA, 25 bp, probe
atatgtaggtgctccactaatatcc

SEQ ID NO: 120046 - DNA, 25 bp, probe
atatgtaggtgctccactaatatcc

SEQ ID NO: 120047 - DNA, 25 bp, probe
atattaggatattgctcaaaattat

SEQ ID NO: 120048 - DNA, 25 bp, probe
ataaaggttagccatcagaaggatt

SEQ ID NO: 120049 - DNA, 25 bp, probe
atattaggttcaggtgcataaggga

SEQ ID NO: 120050 - DNA, 25 bp, probe
atttgtgtggtcagagatacaggaa

SEQ ID NO: 120051 - DNA, 25 bp, probe
atttgtgtggtcagagatacaggaa

SEQ ID NO: 120052 - DNA, 25 bp, probe
atttggagtgtcagcagctatagtg

SEQ ID NO: 120053 - DNA, 25 bp, probe
atattacaacgcggcagcattatga

SEQ ID NO: 120054 - DNA, 25 bp, probe
atattatctgaactggactagtgaa

SEQ ID NO: 120055 - DNA, 25 bp, probe
atatttgcagaaatgtttcgtagaa

SEQ ID NO: 120056 - DNA, 25 bp, probe
atattctgcagctataaattttgaa

SEQ ID NO: 120057 - DNA, 25 bp, probe
atactcatcatagaaaacttgaaaa

SEQ ID NO: 120058 - DNA, 25 bp, probe
atatgcaatcactgaaaactatgca

SEQ ID NO: 120059 - DNA, 25 bp, probe
atatgattcacatgctaaagccagg

SEQ ID NO: 120060 - DNA, 25 bp, probe
atctgtgttcatctaaaccggaagg

SEQ ID NO: 120061 - DNA, 25 bp, probe
atagtgcttatgcttgacaccggtt

SEQ ID NO: 120062 - DNA, 25 bp, probe
atatgcatctgtgtgtgtagagggg

SEQ ID NO: 120063 - DNA, 25 bp, probe
atatcatcgttggaatggagattgt

SEQ ID NO: 120064 - DNA, 25 bp, probe
atatcatcgttggaatggagattgt

SEQ ID NO: 120065 - DNA, 25 bp, probe
atattcttctgacttaggattggcc

SEQ ID NO: 120066 - DNA, 25 bp, probe
atatttgatatacccttcaattgcc

SEQ ID NO: 120067 - DNA, 25 bp, probe
atatttatcaactctgtaaactctc

SEQ ID NO: 120068 - DNA, 25 bp, probe
atatcttggaacttctgacagaggt

SEQ ID NO: 120069 - DNA, 25 bp, probe
ataccaggcaatgggatacgaagtg

SEQ ID NO: 120070 - DNA, 25 bp, probe
atacaaacattctaattaaaggctt

SEQ ID NO: 120071 - DNA, 25 bp, probe
atatgaaagccacactttgaaggta

SEQ ID NO: 120072 - DNA, 25 bp, probe
atatcaaacctcacttccgaatgta

SEQ ID NO: 120073 - DNA, 25 bp, probe
atatcaaactcatcttaccccagta

SEQ ID NO: 120074 - DNA, 25 bp, probe
atatcaatcctcttttgatgtctgc

SEQ ID NO: 120075 - DNA, 25 bp, probe
atatcaccatcttggttgttgtgct

SEQ ID NO: 120076 - DNA, 25 bp, probe
ataaccagttggacgtggtgctgcc

SEQ ID NO: 120077 - DNA, 25 bp, probe
ataaccagttggacgtggtgctgcc

SEQ ID NO: 120078 - DNA, 25 bp, probe
atcaagcccttaccagggcttcccg

SEQ ID NO: 120079 - DNA, 25 bp, probe
atattccactatttgcagaggctta

SEQ ID NO: 120080 - DNA, 25 bp, probe
atattccactatttgcagaggctta

SEQ ID NO: 120081 - DNA, 25 bp, probe
atattccatgcattagtacacttta

SEQ ID NO: 120082 - DNA, 25 bp, probe
atatagcccattttaacttgtataa

SEQ ID NO: 120083 - DNA, 25 bp, probe
atatagcccattttaacttgtataa

SEQ ID NO: 120084 - DNA, 25 bp, probe
atagaacgcaaacaacttgattatt

SEQ ID NO: 120085 - DNA, 25 bp, probe
aaaacagaagttgccttgggattca

SEQ ID NO: 120086 - DNA, 25 bp, probe
atagattagatgttttccttgggat

SEQ ID NO: 120087 - DNA, 25 bp, probe
atatttaatgtttgtctcctgaagt

SEQ ID NO: 120088 - DNA, 25 bp, probe
atattggactgttatactcttgaat

SEQ ID NO: 120089 - DNA, 25 bp, probe
atattcaacattttacaactgcagt

SEQ ID NO: 120090 - DNA, 25 bp, probe
atatctgcaacattgttactgccta

SEQ ID NO: 120091 - DNA, 25 bp, probe
atattgcttatgtctctacatggta

SEQ ID NO: 120092 - DNA, 25 bp, probe
atatggtctctgggtatcatggcta

SEQ ID NO: 120093 - DNA, 25 bp, probe
ataaatctcaggggaagcctcagag

SEQ ID NO: 120094 - DNA, 25 bp, probe
ataaatctcaggggaagcctcagag

SEQ ID NO: 120095 - DNA, 25 bp, probe
atatctacttggggacagccacgaa

SEQ ID NO: 120096 - DNA, 25 bp, probe
atatcttgttgctggaaggccgaga

SEQ ID NO: 120097 - DNA, 25 bp, probe
atatttggctgcaggaaggcttgga

SEQ ID NO: 120098 - DNA, 25 bp, probe
atatttggctgcaggaaggcttgga

SEQ ID NO: 120099 - DNA, 25 bp, probe
atattttgtgtataatgtgctttat

SEQ ID NO: 120100 - DNA, 25 bp, probe
atattttattccttcttgcatttta

SEQ ID NO: 120101 - DNA, 25 bp, probe
atattttaccattctgcgtgtatta

SEQ ID NO: 120102 - DNA, 25 bp, probe
atatttttgatttcatcgaaattat

SEQ ID NO: 120103 - DNA, 25 bp, probe
ataattggtattcaggtaactcatt

SEQ ID NO: 120104 - DNA, 25 bp, probe
atattttgtgggcaggtatcaacat

SEQ ID NO: 120105 - DNA, 25 bp, probe
atattatgtggatcctgtcaacaaa

SEQ ID NO: 120106 - DNA, 25 bp, probe
atagaattaacacatgatcctgcaa

SEQ ID NO: 120107 - DNA, 25 bp, probe
atatcatatataacagaagactgcc

SEQ ID NO: 120108 - DNA, 25 bp, probe
atattcatatcaacagcaccattcc

SEQ ID NO: 120109 - DNA, 25 bp, probe
atatcattctcaaatgcggcttcgc

SEQ ID NO: 120110 - DNA, 25 bp, probe
atatcattctcaaatgcggcttcgc

SEQ ID NO: 120111 - DNA, 25 bp, probe
atatcatatcatcacattgagctga

SEQ ID NO: 120112 - DNA, 25 bp, probe
atatcatatcatcacattgagctga

SEQ ID NO: 120113 - DNA, 25 bp, probe
atattcctccaattcaggacccaca

SEQ ID NO: 120114 - DNA, 25 bp, probe
atattcctccaattcaggacccaca

SEQ ID NO: 120115 - DNA, 25 bp, probe
atatgtccttaggtcctggtctaca

SEQ ID NO: 120116 - DNA, 25 bp, probe
atgagacctgtacccgattttacac

SEQ ID NO: 120117 - DNA, 25 bp, probe
aggccaggaaacagatttttccctg

SEQ ID NO: 120118 - DNA, 25 bp, probe
aggccaggaaacagatttttccctg

SEQ ID NO: 120119 - DNA, 25 bp, probe
atacctttaatcagaactcattccc

SEQ ID NO: 120120 - DNA, 25 bp, probe
ataccgttactctgatgaattgaat

SEQ ID NO: 120121 - DNA, 25 bp, probe
atatccgaaactaaatacttgattt

SEQ ID NO: 120122 - DNA, 25 bp, probe
atatccataacctctatatctttaa

SEQ ID NO: 120123 - DNA, 25 bp, probe
atacgtaccacggattctctttaat

SEQ ID NO: 120124 - DNA, 25 bp, probe
atacgtaccacggattctctttaat

SEQ ID NO: 120125 - DNA, 25 bp, probe
atcaggtaaaaatttctcttggctt

SEQ ID NO: 120126 - DNA, 25 bp, probe
atcaggtaaaaatttctcttggctt

SEQ ID NO: 120127 - DNA, 25 bp, probe
atatggatacaaaatctattctaga

SEQ ID NO: 120128 - DNA, 25 bp, probe
atattgttcccatatatttaaaata

SEQ ID NO: 120129 - DNA, 25 bp, probe
ataatggtagcctaaacttaatatt

SEQ ID NO: 120130 - DNA, 25 bp, probe
atatttgtactttaacatgttgcat

SEQ ID NO: 120131 - DNA, 25 bp, probe
atatttgtactattgaccatcctga

SEQ ID NO: 120132 - DNA, 25 bp, probe
atatatttccattgtgaccagcagc

SEQ ID NO: 120133 - DNA, 25 bp, probe
atatttgctccaagtagccacaaca

SEQ ID NO: 120134 - DNA, 25 bp, probe
atatttagcatattgaaccacacaa

SEQ ID NO: 120135 - DNA, 25 bp, probe
atatttagcatattgaaccacacaa

SEQ ID NO: 120136 - DNA, 25 bp, probe
atatttccattgtgaccagcagcag

SEQ ID NO: 120137 - DNA, 25 bp, probe
atattggcctgtttgcaacagctag

SEQ ID NO: 120138 - DNA, 25 bp, probe
atattggcctgtttgcaacagctag

SEQ ID NO: 120139 - DNA, 25 bp, probe
atattggcgcttttaactcagagtt

SEQ ID NO: 120140 - DNA, 25 bp, probe
atatggtcgttactattttcagttt

SEQ ID NO: 120141 - DNA, 25 bp, probe
atatggcatcgaaagtgttaaaatt

SEQ ID NO: 120142 - DNA, 25 bp, probe
atatggcatcgaaagtgttaaaatt

SEQ ID NO: 120143 - DNA, 25 bp, probe
atatgtgatctccaagtttaaaaaa

SEQ ID NO: 120144 - DNA, 25 bp, probe
atatgtgatctccaagtttaaaaaa

SEQ ID NO: 120145 - DNA, 25 bp, probe
atggtcttagttgtctgaaaagcca

SEQ ID NO: 120146 - DNA, 25 bp, probe
atagatctatcgtgtttaaaaccaa

SEQ ID NO: 120147 - DNA, 25 bp, probe
ataggtgatcttgggcatgtaacaa

SEQ ID NO: 120148 - DNA, 25 bp, probe
atatgagctgtctgtcatttaccta

SEQ ID NO: 120149 - DNA, 25 bp, probe
atatacagtctaattgttcatccta

SEQ ID NO: 120150 - DNA, 25 bp, probe
atatagctatcatttcttttccaaa

SEQ ID NO: 120151 - DNA, 25 bp, probe
atatcacattaatctgtattatcaa

SEQ ID NO: 120152 - DNA, 25 bp, probe
atatatgtttatacatgttcttcaa

SEQ ID NO: 120153 - DNA, 25 bp, probe
atattactagcatatgagtttcata

SEQ ID NO: 120154 - DNA, 25 bp, probe
atattacttgcctatctgacttcat

SEQ ID NO: 120155 - DNA, 25 bp, probe
atatctgccttttattacatacatg

SEQ ID NO: 120156 - DNA, 25 bp, probe
atatcgttttccatacagcagtgcc

SEQ ID NO: 120157 - DNA, 25 bp, probe
atatcgttttccatacagcagtgcc

SEQ ID NO: 120158 - DNA, 25 bp, probe
atatcattcttaatcaccaaggtca

SEQ ID NO: 120159 - DNA, 25 bp, probe
atatatctcatataacagctatggg

SEQ ID NO: 120160 - DNA, 25 bp, probe
atatatctcatataacagctatggg

SEQ ID NO: 120161 - DNA, 25 bp, probe
atatagctcagatggaatgctttac

SEQ ID NO: 120162 - DNA, 25 bp, probe
atatacttatcagctatcttattcc

SEQ ID NO: 120163 - DNA, 25 bp, probe
atatagttcaaccatgattgatgat

SEQ ID NO: 120164 - DNA, 25 bp, probe
atatataatgcaacaatgtgtgtat

SEQ ID NO: 120165 - DNA, 25 bp, probe
atatttaaacacaatggctatcaac

SEQ ID NO: 120166 - DNA, 25 bp, probe
atatttaggaacatatgctcatttg

SEQ ID NO: 120167 - DNA, 25 bp, probe
atatgttcaggaacttttccttcat

SEQ ID NO: 120168 - DNA, 25 bp, probe
atatcctagggtttctaccaatctc

SEQ ID NO: 120169 - DNA, 25 bp, probe
atatcacgggttgaattcacattcc

SEQ ID NO: 120170 - DNA, 25 bp, probe
atacgagcggattaagttcctggtc

SEQ ID NO: 120171 - DNA, 25 bp, probe
atatgggaggactccatatccaggt

SEQ ID NO: 120172 - DNA, 25 bp, probe
atacggatcaaaagtcgaccagtgt

SEQ ID NO: 120173 - DNA, 25 bp, probe
atactgaacattgggcccacacggt

SEQ ID NO: 120174 - DNA, 25 bp, probe
atcactgagtcagtcaactccatcc

SEQ ID NO: 120175 - DNA, 25 bp, probe
atacgaccaaagaccactctcagat

SEQ ID NO: 120176 - DNA, 25 bp, probe
atatcagagaaagcaccgctcacaa

SEQ ID NO: 120177 - DNA, 25 bp, probe
atataactgtaatgccaccacaaaa

SEQ ID NO: 120178 - DNA, 25 bp, probe
atatccgagctaatcagtcaataca

SEQ ID NO: 120179 - DNA, 25 bp, probe
atatctccagccttcgttatgaact

SEQ ID NO: 120180 - DNA, 25 bp, probe
atattctcaccatcctgactgaagt

SEQ ID NO: 120181 - DNA, 25 bp, probe
atattccacctgccttgacatgtgg

SEQ ID NO: 120182 - DNA, 25 bp, probe
atattccacctgccttgacatgtgg

SEQ ID NO: 120183 - DNA, 25 bp, probe
atattcttctgcagttaatggggta

SEQ ID NO: 120184 - DNA, 25 bp, probe
atatctgttctcggtactatagggc

SEQ ID NO: 120185 - DNA, 25 bp, probe
atactttctgcagggagctatgggg

SEQ ID NO: 120186 - DNA, 25 bp, probe
atatttctccagcaaatttgaggaa

SEQ ID NO: 120187 - DNA, 25 bp, probe
atatgttgctccagaacttctgaag

SEQ ID NO: 120188 - DNA, 25 bp, probe
atatattgggttcacattctggagt

SEQ ID NO: 120189 - DNA, 25 bp, probe
atatcttgtggcatatccattgtgg

SEQ ID NO: 120190 - DNA, 25 bp, probe
atatgagggagctttcgctgcggga

SEQ ID NO: 120191 - DNA, 25 bp, probe
atatgagggagctttcgctgcggga

SEQ ID NO: 120192 - DNA, 25 bp, probe
atagaggctgagttagtgacagggt

SEQ ID NO: 120193 - DNA, 25 bp, probe
atagatgtctaggtacttcaggggc

SEQ ID NO: 120194 - DNA, 25 bp, probe
atatatgtaatgttcacttgagtgg

SEQ ID NO: 120195 - DNA, 25 bp, probe
atattatgcagtttctctaagtgga

SEQ ID NO: 120196 - DNA, 25 bp, probe
atattatgcagtttctctaagtgga

SEQ ID NO: 120197 - DNA, 25 bp, probe
atatttgcgtatacattatcatatg

SEQ ID NO: 120198 - DNA, 25 bp, probe
atatatacgtagtcatgtttatgtt

SEQ ID NO: 120199 - DNA, 25 bp, probe
atatacacagacccaggattatgct

SEQ ID NO: 120200 - DNA, 25 bp, probe
atatcaaagactcattgcttaattc

SEQ ID NO: 120201 - DNA, 25 bp, probe
atatgcaaagcactgacttctaagt

SEQ ID NO: 120202 - DNA, 25 bp, probe
atatgctgtaggctgcctgcgacag

SEQ ID NO: 120203 - DNA, 25 bp, probe
atagctgatatgtcagtccctggca

SEQ ID NO: 120204 - DNA, 25 bp, probe
atatgtgtcagtggggctctctgag

SEQ ID NO: 120205 - DNA, 25 bp, probe
atatattcagtccttcttggaagac

SEQ ID NO: 120206 - DNA, 25 bp, probe
atatattcagtccttcttggaagac

SEQ ID NO: 120207 - DNA, 25 bp, probe
atatttcatatacttccgtctcgat

SEQ ID NO: 120208 - DNA, 25 bp, probe
atatttcatatacttccgtctcgat

SEQ ID NO: 120209 - DNA, 25 bp, probe
atattagtgtgatttaagtctcaat

SEQ ID NO: 120210 - DNA, 25 bp, probe
atatgtaagtatgtgaatgtgcgca

SEQ ID NO: 120211 - DNA, 25 bp, probe
atagtgctacttcatgacatcatcc

SEQ ID NO: 120212 - DNA, 25 bp, probe
atagtgctacttcatgacatcatcc

SEQ ID NO: 120213 - DNA, 25 bp, probe
atatggccctatctgaatgcctctg

SEQ ID NO: 120214 - DNA, 25 bp, probe
atatggtccacacggaggtcagctg

SEQ ID NO: 120215 - DNA, 25 bp, probe
atatttcaacagcaagtgccacagt

SEQ ID NO: 120216 - DNA, 25 bp, probe
atcatgtgaaacagtggttgccaaa

SEQ ID NO: 120217 - DNA, 25 bp, probe
atatgggagaagggctgttgggaga

SEQ ID NO: 120218 - DNA, 25 bp, probe
atatggggtcatgtgtgttaggaac

SEQ ID NO: 120219 - DNA, 25 bp, probe
atagtcgtgccatgttgttactcac

SEQ ID NO: 120220 - DNA, 25 bp, probe
atagttgctctatgtttgtaaacag

SEQ ID NO: 120221 - DNA, 25 bp, probe
atatttctgtaacttgtatttaatg

SEQ ID NO: 120222 - DNA, 25 bp, probe
atacctttgaacatttttgaatcac

SEQ ID NO: 120223 - DNA, 25 bp, probe
atacctttgaacatttttgaatcac

SEQ ID NO: 120224 - DNA, 25 bp, probe
ataccgacttacatattgtgggaga

SEQ ID NO: 120225 - DNA, 25 bp, probe
atatctgctactcacatttttggta

SEQ ID NO: 120226 - DNA, 25 bp, probe
atatcgtgaatttccttttagaaag

SEQ ID NO: 120227 - DNA, 25 bp, probe
atatcagtattttccctcaatcaga

SEQ ID NO: 120228 - DNA, 25 bp, probe
atatgcttcatatggacccacatca

SEQ ID NO: 120229 - DNA, 25 bp, probe
atatgctgtcatgattgtgctacag

SEQ ID NO: 120230 - DNA, 25 bp, probe
atatgtgatcagctttcaaagcatt

SEQ ID NO: 120231 - DNA, 25 bp, probe
atatgtgatctcagagtagcccatt

SEQ ID NO: 120232 - DNA, 25 bp, probe
atagtggctgccagtagcagactgt

SEQ ID NO: 120233 - DNA, 25 bp, probe
ataatggggctggtaggacctccga

SEQ ID NO: 120234 - DNA, 25 bp, probe
atagccgtggtgttcagttcactca

SEQ ID NO: 120235 - DNA, 25 bp, probe
atagccgtggtgttcagttcactca

SEQ ID NO: 120236 - DNA, 25 bp, probe
ataggtcagaggatcagtaacagca

SEQ ID NO: 120237 - DNA, 25 bp, probe
atagtgccaaggaagccttctgagc

SEQ ID NO: 120238 - DNA, 25 bp, probe
atatgacccaggaatgccactccta

SEQ ID NO: 120239 - DNA, 25 bp, probe
atatgtgccacaggaagccatcagc

SEQ ID NO: 120240 - DNA, 25 bp, probe
atatcaccagagcaagccatagaca

SEQ ID NO: 120241 - DNA, 25 bp, probe
atatattcagagtaacacaggattc

SEQ ID NO: 120242 - DNA, 25 bp, probe
atatatgtctatcaacacgcatctt

SEQ ID NO: 120243 - DNA, 25 bp, probe
atatctgcatcttgtaagccttttt

SEQ ID NO: 120244 - DNA, 25 bp, probe
atatctgtcccttcagacatttatc

SEQ ID NO: 120245 - DNA, 25 bp, probe
atatttctactacatctaatgacca

SEQ ID NO: 120246 - DNA, 25 bp, probe
atacatttcccaaatggaaaccagg

SEQ ID NO: 120247 - DNA, 25 bp, probe
ataaattcccatctaagaaacactg

SEQ ID NO: 120248 - DNA, 25 bp, probe
ataaacccagagctcaaccagaagg

SEQ ID NO: 120249 - DNA, 25 bp, probe
atagacatccacagcgtcggtaaat

SEQ ID NO: 120250 - DNA, 25 bp, probe
atagtaccactgcacatcatgtttt

SEQ ID NO: 120251 - DNA, 25 bp, probe
atatgattccacccatggcaaattc

SEQ ID NO: 120252 - DNA, 25 bp, probe
atatgaccgctacctggcaatttgc

SEQ ID NO: 120253 - DNA, 25 bp, probe
atatgaccgctacctggcaatttgc

SEQ ID NO: 120254 - DNA, 25 bp, probe
atatgagggctcaagtcgcaatgta

SEQ ID NO: 120255 - DNA, 25 bp, probe
atatgaacgtgcatattgccttgca

SEQ ID NO: 120256 - DNA, 25 bp, probe
atatcagaaatggttggcctgagca

SEQ ID NO: 120257 - DNA, 25 bp, probe
atatcaaaatctactggccaagaat

SEQ ID NO: 120258 - DNA, 25 bp, probe
atatcaaagtcagtaagccaagaaa

SEQ ID NO: 120259 - DNA, 25 bp, probe
atataatatctcataatagtagaca

SEQ ID NO: 120260 - DNA, 25 bp, probe
atataacctctttaatgcctgaaat

SEQ ID NO: 120261 - DNA, 25 bp, probe
atatgatgtcctcatagaaggtgaa

SEQ ID NO: 120262 - DNA, 25 bp, probe
atatcttcgctgcataaagaaaagt

SEQ ID NO: 120263 - DNA, 25 bp, probe
atatttagcgcacccagagaaaatt

SEQ ID NO: 120264 - DNA, 25 bp, probe
atattattaagtccagagagaaaga

SEQ ID NO: 120265 - DNA, 25 bp, probe
atagttttttcctatggaagcatgt

SEQ ID NO: 120266 - DNA, 25 bp, probe
atagttttttcctatggaagcatgt

SEQ ID NO: 120267 - DNA, 25 bp, probe
atagtctttgtgtgcttgctaaatg

SEQ ID NO: 120268 - DNA, 25 bp, probe
atagcacttcggtgccgagagccga

SEQ ID NO: 120269 - DNA, 25 bp, probe
atagattagcgtttgccagggcctg

SEQ ID NO: 120270 - DNA, 25 bp, probe
atgaactcaggtttccggctactga

SEQ ID NO: 120271 - DNA, 25 bp, probe
atatttgggcagttcccagtcctgt

SEQ ID NO: 120272 - DNA, 25 bp, probe
atatttgggcagttcccagtcctgt

SEQ ID NO: 120273 - DNA, 25 bp, probe
atatgtgggtagtattccagcatcc

SEQ ID NO: 120274 - DNA, 25 bp, probe
atagtcttcaagtttccaacgcagt

SEQ ID NO: 120275 - DNA, 25 bp, probe
atagtttccagatggctctaacctc

SEQ ID NO: 120276 - DNA, 25 bp, probe
atagttctattgtggttcataccct

SEQ ID NO: 120277 - DNA, 25 bp, probe
atatttcttgtgtagcgttcttagg

SEQ ID NO: 120278 - DNA, 25 bp, probe
atatcctggctttattattctttgg

SEQ ID NO: 120279 - DNA, 25 bp, probe
atatttatgttctattcatcttttg

SEQ ID NO: 120280 - DNA, 25 bp, probe
atataattgctattaccatcttttt

SEQ ID NO: 120281 - DNA, 25 bp, probe
atatgccttgtttcaaactttgttt

SEQ ID NO: 120282 - DNA, 25 bp, probe
atatgccttgtttcaaactttgttt

SEQ ID NO: 120283 - DNA, 25 bp, probe
atatgcgggatgtacgacattttgt

SEQ ID NO: 120284 - DNA, 25 bp, probe
atatcagtttgatcacactatttta

SEQ ID NO: 120285 - DNA, 25 bp, probe
atatcactttggtctccatttttcc

SEQ ID NO: 120286 - DNA, 25 bp, probe
atatcatcattttacctgattgctt

SEQ ID NO: 120287 - DNA, 25 bp, probe
atatcaacattatcactggtgcact

SEQ ID NO: 120288 - DNA, 25 bp, probe
atatcaacattatcactggtgcact

SEQ ID NO: 120289 - DNA, 25 bp, probe
atatcaacattatcactggtgcact

SEQ ID NO: 120290 - DNA, 25 bp, probe
atatgaccgtcagcgtggtcatctg

SEQ ID NO: 120291 - DNA, 25 bp, probe
atgagacccgaggggcgacttacca

SEQ ID NO: 120292 - DNA, 25 bp, probe
atagccccattggggtcagctccac

SEQ ID NO: 120293 - DNA, 25 bp, probe
ataccttcagagtccgtcagtaagc

SEQ ID NO: 120294 - DNA, 25 bp, probe
ataccttcagagtccgtcagtaagc

SEQ ID NO: 120295 - DNA, 25 bp, probe
ataactctacgagaccagagagact

SEQ ID NO: 120296 - DNA, 25 bp, probe
ataactctacgagaccagagagact

SEQ ID NO: 120297 - DNA, 25 bp, probe
atacagggacaggctcccaataaca

SEQ ID NO: 120298 - DNA, 25 bp, probe
atagaaggatcctccactaaagtta

SEQ ID NO: 120299 - DNA, 25 bp, probe
atagtaaatcgttctccttacaatc

SEQ ID NO: 120300 - DNA, 25 bp, probe
atatatcaaatactttccttcccac

SEQ ID NO: 120301 - DNA, 25 bp, probe
atatatcatcaaagttatccttcaa

SEQ ID NO: 120302 - DNA, 25 bp, probe
atatctgcagcaagagcacttccat

SEQ ID NO: 120303 - DNA, 25 bp, probe
atatctgcagcaagagcacttccat

SEQ ID NO: 120304 - DNA, 25 bp, probe
atatgcgagcaaagcattctcatca

SEQ ID NO: 120305 - DNA, 25 bp, probe
atatagagagatccctaatcccctg

SEQ ID NO: 120306 - DNA, 25 bp, probe
atatggagcatctacccagactccc

SEQ ID NO: 120307 - DNA, 25 bp, probe
atatggagcatctacccagactccc

SEQ ID NO: 120308 - DNA, 25 bp, probe
ataggagctcatatctgacagcatc

SEQ ID NO: 120309 - DNA, 25 bp, probe
ataggcatgatcttattatctcaga

SEQ ID NO: 120310 - DNA, 25 bp, probe
atagtcatgcggtcttatgtatgat

SEQ ID NO: 120311 - DNA, 25 bp, probe
atagtcatgcggtcttatgtatgat

SEQ ID NO: 120312 - DNA, 25 bp, probe
atagtgtgggaaattgctctgcatt

SEQ ID NO: 120313 - DNA, 25 bp, probe
atagtgtgggaaattgctctgcatt

SEQ ID NO: 120314 - DNA, 25 bp, probe
atatctctgtgtcaaggccatgatc

SEQ ID NO: 120315 - DNA, 25 bp, probe
atatgtcaagtttaggtcatttaga

SEQ ID NO: 120316 - DNA, 25 bp, probe
atagtgaagtatttgaggccattaa

SEQ ID NO: 120317 - DNA, 25 bp, probe
atagatcaagtttggctcccttgaa

SEQ ID NO: 120318 - DNA, 25 bp, probe
atagataatgcgaagacttccttag

SEQ ID NO: 120319 - DNA, 25 bp, probe
ataaaaggaggacacgtctctgtgc

SEQ ID NO: 120320 - DNA, 25 bp, probe
atactaagggagttcattgatttgg

SEQ ID NO: 120321 - DNA, 25 bp, probe
atagtggggagacttcttggcttgg

SEQ ID NO: 120322 - DNA, 25 bp, probe
atagtggggagacttcttggcttgg

SEQ ID NO: 120323 - DNA, 25 bp, probe
atagttttactttcttggcactgga

SEQ ID NO: 120324 - DNA, 25 bp, probe
atatgcttatgtagctttccaggac

SEQ ID NO: 120325 - DNA, 25 bp, probe
atatcttatgcttatttccgctgga

SEQ ID NO: 120326 - DNA, 25 bp, probe
atatctgacatcttatttacttgta

SEQ ID NO: 120327 - DNA, 25 bp, probe
atatctgacatcttatttacttgta

SEQ ID NO: 120328 - DNA, 25 bp, probe
atatgctgacactaatattctctta

SEQ ID NO: 120329 - DNA, 25 bp, probe
atatgtcgtcataattcctgctatt

SEQ ID NO: 120330 - DNA, 25 bp, probe
atatgtatctatgatttgtgttttc

SEQ ID NO: 120331 - DNA, 25 bp, probe
atatgatcttgatattgttttatat

SEQ ID NO: 120332 - DNA, 25 bp, probe
atatgtttatacatgttcttcaata

SEQ ID NO: 120333 - DNA, 25 bp, probe
atatctatttaggtgaatattctta

SEQ ID NO: 120334 - DNA, 25 bp, probe
atatgtctgttaggggatactttaa

SEQ ID NO: 120335 - DNA, 25 bp, probe
atatgtggataaacaggcactcttg

SEQ ID NO: 120336 - DNA, 25 bp, probe
atatgtggataaacaggcactcttg

SEQ ID NO: 120337 - DNA, 25 bp, probe
atatgggatagaaatggcagcaaaa

SEQ ID NO: 120338 - DNA, 25 bp, probe
atataggaatgaactgtctgtgaaa

SEQ ID NO: 120339 - DNA, 25 bp, probe
atatagagactgtgttcatgtgtaa

SEQ ID NO: 120340 - DNA, 25 bp, probe
ataaagacgatttgtcagttgtttt

SEQ ID NO: 120341 - DNA, 25 bp, probe
ataacaatggttctagttgcttcat

SEQ ID NO: 120342 - DNA, 25 bp, probe
ataacaatggttctagttgcttcat

SEQ ID NO: 120343 - DNA, 25 bp, probe
atataaagaaatgtggccatgcttt

SEQ ID NO: 120344 - DNA, 25 bp, probe
atagaaaaactcttcagcgcctttg

SEQ ID NO: 120345 - DNA, 25 bp, probe
atatcaagagtctcaagaacctttg

SEQ ID NO: 120346 - DNA, 25 bp, probe
atatacagactcggcatcacaccat

SEQ ID NO: 120347 - DNA, 25 bp, probe
atatacagactcggcatcacaccat

SEQ ID NO: 120348 - DNA, 25 bp, probe
atatgaaactcagccatcccaagct

SEQ ID NO: 120349 - DNA, 25 bp, probe
atatgaaactcagccatcccaagct

SEQ ID NO: 120350 - DNA, 25 bp, probe
atatgaccaccagtcacggcttact

SEQ ID NO: 120351 - DNA, 25 bp, probe
atagagaaccctgcagtgtccagct

SEQ ID NO: 120352 - DNA, 25 bp, probe
atataaattttgcccttccatttct

SEQ ID NO: 120353 - DNA, 25 bp, probe
atagacacatcaaatgccccgaatt

SEQ ID NO: 120354 - DNA, 25 bp, probe
atataatcatacaataacttgaatt

SEQ ID NO: 120355 - DNA, 25 bp, probe
atatacattataatgcaatcctgct

SEQ ID NO: 120356 - DNA, 25 bp, probe
atagagtttaagtatccagtagtga

SEQ ID NO: 120357 - DNA, 25 bp, probe
atagcagtttcatacaactgggagt

SEQ ID NO: 120358 - DNA, 25 bp, probe
atagcgtctagaatccaacaaggag

SEQ ID NO: 120359 - DNA, 25 bp, probe
agagcttcccgtgcaaaaagggtca

SEQ ID NO: 120360 - DNA, 25 bp, probe
atagtccaccgtgacattaaaggtg

SEQ ID NO: 120361 - DNA, 25 bp, probe
atagttcctagtgacatagaaacga

SEQ ID NO: 120362 - DNA, 25 bp, probe
atagtagactgaatccacatagaga

SEQ ID NO: 120363 - DNA, 25 bp, probe
ataaagacggattctaaggactcta

SEQ ID NO: 120364 - DNA, 25 bp, probe
ataaaaagcggagaaggtgtcttca

SEQ ID NO: 120365 - DNA, 25 bp, probe
ataaacccctcagacagtttgctta

SEQ ID NO: 120366 - DNA, 25 bp, probe
ataaacctcccataatttttgtcat

SEQ ID NO: 120367 - DNA, 25 bp, probe
atataagtttccatgcttttttgta

SEQ ID NO: 120368 - DNA, 25 bp, probe
atatgggctattggttgtgtttttg

SEQ ID NO: 120369 - DNA, 25 bp, probe
atatgggctattggttgtgtttttg

SEQ ID NO: 120370 - DNA, 25 bp, probe
atatgggtattacctttgtctcttc

SEQ ID NO: 120371 - DNA, 25 bp, probe
ataggcaacgtcacatttgtttgtt

SEQ ID NO: 120372 - DNA, 25 bp, probe
atatggaaattccgcactttttttg

SEQ ID NO: 120373 - DNA, 25 bp, probe
atatgagagaatcacacaagtttgt

SEQ ID NO: 120374 - DNA, 25 bp, probe
atatgcgctcaataaacgtgtttct

SEQ ID NO: 120375 - DNA, 25 bp, probe
atagctgcaaaccaagcatcagtca

SEQ ID NO: 120376 - DNA, 25 bp, probe
atagcagcaacagtcaggagggcgg

SEQ ID NO: 120377 - DNA, 25 bp, probe
ataccaatctcctgaggcttgtgga

SEQ ID NO: 120378 - DNA, 25 bp, probe
atacggactcactggtgcaatggga

SEQ ID NO: 120379 - DNA, 25 bp, probe
ataagtgaagcctcccaagggactg

SEQ ID NO: 120380 - DNA, 25 bp, probe
ataatgtgaactttcccctgttcca

SEQ ID NO: 120381 - DNA, 25 bp, probe
atagtaaataaaaccttctctccag

SEQ ID NO: 120382 - DNA, 25 bp, probe
atacttaccaacagcctttctgcta

SEQ ID NO: 120383 - DNA, 25 bp, probe
atagttactcatacggctggtcctt

SEQ ID NO: 120384 - DNA, 25 bp, probe
atagttactcatacggctggtcctt

SEQ ID NO: 120385 - DNA, 25 bp, probe
atgcatgtctaagtacgcacggccg

SEQ ID NO: 120386 - DNA, 25 bp, probe
ctggttacctacgaaggctccaatc

SEQ ID NO: 120387 - DNA, 25 bp, probe
atgttttgccgagaggtgtccattc

SEQ ID NO: 120388 - DNA, 25 bp, probe
atataattccggtcagtgctgacaa

SEQ ID NO: 120389 - DNA, 25 bp, probe
atatctacaactttcaggctgacaa

SEQ ID NO: 120390 - DNA, 25 bp, probe
atataactcaattctatgggataat

SEQ ID NO: 120391 - DNA, 25 bp, probe
atatcaaccattcgtgtgcacctaa

SEQ ID NO: 120392 - DNA, 25 bp, probe
atagcaaccacttatggcactgtat

SEQ ID NO: 120393 - DNA, 25 bp, probe
atagcaaccacttatggcactgtat

SEQ ID NO: 120394 - DNA, 25 bp, probe
atatgcccttctcatggcagaggcc

SEQ ID NO: 120395 - DNA, 25 bp, probe
atatccttggctctgtgggtgactt

SEQ ID NO: 120396 - DNA, 25 bp, probe
atatcctggggttgtgggtattaga

SEQ ID NO: 120397 - DNA, 25 bp, probe
atatccgttgatgtgttgtctagta

SEQ ID NO: 120398 - DNA, 25 bp, probe
atatctcgttatttattggaggtat

SEQ ID NO: 120399 - DNA, 25 bp, probe
atagatcgtgttatcatcgggcgcc

SEQ ID NO: 120400 - DNA, 25 bp, probe
atagcagcattgattcttctggtgc

SEQ ID NO: 120401 - DNA, 25 bp, probe
atatcatgctccattgttcagatgc

SEQ ID NO: 120402 - DNA, 25 bp, probe
atatcagctgccatattacgactta

SEQ ID NO: 120403 - DNA, 25 bp, probe
atatcattggattttatggagcatt

SEQ ID NO: 120404 - DNA, 25 bp, probe
atatcattaagctgattgacactgt

SEQ ID NO: 120405 - DNA, 25 bp, probe
atagctgctaatctgtcaacctgtc

SEQ ID NO: 120406 - DNA, 25 bp, probe
atatgctgtggaccgtcaacccagc

SEQ ID NO: 120407 - DNA, 25 bp, probe
atatgcttgtgcttctccaaaaaca

SEQ ID NO: 120408 - DNA, 25 bp, probe
atatgcttgtgcttctccaaaaaca

SEQ ID NO: 120409 - DNA, 25 bp, probe
atatctgatggcacctataaaatta

SEQ ID NO: 120410 - DNA, 25 bp, probe
atatgcttgacagctttgaaactga

SEQ ID NO: 120411 - DNA, 25 bp, probe
atatctctgaaggattctacactag

SEQ ID NO: 120412 - DNA, 25 bp, probe
atacactgaagtgtcaaacacagtc

SEQ ID NO: 120413 - DNA, 25 bp, probe
atacattactgcagagaaacacgga

SEQ ID NO: 120414 - DNA, 25 bp, probe
atactatgccagagaggaaactata

SEQ ID NO: 120415 - DNA, 25 bp, probe
atactatgccagagaggaaactata

SEQ ID NO: 120416 - DNA, 25 bp, probe
atactggaagcttgataataaaatg

SEQ ID NO: 120417 - DNA, 25 bp, probe
atagaggacattcaacaagaaatca

SEQ ID NO: 120418 - DNA, 25 bp, probe
ataggaattgacccacaagaaatga

SEQ ID NO: 120419 - DNA, 25 bp, probe
ataggaatgaactgtctgtgaaatg

SEQ ID NO: 120420 - DNA, 25 bp, probe
ataggagacacttttttatcacatg

SEQ ID NO: 120421 - DNA, 25 bp, probe
atagatgaagacagtcctttatatg

SEQ ID NO: 120422 - DNA, 25 bp, probe
atagatgaagacagtcctttatatg

SEQ ID NO: 120423 - DNA, 25 bp, probe
atagaccagaccccagtgattaatg

SEQ ID NO: 120424 - DNA, 25 bp, probe
atagcgcccaagctcagcttagaag

SEQ ID NO: 120425 - DNA, 25 bp, probe
ataggcattgcctctggtgaagaga

SEQ ID NO: 120426 - DNA, 25 bp, probe
atatggtatgagtgcaaggtagaac

SEQ ID NO: 120427 - DNA, 25 bp, probe
atatggtatgagtgcaaggtagaac

SEQ ID NO: 120428 - DNA, 25 bp, probe
atatcttctacatgcaatttagaac

SEQ ID NO: 120429 - DNA, 25 bp, probe
atatgcttatgaaacagatttatga

SEQ ID NO: 120430 - DNA, 25 bp, probe
atatcttctgcattgaagttgtcaa

SEQ ID NO: 120431 - DNA, 25 bp, probe
atatcttctttgaatgctaagcatg

SEQ ID NO: 120432 - DNA, 25 bp, probe
atatcttctttgaatgctaagcatg

SEQ ID NO: 120433 - DNA, 25 bp, probe
atatcttctttgaatgctaagcatg

SEQ ID NO: 120434 - DNA, 25 bp, probe
atatctcactttcattatactacct

SEQ ID NO: 120435 - DNA, 25 bp, probe
atatgcccgttggtctatgattgac

SEQ ID NO: 120436 - DNA, 25 bp, probe
atatgcccgtatgtgcgtgcatgtg

SEQ ID NO: 120437 - DNA, 25 bp, probe
atatctgcagcgttgcttggtgcac

SEQ ID NO: 120438 - DNA, 25 bp, probe
atatctcagtgtatcggagcctggc

SEQ ID NO: 120439 - DNA, 25 bp, probe
atatcatcaagtatttggactcgtt

SEQ ID NO: 120440 - DNA, 25 bp, probe
atatcatctagtgatcttttgcatc

SEQ ID NO: 120441 - DNA, 25 bp, probe
atatctcaagatagcacttttggca

SEQ ID NO: 120442 - DNA, 25 bp, probe
atatctcaagatagcacttttggca

SEQ ID NO: 120443 - DNA, 25 bp, probe
atatgcctgagaacctttgcatgaa

SEQ ID NO: 120444 - DNA, 25 bp, probe
atatccaagtatcctcagcacagaa

SEQ ID NO: 120445 - DNA, 25 bp, probe
atatccaagtatcctcagcacagaa

SEQ ID NO: 120446 - DNA, 25 bp, probe
atatccaagaagcagcccaggagta

SEQ ID NO: 120447 - DNA, 25 bp, probe
atatccagagcgagcgcttcagggc

SEQ ID NO: 120448 - DNA, 25 bp, probe
atacttgcagaggggttcaggttcc

SEQ ID NO: 120449 - DNA, 25 bp, probe
atacatctcgcctggtacaggaaca

SEQ ID NO: 120450 - DNA, 25 bp, probe
atacttcttgctgctttcaggacca

SEQ ID NO: 120451 - DNA, 25 bp, probe
atatgcttttctggtttataactac

SEQ ID NO: 120452 - DNA, 25 bp, probe
atatgcttttctggtttataactac

SEQ ID NO: 120453 - DNA, 25 bp, probe
atatcttgtactattttcatcgtgg

SEQ ID NO: 120454 - DNA, 25 bp, probe
atatcatttgaggttttctacaatt

SEQ ID NO: 120455 - DNA, 25 bp, probe
atactgcctagtgtattcaacagaa

SEQ ID NO: 120456 - DNA, 25 bp, probe
atactgcctagtgtattcaacagaa

SEQ ID NO: 120457 - DNA, 25 bp, probe
atatctcttattgttctatgttgaa

SEQ ID NO: 120458 - DNA, 25 bp, probe
atatctcttattgttctatgttgaa

SEQ ID NO: 120459 - DNA, 25 bp, probe
atatcttttcttttgctcatcttag

SEQ ID NO: 120460 - DNA, 25 bp, probe
atatcgggacacactgatacttcat

SEQ ID NO: 120461 - DNA, 25 bp, probe
atatcatgggaagcactctcactta

SEQ ID NO: 120462 - DNA, 25 bp, probe
atatcaggcgaatgcagctcagtgc

SEQ ID NO: 120463 - DNA, 25 bp, probe
atatcaggcgaatgcagctcagtgc

SEQ ID NO: 120464 - DNA, 25 bp, probe
atatgaggcagaccacatccagtcc

SEQ ID NO: 120465 - DNA, 25 bp, probe
ataggtgcagagacacccacttaga

SEQ ID NO: 120466 - DNA, 25 bp, probe
atatgggaaatatgcccttctcatg

SEQ ID NO: 120467 - DNA, 25 bp, probe
atatcaggacagtggctccttctca

SEQ ID NO: 120468 - DNA, 25 bp, probe
atagcaggcaagaggatccaggtcc

SEQ ID NO: 120469 - DNA, 25 bp, probe
atagcaggcaagaggatccaggtcc

SEQ ID NO: 120470 - DNA, 25 bp, probe
atagcaggaacaacacattcaggtg

SEQ ID NO: 120471 - DNA, 25 bp, probe
atagcaagtgactgctttcaagcag

SEQ ID NO: 120472 - DNA, 25 bp, probe
aggaattcctcgagacgtacggtgc

SEQ ID NO: 120473 - DNA, 25 bp, probe
aggaattcctcgagacgtacggtgc

SEQ ID NO: 120474 - DNA, 25 bp, probe
aggaattagtaacaggaactgaggc

SEQ ID NO: 120475 - DNA, 25 bp, probe
atggactttttgtgggactccagag

SEQ ID NO: 120476 - DNA, 25 bp, probe
ataggatttttctgcaggactttaa

SEQ ID NO: 120477 - DNA, 25 bp, probe
atatggaatattactgtgggaaatc

SEQ ID NO: 120478 - DNA, 25 bp, probe
atcaatccatcttatttggaaatga

SEQ ID NO: 120479 - DNA, 25 bp, probe
atagcccattatagacaggtcaata

SEQ ID NO: 120480 - DNA, 25 bp, probe
atagcgctcacgcaagcatggttaa

SEQ ID NO: 120481 - DNA, 25 bp, probe
atacttccattatcaaggctaatta

SEQ ID NO: 120482 - DNA, 25 bp, probe
atagtttcatcttccgaggccaata

SEQ ID NO: 120483 - DNA, 25 bp, probe
atagtttcatcttccgaggccaata

SEQ ID NO: 120484 - DNA, 25 bp, probe
atatgctttacttagcggattcctg

SEQ ID NO: 120485 - DNA, 25 bp, probe
atatgcttttgaatagtcagttact

SEQ ID NO: 120486 - DNA, 25 bp, probe
atatctctgttttaggagttcacat

SEQ ID NO: 120487 - DNA, 25 bp, probe
atatcgcttttgtggaagtgcatat

SEQ ID NO: 120488 - DNA, 25 bp, probe
ataccactgtgggggcaagtgaaaa

SEQ ID NO: 120489 - DNA, 25 bp, probe
ataccactgtgggggcaagtgaaaa

SEQ ID NO: 120490 - DNA, 25 bp, probe
atatcccttggccagaaggtgaaga

SEQ ID NO: 120491 - DNA, 25 bp, probe
ataccagttgagtagaatgtgatca

SEQ ID NO: 120492 - DNA, 25 bp, probe
ataccattggtgtcatgatcagaat

SEQ ID NO: 120493 - DNA, 25 bp, probe
atatccatgtcggcttgtagagaga

SEQ ID NO: 120494 - DNA, 25 bp, probe
atatccatgtcggcttgtagagaga

SEQ ID NO: 120495 - DNA, 25 bp, probe
atagactatgaggctgcgaaggcag

SEQ ID NO: 120496 - DNA, 25 bp, probe
atagactatgaggctgcgaaggcag

SEQ ID NO: 120497 - DNA, 25 bp, probe
atagccaagatggatgccacagcca

SEQ ID NO: 120498 - DNA, 25 bp, probe
ataccagtgtgatgtcaggccattg

SEQ ID NO: 120499 - DNA, 25 bp, probe
atatcctgtgtgtgaatcgggatgc

SEQ ID NO: 120500 - DNA, 25 bp, probe
atatctcggatacaatagaggcaaa

SEQ ID NO: 120501 - DNA, 25 bp, probe
atatgctagtaaacacaagaggaca

SEQ ID NO: 120502 - DNA, 25 bp, probe
atatctagtactgcaactgccagaa

SEQ ID NO: 120503 - DNA, 25 bp, probe
atatctacatacatcaattaaactt

SEQ ID NO: 120504 - DNA, 25 bp, probe
atatcgactacctgagaaattgctt

SEQ ID NO: 120505 - DNA, 25 bp, probe
atatccagtaagtagaattatctct

SEQ ID NO: 120506 - DNA, 25 bp, probe
atatcctcatcacgaaacattccgt

SEQ ID NO: 120507 - DNA, 25 bp, probe
ataggctctcaacaaatgtgtggta

SEQ ID NO: 120508 - DNA, 25 bp, probe
ataggcctctgggagtgatttggtt

SEQ ID NO: 120509 - DNA, 25 bp, probe
ataggacagcggccttgttttgact

SEQ ID NO: 120510 - DNA, 25 bp, probe
ataggtagagtcattcatatttgtc

SEQ ID NO: 120511 - DNA, 25 bp, probe
ataggtagagtcattcatatttgtc

SEQ ID NO: 120512 - DNA, 25 bp, probe
atatgttagccatttcctgtctggt

SEQ ID NO: 120513 - DNA, 25 bp, probe
atatgcttatattgttcacttcttt

SEQ ID NO: 120514 - DNA, 25 bp, probe
atatcctctgacgtatcatcttttt

SEQ ID NO: 120515 - DNA, 25 bp, probe
atatgcctccaaactagcttttgat

SEQ ID NO: 120516 - DNA, 25 bp, probe
atatgcctccaaactagcttttgat

SEQ ID NO: 120517 - DNA, 25 bp, probe
atagcccctaatgttatgactgatc

SEQ ID NO: 120518 - DNA, 25 bp, probe
atacccctacctctgatgagctatg

SEQ ID NO: 120519 - DNA, 25 bp, probe
ataccacctaacactcgagttggca

SEQ ID NO: 120520 - DNA, 25 bp, probe
atcttcaaaaccaactaagttatga

SEQ ID NO: 120521 - DNA, 25 bp, probe
atccctgaaacctgcatagagtttg

SEQ ID NO: 120522 - DNA, 25 bp, probe
ataacgaacaacagcaacgtcttga

SEQ ID NO: 120523 - DNA, 25 bp, probe
atatgaaaaaaatgccacgtctgtt

SEQ ID NO: 120524 - DNA, 25 bp, probe
atagcaaactcctataccactgtca

SEQ ID NO: 120525 - DNA, 25 bp, probe
atactataactcgagaaaaggcatt

SEQ ID NO: 120526 - DNA, 25 bp, probe
atactataactcgagaaaaggcatt

SEQ ID NO: 120527 - DNA, 25 bp, probe
atacttacacaaggagaagaggatt

SEQ ID NO: 120528 - DNA, 25 bp, probe
atactggacagctcggggcattttc

SEQ ID NO: 120529 - DNA, 25 bp, probe
atacgagctctacagggtggtcttc

SEQ ID NO: 120530 - DNA, 25 bp, probe
atagccatgctggagacgtggtgga

SEQ ID NO: 120531 - DNA, 25 bp, probe
atatcctgtgcgtccgagaggcaac

SEQ ID NO: 120532 - DNA, 25 bp, probe
atatcctgtgcgtccgagaggcaac

SEQ ID NO: 120533 - DNA, 25 bp, probe
ataccatctcccaggagtgcaagaa

SEQ ID NO: 120534 - DNA, 25 bp, probe
atagaaccgccttaagagagataaa

SEQ ID NO: 120535 - DNA, 25 bp, probe
atagtagccacaataaaacaccaaa

SEQ ID NO: 120536 - DNA, 25 bp, probe
atcagtggcggatcaaaacctacaa

SEQ ID NO: 120537 - DNA, 25 bp, probe
atcagtggcggatcaaaacctacaa

SEQ ID NO: 120538 - DNA, 25 bp, probe
ataaagctgtgataaatactgtaat

SEQ ID NO: 120539 - DNA, 25 bp, probe
atatccgcattgaaaaacctgtaca

SEQ ID NO: 120540 - DNA, 25 bp, probe
atatcctcttgtcaaatctttacct

SEQ ID NO: 120541 - DNA, 25 bp, probe
atatccatcttttccatgatgcttc

SEQ ID NO: 120542 - DNA, 25 bp, probe
atacttactcttctatgctatcact

SEQ ID NO: 120543 - DNA, 25 bp, probe
ataccaaccattcagtgcatcatac

SEQ ID NO: 120544 - DNA, 25 bp, probe
atacagccctattctagaggatact

SEQ ID NO: 120545 - DNA, 25 bp, probe
atagattccaatcctcatggaggac

SEQ ID NO: 120546 - DNA, 25 bp, probe
atagtatcacaaatctgtagtagca

SEQ ID NO: 120547 - DNA, 25 bp, probe
atatgtgagcactatctttcaggaa

SEQ ID NO: 120548 - DNA, 25 bp, probe
atatgtgagcactatctttcaggaa

SEQ ID NO: 120549 - DNA, 25 bp, probe
atagtgaggcagactttcaataagg

SEQ ID NO: 120550 - DNA, 25 bp, probe
atagggcagatcactctcaagaagg

SEQ ID NO: 120551 - DNA, 25 bp, probe
atagtctgcagtgacctcaacaaga

SEQ ID NO: 120552 - DNA, 25 bp, probe
atcaggtggttagctcaaccaatgg

SEQ ID NO: 120553 - DNA, 25 bp, probe
atcggtgtgtaaggtggcctattcc

SEQ ID NO: 120554 - DNA, 25 bp, probe
atatgcctgttatctgtggcgtttc

SEQ ID NO: 120555 - DNA, 25 bp, probe
atatccatcttttcagtagcgttaa

SEQ ID NO: 120556 - DNA, 25 bp, probe
atagttttctcattgctacagtgta

SEQ ID NO: 120557 - DNA, 25 bp, probe
ataggtttcatcttcaacaggatat

SEQ ID NO: 120558 - DNA, 25 bp, probe
ataggttccagcctgaactgtctgc

SEQ ID NO: 120559 - DNA, 25 bp, probe
atatgtttccagtgtagcagatctc

SEQ ID NO: 120560 - DNA, 25 bp, probe
atatgcctgtccaaaattgcagact

SEQ ID NO: 120561 - DNA, 25 bp, probe
atatgcgatttgacagaagcggaac

SEQ ID NO: 120562 - DNA, 25 bp, probe
atactattcttaaagctgctgaagt

SEQ ID NO: 120563 - DNA, 25 bp, probe
atagcattgatcattgaactgctgg

SEQ ID NO: 120564 - DNA, 25 bp, probe
atagatgctgacctccatcattttg

SEQ ID NO: 120565 - DNA, 25 bp, probe
atagtgctgcgaatccaattattta

SEQ ID NO: 120566 - DNA, 25 bp, probe
ataggcctgcctacaatattctcat

SEQ ID NO: 120567 - DNA, 25 bp, probe
ataggcatggccatagaaatatcat

SEQ ID NO: 120568 - DNA, 25 bp, probe
atagtgctgtccatagctagtggtc

SEQ ID NO: 120569 - DNA, 25 bp, probe
atagttcgcacatttttggctgtcc

SEQ ID NO: 120570 - DNA, 25 bp, probe
atagttcgcacatttttggctgtcc

SEQ ID NO: 120571 - DNA, 25 bp, probe
atacttctaaattttgggagctcct

SEQ ID NO: 120572 - DNA, 25 bp, probe
atacccatctagtgttgggcaacca

SEQ ID NO: 120573 - DNA, 25 bp, probe
atacccatctagtgttgggcaacca

SEQ ID NO: 120574 - DNA, 25 bp, probe
ataatcctaagaacttctccaacga

SEQ ID NO: 120575 - DNA, 25 bp, probe
ataattatacctactttacccatga

SEQ ID NO: 120576 - DNA, 25 bp, probe
ataaagaacctcattgttgtactgc

SEQ ID NO: 120577 - DNA, 25 bp, probe
ataaagaactgcagccttggtactg

SEQ ID NO: 120578 - DNA, 25 bp, probe
atagaatacggcacagtctggtcct

SEQ ID NO: 120579 - DNA, 25 bp, probe
ataaaagctggcacttggcttccgc

SEQ ID NO: 120580 - DNA, 25 bp, probe
atacgaggcgtcagctgctggcctc

SEQ ID NO: 120581 - DNA, 25 bp, probe
atagccaacctcacactggctgatc

SEQ ID NO: 120582 - DNA, 25 bp, probe
atatgccatagcttggcccttgctt

SEQ ID NO: 120583 - DNA, 25 bp, probe
atatccatggatctctttggcatta

SEQ ID NO: 120584 - DNA, 25 bp, probe
atatccatggagtctcttctgagcc

SEQ ID NO: 120585 - DNA, 25 bp, probe
atatccatcatgcacttgctatgtg

SEQ ID NO: 120586 - DNA, 25 bp, probe
atacctgcatgacctgggcattgta

SEQ ID NO: 120587 - DNA, 25 bp, probe
atatgctatctacctggaatctctc

SEQ ID NO: 120588 - DNA, 25 bp, probe
atatgtgactatccttcatctacct

SEQ ID NO: 120589 - DNA, 25 bp, probe
atatgtagttgaattcatcaatctt

SEQ ID NO: 120590 - DNA, 25 bp, probe
atatgctggttgtgtatgctttgtc

SEQ ID NO: 120591 - DNA, 25 bp, probe
atatgctggttgtgtatgctttgtc

SEQ ID NO: 120592 - DNA, 25 bp, probe
atagcgagggtcgtgagctttggcc

SEQ ID NO: 120593 - DNA, 25 bp, probe
atagcgagggtcgtgagctttggcc

SEQ ID NO: 120594 - DNA, 25 bp, probe
atagccaggtctggctgggtcggca

SEQ ID NO: 120595 - DNA, 25 bp, probe
atagccaggtctggctgggtcggca

SEQ ID NO: 120596 - DNA, 25 bp, probe
atagcccaggttcttgatcggatgt

SEQ ID NO: 120597 - DNA, 25 bp, probe
ataaccgtgcttctttcatgtcagg

SEQ ID NO: 120598 - DNA, 25 bp, probe
atagaccagtctgattttgaagggt

SEQ ID NO: 120599 - DNA, 25 bp, probe
ataagccaccaatccctgaaagatt

SEQ ID NO: 120600 - DNA, 25 bp, probe
atacctactttacccatgatgaaat

SEQ ID NO: 120601 - DNA, 25 bp, probe
atcacccttttccacctgtggaata

SEQ ID NO: 120602 - DNA, 25 bp, probe
atacctgctttaaccggatcgacat

SEQ ID NO: 120603 - DNA, 25 bp, probe
atcacgctggggaaacggataggct

SEQ ID NO: 120604 - DNA, 25 bp, probe
atctcagctgggtcaataagggcag

SEQ ID NO: 120605 - DNA, 25 bp, probe
atacgctgaggacatggggccaggg

SEQ ID NO: 120606 - DNA, 25 bp, probe
atacgctggaaattgactccccttt

SEQ ID NO: 120607 - DNA, 25 bp, probe
ataccaataaagtgaccctgttctc

SEQ ID NO: 120608 - DNA, 25 bp, probe
ataccaataaagtgaccctgctctc

SEQ ID NO: 120609 - DNA, 25 bp, probe
ataccacaaagccaagacgttccat

SEQ ID NO: 120610 - DNA, 25 bp, probe
atcgcctatacgaaatatggttcct

SEQ ID NO: 120611 - DNA, 25 bp, probe
atcgcctatacgaaatatggttcct

SEQ ID NO: 120612 - DNA, 25 bp, probe
ataacgggctgcaattctggttcct

SEQ ID NO: 120613 - DNA, 25 bp, probe
ataacgggctgcaattctggttcct

SEQ ID NO: 120614 - DNA, 25 bp, probe
ataaaaggtgcctctgcttgactat

SEQ ID NO: 120615 - DNA, 25 bp, probe
atacacaagggatggatttgaccta

SEQ ID NO: 120616 - DNA, 25 bp, probe
ataccaagtcagtggtcttaattga

SEQ ID NO: 120617 - DNA, 25 bp, probe
atagccctgtctcaagtcttgatgt

SEQ ID NO: 120618 - DNA, 25 bp, probe
atagcccagtacacaggctgtggaa

SEQ ID NO: 120619 - DNA, 25 bp, probe
ataggacgcttcggaatgtgggaaa

SEQ ID NO: 120620 - DNA, 25 bp, probe
atagactccttcgtgatctggggat

SEQ ID NO: 120621 - DNA, 25 bp, probe
atatgtctccctgcatgtcaggaag

SEQ ID NO: 120622 - DNA, 25 bp, probe
atatgtctcagcatccaggagggct

SEQ ID NO: 120623 - DNA, 25 bp, probe
atagcttgcgcattctcatggagaa

SEQ ID NO: 120624 - DNA, 25 bp, probe
atagcccagcaaatagtgataacaa

SEQ ID NO: 120625 - DNA, 25 bp, probe
atatggcaaaaatggctagacaccc

SEQ ID NO: 120626 - DNA, 25 bp, probe
atatgtgagacgaatgatggctaga

SEQ ID NO: 120627 - DNA, 25 bp, probe
atagatgcagccgttgcaggcgaag

SEQ ID NO: 120628 - DNA, 25 bp, probe
atagtcagctcccgtggggagatca

SEQ ID NO: 120629 - DNA, 25 bp, probe
atagctacgacgctgcggggaatga

SEQ ID NO: 120630 - DNA, 25 bp, probe
atagcaaccactctccgatggaagc

SEQ ID NO: 120631 - DNA, 25 bp, probe
atagcaaccactctccgatggaagc

SEQ ID NO: 120632 - DNA, 25 bp, probe
atagaagaagccccacgggagccag

SEQ ID NO: 120633 - DNA, 25 bp, probe
atagaagattccccggaagcccaga

SEQ ID NO: 120634 - DNA, 25 bp, probe
atagaagattccccggaagcccaga

SEQ ID NO: 120635 - DNA, 25 bp, probe
atagaagattccccggaagcccaga

SEQ ID NO: 120636 - DNA, 25 bp, probe
atagaagattccccggaagcccaga

SEQ ID NO: 120637 - DNA, 25 bp, probe
atagaagattccccggaagcccaga

SEQ ID NO: 120638 - DNA, 25 bp, probe
atagagtacatcgatgccgtgaagg

SEQ ID NO: 120639 - DNA, 25 bp, probe
atagcgttcatggctacgaatatgt

SEQ ID NO: 120640 - DNA, 25 bp, probe
atatgcagttattccactaaatgat

SEQ ID NO: 120641 - DNA, 25 bp, probe
atatgcagtttatgtgtcatcaatg

SEQ ID NO: 120642 - DNA, 25 bp, probe
atatgattacaaagttgcacagcat

SEQ ID NO: 120643 - DNA, 25 bp, probe
atacttatatcaaggtcccaaaata

SEQ ID NO: 120644 - DNA, 25 bp, probe
atacttgtaaaaccaccgcattcta

SEQ ID NO: 120645 - DNA, 25 bp, probe
atatggtgtcattaaccccgcagtt

SEQ ID NO: 120646 - DNA, 25 bp, probe
atatgggctgataaacccggggtga

SEQ ID NO: 120647 - DNA, 25 bp, probe
atcaggtccaaaactcctggggaga

SEQ ID NO: 120648 - DNA, 25 bp, probe
atagattctaaaaacctcaggtggc

SEQ ID NO: 120649 - DNA, 25 bp, probe
ataccaataaaatctccagcgaggc

SEQ ID NO: 120650 - DNA, 25 bp, probe
atagccaagataccaaccatcacgg

SEQ ID NO: 120651 - DNA, 25 bp, probe
atagccaagataccaaccatcacgg

SEQ ID NO: 120652 - DNA, 25 bp, probe
ataccatcaggcctaatctcatacc

SEQ ID NO: 120653 - DNA, 25 bp, probe
atcacggcagtttgcaacttgcacg

SEQ ID NO: 120654 - DNA, 25 bp, probe
atcacggcagtttgcaacttgcacg

SEQ ID NO: 120655 - DNA, 25 bp, probe
atacatggcttttgctcacactgag

SEQ ID NO: 120656 - DNA, 25 bp, probe
atactacatctttctggcacataac

SEQ ID NO: 120657 - DNA, 25 bp, probe
ataggcacttgctacttcagtaatg

SEQ ID NO: 120658 - DNA, 25 bp, probe
ataggctttgagtctaatgaaacaa

SEQ ID NO: 120659 - DNA, 25 bp, probe
atcagagcttgatgttttgaagtcc

SEQ ID NO: 120660 - DNA, 25 bp, probe
ataggttatactttgctgacgattc

SEQ ID NO: 120661 - DNA, 25 bp, probe
atatggtgcatttcttgtctactga

SEQ ID NO: 120662 - DNA, 25 bp, probe
atatggacttacagtcagagatgac

SEQ ID NO: 120663 - DNA, 25 bp, probe
ataggatttgacactgccagagaca

SEQ ID NO: 120664 - DNA, 25 bp, probe
ataggatttgacactgccagagaca

SEQ ID NO: 120665 - DNA, 25 bp, probe
atagtgtttgtaacaccgtccaaca

SEQ ID NO: 120666 - DNA, 25 bp, probe
atatgttaagtaacactcaaccatc

SEQ ID NO: 120667 - DNA, 25 bp, probe
atagttatagtaaagccattgacat

SEQ ID NO: 120668 - DNA, 25 bp, probe
atatgttttgttccctatcatgcct

SEQ ID NO: 120669 - DNA, 25 bp, probe
atagcttattttaacaattgcctga

SEQ ID NO: 120670 - DNA, 25 bp, probe
atacttattagaagcaaactgccct

SEQ ID NO: 120671 - DNA, 25 bp, probe
atacgagaaaagcccatgacgccct

SEQ ID NO: 120672 - DNA, 25 bp, probe
atacacaaagaactggatcacccca

SEQ ID NO: 120673 - DNA, 25 bp, probe
ataagcaaagagggcaatcgcctcc

SEQ ID NO: 120674 - DNA, 25 bp, probe
atagaccaggcccagaatcgaatcc

SEQ ID NO: 120675 - DNA, 25 bp, probe
ataagccgtccactgaagaaaagtt

SEQ ID NO: 120676 - DNA, 25 bp, probe
atagggctgggcctgaccaaaaata

SEQ ID NO: 120677 - DNA, 25 bp, probe
ataggggcggctcaggcactgagac

SEQ ID NO: 120678 - DNA, 25 bp, probe
atatggggagactaaggcctggaga

SEQ ID NO: 120679 - DNA, 25 bp, probe
atcattggtaacttgggcctgggcc

SEQ ID NO: 120680 - DNA, 25 bp, probe
atccaggtcaactgggactgcaacc

SEQ ID NO: 120681 - DNA, 25 bp, probe
agacggtacagctgaggaacccgcc

SEQ ID NO: 120682 - DNA, 25 bp, probe
aggactctgggctgggaagccctgt

SEQ ID NO: 120683 - DNA, 25 bp, probe
ataagttggtgcatggcggaccctg

SEQ ID NO: 120684 - DNA, 25 bp, probe
atagctggtggtgggcgctaatcct

SEQ ID NO: 120685 - DNA, 25 bp, probe
atactggggtgtcctcaagacccat

SEQ ID NO: 120686 - DNA, 25 bp, probe
atcactgggggtctcacaggactca

SEQ ID NO: 120687 - DNA, 25 bp, probe
atactggagagttcttccgagacca

SEQ ID NO: 120688 - DNA, 25 bp, probe
aggcctagattacttgcacgggact

SEQ ID NO: 120689 - DNA, 25 bp, probe
atacctaatgtctgtcaggagtgac

SEQ ID NO: 120690 - DNA, 25 bp, probe
atacttgaattctggctgatggtgt

SEQ ID NO: 120691 - DNA, 25 bp, probe
atacctaatctgttgagtttgtgca

SEQ ID NO: 120692 - DNA, 25 bp, probe
atacctaatctgttgagtttgtgca

SEQ ID NO: 120693 - DNA, 25 bp, probe
atactcatcatgtgtaattccgtga

SEQ ID NO: 120694 - DNA, 25 bp, probe
atacctcaatgaaaatcccttgagg

SEQ ID NO: 120695 - DNA, 25 bp, probe
ataaagcaatcaaagaaccattaga

SEQ ID NO: 120696 - DNA, 25 bp, probe
atactaaagaatacaacctgctaag

SEQ ID NO: 120697 - DNA, 25 bp, probe
atactacaaggctcaggctcagaaa

SEQ ID NO: 120698 - DNA, 25 bp, probe
atagctttgggatcatcctgcagga

SEQ ID NO: 120699 - DNA, 25 bp, probe
atagttttctgatcccagaggtgca

SEQ ID NO: 120700 - DNA, 25 bp, probe
atactctgtttagagcaagggctca

SEQ ID NO: 120701 - DNA, 25 bp, probe
atagttgagtgcacccaagtggcac

SEQ ID NO: 120702 - DNA, 25 bp, probe
atacctgtggcatcaccaagttccc

SEQ ID NO: 120703 - DNA, 25 bp, probe
ataacatttgagtatccgattcgcc

SEQ ID NO: 120704 - DNA, 25 bp, probe
ataacatttgagtatccgattcgcc

SEQ ID NO: 120705 - DNA, 25 bp, probe
ataaattaaatgacttgaatagctc

SEQ ID NO: 120706 - DNA, 25 bp, probe
atacccgaaatgatgtactggatga

SEQ ID NO: 120707 - DNA, 25 bp, probe
ataccaggaactgttcaggcacatg

SEQ ID NO: 120708 - DNA, 25 bp, probe
ataaaggtgcctgttaccgatgctc

SEQ ID NO: 120709 - DNA, 25 bp, probe
ataaaggtgcctgttaccgatgctc

SEQ ID NO: 120710 - DNA, 25 bp, probe
ataaacgaatatatgtacctttcac

SEQ ID NO: 120711 - DNA, 25 bp, probe
accaaatgaaactttgacctttgag

SEQ ID NO: 120712 - DNA, 25 bp, probe
atcgcaaaaacctttatccctacag

SEQ ID NO: 120713 - DNA, 25 bp, probe
atcagaaaaacctgttcccatcacc

SEQ ID NO: 120714 - DNA, 25 bp, probe
atcagaaagtttgagttccctgccc

SEQ ID NO: 120715 - DNA, 25 bp, probe
atagcaaggttctagggctcttcgc

SEQ ID NO: 120716 - DNA, 25 bp, probe
ataaagcacttcagggcttgctccc

SEQ ID NO: 120717 - DNA, 25 bp, probe
atagcccaatttttggtatgtgctc

SEQ ID NO: 120718 - DNA, 25 bp, probe
atatggcccagtgtcaagttgtgct

SEQ ID NO: 120719 - DNA, 25 bp, probe
atagcagcccgtatgatattattca

SEQ ID NO: 120720 - DNA, 25 bp, probe
atatggcccgcgctggagtttcaat

SEQ ID NO: 120721 - DNA, 25 bp, probe
atatgtgtgccctggactgtttcaa

SEQ ID NO: 120722 - DNA, 25 bp, probe
atagtgccccattaggccatttaca

SEQ ID NO: 120723 - DNA, 25 bp, probe
atagcttaccagtagacctttaatg

SEQ ID NO: 120724 - DNA, 25 bp, probe
atagcttaccagtagacctttaatg

SEQ ID NO: 120725 - DNA, 25 bp, probe
atagctgggtggtgacctcttagcg

SEQ ID NO: 120726 - DNA, 25 bp, probe
atagctgggtggtgacctcttagcg

SEQ ID NO: 120727 - DNA, 25 bp, probe
atacgaagtggatacctctagtgca

SEQ ID NO: 120728 - DNA, 25 bp, probe
atacagtgggcgttcaagtctagtc

SEQ ID NO: 120729 - DNA, 25 bp, probe
atacgtttgtgcagaatctctatgt

SEQ ID NO: 120730 - DNA, 25 bp, probe
ataggttctgttttatgtcttgaat

SEQ ID NO: 120731 - DNA, 25 bp, probe
atatggattttgcattattcctgaa

SEQ ID NO: 120732 - DNA, 25 bp, probe
ataggaatcattcttctcttgctgt

SEQ ID NO: 120733 - DNA, 25 bp, probe
atatggcctattcgttgcctttgca

SEQ ID NO: 120734 - DNA, 25 bp, probe
atatggtatttgctctccattagca

SEQ ID NO: 120735 - DNA, 25 bp, probe
atatggctttgggtaccagctctca

SEQ ID NO: 120736 - DNA, 25 bp, probe
atagttttggccgaaatgctctgga

SEQ ID NO: 120737 - DNA, 25 bp, probe
atagtgcatcttggtccgatactct

SEQ ID NO: 120738 - DNA, 25 bp, probe
ataggctttggtcttttcatctgca

SEQ ID NO: 120739 - DNA, 25 bp, probe
atacctttggatctcttgtatagat

SEQ ID NO: 120740 - DNA, 25 bp, probe
atactctttttattcttaagatgat

SEQ ID NO: 120741 - DNA, 25 bp, probe
atactttttggcagcattaaatatt

SEQ ID NO: 120742 - DNA, 25 bp, probe
atagctgtttaggaaggtgaaatac

SEQ ID NO: 120743 - DNA, 25 bp, probe
atagcatgtgtgtaaactttaaata

SEQ ID NO: 120744 - DNA, 25 bp, probe
atagctgggaagaatttaatgatca

SEQ ID NO: 120745 - DNA, 25 bp, probe
atacggaacagcatttccctgcagc

SEQ ID NO: 120746 - DNA, 25 bp, probe
atagtgaatacactgtttcctccgt

SEQ ID NO: 120747 - DNA, 25 bp, probe
atagagcaattcctttgctttccct

SEQ ID NO: 120748 - DNA, 25 bp, probe
atagagtctgtgttggtcttcatcc

SEQ ID NO: 120749 - DNA, 25 bp, probe
atagcagctgctgccgtgtcattat

SEQ ID NO: 120750 - DNA, 25 bp, probe
atagcagctgctgccgtgtcattat

SEQ ID NO: 120751 - DNA, 25 bp, probe
atagagcgtgacggcactgagtcct

SEQ ID NO: 120752 - DNA, 25 bp, probe
atacgcctgacacagagaacctctc

SEQ ID NO: 120753 - DNA, 25 bp, probe
ataccacgtaaatcaagccattcat

SEQ ID NO: 120754 - DNA, 25 bp, probe
atacccttcaattgccaaatttgat

SEQ ID NO: 120755 - DNA, 25 bp, probe
ataccaatacactgctaagtagttc

SEQ ID NO: 120756 - DNA, 25 bp, probe
ataccgcaacaggccgaactagtcc

SEQ ID NO: 120757 - DNA, 25 bp, probe
ataccgcaacaggccgaactagtcc

SEQ ID NO: 120758 - DNA, 25 bp, probe
ataccaagtccatcgacatctggtc

SEQ ID NO: 120759 - DNA, 25 bp, probe
atacgcatgactacattacaacggg

SEQ ID NO: 120760 - DNA, 25 bp, probe
atagcacagcactgctaaatactgt

SEQ ID NO: 120761 - DNA, 25 bp, probe
atagaccaacgctaaagcctgtgct

SEQ ID NO: 120762 - DNA, 25 bp, probe
ataccacaacacttatggcctgtct

SEQ ID NO: 120763 - DNA, 25 bp, probe
ataccacatactttatttcttctta

SEQ ID NO: 120764 - DNA, 25 bp, probe
ataggacattgatttgatttttatt

SEQ ID NO: 120765 - DNA, 25 bp, probe
atatggacagtatgatttattgttt

SEQ ID NO: 120766 - DNA, 25 bp, probe
atatggaatgtctgtaaattctaat

SEQ ID NO: 120767 - DNA, 25 bp, probe
ataacatatttcttaaatccaaatt

SEQ ID NO: 120768 - DNA, 25 bp, probe
ataacatatttcttaaatccaaatt

SEQ ID NO: 120769 - DNA, 25 bp, probe
atacttcatttttaatatccaattt

SEQ ID NO: 120770 - DNA, 25 bp, probe
atacccttcttttatgagcagaagg

SEQ ID NO: 120771 - DNA, 25 bp, probe
atagaccatacatacgatcagcaaa

SEQ ID NO: 120772 - DNA, 25 bp, probe
atagccctgtgatactgcatctcac

SEQ ID NO: 120773 - DNA, 25 bp, probe
atagctttgagaaactcttccctga

SEQ ID NO: 120774 - DNA, 25 bp, probe
atagctttgagaaactcttccctga

SEQ ID NO: 120775 - DNA, 25 bp, probe
atagtactataagctcctacctaga

SEQ ID NO: 120776 - DNA, 25 bp, probe
atagtttatgattccacctacatga

SEQ ID NO: 120777 - DNA, 25 bp, probe
atagggcaatataccaatctcctga

SEQ ID NO: 120778 - DNA, 25 bp, probe
atagtacttactgcaatgctcgctg

SEQ ID NO: 120779 - DNA, 25 bp, probe
ataacactgtactgcaataagggga

SEQ ID NO: 120780 - DNA, 25 bp, probe
atagatttgtacttgaataaggtga

SEQ ID NO: 120781 - DNA, 25 bp, probe
atagatgtatgtgcgtgtatacaca

SEQ ID NO: 120782 - DNA, 25 bp, probe
atagtgtcattccatgtttaaaaag

SEQ ID NO: 120783 - DNA, 25 bp, probe
atagctgctaattaggttaatgaac

SEQ ID NO: 120784 - DNA, 25 bp, probe
atagcgtatcgcaagggtttgacac

SEQ ID NO: 120785 - DNA, 25 bp, probe
ataggaattctcagtgtttcaaatg

SEQ ID NO: 120786 - DNA, 25 bp, probe
atagcaactattcatttgttcacaa

SEQ ID NO: 120787 - DNA, 25 bp, probe
ataaacttataaatatttctccagc

SEQ ID NO: 120788 - DNA, 25 bp, probe
atagggcttgcaatgaacttttcca

SEQ ID NO: 120789 - DNA, 25 bp, probe
ataggggctgcaaatgttgttccgc

SEQ ID NO: 120790 - DNA, 25 bp, probe
atactggcctgatgagtatgctcta

SEQ ID NO: 120791 - DNA, 25 bp, probe
atactggtctgaagaggatgctcta

SEQ ID NO: 120792 - DNA, 25 bp, probe
atacaggctctgagtctggtgtagt

SEQ ID NO: 120793 - DNA, 25 bp, probe
atacggcttttttgctggtcagcag

SEQ ID NO: 120794 - DNA, 25 bp, probe
atactggttcataatctggaggcaa

SEQ ID NO: 120795 - DNA, 25 bp, probe
atactggtactgctgtaatgagcca

SEQ ID NO: 120796 - DNA, 25 bp, probe
atacaggtcacttggccaaggccac

SEQ ID NO: 120797 - DNA, 25 bp, probe
atacagttctgatacccaggctctc

SEQ ID NO: 120798 - DNA, 25 bp, probe
atacttatctgtgaccacacgctgt

SEQ ID NO: 120799 - DNA, 25 bp, probe
atacatatcaggttgcaaccaggtg

SEQ ID NO: 120800 - DNA, 25 bp, probe
atacatcataagctccagccttgat

SEQ ID NO: 120801 - DNA, 25 bp, probe
atagcaattagtcagctgatttgat

SEQ ID NO: 120802 - DNA, 25 bp, probe
atagattaatggcactgattgtttt

SEQ ID NO: 120803 - DNA, 25 bp, probe
atagttaaactctatgattatttct

SEQ ID NO: 120804 - DNA, 25 bp, probe
atagttgctaatccttatttcttct

SEQ ID NO: 120805 - DNA, 25 bp, probe
atactgtctgtatctttggttatcc

SEQ ID NO: 120806 - DNA, 25 bp, probe
atacctgtttgactttgaggtagtc

SEQ ID NO: 120807 - DNA, 25 bp, probe
atacctttatgatatattgagttta

SEQ ID NO: 120808 - DNA, 25 bp, probe
atagcctagggctgaatttttgtca

SEQ ID NO: 120809 - DNA, 25 bp, probe
ctagcctagggtcccatattgggtc

SEQ ID NO: 120810 - DNA, 25 bp, probe
atagctcgagagaatgtccaaggtg

SEQ ID NO: 120811 - DNA, 25 bp, probe
atacatcgaagcatgtctcagccag

SEQ ID NO: 120812 - DNA, 25 bp, probe
atactggaagctctacgctactgcc

SEQ ID NO: 120813 - DNA, 25 bp, probe
atacgtggaaggtacgctcactggg

SEQ ID NO: 120814 - DNA, 25 bp, probe
atgacggcagaagacctgctccgta

SEQ ID NO: 120815 - DNA, 25 bp, probe
ataaatgctgaagaggcccccaaaa

SEQ ID NO: 120816 - DNA, 25 bp, probe
atagggagcaagtggcagccaccaa

SEQ ID NO: 120817 - DNA, 25 bp, probe
atagcaggtgaactcgaagcccaca

SEQ ID NO: 120818 - DNA, 25 bp, probe
atagcagcttattcacaagacccaa

SEQ ID NO: 120819 - DNA, 25 bp, probe
ataagttccccattgaggatgccag

SEQ ID NO: 120820 - DNA, 25 bp, probe
atagtgcattgccccttgggatata

SEQ ID NO: 120821 - DNA, 25 bp, probe
ataggattgcctgcttagatgataa

SEQ ID NO: 120822 - DNA, 25 bp, probe
atagtcattccaaatatgagatgca

SEQ ID NO: 120823 - DNA, 25 bp, probe
atagcatttatcagctgtggcatat

SEQ ID NO: 120824 - DNA, 25 bp, probe
atagattatatattgccagatgtta

SEQ ID NO: 120825 - DNA, 25 bp, probe
atagattatatattgccagatgtta

SEQ ID NO: 120826 - DNA, 25 bp, probe
atagatcttttactcacattctgtt

SEQ ID NO: 120827 - DNA, 25 bp, probe
atagactgtgtgatgtcctttgagt

SEQ ID NO: 120828 - DNA, 25 bp, probe
atagactgtgtgatgtcctttgagt

SEQ ID NO: 120829 - DNA, 25 bp, probe
ataacttgtcacaccttttgtttca

SEQ ID NO: 120830 - DNA, 25 bp, probe
ataaatttcaccagcgttgtagtac

SEQ ID NO: 120831 - DNA, 25 bp, probe
ataaattcgaacagccctggtggta

SEQ ID NO: 120832 - DNA, 25 bp, probe
ataaattcgaacagccctggtggta

SEQ ID NO: 120833 - DNA, 25 bp, probe
ataaaattatacagccaggtgggaa

SEQ ID NO: 120834 - DNA, 25 bp, probe
ataaaggtaatcagctcagtgtgtt

SEQ ID NO: 120835 - DNA, 25 bp, probe
atacactgctaagtagttcagtttt

SEQ ID NO: 120836 - DNA, 25 bp, probe
atcagtcttaagtatggttgtttta

SEQ ID NO: 120837 - DNA, 25 bp, probe
atagattgctcaaatcaggttttct

SEQ ID NO: 120838 - DNA, 25 bp, probe
atagtattaattatgctcttctatg

SEQ ID NO: 120839 - DNA, 25 bp, probe
atagtcactagtattgctaattttt

SEQ ID NO: 120840 - DNA, 25 bp, probe
atagacactgtgctaatgtgaattt

SEQ ID NO: 120841 - DNA, 25 bp, probe
atagagccatatcatacactgaagc

SEQ ID NO: 120842 - DNA, 25 bp, probe
atagagacaatcttacccgcaggtt

SEQ ID NO: 120843 - DNA, 25 bp, probe
atagagtggttttgtcctgcagttc

SEQ ID NO: 120844 - DNA, 25 bp, probe
ataaatcagttttgttgtgagttct

SEQ ID NO: 120845 - DNA, 25 bp, probe
ataaagctttctgtttgtgttccat

SEQ ID NO: 120846 - DNA, 25 bp, probe
atagctagcatttttcttgggttcc

SEQ ID NO: 120847 - DNA, 25 bp, probe
atagcaacattgcattttggatgcc

SEQ ID NO: 120848 - DNA, 25 bp, probe
atagagagagggtctttggctgcac

SEQ ID NO: 120849 - DNA, 25 bp, probe
ataccagcaggaggttctgggcctc

SEQ ID NO: 120850 - DNA, 25 bp, probe
atagcccactaggatctggggccta

SEQ ID NO: 120851 - DNA, 25 bp, probe
atagcctactattcatgggaagcct

SEQ ID NO: 120852 - DNA, 25 bp, probe
atagcgcataataaggggaagactt

SEQ ID NO: 120853 - DNA, 25 bp, probe
atagtgtaaatggaaggcaaagcat

SEQ ID NO: 120854 - DNA, 25 bp, probe
atagcttaaatggaactcaccaaca

SEQ ID NO: 120855 - DNA, 25 bp, probe
atagattagaaatgaccacaggaca

SEQ ID NO: 120856 - DNA, 25 bp, probe
atagactgggacttgagccggggct

SEQ ID NO: 120857 - DNA, 25 bp, probe
atctacggctacttcaacgagaact

SEQ ID NO: 120858 - DNA, 25 bp, probe
atcaaacctcagcccgaggaaacat

SEQ ID NO: 120859 - DNA, 25 bp, probe
ataaccctacagaggtggtgagcat

SEQ ID NO: 120860 - DNA, 25 bp, probe
ataaccacttacagttgcttatatt

SEQ ID NO: 120861 - DNA, 25 bp, probe
ataaccactttttgttgggcaatat

SEQ ID NO: 120862 - DNA, 25 bp, probe
ataaccactttttgttgggcaatat

SEQ ID NO: 120863 - DNA, 25 bp, probe
ataagttttacatttttggcacata

SEQ ID NO: 120864 - DNA, 25 bp, probe
atacaggtttacagttcatgcctgt

SEQ ID NO: 120865 - DNA, 25 bp, probe
atacttgttttcagatccatagcat

SEQ ID NO: 120866 - DNA, 25 bp, probe
atagcttatttgaataaactacaac

SEQ ID NO: 120867 - DNA, 25 bp, probe
atagtttcttgttaacatatggata

SEQ ID NO: 120868 - DNA, 25 bp, probe
atagtattgattcatagagaactta

SEQ ID NO: 120869 - DNA, 25 bp, probe
atagtattgattcatagagaactta

SEQ ID NO: 120870 - DNA, 25 bp, probe
atagttctgaacatcggatactggg

SEQ ID NO: 120871 - DNA, 25 bp, probe
ataattctagcgggggacctgggag

SEQ ID NO: 120872 - DNA, 25 bp, probe
ataactctgaattggggcccagggg

SEQ ID NO: 120873 - DNA, 25 bp, probe
ataaccaggagagaggcccgcaggg

SEQ ID NO: 120874 - DNA, 25 bp, probe
ataaccaggagagaggcccgcaggg

SEQ ID NO: 120875 - DNA, 25 bp, probe
atactccaagcgactagaccggagt

SEQ ID NO: 120876 - DNA, 25 bp, probe
atactcatgaagcttaccgactagt

SEQ ID NO: 120877 - DNA, 25 bp, probe
atagccgagatcattaccctcttgt

SEQ ID NO: 120878 - DNA, 25 bp, probe
atagaccaatcagctgtgtcgcact

SEQ ID NO: 120879 - DNA, 25 bp, probe
atagattagaaagtgcgctggctca

SEQ ID NO: 120880 - DNA, 25 bp, probe
atagattagaaagtgcgctggctca

SEQ ID NO: 120881 - DNA, 25 bp, probe
atagttgatgaatttgctatgcgtt

SEQ ID NO: 120882 - DNA, 25 bp, probe
atacttgcaggctttgtatgtgaat

SEQ ID NO: 120883 - DNA, 25 bp, probe
atagttcaaccatgattgatgatga

SEQ ID NO: 120884 - DNA, 25 bp, probe
atagttctgcccaaattatgtgaaa

SEQ ID NO: 120885 - DNA, 25 bp, probe
ataatcttcccatgttatttaacaa

SEQ ID NO: 120886 - DNA, 25 bp, probe
ataaaacccgattcatattagacaa

SEQ ID NO: 120887 - DNA, 25 bp, probe
ataaatacctctcccagtgtaaatc

SEQ ID NO: 120888 - DNA, 25 bp, probe
atagtaactactccctgctttatat

SEQ ID NO: 120889 - DNA, 25 bp, probe
atagttactgagtccactttattct

SEQ ID NO: 120890 - DNA, 25 bp, probe
atagttcacctgtctcttatctatt

SEQ ID NO: 120891 - DNA, 25 bp, probe
atagaccagtattctcgaattctct

SEQ ID NO: 120892 - DNA, 25 bp, probe
ataagcccaaagacagcaacttctc

SEQ ID NO: 120893 - DNA, 25 bp, probe
ataaccctgaagactccacatacta

SEQ ID NO: 120894 - DNA, 25 bp, probe
ataactcactgttttccaataactg

SEQ ID NO: 120895 - DNA, 25 bp, probe
ataaatagtgtgtagcccagaaaag

SEQ ID NO: 120896 - DNA, 25 bp, probe
ataaatagtgtgtagcccagaaaag

SEQ ID NO: 120897 - DNA, 25 bp, probe
ataaagatcttgtggcaactacaaa

SEQ ID NO: 120898 - DNA, 25 bp, probe
ataaagcatgcactgtaagaactga

SEQ ID NO: 120899 - DNA, 25 bp, probe
ataagcactgcacatgagatataga

SEQ ID NO: 120900 - DNA, 25 bp, probe
atacagacccgaagtgaggagtccc

SEQ ID NO: 120901 - DNA, 25 bp, probe
atacgacagccgaactctgggccat

SEQ ID NO: 120902 - DNA, 25 bp, probe
ataagaatccaaactatgaggctag

SEQ ID NO: 120903 - DNA, 25 bp, probe
atgaagattcctaacattggtaatg

SEQ ID NO: 120904 - DNA, 25 bp, probe
atgaagattcctaacattggtaatg

SEQ ID NO: 120905 - DNA, 25 bp, probe
atagaagcccttgttgctgtagatg

SEQ ID NO: 120906 - DNA, 25 bp, probe
ataaggggtcatcaatgctggcaag

SEQ ID NO: 120907 - DNA, 25 bp, probe
ataacgagttctctagcgctagtga

SEQ ID NO: 120908 - DNA, 25 bp, probe
ataacgagttctctagcgctagtga

SEQ ID NO: 120909 - DNA, 25 bp, probe
atagacgagtttcttctcagcagtg

SEQ ID NO: 120910 - DNA, 25 bp, probe
atcaccgaggttatgccaaactggt

SEQ ID NO: 120911 - DNA, 25 bp, probe
atagctggaggcatttccacactct

SEQ ID NO: 120912 - DNA, 25 bp, probe
ataattgatggattcttccatcctg

SEQ ID NO: 120913 - DNA, 25 bp, probe
ataatggtatgagtaccctcctcct

SEQ ID NO: 120914 - DNA, 25 bp, probe
ataatgatgttggcaccagttcccc

SEQ ID NO: 120915 - DNA, 25 bp, probe
ataatgatgttggcaccagttcccc

SEQ ID NO: 120916 - DNA, 25 bp, probe
atacagtgtttggacatcaccccac

SEQ ID NO: 120917 - DNA, 25 bp, probe
atacagtgtttggacatcaccccac

SEQ ID NO: 120918 - DNA, 25 bp, probe
atcaagctgatgctgtcagctcagc

SEQ ID NO: 120919 - DNA, 25 bp, probe
atcaagctgatgctgtcagctcagc

SEQ ID NO: 120920 - DNA, 25 bp, probe
atagactgtgcagtgacctccacat

SEQ ID NO: 120921 - DNA, 25 bp, probe
atagaggtcaaaggtcatcatcatt

SEQ ID NO: 120922 - DNA, 25 bp, probe
atagactttgacagcttcatcagct

SEQ ID NO: 120923 - DNA, 25 bp, probe
ataactttgcagttcttacaccgtt

SEQ ID NO: 120924 - DNA, 25 bp, probe
atctacttcttgttggaaagctcca

SEQ ID NO: 120925 - DNA, 25 bp, probe
atagacttactgctggacaatctgc

SEQ ID NO: 120926 - DNA, 25 bp, probe
ataaattccatgcatgggccgctgc

SEQ ID NO: 120927 - DNA, 25 bp, probe
atagcaagaccacagcgctgatcct

SEQ ID NO: 120928 - DNA, 25 bp, probe
atagcaagaccacagcgctgatcct

SEQ ID NO: 120929 - DNA, 25 bp, probe
atacaacacgccggactgactctgg

SEQ ID NO: 120930 - DNA, 25 bp, probe
ataataagccgggatctaccatacc

SEQ ID NO: 120931 - DNA, 25 bp, probe
ataatgtaaagggatgtattctgag

SEQ ID NO: 120932 - DNA, 25 bp, probe
ataaattacagaccaaagattgagt

SEQ ID NO: 120933 - DNA, 25 bp, probe
ataaattacagaccaaagattgagt

SEQ ID NO: 120934 - DNA, 25 bp, probe
ataaccaaggagccaataattgact

SEQ ID NO: 120935 - DNA, 25 bp, probe
ataagcccagtgctgctgtaaatac

SEQ ID NO: 120936 - DNA, 25 bp, probe
ataagctgtttgccacctcaaaact

SEQ ID NO: 120937 - DNA, 25 bp, probe
atcaagattctaggtctccaaaagt

SEQ ID NO: 120938 - DNA, 25 bp, probe
ataaatatgtaggtgctccactaat

SEQ ID NO: 120939 - DNA, 25 bp, probe
ataatacttagatcctccttatact

SEQ ID NO: 120940 - DNA, 25 bp, probe
ataaacttgccatacgtattacagc

SEQ ID NO: 120941 - DNA, 25 bp, probe
atagaacaagttctgcttatttgac

SEQ ID NO: 120942 - DNA, 25 bp, probe
atagcagataaaatttctaattgta

SEQ ID NO: 120943 - DNA, 25 bp, probe
ataatcaaatatcgctttacatgtt

SEQ ID NO: 120944 - DNA, 25 bp, probe
ataccaccatatattcatatcctct

SEQ ID NO: 120945 - DNA, 25 bp, probe
atacaacctaacgcatctgcagcct

SEQ ID NO: 120946 - DNA, 25 bp, probe
atagcaaccataactgccactgtgc

SEQ ID NO: 120947 - DNA, 25 bp, probe
ataatatacataactccctggaaat

SEQ ID NO: 120948 - DNA, 25 bp, probe
aaatgacacgacttgggggcaaagg

SEQ ID NO: 120949 - DNA, 25 bp, probe
atacattctcgactttggggattag

SEQ ID NO: 120950 - DNA, 25 bp, probe
atacattctcgactttggggattag

SEQ ID NO: 120951 - DNA, 25 bp, probe
atcactttggactttaccagttagg

SEQ ID NO: 120952 - DNA, 25 bp, probe
atagcttttgaatgtacacagcgaa

SEQ ID NO: 120953 - DNA, 25 bp, probe
atagctcttctatagtgtcacctaa

SEQ ID NO: 120954 - DNA, 25 bp, probe
atagatgtgttattacttcctcaat

SEQ ID NO: 120955 - DNA, 25 bp, probe
ataatgtactattgacatgggcatc

SEQ ID NO: 120956 - DNA, 25 bp, probe
atagatatccttggcacatccgtac

SEQ ID NO: 120957 - DNA, 25 bp, probe
ataaacagcttggcagtgcaggtga

SEQ ID NO: 120958 - DNA, 25 bp, probe
ataacactatatccagacaagcatg

SEQ ID NO: 120959 - DNA, 25 bp, probe
aggacgcttgagccagaatctcagg

SEQ ID NO: 120960 - DNA, 25 bp, probe
atagacccgaggaaactcagagtcg

SEQ ID NO: 120961 - DNA, 25 bp, probe
ataattccggaaacagctacactgt

SEQ ID NO: 120962 - DNA, 25 bp, probe
atacatccacagggttttgacactt

SEQ ID NO: 120963 - DNA, 25 bp, probe
atacccatgctgcttttctgagtgt

SEQ ID NO: 120964 - DNA, 25 bp, probe
ataaaattggtttcctgtggtcatg

SEQ ID NO: 120965 - DNA, 25 bp, probe
ataaaacgattttctgttgctgcca

SEQ ID NO: 120966 - DNA, 25 bp, probe
atagctttcaattgttctttctgga

SEQ ID NO: 120967 - DNA, 25 bp, probe
atagcttccagtattcattgattta

SEQ ID NO: 120968 - DNA, 25 bp, probe
atagcttccagtattcattgattta

SEQ ID NO: 120969 - DNA, 25 bp, probe
atagctattcgtcctgtaatctgtt

SEQ ID NO: 120970 - DNA, 25 bp, probe
atagctttattccttagatggttct

SEQ ID NO: 120971 - DNA, 25 bp, probe
atagcatttattgtgataagtacat

SEQ ID NO: 120972 - DNA, 25 bp, probe
atagcattgctttcgtgtaaattat

SEQ ID NO: 120973 - DNA, 25 bp, probe
atagcattgtttactcagtcaagtt

SEQ ID NO: 120974 - DNA, 25 bp, probe
atactattgagtacctacaagtgtt

SEQ ID NO: 120975 - DNA, 25 bp, probe
atacctctactaacaaccaatttgt

SEQ ID NO: 120976 - DNA, 25 bp, probe
atagcctaactacacacatcaaaat

SEQ ID NO: 120977 - DNA, 25 bp, probe
atagcaatacactgtaatatcagaa

SEQ ID NO: 120978 - DNA, 25 bp, probe
atagaatacacaaagaactggatca

SEQ ID NO: 120979 - DNA, 25 bp, probe
ataaaagcatgccaaatcttggagc

SEQ ID NO: 120980 - DNA, 25 bp, probe
ataaacaggcactcttgtgggaata

SEQ ID NO: 120981 - DNA, 25 bp, probe
ataaacaggcactcttgtgggaata

SEQ ID NO: 120982 - DNA, 25 bp, probe
atagaagcaaactcttgctgtttat

SEQ ID NO: 120983 - DNA, 25 bp, probe
ataagaatgaactaagtatgtttct

SEQ ID NO: 120984 - DNA, 25 bp, probe
atagaagtgtgatgtgagttgttgt

SEQ ID NO: 120985 - DNA, 25 bp, probe
atagacagcctgcgagacctaagag

SEQ ID NO: 120986 - DNA, 25 bp, probe
ataaagcgcacacaaccattcaggc

SEQ ID NO: 120987 - DNA, 25 bp, probe
ataaagcgcacacaaccattcaggc

SEQ ID NO: 120988 - DNA, 25 bp, probe
atactcagcccaagaatttgtcagg

SEQ ID NO: 120989 - DNA, 25 bp, probe
atagcgacgcgctggcgttacagcg

SEQ ID NO: 120990 - DNA, 25 bp, probe
ataaacttattggctgttacgtggg

SEQ ID NO: 120991 - DNA, 25 bp, probe
ataaacttattggctgttacgtggg

SEQ ID NO: 120992 - DNA, 25 bp, probe
ataaacttttaggcctgaataggag

SEQ ID NO: 120993 - DNA, 25 bp, probe
ataacactttccagcctatagcaga

SEQ ID NO: 120994 - DNA, 25 bp, probe
ataacagtctgtttggccattacta

SEQ ID NO: 120995 - DNA, 25 bp, probe
atcacaaatttatggcctttaagtc

SEQ ID NO: 120996 - DNA, 25 bp, probe
ataacaatttactaccttctgatga

SEQ ID NO: 120997 - DNA, 25 bp, probe
ataattagtctccaagccattcagt

SEQ ID NO: 120998 - DNA, 25 bp, probe
atagcaatatcaaaaggaattcagt

SEQ ID NO: 120999 - DNA, 25 bp, probe
atagctataatgaataagcaataca

SEQ ID NO: 121000 - DNA, 25 bp, probe
atagcatcacaaatttcacaaataa

SEQ ID NO: 121001 - DNA, 25 bp, probe
atagacacagcattttcactccaga

SEQ ID NO: 121002 - DNA, 25 bp, probe
atagaacagagtcgtaatcccagct

SEQ ID NO: 121003 - DNA, 25 bp, probe
ataaaaggacgatctgcccctggaa

SEQ ID NO: 121004 - DNA, 25 bp, probe
ataaacacaaaatccattccaggta

SEQ ID NO: 121005 - DNA, 25 bp, probe
ataaacacaaaatccattccaggta

SEQ ID NO: 121006 - DNA, 25 bp, probe
ataaaatattggttgacttccggct

SEQ ID NO: 121007 - DNA, 25 bp, probe
ataaaatcttgtttctttcctcagt

SEQ ID NO: 121008 - DNA, 25 bp, probe
ataacggctgtggtttttcacacaa

SEQ ID NO: 121009 - DNA, 25 bp, probe
ataccgactcagattccttaagcat

SEQ ID NO: 121010 - DNA, 25 bp, probe
atacgaaatatggttccttttgtgg

SEQ ID NO: 121011 - DNA, 25 bp, probe
atagacaaatatgcccgtattctct

SEQ ID NO: 121012 - DNA, 25 bp, probe
ataccgaaaagggcctgatgtctgc

SEQ ID NO: 121013 - DNA, 25 bp, probe
atagcacgatgttggaatccgactt

SEQ ID NO: 121014 - DNA, 25 bp, probe
atcagcaggaattgctgtgtcccag

SEQ ID NO: 121015 - DNA, 25 bp, probe
atagcagtgatttatttcctgggtt

SEQ ID NO: 121016 - DNA, 25 bp, probe
atcaagtgttcgagtccctgagctc

SEQ ID NO: 121017 - DNA, 25 bp, probe
atcaagtgttcgagtccctgagctc

SEQ ID NO: 121018 - DNA, 25 bp, probe
atcaagttttcagaagccgactact

SEQ ID NO: 121019 - DNA, 25 bp, probe
ataagcttgtacagaagttccctct

SEQ ID NO: 121020 - DNA, 25 bp, probe
ataactctctacaggaatatatttt

SEQ ID NO: 121021 - DNA, 25 bp, probe
ataacctgcataactttttgtcttt

SEQ ID NO: 121022 - DNA, 25 bp, probe
atcatgaccgtcactgactttggct

SEQ ID NO: 121023 - DNA, 25 bp, probe
atcatgaccgtgaggaaggccctca

SEQ ID NO: 121024 - DNA, 25 bp, probe
atcggcttggtactgaaaccctgcc

SEQ ID NO: 121025 - DNA, 25 bp, probe
atcggcttggtactgaaaccctgcc

SEQ ID NO: 121026 - DNA, 25 bp, probe
ataaactgctgtgtgaagacctccc

SEQ ID NO: 121027 - DNA, 25 bp, probe
atcattaatcttttcaaggtccttc

SEQ ID NO: 121028 - DNA, 25 bp, probe
ataacaacagtaccaaggtggctgt

SEQ ID NO: 121029 - DNA, 25 bp, probe
ataaaaattagcctggcgtggtggc

SEQ ID NO: 121030 - DNA, 25 bp, probe
ataaaagattggactccctggtggt

SEQ ID NO: 121031 - DNA, 25 bp, probe
ataaaagcacttaccagccgaacgt

SEQ ID NO: 121032 - DNA, 25 bp, probe
ataaatacacttccacagtcagcac

SEQ ID NO: 121033 - DNA, 25 bp, probe
atcacctgcaacagaacgtccactt

SEQ ID NO: 121034 - DNA, 25 bp, probe
atccctgccgaaaacgagacaattg

SEQ ID NO: 121035 - DNA, 25 bp, probe
atccctgccgaaaacgagacaattg

SEQ ID NO: 121036 - DNA, 25 bp, probe
atctaaggccaaaagctgtgaaaat

SEQ ID NO: 121037 - DNA, 25 bp, probe
atacaaggagaagcactggatccaa

SEQ ID NO: 121038 - DNA, 25 bp, probe
atacaaggagaagcactggatccaa

SEQ ID NO: 121039 - DNA, 25 bp, probe
ataaagtgtgaatcttggatccagt

SEQ ID NO: 121040 - DNA, 25 bp, probe
ataacatggtcatttccggagtact

SEQ ID NO: 121041 - DNA, 25 bp, probe
ataactggtgacaatagatgtgagt

SEQ ID NO: 121042 - DNA, 25 bp, probe
atagcatcggagactacgaggtcat

SEQ ID NO: 121043 - DNA, 25 bp, probe
atacttgcaagtgacaagctgtcca

SEQ ID NO: 121044 - DNA, 25 bp, probe
atagctggcagatgcccaacgggca

SEQ ID NO: 121045 - DNA, 25 bp, probe
atagcggcctcggaaaagctggcac

SEQ ID NO: 121046 - DNA, 25 bp, probe
atagcggcctcggaaaagctggcac

SEQ ID NO: 121047 - DNA, 25 bp, probe
atagctgggctcccaagtacaatga

SEQ ID NO: 121048 - DNA, 25 bp, probe
atagctgggctcccaagtacaatga

SEQ ID NO: 121049 - DNA, 25 bp, probe
atacctggtctgccttgtacaagaa

SEQ ID NO: 121050 - DNA, 25 bp, probe
atacctggcctggtctggacacagt

SEQ ID NO: 121051 - DNA, 25 bp, probe
atacctgcgcttgaaggacatcatc

SEQ ID NO: 121052 - DNA, 25 bp, probe
atacctgcgcttgaaggacatcatc

SEQ ID NO: 121053 - DNA, 25 bp, probe
atagctacctgttaaagaatcatct

SEQ ID NO: 121054 - DNA, 25 bp, probe
atagctattcgtcctaaaacactgg

SEQ ID NO: 121055 - DNA, 25 bp, probe
ataaatatattcagagtaacacagg

SEQ ID NO: 121056 - DNA, 25 bp, probe
ataaaataccgagggcagtatcaga

SEQ ID NO: 121057 - DNA, 25 bp, probe
ataaaagaaggccgcgcagccacgg

SEQ ID NO: 121058 - DNA, 25 bp, probe
ataagggagggcacgtgcacagcag

SEQ ID NO: 121059 - DNA, 25 bp, probe
ataaaggcacgggctactacacatg

SEQ ID NO: 121060 - DNA, 25 bp, probe
ataaactcaagtgcctgctacacat

SEQ ID NO: 121061 - DNA, 25 bp, probe
atcaactataagcccactgttaata

SEQ ID NO: 121062 - DNA, 25 bp, probe
ataactccagacatcactggcagaa

SEQ ID NO: 121063 - DNA, 25 bp, probe
ataactccagacatcactggcagaa

SEQ ID NO: 121064 - DNA, 25 bp, probe
atacctccagatatgagctcatggt

SEQ ID NO: 121065 - DNA, 25 bp, probe
atacctactgctccaagtcagatgt

SEQ ID NO: 121066 - DNA, 25 bp, probe
atactgtccattccacatattattc

SEQ ID NO: 121067 - DNA, 25 bp, probe
atacccacatcccagcatgtgtacc

SEQ ID NO: 121068 - DNA, 25 bp, probe
atacccacatcccagcatgtgtacc

SEQ ID NO: 121069 - DNA, 25 bp, probe
atagcccacatcatagagctgctag

SEQ ID NO: 121070 - DNA, 25 bp, probe
atacctgatctgcaagatgctgctc

SEQ ID NO: 121071 - DNA, 25 bp, probe
atagcttgtctttacatgcatgctt

SEQ ID NO: 121072 - DNA, 25 bp, probe
atactattattgaaatcgcttgacc

SEQ ID NO: 121073 - DNA, 25 bp, probe
ataccactgcattgggacgtctgca

SEQ ID NO: 121074 - DNA, 25 bp, probe
atacatcactgattgctggctttgt

SEQ ID NO: 121075 - DNA, 25 bp, probe
atacatcactgattgctggctttgt

SEQ ID NO: 121076 - DNA, 25 bp, probe
atacgcactggtatgtgtggatgat

SEQ ID NO: 121077 - DNA, 25 bp, probe
atagccacttttttgtcaagagtta

SEQ ID NO: 121078 - DNA, 25 bp, probe
atagcctgttttgtgtatattggtg

SEQ ID NO: 121079 - DNA, 25 bp, probe
atagccttttcaagcttgtttttgc

SEQ ID NO: 121080 - DNA, 25 bp, probe
atacctatgttcgattttgttttgt

SEQ ID NO: 121081 - DNA, 25 bp, probe
atagcctatgtacatctttaccagc

SEQ ID NO: 121082 - DNA, 25 bp, probe
atagcctatgtacatctttaccagc

SEQ ID NO: 121083 - DNA, 25 bp, probe
ataccatatgtattagtcccccagt

SEQ ID NO: 121084 - DNA, 25 bp, probe
ataccaagctccaagtcccagggag

SEQ ID NO: 121085 - DNA, 25 bp, probe
atacccacaacactgtccgagggtg

SEQ ID NO: 121086 - DNA, 25 bp, probe
atacgctccaactgatccagatgct

SEQ ID NO: 121087 - DNA, 25 bp, probe
atacagctccagacgcgttaagcgc

SEQ ID NO: 121088 - DNA, 25 bp, probe
atcaaggacgatgagtacaacccct

SEQ ID NO: 121089 - DNA, 25 bp, probe
atctggaaccatcagaaacaccctc

SEQ ID NO: 121090 - DNA, 25 bp, probe
cctggagtccacgtttaactcctct

SEQ ID NO: 121091 - DNA, 25 bp, probe
ttcctatgtccacacttaaccttta

SEQ ID NO: 121092 - DNA, 25 bp, probe
ataatattccactcataaaacttta

SEQ ID NO: 121093 - DNA, 25 bp, probe
ataatcacctaggtttacaaatatt

SEQ ID NO: 121094 - DNA, 25 bp, probe
ataatcccctgttaaaataatcaat

SEQ ID NO: 121095 - DNA, 25 bp, probe
atactcccgctgtctcaaaaataaa

SEQ ID NO: 121096 - DNA, 25 bp, probe
atactactagcttccagacaatcat

SEQ ID NO: 121097 - DNA, 25 bp, probe
atagctactgtttgcaatgtcttat

SEQ ID NO: 121098 - DNA, 25 bp, probe
atctctaagttacatgacctatatc

SEQ ID NO: 121099 - DNA, 25 bp, probe
atacagaactcacagtacctatgac

SEQ ID NO: 121100 - DNA, 25 bp, probe
atactgagacctccagatgcacttt

SEQ ID NO: 121101 - DNA, 25 bp, probe
atacgaccatcaacagagactgact

SEQ ID NO: 121102 - DNA, 25 bp, probe
atcatcagcattaccaacaacgtca

SEQ ID NO: 121103 - DNA, 25 bp, probe
atcccataccacccacaggtaggga

SEQ ID NO: 121104 - DNA, 25 bp, probe
atcccataccacccacaggtaggga

SEQ ID NO: 121105 - DNA, 25 bp, probe
atacatagaccaggcccagaatcga

SEQ ID NO: 121106 - DNA, 25 bp, probe
atactgaagatgccgcacacaaaca

SEQ ID NO: 121107 - DNA, 25 bp, probe
ataccataggaggcacaagcaccat

SEQ ID NO: 121108 - DNA, 25 bp, probe
atcaacagcagtgccaaacccatcg

SEQ ID NO: 121109 - DNA, 25 bp, probe
ataaagcagatgaaccttcaacagc

SEQ ID NO: 121110 - DNA, 25 bp, probe
ataaaaacatgacaattccagagga

SEQ ID NO: 121111 - DNA, 25 bp, probe
ataaaaacactctcacctattggtt

SEQ ID NO: 121112 - DNA, 25 bp, probe
ataaataatctctgtaccaaatagt

SEQ ID NO: 121113 - DNA, 25 bp, probe
atacctttctcatgggccaactaat

SEQ ID NO: 121114 - DNA, 25 bp, probe
atacctttctcatgggccaactaat

SEQ ID NO: 121115 - DNA, 25 bp, probe
atacaatttgtatttgggatgcaat

SEQ ID NO: 121116 - DNA, 25 bp, probe
atacttctctgcaacttgttgagca

SEQ ID NO: 121117 - DNA, 25 bp, probe
ataccatcatgtacagttgctggca

SEQ ID NO: 121118 - DNA, 25 bp, probe
ataccaatgggcattgctgtgttca

SEQ ID NO: 121119 - DNA, 25 bp, probe
atacatttagtcatcgatttatcaa

SEQ ID NO: 121120 - DNA, 25 bp, probe
ataatttagttactacctcatacaa

SEQ ID NO: 121121 - DNA, 25 bp, probe
ataatttagttactacctcatacaa

SEQ ID NO: 121122 - DNA, 25 bp, probe
ataacttatggtagctagattctag

SEQ ID NO: 121123 - DNA, 25 bp, probe
ataactagaggtaataattggtatt

SEQ ID NO: 121124 - DNA, 25 bp, probe
ataacaagtttaagaacatgttctt

SEQ ID NO: 121125 - DNA, 25 bp, probe
ataagccaattaatagacgagtttc

SEQ ID NO: 121126 - DNA, 25 bp, probe
ataagcccatttaaaagaggtcact

SEQ ID NO: 121127 - DNA, 25 bp, probe
ataagcccatttaaaagaggtcact

SEQ ID NO: 121128 - DNA, 25 bp, probe
ataagcccatcaagaaagtcatggt

SEQ ID NO: 121129 - DNA, 25 bp, probe
atacgctggcatcgaaaacactgag

SEQ ID NO: 121130 - DNA, 25 bp, probe
atacagctgtgtggaagataagatg

SEQ ID NO: 121131 - DNA, 25 bp, probe
atagccatgtacatattacagcatg

SEQ ID NO: 121132 - DNA, 25 bp, probe
atagccatgtacatattacagcatg

SEQ ID NO: 121133 - DNA, 25 bp, probe
atagccgtgcaagatgaatgcagat

SEQ ID NO: 121134 - DNA, 25 bp, probe
ataccgatgcacttatagatgcaat

SEQ ID NO: 121135 - DNA, 25 bp, probe
ataccatatatcaatgaaagcaact

SEQ ID NO: 121136 - DNA, 25 bp, probe
atacctcatataatacttgctcaac

SEQ ID NO: 121137 - DNA, 25 bp, probe
ataccctgagataagcttatagatc

SEQ ID NO: 121138 - DNA, 25 bp, probe
atacaccatggaacactatgtgtat

SEQ ID NO: 121139 - DNA, 25 bp, probe
atacagacatgttaccagcacaaat

SEQ ID NO: 121140 - DNA, 25 bp, probe
atacagagtctcttccaacgaaact

SEQ ID NO: 121141 - DNA, 25 bp, probe
ataaggactcttaaaataatcctga

SEQ ID NO: 121142 - DNA, 25 bp, probe
ataagggactttggaattctgcttc

SEQ ID NO: 121143 - DNA, 25 bp, probe
atacgggcacatacggattcttgct

SEQ ID NO: 121144 - DNA, 25 bp, probe
atacctgtgaggactggttgtctct

SEQ ID NO: 121145 - DNA, 25 bp, probe
atacctctgtggatgaatattctta

SEQ ID NO: 121146 - DNA, 25 bp, probe
ataccaccatgcccagctaatttta

SEQ ID NO: 121147 - DNA, 25 bp, probe
atacccacaggttctatgatttgta

SEQ ID NO: 121148 - DNA, 25 bp, probe
atacccacaggttctatgatttgta

SEQ ID NO: 121149 - DNA, 25 bp, probe
atagcctgtggcctttgcaatttgt

SEQ ID NO: 121150 - DNA, 25 bp, probe
atagcctgtggcctttgcaatttgt

SEQ ID NO: 121151 - DNA, 25 bp, probe
atagccttacagtatctggctttgt

SEQ ID NO: 121152 - DNA, 25 bp, probe
atacctctgaccaacaggctgttct

SEQ ID NO: 121153 - DNA, 25 bp, probe
ataacctgatctaccaagtggctaa

SEQ ID NO: 121154 - DNA, 25 bp, probe
ataactggacttccagctgtggatg

SEQ ID NO: 121155 - DNA, 25 bp, probe
atacccatcatggtgacactggggt

SEQ ID NO: 121156 - DNA, 25 bp, probe
ataccactatggccacatcgaggag

SEQ ID NO: 121157 - DNA, 25 bp, probe
atcaccctaggccacttggagggta

SEQ ID NO: 121158 - DNA, 25 bp, probe
atcaacagtggccaggttaaggatg

SEQ ID NO: 121159 - DNA, 25 bp, probe
atcagacatgtgagcactacgggtg

SEQ ID NO: 121160 - DNA, 25 bp, probe
atagccatgataaacaactcctatc

SEQ ID NO: 121161 - DNA, 25 bp, probe
atagccatgataaacaactcctatc

SEQ ID NO: 121162 - DNA, 25 bp, probe
atacacaattgccaacactcctgat

SEQ ID NO: 121163 - DNA, 25 bp, probe
atacagccaagggcactgctcactg

SEQ ID NO: 121164 - DNA, 25 bp, probe
atacgccagcaggccacatggctgg

SEQ ID NO: 121165 - DNA, 25 bp, probe
atacgtcagcagatcctggatgaaa

SEQ ID NO: 121166 - DNA, 25 bp, probe
atacagtatgagctgcggggatatt

SEQ ID NO: 121167 - DNA, 25 bp, probe
atacacagcatgcagactgggagtt

SEQ ID NO: 121168 - DNA, 25 bp, probe
atacacagcatgcagactgggagtt

SEQ ID NO: 121169 - DNA, 25 bp, probe
ataagctgatgctcagctgctggag

SEQ ID NO: 121170 - DNA, 25 bp, probe
atacctgcagcaacgtgggagaaag

SEQ ID NO: 121171 - DNA, 25 bp, probe
atacgtggccatggtggtggacaga

SEQ ID NO: 121172 - DNA, 25 bp, probe
ataaaggcctcttgggatgtcagaa

SEQ ID NO: 121173 - DNA, 25 bp, probe
ataaacctcatcaattaattcaaaa

SEQ ID NO: 121174 - DNA, 25 bp, probe
ataatgagcccatcactaatatcca

SEQ ID NO: 121175 - DNA, 25 bp, probe
atcaaatgccccgaatttagtcaca

SEQ ID NO: 121176 - DNA, 25 bp, probe
ataaaccttcaatttatggtcttct

SEQ ID NO: 121177 - DNA, 25 bp, probe
ataactcctgtgcaatgaaggtgat

SEQ ID NO: 121178 - DNA, 25 bp, probe
atacccctgtgaaatgtcactgatt

SEQ ID NO: 121179 - DNA, 25 bp, probe
atacccctgtgaaatgtcactgatt

SEQ ID NO: 121180 - DNA, 25 bp, probe
ataccccaccagaatgtcacaatca

SEQ ID NO: 121181 - DNA, 25 bp, probe
ataccccaccagaatgtcacaatca

SEQ ID NO: 121182 - DNA, 25 bp, probe
atactcccacaggtgggcccatatt

SEQ ID NO: 121183 - DNA, 25 bp, probe
atactttcaagttcctggccattgt

SEQ ID NO: 121184 - DNA, 25 bp, probe
atactcttatagcctgccttcaatt

SEQ ID NO: 121185 - DNA, 25 bp, probe
atactcttatagcctgccttcaatt

SEQ ID NO: 121186 - DNA, 25 bp, probe
atacttacatatctgacttctagga

SEQ ID NO: 121187 - DNA, 25 bp, probe
atacttacatatctgacttctagga

SEQ ID NO: 121188 - DNA, 25 bp, probe
ataattcagtccttgcctttgaagg

SEQ ID NO: 121189 - DNA, 25 bp, probe
ataattgcttcacagccttggccat

SEQ ID NO: 121190 - DNA, 25 bp, probe
atcaatggattctcgacttcaaagg

SEQ ID NO: 121191 - DNA, 25 bp, probe
ataatggctgaaataacgataaaaa

SEQ ID NO: 121192 - DNA, 25 bp, probe
ataaggaaatttgtagcatcaacta

SEQ ID NO: 121193 - DNA, 25 bp, probe
ataccgaagattagtggagctctaa

SEQ ID NO: 121194 - DNA, 25 bp, probe
atcacggtcaagagtaagctgtcca

SEQ ID NO: 121195 - DNA, 25 bp, probe
atcacagttacacaggagaggttga

SEQ ID NO: 121196 - DNA, 25 bp, probe
atcacagatttccaaaagtactagc

SEQ ID NO: 121197 - DNA, 25 bp, probe
atcacagatttccaaaagtactagc

SEQ ID NO: 121198 - DNA, 25 bp, probe
atacaattccagaaagtgaactcat

SEQ ID NO: 121199 - DNA, 25 bp, probe
atacataattataaccgagggctgg

SEQ ID NO: 121200 - DNA, 25 bp, probe
atacaagattctgcacctcaaaggg

SEQ ID NO: 121201 - DNA, 25 bp, probe
atacaatttctctatgccatctaga

SEQ ID NO: 121202 - DNA, 25 bp, probe
ataaattttgaaccattgatgtgca

SEQ ID NO: 121203 - DNA, 25 bp, probe
ataatgttttgctactcttgtcaga

SEQ ID NO: 121204 - DNA, 25 bp, probe
atacattgtttctctattatctgaa

SEQ ID NO: 121205 - DNA, 25 bp, probe
ataacgtggtgatatactttgcaac

SEQ ID NO: 121206 - DNA, 25 bp, probe
ataacttgaattatagttctcaaca

SEQ ID NO: 121207 - DNA, 25 bp, probe
ataattgctggctggtgggttgcaa

SEQ ID NO: 121208 - DNA, 25 bp, probe
ataatgttatgcacgttggcttgag

SEQ ID NO: 121209 - DNA, 25 bp, probe
atacattcactgtctctgttggtgg

SEQ ID NO: 121210 - DNA, 25 bp, probe
atacagacattggcttgttggtttt

SEQ ID NO: 121211 - DNA, 25 bp, probe
atacagacattggcttgttggtttt

SEQ ID NO: 121212 - DNA, 25 bp, probe
atcaaacatctggaaattaccttaa

SEQ ID NO: 121213 - DNA, 25 bp, probe
atcaaaaatggcactgtccccttca

SEQ ID NO: 121214 - DNA, 25 bp, probe
atcaaaaatggcactgtccccttca

SEQ ID NO: 121215 - DNA, 25 bp, probe
ataaattatggctcttcacctgggc

SEQ ID NO: 121216 - DNA, 25 bp, probe
atacgattttctgttgcaccttgta

SEQ ID NO: 121217 - DNA, 25 bp, probe
ataaattgtttggcttcctcctgaa

SEQ ID NO: 121218 - DNA, 25 bp, probe
ataaattgtttggcttcctcctgaa

SEQ ID NO: 121219 - DNA, 25 bp, probe
ataaaatgtttgaccatgccttcat

SEQ ID NO: 121220 - DNA, 25 bp, probe
ataaagaaatgtggccatgctttaa

SEQ ID NO: 121221 - DNA, 25 bp, probe
atacagtagtgactcccatgctaaa

SEQ ID NO: 121222 - DNA, 25 bp, probe
atacgtaggacatcctctgcatctt

SEQ ID NO: 121223 - DNA, 25 bp, probe
ataagtaaggcatctttgttgtcaa

SEQ ID NO: 121224 - DNA, 25 bp, probe
ataagtctagggctattgtgttagt

SEQ ID NO: 121225 - DNA, 25 bp, probe
ataagtctagggctattgtgttagt

SEQ ID NO: 121226 - DNA, 25 bp, probe
ataaggctagtacctgctttgttgg

SEQ ID NO: 121227 - DNA, 25 bp, probe
ataagacttttcctcattctgtggg

SEQ ID NO: 121228 - DNA, 25 bp, probe
atacgtattttccgtagtgctctgg

SEQ ID NO: 121229 - DNA, 25 bp, probe
atccctgtttctctatgtagtctgg

SEQ ID NO: 121230 - DNA, 25 bp, probe
atacctgtgttcagattgtaagatc

SEQ ID NO: 121231 - DNA, 25 bp, probe
atacctgtgtctatgagtgtctgga

SEQ ID NO: 121232 - DNA, 25 bp, probe
atacctgtgtctatgagtgtctgga

SEQ ID NO: 121233 - DNA, 25 bp, probe
atacctggattgggatgtgtctgag

SEQ ID NO: 121234 - DNA, 25 bp, probe
atacctcaagtgggtctattagcat

SEQ ID NO: 121235 - DNA, 25 bp, probe
atacttcaggtgttgctgttaacat

SEQ ID NO: 121236 - DNA, 25 bp, probe
atactccaggatcatctttccagca

SEQ ID NO: 121237 - DNA, 25 bp, probe
atactccaggatcatctttccagca

SEQ ID NO: 121238 - DNA, 25 bp, probe
ataccgaatgggtcttattcagacc

SEQ ID NO: 121239 - DNA, 25 bp, probe
atactcagtatggttcttcagtcga

SEQ ID NO: 121240 - DNA, 25 bp, probe
atactactatgatatttagctgcag

SEQ ID NO: 121241 - DNA, 25 bp, probe
atactatcaaattatgttgtgtgca

SEQ ID NO: 121242 - DNA, 25 bp, probe
atactatcaaattatgttgtgtgca

SEQ ID NO: 121243 - DNA, 25 bp, probe
atactcgaggtggatgtcgcgtcct

SEQ ID NO: 121244 - DNA, 25 bp, probe
ataactgaggtggatgcagcctccg

SEQ ID NO: 121245 - DNA, 25 bp, probe
atacggaggctgatgagagctcgcc

SEQ ID NO: 121246 - DNA, 25 bp, probe
atacccagcgcaaaggcactggccg

SEQ ID NO: 121247 - DNA, 25 bp, probe
atcccagaactcaggactggagccc

SEQ ID NO: 121248 - DNA, 25 bp, probe
atctgccaaaacaaggacaaatctt

SEQ ID NO: 121249 - DNA, 25 bp, probe
atcggctcaccaggggacgaactag

SEQ ID NO: 121250 - DNA, 25 bp, probe
atcaggctcccagggtttaatgtgg

SEQ ID NO: 121251 - DNA, 25 bp, probe
ataatctacactgtgtttaatgaag

SEQ ID NO: 121252 - DNA, 25 bp, probe
ataagtagactgtttttatgtgtga

SEQ ID NO: 121253 - DNA, 25 bp, probe
atacactaacatttgatgttagcgt

SEQ ID NO: 121254 - DNA, 25 bp, probe
atacccaacagatggttctcagacc

SEQ ID NO: 121255 - DNA, 25 bp, probe
ataccctgacagacaagttctatgt

SEQ ID NO: 121256 - DNA, 25 bp, probe
atacccaggagtccagcaatcattg

SEQ ID NO: 121257 - DNA, 25 bp, probe
atacccatgccattgacaaatactc

SEQ ID NO: 121258 - DNA, 25 bp, probe
atacccatctaccaaaagcagatat

SEQ ID NO: 121259 - DNA, 25 bp, probe
atacccatctaccaaaagcagatat

SEQ ID NO: 121260 - DNA, 25 bp, probe
ataccctcatcaccaagatggccaa

SEQ ID NO: 121261 - DNA, 25 bp, probe
ataccgctcaaaagaagctccaaga

SEQ ID NO: 121262 - DNA, 25 bp, probe
ataacccaaaggcatgctccagaca

SEQ ID NO: 121263 - DNA, 25 bp, probe
atcaacccagagacgggcgagcaga

SEQ ID NO: 121264 - DNA, 25 bp, probe
atcaaggctaggaggctcgaccacc

SEQ ID NO: 121265 - DNA, 25 bp, probe
atacaggagagccttggccaagcat

SEQ ID NO: 121266 - DNA, 25 bp, probe
atacaggaagaggtgctgccaggat

SEQ ID NO: 121267 - DNA, 25 bp, probe
atacaggaagaggtgctgccaggat

SEQ ID NO: 121268 - DNA, 25 bp, probe
ataaggacatgaaggatgccctgaa

SEQ ID NO: 121269 - DNA, 25 bp, probe
atacaaacatatcttctgcattgaa

SEQ ID NO: 121270 - DNA, 25 bp, probe
atacaaacatatcttctgcattgaa

SEQ ID NO: 121271 - DNA, 25 bp, probe
atactgtacatagatgtatcattaa

SEQ ID NO: 121272 - DNA, 25 bp, probe
ataagagagtcaccatgtatgcaat

SEQ ID NO: 121273 - DNA, 25 bp, probe
ataaagatgtgcctttatgagggca

SEQ ID NO: 121274 - DNA, 25 bp, probe
atcaaagttcttcctaaaggtcatg

SEQ ID NO: 121275 - DNA, 25 bp, probe
ataactgttttgctacaacccatga

SEQ ID NO: 121276 - DNA, 25 bp, probe
ataagctttttgcatttatctgaag

SEQ ID NO: 121277 - DNA, 25 bp, probe
atacattatatttatgttctattca

SEQ ID NO: 121278 - DNA, 25 bp, probe
atacagtctaattgttcatcctaat

SEQ ID NO: 121279 - DNA, 25 bp, probe
ataagtatatcatgcttgccctaga

SEQ ID NO: 121280 - DNA, 25 bp, probe
ataagtatatcatgcttgccctaga

SEQ ID NO: 121281 - DNA, 25 bp, probe
ataatgctacacaccttcaagagag

SEQ ID NO: 121282 - DNA, 25 bp, probe
atactttgcactgggctgtacgaca

SEQ ID NO: 121283 - DNA, 25 bp, probe
atactgcctggcagctgcgattcag

SEQ ID NO: 121284 - DNA, 25 bp, probe
atactgctcagtgacatggcccagg

SEQ ID NO: 121285 - DNA, 25 bp, probe
atactgctctgtggaacctcgcagg

SEQ ID NO: 121286 - DNA, 25 bp, probe
atactgctctgtggaacctcgcagg

SEQ ID NO: 121287 - DNA, 25 bp, probe
atactgttgtggacaatctcagctg

SEQ ID NO: 121288 - DNA, 25 bp, probe
atactgtgatatctcatcctagcta

SEQ ID NO: 121289 - DNA, 25 bp, probe
atactgtgcaatcatcacctctgtc

SEQ ID NO: 121290 - DNA, 25 bp, probe
atacttgaacttgtctcattccacc

SEQ ID NO: 121291 - DNA, 25 bp, probe
atactttcctgagtttgatcatcca

SEQ ID NO: 121292 - DNA, 25 bp, probe
atacgtatacttgctatgacactga

SEQ ID NO: 121293 - DNA, 25 bp, probe
atactgttactaaacataagttcaa

SEQ ID NO: 121294 - DNA, 25 bp, probe
atactattatctacttcataagtca

SEQ ID NO: 121295 - DNA, 25 bp, probe
atactcataagccacctctgtaatc

SEQ ID NO: 121296 - DNA, 25 bp, probe
atacttgaatggacctctataaacg

SEQ ID NO: 121297 - DNA, 25 bp, probe
atactgccaataaactcttaatact

SEQ ID NO: 121298 - DNA, 25 bp, probe
atcacgatattcagaccttgacttt

SEQ ID NO: 121299 - DNA, 25 bp, probe
atcaatgtttcagccctagactgcc

SEQ ID NO: 121300 - DNA, 25 bp, probe
ataatggactcctcctatagtgcca

SEQ ID NO: 121301 - DNA, 25 bp, probe
ataatggactcctcctatagtgcca

SEQ ID NO: 121302 - DNA, 25 bp, probe
atcagtagttcctacccatagtctt

SEQ ID NO: 121303 - DNA, 25 bp, probe
atacacctatctcaaccattttttt

SEQ ID NO: 121304 - DNA, 25 bp, probe
ataaattatctctaacgtctttgtt

SEQ ID NO: 121305 - DNA, 25 bp, probe
ataaaaatacaaagcctcttgtcat

SEQ ID NO: 121306 - DNA, 25 bp, probe
ataaaagattgtaggctatctctgt

SEQ ID NO: 121307 - DNA, 25 bp, probe
ataaaatatctgagcggaactgtga

SEQ ID NO: 121308 - DNA, 25 bp, probe
ataatccttggcagggctcagcagg

SEQ ID NO: 121309 - DNA, 25 bp, probe
atactcagggacagggcatcatggg

SEQ ID NO: 121310 - DNA, 25 bp, probe
atactcgcaggaaggagtctcatgc

SEQ ID NO: 121311 - DNA, 25 bp, probe
atacatcatatgcagaggaagcttc

SEQ ID NO: 121312 - DNA, 25 bp, probe
atacatcgagcggaagaactacatt

SEQ ID NO: 121313 - DNA, 25 bp, probe
ataacacacatggactgaagctgac

SEQ ID NO: 121314 - DNA, 25 bp, probe
ataacactctgctgtaacgaagaag

SEQ ID NO: 121315 - DNA, 25 bp, probe
ataagcctcctttacactgaataag

SEQ ID NO: 121316 - DNA, 25 bp, probe
ataaggccagggtaccatggagaaa

SEQ ID NO: 121317 - DNA, 25 bp, probe
atctgagggagaggaacgtggaaca

SEQ ID NO: 121318 - DNA, 25 bp, probe
atctgagggagaggaacgtggaaca

SEQ ID NO: 121319 - DNA, 25 bp, probe
atcaggggacgggatggggtacaca

SEQ ID NO: 121320 - DNA, 25 bp, probe
atgaggagtgggggggagtgctacg

SEQ ID NO: 121321 - DNA, 25 bp, probe
atgggagtggggagcggacgttggc

SEQ ID NO: 121322 - DNA, 25 bp, probe
atcttgggggggcggagcagttggg

SEQ ID NO: 121323 - DNA, 25 bp, probe
atctgtttggtgggggtagagctga

SEQ ID NO: 121324 - DNA, 25 bp, probe
atcagcgtcgacaccggggagctga

SEQ ID NO: 121325 - DNA, 25 bp, probe
atcagcttcagagcctgggctggtc

SEQ ID NO: 121326 - DNA, 25 bp, probe
atacttgtgtattttgcagctggtc

SEQ ID NO: 121327 - DNA, 25 bp, probe
atacttgtgtattttgcagctggtc

SEQ ID NO: 121328 - DNA, 25 bp, probe
atactttgctgacgattcacatttt

SEQ ID NO: 121329 - DNA, 25 bp, probe
atactttctcgtacacacttttgtg

SEQ ID NO: 121330 - DNA, 25 bp, probe
atcactttgtctgtgagaccttagc

SEQ ID NO: 121331 - DNA, 25 bp, probe
atacatgtaaatctagacctctgac

SEQ ID NO: 121332 - DNA, 25 bp, probe
atacagggacttaatgatcctagag

SEQ ID NO: 121333 - DNA, 25 bp, probe
atacagggacttaatgatcctagag

SEQ ID NO: 121334 - DNA, 25 bp, probe
atacagaaagtattggagcccagat

SEQ ID NO: 121335 - DNA, 25 bp, probe
atacagaaagtattggagcccagat

SEQ ID NO: 121336 - DNA, 25 bp, probe
atacatgaacagaaactgcccaggt

SEQ ID NO: 121337 - DNA, 25 bp, probe
atcacaggaagcaaacccagctcct

SEQ ID NO: 121338 - DNA, 25 bp, probe
ataaggtaaaatgccatgatgcctc

SEQ ID NO: 121339 - DNA, 25 bp, probe
ataaaggagaataccacagagctcc

SEQ ID NO: 121340 - DNA, 25 bp, probe
ataactcgagaaagccacacacata

SEQ ID NO: 121341 - DNA, 25 bp, probe
ataaccgcacagacactgacaagca

SEQ ID NO: 121342 - DNA, 25 bp, probe
ataacatacacgtcattgcaagtgt

SEQ ID NO: 121343 - DNA, 25 bp, probe
ataaatccacaaattacattttgca

SEQ ID NO: 121344 - DNA, 25 bp, probe
ataaatccacaaattacattttgca

SEQ ID NO: 121345 - DNA, 25 bp, probe
ataacatttccgtttccatcattga

SEQ ID NO: 121346 - DNA, 25 bp, probe
ataacatttccgtttccatcattga

SEQ ID NO: 121347 - DNA, 25 bp, probe
ataactcttccatgtttcacatttc

SEQ ID NO: 121348 - DNA, 25 bp, probe
ataagctgtacaatcgtttcatcat

SEQ ID NO: 121349 - DNA, 25 bp, probe
ataatttgaccattgctatgaacat

SEQ ID NO: 121350 - DNA, 25 bp, probe
ataatgtatgcagcagttgattcca

SEQ ID NO: 121351 - DNA, 25 bp, probe
ataaaaggacagcactctctcactc

SEQ ID NO: 121352 - DNA, 25 bp, probe
ataaaagctgaatcatttcatacca

SEQ ID NO: 121353 - DNA, 25 bp, probe
atggaaatgctataccttacctacc

SEQ ID NO: 121354 - DNA, 25 bp, probe
ataataacatttaccttcagcctcc

SEQ ID NO: 121355 - DNA, 25 bp, probe
ataataacatttaccttcagcctcc

SEQ ID NO: 121356 - DNA, 25 bp, probe
ataaacacattgaaccctagatctc

SEQ ID NO: 121357 - DNA, 25 bp, probe
ataaccctttatcgcctgcagaatt

SEQ ID NO: 121358 - DNA, 25 bp, probe
atgcaatccccttttggtagaattg

SEQ ID NO: 121359 - DNA, 25 bp, probe
atcttgcatccctgtatggaggtct

SEQ ID NO: 121360 - DNA, 25 bp, probe
atgcagtgcaccctggctacgggtt

SEQ ID NO: 121361 - DNA, 25 bp, probe
ataagcatccacagtacaagccttg

SEQ ID NO: 121362 - DNA, 25 bp, probe
ataatcctcccgtaaagcttcattt

SEQ ID NO: 121363 - DNA, 25 bp, probe
ataatcctcccgtaaagcttcattt

SEQ ID NO: 121364 - DNA, 25 bp, probe
ataatcctcttgcaaaatctcattt

SEQ ID NO: 121365 - DNA, 25 bp, probe
atacagccttggactagcaatttat

SEQ ID NO: 121366 - DNA, 25 bp, probe
atacagctttgagctcagcatgact

SEQ ID NO: 121367 - DNA, 25 bp, probe
atacagctttggaatcgtcctctgg

SEQ ID NO: 121368 - DNA, 25 bp, probe
atacagctttggaatcgtcctctgg

SEQ ID NO: 121369 - DNA, 25 bp, probe
atacagctttggaatcgtcctctgg

SEQ ID NO: 121370 - DNA, 25 bp, probe
atacagtgttgacattctgcctgcc

SEQ ID NO: 121371 - DNA, 25 bp, probe
atacaatgattggtgagctgccccc

SEQ ID NO: 121372 - DNA, 25 bp, probe
atacaatgattggtgagctgccccc

SEQ ID NO: 121373 - DNA, 25 bp, probe
ataaagtaggtgcctgctcagctct

SEQ ID NO: 121374 - DNA, 25 bp, probe
atacaatctgaggcctcctctctca

SEQ ID NO: 121375 - DNA, 25 bp, probe
atacatctcgaggccagtcatcctc

SEQ ID NO: 121376 - DNA, 25 bp, probe
atactcttgtgttacatcatctcat

SEQ ID NO: 121377 - DNA, 25 bp, probe
atacatcttcaggatgattcatcta

SEQ ID NO: 121378 - DNA, 25 bp, probe
atacatcatatgttagatacacaaa

SEQ ID NO: 121379 - DNA, 25 bp, probe
atacatcatatgttagatacacaaa

SEQ ID NO: 121380 - DNA, 25 bp, probe
atacacatacatacacatacataca

SEQ ID NO: 121381 - DNA, 25 bp, probe
atacaagcatgcccaatcttagaga

SEQ ID NO: 121382 - DNA, 25 bp, probe
ataaggctcttgcactgtgacagag

SEQ ID NO: 121383 - DNA, 25 bp, probe
ataaggcttaattgtggaaagctaa

SEQ ID NO: 121384 - DNA, 25 bp, probe
ataagattacacagattatacagct

SEQ ID NO: 121385 - DNA, 25 bp, probe
ataagttactatttattccgctccg

SEQ ID NO: 121386 - DNA, 25 bp, probe
ataagttactatttattccgctccg

SEQ ID NO: 121387 - DNA, 25 bp, probe
ataaggttctttcatttcaatccca

SEQ ID NO: 121388 - DNA, 25 bp, probe
ataaggtatccgtccatgttcttgc

SEQ ID NO: 121389 - DNA, 25 bp, probe
ataaggtatccgtccatgttcttgc

SEQ ID NO: 121390 - DNA, 25 bp, probe
ataaagagaccggccagattgttgc

SEQ ID NO: 121391 - DNA, 25 bp, probe
ataataagtcacagccaaatgcttc

SEQ ID NO: 121392 - DNA, 25 bp, probe
ataaccagtctcagcaagacatcct

SEQ ID NO: 121393 - DNA, 25 bp, probe
ataactcagtacagatagcaattag

SEQ ID NO: 121394 - DNA, 25 bp, probe
ataaccgctacactacagagtctga

SEQ ID NO: 121395 - DNA, 25 bp, probe
ataaccagcaagctctcagatgcca

SEQ ID NO: 121396 - DNA, 25 bp, probe
atcaacactcaccagaccaatctga

SEQ ID NO: 121397 - DNA, 25 bp, probe
atcaagcatccatctgactaaggca

SEQ ID NO: 121398 - DNA, 25 bp, probe
ataatatctgcatcttgtaagcctt

SEQ ID NO: 121399 - DNA, 25 bp, probe
atcaggatggaaacagtcaggcact

SEQ ID NO: 121400 - DNA, 25 bp, probe
ataaagatgacttcgtagcagcacc

SEQ ID NO: 121401 - DNA, 25 bp, probe
atacaagatgacaactcttcccgtt

SEQ ID NO: 121402 - DNA, 25 bp, probe
atacacagagactctttcatttttc

SEQ ID NO: 121403 - DNA, 25 bp, probe
atacaaggagctctttaatcctgac

SEQ ID NO: 121404 - DNA, 25 bp, probe
atacagggatgctgtttttccattc

SEQ ID NO: 121405 - DNA, 25 bp, probe
atacagggtctatcttgcttcctac

SEQ ID NO: 121406 - DNA, 25 bp, probe
atcggggtcatttgctattcccctc

SEQ ID NO: 121407 - DNA, 25 bp, probe
atcccgattctataaggccaactgc

SEQ ID NO: 121408 - DNA, 25 bp, probe
atcaaccacttacaagaggcaaggc

SEQ ID NO: 121409 - DNA, 25 bp, probe
atcacccagaaaccaatgccgtaga

SEQ ID NO: 121410 - DNA, 25 bp, probe
atcacccagaaaccaatgccgtaga

SEQ ID NO: 121411 - DNA, 25 bp, probe
ataagtgaaagttaatgccaataga

SEQ ID NO: 121412 - DNA, 25 bp, probe
atcagttgaaaaaagtccagcttga

SEQ ID NO: 121413 - DNA, 25 bp, probe
atcagtgccagaaattccttaccta

SEQ ID NO: 121414 - DNA, 25 bp, probe
atcagtctggacatttactactttt

SEQ ID NO: 121415 - DNA, 25 bp, probe
ataactgctatcctttaccagagtt

SEQ ID NO: 121416 - DNA, 25 bp, probe
ataattgcttccaaacagctgggtt

SEQ ID NO: 121417 - DNA, 25 bp, probe
ataatggttactacacatcacagga

SEQ ID NO: 121418 - DNA, 25 bp, probe
ataatggttactacacatcacagga

SEQ ID NO: 121419 - DNA, 25 bp, probe
ataatgtttcggagtccaggactgg

SEQ ID NO: 121420 - DNA, 25 bp, probe
agagttcttccgagaccaagggagg

SEQ ID NO: 121421 - DNA, 25 bp, probe
agtgcgtttcccagaacgaacacta

SEQ ID NO: 121422 - DNA, 25 bp, probe
agtgcgtttcccagaacgaacacta

SEQ ID NO: 121423 - DNA, 25 bp, probe
acggttttccataggcattaaagtg

SEQ ID NO: 121424 - DNA, 25 bp, probe
ataatttttcctatgctataaacta

SEQ ID NO: 121425 - DNA, 25 bp, probe
ataacttgtcacttaatgttagaaa

SEQ ID NO: 121426 - DNA, 25 bp, probe
atcaagggtcattatgggttaggca

SEQ ID NO: 121427 - DNA, 25 bp, probe
atcacgggtgcctggagtgtggtgc

SEQ ID NO: 121428 - DNA, 25 bp, probe
atcacgggtgcctggagtgtggtgc

SEQ ID NO: 121429 - DNA, 25 bp, probe
atcagctggggatcgggctgtggtg

SEQ ID NO: 121430 - DNA, 25 bp, probe
atcaccagcggcgtctgggtgtgga

SEQ ID NO: 121431 - DNA, 25 bp, probe
atcaccatggtactgtggggggcca

SEQ ID NO: 121432 - DNA, 25 bp, probe
atcacgcagggacgtgagttggagc

SEQ ID NO: 121433 - DNA, 25 bp, probe
atcaacgtgcttctgcagtacggct

SEQ ID NO: 121434 - DNA, 25 bp, probe
ataactgtcctcaacaacagcggcc

SEQ ID NO: 121435 - DNA, 25 bp, probe
atgaatttcctgacaaagactgggc

SEQ ID NO: 121436 - DNA, 25 bp, probe
atcgtttcggctggcaagcctggtg

SEQ ID NO: 121437 - DNA, 25 bp, probe
atcgttagggtgaagcattatggtc

SEQ ID NO: 121438 - DNA, 25 bp, probe
atacatgtagtggataagcagttgc

SEQ ID NO: 121439 - DNA, 25 bp, probe
atacatgtatgtttcaggatatttg

SEQ ID NO: 121440 - DNA, 25 bp, probe
atacagacagctttcctgatcattt

SEQ ID NO: 121441 - DNA, 25 bp, probe
atacatcatgaccgtcactgacttt

SEQ ID NO: 121442 - DNA, 25 bp, probe
atacattatcgttcacaattttatt

SEQ ID NO: 121443 - DNA, 25 bp, probe
atacatttcttactgccgattgctt

SEQ ID NO: 121444 - DNA, 25 bp, probe
atacatttcttactgccgattgctt

SEQ ID NO: 121445 - DNA, 25 bp, probe
atacatttctataggctctgaagca

SEQ ID NO: 121446 - DNA, 25 bp, probe
ataatcatactgattgcctaaaact

SEQ ID NO: 121447 - DNA, 25 bp, probe
ataatccagtggtgccttacatggt

SEQ ID NO: 121448 - DNA, 25 bp, probe
ataaagaggtgtgctttgacagttt

SEQ ID NO: 121449 - DNA, 25 bp, probe
ataaagaggatcgaccagtcagagt

SEQ ID NO: 121450 - DNA, 25 bp, probe
atcaaggagacctaccagctccaca

SEQ ID NO: 121451 - DNA, 25 bp, probe
atcaaggagacctaccagctccaca

SEQ ID NO: 121452 - DNA, 25 bp, probe
atcaaggagacctaccagctccaca

SEQ ID NO: 121453 - DNA, 25 bp, probe
ataaatcgatactgctggccaatca

SEQ ID NO: 121454 - DNA, 25 bp, probe
ataagatttaaccaacatcaacaaa

SEQ ID NO: 121455 - DNA, 25 bp, probe
ataattttattcccagcacagtcac

SEQ ID NO: 121456 - DNA, 25 bp, probe
atacaatgttatcaaccaactgcac

SEQ ID NO: 121457 - DNA, 25 bp, probe
atacaatgttatcaaccaactgcac

SEQ ID NO: 121458 - DNA, 25 bp, probe
ataaagtcatacgctccaactgatc

SEQ ID NO: 121459 - DNA, 25 bp, probe
ataaatgtccatactccaaacagtc

SEQ ID NO: 121460 - DNA, 25 bp, probe
ataatttccatgatacaaagatctt

SEQ ID NO: 121461 - DNA, 25 bp, probe
ataatttcctttgatgacatgtcct

SEQ ID NO: 121462 - DNA, 25 bp, probe
atcaattttttaaatagctcccatt

SEQ ID NO: 121463 - DNA, 25 bp, probe
ataacttgttggaggctgccagcaa

SEQ ID NO: 121464 - DNA, 25 bp, probe
atcaacgtttggagccttggcatca

SEQ ID NO: 121465 - DNA, 25 bp, probe
atcaacgtttggagccttggcatca

SEQ ID NO: 121466 - DNA, 25 bp, probe
atcaacagccgtgaccactttagaa

SEQ ID NO: 121467 - DNA, 25 bp, probe
ataaacggcacggcgcttttaacag

SEQ ID NO: 121468 - DNA, 25 bp, probe
ataaacggcacggcgcttttaacag

SEQ ID NO: 121469 - DNA, 25 bp, probe
ataaatcccaagtgcttttacacac

SEQ ID NO: 121470 - DNA, 25 bp, probe
ataaatgccaaacatgttgtcacac

SEQ ID NO: 121471 - DNA, 25 bp, probe
ataaatgccaaacatgttgtcacac

SEQ ID NO: 121472 - DNA, 25 bp, probe
ataaacttagcacgattctgtgact

SEQ ID NO: 121473 - DNA, 25 bp, probe
ataaatgcttggcttctgtgtatct

SEQ ID NO: 121474 - DNA, 25 bp, probe
ataaatgcttggcttctgtgtatct

SEQ ID NO: 121475 - DNA, 25 bp, probe
ataacagcgtgggggtgctcttcaa

SEQ ID NO: 121476 - DNA, 25 bp, probe
ataacaggtctgtgatgcccttaga

SEQ ID NO: 121477 - DNA, 25 bp, probe
ataaatttctgcttgtgcctttaga

SEQ ID NO: 121478 - DNA, 25 bp, probe
ataacatctactgtatcctttagaa

SEQ ID NO: 121479 - DNA, 25 bp, probe
ataatcactacttaagctaattaat

SEQ ID NO: 121480 - DNA, 25 bp, probe
ataatcactacttaagctaattaat

SEQ ID NO: 121481 - DNA, 25 bp, probe
ataacctcctcatagctgacattga

SEQ ID NO: 121482 - DNA, 25 bp, probe
atcaacgtcctccatgagcatggca

SEQ ID NO: 121483 - DNA, 25 bp, probe
atcaacgtcctccatgagcatggca

SEQ ID NO: 121484 - DNA, 25 bp, probe
ataaagcatctacgtcagcaggcca

SEQ ID NO: 121485 - DNA, 25 bp, probe
ataagaactgcaaatcagagtgcta

SEQ ID NO: 121486 - DNA, 25 bp, probe
atcaagacgctcaagtcgggctaca

SEQ ID NO: 121487 - DNA, 25 bp, probe
ataataggctccatcgctggtgcca

SEQ ID NO: 121488 - DNA, 25 bp, probe
ataagaggatcagccgggtgcaatg

SEQ ID NO: 121489 - DNA, 25 bp, probe
atacagcatgggtggcagggtttgg

SEQ ID NO: 121490 - DNA, 25 bp, probe
ataagctgctttagctggggttctg

SEQ ID NO: 121491 - DNA, 25 bp, probe
ataagctgaaatatggccagactat

SEQ ID NO: 121492 - DNA, 25 bp, probe
ataacagaacaaatcgctcacgaat

SEQ ID NO: 121493 - DNA, 25 bp, probe
atcaaaagcaccagcaggcacgtta

SEQ ID NO: 121494 - DNA, 25 bp, probe
ataaaccacacttagtcctgatgta

SEQ ID NO: 121495 - DNA, 25 bp, probe
atcaaagtcaaacagatccatattc

SEQ ID NO: 121496 - DNA, 25 bp, probe
ataatagggcaatataccaatctcc

SEQ ID NO: 121497 - DNA, 25 bp, probe
ataaagttgcagatgattcaaaccg

SEQ ID NO: 121498 - DNA, 25 bp, probe
atacacagctttatgatatcaaaga

SEQ ID NO: 121499 - DNA, 25 bp, probe
atcacagactttgagaacaggcgaa

SEQ ID NO: 121500 - DNA, 25 bp, probe
atcagcagacacgggagtttgtgga

SEQ ID NO: 121501 - DNA, 25 bp, probe
ataatgtagctggggcattttccat

SEQ ID NO: 121502 - DNA, 25 bp, probe
ataatgtgtgtctcctgtatttgtt

SEQ ID NO: 121503 - DNA, 25 bp, probe
atcacatttgagaccctgtgtttga

SEQ ID NO: 121504 - DNA, 25 bp, probe
atcaattggatataatcttcttacc

SEQ ID NO: 121505 - DNA, 25 bp, probe
ataatttctatgaaatcgtcgcttc

SEQ ID NO: 121506 - DNA, 25 bp, probe
atcagtcttctataatctggggtcg

SEQ ID NO: 121507 - DNA, 25 bp, probe
atcagtttgcatttgtagggttacg

SEQ ID NO: 121508 - DNA, 25 bp, probe
atcacttttcctccagggttagatc

SEQ ID NO: 121509 - DNA, 25 bp, probe
ataattataaccgagggctggcgtt

SEQ ID NO: 121510 - DNA, 25 bp, probe
agcaaggtaacctggcctttgtgaa

SEQ ID NO: 121511 - DNA, 25 bp, probe
agcaaggtaacctggcctttgtgaa

SEQ ID NO: 121512 - DNA, 25 bp, probe
atccaaaggacctgaccttcttgaa

SEQ ID NO: 121513 - DNA, 25 bp, probe
aggcaaaagatttagacctcggtct

SEQ ID NO: 121514 - DNA, 25 bp, probe
aggcaaaagatttagacctcggtct

SEQ ID NO: 121515 - DNA, 25 bp, probe
atcacactgaatgttagaccttttc

SEQ ID NO: 121516 - DNA, 25 bp, probe
atcacaggcaaccagttggcctcat

SEQ ID NO: 121517 - DNA, 25 bp, probe
atcacagcgctgagcgtcgagcgct

SEQ ID NO: 121518 - DNA, 25 bp, probe
atcacgcgatgttgactgcacaggt

SEQ ID NO: 121519 - DNA, 25 bp, probe
atcacaggcatgacaatgctgctac

SEQ ID NO: 121520 - DNA, 25 bp, probe
atcacaggcatgacaatgctgctac

SEQ ID NO: 121521 - DNA, 25 bp, probe
atcacatagcattgatcattgaact

SEQ ID NO: 121522 - DNA, 25 bp, probe
atcaatttctacatgaatatgctga

SEQ ID NO: 121523 - DNA, 25 bp, probe
atcaatttcgtatttctgttcaaca

SEQ ID NO: 121524 - DNA, 25 bp, probe
atcaaatatcgctttacatgttctt

SEQ ID NO: 121525 - DNA, 25 bp, probe
ataaatatttctccagcaaatttga

SEQ ID NO: 121526 - DNA, 25 bp, probe
ataaatatgtttccctatgtgtgtg

SEQ ID NO: 121527 - DNA, 25 bp, probe
atacaatattgtactcagtgttttg

SEQ ID NO: 121528 - DNA, 25 bp, probe
atacaaattgtattgcttattcatt

SEQ ID NO: 121529 - DNA, 25 bp, probe
ataacaatttcatccaattcatctt

SEQ ID NO: 121530 - DNA, 25 bp, probe
ataaccttgtcaaccactacatgtg

SEQ ID NO: 121531 - DNA, 25 bp, probe
ataacttgggccatcctatcatctg

SEQ ID NO: 121532 - DNA, 25 bp, probe
atcaagtcgggaactccataccgaa

SEQ ID NO: 121533 - DNA, 25 bp, probe
ataagaacaagaaccacaacctgaa

SEQ ID NO: 121534 - DNA, 25 bp, probe
ataagaacaagaaccacaacctgaa

SEQ ID NO: 121535 - DNA, 25 bp, probe
atcaaagaaataacccagacttaat

SEQ ID NO: 121536 - DNA, 25 bp, probe
atcaaagtcagtaagccaagaaaaa

SEQ ID NO: 121537 - DNA, 25 bp, probe
ataacaccagtgtagccaaaagaga

SEQ ID NO: 121538 - DNA, 25 bp, probe
atcacacacccgtagccataaaaat

SEQ ID NO: 121539 - DNA, 25 bp, probe
atcacaaactcgaaccaaagtcgtc

SEQ ID NO: 121540 - DNA, 25 bp, probe
atcacaacattcgtgcccaagaacc

SEQ ID NO: 121541 - DNA, 25 bp, probe
ataacagcatctcggaggccaagat

SEQ ID NO: 121542 - DNA, 25 bp, probe
atcaccattcttcgagggaatcatg

SEQ ID NO: 121543 - DNA, 25 bp, probe
ataacagtgccttaaggtatgatgt

SEQ ID NO: 121544 - DNA, 25 bp, probe
ataactgtcgcgtacacatgtgtga

SEQ ID NO: 121545 - DNA, 25 bp, probe
ataacattgggctaatatctgctgt

SEQ ID NO: 121546 - DNA, 25 bp, probe
atcagccgggtgcaatgactcatgc

SEQ ID NO: 121547 - DNA, 25 bp, probe
atcagacagggtagattacctcgga

SEQ ID NO: 121548 - DNA, 25 bp, probe
atcaagagagggatggctaccagga

SEQ ID NO: 121549 - DNA, 25 bp, probe
atcaagagagggatggctaccagga

SEQ ID NO: 121550 - DNA, 25 bp, probe
atcagggtggagatggccattgcga

SEQ ID NO: 121551 - DNA, 25 bp, probe
atcagtgtggtagcttgctcaacag

SEQ ID NO: 121552 - DNA, 25 bp, probe
atcaatgtttaactcagctcaaagg

SEQ ID NO: 121553 - DNA, 25 bp, probe
ataattttgcaactcatgttatggg

SEQ ID NO: 121554 - DNA, 25 bp, probe
ataagtactgggctgttcagggaca

SEQ ID NO: 121555 - DNA, 25 bp, probe
ataagtactggctgtcctcagcctg

SEQ ID NO: 121556 - DNA, 25 bp, probe
ataagtacttgtgtcatccagaatg

SEQ ID NO: 121557 - DNA, 25 bp, probe
ataagcttcggcagtatcacaagaa

SEQ ID NO: 121558 - DNA, 25 bp, probe
ataagcttcggcagtatcacaagaa

SEQ ID NO: 121559 - DNA, 25 bp, probe
ataagtataggattttgcacattga

SEQ ID NO: 121560 - DNA, 25 bp, probe
ataataacatggtcatttccggagt

SEQ ID NO: 121561 - DNA, 25 bp, probe
ataagcacttggaattgtactgggt

SEQ ID NO: 121562 - DNA, 25 bp, probe
ataagctctttgaatgtgtatatta

SEQ ID NO: 121563 - DNA, 25 bp, probe
ataattctggcaatgagagtatttt

SEQ ID NO: 121564 - DNA, 25 bp, probe
ataattctggcaatgagagtatttt

SEQ ID NO: 121565 - DNA, 25 bp, probe
ataatattgccttgatgtttctata

SEQ ID NO: 121566 - DNA, 25 bp, probe
ataatattgccttgatgtttctata

SEQ ID NO: 121567 - DNA, 25 bp, probe
ataacatggctctggatatccttgg

SEQ ID NO: 121568 - DNA, 25 bp, probe
ataaagagctcaagtggtcaccgtg

SEQ ID NO: 121569 - DNA, 25 bp, probe
ataacgcgctcacctattactcgcg

SEQ ID NO: 121570 - DNA, 25 bp, probe
ataaatgcctcatcaagaacccagc

SEQ ID NO: 121571 - DNA, 25 bp, probe
ataaactctccagaacacatccagc

SEQ ID NO: 121572 - DNA, 25 bp, probe
ataatagcttccagtattcattgat

SEQ ID NO: 121573 - DNA, 25 bp, probe
atcaccacctcagagctgttcagga

SEQ ID NO: 121574 - DNA, 25 bp, probe
ataaatattcttagctgtctagaga

SEQ ID NO: 121575 - DNA, 25 bp, probe
ataaagcactttagcatctgttcag

SEQ ID NO: 121576 - DNA, 25 bp, probe
ataaagctgattgtcatgtgattaa

SEQ ID NO: 121577 - DNA, 25 bp, probe
atgaaagccagtgagcctactaacc

SEQ ID NO: 121578 - DNA, 25 bp, probe
atcaagaccagcaagaacccaaacc

SEQ ID NO: 121579 - DNA, 25 bp, probe
atcaaaaccatcaaattgccaaaac

SEQ ID NO: 121580 - DNA, 25 bp, probe
atcaaaaagtacatgctcctcaaga

SEQ ID NO: 121581 - DNA, 25 bp, probe
ataactatttccatgatgcacgccg

SEQ ID NO: 121582 - DNA, 25 bp, probe
ataagcttgttggcctagactgctc

SEQ ID NO: 121583 - DNA, 25 bp, probe
ataagttattcacctgagtatgcaa

SEQ ID NO: 121584 - DNA, 25 bp, probe
ataagtgtgtgttttatactgcaac

SEQ ID NO: 121585 - DNA, 25 bp, probe
ataagtagatctttttcattgcaaa

SEQ ID NO: 121586 - DNA, 25 bp, probe
ataaaaatctttatagtctaagctt

SEQ ID NO: 121587 - DNA, 25 bp, probe
ataaccaaccttacatcaactactc

SEQ ID NO: 121588 - DNA, 25 bp, probe
ataactacccttagcaaacactagc

SEQ ID NO: 121589 - DNA, 25 bp, probe
acgccttccaactcaaaattagcaa

SEQ ID NO: 121590 - DNA, 25 bp, probe
atcaccttatcaaattaaaatggga

SEQ ID NO: 121591 - DNA, 25 bp, probe
atcacctttgccaagtaagagtggt

SEQ ID NO: 121592 - DNA, 25 bp, probe
atcaatgctattaacagtatcaggt

SEQ ID NO: 121593 - DNA, 25 bp, probe
atcaatgctattaacagtatcaggt

SEQ ID NO: 121594 - DNA, 25 bp, probe
atcaatgccatcaactatgccctgg

SEQ ID NO: 121595 - DNA, 25 bp, probe
atcaatgagtctggctatggacgga

SEQ ID NO: 121596 - DNA, 25 bp, probe
atcaccatcctggccatgggccaga

SEQ ID NO: 121597 - DNA, 25 bp, probe
atcactcccacggagacaccatgac

SEQ ID NO: 121598 - DNA, 25 bp, probe
atgaatcccctggatacacggaatg

SEQ ID NO: 121599 - DNA, 25 bp, probe
atcaatcccagcactaactgtaatg

SEQ ID NO: 121600 - DNA, 25 bp, probe
ataaccatgagcactactctaccat

SEQ ID NO: 121601 - DNA, 25 bp, probe
ataatccatacaattctcttcagtt

SEQ ID NO: 121602 - DNA, 25 bp, probe
ataatcgataagtctcagctggatg

SEQ ID NO: 121603 - DNA, 25 bp, probe
ataactactgacttcactggagtct

SEQ ID NO: 121604 - DNA, 25 bp, probe
ataacattcttcgatctctgggatt

SEQ ID NO: 121605 - DNA, 25 bp, probe
ataacattcttcgatctctgggatt

SEQ ID NO: 121606 - DNA, 25 bp, probe
ataatattcgttttctgggttctgg

SEQ ID NO: 121607 - DNA, 25 bp, probe
atcaatattgtttttgctttttctg

SEQ ID NO: 121608 - DNA, 25 bp, probe
ataaacattgtactgttcttttgct

SEQ ID NO: 121609 - DNA, 25 bp, probe
ataaagcatatttcatgtttgattt

SEQ ID NO: 121610 - DNA, 25 bp, probe
ataattctgcttaagctctagtttg

SEQ ID NO: 121611 - DNA, 25 bp, probe
ataattcttttatttgcagtttacg

SEQ ID NO: 121612 - DNA, 25 bp, probe
ataatttccttttctagaggtacat

SEQ ID NO: 121613 - DNA, 25 bp, probe
ataatgctgtcctttagtagcaagt

SEQ ID NO: 121614 - DNA, 25 bp, probe
ataattcagctctaccaggcagcag

SEQ ID NO: 121615 - DNA, 25 bp, probe
ataatctgagaatgccagtgtcaca

SEQ ID NO: 121616 - DNA, 25 bp, probe
ataatctatatcacacagcttcctc

SEQ ID NO: 121617 - DNA, 25 bp, probe
ataataaatagtccatgttacatca

SEQ ID NO: 121618 - DNA, 25 bp, probe
ataataaatagtccatgttacatca

SEQ ID NO: 121619 - DNA, 25 bp, probe
ataaaaagcatgactatttccacca

SEQ ID NO: 121620 - DNA, 25 bp, probe
ataaagaagcacgttgatttcacca

SEQ ID NO: 121621 - DNA, 25 bp, probe
ataatatcgacacagtgctttccgt

SEQ ID NO: 121622 - DNA, 25 bp, probe
ataaactgtaattgtgtttcagtta

SEQ ID NO: 121623 - DNA, 25 bp, probe
ataaacctgtcatgtgcggatcctt

SEQ ID NO: 121624 - DNA, 25 bp, probe
ataaaccctccaagggatctgcttg

SEQ ID NO: 121625 - DNA, 25 bp, probe
ataatgatccctggcaacggacagc

SEQ ID NO: 121626 - DNA, 25 bp, probe
ataaaccctggcactggtcacaaag

SEQ ID NO: 121627 - DNA, 25 bp, probe
ataagaccaatggtggctgttccac

SEQ ID NO: 121628 - DNA, 25 bp, probe
ataacatcatggtcctggtttctac

SEQ ID NO: 121629 - DNA, 25 bp, probe
ataacatcatggtcctggtttctac

SEQ ID NO: 121630 - DNA, 25 bp, probe
ataactctgtacgaggcttctctaa

SEQ ID NO: 121631 - DNA, 25 bp, probe
ataacagcagtatcggccttgtgta

SEQ ID NO: 121632 - DNA, 25 bp, probe
ataacagcagtatcggccttgtgta

SEQ ID NO: 121633 - DNA, 25 bp, probe
ataaaagataacccgttctgtgagt

SEQ ID NO: 121634 - DNA, 25 bp, probe
ataaaagataacccgttctgtgagt

SEQ ID NO: 121635 - DNA, 25 bp, probe
ataataaaccaccctgttctgtgaa

SEQ ID NO: 121636 - DNA, 25 bp, probe
ataaccacccatatctatcctggat

SEQ ID NO: 121637 - DNA, 25 bp, probe
ataacaactcctaatcgtctgcttc

SEQ ID NO: 121638 - DNA, 25 bp, probe
ataaacactgtcttctttcatcttc

SEQ ID NO: 121639 - DNA, 25 bp, probe
ataaacactgccatcatctaaccat

SEQ ID NO: 121640 - DNA, 25 bp, probe
atcatgaagactctctatcacccaa

SEQ ID NO: 121641 - DNA, 25 bp, probe
atcagcatggttgtatagtgcccca

SEQ ID NO: 121642 - DNA, 25 bp, probe
atcagagagaagatggtgtggtcta

SEQ ID NO: 121643 - DNA, 25 bp, probe
atcaaagacaaacctctgagctcca

SEQ ID NO: 121644 - DNA, 25 bp, probe
atcaaacatcaatcatccctgtcca

SEQ ID NO: 121645 - DNA, 25 bp, probe
atcagaacatgcatgaacccttccc

SEQ ID NO: 121646 - DNA, 25 bp, probe
atcaaggagggcttctccttccagc

SEQ ID NO: 121647 - DNA, 25 bp, probe
atcaaggagggcttctccttccagc

SEQ ID NO: 121648 - DNA, 25 bp, probe
atgacatgaagccagcttcccgtcc

SEQ ID NO: 121649 - DNA, 25 bp, probe
atcgagaagtacatcccgtacaccc

SEQ ID NO: 121650 - DNA, 25 bp, probe
atcaccagaataaacccagcttccc

SEQ ID NO: 121651 - DNA, 25 bp, probe
atcaccaagctgaaaccctggtgcc

SEQ ID NO: 121652 - DNA, 25 bp, probe
atcacaaaatacaatatcctggctt

SEQ ID NO: 121653 - DNA, 25 bp, probe
atcacaaaatacaatatcctggctt

SEQ ID NO: 121654 - DNA, 25 bp, probe
atcaaaactagtaatccttatcacc

SEQ ID NO: 121655 - DNA, 25 bp, probe
atcaagagaaagttaccattcagag

SEQ ID NO: 121656 - DNA, 25 bp, probe
atcaggatttagtgacctaattgaa

SEQ ID NO: 121657 - DNA, 25 bp, probe
atcaagctgttatgaacaccagaaa

SEQ ID NO: 121658 - DNA, 25 bp, probe
ataaccatgtgcatggacagccata

SEQ ID NO: 121659 - DNA, 25 bp, probe
ataatccattgtttgaggtgcttgc

SEQ ID NO: 121660 - DNA, 25 bp, probe
ataatccattgtttgaggtgcttgc

SEQ ID NO: 121661 - DNA, 25 bp, probe
ataaccatagtacaggatgatttct

SEQ ID NO: 121662 - DNA, 25 bp, probe
atcacaataagtataggattttgca

SEQ ID NO: 121663 - DNA, 25 bp, probe
atcaagcctagtgtaaatttctgca

SEQ ID NO: 121664 - DNA, 25 bp, probe
atcaaactcagtctcaaactcttaa

SEQ ID NO: 121665 - DNA, 25 bp, probe
atcaaactcagtctcaaactcttaa

SEQ ID NO: 121666 - DNA, 25 bp, probe
ataaacaagatcgtcaggaccaaaa

SEQ ID NO: 121667 - DNA, 25 bp, probe
atcaaaccttcttctggaccaaagc

SEQ ID NO: 121668 - DNA, 25 bp, probe
atcaaatcagtcttccggtctgcag

SEQ ID NO: 121669 - DNA, 25 bp, probe
atcaaaggctgcatccgttctgcca

SEQ ID NO: 121670 - DNA, 25 bp, probe
atcacaaacgactacggtctggaca

SEQ ID NO: 121671 - DNA, 25 bp, probe
atcaccagaccctgggattggctat

SEQ ID NO: 121672 - DNA, 25 bp, probe
atcaccagaccctgggattggctat

SEQ ID NO: 121673 - DNA, 25 bp, probe
atcagccgtaccgggcgatgcttgt

SEQ ID NO: 121674 - DNA, 25 bp, probe
atcacatcagtgcccagagggagtt

SEQ ID NO: 121675 - DNA, 25 bp, probe
atcacagatgtgcccagagtagccc

SEQ ID NO: 121676 - DNA, 25 bp, probe
atcaccagtgtcatagtggcccgga

SEQ ID NO: 121677 - DNA, 25 bp, probe
atcaaactggcctgtggcgacacga

SEQ ID NO: 121678 - DNA, 25 bp, probe
ataacagctgggttcgcaggagcca

SEQ ID NO: 121679 - DNA, 25 bp, probe
ataacagctgtggctcacgtgagag

SEQ ID NO: 121680 - DNA, 25 bp, probe
atcgcactctggtctacggagggat

SEQ ID NO: 121681 - DNA, 25 bp, probe
atcaacttggtcaacagaagctggt

SEQ ID NO: 121682 - DNA, 25 bp, probe
ataatctctgtaccaaatagtaatt

SEQ ID NO: 121683 - DNA, 25 bp, probe
atcacctcgtccacaatagtcaatc

SEQ ID NO: 121684 - DNA, 25 bp, probe
atcacccagcctctgagagcagtta

SEQ ID NO: 121685 - DNA, 25 bp, probe
ataactgcgactatgagcagaggga

SEQ ID NO: 121686 - DNA, 25 bp, probe
acaaccgctttgtgcataaggactt

SEQ ID NO: 121687 - DNA, 25 bp, probe
acaaccgctttgtgcataaggactt

SEQ ID NO: 121688 - DNA, 25 bp, probe
atcggccctttgtgaagacgacgcg

SEQ ID NO: 121689 - DNA, 25 bp, probe
atcggccgggggggatgagggcagg

SEQ ID NO: 121690 - DNA, 25 bp, probe
atcaggcagcgggtagggcacaggg

SEQ ID NO: 121691 - DNA, 25 bp, probe
atcggacggtggtgtgaatattgga

SEQ ID NO: 121692 - DNA, 25 bp, probe
atctggaccggggagtacaaatgcg

SEQ ID NO: 121693 - DNA, 25 bp, probe
atcaagcacaaccggttcacaaagg

SEQ ID NO: 121694 - DNA, 25 bp, probe
atcaatgctaatccgatgggcaaaa

SEQ ID NO: 121695 - DNA, 25 bp, probe
atcaatgctaatccgatgggcaaaa

SEQ ID NO: 121696 - DNA, 25 bp, probe
ataattcagtcacgtggccatacca

SEQ ID NO: 121697 - DNA, 25 bp, probe
ataatgtactcttgctggagaaccg

SEQ ID NO: 121698 - DNA, 25 bp, probe
atcactgtattttcgtaaacacatg

SEQ ID NO: 121699 - DNA, 25 bp, probe
atcacttgatgtaacctggaaacta

SEQ ID NO: 121700 - DNA, 25 bp, probe
atcagttcaggaatcgcggtacaaa

SEQ ID NO: 121701 - DNA, 25 bp, probe
atcagttcaggaatcgcggtacaaa

SEQ ID NO: 121702 - DNA, 25 bp, probe
ataagtcagctgtatctggggccat

SEQ ID NO: 121703 - DNA, 25 bp, probe
ataagctcactggtcgggacttctc

SEQ ID NO: 121704 - DNA, 25 bp, probe
atcaaggcactggacgtctacttct

SEQ ID NO: 121705 - DNA, 25 bp, probe
atcatgagcagctgtcaggactaat

SEQ ID NO: 121706 - DNA, 25 bp, probe
atcaggagcctgtactgcctgaagg

SEQ ID NO: 121707 - DNA, 25 bp, probe
atcagagcccatgaagcccaagatg

SEQ ID NO: 121708 - DNA, 25 bp, probe
atcagcgcttctgcacacagtatat

SEQ ID NO: 121709 - DNA, 25 bp, probe
atcagcgcttctgcacacagtatat

SEQ ID NO: 121710 - DNA, 25 bp, probe
atcacggatttgtacagctatatta

SEQ ID NO: 121711 - DNA, 25 bp, probe
atcacagcaaagaaccaccatctta

SEQ ID NO: 121712 - DNA, 25 bp, probe
ataacatcaggttccagttgcttga

SEQ ID NO: 121713 - DNA, 25 bp, probe
ataacacagaattccatattgctat

SEQ ID NO: 121714 - DNA, 25 bp, probe
ataacacatatttggtatctgatca

SEQ ID NO: 121715 - DNA, 25 bp, probe
ataacagctctattattattcagca

SEQ ID NO: 121716 - DNA, 25 bp, probe
ataacatttaacaagtattgcagta

SEQ ID NO: 121717 - DNA, 25 bp, probe
atcacagtgttatgtagtattgttc

SEQ ID NO: 121718 - DNA, 25 bp, probe
atcacctgttatccttgtttgtaaa

SEQ ID NO: 121719 - DNA, 25 bp, probe
atcaccgattgcccttgtcaactca

SEQ ID NO: 121720 - DNA, 25 bp, probe
atcacctgaacatcattaaactcaa

SEQ ID NO: 121721 - DNA, 25 bp, probe
atcaaacagttggattcagaaccaa

SEQ ID NO: 121722 - DNA, 25 bp, probe
atcaaccaggaggaattcaaaggtt

SEQ ID NO: 121723 - DNA, 25 bp, probe
atcacccagagagggttcggcaggg

SEQ ID NO: 121724 - DNA, 25 bp, probe
atcacccagagagggttcggcaggg

SEQ ID NO: 121725 - DNA, 25 bp, probe
atcaacctcaacttgttcaggacgt

SEQ ID NO: 121726 - DNA, 25 bp, probe
atcacaattcaactttgtcccacct

SEQ ID NO: 121727 - DNA, 25 bp, probe
atcacaattcaactttgtcccacct

SEQ ID NO: 121728 - DNA, 25 bp, probe
aagaattcaattgtggaccccaaag

SEQ ID NO: 121729 - DNA, 25 bp, probe
aaaagtgcaaccatagaacctaaag

SEQ ID NO: 121730 - DNA, 25 bp, probe
aaaagtgcaaccatagaacctaaag

SEQ ID NO: 121731 - DNA, 25 bp, probe
ataatcctgaacattagaaccctaa

SEQ ID NO: 121732 - DNA, 25 bp, probe
atctgtcctgggattcaacccacta

SEQ ID NO: 121733 - DNA, 25 bp, probe
atgcttttctggtttataactacta

SEQ ID NO: 121734 - DNA, 25 bp, probe
atcttttctgtgtgtaaacatagtt

SEQ ID NO: 121735 - DNA, 25 bp, probe
atcttttatttgctcaaaatagcga

SEQ ID NO: 121736 - DNA, 25 bp, probe
atcttttatttgctcaaaatagcga

SEQ ID NO: 121737 - DNA, 25 bp, probe
accagaccacttctcagaaaatgca

SEQ ID NO: 121738 - DNA, 25 bp, probe
atcaggacccgtcctcaataacaat

SEQ ID NO: 121739 - DNA, 25 bp, probe
atcagcggaccatccagaatgacat

SEQ ID NO: 121740 - DNA, 25 bp, probe
atcagcaacgctaccacgaagacat

SEQ ID NO: 121741 - DNA, 25 bp, probe
atcaccagagcaagccatagacagc

SEQ ID NO: 121742 - DNA, 25 bp, probe
atcatccatgacttggcccaagttt

SEQ ID NO: 121743 - DNA, 25 bp, probe
atcatccatgacttggcccaagttt

SEQ ID NO: 121744 - DNA, 25 bp, probe
atcaccaatttgggctctcagagct

SEQ ID NO: 121745 - DNA, 25 bp, probe
atcaccaaggtcatatgaaactaac

SEQ ID NO: 121746 - DNA, 25 bp, probe
atcaacacaggccgctaggaagcag

SEQ ID NO: 121747 - DNA, 25 bp, probe
atcagaatctgtcggccaaaagcgg

SEQ ID NO: 121748 - DNA, 25 bp, probe
atcgggaaggagacacatatcacag

SEQ ID NO: 121749 - DNA, 25 bp, probe
atccggaacctgattttagttctgt

SEQ ID NO: 121750 - DNA, 25 bp, probe
atcagagttaccattatttaatttg

SEQ ID NO: 121751 - DNA, 25 bp, probe
ataatagtacctttgattatacatt

SEQ ID NO: 121752 - DNA, 25 bp, probe
ataactgtaccaaggaataagtatg

SEQ ID NO: 121753 - DNA, 25 bp, probe
ataactgtaccaaggaataagtatg

SEQ ID NO: 121754 - DNA, 25 bp, probe
atcaccttcctcaaggatttcagtt

SEQ ID NO: 121755 - DNA, 25 bp, probe
atcatccttcccaaggattccgctt

SEQ ID NO: 121756 - DNA, 25 bp, probe
atcaccattggcaatgagcggttcc

SEQ ID NO: 121757 - DNA, 25 bp, probe
atcagtgtccagcgtgctggttccc

SEQ ID NO: 121758 - DNA, 25 bp, probe
atcagtcaccagttttggaaccagt

SEQ ID NO: 121759 - DNA, 25 bp, probe
atcaatcccgttttgacatgttcac

SEQ ID NO: 121760 - DNA, 25 bp, probe
atcacaccaagactttattgttagg

SEQ ID NO: 121761 - DNA, 25 bp, probe
ataacccagacttaatcttgaatga

SEQ ID NO: 121762 - DNA, 25 bp, probe
atcacacccatgttaaatcccttga

SEQ ID NO: 121763 - DNA, 25 bp, probe
atcatccgcctttacgaagtggtgg

SEQ ID NO: 121764 - DNA, 25 bp, probe
atcagctgccatattacgacttagt

SEQ ID NO: 121765 - DNA, 25 bp, probe
atcagcgtcaacatgcagtaaaggt

SEQ ID NO: 121766 - DNA, 25 bp, probe
atcagcgtcaacatgcagtaaaggt

SEQ ID NO: 121767 - DNA, 25 bp, probe
atcacagtaaccaactctaaagttt

SEQ ID NO: 121768 - DNA, 25 bp, probe
atcacagtgactcccaccaagaagt

SEQ ID NO: 121769 - DNA, 25 bp, probe
atcaatgtacatgccaacataaata

SEQ ID NO: 121770 - DNA, 25 bp, probe
atcatctttccatcaggccaaagaa

SEQ ID NO: 121771 - DNA, 25 bp, probe
atcagctctgttcatgagtgctcag

SEQ ID NO: 121772 - DNA, 25 bp, probe
atcagcactgtcataaagctcaact

SEQ ID NO: 121773 - DNA, 25 bp, probe
atcagcactgtcataaagctcaact

SEQ ID NO: 121774 - DNA, 25 bp, probe
ataatgctgatacttacatgtaagt

SEQ ID NO: 121775 - DNA, 25 bp, probe
ataatgctgatacttacatgtaagt

SEQ ID NO: 121776 - DNA, 25 bp, probe
ataactgatgagatacatttgatct

SEQ ID NO: 121777 - DNA, 25 bp, probe
ataagctcatcaatttcatttctat

SEQ ID NO: 121778 - DNA, 25 bp, probe
ataatgcagcctcttaattctttga

SEQ ID NO: 121779 - DNA, 25 bp, probe
ataatgcagcctcttaattctttga

SEQ ID NO: 121780 - DNA, 25 bp, probe
ataaggccctaatgatgctctttaa

SEQ ID NO: 121781 - DNA, 25 bp, probe
ataatgagccgttaagtcttttctg

SEQ ID NO: 121782 - DNA, 25 bp, probe
ataagtaagaagtagtgtttccatg

SEQ ID NO: 121783 - DNA, 25 bp, probe
atcatcaccaggaggagtgtttaat

SEQ ID NO: 121784 - DNA, 25 bp, probe
atcaccccagcaacaggttctttag

SEQ ID NO: 121785 - DNA, 25 bp, probe
atcaacaccacaacaggagtcttcg

SEQ ID NO: 121786 - DNA, 25 bp, probe
ataaccacaaggccgacatcagctc

SEQ ID NO: 121787 - DNA, 25 bp, probe
ataaccacaaggccgacatcagctc

SEQ ID NO: 121788 - DNA, 25 bp, probe
ataaggagcaagggcgcacagagcc

SEQ ID NO: 121789 - DNA, 25 bp, probe
ataaggatgaagccgcgtgcagtgg

SEQ ID NO: 121790 - DNA, 25 bp, probe
ataaccatgaccagcattgcaggga

SEQ ID NO: 121791 - DNA, 25 bp, probe
atcaagctagacttcaaggcgggat

SEQ ID NO: 121792 - DNA, 25 bp, probe
atcaagctagacttcaaggcgggat

SEQ ID NO: 121793 - DNA, 25 bp, probe
atcaagctcaacgttctggagtggc

SEQ ID NO: 121794 - DNA, 25 bp, probe
atcaatgccaactacatccggggct

SEQ ID NO: 121795 - DNA, 25 bp, probe
atcacccgagagaacctggaggcac

SEQ ID NO: 121796 - DNA, 25 bp, probe
atcaccggagtcagtctatagcgca

SEQ ID NO: 121797 - DNA, 25 bp, probe
atcaacggcgacattcgggcgaaga

SEQ ID NO: 121798 - DNA, 25 bp, probe
atcaactctgtaaactctcgggaaa

SEQ ID NO: 121799 - DNA, 25 bp, probe
atcaactctgtaaactctcgggaaa

SEQ ID NO: 121800 - DNA, 25 bp, probe
atcaagcatctggttgaccttctgg

SEQ ID NO: 121801 - DNA, 25 bp, probe
atcaagcatctggttgaccttctgg

SEQ ID NO: 121802 - DNA, 25 bp, probe
atcaacacgcacctgggcattggtg

SEQ ID NO: 121803 - DNA, 25 bp, probe
ataagtctcagctggatgcagtgaa

SEQ ID NO: 121804 - DNA, 25 bp, probe
atcagcagttactggacaggaccag

SEQ ID NO: 121805 - DNA, 25 bp, probe
atcactgttggctgctagggacaca

SEQ ID NO: 121806 - DNA, 25 bp, probe
atcactgttggctgctagggacaca

SEQ ID NO: 121807 - DNA, 25 bp, probe
atcactgtggccgagcaaaggagca

SEQ ID NO: 121808 - DNA, 25 bp, probe
atcagcttgcaaggagataggagct

SEQ ID NO: 121809 - DNA, 25 bp, probe
atcacggccatggatgccaatagtc

SEQ ID NO: 121810 - DNA, 25 bp, probe
atcagtagccaggaccagagtggcc

SEQ ID NO: 121811 - DNA, 25 bp, probe
ataataccagtgtgatgtcaggcca

SEQ ID NO: 121812 - DNA, 25 bp, probe
atcatatactcgagacttaccgcat

SEQ ID NO: 121813 - DNA, 25 bp, probe
atcaatgaccccttcattgacctca

SEQ ID NO: 121814 - DNA, 25 bp, probe
atcaaaccccatgcaatcatcatcc

SEQ ID NO: 121815 - DNA, 25 bp, probe
atcaacccaactgaagcatttcaat

SEQ ID NO: 121816 - DNA, 25 bp, probe
atcacacccaactacagtgtttcca

SEQ ID NO: 121817 - DNA, 25 bp, probe
atcactgcgcaggagaaagattttc

SEQ ID NO: 121818 - DNA, 25 bp, probe
atcatctggagccctagtatctaat

SEQ ID NO: 121819 - DNA, 25 bp, probe
atcacatggaccccgtataacatca

SEQ ID NO: 121820 - DNA, 25 bp, probe
atcacatggaccccgtataacatca

SEQ ID NO: 121821 - DNA, 25 bp, probe
atcagctgtgtcgcacttaaactgg

SEQ ID NO: 121822 - DNA, 25 bp, probe
atcagtggcgatgactttatttgcg

SEQ ID NO: 121823 - DNA, 25 bp, probe
atcactggctactacatccttgtag

SEQ ID NO: 121824 - DNA, 25 bp, probe
atcactcagctccttgatattttag

SEQ ID NO: 121825 - DNA, 25 bp, probe
atcacatatcctgtgaactcctagc

SEQ ID NO: 121826 - DNA, 25 bp, probe
atcaatgaatgagaggacttctatg

SEQ ID NO: 121827 - DNA, 25 bp, probe
ataatggtcaggtgccatgtgctgt

SEQ ID NO: 121828 - DNA, 25 bp, probe
atcaatggcttttcagccatggcta

SEQ ID NO: 121829 - DNA, 25 bp, probe
atcaatggcttttcagccatggcta

SEQ ID NO: 121830 - DNA, 25 bp, probe
atcaatgctgaagttagcctactct

SEQ ID NO: 121831 - DNA, 25 bp, probe
atcaatgctgaagttagcctactct

SEQ ID NO: 121832 - DNA, 25 bp, probe
atcacttgaacttcagtgccctcac

SEQ ID NO: 121833 - DNA, 25 bp, probe
atcactgtacaggtctggaaccacc

SEQ ID NO: 121834 - DNA, 25 bp, probe
atcactgtacaggtctggaaccacc

SEQ ID NO: 121835 - DNA, 25 bp, probe
atcacgttccgtgagcagacacaaa

SEQ ID NO: 121836 - DNA, 25 bp, probe
atcacctctctcatggaagaaccaa

SEQ ID NO: 121837 - DNA, 25 bp, probe
atcaccacttactgacagaagcagg

SEQ ID NO: 121838 - DNA, 25 bp, probe
atcaacagccttcgcaacaaagagg

SEQ ID NO: 121839 - DNA, 25 bp, probe
atcacgctgtttgggcccaagagga

SEQ ID NO: 121840 - DNA, 25 bp, probe
atcaggttgttgtgaagagcaagga

SEQ ID NO: 121841 - DNA, 25 bp, probe
atcagccatgtgcctgaaaacacaa

SEQ ID NO: 121842 - DNA, 25 bp, probe
atcactctctggcaaatgactacca

SEQ ID NO: 121843 - DNA, 25 bp, probe
atcccagtcaggaattactaagctc

SEQ ID NO: 121844 - DNA, 25 bp, probe
atcaccctaaatttactcatctctc

SEQ ID NO: 121845 - DNA, 25 bp, probe
atcaatagtcaaaatgtactttcta

SEQ ID NO: 121846 - DNA, 25 bp, probe
atcaatttcacatcaaaacttctga

SEQ ID NO: 121847 - DNA, 25 bp, probe
atcagtgattcattcccaaatcttc

SEQ ID NO: 121848 - DNA, 25 bp, probe
atcagtgacttcaagcctggatctt

SEQ ID NO: 121849 - DNA, 25 bp, probe
atcagcaacattccagtcttgaatt

SEQ ID NO: 121850 - DNA, 25 bp, probe
ataagatcatccgactttatgatta

SEQ ID NO: 121851 - DNA, 25 bp, probe
ataatgcatgatgcctcttccagtt

SEQ ID NO: 121852 - DNA, 25 bp, probe
atcaagagagaccttctacaggatc

SEQ ID NO: 121853 - DNA, 25 bp, probe
atcaagattgacattttccctgcca

SEQ ID NO: 121854 - DNA, 25 bp, probe
ataagtatcttcatgtatccctgtt

SEQ ID NO: 121855 - DNA, 25 bp, probe
ataagtatcttcatgtatccctgtt

SEQ ID NO: 121856 - DNA, 25 bp, probe
ataagtatcttcatgtatccctgtt

SEQ ID NO: 121857 - DNA, 25 bp, probe
ataagtatctatttaatcttttgta

SEQ ID NO: 121858 - DNA, 25 bp, probe
ataagtattatctctatttttcaga

SEQ ID NO: 121859 - DNA, 25 bp, probe
ataagtattatctctatttttcaga

SEQ ID NO: 121860 - DNA, 25 bp, probe
atcactggattaagcccttttctac

SEQ ID NO: 121861 - DNA, 25 bp, probe
atcacatggatatcctttagttctt

SEQ ID NO: 121862 - DNA, 25 bp, probe
atcacatggatatcctttagttctt

SEQ ID NO: 121863 - DNA, 25 bp, probe
ataatgccatcttcagttttggttt

SEQ ID NO: 121864 - DNA, 25 bp, probe
atcaatgcacatcttggtattgagc

SEQ ID NO: 121865 - DNA, 25 bp, probe
atcaatgagaacatggtcttggccg

SEQ ID NO: 121866 - DNA, 25 bp, probe
atcacggagtacatgttctgtgccg

SEQ ID NO: 121867 - DNA, 25 bp, probe
atcacggccttcatggatggtgcct

SEQ ID NO: 121868 - DNA, 25 bp, probe
atcaccgagttcattgagaatggct

SEQ ID NO: 121869 - DNA, 25 bp, probe
atcaccgagggcctggaggtgcact

SEQ ID NO: 121870 - DNA, 25 bp, probe
atcacctgaggtcaggagttcaaga

SEQ ID NO: 121871 - DNA, 25 bp, probe
atcaaggattcctgggtgctcaagt

SEQ ID NO: 121872 - DNA, 25 bp, probe
atcacagagatttcaaaaactcaca

SEQ ID NO: 121873 - DNA, 25 bp, probe
atcaagatcacccacaagaaccaga

SEQ ID NO: 121874 - DNA, 25 bp, probe
atcaggaacgcctcgatacgctgga

SEQ ID NO: 121875 - DNA, 25 bp, probe
atcagtggacgacgccttacagcat

SEQ ID NO: 121876 - DNA, 25 bp, probe
atcagtaactggtcatggtcatgca

SEQ ID NO: 121877 - DNA, 25 bp, probe
atcaggacagtgagctctgctgcca

SEQ ID NO: 121878 - DNA, 25 bp, probe
atcaggaagatgctgcgtatccaga

SEQ ID NO: 121879 - DNA, 25 bp, probe
atcaagaagaaccgccatcctgact

SEQ ID NO: 121880 - DNA, 25 bp, probe
atcacaaaaacactgctctgcattg

SEQ ID NO: 121881 - DNA, 25 bp, probe
atcatgcacggaggcctgttcagtg

SEQ ID NO: 121882 - DNA, 25 bp, probe
atcaagccagaggccagtcagatgc

SEQ ID NO: 121883 - DNA, 25 bp, probe
atcactggcagacgcatgggcacat

SEQ ID NO: 121884 - DNA, 25 bp, probe
atcacggcaatgcggctgcactggt

SEQ ID NO: 121885 - DNA, 25 bp, probe
atcacagagaagggcccactgggtg

SEQ ID NO: 121886 - DNA, 25 bp, probe
atcacagagaaagctcgagcactgg

SEQ ID NO: 121887 - DNA, 25 bp, probe
atcaccagcaaacgccaggacttgg

SEQ ID NO: 121888 - DNA, 25 bp, probe
atcaccatgacgacggtggactatg

SEQ ID NO: 121889 - DNA, 25 bp, probe
atcaccatgacgacggtggactatg

SEQ ID NO: 121890 - DNA, 25 bp, probe
atcaccatccctgacttgactgatg

SEQ ID NO: 121891 - DNA, 25 bp, probe
atcaccttactagtttgcagtgctg

SEQ ID NO: 121892 - DNA, 25 bp, probe
atcaccttactagtttgcagtgctg

SEQ ID NO: 121893 - DNA, 25 bp, probe
atcacgcttagcatcgtgctggagc

SEQ ID NO: 121894 - DNA, 25 bp, probe
atcacatacaagatcattcggcatg

SEQ ID NO: 121895 - DNA, 25 bp, probe
atcaatagagacgatgtcacgtatt

SEQ ID NO: 121896 - DNA, 25 bp, probe
atcagtcaatacaagtcacatgggt

SEQ ID NO: 121897 - DNA, 25 bp, probe
atcacaaatctgtagtagcatgggt

SEQ ID NO: 121898 - DNA, 25 bp, probe
ataatcacatcttggagaattggat

SEQ ID NO: 121899 - DNA, 25 bp, probe
atcagcatcacctagaaacttgtta

SEQ ID NO: 121900 - DNA, 25 bp, probe
atcagacctcaataattttatactg

SEQ ID NO: 121901 - DNA, 25 bp, probe
atcagacctcaataattttatactg

SEQ ID NO: 121902 - DNA, 25 bp, probe
atcaccccagaatagttaaactcta

SEQ ID NO: 121903 - DNA, 25 bp, probe
atcaccaacaaatggtttcaaccca

SEQ ID NO: 121904 - DNA, 25 bp, probe
atcaaaaacaaacgatattcttctc

SEQ ID NO: 121905 - DNA, 25 bp, probe
atcaaaaagaaccggcatcctgact

SEQ ID NO: 121906 - DNA, 25 bp, probe
atcaaggaattcagggcactcatga

SEQ ID NO: 121907 - DNA, 25 bp, probe
atgggtaattttgtgcacatggcag

SEQ ID NO: 121908 - DNA, 25 bp, probe
atgggtaattttgtgcacatggcag

SEQ ID NO: 121909 - DNA, 25 bp, probe
atcaggtcaattcttatcagataag

SEQ ID NO: 121910 - DNA, 25 bp, probe
atcaagaccattgtttcatgttaat

SEQ ID NO: 121911 - DNA, 25 bp, probe
ataatacattgtgttatatgttcaa

SEQ ID NO: 121912 - DNA, 25 bp, probe
atcaatcactttgtctgtgagacct

SEQ ID NO: 121913 - DNA, 25 bp, probe
atcaacctgttttgttggactccta

SEQ ID NO: 121914 - DNA, 25 bp, probe
ataatccttgttagagttatccctg

SEQ ID NO: 121915 - DNA, 25 bp, probe
atcaatcctcttttgatgtctgcag

SEQ ID NO: 121916 - DNA, 25 bp, probe
atcaagattttttcattctcgtgac

SEQ ID NO: 121917 - DNA, 25 bp, probe
atcaatttcttaacatgagctccag

SEQ ID NO: 121918 - DNA, 25 bp, probe
atcaagatgatcaaagaaggctcca

SEQ ID NO: 121919 - DNA, 25 bp, probe
atcatatgtagcatcacaaactcga

SEQ ID NO: 121920 - DNA, 25 bp, probe
atcatcatttgcttcaagccccgaa

SEQ ID NO: 121921 - DNA, 25 bp, probe
atcatgctgttgctcatggcgatgc

SEQ ID NO: 121922 - DNA, 25 bp, probe
atcagcttcttgtgtggtgtcatcg

SEQ ID NO: 121923 - DNA, 25 bp, probe
atcagcattctctaacttgtttggt

SEQ ID NO: 121924 - DNA, 25 bp, probe
atcatcaggctctaccaggttatgg

SEQ ID NO: 121925 - DNA, 25 bp, probe
atcatcaggctctaccaggttatgg

SEQ ID NO: 121926 - DNA, 25 bp, probe
atcaagtgtattgctggttctgctg

SEQ ID NO: 121927 - DNA, 25 bp, probe
ataatgctgacgttcttgcttttgg

SEQ ID NO: 121928 - DNA, 25 bp, probe
ataatctgaggtttggcatgtcctg

SEQ ID NO: 121929 - DNA, 25 bp, probe
atcaatcaaccttttgtgtcacgag

SEQ ID NO: 121930 - DNA, 25 bp, probe
accccatcctttatgtcctaattag

SEQ ID NO: 121931 - DNA, 25 bp, probe
atcttccaacttttctggcggaatt

SEQ ID NO: 121932 - DNA, 25 bp, probe
atcttccaacttttctggcggaatt

SEQ ID NO: 121933 - DNA, 25 bp, probe
atcttctctactttcattggggagc

SEQ ID NO: 121934 - DNA, 25 bp, probe
atctggtgtagctccttcggagaca

SEQ ID NO: 121935 - DNA, 25 bp, probe
atgttggaatccgacttggggacca

SEQ ID NO: 121936 - DNA, 25 bp, probe
atcttggaatatgcccgttggtcta

SEQ ID NO: 121937 - DNA, 25 bp, probe
atccaagaattcccctgaaggacgt

SEQ ID NO: 121938 - DNA, 25 bp, probe
atgggaaattgatccaaaggacctg

SEQ ID NO: 121939 - DNA, 25 bp, probe
atgagggaaataagcaaagagggca

SEQ ID NO: 121940 - DNA, 25 bp, probe
atcagctgctgaaacaacaaatagg

SEQ ID NO: 121941 - DNA, 25 bp, probe
atcagagtgctacaacataaaactg

SEQ ID NO: 121942 - DNA, 25 bp, probe
atcaagtcttctgatctcagataac

SEQ ID NO: 121943 - DNA, 25 bp, probe
atcacatgtattaaattcttctgtc

SEQ ID NO: 121944 - DNA, 25 bp, probe
atcacaggattttgttatgttactc

SEQ ID NO: 121945 - DNA, 25 bp, probe
atcaagaatatctgagtcatttttc

SEQ ID NO: 121946 - DNA, 25 bp, probe
atcaatcaattcatatctatttatt

SEQ ID NO: 121947 - DNA, 25 bp, probe
atcagatcaaccctgatgcttgctt

SEQ ID NO: 121948 - DNA, 25 bp, probe
atcagatggaccctgatgcctgctt

SEQ ID NO: 121949 - DNA, 25 bp, probe
atcagatggaccctgatgcctgctt

SEQ ID NO: 121950 - DNA, 25 bp, probe
atcagcaggaggcctcatgtcctcc

SEQ ID NO: 121951 - DNA, 25 bp, probe
atcagcaggaggcctcatgtcctcc

SEQ ID NO: 121952 - DNA, 25 bp, probe
atcaccgagcgcttgatgtgcgcgg

SEQ ID NO: 121953 - DNA, 25 bp, probe
atcatcaggagcctgtactgcctga

SEQ ID NO: 121954 - DNA, 25 bp, probe
atcacgtgcatttgctatgtgccgt

SEQ ID NO: 121955 - DNA, 25 bp, probe
atcacagatgctgtgaaggtcgtgg

SEQ ID NO: 121956 - DNA, 25 bp, probe
atcaagatgtcccaggtcctgggaa

SEQ ID NO: 121957 - DNA, 25 bp, probe
atcagaagtcgcagctctggtggga

SEQ ID NO: 121958 - DNA, 25 bp, probe
atcaagcagttcatggcgagaggga

SEQ ID NO: 121959 - DNA, 25 bp, probe
atcaggagtgtctaaggcagatggg

SEQ ID NO: 121960 - DNA, 25 bp, probe
atcagagcgtgcagacggaggatgg

SEQ ID NO: 121961 - DNA, 25 bp, probe
atcatgagtgcgtggctggggacag

SEQ ID NO: 121962 - DNA, 25 bp, probe
atcatggacgcacctgtggggagca

SEQ ID NO: 121963 - DNA, 25 bp, probe
atcgaaccgtctctgagtggctcga

SEQ ID NO: 121964 - DNA, 25 bp, probe
atcggttggtgccactgaatggcta

SEQ ID NO: 121965 - DNA, 25 bp, probe
atcggctttttgcctacggcatagt

SEQ ID NO: 121966 - DNA, 25 bp, probe
atcggctttttgcctacggcatagt

SEQ ID NO: 121967 - DNA, 25 bp, probe
atcagggttcttagctagcagtttt

SEQ ID NO: 121968 - DNA, 25 bp, probe
atcagggtgtggtagaacactttca

SEQ ID NO: 121969 - DNA, 25 bp, probe
atcaagggtgaggcagagacccgcg

SEQ ID NO: 121970 - DNA, 25 bp, probe
atcaacgtctggtatgacccagccg

SEQ ID NO: 121971 - DNA, 25 bp, probe
atcatagccctgcttactaaaagta

SEQ ID NO: 121972 - DNA, 25 bp, probe
atcaaatcctgctttggcgacaaaa

SEQ ID NO: 121973 - DNA, 25 bp, probe
atcaaacacctcttgctagcaaaga

SEQ ID NO: 121974 - DNA, 25 bp, probe
atcacaacagcagcctcttcgaaat

SEQ ID NO: 121975 - DNA, 25 bp, probe
atcacaaccaccgttacaagtatac

SEQ ID NO: 121976 - DNA, 25 bp, probe
atcagaagctcaaacttcctggtaa

SEQ ID NO: 121977 - DNA, 25 bp, probe
atcagaagcctgtggtcaaagtaga

SEQ ID NO: 121978 - DNA, 25 bp, probe
atcactatccgatgcaccaaactaa

SEQ ID NO: 121979 - DNA, 25 bp, probe
atcacacatccagacctaaagctac

SEQ ID NO: 121980 - DNA, 25 bp, probe
atcacagctaaggaactactagata

SEQ ID NO: 121981 - DNA, 25 bp, probe
atcacactcacacagttgactatct

SEQ ID NO: 121982 - DNA, 25 bp, probe
atcacactcacacagttgactatct

SEQ ID NO: 121983 - DNA, 25 bp, probe
atcagcaatcttcagttcatctcct

SEQ ID NO: 121984 - DNA, 25 bp, probe
atcagtttgcattggcttctcattt

SEQ ID NO: 121985 - DNA, 25 bp, probe
atcaaatttcgccttacattgcatc

SEQ ID NO: 121986 - DNA, 25 bp, probe
atcaaagactcattgcttaattcta

SEQ ID NO: 121987 - DNA, 25 bp, probe
atcaatctggcttctgcattactat

SEQ ID NO: 121988 - DNA, 25 bp, probe
atcatttctgcatcagctgctgaaa

SEQ ID NO: 121989 - DNA, 25 bp, probe
atcaacatcatattcagcccatcac

SEQ ID NO: 121990 - DNA, 25 bp, probe
atcaactctaacaactcatccaaga

SEQ ID NO: 121991 - DNA, 25 bp, probe
atgtacgttacagctttcacagagt

SEQ ID NO: 121992 - DNA, 25 bp, probe
atgctaagtctaacactcctgggag

SEQ ID NO: 121993 - DNA, 25 bp, probe
atcttgggcagaacataccgggtgg

SEQ ID NO: 121994 - DNA, 25 bp, probe
atcttaggcgcttcaggcggagttg

SEQ ID NO: 121995 - DNA, 25 bp, probe
atcttaacctcctgcctaggatttg

SEQ ID NO: 121996 - DNA, 25 bp, probe
atctaaacctgccacggatcgaatg

SEQ ID NO: 121997 - DNA, 25 bp, probe
atctgtaacctgctcactgaaactg

SEQ ID NO: 121998 - DNA, 25 bp, probe
atcatgaattttaggactgggactg

SEQ ID NO: 121999 - DNA, 25 bp, probe
atcatgaattttaggactgggactg

SEQ ID NO: 122000 - DNA, 25 bp, probe
atcagactctctaaggactggaagg

SEQ ID NO: 122001 - DNA, 25 bp, probe
atcagctcctctgagggtccagagc

SEQ ID NO: 122002 - DNA, 25 bp, probe
atcagtcacctgggagagctcaaac

SEQ ID NO: 122003 - DNA, 25 bp, probe
atcagtcacctgggagagctcaaac

SEQ ID NO: 122004 - DNA, 25 bp, probe
atcacccctgagcagagcaaacgca

SEQ ID NO: 122005 - DNA, 25 bp, probe
atcaccacggtgctgacgatgacca

SEQ ID NO: 122006 - DNA, 25 bp, probe
atcatagcacttcggtgccgagagc

SEQ ID NO: 122007 - DNA, 25 bp, probe
atcaagcactatgagatactcgagg

SEQ ID NO: 122008 - DNA, 25 bp, probe
atcaagcgctacgagacgctggagg

SEQ ID NO: 122009 - DNA, 25 bp, probe
atcacagcgcctgcagaggtggagg

SEQ ID NO: 122010 - DNA, 25 bp, probe
atcacagctcatgccgaggtggagg

SEQ ID NO: 122011 - DNA, 25 bp, probe
atcaagtacaagggctgctgcgagg

SEQ ID NO: 122012 - DNA, 25 bp, probe
atcaaatgataactggaagctgagg

SEQ ID NO: 122013 - DNA, 25 bp, probe
atcacctcatcgatgcagaatctga

SEQ ID NO: 122014 - DNA, 25 bp, probe
atcacctcatcgatgcagaatctga

SEQ ID NO: 122015 - DNA, 25 bp, probe
atcacctgcattgttaatgctacca

SEQ ID NO: 122016 - DNA, 25 bp, probe
atcacctgcattgttaatgctacca

SEQ ID NO: 122017 - DNA, 25 bp, probe
atcatcctatatggccggatctacc

SEQ ID NO: 122018 - DNA, 25 bp, probe
atcacatctatatccaagttacctc

SEQ ID NO: 122019 - DNA, 25 bp, probe
atcaaatgcattgccaaggaggccc

SEQ ID NO: 122020 - DNA, 25 bp, probe
atcatcggcttggtactgaaaccct

SEQ ID NO: 122021 - DNA, 25 bp, probe
atcatcggcttggtactgaaaccct

SEQ ID NO: 122022 - DNA, 25 bp, probe
atcatgatgcgctgctggaaaaacc

SEQ ID NO: 122023 - DNA, 25 bp, probe
atcatgggcggcaggatctgaactc

SEQ ID NO: 122024 - DNA, 25 bp, probe
atcgggctaagactttaactcagag

SEQ ID NO: 122025 - DNA, 25 bp, probe
atcaggtcaaagattttgcccaact

SEQ ID NO: 122026 - DNA, 25 bp, probe
atcatggatcagttttctttcgctc

SEQ ID NO: 122027 - DNA, 25 bp, probe
atcacgacaaggatatgatgtccgc

SEQ ID NO: 122028 - DNA, 25 bp, probe
atcatcaaagggcccattgtcctct

SEQ ID NO: 122029 - DNA, 25 bp, probe
atcatcaaatggccaatctagaacg

SEQ ID NO: 122030 - DNA, 25 bp, probe
atcacaatatgccaagtataacctg

SEQ ID NO: 122031 - DNA, 25 bp, probe
atcaaagtgccataacagcaactga

SEQ ID NO: 122032 - DNA, 25 bp, probe
atcaaagtgccataacagcaactga

SEQ ID NO: 122033 - DNA, 25 bp, probe
atcaaaaccaagtcgcagctgagcg

SEQ ID NO: 122034 - DNA, 25 bp, probe
atcaaaaccaagtcgcagctgagcg

SEQ ID NO: 122035 - DNA, 25 bp, probe
atcaaaaacactctcactatgctgc

SEQ ID NO: 122036 - DNA, 25 bp, probe
atcacaacaacctatgtcactgact

SEQ ID NO: 122037 - DNA, 25 bp, probe
atcaaagcagacatcgtccatgcct

SEQ ID NO: 122038 - DNA, 25 bp, probe
atcaaggctgacatcgtgcacgcct

SEQ ID NO: 122039 - DNA, 25 bp, probe
atcaatggaaatcccatcaccatct

SEQ ID NO: 122040 - DNA, 25 bp, probe
atcagtggaacttctgtactacaac

SEQ ID NO: 122041 - DNA, 25 bp, probe
atcactgcgcaagttgttacatctc

SEQ ID NO: 122042 - DNA, 25 bp, probe
atcacgggttgaattcacattccct

SEQ ID NO: 122043 - DNA, 25 bp, probe
atcacgggttgaattcacattccct

SEQ ID NO: 122044 - DNA, 25 bp, probe
atcagcctggttgagctcaaatccc

SEQ ID NO: 122045 - DNA, 25 bp, probe
atcacctacctgggcatcaaggcca

SEQ ID NO: 122046 - DNA, 25 bp, probe
atcaactactcaaggacggtgcaat

SEQ ID NO: 122047 - DNA, 25 bp, probe
atcacaccactaatgacttagtgca

SEQ ID NO: 122048 - DNA, 25 bp, probe
atcacaccactaatgacttagtgca

SEQ ID NO: 122049 - DNA, 25 bp, probe
atcacagtgcacaatattcttaaaa

SEQ ID NO: 122050 - DNA, 25 bp, probe
atcaagctacagaatgtcagtaaat

SEQ ID NO: 122051 - DNA, 25 bp, probe
atcaagctacagaatgtcagtaaat

SEQ ID NO: 122052 - DNA, 25 bp, probe
atcagtgctacaggctttgtacaaa

SEQ ID NO: 122053 - DNA, 25 bp, probe
atcaggcttatccgatgtgctacat

SEQ ID NO: 122054 - DNA, 25 bp, probe
atcaagtccatcctgagtatcatga

SEQ ID NO: 122055 - DNA, 25 bp, probe
atcaagtccatcctgagtatcatga

SEQ ID NO: 122056 - DNA, 25 bp, probe
atcaatgttctcctccatacagagt

SEQ ID NO: 122057 - DNA, 25 bp, probe
gaattaactcgtgctaaggggtcgg

SEQ ID NO: 122058 - DNA, 25 bp, probe
agattacctcggataccacaagtgc

SEQ ID NO: 122059 - DNA, 25 bp, probe
aattggccttggggactactcggct

SEQ ID NO: 122060 - DNA, 25 bp, probe
ggtctaccttagagcaaacccagta

SEQ ID NO: 122061 - DNA, 25 bp, probe
gtgtctttttagtggagtcgtagta

SEQ ID NO: 122062 - DNA, 25 bp, probe
atctttttctactcgagttacagac

SEQ ID NO: 122063 - DNA, 25 bp, probe
atctttttctactcgagttacagac

SEQ ID NO: 122064 - DNA, 25 bp, probe
atcactttgtctatcctcattttaa

SEQ ID NO: 122065 - DNA, 25 bp, probe
atcactttgtctatcctcattttaa

SEQ ID NO: 122066 - DNA, 25 bp, probe
atcagtttccacatcctatgtacta

SEQ ID NO: 122067 - DNA, 25 bp, probe
atcgatttatcaatcccgttttgac

SEQ ID NO: 122068 - DNA, 25 bp, probe
atcaagatattttccggctttatgt

SEQ ID NO: 122069 - DNA, 25 bp, probe
atcacagtagtttttgtgttttgtt

SEQ ID NO: 122070 - DNA, 25 bp, probe
atcacgaggtgtaatttttaatttg

SEQ ID NO: 122071 - DNA, 25 bp, probe
atcacccgtggacttatttgacctt

SEQ ID NO: 122072 - DNA, 25 bp, probe
atcactttggggcctcattaaccct

SEQ ID NO: 122073 - DNA, 25 bp, probe
atcactttgcatgtgactattttcc

SEQ ID NO: 122074 - DNA, 25 bp, probe
atcagcttgtatgtgaagatctttg

SEQ ID NO: 122075 - DNA, 25 bp, probe
atcagcttcattttcaacttctgtg

SEQ ID NO: 122076 - DNA, 25 bp, probe
atcatgatctgactttaattgtgtg

SEQ ID NO: 122077 - DNA, 25 bp, probe
atcaagatcacattgtcagcttttg

SEQ ID NO: 122078 - DNA, 25 bp, probe
atcaagatgactaccagctggttcg

SEQ ID NO: 122079 - DNA, 25 bp, probe
atcaagcagacggccgctgtgtgac

SEQ ID NO: 122080 - DNA, 25 bp, probe
atcacacgcacgtcagcgatgttcc

SEQ ID NO: 122081 - DNA, 25 bp, probe
atcagcatgatgggacgcgtggtca

SEQ ID NO: 122082 - DNA, 25 bp, probe
atcagcatatttttgccatggtaat

SEQ ID NO: 122083 - DNA, 25 bp, probe
atcagcaagtttcgccatcagaaca

SEQ ID NO: 122084 - DNA, 25 bp, probe
atcacactggttggtcatcaaaaga

SEQ ID NO: 122085 - DNA, 25 bp, probe
atcaacgaggaggattctagagtga

SEQ ID NO: 122086 - DNA, 25 bp, probe
atcaacaaggagggccatgtgaaga

SEQ ID NO: 122087 - DNA, 25 bp, probe
atcaacgaggacccgggcaagaatg

SEQ ID NO: 122088 - DNA, 25 bp, probe
atcaagcggtccgaggtggaagaag

SEQ ID NO: 122089 - DNA, 25 bp, probe
atcctggtagctgaggggcggaaga

SEQ ID NO: 122090 - DNA, 25 bp, probe
atgcttgagtacgaaccggccaaga

SEQ ID NO: 122091 - DNA, 25 bp, probe
ccttgaaaaaactggagtcagaaga

SEQ ID NO: 122092 - DNA, 25 bp, probe
ctttacttaacgtggatcaaaatca

SEQ ID NO: 122093 - DNA, 25 bp, probe
ctttacttaacgtggatcaaaatca

SEQ ID NO: 122094 - DNA, 25 bp, probe
atcttacattagtgattccatcaaa

SEQ ID NO: 122095 - DNA, 25 bp, probe
atcttacctagatatctcagcttgg

SEQ ID NO: 122096 - DNA, 25 bp, probe
atcttacctagatatctcagcttgg

SEQ ID NO: 122097 - DNA, 25 bp, probe
atcttgtactattttcatcgtggga

SEQ ID NO: 122098 - DNA, 25 bp, probe
atctttacttacttttcaggctgct

SEQ ID NO: 122099 - DNA, 25 bp, probe
atctttggctgatgttcttagccct

SEQ ID NO: 122100 - DNA, 25 bp, probe
atcattttgtactatttactccaca

SEQ ID NO: 122101 - DNA, 25 bp, probe
atctactttgtcatttatccaccac

SEQ ID NO: 122102 - DNA, 25 bp, probe
atcttgttttaccctatacatccac

SEQ ID NO: 122103 - DNA, 25 bp, probe
atcagttttgtttactcatcctcca

SEQ ID NO: 122104 - DNA, 25 bp, probe
atcagaactgcgtattacaatccgg

SEQ ID NO: 122105 - DNA, 25 bp, probe
atcaaactcattgtcactgtcctgg

SEQ ID NO: 122106 - DNA, 25 bp, probe
atcacccttatagtaatgtgctctg

SEQ ID NO: 122107 - DNA, 25 bp, probe
atccctttgaaagctggcagtacct

SEQ ID NO: 122108 - DNA, 25 bp, probe
atcaccgaaaacggcgtgcatggca

SEQ ID NO: 122109 - DNA, 25 bp, probe
atcagccggacaacattgggatgct

SEQ ID NO: 122110 - DNA, 25 bp, probe
atcagccacccaatgactggcgtat

SEQ ID NO: 122111 - DNA, 25 bp, probe
atggtccccaagacctctatatttg

SEQ ID NO: 122112 - DNA, 25 bp, probe
atggtacctagtctttgaatttgtt

SEQ ID NO: 122113 - DNA, 25 bp, probe
atcaccaccggtgtttccatatttt

SEQ ID NO: 122114 - DNA, 25 bp, probe
atcaaacgtgttatattccatactt

SEQ ID NO: 122115 - DNA, 25 bp, probe
atcaaactttctaggtgttaagata

SEQ ID NO: 122116 - DNA, 25 bp, probe
atcaacacttttattcttaagcatt

SEQ ID NO: 122117 - DNA, 25 bp, probe
atcaccattcttatgtcactttaga

SEQ ID NO: 122118 - DNA, 25 bp, probe
atcaaatgccttcatgaatctttca

SEQ ID NO: 122119 - DNA, 25 bp, probe
atcaaccctgtcatatatgctttca

SEQ ID NO: 122120 - DNA, 25 bp, probe
atcaaccctgtcatatatgctttca

SEQ ID NO: 122121 - DNA, 25 bp, probe
atcaactctttcagattgcctttct

SEQ ID NO: 122122 - DNA, 25 bp, probe
atcaaaggattgggcactttttctt

SEQ ID NO: 122123 - DNA, 25 bp, probe
atcacaaggtgctggcacttattgc

SEQ ID NO: 122124 - DNA, 25 bp, probe
atcatcaagcgggaagccttgctca

SEQ ID NO: 122125 - DNA, 25 bp, probe
atcatcaaggattcctgggtgctca

SEQ ID NO: 122126 - DNA, 25 bp, probe
atcaaaggtcacgtgcggttcattg

SEQ ID NO: 122127 - DNA, 25 bp, probe
atcacacggttctctgaggtctggg

SEQ ID NO: 122128 - DNA, 25 bp, probe
atctacggtttcgagggtgaggtga

SEQ ID NO: 122129 - DNA, 25 bp, probe
atctgattgagacttcggcacgtaa

SEQ ID NO: 122130 - DNA, 25 bp, probe
atcagactgatgatttggctaaaga

SEQ ID NO: 122131 - DNA, 25 bp, probe
atcaactgcaaactgctggtccata

SEQ ID NO: 122132 - DNA, 25 bp, probe
atcaactgcaaactgctggtccata

SEQ ID NO: 122133 - DNA, 25 bp, probe
atcaaagaatagctgcaatctccat

SEQ ID NO: 122134 - DNA, 25 bp, probe
atcacatgcatgttaggaaactcca

SEQ ID NO: 122135 - DNA, 25 bp, probe
atcactgtgatttgtacatatgccc

SEQ ID NO: 122136 - DNA, 25 bp, probe
atcacgctgtggtttgatgatgcgc

SEQ ID NO: 122137 - DNA, 25 bp, probe
atcagcagcttgcgggagatcacgc

SEQ ID NO: 122138 - DNA, 25 bp, probe
atcagcagctcgggggcactgatgg

SEQ ID NO: 122139 - DNA, 25 bp, probe
atcagcattccagcagcagcatttg

SEQ ID NO: 122140 - DNA, 25 bp, probe
atcacagatgcagccaccatgaaga

SEQ ID NO: 122141 - DNA, 25 bp, probe
atcacttcagtgatccatgcataga

SEQ ID NO: 122142 - DNA, 25 bp, probe
atcacttcagtgatccatgcataga

SEQ ID NO: 122143 - DNA, 25 bp, probe
atcactcctatcacaagtgcaaatg

SEQ ID NO: 122144 - DNA, 25 bp, probe
atcactcttataccaagggcaagcg

SEQ ID NO: 122145 - DNA, 25 bp, probe
atcacttaaacaggaggcaggggtt

SEQ ID NO: 122146 - DNA, 25 bp, probe
atcagctgtgaatcgtcagggggtg

SEQ ID NO: 122147 - DNA, 25 bp, probe
atgaatgtaaactcgggggtgctgg

SEQ ID NO: 122148 - DNA, 25 bp, probe
atggttaaaatagcggcctgtgccc

SEQ ID NO: 122149 - DNA, 25 bp, probe
atcctttacactctagtggtcgccc

SEQ ID NO: 122150 - DNA, 25 bp, probe
atcactaaagtccttcaggtgtcct

SEQ ID NO: 122151 - DNA, 25 bp, probe
atcactaacacatatagggcttcct

SEQ ID NO: 122152 - DNA, 25 bp, probe
acgatattcagatttcggccttagt

SEQ ID NO: 122153 - DNA, 25 bp, probe
atctgtattcaggttacccttctgt

SEQ ID NO: 122154 - DNA, 25 bp, probe
atcacagcagtgagttacgactttg

SEQ ID NO: 122155 - DNA, 25 bp, probe
atcacagcagtgagttacgactttg

SEQ ID NO: 122156 - DNA, 25 bp, probe
atcagctcagtgtgttactggttta

SEQ ID NO: 122157 - DNA, 25 bp, probe
atcagctgaggtttttttcagtatg

SEQ ID NO: 122158 - DNA, 25 bp, probe
atcacatgagggtttcttgttgctt

SEQ ID NO: 122159 - DNA, 25 bp, probe
atcactgtgatgtttgtattctttt

SEQ ID NO: 122160 - DNA, 25 bp, probe
atcactggatgaacttgaagatctt

SEQ ID NO: 122161 - DNA, 25 bp, probe
atcactttggacagatatgacatct

SEQ ID NO: 122162 - DNA, 25 bp, probe
atcagctatgggccagcttatgacc

SEQ ID NO: 122163 - DNA, 25 bp, probe
atcagctatgggccagcttatgacc

SEQ ID NO: 122164 - DNA, 25 bp, probe
atcagcttgggctatgccaacagct

SEQ ID NO: 122165 - DNA, 25 bp, probe
atcagattcacggacccagagcttt

SEQ ID NO: 122166 - DNA, 25 bp, probe
atcacttacaggtaccatttatttc

SEQ ID NO: 122167 - DNA, 25 bp, probe
atcttgtggtggtcaccattttcta

SEQ ID NO: 122168 - DNA, 25 bp, probe
atctactggatttccgtagtattga

SEQ ID NO: 122169 - DNA, 25 bp, probe
atcatcacatggaccccgtataaca

SEQ ID NO: 122170 - DNA, 25 bp, probe
atcatcaaggtggccaaggagaaca

SEQ ID NO: 122171 - DNA, 25 bp, probe
atcatccacagttacacggaaagca

SEQ ID NO: 122172 - DNA, 25 bp, probe
atcaccatcattgagcaccagaagt

SEQ ID NO: 122173 - DNA, 25 bp, probe
atcagtatctacaagcacctaattc

SEQ ID NO: 122174 - DNA, 25 bp, probe
atcactgtctacaacaccaacatcg

SEQ ID NO: 122175 - DNA, 25 bp, probe
atcactgttagcaactccaaaatct

SEQ ID NO: 122176 - DNA, 25 bp, probe
atcagctatcttattccaaaactac

SEQ ID NO: 122177 - DNA, 25 bp, probe
atcacttgctatccattaagaagac

SEQ ID NO: 122178 - DNA, 25 bp, probe
atcacacgctacaccaagaagacct

SEQ ID NO: 122179 - DNA, 25 bp, probe
atcacaggctcagggcaaagaagtg

SEQ ID NO: 122180 - DNA, 25 bp, probe
atcaccaacggtgaagaagtggtag

SEQ ID NO: 122181 - DNA, 25 bp, probe
atcaccaagcggagacgcaaggcct

SEQ ID NO: 122182 - DNA, 25 bp, probe
atcactcgtgcccaaagaaagggcc

SEQ ID NO: 122183 - DNA, 25 bp, probe
atcactgccacccagaagactgtgg

SEQ ID NO: 122184 - DNA, 25 bp, probe
atcacgcccggagtagaagcgcata

SEQ ID NO: 122185 - DNA, 25 bp, probe
atcacacatccagagctaaagccac

SEQ ID NO: 122186 - DNA, 25 bp, probe
atcagatcatccacagttacacgga

SEQ ID NO: 122187 - DNA, 25 bp, probe
atcagtaccacttttgctacgatgt

SEQ ID NO: 122188 - DNA, 25 bp, probe
atcagtaccactctgtgcacggagt

SEQ ID NO: 122189 - DNA, 25 bp, probe
atcatctatgccttcgttggggaga

SEQ ID NO: 122190 - DNA, 25 bp, probe
atcaaaggattcagcatgtggtgga

SEQ ID NO: 122191 - DNA, 25 bp, probe
atcagaagtatgccttgctgtggat

SEQ ID NO: 122192 - DNA, 25 bp, probe
atcaaagtctgttctggcggcattg

SEQ ID NO: 122193 - DNA, 25 bp, probe
atcaaagctctgtttgtgtctgagg

SEQ ID NO: 122194 - DNA, 25 bp, probe
atcacagagatccagtctattcaag

SEQ ID NO: 122195 - DNA, 25 bp, probe
atcacggaccagtacatctacatgg

SEQ ID NO: 122196 - DNA, 25 bp, probe
atcagccgcatcgagtatatccact

SEQ ID NO: 122197 - DNA, 25 bp, probe
atcacaccatgccatgttttccttc

SEQ ID NO: 122198 - DNA, 25 bp, probe
atcactctcagcatgttgtctgctc

SEQ ID NO: 122199 - DNA, 25 bp, probe
atcactgcacatccgtagttatgct

SEQ ID NO: 122200 - DNA, 25 bp, probe
atcactcactgttgtagcttctgtt

SEQ ID NO: 122201 - DNA, 25 bp, probe
atcacgccgtattacatctctgtgt

SEQ ID NO: 122202 - DNA, 25 bp, probe
atcacgccgtattacatctctgtgt

SEQ ID NO: 122203 - DNA, 25 bp, probe
atcagccggattttgttattgatat

SEQ ID NO: 122204 - DNA, 25 bp, probe
atcacattggtatgtttatgctgat

SEQ ID NO: 122205 - DNA, 25 bp, probe
atcacttgagatcaggagttcgaga

SEQ ID NO: 122206 - DNA, 25 bp, probe
atcatcaggaaccgggcttcaggac

SEQ ID NO: 122207 - DNA, 25 bp, probe
atctacgacaagcgctgcgacctgt

SEQ ID NO: 122208 - DNA, 25 bp, probe
atcaaatccgactggctaggctgct

SEQ ID NO: 122209 - DNA, 25 bp, probe
atctatactccaagcgactagaccg

SEQ ID NO: 122210 - DNA, 25 bp, probe
atcttacttctatatcattaggaaa

SEQ ID NO: 122211 - DNA, 25 bp, probe
atcttggctcccagagctctaggaa

SEQ ID NO: 122212 - DNA, 25 bp, probe
atcattaactccagccttatgcaga

SEQ ID NO: 122213 - DNA, 25 bp, probe
atcgtaattcatccgttgtatcaga

SEQ ID NO: 122214 - DNA, 25 bp, probe
atcgtaattcatccgttgtatcaga

SEQ ID NO: 122215 - DNA, 25 bp, probe
atcacaatgagattccagtttacaa

SEQ ID NO: 122216 - DNA, 25 bp, probe
atcagcaggatattccgcatttaca

SEQ ID NO: 122217 - DNA, 25 bp, probe
atcacaaaagattccatctcccaac

SEQ ID NO: 122218 - DNA, 25 bp, probe
atcagcataaagatcactcatccca

SEQ ID NO: 122219 - DNA, 25 bp, probe
atcagcataaagatcactcatccca

SEQ ID NO: 122220 - DNA, 25 bp, probe
atcagcccatgaactccataggcca

SEQ ID NO: 122221 - DNA, 25 bp, probe
atcagctcctattctccagtggaga

SEQ ID NO: 122222 - DNA, 25 bp, probe
atcactcacttcttctgcgatgtga

SEQ ID NO: 122223 - DNA, 25 bp, probe
atcactgacttcaatctgtgcctgc

SEQ ID NO: 122224 - DNA, 25 bp, probe
atcagaaattcattttcctgcacat

SEQ ID NO: 122225 - DNA, 25 bp, probe
atcatgggcattactttcctggcag

SEQ ID NO: 122226 - DNA, 25 bp, probe
atcatgatgccaacctcttacgtgc

SEQ ID NO: 122227 - DNA, 25 bp, probe
atcatgtacttcgcttaagtttcta

SEQ ID NO: 122228 - DNA, 25 bp, probe
atcagtacattgcttgtcaagggcc

SEQ ID NO: 122229 - DNA, 25 bp, probe
atcagtgtcttgcctagcttgaggg

SEQ ID NO: 122230 - DNA, 25 bp, probe
atcagtgtcttgcctagcttgaggg

SEQ ID NO: 122231 - DNA, 25 bp, probe
atcaggaatcttaacttcatgtgag

SEQ ID NO: 122232 - DNA, 25 bp, probe
atcacatgaatgttagtattctgga

SEQ ID NO: 122233 - DNA, 25 bp, probe
atcacatgaatgttagtattctgga

SEQ ID NO: 122234 - DNA, 25 bp, probe
atctagacctctctgattgctgatg

SEQ ID NO: 122235 - DNA, 25 bp, probe
atctaggcaacatagtattcatgac

SEQ ID NO: 122236 - DNA, 25 bp, probe
atctaggcaacatagtattcatgac

SEQ ID NO: 122237 - DNA, 25 bp, probe
atctaccatacccattgactaacta

SEQ ID NO: 122238 - DNA, 25 bp, probe
atctacaagcacctaattctaccaa

SEQ ID NO: 122239 - DNA, 25 bp, probe
atctatgaaacggattactaccgga

SEQ ID NO: 122240 - DNA, 25 bp, probe
atcattaatgacgccttcaacctgg

SEQ ID NO: 122241 - DNA, 25 bp, probe
atctacttggctgccttcaattttg

SEQ ID NO: 122242 - DNA, 25 bp, probe
atctttgtggtcatctactgggttg

SEQ ID NO: 122243 - DNA, 25 bp, probe
atctttgtggtcatctactgggttg

SEQ ID NO: 122244 - DNA, 25 bp, probe
atctttgagcttgtggaggtggtcg

SEQ ID NO: 122245 - DNA, 25 bp, probe
atcttcctggtggttgggatgttcc

SEQ ID NO: 122246 - DNA, 25 bp, probe
atgttcctaatgggttcgtttcaga

SEQ ID NO: 122247 - DNA, 25 bp, probe
atcttggtatgggctgttctgtttc

SEQ ID NO: 122248 - DNA, 25 bp, probe
atctatccctggggtcactcattta

SEQ ID NO: 122249 - DNA, 25 bp, probe
atctatccctggggtcactcattta

SEQ ID NO: 122250 - DNA, 25 bp, probe
atgctttccttggagccaaatttaa

SEQ ID NO: 122251 - DNA, 25 bp, probe
atctttcccacctaaaaatgtctga

SEQ ID NO: 122252 - DNA, 25 bp, probe
atctttccatcaggccaaagaatcc

SEQ ID NO: 122253 - DNA, 25 bp, probe
atctatttgctggagtctaggaatt

SEQ ID NO: 122254 - DNA, 25 bp, probe
atcagatttctaaattacatgccat

SEQ ID NO: 122255 - DNA, 25 bp, probe
atcacatacctcatcattaatcttt

SEQ ID NO: 122256 - DNA, 25 bp, probe
atcattcccatcctcataatttaca

SEQ ID NO: 122257 - DNA, 25 bp, probe
atctatgccacagcaatgcttttaa

SEQ ID NO: 122258 - DNA, 25 bp, probe
atctggctaaggcatcattttcacc

SEQ ID NO: 122259 - DNA, 25 bp, probe
atctggctaaggcatcattttcacc

SEQ ID NO: 122260 - DNA, 25 bp, probe
atcaggtaaactgatgctttcagat

SEQ ID NO: 122261 - DNA, 25 bp, probe
atcactaccaacaattttctgcaat

SEQ ID NO: 122262 - DNA, 25 bp, probe
atccagaccaacgattttctcagtt

SEQ ID NO: 122263 - DNA, 25 bp, probe
atcttacccgcaggttttcagatct

SEQ ID NO: 122264 - DNA, 25 bp, probe
atcatcaacctctcggtagtagatc

SEQ ID NO: 122265 - DNA, 25 bp, probe
atcatgaacccccaggtgtgtattc

SEQ ID NO: 122266 - DNA, 25 bp, probe
atcatggtggtggccagcgtgtgtt

SEQ ID NO: 122267 - DNA, 25 bp, probe
atcatggctgtgagacactggtcct

SEQ ID NO: 122268 - DNA, 25 bp, probe
atcatggctgtgagacactggtcct

SEQ ID NO: 122269 - DNA, 25 bp, probe
atcagcgtgatgaaaacggtgagac

SEQ ID NO: 122270 - DNA, 25 bp, probe
atcagcgtgatgaaaacggtgagac

SEQ ID NO: 122271 - DNA, 25 bp, probe
atcacctgacagtaactttcatgac

SEQ ID NO: 122272 - DNA, 25 bp, probe
atcacctgaaacagcttccagagtg

SEQ ID NO: 122273 - DNA, 25 bp, probe
atcatttggaacagtctacaaggga

SEQ ID NO: 122274 - DNA, 25 bp, probe
atctttgagcccattcttctgggtg

SEQ ID NO: 122275 - DNA, 25 bp, probe
atctattcaccaatttctactggat

SEQ ID NO: 122276 - DNA, 25 bp, probe
atcatccaactctatgtttacatgt

SEQ ID NO: 122277 - DNA, 25 bp, probe
atcagaagactgtttcttactctgt

SEQ ID NO: 122278 - DNA, 25 bp, probe
atcagaagactgtttcttactctgt

SEQ ID NO: 122279 - DNA, 25 bp, probe
atcagatggtctttaaatgtctctt

SEQ ID NO: 122280 - DNA, 25 bp, probe
atcagatggtctttaaatgtctctt

SEQ ID NO: 122281 - DNA, 25 bp, probe
atcaggtgtcaacaattgatcttct

SEQ ID NO: 122282 - DNA, 25 bp, probe
atcagggaacatgaatggtttaaac

SEQ ID NO: 122283 - DNA, 25 bp, probe
atcagagaacaagaacttcatttca

SEQ ID NO: 122284 - DNA, 25 bp, probe
atcaggccaaagaatccttctcttc

SEQ ID NO: 122285 - DNA, 25 bp, probe
atcagcgtaagaggtggctgtactg

SEQ ID NO: 122286 - DNA, 25 bp, probe
atcagcccaggaggggcaggttccc

SEQ ID NO: 122287 - DNA, 25 bp, probe
atcggcacagctgtggccaggtata

SEQ ID NO: 122288 - DNA, 25 bp, probe
atcactcaagctgtaatgaggatca

SEQ ID NO: 122289 - DNA, 25 bp, probe
atcactcaagtgcacaacagcttcc

SEQ ID NO: 122290 - DNA, 25 bp, probe
atcactcaagtgcacaacagcttcc

SEQ ID NO: 122291 - DNA, 25 bp, probe
atcactgaaccagacacagcattgc

SEQ ID NO: 122292 - DNA, 25 bp, probe
atcatctaaccattacagcctgtat

SEQ ID NO: 122293 - DNA, 25 bp, probe
atcagctgtggcatattacctgtaa

SEQ ID NO: 122294 - DNA, 25 bp, probe
atcagctgttgcttgaaacctgtta

SEQ ID NO: 122295 - DNA, 25 bp, probe
atcagtgtagagaaaaccgtgaaga

SEQ ID NO: 122296 - DNA, 25 bp, probe
atcaggatcaggtgaaaagatcaag

SEQ ID NO: 122297 - DNA, 25 bp, probe
atcaggaaagctcaatcagatacaa

SEQ ID NO: 122298 - DNA, 25 bp, probe
atcatgtaaatgctcaaagatgtaa

SEQ ID NO: 122299 - DNA, 25 bp, probe
atcagggcaagctcatagcacatgt

SEQ ID NO: 122300 - DNA, 25 bp, probe
atcagggcaagctcatagcacatgt

SEQ ID NO: 122301 - DNA, 25 bp, probe
atcatggtacagtagtagatcagct

SEQ ID NO: 122302 - DNA, 25 bp, probe
atcatggttcgggcgagcaatgctg

SEQ ID NO: 122303 - DNA, 25 bp, probe
atcactgtgtagggggacagctgtg

SEQ ID NO: 122304 - DNA, 25 bp, probe
atcactcgtgtgagcctaactgcta

SEQ ID NO: 122305 - DNA, 25 bp, probe
atcagctagctgtattcctaaacaa

SEQ ID NO: 122306 - DNA, 25 bp, probe
atcagctggttattgctaacataga

SEQ ID NO: 122307 - DNA, 25 bp, probe
atcagtggtgtctgaaatcatatta

SEQ ID NO: 122308 - DNA, 25 bp, probe
atcagctgaatcaacgaggaggatt

SEQ ID NO: 122309 - DNA, 25 bp, probe
atcatgctgaactccaagggctata

SEQ ID NO: 122310 - DNA, 25 bp, probe
atctatgtcacagctaaggagcatg

SEQ ID NO: 122311 - DNA, 25 bp, probe
atcatgggcaaggcaagggaattcc

SEQ ID NO: 122312 - DNA, 25 bp, probe
atctgggcggccattgagagctttg

SEQ ID NO: 122313 - DNA, 25 bp, probe
atctgggcggccattgagagctttg

SEQ ID NO: 122314 - DNA, 25 bp, probe
atctgggtcctggtgtggaccggaa

SEQ ID NO: 122315 - DNA, 25 bp, probe
atcattcctgcctgggaatcctgga

SEQ ID NO: 122316 - DNA, 25 bp, probe
atcattccatggcaccaaacgctgg

SEQ ID NO: 122317 - DNA, 25 bp, probe
atcattccatggcaccaaacgctgg

SEQ ID NO: 122318 - DNA, 25 bp, probe
atcttgccccagaccggcagcctgg

SEQ ID NO: 122319 - DNA, 25 bp, probe
atctacttgaagtcctgaagctcgc

SEQ ID NO: 122320 - DNA, 25 bp, probe
atctcctggaatgcttaatggacct

SEQ ID NO: 122321 - DNA, 25 bp, probe
atcagcctgtgtttttaatgaactt

SEQ ID NO: 122322 - DNA, 25 bp, probe
atcacctctgtctagttacaggacg

SEQ ID NO: 122323 - DNA, 25 bp, probe
atccctgcgacctgaaaggcattgg

SEQ ID NO: 122324 - DNA, 25 bp, probe
atccctgcgacctgaaaggcattgg

SEQ ID NO: 122325 - DNA, 25 bp, probe
atctcctccaaataccagatactgt

SEQ ID NO: 122326 - DNA, 25 bp, probe
cttttcaataaacaagatcgtcagg

SEQ ID NO: 122327 - DNA, 25 bp, probe
atgctgtgtagataagtaagaagta

SEQ ID NO: 122328 - DNA, 25 bp, probe
atcagtacagatgaaggcaaatgtt

SEQ ID NO: 122329 - DNA, 25 bp, probe
atcaggacacaaaagagtacatatt

SEQ ID NO: 122330 - DNA, 25 bp, probe
atcaggacacaaaagagtacatatt

SEQ ID NO: 122331 - DNA, 25 bp, probe
atcatggacaaaacctgctggaatt

SEQ ID NO: 122332 - DNA, 25 bp, probe
atcagagaaagcaccgctcacaact

SEQ ID NO: 122333 - DNA, 25 bp, probe
atcagaaatggttggcctgagcaac

SEQ ID NO: 122334 - DNA, 25 bp, probe
atcaccacggatttcagcagaggac

SEQ ID NO: 122335 - DNA, 25 bp, probe
atcgtcacggtctcgggagacgggc

SEQ ID NO: 122336 - DNA, 25 bp, probe
atcgtgactttgcgggagaactgga

SEQ ID NO: 122337 - DNA, 25 bp, probe
atcagtgacttagggctaggaacat

SEQ ID NO: 122338 - DNA, 25 bp, probe
atcattgactttgggctggctagaa

SEQ ID NO: 122339 - DNA, 25 bp, probe
atcattgactttgggctggctagaa

SEQ ID NO: 122340 - DNA, 25 bp, probe
atcagtgacctcagtagcctcaaat

SEQ ID NO: 122341 - DNA, 25 bp, probe
atcagtgatcctattcagcagatat

SEQ ID NO: 122342 - DNA, 25 bp, probe
atcatggatccgctctactgatctt

SEQ ID NO: 122343 - DNA, 25 bp, probe
atcatggatccgctctactgatctt

SEQ ID NO: 122344 - DNA, 25 bp, probe
atcagtgtggagccttacatactgg

SEQ ID NO: 122345 - DNA, 25 bp, probe
atcagatccagatgttacaacgggc

SEQ ID NO: 122346 - DNA, 25 bp, probe
atcagcatcctgatttgaaccctga

SEQ ID NO: 122347 - DNA, 25 bp, probe
atcagccctgtgtataaagccatta

SEQ ID NO: 122348 - DNA, 25 bp, probe
atcccctgttaaaataatcaatggc

SEQ ID NO: 122349 - DNA, 25 bp, probe
atccaactgttatactaccagaagg

SEQ ID NO: 122350 - DNA, 25 bp, probe
atctcactttttccagtatacaaag

SEQ ID NO: 122351 - DNA, 25 bp, probe
atctccatcctttttgttatatggg

SEQ ID NO: 122352 - DNA, 25 bp, probe
atctccatcctttttgttatatggg

SEQ ID NO: 122353 - DNA, 25 bp, probe
atcatccctctattattcttaaatg

SEQ ID NO: 122354 - DNA, 25 bp, probe
atcatcccttcagctattgggaatt

SEQ ID NO: 122355 - DNA, 25 bp, probe
atcagccctcaagctatgctaggaa

SEQ ID NO: 122356 - DNA, 25 bp, probe
atcagccccatagtgctcaggaggc

SEQ ID NO: 122357 - DNA, 25 bp, probe
atcacctgccatctgaaggtcactc

SEQ ID NO: 122358 - DNA, 25 bp, probe
atgcaccaggtctcaaggttctcat

SEQ ID NO: 122359 - DNA, 25 bp, probe
atcaccacagtcttaacgatgacca

SEQ ID NO: 122360 - DNA, 25 bp, probe
atcaccacagtcttaacgatgacca

SEQ ID NO: 122361 - DNA, 25 bp, probe
atctcccgtcatccagggagaccag

SEQ ID NO: 122362 - DNA, 25 bp, probe
atcttccagaatctggggagctgca

SEQ ID NO: 122363 - DNA, 25 bp, probe
atcttctagaagcataagtgtctca

SEQ ID NO: 122364 - DNA, 25 bp, probe
atcttcgtggagtcagaactgcctc

SEQ ID NO: 122365 - DNA, 25 bp, probe
atcttggtagaggagagcaacgtgc

SEQ ID NO: 122366 - DNA, 25 bp, probe
atcttaagtgaggaggcatgggccc

SEQ ID NO: 122367 - DNA, 25 bp, probe
atcttcaaggtgggagacgactgcc

SEQ ID NO: 122368 - DNA, 25 bp, probe
atctaccggacagagagccacgtct

SEQ ID NO: 122369 - DNA, 25 bp, probe
atctaccggacagagagccacgtct

SEQ ID NO: 122370 - DNA, 25 bp, probe
atcttcaagaacttcaacctctttc

SEQ ID NO: 122371 - DNA, 25 bp, probe
atcatactaaacttcacctacatta

SEQ ID NO: 122372 - DNA, 25 bp, probe
atctagtactgcaactgccagaact

SEQ ID NO: 122373 - DNA, 25 bp, probe
atctagttaccaatgctgcagtcct

SEQ ID NO: 122374 - DNA, 25 bp, probe
atctcagcttcttcaggcggtagct

SEQ ID NO: 122375 - DNA, 25 bp, probe
atccgattcttggtctctgaacttg

SEQ ID NO: 122376 - DNA, 25 bp, probe
atccaaccctctgctgctgaagagg

SEQ ID NO: 122377 - DNA, 25 bp, probe
atcgatagccctagccctagataga

SEQ ID NO: 122378 - DNA, 25 bp, probe
atcgaaactctcatccgcgatatgt

SEQ ID NO: 122379 - DNA, 25 bp, probe
atcagccaacacgttatcagcagat

SEQ ID NO: 122380 - DNA, 25 bp, probe
atcagcagcaattgcctctgaaaga

SEQ ID NO: 122381 - DNA, 25 bp, probe
atctctgcaagactcatcgccaaag

SEQ ID NO: 122382 - DNA, 25 bp, probe
atcatcagcaagtttcgccatcaga

SEQ ID NO: 122383 - DNA, 25 bp, probe
atcatgctcaagttgtggctcaagc

SEQ ID NO: 122384 - DNA, 25 bp, probe
atcagacatcagttgagcactgcaa

SEQ ID NO: 122385 - DNA, 25 bp, probe
atcagacatcagttgagcactgcaa

SEQ ID NO: 122386 - DNA, 25 bp, probe
atcagagcaaggcgctatggtcagg

SEQ ID NO: 122387 - DNA, 25 bp, probe
atcagaagagagcccttggtaacca

SEQ ID NO: 122388 - DNA, 25 bp, probe
atcagcaggcggctattggtaaacg

SEQ ID NO: 122389 - DNA, 25 bp, probe
atcccaggacgtttgcttacactgg

SEQ ID NO: 122390 - DNA, 25 bp, probe
atcaccaggacagagggtaacactg

SEQ ID NO: 122391 - DNA, 25 bp, probe
atcaccaaggcctgggatcaacctg

SEQ ID NO: 122392 - DNA, 25 bp, probe
atcatccatctacttggggatcgac

SEQ ID NO: 122393 - DNA, 25 bp, probe
atcttcattagttggagtgtccctg

SEQ ID NO: 122394 - DNA, 25 bp, probe
atcttcattagttggagtgtccctg

SEQ ID NO: 122395 - DNA, 25 bp, probe
atcttcatgaagggcgcgacccgcg

SEQ ID NO: 122396 - DNA, 25 bp, probe
atcttctatgagatggccacaggcc

SEQ ID NO: 122397 - DNA, 25 bp, probe
atcttctctgtgagatcccacactt

SEQ ID NO: 122398 - DNA, 25 bp, probe
atctccctgatagaccaatcagctg

SEQ ID NO: 122399 - DNA, 25 bp, probe
atctaccgagattgaccttcacgtg

SEQ ID NO: 122400 - DNA, 25 bp, probe
atctatcctaaatgttcccttgaag

SEQ ID NO: 122401 - DNA, 25 bp, probe
atcctcctgtaatggaacctgtggt

SEQ ID NO: 122402 - DNA, 25 bp, probe
atggtgccttcgtgaaggcttttgt

SEQ ID NO: 122403 - DNA, 25 bp, probe
atctatttgtggtgaatgtgttttt

SEQ ID NO: 122404 - DNA, 25 bp, probe
atctgttcaaagtcgtagggcttat

SEQ ID NO: 122405 - DNA, 25 bp, probe
atctttccaactctacggatttgcc

SEQ ID NO: 122406 - DNA, 25 bp, probe
atctatgatccagccaaacgaattt

SEQ ID NO: 122407 - DNA, 25 bp, probe
atctctgtcacatccaactggaaat

SEQ ID NO: 122408 - DNA, 25 bp, probe
atctctgtgacattacagggaaaaa

SEQ ID NO: 122409 - DNA, 25 bp, probe
atcttgcgttgtatgttgaaaatca

SEQ ID NO: 122410 - DNA, 25 bp, probe
atcttggtaatgatgtcctacgatc

SEQ ID NO: 122411 - DNA, 25 bp, probe
atctttgtttattcctccacagact

SEQ ID NO: 122412 - DNA, 25 bp, probe
atcttttttgtgtatggcaccagaa

SEQ ID NO: 122413 - DNA, 25 bp, probe
atcatctcattaaggccattcccac

SEQ ID NO: 122414 - DNA, 25 bp, probe
atcttgcatatgagtccattcccca

SEQ ID NO: 122415 - DNA, 25 bp, probe
atcttgcatatgagtccattcccca

SEQ ID NO: 122416 - DNA, 25 bp, probe
atcttgtagccattcattgtacctc

SEQ ID NO: 122417 - DNA, 25 bp, probe
atcttggagctggactcgtactccc

SEQ ID NO: 122418 - DNA, 25 bp, probe
atcttggacgtgattggactcccag

SEQ ID NO: 122419 - DNA, 25 bp, probe
atctctggcaccaggggtttcctga

SEQ ID NO: 122420 - DNA, 25 bp, probe
atctctggcaccaggggtttcctga

SEQ ID NO: 122421 - DNA, 25 bp, probe
accgtagccacggcagtgtttttgg

SEQ ID NO: 122422 - DNA, 25 bp, probe
atctttagccaccctgagtttgaag

SEQ ID NO: 122423 - DNA, 25 bp, probe
atcttatgccacgggaagtttagag

SEQ ID NO: 122424 - DNA, 25 bp, probe
atctcttgcaactggtcaaattcga

SEQ ID NO: 122425 - DNA, 25 bp, probe
atctcttgcaactggtcaaattcga

SEQ ID NO: 122426 - DNA, 25 bp, probe
atcatcttaacttggctaacatagc

SEQ ID NO: 122427 - DNA, 25 bp, probe
atcatgtaatatctgtgctctaata

SEQ ID NO: 122428 - DNA, 25 bp, probe
atcatagcaataacattcccactgc

SEQ ID NO: 122429 - DNA, 25 bp, probe
atcatcagcaggatattccgcattt

SEQ ID NO: 122430 - DNA, 25 bp, probe
atcatgagcggcaactaccagtttg

SEQ ID NO: 122431 - DNA, 25 bp, probe
atcatgagggaagagctctgtgtct

SEQ ID NO: 122432 - DNA, 25 bp, probe
atcatgggccacatatcctgtgccc

SEQ ID NO: 122433 - DNA, 25 bp, probe
atcaggtgctccgaatctctgtagc

SEQ ID NO: 122434 - DNA, 25 bp, probe
atcagtgtgctggtgcttgttgtac

SEQ ID NO: 122435 - DNA, 25 bp, probe
atcagggtggatcatgtgcttgagc

SEQ ID NO: 122436 - DNA, 25 bp, probe
atcagggtggatcatgtgcttgagc

SEQ ID NO: 122437 - DNA, 25 bp, probe
atcagagggctgaacatgtccgagt

SEQ ID NO: 122438 - DNA, 25 bp, probe
atcagatgctgagacacatgtctcc

SEQ ID NO: 122439 - DNA, 25 bp, probe
atcagtgtgaaattagtccccagtg

SEQ ID NO: 122440 - DNA, 25 bp, probe
atcattctcaaatgcggcttcgctt

SEQ ID NO: 122441 - DNA, 25 bp, probe
atcattctcaaatgcggcttcgctt

SEQ ID NO: 122442 - DNA, 25 bp, probe
atcatgtttgaatctacattcactt

SEQ ID NO: 122443 - DNA, 25 bp, probe
atcagccttagaacaagaaccttac

SEQ ID NO: 122444 - DNA, 25 bp, probe
atcagccttggaaaatgagcacact

SEQ ID NO: 122445 - DNA, 25 bp, probe
atcagcctgggcaacacagtgagac

SEQ ID NO: 122446 - DNA, 25 bp, probe
atcagcatctgcacaaaggtggaca

SEQ ID NO: 122447 - DNA, 25 bp, probe
atcatgcttgccctagagagtttgc

SEQ ID NO: 122448 - DNA, 25 bp, probe
atcatgcttgccctagagagtttgc

SEQ ID NO: 122449 - DNA, 25 bp, probe
atcttgtccgtgaagatgtattgcc

SEQ ID NO: 122450 - DNA, 25 bp, probe
atctagtcctggaacaattgcacac

SEQ ID NO: 122451 - DNA, 25 bp, probe
atctcagaccttaaccttacaggcc

SEQ ID NO: 122452 - DNA, 25 bp, probe
atcagagacctcagactcttcacag

SEQ ID NO: 122453 - DNA, 25 bp, probe
atcaggactatacctcatttacagt

SEQ ID NO: 122454 - DNA, 25 bp, probe
atcgagccaatacctactgctccaa

SEQ ID NO: 122455 - DNA, 25 bp, probe
atcaggcccaacgtaggcttctgga

SEQ ID NO: 122456 - DNA, 25 bp, probe
atcagtgcccagagggagtttgcgg

SEQ ID NO: 122457 - DNA, 25 bp, probe
atcagagcgccgaggagagtgggaa

SEQ ID NO: 122458 - DNA, 25 bp, probe
atcagcgcgcaagagggcagaccga

SEQ ID NO: 122459 - DNA, 25 bp, probe
atcagtgtctaattgggcaaactaa

SEQ ID NO: 122460 - DNA, 25 bp, probe
atcagtggctacttggtggactctg

SEQ ID NO: 122461 - DNA, 25 bp, probe
atcatgttgtagtttgcacagactt

SEQ ID NO: 122462 - DNA, 25 bp, probe
atcatgttgtagtttgcacagactt

SEQ ID NO: 122463 - DNA, 25 bp, probe
atcagcattatctcggacacatctt

SEQ ID NO: 122464 - DNA, 25 bp, probe
atcagcattatctcggacacatctt

SEQ ID NO: 122465 - DNA, 25 bp, probe
atcagcatcacccgggaactttttt

SEQ ID NO: 122466 - DNA, 25 bp, probe
atcagatcaagtcgggaactccata

SEQ ID NO: 122467 - DNA, 25 bp, probe
atcagatcgagtccaaggcagccta

SEQ ID NO: 122468 - DNA, 25 bp, probe
atcatgtcgagtcactggactctga

SEQ ID NO: 122469 - DNA, 25 bp, probe
atcaggccatggactcaggacctgc

SEQ ID NO: 122470 - DNA, 25 bp, probe
atcagcaccatggaggcaggctccc

SEQ ID NO: 122471 - DNA, 25 bp, probe
atcagctcctggttcatggaagcca

SEQ ID NO: 122472 - DNA, 25 bp, probe
atcatcaccgagttcattgagaatg

SEQ ID NO: 122473 - DNA, 25 bp, probe
atcatctacggctacttcaacgaga

SEQ ID NO: 122474 - DNA, 25 bp, probe
atcatctacaacttcctcagtggca

SEQ ID NO: 122475 - DNA, 25 bp, probe
atcttagatagattcttcaatgata

SEQ ID NO: 122476 - DNA, 25 bp, probe
atcttaggatttaccaaatagggca

SEQ ID NO: 122477 - DNA, 25 bp, probe
atcttccctgttgcctagaagggct

SEQ ID NO: 122478 - DNA, 25 bp, probe
atcttctctctggccccagagggag

SEQ ID NO: 122479 - DNA, 25 bp, probe
atcatcttcagggcccacaaaaatg

SEQ ID NO: 122480 - DNA, 25 bp, probe
atcattcatcgagatataaaacctg

SEQ ID NO: 122481 - DNA, 25 bp, probe
atctcccaacgatttcagaactctg

SEQ ID NO: 122482 - DNA, 25 bp, probe
atctcttaccgaaatggtactcttt

SEQ ID NO: 122483 - DNA, 25 bp, probe
atctctggaaattaattttctcttt

SEQ ID NO: 122484 - DNA, 25 bp, probe
atcattaggaattaagttatcttta

SEQ ID NO: 122485 - DNA, 25 bp, probe
atcattaacaatgtgtgcctttttg

SEQ ID NO: 122486 - DNA, 25 bp, probe
atcattggattttatggagcatttt

SEQ ID NO: 122487 - DNA, 25 bp, probe
atcttaacttcatgtgagctattgg

SEQ ID NO: 122488 - DNA, 25 bp, probe
atcattataaggcttaattgtggaa

SEQ ID NO: 122489 - DNA, 25 bp, probe
atctctaacctgctaaagtttgaac

SEQ ID NO: 122490 - DNA, 25 bp, probe
atccagaggttcccaaagatcttgg

SEQ ID NO: 122491 - DNA, 25 bp, probe
atctgggtgtttcaaagacatcaac

SEQ ID NO: 122492 - DNA, 25 bp, probe
atcttggtttgccttccagaaaaca

SEQ ID NO: 122493 - DNA, 25 bp, probe
atcttggtttgccttccagaaaaca

SEQ ID NO: 122494 - DNA, 25 bp, probe
atcagaggtttgcttcctcagtaac

SEQ ID NO: 122495 - DNA, 25 bp, probe
atcagtgactttggaatgtctcgtc

SEQ ID NO: 122496 - DNA, 25 bp, probe
atcttggtatttttgtctcctcgtc

SEQ ID NO: 122497 - DNA, 25 bp, probe
atctttattatttttctttctatga

SEQ ID NO: 122498 - DNA, 25 bp, probe
atctttcttatcttaattgcgtcct

SEQ ID NO: 122499 - DNA, 25 bp, probe
atcttgtgtttcttcaaccttcaaa

SEQ ID NO: 122500 - DNA, 25 bp, probe
atcattttatgtcctatatacttga

SEQ ID NO: 122501 - DNA, 25 bp, probe
atctcttacattctagttctggtgc

SEQ ID NO: 122502 - DNA, 25 bp, probe
atccttagtcaaccagttgcatcgt

SEQ ID NO: 122503 - DNA, 25 bp, probe
atcatttattcattgggttgtcaga

SEQ ID NO: 122504 - DNA, 25 bp, probe
atcatttattcattgggttgtcaga

SEQ ID NO: 122505 - DNA, 25 bp, probe
atcattgtcgtattgtagtcttaag

SEQ ID NO: 122506 - DNA, 25 bp, probe
atcatctgttgtggcattctatctt

SEQ ID NO: 122507 - DNA, 25 bp, probe
atcatctggccaggcatggtggctt

SEQ ID NO: 122508 - DNA, 25 bp, probe
atcatcagccacgtgtagggtgtga

SEQ ID NO: 122509 - DNA, 25 bp, probe
atcagggcagcttaagtggtctaag

SEQ ID NO: 122510 - DNA, 25 bp, probe
atcatggaggatttagtacccaaat

SEQ ID NO: 122511 - DNA, 25 bp, probe
atcagtaccaaggagtacgcctacc

SEQ ID NO: 122512 - DNA, 25 bp, probe
atcgtcaacgacgaggttcgctacc

SEQ ID NO: 122513 - DNA, 25 bp, probe
atcatgtccaggaccgtctacctaa

SEQ ID NO: 122514 - DNA, 25 bp, probe
atcatgtcaaggtcacaggcatcca

SEQ ID NO: 122515 - DNA, 25 bp, probe
atcattcacaggtaaccgcgggggt

SEQ ID NO: 122516 - DNA, 25 bp, probe
atctgatccgggagcgcacggagga

SEQ ID NO: 122517 - DNA, 25 bp, probe
atctggccagggtgctccctgggat

SEQ ID NO: 122518 - DNA, 25 bp, probe
atcttccaggtagtgctgcttctga

SEQ ID NO: 122519 - DNA, 25 bp, probe
atctcccaagaggctgactattaat

SEQ ID NO: 122520 - DNA, 25 bp, probe
catctacaaagaccccgactacgtc

SEQ ID NO: 122521 - DNA, 25 bp, probe
atctcaaacagtacccaattccgac

SEQ ID NO: 122522 - DNA, 25 bp, probe
atgccaaggcagaacccattcttgg

SEQ ID NO: 122523 - DNA, 25 bp, probe
atgccaaggcagaacccattcttgg

SEQ ID NO: 122524 - DNA, 25 bp, probe
atcttacatcagacccttttctggt

SEQ ID NO: 122525 - DNA, 25 bp, probe
atcttacagtgatacagttttgtat

SEQ ID NO: 122526 - DNA, 25 bp, probe
atctttcaggaaatttttgcatgtt

SEQ ID NO: 122527 - DNA, 25 bp, probe
atcttcatggtgtctgattttttgg

SEQ ID NO: 122528 - DNA, 25 bp, probe
atctatgctttcagactctttgatg

SEQ ID NO: 122529 - DNA, 25 bp, probe
atctatcttctaaacttggcagttt

SEQ ID NO: 122530 - DNA, 25 bp, probe
atcatctttattgtcgtggcagcct

SEQ ID NO: 122531 - DNA, 25 bp, probe
atcatttaatttttgggacctcagt

SEQ ID NO: 122532 - DNA, 25 bp, probe
atcttgtattttataggcatggcca

SEQ ID NO: 122533 - DNA, 25 bp, probe
atctcaaaatatcctaagactaaca

SEQ ID NO: 122534 - DNA, 25 bp, probe
atcataagaataatcatcaaaggca

SEQ ID NO: 122535 - DNA, 25 bp, probe
atcatgagagcagacagatcacaca

SEQ ID NO: 122536 - DNA, 25 bp, probe
atctgagaatgccagtgtcacaaaa

SEQ ID NO: 122537 - DNA, 25 bp, probe
atctagacagcatctgttcaaagtc

SEQ ID NO: 122538 - DNA, 25 bp, probe
atctatggcagtgtttgaacagcat

SEQ ID NO: 122539 - DNA, 25 bp, probe
atctatgtggtcattgatctcccta

SEQ ID NO: 122540 - DNA, 25 bp, probe
atgctataatccagtggtgccttac

SEQ ID NO: 122541 - DNA, 25 bp, probe
atctattcacttctggtgccacaac

SEQ ID NO: 122542 - DNA, 25 bp, probe
atcttagaatctacaggtctccctc

SEQ ID NO: 122543 - DNA, 25 bp, probe
atctgtgaagcaaatccagactcct

SEQ ID NO: 122544 - DNA, 25 bp, probe
atcatgtgaagttccgctcactctc

SEQ ID NO: 122545 - DNA, 25 bp, probe
atcatggaagtggtgggcacaccca

SEQ ID NO: 122546 - DNA, 25 bp, probe
atctggtaggggatgatgccgcctg

SEQ ID NO: 122547 - DNA, 25 bp, probe
atctgttcagggtggctgcacgatt

SEQ ID NO: 122548 - DNA, 25 bp, probe
atcttatgaagttatttgcatctga

SEQ ID NO: 122549 - DNA, 25 bp, probe
atctattgagtgtacatttatgtgt

SEQ ID NO: 122550 - DNA, 25 bp, probe
atctattgagtgtacatttatgtgt

SEQ ID NO: 122551 - DNA, 25 bp, probe
atcagttatggttcctttggtcgct

SEQ ID NO: 122552 - DNA, 25 bp, probe
atcagattattgcaacatttaacct

SEQ ID NO: 122553 - DNA, 25 bp, probe
atcagtctttgtcaatgctctaaca

SEQ ID NO: 122554 - DNA, 25 bp, probe
atcaggcttggttcattttaatgaa

SEQ ID NO: 122555 - DNA, 25 bp, probe
atcaggcctgattctacttttgaaa

SEQ ID NO: 122556 - DNA, 25 bp, probe
atcagtgaggattctgatcctttca

SEQ ID NO: 122557 - DNA, 25 bp, probe
atcagtactgagtgctgcctgtctg

SEQ ID NO: 122558 - DNA, 25 bp, probe
atcagtactgagtgctgcctgtctg

SEQ ID NO: 122559 - DNA, 25 bp, probe
atcatgcgggagtgctggcatgccg

SEQ ID NO: 122560 - DNA, 25 bp, probe
atcatgggtgtgatgctggtgtgtg

SEQ ID NO: 122561 - DNA, 25 bp, probe
atcagactggatttgtgagtgctgg

SEQ ID NO: 122562 - DNA, 25 bp, probe
atctacggatttagaatgtggtaaa

SEQ ID NO: 122563 - DNA, 25 bp, probe
atcttccgtatcttaagtgaggagg

SEQ ID NO: 122564 - DNA, 25 bp, probe
atcttggcgttcagcagagtcaggg

SEQ ID NO: 122565 - DNA, 25 bp, probe
atctgggacgtccacgagtgagggg

SEQ ID NO: 122566 - DNA, 25 bp, probe
atctgggaagtatcaggttctggga

SEQ ID NO: 122567 - DNA, 25 bp, probe
atcagggaaattgcaggtctgcagg

SEQ ID NO: 122568 - DNA, 25 bp, probe
atcaggctgtactttcaggttccaa

SEQ ID NO: 122569 - DNA, 25 bp, probe
atcaggctgtactttcaggttccaa

SEQ ID NO: 122570 - DNA, 25 bp, probe
atctctgttgacccgaggttccaaa

SEQ ID NO: 122571 - DNA, 25 bp, probe
atctctgttgacccgaggttccaaa

SEQ ID NO: 122572 - DNA, 25 bp, probe
atctgcttgatatcccaagttggaa

SEQ ID NO: 122573 - DNA, 25 bp, probe
atctgtaaaacacctatttgggata

SEQ ID NO: 122574 - DNA, 25 bp, probe
atctgtaaaacacctatttgggata

SEQ ID NO: 122575 - DNA, 25 bp, probe
atctgtaaataaggcccaaggaaca

SEQ ID NO: 122576 - DNA, 25 bp, probe
atgtgtgcaaaagcccaaaggttcc

SEQ ID NO: 122577 - DNA, 25 bp, probe
atcagtcagaaagtccctataggat

SEQ ID NO: 122578 - DNA, 25 bp, probe
atcatgtctgcataatcctccaaga

SEQ ID NO: 122579 - DNA, 25 bp, probe
atcatgttgcagcaattcactgtaa

SEQ ID NO: 122580 - DNA, 25 bp, probe
atctaatgcatcctatatccagtaa

SEQ ID NO: 122581 - DNA, 25 bp, probe
atctatatgatcatgacagaatgct

SEQ ID NO: 122582 - DNA, 25 bp, probe
atctatgagctttgtcagtgcgcgt

SEQ ID NO: 122583 - DNA, 25 bp, probe
atcttcatgtatgtgcgtcctgcat

SEQ ID NO: 122584 - DNA, 25 bp, probe
atcttcatgtatgtgcgtcctgcat

SEQ ID NO: 122585 - DNA, 25 bp, probe
atcagtcagtatctgcagaacagta

SEQ ID NO: 122586 - DNA, 25 bp, probe
atcagtctgtgaagcgaagccagct

SEQ ID NO: 122587 - DNA, 25 bp, probe
atcatgatctgtacctaagctcagt

SEQ ID NO: 122588 - DNA, 25 bp, probe
atcatgatcgtgacctacacgcgca

SEQ ID NO: 122589 - DNA, 25 bp, probe
atcatgaccagaagcttgacgcacc

SEQ ID NO: 122590 - DNA, 25 bp, probe
atcatatcagagcacttgatcgcct

SEQ ID NO: 122591 - DNA, 25 bp, probe
atcatgcaaatgctgtattcttctt

SEQ ID NO: 122592 - DNA, 25 bp, probe
atcatgcaaataaattatgcgattt

SEQ ID NO: 122593 - DNA, 25 bp, probe
atcatgcaattcttctttgcctgta

SEQ ID NO: 122594 - DNA, 25 bp, probe
atcatgcaattcttctttgcctgta

SEQ ID NO: 122595 - DNA, 25 bp, probe
atcatggttttctttctgcattaaa

SEQ ID NO: 122596 - DNA, 25 bp, probe
atcatcagtcttaatattcagagaa

SEQ ID NO: 122597 - DNA, 25 bp, probe
atcatgagcagcattcagactatga

SEQ ID NO: 122598 - DNA, 25 bp, probe
atcatggcagagatgctgacaggga

SEQ ID NO: 122599 - DNA, 25 bp, probe
atcatggcagagatgctgacaggga

SEQ ID NO: 122600 - DNA, 25 bp, probe
atcatgctgaccgtcggcatggaga

SEQ ID NO: 122601 - DNA, 25 bp, probe
atcatgctgaccgtcggcatggaga

SEQ ID NO: 122602 - DNA, 25 bp, probe
atcatgtaccgctgcgtgacgggga

SEQ ID NO: 122603 - DNA, 25 bp, probe
atcatgtaccgctgcgtgacgggga

SEQ ID NO: 122604 - DNA, 25 bp, probe
atctggcgcctacgaggacgtggcg

SEQ ID NO: 122605 - DNA, 25 bp, probe
atcagtgttctctgaggtcctgtgc

SEQ ID NO: 122606 - DNA, 25 bp, probe
atcggttcattcgatgagacctgta

SEQ ID NO: 122607 - DNA, 25 bp, probe
atctgtatctatagcaacaacccag

SEQ ID NO: 122608 - DNA, 25 bp, probe
atctacatttcaaaaccctcatggg

SEQ ID NO: 122609 - DNA, 25 bp, probe
atctcactttcattatactacctgg

SEQ ID NO: 122610 - DNA, 25 bp, probe
atctatatttatttgactcagcact

SEQ ID NO: 122611 - DNA, 25 bp, probe
atcataatcattttctgctgttgca

SEQ ID NO: 122612 - DNA, 25 bp, probe
atcatatactgtttctgcaatggcg

SEQ ID NO: 122613 - DNA, 25 bp, probe
atcatctaccatgtcattgatgcca

SEQ ID NO: 122614 - DNA, 25 bp, probe
atcatctactcagtggcttggctga

SEQ ID NO: 122615 - DNA, 25 bp, probe
atcattgactcgatgcttcggatgc

SEQ ID NO: 122616 - DNA, 25 bp, probe
atctttcagcgcagcttgtgagact

SEQ ID NO: 122617 - DNA, 25 bp, probe
atcatttcattaagatctctaatct

SEQ ID NO: 122618 - DNA, 25 bp, probe
atcatgttcacttaacattaaatac

SEQ ID NO: 122619 - DNA, 25 bp, probe
atcttctgcattgaagttgtcaata

SEQ ID NO: 122620 - DNA, 25 bp, probe
atcttccagctgtggtttcacttca

SEQ ID NO: 122621 - DNA, 25 bp, probe
atctcttcaatggggctgatacctt

SEQ ID NO: 122622 - DNA, 25 bp, probe
atctttgccctgggcattatcatct

SEQ ID NO: 122623 - DNA, 25 bp, probe
atcatcaaccctgtcatatatgctt

SEQ ID NO: 122624 - DNA, 25 bp, probe
atcatcacacccatgttaaatccct

SEQ ID NO: 122625 - DNA, 25 bp, probe
atcatgtcagtctgcttagaaataa

SEQ ID NO: 122626 - DNA, 25 bp, probe
atcatcctgccagccgagaacaaga

SEQ ID NO: 122627 - DNA, 25 bp, probe
atcttcatgtacccaggcaacaaga

SEQ ID NO: 122628 - DNA, 25 bp, probe
atctatatcaagccctctgcaaaag

SEQ ID NO: 122629 - DNA, 25 bp, probe
atcttcacagagacccagttcacag

SEQ ID NO: 122630 - DNA, 25 bp, probe
atcataaaggtgccacgttacaaga

SEQ ID NO: 122631 - DNA, 25 bp, probe
atctcagaaggtcctcctgaaccgt

SEQ ID NO: 122632 - DNA, 25 bp, probe
atctaggggagtacctggaggcgta

SEQ ID NO: 122633 - DNA, 25 bp, probe
atcatttgggagccccagtagagct

SEQ ID NO: 122634 - DNA, 25 bp, probe
atcatcaacatgaaggcccgaaact

SEQ ID NO: 122635 - DNA, 25 bp, probe
atctgctggcagagagccacgcaaa

SEQ ID NO: 122636 - DNA, 25 bp, probe
atcatgctggactgcaggcacaaag

SEQ ID NO: 122637 - DNA, 25 bp, probe
atcatagtgcactgcagtgacggtg

SEQ ID NO: 122638 - DNA, 25 bp, probe
atcatcaatctcttaggagcatgtg

SEQ ID NO: 122639 - DNA, 25 bp, probe
atcatcagagcgccgaggagagtgg

SEQ ID NO: 122640 - DNA, 25 bp, probe
atcatccatctgctggcagagagcc

SEQ ID NO: 122641 - DNA, 25 bp, probe
atcatgcaagctggtggctggacca

SEQ ID NO: 122642 - DNA, 25 bp, probe
atcatgccaggcaaggtgaacccta

SEQ ID NO: 122643 - DNA, 25 bp, probe
atcatccagcgggaggtattcacta

SEQ ID NO: 122644 - DNA, 25 bp, probe
atctctcaggctgtgccttaattca

SEQ ID NO: 122645 - DNA, 25 bp, probe
atccattcctagacctttcattaga

SEQ ID NO: 122646 - DNA, 25 bp, probe
atctttcctagatctatgtttcaca

SEQ ID NO: 122647 - DNA, 25 bp, probe
atcttatttatacctcagtttgcat

SEQ ID NO: 122648 - DNA, 25 bp, probe
atcatctttgaatactatgtgggat

SEQ ID NO: 122649 - DNA, 25 bp, probe
atcatgtttgaaggatttctgagtg

SEQ ID NO: 122650 - DNA, 25 bp, probe
atcattctgtaaggtcctctgaaga

SEQ ID NO: 122651 - DNA, 25 bp, probe
atcatcatcgcatggtgtacctgga

SEQ ID NO: 122652 - DNA, 25 bp, probe
atcttccaatgattaaccaggatga

SEQ ID NO: 122653 - DNA, 25 bp, probe
atcattcaccaaccataccagagaa

SEQ ID NO: 122654 - DNA, 25 bp, probe
atcatatcctcagaccaggtggaat

SEQ ID NO: 122655 - DNA, 25 bp, probe
atctagtcatcataccagttggaat

SEQ ID NO: 122656 - DNA, 25 bp, probe
atctagtcatcataccagttggaat

SEQ ID NO: 122657 - DNA, 25 bp, probe
atcatagtcagctcccgtggggaga

SEQ ID NO: 122658 - DNA, 25 bp, probe
atcatattcagcccatcacgctgtg

SEQ ID NO: 122659 - DNA, 25 bp, probe
atcatgttccaggatcactgttggc

SEQ ID NO: 122660 - DNA, 25 bp, probe
atcatgttccaggatcactgttggc

SEQ ID NO: 122661 - DNA, 25 bp, probe
atcataagccagtgacagttgacct

SEQ ID NO: 122662 - DNA, 25 bp, probe
atctaagcccaggacatgagtgtct

SEQ ID NO: 122663 - DNA, 25 bp, probe
atcttactcacagagctggtcacca

SEQ ID NO: 122664 - DNA, 25 bp, probe
atcttgttcagatacatggctccta

SEQ ID NO: 122665 - DNA, 25 bp, probe
atcttgttcagatacatggctccta

SEQ ID NO: 122666 - DNA, 25 bp, probe
atctgagaaagttccggtcctataa

SEQ ID NO: 122667 - DNA, 25 bp, probe
atctgaaaaagtgctcaacctcccc

SEQ ID NO: 122668 - DNA, 25 bp, probe
atctagacaagaacatacatacccc

SEQ ID NO: 122669 - DNA, 25 bp, probe
atcgggaagtactacatggccacta

SEQ ID NO: 122670 - DNA, 25 bp, probe
atcaggttactatatcaacaactga

SEQ ID NO: 122671 - DNA, 25 bp, probe
atctgttaactattatccaaacaaa

SEQ ID NO: 122672 - DNA, 25 bp, probe
atcatgttaatcaagctctcctcac

SEQ ID NO: 122673 - DNA, 25 bp, probe
atcattgacaataagcgctacctct

SEQ ID NO: 122674 - DNA, 25 bp, probe
atcatggagcacaacgtttcctatc

SEQ ID NO: 122675 - DNA, 25 bp, probe
atcatggaacaaactgtcacctacc

SEQ ID NO: 122676 - DNA, 25 bp, probe
atcatgtgcccacagtgatcacctt

SEQ ID NO: 122677 - DNA, 25 bp, probe
atcaggcctaatctcatacctctga

SEQ ID NO: 122678 - DNA, 25 bp, probe
atcgaggtcctgatgaacacctaca

SEQ ID NO: 122679 - DNA, 25 bp, probe
atcttggtcactctgaagcacaata

SEQ ID NO: 122680 - DNA, 25 bp, probe
atctcaggtgccatgtaaggcttgg

SEQ ID NO: 122681 - DNA, 25 bp, probe
atctgagtgctgtctaaaactgttg

SEQ ID NO: 122682 - DNA, 25 bp, probe
atcgagtagttaaccaatttgccag

SEQ ID NO: 122683 - DNA, 25 bp, probe
atcgaaacgtgaacccagtggctct

SEQ ID NO: 122684 - DNA, 25 bp, probe
atctacaacgtgggcacgcgtggcc

SEQ ID NO: 122685 - DNA, 25 bp, probe
atctacaacgtgggcacgcgtggcc

SEQ ID NO: 122686 - DNA, 25 bp, probe
atctacaattggtagccgctgcgga

SEQ ID NO: 122687 - DNA, 25 bp, probe
atctcaaattcaagtgtagctgggc

SEQ ID NO: 122688 - DNA, 25 bp, probe
atctcaaattcaagtgtagctgggc

SEQ ID NO: 122689 - DNA, 25 bp, probe
atctatgaaatttgctgttggagtg

SEQ ID NO: 122690 - DNA, 25 bp, probe
atctataatatttgtgtgttcacta

SEQ ID NO: 122691 - DNA, 25 bp, probe
atctttctgttactgatgttcaata

SEQ ID NO: 122692 - DNA, 25 bp, probe
atcatttcattttgtatttaatatc

SEQ ID NO: 122693 - DNA, 25 bp, probe
atcatttgctctcctgaatttatga

SEQ ID NO: 122694 - DNA, 25 bp, probe
atcatttactgcctgcgcaatcaag

SEQ ID NO: 122695 - DNA, 25 bp, probe
atcatcatgtaccgctgcgtgacgg

SEQ ID NO: 122696 - DNA, 25 bp, probe
atcatcatgtaccgctgcgtgacgg

SEQ ID NO: 122697 - DNA, 25 bp, probe
atcatcaggatcaaggaggcctgcc

SEQ ID NO: 122698 - DNA, 25 bp, probe
atcatcagcgcgcaagagggcagac

SEQ ID NO: 122699 - DNA, 25 bp, probe
atgatctgatgggactactggaatc

SEQ ID NO: 122700 - DNA, 25 bp, probe
atcatcttggtactactagatgtct

SEQ ID NO: 122701 - DNA, 25 bp, probe
atctctttacttttcagtgtctacg

SEQ ID NO: 122702 - DNA, 25 bp, probe
atcctttcaatatacgttcttcagg

SEQ ID NO: 122703 - DNA, 25 bp, probe
atcattttaatatccaattgccttg

SEQ ID NO: 122704 - DNA, 25 bp, probe
atcattttaatatccaattgccttg

SEQ ID NO: 122705 - DNA, 25 bp, probe
atcattcttaatcaccaaggtcata

SEQ ID NO: 122706 - DNA, 25 bp, probe
atctcatcctagatcaccgaggtta

SEQ ID NO: 122707 - DNA, 25 bp, probe
atctatccaatttacacagcaagtt

SEQ ID NO: 122708 - DNA, 25 bp, probe
atcatctcacttgctaacatgtttt

SEQ ID NO: 122709 - DNA, 25 bp, probe
atcatctctgttatacacctgtatc

SEQ ID NO: 122710 - DNA, 25 bp, probe
atcttcagcttactactctggatac

SEQ ID NO: 122711 - DNA, 25 bp, probe
atcttctgcttaatgcagtttgacc

SEQ ID NO: 122712 - DNA, 25 bp, probe
atctcattaataagaagattactcc

SEQ ID NO: 122713 - DNA, 25 bp, probe
atcatttcatttaagagatcatttc

SEQ ID NO: 122714 - DNA, 25 bp, probe
atcatgctccattgttcagatgctt

SEQ ID NO: 122715 - DNA, 25 bp, probe
atcatccacatcttcatcgtgttca

SEQ ID NO: 122716 - DNA, 25 bp, probe
atcatctctgtagacatgtgttcat

SEQ ID NO: 122717 - DNA, 25 bp, probe
atcatctagtgatcttttgcatcat

SEQ ID NO: 122718 - DNA, 25 bp, probe
atcatctactgctacatcttcatct

SEQ ID NO: 122719 - DNA, 25 bp, probe
atcatcatctctgcaagactcatcg

SEQ ID NO: 122720 - DNA, 25 bp, probe
atcatctgcattcctgatgaccaat

SEQ ID NO: 122721 - DNA, 25 bp, probe
atctcgatctcttgacctcatgatc

SEQ ID NO: 122722 - DNA, 25 bp, probe
atctagtgatcttttgcatcatgag

SEQ ID NO: 122723 - DNA, 25 bp, probe
atctttgtcttgttgccattgggtt

SEQ ID NO: 122724 - DNA, 25 bp, probe
atcttctttttgtgcatgatgggaa

SEQ ID NO: 122725 - DNA, 25 bp, probe
atcattcgggtccgggctggagaac

SEQ ID NO: 122726 - DNA, 25 bp, probe
atgaacgaggccagtggggaaccct

SEQ ID NO: 122727 - DNA, 25 bp, probe
atctaccaagccagtggaggaagca

SEQ ID NO: 122728 - DNA, 25 bp, probe
atctaccaagccagtggaggaagca

SEQ ID NO: 122729 - DNA, 25 bp, probe
atgctagtaaacacaagaggacagg

SEQ ID NO: 122730 - DNA, 25 bp, probe
atctacctgaacatccagaggcgca

SEQ ID NO: 122731 - DNA, 25 bp, probe
atcttccttacgtcatctggactaa

SEQ ID NO: 122732 - DNA, 25 bp, probe
atctttcttgtttcatcgtaaacat

SEQ ID NO: 122733 - DNA, 25 bp, probe
atctgtgtcccgctcaggtataaaa

SEQ ID NO: 122734 - DNA, 25 bp, probe
atctttccctgttaggctgatttca

SEQ ID NO: 122735 - DNA, 25 bp, probe
atctttcccatgtatgtgactggca

SEQ ID NO: 122736 - DNA, 25 bp, probe
atcttttctcaatgatgcttggctc

SEQ ID NO: 122737 - DNA, 25 bp, probe
atctttttacagttgcatcaggcct

SEQ ID NO: 122738 - DNA, 25 bp, probe
atctttttacagttgcatcaggcct

SEQ ID NO: 122739 - DNA, 25 bp, probe
atctttgcttacagtgcatcacaac

SEQ ID NO: 122740 - DNA, 25 bp, probe
atctttgtgattatagtcagcattc

SEQ ID NO: 122741 - DNA, 25 bp, probe
atcttgcgcatctttaagctgaccc

SEQ ID NO: 122742 - DNA, 25 bp, probe
atctatcccgttaacagatcctcaa

SEQ ID NO: 122743 - DNA, 25 bp, probe
atctatcccgttaacagatcctcaa

SEQ ID NO: 122744 - DNA, 25 bp, probe
atctacccttactcatatgcttaca

SEQ ID NO: 122745 - DNA, 25 bp, probe
atccaccctataccctaaataactg

SEQ ID NO: 122746 - DNA, 25 bp, probe
atcctcctaaatccgttgcaaagtt

SEQ ID NO: 122747 - DNA, 25 bp, probe
atctgccactacatccaggctgaga

SEQ ID NO: 122748 - DNA, 25 bp, probe
atctacagccgcatcggcggagacc

SEQ ID NO: 122749 - DNA, 25 bp, probe
atcttcatcctgaaccggaatgacc

SEQ ID NO: 122750 - DNA, 25 bp, probe
atctgtacctaagctcagtatgcaa

SEQ ID NO: 122751 - DNA, 25 bp, probe
atctaacttcagagtgcagtctaca

SEQ ID NO: 122752 - DNA, 25 bp, probe
atcataggcattttttcattctaca

SEQ ID NO: 122753 - DNA, 25 bp, probe
atcataggcattttttcattctaca

SEQ ID NO: 122754 - DNA, 25 bp, probe
atcatccagctttttttgttagcaa

SEQ ID NO: 122755 - DNA, 25 bp, probe
atcatctccatcctttttgttatat

SEQ ID NO: 122756 - DNA, 25 bp, probe
atcatctccatcctttttgttatat

SEQ ID NO: 122757 - DNA, 25 bp, probe
atctttatggctactttcttacatg

SEQ ID NO: 122758 - DNA, 25 bp, probe
atcgtgttggtcaaattcctccatg

SEQ ID NO: 122759 - DNA, 25 bp, probe
atcatttgggttaatatggctcttc

SEQ ID NO: 122760 - DNA, 25 bp, probe
atctactgggttgatttcatcatct

SEQ ID NO: 122761 - DNA, 25 bp, probe
atctacggaggaggtcttcacagct

SEQ ID NO: 122762 - DNA, 25 bp, probe
atctatcagcatttacgaaatccag

SEQ ID NO: 122763 - DNA, 25 bp, probe
atcttcatataaactcaagtgcctg

SEQ ID NO: 122764 - DNA, 25 bp, probe
atctacattgtcaccgagtacatgg

SEQ ID NO: 122765 - DNA, 25 bp, probe
atctactagtgtggccgaggctatg

SEQ ID NO: 122766 - DNA, 25 bp, probe
atctagcaagccgctggggcttggg

SEQ ID NO: 122767 - DNA, 25 bp, probe
atctaccaggagtggcggtggggac

SEQ ID NO: 122768 - DNA, 25 bp, probe
atcttctgggaatggtgagctggag

SEQ ID NO: 122769 - DNA, 25 bp, probe
atcatctctgctgatacgagggtgg

SEQ ID NO: 122770 - DNA, 25 bp, probe
atctgatgtgcagaagctgggctgc

SEQ ID NO: 122771 - DNA, 25 bp, probe
atcttgcagcactatcagtatgttg

SEQ ID NO: 122772 - DNA, 25 bp, probe
atcttgcccatcatgatatatgctg

SEQ ID NO: 122773 - DNA, 25 bp, probe
atcttgaatgatacgattatgccca

SEQ ID NO: 122774 - DNA, 25 bp, probe
atctattggacaagttatgcctaat

SEQ ID NO: 122775 - DNA, 25 bp, probe
atcttctggacaaacttctgcgata

SEQ ID NO: 122776 - DNA, 25 bp, probe
atctttcatccatacctgtgcatga

SEQ ID NO: 122777 - DNA, 25 bp, probe
atctttcccatcaactctgtgtgaa

SEQ ID NO: 122778 - DNA, 25 bp, probe
atctttcccatcaactctgtgtgaa

SEQ ID NO: 122779 - DNA, 25 bp, probe
atctttgtcttcaagctccattggt

SEQ ID NO: 122780 - DNA, 25 bp, probe
atctttagtttcctccatatttgtc

SEQ ID NO: 122781 - DNA, 25 bp, probe
atctttagtttcctccatatttgtc

SEQ ID NO: 122782 - DNA, 25 bp, probe
atcttttgttctcatggaattggcc

SEQ ID NO: 122783 - DNA, 25 bp, probe
atcgtcttatattagggaattaggg

SEQ ID NO: 122784 - DNA, 25 bp, probe
atctgactaaactgggacttggtgg

SEQ ID NO: 122785 - DNA, 25 bp, probe
atctgactaaactgggacttggtgg

SEQ ID NO: 122786 - DNA, 25 bp, probe
atctttaaacaacatgcactctgag

SEQ ID NO: 122787 - DNA, 25 bp, probe
atcttttaccattgacaccttgcac

SEQ ID NO: 122788 - DNA, 25 bp, probe
atcttttaccattgacaccttgcac

SEQ ID NO: 122789 - DNA, 25 bp, probe
atcttgtacactatagcttcttcca

SEQ ID NO: 122790 - DNA, 25 bp, probe
atcttgtacactatagcttcttcca

SEQ ID NO: 122791 - DNA, 25 bp, probe
atctttccactaacgtactatcact

SEQ ID NO: 122792 - DNA, 25 bp, probe
atcttcccattcttttacttagtgc

SEQ ID NO: 122793 - DNA, 25 bp, probe
atcttcctcatttatactattattt

SEQ ID NO: 122794 - DNA, 25 bp, probe
atcgtaccagggaagctagtctttc

SEQ ID NO: 122795 - DNA, 25 bp, probe
atcattaaagtgcatagatttctat

SEQ ID NO: 122796 - DNA, 25 bp, probe
atcttagaggggtattcttcttgaa

SEQ ID NO: 122797 - DNA, 25 bp, probe
atctttgaggtgtaatcttgtttta

SEQ ID NO: 122798 - DNA, 25 bp, probe
atctttggggagacaccctatattc

SEQ ID NO: 122799 - DNA, 25 bp, probe
atctttggaacatcagcaccagtat

SEQ ID NO: 122800 - DNA, 25 bp, probe
atctggaagccaaacaccggcattt

SEQ ID NO: 122801 - DNA, 25 bp, probe
atcgaagcaggaattccccactttt

SEQ ID NO: 122802 - DNA, 25 bp, probe
atcgaagcaggaattccccactttt

SEQ ID NO: 122803 - DNA, 25 bp, probe
atcgagcgagtgaacatgccgcccg

SEQ ID NO: 122804 - DNA, 25 bp, probe
atctactgagctaatagccactagc

SEQ ID NO: 122805 - DNA, 25 bp, probe
atctcctgaatgctcacctaagctc

SEQ ID NO: 122806 - DNA, 25 bp, probe
atcttgctggcaagcttcctaggct

SEQ ID NO: 122807 - DNA, 25 bp, probe
atcttcaggatgattcatctagcag

SEQ ID NO: 122808 - DNA, 25 bp, probe
atctccaggtggatcactggcagac

SEQ ID NO: 122809 - DNA, 25 bp, probe
atctccagtgggaactcttcaaggt

SEQ ID NO: 122810 - DNA, 25 bp, probe
atctccagtgggaactcttcaaggt

SEQ ID NO: 122811 - DNA, 25 bp, probe
atcggcacgaggattattcaagaat

SEQ ID NO: 122812 - DNA, 25 bp, probe
atcgtagccgttctgattcaagagc

SEQ ID NO: 122813 - DNA, 25 bp, probe
atccaaccaattcaattaatgtctt

SEQ ID NO: 122814 - DNA, 25 bp, probe
atctataccaatgttcttaagactc

SEQ ID NO: 122815 - DNA, 25 bp, probe
aggtacccatgttctcgataggcct

SEQ ID NO: 122816 - DNA, 25 bp, probe
aggattctccggtctggaatttctg

SEQ ID NO: 122817 - DNA, 25 bp, probe
aggattctccggtctggaatttctg

SEQ ID NO: 122818 - DNA, 25 bp, probe
aagtactcagggtggaagtcctgcc

SEQ ID NO: 122819 - DNA, 25 bp, probe
accgaagggtactgaagagcctcac

SEQ ID NO: 122820 - DNA, 25 bp, probe
ccctttcggttcaagaagagccagc

SEQ ID NO: 122821 - DNA, 25 bp, probe
cacggtcatccggagtactaagccc

SEQ ID NO: 122822 - DNA, 25 bp, probe
atctggtcgcctgggaaacaagccc

SEQ ID NO: 122823 - DNA, 25 bp, probe
atcattgtcacccaggaaaggcgac

SEQ ID NO: 122824 - DNA, 25 bp, probe
atcattgtcacccaggaaaggcgac

SEQ ID NO: 122825 - DNA, 25 bp, probe
atctgcaatacccaagccacaggga

SEQ ID NO: 122826 - DNA, 25 bp, probe
atctcaacaacctcagccagagtgt

SEQ ID NO: 122827 - DNA, 25 bp, probe
atctataccaccttcaatatcgagt

SEQ ID NO: 122828 - DNA, 25 bp, probe
atcttcccatcgtctgcatgataag

SEQ ID NO: 122829 - DNA, 25 bp, probe
atcttcccatcgtctgcatgataag

SEQ ID NO: 122830 - DNA, 25 bp, probe
atcattcaccgcgatcttaaatgtg

SEQ ID NO: 122831 - DNA, 25 bp, probe
atctacactcaggacttcacggtgc

SEQ ID NO: 122832 - DNA, 25 bp, probe
atctcagcagtcaggcttctggttg

SEQ ID NO: 122833 - DNA, 25 bp, probe
atctctggtcagagcctcagaattg

SEQ ID NO: 122834 - DNA, 25 bp, probe
atctctgggcatgtcccgatatctg

SEQ ID NO: 122835 - DNA, 25 bp, probe
atctctggacaggtcccttcagtag

SEQ ID NO: 122836 - DNA, 25 bp, probe
atctcgggcagttggcactgtcaaa

SEQ ID NO: 122837 - DNA, 25 bp, probe
atcttggacctaccacttgaaacca

SEQ ID NO: 122838 - DNA, 25 bp, probe
atcatttgcttcaagccccgaaaca

SEQ ID NO: 122839 - DNA, 25 bp, probe
atcatttctttaaaacgatcaactt

SEQ ID NO: 122840 - DNA, 25 bp, probe
atgtccccttcaacaaggtcatggt

SEQ ID NO: 122841 - DNA, 25 bp, probe
atctccacctcgaagtagtggctgc

SEQ ID NO: 122842 - DNA, 25 bp, probe
atcattcatggcagattgtttgtgc

SEQ ID NO: 122843 - DNA, 25 bp, probe
atcatttgggagatggctcgtcgtt

SEQ ID NO: 122844 - DNA, 25 bp, probe
atctcgtggaagcggtcatccgtct

SEQ ID NO: 122845 - DNA, 25 bp, probe
atctcgtggaagcggtcatccgtct

SEQ ID NO: 122846 - DNA, 25 bp, probe
atctcagaccaaagggtcgtcctcc

SEQ ID NO: 122847 - DNA, 25 bp, probe
atcgagtccaaggcagcctatgtcc

SEQ ID NO: 122848 - DNA, 25 bp, probe
atctggatgccaggcacctcattga

SEQ ID NO: 122849 - DNA, 25 bp, probe
atctggatgccaggcacctcattga

SEQ ID NO: 122850 - DNA, 25 bp, probe
atctatatggcggtccagcattata

SEQ ID NO: 122851 - DNA, 25 bp, probe
atcatatagttcaaccatgattgat

SEQ ID NO: 122852 - DNA, 25 bp, probe
atctgatactccatttgattattgt

SEQ ID NO: 122853 - DNA, 25 bp, probe
atcttcttcactgtgtatttttcaa

SEQ ID NO: 122854 - DNA, 25 bp, probe
atcattgttaccgtgtttgtcatta

SEQ ID NO: 122855 - DNA, 25 bp, probe
atcattgcatgttttatgttttcaa

SEQ ID NO: 122856 - DNA, 25 bp, probe
atcttcataattaatgcccttcaga

SEQ ID NO: 122857 - DNA, 25 bp, probe
atctatgaaatatcatgctccattg

SEQ ID NO: 122858 - DNA, 25 bp, probe
atcttcataataccagtgtgatgtc

SEQ ID NO: 122859 - DNA, 25 bp, probe
atcttgctactaccgttatacacat

SEQ ID NO: 122860 - DNA, 25 bp, probe
atcttgctctctttaggtctgaact

SEQ ID NO: 122861 - DNA, 25 bp, probe
atcttttctttaggcctgattctat

SEQ ID NO: 122862 - DNA, 25 bp, probe
atgctttattttacccatggtttag

SEQ ID NO: 122863 - DNA, 25 bp, probe
atcttgtttctttcctcagtattta

SEQ ID NO: 122864 - DNA, 25 bp, probe
atctgacttcatacatccctcagtt

SEQ ID NO: 122865 - DNA, 25 bp, probe
atctgacttcatacatccctcagtt

SEQ ID NO: 122866 - DNA, 25 bp, probe
atctgatgccttcatctgttcagtc

SEQ ID NO: 122867 - DNA, 25 bp, probe
atctcactcttgtttttcacagtaa

SEQ ID NO: 122868 - DNA, 25 bp, probe
atctgaatcttgtggtctgaggaaa

SEQ ID NO: 122869 - DNA, 25 bp, probe
atctacacacttgcagtttggaaga

SEQ ID NO: 122870 - DNA, 25 bp, probe
atctcacaccagaacagtttgatga

SEQ ID NO: 122871 - DNA, 25 bp, probe
atcttactgcacagctttctgagaa

SEQ ID NO: 122872 - DNA, 25 bp, probe
atcttactgcacagctttctgagaa

SEQ ID NO: 122873 - DNA, 25 bp, probe
atcttattgcacactgttcgctgga

SEQ ID NO: 122874 - DNA, 25 bp, probe
atcttatcttgcagcactatcagta

SEQ ID NO: 122875 - DNA, 25 bp, probe
atctacagcttcggcctaatcattt

SEQ ID NO: 122876 - DNA, 25 bp, probe
atctacaaccccgttatctatgtct

SEQ ID NO: 122877 - DNA, 25 bp, probe
atctacaaccccgttatctatgtct

SEQ ID NO: 122878 - DNA, 25 bp, probe
atgctaaatatggtcgttactattt

SEQ ID NO: 122879 - DNA, 25 bp, probe
atcttcatgtatccctgttactgat

SEQ ID NO: 122880 - DNA, 25 bp, probe
atcttgagacatcctttttttaagg

SEQ ID NO: 122881 - DNA, 25 bp, probe
atcttagtcatggatttgattttta

SEQ ID NO: 122882 - DNA, 25 bp, probe
atctgtgagaacttttgaattttca

SEQ ID NO: 122883 - DNA, 25 bp, probe
atctgtgccaacggaaggttcttca

SEQ ID NO: 122884 - DNA, 25 bp, probe
atgttccaactttcaggtttgataa

SEQ ID NO: 122885 - DNA, 25 bp, probe
atcttctaaacttggcagtttctaa

SEQ ID NO: 122886 - DNA, 25 bp, probe
atcttctcccactaggaatttaaat

SEQ ID NO: 122887 - DNA, 25 bp, probe
atctcttctctagcaggaattggca

SEQ ID NO: 122888 - DNA, 25 bp, probe
atcttttctctgtcagcgaacgtgg

SEQ ID NO: 122889 - DNA, 25 bp, probe
atcttttcatcctcgagacaggaca

SEQ ID NO: 122890 - DNA, 25 bp, probe
atcttttcatcctaccagatgagaa

SEQ ID NO: 122891 - DNA, 25 bp, probe
atcttctcctcccgtgatgagaagt

SEQ ID NO: 122892 - DNA, 25 bp, probe
atcttctcacttggtgtgaatcctt

SEQ ID NO: 122893 - DNA, 25 bp, probe
atcttccactattttcaatgtatta

SEQ ID NO: 122894 - DNA, 25 bp, probe
atcttccatctttggatttgttaag

SEQ ID NO: 122895 - DNA, 25 bp, probe
atcttgcagattatggactttccta

SEQ ID NO: 122896 - DNA, 25 bp, probe
atcccagctctagtggcaagtctgc

SEQ ID NO: 122897 - DNA, 25 bp, probe
atctacagtaaggacagtctctgct

SEQ ID NO: 122898 - DNA, 25 bp, probe
atcgagaggaggccagatgtcccgg

SEQ ID NO: 122899 - DNA, 25 bp, probe
atccgggaggtcaatgccatgcact

SEQ ID NO: 122900 - DNA, 25 bp, probe
atccaggctgggaacatgctaggca

SEQ ID NO: 122901 - DNA, 25 bp, probe
atcgggcgggagctgtggagcagcc

SEQ ID NO: 122902 - DNA, 25 bp, probe
atcgggaaccatttgtgcaacgaca

SEQ ID NO: 122903 - DNA, 25 bp, probe
atcgaggacaccatagcggagaact

SEQ ID NO: 122904 - DNA, 25 bp, probe
atcgagtcaagctggacgaggcctt

SEQ ID NO: 122905 - DNA, 25 bp, probe
atcgggatatgcgaggccgagtcct

SEQ ID NO: 122906 - DNA, 25 bp, probe
atctctgtagacgaagctctgcgtc

SEQ ID NO: 122907 - DNA, 25 bp, probe
atctttcagcagcaacctgagaact

SEQ ID NO: 122908 - DNA, 25 bp, probe
atctttgagctgctcccaagagcac

SEQ ID NO: 122909 - DNA, 25 bp, probe
atctttgagcatcgctacttcaagg

SEQ ID NO: 122910 - DNA, 25 bp, probe
atctgattcagatgtacatccccag

SEQ ID NO: 122911 - DNA, 25 bp, probe
atctgattcagatgtacatccccag

SEQ ID NO: 122912 - DNA, 25 bp, probe
atcgacgcacagctaatatccgcag

SEQ ID NO: 122913 - DNA, 25 bp, probe
atctactgccacaagttcatccagc

SEQ ID NO: 122914 - DNA, 25 bp, probe
atctactgccacaagttcatccagc

SEQ ID NO: 122915 - DNA, 25 bp, probe
atctacagaccaagtttgctcgcct

SEQ ID NO: 122916 - DNA, 25 bp, probe
atctagaacgtggattccttctttt

SEQ ID NO: 122917 - DNA, 25 bp, probe
atctaatattagccttgtctttgat

SEQ ID NO: 122918 - DNA, 25 bp, probe
atcttaacacaggcaatgtcttctt

SEQ ID NO: 122919 - DNA, 25 bp, probe
atcttaacacaggcaatgtcttctt

SEQ ID NO: 122920 - DNA, 25 bp, probe
atcttccaacatcgattgccttgtg

SEQ ID NO: 122921 - DNA, 25 bp, probe
atcttcaaagcacaactctatttca

SEQ ID NO: 122922 - DNA, 25 bp, probe
atcttgccaagacagcctttgtcca

SEQ ID NO: 122923 - DNA, 25 bp, probe
atcttgcttgaacttcctgttcttc

SEQ ID NO: 122924 - DNA, 25 bp, probe
atctcttcgaacttcagtttcttca

SEQ ID NO: 122925 - DNA, 25 bp, probe
atctttcagatcatgtgcaattttt

SEQ ID NO: 122926 - DNA, 25 bp, probe
atctcctcagatctttggtttttgc

SEQ ID NO: 122927 - DNA, 25 bp, probe
atctaccacattgtccgctttgtgg

SEQ ID NO: 122928 - DNA, 25 bp, probe
atctacaaaatcctccatgctttgg

SEQ ID NO: 122929 - DNA, 25 bp, probe
atcgcacagacactgcgtgcaatgt

SEQ ID NO: 122930 - DNA, 25 bp, probe
atctgcccaacctgcaatgtgacta

SEQ ID NO: 122931 - DNA, 25 bp, probe
atcttgggacactgaattgaacacc

SEQ ID NO: 122932 - DNA, 25 bp, probe
atcggtgtgaaataacgggcccata

SEQ ID NO: 122933 - DNA, 25 bp, probe
atccggagaaaaacacggaccatga

SEQ ID NO: 122934 - DNA, 25 bp, probe
atctctgcagaaagccaacaggtac

SEQ ID NO: 122935 - DNA, 25 bp, probe
atctggagaatcgcctgcaggtggg

SEQ ID NO: 122936 - DNA, 25 bp, probe
atcttcaacatcctcgtgggtgtgg

SEQ ID NO: 122937 - DNA, 25 bp, probe
atcttctatatcttcaggcgcgcgg

SEQ ID NO: 122938 - DNA, 25 bp, probe
atctatctttgctgctcggcagtgg

SEQ ID NO: 122939 - DNA, 25 bp, probe
atctacccatgctccagcaaggagt

SEQ ID NO: 122940 - DNA, 25 bp, probe
atcttccaggcgctacagcaggagt

SEQ ID NO: 122941 - DNA, 25 bp, probe
atcttcagagagtgtgaccaggacc

SEQ ID NO: 122942 - DNA, 25 bp, probe
atcttcagagagtacaccaagccct

SEQ ID NO: 122943 - DNA, 25 bp, probe
atcttcagagagtacaccaagccct

SEQ ID NO: 122944 - DNA, 25 bp, probe
atcttcatcggtactccaaggttct

SEQ ID NO: 122945 - DNA, 25 bp, probe
atcgttctccttacaatcaagttct

SEQ ID NO: 122946 - DNA, 25 bp, probe
atcgaggccgtcaacaacggtgact

SEQ ID NO: 122947 - DNA, 25 bp, probe
atctagagacttcaaaaggctacaa

SEQ ID NO: 122948 - DNA, 25 bp, probe
atctagatgactataacatacacgt

SEQ ID NO: 122949 - DNA, 25 bp, probe
atctacacactaaagaagaactgct

SEQ ID NO: 122950 - DNA, 25 bp, probe
atcttcacctatggaaagcagccat

SEQ ID NO: 122951 - DNA, 25 bp, probe
atctacaccggcctgaagagtgcag

SEQ ID NO: 122952 - DNA, 25 bp, probe
atctacatgccatgcctatgggcca

SEQ ID NO: 122953 - DNA, 25 bp, probe
atctactcctttggcatgtgtgcac

SEQ ID NO: 122954 - DNA, 25 bp, probe
atctaccagctcatgatgcagtgct

SEQ ID NO: 122955 - DNA, 25 bp, probe
atctgcactcagagcgcaagatcca

SEQ ID NO: 122956 - DNA, 25 bp, probe
atcttgctcagaagctcaatatgca

SEQ ID NO: 122957 - DNA, 25 bp, probe
atctattatcaactgctgcttcacc

SEQ ID NO: 122958 - DNA, 25 bp, probe
atcttattcatagtgtttcccacgt

SEQ ID NO: 122959 - DNA, 25 bp, probe
atctacattgtaggtttttccagtg

SEQ ID NO: 122960 - DNA, 25 bp, probe
atctacattgtaggtttttccagtg

SEQ ID NO: 122961 - DNA, 25 bp, probe
atctacattgatagcatttattgtg

SEQ ID NO: 122962 - DNA, 25 bp, probe
atctccctgaccaaaattgctttga

SEQ ID NO: 122963 - DNA, 25 bp, probe
atctctctctcaacaaaaggtatat

SEQ ID NO: 122964 - DNA, 25 bp, probe
atcttcatggaattcacaaagtaat

SEQ ID NO: 122965 - DNA, 25 bp, probe
atctatcatgagtattattaactaa

SEQ ID NO: 122966 - DNA, 25 bp, probe
atctttgagataatttaaccctgcc

SEQ ID NO: 122967 - DNA, 25 bp, probe
atcttctgcagagaactggaacctg

SEQ ID NO: 122968 - DNA, 25 bp, probe
atcttctataaacaggcatgcactc

SEQ ID NO: 122969 - DNA, 25 bp, probe
atctatgattaatctaggattcctt

SEQ ID NO: 122970 - DNA, 25 bp, probe
atctagaagagtctattgtctcctt

SEQ ID NO: 122971 - DNA, 25 bp, probe
atctggagggccatcttggcacagc

SEQ ID NO: 122972 - DNA, 25 bp, probe
acggcagggatcattgggaaaggtg

SEQ ID NO: 122973 - DNA, 25 bp, probe
acggcagggatcattgggaaaggtg

SEQ ID NO: 122974 - DNA, 25 bp, probe
atctggggagtatttgggaaacagg

SEQ ID NO: 122975 - DNA, 25 bp, probe
atctgggatatgtgttggaaaactg

SEQ ID NO: 122976 - DNA, 25 bp, probe
atctaagcatttttatggaaatatt

SEQ ID NO: 122977 - DNA, 25 bp, probe
atctgaatcatttttaagtatacat

SEQ ID NO: 122978 - DNA, 25 bp, probe
atctatgtctttatgaaccggcagt

SEQ ID NO: 122979 - DNA, 25 bp, probe
atctatgtcttttcctaccagtggt

SEQ ID NO: 122980 - DNA, 25 bp, probe
atcttcaccgattttacctgcatgg

SEQ ID NO: 122981 - DNA, 25 bp, probe
atcttcatcatcattttctcctatg

SEQ ID NO: 122982 - DNA, 25 bp, probe
atcttcatcatcattttctcctatg

SEQ ID NO: 122983 - DNA, 25 bp, probe
atctactgagcaatatttcccttta

SEQ ID NO: 122984 - DNA, 25 bp, probe
atctactgagcaatatttcccttta

SEQ ID NO: 122985 - DNA, 25 bp, probe
atcgcgtcaagaaattccagtttac

SEQ ID NO: 122986 - DNA, 25 bp, probe
atcgagccaaatggatatcacagga

SEQ ID NO: 122987 - DNA, 25 bp, probe
atctgaccaatagtacacacacaga

SEQ ID NO: 122988 - DNA, 25 bp, probe
atctgatccttgtggcacacaactg

SEQ ID NO: 122989 - DNA, 25 bp, probe
atctaccatgggaagcatcccctga

SEQ ID NO: 122990 - DNA, 25 bp, probe
atctccctggcgaagatctacttca

SEQ ID NO: 122991 - DNA, 25 bp, probe
atctccctggcgaagatctacttca

SEQ ID NO: 122992 - DNA, 25 bp, probe
atctgcccctggaagattaaaccag

SEQ ID NO: 122993 - DNA, 25 bp, probe
atcgcccctgagatcctacagggcc

SEQ ID NO: 122994 - DNA, 25 bp, probe
atctcccacgactcagtgaagtttc

SEQ ID NO: 122995 - DNA, 25 bp, probe
atctcccacgactcagtgaagtttc

SEQ ID NO: 122996 - DNA, 25 bp, probe
atctggcgggcacacagtgcaatgt

SEQ ID NO: 122997 - DNA, 25 bp, probe
atctggcgggcacacagtgcaatgt

SEQ ID NO: 122998 - DNA, 25 bp, probe
atcgatgctgctccagtaactacag

SEQ ID NO: 122999 - DNA, 25 bp, probe
atctactgctgtctcaaccacaggt

SEQ ID NO: 123000 - DNA, 25 bp, probe
atctactgctgtctcaaccacaggt

SEQ ID NO: 123001 - DNA, 25 bp, probe
atctgctctgtctggaatccaggga

SEQ ID NO: 123002 - DNA, 25 bp, probe
atctcttcatcttaaacctggccat

SEQ ID NO: 123003 - DNA, 25 bp, probe
atcgagttcatgtacaagcctggga

SEQ ID NO: 123004 - DNA, 25 bp, probe
atcgtcatcctggaaggcgtggtgg

SEQ ID NO: 123005 - DNA, 25 bp, probe
atcgtcatcctggaaggcgtggtgg

SEQ ID NO: 123006 - DNA, 25 bp, probe
atcgatgccgtgaaggactgccgtg

SEQ ID NO: 123007 - DNA, 25 bp, probe
atctcagccgtgaactacgacttcg

SEQ ID NO: 123008 - DNA, 25 bp, probe
atcgcaaatgctgcactacgaccct

SEQ ID NO: 123009 - DNA, 25 bp, probe
atctcaatgagatcaaaccccctat

SEQ ID NO: 123010 - DNA, 25 bp, probe
atctatggcacatcaagttaccctg

SEQ ID NO: 123011 - DNA, 25 bp, probe
atctatggcacatcaagttaccctg

SEQ ID NO: 123012 - DNA, 25 bp, probe
atctagcagcctacaagggccacct

SEQ ID NO: 123013 - DNA, 25 bp, probe
atctcagggcttcatgggaattcat

SEQ ID NO: 123014 - DNA, 25 bp, probe
atctcagggtttctggtgatcttgc

SEQ ID NO: 123015 - DNA, 25 bp, probe
atctaggaccttgtctgtggcaatc

SEQ ID NO: 123016 - DNA, 25 bp, probe
atctagaaccttgttgcctgtgtct

SEQ ID NO: 123017 - DNA, 25 bp, probe
atctagaaccttgttgcctgtgtct

SEQ ID NO: 123018 - DNA, 25 bp, probe
atgctggaaccttccatgggggtct

SEQ ID NO: 123019 - DNA, 25 bp, probe
atcggaacacattcagctgctgggt

SEQ ID NO: 123020 - DNA, 25 bp, probe
atctcgaatggctgctgctggtggt

SEQ ID NO: 123021 - DNA, 25 bp, probe
atctgcgagagccgcttcatgcggg

SEQ ID NO: 123022 - DNA, 25 bp, probe
atctgctgcagactggagcctgaga

SEQ ID NO: 123023 - DNA, 25 bp, probe
atctgcatccagatgacactggcct

SEQ ID NO: 123024 - DNA, 25 bp, probe
atctggccgcagaagatcttttcct

SEQ ID NO: 123025 - DNA, 25 bp, probe
atctgccctgtgaagtttgttttct

SEQ ID NO: 123026 - DNA, 25 bp, probe
atctgtccagtgggtaggttggact

SEQ ID NO: 123027 - DNA, 25 bp, probe
acttcgaagtggaggtctgccagct

SEQ ID NO: 123028 - DNA, 25 bp, probe
atctctcaaaggccttggttctgac

SEQ ID NO: 123029 - DNA, 25 bp, probe
acttaaaggccatgagttactcggg

SEQ ID NO: 123030 - DNA, 25 bp, probe
acctgaaagggcattttggctccgg

SEQ ID NO: 123031 - DNA, 25 bp, probe
acctgcaacggagactccggtgggc

SEQ ID NO: 123032 - DNA, 25 bp, probe
accctacgggaaggccgtagatgtg

SEQ ID NO: 123033 - DNA, 25 bp, probe
atccttcacaggggacccgttgata

SEQ ID NO: 123034 - DNA, 25 bp, probe
atccttcgtggggaaccgcgagata

SEQ ID NO: 123035 - DNA, 25 bp, probe
atccttcgtggggaaccgcgagata

SEQ ID NO: 123036 - DNA, 25 bp, probe
atgccccggaaggaagtcagataac

SEQ ID NO: 123037 - DNA, 25 bp, probe
atgcctccgaaagagggccaggtcc

SEQ ID NO: 123038 - DNA, 25 bp, probe
atcgatccaaaagtgttggccatga

SEQ ID NO: 123039 - DNA, 25 bp, probe
atcgatccaaaagtgttggccatga

SEQ ID NO: 123040 - DNA, 25 bp, probe
atcgaccagtcagagttcgaaggct

SEQ ID NO: 123041 - DNA, 25 bp, probe
atgccaaagtactgttggttcgatt

SEQ ID NO: 123042 - DNA, 25 bp, probe
atccaatagtagagttggctttttt

SEQ ID NO: 123043 - DNA, 25 bp, probe
atctaatcagttatgtatggtttct

SEQ ID NO: 123044 - DNA, 25 bp, probe
atctacttgtgacttgttggccttc

SEQ ID NO: 123045 - DNA, 25 bp, probe
atctgctttgtactgttggtgcctt

SEQ ID NO: 123046 - DNA, 25 bp, probe
atctcttagtagttgtggtatattt

SEQ ID NO: 123047 - DNA, 25 bp, probe
atctcgtggatagttcatggtaatt

SEQ ID NO: 123048 - DNA, 25 bp, probe
atctttggaatgcatgccagtaatg

SEQ ID NO: 123049 - DNA, 25 bp, probe
atctctgttatacacctgtatcatg

SEQ ID NO: 123050 - DNA, 25 bp, probe
atcttttgtgtctttcttatcatga

SEQ ID NO: 123051 - DNA, 25 bp, probe
atctgatttgttttcctcttaacgt

SEQ ID NO: 123052 - DNA, 25 bp, probe
atctggcttctgcattactattaac

SEQ ID NO: 123053 - DNA, 25 bp, probe
atctccatcattgttattttaacga

SEQ ID NO: 123054 - DNA, 25 bp, probe
atctcatacaaggcttattcttatt

SEQ ID NO: 123055 - DNA, 25 bp, probe
atctgtgaaaccctatgttgtcatc

SEQ ID NO: 123056 - DNA, 25 bp, probe
atctcaggcaaggtgtagtatgtcc

SEQ ID NO: 123057 - DNA, 25 bp, probe
atctcagccattggggcagggaccc

SEQ ID NO: 123058 - DNA, 25 bp, probe
atctcagccattggggcagggaccc

SEQ ID NO: 123059 - DNA, 25 bp, probe
atctcagacactggcagtcagggag

SEQ ID NO: 123060 - DNA, 25 bp, probe
atctagccatgcgaggtcttgggga

SEQ ID NO: 123061 - DNA, 25 bp, probe
atctggccgccattgaaagatggga

SEQ ID NO: 123062 - DNA, 25 bp, probe
atctggtctgactgaattcaaggga

SEQ ID NO: 123063 - DNA, 25 bp, probe
atctcgaatgactggcttaaatggt

SEQ ID NO: 123064 - DNA, 25 bp, probe
atctcgaatgactggcttaaatggt

SEQ ID NO: 123065 - DNA, 25 bp, probe
atctggaaattaccttaatatgcaa

SEQ ID NO: 123066 - DNA, 25 bp, probe
atctaaactgtagctgtattagcag

SEQ ID NO: 123067 - DNA, 25 bp, probe
atctaagtctgatttagtttcatca

SEQ ID NO: 123068 - DNA, 25 bp, probe
atctaggtttgttactggcttcaga

SEQ ID NO: 123069 - DNA, 25 bp, probe
atctttgtgcctcaacatactgttg

SEQ ID NO: 123070 - DNA, 25 bp, probe
atctagtcccatcaactcactatat

SEQ ID NO: 123071 - DNA, 25 bp, probe
catcggggattccacctacttattt

SEQ ID NO: 123072 - DNA, 25 bp, probe
atcggtgtcattcacctttcgtgtt

SEQ ID NO: 123073 - DNA, 25 bp, probe
atcgttgtgcttttttttctgtgtt

SEQ ID NO: 123074 - DNA, 25 bp, probe
atcgttgtgcttttttttctgtgtt

SEQ ID NO: 123075 - DNA, 25 bp, probe
atcgggtgctatatgttccgcatgg

SEQ ID NO: 123076 - DNA, 25 bp, probe
atcgtgggctactattatcccagtg

SEQ ID NO: 123077 - DNA, 25 bp, probe
atcgtgggctactattatcccagtg

SEQ ID NO: 123078 - DNA, 25 bp, probe
atcgtgtggtacgtcacatcccaga

SEQ ID NO: 123079 - DNA, 25 bp, probe
atctcgaagaagcctacatcccagt

SEQ ID NO: 123080 - DNA, 25 bp, probe
atctcgaagaagcctacatcccagt

SEQ ID NO: 123081 - DNA, 25 bp, probe
atctcaagggatcaacccaagttca

SEQ ID NO: 123082 - DNA, 25 bp, probe
atccaagaccttacaaccacatttc

SEQ ID NO: 123083 - DNA, 25 bp, probe
acctagaggcttggcacctaatacc

SEQ ID NO: 123084 - DNA, 25 bp, probe
atccatattggcagaacgaaaacgc

SEQ ID NO: 123085 - DNA, 25 bp, probe
atctctttggatccagcaaaaacca

SEQ ID NO: 123086 - DNA, 25 bp, probe
atctcgcctggtacaggaacataaa

SEQ ID NO: 123087 - DNA, 25 bp, probe
atctgcacactcctgaaaaacagaa

SEQ ID NO: 123088 - DNA, 25 bp, probe
atctacaccctgttaaccaagaaat

SEQ ID NO: 123089 - DNA, 25 bp, probe
atctaccccatgttttataaggaat

SEQ ID NO: 123090 - DNA, 25 bp, probe
atctgactccctgatttatgacgac

SEQ ID NO: 123091 - DNA, 25 bp, probe
atcggctcgcaaatctttgatacgg

SEQ ID NO: 123092 - DNA, 25 bp, probe
atctgttgcctagttttgtacatgg

SEQ ID NO: 123093 - DNA, 25 bp, probe
atctgttgcctagttttgtacatgg

SEQ ID NO: 123094 - DNA, 25 bp, probe
atctttcacacacattctggacagc

SEQ ID NO: 123095 - DNA, 25 bp, probe
atctgatcccagttttctggaagca

SEQ ID NO: 123096 - DNA, 25 bp, probe
atctggcctcagcttgggctagaga

SEQ ID NO: 123097 - DNA, 25 bp, probe
atctgagccaaccttggccgacatg

SEQ ID NO: 123098 - DNA, 25 bp, probe
atctgagccaaccttggccgacatg

SEQ ID NO: 123099 - DNA, 25 bp, probe
atctagcagacagctctggacagac

SEQ ID NO: 123100 - DNA, 25 bp, probe
atctcatgcgtctatgttggagcaa

SEQ ID NO: 123101 - DNA, 25 bp, probe
atctcggatacaatagaggcaaaga

SEQ ID NO: 123102 - DNA, 25 bp, probe
atctcagaatacagaagacctagca

SEQ ID NO: 123103 - DNA, 25 bp, probe
atctagctacacgggaccctgatga

SEQ ID NO: 123104 - DNA, 25 bp, probe
atctagctacacgggaccctgatga

SEQ ID NO: 123105 - DNA, 25 bp, probe
atcggagacccggaaactgatcagg

SEQ ID NO: 123106 - DNA, 25 bp, probe
atcgccgataaccaggatttacagg

SEQ ID NO: 123107 - DNA, 25 bp, probe
atcggtgacatctgggctttcactc

SEQ ID NO: 123108 - DNA, 25 bp, probe
atccggcagcacagctggttccgga

SEQ ID NO: 123109 - DNA, 25 bp, probe
atcggcacagtcagcatggatgata

SEQ ID NO: 123110 - DNA, 25 bp, probe
atctggcacgtggccaggagccatg

SEQ ID NO: 123111 - DNA, 25 bp, probe
atctattgcgtggtgggcagccatg

SEQ ID NO: 123112 - DNA, 25 bp, probe
atctttgcagagctggccaatgctg

SEQ ID NO: 123113 - DNA, 25 bp, probe
atctctagagggaagctcacagcat

SEQ ID NO: 123114 - DNA, 25 bp, probe
atctgctggagggtggtagagacca

SEQ ID NO: 123115 - DNA, 25 bp, probe
atctttggcgttcgtctagacacag

SEQ ID NO: 123116 - DNA, 25 bp, probe
atctcttccctttgctaacaatgag

SEQ ID NO: 123117 - DNA, 25 bp, probe
atctcttatcttacgaaaaaatggt

SEQ ID NO: 123118 - DNA, 25 bp, probe
atctgttagctttgtgaaaattcat

SEQ ID NO: 123119 - DNA, 25 bp, probe
atctcttgagagatttagaatatct

SEQ ID NO: 123120 - DNA, 25 bp, probe
atctcttggatctcctcagatcttt

SEQ ID NO: 123121 - DNA, 25 bp, probe
atctagaggatctctcctttttata

SEQ ID NO: 123122 - DNA, 25 bp, probe
atctagaggatctctcctttttata

SEQ ID NO: 123123 - DNA, 25 bp, probe
atctctgaaatatctcgttatttat

SEQ ID NO: 123124 - DNA, 25 bp, probe
atctgagacagatactagatatttt

SEQ ID NO: 123125 - DNA, 25 bp, probe
atctcagaatcttacttgatgcatt

SEQ ID NO: 123126 - DNA, 25 bp, probe
atctctcaatctcatgcttgagtct

SEQ ID NO: 123127 - DNA, 25 bp, probe
atctctaatctgttttgagtcttta

SEQ ID NO: 123128 - DNA, 25 bp, probe
atctctcaatgtttttacttttgaa

SEQ ID NO: 123129 - DNA, 25 bp, probe
atctgacatcttatttacttgtaga

SEQ ID NO: 123130 - DNA, 25 bp, probe
atctgacatcttatttacttgtaga

SEQ ID NO: 123131 - DNA, 25 bp, probe
atctgagtttagattcccttgaaga

SEQ ID NO: 123132 - DNA, 25 bp, probe
atgcagagttttttttccgtgaaag

SEQ ID NO: 123133 - DNA, 25 bp, probe
atcgttttttatatctcaggtggtg

SEQ ID NO: 123134 - DNA, 25 bp, probe
atctcttttttatatctctttggcg

SEQ ID NO: 123135 - DNA, 25 bp, probe
atctctcttgttagttaccttgtag

SEQ ID NO: 123136 - DNA, 25 bp, probe
atctctcttgttagttaccttgtag

SEQ ID NO: 123137 - DNA, 25 bp, probe
atctctttcctagattagcttctga

SEQ ID NO: 123138 - DNA, 25 bp, probe
atctctttattagtgaatcatgctt

SEQ ID NO: 123139 - DNA, 25 bp, probe
atctctttattagtgaatcatgctt

SEQ ID NO: 123140 - DNA, 25 bp, probe
atctcttagtggttacattgccatt

SEQ ID NO: 123141 - DNA, 25 bp, probe
atctctcgactgaatggactttgca

SEQ ID NO: 123142 - DNA, 25 bp, probe
atctgcacaaaggtggacatgttca

SEQ ID NO: 123143 - DNA, 25 bp, probe
atctaccagatcatgtacagctgct

SEQ ID NO: 123144 - DNA, 25 bp, probe
atctctgtaatcatgcaatagctgt

SEQ ID NO: 123145 - DNA, 25 bp, probe
atctcatttcacaagactggcttca

SEQ ID NO: 123146 - DNA, 25 bp, probe
atctagttcctggattggttgctaa

SEQ ID NO: 123147 - DNA, 25 bp, probe
atctgtgttttgaatggtgttgtat

SEQ ID NO: 123148 - DNA, 25 bp, probe
atctggaggtctcatttcttgtaaa

SEQ ID NO: 123149 - DNA, 25 bp, probe
catcgacaggtacattgcggttact

SEQ ID NO: 123150 - DNA, 25 bp, probe
atctaatgaccacatttgtattact

SEQ ID NO: 123151 - DNA, 25 bp, probe
atctaacaaattattgtctcataat

SEQ ID NO: 123152 - DNA, 25 bp, probe
atctacacagtgactttcttcctag

SEQ ID NO: 123153 - DNA, 25 bp, probe
atctacctggacattcttggctagt

SEQ ID NO: 123154 - DNA, 25 bp, probe
atctacctggacattcttggctagt

SEQ ID NO: 123155 - DNA, 25 bp, probe
atctacctggacaccgcagatgaag

SEQ ID NO: 123156 - DNA, 25 bp, probe
atctgtcctgggattgtgcaagaag

SEQ ID NO: 123157 - DNA, 25 bp, probe
atctactcagtggcttggctgaatt

SEQ ID NO: 123158 - DNA, 25 bp, probe
atctacatacagcctggcagtactt

SEQ ID NO: 123159 - DNA, 25 bp, probe
atctcactaagccttagttctttca

SEQ ID NO: 123160 - DNA, 25 bp, probe
atctcacacgactttagtttggcca

SEQ ID NO: 123161 - DNA, 25 bp, probe
atcccaggacgtcagttctgtccat

SEQ ID NO: 123162 - DNA, 25 bp, probe
atcctaaactgccctgtggctttct

SEQ ID NO: 123163 - DNA, 25 bp, probe
atgcgtttaatcacattcgagtgtt

SEQ ID NO: 123164 - DNA, 25 bp, probe
atcgttcttgattagtatcgtgagt

SEQ ID NO: 123165 - DNA, 25 bp, probe
atctgatatttacagctttggtgtg

SEQ ID NO: 123166 - DNA, 25 bp, probe
atctaagatttgggcatttggttat

SEQ ID NO: 123167 - DNA, 25 bp, probe
atctaagatttgggcatttggttat

SEQ ID NO: 123168 - DNA, 25 bp, probe
atctaagctcttgtaagtgagttaa

SEQ ID NO: 123169 - DNA, 25 bp, probe
atctcaaattttaagatggatttca

SEQ ID NO: 123170 - DNA, 25 bp, probe
atctcgttatttattggaggtattg

SEQ ID NO: 123171 - DNA, 25 bp, probe
atccgttgatgtgttgtctagtata

SEQ ID NO: 123172 - DNA, 25 bp, probe
atcccggctgctgcatttaggtgga

SEQ ID NO: 123173 - DNA, 25 bp, probe
atcgacgcgcttctgtatgggcgcg

SEQ ID NO: 123174 - DNA, 25 bp, probe
atcgagggccgaggtcacggccagg

SEQ ID NO: 123175 - DNA, 25 bp, probe
atcggaggccgggagagcaggcccc

SEQ ID NO: 123176 - DNA, 25 bp, probe
atcgaggtgctctgcgagaacttcc

SEQ ID NO: 123177 - DNA, 25 bp, probe
atctgagatttcactgacaacttta

SEQ ID NO: 123178 - DNA, 25 bp, probe
atctgatgtttcacgcagtccattt

SEQ ID NO: 123179 - DNA, 25 bp, probe
atctctttcctgaggatccatcata

SEQ ID NO: 123180 - DNA, 25 bp, probe
atctctaacagctcaggatctctta

SEQ ID NO: 123181 - DNA, 25 bp, probe
atctctggagccttggagttctttg

SEQ ID NO: 123182 - DNA, 25 bp, probe
atcgatgaggtcttcggctttgttc

SEQ ID NO: 123183 - DNA, 25 bp, probe
atcggagccatcatcgcgccaaatt

SEQ ID NO: 123184 - DNA, 25 bp, probe
atctgggccatcggtgtgacagcct

SEQ ID NO: 123185 - DNA, 25 bp, probe
atctgtcctcaggatggatgtccct

SEQ ID NO: 123186 - DNA, 25 bp, probe
atcgtcaccgcaagatgaagccagt

SEQ ID NO: 123187 - DNA, 25 bp, probe
atcgtcacggagtacatgagcaagg

SEQ ID NO: 123188 - DNA, 25 bp, probe
atctgcttcggagactcaggtggcc

SEQ ID NO: 123189 - DNA, 25 bp, probe
atctgttctcggtactatagggcac

SEQ ID NO: 123190 - DNA, 25 bp, probe
atctgttctcggtactatagggcac

SEQ ID NO: 123191 - DNA, 25 bp, probe
atcgttttggtcttgtacaggcaca

SEQ ID NO: 123192 - DNA, 25 bp, probe
atctgttttgagtctttacaaaata

SEQ ID NO: 123193 - DNA, 25 bp, probe
atctgatttgtccttttgatgcaaa

SEQ ID NO: 123194 - DNA, 25 bp, probe
atcggctttcctacctagatgagca

SEQ ID NO: 123195 - DNA, 25 bp, probe
atctgggctttcactctggtgaaac

SEQ ID NO: 123196 - DNA, 25 bp, probe
atctgtggctttctccatcatagaa

SEQ ID NO: 123197 - DNA, 25 bp, probe
atctggagttggggcacagcgaggt

SEQ ID NO: 123198 - DNA, 25 bp, probe
atctgggcatatggggctgggatgg

SEQ ID NO: 123199 - DNA, 25 bp, probe
atctgtctaacttggctggtggtgt

SEQ ID NO: 123200 - DNA, 25 bp, probe
atccctgaaatctgatcttggtatt

SEQ ID NO: 123201 - DNA, 25 bp, probe
atccctgagaccttccggggatggc

SEQ ID NO: 123202 - DNA, 25 bp, probe
atcggcggatccaatggacgacgat

SEQ ID NO: 123203 - DNA, 25 bp, probe
atcggggattggtgagccagctgct

SEQ ID NO: 123204 - DNA, 25 bp, probe
atcggggattggtgagccagctgct

SEQ ID NO: 123205 - DNA, 25 bp, probe
atcggggattggtgagccagctgct

SEQ ID NO: 123206 - DNA, 25 bp, probe
atcggggattggtgagccagctgct

SEQ ID NO: 123207 - DNA, 25 bp, probe
atcggggattggtgagccagctgct

SEQ ID NO: 123208 - DNA, 25 bp, probe
atcggttcctggcagaggatgcact

SEQ ID NO: 123209 - DNA, 25 bp, probe
atctgtgcttgcaggcgagggcatg

SEQ ID NO: 123210 - DNA, 25 bp, probe
atcgtggtgaaggtgagggcggcgg

SEQ ID NO: 123211 - DNA, 25 bp, probe
atcggcggagaccagggctggtgga

SEQ ID NO: 123212 - DNA, 25 bp, probe
atcggcggagaccagggctggtgga

SEQ ID NO: 123213 - DNA, 25 bp, probe
atcggcggagaccagggctggtgga

SEQ ID NO: 123214 - DNA, 25 bp, probe
atcggcagtggagctactgctgtgg

SEQ ID NO: 123215 - DNA, 25 bp, probe
atcgtcatggtgacccagtgtgttg

SEQ ID NO: 123216 - DNA, 25 bp, probe
atctcaatgtgaatgcaccaggctg

SEQ ID NO: 123217 - DNA, 25 bp, probe
atctactgatgctagacacttggca

SEQ ID NO: 123218 - DNA, 25 bp, probe
atcgacatgctgtacatcagctatg

SEQ ID NO: 123219 - DNA, 25 bp, probe
atcgacatgctgtacatcagctatg

SEQ ID NO: 123220 - DNA, 25 bp, probe
atctgcaagcattgtctgagctgag

SEQ ID NO: 123221 - DNA, 25 bp, probe
atctgcaagcattgtctgagctgag

SEQ ID NO: 123222 - DNA, 25 bp, probe
atctcagagcttacaggctgagcca

SEQ ID NO: 123223 - DNA, 25 bp, probe
atctcatgagcttcttggggctggc

SEQ ID NO: 123224 - DNA, 25 bp, probe
atctcaagctactggtgagctggca

SEQ ID NO: 123225 - DNA, 25 bp, probe
atcgcagacttctggcagatggtgt

SEQ ID NO: 123226 - DNA, 25 bp, probe
atctgcaaagtctgagcaggttttg

SEQ ID NO: 123227 - DNA, 25 bp, probe
atctccaagacggatggcgtttgtg

SEQ ID NO: 123228 - DNA, 25 bp, probe
atctcacagagaaggtggccctctc

SEQ ID NO: 123229 - DNA, 25 bp, probe
atctcaaagaagaaggcctctgatg

SEQ ID NO: 123230 - DNA, 25 bp, probe
atctcctatgaaccagacagctctt

SEQ ID NO: 123231 - DNA, 25 bp, probe
atctccgataagacagacatgtgga

SEQ ID NO: 123232 - DNA, 25 bp, probe
atctcagggcactcaaatgtggcac

SEQ ID NO: 123233 - DNA, 25 bp, probe
atctcagttatcttaaatattccaa

SEQ ID NO: 123234 - DNA, 25 bp, probe
atctgcagttactttgaagacatca

SEQ ID NO: 123235 - DNA, 25 bp, probe
atctgcatggtattggaataactca

SEQ ID NO: 123236 - DNA, 25 bp, probe
atctgcatggcgtacctcatgaaga

SEQ ID NO: 123237 - DNA, 25 bp, probe
atctctaagtgttgctcagagtgaa

SEQ ID NO: 123238 - DNA, 25 bp, probe
atctctaagtgttgctcagagtgaa

SEQ ID NO: 123239 - DNA, 25 bp, probe
atcctgaatttgcacagaggaaagc

SEQ ID NO: 123240 - DNA, 25 bp, probe
atcctggttgctctcaggaggctcc

SEQ ID NO: 123241 - DNA, 25 bp, probe
atctctgttctgcaggtgagaggat

SEQ ID NO: 123242 - DNA, 25 bp, probe
atccagtgacggcaggaacgtggac

SEQ ID NO: 123243 - DNA, 25 bp, probe
atcgactgcatcacgcagggacgtg

SEQ ID NO: 123244 - DNA, 25 bp, probe
atcgactgcatcacgcagggacgtg

SEQ ID NO: 123245 - DNA, 25 bp, probe
atcgaccgaaagcaagaggtgcctc

SEQ ID NO: 123246 - DNA, 25 bp, probe
atcgaccgaaagcaagaggtgcctc

SEQ ID NO: 123247 - DNA, 25 bp, probe
atcgacctaacacatctgaaatact

SEQ ID NO: 123248 - DNA, 25 bp, probe
atcgacctaacacatctgaaatact

SEQ ID NO: 123249 - DNA, 25 bp, probe
atcggctgtacttcgtcatggaata

SEQ ID NO: 123250 - DNA, 25 bp, probe
atctgtgagaataatcgctatggaa

SEQ ID NO: 123251 - DNA, 25 bp, probe
atctgtgagaataatcgctatggaa

SEQ ID NO: 123252 - DNA, 25 bp, probe
atctctgtgccttatgtctatggat

SEQ ID NO: 123253 - DNA, 25 bp, probe
atctctgtgccttatgtctatggat

SEQ ID NO: 123254 - DNA, 25 bp, probe
atctctgccctgcacttgtgcagaa

SEQ ID NO: 123255 - DNA, 25 bp, probe
atctctgccctgcacttgtgcagaa

SEQ ID NO: 123256 - DNA, 25 bp, probe
atctgttcaccactcatttgcaact

SEQ ID NO: 123257 - DNA, 25 bp, probe
atctcttgagacttattcgctacta

SEQ ID NO: 123258 - DNA, 25 bp, probe
atctcaaagatcatggtagtactta

SEQ ID NO: 123259 - DNA, 25 bp, probe
atctcaatacactggaacgcctcat

SEQ ID NO: 123260 - DNA, 25 bp, probe
atccacttccggctgaagaccatta

SEQ ID NO: 123261 - DNA, 25 bp, probe
atctcaattcccttataaatccact

SEQ ID NO: 123262 - DNA, 25 bp, probe
atctcaattcccttataaatccact

SEQ ID NO: 123263 - DNA, 25 bp, probe
atctaattcaccttaacatgtggga

SEQ ID NO: 123264 - DNA, 25 bp, probe
atctaattcgccctcagcatgtggg

SEQ ID NO: 123265 - DNA, 25 bp, probe
atctctttcaccccagtgtgaggtt

SEQ ID NO: 123266 - DNA, 25 bp, probe
atctctgatttggctctccttaagt

SEQ ID NO: 123267 - DNA, 25 bp, probe
atgcctactgtaggcctcctaagtc

SEQ ID NO: 123268 - DNA, 25 bp, probe
atctcacctgttggaatgcactaat

SEQ ID NO: 123269 - DNA, 25 bp, probe
atctccagttctggaggctccagtg

SEQ ID NO: 123270 - DNA, 25 bp, probe
atctcagtgtatcggagcctggcag

SEQ ID NO: 123271 - DNA, 25 bp, probe
atctcactggacgagttcaggcaga

SEQ ID NO: 123272 - DNA, 25 bp, probe
atctcctgggggcacaggaatgtcg

SEQ ID NO: 123273 - DNA, 25 bp, probe
atcgtgctggagcggatgcggtatg

SEQ ID NO: 123274 - DNA, 25 bp, probe
atcggtggaacagtgatgaagtgag

SEQ ID NO: 123275 - DNA, 25 bp, probe
atcggttcaggaggagacagtcagg

SEQ ID NO: 123276 - DNA, 25 bp, probe
atgtgatgactgtgacggggctagg

SEQ ID NO: 123277 - DNA, 25 bp, probe
atctgcagaatgggagcggtggggg

SEQ ID NO: 123278 - DNA, 25 bp, probe
atctgccacagaaggctggtgggtt

SEQ ID NO: 123279 - DNA, 25 bp, probe
atctgccggctggagcgggcagtgt

SEQ ID NO: 123280 - DNA, 25 bp, probe
atctccatggctttgggacatttac

SEQ ID NO: 123281 - DNA, 25 bp, probe
atctcctgaggcttgtggatttcta

SEQ ID NO: 123282 - DNA, 25 bp, probe
atctcgcagaccagtcgtttctaga

SEQ ID NO: 123283 - DNA, 25 bp, probe
atctcatgaagccattgatcttatc

SEQ ID NO: 123284 - DNA, 25 bp, probe
atctccatatgaacatgtcttctgg

SEQ ID NO: 123285 - DNA, 25 bp, probe
atctgcatttgaaagactacttgtc

SEQ ID NO: 123286 - DNA, 25 bp, probe
atctgcatcttgtaagcctttttgt

SEQ ID NO: 123287 - DNA, 25 bp, probe
atctcactttaatgctttcttgccc

SEQ ID NO: 123288 - DNA, 25 bp, probe
atctcctgtccaatgacatgtgtgc

SEQ ID NO: 123289 - DNA, 25 bp, probe
atctcctgacacttagcattctggt

SEQ ID NO: 123290 - DNA, 25 bp, probe
atctcatcgacctggacttgtgtaa

SEQ ID NO: 123291 - DNA, 25 bp, probe
atctctcacctcaggaactggaaga

SEQ ID NO: 123292 - DNA, 25 bp, probe
atgactatggccgggccgtggactg

SEQ ID NO: 123293 - DNA, 25 bp, probe
atgactatggccgggccgtggactg

SEQ ID NO: 123294 - DNA, 25 bp, probe
atgactatggccgggccgtggactg

SEQ ID NO: 123295 - DNA, 25 bp, probe
atgactagccaggcccctggcttaa

SEQ ID NO: 123296 - DNA, 25 bp, probe
atcgctaacgccacactgagttaat

SEQ ID NO: 123297 - DNA, 25 bp, probe
atcccaaactaagctatgtgaaata

SEQ ID NO: 123298 - DNA, 25 bp, probe
atccctcaccaaactttggcaaaag

SEQ ID NO: 123299 - DNA, 25 bp, probe
atcccccagcaaagtgcctagaaca

SEQ ID NO: 123300 - DNA, 25 bp, probe
atcggcccaagtatgcgggactcac

SEQ ID NO: 123301 - DNA, 25 bp, probe
atcccccaaatgagcaggtccaaga

SEQ ID NO: 123302 - DNA, 25 bp, probe
atctccctcaagagtgggactgagg

SEQ ID NO: 123303 - DNA, 25 bp, probe
atctcctctaaggccatgggaatca

SEQ ID NO: 123304 - DNA, 25 bp, probe
atctgactcaactgccaggtgaaaa

SEQ ID NO: 123305 - DNA, 25 bp, probe
atctgcactcaaggtcgctggatgc

SEQ ID NO: 123306 - DNA, 25 bp, probe
atctgcacagcaagctgtcggtgat

SEQ ID NO: 123307 - DNA, 25 bp, probe
atctgctcatgcagtgtcagcctca

SEQ ID NO: 123308 - DNA, 25 bp, probe
atctcttgcaagctaatgctcagca

SEQ ID NO: 123309 - DNA, 25 bp, probe
atctgaatcagacaatcatgtagca

SEQ ID NO: 123310 - DNA, 25 bp, probe
atctgaatcagacaatcatgtagca

SEQ ID NO: 123311 - DNA, 25 bp, probe
atcgtaaagcgagctgacgctggtt

SEQ ID NO: 123312 - DNA, 25 bp, probe
atcgtcaacaacttcggcatgtact

SEQ ID NO: 123313 - DNA, 25 bp, probe
atctggtgaaacttctcctgatgca

SEQ ID NO: 123314 - DNA, 25 bp, probe
atctctgccaaaggtctcctatgta

SEQ ID NO: 123315 - DNA, 25 bp, probe
atctctgccaaaggtctcctatgta

SEQ ID NO: 123316 - DNA, 25 bp, probe
atctcttatactgtcatcctggtga

SEQ ID NO: 123317 - DNA, 25 bp, probe
atctcttatactgtcatcctggtga

SEQ ID NO: 123318 - DNA, 25 bp, probe
atctctttggctgaacatcgagagg

SEQ ID NO: 123319 - DNA, 25 bp, probe
atccggtggctttagccgtgcaaat

SEQ ID NO: 123320 - DNA, 25 bp, probe
atcgctggtgtgctaacaattgccc

SEQ ID NO: 123321 - DNA, 25 bp, probe
atctctgtggtgaagtcacaggtgc

SEQ ID NO: 123322 - DNA, 25 bp, probe
atctgcagatggaatccgagcaggg

SEQ ID NO: 123323 - DNA, 25 bp, probe
atctcagagtgtcctctggggggca

SEQ ID NO: 123324 - DNA, 25 bp, probe
atctgaaggtccagtactcagtgca

SEQ ID NO: 123325 - DNA, 25 bp, probe
atctgaaggtccagtactcagtgca

SEQ ID NO: 123326 - DNA, 25 bp, probe
atctgcagggacgcgtacgagctgc

SEQ ID NO: 123327 - DNA, 25 bp, probe
atctggtgcgaggactttctggtgc

SEQ ID NO: 123328 - DNA, 25 bp, probe
atcgaggcatggggcatgtcctttc

SEQ ID NO: 123329 - DNA, 25 bp, probe
atctgaggtttggcatgtcctgttt

SEQ ID NO: 123330 - DNA, 25 bp, probe
atctgggtttgtttacagcaattcc

SEQ ID NO: 123331 - DNA, 25 bp, probe
actgggtcctttattcatttctggg

SEQ ID NO: 123332 - DNA, 25 bp, probe
atctggagccctagtatctaatttt

SEQ ID NO: 123333 - DNA, 25 bp, probe
atctggatctctgttatgtgccatt

SEQ ID NO: 123334 - DNA, 25 bp, probe
atctggatatctgctggaagcctca

SEQ ID NO: 123335 - DNA, 25 bp, probe
atcgggacacactgatacttcatgg

SEQ ID NO: 123336 - DNA, 25 bp, probe
atcggccgacacaagaacatcatca

SEQ ID NO: 123337 - DNA, 25 bp, probe
atcggccgacacaagaacatcatca

SEQ ID NO: 123338 - DNA, 25 bp, probe
atcgagcggaagaactacattcacc

SEQ ID NO: 123339 - DNA, 25 bp, probe
atccacacttaatataattcgccac

SEQ ID NO: 123340 - DNA, 25 bp, probe
atccccagtttgtatttagctgcca

SEQ ID NO: 123341 - DNA, 25 bp, probe
atctctccagttcatcattaatgtg

SEQ ID NO: 123342 - DNA, 25 bp, probe
atctctccagttcatcattaatgtg

SEQ ID NO: 123343 - DNA, 25 bp, probe
atctctctccttgactggaattgct

SEQ ID NO: 123344 - DNA, 25 bp, probe
atctctctccttgactggaattgct

SEQ ID NO: 123345 - DNA, 25 bp, probe
atccttgccttcaaacgaaatggct

SEQ ID NO: 123346 - DNA, 25 bp, probe
atcccgtttcaaggctgtaattctg

SEQ ID NO: 123347 - DNA, 25 bp, probe
atcccgtttcaaggctgtaattctg

SEQ ID NO: 123348 - DNA, 25 bp, probe
atcgccctgtgataggatctaactt

SEQ ID NO: 123349 - DNA, 25 bp, probe
atcgccctgtgataggatctaactt

SEQ ID NO: 123350 - DNA, 25 bp, probe
atctccacagaatgggcatcgtcca

SEQ ID NO: 123351 - DNA, 25 bp, probe
atctcccagcaatataattttgaca

SEQ ID NO: 123352 - DNA, 25 bp, probe
atctcccagcaatataattttgaca

SEQ ID NO: 123353 - DNA, 25 bp, probe
atctgccaaaattatggatccggat

SEQ ID NO: 123354 - DNA, 25 bp, probe
atctgccagtaaacatcttccacaa

SEQ ID NO: 123355 - DNA, 25 bp, probe
atctgcaacaagaagtttcccactt

SEQ ID NO: 123356 - DNA, 25 bp, probe
atctgcaacaagaagtttcccactt

SEQ ID NO: 123357 - DNA, 25 bp, probe
atctgcctacatacagctattcaca

SEQ ID NO: 123358 - DNA, 25 bp, probe
atctctgctcaaagaattcaagcgt

SEQ ID NO: 123359 - DNA, 25 bp, probe
atctctgctcaaagaattcaagcgt

SEQ ID NO: 123360 - DNA, 25 bp, probe
atctctgtgcaccagttcctaggtg

SEQ ID NO: 123361 - DNA, 25 bp, probe
atctgatggactggtgtcctatgga

SEQ ID NO: 123362 - DNA, 25 bp, probe
atctgatgttgttttcctatggaaa

SEQ ID NO: 123363 - DNA, 25 bp, probe
atctgacgggatttctatatggaca

SEQ ID NO: 123364 - DNA, 25 bp, probe
atctgctagggatcttgatttgaaa

SEQ ID NO: 123365 - DNA, 25 bp, probe
atctgtaacgcagcttccgtaagca

SEQ ID NO: 123366 - DNA, 25 bp, probe
atctgtaacgcagcttccgtaagca

SEQ ID NO: 123367 - DNA, 25 bp, probe
atctcgaaccgcatgttcaggaaat

SEQ ID NO: 123368 - DNA, 25 bp, probe
atcccaagccctttagggctacagt

SEQ ID NO: 123369 - DNA, 25 bp, probe
atcggccactacattctgggtgaca

SEQ ID NO: 123370 - DNA, 25 bp, probe
atccttccttatcatgctgggtaca

SEQ ID NO: 123371 - DNA, 25 bp, probe
atcctccccttctgggagacacagt

SEQ ID NO: 123372 - DNA, 25 bp, probe
atcctccccttctgggagacacagt

SEQ ID NO: 123373 - DNA, 25 bp, probe
atcctccccttgagagtcatcagaa

SEQ ID NO: 123374 - DNA, 25 bp, probe
atccctcacctcagaagtaagacaa

SEQ ID NO: 123375 - DNA, 25 bp, probe
atctctccacctgctgatggaagcg

SEQ ID NO: 123376 - DNA, 25 bp, probe
atctgctactactacatggccaagg

SEQ ID NO: 123377 - DNA, 25 bp, probe
atctgcttctaccttagctcaagaa

SEQ ID NO: 123378 - DNA, 25 bp, probe
atctctttgactatatcacagagaa

SEQ ID NO: 123379 - DNA, 25 bp, probe
atctctctttctaatgagaaggact

SEQ ID NO: 123380 - DNA, 25 bp, probe
atctccgttgctatggatgcaggcc

SEQ ID NO: 123381 - DNA, 25 bp, probe
atctccgtcttttcagaagtgctgt

SEQ ID NO: 123382 - DNA, 25 bp, probe
atcccgatgttagaaatggttccag

SEQ ID NO: 123383 - DNA, 25 bp, probe
atcccgagttgtgtccaacgattcg

SEQ ID NO: 123384 - DNA, 25 bp, probe
atccctcagtttcttaaaatgtcct

SEQ ID NO: 123385 - DNA, 25 bp, probe
atcccaagtcggccattgaaaactc

SEQ ID NO: 123386 - DNA, 25 bp, probe
atcgggacttggcagccagaaacat

SEQ ID NO: 123387 - DNA, 25 bp, probe
atctgtgggcttgtgacacggactc

SEQ ID NO: 123388 - DNA, 25 bp, probe
atctgtcccttcagacatttatcct

SEQ ID NO: 123389 - DNA, 25 bp, probe
atctgtagacttctggttgtatttc

SEQ ID NO: 123390 - DNA, 25 bp, probe
atctgttgatttctgaccattatca

SEQ ID NO: 123391 - DNA, 25 bp, probe
atctgtctcttgtagtacaatgtat

SEQ ID NO: 123392 - DNA, 25 bp, probe
atctgccctgtgttatccagttatg

SEQ ID NO: 123393 - DNA, 25 bp, probe
atctgcattttgtctctttgtatct

SEQ ID NO: 123394 - DNA, 25 bp, probe
atgctattaagtcattctgaatctt

SEQ ID NO: 123395 - DNA, 25 bp, probe
atcgtctacgttatctgcatcactt

SEQ ID NO: 123396 - DNA, 25 bp, probe
atcgtctacgttatctgcatcactt

SEQ ID NO: 123397 - DNA, 25 bp, probe
atcgtctacgttatctgcatcactt

SEQ ID NO: 123398 - DNA, 25 bp, probe
atcgcgccggattattgctgcaact

SEQ ID NO: 123399 - DNA, 25 bp, probe
atctgagctggggaattgtacacat

SEQ ID NO: 123400 - DNA, 25 bp, probe
atctgagcattgataatgttctatc

SEQ ID NO: 123401 - DNA, 25 bp, probe
atcggaatgttggatcagctgtatc

SEQ ID NO: 123402 - DNA, 25 bp, probe
atctgggcttctggagagtattgct

SEQ ID NO: 123403 - DNA, 25 bp, probe
atctgcccagattctgaggttctgc

SEQ ID NO: 123404 - DNA, 25 bp, probe
atctgatccatgttcttgggactct

SEQ ID NO: 123405 - DNA, 25 bp, probe
atctctccttagttgatgagactgt

SEQ ID NO: 123406 - DNA, 25 bp, probe
atctccactgaatcgctggactgtg

SEQ ID NO: 123407 - DNA, 25 bp, probe
atctctgctgtgaagccctaacgtg

SEQ ID NO: 123408 - DNA, 25 bp, probe
atctctgtgtcaaggccatgatcct

SEQ ID NO: 123409 - DNA, 25 bp, probe
atctctgtgtgaaagtatctgactt

SEQ ID NO: 123410 - DNA, 25 bp, probe
atctctgggatttatgctcatgaac

SEQ ID NO: 123411 - DNA, 25 bp, probe
atctctggagactcatctcaggaca

SEQ ID NO: 123412 - DNA, 25 bp, probe
atctctggagactcatctcaggaca

SEQ ID NO: 123413 - DNA, 25 bp, probe
atctctgggacatttttgaggcatt

SEQ ID NO: 123414 - DNA, 25 bp, probe
atctctgagcaactttgtctggcct

SEQ ID NO: 123415 - DNA, 25 bp, probe
atcgatggcaagatcttctgcgtgc

SEQ ID NO: 123416 - DNA, 25 bp, probe
atctgattccagagcactgctccag

SEQ ID NO: 123417 - DNA, 25 bp, probe
atcgtgttctgcaatgcaggcatca

SEQ ID NO: 123418 - DNA, 25 bp, probe
atctgtgatgatcctcatatggccc

SEQ ID NO: 123419 - DNA, 25 bp, probe
atctgagatgattctctaccctcat

SEQ ID NO: 123420 - DNA, 25 bp, probe
atcgacatggtcctgaaccgcatgg

SEQ ID NO: 123421 - DNA, 25 bp, probe
atctgtcaagactgatactactggg

SEQ ID NO: 123422 - DNA, 25 bp, probe
atctctgcaaggctgaaaagcttgg

SEQ ID NO: 123423 - DNA, 25 bp, probe
atcgttgagatgcccaagaacctgg

SEQ ID NO: 123424 - DNA, 25 bp, probe
atcgttgagatgcccaagaacctgg

SEQ ID NO: 123425 - DNA, 25 bp, probe
atcggtcagcagaaaagaccctgct

SEQ ID NO: 123426 - DNA, 25 bp, probe
atctgcctctcagaaaaacccacca

SEQ ID NO: 123427 - DNA, 25 bp, probe
atctcctcaacatggaaactaaggc

SEQ ID NO: 123428 - DNA, 25 bp, probe
atcctctggacacgtaacctatgtc

SEQ ID NO: 123429 - DNA, 25 bp, probe
atctcctgaacccacaaattattct

SEQ ID NO: 123430 - DNA, 25 bp, probe
atctccgaagttaaaatctgtaata

SEQ ID NO: 123431 - DNA, 25 bp, probe
atctccagtcatgttagaatttaat

SEQ ID NO: 123432 - DNA, 25 bp, probe
atctccacacatctgttggactttt

SEQ ID NO: 123433 - DNA, 25 bp, probe
atctccacacatctgttggactttt

SEQ ID NO: 123434 - DNA, 25 bp, probe
atcccacaatgggctctgtttttat

SEQ ID NO: 123435 - DNA, 25 bp, probe
atctccagaagtgcagcctttgtta

SEQ ID NO: 123436 - DNA, 25 bp, probe
atcccagggtgaacctgcctgtgaa

SEQ ID NO: 123437 - DNA, 25 bp, probe
atccgtgtggacacgccacattatc

SEQ ID NO: 123438 - DNA, 25 bp, probe
atcggggcgacaatagctcactgcc

SEQ ID NO: 123439 - DNA, 25 bp, probe
agtgggtcgacattttcctggacac

SEQ ID NO: 123440 - DNA, 25 bp, probe
atgcgggtagactacgaccaggtga

SEQ ID NO: 123441 - DNA, 25 bp, probe
atcccggctgaatgagaccacggag

SEQ ID NO: 123442 - DNA, 25 bp, probe
atccgtccatttagtactacctgca

SEQ ID NO: 123443 - DNA, 25 bp, probe
atctccccattgacaatttaccatg

SEQ ID NO: 123444 - DNA, 25 bp, probe
atctccccttgcactaaagtatgta

SEQ ID NO: 123445 - DNA, 25 bp, probe
atctccccttttatgcagggatgga

SEQ ID NO: 123446 - DNA, 25 bp, probe
atctccccttttatgcagggatgga

SEQ ID NO: 123447 - DNA, 25 bp, probe
atcccgcagttttcttgggggcaga

SEQ ID NO: 123448 - DNA, 25 bp, probe
atccccgtggattctgctaagggaa

SEQ ID NO: 123449 - DNA, 25 bp, probe
atcccgggtgattctgtacatagtg

SEQ ID NO: 123450 - DNA, 25 bp, probe
atctcctaagtagctcttcagagtc

SEQ ID NO: 123451 - DNA, 25 bp, probe
atctcctaagtagctcttcagagtc

SEQ ID NO: 123452 - DNA, 25 bp, probe
atctcccataatacgacctacagtc

SEQ ID NO: 123453 - DNA, 25 bp, probe
atctgcaccaggaatccctaaagcc

SEQ ID NO: 123454 - DNA, 25 bp, probe
atctgctccaggttctgaagaaggc

SEQ ID NO: 123455 - DNA, 25 bp, probe
acacccacggacaggtaggcacgag

SEQ ID NO: 123456 - DNA, 25 bp, probe
acgtccatcgggaggcaaggcctca

SEQ ID NO: 123457 - DNA, 25 bp, probe
acgtccatcgggaggcaaggcctca

SEQ ID NO: 123458 - DNA, 25 bp, probe
atctgtttcgtgcattggaagaccc

SEQ ID NO: 123459 - DNA, 25 bp, probe
atcgtattcttccagtgaaaacaag

SEQ ID NO: 123460 - DNA, 25 bp, probe
atctccatttctcagtgacagaagc

SEQ ID NO: 123461 - DNA, 25 bp, probe
atctccagtccacaagttgaagagg

SEQ ID NO: 123462 - DNA, 25 bp, probe
atctcctgtcccaggattagcagag

SEQ ID NO: 123463 - DNA, 25 bp, probe
atctccatacggaggcgccaggagt

SEQ ID NO: 123464 - DNA, 25 bp, probe
atcccacaagggcgctgggggtgga

SEQ ID NO: 123465 - DNA, 25 bp, probe
atcccaaagccgtgtgtttgtgatg

SEQ ID NO: 123466 - DNA, 25 bp, probe
atcccaaagccttcaggtggagggg

SEQ ID NO: 123467 - DNA, 25 bp, probe
atcccagccagcggattgggggtgg

SEQ ID NO: 123468 - DNA, 25 bp, probe
atcccagccagcggattgggggtgg

SEQ ID NO: 123469 - DNA, 25 bp, probe
atcccagccagcggattgggggtgg

SEQ ID NO: 123470 - DNA, 25 bp, probe
atctccagctcagagtttgatggct

SEQ ID NO: 123471 - DNA, 25 bp, probe
atcctgactaccattgctgtcactg

SEQ ID NO: 123472 - DNA, 25 bp, probe
atcgtggtgtccatgatcttcattc

SEQ ID NO: 123473 - DNA, 25 bp, probe
atcgtggtgtccatgatcttcattc

SEQ ID NO: 123474 - DNA, 25 bp, probe
atcgtgatcgccgaggacttcacaa

SEQ ID NO: 123475 - DNA, 25 bp, probe
atcgtgatcgccgaggacttcacaa

SEQ ID NO: 123476 - DNA, 25 bp, probe
atcgcagcttggggccaactgacga

SEQ ID NO: 123477 - DNA, 25 bp, probe
atccccgtggatgacactgacaggc

SEQ ID NO: 123478 - DNA, 25 bp, probe
atccccgtggatgacactgacaggc

SEQ ID NO: 123479 - DNA, 25 bp, probe
atcccactgggaaaacgtctcaggt

SEQ ID NO: 123480 - DNA, 25 bp, probe
atccaagctgttgaaactggctatg

SEQ ID NO: 123481 - DNA, 25 bp, probe
atgacaaggagggtcacctggtgtg

SEQ ID NO: 123482 - DNA, 25 bp, probe
atccacagggacaacaccaccgtgg

SEQ ID NO: 123483 - DNA, 25 bp, probe
atcccagagggcaaaagcctcagtc

SEQ ID NO: 123484 - DNA, 25 bp, probe
accagaagtgtgagaacgcctaccc

SEQ ID NO: 123485 - DNA, 25 bp, probe
atcgaccaggtggtgcgggattacc

SEQ ID NO: 123486 - DNA, 25 bp, probe
atcgattcgagggcactgggttttc

SEQ ID NO: 123487 - DNA, 25 bp, probe
atccgatcgacggcactgcgaattt

SEQ ID NO: 123488 - DNA, 25 bp, probe
atcgtgatctggccgcacggaacat

SEQ ID NO: 123489 - DNA, 25 bp, probe
atctgtgacttcatgctctgataac

SEQ ID NO: 123490 - DNA, 25 bp, probe
atcgcatgttccagatctatcagac

SEQ ID NO: 123491 - DNA, 25 bp, probe
atcgtttccaaacagcatgctcgag

SEQ ID NO: 123492 - DNA, 25 bp, probe
atcgctattaacagccagagtcata

SEQ ID NO: 123493 - DNA, 25 bp, probe
atcgctattaacagccagagtcata

SEQ ID NO: 123494 - DNA, 25 bp, probe
atctgttattactagcaaattctac

SEQ ID NO: 123495 - DNA, 25 bp, probe
atcgttactacatccagattcctca

SEQ ID NO: 123496 - DNA, 25 bp, probe
atcgttactacatccagattcctca

SEQ ID NO: 123497 - DNA, 25 bp, probe
atcgttcagaagctccgcttcacat

SEQ ID NO: 123498 - DNA, 25 bp, probe
atctgtttaacgtggctctgcagca

SEQ ID NO: 123499 - DNA, 25 bp, probe
atctgttgtccaatcaaggcttctc

SEQ ID NO: 123500 - DNA, 25 bp, probe
atctgtttcagcaaccaggcctgag

SEQ ID NO: 123501 - DNA, 25 bp, probe
atcggtctagcatatcagtcactgg

SEQ ID NO: 123502 - DNA, 25 bp, probe
atcggtctagcatatcagtcactgg

SEQ ID NO: 123503 - DNA, 25 bp, probe
atcggccttgtgtagaatcactcgc

SEQ ID NO: 123504 - DNA, 25 bp, probe
atcggccttgtgtagaatcactcgc

SEQ ID NO: 123505 - DNA, 25 bp, probe
atcgatcctctgatttatgcactcc

SEQ ID NO: 123506 - DNA, 25 bp, probe
atctccaccatgaaagtgatgcagt

SEQ ID NO: 123507 - DNA, 25 bp, probe
atctgtctgccgaaggctagcatgg

SEQ ID NO: 123508 - DNA, 25 bp, probe
atctgcattcctgatgaccaatggg

SEQ ID NO: 123509 - DNA, 25 bp, probe
atctgtgtctgtaatttgttggggg

SEQ ID NO: 123510 - DNA, 25 bp, probe
atctgtctatgaatgttagtctgtt

SEQ ID NO: 123511 - DNA, 25 bp, probe
atcgctattgttcatgtatcgtgct

SEQ ID NO: 123512 - DNA, 25 bp, probe
atctgtttgttactgcatcatctgt

SEQ ID NO: 123513 - DNA, 25 bp, probe
atctggtgatgcttgagtgcacaga

SEQ ID NO: 123514 - DNA, 25 bp, probe
atctgcaggatgttactcaccaaga

SEQ ID NO: 123515 - DNA, 25 bp, probe
atctgcaggatgttactcaccaaga

SEQ ID NO: 123516 - DNA, 25 bp, probe
cgtcaataattttgaccaagacttt

SEQ ID NO: 123517 - DNA, 25 bp, probe
atctccaaatttttctaagactact

SEQ ID NO: 123518 - DNA, 25 bp, probe
atcctgaacctgagttcaaccaacc

SEQ ID NO: 123519 - DNA, 25 bp, probe
atgcctaccctaagtttatagaatc

SEQ ID NO: 123520 - DNA, 25 bp, probe
atccgatgcaccaaactaataaaac

SEQ ID NO: 123521 - DNA, 25 bp, probe
atctgcactactcaacttataaact

SEQ ID NO: 123522 - DNA, 25 bp, probe
atgctggtaatgcaacctttgaaac

SEQ ID NO: 123523 - DNA, 25 bp, probe
atctgacagcaaataacactttgag

SEQ ID NO: 123524 - DNA, 25 bp, probe
atctgaactttcaaagcttgctatt

SEQ ID NO: 123525 - DNA, 25 bp, probe
atctgaactttcaaagcttgctatt

SEQ ID NO: 123526 - DNA, 25 bp, probe
atctgcacagtcttctaagtcacat

SEQ ID NO: 123527 - DNA, 25 bp, probe
atctgataatgctcaaagtgcagta

SEQ ID NO: 123528 - DNA, 25 bp, probe
atccttacaccaaagctgatgggcg

SEQ ID NO: 123529 - DNA, 25 bp, probe
atcctctggctggctaactggaagc

SEQ ID NO: 123530 - DNA, 25 bp, probe
atcccggctttgatgagcagagagc

SEQ ID NO: 123531 - DNA, 25 bp, probe
atcccaggcttaattgccctacaaa

SEQ ID NO: 123532 - DNA, 25 bp, probe
atcctaatgcttcttccttcagaaa

SEQ ID NO: 123533 - DNA, 25 bp, probe
atccgaattcttcgccctatagtga

SEQ ID NO: 123534 - DNA, 25 bp, probe
atccaaatatgaatgctcccttcgg

SEQ ID NO: 123535 - DNA, 25 bp, probe
atcccatatatagttcagccttaat

SEQ ID NO: 123536 - DNA, 25 bp, probe
atcgacattaacccactcatttagt

SEQ ID NO: 123537 - DNA, 25 bp, probe
atcgacattacagatgactgcatct

SEQ ID NO: 123538 - DNA, 25 bp, probe
atcgcaactacaggtacgagctgat

SEQ ID NO: 123539 - DNA, 25 bp, probe
atcgccctctgcaagtggcgaatga

SEQ ID NO: 123540 - DNA, 25 bp, probe
atcgctcgcaaccaggtgcgcaaga

SEQ ID NO: 123541 - DNA, 25 bp, probe
atcgcttgaacctgtgaggcagagg

SEQ ID NO: 123542 - DNA, 25 bp, probe
atccctgacacggtgtggtccattg

SEQ ID NO: 123543 - DNA, 25 bp, probe
atcccagaggcaaggggacctgctg

SEQ ID NO: 123544 - DNA, 25 bp, probe
atcgccatagaaagtcttgcagacc

SEQ ID NO: 123545 - DNA, 25 bp, probe
atctggtagctgtagattctggacc

SEQ ID NO: 123546 - DNA, 25 bp, probe
atctggacagctgggatgttgggca

SEQ ID NO: 123547 - DNA, 25 bp, probe
atctggcaactggtactttgatgaa

SEQ ID NO: 123548 - DNA, 25 bp, probe
atctggacaaggccaccttaatatg

SEQ ID NO: 123549 - DNA, 25 bp, probe
atcgacacaagtccaccaaatttgg

SEQ ID NO: 123550 - DNA, 25 bp, probe
atcgaccaatttgtgaagatcgtgg

SEQ ID NO: 123551 - DNA, 25 bp, probe
atgaaccagatctacggtttcgagg

SEQ ID NO: 123552 - DNA, 25 bp, probe
atgaatgcgaatttctggctttggg

SEQ ID NO: 123553 - DNA, 25 bp, probe
atgaagcaaatcgtgtccttcgaca

SEQ ID NO: 123554 - DNA, 25 bp, probe
atgaaaacagagcttcccgtgcaaa

SEQ ID NO: 123555 - DNA, 25 bp, probe
atccgaaaagtttccacttgcagca

SEQ ID NO: 123556 - DNA, 25 bp, probe
atcgccaaatagaaccgcctttcag

SEQ ID NO: 123557 - DNA, 25 bp, probe
atcccaaatttgatgacactttcga

SEQ ID NO: 123558 - DNA, 25 bp, probe
atccctcagatgctggtcaacttgt

SEQ ID NO: 123559 - DNA, 25 bp, probe
atccttagtgagggtgccctggtca

SEQ ID NO: 123560 - DNA, 25 bp, probe
atccacctggagggtgtcgtgacca

SEQ ID NO: 123561 - DNA, 25 bp, probe
acctcactggctctggtcaatacta

SEQ ID NO: 123562 - DNA, 25 bp, probe
acctcactggctctggtcaatacta

SEQ ID NO: 123563 - DNA, 25 bp, probe
atcgcttttctggctgactattact

SEQ ID NO: 123564 - DNA, 25 bp, probe
atcgcccgagtgggacgattacttg

SEQ ID NO: 123565 - DNA, 25 bp, probe
atccatccaagacttgactgtaact

SEQ ID NO: 123566 - DNA, 25 bp, probe
atccctacaacaatgtttatatgta

SEQ ID NO: 123567 - DNA, 25 bp, probe
atccgcttcgacatcattgtgtttg

SEQ ID NO: 123568 - DNA, 25 bp, probe
atccgcttcgacatcattgtgtttg

SEQ ID NO: 123569 - DNA, 25 bp, probe
atcgaggtcaacatcattgggcccc

SEQ ID NO: 123570 - DNA, 25 bp, probe
atcgaggtcaacatcattgggcccc

SEQ ID NO: 123571 - DNA, 25 bp, probe
atgccaggaaacatcttaggacccc

SEQ ID NO: 123572 - DNA, 25 bp, probe
atccacgaaactaccttcaactcca

SEQ ID NO: 123573 - DNA, 25 bp, probe
atccaaaaaccagtcggcagaccac

SEQ ID NO: 123574 - DNA, 25 bp, probe
ttcacgaaaaacgaggaatccgaca

SEQ ID NO: 123575 - DNA, 25 bp, probe
atcctgaaaacctgtgtaccagacc

SEQ ID NO: 123576 - DNA, 25 bp, probe
atcctaaaaactctgcttcggtgtc

SEQ ID NO: 123577 - DNA, 25 bp, probe
atcccgaaacctcatgcagagggcc

SEQ ID NO: 123578 - DNA, 25 bp, probe
atcccggacgccaagaagaggggca

SEQ ID NO: 123579 - DNA, 25 bp, probe
atcggcgcgacagtgtagaaagtgg

SEQ ID NO: 123580 - DNA, 25 bp, probe
atctgatgggactactggaatcagg

SEQ ID NO: 123581 - DNA, 25 bp, probe
atcgagcatgagcacctaaatcact

SEQ ID NO: 123582 - DNA, 25 bp, probe
atcccatgtgtgatcataaactcat

SEQ ID NO: 123583 - DNA, 25 bp, probe
atcctatatgtaatgatcattatcg

SEQ ID NO: 123584 - DNA, 25 bp, probe
atcctgcatggtatcactaaaggtt

SEQ ID NO: 123585 - DNA, 25 bp, probe
atcctgcaactcttgataaagggct

SEQ ID NO: 123586 - DNA, 25 bp, probe
atccaccctttaaaagcattgatga

SEQ ID NO: 123587 - DNA, 25 bp, probe
atccagccccattctagaactgcat

SEQ ID NO: 123588 - DNA, 25 bp, probe
atcgcagcccaaacagggcagcaat

SEQ ID NO: 123589 - DNA, 25 bp, probe
atcgaccgctataagcgctggaagt

SEQ ID NO: 123590 - DNA, 25 bp, probe
atcgacagcttcaccagctgtgcca

SEQ ID NO: 123591 - DNA, 25 bp, probe
atcgagcagttctccactgtgaagg

SEQ ID NO: 123592 - DNA, 25 bp, probe
atctgggtctgcttatgagaatgaa

SEQ ID NO: 123593 - DNA, 25 bp, probe
atctgggtgatggatcacaacacat

SEQ ID NO: 123594 - DNA, 25 bp, probe
atctggggatcgtcaaatctttttc

SEQ ID NO: 123595 - DNA, 25 bp, probe
atcgtgttacagtcacaatctactt

SEQ ID NO: 123596 - DNA, 25 bp, probe
atcctttaaggtattcagttattct

SEQ ID NO: 123597 - DNA, 25 bp, probe
atcgttgtacgactatcttcagctt

SEQ ID NO: 123598 - DNA, 25 bp, probe
atctgatttaatgttttctgctgtt

SEQ ID NO: 123599 - DNA, 25 bp, probe
atctgtttttgctttgtgttgtggt

SEQ ID NO: 123600 - DNA, 25 bp, probe
atcgcgtgatatccgttgatgtgtt

SEQ ID NO: 123601 - DNA, 25 bp, probe
atcctggttatcggcgatgtgatct

SEQ ID NO: 123602 - DNA, 25 bp, probe
atccgcattttctggacagtcttta

SEQ ID NO: 123603 - DNA, 25 bp, probe
atccgcattttctggacagtcttta

SEQ ID NO: 123604 - DNA, 25 bp, probe
atcccatatgtttttgaagtcctcc

SEQ ID NO: 123605 - DNA, 25 bp, probe
atcctcctgaaaagggaatgcctcc

SEQ ID NO: 123606 - DNA, 25 bp, probe
atccttccaacagggcagtcaggcc

SEQ ID NO: 123607 - DNA, 25 bp, probe
atccttccagaaggagacgagctgc

SEQ ID NO: 123608 - DNA, 25 bp, probe
atccagtaagtagaattatctcttc

SEQ ID NO: 123609 - DNA, 25 bp, probe
atccggaagccgccaagtgattttc

SEQ ID NO: 123610 - DNA, 25 bp, probe
atccctaagtgccctaatatatacc

SEQ ID NO: 123611 - DNA, 25 bp, probe
atccagctagattgcagtttaataa

SEQ ID NO: 123612 - DNA, 25 bp, probe
atcggcaagctctactatgagaatg

SEQ ID NO: 123613 - DNA, 25 bp, probe
atcgtaactgcttctagagatggga

SEQ ID NO: 123614 - DNA, 25 bp, probe
atcgtaactgcttctagagatggga

SEQ ID NO: 123615 - DNA, 25 bp, probe
atctggaaggatgctcgagagaaca

SEQ ID NO: 123616 - DNA, 25 bp, probe
atctggaaggatgctcgagagaaca

SEQ ID NO: 123617 - DNA, 25 bp, probe
atcgaagtgtgtatcaaaagagact

SEQ ID NO: 123618 - DNA, 25 bp, probe
atcctggaggtcatccattaggaat

SEQ ID NO: 123619 - DNA, 25 bp, probe
atcctgaacgacatcaccgaggagt

SEQ ID NO: 123620 - DNA, 25 bp, probe
atcctgttggccatcatccagggtc

SEQ ID NO: 123621 - DNA, 25 bp, probe
atcctggtcccagtgttagggtagc

SEQ ID NO: 123622 - DNA, 25 bp, probe
actcagggtcaatactcagggtcag

SEQ ID NO: 123623 - DNA, 25 bp, probe
atcctggtaacctactaggtgctga

SEQ ID NO: 123624 - DNA, 25 bp, probe
atcctggtaacctactaggtgctga

SEQ ID NO: 123625 - DNA, 25 bp, probe
accgtggtcacggcaaaggaagacg

SEQ ID NO: 123626 - DNA, 25 bp, probe
atggcggctctcgccaaaaggaagg

SEQ ID NO: 123627 - DNA, 25 bp, probe
atgccttctccagacaaaccagaag

SEQ ID NO: 123628 - DNA, 25 bp, probe
atcctccccaaggaaacagcagcat

SEQ ID NO: 123629 - DNA, 25 bp, probe
atccccgccatctggaaaagcatct

SEQ ID NO: 123630 - DNA, 25 bp, probe
atccccgccatctggaaaagcatct

SEQ ID NO: 123631 - DNA, 25 bp, probe
atcgccgaggacttcacaatcaagc

SEQ ID NO: 123632 - DNA, 25 bp, probe
atcgccgaggacttcacaatcaagc

SEQ ID NO: 123633 - DNA, 25 bp, probe
atccctcaggtttcaaacagacctt

SEQ ID NO: 123634 - DNA, 25 bp, probe
atcccctggcttgcagaaaatccag

SEQ ID NO: 123635 - DNA, 25 bp, probe
atcctcgggcttgggagaatgacta

SEQ ID NO: 123636 - DNA, 25 bp, probe
atcccgggacctgaactattagcac

SEQ ID NO: 123637 - DNA, 25 bp, probe
atcccttggaccacccataaatgac

SEQ ID NO: 123638 - DNA, 25 bp, probe
atccccttgaacagcctcaagcaag

SEQ ID NO: 123639 - DNA, 25 bp, probe
atccctgtggggcggtcaggagcac

SEQ ID NO: 123640 - DNA, 25 bp, probe
atccctgtatggaggtctcccgatt

SEQ ID NO: 123641 - DNA, 25 bp, probe
atccatcttatgaggatcccagcca

SEQ ID NO: 123642 - DNA, 25 bp, probe
atcgataaagccaagctctccagct

SEQ ID NO: 123643 - DNA, 25 bp, probe
atcctaactccatgtctctgagcat

SEQ ID NO: 123644 - DNA, 25 bp, probe
atcgaaagcttcagacacatgcagt

SEQ ID NO: 123645 - DNA, 25 bp, probe
atcgaccggcacaaacagctgcggg

SEQ ID NO: 123646 - DNA, 25 bp, probe
atcgaccggcacaaacagctgcggg

SEQ ID NO: 123647 - DNA, 25 bp, probe
atcgaagggctcaagaagcgccgga

SEQ ID NO: 123648 - DNA, 25 bp, probe
atcgcaagggtttgacacggctgcc

SEQ ID NO: 123649 - DNA, 25 bp, probe
atcgcatgtggcgcaagactcggtc

SEQ ID NO: 123650 - DNA, 25 bp, probe
atcgctctgcacagctatgagccct

SEQ ID NO: 123651 - DNA, 25 bp, probe
atcgctctgcacagctatgagccct

SEQ ID NO: 123652 - DNA, 25 bp, probe
atccatgtgcagcttactggccatt

SEQ ID NO: 123653 - DNA, 25 bp, probe
atcctgtgctcggaaatcccaaagc

SEQ ID NO: 123654 - DNA, 25 bp, probe
atctgtgtgctctacacagacctcc

SEQ ID NO: 123655 - DNA, 25 bp, probe
atctggccacacgaaactgtttagt

SEQ ID NO: 123656 - DNA, 25 bp, probe
atctggctgcaagaaatgtgttgct

SEQ ID NO: 123657 - DNA, 25 bp, probe
atctgtgcgagtcaagcattggtct

SEQ ID NO: 123658 - DNA, 25 bp, probe
atcgtggagacagggcatttgagtt

SEQ ID NO: 123659 - DNA, 25 bp, probe
atcggcagaggagtgagctctgtgg

SEQ ID NO: 123660 - DNA, 25 bp, probe
atcgtcaagtgccaggcgctgagcg

SEQ ID NO: 123661 - DNA, 25 bp, probe
atcgataagtctcagctggatgcag

SEQ ID NO: 123662 - DNA, 25 bp, probe
atcgtactggtaaaatgcattcaaa

SEQ ID NO: 123663 - DNA, 25 bp, probe
atcctactggtagatggaacagcat

SEQ ID NO: 123664 - DNA, 25 bp, probe
atcctgacggttgatgtggcctgaa

SEQ ID NO: 123665 - DNA, 25 bp, probe
atcctggggttgactgtgtccattc

SEQ ID NO: 123666 - DNA, 25 bp, probe
atcctttagttcattgtccaccatg

SEQ ID NO: 123667 - DNA, 25 bp, probe
atcgtactgaggtaacttccacgta

SEQ ID NO: 123668 - DNA, 25 bp, probe
atcggaagtggaaacttctcccaag

SEQ ID NO: 123669 - DNA, 25 bp, probe
atcccataggaaagaaatcttccaa

SEQ ID NO: 123670 - DNA, 25 bp, probe
atcccataggaaagaaatcttccaa

SEQ ID NO: 123671 - DNA, 25 bp, probe
atgcccaaggccagaatgacgggaa

SEQ ID NO: 123672 - DNA, 25 bp, probe
atccccagtgacggaaagggcatga

SEQ ID NO: 123673 - DNA, 25 bp, probe
atccccagtgacggaaagggcatga

SEQ ID NO: 123674 - DNA, 25 bp, probe
atcgcccgataaagacggattctaa

SEQ ID NO: 123675 - DNA, 25 bp, probe
atccccgtaatcaatgtgggcctat

SEQ ID NO: 123676 - DNA, 25 bp, probe
atcggccgtcgacatgatggagttg

SEQ ID NO: 123677 - DNA, 25 bp, probe
atcccccatcagatgatgggagtgg

SEQ ID NO: 123678 - DNA, 25 bp, probe
atcctccccaatacagatggaatgg

SEQ ID NO: 123679 - DNA, 25 bp, probe
atcctatatccagtaagtagaatta

SEQ ID NO: 123680 - DNA, 25 bp, probe
atccttcatcgagatctgaaaactc

SEQ ID NO: 123681 - DNA, 25 bp, probe
atcgttcatccggtggaaacagcct

SEQ ID NO: 123682 - DNA, 25 bp, probe
atcgttcatctaggggaagacatct

SEQ ID NO: 123683 - DNA, 25 bp, probe
atcgtgtcagctaggtgtacataca

SEQ ID NO: 123684 - DNA, 25 bp, probe
atcgtgtcagctaggtgtacataca

SEQ ID NO: 123685 - DNA, 25 bp, probe
atctggagctgaagcgttactacag

SEQ ID NO: 123686 - DNA, 25 bp, probe
atcgcggatgaagacgcacggcaga

SEQ ID NO: 123687 - DNA, 25 bp, probe
atcgcggatgaagacgcacggcaga

SEQ ID NO: 123688 - DNA, 25 bp, probe
atcgccgtggagaggcacatgtcaa

SEQ ID NO: 123689 - DNA, 25 bp, probe
atcctgctttacaggatcatgtaaa

SEQ ID NO: 123690 - DNA, 25 bp, probe
atcgtcatgttaacaaacttgaaag

SEQ ID NO: 123691 - DNA, 25 bp, probe
atcctacttccctcaattgaatcag

SEQ ID NO: 123692 - DNA, 25 bp, probe
atcgtactttcctacatttgcataa

SEQ ID NO: 123693 - DNA, 25 bp, probe
atcgctattgtctgtaatgtctgat

SEQ ID NO: 123694 - DNA, 25 bp, probe
atccgatcacctcgaagatttattg

SEQ ID NO: 123695 - DNA, 25 bp, probe
atcgcctccactgcatggatattct

SEQ ID NO: 123696 - DNA, 25 bp, probe
atccctccctgtggtatatcattgg

SEQ ID NO: 123697 - DNA, 25 bp, probe
atccccaccactgatatcatgggga

SEQ ID NO: 123698 - DNA, 25 bp, probe
atccacctctaaggactggggaaag

SEQ ID NO: 123699 - DNA, 25 bp, probe
ctcacccccaacacaggtggaaggt

SEQ ID NO: 123700 - DNA, 25 bp, probe
ctccccccaaatattgggcagccct

SEQ ID NO: 123701 - DNA, 25 bp, probe
atccggctcacatattttggccagt

SEQ ID NO: 123702 - DNA, 25 bp, probe
atcccactggcattgattttgatcc

SEQ ID NO: 123703 - DNA, 25 bp, probe
atcccactggcattgattttgatcc

SEQ ID NO: 123704 - DNA, 25 bp, probe
atccaactctgaatcttttttcacc

SEQ ID NO: 123705 - DNA, 25 bp, probe
atccaactctgaatcttttttcacc

SEQ ID NO: 123706 - DNA, 25 bp, probe
atcctggtttgtaatgtttgtcagt

SEQ ID NO: 123707 - DNA, 25 bp, probe
atcctgtgtttcattacttgaatgt

SEQ ID NO: 123708 - DNA, 25 bp, probe
atccattcctctcttgtttatagta

SEQ ID NO: 123709 - DNA, 25 bp, probe
atcctctccatcctgattaatttca

SEQ ID NO: 123710 - DNA, 25 bp, probe
atccttgtatccatgtaatttcaga

SEQ ID NO: 123711 - DNA, 25 bp, probe
atgactaattagggtacatttataa

SEQ ID NO: 123712 - DNA, 25 bp, probe
atgactaattagggtacatttataa

SEQ ID NO: 123713 - DNA, 25 bp, probe
atgaataatggtagcctaaacttaa

SEQ ID NO: 123714 - DNA, 25 bp, probe
atgagaaggagtcccgacacctgat

SEQ ID NO: 123715 - DNA, 25 bp, probe
atgagaaggagtcccgacacctgat

SEQ ID NO: 123716 - DNA, 25 bp, probe
atgagaaggagtcccgacacctgat

SEQ ID NO: 123717 - DNA, 25 bp, probe
atcggaaatatcgggacacactgat

SEQ ID NO: 123718 - DNA, 25 bp, probe
atgaggaacaactagaaccaagatc

SEQ ID NO: 123719 - DNA, 25 bp, probe
atgatcgaaagtgtaactgacaatc

SEQ ID NO: 123720 - DNA, 25 bp, probe
atccgcaaagtgttggacgccaata

SEQ ID NO: 123721 - DNA, 25 bp, probe
atgccacgagggtgaatgcggctga

SEQ ID NO: 123722 - DNA, 25 bp, probe
atccacgcagcgtggcactgggacg

SEQ ID NO: 123723 - DNA, 25 bp, probe
atccctgccgttagcgactgcgacg

SEQ ID NO: 123724 - DNA, 25 bp, probe
atgccggccgtcaaggaccaggcat

SEQ ID NO: 123725 - DNA, 25 bp, probe
atccggcacttgatggagaaggacc

SEQ ID NO: 123726 - DNA, 25 bp, probe
atcgtggtcttcatcgtaaggacgg

SEQ ID NO: 123727 - DNA, 25 bp, probe
atgcgttggcccacgtagcaaaaag

SEQ ID NO: 123728 - DNA, 25 bp, probe
atggcaaagcccacttagcaaaagc

SEQ ID NO: 123729 - DNA, 25 bp, probe
atgggtctccgcacttggaaaggtt

SEQ ID NO: 123730 - DNA, 25 bp, probe
atccttcttcgcagctttacagggt

SEQ ID NO: 123731 - DNA, 25 bp, probe
aggtttccctggcaatccaggtctc

SEQ ID NO: 123732 - DNA, 25 bp, probe
agggtacctctcatgttaagtgttc

SEQ ID NO: 123733 - DNA, 25 bp, probe
aggagtccttttttacacaatgttg

SEQ ID NO: 123734 - DNA, 25 bp, probe
agtactgcctctataaaaacgtcgc

SEQ ID NO: 123735 - DNA, 25 bp, probe
agtactgcctctataaaaacgtcgc

SEQ ID NO: 123736 - DNA, 25 bp, probe
ggaactgacggagattaaccgtcgg

SEQ ID NO: 123737 - DNA, 25 bp, probe
aggagctgagggtttaccccgtgag

SEQ ID NO: 123738 - DNA, 25 bp, probe
agaactggggttcaagcccaggctt

SEQ ID NO: 123739 - DNA, 25 bp, probe
atgacagtgggaaataacacccgaa

SEQ ID NO: 123740 - DNA, 25 bp, probe
atgcaggccaggttaaaacccagag

SEQ ID NO: 123741 - DNA, 25 bp, probe
atcggtgaacaataaattctgcaag

SEQ ID NO: 123742 - DNA, 25 bp, probe
atccggaacccggcaagtctcaaga

SEQ ID NO: 123743 - DNA, 25 bp, probe
atccggaatcccggcagcctgaaga

SEQ ID NO: 123744 - DNA, 25 bp, probe
atcctgtgaaactggctttatagag

SEQ ID NO: 123745 - DNA, 25 bp, probe
atcctgtgaaactggctttatagag

SEQ ID NO: 123746 - DNA, 25 bp, probe
atcctggacaactggatcaccatcc

SEQ ID NO: 123747 - DNA, 25 bp, probe
atcctcgagatcctagactacctct

SEQ ID NO: 123748 - DNA, 25 bp, probe
atcgatcttgcaccaagactgaact

SEQ ID NO: 123749 - DNA, 25 bp, probe
atcctttgagctgctgactgccaat

SEQ ID NO: 123750 - DNA, 25 bp, probe
atcctttagttcttcagcctctaaa

SEQ ID NO: 123751 - DNA, 25 bp, probe
atcctttagttcttcagcctctaaa

SEQ ID NO: 123752 - DNA, 25 bp, probe
atccttctccttgaggcttctaaat

SEQ ID NO: 123753 - DNA, 25 bp, probe
atcctttgccttatctaacaaacat

SEQ ID NO: 123754 - DNA, 25 bp, probe
atcctttacttcatcaacacaggaa

SEQ ID NO: 123755 - DNA, 25 bp, probe
atcctttgtttcaccaaccagttat

SEQ ID NO: 123756 - DNA, 25 bp, probe
atccttcgatttccctatgattcat

SEQ ID NO: 123757 - DNA, 25 bp, probe
atgcttatctggtgatccggagatc

SEQ ID NO: 123758 - DNA, 25 bp, probe
atcgtatgtgagatgctccggcacc

SEQ ID NO: 123759 - DNA, 25 bp, probe
atcgtgaggcaggtgctgcacggcc

SEQ ID NO: 123760 - DNA, 25 bp, probe
atcgtggagatcatgcagcaaggtt

SEQ ID NO: 123761 - DNA, 25 bp, probe
atcccagaggatagcagcatggttt

SEQ ID NO: 123762 - DNA, 25 bp, probe
atcctccagagaacgatttgtcttc

SEQ ID NO: 123763 - DNA, 25 bp, probe
atccttaggctacgttttcatgtat

SEQ ID NO: 123764 - DNA, 25 bp, probe
atcctaaggctgtccacgtacttaa

SEQ ID NO: 123765 - DNA, 25 bp, probe
atcgttagtctgaccctgaacgtta

SEQ ID NO: 123766 - DNA, 25 bp, probe
atcgtcatgaccacccgagaggtgg

SEQ ID NO: 123767 - DNA, 25 bp, probe
atcctgctggtcaccgggcaggagg

SEQ ID NO: 123768 - DNA, 25 bp, probe
atccgggatctactctgggagacaa

SEQ ID NO: 123769 - DNA, 25 bp, probe
ttccatggttttttcgaggacaacg

SEQ ID NO: 123770 - DNA, 25 bp, probe
atccgagtttcttctctacgaaaag

SEQ ID NO: 123771 - DNA, 25 bp, probe
atccatttttctgctcttagaaagg

SEQ ID NO: 123772 - DNA, 25 bp, probe
atccatttttcaccctacatgaatc

SEQ ID NO: 123773 - DNA, 25 bp, probe
atgccaattctttacctttgaactc

SEQ ID NO: 123774 - DNA, 25 bp, probe
atccactttttctctggctgaagtg

SEQ ID NO: 123775 - DNA, 25 bp, probe
atccctttttctgctaattcgagtc

SEQ ID NO: 123776 - DNA, 25 bp, probe
atccctttttctgctaattcgagtc

SEQ ID NO: 123777 - DNA, 25 bp, probe
atccctctattattcttaaatgcca

SEQ ID NO: 123778 - DNA, 25 bp, probe
atccttatgtctatgttgaaatcca

SEQ ID NO: 123779 - DNA, 25 bp, probe
atccttgtgacatggttaagcaacc

SEQ ID NO: 123780 - DNA, 25 bp, probe
atcctaggaagaggtctgatgacat

SEQ ID NO: 123781 - DNA, 25 bp, probe
atcctcatcgacatggtcctgaacc

SEQ ID NO: 123782 - DNA, 25 bp, probe
atcccatccacaatactactgattt

SEQ ID NO: 123783 - DNA, 25 bp, probe
atcgatcttgccaaaggagtgattc

SEQ ID NO: 123784 - DNA, 25 bp, probe
atcgatcttgccaaaggagtgattc

SEQ ID NO: 123785 - DNA, 25 bp, probe
atcgtcatgtgggaagtcatgtcat

SEQ ID NO: 123786 - DNA, 25 bp, probe
atcgaagatgccgacctcagcatcg

SEQ ID NO: 123787 - DNA, 25 bp, probe
atcgatgagagctacaatttgacgg

SEQ ID NO: 123788 - DNA, 25 bp, probe
atgctaaagccaggattgtgttggg

SEQ ID NO: 123789 - DNA, 25 bp, probe
agcttatcccactgggttgggatta

SEQ ID NO: 123790 - DNA, 25 bp, probe
agctcagaccggtgggctaggtttc

SEQ ID NO: 123791 - DNA, 25 bp, probe
atgccaacccggagactgaagtgtc

SEQ ID NO: 123792 - DNA, 25 bp, probe
agcccactccggaaactaaagtgag

SEQ ID NO: 123793 - DNA, 25 bp, probe
aggacctgccccacatgaaaaggat

SEQ ID NO: 123794 - DNA, 25 bp, probe
aggtcccacgctatatgcacaaagt

SEQ ID NO: 123795 - DNA, 25 bp, probe
atcgctccacggttgttgactatat

SEQ ID NO: 123796 - DNA, 25 bp, probe
atccaccctggtgttgactgacttt

SEQ ID NO: 123797 - DNA, 25 bp, probe
atccaccctggtgttgactgacttt

SEQ ID NO: 123798 - DNA, 25 bp, probe
atccactggggtcttcattggttgg

SEQ ID NO: 123799 - DNA, 25 bp, probe
atccttggggagattgctgtgtcta

SEQ ID NO: 123800 - DNA, 25 bp, probe
atcctacaggggattgtgttttgtc

SEQ ID NO: 123801 - DNA, 25 bp, probe
atgcggacacgtcagttttgtgtta

SEQ ID NO: 123802 - DNA, 25 bp, probe
atgcggacacgtcagttttgtgtta

SEQ ID NO: 123803 - DNA, 25 bp, probe
aggcttccagtctgtgtttggtttt

SEQ ID NO: 123804 - DNA, 25 bp, probe
accaatagcttctgagttttttgtt

SEQ ID NO: 123805 - DNA, 25 bp, probe
atccaagacttatcagtctttatgg

SEQ ID NO: 123806 - DNA, 25 bp, probe
atccagtcatttatagcttacggaa

SEQ ID NO: 123807 - DNA, 25 bp, probe
atccattaatgtatcagttatccca

SEQ ID NO: 123808 - DNA, 25 bp, probe
atccttttgttgaaatggcatcgta

SEQ ID NO: 123809 - DNA, 25 bp, probe
atcctttatgtcctgacacgtcttc

SEQ ID NO: 123810 - DNA, 25 bp, probe
atcctcctgagccacatgtgcaggt

SEQ ID NO: 123811 - DNA, 25 bp, probe
atccacactgccacaatgcaggtgt

SEQ ID NO: 123812 - DNA, 25 bp, probe
atccatacagctttcagtcagatgt

SEQ ID NO: 123813 - DNA, 25 bp, probe
atcgagacagccacagtagaagcgg

SEQ ID NO: 123814 - DNA, 25 bp, probe
atcgagatgtgccattagaagaaca

SEQ ID NO: 123815 - DNA, 25 bp, probe
atcgcagatcccaatcaaagtgcca

SEQ ID NO: 123816 - DNA, 25 bp, probe
atcgagccgccaaaagtgtcatcac

SEQ ID NO: 123817 - DNA, 25 bp, probe
atccaccccatccaatttatcaagg

SEQ ID NO: 123818 - DNA, 25 bp, probe
atcccctcagcagagtgtgtttaag

SEQ ID NO: 123819 - DNA, 25 bp, probe
atcgctcttcccagagttgttaatg

SEQ ID NO: 123820 - DNA, 25 bp, probe
atccttgctctcctagagcttgttg

SEQ ID NO: 123821 - DNA, 25 bp, probe
atcgtgagcatctttgggctctgct

SEQ ID NO: 123822 - DNA, 25 bp, probe
atcgtgagcatctttgggctctgct

SEQ ID NO: 123823 - DNA, 25 bp, probe
atcgctctctagacatgtggtctgt

SEQ ID NO: 123824 - DNA, 25 bp, probe
atgcaccactgagcaggaccagcat

SEQ ID NO: 123825 - DNA, 25 bp, probe
atgcaccacacagactacaagttcc

SEQ ID NO: 123826 - DNA, 25 bp, probe
atgctggactgcaggcacaaagacc

SEQ ID NO: 123827 - DNA, 25 bp, probe
atgctgtaccagtgccagggacaca

SEQ ID NO: 123828 - DNA, 25 bp, probe
atcgctactcatccccagagaaaga

SEQ ID NO: 123829 - DNA, 25 bp, probe
atcgtgtcttctcccagaagtcaga

SEQ ID NO: 123830 - DNA, 25 bp, probe
atgcgaatttctcccaattgaacct

SEQ ID NO: 123831 - DNA, 25 bp, probe
atcgatttcctgtacttctaacaat

SEQ ID NO: 123832 - DNA, 25 bp, probe
atcgatttcctgtacttctaacaat

SEQ ID NO: 123833 - DNA, 25 bp, probe
atcgtgaacttgtcctcttaaaatg

SEQ ID NO: 123834 - DNA, 25 bp, probe
atgcagtgccaggaacccttaaaca

SEQ ID NO: 123835 - DNA, 25 bp, probe
atgcgtggctggaaccacattgaag

SEQ ID NO: 123836 - DNA, 25 bp, probe
atgcgtggcggagatcggggagggc

SEQ ID NO: 123837 - DNA, 25 bp, probe
atcgccctgggatgtggtggggagc

SEQ ID NO: 123838 - DNA, 25 bp, probe
atgcccttggtaggtctgggggact

SEQ ID NO: 123839 - DNA, 25 bp, probe
atgcccttggtaggtctgggggact

SEQ ID NO: 123840 - DNA, 25 bp, probe
atgccccgcagtcagtgttgggggg

SEQ ID NO: 123841 - DNA, 25 bp, probe
atcctgccggatgagtgtgggtgtg

SEQ ID NO: 123842 - DNA, 25 bp, probe
atcgctgactaatcagtgttttgat

SEQ ID NO: 123843 - DNA, 25 bp, probe
atcctggtatcatatggctacattg

SEQ ID NO: 123844 - DNA, 25 bp, probe
atcctgagagactgtcagctgtatt

SEQ ID NO: 123845 - DNA, 25 bp, probe
atcctggtgaatatagtgctgctat

SEQ ID NO: 123846 - DNA, 25 bp, probe
atcctggtgaatgtctgttcagctc

SEQ ID NO: 123847 - DNA, 25 bp, probe
atcctcttcaaggctcagtggttca

SEQ ID NO: 123848 - DNA, 25 bp, probe
atcctcttcaaggctcagtggttca

SEQ ID NO: 123849 - DNA, 25 bp, probe
atccatgttcaattcaaggttatct

SEQ ID NO: 123850 - DNA, 25 bp, probe
atgcctgttgacagaaaccttctgg

SEQ ID NO: 123851 - DNA, 25 bp, probe
atcctgtgaggactgcaaagccttc

SEQ ID NO: 123852 - DNA, 25 bp, probe
atccgggagacaggacgggctctcc

SEQ ID NO: 123853 - DNA, 25 bp, probe
atcccagagggcgagggggcctctg

SEQ ID NO: 123854 - DNA, 25 bp, probe
atccgcgaggtggcggtgctgaggc

SEQ ID NO: 123855 - DNA, 25 bp, probe
atcccaggtgcaccatggggcaggc

SEQ ID NO: 123856 - DNA, 25 bp, probe
acaggggtatcctggaagcctcctt

SEQ ID NO: 123857 - DNA, 25 bp, probe
acaggggtatcctggaagcctcctt

SEQ ID NO: 123858 - DNA, 25 bp, probe
ctcagggcctgatggggaacctacc

SEQ ID NO: 123859 - DNA, 25 bp, probe
atccgagctctggagcgtggatacc

SEQ ID NO: 123860 - DNA, 25 bp, probe
atccggagctgcgaggccaaacagc

SEQ ID NO: 123861 - DNA, 25 bp, probe
atccggagctgcgaggccaaacagc

SEQ ID NO: 123862 - DNA, 25 bp, probe
atcgtaggagccattcacaagcaga

SEQ ID NO: 123863 - DNA, 25 bp, probe
atcctttgacgctgtgacaatgctg

SEQ ID NO: 123864 - DNA, 25 bp, probe
atcctgtggactggtttgccatggg

SEQ ID NO: 123865 - DNA, 25 bp, probe
atccctgtaccagatcacctggtgg

SEQ ID NO: 123866 - DNA, 25 bp, probe
atccctgtatcgtggaccttttgtg

SEQ ID NO: 123867 - DNA, 25 bp, probe
atccctgtatcgtggaccttttgtg

SEQ ID NO: 123868 - DNA, 25 bp, probe
accacgttaggagcaacctttgtat

SEQ ID NO: 123869 - DNA, 25 bp, probe
aacggtccagaagaatcccttctag

SEQ ID NO: 123870 - DNA, 25 bp, probe
aacagggtcaaagactctaaatgga

SEQ ID NO: 123871 - DNA, 25 bp, probe
aacagggtcaaagactctaaatgga

SEQ ID NO: 123872 - DNA, 25 bp, probe
agattcggacaatcgaccgaaagca

SEQ ID NO: 123873 - DNA, 25 bp, probe
atgaagttgacataccacctaacac

SEQ ID NO: 123874 - DNA, 25 bp, probe
atcgagtctgaatctgcactactca

SEQ ID NO: 123875 - DNA, 25 bp, probe
atcgagtgtagctgtgaaatccata

SEQ ID NO: 123876 - DNA, 25 bp, probe
atcgagtgtagctgtgaaatccata

SEQ ID NO: 123877 - DNA, 25 bp, probe
atcgctgtgtagtgtgaaagaaaag

SEQ ID NO: 123878 - DNA, 25 bp, probe
atccgtgtctctataacagaaaaat

SEQ ID NO: 123879 - DNA, 25 bp, probe
atcccgtctgccagtcaaagaaaaa

SEQ ID NO: 123880 - DNA, 25 bp, probe
atcccgtctgccagtcaaagaaaaa

SEQ ID NO: 123881 - DNA, 25 bp, probe
atcccgagtgctgcgtggaagtaaa

SEQ ID NO: 123882 - DNA, 25 bp, probe
atccttgagctgggctgggcacagc

SEQ ID NO: 123883 - DNA, 25 bp, probe
atcccagctgtcggttgagcacagc

SEQ ID NO: 123884 - DNA, 25 bp, probe
atgccagcaggaatgggtagcagcc

SEQ ID NO: 123885 - DNA, 25 bp, probe
atcgcagacgaggcggctaagccac

SEQ ID NO: 123886 - DNA, 25 bp, probe
atccatgcctaccaggtgaagccac

SEQ ID NO: 123887 - DNA, 25 bp, probe
atccatgcactttaattgaagaact

SEQ ID NO: 123888 - DNA, 25 bp, probe
atgccagccattaataaaaggacga

SEQ ID NO: 123889 - DNA, 25 bp, probe
atccagcctataatcctaagaactt

SEQ ID NO: 123890 - DNA, 25 bp, probe
atccacagtacaagccttgaacatc

SEQ ID NO: 123891 - DNA, 25 bp, probe
atcctactcagcaagtttggcatct

SEQ ID NO: 123892 - DNA, 25 bp, probe
atcctaatgctggatttgtccatca

SEQ ID NO: 123893 - DNA, 25 bp, probe
atccagtactggactttacacaatc

SEQ ID NO: 123894 - DNA, 25 bp, probe
atccagtactggactttacacaatc

SEQ ID NO: 123895 - DNA, 25 bp, probe
atgccattagctctctacaaaataa

SEQ ID NO: 123896 - DNA, 25 bp, probe
atccaaacacctagtcaatacagat

SEQ ID NO: 123897 - DNA, 25 bp, probe
atccacatcacagaggccaagaaat

SEQ ID NO: 123898 - DNA, 25 bp, probe
atccctccagcggtgcaatgaacta

SEQ ID NO: 123899 - DNA, 25 bp, probe
atcctgtctcccgatgaaaacatat

SEQ ID NO: 123900 - DNA, 25 bp, probe
atcctactccctgaagagcgcaata

SEQ ID NO: 123901 - DNA, 25 bp, probe
atcctactccctgaagagcgcaata

SEQ ID NO: 123902 - DNA, 25 bp, probe
atccaacccctgagaggacaacaac

SEQ ID NO: 123903 - DNA, 25 bp, probe
atgagttcccctgagggaatgaaac

SEQ ID NO: 123904 - DNA, 25 bp, probe
atgaccctaccagaggttggagaac

SEQ ID NO: 123905 - DNA, 25 bp, probe
atgactgtcttaggggcgtttgtgg

SEQ ID NO: 123906 - DNA, 25 bp, probe
atcctgcctggagtgggcaccaagg

SEQ ID NO: 123907 - DNA, 25 bp, probe
atcctgcctggagtgggcaccaagg

SEQ ID NO: 123908 - DNA, 25 bp, probe
atccaggatgacgagggctccacgg

SEQ ID NO: 123909 - DNA, 25 bp, probe
atccggcagaatgggcatgcagcca

SEQ ID NO: 123910 - DNA, 25 bp, probe
atcgcggagattgggaaccagctgt

SEQ ID NO: 123911 - DNA, 25 bp, probe
atcgcctcgttgagtgagcaactgt

SEQ ID NO: 123912 - DNA, 25 bp, probe
atccctccagtgctgtagagtcgga

SEQ ID NO: 123913 - DNA, 25 bp, probe
atcctcactcgacagaacagtcagt

SEQ ID NO: 123914 - DNA, 25 bp, probe
atgcgctacccaccaataatgaaat

SEQ ID NO: 123915 - DNA, 25 bp, probe
atcgccagtccagcagctaaggata

SEQ ID NO: 123916 - DNA, 25 bp, probe
atcccagcactaactgtaatggctt

SEQ ID NO: 123917 - DNA, 25 bp, probe
atcccagcactaactgtaatggctt

SEQ ID NO: 123918 - DNA, 25 bp, probe
atcccaagctggttaaattctatgg

SEQ ID NO: 123919 - DNA, 25 bp, probe
atcccaagctggttaaattctatgg

SEQ ID NO: 123920 - DNA, 25 bp, probe
atcccacaggctttctagacttaga

SEQ ID NO: 123921 - DNA, 25 bp, probe
atcccaatggcttatcttacactgg

SEQ ID NO: 123922 - DNA, 25 bp, probe
atcccaaggcatatttctcctagac

SEQ ID NO: 123923 - DNA, 25 bp, probe
atgcccgtgaagaatttacccacac

SEQ ID NO: 123924 - DNA, 25 bp, probe
atgcccgtgaagaatttacccacac

SEQ ID NO: 123925 - DNA, 25 bp, probe
atcccctgaaaacttactctcaact

SEQ ID NO: 123926 - DNA, 25 bp, probe
atcctgtgacaagcacttactccaa

SEQ ID NO: 123927 - DNA, 25 bp, probe
atcctgtgacaagcacttactccaa

SEQ ID NO: 123928 - DNA, 25 bp, probe
atccagccaaacgaatttctggcaa

SEQ ID NO: 123929 - DNA, 25 bp, probe
atccaccaagtttatatttagaatt

SEQ ID NO: 123930 - DNA, 25 bp, probe
atgcgaaaggttgtatgtgatcaga

SEQ ID NO: 123931 - DNA, 25 bp, probe
atgctcaaaggccttaagtacatcc

SEQ ID NO: 123932 - DNA, 25 bp, probe
atgtcaaaccctgaagtgatccgag

SEQ ID NO: 123933 - DNA, 25 bp, probe
atccaataactcagaaccatccaga

SEQ ID NO: 123934 - DNA, 25 bp, probe
atcccaaaccagacagaaaccaaag

SEQ ID NO: 123935 - DNA, 25 bp, probe
atcctacatagggatctgaaaccaa

SEQ ID NO: 123936 - DNA, 25 bp, probe
atcctaagaacttctccaacgacat

SEQ ID NO: 123937 - DNA, 25 bp, probe
atcccgagaaatctccagcatggaa

SEQ ID NO: 123938 - DNA, 25 bp, probe
atcccaaataatgtcggcttacaaa

SEQ ID NO: 123939 - DNA, 25 bp, probe
atcccacagcaatttctgggttaca

SEQ ID NO: 123940 - DNA, 25 bp, probe
atcccgatgcaaatgttctggttaa

SEQ ID NO: 123941 - DNA, 25 bp, probe
catccggaaatgctccaggttcaat

SEQ ID NO: 123942 - DNA, 25 bp, probe
catccggaaatgctccaggttcaat

SEQ ID NO: 123943 - DNA, 25 bp, probe
atgctcccaaagctgccatgggtaa

SEQ ID NO: 123944 - DNA, 25 bp, probe
atcccaatacggactcactggtgca

SEQ ID NO: 123945 - DNA, 25 bp, probe
atcgctcacatagtggagcttctgg

SEQ ID NO: 123946 - DNA, 25 bp, probe
atcgccagcatttcgatcctcgtca

SEQ ID NO: 123947 - DNA, 25 bp, probe
atcgcagagctctggatcctgaatc

SEQ ID NO: 123948 - DNA, 25 bp, probe
atcgaagcatctgaatcatgtccac

SEQ ID NO: 123949 - DNA, 25 bp, probe
atcgcatacatcatgaccgtcactg

SEQ ID NO: 123950 - DNA, 25 bp, probe
atcgcatacatcatgaccgtcactg

SEQ ID NO: 123951 - DNA, 25 bp, probe
atcgcatacatcatgaccgtcactg

SEQ ID NO: 123952 - DNA, 25 bp, probe
atcgcatacatcatgaccgtcactg

SEQ ID NO: 123953 - DNA, 25 bp, probe
atcgcatacatcatgaccgtcactg

SEQ ID NO: 123954 - DNA, 25 bp, probe
atccatatgctgagggagtatctgg

SEQ ID NO: 123955 - DNA, 25 bp, probe
atcctcatgaatccgaaactctgtg

SEQ ID NO: 123956 - DNA, 25 bp, probe
atccctatgtgccaaaagtagtgaa

SEQ ID NO: 123957 - DNA, 25 bp, probe
atcccttgatctatacactgaggaa

SEQ ID NO: 123958 - DNA, 25 bp, probe
atcctagcttttaacctgagccaga

SEQ ID NO: 123959 - DNA, 25 bp, probe
atcctgggtgtttatcacgttcaga

SEQ ID NO: 123960 - DNA, 25 bp, probe
atccagatgagtcaataccgttcca

SEQ ID NO: 123961 - DNA, 25 bp, probe
atccgtgagttattgcaaggcatgt

SEQ ID NO: 123962 - DNA, 25 bp, probe
atccctgacatctatgagaaggacc

SEQ ID NO: 123963 - DNA, 25 bp, probe
atcccagcactttgggaggccgagg

SEQ ID NO: 123964 - DNA, 25 bp, probe
atcccagctactcgggaggctgagg

SEQ ID NO: 123965 - DNA, 25 bp, probe
atgcttctggccagggatcctgggt

SEQ ID NO: 123966 - DNA, 25 bp, probe
atgttggccaggctggtctccaact

SEQ ID NO: 123967 - DNA, 25 bp, probe
atggaggacaggctggccgagacct

SEQ ID NO: 123968 - DNA, 25 bp, probe
atccagggcgggatcctgaacctga

SEQ ID NO: 123969 - DNA, 25 bp, probe
atccggcccaagttcctaagtagag

SEQ ID NO: 123970 - DNA, 25 bp, probe
atccagaccctagtacctaatacgg

SEQ ID NO: 123971 - DNA, 25 bp, probe
atcccagctcctttcaagctgaaac

SEQ ID NO: 123972 - DNA, 25 bp, probe
atcccagctcctttcaagctgaaac

SEQ ID NO: 123973 - DNA, 25 bp, probe
atcccagatgacaaccagacggaca

SEQ ID NO: 123974 - DNA, 25 bp, probe
atcgccgcatacagctaacaaaacg

SEQ ID NO: 123975 - DNA, 25 bp, probe
atcgccgcatacagctaacaaaacg

SEQ ID NO: 123976 - DNA, 25 bp, probe
atcgcccagacagtgctgcgaaacc

SEQ ID NO: 123977 - DNA, 25 bp, probe
atcgccaaagagaccatgaaagccg

SEQ ID NO: 123978 - DNA, 25 bp, probe
atccccaagcagaaaggcaaccatg

SEQ ID NO: 123979 - DNA, 25 bp, probe
atcccagaagggtggataccccaca

SEQ ID NO: 123980 - DNA, 25 bp, probe
atcccagagtggctcaggtgacaac

SEQ ID NO: 123981 - DNA, 25 bp, probe
atcctgcaaggcctgtcagatgctg

SEQ ID NO: 123982 - DNA, 25 bp, probe
atcccaaggcatccatcagagcaga

SEQ ID NO: 123983 - DNA, 25 bp, probe
atcccatggcaaaacgagatgatag

SEQ ID NO: 123984 - DNA, 25 bp, probe
atcgcggtacaaactggcatgaatg

SEQ ID NO: 123985 - DNA, 25 bp, probe
atcgcggtacaaactggcatgaatg

SEQ ID NO: 123986 - DNA, 25 bp, probe
atcccttgatgatactgccataatg

SEQ ID NO: 123987 - DNA, 25 bp, probe
atccctagatgaaaaactccagtgt

SEQ ID NO: 123988 - DNA, 25 bp, probe
atcccaacaaagacatactccaatg

SEQ ID NO: 123989 - DNA, 25 bp, probe
atccctgaaagattaagccctgaag

SEQ ID NO: 123990 - DNA, 25 bp, probe
atccctgaaagattaagccctgaag

SEQ ID NO: 123991 - DNA, 25 bp, probe
atccctgaaagattaagccctgaag

SEQ ID NO: 123992 - DNA, 25 bp, probe
atgccacctaatgatcaagccctat

SEQ ID NO: 123993 - DNA, 25 bp, probe
atgcccctgacagatctagttctct

SEQ ID NO: 123994 - DNA, 25 bp, probe
atgcccacatcagaatggagtccct

SEQ ID NO: 123995 - DNA, 25 bp, probe
atcgccaacatgtcactggacatcc

SEQ ID NO: 123996 - DNA, 25 bp, probe
atcctcaggtgatttgtatgctcat

SEQ ID NO: 123997 - DNA, 25 bp, probe
atcctcgtggattttgatatcttcc

SEQ ID NO: 123998 - DNA, 25 bp, probe
atccaaggagttgctgcttttccag

SEQ ID NO: 123999 - DNA, 25 bp, probe
atcctgaagtgactccgtttgtgcc

SEQ ID NO: 124000 - DNA, 25 bp, probe
atgcctataatgtgccgctttgtga

SEQ ID NO: 124001 - DNA, 25 bp, probe
atcctatacgtgtcctctattggaa

SEQ ID NO: 124002 - DNA, 25 bp, probe
atcctaagggctggtctctgctgaa

SEQ ID NO: 124003 - DNA, 25 bp, probe
atcctccagcagttagactccaaag

SEQ ID NO: 124004 - DNA, 25 bp, probe
atcctaaagatccagtccagagaag

SEQ ID NO: 124005 - DNA, 25 bp, probe
atcctcaaagtgctggtcgaggcag

SEQ ID NO: 124006 - DNA, 25 bp, probe
atcctcactggtcgggagaggtcag

SEQ ID NO: 124007 - DNA, 25 bp, probe
atcccctggatacacggaatgcaga

SEQ ID NO: 124008 - DNA, 25 bp, probe
atcccctggaagtacaaggactcat

SEQ ID NO: 124009 - DNA, 25 bp, probe
atccccgtgggatcaagagagacct

SEQ ID NO: 124010 - DNA, 25 bp, probe
atgcctcccggctttgcagggagac

SEQ ID NO: 124011 - DNA, 25 bp, probe
atgcctctcccattttagtggtagc

SEQ ID NO: 124012 - DNA, 25 bp, probe
atccttcctcatttgcaaggtgaac

SEQ ID NO: 124013 - DNA, 25 bp, probe
atcctatgcctcagctggatggaca

SEQ ID NO: 124014 - DNA, 25 bp, probe
atcctcatttgcatctggatggcgg

SEQ ID NO: 124015 - DNA, 25 bp, probe
atccctgtgttgtctctagagcagg

SEQ ID NO: 124016 - DNA, 25 bp, probe
atcctctgttttatgagtgctgaga

SEQ ID NO: 124017 - DNA, 25 bp, probe
atccatttgcctttctgggagcaga

SEQ ID NO: 124018 - DNA, 25 bp, probe
atccacagctgtgacatgggggcaa

SEQ ID NO: 124019 - DNA, 25 bp, probe
atccgctggatgtcttgggagagta

SEQ ID NO: 124020 - DNA, 25 bp, probe
atccccagctgtatgaggagagctt

SEQ ID NO: 124021 - DNA, 25 bp, probe
atccctgagctgaacgggaagctca

SEQ ID NO: 124022 - DNA, 25 bp, probe
atccccagctacagtggaacacaac

SEQ ID NO: 124023 - DNA, 25 bp, probe
atgccccagctctggatgaaggcaa

SEQ ID NO: 124024 - DNA, 25 bp, probe
atcccatatgcctgggcagaaggaa

SEQ ID NO: 124025 - DNA, 25 bp, probe
atccctgtgcctggggaagcagtcc

SEQ ID NO: 124026 - DNA, 25 bp, probe
atcctcagtgccgtgggcactttcc

SEQ ID NO: 124027 - DNA, 25 bp, probe
atcctcagaccaggtggaattactt

SEQ ID NO: 124028 - DNA, 25 bp, probe
atgcagaggaaaggggaataatctt

SEQ ID NO: 124029 - DNA, 25 bp, probe
atccacaggtatgtaaaagacaata

SEQ ID NO: 124030 - DNA, 25 bp, probe
atccaccgtgacatcaaggatgaga

SEQ ID NO: 124031 - DNA, 25 bp, probe
atccagcgggaactcagggtgagca

SEQ ID NO: 124032 - DNA, 25 bp, probe
atcctgggaggatcctgggagaagg

SEQ ID NO: 124033 - DNA, 25 bp, probe
atccgggagcgcacggaggagctgg

SEQ ID NO: 124034 - DNA, 25 bp, probe
atcctgggcaagaccttgcaggcct

SEQ ID NO: 124035 - DNA, 25 bp, probe
atcctgtggtccatttcataccatt

SEQ ID NO: 124036 - DNA, 25 bp, probe
atccgcatgtgtctgtattcataca

SEQ ID NO: 124037 - DNA, 25 bp, probe
atccgcatgtgtctgtattcataca

SEQ ID NO: 124038 - DNA, 25 bp, probe
atcccaggctcacatgattcattca

SEQ ID NO: 124039 - DNA, 25 bp, probe
atcccagttgtcaatgatgtgcttc

SEQ ID NO: 124040 - DNA, 25 bp, probe
atcccagttgtcaatgatgtgcttc

SEQ ID NO: 124041 - DNA, 25 bp, probe
atcctcaaagtcatgttgttgctaa

SEQ ID NO: 124042 - DNA, 25 bp, probe
atcctcaaagtcatgttgttgctaa

SEQ ID NO: 124043 - DNA, 25 bp, probe
atcctcaacagtgtaggctcaagaa

SEQ ID NO: 124044 - DNA, 25 bp, probe
atcctaccaacactaggccacagag

SEQ ID NO: 124045 - DNA, 25 bp, probe
atccaatcaaacctcagcccgagga

SEQ ID NO: 124046 - DNA, 25 bp, probe
atccacctaaggccattgacgtggc

SEQ ID NO: 124047 - DNA, 25 bp, probe
atccacctaaggccattgacgtggc

SEQ ID NO: 124048 - DNA, 25 bp, probe
atccccaaagagctctggatgatgg

SEQ ID NO: 124049 - DNA, 25 bp, probe
atccctacatcaacgtctggtatga

SEQ ID NO: 124050 - DNA, 25 bp, probe
atccaataatctacactgtgtttaa

SEQ ID NO: 124051 - DNA, 25 bp, probe
atccagcaagacttcgtgattttta

SEQ ID NO: 124052 - DNA, 25 bp, probe
atccatgacaactttggtatcgtgg

SEQ ID NO: 124053 - DNA, 25 bp, probe
atccagagcacagatctgtttcgtg

SEQ ID NO: 124054 - DNA, 25 bp, probe
atccaccaactagtcatgggcagta

SEQ ID NO: 124055 - DNA, 25 bp, probe
atccacaatctcaagcactggggcc

SEQ ID NO: 124056 - DNA, 25 bp, probe
atccgaatgctcaagcaactcaagc

SEQ ID NO: 124057 - DNA, 25 bp, probe
atccaaagcatgtctgcaacccagc

SEQ ID NO: 124058 - DNA, 25 bp, probe
atccatcatatagttcaaccatgat

SEQ ID NO: 124059 - DNA, 25 bp, probe
atgcctttgcaataactagattgtg

SEQ ID NO: 124060 - DNA, 25 bp, probe
atgcctttgcaataactagattgtg

SEQ ID NO: 124061 - DNA, 25 bp, probe
atgctttaccattcaacatagtatc

SEQ ID NO: 124062 - DNA, 25 bp, probe
atgctttacatggcaatcaaagcct

SEQ ID NO: 124063 - DNA, 25 bp, probe
atgctttcagcagctacaaaccctg

SEQ ID NO: 124064 - DNA, 25 bp, probe
atgctctctcaaccttaacaaacac

SEQ ID NO: 124065 - DNA, 25 bp, probe
atgcttccacagcgtaaatacaccc

SEQ ID NO: 124066 - DNA, 25 bp, probe
atgctttcctagctgaagtcatact

SEQ ID NO: 124067 - DNA, 25 bp, probe
atgctggttcagctatacagttaat

SEQ ID NO: 124068 - DNA, 25 bp, probe
atgctacagtagctaagaagtatta

SEQ ID NO: 124069 - DNA, 25 bp, probe
atgctacagtagctaagaagtatta

SEQ ID NO: 124070 - DNA, 25 bp, probe
atgccacgtctgtttaaattatttg

SEQ ID NO: 124071 - DNA, 25 bp, probe
atcccatgtcgtgttggttactata

SEQ ID NO: 124072 - DNA, 25 bp, probe
atcccagatggttatgttttacata

SEQ ID NO: 124073 - DNA, 25 bp, probe
atcccagatggttatgttttacata

SEQ ID NO: 124074 - DNA, 25 bp, probe
atccacaaggcatagcctccaagta

SEQ ID NO: 124075 - DNA, 25 bp, probe
atgccaaatgagaatatccccgagt

SEQ ID NO: 124076 - DNA, 25 bp, probe
atcctagatggaaaccctcatgcta

SEQ ID NO: 124077 - DNA, 25 bp, probe
atggaagatggacaccaccggacac

SEQ ID NO: 124078 - DNA, 25 bp, probe
atgagaagatggtcaactacctggt

SEQ ID NO: 124079 - DNA, 25 bp, probe
agggagggacaagccctggggagag

SEQ ID NO: 124080 - DNA, 25 bp, probe
atgtgtggggtttcccctcaggaat

SEQ ID NO: 124081 - DNA, 25 bp, probe
agttggttgttctggccaacaatat

SEQ ID NO: 124082 - DNA, 25 bp, probe
agtcggttgttcctggtcattgagt

SEQ ID NO: 124083 - DNA, 25 bp, probe
aggcagactggtacctcgttaagat

SEQ ID NO: 124084 - DNA, 25 bp, probe
atccatgacttggcccaagtttatg

SEQ ID NO: 124085 - DNA, 25 bp, probe
atccagtttccagctgcaggtttgt

SEQ ID NO: 124086 - DNA, 25 bp, probe
atgccagttccaagcctaggtttca

SEQ ID NO: 124087 - DNA, 25 bp, probe
atccagctcatggtggccatgggat

SEQ ID NO: 124088 - DNA, 25 bp, probe
atccagctcatggtggccatgggat

SEQ ID NO: 124089 - DNA, 25 bp, probe
atccctcatgtgatgcctgtaaaaa

SEQ ID NO: 124090 - DNA, 25 bp, probe
atcccatcatctatggtgccaaaac

SEQ ID NO: 124091 - DNA, 25 bp, probe
atcccatcatctactgcttcatgaa

SEQ ID NO: 124092 - DNA, 25 bp, probe
atccctcagctgacactgaagacga

SEQ ID NO: 124093 - DNA, 25 bp, probe
atccctccatgaattgatgaatctg

SEQ ID NO: 124094 - DNA, 25 bp, probe
atccctacatgtattgcacattgta

SEQ ID NO: 124095 - DNA, 25 bp, probe
atccctgcaaggatctgcagttact

SEQ ID NO: 124096 - DNA, 25 bp, probe
atgcctttcagggtgtggtctactc

SEQ ID NO: 124097 - DNA, 25 bp, probe
atgcctattacgagatggggatcca

SEQ ID NO: 124098 - DNA, 25 bp, probe
atcctcaaagccaagctggggatgc

SEQ ID NO: 124099 - DNA, 25 bp, probe
atcccctcagccaagggcaggtgga

SEQ ID NO: 124100 - DNA, 25 bp, probe
atcccgaagcctgtgtagcagtgag

SEQ ID NO: 124101 - DNA, 25 bp, probe
atccctgaccctgggatggctggat

SEQ ID NO: 124102 - DNA, 25 bp, probe
atccctgactggtgcgtggtggagg

SEQ ID NO: 124103 - DNA, 25 bp, probe
atccgaaatggctctgaggtgcggg

SEQ ID NO: 124104 - DNA, 25 bp, probe
atcctgagagactcctggggtggga

SEQ ID NO: 124105 - DNA, 25 bp, probe
atcctgagagactcctggggtggga

SEQ ID NO: 124106 - DNA, 25 bp, probe
atcctgagtcacccctgggtgtcag

SEQ ID NO: 124107 - DNA, 25 bp, probe
atccgctgccacaacttggtggacg

SEQ ID NO: 124108 - DNA, 25 bp, probe
atccctgtatctactagtgtggccg

SEQ ID NO: 124109 - DNA, 25 bp, probe
atcctgtgaactcctagctgtggtc

SEQ ID NO: 124110 - DNA, 25 bp, probe
atgcctgttatctgtggcgtttcat

SEQ ID NO: 124111 - DNA, 25 bp, probe
atcctttatctgtgacttcatgctc

SEQ ID NO: 124112 - DNA, 25 bp, probe
atcctgggtctgcaactttggaaaa

SEQ ID NO: 124113 - DNA, 25 bp, probe
atcctgtggctctgaacttcatgaa

SEQ ID NO: 124114 - DNA, 25 bp, probe
atcctgtggctctgaacttcatgaa

SEQ ID NO: 124115 - DNA, 25 bp, probe
atcctgtcagatgataacttcaacc

SEQ ID NO: 124116 - DNA, 25 bp, probe
atccagcttgatgatgtcacctacc

SEQ ID NO: 124117 - DNA, 25 bp, probe
atgcctgctatcgagcatgagcacc

SEQ ID NO: 124118 - DNA, 25 bp, probe
atcctgtatgctgcgctgaacagag

SEQ ID NO: 124119 - DNA, 25 bp, probe
atcctgatggaggctccacactaga

SEQ ID NO: 124120 - DNA, 25 bp, probe
atccgagaggtggccaacaaagtca

SEQ ID NO: 124121 - DNA, 25 bp, probe
atccgagaggtggccaacaaagtca

SEQ ID NO: 124122 - DNA, 25 bp, probe
atccgcagggtgttcaacgactgcc

SEQ ID NO: 124123 - DNA, 25 bp, probe
atccgcagagaaattcagaacctca

SEQ ID NO: 124124 - DNA, 25 bp, probe
atcctcagagagttacaaagccaga

SEQ ID NO: 124125 - DNA, 25 bp, probe
atccttggatcagtactgaactcag

SEQ ID NO: 124126 - DNA, 25 bp, probe
atgcctgatgtgacgctactaacct

SEQ ID NO: 124127 - DNA, 25 bp, probe
atccgtgtccgagtctgacaccatc

SEQ ID NO: 124128 - DNA, 25 bp, probe
atccttgttagagttatccctgcag

SEQ ID NO: 124129 - DNA, 25 bp, probe
atccttgtggaagaaggccacatgg

SEQ ID NO: 124130 - DNA, 25 bp, probe
atccagatgccgataaaggcccctg

SEQ ID NO: 124131 - DNA, 25 bp, probe
atccagatccagagagaagaccttc

SEQ ID NO: 124132 - DNA, 25 bp, probe
atccagatccagagagaagaccttc

SEQ ID NO: 124133 - DNA, 25 bp, probe
atccgtctgctgcagaaactccttc

SEQ ID NO: 124134 - DNA, 25 bp, probe
atccttctctgggaaatctactcct

SEQ ID NO: 124135 - DNA, 25 bp, probe
atccatttctgtgaactcttctgca

SEQ ID NO: 124136 - DNA, 25 bp, probe
atcctttttcgatcattcaatgcat

SEQ ID NO: 124137 - DNA, 25 bp, probe
atccctgtttttaccatcaatcatc

SEQ ID NO: 124138 - DNA, 25 bp, probe
atccctgatcttatcaccagtgtca

SEQ ID NO: 124139 - DNA, 25 bp, probe
atccctcatcttatgtaagtgtgaa

SEQ ID NO: 124140 - DNA, 25 bp, probe
atgcccgcataaaactgaaggtgga

SEQ ID NO: 124141 - DNA, 25 bp, probe
atgccacctgagttaatgaagccgg

SEQ ID NO: 124142 - DNA, 25 bp, probe
atcctccgaagtaagagcttggaga

SEQ ID NO: 124143 - DNA, 25 bp, probe
atcctcctctgataaatctctggga

SEQ ID NO: 124144 - DNA, 25 bp, probe
atcctgcactctaaggagatcatct

SEQ ID NO: 124145 - DNA, 25 bp, probe
atcctcctgcacaaggtgcagcatg

SEQ ID NO: 124146 - DNA, 25 bp, probe
atccaccagctcatgggcaatgggg

SEQ ID NO: 124147 - DNA, 25 bp, probe
atccaccagctcatgggcaatgggg

SEQ ID NO: 124148 - DNA, 25 bp, probe
atgctcctgagtggtgtaggtgggg

SEQ ID NO: 124149 - DNA, 25 bp, probe
atccttgagtgcctcagtggtggcg

SEQ ID NO: 124150 - DNA, 25 bp, probe
atcctctattgtacagatgggaagt

SEQ ID NO: 124151 - DNA, 25 bp, probe
atcctgttcatgaagcagatatgtg

SEQ ID NO: 124152 - DNA, 25 bp, probe
atcctcttcatgcacaagatgaggg

SEQ ID NO: 124153 - DNA, 25 bp, probe
atccctgtagtgccaactgaagtgc

SEQ ID NO: 124154 - DNA, 25 bp, probe
atcctcatcaagttcaacgcggtgc

SEQ ID NO: 124155 - DNA, 25 bp, probe
atcctcacagctgaaatctcagggc

SEQ ID NO: 124156 - DNA, 25 bp, probe
atcctcatcacgaaacattccgtga

SEQ ID NO: 124157 - DNA, 25 bp, probe
atgctctacggaaacatattctaga

SEQ ID NO: 124158 - DNA, 25 bp, probe
atcctaatagaaattgatgttacta

SEQ ID NO: 124159 - DNA, 25 bp, probe
atccaaaggagatgctggcataaca

SEQ ID NO: 124160 - DNA, 25 bp, probe
atcctggacagaaagcgccataaca

SEQ ID NO: 124161 - DNA, 25 bp, probe
atcctcagtagaaagcccaagccag

SEQ ID NO: 124162 - DNA, 25 bp, probe
atccttgtggatggacagccacgcc

SEQ ID NO: 124163 - DNA, 25 bp, probe
atcctaatgtatgaactcctgactg

SEQ ID NO: 124164 - DNA, 25 bp, probe
atcctaatgcaacaagtcctgaatc

SEQ ID NO: 124165 - DNA, 25 bp, probe
atccaatgtgccatcaagtcactaa

SEQ ID NO: 124166 - DNA, 25 bp, probe
atgccaattgacacaaagcattcca

SEQ ID NO: 124167 - DNA, 25 bp, probe
atccgcattgccaaaatggactcct

SEQ ID NO: 124168 - DNA, 25 bp, probe
atccgtatctgcagaatgggccact

SEQ ID NO: 124169 - DNA, 25 bp, probe
atccggatgctggagttcggcagcc

SEQ ID NO: 124170 - DNA, 25 bp, probe
atgcgcaggatgcggatggggccac

SEQ ID NO: 124171 - DNA, 25 bp, probe
atgcgggagttggggttgctcatct

SEQ ID NO: 124172 - DNA, 25 bp, probe
atccggtgtaggcacagctctccta

SEQ ID NO: 124173 - DNA, 25 bp, probe
atcccctgaattggagagctctcct

SEQ ID NO: 124174 - DNA, 25 bp, probe
atccacgctcaattagagccattca

SEQ ID NO: 124175 - DNA, 25 bp, probe
atccagagtcaagcaacatttcaaa

SEQ ID NO: 124176 - DNA, 25 bp, probe
atccgagatcagcagcaattgcctc

SEQ ID NO: 124177 - DNA, 25 bp, probe
atcctggcatagcacagggtcatgg

SEQ ID NO: 124178 - DNA, 25 bp, probe
atcctcgtcaggtgcaggtcagcac

SEQ ID NO: 124179 - DNA, 25 bp, probe
atccacgaccgccgcaagatgcggc

SEQ ID NO: 124180 - DNA, 25 bp, probe
atccacgaccgccgcaagatgcggc

SEQ ID NO: 124181 - DNA, 25 bp, probe
atccagcaacgcgaggaaggcctgt

SEQ ID NO: 124182 - DNA, 25 bp, probe
atgccagacacctagcgaagagctc

SEQ ID NO: 124183 - DNA, 25 bp, probe
atgctgaacgccaggaagtgtcctt

SEQ ID NO: 124184 - DNA, 25 bp, probe
atgcgcatcagctacctgtaggggc

SEQ ID NO: 124185 - DNA, 25 bp, probe
atgcctcacattgctggcacgggga

SEQ ID NO: 124186 - DNA, 25 bp, probe
atgcaggagcttgaagcactcggct

SEQ ID NO: 124187 - DNA, 25 bp, probe
atgctggcaggggacatgacctggc

SEQ ID NO: 124188 - DNA, 25 bp, probe
atgctgccgcaggatgatcagtccg

SEQ ID NO: 124189 - DNA, 25 bp, probe
atgctggcgctgagtacgtcgtgga

SEQ ID NO: 124190 - DNA, 25 bp, probe
atgctggcgcttctctcgtcggcgg

SEQ ID NO: 124191 - DNA, 25 bp, probe
atgcattgccctatgcactgttagc

SEQ ID NO: 124192 - DNA, 25 bp, probe
atgccgacctcagcatcggcatctg

SEQ ID NO: 124193 - DNA, 25 bp, probe
atgccgacctcagcatcggcatctg

SEQ ID NO: 124194 - DNA, 25 bp, probe
atccacaccatcgatatgaggcagg

SEQ ID NO: 124195 - DNA, 25 bp, probe
atccacaccatcgatatgaggcagg

SEQ ID NO: 124196 - DNA, 25 bp, probe
atccaaacatctgcagattcactgg

SEQ ID NO: 124197 - DNA, 25 bp, probe
atccagccaagcacagtctactgtt

SEQ ID NO: 124198 - DNA, 25 bp, probe
atccactcagggcattgtatctgat

SEQ ID NO: 124199 - DNA, 25 bp, probe
atgaatcatcggcttggtactgaaa

SEQ ID NO: 124200 - DNA, 25 bp, probe
atgaatcatcggcttggtactgaaa

SEQ ID NO: 124201 - DNA, 25 bp, probe
atgcaatacgggggcctctatgaat

SEQ ID NO: 124202 - DNA, 25 bp, probe
atgccagtcgggcagcccaggatag

SEQ ID NO: 124203 - DNA, 25 bp, probe
atgccaccaaggccacatcgaggaa

SEQ ID NO: 124204 - DNA, 25 bp, probe
atccattcacagagacctagcagca

SEQ ID NO: 124205 - DNA, 25 bp, probe
atccttcacgcatatcagctgatcg

SEQ ID NO: 124206 - DNA, 25 bp, probe
atcctgtcctgctattgcattatca

SEQ ID NO: 124207 - DNA, 25 bp, probe
atcctgtcctgctatatgaagatca

SEQ ID NO: 124208 - DNA, 25 bp, probe
atgcgaacccaaatgcagcagatgc

SEQ ID NO: 124209 - DNA, 25 bp, probe
atgcgagcaaagcattctcatcagt

SEQ ID NO: 124210 - DNA, 25 bp, probe
atccataactgatttccaagctggt

SEQ ID NO: 124211 - DNA, 25 bp, probe
atcctcgtctgaatcatccgaggca

SEQ ID NO: 124212 - DNA, 25 bp, probe
atcctgcgcttgatcaactgaacca

SEQ ID NO: 124213 - DNA, 25 bp, probe
atcctgtggtgtccatgaggtacca

SEQ ID NO: 124214 - DNA, 25 bp, probe
atcctgagcaggaacgtggctccca

SEQ ID NO: 124215 - DNA, 25 bp, probe
atccatggagcaacagtggttccca

SEQ ID NO: 124216 - DNA, 25 bp, probe
atcctagatcaccgaggttatgcca

SEQ ID NO: 124217 - DNA, 25 bp, probe
atcctcagacacctgtggaataccc

SEQ ID NO: 124218 - DNA, 25 bp, probe
atcctgagatagctctgcagataag

SEQ ID NO: 124219 - DNA, 25 bp, probe
atcctgagagcatctcgaatatcag

SEQ ID NO: 124220 - DNA, 25 bp, probe
atcctgagagcatctcgaatatcag

SEQ ID NO: 124221 - DNA, 25 bp, probe
atccttgaatactcaattcagtgac

SEQ ID NO: 124222 - DNA, 25 bp, probe
atgcctatactatcacaacaagttc

SEQ ID NO: 124223 - DNA, 25 bp, probe
atgcctatactatcacaacaagttc

SEQ ID NO: 124224 - DNA, 25 bp, probe
atgcttcacctagaaacagattaca

SEQ ID NO: 124225 - DNA, 25 bp, probe
atgccaggcctagatacgacaaacg

SEQ ID NO: 124226 - DNA, 25 bp, probe
atccacctgatagacgcgaacacag

SEQ ID NO: 124227 - DNA, 25 bp, probe
atccacagttacacggaaagcatgg

SEQ ID NO: 124228 - DNA, 25 bp, probe
atccaagaaaggactgggaagctga

SEQ ID NO: 124229 - DNA, 25 bp, probe
atgcccagaccatgcctggtgaagt

SEQ ID NO: 124230 - DNA, 25 bp, probe
atgcccagaccatgcctggtgaagt

SEQ ID NO: 124231 - DNA, 25 bp, probe
atgcccagaccatgcctggtgaagt

SEQ ID NO: 124232 - DNA, 25 bp, probe
atgtccaacctgacaccagagtcgt

SEQ ID NO: 124233 - DNA, 25 bp, probe
atgtccaacctgacaccagagtcgt

SEQ ID NO: 124234 - DNA, 25 bp, probe
atgtccattttggagggatccattt

SEQ ID NO: 124235 - DNA, 25 bp, probe
atgttttatgggacccccatcttca

SEQ ID NO: 124236 - DNA, 25 bp, probe
atgttttatgggacccccatcttca

SEQ ID NO: 124237 - DNA, 25 bp, probe
atgctgtctttacatggggttttca

SEQ ID NO: 124238 - DNA, 25 bp, probe
atgcttggagtcataagtgttattt

SEQ ID NO: 124239 - DNA, 25 bp, probe
atgctttggttctgggttgtttcct

SEQ ID NO: 124240 - DNA, 25 bp, probe
agtttgcgtttgaggtagttgtgcc

SEQ ID NO: 124241 - DNA, 25 bp, probe
atgctttccttacaggatttcaggc

SEQ ID NO: 124242 - DNA, 25 bp, probe
atgctttacttagcggattcctgcc

SEQ ID NO: 124243 - DNA, 25 bp, probe
atgcccttttaggagcaattccatc

SEQ ID NO: 124244 - DNA, 25 bp, probe
atcctccattaagcgagcatacctc

SEQ ID NO: 124245 - DNA, 25 bp, probe
atcctccagaaagtcgagcagcacc

SEQ ID NO: 124246 - DNA, 25 bp, probe
atccaccagatcgacttgatcgtgc

SEQ ID NO: 124247 - DNA, 25 bp, probe
atccttaaccaccgcatatgcatgc

SEQ ID NO: 124248 - DNA, 25 bp, probe
atcctgtgaaacgtgctgtcatatg

SEQ ID NO: 124249 - DNA, 25 bp, probe
atcctgcgagcaagaatttcatata

SEQ ID NO: 124250 - DNA, 25 bp, probe
atcctgctcacagaatcacagctaa

SEQ ID NO: 124251 - DNA, 25 bp, probe
atcctcaccatccacagcaagatga

SEQ ID NO: 124252 - DNA, 25 bp, probe
atgcctcacacttcacatcagaatt

SEQ ID NO: 124253 - DNA, 25 bp, probe
atgcccaacgatccggagaaaaaca

SEQ ID NO: 124254 - DNA, 25 bp, probe
atgctggagggctcggagaagaacc

SEQ ID NO: 124255 - DNA, 25 bp, probe
atgctgcggtggttgtgtgggaaac

SEQ ID NO: 124256 - DNA, 25 bp, probe
atgccagtgtggctgtgctctaaaa

SEQ ID NO: 124257 - DNA, 25 bp, probe
atccatgggagcattctcaaaggct

SEQ ID NO: 124258 - DNA, 25 bp, probe
atccatgggagctttctttctgact

SEQ ID NO: 124259 - DNA, 25 bp, probe
atccaggccttattcttatagacta

SEQ ID NO: 124260 - DNA, 25 bp, probe
atccaggtttaaccctgcaagctgt

SEQ ID NO: 124261 - DNA, 25 bp, probe
atccaggtttaaccctgcaagctgt

SEQ ID NO: 124262 - DNA, 25 bp, probe
atccaggtatgtccaactcggaggt

SEQ ID NO: 124263 - DNA, 25 bp, probe
atccagatgttacaacgggcaggag

SEQ ID NO: 124264 - DNA, 25 bp, probe
atccggtctcacagcactggaagga

SEQ ID NO: 124265 - DNA, 25 bp, probe
atcctttgcccatgcctgagaaagg

SEQ ID NO: 124266 - DNA, 25 bp, probe
atcctcttccagccgcagaagaacg

SEQ ID NO: 124267 - DNA, 25 bp, probe
atcctctccctgcggagacatatca

SEQ ID NO: 124268 - DNA, 25 bp, probe
atccatccatctccagggagcaaga

SEQ ID NO: 124269 - DNA, 25 bp, probe
atccactttgcccagcagatatatg

SEQ ID NO: 124270 - DNA, 25 bp, probe
atccactttgcccagcagatatatg

SEQ ID NO: 124271 - DNA, 25 bp, probe
atccttgttgccccactaaggaatc

SEQ ID NO: 124272 - DNA, 25 bp, probe
atcctttgtactctataatgtgaac

SEQ ID NO: 124273 - DNA, 25 bp, probe
atccttcaggcattctttaaggaga

SEQ ID NO: 124274 - DNA, 25 bp, probe
atcctctaggaggtctctaagaata

SEQ ID NO: 124275 - DNA, 25 bp, probe
atcctctacaacctcatttcaaaga

SEQ ID NO: 124276 - DNA, 25 bp, probe
atgcccttctgaactggcttaaaga

SEQ ID NO: 124277 - DNA, 25 bp, probe
atgctgccttcttggggattcaaaa

SEQ ID NO: 124278 - DNA, 25 bp, probe
atgctgccttcttggggattcaaaa

SEQ ID NO: 124279 - DNA, 25 bp, probe
atgctttctattggagtttcaggaa

SEQ ID NO: 124280 - DNA, 25 bp, probe
atgcgaacatactggctcttaggag

SEQ ID NO: 124281 - DNA, 25 bp, probe
atccagaatcaaaagctcaagagtg

SEQ ID NO: 124282 - DNA, 25 bp, probe
atccaaacctgaagtcacagatgat

SEQ ID NO: 124283 - DNA, 25 bp, probe
atcctagatctcagaatcacaatag

SEQ ID NO: 124284 - DNA, 25 bp, probe
atcctctggcacaagatgcacaatt

SEQ ID NO: 124285 - DNA, 25 bp, probe
atccatctgctggcagagagccacg

SEQ ID NO: 124286 - DNA, 25 bp, probe
atccattgtagcgaaggcactgggt

SEQ ID NO: 124287 - DNA, 25 bp, probe
atccttggcccaggagagcgggctc

SEQ ID NO: 124288 - DNA, 25 bp, probe
accattggaccagtgtcacctggct

SEQ ID NO: 124289 - DNA, 25 bp, probe
atcctgtgcacagagtgtacctcct

SEQ ID NO: 124290 - DNA, 25 bp, probe
atcctgtgcacagagtgtacctcct

SEQ ID NO: 124291 - DNA, 25 bp, probe
atcctgtgtcaggacagtatccacc

SEQ ID NO: 124292 - DNA, 25 bp, probe
atccatgtgtgcaaaccatctgccc

SEQ ID NO: 124293 - DNA, 25 bp, probe
atccattgcagaaatagcctgttgc

SEQ ID NO: 124294 - DNA, 25 bp, probe
atgctggaagctaatggcctgttgc

SEQ ID NO: 124295 - DNA, 25 bp, probe
atgctggaagctaatggcctgttgc

SEQ ID NO: 124296 - DNA, 25 bp, probe
atgcaagtatgttgggctcgctggc

SEQ ID NO: 124297 - DNA, 25 bp, probe
atgcatgagttgagttgcttctgag

SEQ ID NO: 124298 - DNA, 25 bp, probe
atgcatagggaggtcctatggcagc

SEQ ID NO: 124299 - DNA, 25 bp, probe
atgctggtaggggcactgtgtgcac

SEQ ID NO: 124300 - DNA, 25 bp, probe
atcctactggtagatggaacagcat

SEQ ID NO: 124301 - DNA, 25 bp, probe
atcctttgtgaagctggaacactgg

SEQ ID NO: 124302 - DNA, 25 bp, probe
atcctgttctgctacgtggagatcc

SEQ ID NO: 124303 - DNA, 25 bp, probe
atcctgttctgctacgtggagatcc

SEQ ID NO: 124304 - DNA, 25 bp, probe
atgctttgatcctcactgtggaacc

SEQ ID NO: 124305 - DNA, 25 bp, probe
atgctttgatccgaattcttcgccc

SEQ ID NO: 124306 - DNA, 25 bp, probe
atgcatttactagattctagcaccg

SEQ ID NO: 124307 - DNA, 25 bp, probe
atgctggtcacaaacacccagaccg

SEQ ID NO: 124308 - DNA, 25 bp, probe
atgctgagaaaaacccaagaccgct

SEQ ID NO: 124309 - DNA, 25 bp, probe
aggccaaacagcagctagaatacgc

SEQ ID NO: 124310 - DNA, 25 bp, probe
aggccaaacatacccaacagatggt

SEQ ID NO: 124311 - DNA, 25 bp, probe
atggccaaaccacaaaaagatgaga

SEQ ID NO: 124312 - DNA, 25 bp, probe
atgcccccacactgaaatgaagctg

SEQ ID NO: 124313 - DNA, 25 bp, probe
atccaccgccactgtgtgaaactgt

SEQ ID NO: 124314 - DNA, 25 bp, probe
atccagtcccagtgtcagaatgatt

SEQ ID NO: 124315 - DNA, 25 bp, probe
atccaatgctcaagaaacaacttct

SEQ ID NO: 124316 - DNA, 25 bp, probe
atccagatgccaaatatgccaaggt

SEQ ID NO: 124317 - DNA, 25 bp, probe
atgccattgacaaatactctaggtt

SEQ ID NO: 124318 - DNA, 25 bp, probe
atgctcctggcaactacttcaaggt

SEQ ID NO: 124319 - DNA, 25 bp, probe
atcctctccactatcttcaggatgc

SEQ ID NO: 124320 - DNA, 25 bp, probe
atcctctccaaagttggagcttcta

SEQ ID NO: 124321 - DNA, 25 bp, probe
atgcccccataagtagtacctttga

SEQ ID NO: 124322 - DNA, 25 bp, probe
atgctgaccctaggattttccttcc

SEQ ID NO: 124323 - DNA, 25 bp, probe
atgcaggacctggcagatttctttc

SEQ ID NO: 124324 - DNA, 25 bp, probe
atgcatgggcaccaaagtcctttga

SEQ ID NO: 124325 - DNA, 25 bp, probe
atgcatgggcaccaaagtcctttga

SEQ ID NO: 124326 - DNA, 25 bp, probe
atgcctgcaacgtgaacatcttcga

SEQ ID NO: 124327 - DNA, 25 bp, probe
atcctgctcctagtgagtatctttg

SEQ ID NO: 124328 - DNA, 25 bp, probe
atgcttcccaagaaatagttgatga

SEQ ID NO: 124329 - DNA, 25 bp, probe
atgcttacccgagacagatagatga

SEQ ID NO: 124330 - DNA, 25 bp, probe
atgctttgctccgaacaaatagtaa

SEQ ID NO: 124331 - DNA, 25 bp, probe
atgctctttgcctctaattcagtat

SEQ ID NO: 124332 - DNA, 25 bp, probe
atccttctcactttgaattagttgt

SEQ ID NO: 124333 - DNA, 25 bp, probe
atccacttcactctgatgactcaga

SEQ ID NO: 124334 - DNA, 25 bp, probe
atccacggcactccgcgagctgtat

SEQ ID NO: 124335 - DNA, 25 bp, probe
atccacagatcaggcccaatcatta

SEQ ID NO: 124336 - DNA, 25 bp, probe
atcctatcatctggagccctagtat

SEQ ID NO: 124337 - DNA, 25 bp, probe
atcctgagcatctagaaccttgttg

SEQ ID NO: 124338 - DNA, 25 bp, probe
atcctgagcatctagaaccttgttg

SEQ ID NO: 124339 - DNA, 25 bp, probe
atcctgagcacatatcagctgtgct

SEQ ID NO: 124340 - DNA, 25 bp, probe
atcctcagacatgcagctgtgtgtg

SEQ ID NO: 124341 - DNA, 25 bp, probe
atcctcatcacagagcggtctggca

SEQ ID NO: 124342 - DNA, 25 bp, probe
atccacattgcggaggttctgtgac

SEQ ID NO: 124343 - DNA, 25 bp, probe
atccacattggatcctcatttgaga

SEQ ID NO: 124344 - DNA, 25 bp, probe
atcctgctatggtaccattctaatg

SEQ ID NO: 124345 - DNA, 25 bp, probe
atccttttccagcagccataatttt

SEQ ID NO: 124346 - DNA, 25 bp, probe
atccttgttcctgttacaatattta

SEQ ID NO: 124347 - DNA, 25 bp, probe
atccttgtatctttttatacatatt

SEQ ID NO: 124348 - DNA, 25 bp, probe
atccattgtgtcatatttactctaa

SEQ ID NO: 124349 - DNA, 25 bp, probe
atccatctggaaatgatttttgtat

SEQ ID NO: 124350 - DNA, 25 bp, probe
atgccatcgtatgtattttgtgtgc

SEQ ID NO: 124351 - DNA, 25 bp, probe
atgaaggtttcttgtcattatgaca

SEQ ID NO: 124352 - DNA, 25 bp, probe
atgaaagttctcagtattgtaacag

SEQ ID NO: 124353 - DNA, 25 bp, probe
atgaagaatttcaggacatctcgga

SEQ ID NO: 124354 - DNA, 25 bp, probe
atgaagaaagtccagacctcggaga

SEQ ID NO: 124355 - DNA, 25 bp, probe
atgaagaaattcgaatctcccaaca

SEQ ID NO: 124356 - DNA, 25 bp, probe
atgttaaattgagcggccgcgaatt

SEQ ID NO: 124357 - DNA, 25 bp, probe
atgtccaaatagcggcctcggaaaa

SEQ ID NO: 124358 - DNA, 25 bp, probe
atgcacctaaagaggcctccatgga

SEQ ID NO: 124359 - DNA, 25 bp, probe
atgagaccacggagacccagaggac

SEQ ID NO: 124360 - DNA, 25 bp, probe
atgacatccgggccgacgtatggag

SEQ ID NO: 124361 - DNA, 25 bp, probe
atgacccaggagtctacactcaagt

SEQ ID NO: 124362 - DNA, 25 bp, probe
atgactgctgcagttttaccccagc

SEQ ID NO: 124363 - DNA, 25 bp, probe
atgactgctgcagttttaccccagc

SEQ ID NO: 124364 - DNA, 25 bp, probe
agatagtgactaaagcagcttatgt

SEQ ID NO: 124365 - DNA, 25 bp, probe
atgacttttttaaactaagatctgt

SEQ ID NO: 124366 - DNA, 25 bp, probe
atcctttttgctttcaccaagaatg

SEQ ID NO: 124367 - DNA, 25 bp, probe
atcctttttgctttcaccaagaatg

SEQ ID NO: 124368 - DNA, 25 bp, probe
atcctcttttgatgtctgcagaaga

SEQ ID NO: 124369 - DNA, 25 bp, probe
atcctcgtatagcgtatgacaaggc

SEQ ID NO: 124370 - DNA, 25 bp, probe
atgttagtcttttgtatattaggcc

SEQ ID NO: 124371 - DNA, 25 bp, probe
atgttagtcttttgtatattaggcc

SEQ ID NO: 124372 - DNA, 25 bp, probe
ctgttggaatcttaggaactagacc

SEQ ID NO: 124373 - DNA, 25 bp, probe
tcttagggtcccagaacaagcccca

SEQ ID NO: 124374 - DNA, 25 bp, probe
atgaagggctgcgcttaaaacaccg

SEQ ID NO: 124375 - DNA, 25 bp, probe
atgaagggctgcgcttaaaacaccg

SEQ ID NO: 124376 - DNA, 25 bp, probe
atgaagagcccctttaacaaccgct

SEQ ID NO: 124377 - DNA, 25 bp, probe
atgaaagccaaacctttcccatcgt

SEQ ID NO: 124378 - DNA, 25 bp, probe
atgaagccgcaggagcagttgaccc

SEQ ID NO: 124379 - DNA, 25 bp, probe
atgaaccagtataagtagcacaatt

SEQ ID NO: 124380 - DNA, 25 bp, probe
atgctgaccgttggcactaagccag

SEQ ID NO: 124381 - DNA, 25 bp, probe
atgctgaaaggtacctgccaggcac

SEQ ID NO: 124382 - DNA, 25 bp, probe
atgctatgaaacatctccccagaaa

SEQ ID NO: 124383 - DNA, 25 bp, probe
atgttagcaaacgcagctccaactt

SEQ ID NO: 124384 - DNA, 25 bp, probe
atgtctggaaatcacagtaaacctc

SEQ ID NO: 124385 - DNA, 25 bp, probe
atgttggaatccgaagccacttccc

SEQ ID NO: 124386 - DNA, 25 bp, probe
atgctgtgtgactcaaaccaaatca

SEQ ID NO: 124387 - DNA, 25 bp, probe
atgcttgggcagacgagaccacact

SEQ ID NO: 124388 - DNA, 25 bp, probe
atgctgtcgggactgagcaggcaat

SEQ ID NO: 124389 - DNA, 25 bp, probe
atgccttgctgtggatggagagcgt

SEQ ID NO: 124390 - DNA, 25 bp, probe
atccaggcactgaaggaggcgtccg

SEQ ID NO: 124391 - DNA, 25 bp, probe
atccttgcacgtttgatgactgcca

SEQ ID NO: 124392 - DNA, 25 bp, probe
atccatggacaattctatgacctca

SEQ ID NO: 124393 - DNA, 25 bp, probe
atccatggataattgcttcacagcc

SEQ ID NO: 124394 - DNA, 25 bp, probe
atccttgagtttgctcacagtgcct

SEQ ID NO: 124395 - DNA, 25 bp, probe
atccttgggctatgtcagaggcaca

SEQ ID NO: 124396 - DNA, 25 bp, probe
atcctttggctttggaagctgagca

SEQ ID NO: 124397 - DNA, 25 bp, probe
atcctttggctttggaagctgagca

SEQ ID NO: 124398 - DNA, 25 bp, probe
atcctagtcagctttgaacgctgtg

SEQ ID NO: 124399 - DNA, 25 bp, probe
atcctatgtgattttaactctgtct

SEQ ID NO: 124400 - DNA, 25 bp, probe
atcctatgtgattttaactctgtct

SEQ ID NO: 124401 - DNA, 25 bp, probe
atccagtggttgttacattctggta

SEQ ID NO: 124402 - DNA, 25 bp, probe
atgccgagttcttctacaactggta

SEQ ID NO: 124403 - DNA, 25 bp, probe
atccaaattctacctcttcatggtt

SEQ ID NO: 124404 - DNA, 25 bp, probe
atccaaattctacctcttcatggtt

SEQ ID NO: 124405 - DNA, 25 bp, probe
atcctaaatctatcctaaatgttcc

SEQ ID NO: 124406 - DNA, 25 bp, probe
atcctaaatgttcccttgaagtatt

SEQ ID NO: 124407 - DNA, 25 bp, probe
atccaagtatgtctcctgtgtagta

SEQ ID NO: 124408 - DNA, 25 bp, probe
atccaagtatgtctcctgtgtagta

SEQ ID NO: 124409 - DNA, 25 bp, probe
atccagattattcacaccgatagca

SEQ ID NO: 124410 - DNA, 25 bp, probe
atccagtctattcaaggcattgaga

SEQ ID NO: 124411 - DNA, 25 bp, probe
atccattgtttgaggtgcttgcagt

SEQ ID NO: 124412 - DNA, 25 bp, probe
atccattgtttgaggtgcttgcagt

SEQ ID NO: 124413 - DNA, 25 bp, probe
atgcatggttctaaatggtttcagt

SEQ ID NO: 124414 - DNA, 25 bp, probe
atgctgcgttttgtggtaatggatt

SEQ ID NO: 124415 - DNA, 25 bp, probe
atccattaatcagatgcgtaaagac

SEQ ID NO: 124416 - DNA, 25 bp, probe
atccattaatcagatgcgtaaagac

SEQ ID NO: 124417 - DNA, 25 bp, probe
atccatctagaacaccaccagaggc

SEQ ID NO: 124418 - DNA, 25 bp, probe
atccattggaagtcccctgaaaggt

SEQ ID NO: 124419 - DNA, 25 bp, probe
atgccctggagttcctccatgagaa

SEQ ID NO: 124420 - DNA, 25 bp, probe
atgccctggagttcctccatgagaa

SEQ ID NO: 124421 - DNA, 25 bp, probe
atgccctggagttcctccatgagaa

SEQ ID NO: 124422 - DNA, 25 bp, probe
atgctcctgggatacgctatgaact

SEQ ID NO: 124423 - DNA, 25 bp, probe
atgctcctgggatacgctatgaact

SEQ ID NO: 124424 - DNA, 25 bp, probe
atgcctcagtggcaacctcatgaac

SEQ ID NO: 124425 - DNA, 25 bp, probe
atgctcagagagagaatcctgcaga

SEQ ID NO: 124426 - DNA, 25 bp, probe
atgctcagagagagaatcctgcaga

SEQ ID NO: 124427 - DNA, 25 bp, probe
atgccagatggtcacaccgaaggta

SEQ ID NO: 124428 - DNA, 25 bp, probe
atgccagatggtcacaccgaaggta

SEQ ID NO: 124429 - DNA, 25 bp, probe
atgaagtctggcaactcggacgtgt

SEQ ID NO: 124430 - DNA, 25 bp, probe
agacccggcatggtccagacgaagg

SEQ ID NO: 124431 - DNA, 25 bp, probe
agacccggcatggtccagacgaagg

SEQ ID NO: 124432 - DNA, 25 bp, probe
aggcccacttcttctcagaaaagag

SEQ ID NO: 124433 - DNA, 25 bp, probe
aggcccacttcttctcagaaaagag

SEQ ID NO: 124434 - DNA, 25 bp, probe
aggcccacttcttctcagaaaagag

SEQ ID NO: 124435 - DNA, 25 bp, probe
aggcctcatctgctttcaaagcacc

SEQ ID NO: 124436 - DNA, 25 bp, probe
aggcctgattgggtttctagtcctc

SEQ ID NO: 124437 - DNA, 25 bp, probe
atgttctgttggattttggtttgct

SEQ ID NO: 124438 - DNA, 25 bp, probe
atgcccaggtgtcttttgggtctct

SEQ ID NO: 124439 - DNA, 25 bp, probe
atgcctgtgtttattactgggcttc

SEQ ID NO: 124440 - DNA, 25 bp, probe
atcctttcctcaatgtcttcgagtt

SEQ ID NO: 124441 - DNA, 25 bp, probe
atcctttcctcaatgtcttcgagtt

SEQ ID NO: 124442 - DNA, 25 bp, probe
atccttccactgagtccgctgaagg

SEQ ID NO: 124443 - DNA, 25 bp, probe
atgccttacattaaagtccaatatg

SEQ ID NO: 124444 - DNA, 25 bp, probe
atgcctttctgtatagtacacatga

SEQ ID NO: 124445 - DNA, 25 bp, probe
atccatttctgtatgcaatattcac

SEQ ID NO: 124446 - DNA, 25 bp, probe
atccttttcaatctcattgtcactg

SEQ ID NO: 124447 - DNA, 25 bp, probe
atcctttcatagactacactgtccc

SEQ ID NO: 124448 - DNA, 25 bp, probe
atcctatctctttctacatcagatc

SEQ ID NO: 124449 - DNA, 25 bp, probe
atcctatcttgtacaaatgcatgct

SEQ ID NO: 124450 - DNA, 25 bp, probe
atcctatcttgtacaaatgcatgct

SEQ ID NO: 124451 - DNA, 25 bp, probe
atccatgactttgcgcaagcatcac

SEQ ID NO: 124452 - DNA, 25 bp, probe
atccaggcactgactccaagatcat

SEQ ID NO: 124453 - DNA, 25 bp, probe
atgcagagacctacttcaactacaa

SEQ ID NO: 124454 - DNA, 25 bp, probe
atgcagagacctacttcaactacaa

SEQ ID NO: 124455 - DNA, 25 bp, probe
atgctgcagtcctgcagtcacctat

SEQ ID NO: 124456 - DNA, 25 bp, probe
atccagcatcccaagatcattctac

SEQ ID NO: 124457 - DNA, 25 bp, probe
atccatgtgcccaggattatattag

SEQ ID NO: 124458 - DNA, 25 bp, probe
atccattcaatcatttattcattgg

SEQ ID NO: 124459 - DNA, 25 bp, probe
atccattcaatcatttattcattgg

SEQ ID NO: 124460 - DNA, 25 bp, probe
atccatatcatagttgctttcttta

SEQ ID NO: 124461 - DNA, 25 bp, probe
atccatctcacagggttattgtgaa

SEQ ID NO: 124462 - DNA, 25 bp, probe
atgccacaaagcggttaggctgtga

SEQ ID NO: 124463 - DNA, 25 bp, probe
atgctccagcaaggagttcaagcgc

SEQ ID NO: 124464 - DNA, 25 bp, probe
atgctcagggcccacattaaggaaa

SEQ ID NO: 124465 - DNA, 25 bp, probe
atgctgaggtcccactcgggaaagg

SEQ ID NO: 124466 - DNA, 25 bp, probe
atgctgaggtcccactcgggaaagg

SEQ ID NO: 124467 - DNA, 25 bp, probe
atgctgtggttggatcaaggactca

SEQ ID NO: 124468 - DNA, 25 bp, probe
atgctgtggttgtgctcaatgtctc

SEQ ID NO: 124469 - DNA, 25 bp, probe
atgcagtttatgtgtcatcaatgta

SEQ ID NO: 124470 - DNA, 25 bp, probe
atgcagttattccactaaatgatga

SEQ ID NO: 124471 - DNA, 25 bp, probe
atgcagttattccactaaatgatga

SEQ ID NO: 124472 - DNA, 25 bp, probe
atgcagtggtgatgcctaaaggaat

SEQ ID NO: 124473 - DNA, 25 bp, probe
atgtgcaagctgtgcctacaactaa

SEQ ID NO: 124474 - DNA, 25 bp, probe
atgctgtaggctgcctgcgacagat

SEQ ID NO: 124475 - DNA, 25 bp, probe
atgctgtggccagccaggcaggaag

SEQ ID NO: 124476 - DNA, 25 bp, probe
atgccttccagctcatggatgagca

SEQ ID NO: 124477 - DNA, 25 bp, probe
atgccttcactgtagctattggggc

SEQ ID NO: 124478 - DNA, 25 bp, probe
atgcgtgccccaaggatgagggggt

SEQ ID NO: 124479 - DNA, 25 bp, probe
atgcgtgccccaaggatgagggggt

SEQ ID NO: 124480 - DNA, 25 bp, probe
atgctgtccccaacagctggggtgg

SEQ ID NO: 124481 - DNA, 25 bp, probe
atgctgtttacaacctgtacgctgt

SEQ ID NO: 124482 - DNA, 25 bp, probe
atgcgttgagacatttgtacgtgct

SEQ ID NO: 124483 - DNA, 25 bp, probe
atgcgttgagacatttgtacgtgct

SEQ ID NO: 124484 - DNA, 25 bp, probe
atgctgtatgtttgttttacagatc

SEQ ID NO: 124485 - DNA, 25 bp, probe
atgctggtttttctctgagcacaaa

SEQ ID NO: 124486 - DNA, 25 bp, probe
atgccgttatttcatgtgactccag

SEQ ID NO: 124487 - DNA, 25 bp, probe
atgccgttatttcatgtgactccag

SEQ ID NO: 124488 - DNA, 25 bp, probe
atgccgaccaggagatctacttcat

SEQ ID NO: 124489 - DNA, 25 bp, probe
atgccaggcaaggtgaaccctactc

SEQ ID NO: 124490 - DNA, 25 bp, probe
atccaggggatgaagagcacccacc

SEQ ID NO: 124491 - DNA, 25 bp, probe
atgccaaggggaagagcgacacctc

SEQ ID NO: 124492 - DNA, 25 bp, probe
atgccacagcagcgtcagatgctaa

SEQ ID NO: 124493 - DNA, 25 bp, probe
atgcccatgaatcacatggctcagc

SEQ ID NO: 124494 - DNA, 25 bp, probe
atgcagtgcaaacacaggtcaccca

SEQ ID NO: 124495 - DNA, 25 bp, probe
atgcaggaacatcgcaaggtgccct

SEQ ID NO: 124496 - DNA, 25 bp, probe
atgcaagactctcaaggagtacttt

SEQ ID NO: 124497 - DNA, 25 bp, probe
atgccaactctgtaaaacacactta

SEQ ID NO: 124498 - DNA, 25 bp, probe
atgctcccttgaagccatagaattt

SEQ ID NO: 124499 - DNA, 25 bp, probe
atgctcctggtgacatgggacacaa

SEQ ID NO: 124500 - DNA, 25 bp, probe
atgctgccagtgacctgctggcaca

SEQ ID NO: 124501 - DNA, 25 bp, probe
atgcctgcattcatatttgcacagg

SEQ ID NO: 124502 - DNA, 25 bp, probe
atgccttcatgaatctttcatacat

SEQ ID NO: 124503 - DNA, 25 bp, probe
atgcccctgattttatcattctgct

SEQ ID NO: 124504 - DNA, 25 bp, probe
atccatcttttccatgatgcttcca

SEQ ID NO: 124505 - DNA, 25 bp, probe
atccagctgttgtacagtgcctgct

SEQ ID NO: 124506 - DNA, 25 bp, probe
atccagtttcagttgtcctgtcatc

SEQ ID NO: 124507 - DNA, 25 bp, probe
atgaacatttcggttcttgtcctcc

SEQ ID NO: 124508 - DNA, 25 bp, probe
atgaaatcgtcgcttcttgaagacc

SEQ ID NO: 124509 - DNA, 25 bp, probe
gtcaagctggttgtccactaaaccc

SEQ ID NO: 124510 - DNA, 25 bp, probe
ttcaagctggaaagggcctaaaggc

SEQ ID NO: 124511 - DNA, 25 bp, probe
atgacagtgtacagaggcctcaaac

SEQ ID NO: 124512 - DNA, 25 bp, probe
atgatagttgccaagatgccccaag

SEQ ID NO: 124513 - DNA, 25 bp, probe
atgatagttgccaagatgccccaag

SEQ ID NO: 124514 - DNA, 25 bp, probe
atgatagcttggattccctaggtct

SEQ ID NO: 124515 - DNA, 25 bp, probe
atgaagcatctatgttcccaagagt

SEQ ID NO: 124516 - DNA, 25 bp, probe
atgcaaaaacgattccgaaacataa

SEQ ID NO: 124517 - DNA, 25 bp, probe
atgagaaacgtgtttagtatcaaaa

SEQ ID NO: 124518 - DNA, 25 bp, probe
aggaacgctggatccattccaaata

SEQ ID NO: 124519 - DNA, 25 bp, probe
atgtacgactggtcacagtcccaag

SEQ ID NO: 124520 - DNA, 25 bp, probe
atgtagctacgagatggtaccgagc

SEQ ID NO: 124521 - DNA, 25 bp, probe
atgctccccgaggtgggagcggcgt

SEQ ID NO: 124522 - DNA, 25 bp, probe
atgctcacatccaagctgtgcttag

SEQ ID NO: 124523 - DNA, 25 bp, probe
atgctcactcaggcatgctggtatt

SEQ ID NO: 124524 - DNA, 25 bp, probe
atgctcatctgagtgacggatatgt

SEQ ID NO: 124525 - DNA, 25 bp, probe
atccagctgctttctcgaatggaat

SEQ ID NO: 124526 - DNA, 25 bp, probe
atgcgagcactacctcagaatgacg

SEQ ID NO: 124527 - DNA, 25 bp, probe
atgcggccgagatcaataacatggc

SEQ ID NO: 124528 - DNA, 25 bp, probe
atgcagggacaatccatcagaaaga

SEQ ID NO: 124529 - DNA, 25 bp, probe
atgcctggtcagaactacagaacca

SEQ ID NO: 124530 - DNA, 25 bp, probe
atgcctttagaataccgcaccataa

SEQ ID NO: 124531 - DNA, 25 bp, probe
atgcctttgattttattcgcaccat

SEQ ID NO: 124532 - DNA, 25 bp, probe
atccatctcttgaactttatactct

SEQ ID NO: 124533 - DNA, 25 bp, probe
atccaattgtgttgccatatacatt

SEQ ID NO: 124534 - DNA, 25 bp, probe
atgccataattgatcctaatcatga

SEQ ID NO: 124535 - DNA, 25 bp, probe
atgccagaactgaaagctaaattac

SEQ ID NO: 124536 - DNA, 25 bp, probe
atccagaggctagcagttcaacttc

SEQ ID NO: 124537 - DNA, 25 bp, probe
atccagagtccagcaggtcagagca

SEQ ID NO: 124538 - DNA, 25 bp, probe
atccatactggaacagcgataacgt

SEQ ID NO: 124539 - DNA, 25 bp, probe
atgccaactggaataataaagctga

SEQ ID NO: 124540 - DNA, 25 bp, probe
atgcagaacttactcttggaagaag

SEQ ID NO: 124541 - DNA, 25 bp, probe
atgaggacattcgtccggaaaaggg

SEQ ID NO: 124542 - DNA, 25 bp, probe
atgacgtctatcctccagagaacga

SEQ ID NO: 124543 - DNA, 25 bp, probe
atgattgtttacgcagaaattctac

SEQ ID NO: 124544 - DNA, 25 bp, probe
atgagttttatccaagaccttacaa

SEQ ID NO: 124545 - DNA, 25 bp, probe
atgcgttatggaattgaatccattt

SEQ ID NO: 124546 - DNA, 25 bp, probe
atgcggtttccaaggtgcacatttt

SEQ ID NO: 124547 - DNA, 25 bp, probe
atgcaggggtgtgaggcccagggtg

SEQ ID NO: 124548 - DNA, 25 bp, probe
atgcagtggagtgtggtggccagtg

SEQ ID NO: 124549 - DNA, 25 bp, probe
atgatgatgaagtttgcggagaagg

SEQ ID NO: 124550 - DNA, 25 bp, probe
atgagtcatacgggaggcgagtggt

SEQ ID NO: 124551 - DNA, 25 bp, probe
atgagaatggcgtgggctacgtgct

SEQ ID NO: 124552 - DNA, 25 bp, probe
atgcagcaatggtaagcgtaaagtt

SEQ ID NO: 124553 - DNA, 25 bp, probe
atgctgctgtctccacggtaaagga

SEQ ID NO: 124554 - DNA, 25 bp, probe
atgcttggcttctgtgtatctaggt

SEQ ID NO: 124555 - DNA, 25 bp, probe
atgcttggcttctgtgtatctaggt

SEQ ID NO: 124556 - DNA, 25 bp, probe
atgcttccatttgtaatcaagttat

SEQ ID NO: 124557 - DNA, 25 bp, probe
atgcttcaagtcactaatcacctga

SEQ ID NO: 124558 - DNA, 25 bp, probe
atgcttcaagtcactaatcacctga

SEQ ID NO: 124559 - DNA, 25 bp, probe
atgcttcaagtaagttattccgtat

SEQ ID NO: 124560 - DNA, 25 bp, probe
atgccaaggtgaagcttatcccact

SEQ ID NO: 124561 - DNA, 25 bp, probe
atgcccaggagaacttcaagtcctt

SEQ ID NO: 124562 - DNA, 25 bp, probe
atccaccgagatatcaaagctgcca

SEQ ID NO: 124563 - DNA, 25 bp, probe
atccaccgagatatcaaagctgcca

SEQ ID NO: 124564 - DNA, 25 bp, probe
atgccccaggctatgacaaagtcaa

SEQ ID NO: 124565 - DNA, 25 bp, probe
atgccttcttgtctgacaacttcaa

SEQ ID NO: 124566 - DNA, 25 bp, probe
atgccctttggactgtcaggtccaa

SEQ ID NO: 124567 - DNA, 25 bp, probe
atgcccgttggtctatgattgacaa

SEQ ID NO: 124568 - DNA, 25 bp, probe
atgcccgtatgtgcgtgcatgtgta

SEQ ID NO: 124569 - DNA, 25 bp, probe
atccatgcagtagaggcgctgggca

SEQ ID NO: 124570 - DNA, 25 bp, probe
atgccagaaacaaggctcggtcacc

SEQ ID NO: 124571 - DNA, 25 bp, probe
atgacatacagacaggggttcccct

SEQ ID NO: 124572 - DNA, 25 bp, probe
atgcctcacagacagtaggatccca

SEQ ID NO: 124573 - DNA, 25 bp, probe
atgcctcacagacagtaggatccca

SEQ ID NO: 124574 - DNA, 25 bp, probe
atgcctccagaagtgttggacgaga

SEQ ID NO: 124575 - DNA, 25 bp, probe
atgccatcaatgaggtgttagaagc

SEQ ID NO: 124576 - DNA, 25 bp, probe
atgccatccagcaagacttcgtgat

SEQ ID NO: 124577 - DNA, 25 bp, probe
atgccatccagcaagacttcgtgat

SEQ ID NO: 124578 - DNA, 25 bp, probe
atgcttccagctagagcttcggggg

SEQ ID NO: 124579 - DNA, 25 bp, probe
atgcttcatcgtcggtccgggctgc

SEQ ID NO: 124580 - DNA, 25 bp, probe
atgcttcaggcatggtgccggcctg

SEQ ID NO: 124581 - DNA, 25 bp, probe
atgcctctgatatgggactgagcct

SEQ ID NO: 124582 - DNA, 25 bp, probe
atgcgggatgtacgacattttgtga

SEQ ID NO: 124583 - DNA, 25 bp, probe
atgctaagcatgagcgatattttta

SEQ ID NO: 124584 - DNA, 25 bp, probe
atgctaagcatgagcgatattttta

SEQ ID NO: 124585 - DNA, 25 bp, probe
atgctaagcatgagcgatattttta

SEQ ID NO: 124586 - DNA, 25 bp, probe
atgcatcaacttccgcaagttctcc

SEQ ID NO: 124587 - DNA, 25 bp, probe
atgctgcccttgggaagctcattgc

SEQ ID NO: 124588 - DNA, 25 bp, probe
atccactcctgaacaactcattgaa

SEQ ID NO: 124589 - DNA, 25 bp, probe
atccagctcctggcgataatgtgtg

SEQ ID NO: 124590 - DNA, 25 bp, probe
atgccagcatccttggatcagtact

SEQ ID NO: 124591 - DNA, 25 bp, probe
atgccaacacgctgctgcagctagg

SEQ ID NO: 124592 - DNA, 25 bp, probe
atgccaacacgctgctgcagctagg

SEQ ID NO: 124593 - DNA, 25 bp, probe
atccagacattgttgctgagacagc

SEQ ID NO: 124594 - DNA, 25 bp, probe
atccaccatgtcttgcaatgagcac

SEQ ID NO: 124595 - DNA, 25 bp, probe
atgccccaatgcttctatatgctaa

SEQ ID NO: 124596 - DNA, 25 bp, probe
atgccatagcattttccagagctaa

SEQ ID NO: 124597 - DNA, 25 bp, probe
atgccaagctgatttgtagctcgta

SEQ ID NO: 124598 - DNA, 25 bp, probe
atccaatgcttctgcatactgtgtt

SEQ ID NO: 124599 - DNA, 25 bp, probe
atccagatgttatgctcctgctgat

SEQ ID NO: 124600 - DNA, 25 bp, probe
atgccagaatctatgtggtgctgaa

SEQ ID NO: 124601 - DNA, 25 bp, probe
atccagatgatcgtggtggatgggg

SEQ ID NO: 124602 - DNA, 25 bp, probe
atgctagagctaatgggagatgtgg

SEQ ID NO: 124603 - DNA, 25 bp, probe
atgctgagcggctgggcaggaggga

SEQ ID NO: 124604 - DNA, 25 bp, probe
atgctgaccagccagggggctgagt

SEQ ID NO: 124605 - DNA, 25 bp, probe
atgctgtgtcctcgtggggaggtgc

SEQ ID NO: 124606 - DNA, 25 bp, probe
atgccatggcctgtggatggagaat

SEQ ID NO: 124607 - DNA, 25 bp, probe
atgccgagcctgtggagtgaactgc

SEQ ID NO: 124608 - DNA, 25 bp, probe
atgatgggcctgtgaaggtagtggt

SEQ ID NO: 124609 - DNA, 25 bp, probe
atgatcgcccgataaagacggattc

SEQ ID NO: 124610 - DNA, 25 bp, probe
agtccacttaaataatcctctatgt

SEQ ID NO: 124611 - DNA, 25 bp, probe
agtccaaacacctcaatgtccaaat

SEQ ID NO: 124612 - DNA, 25 bp, probe
atgttattaaccacaatgacgacct

SEQ ID NO: 124613 - DNA, 25 bp, probe
atgtgtttacaccacaaaaaactct

SEQ ID NO: 124614 - DNA, 25 bp, probe
atgccacttaccccattaaagcagt

SEQ ID NO: 124615 - DNA, 25 bp, probe
atgccactatccaaagcaaaaactg

SEQ ID NO: 124616 - DNA, 25 bp, probe
atgccactatccaaagcaaaaactg

SEQ ID NO: 124617 - DNA, 25 bp, probe
atgcacacatcaagagaaagttacc

SEQ ID NO: 124618 - DNA, 25 bp, probe
atgcccatcagatccagatgttaca

SEQ ID NO: 124619 - DNA, 25 bp, probe
atgccctggacctaagtgacatcaa

SEQ ID NO: 124620 - DNA, 25 bp, probe
atgccagctgtggctccgaggaaaa

SEQ ID NO: 124621 - DNA, 25 bp, probe
atgccactggatgggatgtggaaca

SEQ ID NO: 124622 - DNA, 25 bp, probe
atgcctatatgtgtattgtatactt

SEQ ID NO: 124623 - DNA, 25 bp, probe
atgccaaatatgccaaggtgaagct

SEQ ID NO: 124624 - DNA, 25 bp, probe
atgccaacataaatatggcgattgt

SEQ ID NO: 124625 - DNA, 25 bp, probe
atgccaactagtagaaccttctttc

SEQ ID NO: 124626 - DNA, 25 bp, probe
atgcaaaccaaatcttctctgtttc

SEQ ID NO: 124627 - DNA, 25 bp, probe
atgaaacaaggatcttccgagtgct

SEQ ID NO: 124628 - DNA, 25 bp, probe
aggaagtaggacttgtagtagagct

SEQ ID NO: 124629 - DNA, 25 bp, probe
atgaaatgtaggttctatactagaa

SEQ ID NO: 124630 - DNA, 25 bp, probe
atgaaatgtaggttctatactagaa

SEQ ID NO: 124631 - DNA, 25 bp, probe
atgaaactcaggtacaaactcgact

SEQ ID NO: 124632 - DNA, 25 bp, probe
atgatgcgctgctggaaaaaccgtc

SEQ ID NO: 124633 - DNA, 25 bp, probe
atgcatgcccacagcaaagacacca

SEQ ID NO: 124634 - DNA, 25 bp, probe
atgccctgcagagcaataacactat

SEQ ID NO: 124635 - DNA, 25 bp, probe
atgcctcagagacaagtatagttac

SEQ ID NO: 124636 - DNA, 25 bp, probe
atgccaaagacatcgctgaaattga

SEQ ID NO: 124637 - DNA, 25 bp, probe
atgccaaagacatcgctgaaattga

SEQ ID NO: 124638 - DNA, 25 bp, probe
atgctgataaactgacataatatta

SEQ ID NO: 124639 - DNA, 25 bp, probe
atgcttatagcttgtgacattatgt

SEQ ID NO: 124640 - DNA, 25 bp, probe
atgcttatagcttgtgacattatgt

SEQ ID NO: 124641 - DNA, 25 bp, probe
atgcttgacagctttgaaactgata

SEQ ID NO: 124642 - DNA, 25 bp, probe
atgccttagcatgtgactcctgaag

SEQ ID NO: 124643 - DNA, 25 bp, probe
atgacatttcagccgactactggtc

SEQ ID NO: 124644 - DNA, 25 bp, probe
atgaatcctggggttgactgtgtcc

SEQ ID NO: 124645 - DNA, 25 bp, probe
atgacctctggggaccaagttcagt

SEQ ID NO: 124646 - DNA, 25 bp, probe
aggctttgtgggccctagtagtctt

SEQ ID NO: 124647 - DNA, 25 bp, probe
aggcttccaggagcacgagggcctt

SEQ ID NO: 124648 - DNA, 25 bp, probe
atgcgtgttaggaacaaggtgcacc

SEQ ID NO: 124649 - DNA, 25 bp, probe
atgctctaaaagaatatggcgtcat

SEQ ID NO: 124650 - DNA, 25 bp, probe
atgctgctacaaaatctggggtaca

SEQ ID NO: 124651 - DNA, 25 bp, probe
atgctgctacaaaatctggggtaca

SEQ ID NO: 124652 - DNA, 25 bp, probe
atgcgcattctaacctggaggtcaa

SEQ ID NO: 124653 - DNA, 25 bp, probe
atgacatctctagtacttcggatca

SEQ ID NO: 124654 - DNA, 25 bp, probe
atgaacagttcatcaatgcggccaa

SEQ ID NO: 124655 - DNA, 25 bp, probe
atgacattgttcttacacggcacaa

SEQ ID NO: 124656 - DNA, 25 bp, probe
atgaatactacactgaactgggaat

SEQ ID NO: 124657 - DNA, 25 bp, probe
atgcgatttgacagaagcggaactc

SEQ ID NO: 124658 - DNA, 25 bp, probe
atgctgactctatgagatggggaac

SEQ ID NO: 124659 - DNA, 25 bp, probe
atgcggctgcactggtggaagaagc

SEQ ID NO: 124660 - DNA, 25 bp, probe
atgcccatcaaacgtggacaagcag

SEQ ID NO: 124661 - DNA, 25 bp, probe
atgcaccctccaggggacaactgag

SEQ ID NO: 124662 - DNA, 25 bp, probe
atgcaccctccaggggacaactgag

SEQ ID NO: 124663 - DNA, 25 bp, probe
atgcaacgtcctgaggacagttctg

SEQ ID NO: 124664 - DNA, 25 bp, probe
atgaaagccctcggtgagcgtgtca

SEQ ID NO: 124665 - DNA, 25 bp, probe
atgagtgcgacctgcctgaaatgtg

SEQ ID NO: 124666 - DNA, 25 bp, probe
atgaaggaaccgacaatcaagtttt

SEQ ID NO: 124667 - DNA, 25 bp, probe
atgcaagagaaattccaaccgtcct

SEQ ID NO: 124668 - DNA, 25 bp, probe
atgcaagagaaattccaaccgtcct

SEQ ID NO: 124669 - DNA, 25 bp, probe
atgaaggaaaagccatagcaggagt

SEQ ID NO: 124670 - DNA, 25 bp, probe
atgaaggagggaggcgggactgggg

SEQ ID NO: 124671 - DNA, 25 bp, probe
atgaaggagggaggcgggactgggg

SEQ ID NO: 124672 - DNA, 25 bp, probe
atgaaggaatagcccgaggaccggg

SEQ ID NO: 124673 - DNA, 25 bp, probe
atgaaaaaggttggtgtcaccgtgg

SEQ ID NO: 124674 - DNA, 25 bp, probe
atgaaaagagtgatggttcctgggg

SEQ ID NO: 124675 - DNA, 25 bp, probe
atgagaaagccttcttttggggtca

SEQ ID NO: 124676 - DNA, 25 bp, probe
atgagaaagccttcttttggggtca

SEQ ID NO: 124677 - DNA, 25 bp, probe
atgaaaatattgcctgttttgggat

SEQ ID NO: 124678 - DNA, 25 bp, probe
atgaacaaattcctgcttgtccggc

SEQ ID NO: 124679 - DNA, 25 bp, probe
atgctgatccaaatgttgcttgtag

SEQ ID NO: 124680 - DNA, 25 bp, probe
atgctgatccaaatgttgcttgtag

SEQ ID NO: 124681 - DNA, 25 bp, probe
atgcgacgtcatagctcttctatag

SEQ ID NO: 124682 - DNA, 25 bp, probe
atgaattgtcacatctatccacact

SEQ ID NO: 124683 - DNA, 25 bp, probe
atgaagtcaaactgtgccacacatg

SEQ ID NO: 124684 - DNA, 25 bp, probe
atgaaacagacgttgtccctcagga

SEQ ID NO: 124685 - DNA, 25 bp, probe
atgtccaaccaagatatcccaggac

SEQ ID NO: 124686 - DNA, 25 bp, probe
atgtctcaaccggcagatccggggg

SEQ ID NO: 124687 - DNA, 25 bp, probe
atgccgcagaccattatctggcggg

SEQ ID NO: 124688 - DNA, 25 bp, probe
atgccagcgacacctggatgttcgg

SEQ ID NO: 124689 - DNA, 25 bp, probe
atgccctgggcaatgagatggtctg

SEQ ID NO: 124690 - DNA, 25 bp, probe
atgcagcacatgtttatgaagttct

SEQ ID NO: 124691 - DNA, 25 bp, probe
atgccaatgcaaacattatttctga

SEQ ID NO: 124692 - DNA, 25 bp, probe
atgccaccaaatatattctctgctc

SEQ ID NO: 124693 - DNA, 25 bp, probe
atgccagcacaattgaaattcacac

SEQ ID NO: 124694 - DNA, 25 bp, probe
atgccaaaaatgtcaggctcaccta

SEQ ID NO: 124695 - DNA, 25 bp, probe
atgccataaagaggatcgaccagtc

SEQ ID NO: 124696 - DNA, 25 bp, probe
atgccaaacatgttgtcacacacac

SEQ ID NO: 124697 - DNA, 25 bp, probe
atgccaaacatgttgtcacacacac

SEQ ID NO: 124698 - DNA, 25 bp, probe
atgccaattcatctcagcaatcaca

SEQ ID NO: 124699 - DNA, 25 bp, probe
atgcgatgtgtccaatcggagacaa

SEQ ID NO: 124700 - DNA, 25 bp, probe
atgcgattacgcttcagagatacca

SEQ ID NO: 124701 - DNA, 25 bp, probe
atgcgctgtacggtagtgcaaccct

SEQ ID NO: 124702 - DNA, 25 bp, probe
atgcgctagccaggtagagagacac

SEQ ID NO: 124703 - DNA, 25 bp, probe
atgcgaaggacgcgcaaatgcagca

SEQ ID NO: 124704 - DNA, 25 bp, probe
atgctgacagcagccggaagctggc

SEQ ID NO: 124705 - DNA, 25 bp, probe
atgctgagcgaagctataggctctt

SEQ ID NO: 124706 - DNA, 25 bp, probe
atgctgcagagctgtgttgcggctt

SEQ ID NO: 124707 - DNA, 25 bp, probe
atgctgcagagctgtgttgcggctt

SEQ ID NO: 124708 - DNA, 25 bp, probe
atgccacatgccgtgttaagcattt

SEQ ID NO: 124709 - DNA, 25 bp, probe
atgccattgatcattttagctgtga

SEQ ID NO: 124710 - DNA, 25 bp, probe
atgccattgatcattttagctgtga

SEQ ID NO: 124711 - DNA, 25 bp, probe
atgccagagacggaattagctgtga

SEQ ID NO: 124712 - DNA, 25 bp, probe
atgccagagacggaattagctgtga

SEQ ID NO: 124713 - DNA, 25 bp, probe
atgcgcgaggcgcagatcatgcacc

SEQ ID NO: 124714 - DNA, 25 bp, probe
atgcgctcagtgccatgcgttcgct

SEQ ID NO: 124715 - DNA, 25 bp, probe
atgcagcttgatgtggtcttgggtg

SEQ ID NO: 124716 - DNA, 25 bp, probe
atgacaaattggggctgtcgggggc

SEQ ID NO: 124717 - DNA, 25 bp, probe
agatagagttgcagggaaggggggg

SEQ ID NO: 124718 - DNA, 25 bp, probe
atgaaggttcttctcaagggtgcga

SEQ ID NO: 124719 - DNA, 25 bp, probe
atgagggttttgcacctggacctca

SEQ ID NO: 124720 - DNA, 25 bp, probe
agaaggcctttgctgcctgaaagtc

SEQ ID NO: 124721 - DNA, 25 bp, probe
agaaggcctttgctgcctgaaagtc

SEQ ID NO: 124722 - DNA, 25 bp, probe
aaaacgttaccagcagctgaaacca

SEQ ID NO: 124723 - DNA, 25 bp, probe
atgaagaggtgttccaggtgcgaaa

SEQ ID NO: 124724 - DNA, 25 bp, probe
atgactgttcttgcgggggataaaa

SEQ ID NO: 124725 - DNA, 25 bp, probe
agaaactttcgctggatggttttag

SEQ ID NO: 124726 - DNA, 25 bp, probe
atgaacctttcctagggctgtggag

SEQ ID NO: 124727 - DNA, 25 bp, probe
atgccacgactattcttggacttgg

SEQ ID NO: 124728 - DNA, 25 bp, probe
atgccaggaatattgtcatcctttg

SEQ ID NO: 124729 - DNA, 25 bp, probe
atgccaaatatgtctccctgcatgt

SEQ ID NO: 124730 - DNA, 25 bp, probe
atgcccaaagatgcagccggtattt

SEQ ID NO: 124731 - DNA, 25 bp, probe
atgacgcaaagatcaccagccatgt

SEQ ID NO: 124732 - DNA, 25 bp, probe
atgcaggaagagtagcactcactga

SEQ ID NO: 124733 - DNA, 25 bp, probe
atgcaggaggagttctcgcgtgatg

SEQ ID NO: 124734 - DNA, 25 bp, probe
atgcaggagtcgtgcatcgcgtgat

SEQ ID NO: 124735 - DNA, 25 bp, probe
atgacgagttcggacgggattcgag

SEQ ID NO: 124736 - DNA, 25 bp, probe
atgaagaaactccaagggtttgagt

SEQ ID NO: 124737 - DNA, 25 bp, probe
atgaaaatcaccgagggcgacctgt

SEQ ID NO: 124738 - DNA, 25 bp, probe
atgctcaaacaccagggttaccttg

SEQ ID NO: 124739 - DNA, 25 bp, probe
atgagccccaaattggttactgtat

SEQ ID NO: 124740 - DNA, 25 bp, probe
atgcagtgccaagttgggttccttc

SEQ ID NO: 124741 - DNA, 25 bp, probe
atgcaggaacatatgggaaccaacg

SEQ ID NO: 124742 - DNA, 25 bp, probe
atgcaagatacaatggaggagaaca

SEQ ID NO: 124743 - DNA, 25 bp, probe
atgcctgcagagagtatagaataca

SEQ ID NO: 124744 - DNA, 25 bp, probe
atgccatgaagcagtacgaatgcag

SEQ ID NO: 124745 - DNA, 25 bp, probe
atgccatcgagcaggactaccggct

SEQ ID NO: 124746 - DNA, 25 bp, probe
atgccaccatgcatggaaatcgtgc

SEQ ID NO: 124747 - DNA, 25 bp, probe
atgcgctgtcagataaacatggctg

SEQ ID NO: 124748 - DNA, 25 bp, probe
atgctgctgtggttagaagcagatt

SEQ ID NO: 124749 - DNA, 25 bp, probe
atgcgcgttgactacgagcagatca

SEQ ID NO: 124750 - DNA, 25 bp, probe
atgccagtagtgtaagcagcttagt

SEQ ID NO: 124751 - DNA, 25 bp, probe
atgctcggattcaagcagctgcttc

SEQ ID NO: 124752 - DNA, 25 bp, probe
atgctcggattcaagcagctgcttc

SEQ ID NO: 124753 - DNA, 25 bp, probe
atgctcggattcaagcagctgcttc

SEQ ID NO: 124754 - DNA, 25 bp, probe
atgctgcgctgaacagagacttccg

SEQ ID NO: 124755 - DNA, 25 bp, probe
atgctgctgctcttcgcaagctgac

SEQ ID NO: 124756 - DNA, 25 bp, probe
atgatgcatgtcttcattctgcaga

SEQ ID NO: 124757 - DNA, 25 bp, probe
atgcagcagctattgcacttcagcc

SEQ ID NO: 124758 - DNA, 25 bp, probe
atgcggtactgaggtgcagacaagg

SEQ ID NO: 124759 - DNA, 25 bp, probe
atgcggaggcctgtgcagggacagc

SEQ ID NO: 124760 - DNA, 25 bp, probe
atgcggaggcctgtgcagggacagc

SEQ ID NO: 124761 - DNA, 25 bp, probe
atgcaagggactgtgtgttgccaca

SEQ ID NO: 124762 - DNA, 25 bp, probe
atgccagggacattttcaagacaca

SEQ ID NO: 124763 - DNA, 25 bp, probe
atgacctagacatttccagaatcaa

SEQ ID NO: 124764 - DNA, 25 bp, probe
atgcctgttaatattcatgttctga

SEQ ID NO: 124765 - DNA, 25 bp, probe
atgcctgttaatattcatgttctga

SEQ ID NO: 124766 - DNA, 25 bp, probe
atgcctgttaaatggatcgccatag

SEQ ID NO: 124767 - DNA, 25 bp, probe
atgccattgctgaaatccgacgact

SEQ ID NO: 124768 - DNA, 25 bp, probe
atgccattgctgaaatccgacgact

SEQ ID NO: 124769 - DNA, 25 bp, probe
atgcctcagctggatggacaacgcc

SEQ ID NO: 124770 - DNA, 25 bp, probe
atgaccaggcggggagacagcccct

SEQ ID NO: 124771 - DNA, 25 bp, probe
atgaccagaactggaaacggcccct

SEQ ID NO: 124772 - DNA, 25 bp, probe
atgcagccaaaataccatctggcca

SEQ ID NO: 124773 - DNA, 25 bp, probe
atgccctgataaagaacatctgtcc

SEQ ID NO: 124774 - DNA, 25 bp, probe
atgccaggatggtgacacacatatt

SEQ ID NO: 124775 - DNA, 25 bp, probe
atgcagagtattttgatcttcaatt

SEQ ID NO: 124776 - DNA, 25 bp, probe
atgcatctgtttattctatagttat

SEQ ID NO: 124777 - DNA, 25 bp, probe
atgcatctgtttattctatagttat

SEQ ID NO: 124778 - DNA, 25 bp, probe
atgcctggctgatgtttatatgttt

SEQ ID NO: 124779 - DNA, 25 bp, probe
atgctccctgaagtcttacagctct

SEQ ID NO: 124780 - DNA, 25 bp, probe
atgctcacttgaggtgctttatgtg

SEQ ID NO: 124781 - DNA, 25 bp, probe
atgctccttgaccacattttgggaa

SEQ ID NO: 124782 - DNA, 25 bp, probe
atgctccaggttcaattttctgaga

SEQ ID NO: 124783 - DNA, 25 bp, probe
atgccgggatcaaagtctgttctgg

SEQ ID NO: 124784 - DNA, 25 bp, probe
atgctcgcaggttagagttgggtgt

SEQ ID NO: 124785 - DNA, 25 bp, probe
atgccgccgatatgatggctgggag

SEQ ID NO: 124786 - DNA, 25 bp, probe
atgccctgcaaagaggctgattgag

SEQ ID NO: 124787 - DNA, 25 bp, probe
atgcctcgaacttcagtgtgatcgg

SEQ ID NO: 124788 - DNA, 25 bp, probe
atgcctcgaacttcagtgtgatcgg

SEQ ID NO: 124789 - DNA, 25 bp, probe
atgccttacctggacatgtatcaga

SEQ ID NO: 124790 - DNA, 25 bp, probe
atgccgttaagccatcagttcagga

SEQ ID NO: 124791 - DNA, 25 bp, probe
atgccgttaagccatcagttcagga

SEQ ID NO: 124792 - DNA, 25 bp, probe
atgcagccttaaacagtgtccagga

SEQ ID NO: 124793 - DNA, 25 bp, probe
atgcagccttaaacagtgtccagga

SEQ ID NO: 124794 - DNA, 25 bp, probe
atgccattgtcaaaagatttctgga

SEQ ID NO: 124795 - DNA, 25 bp, probe
atgctcatttaatagatattcactg

SEQ ID NO: 124796 - DNA, 25 bp, probe
atgctttataaatttgttcaaaggg

SEQ ID NO: 124797 - DNA, 25 bp, probe
atgcttgttgaatcaggggcaaacg

SEQ ID NO: 124798 - DNA, 25 bp, probe
atgctgtgtctactaactgggaaag

SEQ ID NO: 124799 - DNA, 25 bp, probe
atgctgtgtctactaactgggaaag

SEQ ID NO: 124800 - DNA, 25 bp, probe
atgcgtgttaggaacgtcaaagaaa

SEQ ID NO: 124801 - DNA, 25 bp, probe
atgctgttctaactacagtgctcaa

SEQ ID NO: 124802 - DNA, 25 bp, probe
atgccttctagattcactgtctttt

SEQ ID NO: 124803 - DNA, 25 bp, probe
atgcctttcgattcatctacatttc

SEQ ID NO: 124804 - DNA, 25 bp, probe
atgcctttcgattcatctacatttc

SEQ ID NO: 124805 - DNA, 25 bp, probe
acctgggcagatacatcccattcct

SEQ ID NO: 124806 - DNA, 25 bp, probe
atgcctgtgggtcaacgtgtcagct

SEQ ID NO: 124807 - DNA, 25 bp, probe
atgcctggagggatgtctggctgca

SEQ ID NO: 124808 - DNA, 25 bp, probe
atgaaggaggagattatggtttcag

SEQ ID NO: 124809 - DNA, 25 bp, probe
atgaaggggctgaggatgactattg

SEQ ID NO: 124810 - DNA, 25 bp, probe
atgagggcccaatgtatgatctatt

SEQ ID NO: 124811 - DNA, 25 bp, probe
atgagggctcaagtcgcaatgtatc

SEQ ID NO: 124812 - DNA, 25 bp, probe
atgagggctcaagtcgcaatgtatc

SEQ ID NO: 124813 - DNA, 25 bp, probe
atgagggctcaagtcgcaatgtatc

SEQ ID NO: 124814 - DNA, 25 bp, probe
atgctgtggacaggcaccaatttct

SEQ ID NO: 124815 - DNA, 25 bp, probe
atgctgtggacaggcaccaatttct

SEQ ID NO: 124816 - DNA, 25 bp, probe
atgcagtcagaagggtcctgtcccc

SEQ ID NO: 124817 - DNA, 25 bp, probe
atgcagagtgactggaacttcccgt

SEQ ID NO: 124818 - DNA, 25 bp, probe
atgcgcagtagccggaaatgctccc

SEQ ID NO: 124819 - DNA, 25 bp, probe
atgcgcagtagccggaaatgctccc

SEQ ID NO: 124820 - DNA, 25 bp, probe
atgctatctacctggaatctctctc

SEQ ID NO: 124821 - DNA, 25 bp, probe
atgctatctacctggaatctctctc

SEQ ID NO: 124822 - DNA, 25 bp, probe
atgctgtttcttgtgaaatgctctc

SEQ ID NO: 124823 - DNA, 25 bp, probe
atgcattccatttctggaagtgact

SEQ ID NO: 124824 - DNA, 25 bp, probe
atgcattatgtggactgaaccgact

SEQ ID NO: 124825 - DNA, 25 bp, probe
atgcttcagatgggctgtgcacacg

SEQ ID NO: 124826 - DNA, 25 bp, probe
atgcagccagaggagggcacaggct

SEQ ID NO: 124827 - DNA, 25 bp, probe
atgacgctcatcgtgggcatcacgt

SEQ ID NO: 124828 - DNA, 25 bp, probe
atgccctatctggattctacttatt

SEQ ID NO: 124829 - DNA, 25 bp, probe
atgaacatactttcctatttctgtt

SEQ ID NO: 124830 - DNA, 25 bp, probe
atgaaccccattctgtatgttttca

SEQ ID NO: 124831 - DNA, 25 bp, probe
atgaagactctagacgtttactttg

SEQ ID NO: 124832 - DNA, 25 bp, probe
atgaaagcccaaatcacctgtactt

SEQ ID NO: 124833 - DNA, 25 bp, probe
atgaaatactccagcacgtgtggct

SEQ ID NO: 124834 - DNA, 25 bp, probe
atgaataccttatcagctgttgctt

SEQ ID NO: 124835 - DNA, 25 bp, probe
atgcaaagctctttacctcttgcta

SEQ ID NO: 124836 - DNA, 25 bp, probe
atgcaacctttgaaactttgtaaag

SEQ ID NO: 124837 - DNA, 25 bp, probe
atgaagccttcacaacagttgaaga

SEQ ID NO: 124838 - DNA, 25 bp, probe
atgagaccttggcaaagttaatagc

SEQ ID NO: 124839 - DNA, 25 bp, probe
atgagacattggagaacctgaaaca

SEQ ID NO: 124840 - DNA, 25 bp, probe
atgaagttgatgtgcccttgaatac

SEQ ID NO: 124841 - DNA, 25 bp, probe
atgacaatgaagtgacactttgaca

SEQ ID NO: 124842 - DNA, 25 bp, probe
atgacaaagtgatgaccgtccagag

SEQ ID NO: 124843 - DNA, 25 bp, probe
atgctctaagtgaagatacaggcca

SEQ ID NO: 124844 - DNA, 25 bp, probe
atgctgctccagtaactacagtggc

SEQ ID NO: 124845 - DNA, 25 bp, probe
atgctggacgagtcattcacagtca

SEQ ID NO: 124846 - DNA, 25 bp, probe
atgctgagacgctgaacaacatcct

SEQ ID NO: 124847 - DNA, 25 bp, probe
atgctggactctggaccatatacca

SEQ ID NO: 124848 - DNA, 25 bp, probe
atgctgtcacttaataatcaacctg

SEQ ID NO: 124849 - DNA, 25 bp, probe
atgcttccattttcaccaatactag

SEQ ID NO: 124850 - DNA, 25 bp, probe
atgctttcatttacacagatatcca

SEQ ID NO: 124851 - DNA, 25 bp, probe
atgcttgcatagttgccaccatttt

SEQ ID NO: 124852 - DNA, 25 bp, probe
atgctgtcatgattgtgctacagtt

SEQ ID NO: 124853 - DNA, 25 bp, probe
atgctgctgatagtgatggatggac

SEQ ID NO: 124854 - DNA, 25 bp, probe
atgctcgtgatgtatgttgcagatc

SEQ ID NO: 124855 - DNA, 25 bp, probe
atgctggagaaagtgtggatgccct

SEQ ID NO: 124856 - DNA, 25 bp, probe
atgctgggggcagtggaaggcccca

SEQ ID NO: 124857 - DNA, 25 bp, probe
atgtagggtgcagaccgtactccat

SEQ ID NO: 124858 - DNA, 25 bp, probe
atgaaggattactctccatatccct

SEQ ID NO: 124859 - DNA, 25 bp, probe
atgaaaaaccagtctcttatccctc

SEQ ID NO: 124860 - DNA, 25 bp, probe
atgacaaagagtgactccctgccct

SEQ ID NO: 124861 - DNA, 25 bp, probe
atgaaaaattgaagtcacagcccct

SEQ ID NO: 124862 - DNA, 25 bp, probe
atgaaccaaagaaaacatttcacta

SEQ ID NO: 124863 - DNA, 25 bp, probe
atgaaccctacaaaatccatggcct

SEQ ID NO: 124864 - DNA, 25 bp, probe
atgaacctgtcctaaatcaattcct

SEQ ID NO: 124865 - DNA, 25 bp, probe
atgtaccgtcctttccaatacgatt

SEQ ID NO: 124866 - DNA, 25 bp, probe
agataccgcaacaggccgaactagt

SEQ ID NO: 124867 - DNA, 25 bp, probe
agataccgcaacaggccgaactagt

SEQ ID NO: 124868 - DNA, 25 bp, probe
atgaaatcgaacagtcgctgaacgg

SEQ ID NO: 124869 - DNA, 25 bp, probe
atgaacaaaaccctacgaaagaatg

SEQ ID NO: 124870 - DNA, 25 bp, probe
atgacatcaaaaggccttggcaaag

SEQ ID NO: 124871 - DNA, 25 bp, probe
atgaattatcctgccttggatggac

SEQ ID NO: 124872 - DNA, 25 bp, probe
atgaacactactgcctgtagtctga

SEQ ID NO: 124873 - DNA, 25 bp, probe
atgaaatttgctgttggagtgctta

SEQ ID NO: 124874 - DNA, 25 bp, probe
atgttattactgttttgggcctcca

SEQ ID NO: 124875 - DNA, 25 bp, probe
atgtttttcagctttagggtcctgc

SEQ ID NO: 124876 - DNA, 25 bp, probe
atgcttggcttcttttagggctacc

SEQ ID NO: 124877 - DNA, 25 bp, probe
atgctgtggctttgtgttgcgtttt

SEQ ID NO: 124878 - DNA, 25 bp, probe
atgctgtggctttgtgttgcgtttt

SEQ ID NO: 124879 - DNA, 25 bp, probe
atgcttggcactttgtggcaagatt

SEQ ID NO: 124880 - DNA, 25 bp, probe
atgcatatgccactgttattccact

SEQ ID NO: 124881 - DNA, 25 bp, probe
atgctcatcatatttatgttccgct

SEQ ID NO: 124882 - DNA, 25 bp, probe
atgctcatcatatttatgttccgct

SEQ ID NO: 124883 - DNA, 25 bp, probe
atgctatcaaattatcttcaccctc

SEQ ID NO: 124884 - DNA, 25 bp, probe
atgcacatagaatacggcacagtct

SEQ ID NO: 124885 - DNA, 25 bp, probe
atgcccaagattactgtcaatgtct

SEQ ID NO: 124886 - DNA, 25 bp, probe
atgcgctcaataaacgtgtttctcc

SEQ ID NO: 124887 - DNA, 25 bp, probe
atgctgtcaagcaatattgttttat

SEQ ID NO: 124888 - DNA, 25 bp, probe
atgctggccagcattttcattcatt

SEQ ID NO: 124889 - DNA, 25 bp, probe
atgctgcctctgtaaattcatgtat

SEQ ID NO: 124890 - DNA, 25 bp, probe
atgcatcctgcagagtatctaattt

SEQ ID NO: 124891 - DNA, 25 bp, probe
atgctctcagcaatatttagtactt

SEQ ID NO: 124892 - DNA, 25 bp, probe
atgcccagccagaatggatgtacta

SEQ ID NO: 124893 - DNA, 25 bp, probe
atgcagacgccgagatgactggcta

SEQ ID NO: 124894 - DNA, 25 bp, probe
atgaaggcaggcatgctgattcctg

SEQ ID NO: 124895 - DNA, 25 bp, probe
atgaagtcagtttggttcttgtgca

SEQ ID NO: 124896 - DNA, 25 bp, probe
atgatttctggcagatggtttggca

SEQ ID NO: 124897 - DNA, 25 bp, probe
atgcacttccagggtcttttggtct

SEQ ID NO: 124898 - DNA, 25 bp, probe
atgaatgaccagtgtttttcgtcgc

SEQ ID NO: 124899 - DNA, 25 bp, probe
atgaacatgccgttggttttattgg

SEQ ID NO: 124900 - DNA, 25 bp, probe
atgaagctccaggaactttaatgag

SEQ ID NO: 124901 - DNA, 25 bp, probe
atgaaactggagaagttgtcaatga

SEQ ID NO: 124902 - DNA, 25 bp, probe
atgattactcggacaccgtgaagga

SEQ ID NO: 124903 - DNA, 25 bp, probe
atgctgtgtgtcggacacctggaag

SEQ ID NO: 124904 - DNA, 25 bp, probe
atgctttctacgccattcaggaagg

SEQ ID NO: 124905 - DNA, 25 bp, probe
atgctcttctctcacatggagaaaa

SEQ ID NO: 124906 - DNA, 25 bp, probe
atgctcttctctcacatggagaaaa

SEQ ID NO: 124907 - DNA, 25 bp, probe
atgctcagattcaaccgacagaaag

SEQ ID NO: 124908 - DNA, 25 bp, probe
atgcttgttcaggcacgccagaagg

SEQ ID NO: 124909 - DNA, 25 bp, probe
atgcttatatggcgcctgaaaggat

SEQ ID NO: 124910 - DNA, 25 bp, probe
atgcaaaatggaccagttcaagcca

SEQ ID NO: 124911 - DNA, 25 bp, probe
atgcttaatggacctttccagcacc

SEQ ID NO: 124912 - DNA, 25 bp, probe
atgcttataagcctcctttacactg

SEQ ID NO: 124913 - DNA, 25 bp, probe
atgctgtcaaagttacagtttacgc

SEQ ID NO: 124914 - DNA, 25 bp, probe
atgctgtcaaagttacagtttacgc

SEQ ID NO: 124915 - DNA, 25 bp, probe
atgctgtagaagtgagtttgtaaat

SEQ ID NO: 124916 - DNA, 25 bp, probe
atgctttacacaggcagttttgaaa

SEQ ID NO: 124917 - DNA, 25 bp, probe
atgcttcttgtcttggttactgtac

SEQ ID NO: 124918 - DNA, 25 bp, probe
atgctgtttgtcttggtcttagtgt

SEQ ID NO: 124919 - DNA, 25 bp, probe
atgctgattattttagtctatttta

SEQ ID NO: 124920 - DNA, 25 bp, probe
atgctgacattgacgtagtcgttgt

SEQ ID NO: 124921 - DNA, 25 bp, probe
atgctgaagttccgaacagtccatg

SEQ ID NO: 124922 - DNA, 25 bp, probe
atgctgaaggaaccaacagtccacc

SEQ ID NO: 124923 - DNA, 25 bp, probe
atgctgcaagggctgattgccgctc

SEQ ID NO: 124924 - DNA, 25 bp, probe
atgctcaagaggcaacgctctctct

SEQ ID NO: 124925 - DNA, 25 bp, probe
atgctctggcgtcgaatggtttcct

SEQ ID NO: 124926 - DNA, 25 bp, probe
atgctctgtttccaactgcatttcc

SEQ ID NO: 124927 - DNA, 25 bp, probe
atgctgctttgttcactgcagctct

SEQ ID NO: 124928 - DNA, 25 bp, probe
atgctgcattttgagtggacttgat

SEQ ID NO: 124929 - DNA, 25 bp, probe
atgcttcttgtggtctggactgaac

SEQ ID NO: 124930 - DNA, 25 bp, probe
atgctcttgggcaactacagcagag

SEQ ID NO: 124931 - DNA, 25 bp, probe
atgacttgggcatcatgcatcgaga

SEQ ID NO: 124932 - DNA, 25 bp, probe
atgactgtaagcctctgatgcctga

SEQ ID NO: 124933 - DNA, 25 bp, probe
atgcactaagcattgtctgccagct

SEQ ID NO: 124934 - DNA, 25 bp, probe
atgctcaaagcatgtcagtttcctt

SEQ ID NO: 124935 - DNA, 25 bp, probe
atgcatgcaaggccagtcgtggtgc

SEQ ID NO: 124936 - DNA, 25 bp, probe
atgcatgaagccctgaagcttgctg

SEQ ID NO: 124937 - DNA, 25 bp, probe
atgctgaaacatccacacattgtag

SEQ ID NO: 124938 - DNA, 25 bp, probe
atgcacaccttgtgccactggagga

SEQ ID NO: 124939 - DNA, 25 bp, probe
atgaaacttaaccatacagaatgat

SEQ ID NO: 124940 - DNA, 25 bp, probe
atgaaaggcgaacttgaagaagaga

SEQ ID NO: 124941 - DNA, 25 bp, probe
atgaagggccgactggccaaccagt

SEQ ID NO: 124942 - DNA, 25 bp, probe
atgtagggcaggtgtctgcaaactt

SEQ ID NO: 124943 - DNA, 25 bp, probe
atgaacgagcaggaggtactaaatg

SEQ ID NO: 124944 - DNA, 25 bp, probe
atgcataagatgctcagagtcctca

SEQ ID NO: 124945 - DNA, 25 bp, probe
atgcataagatgctcagagtcctca

SEQ ID NO: 124946 - DNA, 25 bp, probe
atgctgagaatgatccctactcaaa

SEQ ID NO: 124947 - DNA, 25 bp, probe
atggaaatgtcctccaacaataaag

SEQ ID NO: 124948 - DNA, 25 bp, probe
atggaagacacttacctaacaagta

SEQ ID NO: 124949 - DNA, 25 bp, probe
atgagacaaacttctcagcgtaaag

SEQ ID NO: 124950 - DNA, 25 bp, probe
atgaaccagctcagccacgtaaact

SEQ ID NO: 124951 - DNA, 25 bp, probe
atgaaccagctcagccacgtaaact

SEQ ID NO: 124952 - DNA, 25 bp, probe
atgtattcttcagccccataaactg

SEQ ID NO: 124953 - DNA, 25 bp, probe
atgacttcgtagcagcacctactat

SEQ ID NO: 124954 - DNA, 25 bp, probe
atgaggccgctagaggcctgaggat

SEQ ID NO: 124955 - DNA, 25 bp, probe
atgtccccaaaaagccgtgagtcag

SEQ ID NO: 124956 - DNA, 25 bp, probe
aggccccaattatccaatagtctaa

SEQ ID NO: 124957 - DNA, 25 bp, probe
atgaccccaatttatccaagttcta

SEQ ID NO: 124958 - DNA, 25 bp, probe
atgagcctggaaagaatcaaaacct

SEQ ID NO: 124959 - DNA, 25 bp, probe
atgaccccaaagaatcacaccaaga

SEQ ID NO: 124960 - DNA, 25 bp, probe
atgaccctacaggtttaccaaccag

SEQ ID NO: 124961 - DNA, 25 bp, probe
atgacacctccaattttgatgaacc

SEQ ID NO: 124962 - DNA, 25 bp, probe
atgatgccaacctcttacgtgcgcc

SEQ ID NO: 124963 - DNA, 25 bp, probe
atgggaaccaacgtcatcgttgcca

SEQ ID NO: 124964 - DNA, 25 bp, probe
atgaggatactcagaccaccttgga

SEQ ID NO: 124965 - DNA, 25 bp, probe
atgcaggaactcctggactccttgg

SEQ ID NO: 124966 - DNA, 25 bp, probe
atgcaacaagtcctgaatcccttgc

SEQ ID NO: 124967 - DNA, 25 bp, probe
atgctgaaattcgtgagtcacctgg

SEQ ID NO: 124968 - DNA, 25 bp, probe
atgctggtgtgtgtcacagccctga

SEQ ID NO: 124969 - DNA, 25 bp, probe
atgctgtgttccatacagccttgga

SEQ ID NO: 124970 - DNA, 25 bp, probe
atgcagtgacatacaaagaccaagg

SEQ ID NO: 124971 - DNA, 25 bp, probe
atgcagtgatgtatccaacctatgg

SEQ ID NO: 124972 - DNA, 25 bp, probe
atgctgttgctcatggcgatgcact

SEQ ID NO: 124973 - DNA, 25 bp, probe
atgttagtactgcccatgactagtt

SEQ ID NO: 124974 - DNA, 25 bp, probe
atgcattattcattaactacttgta

SEQ ID NO: 124975 - DNA, 25 bp, probe
atgcttttattcagcatcctttatc

SEQ ID NO: 124976 - DNA, 25 bp, probe
atgcttcttgcagttaatctcgtta

SEQ ID NO: 124977 - DNA, 25 bp, probe
atgcatctttggacatcaatgtcct

SEQ ID NO: 124978 - DNA, 25 bp, probe
atgcatctttcagcagcagcgtgtc

SEQ ID NO: 124979 - DNA, 25 bp, probe
atgcatctttcagcagcagcgtgtc

SEQ ID NO: 124980 - DNA, 25 bp, probe
atgcacgttcagacagctgcattgt

SEQ ID NO: 124981 - DNA, 25 bp, probe
atgctctgatgacgaactgatttct

SEQ ID NO: 124982 - DNA, 25 bp, probe
atgctctgatgacgaactgatttct

SEQ ID NO: 124983 - DNA, 25 bp, probe
atgctatatgcatgaagcttctgtt

SEQ ID NO: 124984 - DNA, 25 bp, probe
atgtgcaaggagggcatttgtaacg

SEQ ID NO: 124985 - DNA, 25 bp, probe
atgctgaaggacccttttgtgcgct

SEQ ID NO: 124986 - DNA, 25 bp, probe
atgctgacgttcttgcttttggcgc

SEQ ID NO: 124987 - DNA, 25 bp, probe
atgctgacgttcttgcttttggcgc

SEQ ID NO: 124988 - DNA, 25 bp, probe
atgcatgcccttttcatgtttgtag

SEQ ID NO: 124989 - DNA, 25 bp, probe
atgcatcctatatccagtaagtaga

SEQ ID NO: 124990 - DNA, 25 bp, probe
atgcacgctgaatcctgctatggta

SEQ ID NO: 124991 - DNA, 25 bp, probe
atgctcagctacttgtgctggaggt

SEQ ID NO: 124992 - DNA, 25 bp, probe
atgctgaggagcagtctggagggca

SEQ ID NO: 124993 - DNA, 25 bp, probe
atgcacaggagctccaagggctcag

SEQ ID NO: 124994 - DNA, 25 bp, probe
atgttggcagaactcaagggcaaag

SEQ ID NO: 124995 - DNA, 25 bp, probe
atgatttcagtagaacagggagcga

SEQ ID NO: 124996 - DNA, 25 bp, probe
atgaactcaaacaccaggcagatgg

SEQ ID NO: 124997 - DNA, 25 bp, probe
atgaactcaaacaccaggcagatgg

SEQ ID NO: 124998 - DNA, 25 bp, probe
atgaaccagacgtaccgagaggagt

SEQ ID NO: 124999 - DNA, 25 bp, probe
atgagcccgggtactatgaagatgg

SEQ ID NO: 125000 - DNA, 25 bp, probe
atgcacccaggtagccctgggcatg

SEQ ID NO: 125001 - DNA, 25 bp, probe
atgacgacggtggactatggcgaca

SEQ ID NO: 125002 - DNA, 25 bp, probe
atgacgaggatattgactgggtaca

SEQ ID NO: 125003 - DNA, 25 bp, probe
atgaacctgtcattgggggtcagac

SEQ ID NO: 125004 - DNA, 25 bp, probe
agaactccctggaggcccagaaaag

SEQ ID NO: 125005 - DNA, 25 bp, probe
atgaactacctgtgggcaccgagaa

SEQ ID NO: 125006 - DNA, 25 bp, probe
atgacctacctaaggagcggctgaa

SEQ ID NO: 125007 - DNA, 25 bp, probe
atgcactcgaccacgtagaaggcag

SEQ ID NO: 125008 - DNA, 25 bp, probe
atgcttggccacccgtggaagtagc

SEQ ID NO: 125009 - DNA, 25 bp, probe
atgttacccccttgaaattcagcaa

SEQ ID NO: 125010 - DNA, 25 bp, probe
atgctaaaccctataatttacacat

SEQ ID NO: 125011 - DNA, 25 bp, probe
atgaaaacctctgtgacaactccct

SEQ ID NO: 125012 - DNA, 25 bp, probe
atgacaaccctgagtacaattgcca

SEQ ID NO: 125013 - DNA, 25 bp, probe
atgacaaccccaacttcatcttgtc

SEQ ID NO: 125014 - DNA, 25 bp, probe
atgaacccatccactgatatttgtc

SEQ ID NO: 125015 - DNA, 25 bp, probe
atgaacccatccactgatatttgtc

SEQ ID NO: 125016 - DNA, 25 bp, probe
atgaacccactatgttttggcctta

SEQ ID NO: 125017 - DNA, 25 bp, probe
atgagatccacctaaggccattgac

SEQ ID NO: 125018 - DNA, 25 bp, probe
atgatgaccccttacgtggtgacac

SEQ ID NO: 125019 - DNA, 25 bp, probe
atgagcatccggatcctgaagtgac

SEQ ID NO: 125020 - DNA, 25 bp, probe
atgagcatggcatagtccaccgtga

SEQ ID NO: 125021 - DNA, 25 bp, probe
atgagcatggcatagtccaccgtga

SEQ ID NO: 125022 - DNA, 25 bp, probe
atgagcatggcatagtccaccgtga

SEQ ID NO: 125023 - DNA, 25 bp, probe
atgaacgaacagactcaggcgatgt

SEQ ID NO: 125024 - DNA, 25 bp, probe
atgcattcgaagatctccgctgtat

SEQ ID NO: 125025 - DNA, 25 bp, probe
atgcattcgaagatctccgctgtat

SEQ ID NO: 125026 - DNA, 25 bp, probe
atgcatgtggacagtcgcgagcgtt

SEQ ID NO: 125027 - DNA, 25 bp, probe
atgatctcccatgtcgtgacgtatt

SEQ ID NO: 125028 - DNA, 25 bp, probe
atgctcaccctgtcactgagggttt

SEQ ID NO: 125029 - DNA, 25 bp, probe
atgacaacagcgacatcatggtggc

SEQ ID NO: 125030 - DNA, 25 bp, probe
atgacaagagcgactgccttgccat

SEQ ID NO: 125031 - DNA, 25 bp, probe
atgagcaaacgcatggacatcgcca

SEQ ID NO: 125032 - DNA, 25 bp, probe
atgcagagaaccttggaatcgtctt

SEQ ID NO: 125033 - DNA, 25 bp, probe
atgcagtgaaccttgagaaaatcta

SEQ ID NO: 125034 - DNA, 25 bp, probe
atgactatacgctaagagaacttaa

SEQ ID NO: 125035 - DNA, 25 bp, probe
atgactcatcggtcagcagaaaaga

SEQ ID NO: 125036 - DNA, 25 bp, probe
atgcactactcggtgtgaatgaaga

SEQ ID NO: 125037 - DNA, 25 bp, probe
atgcattgtatcgatgttatgtaaa

SEQ ID NO: 125038 - DNA, 25 bp, probe
atgcattgtatggctttataaatga

SEQ ID NO: 125039 - DNA, 25 bp, probe
atgcttaatgcctttgaaattttgt

SEQ ID NO: 125040 - DNA, 25 bp, probe
atgttgagtgttttaaagcatttgg

SEQ ID NO: 125041 - DNA, 25 bp, probe
atgttgagtgttttaaagcatttgg

SEQ ID NO: 125042 - DNA, 25 bp, probe
atgctcataggtcacttctacttct

SEQ ID NO: 125043 - DNA, 25 bp, probe
atgcactatgagatgctcttcaact

SEQ ID NO: 125044 - DNA, 25 bp, probe
atgaccatgagtagcatcagccaga

SEQ ID NO: 125045 - DNA, 25 bp, probe
atgaccagggtggcccagttgaaat

SEQ ID NO: 125046 - DNA, 25 bp, probe
atgaccgtggtggttggggtatatc

SEQ ID NO: 125047 - DNA, 25 bp, probe
atgagcagcgtggtggacaggagca

SEQ ID NO: 125048 - DNA, 25 bp, probe
atgcaagcaatggggagtggctgta

SEQ ID NO: 125049 - DNA, 25 bp, probe
atgaagccagtgcagatggtgccag

SEQ ID NO: 125050 - DNA, 25 bp, probe
atgcaaggccagtcgtggtgcacgg

SEQ ID NO: 125051 - DNA, 25 bp, probe
atgctagcctgctacttggtgaagg

SEQ ID NO: 125052 - DNA, 25 bp, probe
atgctagtcatgttcttggttctgt

SEQ ID NO: 125053 - DNA, 25 bp, probe
atgctttcagatccatcggtttata

SEQ ID NO: 125054 - DNA, 25 bp, probe
atgctttcagatccatcggtttata

SEQ ID NO: 125055 - DNA, 25 bp, probe
atgtactgcagaaactgaggactaa

SEQ ID NO: 125056 - DNA, 25 bp, probe
atgaatgatataaactgggatgcag

SEQ ID NO: 125057 - DNA, 25 bp, probe
atgaagattgatcagcttgtgtatg

SEQ ID NO: 125058 - DNA, 25 bp, probe
atgcaaatctataagctcctgcttt

SEQ ID NO: 125059 - DNA, 25 bp, probe
atgcaaatctataagctcctgcttt

SEQ ID NO: 125060 - DNA, 25 bp, probe
atgaatgattctacagctaggactt

SEQ ID NO: 125061 - DNA, 25 bp, probe
atgaatgtactgaccagctgaggca

SEQ ID NO: 125062 - DNA, 25 bp, probe
atgctatctgttcctatctgcagga

SEQ ID NO: 125063 - DNA, 25 bp, probe
atgcttgcaattccttctgagagat

SEQ ID NO: 125064 - DNA, 25 bp, probe
atgcttatttccgctggaacatata

SEQ ID NO: 125065 - DNA, 25 bp, probe
atgctcgattattccctgtacaata

SEQ ID NO: 125066 - DNA, 25 bp, probe
atgcttgagtcttaccgtaattgat

SEQ ID NO: 125067 - DNA, 25 bp, probe
atgaatgaggcacagccgtagagct

SEQ ID NO: 125068 - DNA, 25 bp, probe
atgacggagcagcggaaacgcaggc

SEQ ID NO: 125069 - DNA, 25 bp, probe
atgacggaggagtagccggccagtc

SEQ ID NO: 125070 - DNA, 25 bp, probe
atgactagagggagccaagaggatg

SEQ ID NO: 125071 - DNA, 25 bp, probe
atgacttgggtgaccttaaggatgt

SEQ ID NO: 125072 - DNA, 25 bp, probe
atgcagccttttacctaagaaattt

SEQ ID NO: 125073 - DNA, 25 bp, probe
atgcagccttttacctaagaaattt

SEQ ID NO: 125074 - DNA, 25 bp, probe
atgtagtgtgttccatttaaaattt

SEQ ID NO: 125075 - DNA, 25 bp, probe
atgtcaagttgttctggaaattttt

SEQ ID NO: 125076 - DNA, 25 bp, probe
atgacaaaggtctattgaatttatt

SEQ ID NO: 125077 - DNA, 25 bp, probe
atgaatgtgggattattgaatgggt

SEQ ID NO: 125078 - DNA, 25 bp, probe
atgactacgtccattacatcgagcc

SEQ ID NO: 125079 - DNA, 25 bp, probe
atgaggactaccatctgaccgaggt

SEQ ID NO: 125080 - DNA, 25 bp, probe
atgagacctactgatgtccctgata

SEQ ID NO: 125081 - DNA, 25 bp, probe
atgaaacatatttagagcacttaat

SEQ ID NO: 125082 - DNA, 25 bp, probe
atgactacttgtttatagagttctt

SEQ ID NO: 125083 - DNA, 25 bp, probe
atgaatgcctttatagatagtcact

SEQ ID NO: 125084 - DNA, 25 bp, probe
atgaatgactccaactacattgtca

SEQ ID NO: 125085 - DNA, 25 bp, probe
atgcaagtgtctaacttctgtgcct

SEQ ID NO: 125086 - DNA, 25 bp, probe
atgaaggcacataggcttctcccat

SEQ ID NO: 125087 - DNA, 25 bp, probe
atgaagaccatgggcatgtcctccg

SEQ ID NO: 125088 - DNA, 25 bp, probe
atgagaagactggtgcatttacagc

SEQ ID NO: 125089 - DNA, 25 bp, probe
atgaacacatcgggactgtgtctgc

SEQ ID NO: 125090 - DNA, 25 bp, probe
atgagcaccatagcaccattgtctc

SEQ ID NO: 125091 - DNA, 25 bp, probe
atgagccgttaagtcttttctgata

SEQ ID NO: 125092 - DNA, 25 bp, probe
atgtagcaataatgtcttttgaata

SEQ ID NO: 125093 - DNA, 25 bp, probe
atgatgacatctctagtacttcgga

SEQ ID NO: 125094 - DNA, 25 bp, probe
atgaccagctgcttagtcacctggc

SEQ ID NO: 125095 - DNA, 25 bp, probe
atgcaggatgcccacgtcatcctga

SEQ ID NO: 125096 - DNA, 25 bp, probe
atgcaggaattgactgttctgctga

SEQ ID NO: 125097 - DNA, 25 bp, probe
atgcacagtatctgctgttcttcag

SEQ ID NO: 125098 - DNA, 25 bp, probe
atgaagttcacggcttcttctgggg

SEQ ID NO: 125099 - DNA, 25 bp, probe
atgggcattacgggtgttgaaggtg

SEQ ID NO: 125100 - DNA, 25 bp, probe
atgcaggaaggccgggttgtgaggg

SEQ ID NO: 125101 - DNA, 25 bp, probe
aggcgagcaactggggttgggcggc

SEQ ID NO: 125102 - DNA, 25 bp, probe
atgagaggaacgggagatatgaggg

SEQ ID NO: 125103 - DNA, 25 bp, probe
atgagaagacggctcggtgaggggg

SEQ ID NO: 125104 - DNA, 25 bp, probe
atgagaagacggctcggtgaggggg

SEQ ID NO: 125105 - DNA, 25 bp, probe
atgattagatcgggtctcggaaggg

SEQ ID NO: 125106 - DNA, 25 bp, probe
atgagtcaataccgttccatagagg

SEQ ID NO: 125107 - DNA, 25 bp, probe
atgagtctacagttataccaagtgg

SEQ ID NO: 125108 - DNA, 25 bp, probe
atgcagcattaaactttgacaaggc

SEQ ID NO: 125109 - DNA, 25 bp, probe
atgaccagagacatctatgaaacgg

SEQ ID NO: 125110 - DNA, 25 bp, probe
atgaccatggaagctgagaggccag

SEQ ID NO: 125111 - DNA, 25 bp, probe
atgagacagcgactggctcacagac

SEQ ID NO: 125112 - DNA, 25 bp, probe
atgcacacacagatggtcacacaga

SEQ ID NO: 125113 - DNA, 25 bp, probe
atgcatcactggagacctactgcaa

SEQ ID NO: 125114 - DNA, 25 bp, probe
atgctagctctgagccagttcagta

SEQ ID NO: 125115 - DNA, 25 bp, probe
atgcttgctgcacagacatattaga

SEQ ID NO: 125116 - DNA, 25 bp, probe
atgcattccacttcactgatgctga

SEQ ID NO: 125117 - DNA, 25 bp, probe
atgcaatcacaccatgccatgtttt

SEQ ID NO: 125118 - DNA, 25 bp, probe
atgacatgccacatgccgtgttaag

SEQ ID NO: 125119 - DNA, 25 bp, probe
atgaacacctacagtgttgtgcagc

SEQ ID NO: 125120 - DNA, 25 bp, probe
atgaagcccaagatgctgggtatcg

SEQ ID NO: 125121 - DNA, 25 bp, probe
atgcattgcccacatttgtgtcttc

SEQ ID NO: 125122 - DNA, 25 bp, probe
atgcttggctaactatatttgcttt

SEQ ID NO: 125123 - DNA, 25 bp, probe
atgttggtagccactgctagatatt

SEQ ID NO: 125124 - DNA, 25 bp, probe
atgtctttatgaaccggcagtttcg

SEQ ID NO: 125125 - DNA, 25 bp, probe
atgactttatttgcggagcatttct

SEQ ID NO: 125126 - DNA, 25 bp, probe
atgacttaagtttttgtgctcttgc

SEQ ID NO: 125127 - DNA, 25 bp, probe
atgacaagcaaggtttctggtgcct

SEQ ID NO: 125128 - DNA, 25 bp, probe
atgacagcctgggcttactggagct

SEQ ID NO: 125129 - DNA, 25 bp, probe
atgcagggctacgattggctgaagt

SEQ ID NO: 125130 - DNA, 25 bp, probe
atgagctgactgggctttgctacgt

SEQ ID NO: 125131 - DNA, 25 bp, probe
atgagctcctgctcattgtggccag

SEQ ID NO: 125132 - DNA, 25 bp, probe
atgacgcctttaatgtgggcagcat

SEQ ID NO: 125133 - DNA, 25 bp, probe
atgaggtccatcagtatcggcagtg

SEQ ID NO: 125134 - DNA, 25 bp, probe
atgaggtccatcagtatcggcagtg

SEQ ID NO: 125135 - DNA, 25 bp, probe
atgacctcctcaacatattcgagct

SEQ ID NO: 125136 - DNA, 25 bp, probe
atgaactccataggccattaatttg

SEQ ID NO: 125137 - DNA, 25 bp, probe
atgaactcagcattctgtacttttg

SEQ ID NO: 125138 - DNA, 25 bp, probe
atgaatgcagactctgctaccattt

SEQ ID NO: 125139 - DNA, 25 bp, probe
atgaatcagtcatcatccagctggt

SEQ ID NO: 125140 - DNA, 25 bp, probe
ttgggagctttgctctatcctggac

SEQ ID NO: 125141 - DNA, 25 bp, probe
atgaattgctgattgcctctttctc

SEQ ID NO: 125142 - DNA, 25 bp, probe
atgcagatgtggtgcttctcattta

SEQ ID NO: 125143 - DNA, 25 bp, probe
atgcagctgtgtgtggcagtatttt

SEQ ID NO: 125144 - DNA, 25 bp, probe
atgcaggattccaggttatatctca

SEQ ID NO: 125145 - DNA, 25 bp, probe
atgagatactcgaggtggatgtcgc

SEQ ID NO: 125146 - DNA, 25 bp, probe
atgatgatagctatggtgtagatgg

SEQ ID NO: 125147 - DNA, 25 bp, probe
atgatgagggactgttggcatgcag

SEQ ID NO: 125148 - DNA, 25 bp, probe
atgatgatgagggactgttggcatg

SEQ ID NO: 125149 - DNA, 25 bp, probe
atgcagtagaggcgctgggcagaga

SEQ ID NO: 125150 - DNA, 25 bp, probe
atgcagaagaagcgatgtatcagaa

SEQ ID NO: 125151 - DNA, 25 bp, probe
atgagcccagagcagattcatggaa

SEQ ID NO: 125152 - DNA, 25 bp, probe
agatcaccgaggttatgccaaactg

SEQ ID NO: 125153 - DNA, 25 bp, probe
atgcacccaaagtatcgccagaagc

SEQ ID NO: 125154 - DNA, 25 bp, probe
atgacaaatcagcaaccacaagagc

SEQ ID NO: 125155 - DNA, 25 bp, probe
atgacaaatcagcaaccacaagagc

SEQ ID NO: 125156 - DNA, 25 bp, probe
atgacaacgagtacaccacggaact

SEQ ID NO: 125157 - DNA, 25 bp, probe
atgaacaccgtgaacctcagttatt

SEQ ID NO: 125158 - DNA, 25 bp, probe
atgatatacctgtaactgtacctat

SEQ ID NO: 125159 - DNA, 25 bp, probe
atgcaaactccatcgttgagcctgg

SEQ ID NO: 125160 - DNA, 25 bp, probe
atgcaaaatctctactgctttggat

SEQ ID NO: 125161 - DNA, 25 bp, probe
atgcagcaaacttcactgttgtctt

SEQ ID NO: 125162 - DNA, 25 bp, probe
atgcatattttagttgattgctttt

SEQ ID NO: 125163 - DNA, 25 bp, probe
atgcatattttagttgattgctttt

SEQ ID NO: 125164 - DNA, 25 bp, probe
atgcatgacctttggtacatgcctg

SEQ ID NO: 125165 - DNA, 25 bp, probe
atgatgacacttacgacaatgacat

SEQ ID NO: 125166 - DNA, 25 bp, probe
atgatgacgtggactgcacaatgac

SEQ ID NO: 125167 - DNA, 25 bp, probe
atgaagcgggccctgatgatgatga

SEQ ID NO: 125168 - DNA, 25 bp, probe
atgaagttgccgatgatgaggaccg

SEQ ID NO: 125169 - DNA, 25 bp, probe
atgacgttgccgattcaccagcact

SEQ ID NO: 125170 - DNA, 25 bp, probe
atgacttcttttattgtcacctaca

SEQ ID NO: 125171 - DNA, 25 bp, probe
atgacttcttgtggttctgtaatgc

SEQ ID NO: 125172 - DNA, 25 bp, probe
atgacttcttgtggttctgtaatgc

SEQ ID NO: 125173 - DNA, 25 bp, probe
atgacgtctctgtgttcgtgattcc

SEQ ID NO: 125174 - DNA, 25 bp, probe
atgacgatgccgtgtgtctcgtctc

SEQ ID NO: 125175 - DNA, 25 bp, probe
atgacaagctcgtgaggctctacgc

SEQ ID NO: 125176 - DNA, 25 bp, probe
atgacaagctcgtgaggctctacgc

SEQ ID NO: 125177 - DNA, 25 bp, probe
atgataagctggttcagtgcccacc

SEQ ID NO: 125178 - DNA, 25 bp, probe
atgatgagcagtagtaccagcccca

SEQ ID NO: 125179 - DNA, 25 bp, probe
atgaagaatttacagctcagactat

SEQ ID NO: 125180 - DNA, 25 bp, probe
atgaagatatttgtacagtgtcgct

SEQ ID NO: 125181 - DNA, 25 bp, probe
atgaagtcttttaacagtctctctt

SEQ ID NO: 125182 - DNA, 25 bp, probe
atgaactatttcgaaagcccttcta

SEQ ID NO: 125183 - DNA, 25 bp, probe
atgagattattttggtacacctttc

SEQ ID NO: 125184 - DNA, 25 bp, probe
atgcagtttgtccattgtgacagtt

SEQ ID NO: 125185 - DNA, 25 bp, probe
atgcagtttctctaagtggaaaaac

SEQ ID NO: 125186 - DNA, 25 bp, probe
atgcagtttctctaagtggaaaaac

SEQ ID NO: 125187 - DNA, 25 bp, probe
atgcagtctgaaaagggaagaaaca

SEQ ID NO: 125188 - DNA, 25 bp, probe
atgagttgcagatatgcgtgaagga

SEQ ID NO: 125189 - DNA, 25 bp, probe
atgagctgagggaagtggacggcac

SEQ ID NO: 125190 - DNA, 25 bp, probe
atatggaggtttcccaccagaagcc

SEQ ID NO: 125191 - DNA, 25 bp, probe
atgaggatggtatggactgcatgga

SEQ ID NO: 125192 - DNA, 25 bp, probe
atgaggaccgaagtgattgtggact

SEQ ID NO: 125193 - DNA, 25 bp, probe
atgaagccctgaagcttgctgagag

SEQ ID NO: 125194 - DNA, 25 bp, probe
atgaggcccatcactgttgggggca

SEQ ID NO: 125195 - DNA, 25 bp, probe
atgaggctactgagtttggtgttca

SEQ ID NO: 125196 - DNA, 25 bp, probe
atgcaatggacctgattctagttta

SEQ ID NO: 125197 - DNA, 25 bp, probe
atgcaatggaaatgatgctttttgt

SEQ ID NO: 125198 - DNA, 25 bp, probe
atgagattggcatggctttatttgt

SEQ ID NO: 125199 - DNA, 25 bp, probe
atgcagtggacatggcctttgttcc

SEQ ID NO: 125200 - DNA, 25 bp, probe
atgttgacaggatgcccaggtcacc

SEQ ID NO: 125201 - DNA, 25 bp, probe
atgagagaagagagtgccagagtct

SEQ ID NO: 125202 - DNA, 25 bp, probe
atgaaggatgcaggcttccaggcct

SEQ ID NO: 125203 - DNA, 25 bp, probe
atgaagttgccctcacaagcaaaga

SEQ ID NO: 125204 - DNA, 25 bp, probe
atgaccgttccagcactgtcaaaga

SEQ ID NO: 125205 - DNA, 25 bp, probe
atgacctttgcctaccttgtaggcc

SEQ ID NO: 125206 - DNA, 25 bp, probe
atgacctttgcctaccttgtaggcc

SEQ ID NO: 125207 - DNA, 25 bp, probe
atgcacaattatttcacgcttgtga

SEQ ID NO: 125208 - DNA, 25 bp, probe
atgcacaattatttcacgcttgtga

SEQ ID NO: 125209 - DNA, 25 bp, probe
atgaagtaattatttgctgtgaaag

SEQ ID NO: 125210 - DNA, 25 bp, probe
atgaagtgcaaaaatgtggtcccag

SEQ ID NO: 125211 - DNA, 25 bp, probe
atgtttcacaactagtggctgccca

SEQ ID NO: 125212 - DNA, 25 bp, probe
atgtttcatagttggggtcatagat

SEQ ID NO: 125213 - DNA, 25 bp, probe
atgtatgttgaatgtggtcccagat

SEQ ID NO: 125214 - DNA, 25 bp, probe
atgatttagcgaggtggcctacatg

SEQ ID NO: 125215 - DNA, 25 bp, probe
atgaccgactgatgttcccacggat

SEQ ID NO: 125216 - DNA, 25 bp, probe
atgacacagcctgtttcaaccaggc

SEQ ID NO: 125217 - DNA, 25 bp, probe
atgcacaaccttgatgataaccagt

SEQ ID NO: 125218 - DNA, 25 bp, probe
atgcactcaacacggtgtgaatcac

SEQ ID NO: 125219 - DNA, 25 bp, probe
atgcactctatccgggagatggcct

SEQ ID NO: 125220 - DNA, 25 bp, probe
atgcactctatccgggagatggcct

SEQ ID NO: 125221 - DNA, 25 bp, probe
atgaactgctgacgggaatggcact

SEQ ID NO: 125222 - DNA, 25 bp, probe
atgagatgttggcaggacagcctcc

SEQ ID NO: 125223 - DNA, 25 bp, probe
atgcaaggggtgccataccctacac

SEQ ID NO: 125224 - DNA, 25 bp, probe
atgaagggatgaccaaccacgagac

SEQ ID NO: 125225 - DNA, 25 bp, probe
atgcagaccagatctcaactcctga

SEQ ID NO: 125226 - DNA, 25 bp, probe
atgcagaccagatctcaactcctga

SEQ ID NO: 125227 - DNA, 25 bp, probe
atgagaccatgatcgaggacgtgca

SEQ ID NO: 125228 - DNA, 25 bp, probe
agacagcatctgttcaaagtcgtag

SEQ ID NO: 125229 - DNA, 25 bp, probe
atgacaatcatgttgcagcaattca

SEQ ID NO: 125230 - DNA, 25 bp, probe
atgacatctgattagcagaagtcat

SEQ ID NO: 125231 - DNA, 25 bp, probe
atgacatcctgctgatcaagctctc

SEQ ID NO: 125232 - DNA, 25 bp, probe
atgcaacctcaccacaagtacaaag

SEQ ID NO: 125233 - DNA, 25 bp, probe
atgtacctgccggagagtgtcagaa

SEQ ID NO: 125234 - DNA, 25 bp, probe
atgtcaacctcaaaaaccagaaaga

SEQ ID NO: 125235 - DNA, 25 bp, probe
agtaactcatttcacccaaacaaga

SEQ ID NO: 125236 - DNA, 25 bp, probe
atgttttcattttccccaaaatgca

SEQ ID NO: 125237 - DNA, 25 bp, probe
atgactgtttttttctgcctaatag

SEQ ID NO: 125238 - DNA, 25 bp, probe
atgcacttctatttagccagcgttt

SEQ ID NO: 125239 - DNA, 25 bp, probe
atgcaggtccatcctgacctggtat

SEQ ID NO: 125240 - DNA, 25 bp, probe
atgcagtgtcttgctggcagatgtg

SEQ ID NO: 125241 - DNA, 25 bp, probe
atgcagatctacagcgccagagtgc

SEQ ID NO: 125242 - DNA, 25 bp, probe
atgcagaccagcaagctgtgagagt

SEQ ID NO: 125243 - DNA, 25 bp, probe
atgcagactgcagggcttgaaatgg

SEQ ID NO: 125244 - DNA, 25 bp, probe
atgaggtcaccctgaagatttacat

SEQ ID NO: 125245 - DNA, 25 bp, probe
atgaggtcaccctgaagatttacat

SEQ ID NO: 125246 - DNA, 25 bp, probe
atgagttcactacagacgattaaca

SEQ ID NO: 125247 - DNA, 25 bp, probe
atgattccactaaagaagttgaagt

SEQ ID NO: 125248 - DNA, 25 bp, probe
atgttctttcaagtgcaaagtaatt

SEQ ID NO: 125249 - DNA, 25 bp, probe
atgtctgtttccagaacagtgcctt

SEQ ID NO: 125250 - DNA, 25 bp, probe
atgactattccctgacagttatttt

SEQ ID NO: 125251 - DNA, 25 bp, probe
atgcagttttcctcaaaatttgctg

SEQ ID NO: 125252 - DNA, 25 bp, probe
atgcagaatttccccagaaacctgt

SEQ ID NO: 125253 - DNA, 25 bp, probe
atgcaaataattacaccaaactctg

SEQ ID NO: 125254 - DNA, 25 bp, probe
atgcaaataattacaccaaactctg

SEQ ID NO: 125255 - DNA, 25 bp, probe
atgacaccaatctcaaaaagctgct

SEQ ID NO: 125256 - DNA, 25 bp, probe
atgaactagcatttaataaagcaca

SEQ ID NO: 125257 - DNA, 25 bp, probe
atgcaactcaattacaaaggacaca

SEQ ID NO: 125258 - DNA, 25 bp, probe
atgcaactactctacatagccaaat

SEQ ID NO: 125259 - DNA, 25 bp, probe
atgacgcggctcaaaaggaaaccaa

SEQ ID NO: 125260 - DNA, 25 bp, probe
atgaattggacatttcggataactc

SEQ ID NO: 125261 - DNA, 25 bp, probe
atgacatctaagttttgtgtacaga

SEQ ID NO: 125262 - DNA, 25 bp, probe
atgacacttatacttggtttaattc

SEQ ID NO: 125263 - DNA, 25 bp, probe
cttacttatttcatcgttacttaat

SEQ ID NO: 125264 - DNA, 25 bp, probe
ctgaagccttttgtcgttgccttca

SEQ ID NO: 125265 - DNA, 25 bp, probe
atgaagccctttattgacatggttc

SEQ ID NO: 125266 - DNA, 25 bp, probe
atgaatcccttaagtgtgaacgtct

SEQ ID NO: 125267 - DNA, 25 bp, probe
atgattcagtcttgacggtgaatgg

SEQ ID NO: 125268 - DNA, 25 bp, probe
atgacacagtcttggctcactgcaa

SEQ ID NO: 125269 - DNA, 25 bp, probe
atgaacagtatcactcactaaatga

SEQ ID NO: 125270 - DNA, 25 bp, probe
atgactggtcctaatctgtaaatga

SEQ ID NO: 125271 - DNA, 25 bp, probe
atgcactggcctgttctgtaggaga

SEQ ID NO: 125272 - DNA, 25 bp, probe
atgcactggctgacctatcatgaga

SEQ ID NO: 125273 - DNA, 25 bp, probe
atgcactggctgacctatcatgaga

SEQ ID NO: 125274 - DNA, 25 bp, probe
atgactgcagtgtatatgaatggag

SEQ ID NO: 125275 - DNA, 25 bp, probe
atgactgactgactaaatgacaccc

SEQ ID NO: 125276 - DNA, 25 bp, probe
atgactgactgactaaatgacaccc

SEQ ID NO: 125277 - DNA, 25 bp, probe
atgacgagacccaaatgatccgcgt

SEQ ID NO: 125278 - DNA, 25 bp, probe
atgagcgagaccgtcaacagtgtcg

SEQ ID NO: 125279 - DNA, 25 bp, probe
atgacagatgatgctgtcaagcaat

SEQ ID NO: 125280 - DNA, 25 bp, probe
atgcaaatgagccatatgaaaatta

SEQ ID NO: 125281 - DNA, 25 bp, probe
atgcaaatggctactaagcacatga

SEQ ID NO: 125282 - DNA, 25 bp, probe
atgaatatgatgtcctcatagaagg

SEQ ID NO: 125283 - DNA, 25 bp, probe
atgaattatgcggcttaaagctgtc

SEQ ID NO: 125284 - DNA, 25 bp, probe
atgcaattcagtgttccaagtctct

SEQ ID NO: 125285 - DNA, 25 bp, probe
aagcttgcgttgattaagtccctgc

SEQ ID NO: 125286 - DNA, 25 bp, probe
atggcttgggtatctcaattccctt

SEQ ID NO: 125287 - DNA, 25 bp, probe
atgttgcgggtattccaaattctct

SEQ ID NO: 125288 - DNA, 25 bp, probe
agattggtttgagtgccctttgcta

SEQ ID NO: 125289 - DNA, 25 bp, probe
atgattgtgctacagtttctttaag

SEQ ID NO: 125290 - DNA, 25 bp, probe
atgactgtcttccctattcttaggg

SEQ ID NO: 125291 - DNA, 25 bp, probe
atgaggtcttcggctttgttcagac

SEQ ID NO: 125292 - DNA, 25 bp, probe
atgattatttctccttggatacaga

SEQ ID NO: 125293 - DNA, 25 bp, probe
atgttttgtttggtcagcacagcgt

SEQ ID NO: 125294 - DNA, 25 bp, probe
atgagtcgtattacagttgacgcgg

SEQ ID NO: 125295 - DNA, 25 bp, probe
atgagtttactaatgactgggggga

SEQ ID NO: 125296 - DNA, 25 bp, probe
atgagattgtcgcactgaagaaggt

SEQ ID NO: 125297 - DNA, 25 bp, probe
atgaactacggactgcactgaaagc

SEQ ID NO: 125298 - DNA, 25 bp, probe
atgaatatgactggattggtaaaca

SEQ ID NO: 125299 - DNA, 25 bp, probe
atgactagcagaattgtgggaacaa

SEQ ID NO: 125300 - DNA, 25 bp, probe
atgactacactcaaggatgtgaacc

SEQ ID NO: 125301 - DNA, 25 bp, probe
atgtctagacaccatgttgtatcag

SEQ ID NO: 125302 - DNA, 25 bp, probe
atgaaagccacactttgaaggtaat

SEQ ID NO: 125303 - DNA, 25 bp, probe
atgaaatggccacatctgaggctgt

SEQ ID NO: 125304 - DNA, 25 bp, probe
atgaagagacacagtctagaggtcc

SEQ ID NO: 125305 - DNA, 25 bp, probe
atgaaggaagaactctacctgctcc

SEQ ID NO: 125306 - DNA, 25 bp, probe
atgaaggaagaactctacctgctcc

SEQ ID NO: 125307 - DNA, 25 bp, probe
atgaagttacaaacatacagccatc

SEQ ID NO: 125308 - DNA, 25 bp, probe
atgcacagggacactcacacaggca

SEQ ID NO: 125309 - DNA, 25 bp, probe
atgaaagtagatcctgctcacagaa

SEQ ID NO: 125310 - DNA, 25 bp, probe
atgaaatgtatacctggatctgaac

SEQ ID NO: 125311 - DNA, 25 bp, probe
atgacaatatcaggctctggatcag

SEQ ID NO: 125312 - DNA, 25 bp, probe
atgacaatatcaggctctggatcag

SEQ ID NO: 125313 - DNA, 25 bp, probe
atgaagatcacagagctggataaag

SEQ ID NO: 125314 - DNA, 25 bp, probe
atgagaacacatcagctggacgcta

SEQ ID NO: 125315 - DNA, 25 bp, probe
atgagaaagcgctacagtgtggata

SEQ ID NO: 125316 - DNA, 25 bp, probe
atgaacaacactcgccttggatgca

SEQ ID NO: 125317 - DNA, 25 bp, probe
atgtatcatcagagcgccgaggaga

SEQ ID NO: 125318 - DNA, 25 bp, probe
atgactatgcagaggcctgggggac

SEQ ID NO: 125319 - DNA, 25 bp, probe
atgagttgagttgcttctgaggtac

SEQ ID NO: 125320 - DNA, 25 bp, probe
atgagtttgtgtactggccaagtcg

SEQ ID NO: 125321 - DNA, 25 bp, probe
atgagattgttctctggcagccggt

SEQ ID NO: 125322 - DNA, 25 bp, probe
atgaagacattctgtggcactccag

SEQ ID NO: 125323 - DNA, 25 bp, probe
atgagagacaccaaggtgcctgcca

SEQ ID NO: 125324 - DNA, 25 bp, probe
atgaagaccacgagctccatggagc

SEQ ID NO: 125325 - DNA, 25 bp, probe
atgaaaccaaatggactcagccctc

SEQ ID NO: 125326 - DNA, 25 bp, probe
atgaacaccagaaaggtcacctgcc

SEQ ID NO: 125327 - DNA, 25 bp, probe
atgaacaggagaaggccgtcttcca

SEQ ID NO: 125328 - DNA, 25 bp, probe
atgcaacagggatatgatgctgctt

SEQ ID NO: 125329 - DNA, 25 bp, probe
atgcaactacaacctgatgcgtctg

SEQ ID NO: 125330 - DNA, 25 bp, probe
atgaaaacaagggatggctcattgt

SEQ ID NO: 125331 - DNA, 25 bp, probe
atgaatacaaatcgaaggcctctac

SEQ ID NO: 125332 - DNA, 25 bp, probe
atgaattcagaatgcaggtggctct

SEQ ID NO: 125333 - DNA, 25 bp, probe
atgtcattcgacacggagcagatgc

SEQ ID NO: 125334 - DNA, 25 bp, probe
atgagattcaaaacgcagagcagat

SEQ ID NO: 125335 - DNA, 25 bp, probe
atgacctgacaaccctgatcatcat

SEQ ID NO: 125336 - DNA, 25 bp, probe
atgacaataaacttcgtccagatat

SEQ ID NO: 125337 - DNA, 25 bp, probe
atgaaaaccagatcgtgcacagaga

SEQ ID NO: 125338 - DNA, 25 bp, probe
atgaagtactcacacatgccacaac

SEQ ID NO: 125339 - DNA, 25 bp, probe
atgaggtatcttctgcagcacaagg

SEQ ID NO: 125340 - DNA, 25 bp, probe
atgaagaccctgcagcatgacaagc

SEQ ID NO: 125341 - DNA, 25 bp, probe
atgaagcattacaggatgacagcag

SEQ ID NO: 125342 - DNA, 25 bp, probe
atgaacatccgcaatgcgaggccag

SEQ ID NO: 125343 - DNA, 25 bp, probe
atgaacccatatatgagagcctgtt

SEQ ID NO: 125344 - DNA, 25 bp, probe
atgaacatttatatgattgcattgg

SEQ ID NO: 125345 - DNA, 25 bp, probe
atgaaatgcttctgagcagtcttgt

SEQ ID NO: 125346 - DNA, 25 bp, probe
atgaaatgcttctgagcagtcttgt

SEQ ID NO: 125347 - DNA, 25 bp, probe
atgcaagtgtgactgctggcgtctt

SEQ ID NO: 125348 - DNA, 25 bp, probe
atgcaagctggtggctggaccaatg

SEQ ID NO: 125349 - DNA, 25 bp, probe
atgcaagagctcagcacgatccaca

SEQ ID NO: 125350 - DNA, 25 bp, probe
atgcaaggtgcccacatgtgtccat

SEQ ID NO: 125351 - DNA, 25 bp, probe
atgagcaggtgctgaagttcgtcat

SEQ ID NO: 125352 - DNA, 25 bp, probe
atgatgctggtgcagactctctgcc

SEQ ID NO: 125353 - DNA, 25 bp, probe
atgagctatgtgcatcgtgatctgg

SEQ ID NO: 125354 - DNA, 25 bp, probe
atgactttggcacgtcacgggatgg

SEQ ID NO: 125355 - DNA, 25 bp, probe
atgaagttggacagcaggtggagag

SEQ ID NO: 125356 - DNA, 25 bp, probe
atgacagttgagtggagtgggaagg

SEQ ID NO: 125357 - DNA, 25 bp, probe
atgacagtggagaggagggcgaggc

SEQ ID NO: 125358 - DNA, 25 bp, probe
atgatcgggatatgcgaggccgagt

SEQ ID NO: 125359 - DNA, 25 bp, probe
atgatctgggcatatggggctggga

SEQ ID NO: 125360 - DNA, 25 bp, probe
atgcaatgggcttagtattctggga

SEQ ID NO: 125361 - DNA, 25 bp, probe
atgcaatgggcttagtattctggga

SEQ ID NO: 125362 - DNA, 25 bp, probe
atgaatttgctatgcgttatggaat

SEQ ID NO: 125363 - DNA, 25 bp, probe
atgaaatgtgtatgcacctattgaa

SEQ ID NO: 125364 - DNA, 25 bp, probe
atgaaatcgttagcaccttaggaga

SEQ ID NO: 125365 - DNA, 25 bp, probe
atgaactggctatgaaccacctggg

SEQ ID NO: 125366 - DNA, 25 bp, probe
atgacagtgtctttaaccatttaga

SEQ ID NO: 125367 - DNA, 25 bp, probe
atgacagtgtctttaaccatttaga

SEQ ID NO: 125368 - DNA, 25 bp, probe
atgacctttggtacatgcctgttaa

SEQ ID NO: 125369 - DNA, 25 bp, probe
atgacctttggtacatgcctgttaa

SEQ ID NO: 125370 - DNA, 25 bp, probe
atgactggacagttaccttattcaa

SEQ ID NO: 125371 - DNA, 25 bp, probe
atgactggacagttaccttattcaa

SEQ ID NO: 125372 - DNA, 25 bp, probe
atgagcaggtccaagacacttattc

SEQ ID NO: 125373 - DNA, 25 bp, probe
atgagcaggcgtggatggcatctta

SEQ ID NO: 125374 - DNA, 25 bp, probe
atgaggtcagaccaggatttgcatt

SEQ ID NO: 125375 - DNA, 25 bp, probe
atgaagtcagaccaggagtctaaca

SEQ ID NO: 125376 - DNA, 25 bp, probe
atgaatatgcagactgcagggcttg

SEQ ID NO: 125377 - DNA, 25 bp, probe
atgactgctcgaatcagcatggctg

SEQ ID NO: 125378 - DNA, 25 bp, probe
atgacttagatctagctcctaccta

SEQ ID NO: 125379 - DNA, 25 bp, probe
atgagtgctgcaaagagccctaccc

SEQ ID NO: 125380 - DNA, 25 bp, probe
atgacagtgaattgacccatgttcc

SEQ ID NO: 125381 - DNA, 25 bp, probe
atgaggtgaatggacagccagccac

SEQ ID NO: 125382 - DNA, 25 bp, probe
atgaagtgcacaagagcacgcaggc

SEQ ID NO: 125383 - DNA, 25 bp, probe
atgacctgcagcagaatctgagcag

SEQ ID NO: 125384 - DNA, 25 bp, probe
atgacggctgctcgaagaacaatgt

SEQ ID NO: 125385 - DNA, 25 bp, probe
atgacttctgctaaaaagcaatcat

SEQ ID NO: 125386 - DNA, 25 bp, probe
atgaaatctgctgcaaaatctctct

SEQ ID NO: 125387 - DNA, 25 bp, probe
atgacagtctgctacgcaaaacatt

SEQ ID NO: 125388 - DNA, 25 bp, probe
atgacagtgcaggaagatcgaaagt

SEQ ID NO: 125389 - DNA, 25 bp, probe
atgaagatgctgcacagtttacaga

SEQ ID NO: 125390 - DNA, 25 bp, probe
atgagcacattgtcaagttctatgg

SEQ ID NO: 125391 - DNA, 25 bp, probe
atgaccagtatgtcagttcagtcgg

SEQ ID NO: 125392 - DNA, 25 bp, probe
atgaaggtgatggcaggccatgggg

SEQ ID NO: 125393 - DNA, 25 bp, probe
atgacaggaagcgacgcctctggca

SEQ ID NO: 125394 - DNA, 25 bp, probe
atgacaggaagcgacgcctctggca

SEQ ID NO: 125395 - DNA, 25 bp, probe
atgacagtgactccacatcaactga

SEQ ID NO: 125396 - DNA, 25 bp, probe
atgagcagttcatcaatgcagccaa

SEQ ID NO: 125397 - DNA, 25 bp, probe
atgacagcatccaactccatgcaaa

SEQ ID NO: 125398 - DNA, 25 bp, probe
atgaagcatctcaattgctggagga

SEQ ID NO: 125399 - DNA, 25 bp, probe
atgaaagcacacttcgggatgacca

SEQ ID NO: 125400 - DNA, 25 bp, probe
atgaagaatacattgctgggaacca

SEQ ID NO: 125401 - DNA, 25 bp, probe
atgaagcaaacaatgctctaatcac

SEQ ID NO: 125402 - DNA, 25 bp, probe
atgaagaattatcttccatcacata

SEQ ID NO: 125403 - DNA, 25 bp, probe
atgaaaatcattatgtcattccata

SEQ ID NO: 125404 - DNA, 25 bp, probe
atgactattttattgcttcctgtga

SEQ ID NO: 125405 - DNA, 25 bp, probe
atgaagtattattatctgtctcttg

SEQ ID NO: 125406 - DNA, 25 bp, probe
atgaatgtattgtacactgacgcgt

SEQ ID NO: 125407 - DNA, 25 bp, probe
atgactgtcacttacatcgaggcct

SEQ ID NO: 125408 - DNA, 25 bp, probe
atgtttctgcttcccagaatgcacc

SEQ ID NO: 125409 - DNA, 25 bp, probe
atgttcttacgtgaaatctgctccc

SEQ ID NO: 125410 - DNA, 25 bp, probe
atgacacttacgacaatgacattgc

SEQ ID NO: 125411 - DNA, 25 bp, probe
atgaagctgtagggactcatcttgc

SEQ ID NO: 125412 - DNA, 25 bp, probe
atgattcatggggaactccatttca

SEQ ID NO: 125413 - DNA, 25 bp, probe
atgttcagtggaggatcccatcaaa

SEQ ID NO: 125414 - DNA, 25 bp, probe
atgacctcatggagtcctcatacaa

SEQ ID NO: 125415 - DNA, 25 bp, probe
atgactgctacgtggccatatgcca

SEQ ID NO: 125416 - DNA, 25 bp, probe
atgactggccagttgagctcaggaa

SEQ ID NO: 125417 - DNA, 25 bp, probe
atgactggctcagcgccatcaaaat

SEQ ID NO: 125418 - DNA, 25 bp, probe
atgacatgtcctgcatcttctataa

SEQ ID NO: 125419 - DNA, 25 bp, probe
atgttgctccagaacttctgaagag

SEQ ID NO: 125420 - DNA, 25 bp, probe
atgttcatgccatcaacttgacgct

SEQ ID NO: 125421 - DNA, 25 bp, probe
atgtatcgtgctggaagtctgaact

SEQ ID NO: 125422 - DNA, 25 bp, probe
atgatagtgatggcaaaggcgatat

SEQ ID NO: 125423 - DNA, 25 bp, probe
atgaagagcaaccagaggctgaagt

SEQ ID NO: 125424 - DNA, 25 bp, probe
atgacagtgaaccgaagcgcaatgt

SEQ ID NO: 125425 - DNA, 25 bp, probe
atgacgtggactttagcatgcagag

SEQ ID NO: 125426 - DNA, 25 bp, probe
atgacgtggactgcacaatgacaga

SEQ ID NO: 125427 - DNA, 25 bp, probe
atgaccaatgccttccaatatgtgc

SEQ ID NO: 125428 - DNA, 25 bp, probe
atgatcctgatggctctcaaattga

SEQ ID NO: 125429 - DNA, 25 bp, probe
atgaggatgggcccaacattgacaa

SEQ ID NO: 125430 - DNA, 25 bp, probe
atgacgtgtgtgcgcaagttcaccc

SEQ ID NO: 125431 - DNA, 25 bp, probe
atgacgtggtgaactaaccgctccc

SEQ ID NO: 125432 - DNA, 25 bp, probe
atgacgctttaagatattccttcct

SEQ ID NO: 125433 - DNA, 25 bp, probe
atgatcactttaaacaattccgttt

SEQ ID NO: 125434 - DNA, 25 bp, probe
atgtccttcaaatctgttagcgttt

SEQ ID NO: 125435 - DNA, 25 bp, probe
atgtccttcaaatctgttagcgttt

SEQ ID NO: 125436 - DNA, 25 bp, probe
atgtccttaagagggtgttcgggat

SEQ ID NO: 125437 - DNA, 25 bp, probe
atgttcttaaagagttccacaagca

SEQ ID NO: 125438 - DNA, 25 bp, probe
catgtacttcgcttaagtttctaac

SEQ ID NO: 125439 - DNA, 25 bp, probe
atgtacttcgcttaagtttctaact

SEQ ID NO: 125440 - DNA, 25 bp, probe
atgtagtttccatcagtcaataaaa

SEQ ID NO: 125441 - DNA, 25 bp, probe
atgtattttccatactgagtttaaa

SEQ ID NO: 125442 - DNA, 25 bp, probe
atgttgtttgcctaccaagatatta

SEQ ID NO: 125443 - DNA, 25 bp, probe
atgtctggttcatactccagccttt

SEQ ID NO: 125444 - DNA, 25 bp, probe
atgatctgtttttagtcgtggcatt

SEQ ID NO: 125445 - DNA, 25 bp, probe
atgacaatgttttatcctgctggcc

SEQ ID NO: 125446 - DNA, 25 bp, probe
atgacaggttcattttgttggcctg

SEQ ID NO: 125447 - DNA, 25 bp, probe
atgaccgtcactgactttggctggg

SEQ ID NO: 125448 - DNA, 25 bp, probe
atgaccgtcactgactttggctggg

SEQ ID NO: 125449 - DNA, 25 bp, probe
atgaccgtcactgactttggctggg

SEQ ID NO: 125450 - DNA, 25 bp, probe
atgaccgtcactgactttggctggg

SEQ ID NO: 125451 - DNA, 25 bp, probe
atggacgtaccgacaatggtctggg

SEQ ID NO: 125452 - DNA, 25 bp, probe
atgtacggaggcaccaatctctggg

SEQ ID NO: 125453 - DNA, 25 bp, probe
aggagcgacaggcctaaatttgggc

SEQ ID NO: 125454 - DNA, 25 bp, probe
aggaggagacgctcactttcgaagc

SEQ ID NO: 125455 - DNA, 25 bp, probe
aggaggagacgctcactttcgaagc

SEQ ID NO: 125456 - DNA, 25 bp, probe
aggaggggtgatgactttggcacgt

SEQ ID NO: 125457 - DNA, 25 bp, probe
atgtcaggcgggttactttccagga

SEQ ID NO: 125458 - DNA, 25 bp, probe
atgtcaggcgggttactttccagga

SEQ ID NO: 125459 - DNA, 25 bp, probe
atgaagcagggccgtactttgctgc

SEQ ID NO: 125460 - DNA, 25 bp, probe
atgaactgtgtctgtaaagtgctca

SEQ ID NO: 125461 - DNA, 25 bp, probe
atgagaaatgtatgccaaatgatta

SEQ ID NO: 125462 - DNA, 25 bp, probe
atgtaatcagtgtagagaaaaccgt

SEQ ID NO: 125463 - DNA, 25 bp, probe
atgtaagatgtgtatatgtatagct

SEQ ID NO: 125464 - DNA, 25 bp, probe
atgaacgtgcatattgccttgcaaa

SEQ ID NO: 125465 - DNA, 25 bp, probe
atgaaccgcttcatgccactgaata

SEQ ID NO: 125466 - DNA, 25 bp, probe
atgacaccagctgtctgtactagac

SEQ ID NO: 125467 - DNA, 25 bp, probe
atgacaccagcttcctggactttct

SEQ ID NO: 125468 - DNA, 25 bp, probe
atgaacccatcatgctggtttttct

SEQ ID NO: 125469 - DNA, 25 bp, probe
atgacagcttcagactttgtttttt

SEQ ID NO: 125470 - DNA, 25 bp, probe
atgaagctacacaaacctttctctt

SEQ ID NO: 125471 - DNA, 25 bp, probe
atgagcactactctaccatggttct

SEQ ID NO: 125472 - DNA, 25 bp, probe
atgagatgcctcattcctcagtttc

SEQ ID NO: 125473 - DNA, 25 bp, probe
atgaccttttatgccagttgtgcca

SEQ ID NO: 125474 - DNA, 25 bp, probe
atgtgccccagttctattttggcca

SEQ ID NO: 125475 - DNA, 25 bp, probe
atgtccacctaaattcctatgtcca

SEQ ID NO: 125476 - DNA, 25 bp, probe
atgtccaccatagaatttggttact

SEQ ID NO: 125477 - DNA, 25 bp, probe
atgtaacctggaaactatgctttac

SEQ ID NO: 125478 - DNA, 25 bp, probe
atgtaattttatccctcatgtatac

SEQ ID NO: 125479 - DNA, 25 bp, probe
atgagatcaaaccccctattataca

SEQ ID NO: 125480 - DNA, 25 bp, probe
atgatataaatactctccatttccc

SEQ ID NO: 125481 - DNA, 25 bp, probe
atgtacaaaagtaccatagcacagc

SEQ ID NO: 125482 - DNA, 25 bp, probe
atgtcaccaaaaacctgcggcgaga

SEQ ID NO: 125483 - DNA, 25 bp, probe
atgtaccaagtattccagtggaaga

SEQ ID NO: 125484 - DNA, 25 bp, probe
atgtatggtcatggaatacgtggaa

SEQ ID NO: 125485 - DNA, 25 bp, probe
atgtagagactccttccgaagaaga

SEQ ID NO: 125486 - DNA, 25 bp, probe
atgttgacgactctcacagaacgag

SEQ ID NO: 125487 - DNA, 25 bp, probe
atgttcactgacacaaaggatgaga

SEQ ID NO: 125488 - DNA, 25 bp, probe
atgttgccttgcttcaagataaagt

SEQ ID NO: 125489 - DNA, 25 bp, probe
atgttgcttgatggtgaaattggag

SEQ ID NO: 125490 - DNA, 25 bp, probe
atgttgcttgatggtgaaattggag

SEQ ID NO: 125491 - DNA, 25 bp, probe
atgttggtgaaggcaagtctctgaa

SEQ ID NO: 125492 - DNA, 25 bp, probe
atgtctgggaacccagctgcctaac

SEQ ID NO: 125493 - DNA, 25 bp, probe
atgtgtggaaacccactatttaata

SEQ ID NO: 125494 - DNA, 25 bp, probe
atgtggactgaaccgacttttctaa

SEQ ID NO: 125495 - DNA, 25 bp, probe
atgtggactgaaccgacttttctaa

SEQ ID NO: 125496 - DNA, 25 bp, probe
atggtgactggcaccatgccatttc

SEQ ID NO: 125497 - DNA, 25 bp, probe
atgaggacgtgtctgttatttccta

SEQ ID NO: 125498 - DNA, 25 bp, probe
atgactcaccttttggattttccac

SEQ ID NO: 125499 - DNA, 25 bp, probe
atgacatgcaacttaaggacttctc

SEQ ID NO: 125500 - DNA, 25 bp, probe
atgacatgcagactaaagaattgta

SEQ ID NO: 125501 - DNA, 25 bp, probe
atgactgaagtaataactgatgaga

SEQ ID NO: 125502 - DNA, 25 bp, probe
atgagctcacctacaacctagagaa

SEQ ID NO: 125503 - DNA, 25 bp, probe
atggtcccatacttcctaaggaaat

SEQ ID NO: 125504 - DNA, 25 bp, probe
atgtgatctccaagtttaaaaaaat

SEQ ID NO: 125505 - DNA, 25 bp, probe
agtctcagccaacagtaccaaaagt

SEQ ID NO: 125506 - DNA, 25 bp, probe
atgactaccagctggttcgaaaatt

SEQ ID NO: 125507 - DNA, 25 bp, probe
atgactaccagctggttcgaaaatt

SEQ ID NO: 125508 - DNA, 25 bp, probe
atgatctacacccgtttcttaaaag

SEQ ID NO: 125509 - DNA, 25 bp, probe
atgattacaccaatgtattctagaa

SEQ ID NO: 125510 - DNA, 25 bp, probe
atgatcaacaccgtgtgcttcgtga

SEQ ID NO: 125511 - DNA, 25 bp, probe
atgaaagccacatgtctgtgtgtgt

SEQ ID NO: 125512 - DNA, 25 bp, probe
atgacaacagcaactttgagtggct

SEQ ID NO: 125513 - DNA, 25 bp, probe
atgaactatctcattagaagtcata

SEQ ID NO: 125514 - DNA, 25 bp, probe
atgaactatctcattagaagtcata

SEQ ID NO: 125515 - DNA, 25 bp, probe
atgatcagtgataccttagagactt

SEQ ID NO: 125516 - DNA, 25 bp, probe
atgtcagagtcacctgatgtcaacc

SEQ ID NO: 125517 - DNA, 25 bp, probe
atgtcatgcgcatcttgtctgcaga

SEQ ID NO: 125518 - DNA, 25 bp, probe
atgtcaacactggttcatgcagacc

SEQ ID NO: 125519 - DNA, 25 bp, probe
atgtcaacactggttcatgcagacc

SEQ ID NO: 125520 - DNA, 25 bp, probe
atgaccacagcaggtatacagctct

SEQ ID NO: 125521 - DNA, 25 bp, probe
atgattatcacatttgagaccctgt

SEQ ID NO: 125522 - DNA, 25 bp, probe
atgagcatacatcttaaatcttttc

SEQ ID NO: 125523 - DNA, 25 bp, probe
atgagcacaactttcaaattatgta

SEQ ID NO: 125524 - DNA, 25 bp, probe
atgacagcgacttggcaatatttat

SEQ ID NO: 125525 - DNA, 25 bp, probe
atgatacagactctatattgctata

SEQ ID NO: 125526 - DNA, 25 bp, probe
atgaaatatgcttatattggctata

SEQ ID NO: 125527 - DNA, 25 bp, probe
atgtaaatgtacatgtgcagatatt

SEQ ID NO: 125528 - DNA, 25 bp, probe
atgatcacagcaatacttgtatgca

SEQ ID NO: 125529 - DNA, 25 bp, probe
atgacctgcatcaagtcttctgatc

SEQ ID NO: 125530 - DNA, 25 bp, probe
atgacctgcatcatcatttgcttca

SEQ ID NO: 125531 - DNA, 25 bp, probe
atgacctgatcattacatggctgtg

SEQ ID NO: 125532 - DNA, 25 bp, probe
atgacctgagacaagatgctgtcat

SEQ ID NO: 125533 - DNA, 25 bp, probe
atgaccatggactggatgctttata

SEQ ID NO: 125534 - DNA, 25 bp, probe
atgaccacccattgattgtattata

SEQ ID NO: 125535 - DNA, 25 bp, probe
atgaccacccattgattgtattata

SEQ ID NO: 125536 - DNA, 25 bp, probe
atgacaacacctggtttgttctctg

SEQ ID NO: 125537 - DNA, 25 bp, probe
atgacatttcacgggagatttcttg

SEQ ID NO: 125538 - DNA, 25 bp, probe
atgacatttcacgggagatttcttg

SEQ ID NO: 125539 - DNA, 25 bp, probe
atgatcaacaccgtggatgatttct

SEQ ID NO: 125540 - DNA, 25 bp, probe
atgataacacttggagctattacat

SEQ ID NO: 125541 - DNA, 25 bp, probe
atgatttcactaggcatttggcaat

SEQ ID NO: 125542 - DNA, 25 bp, probe
atgtttccttgccttgttgatgtgg

SEQ ID NO: 125543 - DNA, 25 bp, probe
atgagttcctattttttctgggaga

SEQ ID NO: 125544 - DNA, 25 bp, probe
agtcttgccttacacaaaggggatc

SEQ ID NO: 125545 - DNA, 25 bp, probe
atgtctttttcagccacgagggtat

SEQ ID NO: 125546 - DNA, 25 bp, probe
atgacttgtatgacaactcccaggt

SEQ ID NO: 125547 - DNA, 25 bp, probe
atgtcttgtgatgaaccactaggct

SEQ ID NO: 125548 - DNA, 25 bp, probe
atgtcttgtgatgaaccactaggct

SEQ ID NO: 125549 - DNA, 25 bp, probe
atgtcttctggaaacgtcaactctt

SEQ ID NO: 125550 - DNA, 25 bp, probe
atgtttcataaaccctggcactggt

SEQ ID NO: 125551 - DNA, 25 bp, probe
atgtatttgaagcacctgaataggc

SEQ ID NO: 125552 - DNA, 25 bp, probe
atgtttaaatcctcgtatgcactct

SEQ ID NO: 125553 - DNA, 25 bp, probe
atgtttaaatcctcgtatgcactct

SEQ ID NO: 125554 - DNA, 25 bp, probe
agtttaagatccacacgtactccag

SEQ ID NO: 125555 - DNA, 25 bp, probe
atgattaaaattctcacctttcaca

SEQ ID NO: 125556 - DNA, 25 bp, probe
agtgtactaattcttctaattccag

SEQ ID NO: 125557 - DNA, 25 bp, probe
agtacccaaatcgtcttatattagg

SEQ ID NO: 125558 - DNA, 25 bp, probe
atggagcctcaagattcttctttag

SEQ ID NO: 125559 - DNA, 25 bp, probe
aggaactaacttactgtccaccagt

SEQ ID NO: 125560 - DNA, 25 bp, probe
aggaactaacttactgtccaccagt

SEQ ID NO: 125561 - DNA, 25 bp, probe
aggaaggtatttcagctcccaagtt

SEQ ID NO: 125562 - DNA, 25 bp, probe
atgtcaaaacatacctacttccaga

SEQ ID NO: 125563 - DNA, 25 bp, probe
atgtcaaggttaagtctttcgagaa

SEQ ID NO: 125564 - DNA, 25 bp, probe
atgtcatttcatacaaattttccca

SEQ ID NO: 125565 - DNA, 25 bp, probe
atgtcatttcatacaaattttccca

SEQ ID NO: 125566 - DNA, 25 bp, probe
atgactttatccttgaagctacaca

SEQ ID NO: 125567 - DNA, 25 bp, probe
atgacttttccatgtatctacctca

SEQ ID NO: 125568 - DNA, 25 bp, probe
atgactttattcttgtatctcatct

SEQ ID NO: 125569 - DNA, 25 bp, probe
atgagatttctcattgatcacagat

SEQ ID NO: 125570 - DNA, 25 bp, probe
atgagttggctgattgagactgcaa

SEQ ID NO: 125571 - DNA, 25 bp, probe
atgacatttgctatctgctggctgc

SEQ ID NO: 125572 - DNA, 25 bp, probe
atgacaatggccacatcattctcaa

SEQ ID NO: 125573 - DNA, 25 bp, probe
atgatcaacttaactcttcatccat

SEQ ID NO: 125574 - DNA, 25 bp, probe
atgatcaacttaactcttcatccat

SEQ ID NO: 125575 - DNA, 25 bp, probe
atgtaactgctaaccttacagtaaa

SEQ ID NO: 125576 - DNA, 25 bp, probe
atgtatcctttcggcatgtggagga

SEQ ID NO: 125577 - DNA, 25 bp, probe
atgttattttccgaaggcgataatg

SEQ ID NO: 125578 - DNA, 25 bp, probe
atgttactgttactgatacaggaaa

SEQ ID NO: 125579 - DNA, 25 bp, probe
atgtcagacttcgagtgtacaaaat

SEQ ID NO: 125580 - DNA, 25 bp, probe
atgtcagacttcgagtgtacaaaat

SEQ ID NO: 125581 - DNA, 25 bp, probe
atgtacgcactgtcagttacaccaa

SEQ ID NO: 125582 - DNA, 25 bp, probe
atgactaagtcccatatcacacaca

SEQ ID NO: 125583 - DNA, 25 bp, probe
atgacaaagtcaaggacatctcaga

SEQ ID NO: 125584 - DNA, 25 bp, probe
atgtaagagatacggcacttctggc

SEQ ID NO: 125585 - DNA, 25 bp, probe
atgtatttgaacagcatcttctttt

SEQ ID NO: 125586 - DNA, 25 bp, probe
atgatattgaacaggctttttgttt

SEQ ID NO: 125587 - DNA, 25 bp, probe
atgtaagaggttttgttgtctgttt

SEQ ID NO: 125588 - DNA, 25 bp, probe
atgtattaaattcttctgtctatta

SEQ ID NO: 125589 - DNA, 25 bp, probe
atgataagacattttgtttttactg

SEQ ID NO: 125590 - DNA, 25 bp, probe
atgtgcaaaacagcgtttaagactg

SEQ ID NO: 125591 - DNA, 25 bp, probe
atgagcataaacacacatttaggaa

SEQ ID NO: 125592 - DNA, 25 bp, probe
atgagctttaaaactccataggaaa

SEQ ID NO: 125593 - DNA, 25 bp, probe
atgacagtaaaacttctgtgaggga

SEQ ID NO: 125594 - DNA, 25 bp, probe
atgaggtcataatccttagtgaggg

SEQ ID NO: 125595 - DNA, 25 bp, probe
atgaggctccaatacatgggaagct

SEQ ID NO: 125596 - DNA, 25 bp, probe
atgaggctccaatacatgggaagct

SEQ ID NO: 125597 - DNA, 25 bp, probe
agacctctgaccttagtagcaacat

SEQ ID NO: 125598 - DNA, 25 bp, probe
atgacctctacattgaaaacaacaa

SEQ ID NO: 125599 - DNA, 25 bp, probe
atgacacctgaattatgctaaaaca

SEQ ID NO: 125600 - DNA, 25 bp, probe
atgagccctgaattgttctcaaaca

SEQ ID NO: 125601 - DNA, 25 bp, probe
atgaggcctggcactttgcaaggat

SEQ ID NO: 125602 - DNA, 25 bp, probe
atgaggcctggcactttgcaaggat

SEQ ID NO: 125603 - DNA, 25 bp, probe
atgaggacatttactataaaagcat

SEQ ID NO: 125604 - DNA, 25 bp, probe
atgaggatcgttttttaagtgcaat

SEQ ID NO: 125605 - DNA, 25 bp, probe
atgagaatcagatcgagtccaaggc

SEQ ID NO: 125606 - DNA, 25 bp, probe
aggaaccaactgagccaatgccagc

SEQ ID NO: 125607 - DNA, 25 bp, probe
atgttaacaactcagccatctggca

SEQ ID NO: 125608 - DNA, 25 bp, probe
atggtcacagacttctggcctagga

SEQ ID NO: 125609 - DNA, 25 bp, probe
atgtgctccagttccaacgatgagg

SEQ ID NO: 125610 - DNA, 25 bp, probe
atgtcttcttcccaaggcaagaggt

SEQ ID NO: 125611 - DNA, 25 bp, probe
aggccaatatcccataggctaactt

SEQ ID NO: 125612 - DNA, 25 bp, probe
atgaccacataagaaggcaatttta

SEQ ID NO: 125613 - DNA, 25 bp, probe
atggcaactaactcactcaattttc

SEQ ID NO: 125614 - DNA, 25 bp, probe
atgaccttctactgattagattttc

SEQ ID NO: 125615 - DNA, 25 bp, probe
atgacctttagctatcttatgacaa

SEQ ID NO: 125616 - DNA, 25 bp, probe
atgagctctcttagacatcttgtga

SEQ ID NO: 125617 - DNA, 25 bp, probe
atgacattcattcgagatgctctct

SEQ ID NO: 125618 - DNA, 25 bp, probe
atgtattgcataatcaatgctggct

SEQ ID NO: 125619 - DNA, 25 bp, probe
atgttttcagtgttgctgagagaaa

SEQ ID NO: 125620 - DNA, 25 bp, probe
atgtttacaccaatgccaaaaagca

SEQ ID NO: 125621 - DNA, 25 bp, probe
atgttactaacaatgtccactacga

SEQ ID NO: 125622 - DNA, 25 bp, probe
atgttcaggaacttttccttcatga

SEQ ID NO: 125623 - DNA, 25 bp, probe
atgtctggggaaattttatcttgaa

SEQ ID NO: 125624 - DNA, 25 bp, probe
atgactttgtaaattttgttctata

SEQ ID NO: 125625 - DNA, 25 bp, probe
atgactgagatgtggactttggttc

SEQ ID NO: 125626 - DNA, 25 bp, probe
atgactgagatgtggactttggttc

SEQ ID NO: 125627 - DNA, 25 bp, probe
atgatcgagacgggcatctttggcg

SEQ ID NO: 125628 - DNA, 25 bp, probe
atgatcgagacgggcatctttggcg

SEQ ID NO: 125629 - DNA, 25 bp, probe
atgatacagacattggcttgttggt

SEQ ID NO: 125630 - DNA, 25 bp, probe
atgatacagacattggcttgttggt

SEQ ID NO: 125631 - DNA, 25 bp, probe
atgatgaggaccacgatgtcggtgc

SEQ ID NO: 125632 - DNA, 25 bp, probe
atgtactgaccagctgaggcagcag

SEQ ID NO: 125633 - DNA, 25 bp, probe
atgtcttaccagtgacgctgctgac

SEQ ID NO: 125634 - DNA, 25 bp, probe
atgtcttaccagatagagttgcagg

SEQ ID NO: 125635 - DNA, 25 bp, probe
atgttccacatccaaaagtccagac

SEQ ID NO: 125636 - DNA, 25 bp, probe
atgttccagatctatcagacgtccc

SEQ ID NO: 125637 - DNA, 25 bp, probe
atgacccagctgcttggagatcctc

SEQ ID NO: 125638 - DNA, 25 bp, probe
atgatccaatggcttactggccatc

SEQ ID NO: 125639 - DNA, 25 bp, probe
atgaccctgtgcgtgatcagcattg

SEQ ID NO: 125640 - DNA, 25 bp, probe
atgacgctctggttgagctcagtgg

SEQ ID NO: 125641 - DNA, 25 bp, probe
atgactctctggtgagcgaggacat

SEQ ID NO: 125642 - DNA, 25 bp, probe
atgacgctgatgtggagtggaaatt

SEQ ID NO: 125643 - DNA, 25 bp, probe
atgacctgtataaggtggagaccat

SEQ ID NO: 125644 - DNA, 25 bp, probe
atgatcctgtcttagggcagaggcc

SEQ ID NO: 125645 - DNA, 25 bp, probe
atgatcatcccaatattgtcaaact

SEQ ID NO: 125646 - DNA, 25 bp, probe
atgatcatcccaatattgtcaaact

SEQ ID NO: 125647 - DNA, 25 bp, probe
atgatctcccataatttgaaattga

SEQ ID NO: 125648 - DNA, 25 bp, probe
atgatgttactttatgtgaattctc

SEQ ID NO: 125649 - DNA, 25 bp, probe
atgagtctactttggagacaattaa

SEQ ID NO: 125650 - DNA, 25 bp, probe
gggtggactattcggacaagtacgg

SEQ ID NO: 125651 - DNA, 25 bp, probe
aggctggtctcgtggtaaaactgtt

SEQ ID NO: 125652 - DNA, 25 bp, probe
aggtggtctcctctgacttcaacag

SEQ ID NO: 125653 - DNA, 25 bp, probe
atgaggtgtccactttgatttccag

SEQ ID NO: 125654 - DNA, 25 bp, probe
atgggtatacgcagtgacttccgat

SEQ ID NO: 125655 - DNA, 25 bp, probe
atgtacaaactaaggactatttatt

SEQ ID NO: 125656 - DNA, 25 bp, probe
atgtacaaactagaattttaatata

SEQ ID NO: 125657 - DNA, 25 bp, probe
atgagacttcctattaatttattaa

SEQ ID NO: 125658 - DNA, 25 bp, probe
atgagactatgcgtttttataaaaa

SEQ ID NO: 125659 - DNA, 25 bp, probe
atgagactatgcgtttttataaaaa

SEQ ID NO: 125660 - DNA, 25 bp, probe
atgagcctactgatgttgttgataa

SEQ ID NO: 125661 - DNA, 25 bp, probe
atgactctagtgctcttggtgtata

SEQ ID NO: 125662 - DNA, 25 bp, probe
atgattgctcgattgtttggttttt

SEQ ID NO: 125663 - DNA, 25 bp, probe
atgattgctcgattgtttggttttt

SEQ ID NO: 125664 - DNA, 25 bp, probe
atgttgtcagctttgtactctttgt

SEQ ID NO: 125665 - DNA, 25 bp, probe
atgattaccatgatgtcgtggttgt

SEQ ID NO: 125666 - DNA, 25 bp, probe
atgtccgctctgatgtctggagttt

SEQ ID NO: 125667 - DNA, 25 bp, probe
atgatcatcaccgagttcattgaga

SEQ ID NO: 125668 - DNA, 25 bp, probe
atgatgaatgtgggattattgaatg

SEQ ID NO: 125669 - DNA, 25 bp, probe
atgatagctatggtgtagatggaat

SEQ ID NO: 125670 - DNA, 25 bp, probe
atgagatgcattgttacaggaagtc

SEQ ID NO: 125671 - DNA, 25 bp, probe
atgacgactccgacatcaggaagat

SEQ ID NO: 125672 - DNA, 25 bp, probe
atgaccatgcccgcataaaactgaa

SEQ ID NO: 125673 - DNA, 25 bp, probe
atgaggcctccaaacaaacactgga

SEQ ID NO: 125674 - DNA, 25 bp, probe
atgaggcctagagatcaagaatatc

SEQ ID NO: 125675 - DNA, 25 bp, probe
atgaggcctagagatcaagaatatc

SEQ ID NO: 125676 - DNA, 25 bp, probe
atgactcttcaaggattagaatatt

SEQ ID NO: 125677 - DNA, 25 bp, probe
agtctttacaaaatagccagttata

SEQ ID NO: 125678 - DNA, 25 bp, probe
atgttttaccatacaataagttgac

SEQ ID NO: 125679 - DNA, 25 bp, probe
atgtataatttcacagataatttac

SEQ ID NO: 125680 - DNA, 25 bp, probe
atgagaaggttcacatgtgttttga

SEQ ID NO: 125681 - DNA, 25 bp, probe
atgatgaaaatgactccaagctctt

SEQ ID NO: 125682 - DNA, 25 bp, probe
atgagcctaatgaccacagcaggta

SEQ ID NO: 125683 - DNA, 25 bp, probe
atgacctgaaacctcagcgtgaatt

SEQ ID NO: 125684 - DNA, 25 bp, probe
atgaccccaacgctggagcagtata

SEQ ID NO: 125685 - DNA, 25 bp, probe
atgaccccaacgctggagcagtata

SEQ ID NO: 125686 - DNA, 25 bp, probe
atgaccgacaagggttgtgtgaaga

SEQ ID NO: 125687 - DNA, 25 bp, probe
atgactctgtcttgtgggtgtctga

SEQ ID NO: 125688 - DNA, 25 bp, probe
atgatgtcgtggttgttgatgttga

SEQ ID NO: 125689 - DNA, 25 bp, probe
atgagctgctgaggaggttgtgtgg

SEQ ID NO: 125690 - DNA, 25 bp, probe
atgacctaggactgatgctgtgggg

SEQ ID NO: 125691 - DNA, 25 bp, probe
atgaccacagtgaaagttttggctg

SEQ ID NO: 125692 - DNA, 25 bp, probe
atgatcccagataagtgtgtgtttt

SEQ ID NO: 125693 - DNA, 25 bp, probe
atgatcccagataagtgtgtgtttt

SEQ ID NO: 125694 - DNA, 25 bp, probe
atgaggtccatcagagctctgattt

SEQ ID NO: 125695 - DNA, 25 bp, probe
atgaggaccacatcgctcacatagt

SEQ ID NO: 125696 - DNA, 25 bp, probe
atgatgaaccgcttcatgccactga

SEQ ID NO: 125697 - DNA, 25 bp, probe
atgatgaaccctacactgactttga

SEQ ID NO: 125698 - DNA, 25 bp, probe
atgataattcagtccttgcctttga

SEQ ID NO: 125699 - DNA, 25 bp, probe
atgatagtttgtcctgtgtccttag

SEQ ID NO: 125700 - DNA, 25 bp, probe
atgtatgtaatgtgtggtggcctca

SEQ ID NO: 125701 - DNA, 25 bp, probe
atgtacgagatgatgtgcggccgcc

SEQ ID NO: 125702 - DNA, 25 bp, probe
atgtacgagatgatgtgcggccgcc

SEQ ID NO: 125703 - DNA, 25 bp, probe
atgtacgagatgatgtgcggccgcc

SEQ ID NO: 125704 - DNA, 25 bp, probe
atgtctggagctatggggtcaccat

SEQ ID NO: 125705 - DNA, 25 bp, probe
atgttgggctaagggctgtgagctt

SEQ ID NO: 125706 - DNA, 25 bp, probe
atgttggtgggtggtcactgagacc

SEQ ID NO: 125707 - DNA, 25 bp, probe
atgagggtcagcgacgtggggagcc

SEQ ID NO: 125708 - DNA, 25 bp, probe
atgagggtcagcgacgtggggagcc

SEQ ID NO: 125709 - DNA, 25 bp, probe
atgaggttgaggacgtgggagactg

SEQ ID NO: 125710 - DNA, 25 bp, probe
atgacctgcggcgctgggagaagtg

SEQ ID NO: 125711 - DNA, 25 bp, probe
atgtccgctggcccaggaagaaatt

SEQ ID NO: 125712 - DNA, 25 bp, probe
atgtccgctggcccaggaagaaatt

SEQ ID NO: 125713 - DNA, 25 bp, probe
atgtccggcgcctggagtataagcc

SEQ ID NO: 125714 - DNA, 25 bp, probe
atgtcatgcgaccctaggacttttt

SEQ ID NO: 125715 - DNA, 25 bp, probe
atgatgacgaggatattgactgggt

SEQ ID NO: 125716 - DNA, 25 bp, probe
atgatggccatagatttgccttgtg

SEQ ID NO: 125717 - DNA, 25 bp, probe
atgagaggccatcatttgcccagat

SEQ ID NO: 125718 - DNA, 25 bp, probe
atgagcaatgccagtgttgccctca

SEQ ID NO: 125719 - DNA, 25 bp, probe
atgagaagcacttggagagcctcaa

SEQ ID NO: 125720 - DNA, 25 bp, probe
atgagggactgttggcatgcagtgc

SEQ ID NO: 125721 - DNA, 25 bp, probe
atgagggattgctggcatgctgtac

SEQ ID NO: 125722 - DNA, 25 bp, probe
atgagtggtttttgagctatgagaa

SEQ ID NO: 125723 - DNA, 25 bp, probe
atgtctcgtggtaggactgtagaaa

SEQ ID NO: 125724 - DNA, 25 bp, probe
atgatcaagttgaaggatttgcaaa

SEQ ID NO: 125725 - DNA, 25 bp, probe
atgatcgaatctgggtgtttcaaag

SEQ ID NO: 125726 - DNA, 25 bp, probe
atgatggcagatttacagtcattca

SEQ ID NO: 125727 - DNA, 25 bp, probe
atgacgcacttttcatgtctgtctt

SEQ ID NO: 125728 - DNA, 25 bp, probe
atgagcacacaattatagcttgttt

SEQ ID NO: 125729 - DNA, 25 bp, probe
atgagatccaccaacatcttttatt

SEQ ID NO: 125730 - DNA, 25 bp, probe
atgagatccaccaacatcttttatt

SEQ ID NO: 125731 - DNA, 25 bp, probe
atgtttcatgacgactattcttgca

SEQ ID NO: 125732 - DNA, 25 bp, probe
atgtatctgaggcagctattccgca

SEQ ID NO: 125733 - DNA, 25 bp, probe
atgtagctggggcattttccatttc

SEQ ID NO: 125734 - DNA, 25 bp, probe
atgtaagggggtacagtgcagtttt

SEQ ID NO: 125735 - DNA, 25 bp, probe
atgggaagggtctcctatttattca

SEQ ID NO: 125736 - DNA, 25 bp, probe
agttgggaagcctccttttgaggca

SEQ ID NO: 125737 - DNA, 25 bp, probe
atgtcttggaaccgggctatgttga

SEQ ID NO: 125738 - DNA, 25 bp, probe
atgtgtccaaatcggggattggtga

SEQ ID NO: 125739 - DNA, 25 bp, probe
atggtcccctggcagaaggaggtgg

SEQ ID NO: 125740 - DNA, 25 bp, probe
atgaccccgctcttaaagatgagtt

SEQ ID NO: 125741 - DNA, 25 bp, probe
atgtcaccactccagatagaaaggt

SEQ ID NO: 125742 - DNA, 25 bp, probe
atgtcactgactcagatgcagggtc

SEQ ID NO: 125743 - DNA, 25 bp, probe
atgttgcagatccgcaggcagaagc

SEQ ID NO: 125744 - DNA, 25 bp, probe
atgagacacatccacagatcaggcc

SEQ ID NO: 125745 - DNA, 25 bp, probe
atgagaacatcgtgatcgccgagga

SEQ ID NO: 125746 - DNA, 25 bp, probe
atgagaacatggtcttggccggagc

SEQ ID NO: 125747 - DNA, 25 bp, probe
atgagaaaggatctactcagagatg

SEQ ID NO: 125748 - DNA, 25 bp, probe
atgagcacataggactctagacggc

SEQ ID NO: 125749 - DNA, 25 bp, probe
atgagcacataggactctagacggc

SEQ ID NO: 125750 - DNA, 25 bp, probe
atgagcaacatgcagatctacagcg

SEQ ID NO: 125751 - DNA, 25 bp, probe
atgaccacagtccatgccatcactg

SEQ ID NO: 125752 - DNA, 25 bp, probe
atgatgcgctcagtgccatgcgttc

SEQ ID NO: 125753 - DNA, 25 bp, probe
atgatgtcatcaggctccagttatt

SEQ ID NO: 125754 - DNA, 25 bp, probe
atgatgtctgacctccttatatatg

SEQ ID NO: 125755 - DNA, 25 bp, probe
atgatgtctgacctccttatatatg

SEQ ID NO: 125756 - DNA, 25 bp, probe
atgatatctgcattccacttaagga

SEQ ID NO: 125757 - DNA, 25 bp, probe
atgttgcagcaattcactgtaaagc

SEQ ID NO: 125758 - DNA, 25 bp, probe
atgatgctggaaatgctctgtacaa

SEQ ID NO: 125759 - DNA, 25 bp, probe
atgatcatgtaatatctgtgctcta

SEQ ID NO: 125760 - DNA, 25 bp, probe
atgataaccaagaatgtctccattg

SEQ ID NO: 125761 - DNA, 25 bp, probe
atgatgaagtcacagagctccaagg

SEQ ID NO: 125762 - DNA, 25 bp, probe
atgagtatgctctaaaagaatatgg

SEQ ID NO: 125763 - DNA, 25 bp, probe
atgagttccactgccagatttatgg

SEQ ID NO: 125764 - DNA, 25 bp, probe
atgagtatatcatttcctgtctttg

SEQ ID NO: 125765 - DNA, 25 bp, probe
atgagtacacatctccagctattca

SEQ ID NO: 125766 - DNA, 25 bp, probe
atgagttatcatcttagctgtgtta

SEQ ID NO: 125767 - DNA, 25 bp, probe
atgagttatcatcttagctgtgtta

SEQ ID NO: 125768 - DNA, 25 bp, probe
atgagtttcacagtgtgattttgat

SEQ ID NO: 125769 - DNA, 25 bp, probe
atgagctgtctgtcatttacctact

SEQ ID NO: 125770 - DNA, 25 bp, probe
agacgtcgtcaattaagtcccaatt

SEQ ID NO: 125771 - DNA, 25 bp, probe
atgaggttgtaaatgaagatccaga

SEQ ID NO: 125772 - DNA, 25 bp, probe
atgacctcatgctcgtgaagctcaa

SEQ ID NO: 125773 - DNA, 25 bp, probe
atgaccacaggacatgcaaccagag

SEQ ID NO: 125774 - DNA, 25 bp, probe
atgatccaaacacctagtcaataca

SEQ ID NO: 125775 - DNA, 25 bp, probe
atgatcacagagccatcctaacaaa

SEQ ID NO: 125776 - DNA, 25 bp, probe
atgatgctgagacgctgaacaacat

SEQ ID NO: 125777 - DNA, 25 bp, probe
atgtatcagatgctgagacacatgt

SEQ ID NO: 125778 - DNA, 25 bp, probe
atgatatgcacgctgaatcctgcta

SEQ ID NO: 125779 - DNA, 25 bp, probe
atgatgagacagaatgtattgtata

SEQ ID NO: 125780 - DNA, 25 bp, probe
atgagatgatcgaatctgggtgttt

SEQ ID NO: 125781 - DNA, 25 bp, probe
atgagagggagaccggcatgctttg

SEQ ID NO: 125782 - DNA, 25 bp, probe
aggagggtaggtctgcattataact

SEQ ID NO: 125783 - DNA, 25 bp, probe
atgagtggctgttggttggcttgaa

SEQ ID NO: 125784 - DNA, 25 bp, probe
atgagatgcgcctggttattgagaa

SEQ ID NO: 125785 - DNA, 25 bp, probe
atgagatgctaactagtttggcaca

SEQ ID NO: 125786 - DNA, 25 bp, probe
atgatgatgatacaaattttgaaga

SEQ ID NO: 125787 - DNA, 25 bp, probe
atgagtcaagcagaattgttcagaa

SEQ ID NO: 125788 - DNA, 25 bp, probe
atgagtcaagcagaattgttcagaa

SEQ ID NO: 125789 - DNA, 25 bp, probe
atgagctgccaagtctattttaaag

SEQ ID NO: 125790 - DNA, 25 bp, probe
atgatatcaaagactcattgcttaa

SEQ ID NO: 125791 - DNA, 25 bp, probe
atgttcaaactccatctgcaaaaga

SEQ ID NO: 125792 - DNA, 25 bp, probe
atgttcaaactccatctgcaaaaga

SEQ ID NO: 125793 - DNA, 25 bp, probe
atgtcacaaactgtagcacaaataa

SEQ ID NO: 125794 - DNA, 25 bp, probe
agtccataagctttacccactaact

SEQ ID NO: 125795 - DNA, 25 bp, probe
agtctccaagtgtttaccactttct

SEQ ID NO: 125796 - DNA, 25 bp, probe
atgtgtcaccaaaatttcccttgcc

SEQ ID NO: 125797 - DNA, 25 bp, probe
acctaacgaagtatccttcagcctg

SEQ ID NO: 125798 - DNA, 25 bp, probe
atgggaaaaagtattcttccattga

SEQ ID NO: 125799 - DNA, 25 bp, probe
atgggaacattactgtcttcccctc

SEQ ID NO: 125800 - DNA, 25 bp, probe
atgttaaatacattgtttctctatt

SEQ ID NO: 125801 - DNA, 25 bp, probe
atgataaaaagcttgtacctccttt

SEQ ID NO: 125802 - DNA, 25 bp, probe
agtaaagaacagaaacgccgaatat

SEQ ID NO: 125803 - DNA, 25 bp, probe
agttcaagtccgacaacaccgtgtc

SEQ ID NO: 125804 - DNA, 25 bp, probe
agttcaagtccgacaacaccgtgtc

SEQ ID NO: 125805 - DNA, 25 bp, probe
agtcccagacacctagacacggacc

SEQ ID NO: 125806 - DNA, 25 bp, probe
atgagggagaccccgacagaggacg

SEQ ID NO: 125807 - DNA, 25 bp, probe
atgaggtggacacacgaccagcctc

SEQ ID NO: 125808 - DNA, 25 bp, probe
atgggggacctatgcagaagctata

SEQ ID NO: 125809 - DNA, 25 bp, probe
atgaggcatgggctaaggatttgaa

SEQ ID NO: 125810 - DNA, 25 bp, probe
atgttcggggtgacactgtgggaaa

SEQ ID NO: 125811 - DNA, 25 bp, probe
atgtgccgctggctgaactttgggt

SEQ ID NO: 125812 - DNA, 25 bp, probe
atgtgccgctggctgaactttgggt

SEQ ID NO: 125813 - DNA, 25 bp, probe
aggctggtcaggaaactcgggtctg

SEQ ID NO: 125814 - DNA, 25 bp, probe
acctggtaattatcctcaagttgtg

SEQ ID NO: 125815 - DNA, 25 bp, probe
acctggtaattatcctcaagttgtg

SEQ ID NO: 125816 - DNA, 25 bp, probe
agtgggtttacatactcaactcctg

SEQ ID NO: 125817 - DNA, 25 bp, probe
atggaggatttagtacccaaatcgt

SEQ ID NO: 125818 - DNA, 25 bp, probe
atgggccatttctcagctataaatt

SEQ ID NO: 125819 - DNA, 25 bp, probe
atgtagtttcttcagttcaatgttc

SEQ ID NO: 125820 - DNA, 25 bp, probe
atgtagtttcttcagttcaatgttc

SEQ ID NO: 125821 - DNA, 25 bp, probe
atgatggtttttcacctcactttct

SEQ ID NO: 125822 - DNA, 25 bp, probe
atgatgtgtttgggatactgcttat

SEQ ID NO: 125823 - DNA, 25 bp, probe
atgatgttattatatatgcttatga

SEQ ID NO: 125824 - DNA, 25 bp, probe
atgatgctgtcaagcaatattgttt

SEQ ID NO: 125825 - DNA, 25 bp, probe
atgatcctgataggcaaggtttaca

SEQ ID NO: 125826 - DNA, 25 bp, probe
atgatcttaagccaggtaattatga

SEQ ID NO: 125827 - DNA, 25 bp, probe
atgatttcaaggcgaagctggcggc

SEQ ID NO: 125828 - DNA, 25 bp, probe
atgagttgggtgccatcaagctggc

SEQ ID NO: 125829 - DNA, 25 bp, probe
atgagattgtggacaccacatttga

SEQ ID NO: 125830 - DNA, 25 bp, probe
atgagatggggaacaagcttgtgca

SEQ ID NO: 125831 - DNA, 25 bp, probe
atgagacggtgctcactgtgtggtc

SEQ ID NO: 125832 - DNA, 25 bp, probe
atgagagggtgtatctgtggggcac

SEQ ID NO: 125833 - DNA, 25 bp, probe
atgaggggcttcacgagaggccaca

SEQ ID NO: 125834 - DNA, 25 bp, probe
atgtgggtttccatggtggctatca

SEQ ID NO: 125835 - DNA, 25 bp, probe
atgtgggattattgaatgggtgaac

SEQ ID NO: 125836 - DNA, 25 bp, probe
atgggggtatggttttgtcactgcc

SEQ ID NO: 125837 - DNA, 25 bp, probe
atgatgggaaaggtattagatttac

SEQ ID NO: 125838 - DNA, 25 bp, probe
atggggagacacatttcgtcctccg

SEQ ID NO: 125839 - DNA, 25 bp, probe
atgaggtacaacctgttctgctttc

SEQ ID NO: 125840 - DNA, 25 bp, probe
atgagggaagagctctgtgtcttct

SEQ ID NO: 125841 - DNA, 25 bp, probe
atgaggtacgagctggatacccaag

SEQ ID NO: 125842 - DNA, 25 bp, probe
atgtggaattgaacgactacccaga

SEQ ID NO: 125843 - DNA, 25 bp, probe
atgggtcttattcagaccccagatc

SEQ ID NO: 125844 - DNA, 25 bp, probe
atgttttctacaaagacttacgtca

SEQ ID NO: 125845 - DNA, 25 bp, probe
atgttctttagctagagcctgtact

SEQ ID NO: 125846 - DNA, 25 bp, probe
atgtatagctatgtagcgctctgta

SEQ ID NO: 125847 - DNA, 25 bp, probe
atgttgacatactgatcctctactc

SEQ ID NO: 125848 - DNA, 25 bp, probe
atgatagaaacagactgcctgaatt

SEQ ID NO: 125849 - DNA, 25 bp, probe
atgtaggaagagttctcctgaggct

SEQ ID NO: 125850 - DNA, 25 bp, probe
atgttggaaatgtgcaaccactgct

SEQ ID NO: 125851 - DNA, 25 bp, probe
atgttgagaagatggccccttgtgc

SEQ ID NO: 125852 - DNA, 25 bp, probe
atgtttaatggcacctcatttggct

SEQ ID NO: 125853 - DNA, 25 bp, probe
atgtttaatggcacctcatttggct

SEQ ID NO: 125854 - DNA, 25 bp, probe
atgtttccaggcatgaccctggagc

SEQ ID NO: 125855 - DNA, 25 bp, probe
atgtttccaactagattccagagat

SEQ ID NO: 125856 - DNA, 25 bp, probe
atgtttccaactagattccagagat

SEQ ID NO: 125857 - DNA, 25 bp, probe
atgttactcaccaagaatccaagca

SEQ ID NO: 125858 - DNA, 25 bp, probe
atggttctgcagacaccaagccaac

SEQ ID NO: 125859 - DNA, 25 bp, probe
atgaggttgatgacccaagcctgcc

SEQ ID NO: 125860 - DNA, 25 bp, probe
atgaggaatgtggggcaagcctggg

SEQ ID NO: 125861 - DNA, 25 bp, probe
atgatggcagtggccgacatcacct

SEQ ID NO: 125862 - DNA, 25 bp, probe
atgatggcagggataacacacaatg

SEQ ID NO: 125863 - DNA, 25 bp, probe
atgttgtcattgatataaacctgtt

SEQ ID NO: 125864 - DNA, 25 bp, probe
atgatgtacaaactaaggactattt

SEQ ID NO: 125865 - DNA, 25 bp, probe
atgatgtctgcaaaggagggcctca

SEQ ID NO: 125866 - DNA, 25 bp, probe
atgtgccatcgaagatgccgacctc

SEQ ID NO: 125867 - DNA, 25 bp, probe
atgtgccatcgaagatgccgacctc

SEQ ID NO: 125868 - DNA, 25 bp, probe
atgatccagagaaactagacgcctt

SEQ ID NO: 125869 - DNA, 25 bp, probe
atgaggagctctagactaacgccac

SEQ ID NO: 125870 - DNA, 25 bp, probe
atgtaggtgctccactaatatccat

SEQ ID NO: 125871 - DNA, 25 bp, probe
atgtaggtgctccactaatatccat

SEQ ID NO: 125872 - DNA, 25 bp, probe
atgtcagggctttcaagcagagcac

SEQ ID NO: 125873 - DNA, 25 bp, probe
atgtggaggctatcaacaaagaatg

SEQ ID NO: 125874 - DNA, 25 bp, probe
atgtctgaacttgaaagccacagag

SEQ ID NO: 125875 - DNA, 25 bp, probe
atgttgttctgtcagttgccaaagg

SEQ ID NO: 125876 - DNA, 25 bp, probe
atgttcttgatgaccagtatgtcag

SEQ ID NO: 125877 - DNA, 25 bp, probe
atgagtgtctgtccagactcagtgg

SEQ ID NO: 125878 - DNA, 25 bp, probe
atgattactgtcaaaccagcatggt

SEQ ID NO: 125879 - DNA, 25 bp, probe
atgattcacatgctaaagccaggat

SEQ ID NO: 125880 - DNA, 25 bp, probe
atgatatgcgatttgacagaagcgg

SEQ ID NO: 125881 - DNA, 25 bp, probe
atgatagcgaatggccagaagaagc

SEQ ID NO: 125882 - DNA, 25 bp, probe
atgtagaactcagcagttgacatcc

SEQ ID NO: 125883 - DNA, 25 bp, probe
atgtagtgactgcggatgtttacac

SEQ ID NO: 125884 - DNA, 25 bp, probe
atgtcagagcagttgggttttaccc

SEQ ID NO: 125885 - DNA, 25 bp, probe
atgtcacatgcacatgggtcctttg

SEQ ID NO: 125886 - DNA, 25 bp, probe
agtagctcttcagggacacttaggg

SEQ ID NO: 125887 - DNA, 25 bp, probe
agtcgtgttcagggaattgggattc

SEQ ID NO: 125888 - DNA, 25 bp, probe
atgtttgtctcctgaagtttgtctt

SEQ ID NO: 125889 - DNA, 25 bp, probe
atgatattggtctttgaatttggta

SEQ ID NO: 125890 - DNA, 25 bp, probe
atgtttggttgtaaatgctcgtgtg

SEQ ID NO: 125891 - DNA, 25 bp, probe
atgtattgtttgagcaacttggatg

SEQ ID NO: 125892 - DNA, 25 bp, probe
atgtacgttgctatccaggctgtgc

SEQ ID NO: 125893 - DNA, 25 bp, probe
atgtttgtgtgctttaaaattctta

SEQ ID NO: 125894 - DNA, 25 bp, probe
atgttgttgataaattaaatgactt

SEQ ID NO: 125895 - DNA, 25 bp, probe
atgtactgtgtaaataaaacctgca

SEQ ID NO: 125896 - DNA, 25 bp, probe
aaactagtgacatagccgacgtgcc

SEQ ID NO: 125897 - DNA, 25 bp, probe
aggcacggtcaaaagggcaagtgcc

SEQ ID NO: 125898 - DNA, 25 bp, probe
agctcaggggaagcggaaagccttt

SEQ ID NO: 125899 - DNA, 25 bp, probe
agtacatcagacaggggaaactttc

SEQ ID NO: 125900 - DNA, 25 bp, probe
atgtcacttgtgatgtgggaaacta

SEQ ID NO: 125901 - DNA, 25 bp, probe
atgtcacttatttgcttagtttccg

SEQ ID NO: 125902 - DNA, 25 bp, probe
cttccttttagcctagttcatccaa

SEQ ID NO: 125903 - DNA, 25 bp, probe
atgtacttttaccgcaggataccaa

SEQ ID NO: 125904 - DNA, 25 bp, probe
atgtgtcttttgaagggctatacca

SEQ ID NO: 125905 - DNA, 25 bp, probe
atgatctcattaataagaagattac

SEQ ID NO: 125906 - DNA, 25 bp, probe
atgttcagttatccatgcaagaaac

SEQ ID NO: 125907 - DNA, 25 bp, probe
atgtatacttacggcaacaagcagc

SEQ ID NO: 125908 - DNA, 25 bp, probe
atgtttcatttacctacaagctccc

SEQ ID NO: 125909 - DNA, 25 bp, probe
atgtttcttgttggctgtcatggct

SEQ ID NO: 125910 - DNA, 25 bp, probe
atgttcatttgtatctggatctctg

SEQ ID NO: 125911 - DNA, 25 bp, probe
atgttcacattctttctaaccatgg

SEQ ID NO: 125912 - DNA, 25 bp, probe
atgattcaaattatctcgcaccggg

SEQ ID NO: 125913 - DNA, 25 bp, probe
atgatgtctgaagttattgctgcac

SEQ ID NO: 125914 - DNA, 25 bp, probe
atgatgtctgaagttattgctgcac

SEQ ID NO: 125915 - DNA, 25 bp, probe
atgattagacgttgactgcatctcc

SEQ ID NO: 125916 - DNA, 25 bp, probe
atgatcactacgtgaccatctgcca

SEQ ID NO: 125917 - DNA, 25 bp, probe
atgatctgcttctggatctcactgt

SEQ ID NO: 125918 - DNA, 25 bp, probe
atgattcttcttggtctactgtgaa

SEQ ID NO: 125919 - DNA, 25 bp, probe
atgttcatcctatgtctccagatac

SEQ ID NO: 125920 - DNA, 25 bp, probe
atgtctatgccctgtacattgtagc

SEQ ID NO: 125921 - DNA, 25 bp, probe
atgtcttctgtctttggtattatag

SEQ ID NO: 125922 - DNA, 25 bp, probe
atgatttgcagttattcgtaatgtc

SEQ ID NO: 125923 - DNA, 25 bp, probe
atgtcctaggtttcgtagatgcccc

SEQ ID NO: 125924 - DNA, 25 bp, probe
atgtcctttgtatctctaagttaca

SEQ ID NO: 125925 - DNA, 25 bp, probe
atgttttttatacttcaaatgtcat

SEQ ID NO: 125926 - DNA, 25 bp, probe
atgttgtctttatcgactttgtaaa

SEQ ID NO: 125927 - DNA, 25 bp, probe
atgttgtctttatcgactttgtaaa

SEQ ID NO: 125928 - DNA, 25 bp, probe
agttaatagctatcttccttaaaga

SEQ ID NO: 125929 - DNA, 25 bp, probe
atgttacattctttgttacttaaat

SEQ ID NO: 125930 - DNA, 25 bp, probe
atgttgactttgtttcatactgcca

SEQ ID NO: 125931 - DNA, 25 bp, probe
atgtttcttggagacatcccacaat

SEQ ID NO: 125932 - DNA, 25 bp, probe
atgatttttgtgaccctgtccatca

SEQ ID NO: 125933 - DNA, 25 bp, probe
atgatgttattgtttccttgccttg

SEQ ID NO: 125934 - DNA, 25 bp, probe
atgtgtgtgacgtttcgggtttgtt

SEQ ID NO: 125935 - DNA, 25 bp, probe
atgttgatgactcttcaaggattag

SEQ ID NO: 125936 - DNA, 25 bp, probe
atgttggacttctgcaatagatgac

SEQ ID NO: 125937 - DNA, 25 bp, probe
atgtctaggtacttcaggggcactt

SEQ ID NO: 125938 - DNA, 25 bp, probe
atgtttgacttcgtattgaccctta

SEQ ID NO: 125939 - DNA, 25 bp, probe
atgtttactcatgtatttccactac

SEQ ID NO: 125940 - DNA, 25 bp, probe
atgtttcacgcagtccattttcatt

SEQ ID NO: 125941 - DNA, 25 bp, probe
atgttgcttccagacatacttctct

SEQ ID NO: 125942 - DNA, 25 bp, probe
atgttgcttccaaggctagtggtaa

SEQ ID NO: 125943 - DNA, 25 bp, probe
atgttttcaaacctagtgctataaa

SEQ ID NO: 125944 - DNA, 25 bp, probe
atgttgctgacaaacttatcccaaa

SEQ ID NO: 125945 - DNA, 25 bp, probe
atgtagcatcacaaactcgaaccaa

SEQ ID NO: 125946 - DNA, 25 bp, probe
atgtcagtccaatctccaatgagaa

SEQ ID NO: 125947 - DNA, 25 bp, probe
atggtgtccatatcttccatagctc

SEQ ID NO: 125948 - DNA, 25 bp, probe
atgttgtcatcttcaattacataac

SEQ ID NO: 125949 - DNA, 25 bp, probe
atgatcttcattccctgtatctata

SEQ ID NO: 125950 - DNA, 25 bp, probe
atggtcatcagccaactgctgcatt

SEQ ID NO: 125951 - DNA, 25 bp, probe
atgaggctcactcattgcagatccc

SEQ ID NO: 125952 - DNA, 25 bp, probe
atgaggctcactcattgcagatccc

SEQ ID NO: 125953 - DNA, 25 bp, probe
atgatggacacacaatggatggaca

SEQ ID NO: 125954 - DNA, 25 bp, probe
atgatggacacacaatggatggaca

SEQ ID NO: 125955 - DNA, 25 bp, probe
atgatggagctgaccaacgtgcagc

SEQ ID NO: 125956 - DNA, 25 bp, probe
atgatggagctatgcctcagtggca

SEQ ID NO: 125957 - DNA, 25 bp, probe
atgatggaaatgccgccgtggtgtc

SEQ ID NO: 125958 - DNA, 25 bp, probe
atgtttgagatgctcacggggtccc

SEQ ID NO: 125959 - DNA, 25 bp, probe
agttcgtcatggatggcggggtcct

SEQ ID NO: 125960 - DNA, 25 bp, probe
atgttaattgagagccctgggtcct

SEQ ID NO: 125961 - DNA, 25 bp, probe
atgttgactggtgggctcttggagt

SEQ ID NO: 125962 - DNA, 25 bp, probe
atgtattgcgggcgctctagaggat

SEQ ID NO: 125963 - DNA, 25 bp, probe
atgtcttagaggcagcaccaaccac

SEQ ID NO: 125964 - DNA, 25 bp, probe
atgatccggaagcagcttacaccac

SEQ ID NO: 125965 - DNA, 25 bp, probe
atgatacggaacagcatttccctgc

SEQ ID NO: 125966 - DNA, 25 bp, probe
atgatgagggattgctggcatgctg

SEQ ID NO: 125967 - DNA, 25 bp, probe
atgatcacaggaatgaatgcatgct

SEQ ID NO: 125968 - DNA, 25 bp, probe
atgtcacagctaaggagcatgccca

SEQ ID NO: 125969 - DNA, 25 bp, probe
atgttgcactgaagacagaccctgt

SEQ ID NO: 125970 - DNA, 25 bp, probe
atgttcactgcagaggaggttgctc

SEQ ID NO: 125971 - DNA, 25 bp, probe
atgttcactgcagaggaggttgctc

SEQ ID NO: 125972 - DNA, 25 bp, probe
atgttactgtctgggagcagcttca

SEQ ID NO: 125973 - DNA, 25 bp, probe
atgtctcagcatccaggagggcttc

SEQ ID NO: 125974 - DNA, 25 bp, probe
aggcttagtcagcagggctctgcca

SEQ ID NO: 125975 - DNA, 25 bp, probe
aggcttagtcagcagggctctgcca

SEQ ID NO: 125976 - DNA, 25 bp, probe
atgattctagtcaagacggcatctg

SEQ ID NO: 125977 - DNA, 25 bp, probe
atgatgttaacaactcagccatctg

SEQ ID NO: 125978 - DNA, 25 bp, probe
atgataacaacagcagcaccctgga

SEQ ID NO: 125979 - DNA, 25 bp, probe
atgggatgcaaggccgaagcctgga

SEQ ID NO: 125980 - DNA, 25 bp, probe
atgtgccatcaagtcactaagtcgc

SEQ ID NO: 125981 - DNA, 25 bp, probe
atgatgcctccattcctagagggct

SEQ ID NO: 125982 - DNA, 25 bp, probe
atgatcctgctcaattccagtatgt

SEQ ID NO: 125983 - DNA, 25 bp, probe
atgtcctgcttgatgcacacatgaa

SEQ ID NO: 125984 - DNA, 25 bp, probe
atgatgcctttgatcgatgctgctc

SEQ ID NO: 125985 - DNA, 25 bp, probe
atgatcgttatgctgctgtctgtca

SEQ ID NO: 125986 - DNA, 25 bp, probe
atgatcctggtcctgctgatcaatt

SEQ ID NO: 125987 - DNA, 25 bp, probe
atgatcacatggaaggcggcgcaga

SEQ ID NO: 125988 - DNA, 25 bp, probe
atgatcatgcgggagtgctggcatg

SEQ ID NO: 125989 - DNA, 25 bp, probe
atgatctgggggacgtatttgaagg

SEQ ID NO: 125990 - DNA, 25 bp, probe
atgtcttgggagagtatcttgctgg

SEQ ID NO: 125991 - DNA, 25 bp, probe
atgtttgggtgccagagatctgatg

SEQ ID NO: 125992 - DNA, 25 bp, probe
atgttgtctgcggcaaattgtgctt

SEQ ID NO: 125993 - DNA, 25 bp, probe
atgtgatgtctggagcataggatgc

SEQ ID NO: 125994 - DNA, 25 bp, probe
atgttgatccgaataggaggatgtc

SEQ ID NO: 125995 - DNA, 25 bp, probe
atgtggtcaggactgagcaggggac

SEQ ID NO: 125996 - DNA, 25 bp, probe
gacagcagcgacagcagtgacagca

SEQ ID NO: 125997 - DNA, 25 bp, probe
atgttacaacgggcaggagcctcct

SEQ ID NO: 125998 - DNA, 25 bp, probe
atgttagaactgaggtgggctagtg

SEQ ID NO: 125999 - DNA, 25 bp, probe
atggtgtacttgtggttggctatgg

SEQ ID NO: 126000 - DNA, 25 bp, probe
atggtgtacttgtggttggctatgg

SEQ ID NO: 126001 - DNA, 25 bp, probe
aggtattttagtcacttgattgttc

SEQ ID NO: 126002 - DNA, 25 bp, probe
atgtgttctttacaaatatttgctt

SEQ ID NO: 126003 - DNA, 25 bp, probe
atgattctccgaagaaaagctttgc

SEQ ID NO: 126004 - DNA, 25 bp, probe
atgattctccgaagaaaagctttgc

SEQ ID NO: 126005 - DNA, 25 bp, probe
atgatgcttcccaagaaatagttga

SEQ ID NO: 126006 - DNA, 25 bp, probe
atgtccatccacagacgaatgtata

SEQ ID NO: 126007 - DNA, 25 bp, probe
atgttcattaagttctgaatgttaa

SEQ ID NO: 126008 - DNA, 25 bp, probe
atgattttgtaattcttatgactaa

SEQ ID NO: 126009 - DNA, 25 bp, probe
atgatcttatggaactctttagaat

SEQ ID NO: 126010 - DNA, 25 bp, probe
atgatgttatcagactcattaaaca

SEQ ID NO: 126011 - DNA, 25 bp, probe
atgattgatgatgaagccttaaaag

SEQ ID NO: 126012 - DNA, 25 bp, probe
atgtatcagtgtggagccttacata

SEQ ID NO: 126013 - DNA, 25 bp, probe
atgtagagtggccaagcttcctaag

SEQ ID NO: 126014 - DNA, 25 bp, probe
atgttagctgtcccactatgcttaa

SEQ ID NO: 126015 - DNA, 25 bp, probe
atgttcactgtgccataatgctgct

SEQ ID NO: 126016 - DNA, 25 bp, probe
atgattcgcaagcctgatactctcc

SEQ ID NO: 126017 - DNA, 25 bp, probe
atgatctctgaagctgggctgtcct

SEQ ID NO: 126018 - DNA, 25 bp, probe
atgatctctgaagctgggctgtcct

SEQ ID NO: 126019 - DNA, 25 bp, probe
atgtactgcaaagtcgccagtcact

SEQ ID NO: 126020 - DNA, 25 bp, probe
atgtactgcaaagtcgccagtcact

SEQ ID NO: 126021 - DNA, 25 bp, probe
atgttctgcaatatcctgcagctca

SEQ ID NO: 126022 - DNA, 25 bp, probe
atgtctatggattctctgtcagcct

SEQ ID NO: 126023 - DNA, 25 bp, probe
atgtctatggattctctgtcagcct

SEQ ID NO: 126024 - DNA, 25 bp, probe
atgtcaatggaatcatgtactctgt

SEQ ID NO: 126025 - DNA, 25 bp, probe
atgtcaaggtcacaggcatccatgt

SEQ ID NO: 126026 - DNA, 25 bp, probe
atgtcaaggtcacaggcatccatgt

SEQ ID NO: 126027 - DNA, 25 bp, probe
atgtcaggattaccagattacatga

SEQ ID NO: 126028 - DNA, 25 bp, probe
atgtcaggataaactgattgtgcag

SEQ ID NO: 126029 - DNA, 25 bp, probe
atgtcaggataaactgattgtgcag

SEQ ID NO: 126030 - DNA, 25 bp, probe
atgtcagagctaccagtgtgctgct

SEQ ID NO: 126031 - DNA, 25 bp, probe
atgtcagagtgagcagtgagggcca

SEQ ID NO: 126032 - DNA, 25 bp, probe
atgatagagaaccctgcagtgtcca

SEQ ID NO: 126033 - DNA, 25 bp, probe
atgatcgatgaagacatgactgctc

SEQ ID NO: 126034 - DNA, 25 bp, probe
atgtcgctgtcaggatcatgccctg

SEQ ID NO: 126035 - DNA, 25 bp, probe
atgtcgctgtcaggatcatgccctg

SEQ ID NO: 126036 - DNA, 25 bp, probe
atgtgcgcattttgcattccatatg

SEQ ID NO: 126037 - DNA, 25 bp, probe
atgtcacaatgaccaatcccagctc

SEQ ID NO: 126038 - DNA, 25 bp, probe
atgtaacaaggatctccagtccaca

SEQ ID NO: 126039 - DNA, 25 bp, probe
atgtacaaatctttcatccatacct

SEQ ID NO: 126040 - DNA, 25 bp, probe
atgtactacactttatccattattc

SEQ ID NO: 126041 - DNA, 25 bp, probe
atgtcacaacaataacctccatagc

SEQ ID NO: 126042 - DNA, 25 bp, probe
atgttcaaattcaaactcatccagt

SEQ ID NO: 126043 - DNA, 25 bp, probe
atgttgcaaatatcaggctcccagg

SEQ ID NO: 126044 - DNA, 25 bp, probe
atgtctgctaaaacagccatcttca

SEQ ID NO: 126045 - DNA, 25 bp, probe
atgatctggattaaatgccatttat

SEQ ID NO: 126046 - DNA, 25 bp, probe
atgtctgtcttatcatgcaatggaa

SEQ ID NO: 126047 - DNA, 25 bp, probe
atgtcttatttttgaaccatgcata

SEQ ID NO: 126048 - DNA, 25 bp, probe
atgtttatattttaagtcagctgtc

SEQ ID NO: 126049 - DNA, 25 bp, probe
atgtatataatcattctatttgctt

SEQ ID NO: 126050 - DNA, 25 bp, probe
atgtcatgtatatcaactattctgg

SEQ ID NO: 126051 - DNA, 25 bp, probe
atgatctttatggctactttcttac

SEQ ID NO: 126052 - DNA, 25 bp, probe
atgatctacttggctgccttcaatt

SEQ ID NO: 126053 - DNA, 25 bp, probe
atgattattcagtgcgtatatatct

SEQ ID NO: 126054 - DNA, 25 bp, probe
atgttgactgcacaggtaatacaac

SEQ ID NO: 126055 - DNA, 25 bp, probe
atgtctgagtgacttggataaaaca

SEQ ID NO: 126056 - DNA, 25 bp, probe
atgttgagaatcatggacaaaacct

SEQ ID NO: 126057 - DNA, 25 bp, probe
atgtttcatatgcagcgacaaagaa

SEQ ID NO: 126058 - DNA, 25 bp, probe
atgttctgcatgtaagaaacacaat

SEQ ID NO: 126059 - DNA, 25 bp, probe
atgattccaaagtaacatgtaattg

SEQ ID NO: 126060 - DNA, 25 bp, probe
atgtctctccaacaacgtagtattg

SEQ ID NO: 126061 - DNA, 25 bp, probe
atgtttgcggattacacgttgaaag

SEQ ID NO: 126062 - DNA, 25 bp, probe
atgtttgctcagtgcaaggtggaga

SEQ ID NO: 126063 - DNA, 25 bp, probe
atgatcttgccattccgagtgaaga

SEQ ID NO: 126064 - DNA, 25 bp, probe
atgatcttgccattccgagtgaaga

SEQ ID NO: 126065 - DNA, 25 bp, probe
atgtcttcctgcccggaaagcagtt

SEQ ID NO: 126066 - DNA, 25 bp, probe
atgtcttcctgcaacaggtgtgaca

SEQ ID NO: 126067 - DNA, 25 bp, probe
atgttagcctggtcaagatgctgac

SEQ ID NO: 126068 - DNA, 25 bp, probe
atgtgtccttagtcaactgtaccac

SEQ ID NO: 126069 - DNA, 25 bp, probe
atgttgcacgattaaaattactcac

SEQ ID NO: 126070 - DNA, 25 bp, probe
atgattacgtcatccagactactcg

SEQ ID NO: 126071 - DNA, 25 bp, probe
atgttacagtccacagatctgattc

SEQ ID NO: 126072 - DNA, 25 bp, probe
atgtttcatgaccacccattgattg

SEQ ID NO: 126073 - DNA, 25 bp, probe
atgttctattcatcttttgaatgtt

SEQ ID NO: 126074 - DNA, 25 bp, probe
atgttgctgaactctttgtatatgc

SEQ ID NO: 126075 - DNA, 25 bp, probe
atgtttgggcaaattctgttagcaa

SEQ ID NO: 126076 - DNA, 25 bp, probe
atgtttgggcaaattctgttagcaa

SEQ ID NO: 126077 - DNA, 25 bp, probe
atgtttccctatgtgtgtgtggagg

SEQ ID NO: 126078 - DNA, 25 bp, probe
atgttttcctattcatcaggctgta

SEQ ID NO: 126079 - DNA, 25 bp, probe
atgttttcctattcatcaggctgta

SEQ ID NO: 126080 - DNA, 25 bp, probe
atgtatcctcccgattattgcgtat

SEQ ID NO: 126081 - DNA, 25 bp, probe
atgtttatacaggatctttcagatc

SEQ ID NO: 126082 - DNA, 25 bp, probe
atgtttaacccaggtgaagatcttt

SEQ ID NO: 126083 - DNA, 25 bp, probe
atgtgttaaatttagtgcaagcttt

SEQ ID NO: 126084 - DNA, 25 bp, probe
atggttttattctgcttggcttctc

SEQ ID NO: 126085 - DNA, 25 bp, probe
atgataatgttatgcacgttggctt

SEQ ID NO: 126086 - DNA, 25 bp, probe
atgattagttgatgtatgtttttta

SEQ ID NO: 126087 - DNA, 25 bp, probe
atgtcacgttatcttcattttggga

SEQ ID NO: 126088 - DNA, 25 bp, probe
atgtcacgtttccttctgatttgga

SEQ ID NO: 126089 - DNA, 25 bp, probe
atgtcgcgtcctggtttaaggatgt

SEQ ID NO: 126090 - DNA, 25 bp, probe
atggggcccttttcaaaggagatct

SEQ ID NO: 126091 - DNA, 25 bp, probe
atgggtcctatgggaacagagggtc

SEQ ID NO: 126092 - DNA, 25 bp, probe
atgggtcgagagcggacgagggcac

SEQ ID NO: 126093 - DNA, 25 bp, probe
atgggtggatcaggggacgggatgg

SEQ ID NO: 126094 - DNA, 25 bp, probe
atggggtgggggcaataggaggatg

SEQ ID NO: 126095 - DNA, 25 bp, probe
atgtaggggaggagacatttgtgtg

SEQ ID NO: 126096 - DNA, 25 bp, probe
atgtagcagggggaagtatttaatt

SEQ ID NO: 126097 - DNA, 25 bp, probe
atgtagcagggggaagtatttaatt

SEQ ID NO: 126098 - DNA, 25 bp, probe
atgtatcaagttgaagcaagttcag

SEQ ID NO: 126099 - DNA, 25 bp, probe
atgtgcataattaaaaccagcttca

SEQ ID NO: 126100 - DNA, 25 bp, probe
atgtctatcaggaaagcaaagcttc

SEQ ID NO: 126101 - DNA, 25 bp, probe
atgtctatcaggaaagcaaagcttc

SEQ ID NO: 126102 - DNA, 25 bp, probe
atgtccaaggattggccgcttgtcg

SEQ ID NO: 126103 - DNA, 25 bp, probe
atgtcaccggatcctgggtggtctg

SEQ ID NO: 126104 - DNA, 25 bp, probe
atgtcccggaggggactgagctccc

SEQ ID NO: 126105 - DNA, 25 bp, probe
atgttccagcaaaaggagtggctcc

SEQ ID NO: 126106 - DNA, 25 bp, probe
atgtcaccaccaaaggtttgcaccc

SEQ ID NO: 126107 - DNA, 25 bp, probe
atgtcaccatcagaaggctgtttgt

SEQ ID NO: 126108 - DNA, 25 bp, probe
atgtcaccagcgcacacgctgattt

SEQ ID NO: 126109 - DNA, 25 bp, probe
atgtacccagcctaccagagatgga

SEQ ID NO: 126110 - DNA, 25 bp, probe
atgtacacagcgaaccacaggatgg

SEQ ID NO: 126111 - DNA, 25 bp, probe
atgtacttgttctacctggattgtc

SEQ ID NO: 126112 - DNA, 25 bp, probe
atgtttccgtgctacactttgtgtc

SEQ ID NO: 126113 - DNA, 25 bp, probe
atgtttccgtgctacactttgtgtc

SEQ ID NO: 126114 - DNA, 25 bp, probe
atgttttccatatactttgtcttgc

SEQ ID NO: 126115 - DNA, 25 bp, probe
atgtttgttgtatacttccttatgc

SEQ ID NO: 126116 - DNA, 25 bp, probe
atgtatttcctatcaccatactttt

SEQ ID NO: 126117 - DNA, 25 bp, probe
agtgtaaccatcaccctaataatat

SEQ ID NO: 126118 - DNA, 25 bp, probe
atgttagaccaccctcacataatca

SEQ ID NO: 126119 - DNA, 25 bp, probe
atgtgtagacgcactctcaaaaact

SEQ ID NO: 126120 - DNA, 25 bp, probe
atgttatgactgatcactccattga

SEQ ID NO: 126121 - DNA, 25 bp, probe
atgggcataggtgaccgctgtgaga

SEQ ID NO: 126122 - DNA, 25 bp, probe
atggctattattgatcccttgaaac

SEQ ID NO: 126123 - DNA, 25 bp, probe
atgttaacagatgatccatttgaac

SEQ ID NO: 126124 - DNA, 25 bp, probe
atgttaatctatgatccagccaaac

SEQ ID NO: 126125 - DNA, 25 bp, probe
atgttagtgattgatcctgacaagc

SEQ ID NO: 126126 - DNA, 25 bp, probe
atgattactgataatatcacaaccc

SEQ ID NO: 126127 - DNA, 25 bp, probe
atgtatacgtattgtgcctgagctc

SEQ ID NO: 126128 - DNA, 25 bp, probe
atgttactatttggccagctgctgc

SEQ ID NO: 126129 - DNA, 25 bp, probe
atgtgtaacaacagccgcttctgga

SEQ ID NO: 126130 - DNA, 25 bp, probe
atgtctaagaaatccagcttcataa

SEQ ID NO: 126131 - DNA, 25 bp, probe
atgtccagaacttcccgtatatgaa

SEQ ID NO: 126132 - DNA, 25 bp, probe
atgattgacaagtaccaggctttga

SEQ ID NO: 126133 - DNA, 25 bp, probe
atgttgacaagctctggttgcttat

SEQ ID NO: 126134 - DNA, 25 bp, probe
atgttgacggctttgtgattgattc

SEQ ID NO: 126135 - DNA, 25 bp, probe
atgttgacggctttgtgattgattc

SEQ ID NO: 126136 - DNA, 25 bp, probe
atgttggaggtatttgcattgttta

SEQ ID NO: 126137 - DNA, 25 bp, probe
atgttggacataattgagtttttaa

SEQ ID NO: 126138 - DNA, 25 bp, probe
atgtttgactattgtgatgactctt

SEQ ID NO: 126139 - DNA, 25 bp, probe
atgtagtagcatttgggacatctga

SEQ ID NO: 126140 - DNA, 25 bp, probe
atgtagtagcatttgggacatctga

SEQ ID NO: 126141 - DNA, 25 bp, probe
atgtactagtactgtgtactgtata

SEQ ID NO: 126142 - DNA, 25 bp, probe
atgttctcgataggccttttgatga

SEQ ID NO: 126143 - DNA, 25 bp, probe
atgttcgcgattatcttctatatct

SEQ ID NO: 126144 - DNA, 25 bp, probe
atgtgtctcagaatatttttgaggc

SEQ ID NO: 126145 - DNA, 25 bp, probe
atgtcttccatgtatcttttgaact

SEQ ID NO: 126146 - DNA, 25 bp, probe
atgtcttccagatttgctctgcatg

SEQ ID NO: 126147 - DNA, 25 bp, probe
atgttactcagaattttgctttgat

SEQ ID NO: 126148 - DNA, 25 bp, probe
atgttagcatcgactctttcttttt

SEQ ID NO: 126149 - DNA, 25 bp, probe
atgttagccatttcctgtctggttt

SEQ ID NO: 126150 - DNA, 25 bp, probe
atgttgacacatttcctggtgctcc

SEQ ID NO: 126151 - DNA, 25 bp, probe
atgttgaagaggactctgtgatccc

SEQ ID NO: 126152 - DNA, 25 bp, probe
atgttcatctgctgtcttgtgatta

SEQ ID NO: 126153 - DNA, 25 bp, probe
atgtagcttccacctcatggattgc

SEQ ID NO: 126154 - DNA, 25 bp, probe
atgtacagtcactgctagtgttcaa

SEQ ID NO: 126155 - DNA, 25 bp, probe
atgtatggtcactgggctgtgtcat

SEQ ID NO: 126156 - DNA, 25 bp, probe
atgtctggagctttggagtgttgat

SEQ ID NO: 126157 - DNA, 25 bp, probe
atgtatgatagtgtgcatgtggttg

SEQ ID NO: 126158 - DNA, 25 bp, probe
atgttgcgagatgacatgactgtct

SEQ ID NO: 126159 - DNA, 25 bp, probe
atgttctctacatgaactgctcatt

SEQ ID NO: 126160 - DNA, 25 bp, probe
atgtattctactcatgttgccattt

SEQ ID NO: 126161 - DNA, 25 bp, probe
atgtattctataccagtaatacttg

SEQ ID NO: 126162 - DNA, 25 bp, probe
atgtactgcaggcccagatagataa

SEQ ID NO: 126163 - DNA, 25 bp, probe
atgtatctgagtattgaatgataat

SEQ ID NO: 126164 - DNA, 25 bp, probe
atggtctctggcattgaagtagatg

SEQ ID NO: 126165 - DNA, 25 bp, probe
aggccttggcttgatggaagtgggc

SEQ ID NO: 126166 - DNA, 25 bp, probe
aggagtttgttcaggaagtggacac

SEQ ID NO: 126167 - DNA, 25 bp, probe
aggagtttgttcaggaagtggacac

SEQ ID NO: 126168 - DNA, 25 bp, probe
atgggttcgtttcagaagtgcctca

SEQ ID NO: 126169 - DNA, 25 bp, probe
atggctttcaaaaccgtaagcccag

SEQ ID NO: 126170 - DNA, 25 bp, probe
atgttttcaaacatgccataaggaa

SEQ ID NO: 126171 - DNA, 25 bp, probe
atgttttcaaacatgccataaggaa

SEQ ID NO: 126172 - DNA, 25 bp, probe
atgtcatttccatcttctggaaggc

SEQ ID NO: 126173 - DNA, 25 bp, probe
atgtcatttccatcatattgtaaat

SEQ ID NO: 126174 - DNA, 25 bp, probe
atgtcagcctcttcgatgtttaata

SEQ ID NO: 126175 - DNA, 25 bp, probe
atgtcatctctggtcagagtttact

SEQ ID NO: 126176 - DNA, 25 bp, probe
atgtcagtctgagtggtgtcttact

SEQ ID NO: 126177 - DNA, 25 bp, probe
atgtcagtctcagcactgttacaat

SEQ ID NO: 126178 - DNA, 25 bp, probe
atgtacactgaggtctgttctaatg

SEQ ID NO: 126179 - DNA, 25 bp, probe
atgtatgcctatatgtgtattgtat

SEQ ID NO: 126180 - DNA, 25 bp, probe
atgtggtttttgttgatttggtata

SEQ ID NO: 126181 - DNA, 25 bp, probe
atgtggtcccagattatttctgtaa

SEQ ID NO: 126182 - DNA, 25 bp, probe
atgtttcccactttattatgaccaa

SEQ ID NO: 126183 - DNA, 25 bp, probe
atgtttcccactttattatgaccaa

SEQ ID NO: 126184 - DNA, 25 bp, probe
atgttccctgacaatgtttgtaaca

SEQ ID NO: 126185 - DNA, 25 bp, probe
atgtttctatctgattttgtgcaaa

SEQ ID NO: 126186 - DNA, 25 bp, probe
atgtgtttactttccatttggcaga

SEQ ID NO: 126187 - DNA, 25 bp, probe
atgttttggttaacacaatgtactt

SEQ ID NO: 126188 - DNA, 25 bp, probe
atgttttggattaaccggctgcaga

SEQ ID NO: 126189 - DNA, 25 bp, probe
atgttctctgaagaactgtggctgg

SEQ ID NO: 126190 - DNA, 25 bp, probe
atgtttgaagagaaacctccggtgt

SEQ ID NO: 126191 - DNA, 25 bp, probe
atgtttgtcagtaaatactcccact

SEQ ID NO: 126192 - DNA, 25 bp, probe
atgtttgtaaaattccctagctctc

SEQ ID NO: 126193 - DNA, 25 bp, probe
atgtttgtaaaattccctagctctc

SEQ ID NO: 126194 - DNA, 25 bp, probe
atgtacctgaatttattactaactc

SEQ ID NO: 126195 - DNA, 25 bp, probe
atgttcccaagagtttgacttcagc

SEQ ID NO: 126196 - DNA, 25 bp, probe
atgtacgccagcagctttacgctgg

SEQ ID NO: 126197 - DNA, 25 bp, probe
atgtactcctgcagatttagccggc

SEQ ID NO: 126198 - DNA, 25 bp, probe
atgtgacaacatctttatcaccggc

SEQ ID NO: 126199 - DNA, 25 bp, probe
atggaggtgattttgtggccctaga

SEQ ID NO: 126200 - DNA, 25 bp, probe
atggaggtgattttgtggccctaga

SEQ ID NO: 126201 - DNA, 25 bp, probe
atggatagtgtttcttccttccagc

SEQ ID NO: 126202 - DNA, 25 bp, probe
atgtaatgtagttctttgttcctgc

SEQ ID NO: 126203 - DNA, 25 bp, probe
atgtcaatctcagttttgctttcct

SEQ ID NO: 126204 - DNA, 25 bp, probe
atgtcaatatcatttatggcctcac

SEQ ID NO: 126205 - DNA, 25 bp, probe
atgtataatacttagatcctcctta

SEQ ID NO: 126206 - DNA, 25 bp, probe
atgtttatacattatttctaccgag

SEQ ID NO: 126207 - DNA, 25 bp, probe
atgttttgtgattcactttaacctg

SEQ ID NO: 126208 - DNA, 25 bp, probe
atgttttgctactcttgtcagacaa

SEQ ID NO: 126209 - DNA, 25 bp, probe
atgtatttgtacactatctggcaca

SEQ ID NO: 126210 - DNA, 25 bp, probe
atgtgatttgctccagatcgttaga

SEQ ID NO: 126211 - DNA, 25 bp, probe
atgtatcttgcatccctgtatggag

SEQ ID NO: 126212 - DNA, 25 bp, probe
atgtacttgaactactgtcgtgggc

SEQ ID NO: 126213 - DNA, 25 bp, probe
atgtggcctgaaagcacttagcggg

SEQ ID NO: 126214 - DNA, 25 bp, probe
atgggggctctaggaatgccggcat

SEQ ID NO: 126215 - DNA, 25 bp, probe
atggggttcaacttgacgcttgcaa

SEQ ID NO: 126216 - DNA, 25 bp, probe
atgtggtgttattggtacctctcat

SEQ ID NO: 126217 - DNA, 25 bp, probe
atgtactcttgctggagaaccgatc

SEQ ID NO: 126218 - DNA, 25 bp, probe
atgtacatttcaaggctgagcagcc

SEQ ID NO: 126219 - DNA, 25 bp, probe
atgtactggctggggtaggcctcag

SEQ ID NO: 126220 - DNA, 25 bp, probe
atgtcctggtcgcatgtatgcacct

SEQ ID NO: 126221 - DNA, 25 bp, probe
atgtcccgatatctggatatctgct

SEQ ID NO: 126222 - DNA, 25 bp, probe
atgtccctgtgaggtctatcatctc

SEQ ID NO: 126223 - DNA, 25 bp, probe
atgttgccgtgaagatcttctcctc

SEQ ID NO: 126224 - DNA, 25 bp, probe
atgtctggcttaagtccttagctgc

SEQ ID NO: 126225 - DNA, 25 bp, probe
atgtcaggaatgtgattcttcatct

SEQ ID NO: 126226 - DNA, 25 bp, probe
atgtcagtaataggatttggtttca

SEQ ID NO: 126227 - DNA, 25 bp, probe
atgtagtcaaatattatggcagtta

SEQ ID NO: 126228 - DNA, 25 bp, probe
atgtagtaaataaattggcaggtaa

SEQ ID NO: 126229 - DNA, 25 bp, probe
atgtggtaaattaattcgagaggag

SEQ ID NO: 126230 - DNA, 25 bp, probe
atgggtaaaagcatgtctacgaaga

SEQ ID NO: 126231 - DNA, 25 bp, probe
atgggtaaaagcatgtctacgaaga

SEQ ID NO: 126232 - DNA, 25 bp, probe
atgggtcaaaaatgtcttcccagtt

SEQ ID NO: 126233 - DNA, 25 bp, probe
atgggtcaaaaatgtcttcccagtt

SEQ ID NO: 126234 - DNA, 25 bp, probe
atgggtccaaagttgatgtaatcca

SEQ ID NO: 126235 - DNA, 25 bp, probe
aggatgtcccgggtgtgtacaccaa

SEQ ID NO: 126236 - DNA, 25 bp, probe
atgggatctcctggcagtttgaccc

SEQ ID NO: 126237 - DNA, 25 bp, probe
atgggtctccagttgttcatcaacc

SEQ ID NO: 126238 - DNA, 25 bp, probe
atgggtctccagttgttcatcaacc

SEQ ID NO: 126239 - DNA, 25 bp, probe
atgtgggtaagacattcaaacctgg

SEQ ID NO: 126240 - DNA, 25 bp, probe
atggggtggaagctctcaaatacat

SEQ ID NO: 126241 - DNA, 25 bp, probe
atgggatagaaatggcagcaaaatt

SEQ ID NO: 126242 - DNA, 25 bp, probe
atgggatcgtcatgtgggaagtcat

SEQ ID NO: 126243 - DNA, 25 bp, probe
atggtacatggttgtctgaaagcct

SEQ ID NO: 126244 - DNA, 25 bp, probe
atggtacatggttgtctgaaagcct

SEQ ID NO: 126245 - DNA, 25 bp, probe
atgtgtaaggaaggattacggccag

SEQ ID NO: 126246 - DNA, 25 bp, probe
atgtgaaaggcatcttctaccgcaa

SEQ ID NO: 126247 - DNA, 25 bp, probe
atgtaaatggaacttctgcaaggca

SEQ ID NO: 126248 - DNA, 25 bp, probe
atgtctatgattgaaagcttaagca

SEQ ID NO: 126249 - DNA, 25 bp, probe
atgtcgtgttggttactataacaac

SEQ ID NO: 126250 - DNA, 25 bp, probe
atgttagtaggcttagttttttcag

SEQ ID NO: 126251 - DNA, 25 bp, probe
atgtaagaaggctagatttttttga

SEQ ID NO: 126252 - DNA, 25 bp, probe
atgtaatttgtgcagatttgttggt

SEQ ID NO: 126253 - DNA, 25 bp, probe
atgtaatttgtgcagatttgttggt

SEQ ID NO: 126254 - DNA, 25 bp, probe
atgttttgtctgcagtttgttattg

SEQ ID NO: 126255 - DNA, 25 bp, probe
atgtttttatggttcatgttatatc

SEQ ID NO: 126256 - DNA, 25 bp, probe
atgtacttctatcactgcatttatt

SEQ ID NO: 126257 - DNA, 25 bp, probe
atgtatttcataattctcccataat

SEQ ID NO: 126258 - DNA, 25 bp, probe
atgttatataatatctcataatagt

SEQ ID NO: 126259 - DNA, 25 bp, probe
atgtttgaactcattcatacctgta

SEQ ID NO: 126260 - DNA, 25 bp, probe
atgtttcaggatatttgacctgtca

SEQ ID NO: 126261 - DNA, 25 bp, probe
atgtgttggtttattgattctgtaa

SEQ ID NO: 126262 - DNA, 25 bp, probe
atgtgactttcttgttttgtctcaa

SEQ ID NO: 126263 - DNA, 25 bp, probe
atgtaattggcttccttctgtttaa

SEQ ID NO: 126264 - DNA, 25 bp, probe
atgtatgcttggaccctattattta

SEQ ID NO: 126265 - DNA, 25 bp, probe
atgtatgtatggatctgtatttgta

SEQ ID NO: 126266 - DNA, 25 bp, probe
atgtatgtagtggcaatgtttggaa

SEQ ID NO: 126267 - DNA, 25 bp, probe
atgtgcatgtgaccacaaatgcttg

SEQ ID NO: 126268 - DNA, 25 bp, probe
atgtcacaagcacagaatctatgga

SEQ ID NO: 126269 - DNA, 25 bp, probe
atgtgaagatggcagacttcggtgt

SEQ ID NO: 126270 - DNA, 25 bp, probe
atgtggagtggaaatttgcaagggc

SEQ ID NO: 126271 - DNA, 25 bp, probe
atgggttgttagtagtgccagaggc

SEQ ID NO: 126272 - DNA, 25 bp, probe
atgtggtgatggagtacgccagagg

SEQ ID NO: 126273 - DNA, 25 bp, probe
atgtctgcgtggaaagggcccaaga

SEQ ID NO: 126274 - DNA, 25 bp, probe
atgtgtccatggaaaaggtcctact

SEQ ID NO: 126275 - DNA, 25 bp, probe
atgtctccatggatacagggccctt

SEQ ID NO: 126276 - DNA, 25 bp, probe
atgtctccatggatacagggccctt

SEQ ID NO: 126277 - DNA, 25 bp, probe
atgtctccatggatacagggccctt

SEQ ID NO: 126278 - DNA, 25 bp, probe
atgtctccatggatacagggccctt

SEQ ID NO: 126279 - DNA, 25 bp, probe
atgtttgcaggggtgacggccctca

SEQ ID NO: 126280 - DNA, 25 bp, probe
atgtcttgacgggatcactggggct

SEQ ID NO: 126281 - DNA, 25 bp, probe
atgtcctgttggaccacgagggtca

SEQ ID NO: 126282 - DNA, 25 bp, probe
atgtccttatcaacaaggagggcca

SEQ ID NO: 126283 - DNA, 25 bp, probe
atgtccttaaaatgtggtctgccaa

SEQ ID NO: 126284 - DNA, 25 bp, probe
atgtcctaggaatttggtattggtt

SEQ ID NO: 126285 - DNA, 25 bp, probe
atggccccaaagtggatgtctggtt

SEQ ID NO: 126286 - DNA, 25 bp, probe
atgtgccccagatctggaagggcct

SEQ ID NO: 126287 - DNA, 25 bp, probe
atggtcccaacaggtacaatgacct

SEQ ID NO: 126288 - DNA, 25 bp, probe
aggatccaaagtgggaattccctcg

SEQ ID NO: 126289 - DNA, 25 bp, probe
agatcaaccaggaggaattcaaagg

SEQ ID NO: 126290 - DNA, 25 bp, probe
atgtataccaggtggactctctgca

SEQ ID NO: 126291 - DNA, 25 bp, probe
atggtaccagggttcttttgcaagt

SEQ ID NO: 126292 - DNA, 25 bp, probe
atggtgtaaggattacttttcctgt

SEQ ID NO: 126293 - DNA, 25 bp, probe
atgggaaaggtattagatttactgc

SEQ ID NO: 126294 - DNA, 25 bp, probe
atgggataactgctatcctttacca

SEQ ID NO: 126295 - DNA, 25 bp, probe
atgggtatgctgtagctaactttat

SEQ ID NO: 126296 - DNA, 25 bp, probe
atgggtatgctgtagctaactttat

SEQ ID NO: 126297 - DNA, 25 bp, probe
atgtagttgaattcatcaatctttt

SEQ ID NO: 126298 - DNA, 25 bp, probe
atgtaaaagacaatactcttgtgtt

SEQ ID NO: 126299 - DNA, 25 bp, probe
atgtcatcaaccacttcttctgtga

SEQ ID NO: 126300 - DNA, 25 bp, probe
atgtacacacacactttgtctagct

SEQ ID NO: 126301 - DNA, 25 bp, probe
atgtaccaatatttgctgtgatgct

SEQ ID NO: 126302 - DNA, 25 bp, probe
atgtcttcagctatgctctgtgtct

SEQ ID NO: 126303 - DNA, 25 bp, probe
atgtttcgtatatctgttctcggta

SEQ ID NO: 126304 - DNA, 25 bp, probe
atgtcttctgttttcaggttctgtt

SEQ ID NO: 126305 - DNA, 25 bp, probe
atgtcatttaattgtcagtttcttt

SEQ ID NO: 126306 - DNA, 25 bp, probe
atgtttgtagaattcattttttatc

SEQ ID NO: 126307 - DNA, 25 bp, probe
atgttttcagagttcttgcctatta

SEQ ID NO: 126308 - DNA, 25 bp, probe
atgttttcatgggtcaggacttcaa

SEQ ID NO: 126309 - DNA, 25 bp, probe
atgtctttcgcagatcgcagacctc

SEQ ID NO: 126310 - DNA, 25 bp, probe
atgtctttcgcagatcgcagacctc

SEQ ID NO: 126311 - DNA, 25 bp, probe
atgtgtctaccaggcagcgaagctc

SEQ ID NO: 126312 - DNA, 25 bp, probe
atgtgtctaccaggcagcgaagctc

SEQ ID NO: 126313 - DNA, 25 bp, probe
atgtggatatccagagcgagcgctt

SEQ ID NO: 126314 - DNA, 25 bp, probe
atgtcgtatccggaggagagctata

SEQ ID NO: 126315 - DNA, 25 bp, probe
atgtctgtataaataatgagcgtta

SEQ ID NO: 126316 - DNA, 25 bp, probe
atgtctataacaataaagctgctgt

SEQ ID NO: 126317 - DNA, 25 bp, probe
atgtgcagatattcctaaagtttta

SEQ ID NO: 126318 - DNA, 25 bp, probe
atggaatcccactgtatgatttata

SEQ ID NO: 126319 - DNA, 25 bp, probe
atgtaaccctgctttgggaatatgg

SEQ ID NO: 126320 - DNA, 25 bp, probe
atgtaacaggtcttattggaattgc

SEQ ID NO: 126321 - DNA, 25 bp, probe
aggccagggtcgaatctggaatggg

SEQ ID NO: 126322 - DNA, 25 bp, probe
atgtccaaagggaatcaggattctg

SEQ ID NO: 126323 - DNA, 25 bp, probe
atgtccaaagggaatcaggattctg

SEQ ID NO: 126324 - DNA, 25 bp, probe
atgtactaagggatgcagtggagtg

SEQ ID NO: 126325 - DNA, 25 bp, probe
atgtttgaagatgatggcaggaagg

SEQ ID NO: 126326 - DNA, 25 bp, probe
atgtttattgatgtggagctttctg

SEQ ID NO: 126327 - DNA, 25 bp, probe
atgtattttgatggtggtggtcgtg

SEQ ID NO: 126328 - DNA, 25 bp, probe
atgtcattttgaaagtgtactgctt

SEQ ID NO: 126329 - DNA, 25 bp, probe
atgtcatgtttgtagaattcatttt

SEQ ID NO: 126330 - DNA, 25 bp, probe
atgtacttctggcaattctatctgt

SEQ ID NO: 126331 - DNA, 25 bp, probe
atgtcaccgtggtgaccttcttctg

SEQ ID NO: 126332 - DNA, 25 bp, probe
atgtcacctgtgtgggtattttata

SEQ ID NO: 126333 - DNA, 25 bp, probe
atgtgccctgacatggttaatttat

SEQ ID NO: 126334 - DNA, 25 bp, probe
atgtacctgtcactttacacattta

SEQ ID NO: 126335 - DNA, 25 bp, probe
atgtgcccttctcgtaaagttgttc

SEQ ID NO: 126336 - DNA, 25 bp, probe
atgtcacctttgctacgcaaggaaa

SEQ ID NO: 126337 - DNA, 25 bp, probe
atgtactttgtccttcagcaagaaa

SEQ ID NO: 126338 - DNA, 25 bp, probe
atgtgtttgtgtccttaggcaaagc

SEQ ID NO: 126339 - DNA, 25 bp, probe
atgtgtgttttctttgagagcagtg

SEQ ID NO: 126340 - DNA, 25 bp, probe
atgtgtgttttctttgagagcagtg

SEQ ID NO: 126341 - DNA, 25 bp, probe
atgtgtggtcttttgggatcctgct

SEQ ID NO: 126342 - DNA, 25 bp, probe
atgtgtggtcttttgggatcctgct

SEQ ID NO: 126343 - DNA, 25 bp, probe
atgtgtgggcctttggagtgacgct

SEQ ID NO: 126344 - DNA, 25 bp, probe
atgtctggggtgttgtgagttgggg

SEQ ID NO: 126345 - DNA, 25 bp, probe
atgtgtgtgtggttttcctttgggg

SEQ ID NO: 126346 - DNA, 25 bp, probe
atggggtgtctgtgttatttgtggg

SEQ ID NO: 126347 - DNA, 25 bp, probe
atgggtgttggtgattgtattttaa

SEQ ID NO: 126348 - DNA, 25 bp, probe
atggggtatgcagggtctggaagtt

SEQ ID NO: 126349 - DNA, 25 bp, probe
atggggtcagacagaaagagcttct

SEQ ID NO: 126350 - DNA, 25 bp, probe
atgtcggtcaaccacgaggagctgg

SEQ ID NO: 126351 - DNA, 25 bp, probe
atgtcggtcaaccacgaggagctgg

SEQ ID NO: 126352 - DNA, 25 bp, probe
atgtcatcgacagcacagaagggct

SEQ ID NO: 126353 - DNA, 25 bp, probe
atgtacatgccaacataaatatggc

SEQ ID NO: 126354 - DNA, 25 bp, probe
atgtcactgctcaaattacatttca

SEQ ID NO: 126355 - DNA, 25 bp, probe
atgtcactgctcaaattacatttca

SEQ ID NO: 126356 - DNA, 25 bp, probe
atgtacatgtgcagatattcctaaa

SEQ ID NO: 126357 - DNA, 25 bp, probe
atgtaactgcattgagaactgcata

SEQ ID NO: 126358 - DNA, 25 bp, probe
atgtatgcctgcaaaaagctacaaa

SEQ ID NO: 126359 - DNA, 25 bp, probe
atgtagaattgaaaatgcattaggg

SEQ ID NO: 126360 - DNA, 25 bp, probe
atgtaagttgttcatgttgcagaaa

SEQ ID NO: 126361 - DNA, 25 bp, probe
atgtaagttgttcatgttgcagaaa

SEQ ID NO: 126362 - DNA, 25 bp, probe
atgtgaaggcgctgtataatgaaac

SEQ ID NO: 126363 - DNA, 25 bp, probe
atgtgaaacagtggttgccaaaagt

SEQ ID NO: 126364 - DNA, 25 bp, probe
atggtagtcagtatggctcaaccag

SEQ ID NO: 126365 - DNA, 25 bp, probe
atgtggttcagtacggctgtaccaa

SEQ ID NO: 126366 - DNA, 25 bp, probe
atgtgaataagtactggctgtcctc

SEQ ID NO: 126367 - DNA, 25 bp, probe
atgggcatatgaccctgttgtcctg

SEQ ID NO: 126368 - DNA, 25 bp, probe
atgtgacaagtggacattatttatg

SEQ ID NO: 126369 - DNA, 25 bp, probe
atgtgacaagtggacattatttatg

SEQ ID NO: 126370 - DNA, 25 bp, probe
atgtgactcaaggcctgctgtttaa

SEQ ID NO: 126371 - DNA, 25 bp, probe
atgtggccgaggactttgattgcac

SEQ ID NO: 126372 - DNA, 25 bp, probe
atgtagggtggaaacactctgatct

SEQ ID NO: 126373 - DNA, 25 bp, probe
atgtatgggtgggcacctccattct

SEQ ID NO: 126374 - DNA, 25 bp, probe
atgtatgggtgggcacctccattct

SEQ ID NO: 126375 - DNA, 25 bp, probe
atgtatgggagagcagactgcaccc

SEQ ID NO: 126376 - DNA, 25 bp, probe
atgtatccaacagacactcaataaa

SEQ ID NO: 126377 - DNA, 25 bp, probe
atgtgtccaatcggagacaaaagca

SEQ ID NO: 126378 - DNA, 25 bp, probe
atgtcccaagctgagaagaatgcag

SEQ ID NO: 126379 - DNA, 25 bp, probe
atgtgcctaactgagaggaacctgc

SEQ ID NO: 126380 - DNA, 25 bp, probe
atgtcttgaaatcaagggccagctg

SEQ ID NO: 126381 - DNA, 25 bp, probe
atgtctaagaacggggaccagcatc

SEQ ID NO: 126382 - DNA, 25 bp, probe
atgtgtaattccgtgatggaccctc

SEQ ID NO: 126383 - DNA, 25 bp, probe
atggtcatttccggagtacttgcca

SEQ ID NO: 126384 - DNA, 25 bp, probe
atgggcatttccgccagaatggcgg

SEQ ID NO: 126385 - DNA, 25 bp, probe
atgggcatgttagaactgaggtggg

SEQ ID NO: 126386 - DNA, 25 bp, probe
aggccagttcgttggatggctcttg

SEQ ID NO: 126387 - DNA, 25 bp, probe
aggccagttcgttggatggctcttg

SEQ ID NO: 126388 - DNA, 25 bp, probe
aggccagcctagaggtggcttctgg

SEQ ID NO: 126389 - DNA, 25 bp, probe
aggccaaccagatgctgggcgatct

SEQ ID NO: 126390 - DNA, 25 bp, probe
atgggaattcactgctgggatgttg

SEQ ID NO: 126391 - DNA, 25 bp, probe
atgtaaataatgtgtgtgtgtgtgt

SEQ ID NO: 126392 - DNA, 25 bp, probe
atgtcaacagatagttgtgttttta

SEQ ID NO: 126393 - DNA, 25 bp, probe
atgtgcccaattcagtgttgtgtat

SEQ ID NO: 126394 - DNA, 25 bp, probe
atgtctgccaactacatgtgtcctt

SEQ ID NO: 126395 - DNA, 25 bp, probe
atgtcatggcgaagactgagtcacc

SEQ ID NO: 126396 - DNA, 25 bp, probe
atgtcatggcgaagactgagtcacc

SEQ ID NO: 126397 - DNA, 25 bp, probe
atgtcatggcgaagactgagtcacc

SEQ ID NO: 126398 - DNA, 25 bp, probe
atgtgctccagcaagtctgagtctg

SEQ ID NO: 126399 - DNA, 25 bp, probe
atgtgctgaagcaaagtgcccatgg

SEQ ID NO: 126400 - DNA, 25 bp, probe
atggctaagtgaagatgacaatcat

SEQ ID NO: 126401 - DNA, 25 bp, probe
atggtagacagttcatgcagtatat

SEQ ID NO: 126402 - DNA, 25 bp, probe
atgtgctcaacaaccagcagttcct

SEQ ID NO: 126403 - DNA, 25 bp, probe
atggctcaatgcacaactattgccc

SEQ ID NO: 126404 - DNA, 25 bp, probe
atgtctcactttaacttgtatctca

SEQ ID NO: 126405 - DNA, 25 bp, probe
atgtctagttttatttgtataggaa

SEQ ID NO: 126406 - DNA, 25 bp, probe
atggtattcattaggttttaactga

SEQ ID NO: 126407 - DNA, 25 bp, probe
aggtattgcatattccatttacggt

SEQ ID NO: 126408 - DNA, 25 bp, probe
atgggacgacaagaatgtactggtt

SEQ ID NO: 126409 - DNA, 25 bp, probe
atggtgtctggaagaaagttctggt

SEQ ID NO: 126410 - DNA, 25 bp, probe
atggtattggaataactcacaggga

SEQ ID NO: 126411 - DNA, 25 bp, probe
atggctcaggctgaagaaccggggt

SEQ ID NO: 126412 - DNA, 25 bp, probe
atggccatggctcagaaaccttata

SEQ ID NO: 126413 - DNA, 25 bp, probe
atgtccatactccaaacagtcaaaa

SEQ ID NO: 126414 - DNA, 25 bp, probe
atgtcagagccccgaagcagctaat

SEQ ID NO: 126415 - DNA, 25 bp, probe
atggggccctggagctgcaaaatcc

SEQ ID NO: 126416 - DNA, 25 bp, probe
acggcccgggaaatggccaatgcca

SEQ ID NO: 126417 - DNA, 25 bp, probe
acaaccacgggtttggcaactgcgt

SEQ ID NO: 126418 - DNA, 25 bp, probe
agagacccggggatggattggcctc

SEQ ID NO: 126419 - DNA, 25 bp, probe
agagacccggggatggattggcctc

SEQ ID NO: 126420 - DNA, 25 bp, probe
aggaccccaggtaagatgttaatct

SEQ ID NO: 126421 - DNA, 25 bp, probe
aggttcccagggagacgctgaagct

SEQ ID NO: 126422 - DNA, 25 bp, probe
aggtggccaaggagttcgtgaagct

SEQ ID NO: 126423 - DNA, 25 bp, probe
atggtgctagactgaattacgtaag

SEQ ID NO: 126424 - DNA, 25 bp, probe
atgggctaacggtttgaatagacat

SEQ ID NO: 126425 - DNA, 25 bp, probe
atggggagtcggttagtcattgata

SEQ ID NO: 126426 - DNA, 25 bp, probe
atgggaggggatgctactgatggga

SEQ ID NO: 126427 - DNA, 25 bp, probe
aggcgggctggtgttctaagagccc

SEQ ID NO: 126428 - DNA, 25 bp, probe
atgtggggaggttgtcattcagaac

SEQ ID NO: 126429 - DNA, 25 bp, probe
atgtggggaggttgtcattcagaac

SEQ ID NO: 126430 - DNA, 25 bp, probe
atgtgggaagtcatgtcatttggag

SEQ ID NO: 126431 - DNA, 25 bp, probe
atgtgggaagtgatgtcgtacgggg

SEQ ID NO: 126432 - DNA, 25 bp, probe
atggtagaacggtggctactgtgag

SEQ ID NO: 126433 - DNA, 25 bp, probe
aggctaaaagccttggtcactactt

SEQ ID NO: 126434 - DNA, 25 bp, probe
aggctgaaaaccatgacaccttcct

SEQ ID NO: 126435 - DNA, 25 bp, probe
aggctgaaaaccatgacaccttcct

SEQ ID NO: 126436 - DNA, 25 bp, probe
atgggaggaaccaggccacattcct

SEQ ID NO: 126437 - DNA, 25 bp, probe
atggggaactccatttcagcagctc

SEQ ID NO: 126438 - DNA, 25 bp, probe
atggggaactccatttcagcagctc

SEQ ID NO: 126439 - DNA, 25 bp, probe
atggtggagacctgcgttatcacct

SEQ ID NO: 126440 - DNA, 25 bp, probe
atggtgggacacggagtttgcgttt

SEQ ID NO: 126441 - DNA, 25 bp, probe
atggtcgtggacgtagtcctcttta

SEQ ID NO: 126442 - DNA, 25 bp, probe
atgtgttagcactgatagtcctttt

SEQ ID NO: 126443 - DNA, 25 bp, probe
atgtccttgcacttaaactcattcc

SEQ ID NO: 126444 - DNA, 25 bp, probe
atgtgttacccataaacactgccat

SEQ ID NO: 126445 - DNA, 25 bp, probe
atggtgtcccagtaaagccaatgac

SEQ ID NO: 126446 - DNA, 25 bp, probe
atgtggtgaaatcaaaatcactgat

SEQ ID NO: 126447 - DNA, 25 bp, probe
atggggcagaagcacgaactcgaga

SEQ ID NO: 126448 - DNA, 25 bp, probe
atggagtgacgacttcgatagtaga

SEQ ID NO: 126449 - DNA, 25 bp, probe
atgggcctgcagtgatccattgtag

SEQ ID NO: 126450 - DNA, 25 bp, probe
atgtcgggagacaaacttctgagcg

SEQ ID NO: 126451 - DNA, 25 bp, probe
atgtcgggagacaaacttctgagcg

SEQ ID NO: 126452 - DNA, 25 bp, probe
atgtctgggaagttactctcatggt

SEQ ID NO: 126453 - DNA, 25 bp, probe
atggctgggaacatgacccagcctg

SEQ ID NO: 126454 - DNA, 25 bp, probe
atggtgtgggagagcggctgcaccg

SEQ ID NO: 126455 - DNA, 25 bp, probe
atggtggggagacttgacttcctcg

SEQ ID NO: 126456 - DNA, 25 bp, probe
atggggataatacctatttcacaag

SEQ ID NO: 126457 - DNA, 25 bp, probe
atggggatccaaccaattcaattaa

SEQ ID NO: 126458 - DNA, 25 bp, probe
atggggatcctgtacaaccctttgt

SEQ ID NO: 126459 - DNA, 25 bp, probe
atggggatcctgtacaaccctttgt

SEQ ID NO: 126460 - DNA, 25 bp, probe
atggggtctcagaacttctacttct

SEQ ID NO: 126461 - DNA, 25 bp, probe
atggctgatgcccagaacatttcac

SEQ ID NO: 126462 - DNA, 25 bp, probe
atggcatgcactacagaaataactg

SEQ ID NO: 126463 - DNA, 25 bp, probe
atggcatgcactacagaaataactg

SEQ ID NO: 126464 - DNA, 25 bp, probe
atgtcacagtagtaaataacttatt

SEQ ID NO: 126465 - DNA, 25 bp, probe
atgtctttcggttatcaagtgtttc

SEQ ID NO: 126466 - DNA, 25 bp, probe
atgtgctttggggaccggtattatc

SEQ ID NO: 126467 - DNA, 25 bp, probe
atggtagggggagagggacctgccg

SEQ ID NO: 126468 - DNA, 25 bp, probe
atgggggtgtggaggtgggaaccag

SEQ ID NO: 126469 - DNA, 25 bp, probe
atgggtccgaggcgggggacagaag

SEQ ID NO: 126470 - DNA, 25 bp, probe
atgggttcggcagatggtggtggta

SEQ ID NO: 126471 - DNA, 25 bp, probe
atgggctgtatgaaaagggtgggaa

SEQ ID NO: 126472 - DNA, 25 bp, probe
atgggctgtatgaaaagggtgggaa

SEQ ID NO: 126473 - DNA, 25 bp, probe
atggaggaaaactggagtgccgaga

SEQ ID NO: 126474 - DNA, 25 bp, probe
atgggggctgaatgtgcgagtccat

SEQ ID NO: 126475 - DNA, 25 bp, probe
atgtgtggaggactttgcaggggat

SEQ ID NO: 126476 - DNA, 25 bp, probe
atgtgccggagacggaccagtggac

SEQ ID NO: 126477 - DNA, 25 bp, probe
atgtgccggagacggaccagtggac

SEQ ID NO: 126478 - DNA, 25 bp, probe
aggccgaaatggtcaacgccatgca

SEQ ID NO: 126479 - DNA, 25 bp, probe
agaggccagtacgacgtggccatca

SEQ ID NO: 126480 - DNA, 25 bp, probe
atgggcatcgtcaacggggccaagt

SEQ ID NO: 126481 - DNA, 25 bp, probe
atggactctaatgcagggacctgaa

SEQ ID NO: 126482 - DNA, 25 bp, probe
aggatcctagttcagtttctgggaa

SEQ ID NO: 126483 - DNA, 25 bp, probe
aggcacctaaacagattcttctgga

SEQ ID NO: 126484 - DNA, 25 bp, probe
atgtcagactaatcaggcttatccg

SEQ ID NO: 126485 - DNA, 25 bp, probe
atgtcagactaatcaggcttatccg

SEQ ID NO: 126486 - DNA, 25 bp, probe
atgtgagacgaatgatggctagatc

SEQ ID NO: 126487 - DNA, 25 bp, probe
atgtgatagaggtggctacagacgc

SEQ ID NO: 126488 - DNA, 25 bp, probe
atgtgatcagaagctgcgtcccaac

SEQ ID NO: 126489 - DNA, 25 bp, probe
atggaataagctacgtcctcaacgc

SEQ ID NO: 126490 - DNA, 25 bp, probe
atgtcctatagaaggatcctccact

SEQ ID NO: 126491 - DNA, 25 bp, probe
aggccttatgagggtcctctacttc

SEQ ID NO: 126492 - DNA, 25 bp, probe
aggccttatgagggtcctctacttc

SEQ ID NO: 126493 - DNA, 25 bp, probe
aggcgtgtatgacgctgggcacgtt

SEQ ID NO: 126494 - DNA, 25 bp, probe
aggagtatttcctgtgccaggtata

SEQ ID NO: 126495 - DNA, 25 bp, probe
atggtgaaaccctgtctctagtaaa

SEQ ID NO: 126496 - DNA, 25 bp, probe
atgtggattaccacctgccttaatg

SEQ ID NO: 126497 - DNA, 25 bp, probe
atgtgtgtccaggctacctggctgt

SEQ ID NO: 126498 - DNA, 25 bp, probe
atgggactactggaatcaggcttgg

SEQ ID NO: 126499 - DNA, 25 bp, probe
atgggggaaggaatcagcctgtgtg

SEQ ID NO: 126500 - DNA, 25 bp, probe
atgtggcgggattaatagactatga

SEQ ID NO: 126501 - DNA, 25 bp, probe
atgtggttggtcaaatcaactgaat

SEQ ID NO: 126502 - DNA, 25 bp, probe
atgtggtcctggaaatcccttattg

SEQ ID NO: 126503 - DNA, 25 bp, probe
atgtgtgtggtaaatctccgtttat

SEQ ID NO: 126504 - DNA, 25 bp, probe
atgtgtttgcataaacattctttta

SEQ ID NO: 126505 - DNA, 25 bp, probe
atgtgtattgaaaacgttgccattt

SEQ ID NO: 126506 - DNA, 25 bp, probe
atgtggggcaagatcgtctgcctgt

SEQ ID NO: 126507 - DNA, 25 bp, probe
atgtggaggccaaccagatgctggg

SEQ ID NO: 126508 - DNA, 25 bp, probe
atgtcgcaggcattactaatctgaa

SEQ ID NO: 126509 - DNA, 25 bp, probe
atgtcgcaggcattactaatctgaa

SEQ ID NO: 126510 - DNA, 25 bp, probe
atgtcatgatagatcaccaacagaa

SEQ ID NO: 126511 - DNA, 25 bp, probe
atgtctgaatgcttacacaaataaa

SEQ ID NO: 126512 - DNA, 25 bp, probe
atgtcagtctgcttagaaataacag

SEQ ID NO: 126513 - DNA, 25 bp, probe
atgtcagttcagtcggaacaaagtt

SEQ ID NO: 126514 - DNA, 25 bp, probe
atgtgtttgcagtagtgttcaagtg

SEQ ID NO: 126515 - DNA, 25 bp, probe
atgtgcttatgcaggattccaggtt

SEQ ID NO: 126516 - DNA, 25 bp, probe
atggccatgcctgttaccaggtgct

SEQ ID NO: 126517 - DNA, 25 bp, probe
atgggccagcttatgaccagggtgg

SEQ ID NO: 126518 - DNA, 25 bp, probe
atgtgggaggtcatgagctatggag

SEQ ID NO: 126519 - DNA, 25 bp, probe
atgtggagcgattccggtatggctg

SEQ ID NO: 126520 - DNA, 25 bp, probe
atgggaccaacccagtgacagctgt

SEQ ID NO: 126521 - DNA, 25 bp, probe
atgggacagcagcggatgtgttcag

SEQ ID NO: 126522 - DNA, 25 bp, probe
aggcccagcagccgtttgatgattc

SEQ ID NO: 126523 - DNA, 25 bp, probe
atgtcccgagtgcttgaggatgatc

SEQ ID NO: 126524 - DNA, 25 bp, probe
atgtccatcgttgctgtcagttatg

SEQ ID NO: 126525 - DNA, 25 bp, probe
atgtcgatggttgagatatttattt

SEQ ID NO: 126526 - DNA, 25 bp, probe
atgtcgctgtttgagaacttcactt

SEQ ID NO: 126527 - DNA, 25 bp, probe
atgtcctgtttccatacatgttttt

SEQ ID NO: 126528 - DNA, 25 bp, probe
atgtcttttgtgctacagtttcgta

SEQ ID NO: 126529 - DNA, 25 bp, probe
atgtcagttttgttacagttgtagc

SEQ ID NO: 126530 - DNA, 25 bp, probe
atgtcactttgtttccattggagac

SEQ ID NO: 126531 - DNA, 25 bp, probe
atgtcttttgattcccaatgagaag

SEQ ID NO: 126532 - DNA, 25 bp, probe
atgtgctgtttttcctcatacaagt

SEQ ID NO: 126533 - DNA, 25 bp, probe
atgtgcaatttttatctaaccaatc

SEQ ID NO: 126534 - DNA, 25 bp, probe
atgtgaattttatgatgccaccgtg

SEQ ID NO: 126535 - DNA, 25 bp, probe
atgtgaagtttatagctagcctggg

SEQ ID NO: 126536 - DNA, 25 bp, probe
aggcaaggtgaaccctactcagtgt

SEQ ID NO: 126537 - DNA, 25 bp, probe
atggaaagggagggtgaaagtgatt

SEQ ID NO: 126538 - DNA, 25 bp, probe
atgtgtaggagtctgggcacaagtg

SEQ ID NO: 126539 - DNA, 25 bp, probe
aggtctggttcggggtcagattccg

SEQ ID NO: 126540 - DNA, 25 bp, probe
cggttgctggttgtggactatgcca

SEQ ID NO: 126541 - DNA, 25 bp, probe
atggttgcttttgccatggttgctt

SEQ ID NO: 126542 - DNA, 25 bp, probe
atggttgcttttgccatggttgctt

SEQ ID NO: 126543 - DNA, 25 bp, probe
atggtagaatttcccatgcatttac

SEQ ID NO: 126544 - DNA, 25 bp, probe
atggtggagatcagtgcctggttcc

SEQ ID NO: 126545 - DNA, 25 bp, probe
atgtggagaatcggcccaagtatgc

SEQ ID NO: 126546 - DNA, 25 bp, probe
atgtgcatggaaatgtcctccaaca

SEQ ID NO: 126547 - DNA, 25 bp, probe
atggattcagtactcctcaaccact

SEQ ID NO: 126548 - DNA, 25 bp, probe
atgtgtgctggtttacatgactcca

SEQ ID NO: 126549 - DNA, 25 bp, probe
atgtgagaaatgtctaatagcccat

SEQ ID NO: 126550 - DNA, 25 bp, probe
atgtgagaaatgtctaatagcccat

SEQ ID NO: 126551 - DNA, 25 bp, probe
atgtggaagatcttattcaacagca

SEQ ID NO: 126552 - DNA, 25 bp, probe
atgtggcataaatactgcggcagca

SEQ ID NO: 126553 - DNA, 25 bp, probe
atgtgacaaaattatctcgacctta

SEQ ID NO: 126554 - DNA, 25 bp, probe
atgtgacaaaattatctcgacctta

SEQ ID NO: 126555 - DNA, 25 bp, probe
atgtgactcaagacttccagagcct

SEQ ID NO: 126556 - DNA, 25 bp, probe
atgtgactctgaagctgacgaactt

SEQ ID NO: 126557 - DNA, 25 bp, probe
atgtcctgccaaggagagaagttta

SEQ ID NO: 126558 - DNA, 25 bp, probe
atgtcctgccaaggagagaagttta

SEQ ID NO: 126559 - DNA, 25 bp, probe
atgtctaccaactgatgaatgggaa

SEQ ID NO: 126560 - DNA, 25 bp, probe
atgtcggcgcagattgctgaaggga

SEQ ID NO: 126561 - DNA, 25 bp, probe
atgtcggatgcagttctcagtcagt

SEQ ID NO: 126562 - DNA, 25 bp, probe
atgtctagtgatcatctcagctgaa

SEQ ID NO: 126563 - DNA, 25 bp, probe
atgtctatgttttctactccaattc

SEQ ID NO: 126564 - DNA, 25 bp, probe
atgtgcttttagacggtctcaatct

SEQ ID NO: 126565 - DNA, 25 bp, probe
atgtgcttttcaataggaatcattc

SEQ ID NO: 126566 - DNA, 25 bp, probe
atgtgctcatctcctaagtagctct

SEQ ID NO: 126567 - DNA, 25 bp, probe
atgtgctgagttagaattactctga

SEQ ID NO: 126568 - DNA, 25 bp, probe
aggctgattttgaagtgctccatga

SEQ ID NO: 126569 - DNA, 25 bp, probe
aggtttgttggactttcataaattg

SEQ ID NO: 126570 - DNA, 25 bp, probe
agtccaagttggccatgtccaagaa

SEQ ID NO: 126571 - DNA, 25 bp, probe
aggccaatgtaggaacccaaaatgc

SEQ ID NO: 126572 - DNA, 25 bp, probe
atggcaggatcgggagaccccaact

SEQ ID NO: 126573 - DNA, 25 bp, probe
atggaagacgtttaatagtgcaact

SEQ ID NO: 126574 - DNA, 25 bp, probe
atggaagacgtttaatagtgcaact

SEQ ID NO: 126575 - DNA, 25 bp, probe
atggctcgaggtctacggagaaatg

SEQ ID NO: 126576 - DNA, 25 bp, probe
catggcttacctctcagaacgtaag

SEQ ID NO: 126577 - DNA, 25 bp, probe
atggtaatcctgctcagtacgagag

SEQ ID NO: 126578 - DNA, 25 bp, probe
atggtcaactacctggtcatctggt

SEQ ID NO: 126579 - DNA, 25 bp, probe
aggcttctaagcctagtcctgcagt

SEQ ID NO: 126580 - DNA, 25 bp, probe
atgtctttaatgcatttgcccaata

SEQ ID NO: 126581 - DNA, 25 bp, probe
atgtctttacattaactactaacag

SEQ ID NO: 126582 - DNA, 25 bp, probe
atgtctgtaaattctaatacttgaa

SEQ ID NO: 126583 - DNA, 25 bp, probe
atgtcgccattgttgtacaaccaaa

SEQ ID NO: 126584 - DNA, 25 bp, probe
atgtcgccattgttgtacaaccaaa

SEQ ID NO: 126585 - DNA, 25 bp, probe
atggtggctcatgtctataatccca

SEQ ID NO: 126586 - DNA, 25 bp, probe
atggtggcacatgcctgtagtccca

SEQ ID NO: 126587 - DNA, 25 bp, probe
atggctgtgatagcctttcctaatc

SEQ ID NO: 126588 - DNA, 25 bp, probe
atgtgtgtatggacctatacatgat

SEQ ID NO: 126589 - DNA, 25 bp, probe
atgtggtttggggcagatctgtagt

SEQ ID NO: 126590 - DNA, 25 bp, probe
atgggcatttaggtagactggataa

SEQ ID NO: 126591 - DNA, 25 bp, probe
atgggcctgtgaaggtagtggtagc

SEQ ID NO: 126592 - DNA, 25 bp, probe
atgggattgtgaaggtgtggaaata

SEQ ID NO: 126593 - DNA, 25 bp, probe
atgggattgtgaaggtgtggaaata

SEQ ID NO: 126594 - DNA, 25 bp, probe
atgggcagattacagtgggacaaag

SEQ ID NO: 126595 - DNA, 25 bp, probe
atgggcatatgtgtcagtggggctc

SEQ ID NO: 126596 - DNA, 25 bp, probe
atgggcatgagtgtcaggggtccca

SEQ ID NO: 126597 - DNA, 25 bp, probe
atgggaagggcatcgggtgctatat

SEQ ID NO: 126598 - DNA, 25 bp, probe
atgggaaggagctgccgcaggtgtg

SEQ ID NO: 126599 - DNA, 25 bp, probe
atggatggatgacatcccagggctg

SEQ ID NO: 126600 - DNA, 25 bp, probe
atggggatgtcagtgctcctagggt

SEQ ID NO: 126601 - DNA, 25 bp, probe
atgtgtcagtggggctctctgagtc

SEQ ID NO: 126602 - DNA, 25 bp, probe
atgtgtcagtggggctctctgagtc

SEQ ID NO: 126603 - DNA, 25 bp, probe
atggtcaggagacccttagccacca

SEQ ID NO: 126604 - DNA, 25 bp, probe
atggtggcaggtgcctgtagtccca

SEQ ID NO: 126605 - DNA, 25 bp, probe
atgggggtgtgctactttatcacag

SEQ ID NO: 126606 - DNA, 25 bp, probe
atggaagcgtgttacttacaaagag

SEQ ID NO: 126607 - DNA, 25 bp, probe
atgtgtacctgcttagttaattggc

SEQ ID NO: 126608 - DNA, 25 bp, probe
atgtgtacctaatgaaaagatctcc

SEQ ID NO: 126609 - DNA, 25 bp, probe
atggatacccaatgcaaattactta

SEQ ID NO: 126610 - DNA, 25 bp, probe
atggataccgctcaaaagaagctcc

SEQ ID NO: 126611 - DNA, 25 bp, probe
atggaacttctgcaaggcagtaatt

SEQ ID NO: 126612 - DNA, 25 bp, probe
aggaactccaaaagggcttcaatgc

SEQ ID NO: 126613 - DNA, 25 bp, probe
atggtgttccaaaagggtgacagtg

SEQ ID NO: 126614 - DNA, 25 bp, probe
atgtgttggtcacccacgggaaggt

SEQ ID NO: 126615 - DNA, 25 bp, probe
atgtgttgaccatcgcaggggtggg

SEQ ID NO: 126616 - DNA, 25 bp, probe
atggagctgccccacggtggggagg

SEQ ID NO: 126617 - DNA, 25 bp, probe
atggagctgccccacggtggggagg

SEQ ID NO: 126618 - DNA, 25 bp, probe
atggggccagagatgaagggaagtg

SEQ ID NO: 126619 - DNA, 25 bp, probe
atggggccagagatgaagggaagtg

SEQ ID NO: 126620 - DNA, 25 bp, probe
atggtggccatgaatatgcagactg

SEQ ID NO: 126621 - DNA, 25 bp, probe
atgtgcttgcatttctagcgagctg

SEQ ID NO: 126622 - DNA, 25 bp, probe
atgtgctttgactgcatgcatggtg

SEQ ID NO: 126623 - DNA, 25 bp, probe
atgtgctttgactgcatgcatggtg

SEQ ID NO: 126624 - DNA, 25 bp, probe
atgtctgtgtgtgtgcatgtatgtg

SEQ ID NO: 126625 - DNA, 25 bp, probe
atgtctctgaggttgcatggcatgg

SEQ ID NO: 126626 - DNA, 25 bp, probe
atgtcccaggatccatggcaggacg

SEQ ID NO: 126627 - DNA, 25 bp, probe
atgtctggcgggcaggcagagacgc

SEQ ID NO: 126628 - DNA, 25 bp, probe
atgtctgtgaagccatggaatacct

SEQ ID NO: 126629 - DNA, 25 bp, probe
atgtgtgtgaaggatcaggaagcac

SEQ ID NO: 126630 - DNA, 25 bp, probe
atgtgttgttgccatggtaatcctg

SEQ ID NO: 126631 - DNA, 25 bp, probe
atggtatgctggagagttactctgc

SEQ ID NO: 126632 - DNA, 25 bp, probe
atgtgaatgggaggatgtggatctt

SEQ ID NO: 126633 - DNA, 25 bp, probe
atgtgaatgcgcaggatgcggatgg

SEQ ID NO: 126634 - DNA, 25 bp, probe
agtacatgctgctgtgcatgcacgg

SEQ ID NO: 126635 - DNA, 25 bp, probe
atgggcattgcaagtgccaccgtgc

SEQ ID NO: 126636 - DNA, 25 bp, probe
atggtgacagagctggcacctctgg

SEQ ID NO: 126637 - DNA, 25 bp, probe
atggttcaagcgctgcttagctgcc

SEQ ID NO: 126638 - DNA, 25 bp, probe
aggagtccatggctggtatggccat

SEQ ID NO: 126639 - DNA, 25 bp, probe
aggagtccatggctggtatggccat

SEQ ID NO: 126640 - DNA, 25 bp, probe
atggaccctgtggggtatagccggc

SEQ ID NO: 126641 - DNA, 25 bp, probe
aggcccctgggacaatgacccagaa

SEQ ID NO: 126642 - DNA, 25 bp, probe
aggcccgtgagatcgaggccttcga

SEQ ID NO: 126643 - DNA, 25 bp, probe
atggctacgtgtgactagtgcttac

SEQ ID NO: 126644 - DNA, 25 bp, probe
atggcccgcgctggagtttcaatac

SEQ ID NO: 126645 - DNA, 25 bp, probe
atgtgccactggagagtattcattt

SEQ ID NO: 126646 - DNA, 25 bp, probe
atgtccctggtttctattgatctgg

SEQ ID NO: 126647 - DNA, 25 bp, probe
atgtccgtagttttatagtcctatt

SEQ ID NO: 126648 - DNA, 25 bp, probe
atgtgcaaggcctttttaggcacta

SEQ ID NO: 126649 - DNA, 25 bp, probe
agtcagagaccactgtcttaacagt

SEQ ID NO: 126650 - DNA, 25 bp, probe
agtcagagaccactgtcttaacagt

SEQ ID NO: 126651 - DNA, 25 bp, probe
aggctgtgagcccttcatgggagac

SEQ ID NO: 126652 - DNA, 25 bp, probe
atggtgtatgatgtctttgggaaga

SEQ ID NO: 126653 - DNA, 25 bp, probe
atgtggacatgagccatttgagggg

SEQ ID NO: 126654 - DNA, 25 bp, probe
atgtgtctgcattgtcactgttgac

SEQ ID NO: 126655 - DNA, 25 bp, probe
atgtgtctgcattgtcactgttgac

SEQ ID NO: 126656 - DNA, 25 bp, probe
atgtgtgcagtttcttgcatttcat

SEQ ID NO: 126657 - DNA, 25 bp, probe
atgtgctggctctcattggtatcat

SEQ ID NO: 126658 - DNA, 25 bp, probe
atgtgtgctcattttgtggttctaa

SEQ ID NO: 126659 - DNA, 25 bp, probe
atgtgtgctcattttgtggttctaa

SEQ ID NO: 126660 - DNA, 25 bp, probe
atgtgtgtgataaatgggtttgcta

SEQ ID NO: 126661 - DNA, 25 bp, probe
atgtgtgtgataaatgggtttgcta

SEQ ID NO: 126662 - DNA, 25 bp, probe
atgtgcctggacaatggtgtacaaa

SEQ ID NO: 126663 - DNA, 25 bp, probe
atgtgcctggacaatggtgtacaaa

SEQ ID NO: 126664 - DNA, 25 bp, probe
atgtgcctggggaaggctacaatca

SEQ ID NO: 126665 - DNA, 25 bp, probe
atgtggctcagtggaagacccttca

SEQ ID NO: 126666 - DNA, 25 bp, probe
atgtcctcagtgtaccactacttag

SEQ ID NO: 126667 - DNA, 25 bp, probe
atgtgcccaggattatattagcatt

SEQ ID NO: 126668 - DNA, 25 bp, probe
atgtgactgctttcattgaatcaca

SEQ ID NO: 126669 - DNA, 25 bp, probe
atgtgactggcaagtggaacagcat

SEQ ID NO: 126670 - DNA, 25 bp, probe
atgtgcacttgaaggtgacctccca

SEQ ID NO: 126671 - DNA, 25 bp, probe
atgtgactgatgagtatgacttact

SEQ ID NO: 126672 - DNA, 25 bp, probe
atgtgactgatgagtatgacttact

SEQ ID NO: 126673 - DNA, 25 bp, probe
atgtgatctcagagtagcccatttc

SEQ ID NO: 126674 - DNA, 25 bp, probe
atgtgcatgatttattacctcattc

SEQ ID NO: 126675 - DNA, 25 bp, probe
atgtgcatgatttattacctcattc

SEQ ID NO: 126676 - DNA, 25 bp, probe
atgtgtaaggagaacgtcttccccg

SEQ ID NO: 126677 - DNA, 25 bp, probe
atgggaagtataaagccttctccac

SEQ ID NO: 126678 - DNA, 25 bp, probe
aggcctatgttagggcctttgccca

SEQ ID NO: 126679 - DNA, 25 bp, probe
aggccaataatcatgacctcttcca

SEQ ID NO: 126680 - DNA, 25 bp, probe
atggacctatacatgatgcacctac

SEQ ID NO: 126681 - DNA, 25 bp, probe
atggagcagcagtcctcgtgctcct

SEQ ID NO: 126682 - DNA, 25 bp, probe
aggctgagcacaggcatttcctgct

SEQ ID NO: 126683 - DNA, 25 bp, probe
atggcagagcacatgagatgtcctc

SEQ ID NO: 126684 - DNA, 25 bp, probe
atggtggcagtcaagatcatctcaa

SEQ ID NO: 126685 - DNA, 25 bp, probe
atggttcagtcctagcaagaagcga

SEQ ID NO: 126686 - DNA, 25 bp, probe
atgtggctccttttcaagacagtga

SEQ ID NO: 126687 - DNA, 25 bp, probe
atgtgacatcgcttgttcctaagtg

SEQ ID NO: 126688 - DNA, 25 bp, probe
atgtgtatcgaccatgtgccatata

SEQ ID NO: 126689 - DNA, 25 bp, probe
atgtgctttatggcaggcgcaaact

SEQ ID NO: 126690 - DNA, 25 bp, probe
atggattctctgtcagcctaatatg

SEQ ID NO: 126691 - DNA, 25 bp, probe
atggattctctgtcagcctaatatg

SEQ ID NO: 126692 - DNA, 25 bp, probe
atgtgttcacattactatagatatg

SEQ ID NO: 126693 - DNA, 25 bp, probe
atgtgtatgcacctattgaaatatg

SEQ ID NO: 126694 - DNA, 25 bp, probe
atgtgctacgcactctgcaacaaag

SEQ ID NO: 126695 - DNA, 25 bp, probe
atgtgcctctcaccatcatgaaaag

SEQ ID NO: 126696 - DNA, 25 bp, probe
atgtcctccaacaataaagagctca

SEQ ID NO: 126697 - DNA, 25 bp, probe
atgtgccccacaagacacatcaagc

SEQ ID NO: 126698 - DNA, 25 bp, probe
atgtgtcatcaatgtacatgccaac

SEQ ID NO: 126699 - DNA, 25 bp, probe
atgtgtctgcaggtagaatgcacag

SEQ ID NO: 126700 - DNA, 25 bp, probe
atgtgttcaccaagggctcaggcaa

SEQ ID NO: 126701 - DNA, 25 bp, probe
atgtgttcaccaagggctcaggcaa

SEQ ID NO: 126702 - DNA, 25 bp, probe
atgggtgcccacagtgtcaggcact

SEQ ID NO: 126703 - DNA, 25 bp, probe
atgggccctcagaggacagtgcttc

SEQ ID NO: 126704 - DNA, 25 bp, probe
atgggtcctgcaattctacagtttc

SEQ ID NO: 126705 - DNA, 25 bp, probe
atgggtcctgttatttatgcttgct

SEQ ID NO: 126706 - DNA, 25 bp, probe
atgggatcgttgtacgactatcttc

SEQ ID NO: 126707 - DNA, 25 bp, probe
atgtggacggttatgactactcatg

SEQ ID NO: 126708 - DNA, 25 bp, probe
atgtgcaaccaatttatactttctg

SEQ ID NO: 126709 - DNA, 25 bp, probe
atgtggaccaactttatctgataat

SEQ ID NO: 126710 - DNA, 25 bp, probe
atgtgtatgtaaatcttcatgtgat

SEQ ID NO: 126711 - DNA, 25 bp, probe
atgtgctggtaactgctttgcttct

SEQ ID NO: 126712 - DNA, 25 bp, probe
atgtgctggtaactgctttgcttct

SEQ ID NO: 126713 - DNA, 25 bp, probe
atggtggagaagactcttgcttcca

SEQ ID NO: 126714 - DNA, 25 bp, probe
atggtggagaagactcttgcttcca

SEQ ID NO: 126715 - DNA, 25 bp, probe
atggttcgaagttttgctgttcagt

SEQ ID NO: 126716 - DNA, 25 bp, probe
atggatttccgtctctggtgtagct

SEQ ID NO: 126717 - DNA, 25 bp, probe
atgtgttttcttgtctggagtctgc

SEQ ID NO: 126718 - DNA, 25 bp, probe
atggttcttcccttcatgatagtat

SEQ ID NO: 126719 - DNA, 25 bp, probe
atggttcttcccttcatgatagtat

SEQ ID NO: 126720 - DNA, 25 bp, probe
atggttttcaggagcatgaagtttg

SEQ ID NO: 126721 - DNA, 25 bp, probe
atggtttacatgttccaatatgatt

SEQ ID NO: 126722 - DNA, 25 bp, probe
atgtgtatttcttatacgcttttct

SEQ ID NO: 126723 - DNA, 25 bp, probe
atgtgtgatttttatagtctcgttt

SEQ ID NO: 126724 - DNA, 25 bp, probe
atgtgtgatttttatagtctcgttt

SEQ ID NO: 126725 - DNA, 25 bp, probe
atgtgtattattatagctacctgtt

SEQ ID NO: 126726 - DNA, 25 bp, probe
atgtgtattattatagctacctgtt

SEQ ID NO: 126727 - DNA, 25 bp, probe
atgtccttagatatcctgagctctg

SEQ ID NO: 126728 - DNA, 25 bp, probe
atgtgggtagtattccagcatcctt

SEQ ID NO: 126729 - DNA, 25 bp, probe
atgtggcttttatttcagtgccata

SEQ ID NO: 126730 - DNA, 25 bp, probe
atgtgactttggattggctcgagat

SEQ ID NO: 126731 - DNA, 25 bp, probe
atgtgggcttaggcttggactggat

SEQ ID NO: 126732 - DNA, 25 bp, probe
atgtggtgtggggcgtggatcgagt

SEQ ID NO: 126733 - DNA, 25 bp, probe
atgtggtgtggggcgtggatcgagt

SEQ ID NO: 126734 - DNA, 25 bp, probe
atgtggcatgcgagccggaactcag

SEQ ID NO: 126735 - DNA, 25 bp, probe
atggggcgtggcaagggaatagcga

SEQ ID NO: 126736 - DNA, 25 bp, probe
atgggcacagcatgaagcaggaaat

SEQ ID NO: 126737 - DNA, 25 bp, probe
atggggataagaaaggcagctgtga

SEQ ID NO: 126738 - DNA, 25 bp, probe
atggtggctcggtacaggttgtaag

SEQ ID NO: 126739 - DNA, 25 bp, probe
atgtgcggctcgtacacagggactt

SEQ ID NO: 126740 - DNA, 25 bp, probe
atgtgcctgtagtcccaggtactca

SEQ ID NO: 126741 - DNA, 25 bp, probe
atgtgccataaggcctcagaatgaa

SEQ ID NO: 126742 - DNA, 25 bp, probe
atgtgccataaggcctcagaatgaa

SEQ ID NO: 126743 - DNA, 25 bp, probe
atgtgaccaaggacatgacactgga

SEQ ID NO: 126744 - DNA, 25 bp, probe
atgtgaccacaaatgcttgcttgga

SEQ ID NO: 126745 - DNA, 25 bp, probe
atgtggctccagaagtgctgctgag

SEQ ID NO: 126746 - DNA, 25 bp, probe
atgtgacatccgcaggtgctgccat

SEQ ID NO: 126747 - DNA, 25 bp, probe
atggagcaatctcgcagtgcagtgg

SEQ ID NO: 126748 - DNA, 25 bp, probe
atggaaggcggcgcagaggcagctg

SEQ ID NO: 126749 - DNA, 25 bp, probe
atggaggtggtcaacagcggctctg

SEQ ID NO: 126750 - DNA, 25 bp, probe
atggaggtggtcaacagcggctctg

SEQ ID NO: 126751 - DNA, 25 bp, probe
atggagcgtggtagccacttcagcc

SEQ ID NO: 126752 - DNA, 25 bp, probe
atgggtgggctcagaatgccccgga

SEQ ID NO: 126753 - DNA, 25 bp, probe
atgggatgggtctgaccccttgtgg

SEQ ID NO: 126754 - DNA, 25 bp, probe
atgtgcaatgccgtcattgacccct

SEQ ID NO: 126755 - DNA, 25 bp, probe
atgtgcaatgccgtcattgacccct

SEQ ID NO: 126756 - DNA, 25 bp, probe
atgtggaccactatgatcacaccat

SEQ ID NO: 126757 - DNA, 25 bp, probe
atgggaacgctttgtccacagtgaa

SEQ ID NO: 126758 - DNA, 25 bp, probe
atgtggaacattacagtccaatggt

SEQ ID NO: 126759 - DNA, 25 bp, probe
atggagaacatctccaccaagggcc

SEQ ID NO: 126760 - DNA, 25 bp, probe
atgtgaccgatatgttcccggacct

SEQ ID NO: 126761 - DNA, 25 bp, probe
atgtgaccgatatgttcccggacct

SEQ ID NO: 126762 - DNA, 25 bp, probe
atgtgacaagtatgacgcccaggca

SEQ ID NO: 126763 - DNA, 25 bp, probe
atgtgaaagttcccaccaaccagtg

SEQ ID NO: 126764 - DNA, 25 bp, probe
atgtgaaagttcccaccaaccagtg

SEQ ID NO: 126765 - DNA, 25 bp, probe
atgtgtacagttggttcatcccttt

SEQ ID NO: 126766 - DNA, 25 bp, probe
atgtgatatcagttgtttgacgtgc

SEQ ID NO: 126767 - DNA, 25 bp, probe
atgtgatatcagttgtttgacgtgc

SEQ ID NO: 126768 - DNA, 25 bp, probe
atgtgcacaagtgttgtgtcgtgca

SEQ ID NO: 126769 - DNA, 25 bp, probe
atgtgcacgaatgactgttctgtcc

SEQ ID NO: 126770 - DNA, 25 bp, probe
atgtgcacaataaacccgtctcacc

SEQ ID NO: 126771 - DNA, 25 bp, probe
atggatcaatcaaacccggctgtcc

SEQ ID NO: 126772 - DNA, 25 bp, probe
atggactgactatggctcgaggtct

SEQ ID NO: 126773 - DNA, 25 bp, probe
atggggagcttcggttattgtcatc

SEQ ID NO: 126774 - DNA, 25 bp, probe
atggaggacaatcagtatgtggtac

SEQ ID NO: 126775 - DNA, 25 bp, probe
atggtgaacagtgctcttgtggtag

SEQ ID NO: 126776 - DNA, 25 bp, probe
atgtgtgtacagactcactgatgca

SEQ ID NO: 126777 - DNA, 25 bp, probe
atgtgtgtgtctctatcttgcatct

SEQ ID NO: 126778 - DNA, 25 bp, probe
atgtggttcatctgaattcattgat

SEQ ID NO: 126779 - DNA, 25 bp, probe
atggcctttaccattatgctgtaat

SEQ ID NO: 126780 - DNA, 25 bp, probe
atggcctttaagtcatttggagaat

SEQ ID NO: 126781 - DNA, 25 bp, probe
atggcttgtggatgtttcttgatgt

SEQ ID NO: 126782 - DNA, 25 bp, probe
atgtgcatactttaggtttgtatgt

SEQ ID NO: 126783 - DNA, 25 bp, probe
atggatacagcttcaggctttgggg

SEQ ID NO: 126784 - DNA, 25 bp, probe
atggatcaagctagatcagcattct

SEQ ID NO: 126785 - DNA, 25 bp, probe
atggacccattgtgcatcttttact

SEQ ID NO: 126786 - DNA, 25 bp, probe
atgtgtatgccactgtcagtccttt

SEQ ID NO: 126787 - DNA, 25 bp, probe
atgtgaatgagcttgtagtgtttgt

SEQ ID NO: 126788 - DNA, 25 bp, probe
atgtgaagcatgctttgctgctatg

SEQ ID NO: 126789 - DNA, 25 bp, probe
atgtggcactggatcatgctgtaac

SEQ ID NO: 126790 - DNA, 25 bp, probe
atgtgtactgtgatctgtaagaagt

SEQ ID NO: 126791 - DNA, 25 bp, probe
atgtgattcttcatcttccaaggaa

SEQ ID NO: 126792 - DNA, 25 bp, probe
atggattttcaaggtctctaaacct

SEQ ID NO: 126793 - DNA, 25 bp, probe
atggtggtccatagagatttgaaac

SEQ ID NO: 126794 - DNA, 25 bp, probe
atggggaacaagcttgtgcaagaag

SEQ ID NO: 126795 - DNA, 25 bp, probe
aggctggaacttgtggttgaggcag

SEQ ID NO: 126796 - DNA, 25 bp, probe
atggtgcggtctcagaggtcaggga

SEQ ID NO: 126797 - DNA, 25 bp, probe
atggtgtggtctacgaggtcaggga

SEQ ID NO: 126798 - DNA, 25 bp, probe
atggatgggtatgctgagactcaat

SEQ ID NO: 126799 - DNA, 25 bp, probe
atggaacactatgtgtattaatcca

SEQ ID NO: 126800 - DNA, 25 bp, probe
atgtgagcctttgtgatacgaattc

SEQ ID NO: 126801 - DNA, 25 bp, probe
atggagtccctgatgattcgagtga

SEQ ID NO: 126802 - DNA, 25 bp, probe
atggacttcatgcaagttggcagtg

SEQ ID NO: 126803 - DNA, 25 bp, probe
atgggctgtgcacacggttgagccg

SEQ ID NO: 126804 - DNA, 25 bp, probe
atgtggctgtggcacgaggaagcaa

SEQ ID NO: 126805 - DNA, 25 bp, probe
atgtggtgggtatcaggaggcagcg

SEQ ID NO: 126806 - DNA, 25 bp, probe
atgtggatgcagcttacgaagtggc

SEQ ID NO: 126807 - DNA, 25 bp, probe
atggagaggccagtacgacgtggcc

SEQ ID NO: 126808 - DNA, 25 bp, probe
aggcagggatcggtctgagcctggg

SEQ ID NO: 126809 - DNA, 25 bp, probe
atgtgaggtcacagtctactcgggg

SEQ ID NO: 126810 - DNA, 25 bp, probe
atgtgattgctcagtgtattctccc

SEQ ID NO: 126811 - DNA, 25 bp, probe
aggattcctagcctattcttactta

SEQ ID NO: 126812 - DNA, 25 bp, probe
aggattcctagcctattcttactta

SEQ ID NO: 126813 - DNA, 25 bp, probe
atggattttcaccgattctactttg

SEQ ID NO: 126814 - DNA, 25 bp, probe
atgtgatttcctgggttctcactgt

SEQ ID NO: 126815 - DNA, 25 bp, probe
atgtgacttcactttggtgccaatg

SEQ ID NO: 126816 - DNA, 25 bp, probe
atgtgacttcactttggtgccaatg

SEQ ID NO: 126817 - DNA, 25 bp, probe
atgtgagctctatggtggtggatat

SEQ ID NO: 126818 - DNA, 25 bp, probe
atggtggctgcatggcaggtcttaa

SEQ ID NO: 126819 - DNA, 25 bp, probe
atgtgtggtgacttgcggatttatg

SEQ ID NO: 126820 - DNA, 25 bp, probe
atgtgtatgcgtttgggattgttct

SEQ ID NO: 126821 - DNA, 25 bp, probe
atggtatcctattttcttgtttata

SEQ ID NO: 126822 - DNA, 25 bp, probe
atggtatcctattttcttgtttata

SEQ ID NO: 126823 - DNA, 25 bp, probe
atggtaccattctaatgtatgtagt

SEQ ID NO: 126824 - DNA, 25 bp, probe
atggaactagatgacgctttaagat

SEQ ID NO: 126825 - DNA, 25 bp, probe
atggaactaactttcctggactgtg

SEQ ID NO: 126826 - DNA, 25 bp, probe
atgggactgaatatacctggggtat

SEQ ID NO: 126827 - DNA, 25 bp, probe
atgggactgaatatacctggggtat

SEQ ID NO: 126828 - DNA, 25 bp, probe
atggtggtatcttaaaatggtggtt

SEQ ID NO: 126829 - DNA, 25 bp, probe
atggtggtacgataaaggtgaatgt

SEQ ID NO: 126830 - DNA, 25 bp, probe
atggtggtacgacaaaggagagtgc

SEQ ID NO: 126831 - DNA, 25 bp, probe
atgggttactggaagccgggactgc

SEQ ID NO: 126832 - DNA, 25 bp, probe
atgggttactacaaaaacaacatga

SEQ ID NO: 126833 - DNA, 25 bp, probe
actcgttaaagcaaagcgctaagta

SEQ ID NO: 126834 - DNA, 25 bp, probe
aggcttaattgtggaaagctaagta

SEQ ID NO: 126835 - DNA, 25 bp, probe
aggccatcctttgtgaagctggaac

SEQ ID NO: 126836 - DNA, 25 bp, probe
gcaggcacaactctttatacggttg

SEQ ID NO: 126837 - DNA, 25 bp, probe
atggactggatgctttataaatttg

SEQ ID NO: 126838 - DNA, 25 bp, probe
atgggcggatttttaaatctatgat

SEQ ID NO: 126839 - DNA, 25 bp, probe
atgtggggatgttttgacatttaca

SEQ ID NO: 126840 - DNA, 25 bp, probe
atgtgaggggatattgctgctttaa

SEQ ID NO: 126841 - DNA, 25 bp, probe
atggtggagtgtattcatcttctgg

SEQ ID NO: 126842 - DNA, 25 bp, probe
atggtgtaattttgtcctctctgtg

SEQ ID NO: 126843 - DNA, 25 bp, probe
atgggaactttaacactctagctat

SEQ ID NO: 126844 - DNA, 25 bp, probe
atgggtagtcatggaatacttggct

SEQ ID NO: 126845 - DNA, 25 bp, probe
atgtggtgcgtgtgaatctgtgggc

SEQ ID NO: 126846 - DNA, 25 bp, probe
atgtgggtgatggtggatgatgtgt

SEQ ID NO: 126847 - DNA, 25 bp, probe
atgtgagcggaattccatgcagtgt

SEQ ID NO: 126848 - DNA, 25 bp, probe
atgtgtgccggaatatcagcaggcg

SEQ ID NO: 126849 - DNA, 25 bp, probe
atgtgatcttggctcactgcagcct

SEQ ID NO: 126850 - DNA, 25 bp, probe
atgtgagtgtggcacacctcctgtt

SEQ ID NO: 126851 - DNA, 25 bp, probe
atggaggaggtgccacctgactggg

SEQ ID NO: 126852 - DNA, 25 bp, probe
atggaggaatcttggcgttcagcag

SEQ ID NO: 126853 - DNA, 25 bp, probe
gagtgggattaacaaccctggaaga

SEQ ID NO: 126854 - DNA, 25 bp, probe
atgtgggatgtatttgaagcacctg

SEQ ID NO: 126855 - DNA, 25 bp, probe
atgggatgcattgaggacagaacta

SEQ ID NO: 126856 - DNA, 25 bp, probe
atgtggatgctttgcacaccaaggc

SEQ ID NO: 126857 - DNA, 25 bp, probe
atggtgtgtgcttagcgcaaatggc

SEQ ID NO: 126858 - DNA, 25 bp, probe
atgggagagctctggcagatgtccc

SEQ ID NO: 126859 - DNA, 25 bp, probe
atgtgtgggcatttggcgtgaccat

SEQ ID NO: 126860 - DNA, 25 bp, probe
atgtgtggtcatttggtgtgctgct

SEQ ID NO: 126861 - DNA, 25 bp, probe
atgtgtaccatactgtgtgctccag

SEQ ID NO: 126862 - DNA, 25 bp, probe
atgggagctcttttctgatccatgg

SEQ ID NO: 126863 - DNA, 25 bp, probe
atggcgatgctcatagctcaggcct

SEQ ID NO: 126864 - DNA, 25 bp, probe
atggagtacagctgtctggcctcca

SEQ ID NO: 126865 - DNA, 25 bp, probe
atggaggaatcttcctgtacccagc

SEQ ID NO: 126866 - DNA, 25 bp, probe
atggaaaagtacgagtggcccctag

SEQ ID NO: 126867 - DNA, 25 bp, probe
atgggagaactctgagtggccacct

SEQ ID NO: 126868 - DNA, 25 bp, probe
atgggaaagccagcagtgtcaccgc

SEQ ID NO: 126869 - DNA, 25 bp, probe
atgggaaagccagcagtgtcaccgc

SEQ ID NO: 126870 - DNA, 25 bp, probe
atgtggacaactccaagctctcaca

SEQ ID NO: 126871 - DNA, 25 bp, probe
atgtgtgaagtttgcaagcttgctt

SEQ ID NO: 126872 - DNA, 25 bp, probe
atgtgtgactttggcatcagtggct

SEQ ID NO: 126873 - DNA, 25 bp, probe
atggctcactcttgctgcagaggaa

SEQ ID NO: 126874 - DNA, 25 bp, probe
atggctcactcttgctgcagaggaa

SEQ ID NO: 126875 - DNA, 25 bp, probe
atggtcagtctctactgggacatgt

SEQ ID NO: 126876 - DNA, 25 bp, probe
atgtgtcaacacgatggggagctac

SEQ ID NO: 126877 - DNA, 25 bp, probe
atggatacacagaggttgcagcaga

SEQ ID NO: 126878 - DNA, 25 bp, probe
atggagcaagagagtggtcagaaca

SEQ ID NO: 126879 - DNA, 25 bp, probe
atgggatacgaagtggatacctcta

SEQ ID NO: 126880 - DNA, 25 bp, probe
atgggatacgaagtggatacctcta

SEQ ID NO: 126881 - DNA, 25 bp, probe
atgggatacgaagtggatacctcta

SEQ ID NO: 126882 - DNA, 25 bp, probe
atggttacgtcagtcgtgtgcagct

SEQ ID NO: 126883 - DNA, 25 bp, probe
atggttacgtcagtcgtgtgcagct

SEQ ID NO: 126884 - DNA, 25 bp, probe
atggttagcgaggccgtgcagggcc

SEQ ID NO: 126885 - DNA, 25 bp, probe
atggagaagcgggcctggaaggagc

SEQ ID NO: 126886 - DNA, 25 bp, probe
atgggagacgggggcagagagggac

SEQ ID NO: 126887 - DNA, 25 bp, probe
atggggagctggggccaggaaccac

SEQ ID NO: 126888 - DNA, 25 bp, probe
atgggtacggcaaccacatgtccca

SEQ ID NO: 126889 - DNA, 25 bp, probe
aggagttcaggaacccttctccata

SEQ ID NO: 126890 - DNA, 25 bp, probe
atggagtcttggtgtcctactctat

SEQ ID NO: 126891 - DNA, 25 bp, probe
atgggtctgggaagcttttgtctat

SEQ ID NO: 126892 - DNA, 25 bp, probe
atgtggtattggtgctttgtgtcta

SEQ ID NO: 126893 - DNA, 25 bp, probe
atgtgtgtcttgtacagttagttat

SEQ ID NO: 126894 - DNA, 25 bp, probe
atggtgccttgcagcactgttgatg

SEQ ID NO: 126895 - DNA, 25 bp, probe
atggtgctgtctatgcacaggtgtg

SEQ ID NO: 126896 - DNA, 25 bp, probe
atggggtttatgtcagtcattttgg

SEQ ID NO: 126897 - DNA, 25 bp, probe
atggttttcttgtgtgtttattgtc

SEQ ID NO: 126898 - DNA, 25 bp, probe
atggttttgctttttgattcttgta

SEQ ID NO: 126899 - DNA, 25 bp, probe
atggttttgctttttgattcttgta

SEQ ID NO: 126900 - DNA, 25 bp, probe
atgggtctggttttcatttcttatg

SEQ ID NO: 126901 - DNA, 25 bp, probe
catggaaaggttttaagatttgagg

SEQ ID NO: 126902 - DNA, 25 bp, probe
atggagaagggtatatttaatgagc

SEQ ID NO: 126903 - DNA, 25 bp, probe
atgggctaggccttttttatattga

SEQ ID NO: 126904 - DNA, 25 bp, probe
atgggctaggccttttttatattga

SEQ ID NO: 126905 - DNA, 25 bp, probe
atgtgtgctagagcttactctgaga

SEQ ID NO: 126906 - DNA, 25 bp, probe
atggtcaacgccatgcaccagaaat

SEQ ID NO: 126907 - DNA, 25 bp, probe
atggtcacatgggctaattagaatt

SEQ ID NO: 126908 - DNA, 25 bp, probe
atggaaaggctgttatatggaatgt

SEQ ID NO: 126909 - DNA, 25 bp, probe
atgggaagtctgtcgattggtggtc

SEQ ID NO: 126910 - DNA, 25 bp, probe
atggcgtatgtcatcaacgggggtg

SEQ ID NO: 126911 - DNA, 25 bp, probe
atggggtatttcaccctgtgtgctg

SEQ ID NO: 126912 - DNA, 25 bp, probe
atggattggtttattgccgtgtgct

SEQ ID NO: 126913 - DNA, 25 bp, probe
atggttggttatattctggggcttg

SEQ ID NO: 126914 - DNA, 25 bp, probe
atggtttttatttctcgggtgcatt

SEQ ID NO: 126915 - DNA, 25 bp, probe
atggcctttggatcactgggggcac

SEQ ID NO: 126916 - DNA, 25 bp, probe
atggcagcccaggtaactgggccag

SEQ ID NO: 126917 - DNA, 25 bp, probe
atggagctcacggcttaaagcccaa

SEQ ID NO: 126918 - DNA, 25 bp, probe
atggaggaagctgtaccgtgccaac

SEQ ID NO: 126919 - DNA, 25 bp, probe
atggaggaagctgtaccgtgccaac

SEQ ID NO: 126920 - DNA, 25 bp, probe
atgggggagctgttgaatgggtccc

SEQ ID NO: 126921 - DNA, 25 bp, probe
atggggtgaccacagaggagtgcca

SEQ ID NO: 126922 - DNA, 25 bp, probe
atggggggcacacagagtgagcagt

SEQ ID NO: 126923 - DNA, 25 bp, probe
atggtgggaatagggcaagatgcag

SEQ ID NO: 126924 - DNA, 25 bp, probe
atggggagcctgttagcacagtgcc

SEQ ID NO: 126925 - DNA, 25 bp, probe
atggggcaagctctggcacagtgcc

SEQ ID NO: 126926 - DNA, 25 bp, probe
atggggcagaagcctgaacagagcc

SEQ ID NO: 126927 - DNA, 25 bp, probe
atggatacagatggctctggaaagc

SEQ ID NO: 126928 - DNA, 25 bp, probe
atgtgtgacatggtggcggaggagc

SEQ ID NO: 126929 - DNA, 25 bp, probe
atgtgtgacatggtggcggaggagc

SEQ ID NO: 126930 - DNA, 25 bp, probe
atgtggccagggacggcatgagcag

SEQ ID NO: 126931 - DNA, 25 bp, probe
atgggcttgggagccagacactcca

SEQ ID NO: 126932 - DNA, 25 bp, probe
atgggcaaggtggtccagatcctac

SEQ ID NO: 126933 - DNA, 25 bp, probe
atgggcagagagaaactaatcagct

SEQ ID NO: 126934 - DNA, 25 bp, probe
atgggaatgagatcctactactatg

SEQ ID NO: 126935 - DNA, 25 bp, probe
atggagtatgaatgcccctacttgg

SEQ ID NO: 126936 - DNA, 25 bp, probe
atgggtgaacaacactgctggtttg

SEQ ID NO: 126937 - DNA, 25 bp, probe
atgggtgaacaacactgctggtttg

SEQ ID NO: 126938 - DNA, 25 bp, probe
atgggcaaaaacatcagcattattt

SEQ ID NO: 126939 - DNA, 25 bp, probe
atgggcaaaaacatcagcattattt

SEQ ID NO: 126940 - DNA, 25 bp, probe
atgggcagaagcacattgtcatctt

SEQ ID NO: 126941 - DNA, 25 bp, probe
atgggagcagacaaagaggatcttt

SEQ ID NO: 126942 - DNA, 25 bp, probe
atgggagcagacaaagaggatcttt

SEQ ID NO: 126943 - DNA, 25 bp, probe
atggtccatgtcaaaaggcattgat

SEQ ID NO: 126944 - DNA, 25 bp, probe
atggtcagattccaaagtcctttct

SEQ ID NO: 126945 - DNA, 25 bp, probe
atggtcagattccaaagtcctttct

SEQ ID NO: 126946 - DNA, 25 bp, probe
atggtactctaatcagtccttatta

SEQ ID NO: 126947 - DNA, 25 bp, probe
atggttgtaaattcatacacttatc

SEQ ID NO: 126948 - DNA, 25 bp, probe
atggtttcagaaagcattcaagtac

SEQ ID NO: 126949 - DNA, 25 bp, probe
atggcatttaggaattagaagtcaa

SEQ ID NO: 126950 - DNA, 25 bp, probe
atggcatttaggaattagaagtcaa

SEQ ID NO: 126951 - DNA, 25 bp, probe
atggcttaagcctgtgtataaaaaa

SEQ ID NO: 126952 - DNA, 25 bp, probe
atgggtacccatttgataagagaaa

SEQ ID NO: 126953 - DNA, 25 bp, probe
atggagaaaccatatgccaagagaa

SEQ ID NO: 126954 - DNA, 25 bp, probe
atggagaaaccatgcacatagaata

SEQ ID NO: 126955 - DNA, 25 bp, probe
atggacaaatgcctatgaaattaaa

SEQ ID NO: 126956 - DNA, 25 bp, probe
atggccacgtctctggattttaaaa

SEQ ID NO: 126957 - DNA, 25 bp, probe
aggccactttggagttgtctaccac

SEQ ID NO: 126958 - DNA, 25 bp, probe
agtgtacttgtaattgttgtctgaa

SEQ ID NO: 126959 - DNA, 25 bp, probe
aggaatttgctttgtttactgctag

SEQ ID NO: 126960 - DNA, 25 bp, probe
aggccattaatttggctttcggatc

SEQ ID NO: 126961 - DNA, 25 bp, probe
atgggaggacattggcctttcggct

SEQ ID NO: 126962 - DNA, 25 bp, probe
atggagatggacagacctgggcctg

SEQ ID NO: 126963 - DNA, 25 bp, probe
atgggagagattagacactggaggt

SEQ ID NO: 126964 - DNA, 25 bp, probe
atgggaatattcagcagaggacagt

SEQ ID NO: 126965 - DNA, 25 bp, probe
atggtacatataattagggaaggat

SEQ ID NO: 126966 - DNA, 25 bp, probe
atggtgacttttagggagcacaaac

SEQ ID NO: 126967 - DNA, 25 bp, probe
atgggttgcttaaggtcatgcagct

SEQ ID NO: 126968 - DNA, 25 bp, probe
atgtggtctgttggggtcatcatct

SEQ ID NO: 126969 - DNA, 25 bp, probe
atgggctggtggagcgctcattaat

SEQ ID NO: 126970 - DNA, 25 bp, probe
atgggctgctgtcattttatgctaa

SEQ ID NO: 126971 - DNA, 25 bp, probe
atgtggctcttcgttgtttagaact

SEQ ID NO: 126972 - DNA, 25 bp, probe
atggagcacttcctttccagaaact

SEQ ID NO: 126973 - DNA, 25 bp, probe
atgggcacattcttgtggcaagcat

SEQ ID NO: 126974 - DNA, 25 bp, probe
atggagctatgcctcagtggcaacc

SEQ ID NO: 126975 - DNA, 25 bp, probe
atggtgcttctgacgttgatgactg

SEQ ID NO: 126976 - DNA, 25 bp, probe
atggtgtttgtcatctgctggatgc

SEQ ID NO: 126977 - DNA, 25 bp, probe
atggcgattgttttcttggacggat

SEQ ID NO: 126978 - DNA, 25 bp, probe
atggcgattgttatttaatgagctt

SEQ ID NO: 126979 - DNA, 25 bp, probe
atgggcatcaacacttttattctta

SEQ ID NO: 126980 - DNA, 25 bp, probe
atggtcctcactgattgttttcttt

SEQ ID NO: 126981 - DNA, 25 bp, probe
atggtcctcactgattgttttcttt

SEQ ID NO: 126982 - DNA, 25 bp, probe
atggtccttgtgatggtattacttt

SEQ ID NO: 126983 - DNA, 25 bp, probe
atggtcactgggctgtgtcatgtac

SEQ ID NO: 126984 - DNA, 25 bp, probe
atggagtgttggctgtgctattata

SEQ ID NO: 126985 - DNA, 25 bp, probe
atgggtttgctaatgtgctgtttta

SEQ ID NO: 126986 - DNA, 25 bp, probe
atgggtttgctaatgtgctgtttta

SEQ ID NO: 126987 - DNA, 25 bp, probe
atggtgtttgtgatgactattttga

SEQ ID NO: 126988 - DNA, 25 bp, probe
atggtgttgaccaataaaatatcta

SEQ ID NO: 126989 - DNA, 25 bp, probe
atggaggtgccaaataattatgtgc

SEQ ID NO: 126990 - DNA, 25 bp, probe
atggaagaactggatgaatcatacc

SEQ ID NO: 126991 - DNA, 25 bp, probe
atggacctccttaatatcatcagcc

SEQ ID NO: 126992 - DNA, 25 bp, probe
atggaactcaccaacattattcata

SEQ ID NO: 126993 - DNA, 25 bp, probe
atggaactcaccaacattattcata

SEQ ID NO: 126994 - DNA, 25 bp, probe
atggaatccaccaagacctgaaatt

SEQ ID NO: 126995 - DNA, 25 bp, probe
atggattccattaaactgcattaag

SEQ ID NO: 126996 - DNA, 25 bp, probe
atggtccatctattaacgcactaat

SEQ ID NO: 126997 - DNA, 25 bp, probe
atggagctgatccagtaacctcgga

SEQ ID NO: 126998 - DNA, 25 bp, probe
atggggctcagaatgcagacctggg

SEQ ID NO: 126999 - DNA, 25 bp, probe
atgtggcagctgattccatgtctgg

SEQ ID NO: 127000 - DNA, 25 bp, probe
atgtggctcaggatggctttgaatg

SEQ ID NO: 127001 - DNA, 25 bp, probe
atgtggcatcgcagtctcttagaat

SEQ ID NO: 127002 - DNA, 25 bp, probe
atgtggcaggcatgtcatcgacagc

SEQ ID NO: 127003 - DNA, 25 bp, probe
atggagcagccatggctatggcaca

SEQ ID NO: 127004 - DNA, 25 bp, probe
atgggatgctcatgtgacagcagtt

SEQ ID NO: 127005 - DNA, 25 bp, probe
atgggaatatggcatcatgcgtgtt

SEQ ID NO: 127006 - DNA, 25 bp, probe
atgggaaagaatactggcttgtgaa

SEQ ID NO: 127007 - DNA, 25 bp, probe
atggaaaagaatatggtgtcaccct

SEQ ID NO: 127008 - DNA, 25 bp, probe
atggatccacagtcacgtgggctcc

SEQ ID NO: 127009 - DNA, 25 bp, probe
atggtccaaatcttttggtcacaat

SEQ ID NO: 127010 - DNA, 25 bp, probe
atggtaagaacgttcaggctcacaa

SEQ ID NO: 127011 - DNA, 25 bp, probe
atgggaagagcaacagtaactccaa

SEQ ID NO: 127012 - DNA, 25 bp, probe
atggaggagatcccattcaaccctg

SEQ ID NO: 127013 - DNA, 25 bp, probe
atggggagattgccaggctgaccct

SEQ ID NO: 127014 - DNA, 25 bp, probe
atggggctgatgggaactgcaacgt

SEQ ID NO: 127015 - DNA, 25 bp, probe
atggggctgatgggaactgcaacgt

SEQ ID NO: 127016 - DNA, 25 bp, probe
atggggctatgtgcacttgaaggtg

SEQ ID NO: 127017 - DNA, 25 bp, probe
atgggcttggaccacttacagtgtg

SEQ ID NO: 127018 - DNA, 25 bp, probe
atggtcggaacgccatactggatgg

SEQ ID NO: 127019 - DNA, 25 bp, probe
atggtacgacattctatattgcaat

SEQ ID NO: 127020 - DNA, 25 bp, probe
atggccaagttattgtgattgaagg

SEQ ID NO: 127021 - DNA, 25 bp, probe
atggtattttctagactgtgaagat

SEQ ID NO: 127022 - DNA, 25 bp, probe
atggtattttctagactgtgaagat

SEQ ID NO: 127023 - DNA, 25 bp, probe
atgggagaagactatccttggagat

SEQ ID NO: 127024 - DNA, 25 bp, probe
agggcaatcgcctccttggaggctc

SEQ ID NO: 127025 - DNA, 25 bp, probe
aggccaatcgccactttggcatggc

SEQ ID NO: 127026 - DNA, 25 bp, probe
aggaaatgcgaaaggttgtatgtga

SEQ ID NO: 127027 - DNA, 25 bp, probe
atggaaatgccgccgtggtgtccat

SEQ ID NO: 127028 - DNA, 25 bp, probe
atggaaatgccgccgtggtgtccat

SEQ ID NO: 127029 - DNA, 25 bp, probe
atggagtgaccagctttgtgtccag

SEQ ID NO: 127030 - DNA, 25 bp, probe
atggggaatcatgttgctgtaacag

SEQ ID NO: 127031 - DNA, 25 bp, probe
atggccaaatcgatgctgctgtaga

SEQ ID NO: 127032 - DNA, 25 bp, probe
atggccaaaagagttgttgctgaac

SEQ ID NO: 127033 - DNA, 25 bp, probe
atggcaccaaacgctggtcacaaca

SEQ ID NO: 127034 - DNA, 25 bp, probe
atggctgggaacccaagtccaagca

SEQ ID NO: 127035 - DNA, 25 bp, probe
atggctggggaacaatgttcacaga

SEQ ID NO: 127036 - DNA, 25 bp, probe
atggcatgggcattacgggtgttga

SEQ ID NO: 127037 - DNA, 25 bp, probe
aggctgaggctgaagtgcaaggatt

SEQ ID NO: 127038 - DNA, 25 bp, probe
atggaaggcaaagcatcacatgtat

SEQ ID NO: 127039 - DNA, 25 bp, probe
atggaaagcattagtctgacagtac

SEQ ID NO: 127040 - DNA, 25 bp, probe
atggagaagttcaacttgctgtaaa

SEQ ID NO: 127041 - DNA, 25 bp, probe
atgggcaattctgacttctcccatc

SEQ ID NO: 127042 - DNA, 25 bp, probe
atgggcagtttcacagttcatccag

SEQ ID NO: 127043 - DNA, 25 bp, probe
atgggacttttgtcatttcaaagac

SEQ ID NO: 127044 - DNA, 25 bp, probe
atggaactctttagaattggtggaa

SEQ ID NO: 127045 - DNA, 25 bp, probe
aggaagtgaatctgtattggggtac

SEQ ID NO: 127046 - DNA, 25 bp, probe
aggaaactgacaaatactggggtgt

SEQ ID NO: 127047 - DNA, 25 bp, probe
aggactcccataaatcactgggggg

SEQ ID NO: 127048 - DNA, 25 bp, probe
aggacctggaggtacctggatgggc

SEQ ID NO: 127049 - DNA, 25 bp, probe
atggacggagacagggccgtggcgc

SEQ ID NO: 127050 - DNA, 25 bp, probe
atggccgtgcaagcttaggctgggg

SEQ ID NO: 127051 - DNA, 25 bp, probe
atggtaagctatgcttagtgccaat

SEQ ID NO: 127052 - DNA, 25 bp, probe
atggataagccagccaactgcacca

SEQ ID NO: 127053 - DNA, 25 bp, probe
atggtaaccacagtgcaaggcaact

SEQ ID NO: 127054 - DNA, 25 bp, probe
atggtgtcccacacaagtgtgacca

SEQ ID NO: 127055 - DNA, 25 bp, probe
aggattccccaaaatgtgctcctca

SEQ ID NO: 127056 - DNA, 25 bp, probe
aggtcacccgaatggtgtccatcgt

SEQ ID NO: 127057 - DNA, 25 bp, probe
agaaaccggaaatcttccatgccct

SEQ ID NO: 127058 - DNA, 25 bp, probe
aggattctagagtgaacttccacac

SEQ ID NO: 127059 - DNA, 25 bp, probe
atgggttcaagatgaatttgtcaac

SEQ ID NO: 127060 - DNA, 25 bp, probe
atgggttcaagatgaatttgtcaac

SEQ ID NO: 127061 - DNA, 25 bp, probe
atgggttcacattgaaatatgtcta

SEQ ID NO: 127062 - DNA, 25 bp, probe
atgggtacctgtaataatactgagc

SEQ ID NO: 127063 - DNA, 25 bp, probe
atgggtacctgtaataatactgagc

SEQ ID NO: 127064 - DNA, 25 bp, probe
atgggtcactgcctccaagtgaaag

SEQ ID NO: 127065 - DNA, 25 bp, probe
atgggtcactgcctccaagtgaaag

SEQ ID NO: 127066 - DNA, 25 bp, probe
atgggtcctggatcacagaactcat

SEQ ID NO: 127067 - DNA, 25 bp, probe
agggtatctggatcaacccgacaac

SEQ ID NO: 127068 - DNA, 25 bp, probe
agggtttatttgcaagacgacgaca

SEQ ID NO: 127069 - DNA, 25 bp, probe
atgggttttttgcacatgaccctgt

SEQ ID NO: 127070 - DNA, 25 bp, probe
atggtagtttctacccatacctcag

SEQ ID NO: 127071 - DNA, 25 bp, probe
atggtagtatacccctatgcagtgt

SEQ ID NO: 127072 - DNA, 25 bp, probe
atggtcagaagagccatcccatggc

SEQ ID NO: 127073 - DNA, 25 bp, probe
aggccagtagtggcctcccaagatg

SEQ ID NO: 127074 - DNA, 25 bp, probe
aggctgggagatccttcgtcaaaac

SEQ ID NO: 127075 - DNA, 25 bp, probe
aggcgtggatggcatcttataaata

SEQ ID NO: 127076 - DNA, 25 bp, probe
aggtttggggttttcagatatcaga

SEQ ID NO: 127077 - DNA, 25 bp, probe
aggtcttgggaggctttcaattgta

SEQ ID NO: 127078 - DNA, 25 bp, probe
aggcctcgttgacatttacatcttt

SEQ ID NO: 127079 - DNA, 25 bp, probe
aggcctggaaacgattttctgtatg

SEQ ID NO: 127080 - DNA, 25 bp, probe
aggcctggattgaaatgtccctggt

SEQ ID NO: 127081 - DNA, 25 bp, probe
aggcgctggaagaaaaacttcattg

SEQ ID NO: 127082 - DNA, 25 bp, probe
atgggtggggagcaaatcatctgca

SEQ ID NO: 127083 - DNA, 25 bp, probe
atggttggaaatctagtcatcatac

SEQ ID NO: 127084 - DNA, 25 bp, probe
atggttggaaatctagtcatcatac

SEQ ID NO: 127085 - DNA, 25 bp, probe
atggtgggaagtactcagtcaagac

SEQ ID NO: 127086 - DNA, 25 bp, probe
atggagggccagtaccagttcagtt

SEQ ID NO: 127087 - DNA, 25 bp, probe
atggcggtcacatatccaggtagct

SEQ ID NO: 127088 - DNA, 25 bp, probe
aggcctgtagacttgccatggtgac

SEQ ID NO: 127089 - DNA, 25 bp, probe
atggttgtggtgtacctgcggatct

SEQ ID NO: 127090 - DNA, 25 bp, probe
atggtggtgggcacagcctggatct

SEQ ID NO: 127091 - DNA, 25 bp, probe
atggtgcggggaggaccggcaccta

SEQ ID NO: 127092 - DNA, 25 bp, probe
atggtgcggggaggaccggcaccta

SEQ ID NO: 127093 - DNA, 25 bp, probe
atggtgcggaggagaccctcagtgc

SEQ ID NO: 127094 - DNA, 25 bp, probe
atggtgcggaggagaccctcagtgc

SEQ ID NO: 127095 - DNA, 25 bp, probe
atggttggcctgagcaacctagtaa

SEQ ID NO: 127096 - DNA, 25 bp, probe
atggttaccgtatacagttgatata

SEQ ID NO: 127097 - DNA, 25 bp, probe
atggggaccaaatccatttgtctga

SEQ ID NO: 127098 - DNA, 25 bp, probe
atggggaacaaagcctcctacatcc

SEQ ID NO: 127099 - DNA, 25 bp, probe
atggggaacaaagcctcctacatcc

SEQ ID NO: 127100 - DNA, 25 bp, probe
atggggaacaaagcctcctacatcc

SEQ ID NO: 127101 - DNA, 25 bp, probe
atggctggaaaggcaacccgtaaca

SEQ ID NO: 127102 - DNA, 25 bp, probe
atggaaggatacggacctcttaaag

SEQ ID NO: 127103 - DNA, 25 bp, probe
atggaacctacggacaggtgtacaa

SEQ ID NO: 127104 - DNA, 25 bp, probe
atggccaatctagaacgtggattcc

SEQ ID NO: 127105 - DNA, 25 bp, probe
atggccaacaggccggggtactcca

SEQ ID NO: 127106 - DNA, 25 bp, probe
atggcgagattgggatcgggacccc

SEQ ID NO: 127107 - DNA, 25 bp, probe
atggagggcgggactgggccgccca

SEQ ID NO: 127108 - DNA, 25 bp, probe
atggggtaggaggatgggctcgccc

SEQ ID NO: 127109 - DNA, 25 bp, probe
atggggatggaggagctgggggatc

SEQ ID NO: 127110 - DNA, 25 bp, probe
atggtgagcaggaaattggggtgtt

SEQ ID NO: 127111 - DNA, 25 bp, probe
atggggagaataatgcgtgagtgtt

SEQ ID NO: 127112 - DNA, 25 bp, probe
atggggagaataatgcgtgagtgtt

SEQ ID NO: 127113 - DNA, 25 bp, probe
atggggcagaatttggaggctcagt

SEQ ID NO: 127114 - DNA, 25 bp, probe
atggggagagactgcgcaggcgcag

SEQ ID NO: 127115 - DNA, 25 bp, probe
atggcactgagtgctggcgggcatg

SEQ ID NO: 127116 - DNA, 25 bp, probe
aggctctgaaacccgaggatgccaa

SEQ ID NO: 127117 - DNA, 25 bp, probe
atggcctgaggtcccgatggacgaa

SEQ ID NO: 127118 - DNA, 25 bp, probe
aggccatcgattcccgggaagatcc

SEQ ID NO: 127119 - DNA, 25 bp, probe
aggccatcgcatacctgagggcctg

SEQ ID NO: 127120 - DNA, 25 bp, probe
aggcctctgcaaggctagtctgggg

SEQ ID NO: 127121 - DNA, 25 bp, probe
aggccctgaaggagacgtcggagaa

SEQ ID NO: 127122 - DNA, 25 bp, probe
aggccctgaaggagacgtcggagaa

SEQ ID NO: 127123 - DNA, 25 bp, probe
atggcagaaaaggaggcacgtcgga

SEQ ID NO: 127124 - DNA, 25 bp, probe
atggcagacaatttgcaggctactt

SEQ ID NO: 127125 - DNA, 25 bp, probe
atggagacagaacggatgatttatc

SEQ ID NO: 127126 - DNA, 25 bp, probe
atggagacagaacggatgatttatc

SEQ ID NO: 127127 - DNA, 25 bp, probe
atggataagacccgagctttgattg

SEQ ID NO: 127128 - DNA, 25 bp, probe
atggtcaagatcggggtcttctcca

SEQ ID NO: 127129 - DNA, 25 bp, probe
atggtgaaaccgaagctcgactctt

SEQ ID NO: 127130 - DNA, 25 bp, probe
aggctctagatggcaaagcccactt

SEQ ID NO: 127131 - DNA, 25 bp, probe
atggcatctgaaggctgcaggcccg

SEQ ID NO: 127132 - DNA, 25 bp, probe
agtgaatctcaggcgcagcgcctcg

SEQ ID NO: 127133 - DNA, 25 bp, probe
atggtaatcacagcattgctctcga

SEQ ID NO: 127134 - DNA, 25 bp, probe
atggagaagacaccttgtgctcatg

SEQ ID NO: 127135 - DNA, 25 bp, probe
atggatgaaagccacatgtctgtgt

SEQ ID NO: 127136 - DNA, 25 bp, probe
atggatgaaagccacatgtctgtgt

SEQ ID NO: 127137 - DNA, 25 bp, probe
atggtgatggaccacatactcctcg

SEQ ID NO: 127138 - DNA, 25 bp, probe
atggtgatggaccacatactcctcg

SEQ ID NO: 127139 - DNA, 25 bp, probe
atggtgtggcaggagcacacgccca

SEQ ID NO: 127140 - DNA, 25 bp, probe
aggctgtggcaggagaatcgtttga

SEQ ID NO: 127141 - DNA, 25 bp, probe
atggctcaggagaggctctttgatt

SEQ ID NO: 127142 - DNA, 25 bp, probe
atggcctacagacacttctggatgt

SEQ ID NO: 127143 - DNA, 25 bp, probe
atggctgtaagtctcatggttcagt

SEQ ID NO: 127144 - DNA, 25 bp, probe
atggcatgaacagtttagcttaagt

SEQ ID NO: 127145 - DNA, 25 bp, probe
atggatcagccattttatgctacag

SEQ ID NO: 127146 - DNA, 25 bp, probe
atggtaggagtcaatctgccacaga

SEQ ID NO: 127147 - DNA, 25 bp, probe
atggtcagtggatgactctgcaaaa

SEQ ID NO: 127148 - DNA, 25 bp, probe
atggtcctgatgatacaccagagga

SEQ ID NO: 127149 - DNA, 25 bp, probe
atggtcctgaaccgcatggcaaaag

SEQ ID NO: 127150 - DNA, 25 bp, probe
atggtcctgaatcgcatggccaaag

SEQ ID NO: 127151 - DNA, 25 bp, probe
atggaccgcagaccagcaacagtag

SEQ ID NO: 127152 - DNA, 25 bp, probe
atggagtccagtctaagcagagaga

SEQ ID NO: 127153 - DNA, 25 bp, probe
atggatatcacctcatcgatgcaga

SEQ ID NO: 127154 - DNA, 25 bp, probe
atggatatcacctcatcgatgcaga

SEQ ID NO: 127155 - DNA, 25 bp, probe
aggctgaagctttcacagtgcagag

SEQ ID NO: 127156 - DNA, 25 bp, probe
aggcgaactgtagagtgcagggacc

SEQ ID NO: 127157 - DNA, 25 bp, probe
aggacccactgaggagatccgggcc

SEQ ID NO: 127158 - DNA, 25 bp, probe
atggaatcctctgtggatgacggcg

SEQ ID NO: 127159 - DNA, 25 bp, probe
atggcacatccgtggaggacggcca

SEQ ID NO: 127160 - DNA, 25 bp, probe
atggactatcactgtctgggggaca

SEQ ID NO: 127161 - DNA, 25 bp, probe
atggagtctaatggtcaagcgctga

SEQ ID NO: 127162 - DNA, 25 bp, probe
atggaccgattgggcatagcagatg

SEQ ID NO: 127163 - DNA, 25 bp, probe
atggattcgcattggagttcactct

SEQ ID NO: 127164 - DNA, 25 bp, probe
atggttctcataccagaattctctt

SEQ ID NO: 127165 - DNA, 25 bp, probe
atggttttgaggcacattatcccta

SEQ ID NO: 127166 - DNA, 25 bp, probe
atggttcttcagtcgatatatgggc

SEQ ID NO: 127167 - DNA, 25 bp, probe
atggcttctttaatgaatcatcggc

SEQ ID NO: 127168 - DNA, 25 bp, probe
atggcttttctttcaatcttaggag

SEQ ID NO: 127169 - DNA, 25 bp, probe
aggcctttgcatacacctttatgag

SEQ ID NO: 127170 - DNA, 25 bp, probe
atggcagttggatcagctcctttac

SEQ ID NO: 127171 - DNA, 25 bp, probe
atggagtatgtttcccactttatta

SEQ ID NO: 127172 - DNA, 25 bp, probe
atggagtatgtttcccactttatta

SEQ ID NO: 127173 - DNA, 25 bp, probe
atggagaagttatcagacactctgg

SEQ ID NO: 127174 - DNA, 25 bp, probe
aggccaagatttgcagaacttgtgg

SEQ ID NO: 127175 - DNA, 25 bp, probe
atggaaaatttcaagtactgcagtg

SEQ ID NO: 127176 - DNA, 25 bp, probe
atggagcaaagtgagggccgagtga

SEQ ID NO: 127177 - DNA, 25 bp, probe
aggagcaaggacggggccaaggtcg

SEQ ID NO: 127178 - DNA, 25 bp, probe
aggaagaggctgggggactagaaag

SEQ ID NO: 127179 - DNA, 25 bp, probe
atggaagatggtcctgggattcgaa

SEQ ID NO: 127180 - DNA, 25 bp, probe
atggggtggttctaggactggattt

SEQ ID NO: 127181 - DNA, 25 bp, probe
atggagcttgtgttctcagaatctg

SEQ ID NO: 127182 - DNA, 25 bp, probe
atggattatgctttccagtatgttc

SEQ ID NO: 127183 - DNA, 25 bp, probe
atggatggactccccttatgtatgc

SEQ ID NO: 127184 - DNA, 25 bp, probe
atggatggactccccttatgtatgc

SEQ ID NO: 127185 - DNA, 25 bp, probe
atggatgacactaccctgaagttcc

SEQ ID NO: 127186 - DNA, 25 bp, probe
atggagcatccttctccgatagtga

SEQ ID NO: 127187 - DNA, 25 bp, probe
atggatgcatcacactcaaggacag

SEQ ID NO: 127188 - DNA, 25 bp, probe
atggtgtgaccactgcagaagacag

SEQ ID NO: 127189 - DNA, 25 bp, probe
atggtgtgggagcagaaaagcaggg

SEQ ID NO: 127190 - DNA, 25 bp, probe
atggtgttcaagaaacgtgacagtg

SEQ ID NO: 127191 - DNA, 25 bp, probe
atggcttccagactagggtgaattt

SEQ ID NO: 127192 - DNA, 25 bp, probe
atggctcccaggtcattaggaagct

SEQ ID NO: 127193 - DNA, 25 bp, probe
atggtcttcgagtatatgcggcacg

SEQ ID NO: 127194 - DNA, 25 bp, probe
atggtctctgggtatcatggctatt

SEQ ID NO: 127195 - DNA, 25 bp, probe
atggacctgaggccacaggccaagt

SEQ ID NO: 127196 - DNA, 25 bp, probe
atggcaccatatccgcaagggtaac

SEQ ID NO: 127197 - DNA, 25 bp, probe
atggcatgaaatcagacagggtaga

SEQ ID NO: 127198 - DNA, 25 bp, probe
atggaaatgctgtttcagggctgga

SEQ ID NO: 127199 - DNA, 25 bp, probe
atggaaatgctgtttcagggctgga

SEQ ID NO: 127200 - DNA, 25 bp, probe
atggatggacatcttcagagagtgt

SEQ ID NO: 127201 - DNA, 25 bp, probe
atggattgactttctaaatctgttc

SEQ ID NO: 127202 - DNA, 25 bp, probe
atggatctactgacattagcacttt

SEQ ID NO: 127203 - DNA, 25 bp, probe
atggtccatttcatgtgatctatta

SEQ ID NO: 127204 - DNA, 25 bp, probe
atggactttgtcatggcactcatct

SEQ ID NO: 127205 - DNA, 25 bp, probe
atggatgtgtattcaatgtcacttg

SEQ ID NO: 127206 - DNA, 25 bp, probe
atggcagctctttaatgtacttcaa

SEQ ID NO: 127207 - DNA, 25 bp, probe
atggatctggtctgactgaattcaa

SEQ ID NO: 127208 - DNA, 25 bp, probe
atggtcttgcttcaatgactccaat

SEQ ID NO: 127209 - DNA, 25 bp, probe
atggccaagtatgagatctccgccc

SEQ ID NO: 127210 - DNA, 25 bp, probe
atggccaagtatgagatctccgccc

SEQ ID NO: 127211 - DNA, 25 bp, probe
agggcaagttcatttccctgttcta

SEQ ID NO: 127212 - DNA, 25 bp, probe
aggggcagttaaatatcctctacta

SEQ ID NO: 127213 - DNA, 25 bp, probe
aggccgaggtaaatacagtgaagta

SEQ ID NO: 127214 - DNA, 25 bp, probe
aggccgaggtaaatacagtgaagta

SEQ ID NO: 127215 - DNA, 25 bp, probe
atggctcgtcgttgtatcacaggag

SEQ ID NO: 127216 - DNA, 25 bp, probe
atggtcttctgttttgaagctcatg

SEQ ID NO: 127217 - DNA, 25 bp, probe
atggtcttcagccatgtggagggct

SEQ ID NO: 127218 - DNA, 25 bp, probe
atggtttcacatagacgtgcagtgt

SEQ ID NO: 127219 - DNA, 25 bp, probe
atggctttccaagggatcagtgaga

SEQ ID NO: 127220 - DNA, 25 bp, probe
aggcctccaaacaaacactggagat

SEQ ID NO: 127221 - DNA, 25 bp, probe
aggcccaaagtgaagtcacccagag

SEQ ID NO: 127222 - DNA, 25 bp, probe
atggcagcaaaatttaacacctagg

SEQ ID NO: 127223 - DNA, 25 bp, probe
atggcacaatagtttcaaaggcaag

SEQ ID NO: 127224 - DNA, 25 bp, probe
atggaatgcatcaccattaagacaa

SEQ ID NO: 127225 - DNA, 25 bp, probe
atggactgcatgaggctcttcacca

SEQ ID NO: 127226 - DNA, 25 bp, probe
atggattatgttcctctgtgtgcta

SEQ ID NO: 127227 - DNA, 25 bp, probe
atggagtatgttccgggctgtgagc

SEQ ID NO: 127228 - DNA, 25 bp, probe
atggagcctaagtctgtggtggaca

SEQ ID NO: 127229 - DNA, 25 bp, probe
atggcgagtggtgctgaagggacag

SEQ ID NO: 127230 - DNA, 25 bp, probe
atggccgtaggcaggggagaaggaa

SEQ ID NO: 127231 - DNA, 25 bp, probe
aggccgtggagaaggggtaccgcat

SEQ ID NO: 127232 - DNA, 25 bp, probe
aggcgcagggacatggggcaagcca

SEQ ID NO: 127233 - DNA, 25 bp, probe
aggcccggagttagggctgagccag

SEQ ID NO: 127234 - DNA, 25 bp, probe
aggcccagagttcatgggctgccct

SEQ ID NO: 127235 - DNA, 25 bp, probe
aggcctcaagtgggcatgggggcag

SEQ ID NO: 127236 - DNA, 25 bp, probe
aggctccggatggagcctggggctg

SEQ ID NO: 127237 - DNA, 25 bp, probe
aggctctgcaggacacacctgaggt

SEQ ID NO: 127238 - DNA, 25 bp, probe
aggctctgcaggacacacctgaggt

SEQ ID NO: 127239 - DNA, 25 bp, probe
atggctctggaggacagctcacagg

SEQ ID NO: 127240 - DNA, 25 bp, probe
aggctctggagttcctggcagataa

SEQ ID NO: 127241 - DNA, 25 bp, probe
aggtctggaacacccgcagtagaaa

SEQ ID NO: 127242 - DNA, 25 bp, probe
aggtcagggtcacccaagcaacaaa

SEQ ID NO: 127243 - DNA, 25 bp, probe
aggagagagggattcgaaaacagtc

SEQ ID NO: 127244 - DNA, 25 bp, probe
atggatggagggtatctggatcaac

SEQ ID NO: 127245 - DNA, 25 bp, probe
atggatgcgtggatatctgtgtata

SEQ ID NO: 127246 - DNA, 25 bp, probe
atggtgatgcttattctgtacagta

SEQ ID NO: 127247 - DNA, 25 bp, probe
atggtgtgctccatcatgatgtatt

SEQ ID NO: 127248 - DNA, 25 bp, probe
atggatgatgtaggtcagactctat

SEQ ID NO: 127249 - DNA, 25 bp, probe
atggtgatcttctcaactatctaag

SEQ ID NO: 127250 - DNA, 25 bp, probe
aggtcctcctcggactatttatgac

SEQ ID NO: 127251 - DNA, 25 bp, probe
atggacctccacgaacttgaatcaa

SEQ ID NO: 127252 - DNA, 25 bp, probe
atggactcatccaccaggggatgaa

SEQ ID NO: 127253 - DNA, 25 bp, probe
atggtcgatcacaactggggaggag

SEQ ID NO: 127254 - DNA, 25 bp, probe
atggtcgcaccttcaaagtgggcag

SEQ ID NO: 127255 - DNA, 25 bp, probe
aggcccaccttcaagcagctggtgg

SEQ ID NO: 127256 - DNA, 25 bp, probe
aggccacacccttcaagtggttcat

SEQ ID NO: 127257 - DNA, 25 bp, probe
aggccacacccttcaagtggttcat

SEQ ID NO: 127258 - DNA, 25 bp, probe
agtgccccggcataaggattggagg

SEQ ID NO: 127259 - DNA, 25 bp, probe
aggacagcgacctcaaggagggggg

SEQ ID NO: 127260 - DNA, 25 bp, probe
aggacagcgacctcaaggagggggg

SEQ ID NO: 127261 - DNA, 25 bp, probe
agtgacggttcctacacaggacagg

SEQ ID NO: 127262 - DNA, 25 bp, probe
aggatatggttcaatttacgactgc

SEQ ID NO: 127263 - DNA, 25 bp, probe
aggctcggcttggattattctgcag

SEQ ID NO: 127264 - DNA, 25 bp, probe
atggcaggggtggtttatctgcatg

SEQ ID NO: 127265 - DNA, 25 bp, probe
atggttcgggcgagcaatgctgcag

SEQ ID NO: 127266 - DNA, 25 bp, probe
atggagaagggcaggcatatggagt

SEQ ID NO: 127267 - DNA, 25 bp, probe
atggatgcagtgacctcggaaggag

SEQ ID NO: 127268 - DNA, 25 bp, probe
atggatagattgcctagtggtgaag

SEQ ID NO: 127269 - DNA, 25 bp, probe
aggaagcagtgagtcggggacagtc

SEQ ID NO: 127270 - DNA, 25 bp, probe
atggagtactgcgatgaggggactt

SEQ ID NO: 127271 - DNA, 25 bp, probe
atggaggcctctggtgagtgtgagc

SEQ ID NO: 127272 - DNA, 25 bp, probe
atggagcagcctcgaaactgtgacg

SEQ ID NO: 127273 - DNA, 25 bp, probe
atggagcagtgctgggcctatgagc

SEQ ID NO: 127274 - DNA, 25 bp, probe
atggtgcacctggtggagcgagtgc

SEQ ID NO: 127275 - DNA, 25 bp, probe
atggtgcacctggtggagcgagtgc

SEQ ID NO: 127276 - DNA, 25 bp, probe
atggtgcgcctgctggaagatgccg

SEQ ID NO: 127277 - DNA, 25 bp, probe
atggctgccccgaggaagacaacaa

SEQ ID NO: 127278 - DNA, 25 bp, probe
atggctcccgtgaggaggtgaacga

SEQ ID NO: 127279 - DNA, 25 bp, probe
aggccccgtgccagaggggaagagg

SEQ ID NO: 127280 - DNA, 25 bp, probe
aggctcccgtggagaggaggccgtg

SEQ ID NO: 127281 - DNA, 25 bp, probe
aggcccgctgggagggtacatggat

SEQ ID NO: 127282 - DNA, 25 bp, probe
aggccccgcggagatgaagaatttg

SEQ ID NO: 127283 - DNA, 25 bp, probe
atggccccctgggttaagaggctct

SEQ ID NO: 127284 - DNA, 25 bp, probe
aggccctgcgggagattaaggctct

SEQ ID NO: 127285 - DNA, 25 bp, probe
atggcccttgggagacagatgggtg

SEQ ID NO: 127286 - DNA, 25 bp, probe
atggccctaaagtcgacatatggtc

SEQ ID NO: 127287 - DNA, 25 bp, probe
aggccggaagagatgccaatttcga

SEQ ID NO: 127288 - DNA, 25 bp, probe
agtctgggtcactttgtaacttaca

SEQ ID NO: 127289 - DNA, 25 bp, probe
aggcagggccacttttgaagtcttc

SEQ ID NO: 127290 - DNA, 25 bp, probe
aggccagaacagttattggatgttt

SEQ ID NO: 127291 - DNA, 25 bp, probe
atggctgccaactattttgaggatg

SEQ ID NO: 127292 - DNA, 25 bp, probe
atggcagctaacacatgaatgaggc

SEQ ID NO: 127293 - DNA, 25 bp, probe
atggcgtacctcatgaagaccaagc

SEQ ID NO: 127294 - DNA, 25 bp, probe
atggctgctctcgcaggaattccaa

SEQ ID NO: 127295 - DNA, 25 bp, probe
atggcatacatcgagcggaagaact

SEQ ID NO: 127296 - DNA, 25 bp, probe
aggcttccactggggagaagtccag

SEQ ID NO: 127297 - DNA, 25 bp, probe
atggtctctacctaatggacctccg

SEQ ID NO: 127298 - DNA, 25 bp, probe
atggacaccaactaatgctgactcc

SEQ ID NO: 127299 - DNA, 25 bp, probe
atggatcgccatagaaagtcttgca

SEQ ID NO: 127300 - DNA, 25 bp, probe
atggatcctaggaagaggtctgatg

SEQ ID NO: 127301 - DNA, 25 bp, probe
atggttctgagttatagtgtcttat

SEQ ID NO: 127302 - DNA, 25 bp, probe
atggcttcagagtttcgtgaccaac

SEQ ID NO: 127303 - DNA, 25 bp, probe
atggtctcaaagttggatgacctca

SEQ ID NO: 127304 - DNA, 25 bp, probe
atggcactcagataatagtgacgct

SEQ ID NO: 127305 - DNA, 25 bp, probe
atggcccaggattcaagaactgtac

SEQ ID NO: 127306 - DNA, 25 bp, probe
atggccacatggatcgaacactcat

SEQ ID NO: 127307 - DNA, 25 bp, probe
atggaccatgatctgatgggactac

SEQ ID NO: 127308 - DNA, 25 bp, probe
atggagaagatcctagggcccatcc

SEQ ID NO: 127309 - DNA, 25 bp, probe
atggaattacactagaggccctccg

SEQ ID NO: 127310 - DNA, 25 bp, probe
aggacagatggacaggttcctcctg

SEQ ID NO: 127311 - DNA, 25 bp, probe
atggacaaggagagcaccttccgga

SEQ ID NO: 127312 - DNA, 25 bp, probe
atggagaaggaaggctccatctcca

SEQ ID NO: 127313 - DNA, 25 bp, probe
atggagataagatgaatctcttctc

SEQ ID NO: 127314 - DNA, 25 bp, probe
atggaaaccaggaagcctagcatcc

SEQ ID NO: 127315 - DNA, 25 bp, probe
atggcagtcacagggggcctgtgtc

SEQ ID NO: 127316 - DNA, 25 bp, probe
aggccgcattgctaagatgcctgtt

SEQ ID NO: 127317 - DNA, 25 bp, probe
aggccacgctggaaatgctctttcc

SEQ ID NO: 127318 - DNA, 25 bp, probe
aggcggctgcagcaagcagaccttc

SEQ ID NO: 127319 - DNA, 25 bp, probe
atggcacctactcagcaatgccttc

SEQ ID NO: 127320 - DNA, 25 bp, probe
atggcatcactgaccaagcagatac

SEQ ID NO: 127321 - DNA, 25 bp, probe
atggcatgcacgttcagacagctgc

SEQ ID NO: 127322 - DNA, 25 bp, probe
atggatggcgcaccaagcagtgctg

SEQ ID NO: 127323 - DNA, 25 bp, probe
aggcatggcggcgcatgcctgcaat

SEQ ID NO: 127324 - DNA, 25 bp, probe
tatcatgctgtctttacatggggtt

SEQ ID NO: 127325 - DNA, 25 bp, probe
aggccaagaggatcaatcacattag

SEQ ID NO: 127326 - DNA, 25 bp, probe
aggccataatgggacaatagagttt

SEQ ID NO: 127327 - DNA, 25 bp, probe
aggctgcttattggaccagaagtcc

SEQ ID NO: 127328 - DNA, 25 bp, probe
atggcagtgtttgaacagcattgta

SEQ ID NO: 127329 - DNA, 25 bp, probe
atggcaggtcttaaggaagctgcaa

SEQ ID NO: 127330 - DNA, 25 bp, probe
atggagtgctgctgtgggaactgct

SEQ ID NO: 127331 - DNA, 25 bp, probe
atggcactgtccaggtgaacttcta

SEQ ID NO: 127332 - DNA, 25 bp, probe
atggctttctctcagacaacttcaa

SEQ ID NO: 127333 - DNA, 25 bp, probe
atggccttttggtagcaactgtgca

SEQ ID NO: 127334 - DNA, 25 bp, probe
aggccttcgggaagaggcttcctgg

SEQ ID NO: 127335 - DNA, 25 bp, probe
atggccctcagggacagtgaggtcc

SEQ ID NO: 127336 - DNA, 25 bp, probe
aggcatcccagaggcaaggggacct

SEQ ID NO: 127337 - DNA, 25 bp, probe
atggttcaaaacaatcggagaccta

SEQ ID NO: 127338 - DNA, 25 bp, probe
aggttcaaaggcattaaagcatttc

SEQ ID NO: 127339 - DNA, 25 bp, probe
atggcttacttacaaaagcagcttt

SEQ ID NO: 127340 - DNA, 25 bp, probe
atggcgtatctatcggaaggatttc

SEQ ID NO: 127341 - DNA, 25 bp, probe
atggaggtccaatggaaggttctgg

SEQ ID NO: 127342 - DNA, 25 bp, probe
agagaccctaaacaacgttctatct

SEQ ID NO: 127343 - DNA, 25 bp, probe
agtgacccttaacactacacttctc

SEQ ID NO: 127344 - DNA, 25 bp, probe
aggaaagcgtaagcaggaagacctc

SEQ ID NO: 127345 - DNA, 25 bp, probe
aggaaagcgtaagcaggaagacctc

SEQ ID NO: 127346 - DNA, 25 bp, probe
atggagaaaaactcaggcaagacct

SEQ ID NO: 127347 - DNA, 25 bp, probe
atggacaaaacctgctggaattttg

SEQ ID NO: 127348 - DNA, 25 bp, probe
atggagaaaacccctgtgactccaa

SEQ ID NO: 127349 - DNA, 25 bp, probe
atggaaaatcacttgtttgccccag

SEQ ID NO: 127350 - DNA, 25 bp, probe
aggcattacttactttccactgccg

SEQ ID NO: 127351 - DNA, 25 bp, probe
aggcaatgactacattgtccctcgg

SEQ ID NO: 127352 - DNA, 25 bp, probe
atggcatatgaccgctatgtggcca

SEQ ID NO: 127353 - DNA, 25 bp, probe
atggttatcagggcatgtgttcaac

SEQ ID NO: 127354 - DNA, 25 bp, probe
atggattaaatggcacctgtatacc

SEQ ID NO: 127355 - DNA, 25 bp, probe
atggattaaatggcacctgtatacc

SEQ ID NO: 127356 - DNA, 25 bp, probe
aggcttgcagaagtcagaagtaacc

SEQ ID NO: 127357 - DNA, 25 bp, probe
atggcctggagagcgtgagctatga

SEQ ID NO: 127358 - DNA, 25 bp, probe
atggtatggactgcatggacaatga

SEQ ID NO: 127359 - DNA, 25 bp, probe
atggttgtatatgctctgaagtggg

SEQ ID NO: 127360 - DNA, 25 bp, probe
atggattatattgtctcaacatggt

SEQ ID NO: 127361 - DNA, 25 bp, probe
atggcttttgtggccatcatttggc

SEQ ID NO: 127362 - DNA, 25 bp, probe
atggttggaggtcagcttcaggcct

SEQ ID NO: 127363 - DNA, 25 bp, probe
atggctctggacgtgaagtctcggg

SEQ ID NO: 127364 - DNA, 25 bp, probe
atggccttgacatttaatcacaggt

SEQ ID NO: 127365 - DNA, 25 bp, probe
atggccttgacatttaatcacaggt

SEQ ID NO: 127366 - DNA, 25 bp, probe
atggcagtatgcggtctatcaccac

SEQ ID NO: 127367 - DNA, 25 bp, probe
atggatgtgagccaccattcctggc

SEQ ID NO: 127368 - DNA, 25 bp, probe
atggatgttcatctgcattggctgg

SEQ ID NO: 127369 - DNA, 25 bp, probe
atggcatatgtcattaatgggggtg

SEQ ID NO: 127370 - DNA, 25 bp, probe
atggcatatgtcattaatgggggtg

SEQ ID NO: 127371 - DNA, 25 bp, probe
aggctggttctgaaatggaggggaa

SEQ ID NO: 127372 - DNA, 25 bp, probe
aggcgcgcttcgagggaatatgcga

SEQ ID NO: 127373 - DNA, 25 bp, probe
atggccgtcatcatggggcagaagc

SEQ ID NO: 127374 - DNA, 25 bp, probe
atggccctcacgtatgaggagaagc

SEQ ID NO: 127375 - DNA, 25 bp, probe
atggcccaaatgtcagggttctgct

SEQ ID NO: 127376 - DNA, 25 bp, probe
atggctcctaagtcagggtgttatg

SEQ ID NO: 127377 - DNA, 25 bp, probe
atggctcctaagtcagggtgttatg

SEQ ID NO: 127378 - DNA, 25 bp, probe
aggtttcaagtctgggttctggtgt

SEQ ID NO: 127379 - DNA, 25 bp, probe
atggacctcagaccttgggatttgg

SEQ ID NO: 127380 - DNA, 25 bp, probe
atggactggtgtcctatggagatat

SEQ ID NO: 127381 - DNA, 25 bp, probe
atggacatggggtctgtgacagcaa

SEQ ID NO: 127382 - DNA, 25 bp, probe
atggagctccaggtattgccaaggt

SEQ ID NO: 127383 - DNA, 25 bp, probe
atggcactggcgggatggccagggc

SEQ ID NO: 127384 - DNA, 25 bp, probe
atggcactggaggcgggctccagcc

SEQ ID NO: 127385 - DNA, 25 bp, probe
atggcatctatgttgaggatgtcaa

SEQ ID NO: 127386 - DNA, 25 bp, probe
aggctgctgcattgtgggtgatgac

SEQ ID NO: 127387 - DNA, 25 bp, probe
atggatcgctttgggagtgaccttc

SEQ ID NO: 127388 - DNA, 25 bp, probe
atggatcctggttggcatgtgtcct

SEQ ID NO: 127389 - DNA, 25 bp, probe
atggatcgctggtgacacagccctc

SEQ ID NO: 127390 - DNA, 25 bp, probe
atggcaagggcagacaaggcccgtt

SEQ ID NO: 127391 - DNA, 25 bp, probe
atggaaaccagatcaagcccaagat

SEQ ID NO: 127392 - DNA, 25 bp, probe
atggaacaccataaagcgcacacaa

SEQ ID NO: 127393 - DNA, 25 bp, probe
atggaacaccataaagcgcacacaa

SEQ ID NO: 127394 - DNA, 25 bp, probe
atggaacagctgtcaaggccacacc

SEQ ID NO: 127395 - DNA, 25 bp, probe
atggaacagctgtcaaggccacacc

SEQ ID NO: 127396 - DNA, 25 bp, probe
atggatacattgcactagtcaactg

SEQ ID NO: 127397 - DNA, 25 bp, probe
atggaacatctgctcaacatgaagt

SEQ ID NO: 127398 - DNA, 25 bp, probe
atggcagactctatgcaagagaagc

SEQ ID NO: 127399 - DNA, 25 bp, probe
atggcaagttaagaagcacagaggc

SEQ ID NO: 127400 - DNA, 25 bp, probe
atggcatcagtatacctgagccaga

SEQ ID NO: 127401 - DNA, 25 bp, probe
atggcatcagtatacctgagccaga

SEQ ID NO: 127402 - DNA, 25 bp, probe
aggacagtttccctacaagaactgc

SEQ ID NO: 127403 - DNA, 25 bp, probe
atggaaattcccttcatctggaacc

SEQ ID NO: 127404 - DNA, 25 bp, probe
atggaatattcccctatctctagaa

SEQ ID NO: 127405 - DNA, 25 bp, probe
atggcaagttctgtggttctgagaa

SEQ ID NO: 127406 - DNA, 25 bp, probe
aggcaagcatttggggacctacttc

SEQ ID NO: 127407 - DNA, 25 bp, probe
atggcagagaacaggctggcctact

SEQ ID NO: 127408 - DNA, 25 bp, probe
atggacaatgagaggcggccgcatt

SEQ ID NO: 127409 - DNA, 25 bp, probe
atggacatatggggccttggcgtca

SEQ ID NO: 127410 - DNA, 25 bp, probe
atggccatagatttgccttgtggtg

SEQ ID NO: 127411 - DNA, 25 bp, probe
atggcaatggcagttccttctgttg

SEQ ID NO: 127412 - DNA, 25 bp, probe
atggcaatggcagttccttctgttg

SEQ ID NO: 127413 - DNA, 25 bp, probe
atggacatggcaggccgatttggga

SEQ ID NO: 127414 - DNA, 25 bp, probe
atggcagatggagcctatcaggaag

SEQ ID NO: 127415 - DNA, 25 bp, probe
atggcagtctgtgtcttgctatgga

SEQ ID NO: 127416 - DNA, 25 bp, probe
atggcagtcctaaatgttcatgaga

SEQ ID NO: 127417 - DNA, 25 bp, probe
aggcgtccgagagtgctcggcagga

SEQ ID NO: 127418 - DNA, 25 bp, probe
aggcagctcctgtgaagggaggaga

SEQ ID NO: 127419 - DNA, 25 bp, probe
aggcctctgtgattggacaaaaaga

SEQ ID NO: 127420 - DNA, 25 bp, probe
aggcccacatgagggccataaaggc

SEQ ID NO: 127421 - DNA, 25 bp, probe
atggcccatccaagacttttaggcc

SEQ ID NO: 127422 - DNA, 25 bp, probe
atggactatgctatgaatttataca

SEQ ID NO: 127423 - DNA, 25 bp, probe
atggcacctcatttggctttgtgaa

SEQ ID NO: 127424 - DNA, 25 bp, probe
atggcacctcatttggctttgtgaa

SEQ ID NO: 127425 - DNA, 25 bp, probe
atggcactgaatcatccatatttta

SEQ ID NO: 127426 - DNA, 25 bp, probe
atggccggttatgcacatcatttaa

SEQ ID NO: 127427 - DNA, 25 bp, probe
atggacagttaatgcccactgaaag

SEQ ID NO: 127428 - DNA, 25 bp, probe
atggaatgttgtttgcctaccaaga

SEQ ID NO: 127429 - DNA, 25 bp, probe
atggacagcttctttgcccaaaatg

SEQ ID NO: 127430 - DNA, 25 bp, probe
atggacagtatctaacttgaaaaga

SEQ ID NO: 127431 - DNA, 25 bp, probe
atggaatgtctgtaaattctaatac

SEQ ID NO: 127432 - DNA, 25 bp, probe
atggaaacaaaattctgttatagca

SEQ ID NO: 127433 - DNA, 25 bp, probe
atggcaaaatctttatcgtttccaa

SEQ ID NO: 127434 - DNA, 25 bp, probe
atggcaaaatctttatcgtttccaa

SEQ ID NO: 127435 - DNA, 25 bp, probe
aggcggagttggtacttttgctata

SEQ ID NO: 127436 - DNA, 25 bp, probe
atggcgaagtctttagtctttttca

SEQ ID NO: 127437 - DNA, 25 bp, probe
atggacctgattctagtttattcta

SEQ ID NO: 127438 - DNA, 25 bp, probe
atggacattttctggcttgtcattc

SEQ ID NO: 127439 - DNA, 25 bp, probe
aggaattttcttcatcgagatttag

SEQ ID NO: 127440 - DNA, 25 bp, probe
aggcaacctagaacccgaatgtaag

SEQ ID NO: 127441 - DNA, 25 bp, probe
aggcctcctaagtctaatatttaag

SEQ ID NO: 127442 - DNA, 25 bp, probe
aggcagttcaaagcaggatatgtta

SEQ ID NO: 127443 - DNA, 25 bp, probe
acgaggattattcaagaattctacc

SEQ ID NO: 127444 - DNA, 25 bp, probe
atggaggacgttcttacactcccac

SEQ ID NO: 127445 - DNA, 25 bp, probe
agtgggacgattacttggacaccgt

SEQ ID NO: 127446 - DNA, 25 bp, probe
aggcggaagataactgagcagcacc

SEQ ID NO: 127447 - DNA, 25 bp, probe
atggcagggcagtggctagcccgga

SEQ ID NO: 127448 - DNA, 25 bp, probe
atggcaccagaggtggttacacgga

SEQ ID NO: 127449 - DNA, 25 bp, probe
aggcccaaggaacatgtcgggaggg

SEQ ID NO: 127450 - DNA, 25 bp, probe
aggaccacaagcgttacctggtggg

SEQ ID NO: 127451 - DNA, 25 bp, probe
aggcaataaactttcttcggtgaga

SEQ ID NO: 127452 - DNA, 25 bp, probe
aggaaaccagtgcctttaggtgaga

SEQ ID NO: 127453 - DNA, 25 bp, probe
aggagcaaaaggcggttcgtcttca

SEQ ID NO: 127454 - DNA, 25 bp, probe
aggaataactggcgggcacagggtc

SEQ ID NO: 127455 - DNA, 25 bp, probe
aggaatgtagggcctgcatggagaa

SEQ ID NO: 127456 - DNA, 25 bp, probe
atggaggatgagctgtgtagggaga

SEQ ID NO: 127457 - DNA, 25 bp, probe
atggctggatggcattggattgggc

SEQ ID NO: 127458 - DNA, 25 bp, probe
atggctggatggcattggattgggc

SEQ ID NO: 127459 - DNA, 25 bp, probe
atggctgagagttgaattgtggttc

SEQ ID NO: 127460 - DNA, 25 bp, probe
atggctgagagttgaattgtggttc

SEQ ID NO: 127461 - DNA, 25 bp, probe
aggctggcagcattgcaatagtgag

SEQ ID NO: 127462 - DNA, 25 bp, probe
atggaggcagcattaacagttctac

SEQ ID NO: 127463 - DNA, 25 bp, probe
atggaggagacctaatgtttcatat

SEQ ID NO: 127464 - DNA, 25 bp, probe
atggaagtgacctcagtgctgaaga

SEQ ID NO: 127465 - DNA, 25 bp, probe
atggaagtgacctcagtgctgaaga

SEQ ID NO: 127466 - DNA, 25 bp, probe
agtcaagccccatcaactagaagtg

SEQ ID NO: 127467 - DNA, 25 bp, probe
gagttaggctccacacctaaccagg

SEQ ID NO: 127468 - DNA, 25 bp, probe
gagttaggctccacacctaaccagg

SEQ ID NO: 127469 - DNA, 25 bp, probe
aggatatgttccatcagccgtaccg

SEQ ID NO: 127470 - DNA, 25 bp, probe
aggctttacacaccaaagaagccgg

SEQ ID NO: 127471 - DNA, 25 bp, probe
aggctttacaagccaaacgcaaaag

SEQ ID NO: 127472 - DNA, 25 bp, probe
aggctttacaagccaaacgcaaaag

SEQ ID NO: 127473 - DNA, 25 bp, probe
atggcacttataaccaaagcccaaa

SEQ ID NO: 127474 - DNA, 25 bp, probe
atggcacaaataagctcatccctcc

SEQ ID NO: 127475 - DNA, 25 bp, probe
atggctcaaccagccatctacttct

SEQ ID NO: 127476 - DNA, 25 bp, probe
atggccataccagccatggactcct

SEQ ID NO: 127477 - DNA, 25 bp, probe
atggccacggctgcttccagctcct

SEQ ID NO: 127478 - DNA, 25 bp, probe
atggaccagtctgcattcgctggct

SEQ ID NO: 127479 - DNA, 25 bp, probe
atggcactcagagtgccccgtacat

SEQ ID NO: 127480 - DNA, 25 bp, probe
atggcagcttgagcctgaccataca

SEQ ID NO: 127481 - DNA, 25 bp, probe
atggcagcaacatcaatacctcagc

SEQ ID NO: 127482 - DNA, 25 bp, probe
atggagctgacatcacaaggtgctg

SEQ ID NO: 127483 - DNA, 25 bp, probe
atggactgcatggacaatgagaggc

SEQ ID NO: 127484 - DNA, 25 bp, probe
atggactctcagacactcagaagca

SEQ ID NO: 127485 - DNA, 25 bp, probe
atggagcctggaactgcatcagtga

SEQ ID NO: 127486 - DNA, 25 bp, probe
atggcatgccgtgatcagaagtcat

SEQ ID NO: 127487 - DNA, 25 bp, probe
atggcatcctgagacagttgcacag

SEQ ID NO: 127488 - DNA, 25 bp, probe
atggctttgcagtaatgtgtatcag

SEQ ID NO: 127489 - DNA, 25 bp, probe
atggctaaggtggcattgtctcatg

SEQ ID NO: 127490 - DNA, 25 bp, probe
atggaagagagccaggcagccccga

SEQ ID NO: 127491 - DNA, 25 bp, probe
atggagaagagcaaggccacgccgg

SEQ ID NO: 127492 - DNA, 25 bp, probe
atggacatgttcagggatcgccagg

SEQ ID NO: 127493 - DNA, 25 bp, probe
aggccagtcacaatggacagcgccg

SEQ ID NO: 127494 - DNA, 25 bp, probe
aggcggctgaaagccagcagcacga

SEQ ID NO: 127495 - DNA, 25 bp, probe
atggcggtgtgggcagcacagagcc

SEQ ID NO: 127496 - DNA, 25 bp, probe
aggcgggtgctggtgatgacacact

SEQ ID NO: 127497 - DNA, 25 bp, probe
atggctgggctacgtgaatagcgcc

SEQ ID NO: 127498 - DNA, 25 bp, probe
atggctggcctgaagtgggcatccc

SEQ ID NO: 127499 - DNA, 25 bp, probe
atggctggcctggacggaccagccc

SEQ ID NO: 127500 - DNA, 25 bp, probe
atggctggcctggacggaccagccc

SEQ ID NO: 127501 - DNA, 25 bp, probe
aggctgtatctggacaaggccacct

SEQ ID NO: 127502 - DNA, 25 bp, probe
aggctgtatctggacaaggccacct

SEQ ID NO: 127503 - DNA, 25 bp, probe
aggcgataatgttctggtgaacacc

SEQ ID NO: 127504 - DNA, 25 bp, probe
agccttaagttgtgctagcaaccct

SEQ ID NO: 127505 - DNA, 25 bp, probe
agggtaacttgggtccacagtcact

SEQ ID NO: 127506 - DNA, 25 bp, probe
aggatgaaagttcccccatcagttc

SEQ ID NO: 127507 - DNA, 25 bp, probe
agggaaagttcctgtcacatcgtca

SEQ ID NO: 127508 - DNA, 25 bp, probe
agggaaagttcctgtcacatcgtca

SEQ ID NO: 127509 - DNA, 25 bp, probe
agagaaccgttcgtttgcaatctac

SEQ ID NO: 127510 - DNA, 25 bp, probe
atggaacttgctcgggttcaattaa

SEQ ID NO: 127511 - DNA, 25 bp, probe
atggcatagtccaccgtgacattaa

SEQ ID NO: 127512 - DNA, 25 bp, probe
atggcatagtccaccgtgacattaa

SEQ ID NO: 127513 - DNA, 25 bp, probe
atggcatagtccaccgtgacattaa

SEQ ID NO: 127514 - DNA, 25 bp, probe
atggacagatccacaggtatgtaaa

SEQ ID NO: 127515 - DNA, 25 bp, probe
atggacgaggtcaagggtgaaaagc

SEQ ID NO: 127516 - DNA, 25 bp, probe
atggagctacgtgtggggaacaagt

SEQ ID NO: 127517 - DNA, 25 bp, probe
aggcgtactgacaggtggaccaacg

SEQ ID NO: 127518 - DNA, 25 bp, probe
aggcagtttaactgttctccacacc

SEQ ID NO: 127519 - DNA, 25 bp, probe
aggcagtttaactgttctccacacc

SEQ ID NO: 127520 - DNA, 25 bp, probe
aggcattatttgaccggatctacac

SEQ ID NO: 127521 - DNA, 25 bp, probe
atggcttatcttacactggatcacc

SEQ ID NO: 127522 - DNA, 25 bp, probe
atggcattatttgatctgaaatgtt

SEQ ID NO: 127523 - DNA, 25 bp, probe
atggctgctatggtttcagagaatg

SEQ ID NO: 127524 - DNA, 25 bp, probe
atggctattggtggtgcaggaagaa

SEQ ID NO: 127525 - DNA, 25 bp, probe
atggctgtaggtggtgttgagaaag

SEQ ID NO: 127526 - DNA, 25 bp, probe
atggcggcgggaggttgatggcgag

SEQ ID NO: 127527 - DNA, 25 bp, probe
aggagtactggaggttttgcagggt

SEQ ID NO: 127528 - DNA, 25 bp, probe
atggagctatggaatcgttatgtgg

SEQ ID NO: 127529 - DNA, 25 bp, probe
atggcagcttagaggtgttggcttt

SEQ ID NO: 127530 - DNA, 25 bp, probe
atggcagcttagaggtgttggcttt

SEQ ID NO: 127531 - DNA, 25 bp, probe
atggctcattaaatcagttatggtt

SEQ ID NO: 127532 - DNA, 25 bp, probe
atggcttcatgatgtacctgttgtc

SEQ ID NO: 127533 - DNA, 25 bp, probe
atggcttcatagctcaagcagtatt

SEQ ID NO: 127534 - DNA, 25 bp, probe
atggcatggtccttgtgatggtatt

SEQ ID NO: 127535 - DNA, 25 bp, probe
agtgcgagactgtggtggtattttg

SEQ ID NO: 127536 - DNA, 25 bp, probe
aggcgaactgcgcggttctatgtta

SEQ ID NO: 127537 - DNA, 25 bp, probe
aggctgaattgtgatcctacctttg

SEQ ID NO: 127538 - DNA, 25 bp, probe
aggtggagagtcattttccttcgtc

SEQ ID NO: 127539 - DNA, 25 bp, probe
caggattaggttattttccttctct

SEQ ID NO: 127540 - DNA, 25 bp, probe
aggcgatatctgctgtttttccttc

SEQ ID NO: 127541 - DNA, 25 bp, probe
aggcactactgactttgttcttatt

SEQ ID NO: 127542 - DNA, 25 bp, probe
aggcactactgactttgttcttatt

SEQ ID NO: 127543 - DNA, 25 bp, probe
aggcagctatgggtttcttttgatc

SEQ ID NO: 127544 - DNA, 25 bp, probe
atggcatgtattcttttcagtcttt

SEQ ID NO: 127545 - DNA, 25 bp, probe
atggcatgtattcttttcagtcttt

SEQ ID NO: 127546 - DNA, 25 bp, probe
atggcaagatctgtttttgctttgt

SEQ ID NO: 127547 - DNA, 25 bp, probe
atggaaggtgctaatctttgctgtc

SEQ ID NO: 127548 - DNA, 25 bp, probe
atggaaagttctacatcatgatgtg

SEQ ID NO: 127549 - DNA, 25 bp, probe
atggacagatattctgcctccatgg

SEQ ID NO: 127550 - DNA, 25 bp, probe
atggctatgtatccgatcccatgag

SEQ ID NO: 127551 - DNA, 25 bp, probe
atggcaagagatcatatcctcagac

SEQ ID NO: 127552 - DNA, 25 bp, probe
atggaagagcttacaacctgcctta

SEQ ID NO: 127553 - DNA, 25 bp, probe
atggaaggttacaagtggcacttca

SEQ ID NO: 127554 - DNA, 25 bp, probe
aggcagggatttgaggagcagcttc

SEQ ID NO: 127555 - DNA, 25 bp, probe
aggctgttgctgaggaaaagcctca

SEQ ID NO: 127556 - DNA, 25 bp, probe
atggccctggggcaaatcatgcccc

SEQ ID NO: 127557 - DNA, 25 bp, probe
atggactatgggggacacacgcccc

SEQ ID NO: 127558 - DNA, 25 bp, probe
atggaagtggtgggcacacccagcc

SEQ ID NO: 127559 - DNA, 25 bp, probe
aggcggcgggcatgccaaaagctat

SEQ ID NO: 127560 - DNA, 25 bp, probe
aggcggcgggcatgccaaaagctat

SEQ ID NO: 127561 - DNA, 25 bp, probe
aggctggcgggacgtgcttgaagcc

SEQ ID NO: 127562 - DNA, 25 bp, probe
aggctggcgggacgtgcttgaagcc

SEQ ID NO: 127563 - DNA, 25 bp, probe
aggctgggcgtgaggggagacatcc

SEQ ID NO: 127564 - DNA, 25 bp, probe
atggccgacgagctgaggcggcacc

SEQ ID NO: 127565 - DNA, 25 bp, probe
aggctccagcaactctgggggaggc

SEQ ID NO: 127566 - DNA, 25 bp, probe
aggctccagcaactctgggggaggc

SEQ ID NO: 127567 - DNA, 25 bp, probe
aggctccagcaactctgggggaggc

SEQ ID NO: 127568 - DNA, 25 bp, probe
aggctccagcaactctgggggaggc

SEQ ID NO: 127569 - DNA, 25 bp, probe
atggctcctgaggtgctcgagggag

SEQ ID NO: 127570 - DNA, 25 bp, probe
atggcacctgaggtcatcaagcagt

SEQ ID NO: 127571 - DNA, 25 bp, probe
atggcacctgaggtactaagaggtc

SEQ ID NO: 127572 - DNA, 25 bp, probe
atggaatgcctccaacttagaggac

SEQ ID NO: 127573 - DNA, 25 bp, probe
atggaatcaaaatctctcaggggct

SEQ ID NO: 127574 - DNA, 25 bp, probe
atggacaatgaacggccttgctggg

SEQ ID NO: 127575 - DNA, 25 bp, probe
aggtgctcaatcagcagcctttggt

SEQ ID NO: 127576 - DNA, 25 bp, probe
atggcagctaacagtgctttttgct

SEQ ID NO: 127577 - DNA, 25 bp, probe
atggcaatcaaagccttttgatcat

SEQ ID NO: 127578 - DNA, 25 bp, probe
atggccatgaacgcctttggagaca

SEQ ID NO: 127579 - DNA, 25 bp, probe
atggcaagagaagcaaccggaccct

SEQ ID NO: 127580 - DNA, 25 bp, probe
aggccaggccaacacaagtgaccta

SEQ ID NO: 127581 - DNA, 25 bp, probe
atggcagcagtgtcaacagacggga

SEQ ID NO: 127582 - DNA, 25 bp, probe
atggcagggataacacacaatgaga

SEQ ID NO: 127583 - DNA, 25 bp, probe
atggcagcgtatacaaagctattca

SEQ ID NO: 127584 - DNA, 25 bp, probe
atggcagcttctacatacgaattaa

SEQ ID NO: 127585 - DNA, 25 bp, probe
atggcagcttctacatacgaattaa

SEQ ID NO: 127586 - DNA, 25 bp, probe
atggctcttcataattctaagacta

SEQ ID NO: 127587 - DNA, 25 bp, probe
atggctcttcataattctaagacta

SEQ ID NO: 127588 - DNA, 25 bp, probe
atggcactgtatatattgtagactt

SEQ ID NO: 127589 - DNA, 25 bp, probe
atggcagattatcgacatctttgaa

SEQ ID NO: 127590 - DNA, 25 bp, probe
aggcgattccagttcactcagaatc

SEQ ID NO: 127591 - DNA, 25 bp, probe
aggccttctctcatgatctaagtct

SEQ ID NO: 127592 - DNA, 25 bp, probe
aggccttctctcatgatctaagtct

SEQ ID NO: 127593 - DNA, 25 bp, probe
aggccatcttcttatacatatacta

SEQ ID NO: 127594 - DNA, 25 bp, probe
aggccatcttcttatacatatacta

SEQ ID NO: 127595 - DNA, 25 bp, probe
aggccaccctggaatcagaactgca

SEQ ID NO: 127596 - DNA, 25 bp, probe
aggcaactagtggttatactctgca

SEQ ID NO: 127597 - DNA, 25 bp, probe
aggactctagtggttgtcaactcat

SEQ ID NO: 127598 - DNA, 25 bp, probe
aggacactgaattttccaccatctc

SEQ ID NO: 127599 - DNA, 25 bp, probe
aggattggaatagttcaagccgggc

SEQ ID NO: 127600 - DNA, 25 bp, probe
agtaaagttgatcccaagcctgggc

SEQ ID NO: 127601 - DNA, 25 bp, probe
agaaaattttgaaccctcatggaat

SEQ ID NO: 127602 - DNA, 25 bp, probe
aggaaattttgtctcacctgtgaaa

SEQ ID NO: 127603 - DNA, 25 bp, probe
aggaaatcaattctgggccatcaga

SEQ ID NO: 127604 - DNA, 25 bp, probe
atggcagaatctatttgggacttca

SEQ ID NO: 127605 - DNA, 25 bp, probe
atggcagaatctatttgggacttca

SEQ ID NO: 127606 - DNA, 25 bp, probe
atggcaacagtccttggtcaactat

SEQ ID NO: 127607 - DNA, 25 bp, probe
atggcaacagtccttggtcaactat

SEQ ID NO: 127608 - DNA, 25 bp, probe
atggaacagcatgtggtgaaatcaa

SEQ ID NO: 127609 - DNA, 25 bp, probe
atggcaccatgtgtggtccagaaat

SEQ ID NO: 127610 - DNA, 25 bp, probe
atggcaccatgtgtggtccagaaat

SEQ ID NO: 127611 - DNA, 25 bp, probe
atggcaccagaagtgggcaaaagaa

SEQ ID NO: 127612 - DNA, 25 bp, probe
atggcacctgaagttgtcaataatg

SEQ ID NO: 127613 - DNA, 25 bp, probe
atggaagccatagagtacatcgatg

SEQ ID NO: 127614 - DNA, 25 bp, probe
atggaatcctgtattgcacattcat

SEQ ID NO: 127615 - DNA, 25 bp, probe
atggcagtgtttatgctgcagcttc

SEQ ID NO: 127616 - DNA, 25 bp, probe
atggcagattgtttgtgctttcaac

SEQ ID NO: 127617 - DNA, 25 bp, probe
atggcagaagcctttgtgatctcac

SEQ ID NO: 127618 - DNA, 25 bp, probe
aggcagagtccattctggatgccct

SEQ ID NO: 127619 - DNA, 25 bp, probe
atggcacagccattatcatgtatgt

SEQ ID NO: 127620 - DNA, 25 bp, probe
atggccagcctaattgtggcgagac

SEQ ID NO: 127621 - DNA, 25 bp, probe
atggcatcaccgttgtggactggcc

SEQ ID NO: 127622 - DNA, 25 bp, probe
atggcaattgcactcatgtggactg

SEQ ID NO: 127623 - DNA, 25 bp, probe
atggaattcacctttgcatcttttg

SEQ ID NO: 127624 - DNA, 25 bp, probe
aggaattcctctgttttatggatct

SEQ ID NO: 127625 - DNA, 25 bp, probe
aggaattccgtgtattattttgatt

SEQ ID NO: 127626 - DNA, 25 bp, probe
aggaattccgtgtattattttgatt

SEQ ID NO: 127627 - DNA, 25 bp, probe
agggagttcattgatttggttgatt

SEQ ID NO: 127628 - DNA, 25 bp, probe
aggcagaattcttcaattaagttga

SEQ ID NO: 127629 - DNA, 25 bp, probe
aggaacgacttctgtaagctccagg

SEQ ID NO: 127630 - DNA, 25 bp, probe
agagaacccttaggtttccagcgtg

SEQ ID NO: 127631 - DNA, 25 bp, probe
agagaacccttaggtttccagcgtg

SEQ ID NO: 127632 - DNA, 25 bp, probe
aaggaactactagataaccagtggt

SEQ ID NO: 127633 - DNA, 25 bp, probe
gaaccaactttagagaacctgcctg

SEQ ID NO: 127634 - DNA, 25 bp, probe
agatccacacttcaacgatatcctg

SEQ ID NO: 127635 - DNA, 25 bp, probe
atggccacatccttaaccttggcaa

SEQ ID NO: 127636 - DNA, 25 bp, probe
aggacctaattatgcctgtctgcaa

SEQ ID NO: 127637 - DNA, 25 bp, probe
aggccaggaatgtacagctctgttc

SEQ ID NO: 127638 - DNA, 25 bp, probe
aggccaaggagttcatctctaagct

SEQ ID NO: 127639 - DNA, 25 bp, probe
aggccaagctggtctagcctgacat

SEQ ID NO: 127640 - DNA, 25 bp, probe
aggcagcaagtggcctaccagaaat

SEQ ID NO: 127641 - DNA, 25 bp, probe
aggcagacaagcccaatggcatgaa

SEQ ID NO: 127642 - DNA, 25 bp, probe
aggcgcagacctcaatgcgtgagtc

SEQ ID NO: 127643 - DNA, 25 bp, probe
aggcgagaagtcgctgcagctggtc

SEQ ID NO: 127644 - DNA, 25 bp, probe
atggctgaaaggtgtggggtcagcg

SEQ ID NO: 127645 - DNA, 25 bp, probe
atggcgaagagacttgggcccatcc

SEQ ID NO: 127646 - DNA, 25 bp, probe
atggcgaagagacttgggcccatcc

SEQ ID NO: 127647 - DNA, 25 bp, probe
atggcgaagagacttgggcccatcc

SEQ ID NO: 127648 - DNA, 25 bp, probe
atggctgactggccttctgaggcct

SEQ ID NO: 127649 - DNA, 25 bp, probe
aggccacatggctgacattagctct

SEQ ID NO: 127650 - DNA, 25 bp, probe
aggcgctggccaagcaagtagcctc

SEQ ID NO: 127651 - DNA, 25 bp, probe
aggcgctggccaagcaagtagcctc

SEQ ID NO: 127652 - DNA, 25 bp, probe
aggcgtgcgtgaagcaagaactcct

SEQ ID NO: 127653 - DNA, 25 bp, probe
aggctgtggtgcacgtgaaccagga

SEQ ID NO: 127654 - DNA, 25 bp, probe
atggcgtgatatgcacctgcaacgg

SEQ ID NO: 127655 - DNA, 25 bp, probe
aggcctgataactctgtacgaggct

SEQ ID NO: 127656 - DNA, 25 bp, probe
aggactgtaaaggtgactcggatgc

SEQ ID NO: 127657 - DNA, 25 bp, probe
aggacagtgacatcttgttcggaag

SEQ ID NO: 127658 - DNA, 25 bp, probe
aggacagattctagcttttcaagga

SEQ ID NO: 127659 - DNA, 25 bp, probe
atggctatgttggagtttttatgga

SEQ ID NO: 127660 - DNA, 25 bp, probe
atggctatcttccactgtttatttt

SEQ ID NO: 127661 - DNA, 25 bp, probe
atggccatcttgacagtgttttttc

SEQ ID NO: 127662 - DNA, 25 bp, probe
aggccactgggccgttttgatgacc

SEQ ID NO: 127663 - DNA, 25 bp, probe
aggccactgggccgttttgatgacc

SEQ ID NO: 127664 - DNA, 25 bp, probe
aggccttggccttggatttgatgga

SEQ ID NO: 127665 - DNA, 25 bp, probe
aggctctctggcttaagtttagaag

SEQ ID NO: 127666 - DNA, 25 bp, probe
aggctcatttggggaggtgtacaag

SEQ ID NO: 127667 - DNA, 25 bp, probe
aggctctgcttccttaggttacaaa

SEQ ID NO: 127668 - DNA, 25 bp, probe
atggctctgcatcacttaggtattc

SEQ ID NO: 127669 - DNA, 25 bp, probe
atggctctgcatcacttaggtattc

SEQ ID NO: 127670 - DNA, 25 bp, probe
aggctgctgcatcaaatcaatgctt

SEQ ID NO: 127671 - DNA, 25 bp, probe
aggtgctgactaaactggttgcccg

SEQ ID NO: 127672 - DNA, 25 bp, probe
aggtgtgaaaagagaggctccaccc

SEQ ID NO: 127673 - DNA, 25 bp, probe
aggctgctgaggggtagcaggtcca

SEQ ID NO: 127674 - DNA, 25 bp, probe
aggcgggcggatcatgaggttagga

SEQ ID NO: 127675 - DNA, 25 bp, probe
aggcagtggcgtcgttgaggtgcta

SEQ ID NO: 127676 - DNA, 25 bp, probe
atggcagaggcagggtcgctgagtc

SEQ ID NO: 127677 - DNA, 25 bp, probe
atggcagaggcagggtcgctgagtc

SEQ ID NO: 127678 - DNA, 25 bp, probe
atggcagcaggttggtgattcagtc

SEQ ID NO: 127679 - DNA, 25 bp, probe
aggagcagtttgagttcgcgctgac

SEQ ID NO: 127680 - DNA, 25 bp, probe
aggagcttttctgtgtcctaagccc

SEQ ID NO: 127681 - DNA, 25 bp, probe
aggagcttttctgtgtcctaagccc

SEQ ID NO: 127682 - DNA, 25 bp, probe
cggacgttactctgtggactactcc

SEQ ID NO: 127683 - DNA, 25 bp, probe
cggacgttactctgtggactactcc

SEQ ID NO: 127684 - DNA, 25 bp, probe
aggaggttatcggcagtggagctac

SEQ ID NO: 127685 - DNA, 25 bp, probe
aggaggacccgatttctgagtacgc

SEQ ID NO: 127686 - DNA, 25 bp, probe
aggaccggcctatgtcatggaactg

SEQ ID NO: 127687 - DNA, 25 bp, probe
aggaccggttcatttggcggactgt

SEQ ID NO: 127688 - DNA, 25 bp, probe
aggcacagggcacctaatgggggct

SEQ ID NO: 127689 - DNA, 25 bp, probe
aggccagatgtcccggaggggactg

SEQ ID NO: 127690 - DNA, 25 bp, probe
aggtagatatctccgaaggacccgc

SEQ ID NO: 127691 - DNA, 25 bp, probe
aggtagatatctccgaaggacccgc

SEQ ID NO: 127692 - DNA, 25 bp, probe
aggtgacaacggcaaaccatccacc

SEQ ID NO: 127693 - DNA, 25 bp, probe
aggctaagaccgcagaagcaacccc

SEQ ID NO: 127694 - DNA, 25 bp, probe
aggccaaccgcgagaagatgaccca

SEQ ID NO: 127695 - DNA, 25 bp, probe
aggcctacgcgaaaatctgtgaccc

SEQ ID NO: 127696 - DNA, 25 bp, probe
aggccaccgagaaacatgataacca

SEQ ID NO: 127697 - DNA, 25 bp, probe
aggcaaccacgagacagacaacatg

SEQ ID NO: 127698 - DNA, 25 bp, probe
atggcgacagccgagaagcagaaac

SEQ ID NO: 127699 - DNA, 25 bp, probe
atggcagaagtatgtagagcaatca

SEQ ID NO: 127700 - DNA, 25 bp, probe
atggcagtcttatgtgcaaagatcg

SEQ ID NO: 127701 - DNA, 25 bp, probe
atggctgttattatacacagctctg

SEQ ID NO: 127702 - DNA, 25 bp, probe
atggctgttattatacacagctctg

SEQ ID NO: 127703 - DNA, 25 bp, probe
atggctgtttggttccagccatgag

SEQ ID NO: 127704 - DNA, 25 bp, probe
aggtaatctgaaacacagtcatgtg

SEQ ID NO: 127705 - DNA, 25 bp, probe
aggtaatctgaaacacagtcatgtg

SEQ ID NO: 127706 - DNA, 25 bp, probe
aggcttgattaagtccagtcgtccc

SEQ ID NO: 127707 - DNA, 25 bp, probe
aggcttgttacattggcacagagcc

SEQ ID NO: 127708 - DNA, 25 bp, probe
aggcttgtattagtcccaagccaca

SEQ ID NO: 127709 - DNA, 25 bp, probe
atggcttggatttgctctcgaaaat

SEQ ID NO: 127710 - DNA, 25 bp, probe
aggcttggcatttgccatatcatca

SEQ ID NO: 127711 - DNA, 25 bp, probe
aggcctggattatctgcactcagag

SEQ ID NO: 127712 - DNA, 25 bp, probe
aggcctggattatctgcactcagag

SEQ ID NO: 127713 - DNA, 25 bp, probe
aggccttgagcttatcatgccaagg

SEQ ID NO: 127714 - DNA, 25 bp, probe
aggctctaagcatttgatgctcaca

SEQ ID NO: 127715 - DNA, 25 bp, probe
atggcctacatggatgctgcctact

SEQ ID NO: 127716 - DNA, 25 bp, probe
atggcctacatggaacgcatgaact

SEQ ID NO: 127717 - DNA, 25 bp, probe
aggctctggagataccagcaacttt

SEQ ID NO: 127718 - DNA, 25 bp, probe
aggcgctatggtcaggagaccctta

SEQ ID NO: 127719 - DNA, 25 bp, probe
aggcctggtggaaggaggcgcactt

SEQ ID NO: 127720 - DNA, 25 bp, probe
aggcctggtggaaggaggcgcactt

SEQ ID NO: 127721 - DNA, 25 bp, probe
aggccaggtggtactgctcctggat

SEQ ID NO: 127722 - DNA, 25 bp, probe
aggcttggctggcaatggccttgtc

SEQ ID NO: 127723 - DNA, 25 bp, probe
aggctatggggacatgtgcccgacc

SEQ ID NO: 127724 - DNA, 25 bp, probe
aggcgtggtggacatctttcagacg

SEQ ID NO: 127725 - DNA, 25 bp, probe
aggcgtgagggcaaatctggctcac

SEQ ID NO: 127726 - DNA, 25 bp, probe
aggcttggagacagtctgacccagt

SEQ ID NO: 127727 - DNA, 25 bp, probe
aggctatggagtagcaacgcccaag

SEQ ID NO: 127728 - DNA, 25 bp, probe
atggctgagtgagccagactgcacc

SEQ ID NO: 127729 - DNA, 25 bp, probe
aggctgatgagctccaacataacag

SEQ ID NO: 127730 - DNA, 25 bp, probe
aggcagatgagcttacaagtattga

SEQ ID NO: 127731 - DNA, 25 bp, probe
aggcaagactgttcagcatgaatta

SEQ ID NO: 127732 - DNA, 25 bp, probe
aggccagatatgcctcagatattta

SEQ ID NO: 127733 - DNA, 25 bp, probe
aggccatgtgtctcagagctgttaa

SEQ ID NO: 127734 - DNA, 25 bp, probe
aggaatggattctgaagtttacaag

SEQ ID NO: 127735 - DNA, 25 bp, probe
aggaatggattctgaagtttacaag

SEQ ID NO: 127736 - DNA, 25 bp, probe
aggatgaagtcctgattccttccaa

SEQ ID NO: 127737 - DNA, 25 bp, probe
agaattaccctttatgactaccaag

SEQ ID NO: 127738 - DNA, 25 bp, probe
aggaatacctctactaacaaccaat

SEQ ID NO: 127739 - DNA, 25 bp, probe
aggcaacccgtaacaaagaacacat

SEQ ID NO: 127740 - DNA, 25 bp, probe
agtgcaagttcaatccctaaaacaa

SEQ ID NO: 127741 - DNA, 25 bp, probe
aggcaacttcctgaccgaggatcaa

SEQ ID NO: 127742 - DNA, 25 bp, probe
aggcccttacgaaatggtgttcaag

SEQ ID NO: 127743 - DNA, 25 bp, probe
aggcccaggggaattggtgattaca

SEQ ID NO: 127744 - DNA, 25 bp, probe
aggccgggaagttcagcctgattcc

SEQ ID NO: 127745 - DNA, 25 bp, probe
aggcggggaagtacagctcagagtt

SEQ ID NO: 127746 - DNA, 25 bp, probe
aggcggaagaagctgagtcgcactt

SEQ ID NO: 127747 - DNA, 25 bp, probe
aggcggaagaagctgagtcgcactt

SEQ ID NO: 127748 - DNA, 25 bp, probe
aggctgaggcaacgagtgggaggtt

SEQ ID NO: 127749 - DNA, 25 bp, probe
aggctgtcagacaggctgggggcct

SEQ ID NO: 127750 - DNA, 25 bp, probe
aggcgatagaattggcgcatgcgta

SEQ ID NO: 127751 - DNA, 25 bp, probe
aggcgggatgaagggctgcgcttaa

SEQ ID NO: 127752 - DNA, 25 bp, probe
aggcgggatgaagggctgcgcttaa

SEQ ID NO: 127753 - DNA, 25 bp, probe
aggcagcaggagtctcggctgacat

SEQ ID NO: 127754 - DNA, 25 bp, probe
aggcagcaggagtctcggctgacat

SEQ ID NO: 127755 - DNA, 25 bp, probe
atggcgaggtacaagctgagatcaa

SEQ ID NO: 127756 - DNA, 25 bp, probe
aggcgcatgcacaaccttgatgata

SEQ ID NO: 127757 - DNA, 25 bp, probe
aggcgcatgcacaaccttgatgata

SEQ ID NO: 127758 - DNA, 25 bp, probe
atggcgcaccaagcagtgctgtggg

SEQ ID NO: 127759 - DNA, 25 bp, probe
aggccaccatcatcggcgagtgggt

SEQ ID NO: 127760 - DNA, 25 bp, probe
aggccaccatcatcggcgagtgggt

SEQ ID NO: 127761 - DNA, 25 bp, probe
aggccaaataggaggagctgtgaaa

SEQ ID NO: 127762 - DNA, 25 bp, probe
aggccgacaaggagccactggaaat

SEQ ID NO: 127763 - DNA, 25 bp, probe
agtgcctgacaaaacgaatttaagt

SEQ ID NO: 127764 - DNA, 25 bp, probe
atggccagacaatggcgattgttat

SEQ ID NO: 127765 - DNA, 25 bp, probe
aggaagacagccctgtgattgttat

SEQ ID NO: 127766 - DNA, 25 bp, probe
aggaaacccatcagttgtctactca

SEQ ID NO: 127767 - DNA, 25 bp, probe
aggaaaggacttcctttctcactgc

SEQ ID NO: 127768 - DNA, 25 bp, probe
aggccaagtgcaattgacttccctt

SEQ ID NO: 127769 - DNA, 25 bp, probe
aggctcagggcaaagaagtggcctc

SEQ ID NO: 127770 - DNA, 25 bp, probe
aggccagctggcagcagagtgtggc

SEQ ID NO: 127771 - DNA, 25 bp, probe
aggccaatgagtggcagaggctggc

SEQ ID NO: 127772 - DNA, 25 bp, probe
aggccaatatcagcaagggcatgct

SEQ ID NO: 127773 - DNA, 25 bp, probe
aggctgtgaaagccactctggtgct

SEQ ID NO: 127774 - DNA, 25 bp, probe
aggctgtgaaagccactctggtgct

SEQ ID NO: 127775 - DNA, 25 bp, probe
atggctggaaggcactggtgatgtc

SEQ ID NO: 127776 - DNA, 25 bp, probe
aggctgaggcagcagactggtgtga

SEQ ID NO: 127777 - DNA, 25 bp, probe
aggctcatggagcagtgctgggcct

SEQ ID NO: 127778 - DNA, 25 bp, probe
aggctgtggagccaaggcggctcca

SEQ ID NO: 127779 - DNA, 25 bp, probe
aggcctgaactatgcctgtctcact

SEQ ID NO: 127780 - DNA, 25 bp, probe
aggccaaatgtgtcaccttcagcct

SEQ ID NO: 127781 - DNA, 25 bp, probe
atggccagaatatgaccgtcagcgt

SEQ ID NO: 127782 - DNA, 25 bp, probe
atggcgaaattatccccatctgtcc

SEQ ID NO: 127783 - DNA, 25 bp, probe
atggccagactatcaggcccatttg

SEQ ID NO: 127784 - DNA, 25 bp, probe
atggccaacgacgaggagtcagacg

SEQ ID NO: 127785 - DNA, 25 bp, probe
atggccaacagcacacagatgaaga

SEQ ID NO: 127786 - DNA, 25 bp, probe
atggccctagcattactagatgcag

SEQ ID NO: 127787 - DNA, 25 bp, probe
aggccttgagaaagcgaagcaggag

SEQ ID NO: 127788 - DNA, 25 bp, probe
aggccctggcatcatgcgaaggaac

SEQ ID NO: 127789 - DNA, 25 bp, probe
aggccctggcatcatgcgaaggaac

SEQ ID NO: 127790 - DNA, 25 bp, probe
aggccccagcagcatggaacagaca

SEQ ID NO: 127791 - DNA, 25 bp, probe
atggcccagaggcgcagcaagagac

SEQ ID NO: 127792 - DNA, 25 bp, probe
aggtcaaacgagcagcacaggcact

SEQ ID NO: 127793 - DNA, 25 bp, probe
aggcgcaaacggaaacagcagaagc

SEQ ID NO: 127794 - DNA, 25 bp, probe
aggcgaaactgagtcagagcggggc

SEQ ID NO: 127795 - DNA, 25 bp, probe
aggccacgggaaagagctggggcag

SEQ ID NO: 127796 - DNA, 25 bp, probe
aggctgcaaggggtggactgtggga

SEQ ID NO: 127797 - DNA, 25 bp, probe
aggctcaagagctggcggaggggca

SEQ ID NO: 127798 - DNA, 25 bp, probe
aggacaatgcaatacgggggcctct

SEQ ID NO: 127799 - DNA, 25 bp, probe
agtgagaaaaaactagggctgactt

SEQ ID NO: 127800 - DNA, 25 bp, probe
aggaaagtagaacagctgcagtaca

SEQ ID NO: 127801 - DNA, 25 bp, probe
aggaacgtcctagagctgattgagt

SEQ ID NO: 127802 - DNA, 25 bp, probe
aggaagctttgccattagatctaga

SEQ ID NO: 127803 - DNA, 25 bp, probe
agcgatttgtctggttaattccgat

SEQ ID NO: 127804 - DNA, 25 bp, probe
aggcctctatctgtccaattattat

SEQ ID NO: 127805 - DNA, 25 bp, probe
aggcatccttctttgccagattcat

SEQ ID NO: 127806 - DNA, 25 bp, probe
aggcatccatgtccaccatagaatt

SEQ ID NO: 127807 - DNA, 25 bp, probe
aggcatcggtgccacgcatcttcat

SEQ ID NO: 127808 - DNA, 25 bp, probe
aggcatgcagtttgtccattgtgac

SEQ ID NO: 127809 - DNA, 25 bp, probe
aggctctttaatccatctggaaatg

SEQ ID NO: 127810 - DNA, 25 bp, probe
aggcagctttaaccattaaaactga

SEQ ID NO: 127811 - DNA, 25 bp, probe
aggcccagtcaacgcttaaacaagt

SEQ ID NO: 127812 - DNA, 25 bp, probe
aggcccagtcaacgcttaaacaagt

SEQ ID NO: 127813 - DNA, 25 bp, probe
atggccaagcaattcctctgaacaa

SEQ ID NO: 127814 - DNA, 25 bp, probe
aggccaaaattgtgcgcaatgccaa

SEQ ID NO: 127815 - DNA, 25 bp, probe
agggcaaagaagtggcctcctgggg

SEQ ID NO: 127816 - DNA, 25 bp, probe
aggaaaaggagctgcgatcccggga

SEQ ID NO: 127817 - DNA, 25 bp, probe
aggaaaaggagctgcgatcccggga

SEQ ID NO: 127818 - DNA, 25 bp, probe
aggaaatggggtatgcagggtctgg

SEQ ID NO: 127819 - DNA, 25 bp, probe
aggaaatggtttcctgcctgaggct

SEQ ID NO: 127820 - DNA, 25 bp, probe
aggaattgtctcctggggctatggc

SEQ ID NO: 127821 - DNA, 25 bp, probe
aggaatagactccttcgtgatctgg

SEQ ID NO: 127822 - DNA, 25 bp, probe
aggctaagactgcctgtctcatatg

SEQ ID NO: 127823 - DNA, 25 bp, probe
atggccagaattcctgtcatggata

SEQ ID NO: 127824 - DNA, 25 bp, probe
aggacatagatacctatcaggatga

SEQ ID NO: 127825 - DNA, 25 bp, probe
aggcacagagacctgtccatggtcc

SEQ ID NO: 127826 - DNA, 25 bp, probe
aggacatgacactggaaggtgacga

SEQ ID NO: 127827 - DNA, 25 bp, probe
aggaaatcaggggaaacatgagtga

SEQ ID NO: 127828 - DNA, 25 bp, probe
aggagttgaggaggacgacatttac

SEQ ID NO: 127829 - DNA, 25 bp, probe
aggcagtagggatccagatatttaa

SEQ ID NO: 127830 - DNA, 25 bp, probe
atggccaggggatccagtatctctt

SEQ ID NO: 127831 - DNA, 25 bp, probe
atggccagggataatccgtcacctc

SEQ ID NO: 127832 - DNA, 25 bp, probe
aggccagtggagagcagctgttcct

SEQ ID NO: 127833 - DNA, 25 bp, probe
aggcctcaatggagcagctgcttag

SEQ ID NO: 127834 - DNA, 25 bp, probe
aggcctcaatggagcagctgcttag

SEQ ID NO: 127835 - DNA, 25 bp, probe
atggcccaggtaatcctcttagaca

SEQ ID NO: 127836 - DNA, 25 bp, probe
aggacaccagtgaatccctgtcaga

SEQ ID NO: 127837 - DNA, 25 bp, probe
aggaaacactgctgacctttgcaaa

SEQ ID NO: 127838 - DNA, 25 bp, probe
aggaaacactgctgacctttgcaaa

SEQ ID NO: 127839 - DNA, 25 bp, probe
aggaaatactcagcaactgttagct

SEQ ID NO: 127840 - DNA, 25 bp, probe
aggacacaggtcacaactgtaggca

SEQ ID NO: 127841 - DNA, 25 bp, probe
aggccacgtatcagggaaattgcag

SEQ ID NO: 127842 - DNA, 25 bp, probe
aggatccattggagggcaagtctgg

SEQ ID NO: 127843 - DNA, 25 bp, probe
aggatccattggagggcaagtctgg

SEQ ID NO: 127844 - DNA, 25 bp, probe
aggcctatgtggaggccaaccagat

SEQ ID NO: 127845 - DNA, 25 bp, probe
agccctgtgttggggtcctcaaaga

SEQ ID NO: 127846 - DNA, 25 bp, probe
atggccttcttggagagtcaccaat

SEQ ID NO: 127847 - DNA, 25 bp, probe
atggccattcttctgtcacatgcca

SEQ ID NO: 127848 - DNA, 25 bp, probe
atggccatcatgagcgtgctctacc

SEQ ID NO: 127849 - DNA, 25 bp, probe
aggccactgattacttcatgactgc

SEQ ID NO: 127850 - DNA, 25 bp, probe
aggccctgtttgtttgcacataata

SEQ ID NO: 127851 - DNA, 25 bp, probe
aggacggtttatgagcacacaatta

SEQ ID NO: 127852 - DNA, 25 bp, probe
aggcaaggtttacacagcacagaac

SEQ ID NO: 127853 - DNA, 25 bp, probe
aggccaggtgttggcagccaactgc

SEQ ID NO: 127854 - DNA, 25 bp, probe
aggccaggcatgactttgacagact

SEQ ID NO: 127855 - DNA, 25 bp, probe
aggccaagcgccagtgaggactgct

SEQ ID NO: 127856 - DNA, 25 bp, probe
aggccaacgcacggggagaggctgt

SEQ ID NO: 127857 - DNA, 25 bp, probe
aggacatgtcccaggatgagaaggt

SEQ ID NO: 127858 - DNA, 25 bp, probe
aggcctccatccagaatggcaaaga

SEQ ID NO: 127859 - DNA, 25 bp, probe
aggcccctgcacaagaagaagaagc

SEQ ID NO: 127860 - DNA, 25 bp, probe
aggcctctcgagccatgatagagaa

SEQ ID NO: 127861 - DNA, 25 bp, probe
aggcttgctggacctaaaatcaatg

SEQ ID NO: 127862 - DNA, 25 bp, probe
aggatatgttaagtaacactcaacc

SEQ ID NO: 127863 - DNA, 25 bp, probe
aggactttaatatagcaacagacaa

SEQ ID NO: 127864 - DNA, 25 bp, probe
aggactttaatatagcaacagacaa

SEQ ID NO: 127865 - DNA, 25 bp, probe
aggccttttataggcaggagcccca

SEQ ID NO: 127866 - DNA, 25 bp, probe
aggacgtattatctgatggacccca

SEQ ID NO: 127867 - DNA, 25 bp, probe
atggccgtgtttcggaatgtcctca

SEQ ID NO: 127868 - DNA, 25 bp, probe
atggcctgtggatggagaatgtgca

SEQ ID NO: 127869 - DNA, 25 bp, probe
aggcctatgagatgtcagagctgct

SEQ ID NO: 127870 - DNA, 25 bp, probe
aggccttagtgagcgagtcatggat

SEQ ID NO: 127871 - DNA, 25 bp, probe
aggcgcttcaggcggagttggtact

SEQ ID NO: 127872 - DNA, 25 bp, probe
aggacttcgagttgggttgcagctt

SEQ ID NO: 127873 - DNA, 25 bp, probe
aggccatcacggtcaagagtaagct

SEQ ID NO: 127874 - DNA, 25 bp, probe
aggccatcacggtcaagagtaagct

SEQ ID NO: 127875 - DNA, 25 bp, probe
atggccacaggttgaagcagcccga

SEQ ID NO: 127876 - DNA, 25 bp, probe
aggccagagctgagcactcagcccg

SEQ ID NO: 127877 - DNA, 25 bp, probe
aggccagcaagaagctcatcattgc

SEQ ID NO: 127878 - DNA, 25 bp, probe
aggccaggcagaagctgtgctctga

SEQ ID NO: 127879 - DNA, 25 bp, probe
aggccaggcagaagctgtgctctga

SEQ ID NO: 127880 - DNA, 25 bp, probe
aggcacaggcgttttcaggaaacaa

SEQ ID NO: 127881 - DNA, 25 bp, probe
aggccccagttattgtgaaaacaga

SEQ ID NO: 127882 - DNA, 25 bp, probe
aggccccagttattgtgaaaacaga

SEQ ID NO: 127883 - DNA, 25 bp, probe
aggaccatagtttcttgttaacata

SEQ ID NO: 127884 - DNA, 25 bp, probe
aggcaatatatctttctgttttacc

SEQ ID NO: 127885 - DNA, 25 bp, probe
aggcgtcaacgtgcattttatttat

SEQ ID NO: 127886 - DNA, 25 bp, probe
aggctggaacagtccatccttatcc

SEQ ID NO: 127887 - DNA, 25 bp, probe
aggctatatcatggccacatcctta

SEQ ID NO: 127888 - DNA, 25 bp, probe
agcctgatttctccaccttagaaaa

SEQ ID NO: 127889 - DNA, 25 bp, probe
aggtgctatcgttcaacttcaaaac

SEQ ID NO: 127890 - DNA, 25 bp, probe
aggcagtatccctcatcttatgtaa

SEQ ID NO: 127891 - DNA, 25 bp, probe
aggcaagagacctctaccagtagaa

SEQ ID NO: 127892 - DNA, 25 bp, probe
aggcaagaacgtgtagcaataaaac

SEQ ID NO: 127893 - DNA, 25 bp, probe
agggaacctggctgagaccaaaaca

SEQ ID NO: 127894 - DNA, 25 bp, probe
agggaacatcccaggacgtcagttc

SEQ ID NO: 127895 - DNA, 25 bp, probe
aggaacctcttcagaaagtgtgctt

SEQ ID NO: 127896 - DNA, 25 bp, probe
aggaaccacctcaaaaagtgcggag

SEQ ID NO: 127897 - DNA, 25 bp, probe
aggaaccacctcaaaaagtgcggag

SEQ ID NO: 127898 - DNA, 25 bp, probe
aggaagcgacccagaaatggcaggg

SEQ ID NO: 127899 - DNA, 25 bp, probe
aggaagaactccagcaggtacagtg

SEQ ID NO: 127900 - DNA, 25 bp, probe
aggaaggactccatttgatactgtt

SEQ ID NO: 127901 - DNA, 25 bp, probe
aggaagttgtctataatgagccgtt

SEQ ID NO: 127902 - DNA, 25 bp, probe
aggcacatgtggttttttggtgttt

SEQ ID NO: 127903 - DNA, 25 bp, probe
aggccatcggctttgtcaaggatgt

SEQ ID NO: 127904 - DNA, 25 bp, probe
aggccaccagtgtcgagcaaggaga

SEQ ID NO: 127905 - DNA, 25 bp, probe
aggccagacaactgcagcgaggaga

SEQ ID NO: 127906 - DNA, 25 bp, probe
aggcctagctcagatgatgcgggag

SEQ ID NO: 127907 - DNA, 25 bp, probe
aggctataggaatgatcatggtcgt

SEQ ID NO: 127908 - DNA, 25 bp, probe
aggcttctgtacagtcaggtctgct

SEQ ID NO: 127909 - DNA, 25 bp, probe
aggcctgctgattcagagggtcctc

SEQ ID NO: 127910 - DNA, 25 bp, probe
aggctctgatgctgagaggcttgcc

SEQ ID NO: 127911 - DNA, 25 bp, probe
aggcgtgatgcaggggtgtgaggcc

SEQ ID NO: 127912 - DNA, 25 bp, probe
aggctggaagggctggcagatcgct

SEQ ID NO: 127913 - DNA, 25 bp, probe
aggctgagcacaagcgggagcacct

SEQ ID NO: 127914 - DNA, 25 bp, probe
aggctgagacagtcgtgcgactcct

SEQ ID NO: 127915 - DNA, 25 bp, probe
aggctcaacctactgacagccacat

SEQ ID NO: 127916 - DNA, 25 bp, probe
aggctcagtcctagttcaggatttg

SEQ ID NO: 127917 - DNA, 25 bp, probe
aggctgcttcctagtaagaacgtac

SEQ ID NO: 127918 - DNA, 25 bp, probe
aggctcatctacagtaaggacagtc

SEQ ID NO: 127919 - DNA, 25 bp, probe
aggcagcctgccagtgaaggtcact

SEQ ID NO: 127920 - DNA, 25 bp, probe
aggcagcctgccagtgaaggtcact

SEQ ID NO: 127921 - DNA, 25 bp, probe
aggcatactctccaggattgtccac

SEQ ID NO: 127922 - DNA, 25 bp, probe
aggccctgggcaggatgttcactct

SEQ ID NO: 127923 - DNA, 25 bp, probe
aggctcactgggtgctgtgtgaagt

SEQ ID NO: 127924 - DNA, 25 bp, probe
aggctcactgagcaggctttatctg

SEQ ID NO: 127925 - DNA, 25 bp, probe
aggccctagagcactggtctgtggg

SEQ ID NO: 127926 - DNA, 25 bp, probe
aggccctagagcactggtctgtggg

SEQ ID NO: 127927 - DNA, 25 bp, probe
aggccctgagacacttgtgggtggt

SEQ ID NO: 127928 - DNA, 25 bp, probe
aggcccttcaatatccatggagtct

SEQ ID NO: 127929 - DNA, 25 bp, probe
aggcccacaaaagccaggactctct

SEQ ID NO: 127930 - DNA, 25 bp, probe
aggcaataaaaatcatagtactctt

SEQ ID NO: 127931 - DNA, 25 bp, probe
aggcattactaaaagaaccaccaga

SEQ ID NO: 127932 - DNA, 25 bp, probe
aggattattcaagaattctaccaaa

SEQ ID NO: 127933 - DNA, 25 bp, probe
aggctaagtcaagatcaacattcca

SEQ ID NO: 127934 - DNA, 25 bp, probe
aggcccagactatatgaaactcagc

SEQ ID NO: 127935 - DNA, 25 bp, probe
aggcccagactatatgaaactcagc

SEQ ID NO: 127936 - DNA, 25 bp, probe
aggcccagtataaatgccacctcct

SEQ ID NO: 127937 - DNA, 25 bp, probe
aggtacagttatatccccattttgc

SEQ ID NO: 127938 - DNA, 25 bp, probe
aggaacaattaaactggctgatttt

SEQ ID NO: 127939 - DNA, 25 bp, probe
aggaaaacttagctcctgcttttga

SEQ ID NO: 127940 - DNA, 25 bp, probe
aggaaagaaaggctcctgtttctca

SEQ ID NO: 127941 - DNA, 25 bp, probe
aggaatcaaggagcctccgttccca

SEQ ID NO: 127942 - DNA, 25 bp, probe
aggagtccttagtgctcctttatcc

SEQ ID NO: 127943 - DNA, 25 bp, probe
aggaatgtttaatgcccctgatttt

SEQ ID NO: 127944 - DNA, 25 bp, probe
aggcgagtggcttatagcctccatt

SEQ ID NO: 127945 - DNA, 25 bp, probe
aggcgatgtgctttatggcaggcgc

SEQ ID NO: 127946 - DNA, 25 bp, probe
aggaatgtgtcaaatgggagccatt

SEQ ID NO: 127947 - DNA, 25 bp, probe
aggaaagcacaactgggtcctttat

SEQ ID NO: 127948 - DNA, 25 bp, probe
aggagaaagcaattggcttccttag

SEQ ID NO: 127949 - DNA, 25 bp, probe
aggagaaagcaattggcttccttag

SEQ ID NO: 127950 - DNA, 25 bp, probe
agggaacagaaatgcctttttgtat

SEQ ID NO: 127951 - DNA, 25 bp, probe
aggaaacagacatactcattcattt

SEQ ID NO: 127952 - DNA, 25 bp, probe
aggcaactccaattaaactcatatg

SEQ ID NO: 127953 - DNA, 25 bp, probe
aggcagtcccagatgagcctctatt

SEQ ID NO: 127954 - DNA, 25 bp, probe
aggcaacctcagttgatgccttccc

SEQ ID NO: 127955 - DNA, 25 bp, probe
aggaagtccgtttgatgattccact

SEQ ID NO: 127956 - DNA, 25 bp, probe
aggacaatcagtatgtggtacaact

SEQ ID NO: 127957 - DNA, 25 bp, probe
aggagcctgagtgatgtggcccagg

SEQ ID NO: 127958 - DNA, 25 bp, probe
aggccctggctaatgggcccgaggc

SEQ ID NO: 127959 - DNA, 25 bp, probe
aggccctgactcagagggccagagt

SEQ ID NO: 127960 - DNA, 25 bp, probe
aggctgactcccaggggaagagggg

SEQ ID NO: 127961 - DNA, 25 bp, probe
aggctatcacaggctcagggcaaag

SEQ ID NO: 127962 - DNA, 25 bp, probe
aggctatcacaggctcagggcaaag

SEQ ID NO: 127963 - DNA, 25 bp, probe
aggctatgacagtctgctacgcaaa

SEQ ID NO: 127964 - DNA, 25 bp, probe
aggccatgacagatgaatccgacac

SEQ ID NO: 127965 - DNA, 25 bp, probe
aggcactgtcagagaatctggagtt

SEQ ID NO: 127966 - DNA, 25 bp, probe
aggcactgggctacaatgcggagtt

SEQ ID NO: 127967 - DNA, 25 bp, probe
aggcatgcgagtaacaagggcatgg

SEQ ID NO: 127968 - DNA, 25 bp, probe
aggcttatgctaacaggagacttgc

SEQ ID NO: 127969 - DNA, 25 bp, probe
aggcttatgctaacaggagacttgc

SEQ ID NO: 127970 - DNA, 25 bp, probe
aggcttatgctaacaggagacttgc

SEQ ID NO: 127971 - DNA, 25 bp, probe
aggctgcttttgggaggacttcatt

SEQ ID NO: 127972 - DNA, 25 bp, probe
aggctgcttttgggaggacttcatt

SEQ ID NO: 127973 - DNA, 25 bp, probe
aggctgccaagaggaacgacttctg

SEQ ID NO: 127974 - DNA, 25 bp, probe
aggcccagaatcgaatccaatgtgc

SEQ ID NO: 127975 - DNA, 25 bp, probe
aggctacaagagccctccaagagcc

SEQ ID NO: 127976 - DNA, 25 bp, probe
aggaacaaggacattcaaagtgccc

SEQ ID NO: 127977 - DNA, 25 bp, probe
aggaccaaggtccatacaaatgcct

SEQ ID NO: 127978 - DNA, 25 bp, probe
aggaccaaggtccatacaaatgcct

SEQ ID NO: 127979 - DNA, 25 bp, probe
aggagccatatgaaagtaaggcatt

SEQ ID NO: 127980 - DNA, 25 bp, probe
aggagccatatgaaagtaaggcatt

SEQ ID NO: 127981 - DNA, 25 bp, probe
aggcaccatatttgctgaactagca

SEQ ID NO: 127982 - DNA, 25 bp, probe
aggcaccagcagtcctgaagttggc

SEQ ID NO: 127983 - DNA, 25 bp, probe
aggcccacagcatggggcttggctc

SEQ ID NO: 127984 - DNA, 25 bp, probe
aggctacccagagggcgtggagcgc

SEQ ID NO: 127985 - DNA, 25 bp, probe
aggcatagaacacaggcgggtgctg

SEQ ID NO: 127986 - DNA, 25 bp, probe
aggcatagaacacaggcgggtgctg

SEQ ID NO: 127987 - DNA, 25 bp, probe
aggaaggacagagggtgggcgcagg

SEQ ID NO: 127988 - DNA, 25 bp, probe
aggaatcagcctgtgtggggtggag

SEQ ID NO: 127989 - DNA, 25 bp, probe
aggcctgcactgattggggcctggg

SEQ ID NO: 127990 - DNA, 25 bp, probe
aggcctgcactgattggggcctggg

SEQ ID NO: 127991 - DNA, 25 bp, probe
aggcactgtcagccaatgtgggggg

SEQ ID NO: 127992 - DNA, 25 bp, probe
aggctctgtgggcataggcaggcag

SEQ ID NO: 127993 - DNA, 25 bp, probe
aggctttggtggcagcatggacagt

SEQ ID NO: 127994 - DNA, 25 bp, probe
aggcttatgtggtcaggactgagca

SEQ ID NO: 127995 - DNA, 25 bp, probe
aggcctatgttggaggacaagacat

SEQ ID NO: 127996 - DNA, 25 bp, probe
aggccttatctccaagaccagagat

SEQ ID NO: 127997 - DNA, 25 bp, probe
aggcattatatatactacacagagt

SEQ ID NO: 127998 - DNA, 25 bp, probe
aggcattatatatactacacagagt

SEQ ID NO: 127999 - DNA, 25 bp, probe
aggcttctattacctattaggtgga

SEQ ID NO: 128000 - DNA, 25 bp, probe
aggctttgtgctggcctttgagttc

SEQ ID NO: 128001 - DNA, 25 bp, probe
aggtttgcccgaatcttggctgagt

SEQ ID NO: 128002 - DNA, 25 bp, probe
aggtttgcccgaatcttggctgagt

SEQ ID NO: 128003 - DNA, 25 bp, probe
aggtttgaccagcacaagccagatt

SEQ ID NO: 128004 - DNA, 25 bp, probe
aggctttgagtatatcaacccatta

SEQ ID NO: 128005 - DNA, 25 bp, probe
aggttactgaccttcaaggcctttg

SEQ ID NO: 128006 - DNA, 25 bp, probe
aggtttgcttcctcagtaacatttc

SEQ ID NO: 128007 - DNA, 25 bp, probe
aggttttcatcagacgtacttaatc

SEQ ID NO: 128008 - DNA, 25 bp, probe
aggctttatctggaacgtcaccttg

SEQ ID NO: 128009 - DNA, 25 bp, probe
aggctttatctggaacgtcaccttg

SEQ ID NO: 128010 - DNA, 25 bp, probe
aggcttgttctgttgagtggcactt

SEQ ID NO: 128011 - DNA, 25 bp, probe
aggctttgtctgcagaaggagatca

SEQ ID NO: 128012 - DNA, 25 bp, probe
aggccctgtctgaagcagagccaaa

SEQ ID NO: 128013 - DNA, 25 bp, probe
aggcctcattctccaaggccaggag

SEQ ID NO: 128014 - DNA, 25 bp, probe
aggcagccttcttcacaggctgagg

SEQ ID NO: 128015 - DNA, 25 bp, probe
aggacccctgtccaggatggagggt

SEQ ID NO: 128016 - DNA, 25 bp, probe
aggaatgcctttcagggtgtggtct

SEQ ID NO: 128017 - DNA, 25 bp, probe
aggaatgccactcctaggtatttac

SEQ ID NO: 128018 - DNA, 25 bp, probe
aggcaatagattgctgggtcattta

SEQ ID NO: 128019 - DNA, 25 bp, probe
aggcacatagtgggattacatcata

SEQ ID NO: 128020 - DNA, 25 bp, probe
aggcctcgctcaagattgacttgag

SEQ ID NO: 128021 - DNA, 25 bp, probe
aggcctgcggcaggaggcacaagaa

SEQ ID NO: 128022 - DNA, 25 bp, probe
aggcgctgggcagagagtcaaggcc

SEQ ID NO: 128023 - DNA, 25 bp, probe
aggcgctgggcagagagtcaaggcc

SEQ ID NO: 128024 - DNA, 25 bp, probe
aggcctgggaatggagaatattggt

SEQ ID NO: 128025 - DNA, 25 bp, probe
aggcctgggaaggcagcaagccggg

SEQ ID NO: 128026 - DNA, 25 bp, probe
aggcctgggaaggcagcaagccggg

SEQ ID NO: 128027 - DNA, 25 bp, probe
aggccgtggaagggcaacacaagga

SEQ ID NO: 128028 - DNA, 25 bp, probe
aggccctggcagacgagaagaacgg

SEQ ID NO: 128029 - DNA, 25 bp, probe
aggccccgagagggcgagaccagag

SEQ ID NO: 128030 - DNA, 25 bp, probe
aggctccaggaggctggctggacca

SEQ ID NO: 128031 - DNA, 25 bp, probe
aggcgatcaggagggagctagcact

SEQ ID NO: 128032 - DNA, 25 bp, probe
aggaatcactgaagggctaaccgtg

SEQ ID NO: 128033 - DNA, 25 bp, probe
aggcagaactgaaggcagctcacat

SEQ ID NO: 128034 - DNA, 25 bp, probe
aggacaagctgcagaagctgacatt

SEQ ID NO: 128035 - DNA, 25 bp, probe
aggacaacgatggcagcactgcgct

SEQ ID NO: 128036 - DNA, 25 bp, probe
aggcaggcctaggatggtgctgtct

SEQ ID NO: 128037 - DNA, 25 bp, probe
aggcatggcgtagagggtgctgccc

SEQ ID NO: 128038 - DNA, 25 bp, probe
aggcagcagcttgaagagtttggct

SEQ ID NO: 128039 - DNA, 25 bp, probe
aggaatgcattcaaagtggctttat

SEQ ID NO: 128040 - DNA, 25 bp, probe
aggaagcctctatttatttattagc

SEQ ID NO: 128041 - DNA, 25 bp, probe
aggaacccaattttcttatgaacag

SEQ ID NO: 128042 - DNA, 25 bp, probe
aggaaatacccttcttttatgagca

SEQ ID NO: 128043 - DNA, 25 bp, probe
aggaacatagccctagtttaagaga

SEQ ID NO: 128044 - DNA, 25 bp, probe
aggcaaagtgtcctggcatttaaaa

SEQ ID NO: 128045 - DNA, 25 bp, probe
aggcacagagccaggtgctttacat

SEQ ID NO: 128046 - DNA, 25 bp, probe
aggctgcaaggaaggttcacaacat

SEQ ID NO: 128047 - DNA, 25 bp, probe
aggctgcaaggaaggttcacaacat

SEQ ID NO: 128048 - DNA, 25 bp, probe
aggctgcaaaacggtgttcaccaag

SEQ ID NO: 128049 - DNA, 25 bp, probe
aggctcacagtactggtttccagga

SEQ ID NO: 128050 - DNA, 25 bp, probe
aggctctgagaactggtactctcag

SEQ ID NO: 128051 - DNA, 25 bp, probe
aggcttggagagtatgacctgcggc

SEQ ID NO: 128052 - DNA, 25 bp, probe
aggcattgagaatgtacctgaagag

SEQ ID NO: 128053 - DNA, 25 bp, probe
aggcatgtgaccagtgcctatgcca

SEQ ID NO: 128054 - DNA, 25 bp, probe
aggagtgcatcaacgtgcttctgca

SEQ ID NO: 128055 - DNA, 25 bp, probe
aggcactccaaggtcctgtgcaaat

SEQ ID NO: 128056 - DNA, 25 bp, probe
aggcactccaaggtcctgtgcaaat

SEQ ID NO: 128057 - DNA, 25 bp, probe
aggcttccaactgaatatgagagga

SEQ ID NO: 128058 - DNA, 25 bp, probe
aggcttccatgatgttacattagga

SEQ ID NO: 128059 - DNA, 25 bp, probe
aggcttccatgatgttacattagga

SEQ ID NO: 128060 - DNA, 25 bp, probe
aggcatcctctgtgttcaaaatcaa

SEQ ID NO: 128061 - DNA, 25 bp, probe
aggcacagctctcctattgaaactt

SEQ ID NO: 128062 - DNA, 25 bp, probe
aggcaacatctactgagctaatagc

SEQ ID NO: 128063 - DNA, 25 bp, probe
aggcacaagcatttgcacacatatg

SEQ ID NO: 128064 - DNA, 25 bp, probe
aggcagcagtgttgcagcaacctgt

SEQ ID NO: 128065 - DNA, 25 bp, probe
aggctgagtggactgaggcctgccc

SEQ ID NO: 128066 - DNA, 25 bp, probe
aggaaggagattgggctcgctccac

SEQ ID NO: 128067 - DNA, 25 bp, probe
aggactgcaagactgtggccattaa

SEQ ID NO: 128068 - DNA, 25 bp, probe
aggacatcaaagaagctgtcaaaac

SEQ ID NO: 128069 - DNA, 25 bp, probe
aggcagcattaacagttctacacat

SEQ ID NO: 128070 - DNA, 25 bp, probe
aggagctctcagaaagcttttccag

SEQ ID NO: 128071 - DNA, 25 bp, probe
aggacatctcagaggtggtcacccc

SEQ ID NO: 128072 - DNA, 25 bp, probe
aggaaacaaaagtgtctccctgtgg

SEQ ID NO: 128073 - DNA, 25 bp, probe
aggcaaagcaaaaggtatcatcaca

SEQ ID NO: 128074 - DNA, 25 bp, probe
aggcatgaaaacttggtgaatctct

SEQ ID NO: 128075 - DNA, 25 bp, probe
aggagacaatccgtggtgtatactc

SEQ ID NO: 128076 - DNA, 25 bp, probe
aggagacttacttttatgacattct

SEQ ID NO: 128077 - DNA, 25 bp, probe
aggagactctaattttggattcctt

SEQ ID NO: 128078 - DNA, 25 bp, probe
aggagaccttcttacttatttgcgt

SEQ ID NO: 128079 - DNA, 25 bp, probe
aggagtccttgcatcaatttttctt

SEQ ID NO: 128080 - DNA, 25 bp, probe
aggagatgccagacaacaataattg

SEQ ID NO: 128081 - DNA, 25 bp, probe
aggcgagtgagagtgaataaatatc

SEQ ID NO: 128082 - DNA, 25 bp, probe
aggcgagtcagggagttaaacagca

SEQ ID NO: 128083 - DNA, 25 bp, probe
aggctgagagctcagatttagaaag

SEQ ID NO: 128084 - DNA, 25 bp, probe
aggctggagcgtagtaatgcaatca

SEQ ID NO: 128085 - DNA, 25 bp, probe
aggacggcagcaaggtgacaacagt

SEQ ID NO: 128086 - DNA, 25 bp, probe
aggacagtgagcaggtagctgccat

SEQ ID NO: 128087 - DNA, 25 bp, probe
aggcccagagcaagagaggcatcct

SEQ ID NO: 128088 - DNA, 25 bp, probe
aggcaccaggctgggatgagctgtg

SEQ ID NO: 128089 - DNA, 25 bp, probe
aggcgctacagcaggagtgcatgag

SEQ ID NO: 128090 - DNA, 25 bp, probe
aggttaccagggctgaatgggaaca

SEQ ID NO: 128091 - DNA, 25 bp, probe
ccgttaactttgtgtctcggcaaca

SEQ ID NO: 128092 - DNA, 25 bp, probe
ccgttaactttgtgtctcggcaaca

SEQ ID NO: 128093 - DNA, 25 bp, probe
cgtttaacgtggtgctgttggtcca

SEQ ID NO: 128094 - DNA, 25 bp, probe
aggtcgaaccggtgtgttggtcact

SEQ ID NO: 128095 - DNA, 25 bp, probe
aggctggagcccttgaaaggtgaaa

SEQ ID NO: 128096 - DNA, 25 bp, probe
caggctgggtagtgaacggggaaat

SEQ ID NO: 128097 - DNA, 25 bp, probe
aggctgagttagtgacagggtggca

SEQ ID NO: 128098 - DNA, 25 bp, probe
aggctggagctatttggggcgtcag

SEQ ID NO: 128099 - DNA, 25 bp, probe
aggcagggctgactctaggtgccct

SEQ ID NO: 128100 - DNA, 25 bp, probe
aggcaggatggaactcggcctcatc

SEQ ID NO: 128101 - DNA, 25 bp, probe
aggcaggatggaactcggcctcatc

SEQ ID NO: 128102 - DNA, 25 bp, probe
aggcaggatggaactcggcctcatc

SEQ ID NO: 128103 - DNA, 25 bp, probe
aggaaggagaccatggctctcatcc

SEQ ID NO: 128104 - DNA, 25 bp, probe
aggcagggggaggatggtaatcaca

SEQ ID NO: 128105 - DNA, 25 bp, probe
aggcagtggatgtgtgctgggaagc

SEQ ID NO: 128106 - DNA, 25 bp, probe
aggcacaggatgctgtgttgtcaac

SEQ ID NO: 128107 - DNA, 25 bp, probe
aggaacattctgctgtcggaaagcg

SEQ ID NO: 128108 - DNA, 25 bp, probe
agtaccgcctgggacggaagatcgg

SEQ ID NO: 128109 - DNA, 25 bp, probe
aggacctcaggggacaggtacctgg

SEQ ID NO: 128110 - DNA, 25 bp, probe
aggacctcaggggacaggtacctgg

SEQ ID NO: 128111 - DNA, 25 bp, probe
aggcacctacggcaaagtcaagcgg

SEQ ID NO: 128112 - DNA, 25 bp, probe
aggaagtgatccccgaagtctacgg

SEQ ID NO: 128113 - DNA, 25 bp, probe
aggaaaatcactcctacacgctatc

SEQ ID NO: 128114 - DNA, 25 bp, probe
aggtaagatgcccactaggcagccc

SEQ ID NO: 128115 - DNA, 25 bp, probe
aggtaagatgcccactaggcagccc

SEQ ID NO: 128116 - DNA, 25 bp, probe
aggacacagaatggataagccagcc

SEQ ID NO: 128117 - DNA, 25 bp, probe
aggactggaaggtcacgatcatctc

SEQ ID NO: 128118 - DNA, 25 bp, probe
aggcatctgtgatcgacacaatgac

SEQ ID NO: 128119 - DNA, 25 bp, probe
aggcatctgtgatcgacacaatgac

SEQ ID NO: 128120 - DNA, 25 bp, probe
aggcactggacgtcacagagcagct

SEQ ID NO: 128121 - DNA, 25 bp, probe
aggcagtccatccactgaaggctgt

SEQ ID NO: 128122 - DNA, 25 bp, probe
aggactctcatgcacttatcgagat

SEQ ID NO: 128123 - DNA, 25 bp, probe
aggcagcctgcgattgtgacagaga

SEQ ID NO: 128124 - DNA, 25 bp, probe
aggcatgcctctgatatgggactga

SEQ ID NO: 128125 - DNA, 25 bp, probe
aggcatgcctctgatatgggactga

SEQ ID NO: 128126 - DNA, 25 bp, probe
aggctctcatcaacatacttttagt

SEQ ID NO: 128127 - DNA, 25 bp, probe
aggctccacactagatctgttagaa

SEQ ID NO: 128128 - DNA, 25 bp, probe
aggaaggttatgtcatctattggca

SEQ ID NO: 128129 - DNA, 25 bp, probe
aggaaggcacaagacgttctcctct

SEQ ID NO: 128130 - DNA, 25 bp, probe
aggaagtatcaacacttctcctgct

SEQ ID NO: 128131 - DNA, 25 bp, probe
aggcaactatggcaactaccggcgt

SEQ ID NO: 128132 - DNA, 25 bp, probe
aggatgatcataagcagcaactacc

SEQ ID NO: 128133 - DNA, 25 bp, probe
aggaagcttcatgcaaaacacccaa

SEQ ID NO: 128134 - DNA, 25 bp, probe
aggaatgcttctctgtcaaaacaaa

SEQ ID NO: 128135 - DNA, 25 bp, probe
aggcacatcctcactgtaaacagta

SEQ ID NO: 128136 - DNA, 25 bp, probe
aggcagagcccttttgcagatacga

SEQ ID NO: 128137 - DNA, 25 bp, probe
aggcagagctcggagcctcattgag

SEQ ID NO: 128138 - DNA, 25 bp, probe
aggctggtcatcgcatgtcagctgg

SEQ ID NO: 128139 - DNA, 25 bp, probe
aggctggtctcgaaatcctgacctc

SEQ ID NO: 128140 - DNA, 25 bp, probe
aggctgatttcaaacgcctgacctc

SEQ ID NO: 128141 - DNA, 25 bp, probe
aggctgagtgtgaagcctcctaccc

SEQ ID NO: 128142 - DNA, 25 bp, probe
aggctggttgggacctctacagctt

SEQ ID NO: 128143 - DNA, 25 bp, probe
aggaggcttgctggacctaaaatca

SEQ ID NO: 128144 - DNA, 25 bp, probe
aggatgtccttgcacttaaactcat

SEQ ID NO: 128145 - DNA, 25 bp, probe
aggatggctttctgtagccacacct

SEQ ID NO: 128146 - DNA, 25 bp, probe
aggaggaaggcagcttccacctgca

SEQ ID NO: 128147 - DNA, 25 bp, probe
aggaagaaggcgtcttccacttcca

SEQ ID NO: 128148 - DNA, 25 bp, probe
aggaaaatgtggtttatcacttaag

SEQ ID NO: 128149 - DNA, 25 bp, probe
aggcaaactgtggcttcttacttcc

SEQ ID NO: 128150 - DNA, 25 bp, probe
aggatgaactgatcctttgaccccc

SEQ ID NO: 128151 - DNA, 25 bp, probe
agggagataatagctttcccaccct

SEQ ID NO: 128152 - DNA, 25 bp, probe
aggaggaatcttacttctccacagt

SEQ ID NO: 128153 - DNA, 25 bp, probe
aggcagggcacaatttcgggccagt

SEQ ID NO: 128154 - DNA, 25 bp, probe
agggggctgctattttggaccagat

SEQ ID NO: 128155 - DNA, 25 bp, probe
aggctggagtgtgattctgtgggaa

SEQ ID NO: 128156 - DNA, 25 bp, probe
aggctggcatgaggaattctgaaaa

SEQ ID NO: 128157 - DNA, 25 bp, probe
aggatgctgtgtagataagtaagaa

SEQ ID NO: 128158 - DNA, 25 bp, probe
aggatgtaattaaagctgtagatga

SEQ ID NO: 128159 - DNA, 25 bp, probe
aggcattcacctttatgtgttagaa

SEQ ID NO: 128160 - DNA, 25 bp, probe
aggcatcctcctatttttcatgagt

SEQ ID NO: 128161 - DNA, 25 bp, probe
aggctttccatcacttattacaatt

SEQ ID NO: 128162 - DNA, 25 bp, probe
aggctttactcatcagtcttaagta

SEQ ID NO: 128163 - DNA, 25 bp, probe
aggctgttatatggaatgtctgtaa

SEQ ID NO: 128164 - DNA, 25 bp, probe
aggcatgtcttgggaattgctggta

SEQ ID NO: 128165 - DNA, 25 bp, probe
aggcatttctggacaattctggttg

SEQ ID NO: 128166 - DNA, 25 bp, probe
aggcatctaaggactatgtagtttc

SEQ ID NO: 128167 - DNA, 25 bp, probe
aggcatctaaggactatgtagtttc

SEQ ID NO: 128168 - DNA, 25 bp, probe
aggacaaactgtcagccagtttctg

SEQ ID NO: 128169 - DNA, 25 bp, probe
aggtcttacattcacatcttttcga

SEQ ID NO: 128170 - DNA, 25 bp, probe
aggatcttatgtaaacagtttttgt

SEQ ID NO: 128171 - DNA, 25 bp, probe
aggatcttatgtaaacagtttttgt

SEQ ID NO: 128172 - DNA, 25 bp, probe
aggagcttacatcaaactatgttct

SEQ ID NO: 128173 - DNA, 25 bp, probe
aggcatgctggtaggggcactgtgt

SEQ ID NO: 128174 - DNA, 25 bp, probe
aggagaggctctggggctctcattt

SEQ ID NO: 128175 - DNA, 25 bp, probe
aggcagaagttcggcaccttatttc

SEQ ID NO: 128176 - DNA, 25 bp, probe
aggctgagcattctcagaccttcat

SEQ ID NO: 128177 - DNA, 25 bp, probe
aggcatggtggcttacgcctgtaat

SEQ ID NO: 128178 - DNA, 25 bp, probe
aggcaggggagtctgcttgtcttag

SEQ ID NO: 128179 - DNA, 25 bp, probe
aggaaggggatgatgcgtattgtta

SEQ ID NO: 128180 - DNA, 25 bp, probe
aggaaggtatggctgctgtttgatt

SEQ ID NO: 128181 - DNA, 25 bp, probe
aggacagggtacctgctgtgtatgt

SEQ ID NO: 128182 - DNA, 25 bp, probe
aggaagctgagaacggatattcatt

SEQ ID NO: 128183 - DNA, 25 bp, probe
aggaactgagttcattacatcttta

SEQ ID NO: 128184 - DNA, 25 bp, probe
aggaactgagttcattacatcttta

SEQ ID NO: 128185 - DNA, 25 bp, probe
aggcaagcagccatgtgtctaattt

SEQ ID NO: 128186 - DNA, 25 bp, probe
aggcaaagcagcttctgcagcaaat

SEQ ID NO: 128187 - DNA, 25 bp, probe
aggagaatgcatttcatgtctgatt

SEQ ID NO: 128188 - DNA, 25 bp, probe
aggcagtgatcatctttctgctcct

SEQ ID NO: 128189 - DNA, 25 bp, probe
aggcaggcatgctgattcctgaagt

SEQ ID NO: 128190 - DNA, 25 bp, probe
aggcagcatgtgcatttcctaactc

SEQ ID NO: 128191 - DNA, 25 bp, probe
aggatcatgtaaatgctcaaagatg

SEQ ID NO: 128192 - DNA, 25 bp, probe
aggcacattgaattcttggatgcag

SEQ ID NO: 128193 - DNA, 25 bp, probe
aggctcttgcactgtgacagagctg

SEQ ID NO: 128194 - DNA, 25 bp, probe
aggcaattgcactgtgtagccgtct

SEQ ID NO: 128195 - DNA, 25 bp, probe
aggaatctgcattgggaagtcggcc

SEQ ID NO: 128196 - DNA, 25 bp, probe
aggaatctgcattgggaagtcggcc

SEQ ID NO: 128197 - DNA, 25 bp, probe
aggcagatggcttgtgcagaagatt

SEQ ID NO: 128198 - DNA, 25 bp, probe
aggcagtggctgttggaaagattta

SEQ ID NO: 128199 - DNA, 25 bp, probe
aggggcggaagatgaagatttcgga

SEQ ID NO: 128200 - DNA, 25 bp, probe
gggagggcgaactgtcgaatgttgc

SEQ ID NO: 128201 - DNA, 25 bp, probe
aggaggacggttgtaagcagttgtt

SEQ ID NO: 128202 - DNA, 25 bp, probe
aggggaaatggggtgaacggtgctg

SEQ ID NO: 128203 - DNA, 25 bp, probe
aggggagaatgttgggtaggcagcc

SEQ ID NO: 128204 - DNA, 25 bp, probe
aggggagaatgttgggtaggcagcc

SEQ ID NO: 128205 - DNA, 25 bp, probe
aggagaagaaggcggctcggaccct

SEQ ID NO: 128206 - DNA, 25 bp, probe
aggaaaactggttgccatcaaggcc

SEQ ID NO: 128207 - DNA, 25 bp, probe
aggaaacagtggcggcatgaagctc

SEQ ID NO: 128208 - DNA, 25 bp, probe
aggaaggcgggaccacaggagcctc

SEQ ID NO: 128209 - DNA, 25 bp, probe
aggaactggggaacacaaggtcaca

SEQ ID NO: 128210 - DNA, 25 bp, probe
aggaacgggagatatgagggctcaa

SEQ ID NO: 128211 - DNA, 25 bp, probe
aggaaaaggacccatacggctcgat

SEQ ID NO: 128212 - DNA, 25 bp, probe
aggaaaaggacccatacggctcgat

SEQ ID NO: 128213 - DNA, 25 bp, probe
aggaacaagggctacaatcgctctc

SEQ ID NO: 128214 - DNA, 25 bp, probe
aggaaggcagctggtatattcagtc

SEQ ID NO: 128215 - DNA, 25 bp, probe
aggacggactcctaattcaatgctc

SEQ ID NO: 128216 - DNA, 25 bp, probe
aggcaagaacctctttagcatccac

SEQ ID NO: 128217 - DNA, 25 bp, probe
aggaaaatcccttctaggcatctcc

SEQ ID NO: 128218 - DNA, 25 bp, probe
aggaagagccaagccacaggctttc

SEQ ID NO: 128219 - DNA, 25 bp, probe
aggcaatagaaaagccagggttgtc

SEQ ID NO: 128220 - DNA, 25 bp, probe
aggcatttggagagcaagggttcat

SEQ ID NO: 128221 - DNA, 25 bp, probe
aggctttggcgcagcagatgctttg

SEQ ID NO: 128222 - DNA, 25 bp, probe
aggctttggcgcagcagatgctttg

SEQ ID NO: 128223 - DNA, 25 bp, probe
aggcaagtggtcaagccatgctttg

SEQ ID NO: 128224 - DNA, 25 bp, probe
aggaaatggctctgctgatgcaagc

SEQ ID NO: 128225 - DNA, 25 bp, probe
aggaactatgtctgtgcaagccttc

SEQ ID NO: 128226 - DNA, 25 bp, probe
aggaactatgtctgtgcaagccttc

SEQ ID NO: 128227 - DNA, 25 bp, probe
aggaattgagtgggcctagcccctc

SEQ ID NO: 128228 - DNA, 25 bp, probe
aggcaattgaaggacgatccctccc

SEQ ID NO: 128229 - DNA, 25 bp, probe
aggagtacaacctgcatgacctccc

SEQ ID NO: 128230 - DNA, 25 bp, probe
aggagtacaacctgcatgacctccc

SEQ ID NO: 128231 - DNA, 25 bp, probe
aggaaattgacctggagcacctcca

SEQ ID NO: 128232 - DNA, 25 bp, probe
aggcaccatggagcagggatcaccc

SEQ ID NO: 128233 - DNA, 25 bp, probe
aggctcacagggaacaagacacggc

SEQ ID NO: 128234 - DNA, 25 bp, probe
aggctcacaagcttgatctaagact

SEQ ID NO: 128235 - DNA, 25 bp, probe
aggcatcacctgaatatcttacctc

SEQ ID NO: 128236 - DNA, 25 bp, probe
aggcatcacctgaatatcttacctc

SEQ ID NO: 128237 - DNA, 25 bp, probe
aggcataaattatttcagacctgca

SEQ ID NO: 128238 - DNA, 25 bp, probe
aggaagtgttgacctcagacgctca

SEQ ID NO: 128239 - DNA, 25 bp, probe
agtaaatgcttccactaaactgaaa

SEQ ID NO: 128240 - DNA, 25 bp, probe
aggaaatttgtagcatcaactagaa

SEQ ID NO: 128241 - DNA, 25 bp, probe
aggaaattcagttagaggagcaaga

SEQ ID NO: 128242 - DNA, 25 bp, probe
aggcaaattcagatgctgggattgg

SEQ ID NO: 128243 - DNA, 25 bp, probe
aggcaaattcagatgctgggattgg

SEQ ID NO: 128244 - DNA, 25 bp, probe
aggaaatctagcatgtgaggggact

SEQ ID NO: 128245 - DNA, 25 bp, probe
aggagccaccagattggatgggagc

SEQ ID NO: 128246 - DNA, 25 bp, probe
aggaccacacgcagtttgcaagcac

SEQ ID NO: 128247 - DNA, 25 bp, probe
aggattcaccacagtacttcacatc

SEQ ID NO: 128248 - DNA, 25 bp, probe
aggattcaccacagtacttcacatc

SEQ ID NO: 128249 - DNA, 25 bp, probe
aggaatctcactcttacttgcaatc

SEQ ID NO: 128250 - DNA, 25 bp, probe
aggacactcggtttgactctcaaac

SEQ ID NO: 128251 - DNA, 25 bp, probe
aggaatgatcatggtcgtgaccgct

SEQ ID NO: 128252 - DNA, 25 bp, probe
aggaaatcgactgggcccagctgaa

SEQ ID NO: 128253 - DNA, 25 bp, probe
aggaagttatctagcaagccgctgg

SEQ ID NO: 128254 - DNA, 25 bp, probe
aggcaagtgtacctctagagcccag

SEQ ID NO: 128255 - DNA, 25 bp, probe
aggcaagtgtacctctagagcccag

SEQ ID NO: 128256 - DNA, 25 bp, probe
aggagattgctaactgcttagccca

SEQ ID NO: 128257 - DNA, 25 bp, probe
aggagctgcgcaaactgttggtcgc

SEQ ID NO: 128258 - DNA, 25 bp, probe
aggcactccaaaggcctgcagatcc

SEQ ID NO: 128259 - DNA, 25 bp, probe
aggcaccgaaaatgctgatgtccag

SEQ ID NO: 128260 - DNA, 25 bp, probe
aggcaacgaaggcaatgctgctccc

SEQ ID NO: 128261 - DNA, 25 bp, probe
aggaaagaacagctatgccctccag

SEQ ID NO: 128262 - DNA, 25 bp, probe
aggaagcctgaaccaatccttccac

SEQ ID NO: 128263 - DNA, 25 bp, probe
aggaagcctgaaccaatccttccac

SEQ ID NO: 128264 - DNA, 25 bp, probe
aggtactcttgggcatattttccat

SEQ ID NO: 128265 - DNA, 25 bp, probe
aggaccatctctgacattcattggc

SEQ ID NO: 128266 - DNA, 25 bp, probe
aggatgcttcttacctgtcagagga

SEQ ID NO: 128267 - DNA, 25 bp, probe
aggacgtcagttctgtccatgtggg

SEQ ID NO: 128268 - DNA, 25 bp, probe
aggaggatcgttttctaagtgcaat

SEQ ID NO: 128269 - DNA, 25 bp, probe
aggaatggcctttctacaaagcaag

SEQ ID NO: 128270 - DNA, 25 bp, probe
agggtcctgcttcatgacaaaaagg

SEQ ID NO: 128271 - DNA, 25 bp, probe
aggaatcctgcactgaagaaaactg

SEQ ID NO: 128272 - DNA, 25 bp, probe
agtagacctagttccaggatccatg

SEQ ID NO: 128273 - DNA, 25 bp, probe
aggagacaccagaacgactgtccat

SEQ ID NO: 128274 - DNA, 25 bp, probe
aggagacataaggtatccgtccatg

SEQ ID NO: 128275 - DNA, 25 bp, probe
aggagacataaggtatccgtccatg

SEQ ID NO: 128276 - DNA, 25 bp, probe
aggcatcaaaggctgcatccgttct

SEQ ID NO: 128277 - DNA, 25 bp, probe
aggacatgcaaccagagatcgtgtt

SEQ ID NO: 128278 - DNA, 25 bp, probe
aggacagtcagccactacgtgatgc

SEQ ID NO: 128279 - DNA, 25 bp, probe
aggaagtagcatgcagtctggatct

SEQ ID NO: 128280 - DNA, 25 bp, probe
aggagagttgcaccaccagatatac

SEQ ID NO: 128281 - DNA, 25 bp, probe
aggagagagggcacaagtcaacttg

SEQ ID NO: 128282 - DNA, 25 bp, probe
aggaaaccgttctgtgatatcatgg

SEQ ID NO: 128283 - DNA, 25 bp, probe
aggaaaccatcttcatcggtactcc

SEQ ID NO: 128284 - DNA, 25 bp, probe
aggaacatctactcagcagactact

SEQ ID NO: 128285 - DNA, 25 bp, probe
aggaatcagtcagtatctgcagaac

SEQ ID NO: 128286 - DNA, 25 bp, probe
aggaatcaggagctctgagtgccat

SEQ ID NO: 128287 - DNA, 25 bp, probe
aggagacaggaaggtggtgcttaca

SEQ ID NO: 128288 - DNA, 25 bp, probe
aggcagatgggagggttgtgcttgt

SEQ ID NO: 128289 - DNA, 25 bp, probe
aggagattggaagcggtcagtttgg

SEQ ID NO: 128290 - DNA, 25 bp, probe
aggagattggaagcggtcagtttgg

SEQ ID NO: 128291 - DNA, 25 bp, probe
aggtgatcggaaagggtcccttcag

SEQ ID NO: 128292 - DNA, 25 bp, probe
aggcagatgggccaaggtgaccacc

SEQ ID NO: 128293 - DNA, 25 bp, probe
aggagatgatgggaaggaaccccaa

SEQ ID NO: 128294 - DNA, 25 bp, probe
aggagaagagcaagggttccctcaa

SEQ ID NO: 128295 - DNA, 25 bp, probe
aggaagaccaatagcgtctcaccca

SEQ ID NO: 128296 - DNA, 25 bp, probe
aggaagaccaatagcgtctcaccca

SEQ ID NO: 128297 - DNA, 25 bp, probe
aggcaaggccaaactgtctcaaaga

SEQ ID NO: 128298 - DNA, 25 bp, probe
aggagtggcctaaattgtctaatgt

SEQ ID NO: 128299 - DNA, 25 bp, probe
aggagatggtttcctatttcctgcg

SEQ ID NO: 128300 - DNA, 25 bp, probe
aggaatgtgattcttcatcttccaa

SEQ ID NO: 128301 - DNA, 25 bp, probe
aggcttgtactgctttgttgaataa

SEQ ID NO: 128302 - DNA, 25 bp, probe
aggagttaatttttgtcagcaacaa

SEQ ID NO: 128303 - DNA, 25 bp, probe
agggttaattttagcttggcactgg

SEQ ID NO: 128304 - DNA, 25 bp, probe
aggtttcaacctgcgcattgggagg

SEQ ID NO: 128305 - DNA, 25 bp, probe
aggtaaaatccttcctggagtagag

SEQ ID NO: 128306 - DNA, 25 bp, probe
aggcagcagaaactttcgctggatg

SEQ ID NO: 128307 - DNA, 25 bp, probe
aggacagtacatctactgcttatga

SEQ ID NO: 128308 - DNA, 25 bp, probe
aggtattagatttactgctaatgag

SEQ ID NO: 128309 - DNA, 25 bp, probe
aggtttctattttctctgatacttt

SEQ ID NO: 128310 - DNA, 25 bp, probe
aggttggtgattcagtccgaccttc

SEQ ID NO: 128311 - DNA, 25 bp, probe
aggtgtggtttgagccaggacctgg

SEQ ID NO: 128312 - DNA, 25 bp, probe
aggaattggttgagggcgttcgctg

SEQ ID NO: 128313 - DNA, 25 bp, probe
aggaactggtgcaggagagtttcag

SEQ ID NO: 128314 - DNA, 25 bp, probe
aggacagcagcttctcggaatgcat

SEQ ID NO: 128315 - DNA, 25 bp, probe
aggcacagagtttgctgcgagctct

SEQ ID NO: 128316 - DNA, 25 bp, probe
aggcagcagactggtgtgaacccgg

SEQ ID NO: 128317 - DNA, 25 bp, probe
aggcaggattggggtcacagccgct

SEQ ID NO: 128318 - DNA, 25 bp, probe
aggcaggattgggcttttctggctt

SEQ ID NO: 128319 - DNA, 25 bp, probe
aggaagttgtgcggtttctagataa

SEQ ID NO: 128320 - DNA, 25 bp, probe
aggaccttgactgtgtggaagaaaa

SEQ ID NO: 128321 - DNA, 25 bp, probe
aggactcaaacgcgtggaaaatatc

SEQ ID NO: 128322 - DNA, 25 bp, probe
aggacccacacgacgggaagacaag

SEQ ID NO: 128323 - DNA, 25 bp, probe
aggacgacaccgaggaagggcctga

SEQ ID NO: 128324 - DNA, 25 bp, probe
agcgagtaagggaggaggggcgatt

SEQ ID NO: 128325 - DNA, 25 bp, probe
aggagctgggggatcctgggaggat

SEQ ID NO: 128326 - DNA, 25 bp, probe
agtggagggggtgtctggaagctga

SEQ ID NO: 128327 - DNA, 25 bp, probe
aggaatgaggggcttcacgagaggc

SEQ ID NO: 128328 - DNA, 25 bp, probe
aggcaagcaagctctcttgccgagg

SEQ ID NO: 128329 - DNA, 25 bp, probe
aggaagccatcaactgctatgccaa

SEQ ID NO: 128330 - DNA, 25 bp, probe
aggaacacatcaagctggagcacaa

SEQ ID NO: 128331 - DNA, 25 bp, probe
aggacagacacaacggcaacattat

SEQ ID NO: 128332 - DNA, 25 bp, probe
aggcagagaagcacgtgcacaactt

SEQ ID NO: 128333 - DNA, 25 bp, probe
aggcatgcatgaagccctgaagctt

SEQ ID NO: 128334 - DNA, 25 bp, probe
aggtatgttgccagaagtatttcct

SEQ ID NO: 128335 - DNA, 25 bp, probe
aggaatgtcacctgaaattacttct

SEQ ID NO: 128336 - DNA, 25 bp, probe
aggagatagccctgcacaagtacct

SEQ ID NO: 128337 - DNA, 25 bp, probe
aggagatagccctgcacaagtacct

SEQ ID NO: 128338 - DNA, 25 bp, probe
aggagaccctgggcaaaggcaccta

SEQ ID NO: 128339 - DNA, 25 bp, probe
aggagccactattccagaaggctcc

SEQ ID NO: 128340 - DNA, 25 bp, probe
aggcagtttcttacagcaaggtccc

SEQ ID NO: 128341 - DNA, 25 bp, probe
aggcagtcttccttggcaaggctta

SEQ ID NO: 128342 - DNA, 25 bp, probe
aggaatttgccactggcaactgccc

SEQ ID NO: 128343 - DNA, 25 bp, probe
aggaatttgccactggcaactgccc

SEQ ID NO: 128344 - DNA, 25 bp, probe
aggaatctgttactcgaatccaccc

SEQ ID NO: 128345 - DNA, 25 bp, probe
aggaaagtctcagtccaaacacctc

SEQ ID NO: 128346 - DNA, 25 bp, probe
aggaaagtctcagtccaaacacctc

SEQ ID NO: 128347 - DNA, 25 bp, probe
aggaagactgcatgtccaaacgaag

SEQ ID NO: 128348 - DNA, 25 bp, probe
aggacatgtgcttggtacaaaaagg

SEQ ID NO: 128349 - DNA, 25 bp, probe
aggactttgtggtacggcagaggcg

SEQ ID NO: 128350 - DNA, 25 bp, probe
aggcagttttgagttcccagaggaa

SEQ ID NO: 128351 - DNA, 25 bp, probe
aggagttttactgcctgtagcaatg

SEQ ID NO: 128352 - DNA, 25 bp, probe
aggcacttttttggcggctaaatca

SEQ ID NO: 128353 - DNA, 25 bp, probe
aggcacttttttggcggctaaatca

SEQ ID NO: 128354 - DNA, 25 bp, probe
aggacttcctgaaagctggtgacaa

SEQ ID NO: 128355 - DNA, 25 bp, probe
aggacgtcctaaacaaggatctgat

SEQ ID NO: 128356 - DNA, 25 bp, probe
aggactttatagacaaactactgat

SEQ ID NO: 128357 - DNA, 25 bp, probe
aggactttatcttagaagctacaca

SEQ ID NO: 128358 - DNA, 25 bp, probe
aggacttgtactagcagagagtcct

SEQ ID NO: 128359 - DNA, 25 bp, probe
aggacatgagtgtctgtccagactc

SEQ ID NO: 128360 - DNA, 25 bp, probe
aggacaggcttcatgcctgcatcct

SEQ ID NO: 128361 - DNA, 25 bp, probe
agagacgacttgggacgcaacgaca

SEQ ID NO: 128362 - DNA, 25 bp, probe
agagacgacttgggacgcaacgaca

SEQ ID NO: 128363 - DNA, 25 bp, probe
aggcactgaaggaggcgtccgagag

SEQ ID NO: 128364 - DNA, 25 bp, probe
aggattacaggcatgagctaccgtg

SEQ ID NO: 128365 - DNA, 25 bp, probe
aggaaaaatctcaagctactggtga

SEQ ID NO: 128366 - DNA, 25 bp, probe
aggaaaaatctcaagctactggtga

SEQ ID NO: 128367 - DNA, 25 bp, probe
aggaagaatgagtctactttggaga

SEQ ID NO: 128368 - DNA, 25 bp, probe
aggaaggtgaacaagtgctaccggg

SEQ ID NO: 128369 - DNA, 25 bp, probe
aggaaactggaccatctgcaagccc

SEQ ID NO: 128370 - DNA, 25 bp, probe
aggcacacacggcagatgctgcaaa

SEQ ID NO: 128371 - DNA, 25 bp, probe
aggcagcctctgcgaatgctgccac

SEQ ID NO: 128372 - DNA, 25 bp, probe
aggcagcctctgcgaatgctgccac

SEQ ID NO: 128373 - DNA, 25 bp, probe
aggagctgtctactgggcatgctcc

SEQ ID NO: 128374 - DNA, 25 bp, probe
aggagcgtgacactggtgatcgcat

SEQ ID NO: 128375 - DNA, 25 bp, probe
aggagggacagtctcaccatttccc

SEQ ID NO: 128376 - DNA, 25 bp, probe
aggagtggtcaggaccaccaagccc

SEQ ID NO: 128377 - DNA, 25 bp, probe
aggagaggacagaaagcaaaggcac

SEQ ID NO: 128378 - DNA, 25 bp, probe
aggaagtgaatgccatcctcaaggc

SEQ ID NO: 128379 - DNA, 25 bp, probe
aggcaatcgactgcatcacgcaggg

SEQ ID NO: 128380 - DNA, 25 bp, probe
aggacctcttcgacatcgaggatga

SEQ ID NO: 128381 - DNA, 25 bp, probe
aggacgcttcggaatgtgggaaatg

SEQ ID NO: 128382 - DNA, 25 bp, probe
aggacacattctggaaggggaccac

SEQ ID NO: 128383 - DNA, 25 bp, probe
aggagacagtcccacacgtggagga

SEQ ID NO: 128384 - DNA, 25 bp, probe
aggaaagataccgaagattagtgga

SEQ ID NO: 128385 - DNA, 25 bp, probe
agagaagaataagccgtccactgaa

SEQ ID NO: 128386 - DNA, 25 bp, probe
aggtagagctgagaccgtccttgtt

SEQ ID NO: 128387 - DNA, 25 bp, probe
aggtaacgcaagttcgtcctgtgct

SEQ ID NO: 128388 - DNA, 25 bp, probe
aggaaaggacagtccaggcattgtg

SEQ ID NO: 128389 - DNA, 25 bp, probe
aggaacctgaggtccagagtgggga

SEQ ID NO: 128390 - DNA, 25 bp, probe
agaggttataggtcactcctggggc

SEQ ID NO: 128391 - DNA, 25 bp, probe
aggacattaaaatctccaggcctgt

SEQ ID NO: 128392 - DNA, 25 bp, probe
aggacattgtgacttggctcaagcg

SEQ ID NO: 128393 - DNA, 25 bp, probe
aggaatcttacttctccacagtgaa

SEQ ID NO: 128394 - DNA, 25 bp, probe
aggaatcttacttctccacagtgaa

SEQ ID NO: 128395 - DNA, 25 bp, probe
aggaatcttaacttcatgtgagcta

SEQ ID NO: 128396 - DNA, 25 bp, probe
aggtcatccatgacaactttggtat

SEQ ID NO: 128397 - DNA, 25 bp, probe
aggtcaccaagatgctggcagtggt

SEQ ID NO: 128398 - DNA, 25 bp, probe
agggacccagcactgggctgggttg

SEQ ID NO: 128399 - DNA, 25 bp, probe
aggaaccgcaagccggagaggattt

SEQ ID NO: 128400 - DNA, 25 bp, probe
aggacacccaggccatgaaggagat

SEQ ID NO: 128401 - DNA, 25 bp, probe
aggacaaccttattaagctcgtcac

SEQ ID NO: 128402 - DNA, 25 bp, probe
aggaaacgccaagaactgctggccg

SEQ ID NO: 128403 - DNA, 25 bp, probe
aggaacaacctagaagctttgctgc

SEQ ID NO: 128404 - DNA, 25 bp, probe
aggaaaacccattggcagatattgg

SEQ ID NO: 128405 - DNA, 25 bp, probe
aggaaaagccatagcaggagttatt

SEQ ID NO: 128406 - DNA, 25 bp, probe
aggcaaaatgccatcgtatgtattt

SEQ ID NO: 128407 - DNA, 25 bp, probe
aggcaaagacctacttctgaagtgt

SEQ ID NO: 128408 - DNA, 25 bp, probe
aggaaacatcctactggtagatgga

SEQ ID NO: 128409 - DNA, 25 bp, probe
aggaccagatccagcggctggtgct

SEQ ID NO: 128410 - DNA, 25 bp, probe
aggacacttccaatgagtccagctc

SEQ ID NO: 128411 - DNA, 25 bp, probe
aggacttgtgcagacgccacagtct

SEQ ID NO: 128412 - DNA, 25 bp, probe
aggagctggtgggcagcttccagct

SEQ ID NO: 128413 - DNA, 25 bp, probe
aggagctggagaacgccttcagcct

SEQ ID NO: 128414 - DNA, 25 bp, probe
aggagctggagaacgccttcagcct

SEQ ID NO: 128415 - DNA, 25 bp, probe
aggacaagacgagtgccttgagcct

SEQ ID NO: 128416 - DNA, 25 bp, probe
aggagcagagagcggaccgaccagc

SEQ ID NO: 128417 - DNA, 25 bp, probe
aggcaaagaatacacgctcaccagc

SEQ ID NO: 128418 - DNA, 25 bp, probe
aggcaagtataaaagcctctctcag

SEQ ID NO: 128419 - DNA, 25 bp, probe
aggaggtataataaactcagtcata

SEQ ID NO: 128420 - DNA, 25 bp, probe
aggagaaacaataaactcattttca

SEQ ID NO: 128421 - DNA, 25 bp, probe
aggtggaccaacggactgatttaga

SEQ ID NO: 128422 - DNA, 25 bp, probe
aggtaaccatttgagctgcaattca

SEQ ID NO: 128423 - DNA, 25 bp, probe
aggacaactttgatatgtgcagttc

SEQ ID NO: 128424 - DNA, 25 bp, probe
aggaagccttataccagtgcagtgg

SEQ ID NO: 128425 - DNA, 25 bp, probe
aggaagtgccagtgcagcggcagtg

SEQ ID NO: 128426 - DNA, 25 bp, probe
aggacctggagaagatcggcatggg

SEQ ID NO: 128427 - DNA, 25 bp, probe
aggacctgacaaatacccaatggca

SEQ ID NO: 128428 - DNA, 25 bp, probe
aggacctgacaaatacccaatggca

SEQ ID NO: 128429 - DNA, 25 bp, probe
aggacggagaaaacggcagcagaca

SEQ ID NO: 128430 - DNA, 25 bp, probe
aggacggggagagcgtgggtcactg

SEQ ID NO: 128431 - DNA, 25 bp, probe
aggacaagacggtgcagtcggctgc

SEQ ID NO: 128432 - DNA, 25 bp, probe
aggacaagacggtgcagtcggctgc

SEQ ID NO: 128433 - DNA, 25 bp, probe
aggacaggaaggagaccatggctct

SEQ ID NO: 128434 - DNA, 25 bp, probe
aggcaagacacgcttacacggccat

SEQ ID NO: 128435 - DNA, 25 bp, probe
aggcaagacacgcttacacggccat

SEQ ID NO: 128436 - DNA, 25 bp, probe
aggaaaccaggtccatcatgcggtc

SEQ ID NO: 128437 - DNA, 25 bp, probe
aggcaaacagcagtgatggctgggg

SEQ ID NO: 128438 - DNA, 25 bp, probe
aggcaagctgctatgatggccgcgg

SEQ ID NO: 128439 - DNA, 25 bp, probe
aggaactgcttttggcactgggagt

SEQ ID NO: 128440 - DNA, 25 bp, probe
aggacactttctggctagtgggcag

SEQ ID NO: 128441 - DNA, 25 bp, probe
aggacctttgccatagttcagctaa

SEQ ID NO: 128442 - DNA, 25 bp, probe
aggaggcacgtcggaagttcaaaca

SEQ ID NO: 128443 - DNA, 25 bp, probe
aggaggcacgtcggaagttcaaaca

SEQ ID NO: 128444 - DNA, 25 bp, probe
aggaggacgtgagccagtttgatac

SEQ ID NO: 128445 - DNA, 25 bp, probe
aggaagattgtgtctcagcctttta

SEQ ID NO: 128446 - DNA, 25 bp, probe
aggaatgttatgtgcccttaccacc

SEQ ID NO: 128447 - DNA, 25 bp, probe
aggaattctcagtgtttcaaatgca

SEQ ID NO: 128448 - DNA, 25 bp, probe
aggatcgaccagtcagagttcgaag

SEQ ID NO: 128449 - DNA, 25 bp, probe
aggaccaccaatggattgtggaaaa

SEQ ID NO: 128450 - DNA, 25 bp, probe
aggaccaccaatggattgtggaaaa

SEQ ID NO: 128451 - DNA, 25 bp, probe
aggaaactgcagacgaattgaaaat

SEQ ID NO: 128452 - DNA, 25 bp, probe
aggaaagtgaggaacagcaacaatt

SEQ ID NO: 128453 - DNA, 25 bp, probe
aggaaagatgagctcagccccattg

SEQ ID NO: 128454 - DNA, 25 bp, probe
aggaagagattggccagcacccttc

SEQ ID NO: 128455 - DNA, 25 bp, probe
aggaaggcagtgaaggccaccctgg

SEQ ID NO: 128456 - DNA, 25 bp, probe
aggatgaatgggagatcccccggca

SEQ ID NO: 128457 - DNA, 25 bp, probe
aggtgaatggccaagtccttttgga

SEQ ID NO: 128458 - DNA, 25 bp, probe
aggtgaatggccaagtccttttgga

SEQ ID NO: 128459 - DNA, 25 bp, probe
aggatgaaggggctccatttctgct

SEQ ID NO: 128460 - DNA, 25 bp, probe
aggaggaggcaaggtcctagtccac

SEQ ID NO: 128461 - DNA, 25 bp, probe
agggagaggcctatactagtccacg

SEQ ID NO: 128462 - DNA, 25 bp, probe
aggaaaggagccacaatgtgataga

SEQ ID NO: 128463 - DNA, 25 bp, probe
aggcaagagggcgaccactgttact

SEQ ID NO: 128464 - DNA, 25 bp, probe
aggaaagagggagcaggtgccccca

SEQ ID NO: 128465 - DNA, 25 bp, probe
aggaaagagggagcaggtgccccca

SEQ ID NO: 128466 - DNA, 25 bp, probe
aggaaggggtaatgagctccagccc

SEQ ID NO: 128467 - DNA, 25 bp, probe
aggaaggggtaatgagctccagccc

SEQ ID NO: 128468 - DNA, 25 bp, probe
aggaagggggcaaggactcctgcca

SEQ ID NO: 128469 - DNA, 25 bp, probe
aggaaggggtgcatgcatgtccccc

SEQ ID NO: 128470 - DNA, 25 bp, probe
aggaaggtggcattccgtgcttgcc

SEQ ID NO: 128471 - DNA, 25 bp, probe
aggaaggagagcatctcggggcctc

SEQ ID NO: 128472 - DNA, 25 bp, probe
aggtcagaagacatgcctggaggga

SEQ ID NO: 128473 - DNA, 25 bp, probe
aggtcagaagacatgcctggaggga

SEQ ID NO: 128474 - DNA, 25 bp, probe
aggtcagaagtaatcctgagaaatg

SEQ ID NO: 128475 - DNA, 25 bp, probe
aggtcagcacgttgctgtcgattaa

SEQ ID NO: 128476 - DNA, 25 bp, probe
aggatcagcttggacatgcccatta

SEQ ID NO: 128477 - DNA, 25 bp, probe
aggaagcttgcaacatgcccagttc

SEQ ID NO: 128478 - DNA, 25 bp, probe
aggcaagatggctcacacctgtgat

SEQ ID NO: 128479 - DNA, 25 bp, probe
aggcaagaggatccaggtcctattc

SEQ ID NO: 128480 - DNA, 25 bp, probe
aggaaggtgcatccagttcctcatg

SEQ ID NO: 128481 - DNA, 25 bp, probe
aggaagcactaggatgttcaggcag

SEQ ID NO: 128482 - DNA, 25 bp, probe
aggaacgtggtgatgccaggcagcg

SEQ ID NO: 128483 - DNA, 25 bp, probe
aggaacgtggacaagactcgcagat

SEQ ID NO: 128484 - DNA, 25 bp, probe
aggaaatcctgagagcatctcgaat

SEQ ID NO: 128485 - DNA, 25 bp, probe
aggaaatcctgagagcatctcgaat

SEQ ID NO: 128486 - DNA, 25 bp, probe
aggacatatcttggaacttctgaca

SEQ ID NO: 128487 - DNA, 25 bp, probe
aggaatttcttatctgacagagcat

SEQ ID NO: 128488 - DNA, 25 bp, probe
aggaagtctctttaatgcaatgatt

SEQ ID NO: 128489 - DNA, 25 bp, probe
aggaaggatttcactcagctgttcc

SEQ ID NO: 128490 - DNA, 25 bp, probe
aggaaggattacggccaggagatac

SEQ ID NO: 128491 - DNA, 25 bp, probe
aggaaggattacggccaggagatac

SEQ ID NO: 128492 - DNA, 25 bp, probe
aggaattgctgtgtcccagaggaaa

SEQ ID NO: 128493 - DNA, 25 bp, probe
aggatttgttattctaaaggtgata

SEQ ID NO: 128494 - DNA, 25 bp, probe
agaactcgttaaagcaaagcgctaa

SEQ ID NO: 128495 - DNA, 25 bp, probe
aggacatctctgtaaaaagcaggtg

SEQ ID NO: 128496 - DNA, 25 bp, probe
aggacatctagctcaatacaaaatg

SEQ ID NO: 128497 - DNA, 25 bp, probe
aggacatctagctcaatacaaaatg

SEQ ID NO: 128498 - DNA, 25 bp, probe
aggaacatatgctcatttgagaaag

SEQ ID NO: 128499 - DNA, 25 bp, probe
aggaatcgtgattattgtgatacaa

SEQ ID NO: 128500 - DNA, 25 bp, probe
aggatattgctcaaaattatataat

SEQ ID NO: 128501 - DNA, 25 bp, probe
aggaattgatcagtatcactttaag

SEQ ID NO: 128502 - DNA, 25 bp, probe
aggagttgtagatatcttccagact

SEQ ID NO: 128503 - DNA, 25 bp, probe
aggacgtgtctgttatttcctaatc

SEQ ID NO: 128504 - DNA, 25 bp, probe
aggactggtatctgtgttgcctact

SEQ ID NO: 128505 - DNA, 25 bp, probe
aggactggtaagcgactgtcatcaa

SEQ ID NO: 128506 - DNA, 25 bp, probe
aggactttcataccgacaacatctg

SEQ ID NO: 128507 - DNA, 25 bp, probe
aggactacacatggcctacagacac

SEQ ID NO: 128508 - DNA, 25 bp, probe
aggactatgcagatgcctaccagga

SEQ ID NO: 128509 - DNA, 25 bp, probe
aggactgtcaggcactgactcatga

SEQ ID NO: 128510 - DNA, 25 bp, probe
aggatctgccaaggagcttttgcag

SEQ ID NO: 128511 - DNA, 25 bp, probe
aggacctaagattctctggctcagc

SEQ ID NO: 128512 - DNA, 25 bp, probe
aggacctcgagatcatcgtcatcct

SEQ ID NO: 128513 - DNA, 25 bp, probe
aggacctcgagatcatcgtcatcct

SEQ ID NO: 128514 - DNA, 25 bp, probe
aggacactcgaggagccgaagagct

SEQ ID NO: 128515 - DNA, 25 bp, probe
aggaacaggaggaccacgatgcgct

SEQ ID NO: 128516 - DNA, 25 bp, probe
aggaaattgaggatgacgctgatgt

SEQ ID NO: 128517 - DNA, 25 bp, probe
aggaaatgatgcagcttgctccttc

SEQ ID NO: 128518 - DNA, 25 bp, probe
aggagagagcagcttctgccacttc

SEQ ID NO: 128519 - DNA, 25 bp, probe
aggagcgatcgtttgcaacctgctc

SEQ ID NO: 128520 - DNA, 25 bp, probe
aggacaacgtgatgaagatcgcaga

SEQ ID NO: 128521 - DNA, 25 bp, probe
aggagcagaaatttgaagtcgaaaa

SEQ ID NO: 128522 - DNA, 25 bp, probe
aggaacaacacattcaggtgctgaa

SEQ ID NO: 128523 - DNA, 25 bp, probe
aggaacagacaatcttgatcagcag

SEQ ID NO: 128524 - DNA, 25 bp, probe
aggacaagcaataactctctacagg

SEQ ID NO: 128525 - DNA, 25 bp, probe
aggacaatgcaaaatcgccgatcag

SEQ ID NO: 128526 - DNA, 25 bp, probe
aggaaatacaatccctctgaagaag

SEQ ID NO: 128527 - DNA, 25 bp, probe
aggtccatacaaatgccttgaaaat

SEQ ID NO: 128528 - DNA, 25 bp, probe
aggtccatacaaatgccttgaaaat

SEQ ID NO: 128529 - DNA, 25 bp, probe
agggaaaatctgaccataagaaatt

SEQ ID NO: 128530 - DNA, 25 bp, probe
aggagaactggtcgccatcaagaaa

SEQ ID NO: 128531 - DNA, 25 bp, probe
aggaaagctcaatcagatacaaaaa

SEQ ID NO: 128532 - DNA, 25 bp, probe
aggataactctttggatgccccagt

SEQ ID NO: 128533 - DNA, 25 bp, probe
aggaaactctcattcgtgcactaag

SEQ ID NO: 128534 - DNA, 25 bp, probe
aggaaagcttaaatgtactcactgt

SEQ ID NO: 128535 - DNA, 25 bp, probe
aggaacagcaaccaagtaccctgct

SEQ ID NO: 128536 - DNA, 25 bp, probe
aggaaggcagtcccagatgagcctc

SEQ ID NO: 128537 - DNA, 25 bp, probe
aggacagagttcacaggaggccagt

SEQ ID NO: 128538 - DNA, 25 bp, probe
aggaagagttctcctgaggctgtca

SEQ ID NO: 128539 - DNA, 25 bp, probe
aggaaggtgagtatgaggctgcaca

SEQ ID NO: 128540 - DNA, 25 bp, probe
aggaaggcgagtcctcatgtgtgtc

SEQ ID NO: 128541 - DNA, 25 bp, probe
aggacatgctggatgccttgggcat

SEQ ID NO: 128542 - DNA, 25 bp, probe
aggacatgcggcctgcatggtggga

SEQ ID NO: 128543 - DNA, 25 bp, probe
aggagagcatctgctctgagacgga

SEQ ID NO: 128544 - DNA, 25 bp, probe
aggagagactcaccatcgagggagt

SEQ ID NO: 128545 - DNA, 25 bp, probe
aggacgactcagtatccgagagctg

SEQ ID NO: 128546 - DNA, 25 bp, probe
aggacagctctacaccagagagtgc

SEQ ID NO: 128547 - DNA, 25 bp, probe
aggactctgcatttaccaagcactt

SEQ ID NO: 128548 - DNA, 25 bp, probe
aggactctgcatttaccaagcactt

SEQ ID NO: 128549 - DNA, 25 bp, probe
aggtttgcatgctggtaatgcaacc

SEQ ID NO: 128550 - DNA, 25 bp, probe
aggttggcatggattacagaagctg

SEQ ID NO: 128551 - DNA, 25 bp, probe
aggttggcatggattacagaagctg

SEQ ID NO: 128552 - DNA, 25 bp, probe
aggttatcggcagtggagctactgc

SEQ ID NO: 128553 - DNA, 25 bp, probe
aggatatcatcttgagtatagcaat

SEQ ID NO: 128554 - DNA, 25 bp, probe
aggatatcatcttgagtatagcaat

SEQ ID NO: 128555 - DNA, 25 bp, probe
aggtacatcaatttcacatcaaaac

SEQ ID NO: 128556 - DNA, 25 bp, probe
aggtacatcaatttcacatcaaaac

SEQ ID NO: 128557 - DNA, 25 bp, probe
aggatttcactcttcaaagccaaag

SEQ ID NO: 128558 - DNA, 25 bp, probe
aggactgaccgcttcataagccagt

SEQ ID NO: 128559 - DNA, 25 bp, probe
aggattaccagattacatgagccca

SEQ ID NO: 128560 - DNA, 25 bp, probe
aggacgaggacatgtatggcaccat

SEQ ID NO: 128561 - DNA, 25 bp, probe
aggagggcggaagtagagtcctcca

SEQ ID NO: 128562 - DNA, 25 bp, probe
aggaaagtggaggttagtctgtggc

SEQ ID NO: 128563 - DNA, 25 bp, probe
aggatacagtttgttcctcgtggcg

SEQ ID NO: 128564 - DNA, 25 bp, probe
aggaccagtttgagtttgcgctgac

SEQ ID NO: 128565 - DNA, 25 bp, probe
aggaccgaagtgattgtggactgtc

SEQ ID NO: 128566 - DNA, 25 bp, probe
aggttctccttgattgggactgggg

SEQ ID NO: 128567 - DNA, 25 bp, probe
aggttctcggtacttaggacttgat

SEQ ID NO: 128568 - DNA, 25 bp, probe
aggttatacgtaccacggattctct

SEQ ID NO: 128569 - DNA, 25 bp, probe
aggtttccttaggcagcttatttat

SEQ ID NO: 128570 - DNA, 25 bp, probe
aggtttaccaaccagcattgaattg

SEQ ID NO: 128571 - DNA, 25 bp, probe
aggtatgtaaaagacaatactcttg

SEQ ID NO: 128572 - DNA, 25 bp, probe
aggttgaaggcaaaaccaactctct

SEQ ID NO: 128573 - DNA, 25 bp, probe
aggtctacctgaaaattcaacattt

SEQ ID NO: 128574 - DNA, 25 bp, probe
aggaccctgatgaaagaccaacatt

SEQ ID NO: 128575 - DNA, 25 bp, probe
aggaggccgtgttagacgtcattcc

SEQ ID NO: 128576 - DNA, 25 bp, probe
aggagtccgaggtagccttcaatca

SEQ ID NO: 128577 - DNA, 25 bp, probe
aggagttcaagaccagcctggccaa

SEQ ID NO: 128578 - DNA, 25 bp, probe
aggaaaagaggccagctctgcagcc

SEQ ID NO: 128579 - DNA, 25 bp, probe
aggaaaagaggccagctctgcagcc

SEQ ID NO: 128580 - DNA, 25 bp, probe
aggaaacgatgggacctcagtcttc

SEQ ID NO: 128581 - DNA, 25 bp, probe
aggagaaggtgaaagccgcggctaa

SEQ ID NO: 128582 - DNA, 25 bp, probe
aggaaatgctgttaacctggcagta

SEQ ID NO: 128583 - DNA, 25 bp, probe
aggaagctctgaagaaactggcata

SEQ ID NO: 128584 - DNA, 25 bp, probe
aggaagctctgaagaaactggcata

SEQ ID NO: 128585 - DNA, 25 bp, probe
aggaagctgcaagaagagtgtctgc

SEQ ID NO: 128586 - DNA, 25 bp, probe
aggaactgaggcgatagaattggcg

SEQ ID NO: 128587 - DNA, 25 bp, probe
aggaagcaggccgagagacttgcac

SEQ ID NO: 128588 - DNA, 25 bp, probe
aggaaagagtgcaaggtcttcaagc

SEQ ID NO: 128589 - DNA, 25 bp, probe
aggagcaaagcaggaggtcttgggc

SEQ ID NO: 128590 - DNA, 25 bp, probe
aggagaataccacagagctccagtg

SEQ ID NO: 128591 - DNA, 25 bp, probe
aggagtacaccatcaagtcgcactc

SEQ ID NO: 128592 - DNA, 25 bp, probe
aggagaacatctttgacactctgca

SEQ ID NO: 128593 - DNA, 25 bp, probe
aggagagacctgtgcaaatctgagc

SEQ ID NO: 128594 - DNA, 25 bp, probe
aggacgatcctccgatgaaagcagc

SEQ ID NO: 128595 - DNA, 25 bp, probe
aggacgatcctccgatgaaagcagc

SEQ ID NO: 128596 - DNA, 25 bp, probe
aggacaagcctgagagggcctgcga

SEQ ID NO: 128597 - DNA, 25 bp, probe
aggaacagcctgaggggctctggcc

SEQ ID NO: 128598 - DNA, 25 bp, probe
actgggccttagtgggccagggctg

SEQ ID NO: 128599 - DNA, 25 bp, probe
agggttcttggatgtggaagggctt

SEQ ID NO: 128600 - DNA, 25 bp, probe
aggagtcccttgcgggaagactgcc

SEQ ID NO: 128601 - DNA, 25 bp, probe
aggttcacggtctgagtaacacctc

SEQ ID NO: 128602 - DNA, 25 bp, probe
aggattacggccaggagatacaacc

SEQ ID NO: 128603 - DNA, 25 bp, probe
aggtcttcagtcctggggattacat

SEQ ID NO: 128604 - DNA, 25 bp, probe
aggtcttcagtcctggggattacat

SEQ ID NO: 128605 - DNA, 25 bp, probe
aggactcacagtacagtgggttatt

SEQ ID NO: 128606 - DNA, 25 bp, probe
aggactgcaccttagggcagtgtcc

SEQ ID NO: 128607 - DNA, 25 bp, probe
aggagccatctttgatcgggtgctg

SEQ ID NO: 128608 - DNA, 25 bp, probe
aggacgtgctggacatcgagcagtt

SEQ ID NO: 128609 - DNA, 25 bp, probe
aggagctgtgatgtatggagtgttg

SEQ ID NO: 128610 - DNA, 25 bp, probe
aggagttgtctcctggggtgatggc

SEQ ID NO: 128611 - DNA, 25 bp, probe
aggactggagcccatgtaggtttgc

SEQ ID NO: 128612 - DNA, 25 bp, probe
aggtgcgggaccagcagaatttgcc

SEQ ID NO: 128613 - DNA, 25 bp, probe
aggagccggacctacaacatgatcc

SEQ ID NO: 128614 - DNA, 25 bp, probe
aggagctcagggccataaaaatgca

SEQ ID NO: 128615 - DNA, 25 bp, probe
aggatccggggcaatacagaccatc

SEQ ID NO: 128616 - DNA, 25 bp, probe
aggacgcagagggccaagagagaca

SEQ ID NO: 128617 - DNA, 25 bp, probe
aggactgtgaggacacacgggaagt

SEQ ID NO: 128618 - DNA, 25 bp, probe
aggactctgagccacaaggggaagg

SEQ ID NO: 128619 - DNA, 25 bp, probe
aggagcctgatcaagccagaggaga

SEQ ID NO: 128620 - DNA, 25 bp, probe
aggagctctacaacatcatgatgcg

SEQ ID NO: 128621 - DNA, 25 bp, probe
aggacattgacaacgcagactttga

SEQ ID NO: 128622 - DNA, 25 bp, probe
aggacattgacaacgcagactttga

SEQ ID NO: 128623 - DNA, 25 bp, probe
aggagcaatacatcgaagcatgtct

SEQ ID NO: 128624 - DNA, 25 bp, probe
aggagtaaaagccagagcaagtgcc

SEQ ID NO: 128625 - DNA, 25 bp, probe
aggagtcagaaagcagtggggaaga

SEQ ID NO: 128626 - DNA, 25 bp, probe
aggagctcaacgtgacggtggtgac

SEQ ID NO: 128627 - DNA, 25 bp, probe
aggactccactttgaaggttgtgcc

SEQ ID NO: 128628 - DNA, 25 bp, probe
aggaccacactttgagaacctgtgc

SEQ ID NO: 128629 - DNA, 25 bp, probe
aggagccacaatgtgatagaggtgg

SEQ ID NO: 128630 - DNA, 25 bp, probe
aggactccagatgaggacaagaggg

SEQ ID NO: 128631 - DNA, 25 bp, probe
aggactcctgcaagggggacagtgg

SEQ ID NO: 128632 - DNA, 25 bp, probe
aggagctcctgcgggcagggaagtc

SEQ ID NO: 128633 - DNA, 25 bp, probe
aggagctcctatcggagggtcttcc

SEQ ID NO: 128634 - DNA, 25 bp, probe
aggacatccttggggagattgctgt

SEQ ID NO: 128635 - DNA, 25 bp, probe
aggactgttacagctgagcattatg

SEQ ID NO: 128636 - DNA, 25 bp, probe
aggacttcacaatcaagctgatagt

SEQ ID NO: 128637 - DNA, 25 bp, probe
aggatgttcatattccaaggatatt

SEQ ID NO: 128638 - DNA, 25 bp, probe
aggatcgttttctaagtgcaatact

SEQ ID NO: 128639 - DNA, 25 bp, probe
aggtctttttagaaggcttcctcat

SEQ ID NO: 128640 - DNA, 25 bp, probe
aggttactattgtttgtttcatctt

SEQ ID NO: 128641 - DNA, 25 bp, probe
aggttatcgtcgtattcctctgttt

SEQ ID NO: 128642 - DNA, 25 bp, probe
aggatttcagtacatcttgccgtgc

SEQ ID NO: 128643 - DNA, 25 bp, probe
aggtttatggacactgagccactgc

SEQ ID NO: 128644 - DNA, 25 bp, probe
aggtttgaagacgtctaccagctgc

SEQ ID NO: 128645 - DNA, 25 bp, probe
aggtgttcaaatctcgaacgccgcc

SEQ ID NO: 128646 - DNA, 25 bp, probe
aggtgttcaaatctcgaacgccgcc

SEQ ID NO: 128647 - DNA, 25 bp, probe
aggattcaaagatctcgaactccat

SEQ ID NO: 128648 - DNA, 25 bp, probe
aggtgaataaaatttgacattagat

SEQ ID NO: 128649 - DNA, 25 bp, probe
aggatcattcaaaagttacccaaag

SEQ ID NO: 128650 - DNA, 25 bp, probe
aggatccatcatatagttcaaccat

SEQ ID NO: 128651 - DNA, 25 bp, probe
aggatccatcatatagttcaaccat

SEQ ID NO: 128652 - DNA, 25 bp, probe
aggatgccataaagaggatcgacca

SEQ ID NO: 128653 - DNA, 25 bp, probe
aggactcaagcaatggagagcggcg

SEQ ID NO: 128654 - DNA, 25 bp, probe
aggacatcaacttcaggaggctgga

SEQ ID NO: 128655 - DNA, 25 bp, probe
aggacatcaacttcaggaggctgga

SEQ ID NO: 128656 - DNA, 25 bp, probe
aggtcattgactttggttctgctag

SEQ ID NO: 128657 - DNA, 25 bp, probe
aggacatagccaagctggtccctaa

SEQ ID NO: 128658 - DNA, 25 bp, probe
agggctgactctaggtgcccttgga

SEQ ID NO: 128659 - DNA, 25 bp, probe
aggtgatccttatggcaactgtggc

SEQ ID NO: 128660 - DNA, 25 bp, probe
aggattccgctttggaactgtccga

SEQ ID NO: 128661 - DNA, 25 bp, probe
aggtgacggccttagatctctcgcc

SEQ ID NO: 128662 - DNA, 25 bp, probe
agggatcaacccaagttcatggccc

SEQ ID NO: 128663 - DNA, 25 bp, probe
aggtacaaactcgacttcagacctc

SEQ ID NO: 128664 - DNA, 25 bp, probe
aggttacaagtggcacttcaatgag

SEQ ID NO: 128665 - DNA, 25 bp, probe
aggaaagaggactacttcagagaga

SEQ ID NO: 128666 - DNA, 25 bp, probe
aggaccgaggactatgctatgatga

SEQ ID NO: 128667 - DNA, 25 bp, probe
aggacctcggcagagccaagaggtt

SEQ ID NO: 128668 - DNA, 25 bp, probe
aggacccagggaatgccagggacat

SEQ ID NO: 128669 - DNA, 25 bp, probe
aggaccagagcctgtctcagggaat

SEQ ID NO: 128670 - DNA, 25 bp, probe
aggacaccgcctatctggtggagaa

SEQ ID NO: 128671 - DNA, 25 bp, probe
aggacccgtgtcacatcgtgaatat

SEQ ID NO: 128672 - DNA, 25 bp, probe
aggactcacgttaactcacatttat

SEQ ID NO: 128673 - DNA, 25 bp, probe
aggactcaggtaacctgcgtgcttt

SEQ ID NO: 128674 - DNA, 25 bp, probe
aggagtccattatcgctgggcattt

SEQ ID NO: 128675 - DNA, 25 bp, probe
aggagagccttctggtggctggttc

SEQ ID NO: 128676 - DNA, 25 bp, probe
agaggaccattctggcttttgtctc

SEQ ID NO: 128677 - DNA, 25 bp, probe
aggtagatctttagcagtcttttct

SEQ ID NO: 128678 - DNA, 25 bp, probe
aggtactttactatcttctatgctc

SEQ ID NO: 128679 - DNA, 25 bp, probe
aggtttgtaactgtttcatagaaga

SEQ ID NO: 128680 - DNA, 25 bp, probe
aggttctttctagttttcaagcaat

SEQ ID NO: 128681 - DNA, 25 bp, probe
aggttgctatggttttatctaacaa

SEQ ID NO: 128682 - DNA, 25 bp, probe
aggtaccttggaaatatctaacata

SEQ ID NO: 128683 - DNA, 25 bp, probe
acgtaacctgcttagtattgacact

SEQ ID NO: 128684 - DNA, 25 bp, probe
aggtaaccattaactatgtacatat

SEQ ID NO: 128685 - DNA, 25 bp, probe
aggtaaccattaactatgtacatat

SEQ ID NO: 128686 - DNA, 25 bp, probe
aggtcaaccagtacccttacatata

SEQ ID NO: 128687 - DNA, 25 bp, probe
aggtctaccattgcttgttcagaga

SEQ ID NO: 128688 - DNA, 25 bp, probe
aggtctaccattgcttgttcagaga

SEQ ID NO: 128689 - DNA, 25 bp, probe
aggtctagcattgtcaagctcctaa

SEQ ID NO: 128690 - DNA, 25 bp, probe
aggactcagaagttcaagctaaata

SEQ ID NO: 128691 - DNA, 25 bp, probe
aggaccagatcgtggtgcagaaagg

SEQ ID NO: 128692 - DNA, 25 bp, probe
aggacctcacgatggtgctgaaaac

SEQ ID NO: 128693 - DNA, 25 bp, probe
aggacctcacgatggtgctgaaaac

SEQ ID NO: 128694 - DNA, 25 bp, probe
aggacgctcaaggaggtgctgacat

SEQ ID NO: 128695 - DNA, 25 bp, probe
aggacgccaaggagatcatgcagca

SEQ ID NO: 128696 - DNA, 25 bp, probe
aggaggtcaagtgtgcatgcaagag

SEQ ID NO: 128697 - DNA, 25 bp, probe
aggaggtcaagtgtgcatgcaagag

SEQ ID NO: 128698 - DNA, 25 bp, probe
aggagaccaaggttctcaagaccct

SEQ ID NO: 128699 - DNA, 25 bp, probe
aggagatgccaaccgttcaacatcc

SEQ ID NO: 128700 - DNA, 25 bp, probe
aggagaccaagtcctggctacatcc

SEQ ID NO: 128701 - DNA, 25 bp, probe
aggacacagcaagtgagtcctcccc

SEQ ID NO: 128702 - DNA, 25 bp, probe
aggacatgataaggcagatccttcc

SEQ ID NO: 128703 - DNA, 25 bp, probe
aggacatgataaggcagatccttcc

SEQ ID NO: 128704 - DNA, 25 bp, probe
aggagcatgtgttagcgtctcgtcc

SEQ ID NO: 128705 - DNA, 25 bp, probe
aggagcatgtgttagcgtctcgtcc

SEQ ID NO: 128706 - DNA, 25 bp, probe
aggagattgatattgctgccaccct

SEQ ID NO: 128707 - DNA, 25 bp, probe
aggagatgggatggtacctcctagg

SEQ ID NO: 128708 - DNA, 25 bp, probe
agggattcgaaaacagtcctcagtt

SEQ ID NO: 128709 - DNA, 25 bp, probe
aggtgtctcgagagaagatcaccct

SEQ ID NO: 128710 - DNA, 25 bp, probe
aggacctcaccaaaagatccagcct

SEQ ID NO: 128711 - DNA, 25 bp, probe
aggacctacgtatgatgatatcaat

SEQ ID NO: 128712 - DNA, 25 bp, probe
aggacctacgtatgatgatatcaat

SEQ ID NO: 128713 - DNA, 25 bp, probe
aggacacagttgcatcagtgatgta

SEQ ID NO: 128714 - DNA, 25 bp, probe
aggacagcagtgggctcagcatggt

SEQ ID NO: 128715 - DNA, 25 bp, probe
aggacactgatgggtcctgctgctc

SEQ ID NO: 128716 - DNA, 25 bp, probe
aggacatctgggtctcatttgcttc

SEQ ID NO: 128717 - DNA, 25 bp, probe
aggacatctgggtctcatttgcttc

SEQ ID NO: 128718 - DNA, 25 bp, probe
aggacattctgttctcattattatc

SEQ ID NO: 128719 - DNA, 25 bp, probe
aggacattctgttctcattattatc

SEQ ID NO: 128720 - DNA, 25 bp, probe
aggagattctatgtgcttttatcag

SEQ ID NO: 128721 - DNA, 25 bp, probe
agggatttgtgcatcttattcatag

SEQ ID NO: 128722 - DNA, 25 bp, probe
aggtggtgctggtttatgttctagg

SEQ ID NO: 128723 - DNA, 25 bp, probe
aggacctgcgggacaagattcttgg

SEQ ID NO: 128724 - DNA, 25 bp, probe
aggagccatggctggaggttatcga

SEQ ID NO: 128725 - DNA, 25 bp, probe
aggagccatggctggaggttatcga

SEQ ID NO: 128726 - DNA, 25 bp, probe
aggagcgcacgctggaggagtggaa

SEQ ID NO: 128727 - DNA, 25 bp, probe
aggagctgactgtggactggtgggc

SEQ ID NO: 128728 - DNA, 25 bp, probe
aggactgatgctgtggggtgctggt

SEQ ID NO: 128729 - DNA, 25 bp, probe
aggacgagcccagtgtagttgtgtg

SEQ ID NO: 128730 - DNA, 25 bp, probe
aggatcgacgcgcttctgtatgggc

SEQ ID NO: 128731 - DNA, 25 bp, probe
aggacaaatcccggctgaatgagac

SEQ ID NO: 128732 - DNA, 25 bp, probe
aggtcaaaccggaggagagactcac

SEQ ID NO: 128733 - DNA, 25 bp, probe
aggtaatccgggaaggaggtcatgc

SEQ ID NO: 128734 - DNA, 25 bp, probe
agttgaactagggaagagggtcttg

SEQ ID NO: 128735 - DNA, 25 bp, probe
agttgaactagggaagagggtcttg

SEQ ID NO: 128736 - DNA, 25 bp, probe
aggtaactgaggagaggggcgcctc

SEQ ID NO: 128737 - DNA, 25 bp, probe
aggtacctaggttggagtccagcct

SEQ ID NO: 128738 - DNA, 25 bp, probe
aggtagcctctggaaagcattcccc

SEQ ID NO: 128739 - DNA, 25 bp, probe
aggagagccttggccaagcatttcc

SEQ ID NO: 128740 - DNA, 25 bp, probe
aggagcagaattccacattcattac

SEQ ID NO: 128741 - DNA, 25 bp, probe
aggacagagaagccactggtttctc

SEQ ID NO: 128742 - DNA, 25 bp, probe
aggacagagaagccactggtttctc

SEQ ID NO: 128743 - DNA, 25 bp, probe
aggagccagaggcactagctgatgg

SEQ ID NO: 128744 - DNA, 25 bp, probe
aggagcggatggagttgctgcaggc

SEQ ID NO: 128745 - DNA, 25 bp, probe
aggacaggtggaagtgtggcagggg

SEQ ID NO: 128746 - DNA, 25 bp, probe
aggagctggggatggtggacttgga

SEQ ID NO: 128747 - DNA, 25 bp, probe
aggactgggtgcagcagaaagcctg

SEQ ID NO: 128748 - DNA, 25 bp, probe
aggactgggtgcagcagaaagcctg

SEQ ID NO: 128749 - DNA, 25 bp, probe
aggagcatggtcgggcaaatccctg

SEQ ID NO: 128750 - DNA, 25 bp, probe
aggagcaggctgcaggtttcctgcc

SEQ ID NO: 128751 - DNA, 25 bp, probe
aggagcaggctgcaggtttcctgcc

SEQ ID NO: 128752 - DNA, 25 bp, probe
aggacatggccgggctgctgaagcc

SEQ ID NO: 128753 - DNA, 25 bp, probe
aggatcatgtggtaactgcgagagc

SEQ ID NO: 128754 - DNA, 25 bp, probe
aggactctgacattgatggcgaggc

SEQ ID NO: 128755 - DNA, 25 bp, probe
aggactctggcttgagactagacgg

SEQ ID NO: 128756 - DNA, 25 bp, probe
aggacattgtgtcagattaccagtt

SEQ ID NO: 128757 - DNA, 25 bp, probe
aggacattcaacaagaaatcacagt

SEQ ID NO: 128758 - DNA, 25 bp, probe
aggactggcagtaagacatgattca

SEQ ID NO: 128759 - DNA, 25 bp, probe
aggactcgctggacgacagcggcag

SEQ ID NO: 128760 - DNA, 25 bp, probe
aggactagtggagtcctgagtcagc

SEQ ID NO: 128761 - DNA, 25 bp, probe
aggatctgcagttactttgaagaca

SEQ ID NO: 128762 - DNA, 25 bp, probe
aggagcacctcaactatgtgactga

SEQ ID NO: 128763 - DNA, 25 bp, probe
aggagcacctcaactatgtgactga

SEQ ID NO: 128764 - DNA, 25 bp, probe
aggtccgcatcatcatcatgctgac

SEQ ID NO: 128765 - DNA, 25 bp, probe
aggtccgcatcatcatcatgctgac

SEQ ID NO: 128766 - DNA, 25 bp, probe
agggtaggtgagagtcagggtgcag

SEQ ID NO: 128767 - DNA, 25 bp, probe
agggtgagacggagccggaagttat

SEQ ID NO: 128768 - DNA, 25 bp, probe
agaggaggacgtgagccagtttgat

SEQ ID NO: 128769 - DNA, 25 bp, probe
aggagatcaaggtccagccattctt

SEQ ID NO: 128770 - DNA, 25 bp, probe
aggagatcaaggtccagccattctt

SEQ ID NO: 128771 - DNA, 25 bp, probe
aggagcacaagccacaagtcttcca

SEQ ID NO: 128772 - DNA, 25 bp, probe
aggagaccttcctggcaatcaagta

SEQ ID NO: 128773 - DNA, 25 bp, probe
agggaccctcctacactacagaggg

SEQ ID NO: 128774 - DNA, 25 bp, probe
agggaccctcctacactacagaggg

SEQ ID NO: 128775 - DNA, 25 bp, probe
aggagatctcaccaagcacattaaa

SEQ ID NO: 128776 - DNA, 25 bp, probe
aggagatctcaccaagcacattaaa

SEQ ID NO: 128777 - DNA, 25 bp, probe
aggatgatccggaagcagcttacac

SEQ ID NO: 128778 - DNA, 25 bp, probe
aggatgatcatgagcggcaactacc

SEQ ID NO: 128779 - DNA, 25 bp, probe
aggagatgcagctggtccttactcc

SEQ ID NO: 128780 - DNA, 25 bp, probe
aggtcagacacgttccactgaccct

SEQ ID NO: 128781 - DNA, 25 bp, probe
aggagtacctgtaccacaagcacct

SEQ ID NO: 128782 - DNA, 25 bp, probe
aggagttcctgaacgagaaggcgcg

SEQ ID NO: 128783 - DNA, 25 bp, probe
aggacctctacaggcggaaggcctg

SEQ ID NO: 128784 - DNA, 25 bp, probe
aggtttcttcaggctgaggaggact

SEQ ID NO: 128785 - DNA, 25 bp, probe
aggagttctgaagctgacagcacta

SEQ ID NO: 128786 - DNA, 25 bp, probe
aggagttctgaagctgacagcacta

SEQ ID NO: 128787 - DNA, 25 bp, probe
aggagacattgctctatgtctgcct

SEQ ID NO: 128788 - DNA, 25 bp, probe
aggagacattgctctatgtctgcct

SEQ ID NO: 128789 - DNA, 25 bp, probe
aggagagattgatccatgtctgttt

SEQ ID NO: 128790 - DNA, 25 bp, probe
aggagctcattatccagtctgtgcc

SEQ ID NO: 128791 - DNA, 25 bp, probe
aggagctcaatgtcaccgtggtgac

SEQ ID NO: 128792 - DNA, 25 bp, probe
aggagccaatggcctttggatcact

SEQ ID NO: 128793 - DNA, 25 bp, probe
aggaggagatcgctttgttctcatc

SEQ ID NO: 128794 - DNA, 25 bp, probe
aggaggagatcgctttgttctcatc

SEQ ID NO: 128795 - DNA, 25 bp, probe
aggagagagtggtctggtgggcttc

SEQ ID NO: 128796 - DNA, 25 bp, probe
aggagaaggtgatgatctgggcata

SEQ ID NO: 128797 - DNA, 25 bp, probe
aggagaatggtgttattactgacaa

SEQ ID NO: 128798 - DNA, 25 bp, probe
aggagtctggcgttatctccacaat

SEQ ID NO: 128799 - DNA, 25 bp, probe
aggtttgatgcctatttccaccaga

SEQ ID NO: 128800 - DNA, 25 bp, probe
aggttagattctcattcacgggact

SEQ ID NO: 128801 - DNA, 25 bp, probe
aggtgaacacttccttctagggagc

SEQ ID NO: 128802 - DNA, 25 bp, probe
agagtaaaactgtatttgtgggagc

SEQ ID NO: 128803 - DNA, 25 bp, probe
aggtactcttctgtttgtgggcaga

SEQ ID NO: 128804 - DNA, 25 bp, probe
aggggtattcgttttgtgactcaca

SEQ ID NO: 128805 - DNA, 25 bp, probe
aggatcgttttttaagtgcaatact

SEQ ID NO: 128806 - DNA, 25 bp, probe
aggtcataatttaaatcgtcaaact

SEQ ID NO: 128807 - DNA, 25 bp, probe
aggtcataatttaaatcgtcaaact

SEQ ID NO: 128808 - DNA, 25 bp, probe
aggtcttattggaattgcttatgaa

SEQ ID NO: 128809 - DNA, 25 bp, probe
aggatctctttgtgaactctgtgtt

SEQ ID NO: 128810 - DNA, 25 bp, probe
agagagttttaagacactgttctgg

SEQ ID NO: 128811 - DNA, 25 bp, probe
aggagttgtgtcgagctcacagcgt

SEQ ID NO: 128812 - DNA, 25 bp, probe
aggagttgtgtcgagctcacagcgt

SEQ ID NO: 128813 - DNA, 25 bp, probe
aggagtatgtgtccaatgctgcctt

SEQ ID NO: 128814 - DNA, 25 bp, probe
aggagatgtgatgtccactgcctgt

SEQ ID NO: 128815 - DNA, 25 bp, probe
aggtggtatcaggcccctgagttac

SEQ ID NO: 128816 - DNA, 25 bp, probe
aggtcaggattggccctgggtttgc

SEQ ID NO: 128817 - DNA, 25 bp, probe
aggactggattttccacgtcttgtc

SEQ ID NO: 128818 - DNA, 25 bp, probe
aggactttgattgcacattgttgtt

SEQ ID NO: 128819 - DNA, 25 bp, probe
aggagttagtctggcttcatgtttt

SEQ ID NO: 128820 - DNA, 25 bp, probe
aggagattgcagatgcgtgtcgcct

SEQ ID NO: 128821 - DNA, 25 bp, probe
aggagtcggtgtgatgtcatgcctt

SEQ ID NO: 128822 - DNA, 25 bp, probe
aggattccaggttatatctcatctt

SEQ ID NO: 128823 - DNA, 25 bp, probe
aggatactccctgcatgatacatct

SEQ ID NO: 128824 - DNA, 25 bp, probe
aggatactccctgcatgatacatct

SEQ ID NO: 128825 - DNA, 25 bp, probe
aggagacgacttactagatctcata

SEQ ID NO: 128826 - DNA, 25 bp, probe
aggagaccagtgtatctctgtccat

SEQ ID NO: 128827 - DNA, 25 bp, probe
aggagaccagtgtatctctgtccat

SEQ ID NO: 128828 - DNA, 25 bp, probe
aggatgatctcgatctcttgacctc

SEQ ID NO: 128829 - DNA, 25 bp, probe
aggagtgtcaatactgcgagactta

SEQ ID NO: 128830 - DNA, 25 bp, probe
aggagatgtggaactcgggctgtca

SEQ ID NO: 128831 - DNA, 25 bp, probe
aggagttggaccacactgtgagcat

SEQ ID NO: 128832 - DNA, 25 bp, probe
aggtttgacatcgaagacgtgaata

SEQ ID NO: 128833 - DNA, 25 bp, probe
aggtatgttcttgatgaccagtatg

SEQ ID NO: 128834 - DNA, 25 bp, probe
aggattttcatgttgatgactcgaa

SEQ ID NO: 128835 - DNA, 25 bp, probe
aggatgtttctgttgattttattca

SEQ ID NO: 128836 - DNA, 25 bp, probe
aggactgtgtagttgtatatttgta

SEQ ID NO: 128837 - DNA, 25 bp, probe
aggggctgtggaggttgatattatt

SEQ ID NO: 128838 - DNA, 25 bp, probe
aggggtggagaagtgtcgttttcat

SEQ ID NO: 128839 - DNA, 25 bp, probe
aggttatctggaagttcagtctttt

SEQ ID NO: 128840 - DNA, 25 bp, probe
aggtttgaggttctcagctttcctt

SEQ ID NO: 128841 - DNA, 25 bp, probe
agtttgtgggtcagtctgtcttccc

SEQ ID NO: 128842 - DNA, 25 bp, probe
aggttgggggcagtgttgtggccct

SEQ ID NO: 128843 - DNA, 25 bp, probe
aggtaggggtggctggggcagccca

SEQ ID NO: 128844 - DNA, 25 bp, probe
aggagaggggtgcaacaggaccgcc

SEQ ID NO: 128845 - DNA, 25 bp, probe
agggggcaaggagaaagcaccgaca

SEQ ID NO: 128846 - DNA, 25 bp, probe
agtgggtgccacaatctgaacccct

SEQ ID NO: 128847 - DNA, 25 bp, probe
aggaggtgcacgcacattacctgca

SEQ ID NO: 128848 - DNA, 25 bp, probe
aggaggccaagagaaaccgcacctt

SEQ ID NO: 128849 - DNA, 25 bp, probe
aggaggacaagatgcaatacctgca

SEQ ID NO: 128850 - DNA, 25 bp, probe
aggaggacaagatgcaatacctgca

SEQ ID NO: 128851 - DNA, 25 bp, probe
agtgaagaaaaccaccaccttcctg

SEQ ID NO: 128852 - DNA, 25 bp, probe
aggagtggttacccagacacttctt

SEQ ID NO: 128853 - DNA, 25 bp, probe
aggagtggttacccagacacttctt

SEQ ID NO: 128854 - DNA, 25 bp, probe
aggagggcttcatcctcataatgtc

SEQ ID NO: 128855 - DNA, 25 bp, probe
aggaggagtttctgtcatcctgtcc

SEQ ID NO: 128856 - DNA, 25 bp, probe
aggggaatctctattactctgtact

SEQ ID NO: 128857 - DNA, 25 bp, probe
aggggaatcattaaagtgctttcag

SEQ ID NO: 128858 - DNA, 25 bp, probe
aggaccgatgataatacgttttcat

SEQ ID NO: 128859 - DNA, 25 bp, probe
aggaccggataatggccatcatgta

SEQ ID NO: 128860 - DNA, 25 bp, probe
aggatacttgaatggacctctataa

SEQ ID NO: 128861 - DNA, 25 bp, probe
aggagagcgtgcatagcgacactcg

SEQ ID NO: 128862 - DNA, 25 bp, probe
aggagaagtcgcagtgcgcactgga

SEQ ID NO: 128863 - DNA, 25 bp, probe
aggagcaagtcctgtgtggcaaaac

SEQ ID NO: 128864 - DNA, 25 bp, probe
aggagacaccgctggtggactgtaa

SEQ ID NO: 128865 - DNA, 25 bp, probe
aggagcacgccgtgagatgagcacc

SEQ ID NO: 128866 - DNA, 25 bp, probe
aggagtcttcagtgtgtgagcctcc

SEQ ID NO: 128867 - DNA, 25 bp, probe
aggagtcttaacattggccagcatc

SEQ ID NO: 128868 - DNA, 25 bp, probe
aggagattgtgaacttcagccccat

SEQ ID NO: 128869 - DNA, 25 bp, probe
aggagattgtgaacttcagccccat

SEQ ID NO: 128870 - DNA, 25 bp, probe
aggagaatggtgacctcagtccctt

SEQ ID NO: 128871 - DNA, 25 bp, probe
aggagaaggtgtacatcgccactca

SEQ ID NO: 128872 - DNA, 25 bp, probe
aggatccaagctaagcactgccact

SEQ ID NO: 128873 - DNA, 25 bp, probe
aggatccaagctaagcactgccact

SEQ ID NO: 128874 - DNA, 25 bp, probe
aggtcctgatgaacacctacagtgt

SEQ ID NO: 128875 - DNA, 25 bp, probe
aggtgccatggtaacctgacactct

SEQ ID NO: 128876 - DNA, 25 bp, probe
aggtgccatggtaacctgacactct

SEQ ID NO: 128877 - DNA, 25 bp, probe
aggtcccatgtcaacactggttcat

SEQ ID NO: 128878 - DNA, 25 bp, probe
aggtccctgtggacaatgccattct

SEQ ID NO: 128879 - DNA, 25 bp, probe
aggtcaactgcagggagatggattc

SEQ ID NO: 128880 - DNA, 25 bp, probe
aggtcaactgcagggagatggattc

SEQ ID NO: 128881 - DNA, 25 bp, probe
agggtactgcagcaattgaagtgct

SEQ ID NO: 128882 - DNA, 25 bp, probe
agggtactgcagcaattgaagtgct

SEQ ID NO: 128883 - DNA, 25 bp, probe
aggtgaacggcatgttgatcatgtg

SEQ ID NO: 128884 - DNA, 25 bp, probe
aggtgaacggcatgttgatcatgtg

SEQ ID NO: 128885 - DNA, 25 bp, probe
aggtcaagggcatgggttggggtag

SEQ ID NO: 128886 - DNA, 25 bp, probe
aggtcagagtggaggagagggaaga

SEQ ID NO: 128887 - DNA, 25 bp, probe
aggatggcatgaagtttaaggaata

SEQ ID NO: 128888 - DNA, 25 bp, probe
aggagagccagagtattgaaagaaa

SEQ ID NO: 128889 - DNA, 25 bp, probe
aggagctgaggaatttgcaacgaga

SEQ ID NO: 128890 - DNA, 25 bp, probe
aggatcaatcacattagctcctgga

SEQ ID NO: 128891 - DNA, 25 bp, probe
aggattcaccattctagatgccatc

SEQ ID NO: 128892 - DNA, 25 bp, probe
aggagtgagaattctgagagtcagc

SEQ ID NO: 128893 - DNA, 25 bp, probe
aggagtgagcgacgcagagcaggac

SEQ ID NO: 128894 - DNA, 25 bp, probe
aggagtaagacccctggaccaccag

SEQ ID NO: 128895 - DNA, 25 bp, probe
agggtagattacctcggataccaca

SEQ ID NO: 128896 - DNA, 25 bp, probe
aggggagaaacctgagtctcagagc

SEQ ID NO: 128897 - DNA, 25 bp, probe
aggggagaaacctgagtctcagagc

SEQ ID NO: 128898 - DNA, 25 bp, probe
aggtggaaaaacagcgcctgcggga

SEQ ID NO: 128899 - DNA, 25 bp, probe
aggtaaaaactaaggacatgctgag

SEQ ID NO: 128900 - DNA, 25 bp, probe
aggtaagaaagtctcaggctctgat

SEQ ID NO: 128901 - DNA, 25 bp, probe
aggtaagaaagtctcaggctctgat

SEQ ID NO: 128902 - DNA, 25 bp, probe
aggtaacatgtggtttcttgccttt

SEQ ID NO: 128903 - DNA, 25 bp, probe
aggataacaccgcttttgttctcgc

SEQ ID NO: 128904 - DNA, 25 bp, probe
aggattaccccatatacatgtgact

SEQ ID NO: 128905 - DNA, 25 bp, probe
aggatgtgacgttattaccagtgaa

SEQ ID NO: 128906 - DNA, 25 bp, probe
aggatgtgacgttattaccagtgaa

SEQ ID NO: 128907 - DNA, 25 bp, probe
aggagagtctgttatcacccaaata

SEQ ID NO: 128908 - DNA, 25 bp, probe
aggagtcgctgttgaacccagagct

SEQ ID NO: 128909 - DNA, 25 bp, probe
aggagtcgctgttgaacccagagct

SEQ ID NO: 128910 - DNA, 25 bp, probe
aggagtcgctgttgaacccagagct

SEQ ID NO: 128911 - DNA, 25 bp, probe
aggagtcgctgttgaacccagagct

SEQ ID NO: 128912 - DNA, 25 bp, probe
aggagtcgctgttgaacccagagct

SEQ ID NO: 128913 - DNA, 25 bp, probe
agggatggattttcaccgattctac

SEQ ID NO: 128914 - DNA, 25 bp, probe
aggtgtggagcgacatcccgcttgc

SEQ ID NO: 128915 - DNA, 25 bp, probe
aggtcatcagggacccattgttctc

SEQ ID NO: 128916 - DNA, 25 bp, probe
aggtaggaagaatcattgctgcatt

SEQ ID NO: 128917 - DNA, 25 bp, probe
aggatggtaatcacagcattgctct

SEQ ID NO: 128918 - DNA, 25 bp, probe
aggagttctcagaacacttccgctg

SEQ ID NO: 128919 - DNA, 25 bp, probe
aggagatgagacctaccttccagtt

SEQ ID NO: 128920 - DNA, 25 bp, probe
aggagaggacttccctgcagcacgt

SEQ ID NO: 128921 - DNA, 25 bp, probe
agggaggagaaccctggtgagtcga

SEQ ID NO: 128922 - DNA, 25 bp, probe
agggccctgaaagctgttgcagctc

SEQ ID NO: 128923 - DNA, 25 bp, probe
aggaggcctgaactgccaaggcccc

SEQ ID NO: 128924 - DNA, 25 bp, probe
aggagaacatgaagccgcaggagca

SEQ ID NO: 128925 - DNA, 25 bp, probe
aggagaagctgaagactgtggagga

SEQ ID NO: 128926 - DNA, 25 bp, probe
aggaggggatgggctatggggaccg

SEQ ID NO: 128927 - DNA, 25 bp, probe
aggagcgggggtgatgccagagtct

SEQ ID NO: 128928 - DNA, 25 bp, probe
aggagcgggaccaaagcaccaatat

SEQ ID NO: 128929 - DNA, 25 bp, probe
agggccggacaaaagctcgagaaag

SEQ ID NO: 128930 - DNA, 25 bp, probe
aggagctctggatacaagctcccca

SEQ ID NO: 128931 - DNA, 25 bp, probe
aggagctctggatacaagctcccca

SEQ ID NO: 128932 - DNA, 25 bp, probe
aggagcctggactaggactcccata

SEQ ID NO: 128933 - DNA, 25 bp, probe
aggagcttggaccttggtactacct

SEQ ID NO: 128934 - DNA, 25 bp, probe
agggccgtgacacaggttctggcca

SEQ ID NO: 128935 - DNA, 25 bp, probe
aggaggtgccaacagtgttaggcct

SEQ ID NO: 128936 - DNA, 25 bp, probe
aggagtgtccaacattttcagcttc

SEQ ID NO: 128937 - DNA, 25 bp, probe
aggtggtgactatattttctgcttc

SEQ ID NO: 128938 - DNA, 25 bp, probe
aggatggtaccattgctctttccta

SEQ ID NO: 128939 - DNA, 25 bp, probe
aggaggtgaccagtcttcatttgaa

SEQ ID NO: 128940 - DNA, 25 bp, probe
aggatgggacttttgtcatttcaaa

SEQ ID NO: 128941 - DNA, 25 bp, probe
aggtgtactttgtgctcatttcaga

SEQ ID NO: 128942 - DNA, 25 bp, probe
agggtactctattccttatatggag

SEQ ID NO: 128943 - DNA, 25 bp, probe
agggaagctttaactccaagtggag

SEQ ID NO: 128944 - DNA, 25 bp, probe
agggaagctttaactccaagtggag

SEQ ID NO: 128945 - DNA, 25 bp, probe
aggggacttgtatacccaggcagca

SEQ ID NO: 128946 - DNA, 25 bp, probe
agggagaccttagctccgagaagca

SEQ ID NO: 128947 - DNA, 25 bp, probe
aggtaacctgcgtgctttataagcc

SEQ ID NO: 128948 - DNA, 25 bp, probe
aggtacctggtgtgccagcgaaacc

SEQ ID NO: 128949 - DNA, 25 bp, probe
aggtacctggtgtgccagcgaaacc

SEQ ID NO: 128950 - DNA, 25 bp, probe
aggtagccggtgtgcggtgaactct

SEQ ID NO: 128951 - DNA, 25 bp, probe
aggttctcctggtgcggttgaagaa

SEQ ID NO: 128952 - DNA, 25 bp, probe
agagtcccctggggctagaggtgga

SEQ ID NO: 128953 - DNA, 25 bp, probe
aggtcatccctgagccagataagag

SEQ ID NO: 128954 - DNA, 25 bp, probe
aggatcttgttgaatccagtccagg

SEQ ID NO: 128955 - DNA, 25 bp, probe
aggaggtgaatgctatcctcaaggc

SEQ ID NO: 128956 - DNA, 25 bp, probe
aggagacaggcacgttcttcgagcc

SEQ ID NO: 128957 - DNA, 25 bp, probe
aggagaccctggttttcatggtgca

SEQ ID NO: 128958 - DNA, 25 bp, probe
aggagatgctccagttagtaattca

SEQ ID NO: 128959 - DNA, 25 bp, probe
aggagatgctccagttagtaattca

SEQ ID NO: 128960 - DNA, 25 bp, probe
aggagaaccctggtgagtcgaatca

SEQ ID NO: 128961 - DNA, 25 bp, probe
aggaggtccgcgggaggatggagca

SEQ ID NO: 128962 - DNA, 25 bp, probe
aggagatgaacggccgggtcagcca

SEQ ID NO: 128963 - DNA, 25 bp, probe
aggagatgaacggccgggtcagcca

SEQ ID NO: 128964 - DNA, 25 bp, probe
agtgtggcaggggccatgtggtaaa

SEQ ID NO: 128965 - DNA, 25 bp, probe
aggaggaggaccatcgagctaaagg

SEQ ID NO: 128966 - DNA, 25 bp, probe
aggatgggagatgcgtgcagagctg

SEQ ID NO: 128967 - DNA, 25 bp, probe
aggagtggagatcgcgtgcattgcc

SEQ ID NO: 128968 - DNA, 25 bp, probe
aggagctgacagtgcttctacacat

SEQ ID NO: 128969 - DNA, 25 bp, probe
aggagtgaagaaggtgctcacctca

SEQ ID NO: 128970 - DNA, 25 bp, probe
aggagtgaagaaggtgctcacctca

SEQ ID NO: 128971 - DNA, 25 bp, probe
aggtgctgactgacaagcatgcccc

SEQ ID NO: 128972 - DNA, 25 bp, probe
aggtccatgctgccaagtcactggc

SEQ ID NO: 128973 - DNA, 25 bp, probe
aggatcgccatccggatcacggcaa

SEQ ID NO: 128974 - DNA, 25 bp, probe
aggatcgccatccggatcacggcaa

SEQ ID NO: 128975 - DNA, 25 bp, probe
aggagatagtcgcttcctggctaat

SEQ ID NO: 128976 - DNA, 25 bp, probe
aggagactgtccctctgactggaaa

SEQ ID NO: 128977 - DNA, 25 bp, probe
aggagtctgcttacttactggaatt

SEQ ID NO: 128978 - DNA, 25 bp, probe
aggagatcattaagaccacggagca

SEQ ID NO: 128979 - DNA, 25 bp, probe
aggatgccacatctgaccttggata

SEQ ID NO: 128980 - DNA, 25 bp, probe
aggatgacatcatctacactcagga

SEQ ID NO: 128981 - DNA, 25 bp, probe
aggatgaatatgatgtcctcataga

SEQ ID NO: 128982 - DNA, 25 bp, probe
aggtgattttgtggccctagatagg

SEQ ID NO: 128983 - DNA, 25 bp, probe
aggagattttgtaactgcttgccat

SEQ ID NO: 128984 - DNA, 25 bp, probe
aggagaagctgtgctacgtcgccct

SEQ ID NO: 128985 - DNA, 25 bp, probe
aggagaagcatggcgtcatccatcg

SEQ ID NO: 128986 - DNA, 25 bp, probe
aggagaagcactggatccaaagcat

SEQ ID NO: 128987 - DNA, 25 bp, probe
aggataaggggtcatcaatgctggc

SEQ ID NO: 128988 - DNA, 25 bp, probe
aggatttagggtcacatgctgcagg

SEQ ID NO: 128989 - DNA, 25 bp, probe
aggttgtatgtgatcagaagctgcg

SEQ ID NO: 128990 - DNA, 25 bp, probe
aggttgtcatgtcagcggagctaga

SEQ ID NO: 128991 - DNA, 25 bp, probe
aggttgtcatgtcagcggagctaga

SEQ ID NO: 128992 - DNA, 25 bp, probe
aggttctcttcaagtcgcagataga

SEQ ID NO: 128993 - DNA, 25 bp, probe
aggtcttcatccagatgccaaatat

SEQ ID NO: 128994 - DNA, 25 bp, probe
aggtcactcaagaagtaagcaacta

SEQ ID NO: 128995 - DNA, 25 bp, probe
aggtctcctatgtaaaagcgattga

SEQ ID NO: 128996 - DNA, 25 bp, probe
aggtctcctatgtaaaagcgattga

SEQ ID NO: 128997 - DNA, 25 bp, probe
aggtctcctatgtcacagcgatgga

SEQ ID NO: 128998 - DNA, 25 bp, probe
aggtctgtcttctgccagatggaag

SEQ ID NO: 128999 - DNA, 25 bp, probe
aggtgcatttggtgccagaaaacag

SEQ ID NO: 129000 - DNA, 25 bp, probe
aggtgcacattttccacggaaacag

SEQ ID NO: 129001 - DNA, 25 bp, probe
agtgtagttgtgtggcgtgaactct

SEQ ID NO: 129002 - DNA, 25 bp, probe
aggtgcaacttgaggctctgctagc

SEQ ID NO: 129003 - DNA, 25 bp, probe
aggtaacacttccgctgctgcggca

SEQ ID NO: 129004 - DNA, 25 bp, probe
aggtggacatttggagcactggcgt

SEQ ID NO: 129005 - DNA, 25 bp, probe
agggtactggcctagccatgtggaa

SEQ ID NO: 129006 - DNA, 25 bp, probe
aggagtttgagactagcctaggcaa

SEQ ID NO: 129007 - DNA, 25 bp, probe
aggatttggaacaactccagcccag

SEQ ID NO: 129008 - DNA, 25 bp, probe
agggtgttgaagatgctccctggcg

SEQ ID NO: 129009 - DNA, 25 bp, probe
aggagtgttttgatgtgggctgtaa

SEQ ID NO: 129010 - DNA, 25 bp, probe
aggagtgttttgatgtgggctgtaa

SEQ ID NO: 129011 - DNA, 25 bp, probe
aggagtttgacgaggtgtctcggat

SEQ ID NO: 129012 - DNA, 25 bp, probe
aggaggggaagtttgctgtattgga

SEQ ID NO: 129013 - DNA, 25 bp, probe
aggaggggaagtttgctgtattgga

SEQ ID NO: 129014 - DNA, 25 bp, probe
aggaggtgctgacatgctcctggtg

SEQ ID NO: 129015 - DNA, 25 bp, probe
aggagaggagagcatctgctctgag

SEQ ID NO: 129016 - DNA, 25 bp, probe
aggagataggagctcatatctgaca

SEQ ID NO: 129017 - DNA, 25 bp, probe
agggatcggagccatcatcgcgcca

SEQ ID NO: 129018 - DNA, 25 bp, probe
agggatcggagccatcatcgcgcca

SEQ ID NO: 129019 - DNA, 25 bp, probe
aggtgcatcgccagcatttcgatcc

SEQ ID NO: 129020 - DNA, 25 bp, probe
aggtgacgtccgtgggacctagact

SEQ ID NO: 129021 - DNA, 25 bp, probe
aggtgacgtccgtgggacctagact

SEQ ID NO: 129022 - DNA, 25 bp, probe
aggtgaagtcctctggaatccgagt

SEQ ID NO: 129023 - DNA, 25 bp, probe
aggagaaagacagctggaaccgagt

SEQ ID NO: 129024 - DNA, 25 bp, probe
aggagaaagacagctggaaccgagt

SEQ ID NO: 129025 - DNA, 25 bp, probe
aggagaaagccagcctgaccctggc

SEQ ID NO: 129026 - DNA, 25 bp, probe
aggaggaatgcctttcagggtgtgg

SEQ ID NO: 129027 - DNA, 25 bp, probe
aggaggtctacatcaagaatgggga

SEQ ID NO: 129028 - DNA, 25 bp, probe
aggtggctaatctcaggactgggaa

SEQ ID NO: 129029 - DNA, 25 bp, probe
aggtcctaaatcactcatctggcct

SEQ ID NO: 129030 - DNA, 25 bp, probe
aggtctccaaaatctgcactgggct

SEQ ID NO: 129031 - DNA, 25 bp, probe
aggttcacaatcaagtctgacgtgt

SEQ ID NO: 129032 - DNA, 25 bp, probe
aggttcacaatcaagtctgacgtgt

SEQ ID NO: 129033 - DNA, 25 bp, probe
aggttcacaaactcttggtcattat

SEQ ID NO: 129034 - DNA, 25 bp, probe
aggttcacaaactcttggtcattat

SEQ ID NO: 129035 - DNA, 25 bp, probe
aggttcgcaagaacctgatggacat

SEQ ID NO: 129036 - DNA, 25 bp, probe
aggattcacggtgcacatgctggca

SEQ ID NO: 129037 - DNA, 25 bp, probe
aggtgtacgtggccaatgcaggcga

SEQ ID NO: 129038 - DNA, 25 bp, probe
aggttcaccagggcatcaagggaat

SEQ ID NO: 129039 - DNA, 25 bp, probe
aggtgctaccagtgcaaagctgcta

SEQ ID NO: 129040 - DNA, 25 bp, probe
aggtgcatgccatgctcagaaccct

SEQ ID NO: 129041 - DNA, 25 bp, probe
aggtgcatgccatgctcagaaccct

SEQ ID NO: 129042 - DNA, 25 bp, probe
aggtgcatacattcagagggccaca

SEQ ID NO: 129043 - DNA, 25 bp, probe
aggtatgcaccactgagcaggacca

SEQ ID NO: 129044 - DNA, 25 bp, probe
aggtgatgactggatgagctgctga

SEQ ID NO: 129045 - DNA, 25 bp, probe
aggagatgacatggagatctgtgca

SEQ ID NO: 129046 - DNA, 25 bp, probe
aggatatgatgtccgctctgatgtc

SEQ ID NO: 129047 - DNA, 25 bp, probe
aggatgagatgacctcactggctct

SEQ ID NO: 129048 - DNA, 25 bp, probe
agggagcatgagcctcatttcctct

SEQ ID NO: 129049 - DNA, 25 bp, probe
aggagatgctggcataacatactat

SEQ ID NO: 129050 - DNA, 25 bp, probe
aggatggctggtcagaaaccttccc

SEQ ID NO: 129051 - DNA, 25 bp, probe
agagagggattcgaaaacagtcctc

SEQ ID NO: 129052 - DNA, 25 bp, probe
aggagaggtgtggagcgaagatgtc

SEQ ID NO: 129053 - DNA, 25 bp, probe
aggagagcaggtgacacagtgagct

SEQ ID NO: 129054 - DNA, 25 bp, probe
aggaggaggtgccaacagtgttagg

SEQ ID NO: 129055 - DNA, 25 bp, probe
aggaggaggtgccaacagtgttagg

SEQ ID NO: 129056 - DNA, 25 bp, probe
aggaggagcagatcttcgtggtcat

SEQ ID NO: 129057 - DNA, 25 bp, probe
aggggaggacactggtggttctact

SEQ ID NO: 129058 - DNA, 25 bp, probe
aggggacgattctgtgttttctcca

SEQ ID NO: 129059 - DNA, 25 bp, probe
aggatggggtgtctgtgttatttgt

SEQ ID NO: 129060 - DNA, 25 bp, probe
aggaggagtgtttaatgatggattt

SEQ ID NO: 129061 - DNA, 25 bp, probe
aggagtagttgtttcagaggtgatt

SEQ ID NO: 129062 - DNA, 25 bp, probe
aggagtagttgtttcagaggtgatt

SEQ ID NO: 129063 - DNA, 25 bp, probe
aggaggagttacgtagagagggtgg

SEQ ID NO: 129064 - DNA, 25 bp, probe
aggatggagttcgtgtccgaggtgc

SEQ ID NO: 129065 - DNA, 25 bp, probe
aggaggtgtctcaggctgcctgagt

SEQ ID NO: 129066 - DNA, 25 bp, probe
aggaggtgtctcaggctgcctgagt

SEQ ID NO: 129067 - DNA, 25 bp, probe
aggaggagagccaggggcggtcagc

SEQ ID NO: 129068 - DNA, 25 bp, probe
aggagggggaggacggagttcagag

SEQ ID NO: 129069 - DNA, 25 bp, probe
cacggcgtgggaggggtagtcgaag

SEQ ID NO: 129070 - DNA, 25 bp, probe
agggagtgggaggggtctgtctcca

SEQ ID NO: 129071 - DNA, 25 bp, probe
aggatggaggggtggtcctgactca

SEQ ID NO: 129072 - DNA, 25 bp, probe
aggggagtgggtgaccctgacactt

SEQ ID NO: 129073 - DNA, 25 bp, probe
cagggggaaggtgtccctgacttag

SEQ ID NO: 129074 - DNA, 25 bp, probe
aggggagtatggagtacagctgtct

SEQ ID NO: 129075 - DNA, 25 bp, probe
aggggagcatgggaagtgacggttt

SEQ ID NO: 129076 - DNA, 25 bp, probe
aggtgtggctgtgaggtcagggttt

SEQ ID NO: 129077 - DNA, 25 bp, probe
aggtcttctcatatggacgggctcc

SEQ ID NO: 129078 - DNA, 25 bp, probe
aggtcttctcatatggacgggctcc

SEQ ID NO: 129079 - DNA, 25 bp, probe
aggttcttctcaagggtgcgagctc

SEQ ID NO: 129080 - DNA, 25 bp, probe
aggtcactgttaagggcttctgctg

SEQ ID NO: 129081 - DNA, 25 bp, probe
aggtgccgccattggcggttctgct

SEQ ID NO: 129082 - DNA, 25 bp, probe
aggtgtccagtacgctggttttagt

SEQ ID NO: 129083 - DNA, 25 bp, probe
aggtgcccatggagcgcgtgtttga

SEQ ID NO: 129084 - DNA, 25 bp, probe
agtggcttcaagagtccttactgaa

SEQ ID NO: 129085 - DNA, 25 bp, probe
agtggcttcaagagtccttactgaa

SEQ ID NO: 129086 - DNA, 25 bp, probe
aggtgtacagctgtgaccttacgac

SEQ ID NO: 129087 - DNA, 25 bp, probe
aggtgtccactttgatttccagacc

SEQ ID NO: 129088 - DNA, 25 bp, probe
aggtgtcaacaattgatcttctgag

SEQ ID NO: 129089 - DNA, 25 bp, probe
aggtggaccaacaatttcagagagt

SEQ ID NO: 129090 - DNA, 25 bp, probe
agggaactgaacattccagagcgtg

SEQ ID NO: 129091 - DNA, 25 bp, probe
agggaactgtgacatttcaagctct

SEQ ID NO: 129092 - DNA, 25 bp, probe
agggtgacttctctaccaagtctga

SEQ ID NO: 129093 - DNA, 25 bp, probe
aggaggtgatttcctcacctttctg

SEQ ID NO: 129094 - DNA, 25 bp, probe
agggagtgcttatttccctttgtgt

SEQ ID NO: 129095 - DNA, 25 bp, probe
aggtaggcacttttccttgttgata

SEQ ID NO: 129096 - DNA, 25 bp, probe
aggtggagcagcgtttcctagttct

SEQ ID NO: 129097 - DNA, 25 bp, probe
agggaacctgtttcactatggcctc

SEQ ID NO: 129098 - DNA, 25 bp, probe
agggaacctgtttcactatggcctc

SEQ ID NO: 129099 - DNA, 25 bp, probe
agggaagccttttggctataaccag

SEQ ID NO: 129100 - DNA, 25 bp, probe
agggaaggagtcaacagtgtaacta

SEQ ID NO: 129101 - DNA, 25 bp, probe
agggaaggagtcaacagtgtaacta

SEQ ID NO: 129102 - DNA, 25 bp, probe
aggtgaactggtctcactggaacca

SEQ ID NO: 129103 - DNA, 25 bp, probe
agggcacaattttttctggaatctc

SEQ ID NO: 129104 - DNA, 25 bp, probe
aggtgaagatatattcctccaattc

SEQ ID NO: 129105 - DNA, 25 bp, probe
aggtgaagatatattcctccaattc

SEQ ID NO: 129106 - DNA, 25 bp, probe
aggtaagatgttaatctcccagccc

SEQ ID NO: 129107 - DNA, 25 bp, probe
agggcaaggattctctgtacgccca

SEQ ID NO: 129108 - DNA, 25 bp, probe
agggcctgagttagactatttccca

SEQ ID NO: 129109 - DNA, 25 bp, probe
agggcctgatggggaacctaccatc

SEQ ID NO: 129110 - DNA, 25 bp, probe
aggtgcctatggagaagttcaactt

SEQ ID NO: 129111 - DNA, 25 bp, probe
aggtggcacaggggcctgttcaacc

SEQ ID NO: 129112 - DNA, 25 bp, probe
aggtgagaagctggccttgtatcaa

SEQ ID NO: 129113 - DNA, 25 bp, probe
aggtgaacagcaagcaacgctatgc

SEQ ID NO: 129114 - DNA, 25 bp, probe
aggtgaacagcaagcaacgctatgc

SEQ ID NO: 129115 - DNA, 25 bp, probe
aggtggtcatcaagcacaaccggtt

SEQ ID NO: 129116 - DNA, 25 bp, probe
aggatgccctgaagaaactgatgag

SEQ ID NO: 129117 - DNA, 25 bp, probe
aggatgacgctgatgtggagtggaa

SEQ ID NO: 129118 - DNA, 25 bp, probe
aggtagtgctgcttctgaagttatc

SEQ ID NO: 129119 - DNA, 25 bp, probe
aggtatggctgctgtttgattatgc

SEQ ID NO: 129120 - DNA, 25 bp, probe
aggtatggctgctgtttgattatgc

SEQ ID NO: 129121 - DNA, 25 bp, probe
aggtatcatgtctgctttctaagtg

SEQ ID NO: 129122 - DNA, 25 bp, probe
aggtatcatgtctgctttctaagtg

SEQ ID NO: 129123 - DNA, 25 bp, probe
aggttattcagacctattctgcctg

SEQ ID NO: 129124 - DNA, 25 bp, probe
aggtcgactcggccgagtatggctg

SEQ ID NO: 129125 - DNA, 25 bp, probe
aggtccatcctgacctggtatggtc

SEQ ID NO: 129126 - DNA, 25 bp, probe
aggtcttcctatctggaatgactag

SEQ ID NO: 129127 - DNA, 25 bp, probe
aggtcttccgatcagtggtgtctgt

SEQ ID NO: 129128 - DNA, 25 bp, probe
aggtcatcgagaacgcgggggagtt

SEQ ID NO: 129129 - DNA, 25 bp, probe
aggtctggaaatcaagtgggagatc

SEQ ID NO: 129130 - DNA, 25 bp, probe
aggttggtcaattaccgtggcacac

SEQ ID NO: 129131 - DNA, 25 bp, probe
aggttggtcaattaccgtggcacac

SEQ ID NO: 129132 - DNA, 25 bp, probe
aggtgggtcaactccaaggcaaatg

SEQ ID NO: 129133 - DNA, 25 bp, probe
agggtggataccccacaagtagaat

SEQ ID NO: 129134 - DNA, 25 bp, probe
agggctgggcctgaccaaaaatata

SEQ ID NO: 129135 - DNA, 25 bp, probe
agtcccagagcctcctaaaattcta

SEQ ID NO: 129136 - DNA, 25 bp, probe
agggccaagcctctgttaaagtcat

SEQ ID NO: 129137 - DNA, 25 bp, probe
aggtccaagacacttattcatacat

SEQ ID NO: 129138 - DNA, 25 bp, probe
agggaatccacacttaatataattc

SEQ ID NO: 129139 - DNA, 25 bp, probe
aggtgattgccacatgtcacttatt

SEQ ID NO: 129140 - DNA, 25 bp, probe
agggatgtgatccggcatccttgag

SEQ ID NO: 129141 - DNA, 25 bp, probe
aggggctgattgcaatactggacgt

SEQ ID NO: 129142 - DNA, 25 bp, probe
aggggcgatatcctctgacgtatca

SEQ ID NO: 129143 - DNA, 25 bp, probe
aggagtggatcctggagcagctcac

SEQ ID NO: 129144 - DNA, 25 bp, probe
aggagtcgtgcatcgcgtgatatcc

SEQ ID NO: 129145 - DNA, 25 bp, probe
aggtgtcgcagatgcagctatgctc

SEQ ID NO: 129146 - DNA, 25 bp, probe
agtgacttgctgtggcaatgccaca

SEQ ID NO: 129147 - DNA, 25 bp, probe
agtgacttgctgtggcaatgccaca

SEQ ID NO: 129148 - DNA, 25 bp, probe
aggtcttcgttggcaatttcagtca

SEQ ID NO: 129149 - DNA, 25 bp, probe
aggtcttcgttggcaatttcagtca

SEQ ID NO: 129150 - DNA, 25 bp, probe
aggtcctcagatgggaattgcacag

SEQ ID NO: 129151 - DNA, 25 bp, probe
aggtcactcagaaaaatggcacagc

SEQ ID NO: 129152 - DNA, 25 bp, probe
aggatgcactcaacacggtgtgaat

SEQ ID NO: 129153 - DNA, 25 bp, probe
aggatgacttgaacgcaggaggctg

SEQ ID NO: 129154 - DNA, 25 bp, probe
aggaggcatagaacacaggcgggtg

SEQ ID NO: 129155 - DNA, 25 bp, probe
aggaggcatagaacacaggcgggtg

SEQ ID NO: 129156 - DNA, 25 bp, probe
aggaggcaagtaggggcagctgggt

SEQ ID NO: 129157 - DNA, 25 bp, probe
aggaggagagctatgtacagggaga

SEQ ID NO: 129158 - DNA, 25 bp, probe
aggagtgaagtaattgacagggaaa

SEQ ID NO: 129159 - DNA, 25 bp, probe
aggagtgaagtaattgacagggaaa

SEQ ID NO: 129160 - DNA, 25 bp, probe
aggaggtactaaatgcaatagagca

SEQ ID NO: 129161 - DNA, 25 bp, probe
aggaggtgcctgaaagctgggagcg

SEQ ID NO: 129162 - DNA, 25 bp, probe
aggaggcagcctgcgattgtgacag

SEQ ID NO: 129163 - DNA, 25 bp, probe
aggatggcatcaccgttgtggactg

SEQ ID NO: 129164 - DNA, 25 bp, probe
aggattgcttcaagtctctggacac

SEQ ID NO: 129165 - DNA, 25 bp, probe
aggatggtcttgatctcctgacatc

SEQ ID NO: 129166 - DNA, 25 bp, probe
aggatggactaaatgatctctgaaa

SEQ ID NO: 129167 - DNA, 25 bp, probe
aggggacataaaccacgagagtgac

SEQ ID NO: 129168 - DNA, 25 bp, probe
aggggacataaaccacgagagtgac

SEQ ID NO: 129169 - DNA, 25 bp, probe
aggtttgataaacaccagaacagaa

SEQ ID NO: 129170 - DNA, 25 bp, probe
aggatgagggaagggaccagaagcc

SEQ ID NO: 129171 - DNA, 25 bp, probe
aggagggagaaatggccaccacatc

SEQ ID NO: 129172 - DNA, 25 bp, probe
aggagggagaaatggccaccacatc

SEQ ID NO: 129173 - DNA, 25 bp, probe
aggaggaggaagtatgtgaccccaa

SEQ ID NO: 129174 - DNA, 25 bp, probe
aggatgggttcagttgtgaccccgg

SEQ ID NO: 129175 - DNA, 25 bp, probe
aggtctggtacagcaatgggccggg

SEQ ID NO: 129176 - DNA, 25 bp, probe
aggtctggtacagcaatgggccggg

SEQ ID NO: 129177 - DNA, 25 bp, probe
aggtctgagtaacatcattggcatc

SEQ ID NO: 129178 - DNA, 25 bp, probe
aggtctgagtaacatcattggcatc

SEQ ID NO: 129179 - DNA, 25 bp, probe
aggatgctggtgctggacagtgacc

SEQ ID NO: 129180 - DNA, 25 bp, probe
aggatgctggtgctggacagtgacc

SEQ ID NO: 129181 - DNA, 25 bp, probe
aggaggcagtgggatggaggagcgc

SEQ ID NO: 129182 - DNA, 25 bp, probe
aggatggcatctcagtcaagggcgc

SEQ ID NO: 129183 - DNA, 25 bp, probe
aggatggcatctcagtcaagggcgc

SEQ ID NO: 129184 - DNA, 25 bp, probe
aggggccgaaggtcaggactcatct

SEQ ID NO: 129185 - DNA, 25 bp, probe
aggggccgaaggtcaggactcatct

SEQ ID NO: 129186 - DNA, 25 bp, probe
aggtcctctgaagacaagacttcta

SEQ ID NO: 129187 - DNA, 25 bp, probe
aggtcccataaatcaacagcaatct

SEQ ID NO: 129188 - DNA, 25 bp, probe
aggggccattcaaccaaagcagaca

SEQ ID NO: 129189 - DNA, 25 bp, probe
aggttgacagtcatccacaaggcat

SEQ ID NO: 129190 - DNA, 25 bp, probe
aggttgacagtcatccacaaggcat

SEQ ID NO: 129191 - DNA, 25 bp, probe
aggttgcactggactgcaagcacag

SEQ ID NO: 129192 - DNA, 25 bp, probe
aggatggtatggactgcatggacaa

SEQ ID NO: 129193 - DNA, 25 bp, probe
aggatgagtgggccattgagaagaa

SEQ ID NO: 129194 - DNA, 25 bp, probe
aggtggctagtggcatttgataata

SEQ ID NO: 129195 - DNA, 25 bp, probe
aggtcgctggatgctgatctaatca

SEQ ID NO: 129196 - DNA, 25 bp, probe
aggatcagccgggtgcaatgactca

SEQ ID NO: 129197 - DNA, 25 bp, probe
aggtagggctgcagcactgatgccc

SEQ ID NO: 129198 - DNA, 25 bp, probe
aggatggggctcagaatgcagacct

SEQ ID NO: 129199 - DNA, 25 bp, probe
aggatgggcccaacattgacaacat

SEQ ID NO: 129200 - DNA, 25 bp, probe
aggaggagcccaagtacagcatcca

SEQ ID NO: 129201 - DNA, 25 bp, probe
aggaggaggtcttcgacagcatcgt

SEQ ID NO: 129202 - DNA, 25 bp, probe
aggggtggtttatctgcatggtatt

SEQ ID NO: 129203 - DNA, 25 bp, probe
agggcggtgggattaagctgcctat

SEQ ID NO: 129204 - DNA, 25 bp, probe
agggcagaggggaggaggtcgtctg

SEQ ID NO: 129205 - DNA, 25 bp, probe
aggatgggcgggaggggatctgtgt

SEQ ID NO: 129206 - DNA, 25 bp, probe
aggtctacgtgggggacgagcgtgt

SEQ ID NO: 129207 - DNA, 25 bp, probe
aggtctacgtgggggacgagcgtgt

SEQ ID NO: 129208 - DNA, 25 bp, probe
aggatgctatccagagggacccatg

SEQ ID NO: 129209 - DNA, 25 bp, probe
aggatgtgaacaaggtcgcctactg

SEQ ID NO: 129210 - DNA, 25 bp, probe
aggtggcacactgggtgcccaagct

SEQ ID NO: 129211 - DNA, 25 bp, probe
aggtagccctgggcatggagcacct

SEQ ID NO: 129212 - DNA, 25 bp, probe
aggtgccccttggcatgaacaacct

SEQ ID NO: 129213 - DNA, 25 bp, probe
agtggcccgagtgcgaaagtccaag

SEQ ID NO: 129214 - DNA, 25 bp, probe
agggcccaggtgagctgaagacaaa

SEQ ID NO: 129215 - DNA, 25 bp, probe
agcgggtagggcacagggaagaggg

SEQ ID NO: 129216 - DNA, 25 bp, probe
aggggaactgcctcagtgagaacgg

SEQ ID NO: 129217 - DNA, 25 bp, probe
aggggaactgcctcagtgagaacgg

SEQ ID NO: 129218 - DNA, 25 bp, probe
aggaggaaagccacccagatactgc

SEQ ID NO: 129219 - DNA, 25 bp, probe
aggaggaaagccacccagatactgc

SEQ ID NO: 129220 - DNA, 25 bp, probe
aggaggaagatgacaaccccgactg

SEQ ID NO: 129221 - DNA, 25 bp, probe
aggtggcagaggccaacccaaagat

SEQ ID NO: 129222 - DNA, 25 bp, probe
agggggtgatgtgccccacaagaca

SEQ ID NO: 129223 - DNA, 25 bp, probe
aggaggctgaatgagccctgcagaa

SEQ ID NO: 129224 - DNA, 25 bp, probe
aggatgaggatacagcctgtgtgac

SEQ ID NO: 129225 - DNA, 25 bp, probe
aggatgatttcactaggcatttggc

SEQ ID NO: 129226 - DNA, 25 bp, probe
aggatgattcaacaggttttcctga

SEQ ID NO: 129227 - DNA, 25 bp, probe
aggtttcaacttggtcattgtgccc

SEQ ID NO: 129228 - DNA, 25 bp, probe
agtgttcaaagcaggcccgagccgc

SEQ ID NO: 129229 - DNA, 25 bp, probe
agtgttcaaagcaggcccgagccgc

SEQ ID NO: 129230 - DNA, 25 bp, probe
aggtggtacgcaagaccaccagccc

SEQ ID NO: 129231 - DNA, 25 bp, probe
aggtggtacgcaagaccaccagccc

SEQ ID NO: 129232 - DNA, 25 bp, probe
aggttggacagcctggaacagcagc

SEQ ID NO: 129233 - DNA, 25 bp, probe
aggttggacagcctggaacagcagc

SEQ ID NO: 129234 - DNA, 25 bp, probe
aggatgtggagaccgaggcccatct

SEQ ID NO: 129235 - DNA, 25 bp, probe
aggtgatagaagtcgggccctgaaa

SEQ ID NO: 129236 - DNA, 25 bp, probe
aggggtggcaagtggcctcagagaa

SEQ ID NO: 129237 - DNA, 25 bp, probe
aggggtgacaagtggtcaaggagct

SEQ ID NO: 129238 - DNA, 25 bp, probe
agggggtccatgtggaccaggcgcc

SEQ ID NO: 129239 - DNA, 25 bp, probe
aggaggcgtccgagagtgctcggca

SEQ ID NO: 129240 - DNA, 25 bp, probe
aggaggcgatcaggagggagctagc

SEQ ID NO: 129241 - DNA, 25 bp, probe
aggatgagctgtgtagggagatatt

SEQ ID NO: 129242 - DNA, 25 bp, probe
aggatgttgggctaagggctgtgag

SEQ ID NO: 129243 - DNA, 25 bp, probe
aggatgttgggctaagggctgtgag

SEQ ID NO: 129244 - DNA, 25 bp, probe
aggttgatggcgagtggtgctgaag

SEQ ID NO: 129245 - DNA, 25 bp, probe
aggattatactgactgtggtggtgt

SEQ ID NO: 129246 - DNA, 25 bp, probe
aggtatgtgagctctatggtggtgg

SEQ ID NO: 129247 - DNA, 25 bp, probe
aggatagcatacacgctggtgggcc

SEQ ID NO: 129248 - DNA, 25 bp, probe
aggatagcagctgcaggtgggcggc

SEQ ID NO: 129249 - DNA, 25 bp, probe
aggattctgtggctgtagactgatc

SEQ ID NO: 129250 - DNA, 25 bp, probe
aggattctgtggctgtagactgatc

SEQ ID NO: 129251 - DNA, 25 bp, probe
aggatcactgttggctgctagggac

SEQ ID NO: 129252 - DNA, 25 bp, probe
aggatcactgttggctgctagggac

SEQ ID NO: 129253 - DNA, 25 bp, probe
aggtcaggtcttggtaggtgcctgc

SEQ ID NO: 129254 - DNA, 25 bp, probe
aggtgggtgcttgtagttccagcta

SEQ ID NO: 129255 - DNA, 25 bp, probe
agtggctggccttttaaatcgacgt

SEQ ID NO: 129256 - DNA, 25 bp, probe
agggcctgcacaggttaaccgtcag

SEQ ID NO: 129257 - DNA, 25 bp, probe
aggtttgccggctgaaccaggagat

SEQ ID NO: 129258 - DNA, 25 bp, probe
aggatgatcgcccgataaagacgga

SEQ ID NO: 129259 - DNA, 25 bp, probe
agggacggtttacggacgtgcagct

SEQ ID NO: 129260 - DNA, 25 bp, probe
agggatctagctcttcgagtggatc

SEQ ID NO: 129261 - DNA, 25 bp, probe
aggtgactcaggacttcatgatgta

SEQ ID NO: 129262 - DNA, 25 bp, probe
aggtgaatggcacctggctgcaggc

SEQ ID NO: 129263 - DNA, 25 bp, probe
agggaatggcatacatcgagcggaa

SEQ ID NO: 129264 - DNA, 25 bp, probe
aggtgaatgcaaactccatcgttga

SEQ ID NO: 129265 - DNA, 25 bp, probe
agggcaataccagcagcagccttag

SEQ ID NO: 129266 - DNA, 25 bp, probe
agggtagcaccaggcatagccactt

SEQ ID NO: 129267 - DNA, 25 bp, probe
aggtgtacaccacgcagagtgacgt

SEQ ID NO: 129268 - DNA, 25 bp, probe
aggttgctcaactgcaggtggagat

SEQ ID NO: 129269 - DNA, 25 bp, probe
aggttgccagagcacataacgaagt

SEQ ID NO: 129270 - DNA, 25 bp, probe
aggatgtccctgcactgatacagaa

SEQ ID NO: 129271 - DNA, 25 bp, probe
aggattgcctgcttagatgataaaa

SEQ ID NO: 129272 - DNA, 25 bp, probe
aggtgatcctggcagaagataagag

SEQ ID NO: 129273 - DNA, 25 bp, probe
aggatatgtcttctgaagatcaagg

SEQ ID NO: 129274 - DNA, 25 bp, probe
aggtcatgttggcagaactcaaggg

SEQ ID NO: 129275 - DNA, 25 bp, probe
aggtggttagctcaaccaatggaga

SEQ ID NO: 129276 - DNA, 25 bp, probe
agggtgttatgtcctgaaaataggt

SEQ ID NO: 129277 - DNA, 25 bp, probe
aggtgacttcttagtaaccagagtt

SEQ ID NO: 129278 - DNA, 25 bp, probe
aggtcacttttcacatccttgactt

SEQ ID NO: 129279 - DNA, 25 bp, probe
aggttcatgtctgcaaatccttcca

SEQ ID NO: 129280 - DNA, 25 bp, probe
aggatttgcactaatgttcctctcc

SEQ ID NO: 129281 - DNA, 25 bp, probe
aggatttgcactaatgttcctctcc

SEQ ID NO: 129282 - DNA, 25 bp, probe
aggttatgtctgatgtgaccctgcc

SEQ ID NO: 129283 - DNA, 25 bp, probe
aggatctttagcagtaccctagcct

SEQ ID NO: 129284 - DNA, 25 bp, probe
aggtctgtaactatggacttacctt

SEQ ID NO: 129285 - DNA, 25 bp, probe
aggtcttaaagaaggacgtcatcct

SEQ ID NO: 129286 - DNA, 25 bp, probe
aggtctctaagacaagactcttaat

SEQ ID NO: 129287 - DNA, 25 bp, probe
aggttttatgagacttcctattaat

SEQ ID NO: 129288 - DNA, 25 bp, probe
ctgtacttataaggtaactatttgt

SEQ ID NO: 129289 - DNA, 25 bp, probe
agggctaattacctaaccagcttgt

SEQ ID NO: 129290 - DNA, 25 bp, probe
agtgggcaatttgtcacctcacttg

SEQ ID NO: 129291 - DNA, 25 bp, probe
aggggcatgcacatgcccacgtcac

SEQ ID NO: 129292 - DNA, 25 bp, probe
agggtagacgtggccaagtcggtca

SEQ ID NO: 129293 - DNA, 25 bp, probe
agggctaaccgtgatagtccttgca

SEQ ID NO: 129294 - DNA, 25 bp, probe
aggtctgagaatgacgatacccgtg

SEQ ID NO: 129295 - DNA, 25 bp, probe
aggatctaggctgttgtaccaagca

SEQ ID NO: 129296 - DNA, 25 bp, probe
aggatctaggctgttgtaccaagca

SEQ ID NO: 129297 - DNA, 25 bp, probe
aggtctacgtgtttgcaacgctaga

SEQ ID NO: 129298 - DNA, 25 bp, probe
aggttgacgatggctctgaactctc

SEQ ID NO: 129299 - DNA, 25 bp, probe
aggttgacgatggctctgaactctc

SEQ ID NO: 129300 - DNA, 25 bp, probe
aggtgtgcactgtctatttacatcc

SEQ ID NO: 129301 - DNA, 25 bp, probe
aggggcaccagtttgtagtccctct

SEQ ID NO: 129302 - DNA, 25 bp, probe
agggtcacaaagtgttcttcctcat

SEQ ID NO: 129303 - DNA, 25 bp, probe
aggtataattgatggattcttccat

SEQ ID NO: 129304 - DNA, 25 bp, probe
aggtactaatggtgattatgctcca

SEQ ID NO: 129305 - DNA, 25 bp, probe
aggtcaccagatcctagtgtagttc

SEQ ID NO: 129306 - DNA, 25 bp, probe
aggatctccaagacggatggcgttt

SEQ ID NO: 129307 - DNA, 25 bp, probe
agagttcgaaggctttgagtatatc

SEQ ID NO: 129308 - DNA, 25 bp, probe
aggtgatcggatctgtttcatttat

SEQ ID NO: 129309 - DNA, 25 bp, probe
agggagcgagtgccttttattctta

SEQ ID NO: 129310 - DNA, 25 bp, probe
agggaccagaggatcctatcttctc

SEQ ID NO: 129311 - DNA, 25 bp, probe
agggaaaatgaagtcagcacacttt

SEQ ID NO: 129312 - DNA, 25 bp, probe
agggtatctagcgccagagatcctt

SEQ ID NO: 129313 - DNA, 25 bp, probe
agggcttactgctctgcaagccctc

SEQ ID NO: 129314 - DNA, 25 bp, probe
agggcttcactgaagtgctaccagt

SEQ ID NO: 129315 - DNA, 25 bp, probe
aggtcgtcaatgatgagtcctctct

SEQ ID NO: 129316 - DNA, 25 bp, probe
aggtcattcaaattttccctcttct

SEQ ID NO: 129317 - DNA, 25 bp, probe
agtgtattcaaattttatcagttta

SEQ ID NO: 129318 - DNA, 25 bp, probe
aggtcattaacaccacttcttttca

SEQ ID NO: 129319 - DNA, 25 bp, probe
aggttgaaacatatctcttatctta

SEQ ID NO: 129320 - DNA, 25 bp, probe
aggtgaagattcttttcttaggtat

SEQ ID NO: 129321 - DNA, 25 bp, probe
aggtgagaatattttgtgggcaggt

SEQ ID NO: 129322 - DNA, 25 bp, probe
aggtgagaatattttgtgggcaggt

SEQ ID NO: 129323 - DNA, 25 bp, probe
aggtcaagaaggcctatgtggaggc

SEQ ID NO: 129324 - DNA, 25 bp, probe
aggtagagtagctctttgtacataa

SEQ ID NO: 129325 - DNA, 25 bp, probe
aggttgtgtagctgtgtcatgtata

SEQ ID NO: 129326 - DNA, 25 bp, probe
aggttggtttcagtgttgtacagtg

SEQ ID NO: 129327 - DNA, 25 bp, probe
aggtgtggaatttctgtctcccaag

SEQ ID NO: 129328 - DNA, 25 bp, probe
agggtgggaatgtccactggaaaga

SEQ ID NO: 129329 - DNA, 25 bp, probe
agggggtcgagtccagtgagaaact

SEQ ID NO: 129330 - DNA, 25 bp, probe
aggggaccgaattaaggaatggctg

SEQ ID NO: 129331 - DNA, 25 bp, probe
agggaaccgaagccaagtgataaag

SEQ ID NO: 129332 - DNA, 25 bp, probe
agggccaaagaggtatagtatacaa

SEQ ID NO: 129333 - DNA, 25 bp, probe
agtgactaccgggtacagaccacca

SEQ ID NO: 129334 - DNA, 25 bp, probe
aggtgtacaaggggatcgacaacca

SEQ ID NO: 129335 - DNA, 25 bp, probe
agggtgatttggggatgcttaagaa

SEQ ID NO: 129336 - DNA, 25 bp, probe
aggggaattggtgattacagtagca

SEQ ID NO: 129337 - DNA, 25 bp, probe
agggggaggatggtaatcacagcat

SEQ ID NO: 129338 - DNA, 25 bp, probe
agggggaggatagagcccatcccag

SEQ ID NO: 129339 - DNA, 25 bp, probe
agggaggcagacttacctccctcaa

SEQ ID NO: 129340 - DNA, 25 bp, probe
agggaggcagacttacctccctcaa

SEQ ID NO: 129341 - DNA, 25 bp, probe
agggaggcagacttacctccctcaa

SEQ ID NO: 129342 - DNA, 25 bp, probe
agggaggcagacttacctccctcaa

SEQ ID NO: 129343 - DNA, 25 bp, probe
aggtgggaacatggtcacccccact

SEQ ID NO: 129344 - DNA, 25 bp, probe
aggtgaatggacagccagccaccac

SEQ ID NO: 129345 - DNA, 25 bp, probe
aggtgtggatggggtactacaacgg

SEQ ID NO: 129346 - DNA, 25 bp, probe
aggtggtcggcaatggaacctacgg

SEQ ID NO: 129347 - DNA, 25 bp, probe
aggtggttatattggcaacctattc

SEQ ID NO: 129348 - DNA, 25 bp, probe
aggtgctttacatgtaactcattta

SEQ ID NO: 129349 - DNA, 25 bp, probe
aggtcattaagatgttgatcacaca

SEQ ID NO: 129350 - DNA, 25 bp, probe
aggtcttccagatgtgtaatacatt

SEQ ID NO: 129351 - DNA, 25 bp, probe
aggattgtcctgttactaatgtgca

SEQ ID NO: 129352 - DNA, 25 bp, probe
aggtcatgttctttcagcttatggc

SEQ ID NO: 129353 - DNA, 25 bp, probe
aggtcagcttccatggtagtgtcca

SEQ ID NO: 129354 - DNA, 25 bp, probe
aggtgagccctcatagggagatcca

SEQ ID NO: 129355 - DNA, 25 bp, probe
aggtggcctgccaggagtgtcacct

SEQ ID NO: 129356 - DNA, 25 bp, probe
aggtcgctgcggggatggtgtacct

SEQ ID NO: 129357 - DNA, 25 bp, probe
aggtcaggggctaggtgttgaactt

SEQ ID NO: 129358 - DNA, 25 bp, probe
aggtagagggcgagttggaggagct

SEQ ID NO: 129359 - DNA, 25 bp, probe
agggaagagggtcttggtgacctgg

SEQ ID NO: 129360 - DNA, 25 bp, probe
agggtcagtggacttttgtgggcct

SEQ ID NO: 129361 - DNA, 25 bp, probe
aggttctggaggcccatttgggaga

SEQ ID NO: 129362 - DNA, 25 bp, probe
aggtttggcatgtcctgttttgata

SEQ ID NO: 129363 - DNA, 25 bp, probe
aggtaagtggcagctgctctattta

SEQ ID NO: 129364 - DNA, 25 bp, probe
aggtaactgggccagcagcctttac

SEQ ID NO: 129365 - DNA, 25 bp, probe
aggtcagcattgaggtcacctgctt

SEQ ID NO: 129366 - DNA, 25 bp, probe
aggttgcatggcatggtccttgtga

SEQ ID NO: 129367 - DNA, 25 bp, probe
aggttcatgctcatattcattatgg

SEQ ID NO: 129368 - DNA, 25 bp, probe
aggtttgcgcctgtcaagtgcgagc

SEQ ID NO: 129369 - DNA, 25 bp, probe
agggttatcaatgccaagtgtgcac

SEQ ID NO: 129370 - DNA, 25 bp, probe
agggtttgtagggacatgatcagca

SEQ ID NO: 129371 - DNA, 25 bp, probe
agggttttagagagcagtggcagag

SEQ ID NO: 129372 - DNA, 25 bp, probe
agggctttattgtactactgtgaag

SEQ ID NO: 129373 - DNA, 25 bp, probe
aggttcttcctgtacatacgtgtat

SEQ ID NO: 129374 - DNA, 25 bp, probe
aggttttctgtgtgctgcacggtgc

SEQ ID NO: 129375 - DNA, 25 bp, probe
aggttcattttgttggcctgtgatg

SEQ ID NO: 129376 - DNA, 25 bp, probe
agggacgttctgtgggcagtagccc

SEQ ID NO: 129377 - DNA, 25 bp, probe
agggacagtctccagggtcagtccc

SEQ ID NO: 129378 - DNA, 25 bp, probe
agagggaattcacaggaccccctga

SEQ ID NO: 129379 - DNA, 25 bp, probe
aggggaaacatcaggcattctccac

SEQ ID NO: 129380 - DNA, 25 bp, probe
aggggaaacgagtggtctgctctgc

SEQ ID NO: 129381 - DNA, 25 bp, probe
agggagcactcaggagggttccttg

SEQ ID NO: 129382 - DNA, 25 bp, probe
aatggaccctgtggggtatagccgg

SEQ ID NO: 129383 - DNA, 25 bp, probe
agggagagcggcgagggtaagggcg

SEQ ID NO: 129384 - DNA, 25 bp, probe
aggggaagactggtggtacatggga

SEQ ID NO: 129385 - DNA, 25 bp, probe
agggtttccatggggtaggaggatg

SEQ ID NO: 129386 - DNA, 25 bp, probe
agggtctgtccagatcacaaggggc

SEQ ID NO: 129387 - DNA, 25 bp, probe
agggtctgtccagatcacaaggggc

SEQ ID NO: 129388 - DNA, 25 bp, probe
agggacatgtaacaagcacaccggc

SEQ ID NO: 129389 - DNA, 25 bp, probe
agggacagggagccatcattcctgc

SEQ ID NO: 129390 - DNA, 25 bp, probe
aggtgcagctgcaacagtacttcct

SEQ ID NO: 129391 - DNA, 25 bp, probe
aggtgcagctgcaacagtacttcct

SEQ ID NO: 129392 - DNA, 25 bp, probe
aggtcacgtgcggttcattgactat

SEQ ID NO: 129393 - DNA, 25 bp, probe
aggtgctcggtggagtcatggcatt

SEQ ID NO: 129394 - DNA, 25 bp, probe
aggtcgcagtgttcagtgctggagc

SEQ ID NO: 129395 - DNA, 25 bp, probe
aggtctgagtcctagagattacata

SEQ ID NO: 129396 - DNA, 25 bp, probe
aggtctgagtcctagagattacata

SEQ ID NO: 129397 - DNA, 25 bp, probe
aggttattcacatggagctggatca

SEQ ID NO: 129398 - DNA, 25 bp, probe
aggttatgtagattccaaggatgca

SEQ ID NO: 129399 - DNA, 25 bp, probe
aggttaggagactgatagcatgtga

SEQ ID NO: 129400 - DNA, 25 bp, probe
aggttctgatgacctagtgaatgaa

SEQ ID NO: 129401 - DNA, 25 bp, probe
aggtcctgtgcaaatagtgtcaaaa

SEQ ID NO: 129402 - DNA, 25 bp, probe
aggtcacaggcatccatgtgtgcaa

SEQ ID NO: 129403 - DNA, 25 bp, probe
aggtcacaggcatccatgtgtgcaa

SEQ ID NO: 129404 - DNA, 25 bp, probe
agggccaactcattcgtgggaacag

SEQ ID NO: 129405 - DNA, 25 bp, probe
aggggcaactgagtctgcgggagaa

SEQ ID NO: 129406 - DNA, 25 bp, probe
agggggactgctccaacaggaaaga

SEQ ID NO: 129407 - DNA, 25 bp, probe
aggggaatgctcagaaaggaaataa

SEQ ID NO: 129408 - DNA, 25 bp, probe
agggtgcaaggaagaggcttaagta

SEQ ID NO: 129409 - DNA, 25 bp, probe
agggacaatggaaaggctgttatat

SEQ ID NO: 129410 - DNA, 25 bp, probe
aggtatccttcagagtggattggat

SEQ ID NO: 129411 - DNA, 25 bp, probe
aggtatcctaactatgttggaggta

SEQ ID NO: 129412 - DNA, 25 bp, probe
agggacctagtctcagggatggagc

SEQ ID NO: 129413 - DNA, 25 bp, probe
agggaccggtgctgcaggagtgtcc

SEQ ID NO: 129414 - DNA, 25 bp, probe
agggtcccagattacgtatgttaca

SEQ ID NO: 129415 - DNA, 25 bp, probe
aggtgctctccagtaactaactaac

SEQ ID NO: 129416 - DNA, 25 bp, probe
agggcttacctgtacactgacttga

SEQ ID NO: 129417 - DNA, 25 bp, probe
agtggtggacctgacctgccgtcta

SEQ ID NO: 129418 - DNA, 25 bp, probe
aggtgagcgaaagaactcaggactt

SEQ ID NO: 129419 - DNA, 25 bp, probe
agggaacagcaggttaccaggactg

SEQ ID NO: 129420 - DNA, 25 bp, probe
aggtgacccaggagatcacagatga

SEQ ID NO: 129421 - DNA, 25 bp, probe
aggtgacccaaatcacagagtgcct

SEQ ID NO: 129422 - DNA, 25 bp, probe
aggtttacgcaatagcgacgcgctg

SEQ ID NO: 129423 - DNA, 25 bp, probe
aggttttgagtatatcaatcctctt

SEQ ID NO: 129424 - DNA, 25 bp, probe
aggttttagcaaaatgcacactttt

SEQ ID NO: 129425 - DNA, 25 bp, probe
aggttttagcaaaatgcacactttt

SEQ ID NO: 129426 - DNA, 25 bp, probe
aggtatttcagctcccaagtttagt

SEQ ID NO: 129427 - DNA, 25 bp, probe
aggtttgtaatcactgtagcttcag

SEQ ID NO: 129428 - DNA, 25 bp, probe
aggtctttaatagtgttgagtggca

SEQ ID NO: 129429 - DNA, 25 bp, probe
aggtctcattatatattgggtgcta

SEQ ID NO: 129430 - DNA, 25 bp, probe
aggtctcattatatattgggtgcta

SEQ ID NO: 129431 - DNA, 25 bp, probe
aggtcctgccatttattgggcagat

SEQ ID NO: 129432 - DNA, 25 bp, probe
aggtgccatgtaaggcttggtgcca

SEQ ID NO: 129433 - DNA, 25 bp, probe
aggtccatgcacaggtgtagcatgt

SEQ ID NO: 129434 - DNA, 25 bp, probe
aggtccagcagctacatttacacat

SEQ ID NO: 129435 - DNA, 25 bp, probe
aggtgatcagcaggactgtctccag

SEQ ID NO: 129436 - DNA, 25 bp, probe
aggtgatcagcaggactgtctccag

SEQ ID NO: 129437 - DNA, 25 bp, probe
aggtgtattgaagtcctccagacaa

SEQ ID NO: 129438 - DNA, 25 bp, probe
agggatcagtagttcctacccatag

SEQ ID NO: 129439 - DNA, 25 bp, probe
agggatggtgaaaccgaagctcgac

SEQ ID NO: 129440 - DNA, 25 bp, probe
aggtgggtggatcacgaggtcggga

SEQ ID NO: 129441 - DNA, 25 bp, probe
aggtggaaggatcacttgaggccag

SEQ ID NO: 129442 - DNA, 25 bp, probe
aggggacaggtacctggtgtgccag

SEQ ID NO: 129443 - DNA, 25 bp, probe
aggggacaggtacctggtgtgccag

SEQ ID NO: 129444 - DNA, 25 bp, probe
aggggttggtatctcaggtctgaat

SEQ ID NO: 129445 - DNA, 25 bp, probe
aggtcgtttgtttttgttctgagct

SEQ ID NO: 129446 - DNA, 25 bp, probe
aggggtttgtgttgctagttaagct

SEQ ID NO: 129447 - DNA, 25 bp, probe
aggggctttggaagctctgttgcag

SEQ ID NO: 129448 - DNA, 25 bp, probe
agggactttggaattctgcttctct

SEQ ID NO: 129449 - DNA, 25 bp, probe
agggactgttggcatgcagtgccct

SEQ ID NO: 129450 - DNA, 25 bp, probe
aggtagctttggcagcagggctgat

SEQ ID NO: 129451 - DNA, 25 bp, probe
agggtgatttgtcactgggctgtcc

SEQ ID NO: 129452 - DNA, 25 bp, probe
agtgagtgcagttgattcactgggt

SEQ ID NO: 129453 - DNA, 25 bp, probe
agtccagattagatcactgggtgct

SEQ ID NO: 129454 - DNA, 25 bp, probe
agttagagtaggttgctatggtttt

SEQ ID NO: 129455 - DNA, 25 bp, probe
agggggatatggtgcatttcttgtc

SEQ ID NO: 129456 - DNA, 25 bp, probe
agggttcttagctagcagtttttct

SEQ ID NO: 129457 - DNA, 25 bp, probe
agggtgccttctgaatactgttatt

SEQ ID NO: 129458 - DNA, 25 bp, probe
agggctgctgcaattgtaataggtt

SEQ ID NO: 129459 - DNA, 25 bp, probe
aggtgctggcacttattgcaattta

SEQ ID NO: 129460 - DNA, 25 bp, probe
aggtgcggcatccaattcaaatatt

SEQ ID NO: 129461 - DNA, 25 bp, probe
agggtatgctgcctctgtaaattca

SEQ ID NO: 129462 - DNA, 25 bp, probe
aggtgccatgtgctgtattaagtgc

SEQ ID NO: 129463 - DNA, 25 bp, probe
aggtgccatgtgctgtattaagtgc

SEQ ID NO: 129464 - DNA, 25 bp, probe
agggctgtgagcttatgttacaggc

SEQ ID NO: 129465 - DNA, 25 bp, probe
agggctgcaagtggaattcatcaac

SEQ ID NO: 129466 - DNA, 25 bp, probe
agggtgctgagctgtatggtccagc

SEQ ID NO: 129467 - DNA, 25 bp, probe
agggtgctgagctgtatggtccagc

SEQ ID NO: 129468 - DNA, 25 bp, probe
agggcatcgtatcctatggacggtc

SEQ ID NO: 129469 - DNA, 25 bp, probe
agggcatcgtatcctatggacggtc

SEQ ID NO: 129470 - DNA, 25 bp, probe
agtggacttcatcaagagtcatgga

SEQ ID NO: 129471 - DNA, 25 bp, probe
agtggacttcatcaagagtcatgga

SEQ ID NO: 129472 - DNA, 25 bp, probe
agggagtgtcacctcaaatgcaata

SEQ ID NO: 129473 - DNA, 25 bp, probe
aggtggtggactcgacaacgtcatc

SEQ ID NO: 129474 - DNA, 25 bp, probe
agggcaggtagctgatgctaagttg

SEQ ID NO: 129475 - DNA, 25 bp, probe
aggggagtctgcttgtcttagatgt

SEQ ID NO: 129476 - DNA, 25 bp, probe
aggggattgtgacttgcctgaattc

SEQ ID NO: 129477 - DNA, 25 bp, probe
aggtgctgattttgcctctaaattt

SEQ ID NO: 129478 - DNA, 25 bp, probe
agggtgctcttatttctacagttac

SEQ ID NO: 129479 - DNA, 25 bp, probe
aggggattgtgttttgtcactctag

SEQ ID NO: 129480 - DNA, 25 bp, probe
agggtgaatgtgatattgttcccac

SEQ ID NO: 129481 - DNA, 25 bp, probe
aggtccaagtgtactgttggccgca

SEQ ID NO: 129482 - DNA, 25 bp, probe
aggtgccaacagtgttaggcctggc

SEQ ID NO: 129483 - DNA, 25 bp, probe
agggggaatgctgtcgggactgagc

SEQ ID NO: 129484 - DNA, 25 bp, probe
aggggggatgctgcttagctgatcc

SEQ ID NO: 129485 - DNA, 25 bp, probe
aggggggatgctgcttagctgatcc

SEQ ID NO: 129486 - DNA, 25 bp, probe
agggatgaggatgccggactccctc

SEQ ID NO: 129487 - DNA, 25 bp, probe
agtgggatgattactcggacaccgt

SEQ ID NO: 129488 - DNA, 25 bp, probe
agggtgagcagtacatgaacacccg

SEQ ID NO: 129489 - DNA, 25 bp, probe
aggtggagaggttggacatccccct

SEQ ID NO: 129490 - DNA, 25 bp, probe
aggtggagaggttggacatccccct

SEQ ID NO: 129491 - DNA, 25 bp, probe
aggggagcagtatggaattcattct

SEQ ID NO: 129492 - DNA, 25 bp, probe
aggtatatgccttcaggaatgatat

SEQ ID NO: 129493 - DNA, 25 bp, probe
aggtgtgcatgggacaagaacatat

SEQ ID NO: 129494 - DNA, 25 bp, probe
aggggcagaaccaagacagcacagt

SEQ ID NO: 129495 - DNA, 25 bp, probe
aggggcagaaccaagacagcacagt

SEQ ID NO: 129496 - DNA, 25 bp, probe
agggtcaatactcagggtcagtgca

SEQ ID NO: 129497 - DNA, 25 bp, probe
aggtctacaactatgtggactggat

SEQ ID NO: 129498 - DNA, 25 bp, probe
aggtcatcaaacagtcggcctatga

SEQ ID NO: 129499 - DNA, 25 bp, probe
agggaaagcatcaggcaacctagaa

SEQ ID NO: 129500 - DNA, 25 bp, probe
aggtgaaactctctggcagccataa

SEQ ID NO: 129501 - DNA, 25 bp, probe
agtgaaaggcccttgggaatgaagg

SEQ ID NO: 129502 - DNA, 25 bp, probe
agctagttgcgtcccagggaccaag

SEQ ID NO: 129503 - DNA, 25 bp, probe
agtggatccgagctcggtaccaagc

SEQ ID NO: 129504 - DNA, 25 bp, probe
agggtccggcgtggggatcagccgg

SEQ ID NO: 129505 - DNA, 25 bp, probe
agtcctccccattgggaacagggtg

SEQ ID NO: 129506 - DNA, 25 bp, probe
agaccattttcaagagggacggtat

SEQ ID NO: 129507 - DNA, 25 bp, probe
agacgtttcgatgaagcccgagctc

SEQ ID NO: 129508 - DNA, 25 bp, probe
agacgtttcgatgaagcccgagctc

SEQ ID NO: 129509 - DNA, 25 bp, probe
agatcctcagtagaaagcccaagcc

SEQ ID NO: 129510 - DNA, 25 bp, probe
agtgctataccaaaagggccaagcc

SEQ ID NO: 129511 - DNA, 25 bp, probe
agtgttacgttagatagctctcgcc

SEQ ID NO: 129512 - DNA, 25 bp, probe
agggatgcttgagtacgaaccggcc

SEQ ID NO: 129513 - DNA, 25 bp, probe
agggatgcttgagtacgaaccggcc

SEQ ID NO: 129514 - DNA, 25 bp, probe
agggagtttctaaagagcctgcgaa

SEQ ID NO: 129515 - DNA, 25 bp, probe
agtgggttttgtgaggctctgtggc

SEQ ID NO: 129516 - DNA, 25 bp, probe
agggtgtgagtttgagaacactgtg

SEQ ID NO: 129517 - DNA, 25 bp, probe
aggtagtggtagcagagaattttga

SEQ ID NO: 129518 - DNA, 25 bp, probe
aggtcagctgagtccgaggaggtgt

SEQ ID NO: 129519 - DNA, 25 bp, probe
aggtggtgcagatcgtggagatcat

SEQ ID NO: 129520 - DNA, 25 bp, probe
aggtggtgcagggcaacgcagacat

SEQ ID NO: 129521 - DNA, 25 bp, probe
aggtagctgagggcatggcctacat

SEQ ID NO: 129522 - DNA, 25 bp, probe
aggtgactatggttggcccacacca

SEQ ID NO: 129523 - DNA, 25 bp, probe
aggtgacaaggattgggtcccacat

SEQ ID NO: 129524 - DNA, 25 bp, probe
agggacgtgagttggagcggccacg

SEQ ID NO: 129525 - DNA, 25 bp, probe
agggacattggctgggaggctgacc

SEQ ID NO: 129526 - DNA, 25 bp, probe
aggggtgatgactttggcacgtcac

SEQ ID NO: 129527 - DNA, 25 bp, probe
agggcctggactgtgacattgacat

SEQ ID NO: 129528 - DNA, 25 bp, probe
aggtcagatggatcctggttggcat

SEQ ID NO: 129529 - DNA, 25 bp, probe
aggtggcagtgaacctggccaagct

SEQ ID NO: 129530 - DNA, 25 bp, probe
aggggaggaagcgggaggcaggcct

SEQ ID NO: 129531 - DNA, 25 bp, probe
agggagggggctaagagaggagcaa

SEQ ID NO: 129532 - DNA, 25 bp, probe
agggggccacctgtgatgaggaaga

SEQ ID NO: 129533 - DNA, 25 bp, probe
agggggctaagagaggagcaaagca

SEQ ID NO: 129534 - DNA, 25 bp, probe
agggaagtggacggcaccgctaaga

SEQ ID NO: 129535 - DNA, 25 bp, probe
agggaagtggacggcaccgctaaga

SEQ ID NO: 129536 - DNA, 25 bp, probe
agggaggaggcagcgactccttgga

SEQ ID NO: 129537 - DNA, 25 bp, probe
aggtcgggagaaaggtcgctgtgtg

SEQ ID NO: 129538 - DNA, 25 bp, probe
agtactgggaagaggaagcgtggca

SEQ ID NO: 129539 - DNA, 25 bp, probe
agtcaagggtagggtgggccttcag

SEQ ID NO: 129540 - DNA, 25 bp, probe
agtaagaagtagtgtttccatgctc

SEQ ID NO: 129541 - DNA, 25 bp, probe
agttaaactctatgattatttctcc

SEQ ID NO: 129542 - DNA, 25 bp, probe
agtgtcataactccacagatcgaat

SEQ ID NO: 129543 - DNA, 25 bp, probe
aggtctgaagctaacaggcctgctg

SEQ ID NO: 129544 - DNA, 25 bp, probe
aggtctgaagctaacaggcctgctg

SEQ ID NO: 129545 - DNA, 25 bp, probe
aggtcatgaagcaaacaatgctcta

SEQ ID NO: 129546 - DNA, 25 bp, probe
aggtccaagccatcaagtgctttct

SEQ ID NO: 129547 - DNA, 25 bp, probe
aggtgacaactctcattctgtctgt

SEQ ID NO: 129548 - DNA, 25 bp, probe
aggtgacaactctcattctgtctgt

SEQ ID NO: 129549 - DNA, 25 bp, probe
aggtgccaatccagcagtcattact

SEQ ID NO: 129550 - DNA, 25 bp, probe
agggtctagccaaaatcatagagct

SEQ ID NO: 129551 - DNA, 25 bp, probe
aggtgatgaagcttcacaaaggagc

SEQ ID NO: 129552 - DNA, 25 bp, probe
aggtgatgaagcttcacaaaggagc

SEQ ID NO: 129553 - DNA, 25 bp, probe
aggtgagattgccatccgtgtgttc

SEQ ID NO: 129554 - DNA, 25 bp, probe
aggtgcaggtcagcacgttgctgtc

SEQ ID NO: 129555 - DNA, 25 bp, probe
aggtgcgttatctcagcttcttcag

SEQ ID NO: 129556 - DNA, 25 bp, probe
agtgtggttagcttgacctttctgt

SEQ ID NO: 129557 - DNA, 25 bp, probe
aggggagtgagcttgagcctttgat

SEQ ID NO: 129558 - DNA, 25 bp, probe
aggtggagatcattgggctccctgt

SEQ ID NO: 129559 - DNA, 25 bp, probe
agggaggtgcaaaggctctacgtgc

SEQ ID NO: 129560 - DNA, 25 bp, probe
agggaggtgcaaaggctctacgtgc

SEQ ID NO: 129561 - DNA, 25 bp, probe
aggggttcaatgagctcatccctca

SEQ ID NO: 129562 - DNA, 25 bp, probe
agtgtggtaaatatgtgctccgctt

SEQ ID NO: 129563 - DNA, 25 bp, probe
agtgtggtaaatatgtgctccgctt

SEQ ID NO: 129564 - DNA, 25 bp, probe
agtgggtacagagagtggcctgatg

SEQ ID NO: 129565 - DNA, 25 bp, probe
aggtgggcaaggccattggccatgg

SEQ ID NO: 129566 - DNA, 25 bp, probe
aggtggtgcgggattaccagtccaa

SEQ ID NO: 129567 - DNA, 25 bp, probe
aggtgggtgggatttccgagctgac

SEQ ID NO: 129568 - DNA, 25 bp, probe
aggtgggtgggatttccgagctgac

SEQ ID NO: 129569 - DNA, 25 bp, probe
aggtgatgtgtaggaagcccagccc

SEQ ID NO: 129570 - DNA, 25 bp, probe
aggtggtagaggagccatcgccaca

SEQ ID NO: 129571 - DNA, 25 bp, probe
aggtggtagaggagccatcgccaca

SEQ ID NO: 129572 - DNA, 25 bp, probe
aggtggtgacggactggcacatgct

SEQ ID NO: 129573 - DNA, 25 bp, probe
aggtggtgagcggtttgcagtgtcc

SEQ ID NO: 129574 - DNA, 25 bp, probe
aggtggtgcaggagtatattgatgc

SEQ ID NO: 129575 - DNA, 25 bp, probe
aggtgtggatgctctctatttagcg

SEQ ID NO: 129576 - DNA, 25 bp, probe
aggtgtggatgctctctatttagcg

SEQ ID NO: 129577 - DNA, 25 bp, probe
aggtgatgggcgtctgagtttcaca

SEQ ID NO: 129578 - DNA, 25 bp, probe
agagttggaagtacagtttcaagga

SEQ ID NO: 129579 - DNA, 25 bp, probe
aggtctggacaggagacttggcggg

SEQ ID NO: 129580 - DNA, 25 bp, probe
agggctggacggatgttgggagtgg

SEQ ID NO: 129581 - DNA, 25 bp, probe
agggagctgagggactgcttcaggg

SEQ ID NO: 129582 - DNA, 25 bp, probe
agggagctgagggactgcttcaggg

SEQ ID NO: 129583 - DNA, 25 bp, probe
aggggcttagtgtctggacagggac

SEQ ID NO: 129584 - DNA, 25 bp, probe
aggggctcccgacagacgggagcag

SEQ ID NO: 129585 - DNA, 25 bp, probe
aggtggtccctgatggactggggct

SEQ ID NO: 129586 - DNA, 25 bp, probe
aggggtagtcgaagagctctggtgg

SEQ ID NO: 129587 - DNA, 25 bp, probe
aggtcagtgggcttaggcctgcagt

SEQ ID NO: 129588 - DNA, 25 bp, probe
agggagtgggctaagcacgggccat

SEQ ID NO: 129589 - DNA, 25 bp, probe
aggtggcgggtgatgagctgactgg

SEQ ID NO: 129590 - DNA, 25 bp, probe
aggtccgcgggaggatggagcagtg

SEQ ID NO: 129591 - DNA, 25 bp, probe
aggtgattttggtctagctacagtg

SEQ ID NO: 129592 - DNA, 25 bp, probe
aggtgattttggtctagctacagtg

SEQ ID NO: 129593 - DNA, 25 bp, probe
aggtgactttggtctagccacagtg

SEQ ID NO: 129594 - DNA, 25 bp, probe
aggtgacagcattgcttaagcccag

SEQ ID NO: 129595 - DNA, 25 bp, probe
agggaaactgccagcaacgcaggcc

SEQ ID NO: 129596 - DNA, 25 bp, probe
agggctcgaccacttcaacaaagcc

SEQ ID NO: 129597 - DNA, 25 bp, probe
agggcccctctgttgaacaaatggc

SEQ ID NO: 129598 - DNA, 25 bp, probe
agggacaccctaataaagcaatcgc

SEQ ID NO: 129599 - DNA, 25 bp, probe
aggtgaaccctactcagtgtgaagc

SEQ ID NO: 129600 - DNA, 25 bp, probe
aggtgaacggtgcctgggtgcaggc

SEQ ID NO: 129601 - DNA, 25 bp, probe
aggtgaacggtgcctgggtgcaggc

SEQ ID NO: 129602 - DNA, 25 bp, probe
aggtgctgacggacacgtcgtacac

SEQ ID NO: 129603 - DNA, 25 bp, probe
aggtgctgacccaggaggcatacac

SEQ ID NO: 129604 - DNA, 25 bp, probe
aggtgctgaagcagggcacggagaa

SEQ ID NO: 129605 - DNA, 25 bp, probe
aggtgctgcagatgcgggaaggact

SEQ ID NO: 129606 - DNA, 25 bp, probe
aggtgctgaaaacgttagcctctaa

SEQ ID NO: 129607 - DNA, 25 bp, probe
agtggtggtagatgttgtgcctcgg

SEQ ID NO: 129608 - DNA, 25 bp, probe
agggggatgagagcacttgcttcag

SEQ ID NO: 129609 - DNA, 25 bp, probe
agggcagcggagatcagcgtggaca

SEQ ID NO: 129610 - DNA, 25 bp, probe
agggcagcggagatcagcgtggaca

SEQ ID NO: 129611 - DNA, 25 bp, probe
aggtggcggtgaagagcctgaagca

SEQ ID NO: 129612 - DNA, 25 bp, probe
aggtggccattaagatcctggacaa

SEQ ID NO: 129613 - DNA, 25 bp, probe
aggtgatcgtattcttccagtgaaa

SEQ ID NO: 129614 - DNA, 25 bp, probe
aggtgatcgtattcttccagtgaaa

SEQ ID NO: 129615 - DNA, 25 bp, probe
aggtgttgcttatctccatgagaac

SEQ ID NO: 129616 - DNA, 25 bp, probe
agggagttaaacagcagcaacacta

SEQ ID NO: 129617 - DNA, 25 bp, probe
aggtgagtatactaagggagttcat

SEQ ID NO: 129618 - DNA, 25 bp, probe
aggggtgaacgatggcgagatatct

SEQ ID NO: 129619 - DNA, 25 bp, probe
agtgggtactcgtcagcaaaaattg

SEQ ID NO: 129620 - DNA, 25 bp, probe
agggtttccgctgtcaaacatgtgg

SEQ ID NO: 129621 - DNA, 25 bp, probe
agggtcttcctttggcatgggatgg

SEQ ID NO: 129622 - DNA, 25 bp, probe
agggtcagtccctggatgggtggtt

SEQ ID NO: 129623 - DNA, 25 bp, probe
agggtcagtccctggatgggtggtt

SEQ ID NO: 129624 - DNA, 25 bp, probe
agggtcgctccccaagatggagggg

SEQ ID NO: 129625 - DNA, 25 bp, probe
aggtgggcagccacgagaaggtggg

SEQ ID NO: 129626 - DNA, 25 bp, probe
aggtcctgagccatggagaagggac

SEQ ID NO: 129627 - DNA, 25 bp, probe
aggtgggcatggctggagaggagga

SEQ ID NO: 129628 - DNA, 25 bp, probe
aggtggacatgtcctgaaggacaag

SEQ ID NO: 129629 - DNA, 25 bp, probe
agggacactggcagctgtggaaatg

SEQ ID NO: 129630 - DNA, 25 bp, probe
agggatggctaccaggaggaaatcc

SEQ ID NO: 129631 - DNA, 25 bp, probe
aggggatgctactgatgggaatgat

SEQ ID NO: 129632 - DNA, 25 bp, probe
aggggtcatcaatgctggcaagagt

SEQ ID NO: 129633 - DNA, 25 bp, probe
aggggccatgcaggagcttgaagca

SEQ ID NO: 129634 - DNA, 25 bp, probe
aggtgacctgcttggatctagacag

SEQ ID NO: 129635 - DNA, 25 bp, probe
agggacatcatcaagggtgaggcag

SEQ ID NO: 129636 - DNA, 25 bp, probe
aggtgcagtcaccgaaagagagcgc

SEQ ID NO: 129637 - DNA, 25 bp, probe
aggtgcaccctgcaggagatacagc

SEQ ID NO: 129638 - DNA, 25 bp, probe
aggtgccacctgactgggagagagc

SEQ ID NO: 129639 - DNA, 25 bp, probe
aggtcctgattgaaggggaggcttg

SEQ ID NO: 129640 - DNA, 25 bp, probe
aggtgttcattgaaggtgccagttc

SEQ ID NO: 129641 - DNA, 25 bp, probe
aggtgataaattgggtcacagaggc

SEQ ID NO: 129642 - DNA, 25 bp, probe
agggccaatttctgaccagagctgc

SEQ ID NO: 129643 - DNA, 25 bp, probe
aggtggcagatgctaggaccaaggc

SEQ ID NO: 129644 - DNA, 25 bp, probe
aggtggtgggatcacctctgaggcc

SEQ ID NO: 129645 - DNA, 25 bp, probe
aggtggtgggatcacctctgaggcc

SEQ ID NO: 129646 - DNA, 25 bp, probe
agtgggctatggatgccctttggcc

SEQ ID NO: 129647 - DNA, 25 bp, probe
aggggctatgggtttgctttggtgt

SEQ ID NO: 129648 - DNA, 25 bp, probe
aggggctagctggatttgtttgttt

SEQ ID NO: 129649 - DNA, 25 bp, probe
aggtgtttggcttagtatttgttat

SEQ ID NO: 129650 - DNA, 25 bp, probe
agggagttggtgtgctatttttgaa

SEQ ID NO: 129651 - DNA, 25 bp, probe
agggagggtgaaagtgattatggga

SEQ ID NO: 129652 - DNA, 25 bp, probe
agaaagggtaggagatgttgggcag

SEQ ID NO: 129653 - DNA, 25 bp, probe
agagaagggggagcggttggcacag

SEQ ID NO: 129654 - DNA, 25 bp, probe
agagaagggggagcggttggcacag

SEQ ID NO: 129655 - DNA, 25 bp, probe
agtggacggggagcaggtggagtat

SEQ ID NO: 129656 - DNA, 25 bp, probe
agtgatgacggaggagtagccggcc

SEQ ID NO: 129657 - DNA, 25 bp, probe
agtgacagggtggcagtcccatagc

SEQ ID NO: 129658 - DNA, 25 bp, probe
agtgacggggccaccatgaaaacct

SEQ ID NO: 129659 - DNA, 25 bp, probe
actacaagcggatggttaaacaatt

SEQ ID NO: 129660 - DNA, 25 bp, probe
agaaaggggggggtcacagcaacat

SEQ ID NO: 129661 - DNA, 25 bp, probe
agtaacgggtttttccatggcatca

SEQ ID NO: 129662 - DNA, 25 bp, probe
agtcaaggccctgtgcgctaaggcc

SEQ ID NO: 129663 - DNA, 25 bp, probe
agtcagaagaccaggctacaaggtg

SEQ ID NO: 129664 - DNA, 25 bp, probe
agtggtgagacctttccaccatggg

SEQ ID NO: 129665 - DNA, 25 bp, probe
agtgggtgaagctgtaccgcggaga

SEQ ID NO: 129666 - DNA, 25 bp, probe
aggggagatcatcggaggccgggag

SEQ ID NO: 129667 - DNA, 25 bp, probe
agtgggcattggaggtgccagggga

SEQ ID NO: 129668 - DNA, 25 bp, probe
agggtctgagagaggagccacagtc

SEQ ID NO: 129669 - DNA, 25 bp, probe
agggtctgagagaggagccacagtc

SEQ ID NO: 129670 - DNA, 25 bp, probe
agggtaaagtcggaccagtgtcaag

SEQ ID NO: 129671 - DNA, 25 bp, probe
agggtgaaagtggtttagtgctaga

SEQ ID NO: 129672 - DNA, 25 bp, probe
cagagagccacgcaaacatgggtgc

SEQ ID NO: 129673 - DNA, 25 bp, probe
aggtgttgaaatttgtcatggatgg

SEQ ID NO: 129674 - DNA, 25 bp, probe
aggtgtctatagaactagtggggct

SEQ ID NO: 129675 - DNA, 25 bp, probe
aggtgtcattagccctgagaggcgg

SEQ ID NO: 129676 - DNA, 25 bp, probe
aggtgatgttgagcttgaatgggaa

SEQ ID NO: 129677 - DNA, 25 bp, probe
aggtgcttcgagctcagacagggac

SEQ ID NO: 129678 - DNA, 25 bp, probe
agggcgttgaggccaaggagcgcac

SEQ ID NO: 129679 - DNA, 25 bp, probe
agggcttcaatgcgaaggacgcgca

SEQ ID NO: 129680 - DNA, 25 bp, probe
agggcctcctgagaaggacaggcaa

SEQ ID NO: 129681 - DNA, 25 bp, probe
agggacacctacggcagagaaccca

SEQ ID NO: 129682 - DNA, 25 bp, probe
agtgtaatcccccaggagaacatct

SEQ ID NO: 129683 - DNA, 25 bp, probe
agggaacacaactagtaactctgca

SEQ ID NO: 129684 - DNA, 25 bp, probe
agggacctcaagccagaaaatctca

SEQ ID NO: 129685 - DNA, 25 bp, probe
aggtgaggctcggcttggattattc

SEQ ID NO: 129686 - DNA, 25 bp, probe
aggtgaggacatctgggtctcattt

SEQ ID NO: 129687 - DNA, 25 bp, probe
aggtgcaggagaaatgcgccctcat

SEQ ID NO: 129688 - DNA, 25 bp, probe
aggtggcgagtgaaggcaccatgct

SEQ ID NO: 129689 - DNA, 25 bp, probe
aggtgggaggacacaccatgctccc

SEQ ID NO: 129690 - DNA, 25 bp, probe
aggggagggagctcaatatgtcctg

SEQ ID NO: 129691 - DNA, 25 bp, probe
gcgtggaaagggcccaagaacctgg

SEQ ID NO: 129692 - DNA, 25 bp, probe
agtgcgaaggggcccatgggttggg

SEQ ID NO: 129693 - DNA, 25 bp, probe
agggaaggcccaactggttcaggct

SEQ ID NO: 129694 - DNA, 25 bp, probe
agggaagaagttacagatttatggt

SEQ ID NO: 129695 - DNA, 25 bp, probe
agggaaaatgtgtgcaggtctactg

SEQ ID NO: 129696 - DNA, 25 bp, probe
aggtgaaagagtttgggctgggatc

SEQ ID NO: 129697 - DNA, 25 bp, probe
aggtgaaagagtttgggctgggatc

SEQ ID NO: 129698 - DNA, 25 bp, probe
aggtgacagggtctgggtgtgcctg

SEQ ID NO: 129699 - DNA, 25 bp, probe
aggtgacagggtctgggtgtgcctg

SEQ ID NO: 129700 - DNA, 25 bp, probe
agtgggggtgctctggagaggctgt

SEQ ID NO: 129701 - DNA, 25 bp, probe
agtgggggtgctctggagaggctgt

SEQ ID NO: 129702 - DNA, 25 bp, probe
agtgggaggtgtctcgagagaagat

SEQ ID NO: 129703 - DNA, 25 bp, probe
aggggcaggttgctgatcaggagga

SEQ ID NO: 129704 - DNA, 25 bp, probe
aggggcattctctggttggaggaca

SEQ ID NO: 129705 - DNA, 25 bp, probe
aggtgtgtttgcagtggatggggaa

SEQ ID NO: 129706 - DNA, 25 bp, probe
agtggctgatttgggggagaaacaa

SEQ ID NO: 129707 - DNA, 25 bp, probe
agggagatcacgctggggaaacgga

SEQ ID NO: 129708 - DNA, 25 bp, probe
agggcaatcgggaaggagcacaagg

SEQ ID NO: 129709 - DNA, 25 bp, probe
agggccctgaggaaggcacacttgc

SEQ ID NO: 129710 - DNA, 25 bp, probe
agggccctgaggaaggcacacttgc

SEQ ID NO: 129711 - DNA, 25 bp, probe
agggccagaaggtggccaccagcta

SEQ ID NO: 129712 - DNA, 25 bp, probe
aggggaagatgggagagcgatacat

SEQ ID NO: 129713 - DNA, 25 bp, probe
agggtgggtcctggatgcagttgat

SEQ ID NO: 129714 - DNA, 25 bp, probe
agggtgggtcctggatgcagttgat

SEQ ID NO: 129715 - DNA, 25 bp, probe
agggtgtcgtcctgcagtatgagat

SEQ ID NO: 129716 - DNA, 25 bp, probe
agtggcttcgtgttcgactatgagt

SEQ ID NO: 129717 - DNA, 25 bp, probe
agggcttgcattggtcaggatagag

SEQ ID NO: 129718 - DNA, 25 bp, probe
agggcctggtcactgtagaagatga

SEQ ID NO: 129719 - DNA, 25 bp, probe
agggcctggtacaagggaatgtcac

SEQ ID NO: 129720 - DNA, 25 bp, probe
agggccgagtaaagtgtgatcatta

SEQ ID NO: 129721 - DNA, 25 bp, probe
aggtggagacgattggggatgctta

SEQ ID NO: 129722 - DNA, 25 bp, probe
aggtgaagagctgattgaggctgcc

SEQ ID NO: 129723 - DNA, 25 bp, probe
agggaatagcgacttagtgttctaa

SEQ ID NO: 129724 - DNA, 25 bp, probe
agaggatcgaccagtcagagttcga

SEQ ID NO: 129725 - DNA, 25 bp, probe
agggacagcaccagactattctctg

SEQ ID NO: 129726 - DNA, 25 bp, probe
agggtctgatcatcgacgcttttgg

SEQ ID NO: 129727 - DNA, 25 bp, probe
agggtttctaccaatctctgttgaa

SEQ ID NO: 129728 - DNA, 25 bp, probe
agggtttctaccaatctctgttgaa

SEQ ID NO: 129729 - DNA, 25 bp, probe
aggggctcttaggcaatcacatagt

SEQ ID NO: 129730 - DNA, 25 bp, probe
aggggctcttaggcaatcacatagt

SEQ ID NO: 129731 - DNA, 25 bp, probe
aggggcatattagcaattagagttg

SEQ ID NO: 129732 - DNA, 25 bp, probe
aggggtattcctaatttgctttgca

SEQ ID NO: 129733 - DNA, 25 bp, probe
agatggggtttcacttttgttgcct

SEQ ID NO: 129734 - DNA, 25 bp, probe
agagggaactcagactcctttccct

SEQ ID NO: 129735 - DNA, 25 bp, probe
caataaagactgagacccgttcgcc

SEQ ID NO: 129736 - DNA, 25 bp, probe
actaacttcatgatgaccccttacg

SEQ ID NO: 129737 - DNA, 25 bp, probe
agtcaacctcatgtgacaccttacc

SEQ ID NO: 129738 - DNA, 25 bp, probe
agtgaaccttgagaaaatctaccga

SEQ ID NO: 129739 - DNA, 25 bp, probe
agggaccagaaccacaagcaaaccg

SEQ ID NO: 129740 - DNA, 25 bp, probe
agggaccagagacccggcatggtcc

SEQ ID NO: 129741 - DNA, 25 bp, probe
agggatgtcaaaccctgaagtgatc

SEQ ID NO: 129742 - DNA, 25 bp, probe
agggcagatcactctcaagaaggac

SEQ ID NO: 129743 - DNA, 25 bp, probe
aggtgaagctatggctctaaatgag

SEQ ID NO: 129744 - DNA, 25 bp, probe
aggtgagcagtaggtcatccagtcc

SEQ ID NO: 129745 - DNA, 25 bp, probe
aggtgagcagtaggtcatccagtcc

SEQ ID NO: 129746 - DNA, 25 bp, probe
agtcagcgagttttatttgtccgct

SEQ ID NO: 129747 - DNA, 25 bp, probe
agtgccagtttgcttagttctcact

SEQ ID NO: 129748 - DNA, 25 bp, probe
agtgcctgcaagctttggatttcct

SEQ ID NO: 129749 - DNA, 25 bp, probe
agggatgccaagttcggacttcact

SEQ ID NO: 129750 - DNA, 25 bp, probe
agggatgccaagttcggacttcact

SEQ ID NO: 129751 - DNA, 25 bp, probe
aggtgaccgatgtacaggactttcc

SEQ ID NO: 129752 - DNA, 25 bp, probe
aggtgtacatcatacaggcctgtcg

SEQ ID NO: 129753 - DNA, 25 bp, probe
aggtgtctacattaagagccttatg

SEQ ID NO: 129754 - DNA, 25 bp, probe
aggtgtctagaggcaacagtgttct

SEQ ID NO: 129755 - DNA, 25 bp, probe
aggtgtccatggggagcactggatt

SEQ ID NO: 129756 - DNA, 25 bp, probe
aggtggcacaggggaggtgcgagct

SEQ ID NO: 129757 - DNA, 25 bp, probe
aggtggcactggggcggatggagtg

SEQ ID NO: 129758 - DNA, 25 bp, probe
aggtgagccgcatggtggttgtgat

SEQ ID NO: 129759 - DNA, 25 bp, probe
aggtgagccgcatggtggttgtgat

SEQ ID NO: 129760 - DNA, 25 bp, probe
aggtgacattgcaggtggccatgtt

SEQ ID NO: 129761 - DNA, 25 bp, probe
agggaatatgcgaagctgccgcgtg

SEQ ID NO: 129762 - DNA, 25 bp, probe
agggggatggtctatgccagaggct

SEQ ID NO: 129763 - DNA, 25 bp, probe
agggcctgggactaccaggcctgca

SEQ ID NO: 129764 - DNA, 25 bp, probe
agggcctgggactaccaggcctgca

SEQ ID NO: 129765 - DNA, 25 bp, probe
aggtgtctcggatagtgggctctgt

SEQ ID NO: 129766 - DNA, 25 bp, probe
aggtggctgtgcgaagaggggctcg

SEQ ID NO: 129767 - DNA, 25 bp, probe
aggtgtgaggtccagggttgctagg

SEQ ID NO: 129768 - DNA, 25 bp, probe
agggatgggctggggagttgcttgt

SEQ ID NO: 129769 - DNA, 25 bp, probe
agggatgggctggggagttgcttgt

SEQ ID NO: 129770 - DNA, 25 bp, probe
agggcatgggttggggtagtgggtg

SEQ ID NO: 129771 - DNA, 25 bp, probe
agggatggccaaggccgctagggtc

SEQ ID NO: 129772 - DNA, 25 bp, probe
agggcaggaaacgccaagaactgct

SEQ ID NO: 129773 - DNA, 25 bp, probe
agggcaagaaccgctacaagaacat

SEQ ID NO: 129774 - DNA, 25 bp, probe
agggcaggacccaaaggaagaagct

SEQ ID NO: 129775 - DNA, 25 bp, probe
agtggcggcaacgacaaagaaaagg

SEQ ID NO: 129776 - DNA, 25 bp, probe
agtgaagtcaccgctatgttagaga

SEQ ID NO: 129777 - DNA, 25 bp, probe
agtggagccctcagttttatggatc

SEQ ID NO: 129778 - DNA, 25 bp, probe
agggggccttggaatctatagtata

SEQ ID NO: 129779 - DNA, 25 bp, probe
agggcgatgcctgggtttacaaaag

SEQ ID NO: 129780 - DNA, 25 bp, probe
agtggccactctgggtggttctaag

SEQ ID NO: 129781 - DNA, 25 bp, probe
agggatcctccaaggatgctgtgta

SEQ ID NO: 129782 - DNA, 25 bp, probe
agggactgtgccagatgttaggaga

SEQ ID NO: 129783 - DNA, 25 bp, probe
aggggctggacaggcactgtcagcc

SEQ ID NO: 129784 - DNA, 25 bp, probe
aggggatggcagctactgccacctt

SEQ ID NO: 129785 - DNA, 25 bp, probe
aggggatggcagctactgccacctt

SEQ ID NO: 129786 - DNA, 25 bp, probe
agggctagacagctcagttcaccat

SEQ ID NO: 129787 - DNA, 25 bp, probe
agggcctgaagtacacattctctgt

SEQ ID NO: 129788 - DNA, 25 bp, probe
agggcatcgaagagacctactgggt

SEQ ID NO: 129789 - DNA, 25 bp, probe
agaggagccaagaaactaaaggtga

SEQ ID NO: 129790 - DNA, 25 bp, probe
agtggagctgggaggtagaagggga

SEQ ID NO: 129791 - DNA, 25 bp, probe
agggcacagggaagagggagggtgt

SEQ ID NO: 129792 - DNA, 25 bp, probe
agggacaagcataagaaggaggcgg

SEQ ID NO: 129793 - DNA, 25 bp, probe
agggctgcgaatctagaggaggggg

SEQ ID NO: 129794 - DNA, 25 bp, probe
agtggtggtaaaaggagcggagtgc

SEQ ID NO: 129795 - DNA, 25 bp, probe
agggctggaaacagtatgcaagact

SEQ ID NO: 129796 - DNA, 25 bp, probe
agggtggagaacagatgcacgagaa

SEQ ID NO: 129797 - DNA, 25 bp, probe
aggggtagataaggacatggatgaa

SEQ ID NO: 129798 - DNA, 25 bp, probe
agggcagctgactaaagaatgtatc

SEQ ID NO: 129799 - DNA, 25 bp, probe
agggcgagaccagaggggacggaag

SEQ ID NO: 129800 - DNA, 25 bp, probe
aggtggagacaataggggacgccta

SEQ ID NO: 129801 - DNA, 25 bp, probe
agggaaagccagaaggggcacgcct

SEQ ID NO: 129802 - DNA, 25 bp, probe
agggtagtgcctgcagggatgcatg

SEQ ID NO: 129803 - DNA, 25 bp, probe
agggtaggcagggagcagcatgtct

SEQ ID NO: 129804 - DNA, 25 bp, probe
agggcttgccaagtgtgcatgcatt

SEQ ID NO: 129805 - DNA, 25 bp, probe
agggcttgaaatggacatctgtgat

SEQ ID NO: 129806 - DNA, 25 bp, probe
agggcctgcaaaaggcagcgaggag

SEQ ID NO: 129807 - DNA, 25 bp, probe
aggtgtctgtaaaggagaggagcca

SEQ ID NO: 129808 - DNA, 25 bp, probe
aggtgttggaacgggagctggcctg

SEQ ID NO: 129809 - DNA, 25 bp, probe
aggtggtataaaggaggctcctctg

SEQ ID NO: 129810 - DNA, 25 bp, probe
aggggttgagaatggaatcctctgt

SEQ ID NO: 129811 - DNA, 25 bp, probe
aggggttgagaatggaatcctctgt

SEQ ID NO: 129812 - DNA, 25 bp, probe
aggggggaagattgtgggcactctg

SEQ ID NO: 129813 - DNA, 25 bp, probe
aggggtgagacagtgggggtgcctg

SEQ ID NO: 129814 - DNA, 25 bp, probe
aggggtggactgtgggatgcatgcc

SEQ ID NO: 129815 - DNA, 25 bp, probe
aggggtggactgtgggatgcatgcc

SEQ ID NO: 129816 - DNA, 25 bp, probe
aggtggtggagaacgtgggcatgct

SEQ ID NO: 129817 - DNA, 25 bp, probe
aggtgtgtggctgcggtgaggagct

SEQ ID NO: 129818 - DNA, 25 bp, probe
aggtgtgggtgtacacaggcgcgtc

SEQ ID NO: 129819 - DNA, 25 bp, probe
aggtgtcggtgtgccaggagatgct

SEQ ID NO: 129820 - DNA, 25 bp, probe
agtgttagggtagcatgggattaca

SEQ ID NO: 129821 - DNA, 25 bp, probe
agtgattatgggaatcatagggaaa

SEQ ID NO: 129822 - DNA, 25 bp, probe
agggtttggattagcagtggaataa

SEQ ID NO: 129823 - DNA, 25 bp, probe
agggcttctgcctgaagatggagct

SEQ ID NO: 129824 - DNA, 25 bp, probe
agggcttcatcctcataatgtcaga

SEQ ID NO: 129825 - DNA, 25 bp, probe
agtgtcctcatctgtccaatgacag

SEQ ID NO: 129826 - DNA, 25 bp, probe
agggctgccatataacctgacagga

SEQ ID NO: 129827 - DNA, 25 bp, probe
aggggcacatcaaaatcgctgactt

SEQ ID NO: 129828 - DNA, 25 bp, probe
agtgggagggaattcctagctgtaa

SEQ ID NO: 129829 - DNA, 25 bp, probe
aggggaaggatcttatgctacagta

SEQ ID NO: 129830 - DNA, 25 bp, probe
aggggacagtgttatgagcgaagga

SEQ ID NO: 129831 - DNA, 25 bp, probe
aggggagcagtgttgatgccaaaat

SEQ ID NO: 129832 - DNA, 25 bp, probe
aggggagcagtgttgatgccaaaat

SEQ ID NO: 129833 - DNA, 25 bp, probe
agggtggagcattctgtctaagaga

SEQ ID NO: 129834 - DNA, 25 bp, probe
agggtggatcatgtgcttgagcaga

SEQ ID NO: 129835 - DNA, 25 bp, probe
agggtggatcatgtgcttgagcaga

SEQ ID NO: 129836 - DNA, 25 bp, probe
agtggaagacatcctatctagctgc

SEQ ID NO: 129837 - DNA, 25 bp, probe
agggaaggacagacatcaagtgcca

SEQ ID NO: 129838 - DNA, 25 bp, probe
agggcacagcacaggcaaaggccag

SEQ ID NO: 129839 - DNA, 25 bp, probe
agggaagtcatccacaaagacctgg

SEQ ID NO: 129840 - DNA, 25 bp, probe
agggtgagatcattccaacttcctt

SEQ ID NO: 129841 - DNA, 25 bp, probe
agggttctcaatgcagatctccctt

SEQ ID NO: 129842 - DNA, 25 bp, probe
agggtctccaaggagacgcctctgt

SEQ ID NO: 129843 - DNA, 25 bp, probe
agggatgccaaggcttaccgatctg

SEQ ID NO: 129844 - DNA, 25 bp, probe
agggtgaatgaggtgaactggtctc

SEQ ID NO: 129845 - DNA, 25 bp, probe
aggggatatgggcagagacagtctc

SEQ ID NO: 129846 - DNA, 25 bp, probe
aggtggaggtggccgatgaaaccaa

SEQ ID NO: 129847 - DNA, 25 bp, probe
aggggagtgtggctgtagaatcatc

SEQ ID NO: 129848 - DNA, 25 bp, probe
aggtgggagggcagcggagatcagc

SEQ ID NO: 129849 - DNA, 25 bp, probe
aggtgggagggcagcggagatcagc

SEQ ID NO: 129850 - DNA, 25 bp, probe
agggcggcaagtgaggatgcagtcc

SEQ ID NO: 129851 - DNA, 25 bp, probe
agggcatggcacagaaggtttccaa

SEQ ID NO: 129852 - DNA, 25 bp, probe
agggcttgcaatgaacttttccatt

SEQ ID NO: 129853 - DNA, 25 bp, probe
agggaatgccagggacattttcaag

SEQ ID NO: 129854 - DNA, 25 bp, probe
agggtgtagctgggtacatattaag

SEQ ID NO: 129855 - DNA, 25 bp, probe
agggtggtcagggtgcagaataaat

SEQ ID NO: 129856 - DNA, 25 bp, probe
agggatggggtggtggatcatcaaa

SEQ ID NO: 129857 - DNA, 25 bp, probe
agggctgagtgggcaaaatacgaca

SEQ ID NO: 129858 - DNA, 25 bp, probe
agggctgagtgggcaaaatacgaca

SEQ ID NO: 129859 - DNA, 25 bp, probe
agggtgggtgccaattccaccagca

SEQ ID NO: 129860 - DNA, 25 bp, probe
agggggtggcttggtcacaacagcc

SEQ ID NO: 129861 - DNA, 25 bp, probe
aggggatttgcaatggtgtcaccac

SEQ ID NO: 129862 - DNA, 25 bp, probe
aggggcgattgagggttcacctctg

SEQ ID NO: 129863 - DNA, 25 bp, probe
aggggagagtgtggtgtttcctgca

SEQ ID NO: 129864 - DNA, 25 bp, probe
aggggacagatgtgctgctgttccc

SEQ ID NO: 129865 - DNA, 25 bp, probe
aggggcacaggctctgatgcagtgc

SEQ ID NO: 129866 - DNA, 25 bp, probe
aggggcacaggctctgatgcagtgc

SEQ ID NO: 129867 - DNA, 25 bp, probe
agggccacatagctgtgagtgcagc

SEQ ID NO: 129868 - DNA, 25 bp, probe
aggggacatcagtgcgagacctgct

SEQ ID NO: 129869 - DNA, 25 bp, probe
aggggacacagcagaggccccatgc

SEQ ID NO: 129870 - DNA, 25 bp, probe
agcctagaacagctaagaccacagg

SEQ ID NO: 129871 - DNA, 25 bp, probe
agcctagaacagctaagaccacagg

SEQ ID NO: 129872 - DNA, 25 bp, probe
aggtggaaagagtacagtcccagga

SEQ ID NO: 129873 - DNA, 25 bp, probe
aggtggaaacactacagacactaca

SEQ ID NO: 129874 - DNA, 25 bp, probe
aggtggaaactgcagagagtcatga

SEQ ID NO: 129875 - DNA, 25 bp, probe
aggggaaatcagcaaagttatcagc

SEQ ID NO: 129876 - DNA, 25 bp, probe
aagggcaacctggtgaactttctgc

SEQ ID NO: 129877 - DNA, 25 bp, probe
agggcaacctggtgaactttctgcg

SEQ ID NO: 129878 - DNA, 25 bp, probe
aggggatccctgtagtgagttttgg

SEQ ID NO: 129879 - DNA, 25 bp, probe
aggggatgaccttgaatgatgccat

SEQ ID NO: 129880 - DNA, 25 bp, probe
agggcagggctctgatattccatga

SEQ ID NO: 129881 - DNA, 25 bp, probe
agggcagaggcgcagaatcctgtga

SEQ ID NO: 129882 - DNA, 25 bp, probe
agggcagaggcgcagaatcctgtga

SEQ ID NO: 129883 - DNA, 25 bp, probe
agggcaatcagggcagactgcctgg

SEQ ID NO: 129884 - DNA, 25 bp, probe
agggcaggctgaggcaacgagtggg

SEQ ID NO: 129885 - DNA, 25 bp, probe
agggatgtcacagaaccaggcgccc

SEQ ID NO: 129886 - DNA, 25 bp, probe
agtagatgagccgggtccggcctct

SEQ ID NO: 129887 - DNA, 25 bp, probe
agtggcagagcctaggttcaaacca

SEQ ID NO: 129888 - DNA, 25 bp, probe
agggacggagagctccagacctaac

SEQ ID NO: 129889 - DNA, 25 bp, probe
agggccaggaatcccaaaccagaca

SEQ ID NO: 129890 - DNA, 25 bp, probe
agggccggactggccacaaggaaga

SEQ ID NO: 129891 - DNA, 25 bp, probe
agggaaggtctggtacatattggaa

SEQ ID NO: 129892 - DNA, 25 bp, probe
agggagggcttggagaatatttcta

SEQ ID NO: 129893 - DNA, 25 bp, probe
agggatggacttccacagattctac

SEQ ID NO: 129894 - DNA, 25 bp, probe
agggtgtgactcttacagacctgaa

SEQ ID NO: 129895 - DNA, 25 bp, probe
agtgtttgacatttaacccagccaa

SEQ ID NO: 129896 - DNA, 25 bp, probe
agtgttctgtctaaaaaccagacaa

SEQ ID NO: 129897 - DNA, 25 bp, probe
agtgttcattttaagtaacgtgctc

SEQ ID NO: 129898 - DNA, 25 bp, probe
agggtcgcttgttaaaagctgctgc

SEQ ID NO: 129899 - DNA, 25 bp, probe
agggactcctgttcatattagcact

SEQ ID NO: 129900 - DNA, 25 bp, probe
agggacagcagcttacatggcccct

SEQ ID NO: 129901 - DNA, 25 bp, probe
agggacagagctaaacgtgccagtt

SEQ ID NO: 129902 - DNA, 25 bp, probe
agggacaagtcccaagatgccagaa

SEQ ID NO: 129903 - DNA, 25 bp, probe
agggccaaagctcaaatgcccacca

SEQ ID NO: 129904 - DNA, 25 bp, probe
agggcaagcggatggagtgcccacc

SEQ ID NO: 129905 - DNA, 25 bp, probe
agggattctgaatggtgtgacgacc

SEQ ID NO: 129906 - DNA, 25 bp, probe
agggtctcgtcaggaggtgcctgag

SEQ ID NO: 129907 - DNA, 25 bp, probe
agtggtcatcaaaggagttcgcgga

SEQ ID NO: 129908 - DNA, 25 bp, probe
agtgtgtatacccaggcttgtctgg

SEQ ID NO: 129909 - DNA, 25 bp, probe
aggggtgatcaccaagtttcataat

SEQ ID NO: 129910 - DNA, 25 bp, probe
agggtgtgatgactacttgtttata

SEQ ID NO: 129911 - DNA, 25 bp, probe
agggtttagaatatgatctatttta

SEQ ID NO: 129912 - DNA, 25 bp, probe
agggtttgagtaaatacaaagactg

SEQ ID NO: 129913 - DNA, 25 bp, probe
agggttcaatgggaattcaattcat

SEQ ID NO: 129914 - DNA, 25 bp, probe
agggctttatgtgaactatgatatt

SEQ ID NO: 129915 - DNA, 25 bp, probe
agggcttgttttgaaatattgtata

SEQ ID NO: 129916 - DNA, 25 bp, probe
agtcctatttttcacctaagtcatc

SEQ ID NO: 129917 - DNA, 25 bp, probe
accctatcctacacgactaggaact

SEQ ID NO: 129918 - DNA, 25 bp, probe
accactttcctcatctactagtaag

SEQ ID NO: 129919 - DNA, 25 bp, probe
agggatttgccaattccactcatta

SEQ ID NO: 129920 - DNA, 25 bp, probe
agtggacttcgcagtccacttctga

SEQ ID NO: 129921 - DNA, 25 bp, probe
agggatctccagaagtgcagccttt

SEQ ID NO: 129922 - DNA, 25 bp, probe
agggattacagtgggggcatttctt

SEQ ID NO: 129923 - DNA, 25 bp, probe
agtggaataaatgtggcctttgctt

SEQ ID NO: 129924 - DNA, 25 bp, probe
agtgtcctgaaagattcctttccta

SEQ ID NO: 129925 - DNA, 25 bp, probe
agtgtgttaaaatgtcgcttttcat

SEQ ID NO: 129926 - DNA, 25 bp, probe
agtggctataaaacgattttctgtt

SEQ ID NO: 129927 - DNA, 25 bp, probe
agtgtgtataaaccttcttcttctt

SEQ ID NO: 129928 - DNA, 25 bp, probe
aggggtaatgagctccagcccctaa

SEQ ID NO: 129929 - DNA, 25 bp, probe
agtgggtcaagacggatcaggctct

SEQ ID NO: 129930 - DNA, 25 bp, probe
agggcaccaggccagagatagtctt

SEQ ID NO: 129931 - DNA, 25 bp, probe
agggacacccaaggatatgtcttct

SEQ ID NO: 129932 - DNA, 25 bp, probe
agggaagaaacaggatggctttctg

SEQ ID NO: 129933 - DNA, 25 bp, probe
agggcattgcttacacggatgcctt

SEQ ID NO: 129934 - DNA, 25 bp, probe
agggcatggcctacatggaacgcat

SEQ ID NO: 129935 - DNA, 25 bp, probe
agggctggagcttcagcgagggctt

SEQ ID NO: 129936 - DNA, 25 bp, probe
agtggtagagcagagcctgacccta

SEQ ID NO: 129937 - DNA, 25 bp, probe
agggattgctggcatgctgtaccct

SEQ ID NO: 129938 - DNA, 25 bp, probe
agggatagctgggtggtgacctctt

SEQ ID NO: 129939 - DNA, 25 bp, probe
agggtaggcctgatgacagccctgt

SEQ ID NO: 129940 - DNA, 25 bp, probe
agggtaacactgatgacttgctcat

SEQ ID NO: 129941 - DNA, 25 bp, probe
agtcaataaagtctggtgcctcatt

SEQ ID NO: 129942 - DNA, 25 bp, probe
agtcaataaagtctggtgcctcatt

SEQ ID NO: 129943 - DNA, 25 bp, probe
agttagaaatctccagtgtgcgttg

SEQ ID NO: 129944 - DNA, 25 bp, probe
agttagaaatctccagtgtgcgttg

SEQ ID NO: 129945 - DNA, 25 bp, probe
agggctgaaagcacaggtggcatat

SEQ ID NO: 129946 - DNA, 25 bp, probe
agggctgcaacaaccagtagctcat

SEQ ID NO: 129947 - DNA, 25 bp, probe
agggagaacatggccaatagtcata

SEQ ID NO: 129948 - DNA, 25 bp, probe
agggagaaatggccaccacatcacc

SEQ ID NO: 129949 - DNA, 25 bp, probe
agggagaaatggccaccacatcacc

SEQ ID NO: 129950 - DNA, 25 bp, probe
agggtgtcgtgaccaagagcacacc

SEQ ID NO: 129951 - DNA, 25 bp, probe
agtggttcttgacatcacacgatga

SEQ ID NO: 129952 - DNA, 25 bp, probe
agccgtgacctacatcgacgagaag

SEQ ID NO: 129953 - DNA, 25 bp, probe
agagcggaccgaccagctgaaagaa

SEQ ID NO: 129954 - DNA, 25 bp, probe
agctttgaccgctacctgaacatag

SEQ ID NO: 129955 - DNA, 25 bp, probe
agtgatgtacatccaaccgtcactg

SEQ ID NO: 129956 - DNA, 25 bp, probe
agtgttaagtatgtcgccattgttg

SEQ ID NO: 129957 - DNA, 25 bp, probe
agtgttaagtatgtcgccattgttg

SEQ ID NO: 129958 - DNA, 25 bp, probe
agagtaaagttgatcccaagcctgg

SEQ ID NO: 129959 - DNA, 25 bp, probe
agggaaaatgttgcactgaaggtgg

SEQ ID NO: 129960 - DNA, 25 bp, probe
agggaaattgctgatcatgggcggc

SEQ ID NO: 129961 - DNA, 25 bp, probe
agggaagaagatgagtggagtgtgc

SEQ ID NO: 129962 - DNA, 25 bp, probe
agggaagaagatgagtggagtgtgc

SEQ ID NO: 129963 - DNA, 25 bp, probe
aggggacaagaggctgtgggtgcag

SEQ ID NO: 129964 - DNA, 25 bp, probe
aggggagaatgggtgttgtatgggg

SEQ ID NO: 129965 - DNA, 25 bp, probe
agtggggccatgattggtttctagg

SEQ ID NO: 129966 - DNA, 25 bp, probe
agggagggattggtagctttctagg

SEQ ID NO: 129967 - DNA, 25 bp, probe
agggagggattggtagctttctagg

SEQ ID NO: 129968 - DNA, 25 bp, probe
agggggtgtgtggaacgttctgaga

SEQ ID NO: 129969 - DNA, 25 bp, probe
agggtgtggtagaacactttcaaag

SEQ ID NO: 129970 - DNA, 25 bp, probe
agtggtgggtggcacatgcttataa

SEQ ID NO: 129971 - DNA, 25 bp, probe
agtcctatgagttgcagatatgcgt

SEQ ID NO: 129972 - DNA, 25 bp, probe
agtgcagctgagcggctgtatgggc

SEQ ID NO: 129973 - DNA, 25 bp, probe
agtgcagtgatgtgatcttggctca

SEQ ID NO: 129974 - DNA, 25 bp, probe
agtcggattaaactacatcaagaag

SEQ ID NO: 129975 - DNA, 25 bp, probe
agtgggtaagaactacacaatcaag

SEQ ID NO: 129976 - DNA, 25 bp, probe
agtgggtaagaactacacaatcaag

SEQ ID NO: 129977 - DNA, 25 bp, probe
agtgggtaagaactacacaatcaag

SEQ ID NO: 129978 - DNA, 25 bp, probe
aggggttaaattgtgcttccaggca

SEQ ID NO: 129979 - DNA, 25 bp, probe
aggggttaaattgtgcttccaggca

SEQ ID NO: 129980 - DNA, 25 bp, probe
agggagttaaatacctgtgcatccc

SEQ ID NO: 129981 - DNA, 25 bp, probe
agtggcagttatgtgtcctgcaccc

SEQ ID NO: 129982 - DNA, 25 bp, probe
agggcagagtacaagcccagcaccc

SEQ ID NO: 129983 - DNA, 25 bp, probe
agtgagctgagatcgtgccactgca

SEQ ID NO: 129984 - DNA, 25 bp, probe
agtggtggtacagtggcagaggcag

SEQ ID NO: 129985 - DNA, 25 bp, probe
agggtgatgtgaagatggcagactt

SEQ ID NO: 129986 - DNA, 25 bp, probe
agggtgatgtgaagatggcagactt

SEQ ID NO: 129987 - DNA, 25 bp, probe
agggctgctgtgagatggaattcca

SEQ ID NO: 129988 - DNA, 25 bp, probe
agtgtcatcttgtgggcattataca

SEQ ID NO: 129989 - DNA, 25 bp, probe
agtgtatatgttaggctttgtgagc

SEQ ID NO: 129990 - DNA, 25 bp, probe
agtgtgaagtctgacatttggagtc

SEQ ID NO: 129991 - DNA, 25 bp, probe
agtggagcttctgagggatgcaggt

SEQ ID NO: 129992 - DNA, 25 bp, probe
agggagatattcaacaggagggcgg

SEQ ID NO: 129993 - DNA, 25 bp, probe
agggagatttaagtacattggccaa

SEQ ID NO: 129994 - DNA, 25 bp, probe
aggggatcctatggttatgtgtgcc

SEQ ID NO: 129995 - DNA, 25 bp, probe
agtgaatgttcctgtttgatgtgac

SEQ ID NO: 129996 - DNA, 25 bp, probe
agggatattgccttatttgtctgta

SEQ ID NO: 129997 - DNA, 25 bp, probe
agggatattgccttatttgtctgta

SEQ ID NO: 129998 - DNA, 25 bp, probe
agggtattgatgtttcttgtggata

SEQ ID NO: 129999 - DNA, 25 bp, probe
agggctcattaagccttttggacac

SEQ ID NO: 130000 - DNA, 25 bp, probe
agggtttaggcatcattttgagaat

SEQ ID NO: 130001 - DNA, 25 bp, probe
agggatattaggatattgctcaaaa

SEQ ID NO: 130002 - DNA, 25 bp, probe
gggaaaaaggtgctctccagtaact

SEQ ID NO: 130003 - DNA, 25 bp, probe
agtgcaaaaatgtggtcccagtgta

SEQ ID NO: 130004 - DNA, 25 bp, probe
agtattaatgcgttggcccacgtag

SEQ ID NO: 130005 - DNA, 25 bp, probe
agtgttaatctttgtgctatatggt

SEQ ID NO: 130006 - DNA, 25 bp, probe
agtgtgtttctttctaaattgctgt

SEQ ID NO: 130007 - DNA, 25 bp, probe
agggtttgctatagggtttgctctg

SEQ ID NO: 130008 - DNA, 25 bp, probe
agggtttgctatagggtttgctctg

SEQ ID NO: 130009 - DNA, 25 bp, probe
agggctgttggaagtagctgttagc

SEQ ID NO: 130010 - DNA, 25 bp, probe
agggcttcatgggaattcatttcac

SEQ ID NO: 130011 - DNA, 25 bp, probe
agtgagttctaccaatgtattgtcc

SEQ ID NO: 130012 - DNA, 25 bp, probe
agtggtcgcttactttgagtgatcc

SEQ ID NO: 130013 - DNA, 25 bp, probe
agtgttcaaagccattgggcttcct

SEQ ID NO: 130014 - DNA, 25 bp, probe
agtgtgcaaacctttcgagactcct

SEQ ID NO: 130015 - DNA, 25 bp, probe
agggatagtcactggctggactcct

SEQ ID NO: 130016 - DNA, 25 bp, probe
agggttgtgtcttcagtggcaccct

SEQ ID NO: 130017 - DNA, 25 bp, probe
agggccaggatttgaggctgcccca

SEQ ID NO: 130018 - DNA, 25 bp, probe
agggctgcacagtccagagggaccc

SEQ ID NO: 130019 - DNA, 25 bp, probe
agggctgcacagtccagagggaccc

SEQ ID NO: 130020 - DNA, 25 bp, probe
agtgatgaccgtccagaggggtgcc

SEQ ID NO: 130021 - DNA, 25 bp, probe
agtggaccagacgagtggggatcag

SEQ ID NO: 130022 - DNA, 25 bp, probe
agtggactcagtgggttaacatcag

SEQ ID NO: 130023 - DNA, 25 bp, probe
agggactccagtggggaactcagca

SEQ ID NO: 130024 - DNA, 25 bp, probe
agtggtcctggtgggagaccacgcc

SEQ ID NO: 130025 - DNA, 25 bp, probe
agggtcgggaagggacatgccaggc

SEQ ID NO: 130026 - DNA, 25 bp, probe
agggtcgggaagggacatgccaggc

SEQ ID NO: 130027 - DNA, 25 bp, probe
agggccagagtgtgtatacccaggc

SEQ ID NO: 130028 - DNA, 25 bp, probe
agggccagagccatgtctatgccct

SEQ ID NO: 130029 - DNA, 25 bp, probe
agggctctgtccatgaattcccaat

SEQ ID NO: 130030 - DNA, 25 bp, probe
agggctcttccagatgaggcccaaa

SEQ ID NO: 130031 - DNA, 25 bp, probe
agtgtccggccagagtggcttacaa

SEQ ID NO: 130032 - DNA, 25 bp, probe
gagtagccggccagtcgaggctaca

SEQ ID NO: 130033 - DNA, 25 bp, probe
agtgggcgttcaagtctagtcgagc

SEQ ID NO: 130034 - DNA, 25 bp, probe
agtgggagttcaaggcgcccatgag

SEQ ID NO: 130035 - DNA, 25 bp, probe
agtgggagttcaaggcgcccatgag

SEQ ID NO: 130036 - DNA, 25 bp, probe
agtgcattagtagaagccacctggc

SEQ ID NO: 130037 - DNA, 25 bp, probe
agatcaaagttctaagaagctggtg

SEQ ID NO: 130038 - DNA, 25 bp, probe
agtcgggagctctggcaagctatag

SEQ ID NO: 130039 - DNA, 25 bp, probe
agtcagggagttaaacagcagcaac

SEQ ID NO: 130040 - DNA, 25 bp, probe
agtgctggagatgttcgactggaac

SEQ ID NO: 130041 - DNA, 25 bp, probe
agtgaacactgcttctcgaatggag

SEQ ID NO: 130042 - DNA, 25 bp, probe
agggaaactgtctaggattcagctg

SEQ ID NO: 130043 - DNA, 25 bp, probe
agtggagctactgctgtggttcagg

SEQ ID NO: 130044 - DNA, 25 bp, probe
agggagctgaattcgtgccagtgca

SEQ ID NO: 130045 - DNA, 25 bp, probe
agggaggactcattgcatacagatc

SEQ ID NO: 130046 - DNA, 25 bp, probe
agggagacactctatctgtaatcca

SEQ ID NO: 130047 - DNA, 25 bp, probe
agggagagctgcttaatgtgcttta

SEQ ID NO: 130048 - DNA, 25 bp, probe
agtggtgatgcctaaaggaatgtca

SEQ ID NO: 130049 - DNA, 25 bp, probe
agtgattgagccacaagtatactga

SEQ ID NO: 130050 - DNA, 25 bp, probe
agtggttgccaaaagtggagcgagg

SEQ ID NO: 130051 - DNA, 25 bp, probe
agtggttccgtgaatgggagcccct

SEQ ID NO: 130052 - DNA, 25 bp, probe
agggttcctcattaagaactcctgt

SEQ ID NO: 130053 - DNA, 25 bp, probe
agggtcttccatgaagaatctccag

SEQ ID NO: 130054 - DNA, 25 bp, probe
agggctttcaagcagagcacattcc

SEQ ID NO: 130055 - DNA, 25 bp, probe
agtggattaccactgagacatccat

SEQ ID NO: 130056 - DNA, 25 bp, probe
agggactaacatcgaagcatctgaa

SEQ ID NO: 130057 - DNA, 25 bp, probe
agtgtgacccacagtgactctgaga

SEQ ID NO: 130058 - DNA, 25 bp, probe
agtgtgacccacagtgactctgaga

SEQ ID NO: 130059 - DNA, 25 bp, probe
agcttaccccaaaagattagccttg

SEQ ID NO: 130060 - DNA, 25 bp, probe
agtgttccccaagaggatggccatg

SEQ ID NO: 130061 - DNA, 25 bp, probe
agtgttttgtaataaatggcctgat

SEQ ID NO: 130062 - DNA, 25 bp, probe
agggctttggccttaaaggcgctgt

SEQ ID NO: 130063 - DNA, 25 bp, probe
agccctttagggctacagtctcttg

SEQ ID NO: 130064 - DNA, 25 bp, probe
agaccatttagagcccaatttgtgg

SEQ ID NO: 130065 - DNA, 25 bp, probe
agatgacatttagccctaagattgg

SEQ ID NO: 130066 - DNA, 25 bp, probe
agtgagaatttcttccttcagacgg

SEQ ID NO: 130067 - DNA, 25 bp, probe
agtctcttttcatactggctgttgg

SEQ ID NO: 130068 - DNA, 25 bp, probe
agtctcttttcatactggctgttgg

SEQ ID NO: 130069 - DNA, 25 bp, probe
agtgtcctggctgtttggtgattgg

SEQ ID NO: 130070 - DNA, 25 bp, probe
agtgtcctggctgtttggtgattgg

SEQ ID NO: 130071 - DNA, 25 bp, probe
agtgtcctggctgtttggtgattgg

SEQ ID NO: 130072 - DNA, 25 bp, probe
agtggcctggctgatttgaataaat

SEQ ID NO: 130073 - DNA, 25 bp, probe
agggtctggattattgtcataagaa

SEQ ID NO: 130074 - DNA, 25 bp, probe
agggtctgacaagttctgctatgaa

SEQ ID NO: 130075 - DNA, 25 bp, probe
agtgcagtctacaacttcaccaaat

SEQ ID NO: 130076 - DNA, 25 bp, probe
agtggtcccaaaccaacacaacagt

SEQ ID NO: 130077 - DNA, 25 bp, probe
agtggtcccaaaccaacacaacagt

SEQ ID NO: 130078 - DNA, 25 bp, probe
agatggtcctgggattcgaacaccg

SEQ ID NO: 130079 - DNA, 25 bp, probe
agatggtcctgggattcgaacaccg

SEQ ID NO: 130080 - DNA, 25 bp, probe
agatggtcctgggattcgaacaccg

SEQ ID NO: 130081 - DNA, 25 bp, probe
agatggtcctgggattcgaacaccg

SEQ ID NO: 130082 - DNA, 25 bp, probe
agatggtcctgggattcgaacaccg

SEQ ID NO: 130083 - DNA, 25 bp, probe
agggtgctgtgtgtgacatagacac

SEQ ID NO: 130084 - DNA, 25 bp, probe
agtgttgactgtgtcattagtcctt

SEQ ID NO: 130085 - DNA, 25 bp, probe
agtgttgtcattctgtaggtctcat

SEQ ID NO: 130086 - DNA, 25 bp, probe
agtgaagtatggctgtaagtctcat

SEQ ID NO: 130087 - DNA, 25 bp, probe
agtgacttagggctaggaacattct

SEQ ID NO: 130088 - DNA, 25 bp, probe
agtacttctgggggaagaatgctct

SEQ ID NO: 130089 - DNA, 25 bp, probe
agtcccactggatggcaagggcacg

SEQ ID NO: 130090 - DNA, 25 bp, probe
agtcccgggacaacagcagggacag

SEQ ID NO: 130091 - DNA, 25 bp, probe
agtcctctggaatccgagtgggctc

SEQ ID NO: 130092 - DNA, 25 bp, probe
agttgtcagtcagagccgttggtgt

SEQ ID NO: 130093 - DNA, 25 bp, probe
agtgagccacgagagcctggtagtg

SEQ ID NO: 130094 - DNA, 25 bp, probe
agtggctgccagtagcagactgtta

SEQ ID NO: 130095 - DNA, 25 bp, probe
agtggtgccagttgccagggcaagt

SEQ ID NO: 130096 - DNA, 25 bp, probe
agtgtggtagcttgctcaacaggtg

SEQ ID NO: 130097 - DNA, 25 bp, probe
agtgtggggctgaccccaatgctgc

SEQ ID NO: 130098 - DNA, 25 bp, probe
agtgtggggctgaccccaatgctgc

SEQ ID NO: 130099 - DNA, 25 bp, probe
agtgtggggctgaccccaatgctgc

SEQ ID NO: 130100 - DNA, 25 bp, probe
agtgagatgtttgctgcacccatgg

SEQ ID NO: 130101 - DNA, 25 bp, probe
agtgagatgtttgctgcacccatgg

SEQ ID NO: 130102 - DNA, 25 bp, probe
agtgagatgtttgctgcacccatgg

SEQ ID NO: 130103 - DNA, 25 bp, probe
agtgaggacgccgatgacctatgaa

SEQ ID NO: 130104 - DNA, 25 bp, probe
agtgcagtgggcagaatacttctca

SEQ ID NO: 130105 - DNA, 25 bp, probe
agtgcagtgggcagaatacttctca

SEQ ID NO: 130106 - DNA, 25 bp, probe
agtgaggaatgctgcctattccctc

SEQ ID NO: 130107 - DNA, 25 bp, probe
agtgagcagtatttccacaaccacc

SEQ ID NO: 130108 - DNA, 25 bp, probe
agtgcaggcattactaaaagaacca

SEQ ID NO: 130109 - DNA, 25 bp, probe
agtggagcattggctgagagaccag

SEQ ID NO: 130110 - DNA, 25 bp, probe
agtgggaggacgtagagcagagaag

SEQ ID NO: 130111 - DNA, 25 bp, probe
agggctgtggagtgaggccagtaag

SEQ ID NO: 130112 - DNA, 25 bp, probe
agggcagggagcatgagcctcattt

SEQ ID NO: 130113 - DNA, 25 bp, probe
agggcagggatttgtgcatcttatt

SEQ ID NO: 130114 - DNA, 25 bp, probe
agggcatgaggtcagaccaggattt

SEQ ID NO: 130115 - DNA, 25 bp, probe
agggctacgtcaagatcgcagactt

SEQ ID NO: 130116 - DNA, 25 bp, probe
agggatgccagtaagtctgcaggtg

SEQ ID NO: 130117 - DNA, 25 bp, probe
agggaacatgtgtatgtcataagga

SEQ ID NO: 130118 - DNA, 25 bp, probe
agggcatacatggtgattctcctgc

SEQ ID NO: 130119 - DNA, 25 bp, probe
agggcatacatggtgattctcctgc

SEQ ID NO: 130120 - DNA, 25 bp, probe
agggcagcacatagggcttcacatg

SEQ ID NO: 130121 - DNA, 25 bp, probe
agtggcacaatactgctcactgcag

SEQ ID NO: 130122 - DNA, 25 bp, probe
gaggctatatcatggccacatcctt

SEQ ID NO: 130123 - DNA, 25 bp, probe
agtgtgagcatcgggctttgcagtc

SEQ ID NO: 130124 - DNA, 25 bp, probe
agtgtgcagacagccatgcgtggcc

SEQ ID NO: 130125 - DNA, 25 bp, probe
agtgtgcagacagccatgcgtggcc

SEQ ID NO: 130126 - DNA, 25 bp, probe
agggatgaagacctgcagtgagccc

SEQ ID NO: 130127 - DNA, 25 bp, probe
agtgtgagaagaggggtggcccccg

SEQ ID NO: 130128 - DNA, 25 bp, probe
agttggaagggaccccagatacctg

SEQ ID NO: 130129 - DNA, 25 bp, probe
agggcaaaggagagcaaacaacttt

SEQ ID NO: 130130 - DNA, 25 bp, probe
agggaaatgacagggcaaagcaatt

SEQ ID NO: 130131 - DNA, 25 bp, probe
agtgtaaatggaaggcaaagcatca

SEQ ID NO: 130132 - DNA, 25 bp, probe
agtggaagaagtttgccaagcacat

SEQ ID NO: 130133 - DNA, 25 bp, probe
agtggaagaagtttgccaagcacat

SEQ ID NO: 130134 - DNA, 25 bp, probe
agtggggaactcagcaaatactcag

SEQ ID NO: 130135 - DNA, 25 bp, probe
agggcaagaactataaacactcatt

SEQ ID NO: 130136 - DNA, 25 bp, probe
agggcagaggaatgtagggcctgca

SEQ ID NO: 130137 - DNA, 25 bp, probe
agtggaagtatctgctatgggacta

SEQ ID NO: 130138 - DNA, 25 bp, probe
agggaagctctatctgggaactcac

SEQ ID NO: 130139 - DNA, 25 bp, probe
agtgaagggcaatcagggcagactg

SEQ ID NO: 130140 - DNA, 25 bp, probe
agtggtccgcaagatgggagacaag

SEQ ID NO: 130141 - DNA, 25 bp, probe
agtggctcccagtgtgggctacata

SEQ ID NO: 130142 - DNA, 25 bp, probe
agtggttccgcaagctggcggactt

SEQ ID NO: 130143 - DNA, 25 bp, probe
agtggttccgcaagctggcggactt

SEQ ID NO: 130144 - DNA, 25 bp, probe
agtccactttattctggggcactgt

SEQ ID NO: 130145 - DNA, 25 bp, probe
agtccactttgacttcgtactgtct

SEQ ID NO: 130146 - DNA, 25 bp, probe
agttcaactggactttggcctacaa

SEQ ID NO: 130147 - DNA, 25 bp, probe
agttaaggccaaatatcccaaacag

SEQ ID NO: 130148 - DNA, 25 bp, probe
agttaaggccaaatatcccaaacag

SEQ ID NO: 130149 - DNA, 25 bp, probe
agttccaggttgatatcacctacac

SEQ ID NO: 130150 - DNA, 25 bp, probe
agttatttattgggaacccctgcag

SEQ ID NO: 130151 - DNA, 25 bp, probe
agttggatttcgagaatgccttcta

SEQ ID NO: 130152 - DNA, 25 bp, probe
agttggatttcgagaatgccttcta

SEQ ID NO: 130153 - DNA, 25 bp, probe
agttgggttggtcacagccttgtga

SEQ ID NO: 130154 - DNA, 25 bp, probe
agtctgggttgtagagaactctttg

SEQ ID NO: 130155 - DNA, 25 bp, probe
agtggggatttgtaagacttagatg

SEQ ID NO: 130156 - DNA, 25 bp, probe
agtactgcgatgaggggactttaga

SEQ ID NO: 130157 - DNA, 25 bp, probe
agtggctgagtgcagctgagcggct

SEQ ID NO: 130158 - DNA, 25 bp, probe
agtggcgactgcacagaatggctga

SEQ ID NO: 130159 - DNA, 25 bp, probe
agtggcgcagtctgaatggcggcac

SEQ ID NO: 130160 - DNA, 25 bp, probe
agggcagcaatgttgaagtgaccat

SEQ ID NO: 130161 - DNA, 25 bp, probe
agggcgcatatggaacggctctcag

SEQ ID NO: 130162 - DNA, 25 bp, probe
agggccagatcggggcgcccatgcc

SEQ ID NO: 130163 - DNA, 25 bp, probe
agggcctatcgtgggagagcctggg

SEQ ID NO: 130164 - DNA, 25 bp, probe
agggcactcaaatgtggcacctggt

SEQ ID NO: 130165 - DNA, 25 bp, probe
agggcttgatagacctggcactgcc

SEQ ID NO: 130166 - DNA, 25 bp, probe
agggcttgatagacctggcactgcc

SEQ ID NO: 130167 - DNA, 25 bp, probe
agggccgtgatgacctgagacaaga

SEQ ID NO: 130168 - DNA, 25 bp, probe
agggccaaagaccattgcagagatg

SEQ ID NO: 130169 - DNA, 25 bp, probe
agggccaaagaccattgcagagatg

SEQ ID NO: 130170 - DNA, 25 bp, probe
agggccatcaaactcattgtcactg

SEQ ID NO: 130171 - DNA, 25 bp, probe
agggactccaagtcaagtgaaggac

SEQ ID NO: 130172 - DNA, 25 bp, probe
agggactggtggtcaagattggtga

SEQ ID NO: 130173 - DNA, 25 bp, probe
agggacctcatttcaagactgttga

SEQ ID NO: 130174 - DNA, 25 bp, probe
agtgagaaaagttcaatactcttga

SEQ ID NO: 130175 - DNA, 25 bp, probe
agggcaagtaggtatataatttgat

SEQ ID NO: 130176 - DNA, 25 bp, probe
agggcatttagaggaagaaggctga

SEQ ID NO: 130177 - DNA, 25 bp, probe
agggaaataagcaaagagggcaatc

SEQ ID NO: 130178 - DNA, 25 bp, probe
agaggaaaggacatgggtagcaatt

SEQ ID NO: 130179 - DNA, 25 bp, probe
agggaataccacagtcattagcctt

SEQ ID NO: 130180 - DNA, 25 bp, probe
agaaataacccagacttaatcttga

SEQ ID NO: 130181 - DNA, 25 bp, probe
acagcaaaccccaaatcttcaaagt

SEQ ID NO: 130182 - DNA, 25 bp, probe
aacaaaggccgagcgttatatagca

SEQ ID NO: 130183 - DNA, 25 bp, probe
agatatctaccgggccagttattac

SEQ ID NO: 130184 - DNA, 25 bp, probe
agttttcgcagcaccaggctagtaa

SEQ ID NO: 130185 - DNA, 25 bp, probe
agtgttactgaatcttagtatgcta

SEQ ID NO: 130186 - DNA, 25 bp, probe
agtgggactcactctgaagtatgtg

SEQ ID NO: 130187 - DNA, 25 bp, probe
agtgggactcactctgaagtatgtg

SEQ ID NO: 130188 - DNA, 25 bp, probe
agtgggaacacatcaatctgggctg

SEQ ID NO: 130189 - DNA, 25 bp, probe
agtgtggagccttacatactgggag

SEQ ID NO: 130190 - DNA, 25 bp, probe
agtgtggaagatgacaaggagggtc

SEQ ID NO: 130191 - DNA, 25 bp, probe
agtggcgacgatgaacatgccgttg

SEQ ID NO: 130192 - DNA, 25 bp, probe
agtggctagccattaaaggtgttgc

SEQ ID NO: 130193 - DNA, 25 bp, probe
agggcaagctcatagcacatgtttt

SEQ ID NO: 130194 - DNA, 25 bp, probe
agggcaagctcatagcacatgtttt

SEQ ID NO: 130195 - DNA, 25 bp, probe
agggaagcataaagccttctctacg

SEQ ID NO: 130196 - DNA, 25 bp, probe
agggcagaagcaaagccttctccac

SEQ ID NO: 130197 - DNA, 25 bp, probe
agggcaacacaaggacatggtgcgc

SEQ ID NO: 130198 - DNA, 25 bp, probe
agggaacaggattgtatggcagcct

SEQ ID NO: 130199 - DNA, 25 bp, probe
agggagaaggttgcagagcacttcc

SEQ ID NO: 130200 - DNA, 25 bp, probe
agggcgacaattaggagagccagaa

SEQ ID NO: 130201 - DNA, 25 bp, probe
agtggcagagaatttgtaacctgat

SEQ ID NO: 130202 - DNA, 25 bp, probe
agtgaggcagactttcaataaggag

SEQ ID NO: 130203 - DNA, 25 bp, probe
agtggcgatgactttatttgcggag

SEQ ID NO: 130204 - DNA, 25 bp, probe
agggcatgaagcctttttcctggtc

SEQ ID NO: 130205 - DNA, 25 bp, probe
agagcagcaggtgttacccaaggtc

SEQ ID NO: 130206 - DNA, 25 bp, probe
agggcatggctgggaacccaagtcc

SEQ ID NO: 130207 - DNA, 25 bp, probe
agggagagtgggaaccactacgcca

SEQ ID NO: 130208 - DNA, 25 bp, probe
agtggagaggatgtaacacgccccc

SEQ ID NO: 130209 - DNA, 25 bp, probe
agtagtagactggatacaccccgac

SEQ ID NO: 130210 - DNA, 25 bp, probe
agtgaggacctggagttggcctccc

SEQ ID NO: 130211 - DNA, 25 bp, probe
agtggtggcgtgggaatggctgccc

SEQ ID NO: 130212 - DNA, 25 bp, probe
agtggaggtctgagaatgacgatac

SEQ ID NO: 130213 - DNA, 25 bp, probe
agtcggcgtctgttccaacagatcc

SEQ ID NO: 130214 - DNA, 25 bp, probe
agtgaggaagctttgccattagatc

SEQ ID NO: 130215 - DNA, 25 bp, probe
agtggcagaacgtgcacttccactg

SEQ ID NO: 130216 - DNA, 25 bp, probe
agtggcagaacgtgcacttccactg

SEQ ID NO: 130217 - DNA, 25 bp, probe
agtggcagaacgtgcacttccactg

SEQ ID NO: 130218 - DNA, 25 bp, probe
agggcagtacagtggcttcaagagt

SEQ ID NO: 130219 - DNA, 25 bp, probe
agggcagtacagtggcttcaagagt

SEQ ID NO: 130220 - DNA, 25 bp, probe
agggcagtgagggggttgatgggct

SEQ ID NO: 130221 - DNA, 25 bp, probe
agtgtttgggtgggtgtcatgggtg

SEQ ID NO: 130222 - DNA, 25 bp, probe
agtgtttctagggtgtagctgggta

SEQ ID NO: 130223 - DNA, 25 bp, probe
agtgcttccgggtgggcatgaggaa

SEQ ID NO: 130224 - DNA, 25 bp, probe
agtgctgaacagtggaggaagaggg

SEQ ID NO: 130225 - DNA, 25 bp, probe
agtgacaaagtcaacaggcaaggta

SEQ ID NO: 130226 - DNA, 25 bp, probe
agtgatcaacccagagacgggcgag

SEQ ID NO: 130227 - DNA, 25 bp, probe
agtgaaggcaccatgctgaagcggc

SEQ ID NO: 130228 - DNA, 25 bp, probe
agtgcaagagcccttcgtgggagct

SEQ ID NO: 130229 - DNA, 25 bp, probe
agtgagaatgctctacggaaacata

SEQ ID NO: 130230 - DNA, 25 bp, probe
agtggcctgcattgtacccactaat

SEQ ID NO: 130231 - DNA, 25 bp, probe
agtggcctgcattgtacccactaat

SEQ ID NO: 130232 - DNA, 25 bp, probe
agtgtgcacatgtgttacccataaa

SEQ ID NO: 130233 - DNA, 25 bp, probe
agtggaaacttctcccaagtgaagc

SEQ ID NO: 130234 - DNA, 25 bp, probe
agtaaatagctttttcaaagtgcaa

SEQ ID NO: 130235 - DNA, 25 bp, probe
agtacatccacctgtgtaataggaa

SEQ ID NO: 130236 - DNA, 25 bp, probe
agtgtccctccttggtgaatttgag

SEQ ID NO: 130237 - DNA, 25 bp, probe
agtgttttatgctgggaatctaggg

SEQ ID NO: 130238 - DNA, 25 bp, probe
agaggatactactgggaaggggatg

SEQ ID NO: 130239 - DNA, 25 bp, probe
agaggatactactgggaaggggatg

SEQ ID NO: 130240 - DNA, 25 bp, probe
agtgtcatagtggcccggaaggggt

SEQ ID NO: 130241 - DNA, 25 bp, probe
agtgcctgagacgcggagacatggc

SEQ ID NO: 130242 - DNA, 25 bp, probe
agtgactggagacagggatgatgga

SEQ ID NO: 130243 - DNA, 25 bp, probe
agggccaggggagtggagagagctc

SEQ ID NO: 130244 - DNA, 25 bp, probe
agggccagagcaagcgctgtaaacc

SEQ ID NO: 130245 - DNA, 25 bp, probe
agtggctggatcagcagctgcagaa

SEQ ID NO: 130246 - DNA, 25 bp, probe
agtggcggcatgaagctccaggaac

SEQ ID NO: 130247 - DNA, 25 bp, probe
agtgtggctgtgaagtgccttaagc

SEQ ID NO: 130248 - DNA, 25 bp, probe
agtgtgtgctcggagatgctggggc

SEQ ID NO: 130249 - DNA, 25 bp, probe
agtctggtgccagcagccgcggtaa

SEQ ID NO: 130250 - DNA, 25 bp, probe
agtgttgtgtatgtgtctgggtaac

SEQ ID NO: 130251 - DNA, 25 bp, probe
agtgccattgcctgtttgggagaca

SEQ ID NO: 130252 - DNA, 25 bp, probe
agtgccattgcctgtttgggagaca

SEQ ID NO: 130253 - DNA, 25 bp, probe
agatgccattgctgaaatccgacga

SEQ ID NO: 130254 - DNA, 25 bp, probe
agtgactattagccactgccagaaa

SEQ ID NO: 130255 - DNA, 25 bp, probe
agtgactattagccactgccagaaa

SEQ ID NO: 130256 - DNA, 25 bp, probe
agtggtgtctagcccatgggagaac

SEQ ID NO: 130257 - DNA, 25 bp, probe
agtggtaccagcccatgaacaaatt

SEQ ID NO: 130258 - DNA, 25 bp, probe
agtggatagaacgcaaacaacttga

SEQ ID NO: 130259 - DNA, 25 bp, probe
agtggtcaggaaaagtgcaaacttg

SEQ ID NO: 130260 - DNA, 25 bp, probe
agggccggagttagagaggcctctg

SEQ ID NO: 130261 - DNA, 25 bp, probe
agggccggcagtaggtggggcctgt

SEQ ID NO: 130262 - DNA, 25 bp, probe
agggctctgtgagaggtggggcagt

SEQ ID NO: 130263 - DNA, 25 bp, probe
agggctttgctcgagctgtgcggaa

SEQ ID NO: 130264 - DNA, 25 bp, probe
agggcacattgcccatggctgggaa

SEQ ID NO: 130265 - DNA, 25 bp, probe
agtgccgattgtctggatgtggaag

SEQ ID NO: 130266 - DNA, 25 bp, probe
agtgccgattgtctggatgtggaag

SEQ ID NO: 130267 - DNA, 25 bp, probe
agtgcccctgtgggatgggaggagt

SEQ ID NO: 130268 - DNA, 25 bp, probe
agtgaaccttgggtgtgagggacca

SEQ ID NO: 130269 - DNA, 25 bp, probe
agtggagagtgcggcgtgggggcac

SEQ ID NO: 130270 - DNA, 25 bp, probe
agtgccaagtgcgagggggacatct

SEQ ID NO: 130271 - DNA, 25 bp, probe
agtggacagatgagggtgatgacag

SEQ ID NO: 130272 - DNA, 25 bp, probe
agtggaaatctggagactggtcaga

SEQ ID NO: 130273 - DNA, 25 bp, probe
agtggcacttcaatgagacggtgct

SEQ ID NO: 130274 - DNA, 25 bp, probe
agtgggcatgctaagggcaaggctt

SEQ ID NO: 130275 - DNA, 25 bp, probe
agtgtggctgctatgaaatgcaagc

SEQ ID NO: 130276 - DNA, 25 bp, probe
agtgtactcatcaattttaagcact

SEQ ID NO: 130277 - DNA, 25 bp, probe
agtgtcccatcttttagcaagcaca

SEQ ID NO: 130278 - DNA, 25 bp, probe
agggctctttgtatagcagaggatc

SEQ ID NO: 130279 - DNA, 25 bp, probe
agggcggtggtgatggcaagaggct

SEQ ID NO: 130280 - DNA, 25 bp, probe
agggcagcctcgttaggacaaggct

SEQ ID NO: 130281 - DNA, 25 bp, probe
agtgtgccacgcttttggacaaggc

SEQ ID NO: 130282 - DNA, 25 bp, probe
agtgatgcaccttgtgttgtaaaag

SEQ ID NO: 130283 - DNA, 25 bp, probe
agtgtgatgtgagttgttgttaaga

SEQ ID NO: 130284 - DNA, 25 bp, probe
agtgggggcatttctttatatcacc

SEQ ID NO: 130285 - DNA, 25 bp, probe
agtggtcagactgtcgtcttactcc

SEQ ID NO: 130286 - DNA, 25 bp, probe
agtcccacgtccatgtttgactatt

SEQ ID NO: 130287 - DNA, 25 bp, probe
agtcccctgtggtgttttgtcacaa

SEQ ID NO: 130288 - DNA, 25 bp, probe
agtcccctgtggtgttttgtcacaa

SEQ ID NO: 130289 - DNA, 25 bp, probe
agtccttcttggaagactacttcac

SEQ ID NO: 130290 - DNA, 25 bp, probe
agtccttcttggaagactacttcac

SEQ ID NO: 130291 - DNA, 25 bp, probe
agtccttcttaacttctagctaaca

SEQ ID NO: 130292 - DNA, 25 bp, probe
agtccttcagtaacaccagtgtaaa

SEQ ID NO: 130293 - DNA, 25 bp, probe
agtgatttggtagccctgggcaaga

SEQ ID NO: 130294 - DNA, 25 bp, probe
agtgtgttgagaagggccgagtaaa

SEQ ID NO: 130295 - DNA, 25 bp, probe
agtgagccagagtgtggcccctaaa

SEQ ID NO: 130296 - DNA, 25 bp, probe
agtacagagcggcggcctttaaact

SEQ ID NO: 130297 - DNA, 25 bp, probe
agtacagagcggcggcctttaaact

SEQ ID NO: 130298 - DNA, 25 bp, probe
agtcaccgacagcggccttgaagac

SEQ ID NO: 130299 - DNA, 25 bp, probe
agtcaccagaaactttttcaggaca

SEQ ID NO: 130300 - DNA, 25 bp, probe
agtcacaatctacttttcttaaact

SEQ ID NO: 130301 - DNA, 25 bp, probe
agtgacaatcatttttcttaaggcc

SEQ ID NO: 130302 - DNA, 25 bp, probe
agtgacaatattcttctcgggatgg

SEQ ID NO: 130303 - DNA, 25 bp, probe
agtgaagattatctacaccgtgggc

SEQ ID NO: 130304 - DNA, 25 bp, probe
agtgaagatttctgcattccggggt

SEQ ID NO: 130305 - DNA, 25 bp, probe
agaacagcttttttgtcaaggggca

SEQ ID NO: 130306 - DNA, 25 bp, probe
agacccttgtggttgactagggctg

SEQ ID NO: 130307 - DNA, 25 bp, probe
acccttgtggttgactagggctggg

SEQ ID NO: 130308 - DNA, 25 bp, probe
agcatcctggtaacctactaggtgc

SEQ ID NO: 130309 - DNA, 25 bp, probe
agcatcctggtaacctactaggtgc

SEQ ID NO: 130310 - DNA, 25 bp, probe
agtgcctggtaagttgccttgtgat

SEQ ID NO: 130311 - DNA, 25 bp, probe
agtcattggcaaaggccactttgga

SEQ ID NO: 130312 - DNA, 25 bp, probe
agtcacagtcgcagtcacctgtggg

SEQ ID NO: 130313 - DNA, 25 bp, probe
agtgcaacattgagtcggtggagga

SEQ ID NO: 130314 - DNA, 25 bp, probe
agtgctactataactcaggaggaaa

SEQ ID NO: 130315 - DNA, 25 bp, probe
agtgctactataactcaggaggaaa

SEQ ID NO: 130316 - DNA, 25 bp, probe
agtccagtctaagcagagagactga

SEQ ID NO: 130317 - DNA, 25 bp, probe
agtccaacacaatcacagcaacaga

SEQ ID NO: 130318 - DNA, 25 bp, probe
aaacaacagcgacaaaaaagtcaag

SEQ ID NO: 130319 - DNA, 25 bp, probe
agattcaaccgacagaaagaacaag

SEQ ID NO: 130320 - DNA, 25 bp, probe
agtcgttctggaccaaaggaacata

SEQ ID NO: 130321 - DNA, 25 bp, probe
agtcaatcccaacaaagacatactc

SEQ ID NO: 130322 - DNA, 25 bp, probe
agtcattgcccacggcaaagaccac

SEQ ID NO: 130323 - DNA, 25 bp, probe
agtgacaggccacttcaaaacaccc

SEQ ID NO: 130324 - DNA, 25 bp, probe
agtccaggccacctgagttatctcc

SEQ ID NO: 130325 - DNA, 25 bp, probe
agtccagacgtttcgatgaagcccg

SEQ ID NO: 130326 - DNA, 25 bp, probe
agtccagacgtttcgatgaagcccg

SEQ ID NO: 130327 - DNA, 25 bp, probe
agtccagtggctctggaagtgccct

SEQ ID NO: 130328 - DNA, 25 bp, probe
agtggagggctgagtccagcatccc

SEQ ID NO: 130329 - DNA, 25 bp, probe
agtgggaggggcccaagatctctgc

SEQ ID NO: 130330 - DNA, 25 bp, probe
agtgggaggggcccaagatctctgc

SEQ ID NO: 130331 - DNA, 25 bp, probe
agtgtgtaagggcccaaactcaggt

SEQ ID NO: 130332 - DNA, 25 bp, probe
agtggtagtgaagccagaatctcag

SEQ ID NO: 130333 - DNA, 25 bp, probe
agtggataagattacacagattata

SEQ ID NO: 130334 - DNA, 25 bp, probe
agtggatacctctagtgcaatttat

SEQ ID NO: 130335 - DNA, 25 bp, probe
agtgggaatcaggattgtgctttat

SEQ ID NO: 130336 - DNA, 25 bp, probe
agtgggaacacctattggttctcct

SEQ ID NO: 130337 - DNA, 25 bp, probe
agtgagcaacaagcctgggtttccc

SEQ ID NO: 130338 - DNA, 25 bp, probe
agtagggcagagagggcctttcctg

SEQ ID NO: 130339 - DNA, 25 bp, probe
acaaagtggaggcctcgttttcctg

SEQ ID NO: 130340 - DNA, 25 bp, probe
agtaattggcagggtggtgttttct

SEQ ID NO: 130341 - DNA, 25 bp, probe
agtacaaggcatggcgtagagggtg

SEQ ID NO: 130342 - DNA, 25 bp, probe
agtacacattctctgtggactggtg

SEQ ID NO: 130343 - DNA, 25 bp, probe
agtcccagatctcggtgaacgtgga

SEQ ID NO: 130344 - DNA, 25 bp, probe
agtcccagatctcggtgaacgtgga

SEQ ID NO: 130345 - DNA, 25 bp, probe
agtggacatgacagggaacaggaag

SEQ ID NO: 130346 - DNA, 25 bp, probe
agaggactgtgtggggaacttgacc

SEQ ID NO: 130347 - DNA, 25 bp, probe
agtggagcctgcggcttaatttgac

SEQ ID NO: 130348 - DNA, 25 bp, probe
agggcagcacagggaatatttttgt

SEQ ID NO: 130349 - DNA, 25 bp, probe
agggccagtgggagttagctgtgta

SEQ ID NO: 130350 - DNA, 25 bp, probe
agggccaggtgacaggtgatgaggt

SEQ ID NO: 130351 - DNA, 25 bp, probe
agtggtcagctgggcaagtggaagg

SEQ ID NO: 130352 - DNA, 25 bp, probe
agtgggctgctaacacttgggaggg

SEQ ID NO: 130353 - DNA, 25 bp, probe
agctgagttgttaaccagtcgggag

SEQ ID NO: 130354 - DNA, 25 bp, probe
agtgaacatcttaagcagcgtcgag

SEQ ID NO: 130355 - DNA, 25 bp, probe
agtgataacttcgaagccatagggt

SEQ ID NO: 130356 - DNA, 25 bp, probe
agtgacgacttcgatagtagatgat

SEQ ID NO: 130357 - DNA, 25 bp, probe
agtgaacaatactttgtaatttatg

SEQ ID NO: 130358 - DNA, 25 bp, probe
agtgccagaattttaggaacttcag

SEQ ID NO: 130359 - DNA, 25 bp, probe
agtggagagaatggtcgggtggtca

SEQ ID NO: 130360 - DNA, 25 bp, probe
agtgcgaaaacgtgctgctgagccc

SEQ ID NO: 130361 - DNA, 25 bp, probe
agtgcgaaaacgtgctgctgagccc

SEQ ID NO: 130362 - DNA, 25 bp, probe
agtggagagaactgattgtgagctc

SEQ ID NO: 130363 - DNA, 25 bp, probe
agtggacagaacatgctgtgttcca

SEQ ID NO: 130364 - DNA, 25 bp, probe
agtgcgtatgaaagtgtgtgtctgc

SEQ ID NO: 130365 - DNA, 25 bp, probe
agtgacttgatttggtttctgttgt

SEQ ID NO: 130366 - DNA, 25 bp, probe
agtgacttgatttggtttctgttgt

SEQ ID NO: 130367 - DNA, 25 bp, probe
agtgtttttggtttgtgtatatata

SEQ ID NO: 130368 - DNA, 25 bp, probe
agtgttgttttgagtctgttattat

SEQ ID NO: 130369 - DNA, 25 bp, probe
agtgattgttttccagttatttctg

SEQ ID NO: 130370 - DNA, 25 bp, probe
agtgtatgtctttacattaactact

SEQ ID NO: 130371 - DNA, 25 bp, probe
agtgttgtcttattcctaattcctg

SEQ ID NO: 130372 - DNA, 25 bp, probe
agtgttgtcttattcctaattcctg

SEQ ID NO: 130373 - DNA, 25 bp, probe
agtttgctttgctgaccaaatgcct

SEQ ID NO: 130374 - DNA, 25 bp, probe
agtcgaccgagcttaccaaattcat

SEQ ID NO: 130375 - DNA, 25 bp, probe
agtgccacctgagttccaaatttta

SEQ ID NO: 130376 - DNA, 25 bp, probe
agtccaccttcatttaactctttga

SEQ ID NO: 130377 - DNA, 25 bp, probe
agtgtcacctcaaatgcaatacttt

SEQ ID NO: 130378 - DNA, 25 bp, probe
agtgtgcaaacaagttagagctggc

SEQ ID NO: 130379 - DNA, 25 bp, probe
agtgtgactgactaccttgacttga

SEQ ID NO: 130380 - DNA, 25 bp, probe
agtgtacatatctgccaatgccgga

SEQ ID NO: 130381 - DNA, 25 bp, probe
agtgtacatatctgccaatgccgga

SEQ ID NO: 130382 - DNA, 25 bp, probe
agtgtgcacagtgcagccaagcctg

SEQ ID NO: 130383 - DNA, 25 bp, probe
agtgctgatcatgcacggaggcctg

SEQ ID NO: 130384 - DNA, 25 bp, probe
agtcatgatcatgtccttacactcc

SEQ ID NO: 130385 - DNA, 25 bp, probe
agtcatgatcatgtccttacactcc

SEQ ID NO: 130386 - DNA, 25 bp, probe
agtgcatgctgtgctttttcacatt

SEQ ID NO: 130387 - DNA, 25 bp, probe
agtgcatgtgtgttgatttacctgt

SEQ ID NO: 130388 - DNA, 25 bp, probe
agtggagacggaatctgccgctttg

SEQ ID NO: 130389 - DNA, 25 bp, probe
agtgggggagatggcagacgctttc

SEQ ID NO: 130390 - DNA, 25 bp, probe
agtgggcggagaagatccctggctt

SEQ ID NO: 130391 - DNA, 25 bp, probe
agggctcggagaagaacctgcactt

SEQ ID NO: 130392 - DNA, 25 bp, probe
agggctcgaagaaagccgtgactaa

SEQ ID NO: 130393 - DNA, 25 bp, probe
agtgttcagaagagatccagtgaaa

SEQ ID NO: 130394 - DNA, 25 bp, probe
agtgttcagaagagatccagtgaaa

SEQ ID NO: 130395 - DNA, 25 bp, probe
agtgcttgcagatgctttcggtaga

SEQ ID NO: 130396 - DNA, 25 bp, probe
agtgttacattggtacctgttgtct

SEQ ID NO: 130397 - DNA, 25 bp, probe
agtgttacattggtacctgttgtct

SEQ ID NO: 130398 - DNA, 25 bp, probe
agtgtacattgggaaagctgtgttc

SEQ ID NO: 130399 - DNA, 25 bp, probe
agtggagccatgaacactactgcct

SEQ ID NO: 130400 - DNA, 25 bp, probe
agtggagttatgtcactgatctgaa

SEQ ID NO: 130401 - DNA, 25 bp, probe
agtgcacaggtcaaagcgtctggaa

SEQ ID NO: 130402 - DNA, 25 bp, probe
agtgccagggagaacagccaggtga

SEQ ID NO: 130403 - DNA, 25 bp, probe
agtgccagggagaacagccaggtga

SEQ ID NO: 130404 - DNA, 25 bp, probe
agtgtaggcgacagcctcatgggcc

SEQ ID NO: 130405 - DNA, 25 bp, probe
agtgttgggattacaggcgtgagcc

SEQ ID NO: 130406 - DNA, 25 bp, probe
agtgggcctgatttagcaggtggtc

SEQ ID NO: 130407 - DNA, 25 bp, probe
agtgggcctgatttagcaggtggtc

SEQ ID NO: 130408 - DNA, 25 bp, probe
agtggtgccttacatggtgtgtgtg

SEQ ID NO: 130409 - DNA, 25 bp, probe
agtgactgtgctaaaagtgttttga

SEQ ID NO: 130410 - DNA, 25 bp, probe
agtactggccaacagatgaccaaga

SEQ ID NO: 130411 - DNA, 25 bp, probe
agtacggctgtaccaatacaatgag

SEQ ID NO: 130412 - DNA, 25 bp, probe
agtcacggcttactgcaagagaggc

SEQ ID NO: 130413 - DNA, 25 bp, probe
agtgtgcactgcatcaagcaaagca

SEQ ID NO: 130414 - DNA, 25 bp, probe
agtgctgcactcaactatggaaaga

SEQ ID NO: 130415 - DNA, 25 bp, probe
agtgctgcactcaactatggaaaga

SEQ ID NO: 130416 - DNA, 25 bp, probe
agtccagctcccttgctaaaaataa

SEQ ID NO: 130417 - DNA, 25 bp, probe
agtcccaaccatgtcaaaattacag

SEQ ID NO: 130418 - DNA, 25 bp, probe
agtcaccaacccttcatttaacaag

SEQ ID NO: 130419 - DNA, 25 bp, probe
agtgccatcaacccggtgatttaca

SEQ ID NO: 130420 - DNA, 25 bp, probe
agtgatttactcctggttagtacat

SEQ ID NO: 130421 - DNA, 25 bp, probe
agtgatttactcctggttagtacat

SEQ ID NO: 130422 - DNA, 25 bp, probe
agtggccaactctggcctgagtgac

SEQ ID NO: 130423 - DNA, 25 bp, probe
agtggccacctggtagcctagaaca

SEQ ID NO: 130424 - DNA, 25 bp, probe
agtggccacctggtagcctagaaca

SEQ ID NO: 130425 - DNA, 25 bp, probe
actgggccattgatcagactaaata

SEQ ID NO: 130426 - DNA, 25 bp, probe
agtgggccaggttacctacatgaac

SEQ ID NO: 130427 - DNA, 25 bp, probe
agtggatccaggaaaccatccaggc

SEQ ID NO: 130428 - DNA, 25 bp, probe
agtggagcccaaatactatgcagat

SEQ ID NO: 130429 - DNA, 25 bp, probe
agtggaccatgcttatgtcaccagt

SEQ ID NO: 130430 - DNA, 25 bp, probe
agtggaccatgcttatgtcaccagt

SEQ ID NO: 130431 - DNA, 25 bp, probe
agggccctgatttgctgggcagttt

SEQ ID NO: 130432 - DNA, 25 bp, probe
agggccctgatttgctgggcagttt

SEQ ID NO: 130433 - DNA, 25 bp, probe
agggccctgatttgctgggcagttt

SEQ ID NO: 130434 - DNA, 25 bp, probe
agggctggcgttttggaatgcaatt

SEQ ID NO: 130435 - DNA, 25 bp, probe
agtggtgccgatatgtgagacgaat

SEQ ID NO: 130436 - DNA, 25 bp, probe
agtggtgccgttatgcaatccattt

SEQ ID NO: 130437 - DNA, 25 bp, probe
agtggatgcgccagattgtgtcctt

SEQ ID NO: 130438 - DNA, 25 bp, probe
agtggatgacctcatggagtcctca

SEQ ID NO: 130439 - DNA, 25 bp, probe
agtggagaagctcaaggcgctgcac

SEQ ID NO: 130440 - DNA, 25 bp, probe
agtgaggacgtcacgcagacagcac

SEQ ID NO: 130441 - DNA, 25 bp, probe
agtgaggacgtcacgcagacagcac

SEQ ID NO: 130442 - DNA, 25 bp, probe
agtgccatgatcccaacgaagcagc

SEQ ID NO: 130443 - DNA, 25 bp, probe
agtgccatagcccagtacacaggct

SEQ ID NO: 130444 - DNA, 25 bp, probe
agtgcatctcagggagaaccaagga

SEQ ID NO: 130445 - DNA, 25 bp, probe
agtgctggcgtgggacggacaggaa

SEQ ID NO: 130446 - DNA, 25 bp, probe
agtgatggtgcggggaggaccggca

SEQ ID NO: 130447 - DNA, 25 bp, probe
agtggatgtgtgctgggaagccgct

SEQ ID NO: 130448 - DNA, 25 bp, probe
agtgtgctggtgcttgttgtaccta

SEQ ID NO: 130449 - DNA, 25 bp, probe
agtgtgggagctaatgggaatcagc

SEQ ID NO: 130450 - DNA, 25 bp, probe
agtgagggtgccctggtcatgatca

SEQ ID NO: 130451 - DNA, 25 bp, probe
agtgagaggggcctgagcttcagct

SEQ ID NO: 130452 - DNA, 25 bp, probe
agtggatggcccctgaaagcatctt

SEQ ID NO: 130453 - DNA, 25 bp, probe
agtgtcatggccgtgctggaagcct

SEQ ID NO: 130454 - DNA, 25 bp, probe
agtgtcttgcctagcttgagggctt

SEQ ID NO: 130455 - DNA, 25 bp, probe
agtgtttgcactgcgtctgcaggac

SEQ ID NO: 130456 - DNA, 25 bp, probe
agtgtgtggacagcgagcgcaggcc

SEQ ID NO: 130457 - DNA, 25 bp, probe
agtggctgtcagaccgagagtagca

SEQ ID NO: 130458 - DNA, 25 bp, probe
agtacttacctgccaggtcgcagtg

SEQ ID NO: 130459 - DNA, 25 bp, probe
agtacttgacaccccagggaggagc

SEQ ID NO: 130460 - DNA, 25 bp, probe
agtacttggagtctgcaggtgcgag

SEQ ID NO: 130461 - DNA, 25 bp, probe
agtacaaggactcatctgtggtccc

SEQ ID NO: 130462 - DNA, 25 bp, probe
agtcccaggagccaatcagaggccc

SEQ ID NO: 130463 - DNA, 25 bp, probe
agtgccctcgagcactgaagtcacc

SEQ ID NO: 130464 - DNA, 25 bp, probe
agtccccaaggactagtggagtcct

SEQ ID NO: 130465 - DNA, 25 bp, probe
agtgttcatcacaggctagagaggt

SEQ ID NO: 130466 - DNA, 25 bp, probe
agtcatccaaccagcgagctgaggt

SEQ ID NO: 130467 - DNA, 25 bp, probe
agtcagctcacatctaagtccaagt

SEQ ID NO: 130468 - DNA, 25 bp, probe
agtcagtcacttgtttgcagaagca

SEQ ID NO: 130469 - DNA, 25 bp, probe
agtgcaatcctttctgtggatgaaa

SEQ ID NO: 130470 - DNA, 25 bp, probe
agtgtcatactgtatttcaggaata

SEQ ID NO: 130471 - DNA, 25 bp, probe
agtgtcatactgtatttcaggaata

SEQ ID NO: 130472 - DNA, 25 bp, probe
agtgctgctgtttctttaagaggaa

SEQ ID NO: 130473 - DNA, 25 bp, probe
agtaatgaggactttagagaggaaa

SEQ ID NO: 130474 - DNA, 25 bp, probe
agtgaacatgattctagtcaagacg

SEQ ID NO: 130475 - DNA, 25 bp, probe
agtgctacttacagacagcatgctc

SEQ ID NO: 130476 - DNA, 25 bp, probe
agtcccttgcgggaagactgccaat

SEQ ID NO: 130477 - DNA, 25 bp, probe
agtcaccttgctcacagcaaagcca

SEQ ID NO: 130478 - DNA, 25 bp, probe
agtgcaatctttcagcagcaacctg

SEQ ID NO: 130479 - DNA, 25 bp, probe
agtgcaatctttcagcagcaacctg

SEQ ID NO: 130480 - DNA, 25 bp, probe
agtgcctgctacacatacaacactg

SEQ ID NO: 130481 - DNA, 25 bp, probe
agtcgtcaagctcctcaatgacgtg

SEQ ID NO: 130482 - DNA, 25 bp, probe
agtgagagaagcgctgagtcctgtg

SEQ ID NO: 130483 - DNA, 25 bp, probe
agtgaagaagcagcggtcagcagac

SEQ ID NO: 130484 - DNA, 25 bp, probe
agtgaagaagcagcggtcagcagac

SEQ ID NO: 130485 - DNA, 25 bp, probe
agtgtagaaagtggctgtcagaccg

SEQ ID NO: 130486 - DNA, 25 bp, probe
agtggagaagcgatcgctccatccg

SEQ ID NO: 130487 - DNA, 25 bp, probe
agtgaggaacgcacagcggaaacat

SEQ ID NO: 130488 - DNA, 25 bp, probe
agtgggtaggcccagcagtggttct

SEQ ID NO: 130489 - DNA, 25 bp, probe
agtggggaggcacagagtttgctgc

SEQ ID NO: 130490 - DNA, 25 bp, probe
agtggtaaagcgagcaatttgcagc

SEQ ID NO: 130491 - DNA, 25 bp, probe
agtggtaaagcgagcaatttgcagc

SEQ ID NO: 130492 - DNA, 25 bp, probe
agtggcttacagcattttcttcacg

SEQ ID NO: 130493 - DNA, 25 bp, probe
agtgacaatggacctctttttactg

SEQ ID NO: 130494 - DNA, 25 bp, probe
agtgctattggggcctttcttacat

SEQ ID NO: 130495 - DNA, 25 bp, probe
agttttgggagtgtttatcgagcca

SEQ ID NO: 130496 - DNA, 25 bp, probe
agctcctggggacatttatacggac

SEQ ID NO: 130497 - DNA, 25 bp, probe
agtccaccgtgacattaaaggtgcc

SEQ ID NO: 130498 - DNA, 25 bp, probe
agatcccctgtatcattccaagagg

SEQ ID NO: 130499 - DNA, 25 bp, probe
agtggcgcctcttggagttcaagaa

SEQ ID NO: 130500 - DNA, 25 bp, probe
agtgcctgcaccaggggtgcacaat

SEQ ID NO: 130501 - DNA, 25 bp, probe
agtgctaccagcaggtgggctgcct

SEQ ID NO: 130502 - DNA, 25 bp, probe
agtgctaccagcaggtgggctgcct

SEQ ID NO: 130503 - DNA, 25 bp, probe
agtgcacccagcagtgcagtgaccc

SEQ ID NO: 130504 - DNA, 25 bp, probe
agtgcgccaagttgctgctggaagc

SEQ ID NO: 130505 - DNA, 25 bp, probe
agtgcgccaagttgctgctggaagc

SEQ ID NO: 130506 - DNA, 25 bp, probe
agtggtccaggattctgtaatgctt

SEQ ID NO: 130507 - DNA, 25 bp, probe
agtgggccaagtacatcccagcttt

SEQ ID NO: 130508 - DNA, 25 bp, probe
agtggagaagagctatccccgatga

SEQ ID NO: 130509 - DNA, 25 bp, probe
agtctgagaagaaggtcacccgaat

SEQ ID NO: 130510 - DNA, 25 bp, probe
agtgctgagaagttactcgcctggc

SEQ ID NO: 130511 - DNA, 25 bp, probe
agtgcctgaagagcctcgacagaga

SEQ ID NO: 130512 - DNA, 25 bp, probe
agtgcggagaggcgaaactgagtca

SEQ ID NO: 130513 - DNA, 25 bp, probe
agtgggcatgagacgggaagcggtg

SEQ ID NO: 130514 - DNA, 25 bp, probe
agtgacagctgagcggctgagtcct

SEQ ID NO: 130515 - DNA, 25 bp, probe
agtgaccatcccgagctgaatatcg

SEQ ID NO: 130516 - DNA, 25 bp, probe
agtgacgcatctgtgcagcaggatt

SEQ ID NO: 130517 - DNA, 25 bp, probe
agtgacgcatctgtgcagcaggatt

SEQ ID NO: 130518 - DNA, 25 bp, probe
agtgcacgctctgatcaggggtgct

SEQ ID NO: 130519 - DNA, 25 bp, probe
agtgcctgtccaatactgggttcag

SEQ ID NO: 130520 - DNA, 25 bp, probe
agtgccatgaccttgcataggggta

SEQ ID NO: 130521 - DNA, 25 bp, probe
agtgccatgaccttgcataggggta

SEQ ID NO: 130522 - DNA, 25 bp, probe
agtgccttgccattcattggcagga

SEQ ID NO: 130523 - DNA, 25 bp, probe
agtgtctgcaaatcatgtggaggag

SEQ ID NO: 130524 - DNA, 25 bp, probe
agtgttgcagcaacctgtgacagga

SEQ ID NO: 130525 - DNA, 25 bp, probe
agtgttcagcactgtgtacgataca

SEQ ID NO: 130526 - DNA, 25 bp, probe
agtgctacaggctttgtacaaagaa

SEQ ID NO: 130527 - DNA, 25 bp, probe
agtgtaaggcatagagcaccccaca

SEQ ID NO: 130528 - DNA, 25 bp, probe
agtgtccaggcaatgcgaacccaaa

SEQ ID NO: 130529 - DNA, 25 bp, probe
agtgacacggaagaagatgacaaat

SEQ ID NO: 130530 - DNA, 25 bp, probe
agtgagatctcgtctctaaataaaa

SEQ ID NO: 130531 - DNA, 25 bp, probe
agtggtgctctctttagaaaatcac

SEQ ID NO: 130532 - DNA, 25 bp, probe
agtggtttcacatcagcgacacaca

SEQ ID NO: 130533 - DNA, 25 bp, probe
agtctttgtacagacaacaaacctg

SEQ ID NO: 130534 - DNA, 25 bp, probe
agtctttgtacagacaacaaacctg

SEQ ID NO: 130535 - DNA, 25 bp, probe
agtgcattccttgttaataaacttt

SEQ ID NO: 130536 - DNA, 25 bp, probe
agtgcctgccttgtttatagccact

SEQ ID NO: 130537 - DNA, 25 bp, probe
agtgaacactcttggtagaagccct

SEQ ID NO: 130538 - DNA, 25 bp, probe
agtgaagacaccagataggacctct

SEQ ID NO: 130539 - DNA, 25 bp, probe
agtgcaagaacctgatcctccagat

SEQ ID NO: 130540 - DNA, 25 bp, probe
agtgtaacaacattatctgaccaat

SEQ ID NO: 130541 - DNA, 25 bp, probe
agtgtaaaataccctcaccacacct

SEQ ID NO: 130542 - DNA, 25 bp, probe
agtgtaaaacctcttctgcaaatcg

SEQ ID NO: 130543 - DNA, 25 bp, probe
tggatgctttataaatttgttcaaa

SEQ ID NO: 130544 - DNA, 25 bp, probe
agtgttctatgaacaactccaaaac

SEQ ID NO: 130545 - DNA, 25 bp, probe
agtgatggaatatgccctcgaagga

SEQ ID NO: 130546 - DNA, 25 bp, probe
agtgggatacctgcgcttgaaggac

SEQ ID NO: 130547 - DNA, 25 bp, probe
agacctaacactgccttgttggatc

SEQ ID NO: 130548 - DNA, 25 bp, probe
agtccttgaacttccgaattaatct

SEQ ID NO: 130549 - DNA, 25 bp, probe
accctttaatagcagatttggttgc

SEQ ID NO: 130550 - DNA, 25 bp, probe
acgtgtttagtatcaaaagagccca

SEQ ID NO: 130551 - DNA, 25 bp, probe
acgtgtttagtatcaaaagagccca

SEQ ID NO: 130552 - DNA, 25 bp, probe
accgtttttaacacatagcgccgtg

SEQ ID NO: 130553 - DNA, 25 bp, probe
accgtttttaacacatagcgccgtg

SEQ ID NO: 130554 - DNA, 25 bp, probe
agtcagtttttctcttaagtgcctg

SEQ ID NO: 130555 - DNA, 25 bp, probe
agtactttattaattccaagggcat

SEQ ID NO: 130556 - DNA, 25 bp, probe
agatactttaccagctactagggag

SEQ ID NO: 130557 - DNA, 25 bp, probe
agtttttcacagacctacgggatgg

SEQ ID NO: 130558 - DNA, 25 bp, probe
agtgtttatcgagccaaatggatat

SEQ ID NO: 130559 - DNA, 25 bp, probe
agtgttttggcagcagcacatctaa

SEQ ID NO: 130560 - DNA, 25 bp, probe
agtgttgatgaggcatgaaaacatt

SEQ ID NO: 130561 - DNA, 25 bp, probe
agtgtctagagccctttaatgtttt

SEQ ID NO: 130562 - DNA, 25 bp, probe
agtgtctagagcatctgtttttctt

SEQ ID NO: 130563 - DNA, 25 bp, probe
agtgccttacacaatggttttcttg

SEQ ID NO: 130564 - DNA, 25 bp, probe
agtgccttacacaatggttttcttg

SEQ ID NO: 130565 - DNA, 25 bp, probe
agtgcctataaccatgttctatatt

SEQ ID NO: 130566 - DNA, 25 bp, probe
agtccttagatgtagtttcacccaa

SEQ ID NO: 130567 - DNA, 25 bp, probe
agtgccttggcaggtttgtgcaccc

SEQ ID NO: 130568 - DNA, 25 bp, probe
agtgcccagggcgcatgtatgcacc

SEQ ID NO: 130569 - DNA, 25 bp, probe
agtgccacagggtgcagagacccca

SEQ ID NO: 130570 - DNA, 25 bp, probe
agtgcacaagagcacgcaggcgctt

SEQ ID NO: 130571 - DNA, 25 bp, probe
agtgcacaagagcacgcaggcgctt

SEQ ID NO: 130572 - DNA, 25 bp, probe
agtgcttagagcttctgcagggctt

SEQ ID NO: 130573 - DNA, 25 bp, probe
agtgtgtgaagtactgcgtggtgta

SEQ ID NO: 130574 - DNA, 25 bp, probe
agtgatgggagtatgcgtagctttg

SEQ ID NO: 130575 - DNA, 25 bp, probe
agtgtggccagaagtggaatcttta

SEQ ID NO: 130576 - DNA, 25 bp, probe
agtgcattgccccttgggatatatt

SEQ ID NO: 130577 - DNA, 25 bp, probe
agtgctcagaccttgtctagttatt

SEQ ID NO: 130578 - DNA, 25 bp, probe
agtgtggatcacttgctatccatta

SEQ ID NO: 130579 - DNA, 25 bp, probe
agtgtggatccaactagattgcttt

SEQ ID NO: 130580 - DNA, 25 bp, probe
agtgcttatccaactctgaatcttt

SEQ ID NO: 130581 - DNA, 25 bp, probe
agtgcttatccaactctgaatcttt

SEQ ID NO: 130582 - DNA, 25 bp, probe
agtgcttgacactgtagaattttgt

SEQ ID NO: 130583 - DNA, 25 bp, probe
agtgttaacattggagacttgcttt

SEQ ID NO: 130584 - DNA, 25 bp, probe
agtgataagatcatccgactttatg

SEQ ID NO: 130585 - DNA, 25 bp, probe
agtgataagatcatccgactttatg

SEQ ID NO: 130586 - DNA, 25 bp, probe
agtgatcaggcaattcggtcaattg

SEQ ID NO: 130587 - DNA, 25 bp, probe
agtgcatgaggcaactgcaggctcc

SEQ ID NO: 130588 - DNA, 25 bp, probe
agtgatgagtgcgtatcgcgccaca

SEQ ID NO: 130589 - DNA, 25 bp, probe
agtgatgagtgcgtatcgcgccaca

SEQ ID NO: 130590 - DNA, 25 bp, probe
agtgatgatgtcgagatcggaatgg

SEQ ID NO: 130591 - DNA, 25 bp, probe
agtgcatgatgggaaaggtattaga

SEQ ID NO: 130592 - DNA, 25 bp, probe
agtgctggacgaaagcctgaacaaa

SEQ ID NO: 130593 - DNA, 25 bp, probe
agtgctggccaaaacctggccgtct

SEQ ID NO: 130594 - DNA, 25 bp, probe
agtggtgcaggaagatccaggaggt

SEQ ID NO: 130595 - DNA, 25 bp, probe
agtggtggagaccatccaggcacag

SEQ ID NO: 130596 - DNA, 25 bp, probe
agtgtggatgaactactcctacagc

SEQ ID NO: 130597 - DNA, 25 bp, probe
agtgtagagaaaaccgtgaagagat

SEQ ID NO: 130598 - DNA, 25 bp, probe
agtgtaacaaccacgggtgtaagtg

SEQ ID NO: 130599 - DNA, 25 bp, probe
agtgggacaatcgccagagggtggg

SEQ ID NO: 130600 - DNA, 25 bp, probe
agtgaatacacggcccaagaggggg

SEQ ID NO: 130601 - DNA, 25 bp, probe
agtcagagtgcagggccagcaagca

SEQ ID NO: 130602 - DNA, 25 bp, probe
agtgagcagtgagggccagtcttca

SEQ ID NO: 130603 - DNA, 25 bp, probe
agtgaagatacaggccactcttcct

SEQ ID NO: 130604 - DNA, 25 bp, probe
agtgaagcttgggattcactcccta

SEQ ID NO: 130605 - DNA, 25 bp, probe
agtgcagttggatgagacacaccct

SEQ ID NO: 130606 - DNA, 25 bp, probe
agtgcaccagaatggagacgctccc

SEQ ID NO: 130607 - DNA, 25 bp, probe
agtcccgagcaatgaagtcatccac

SEQ ID NO: 130608 - DNA, 25 bp, probe
agtcctcggccattgaagcttcgaa

SEQ ID NO: 130609 - DNA, 25 bp, probe
agtcctcagcaggactcaggcttcg

SEQ ID NO: 130610 - DNA, 25 bp, probe
agtgactcagctgccatagctgcct

SEQ ID NO: 130611 - DNA, 25 bp, probe
agtgactcagctgccatagctgcct

SEQ ID NO: 130612 - DNA, 25 bp, probe
agtgtcagcagtgggatacctgcgc

SEQ ID NO: 130613 - DNA, 25 bp, probe
agtgcatcagtgtggtagcttgctc

SEQ ID NO: 130614 - DNA, 25 bp, probe
agtgctatgtgaggggcctccagct

SEQ ID NO: 130615 - DNA, 25 bp, probe
agtgccaggcagtagggatccagat

SEQ ID NO: 130616 - DNA, 25 bp, probe
agtgcaggagaggaggcgtccctac

SEQ ID NO: 130617 - DNA, 25 bp, probe
agtgcagagagtaaggtgtccttat

SEQ ID NO: 130618 - DNA, 25 bp, probe
agtcgggcaatcttgtgtcgttata

SEQ ID NO: 130619 - DNA, 25 bp, probe
agtcgacgctacattgatgagtaca

SEQ ID NO: 130620 - DNA, 25 bp, probe
agtcgcaatgattcagctcgctgag

SEQ ID NO: 130621 - DNA, 25 bp, probe
agtgctgacacatcattcccagcat

SEQ ID NO: 130622 - DNA, 25 bp, probe
agtgctgacacatcattcccagcat

SEQ ID NO: 130623 - DNA, 25 bp, probe
agtgctgacagatacatggccattg

SEQ ID NO: 130624 - DNA, 25 bp, probe
agtgctccaccatcagagaactgtc

SEQ ID NO: 130625 - DNA, 25 bp, probe
agtgctccaccatcagagaactgtc

SEQ ID NO: 130626 - DNA, 25 bp, probe
agtgctccctacaaatacgaatcct

SEQ ID NO: 130627 - DNA, 25 bp, probe
agtgctccctacaaatacgaatcct

SEQ ID NO: 130628 - DNA, 25 bp, probe
agtgccggtccgaattcgaattggc

SEQ ID NO: 130629 - DNA, 25 bp, probe
agttcggctccgaggtggagctgag

SEQ ID NO: 130630 - DNA, 25 bp, probe
agtacgacttcgtggaggtgcgcag

SEQ ID NO: 130631 - DNA, 25 bp, probe
agtacgacttcgtggaggtgcgcag

SEQ ID NO: 130632 - DNA, 25 bp, probe
agtacgacttcgtggaggtgcgcag

SEQ ID NO: 130633 - DNA, 25 bp, probe
agtacgacttcgtggaggtgcgcag

SEQ ID NO: 130634 - DNA, 25 bp, probe
agtacgaccctaaggacgtcatcgg

SEQ ID NO: 130635 - DNA, 25 bp, probe
agtgcaccccctaaagatggcgcac

SEQ ID NO: 130636 - DNA, 25 bp, probe
agtgcctctccagtttctgaggcca

SEQ ID NO: 130637 - DNA, 25 bp, probe
agtgagttccaggtcaatatgttag

SEQ ID NO: 130638 - DNA, 25 bp, probe
agtgagttccaggtcaatatgttag

SEQ ID NO: 130639 - DNA, 25 bp, probe
agtgccctcactgtagaatttaaaa

SEQ ID NO: 130640 - DNA, 25 bp, probe
agtgacaccccggagattcgtaaat

SEQ ID NO: 130641 - DNA, 25 bp, probe
agatgactaccagctggttcgaaaa

SEQ ID NO: 130642 - DNA, 25 bp, probe
agatgactaccagctggttcgaaaa

SEQ ID NO: 130643 - DNA, 25 bp, probe
agtgagtgacaatcatttttcttaa

SEQ ID NO: 130644 - DNA, 25 bp, probe
agtcatgtgtttcatttatcccata

SEQ ID NO: 130645 - DNA, 25 bp, probe
agtcatttttgattgcttttttcca

SEQ ID NO: 130646 - DNA, 25 bp, probe
agtaggttgctatggttttatctaa

SEQ ID NO: 130647 - DNA, 25 bp, probe
agtaggctttatgctgtgtttatgc

SEQ ID NO: 130648 - DNA, 25 bp, probe
agtaggctttatgctgtgtttatgc

SEQ ID NO: 130649 - DNA, 25 bp, probe
agtgatttttaacttgcgtgtctgc

SEQ ID NO: 130650 - DNA, 25 bp, probe
agtgatttttaacttgcgtgtctgc

SEQ ID NO: 130651 - DNA, 25 bp, probe
agtgtttgtcaagcttctggtctaa

SEQ ID NO: 130652 - DNA, 25 bp, probe
agtgtttgtcaagcttctggtctaa

SEQ ID NO: 130653 - DNA, 25 bp, probe
agtgtttaccactttctgttggaat

SEQ ID NO: 130654 - DNA, 25 bp, probe
agtgttgtattctttttcattgggt

SEQ ID NO: 130655 - DNA, 25 bp, probe
agtgacttattctaagcctcatcta

SEQ ID NO: 130656 - DNA, 25 bp, probe
agtgagcttgctttaaaaatctaca

SEQ ID NO: 130657 - DNA, 25 bp, probe
agtgtgctgtggttcggaagtctaa

SEQ ID NO: 130658 - DNA, 25 bp, probe
agtgtggctgtgctctaaaatctca

SEQ ID NO: 130659 - DNA, 25 bp, probe
agtcgactatgccttagacacatcc

SEQ ID NO: 130660 - DNA, 25 bp, probe
agtcgactatgccttagacacatcc

SEQ ID NO: 130661 - DNA, 25 bp, probe
agtcagcattatctctgagtccacc

SEQ ID NO: 130662 - DNA, 25 bp, probe
agtgccagtcactttggggacctgg

SEQ ID NO: 130663 - DNA, 25 bp, probe
agtgactgctactttgggaatgggt

SEQ ID NO: 130664 - DNA, 25 bp, probe
agtgacctgaggaagcgtgaaggcc

SEQ ID NO: 130665 - DNA, 25 bp, probe
agagacctggtagcctagaacagct

SEQ ID NO: 130666 - DNA, 25 bp, probe
agtaccagtgtatcccagacagcac

SEQ ID NO: 130667 - DNA, 25 bp, probe
agtaccatggtcggaacgccatact

SEQ ID NO: 130668 - DNA, 25 bp, probe
tcattactcgggggcagacccccta

SEQ ID NO: 130669 - DNA, 25 bp, probe
tcattactcgggggcagacccccta

SEQ ID NO: 130670 - DNA, 25 bp, probe
agtatgtgcgggcgcagtacccgtc

SEQ ID NO: 130671 - DNA, 25 bp, probe
agtgagggactgtgttgactgacga

SEQ ID NO: 130672 - DNA, 25 bp, probe
agtgaagagattatgggcctgacca

SEQ ID NO: 130673 - DNA, 25 bp, probe
agtgaaggttgctgaggctctgacc

SEQ ID NO: 130674 - DNA, 25 bp, probe
agtgacttttgctgggcattttccc

SEQ ID NO: 130675 - DNA, 25 bp, probe
agtaattttgcacagacatctcctc

SEQ ID NO: 130676 - DNA, 25 bp, probe
agtcgttcctactgacattgtattg

SEQ ID NO: 130677 - DNA, 25 bp, probe
agtcgatggacttcctgatattgtt

SEQ ID NO: 130678 - DNA, 25 bp, probe
agtgcaaggatcgcctgtcagttga

SEQ ID NO: 130679 - DNA, 25 bp, probe
agtgaaggatgcttccgtcagggca

SEQ ID NO: 130680 - DNA, 25 bp, probe
agtctaccggcaaaggcctacgaat

SEQ ID NO: 130681 - DNA, 25 bp, probe
agtctaccggcaaaggcctacgaat

SEQ ID NO: 130682 - DNA, 25 bp, probe
agttcagcacggggggcagtaagcg

SEQ ID NO: 130683 - DNA, 25 bp, probe
agttcagggccaggttggccaccgt

SEQ ID NO: 130684 - DNA, 25 bp, probe
agttggggccaactttgatcacagc

SEQ ID NO: 130685 - DNA, 25 bp, probe
agtcctaggcaaaatttcatgaagc

SEQ ID NO: 130686 - DNA, 25 bp, probe
agtcctggtgagaatttatggcaat

SEQ ID NO: 130687 - DNA, 25 bp, probe
agtgttggctgtgctattatagaaa

SEQ ID NO: 130688 - DNA, 25 bp, probe
agtgttggcggttcttagagcagat

SEQ ID NO: 130689 - DNA, 25 bp, probe
agtgtgatggagctggtggggccag

SEQ ID NO: 130690 - DNA, 25 bp, probe
agtgctgtgggacggggagagccgc

SEQ ID NO: 130691 - DNA, 25 bp, probe
agtgctgtgggacggggagagccgc

SEQ ID NO: 130692 - DNA, 25 bp, probe
agtgatgtcgtacggggagaggccc

SEQ ID NO: 130693 - DNA, 25 bp, probe
agtgatgtcacatgagctgggccat

SEQ ID NO: 130694 - DNA, 25 bp, probe
agtgagacatcatggctacagcaaa

SEQ ID NO: 130695 - DNA, 25 bp, probe
agtgagccaagccgcagaagcgtgc

SEQ ID NO: 130696 - DNA, 25 bp, probe
agtgatggccaaatgcaaactgcat

SEQ ID NO: 130697 - DNA, 25 bp, probe
agtatggctcaaccagccatctact

SEQ ID NO: 130698 - DNA, 25 bp, probe
agtttcctaccagcaaatagcccta

SEQ ID NO: 130699 - DNA, 25 bp, probe
agtttccagtcctaacaaatgctcc

SEQ ID NO: 130700 - DNA, 25 bp, probe
agtgttctgtgtcaaagaagtgcag

SEQ ID NO: 130701 - DNA, 25 bp, probe
agtgttgcctgagactaaagtgctt

SEQ ID NO: 130702 - DNA, 25 bp, probe
agtgtagattccaactttcagtatg

SEQ ID NO: 130703 - DNA, 25 bp, probe
agtgtagattccaactttcagtatg

SEQ ID NO: 130704 - DNA, 25 bp, probe
agtgctggtttaaacattcagcacc

SEQ ID NO: 130705 - DNA, 25 bp, probe
agtgattttatcttacatgtacatt

SEQ ID NO: 130706 - DNA, 25 bp, probe
agtgattttatcttacatgtacatt

SEQ ID NO: 130707 - DNA, 25 bp, probe
agtgtttgaacagcattgtaaaatg

SEQ ID NO: 130708 - DNA, 25 bp, probe
agtgttggacgagagcttgaacaga

SEQ ID NO: 130709 - DNA, 25 bp, probe
agtgttgtacgacgatgtatcaaca

SEQ ID NO: 130710 - DNA, 25 bp, probe
agtgattgcttccgttttcaagatt

SEQ ID NO: 130711 - DNA, 25 bp, probe
agtgattgcttccgttttcaagatt

SEQ ID NO: 130712 - DNA, 25 bp, probe
agtgcttctacacatttcatctaat

SEQ ID NO: 130713 - DNA, 25 bp, probe
agtgctttactttttgcacaatttt

SEQ ID NO: 130714 - DNA, 25 bp, probe
agtgctttactttttgcacaatttt

SEQ ID NO: 130715 - DNA, 25 bp, probe
agtgttaactagtttaccaaatgct

SEQ ID NO: 130716 - DNA, 25 bp, probe
agtcttaacgatgaccacccagagt

SEQ ID NO: 130717 - DNA, 25 bp, probe
agtcttaacgatgaccacccagagt

SEQ ID NO: 130718 - DNA, 25 bp, probe
agtcaacaccgagaccaccaaagtg

SEQ ID NO: 130719 - DNA, 25 bp, probe
agtcatacccgaaaaagcaaacgat

SEQ ID NO: 130720 - DNA, 25 bp, probe
agattacccctatacacaagaatgg

SEQ ID NO: 130721 - DNA, 25 bp, probe
agtgaaccccttgcaagaagaattc

SEQ ID NO: 130722 - DNA, 25 bp, probe
agtaaccctctaactaatggtatct

SEQ ID NO: 130723 - DNA, 25 bp, probe
agtaaccctgttacacatggcgtgt

SEQ ID NO: 130724 - DNA, 25 bp, probe
agtactttcgttaatcttgctgctt

SEQ ID NO: 130725 - DNA, 25 bp, probe
agtcactatcttcatttcctatgct

SEQ ID NO: 130726 - DNA, 25 bp, probe
agtcactatcttcatttcctatgct

SEQ ID NO: 130727 - DNA, 25 bp, probe
agtccgattgcgttatttcttctac

SEQ ID NO: 130728 - DNA, 25 bp, probe
agtccatgcaatcgattccttgcat

SEQ ID NO: 130729 - DNA, 25 bp, probe
agtgacatgggccatatccgtgctg

SEQ ID NO: 130730 - DNA, 25 bp, probe
agtgcatgtggtcaacacaggttat

SEQ ID NO: 130731 - DNA, 25 bp, probe
agtcatggtggccaacagaggtgag

SEQ ID NO: 130732 - DNA, 25 bp, probe
agtcatgactagcagaattgtggga

SEQ ID NO: 130733 - DNA, 25 bp, probe
agtctggcaactcggacgtgtatga

SEQ ID NO: 130734 - DNA, 25 bp, probe
agtgcagtaagcaggacgtgctgtg

SEQ ID NO: 130735 - DNA, 25 bp, probe
agtgcgtgaacgtgtcggtggtgtc

SEQ ID NO: 130736 - DNA, 25 bp, probe
agctcgtaaggtagtaattggtatt

SEQ ID NO: 130737 - DNA, 25 bp, probe
agcttggaaggtattatagttctga

SEQ ID NO: 130738 - DNA, 25 bp, probe
agtcggttagtcattgatagaacta

SEQ ID NO: 130739 - DNA, 25 bp, probe
agtcagagtctgttgcgttgcagag

SEQ ID NO: 130740 - DNA, 25 bp, probe
agtcagagatcagctccactggaag

SEQ ID NO: 130741 - DNA, 25 bp, probe
agtcagagatcagctccactggaag

SEQ ID NO: 130742 - DNA, 25 bp, probe
agtcagtatctgcagaacagtaagc

SEQ ID NO: 130743 - DNA, 25 bp, probe
agtcagatactgcgcaagaatacat

SEQ ID NO: 130744 - DNA, 25 bp, probe
agtagatcctgctcacagaatcaca

SEQ ID NO: 130745 - DNA, 25 bp, probe
agtgctttcagcataagaatcacac

SEQ ID NO: 130746 - DNA, 25 bp, probe
agtgcctgtgctctcaagacaaact

SEQ ID NO: 130747 - DNA, 25 bp, probe
agtctcgagtcactagagcccaact

SEQ ID NO: 130748 - DNA, 25 bp, probe
agtgttgcaggacagatgagctcaa

SEQ ID NO: 130749 - DNA, 25 bp, probe
agagattgcgggcagcaagacaaag

SEQ ID NO: 130750 - DNA, 25 bp, probe
agagattgcgggcagcaagacaaag

SEQ ID NO: 130751 - DNA, 25 bp, probe
agtgatagtgggtagacataaaatg

SEQ ID NO: 130752 - DNA, 25 bp, probe
agtgacactcctgagactgaagaaa

SEQ ID NO: 130753 - DNA, 25 bp, probe
agtactcatcctttgccagcaaaga

SEQ ID NO: 130754 - DNA, 25 bp, probe
agtacttactgcaatgctcgctgga

SEQ ID NO: 130755 - DNA, 25 bp, probe
agtgatgtacagtctattccataga

SEQ ID NO: 130756 - DNA, 25 bp, probe
agtagtacagaacttgccatctaat

SEQ ID NO: 130757 - DNA, 25 bp, probe
agtagtacagaacttgccatctaat

SEQ ID NO: 130758 - DNA, 25 bp, probe
agtgagtatctttgtggtcatctac

SEQ ID NO: 130759 - DNA, 25 bp, probe
agtgcagtttctaagcatgtagcca

SEQ ID NO: 130760 - DNA, 25 bp, probe
agtgaggcttctgggtgcataccag

SEQ ID NO: 130761 - DNA, 25 bp, probe
agtgatggtccaggttatagtcatg

SEQ ID NO: 130762 - DNA, 25 bp, probe
agtgatggctggggaacaatgttca

SEQ ID NO: 130763 - DNA, 25 bp, probe
agtgacgctgtgggaactcatgact

SEQ ID NO: 130764 - DNA, 25 bp, probe
agtgagtgcctgggaatctgagcct

SEQ ID NO: 130765 - DNA, 25 bp, probe
agtgttgtctgagacctgggtcgct

SEQ ID NO: 130766 - DNA, 25 bp, probe
agtttattgttagccaggttgcttg

SEQ ID NO: 130767 - DNA, 25 bp, probe
agtactttttatgaagactggtctt

SEQ ID NO: 130768 - DNA, 25 bp, probe
agtacggagttagagggtggcttca

SEQ ID NO: 130769 - DNA, 25 bp, probe
agtgagggggttgatgggctgggtg

SEQ ID NO: 130770 - DNA, 25 bp, probe
agtaggggagtcagcactacaggtg

SEQ ID NO: 130771 - DNA, 25 bp, probe
agtaggggagtcagcactacaggtg

SEQ ID NO: 130772 - DNA, 25 bp, probe
agtaggggtattttctactgttgct

SEQ ID NO: 130773 - DNA, 25 bp, probe
agatacgtatatttttaactgcttc

SEQ ID NO: 130774 - DNA, 25 bp, probe
agtgaactaggaatttacctcttca

SEQ ID NO: 130775 - DNA, 25 bp, probe
agtaactttgtttatccctcaagca

SEQ ID NO: 130776 - DNA, 25 bp, probe
agtaagtcttttttgatcattccct

SEQ ID NO: 130777 - DNA, 25 bp, probe
agtacagtatcttaagtgtcaacca

SEQ ID NO: 130778 - DNA, 25 bp, probe
agtgagcagtaccaagagttccgta

SEQ ID NO: 130779 - DNA, 25 bp, probe
agtcagagttcgaaggctttgagta

SEQ ID NO: 130780 - DNA, 25 bp, probe
agtcgctgaacggcgtgcattatca

SEQ ID NO: 130781 - DNA, 25 bp, probe
agtccttagctgcggtgctatatgc

SEQ ID NO: 130782 - DNA, 25 bp, probe
agtgcctcaaagtgggcatgagacg

SEQ ID NO: 130783 - DNA, 25 bp, probe
agtgcctctcgatgtaggatgaacc

SEQ ID NO: 130784 - DNA, 25 bp, probe
agtccccaggagatgtggaactcgg

SEQ ID NO: 130785 - DNA, 25 bp, probe
agttttcagcggaggtcaaagcagg

SEQ ID NO: 130786 - DNA, 25 bp, probe
agtttaggctggtgctgccaaaaag

SEQ ID NO: 130787 - DNA, 25 bp, probe
agtaaagttctttctgccttataag

SEQ ID NO: 130788 - DNA, 25 bp, probe
agtaacattattgttctcattaaca

SEQ ID NO: 130789 - DNA, 25 bp, probe
agtcgacatctaacgttttatcata

SEQ ID NO: 130790 - DNA, 25 bp, probe
acctggcaaaacgtcctttgcatta

SEQ ID NO: 130791 - DNA, 25 bp, probe
accttaagcaccgcaatatcgttca

SEQ ID NO: 130792 - DNA, 25 bp, probe
accagtccccgagagaattttcctg

SEQ ID NO: 130793 - DNA, 25 bp, probe
actgggcaaacagaagaatttttct

SEQ ID NO: 130794 - DNA, 25 bp, probe
agtgaacaagttgaagacttttgta

SEQ ID NO: 130795 - DNA, 25 bp, probe
agtgcccaactgttataggttgttg

SEQ ID NO: 130796 - DNA, 25 bp, probe
agtgcatcacaactgaagaatgggg

SEQ ID NO: 130797 - DNA, 25 bp, probe
agtgctcatgtttgaagatgatggc

SEQ ID NO: 130798 - DNA, 25 bp, probe
agtgctcatgtttgagatgatggca

SEQ ID NO: 130799 - DNA, 25 bp, probe
agtgatcttttgcatcatgagtatt

SEQ ID NO: 130800 - DNA, 25 bp, probe
agtgatcctattcagcagatattaa

SEQ ID NO: 130801 - DNA, 25 bp, probe
agtgatccaaagctgctgaagtatg

SEQ ID NO: 130802 - DNA, 25 bp, probe
agtgccctcaagcatggcaccttgg

SEQ ID NO: 130803 - DNA, 25 bp, probe
agtgacttcaagcctggatcttaca

SEQ ID NO: 130804 - DNA, 25 bp, probe
agtgactccaagaccatgacagaga

SEQ ID NO: 130805 - DNA, 25 bp, probe
agtcccagaattgctgacagcagag

SEQ ID NO: 130806 - DNA, 25 bp, probe
agtcccagaattgctgacagcagag

SEQ ID NO: 130807 - DNA, 25 bp, probe
agtcgcgaggcatttggagagcaag

SEQ ID NO: 130808 - DNA, 25 bp, probe
agtcgcgagcgtttatgctgtcggt

SEQ ID NO: 130809 - DNA, 25 bp, probe
agtctgctacgcaaaacattttttc

SEQ ID NO: 130810 - DNA, 25 bp, probe
agtctggcgtgatcaacattttgtt

SEQ ID NO: 130811 - DNA, 25 bp, probe
agtgcagcaggttaagaattttttc

SEQ ID NO: 130812 - DNA, 25 bp, probe
agtgccaagtcctaaatcattttat

SEQ ID NO: 130813 - DNA, 25 bp, probe
agtgccaagtcctaaatcattttat

SEQ ID NO: 130814 - DNA, 25 bp, probe
agtgccaatcttccatgcaataatt

SEQ ID NO: 130815 - DNA, 25 bp, probe
agtgccaatcttccatgcaataatt

SEQ ID NO: 130816 - DNA, 25 bp, probe
agtgcaaatttgccagcttggagat

SEQ ID NO: 130817 - DNA, 25 bp, probe
agtgagaatgaggacatttactata

SEQ ID NO: 130818 - DNA, 25 bp, probe
agtgataattgcattttcctatcat

SEQ ID NO: 130819 - DNA, 25 bp, probe
agtgaagttcttttactgtaattgg

SEQ ID NO: 130820 - DNA, 25 bp, probe
agagatttgtttttcctcaaaggag

SEQ ID NO: 130821 - DNA, 25 bp, probe
agaatttttccagcccgaaggatct

SEQ ID NO: 130822 - DNA, 25 bp, probe
agttttgacccagcccagaatgaac

SEQ ID NO: 130823 - DNA, 25 bp, probe
agtttagcctacgcttatgaaacca

SEQ ID NO: 130824 - DNA, 25 bp, probe
agttcccctgggattctgaatataa

SEQ ID NO: 130825 - DNA, 25 bp, probe
agttccctcattcttattaccagaa

SEQ ID NO: 130826 - DNA, 25 bp, probe
agttctaccaatgtattgtccacag

SEQ ID NO: 130827 - DNA, 25 bp, probe
agtttggcacagaaatggttccctg

SEQ ID NO: 130828 - DNA, 25 bp, probe
agtttgatagaatcaagacccttgg

SEQ ID NO: 130829 - DNA, 25 bp, probe
agcagccggagacaaaacgccttaa

SEQ ID NO: 130830 - DNA, 25 bp, probe
agtgacctatgacaaaacgccgctg

SEQ ID NO: 130831 - DNA, 25 bp, probe
agtgcaaggatgtgaacaaggtcgc

SEQ ID NO: 130832 - DNA, 25 bp, probe
agtgaagtatgggaaatggagaggc

SEQ ID NO: 130833 - DNA, 25 bp, probe
agtgagagtcatcgggcgtggaagc

SEQ ID NO: 130834 - DNA, 25 bp, probe
agtgaaaatcagcaccttgtcagcc

SEQ ID NO: 130835 - DNA, 25 bp, probe
agtgagaacagacaccttgtcagcc

SEQ ID NO: 130836 - DNA, 25 bp, probe
agtgaaacagacgcttctctgcacc

SEQ ID NO: 130837 - DNA, 25 bp, probe
agtgaagaaggtgctcacctcattc

SEQ ID NO: 130838 - DNA, 25 bp, probe
agtacaaagtgtcctgacccaagcc

SEQ ID NO: 130839 - DNA, 25 bp, probe
agataaggtggtctgtaccgagtcc

SEQ ID NO: 130840 - DNA, 25 bp, probe
agtagagacggggtttcgccatgtt

SEQ ID NO: 130841 - DNA, 25 bp, probe
agtagagacggggtttcgccatgtt

SEQ ID NO: 130842 - DNA, 25 bp, probe
agtagagaaggtgtttcaccgtgtt

SEQ ID NO: 130843 - DNA, 25 bp, probe
agtacggggatgagtccactctggc

SEQ ID NO: 130844 - DNA, 25 bp, probe
agtacggggatgagtccactctggc

SEQ ID NO: 130845 - DNA, 25 bp, probe
agtaaggggaacctccaatgtctct

SEQ ID NO: 130846 - DNA, 25 bp, probe
agtaagggacccgaacactgatcgc

SEQ ID NO: 130847 - DNA, 25 bp, probe
agtcaagggcgccaacaacagtaac

SEQ ID NO: 130848 - DNA, 25 bp, probe
agtgaagtggcccaaaaggctgccc

SEQ ID NO: 130849 - DNA, 25 bp, probe
agtgaagtggcccaaaaggctgccc

SEQ ID NO: 130850 - DNA, 25 bp, probe
cgtacaggacgaaaaaggagcattc

SEQ ID NO: 130851 - DNA, 25 bp, probe
caggcggtactgataaaggacataa

SEQ ID NO: 130852 - DNA, 25 bp, probe
caggcggtactgataaaggacataa

SEQ ID NO: 130853 - DNA, 25 bp, probe
agtaggggcatggtataaggaaata

SEQ ID NO: 130854 - DNA, 25 bp, probe
agtgctggccctcatattaggaata

SEQ ID NO: 130855 - DNA, 25 bp, probe
agtgctggccctcatattaggaata

SEQ ID NO: 130856 - DNA, 25 bp, probe
agtgctgcctcctggtcaaggagaa

SEQ ID NO: 130857 - DNA, 25 bp, probe
agtgctgcctcctggtcaaggagaa

SEQ ID NO: 130858 - DNA, 25 bp, probe
agtgccctgccatggacatatgggg

SEQ ID NO: 130859 - DNA, 25 bp, probe
agtgagtttccacccacagggtgcc

SEQ ID NO: 130860 - DNA, 25 bp, probe
agttcttccgagaccaagggaggca

SEQ ID NO: 130861 - DNA, 25 bp, probe
agtctttccggaggtcagtggtggg

SEQ ID NO: 130862 - DNA, 25 bp, probe
agtccgccgaggtgctcggtggagt

SEQ ID NO: 130863 - DNA, 25 bp, probe
agtctcctagagctagccggatgga

SEQ ID NO: 130864 - DNA, 25 bp, probe
agtctcctagagctagccggatgga

SEQ ID NO: 130865 - DNA, 25 bp, probe
agtccttgagcacctcagctaagga

SEQ ID NO: 130866 - DNA, 25 bp, probe
agtcttctgagagctcctgaggaat

SEQ ID NO: 130867 - DNA, 25 bp, probe
agtgcttctgggacacttggagaaa

SEQ ID NO: 130868 - DNA, 25 bp, probe
agtgctcttgtggtaggtggataac

SEQ ID NO: 130869 - DNA, 25 bp, probe
agtgctcttgtggtaggtggataac

SEQ ID NO: 130870 - DNA, 25 bp, probe
agtcatcctgggtatgggctacaaa

SEQ ID NO: 130871 - DNA, 25 bp, probe
agtttagaagttagtatacaatatt

SEQ ID NO: 130872 - DNA, 25 bp, probe
agtatgaaaagctatcttaaaatat

SEQ ID NO: 130873 - DNA, 25 bp, probe
agtacatcagaccaatcttgcagca

SEQ ID NO: 130874 - DNA, 25 bp, probe
agtatcatgccaggcaaggtgaacc

SEQ ID NO: 130875 - DNA, 25 bp, probe
agtaattggtcatgtgatgcaagcc

SEQ ID NO: 130876 - DNA, 25 bp, probe
agtagttttaagcagaaccatgaaa

SEQ ID NO: 130877 - DNA, 25 bp, probe
agtgctgtatttaagatcaaatctt

SEQ ID NO: 130878 - DNA, 25 bp, probe
agtgctttttggcccaagaatctca

SEQ ID NO: 130879 - DNA, 25 bp, probe
agtgcctatgcctgggaagaattca

SEQ ID NO: 130880 - DNA, 25 bp, probe
agtcctagcaagaagcgagaattct

SEQ ID NO: 130881 - DNA, 25 bp, probe
agtcctcgctgtatggagagcacct

SEQ ID NO: 130882 - DNA, 25 bp, probe
agtcccgagttactcagagcaactt

SEQ ID NO: 130883 - DNA, 25 bp, probe
agtgcactcggtacaccatcaaagc

SEQ ID NO: 130884 - DNA, 25 bp, probe
agtgcccttgtattccataacatgc

SEQ ID NO: 130885 - DNA, 25 bp, probe
agtgcccttgtattccataacatgc

SEQ ID NO: 130886 - DNA, 25 bp, probe
agtgacctcagtagcctcaaatcat

SEQ ID NO: 130887 - DNA, 25 bp, probe
agtaccgcgacaagctcaaagcact

SEQ ID NO: 130888 - DNA, 25 bp, probe
agtacgggatctacaccaaggtcac

SEQ ID NO: 130889 - DNA, 25 bp, probe
agtacgtggactggattctggagaa

SEQ ID NO: 130890 - DNA, 25 bp, probe
agtacgtggactggattctggagaa

SEQ ID NO: 130891 - DNA, 25 bp, probe
agttagtatacaatattggggacac

SEQ ID NO: 130892 - DNA, 25 bp, probe
agttacgtagagagggtggccacaa

SEQ ID NO: 130893 - DNA, 25 bp, probe
agtatcggaaagctgggttgcccag

SEQ ID NO: 130894 - DNA, 25 bp, probe
agagtttaccagcttggatgcccac

SEQ ID NO: 130895 - DNA, 25 bp, probe
agttattgaacagcttggaacacca

SEQ ID NO: 130896 - DNA, 25 bp, probe
agtgctgtttaagctactaacgata

SEQ ID NO: 130897 - DNA, 25 bp, probe
agtgctgtttaagctactaacgata

SEQ ID NO: 130898 - DNA, 25 bp, probe
agtcatttttcagttacatgtaagt

SEQ ID NO: 130899 - DNA, 25 bp, probe
agtgcagcctttgttattgcataca

SEQ ID NO: 130900 - DNA, 25 bp, probe
agatgagtttgtgtactggccaagt

SEQ ID NO: 130901 - DNA, 25 bp, probe
agtgacatttggttctgggaatatg

SEQ ID NO: 130902 - DNA, 25 bp, probe
agtgacatttggttctgggaatatg

SEQ ID NO: 130903 - DNA, 25 bp, probe
agtcactgcctggagttggaaaaga

SEQ ID NO: 130904 - DNA, 25 bp, probe
agtactgcgtggtgtatgataacaa

SEQ ID NO: 130905 - DNA, 25 bp, probe
agtgcattgcgttgtggaattggga

SEQ ID NO: 130906 - DNA, 25 bp, probe
agttggccttgtggcctcagggaac

SEQ ID NO: 130907 - DNA, 25 bp, probe
agtagtgcagttcaccatgagggaa

SEQ ID NO: 130908 - DNA, 25 bp, probe
agtgaaagttttggctgaagcagaa

SEQ ID NO: 130909 - DNA, 25 bp, probe
agtgaaagttttggctgaagcagaa

SEQ ID NO: 130910 - DNA, 25 bp, probe
agtctagagtctgtgcaccaggcag

SEQ ID NO: 130911 - DNA, 25 bp, probe
agtgctaatgtttgagacgatggca

SEQ ID NO: 130912 - DNA, 25 bp, probe
agtgctgggattacaggcgtgagcc

SEQ ID NO: 130913 - DNA, 25 bp, probe
agtgctgggattacaggcgcgagcc

SEQ ID NO: 130914 - DNA, 25 bp, probe
agtgctgggatcacaggcatgaacc

SEQ ID NO: 130915 - DNA, 25 bp, probe
agtctggagataattttgcaactca

SEQ ID NO: 130916 - DNA, 25 bp, probe
agtcctatgataatgttatgcacgt

SEQ ID NO: 130917 - DNA, 25 bp, probe
agtcctgtgaatttcttcactgttg

SEQ ID NO: 130918 - DNA, 25 bp, probe
agtcctggacttttatacagctttt

SEQ ID NO: 130919 - DNA, 25 bp, probe
agtagggcgctaatgtatacacatt

SEQ ID NO: 130920 - DNA, 25 bp, probe
agtatgtcgccattgttgtacaacc

SEQ ID NO: 130921 - DNA, 25 bp, probe
agtatgtcgccattgttgtacaacc

SEQ ID NO: 130922 - DNA, 25 bp, probe
agtagtccaccttcatttaactctt

SEQ ID NO: 130923 - DNA, 25 bp, probe
agtagtgtgattaggcgttaacttt

SEQ ID NO: 130924 - DNA, 25 bp, probe
agtaagttattccgtattgattttg

SEQ ID NO: 130925 - DNA, 25 bp, probe
agtacctttctcagacattttgtag

SEQ ID NO: 130926 - DNA, 25 bp, probe
agtacctttctcagacattttgtag

SEQ ID NO: 130927 - DNA, 25 bp, probe
agttgtctttccatgttttaaatgt

SEQ ID NO: 130928 - DNA, 25 bp, probe
agttgttgttaaaattctcaaggtg

SEQ ID NO: 130929 - DNA, 25 bp, probe
agtccttgataatcgttctcagcac

SEQ ID NO: 130930 - DNA, 25 bp, probe
agttttataattgcttccaaacagc

SEQ ID NO: 130931 - DNA, 25 bp, probe
agtattttaattgcaccttaatgaa

SEQ ID NO: 130932 - DNA, 25 bp, probe
agtattttaattgcaccttaatgaa

SEQ ID NO: 130933 - DNA, 25 bp, probe
agtcagtttttcatagccttacagt

SEQ ID NO: 130934 - DNA, 25 bp, probe
agtagattcgtagttagtttagcct

SEQ ID NO: 130935 - DNA, 25 bp, probe
agtcagcaaggtttactattatatg

SEQ ID NO: 130936 - DNA, 25 bp, probe
agtcggcagagatttatccaataat

SEQ ID NO: 130937 - DNA, 25 bp, probe
agtgcctgctgaatgatttccaaag

SEQ ID NO: 130938 - DNA, 25 bp, probe
agtcaatctgcaagccattttatgg

SEQ ID NO: 130939 - DNA, 25 bp, probe
agaaatcacgcagccttttggttaa

SEQ ID NO: 130940 - DNA, 25 bp, probe
aaatatgaatgctcccttcgggact

SEQ ID NO: 130941 - DNA, 25 bp, probe
aaaagattggactccctggtggttg

SEQ ID NO: 130942 - DNA, 25 bp, probe
agtcaagattggagacctcggtctg

SEQ ID NO: 130943 - DNA, 25 bp, probe
agtaagatgtgtgagcgcactcgtt

SEQ ID NO: 130944 - DNA, 25 bp, probe
agttcaatgatggaaatgccgccgt

SEQ ID NO: 130945 - DNA, 25 bp, probe
agtccactggcgtcttcaccaccat

SEQ ID NO: 130946 - DNA, 25 bp, probe
agttacttgagtgtcactcagcaac

SEQ ID NO: 130947 - DNA, 25 bp, probe
agtcgtgccatgttgttactcacag

SEQ ID NO: 130948 - DNA, 25 bp, probe
agtcctggaacaattgcacaccagc

SEQ ID NO: 130949 - DNA, 25 bp, probe
agtcagctggaggtactgcagcccc

SEQ ID NO: 130950 - DNA, 25 bp, probe
agtcacagtgtgctgtcacagacca

SEQ ID NO: 130951 - DNA, 25 bp, probe
agtccagtgatgtccatgtcagact

SEQ ID NO: 130952 - DNA, 25 bp, probe
agtccttcatgatcagcgcagacat

SEQ ID NO: 130953 - DNA, 25 bp, probe
agtccttcatgatcagcgcagacat

SEQ ID NO: 130954 - DNA, 25 bp, probe
agtccagcttgaacatctagaattc

SEQ ID NO: 130955 - DNA, 25 bp, probe
agtctgcacatagaatccaaactca

SEQ ID NO: 130956 - DNA, 25 bp, probe
agatcatcactatacaacaaaacag

SEQ ID NO: 130957 - DNA, 25 bp, probe
agatcatcactatacaacaaaacag

SEQ ID NO: 130958 - DNA, 25 bp, probe
agtcagtctatagcgcaaaccacac

SEQ ID NO: 130959 - DNA, 25 bp, probe
agtgctgctctcagggcaagagcca

SEQ ID NO: 130960 - DNA, 25 bp, probe
agtgctgctctcagggcaagagcca

SEQ ID NO: 130961 - DNA, 25 bp, probe
agtcgctgcagctggtcatggagta

SEQ ID NO: 130962 - DNA, 25 bp, probe
agtctgcagagccgctgtagagttt

SEQ ID NO: 130963 - DNA, 25 bp, probe
agtctgcagagccgctgtagagttt

SEQ ID NO: 130964 - DNA, 25 bp, probe
agtacgaccgcgagatggtgcagca

SEQ ID NO: 130965 - DNA, 25 bp, probe
agtccagacctcggagaagctgaaa

SEQ ID NO: 130966 - DNA, 25 bp, probe
agtccagatccctcaaagtgaactt

SEQ ID NO: 130967 - DNA, 25 bp, probe
agtcactaccagtaccaatgattac

SEQ ID NO: 130968 - DNA, 25 bp, probe
agtgcaaaccaccattggaatctag

SEQ ID NO: 130969 - DNA, 25 bp, probe
agtcaaactcactatttataatgca

SEQ ID NO: 130970 - DNA, 25 bp, probe
agtagaaatgactcttggtatgaag

SEQ ID NO: 130971 - DNA, 25 bp, probe
agtagcaaaccattcttttgcacac

SEQ ID NO: 130972 - DNA, 25 bp, probe
agtaaactccacatctttgcactac

SEQ ID NO: 130973 - DNA, 25 bp, probe
agtgcagaatctggctttcttttct

SEQ ID NO: 130974 - DNA, 25 bp, probe
agtgcagccaatgcctttgtgtggt

SEQ ID NO: 130975 - DNA, 25 bp, probe
agtgcagccacagacttgtattttg

SEQ ID NO: 130976 - DNA, 25 bp, probe
agtgcagccacagacttgtattttg

SEQ ID NO: 130977 - DNA, 25 bp, probe
agtcccagatgagcctctattttca

SEQ ID NO: 130978 - DNA, 25 bp, probe
agtcttctggaggttctatttacgg

SEQ ID NO: 130979 - DNA, 25 bp, probe
agtcatctttgaggtgtaatcttgt

SEQ ID NO: 130980 - DNA, 25 bp, probe
agatcttttgggtgcagttctgaaa

SEQ ID NO: 130981 - DNA, 25 bp, probe
agtcatttgaggttagatcttttaa

SEQ ID NO: 130982 - DNA, 25 bp, probe
agtcccgaggaaagtctcagtccaa

SEQ ID NO: 130983 - DNA, 25 bp, probe
agtccaaattggtgctcacagtccc

SEQ ID NO: 130984 - DNA, 25 bp, probe
agtcaaccttgggtgatgccttccc

SEQ ID NO: 130985 - DNA, 25 bp, probe
agtcaacaggcaaggtaatcttcac

SEQ ID NO: 130986 - DNA, 25 bp, probe
agtcaacaaatccctagttgatagg

SEQ ID NO: 130987 - DNA, 25 bp, probe
agtctacaagggaaagtggcatggt

SEQ ID NO: 130988 - DNA, 25 bp, probe
agtgcccataggaaatagagagagg

SEQ ID NO: 130989 - DNA, 25 bp, probe
agtgcccagagggagtttgcggggg

SEQ ID NO: 130990 - DNA, 25 bp, probe
aatccgaggacctttggctcgggag

SEQ ID NO: 130991 - DNA, 25 bp, probe
caatttcgaacctcggtcgcaggag

SEQ ID NO: 130992 - DNA, 25 bp, probe
agtcttctataatctggggtcggag

SEQ ID NO: 130993 - DNA, 25 bp, probe
agttatattacttttgaggctggtg

SEQ ID NO: 130994 - DNA, 25 bp, probe
agttcttttcctagtcagcaggttc

SEQ ID NO: 130995 - DNA, 25 bp, probe
agtctttgtgtgcttgctaaatggt

SEQ ID NO: 130996 - DNA, 25 bp, probe
agtccatttttttgtaaatgcatct

SEQ ID NO: 130997 - DNA, 25 bp, probe
agtccattcttgctctgtttgagtc

SEQ ID NO: 130998 - DNA, 25 bp, probe
agtctctactgggacatgttaggcc

SEQ ID NO: 130999 - DNA, 25 bp, probe
agtgctcgaataccatctgatgtca

SEQ ID NO: 131000 - DNA, 25 bp, probe
agtgctgcttctacacatgtggtac

SEQ ID NO: 131001 - DNA, 25 bp, probe
agtgctgtccatagctagtggtctt

SEQ ID NO: 131002 - DNA, 25 bp, probe
agtcaatcctaattgtggtcctgcc

SEQ ID NO: 131003 - DNA, 25 bp, probe
agtcagtgcttaaatgggctccttc

SEQ ID NO: 131004 - DNA, 25 bp, probe
agtcagtgcgtaagatcgtctcctt

SEQ ID NO: 131005 - DNA, 25 bp, probe
agtcagtgcgtaagatcgtctcctt

SEQ ID NO: 131006 - DNA, 25 bp, probe
agtcctgcagtttgactgtttgcct

SEQ ID NO: 131007 - DNA, 25 bp, probe
agtcctgcagtttgactgtttgcct

SEQ ID NO: 131008 - DNA, 25 bp, probe
agtcccagtcattgagtctcgagtc

SEQ ID NO: 131009 - DNA, 25 bp, probe
agtcacacgctgactggttgggtct

SEQ ID NO: 131010 - DNA, 25 bp, probe
agtacaccttcaggcttaggtccat

SEQ ID NO: 131011 - DNA, 25 bp, probe
agtacagtttccgcaaggacatctt

SEQ ID NO: 131012 - DNA, 25 bp, probe
cagttcagtcggaacaaagtttcca

SEQ ID NO: 131013 - DNA, 25 bp, probe
agttcagtcggaacaaagtttccag

SEQ ID NO: 131014 - DNA, 25 bp, probe
agtccactcccaacaatactgtgtg

SEQ ID NO: 131015 - DNA, 25 bp, probe
agtccactcccaacaatactgtgtg

SEQ ID NO: 131016 - DNA, 25 bp, probe
agtgctcagcccatttcaactgggc

SEQ ID NO: 131017 - DNA, 25 bp, probe
agtccacacagcaagcttcacaagg

SEQ ID NO: 131018 - DNA, 25 bp, probe
agtccagatatctagcccacagagt

SEQ ID NO: 131019 - DNA, 25 bp, probe
agtcaccatttactccaagcatgta

SEQ ID NO: 131020 - DNA, 25 bp, probe
agtcatccatggacccctgatgatt

SEQ ID NO: 131021 - DNA, 25 bp, probe
agtcccatcaactcactatatatat

SEQ ID NO: 131022 - DNA, 25 bp, probe
agtcctcatcgattggcaacttcaa

SEQ ID NO: 131023 - DNA, 25 bp, probe
agtcctcatcgattggcaacttcaa

SEQ ID NO: 131024 - DNA, 25 bp, probe
agtcctctcttttgcatattctaat

SEQ ID NO: 131025 - DNA, 25 bp, probe
agtctttcttgttatgacctctagc

SEQ ID NO: 131026 - DNA, 25 bp, probe
agtcttttgtcttctgagtgttgga

SEQ ID NO: 131027 - DNA, 25 bp, probe
agtctttgtggattctgaggccctg

SEQ ID NO: 131028 - DNA, 25 bp, probe
agtctagatggatattagatgcccg

SEQ ID NO: 131029 - DNA, 25 bp, probe
agtcggatgtgaggttcagcagtgc

SEQ ID NO: 131030 - DNA, 25 bp, probe
agtcgctgttgaacccagagctgat

SEQ ID NO: 131031 - DNA, 25 bp, probe
agtcgctgttgaacccagagctgat

SEQ ID NO: 131032 - DNA, 25 bp, probe
agtgctctgtggacccacagcctaa

SEQ ID NO: 131033 - DNA, 25 bp, probe
agtcctgcaatgacacccagtacaa

SEQ ID NO: 131034 - DNA, 25 bp, probe
agtgccatgaagaaactctggatga

SEQ ID NO: 131035 - DNA, 25 bp, probe
agtgccatgaggagcaccctgtcat

SEQ ID NO: 131036 - DNA, 25 bp, probe
agtctatcatggagcacaacgtttc

SEQ ID NO: 131037 - DNA, 25 bp, probe
agtttctggcatagagtcctggctt

SEQ ID NO: 131038 - DNA, 25 bp, probe
aaattgcgctaaagccctgacttta

SEQ ID NO: 131039 - DNA, 25 bp, probe
agacaatggctataaactgaattag

SEQ ID NO: 131040 - DNA, 25 bp, probe
agatcaaggcaagaacctctttagc

SEQ ID NO: 131041 - DNA, 25 bp, probe
agtaagtcacactaagtcttctgga

SEQ ID NO: 131042 - DNA, 25 bp, probe
agtaagtcacactaagtcttctgga

SEQ ID NO: 131043 - DNA, 25 bp, probe
agtacagatagcaattagtcagctg

SEQ ID NO: 131044 - DNA, 25 bp, probe
agtactgcacaaattcctaaggggg

SEQ ID NO: 131045 - DNA, 25 bp, probe
agtattcaaaaaactccaggctggc

SEQ ID NO: 131046 - DNA, 25 bp, probe
agtaagcaggacaaatcccggctga

SEQ ID NO: 131047 - DNA, 25 bp, probe
agtccactgtaaatacacctgggat

SEQ ID NO: 131048 - DNA, 25 bp, probe
agtgccatggtagaagaattgagga

SEQ ID NO: 131049 - DNA, 25 bp, probe
agtgccatggtagaagaattgagga

SEQ ID NO: 131050 - DNA, 25 bp, probe
agtcactttgacaatgggaatgagg

SEQ ID NO: 131051 - DNA, 25 bp, probe
agtcgggctacacggagaagcagcg

SEQ ID NO: 131052 - DNA, 25 bp, probe
agtcagcacagtacaggcgagaacc

SEQ ID NO: 131053 - DNA, 25 bp, probe
agtccacgctgatgacgcagaagac

SEQ ID NO: 131054 - DNA, 25 bp, probe
agttcccttctgttcagcaaaggaa

SEQ ID NO: 131055 - DNA, 25 bp, probe
agttaatttttgtcagcaacaaaga

SEQ ID NO: 131056 - DNA, 25 bp, probe
agttcaagttccctcagattaaagc

SEQ ID NO: 131057 - DNA, 25 bp, probe
agtctcattcttccctggagttaat

SEQ ID NO: 131058 - DNA, 25 bp, probe
agtctattgtctccttggttatatt

SEQ ID NO: 131059 - DNA, 25 bp, probe
agtctattgtctccttggttatatt

SEQ ID NO: 131060 - DNA, 25 bp, probe
agtccccgctgggtgcgtagataat

SEQ ID NO: 131061 - DNA, 25 bp, probe
agtccccgctgggtgcgtagataat

SEQ ID NO: 131062 - DNA, 25 bp, probe
agtctcccatttaagcagctaataa

SEQ ID NO: 131063 - DNA, 25 bp, probe
agtcgcacacatctccagcgataaa

SEQ ID NO: 131064 - DNA, 25 bp, probe
agtcccctgcaggtagctatcaaga

SEQ ID NO: 131065 - DNA, 25 bp, probe
agtaacctggaggatctgatccggg

SEQ ID NO: 131066 - DNA, 25 bp, probe
agtatgtccaaaggcactgaggggg

SEQ ID NO: 131067 - DNA, 25 bp, probe
agtcagcacaaactcagcatctagt

SEQ ID NO: 131068 - DNA, 25 bp, probe
agtagaatgtgatcaatccagttta

SEQ ID NO: 131069 - DNA, 25 bp, probe
agtaactctgcagagtgccttctcc

SEQ ID NO: 131070 - DNA, 25 bp, probe
agtcaactacgcgaggcagaggctc

SEQ ID NO: 131071 - DNA, 25 bp, probe
agtgccactcactgaaggagagctt

SEQ ID NO: 131072 - DNA, 25 bp, probe
agtccaggcagctcacggaggagat

SEQ ID NO: 131073 - DNA, 25 bp, probe
agtccagggatgctgcggagcctgt

SEQ ID NO: 131074 - DNA, 25 bp, probe
agtccagggatgctgcggagcctgt

SEQ ID NO: 131075 - DNA, 25 bp, probe
agtcctgtgagctcaggtgacctcc

SEQ ID NO: 131076 - DNA, 25 bp, probe
agtcctgtgagctcaggtgacctcc

SEQ ID NO: 131077 - DNA, 25 bp, probe
agtcagtatggctcaaccagccatc

SEQ ID NO: 131078 - DNA, 25 bp, probe
agtagttgagcctgaccatgagtct

SEQ ID NO: 131079 - DNA, 25 bp, probe
agtagttgagcctgaccatgagtct

SEQ ID NO: 131080 - DNA, 25 bp, probe
agtcagcatgcggccgagatcaata

SEQ ID NO: 131081 - DNA, 25 bp, probe
agtgcgcgatgccgggatcaaagtc

SEQ ID NO: 131082 - DNA, 25 bp, probe
agctacgtgtggggaacaagtaccg

SEQ ID NO: 131083 - DNA, 25 bp, probe
agtaggtgggggaacactgagaaag

SEQ ID NO: 131084 - DNA, 25 bp, probe
agtcaggtggtgggagtaccagccc

SEQ ID NO: 131085 - DNA, 25 bp, probe
agatcacctggtggaggtaccgttg

SEQ ID NO: 131086 - DNA, 25 bp, probe
agatcatccgtgggaacttccctta

SEQ ID NO: 131087 - DNA, 25 bp, probe
agtctgagggccaaacgtgcctgct

SEQ ID NO: 131088 - DNA, 25 bp, probe
agattatgggcctgaccatcttggc

SEQ ID NO: 131089 - DNA, 25 bp, probe
agattgaggggcccactgtttggag

SEQ ID NO: 131090 - DNA, 25 bp, probe
agattgaggggcccactgtttggag

SEQ ID NO: 131091 - DNA, 25 bp, probe
agttgacgcggccggcgaatttagt

SEQ ID NO: 131092 - DNA, 25 bp, probe
agttaagcgggttgggatcatcata

SEQ ID NO: 131093 - DNA, 25 bp, probe
agtttagaggcacagtggaccaagt

SEQ ID NO: 131094 - DNA, 25 bp, probe
agtttagagctcctggacagtaaag

SEQ ID NO: 131095 - DNA, 25 bp, probe
agtttggagctcctggaaggtaaag

SEQ ID NO: 131096 - DNA, 25 bp, probe
agtcctggaccccgagggaatcagg

SEQ ID NO: 131097 - DNA, 25 bp, probe
agtttggatcgcccgagtgggacga

SEQ ID NO: 131098 - DNA, 25 bp, probe
agcccggtggtctggattggagtat

SEQ ID NO: 131099 - DNA, 25 bp, probe
agtcactgggttttggtatggtttg

SEQ ID NO: 131100 - DNA, 25 bp, probe
agtcctctgagtacatctggtggtg

SEQ ID NO: 131101 - DNA, 25 bp, probe
agtcaccaagataatctgaggtttg

SEQ ID NO: 131102 - DNA, 25 bp, probe
agtctcccagtgggtgatgcttttg

SEQ ID NO: 131103 - DNA, 25 bp, probe
agtctgaccgggctgcattgtgtat

SEQ ID NO: 131104 - DNA, 25 bp, probe
agtctccgagagcggattgagttcc

SEQ ID NO: 131105 - DNA, 25 bp, probe
agtagctccaggcaggtgtggcttc

SEQ ID NO: 131106 - DNA, 25 bp, probe
agtagctccaggcaggtgtggcttc

SEQ ID NO: 131107 - DNA, 25 bp, probe
agtacaccaagccctggatggtgtc

SEQ ID NO: 131108 - DNA, 25 bp, probe
agtacaccaagccctggatggtgtc

SEQ ID NO: 131109 - DNA, 25 bp, probe
agtacatacaaaacaggctggtctc

SEQ ID NO: 131110 - DNA, 25 bp, probe
agtagtgaccaatcgggagtagcaa

SEQ ID NO: 131111 - DNA, 25 bp, probe
agtaacaggaactgaggcgatagaa

SEQ ID NO: 131112 - DNA, 25 bp, probe
agtaaattaagcagatagtcaaaga

SEQ ID NO: 131113 - DNA, 25 bp, probe
agtcaacttacggtgcacagtaata

SEQ ID NO: 131114 - DNA, 25 bp, probe
agtcaacttacggtgcacagtaata

SEQ ID NO: 131115 - DNA, 25 bp, probe
agttggctgtatgactgaagtaata

SEQ ID NO: 131116 - DNA, 25 bp, probe
agtctctgtgtaatcatctgaagaa

SEQ ID NO: 131117 - DNA, 25 bp, probe
agtccttggcaaatcacaacattct

SEQ ID NO: 131118 - DNA, 25 bp, probe
agtcactgcaggcttcagcaactta

SEQ ID NO: 131119 - DNA, 25 bp, probe
agtactgcaactgccagaacttggt

SEQ ID NO: 131120 - DNA, 25 bp, probe
agtaataactgatgagatacatttg

SEQ ID NO: 131121 - DNA, 25 bp, probe
agagaatattaatggtagctttaga

SEQ ID NO: 131122 - DNA, 25 bp, probe
agagtactaaacagcttccttcaga

SEQ ID NO: 131123 - DNA, 25 bp, probe
agttcacagcagtgggtaggcccag

SEQ ID NO: 131124 - DNA, 25 bp, probe
agtctagagagggtcgtctggcctg

SEQ ID NO: 131125 - DNA, 25 bp, probe
agtctcgaagagttcctttgccaaa

SEQ ID NO: 131126 - DNA, 25 bp, probe
agtcctcatacaatctactttacag

SEQ ID NO: 131127 - DNA, 25 bp, probe
agtcccaaagcacagttcttggttg

SEQ ID NO: 131128 - DNA, 25 bp, probe
agtctccagggtcagtccctggatg

SEQ ID NO: 131129 - DNA, 25 bp, probe
agtcccaaggagcaatacatcgaag

SEQ ID NO: 131130 - DNA, 25 bp, probe
agtcctagaggacctgagtctgcta

SEQ ID NO: 131131 - DNA, 25 bp, probe
agtgccagtgagcacacgcacttta

SEQ ID NO: 131132 - DNA, 25 bp, probe
agtgccagtgagcacacgcacttta

SEQ ID NO: 131133 - DNA, 25 bp, probe
agtccagaagtatctgcctttaggc

SEQ ID NO: 131134 - DNA, 25 bp, probe
agtccaaagacaatggcctttacca

SEQ ID NO: 131135 - DNA, 25 bp, probe
agttcaaatgttatccttgttcctg

SEQ ID NO: 131136 - DNA, 25 bp, probe
agtccgaatgttagattcctcttgc

SEQ ID NO: 131137 - DNA, 25 bp, probe
agtcatcgatttatcaatcccgttt

SEQ ID NO: 131138 - DNA, 25 bp, probe
agtcagctgtctttgtcaaccatac

SEQ ID NO: 131139 - DNA, 25 bp, probe
agtcagctgtctttgtcaaccatac

SEQ ID NO: 131140 - DNA, 25 bp, probe
agtcagatgctttcatttacacaga

SEQ ID NO: 131141 - DNA, 25 bp, probe
agtcaatgcctatgaacacatcaga

SEQ ID NO: 131142 - DNA, 25 bp, probe
agtttatctatggcacccatgcacc

SEQ ID NO: 131143 - DNA, 25 bp, probe
agatcattaatgacgccttcaacct

SEQ ID NO: 131144 - DNA, 25 bp, probe
agtttacactgcctcttagcagcct

SEQ ID NO: 131145 - DNA, 25 bp, probe
agtttccagatggctctaacctcag

SEQ ID NO: 131146 - DNA, 25 bp, probe
agtcttctgagttgtgctacaccaa

SEQ ID NO: 131147 - DNA, 25 bp, probe
agatcttcaagatgtgttaaagtgt

SEQ ID NO: 131148 - DNA, 25 bp, probe
agtcataaatgaaagctttgaaggt

SEQ ID NO: 131149 - DNA, 25 bp, probe
agtcacgaaaaacttacatgagagt

SEQ ID NO: 131150 - DNA, 25 bp, probe
agtcacgaaaaacttacatgagagt

SEQ ID NO: 131151 - DNA, 25 bp, probe
agtcaggaaatggggtatgcagggt

SEQ ID NO: 131152 - DNA, 25 bp, probe
agtatgtaaatggaggagacctaat

SEQ ID NO: 131153 - DNA, 25 bp, probe
agtctgcttcactgagatgctacct

SEQ ID NO: 131154 - DNA, 25 bp, probe
agtcatgttccagcttggactcatg

SEQ ID NO: 131155 - DNA, 25 bp, probe
agtctaacactcctgggagctcagg

SEQ ID NO: 131156 - DNA, 25 bp, probe
agtcttcgagacttgggagctgctt

SEQ ID NO: 131157 - DNA, 25 bp, probe
agtcattccaaatatgagatgcatt

SEQ ID NO: 131158 - DNA, 25 bp, probe
agtcattccaaatatgagatgcatt

SEQ ID NO: 131159 - DNA, 25 bp, probe
agtatactaagggagttcattgatt

SEQ ID NO: 131160 - DNA, 25 bp, probe
agtaacccacattctgttcaggata

SEQ ID NO: 131161 - DNA, 25 bp, probe
agtaacgtgctcactgtgtatagga

SEQ ID NO: 131162 - DNA, 25 bp, probe
agttacagattcagcttttcaaatt

SEQ ID NO: 131163 - DNA, 25 bp, probe
agttacagattcagcttttcaaatt

SEQ ID NO: 131164 - DNA, 25 bp, probe
agcgtcctgatcacgtttgacaaca

SEQ ID NO: 131165 - DNA, 25 bp, probe
agcttttctttccttttgcaacaag

SEQ ID NO: 131166 - DNA, 25 bp, probe
agttcgccttttcatttcaagcata

SEQ ID NO: 131167 - DNA, 25 bp, probe
agttcccaaagtgattgtacctagg

SEQ ID NO: 131168 - DNA, 25 bp, probe
agttcctatgaacaacgtaccaaca

SEQ ID NO: 131169 - DNA, 25 bp, probe
agttttctacaatagctacctccca

SEQ ID NO: 131170 - DNA, 25 bp, probe
agttcttctacaactggtacttcct

SEQ ID NO: 131171 - DNA, 25 bp, probe
agtacattgtaccaaagttcttaat

SEQ ID NO: 131172 - DNA, 25 bp, probe
agttcttgtacacaacgtttccact

SEQ ID NO: 131173 - DNA, 25 bp, probe
agtttcagttatcatactttcctat

SEQ ID NO: 131174 - DNA, 25 bp, probe
agtcttggttctgaaacttctctaa

SEQ ID NO: 131175 - DNA, 25 bp, probe
agtttattctctgaataggtcccaa

SEQ ID NO: 131176 - DNA, 25 bp, probe
agtttgtgcctcagaaaggccccct

SEQ ID NO: 131177 - DNA, 25 bp, probe
agttaagatcacagacaatgccctc

SEQ ID NO: 131178 - DNA, 25 bp, probe
agttaaggtcattactaggccatat

SEQ ID NO: 131179 - DNA, 25 bp, probe
agttaaggtcattactaggccatat

SEQ ID NO: 131180 - DNA, 25 bp, probe
agttaaggaatctctgtgtgcaaag

SEQ ID NO: 131181 - DNA, 25 bp, probe
agtcattgatagaactactttgaaa

SEQ ID NO: 131182 - DNA, 25 bp, probe
agtcttttgacatgagccctgaaaa

SEQ ID NO: 131183 - DNA, 25 bp, probe
agtcccctgaaaggtcctatacaag

SEQ ID NO: 131184 - DNA, 25 bp, probe
agatgagctcaagaaggtccttaac

SEQ ID NO: 131185 - DNA, 25 bp, probe
agtactaaacagcttccttcagatc

SEQ ID NO: 131186 - DNA, 25 bp, probe
agtcacttagacaggcttttagatg

SEQ ID NO: 131187 - DNA, 25 bp, probe
agtcactttatctgggtgtctcgca

SEQ ID NO: 131188 - DNA, 25 bp, probe
agtcagctgctcaacggaatggcct

SEQ ID NO: 131189 - DNA, 25 bp, probe
agtcatgctgactctatgagatggg

SEQ ID NO: 131190 - DNA, 25 bp, probe
agtcctattgtcgtgcatgtgggat

SEQ ID NO: 131191 - DNA, 25 bp, probe
agtcctctgtttgcactggacatat

SEQ ID NO: 131192 - DNA, 25 bp, probe
agtctattgtttaactgtaccatcc

SEQ ID NO: 131193 - DNA, 25 bp, probe
agttatcttaaatattccaatacta

SEQ ID NO: 131194 - DNA, 25 bp, probe
agttatttaacatccattaatcaga

SEQ ID NO: 131195 - DNA, 25 bp, probe
agttatttaacatccattaatcaga

SEQ ID NO: 131196 - DNA, 25 bp, probe
agttgccatgtagaccccttgaaga

SEQ ID NO: 131197 - DNA, 25 bp, probe
agttgccatgtagaccccttgaaga

SEQ ID NO: 131198 - DNA, 25 bp, probe
agttggatgagacacacccttacac

SEQ ID NO: 131199 - DNA, 25 bp, probe
agttatagtgatcaactcccttctc

SEQ ID NO: 131200 - DNA, 25 bp, probe
agttatagcccaaactcaactctca

SEQ ID NO: 131201 - DNA, 25 bp, probe
agtttaagctttattcattcatgca

SEQ ID NO: 131202 - DNA, 25 bp, probe
agtcatattgacattctttaatcca

SEQ ID NO: 131203 - DNA, 25 bp, probe
agtcatcctgaacctgagttcaacc

SEQ ID NO: 131204 - DNA, 25 bp, probe
agttcactgggactcagtttacctt

SEQ ID NO: 131205 - DNA, 25 bp, probe
agtccctgggactgtttcagacttg

SEQ ID NO: 131206 - DNA, 25 bp, probe
agtcgggggagggcttcatcgactt

SEQ ID NO: 131207 - DNA, 25 bp, probe
agatcgtggacgaggccaacgcacg

SEQ ID NO: 131208 - DNA, 25 bp, probe
agatcgtgttacagtcacaatctac

SEQ ID NO: 131209 - DNA, 25 bp, probe
agcttgtttacccaccagattacaa

SEQ ID NO: 131210 - DNA, 25 bp, probe
agcttcattaagataccagttggga

SEQ ID NO: 131211 - DNA, 25 bp, probe
agcttcccaaacaccagtgttggat

SEQ ID NO: 131212 - DNA, 25 bp, probe
agcttcccaaacaccagtgttggat

SEQ ID NO: 131213 - DNA, 25 bp, probe
agatctggccacacgaaactgttta

SEQ ID NO: 131214 - DNA, 25 bp, probe
agtctctccatcacttgatcaatgt

SEQ ID NO: 131215 - DNA, 25 bp, probe
agtctctgatccagtttgtgagaac

SEQ ID NO: 131216 - DNA, 25 bp, probe
agtttgatcacactattttagagtc

SEQ ID NO: 131217 - DNA, 25 bp, probe
agtctgataacatggtttcaagccc

SEQ ID NO: 131218 - DNA, 25 bp, probe
agtctgataacatggtttcaagccc

SEQ ID NO: 131219 - DNA, 25 bp, probe
agtcagtagatctggtttccattcc

SEQ ID NO: 131220 - DNA, 25 bp, probe
agtcatgtagacaggtacttcactc

SEQ ID NO: 131221 - DNA, 25 bp, probe
agttttactaatccacttcactctg

SEQ ID NO: 131222 - DNA, 25 bp, probe
agatttttgctcaggcgttcctggg

SEQ ID NO: 131223 - DNA, 25 bp, probe
agatttttgctcaggcgttcctggg

SEQ ID NO: 131224 - DNA, 25 bp, probe
agtctgattttgaagggttctcgta

SEQ ID NO: 131225 - DNA, 25 bp, probe
agtcattttggttggcgcttttgtt

SEQ ID NO: 131226 - DNA, 25 bp, probe
agtctttgagcgagcccattttgtg

SEQ ID NO: 131227 - DNA, 25 bp, probe
agtcttaacattggccagcatctgt

SEQ ID NO: 131228 - DNA, 25 bp, probe
agtcattgactttggatcaagctgt

SEQ ID NO: 131229 - DNA, 25 bp, probe
agtcattcctttggatgtagtagat

SEQ ID NO: 131230 - DNA, 25 bp, probe
agtcttccatgtcagagtcacctga

SEQ ID NO: 131231 - DNA, 25 bp, probe
agatctgtaattggacagctctctc

SEQ ID NO: 131232 - DNA, 25 bp, probe
agtctggaggtcccagacatgctgc

SEQ ID NO: 131233 - DNA, 25 bp, probe
agtcttgaggccgaccaagagccag

SEQ ID NO: 131234 - DNA, 25 bp, probe
agtttcttgggagcaacagcacgta

SEQ ID NO: 131235 - DNA, 25 bp, probe
agattactaacttccaacactcagt

SEQ ID NO: 131236 - DNA, 25 bp, probe
agattattgcaacatttaacctgaa

SEQ ID NO: 131237 - DNA, 25 bp, probe
agagtgctacaacataaaactggga

SEQ ID NO: 131238 - DNA, 25 bp, probe
agagtttcagggacaattactgggg

SEQ ID NO: 131239 - DNA, 25 bp, probe
agttattcagggacactatattaca

SEQ ID NO: 131240 - DNA, 25 bp, probe
agtaacacaggattcactgttttat

SEQ ID NO: 131241 - DNA, 25 bp, probe
agttatgccaaagtactgttggttc

SEQ ID NO: 131242 - DNA, 25 bp, probe
agttggctctagctacttggactat

SEQ ID NO: 131243 - DNA, 25 bp, probe
agttgtgtccaacgattcggactcg

SEQ ID NO: 131244 - DNA, 25 bp, probe
agtcatgtgtctgaggtgacggact

SEQ ID NO: 131245 - DNA, 25 bp, probe
agtctgcttctttgcaggtcgggag

SEQ ID NO: 131246 - DNA, 25 bp, probe
agtctgttctggcggcattgtgggc

SEQ ID NO: 131247 - DNA, 25 bp, probe
agtttctgggcgagcgtgattgtgc

SEQ ID NO: 131248 - DNA, 25 bp, probe
agttccgtgtaagggctttgatgcc

SEQ ID NO: 131249 - DNA, 25 bp, probe
agtatccagttcttagtccttagtc

SEQ ID NO: 131250 - DNA, 25 bp, probe
agttcctgtggaatcagacctccag

SEQ ID NO: 131251 - DNA, 25 bp, probe
agtatgatctgcagaatgaaactca

SEQ ID NO: 131252 - DNA, 25 bp, probe
agtcttctgatctcagataactcag

SEQ ID NO: 131253 - DNA, 25 bp, probe
agtcatctcctcagcaggaacgcac

SEQ ID NO: 131254 - DNA, 25 bp, probe
agtctcagctggatgcagtgaacct

SEQ ID NO: 131255 - DNA, 25 bp, probe
agtctcagccgaagagagctgggct

SEQ ID NO: 131256 - DNA, 25 bp, probe
agtcataggcagagtggttgtgctg

SEQ ID NO: 131257 - DNA, 25 bp, probe
agtcatatggcagcaggttggtgat

SEQ ID NO: 131258 - DNA, 25 bp, probe
agtctgatgtgtgggcctatggcgt

SEQ ID NO: 131259 - DNA, 25 bp, probe
agtcgatatatgggctattggttgt

SEQ ID NO: 131260 - DNA, 25 bp, probe
agtctgaatctgcactactcaactt

SEQ ID NO: 131261 - DNA, 25 bp, probe
agtctgacgatgacacctccaattt

SEQ ID NO: 131262 - DNA, 25 bp, probe
agtctcagcaagacatcctacaaga

SEQ ID NO: 131263 - DNA, 25 bp, probe
agtctccacagaaacagcatcaagt

SEQ ID NO: 131264 - DNA, 25 bp, probe
agtctcacaagacaacatgataaaa

SEQ ID NO: 131265 - DNA, 25 bp, probe
agttgcccaaccacaggaagaaagg

SEQ ID NO: 131266 - DNA, 25 bp, probe
agtcacccacccatatggaaattgc

SEQ ID NO: 131267 - DNA, 25 bp, probe
agtacaacaactgtgctacaaatgg

SEQ ID NO: 131268 - DNA, 25 bp, probe
agtagccataaagatcatcagcaaa

SEQ ID NO: 131269 - DNA, 25 bp, probe
agtaccagccaagtacacacgatga

SEQ ID NO: 131270 - DNA, 25 bp, probe
agaaccatcaagttccaaccattaa

SEQ ID NO: 131271 - DNA, 25 bp, probe
aaacccacacctcgtgaactgtaat

SEQ ID NO: 131272 - DNA, 25 bp, probe
cagcgacccaccttttgaagttcgt

SEQ ID NO: 131273 - DNA, 25 bp, probe
cagcgacccaccttttgaagttcgt

SEQ ID NO: 131274 - DNA, 25 bp, probe
agcgacccaccttttgaagttcgtg

SEQ ID NO: 131275 - DNA, 25 bp, probe
acaacttcagcctgttaggtttagg

SEQ ID NO: 131276 - DNA, 25 bp, probe
agcaagttcacctccaagtttgtac

SEQ ID NO: 131277 - DNA, 25 bp, probe
agcaagttcacctccaagtttgtac

SEQ ID NO: 131278 - DNA, 25 bp, probe
agaagtctagcctcaggtttctacc

SEQ ID NO: 131279 - DNA, 25 bp, probe
agaggcctgatggttagtgttaatg

SEQ ID NO: 131280 - DNA, 25 bp, probe
agaggcctcaaactgggttacaaat

SEQ ID NO: 131281 - DNA, 25 bp, probe
agagggagccaagatcgttaaagat

SEQ ID NO: 131282 - DNA, 25 bp, probe
agtcggaccagtgtcaaggaaagtt

SEQ ID NO: 131283 - DNA, 25 bp, probe
agtctggcaccaaagtccaggacac

SEQ ID NO: 131284 - DNA, 25 bp, probe
agtagctggccagaactcaagtcac

SEQ ID NO: 131285 - DNA, 25 bp, probe
agtttgcccagacagtcatgactag

SEQ ID NO: 131286 - DNA, 25 bp, probe
agtagtgtcctcctagtatattagt

SEQ ID NO: 131287 - DNA, 25 bp, probe
agtatggttcttcagtcgatatatg

SEQ ID NO: 131288 - DNA, 25 bp, probe
agtctgctttaattcatgtccttct

SEQ ID NO: 131289 - DNA, 25 bp, probe
agttgtttgatatatctcccctgta

SEQ ID NO: 131290 - DNA, 25 bp, probe
agtttattataatcatccctctatt

SEQ ID NO: 131291 - DNA, 25 bp, probe
agttatttataattgccttgtcata

SEQ ID NO: 131292 - DNA, 25 bp, probe
agtttattacagttccttggatgaa

SEQ ID NO: 131293 - DNA, 25 bp, probe
agtattaaactctcctttgatatta

SEQ ID NO: 131294 - DNA, 25 bp, probe
agtactataatttacctgaagtctt

SEQ ID NO: 131295 - DNA, 25 bp, probe
agcttcttggtattcacttgggttt

SEQ ID NO: 131296 - DNA, 25 bp, probe
agtatctgtgtttccggtgggtgta

SEQ ID NO: 131297 - DNA, 25 bp, probe
agtacattgtttccacttcttgata

SEQ ID NO: 131298 - DNA, 25 bp, probe
agtcactagtattgctaatttttga

SEQ ID NO: 131299 - DNA, 25 bp, probe
agtcacaatgtattgcataatcaat

SEQ ID NO: 131300 - DNA, 25 bp, probe
agtcaatatcaccatcatagacaga

SEQ ID NO: 131301 - DNA, 25 bp, probe
agtctttcatcttctggcagcagaa

SEQ ID NO: 131302 - DNA, 25 bp, probe
agttttcatcgtctgctcaataccg

SEQ ID NO: 131303 - DNA, 25 bp, probe
agtatcttcatgtatccctgttact

SEQ ID NO: 131304 - DNA, 25 bp, probe
agtacaccatatgcactctggtacc

SEQ ID NO: 131305 - DNA, 25 bp, probe
agttaaatatcctctactacctcac

SEQ ID NO: 131306 - DNA, 25 bp, probe
agtaccaaggagtacgcctacctca

SEQ ID NO: 131307 - DNA, 25 bp, probe
cagttactggggtcacccaacctga

SEQ ID NO: 131308 - DNA, 25 bp, probe
agcttctgggggacatccccccagc

SEQ ID NO: 131309 - DNA, 25 bp, probe
agtatgtggggacacccatggccag

SEQ ID NO: 131310 - DNA, 25 bp, probe
agtactggtagagaagcctctgcca

SEQ ID NO: 131311 - DNA, 25 bp, probe
agtactaaagagggagccttgctat

SEQ ID NO: 131312 - DNA, 25 bp, probe
agtactaaagagggagccttgctat

SEQ ID NO: 131313 - DNA, 25 bp, probe
agtacatgatgatgcgggactgctg

SEQ ID NO: 131314 - DNA, 25 bp, probe
agtcagctgagttgtaggcctggct

SEQ ID NO: 131315 - DNA, 25 bp, probe
agtcagtggtaactgctgcagggct

SEQ ID NO: 131316 - DNA, 25 bp, probe
agtcactggaaactgctgggcagag

SEQ ID NO: 131317 - DNA, 25 bp, probe
agtacagaaacaccggatgcagcag

SEQ ID NO: 131318 - DNA, 25 bp, probe
agttcctgtgaacaatgcactggga

SEQ ID NO: 131319 - DNA, 25 bp, probe
agttactcgaatgagccctggctac

SEQ ID NO: 131320 - DNA, 25 bp, probe
agttcccagagtgggctttggtggc

SEQ ID NO: 131321 - DNA, 25 bp, probe
agtcttcggcagaagcacttgtcag

SEQ ID NO: 131322 - DNA, 25 bp, probe
agtttgcggtgaagattatggaagt

SEQ ID NO: 131323 - DNA, 25 bp, probe
agtttggtggatgacgtgccaagga

SEQ ID NO: 131324 - DNA, 25 bp, probe
agtcattgcgggaccgcgtggaaga

SEQ ID NO: 131325 - DNA, 25 bp, probe
agtttgggaccatgactgagaagca

SEQ ID NO: 131326 - DNA, 25 bp, probe
agtttgtctaccagtaagagagcaa

SEQ ID NO: 131327 - DNA, 25 bp, probe
agttttaagacactgttctgggcta

SEQ ID NO: 131328 - DNA, 25 bp, probe
agtttctgaaacggaatcccagcca

SEQ ID NO: 131329 - DNA, 25 bp, probe
agtttctgaaacggaatcccagcca

SEQ ID NO: 131330 - DNA, 25 bp, probe
agttcctgaacgagaaggcgcgcct

SEQ ID NO: 131331 - DNA, 25 bp, probe
agttcttatcagcaagatggtccca

SEQ ID NO: 131332 - DNA, 25 bp, probe
agatacctatcaggatgaagaacag

SEQ ID NO: 131333 - DNA, 25 bp, probe
agtacatcgatgccgtgaaggactg

SEQ ID NO: 131334 - DNA, 25 bp, probe
agtacttgcacggcaagggcatcat

SEQ ID NO: 131335 - DNA, 25 bp, probe
agtctcttcaaggcattatctcctg

SEQ ID NO: 131336 - DNA, 25 bp, probe
agtctattcaaggcattgagaatgt

SEQ ID NO: 131337 - DNA, 25 bp, probe
agttaagaaccactgacaatgtaac

SEQ ID NO: 131338 - DNA, 25 bp, probe
agttttgatgatgctcttcaagtaa

SEQ ID NO: 131339 - DNA, 25 bp, probe
agtttccatgagccaccgaagttac

SEQ ID NO: 131340 - DNA, 25 bp, probe
agttactcgtgtactaatagattac

SEQ ID NO: 131341 - DNA, 25 bp, probe
agtctaattttactttatgctatga

SEQ ID NO: 131342 - DNA, 25 bp, probe
agtctaattgttcatcctaattgtt

SEQ ID NO: 131343 - DNA, 25 bp, probe
agtctaatctctaaatcaagtattt

SEQ ID NO: 131344 - DNA, 25 bp, probe
agttttccttgctatcaggatgcat

SEQ ID NO: 131345 - DNA, 25 bp, probe
agtttgcatagctacttctcgacat

SEQ ID NO: 131346 - DNA, 25 bp, probe
agtttaccaagtactggacagaatc

SEQ ID NO: 131347 - DNA, 25 bp, probe
agttttccaagtactaccagaagca

SEQ ID NO: 131348 - DNA, 25 bp, probe
agtttgtcaagagacccctgaacat

SEQ ID NO: 131349 - DNA, 25 bp, probe
agtttgtcaagagacccctgaacat

SEQ ID NO: 131350 - DNA, 25 bp, probe
agatttgtgaagtgtttccttagaa

SEQ ID NO: 131351 - DNA, 25 bp, probe
agtctttagagaatgatctatcact

SEQ ID NO: 131352 - DNA, 25 bp, probe
agtttgtaaatattctacacatgta

SEQ ID NO: 131353 - DNA, 25 bp, probe
agtcttgcagaccgagtctacacaa

SEQ ID NO: 131354 - DNA, 25 bp, probe
agtctttgtcaatgctctaacaaac

SEQ ID NO: 131355 - DNA, 25 bp, probe
agttactccgtaccttactgagatc

SEQ ID NO: 131356 - DNA, 25 bp, probe
agttttcacttacctcattgggaga

SEQ ID NO: 131357 - DNA, 25 bp, probe
agcaatttcctgcaaccagtaagga

SEQ ID NO: 131358 - DNA, 25 bp, probe
agtaagtgctctcaactgcgtaggt

SEQ ID NO: 131359 - DNA, 25 bp, probe
agtacctctccctactatgtgagag

SEQ ID NO: 131360 - DNA, 25 bp, probe
agtagccttgtccagacgaagtgac

SEQ ID NO: 131361 - DNA, 25 bp, probe
agtcacctgtgggctgtccaagtga

SEQ ID NO: 131362 - DNA, 25 bp, probe
agtacctgggtctggacgtgccagt

SEQ ID NO: 131363 - DNA, 25 bp, probe
agtacctcgggaatgaacttccgct

SEQ ID NO: 131364 - DNA, 25 bp, probe
agtaagtgcgggtcataagcttgcg

SEQ ID NO: 131365 - DNA, 25 bp, probe
agtaaagtgtgatcattactggcca

SEQ ID NO: 131366 - DNA, 25 bp, probe
agtcacctgatgtcaaccttgtgac

SEQ ID NO: 131367 - DNA, 25 bp, probe
agtcacccatgtactgcaagtctga

SEQ ID NO: 131368 - DNA, 25 bp, probe
agtacacatcgtatggggtgacacc

SEQ ID NO: 131369 - DNA, 25 bp, probe
agtacaatcagggtgtggtagaaca

SEQ ID NO: 131370 - DNA, 25 bp, probe
agtactacatgggcttggccgaaga

SEQ ID NO: 131371 - DNA, 25 bp, probe
agtatcgaaagattccgcaggaaga

SEQ ID NO: 131372 - DNA, 25 bp, probe
agttcgaaaactcagcaatggcaga

SEQ ID NO: 131373 - DNA, 25 bp, probe
agattccaaggacctcacgatggtg

SEQ ID NO: 131374 - DNA, 25 bp, probe
agttcgatatttctctgcgtgggca

SEQ ID NO: 131375 - DNA, 25 bp, probe
agtacatgagtgctcttctgcaggc

SEQ ID NO: 131376 - DNA, 25 bp, probe
agtcacagtggccttgttggtgccc

SEQ ID NO: 131377 - DNA, 25 bp, probe
agtcacaggcagctctttggtgttt

SEQ ID NO: 131378 - DNA, 25 bp, probe
agtacatccagctctcagtggatgc

SEQ ID NO: 131379 - DNA, 25 bp, probe
agtcagaactgcctctgagctgggc

SEQ ID NO: 131380 - DNA, 25 bp, probe
agtcaggattgctctgcaggaagac

SEQ ID NO: 131381 - DNA, 25 bp, probe
agtatgaatttcctgacaaagactg

SEQ ID NO: 131382 - DNA, 25 bp, probe
agtatggttcatctgtcacaagcct

SEQ ID NO: 131383 - DNA, 25 bp, probe
agttgaggtgcgacaggcactcggc

SEQ ID NO: 131384 - DNA, 25 bp, probe
agttgagggcagctggcctagagcc

SEQ ID NO: 131385 - DNA, 25 bp, probe
agttcggacgggattcgaggcgtgc

SEQ ID NO: 131386 - DNA, 25 bp, probe
agttctgaacatcggatactggggc

SEQ ID NO: 131387 - DNA, 25 bp, probe
agttcatcgacgagaacccagagct

SEQ ID NO: 131388 - DNA, 25 bp, probe
agttccttttagactcaccagagat

SEQ ID NO: 131389 - DNA, 25 bp, probe
agtcattttgtttgtgtccacagaa

SEQ ID NO: 131390 - DNA, 25 bp, probe
agtcatttcatgtttctgtctgggg

SEQ ID NO: 131391 - DNA, 25 bp, probe
agattgatccatgtctgtttgtagg

SEQ ID NO: 131392 - DNA, 25 bp, probe
agtatatcaatcctcttttgatgtc

SEQ ID NO: 131393 - DNA, 25 bp, probe
agtcattcacatgtgttcgtgagat

SEQ ID NO: 131394 - DNA, 25 bp, probe
agtatgctattaagtcattctgaat

SEQ ID NO: 131395 - DNA, 25 bp, probe
agtatgccttgctgtggatggagag

SEQ ID NO: 131396 - DNA, 25 bp, probe
agtatgccttgctgtggatggagag

SEQ ID NO: 131397 - DNA, 25 bp, probe
agtatccctcatcttatgtaagtgt

SEQ ID NO: 131398 - DNA, 25 bp, probe
agttaccctgcagtttgtgaatttt

SEQ ID NO: 131399 - DNA, 25 bp, probe
agtaattcctctgattctgttttct

SEQ ID NO: 131400 - DNA, 25 bp, probe
agtagaacctctgactgccaatttc

SEQ ID NO: 131401 - DNA, 25 bp, probe
agtagggtcagttcacgtagattct

SEQ ID NO: 131402 - DNA, 25 bp, probe
agtaagcccttggccgtgatgtgtc

SEQ ID NO: 131403 - DNA, 25 bp, probe
agtaatggacttgcccatggtgagt

SEQ ID NO: 131404 - DNA, 25 bp, probe
agtaaggatttcggattcagctggt

SEQ ID NO: 131405 - DNA, 25 bp, probe
agtataggattttgcacattgaggg

SEQ ID NO: 131406 - DNA, 25 bp, probe
agttggtgaaaaggcttggcgctgg

SEQ ID NO: 131407 - DNA, 25 bp, probe
agtatgttaaagtgcctctggctga

SEQ ID NO: 131408 - DNA, 25 bp, probe
agtatgatgtaatgtggtctttttt

SEQ ID NO: 131409 - DNA, 25 bp, probe
agttattaaagttatgtttttcatg

SEQ ID NO: 131410 - DNA, 25 bp, probe
agataagtaagaagtagtgtttcca

SEQ ID NO: 131411 - DNA, 25 bp, probe
agtaattacagtcttctgctttaaa

SEQ ID NO: 131412 - DNA, 25 bp, probe
agttattaccttctgctgttgcaaa

SEQ ID NO: 131413 - DNA, 25 bp, probe
agttcagctttcatggactttcaaa

SEQ ID NO: 131414 - DNA, 25 bp, probe
agttcagcatttattgtttaggagt

SEQ ID NO: 131415 - DNA, 25 bp, probe
agtatatgctgtgaaggtcttaaag

SEQ ID NO: 131416 - DNA, 25 bp, probe
agtcatggaggctataggatcttat

SEQ ID NO: 131417 - DNA, 25 bp, probe
agtcatggaggctataggatcttat

SEQ ID NO: 131418 - DNA, 25 bp, probe
agtatcataacattcgggtatatga

SEQ ID NO: 131419 - DNA, 25 bp, probe
agtatacaatattggggacaccaac

SEQ ID NO: 131420 - DNA, 25 bp, probe
agattacagtatgtggggacaccca

SEQ ID NO: 131421 - DNA, 25 bp, probe
cagttatttgcagaagggaaccgaa

SEQ ID NO: 131422 - DNA, 25 bp, probe
agtttcattgcataccggatacaga

SEQ ID NO: 131423 - DNA, 25 bp, probe
agtattatttattgcacggtcaaaa

SEQ ID NO: 131424 - DNA, 25 bp, probe
agttgtctataatgagccgttaagt

SEQ ID NO: 131425 - DNA, 25 bp, probe
agtttccatatgccgatgccgtaaa

SEQ ID NO: 131426 - DNA, 25 bp, probe
agttcccagaggcttctgtacagtc

SEQ ID NO: 131427 - DNA, 25 bp, probe
agtttcaaagagctcttggccatcc

SEQ ID NO: 131428 - DNA, 25 bp, probe
agttcccaaaggcaagactctctct

SEQ ID NO: 131429 - DNA, 25 bp, probe
agttcccaaactcatggaagtctgt

SEQ ID NO: 131430 - DNA, 25 bp, probe
agtaaccctgtctaatgaaacctgt

SEQ ID NO: 131431 - DNA, 25 bp, probe
agtacccttgattcaggaaacctgt

SEQ ID NO: 131432 - DNA, 25 bp, probe
agtagccctgtatggagaagaggag

SEQ ID NO: 131433 - DNA, 25 bp, probe
agtagccctgtatggagaagaggag

SEQ ID NO: 131434 - DNA, 25 bp, probe
agtcacttctgctagagtgaaagca

SEQ ID NO: 131435 - DNA, 25 bp, probe
agtcactgttctaatgctggcaatt

SEQ ID NO: 131436 - DNA, 25 bp, probe
agtcagttttatagtgtgcaagtgg

SEQ ID NO: 131437 - DNA, 25 bp, probe
agtaggcatcttagcttggcaggtg

SEQ ID NO: 131438 - DNA, 25 bp, probe
agtcacagccaaatgcttccatttg

SEQ ID NO: 131439 - DNA, 25 bp, probe
agtaagtagaattatctcttcatct

SEQ ID NO: 131440 - DNA, 25 bp, probe
agttattagcagaagcaaatgtcat

SEQ ID NO: 131441 - DNA, 25 bp, probe
agtatgctctaaaagaatatggcgt

SEQ ID NO: 131442 - DNA, 25 bp, probe
agtatgtatttgtacactatctggc

SEQ ID NO: 131443 - DNA, 25 bp, probe
agtaggacttgtagtagagctgctg

SEQ ID NO: 131444 - DNA, 25 bp, probe
agtaggaggatcatttatgcttggg

SEQ ID NO: 131445 - DNA, 25 bp, probe
agtaggggccactcatattctgggc

SEQ ID NO: 131446 - DNA, 25 bp, probe
agtaaaaccctgacatgtattgcgg

SEQ ID NO: 131447 - DNA, 25 bp, probe
agtacaatgagccttactgtattta

SEQ ID NO: 131448 - DNA, 25 bp, probe
agtcaaatggccagactatttcatt

SEQ ID NO: 131449 - DNA, 25 bp, probe
agtcagaatgactcgacctgtcctt

SEQ ID NO: 131450 - DNA, 25 bp, probe
agtcaaagacattctgacatcttag

SEQ ID NO: 131451 - DNA, 25 bp, probe
agtcaaaggcattcgccacgacatc

SEQ ID NO: 131452 - DNA, 25 bp, probe
agtcaagcatctaagcccaggacat

SEQ ID NO: 131453 - DNA, 25 bp, probe
agtagagcacgtcgccgagatgaag

SEQ ID NO: 131454 - DNA, 25 bp, probe
agtaacacgctgaaggggcttggtg

SEQ ID NO: 131455 - DNA, 25 bp, probe
agtaacacgctgaaggggcttggtg

SEQ ID NO: 131456 - DNA, 25 bp, probe
agttaaggagtagggctgtgggtgc

SEQ ID NO: 131457 - DNA, 25 bp, probe
agatctacggtttcgagggtgaggt

SEQ ID NO: 131458 - DNA, 25 bp, probe
agtttcctgtcctgagacgaaattc

SEQ ID NO: 131459 - DNA, 25 bp, probe
agtttccctacaagaactgcaagac

SEQ ID NO: 131460 - DNA, 25 bp, probe
agttcatccctgcaaggatctgcag

SEQ ID NO: 131461 - DNA, 25 bp, probe
agtttcacatcagaaggttcatctt

SEQ ID NO: 131462 - DNA, 25 bp, probe
agtttacgcaggacattcttgccgt

SEQ ID NO: 131463 - DNA, 25 bp, probe
agtttacgcaggacattcttgccgt

SEQ ID NO: 131464 - DNA, 25 bp, probe
agttcataaagacaccttgcactct

SEQ ID NO: 131465 - DNA, 25 bp, probe
cagcttctaaaatatattcccccaa

SEQ ID NO: 131466 - DNA, 25 bp, probe
agctttacaagagaaaacccatatt

SEQ ID NO: 131467 - DNA, 25 bp, probe
agtttccatcagtcaataaaacctg

SEQ ID NO: 131468 - DNA, 25 bp, probe
agttcaccatagtactataagctcc

SEQ ID NO: 131469 - DNA, 25 bp, probe
agttcccatctgttcaggcaaatgc

SEQ ID NO: 131470 - DNA, 25 bp, probe
agtactacaccattcagtgcacgtg

SEQ ID NO: 131471 - DNA, 25 bp, probe
agtacaaagagattagtcacagatg

SEQ ID NO: 131472 - DNA, 25 bp, probe
agtacaaagagattagtcacagatg

SEQ ID NO: 131473 - DNA, 25 bp, probe
agtacatctgggtgatgcaacctgc

SEQ ID NO: 131474 - DNA, 25 bp, probe
agtactcagagtgacacatgtccgc

SEQ ID NO: 131475 - DNA, 25 bp, probe
agtactcagagtgacacatgtccgc

SEQ ID NO: 131476 - DNA, 25 bp, probe
agtacacacagtgactattagccac

SEQ ID NO: 131477 - DNA, 25 bp, probe
agtacacacagtgactattagccac

SEQ ID NO: 131478 - DNA, 25 bp, probe
agtacaatcaggggttgtacctcca

SEQ ID NO: 131479 - DNA, 25 bp, probe
cagggaaacggaattgtacaacact

SEQ ID NO: 131480 - DNA, 25 bp, probe
agagtaaccctgtctaatgaaacct

SEQ ID NO: 131481 - DNA, 25 bp, probe
agaaattactctcaaagaaacctga

SEQ ID NO: 131482 - DNA, 25 bp, probe
agagaagtacttgaacacccctgga

SEQ ID NO: 131483 - DNA, 25 bp, probe
agtacaagccttgaacatcgtcctg

SEQ ID NO: 131484 - DNA, 25 bp, probe
agatcaaacatctggaaattacctt

SEQ ID NO: 131485 - DNA, 25 bp, probe
agtaaaacgtgaaaatgctacagtt

SEQ ID NO: 131486 - DNA, 25 bp, probe
actgtgaaatttgccaagtacgttg

SEQ ID NO: 131487 - DNA, 25 bp, probe
agttgggctgttgcatcgagtaatg

SEQ ID NO: 131488 - DNA, 25 bp, probe
agttgacgccttcccagagtcaacc

SEQ ID NO: 131489 - DNA, 25 bp, probe
agtagaggcgctgggcagagagtca

SEQ ID NO: 131490 - DNA, 25 bp, probe
agtacggctgctgcaaggagctggc

SEQ ID NO: 131491 - DNA, 25 bp, probe
agtacaggctgcacctgtcagtggc

SEQ ID NO: 131492 - DNA, 25 bp, probe
agttccctgaatggagtcaggtgct

SEQ ID NO: 131493 - DNA, 25 bp, probe
agttgacttcaagacgctggctgat

SEQ ID NO: 131494 - DNA, 25 bp, probe
agttatctagcaagccgctggggct

SEQ ID NO: 131495 - DNA, 25 bp, probe
agttatctagcaagccgctggggct

SEQ ID NO: 131496 - DNA, 25 bp, probe
agtttgccagaagctcagggtgcat

SEQ ID NO: 131497 - DNA, 25 bp, probe
agtatcacacggttctctgaggtct

SEQ ID NO: 131498 - DNA, 25 bp, probe
agtatccagcgggaactcagggtga

SEQ ID NO: 131499 - DNA, 25 bp, probe
agtactcaaggcaaaccagcaattg

SEQ ID NO: 131500 - DNA, 25 bp, probe
agtactcaagccgcaccagagatgg

SEQ ID NO: 131501 - DNA, 25 bp, probe
agtaccagacctgctagagaagggg

SEQ ID NO: 131502 - DNA, 25 bp, probe
agttcctgccccgtgaaatacaggt

SEQ ID NO: 131503 - DNA, 25 bp, probe
agttttgctctctgtgggacaaagc

SEQ ID NO: 131504 - DNA, 25 bp, probe
agttccttctcatggacgagcaaag

SEQ ID NO: 131505 - DNA, 25 bp, probe
agctcttcgtacaggacgaaaaagg

SEQ ID NO: 131506 - DNA, 25 bp, probe
agtttctgcaacattcaatgaaata

SEQ ID NO: 131507 - DNA, 25 bp, probe
agtcaagatgaaatatcaattcaaa

SEQ ID NO: 131508 - DNA, 25 bp, probe
agtatttgaagccatcaacatcaca

SEQ ID NO: 131509 - DNA, 25 bp, probe
agttttagaaactagctacataagt

SEQ ID NO: 131510 - DNA, 25 bp, probe
agatttaaccaacatcaacaaaata

SEQ ID NO: 131511 - DNA, 25 bp, probe
agatttttcactagcgtacatctaa

SEQ ID NO: 131512 - DNA, 25 bp, probe
agtttgtgtactggccaagtcgaga

SEQ ID NO: 131513 - DNA, 25 bp, probe
agtactgtgtactgtatagacagtt

SEQ ID NO: 131514 - DNA, 25 bp, probe
agtactgtgaacagtgttatctgta

SEQ ID NO: 131515 - DNA, 25 bp, probe
agtactgtgaacagtgttatctgta

SEQ ID NO: 131516 - DNA, 25 bp, probe
agtacttgagcagctgtatttcttt

SEQ ID NO: 131517 - DNA, 25 bp, probe
agtacatgttgaccttattcgctgc

SEQ ID NO: 131518 - DNA, 25 bp, probe
agtacatgttgaccttattcgctgc

SEQ ID NO: 131519 - DNA, 25 bp, probe
agtacaactgaaacttatcacatgc

SEQ ID NO: 131520 - DNA, 25 bp, probe
agtacacctgcaaggctgtcaacag

SEQ ID NO: 131521 - DNA, 25 bp, probe
agtacatggccaatggctgcctcct

SEQ ID NO: 131522 - DNA, 25 bp, probe
agtactgagacttgcctgcactgat

SEQ ID NO: 131523 - DNA, 25 bp, probe
agtagctatgactgcagatcatgta

SEQ ID NO: 131524 - DNA, 25 bp, probe
agtaccatagcacagcactgctaaa

SEQ ID NO: 131525 - DNA, 25 bp, probe
agtacctacatattgccagtgagaa

SEQ ID NO: 131526 - DNA, 25 bp, probe
agatagcgcataataaggggaagac

SEQ ID NO: 131527 - DNA, 25 bp, probe
aaattctaataagaggatcagccgg

SEQ ID NO: 131528 - DNA, 25 bp, probe
agaatttccaaagaagattgccaaa

SEQ ID NO: 131529 - DNA, 25 bp, probe
agatatttctaatcggtcttgccca

SEQ ID NO: 131530 - DNA, 25 bp, probe
agtaatttgaatagctcaggtgtgc

SEQ ID NO: 131531 - DNA, 25 bp, probe
agtatattgggaagctcaatgatac

SEQ ID NO: 131532 - DNA, 25 bp, probe
agttattggagacatatagctcaga

SEQ ID NO: 131533 - DNA, 25 bp, probe
agttttgatgctgtatttgctgcca

SEQ ID NO: 131534 - DNA, 25 bp, probe
agtaaatgagcctttctgcctcaca

SEQ ID NO: 131535 - DNA, 25 bp, probe
agtaacagggcagttcattccaaat

SEQ ID NO: 131536 - DNA, 25 bp, probe
agtactctgggcgatatttgcaaat

SEQ ID NO: 131537 - DNA, 25 bp, probe
agtactctgggcgatatttgcaaat

SEQ ID NO: 131538 - DNA, 25 bp, probe
agtaccatgggaagtgttgcagaca

SEQ ID NO: 131539 - DNA, 25 bp, probe
agtacctgcaggtgtttgaggagca

SEQ ID NO: 131540 - DNA, 25 bp, probe
agtattgtgactttgtttgggccaa

SEQ ID NO: 131541 - DNA, 25 bp, probe
agtttggagctatttcttgatggaa

SEQ ID NO: 131542 - DNA, 25 bp, probe
agtttggagttcctctttagcaagc

SEQ ID NO: 131543 - DNA, 25 bp, probe
agtttaatgtccgttgtatcacaaa

SEQ ID NO: 131544 - DNA, 25 bp, probe
agtatgtcagttcagtcggaacaaa

SEQ ID NO: 131545 - DNA, 25 bp, probe
agttgacatttggagtataggcacc

SEQ ID NO: 131546 - DNA, 25 bp, probe
agttccagctatgagttcctgcaac

SEQ ID NO: 131547 - DNA, 25 bp, probe
agtatgcggctgtcaactacctgac

SEQ ID NO: 131548 - DNA, 25 bp, probe
agtatcgtggtgtcagctatggccc

SEQ ID NO: 131549 - DNA, 25 bp, probe
agttctgtggttctgagaagcccga

SEQ ID NO: 131550 - DNA, 25 bp, probe
agtatttttcatttggaagtccaat

SEQ ID NO: 131551 - DNA, 25 bp, probe
agtacttgtgtcatccagaatgttt

SEQ ID NO: 131552 - DNA, 25 bp, probe
agttctcagttatctaaagcttttc

SEQ ID NO: 131553 - DNA, 25 bp, probe
agtttgcacttaagctgtaatttta

SEQ ID NO: 131554 - DNA, 25 bp, probe
agttggcaccaaacgctatatgcct

SEQ ID NO: 131555 - DNA, 25 bp, probe
agttgtagtcaatgcctatgaacac

SEQ ID NO: 131556 - DNA, 25 bp, probe
agtattgcagtaatcatcacttaca

SEQ ID NO: 131557 - DNA, 25 bp, probe
agtttatgtgtcatcaatgtacatg

SEQ ID NO: 131558 - DNA, 25 bp, probe
agttattccactaaatgatgaatgt

SEQ ID NO: 131559 - DNA, 25 bp, probe
agttttctatgttctgatgatgata

SEQ ID NO: 131560 - DNA, 25 bp, probe
agttttcttttcttgcactgatctt

SEQ ID NO: 131561 - DNA, 25 bp, probe
agttttgcttcattggaccgtttag

SEQ ID NO: 131562 - DNA, 25 bp, probe
agttttcttcatctgtccagttggg

SEQ ID NO: 131563 - DNA, 25 bp, probe
agttcttcattaactgaccctcatg

SEQ ID NO: 131564 - DNA, 25 bp, probe
caggtcttctttgaaggcctatggg

SEQ ID NO: 131565 - DNA, 25 bp, probe
agatcatttttttcaaggttatgga

SEQ ID NO: 131566 - DNA, 25 bp, probe
agatcatttttttcaaggttatgga

SEQ ID NO: 131567 - DNA, 25 bp, probe
agtatttcctgtgccaggtatacgc

SEQ ID NO: 131568 - DNA, 25 bp, probe
agtattctcacttctgggttatcag

SEQ ID NO: 131569 - DNA, 25 bp, probe
agttcagtagctttggtattatgag

SEQ ID NO: 131570 - DNA, 25 bp, probe
agttagatgcaatttggtcattaat

SEQ ID NO: 131571 - DNA, 25 bp, probe
agtatgaggcatttttgaataagtc

SEQ ID NO: 131572 - DNA, 25 bp, probe
agtagcagatgccgttcaaaaggtc

SEQ ID NO: 131573 - DNA, 25 bp, probe
agatatcatatccactccaatttgt

SEQ ID NO: 131574 - DNA, 25 bp, probe
agtacatcagcaaccatccttgttg

SEQ ID NO: 131575 - DNA, 25 bp, probe
agtatcaactgcaacatccctttga

SEQ ID NO: 131576 - DNA, 25 bp, probe
agtatagatgctgacctccatcatt

SEQ ID NO: 131577 - DNA, 25 bp, probe
agtagaggatgttcctgcttctcta

SEQ ID NO: 131578 - DNA, 25 bp, probe
agttggtagactttatcctggcact

SEQ ID NO: 131579 - DNA, 25 bp, probe
agtttgttgactttacctcacagtg

SEQ ID NO: 131580 - DNA, 25 bp, probe
agtttgttgactttacctcacagtg

SEQ ID NO: 131581 - DNA, 25 bp, probe
agtactgggactacgaggctcacgt

SEQ ID NO: 131582 - DNA, 25 bp, probe
agtagccggccagtcgaggctacag

SEQ ID NO: 131583 - DNA, 25 bp, probe
agttggggcacagcgaggtactgca

SEQ ID NO: 131584 - DNA, 25 bp, probe
agttggtagtaggtatggttctcat

SEQ ID NO: 131585 - DNA, 25 bp, probe
agactgtaatgtacctgaagtttct

SEQ ID NO: 131586 - DNA, 25 bp, probe
agttttctcattgctacagtgtatt

SEQ ID NO: 131587 - DNA, 25 bp, probe
agtttgctcaagatcccaagttcat

SEQ ID NO: 131588 - DNA, 25 bp, probe
agttcctcatcaaaaccaagtcgca

SEQ ID NO: 131589 - DNA, 25 bp, probe
agttcctcatcaaaaccaagtcgca

SEQ ID NO: 131590 - DNA, 25 bp, probe
agactcagtacaaaccaatcttccc

SEQ ID NO: 131591 - DNA, 25 bp, probe
agttcatcgataaagccaagctctc

SEQ ID NO: 131592 - DNA, 25 bp, probe
agttcaatgatgaggtgaagcacat

SEQ ID NO: 131593 - DNA, 25 bp, probe
agtatctgcagcacatggatggaga

SEQ ID NO: 131594 - DNA, 25 bp, probe
agtatggcacatgatatgagtcact

SEQ ID NO: 131595 - DNA, 25 bp, probe
agttgtgcacatggcttagttttca

SEQ ID NO: 131596 - DNA, 25 bp, probe
agtttatcatcgttgactctttgca

SEQ ID NO: 131597 - DNA, 25 bp, probe
agttacatgacctatatcttttcct

SEQ ID NO: 131598 - DNA, 25 bp, probe
agattaatcctatatgtaatgatca

SEQ ID NO: 131599 - DNA, 25 bp, probe
agatactacctgcaattttatacat

SEQ ID NO: 131600 - DNA, 25 bp, probe
agtaccactgcacatcatgtttttt

SEQ ID NO: 131601 - DNA, 25 bp, probe
agatcccctcatctcatgagttctt

SEQ ID NO: 131602 - DNA, 25 bp, probe
agttcaccagcaagtcggatgtctg

SEQ ID NO: 131603 - DNA, 25 bp, probe
agttcaccagcaagtcggatgtctg

SEQ ID NO: 131604 - DNA, 25 bp, probe
agttacaccactgaggcattcctca

SEQ ID NO: 131605 - DNA, 25 bp, probe
agttatcattaatgtagttcctcat

SEQ ID NO: 131606 - DNA, 25 bp, probe
agttatcattaatgtagttcctcat

SEQ ID NO: 131607 - DNA, 25 bp, probe
agttctgttgaggcttagtttgatc

SEQ ID NO: 131608 - DNA, 25 bp, probe
agttcatcaaccattagtttatttt

SEQ ID NO: 131609 - DNA, 25 bp, probe
agttcacaagagaagtcgtttcatt

SEQ ID NO: 131610 - DNA, 25 bp, probe
agttcgaaggctttgagtatatcaa

SEQ ID NO: 131611 - DNA, 25 bp, probe
agttctgaaactaagactatagata

SEQ ID NO: 131612 - DNA, 25 bp, probe
agttcttacagtaatccctgagaaa

SEQ ID NO: 131613 - DNA, 25 bp, probe
agttcttcaccttgacgcttatgaa

SEQ ID NO: 131614 - DNA, 25 bp, probe
agttcctagctcttgacttagctta

SEQ ID NO: 131615 - DNA, 25 bp, probe
agattcgtagttagtttagcctacg

SEQ ID NO: 131616 - DNA, 25 bp, probe
aaaccttttggaatctgggctactg

SEQ ID NO: 131617 - DNA, 25 bp, probe
aactccttcctggaatccttccagg

SEQ ID NO: 131618 - DNA, 25 bp, probe
agaccaatacctcatacctaacgtc

SEQ ID NO: 131619 - DNA, 25 bp, probe
agactcagtagcgttttagtcgttt

SEQ ID NO: 131620 - DNA, 25 bp, probe
agatgctcaaaggccttaagtacat

SEQ ID NO: 131621 - DNA, 25 bp, probe
agatgctgaaggacccttttgtgcg

SEQ ID NO: 131622 - DNA, 25 bp, probe
agagtgacgtgtggtcctttggggt

SEQ ID NO: 131623 - DNA, 25 bp, probe
agactacgaccctcggcagggagat

SEQ ID NO: 131624 - DNA, 25 bp, probe
aacttcgaagccatagggtggagaa

SEQ ID NO: 131625 - DNA, 25 bp, probe
agattatcgacatctttgaagctgg

SEQ ID NO: 131626 - DNA, 25 bp, probe
agtttagattcccttgaagatgtgt

SEQ ID NO: 131627 - DNA, 25 bp, probe
agtttaggctcacctcaaagatgtc

SEQ ID NO: 131628 - DNA, 25 bp, probe
agttgtgtgaataccccaagactcc

SEQ ID NO: 131629 - DNA, 25 bp, probe
agtttgtcagtgaccatcccgagct

SEQ ID NO: 131630 - DNA, 25 bp, probe
agttcttggtgagttctccagtgcc

SEQ ID NO: 131631 - DNA, 25 bp, probe
agtatctggctgggttttcaggggc

SEQ ID NO: 131632 - DNA, 25 bp, probe
agtatgccggcggtattgtcgtggg

SEQ ID NO: 131633 - DNA, 25 bp, probe
agtatgaccagggcgtcgatctgtg

SEQ ID NO: 131634 - DNA, 25 bp, probe
agtatgaccagggcgtcgatctgtg

SEQ ID NO: 131635 - DNA, 25 bp, probe
agatatcccaggacgtttgcttaca

SEQ ID NO: 131636 - DNA, 25 bp, probe
agttctcagtgccattgcttatctt

SEQ ID NO: 131637 - DNA, 25 bp, probe
agtatggaagcttgtctttgctctt

SEQ ID NO: 131638 - DNA, 25 bp, probe
agtaggtctgattgagcttgtgttg

SEQ ID NO: 131639 - DNA, 25 bp, probe
agtatggctgtaagtctcatggttc

SEQ ID NO: 131640 - DNA, 25 bp, probe
agtattgctgttgatcttcgtcatt

SEQ ID NO: 131641 - DNA, 25 bp, probe
agataatgggttttatggatttctt

SEQ ID NO: 131642 - DNA, 25 bp, probe
agatacagttttcctattggacctg

SEQ ID NO: 131643 - DNA, 25 bp, probe
agatacagttttcctattggacctg

SEQ ID NO: 131644 - DNA, 25 bp, probe
agtagcccatttcctagggcaccat

SEQ ID NO: 131645 - DNA, 25 bp, probe
agatacccagattccaaggacctca

SEQ ID NO: 131646 - DNA, 25 bp, probe
ggattctgaatataacatatagcct

SEQ ID NO: 131647 - DNA, 25 bp, probe
agattcccagttaaaaggctccaga

SEQ ID NO: 131648 - DNA, 25 bp, probe
agttctccactgtgaagggcgtcaa

SEQ ID NO: 131649 - DNA, 25 bp, probe
agattctgcacctcaaaggggatcc

SEQ ID NO: 131650 - DNA, 25 bp, probe
agtttatctcaataaccaggtcatc

SEQ ID NO: 131651 - DNA, 25 bp, probe
agtttatctcaataaccaggtcatc

SEQ ID NO: 131652 - DNA, 25 bp, probe
agtttcatgtttcaatgccaagttc

SEQ ID NO: 131653 - DNA, 25 bp, probe
agttaagctttgcagcttccagtgt

SEQ ID NO: 131654 - DNA, 25 bp, probe
agtttgaatttcagcttcactgtgt

SEQ ID NO: 131655 - DNA, 25 bp, probe
agtttgacccagcactttgttgtgg

SEQ ID NO: 131656 - DNA, 25 bp, probe
agtatatatcccagactgtctttta

SEQ ID NO: 131657 - DNA, 25 bp, probe
agtatgtagccccagagatcatcct

SEQ ID NO: 131658 - DNA, 25 bp, probe
agttttaccagcagaactctctaaa

SEQ ID NO: 131659 - DNA, 25 bp, probe
agtttctcaaactggagtctctaga

SEQ ID NO: 131660 - DNA, 25 bp, probe
agtttttcacaatggtggcatcaag

SEQ ID NO: 131661 - DNA, 25 bp, probe
agttgtttgacgtgcaatggcccag

SEQ ID NO: 131662 - DNA, 25 bp, probe
agttgtttgacgtgcaatggcccag

SEQ ID NO: 131663 - DNA, 25 bp, probe
agtttggcgaggtctgcagtggcca

SEQ ID NO: 131664 - DNA, 25 bp, probe
agtttgtgcaggcgcagagtcctat

SEQ ID NO: 131665 - DNA, 25 bp, probe
agttctcatggtcagaagttctcat

SEQ ID NO: 131666 - DNA, 25 bp, probe
agttccaggtggacacaggtgccaa

SEQ ID NO: 131667 - DNA, 25 bp, probe
agttccaggtggacacaggtgccaa

SEQ ID NO: 131668 - DNA, 25 bp, probe
agttccaggtggacacaggtgccaa

SEQ ID NO: 131669 - DNA, 25 bp, probe
agttcattgatgaggccttgtccca

SEQ ID NO: 131670 - DNA, 25 bp, probe
agtttgatgtatttggcgctgtccc

SEQ ID NO: 131671 - DNA, 25 bp, probe
agttagttatattagcagccctctg

SEQ ID NO: 131672 - DNA, 25 bp, probe
agttggccatatttacctcagcctg

SEQ ID NO: 131673 - DNA, 25 bp, probe
agttggccatatttacctcagcctg

SEQ ID NO: 131674 - DNA, 25 bp, probe
agttagccaagaagagttcctctgt

SEQ ID NO: 131675 - DNA, 25 bp, probe
agttagacactaaggatctctttgt

SEQ ID NO: 131676 - DNA, 25 bp, probe
agtttagcaatatgacattcttggt

SEQ ID NO: 131677 - DNA, 25 bp, probe
agtttagagtaattcacttcaggaa

SEQ ID NO: 131678 - DNA, 25 bp, probe
agtttgaggaaatcacgccaggtgg

SEQ ID NO: 131679 - DNA, 25 bp, probe
agtttgaggaaatcacgccaggtgg

SEQ ID NO: 131680 - DNA, 25 bp, probe
agtttaacaaaatcctcaggtgatt

SEQ ID NO: 131681 - DNA, 25 bp, probe
agttggacaccaacataactgaggt

SEQ ID NO: 131682 - DNA, 25 bp, probe
agttgtattcctttcagcaatgcag

SEQ ID NO: 131683 - DNA, 25 bp, probe
agcttactagcactttgagaatgag

SEQ ID NO: 131684 - DNA, 25 bp, probe
agttcattgcatgctgaagcgacat

SEQ ID NO: 131685 - DNA, 25 bp, probe
agttgacctttgcactggcattaaa

SEQ ID NO: 131686 - DNA, 25 bp, probe
agttgccagtttgggctccagtaat

SEQ ID NO: 131687 - DNA, 25 bp, probe
agttgccgatgatgaggaccgaagt

SEQ ID NO: 131688 - DNA, 25 bp, probe
agattgcgctacagctaggccgcat

SEQ ID NO: 131689 - DNA, 25 bp, probe
agttgagttgcttctgaggtacatt

SEQ ID NO: 131690 - DNA, 25 bp, probe
agtatgagttcttcctttaattatc

SEQ ID NO: 131691 - DNA, 25 bp, probe
agatatagttcatgcttgtttacaa

SEQ ID NO: 131692 - DNA, 25 bp, probe
agatctgggatatgtgttggaaaac

SEQ ID NO: 131693 - DNA, 25 bp, probe
agttgcactattctgagggaaaatc

SEQ ID NO: 131694 - DNA, 25 bp, probe
agttgccatctaccttgggatcaaa

SEQ ID NO: 131695 - DNA, 25 bp, probe
agttacctcagaatttggattggat

SEQ ID NO: 131696 - DNA, 25 bp, probe
agataactccaacttctggctgtag

SEQ ID NO: 131697 - DNA, 25 bp, probe
agataactgtcagcaattgaattat

SEQ ID NO: 131698 - DNA, 25 bp, probe
agataactgtcagcaattgaattat

SEQ ID NO: 131699 - DNA, 25 bp, probe
agatagcacttcgcagtggtccttt

SEQ ID NO: 131700 - DNA, 25 bp, probe
agattatctacaccgtgggccatag

SEQ ID NO: 131701 - DNA, 25 bp, probe
agttcagtacctggaggaggagcag

SEQ ID NO: 131702 - DNA, 25 bp, probe
agttcagtacctggaggaggagcag

SEQ ID NO: 131703 - DNA, 25 bp, probe
agttgcagttaactggggtatcagc

SEQ ID NO: 131704 - DNA, 25 bp, probe
agttggagtgtgatggggttggggt

SEQ ID NO: 131705 - DNA, 25 bp, probe
agtttatggtgcagaatggattgag

SEQ ID NO: 131706 - DNA, 25 bp, probe
agttcttagttatatagcatctgga

SEQ ID NO: 131707 - DNA, 25 bp, probe
agtatcctcagcacagaaagcatgt

SEQ ID NO: 131708 - DNA, 25 bp, probe
agtatcctcagcacagaaagcatgt

SEQ ID NO: 131709 - DNA, 25 bp, probe
agtatgcttcacctagaaacagatt

SEQ ID NO: 131710 - DNA, 25 bp, probe
agttcttcaaaactagtcagtttga

SEQ ID NO: 131711 - DNA, 25 bp, probe
agatccgtagaattgtcaggagtgc

SEQ ID NO: 131712 - DNA, 25 bp, probe
agatctcagtaaggtacggagtaac

SEQ ID NO: 131713 - DNA, 25 bp, probe
agatccagtccagagaaggaagaaa

SEQ ID NO: 131714 - DNA, 25 bp, probe
agatccagggactgaagccaaagtt

SEQ ID NO: 131715 - DNA, 25 bp, probe
agattaaggcctggcagaaaatttt

SEQ ID NO: 131716 - DNA, 25 bp, probe
agatatccaggcttaccaaagtatt

SEQ ID NO: 131717 - DNA, 25 bp, probe
agatatcccgtttcaaggctgtaat

SEQ ID NO: 131718 - DNA, 25 bp, probe
agattggcggccttatagactctaa

SEQ ID NO: 131719 - DNA, 25 bp, probe
agattggcggccttatagactctaa

SEQ ID NO: 131720 - DNA, 25 bp, probe
agtatggctggccccatgaagatgc

SEQ ID NO: 131721 - DNA, 25 bp, probe
agtatgacaacagcctcaagatcat

SEQ ID NO: 131722 - DNA, 25 bp, probe
agttacaagaacctcacgctcaaat

SEQ ID NO: 131723 - DNA, 25 bp, probe
agttcaagaccagcctggccaacat

SEQ ID NO: 131724 - DNA, 25 bp, probe
agttgatagaacacctgggcgcgct

SEQ ID NO: 131725 - DNA, 25 bp, probe
agttctggaggctccagtggctcct

SEQ ID NO: 131726 - DNA, 25 bp, probe
agtttagcttgcaggatgggtcact

SEQ ID NO: 131727 - DNA, 25 bp, probe
agtttagcttgcaggatgggtcact

SEQ ID NO: 131728 - DNA, 25 bp, probe
agtttagtatgctggtattgtttat

SEQ ID NO: 131729 - DNA, 25 bp, probe
agatcttggtcctgtgttttttctg

SEQ ID NO: 131730 - DNA, 25 bp, probe
agatttggatccagtggttgttaca

SEQ ID NO: 131731 - DNA, 25 bp, probe
agatcctggacccctgggtgtatat

SEQ ID NO: 131732 - DNA, 25 bp, probe
agatgcaggaactcctggactcctt

SEQ ID NO: 131733 - DNA, 25 bp, probe
agatgcaggtcctgtgcttcagctt

SEQ ID NO: 131734 - DNA, 25 bp, probe
agagggtcaaggcttctgcttagtt

SEQ ID NO: 131735 - DNA, 25 bp, probe
agagggtcaaggcttctgcttagtt

SEQ ID NO: 131736 - DNA, 25 bp, probe
agaggggcgattccctcgtcaattt

SEQ ID NO: 131737 - DNA, 25 bp, probe
agaggggcgattccctcgtcaattt

SEQ ID NO: 131738 - DNA, 25 bp, probe
agaaattcgaatctcccaacatcct

SEQ ID NO: 131739 - DNA, 25 bp, probe
agaaattcgaatctcccaacatcct

SEQ ID NO: 131740 - DNA, 25 bp, probe
agaaatcctaaaatcctcgtaccat

SEQ ID NO: 131741 - DNA, 25 bp, probe
agaaatcctaaaatcctcgtaccat

SEQ ID NO: 131742 - DNA, 25 bp, probe
agataatgcctaagaatgaccgctg

SEQ ID NO: 131743 - DNA, 25 bp, probe
agtatatgcctaaaatgtatgcact

SEQ ID NO: 131744 - DNA, 25 bp, probe
agtatatgcctaaaatgtatgcact

SEQ ID NO: 131745 - DNA, 25 bp, probe
agtattgctgtttacagatcagact

SEQ ID NO: 131746 - DNA, 25 bp, probe
agattcctgttgttgctatcagaac

SEQ ID NO: 131747 - DNA, 25 bp, probe
agtattcttagttgttcagttgcca

SEQ ID NO: 131748 - DNA, 25 bp, probe
agatactttgtgagttcctaccctc

SEQ ID NO: 131749 - DNA, 25 bp, probe
agatactgtttgagctgtgcctcgg

SEQ ID NO: 131750 - DNA, 25 bp, probe
agatactgtttgagctgtgcctcgg

SEQ ID NO: 131751 - DNA, 25 bp, probe
agatgcctgttaaatggatcgccat

SEQ ID NO: 131752 - DNA, 25 bp, probe
agattttgtaactgcttgccattaa

SEQ ID NO: 131753 - DNA, 25 bp, probe
agttccggaaagccttcctcaagat

SEQ ID NO: 131754 - DNA, 25 bp, probe
agttcagaggaaagccttccgcacc

SEQ ID NO: 131755 - DNA, 25 bp, probe
agattagcagaagtcacttctccca

SEQ ID NO: 131756 - DNA, 25 bp, probe
agtttcagagagtcaatgtcattac

SEQ ID NO: 131757 - DNA, 25 bp, probe
agtttagagagctaagattatctgg

SEQ ID NO: 131758 - DNA, 25 bp, probe
agtttaagagaacaactctggagac

SEQ ID NO: 131759 - DNA, 25 bp, probe
agtttaagagaacaactctggagac

SEQ ID NO: 131760 - DNA, 25 bp, probe
agtttataccaatacactgctaagt

SEQ ID NO: 131761 - DNA, 25 bp, probe
agtttataccaatacactgctaagt

SEQ ID NO: 131762 - DNA, 25 bp, probe
agttggagaccgtcaaccttcaagt

SEQ ID NO: 131763 - DNA, 25 bp, probe
agttggcaaaaacagccttctagca

SEQ ID NO: 131764 - DNA, 25 bp, probe
agttgcaaaaaaagactgtatcaaa

SEQ ID NO: 131765 - DNA, 25 bp, probe
agttagcaactatcgatcttgccaa

SEQ ID NO: 131766 - DNA, 25 bp, probe
agttagcacatttacttttctctcc

SEQ ID NO: 131767 - DNA, 25 bp, probe
agttcagacttatcaccattcttat

SEQ ID NO: 131768 - DNA, 25 bp, probe
agtatgaatttgtgcaccatgctct

SEQ ID NO: 131769 - DNA, 25 bp, probe
agttgccaatatttgcaccatcttc

SEQ ID NO: 131770 - DNA, 25 bp, probe
agttgtgcacttttacaagccgcaa

SEQ ID NO: 131771 - DNA, 25 bp, probe
agtatctgcctttaggcacagctgg

SEQ ID NO: 131772 - DNA, 25 bp, probe
agtttgttcatgtcagtgagagctt

SEQ ID NO: 131773 - DNA, 25 bp, probe
agatatggcccgcgctggagtttca

SEQ ID NO: 131774 - DNA, 25 bp, probe
agttggtccgaggggagcccaatgt

SEQ ID NO: 131775 - DNA, 25 bp, probe
agtttggccaagatggacccatttc

SEQ ID NO: 131776 - DNA, 25 bp, probe
agttaaggaagagtgccaccccttg

SEQ ID NO: 131777 - DNA, 25 bp, probe
agattacaggcatgggccaccacgc

SEQ ID NO: 131778 - DNA, 25 bp, probe
agttatgatggcactgctgcactcc

SEQ ID NO: 131779 - DNA, 25 bp, probe
agtatcatgaagactctctatcacc

SEQ ID NO: 131780 - DNA, 25 bp, probe
agttctgaagtgatctaggcatgtt

SEQ ID NO: 131781 - DNA, 25 bp, probe
agtttgacaatgctggcgccatgat

SEQ ID NO: 131782 - DNA, 25 bp, probe
agtatccacaagcacagaccatcat

SEQ ID NO: 131783 - DNA, 25 bp, probe
agttgcgacaggcaagcatccactc

SEQ ID NO: 131784 - DNA, 25 bp, probe
agttagccaggcatggtcacgcatg

SEQ ID NO: 131785 - DNA, 25 bp, probe
agttaccaatgctgcagtcctgcag

SEQ ID NO: 131786 - DNA, 25 bp, probe
agttacaaacatacagccatctggg

SEQ ID NO: 131787 - DNA, 25 bp, probe
agttcacaacacagcagcacacaca

SEQ ID NO: 131788 - DNA, 25 bp, probe
agtatccagaaaacatgctcatgcc

SEQ ID NO: 131789 - DNA, 25 bp, probe
agtatcacagagatccagtctattc

SEQ ID NO: 131790 - DNA, 25 bp, probe
agtataaggctttctcaatcagtgc

SEQ ID NO: 131791 - DNA, 25 bp, probe
agtatcacaaatctgtagtagcatg

SEQ ID NO: 131792 - DNA, 25 bp, probe
agtatccagacctgatcgctgagct

SEQ ID NO: 131793 - DNA, 25 bp, probe
agttcctcatacagatcctgcagct

SEQ ID NO: 131794 - DNA, 25 bp, probe
agtttctcattactgtctgtggcta

SEQ ID NO: 131795 - DNA, 25 bp, probe
agttctctatgtcttcattgggcat

SEQ ID NO: 131796 - DNA, 25 bp, probe
agttctctgcagagtttgttgactt

SEQ ID NO: 131797 - DNA, 25 bp, probe
agatctcccagtaatttttcttatt

SEQ ID NO: 131798 - DNA, 25 bp, probe
agttcagccttaatattgtttttgt

SEQ ID NO: 131799 - DNA, 25 bp, probe
agttcaggtctaatcaggtttcttt

SEQ ID NO: 131800 - DNA, 25 bp, probe
agttcattgtccaccatgatttcat

SEQ ID NO: 131801 - DNA, 25 bp, probe
agttgataactcttccatgtttcac

SEQ ID NO: 131802 - DNA, 25 bp, probe
agtttatatctctcatgcatatttt

SEQ ID NO: 131803 - DNA, 25 bp, probe
agtttctacttgcaatattctattc

SEQ ID NO: 131804 - DNA, 25 bp, probe
agtattcatgactatggataaacta

SEQ ID NO: 131805 - DNA, 25 bp, probe
agtattcatgactatggataaacta

SEQ ID NO: 131806 - DNA, 25 bp, probe
agttcatgagcctggaaagaatcaa

SEQ ID NO: 131807 - DNA, 25 bp, probe
ctgcccaagtttgaaggacaaaccg

SEQ ID NO: 131808 - DNA, 25 bp, probe
gaaccaagtttgagacggaacaggc

SEQ ID NO: 131809 - DNA, 25 bp, probe
aactccattgttcagggtaaaggct

SEQ ID NO: 131810 - DNA, 25 bp, probe
agaccgagtctacacaagtaaaagt

SEQ ID NO: 131811 - DNA, 25 bp, probe
agaatatggttctcctactaactag

SEQ ID NO: 131812 - DNA, 25 bp, probe
agataagatttaaccaacatcaaca

SEQ ID NO: 131813 - DNA, 25 bp, probe
agatcattatttaacctagttcaat

SEQ ID NO: 131814 - DNA, 25 bp, probe
agatcagtgatttcggactttccaa

SEQ ID NO: 131815 - DNA, 25 bp, probe
agtattattatctgtctcttgtagt

SEQ ID NO: 131816 - DNA, 25 bp, probe
agttttgtacatggatctcatttta

SEQ ID NO: 131817 - DNA, 25 bp, probe
agttgtgagatattggatgtgtggc

SEQ ID NO: 131818 - DNA, 25 bp, probe
agtatagatgtatggtctgctggct

SEQ ID NO: 131819 - DNA, 25 bp, probe
agttcaatgaactgacttcagcgaa

SEQ ID NO: 131820 - DNA, 25 bp, probe
agttcaagttctggacttcagccgc

SEQ ID NO: 131821 - DNA, 25 bp, probe
agttcagtatttggagttcaacact

SEQ ID NO: 131822 - DNA, 25 bp, probe
agttcatgtactttgagttccctca

SEQ ID NO: 131823 - DNA, 25 bp, probe
agttcattaccagaatatatcccaa

SEQ ID NO: 131824 - DNA, 25 bp, probe
agtttctaaagcaatttcatcacga

SEQ ID NO: 131825 - DNA, 25 bp, probe
agtattttagacattcctcgtcagt

SEQ ID NO: 131826 - DNA, 25 bp, probe
agtatttccaacttgtcacttgcca

SEQ ID NO: 131827 - DNA, 25 bp, probe
agtttcctcagagatcatacctccc

SEQ ID NO: 131828 - DNA, 25 bp, probe
agatcttcgtggagtcagaactgcc

SEQ ID NO: 131829 - DNA, 25 bp, probe
agtttgcagttgacttcaagacgct

SEQ ID NO: 131830 - DNA, 25 bp, probe
agttgtagatatcttccagactgtc

SEQ ID NO: 131831 - DNA, 25 bp, probe
agtttttatggactctcagacactc

SEQ ID NO: 131832 - DNA, 25 bp, probe
agtttttcatagccttacagtatct

SEQ ID NO: 131833 - DNA, 25 bp, probe
agtttttctgctctttcttacataa

SEQ ID NO: 131834 - DNA, 25 bp, probe
agttttgtcttggatattcttgaaa

SEQ ID NO: 131835 - DNA, 25 bp, probe
agatttggctcttggtttctggaat

SEQ ID NO: 131836 - DNA, 25 bp, probe
agatttggctcttggtttctggaat

SEQ ID NO: 131837 - DNA, 25 bp, probe
agatattttccggctttatgtcagt

SEQ ID NO: 131838 - DNA, 25 bp, probe
agatttggctcctctttgaatatcc

SEQ ID NO: 131839 - DNA, 25 bp, probe
agttctatgacctcctcaacatatt

SEQ ID NO: 131840 - DNA, 25 bp, probe
agttcattggaactaccaacttgtt

SEQ ID NO: 131841 - DNA, 25 bp, probe
agttagggtttaggcatcattttga

SEQ ID NO: 131842 - DNA, 25 bp, probe
agttgacttgttttgcacacttttc

SEQ ID NO: 131843 - DNA, 25 bp, probe
agttgctgttgtgttcaccatggct

SEQ ID NO: 131844 - DNA, 25 bp, probe
agttgctgttgtgttcaccatggct

SEQ ID NO: 131845 - DNA, 25 bp, probe
agattctgttcagcattcactaacc

SEQ ID NO: 131846 - DNA, 25 bp, probe
agttgtggctcaagcaaggctaatt

SEQ ID NO: 131847 - DNA, 25 bp, probe
agtttcacatctagcaaactccttc

SEQ ID NO: 131848 - DNA, 25 bp, probe
agttatccctgcaggagtccttagt

SEQ ID NO: 131849 - DNA, 25 bp, probe
agttatatcttgtggcatatccatt

SEQ ID NO: 131850 - DNA, 25 bp, probe
agttatacatcttcaggatgattca

SEQ ID NO: 131851 - DNA, 25 bp, probe
agtttcaataccggagatcatgcaa

SEQ ID NO: 131852 - DNA, 25 bp, probe
agtttctttccatggatctgaagaa

SEQ ID NO: 131853 - DNA, 25 bp, probe
agtttcttctcatcagagcactggg

SEQ ID NO: 131854 - DNA, 25 bp, probe
gagttacttggctcggagcgggcga

SEQ ID NO: 131855 - DNA, 25 bp, probe
agttacttggctcggagcgggcgag

SEQ ID NO: 131856 - DNA, 25 bp, probe
agttacctggcagggacgctgggac

SEQ ID NO: 131857 - DNA, 25 bp, probe
agttaactggggtatcagctgaatc

SEQ ID NO: 131858 - DNA, 25 bp, probe
agttcatactgtgtaatcagtttaa

SEQ ID NO: 131859 - DNA, 25 bp, probe
agttctgacagttccagcacgtgtg

SEQ ID NO: 131860 - DNA, 25 bp, probe
agttcgggtcatggcagactctatg

SEQ ID NO: 131861 - DNA, 25 bp, probe
agtttatggcctggagagcgtgagc

SEQ ID NO: 131862 - DNA, 25 bp, probe
agtttctggccagaagcaccagcct

SEQ ID NO: 131863 - DNA, 25 bp, probe
agatattctgacaccactgactctg

SEQ ID NO: 131864 - DNA, 25 bp, probe
agatattctgacaccactgactctg

SEQ ID NO: 131865 - DNA, 25 bp, probe
agttgtctgcatttgatcactggtc

SEQ ID NO: 131866 - DNA, 25 bp, probe
agttatctgataatgctcaaagtgc

SEQ ID NO: 131867 - DNA, 25 bp, probe
agcttagctaatgccaaagctggac

SEQ ID NO: 131868 - DNA, 25 bp, probe
agttcaccagcagctaagtgctgac

SEQ ID NO: 131869 - DNA, 25 bp, probe
agttcaccagcagctaagtgctgac

SEQ ID NO: 131870 - DNA, 25 bp, probe
agttcagcactgtgctagcctctgt

SEQ ID NO: 131871 - DNA, 25 bp, probe
agttctgcttgacctgagagctctg

SEQ ID NO: 131872 - DNA, 25 bp, probe
agattgctgattccagggatgattt

SEQ ID NO: 131873 - DNA, 25 bp, probe
agattggactccctggtggttgagt

SEQ ID NO: 131874 - DNA, 25 bp, probe
agttcatggctccggagatggtgaa

SEQ ID NO: 131875 - DNA, 25 bp, probe
agttatgcctaatagcaggcaagag

SEQ ID NO: 131876 - DNA, 25 bp, probe
agttaccattcagaggtgcagtgag

SEQ ID NO: 131877 - DNA, 25 bp, probe
agttccagctactcaggaggctgag

SEQ ID NO: 131878 - DNA, 25 bp, probe
agttcctgctggggcaagcaggaga

SEQ ID NO: 131879 - DNA, 25 bp, probe
agttgtatctgggcagcttgcacgg

SEQ ID NO: 131880 - DNA, 25 bp, probe
agttgcttgtgccaccaagacgtgc

SEQ ID NO: 131881 - DNA, 25 bp, probe
agtttctgctgctgaagaacttctc

SEQ ID NO: 131882 - DNA, 25 bp, probe
agtttctgatgctgactggcacctt

SEQ ID NO: 131883 - DNA, 25 bp, probe
agtttgctcacagtgcctgtgcacc

SEQ ID NO: 131884 - DNA, 25 bp, probe
agatttacaggtgcagtcaccgaaa

SEQ ID NO: 131885 - DNA, 25 bp, probe
agaattgaaaatgcattagggaaaa

SEQ ID NO: 131886 - DNA, 25 bp, probe
agaatggaacgagttttgagtaatc

SEQ ID NO: 131887 - DNA, 25 bp, probe
agatctctaatctgttttgagtctt

SEQ ID NO: 131888 - DNA, 25 bp, probe
agactcattgcttaattctaagact

SEQ ID NO: 131889 - DNA, 25 bp, probe
agatcctagtgtagttctgaaacta

SEQ ID NO: 131890 - DNA, 25 bp, probe
agatccacaggtatgtaaaagacaa

SEQ ID NO: 131891 - DNA, 25 bp, probe
acctccaggatttggaacaactcca

SEQ ID NO: 131892 - DNA, 25 bp, probe
agttccaggatccatgggagcattc

SEQ ID NO: 131893 - DNA, 25 bp, probe
agttccagagacctgggggtgtgtc

SEQ ID NO: 131894 - DNA, 25 bp, probe
agttctcagagctctcgaggaaagt

SEQ ID NO: 131895 - DNA, 25 bp, probe
agatgactaagcagcctgcaaaaaa

SEQ ID NO: 131896 - DNA, 25 bp, probe
agttaatgctggattgctggcagaa

SEQ ID NO: 131897 - DNA, 25 bp, probe
agacttttggtctgtgggccattta

SEQ ID NO: 131898 - DNA, 25 bp, probe
agacttttcctcaggaatcctgttt

SEQ ID NO: 131899 - DNA, 25 bp, probe
agagttatccctgcaggagtcctta

SEQ ID NO: 131900 - DNA, 25 bp, probe
agagatttccctgaggaggttccct

SEQ ID NO: 131901 - DNA, 25 bp, probe
agagatttccctgaggaggttccct

SEQ ID NO: 131902 - DNA, 25 bp, probe
caggtttctccagaaagtactccct

SEQ ID NO: 131903 - DNA, 25 bp, probe
caggtttctccagaaagtactccct

SEQ ID NO: 131904 - DNA, 25 bp, probe
agagtttacacataaattttcctgt

SEQ ID NO: 131905 - DNA, 25 bp, probe
agaggacgcccataatttcttccat

SEQ ID NO: 131906 - DNA, 25 bp, probe
agaggacatcccagatttacctcct

SEQ ID NO: 131907 - DNA, 25 bp, probe
agaggacctcaaggatcaataatcc

SEQ ID NO: 131908 - DNA, 25 bp, probe
agatgaggcccaccattaaagatca

SEQ ID NO: 131909 - DNA, 25 bp, probe
agatagggcagatcactctcaagaa

SEQ ID NO: 131910 - DNA, 25 bp, probe
agatagggcagatcactctcaagaa

SEQ ID NO: 131911 - DNA, 25 bp, probe
agttgtcgcagcttactgtccaaga

SEQ ID NO: 131912 - DNA, 25 bp, probe
agttgtgtcatgttaatgtgcctaa

SEQ ID NO: 131913 - DNA, 25 bp, probe
agttggttttgcatgtctgcatgaa

SEQ ID NO: 131914 - DNA, 25 bp, probe
agttggagcttctattgccatgaac

SEQ ID NO: 131915 - DNA, 25 bp, probe
agttggggtcatagatgtttccttg

SEQ ID NO: 131916 - DNA, 25 bp, probe
agttggcagttatggttttctttca

SEQ ID NO: 131917 - DNA, 25 bp, probe
agttggcagttatggttttctttca

SEQ ID NO: 131918 - DNA, 25 bp, probe
agattgcttttctggttgtgccatt

SEQ ID NO: 131919 - DNA, 25 bp, probe
agattgcttttctggttgtgccatt

SEQ ID NO: 131920 - DNA, 25 bp, probe
agttctattttggctggtgtgaata

SEQ ID NO: 131921 - DNA, 25 bp, probe
agtttatttattggagtgatggatt

SEQ ID NO: 131922 - DNA, 25 bp, probe
agtttatttattggagtgatggatt

SEQ ID NO: 131923 - DNA, 25 bp, probe
agtttattcttgtggcatcattata

SEQ ID NO: 131924 - DNA, 25 bp, probe
agttctacaaatcaggcatttattt

SEQ ID NO: 131925 - DNA, 25 bp, probe
agatttagcacaatggagagattcc

SEQ ID NO: 131926 - DNA, 25 bp, probe
agatttagcacaatggagagattcc

SEQ ID NO: 131927 - DNA, 25 bp, probe
agttctacagtggggagagatgcct

SEQ ID NO: 131928 - DNA, 25 bp, probe
agttcagcatcgcggatgaagacgc

SEQ ID NO: 131929 - DNA, 25 bp, probe
agttcctggcaggcactgtggacac

SEQ ID NO: 131930 - DNA, 25 bp, probe
agattgagcggagtgcctcggaacc

SEQ ID NO: 131931 - DNA, 25 bp, probe
agattgcaaatactgcccgcaaagc

SEQ ID NO: 131932 - DNA, 25 bp, probe
agaggaaaaatgagcgcaacgccga

SEQ ID NO: 131933 - DNA, 25 bp, probe
agatggcacttataaccaaagccca

SEQ ID NO: 131934 - DNA, 25 bp, probe
agatggttctcagacccgacattaa

SEQ ID NO: 131935 - DNA, 25 bp, probe
agagagtgaccctccacgaaaagga

SEQ ID NO: 131936 - DNA, 25 bp, probe
ctaggccactcctccaaaggaagtc

SEQ ID NO: 131937 - DNA, 25 bp, probe
ctacgataattatacgacggagacc

SEQ ID NO: 131938 - DNA, 25 bp, probe
aatccaaaaaccagtcggcagacca

SEQ ID NO: 131939 - DNA, 25 bp, probe
agagcaccaaagagctaggggcccc

SEQ ID NO: 131940 - DNA, 25 bp, probe
agatgtccaaccaaggggcagtcct

SEQ ID NO: 131941 - DNA, 25 bp, probe
agatgtccaaccaaggggcagtcct

SEQ ID NO: 131942 - DNA, 25 bp, probe
agagacaaatccacgggcgggtctg

SEQ ID NO: 131943 - DNA, 25 bp, probe
agatgacaaattggggctgtcgggg

SEQ ID NO: 131944 - DNA, 25 bp, probe
agttgcaattgaaatattattaaca

SEQ ID NO: 131945 - DNA, 25 bp, probe
agttccatagaacattttccagaag

SEQ ID NO: 131946 - DNA, 25 bp, probe
agttccgaagacggctttcaagaca

SEQ ID NO: 131947 - DNA, 25 bp, probe
agttccgtcagctgcagctgttcaa

SEQ ID NO: 131948 - DNA, 25 bp, probe
agattcccttgaagatgtgtcccaa

SEQ ID NO: 131949 - DNA, 25 bp, probe
agattccttttgtcaattgcaccaa

SEQ ID NO: 131950 - DNA, 25 bp, probe
agatctcctttagagggcacagtca

SEQ ID NO: 131951 - DNA, 25 bp, probe
agatcttttccagagtatgcaactc

SEQ ID NO: 131952 - DNA, 25 bp, probe
agatgcttttccgtagtcgtgacct

SEQ ID NO: 131953 - DNA, 25 bp, probe
agatctttatgctgctggtggtggg

SEQ ID NO: 131954 - DNA, 25 bp, probe
agatatttatggagcaggtgcctgg

SEQ ID NO: 131955 - DNA, 25 bp, probe
agatatttatggagcaggtgcctgg

SEQ ID NO: 131956 - DNA, 25 bp, probe
agttcttggaggtcaagggcatggg

SEQ ID NO: 131957 - DNA, 25 bp, probe
agttcctgcagggactaggtcttgc

SEQ ID NO: 131958 - DNA, 25 bp, probe
agattcctgcaacctcaagagactt

SEQ ID NO: 131959 - DNA, 25 bp, probe
agttcagccaggccagcaaggactt

SEQ ID NO: 131960 - DNA, 25 bp, probe
agttgagtgcacccaagtggcaccc

SEQ ID NO: 131961 - DNA, 25 bp, probe
agttagtgccatggcacactgccac

SEQ ID NO: 131962 - DNA, 25 bp, probe
agttatggcaatgaactgcagcatg

SEQ ID NO: 131963 - DNA, 25 bp, probe
agttgcagcgattgcaactggcctg

SEQ ID NO: 131964 - DNA, 25 bp, probe
agttcatgctgtcggatctggccga

SEQ ID NO: 131965 - DNA, 25 bp, probe
agattcatgcgatgtgtccaatcgg

SEQ ID NO: 131966 - DNA, 25 bp, probe
agttcaacactgtctctcaatcaga

SEQ ID NO: 131967 - DNA, 25 bp, probe
agatctagacctctctgattgctga

SEQ ID NO: 131968 - DNA, 25 bp, probe
agattagccattctctgctgctatt

SEQ ID NO: 131969 - DNA, 25 bp, probe
agattgatcagcttgtgtatggttt

SEQ ID NO: 131970 - DNA, 25 bp, probe
agttgatgaatttgctatgcgttat

SEQ ID NO: 131971 - DNA, 25 bp, probe
agttgtgaacattgcttgtgtgtgt

SEQ ID NO: 131972 - DNA, 25 bp, probe
agttctgaaactgctttgtatctgc

SEQ ID NO: 131973 - DNA, 25 bp, probe
agttctgacgaatgtccattcttca

SEQ ID NO: 131974 - DNA, 25 bp, probe
agttctgacgaatgtccattcttca

SEQ ID NO: 131975 - DNA, 25 bp, probe
agttctgtaaataaccagccttcaa

SEQ ID NO: 131976 - DNA, 25 bp, probe
agttctgtgaactgaatgcagcctg

SEQ ID NO: 131977 - DNA, 25 bp, probe
agttctgtgaactgaatgcagcctg

SEQ ID NO: 131978 - DNA, 25 bp, probe
agttgtgtaagattcaccagcctga

SEQ ID NO: 131979 - DNA, 25 bp, probe
agttggcatgtgcagacacagccct

SEQ ID NO: 131980 - DNA, 25 bp, probe
catcatttgcttcaagccccgaaac

SEQ ID NO: 131981 - DNA, 25 bp, probe
agatttcttcgcaagactatggaaa

SEQ ID NO: 131982 - DNA, 25 bp, probe
agatcttctctctggatccggaaga

SEQ ID NO: 131983 - DNA, 25 bp, probe
agatcttctctctggatccggaaga

SEQ ID NO: 131984 - DNA, 25 bp, probe
agattgttctctggcagccggtaac

SEQ ID NO: 131985 - DNA, 25 bp, probe
agttgtacctcccctggatgaagat

SEQ ID NO: 131986 - DNA, 25 bp, probe
agatcaggacccgtcctcaataaca

SEQ ID NO: 131987 - DNA, 25 bp, probe
agatagcaaatttttccaactacat

SEQ ID NO: 131988 - DNA, 25 bp, probe
agatagcacaaattctaccatcccc

SEQ ID NO: 131989 - DNA, 25 bp, probe
agttgcctgaggtcattcacatgct

SEQ ID NO: 131990 - DNA, 25 bp, probe
agttgcctgaggtcattcacatgct

SEQ ID NO: 131991 - DNA, 25 bp, probe
agatagcctgtgggatgctgcacct

SEQ ID NO: 131992 - DNA, 25 bp, probe
agatagcctgtgggatgctgcacct

SEQ ID NO: 131993 - DNA, 25 bp, probe
agatcgacttgatcgtgcagctgct

SEQ ID NO: 131994 - DNA, 25 bp, probe
agatcgacttgatcgtgcagctgct

SEQ ID NO: 131995 - DNA, 25 bp, probe
agatcgacttgatcgtgcagctgct

SEQ ID NO: 131996 - DNA, 25 bp, probe
agatctacagatgagcgtggcgcag

SEQ ID NO: 131997 - DNA, 25 bp, probe
agatctaatgcatcctatatccagt

SEQ ID NO: 131998 - DNA, 25 bp, probe
agatctgagccaaccttggccgaca

SEQ ID NO: 131999 - DNA, 25 bp, probe
agatttgccagatattaccgagacg

SEQ ID NO: 132000 - DNA, 25 bp, probe
agatcttggcaatggtacactacaa

SEQ ID NO: 132001 - DNA, 25 bp, probe
agatactggaagctctacgctactg

SEQ ID NO: 132002 - DNA, 25 bp, probe
agatgccgataaaggcccctggtgt

SEQ ID NO: 132003 - DNA, 25 bp, probe
agatctacaaaatcctccatgcttt

SEQ ID NO: 132004 - DNA, 25 bp, probe
agatctacaaaatcctccatgcttt

SEQ ID NO: 132005 - DNA, 25 bp, probe
agatctacaaaatcctccatgcttt

SEQ ID NO: 132006 - DNA, 25 bp, probe
agatctacaaaatcctccatgcttt

SEQ ID NO: 132007 - DNA, 25 bp, probe
agatctgagaaagttccggtcctat

SEQ ID NO: 132008 - DNA, 25 bp, probe
agcatcatggatgcagggccggtcg

SEQ ID NO: 132009 - DNA, 25 bp, probe
agatcaagtccagatgccaagatcc

SEQ ID NO: 132010 - DNA, 25 bp, probe
agttctgtccatgtgggagacccag

SEQ ID NO: 132011 - DNA, 25 bp, probe
agttagtgacagggtggcagtccca

SEQ ID NO: 132012 - DNA, 25 bp, probe
agttcaggactgggatggcaaagaa

SEQ ID NO: 132013 - DNA, 25 bp, probe
agttcaggactgggatggcaaagaa

SEQ ID NO: 132014 - DNA, 25 bp, probe
agttatggacttggaggagagaacc

SEQ ID NO: 132015 - DNA, 25 bp, probe
agttatggacttggaggagagaacc

SEQ ID NO: 132016 - DNA, 25 bp, probe
agattcaggttttctctagagcaaa

SEQ ID NO: 132017 - DNA, 25 bp, probe
agattctatgtgcttttatcagaaa

SEQ ID NO: 132018 - DNA, 25 bp, probe
agttgtatgctgtggtttcagagga

SEQ ID NO: 132019 - DNA, 25 bp, probe
agttgtcatcttggagactaaagaa

SEQ ID NO: 132020 - DNA, 25 bp, probe
agttgtccatcgtgacatcaaggat

SEQ ID NO: 132021 - DNA, 25 bp, probe
agttgtcctttgatgagacagtgat

SEQ ID NO: 132022 - DNA, 25 bp, probe
agttgtcctatttttgtcattacta

SEQ ID NO: 132023 - DNA, 25 bp, probe
agttctccgatttatgtggattgtc

SEQ ID NO: 132024 - DNA, 25 bp, probe
agttgtttatgtgattggttgttct

SEQ ID NO: 132025 - DNA, 25 bp, probe
agttgcttgtagtgagtgctgtttt

SEQ ID NO: 132026 - DNA, 25 bp, probe
agttcggctagatttctgtcttgtt

SEQ ID NO: 132027 - DNA, 25 bp, probe
agatacaccaaatttcagtttgttt

SEQ ID NO: 132028 - DNA, 25 bp, probe
agaacaagaaatcacgtcagtttat

SEQ ID NO: 132029 - DNA, 25 bp, probe
agaacaagaaatcacgtcagtttat

SEQ ID NO: 132030 - DNA, 25 bp, probe
agaaggaagatttgacgttgttgtc

SEQ ID NO: 132031 - DNA, 25 bp, probe
agataggaaccattcaacttagttc

SEQ ID NO: 132032 - DNA, 25 bp, probe
agatgtggaacttatcccgttgcct

SEQ ID NO: 132033 - DNA, 25 bp, probe
agattgagtacttacctgccaggtc

SEQ ID NO: 132034 - DNA, 25 bp, probe
agatgaggtacatacactgccgctt

SEQ ID NO: 132035 - DNA, 25 bp, probe
agatgttgtgaaggtcctgggcctg

SEQ ID NO: 132036 - DNA, 25 bp, probe
agagggtacaggtggtggcctggcc

SEQ ID NO: 132037 - DNA, 25 bp, probe
agaggagtaccgtggcttcctcaat

SEQ ID NO: 132038 - DNA, 25 bp, probe
agaggagtaccgtggcttcctcaat

SEQ ID NO: 132039 - DNA, 25 bp, probe
agagtaggaaccgcttgtcttccag

SEQ ID NO: 132040 - DNA, 25 bp, probe
agatttaagacgggctgcttcttcc

SEQ ID NO: 132041 - DNA, 25 bp, probe
agactgatactactggggcttttcc

SEQ ID NO: 132042 - DNA, 25 bp, probe
agattatatccctatcttctttttc

SEQ ID NO: 132043 - DNA, 25 bp, probe
agattatatccctatcttctttttc

SEQ ID NO: 132044 - DNA, 25 bp, probe
agatttgagccaccacgtgctgatt

SEQ ID NO: 132045 - DNA, 25 bp, probe
agatttgagccaccacgtgctgatt

SEQ ID NO: 132046 - DNA, 25 bp, probe
agatttaccaccaagtctgatgtgt

SEQ ID NO: 132047 - DNA, 25 bp, probe
agatttccaacgacacagtcagccc

SEQ ID NO: 132048 - DNA, 25 bp, probe
agatgttacaacgggcaggagcctc

SEQ ID NO: 132049 - DNA, 25 bp, probe
agattataatacacaaggaaagcag

SEQ ID NO: 132050 - DNA, 25 bp, probe
agattcacactatgcactgggaaag

SEQ ID NO: 132051 - DNA, 25 bp, probe
agatcatccacagttacacggaaag

SEQ ID NO: 132052 - DNA, 25 bp, probe
agatctcaccaagcacattaaaaaa

SEQ ID NO: 132053 - DNA, 25 bp, probe
agatctcaccaagcacattaaaaaa

SEQ ID NO: 132054 - DNA, 25 bp, probe
agttcactacagacgattaacacac

SEQ ID NO: 132055 - DNA, 25 bp, probe
agcttccaaagggttaactcatcta

SEQ ID NO: 132056 - DNA, 25 bp, probe
agttaatacaggtttacagttcatg

SEQ ID NO: 132057 - DNA, 25 bp, probe
agttccataaggtgatacaggcctg

SEQ ID NO: 132058 - DNA, 25 bp, probe
agttccgcaaggcgctcaagagcct

SEQ ID NO: 132059 - DNA, 25 bp, probe
agttctcgcgtgatgggaaggctct

SEQ ID NO: 132060 - DNA, 25 bp, probe
agatcttcacctatggaaagcagcc

SEQ ID NO: 132061 - DNA, 25 bp, probe
agatcttcacctatggaaagcagcc

SEQ ID NO: 132062 - DNA, 25 bp, probe
agatcttcacctatggaaagcagcc

SEQ ID NO: 132063 - DNA, 25 bp, probe
agatattgttgtactggacccagcc

SEQ ID NO: 132064 - DNA, 25 bp, probe
agataaaatgtgacttcccctgctc

SEQ ID NO: 132065 - DNA, 25 bp, probe
agataaaagttcttccagtcagttt

SEQ ID NO: 132066 - DNA, 25 bp, probe
agataaaagttcttccagtcagttt

SEQ ID NO: 132067 - DNA, 25 bp, probe
agataaagactgtcaatccattgat

SEQ ID NO: 132068 - DNA, 25 bp, probe
agttcaaacagaaattgcattgtta

SEQ ID NO: 132069 - DNA, 25 bp, probe
agttctctagcataatttgtattga

SEQ ID NO: 132070 - DNA, 25 bp, probe
agatttgtatgtgaagctattttga

SEQ ID NO: 132071 - DNA, 25 bp, probe
agatgggaattgcacagtaggatgt

SEQ ID NO: 132072 - DNA, 25 bp, probe
agatgagggtttccggggctagtga

SEQ ID NO: 132073 - DNA, 25 bp, probe
agatggtgtggtctacgaggtcagg

SEQ ID NO: 132074 - DNA, 25 bp, probe
agatgggtggatcaggggacgggat

SEQ ID NO: 132075 - DNA, 25 bp, probe
ctgggtgggtttgcaggacgtcagt

SEQ ID NO: 132076 - DNA, 25 bp, probe
caggcaacggacagccaagacgtag

SEQ ID NO: 132077 - DNA, 25 bp, probe
agatgaacgaacagactcaggcgat

SEQ ID NO: 132078 - DNA, 25 bp, probe
agatgaagagacacagtctagaggt

SEQ ID NO: 132079 - DNA, 25 bp, probe
agaaatggtctctggcattgaagta

SEQ ID NO: 132080 - DNA, 25 bp, probe
agctaagacttctgacgtcaactcc

SEQ ID NO: 132081 - DNA, 25 bp, probe
agttgatgccttcccagagtcaacc

SEQ ID NO: 132082 - DNA, 25 bp, probe
agttggccatgtccaagaaagagga

SEQ ID NO: 132083 - DNA, 25 bp, probe
agatctgaccgtccaggaaacaggt

SEQ ID NO: 132084 - DNA, 25 bp, probe
agttgacggatgtcgcagaagagtg

SEQ ID NO: 132085 - DNA, 25 bp, probe
agttgacggatgtcgcagaagagtg

SEQ ID NO: 132086 - DNA, 25 bp, probe
agatatcccttggccagaaggtgaa

SEQ ID NO: 132087 - DNA, 25 bp, probe
agatccccatgaccgaagcggtgga

SEQ ID NO: 132088 - DNA, 25 bp, probe
agattctacttcgagaacctgctgg

SEQ ID NO: 132089 - DNA, 25 bp, probe
agatttagctgctcgaaactgcatg

SEQ ID NO: 132090 - DNA, 25 bp, probe
agatttcctgtgagaacatgcgttt

SEQ ID NO: 132091 - DNA, 25 bp, probe
agatttacatgggcaacacatctgt

SEQ ID NO: 132092 - DNA, 25 bp, probe
agatttacatgggcaacacatctgt

SEQ ID NO: 132093 - DNA, 25 bp, probe
agatttacagaagatctcaggccag

SEQ ID NO: 132094 - DNA, 25 bp, probe
agttgctaaataaatctccccactc

SEQ ID NO: 132095 - DNA, 25 bp, probe
agttgcaaaattatctccagacttc

SEQ ID NO: 132096 - DNA, 25 bp, probe
agattgaaactgccagcttccacct

SEQ ID NO: 132097 - DNA, 25 bp, probe
agttgaaacaggggcccatcatcat

SEQ ID NO: 132098 - DNA, 25 bp, probe
agagctaaccagttaccacacatct

SEQ ID NO: 132099 - DNA, 25 bp, probe
agagctaaccagttaccacacatct

SEQ ID NO: 132100 - DNA, 25 bp, probe
agatgccaaccgttcaacatccttt

SEQ ID NO: 132101 - DNA, 25 bp, probe
agatgccaaccgttcaacatccttt

SEQ ID NO: 132102 - DNA, 25 bp, probe
agatgccaaccgttcaacatccttt

SEQ ID NO: 132103 - DNA, 25 bp, probe
agattaaccgtcggcacatcactga

SEQ ID NO: 132104 - DNA, 25 bp, probe
agattagtgctcggggtcaccatga

SEQ ID NO: 132105 - DNA, 25 bp, probe
agttgatgtgcccttgaataccagg

SEQ ID NO: 132106 - DNA, 25 bp, probe
agttgcaccaccagatataccacta

SEQ ID NO: 132107 - DNA, 25 bp, probe
agatcagccgcatcgagtatatcca

SEQ ID NO: 132108 - DNA, 25 bp, probe
agatcacagagcagcaagttcatac

SEQ ID NO: 132109 - DNA, 25 bp, probe
agatcacatagcattgatcattgaa

SEQ ID NO: 132110 - DNA, 25 bp, probe
agatgacagatgatgctgtcaagca

SEQ ID NO: 132111 - DNA, 25 bp, probe
agatcagtgatcctattcagcagat

SEQ ID NO: 132112 - DNA, 25 bp, probe
agaagttagtatacaatattgggga

SEQ ID NO: 132113 - DNA, 25 bp, probe
agatcgttacttggaaatggagcct

SEQ ID NO: 132114 - DNA, 25 bp, probe
agacacttacctaacaagtactgct

SEQ ID NO: 132115 - DNA, 25 bp, probe
agagtttaagtatccagtagtgatt

SEQ ID NO: 132116 - DNA, 25 bp, probe
agagttaaattctccattatgttcg

SEQ ID NO: 132117 - DNA, 25 bp, probe
agactggaaatttgtagctcaagtt

SEQ ID NO: 132118 - DNA, 25 bp, probe
agttggacactatgtcacatgcaca

SEQ ID NO: 132119 - DNA, 25 bp, probe
agttggaccacactgtgagcatgca

SEQ ID NO: 132120 - DNA, 25 bp, probe
agttgagtgtcaggggacatgatga

SEQ ID NO: 132121 - DNA, 25 bp, probe
agattgaggttcctggacagatcag

SEQ ID NO: 132122 - DNA, 25 bp, probe
agatatgcggtgaggaacagcttga

SEQ ID NO: 132123 - DNA, 25 bp, probe
agatatgagggctcaagtcgcaatg

SEQ ID NO: 132124 - DNA, 25 bp, probe
agattggagtgctgcacaaacaaac

SEQ ID NO: 132125 - DNA, 25 bp, probe
agatccagattgtgacgaagcagac

SEQ ID NO: 132126 - DNA, 25 bp, probe
agatgtcttctgtgcccagaggagc

SEQ ID NO: 132127 - DNA, 25 bp, probe
agatgtcttctgtgcccagaggagc

SEQ ID NO: 132128 - DNA, 25 bp, probe
agttgccatggttaccgaggaccct

SEQ ID NO: 132129 - DNA, 25 bp, probe
agttggatcagtcacttggtaccct

SEQ ID NO: 132130 - DNA, 25 bp, probe
agattgttcagtctcgggtactcaa

SEQ ID NO: 132131 - DNA, 25 bp, probe
agttctcatcacctccaggtggact

SEQ ID NO: 132132 - DNA, 25 bp, probe
agttctcatcacctccaggtggact

SEQ ID NO: 132133 - DNA, 25 bp, probe
agttccatgcaacgtcctgaggaca

SEQ ID NO: 132134 - DNA, 25 bp, probe
agttccagaaggaggcgctggcaga

SEQ ID NO: 132135 - DNA, 25 bp, probe
agattgtcgaacaggagcttggaga

SEQ ID NO: 132136 - DNA, 25 bp, probe
agttgcttgaacttggagctaataa

SEQ ID NO: 132137 - DNA, 25 bp, probe
agttgttgaatattgcgatgccgaa

SEQ ID NO: 132138 - DNA, 25 bp, probe
agatcagtctttgtcaatgctctaa

SEQ ID NO: 132139 - DNA, 25 bp, probe
agatcaatgtttaactcagctcaaa

SEQ ID NO: 132140 - DNA, 25 bp, probe
agatttttcttatagctaaacaaca

SEQ ID NO: 132141 - DNA, 25 bp, probe
agattcttttcttaggtatacaaat

SEQ ID NO: 132142 - DNA, 25 bp, probe
agcttatttgaataaactacaacaa

SEQ ID NO: 132143 - DNA, 25 bp, probe
agttccctcagattaaagctcaccc

SEQ ID NO: 132144 - DNA, 25 bp, probe
agttctccgcgttcatcaagaaccc

SEQ ID NO: 132145 - DNA, 25 bp, probe
agttctgggcctttctcagaagact

SEQ ID NO: 132146 - DNA, 25 bp, probe
agattgctgggtcatttagaataat

SEQ ID NO: 132147 - DNA, 25 bp, probe
agatggcacgggtcttttcaattct

SEQ ID NO: 132148 - DNA, 25 bp, probe
agatggcacgggtcttttcaattct

SEQ ID NO: 132149 - DNA, 25 bp, probe
agaggaagggactttcactttcaag

SEQ ID NO: 132150 - DNA, 25 bp, probe
agaggaacgacttctgtaagctcca

SEQ ID NO: 132151 - DNA, 25 bp, probe
agaggctactcttgacttagaccta

SEQ ID NO: 132152 - DNA, 25 bp, probe
agatagtcacctcactaaggctctc

SEQ ID NO: 132153 - DNA, 25 bp, probe
agatagattcttcaatgataagttg

SEQ ID NO: 132154 - DNA, 25 bp, probe
agctcagatgatgcgggagtgctgg

SEQ ID NO: 132155 - DNA, 25 bp, probe
agatcgagtccaaggcagcctatgt

SEQ ID NO: 132156 - DNA, 25 bp, probe
agatctagtccggacttgctgtgta

SEQ ID NO: 132157 - DNA, 25 bp, probe
agatctagttctcaatcactgctcc

SEQ ID NO: 132158 - DNA, 25 bp, probe
agataagcttctagaacaagccctg

SEQ ID NO: 132159 - DNA, 25 bp, probe
agatatatttaaacctcatgccctg

SEQ ID NO: 132160 - DNA, 25 bp, probe
agatcattttgaaattgttccctgg

SEQ ID NO: 132161 - DNA, 25 bp, probe
agattttgtggaactttgctgtcgt

SEQ ID NO: 132162 - DNA, 25 bp, probe
agattttgtggaactttgctgtcgt

SEQ ID NO: 132163 - DNA, 25 bp, probe
agatatttgcaggctcttcttggct

SEQ ID NO: 132164 - DNA, 25 bp, probe
agatatttgcaggctcttcttggct

SEQ ID NO: 132165 - DNA, 25 bp, probe
agatatccatcatgcacttgctatg

SEQ ID NO: 132166 - DNA, 25 bp, probe
agatatctgctactcacatttttgg

SEQ ID NO: 132167 - DNA, 25 bp, probe
agatattgctgcctctgagtttatt

SEQ ID NO: 132168 - DNA, 25 bp, probe
agattcagcagtcagatgtttactg

SEQ ID NO: 132169 - DNA, 25 bp, probe
agatcgcacaggatgagatttatat

SEQ ID NO: 132170 - DNA, 25 bp, probe
agatcagaatagtagcagatgtaaa

SEQ ID NO: 132171 - DNA, 25 bp, probe
agataactcagtacagatagcaatt

SEQ ID NO: 132172 - DNA, 25 bp, probe
agttgcttagatccagtcatgtatt

SEQ ID NO: 132173 - DNA, 25 bp, probe
agttgcttagatccagtcatgtatt

SEQ ID NO: 132174 - DNA, 25 bp, probe
agctcatttcgacagtcggatccat

SEQ ID NO: 132175 - DNA, 25 bp, probe
agctcatttcgacagtcggatccat

SEQ ID NO: 132176 - DNA, 25 bp, probe
agatattgtggacacggccatgccc

SEQ ID NO: 132177 - DNA, 25 bp, probe
agttctgtggtgcatctgagccagt

SEQ ID NO: 132178 - DNA, 25 bp, probe
agttggtggagtactaccagtgcca

SEQ ID NO: 132179 - DNA, 25 bp, probe
agttcgtgaagctcaagtcggacac

SEQ ID NO: 132180 - DNA, 25 bp, probe
agatttctcacctcgagacaggaca

SEQ ID NO: 132181 - DNA, 25 bp, probe
agatttcttcattctgctgagcaag

SEQ ID NO: 132182 - DNA, 25 bp, probe
agatttgtgactttgtcaatcagtg

SEQ ID NO: 132183 - DNA, 25 bp, probe
agatttcacacctatgacatacatg

SEQ ID NO: 132184 - DNA, 25 bp, probe
agatttccacagttgactacatcct

SEQ ID NO: 132185 - DNA, 25 bp, probe
agatttccacagatgacatgaaaaa

SEQ ID NO: 132186 - DNA, 25 bp, probe
agatttctcatttgccaataataat

SEQ ID NO: 132187 - DNA, 25 bp, probe
agatcgtatttatgcaatgaaagtt

SEQ ID NO: 132188 - DNA, 25 bp, probe
agatctgtttcgtgcattggaagac

SEQ ID NO: 132189 - DNA, 25 bp, probe
agatttgtctaattgcatctcaaaa

SEQ ID NO: 132190 - DNA, 25 bp, probe
agatatgtactgcaggcccagatag

SEQ ID NO: 132191 - DNA, 25 bp, probe
agatcatatcctcagaccaggtgga

SEQ ID NO: 132192 - DNA, 25 bp, probe
agatagatccatctgagttggcttt

SEQ ID NO: 132193 - DNA, 25 bp, probe
agatagatccatctgagttggcttt

SEQ ID NO: 132194 - DNA, 25 bp, probe
agatgtgccctggtaactggctttg

SEQ ID NO: 132195 - DNA, 25 bp, probe
agatgtgccctggtaactggctttg

SEQ ID NO: 132196 - DNA, 25 bp, probe
agatgcccttctgaactggcttaaa

SEQ ID NO: 132197 - DNA, 25 bp, probe
agatccctttgtccacaagtaaaag

SEQ ID NO: 132198 - DNA, 25 bp, probe
agaccctgattgcccgtaggttaag

SEQ ID NO: 132199 - DNA, 25 bp, probe
agatccacatcaaaccgggggctaa

SEQ ID NO: 132200 - DNA, 25 bp, probe
agattgaaataatgcggggtctgcg

SEQ ID NO: 132201 - DNA, 25 bp, probe
agatgctgaataatgtacgggactt

SEQ ID NO: 132202 - DNA, 25 bp, probe
agattgcagatgcgtgtcgcctgac

SEQ ID NO: 132203 - DNA, 25 bp, probe
agatacagatggctgcctgctgctc

SEQ ID NO: 132204 - DNA, 25 bp, probe
agatacagatggctgcctgctgctc

SEQ ID NO: 132205 - DNA, 25 bp, probe
agatcaagtgggccttggatcgcta

SEQ ID NO: 132206 - DNA, 25 bp, probe
agatcagcagtacatctcagaccct

SEQ ID NO: 132207 - DNA, 25 bp, probe
agatcctgtatgccacatcagaccc

SEQ ID NO: 132208 - DNA, 25 bp, probe
agaacttcgccagtcaactacgcga

SEQ ID NO: 132209 - DNA, 25 bp, probe
agaccattcaaagctacccgaacta

SEQ ID NO: 132210 - DNA, 25 bp, probe
agaggagtaactcgtgtcccgaact

SEQ ID NO: 132211 - DNA, 25 bp, probe
agaggagtaactcgtgtcccgaact

SEQ ID NO: 132212 - DNA, 25 bp, probe
agcggaagaactacattcaccggga

SEQ ID NO: 132213 - DNA, 25 bp, probe
agaagaacaaatattcctcgtgcta

SEQ ID NO: 132214 - DNA, 25 bp, probe
agatgaaacaaggatcttccgagtg

SEQ ID NO: 132215 - DNA, 25 bp, probe
agattggagaaggcttgtattagtc

SEQ ID NO: 132216 - DNA, 25 bp, probe
agagggcgatagtcgttttcttgca

SEQ ID NO: 132217 - DNA, 25 bp, probe
agagggcgatagtcgttttcttgca

SEQ ID NO: 132218 - DNA, 25 bp, probe
agttgtgtgctattcgtaagttctg

SEQ ID NO: 132219 - DNA, 25 bp, probe
agttgtgtgctattcgtaagttctg

SEQ ID NO: 132220 - DNA, 25 bp, probe
agttgtatatttgtaagatgacaga

SEQ ID NO: 132221 - DNA, 25 bp, probe
agatatttatttgtgcccagaagca

SEQ ID NO: 132222 - DNA, 25 bp, probe
agatattaacttactcacacggaca

SEQ ID NO: 132223 - DNA, 25 bp, probe
agatattaattcagctgcacaaaat

SEQ ID NO: 132224 - DNA, 25 bp, probe
agattaagagtcaatctgcaagcca

SEQ ID NO: 132225 - DNA, 25 bp, probe
agattcatcaggacctgctcagcag

SEQ ID NO: 132226 - DNA, 25 bp, probe
agattgtgcagatgactgaagcaga

SEQ ID NO: 132227 - DNA, 25 bp, probe
agattgcatccaagacttatcagtc

SEQ ID NO: 132228 - DNA, 25 bp, probe
agatgatgctgtcaagcaatattgt

SEQ ID NO: 132229 - DNA, 25 bp, probe
agatctggctgcaagaaatgtgttg

SEQ ID NO: 132230 - DNA, 25 bp, probe
agttgcctcatctacaatttgagaa

SEQ ID NO: 132231 - DNA, 25 bp, probe
agatctacacacttgcagtttggaa

SEQ ID NO: 132232 - DNA, 25 bp, probe
agatctacaccactgtgctgtttgc

SEQ ID NO: 132233 - DNA, 25 bp, probe
agattgacacgctgtcattttccat

SEQ ID NO: 132234 - DNA, 25 bp, probe
agttgcatcaagtgttcgagtccct

SEQ ID NO: 132235 - DNA, 25 bp, probe
agttgcatcaagtgttcgagtccct

SEQ ID NO: 132236 - DNA, 25 bp, probe
agataatctgaggtttggcatgtcc

SEQ ID NO: 132237 - DNA, 25 bp, probe
agatcagactgatgatttggctaaa

SEQ ID NO: 132238 - DNA, 25 bp, probe
agatgaacatgtatagtggctaact

SEQ ID NO: 132239 - DNA, 25 bp, probe
agatgaagcagggccgtactttgct

SEQ ID NO: 132240 - DNA, 25 bp, probe
agattcgcggatgatgtacttctct

SEQ ID NO: 132241 - DNA, 25 bp, probe
agattcgcggatgatgtacttctct

SEQ ID NO: 132242 - DNA, 25 bp, probe
agatcctgggtgcagacttcatcct

SEQ ID NO: 132243 - DNA, 25 bp, probe
agattccaagtcaatggcttccctt

SEQ ID NO: 132244 - DNA, 25 bp, probe
agatgctcaaagacaacgcctctga

SEQ ID NO: 132245 - DNA, 25 bp, probe
agattacacagattatacagctcta

SEQ ID NO: 132246 - DNA, 25 bp, probe
agatttaagaatcgagagctccaga

SEQ ID NO: 132247 - DNA, 25 bp, probe
agattattactacgatgattgacag

SEQ ID NO: 132248 - DNA, 25 bp, probe
agattcatcttttcagtttgatagt

SEQ ID NO: 132249 - DNA, 25 bp, probe
agattcacaatttcaaggtgcatac

SEQ ID NO: 132250 - DNA, 25 bp, probe
agagcccaatttgtggtctaccttc

SEQ ID NO: 132251 - DNA, 25 bp, probe
agagcttgcaaatagttttactttc

SEQ ID NO: 132252 - DNA, 25 bp, probe
agaggaaattaactatctgtactta

SEQ ID NO: 132253 - DNA, 25 bp, probe
acaggaattttcttttctcagtgga

SEQ ID NO: 132254 - DNA, 25 bp, probe
agaggaatttggctgcttctacggc

SEQ ID NO: 132255 - DNA, 25 bp, probe
agaggaagtaggacttgtagtagag

SEQ ID NO: 132256 - DNA, 25 bp, probe
agaggcgccaacgcttggaggaaga

SEQ ID NO: 132257 - DNA, 25 bp, probe
agatgggtccgaggcgggggacaga

SEQ ID NO: 132258 - DNA, 25 bp, probe
agatggtgtgtccagcactcgattg

SEQ ID NO: 132259 - DNA, 25 bp, probe
agatggtgtgtccagcactcgattg

SEQ ID NO: 132260 - DNA, 25 bp, probe
agatttgtgatccaggcctcacttc

SEQ ID NO: 132261 - DNA, 25 bp, probe
agatttgtaggaaggtctcattctt

SEQ ID NO: 132262 - DNA, 25 bp, probe
agatttgtaggaaggtctcattctt

SEQ ID NO: 132263 - DNA, 25 bp, probe
agttgttagccaagtaaatatcatt

SEQ ID NO: 132264 - DNA, 25 bp, probe
agttgttaccattataaccctacag

SEQ ID NO: 132265 - DNA, 25 bp, probe
agattttacctgttactctacatta

SEQ ID NO: 132266 - DNA, 25 bp, probe
agttgattactgcctgtactctaca

SEQ ID NO: 132267 - DNA, 25 bp, probe
agagtcttactgtagctacgctaat

SEQ ID NO: 132268 - DNA, 25 bp, probe
agatgtcttcagctatgctctgtgt

SEQ ID NO: 132269 - DNA, 25 bp, probe
agattcagtagcagatgccgttcaa

SEQ ID NO: 132270 - DNA, 25 bp, probe
agatgactgtggagctcctgttcag

SEQ ID NO: 132271 - DNA, 25 bp, probe
agatgactgtggagctcctgttcag

SEQ ID NO: 132272 - DNA, 25 bp, probe
agatgatatgtgctgcctttgcttc

SEQ ID NO: 132273 - DNA, 25 bp, probe
agatattgtgagctaatcagcttgc

SEQ ID NO: 132274 - DNA, 25 bp, probe
agatattggagagaacacattatgt

SEQ ID NO: 132275 - DNA, 25 bp, probe
agattctggctggctcaaaggtagt

SEQ ID NO: 132276 - DNA, 25 bp, probe
agattctggctgttctaaagttggc

SEQ ID NO: 132277 - DNA, 25 bp, probe
agattctggctgttctaaagttggc

SEQ ID NO: 132278 - DNA, 25 bp, probe
agatgctgggcgatctcatcaaggt

SEQ ID NO: 132279 - DNA, 25 bp, probe
agatgcatgctttgttctgtgcata

SEQ ID NO: 132280 - DNA, 25 bp, probe
agatgatgctgccttctcagtagaa

SEQ ID NO: 132281 - DNA, 25 bp, probe
agatgctgcgcaccaggagcaaaag

SEQ ID NO: 132282 - DNA, 25 bp, probe
agatatgccaccaaggccacatcga

SEQ ID NO: 132283 - DNA, 25 bp, probe
agcttgggccagtgacaatctgcaa

SEQ ID NO: 132284 - DNA, 25 bp, probe
agattgtgagccgccaatatcatca

SEQ ID NO: 132285 - DNA, 25 bp, probe
agttgggcactggcaaatgtctcct

SEQ ID NO: 132286 - DNA, 25 bp, probe
agttgtggtttatcattctctattt

SEQ ID NO: 132287 - DNA, 25 bp, probe
agttgtggtttatcattctctattt

SEQ ID NO: 132288 - DNA, 25 bp, probe
agatatttccctaacatgtcctttt

SEQ ID NO: 132289 - DNA, 25 bp, probe
agaggtaccacgaagctaccttttg

SEQ ID NO: 132290 - DNA, 25 bp, probe
agaggtaccacgaagctaccttttg

SEQ ID NO: 132291 - DNA, 25 bp, probe
agatagccctgcacaagtaccttaa

SEQ ID NO: 132292 - DNA, 25 bp, probe
agatagccctgcacaagtaccttaa

SEQ ID NO: 132293 - DNA, 25 bp, probe
agatgcaccctggcatcggtacact

SEQ ID NO: 132294 - DNA, 25 bp, probe
agatcacatagtgctaggatgacac

SEQ ID NO: 132295 - DNA, 25 bp, probe
agatgactaggtgaggcatgctgac

SEQ ID NO: 132296 - DNA, 25 bp, probe
agatgactaggtgaggcatgctgac

SEQ ID NO: 132297 - DNA, 25 bp, probe
agatactcaagtacacactgtggga

SEQ ID NO: 132298 - DNA, 25 bp, probe
agatcctagactacctctgtgaggt

SEQ ID NO: 132299 - DNA, 25 bp, probe
agatcctagaatatccggagtcatc

SEQ ID NO: 132300 - DNA, 25 bp, probe
agatgtctaggtacttcaggggcac

SEQ ID NO: 132301 - DNA, 25 bp, probe
agatgatcctggagtccaggcccct

SEQ ID NO: 132302 - DNA, 25 bp, probe
agatgatgcgggagtgctggtaccc

SEQ ID NO: 132303 - DNA, 25 bp, probe
agattcggaggatcatggctgcggc

SEQ ID NO: 132304 - DNA, 25 bp, probe
agattaagggcttcattcggcgctt

SEQ ID NO: 132305 - DNA, 25 bp, probe
agatacagaatccttcatcctggcc

SEQ ID NO: 132306 - DNA, 25 bp, probe
agatacaggacattctcatcaccac

SEQ ID NO: 132307 - DNA, 25 bp, probe
agatgtaaacattaacacctcgtga

SEQ ID NO: 132308 - DNA, 25 bp, probe
agatgggcacgcggagaacctcgtg

SEQ ID NO: 132309 - DNA, 25 bp, probe
agatgggcacgcggagaacctcgtg

SEQ ID NO: 132310 - DNA, 25 bp, probe
agatgggcacgcggagaacctcgtg

SEQ ID NO: 132311 - DNA, 25 bp, probe
agaggtgagcagaggagtccagggc

SEQ ID NO: 132312 - DNA, 25 bp, probe
agaggcgaaactgagtcagagcggg

SEQ ID NO: 132313 - DNA, 25 bp, probe
agaggtgacacctcactaaggggcc

SEQ ID NO: 132314 - DNA, 25 bp, probe
agaggtgacacctcactaaggggcc

SEQ ID NO: 132315 - DNA, 25 bp, probe
agacgatgtcacgtattgccaagag

SEQ ID NO: 132316 - DNA, 25 bp, probe
agatctcagtagactgggtcaagag

SEQ ID NO: 132317 - DNA, 25 bp, probe
agatctcagtagactgggtcaagag

SEQ ID NO: 132318 - DNA, 25 bp, probe
agattcaggcagactggtggcagtg

SEQ ID NO: 132319 - DNA, 25 bp, probe
agattcagagcacttgggattgtaa

SEQ ID NO: 132320 - DNA, 25 bp, probe
agattagatcactgggtgctgggaa

SEQ ID NO: 132321 - DNA, 25 bp, probe
agattgcttcagttgagggccggaa

SEQ ID NO: 132322 - DNA, 25 bp, probe
agattgccaagggaggagccgacaa

SEQ ID NO: 132323 - DNA, 25 bp, probe
agatgtcccggaggggactgagctc

SEQ ID NO: 132324 - DNA, 25 bp, probe
agaccgctcgggcatggagaattcc

SEQ ID NO: 132325 - DNA, 25 bp, probe
agatcgcctcgggtatggtgtacct

SEQ ID NO: 132326 - DNA, 25 bp, probe
agatcgcgccggattattgctgcaa

SEQ ID NO: 132327 - DNA, 25 bp, probe
agttggacgtgaatgctgaggcagc

SEQ ID NO: 132328 - DNA, 25 bp, probe
agttggatcagtttgatagaatcaa

SEQ ID NO: 132329 - DNA, 25 bp, probe
agatgtggcatcttttgtaaaactg

SEQ ID NO: 132330 - DNA, 25 bp, probe
agatgctggtaaatgtgctcaacat

SEQ ID NO: 132331 - DNA, 25 bp, probe
agatgtggttgcatcctaactccat

SEQ ID NO: 132332 - DNA, 25 bp, probe
agcgtggttacctctgacgctattc

SEQ ID NO: 132333 - DNA, 25 bp, probe
agagaggtttccttcacacaggttc

SEQ ID NO: 132334 - DNA, 25 bp, probe
agaggacttccctgcagcacgtcgc

SEQ ID NO: 132335 - DNA, 25 bp, probe
agatgggattccctatggacgcctg

SEQ ID NO: 132336 - DNA, 25 bp, probe
agattcctggcattcgaggagccct

SEQ ID NO: 132337 - DNA, 25 bp, probe
agatctcggtgaacgtggaggactg

SEQ ID NO: 132338 - DNA, 25 bp, probe
agatccaggttttgggaggccgtgc

SEQ ID NO: 132339 - DNA, 25 bp, probe
agctccattgtttcggaaatccagg

SEQ ID NO: 132340 - DNA, 25 bp, probe
agctccattgtttcggaaatccagg

SEQ ID NO: 132341 - DNA, 25 bp, probe
agcacttccgactggaaaccgagtg

SEQ ID NO: 132342 - DNA, 25 bp, probe
agaccccaaatcagatcaagtcggg

SEQ ID NO: 132343 - DNA, 25 bp, probe
agatcactctcaagaaggaccagat

SEQ ID NO: 132344 - DNA, 25 bp, probe
agatcactctcaagaaggaccagat

SEQ ID NO: 132345 - DNA, 25 bp, probe
agatcacgctggggaaacggatagg

SEQ ID NO: 132346 - DNA, 25 bp, probe
agatcaagtcgggaactccataccg

SEQ ID NO: 132347 - DNA, 25 bp, probe
agatctagacaagaacatacatacc

SEQ ID NO: 132348 - DNA, 25 bp, probe
agatctgcgatcagcaaacattcta

SEQ ID NO: 132349 - DNA, 25 bp, probe
agatctacacagtcacacaattatt

SEQ ID NO: 132350 - DNA, 25 bp, probe
agattgacaaggtagacatggattt

SEQ ID NO: 132351 - DNA, 25 bp, probe
agatcaacaaggtcatgcttgcgat

SEQ ID NO: 132352 - DNA, 25 bp, probe
agatcttggtggtcagctgggtcta

SEQ ID NO: 132353 - DNA, 25 bp, probe
agatcttggtggtcagctgggtcta

SEQ ID NO: 132354 - DNA, 25 bp, probe
agattgagatggccatcctgcggtt

SEQ ID NO: 132355 - DNA, 25 bp, probe
agatgtataatttcctcaggtcatt

SEQ ID NO: 132356 - DNA, 25 bp, probe
agatgtataatttcctcaggtcatt

SEQ ID NO: 132357 - DNA, 25 bp, probe
agatcatgaagttacccactgtctt

SEQ ID NO: 132358 - DNA, 25 bp, probe
agattgaagatgcatccaaccctct

SEQ ID NO: 132359 - DNA, 25 bp, probe
agattgctagtgcaactactgctcc

SEQ ID NO: 132360 - DNA, 25 bp, probe
agattctggctgtccactattgttc

SEQ ID NO: 132361 - DNA, 25 bp, probe
agatttcctgatcccgatgttagaa

SEQ ID NO: 132362 - DNA, 25 bp, probe
agatcagtttgaccggtgtggacac

SEQ ID NO: 132363 - DNA, 25 bp, probe
gaatcgtttgaacacgggaggcgga

SEQ ID NO: 132364 - DNA, 25 bp, probe
agatccagatgttacaacgggcagg

SEQ ID NO: 132365 - DNA, 25 bp, probe
agatctgggacgtccacgagtgagg

SEQ ID NO: 132366 - DNA, 25 bp, probe
agatcgaggactttctggaggagac

SEQ ID NO: 132367 - DNA, 25 bp, probe
agatcgagaccatcctggctaacac

SEQ ID NO: 132368 - DNA, 25 bp, probe
agatcggtgacatctgggctttcac

SEQ ID NO: 132369 - DNA, 25 bp, probe
agatgtagtgactgcggatgtttac

SEQ ID NO: 132370 - DNA, 25 bp, probe
agagtaattatttcaatctttgact

SEQ ID NO: 132371 - DNA, 25 bp, probe
agattagatgttttccttgggattt

SEQ ID NO: 132372 - DNA, 25 bp, probe
agattaagttcatccctgcaaggat

SEQ ID NO: 132373 - DNA, 25 bp, probe
agattaatggcagagtgcctcaaaa

SEQ ID NO: 132374 - DNA, 25 bp, probe
agataaatatcccatggcccaagat

SEQ ID NO: 132375 - DNA, 25 bp, probe
agataaactgctccaaaccaacatg

SEQ ID NO: 132376 - DNA, 25 bp, probe
agatagagacaatcttacccgcagg

SEQ ID NO: 132377 - DNA, 25 bp, probe
acatagaccaaatatcccccaataa

SEQ ID NO: 132378 - DNA, 25 bp, probe
agatcaagataaagaagcctcccaa

SEQ ID NO: 132379 - DNA, 25 bp, probe
agatcaagataaagaagcctcccaa

SEQ ID NO: 132380 - DNA, 25 bp, probe
agatccacattcaagtgtgcccacc

SEQ ID NO: 132381 - DNA, 25 bp, probe
agatacctctgagttgtctctactc

SEQ ID NO: 132382 - DNA, 25 bp, probe
agatcacctgtgaaagcttgcaact

SEQ ID NO: 132383 - DNA, 25 bp, probe
agatcacctgtgaaagcttgcaact

SEQ ID NO: 132384 - DNA, 25 bp, probe
agatacacgtgtgagcaggcagctc

SEQ ID NO: 132385 - DNA, 25 bp, probe
agattacatgtatctgaggcagcta

SEQ ID NO: 132386 - DNA, 25 bp, probe
agatccagtctattcaaggcattga

SEQ ID NO: 132387 - DNA, 25 bp, probe
agaccagaccccagtgattaatgtg

SEQ ID NO: 132388 - DNA, 25 bp, probe
agaccaggctacaaggtgtttttgg

SEQ ID NO: 132389 - DNA, 25 bp, probe
agatcctggcatagcacagggtcat

SEQ ID NO: 132390 - DNA, 25 bp, probe
agatgcctcagatgctataggtcag

SEQ ID NO: 132391 - DNA, 25 bp, probe
agataccgaagattagtggagctct

SEQ ID NO: 132392 - DNA, 25 bp, probe
agatactcgaggtggatgtcgcgtc

SEQ ID NO: 132393 - DNA, 25 bp, probe
agatttccattgtgtggcctggtgg

SEQ ID NO: 132394 - DNA, 25 bp, probe
agagactccttgtgatgactggggc

SEQ ID NO: 132395 - DNA, 25 bp, probe
agatcgcatatttggggcagctggg

SEQ ID NO: 132396 - DNA, 25 bp, probe
agatgctcgtgtgcagagagcactg

SEQ ID NO: 132397 - DNA, 25 bp, probe
agatgtggatatccagagcgagcgc

SEQ ID NO: 132398 - DNA, 25 bp, probe
agagttttaagacactgttctgggc

SEQ ID NO: 132399 - DNA, 25 bp, probe
agattttataaacagcttggcagtg

SEQ ID NO: 132400 - DNA, 25 bp, probe
agagtttcttagaggcttggactgc

SEQ ID NO: 132401 - DNA, 25 bp, probe
agagttccgtaaacagtgttacacg

SEQ ID NO: 132402 - DNA, 25 bp, probe
agacgtacttaatctgtatttagat

SEQ ID NO: 132403 - DNA, 25 bp, probe
aacttaaatgtatcgacttacagtt

SEQ ID NO: 132404 - DNA, 25 bp, probe
aacttaaatgtatcgacttacagtt

SEQ ID NO: 132405 - DNA, 25 bp, probe
agagttgcaaaaaaagactgtatca

SEQ ID NO: 132406 - DNA, 25 bp, probe
agatttaccataagggactgtgcca

SEQ ID NO: 132407 - DNA, 25 bp, probe
agcatattaccaggggtttggccat

SEQ ID NO: 132408 - DNA, 25 bp, probe
agatactcccacaggtgggcccata

SEQ ID NO: 132409 - DNA, 25 bp, probe
agataacgccacgtgtgatggcccc

SEQ ID NO: 132410 - DNA, 25 bp, probe
agataaccacaaggccgacatcagc

SEQ ID NO: 132411 - DNA, 25 bp, probe
agataaccacaaggccgacatcagc

SEQ ID NO: 132412 - DNA, 25 bp, probe
agatgaagcctatctcatcggccgc

SEQ ID NO: 132413 - DNA, 25 bp, probe
agatgaatgagtacaccgtgcacct

SEQ ID NO: 132414 - DNA, 25 bp, probe
agagatctgagccaaccttggccga

SEQ ID NO: 132415 - DNA, 25 bp, probe
agatccatgcagccaagtcactggc

SEQ ID NO: 132416 - DNA, 25 bp, probe
agatcagctgtgacaaggacttgca

SEQ ID NO: 132417 - DNA, 25 bp, probe
agatctgcatgaatgaagaccctgc

SEQ ID NO: 132418 - DNA, 25 bp, probe
agatcgcagactttggcctctgcaa

SEQ ID NO: 132419 - DNA, 25 bp, probe
agatgcgaacatactggctcttagg

SEQ ID NO: 132420 - DNA, 25 bp, probe
agatctgcaaatacatgtcctggat

SEQ ID NO: 132421 - DNA, 25 bp, probe
agatcatgcaagctggtggctggac

SEQ ID NO: 132422 - DNA, 25 bp, probe
agatctgcaagcattgtctgagctg

SEQ ID NO: 132423 - DNA, 25 bp, probe
agatctgcaagcattgtctgagctg

SEQ ID NO: 132424 - DNA, 25 bp, probe
agatctgcacaattgatgtctacat

SEQ ID NO: 132425 - DNA, 25 bp, probe
agatcagcagcaattgcctctgaaa

SEQ ID NO: 132426 - DNA, 25 bp, probe
agatgaagcatctatgttcccaaga

SEQ ID NO: 132427 - DNA, 25 bp, probe
agatgaagcatctatgttcccaaga

SEQ ID NO: 132428 - DNA, 25 bp, probe
agatgacgatcatctttccatcagg

SEQ ID NO: 132429 - DNA, 25 bp, probe
agatgagtgctctgtggaccacagc

SEQ ID NO: 132430 - DNA, 25 bp, probe
agatgcagtgccaggaacccttaaa

SEQ ID NO: 132431 - DNA, 25 bp, probe
agatgaggctagcgattgccctgtg

SEQ ID NO: 132432 - DNA, 25 bp, probe
agatgttgcaagtcgttcctttttc

SEQ ID NO: 132433 - DNA, 25 bp, probe
agatcttgagattctgattcttttc

SEQ ID NO: 132434 - DNA, 25 bp, probe
agatatcaagtcttttgcactttta

SEQ ID NO: 132435 - DNA, 25 bp, probe
agatatcaagtcttttgcactttta

SEQ ID NO: 132436 - DNA, 25 bp, probe
agatgcctcttgttttaatatatta

SEQ ID NO: 132437 - DNA, 25 bp, probe
agatcgtcacagctgtctatttttg

SEQ ID NO: 132438 - DNA, 25 bp, probe
agatcgtcacagctgtctatttttg

SEQ ID NO: 132439 - DNA, 25 bp, probe
agatctcatacaaggcttattctta

SEQ ID NO: 132440 - DNA, 25 bp, probe
agatgtctacaaaggacaggttaga

SEQ ID NO: 132441 - DNA, 25 bp, probe
agatgtctacaaaggacaggttaga

SEQ ID NO: 132442 - DNA, 25 bp, probe
agatcctacccggaaaggctcagtg

SEQ ID NO: 132443 - DNA, 25 bp, probe
agaccgagtccccaaggactagtgg

SEQ ID NO: 132444 - DNA, 25 bp, probe
agatcgggtctcggaagggaagtag

SEQ ID NO: 132445 - DNA, 25 bp, probe
agatcgacgtgctggagcgggaact

SEQ ID NO: 132446 - DNA, 25 bp, probe
agatcgacgtgctggagcgggaact

SEQ ID NO: 132447 - DNA, 25 bp, probe
agatccaccttgagaggaatgaact

SEQ ID NO: 132448 - DNA, 25 bp, probe
agagaccatttttaggatcatagac

SEQ ID NO: 132449 - DNA, 25 bp, probe
agagcaacaattttagggttcagca

SEQ ID NO: 132450 - DNA, 25 bp, probe
agataggaattctcagtgtttcaaa

SEQ ID NO: 132451 - DNA, 25 bp, probe
agataggattttctgtgtttcctga

SEQ ID NO: 132452 - DNA, 25 bp, probe
agatagttgctaatccttatttctt

SEQ ID NO: 132453 - DNA, 25 bp, probe
agatagagtgcctttctgtttcttt

SEQ ID NO: 132454 - DNA, 25 bp, probe
agatgaagttcacggcttcttctgg

SEQ ID NO: 132455 - DNA, 25 bp, probe
agatgaagtgtgccagctggttccc

SEQ ID NO: 132456 - DNA, 25 bp, probe
agatgaagtgtgccagctggttccc

SEQ ID NO: 132457 - DNA, 25 bp, probe
agatgaagtctcactgtgttgccca

SEQ ID NO: 132458 - DNA, 25 bp, probe
agatgttgttctgtcagttgccaaa

SEQ ID NO: 132459 - DNA, 25 bp, probe
agattattatgttctcagttctctc

SEQ ID NO: 132460 - DNA, 25 bp, probe
agatttttcagagtcatgttctcca

SEQ ID NO: 132461 - DNA, 25 bp, probe
agatttttcagagtcatgttctcca

SEQ ID NO: 132462 - DNA, 25 bp, probe
agatcatttctgcactcatgttcct

SEQ ID NO: 132463 - DNA, 25 bp, probe
agacttctcttacattttcgtcctg

SEQ ID NO: 132464 - DNA, 25 bp, probe
agattttctatccttctttatacct

SEQ ID NO: 132465 - DNA, 25 bp, probe
agatttgactctgttgttttctctc

SEQ ID NO: 132466 - DNA, 25 bp, probe
agatgggcagtttttgtctttcacc

SEQ ID NO: 132467 - DNA, 25 bp, probe
agaggggttgagaatggaatcctct

SEQ ID NO: 132468 - DNA, 25 bp, probe
agatgcagaggaaaggggaataatc

SEQ ID NO: 132469 - DNA, 25 bp, probe
agatcgaggacctggcgagtaagga

SEQ ID NO: 132470 - DNA, 25 bp, probe
agaggggacctgctgggaatggggt

SEQ ID NO: 132471 - DNA, 25 bp, probe
agaggggactggcatggggggatct

SEQ ID NO: 132472 - DNA, 25 bp, probe
agacgggcgctagatttggggctca

SEQ ID NO: 132473 - DNA, 25 bp, probe
agataattcagctccttatggggcc

SEQ ID NO: 132474 - DNA, 25 bp, probe
agataatgtagctgttttataattc

SEQ ID NO: 132475 - DNA, 25 bp, probe
agatatatgtacagacttgtatttt

SEQ ID NO: 132476 - DNA, 25 bp, probe
agatatgttcagcgatcccaacttt

SEQ ID NO: 132477 - DNA, 25 bp, probe
agatcgatttgctgctaccaacttt

SEQ ID NO: 132478 - DNA, 25 bp, probe
agacgattgttcttagacctcctaa

SEQ ID NO: 132479 - DNA, 25 bp, probe
agatctgttgtccaatcaaggcttc

SEQ ID NO: 132480 - DNA, 25 bp, probe
agatctgttgtccaatcaaggcttc

SEQ ID NO: 132481 - DNA, 25 bp, probe
agatgtggtctacatctcagccttc

SEQ ID NO: 132482 - DNA, 25 bp, probe
agatcttgtgcctcaagcagccatt

SEQ ID NO: 132483 - DNA, 25 bp, probe
agaggatatccattcctgagctcct

SEQ ID NO: 132484 - DNA, 25 bp, probe
agaggatatccattcctgagctcct

SEQ ID NO: 132485 - DNA, 25 bp, probe
agaggtaccttctatcagggctacc

SEQ ID NO: 132486 - DNA, 25 bp, probe
agaggcatacctgcccaatgtcaac

SEQ ID NO: 132487 - DNA, 25 bp, probe
agatggttgaatcccaagatgtaaa

SEQ ID NO: 132488 - DNA, 25 bp, probe
agaggtaatacccatctaggaaaga

SEQ ID NO: 132489 - DNA, 25 bp, probe
agagtgtaacaaccacgggtgtaag

SEQ ID NO: 132490 - DNA, 25 bp, probe
agaggcgaaatcagcacgtggtggc

SEQ ID NO: 132491 - DNA, 25 bp, probe
agaggcgaaatcagcacgtggtggc

SEQ ID NO: 132492 - DNA, 25 bp, probe
agatgggccgacacacacttggccc

SEQ ID NO: 132493 - DNA, 25 bp, probe
agagggcctggcttcaacattgggc

SEQ ID NO: 132494 - DNA, 25 bp, probe
agagctgatgacttcctaacactag

SEQ ID NO: 132495 - DNA, 25 bp, probe
agagctgatgacttcctaacactag

SEQ ID NO: 132496 - DNA, 25 bp, probe
agatgtggacaactccaagctctca

SEQ ID NO: 132497 - DNA, 25 bp, probe
agatggcgaccaccaaagtcaaacg

SEQ ID NO: 132498 - DNA, 25 bp, probe
agatgtcggcggcaacgaccagtct

SEQ ID NO: 132499 - DNA, 25 bp, probe
agatgtcggcggcaacgaccagtct

SEQ ID NO: 132500 - DNA, 25 bp, probe
agagacaggggacacgctctatgcc

SEQ ID NO: 132501 - DNA, 25 bp, probe
agaggagcgaggacaacgttggccc

SEQ ID NO: 132502 - DNA, 25 bp, probe
agaggagcgaggacaacgttggccc

SEQ ID NO: 132503 - DNA, 25 bp, probe
agatgaagcaaacaacagtggagtc

SEQ ID NO: 132504 - DNA, 25 bp, probe
agataagaatatccaccagtcggtg

SEQ ID NO: 132505 - DNA, 25 bp, probe
agataactgagcagcaccgtcgtct

SEQ ID NO: 132506 - DNA, 25 bp, probe
agatacctgtgaggactggttgtct

SEQ ID NO: 132507 - DNA, 25 bp, probe
agatgactcttgacctgtggttctc

SEQ ID NO: 132508 - DNA, 25 bp, probe
agatgcattgttacaggaagtccct

SEQ ID NO: 132509 - DNA, 25 bp, probe
agatggtgccttcgtgaaggctttt

SEQ ID NO: 132510 - DNA, 25 bp, probe
agatgcttggttgtgttgaggtttt

SEQ ID NO: 132511 - DNA, 25 bp, probe
agatctatggccgggttggctggtt

SEQ ID NO: 132512 - DNA, 25 bp, probe
agatcgtggccatggtgagggtgtg

SEQ ID NO: 132513 - DNA, 25 bp, probe
agatcagctccactggaagggggag

SEQ ID NO: 132514 - DNA, 25 bp, probe
agatcagctccactggaagggggag

SEQ ID NO: 132515 - DNA, 25 bp, probe
agatcgtctctgggagggtgcggtt

SEQ ID NO: 132516 - DNA, 25 bp, probe
agatggaatccgagcagggcgactt

SEQ ID NO: 132517 - DNA, 25 bp, probe
agaggtcttaattctgaaggactat

SEQ ID NO: 132518 - DNA, 25 bp, probe
agaggtcttaattctgaaggactat

SEQ ID NO: 132519 - DNA, 25 bp, probe
agagcttcctcattgttaaggcagc

SEQ ID NO: 132520 - DNA, 25 bp, probe
agagatctatccaatttacacagca

SEQ ID NO: 132521 - DNA, 25 bp, probe
agagatctatccaatttacacagca

SEQ ID NO: 132522 - DNA, 25 bp, probe
agagatcattcacgatcttcccgta

SEQ ID NO: 132523 - DNA, 25 bp, probe
agatgactgtagcttttcgtgctcc

SEQ ID NO: 132524 - DNA, 25 bp, probe
agatgatctctttctttatgctttc

SEQ ID NO: 132525 - DNA, 25 bp, probe
agatctcccttttctagttagctat

SEQ ID NO: 132526 - DNA, 25 bp, probe
agatccccttgtggctactggaaat

SEQ ID NO: 132527 - DNA, 25 bp, probe
agaggcctgggtgtgacctgacacc

SEQ ID NO: 132528 - DNA, 25 bp, probe
agaggccgaaggtgcctcagactcc

SEQ ID NO: 132529 - DNA, 25 bp, probe
agaagccgaaggtgagccctttctg

SEQ ID NO: 132530 - DNA, 25 bp, probe
agaccttcaaggtaacccaattgcg

SEQ ID NO: 132531 - DNA, 25 bp, probe
agaggctacaagagccctccaagag

SEQ ID NO: 132532 - DNA, 25 bp, probe
agaggtaaagctggctttcgagagg

SEQ ID NO: 132533 - DNA, 25 bp, probe
agatgcgtacgtcctctttaagaga

SEQ ID NO: 132534 - DNA, 25 bp, probe
agatgttgtggtcgatttacaaggt

SEQ ID NO: 132535 - DNA, 25 bp, probe
agatgtttggagctttggagtggtt

SEQ ID NO: 132536 - DNA, 25 bp, probe
aatgtttttaccaggaatggatgtc

SEQ ID NO: 132537 - DNA, 25 bp, probe
agaatatttttgaggcgaaggcgtc

SEQ ID NO: 132538 - DNA, 25 bp, probe
agaagtctttccggaggtcagtggt

SEQ ID NO: 132539 - DNA, 25 bp, probe
agacaatcttacccgcaggttttca

SEQ ID NO: 132540 - DNA, 25 bp, probe
agaaatttccactcaggtctgtttt

SEQ ID NO: 132541 - DNA, 25 bp, probe
agagaagtttcacttcaagtcatgg

SEQ ID NO: 132542 - DNA, 25 bp, probe
agatgcactgttcaattcggtacgc

SEQ ID NO: 132543 - DNA, 25 bp, probe
agatcactatgttgtagttggggcc

SEQ ID NO: 132544 - DNA, 25 bp, probe
agatcattatcttcatgtttgggga

SEQ ID NO: 132545 - DNA, 25 bp, probe
agatcagccatttaaatatgtggat

SEQ ID NO: 132546 - DNA, 25 bp, probe
agatcagccatttaaatatgtggat

SEQ ID NO: 132547 - DNA, 25 bp, probe
agatgaccttaaatatgatggagta

SEQ ID NO: 132548 - DNA, 25 bp, probe
agatgagcctataaattgtgagagc

SEQ ID NO: 132549 - DNA, 25 bp, probe
agatgagcctctattttcatcagct

SEQ ID NO: 132550 - DNA, 25 bp, probe
agatcaggatgtatttgaacagcat

SEQ ID NO: 132551 - DNA, 25 bp, probe
agataggagctcatatctgacagca

SEQ ID NO: 132552 - DNA, 25 bp, probe
agatgaggcctcaaatgctgccatg

SEQ ID NO: 132553 - DNA, 25 bp, probe
agatgagagcctgtgacaggtggca

SEQ ID NO: 132554 - DNA, 25 bp, probe
agatgggcagctgaaatggtggtag

SEQ ID NO: 132555 - DNA, 25 bp, probe
agatggagacctcaattattttttc

SEQ ID NO: 132556 - DNA, 25 bp, probe
agatccagtggacaatgctattttt

SEQ ID NO: 132557 - DNA, 25 bp, probe
agatctcgtgggatgtctcttttgt

SEQ ID NO: 132558 - DNA, 25 bp, probe
agatgcaatctgatttgtccttttg

SEQ ID NO: 132559 - DNA, 25 bp, probe
agatgaattttatcagccatgtttg

SEQ ID NO: 132560 - DNA, 25 bp, probe
agagaattttgatcggctttttgcc

SEQ ID NO: 132561 - DNA, 25 bp, probe
agagaattttgatcggctttttgcc

SEQ ID NO: 132562 - DNA, 25 bp, probe
agatgtttaatatctggtttcttct

SEQ ID NO: 132563 - DNA, 25 bp, probe
agatcatttcaaaactcatttccta

SEQ ID NO: 132564 - DNA, 25 bp, probe
agatctctcctaaagctgcaggtcc

SEQ ID NO: 132565 - DNA, 25 bp, probe
agatctctcctaaagctgcaggtcc

SEQ ID NO: 132566 - DNA, 25 bp, probe
agatcatccacacggacatcaagcc

SEQ ID NO: 132567 - DNA, 25 bp, probe
agatcatccatctgctggcagagag

SEQ ID NO: 132568 - DNA, 25 bp, probe
agatcgccctgactgggaggaagct

SEQ ID NO: 132569 - DNA, 25 bp, probe
agatccctgtgcctggggaagcagt

SEQ ID NO: 132570 - DNA, 25 bp, probe
agcagccgcatgagctggggaatcc

SEQ ID NO: 132571 - DNA, 25 bp, probe
agcaggcgtttgatgaaagtcccca

SEQ ID NO: 132572 - DNA, 25 bp, probe
agagggattcgaaaacagtcctcag

SEQ ID NO: 132573 - DNA, 25 bp, probe
agaggccttccaaaaacacattcag

SEQ ID NO: 132574 - DNA, 25 bp, probe
agaggacgtccacaaccagtgaagg

SEQ ID NO: 132575 - DNA, 25 bp, probe
agaggacgtccacaaccagtgaagg

SEQ ID NO: 132576 - DNA, 25 bp, probe
agaggaaattcactccctcgtaagc

SEQ ID NO: 132577 - DNA, 25 bp, probe
agagggcaaaagcctcagtcggcaa

SEQ ID NO: 132578 - DNA, 25 bp, probe
agagggaacctggagcagaccacaa

SEQ ID NO: 132579 - DNA, 25 bp, probe
agaggaaaccatgagtgtgctagca

SEQ ID NO: 132580 - DNA, 25 bp, probe
agatgtaaacattgtggatgactga

SEQ ID NO: 132581 - DNA, 25 bp, probe
agatgtaaacattgtggatgactga

SEQ ID NO: 132582 - DNA, 25 bp, probe
agatccgcatgtgtctgtattcata

SEQ ID NO: 132583 - DNA, 25 bp, probe
agatccgcatgtgtctgtattcata

SEQ ID NO: 132584 - DNA, 25 bp, probe
agatcacgcaggtctatggcttcta

SEQ ID NO: 132585 - DNA, 25 bp, probe
agaggccatgtgtctcagagctgtt

SEQ ID NO: 132586 - DNA, 25 bp, probe
agatgtggtgcttctcatttattct

SEQ ID NO: 132587 - DNA, 25 bp, probe
agatgtggtgcttctcatttattct

SEQ ID NO: 132588 - DNA, 25 bp, probe
agatgtggctcttcgttgtttagaa

SEQ ID NO: 132589 - DNA, 25 bp, probe
agatgctgtttgtcttggtcttagt

SEQ ID NO: 132590 - DNA, 25 bp, probe
agatgctgtttgtcttggtcttagt

SEQ ID NO: 132591 - DNA, 25 bp, probe
agatctttagcagtcttttctagtt

SEQ ID NO: 132592 - DNA, 25 bp, probe
agatctttgcagggctgactttagt

SEQ ID NO: 132593 - DNA, 25 bp, probe
agatcatttcaggtgagcagttaga

SEQ ID NO: 132594 - DNA, 25 bp, probe
agatccttcaggagatgttgtatgg

SEQ ID NO: 132595 - DNA, 25 bp, probe
agatccttcaggagatgttgtatgg

SEQ ID NO: 132596 - DNA, 25 bp, probe
agatccatctcacagggttattgtg

SEQ ID NO: 132597 - DNA, 25 bp, probe
agatccacctaaggccattgacgtg

SEQ ID NO: 132598 - DNA, 25 bp, probe
agatccaccagatcgacttgatcgt

SEQ ID NO: 132599 - DNA, 25 bp, probe
agatcccaaaccagctattcttttc

SEQ ID NO: 132600 - DNA, 25 bp, probe
agatgcctgaaacaagctacctgac

SEQ ID NO: 132601 - DNA, 25 bp, probe
agatcctggccacaattgagctgct

SEQ ID NO: 132602 - DNA, 25 bp, probe
agatccatggggcagtccaggcatc

SEQ ID NO: 132603 - DNA, 25 bp, probe
agatccatggggcagtccaggcatc

SEQ ID NO: 132604 - DNA, 25 bp, probe
agatccatggggcagtccaggcatc

SEQ ID NO: 132605 - DNA, 25 bp, probe
agatccatggggcagtccaggcatc

SEQ ID NO: 132606 - DNA, 25 bp, probe
agatccatggggcagtccaggcatc

SEQ ID NO: 132607 - DNA, 25 bp, probe
agatggagggggtcccaagcactgc

SEQ ID NO: 132608 - DNA, 25 bp, probe
agatgctgagggtgtttcttcctgc

SEQ ID NO: 132609 - DNA, 25 bp, probe
agatggtggacggtttgctgtttgc

SEQ ID NO: 132610 - DNA, 25 bp, probe
agatgtatgaaggcttttggtctcc

SEQ ID NO: 132611 - DNA, 25 bp, probe
agatgtaatgtagttctttgttcct

SEQ ID NO: 132612 - DNA, 25 bp, probe
agaggaatcggctctgtatttgcct

SEQ ID NO: 132613 - DNA, 25 bp, probe
agaggagaagactcggaattccctg

SEQ ID NO: 132614 - DNA, 25 bp, probe
agagggcatcagtgacggggccacc

SEQ ID NO: 132615 - DNA, 25 bp, probe
agaggtctgaagcactgagggctcc

SEQ ID NO: 132616 - DNA, 25 bp, probe
agaggtgtccagagccaaggcttct

SEQ ID NO: 132617 - DNA, 25 bp, probe
agaggctgccgggaccagcatattt

SEQ ID NO: 132618 - DNA, 25 bp, probe
agagaggcaatggagcacccctatt

SEQ ID NO: 132619 - DNA, 25 bp, probe
agagaggctatgacaaccccaactt

SEQ ID NO: 132620 - DNA, 25 bp, probe
agatgggctcatgaactcctacttt

SEQ ID NO: 132621 - DNA, 25 bp, probe
agagcctcctaaaattctagccatt

SEQ ID NO: 132622 - DNA, 25 bp, probe
agcggtccacattagagttgaaatt

SEQ ID NO: 132623 - DNA, 25 bp, probe
agactgtccctctgactggaaaaca

SEQ ID NO: 132624 - DNA, 25 bp, probe
agagcgagaccctgtctcaaaaaaa

SEQ ID NO: 132625 - DNA, 25 bp, probe
agacatcaaacctgttaccacagac

SEQ ID NO: 132626 - DNA, 25 bp, probe
agaccaaagacatgggtgcccaggc

SEQ ID NO: 132627 - DNA, 25 bp, probe
agatgccaaaggggttcccctgcgg

SEQ ID NO: 132628 - DNA, 25 bp, probe
agatggcaaagcggtgattcccctg

SEQ ID NO: 132629 - DNA, 25 bp, probe
agatggcaaagcggtgattcccctg

SEQ ID NO: 132630 - DNA, 25 bp, probe
agatggacagcttggttacctccac

SEQ ID NO: 132631 - DNA, 25 bp, probe
agaggatccaagcttacgtacgcgt

SEQ ID NO: 132632 - DNA, 25 bp, probe
agaggagccagatgtacacctaccc

SEQ ID NO: 132633 - DNA, 25 bp, probe
agatcatggcaggacaggaaccaac

SEQ ID NO: 132634 - DNA, 25 bp, probe
agatgatggcaggaaggtctccttt

SEQ ID NO: 132635 - DNA, 25 bp, probe
agatgcaggatgcccacgtcatcct

SEQ ID NO: 132636 - DNA, 25 bp, probe
agatgagaagacgctccagctgcag

SEQ ID NO: 132637 - DNA, 25 bp, probe
agatgagatagaggacattcaacaa

SEQ ID NO: 132638 - DNA, 25 bp, probe
agatctgtctgaagcagcttcacac

SEQ ID NO: 132639 - DNA, 25 bp, probe
agatctcggaactttcagcagctga

SEQ ID NO: 132640 - DNA, 25 bp, probe
agatcgcggaatggttatggctgtg

SEQ ID NO: 132641 - DNA, 25 bp, probe
agatctgggactgctttggtcatga

SEQ ID NO: 132642 - DNA, 25 bp, probe
agatgctgtggctttgtgttgcgtt

SEQ ID NO: 132643 - DNA, 25 bp, probe
agatcatcatcgactttgtgtggat

SEQ ID NO: 132644 - DNA, 25 bp, probe
agatgccacgactattcttggactt

SEQ ID NO: 132645 - DNA, 25 bp, probe
agatcgccaacatgtcactggacat

SEQ ID NO: 132646 - DNA, 25 bp, probe
agatcatgccattgcattccagcct

SEQ ID NO: 132647 - DNA, 25 bp, probe
agatgaggtatcttctgcagcacaa

SEQ ID NO: 132648 - DNA, 25 bp, probe
agatcatgtacagctgctggcacga

SEQ ID NO: 132649 - DNA, 25 bp, probe
agatctgtctgggctgtgatgacga

SEQ ID NO: 132650 - DNA, 25 bp, probe
agatgctggtgggtgagtgcccgtt

SEQ ID NO: 132651 - DNA, 25 bp, probe
agatgctggtgggtgagtgcccgtt

SEQ ID NO: 132652 - DNA, 25 bp, probe
agatgtgttgtggtaaaaagtgtta

SEQ ID NO: 132653 - DNA, 25 bp, probe
agagtttgacttcagcaaaggacaa

SEQ ID NO: 132654 - DNA, 25 bp, probe
agagtttgacttcagcaaaggacaa

SEQ ID NO: 132655 - DNA, 25 bp, probe
agaggttgtttcccataatagaact

SEQ ID NO: 132656 - DNA, 25 bp, probe
agatggttgtaagctattatagtat

SEQ ID NO: 132657 - DNA, 25 bp, probe
agatggttgtaagctattatagtat

SEQ ID NO: 132658 - DNA, 25 bp, probe
agaggttgtccacattatcatgagt

SEQ ID NO: 132659 - DNA, 25 bp, probe
agagaggttccacatgagcatgact

SEQ ID NO: 132660 - DNA, 25 bp, probe
agaggagctacagaaatatgatata

SEQ ID NO: 132661 - DNA, 25 bp, probe
agaggagctacagaaatatgatata

SEQ ID NO: 132662 - DNA, 25 bp, probe
agaggagtatgcaccaaataaattt

SEQ ID NO: 132663 - DNA, 25 bp, probe
agcgaggttgatgtagataataatt

SEQ ID NO: 132664 - DNA, 25 bp, probe
agcgaggttgatgtagataataatt

SEQ ID NO: 132665 - DNA, 25 bp, probe
agatgggttgagtttgctgtataca

SEQ ID NO: 132666 - DNA, 25 bp, probe
agagggatggagttcctggcttccc

SEQ ID NO: 132667 - DNA, 25 bp, probe
agaggttgaggatgcactggcctgt

SEQ ID NO: 132668 - DNA, 25 bp, probe
agaggtggcaggaatacttcacctt

SEQ ID NO: 132669 - DNA, 25 bp, probe
agatggctacagggaagcctccact

SEQ ID NO: 132670 - DNA, 25 bp, probe
agagagcttatcgtgaacttgtcct

SEQ ID NO: 132671 - DNA, 25 bp, probe
agatgagcttccggagactgctctc

SEQ ID NO: 132672 - DNA, 25 bp, probe
agatgacttcgtagcagcacctact

SEQ ID NO: 132673 - DNA, 25 bp, probe
agatggttctgcagacaccaagcca

SEQ ID NO: 132674 - DNA, 25 bp, probe
agatgggtttcagcccagcagaagc

SEQ ID NO: 132675 - DNA, 25 bp, probe
agatgggtttcccagcaacgacagc

SEQ ID NO: 132676 - DNA, 25 bp, probe
agatgcggttccggaagacaggcca

SEQ ID NO: 132677 - DNA, 25 bp, probe
agagctggtggggctccagatcagg

SEQ ID NO: 132678 - DNA, 25 bp, probe
agagctgtggggaccaggtaggagg

SEQ ID NO: 132679 - DNA, 25 bp, probe
agagggagtggtgaggccctgggcc

SEQ ID NO: 132680 - DNA, 25 bp, probe
agagggatcttgtgtacccttcacc

SEQ ID NO: 132681 - DNA, 25 bp, probe
agaggagtcgctacacttaccttga

SEQ ID NO: 132682 - DNA, 25 bp, probe
agaggcttccaagcattactttaac

SEQ ID NO: 132683 - DNA, 25 bp, probe
agaggcacctaaacagattcttctg

SEQ ID NO: 132684 - DNA, 25 bp, probe
agaggctagctacctaggcttgtct

SEQ ID NO: 132685 - DNA, 25 bp, probe
agaggaatataactctggtggtctc

SEQ ID NO: 132686 - DNA, 25 bp, probe
agatggaattaacttcatggtgaat

SEQ ID NO: 132687 - DNA, 25 bp, probe
agatgccaaatatgccaaggtgaag

SEQ ID NO: 132688 - DNA, 25 bp, probe
agatgctcaacaggaccaaggatgc

SEQ ID NO: 132689 - DNA, 25 bp, probe
agatgtacagcagcttccaggtgat

SEQ ID NO: 132690 - DNA, 25 bp, probe
agatgctgctcagcctacaagggcc

SEQ ID NO: 132691 - DNA, 25 bp, probe
agaagtcccctatcggggcattgat

SEQ ID NO: 132692 - DNA, 25 bp, probe
agaaccttaccttcaaggagcaagt

SEQ ID NO: 132693 - DNA, 25 bp, probe
agagacctgccccttaaataagagg

SEQ ID NO: 132694 - DNA, 25 bp, probe
agagatcccctggcttgcagaaaat

SEQ ID NO: 132695 - DNA, 25 bp, probe
agatgacgcaactctcagtgaaact

SEQ ID NO: 132696 - DNA, 25 bp, probe
agatgccacaaagcggttaggctgt

SEQ ID NO: 132697 - DNA, 25 bp, probe
agatgcccaacgggcactatcggcg

SEQ ID NO: 132698 - DNA, 25 bp, probe
agatgcccaacgggcactatcggcg

SEQ ID NO: 132699 - DNA, 25 bp, probe
agatgcccaaatccttagatctggc

SEQ ID NO: 132700 - DNA, 25 bp, probe
agatgcccaaatccttagatctggc

SEQ ID NO: 132701 - DNA, 25 bp, probe
agatgtcccattgataattcgagca

SEQ ID NO: 132702 - DNA, 25 bp, probe
agatgtcccattgataattcgagca

SEQ ID NO: 132703 - DNA, 25 bp, probe
agatgtccactgagatagaagccct

SEQ ID NO: 132704 - DNA, 25 bp, probe
agatgcccaagtggaccagagtcat

SEQ ID NO: 132705 - DNA, 25 bp, probe
agagcccatgaagcccaagatgctg

SEQ ID NO: 132706 - DNA, 25 bp, probe
agagtccagaagtaattcagatgct

SEQ ID NO: 132707 - DNA, 25 bp, probe
agaggtagatgatgaattggacatt

SEQ ID NO: 132708 - DNA, 25 bp, probe
agaggtaatggtaatgtgagactta

SEQ ID NO: 132709 - DNA, 25 bp, probe
agaggtaatggtaatgtgagactta

SEQ ID NO: 132710 - DNA, 25 bp, probe
agaggtgttggaacgggagctggcc

SEQ ID NO: 132711 - DNA, 25 bp, probe
agagggcaaggagccgtcagtggcc

SEQ ID NO: 132712 - DNA, 25 bp, probe
agagggcaaggagccgtcagtggcc

SEQ ID NO: 132713 - DNA, 25 bp, probe
agagggcaaggagccgtcagtggcc

SEQ ID NO: 132714 - DNA, 25 bp, probe
agaggagagggctcctgtgacggcg

SEQ ID NO: 132715 - DNA, 25 bp, probe
agaggagagggatgtcgggggggtg

SEQ ID NO: 132716 - DNA, 25 bp, probe
agaggagagggatgtcgggggggtg

SEQ ID NO: 132717 - DNA, 25 bp, probe
agaggaggtgctctctactgagggg

SEQ ID NO: 132718 - DNA, 25 bp, probe
agaggcagcatgtgcatttcctaac

SEQ ID NO: 132719 - DNA, 25 bp, probe
agatgccagccaagtgtgatcctgc

SEQ ID NO: 132720 - DNA, 25 bp, probe
agatcctgctcacagaatcacagct

SEQ ID NO: 132721 - DNA, 25 bp, probe
agatcctccagaaagtcgagcagca

SEQ ID NO: 132722 - DNA, 25 bp, probe
agatccaccgagatatcaaagctgc

SEQ ID NO: 132723 - DNA, 25 bp, probe
agatccaccgagatatcaaagctgc

SEQ ID NO: 132724 - DNA, 25 bp, probe
agatcccctggcttgcagaaaatcc

SEQ ID NO: 132725 - DNA, 25 bp, probe
agatgacggctgctcgaagaacaat

SEQ ID NO: 132726 - DNA, 25 bp, probe
agatgagtgggattctaagaagcaa

SEQ ID NO: 132727 - DNA, 25 bp, probe
agatgagattgtcgcactgaagaag

SEQ ID NO: 132728 - DNA, 25 bp, probe
agagtactgcagacatcatgaaatc

SEQ ID NO: 132729 - DNA, 25 bp, probe
agagtactgcagacatcatgaaatc

SEQ ID NO: 132730 - DNA, 25 bp, probe
agatgattcgcaagcctgatactct

SEQ ID NO: 132731 - DNA, 25 bp, probe
agatgagtcaataccgttccataga

SEQ ID NO: 132732 - DNA, 25 bp, probe
agagagataaactgcatttcaagta

SEQ ID NO: 132733 - DNA, 25 bp, probe
agaggaatagcagtttcatacaact

SEQ ID NO: 132734 - DNA, 25 bp, probe
agaggttagaatggcagctcaaact

SEQ ID NO: 132735 - DNA, 25 bp, probe
agaggtggaaacactacagacacta

SEQ ID NO: 132736 - DNA, 25 bp, probe
agaggtggaggtggccgatgaaacc

SEQ ID NO: 132737 - DNA, 25 bp, probe
agatggccaaagaccggagaaacca

SEQ ID NO: 132738 - DNA, 25 bp, probe
agatgacagcagagtcctcgagcac

SEQ ID NO: 132739 - DNA, 25 bp, probe
agatgcacgagaaatccatccccta

SEQ ID NO: 132740 - DNA, 25 bp, probe
agatgcacgagaaatccatccccta

SEQ ID NO: 132741 - DNA, 25 bp, probe
agatgctgagacacatgtctccgcc

SEQ ID NO: 132742 - DNA, 25 bp, probe
agatgatgaagtactggcagcccac

SEQ ID NO: 132743 - DNA, 25 bp, probe
agatgaaagccagtgagcctactaa

SEQ ID NO: 132744 - DNA, 25 bp, probe
agatgatggaccctggttatcccaa

SEQ ID NO: 132745 - DNA, 25 bp, probe
agaaggcccgggccatgtttaagca

SEQ ID NO: 132746 - DNA, 25 bp, probe
agaatcggcacgaggattattcaag

SEQ ID NO: 132747 - DNA, 25 bp, probe
agatgatcgaatctgggtgtttcaa

SEQ ID NO: 132748 - DNA, 25 bp, probe
agatgacagcgacttggcaatattt

SEQ ID NO: 132749 - DNA, 25 bp, probe
agatgacaatcatgttgcagcaatt

SEQ ID NO: 132750 - DNA, 25 bp, probe
agagactaagaattgcagattttgg

SEQ ID NO: 132751 - DNA, 25 bp, probe
agatcctatggttcgaagttttgct

SEQ ID NO: 132752 - DNA, 25 bp, probe
agatccttcttcgaaagttttgcca

SEQ ID NO: 132753 - DNA, 25 bp, probe
agatgccttctagaattggtttgct

SEQ ID NO: 132754 - DNA, 25 bp, probe
agatgccttctagattcactgtctt

SEQ ID NO: 132755 - DNA, 25 bp, probe
agacctgtacaccaaacttccagga

SEQ ID NO: 132756 - DNA, 25 bp, probe
agatcctgagacacttgacttcaca

SEQ ID NO: 132757 - DNA, 25 bp, probe
agatggtgacagagctggcacctct

SEQ ID NO: 132758 - DNA, 25 bp, probe
agatggcaaagctgagtgcaggtgc

SEQ ID NO: 132759 - DNA, 25 bp, probe
agatccgcaagctggtggctgtgaa

SEQ ID NO: 132760 - DNA, 25 bp, probe
agaggcgtgatgcaggggtgtgagg

SEQ ID NO: 132761 - DNA, 25 bp, probe
agatggcttgtgcagaagattggag

SEQ ID NO: 132762 - DNA, 25 bp, probe
agatggcatgttgcagacaggagtc

SEQ ID NO: 132763 - DNA, 25 bp, probe
agatgatcgatttccagagtatggc

SEQ ID NO: 132764 - DNA, 25 bp, probe
agagtcagagatcttggtatgggct

SEQ ID NO: 132765 - DNA, 25 bp, probe
agagctcatggtgtccgtgggatat

SEQ ID NO: 132766 - DNA, 25 bp, probe
agagcttcggggggatgtggaaatg

SEQ ID NO: 132767 - DNA, 25 bp, probe
agaggctgggcgtgaggggagacat

SEQ ID NO: 132768 - DNA, 25 bp, probe
agagaggtacgtttgcgggagcaca

SEQ ID NO: 132769 - DNA, 25 bp, probe
agagggataccgtgaggcagtgcaa

SEQ ID NO: 132770 - DNA, 25 bp, probe
agaggccatccagacggtgcaggcc

SEQ ID NO: 132771 - DNA, 25 bp, probe
agaggccatccagacggtgcaggcc

SEQ ID NO: 132772 - DNA, 25 bp, probe
agaggccatccagacggtgcaggcc

SEQ ID NO: 132773 - DNA, 25 bp, probe
agaggccatccagacggtgcaggcc

SEQ ID NO: 132774 - DNA, 25 bp, probe
agaggccatccagacggtgcaggcc

SEQ ID NO: 132775 - DNA, 25 bp, probe
agagtgtatcactcagggccgagtc

SEQ ID NO: 132776 - DNA, 25 bp, probe
agagtgtatcactcagggccgagtc

SEQ ID NO: 132777 - DNA, 25 bp, probe
agatgttacctgggcaggacagagg

SEQ ID NO: 132778 - DNA, 25 bp, probe
agatgcttcatcttaggaaacagtt

SEQ ID NO: 132779 - DNA, 25 bp, probe
agatgctttcggtagagaaaatcat

SEQ ID NO: 132780 - DNA, 25 bp, probe
acgattccgaaacataatatcaatt

SEQ ID NO: 132781 - DNA, 25 bp, probe
accacttcgggaaaaagacaagcat

SEQ ID NO: 132782 - DNA, 25 bp, probe
agagcctttgggaataaaaagccat

SEQ ID NO: 132783 - DNA, 25 bp, probe
agagctcagggacgcattcaaaaag

SEQ ID NO: 132784 - DNA, 25 bp, probe
agagctcagggacgcattcaaaaag

SEQ ID NO: 132785 - DNA, 25 bp, probe
agaggagagagggattcgaaaacag

SEQ ID NO: 132786 - DNA, 25 bp, probe
agaggaaagggcatgaatatataaa

SEQ ID NO: 132787 - DNA, 25 bp, probe
agaggtcaagggcgccctgaaaagg

SEQ ID NO: 132788 - DNA, 25 bp, probe
aagttacggctgctgtccggaaagt

SEQ ID NO: 132789 - DNA, 25 bp, probe
agagatatacagtctgccttcggcc

SEQ ID NO: 132790 - DNA, 25 bp, probe
agagatatacagtctgccttcggcc

SEQ ID NO: 132791 - DNA, 25 bp, probe
agatgcacaccttgtgccactggag

SEQ ID NO: 132792 - DNA, 25 bp, probe
agatgcacaccttgtgccactggag

SEQ ID NO: 132793 - DNA, 25 bp, probe
agatgctacgccaagccactaagcg

SEQ ID NO: 132794 - DNA, 25 bp, probe
agatgctgactgcaaacttctcact

SEQ ID NO: 132795 - DNA, 25 bp, probe
agatgaatccgacacatgcagctcc

SEQ ID NO: 132796 - DNA, 25 bp, probe
agatgaatccgacacatgcagctcc

SEQ ID NO: 132797 - DNA, 25 bp, probe
agatgatacctgaagctgtcacctc

SEQ ID NO: 132798 - DNA, 25 bp, probe
agatgttccagattcagttccacac

SEQ ID NO: 132799 - DNA, 25 bp, probe
agaggtcaagcattcgttctacccc

SEQ ID NO: 132800 - DNA, 25 bp, probe
agatggtcatattattcttcttctt

SEQ ID NO: 132801 - DNA, 25 bp, probe
agagattgatccatgtctgtttgta

SEQ ID NO: 132802 - DNA, 25 bp, probe
agaggatgaagcctgtctttcttgt

SEQ ID NO: 132803 - DNA, 25 bp, probe
agatgccatagagcaattcctttgc

SEQ ID NO: 132804 - DNA, 25 bp, probe
agatgctcataggtcacttctactt

SEQ ID NO: 132805 - DNA, 25 bp, probe
agatgtacggcttttaatcttggaa

SEQ ID NO: 132806 - DNA, 25 bp, probe
agagtgattggtggtatattacgga

SEQ ID NO: 132807 - DNA, 25 bp, probe
agagatgttgtggtcgatttacaag

SEQ ID NO: 132808 - DNA, 25 bp, probe
agatgctgggtatcgaatgtacagg

SEQ ID NO: 132809 - DNA, 25 bp, probe
agatggaagtgctcgatcgctactg

SEQ ID NO: 132810 - DNA, 25 bp, probe
agatggaagtgctcgatcgctactg

SEQ ID NO: 132811 - DNA, 25 bp, probe
agatgaaaatcttgcgttgtatgtt

SEQ ID NO: 132812 - DNA, 25 bp, probe
agagaccggccagattgttgctatt

SEQ ID NO: 132813 - DNA, 25 bp, probe
acagtttggccaagatggacccatt

SEQ ID NO: 132814 - DNA, 25 bp, probe
agactttgggaaatgagaaccagtt

SEQ ID NO: 132815 - DNA, 25 bp, probe
agagcttgtggaaaagaaagtttgt

SEQ ID NO: 132816 - DNA, 25 bp, probe
agagctcctggacagtaaagtcctt

SEQ ID NO: 132817 - DNA, 25 bp, probe
agaggcgctggaagaaaaacttcat

SEQ ID NO: 132818 - DNA, 25 bp, probe
agaggcagcccaagaaaacgcgtct

SEQ ID NO: 132819 - DNA, 25 bp, probe
agagggccatatcccgaaacctcat

SEQ ID NO: 132820 - DNA, 25 bp, probe
agagggtgcagtcggctgagaaact

SEQ ID NO: 132821 - DNA, 25 bp, probe
agagagtgccagagtctatgaaaac

SEQ ID NO: 132822 - DNA, 25 bp, probe
agatgaaggcaaatgttggatacaa

SEQ ID NO: 132823 - DNA, 25 bp, probe
agatgaaggcaaatgttggatacaa

SEQ ID NO: 132824 - DNA, 25 bp, probe
agatgatcccaaagctttaaaaaca

SEQ ID NO: 132825 - DNA, 25 bp, probe
agatgtgattaaagcggtagaggaa

SEQ ID NO: 132826 - DNA, 25 bp, probe
agatgtgattaaagccattgaggaa

SEQ ID NO: 132827 - DNA, 25 bp, probe
agatgagcttacaagtattgaaata

SEQ ID NO: 132828 - DNA, 25 bp, probe
agatgcagttcagtttataagacaa

SEQ ID NO: 132829 - DNA, 25 bp, probe
agatgagtttgtatcatggaggaga

SEQ ID NO: 132830 - DNA, 25 bp, probe
agatgacatttgctttgggcagagg

SEQ ID NO: 132831 - DNA, 25 bp, probe
agatgcagcagcagtctttagccag

SEQ ID NO: 132832 - DNA, 25 bp, probe
agatgcggccagtcctggagagcga

SEQ ID NO: 132833 - DNA, 25 bp, probe
agatgctgaccagccagggggctga

SEQ ID NO: 132834 - DNA, 25 bp, probe
agatgtgatcctgccagagtactaa

SEQ ID NO: 132835 - DNA, 25 bp, probe
agactgtgcccggcaggagactgac

SEQ ID NO: 132836 - DNA, 25 bp, probe
agacaactccggttagatgctactg

SEQ ID NO: 132837 - DNA, 25 bp, probe
agaccctccaaaagagtgaactgtc

SEQ ID NO: 132838 - DNA, 25 bp, probe
agaggcttcccaagggggacttgtg

SEQ ID NO: 132839 - DNA, 25 bp, probe
agaggcttcccaagggggacttgtg

SEQ ID NO: 132840 - DNA, 25 bp, probe
agaggcttccactggggagaagtcc

SEQ ID NO: 132841 - DNA, 25 bp, probe
agaggctgtgcctaaggtctgagaa

SEQ ID NO: 132842 - DNA, 25 bp, probe
agaggctgtggtgcacgtgaaccag

SEQ ID NO: 132843 - DNA, 25 bp, probe
agcaccggggctgttaatgccacac

SEQ ID NO: 132844 - DNA, 25 bp, probe
agcagccagagccggctttaagtcc

SEQ ID NO: 132845 - DNA, 25 bp, probe
agacactgcctgcttttacttggca

SEQ ID NO: 132846 - DNA, 25 bp, probe
agaccatcctggctaacacggtgaa

SEQ ID NO: 132847 - DNA, 25 bp, probe
agaccatcctggctaacacggtgaa

SEQ ID NO: 132848 - DNA, 25 bp, probe
agatgttttggattaaccggctgca

SEQ ID NO: 132849 - DNA, 25 bp, probe
agatggttaccgaatagcccagcca

SEQ ID NO: 132850 - DNA, 25 bp, probe
agatggaggaagctgtaccgtgcca

SEQ ID NO: 132851 - DNA, 25 bp, probe
agatggaggaagctgtaccgtgcca

SEQ ID NO: 132852 - DNA, 25 bp, probe
agatgatgggaacctgtcccgcagt

SEQ ID NO: 132853 - DNA, 25 bp, probe
agagtgcggagaggcgaaactgagt

SEQ ID NO: 132854 - DNA, 25 bp, probe
agagctggcgaagaagtcctggttt

SEQ ID NO: 132855 - DNA, 25 bp, probe
agcagcgggaacggagcttcggagc

SEQ ID NO: 132856 - DNA, 25 bp, probe
agatggggaacaagcttgtgcaaga

SEQ ID NO: 132857 - DNA, 25 bp, probe
agatggtgtgaaaagcttgcagaac

SEQ ID NO: 132858 - DNA, 25 bp, probe
agatggaggtgtaggctggagagac

SEQ ID NO: 132859 - DNA, 25 bp, probe
agatggaggctgctcagtcgggagc

SEQ ID NO: 132860 - DNA, 25 bp, probe
agaggggcatgcacatgcccacgtc

SEQ ID NO: 132861 - DNA, 25 bp, probe
agatgatgggtggccatgccatccg

SEQ ID NO: 132862 - DNA, 25 bp, probe
agatgaagcaggtcgagcacatact

SEQ ID NO: 132863 - DNA, 25 bp, probe
agatgatcagaggtgaagaaccgcc

SEQ ID NO: 132864 - DNA, 25 bp, probe
agatgatcagaggtgaagaaccgcc

SEQ ID NO: 132865 - DNA, 25 bp, probe
agatgtcatcaatgaatgagaggac

SEQ ID NO: 132866 - DNA, 25 bp, probe
agatgtctgcttcgagggcaggaac

SEQ ID NO: 132867 - DNA, 25 bp, probe
agagattgctgacgggatggcctac

SEQ ID NO: 132868 - DNA, 25 bp, probe
agacatgcagcttggaggttcagtg

SEQ ID NO: 132869 - DNA, 25 bp, probe
agagtgacttagacatgtttgcatg

SEQ ID NO: 132870 - DNA, 25 bp, probe
agatgctgacctccatcattttggc

SEQ ID NO: 132871 - DNA, 25 bp, probe
agatgctgcacatctgtgcctttgg

SEQ ID NO: 132872 - DNA, 25 bp, probe
agatgtcacagtggggcctctgatc

SEQ ID NO: 132873 - DNA, 25 bp, probe
agatgatcaaagaaggctccatgtc

SEQ ID NO: 132874 - DNA, 25 bp, probe
agatgtgtacaagggcttcatatac

SEQ ID NO: 132875 - DNA, 25 bp, probe
agagtgcttcatctggcattccaaa

SEQ ID NO: 132876 - DNA, 25 bp, probe
agagttgtcatcttggagactaaag

SEQ ID NO: 132877 - DNA, 25 bp, probe
agatgtctgtgatttctgcaactga

SEQ ID NO: 132878 - DNA, 25 bp, probe
agatgctctgtgcagggctgttggt

SEQ ID NO: 132879 - DNA, 25 bp, probe
agaggctgtgggagtgcactgtgct

SEQ ID NO: 132880 - DNA, 25 bp, probe
agagtctgatgtgtgggcctatggc

SEQ ID NO: 132881 - DNA, 25 bp, probe
agaattcaatgcccggcgtaagctt

SEQ ID NO: 132882 - DNA, 25 bp, probe
agagatccatctcacagggttattg

SEQ ID NO: 132883 - DNA, 25 bp, probe
agagtcaatctgcaagccattttat

SEQ ID NO: 132884 - DNA, 25 bp, probe
agatgtctacagcacggattattac

SEQ ID NO: 132885 - DNA, 25 bp, probe
agatgtctacagcacggattattac

SEQ ID NO: 132886 - DNA, 25 bp, probe
agatgttagattctgtaatcttcac

SEQ ID NO: 132887 - DNA, 25 bp, probe
agagtttgttgactttacctcacag

SEQ ID NO: 132888 - DNA, 25 bp, probe
agagttgtctttattgtccaccatg

SEQ ID NO: 132889 - DNA, 25 bp, probe
agaggtggttcaactttctccagat

SEQ ID NO: 132890 - DNA, 25 bp, probe
agaggtggttcaactttctccagat

SEQ ID NO: 132891 - DNA, 25 bp, probe
agaggtgagttccagcatctggccc

SEQ ID NO: 132892 - DNA, 25 bp, probe
agaggtgtttgactgcatcgtcaac

SEQ ID NO: 132893 - DNA, 25 bp, probe
agatggtgtttggctcttatagagc

SEQ ID NO: 132894 - DNA, 25 bp, probe
agatggtgtttggctcttatagagc

SEQ ID NO: 132895 - DNA, 25 bp, probe
agaggagtttggggtatgggagaga

SEQ ID NO: 132896 - DNA, 25 bp, probe
agagcggtactgggagttggttcaa

SEQ ID NO: 132897 - DNA, 25 bp, probe
agaggagttcaggaacccttctcca

SEQ ID NO: 132898 - DNA, 25 bp, probe
agcgggagaagcttacctttctgga

SEQ ID NO: 132899 - DNA, 25 bp, probe
agcgaggtagggtacgcctttggtg

SEQ ID NO: 132900 - DNA, 25 bp, probe
agagacggggtttcaccatgttggc

SEQ ID NO: 132901 - DNA, 25 bp, probe
agaacctgcaggcgaaccatattta

SEQ ID NO: 132902 - DNA, 25 bp, probe
agcgacttagaaaatacctcttcca

SEQ ID NO: 132903 - DNA, 25 bp, probe
agccacttagtaatgaaaccttcca

SEQ ID NO: 132904 - DNA, 25 bp, probe
accacattctggggaagactattcc

SEQ ID NO: 132905 - DNA, 25 bp, probe
agagtcttcggcagaagcacttgtc

SEQ ID NO: 132906 - DNA, 25 bp, probe
agatgtttcatgctgtgaggccttg

SEQ ID NO: 132907 - DNA, 25 bp, probe
agatgttttcggtggctatgatgat

SEQ ID NO: 132908 - DNA, 25 bp, probe
agagttttcgagtgttgcaggctca

SEQ ID NO: 132909 - DNA, 25 bp, probe
agagtttgtgggtcagtctgtcttc

SEQ ID NO: 132910 - DNA, 25 bp, probe
agatgtggagggctgcaatctgtct

SEQ ID NO: 132911 - DNA, 25 bp, probe
agatgtggagggctgcaatctgtct

SEQ ID NO: 132912 - DNA, 25 bp, probe
agatgaggatgggcccaacattgac

SEQ ID NO: 132913 - DNA, 25 bp, probe
agatgagctgcagctcccaaatttc

SEQ ID NO: 132914 - DNA, 25 bp, probe
agagtgcattttcccagatacttcc

SEQ ID NO: 132915 - DNA, 25 bp, probe
agagtgcattttcccagatacttcc

SEQ ID NO: 132916 - DNA, 25 bp, probe
agagctttttgtcactatctgtcaa

SEQ ID NO: 132917 - DNA, 25 bp, probe
agagttattggagacatatagctca

SEQ ID NO: 132918 - DNA, 25 bp, probe
agatgtttattattatcgcatcatc

SEQ ID NO: 132919 - DNA, 25 bp, probe
agatgatcatatgcttatacagaat

SEQ ID NO: 132920 - DNA, 25 bp, probe
agagatatcccttggccagaaggtg

SEQ ID NO: 132921 - DNA, 25 bp, probe
agagtttcctgaggcacagtcggcc

SEQ ID NO: 132922 - DNA, 25 bp, probe
agagttcaccagacagcctgtggaa

SEQ ID NO: 132923 - DNA, 25 bp, probe
agagctgagaccgtccttgttgaag

SEQ ID NO: 132924 - DNA, 25 bp, probe
agagggagccttgctatttcagtgg

SEQ ID NO: 132925 - DNA, 25 bp, probe
agagggagccttgctatttcagtgg

SEQ ID NO: 132926 - DNA, 25 bp, probe
agagggaacacagtctataccaggt

SEQ ID NO: 132927 - DNA, 25 bp, probe
agagggaacacagtctataccaggt

SEQ ID NO: 132928 - DNA, 25 bp, probe
agaggtgaccactttcaactcttga

SEQ ID NO: 132929 - DNA, 25 bp, probe
agagagtggccattatacgcccacc

SEQ ID NO: 132930 - DNA, 25 bp, probe
agagcagggtatcatcagaaccaaa

SEQ ID NO: 132931 - DNA, 25 bp, probe
agaggaagttacttggcaccaagcc

SEQ ID NO: 132932 - DNA, 25 bp, probe
agaggaaggctatcgtctgccaagc

SEQ ID NO: 132933 - DNA, 25 bp, probe
agaggagaggcccaagtttcagcag

SEQ ID NO: 132934 - DNA, 25 bp, probe
agaggagggcccagaggatctgctg

SEQ ID NO: 132935 - DNA, 25 bp, probe
agaggcgagagccctgaaggcctcc

SEQ ID NO: 132936 - DNA, 25 bp, probe
agagtcggacctggacagggccagc

SEQ ID NO: 132937 - DNA, 25 bp, probe
agagtgggtgttgactgctgcccac

SEQ ID NO: 132938 - DNA, 25 bp, probe
agatgatgaggatttaacggtgaac

SEQ ID NO: 132939 - DNA, 25 bp, probe
agatgagggttttgcacctggacct

SEQ ID NO: 132940 - DNA, 25 bp, probe
agatgaggagttctgggctgagctg

SEQ ID NO: 132941 - DNA, 25 bp, probe
agagggtgtgtcaaaggtgagcttt

SEQ ID NO: 132942 - DNA, 25 bp, probe
agatggggctaggactgtgggcttt

SEQ ID NO: 132943 - DNA, 25 bp, probe
agagaccctcatgggctaggacttt

SEQ ID NO: 132944 - DNA, 25 bp, probe
agatgaccgcacagcactatgtgac

SEQ ID NO: 132945 - DNA, 25 bp, probe
agagactacagtaactttgaccagg

SEQ ID NO: 132946 - DNA, 25 bp, probe
agagggcacgtgaactcgagaccgt

SEQ ID NO: 132947 - DNA, 25 bp, probe
agaggccagagagacctgagtttgt

SEQ ID NO: 132948 - DNA, 25 bp, probe
agaggctagcagcaacggcagcttc

SEQ ID NO: 132949 - DNA, 25 bp, probe
agaggctgaggccgaggtgacgctg

SEQ ID NO: 132950 - DNA, 25 bp, probe
agaggtgggcgctttggaggtttgc

SEQ ID NO: 132951 - DNA, 25 bp, probe
agaggacgccgaactcgggcgttgg

SEQ ID NO: 132952 - DNA, 25 bp, probe
agagtacaccaagccctggatggtg

SEQ ID NO: 132953 - DNA, 25 bp, probe
agagaacccagagtacctgggtctg

SEQ ID NO: 132954 - DNA, 25 bp, probe
agagaaacacggaaactaggaagag

SEQ ID NO: 132955 - DNA, 25 bp, probe
caagaacaaggggaagtacgggcag

SEQ ID NO: 132956 - DNA, 25 bp, probe
agaaaaaggcggtgcttatggtgga

SEQ ID NO: 132957 - DNA, 25 bp, probe
agaggcaaagtgggtgggtagaggg

SEQ ID NO: 132958 - DNA, 25 bp, probe
agcggcaacaagggtccgtggacca

SEQ ID NO: 132959 - DNA, 25 bp, probe
agacgaaaagggccacccagaccat

SEQ ID NO: 132960 - DNA, 25 bp, probe
agaggatcaaggggccacactggac

SEQ ID NO: 132961 - DNA, 25 bp, probe
agaggcccaggaatcggagcgaagc

SEQ ID NO: 132962 - DNA, 25 bp, probe
agaggcccaggaatcggagcgaagc

SEQ ID NO: 132963 - DNA, 25 bp, probe
agagggccaggatttgaggctgccc

SEQ ID NO: 132964 - DNA, 25 bp, probe
agatggatcctggttggcatgtgtc

SEQ ID NO: 132965 - DNA, 25 bp, probe
agatgggcactgctgtggagtctgc

SEQ ID NO: 132966 - DNA, 25 bp, probe
agatgggcactgctgtggagtctgc

SEQ ID NO: 132967 - DNA, 25 bp, probe
agatgggcacattcttgtggcaagc

SEQ ID NO: 132968 - DNA, 25 bp, probe
agaggtctcaatgtggaccagctga

SEQ ID NO: 132969 - DNA, 25 bp, probe
agaggccatcctttgtgaagctgga

SEQ ID NO: 132970 - DNA, 25 bp, probe
agaggtttgcgcctgtcaagtgcga

SEQ ID NO: 132971 - DNA, 25 bp, probe
agagagtggtcctagtcaaagagag

SEQ ID NO: 132972 - DNA, 25 bp, probe
agaggagtgttctgtccaggaggcc

SEQ ID NO: 132973 - DNA, 25 bp, probe
agagggtgtatctgtggggcactgg

SEQ ID NO: 132974 - DNA, 25 bp, probe
agaggggtccattgtggatccactg

SEQ ID NO: 132975 - DNA, 25 bp, probe
agacgaagtgacgttgagatcctcg

SEQ ID NO: 132976 - DNA, 25 bp, probe
agacctagttccaggatccatggga

SEQ ID NO: 132977 - DNA, 25 bp, probe
agacctttgtacagacgcaatcggc

SEQ ID NO: 132978 - DNA, 25 bp, probe
agacctcttgtacagaagttgcccc

SEQ ID NO: 132979 - DNA, 25 bp, probe
agacctctttggggaaggctgcaag

SEQ ID NO: 132980 - DNA, 25 bp, probe
agaacttcaaagggaaggtcattgt

SEQ ID NO: 132981 - DNA, 25 bp, probe
agaactccacggtgagggccgatgt

SEQ ID NO: 132982 - DNA, 25 bp, probe
agaagcccagggtgacaagattatt

SEQ ID NO: 132983 - DNA, 25 bp, probe
agcaacctacgggagaccgatattt

SEQ ID NO: 132984 - DNA, 25 bp, probe
agaccctactgggagatgaccaatc

SEQ ID NO: 132985 - DNA, 25 bp, probe
agaggcactactacaagcagaagaa

SEQ ID NO: 132986 - DNA, 25 bp, probe
agagctggcccgacaagaatacaac

SEQ ID NO: 132987 - DNA, 25 bp, probe
agatggcccagagcaagaaatacct

SEQ ID NO: 132988 - DNA, 25 bp, probe
agaggcctgtggcccaaagaacctg

SEQ ID NO: 132989 - DNA, 25 bp, probe
agatggacagggccacgacagggct

SEQ ID NO: 132990 - DNA, 25 bp, probe
agatggtgcagcaggccgagctggg

SEQ ID NO: 132991 - DNA, 25 bp, probe
agatggtcacatgacccaggcctgg

SEQ ID NO: 132992 - DNA, 25 bp, probe
agaggcatctcagagcctcggtctg

SEQ ID NO: 132993 - DNA, 25 bp, probe
agaggcatctcagagcctcggtctg

SEQ ID NO: 132994 - DNA, 25 bp, probe
agaggcttctgtacagtcaggtctg

SEQ ID NO: 132995 - DNA, 25 bp, probe
agagatcgtgttacagtcacaatct

SEQ ID NO: 132996 - DNA, 25 bp, probe
agagtgcagtctacaacttcaccaa

SEQ ID NO: 132997 - DNA, 25 bp, probe
agatgtgatatagctagttcccaaa

SEQ ID NO: 132998 - DNA, 25 bp, probe
agagttgctggactttattccaaaa

SEQ ID NO: 132999 - DNA, 25 bp, probe
agagttgctggactttattccaaaa

SEQ ID NO: 133000 - DNA, 25 bp, probe
agagtgtgggagctaatgggaatca

SEQ ID NO: 133001 - DNA, 25 bp, probe
agagggggcaagtcacatgggcaga

SEQ ID NO: 133002 - DNA, 25 bp, probe
agacgaggtaaggtgcaagtgcaga

SEQ ID NO: 133003 - DNA, 25 bp, probe
agagcgaggcacacgtcaagatcgc

SEQ ID NO: 133004 - DNA, 25 bp, probe
agaggagcccacggctaagaggctg

SEQ ID NO: 133005 - DNA, 25 bp, probe
agagaacaccctctaggggctttgg

SEQ ID NO: 133006 - DNA, 25 bp, probe
agaaacaccctcttaggctgtgcaa

SEQ ID NO: 133007 - DNA, 25 bp, probe
agagaactgtcaccctgaggtaaca

SEQ ID NO: 133008 - DNA, 25 bp, probe
agaggacattcaacaagaaatcaca

SEQ ID NO: 133009 - DNA, 25 bp, probe
aaagacttgaaacaaatgaggcttc

SEQ ID NO: 133010 - DNA, 25 bp, probe
agcaaaatttaacacctaggcctgc

SEQ ID NO: 133011 - DNA, 25 bp, probe
agcaaactctccaagtgacccggag

SEQ ID NO: 133012 - DNA, 25 bp, probe
agagaaatcttcatgtacccaggca

SEQ ID NO: 133013 - DNA, 25 bp, probe
agagaaacctgagaacaccactgca

SEQ ID NO: 133014 - DNA, 25 bp, probe
agagaggaaccagctacctactcag

SEQ ID NO: 133015 - DNA, 25 bp, probe
acaggaaaccaacacccaaagcatg

SEQ ID NO: 133016 - DNA, 25 bp, probe
agaggacataaaataacccataaga

SEQ ID NO: 133017 - DNA, 25 bp, probe
agaggacataaaataacccataaga

SEQ ID NO: 133018 - DNA, 25 bp, probe
agatggattatggacttacctcaat

SEQ ID NO: 133019 - DNA, 25 bp, probe
agatggatttggggctactctctcc

SEQ ID NO: 133020 - DNA, 25 bp, probe
agaccatctggaccagtagcccatc

SEQ ID NO: 133021 - DNA, 25 bp, probe
agaccatctggaccagtagcccatc

SEQ ID NO: 133022 - DNA, 25 bp, probe
agaccacgagctccatggagcccaa

SEQ ID NO: 133023 - DNA, 25 bp, probe
agaggcatcgactttgataccacca

SEQ ID NO: 133024 - DNA, 25 bp, probe
agagcctcagaattgctcagccacc

SEQ ID NO: 133025 - DNA, 25 bp, probe
agatgtctgcaggcatttgcccatc

SEQ ID NO: 133026 - DNA, 25 bp, probe
agatgtgtatgcgtttgggattgtt

SEQ ID NO: 133027 - DNA, 25 bp, probe
agaggtttgctgagcggcttatgtt

SEQ ID NO: 133028 - DNA, 25 bp, probe
agaggtttatgtagggcactgtgct

SEQ ID NO: 133029 - DNA, 25 bp, probe
agaggggaagttctcagctgagctg

SEQ ID NO: 133030 - DNA, 25 bp, probe
agaggggacggaagcattgcgcctg

SEQ ID NO: 133031 - DNA, 25 bp, probe
agatgtggaacttgaggcaggggtg

SEQ ID NO: 133032 - DNA, 25 bp, probe
agaggtaactgaggagaggggcgcc

SEQ ID NO: 133033 - DNA, 25 bp, probe
agaggtaatcaagagaggaggtgaa

SEQ ID NO: 133034 - DNA, 25 bp, probe
agagggcgacaattaggagagccag

SEQ ID NO: 133035 - DNA, 25 bp, probe
agaggaagagagactgcagcagagg

SEQ ID NO: 133036 - DNA, 25 bp, probe
agaggtccagagatgccaagaagct

SEQ ID NO: 133037 - DNA, 25 bp, probe
agaggtcaacagtatggaaggagct

SEQ ID NO: 133038 - DNA, 25 bp, probe
agaggcctatgcagatggaatagag

SEQ ID NO: 133039 - DNA, 25 bp, probe
agagtccctgctaatgtaattggaa

SEQ ID NO: 133040 - DNA, 25 bp, probe
agagccccaggcaagcttttaataa

SEQ ID NO: 133041 - DNA, 25 bp, probe
agagccgttggtgtttttcattgtt

SEQ ID NO: 133042 - DNA, 25 bp, probe
agagctttttatgtgggttatagtt

SEQ ID NO: 133043 - DNA, 25 bp, probe
agagggcgtttgtggcgttgtatgt

SEQ ID NO: 133044 - DNA, 25 bp, probe
agatggggtttatgtcagtcatttt

SEQ ID NO: 133045 - DNA, 25 bp, probe
agaggaggttgctctgtcttcttta

SEQ ID NO: 133046 - DNA, 25 bp, probe
agaggaggttgctctgtcttcttta

SEQ ID NO: 133047 - DNA, 25 bp, probe
agagagagggtctttggctgcacct

SEQ ID NO: 133048 - DNA, 25 bp, probe
agaggaaggtgagtatgaggctgca

SEQ ID NO: 133049 - DNA, 25 bp, probe
agaggacagggacggagagctccag

SEQ ID NO: 133050 - DNA, 25 bp, probe
agaggagcctggactaggactccca

SEQ ID NO: 133051 - DNA, 25 bp, probe
agatgggcactgtccgagtagccag

SEQ ID NO: 133052 - DNA, 25 bp, probe
agatggcagacttcggtgtggctgg

SEQ ID NO: 133053 - DNA, 25 bp, probe
agatggcagacttcggtgtggctgg

SEQ ID NO: 133054 - DNA, 25 bp, probe
agaggagattcatggcctgtgctcg

SEQ ID NO: 133055 - DNA, 25 bp, probe
agaggagattcatggcctgtgctcg

SEQ ID NO: 133056 - DNA, 25 bp, probe
agaggagattcatggcctgtgctcg

SEQ ID NO: 133057 - DNA, 25 bp, probe
agaggcacaatcttgacttgtcaat

SEQ ID NO: 133058 - DNA, 25 bp, probe
agaggacagcaaagtcttgtgacat

SEQ ID NO: 133059 - DNA, 25 bp, probe
agatggaacagcatgtggtgaaatc

SEQ ID NO: 133060 - DNA, 25 bp, probe
agaggacatccttggggagattgct

SEQ ID NO: 133061 - DNA, 25 bp, probe
agaggtgcaccctgcaggagataca

SEQ ID NO: 133062 - DNA, 25 bp, probe
agaggagcacaagggcagaaagaaa

SEQ ID NO: 133063 - DNA, 25 bp, probe
agatggagccataggactgacagca

SEQ ID NO: 133064 - DNA, 25 bp, probe
agacgtgctcatcgtcatctatcac

SEQ ID NO: 133065 - DNA, 25 bp, probe
agagacgctcagcttgtatccattg

SEQ ID NO: 133066 - DNA, 25 bp, probe
agagacgctcagcttgtatccattg

SEQ ID NO: 133067 - DNA, 25 bp, probe
agagactgtcagctgtattccgtga

SEQ ID NO: 133068 - DNA, 25 bp, probe
agaggatgcctgctggatttcctga

SEQ ID NO: 133069 - DNA, 25 bp, probe
agagtggcttgctgatgttccttgt

SEQ ID NO: 133070 - DNA, 25 bp, probe
agagggctatgacatcttggttgct

SEQ ID NO: 133071 - DNA, 25 bp, probe
agatggttatgttacttgtcttcat

SEQ ID NO: 133072 - DNA, 25 bp, probe
agatggttgtattcctcactttgat

SEQ ID NO: 133073 - DNA, 25 bp, probe
agatggttgtattcctcactttgat

SEQ ID NO: 133074 - DNA, 25 bp, probe
agaggctatctaattccacactctg

SEQ ID NO: 133075 - DNA, 25 bp, probe
agaggcaatcatcaatctcctgctt

SEQ ID NO: 133076 - DNA, 25 bp, probe
agagtaacacaggattcactgtttt

SEQ ID NO: 133077 - DNA, 25 bp, probe
agagtcaaacggtgcttctctttta

SEQ ID NO: 133078 - DNA, 25 bp, probe
agagtcaaacggtgcttctctttta

SEQ ID NO: 133079 - DNA, 25 bp, probe
agaggcaaactgtggcttcttactt

SEQ ID NO: 133080 - DNA, 25 bp, probe
agagccaagccacaggctttccatc

SEQ ID NO: 133081 - DNA, 25 bp, probe
agagctctaccacaagattggagtt

SEQ ID NO: 133082 - DNA, 25 bp, probe
agaaaaccaaaggcagcggagattt

SEQ ID NO: 133083 - DNA, 25 bp, probe
agagacaatcttacccgcaggtttt

SEQ ID NO: 133084 - DNA, 25 bp, probe
agacgagacgtaggtagccgtagtt

SEQ ID NO: 133085 - DNA, 25 bp, probe
agactgaacttgtggaccatgtact

SEQ ID NO: 133086 - DNA, 25 bp, probe
agaggatacttgaatggacctctat

SEQ ID NO: 133087 - DNA, 25 bp, probe
agaggagtgttaatggtcacttaga

SEQ ID NO: 133088 - DNA, 25 bp, probe
agaggattcttgatttgcagtctaa

SEQ ID NO: 133089 - DNA, 25 bp, probe
agaggaatctgtttctctgctgtca

SEQ ID NO: 133090 - DNA, 25 bp, probe
agaggcacattgaattcttggatgc

SEQ ID NO: 133091 - DNA, 25 bp, probe
agaggagcattcatccctttgctct

SEQ ID NO: 133092 - DNA, 25 bp, probe
agagggtgacactgctcattttgct

SEQ ID NO: 133093 - DNA, 25 bp, probe
agaggcttggcatttgccatatcat

SEQ ID NO: 133094 - DNA, 25 bp, probe
agagtccttgctttctgatatgctt

SEQ ID NO: 133095 - DNA, 25 bp, probe
agagtgtccactattgattgtatta

SEQ ID NO: 133096 - DNA, 25 bp, probe
agagtgtccactattgattgtatta

SEQ ID NO: 133097 - DNA, 25 bp, probe
agaggaagctctatctggtgtttga

SEQ ID NO: 133098 - DNA, 25 bp, probe
agaggagattctatgtgcttttatc

SEQ ID NO: 133099 - DNA, 25 bp, probe
agaggcttacaaatgtttgccattc

SEQ ID NO: 133100 - DNA, 25 bp, probe
agaccttttcagtatgtcacctttg

SEQ ID NO: 133101 - DNA, 25 bp, probe
agacctttttatacatggcttttgc

SEQ ID NO: 133102 - DNA, 25 bp, probe
agagcctttgtgcatttgactgagg

SEQ ID NO: 133103 - DNA, 25 bp, probe
agaggtgttggctttgtttggatgt

SEQ ID NO: 133104 - DNA, 25 bp, probe
agaggtggaggctattctctttgaa

SEQ ID NO: 133105 - DNA, 25 bp, probe
agaggaggggtgatgactttggcac

SEQ ID NO: 133106 - DNA, 25 bp, probe
agaggaggctgggtggagtggtgtc

SEQ ID NO: 133107 - DNA, 25 bp, probe
agagctgtcgctcaaggagggtgac

SEQ ID NO: 133108 - DNA, 25 bp, probe
agagggcagtggcccgagtgggacc

SEQ ID NO: 133109 - DNA, 25 bp, probe
agagggagtgctgcggaggggacac

SEQ ID NO: 133110 - DNA, 25 bp, probe
agaggtggctgtgcgaagaggggct

SEQ ID NO: 133111 - DNA, 25 bp, probe
agaggaacgggagatatgagggctc

SEQ ID NO: 133112 - DNA, 25 bp, probe
agaggcaaagggtcacagaagtgtt

SEQ ID NO: 133113 - DNA, 25 bp, probe
agatggaagagtggtacagttttct

SEQ ID NO: 133114 - DNA, 25 bp, probe
agaggaggagttccgcactatctac

SEQ ID NO: 133115 - DNA, 25 bp, probe
agaggatttggtccctcaactatca

SEQ ID NO: 133116 - DNA, 25 bp, probe
agaggatctttcagacaaactcatc

SEQ ID NO: 133117 - DNA, 25 bp, probe
agagttctttaaaacacaccagcca

SEQ ID NO: 133118 - DNA, 25 bp, probe
agagtccttactgaagccaggcacc

SEQ ID NO: 133119 - DNA, 25 bp, probe
agagtccttactgaagccaggcacc

SEQ ID NO: 133120 - DNA, 25 bp, probe
agagcttcttccctaagccataaac

SEQ ID NO: 133121 - DNA, 25 bp, probe
agagcttcttccctaagccataaac

SEQ ID NO: 133122 - DNA, 25 bp, probe
agagctcagatttagaaagctctga

SEQ ID NO: 133123 - DNA, 25 bp, probe
agaggatgattttggaaccatgcaa

SEQ ID NO: 133124 - DNA, 25 bp, probe
agaggaagcttgggcacactctggt

SEQ ID NO: 133125 - DNA, 25 bp, probe
agaggaatgtagggcctgcatggag

SEQ ID NO: 133126 - DNA, 25 bp, probe
agaggtgattacaggcctgggtttg

SEQ ID NO: 133127 - DNA, 25 bp, probe
agaggtgattacaggcctgggtttg

SEQ ID NO: 133128 - DNA, 25 bp, probe
agaggtcaggattggccctgggttt

SEQ ID NO: 133129 - DNA, 25 bp, probe
agaggtcaagagagccctatgctgt

SEQ ID NO: 133130 - DNA, 25 bp, probe
agagctgtcatagggtccctttgtc

SEQ ID NO: 133131 - DNA, 25 bp, probe
agagctgtcatagggtccctttgtc

SEQ ID NO: 133132 - DNA, 25 bp, probe
agagtgctgcaaaagccccatatct

SEQ ID NO: 133133 - DNA, 25 bp, probe
agagtgctggaaacacactcctgca

SEQ ID NO: 133134 - DNA, 25 bp, probe
agagtgctggaaacacactcctgca

SEQ ID NO: 133135 - DNA, 25 bp, probe
agaggcgattcaacacaccattgga

SEQ ID NO: 133136 - DNA, 25 bp, probe
agagcgctaagcgacgaccacagta

SEQ ID NO: 133137 - DNA, 25 bp, probe
agaggctgaagatcacctacagtcc

SEQ ID NO: 133138 - DNA, 25 bp, probe
agaggcagaggaagaccaccagctc

SEQ ID NO: 133139 - DNA, 25 bp, probe
agaggcgtgagggcaaatctggctc

SEQ ID NO: 133140 - DNA, 25 bp, probe
agagtgcgtatgggcagcccttgcc

SEQ ID NO: 133141 - DNA, 25 bp, probe
agaggcagaacatagccctggccta

SEQ ID NO: 133142 - DNA, 25 bp, probe
agaggatgaatatgatgtcctcata

SEQ ID NO: 133143 - DNA, 25 bp, probe
agagttgaattagtcatgcagtcat

SEQ ID NO: 133144 - DNA, 25 bp, probe
agagtatcacagagatccagtctat

SEQ ID NO: 133145 - DNA, 25 bp, probe
agaggatcaatcacattagctcctg

SEQ ID NO: 133146 - DNA, 25 bp, probe
agaggtttctgcggaagtcactggg

SEQ ID NO: 133147 - DNA, 25 bp, probe
agaggtttctgcggaagtcactggg

SEQ ID NO: 133148 - DNA, 25 bp, probe
agagggtactgccgacggcactttg

SEQ ID NO: 133149 - DNA, 25 bp, probe
agaggagcaaagcaggaggtcttgg

SEQ ID NO: 133150 - DNA, 25 bp, probe
agaggaacagcactggggagtcttt

SEQ ID NO: 133151 - DNA, 25 bp, probe
agacggactgctggtgtgggtcctg

SEQ ID NO: 133152 - DNA, 25 bp, probe
agacgtgtcgggaggttagctgcgg

SEQ ID NO: 133153 - DNA, 25 bp, probe
agacgtgtcgggaggttagctgcgg

SEQ ID NO: 133154 - DNA, 25 bp, probe
agaggatgtcggctcgagtttcttt

SEQ ID NO: 133155 - DNA, 25 bp, probe
agaggatgtcggctcgagtttcttt

SEQ ID NO: 133156 - DNA, 25 bp, probe
agaggggtgaggttggtcttcttgt

SEQ ID NO: 133157 - DNA, 25 bp, probe
agaggtggtggtcgtttctatgcat

SEQ ID NO: 133158 - DNA, 25 bp, probe
agaggtggtgaacatcttgcggtcc

SEQ ID NO: 133159 - DNA, 25 bp, probe
agaggcgagatcagtatctgcagca

SEQ ID NO: 133160 - DNA, 25 bp, probe
agaggctgtgcaagatgttctacgc

SEQ ID NO: 133161 - DNA, 25 bp, probe
agaggctgtgcaagatgttctacgc

SEQ ID NO: 133162 - DNA, 25 bp, probe
agagagctgtgaagatgtcccggta

SEQ ID NO: 133163 - DNA, 25 bp, probe
agagagctaagattatctggggaaa

SEQ ID NO: 133164 - DNA, 25 bp, probe
agagacccactgtgtcggagaaata

SEQ ID NO: 133165 - DNA, 25 bp, probe
agagtcctcttgtacttcaagaaag

SEQ ID NO: 133166 - DNA, 25 bp, probe
agaccctctaggagtaagatactgt

SEQ ID NO: 133167 - DNA, 25 bp, probe
agaccctctaggagtaagatactgt

SEQ ID NO: 133168 - DNA, 25 bp, probe
agaaccctggtgagtcgaatcacgg

SEQ ID NO: 133169 - DNA, 25 bp, probe
agaatcccgagttgtgtccaacgat

SEQ ID NO: 133170 - DNA, 25 bp, probe
agaggtcagggatggtccagacaga

SEQ ID NO: 133171 - DNA, 25 bp, probe
agacgtggggcatccccagaaagac

SEQ ID NO: 133172 - DNA, 25 bp, probe
agagctttgggcactcccaataatg

SEQ ID NO: 133173 - DNA, 25 bp, probe
agagctttgggcactcccaataatg

SEQ ID NO: 133174 - DNA, 25 bp, probe
agagctttgggcactcccaataatg

SEQ ID NO: 133175 - DNA, 25 bp, probe
agagtttaggctggtgctgccaaaa

SEQ ID NO: 133176 - DNA, 25 bp, probe
agagattaatggcagagtgcctcaa

SEQ ID NO: 133177 - DNA, 25 bp, probe
agagtatcatctgccagaggccagc

SEQ ID NO: 133178 - DNA, 25 bp, probe
agagtcactgtgtcatcgatgagcg

SEQ ID NO: 133179 - DNA, 25 bp, probe
agagctgacagtcctgcttagagcc

SEQ ID NO: 133180 - DNA, 25 bp, probe
agagatgattatgtgttcggcccca

SEQ ID NO: 133181 - DNA, 25 bp, probe
agagatgattatgtgttcggcccca

SEQ ID NO: 133182 - DNA, 25 bp, probe
agagctgttcaccatgtgtgcagcc

SEQ ID NO: 133183 - DNA, 25 bp, probe
agagcgtctcaaaggcatgtgtgcg

SEQ ID NO: 133184 - DNA, 25 bp, probe
agagggctgcattcaaagatgggca

SEQ ID NO: 133185 - DNA, 25 bp, probe
agaggatttcattgaagaggccaaa

SEQ ID NO: 133186 - DNA, 25 bp, probe
agaggatttcattgaagaggccaaa

SEQ ID NO: 133187 - DNA, 25 bp, probe
agaggtttcaaacattgcacaagca

SEQ ID NO: 133188 - DNA, 25 bp, probe
agagggccatcaaactcattgtcac

SEQ ID NO: 133189 - DNA, 25 bp, probe
agagggcctataacctgagtctctg

SEQ ID NO: 133190 - DNA, 25 bp, probe
agaggacgcttgagccagaatctca

SEQ ID NO: 133191 - DNA, 25 bp, probe
agaggacagctctacaccagagagt

SEQ ID NO: 133192 - DNA, 25 bp, probe
agaggatgcactcaacacggtgtga

SEQ ID NO: 133193 - DNA, 25 bp, probe
agagggctcccagaagtgtgtggct

SEQ ID NO: 133194 - DNA, 25 bp, probe
agacgggcccagaggctgggggagc

SEQ ID NO: 133195 - DNA, 25 bp, probe
agaccattgcccggggcttggttgg

SEQ ID NO: 133196 - DNA, 25 bp, probe
agagaaagaccagtggggatttgta

SEQ ID NO: 133197 - DNA, 25 bp, probe
agagaaggacaaatgcagctggtta

SEQ ID NO: 133198 - DNA, 25 bp, probe
agagaggcaaacagcagtgatggct

SEQ ID NO: 133199 - DNA, 25 bp, probe
agagggatacatgggcaggattgtc

SEQ ID NO: 133200 - DNA, 25 bp, probe
agagtgtgtatacccaggcttgtct

SEQ ID NO: 133201 - DNA, 25 bp, probe
agagtgtgtatacccaggcttgtct

SEQ ID NO: 133202 - DNA, 25 bp, probe
agagtgtgtatacccaggcttgtct

SEQ ID NO: 133203 - DNA, 25 bp, probe
agagatgactcttgacctgtggttc

SEQ ID NO: 133204 - DNA, 25 bp, probe
agagatattgtgagcctgtgcctcc

SEQ ID NO: 133205 - DNA, 25 bp, probe
agagatattgtggatggcatgggca

SEQ ID NO: 133206 - DNA, 25 bp, probe
agaggatgtgcttgatggagatgaa

SEQ ID NO: 133207 - DNA, 25 bp, probe
agagcgtgagctatgacagtgaacc

SEQ ID NO: 133208 - DNA, 25 bp, probe
agagagatattgactgctgggaaac

SEQ ID NO: 133209 - DNA, 25 bp, probe
agagagatattgactgctgggaaac

SEQ ID NO: 133210 - DNA, 25 bp, probe
agagcagcgtagacagctggtaaac

SEQ ID NO: 133211 - DNA, 25 bp, probe
agagagctcatcatcagtcttaata

SEQ ID NO: 133212 - DNA, 25 bp, probe
agagagctcatcatcagtcttaata

SEQ ID NO: 133213 - DNA, 25 bp, probe
agagagtcatgatcatgtccttaca

SEQ ID NO: 133214 - DNA, 25 bp, probe
agagagaatgtactgtgccccagag

SEQ ID NO: 133215 - DNA, 25 bp, probe
agaggaagatgacgtccgccattgc

SEQ ID NO: 133216 - DNA, 25 bp, probe
agagggcatgggcatccgcctggat

SEQ ID NO: 133217 - DNA, 25 bp, probe
agagggataggcagtgcctccgcat

SEQ ID NO: 133218 - DNA, 25 bp, probe
agaggaaagcgggtgcccggcatgg

SEQ ID NO: 133219 - DNA, 25 bp, probe
agagtaaacacagtgctggctcggc

SEQ ID NO: 133220 - DNA, 25 bp, probe
agaggatcagtaacagcaatgtatc

SEQ ID NO: 133221 - DNA, 25 bp, probe
agagggcagctactgcaggtttccg

SEQ ID NO: 133222 - DNA, 25 bp, probe
agagggcagctactgcaggtttccg

SEQ ID NO: 133223 - DNA, 25 bp, probe
agagagcccgaggaggtgtctcagg

SEQ ID NO: 133224 - DNA, 25 bp, probe
agagagcccgaggaggtgtctcagg

SEQ ID NO: 133225 - DNA, 25 bp, probe
agagagctcctggaatcctacatcg

SEQ ID NO: 133226 - DNA, 25 bp, probe
agagactctccctatccggagagca

SEQ ID NO: 133227 - DNA, 25 bp, probe
agaccattccgcttcaaggcagagc

SEQ ID NO: 133228 - DNA, 25 bp, probe
agactttccactccaagcacaggag

SEQ ID NO: 133229 - DNA, 25 bp, probe
agactttccactccaagcacaggag

SEQ ID NO: 133230 - DNA, 25 bp, probe
agactttccactccaagcacaggag

SEQ ID NO: 133231 - DNA, 25 bp, probe
agactttccactccaagcacaggag

SEQ ID NO: 133232 - DNA, 25 bp, probe
agacttacacaagacagtttgaggc

SEQ ID NO: 133233 - DNA, 25 bp, probe
agaccctaaacaacgttctatctgg

SEQ ID NO: 133234 - DNA, 25 bp, probe
agaccctaaagatcgtccttctgct

SEQ ID NO: 133235 - DNA, 25 bp, probe
agcaccccaacgtggtcaggttgtt

SEQ ID NO: 133236 - DNA, 25 bp, probe
agaccctcaaactgggtgggttctg

SEQ ID NO: 133237 - DNA, 25 bp, probe
agaccaacggacggattggctggtt

SEQ ID NO: 133238 - DNA, 25 bp, probe
agaccattcagtacaggaaggctgt

SEQ ID NO: 133239 - DNA, 25 bp, probe
agacctagcaatcagtcagggctgc

SEQ ID NO: 133240 - DNA, 25 bp, probe
agacttcgaattctactgactcgac

SEQ ID NO: 133241 - DNA, 25 bp, probe
agagttggaattcaatgcagacccc

SEQ ID NO: 133242 - DNA, 25 bp, probe
agagtggggactcacagaggccccc

SEQ ID NO: 133243 - DNA, 25 bp, probe
agaggtcaggcagcaacatagagca

SEQ ID NO: 133244 - DNA, 25 bp, probe
agaggatcagccgggtgcaatgact

SEQ ID NO: 133245 - DNA, 25 bp, probe
agagagatagccgggctccagggag

SEQ ID NO: 133246 - DNA, 25 bp, probe
agaggataggctggatccctggggc

SEQ ID NO: 133247 - DNA, 25 bp, probe
agaggtggactgtatcaggctgaag

SEQ ID NO: 133248 - DNA, 25 bp, probe
agagttgctggcttataaggtatgc

SEQ ID NO: 133249 - DNA, 25 bp, probe
agagatccagtctattcaaggcatt

SEQ ID NO: 133250 - DNA, 25 bp, probe
agagacatctatgaaacggattact

SEQ ID NO: 133251 - DNA, 25 bp, probe
agaattcttcaagggctaattacct

SEQ ID NO: 133252 - DNA, 25 bp, probe
agagtatcttgctgggcaagttcac

SEQ ID NO: 133253 - DNA, 25 bp, probe
agagtacttgcacggcaagggcatc

SEQ ID NO: 133254 - DNA, 25 bp, probe
agagtgatgcttctgtggagggcct

SEQ ID NO: 133255 - DNA, 25 bp, probe
agaggatggtggctggcaggtccat

SEQ ID NO: 133256 - DNA, 25 bp, probe
agagggtggtggagaccatccaggc

SEQ ID NO: 133257 - DNA, 25 bp, probe
agagtggggatgggcgcaccatcgt

SEQ ID NO: 133258 - DNA, 25 bp, probe
agaggggaatgaaccatggcacctt

SEQ ID NO: 133259 - DNA, 25 bp, probe
agaggtaaatatcacattaatctgt

SEQ ID NO: 133260 - DNA, 25 bp, probe
agagtttacttgctatatagactgt

SEQ ID NO: 133261 - DNA, 25 bp, probe
agactaccacttgtgtggaactgat

SEQ ID NO: 133262 - DNA, 25 bp, probe
agagccccttctatggagataagat

SEQ ID NO: 133263 - DNA, 25 bp, probe
agagaccctactgggagatgaccaa

SEQ ID NO: 133264 - DNA, 25 bp, probe
agagtccctgaaaggcagcagaccc

SEQ ID NO: 133265 - DNA, 25 bp, probe
agagtggtagagcagagcctgaccc

SEQ ID NO: 133266 - DNA, 25 bp, probe
agaggatggaggcagcagcgtgccc

SEQ ID NO: 133267 - DNA, 25 bp, probe
agaggatgaagacgctaaagcccgg

SEQ ID NO: 133268 - DNA, 25 bp, probe
agaggatgaagacgctaaagcccgg

SEQ ID NO: 133269 - DNA, 25 bp, probe
agaggatgaagacgctaaagcccgg

SEQ ID NO: 133270 - DNA, 25 bp, probe
agaggatcacagtgctgagaccccc

SEQ ID NO: 133271 - DNA, 25 bp, probe
agaggaggagagctacagcaccaga

SEQ ID NO: 133272 - DNA, 25 bp, probe
agaggaggagagttgcaccaccaga

SEQ ID NO: 133273 - DNA, 25 bp, probe
agaggaggagcgtgatctctcccaa

SEQ ID NO: 133274 - DNA, 25 bp, probe
agagaaagaggttgtttcccataat

SEQ ID NO: 133275 - DNA, 25 bp, probe
agagatgagagaccactctttcccc

SEQ ID NO: 133276 - DNA, 25 bp, probe
agagatgagagaccactctttcccc

SEQ ID NO: 133277 - DNA, 25 bp, probe
agagatggacagcctctacttccat

SEQ ID NO: 133278 - DNA, 25 bp, probe
agagtggccagctaagagcctgcct

SEQ ID NO: 133279 - DNA, 25 bp, probe
agagtgtgctgactctcaagggcct

SEQ ID NO: 133280 - DNA, 25 bp, probe
agagtgtgctgactctcaagggcct

SEQ ID NO: 133281 - DNA, 25 bp, probe
agagtctcagaattggagggctctg

SEQ ID NO: 133282 - DNA, 25 bp, probe
agagtcctccaaggaggcatcactg

SEQ ID NO: 133283 - DNA, 25 bp, probe
agagttccacaagcagattactgca

SEQ ID NO: 133284 - DNA, 25 bp, probe
agagtgtacacaatccagagtgacg

SEQ ID NO: 133285 - DNA, 25 bp, probe
agagtgcttctaatcatcacagtag

SEQ ID NO: 133286 - DNA, 25 bp, probe
agagcagcttgagcacatcaaaacc

SEQ ID NO: 133287 - DNA, 25 bp, probe
agagcttctggatttcaactatcca

SEQ ID NO: 133288 - DNA, 25 bp, probe
agagtgtgctggatgacttctacac

SEQ ID NO: 133289 - DNA, 25 bp, probe
agaggtgcatggctggcagtcttga

SEQ ID NO: 133290 - DNA, 25 bp, probe
agaggtgcatggctggcagtcttga

SEQ ID NO: 133291 - DNA, 25 bp, probe
agaggtgcatggctggcagtcttga

SEQ ID NO: 133292 - DNA, 25 bp, probe
agaggtgcatggctggcagtcttga

SEQ ID NO: 133293 - DNA, 25 bp, probe
agagtggtgggtggcacatgcttat

SEQ ID NO: 133294 - DNA, 25 bp, probe
agagtggatggaatggatatcctgt

SEQ ID NO: 133295 - DNA, 25 bp, probe
agagggcagagtggtgtcattccat

SEQ ID NO: 133296 - DNA, 25 bp, probe
agagcggaggctgggatctagcgag

SEQ ID NO: 133297 - DNA, 25 bp, probe
agagagaggcctgggtgtgacctga

SEQ ID NO: 133298 - DNA, 25 bp, probe
agagagtccctgagtgtgagacccg

SEQ ID NO: 133299 - DNA, 25 bp, probe
agagatttactaacagtgagactgc

SEQ ID NO: 133300 - DNA, 25 bp, probe
agagttatactcaagcagaatgcac

SEQ ID NO: 133301 - DNA, 25 bp, probe
agagtatgtagccccagagatcatc

SEQ ID NO: 133302 - DNA, 25 bp, probe
agagcaaggagagccaggagcattt

SEQ ID NO: 133303 - DNA, 25 bp, probe
agagaggtggagaactgggatttga

SEQ ID NO: 133304 - DNA, 25 bp, probe
agagaggtggagaactgggatttga

SEQ ID NO: 133305 - DNA, 25 bp, probe
agagctggtgcatgatgacgaggat

SEQ ID NO: 133306 - DNA, 25 bp, probe
agagtcagtcattatgaaatgtact

SEQ ID NO: 133307 - DNA, 25 bp, probe
agagccctgctggtgaacaatgcct

SEQ ID NO: 133308 - DNA, 25 bp, probe
agagccctgctggtgaacaatgcct

SEQ ID NO: 133309 - DNA, 25 bp, probe
agagccctgctggtgaacaatgcct

SEQ ID NO: 133310 - DNA, 25 bp, probe
agagtcctctgaatgaaccttctgg

SEQ ID NO: 133311 - DNA, 25 bp, probe
agagtcctctgaatgaaccttctgg

SEQ ID NO: 133312 - DNA, 25 bp, probe
agagatgccttttggacactttcaa

SEQ ID NO: 133313 - DNA, 25 bp, probe
agagcagcctttcgagaaacgttca

SEQ ID NO: 133314 - DNA, 25 bp, probe
agagcaagttctcgggagcggttct

SEQ ID NO: 133315 - DNA, 25 bp, probe
agagatgctggtagcgctggaggcg

SEQ ID NO: 133316 - DNA, 25 bp, probe
agagactggtggtggagctgcttat

SEQ ID NO: 133317 - DNA, 25 bp, probe
agagactggtggtggagctgcttat

SEQ ID NO: 133318 - DNA, 25 bp, probe
agagccgaaagcaccactgctttac

SEQ ID NO: 133319 - DNA, 25 bp, probe
agagtcagtgaagcacccctttatt

SEQ ID NO: 133320 - DNA, 25 bp, probe
agagtcagtgaagcacccctttatt

SEQ ID NO: 133321 - DNA, 25 bp, probe
agagacagggacacagcccctattt

SEQ ID NO: 133322 - DNA, 25 bp, probe
agaggtggctacagacgcacctctt

SEQ ID NO: 133323 - DNA, 25 bp, probe
agaggtgacccaaatcacagagtgc

SEQ ID NO: 133324 - DNA, 25 bp, probe
agagggaatggcatacatcgagcgg

SEQ ID NO: 133325 - DNA, 25 bp, probe
agacgcccattgagacactgatcag

SEQ ID NO: 133326 - DNA, 25 bp, probe
agacctcaagagtgaaatgtagggg

SEQ ID NO: 133327 - DNA, 25 bp, probe
agagaacaaggtgctgaagatagag

SEQ ID NO: 133328 - DNA, 25 bp, probe
agagccgcagacctactaaaacatg

SEQ ID NO: 133329 - DNA, 25 bp, probe
agagcccatcctcacactaaaattt

SEQ ID NO: 133330 - DNA, 25 bp, probe
agagcccatcctcacactaaaattt

SEQ ID NO: 133331 - DNA, 25 bp, probe
agagccctccaaaacaaaagaccag

SEQ ID NO: 133332 - DNA, 25 bp, probe
agacctgccccttaaataagaggca

SEQ ID NO: 133333 - DNA, 25 bp, probe
agagactggcccttgaagaaccagg

SEQ ID NO: 133334 - DNA, 25 bp, probe
agagacggcacccagaatcagatcc

SEQ ID NO: 133335 - DNA, 25 bp, probe
agagatctggctgcaagaaatgtgt

SEQ ID NO: 133336 - DNA, 25 bp, probe
agagagatccttccagaatatggtg

SEQ ID NO: 133337 - DNA, 25 bp, probe
agagaacgtctgcaacatcgtggtg

SEQ ID NO: 133338 - DNA, 25 bp, probe
agagcacctggtgataccgtggtca

SEQ ID NO: 133339 - DNA, 25 bp, probe
agaaaccagtacagcccttgctgca

SEQ ID NO: 133340 - DNA, 25 bp, probe
agagtcaccaattcatacaccggga

SEQ ID NO: 133341 - DNA, 25 bp, probe
agagtcacctgatgtcaaccttgtg

SEQ ID NO: 133342 - DNA, 25 bp, probe
agagtcctcatatgtgccacaggaa

SEQ ID NO: 133343 - DNA, 25 bp, probe
agagatcgccaacatgtcactggac

SEQ ID NO: 133344 - DNA, 25 bp, probe
agagatggaccaacgatcctatgag

SEQ ID NO: 133345 - DNA, 25 bp, probe
agagcaggacgactgggcctgtaga

SEQ ID NO: 133346 - DNA, 25 bp, probe
agagatgaacaactttgccttcaaa

SEQ ID NO: 133347 - DNA, 25 bp, probe
agcagaaacatgctttcctagctga

SEQ ID NO: 133348 - DNA, 25 bp, probe
agcagaaacatgctttcctagctga

SEQ ID NO: 133349 - DNA, 25 bp, probe
agagaatggtctttcccagggacac

SEQ ID NO: 133350 - DNA, 25 bp, probe
agagtagcccatttcctagggcacc

SEQ ID NO: 133351 - DNA, 25 bp, probe
agagatggacgtgtaccagggccgc

SEQ ID NO: 133352 - DNA, 25 bp, probe
agagagggtgatgttccggagggcg

SEQ ID NO: 133353 - DNA, 25 bp, probe
agagagggtgatgttccggagggcg

SEQ ID NO: 133354 - DNA, 25 bp, probe
agagggaagatgggtccgaggcggg

SEQ ID NO: 133355 - DNA, 25 bp, probe
agagtggagggtttgacgggcctgg

SEQ ID NO: 133356 - DNA, 25 bp, probe
agagtagggtgcactgacaaagtat

SEQ ID NO: 133357 - DNA, 25 bp, probe
agagtcaggggctggccagagggtc

SEQ ID NO: 133358 - DNA, 25 bp, probe
agagttcacaggaggccagtgggcg

SEQ ID NO: 133359 - DNA, 25 bp, probe
agacctcactgggcggcaagaggtc

SEQ ID NO: 133360 - DNA, 25 bp, probe
agaccacagtcactcctgaaggaga

SEQ ID NO: 133361 - DNA, 25 bp, probe
agaccacgcaaagctacaggcgcca

SEQ ID NO: 133362 - DNA, 25 bp, probe
agacctcctgaaccaaaagctccag

SEQ ID NO: 133363 - DNA, 25 bp, probe
agaccacgcgtctgaaggagtacac

SEQ ID NO: 133364 - DNA, 25 bp, probe
agagacaaagtgtggaggagtttcc

SEQ ID NO: 133365 - DNA, 25 bp, probe
agagcaaaggtggggcagggtgcat

SEQ ID NO: 133366 - DNA, 25 bp, probe
agagagaaggtggggctggcctccc

SEQ ID NO: 133367 - DNA, 25 bp, probe
agagatggcggttgggaggtatccc

SEQ ID NO: 133368 - DNA, 25 bp, probe
agagggccggctggaacagtacatc

SEQ ID NO: 133369 - DNA, 25 bp, probe
agagatgggctgttcgatacaatac

SEQ ID NO: 133370 - DNA, 25 bp, probe
agagatatgcctttctcattcttgg

SEQ ID NO: 133371 - DNA, 25 bp, probe
agagcaattacaatctcttcattga

SEQ ID NO: 133372 - DNA, 25 bp, probe
agagcagttgaaatccttaaaacca

SEQ ID NO: 133373 - DNA, 25 bp, probe
agagcagtatgccacttcttaaaac

SEQ ID NO: 133374 - DNA, 25 bp, probe
agagcttacaacctgccttaaaaat

SEQ ID NO: 133375 - DNA, 25 bp, probe
agagctgccaaagggtcttacgaaa

SEQ ID NO: 133376 - DNA, 25 bp, probe
agagctgccaaagggtcttacgaaa

SEQ ID NO: 133377 - DNA, 25 bp, probe
agagctgtaaaacatctgaacctaa

SEQ ID NO: 133378 - DNA, 25 bp, probe
agagataagatttaaccaacatcaa

SEQ ID NO: 133379 - DNA, 25 bp, probe
agagaaagcaccgctcacaactata

SEQ ID NO: 133380 - DNA, 25 bp, probe
agagaataccttggtctcacctatc

SEQ ID NO: 133381 - DNA, 25 bp, probe
agagaataccttggtctcacctatc

SEQ ID NO: 133382 - DNA, 25 bp, probe
agagtcaaccttgggtgatgccttc

SEQ ID NO: 133383 - DNA, 25 bp, probe
agaccaagttgaggtctgttctgtc

SEQ ID NO: 133384 - DNA, 25 bp, probe
agacgaagcgggcggctacgtcaag

SEQ ID NO: 133385 - DNA, 25 bp, probe
agaaagaccagtggggatttgtaag

SEQ ID NO: 133386 - DNA, 25 bp, probe
agagaagcaggaggggtgtttttct

SEQ ID NO: 133387 - DNA, 25 bp, probe
agagattagacactggaggttttta

SEQ ID NO: 133388 - DNA, 25 bp, probe
agagcaataacactatatttatttt

SEQ ID NO: 133389 - DNA, 25 bp, probe
agagaacagattcatttgcttaatt

SEQ ID NO: 133390 - DNA, 25 bp, probe
agagaacagattcatttgcttaatt

SEQ ID NO: 133391 - DNA, 25 bp, probe
agagtaggttgctatggttttatct

SEQ ID NO: 133392 - DNA, 25 bp, probe
agagtatcgtctgtgtccatttttt

SEQ ID NO: 133393 - DNA, 25 bp, probe
agagttcagacttatcaccattctt

SEQ ID NO: 133394 - DNA, 25 bp, probe
agagcttcaactacttctcttgcat

SEQ ID NO: 133395 - DNA, 25 bp, probe
agagaatgacaccatcttccatgct

SEQ ID NO: 133396 - DNA, 25 bp, probe
agagaatgacaccatcttccatgct

SEQ ID NO: 133397 - DNA, 25 bp, probe
agagactgcacaacacgatagcact

SEQ ID NO: 133398 - DNA, 25 bp, probe
agagactgcagcagaggcgagagat

SEQ ID NO: 133399 - DNA, 25 bp, probe
agagatctgatgctgaggaagtgga

SEQ ID NO: 133400 - DNA, 25 bp, probe
agagatcatatcctcagaccaggtg

SEQ ID NO: 133401 - DNA, 25 bp, probe
agagatcagcttcagagcctgggct

SEQ ID NO: 133402 - DNA, 25 bp, probe
agagtcagctatcttgtctggtttt

SEQ ID NO: 133403 - DNA, 25 bp, probe
agagcatacattcttttggttttcc

SEQ ID NO: 133404 - DNA, 25 bp, probe
agagcattcatcgatcctcttggtt

SEQ ID NO: 133405 - DNA, 25 bp, probe
agagttcctgtcacctgaggtggtg

SEQ ID NO: 133406 - DNA, 25 bp, probe
agagtctacctaattctggaatatg

SEQ ID NO: 133407 - DNA, 25 bp, probe
agagttgtattcaatcttggcaata

SEQ ID NO: 133408 - DNA, 25 bp, probe
agagatttcttcattctgctgagca

SEQ ID NO: 133409 - DNA, 25 bp, probe
agagtttcttctcatcagagcactg

SEQ ID NO: 133410 - DNA, 25 bp, probe
agagtttacactcatcagagcgatg

SEQ ID NO: 133411 - DNA, 25 bp, probe
agacgaatgatggctagatcgacga

SEQ ID NO: 133412 - DNA, 25 bp, probe
agacaacatgaaccagatctacggt

SEQ ID NO: 133413 - DNA, 25 bp, probe
agagatgaagagacacagtctagag

SEQ ID NO: 133414 - DNA, 25 bp, probe
agagatgttgagaacccgcagaggg

SEQ ID NO: 133415 - DNA, 25 bp, probe
agagtacatcgatgccgtgaaggac

SEQ ID NO: 133416 - DNA, 25 bp, probe
agagtacatcgatgccgtgaaggac

SEQ ID NO: 133417 - DNA, 25 bp, probe
agagccccgaagcagctaatgtaat

SEQ ID NO: 133418 - DNA, 25 bp, probe
agagctcccgaattagtattaaaag

SEQ ID NO: 133419 - DNA, 25 bp, probe
agactcactaaatcctttccaataa

SEQ ID NO: 133420 - DNA, 25 bp, probe
agcactcttaaaaccacttaaacag

SEQ ID NO: 133421 - DNA, 25 bp, probe
agcactcttaaaaccacttaaacag

SEQ ID NO: 133422 - DNA, 25 bp, probe
agactactacaaagctaatgaaaac

SEQ ID NO: 133423 - DNA, 25 bp, probe
agcactacaacacagggaaattcac

SEQ ID NO: 133424 - DNA, 25 bp, probe
agcactacaacacagggaaattcac

SEQ ID NO: 133425 - DNA, 25 bp, probe
agaaacagaagacgccaacaggtac

SEQ ID NO: 133426 - DNA, 25 bp, probe
aaatacatctcgcctggtacaggaa

SEQ ID NO: 133427 - DNA, 25 bp, probe
agagcatactctccagtggatccaa

SEQ ID NO: 133428 - DNA, 25 bp, probe
agagatatctagcagctcttccagc

SEQ ID NO: 133429 - DNA, 25 bp, probe
agagatatctagcagctcttccagc

SEQ ID NO: 133430 - DNA, 25 bp, probe
agagaactggaacctgcctgaggac

SEQ ID NO: 133431 - DNA, 25 bp, probe
agagaacgaagaccacagcaagaac

SEQ ID NO: 133432 - DNA, 25 bp, probe
agagaacggaaagcagccactaccc

SEQ ID NO: 133433 - DNA, 25 bp, probe
agagaacggaaagcagccactaccc

SEQ ID NO: 133434 - DNA, 25 bp, probe
agagacctgtgcaaatctgagctcc

SEQ ID NO: 133435 - DNA, 25 bp, probe
agagacttttactgagctccgagcc

SEQ ID NO: 133436 - DNA, 25 bp, probe
agagagcatctttgactgtgtctac

SEQ ID NO: 133437 - DNA, 25 bp, probe
agagatgctcataggtcacttctac

SEQ ID NO: 133438 - DNA, 25 bp, probe
agagatgccatgatatcacttcttc

SEQ ID NO: 133439 - DNA, 25 bp, probe
agagattgcagcaattctctacccc

SEQ ID NO: 133440 - DNA, 25 bp, probe
agagtcatgatcatgtccttacact

SEQ ID NO: 133441 - DNA, 25 bp, probe
agagctcaatgacatcctcaacctg

SEQ ID NO: 133442 - DNA, 25 bp, probe
agactgaagaaatttcacagcagtt

SEQ ID NO: 133443 - DNA, 25 bp, probe
agacgaagcctatacaacattaatc

SEQ ID NO: 133444 - DNA, 25 bp, probe
agagcttaccataggaaaactcaat

SEQ ID NO: 133445 - DNA, 25 bp, probe
agagttactctgcaaagttctcagt

SEQ ID NO: 133446 - DNA, 25 bp, probe
agagcttactctgagaaggtgacag

SEQ ID NO: 133447 - DNA, 25 bp, probe
agagctcaaccagaagggatacagt

SEQ ID NO: 133448 - DNA, 25 bp, probe
agcactacctcagaatgacgaccat

SEQ ID NO: 133449 - DNA, 25 bp, probe
agactactactcagattgccagctt

SEQ ID NO: 133450 - DNA, 25 bp, probe
agacccgagctttgattgactccgt

SEQ ID NO: 133451 - DNA, 25 bp, probe
agacccgagctttgattgactccgt

SEQ ID NO: 133452 - DNA, 25 bp, probe
agacctgggctggagaagaaccttc

SEQ ID NO: 133453 - DNA, 25 bp, probe
agaccatgcagcctgcgaaaccatc

SEQ ID NO: 133454 - DNA, 25 bp, probe
agaccacacgcagtattgagctgcc

SEQ ID NO: 133455 - DNA, 25 bp, probe
agaccacacgcagtattgagctgcc

SEQ ID NO: 133456 - DNA, 25 bp, probe
agagccagcacgatgccatcatggc

SEQ ID NO: 133457 - DNA, 25 bp, probe
agagccatccagatctctgtatcct

SEQ ID NO: 133458 - DNA, 25 bp, probe
agagcagaacagatcttttactttg

SEQ ID NO: 133459 - DNA, 25 bp, probe
agaaaacaattcccattatgtacgg

SEQ ID NO: 133460 - DNA, 25 bp, probe
agaaaggcaaggtcctggtccactg

SEQ ID NO: 133461 - DNA, 25 bp, probe
agagatacgaagaaccgtccctcat

SEQ ID NO: 133462 - DNA, 25 bp, probe
agagaaccagaccatctcagacacc

SEQ ID NO: 133463 - DNA, 25 bp, probe
agaccaccacatggcatgcttgact

SEQ ID NO: 133464 - DNA, 25 bp, probe
agagccccagcatctttgatgtgga

SEQ ID NO: 133465 - DNA, 25 bp, probe
agagccccagcatctttgatgtgga

SEQ ID NO: 133466 - DNA, 25 bp, probe
agaccccacgatcttcgaggagaga

SEQ ID NO: 133467 - DNA, 25 bp, probe
agaccccagcgtcaggtgggagtac

SEQ ID NO: 133468 - DNA, 25 bp, probe
agactccttcgtgatctggggatgt

SEQ ID NO: 133469 - DNA, 25 bp, probe
agagtgccattgcctgtttgggaga

SEQ ID NO: 133470 - DNA, 25 bp, probe
agagtgccattgcctgtttgggaga

SEQ ID NO: 133471 - DNA, 25 bp, probe
agagctacagtgtgaatgtggacga

SEQ ID NO: 133472 - DNA, 25 bp, probe
agagctacagtgtgaatgtggacga

SEQ ID NO: 133473 - DNA, 25 bp, probe
agactgcagggcttgaaatggacat

SEQ ID NO: 133474 - DNA, 25 bp, probe
agacctgaggcaatgagtcatagaa

SEQ ID NO: 133475 - DNA, 25 bp, probe
agcacctcccaggagtacgacaaga

SEQ ID NO: 133476 - DNA, 25 bp, probe
agcacctcccaggagtacgacaaga

SEQ ID NO: 133477 - DNA, 25 bp, probe
agagccttacaggaacagctagata

SEQ ID NO: 133478 - DNA, 25 bp, probe
agagagcggaccgaccagctgaaag

SEQ ID NO: 133479 - DNA, 25 bp, probe
agagaggaccagccagctgactgca

SEQ ID NO: 133480 - DNA, 25 bp, probe
agagagcggcagccagcactgatta

SEQ ID NO: 133481 - DNA, 25 bp, probe
agagagcggcagccagcactgatta

SEQ ID NO: 133482 - DNA, 25 bp, probe
agagaagcaggcggcatcgtgatag

SEQ ID NO: 133483 - DNA, 25 bp, probe
agagaagggcaggcacgtggtgctg

SEQ ID NO: 133484 - DNA, 25 bp, probe
agagcgacagaggacacagggtgta

SEQ ID NO: 133485 - DNA, 25 bp, probe
agagctctcgaggaaagtggttgtc

SEQ ID NO: 133486 - DNA, 25 bp, probe
agagttatgaggtaagaagctggcc

SEQ ID NO: 133487 - DNA, 25 bp, probe
agactgttgaagcataatcccagcc

SEQ ID NO: 133488 - DNA, 25 bp, probe
agacggtcaacgagtcagccagtct

SEQ ID NO: 133489 - DNA, 25 bp, probe
agagcggaaaggacctcctggactc

SEQ ID NO: 133490 - DNA, 25 bp, probe
agagcggaaaggacctcctggactc

SEQ ID NO: 133491 - DNA, 25 bp, probe
agacgggaaagggcccgatcgctct

SEQ ID NO: 133492 - DNA, 25 bp, probe
agacgacgaataaagccctgttgct

SEQ ID NO: 133493 - DNA, 25 bp, probe
agacgacgaataaagccctgttgct

SEQ ID NO: 133494 - DNA, 25 bp, probe
agacaagaacatacataccccggtt

SEQ ID NO: 133495 - DNA, 25 bp, probe
agacggaactttgtgctgacggctg

SEQ ID NO: 133496 - DNA, 25 bp, probe
agacggaactttgtgctgacggctg

SEQ ID NO: 133497 - DNA, 25 bp, probe
agactggatttgtgagtgctgggac

SEQ ID NO: 133498 - DNA, 25 bp, probe
agagcggaattatattcatcgtgac

SEQ ID NO: 133499 - DNA, 25 bp, probe
agagctggaatgcaaaatcggggag

SEQ ID NO: 133500 - DNA, 25 bp, probe
agagaagagggcgacaattaggaga

SEQ ID NO: 133501 - DNA, 25 bp, probe
agagacgggcgagcagattcagagc

SEQ ID NO: 133502 - DNA, 25 bp, probe
agagactgggtctacagacctgacc

SEQ ID NO: 133503 - DNA, 25 bp, probe
agagcagcttccgataggacctgcc

SEQ ID NO: 133504 - DNA, 25 bp, probe
agagctgctcacggagaagtccgcc

SEQ ID NO: 133505 - DNA, 25 bp, probe
agagatctccatggtcaggatcccc

SEQ ID NO: 133506 - DNA, 25 bp, probe
agagactgcgcaggcgcagttcccc

SEQ ID NO: 133507 - DNA, 25 bp, probe
agagcccgaggaggtgtctcaggct

SEQ ID NO: 133508 - DNA, 25 bp, probe
agagcgaggagaaggttgtcaccta

SEQ ID NO: 133509 - DNA, 25 bp, probe
agagtcagctgagtgaggcttgtca

SEQ ID NO: 133510 - DNA, 25 bp, probe
agagtcagctgagtgaggcttgtca

SEQ ID NO: 133511 - DNA, 25 bp, probe
agagatccagaaagcgctctgtctc

SEQ ID NO: 133512 - DNA, 25 bp, probe
agagctgctgcagaaggtctctctc

SEQ ID NO: 133513 - DNA, 25 bp, probe
agagcctgaggctggcaatccttgc

SEQ ID NO: 133514 - DNA, 25 bp, probe
agagcttgaggctggagcccttgaa

SEQ ID NO: 133515 - DNA, 25 bp, probe
agacctggaagtcacacaatagaat

SEQ ID NO: 133516 - DNA, 25 bp, probe
agaccttggagccgacacgggagta

SEQ ID NO: 133517 - DNA, 25 bp, probe
agacctaagaggatccggggcaata

SEQ ID NO: 133518 - DNA, 25 bp, probe
agacctgaataagttcctcagggcc

SEQ ID NO: 133519 - DNA, 25 bp, probe
agacctgcaactgttccgcaaactg

SEQ ID NO: 133520 - DNA, 25 bp, probe
agaccaacatcgccttcctgcagaa

SEQ ID NO: 133521 - DNA, 25 bp, probe
agagccacaaggctagccgagaccc

SEQ ID NO: 133522 - DNA, 25 bp, probe
agagcttacaggctgagccaagccc

SEQ ID NO: 133523 - DNA, 25 bp, probe
agagctaaaggcctgggaatggaga

SEQ ID NO: 133524 - DNA, 25 bp, probe
agagtatgaaggtggacttggtcaa

SEQ ID NO: 133525 - DNA, 25 bp, probe
agactctagacgtttactttgtaga

SEQ ID NO: 133526 - DNA, 25 bp, probe
agaatctttagcttatcttttgaag

SEQ ID NO: 133527 - DNA, 25 bp, probe
agactctgttgatgtgataatttga

SEQ ID NO: 133528 - DNA, 25 bp, probe
agacttgggaagcctgacatttcta

SEQ ID NO: 133529 - DNA, 25 bp, probe
agagatggggtttcgccatgttgcc

SEQ ID NO: 133530 - DNA, 25 bp, probe
agagaggggtcttggcactctcttc

SEQ ID NO: 133531 - DNA, 25 bp, probe
agagttttgtcttggatattcttga

SEQ ID NO: 133532 - DNA, 25 bp, probe
agagtttattcccttatctctgctg

SEQ ID NO: 133533 - DNA, 25 bp, probe
agactcttggatgctttatgcctgc

SEQ ID NO: 133534 - DNA, 25 bp, probe
agactattctctgcgtgttgcactg

SEQ ID NO: 133535 - DNA, 25 bp, probe
agacttttatgcataattcacttta

SEQ ID NO: 133536 - DNA, 25 bp, probe
agacttttatgcataattcacttta

SEQ ID NO: 133537 - DNA, 25 bp, probe
agacgtgttggaacacctcatttta

SEQ ID NO: 133538 - DNA, 25 bp, probe
agctatgggggaccaccttgtttat

SEQ ID NO: 133539 - DNA, 25 bp, probe
agaagctggggaggagctttgtttt

SEQ ID NO: 133540 - DNA, 25 bp, probe
agagaggagattctatgtgctttta

SEQ ID NO: 133541 - DNA, 25 bp, probe
agagccagagggaattatttattaa

SEQ ID NO: 133542 - DNA, 25 bp, probe
agagcctgagcgtttaatttattca

SEQ ID NO: 133543 - DNA, 25 bp, probe
agacttgggtgagtgaatttattct

SEQ ID NO: 133544 - DNA, 25 bp, probe
agagcttggcagaagatgagtttgt

SEQ ID NO: 133545 - DNA, 25 bp, probe
agagcgggtgcttgagttgttgtcg

SEQ ID NO: 133546 - DNA, 25 bp, probe
agagcctgtctcagggaattgcctg

SEQ ID NO: 133547 - DNA, 25 bp, probe
agagaggtctcatggggaggcgcga

SEQ ID NO: 133548 - DNA, 25 bp, probe
agagatggtgactggcaagaggcct

SEQ ID NO: 133549 - DNA, 25 bp, probe
agagatggtgactggcaagaggcct

SEQ ID NO: 133550 - DNA, 25 bp, probe
agagatgagacctgcgacaagctcc

SEQ ID NO: 133551 - DNA, 25 bp, probe
agagatgagacctgcgacaagctcc

SEQ ID NO: 133552 - DNA, 25 bp, probe
agagcataatccttggcagggctca

SEQ ID NO: 133553 - DNA, 25 bp, probe
agactatatcgctccagagatcctc

SEQ ID NO: 133554 - DNA, 25 bp, probe
agagaatatgctgggccaactggcc

SEQ ID NO: 133555 - DNA, 25 bp, probe
agagaatatgctgggccaactggcc

SEQ ID NO: 133556 - DNA, 25 bp, probe
agagaatttgcacaaagttccctct

SEQ ID NO: 133557 - DNA, 25 bp, probe
agagaatttgcacaaagttccctct

SEQ ID NO: 133558 - DNA, 25 bp, probe
agagatattctttaatcaattactt

SEQ ID NO: 133559 - DNA, 25 bp, probe
agcaaaatcctatacgtgtcctcta

SEQ ID NO: 133560 - DNA, 25 bp, probe
agagcttatcgtgaacttgtcctct

SEQ ID NO: 133561 - DNA, 25 bp, probe
agactctcaccacaatttttctgct

SEQ ID NO: 133562 - DNA, 25 bp, probe
agactctcccaaaagaacatcttct

SEQ ID NO: 133563 - DNA, 25 bp, probe
agagatcccaaaccagctattcttt

SEQ ID NO: 133564 - DNA, 25 bp, probe
agagaagaaaaccatctcttttgct

SEQ ID NO: 133565 - DNA, 25 bp, probe
agagcaaaataatgtccttagagac

SEQ ID NO: 133566 - DNA, 25 bp, probe
agagaggagccacagtccctaatga

SEQ ID NO: 133567 - DNA, 25 bp, probe
agagagggcacgagaacccaaaggg

SEQ ID NO: 133568 - DNA, 25 bp, probe
agagagagggcacgagaacccaaag

SEQ ID NO: 133569 - DNA, 25 bp, probe
agagcaagcgctgtaaaccctgacg

SEQ ID NO: 133570 - DNA, 25 bp, probe
agagaatctgctgtactacagcctg

SEQ ID NO: 133571 - DNA, 25 bp, probe
agagatttgtgactttgtcaatcag

SEQ ID NO: 133572 - DNA, 25 bp, probe
agagagttgctgctgttggagatgc

SEQ ID NO: 133573 - DNA, 25 bp, probe
agagagcagggcaatttgtggagag

SEQ ID NO: 133574 - DNA, 25 bp, probe
agagacggagtacttgctgctggaa

SEQ ID NO: 133575 - DNA, 25 bp, probe
agagacggagtacttgctgctggaa

SEQ ID NO: 133576 - DNA, 25 bp, probe
agagacggagtactctgccttggag

SEQ ID NO: 133577 - DNA, 25 bp, probe
agagaggcgatttcattcctgggct

SEQ ID NO: 133578 - DNA, 25 bp, probe
agagaggcgatttcattcctgggct

SEQ ID NO: 133579 - DNA, 25 bp, probe
agaagagggtggagccgggcttcgt

SEQ ID NO: 133580 - DNA, 25 bp, probe
agactgggagggagagggcctgtcg

SEQ ID NO: 133581 - DNA, 25 bp, probe
agaccgagagcgcttagtaggtcgg

SEQ ID NO: 133582 - DNA, 25 bp, probe
agaccggagcagccataaggacagc

SEQ ID NO: 133583 - DNA, 25 bp, probe
agagccgagggttcacgatgaccgt

SEQ ID NO: 133584 - DNA, 25 bp, probe
agagccgagggttcacgatgaccgt

SEQ ID NO: 133585 - DNA, 25 bp, probe
agactccaggggactcattactctg

SEQ ID NO: 133586 - DNA, 25 bp, probe
agaccattggggacgcctacatggt

SEQ ID NO: 133587 - DNA, 25 bp, probe
agaccagaggggacggaagcattgc

SEQ ID NO: 133588 - DNA, 25 bp, probe
agagccagggagattgaaggctctc

SEQ ID NO: 133589 - DNA, 25 bp, probe
agaccagtctgattttgaagggttc

SEQ ID NO: 133590 - DNA, 25 bp, probe
agactcagccgctgtctcgccgtgt

SEQ ID NO: 133591 - DNA, 25 bp, probe
agagatagccgggctccagggagtg

SEQ ID NO: 133592 - DNA, 25 bp, probe
agagcaagccatagacagcctgcga

SEQ ID NO: 133593 - DNA, 25 bp, probe
agagagactgatgggcaggggaggt

SEQ ID NO: 133594 - DNA, 25 bp, probe
agagcacaatgagctgagggaagtg

SEQ ID NO: 133595 - DNA, 25 bp, probe
agagcacaatgagctgagggaagtg

SEQ ID NO: 133596 - DNA, 25 bp, probe
agagagcaagagatggggcctgatg

SEQ ID NO: 133597 - DNA, 25 bp, probe
agcagccaaagcagtgtcgacctgg

SEQ ID NO: 133598 - DNA, 25 bp, probe
agcactgaaaccgagtcacctgtgg

SEQ ID NO: 133599 - DNA, 25 bp, probe
agactgctcaaaccattcgtctgat

SEQ ID NO: 133600 - DNA, 25 bp, probe
agactgtcaagagcctgcggctaca

SEQ ID NO: 133601 - DNA, 25 bp, probe
agacgtgcacgtcttcgtgtgacag

SEQ ID NO: 133602 - DNA, 25 bp, probe
agagcgtcctggatgatttctacac

SEQ ID NO: 133603 - DNA, 25 bp, probe
agagcgtcctggatgatttctacac

SEQ ID NO: 133604 - DNA, 25 bp, probe
agagcgccaggctttatcttatcaa

SEQ ID NO: 133605 - DNA, 25 bp, probe
agagcagctcaattatagcatcgta

SEQ ID NO: 133606 - DNA, 25 bp, probe
agagacgtactctgagggcagcgag

SEQ ID NO: 133607 - DNA, 25 bp, probe
agagacgtactctgagggcagcgag

SEQ ID NO: 133608 - DNA, 25 bp, probe
agagacactctgcccgagggcagga

SEQ ID NO: 133609 - DNA, 25 bp, probe
agagactcttctgcatgggtgatgt

SEQ ID NO: 133610 - DNA, 25 bp, probe
agagactctctctgggttcagatga

SEQ ID NO: 133611 - DNA, 25 bp, probe
agagacacagtctagaggtcctgat

SEQ ID NO: 133612 - DNA, 25 bp, probe
agagactcgtgcaatggagattctg

SEQ ID NO: 133613 - DNA, 25 bp, probe
agacagatctgtcaagagaatccat

SEQ ID NO: 133614 - DNA, 25 bp, probe
agacggcgctgttcaaaggccttga

SEQ ID NO: 133615 - DNA, 25 bp, probe
agacggcgctgttcaaaggccttga

SEQ ID NO: 133616 - DNA, 25 bp, probe
agaccccttcaccaatgagctggtg

SEQ ID NO: 133617 - DNA, 25 bp, probe
agaccaccttaaaccagggatcatg

SEQ ID NO: 133618 - DNA, 25 bp, probe
agagccacaatgaaaccaaggaggt

SEQ ID NO: 133619 - DNA, 25 bp, probe
agagccacaatgaaaccaaggaggt

SEQ ID NO: 133620 - DNA, 25 bp, probe
agagcacacaaaacaagagaggaag

SEQ ID NO: 133621 - DNA, 25 bp, probe
agagcacacaaaacaagagaggaag

SEQ ID NO: 133622 - DNA, 25 bp, probe
agagcccagagtgtgggagctaatg

SEQ ID NO: 133623 - DNA, 25 bp, probe
agagcccaagtcaggaggtcaagtg

SEQ ID NO: 133624 - DNA, 25 bp, probe
agactacgaccaggtgaagatcaag

SEQ ID NO: 133625 - DNA, 25 bp, probe
agactgatcggctgcgcgaaatcct

SEQ ID NO: 133626 - DNA, 25 bp, probe
agacgccatggctgcattgaatgat

SEQ ID NO: 133627 - DNA, 25 bp, probe
agaagtcggggctttctgatgtcag

SEQ ID NO: 133628 - DNA, 25 bp, probe
agacgagcgcgggaaatctcttcgg

SEQ ID NO: 133629 - DNA, 25 bp, probe
agacgagcgcgggaaatctcttcgg

SEQ ID NO: 133630 - DNA, 25 bp, probe
agacagagccggggtcactgtcctt

SEQ ID NO: 133631 - DNA, 25 bp, probe
agagaggcctggattcatgtctctc

SEQ ID NO: 133632 - DNA, 25 bp, probe
agagagccctatgctgtattttgca

SEQ ID NO: 133633 - DNA, 25 bp, probe
agagcatcctgtaccgtaagttcac

SEQ ID NO: 133634 - DNA, 25 bp, probe
agagatgcactgttcaattcggtac

SEQ ID NO: 133635 - DNA, 25 bp, probe
agagagagctcactctactctggat

SEQ ID NO: 133636 - DNA, 25 bp, probe
agagcatagtttaacatcttgagaa

SEQ ID NO: 133637 - DNA, 25 bp, probe
agcactagctttttattaagaacct

SEQ ID NO: 133638 - DNA, 25 bp, probe
agactcagactttctttaaaacaga

SEQ ID NO: 133639 - DNA, 25 bp, probe
agagcagagcctgaccctaaaaaga

SEQ ID NO: 133640 - DNA, 25 bp, probe
agagcaacactctgtctcaaaaaaa

SEQ ID NO: 133641 - DNA, 25 bp, probe
agagcaagactctgtctcaaaaaaa

SEQ ID NO: 133642 - DNA, 25 bp, probe
agagacagactctctcttcataaaa

SEQ ID NO: 133643 - DNA, 25 bp, probe
cgaagacactgtatttgaagaaact

SEQ ID NO: 133644 - DNA, 25 bp, probe
agagaagcacgtgtttgagcaggca

SEQ ID NO: 133645 - DNA, 25 bp, probe
agcaaagcaggaggtcttgggctaa

SEQ ID NO: 133646 - DNA, 25 bp, probe
agagaacgcacaggctattagtcat

SEQ ID NO: 133647 - DNA, 25 bp, probe
agagaaagatgcaagacatgtagta

SEQ ID NO: 133648 - DNA, 25 bp, probe
agaaaacccagaggctactatcccg

SEQ ID NO: 133649 - DNA, 25 bp, probe
agaaaaattgccggattccagccct

SEQ ID NO: 133650 - DNA, 25 bp, probe
agccaaatgaggcaggaatcccccc

SEQ ID NO: 133651 - DNA, 25 bp, probe
agagctcaaggtcaatgacacccct

SEQ ID NO: 133652 - DNA, 25 bp, probe
agagctaaagccacaaacccatcta

SEQ ID NO: 133653 - DNA, 25 bp, probe
agagaaaggccaagcggaccagagc

SEQ ID NO: 133654 - DNA, 25 bp, probe
agagcaaaagacttgagccatccaa

SEQ ID NO: 133655 - DNA, 25 bp, probe
agagcagcaaagacattataccaca

SEQ ID NO: 133656 - DNA, 25 bp, probe
agagcagcaaagacattataccaca

SEQ ID NO: 133657 - DNA, 25 bp, probe
agagaggaagtgctccaccatcaga

SEQ ID NO: 133658 - DNA, 25 bp, probe
agagaaatactcactacgccaaatc

SEQ ID NO: 133659 - DNA, 25 bp, probe
agagctaagattatctggggaaatc

SEQ ID NO: 133660 - DNA, 25 bp, probe
agactcgcagattttcttgggagag

SEQ ID NO: 133661 - DNA, 25 bp, probe
agacgtcaataattttgaccaagac

SEQ ID NO: 133662 - DNA, 25 bp, probe
agacttaatgagactttaaaagcat

SEQ ID NO: 133663 - DNA, 25 bp, probe
agactgctagtgttctgtctaaaaa

SEQ ID NO: 133664 - DNA, 25 bp, probe
agactgtagctgctgtgggaaacag

SEQ ID NO: 133665 - DNA, 25 bp, probe
agacgtactctgagggcagcgagga

SEQ ID NO: 133666 - DNA, 25 bp, probe
agacgtactctgagggcagcgagga

SEQ ID NO: 133667 - DNA, 25 bp, probe
agagcgtggcctgtgaccaggaggc

SEQ ID NO: 133668 - DNA, 25 bp, probe
agagagagggctgatcccatggggc

SEQ ID NO: 133669 - DNA, 25 bp, probe
agaaacgagcatacccagcagtggg

SEQ ID NO: 133670 - DNA, 25 bp, probe
agagacccacattcaagcagttggt

SEQ ID NO: 133671 - DNA, 25 bp, probe
agagactcaccatcgagggagtgct

SEQ ID NO: 133672 - DNA, 25 bp, probe
agagacctccataagggagcagctg

SEQ ID NO: 133673 - DNA, 25 bp, probe
agagagccacgcaaacatgggtgct

SEQ ID NO: 133674 - DNA, 25 bp, probe
agagcatcccagctataaggctctt

SEQ ID NO: 133675 - DNA, 25 bp, probe
agagacccagtcaattacatgtttg

SEQ ID NO: 133676 - DNA, 25 bp, probe
agcgcacccagagaaaattaattat

SEQ ID NO: 133677 - DNA, 25 bp, probe
agaccatccagagaaaagcaagaca

SEQ ID NO: 133678 - DNA, 25 bp, probe
agaccatccagagaaaagcaagaca

SEQ ID NO: 133679 - DNA, 25 bp, probe
agagccaccaggaactcgaaaacct

SEQ ID NO: 133680 - DNA, 25 bp, probe
agagccccagctgacatggaaatac

SEQ ID NO: 133681 - DNA, 25 bp, probe
agacgtccatcagccggacaacatt

SEQ ID NO: 133682 - DNA, 25 bp, probe
agagcagtgcctttgaagaacaact

SEQ ID NO: 133683 - DNA, 25 bp, probe
agagagagatctttgtggccatcaa

SEQ ID NO: 133684 - DNA, 25 bp, probe
agagagaagatggtgtggtctacga

SEQ ID NO: 133685 - DNA, 25 bp, probe
agagaagatggtgtggtctacgagg

SEQ ID NO: 133686 - DNA, 25 bp, probe
agagaaatgggctcgtcccgagggt

SEQ ID NO: 133687 - DNA, 25 bp, probe
agagaaatgggctcgtcccgagggt

SEQ ID NO: 133688 - DNA, 25 bp, probe
agagcaggggagtggcttcccaagg

SEQ ID NO: 133689 - DNA, 25 bp, probe
agagagatgggagctcctctcctgg

SEQ ID NO: 133690 - DNA, 25 bp, probe
agagcaagggacctagtctcaggga

SEQ ID NO: 133691 - DNA, 25 bp, probe
agagcaaggggctgaccacagtgtt

SEQ ID NO: 133692 - DNA, 25 bp, probe
agagccaggactctgatccagggct

SEQ ID NO: 133693 - DNA, 25 bp, probe
agagccgtaagaatgcgccagtgcg

SEQ ID NO: 133694 - DNA, 25 bp, probe
agagccgtaagaatgcgccagtgcg

SEQ ID NO: 133695 - DNA, 25 bp, probe
agagcaccaaatgatctgccctgga

SEQ ID NO: 133696 - DNA, 25 bp, probe
agagacacagaagaagctgcctgtc

SEQ ID NO: 133697 - DNA, 25 bp, probe
agagagcacagatgtcaaggacagc

SEQ ID NO: 133698 - DNA, 25 bp, probe
agagagccagcacgagagggagctg

SEQ ID NO: 133699 - DNA, 25 bp, probe
agagagactgcagcagaggcgagag

SEQ ID NO: 133700 - DNA, 25 bp, probe
agagcgagctgcatgagaagtacat

SEQ ID NO: 133701 - DNA, 25 bp, probe
agagaagtgatttgagttgactcat

SEQ ID NO: 133702 - DNA, 25 bp, probe
agagcaatgtgacaagtatgacgcc

SEQ ID NO: 133703 - DNA, 25 bp, probe
agagaactgaagtactggggcctcc

SEQ ID NO: 133704 - DNA, 25 bp, probe
agaaacttcagtgtgtggacctcca

SEQ ID NO: 133705 - DNA, 25 bp, probe
agagaacttcctgattggtcgacaa

SEQ ID NO: 133706 - DNA, 25 bp, probe
agagacatttccggttgtcacaatt

SEQ ID NO: 133707 - DNA, 25 bp, probe
agagagcatttcgctggtgtccttt

SEQ ID NO: 133708 - DNA, 25 bp, probe
agcagtctttgaggctggtggtttg

SEQ ID NO: 133709 - DNA, 25 bp, probe
agactgatttcttctgtggtttatg

SEQ ID NO: 133710 - DNA, 25 bp, probe
agagctaagatctctgggttgtatt

SEQ ID NO: 133711 - DNA, 25 bp, probe
agagaatggatctctcctgctttct

SEQ ID NO: 133712 - DNA, 25 bp, probe
agagaatgacttctgccttcatctg

SEQ ID NO: 133713 - DNA, 25 bp, probe
agagcaatgtttcttgtattctgaa

SEQ ID NO: 133714 - DNA, 25 bp, probe
agagcagatgccatcttctggcttc

SEQ ID NO: 133715 - DNA, 25 bp, probe
agagcagtgccagagcatgggccca

SEQ ID NO: 133716 - DNA, 25 bp, probe
agagcagtggcagaggtagccccct

SEQ ID NO: 133717 - DNA, 25 bp, probe
agagaaggacgagttcgacatcccg

SEQ ID NO: 133718 - DNA, 25 bp, probe
agagaaggaaggactggagcaccag

SEQ ID NO: 133719 - DNA, 25 bp, probe
agagacttaaggttgggcatgggaa

SEQ ID NO: 133720 - DNA, 25 bp, probe
agaacctccaggtctagcctgggta

SEQ ID NO: 133721 - DNA, 25 bp, probe
agagaccaacgttcaagcagttggt

SEQ ID NO: 133722 - DNA, 25 bp, probe
agaccaaacaataaacaggctgaga

SEQ ID NO: 133723 - DNA, 25 bp, probe
agaccagtctggtcaaaatggtgaa

SEQ ID NO: 133724 - DNA, 25 bp, probe
agaccagcctggccaacatggtgaa

SEQ ID NO: 133725 - DNA, 25 bp, probe
agaccgctcgggaaatgcaggaagg

SEQ ID NO: 133726 - DNA, 25 bp, probe
agagactttgggaaatgagaaccag

SEQ ID NO: 133727 - DNA, 25 bp, probe
agacaccttgcctataattaaaatg

SEQ ID NO: 133728 - DNA, 25 bp, probe
agacgcacttcttcacaatctattg

SEQ ID NO: 133729 - DNA, 25 bp, probe
agacgcacttcttcacaatctattg

SEQ ID NO: 133730 - DNA, 25 bp, probe
agaccacgtcactacatttctatgc

SEQ ID NO: 133731 - DNA, 25 bp, probe
agaccctgtcatatatttaatggct

SEQ ID NO: 133732 - DNA, 25 bp, probe
agagcacggataactttatcttgtt

SEQ ID NO: 133733 - DNA, 25 bp, probe
agagcagccggaacctgcattgttt

SEQ ID NO: 133734 - DNA, 25 bp, probe
agagctcagcgagactcagcttgta

SEQ ID NO: 133735 - DNA, 25 bp, probe
agagacaagacttctctgtttactt

SEQ ID NO: 133736 - DNA, 25 bp, probe
agagaaatgtcttttgtgctacagt

SEQ ID NO: 133737 - DNA, 25 bp, probe
tcaggctcttaatattcgaataggc

SEQ ID NO: 133738 - DNA, 25 bp, probe
agagcgtgtgaaccttttgtgttgt

SEQ ID NO: 133739 - DNA, 25 bp, probe
agacgcttaatgccctgtgtttttg

SEQ ID NO: 133740 - DNA, 25 bp, probe
agagcacttaatggtctctgttttc

SEQ ID NO: 133741 - DNA, 25 bp, probe
agacacttcgaactttgggctactc

SEQ ID NO: 133742 - DNA, 25 bp, probe
agacacttcgaactttgggctactc

SEQ ID NO: 133743 - DNA, 25 bp, probe
agacacagtgcttacttaccttact

SEQ ID NO: 133744 - DNA, 25 bp, probe
agacgtgttaaattcagacgtactg

SEQ ID NO: 133745 - DNA, 25 bp, probe
agagcttgttaatgatgatgaggat

SEQ ID NO: 133746 - DNA, 25 bp, probe
agagcttttccttgcaggagcgtca

SEQ ID NO: 133747 - DNA, 25 bp, probe
agagcttgtgtccttcaacagagag

SEQ ID NO: 133748 - DNA, 25 bp, probe
agagactgtatccttcacaggggac

SEQ ID NO: 133749 - DNA, 25 bp, probe
agaaggttcactacaacggtgcctg

SEQ ID NO: 133750 - DNA, 25 bp, probe
agaagagtatatgcaaacggttttg

SEQ ID NO: 133751 - DNA, 25 bp, probe
agacacaaagtttaactggtacttg

SEQ ID NO: 133752 - DNA, 25 bp, probe
agagaaaggtattaactgcaacatt

SEQ ID NO: 133753 - DNA, 25 bp, probe
agactatttttatcctgcaactctt

SEQ ID NO: 133754 - DNA, 25 bp, probe
agagctggtattctagcccaaatct

SEQ ID NO: 133755 - DNA, 25 bp, probe
agcgtgacttatgtacccagaaaga

SEQ ID NO: 133756 - DNA, 25 bp, probe
agaaatcttcatgtacccaggcaac

SEQ ID NO: 133757 - DNA, 25 bp, probe
agagactccagtttacatccagaaa

SEQ ID NO: 133758 - DNA, 25 bp, probe
agaactcccttcaaacacaaagatt

SEQ ID NO: 133759 - DNA, 25 bp, probe
agaagtcgtttaaagctcaaagatg

SEQ ID NO: 133760 - DNA, 25 bp, probe
agactgcttgtaactaaccaagatg

SEQ ID NO: 133761 - DNA, 25 bp, probe
agacctgcattcaaccaactgtaat

SEQ ID NO: 133762 - DNA, 25 bp, probe
agacctattctgaccaaactatata

SEQ ID NO: 133763 - DNA, 25 bp, probe
agacctattctgcctgagcaaggag

SEQ ID NO: 133764 - DNA, 25 bp, probe
agacttatttgccagcagataaatc

SEQ ID NO: 133765 - DNA, 25 bp, probe
agcactatctttcaggaaatttttg

SEQ ID NO: 133766 - DNA, 25 bp, probe
agactactatgaacagttttctttt

SEQ ID NO: 133767 - DNA, 25 bp, probe
agagccacattgagttgctttttct

SEQ ID NO: 133768 - DNA, 25 bp, probe
agaccatcatagagatcgattcttg

SEQ ID NO: 133769 - DNA, 25 bp, probe
agacctgataggattgcctgcttag

SEQ ID NO: 133770 - DNA, 25 bp, probe
agagcacagatctgtttcgtgcatt

SEQ ID NO: 133771 - DNA, 25 bp, probe
agacacaagcatatttgctgcctca

SEQ ID NO: 133772 - DNA, 25 bp, probe
agaccagatgaagactccagccatg

SEQ ID NO: 133773 - DNA, 25 bp, probe
agaccaagtcattacccagtctcat

SEQ ID NO: 133774 - DNA, 25 bp, probe
agaccaacgctaaagcctgtgctcc

SEQ ID NO: 133775 - DNA, 25 bp, probe
agactagcaagcagcaacagttctc

SEQ ID NO: 133776 - DNA, 25 bp, probe
agactgcacaggtgacaagcgtcac

SEQ ID NO: 133777 - DNA, 25 bp, probe
agactgcaaagtcccgagttactca

SEQ ID NO: 133778 - DNA, 25 bp, probe
agagctaatacatgccgacgggcgc

SEQ ID NO: 133779 - DNA, 25 bp, probe
agaagcagaaacacgacgggcgggt

SEQ ID NO: 133780 - DNA, 25 bp, probe
agacgagaaactccaggctctgagc

SEQ ID NO: 133781 - DNA, 25 bp, probe
agagaagagagtgccagagtctatg

SEQ ID NO: 133782 - DNA, 25 bp, probe
agagaagaatgtcctgaagatcagt

SEQ ID NO: 133783 - DNA, 25 bp, probe
agagaagaatgtcctgaagatcagt

SEQ ID NO: 133784 - DNA, 25 bp, probe
agagcaagtgtcccatgaatgtgat

SEQ ID NO: 133785 - DNA, 25 bp, probe
agagcagagctgatggagaaggaag

SEQ ID NO: 133786 - DNA, 25 bp, probe
agagcaggtgacgggagaggaggtt

SEQ ID NO: 133787 - DNA, 25 bp, probe
agagaagatggagtgcgagggcagc

SEQ ID NO: 133788 - DNA, 25 bp, probe
agaagaatcaacagggacacttttt

SEQ ID NO: 133789 - DNA, 25 bp, probe
agaacaactacagtgaggacctgga

SEQ ID NO: 133790 - DNA, 25 bp, probe
agcaccaaagccggtggacagcgga

SEQ ID NO: 133791 - DNA, 25 bp, probe
agacgcagtggggcggggacagggc

SEQ ID NO: 133792 - DNA, 25 bp, probe
agactttggggacagggcaggggca

SEQ ID NO: 133793 - DNA, 25 bp, probe
agactttggggacagggcaggggca

SEQ ID NO: 133794 - DNA, 25 bp, probe
agagcttgtggtggggcaggaacgg

SEQ ID NO: 133795 - DNA, 25 bp, probe
agagcctgtggaggggcttgggcct

SEQ ID NO: 133796 - DNA, 25 bp, probe
agagctcatggcgaagagacttggg

SEQ ID NO: 133797 - DNA, 25 bp, probe
agagctgcgggagatcattgatgag

SEQ ID NO: 133798 - DNA, 25 bp, probe
agagctgcgggagatcattgatgag

SEQ ID NO: 133799 - DNA, 25 bp, probe
agagctgtggaggattgctatctgg

SEQ ID NO: 133800 - DNA, 25 bp, probe
agagctgtgaagatgtcccggtagc

SEQ ID NO: 133801 - DNA, 25 bp, probe
agaaataaaggtgagcagcgaacga

SEQ ID NO: 133802 - DNA, 25 bp, probe
agaaataaaggtgagcagcgaacga

SEQ ID NO: 133803 - DNA, 25 bp, probe
agaccctaagaaagagccgaaagca

SEQ ID NO: 133804 - DNA, 25 bp, probe
aattgcctaaagaggaaggaccaag

SEQ ID NO: 133805 - DNA, 25 bp, probe
tagaacctaaagaggtcaagcccga

SEQ ID NO: 133806 - DNA, 25 bp, probe
tagaacctaaagaggtcaagcccga

SEQ ID NO: 133807 - DNA, 25 bp, probe
aaatccgcaaagtgttggacgccaa

SEQ ID NO: 133808 - DNA, 25 bp, probe
agagcatccctatgggcttggacca

SEQ ID NO: 133809 - DNA, 25 bp, probe
agactctacatgtaggatggtaacc

SEQ ID NO: 133810 - DNA, 25 bp, probe
agactctgagactaagggtgaaagt

SEQ ID NO: 133811 - DNA, 25 bp, probe
agaccctcagtgcggtgctgaaagt

SEQ ID NO: 133812 - DNA, 25 bp, probe
agaccctcagtgcggtgctgaaagt

SEQ ID NO: 133813 - DNA, 25 bp, probe
agacaccatacgctggcatcgaaaa

SEQ ID NO: 133814 - DNA, 25 bp, probe
agagaagcaacgtatggcaggacaa

SEQ ID NO: 133815 - DNA, 25 bp, probe
agagcatagccacctaggggaggag

SEQ ID NO: 133816 - DNA, 25 bp, probe
agagctcaccagctagtgatggagg

SEQ ID NO: 133817 - DNA, 25 bp, probe
agagctcggagcctcattgagacag

SEQ ID NO: 133818 - DNA, 25 bp, probe
agagctctggatcctgaatccagca

SEQ ID NO: 133819 - DNA, 25 bp, probe
agactctgacatcatgtagccggcc

SEQ ID NO: 133820 - DNA, 25 bp, probe
agactctgacatcatgtagccggcc

SEQ ID NO: 133821 - DNA, 25 bp, probe
agagcttacagatttcatcctggcc

SEQ ID NO: 133822 - DNA, 25 bp, probe
agagctccagcagataacgtggcag

SEQ ID NO: 133823 - DNA, 25 bp, probe
agagctgccaaggtggcacaggggc

SEQ ID NO: 133824 - DNA, 25 bp, probe
agagcgcttagtaggtcggaggaag

SEQ ID NO: 133825 - DNA, 25 bp, probe
agacgtttttgtgctgtgggcagca

SEQ ID NO: 133826 - DNA, 25 bp, probe
agacctgtcttttaatgaggcaaca

SEQ ID NO: 133827 - DNA, 25 bp, probe
agacgctggctgatgtactggtaca

SEQ ID NO: 133828 - DNA, 25 bp, probe
agaccctggttttcatggtgcacat

SEQ ID NO: 133829 - DNA, 25 bp, probe
agacacacccttacacggtgacttc

SEQ ID NO: 133830 - DNA, 25 bp, probe
agaccaacgttcaagcagttggtag

SEQ ID NO: 133831 - DNA, 25 bp, probe
agacctccaaccaagcgtatgtgaa

SEQ ID NO: 133832 - DNA, 25 bp, probe
agaactggaacctgcctgaggacag

SEQ ID NO: 133833 - DNA, 25 bp, probe
agaacttgcaccagcgtctggaagg

SEQ ID NO: 133834 - DNA, 25 bp, probe
agaagttcaccttcggcttagactg

SEQ ID NO: 133835 - DNA, 25 bp, probe
agaaaatccctatgtgccaaaagta

SEQ ID NO: 133836 - DNA, 25 bp, probe
agacaaagactttactgccaaaata

SEQ ID NO: 133837 - DNA, 25 bp, probe
agagcaagacaataacatcacaagc

SEQ ID NO: 133838 - DNA, 25 bp, probe
agacacgtaataccagaccaacctc

SEQ ID NO: 133839 - DNA, 25 bp, probe
agagcaggattctccaggctaaatc

SEQ ID NO: 133840 - DNA, 25 bp, probe
agagcagggatctacctggcttctc

SEQ ID NO: 133841 - DNA, 25 bp, probe
agaaccgttcattcttgctttgtgt

SEQ ID NO: 133842 - DNA, 25 bp, probe
agaaacgttttcatgcttctggcca

SEQ ID NO: 133843 - DNA, 25 bp, probe
agaaactttttcaggacatgctatc

SEQ ID NO: 133844 - DNA, 25 bp, probe
agacaaggctttacaggaagattct

SEQ ID NO: 133845 - DNA, 25 bp, probe
agaccatggctgttacagggatcat

SEQ ID NO: 133846 - DNA, 25 bp, probe
agactgcatgtccaaacgaagtaac

SEQ ID NO: 133847 - DNA, 25 bp, probe
agacatgcatgtgtgacaagaacat

SEQ ID NO: 133848 - DNA, 25 bp, probe
agacatgcatgtgtgacaagaacat

SEQ ID NO: 133849 - DNA, 25 bp, probe
agacagttttgctaatggaatggaa

SEQ ID NO: 133850 - DNA, 25 bp, probe
aaattttatcagagagttgcaaaaa

SEQ ID NO: 133851 - DNA, 25 bp, probe
aaattgggacctcagttgcaaccac

SEQ ID NO: 133852 - DNA, 25 bp, probe
tttttaggactcacgttaactcaca

SEQ ID NO: 133853 - DNA, 25 bp, probe
ttttgaagggttctcgtatgtcaac

SEQ ID NO: 133854 - DNA, 25 bp, probe
ctcttaagggggccttggaatctat

SEQ ID NO: 133855 - DNA, 25 bp, probe
ctcttaagggggccttggaatctat

SEQ ID NO: 133856 - DNA, 25 bp, probe
actggaaggggcccgtgggagtcat

SEQ ID NO: 133857 - DNA, 25 bp, probe
agctaacaactacttagtgggacta

SEQ ID NO: 133858 - DNA, 25 bp, probe
agacgacgaggactgctatggcaat

SEQ ID NO: 133859 - DNA, 25 bp, probe
agacgatgccacgacggtggacaca

SEQ ID NO: 133860 - DNA, 25 bp, probe
agactggcagtcgaccgatgccaca

SEQ ID NO: 133861 - DNA, 25 bp, probe
agactggcagtcgaccgatgccaca

SEQ ID NO: 133862 - DNA, 25 bp, probe
agactgcagcagaggcgagagatgc

SEQ ID NO: 133863 - DNA, 25 bp, probe
agactcaaatgctcagaccagctct

SEQ ID NO: 133864 - DNA, 25 bp, probe
agactcaaatgctcagaccagctct

SEQ ID NO: 133865 - DNA, 25 bp, probe
agagctaaatgtacaagccaaatgc

SEQ ID NO: 133866 - DNA, 25 bp, probe
agacttagatgagatagcgcataat

SEQ ID NO: 133867 - DNA, 25 bp, probe
agactgtcgaaggtcaccaaatcag

SEQ ID NO: 133868 - DNA, 25 bp, probe
agactggcctgaaccacaggagagg

SEQ ID NO: 133869 - DNA, 25 bp, probe
agactgttctgaagcaccgagacac

SEQ ID NO: 133870 - DNA, 25 bp, probe
agagcatgttctcgccaacaatgat

SEQ ID NO: 133871 - DNA, 25 bp, probe
agagcattgctttgtcaactcagct

SEQ ID NO: 133872 - DNA, 25 bp, probe
agagcacatctcgagtatacatcat

SEQ ID NO: 133873 - DNA, 25 bp, probe
agacaattcagaagcatcaccatgc

SEQ ID NO: 133874 - DNA, 25 bp, probe
agaccactcgcaacaacgatggcct

SEQ ID NO: 133875 - DNA, 25 bp, probe
agaccactcgcaacaacgatggcct

SEQ ID NO: 133876 - DNA, 25 bp, probe
agaccaccagcatcgacatgtgggc

SEQ ID NO: 133877 - DNA, 25 bp, probe
agagccttatgatcgagcagtggac

SEQ ID NO: 133878 - DNA, 25 bp, probe
agagccttatgatcgagcagtggac

SEQ ID NO: 133879 - DNA, 25 bp, probe
agagcctgtgctaccgcaagatagc

SEQ ID NO: 133880 - DNA, 25 bp, probe
agagccgggactggacacaagccag

SEQ ID NO: 133881 - DNA, 25 bp, probe
agagcaggcaggctaggccaagcca

SEQ ID NO: 133882 - DNA, 25 bp, probe
agagcagggccatcatggtcagccc

SEQ ID NO: 133883 - DNA, 25 bp, probe
agagcaggtgacacagtgagctccc

SEQ ID NO: 133884 - DNA, 25 bp, probe
agagcagatcagtctttgtcaatgc

SEQ ID NO: 133885 - DNA, 25 bp, probe
agagcatctagaatgtacatcacat

SEQ ID NO: 133886 - DNA, 25 bp, probe
agagcatgtgaagttacaatgaggc

SEQ ID NO: 133887 - DNA, 25 bp, probe
agacattgaatcaccaaggcctggg

SEQ ID NO: 133888 - DNA, 25 bp, probe
agactttatcctggcactggtcatc

SEQ ID NO: 133889 - DNA, 25 bp, probe
agacttgtatactggctgaatatca

SEQ ID NO: 133890 - DNA, 25 bp, probe
agacttgtgctgatcgtgctaaatt

SEQ ID NO: 133891 - DNA, 25 bp, probe
agactctgtctcagtccatgaagat

SEQ ID NO: 133892 - DNA, 25 bp, probe
agaatcagatcgagtccaaggcagc

SEQ ID NO: 133893 - DNA, 25 bp, probe
agagctggtgcgagctggcacccac

SEQ ID NO: 133894 - DNA, 25 bp, probe
agacggcagctgagtgcatgacctc

SEQ ID NO: 133895 - DNA, 25 bp, probe
agacggcagctgagtgcatgacctc

SEQ ID NO: 133896 - DNA, 25 bp, probe
agacggtgcagtcggctgcatactc

SEQ ID NO: 133897 - DNA, 25 bp, probe
agacgcgagagacgtgcttccgaag

SEQ ID NO: 133898 - DNA, 25 bp, probe
agacggagaagaggctgtgcaagat

SEQ ID NO: 133899 - DNA, 25 bp, probe
agacctaaatatgctggatatagct

SEQ ID NO: 133900 - DNA, 25 bp, probe
agaccgaattctgtggctcagcaca

SEQ ID NO: 133901 - DNA, 25 bp, probe
agaccaaattctacgcagctggcct

SEQ ID NO: 133902 - DNA, 25 bp, probe
agacccaggattatgctgtgagcct

SEQ ID NO: 133903 - DNA, 25 bp, probe
agacgccgagatgactggctacgtg

SEQ ID NO: 133904 - DNA, 25 bp, probe
agacggaggatggcactggcgggat

SEQ ID NO: 133905 - DNA, 25 bp, probe
agacggaggatgagctgtaccagct

SEQ ID NO: 133906 - DNA, 25 bp, probe
agactaaggatgctgttgcccgtcc

SEQ ID NO: 133907 - DNA, 25 bp, probe
agactaaggatgctgttgcccgtcc

SEQ ID NO: 133908 - DNA, 25 bp, probe
agcagtacaagaactgtgcccaccc

SEQ ID NO: 133909 - DNA, 25 bp, probe
agcaggacaacaagatgacccccgg

SEQ ID NO: 133910 - DNA, 25 bp, probe
agaaaaacaggtctcagcccagggt

SEQ ID NO: 133911 - DNA, 25 bp, probe
agaaagcaaagttttccctcagaga

SEQ ID NO: 133912 - DNA, 25 bp, probe
agaattcaattgtggaccccaaagt

SEQ ID NO: 133913 - DNA, 25 bp, probe
caggtctgagttgttaccccaagcg

SEQ ID NO: 133914 - DNA, 25 bp, probe
agagcattgagcactttatctccca

SEQ ID NO: 133915 - DNA, 25 bp, probe
gaatgcatgtaaggtcttcttgtgt

SEQ ID NO: 133916 - DNA, 25 bp, probe
agagctgagactagtcatgtctctc

SEQ ID NO: 133917 - DNA, 25 bp, probe
agagccagattttgctgagccgctg

SEQ ID NO: 133918 - DNA, 25 bp, probe
agagcgcagtgagtcttcggagctg

SEQ ID NO: 133919 - DNA, 25 bp, probe
agagccacatgatcttagggctggt

SEQ ID NO: 133920 - DNA, 25 bp, probe
agactccagttcttagaggcgctgt

SEQ ID NO: 133921 - DNA, 25 bp, probe
agagctgcctgcacttacaggcgtt

SEQ ID NO: 133922 - DNA, 25 bp, probe
agactgggccagtctgacaggtgct

SEQ ID NO: 133923 - DNA, 25 bp, probe
agactgggccagtctgacaggtgct

SEQ ID NO: 133924 - DNA, 25 bp, probe
agactggtgaccccatcacagtcat

SEQ ID NO: 133925 - DNA, 25 bp, probe
agactggtgaccccatcacagtcat

SEQ ID NO: 133926 - DNA, 25 bp, probe
agactgtgcagtgacctccacatat

SEQ ID NO: 133927 - DNA, 25 bp, probe
agacctgcgatggacttcacagatt

SEQ ID NO: 133928 - DNA, 25 bp, probe
agagctctgctatgactataagttt

SEQ ID NO: 133929 - DNA, 25 bp, probe
agagcttcatttttgatatattgtt

SEQ ID NO: 133930 - DNA, 25 bp, probe
agacttcacttgtggtttgttgcca

SEQ ID NO: 133931 - DNA, 25 bp, probe
agactctaattttggattccttggt

SEQ ID NO: 133932 - DNA, 25 bp, probe
agacctcatgtgttgggttctctcc

SEQ ID NO: 133933 - DNA, 25 bp, probe
agacctgaatattggggtgcttctt

SEQ ID NO: 133934 - DNA, 25 bp, probe
agacgctgtacatgctgggcagcct

SEQ ID NO: 133935 - DNA, 25 bp, probe
agacgctgtacatgctgggcagcct

SEQ ID NO: 133936 - DNA, 25 bp, probe
agaccttagctgtcattgtgacccc

SEQ ID NO: 133937 - DNA, 25 bp, probe
agaccttcaaggacagagaccccag

SEQ ID NO: 133938 - DNA, 25 bp, probe
agaccagcaagggggcagaccccgc

SEQ ID NO: 133939 - DNA, 25 bp, probe
agaccagcaagggggcagaccccgc

SEQ ID NO: 133940 - DNA, 25 bp, probe
agaccacagggttcagcaggttccc

SEQ ID NO: 133941 - DNA, 25 bp, probe
agaccacagggttcagcaggttccc

SEQ ID NO: 133942 - DNA, 25 bp, probe
agaccacagggttcagcaggttccc

SEQ ID NO: 133943 - DNA, 25 bp, probe
agagccagaaaaatcgcaggattcc

SEQ ID NO: 133944 - DNA, 25 bp, probe
agaccagatctcaactcctgaaacc

SEQ ID NO: 133945 - DNA, 25 bp, probe
agaccagatctcaactcctgaaacc

SEQ ID NO: 133946 - DNA, 25 bp, probe
agacacacatatcccttcaaaaact

SEQ ID NO: 133947 - DNA, 25 bp, probe
agaacatctcatcccatatgcatga

SEQ ID NO: 133948 - DNA, 25 bp, probe
agaccatcctgctgttatgagttgc

SEQ ID NO: 133949 - DNA, 25 bp, probe
agacccctgaggagtgggtgctgcc

SEQ ID NO: 133950 - DNA, 25 bp, probe
agaactactgatagggctgggtctg

SEQ ID NO: 133951 - DNA, 25 bp, probe
agaacgtttgtgcgaggcagctctg

SEQ ID NO: 133952 - DNA, 25 bp, probe
agacagagtttgtgggtcagtctgt

SEQ ID NO: 133953 - DNA, 25 bp, probe
agactagatgggaggaggcgccgct

SEQ ID NO: 133954 - DNA, 25 bp, probe
agactagatgggaggaggcgccgct

SEQ ID NO: 133955 - DNA, 25 bp, probe
agactggtgggcaatgggcgtgttg

SEQ ID NO: 133956 - DNA, 25 bp, probe
agactctggggcagcagacatgctg

SEQ ID NO: 133957 - DNA, 25 bp, probe
agaccaaggcgcagagcaactatca

SEQ ID NO: 133958 - DNA, 25 bp, probe
agagcctaaggaacgacctacattt

SEQ ID NO: 133959 - DNA, 25 bp, probe
agagcctaaggaacgacctacattt

SEQ ID NO: 133960 - DNA, 25 bp, probe
agaccatgaaagggcgtctcccttt

SEQ ID NO: 133961 - DNA, 25 bp, probe
atgtctacagacctggagggaacag

SEQ ID NO: 133962 - DNA, 25 bp, probe
agacctagggctggactcaggagct

SEQ ID NO: 133963 - DNA, 25 bp, probe
agacccacagaggcaactcaggagt

SEQ ID NO: 133964 - DNA, 25 bp, probe
agactcaccagagatattgtggatg

SEQ ID NO: 133965 - DNA, 25 bp, probe
agactacacaggttgttatgtttgg

SEQ ID NO: 133966 - DNA, 25 bp, probe
agagctgcgaagcttgctctgctgt

SEQ ID NO: 133967 - DNA, 25 bp, probe
agagctgcgaagcttgctctgctgt

SEQ ID NO: 133968 - DNA, 25 bp, probe
agactctgaatgcatgacctttggt

SEQ ID NO: 133969 - DNA, 25 bp, probe
agacgcacacagctgagcacttagc

SEQ ID NO: 133970 - DNA, 25 bp, probe
agactgcaccctggagagcgtcagg

SEQ ID NO: 133971 - DNA, 25 bp, probe
agacattcctgcagagggtcggtgg

SEQ ID NO: 133972 - DNA, 25 bp, probe
agacctggacactagggtcaggcgg

SEQ ID NO: 133973 - DNA, 25 bp, probe
agacctggacactagggtcaggcgg

SEQ ID NO: 133974 - DNA, 25 bp, probe
aaattggacctcagtgttgtggaga

SEQ ID NO: 133975 - DNA, 25 bp, probe
agaaattccctgaggtgagtgaaga

SEQ ID NO: 133976 - DNA, 25 bp, probe
agaacttcccgtatatgaatgatat

SEQ ID NO: 133977 - DNA, 25 bp, probe
agaactatcccagcttacttgtgag

SEQ ID NO: 133978 - DNA, 25 bp, probe
agaaattcgacagcctcctggagtt

SEQ ID NO: 133979 - DNA, 25 bp, probe
agaaattcgacagcctcctggagtt

SEQ ID NO: 133980 - DNA, 25 bp, probe
agaacataaaccctccaagggatct

SEQ ID NO: 133981 - DNA, 25 bp, probe
agaacagcaaaatgcccttggcact

SEQ ID NO: 133982 - DNA, 25 bp, probe
agaaagacaccaagcctttagactc

SEQ ID NO: 133983 - DNA, 25 bp, probe
agaaaatcatcttggccactttaat

SEQ ID NO: 133984 - DNA, 25 bp, probe
agaaaatcatcttggccactttaat

SEQ ID NO: 133985 - DNA, 25 bp, probe
agaaaatcatgtacttcgcttaagt

SEQ ID NO: 133986 - DNA, 25 bp, probe
agaaaacatgggctactacattatg

SEQ ID NO: 133987 - DNA, 25 bp, probe
agaacaaagctgggatacggtgatt

SEQ ID NO: 133988 - DNA, 25 bp, probe
aaataccatctggccagacgggccc

SEQ ID NO: 133989 - DNA, 25 bp, probe
agaaacatcctggtagctgaggggc

SEQ ID NO: 133990 - DNA, 25 bp, probe
agacctcatcccactgtgggggagt

SEQ ID NO: 133991 - DNA, 25 bp, probe
agacctcatcccactgtgggggagt

SEQ ID NO: 133992 - DNA, 25 bp, probe
agacctgaccgctagtagggaggtt

SEQ ID NO: 133993 - DNA, 25 bp, probe
agacgcagaccccagtaagggcagc

SEQ ID NO: 133994 - DNA, 25 bp, probe
agagcgaggccagcctagaggtggc

SEQ ID NO: 133995 - DNA, 25 bp, probe
agaccggccaccggatggagaggcc

SEQ ID NO: 133996 - DNA, 25 bp, probe
agaccccagccaagggagatgaggc

SEQ ID NO: 133997 - DNA, 25 bp, probe
agaccccagccaagggagatgaggc

SEQ ID NO: 133998 - DNA, 25 bp, probe
agaccacctggcatgagggagaggg

SEQ ID NO: 133999 - DNA, 25 bp, probe
agacccggaatccagtgggcagagg

SEQ ID NO: 134000 - DNA, 25 bp, probe
agacccggaaactgatcagggcagc

SEQ ID NO: 134001 - DNA, 25 bp, probe
agacaaagggactaacatcgaagca

SEQ ID NO: 134002 - DNA, 25 bp, probe
cagaaacctaactcactcgtcaagg

SEQ ID NO: 134003 - DNA, 25 bp, probe
agaaaactaatctaaactgtagctg

SEQ ID NO: 134004 - DNA, 25 bp, probe
agaaaagccaactcgaagtcatcca

SEQ ID NO: 134005 - DNA, 25 bp, probe
agaaagaggacacccggtgtgcccg

SEQ ID NO: 134006 - DNA, 25 bp, probe
agaaagggtctagaatgctgatctc

SEQ ID NO: 134007 - DNA, 25 bp, probe
agaaaggaacttaatgacatacgat

SEQ ID NO: 134008 - DNA, 25 bp, probe
agaaagcgccgctcatgactatacg

SEQ ID NO: 134009 - DNA, 25 bp, probe
agaaactccaatgaaagacactgtt

SEQ ID NO: 134010 - DNA, 25 bp, probe
agactttggaatgaccagagacatc

SEQ ID NO: 134011 - DNA, 25 bp, probe
agaccgtggacagaccaataatgct

SEQ ID NO: 134012 - DNA, 25 bp, probe
agcacggggccagaggaggaacatg

SEQ ID NO: 134013 - DNA, 25 bp, probe
agcccctgcccatctgggaaaatac

SEQ ID NO: 134014 - DNA, 25 bp, probe
agcccctgcccatctgggaaaatac

SEQ ID NO: 134015 - DNA, 25 bp, probe
agacttcgcaaatctctggaaaata

SEQ ID NO: 134016 - DNA, 25 bp, probe
agaattccaaagaacggcctacata

SEQ ID NO: 134017 - DNA, 25 bp, probe
aaatactgaaaaacgaggccaatga

SEQ ID NO: 134018 - DNA, 25 bp, probe
aaatactacaagatcaatggcacca

SEQ ID NO: 134019 - DNA, 25 bp, probe
agacatttatcctttgtttcaccaa

SEQ ID NO: 134020 - DNA, 25 bp, probe
agactgtaagcctgtgtgtgccact

SEQ ID NO: 134021 - DNA, 25 bp, probe
agacgcaaggcctgtcaggcctgcc

SEQ ID NO: 134022 - DNA, 25 bp, probe
agaccagggcatgtgtggctcctgc

SEQ ID NO: 134023 - DNA, 25 bp, probe
agacataaggcagttttcactctga

SEQ ID NO: 134024 - DNA, 25 bp, probe
agaaagggcggtgaactctggctct

SEQ ID NO: 134025 - DNA, 25 bp, probe
aaaagggcaagtgcctctccagttt

SEQ ID NO: 134026 - DNA, 25 bp, probe
agaaaggccaagatttgcagaactt

SEQ ID NO: 134027 - DNA, 25 bp, probe
agaaagtgcaaagtagattcgtagt

SEQ ID NO: 134028 - DNA, 25 bp, probe
agaaaacagacctaatgctccttgt

SEQ ID NO: 134029 - DNA, 25 bp, probe
agaaaagctgacagattttttgcca

SEQ ID NO: 134030 - DNA, 25 bp, probe
agacataagctctgccacatttctt

SEQ ID NO: 134031 - DNA, 25 bp, probe
agacataagctctgccacatttctt

SEQ ID NO: 134032 - DNA, 25 bp, probe
agacttcaacaattgcacatcttca

SEQ ID NO: 134033 - DNA, 25 bp, probe
agacttcaacaattgcacatcttca

SEQ ID NO: 134034 - DNA, 25 bp, probe
agaagctcccgattgcaatactgaa

SEQ ID NO: 134035 - DNA, 25 bp, probe
agacagccatccatgtgcatgagca

SEQ ID NO: 134036 - DNA, 25 bp, probe
agacctgccacagggcagagcaggt

SEQ ID NO: 134037 - DNA, 25 bp, probe
agacactgcccaaggaccagtattt

SEQ ID NO: 134038 - DNA, 25 bp, probe
agacacatcaaatgccccgaattta

SEQ ID NO: 134039 - DNA, 25 bp, probe
agactccaaggagctactgacattc

SEQ ID NO: 134040 - DNA, 25 bp, probe
aattctcagggtgtacctttccagc

SEQ ID NO: 134041 - DNA, 25 bp, probe
agactctcaaggagtactttcttcc

SEQ ID NO: 134042 - DNA, 25 bp, probe
agactcttaggcagctatgggtttc

SEQ ID NO: 134043 - DNA, 25 bp, probe
agacttcggctgagcttggagggtg

SEQ ID NO: 134044 - DNA, 25 bp, probe
agactctccctatccggagagcagc

SEQ ID NO: 134045 - DNA, 25 bp, probe
agactgtatccttcacaggggaccc

SEQ ID NO: 134046 - DNA, 25 bp, probe
agaaggattttctaggaggcagccc

SEQ ID NO: 134047 - DNA, 25 bp, probe
agacagttttcctgaagctgctgcc

SEQ ID NO: 134048 - DNA, 25 bp, probe
agaatttacctcaagaactctttgc

SEQ ID NO: 134049 - DNA, 25 bp, probe
agacatgattcagccacagatacca

SEQ ID NO: 134050 - DNA, 25 bp, probe
agacatgattcagccacagatacca

SEQ ID NO: 134051 - DNA, 25 bp, probe
agaacatgatccaacctgatgccga

SEQ ID NO: 134052 - DNA, 25 bp, probe
agacagtcatgtgaccaggcgctgg

SEQ ID NO: 134053 - DNA, 25 bp, probe
agacaggcgctggacagaggggcag

SEQ ID NO: 134054 - DNA, 25 bp, probe
agacatgagcttgagcaggcagggg

SEQ ID NO: 134055 - DNA, 25 bp, probe
agactatgtggctgtggcacgagga

SEQ ID NO: 134056 - DNA, 25 bp, probe
agacctgtctgaactggaagagaag

SEQ ID NO: 134057 - DNA, 25 bp, probe
agacctgccataacactaatggaag

SEQ ID NO: 134058 - DNA, 25 bp, probe
agacctacaaactgaagtgcaaggc

SEQ ID NO: 134059 - DNA, 25 bp, probe
agacctacaaactgaagtgcaaggc

SEQ ID NO: 134060 - DNA, 25 bp, probe
agacccaaaaggcagaagcaaccca

SEQ ID NO: 134061 - DNA, 25 bp, probe
agacctacatacgggagaacttcct

SEQ ID NO: 134062 - DNA, 25 bp, probe
agccttacatactgggagaatttgt

SEQ ID NO: 134063 - DNA, 25 bp, probe
agcttgcaaccatggtaacgtttct

SEQ ID NO: 134064 - DNA, 25 bp, probe
agctacaacccacagtaccaatact

SEQ ID NO: 134065 - DNA, 25 bp, probe
agaaaacccagtcgaggctcaagtt

SEQ ID NO: 134066 - DNA, 25 bp, probe
agaaaacccagttagatgcaatttg

SEQ ID NO: 134067 - DNA, 25 bp, probe
agaaatacaggaatctgatatcaac

SEQ ID NO: 134068 - DNA, 25 bp, probe
agaaatagaggatttggcaaaagaa

SEQ ID NO: 134069 - DNA, 25 bp, probe
agcaaccaagtaccctgctaaatcc

SEQ ID NO: 134070 - DNA, 25 bp, probe
agcaaaaagtggcacgctacttccc

SEQ ID NO: 134071 - DNA, 25 bp, probe
agcaaaaagtggcacgctacttccc

SEQ ID NO: 134072 - DNA, 25 bp, probe
agaaatctggcatcatacctacctc

SEQ ID NO: 134073 - DNA, 25 bp, probe
agaagttacttcacatttctcatcc

SEQ ID NO: 134074 - DNA, 25 bp, probe
agaacttatctactggatttccgta

SEQ ID NO: 134075 - DNA, 25 bp, probe
agaacttatctactggatttccgta

SEQ ID NO: 134076 - DNA, 25 bp, probe
agaagttaatagctatcttccttaa

SEQ ID NO: 134077 - DNA, 25 bp, probe
agaaagaattactaaatgccctata

SEQ ID NO: 134078 - DNA, 25 bp, probe
agaccagaattatctttgtactaaa

SEQ ID NO: 134079 - DNA, 25 bp, probe
agaccaagaccagctttgctgcctc

SEQ ID NO: 134080 - DNA, 25 bp, probe
agaccaagaccaatgggcagctggc

SEQ ID NO: 134081 - DNA, 25 bp, probe
agaccaagaccagggccacagatgg

SEQ ID NO: 134082 - DNA, 25 bp, probe
agaactccaccaggtgccacagttt

SEQ ID NO: 134083 - DNA, 25 bp, probe
agacacttacaaagctgcctcactt

SEQ ID NO: 134084 - DNA, 25 bp, probe
agaccctatccaagctgcacttggt

SEQ ID NO: 134085 - DNA, 25 bp, probe
agaccacttctcagaaaatgcagca

SEQ ID NO: 134086 - DNA, 25 bp, probe
agactacttcactgctacagagcca

SEQ ID NO: 134087 - DNA, 25 bp, probe
agactacttcactgctacagagcca

SEQ ID NO: 134088 - DNA, 25 bp, probe
agacgacttactagatctcatacaa

SEQ ID NO: 134089 - DNA, 25 bp, probe
agaccatcaatacagtcgcatacca

SEQ ID NO: 134090 - DNA, 25 bp, probe
agacctcctgagaataggcatcacc

SEQ ID NO: 134091 - DNA, 25 bp, probe
agacctggctggcaacgagcagcgc

SEQ ID NO: 134092 - DNA, 25 bp, probe
agacctggctggcaacgagcagcgc

SEQ ID NO: 134093 - DNA, 25 bp, probe
agaccggcgaggagggcatgccgct

SEQ ID NO: 134094 - DNA, 25 bp, probe
agaacagcggaggccgggtgctggt

SEQ ID NO: 134095 - DNA, 25 bp, probe
agaacagccgtgtcatcgtcatgac

SEQ ID NO: 134096 - DNA, 25 bp, probe
agaaaccaggtcacatggaccacag

SEQ ID NO: 134097 - DNA, 25 bp, probe
agaaaacaaactgcttgacccagga

SEQ ID NO: 134098 - DNA, 25 bp, probe
agcaaaaacagaagtcttaccagtg

SEQ ID NO: 134099 - DNA, 25 bp, probe
agaaataaaatactggcttccagat

SEQ ID NO: 134100 - DNA, 25 bp, probe
agcaagatgaaacagggcaccccag

SEQ ID NO: 134101 - DNA, 25 bp, probe
agaaacaaggctcggtcaccgtcag

SEQ ID NO: 134102 - DNA, 25 bp, probe
agaaacaaggctcggtcaccgtcag

SEQ ID NO: 134103 - DNA, 25 bp, probe
agaaacatcagcgtttctactcctc

SEQ ID NO: 134104 - DNA, 25 bp, probe
agaaacacattgttatcttcgccct

SEQ ID NO: 134105 - DNA, 25 bp, probe
agacaaaagcagtttctctccaact

SEQ ID NO: 134106 - DNA, 25 bp, probe
agacaagacataggtagccgtagtt

SEQ ID NO: 134107 - DNA, 25 bp, probe
agacagccacagtagaagcggtaga

SEQ ID NO: 134108 - DNA, 25 bp, probe
agaacgcacaggctattagtcatga

SEQ ID NO: 134109 - DNA, 25 bp, probe
agacctcggtctaattcaactgagt

SEQ ID NO: 134110 - DNA, 25 bp, probe
agacctcggtctaattcaactgagt

SEQ ID NO: 134111 - DNA, 25 bp, probe
agaccgcggcctaataatgagtgat

SEQ ID NO: 134112 - DNA, 25 bp, probe
agacctaggcagtctgcaaatgagg

SEQ ID NO: 134113 - DNA, 25 bp, probe
agacccggctgagtgcagacatggc

SEQ ID NO: 134114 - DNA, 25 bp, probe
agactcatcgccaaagcatcctggc

SEQ ID NO: 134115 - DNA, 25 bp, probe
agaccatccggaagatccacgagca

SEQ ID NO: 134116 - DNA, 25 bp, probe
agacgtctaggaacacaccagagag

SEQ ID NO: 134117 - DNA, 25 bp, probe
agacgccggtggacagtcctgatga

SEQ ID NO: 134118 - DNA, 25 bp, probe
agacctttgcatgaagtgctctgag

SEQ ID NO: 134119 - DNA, 25 bp, probe
agaccctgcagcatgacaagctcgt

SEQ ID NO: 134120 - DNA, 25 bp, probe
agacccaccttcaagcagctggtgg

SEQ ID NO: 134121 - DNA, 25 bp, probe
agacacgcacaccaacgagctggtg

SEQ ID NO: 134122 - DNA, 25 bp, probe
agacacgcacaccaacgagctggtg

SEQ ID NO: 134123 - DNA, 25 bp, probe
agacgccaaccaacgagctgagcgt

SEQ ID NO: 134124 - DNA, 25 bp, probe
agacgattacaagcggaggcgctgc

SEQ ID NO: 134125 - DNA, 25 bp, probe
agacgattacaagcggaggcgctgc

SEQ ID NO: 134126 - DNA, 25 bp, probe
agacgacatcaatttcagtgaggat

SEQ ID NO: 134127 - DNA, 25 bp, probe
agacgacatcaatttcagtgaggat

SEQ ID NO: 134128 - DNA, 25 bp, probe
agacgaataccttctgtgggacacc

SEQ ID NO: 134129 - DNA, 25 bp, probe
agacgtgtggtcgtttggagtcctc

SEQ ID NO: 134130 - DNA, 25 bp, probe
agaagtgcagagagtaaggtgtcct

SEQ ID NO: 134131 - DNA, 25 bp, probe
agacgacagcagtgaggcggactcc

SEQ ID NO: 134132 - DNA, 25 bp, probe
agacagacaacatgaaccagatcta

SEQ ID NO: 134133 - DNA, 25 bp, probe
agacagaaagcagaacagtgattac

SEQ ID NO: 134134 - DNA, 25 bp, probe
agacaggaagcccacctggcatttg

SEQ ID NO: 134135 - DNA, 25 bp, probe
agactgaacttgaacactgacattt

SEQ ID NO: 134136 - DNA, 25 bp, probe
agactgaacttgaacactgacattt

SEQ ID NO: 134137 - DNA, 25 bp, probe
agactaacttgaaagcaggcacagt

SEQ ID NO: 134138 - DNA, 25 bp, probe
agacagaattcttacatgccccgtc

SEQ ID NO: 134139 - DNA, 25 bp, probe
agacaaatgacttacagatcccccg

SEQ ID NO: 134140 - DNA, 25 bp, probe
agacccagagctgagcagctctccc

SEQ ID NO: 134141 - DNA, 25 bp, probe
agacccagagctgagcagctctccc

SEQ ID NO: 134142 - DNA, 25 bp, probe
agacctagcagtgacatctcattgt

SEQ ID NO: 134143 - DNA, 25 bp, probe
agacctagcagtgacatctcattgt

SEQ ID NO: 134144 - DNA, 25 bp, probe
agcaccaggcatagccacttttgcc

SEQ ID NO: 134145 - DNA, 25 bp, probe
agcaccaggcatagccacttttgcc

SEQ ID NO: 134146 - DNA, 25 bp, probe
agcaccaggcatagccacttttgcc

SEQ ID NO: 134147 - DNA, 25 bp, probe
agactcaggcgatgtgctttatggc

SEQ ID NO: 134148 - DNA, 25 bp, probe
agaccggccagattgttgctattaa

SEQ ID NO: 134149 - DNA, 25 bp, probe
agaccctgcaagttgattctcattg

SEQ ID NO: 134150 - DNA, 25 bp, probe
agacttctaatgtatttctcttacc

SEQ ID NO: 134151 - DNA, 25 bp, probe
agacttagacatacaatatacttac

SEQ ID NO: 134152 - DNA, 25 bp, probe
agactgtggccattaagaccttaaa

SEQ ID NO: 134153 - DNA, 25 bp, probe
agaagtggcctcaaaggcacttaat

SEQ ID NO: 134154 - DNA, 25 bp, probe
aaaatggggccaatgacacctacct

SEQ ID NO: 134155 - DNA, 25 bp, probe
agacagtaggtgcttaccctgaact

SEQ ID NO: 134156 - DNA, 25 bp, probe
agactataagctgtacccattgtac

SEQ ID NO: 134157 - DNA, 25 bp, probe
agactataagccctatccgatgtac

SEQ ID NO: 134158 - DNA, 25 bp, probe
agactataagccctatccgatgtac

SEQ ID NO: 134159 - DNA, 25 bp, probe
agacttatcaccattcttatgtcac

SEQ ID NO: 134160 - DNA, 25 bp, probe
agacttcacatggcttttctttcaa

SEQ ID NO: 134161 - DNA, 25 bp, probe
agactaccagatgttactagtgcta

SEQ ID NO: 134162 - DNA, 25 bp, probe
agactaccagatgttactagtgcta

SEQ ID NO: 134163 - DNA, 25 bp, probe
agacttacgtcatttaatgagcctg

SEQ ID NO: 134164 - DNA, 25 bp, probe
agacttatcagtctttatggaggaa

SEQ ID NO: 134165 - DNA, 25 bp, probe
agcaccgacaatctttgattactga

SEQ ID NO: 134166 - DNA, 25 bp, probe
agcagccggaacctgcattgtttta

SEQ ID NO: 134167 - DNA, 25 bp, probe
agcatgggggcccagtgcttttaca

SEQ ID NO: 134168 - DNA, 25 bp, probe
agacaggaggactatgtgtttctaa

SEQ ID NO: 134169 - DNA, 25 bp, probe
agacagtcggtcatttttcacaagc

SEQ ID NO: 134170 - DNA, 25 bp, probe
agacattgtgcgacttcattttcct

SEQ ID NO: 134171 - DNA, 25 bp, probe
agacattgctctatgtctgccttcg

SEQ ID NO: 134172 - DNA, 25 bp, probe
agacattgctctatgtctgccttcg

SEQ ID NO: 134173 - DNA, 25 bp, probe
agacctcttatcatgagcagctgtc

SEQ ID NO: 134174 - DNA, 25 bp, probe
agaccctctgcacatgaggctggtt

SEQ ID NO: 134175 - DNA, 25 bp, probe
agaccctctgcacatgaggctggtt

SEQ ID NO: 134176 - DNA, 25 bp, probe
agacgtctgtcaggggcttggattt

SEQ ID NO: 134177 - DNA, 25 bp, probe
agacgcgttaagcgcattggtcctt

SEQ ID NO: 134178 - DNA, 25 bp, probe
agaagctgttatgtcctgtttccat

SEQ ID NO: 134179 - DNA, 25 bp, probe
agaagcaggttccctgttttgcctc

SEQ ID NO: 134180 - DNA, 25 bp, probe
agactgcaggattttcacttttgtt

SEQ ID NO: 134181 - DNA, 25 bp, probe
agactggtgcatttacagctgttaa

SEQ ID NO: 134182 - DNA, 25 bp, probe
agactggtgcatttacagctgttaa

SEQ ID NO: 134183 - DNA, 25 bp, probe
agacagagtgtatcaccttcttgaa

SEQ ID NO: 134184 - DNA, 25 bp, probe
agaaatgattcatcggttttggtat

SEQ ID NO: 134185 - DNA, 25 bp, probe
agaaatgattcatcggttttggtat

SEQ ID NO: 134186 - DNA, 25 bp, probe
agaaatttcacagcagtttattaat

SEQ ID NO: 134187 - DNA, 25 bp, probe
agaaacaatattacagtttttatca

SEQ ID NO: 134188 - DNA, 25 bp, probe
aaaccaaagttacatttcctgacag

SEQ ID NO: 134189 - DNA, 25 bp, probe
aaactcacaaggaggagttacgtag

SEQ ID NO: 134190 - DNA, 25 bp, probe
agacccgaagtgaggagtcccaagg

SEQ ID NO: 134191 - DNA, 25 bp, probe
agaccgatatttaaggaccccagag

SEQ ID NO: 134192 - DNA, 25 bp, probe
agaactgtttagagccaggtccagg

SEQ ID NO: 134193 - DNA, 25 bp, probe
agaacggtgaggggccagggcaaag

SEQ ID NO: 134194 - DNA, 25 bp, probe
aaatgagggtgggtccttctgcaga

SEQ ID NO: 134195 - DNA, 25 bp, probe
agaaagggatgtgcccttctcgtaa

SEQ ID NO: 134196 - DNA, 25 bp, probe
agaaaatgtttctctctttttgaag

SEQ ID NO: 134197 - DNA, 25 bp, probe
cagaaacggtcctctttattgtcaa

SEQ ID NO: 134198 - DNA, 25 bp, probe
agaaggtggtccagttttcgcagca

SEQ ID NO: 134199 - DNA, 25 bp, probe
agaagcttgtttaagtttacacagc

SEQ ID NO: 134200 - DNA, 25 bp, probe
agaagcctgctttgaaaattttcca

SEQ ID NO: 134201 - DNA, 25 bp, probe
agacatgactgctcgaatcagcatg

SEQ ID NO: 134202 - DNA, 25 bp, probe
agaatgagatgatcgaatctgggtg

SEQ ID NO: 134203 - DNA, 25 bp, probe
agaaagtgatttactcctggttagt

SEQ ID NO: 134204 - DNA, 25 bp, probe
agaaagtgatttactcctggttagt

SEQ ID NO: 134205 - DNA, 25 bp, probe
agaaagtcttgcagaccgagtctac

SEQ ID NO: 134206 - DNA, 25 bp, probe
agaaagtggctgtcagaccgagagt

SEQ ID NO: 134207 - DNA, 25 bp, probe
agaaagtggccatgccaccctgttt

SEQ ID NO: 134208 - DNA, 25 bp, probe
agaaagagccgaaagcaccactgct

SEQ ID NO: 134209 - DNA, 25 bp, probe
agaaatacctgattctcccaatctg

SEQ ID NO: 134210 - DNA, 25 bp, probe
agaaatcctagatctcagaatcaca

SEQ ID NO: 134211 - DNA, 25 bp, probe
agaaatgccctatctgcaaagcaga

SEQ ID NO: 134212 - DNA, 25 bp, probe
agaaatgactacactcaaggatgtg

SEQ ID NO: 134213 - DNA, 25 bp, probe
agaactgaggactattcaagcgatg

SEQ ID NO: 134214 - DNA, 25 bp, probe
agaactggagtcttcataacgctaa

SEQ ID NO: 134215 - DNA, 25 bp, probe
agaagaggagatcatgcaaatttta

SEQ ID NO: 134216 - DNA, 25 bp, probe
agaagagaatattactggtttctac

SEQ ID NO: 134217 - DNA, 25 bp, probe
agacgagatatgttacgggaattac

SEQ ID NO: 134218 - DNA, 25 bp, probe
agcataagaaggaggcggaactgac

SEQ ID NO: 134219 - DNA, 25 bp, probe
agaaagaagggatgggcagcagtgg

SEQ ID NO: 134220 - DNA, 25 bp, probe
agaaagaagggatgggcagcagtgg

SEQ ID NO: 134221 - DNA, 25 bp, probe
agaaagtaggtgtgtggctgcggtg

SEQ ID NO: 134222 - DNA, 25 bp, probe
agaaagggtgtgggtacactggctg

SEQ ID NO: 134223 - DNA, 25 bp, probe
agaagaacggggctgagcactcgct

SEQ ID NO: 134224 - DNA, 25 bp, probe
agaagaacggggctgagcactcgct

SEQ ID NO: 134225 - DNA, 25 bp, probe
agaacatattcggggagagccgggc

SEQ ID NO: 134226 - DNA, 25 bp, probe
agaacagtaagcgaaagagccggcc

SEQ ID NO: 134227 - DNA, 25 bp, probe
agaaagttaccattcagaggtgcag

SEQ ID NO: 134228 - DNA, 25 bp, probe
agaaagttgagtgtcaggggacatg

SEQ ID NO: 134229 - DNA, 25 bp, probe
agaaaactggttccagagtgggata

SEQ ID NO: 134230 - DNA, 25 bp, probe
agaagggctagaacctggagggcta

SEQ ID NO: 134231 - DNA, 25 bp, probe
agaagccccagaagccgtggtggga

SEQ ID NO: 134232 - DNA, 25 bp, probe
agaagtccaagaggggccgtgggcg

SEQ ID NO: 134233 - DNA, 25 bp, probe
agaagtccaagaggggccgtgggcg

SEQ ID NO: 134234 - DNA, 25 bp, probe
agaaaccattctgggagccgtggat

SEQ ID NO: 134235 - DNA, 25 bp, probe
agaaaacatgtctgtgaacttgatg

SEQ ID NO: 134236 - DNA, 25 bp, probe
agaatggacagtgaggacagttatg

SEQ ID NO: 134237 - DNA, 25 bp, probe
aaatgctccagtcacaccttatagg

SEQ ID NO: 134238 - DNA, 25 bp, probe
agacattcaagacaacctgctacaa

SEQ ID NO: 134239 - DNA, 25 bp, probe
agacattctgtacatatcctgtgaa

SEQ ID NO: 134240 - DNA, 25 bp, probe
agacagatactagatattttgatga

SEQ ID NO: 134241 - DNA, 25 bp, probe
agacagtcctgtcgattgtgttatt

SEQ ID NO: 134242 - DNA, 25 bp, probe
agacactgcgtgcaatgttgttatc

SEQ ID NO: 134243 - DNA, 25 bp, probe
agacagatgcagatacagcttgtat

SEQ ID NO: 134244 - DNA, 25 bp, probe
agacgcaggcacaactctttatacg

SEQ ID NO: 134245 - DNA, 25 bp, probe
agaactggacattccatggtcccgg

SEQ ID NO: 134246 - DNA, 25 bp, probe
agaactgtcaccctgaggtaacagg

SEQ ID NO: 134247 - DNA, 25 bp, probe
agaacgaacactaggcggcaccgtt

SEQ ID NO: 134248 - DNA, 25 bp, probe
agacacaggccagagggtccctgtc

SEQ ID NO: 134249 - DNA, 25 bp, probe
agacacaggccagagggtccctgtc

SEQ ID NO: 134250 - DNA, 25 bp, probe
agaacaagcctgttgggttcctggt

SEQ ID NO: 134251 - DNA, 25 bp, probe
agcagaattgggagggactttgtgg

SEQ ID NO: 134252 - DNA, 25 bp, probe
agcagaattgggagggactttgtgg

SEQ ID NO: 134253 - DNA, 25 bp, probe
agcagccgtgggagcagtacatttt

SEQ ID NO: 134254 - DNA, 25 bp, probe
agacacgctgcagatcgaggacttt

SEQ ID NO: 134255 - DNA, 25 bp, probe
agaagcaccactacagggagctccc

SEQ ID NO: 134256 - DNA, 25 bp, probe
agaagccacactccattgtggaccc

SEQ ID NO: 134257 - DNA, 25 bp, probe
agcaacaacgtatgtggagaggccc

SEQ ID NO: 134258 - DNA, 25 bp, probe
agcaacaacgtatgtggagaggccc

SEQ ID NO: 134259 - DNA, 25 bp, probe
agacaccaaatttggcggaggggtg

SEQ ID NO: 134260 - DNA, 25 bp, probe
agacaccaaatttggcggaggggtg

SEQ ID NO: 134261 - DNA, 25 bp, probe
agaactcaaatgctgggggaggtgg

SEQ ID NO: 134262 - DNA, 25 bp, probe
agaactcaaatgctgggggaggtgg

SEQ ID NO: 134263 - DNA, 25 bp, probe
agaactatataggctgtgaaaacgc

SEQ ID NO: 134264 - DNA, 25 bp, probe
agaactttcaccttcatatatttgt

SEQ ID NO: 134265 - DNA, 25 bp, probe
agaaattaagccttctgctgctttt

SEQ ID NO: 134266 - DNA, 25 bp, probe
agaaaccaagcatctttgctgttgt

SEQ ID NO: 134267 - DNA, 25 bp, probe
agaagaccaggctacaaggtgtttt

SEQ ID NO: 134268 - DNA, 25 bp, probe
cgaaccggccaagaggttctccatc

SEQ ID NO: 134269 - DNA, 25 bp, probe
aaatccggtactgatgtcttccacc

SEQ ID NO: 134270 - DNA, 25 bp, probe
aaatccggtactgatgtcttccacc

SEQ ID NO: 134271 - DNA, 25 bp, probe
agaatccggattgctgaatcttccc

SEQ ID NO: 134272 - DNA, 25 bp, probe
agaaccaatgttctcttttcacgct

SEQ ID NO: 134273 - DNA, 25 bp, probe
agaacccatttcttattctcctaat

SEQ ID NO: 134274 - DNA, 25 bp, probe
agacatactcattcatttgatttaa

SEQ ID NO: 134275 - DNA, 25 bp, probe
agacatgcataattgatggtttcta

SEQ ID NO: 134276 - DNA, 25 bp, probe
agacatgcataattgatggtttcta

SEQ ID NO: 134277 - DNA, 25 bp, probe
agacaatactcttgtgttacatcat

SEQ ID NO: 134278 - DNA, 25 bp, probe
agcagaatatatattttacctatca

SEQ ID NO: 134279 - DNA, 25 bp, probe
agcaaaataattgttcagcttccaa

SEQ ID NO: 134280 - DNA, 25 bp, probe
agaacaatggatcggcttccttacc

SEQ ID NO: 134281 - DNA, 25 bp, probe
agaacaaatgtgtgcattcaccccc

SEQ ID NO: 134282 - DNA, 25 bp, probe
aaatatctgttctgaaaccccactt

SEQ ID NO: 134283 - DNA, 25 bp, probe
agaaatcggatctcaagtacccact

SEQ ID NO: 134284 - DNA, 25 bp, probe
agaaacttttcctatgtgtctccag

SEQ ID NO: 134285 - DNA, 25 bp, probe
agaaacagtgttgccatattctcca

SEQ ID NO: 134286 - DNA, 25 bp, probe
agaaagcagtcttccagttctacca

SEQ ID NO: 134287 - DNA, 25 bp, probe
agaatgacgatacccgtgactcagc

SEQ ID NO: 134288 - DNA, 25 bp, probe
agaaagcactagtacggacacgccc

SEQ ID NO: 134289 - DNA, 25 bp, probe
agaaagcactagtacggacacgccc

SEQ ID NO: 134290 - DNA, 25 bp, probe
agacgagaaagatctgccactccct

SEQ ID NO: 134291 - DNA, 25 bp, probe
agacagagacaccattctggacccc

SEQ ID NO: 134292 - DNA, 25 bp, probe
agaaggacgagttcgacatcccgga

SEQ ID NO: 134293 - DNA, 25 bp, probe
agaaggacgagttcgacatcccgga

SEQ ID NO: 134294 - DNA, 25 bp, probe
agaaggaaattctcagcccaaggga

SEQ ID NO: 134295 - DNA, 25 bp, probe
agaaggcgaaagtccagctgccaag

SEQ ID NO: 134296 - DNA, 25 bp, probe
agaaggtcttcatccagatgccaaa

SEQ ID NO: 134297 - DNA, 25 bp, probe
agacatgtttgacttcctgtccaaa

SEQ ID NO: 134298 - DNA, 25 bp, probe
agactgtggagactgctcctgagcc

SEQ ID NO: 134299 - DNA, 25 bp, probe
agactgggagcagtgctggtgcctg

SEQ ID NO: 134300 - DNA, 25 bp, probe
agactgggagcagtgctggtgcctg

SEQ ID NO: 134301 - DNA, 25 bp, probe
agactgtggagtgcggagcctcatt

SEQ ID NO: 134302 - DNA, 25 bp, probe
agactcgagagggctgagcccctcc

SEQ ID NO: 134303 - DNA, 25 bp, probe
agactccaggtgaggctgctgtcat

SEQ ID NO: 134304 - DNA, 25 bp, probe
agactccctgaaaggcgctacattg

SEQ ID NO: 134305 - DNA, 25 bp, probe
agactgggcgaaaggctgtccggag

SEQ ID NO: 134306 - DNA, 25 bp, probe
agactgggaaaaggccgcagggcag

SEQ ID NO: 134307 - DNA, 25 bp, probe
agactgggaaaaggccgcagggcag

SEQ ID NO: 134308 - DNA, 25 bp, probe
agacaggtaaaagctccaggtgtgg

SEQ ID NO: 134309 - DNA, 25 bp, probe
agaagccggtcaagttccaggttga

SEQ ID NO: 134310 - DNA, 25 bp, probe
agaacctcgtgcagtgggaaatgga

SEQ ID NO: 134311 - DNA, 25 bp, probe
agaaaatcgtgaactgggacctgaa

SEQ ID NO: 134312 - DNA, 25 bp, probe
agaacaatcctgaaccaggcctgtc

SEQ ID NO: 134313 - DNA, 25 bp, probe
agaatcaacccaactgaagcatttc

SEQ ID NO: 134314 - DNA, 25 bp, probe
agaaaagaaacactgaatcatttta

SEQ ID NO: 134315 - DNA, 25 bp, probe
agaaaccaaacacagctaatgctat

SEQ ID NO: 134316 - DNA, 25 bp, probe
agaaactgcaaccaacagtaaggac

SEQ ID NO: 134317 - DNA, 25 bp, probe
agaaccgctacacagcggaagaggc

SEQ ID NO: 134318 - DNA, 25 bp, probe
agaaaccaccataacgagaaagctg

SEQ ID NO: 134319 - DNA, 25 bp, probe
agaaaccaccataacgagaaagctg

SEQ ID NO: 134320 - DNA, 25 bp, probe
agacaagcccaatggcatgaaacgg

SEQ ID NO: 134321 - DNA, 25 bp, probe
agacaatgcctatgtggctgatggc

SEQ ID NO: 134322 - DNA, 25 bp, probe
agaaagcattttaggccagccatgg

SEQ ID NO: 134323 - DNA, 25 bp, probe
agaaagcattttaggccagccatgg

SEQ ID NO: 134324 - DNA, 25 bp, probe
agacacagtctagaggtcctgatgg

SEQ ID NO: 134325 - DNA, 25 bp, probe
agaaaggtggacatgtcctgaagga

SEQ ID NO: 134326 - DNA, 25 bp, probe
agaagctgggagatgtgtcctggaa

SEQ ID NO: 134327 - DNA, 25 bp, probe
agacaggaggaacttctcctcctcc

SEQ ID NO: 134328 - DNA, 25 bp, probe
agacaaggtgcaaagttccccatca

SEQ ID NO: 134329 - DNA, 25 bp, probe
agacaaggtgcaaagttccccatca

SEQ ID NO: 134330 - DNA, 25 bp, probe
agacagggaattaggcccccatcat

SEQ ID NO: 134331 - DNA, 25 bp, probe
agcactttaataatgcgctccccaa

SEQ ID NO: 134332 - DNA, 25 bp, probe
agcactttaataatgcgctccccaa

SEQ ID NO: 134333 - DNA, 25 bp, probe
agacatgttcaattacttcctctct

SEQ ID NO: 134334 - DNA, 25 bp, probe
agacatttgactgtcttcctcttgc

SEQ ID NO: 134335 - DNA, 25 bp, probe
agacagacatgagtcttcacccgct

SEQ ID NO: 134336 - DNA, 25 bp, probe
agacatgaatgcacactagcctctc

SEQ ID NO: 134337 - DNA, 25 bp, probe
agaaaatccccaactatgcatgcca

SEQ ID NO: 134338 - DNA, 25 bp, probe
agaagagatgctgccatttaacccc

SEQ ID NO: 134339 - DNA, 25 bp, probe
agaagagagcccttggtaaccagtt

SEQ ID NO: 134340 - DNA, 25 bp, probe
agaaagctgacgattgtgaagccag

SEQ ID NO: 134341 - DNA, 25 bp, probe
agaaactgattggattgatgaacaa

SEQ ID NO: 134342 - DNA, 25 bp, probe
agaaacgtgtttagtatcaaaagag

SEQ ID NO: 134343 - DNA, 25 bp, probe
agaaatctggtcttgttagaaaaca

SEQ ID NO: 134344 - DNA, 25 bp, probe
agaaatgtggccatgctttaaacct

SEQ ID NO: 134345 - DNA, 25 bp, probe
agaatattggccctttctaacctat

SEQ ID NO: 134346 - DNA, 25 bp, probe
agaatctatggcagtgtttgaacag

SEQ ID NO: 134347 - DNA, 25 bp, probe
agacatcaatgttgggtttgacagt

SEQ ID NO: 134348 - DNA, 25 bp, probe
agacatagatgctcccgttacagct

SEQ ID NO: 134349 - DNA, 25 bp, probe
agaaaatgaaccgctctgtcagcct

SEQ ID NO: 134350 - DNA, 25 bp, probe
agaaacaggatggctttctgtagcc

SEQ ID NO: 134351 - DNA, 25 bp, probe
agaagcaagtcaggtttcatgtaac

SEQ ID NO: 134352 - DNA, 25 bp, probe
agaagaacggcgtggcttacctcta

SEQ ID NO: 134353 - DNA, 25 bp, probe
agaagtggcgggagacctagcctgc

SEQ ID NO: 134354 - DNA, 25 bp, probe
agaagtggctggctatagtcccgat

SEQ ID NO: 134355 - DNA, 25 bp, probe
agaagtggctggctatagtcccgat

SEQ ID NO: 134356 - DNA, 25 bp, probe
agaaatggttggcctgagcaaccta

SEQ ID NO: 134357 - DNA, 25 bp, probe
agaacctggagggctagaacctaga

SEQ ID NO: 134358 - DNA, 25 bp, probe
agaacctggagggctagaacctgga

SEQ ID NO: 134359 - DNA, 25 bp, probe
agaaccttctgatcagtgacacggg

SEQ ID NO: 134360 - DNA, 25 bp, probe
agacatttactatcactgcacctga

SEQ ID NO: 134361 - DNA, 25 bp, probe
agacttgtgattagagactgccagg

SEQ ID NO: 134362 - DNA, 25 bp, probe
agacactgagcttctgagacatccc

SEQ ID NO: 134363 - DNA, 25 bp, probe
agacatctgtctggcgatcagcatc

SEQ ID NO: 134364 - DNA, 25 bp, probe
agacactccagggatcagtagttcc

SEQ ID NO: 134365 - DNA, 25 bp, probe
agaacccatgtgatcactaataaaa

SEQ ID NO: 134366 - DNA, 25 bp, probe
agaacccaggcaacaggaagagaaa

SEQ ID NO: 134367 - DNA, 25 bp, probe
agaaccaaaaactgagtgtgagaga

SEQ ID NO: 134368 - DNA, 25 bp, probe
agaacgggaaaggcgagtcagggag

SEQ ID NO: 134369 - DNA, 25 bp, probe
agaacggtgttgcatcgatacaggc

SEQ ID NO: 134370 - DNA, 25 bp, probe
agacacggctgggttggatatgcct

SEQ ID NO: 134371 - DNA, 25 bp, probe
agacagccctgtgattgttatgatc

SEQ ID NO: 134372 - DNA, 25 bp, probe
agactgcctgtctcatatgtctatc

SEQ ID NO: 134373 - DNA, 25 bp, probe
agacagcctgtctacatcattatgg

SEQ ID NO: 134374 - DNA, 25 bp, probe
agacagcactgtcaacactgggcct

SEQ ID NO: 134375 - DNA, 25 bp, probe
agacagcactgtcaacactgggcct

SEQ ID NO: 134376 - DNA, 25 bp, probe
agacagcactgaagtcaagagggac

SEQ ID NO: 134377 - DNA, 25 bp, probe
agacagcagctatgccaacgttcaa

SEQ ID NO: 134378 - DNA, 25 bp, probe
agaagcagctgaagcagcccgcata

SEQ ID NO: 134379 - DNA, 25 bp, probe
agacacgatgagaagccctctgaca

SEQ ID NO: 134380 - DNA, 25 bp, probe
agacatctatgaaacggattactac

SEQ ID NO: 134381 - DNA, 25 bp, probe
agcaccttcaaagggacacctacgg

SEQ ID NO: 134382 - DNA, 25 bp, probe
agacaagtcgagcggcaagcactac

SEQ ID NO: 134383 - DNA, 25 bp, probe
agacaagtcgagcggcaagcactac

SEQ ID NO: 134384 - DNA, 25 bp, probe
agacaatggatgccggctgcaagcc

SEQ ID NO: 134385 - DNA, 25 bp, probe
agacatatagctcagatggaatgct

SEQ ID NO: 134386 - DNA, 25 bp, probe
agactcaccatcgagggagtgctgg

SEQ ID NO: 134387 - DNA, 25 bp, probe
agacaacattccgttggcagctggc

SEQ ID NO: 134388 - DNA, 25 bp, probe
agaaagcattccaaaagcttgtgcg

SEQ ID NO: 134389 - DNA, 25 bp, probe
agaaagcattccaaaagcttgtgcg

SEQ ID NO: 134390 - DNA, 25 bp, probe
agaacaggttccagagcttgatctg

SEQ ID NO: 134391 - DNA, 25 bp, probe
agaaagtttcgcagccgctggcttt

SEQ ID NO: 134392 - DNA, 25 bp, probe
agaattatttaggggcctggcttgc

SEQ ID NO: 134393 - DNA, 25 bp, probe
agaatatagtactcggtcaggtatg

SEQ ID NO: 134394 - DNA, 25 bp, probe
agaacatagccctggcctaggactc

SEQ ID NO: 134395 - DNA, 25 bp, probe
aaaataccttcagcctaaggcacaa

SEQ ID NO: 134396 - DNA, 25 bp, probe
acaagaaccttaccttcaaggagca

SEQ ID NO: 134397 - DNA, 25 bp, probe
agaagggccttctgattccgaagac

SEQ ID NO: 134398 - DNA, 25 bp, probe
agaagggccttctgattccgaagac

SEQ ID NO: 134399 - DNA, 25 bp, probe
agaaggtacccatgttctcgatagg

SEQ ID NO: 134400 - DNA, 25 bp, probe
agaagcattacccataggtcttaag

SEQ ID NO: 134401 - DNA, 25 bp, probe
agaaaataacgcttgggcattaaat

SEQ ID NO: 134402 - DNA, 25 bp, probe
agaaatatttccttaattctagaga

SEQ ID NO: 134403 - DNA, 25 bp, probe
agaaaagttcaatactcttgaaatg

SEQ ID NO: 134404 - DNA, 25 bp, probe
agaaacttgtaatggtctctgaaaa

SEQ ID NO: 134405 - DNA, 25 bp, probe
agaacctggtgagttgttttgaaca

SEQ ID NO: 134406 - DNA, 25 bp, probe
agaactcaggggatttctatgacct

SEQ ID NO: 134407 - DNA, 25 bp, probe
agaactactgggcatgtgctttggg

SEQ ID NO: 134408 - DNA, 25 bp, probe
agacagacatctgggccatcggtgt

SEQ ID NO: 134409 - DNA, 25 bp, probe
agacagaactgtccacatctgcctc

SEQ ID NO: 134410 - DNA, 25 bp, probe
agacagaactgtccacatctgcctc

SEQ ID NO: 134411 - DNA, 25 bp, probe
agacacaacttcaaatcccttacat

SEQ ID NO: 134412 - DNA, 25 bp, probe
agaagaaggtggtatccttataatt

SEQ ID NO: 134413 - DNA, 25 bp, probe
agcaaaaggcggttcgtcttcaagg

SEQ ID NO: 134414 - DNA, 25 bp, probe
agacacacagggagtcagtctcaca

SEQ ID NO: 134415 - DNA, 25 bp, probe
agactcaaggagaggcagattcacc

SEQ ID NO: 134416 - DNA, 25 bp, probe
agacatcaaaaatggcactgtcccc

SEQ ID NO: 134417 - DNA, 25 bp, probe
agacaaataaatttcactgtgccac

SEQ ID NO: 134418 - DNA, 25 bp, probe
agacaaataaatttcactgtgccac

SEQ ID NO: 134419 - DNA, 25 bp, probe
agaaaaaatatatctcaggagctca

SEQ ID NO: 134420 - DNA, 25 bp, probe
agacaagaacattctctcatagaac

SEQ ID NO: 134421 - DNA, 25 bp, probe
agacagatgacggctgctcgaagaa

SEQ ID NO: 134422 - DNA, 25 bp, probe
agacacaggcagcctgcgcagacga

SEQ ID NO: 134423 - DNA, 25 bp, probe
agacagccatgcctccgaaagaggg

SEQ ID NO: 134424 - DNA, 25 bp, probe
agaagcattgactggaaaaggcccc

SEQ ID NO: 134425 - DNA, 25 bp, probe
acaagaaacctgcagaggaccccca

SEQ ID NO: 134426 - DNA, 25 bp, probe
agaagaaccactcaagcagatccca

SEQ ID NO: 134427 - DNA, 25 bp, probe
agaagaaccactcaagcagatccca

SEQ ID NO: 134428 - DNA, 25 bp, probe
agaacaaccactgtggaatcgccac

SEQ ID NO: 134429 - DNA, 25 bp, probe
agaacaagtcccgggacaacagcag

SEQ ID NO: 134430 - DNA, 25 bp, probe
agaacaaatcgctcacgaatgccaa

SEQ ID NO: 134431 - DNA, 25 bp, probe
agaactatttgaggccgaagaagga

SEQ ID NO: 134432 - DNA, 25 bp, probe
agaacatgttcttggttggtgaagg

SEQ ID NO: 134433 - DNA, 25 bp, probe
agaaatatctcctgctgtttcacag

SEQ ID NO: 134434 - DNA, 25 bp, probe
agaaatgctcttagggtcttccgac

SEQ ID NO: 134435 - DNA, 25 bp, probe
agacagtgatcattcagggttcatc

SEQ ID NO: 134436 - DNA, 25 bp, probe
agacagagcagatcagtctttgtca

SEQ ID NO: 134437 - DNA, 25 bp, probe
agacagatggtccaggatcgtgttt

SEQ ID NO: 134438 - DNA, 25 bp, probe
agacatgtggtctgttggggtcatc

SEQ ID NO: 134439 - DNA, 25 bp, probe
agacagtgggggactggacgagatc

SEQ ID NO: 134440 - DNA, 25 bp, probe
agacaggtaagcgctgaacagagac

SEQ ID NO: 134441 - DNA, 25 bp, probe
agaatggataagccagccaactgca

SEQ ID NO: 134442 - DNA, 25 bp, probe
agaacagtgagaggccaagattgac

SEQ ID NO: 134443 - DNA, 25 bp, probe
agaaagtgagcagtgttagcttagt

SEQ ID NO: 134444 - DNA, 25 bp, probe
agaaagtagctaatccagtgtaatc

SEQ ID NO: 134445 - DNA, 25 bp, probe
agaaagtagctaatccagtgtaatc

SEQ ID NO: 134446 - DNA, 25 bp, probe
agacaatgtcatcaaccacttcacc

SEQ ID NO: 134447 - DNA, 25 bp, probe
agacatttcatctaagccacttaaa

SEQ ID NO: 134448 - DNA, 25 bp, probe
agacatttagcaatcctgacattaa

SEQ ID NO: 134449 - DNA, 25 bp, probe
agacatgttgagaatcatggacaaa

SEQ ID NO: 134450 - DNA, 25 bp, probe
agacactctggttgcagtcaccatc

SEQ ID NO: 134451 - DNA, 25 bp, probe
agaagatctcctggcaggcagccat

SEQ ID NO: 134452 - DNA, 25 bp, probe
agaaatgcagccgatatagagtcat

SEQ ID NO: 134453 - DNA, 25 bp, probe
agaacaagccctggaatgtgcattc

SEQ ID NO: 134454 - DNA, 25 bp, probe
agaacaagccctggaatgtgcattc

SEQ ID NO: 134455 - DNA, 25 bp, probe
agacagcaggcagcgccaagtgcgt

SEQ ID NO: 134456 - DNA, 25 bp, probe
agacacatggcagaagcttgaggtt

SEQ ID NO: 134457 - DNA, 25 bp, probe
agacacatggcagaagcttgaggtt

SEQ ID NO: 134458 - DNA, 25 bp, probe
agacagatactggaagctctacgct

SEQ ID NO: 134459 - DNA, 25 bp, probe
agaagatcactttccttcactgtgc

SEQ ID NO: 134460 - DNA, 25 bp, probe
agaagtgaattatccctgctggctt

SEQ ID NO: 134461 - DNA, 25 bp, probe
agaagtggattttgccggctggttg

SEQ ID NO: 134462 - DNA, 25 bp, probe
agaagttactcgcctggcggtggct

SEQ ID NO: 134463 - DNA, 25 bp, probe
agacttttctctcagttgggatgct

SEQ ID NO: 134464 - DNA, 25 bp, probe
agaatatttgcctaattgggaatta

SEQ ID NO: 134465 - DNA, 25 bp, probe
agaattttgctttgattgtagaatc

SEQ ID NO: 134466 - DNA, 25 bp, probe
agaaacttgcagatgatatgtgctg

SEQ ID NO: 134467 - DNA, 25 bp, probe
agacatcctatctagctgcaaggta

SEQ ID NO: 134468 - DNA, 25 bp, probe
agacataccatcttctatagctttt

SEQ ID NO: 134469 - DNA, 25 bp, probe
agacataacataagcaatggctctg

SEQ ID NO: 134470 - DNA, 25 bp, probe
agacattgactacaagactctgaac

SEQ ID NO: 134471 - DNA, 25 bp, probe
agacattgactacaagactctgaac

SEQ ID NO: 134472 - DNA, 25 bp, probe
agacagatggagttctcccctgaac

SEQ ID NO: 134473 - DNA, 25 bp, probe
agaatgattcagtcttgacggtgaa

SEQ ID NO: 134474 - DNA, 25 bp, probe
agaagctcaaacttcctggtaactc

SEQ ID NO: 134475 - DNA, 25 bp, probe
agaacgaagaccacagcaagaactc

SEQ ID NO: 134476 - DNA, 25 bp, probe
agaacgggaacgaagacgcacacaa

SEQ ID NO: 134477 - DNA, 25 bp, probe
agctgacgggaaccaggagaccaac

SEQ ID NO: 134478 - DNA, 25 bp, probe
agctgacgggaaccaggagaccaac

SEQ ID NO: 134479 - DNA, 25 bp, probe
agctaccaggaagaggggcgctgcc

SEQ ID NO: 134480 - DNA, 25 bp, probe
agctactcagtagtcttaggtggga

SEQ ID NO: 134481 - DNA, 25 bp, probe
agaactttattcatgggctgcggag

SEQ ID NO: 134482 - DNA, 25 bp, probe
agaacttgttttggcggctgtggaa

SEQ ID NO: 134483 - DNA, 25 bp, probe
agacactatgtttccgggtgctggt

SEQ ID NO: 134484 - DNA, 25 bp, probe
agacactatggttttaagttgctga

SEQ ID NO: 134485 - DNA, 25 bp, probe
agacatcaatcaatctttaaaagta

SEQ ID NO: 134486 - DNA, 25 bp, probe
gagagtgtaagtgtagaaagggttt

SEQ ID NO: 134487 - DNA, 25 bp, probe
agcgtgttacttacaaagaggtgct

SEQ ID NO: 134488 - DNA, 25 bp, probe
agctgtttgttctccacaataggct

SEQ ID NO: 134489 - DNA, 25 bp, probe
agctttgggcactcccaataatgaa

SEQ ID NO: 134490 - DNA, 25 bp, probe
agctttgggtctctactgtatgaac

SEQ ID NO: 134491 - DNA, 25 bp, probe
agctttgggtctctactgtatgaac

SEQ ID NO: 134492 - DNA, 25 bp, probe
agctttggatttcctgcactcaaac

SEQ ID NO: 134493 - DNA, 25 bp, probe
agctggtggccttgaacttccagac

SEQ ID NO: 134494 - DNA, 25 bp, probe
agcggaagttactaattcggacctg

SEQ ID NO: 134495 - DNA, 25 bp, probe
agcggaagttactaattcggacctg

SEQ ID NO: 134496 - DNA, 25 bp, probe
agaaaagattcacctgtgagcaggc

SEQ ID NO: 134497 - DNA, 25 bp, probe
agaaagaattctggggtcatcctga

SEQ ID NO: 134498 - DNA, 25 bp, probe
agaacgacattcagtgcagtctctt

SEQ ID NO: 134499 - DNA, 25 bp, probe
agaatcgaatccaatgtgccatcaa

SEQ ID NO: 134500 - DNA, 25 bp, probe
agaatgccagatttcttgagcatga

SEQ ID NO: 134501 - DNA, 25 bp, probe
agaatacagaagacctagcagaact

SEQ ID NO: 134502 - DNA, 25 bp, probe
agaacgcacaaacgtcacaagacat

SEQ ID NO: 134503 - DNA, 25 bp, probe
agaacacacacactgttcccaagca

SEQ ID NO: 134504 - DNA, 25 bp, probe
agaacacacacactgttcccaagca

SEQ ID NO: 134505 - DNA, 25 bp, probe
agaaatcatgaaggtcccgaatcac

SEQ ID NO: 134506 - DNA, 25 bp, probe
agaaatcttggagccgctggacact

SEQ ID NO: 134507 - DNA, 25 bp, probe
agaacatcgtgatcgccgaggactt

SEQ ID NO: 134508 - DNA, 25 bp, probe
agaacatcgtgatcgccgaggactt

SEQ ID NO: 134509 - DNA, 25 bp, probe
agaaattaatttggccaggcacagt

SEQ ID NO: 134510 - DNA, 25 bp, probe
agaaattaatttggccaggcacagt

SEQ ID NO: 134511 - DNA, 25 bp, probe
aaatttaatagtgccaaggaagcct

SEQ ID NO: 134512 - DNA, 25 bp, probe
agaaatttaatagtgccaaggaagc

SEQ ID NO: 134513 - DNA, 25 bp, probe
agaagctttctaaggacattaaaca

SEQ ID NO: 134514 - DNA, 25 bp, probe
aaagttattgaacagcttggaacac

SEQ ID NO: 134515 - DNA, 25 bp, probe
agaagtgttggacgagagcttgaac

SEQ ID NO: 134516 - DNA, 25 bp, probe
agaagtgttggacgagagcttgaac

SEQ ID NO: 134517 - DNA, 25 bp, probe
agaagcctgtggtcaaagtagaaca

SEQ ID NO: 134518 - DNA, 25 bp, probe
agaagagggcgacaattaggagagc

SEQ ID NO: 134519 - DNA, 25 bp, probe
agaaggaggcggaactgacggagat

SEQ ID NO: 134520 - DNA, 25 bp, probe
agaagggggaatgctgtcgggactg

SEQ ID NO: 134521 - DNA, 25 bp, probe
agaaggtacgaaatggtcagcggcc

SEQ ID NO: 134522 - DNA, 25 bp, probe
agaagggacatgtgggacgtgagcc

SEQ ID NO: 134523 - DNA, 25 bp, probe
agaacgagaatgtcgccaccttgtc

SEQ ID NO: 134524 - DNA, 25 bp, probe
agaaggagatagtcgcttcctggct

SEQ ID NO: 134525 - DNA, 25 bp, probe
agaaggaagtgacgcgcatggtggt

SEQ ID NO: 134526 - DNA, 25 bp, probe
agaaggaagtgacgcgcatggtggt

SEQ ID NO: 134527 - DNA, 25 bp, probe
agaaaggcaggtcagcgtgtctgca

SEQ ID NO: 134528 - DNA, 25 bp, probe
agaaggtggtgtcagcaaactcaag

SEQ ID NO: 134529 - DNA, 25 bp, probe
agacagatgtggttgcatcctaact

SEQ ID NO: 134530 - DNA, 25 bp, probe
agaacatgctgtgttccatacagcc

SEQ ID NO: 134531 - DNA, 25 bp, probe
agaagcctttgtgatctcacctgtt

SEQ ID NO: 134532 - DNA, 25 bp, probe
agaagcgctttgggcacatttgcag

SEQ ID NO: 134533 - DNA, 25 bp, probe
agaagcgctttgggcacatttgcag

SEQ ID NO: 134534 - DNA, 25 bp, probe
agacaggctacggatggatatgtca

SEQ ID NO: 134535 - DNA, 25 bp, probe
agaaggcacaggggtctgagtacca

SEQ ID NO: 134536 - DNA, 25 bp, probe
agaaagatgcaagacatgtagtaaa

SEQ ID NO: 134537 - DNA, 25 bp, probe
agaaggctgaaatcactaacacata

SEQ ID NO: 134538 - DNA, 25 bp, probe
agaaggagaacttcctgagcaagat

SEQ ID NO: 134539 - DNA, 25 bp, probe
agaaaacacacttcagcttccgaac

SEQ ID NO: 134540 - DNA, 25 bp, probe
agaaaacacacttcagcttccgaac

SEQ ID NO: 134541 - DNA, 25 bp, probe
agaaagacagtcactgcctgggaca

SEQ ID NO: 134542 - DNA, 25 bp, probe
agaaatggatctgactgcccggaca

SEQ ID NO: 134543 - DNA, 25 bp, probe
agaaatggatctgactgcccggaca

SEQ ID NO: 134544 - DNA, 25 bp, probe
agaagtgcgtctggaagttcctgga

SEQ ID NO: 134545 - DNA, 25 bp, probe
agaatctgagtttagattcccttga

SEQ ID NO: 134546 - DNA, 25 bp, probe
agaattgaatctagagtctccccga

SEQ ID NO: 134547 - DNA, 25 bp, probe
agaattggatatctgtcccttcaga

SEQ ID NO: 134548 - DNA, 25 bp, probe
agaaatgtgatcagttcctttgaga

SEQ ID NO: 134549 - DNA, 25 bp, probe
agaaatgtgatcagttcctttgaga

SEQ ID NO: 134550 - DNA, 25 bp, probe
agaatagtagatgtggcctttgaat

SEQ ID NO: 134551 - DNA, 25 bp, probe
agaaagctttcaacgcctttatccg

SEQ ID NO: 134552 - DNA, 25 bp, probe
agcagaagttcgaggcttatgtatc

SEQ ID NO: 134553 - DNA, 25 bp, probe
agaaagttggctggctttatttcta

SEQ ID NO: 134554 - DNA, 25 bp, probe
agaaatgacttgtcgattatttctg

SEQ ID NO: 134555 - DNA, 25 bp, probe
agaaatttgtgtagaatctctgtct

SEQ ID NO: 134556 - DNA, 25 bp, probe
agaaagcttgtataattcagattta

SEQ ID NO: 134557 - DNA, 25 bp, probe
agaaccttgttatttctcagacttt

SEQ ID NO: 134558 - DNA, 25 bp, probe
agaaccttgttatttctcagacttt

SEQ ID NO: 134559 - DNA, 25 bp, probe
agaaccctttaatagcagatttggt

SEQ ID NO: 134560 - DNA, 25 bp, probe
agaatcccttctagaaagcatttta

SEQ ID NO: 134561 - DNA, 25 bp, probe
agaaacgctctggcaaagagtttga

SEQ ID NO: 134562 - DNA, 25 bp, probe
gcctgggtgacagagtgagactccg

SEQ ID NO: 134563 - DNA, 25 bp, probe
agaagggccgagtaaagtgtgatca

SEQ ID NO: 134564 - DNA, 25 bp, probe
agaaggtgcctatggagaagttcaa

SEQ ID NO: 134565 - DNA, 25 bp, probe
agaagagaccttgaacaagttcaat

SEQ ID NO: 134566 - DNA, 25 bp, probe
agaatgatccctactcaaaatttat

SEQ ID NO: 134567 - DNA, 25 bp, probe
agaattccatagcccctaatgttat

SEQ ID NO: 134568 - DNA, 25 bp, probe
agaatgaacacgctccttacttgct

SEQ ID NO: 134569 - DNA, 25 bp, probe
agaatggaatccatctgtctccctc

SEQ ID NO: 134570 - DNA, 25 bp, probe
agaagcagccagcatggtgttccgt

SEQ ID NO: 134571 - DNA, 25 bp, probe
agaacatggccggggtcttcatgct

SEQ ID NO: 134572 - DNA, 25 bp, probe
agacacttcccaagtgtctgctcgc

SEQ ID NO: 134573 - DNA, 25 bp, probe
agaaatgtgcaccagtgttgctccc

SEQ ID NO: 134574 - DNA, 25 bp, probe
agaaatgtggctccagttgctctgt

SEQ ID NO: 134575 - DNA, 25 bp, probe
agaagttcctggtcattgtcttccc

SEQ ID NO: 134576 - DNA, 25 bp, probe
agaagttcctggtcattgtcttccc

SEQ ID NO: 134577 - DNA, 25 bp, probe
agaaggatacggcattggcctccca

SEQ ID NO: 134578 - DNA, 25 bp, probe
agaacggatattcattacccactca

SEQ ID NO: 134579 - DNA, 25 bp, probe
agaacaagataacgcctacaccact

SEQ ID NO: 134580 - DNA, 25 bp, probe
agaaaacagaattccatagccccta

SEQ ID NO: 134581 - DNA, 25 bp, probe
agaaaaaaattgcaagccacacttc

SEQ ID NO: 134582 - DNA, 25 bp, probe
agacaaacatagctggaaacaactt

SEQ ID NO: 134583 - DNA, 25 bp, probe
agaaaacaatagaaggaacatcctg

SEQ ID NO: 134584 - DNA, 25 bp, probe
agaaagccacatttagggctatcac

SEQ ID NO: 134585 - DNA, 25 bp, probe
agaaactcagtcttcagaggcctca

SEQ ID NO: 134586 - DNA, 25 bp, probe
agaagcattccctataaggcctgcc

SEQ ID NO: 134587 - DNA, 25 bp, probe
agacactgccactgaaatagccatc

SEQ ID NO: 134588 - DNA, 25 bp, probe
agacaatgtacaagagactcaaatc

SEQ ID NO: 134589 - DNA, 25 bp, probe
agacaattattgtgatgccatcaac

SEQ ID NO: 134590 - DNA, 25 bp, probe
agaagattatcctgtcctgcaaact

SEQ ID NO: 134591 - DNA, 25 bp, probe
agaaatttctgcatggtctaaatct

SEQ ID NO: 134592 - DNA, 25 bp, probe
agaaattgtgccatttcgcctgact

SEQ ID NO: 134593 - DNA, 25 bp, probe
agacaagtgtgccatttgaccatct

SEQ ID NO: 134594 - DNA, 25 bp, probe
agaaagtgtcagtcattgtcatgct

SEQ ID NO: 134595 - DNA, 25 bp, probe
agaaattgctcgtatggccctagca

SEQ ID NO: 134596 - DNA, 25 bp, probe
agaagacggctgcggagcctagcag

SEQ ID NO: 134597 - DNA, 25 bp, probe
agaagacggctgcggagcctagcag

SEQ ID NO: 134598 - DNA, 25 bp, probe
agaaacgaatgcagggccccattcc

SEQ ID NO: 134599 - DNA, 25 bp, probe
agaatacggcacagtctggtccttt

SEQ ID NO: 134600 - DNA, 25 bp, probe
agaatacagcccagttggatcagtt

SEQ ID NO: 134601 - DNA, 25 bp, probe
agaaacagcccaagcttcagcgggc

SEQ ID NO: 134602 - DNA, 25 bp, probe
agacacaacggcaacattatgctgg

SEQ ID NO: 134603 - DNA, 25 bp, probe
agaaacatcaggaatatttatggtg

SEQ ID NO: 134604 - DNA, 25 bp, probe
agaacacacagctgtaatcgtttgc

SEQ ID NO: 134605 - DNA, 25 bp, probe
agaaaagggagtcatgcattttgct

SEQ ID NO: 134606 - DNA, 25 bp, probe
agaacaaggtgacacatattctgtc

SEQ ID NO: 134607 - DNA, 25 bp, probe
agaaaagcgtcccacatttcagcaa

SEQ ID NO: 134608 - DNA, 25 bp, probe
agaaaagcagatcccaattcatccc

SEQ ID NO: 134609 - DNA, 25 bp, probe
agaaatggcagggacacttctcttg

SEQ ID NO: 134610 - DNA, 25 bp, probe
agaaatgctgatccaaatgttgctt

SEQ ID NO: 134611 - DNA, 25 bp, probe
agaaatgctgatccaaatgttgctt

SEQ ID NO: 134612 - DNA, 25 bp, probe
agaaagatcatgacaggcagttttg

SEQ ID NO: 134613 - DNA, 25 bp, probe
agacaagttctctgcagagtttgtt

SEQ ID NO: 134614 - DNA, 25 bp, probe
agaaggtactcttgggcatattttc

SEQ ID NO: 134615 - DNA, 25 bp, probe
agaacgtactcttggcagaaaggat

SEQ ID NO: 134616 - DNA, 25 bp, probe
agaacttggtcccctcaataagtat

SEQ ID NO: 134617 - DNA, 25 bp, probe
agaagtacgaccctaaggacgtcat

SEQ ID NO: 134618 - DNA, 25 bp, probe
agaaacagggccgccaggaagctct

SEQ ID NO: 134619 - DNA, 25 bp, probe
agaaaccgagaggtcaaggaagctc

SEQ ID NO: 134620 - DNA, 25 bp, probe
agaaaccgagaggtcaaggaagctc

SEQ ID NO: 134621 - DNA, 25 bp, probe
agaaagtccagacctcggagaagct

SEQ ID NO: 134622 - DNA, 25 bp, probe
agaaaattatagtcttggcagaaga

SEQ ID NO: 134623 - DNA, 25 bp, probe
agaacaaatattcctcgtgctaaag

SEQ ID NO: 134624 - DNA, 25 bp, probe
agaaaacatttgcctcagccacaga

SEQ ID NO: 134625 - DNA, 25 bp, probe
agaaaaacgagcctcagctggcgaa

SEQ ID NO: 134626 - DNA, 25 bp, probe
agaaaagcacggaggcttgcggacc

SEQ ID NO: 134627 - DNA, 25 bp, probe
agaagaatatggctggccctgggcc

SEQ ID NO: 134628 - DNA, 25 bp, probe
agcaggaaatccctggggctggttc

SEQ ID NO: 134629 - DNA, 25 bp, probe
agaagacctccctgtgagagagttg

SEQ ID NO: 134630 - DNA, 25 bp, probe
agaagacctccctgtgagagagttg

SEQ ID NO: 134631 - DNA, 25 bp, probe
agaagacctcctgagaataggcatc

SEQ ID NO: 134632 - DNA, 25 bp, probe
agaaaccatgcacatagaatacggc

SEQ ID NO: 134633 - DNA, 25 bp, probe
agaataccatatcccaagatgaagg

SEQ ID NO: 134634 - DNA, 25 bp, probe
agaagaccttcagcaatggcactgg

SEQ ID NO: 134635 - DNA, 25 bp, probe
agaaccctgaatgcaacttctgtgc

SEQ ID NO: 134636 - DNA, 25 bp, probe
agaaacactgtaccatgcctgtcat

SEQ ID NO: 134637 - DNA, 25 bp, probe
agaactcagcgttgccaggtgtgct

SEQ ID NO: 134638 - DNA, 25 bp, probe
agaaccaggtcagcaggtatgcccg

SEQ ID NO: 134639 - DNA, 25 bp, probe
agaacgaagtcaaaagcaagccagc

SEQ ID NO: 134640 - DNA, 25 bp, probe
agaaacgcaatcaaagaatggccca

SEQ ID NO: 134641 - DNA, 25 bp, probe
agaaccgctacaagaacattctccc

SEQ ID NO: 134642 - DNA, 25 bp, probe
agaacactcgaaaagagcacttcac

SEQ ID NO: 134643 - DNA, 25 bp, probe
agaatacacaaagaactggatcacc

SEQ ID NO: 134644 - DNA, 25 bp, probe
agaagagcaaacccaaatcgtacca

SEQ ID NO: 134645 - DNA, 25 bp, probe
agaaagcaatttccaacctgacaaa

SEQ ID NO: 134646 - DNA, 25 bp, probe
agaaagcccaagccagacagtgacg

SEQ ID NO: 134647 - DNA, 25 bp, probe
agaaagcccaagccagacagtgacg

SEQ ID NO: 134648 - DNA, 25 bp, probe
agaagtgggagaccagatcaacagc

SEQ ID NO: 134649 - DNA, 25 bp, probe
agaaatggggcaccagcagcatagc

SEQ ID NO: 134650 - DNA, 25 bp, probe
agaaagaggtcacaggctcagcgtc

SEQ ID NO: 134651 - DNA, 25 bp, probe
agaaagaggtcacaggctcagcgtc

SEQ ID NO: 134652 - DNA, 25 bp, probe
agaagagggatacatgggcaggatt

SEQ ID NO: 134653 - DNA, 25 bp, probe
agaagatggagtgcgagggcagcag

SEQ ID NO: 134654 - DNA, 25 bp, probe
agaagacggagtcggatgctgcgct

SEQ ID NO: 134655 - DNA, 25 bp, probe
agaagacggagtcggatgctgcgct

SEQ ID NO: 134656 - DNA, 25 bp, probe
agaagatcgagcagtgtgactaccc

SEQ ID NO: 134657 - DNA, 25 bp, probe
agaaatggagctctgtggcttccca

SEQ ID NO: 134658 - DNA, 25 bp, probe
agaagtggaggcagatcgctacccc

SEQ ID NO: 134659 - DNA, 25 bp, probe
agaaggagtgccataccttctccca

SEQ ID NO: 134660 - DNA, 25 bp, probe
agaaaagtgccactcagaccatcct

SEQ ID NO: 134661 - DNA, 25 bp, probe
agaaaagtgccactcagaccatcct

SEQ ID NO: 134662 - DNA, 25 bp, probe
agaagacgggcactaaccaggctgt

SEQ ID NO: 134663 - DNA, 25 bp, probe
agaagacgggcactaaccaggctgt

SEQ ID NO: 134664 - DNA, 25 bp, probe
agaagactggtgcatttacagctgt

SEQ ID NO: 134665 - DNA, 25 bp, probe
agaactgctgggcatatgaccgtgc

SEQ ID NO: 134666 - DNA, 25 bp, probe
agaaatgctaactgatagacgtgtt

SEQ ID NO: 134667 - DNA, 25 bp, probe
agaactgtgtactgtatatctgtat

SEQ ID NO: 134668 - DNA, 25 bp, probe
agaatagttaaactctatgattatt

SEQ ID NO: 134669 - DNA, 25 bp, probe
agaatcacaccaagactttattgtt

SEQ ID NO: 134670 - DNA, 25 bp, probe
agaaccaccagatctgcttcaagga

SEQ ID NO: 134671 - DNA, 25 bp, probe
agaactcaaagggcatttagaggaa

SEQ ID NO: 134672 - DNA, 25 bp, probe
agaagccaacagagcagtaagcgca

SEQ ID NO: 134673 - DNA, 25 bp, probe
agaagccaacgctgagtcaggctga

SEQ ID NO: 134674 - DNA, 25 bp, probe
agaagccactggtttctcaggtact

SEQ ID NO: 134675 - DNA, 25 bp, probe
agaactcaaggttttcattgacaat

SEQ ID NO: 134676 - DNA, 25 bp, probe
agcaccgcaatatcgttcagtacct

SEQ ID NO: 134677 - DNA, 25 bp, probe
agcaccgcaatatcgttcagtacct

SEQ ID NO: 134678 - DNA, 25 bp, probe
agcatacaggaaacttctcgtttcc

SEQ ID NO: 134679 - DNA, 25 bp, probe
acatattcgagctcaacggtttacc

SEQ ID NO: 134680 - DNA, 25 bp, probe
agcacattctggctcagggaggtta

SEQ ID NO: 134681 - DNA, 25 bp, probe
agcactacgggtggtgccagtttag

SEQ ID NO: 134682 - DNA, 25 bp, probe
agaagacggcctggtccagttggag

SEQ ID NO: 134683 - DNA, 25 bp, probe
agaagtttgttcccacagattgtcc

SEQ ID NO: 134684 - DNA, 25 bp, probe
agaagtttgttcccacagattgtcc

SEQ ID NO: 134685 - DNA, 25 bp, probe
agaagtttgcccagacagtcatgac

SEQ ID NO: 134686 - DNA, 25 bp, probe
agaattttctctagagtcagtcatt

SEQ ID NO: 134687 - DNA, 25 bp, probe
agaaatgattccaaagtaacatgta

SEQ ID NO: 134688 - DNA, 25 bp, probe
agaagagtactccaagcttcagatg

SEQ ID NO: 134689 - DNA, 25 bp, probe
agaaaaacttcattgctgtcagcgc

SEQ ID NO: 134690 - DNA, 25 bp, probe
agaaaaatgggagttgctgcattgc

SEQ ID NO: 134691 - DNA, 25 bp, probe
agcaaaaatgtaaatgatgtgtagt

SEQ ID NO: 134692 - DNA, 25 bp, probe
agcaatatgaagggaacagtgggta

SEQ ID NO: 134693 - DNA, 25 bp, probe
agcacattgtggcaaaaggggaaca

SEQ ID NO: 134694 - DNA, 25 bp, probe
agaactctgcggtaccagtggagga

SEQ ID NO: 134695 - DNA, 25 bp, probe
agaactctgcggtaccagtggagga

SEQ ID NO: 134696 - DNA, 25 bp, probe
agaacttcaagtcggaggtcatggt

SEQ ID NO: 134697 - DNA, 25 bp, probe
agaactctgcaagacgaggtcaaat

SEQ ID NO: 134698 - DNA, 25 bp, probe
agaactcatcgaaactggggaacca

SEQ ID NO: 134699 - DNA, 25 bp, probe
acatgttacaacacggacgaacctt

SEQ ID NO: 134700 - DNA, 25 bp, probe
acatgttacaacacggacgaacctt

SEQ ID NO: 134701 - DNA, 25 bp, probe
acttggacaacttcgtaggtagcct

SEQ ID NO: 134702 - DNA, 25 bp, probe
actgttaaactcttgtccagtaaca

SEQ ID NO: 134703 - DNA, 25 bp, probe
agctgtaaaacatctgaacctaaca

SEQ ID NO: 134704 - DNA, 25 bp, probe
agctttaccacttttcagccattta

SEQ ID NO: 134705 - DNA, 25 bp, probe
agctcaaatcccaacttagccacgt

SEQ ID NO: 134706 - DNA, 25 bp, probe
agctcaaagggcaatcgggaaggag

SEQ ID NO: 134707 - DNA, 25 bp, probe
agcatcaaaggtcacgtgcggttca

SEQ ID NO: 134708 - DNA, 25 bp, probe
agcacccagggaagcgcctgggctc

SEQ ID NO: 134709 - DNA, 25 bp, probe
agcactcaggagggttccttggtcc

SEQ ID NO: 134710 - DNA, 25 bp, probe
agcactgtggggattctccgtgctc

SEQ ID NO: 134711 - DNA, 25 bp, probe
agcaggttggtgattcagtccgacc

SEQ ID NO: 134712 - DNA, 25 bp, probe
agaagagtggtgttgtcctgcacag

SEQ ID NO: 134713 - DNA, 25 bp, probe
agaagggtatatttaatgagcgaac

SEQ ID NO: 134714 - DNA, 25 bp, probe
agaagatgagtttgtgtactggcca

SEQ ID NO: 134715 - DNA, 25 bp, probe
agaagcaattgattttattgactgc

SEQ ID NO: 134716 - DNA, 25 bp, probe
agaaaacgcatactttctgtgtcta

SEQ ID NO: 134717 - DNA, 25 bp, probe
agaacaagacatacttcaatgtatt

SEQ ID NO: 134718 - DNA, 25 bp, probe
agaacaagacatacttcaatgtatt

SEQ ID NO: 134719 - DNA, 25 bp, probe
agaaacagatatatgctataaaata

SEQ ID NO: 134720 - DNA, 25 bp, probe
agaagaactactgctcaaaattcat

SEQ ID NO: 134721 - DNA, 25 bp, probe
agaacttctacttctctgaaaacta

SEQ ID NO: 134722 - DNA, 25 bp, probe
agaacttctctctctgctaaagtaa

SEQ ID NO: 134723 - DNA, 25 bp, probe
agaactctttcattacttgcatcgt

SEQ ID NO: 134724 - DNA, 25 bp, probe
agaacttttgcattttaatcgttgt

SEQ ID NO: 134725 - DNA, 25 bp, probe
agaactcttcagccatgattagacg

SEQ ID NO: 134726 - DNA, 25 bp, probe
agaacctggagcgaggctaccgcat

SEQ ID NO: 134727 - DNA, 25 bp, probe
agaacctggagcgaggctaccgcat

SEQ ID NO: 134728 - DNA, 25 bp, probe
agaacctggagcgaggctaccgcat

SEQ ID NO: 134729 - DNA, 25 bp, probe
agaagccctgtggcaacggccacat

SEQ ID NO: 134730 - DNA, 25 bp, probe
agaacggcgtgggtggcaacagcat

SEQ ID NO: 134731 - DNA, 25 bp, probe
agaacggcgtgggtggcaacagcat

SEQ ID NO: 134732 - DNA, 25 bp, probe
agaacgtgcagggcctgcctagctt

SEQ ID NO: 134733 - DNA, 25 bp, probe
agaaagctgcagtgccacctgagtt

SEQ ID NO: 134734 - DNA, 25 bp, probe
agaaactgcatggtcgcccatgatt

SEQ ID NO: 134735 - DNA, 25 bp, probe
agaaactgcatgagccaccagtgcc

SEQ ID NO: 134736 - DNA, 25 bp, probe
agaagagccgcaaggaccagatcca

SEQ ID NO: 134737 - DNA, 25 bp, probe
agaaaaacacggaccatgacatcaa

SEQ ID NO: 134738 - DNA, 25 bp, probe
agaagaaaacagatgcccccagaag

SEQ ID NO: 134739 - DNA, 25 bp, probe
agaagacactaagggccccacaggc

SEQ ID NO: 134740 - DNA, 25 bp, probe
agaaacaagaacctgccacctgagg

SEQ ID NO: 134741 - DNA, 25 bp, probe
agaaacaagacagggcttctctcag

SEQ ID NO: 134742 - DNA, 25 bp, probe
agaaaccacacacactgttgctgga

SEQ ID NO: 134743 - DNA, 25 bp, probe
agaaaaccagcactaccttcaacat

SEQ ID NO: 134744 - DNA, 25 bp, probe
agaaacactctacacctctaatcaa

SEQ ID NO: 134745 - DNA, 25 bp, probe
agaagacatctcaggcatttgctaa

SEQ ID NO: 134746 - DNA, 25 bp, probe
agaaggactggggcagtttgctcaa

SEQ ID NO: 134747 - DNA, 25 bp, probe
agaagcgccataagtcagttgagta

SEQ ID NO: 134748 - DNA, 25 bp, probe
agcaagctgcctttgtacttggttg

SEQ ID NO: 134749 - DNA, 25 bp, probe
agaagtgcagcctttgttattgcat

SEQ ID NO: 134750 - DNA, 25 bp, probe
agaagaggccatgtgtctcagagct

SEQ ID NO: 134751 - DNA, 25 bp, probe
agaacatgaccagctgatctcggtg

SEQ ID NO: 134752 - DNA, 25 bp, probe
agaacatggccaatagtcatatgtg

SEQ ID NO: 134753 - DNA, 25 bp, probe
agaaagcgccataacagcatctcgg

SEQ ID NO: 134754 - DNA, 25 bp, probe
agaactgcgtattacaatccggcag

SEQ ID NO: 134755 - DNA, 25 bp, probe
agaaccaatatttcactgtcgacaa

SEQ ID NO: 134756 - DNA, 25 bp, probe
agaaagctaattaagtgctctgaaa

SEQ ID NO: 134757 - DNA, 25 bp, probe
agaaagctaattaagtgctctgaaa

SEQ ID NO: 134758 - DNA, 25 bp, probe
agaagagccaaattgactctctaaa

SEQ ID NO: 134759 - DNA, 25 bp, probe
agaaggacagtacatctactgctta

SEQ ID NO: 134760 - DNA, 25 bp, probe
agaaggcaggaacatgctatgctga

SEQ ID NO: 134761 - DNA, 25 bp, probe
agcacggcatcgtcaccaactggga

SEQ ID NO: 134762 - DNA, 25 bp, probe
agaagaaaatcaccaggctggtgct

SEQ ID NO: 134763 - DNA, 25 bp, probe
agaagtaaacatcaggagtcagctc

SEQ ID NO: 134764 - DNA, 25 bp, probe
agcacaataaactcaaagccagcca

SEQ ID NO: 134765 - DNA, 25 bp, probe
agaaaatgcacctttataaatcaca

SEQ ID NO: 134766 - DNA, 25 bp, probe
agaaggaccctgatgaaagaccaac

SEQ ID NO: 134767 - DNA, 25 bp, probe
agaaggaccctgatgaaagaccaac

SEQ ID NO: 134768 - DNA, 25 bp, probe
agaaggaagttgtctataatgagcc

SEQ ID NO: 134769 - DNA, 25 bp, probe
agaagtaagtcctcatgaagccctt

SEQ ID NO: 134770 - DNA, 25 bp, probe
agaagtaagtcctcatgaagccctt

SEQ ID NO: 134771 - DNA, 25 bp, probe
agaagaaagccctgctgaaccagct

SEQ ID NO: 134772 - DNA, 25 bp, probe
agaaaaagctcaaacgacatcttgc

SEQ ID NO: 134773 - DNA, 25 bp, probe
agaaaaactcaggcaagacctctct

SEQ ID NO: 134774 - DNA, 25 bp, probe
agaaaacagtgatagagcccccatt

SEQ ID NO: 134775 - DNA, 25 bp, probe
agaaaacagtgatagagcccccatt

SEQ ID NO: 134776 - DNA, 25 bp, probe
agaagaagcagctgaagcagcccgc

SEQ ID NO: 134777 - DNA, 25 bp, probe
agaacagtagctgatgaagctgccc

SEQ ID NO: 134778 - DNA, 25 bp, probe
agaacgtattggtccagcttgctct

SEQ ID NO: 134779 - DNA, 25 bp, probe
agaacgatattgaacagctttgcta

SEQ ID NO: 134780 - DNA, 25 bp, probe
agaacgatattgaacagctttgcta

SEQ ID NO: 134781 - DNA, 25 bp, probe
agaacgatattgaacagctttgcta

SEQ ID NO: 134782 - DNA, 25 bp, probe
agaacgatgatcgtcacctctgtgc

SEQ ID NO: 134783 - DNA, 25 bp, probe
agaaggatggcatcaccgttgtgga

SEQ ID NO: 134784 - DNA, 25 bp, probe
agaaggagctgctcatctacttgcg

SEQ ID NO: 134785 - DNA, 25 bp, probe
agaagcccagacgagtagtgtgagc

SEQ ID NO: 134786 - DNA, 25 bp, probe
agaatgcgccagtgcgggtttgcgg

SEQ ID NO: 134787 - DNA, 25 bp, probe
agaatgcgccagtgcgggtttgcgg

SEQ ID NO: 134788 - DNA, 25 bp, probe
agaattgctgacagcagaggctttg

SEQ ID NO: 134789 - DNA, 25 bp, probe
agaatttgtaatcatggttttactg

SEQ ID NO: 134790 - DNA, 25 bp, probe
agaagtgtgatgtgagttgttgtta

SEQ ID NO: 134791 - DNA, 25 bp, probe
agaagtgtgatgtgagttgttgtta

SEQ ID NO: 134792 - DNA, 25 bp, probe
agaactgtgagggaagttgtggata

SEQ ID NO: 134793 - DNA, 25 bp, probe
agaactgaggtgggctagtgggggt

SEQ ID NO: 134794 - DNA, 25 bp, probe
agaagtatcggcgtctgggggagat

SEQ ID NO: 134795 - DNA, 25 bp, probe
agaagatacaagcctcgggagaagc

SEQ ID NO: 134796 - DNA, 25 bp, probe
agaagatataaaggcgactgaatag

SEQ ID NO: 134797 - DNA, 25 bp, probe
agaaaattctacctgtgctacatag

SEQ ID NO: 134798 - DNA, 25 bp, probe
agaagaattctatgctattattaaa

SEQ ID NO: 134799 - DNA, 25 bp, probe
agcaagacttcgtgatttttaacag

SEQ ID NO: 134800 - DNA, 25 bp, probe
agaagacattcatctatttttcaaa

SEQ ID NO: 134801 - DNA, 25 bp, probe
agaaaatttgccaatctttcctact

SEQ ID NO: 134802 - DNA, 25 bp, probe
agaaaatggatcctggctttcccaa

SEQ ID NO: 134803 - DNA, 25 bp, probe
agcacaaatcgaagcaggaattccc

SEQ ID NO: 134804 - DNA, 25 bp, probe
agcacaggcttcacagtgattttgt

SEQ ID NO: 134805 - DNA, 25 bp, probe
agcaagcctctttgagggtactgca

SEQ ID NO: 134806 - DNA, 25 bp, probe
agaaggtcattttagtttctgcaac

SEQ ID NO: 134807 - DNA, 25 bp, probe
agaaggtcattttagtttctgcaac

SEQ ID NO: 134808 - DNA, 25 bp, probe
agaaggtttatgccacccttgaggc

SEQ ID NO: 134809 - DNA, 25 bp, probe
agaaggtgatcattgggccctgggt

SEQ ID NO: 134810 - DNA, 25 bp, probe
agaagagtctattgtctccttggtt

SEQ ID NO: 134811 - DNA, 25 bp, probe
agaagagtctattgtctccttggtt

SEQ ID NO: 134812 - DNA, 25 bp, probe
agaagattttagtctgtatgcttgt

SEQ ID NO: 134813 - DNA, 25 bp, probe
agcacgtcgtaggattccatggttt

SEQ ID NO: 134814 - DNA, 25 bp, probe
agctcctggccatatatcaaggttt

SEQ ID NO: 134815 - DNA, 25 bp, probe
accactgggcaaacagaagaatttt

SEQ ID NO: 134816 - DNA, 25 bp, probe
aaatgctgggttgaaaaatgttttg

SEQ ID NO: 134817 - DNA, 25 bp, probe
agaagtgagtttgtaaatattctac

SEQ ID NO: 134818 - DNA, 25 bp, probe
agaagcgcagtttaagaaaaggcat

SEQ ID NO: 134819 - DNA, 25 bp, probe
agcacgcagcggagaaggacaagga

SEQ ID NO: 134820 - DNA, 25 bp, probe
agcacgagcagtgtgagagccagct

SEQ ID NO: 134821 - DNA, 25 bp, probe
agcacgagcagtgtgagagccagct

SEQ ID NO: 134822 - DNA, 25 bp, probe
agaagagagtgccagagtctatgaa

SEQ ID NO: 134823 - DNA, 25 bp, probe
agaattttgcattgcagtcatagaa

SEQ ID NO: 134824 - DNA, 25 bp, probe
agaagctttgctgcaggatctgcgt

SEQ ID NO: 134825 - DNA, 25 bp, probe
agaagtcttaccagtgctggtttaa

SEQ ID NO: 134826 - DNA, 25 bp, probe
agaactgctggagcgagctgctggt

SEQ ID NO: 134827 - DNA, 25 bp, probe
agaactatcaacttgtggctgggca

SEQ ID NO: 134828 - DNA, 25 bp, probe
agaactatcacatttctgaggctcg

SEQ ID NO: 134829 - DNA, 25 bp, probe
agaactgatatgtactcgtgagtca

SEQ ID NO: 134830 - DNA, 25 bp, probe
agaagctgtgctgccacggcaggcc

SEQ ID NO: 134831 - DNA, 25 bp, probe
agaactgtgctgacttggaaggtgc

SEQ ID NO: 134832 - DNA, 25 bp, probe
agaactggatggtgagcgagtagca

SEQ ID NO: 134833 - DNA, 25 bp, probe
agaatctggggtttgccagtcagtt

SEQ ID NO: 134834 - DNA, 25 bp, probe
agaatctggggtttgccagtcagtt

SEQ ID NO: 134835 - DNA, 25 bp, probe
agaatgggggtatcctgtgcattgt

SEQ ID NO: 134836 - DNA, 25 bp, probe
agaaggatgccgcagaccattatct

SEQ ID NO: 134837 - DNA, 25 bp, probe
agaaggatgcttcaactattatttg

SEQ ID NO: 134838 - DNA, 25 bp, probe
agaaggatgcttcaactattatttg

SEQ ID NO: 134839 - DNA, 25 bp, probe
agaactgcagttcaacttctatcac

SEQ ID NO: 134840 - DNA, 25 bp, probe
agaatggatgtactacactttatcc

SEQ ID NO: 134841 - DNA, 25 bp, probe
agaatatttcacacatcccttcttt

SEQ ID NO: 134842 - DNA, 25 bp, probe
agaagttcaagctcatccattcttt

SEQ ID NO: 134843 - DNA, 25 bp, probe
agaactgtcaagtaatccacctctg

SEQ ID NO: 134844 - DNA, 25 bp, probe
agaacagagtcgtaatcccagctcc

SEQ ID NO: 134845 - DNA, 25 bp, probe
agaacacaggccgaatccaggctct

SEQ ID NO: 134846 - DNA, 25 bp, probe
agaacacaggccgaatccaggctct

SEQ ID NO: 134847 - DNA, 25 bp, probe
agaacatcacgcaaatgtccacgcc

SEQ ID NO: 134848 - DNA, 25 bp, probe
agaacatcacgcaaatgtccacgcc

SEQ ID NO: 134849 - DNA, 25 bp, probe
agaacatcacgcaaatgtccacgcc

SEQ ID NO: 134850 - DNA, 25 bp, probe
agaacatgaccgaattcaagcgtgg

SEQ ID NO: 134851 - DNA, 25 bp, probe
agaacatgaccgaattcaagcgtgg

SEQ ID NO: 134852 - DNA, 25 bp, probe
agcaacatgagggaaataagcaaag

SEQ ID NO: 134853 - DNA, 25 bp, probe
agaagctggaggcacaacgcaccag

SEQ ID NO: 134854 - DNA, 25 bp, probe
agcaactgggatgacgacagcctag

SEQ ID NO: 134855 - DNA, 25 bp, probe
agaaggtggatctctggagccttgg

SEQ ID NO: 134856 - DNA, 25 bp, probe
agcaagtctggatctgggacccttt

SEQ ID NO: 134857 - DNA, 25 bp, probe
agaatgcctgaccctgggaaggctc

SEQ ID NO: 134858 - DNA, 25 bp, probe
agaacctgcactttgtccatatggt

SEQ ID NO: 134859 - DNA, 25 bp, probe
agaacctgcagtttgactcttcatc

SEQ ID NO: 134860 - DNA, 25 bp, probe
agaactcagaggttggcccctaagc

SEQ ID NO: 134861 - DNA, 25 bp, probe
agcaagcaaaggtggcttccttcct

SEQ ID NO: 134862 - DNA, 25 bp, probe
agaagcaccaggtgtcttcagcctc

SEQ ID NO: 134863 - DNA, 25 bp, probe
agaacccagagctgttccagctgcg

SEQ ID NO: 134864 - DNA, 25 bp, probe
agaacaccagagaacatgaccagct

SEQ ID NO: 134865 - DNA, 25 bp, probe
agaagcagcggtcagcagacaagga

SEQ ID NO: 134866 - DNA, 25 bp, probe
agaagaggggttgagaatggaatcc

SEQ ID NO: 134867 - DNA, 25 bp, probe
agaagaggggtggcgcagaagggtt

SEQ ID NO: 134868 - DNA, 25 bp, probe
agaagataagaggacgcagaagctg

SEQ ID NO: 134869 - DNA, 25 bp, probe
agaagtgcctgagacgcggagacat

SEQ ID NO: 134870 - DNA, 25 bp, probe
agaagtcctggtttgggaacttcat

SEQ ID NO: 134871 - DNA, 25 bp, probe
agaatgtccatgcacttgggtttta

SEQ ID NO: 134872 - DNA, 25 bp, probe
agaagtcttaatatgggctgttgcc

SEQ ID NO: 134873 - DNA, 25 bp, probe
agaacactttcaatgggggttgcat

SEQ ID NO: 134874 - DNA, 25 bp, probe
agaacactttcaatgggggttgcat

SEQ ID NO: 134875 - DNA, 25 bp, probe
agaacactttcaaagaggtttgaga

SEQ ID NO: 134876 - DNA, 25 bp, probe
agaactcttgtctaaaggcttatac

SEQ ID NO: 134877 - DNA, 25 bp, probe
agaagctcttcctgaagcgcgataa

SEQ ID NO: 134878 - DNA, 25 bp, probe
agaacatcttactgagcactctcga

SEQ ID NO: 134879 - DNA, 25 bp, probe
agaacagcttaatatcactggcttc

SEQ ID NO: 134880 - DNA, 25 bp, probe
agaagctgctggaagactcactgac

SEQ ID NO: 134881 - DNA, 25 bp, probe
agaacatctttgacactctgcagac

SEQ ID NO: 134882 - DNA, 25 bp, probe
agaagatctaatgcatcctatatcc

SEQ ID NO: 134883 - DNA, 25 bp, probe
agaacatggactacacacaatacag

SEQ ID NO: 134884 - DNA, 25 bp, probe
agaacatcacacatccagagctaaa

SEQ ID NO: 134885 - DNA, 25 bp, probe
agaaccatctctaggcaactatcaa

SEQ ID NO: 134886 - DNA, 25 bp, probe
agaaccatctctaggcaactatcaa

SEQ ID NO: 134887 - DNA, 25 bp, probe
agaaccccatattcttttacatggc

SEQ ID NO: 134888 - DNA, 25 bp, probe
agaaccccatattcttttacatggc

SEQ ID NO: 134889 - DNA, 25 bp, probe
agaagagtcctttcttctctacatc

SEQ ID NO: 134890 - DNA, 25 bp, probe
agaagaacctgcactttgtccatat

SEQ ID NO: 134891 - DNA, 25 bp, probe
agaagcaaactcttgctgtttattt

SEQ ID NO: 134892 - DNA, 25 bp, probe
agaacacagacttatggatcgttat

SEQ ID NO: 134893 - DNA, 25 bp, probe
agaacactgtgcacatggtcagttc

SEQ ID NO: 134894 - DNA, 25 bp, probe
agaacctgatggacatgttcaggga

SEQ ID NO: 134895 - DNA, 25 bp, probe
agaagcccttgttgctgtagatgtg

SEQ ID NO: 134896 - DNA, 25 bp, probe
agcagcaacctgttcatggtggtgg

SEQ ID NO: 134897 - DNA, 25 bp, probe
agcactaccgcgagagctgggaggc

SEQ ID NO: 134898 - DNA, 25 bp, probe
agaagtacctgaaggtggtgatggc

SEQ ID NO: 134899 - DNA, 25 bp, probe
agaattccgcttcggtggagcagct

SEQ ID NO: 134900 - DNA, 25 bp, probe
agaagtcgcagctctggtgggagga

SEQ ID NO: 134901 - DNA, 25 bp, probe
agaagtcatggattgggaagaaaga

SEQ ID NO: 134902 - DNA, 25 bp, probe
agaactgatccaggggacaaaagag

SEQ ID NO: 134903 - DNA, 25 bp, probe
agaacgcccactatgagagccaagg

SEQ ID NO: 134904 - DNA, 25 bp, probe
agaacagcagccgctaagactgcaa

SEQ ID NO: 134905 - DNA, 25 bp, probe
agaacagctgctggtgcttcaggga

SEQ ID NO: 134906 - DNA, 25 bp, probe
agaacggtgtctctcaggatggtgc

SEQ ID NO: 134907 - DNA, 25 bp, probe
agaagtggttctgtatggctaggac

SEQ ID NO: 134908 - DNA, 25 bp, probe
agaatgtggatggccgtgtttcgga

SEQ ID NO: 134909 - DNA, 25 bp, probe
agaaggtgctgcacctgtaccggag

SEQ ID NO: 134910 - DNA, 25 bp, probe
agaaggctgtttgttactctgtcgt

SEQ ID NO: 134911 - DNA, 25 bp, probe
agaagagcctttatttctctctctc

SEQ ID NO: 134912 - DNA, 25 bp, probe
agaagagtgctgtcattatttcctc

SEQ ID NO: 134913 - DNA, 25 bp, probe
agaagatgatctgctgcttctctca

SEQ ID NO: 134914 - DNA, 25 bp, probe
agaatatgctaggctgcactctgct

SEQ ID NO: 134915 - DNA, 25 bp, probe
agaatagcctgtggcctttgcaatt

SEQ ID NO: 134916 - DNA, 25 bp, probe
agaatatggcttggcctatggccat

SEQ ID NO: 134917 - DNA, 25 bp, probe
agctataattcagtcacgtggccat

SEQ ID NO: 134918 - DNA, 25 bp, probe
agaatatgaccgtcagcgtggtcat

SEQ ID NO: 134919 - DNA, 25 bp, probe
agaattggccagagcctgtggcccc

SEQ ID NO: 134920 - DNA, 25 bp, probe
agaattggccagagcctgtggcccc

SEQ ID NO: 134921 - DNA, 25 bp, probe
agaattgggaagccagtgcggcccc

SEQ ID NO: 134922 - DNA, 25 bp, probe
agaattgggaagccagtgcggcccc

SEQ ID NO: 134923 - DNA, 25 bp, probe
agaatctaggaaccttgcctgcgac

SEQ ID NO: 134924 - DNA, 25 bp, probe
agaatatcagtggacgacgccttac

SEQ ID NO: 134925 - DNA, 25 bp, probe
agaaggcagcaatcgaggagcttac

SEQ ID NO: 134926 - DNA, 25 bp, probe
agaaggagcaccgtgtggacttccc

SEQ ID NO: 134927 - DNA, 25 bp, probe
agaaggaatccagcgagtcctcacc

SEQ ID NO: 134928 - DNA, 25 bp, probe
agaaggaatccagcgagtcctcacc

SEQ ID NO: 134929 - DNA, 25 bp, probe
agaagagaacaagcatgcgctccct

SEQ ID NO: 134930 - DNA, 25 bp, probe
agaaggacctgagcagcatcttccg

SEQ ID NO: 134931 - DNA, 25 bp, probe
agaagcgagtgttgtagcacctccg

SEQ ID NO: 134932 - DNA, 25 bp, probe
agaagcgagtgttgtagcacctccg

SEQ ID NO: 134933 - DNA, 25 bp, probe
agaagcgagaattctgagatcctcc

SEQ ID NO: 134934 - DNA, 25 bp, probe
agaagtacaatgccatctgtctgcc

SEQ ID NO: 134935 - DNA, 25 bp, probe
agcaggtacagtgcctggtgccagc

SEQ ID NO: 134936 - DNA, 25 bp, probe
agaagtctgagtccctgagaccacc

SEQ ID NO: 134937 - DNA, 25 bp, probe
agaatgagggtggcttggacccctg

SEQ ID NO: 134938 - DNA, 25 bp, probe
agaagggggtgagtggtgccagttg

SEQ ID NO: 134939 - DNA, 25 bp, probe
agaagggccctaagagttcgtctct

SEQ ID NO: 134940 - DNA, 25 bp, probe
agaaggggcagctgagccccagtcc

SEQ ID NO: 134941 - DNA, 25 bp, probe
agaatggcgacagcaagcccgagct

SEQ ID NO: 134942 - DNA, 25 bp, probe
agaagctcagaaaggacccctgctc

SEQ ID NO: 134943 - DNA, 25 bp, probe
agaatgtagctaaagcccctgctgc

SEQ ID NO: 134944 - DNA, 25 bp, probe
agaagatgacgatgacccctcatta

SEQ ID NO: 134945 - DNA, 25 bp, probe
agaaggaagacttcatccctctggg

SEQ ID NO: 134946 - DNA, 25 bp, probe
agaaggagaacggcatctactccgt

SEQ ID NO: 134947 - DNA, 25 bp, probe
agaataaggacgccatcatcaccgc

SEQ ID NO: 134948 - DNA, 25 bp, probe
agaatccagcgggatgctcgagcac

SEQ ID NO: 134949 - DNA, 25 bp, probe
agaagccacgatgtgctctgtatcc

SEQ ID NO: 134950 - DNA, 25 bp, probe
agaagccacgatgtgctctgtatcc

SEQ ID NO: 134951 - DNA, 25 bp, probe
agaaccaccatgtcttcagtgattg

SEQ ID NO: 134952 - DNA, 25 bp, probe
agaaccacaattaagatgtcatatt

SEQ ID NO: 134953 - DNA, 25 bp, probe
agaactacaattacaaccagcatgc

SEQ ID NO: 134954 - DNA, 25 bp, probe
agaatcatgatctatacgcaaccgg

SEQ ID NO: 134955 - DNA, 25 bp, probe
agaatcctatgatggaaacatggga

SEQ ID NO: 134956 - DNA, 25 bp, probe
agaagccacgcatggacgacgggct

SEQ ID NO: 134957 - DNA, 25 bp, probe
agaagccacgcatggacgacgggct

SEQ ID NO: 134958 - DNA, 25 bp, probe
agcaggcccgcaaggccgaagaggt

SEQ ID NO: 134959 - DNA, 25 bp, probe
agcacgacctcaagagcctgatgga

SEQ ID NO: 134960 - DNA, 25 bp, probe
agaagatcctgtatgccacatcaga

SEQ ID NO: 134961 - DNA, 25 bp, probe
agaagacactgagttcctcactcgc

SEQ ID NO: 134962 - DNA, 25 bp, probe
agaagcaactgaggtgtccgtctgc

SEQ ID NO: 134963 - DNA, 25 bp, probe
agaacgaatgagggtcctctcatcg

SEQ ID NO: 134964 - DNA, 25 bp, probe
agaaccgtgagtggagctcttgctc

SEQ ID NO: 134965 - DNA, 25 bp, probe
agaagccagctgcggagtcttctgg

SEQ ID NO: 134966 - DNA, 25 bp, probe
agcacaaaggcatggaaattcagga

SEQ ID NO: 134967 - DNA, 25 bp, probe
agcaaaaggatatgacaatccgtcc

SEQ ID NO: 134968 - DNA, 25 bp, probe
agcacaaagcttttaccacctgtgg

SEQ ID NO: 134969 - DNA, 25 bp, probe
agcacttcagaatttaaaccaggat

SEQ ID NO: 134970 - DNA, 25 bp, probe
agcacttcagaatttaaaccaggat

SEQ ID NO: 134971 - DNA, 25 bp, probe
agcacttaaagtcaacttcatggag

SEQ ID NO: 134972 - DNA, 25 bp, probe
agaatttaagtctgcctatttcaaa

SEQ ID NO: 134973 - DNA, 25 bp, probe
agaatttacagctcagactattaca

SEQ ID NO: 134974 - DNA, 25 bp, probe
agcaataatgatccatacatactat

SEQ ID NO: 134975 - DNA, 25 bp, probe
agaataaacccagagctcaaccaga

SEQ ID NO: 134976 - DNA, 25 bp, probe
agcaaaaaccaggcgttgaactcca

SEQ ID NO: 134977 - DNA, 25 bp, probe
agcaaattttgcacagtaaactaat

SEQ ID NO: 134978 - DNA, 25 bp, probe
agcagaagctgtacatgtcagtaga

SEQ ID NO: 134979 - DNA, 25 bp, probe
agaagcagcagttctgcatcagtga

SEQ ID NO: 134980 - DNA, 25 bp, probe
agaagcagcactttctgttgataat

SEQ ID NO: 134981 - DNA, 25 bp, probe
agaagatgcagcacactgtcaaaat

SEQ ID NO: 134982 - DNA, 25 bp, probe
agaagtgtgccagcttcaaaaaccc

SEQ ID NO: 134983 - DNA, 25 bp, probe
agaatgaggcctccaaacaaacact

SEQ ID NO: 134984 - DNA, 25 bp, probe
agaagaggccatcctttgtgaagct

SEQ ID NO: 134985 - DNA, 25 bp, probe
agaaggtgttcctttctcacagtga

SEQ ID NO: 134986 - DNA, 25 bp, probe
agaaggtgttcctttctcacagtga

SEQ ID NO: 134987 - DNA, 25 bp, probe
agaaggcatttgccacttgctcatc

SEQ ID NO: 134988 - DNA, 25 bp, probe
agaaggcatttgccacttgctcatc

SEQ ID NO: 134989 - DNA, 25 bp, probe
agaatgcagatgtggtgcttctcat

SEQ ID NO: 134990 - DNA, 25 bp, probe
agcaatggagagcggcgagcatgct

SEQ ID NO: 134991 - DNA, 25 bp, probe
agaaggaggtgcgactgcagctcta

SEQ ID NO: 134992 - DNA, 25 bp, probe
agaagaatcgtggctctgatgccca

SEQ ID NO: 134993 - DNA, 25 bp, probe
agaagaggctgggtgcagtggctca

SEQ ID NO: 134994 - DNA, 25 bp, probe
agaagcacgtgtttgagcaggcatc

SEQ ID NO: 134995 - DNA, 25 bp, probe
agaagcactggatccaaagcatgtc

SEQ ID NO: 134996 - DNA, 25 bp, probe
agaagccatgggataaagatgcctg

SEQ ID NO: 134997 - DNA, 25 bp, probe
agaacctgcaggatagaaagagtgg

SEQ ID NO: 134998 - DNA, 25 bp, probe
agaacctgcacactaagaacaagag

SEQ ID NO: 134999 - DNA, 25 bp, probe
agaagccatatcctgacagaagaag

SEQ ID NO: 135000 - DNA, 25 bp, probe
agaagccatcagaatagcgtctaga

SEQ ID NO: 135001 - DNA, 25 bp, probe
agaatgtatcatcagagcgccgagg

SEQ ID NO: 135002 - DNA, 25 bp, probe
agaagtcagaggcagctgtcggggc

SEQ ID NO: 135003 - DNA, 25 bp, probe
agaagtcagaggcagctgtcggggc

SEQ ID NO: 135004 - DNA, 25 bp, probe
agaaccaggcgccctgaggatggag

SEQ ID NO: 135005 - DNA, 25 bp, probe
agaaccaagcgcccatgatgatggg

SEQ ID NO: 135006 - DNA, 25 bp, probe
agaaccagatgcccatgctcatggg

SEQ ID NO: 135007 - DNA, 25 bp, probe
agaacctgctgtctgccagagagga

SEQ ID NO: 135008 - DNA, 25 bp, probe
agaatcgtggctctgatgcccagga

SEQ ID NO: 135009 - DNA, 25 bp, probe
agcacaagggcacattgcccatggc

SEQ ID NO: 135010 - DNA, 25 bp, probe
agaagaggtgtccttacagaggcct

SEQ ID NO: 135011 - DNA, 25 bp, probe
agaagatggtgtggtctacgaggtc

SEQ ID NO: 135012 - DNA, 25 bp, probe
agaagggagctcatcttctgggtcc

SEQ ID NO: 135013 - DNA, 25 bp, probe
agaaggggctgttcttcagtggttc

SEQ ID NO: 135014 - DNA, 25 bp, probe
agaagagtgtctgcaaatcatgtgg

SEQ ID NO: 135015 - DNA, 25 bp, probe
agaagagagcatagccacctagggg

SEQ ID NO: 135016 - DNA, 25 bp, probe
agaagagagcatagccacctagggg

SEQ ID NO: 135017 - DNA, 25 bp, probe
agaatagcatgaaccagcctgggcc

SEQ ID NO: 135018 - DNA, 25 bp, probe
agaatagcatgaaccagcctgggcc

SEQ ID NO: 135019 - DNA, 25 bp, probe
agcaaccataactgccactgtgctc

SEQ ID NO: 135020 - DNA, 25 bp, probe
agcaaccataactgccactgtgctc

SEQ ID NO: 135021 - DNA, 25 bp, probe
agcaccagcatctctatgccaagat

SEQ ID NO: 135022 - DNA, 25 bp, probe
agcaccagcatctctatgccaagat

SEQ ID NO: 135023 - DNA, 25 bp, probe
agcactcgcctgaagttgaagatgt

SEQ ID NO: 135024 - DNA, 25 bp, probe
agcactcgcctgaagttgaagatgt

SEQ ID NO: 135025 - DNA, 25 bp, probe
agcacagttcttggttgaacatgaa

SEQ ID NO: 135026 - DNA, 25 bp, probe
agaatgattcttcttatactctgaa

SEQ ID NO: 135027 - DNA, 25 bp, probe
agaatttcatggcctctgagttgga

SEQ ID NO: 135028 - DNA, 25 bp, probe
agaatgctgatctcagcttggcttt

SEQ ID NO: 135029 - DNA, 25 bp, probe
agaatgctgatctcagcttggcttt

SEQ ID NO: 135030 - DNA, 25 bp, probe
agaattatgtcaggttggcttgtcc

SEQ ID NO: 135031 - DNA, 25 bp, probe
agaattagtcttttgtgttgtttat

SEQ ID NO: 135032 - DNA, 25 bp, probe
agaagtatggctctgttctttctat

SEQ ID NO: 135033 - DNA, 25 bp, probe
agaagaagcagcactttctgttgat

SEQ ID NO: 135034 - DNA, 25 bp, probe
agaagatagctctctgactgctttg

SEQ ID NO: 135035 - DNA, 25 bp, probe
agaagtcgttcctactgacattgta

SEQ ID NO: 135036 - DNA, 25 bp, probe
agaattcactctgctactatctgct

SEQ ID NO: 135037 - DNA, 25 bp, probe
agaagtcagtcggtatgctctggca

SEQ ID NO: 135038 - DNA, 25 bp, probe
agaattggatctggatcatttggaa

SEQ ID NO: 135039 - DNA, 25 bp, probe
agaatgttaatccatattggcagaa

SEQ ID NO: 135040 - DNA, 25 bp, probe
agaagtagcaatgacaatgaccaag

SEQ ID NO: 135041 - DNA, 25 bp, probe
agaagtagcaatgacaatgaccaag

SEQ ID NO: 135042 - DNA, 25 bp, probe
agaagtcaagggtggagccagagaa

SEQ ID NO: 135043 - DNA, 25 bp, probe
agccgacacgggagtaccagaacac

SEQ ID NO: 135044 - DNA, 25 bp, probe
caaatactggggtgtcctcaagacc

SEQ ID NO: 135045 - DNA, 25 bp, probe
acaaatactggggtgtcctcaagac

SEQ ID NO: 135046 - DNA, 25 bp, probe
agcagaagccgaggagggccgggac

SEQ ID NO: 135047 - DNA, 25 bp, probe
agcagaagccgaggagggccgggac

SEQ ID NO: 135048 - DNA, 25 bp, probe
agcagaagccgaggagggccgggac

SEQ ID NO: 135049 - DNA, 25 bp, probe
agcagaatccaacaatggccgtaca

SEQ ID NO: 135050 - DNA, 25 bp, probe
agcaggtggagtatgggccgctaca

SEQ ID NO: 135051 - DNA, 25 bp, probe
agcaaaggaggacctggctcctgac

SEQ ID NO: 135052 - DNA, 25 bp, probe
agaagagagatgctgctctggccct

SEQ ID NO: 135053 - DNA, 25 bp, probe
agaagagagatgctgctctggccct

SEQ ID NO: 135054 - DNA, 25 bp, probe
agcacagtgagaagtctcaggtctg

SEQ ID NO: 135055 - DNA, 25 bp, probe
agaagaggctcattccaggtttcat

SEQ ID NO: 135056 - DNA, 25 bp, probe
agaagatggtcaactacctggtcat

SEQ ID NO: 135057 - DNA, 25 bp, probe
agcagaaggactgtaccggatcaca

SEQ ID NO: 135058 - DNA, 25 bp, probe
agaaggcacagtgctaccgcagaac

SEQ ID NO: 135059 - DNA, 25 bp, probe
agcagacgacggactgagaccaaac

SEQ ID NO: 135060 - DNA, 25 bp, probe
agaatcgagtggtgaaacagaacaa

SEQ ID NO: 135061 - DNA, 25 bp, probe
agaatctgaaggtgagaatctgagt

SEQ ID NO: 135062 - DNA, 25 bp, probe
agaagctgcagggcgtggagtgcgg

SEQ ID NO: 135063 - DNA, 25 bp, probe
agaagctgcagggcgtggagtgcgg

SEQ ID NO: 135064 - DNA, 25 bp, probe
agaaggctgtgatgtcgctgtcagg

SEQ ID NO: 135065 - DNA, 25 bp, probe
agaagacagacttgcttcccagggc

SEQ ID NO: 135066 - DNA, 25 bp, probe
agaagacaccttgtgctcatgggcc

SEQ ID NO: 135067 - DNA, 25 bp, probe
agaagacagttacctggcagggacg

SEQ ID NO: 135068 - DNA, 25 bp, probe
agaagcaaactgcccttgcatggaa

SEQ ID NO: 135069 - DNA, 25 bp, probe
agaagccaactaactctgcagatgg

SEQ ID NO: 135070 - DNA, 25 bp, probe
agaatgccttccagctcatggatga

SEQ ID NO: 135071 - DNA, 25 bp, probe
agaatggaatcctctgtggatgacg

SEQ ID NO: 135072 - DNA, 25 bp, probe
agaagagactcgtgtgtggcaccgc

SEQ ID NO: 135073 - DNA, 25 bp, probe
agcagggaactcagtgtgacaccgc

SEQ ID NO: 135074 - DNA, 25 bp, probe
agcacgggacacatgtttcacattg

SEQ ID NO: 135075 - DNA, 25 bp, probe
agcacgggacacatgtttcacattg

SEQ ID NO: 135076 - DNA, 25 bp, probe
agaagggacacctttcacagctatc

SEQ ID NO: 135077 - DNA, 25 bp, probe
agaagggacacctttcacagctatc

SEQ ID NO: 135078 - DNA, 25 bp, probe
agaagggctgcaacattcgcacaca

SEQ ID NO: 135079 - DNA, 25 bp, probe
agaatgaggtcaacatcatgaacca

SEQ ID NO: 135080 - DNA, 25 bp, probe
agaagagcagcgacacttgcaaccc

SEQ ID NO: 135081 - DNA, 25 bp, probe
agaagatgagcgatgcggaccctgc

SEQ ID NO: 135082 - DNA, 25 bp, probe
agaatgatggccagagggctcccct

SEQ ID NO: 135083 - DNA, 25 bp, probe
agaagaggcacaaaggagttacatc

SEQ ID NO: 135084 - DNA, 25 bp, probe
agaagaggcacaaaggagttacatc

SEQ ID NO: 135085 - DNA, 25 bp, probe
agaagcggcaaaagcaggtacctgc

SEQ ID NO: 135086 - DNA, 25 bp, probe
agaagtggcaaaagcgcttattttt

SEQ ID NO: 135087 - DNA, 25 bp, probe
agcacagttaaaaggtcaatattct

SEQ ID NO: 135088 - DNA, 25 bp, probe
agcaatttccaacctgacaaatccg

SEQ ID NO: 135089 - DNA, 25 bp, probe
agcagacttctgacggtccaaatcc

SEQ ID NO: 135090 - DNA, 25 bp, probe
agcaatcttgcatatgagtccattc

SEQ ID NO: 135091 - DNA, 25 bp, probe
agcaatcttgcatatgagtccattc

SEQ ID NO: 135092 - DNA, 25 bp, probe
agcagatcatgcactgaggaatttc

SEQ ID NO: 135093 - DNA, 25 bp, probe
agcaccaatccttgcaaattacctg

SEQ ID NO: 135094 - DNA, 25 bp, probe
agcaacatgtcacaacaataacctc

SEQ ID NO: 135095 - DNA, 25 bp, probe
agaagttcaccagcagctaagtgct

SEQ ID NO: 135096 - DNA, 25 bp, probe
agaagttcaccagcagctaagtgct

SEQ ID NO: 135097 - DNA, 25 bp, probe
agcaagttattcacattatagattt

SEQ ID NO: 135098 - DNA, 25 bp, probe
agaagttgtcactcattgtcatgtt

SEQ ID NO: 135099 - DNA, 25 bp, probe
agaagagcagttttcctgtgcatat

SEQ ID NO: 135100 - DNA, 25 bp, probe
agaagtagtgtttccatgctctgtg

SEQ ID NO: 135101 - DNA, 25 bp, probe
agaatgttcattttcatcgctcggg

SEQ ID NO: 135102 - DNA, 25 bp, probe
agaatttgcatttatctcaacagtg

SEQ ID NO: 135103 - DNA, 25 bp, probe
agaatctgatgctttctgatcaaca

SEQ ID NO: 135104 - DNA, 25 bp, probe
agaatcatgctcaagttgtggctca

SEQ ID NO: 135105 - DNA, 25 bp, probe
agaagcttcacaggctgagagctca

SEQ ID NO: 135106 - DNA, 25 bp, probe
agaaggccacatggctgacattagc

SEQ ID NO: 135107 - DNA, 25 bp, probe
agaagagccagtcagatgtctgcag

SEQ ID NO: 135108 - DNA, 25 bp, probe
agaatgacacagtctgggatctcaa

SEQ ID NO: 135109 - DNA, 25 bp, probe
agaatgagacattggagaacctgaa

SEQ ID NO: 135110 - DNA, 25 bp, probe
agcaatgtgacaagtatgacgccca

SEQ ID NO: 135111 - DNA, 25 bp, probe
agcaagctaaagcatggcggccatc

SEQ ID NO: 135112 - DNA, 25 bp, probe
agcaatgctaagaacatggtgacca

SEQ ID NO: 135113 - DNA, 25 bp, probe
agcagagaaaaccatgtgatacgat

SEQ ID NO: 135114 - DNA, 25 bp, probe
agcacgatgaagactggaaagcgac

SEQ ID NO: 135115 - DNA, 25 bp, probe
agcacgatgaagactggaaagcgac

SEQ ID NO: 135116 - DNA, 25 bp, probe
agcagcggacaaataaaactcgctg

SEQ ID NO: 135117 - DNA, 25 bp, probe
agcagccctcacaaaaaggccttgt

SEQ ID NO: 135118 - DNA, 25 bp, probe
agcacctcaaaaaaacaggtatcat

SEQ ID NO: 135119 - DNA, 25 bp, probe
agcacccaaagtatcattgtgaaca

SEQ ID NO: 135120 - DNA, 25 bp, probe
agcaccctttgtttcgggagatcaa

SEQ ID NO: 135121 - DNA, 25 bp, probe
agcaccacgtctgctacggtgagtt

SEQ ID NO: 135122 - DNA, 25 bp, probe
agcaccaagtctttcaacgtgatgt

SEQ ID NO: 135123 - DNA, 25 bp, probe
agcccaactttttcacagcagatta

SEQ ID NO: 135124 - DNA, 25 bp, probe
agcagcccgcatattaggcgcagat

SEQ ID NO: 135125 - DNA, 25 bp, probe
agcagccctatgacttgtatgacaa

SEQ ID NO: 135126 - DNA, 25 bp, probe
agccatgcctttctgtatagtacac

SEQ ID NO: 135127 - DNA, 25 bp, probe
agctcagcttagaagttcgaaaact

SEQ ID NO: 135128 - DNA, 25 bp, probe
agcaagccatagacagcctgcgaga

SEQ ID NO: 135129 - DNA, 25 bp, probe
agcagcacctactatgcttcaggca

SEQ ID NO: 135130 - DNA, 25 bp, probe
agcaatttatgcttcttgggaggcc

SEQ ID NO: 135131 - DNA, 25 bp, probe
agcagtttgtctgcttcttcaagcc

SEQ ID NO: 135132 - DNA, 25 bp, probe
agcagtcggcctacgacttcaaggc

SEQ ID NO: 135133 - DNA, 25 bp, probe
agcagtcggatgtgaggttcagcag

SEQ ID NO: 135134 - DNA, 25 bp, probe
agaatcaactgttgcctctcatacc

SEQ ID NO: 135135 - DNA, 25 bp, probe
agaagcaacatttctggcctgacct

SEQ ID NO: 135136 - DNA, 25 bp, probe
agaagcaacatttctggcctgacct

SEQ ID NO: 135137 - DNA, 25 bp, probe
agaagagccatcccatggccatgtc

SEQ ID NO: 135138 - DNA, 25 bp, probe
agaagagccatcccatggccatgtc

SEQ ID NO: 135139 - DNA, 25 bp, probe
agaagagctatccccgatgatgact

SEQ ID NO: 135140 - DNA, 25 bp, probe
agcactgtataccccgtgaagcatc

SEQ ID NO: 135141 - DNA, 25 bp, probe
agaatgatataactcctgtgcaatg

SEQ ID NO: 135142 - DNA, 25 bp, probe
agaagtctacaggccttgcactggc

SEQ ID NO: 135143 - DNA, 25 bp, probe
agaagtctacaggccttgcactggc

SEQ ID NO: 135144 - DNA, 25 bp, probe
agaaggctcaggacaccgagctggc

SEQ ID NO: 135145 - DNA, 25 bp, probe
agcagaggctgaagatcacctacag

SEQ ID NO: 135146 - DNA, 25 bp, probe
agcaggcacgttaactcgaattctc

SEQ ID NO: 135147 - DNA, 25 bp, probe
agcaggaagttatctagcaagccgc

SEQ ID NO: 135148 - DNA, 25 bp, probe
agcaaaacaaatttagcccactgcc

SEQ ID NO: 135149 - DNA, 25 bp, probe
agaatgaccaaatttacgccatgaa

SEQ ID NO: 135150 - DNA, 25 bp, probe
agaatatctatgatttacagagtaa

SEQ ID NO: 135151 - DNA, 25 bp, probe
agaatactattcttaaagctgctga

SEQ ID NO: 135152 - DNA, 25 bp, probe
agaagactattcttggatggggacc

SEQ ID NO: 135153 - DNA, 25 bp, probe
agaagactattcttggatggggacc

SEQ ID NO: 135154 - DNA, 25 bp, probe
agcaggtctttgtggagcgtgacat

SEQ ID NO: 135155 - DNA, 25 bp, probe
agctgggctttatcgtggagaaggc

SEQ ID NO: 135156 - DNA, 25 bp, probe
agcgggtatggaggcgtcccaagac

SEQ ID NO: 135157 - DNA, 25 bp, probe
actggttggtgttcttcccaaagca

SEQ ID NO: 135158 - DNA, 25 bp, probe
cttcgttggcagagatttccaagaa

SEQ ID NO: 135159 - DNA, 25 bp, probe
ctcgggtctggacaattcggcgaag

SEQ ID NO: 135160 - DNA, 25 bp, probe
agcggcgttggtcaaagcggagacc

SEQ ID NO: 135161 - DNA, 25 bp, probe
agcggcgtaagtttaaaggatgttg

SEQ ID NO: 135162 - DNA, 25 bp, probe
agaaggtacgctctacaagggcagg

SEQ ID NO: 135163 - DNA, 25 bp, probe
agaaggacacccggacaatgctggc

SEQ ID NO: 135164 - DNA, 25 bp, probe
agcaaggcatcccagaggcaagggg

SEQ ID NO: 135165 - DNA, 25 bp, probe
agcaaaatgcccttggcactggaag

SEQ ID NO: 135166 - DNA, 25 bp, probe
agcaaggtggctttgtagtggacaa

SEQ ID NO: 135167 - DNA, 25 bp, probe
agcacaggtggcatatgcgagcaaa

SEQ ID NO: 135168 - DNA, 25 bp, probe
agctcaaggtgcatttcaaactcca

SEQ ID NO: 135169 - DNA, 25 bp, probe
agcaatacgtttgtgcagaatctct

SEQ ID NO: 135170 - DNA, 25 bp, probe
agcctacgtgggacctgagatactc

SEQ ID NO: 135171 - DNA, 25 bp, probe
agcaggcccgagccgcctggatacc

SEQ ID NO: 135172 - DNA, 25 bp, probe
agaaggcctcagccatgcttggata

SEQ ID NO: 135173 - DNA, 25 bp, probe
agaaggcctcagccatgcttggata

SEQ ID NO: 135174 - DNA, 25 bp, probe
agaagtgttgagccatgctacagtt

SEQ ID NO: 135175 - DNA, 25 bp, probe
agaatggcttgtcccatcagcagat

SEQ ID NO: 135176 - DNA, 25 bp, probe
agaatgtgctcaacaaccagcagtt

SEQ ID NO: 135177 - DNA, 25 bp, probe
agaatgtatcttgcatccctgtatg

SEQ ID NO: 135178 - DNA, 25 bp, probe
agaatgattccaacactgctcttct

SEQ ID NO: 135179 - DNA, 25 bp, probe
agaatgttcattccagcttcttcag

SEQ ID NO: 135180 - DNA, 25 bp, probe
agcaattctaatccactttgggttt

SEQ ID NO: 135181 - DNA, 25 bp, probe
agaatgtccacctactttcagtgac

SEQ ID NO: 135182 - DNA, 25 bp, probe
agaatttcccatgcatttactagat

SEQ ID NO: 135183 - DNA, 25 bp, probe
agaatattccataaacttagctgtg

SEQ ID NO: 135184 - DNA, 25 bp, probe
caggttttatgagacttcctattaa

SEQ ID NO: 135185 - DNA, 25 bp, probe
agcttttcatggagcacttcctttc

SEQ ID NO: 135186 - DNA, 25 bp, probe
agaattgtcaggagtgcacctctct

SEQ ID NO: 135187 - DNA, 25 bp, probe
agaatattaagttttcctctgtgca

SEQ ID NO: 135188 - DNA, 25 bp, probe
agaatcattaaattgtgtccctgta

SEQ ID NO: 135189 - DNA, 25 bp, probe
agaatgcactgttgagggaccctta

SEQ ID NO: 135190 - DNA, 25 bp, probe
agcagaagctgatggacgaccttct

SEQ ID NO: 135191 - DNA, 25 bp, probe
agcacaactgggtcctttattcatt

SEQ ID NO: 135192 - DNA, 25 bp, probe
agcacaaaggtactcatttgtaatc

SEQ ID NO: 135193 - DNA, 25 bp, probe
agcacaaaggtactcatttgtaatc

SEQ ID NO: 135194 - DNA, 25 bp, probe
agcacaaatggtttgagggctttaa

SEQ ID NO: 135195 - DNA, 25 bp, probe
agcaacgtgagttatccgcttttca

SEQ ID NO: 135196 - DNA, 25 bp, probe
agcttcctgtgtcacggtgttatca

SEQ ID NO: 135197 - DNA, 25 bp, probe
agcaacactggtcacgtttggaaag

SEQ ID NO: 135198 - DNA, 25 bp, probe
agcagaccgccctggtaagaaacag

SEQ ID NO: 135199 - DNA, 25 bp, probe
agcagagcctgaccctaaaaagaaa

SEQ ID NO: 135200 - DNA, 25 bp, probe
agcagaggtaccacgaagctacctt

SEQ ID NO: 135201 - DNA, 25 bp, probe
agcagaggtaccacgaagctacctt

SEQ ID NO: 135202 - DNA, 25 bp, probe
agcaacgctaccacgaagacatttt

SEQ ID NO: 135203 - DNA, 25 bp, probe
agaagggacattccacaaccatttt

SEQ ID NO: 135204 - DNA, 25 bp, probe
agaagggacattccacaaccatttt

SEQ ID NO: 135205 - DNA, 25 bp, probe
agaatgtgtcactgtcttacctttc

SEQ ID NO: 135206 - DNA, 25 bp, probe
agaatgtgtcactgtcttacctttc

SEQ ID NO: 135207 - DNA, 25 bp, probe
agaatgtgcacagactcttcacctc

SEQ ID NO: 135208 - DNA, 25 bp, probe
agaagatgccccattatatcctcat

SEQ ID NO: 135209 - DNA, 25 bp, probe
agaagtgtgcccagtactggccatc

SEQ ID NO: 135210 - DNA, 25 bp, probe
agaagtgtgcccagtactggccatc

SEQ ID NO: 135211 - DNA, 25 bp, probe
agaagttgacctttgcactggcatt

SEQ ID NO: 135212 - DNA, 25 bp, probe
agaaggtgacagacttcatgctgtg

SEQ ID NO: 135213 - DNA, 25 bp, probe
agaagtgtgtcagtctgtctgtctt

SEQ ID NO: 135214 - DNA, 25 bp, probe
agaattggtttgctctgatcattgc

SEQ ID NO: 135215 - DNA, 25 bp, probe
agaatgtgaatcatggtgtacttgt

SEQ ID NO: 135216 - DNA, 25 bp, probe
agaatgtgaatcatggtgtacttgt

SEQ ID NO: 135217 - DNA, 25 bp, probe
agaagatcaacaaacagaacttgat

SEQ ID NO: 135218 - DNA, 25 bp, probe
agaagtcacacattacaaagttaaa

SEQ ID NO: 135219 - DNA, 25 bp, probe
agaagtcagctatacagacactaaa

SEQ ID NO: 135220 - DNA, 25 bp, probe
agcactgctaaatactgtacataga

SEQ ID NO: 135221 - DNA, 25 bp, probe
agcaatgccaagagaatgatcaata

SEQ ID NO: 135222 - DNA, 25 bp, probe
agaatctccagaataccagcaaccg

SEQ ID NO: 135223 - DNA, 25 bp, probe
agaatctgctccaaaaagctggcca

SEQ ID NO: 135224 - DNA, 25 bp, probe
agaatttcccaaagcagtgcatgct

SEQ ID NO: 135225 - DNA, 25 bp, probe
agaatttcccaaagcagtgcatgct

SEQ ID NO: 135226 - DNA, 25 bp, probe
agaagtgggccaggacaggcccggc

SEQ ID NO: 135227 - DNA, 25 bp, probe
agaaggtgcttagcacaagcccgcc

SEQ ID NO: 135228 - DNA, 25 bp, probe
agaagtttctagaagccactccagc

SEQ ID NO: 135229 - DNA, 25 bp, probe
agaaggcttgtattagtcccaagcc

SEQ ID NO: 135230 - DNA, 25 bp, probe
agaatggtgttattactgacaaggc

SEQ ID NO: 135231 - DNA, 25 bp, probe
agaagggtcatatcatccacatcga

SEQ ID NO: 135232 - DNA, 25 bp, probe
agaaggtctcattatctccatgata

SEQ ID NO: 135233 - DNA, 25 bp, probe
agaagttcgaaaactcagcaatggc

SEQ ID NO: 135234 - DNA, 25 bp, probe
agaagtgacggttcctacacaggac

SEQ ID NO: 135235 - DNA, 25 bp, probe
agcaggatagggagagccccaggac

SEQ ID NO: 135236 - DNA, 25 bp, probe
agcagaacgaggaaaccccagctcc

SEQ ID NO: 135237 - DNA, 25 bp, probe
agcaaccatgacctgaaacctcagc

SEQ ID NO: 135238 - DNA, 25 bp, probe
agcaaggcagactggtacctcgtta

SEQ ID NO: 135239 - DNA, 25 bp, probe
agaatcatcacctgtgtacctaggt

SEQ ID NO: 135240 - DNA, 25 bp, probe
agcaaaccggggcctactagagtct

SEQ ID NO: 135241 - DNA, 25 bp, probe
agcacaaccggttcacaaaggagac

SEQ ID NO: 135242 - DNA, 25 bp, probe
agcccccaagtaagaagtctgagtc

SEQ ID NO: 135243 - DNA, 25 bp, probe
agctcctagggtacagtctactagt

SEQ ID NO: 135244 - DNA, 25 bp, probe
agcaactcatcgattgatttacggc

SEQ ID NO: 135245 - DNA, 25 bp, probe
agcaccctgaacatacctactgagg

SEQ ID NO: 135246 - DNA, 25 bp, probe
agcactttaattccaatgtaccagg

SEQ ID NO: 135247 - DNA, 25 bp, probe
agcacttgtagtgtccagttcacag

SEQ ID NO: 135248 - DNA, 25 bp, probe
agaatgtttgctgatcgcagatctc

SEQ ID NO: 135249 - DNA, 25 bp, probe
agaatgtttgctgatcgcagatctc

SEQ ID NO: 135250 - DNA, 25 bp, probe
agcacgatgttggaatccgacttgg

SEQ ID NO: 135251 - DNA, 25 bp, probe
agcacgtgtttgagcaggcatccag

SEQ ID NO: 135252 - DNA, 25 bp, probe
agaagggtgtgcaagaagcaggctg

SEQ ID NO: 135253 - DNA, 25 bp, probe
agaatggctgggcagagcagagggg

SEQ ID NO: 135254 - DNA, 25 bp, probe
agaaggcgtgggggacaagaaggat

SEQ ID NO: 135255 - DNA, 25 bp, probe
agaatggagtggggtaaaagtgtat

SEQ ID NO: 135256 - DNA, 25 bp, probe
agaatggagtggggtaaaagtgtat

SEQ ID NO: 135257 - DNA, 25 bp, probe
agaagggaaccgaagccaagtgata

SEQ ID NO: 135258 - DNA, 25 bp, probe
agcaggggagtggcttcccaaggtc

SEQ ID NO: 135259 - DNA, 25 bp, probe
agcaggggagtggcttcccaaggtc

SEQ ID NO: 135260 - DNA, 25 bp, probe
agcaaaagtcttatccccagagagc

SEQ ID NO: 135261 - DNA, 25 bp, probe
agcaaaatctaagtccttccagggc

SEQ ID NO: 135262 - DNA, 25 bp, probe
agcaaataatattcgttttctgggt

SEQ ID NO: 135263 - DNA, 25 bp, probe
accaataaccagctcttcttcctgg

SEQ ID NO: 135264 - DNA, 25 bp, probe
agcacatctaacgagtagctcattt

SEQ ID NO: 135265 - DNA, 25 bp, probe
agcagcgtgcaatagctggctcctc

SEQ ID NO: 135266 - DNA, 25 bp, probe
agcagcgtgcaatagctggctcctc

SEQ ID NO: 135267 - DNA, 25 bp, probe
agcagtggggcaggtcctgcctctg

SEQ ID NO: 135268 - DNA, 25 bp, probe
agcaatagcgagggtcgtgagcttt

SEQ ID NO: 135269 - DNA, 25 bp, probe
agaatacttgaagcagtatgctgct

SEQ ID NO: 135270 - DNA, 25 bp, probe
agcaaatgctgcagaaagtatcctg

SEQ ID NO: 135271 - DNA, 25 bp, probe
agcaatactcagcccaagaatttgt

SEQ ID NO: 135272 - DNA, 25 bp, probe
agaattcctgtcatggatatggctt

SEQ ID NO: 135273 - DNA, 25 bp, probe
agcaatttctacacgagatcctctc

SEQ ID NO: 135274 - DNA, 25 bp, probe
agcagttttaacgtttcgctctcgc

SEQ ID NO: 135275 - DNA, 25 bp, probe
agcagttttaacgtttcgctctcgc

SEQ ID NO: 135276 - DNA, 25 bp, probe
agcaccttgtgttactttactcgct

SEQ ID NO: 135277 - DNA, 25 bp, probe
agcacctgaagttattttagcccta

SEQ ID NO: 135278 - DNA, 25 bp, probe
agcaccgaggcctatgttagggcct

SEQ ID NO: 135279 - DNA, 25 bp, probe
agcaccagggactatgaatgggcaa

SEQ ID NO: 135280 - DNA, 25 bp, probe
agcttcaaggacaataagatgttaa

SEQ ID NO: 135281 - DNA, 25 bp, probe
agcttcgaactcaaaatcatggaaa

SEQ ID NO: 135282 - DNA, 25 bp, probe
agcttggaagtcatacccgaaaaag

SEQ ID NO: 135283 - DNA, 25 bp, probe
agcttcagttgttttcccgagcaaa

SEQ ID NO: 135284 - DNA, 25 bp, probe
agcttaagatggtgccttcgtgaag

SEQ ID NO: 135285 - DNA, 25 bp, probe
agctaacctagaggccaccgagaaa

SEQ ID NO: 135286 - DNA, 25 bp, probe
agcaacaactacaacggcctgatga

SEQ ID NO: 135287 - DNA, 25 bp, probe
agcaacgtcttgaacaggcgctgat

SEQ ID NO: 135288 - DNA, 25 bp, probe
agcaacagaggtgccaggcctcagc

SEQ ID NO: 135289 - DNA, 25 bp, probe
agcaagaggagtccaagtcacaccc

SEQ ID NO: 135290 - DNA, 25 bp, probe
agaatgggagctaccgctgcaagtg

SEQ ID NO: 135291 - DNA, 25 bp, probe
agaagtggagcttctgagggatgca

SEQ ID NO: 135292 - DNA, 25 bp, probe
agaaggccattgaggggcacaccaa

SEQ ID NO: 135293 - DNA, 25 bp, probe
agaaggcctatgtggaggccaacca

SEQ ID NO: 135294 - DNA, 25 bp, probe
agcaaggcgctatggtcaggagacc

SEQ ID NO: 135295 - DNA, 25 bp, probe
agcaaggcagcgtggtggtcatggc

SEQ ID NO: 135296 - DNA, 25 bp, probe
agcacagctgtgcgggtgggagact

SEQ ID NO: 135297 - DNA, 25 bp, probe
agaagtgtgtggctgagctgggtcc

SEQ ID NO: 135298 - DNA, 25 bp, probe
agaaggtgctggatagatgcttctc

SEQ ID NO: 135299 - DNA, 25 bp, probe
agaaggtgctggatagatgcttctc

SEQ ID NO: 135300 - DNA, 25 bp, probe
agaaggtgctgttgtaatcagtgga

SEQ ID NO: 135301 - DNA, 25 bp, probe
agaaggtgctgttgtaatcagtgga

SEQ ID NO: 135302 - DNA, 25 bp, probe
agaaggctctgcaggacacacctga

SEQ ID NO: 135303 - DNA, 25 bp, probe
agaatgtgcttctggatgacctcgg

SEQ ID NO: 135304 - DNA, 25 bp, probe
agaatgtgcttctggatgacctcgg

SEQ ID NO: 135305 - DNA, 25 bp, probe
agaatctgcgtctgagatctctctg

SEQ ID NO: 135306 - DNA, 25 bp, probe
agaatcatggacaaaacctgctgga

SEQ ID NO: 135307 - DNA, 25 bp, probe
agaatcagccagccaacaatgtctg

SEQ ID NO: 135308 - DNA, 25 bp, probe
agcaatcaccaagacatatgtgagg

SEQ ID NO: 135309 - DNA, 25 bp, probe
agcaatcaccaagacatatgtgagg

SEQ ID NO: 135310 - DNA, 25 bp, probe
agcaacgccacagcatcaaggatgt

SEQ ID NO: 135311 - DNA, 25 bp, probe
agcagactcacctctggagggtcgt

SEQ ID NO: 135312 - DNA, 25 bp, probe
agcaacctgcatctgctggagggtg

SEQ ID NO: 135313 - DNA, 25 bp, probe
agcaactctatggtagggggagagg

SEQ ID NO: 135314 - DNA, 25 bp, probe
agcaccaaatccagggcggagggcc

SEQ ID NO: 135315 - DNA, 25 bp, probe
agcagcctaaagcaagggtaccgcc

SEQ ID NO: 135316 - DNA, 25 bp, probe
agcacctgaataggcaagtcgaggc

SEQ ID NO: 135317 - DNA, 25 bp, probe
agcacactgtcaaaatatccggaga

SEQ ID NO: 135318 - DNA, 25 bp, probe
agcaagctgtgagagtgcaggcggg

SEQ ID NO: 135319 - DNA, 25 bp, probe
agcaagccgctggggcttgggggct

SEQ ID NO: 135320 - DNA, 25 bp, probe
agcaacgggaagctgtgcggggcag

SEQ ID NO: 135321 - DNA, 25 bp, probe
agcaagtgaagaactctgtcgaagg

SEQ ID NO: 135322 - DNA, 25 bp, probe
agcagcaaagcctccttccagaggc

SEQ ID NO: 135323 - DNA, 25 bp, probe
agcagcaaagcctccttccagaggc

SEQ ID NO: 135324 - DNA, 25 bp, probe
agcagacagatggctctagttaaag

SEQ ID NO: 135325 - DNA, 25 bp, probe
agcagacagatggctctagttaaag

SEQ ID NO: 135326 - DNA, 25 bp, probe
agcaacagttctcagtctttagccc

SEQ ID NO: 135327 - DNA, 25 bp, probe
agcacacctatcttagtggttcccc

SEQ ID NO: 135328 - DNA, 25 bp, probe
agcactctctatggaaatagttgtc

SEQ ID NO: 135329 - DNA, 25 bp, probe
agcagccttgtggaaattgatggag

SEQ ID NO: 135330 - DNA, 25 bp, probe
agcagcctcttcgaaatcaggtggt

SEQ ID NO: 135331 - DNA, 25 bp, probe
agcagcttttaatacagggtagata

SEQ ID NO: 135332 - DNA, 25 bp, probe
agcagtaactgacaacttgaataat

SEQ ID NO: 135333 - DNA, 25 bp, probe
agaatatctctaaaacatggaaaat

SEQ ID NO: 135334 - DNA, 25 bp, probe
agcaattgcctctgaaagacataac

SEQ ID NO: 135335 - DNA, 25 bp, probe
agaattgccacaaacaaggctcaaa

SEQ ID NO: 135336 - DNA, 25 bp, probe
agcagatctccgagacctgtctgaa

SEQ ID NO: 135337 - DNA, 25 bp, probe
agcatttcttaagtgcctatctaaa

SEQ ID NO: 135338 - DNA, 25 bp, probe
agcattcactaagccctacatagga

SEQ ID NO: 135339 - DNA, 25 bp, probe
agcttcctgacggagcgcaacattt

SEQ ID NO: 135340 - DNA, 25 bp, probe
agcttcctgacggagcgcaacattt

SEQ ID NO: 135341 - DNA, 25 bp, probe
agcagccgctaagactgcaagcctt

SEQ ID NO: 135342 - DNA, 25 bp, probe
agcactgtttgagatctacgccatc

SEQ ID NO: 135343 - DNA, 25 bp, probe
agcactgtttgagatctacgccatc

SEQ ID NO: 135344 - DNA, 25 bp, probe
agcacgttgctgtcgattaagaccg

SEQ ID NO: 135345 - DNA, 25 bp, probe
agcagcgatgtggagcagacagcaa

SEQ ID NO: 135346 - DNA, 25 bp, probe
agcagcgttgggagcacatcgaccc

SEQ ID NO: 135347 - DNA, 25 bp, probe
agcagcgttgtgccaaattgccctt

SEQ ID NO: 135348 - DNA, 25 bp, probe
agcaggtagggcttgtactcacttt

SEQ ID NO: 135349 - DNA, 25 bp, probe
agcaggtagggcttgtactcacttt

SEQ ID NO: 135350 - DNA, 25 bp, probe
agcacggtaatgtttgcactcatct

SEQ ID NO: 135351 - DNA, 25 bp, probe
agcaattgattttattgactgcgtc

SEQ ID NO: 135352 - DNA, 25 bp, probe
agcaatagacttcattgactgtgtc

SEQ ID NO: 135353 - DNA, 25 bp, probe
agaatagatgctgactgtactcctc

SEQ ID NO: 135354 - DNA, 25 bp, probe
agcaatattgcctgtgcttctcttc

SEQ ID NO: 135355 - DNA, 25 bp, probe
agaatgtatgcctctgttcttatgt

SEQ ID NO: 135356 - DNA, 25 bp, probe
agaattatactgcttcatattattt

SEQ ID NO: 135357 - DNA, 25 bp, probe
agaattcacaccctctatcataaac

SEQ ID NO: 135358 - DNA, 25 bp, probe
agcaatgtagtactgcctctataaa

SEQ ID NO: 135359 - DNA, 25 bp, probe
agcaatgtagtactgcctctataaa

SEQ ID NO: 135360 - DNA, 25 bp, probe
acattgtactactgattaaactgaa

SEQ ID NO: 135361 - DNA, 25 bp, probe
agcacttgtgctagcaaggtaacct

SEQ ID NO: 135362 - DNA, 25 bp, probe
agcacttgtgctagcaaggtaacct

SEQ ID NO: 135363 - DNA, 25 bp, probe
agcacttggtaggcagagttactcg

SEQ ID NO: 135364 - DNA, 25 bp, probe
agcacttttgaccaagtcctgctac

SEQ ID NO: 135365 - DNA, 25 bp, probe
agcacttttgaccaagtcctgctac

SEQ ID NO: 135366 - DNA, 25 bp, probe
agaataccgcaccataatcactgaa

SEQ ID NO: 135367 - DNA, 25 bp, probe
agaatatcagctgccatattacgac

SEQ ID NO: 135368 - DNA, 25 bp, probe
agaattcagctaacgcttccagacc

SEQ ID NO: 135369 - DNA, 25 bp, probe
agaatttgtgttccttgcagctgac

SEQ ID NO: 135370 - DNA, 25 bp, probe
agaatttgtgttccttgcagctgac

SEQ ID NO: 135371 - DNA, 25 bp, probe
agaattctatcatcctgctcaggag

SEQ ID NO: 135372 - DNA, 25 bp, probe
agcaattcttcagctgcaagaggaa

SEQ ID NO: 135373 - DNA, 25 bp, probe
agcaatgccttagctgggacgcata

SEQ ID NO: 135374 - DNA, 25 bp, probe
agcaacctgtgacaggatcaagcac

SEQ ID NO: 135375 - DNA, 25 bp, probe
agcaatggctaaagggtcaagatct

SEQ ID NO: 135376 - DNA, 25 bp, probe
agcaagagaacaaggtgctgaagat

SEQ ID NO: 135377 - DNA, 25 bp, probe
agcaagctccaacggctgatgaaaa

SEQ ID NO: 135378 - DNA, 25 bp, probe
agaatgtccaaggggcagacactcg

SEQ ID NO: 135379 - DNA, 25 bp, probe
agaatctccagagggccatatcccg

SEQ ID NO: 135380 - DNA, 25 bp, probe
agaatctccatatgaacatgtcttc

SEQ ID NO: 135381 - DNA, 25 bp, probe
agcagcaacctgagaactgttcctc

SEQ ID NO: 135382 - DNA, 25 bp, probe
agcagcaacctgagaactgttcctc

SEQ ID NO: 135383 - DNA, 25 bp, probe
agcaaacacattaagccttccacac

SEQ ID NO: 135384 - DNA, 25 bp, probe
agcacataacataaactgtaccacc

SEQ ID NO: 135385 - DNA, 25 bp, probe
agcgttacataatcattaccacggg

SEQ ID NO: 135386 - DNA, 25 bp, probe
agctggttcgaaaattaggccgagg

SEQ ID NO: 135387 - DNA, 25 bp, probe
agctggttcgaaaattaggccgagg

SEQ ID NO: 135388 - DNA, 25 bp, probe
agcagtttgccagaagctcagggtg

SEQ ID NO: 135389 - DNA, 25 bp, probe
agcagtttcatacaactgggagtct

SEQ ID NO: 135390 - DNA, 25 bp, probe
agcagtgatttatttcctgggttca

SEQ ID NO: 135391 - DNA, 25 bp, probe
agcacgtttcacttagcatgggatg

SEQ ID NO: 135392 - DNA, 25 bp, probe
agcacgtcgcttatattgggatgac

SEQ ID NO: 135393 - DNA, 25 bp, probe
agcagagtcactttgacaatgggaa

SEQ ID NO: 135394 - DNA, 25 bp, probe
agcaattcactgtaaagctggaaag

SEQ ID NO: 135395 - DNA, 25 bp, probe
agcaattgcccatcgagatctgaaa

SEQ ID NO: 135396 - DNA, 25 bp, probe
agcactgactactacaggttctaca

SEQ ID NO: 135397 - DNA, 25 bp, probe
agcacttcagactagcattgttcta

SEQ ID NO: 135398 - DNA, 25 bp, probe
agcacttcagactagcattgttcta

SEQ ID NO: 135399 - DNA, 25 bp, probe
agcactgtcataaagctcaactatg

SEQ ID NO: 135400 - DNA, 25 bp, probe
agcagctgctcatagacccaagagt

SEQ ID NO: 135401 - DNA, 25 bp, probe
agcaccgtgaagacgaatatgatct

SEQ ID NO: 135402 - DNA, 25 bp, probe
agcaccaataaaaaaatgactccta

SEQ ID NO: 135403 - DNA, 25 bp, probe
agcaccaataaaaaaatgactccta

SEQ ID NO: 135404 - DNA, 25 bp, probe
agcgcataataaggggaagacttta

SEQ ID NO: 135405 - DNA, 25 bp, probe
agctgtaacagagaagaaacctaaa

SEQ ID NO: 135406 - DNA, 25 bp, probe
agcagtactacagaacaaaggcaaa

SEQ ID NO: 135407 - DNA, 25 bp, probe
agcaaactcagcacagccaagaagc

SEQ ID NO: 135408 - DNA, 25 bp, probe
agcaaaacagtccaggccaaagagg

SEQ ID NO: 135409 - DNA, 25 bp, probe
agcagaaaatcctagagctggaaga

SEQ ID NO: 135410 - DNA, 25 bp, probe
agcagaacttccaaagagagttaaa

SEQ ID NO: 135411 - DNA, 25 bp, probe
agcacttactccaaaatgagtctac

SEQ ID NO: 135412 - DNA, 25 bp, probe
agccctttctgcacaaaaccagcaa

SEQ ID NO: 135413 - DNA, 25 bp, probe
agctctgttcctaaaaaatgcccga

SEQ ID NO: 135414 - DNA, 25 bp, probe
actgtggaccttgtattctccgtat

SEQ ID NO: 135415 - DNA, 25 bp, probe
acggaaacatttaactgctccttca

SEQ ID NO: 135416 - DNA, 25 bp, probe
agctgggtacatattaagtggcttg

SEQ ID NO: 135417 - DNA, 25 bp, probe
agctgggaatttatgaagttatggc

SEQ ID NO: 135418 - DNA, 25 bp, probe
agctgggcaactttttcctgaatga

SEQ ID NO: 135419 - DNA, 25 bp, probe
agcttggatcacattcatccctatc

SEQ ID NO: 135420 - DNA, 25 bp, probe
agctactgagctcatttcacttact

SEQ ID NO: 135421 - DNA, 25 bp, probe
agaatctgttccattacttgactga

SEQ ID NO: 135422 - DNA, 25 bp, probe
agcaagtttctcattactgtctgtg

SEQ ID NO: 135423 - DNA, 25 bp, probe
agaatgtgtctgcattgtcactgtt

SEQ ID NO: 135424 - DNA, 25 bp, probe
agaatgtgtctgatcctcatttttc

SEQ ID NO: 135425 - DNA, 25 bp, probe
agcaatcatgttaagtcttgttttc

SEQ ID NO: 135426 - DNA, 25 bp, probe
agcaacatgttctgtgtgggcttcc

SEQ ID NO: 135427 - DNA, 25 bp, probe
agcaagttctcgggagcggttctca

SEQ ID NO: 135428 - DNA, 25 bp, probe
agcaagttctcgggagcggttctca

SEQ ID NO: 135429 - DNA, 25 bp, probe
agcaagttgagggaagcttttctga

SEQ ID NO: 135430 - DNA, 25 bp, probe
agaatctgagagcaatggtttttac

SEQ ID NO: 135431 - DNA, 25 bp, probe
agaatctgaggttatgtctgatgtg

SEQ ID NO: 135432 - DNA, 25 bp, probe
agaatatgaagttgccgatgatgag

SEQ ID NO: 135433 - DNA, 25 bp, probe
agcactatgagatactcgaggtgga

SEQ ID NO: 135434 - DNA, 25 bp, probe
agcagtgtgagctacctgggggtgc

SEQ ID NO: 135435 - DNA, 25 bp, probe
agcaatatgacattcttggtgacag

SEQ ID NO: 135436 - DNA, 25 bp, probe
agcaattcatgcttcttgtggtctg

SEQ ID NO: 135437 - DNA, 25 bp, probe
agcatcatccagctttttttgttag

SEQ ID NO: 135438 - DNA, 25 bp, probe
agcaaactcttgctgtttatttatg

SEQ ID NO: 135439 - DNA, 25 bp, probe
agcaaaactctggctgtcttacttt

SEQ ID NO: 135440 - DNA, 25 bp, probe
agcaaaactctggctgtcttacttt

SEQ ID NO: 135441 - DNA, 25 bp, probe
agctcaaacttcctggtaactcaag

SEQ ID NO: 135442 - DNA, 25 bp, probe
agccaccaatccctgaaagattaag

SEQ ID NO: 135443 - DNA, 25 bp, probe
agcacccactccaataacagagtaa

SEQ ID NO: 135444 - DNA, 25 bp, probe
agcacgctcgtggaaaccacactca

SEQ ID NO: 135445 - DNA, 25 bp, probe
agcaggctgggcttatactagctcc

SEQ ID NO: 135446 - DNA, 25 bp, probe
agcagccaggtccagatacacctgc

SEQ ID NO: 135447 - DNA, 25 bp, probe
agcaacaggtatcgaggactctcca

SEQ ID NO: 135448 - DNA, 25 bp, probe
agcactagcctccaggttttacatc

SEQ ID NO: 135449 - DNA, 25 bp, probe
agcatcgggctaagactttaactca

SEQ ID NO: 135450 - DNA, 25 bp, probe
agcacgattctgtgactgtttttct

SEQ ID NO: 135451 - DNA, 25 bp, probe
agcacgtgtggctgacgaatttgtt

SEQ ID NO: 135452 - DNA, 25 bp, probe
agcacaggtggctgcaggaatggct

SEQ ID NO: 135453 - DNA, 25 bp, probe
agcaaggatgtgtacaacagtgagt

SEQ ID NO: 135454 - DNA, 25 bp, probe
agcaaggggctgaccacagtgttct

SEQ ID NO: 135455 - DNA, 25 bp, probe
agcaagaagagctcctctgttcact

SEQ ID NO: 135456 - DNA, 25 bp, probe
agcaagcacagatgtacaggtatca

SEQ ID NO: 135457 - DNA, 25 bp, probe
agctgagcccaggctaaactgccaa

SEQ ID NO: 135458 - DNA, 25 bp, probe
agcaggctctctggcttaagtttag

SEQ ID NO: 135459 - DNA, 25 bp, probe
agcagtgccccggcataaggattgg

SEQ ID NO: 135460 - DNA, 25 bp, probe
agcaagcgccccaaactggaaatgg

SEQ ID NO: 135461 - DNA, 25 bp, probe
agcaatcgcttccagattctaaaat

SEQ ID NO: 135462 - DNA, 25 bp, probe
agcaatcacttgtcattttgcataa

SEQ ID NO: 135463 - DNA, 25 bp, probe
agcatagctctgtacatcttttaaa

SEQ ID NO: 135464 - DNA, 25 bp, probe
agcaagcatctggacctggtcatgc

SEQ ID NO: 135465 - DNA, 25 bp, probe
agcagagtctatggcttctgcctgc

SEQ ID NO: 135466 - DNA, 25 bp, probe
agcagattttgggtctggatctccc

SEQ ID NO: 135467 - DNA, 25 bp, probe
agcagattttgggtctggatctccc

SEQ ID NO: 135468 - DNA, 25 bp, probe
agcaagtttggcatctgtaaacgcc

SEQ ID NO: 135469 - DNA, 25 bp, probe
agcaagtcctgtgtggcaaaactgc

SEQ ID NO: 135470 - DNA, 25 bp, probe
agcaagtccagtgctgaccttgacc

SEQ ID NO: 135471 - DNA, 25 bp, probe
agcgatgtacgcactgtcagttaca

SEQ ID NO: 135472 - DNA, 25 bp, probe
agaatgctagctctgagccagttca

SEQ ID NO: 135473 - DNA, 25 bp, probe
agcatagcccattatagacaggtca

SEQ ID NO: 135474 - DNA, 25 bp, probe
agcaatggcagattatcgacatctt

SEQ ID NO: 135475 - DNA, 25 bp, probe
agcaatggctcaatgcacaactatt

SEQ ID NO: 135476 - DNA, 25 bp, probe
agaatccaattgtacctgatgtttt

SEQ ID NO: 135477 - DNA, 25 bp, probe
agcaatccagaatacctccttttct

SEQ ID NO: 135478 - DNA, 25 bp, probe
agcaatcgcaaaaacctttatccct

SEQ ID NO: 135479 - DNA, 25 bp, probe
agcaattgtatataccctcatcacc

SEQ ID NO: 135480 - DNA, 25 bp, probe
agcaattgtatataccctcatcacc

SEQ ID NO: 135481 - DNA, 25 bp, probe
agcaaataaagctacatccttccct

SEQ ID NO: 135482 - DNA, 25 bp, probe
agaattaccatgtacatcatatttg

SEQ ID NO: 135483 - DNA, 25 bp, probe
agaattaccatgtacatcatatttg

SEQ ID NO: 135484 - DNA, 25 bp, probe
agaattagatcatccaaacatctgc

SEQ ID NO: 135485 - DNA, 25 bp, probe
agaatcaacatctcacacaacttca

SEQ ID NO: 135486 - DNA, 25 bp, probe
agcttcacactctgcattacagtct

SEQ ID NO: 135487 - DNA, 25 bp, probe
agctctgacccaaatttagtcccag

SEQ ID NO: 135488 - DNA, 25 bp, probe
agctacacccctaatttggccaggg

SEQ ID NO: 135489 - DNA, 25 bp, probe
agctacacccctaatttggccaggg

SEQ ID NO: 135490 - DNA, 25 bp, probe
agcttcggcctaatcatttgggaga

SEQ ID NO: 135491 - DNA, 25 bp, probe
agcaggggcgatatcctctgacgta

SEQ ID NO: 135492 - DNA, 25 bp, probe
agcaaggtctgagctcttcttcagc

SEQ ID NO: 135493 - DNA, 25 bp, probe
agcagtggttgtgctcttttctggc

SEQ ID NO: 135494 - DNA, 25 bp, probe
agcagggcatggagtattaccgtgc

SEQ ID NO: 135495 - DNA, 25 bp, probe
agcaaggagcagcagctcctacccc

SEQ ID NO: 135496 - DNA, 25 bp, probe
agcaatgacaagcactttactttca

SEQ ID NO: 135497 - DNA, 25 bp, probe
agcatacctggctacgttgactctt

SEQ ID NO: 135498 - DNA, 25 bp, probe
agcaacctgagaactgttcctctcc

SEQ ID NO: 135499 - DNA, 25 bp, probe
agcaacctgagaactgttcctctcc

SEQ ID NO: 135500 - DNA, 25 bp, probe
agcaactagatgaacctgtcaactt

SEQ ID NO: 135501 - DNA, 25 bp, probe
agcaactagatgaacctgtcaactt

SEQ ID NO: 135502 - DNA, 25 bp, probe
agcacattcacgatactgtgcaatc

SEQ ID NO: 135503 - DNA, 25 bp, probe
agaatatcatctatgacagcatcaa

SEQ ID NO: 135504 - DNA, 25 bp, probe
agaattgagctagtgcagcacacgt

SEQ ID NO: 135505 - DNA, 25 bp, probe
agcaagaagatactgctgcccgagc

SEQ ID NO: 135506 - DNA, 25 bp, probe
agcaagaagacatttcagccactgt

SEQ ID NO: 135507 - DNA, 25 bp, probe
agcaagaagacatttcagccactgt

SEQ ID NO: 135508 - DNA, 25 bp, probe
agcaagaaagcgtcacagccagcgt

SEQ ID NO: 135509 - DNA, 25 bp, probe
agcagagctcgatgatatagcaatg

SEQ ID NO: 135510 - DNA, 25 bp, probe
agcagcgtccactcagagcaagtgt

SEQ ID NO: 135511 - DNA, 25 bp, probe
agcactgcccagcttggaaggtatt

SEQ ID NO: 135512 - DNA, 25 bp, probe
agcacctcctggttggcaaggttta

SEQ ID NO: 135513 - DNA, 25 bp, probe
agcacactccggaggcaggtggtgc

SEQ ID NO: 135514 - DNA, 25 bp, probe
agcacactcagcgctgtgagtcgtg

SEQ ID NO: 135515 - DNA, 25 bp, probe
agcacctcattcagcagctgacgct

SEQ ID NO: 135516 - DNA, 25 bp, probe
agcacctcattcagcagctgacgct

SEQ ID NO: 135517 - DNA, 25 bp, probe
agcacactttgcaaagccacagcgt

SEQ ID NO: 135518 - DNA, 25 bp, probe
agcaagatgttcaaactccatctgc

SEQ ID NO: 135519 - DNA, 25 bp, probe
agcaggagttattaaccagccatat

SEQ ID NO: 135520 - DNA, 25 bp, probe
agcaagacttactaacgcatatcaa

SEQ ID NO: 135521 - DNA, 25 bp, probe
agcacaagttcatcacacgctacac

SEQ ID NO: 135522 - DNA, 25 bp, probe
agcacaagttcatcacacgctacac

SEQ ID NO: 135523 - DNA, 25 bp, probe
agcaaagcattctcatcagtcgcaa

SEQ ID NO: 135524 - DNA, 25 bp, probe
agcaacctcatcactaatcattcaa

SEQ ID NO: 135525 - DNA, 25 bp, probe
agcaccgctcacaactatatgctaa

SEQ ID NO: 135526 - DNA, 25 bp, probe
agcaccctaatgtgattgcattgca

SEQ ID NO: 135527 - DNA, 25 bp, probe
agcaccctaatgtgattgcattgca

SEQ ID NO: 135528 - DNA, 25 bp, probe
agctcggaattgagcttcatgtcaa

SEQ ID NO: 135529 - DNA, 25 bp, probe
agctcgttactcaactccagttgac

SEQ ID NO: 135530 - DNA, 25 bp, probe
agctcgttactcaactccagttgac

SEQ ID NO: 135531 - DNA, 25 bp, probe
agctcgttactcaactccagttgac

SEQ ID NO: 135532 - DNA, 25 bp, probe
agcattttgagattacccaggagac

SEQ ID NO: 135533 - DNA, 25 bp, probe
agcattcagttatttgcagaaggga

SEQ ID NO: 135534 - DNA, 25 bp, probe
agcaatgactgttcttgcgggggat

SEQ ID NO: 135535 - DNA, 25 bp, probe
agcacatactgtacgcggtggtggc

SEQ ID NO: 135536 - DNA, 25 bp, probe
agctagagcttcggggggatgtgga

SEQ ID NO: 135537 - DNA, 25 bp, probe
agcaaagcttcctggtggagggcag

SEQ ID NO: 135538 - DNA, 25 bp, probe
agcacggcgtcctggggagcaggac

SEQ ID NO: 135539 - DNA, 25 bp, probe
agcacgagcggctcggagggggtgc

SEQ ID NO: 135540 - DNA, 25 bp, probe
agcagcggcacctcgagagagaagg

SEQ ID NO: 135541 - DNA, 25 bp, probe
agcacagagtcccctggggctagag

SEQ ID NO: 135542 - DNA, 25 bp, probe
agcaagaggtgcctcatgatgggcc

SEQ ID NO: 135543 - DNA, 25 bp, probe
agcagctgaggtctcttgagggagc

SEQ ID NO: 135544 - DNA, 25 bp, probe
agcagcgcaggcgctcggagaagaa

SEQ ID NO: 135545 - DNA, 25 bp, probe
agcacagctggttccggaagaaaca

SEQ ID NO: 135546 - DNA, 25 bp, probe
agcaagaggctgtacgtgaattaaa

SEQ ID NO: 135547 - DNA, 25 bp, probe
agcttgaggctggagcccttgaaag

SEQ ID NO: 135548 - DNA, 25 bp, probe
agcaccaggtggtctcctctgactt

SEQ ID NO: 135549 - DNA, 25 bp, probe
agcacatcatggttggccttatcct

SEQ ID NO: 135550 - DNA, 25 bp, probe
agcagatatttttgcgcttgccctc

SEQ ID NO: 135551 - DNA, 25 bp, probe
agcagatatttttgcgcttgccctc

SEQ ID NO: 135552 - DNA, 25 bp, probe
agcagatatttttgcgcttgccctc

SEQ ID NO: 135553 - DNA, 25 bp, probe
agcaagacctggtcatctggccgtc

SEQ ID NO: 135554 - DNA, 25 bp, probe
agcaagaggctgttacggcaccatg

SEQ ID NO: 135555 - DNA, 25 bp, probe
agcaccactgctttacagaaacatc

SEQ ID NO: 135556 - DNA, 25 bp, probe
agcaagacatcctacaagagaatac

SEQ ID NO: 135557 - DNA, 25 bp, probe
agcaaagccatattctaaattcact

SEQ ID NO: 135558 - DNA, 25 bp, probe
agcaaagccatattctaaattcact

SEQ ID NO: 135559 - DNA, 25 bp, probe
agcaatgtcctacctgaaatctcct

SEQ ID NO: 135560 - DNA, 25 bp, probe
agcgtgtgcctaccctacgccggca

SEQ ID NO: 135561 - DNA, 25 bp, probe
agcgtgtgcctaccctacgccggca

SEQ ID NO: 135562 - DNA, 25 bp, probe
agccttgcttccacaaggccattgc

SEQ ID NO: 135563 - DNA, 25 bp, probe
agcacttttcagagcgaggccgagc

SEQ ID NO: 135564 - DNA, 25 bp, probe
agcacttgtctcagcgggagctgga

SEQ ID NO: 135565 - DNA, 25 bp, probe
agcacttgctaccagagaggacagc

SEQ ID NO: 135566 - DNA, 25 bp, probe
agcagcgtgaaccggcggacacgca

SEQ ID NO: 135567 - DNA, 25 bp, probe
agcagcgtgaaccggcggacacgca

SEQ ID NO: 135568 - DNA, 25 bp, probe
agcagggaataccacagtcattagc

SEQ ID NO: 135569 - DNA, 25 bp, probe
agcaggagagctccagaagcctttc

SEQ ID NO: 135570 - DNA, 25 bp, probe
agcagatgggctcatgaactcctac

SEQ ID NO: 135571 - DNA, 25 bp, probe
agcagaggagctaggccagtccatc

SEQ ID NO: 135572 - DNA, 25 bp, probe
agcagaggatctttccaaccacatc

SEQ ID NO: 135573 - DNA, 25 bp, probe
agcaggtgactttcctatgacactc

SEQ ID NO: 135574 - DNA, 25 bp, probe
agcaggtgactttcctatgacactc

SEQ ID NO: 135575 - DNA, 25 bp, probe
agcactgtagtttgtcagagactcc

SEQ ID NO: 135576 - DNA, 25 bp, probe
agcacttgagggaccagagacccgg

SEQ ID NO: 135577 - DNA, 25 bp, probe
agcactggacgtctcagagggcgtt

SEQ ID NO: 135578 - DNA, 25 bp, probe
agcactggatgagtcgggaaggttt

SEQ ID NO: 135579 - DNA, 25 bp, probe
agcagcaggtctccgaagaaggttc

SEQ ID NO: 135580 - DNA, 25 bp, probe
agcagagttctctgaataccccatc

SEQ ID NO: 135581 - DNA, 25 bp, probe
agcagcttattcacaagacccaaaa

SEQ ID NO: 135582 - DNA, 25 bp, probe
agcagctttcgaatcagacctgcca

SEQ ID NO: 135583 - DNA, 25 bp, probe
agcagctttcgaatcagacctgcca

SEQ ID NO: 135584 - DNA, 25 bp, probe
agcacttgtcagggctgacatcccc

SEQ ID NO: 135585 - DNA, 25 bp, probe
agcacattgataggagcgatctctc

SEQ ID NO: 135586 - DNA, 25 bp, probe
agcaactatcagggcagctctgcct

SEQ ID NO: 135587 - DNA, 25 bp, probe
agcaatacatcgaagcatgtctcag

SEQ ID NO: 135588 - DNA, 25 bp, probe
agcatatcactctcagcatgttgtc

SEQ ID NO: 135589 - DNA, 25 bp, probe
agcagacagtgccacagttagctca

SEQ ID NO: 135590 - DNA, 25 bp, probe
agcagatcagtctttgtcaatgctc

SEQ ID NO: 135591 - DNA, 25 bp, probe
agcacaccaatggtgtcaatggcag

SEQ ID NO: 135592 - DNA, 25 bp, probe
agcacctgaatgacgtcaacgcaaa

SEQ ID NO: 135593 - DNA, 25 bp, probe
agcacctgaatgacgtcaacgcaaa

SEQ ID NO: 135594 - DNA, 25 bp, probe
agcagcctgcagctggattacgcaa

SEQ ID NO: 135595 - DNA, 25 bp, probe
agcagccatactgatgaccacagca

SEQ ID NO: 135596 - DNA, 25 bp, probe
agcaagctgtcggtgatccacagag

SEQ ID NO: 135597 - DNA, 25 bp, probe
agcaaagtcatgctgactctatgag

SEQ ID NO: 135598 - DNA, 25 bp, probe
agcagaagctctcgatggacaatga

SEQ ID NO: 135599 - DNA, 25 bp, probe
agcagacagctctggacagacaaaa

SEQ ID NO: 135600 - DNA, 25 bp, probe
agcagcaaagagagagcaaccacca

SEQ ID NO: 135601 - DNA, 25 bp, probe
agcatcagaaagacctgcttcccag

SEQ ID NO: 135602 - DNA, 25 bp, probe
agcacaggagagaccagtccttcct

SEQ ID NO: 135603 - DNA, 25 bp, probe
agcaaggaggccggattctgtgccg

SEQ ID NO: 135604 - DNA, 25 bp, probe
agcaaaggggctgacacgtgccagg

SEQ ID NO: 135605 - DNA, 25 bp, probe
agcaaaggggtctcactctgttgcc

SEQ ID NO: 135606 - DNA, 25 bp, probe
agcaaagagggcaatcgcctccttg

SEQ ID NO: 135607 - DNA, 25 bp, probe
agcaaaaaagagacgcacttcttca

SEQ ID NO: 135608 - DNA, 25 bp, probe
agcaattaaaacggactcatctctg

SEQ ID NO: 135609 - DNA, 25 bp, probe
agcacttcagaagatggactctttg

SEQ ID NO: 135610 - DNA, 25 bp, probe
agcagattcagtagcagatgccgtt

SEQ ID NO: 135611 - DNA, 25 bp, probe
agcagattcagtagcagatgccgtt

SEQ ID NO: 135612 - DNA, 25 bp, probe
agcagcaatagtactgagttgtgat

SEQ ID NO: 135613 - DNA, 25 bp, probe
agcagcaaggacatccggatgaaaa

SEQ ID NO: 135614 - DNA, 25 bp, probe
agcagcaaggacatccggatgaaaa

SEQ ID NO: 135615 - DNA, 25 bp, probe
agcacctgaactccacggaaaaatc

SEQ ID NO: 135616 - DNA, 25 bp, probe
agcacctgaactccacggaaaaatc

SEQ ID NO: 135617 - DNA, 25 bp, probe
agcacgatcggggccggagacaagt

SEQ ID NO: 135618 - DNA, 25 bp, probe
agcaggatttgaggccaggccaaag

SEQ ID NO: 135619 - DNA, 25 bp, probe
agcaagagcttaccataggaaaact

SEQ ID NO: 135620 - DNA, 25 bp, probe
agcaaactgcccttgcatggaaaac

SEQ ID NO: 135621 - DNA, 25 bp, probe
agcaacaagcctgtgatagcaaaga

SEQ ID NO: 135622 - DNA, 25 bp, probe
agcaacaagcctgtgatagcaaaga

SEQ ID NO: 135623 - DNA, 25 bp, probe
agcaaactgcctggtatcagaaact

SEQ ID NO: 135624 - DNA, 25 bp, probe
agcaaatcgtgtccttcgacaagct

SEQ ID NO: 135625 - DNA, 25 bp, probe
agcaggacagtggccatttggacag

SEQ ID NO: 135626 - DNA, 25 bp, probe
agcacattgcggggcattcgtgcac

SEQ ID NO: 135627 - DNA, 25 bp, probe
agcagatcatgcgagggtaccggct

SEQ ID NO: 135628 - DNA, 25 bp, probe
agctgaacgggaagctcactggcat

SEQ ID NO: 135629 - DNA, 25 bp, probe
agcaaatcggtgcactgatcgctgc

SEQ ID NO: 135630 - DNA, 25 bp, probe
agcaaatcggtgcactgatcgctgc

SEQ ID NO: 135631 - DNA, 25 bp, probe
agcaaactctagcaatagcagctgc

SEQ ID NO: 135632 - DNA, 25 bp, probe
agcgagcaatttgcagcataactgc

SEQ ID NO: 135633 - DNA, 25 bp, probe
agcgagcaatttgcagcataactgc

SEQ ID NO: 135634 - DNA, 25 bp, probe
agcagccatatctggcaagaagctg

SEQ ID NO: 135635 - DNA, 25 bp, probe
agcagctcattcagacctatgagct

SEQ ID NO: 135636 - DNA, 25 bp, probe
agcagctgaagcagcccgcatatta

SEQ ID NO: 135637 - DNA, 25 bp, probe
agcagctaatgaggctacagaaaca

SEQ ID NO: 135638 - DNA, 25 bp, probe
agcagctggatgatctacagaccaa

SEQ ID NO: 135639 - DNA, 25 bp, probe
agcagcatgatgccaggctacagac

SEQ ID NO: 135640 - DNA, 25 bp, probe
agcagtgtccaggcaatgcgaaccc

SEQ ID NO: 135641 - DNA, 25 bp, probe
agctggatctccatacggaggcgcc

SEQ ID NO: 135642 - DNA, 25 bp, probe
agctgaattccaagcccagggtttg

SEQ ID NO: 135643 - DNA, 25 bp, probe
agctgaattccaagcccagggtttg

SEQ ID NO: 135644 - DNA, 25 bp, probe
agcagaatttgccctacggtgtgac

SEQ ID NO: 135645 - DNA, 25 bp, probe
agcagaatttgccctacggtgtgac

SEQ ID NO: 135646 - DNA, 25 bp, probe
agcaaattcgctgcaacctgttgat

SEQ ID NO: 135647 - DNA, 25 bp, probe
agcacaacctgcgcaagcgcgatgg

SEQ ID NO: 135648 - DNA, 25 bp, probe
agcctatctcatcggccgcggcctg

SEQ ID NO: 135649 - DNA, 25 bp, probe
agcaggattcggagctgcaggcctg

SEQ ID NO: 135650 - DNA, 25 bp, probe
agcaggagtacgtgctgtcggtgct

SEQ ID NO: 135651 - DNA, 25 bp, probe
agcaagggacctagtctcagggatg

SEQ ID NO: 135652 - DNA, 25 bp, probe
agcaagaggttctgatgctcaggaa

SEQ ID NO: 135653 - DNA, 25 bp, probe
agcaagaggttctgatgctcaggaa

SEQ ID NO: 135654 - DNA, 25 bp, probe
agcaagagcagcttcactctgatca

SEQ ID NO: 135655 - DNA, 25 bp, probe
agcaagagcagcttcactctgatca

SEQ ID NO: 135656 - DNA, 25 bp, probe
agcaagagcacttccatctgcttct

SEQ ID NO: 135657 - DNA, 25 bp, probe
agcaagagcacttccatctgcttct

SEQ ID NO: 135658 - DNA, 25 bp, probe
agcaacatcaatacctcagcttctt

SEQ ID NO: 135659 - DNA, 25 bp, probe
agcaacatatgcatctaagatttgg

SEQ ID NO: 135660 - DNA, 25 bp, probe
agcaacatatgcatctaagatttgg

SEQ ID NO: 135661 - DNA, 25 bp, probe
agcacatttgttaatgattcttgtg

SEQ ID NO: 135662 - DNA, 25 bp, probe
agcacatttgttaatgattcttgtg

SEQ ID NO: 135663 - DNA, 25 bp, probe
agcactttctgtggtactcctaatt

SEQ ID NO: 135664 - DNA, 25 bp, probe
agcactttctgttgataatggttgt

SEQ ID NO: 135665 - DNA, 25 bp, probe
agcacatttcagcctatttgcttag

SEQ ID NO: 135666 - DNA, 25 bp, probe
agcactgttgcactttatgttttaa

SEQ ID NO: 135667 - DNA, 25 bp, probe
agcactttagcatctgttcaggtag

SEQ ID NO: 135668 - DNA, 25 bp, probe
agcactttgagaatgagtctcctgt

SEQ ID NO: 135669 - DNA, 25 bp, probe
agcactcttacttatttctctgttt

SEQ ID NO: 135670 - DNA, 25 bp, probe
agcaccttcactaaagtcttatttt

SEQ ID NO: 135671 - DNA, 25 bp, probe
agcaccgtgcatgtatagtttaatt

SEQ ID NO: 135672 - DNA, 25 bp, probe
agcaccggtgctatcacatctatat

SEQ ID NO: 135673 - DNA, 25 bp, probe
agcacattcgggaccaatatatagt

SEQ ID NO: 135674 - DNA, 25 bp, probe
agcagcgtcaggtactactaatatt

SEQ ID NO: 135675 - DNA, 25 bp, probe
agcagagccggaactctctattgtg

SEQ ID NO: 135676 - DNA, 25 bp, probe
agcgaagctataggctcttgttgga

SEQ ID NO: 135677 - DNA, 25 bp, probe
agcgaagctataggctcttgttgga

SEQ ID NO: 135678 - DNA, 25 bp, probe
agcagagacgaagcctttctgtaac

SEQ ID NO: 135679 - DNA, 25 bp, probe
agcaggtccaagacacttattcata

SEQ ID NO: 135680 - DNA, 25 bp, probe
agcggattaagttcctggtcatcgc

SEQ ID NO: 135681 - DNA, 25 bp, probe
agctggttcgggtccttttggacag

SEQ ID NO: 135682 - DNA, 25 bp, probe
agctggttcgggtccttttggacag

SEQ ID NO: 135683 - DNA, 25 bp, probe
agctgtgtttccgctttgtaagaca

SEQ ID NO: 135684 - DNA, 25 bp, probe
agctatgcttagtgccaatagtaag

SEQ ID NO: 135685 - DNA, 25 bp, probe
agcactttgagaggccaaggtgggt

SEQ ID NO: 135686 - DNA, 25 bp, probe
agcagcgggcaagcaagggggtgac

SEQ ID NO: 135687 - DNA, 25 bp, probe
agcagcgggcaagcaagggggtgac

SEQ ID NO: 135688 - DNA, 25 bp, probe
agcagggtggatgcaaggggcctct

SEQ ID NO: 135689 - DNA, 25 bp, probe
agcagagggaattcacaggaccccc

SEQ ID NO: 135690 - DNA, 25 bp, probe
agcagaggggattttggatgtcttc

SEQ ID NO: 135691 - DNA, 25 bp, probe
agcactgtaggaatcgtgggtcttc

SEQ ID NO: 135692 - DNA, 25 bp, probe
agcagcattagtggtttgagtgtct

SEQ ID NO: 135693 - DNA, 25 bp, probe
agcacttaatggtctctgttttcaa

SEQ ID NO: 135694 - DNA, 25 bp, probe
agcacttaatggtctctgttttcaa

SEQ ID NO: 135695 - DNA, 25 bp, probe
agctcttatattgccatttcttcca

SEQ ID NO: 135696 - DNA, 25 bp, probe
agctattattcttacaccctgtgta

SEQ ID NO: 135697 - DNA, 25 bp, probe
agcatgtgttctttagggccttgta

SEQ ID NO: 135698 - DNA, 25 bp, probe
agcagttcacttaaaggccatgagt

SEQ ID NO: 135699 - DNA, 25 bp, probe
agcagctgcaactgaaaagcaaggt

SEQ ID NO: 135700 - DNA, 25 bp, probe
agcagccagccagagaaataccatg

SEQ ID NO: 135701 - DNA, 25 bp, probe
agcagcagcagcagtcagggaacca

SEQ ID NO: 135702 - DNA, 25 bp, probe
agctgcacgcaggacaggtgcttca

SEQ ID NO: 135703 - DNA, 25 bp, probe
agcagatgacaggcacaggccaccg

SEQ ID NO: 135704 - DNA, 25 bp, probe
agcatagatctgccagtggttgtgg

SEQ ID NO: 135705 - DNA, 25 bp, probe
agctcagactggttgagttcaggta

SEQ ID NO: 135706 - DNA, 25 bp, probe
agctctcaatcctcgtatagcgtat

SEQ ID NO: 135707 - DNA, 25 bp, probe
agctcatcgaccgctataagcgctg

SEQ ID NO: 135708 - DNA, 25 bp, probe
agctacgacccagaaggctgaacgg

SEQ ID NO: 135709 - DNA, 25 bp, probe
agctacgacccagaaggctgaacgg

SEQ ID NO: 135710 - DNA, 25 bp, probe
agctagcgcaccgccgagttaaaga

SEQ ID NO: 135711 - DNA, 25 bp, probe
agctaccccttgtgggcaaaggcag

SEQ ID NO: 135712 - DNA, 25 bp, probe
agctaccccttgtgggcaaaggcag

SEQ ID NO: 135713 - DNA, 25 bp, probe
agcttccctaagtggaccaggaagg

SEQ ID NO: 135714 - DNA, 25 bp, probe
agcttcccaaagtttcctatgtgaa

SEQ ID NO: 135715 - DNA, 25 bp, probe
agcttgctcaacaggtgaccttaca

SEQ ID NO: 135716 - DNA, 25 bp, probe
agcttgcttggcccattaactcaaa

SEQ ID NO: 135717 - DNA, 25 bp, probe
agcttgcttggcccattaactcaaa

SEQ ID NO: 135718 - DNA, 25 bp, probe
agctttcagggcgataaaactaaat

SEQ ID NO: 135719 - DNA, 25 bp, probe
agctttacgtgtggctacaacaaat

SEQ ID NO: 135720 - DNA, 25 bp, probe
agctttacgtgtggctacaacaaat

SEQ ID NO: 135721 - DNA, 25 bp, probe
agcagattactgcacgggcaacaaa

SEQ ID NO: 135722 - DNA, 25 bp, probe
agctagtagatgctgggaataccaa

SEQ ID NO: 135723 - DNA, 25 bp, probe
agcacagggagagtgggaaccacta

SEQ ID NO: 135724 - DNA, 25 bp, probe
agcactgtggcgagggaagccagct

SEQ ID NO: 135725 - DNA, 25 bp, probe
agcacttgtcagaggtggaaacact

SEQ ID NO: 135726 - DNA, 25 bp, probe
agcacttgtcagaggtggaaacact

SEQ ID NO: 135727 - DNA, 25 bp, probe
agcacctgtgctttggtgacaacaa

SEQ ID NO: 135728 - DNA, 25 bp, probe
agcacctgtgctttggtgacaacaa

SEQ ID NO: 135729 - DNA, 25 bp, probe
agcagtctgctgaaattctaaaaca

SEQ ID NO: 135730 - DNA, 25 bp, probe
agcagtctgctgaaattctaaaaca

SEQ ID NO: 135731 - DNA, 25 bp, probe
agcatgtcagtttccttaataataa

SEQ ID NO: 135732 - DNA, 25 bp, probe
agcagtagcatcaccatctgtaaaa

SEQ ID NO: 135733 - DNA, 25 bp, probe
agcagaagcttcacaggctgagagc

SEQ ID NO: 135734 - DNA, 25 bp, probe
agcagagtattttcaacttgagtga

SEQ ID NO: 135735 - DNA, 25 bp, probe
agcaggtttaatgactgtattgaaa

SEQ ID NO: 135736 - DNA, 25 bp, probe
agcgagtggtcaaggatttttataa

SEQ ID NO: 135737 - DNA, 25 bp, probe
agcaggcgtggatggcatcttataa

SEQ ID NO: 135738 - DNA, 25 bp, probe
agcagctgtaggtggttttgccaga

SEQ ID NO: 135739 - DNA, 25 bp, probe
agcacgtgggagccgtgtgtgtgcc

SEQ ID NO: 135740 - DNA, 25 bp, probe
agcagccgggatcgatggtggcgct

SEQ ID NO: 135741 - DNA, 25 bp, probe
agcagcctgtgtttgagcagcgagg

SEQ ID NO: 135742 - DNA, 25 bp, probe
agcaccagtatattgctggcagcta

SEQ ID NO: 135743 - DNA, 25 bp, probe
agcacaagaatatgctaggctgcac

SEQ ID NO: 135744 - DNA, 25 bp, probe
agcaaagccatatggagcatctacc

SEQ ID NO: 135745 - DNA, 25 bp, probe
agcaaagcccaggctatactgcctc

SEQ ID NO: 135746 - DNA, 25 bp, probe
agcaaacactagctgttctgctcat

SEQ ID NO: 135747 - DNA, 25 bp, probe
agcagacaacatgataggtcctgat

SEQ ID NO: 135748 - DNA, 25 bp, probe
agcagacaacatgataggtcctgat

SEQ ID NO: 135749 - DNA, 25 bp, probe
agcagcacacctggacaggtctgca

SEQ ID NO: 135750 - DNA, 25 bp, probe
agcacacttgctggacagtgccagt

SEQ ID NO: 135751 - DNA, 25 bp, probe
agcagcagtggcagcagcagtggca

SEQ ID NO: 135752 - DNA, 25 bp, probe
agcagcatgagctgatgacactgga

SEQ ID NO: 135753 - DNA, 25 bp, probe
agcatgagctgatgacactggatgg

SEQ ID NO: 135754 - DNA, 25 bp, probe
acatgctgctgtgcatgcacggcac

SEQ ID NO: 135755 - DNA, 25 bp, probe
agcagtggctgagtgcagctgagcg

SEQ ID NO: 135756 - DNA, 25 bp, probe
agcagctggctgttatcgataaatg

SEQ ID NO: 135757 - DNA, 25 bp, probe
agcagcgggactttgcaacattgtc

SEQ ID NO: 135758 - DNA, 25 bp, probe
agcagggcggtgggaagctggtgct

SEQ ID NO: 135759 - DNA, 25 bp, probe
agcagtggctggtccagggctagtg

SEQ ID NO: 135760 - DNA, 25 bp, probe
agcattgatctgcatccaaggcctt

SEQ ID NO: 135761 - DNA, 25 bp, probe
agcattgatcgctatctgaaggtgg

SEQ ID NO: 135762 - DNA, 25 bp, probe
agcacagatctgtttcgtgcattgg

SEQ ID NO: 135763 - DNA, 25 bp, probe
agcacagtctgatttcttctggcta

SEQ ID NO: 135764 - DNA, 25 bp, probe
agcactgtttatggctgctatggtt

SEQ ID NO: 135765 - DNA, 25 bp, probe
agcacctactatgcttcaggcatgg

SEQ ID NO: 135766 - DNA, 25 bp, probe
agcacaatataaggcgtcagactgg

SEQ ID NO: 135767 - DNA, 25 bp, probe
agcacatcaaaacccacgagctgca

SEQ ID NO: 135768 - DNA, 25 bp, probe
agcacatcaaaacccacgagctgca

SEQ ID NO: 135769 - DNA, 25 bp, probe
agcacatcaaaacccacgagctgca

SEQ ID NO: 135770 - DNA, 25 bp, probe
agcactgcaagacacacacggagaa

SEQ ID NO: 135771 - DNA, 25 bp, probe
agcagtaatggcagcagccggggca

SEQ ID NO: 135772 - DNA, 25 bp, probe
agcatctccagcgtgcggagcatct

SEQ ID NO: 135773 - DNA, 25 bp, probe
agcatctccagcgtgcggagcatct

SEQ ID NO: 135774 - DNA, 25 bp, probe
agcactgctccagtggggccatgat

SEQ ID NO: 135775 - DNA, 25 bp, probe
agcactgctccagtggggccatgat

SEQ ID NO: 135776 - DNA, 25 bp, probe
agcagcggtgacgtggtcagcatgc

SEQ ID NO: 135777 - DNA, 25 bp, probe
agcagcggtgacgtggtcagcatgc

SEQ ID NO: 135778 - DNA, 25 bp, probe
agcagaggtgacatggtgccatcag

SEQ ID NO: 135779 - DNA, 25 bp, probe
agcaaatgtgacactgtctatcagt

SEQ ID NO: 135780 - DNA, 25 bp, probe
agcagagggagcgcttcttgctctt

SEQ ID NO: 135781 - DNA, 25 bp, probe
agcagagggagcgcttcttgctctt

SEQ ID NO: 135782 - DNA, 25 bp, probe
agcagagggagcgcttcttgctctt

SEQ ID NO: 135783 - DNA, 25 bp, probe
agcagtgtggatcttcttccacatt

SEQ ID NO: 135784 - DNA, 25 bp, probe
agcagagggtccagcctcaagatcc

SEQ ID NO: 135785 - DNA, 25 bp, probe
agcagaccgtccatctatcaggacc

SEQ ID NO: 135786 - DNA, 25 bp, probe
agcaggtacctcattgacaggcacc

SEQ ID NO: 135787 - DNA, 25 bp, probe
agcaggaacccattatcctgccagc

SEQ ID NO: 135788 - DNA, 25 bp, probe
agcagctgaaactgtcccatgacag

SEQ ID NO: 135789 - DNA, 25 bp, probe
agcagcttcaactggccttacatgt

SEQ ID NO: 135790 - DNA, 25 bp, probe
agcgattgcaactggcctggccgca

SEQ ID NO: 135791 - DNA, 25 bp, probe
agcaggccatactgtgttggggcaa

SEQ ID NO: 135792 - DNA, 25 bp, probe
agcagcagcctacaagtatatgggg

SEQ ID NO: 135793 - DNA, 25 bp, probe
agcagcagcctacaagtatatgggg

SEQ ID NO: 135794 - DNA, 25 bp, probe
agcacagatgtacaggtatcaggga

SEQ ID NO: 135795 - DNA, 25 bp, probe
agctcggtaccaagcttggcgtaat

SEQ ID NO: 135796 - DNA, 25 bp, probe
agctttctagaatatttgcctaatt

SEQ ID NO: 135797 - DNA, 25 bp, probe
agcttttctgaagatgttaagattt

SEQ ID NO: 135798 - DNA, 25 bp, probe
agcttcgtcaaagaattcaaatccc

SEQ ID NO: 135799 - DNA, 25 bp, probe
agctggattacgcaacagtaaatcc

SEQ ID NO: 135800 - DNA, 25 bp, probe
agcggactccgagcacaataaactc

SEQ ID NO: 135801 - DNA, 25 bp, probe
agctgaaccatcgccaaatagaacc

SEQ ID NO: 135802 - DNA, 25 bp, probe
agctacagccctgctgatccaaaag

SEQ ID NO: 135803 - DNA, 25 bp, probe
agcatccaccccggatgggaaagcc

SEQ ID NO: 135804 - DNA, 25 bp, probe
agcactatgccctttggggacaaca

SEQ ID NO: 135805 - DNA, 25 bp, probe
agcactatggccttatatgcaggga

SEQ ID NO: 135806 - DNA, 25 bp, probe
agcacataggactctagacggcatc

SEQ ID NO: 135807 - DNA, 25 bp, probe
agcacataggactctagacggcatc

SEQ ID NO: 135808 - DNA, 25 bp, probe
agcactaggatgttcaggcaggccc

SEQ ID NO: 135809 - DNA, 25 bp, probe
agcactgtcaagacagcggcaggcc

SEQ ID NO: 135810 - DNA, 25 bp, probe
agcactggcaccgagaggcaggcct

SEQ ID NO: 135811 - DNA, 25 bp, probe
agcagcgagagcttgtgaggagctg

SEQ ID NO: 135812 - DNA, 25 bp, probe
agcagcggattgctctggagcagcc

SEQ ID NO: 135813 - DNA, 25 bp, probe
agcagcggattgctctggagcagcc

SEQ ID NO: 135814 - DNA, 25 bp, probe
agcagctggcctgcatcatggagat

SEQ ID NO: 135815 - DNA, 25 bp, probe
agcagctggacttccagagacatgg

SEQ ID NO: 135816 - DNA, 25 bp, probe
agcactggatccaaagcatgtctgc

SEQ ID NO: 135817 - DNA, 25 bp, probe
agcactggatccaaagcatgtctgc

SEQ ID NO: 135818 - DNA, 25 bp, probe
agcagcttctcggaatgcatgttgt

SEQ ID NO: 135819 - DNA, 25 bp, probe
agcactgatgccaaggatgatttat

SEQ ID NO: 135820 - DNA, 25 bp, probe
agcatcgtgcaccgggacttaaagt

SEQ ID NO: 135821 - DNA, 25 bp, probe
agcatcatgtaccggaagttcacta

SEQ ID NO: 135822 - DNA, 25 bp, probe
agcatcatgtaccggaagttcacta

SEQ ID NO: 135823 - DNA, 25 bp, probe
agcatcatgtaccggaagttcacta

SEQ ID NO: 135824 - DNA, 25 bp, probe
agctatgtccagctgggtgttctgc

SEQ ID NO: 135825 - DNA, 25 bp, probe
agcatcgtcaacgacgaggttcgct

SEQ ID NO: 135826 - DNA, 25 bp, probe
agcacaggctgaagaggggtttcta

SEQ ID NO: 135827 - DNA, 25 bp, probe
agcaggcagctgaaaggcgattttc

SEQ ID NO: 135828 - DNA, 25 bp, probe
agcaggcagctgaaaggcgattttc

SEQ ID NO: 135829 - DNA, 25 bp, probe
agcagacatcgcaacaagtaccttc

SEQ ID NO: 135830 - DNA, 25 bp, probe
agcagcacatctaacgagtagctca

SEQ ID NO: 135831 - DNA, 25 bp, probe
agcagcagcatttgaacttcagtca

SEQ ID NO: 135832 - DNA, 25 bp, probe
agcagcacaatggacctgacgctct

SEQ ID NO: 135833 - DNA, 25 bp, probe
agcagcaagatgttcaaactccatc

SEQ ID NO: 135834 - DNA, 25 bp, probe
agcagatccagttcatcaagctctt

SEQ ID NO: 135835 - DNA, 25 bp, probe
agcagcaccctggagatactcttaa

SEQ ID NO: 135836 - DNA, 25 bp, probe
agcagacaccaaaaaccagtgagag

SEQ ID NO: 135837 - DNA, 25 bp, probe
agcaggcacggtcaaaagggcaagt

SEQ ID NO: 135838 - DNA, 25 bp, probe
agcagcagacgcccaacaagaggcc

SEQ ID NO: 135839 - DNA, 25 bp, probe
accagaacccaagaagattccgata

SEQ ID NO: 135840 - DNA, 25 bp, probe
agcgacgaccacagtaagatcctgg

SEQ ID NO: 135841 - DNA, 25 bp, probe
agcaggcggctattggtaaacgctg

SEQ ID NO: 135842 - DNA, 25 bp, probe
agcaggggctcttaggcaatcacat

SEQ ID NO: 135843 - DNA, 25 bp, probe
agcaggggctcttaggcaatcacat

SEQ ID NO: 135844 - DNA, 25 bp, probe
agcatgtggtgaaatcaaaatcact

SEQ ID NO: 135845 - DNA, 25 bp, probe
agcatttgatgctcacatccactcc

SEQ ID NO: 135846 - DNA, 25 bp, probe
agctaagtgctgacacatcattccc

SEQ ID NO: 135847 - DNA, 25 bp, probe
agctaagtgctgacacatcattccc

SEQ ID NO: 135848 - DNA, 25 bp, probe
agcacggagctgacactgttcagct

SEQ ID NO: 135849 - DNA, 25 bp, probe
agcactgtgtgggaatgtccgccag

SEQ ID NO: 135850 - DNA, 25 bp, probe
agcagagttgggtgtccagcagcag

SEQ ID NO: 135851 - DNA, 25 bp, probe
agcagagttgggtgtccagcagcag

SEQ ID NO: 135852 - DNA, 25 bp, probe
agcatgcaaaccaggtcgcagcacc

SEQ ID NO: 135853 - DNA, 25 bp, probe
agcactaaatcagtttccacatcct

SEQ ID NO: 135854 - DNA, 25 bp, probe
agcactataatattgttcccatata

SEQ ID NO: 135855 - DNA, 25 bp, probe
agcactgtcatctagattttccatt

SEQ ID NO: 135856 - DNA, 25 bp, probe
agcactgtcatctagattttccatt

SEQ ID NO: 135857 - DNA, 25 bp, probe
agcactccatgcgaaaacagccatt

SEQ ID NO: 135858 - DNA, 25 bp, probe
agcactccatgcgaaaacagccatt

SEQ ID NO: 135859 - DNA, 25 bp, probe
agcactgcacatgagatatagatcc

SEQ ID NO: 135860 - DNA, 25 bp, probe
agcactgcacaggatgtcattcagc

SEQ ID NO: 135861 - DNA, 25 bp, probe
agcactgctcagacagtcaaaggac

SEQ ID NO: 135862 - DNA, 25 bp, probe
agcacttcactaccaaatgagcctt

SEQ ID NO: 135863 - DNA, 25 bp, probe
agcactctcacttattaaagatctt

SEQ ID NO: 135864 - DNA, 25 bp, probe
agcttatcccaagtcaaagcccttg

SEQ ID NO: 135865 - DNA, 25 bp, probe
agcttatcccaagtcaaagcccttg

SEQ ID NO: 135866 - DNA, 25 bp, probe
agcttgccccaaacaaacctagcta

SEQ ID NO: 135867 - DNA, 25 bp, probe
agcttgccccaaacaaacctagcta

SEQ ID NO: 135868 - DNA, 25 bp, probe
agctacctcctaaactatagtggct

SEQ ID NO: 135869 - DNA, 25 bp, probe
agctcaccattcaccacaatagcta

SEQ ID NO: 135870 - DNA, 25 bp, probe
agctaccatctcagatatatatata

SEQ ID NO: 135871 - DNA, 25 bp, probe
agcatcacctccagtgactcaaatt

SEQ ID NO: 135872 - DNA, 25 bp, probe
agctgactgccgagtactgaacatt

SEQ ID NO: 135873 - DNA, 25 bp, probe
agctgaatgccgagaagccacactc

SEQ ID NO: 135874 - DNA, 25 bp, probe
agctacagcaccagatatgccacca

SEQ ID NO: 135875 - DNA, 25 bp, probe
agctttaccggaagacactggagga

SEQ ID NO: 135876 - DNA, 25 bp, probe
agctatccccgatgatgacttggag

SEQ ID NO: 135877 - DNA, 25 bp, probe
agctatccccaggttatgcctggcc

SEQ ID NO: 135878 - DNA, 25 bp, probe
agctatccccaggttatgcctggcc

SEQ ID NO: 135879 - DNA, 25 bp, probe
agcgattccggtatggctggtgcaa

SEQ ID NO: 135880 - DNA, 25 bp, probe
agcaccccaggtactggaggcgcaa

SEQ ID NO: 135881 - DNA, 25 bp, probe
agctcccaagtttagttcaggaagc

SEQ ID NO: 135882 - DNA, 25 bp, probe
agccccattgcatttacttcttgca

SEQ ID NO: 135883 - DNA, 25 bp, probe
agccccattgcatttacttcttgca

SEQ ID NO: 135884 - DNA, 25 bp, probe
agcttttctgattctactattggca

SEQ ID NO: 135885 - DNA, 25 bp, probe
agcagcttttgattccctgcatacc

SEQ ID NO: 135886 - DNA, 25 bp, probe
agcagtttgagttcgcgctgacagc

SEQ ID NO: 135887 - DNA, 25 bp, probe
agcagtttgagttcgcgctgacagc

SEQ ID NO: 135888 - DNA, 25 bp, probe
agcagtcattattcaaggtgatcgt

SEQ ID NO: 135889 - DNA, 25 bp, probe
agcagtcattattcaaggtgatcgt

SEQ ID NO: 135890 - DNA, 25 bp, probe
agcattctttgtccagcgtgactta

SEQ ID NO: 135891 - DNA, 25 bp, probe
agcactgctgcagtgtggggctgac

SEQ ID NO: 135892 - DNA, 25 bp, probe
agcactgctgcagtgtggggctgac

SEQ ID NO: 135893 - DNA, 25 bp, probe
agcatctggagttggggcacagcga

SEQ ID NO: 135894 - DNA, 25 bp, probe
agctctggggtgtcaccaagcaagg

SEQ ID NO: 135895 - DNA, 25 bp, probe
agctcagggacgcattcaaaaagat

SEQ ID NO: 135896 - DNA, 25 bp, probe
agctcagggacgcattcaaaaagat

SEQ ID NO: 135897 - DNA, 25 bp, probe
agctctgggagggtctcacggaact

SEQ ID NO: 135898 - DNA, 25 bp, probe
agctttggaatcgtcctctgggaaa

SEQ ID NO: 135899 - DNA, 25 bp, probe
agctttatgtatatcctggtggggc

SEQ ID NO: 135900 - DNA, 25 bp, probe
agctttatgtatatcctggtggggc

SEQ ID NO: 135901 - DNA, 25 bp, probe
agctcaaaattaggccttgggcagg

SEQ ID NO: 135902 - DNA, 25 bp, probe
agctcacaagatacccacttttcag

SEQ ID NO: 135903 - DNA, 25 bp, probe
agcagcaacaatagcagccactctc

SEQ ID NO: 135904 - DNA, 25 bp, probe
agcagcaacaatagcagccactctc

SEQ ID NO: 135905 - DNA, 25 bp, probe
agcagctagaatacgccctgctcat

SEQ ID NO: 135906 - DNA, 25 bp, probe
agcagctagaatacgccctgctcat

SEQ ID NO: 135907 - DNA, 25 bp, probe
agctgttgcactacctcggccatgt

SEQ ID NO: 135908 - DNA, 25 bp, probe
agcagtatcagtgcactcaggtcgt

SEQ ID NO: 135909 - DNA, 25 bp, probe
agcagtgacagcagcaacagcagtg

SEQ ID NO: 135910 - DNA, 25 bp, probe
agcagtgacagcacatctgacagca

SEQ ID NO: 135911 - DNA, 25 bp, probe
agcatgtatcagaacatccatccat

SEQ ID NO: 135912 - DNA, 25 bp, probe
agcattaattacttgtcactttctt

SEQ ID NO: 135913 - DNA, 25 bp, probe
agcagtttaaggctgccttctcctg

SEQ ID NO: 135914 - DNA, 25 bp, probe
agcagcttaagatggtgccttcgtg

SEQ ID NO: 135915 - DNA, 25 bp, probe
agcagcttggagtttgtctgctgaa

SEQ ID NO: 135916 - DNA, 25 bp, probe
agcagtatcggccttgtgtagaatc

SEQ ID NO: 135917 - DNA, 25 bp, probe
agcagtatcggccttgtgtagaatc

SEQ ID NO: 135918 - DNA, 25 bp, probe
agcagagtgggacttggagagcaaa

SEQ ID NO: 135919 - DNA, 25 bp, probe
agcagccggggcagtagtgaagagg

SEQ ID NO: 135920 - DNA, 25 bp, probe
agcccggaggtgttcagtcggagga

SEQ ID NO: 135921 - DNA, 25 bp, probe
agcccggaggtgttcagtcggagga

SEQ ID NO: 135922 - DNA, 25 bp, probe
agcccggaggggaatggattgtaga

SEQ ID NO: 135923 - DNA, 25 bp, probe
agcttcggggggatgtggaaatgaa

SEQ ID NO: 135924 - DNA, 25 bp, probe
agctagcgtgtgagggttggcacta

SEQ ID NO: 135925 - DNA, 25 bp, probe
agctacgttttgcagggctcagtac

SEQ ID NO: 135926 - DNA, 25 bp, probe
agctacgtagttcagtggctgtccc

SEQ ID NO: 135927 - DNA, 25 bp, probe
agctacgtagttcagtggctgtccc

SEQ ID NO: 135928 - DNA, 25 bp, probe
agcgtgggaggtcatcgaggtgtcc

SEQ ID NO: 135929 - DNA, 25 bp, probe
agcagagggactttcagcgggagat

SEQ ID NO: 135930 - DNA, 25 bp, probe
agcagagggactttctgcagagcca

SEQ ID NO: 135931 - DNA, 25 bp, probe
agcgaaccacaggatggggccaaaa

SEQ ID NO: 135932 - DNA, 25 bp, probe
agctgaacgacaaagcggccaaatc

SEQ ID NO: 135933 - DNA, 25 bp, probe
agctcaccgacgagcaggtcatcga

SEQ ID NO: 135934 - DNA, 25 bp, probe
agcacccctggccaaggtcatccat

SEQ ID NO: 135935 - DNA, 25 bp, probe
agcagccctctgagatggcgtatct

SEQ ID NO: 135936 - DNA, 25 bp, probe
agcacccatggattgcaggagatac

SEQ ID NO: 135937 - DNA, 25 bp, probe
agctaccttttgggatgattgctcg

SEQ ID NO: 135938 - DNA, 25 bp, probe
agcattgcctctaggggagagtcaa

SEQ ID NO: 135939 - DNA, 25 bp, probe
agcatacacgctggtgggccaatga

SEQ ID NO: 135940 - DNA, 25 bp, probe
agcatgacattcggggaaaggagat

SEQ ID NO: 135941 - DNA, 25 bp, probe
agcagatatgtgaggggataaggca

SEQ ID NO: 135942 - DNA, 25 bp, probe
agcagcactttctgttgataatggt

SEQ ID NO: 135943 - DNA, 25 bp, probe
agcagccatgtgtctaattttctgg

SEQ ID NO: 135944 - DNA, 25 bp, probe
agcagctgaaaccaattggctctgg

SEQ ID NO: 135945 - DNA, 25 bp, probe
agcagctggacagaggtttctggga

SEQ ID NO: 135946 - DNA, 25 bp, probe
agcagcttgaagagtttggctgggc

SEQ ID NO: 135947 - DNA, 25 bp, probe
agcagatggagaccccttggggagc

SEQ ID NO: 135948 - DNA, 25 bp, probe
agcagaagggagactctaggagttg

SEQ ID NO: 135949 - DNA, 25 bp, probe
agcagaagggagactctaggagttg

SEQ ID NO: 135950 - DNA, 25 bp, probe
agcagcaagagcttaccataggaaa

SEQ ID NO: 135951 - DNA, 25 bp, probe
agcagaccaacaacactgaggaaga

SEQ ID NO: 135952 - DNA, 25 bp, probe
agcagtactatgacccgacggatga

SEQ ID NO: 135953 - DNA, 25 bp, probe
agcagctatctaagtcacaggtgga

SEQ ID NO: 135954 - DNA, 25 bp, probe
agcagcctgtatctctgaggaagag

SEQ ID NO: 135955 - DNA, 25 bp, probe
agcagcctgtatctctgaggaagag

SEQ ID NO: 135956 - DNA, 25 bp, probe
agcagaatgtatcatcagagcgccg

SEQ ID NO: 135957 - DNA, 25 bp, probe
agcagcaacagtcaggagggcggtc

SEQ ID NO: 135958 - DNA, 25 bp, probe
agcagacagcaggcaaggagaggcg

SEQ ID NO: 135959 - DNA, 25 bp, probe
agcagaagcaaatgtcatgcagcag

SEQ ID NO: 135960 - DNA, 25 bp, probe
agcaggaatcagtcagtatctgcag

SEQ ID NO: 135961 - DNA, 25 bp, probe
agcagctaatgttctggtctccgag

SEQ ID NO: 135962 - DNA, 25 bp, probe
agcagccagtgaactttgtcacgga

SEQ ID NO: 135963 - DNA, 25 bp, probe
agcttcctgaagttgtgtccgttaa

SEQ ID NO: 135964 - DNA, 25 bp, probe
agcatccctaagtgttgtcagaata

SEQ ID NO: 135965 - DNA, 25 bp, probe
agcatccctaagtgttgtcagaata

SEQ ID NO: 135966 - DNA, 25 bp, probe
agcatccttccagctttggataata

SEQ ID NO: 135967 - DNA, 25 bp, probe
agcatactatgcagcgttgggaact

SEQ ID NO: 135968 - DNA, 25 bp, probe
agcacctatgccaagtctcggaagg

SEQ ID NO: 135969 - DNA, 25 bp, probe
agcagttatgccaccactggaagat

SEQ ID NO: 135970 - DNA, 25 bp, probe
agcaggttccacaagcctggacagc

SEQ ID NO: 135971 - DNA, 25 bp, probe
agcagtgttgcagcaacctgtgaca

SEQ ID NO: 135972 - DNA, 25 bp, probe
agcaggaacaacaacgagtcacaga

SEQ ID NO: 135973 - DNA, 25 bp, probe
agcatttacaaaactcagatctcaa

SEQ ID NO: 135974 - DNA, 25 bp, probe
agcatttacaaaactcagatctcaa

SEQ ID NO: 135975 - DNA, 25 bp, probe
agctttccagacatctggttgcaaa

SEQ ID NO: 135976 - DNA, 25 bp, probe
agcttgatccactgttgctcttaga

SEQ ID NO: 135977 - DNA, 25 bp, probe
agctgagactagtcatgtctctctt

SEQ ID NO: 135978 - DNA, 25 bp, probe
agcatcaactagaataatctacatt

SEQ ID NO: 135979 - DNA, 25 bp, probe
agcagcttctaattttcaatcatct

SEQ ID NO: 135980 - DNA, 25 bp, probe
agctgatggccttgtttcaaaattc

SEQ ID NO: 135981 - DNA, 25 bp, probe
agcattgaccggacccaactgaatg

SEQ ID NO: 135982 - DNA, 25 bp, probe
agcgctaagcgacgaccacagtaag

SEQ ID NO: 135983 - DNA, 25 bp, probe
agcagcaagaggagtccaagtcaca

SEQ ID NO: 135984 - DNA, 25 bp, probe
agcatcgagaggaggccagatgtcc

SEQ ID NO: 135985 - DNA, 25 bp, probe
agcatgaggcaggctgggttcttcc

SEQ ID NO: 135986 - DNA, 25 bp, probe
agcagaggaggagcgtgatctctcc

SEQ ID NO: 135987 - DNA, 25 bp, probe
agcagtgggtgaagctgtaccgcgg

SEQ ID NO: 135988 - DNA, 25 bp, probe
agccgggtgaagctgtctagcaagg

SEQ ID NO: 135989 - DNA, 25 bp, probe
actagaaggtacgctctacaagggc

SEQ ID NO: 135990 - DNA, 25 bp, probe
accagacctttctcctgaaggtgga

SEQ ID NO: 135991 - DNA, 25 bp, probe
agctctactttatgtcctgaagctg

SEQ ID NO: 135992 - DNA, 25 bp, probe
agcatccttggatcagtactgaact

SEQ ID NO: 135993 - DNA, 25 bp, probe
agctcccatcgtaaggacggactcc

SEQ ID NO: 135994 - DNA, 25 bp, probe
agctttctctgtgtattcggacttc

SEQ ID NO: 135995 - DNA, 25 bp, probe
agctttacacagctgtccttacttc

SEQ ID NO: 135996 - DNA, 25 bp, probe
agctttacacagctgtccttacttc

SEQ ID NO: 135997 - DNA, 25 bp, probe
agcatttagcatattgtttacacat

SEQ ID NO: 135998 - DNA, 25 bp, probe
agcatttagcatattgtttacacat

SEQ ID NO: 135999 - DNA, 25 bp, probe
agcagcttagtaattgtgtctggaa

SEQ ID NO: 136000 - DNA, 25 bp, probe
agcagcaatctgtatttgtggagga

SEQ ID NO: 136001 - DNA, 25 bp, probe
agcatcaatgcacatcttggtattg

SEQ ID NO: 136002 - DNA, 25 bp, probe
agcttggcagaagatgagtttgtgt

SEQ ID NO: 136003 - DNA, 25 bp, probe
agctcccaggcagatgagtccttta

SEQ ID NO: 136004 - DNA, 25 bp, probe
agcatcccaggagatgctctgtagg

SEQ ID NO: 136005 - DNA, 25 bp, probe
agcatccacagtacaagccttgaac

SEQ ID NO: 136006 - DNA, 25 bp, probe
agcagcaacagcaacgggggcaacc

SEQ ID NO: 136007 - DNA, 25 bp, probe
agcagcaacagcaacgggggcaacc

SEQ ID NO: 136008 - DNA, 25 bp, probe
agcttacgtacgcgtgcatgcgacg

SEQ ID NO: 136009 - DNA, 25 bp, probe
agcagtgcacaattccgtggcagct

SEQ ID NO: 136010 - DNA, 25 bp, probe
agcatgtgaaagcctctctggctgt

SEQ ID NO: 136011 - DNA, 25 bp, probe
agcaggacaaatcccggctgaatga

SEQ ID NO: 136012 - DNA, 25 bp, probe
agcagcgccaggaggaagctgacag

SEQ ID NO: 136013 - DNA, 25 bp, probe
agcagtgccagtgggtcgactagca

SEQ ID NO: 136014 - DNA, 25 bp, probe
agcagtcaagaccagctgggtagtc

SEQ ID NO: 136015 - DNA, 25 bp, probe
agcagatcaaacatctggaaattac

SEQ ID NO: 136016 - DNA, 25 bp, probe
agcagttcaacttctgtaacaccag

SEQ ID NO: 136017 - DNA, 25 bp, probe
agcagttcaacttctgtaacaccag

SEQ ID NO: 136018 - DNA, 25 bp, probe
agcttccagacaatcatgtcaaaat

SEQ ID NO: 136019 - DNA, 25 bp, probe
agcatttcgatcctcgtcaggtgca

SEQ ID NO: 136020 - DNA, 25 bp, probe
agcatccacactgccggcaggatgc

SEQ ID NO: 136021 - DNA, 25 bp, probe
agcatcctcacgttgctggagatcc

SEQ ID NO: 136022 - DNA, 25 bp, probe
agctccatcatcaaatggccaatct

SEQ ID NO: 136023 - DNA, 25 bp, probe
agctcctgaaaaatgcctcattacc

SEQ ID NO: 136024 - DNA, 25 bp, probe
agcatttgaaaaacttcactgccca

SEQ ID NO: 136025 - DNA, 25 bp, probe
agcattgtacgaacttccaggccta

SEQ ID NO: 136026 - DNA, 25 bp, probe
agcatctacctgaacatccagaggc

SEQ ID NO: 136027 - DNA, 25 bp, probe
agctcttcaaattcaccatcggcat

SEQ ID NO: 136028 - DNA, 25 bp, probe
agctcttcaaattcaccatcggcat

SEQ ID NO: 136029 - DNA, 25 bp, probe
agcagcgtcaacaaacggggctcaa

SEQ ID NO: 136030 - DNA, 25 bp, probe
agccctccagtgtactgagggtact

SEQ ID NO: 136031 - DNA, 25 bp, probe
agccccctatagtcatggggtccct

SEQ ID NO: 136032 - DNA, 25 bp, probe
agctaccgctgcaagtgtcgggatg

SEQ ID NO: 136033 - DNA, 25 bp, probe
agcattccgcggactgaagggcagg

SEQ ID NO: 136034 - DNA, 25 bp, probe
agcagttctccactgtgaagggcgt

SEQ ID NO: 136035 - DNA, 25 bp, probe
agcagctatgccaacgttcaagatg

SEQ ID NO: 136036 - DNA, 25 bp, probe
agcagcttcacactctgcattacag

SEQ ID NO: 136037 - DNA, 25 bp, probe
agcagtgagacatcatggctacagc

SEQ ID NO: 136038 - DNA, 25 bp, probe
agcagatggatatcacctcatcgat

SEQ ID NO: 136039 - DNA, 25 bp, probe
agcagatctgactagtcaattacag

SEQ ID NO: 136040 - DNA, 25 bp, probe
agcagattaccatttattacatcgt

SEQ ID NO: 136041 - DNA, 25 bp, probe
agcaggaactgagttcattacatct

SEQ ID NO: 136042 - DNA, 25 bp, probe
agcaggagacgacttactagatctc

SEQ ID NO: 136043 - DNA, 25 bp, probe
agcttgaatggattctaacagactc

SEQ ID NO: 136044 - DNA, 25 bp, probe
agctgtgactggaataaacccccgc

SEQ ID NO: 136045 - DNA, 25 bp, probe
agcatggcctagataggcgcccacc

SEQ ID NO: 136046 - DNA, 25 bp, probe
agcaggggcagaacaggccttcacc

SEQ ID NO: 136047 - DNA, 25 bp, probe
agcagaccatgaaagggcgtctccc

SEQ ID NO: 136048 - DNA, 25 bp, probe
agcatgcccaatcttagagactctc

SEQ ID NO: 136049 - DNA, 25 bp, probe
agctctcttcatccagtaagttcat

SEQ ID NO: 136050 - DNA, 25 bp, probe
agcattgctttcgtgtaaattatgt

SEQ ID NO: 136051 - DNA, 25 bp, probe
agcttctttgcccaaaatgcagtgc

SEQ ID NO: 136052 - DNA, 25 bp, probe
agcttcatttctcaatttcttgttt

SEQ ID NO: 136053 - DNA, 25 bp, probe
agcttctaaattaatctctgccttt

SEQ ID NO: 136054 - DNA, 25 bp, probe
agcagttaaattgtgcgctgtattt

SEQ ID NO: 136055 - DNA, 25 bp, probe
agcagaaactttcgctggatggttt

SEQ ID NO: 136056 - DNA, 25 bp, probe
agcattccattctcgtggaggagtt

SEQ ID NO: 136057 - DNA, 25 bp, probe
agcattcctccatcttagatagatg

SEQ ID NO: 136058 - DNA, 25 bp, probe
agcttcgtctcaccttgagttaggc

SEQ ID NO: 136059 - DNA, 25 bp, probe
agcatcctttatctgtgacttcatg

SEQ ID NO: 136060 - DNA, 25 bp, probe
agcagtttatatatttcttcatgaa

SEQ ID NO: 136061 - DNA, 25 bp, probe
agctgtttagtttgttaattgatta

SEQ ID NO: 136062 - DNA, 25 bp, probe
agctgtttagtttgttaattgatta

SEQ ID NO: 136063 - DNA, 25 bp, probe
agctttgtattttggttagctatgc

SEQ ID NO: 136064 - DNA, 25 bp, probe
agctttatatcttgggatttttcac

SEQ ID NO: 136065 - DNA, 25 bp, probe
agctttatatcttgggatttttcac

SEQ ID NO: 136066 - DNA, 25 bp, probe
agcttgtgataatggatcttcattt

SEQ ID NO: 136067 - DNA, 25 bp, probe
agcttttaagccatgcttgctcatt

SEQ ID NO: 136068 - DNA, 25 bp, probe
agcagctttacgctggctgctgtct

SEQ ID NO: 136069 - DNA, 25 bp, probe
agcagcatgcgggggttgctggtgt

SEQ ID NO: 136070 - DNA, 25 bp, probe
agcagtcagagcggcatgggctggc

SEQ ID NO: 136071 - DNA, 25 bp, probe
agcagtcagagcggcatgggctggc

SEQ ID NO: 136072 - DNA, 25 bp, probe
agcagctatgacagtgagtgggaac

SEQ ID NO: 136073 - DNA, 25 bp, probe
acagttgacgcggccggcgaattta

SEQ ID NO: 136074 - DNA, 25 bp, probe
agcagtggaactgcggctgcgcaat

SEQ ID NO: 136075 - DNA, 25 bp, probe
agcagtgcaaggatcgcctgtcagt

SEQ ID NO: 136076 - DNA, 25 bp, probe
agcagagcatcagcttcttcttgca

SEQ ID NO: 136077 - DNA, 25 bp, probe
agcagatgaagcctatctcatcggc

SEQ ID NO: 136078 - DNA, 25 bp, probe
agcagaaagatccatcttgctgact

SEQ ID NO: 136079 - DNA, 25 bp, probe
agcagcagcacagttcagcattgtg

SEQ ID NO: 136080 - DNA, 25 bp, probe
agcattgctagcttccatgtgaaac

SEQ ID NO: 136081 - DNA, 25 bp, probe
agcatcctacctgaggaagctgccc

SEQ ID NO: 136082 - DNA, 25 bp, probe
agcttacaggctgagccaagcccac

SEQ ID NO: 136083 - DNA, 25 bp, probe
agctacgagatggtaccgagctcct

SEQ ID NO: 136084 - DNA, 25 bp, probe
agcattcggattgcaactgctccct

SEQ ID NO: 136085 - DNA, 25 bp, probe
agcagtcggttggagcgagcatccc

SEQ ID NO: 136086 - DNA, 25 bp, probe
agcagtccttggagaccatctgcct

SEQ ID NO: 136087 - DNA, 25 bp, probe
agcatgtggtcctggaaatccctta

SEQ ID NO: 136088 - DNA, 25 bp, probe
agcttttccttgcaggagcgtcagt

SEQ ID NO: 136089 - DNA, 25 bp, probe
agctggtatcacatagttggagtca

SEQ ID NO: 136090 - DNA, 25 bp, probe
agcagtgttgaatagcttgcggcca

SEQ ID NO: 136091 - DNA, 25 bp, probe
agcagtgttgaatagcttgcggcca

SEQ ID NO: 136092 - DNA, 25 bp, probe
agcagtcaggaatccacatggtgta

SEQ ID NO: 136093 - DNA, 25 bp, probe
agcaggagaaaaccacagttctgat

SEQ ID NO: 136094 - DNA, 25 bp, probe
agcaggcaagaggatccaggtccta

SEQ ID NO: 136095 - DNA, 25 bp, probe
agcagagccaagcagcacagagtcc

SEQ ID NO: 136096 - DNA, 25 bp, probe
agctgtgccaggctgtcaagttcct

SEQ ID NO: 136097 - DNA, 25 bp, probe
agctgtgcctacaactaaagtacta

SEQ ID NO: 136098 - DNA, 25 bp, probe
agcatctcctccaaataccagatac

SEQ ID NO: 136099 - DNA, 25 bp, probe
agcatctcctccaaataccagatac

SEQ ID NO: 136100 - DNA, 25 bp, probe
agcttcttccctaagccataaactg

SEQ ID NO: 136101 - DNA, 25 bp, probe
agcttttccagtctgctcaagaaca

SEQ ID NO: 136102 - DNA, 25 bp, probe
agcatttcccagctgtgtaaaaaca

SEQ ID NO: 136103 - DNA, 25 bp, probe
agcagttccaagcttgcatcatgaa

SEQ ID NO: 136104 - DNA, 25 bp, probe
agcatttctgcaagcgttgcctgga

SEQ ID NO: 136105 - DNA, 25 bp, probe
agcagattcgcaagcggctgcgctg

SEQ ID NO: 136106 - DNA, 25 bp, probe
agctatgtgccatcatgcctggctg

SEQ ID NO: 136107 - DNA, 25 bp, probe
agcttgctgctttcagctggagcag

SEQ ID NO: 136108 - DNA, 25 bp, probe
tgcacccatctgcggatggtactcc

SEQ ID NO: 136109 - DNA, 25 bp, probe
agctataatgtgccactggagagta

SEQ ID NO: 136110 - DNA, 25 bp, probe
agcttgcaactgtctgataagaata

SEQ ID NO: 136111 - DNA, 25 bp, probe
agcctagacattcagagcagcagaa

SEQ ID NO: 136112 - DNA, 25 bp, probe
agcctagacattcagagcagcagaa

SEQ ID NO: 136113 - DNA, 25 bp, probe
agcttagcaacgcagaagagtacaa

SEQ ID NO: 136114 - DNA, 25 bp, probe
agctcttgacctcagaaagtatcca

SEQ ID NO: 136115 - DNA, 25 bp, probe
agcagttagccacagaatatgaaca

SEQ ID NO: 136116 - DNA, 25 bp, probe
agcaggtggccacagccttgatgaa

SEQ ID NO: 136117 - DNA, 25 bp, probe
agcagtgggatacctgcgcttgaag

SEQ ID NO: 136118 - DNA, 25 bp, probe
agcagtgggatacctgcgcttgaag

SEQ ID NO: 136119 - DNA, 25 bp, probe
agcatgttggacacactgctctacc

SEQ ID NO: 136120 - DNA, 25 bp, probe
agcttctgagacatccctgattctc

SEQ ID NO: 136121 - DNA, 25 bp, probe
agctcttgaagcctccattattatg

SEQ ID NO: 136122 - DNA, 25 bp, probe
agcatttatcagctgtggcatatta

SEQ ID NO: 136123 - DNA, 25 bp, probe
agcattctcatcagtcgcaatgatt

SEQ ID NO: 136124 - DNA, 25 bp, probe
agcatctcctcaactctgagtgtta

SEQ ID NO: 136125 - DNA, 25 bp, probe
agcatgccccttaagattttctaca

SEQ ID NO: 136126 - DNA, 25 bp, probe
agcatgccccttaagattttctaca

SEQ ID NO: 136127 - DNA, 25 bp, probe
agcatcccctatttgattttcagag

SEQ ID NO: 136128 - DNA, 25 bp, probe
agcatcccctatttgattttcagag

SEQ ID NO: 136129 - DNA, 25 bp, probe
agcttccgtgagctgacctatcagt

SEQ ID NO: 136130 - DNA, 25 bp, probe
agcattcagtattgctgtccgcttc

SEQ ID NO: 136131 - DNA, 25 bp, probe
agcatttgttagatcacatcgccga

SEQ ID NO: 136132 - DNA, 25 bp, probe
agcattagatttctcatttgccaat

SEQ ID NO: 136133 - DNA, 25 bp, probe
agcttgaagacgctcttcatcctct

SEQ ID NO: 136134 - DNA, 25 bp, probe
acataacatttgcactttcgtccct

SEQ ID NO: 136135 - DNA, 25 bp, probe
agctaaacgtgccagtttcttctcc

SEQ ID NO: 136136 - DNA, 25 bp, probe
agctaaacaccaatttcttcctgct

SEQ ID NO: 136137 - DNA, 25 bp, probe
agctaagtacttgcttctattcctt

SEQ ID NO: 136138 - DNA, 25 bp, probe
agcataaagccttctctacgtgctc

SEQ ID NO: 136139 - DNA, 25 bp, probe
agcataaagccttctctacgtgctc

SEQ ID NO: 136140 - DNA, 25 bp, probe
agctaaacatgcttcatcgtcggtc

SEQ ID NO: 136141 - DNA, 25 bp, probe
agcatgaaactttgtagcatcgggc

SEQ ID NO: 136142 - DNA, 25 bp, probe
agcatgttagcagcagtgaacaggg

SEQ ID NO: 136143 - DNA, 25 bp, probe
agcttcagagatacagtccacaggt

SEQ ID NO: 136144 - DNA, 25 bp, probe
agctataaattgcgctctcagctgt

SEQ ID NO: 136145 - DNA, 25 bp, probe
agctcaaaagctcacatctcaggtt

SEQ ID NO: 136146 - DNA, 25 bp, probe
agctcaaaagctcacatctcaggtt

SEQ ID NO: 136147 - DNA, 25 bp, probe
agctaatgtaataagcactcatgtt

SEQ ID NO: 136148 - DNA, 25 bp, probe
agctagactacaggcatgcaccact

SEQ ID NO: 136149 - DNA, 25 bp, probe
agctatgcctcagtggcaacctcat

SEQ ID NO: 136150 - DNA, 25 bp, probe
agctagttagtgccatggcacactg

SEQ ID NO: 136151 - DNA, 25 bp, probe
agctcactgaagtttcgacctgggc

SEQ ID NO: 136152 - DNA, 25 bp, probe
agcgactgcgacgttcgatcttgca

SEQ ID NO: 136153 - DNA, 25 bp, probe
agctgctcggacactcagaccgagc

SEQ ID NO: 136154 - DNA, 25 bp, probe
agcagtgaccacaccaacactgacc

SEQ ID NO: 136155 - DNA, 25 bp, probe
agcagtggttcttgacatcacacga

SEQ ID NO: 136156 - DNA, 25 bp, probe
agcagatggttgaaacacccatgct

SEQ ID NO: 136157 - DNA, 25 bp, probe
agcagagccattcaacactgaactg

SEQ ID NO: 136158 - DNA, 25 bp, probe
agcatcagccttagaacaagaacct

SEQ ID NO: 136159 - DNA, 25 bp, probe
agctcagactattacaataacacca

SEQ ID NO: 136160 - DNA, 25 bp, probe
agctaatgaggctacagaaacaggc

SEQ ID NO: 136161 - DNA, 25 bp, probe
agctccagattctcaaaccagaggc

SEQ ID NO: 136162 - DNA, 25 bp, probe
agcatccacaactacaaatcactac

SEQ ID NO: 136163 - DNA, 25 bp, probe
agcatccagcgacagatcaaccatc

SEQ ID NO: 136164 - DNA, 25 bp, probe
agcatccaccaattttcactgcatt

SEQ ID NO: 136165 - DNA, 25 bp, probe
agcatccctgaaaaccccatgatga

SEQ ID NO: 136166 - DNA, 25 bp, probe
agctccctagaatctcctggaatgc

SEQ ID NO: 136167 - DNA, 25 bp, probe
agctctgttggcaagggtctgggtc

SEQ ID NO: 136168 - DNA, 25 bp, probe
agctctgttggcaagggtctgggtc

SEQ ID NO: 136169 - DNA, 25 bp, probe
agcatcgagggccgaggtcacggcc

SEQ ID NO: 136170 - DNA, 25 bp, probe
agcatcgcggatgaagacgcacggc

SEQ ID NO: 136171 - DNA, 25 bp, probe
agcatcgcggatgaagacgcacggc

SEQ ID NO: 136172 - DNA, 25 bp, probe
agcatcagctcgtcaacgggaagga

SEQ ID NO: 136173 - DNA, 25 bp, probe
agcatcagctcgtcaacgggaagga

SEQ ID NO: 136174 - DNA, 25 bp, probe
agcagatccggctgcaggtggagcg

SEQ ID NO: 136175 - DNA, 25 bp, probe
agccattggtgcacaggatgggggc

SEQ ID NO: 136176 - DNA, 25 bp, probe
agccagtttgtgagtggtggggagg

SEQ ID NO: 136177 - DNA, 25 bp, probe
agcagggaggtccgggagggtgcgg

SEQ ID NO: 136178 - DNA, 25 bp, probe
agcagggtgctcaggtggtgggtgc

SEQ ID NO: 136179 - DNA, 25 bp, probe
agcagggtgctcaggtggtgggtgc

SEQ ID NO: 136180 - DNA, 25 bp, probe
agcagtatggtctggatggcccgtt

SEQ ID NO: 136181 - DNA, 25 bp, probe
agcagtatggtctggatggcccgtt

SEQ ID NO: 136182 - DNA, 25 bp, probe
agcagggcttcaggaggtgcccgct

SEQ ID NO: 136183 - DNA, 25 bp, probe
agcagggtctgagagaggagccaca

SEQ ID NO: 136184 - DNA, 25 bp, probe
agcaggtgcgtgaaggaggatccca

SEQ ID NO: 136185 - DNA, 25 bp, probe
agcatggtggtgaaggactgtgtaa

SEQ ID NO: 136186 - DNA, 25 bp, probe
agctggtggctggaccaatgtaaat

SEQ ID NO: 136187 - DNA, 25 bp, probe
agcatccgtgggtcacaggtaaagc

SEQ ID NO: 136188 - DNA, 25 bp, probe
agcatgactgtagataaggatagca

SEQ ID NO: 136189 - DNA, 25 bp, probe
agcatgacttcttacagagctgtaa

SEQ ID NO: 136190 - DNA, 25 bp, probe
agcatgacttcttacagagctgtaa

SEQ ID NO: 136191 - DNA, 25 bp, probe
agctattgcctaaatcagcgtcaac

SEQ ID NO: 136192 - DNA, 25 bp, probe
agctttgccattagatctagacaag

SEQ ID NO: 136193 - DNA, 25 bp, probe
agcttggtgctaaaccacaatatgt

SEQ ID NO: 136194 - DNA, 25 bp, probe
agctcagtatgcaaaagcccaaact

SEQ ID NO: 136195 - DNA, 25 bp, probe
agctgcagctcccaaatttcaaatt

SEQ ID NO: 136196 - DNA, 25 bp, probe
agctgcagctcccaaatttcaaatt

SEQ ID NO: 136197 - DNA, 25 bp, probe
agctcagtcctgcagtttgactgtt

SEQ ID NO: 136198 - DNA, 25 bp, probe
agctatgctgggcaattctggcaat

SEQ ID NO: 136199 - DNA, 25 bp, probe
agctgatggggaaaattccaaacat

SEQ ID NO: 136200 - DNA, 25 bp, probe
agctgtggtggtgaactccccacaa

SEQ ID NO: 136201 - DNA, 25 bp, probe
agcagtttggggtgtggccccaggg

SEQ ID NO: 136202 - DNA, 25 bp, probe
agcatgatttagcgaggtggcctac

SEQ ID NO: 136203 - DNA, 25 bp, probe
agcatgttgctgaggagtgaggaat

SEQ ID NO: 136204 - DNA, 25 bp, probe
agcagtggctgatttgggggagaaa

SEQ ID NO: 136205 - DNA, 25 bp, probe
agcatgcgggcctttgggaaaaaca

SEQ ID NO: 136206 - DNA, 25 bp, probe
agcagaggacagtgttgccaaaact

SEQ ID NO: 136207 - DNA, 25 bp, probe
agcagggcaggaaacgccaagaact

SEQ ID NO: 136208 - DNA, 25 bp, probe
agcagtgtatggacaagccaaagaa

SEQ ID NO: 136209 - DNA, 25 bp, probe
agcaggtggagcgaggctacaggat

SEQ ID NO: 136210 - DNA, 25 bp, probe
agcaggtcagaagtggcaatgaaat

SEQ ID NO: 136211 - DNA, 25 bp, probe
agcaggtcagaagtggcaatgaaat

SEQ ID NO: 136212 - DNA, 25 bp, probe
agcagtgatggctggggaacaatgt

SEQ ID NO: 136213 - DNA, 25 bp, probe
agccgtggtgggaggacgagtggga

SEQ ID NO: 136214 - DNA, 25 bp, probe
agcttgtggtggggcaggaacggtg

SEQ ID NO: 136215 - DNA, 25 bp, probe
agcttctgagggatgcaggtggctg

SEQ ID NO: 136216 - DNA, 25 bp, probe
agcttggacagtctgagctgtaggt

SEQ ID NO: 136217 - DNA, 25 bp, probe
agcttggacagtctgagctgtaggt

SEQ ID NO: 136218 - DNA, 25 bp, probe
agcaggtgacacagtgagctcccgt

SEQ ID NO: 136219 - DNA, 25 bp, probe
agcaggtgaactcgaagcccacaat

SEQ ID NO: 136220 - DNA, 25 bp, probe
agcaggtgtgcgtgcacacccacac

SEQ ID NO: 136221 - DNA, 25 bp, probe
agcaggtgtgcgtgcacacccacac

SEQ ID NO: 136222 - DNA, 25 bp, probe
agcagtttgcagcagagcatccgct

SEQ ID NO: 136223 - DNA, 25 bp, probe
agcattatctcggacacatcttgtg

SEQ ID NO: 136224 - DNA, 25 bp, probe
agcattatctcggacacatcttgtg

SEQ ID NO: 136225 - DNA, 25 bp, probe
agcttccaggaggacatctactgcc

SEQ ID NO: 136226 - DNA, 25 bp, probe
agcttccaggaggacatctactgcc

SEQ ID NO: 136227 - DNA, 25 bp, probe
agcattccagtagctatgacctgcc

SEQ ID NO: 136228 - DNA, 25 bp, probe
agcattgacaattttcagatctctg

SEQ ID NO: 136229 - DNA, 25 bp, probe
agcattgacaattttcagatctctg

SEQ ID NO: 136230 - DNA, 25 bp, probe
agctattcacatcattgcacacctg

SEQ ID NO: 136231 - DNA, 25 bp, probe
agctagctccatagggaagcctgtg

SEQ ID NO: 136232 - DNA, 25 bp, probe
agcttgtcatcaatggaaatcccat

SEQ ID NO: 136233 - DNA, 25 bp, probe
agctttatcatatgtagcatcacaa

SEQ ID NO: 136234 - DNA, 25 bp, probe
agcattatctctgagtccaccagaa

SEQ ID NO: 136235 - DNA, 25 bp, probe
agcatatatgttgttaactcacaca

SEQ ID NO: 136236 - DNA, 25 bp, probe
agcatatatgtcgctaactcacaca

SEQ ID NO: 136237 - DNA, 25 bp, probe
agcatgcataataagtcacagccaa

SEQ ID NO: 136238 - DNA, 25 bp, probe
agctgcagacctgtacaccaaactt

SEQ ID NO: 136239 - DNA, 25 bp, probe
agctcagattcatctaatcctcaac

SEQ ID NO: 136240 - DNA, 25 bp, probe
agctcagttaaatgcaactgcaagt

SEQ ID NO: 136241 - DNA, 25 bp, probe
agctcactgtaacttgaacaaaagg

SEQ ID NO: 136242 - DNA, 25 bp, probe
agcatagctgagtagttgaactagg

SEQ ID NO: 136243 - DNA, 25 bp, probe
agcatggtgatatgttggccttggt

SEQ ID NO: 136244 - DNA, 25 bp, probe
agcatgtgggggaaggccttgctgt

SEQ ID NO: 136245 - DNA, 25 bp, probe
agctgaaggttgtggcctttgcgct

SEQ ID NO: 136246 - DNA, 25 bp, probe
agctgaaggttgtggcctttgcgct

SEQ ID NO: 136247 - DNA, 25 bp, probe
agctttggacattaggtctttgaca

SEQ ID NO: 136248 - DNA, 25 bp, probe
agctcttaactatgtctctttgtaa

SEQ ID NO: 136249 - DNA, 25 bp, probe
agctattactaattgctttttggaa

SEQ ID NO: 136250 - DNA, 25 bp, probe
agctgcctattttgtgtttagggaa

SEQ ID NO: 136251 - DNA, 25 bp, probe
agctgcctattttgtgtttagggaa

SEQ ID NO: 136252 - DNA, 25 bp, probe
agcatacttcttgctgctttcagga

SEQ ID NO: 136253 - DNA, 25 bp, probe
agcgactgccttgccattaaggagc

SEQ ID NO: 136254 - DNA, 25 bp, probe
agctggcttcactccttaaaagttg

SEQ ID NO: 136255 - DNA, 25 bp, probe
agctggcttcactccttaaaagttg

SEQ ID NO: 136256 - DNA, 25 bp, probe
agcttgttgaaggctcgtcaaaagt

SEQ ID NO: 136257 - DNA, 25 bp, probe
acttttgacccatgtgcaaggattg

SEQ ID NO: 136258 - DNA, 25 bp, probe
agcttttaacctgagccagagctca

SEQ ID NO: 136259 - DNA, 25 bp, probe
agcatttccaacaggatcacagacc

SEQ ID NO: 136260 - DNA, 25 bp, probe
agcatcaatccaacttaaaagcatc

SEQ ID NO: 136261 - DNA, 25 bp, probe
agcatgtacaaaagtaccatagcac

SEQ ID NO: 136262 - DNA, 25 bp, probe
agcttcatcaagcgctacgagacgc

SEQ ID NO: 136263 - DNA, 25 bp, probe
agcttcatcaagcgctacgagacgc

SEQ ID NO: 136264 - DNA, 25 bp, probe
agcttcatcaagcgctacgagacgc

SEQ ID NO: 136265 - DNA, 25 bp, probe
agcttcatcaagcgctacgagacgc

SEQ ID NO: 136266 - DNA, 25 bp, probe
agctccatcaaggctgacatcgtgc

SEQ ID NO: 136267 - DNA, 25 bp, probe
agctccatcaaggctgacatcgtgc

SEQ ID NO: 136268 - DNA, 25 bp, probe
agcatgcactgccagttactgggca

SEQ ID NO: 136269 - DNA, 25 bp, probe
agctgcacctcactggatctagtgt

SEQ ID NO: 136270 - DNA, 25 bp, probe
agcatcggcatctgcagtgatgagt

SEQ ID NO: 136271 - DNA, 25 bp, probe
agcatcagtatatcccatgcaatat

SEQ ID NO: 136272 - DNA, 25 bp, probe
agctcagcaaagacccaaatatcgt

SEQ ID NO: 136273 - DNA, 25 bp, probe
agctcatagggtatcaatatctctt

SEQ ID NO: 136274 - DNA, 25 bp, probe
agctatagctttactcagcatgact

SEQ ID NO: 136275 - DNA, 25 bp, probe
agcatccagtctgtgctatcagagc

SEQ ID NO: 136276 - DNA, 25 bp, probe
agcatctgggctggtgaaacacctc

SEQ ID NO: 136277 - DNA, 25 bp, probe
agcttgcgagctgggcacatgaagc

SEQ ID NO: 136278 - DNA, 25 bp, probe
agctctgcaactgcaagcagaagcc

SEQ ID NO: 136279 - DNA, 25 bp, probe
agcttgcaggcaagccaggagaccc

SEQ ID NO: 136280 - DNA, 25 bp, probe
agcttgacgcaccaagcggaactgc

SEQ ID NO: 136281 - DNA, 25 bp, probe
agcttgaccgcattggcaaaggctc

SEQ ID NO: 136282 - DNA, 25 bp, probe
agctatacacaattcccaaactcat

SEQ ID NO: 136283 - DNA, 25 bp, probe
agctgaactccctctagcaagatat

SEQ ID NO: 136284 - DNA, 25 bp, probe
agctgatgacttcctaacactaggt

SEQ ID NO: 136285 - DNA, 25 bp, probe
agctgatgacttcctaacactaggt

SEQ ID NO: 136286 - DNA, 25 bp, probe
agcctgacttacaatatgcctgtta

SEQ ID NO: 136287 - DNA, 25 bp, probe
agctgctgactcagaagcctctgtt

SEQ ID NO: 136288 - DNA, 25 bp, probe
agcgtgcattcaaacgcactgctct

SEQ ID NO: 136289 - DNA, 25 bp, probe
agcagtgtctccaggacatcttggc

SEQ ID NO: 136290 - DNA, 25 bp, probe
agcatggctgccaatgggagctcat

SEQ ID NO: 136291 - DNA, 25 bp, probe
agcagtgtgacatttggagcatagg

SEQ ID NO: 136292 - DNA, 25 bp, probe
agcatctggacctggtcatgctggt

SEQ ID NO: 136293 - DNA, 25 bp, probe
agcatcaggacggggttgccctgtg

SEQ ID NO: 136294 - DNA, 25 bp, probe
agctcaaacgacatcttgctctctt

SEQ ID NO: 136295 - DNA, 25 bp, probe
agcatcatgaagaacaatttatgtt

SEQ ID NO: 136296 - DNA, 25 bp, probe
agctgaatatatacgtagtcatgtt

SEQ ID NO: 136297 - DNA, 25 bp, probe
agcatgacaagctcgtgaggctcta

SEQ ID NO: 136298 - DNA, 25 bp, probe
agcatgtgcagtcacgggagctcag

SEQ ID NO: 136299 - DNA, 25 bp, probe
agcatggagctgtttgagagatctc

SEQ ID NO: 136300 - DNA, 25 bp, probe
agcatgtattgtttgagcaacttgg

SEQ ID NO: 136301 - DNA, 25 bp, probe
agctgcttatctgtctaacttggct

SEQ ID NO: 136302 - DNA, 25 bp, probe
agccttgtccagacgaagtgacgtt

SEQ ID NO: 136303 - DNA, 25 bp, probe
agcctgtccagagtgcgtatgggca

SEQ ID NO: 136304 - DNA, 25 bp, probe
agcctgttgcaggctgcttcgtagc

SEQ ID NO: 136305 - DNA, 25 bp, probe
agctgtgcttagctcttcgatactt

SEQ ID NO: 136306 - DNA, 25 bp, probe
agctgtttcagcatcaatccaactt

SEQ ID NO: 136307 - DNA, 25 bp, probe
agcatctttcaaaaactacgttatg

SEQ ID NO: 136308 - DNA, 25 bp, probe
agcatcttccctagaaatttttgtg

SEQ ID NO: 136309 - DNA, 25 bp, probe
agcatctgccctgtgaagtttgttt

SEQ ID NO: 136310 - DNA, 25 bp, probe
agcgtccgcatgctaatcgcttttt

SEQ ID NO: 136311 - DNA, 25 bp, probe
agcgccttcagtgtactgtttctta

SEQ ID NO: 136312 - DNA, 25 bp, probe
agcaggtggcgtacgacggtgttga

SEQ ID NO: 136313 - DNA, 25 bp, probe
agcaggtgaggctcggcttggatta

SEQ ID NO: 136314 - DNA, 25 bp, probe
agcaggtgaggctcggcttggatta

SEQ ID NO: 136315 - DNA, 25 bp, probe
acgaagatgcagtacggtttattag

SEQ ID NO: 136316 - DNA, 25 bp, probe
acgaagatgcagtacggtttattag

SEQ ID NO: 136317 - DNA, 25 bp, probe
acgtttgcaacacagtattgaaagg

SEQ ID NO: 136318 - DNA, 25 bp, probe
agcgttcgaacgcactgatttcgac

SEQ ID NO: 136319 - DNA, 25 bp, probe
acgttcttgacgtgttttaacagca

SEQ ID NO: 136320 - DNA, 25 bp, probe
accgttctacgatgtggttcccaat

SEQ ID NO: 136321 - DNA, 25 bp, probe
agccgtgtggacgaagtttggccca

SEQ ID NO: 136322 - DNA, 25 bp, probe
agcttctaggatccaagtttcctta

SEQ ID NO: 136323 - DNA, 25 bp, probe
agctttctgacaaaaagtttccata

SEQ ID NO: 136324 - DNA, 25 bp, probe
agctgattctggaagcaacgttctt

SEQ ID NO: 136325 - DNA, 25 bp, probe
agcttcctgcaggtgcatgactttt

SEQ ID NO: 136326 - DNA, 25 bp, probe
agcatccaggcggtcaagatctttc

SEQ ID NO: 136327 - DNA, 25 bp, probe
agcatcccagctataaggctcttgc

SEQ ID NO: 136328 - DNA, 25 bp, probe
agctgccagactataagccctatcc

SEQ ID NO: 136329 - DNA, 25 bp, probe
agctgccagactataagccctatcc

SEQ ID NO: 136330 - DNA, 25 bp, probe
agctgcctgcacttacaggcgtttc

SEQ ID NO: 136331 - DNA, 25 bp, probe
agctcaggccttacagacgattaac

SEQ ID NO: 136332 - DNA, 25 bp, probe
agctctgtccttacatgtatttgat

SEQ ID NO: 136333 - DNA, 25 bp, probe
agctggtactaacgacattgtgccc

SEQ ID NO: 136334 - DNA, 25 bp, probe
acgataattatacgacggagaccta

SEQ ID NO: 136335 - DNA, 25 bp, probe
acggtatttaagagagaactatatt

SEQ ID NO: 136336 - DNA, 25 bp, probe
agctgtgatttggaagggaaacttt

SEQ ID NO: 136337 - DNA, 25 bp, probe
agcgtaacggagggtgaagagcata

SEQ ID NO: 136338 - DNA, 25 bp, probe
agcgttacctggtgggcacagtgag

SEQ ID NO: 136339 - DNA, 25 bp, probe
agcggtcggtggagaacacaggccc

SEQ ID NO: 136340 - DNA, 25 bp, probe
agcgaggaggcggagtgcccaaacc

SEQ ID NO: 136341 - DNA, 25 bp, probe
agcaggaagccctgcaaccagaacc

SEQ ID NO: 136342 - DNA, 25 bp, probe
agctggagggcctctagggaaccgt

SEQ ID NO: 136343 - DNA, 25 bp, probe
agctggacagaggtttctgggagac

SEQ ID NO: 136344 - DNA, 25 bp, probe
agctatggtgacttttagggagcac

SEQ ID NO: 136345 - DNA, 25 bp, probe
agctcatggagatctttgagactga

SEQ ID NO: 136346 - DNA, 25 bp, probe
agcttaggctgcttattggaccaga

SEQ ID NO: 136347 - DNA, 25 bp, probe
agcttatgaccagggtggcccagtt

SEQ ID NO: 136348 - DNA, 25 bp, probe
agcttacaccaccagggtaagaaag

SEQ ID NO: 136349 - DNA, 25 bp, probe
agcttatacatatcaggttgcaacc

SEQ ID NO: 136350 - DNA, 25 bp, probe
agctcttactcttcaagttcaacca

SEQ ID NO: 136351 - DNA, 25 bp, probe
agctcttactctgggatgtggactc

SEQ ID NO: 136352 - DNA, 25 bp, probe
agctttgccttgagattgactcatt

SEQ ID NO: 136353 - DNA, 25 bp, probe
agctttgcagttactgtgaactatt

SEQ ID NO: 136354 - DNA, 25 bp, probe
agctttattcattcatgcaatacta

SEQ ID NO: 136355 - DNA, 25 bp, probe
agcatttttcaccttcatagcatac

SEQ ID NO: 136356 - DNA, 25 bp, probe
agctttcagtcagatgtatatgcat

SEQ ID NO: 136357 - DNA, 25 bp, probe
agctttcagtcagatgtatatgcat

SEQ ID NO: 136358 - DNA, 25 bp, probe
agctcttcagcggtgcgtatgacat

SEQ ID NO: 136359 - DNA, 25 bp, probe
agcatgttcagcattcaggtgatca

SEQ ID NO: 136360 - DNA, 25 bp, probe
agcatattattgatgagctggatct

SEQ ID NO: 136361 - DNA, 25 bp, probe
agcatttctgtgtttgagagatttc

SEQ ID NO: 136362 - DNA, 25 bp, probe
agctttcagctgagggagagttctc

SEQ ID NO: 136363 - DNA, 25 bp, probe
agctttcagctgagggagagttctc

SEQ ID NO: 136364 - DNA, 25 bp, probe
agctttcgctgcgggagggtgacgt

SEQ ID NO: 136365 - DNA, 25 bp, probe
agctttcgctgcgggagggtgacgt

SEQ ID NO: 136366 - DNA, 25 bp, probe
agctttcgctgcgggagggtgacgt

SEQ ID NO: 136367 - DNA, 25 bp, probe
agcatttttctggggggatgtccat

SEQ ID NO: 136368 - DNA, 25 bp, probe
agctttgttgctgctctggtattct

SEQ ID NO: 136369 - DNA, 25 bp, probe
agctttgttgctgctctggtattct

SEQ ID NO: 136370 - DNA, 25 bp, probe
agcttgtattggccatctggaatat

SEQ ID NO: 136371 - DNA, 25 bp, probe
agctcgtttctacgctgcagagatc

SEQ ID NO: 136372 - DNA, 25 bp, probe
agctcgtttctacgctgcagagatc

SEQ ID NO: 136373 - DNA, 25 bp, probe
agcttgtctttacatgcatgcttgc

SEQ ID NO: 136374 - DNA, 25 bp, probe
agcattgctttatggcttcttgcct

SEQ ID NO: 136375 - DNA, 25 bp, probe
agcatctggctaaggcatcattttc

SEQ ID NO: 136376 - DNA, 25 bp, probe
agcatctggctaaggcatcattttc

SEQ ID NO: 136377 - DNA, 25 bp, probe
agctcatggcgaagagacttgggcc

SEQ ID NO: 136378 - DNA, 25 bp, probe
agcatcgacatgtgggctgtgggct

SEQ ID NO: 136379 - DNA, 25 bp, probe
agcatcgacatgtgggctgtgggct

SEQ ID NO: 136380 - DNA, 25 bp, probe
agcatcgacatgtgggctgtgggct

SEQ ID NO: 136381 - DNA, 25 bp, probe
agccatcaatgatggcttccggctc

SEQ ID NO: 136382 - DNA, 25 bp, probe
agctcatcggcaaagtggccgtccc

SEQ ID NO: 136383 - DNA, 25 bp, probe
agcttacagaaactgtcctctcgcc

SEQ ID NO: 136384 - DNA, 25 bp, probe
agcattccagaatgtgatctcttct

SEQ ID NO: 136385 - DNA, 25 bp, probe
agcatgtcaaaaaggtgtacagctg

SEQ ID NO: 136386 - DNA, 25 bp, probe
agctcaaccagaagggatacagtgt

SEQ ID NO: 136387 - DNA, 25 bp, probe
agctcaaagataacagtgatcacat

SEQ ID NO: 136388 - DNA, 25 bp, probe
agctcaaagataacagtgatcacat

SEQ ID NO: 136389 - DNA, 25 bp, probe
agcatgcaagagctcagcacgatcc

SEQ ID NO: 136390 - DNA, 25 bp, probe
agcatgctagagtatgaaccagctc

SEQ ID NO: 136391 - DNA, 25 bp, probe
agctgtgcagcatgagttcctgccg

SEQ ID NO: 136392 - DNA, 25 bp, probe
agctgtgcagcatgagttcctgccg

SEQ ID NO: 136393 - DNA, 25 bp, probe
agctgtgcagcttgctgctttcagc

SEQ ID NO: 136394 - DNA, 25 bp, probe
agctgtatgagacctatcagagcag

SEQ ID NO: 136395 - DNA, 25 bp, probe
agctttgcaggttatcagagatcaa

SEQ ID NO: 136396 - DNA, 25 bp, probe
agcttctgtggtcccaatgtcatca

SEQ ID NO: 136397 - DNA, 25 bp, probe
agcttctgtggtcccaatgtcatca

SEQ ID NO: 136398 - DNA, 25 bp, probe
agcttgtgttctcagaatctgatgc

SEQ ID NO: 136399 - DNA, 25 bp, probe
agcttgatgtcaattaactctgatg

SEQ ID NO: 136400 - DNA, 25 bp, probe
agcttgatgtcaattaactctgatg

SEQ ID NO: 136401 - DNA, 25 bp, probe
agctgctggcacattttcttgcaga

SEQ ID NO: 136402 - DNA, 25 bp, probe
agcattggctgcattctctttgagt

SEQ ID NO: 136403 - DNA, 25 bp, probe
agcattcgatgcatttttatagaaa

SEQ ID NO: 136404 - DNA, 25 bp, probe
agcattcaattatcttcatgaagga

SEQ ID NO: 136405 - DNA, 25 bp, probe
agcatctctatgccaagattctgca

SEQ ID NO: 136406 - DNA, 25 bp, probe
agctctttgagcagatcctcaaggc

SEQ ID NO: 136407 - DNA, 25 bp, probe
agctcctttgggacccagatcatcg

SEQ ID NO: 136408 - DNA, 25 bp, probe
agctccatttatagcacctcagaca

SEQ ID NO: 136409 - DNA, 25 bp, probe
agcttcatttgttgctccgagagtg

SEQ ID NO: 136410 - DNA, 25 bp, probe
agctgctcggacactcagaccgagc

SEQ ID NO: 136411 - DNA, 25 bp, probe
agcatctgggaagggagcagccagg

SEQ ID NO: 136412 - DNA, 25 bp, probe
agcatgctgggcttggggtccagtt

SEQ ID NO: 136413 - DNA, 25 bp, probe
agcatgctgcccttgggaagctcat

SEQ ID NO: 136414 - DNA, 25 bp, probe
agcattgcaatagtgaggcagactt

SEQ ID NO: 136415 - DNA, 25 bp, probe
agcattcaaacttccatcctattag

SEQ ID NO: 136416 - DNA, 25 bp, probe
agcattaacagttctacacatttac

SEQ ID NO: 136417 - DNA, 25 bp, probe
agctagattgcagtttaataattaa

SEQ ID NO: 136418 - DNA, 25 bp, probe
agctgaaccagcattacaatttggg

SEQ ID NO: 136419 - DNA, 25 bp, probe
agctgaaccagcattacaatttggg

SEQ ID NO: 136420 - DNA, 25 bp, probe
agctggactatggctctactttcag

SEQ ID NO: 136421 - DNA, 25 bp, probe
agctgctgacaatcctatttagcat

SEQ ID NO: 136422 - DNA, 25 bp, probe
agcttgtgcacattcattttttgat

SEQ ID NO: 136423 - DNA, 25 bp, probe
agcttgtgcacattcattttttgat

SEQ ID NO: 136424 - DNA, 25 bp, probe
agcttattgcagacattttttacca

SEQ ID NO: 136425 - DNA, 25 bp, probe
agcttatatgtgaacttatttctca

SEQ ID NO: 136426 - DNA, 25 bp, probe
agctgtcattgtgattttcgacctc

SEQ ID NO: 136427 - DNA, 25 bp, probe
agctgtgcctgagaggtactgcctc

SEQ ID NO: 136428 - DNA, 25 bp, probe
agcgatgccaaggaggtcatggagc

SEQ ID NO: 136429 - DNA, 25 bp, probe
agcgatgccaaggaggtcatggagc

SEQ ID NO: 136430 - DNA, 25 bp, probe
agcgtgacactggtgatcgcataca

SEQ ID NO: 136431 - DNA, 25 bp, probe
agcattgagtatgtgacgcagagaa

SEQ ID NO: 136432 - DNA, 25 bp, probe
agcattggctgagagaccaggaggg

SEQ ID NO: 136433 - DNA, 25 bp, probe
agcttggatgcccacaagggagtag

SEQ ID NO: 136434 - DNA, 25 bp, probe
agcattagatgctggtaaaagctag

SEQ ID NO: 136435 - DNA, 25 bp, probe
agctctggatgaaggcaaaaactgt

SEQ ID NO: 136436 - DNA, 25 bp, probe
agctttatgatatcaaagactcatt

SEQ ID NO: 136437 - DNA, 25 bp, probe
agctatttgatatgcaccaggtctc

SEQ ID NO: 136438 - DNA, 25 bp, probe
agcttttgaatgtacacagcgaacc

SEQ ID NO: 136439 - DNA, 25 bp, probe
agctgacttatttaagcaataacct

SEQ ID NO: 136440 - DNA, 25 bp, probe
agctgacttatttaagcaataacct

SEQ ID NO: 136441 - DNA, 25 bp, probe
agctggttccggaagaaacatcctc

SEQ ID NO: 136442 - DNA, 25 bp, probe
agcgggtccttcggagatatctacc

SEQ ID NO: 136443 - DNA, 25 bp, probe
agcgcaagatccaccgagatatcaa

SEQ ID NO: 136444 - DNA, 25 bp, probe
agcgcaagatccaccgagatatcaa

SEQ ID NO: 136445 - DNA, 25 bp, probe
agctcaatgggcagctgcggtccat

SEQ ID NO: 136446 - DNA, 25 bp, probe
agctcaagccgcacgacgtgcgcct

SEQ ID NO: 136447 - DNA, 25 bp, probe
agctcaagaccgaggtgtcctcttc

SEQ ID NO: 136448 - DNA, 25 bp, probe
agctcaagaccgaggtgtcctcttc

SEQ ID NO: 136449 - DNA, 25 bp, probe
agctcaaaatctagaagagtctatt

SEQ ID NO: 136450 - DNA, 25 bp, probe
agctcaaactccaggaacttgatcc

SEQ ID NO: 136451 - DNA, 25 bp, probe
agctcaagacattttggaggatctg

SEQ ID NO: 136452 - DNA, 25 bp, probe
agctcagcagacaacatgctggagt

SEQ ID NO: 136453 - DNA, 25 bp, probe
agctcatggccaacagcacacagat

SEQ ID NO: 136454 - DNA, 25 bp, probe
agcatcagcatgttggacacactgc

SEQ ID NO: 136455 - DNA, 25 bp, probe
agcatcagcattgcttcgcagtgcc

SEQ ID NO: 136456 - DNA, 25 bp, probe
agcatcaagcagtccacagcagtct

SEQ ID NO: 136457 - DNA, 25 bp, probe
agctcatatgactacactgcaggcc

SEQ ID NO: 136458 - DNA, 25 bp, probe
agcattgatcattgaactgctgggg

SEQ ID NO: 136459 - DNA, 25 bp, probe
agcatctgcacagcaagctgtcggt

SEQ ID NO: 136460 - DNA, 25 bp, probe
agcatctaagcccaggacatgagtg

SEQ ID NO: 136461 - DNA, 25 bp, probe
agcatcaacagcacagacagcgagc

SEQ ID NO: 136462 - DNA, 25 bp, probe
agctcaaccaatggagagctgaatg

SEQ ID NO: 136463 - DNA, 25 bp, probe
agctcaacagcaccgtggtgggcct

SEQ ID NO: 136464 - DNA, 25 bp, probe
agctgcccctagtgtgagggctgcc

SEQ ID NO: 136465 - DNA, 25 bp, probe
agctcccctctgtggggcagtatct

SEQ ID NO: 136466 - DNA, 25 bp, probe
agctgtcccctagtgagggactgtg

SEQ ID NO: 136467 - DNA, 25 bp, probe
agctcatctaccaggagtggcggtg

SEQ ID NO: 136468 - DNA, 25 bp, probe
agctctacaccagagagtgctgcca

SEQ ID NO: 136469 - DNA, 25 bp, probe
agctctacaacatcatgatgcgctg

SEQ ID NO: 136470 - DNA, 25 bp, probe
agcgtcactccatctgatgtgcaga

SEQ ID NO: 136471 - DNA, 25 bp, probe
agctgctcgaaactgcatgttgcga

SEQ ID NO: 136472 - DNA, 25 bp, probe
agctgaccaagaccatatctcgact

SEQ ID NO: 136473 - DNA, 25 bp, probe
agctcagccacgtaaacttgatcca

SEQ ID NO: 136474 - DNA, 25 bp, probe
agctcagccacgtaaacttgatcca

SEQ ID NO: 136475 - DNA, 25 bp, probe
agctgcgccgggaaattgagatcca

SEQ ID NO: 136476 - DNA, 25 bp, probe
agctgccaggggcttgggattttat

SEQ ID NO: 136477 - DNA, 25 bp, probe
accgcaagccggagaggatttggtc

SEQ ID NO: 136478 - DNA, 25 bp, probe
agcgacggccggggcagaagttgag

SEQ ID NO: 136479 - DNA, 25 bp, probe
agcgcgggcgttggaagaactggag

SEQ ID NO: 136480 - DNA, 25 bp, probe
acgtaggcttctggaggcaactgat

SEQ ID NO: 136481 - DNA, 25 bp, probe
acgtaggcttctggaggcaactgat

SEQ ID NO: 136482 - DNA, 25 bp, probe
acgtaggcttctggaggcaactgat

SEQ ID NO: 136483 - DNA, 25 bp, probe
agctgaagtcatactagcccaacca

SEQ ID NO: 136484 - DNA, 25 bp, probe
agctacactgatactgagaaaacca

SEQ ID NO: 136485 - DNA, 25 bp, probe
agcataagctgcacatggcattaaa

SEQ ID NO: 136486 - DNA, 25 bp, probe
agctgacactgttcagctgcctcaa

SEQ ID NO: 136487 - DNA, 25 bp, probe
agctatcctgaaagtggatcagatt

SEQ ID NO: 136488 - DNA, 25 bp, probe
agcatactggccagtgtgatgagca

SEQ ID NO: 136489 - DNA, 25 bp, probe
agctacgtgggaggctgaggcagca

SEQ ID NO: 136490 - DNA, 25 bp, probe
agcattatgtgctgtgcgtggtgac

SEQ ID NO: 136491 - DNA, 25 bp, probe
agcatttccaggtcatgtggctgcc

SEQ ID NO: 136492 - DNA, 25 bp, probe
agctgccttcgaatagtgctgtcca

SEQ ID NO: 136493 - DNA, 25 bp, probe
agctctttcgtatctttcgtatgct

SEQ ID NO: 136494 - DNA, 25 bp, probe
agctctcttcgataattccagttgg

SEQ ID NO: 136495 - DNA, 25 bp, probe
agcttctgcctgaaaagtcccaagg

SEQ ID NO: 136496 - DNA, 25 bp, probe
agctgttgctcacagaaggaccaca

SEQ ID NO: 136497 - DNA, 25 bp, probe
agcatttcgcgatggacagactcac

SEQ ID NO: 136498 - DNA, 25 bp, probe
agcattacaggatgacagcagccga

SEQ ID NO: 136499 - DNA, 25 bp, probe
agcattagcggagtgcgcatggcct

SEQ ID NO: 136500 - DNA, 25 bp, probe
agcatttcaggatttgcagtccccc

SEQ ID NO: 136501 - DNA, 25 bp, probe
agcattctcgaaattggaggactcc

SEQ ID NO: 136502 - DNA, 25 bp, probe
agctgtatggtcttgggaggactcc

SEQ ID NO: 136503 - DNA, 25 bp, probe
agctgtatggtcttgggaggactcc

SEQ ID NO: 136504 - DNA, 25 bp, probe
agctattcgtcctaaaacactggag

SEQ ID NO: 136505 - DNA, 25 bp, probe
agctacctgttaaagaatcatctgg

SEQ ID NO: 136506 - DNA, 25 bp, probe
agctacctgttaaagaatcatctgg

SEQ ID NO: 136507 - DNA, 25 bp, probe
agctacctgttaaagaatcatctgg

SEQ ID NO: 136508 - DNA, 25 bp, probe
agctcacctttgaacagatcccggt

SEQ ID NO: 136509 - DNA, 25 bp, probe
agctcacctttgaacagatcccggt

SEQ ID NO: 136510 - DNA, 25 bp, probe
agctcaagcattaagacacccttgg

SEQ ID NO: 136511 - DNA, 25 bp, probe
agctgtagactgtaaactcctcgtg

SEQ ID NO: 136512 - DNA, 25 bp, probe
agctgctaggcagtgaattcaccca

SEQ ID NO: 136513 - DNA, 25 bp, probe
agctctgagccagttcagtacctgg

SEQ ID NO: 136514 - DNA, 25 bp, probe
agctcgacgtcattcagcttcacgg

SEQ ID NO: 136515 - DNA, 25 bp, probe
agctcaagcctacactatctgtggc

SEQ ID NO: 136516 - DNA, 25 bp, probe
agctcaagcctacactatctgtggc

SEQ ID NO: 136517 - DNA, 25 bp, probe
agctaatcctgtccctgaaggagca

SEQ ID NO: 136518 - DNA, 25 bp, probe
agcttcctcattgttaaggcagcag

SEQ ID NO: 136519 - DNA, 25 bp, probe
agcttcctaggcttgattcatggag

SEQ ID NO: 136520 - DNA, 25 bp, probe
agcttcctggactttctcagaaggt

SEQ ID NO: 136521 - DNA, 25 bp, probe
agcttagttctcttttgatgtaggt

SEQ ID NO: 136522 - DNA, 25 bp, probe
agcttgtgattgttttgtgtgttgg

SEQ ID NO: 136523 - DNA, 25 bp, probe
agctgtgccttggctgttgtatttg

SEQ ID NO: 136524 - DNA, 25 bp, probe
agctgcttctatgtttcatagttgg

SEQ ID NO: 136525 - DNA, 25 bp, probe
agctcttgaatgtttgtgctagcct

SEQ ID NO: 136526 - DNA, 25 bp, probe
agctcctggttcatggaagccatag

SEQ ID NO: 136527 - DNA, 25 bp, probe
agctcctggttcatggaagccatag

SEQ ID NO: 136528 - DNA, 25 bp, probe
agctctcactttcaagaagcaatag

SEQ ID NO: 136529 - DNA, 25 bp, probe
agctgtcatctcattgaagaactga

SEQ ID NO: 136530 - DNA, 25 bp, probe
agcttccatctttgtgtatatctgc

SEQ ID NO: 136531 - DNA, 25 bp, probe
agctctcacattagtatgatttcat

SEQ ID NO: 136532 - DNA, 25 bp, probe
agctaagatttgcacatttctaggt

SEQ ID NO: 136533 - DNA, 25 bp, probe
agctgaagtatgctgaattacgagc

SEQ ID NO: 136534 - DNA, 25 bp, probe
agcttcaggaggcatttcaacagcc

SEQ ID NO: 136535 - DNA, 25 bp, probe
agcttggacatgcccattacaaagc

SEQ ID NO: 136536 - DNA, 25 bp, probe
agctgctgggtgtccattgccatat

SEQ ID NO: 136537 - DNA, 25 bp, probe
agctgctgggtgtccattgccatat

SEQ ID NO: 136538 - DNA, 25 bp, probe
agctgctttgtttctttgcaatgca

SEQ ID NO: 136539 - DNA, 25 bp, probe
agctctaggtttcttgatgatcaag

SEQ ID NO: 136540 - DNA, 25 bp, probe
agctctaggtttcttgatgatcaag

SEQ ID NO: 136541 - DNA, 25 bp, probe
agctataggctcttgttggataaaa

SEQ ID NO: 136542 - DNA, 25 bp, probe
agctcatgggaaaattgtgatcaaa

SEQ ID NO: 136543 - DNA, 25 bp, probe
agctcggtaccagagtgtaacaacc

SEQ ID NO: 136544 - DNA, 25 bp, probe
agctctattaattgccatgtttaca

SEQ ID NO: 136545 - DNA, 25 bp, probe
agctttagggtcctgcttcatgaca

SEQ ID NO: 136546 - DNA, 25 bp, probe
agctttaggtcatatgttcatgtat

SEQ ID NO: 136547 - DNA, 25 bp, probe
agctgttactacattgtacatggca

SEQ ID NO: 136548 - DNA, 25 bp, probe
agctgataactactgacttcactgg

SEQ ID NO: 136549 - DNA, 25 bp, probe
agctgtgagcaatctgcagtctact

SEQ ID NO: 136550 - DNA, 25 bp, probe
agcttgatgatatcactgtcactga

SEQ ID NO: 136551 - DNA, 25 bp, probe
agctgtctatttttgtcactgtcgg

SEQ ID NO: 136552 - DNA, 25 bp, probe
agctgtctatttttgtcactgtcgg

SEQ ID NO: 136553 - DNA, 25 bp, probe
agctgtaatcgtttgcttgttcagg

SEQ ID NO: 136554 - DNA, 25 bp, probe
agctgttgacgtttgctcatttaag

SEQ ID NO: 136555 - DNA, 25 bp, probe
agctttggagtgttgatgtgggaag

SEQ ID NO: 136556 - DNA, 25 bp, probe
agcttgtggaggtggtcggcaatgg

SEQ ID NO: 136557 - DNA, 25 bp, probe
agctttggccgctgagggcacaagg

SEQ ID NO: 136558 - DNA, 25 bp, probe
agctttggccgctgagggcacaagg

SEQ ID NO: 136559 - DNA, 25 bp, probe
agcttgggccggagggcaagggatg

SEQ ID NO: 136560 - DNA, 25 bp, probe
agcgtcggccggagatgagccgagg

SEQ ID NO: 136561 - DNA, 25 bp, probe
agcgtcagaccgagtgcatggtaga

SEQ ID NO: 136562 - DNA, 25 bp, probe
agctctcagcactgtggcgagggaa

SEQ ID NO: 136563 - DNA, 25 bp, probe
agctccgcgccaggatggcgaggaa

SEQ ID NO: 136564 - DNA, 25 bp, probe
agctacctgatggccatggagaaga

SEQ ID NO: 136565 - DNA, 25 bp, probe
agctcacctacctggagaaataccg

SEQ ID NO: 136566 - DNA, 25 bp, probe
agcttggtgaagcgggaagtctcca

SEQ ID NO: 136567 - DNA, 25 bp, probe
agcggggcaaagtgagggccatcca

SEQ ID NO: 136568 - DNA, 25 bp, probe
accaggggcaaatgcaggccacgcc

SEQ ID NO: 136569 - DNA, 25 bp, probe
agcccaggtaactgggccagcagcc

SEQ ID NO: 136570 - DNA, 25 bp, probe
agcgaagtgtacttggtgaccaccc

SEQ ID NO: 136571 - DNA, 25 bp, probe
agctaagtatagttgatgtaacatt

SEQ ID NO: 136572 - DNA, 25 bp, probe
agctattctcataaagtggacatct

SEQ ID NO: 136573 - DNA, 25 bp, probe
agctgttctcaggatcactgggctc

SEQ ID NO: 136574 - DNA, 25 bp, probe
agcttccatgagaacagcagggtag

SEQ ID NO: 136575 - DNA, 25 bp, probe
agcttccaggtggccagagggatgg

SEQ ID NO: 136576 - DNA, 25 bp, probe
agcttcgcagcgtggagtgggagag

SEQ ID NO: 136577 - DNA, 25 bp, probe
agctcactgagctgggtgtaggagg

SEQ ID NO: 136578 - DNA, 25 bp, probe
agcgagctgacgctggttttgtgta

SEQ ID NO: 136579 - DNA, 25 bp, probe
agcttgcttgcacgggttgtaggaa

SEQ ID NO: 136580 - DNA, 25 bp, probe
agctgtgttcatattctgtctagtg

SEQ ID NO: 136581 - DNA, 25 bp, probe
agcggtgccatgaatttgtcacatt

SEQ ID NO: 136582 - DNA, 25 bp, probe
agctgaggaatgcatttccatcagt

SEQ ID NO: 136583 - DNA, 25 bp, probe
agctcaggaaggctgtcagacaggc

SEQ ID NO: 136584 - DNA, 25 bp, probe
agctcaggaaggctgtcagacaggc

SEQ ID NO: 136585 - DNA, 25 bp, probe
agctttgaagagcagctgcgcctgg

SEQ ID NO: 136586 - DNA, 25 bp, probe
agctgtcatgtacggagccgagatt

SEQ ID NO: 136587 - DNA, 25 bp, probe
agcttagctaagtccatcgtgttgg

SEQ ID NO: 136588 - DNA, 25 bp, probe
agctgctaaaaggcctcggattctg

SEQ ID NO: 136589 - DNA, 25 bp, probe
agctcagcagaagccctgtggcaac

SEQ ID NO: 136590 - DNA, 25 bp, probe
agctggcctagagcctgtgggacac

SEQ ID NO: 136591 - DNA, 25 bp, probe
agctggcctagagcctgtgggacac

SEQ ID NO: 136592 - DNA, 25 bp, probe
agcgacccagaaatggcagggacac

SEQ ID NO: 136593 - DNA, 25 bp, probe
agcgtctctgagtgtagcagggcca

SEQ ID NO: 136594 - DNA, 25 bp, probe
agctgtttgtgttgaatgcggcgca

SEQ ID NO: 136595 - DNA, 25 bp, probe
agctgtatttgttcaaggatgggaa

SEQ ID NO: 136596 - DNA, 25 bp, probe
agcgtcacttctgctaaggagggac

SEQ ID NO: 136597 - DNA, 25 bp, probe
agcgaatcctgtgtcacgagcagca

SEQ ID NO: 136598 - DNA, 25 bp, probe
agcgagactagcagtcatccagacc

SEQ ID NO: 136599 - DNA, 25 bp, probe
agctgaagtggcagttccagcggct

SEQ ID NO: 136600 - DNA, 25 bp, probe
agctcagatggaatgctttacatgg

SEQ ID NO: 136601 - DNA, 25 bp, probe
agctctgagctaagccttacgggtc

SEQ ID NO: 136602 - DNA, 25 bp, probe
agcttcgctaaggtgaagctggcct

SEQ ID NO: 136603 - DNA, 25 bp, probe
agctgtcgctcaaggagggtgacat

SEQ ID NO: 136604 - DNA, 25 bp, probe
agcggccctatgcatggtgtagatg

SEQ ID NO: 136605 - DNA, 25 bp, probe
agctttactcagcatgactgtagat

SEQ ID NO: 136606 - DNA, 25 bp, probe
agctttgagctcagcatgacttgaa

SEQ ID NO: 136607 - DNA, 25 bp, probe
agcttcatcatgaccagaagcttga

SEQ ID NO: 136608 - DNA, 25 bp, probe
agcttcatcatgaccagaagcttga

SEQ ID NO: 136609 - DNA, 25 bp, probe
agctgtagtgaccacattctatgga

SEQ ID NO: 136610 - DNA, 25 bp, probe
agctgtcaaccccattatctataac

SEQ ID NO: 136611 - DNA, 25 bp, probe
agctgtcaaccccattatctataac

SEQ ID NO: 136612 - DNA, 25 bp, probe
agcgttaccctcaatagctatgtcc

SEQ ID NO: 136613 - DNA, 25 bp, probe
agctgttccggcattactatgtcat

SEQ ID NO: 136614 - DNA, 25 bp, probe
agcttttcaggcatcctcatataat

SEQ ID NO: 136615 - DNA, 25 bp, probe
agctcagtgtcattttcctattttt

SEQ ID NO: 136616 - DNA, 25 bp, probe
agctctggttatttttctcttgtac

SEQ ID NO: 136617 - DNA, 25 bp, probe
agctgtgtgcttaatttactctgtt

SEQ ID NO: 136618 - DNA, 25 bp, probe
agctgtgtgcttaatttactctgtt

SEQ ID NO: 136619 - DNA, 25 bp, probe
agctgtgtgcttaatttactctgtt

SEQ ID NO: 136620 - DNA, 25 bp, probe
agctgtgtgcttaatttactctgtt

SEQ ID NO: 136621 - DNA, 25 bp, probe
agcggctgcaattttgctactcgct

SEQ ID NO: 136622 - DNA, 25 bp, probe
agcgaggagcatgtggccagtcgcc

SEQ ID NO: 136623 - DNA, 25 bp, probe
agcgagaggcagatggtcctcctcc

SEQ ID NO: 136624 - DNA, 25 bp, probe
agcgagttaatgtgtccatctgccc

SEQ ID NO: 136625 - DNA, 25 bp, probe
agcgagttaatgtgtccatctgccc

SEQ ID NO: 136626 - DNA, 25 bp, probe
agcgaggtgaagaatgccctcagca

SEQ ID NO: 136627 - DNA, 25 bp, probe
agctagacgtggacaagcgcctgac

SEQ ID NO: 136628 - DNA, 25 bp, probe
agctagactaggagaccagaagtga

SEQ ID NO: 136629 - DNA, 25 bp, probe
agctccacgccgaaaaatgaagtgc

SEQ ID NO: 136630 - DNA, 25 bp, probe
agctccacgccgaaaaatgaagtgc

SEQ ID NO: 136631 - DNA, 25 bp, probe
agcttcccgtgcaaaaagggtcacg

SEQ ID NO: 136632 - DNA, 25 bp, probe
agctcacccctggacaaaggtgttc

SEQ ID NO: 136633 - DNA, 25 bp, probe
agcttctacctggacatacagcctt

SEQ ID NO: 136634 - DNA, 25 bp, probe
agctgttactaggacaaccaatatt

SEQ ID NO: 136635 - DNA, 25 bp, probe
agctcccattcagaaactgcaaatt

SEQ ID NO: 136636 - DNA, 25 bp, probe
agctcccattcagaaactgcaaatt

SEQ ID NO: 136637 - DNA, 25 bp, probe
agccccttcagctataccggaaagg

SEQ ID NO: 136638 - DNA, 25 bp, probe
agctccgcttcacatgcagaagtga

SEQ ID NO: 136639 - DNA, 25 bp, probe
agctccagctggacttcgatgactt

SEQ ID NO: 136640 - DNA, 25 bp, probe
agctccagctggacttcgatgactt

SEQ ID NO: 136641 - DNA, 25 bp, probe
agctcccagggaactgaactcttgt

SEQ ID NO: 136642 - DNA, 25 bp, probe
agctttagagaaacatttctctctt

SEQ ID NO: 136643 - DNA, 25 bp, probe
agctccatagggaagcctgtgtctc

SEQ ID NO: 136644 - DNA, 25 bp, probe
agctcccagttgaggtgcgacaggc

SEQ ID NO: 136645 - DNA, 25 bp, probe
agctcattccggaggtgcagaagcc

SEQ ID NO: 136646 - DNA, 25 bp, probe
agctgcttcggggggtgagcaaact

SEQ ID NO: 136647 - DNA, 25 bp, probe
agctgctgctcgttgctgtaggagc

SEQ ID NO: 136648 - DNA, 25 bp, probe
agctcatgatgtgggcgctcaagga

SEQ ID NO: 136649 - DNA, 25 bp, probe
agctcacatctaagtccaagtgcaa

SEQ ID NO: 136650 - DNA, 25 bp, probe
agcttcaccaggagaatgtgcaact

SEQ ID NO: 136651 - DNA, 25 bp, probe
agcttcaagcagctggacaccacac

SEQ ID NO: 136652 - DNA, 25 bp, probe
agcttcaagcagctggacaccacac

SEQ ID NO: 136653 - DNA, 25 bp, probe
agctgaccatactagtgaaacacat

SEQ ID NO: 136654 - DNA, 25 bp, probe
agcggtatactgctgaacaaatatt

SEQ ID NO: 136655 - DNA, 25 bp, probe
accagtcaactgcctataaaacaac

SEQ ID NO: 136656 - DNA, 25 bp, probe
accagtcaactgcctataaaacaac

SEQ ID NO: 136657 - DNA, 25 bp, probe
accaccaaagatctcaaataaaatt

SEQ ID NO: 136658 - DNA, 25 bp, probe
agcccctaactcataaagcaatcaa

SEQ ID NO: 136659 - DNA, 25 bp, probe
agctccctgaatccagtaatttatg

SEQ ID NO: 136660 - DNA, 25 bp, probe
agctccctgaatccagtaatttatg

SEQ ID NO: 136661 - DNA, 25 bp, probe
agctctgcggactcagaacctaact

SEQ ID NO: 136662 - DNA, 25 bp, probe
agctcttggagcagaaaccctacgg

SEQ ID NO: 136663 - DNA, 25 bp, probe
actttaggttaatccctcaagcatg

SEQ ID NO: 136664 - DNA, 25 bp, probe
aaattccgcttagacctgtcggatg

SEQ ID NO: 136665 - DNA, 25 bp, probe
aaattaccaacatccttgttggagt

SEQ ID NO: 136666 - DNA, 25 bp, probe
accttgaacaccacctagctaaagt

SEQ ID NO: 136667 - DNA, 25 bp, probe
agccttgaaaaaactggagtcagaa

SEQ ID NO: 136668 - DNA, 25 bp, probe
agccctggagaagacgaaagccaac

SEQ ID NO: 136669 - DNA, 25 bp, probe
agcccccgaaggatggagaccatgt

SEQ ID NO: 136670 - DNA, 25 bp, probe
agcccccgaaggatggagaccatgt

SEQ ID NO: 136671 - DNA, 25 bp, probe
agccccctgagggaagggacgcagg

SEQ ID NO: 136672 - DNA, 25 bp, probe
agctggctcccagggcaaaggggag

SEQ ID NO: 136673 - DNA, 25 bp, probe
agctggctcccagggcaaaggggag

SEQ ID NO: 136674 - DNA, 25 bp, probe
agctgtctactgggcatgctccagt

SEQ ID NO: 136675 - DNA, 25 bp, probe
agctgggatcagagctccatcagta

SEQ ID NO: 136676 - DNA, 25 bp, probe
agctgggatcagagctccatcagta

SEQ ID NO: 136677 - DNA, 25 bp, probe
agctgatggacgaccttctgaacaa

SEQ ID NO: 136678 - DNA, 25 bp, probe
agctgtggaggattgctatctggag

SEQ ID NO: 136679 - DNA, 25 bp, probe
agctgtgctacgtcgccctggactt

SEQ ID NO: 136680 - DNA, 25 bp, probe
agctggcgaagaagtcctggtttgg

SEQ ID NO: 136681 - DNA, 25 bp, probe
agcgtgtaaaagcttggccctgtgc

SEQ ID NO: 136682 - DNA, 25 bp, probe
acgggaaggaagatgcctccctgca

SEQ ID NO: 136683 - DNA, 25 bp, probe
acgggaaggaagatgcctccctgca

SEQ ID NO: 136684 - DNA, 25 bp, probe
agcgaggacatagagctggcttccc

SEQ ID NO: 136685 - DNA, 25 bp, probe
agcgatgggaacgctttgtccacag

SEQ ID NO: 136686 - DNA, 25 bp, probe
agctcaggggcagctcatagagtcc

SEQ ID NO: 136687 - DNA, 25 bp, probe
agctatagtctggcaccaaagtcca

SEQ ID NO: 136688 - DNA, 25 bp, probe
agctaatttacaaagaagtcatgga

SEQ ID NO: 136689 - DNA, 25 bp, probe
agctcactttacaaaatatttcctc

SEQ ID NO: 136690 - DNA, 25 bp, probe
agctagtttttaatagtgttctctg

SEQ ID NO: 136691 - DNA, 25 bp, probe
agcttatttttatgtggtcttatga

SEQ ID NO: 136692 - DNA, 25 bp, probe
agcttttcgtcttcagtgtcttaat

SEQ ID NO: 136693 - DNA, 25 bp, probe
agcttttcttctactggcttgtaat

SEQ ID NO: 136694 - DNA, 25 bp, probe
agctgttgacttatctgcgcttgtt

SEQ ID NO: 136695 - DNA, 25 bp, probe
agctcctgagtctccagatgttgtt

SEQ ID NO: 136696 - DNA, 25 bp, probe
agctcgctgttatcctggatctggt

SEQ ID NO: 136697 - DNA, 25 bp, probe
agctcacgtgtattctattttgcgt

SEQ ID NO: 136698 - DNA, 25 bp, probe
accaggcgtattctcatttctggat

SEQ ID NO: 136699 - DNA, 25 bp, probe
agcgttggagttgacattttggcat

SEQ ID NO: 136700 - DNA, 25 bp, probe
agctctagtaattaaattatttctc

SEQ ID NO: 136701 - DNA, 25 bp, probe
agctgaggtgactaaatgatatatt

SEQ ID NO: 136702 - DNA, 25 bp, probe
agctgagactgattgtggtttgaat

SEQ ID NO: 136703 - DNA, 25 bp, probe
agctaatgctatggggtgtatgaat

SEQ ID NO: 136704 - DNA, 25 bp, probe
agctctgagttcatggatgttaatt

SEQ ID NO: 136705 - DNA, 25 bp, probe
agctctgagttcatggatgttaatt

SEQ ID NO: 136706 - DNA, 25 bp, probe
agccgagtcctgggagttttgccag

SEQ ID NO: 136707 - DNA, 25 bp, probe
acctgggcattgtgtttgggccgac

SEQ ID NO: 136708 - DNA, 25 bp, probe
accgaggcctatgttagggcctttg

SEQ ID NO: 136709 - DNA, 25 bp, probe
agccgaggacgtgcttggggagcta

SEQ ID NO: 136710 - DNA, 25 bp, probe
agcgcgtaacgtgctgttgaccaat

SEQ ID NO: 136711 - DNA, 25 bp, probe
agcggttccgctgccctgaggcact

SEQ ID NO: 136712 - DNA, 25 bp, probe
actggaaacctctccgagtactgag

SEQ ID NO: 136713 - DNA, 25 bp, probe
actggaaacctctccgagtactgag

SEQ ID NO: 136714 - DNA, 25 bp, probe
accagaaaggtcacctgccttctag

SEQ ID NO: 136715 - DNA, 25 bp, probe
acctgaagctggacaacgtcctcct

SEQ ID NO: 136716 - DNA, 25 bp, probe
agcgagaagccgacatgcatcgcct

SEQ ID NO: 136717 - DNA, 25 bp, probe
agctcagaggcttggcatttgccat

SEQ ID NO: 136718 - DNA, 25 bp, probe
agctcataggcattgctcagggtca

SEQ ID NO: 136719 - DNA, 25 bp, probe
agctaatcagcttgcaaggagatag

SEQ ID NO: 136720 - DNA, 25 bp, probe
agctatgacagtgaaccgaagcgca

SEQ ID NO: 136721 - DNA, 25 bp, probe
agctatgacagtgagtgggaacaaa

SEQ ID NO: 136722 - DNA, 25 bp, probe
agctgctgaagtgcagttcccacca

SEQ ID NO: 136723 - DNA, 25 bp, probe
agctgagacgtctaggaacacacca

SEQ ID NO: 136724 - DNA, 25 bp, probe
agcgtgactgggccgagtccacgct

SEQ ID NO: 136725 - DNA, 25 bp, probe
agctgtggctaagggcaagcccctt

SEQ ID NO: 136726 - DNA, 25 bp, probe
agctgtgcgttctggaccagctact

SEQ ID NO: 136727 - DNA, 25 bp, probe
agctctggatcctgaatccagcaac

SEQ ID NO: 136728 - DNA, 25 bp, probe
agctgtgcccctgaatcatgggcac

SEQ ID NO: 136729 - DNA, 25 bp, probe
agctgaggtcctcagtcagtggcct

SEQ ID NO: 136730 - DNA, 25 bp, probe
agcgatggatttccgtctctggtgt

SEQ ID NO: 136731 - DNA, 25 bp, probe
agctgggaatcacccacgttgtgaa

SEQ ID NO: 136732 - DNA, 25 bp, probe
agctggtcaaacttcatgcggtggt

SEQ ID NO: 136733 - DNA, 25 bp, probe
agcgagaaggacatcatggccgaga

SEQ ID NO: 136734 - DNA, 25 bp, probe
agcgagaccgtcaacagtgtcgcca

SEQ ID NO: 136735 - DNA, 25 bp, probe
agctgagagcggaaaatggtcttct

SEQ ID NO: 136736 - DNA, 25 bp, probe
agctctagctgcctattttgtgttt

SEQ ID NO: 136737 - DNA, 25 bp, probe
agctccagctgccttaggaggagtc

SEQ ID NO: 136738 - DNA, 25 bp, probe
agctccaggccggaggagccattcc

SEQ ID NO: 136739 - DNA, 25 bp, probe
agctcgggcaggggagaacattccg

SEQ ID NO: 136740 - DNA, 25 bp, probe
agcgcagcatccggctgcggacaaa

SEQ ID NO: 136741 - DNA, 25 bp, probe
agcgcagcatccggctgcggacaaa

SEQ ID NO: 136742 - DNA, 25 bp, probe
agctgactccaagctgcatggcaag

SEQ ID NO: 136743 - DNA, 25 bp, probe
agctgacatcacaaggtgctggcac

SEQ ID NO: 136744 - DNA, 25 bp, probe
agctcaatgcactaatgcctggcac

SEQ ID NO: 136745 - DNA, 25 bp, probe
agctcagatgcagtcaccagcatga

SEQ ID NO: 136746 - DNA, 25 bp, probe
agcgcagacatggcccatgctgtgc

SEQ ID NO: 136747 - DNA, 25 bp, probe
agcgcagacatggcccatgctgtgc

SEQ ID NO: 136748 - DNA, 25 bp, probe
agctgtgatcacgagccattgtcat

SEQ ID NO: 136749 - DNA, 25 bp, probe
agctgcctgacggccaggtcatcac

SEQ ID NO: 136750 - DNA, 25 bp, probe
agctggatggtggaagcagttcact

SEQ ID NO: 136751 - DNA, 25 bp, probe
agctggagctaggaacacttaccca

SEQ ID NO: 136752 - DNA, 25 bp, probe
agctgtggccaggtataactttgcc

SEQ ID NO: 136753 - DNA, 25 bp, probe
agcctggccaaaatcaacatcgtct

SEQ ID NO: 136754 - DNA, 25 bp, probe
agcgaggcctgaagcattactggtt

SEQ ID NO: 136755 - DNA, 25 bp, probe
agctggggatctggattcctggttc

SEQ ID NO: 136756 - DNA, 25 bp, probe
agctgagagcttagagtctttagtt

SEQ ID NO: 136757 - DNA, 25 bp, probe
agctgcaggctttgagtttctcaga

SEQ ID NO: 136758 - DNA, 25 bp, probe
agctgcattgtaagagttctgtcat

SEQ ID NO: 136759 - DNA, 25 bp, probe
agctctttgatcgactcattgctca

SEQ ID NO: 136760 - DNA, 25 bp, probe
agctctttgatggtcttgattcaac

SEQ ID NO: 136761 - DNA, 25 bp, probe
agctcatttcattctctagtgtcta

SEQ ID NO: 136762 - DNA, 25 bp, probe
agctcattccaaccttgatgtgtta

SEQ ID NO: 136763 - DNA, 25 bp, probe
agctacccagtgctagagtgggagg

SEQ ID NO: 136764 - DNA, 25 bp, probe
agctgtccgggagaagtgcatggcc

SEQ ID NO: 136765 - DNA, 25 bp, probe
agctggccggaaggagactgtggtt

SEQ ID NO: 136766 - DNA, 25 bp, probe
agcgccactgaatgaaactggagaa

SEQ ID NO: 136767 - DNA, 25 bp, probe
agctctgcctgaaggagaccttcaa

SEQ ID NO: 136768 - DNA, 25 bp, probe
agctctcctattgaaacttgcccag

SEQ ID NO: 136769 - DNA, 25 bp, probe
agcgtcctttggtacgttctgaggt

SEQ ID NO: 136770 - DNA, 25 bp, probe
agcgtccattttttcatattagagg

SEQ ID NO: 136771 - DNA, 25 bp, probe
agctgtacaatcgtttcatcattcg

SEQ ID NO: 136772 - DNA, 25 bp, probe
agctgtacaatcgtttcatcattcg

SEQ ID NO: 136773 - DNA, 25 bp, probe
agctgacattattgtttattttggc

SEQ ID NO: 136774 - DNA, 25 bp, probe
agctacagtcattttttctttgcac

SEQ ID NO: 136775 - DNA, 25 bp, probe
agctacagtcattttttctttgcac

SEQ ID NO: 136776 - DNA, 25 bp, probe
agctctaggcattgttctctttgga

SEQ ID NO: 136777 - DNA, 25 bp, probe
agctaaagcaagcctctttgagggt

SEQ ID NO: 136778 - DNA, 25 bp, probe
agctaaagcaagcctctttgagggt

SEQ ID NO: 136779 - DNA, 25 bp, probe
agctcaaagcattaacttgtatggg

SEQ ID NO: 136780 - DNA, 25 bp, probe
agctccaacacgaccatcgtagggt

SEQ ID NO: 136781 - DNA, 25 bp, probe
agctccataaatgtcaccttggggg

SEQ ID NO: 136782 - DNA, 25 bp, probe
agctgctctaaagtccagactatgg

SEQ ID NO: 136783 - DNA, 25 bp, probe
agcgctgtaaaccctgacggtgggc

SEQ ID NO: 136784 - DNA, 25 bp, probe
agctgctgaaaggccacgggaggtg

SEQ ID NO: 136785 - DNA, 25 bp, probe
agctaagaagcccagacgagtagtg

SEQ ID NO: 136786 - DNA, 25 bp, probe
agctgtggggtccagacttgttggg

SEQ ID NO: 136787 - DNA, 25 bp, probe
agctgtgcgggtgggagactttggc

SEQ ID NO: 136788 - DNA, 25 bp, probe
agctgccctagtgggtatctcttag

SEQ ID NO: 136789 - DNA, 25 bp, probe
agccctcagaaactgtatcccatag

SEQ ID NO: 136790 - DNA, 25 bp, probe
agccctcagaaactgtatcccatag

SEQ ID NO: 136791 - DNA, 25 bp, probe
agcccgcaagaagaacctctcaggc

SEQ ID NO: 136792 - DNA, 25 bp, probe
acctggcacagtgccagaccccaac

SEQ ID NO: 136793 - DNA, 25 bp, probe
acctggagcagtactatgacccgac

SEQ ID NO: 136794 - DNA, 25 bp, probe
agctctggagcgtggataccggatg

SEQ ID NO: 136795 - DNA, 25 bp, probe
agctcttggctgtaggattgcccca

SEQ ID NO: 136796 - DNA, 25 bp, probe
agctcttggatgtggtcagctctcc

SEQ ID NO: 136797 - DNA, 25 bp, probe
agcgctgagcgtcgagcgctacttc

SEQ ID NO: 136798 - DNA, 25 bp, probe
agctgtggagtccagcagtcactct

SEQ ID NO: 136799 - DNA, 25 bp, probe
agctgggagatgagcttctctgcat

SEQ ID NO: 136800 - DNA, 25 bp, probe
agctgggagatgagcttctctgcat

SEQ ID NO: 136801 - DNA, 25 bp, probe
agctgtgaggcgatgctgttccatc

SEQ ID NO: 136802 - DNA, 25 bp, probe
agctgatggtctatttcctcatcct

SEQ ID NO: 136803 - DNA, 25 bp, probe
agctcgcgcttcatttccctcattg

SEQ ID NO: 136804 - DNA, 25 bp, probe
acccctgtactgaatccactaatct

SEQ ID NO: 136805 - DNA, 25 bp, probe
acctcacgtactgtgtactttgtac

SEQ ID NO: 136806 - DNA, 25 bp, probe
agccttaggactgttacagctgagc

SEQ ID NO: 136807 - DNA, 25 bp, probe
agctcttagaaatgtgctacgatgt

SEQ ID NO: 136808 - DNA, 25 bp, probe
agctgtatgaggagagcttcaggcc

SEQ ID NO: 136809 - DNA, 25 bp, probe
agctgtaggcccgactcacagggcc

SEQ ID NO: 136810 - DNA, 25 bp, probe
agctgcttgagccacacgtgcaagc

SEQ ID NO: 136811 - DNA, 25 bp, probe
agctcttcaccaactgtcagaaggc

SEQ ID NO: 136812 - DNA, 25 bp, probe
agctcttcacgcatctgggagcgag

SEQ ID NO: 136813 - DNA, 25 bp, probe
agctcttcacgcatctgggagcgag

SEQ ID NO: 136814 - DNA, 25 bp, probe
agctcctcccctggagggggaatgg

SEQ ID NO: 136815 - DNA, 25 bp, probe
agctcctcccctggagggggaatgg

SEQ ID NO: 136816 - DNA, 25 bp, probe
agcccacccgtgcagagggcagaag

SEQ ID NO: 136817 - DNA, 25 bp, probe
agcccgtcaccctaagtatggatag

SEQ ID NO: 136818 - DNA, 25 bp, probe
agcccgtcaccctaagtatggatag

SEQ ID NO: 136819 - DNA, 25 bp, probe
agcccagggcctgagttagactatt

SEQ ID NO: 136820 - DNA, 25 bp, probe
agcgccagagtgctgacgccttact

SEQ ID NO: 136821 - DNA, 25 bp, probe
agctcggagttgtgagcactctact

SEQ ID NO: 136822 - DNA, 25 bp, probe
agctgtcggttgagcacagctcctc

SEQ ID NO: 136823 - DNA, 25 bp, probe
agctggctgtgtactggcagagctc

SEQ ID NO: 136824 - DNA, 25 bp, probe
agctgtttgtcaaggcgagtgagga

SEQ ID NO: 136825 - DNA, 25 bp, probe
agcgccgatttgagggtggagatat

SEQ ID NO: 136826 - DNA, 25 bp, probe
agccctgatttgtggtagggaagca

SEQ ID NO: 136827 - DNA, 25 bp, probe
agctcctgaacttcttgtgggagat

SEQ ID NO: 136828 - DNA, 25 bp, probe
agctccatgaacagcggcaggaggc

SEQ ID NO: 136829 - DNA, 25 bp, probe
agctcactggatattgcacggagat

SEQ ID NO: 136830 - DNA, 25 bp, probe
agctccagctgtttgtcaaggcgag

SEQ ID NO: 136831 - DNA, 25 bp, probe
agcccactgtgtggcagggggatgg

SEQ ID NO: 136832 - DNA, 25 bp, probe
agctcgcgtggcacagggcataagg

SEQ ID NO: 136833 - DNA, 25 bp, probe
agctccaggggtcagcagcttagtg

SEQ ID NO: 136834 - DNA, 25 bp, probe
agctcacatggatggcaaacctaat

SEQ ID NO: 136835 - DNA, 25 bp, probe
agctcagctggatggcaagaacgtc

SEQ ID NO: 136836 - DNA, 25 bp, probe
agctcctggacgaccagagacctgc

SEQ ID NO: 136837 - DNA, 25 bp, probe
agctctttacagaaaatgcaccttt

SEQ ID NO: 136838 - DNA, 25 bp, probe
agctgctttagctaaagtcccgcgg

SEQ ID NO: 136839 - DNA, 25 bp, probe
agctctttgggggaggccacggagc

SEQ ID NO: 136840 - DNA, 25 bp, probe
agccttcatggtcagcgggacagaa

SEQ ID NO: 136841 - DNA, 25 bp, probe
agccttcatggtcagcgggacagaa

SEQ ID NO: 136842 - DNA, 25 bp, probe
agctcggtgtaccgcgggacaaatc

SEQ ID NO: 136843 - DNA, 25 bp, probe
agctcggtgtaccgcgggacaaatc

SEQ ID NO: 136844 - DNA, 25 bp, probe
agctgaagacgagcgcgggaaatct

SEQ ID NO: 136845 - DNA, 25 bp, probe
agctggtgaagagccgggatcaggt

SEQ ID NO: 136846 - DNA, 25 bp, probe
agctggtgattgtttccgtaagcag

SEQ ID NO: 136847 - DNA, 25 bp, probe
agctgggagatgtgtcctggaatga

SEQ ID NO: 136848 - DNA, 25 bp, probe
agctcagaagatttccatctaaata

SEQ ID NO: 136849 - DNA, 25 bp, probe
agctgcagccaggttggcatcaaaa

SEQ ID NO: 136850 - DNA, 25 bp, probe
agctcagcaggcacggtcaaaaggg

SEQ ID NO: 136851 - DNA, 25 bp, probe
agctcagtggagggcaggaagaagg

SEQ ID NO: 136852 - DNA, 25 bp, probe
agcgaggcggcagagggagaagaga

SEQ ID NO: 136853 - DNA, 25 bp, probe
agcggcgaggcgctgcagaggaagc

SEQ ID NO: 136854 - DNA, 25 bp, probe
agctgtgagagtgcaggcggggggt

SEQ ID NO: 136855 - DNA, 25 bp, probe
agctctggcatggctaggagggggg

SEQ ID NO: 136856 - DNA, 25 bp, probe
tggaggacgttggagactgggagca

SEQ ID NO: 136857 - DNA, 25 bp, probe
agctgagggtctgggggctggagtt

SEQ ID NO: 136858 - DNA, 25 bp, probe
agctgggcaattggcgggcatggag

SEQ ID NO: 136859 - DNA, 25 bp, probe
agctgaggaatttgcaacgagagat

SEQ ID NO: 136860 - DNA, 25 bp, probe
agctgaggctctgagaactggtact

SEQ ID NO: 136861 - DNA, 25 bp, probe
agctgcgagcctgtcaagctgagct

SEQ ID NO: 136862 - DNA, 25 bp, probe
agctgcgtcctgcagaatgggagct

SEQ ID NO: 136863 - DNA, 25 bp, probe
agctcctggcgataatgtgtgtctc

SEQ ID NO: 136864 - DNA, 25 bp, probe
agctcctgtgtacagcatcgttctt

SEQ ID NO: 136865 - DNA, 25 bp, probe
agctccatggtaggagtcaatctgc

SEQ ID NO: 136866 - DNA, 25 bp, probe
agctgccatattacgacttagtgcc

SEQ ID NO: 136867 - DNA, 25 bp, probe
agcgtcaacggccactgtgtgtggc

SEQ ID NO: 136868 - DNA, 25 bp, probe
agcgtatcacaggcaaccagttggc

SEQ ID NO: 136869 - DNA, 25 bp, probe
agctgtcactcatgcaacagcagcc

SEQ ID NO: 136870 - DNA, 25 bp, probe
agctgtcactcatgcaacagcagcc

SEQ ID NO: 136871 - DNA, 25 bp, probe
agcctgcatctacagcatcgcagcc

SEQ ID NO: 136872 - DNA, 25 bp, probe
agcccatctacatcatcactgaata

SEQ ID NO: 136873 - DNA, 25 bp, probe
agcccatctacatcatcactgaata

SEQ ID NO: 136874 - DNA, 25 bp, probe
agctgtcctccattgtactgaacag

SEQ ID NO: 136875 - DNA, 25 bp, probe
agctgtactattttcactcagaagc

SEQ ID NO: 136876 - DNA, 25 bp, probe
agctgtgagccagtattcatttaag

SEQ ID NO: 136877 - DNA, 25 bp, probe
agctggaaactatcatggacagaga

SEQ ID NO: 136878 - DNA, 25 bp, probe
agctgctgatcgaagaaaagaaaga

SEQ ID NO: 136879 - DNA, 25 bp, probe
agctggtgctacaaatgaagaaatg

SEQ ID NO: 136880 - DNA, 25 bp, probe
agctggggacaactgcggtgatgat

SEQ ID NO: 136881 - DNA, 25 bp, probe
agctgggtaatcgatggggagtctg

SEQ ID NO: 136882 - DNA, 25 bp, probe
agctgggtatagtggtatgtgcctg

SEQ ID NO: 136883 - DNA, 25 bp, probe
agctgagggaagtggacggcaccgc

SEQ ID NO: 136884 - DNA, 25 bp, probe
agctgagggaagtggacggcaccgc

SEQ ID NO: 136885 - DNA, 25 bp, probe
agctggggcgagggctgtgcccagc

SEQ ID NO: 136886 - DNA, 25 bp, probe
agctggtaggagggatgtccgggcc

SEQ ID NO: 136887 - DNA, 25 bp, probe
agctggtagggaaagactctgcacc

SEQ ID NO: 136888 - DNA, 25 bp, probe
agcggtagaggaaggctatcgtctg

SEQ ID NO: 136889 - DNA, 25 bp, probe
agcggcggattaaggcttgggcgga

SEQ ID NO: 136890 - DNA, 25 bp, probe
agcggcaggatcgacgcgcttctgt

SEQ ID NO: 136891 - DNA, 25 bp, probe
agcgacagcagtgacagcagcgaca

SEQ ID NO: 136892 - DNA, 25 bp, probe
agctgaagatgagatagaggacatt

SEQ ID NO: 136893 - DNA, 25 bp, probe
agctggtgcatgatgacgaggatat

SEQ ID NO: 136894 - DNA, 25 bp, probe
agcgcagttgcaatgtaagagatac

SEQ ID NO: 136895 - DNA, 25 bp, probe
agcgatttgaatgcacagtaagtgg

SEQ ID NO: 136896 - DNA, 25 bp, probe
agcgttctagcaacacgtgtgtgtg

SEQ ID NO: 136897 - DNA, 25 bp, probe
agctgttccgcaccaagagcaagcg

SEQ ID NO: 136898 - DNA, 25 bp, probe
agctgttcctgagtaacatggagcg

SEQ ID NO: 136899 - DNA, 25 bp, probe
agctcttcgatacttacacaaggag

SEQ ID NO: 136900 - DNA, 25 bp, probe
agctcctcagatttttccagagcag

SEQ ID NO: 136901 - DNA, 25 bp, probe
agctcttcgatctgattgaaagcat

SEQ ID NO: 136902 - DNA, 25 bp, probe
agctctctcagacccttgaagatgt

SEQ ID NO: 136903 - DNA, 25 bp, probe
agctctctcagacccttgaagatgt

SEQ ID NO: 136904 - DNA, 25 bp, probe
agctcctgaactcgatgatgaccgt

SEQ ID NO: 136905 - DNA, 25 bp, probe
agctgacagagaacgagatccgcgg

SEQ ID NO: 136906 - DNA, 25 bp, probe
agctgcaggagaacaaccgcctgga

SEQ ID NO: 136907 - DNA, 25 bp, probe
agctgcaggaggttatcggcagtgg

SEQ ID NO: 136908 - DNA, 25 bp, probe
agctgcatggcaagttctgtggttc

SEQ ID NO: 136909 - DNA, 25 bp, probe
agctcatgtgctagttcatagggag

SEQ ID NO: 136910 - DNA, 25 bp, probe
agctcatgtgctagttcatagggag

SEQ ID NO: 136911 - DNA, 25 bp, probe
agctctggcaagctataggagagaa

SEQ ID NO: 136912 - DNA, 25 bp, probe
agctgtagccagcatcttagacaaa

SEQ ID NO: 136913 - DNA, 25 bp, probe
agcgccgctcatgactatacgctaa

SEQ ID NO: 136914 - DNA, 25 bp, probe
agccgtctgctggagtatacaccaa

SEQ ID NO: 136915 - DNA, 25 bp, probe
agcgacgcgctggcgttacagcgca

SEQ ID NO: 136916 - DNA, 25 bp, probe
agcgacacctggatgttcggggtga

SEQ ID NO: 136917 - DNA, 25 bp, probe
agcggcaccaagacatgttccagga

SEQ ID NO: 136918 - DNA, 25 bp, probe
agcgctcacgcaagcatggttaacg

SEQ ID NO: 136919 - DNA, 25 bp, probe
agctctacgctactgccatgataat

SEQ ID NO: 136920 - DNA, 25 bp, probe
agctcttcctgaagcgcgataacct

SEQ ID NO: 136921 - DNA, 25 bp, probe
agctcattttctgccgatgaagaat

SEQ ID NO: 136922 - DNA, 25 bp, probe
agctctgtttgtgtctgaggaggag

SEQ ID NO: 136923 - DNA, 25 bp, probe
agctggccttgtagcttggaaggcc

SEQ ID NO: 136924 - DNA, 25 bp, probe
agcgtgccaatcaacatgctggtga

SEQ ID NO: 136925 - DNA, 25 bp, probe
agctgtacaatctcatgcgtctatg

SEQ ID NO: 136926 - DNA, 25 bp, probe
agctgagtcttctgcatcagattat

SEQ ID NO: 136927 - DNA, 25 bp, probe
agctgagtcttctgcatcagattat

SEQ ID NO: 136928 - DNA, 25 bp, probe
agcgagtcttacgagcagcatatcc

SEQ ID NO: 136929 - DNA, 25 bp, probe
agctgtgtgtcttccacaatgactg

SEQ ID NO: 136930 - DNA, 25 bp, probe
agctggtggccatcaaatgcattgc

SEQ ID NO: 136931 - DNA, 25 bp, probe
agctgggatccaggcactatgttct

SEQ ID NO: 136932 - DNA, 25 bp, probe
agctgggatccaggcactatgttct

SEQ ID NO: 136933 - DNA, 25 bp, probe
agctggcaatgggcgattatttgtt

SEQ ID NO: 136934 - DNA, 25 bp, probe
agctggcagtacctgtatgcatttc

SEQ ID NO: 136935 - DNA, 25 bp, probe
agctgacagtgcttctacacatttc

SEQ ID NO: 136936 - DNA, 25 bp, probe
agctgccgtcacatgacgtctatcc

SEQ ID NO: 136937 - DNA, 25 bp, probe
agctgccttcaactggaacgaccag

SEQ ID NO: 136938 - DNA, 25 bp, probe
agctgccttggacttgaatccatgc

SEQ ID NO: 136939 - DNA, 25 bp, probe
agctctcttgttctgacacaatcct

SEQ ID NO: 136940 - DNA, 25 bp, probe
agctgctttctcgaatggaatacgt

SEQ ID NO: 136941 - DNA, 25 bp, probe
agctctgttcacaaagtggaggcct

SEQ ID NO: 136942 - DNA, 25 bp, probe
agctctgtgataacagcgtgggggt

SEQ ID NO: 136943 - DNA, 25 bp, probe
agctctggattactgccacagcaag

SEQ ID NO: 136944 - DNA, 25 bp, probe
agctgtgaactacctcaccacagtg

SEQ ID NO: 136945 - DNA, 25 bp, probe
agctccaagatcccggtcaagtgga

SEQ ID NO: 136946 - DNA, 25 bp, probe
agctccaagatcccggtcaagtgga

SEQ ID NO: 136947 - DNA, 25 bp, probe
agctccaagatcccggtcaagtgga

SEQ ID NO: 136948 - DNA, 25 bp, probe
agctgccaagaccctgggcattgtt

SEQ ID NO: 136949 - DNA, 25 bp, probe
agctctttacctcttgctattttgt

SEQ ID NO: 136950 - DNA, 25 bp, probe
agcgtgtgaaccttttgtgttgtca

SEQ ID NO: 136951 - DNA, 25 bp, probe
agctgttggaatgagtatgtgattc

SEQ ID NO: 136952 - DNA, 25 bp, probe
acctcggacatggcgtatgtcatca

SEQ ID NO: 136953 - DNA, 25 bp, probe
agccctgtgattgttatgatcacaa

SEQ ID NO: 136954 - DNA, 25 bp, probe
accagtggcactgttgtttcacaag

SEQ ID NO: 136955 - DNA, 25 bp, probe
caccgttatcggtgtcattcacctt

SEQ ID NO: 136956 - DNA, 25 bp, probe
acctcttagcgggtggatttccctg

SEQ ID NO: 136957 - DNA, 25 bp, probe
agcccttggtgtgggttttatctct

SEQ ID NO: 136958 - DNA, 25 bp, probe
agcccctcttgaaggtgtgttctcc

SEQ ID NO: 136959 - DNA, 25 bp, probe
agcccctagaagtggctttcaccac

SEQ ID NO: 136960 - DNA, 25 bp, probe
agccctaaaggaaagtttgcatcta

SEQ ID NO: 136961 - DNA, 25 bp, probe
agcccttaaaggcatgtttgacttt

SEQ ID NO: 136962 - DNA, 25 bp, probe
agctgctttagctggggttctgtca

SEQ ID NO: 136963 - DNA, 25 bp, probe
agctgctttagctggggttctgtca

SEQ ID NO: 136964 - DNA, 25 bp, probe
agctgcggtacttgagggcttcatt

SEQ ID NO: 136965 - DNA, 25 bp, probe
agctgctgagtgaggagggtctcct

SEQ ID NO: 136966 - DNA, 25 bp, probe
agctgcatagccagtaggccttcct

SEQ ID NO: 136967 - DNA, 25 bp, probe
agctgctatggggctatgtgcactt

SEQ ID NO: 136968 - DNA, 25 bp, probe
agctctgatggttgctgcaggacgt

SEQ ID NO: 136969 - DNA, 25 bp, probe
agctctgatggttgctgcaggacgt

SEQ ID NO: 136970 - DNA, 25 bp, probe
agcgctgtgagatggatgtatttgt

SEQ ID NO: 136971 - DNA, 25 bp, probe
agctgtggagattattgtcatatta

SEQ ID NO: 136972 - DNA, 25 bp, probe
agctgtggagtttggagagattgca

SEQ ID NO: 136973 - DNA, 25 bp, probe
agctctgtattttgtgagcaagaaa

SEQ ID NO: 136974 - DNA, 25 bp, probe
agcggtatgttttgaaagcacaagt

SEQ ID NO: 136975 - DNA, 25 bp, probe
accggacgttagaaatcaagcagat

SEQ ID NO: 136976 - DNA, 25 bp, probe
agctctgctacctggtaatgaagga

SEQ ID NO: 136977 - DNA, 25 bp, probe
agctgccttcagtgggtagaatggg

SEQ ID NO: 136978 - DNA, 25 bp, probe
agccctctacagcggtacagtgagg

SEQ ID NO: 136979 - DNA, 25 bp, probe
agccctcaccatttgcctaaggagg

SEQ ID NO: 136980 - DNA, 25 bp, probe
agctcctcccttccataaatgaagt

SEQ ID NO: 136981 - DNA, 25 bp, probe
agctccctcgctgcgatctattgaa

SEQ ID NO: 136982 - DNA, 25 bp, probe
agcccccagcctgaatatgtgaacc

SEQ ID NO: 136983 - DNA, 25 bp, probe
agccgtgaccactttagaatgaacc

SEQ ID NO: 136984 - DNA, 25 bp, probe
agcctagaccaagtttgtccaacct

SEQ ID NO: 136985 - DNA, 25 bp, probe
agcctagaccaagtttgtccaacct

SEQ ID NO: 136986 - DNA, 25 bp, probe
agcctacatcccagttgtcaatgat

SEQ ID NO: 136987 - DNA, 25 bp, probe
agcctacatcccagttgtcaatgat

SEQ ID NO: 136988 - DNA, 25 bp, probe
acgctgaatcctgctatggtaccat

SEQ ID NO: 136989 - DNA, 25 bp, probe
agccgagatcgtgccattgtactcc

SEQ ID NO: 136990 - DNA, 25 bp, probe
agcgggtgcttgagttgttgtcgtt

SEQ ID NO: 136991 - DNA, 25 bp, probe
agctggggcttttctagtgcttttt

SEQ ID NO: 136992 - DNA, 25 bp, probe
agcgaggatgatttcactaggcatt

SEQ ID NO: 136993 - DNA, 25 bp, probe
agcgggtgtgctcacttacattatg

SEQ ID NO: 136994 - DNA, 25 bp, probe
agctggaggagtctttgacagttga

SEQ ID NO: 136995 - DNA, 25 bp, probe
agctcggagcctcattgagacaggg

SEQ ID NO: 136996 - DNA, 25 bp, probe
agctctggggcggcataatgaaggg

SEQ ID NO: 136997 - DNA, 25 bp, probe
agctgcatggagcctggaactgcat

SEQ ID NO: 136998 - DNA, 25 bp, probe
agctgagcgagttgctgacgctgcc

SEQ ID NO: 136999 - DNA, 25 bp, probe
agcgcatggcagagcatgtcagctg

SEQ ID NO: 137000 - DNA, 25 bp, probe
agcgcatggcagagcatgtcagctg

SEQ ID NO: 137001 - DNA, 25 bp, probe
agctgatggatgtgagcctggtggg

SEQ ID NO: 137002 - DNA, 25 bp, probe
agctgcgtgtggcagcgttggtggc

SEQ ID NO: 137003 - DNA, 25 bp, probe
agctctggtggcagcgttgagaagg

SEQ ID NO: 137004 - DNA, 25 bp, probe
agctcccggcgtggtggaagagggg

SEQ ID NO: 137005 - DNA, 25 bp, probe
agctcctgcgggcagggaagtcttc

SEQ ID NO: 137006 - DNA, 25 bp, probe
agctccctggagcacaaagagtgtt

SEQ ID NO: 137007 - DNA, 25 bp, probe
agctccgcaggacgctcaaggaggt

SEQ ID NO: 137008 - DNA, 25 bp, probe
agctcctgggcgtcatcatagagga

SEQ ID NO: 137009 - DNA, 25 bp, probe
agctcctggggatcatggtggtggc

SEQ ID NO: 137010 - DNA, 25 bp, probe
agctcctttaggactgggtggatgg

SEQ ID NO: 137011 - DNA, 25 bp, probe
agcgttcttaggaatctggtgtctg

SEQ ID NO: 137012 - DNA, 25 bp, probe
cagtactttaacatcgtcgctctgc

SEQ ID NO: 137013 - DNA, 25 bp, probe
cagtactttaacatcgtcgctctgc

SEQ ID NO: 137014 - DNA, 25 bp, probe
agcgagttttatttgtccgctgctg

SEQ ID NO: 137015 - DNA, 25 bp, probe
agctgtggtttcacttcaagcgcta

SEQ ID NO: 137016 - DNA, 25 bp, probe
agctgtggcatattacctgtaacat

SEQ ID NO: 137017 - DNA, 25 bp, probe
agctgttgatggtaggtggcacact

SEQ ID NO: 137018 - DNA, 25 bp, probe
agcgcatcatggaagtggtgggcac

SEQ ID NO: 137019 - DNA, 25 bp, probe
agcgcatcatggaagtggtgggcac

SEQ ID NO: 137020 - DNA, 25 bp, probe
agcgcatcagtgttctctgaggtcc

SEQ ID NO: 137021 - DNA, 25 bp, probe
agctcgcacactactcagagcttcc

SEQ ID NO: 137022 - DNA, 25 bp, probe
agctcccacataattgcagtttctc

SEQ ID NO: 137023 - DNA, 25 bp, probe
agctcctacctactggttgatgtgt

SEQ ID NO: 137024 - DNA, 25 bp, probe
agctcccaactactgtggcgagttt

SEQ ID NO: 137025 - DNA, 25 bp, probe
agctgcgcaaactgttggtcgcttg

SEQ ID NO: 137026 - DNA, 25 bp, probe
agctgccaagactgtctctgaacgg

SEQ ID NO: 137027 - DNA, 25 bp, probe
agctgccaagactgtctctgaacgg

SEQ ID NO: 137028 - DNA, 25 bp, probe
agcgaaaacataaccagagcatcag

SEQ ID NO: 137029 - DNA, 25 bp, probe
agcgtcaagacatttgctgaactca

SEQ ID NO: 137030 - DNA, 25 bp, probe
agctggcttgacatgctgtattcca

SEQ ID NO: 137031 - DNA, 25 bp, probe
agctggaggactggctttgctgcca

SEQ ID NO: 137032 - DNA, 25 bp, probe
agcggggagggtaatgtgcaccaca

SEQ ID NO: 137033 - DNA, 25 bp, probe
agcctgggcctaaaaatgcccatca

SEQ ID NO: 137034 - DNA, 25 bp, probe
agcgccgtgctgtaaataagcccag

SEQ ID NO: 137035 - DNA, 25 bp, probe
agcccaggctgagcattctcagacc

SEQ ID NO: 137036 - DNA, 25 bp, probe
agctggagaatctcttcgaggccct

SEQ ID NO: 137037 - DNA, 25 bp, probe
agcggaggagctccgctaagacctc

SEQ ID NO: 137038 - DNA, 25 bp, probe
agctggaggcacaacgcaccagaca

SEQ ID NO: 137039 - DNA, 25 bp, probe
agctgagagtgaaagtgccatggaa

SEQ ID NO: 137040 - DNA, 25 bp, probe
actgagggaaatagccaaaaaggca

SEQ ID NO: 137041 - DNA, 25 bp, probe
agctgaggagaatatgcctcaaaaa

SEQ ID NO: 137042 - DNA, 25 bp, probe
agctgatgcagatatgtaggccaag

SEQ ID NO: 137043 - DNA, 25 bp, probe
agctgcagctggtctgtttccaggt

SEQ ID NO: 137044 - DNA, 25 bp, probe
agccatgcattgttaatcatccatc

SEQ ID NO: 137045 - DNA, 25 bp, probe
accactgtattaacaccacaactgg

SEQ ID NO: 137046 - DNA, 25 bp, probe
accactggcttaggcgggagcctgg

SEQ ID NO: 137047 - DNA, 25 bp, probe
agctgatccagtaacctcggagacg

SEQ ID NO: 137048 - DNA, 25 bp, probe
agctccaagagctccatgtgggaac

SEQ ID NO: 137049 - DNA, 25 bp, probe
agctgcccgagaacaagtccaaatt

SEQ ID NO: 137050 - DNA, 25 bp, probe
agctgccaaagaagggtcacaaagt

SEQ ID NO: 137051 - DNA, 25 bp, probe
agctgctcaaagagggacacaggat

SEQ ID NO: 137052 - DNA, 25 bp, probe
agcccaaacaggactgacctggata

SEQ ID NO: 137053 - DNA, 25 bp, probe
agcccaaacaggactgacctggata

SEQ ID NO: 137054 - DNA, 25 bp, probe
agcccaaccaacatggcagctaaca

SEQ ID NO: 137055 - DNA, 25 bp, probe
agccactacccctgatgagaacagt

SEQ ID NO: 137056 - DNA, 25 bp, probe
agccactacccctgatgagaacagt

SEQ ID NO: 137057 - DNA, 25 bp, probe
accatcatcacctccggaaagtgta

SEQ ID NO: 137058 - DNA, 25 bp, probe
actgctgaccacgccgaatccggaa

SEQ ID NO: 137059 - DNA, 25 bp, probe
agcgagaccaacgctgagaccttca

SEQ ID NO: 137060 - DNA, 25 bp, probe
agcgtgcactaacttcatgatgacc

SEQ ID NO: 137061 - DNA, 25 bp, probe
agctggagctaatgttgatgcccag

SEQ ID NO: 137062 - DNA, 25 bp, probe
agctgacgctggttttgtgtacagt

SEQ ID NO: 137063 - DNA, 25 bp, probe
agcgactgatgttagttgttaccca

SEQ ID NO: 137064 - DNA, 25 bp, probe
agcgactgatgttagttgttaccca

SEQ ID NO: 137065 - DNA, 25 bp, probe
agcgagcaagctcagtttacacccg

SEQ ID NO: 137066 - DNA, 25 bp, probe
agctgagcacgctcgtggaaaccac

SEQ ID NO: 137067 - DNA, 25 bp, probe
agctgagcctcttgagggcagagac

SEQ ID NO: 137068 - DNA, 25 bp, probe
agctgaggctgtacattgagcagaa

SEQ ID NO: 137069 - DNA, 25 bp, probe
agctggatcgccatctatgagaaga

SEQ ID NO: 137070 - DNA, 25 bp, probe
agctgtggctggtcctggagacaga

SEQ ID NO: 137071 - DNA, 25 bp, probe
agcggctgtgcaggcctttgagaat

SEQ ID NO: 137072 - DNA, 25 bp, probe
agctgagggcatggcctacatggaa

SEQ ID NO: 137073 - DNA, 25 bp, probe
agctgctgggcacgcccagtgagaa

SEQ ID NO: 137074 - DNA, 25 bp, probe
agctccatggagcccaacgagatga

SEQ ID NO: 137075 - DNA, 25 bp, probe
agctgtcggtgatccacagagatgt

SEQ ID NO: 137076 - DNA, 25 bp, probe
agctgccggactacaacaagatctc

SEQ ID NO: 137077 - DNA, 25 bp, probe
agctgactcagaacacaacaaactt

SEQ ID NO: 137078 - DNA, 25 bp, probe
agctgactcagaacacaacaaactt

SEQ ID NO: 137079 - DNA, 25 bp, probe
agctgttgggagaaagcaatacgtt

SEQ ID NO: 137080 - DNA, 25 bp, probe
agctgggggcagaataggtagtatt

SEQ ID NO: 137081 - DNA, 25 bp, probe
agctgaggggcggaagatgaagatt

SEQ ID NO: 137082 - DNA, 25 bp, probe
agctgaggggtgtcacgtggtgcaa

SEQ ID NO: 137083 - DNA, 25 bp, probe
agcggcgggtacgagaggctgaaga

SEQ ID NO: 137084 - DNA, 25 bp, probe
agcggaaggtgacgcgcatggtgtt

SEQ ID NO: 137085 - DNA, 25 bp, probe
agcgaaagagccggcctgtgagtgt

SEQ ID NO: 137086 - DNA, 25 bp, probe
agcgcaagacagctggccaggatgt

SEQ ID NO: 137087 - DNA, 25 bp, probe
agctgaagcgcatcatggaagtggt

SEQ ID NO: 137088 - DNA, 25 bp, probe
agctgcaggagctctatgaacgcct

SEQ ID NO: 137089 - DNA, 25 bp, probe
agctgcaggagctctatgaacgcct

SEQ ID NO: 137090 - DNA, 25 bp, probe
agctgcagagtcttcggcagaagca

SEQ ID NO: 137091 - DNA, 25 bp, probe
agctgagcaggcccgacagagagat

SEQ ID NO: 137092 - DNA, 25 bp, probe
agctgagcaggcccgacagagagat

SEQ ID NO: 137093 - DNA, 25 bp, probe
agctggaagccccagcagatgccac

SEQ ID NO: 137094 - DNA, 25 bp, probe
agctggaagccccagcagatgccac

SEQ ID NO: 137095 - DNA, 25 bp, probe
agctggaagccccagcagatgccac

SEQ ID NO: 137096 - DNA, 25 bp, probe
agctggaacactggctggagaccct

SEQ ID NO: 137097 - DNA, 25 bp, probe
agctgccactgcaggctgaaggcct

SEQ ID NO: 137098 - DNA, 25 bp, probe
agctgccactgcaggctgaaggcct

SEQ ID NO: 137099 - DNA, 25 bp, probe
agcccatctgcagcgatgcagctgg

SEQ ID NO: 137100 - DNA, 25 bp, probe
agcccatctgcagcgatgcagctgg

SEQ ID NO: 137101 - DNA, 25 bp, probe
agcgcaacagcagcctgcagctgga

SEQ ID NO: 137102 - DNA, 25 bp, probe
agctgccagcaaacctgagggaaag

SEQ ID NO: 137103 - DNA, 25 bp, probe
agctgccccacggtggggagggctg

SEQ ID NO: 137104 - DNA, 25 bp, probe
agctgccccacggtggggagggctg

SEQ ID NO: 137105 - DNA, 25 bp, probe
agctgcacgccacggggaggaggcg

SEQ ID NO: 137106 - DNA, 25 bp, probe
agctgcacgccacggggaggaggcg

SEQ ID NO: 137107 - DNA, 25 bp, probe
agcgcatcacgacaaggatatgatg

SEQ ID NO: 137108 - DNA, 25 bp, probe
agctgctccctgcacaggatatcaa

SEQ ID NO: 137109 - DNA, 25 bp, probe
agctgctgccgcttgacaaagacta

SEQ ID NO: 137110 - DNA, 25 bp, probe
agcgcatacgcatgactacattaca

SEQ ID NO: 137111 - DNA, 25 bp, probe
agctgcagtggctgcactactacct

SEQ ID NO: 137112 - DNA, 25 bp, probe
agctggtcctgagtctactcagcct

SEQ ID NO: 137113 - DNA, 25 bp, probe
agctggtcctgagtctactcagcct

SEQ ID NO: 137114 - DNA, 25 bp, probe
agcggcatcggagctagatcacgtt

SEQ ID NO: 137115 - DNA, 25 bp, probe
agcgtgcacaggtgctggacaagtt

SEQ ID NO: 137116 - DNA, 25 bp, probe
agcgtcagcggcaagctgtggagga

SEQ ID NO: 137117 - DNA, 25 bp, probe
agcgtgggtaaggtgggtcaggtgt

SEQ ID NO: 137118 - DNA, 25 bp, probe
agcgtgggtaaggtgggtcaggtgt

SEQ ID NO: 137119 - DNA, 25 bp, probe
agcgctggcgtaagcatggggtctt

SEQ ID NO: 137120 - DNA, 25 bp, probe
agcgaggttatcctgaggtgacatt

SEQ ID NO: 137121 - DNA, 25 bp, probe
agctgcaaggtataattgatggatt

SEQ ID NO: 137122 - DNA, 25 bp, probe
agctgacaggctgtgaaatatggaa

SEQ ID NO: 137123 - DNA, 25 bp, probe
agctgacaggctgtgaaatatggaa

SEQ ID NO: 137124 - DNA, 25 bp, probe
agctgaagcagcccgcatattaggc

SEQ ID NO: 137125 - DNA, 25 bp, probe
agcgatgagcaaactctataagagt

SEQ ID NO: 137126 - DNA, 25 bp, probe
agctgatgagacattctggaagcat

SEQ ID NO: 137127 - DNA, 25 bp, probe
agctgattggcggattggagatgcc

SEQ ID NO: 137128 - DNA, 25 bp, probe
agctgattctcagtggctgggagcc

SEQ ID NO: 137129 - DNA, 25 bp, probe
agctgttccagctgcggcctgcaca

SEQ ID NO: 137130 - DNA, 25 bp, probe
agctgctgtccgaggtgcagctgca

SEQ ID NO: 137131 - DNA, 25 bp, probe
agctgatttcagacacgtgagagag

SEQ ID NO: 137132 - DNA, 25 bp, probe
agcgtatgtgatgactgtgacgggg

SEQ ID NO: 137133 - DNA, 25 bp, probe
agcgtgagctatgacagtgaaccga

SEQ ID NO: 137134 - DNA, 25 bp, probe
agctgtgttagagcaggaacccatt

SEQ ID NO: 137135 - DNA, 25 bp, probe
agcggtgcaagagagaaactcctat

SEQ ID NO: 137136 - DNA, 25 bp, probe
agctgggcagggtgagaagctagat

SEQ ID NO: 137137 - DNA, 25 bp, probe
agcgggcaggtgtgatgctgaccgt

SEQ ID NO: 137138 - DNA, 25 bp, probe
agcgggcaggtgtgatgctgaccgt

SEQ ID NO: 137139 - DNA, 25 bp, probe
agcggtgaaggctgtggtggcctct

SEQ ID NO: 137140 - DNA, 25 bp, probe
agctgggagaactgctgtgtacctc

SEQ ID NO: 137141 - DNA, 25 bp, probe
agctgcttagaaaggaggcgactcc

SEQ ID NO: 137142 - DNA, 25 bp, probe
agctgcttagaaaggaggcgactcc

SEQ ID NO: 137143 - DNA, 25 bp, probe
accttagataaggagtccctgattc

SEQ ID NO: 137144 - DNA, 25 bp, probe
accttagataaggagtccctgattc

SEQ ID NO: 137145 - DNA, 25 bp, probe
aacttgaaaacagccaactgtacct

SEQ ID NO: 137146 - DNA, 25 bp, probe
cataaggaaaggagaccctggacca

SEQ ID NO: 137147 - DNA, 25 bp, probe
agcggaaaaggatgtccctggtcaa

SEQ ID NO: 137148 - DNA, 25 bp, probe
actggaatgttaaactcccgcgtca

SEQ ID NO: 137149 - DNA, 25 bp, probe
agcggaaaataaactccaagcagcc

SEQ ID NO: 137150 - DNA, 25 bp, probe
agcggacaaataaaactcgctgact

SEQ ID NO: 137151 - DNA, 25 bp, probe
actggacaacattttactactgagg

SEQ ID NO: 137152 - DNA, 25 bp, probe
acctaaaaatgtgtatccgagtgga

SEQ ID NO: 137153 - DNA, 25 bp, probe
acaggaaccaagtcctttgcgtgtg

SEQ ID NO: 137154 - DNA, 25 bp, probe
agctgaaaccaattggctctggggc

SEQ ID NO: 137155 - DNA, 25 bp, probe
agcgggacctacctgatcagggagc

SEQ ID NO: 137156 - DNA, 25 bp, probe
agctggatgacctacctaaggagcg

SEQ ID NO: 137157 - DNA, 25 bp, probe
agcgtggacgttggctacaggactg

SEQ ID NO: 137158 - DNA, 25 bp, probe
acctggacgactgccaaggactgag

SEQ ID NO: 137159 - DNA, 25 bp, probe
acctggacggcagaaggcaaaggaa

SEQ ID NO: 137160 - DNA, 25 bp, probe
agcggttaggctgtgaggaaatgga

SEQ ID NO: 137161 - DNA, 25 bp, probe
acgagtttgcggtgaagattatgga

SEQ ID NO: 137162 - DNA, 25 bp, probe
agcgtattatggcaaacacttcaag

SEQ ID NO: 137163 - DNA, 25 bp, probe
agcctggtatggagtccagtctaag

SEQ ID NO: 137164 - DNA, 25 bp, probe
agccttgaactgtggccacctagaa

SEQ ID NO: 137165 - DNA, 25 bp, probe
agcctttatctatgggagattaaaa

SEQ ID NO: 137166 - DNA, 25 bp, probe
agcccctttttgtgacattaccaat

SEQ ID NO: 137167 - DNA, 25 bp, probe
acctcatgttttcaaacttaatact

SEQ ID NO: 137168 - DNA, 25 bp, probe
agccttgcctttgtaatttgacttc

SEQ ID NO: 137169 - DNA, 25 bp, probe
agccccgctattggtataattcaga

SEQ ID NO: 137170 - DNA, 25 bp, probe
accacggtagtgcctgaaatttcac

SEQ ID NO: 137171 - DNA, 25 bp, probe
accaaggtggctgtgaaaaccctga

SEQ ID NO: 137172 - DNA, 25 bp, probe
accagcagcggacaaataaaactcg

SEQ ID NO: 137173 - DNA, 25 bp, probe
accacgaaggccactgtaaactggc

SEQ ID NO: 137174 - DNA, 25 bp, probe
accacgagggtcactgtaaactggc

SEQ ID NO: 137175 - DNA, 25 bp, probe
agcggagggttcacatgtatgatac

SEQ ID NO: 137176 - DNA, 25 bp, probe
agcggagggttcacatgtatgatac

SEQ ID NO: 137177 - DNA, 25 bp, probe
agcgcgtgtttgactacagtgagta

SEQ ID NO: 137178 - DNA, 25 bp, probe
agccggttctctgcacattggaact

SEQ ID NO: 137179 - DNA, 25 bp, probe
accacgttctctgtctgtaaaagct

SEQ ID NO: 137180 - DNA, 25 bp, probe
agccagggacttgttgtcaaagatg

SEQ ID NO: 137181 - DNA, 25 bp, probe
agcccagcaacgtggctgtgaacga

SEQ ID NO: 137182 - DNA, 25 bp, probe
agcccaaatctagagcattgagcac

SEQ ID NO: 137183 - DNA, 25 bp, probe
agcccaaatctagagcattgagcac

SEQ ID NO: 137184 - DNA, 25 bp, probe
agcgactagaccggagtgtctccta

SEQ ID NO: 137185 - DNA, 25 bp, probe
agcgactagaccggagtgtctccta

SEQ ID NO: 137186 - DNA, 25 bp, probe
agcgccaagacctgcaatgttgact

SEQ ID NO: 137187 - DNA, 25 bp, probe
agcggaaatgactccttctgaaatg

SEQ ID NO: 137188 - DNA, 25 bp, probe
agccgaaagcaccactgctttacag

SEQ ID NO: 137189 - DNA, 25 bp, probe
agctggaatgatctgactgcacctc

SEQ ID NO: 137190 - DNA, 25 bp, probe
agctggaatgatctgactgcacctc

SEQ ID NO: 137191 - DNA, 25 bp, probe
agctggatattgagcaggaccaaga

SEQ ID NO: 137192 - DNA, 25 bp, probe
agctggatattgagcaggaccaaga

SEQ ID NO: 137193 - DNA, 25 bp, probe
agcggagcatcgagaggaggccaga

SEQ ID NO: 137194 - DNA, 25 bp, probe
agcgacacgcggcagagatcgccaa

SEQ ID NO: 137195 - DNA, 25 bp, probe
agcgaaagcggcaggatcgacgcgc

SEQ ID NO: 137196 - DNA, 25 bp, probe
acgaagtgacgttgagatcctcggc

SEQ ID NO: 137197 - DNA, 25 bp, probe
acatcaactttgtggataacgggaa

SEQ ID NO: 137198 - DNA, 25 bp, probe
acatcaactttgtggataacgggaa

SEQ ID NO: 137199 - DNA, 25 bp, probe
agcccacactcctcaaaaaggccaa

SEQ ID NO: 137200 - DNA, 25 bp, probe
agcggcacctcgagagagaagggcc

SEQ ID NO: 137201 - DNA, 25 bp, probe
agcgggccacgcagaggcaagaacg

SEQ ID NO: 137202 - DNA, 25 bp, probe
agcctgcccacctatgagaaaaact

SEQ ID NO: 137203 - DNA, 25 bp, probe
agcctgcccacctatgagaaaaact

SEQ ID NO: 137204 - DNA, 25 bp, probe
agccctctcaagttaaacgaactga

SEQ ID NO: 137205 - DNA, 25 bp, probe
agccctctcaagttaaacgaactga

SEQ ID NO: 137206 - DNA, 25 bp, probe
agccctttcggttcaagaagagcca

SEQ ID NO: 137207 - DNA, 25 bp, probe
agcccttcctctgtaaaagtgtcac

SEQ ID NO: 137208 - DNA, 25 bp, probe
agcccttttcatttacaaatctcaa

SEQ ID NO: 137209 - DNA, 25 bp, probe
agcccgttaccttttaattgcatga

SEQ ID NO: 137210 - DNA, 25 bp, probe
agcccagctaatttttgtatcttta

SEQ ID NO: 137211 - DNA, 25 bp, probe
agcgccttcaagaacttcttttcta

SEQ ID NO: 137212 - DNA, 25 bp, probe
agcctcttgaggcacagtttccagt

SEQ ID NO: 137213 - DNA, 25 bp, probe
agccctgtgataccacagactgtgc

SEQ ID NO: 137214 - DNA, 25 bp, probe
agccctgtgaggcgtggcaggtgga

SEQ ID NO: 137215 - DNA, 25 bp, probe
agcgcctggaggacgggacagatgg

SEQ ID NO: 137216 - DNA, 25 bp, probe
agcggctgtgggagccgctcagggt

SEQ ID NO: 137217 - DNA, 25 bp, probe
agcggcttaagggcgatgcctgggt

SEQ ID NO: 137218 - DNA, 25 bp, probe
agctggtggactttggcatggctgg

SEQ ID NO: 137219 - DNA, 25 bp, probe
agctggggagtagtggatgtctgca

SEQ ID NO: 137220 - DNA, 25 bp, probe
agctgagggagtagctcgtgtccgc

SEQ ID NO: 137221 - DNA, 25 bp, probe
agctggtggaagacctggaccgcat

SEQ ID NO: 137222 - DNA, 25 bp, probe
agctggtggaagacctggaccgcat

SEQ ID NO: 137223 - DNA, 25 bp, probe
agctggtggcaagcgtggagcagga

SEQ ID NO: 137224 - DNA, 25 bp, probe
agcggctggaacgattggagatccc

SEQ ID NO: 137225 - DNA, 25 bp, probe
agcgggaggaccaggagacggctgt

SEQ ID NO: 137226 - DNA, 25 bp, probe
agcctggagcaggccacagggttgg

SEQ ID NO: 137227 - DNA, 25 bp, probe
agcctggataaggccagggtaccat

SEQ ID NO: 137228 - DNA, 25 bp, probe
agccggtatcagaaccatagtagca

SEQ ID NO: 137229 - DNA, 25 bp, probe
agccggtatcagaaccatagtagca

SEQ ID NO: 137230 - DNA, 25 bp, probe
agccggtcaagttccaggttgatat

SEQ ID NO: 137231 - DNA, 25 bp, probe
acctgtgtgggtgaaggggataggg

SEQ ID NO: 137232 - DNA, 25 bp, probe
acctatgggctctacacacgggtaa

SEQ ID NO: 137233 - DNA, 25 bp, probe
agcctcatttcttacagacggggaa

SEQ ID NO: 137234 - DNA, 25 bp, probe
agcctcatttcttacagacggggaa

SEQ ID NO: 137235 - DNA, 25 bp, probe
agcgcttagttatcacaaggcctgc

SEQ ID NO: 137236 - DNA, 25 bp, probe
agcgaaaggatgtaaacagtgcctg

SEQ ID NO: 137237 - DNA, 25 bp, probe
agcgaagggtgacagactgggctga

SEQ ID NO: 137238 - DNA, 25 bp, probe
agcgaaggcactgggtgcacgggca

SEQ ID NO: 137239 - DNA, 25 bp, probe
agccgtagttggactgacgggcagg

SEQ ID NO: 137240 - DNA, 25 bp, probe
accgggctagggaactgctggaagt

SEQ ID NO: 137241 - DNA, 25 bp, probe
agcctggatctggggataccgaaag

SEQ ID NO: 137242 - DNA, 25 bp, probe
agcctgggctggtcctgacacaggc

SEQ ID NO: 137243 - DNA, 25 bp, probe
agcgctgtgagtcgtgaagacacgg

SEQ ID NO: 137244 - DNA, 25 bp, probe
agctgtgagatgcctgtgagagcct

SEQ ID NO: 137245 - DNA, 25 bp, probe
agctgtggagcacgtggatgctgcc

SEQ ID NO: 137246 - DNA, 25 bp, probe
agctggagcatctggaagctgcaga

SEQ ID NO: 137247 - DNA, 25 bp, probe
agctggatgcagtgaaccttgagaa

SEQ ID NO: 137248 - DNA, 25 bp, probe
agcggtgcgtatgacatctctgaaa

SEQ ID NO: 137249 - DNA, 25 bp, probe
agccgtgctccatgaactcaaacac

SEQ ID NO: 137250 - DNA, 25 bp, probe
agccgtgctccatgaactcaaacac

SEQ ID NO: 137251 - DNA, 25 bp, probe
agccatgtgcctgaaaacacaaagg

SEQ ID NO: 137252 - DNA, 25 bp, probe
accttccttagggctcatcaaatgc

SEQ ID NO: 137253 - DNA, 25 bp, probe
accaggtctcaaggttctcatttct

SEQ ID NO: 137254 - DNA, 25 bp, probe
agccggtaacagctgaccttattgt

SEQ ID NO: 137255 - DNA, 25 bp, probe
agcctaggaaagataccgaagatta

SEQ ID NO: 137256 - DNA, 25 bp, probe
agccttgggaatctcgttgagcgtt

SEQ ID NO: 137257 - DNA, 25 bp, probe
agccttggtaacgccatggactgca

SEQ ID NO: 137258 - DNA, 25 bp, probe
agccttcggacagacatatgggata

SEQ ID NO: 137259 - DNA, 25 bp, probe
agccggatggactctaatgcaggga

SEQ ID NO: 137260 - DNA, 25 bp, probe
agccggatggactctaatgcaggga

SEQ ID NO: 137261 - DNA, 25 bp, probe
agctggggcagatcccagagggcga

SEQ ID NO: 137262 - DNA, 25 bp, probe
agcgaagtgcagtgcacccagcagt

SEQ ID NO: 137263 - DNA, 25 bp, probe
agccagttggatagccccatggaaa

SEQ ID NO: 137264 - DNA, 25 bp, probe
agcctgggcaggatcccatcagaaa

SEQ ID NO: 137265 - DNA, 25 bp, probe
agcctggagaggctgagccgctgac

SEQ ID NO: 137266 - DNA, 25 bp, probe
agcgcgcaagagggcagaccgatag

SEQ ID NO: 137267 - DNA, 25 bp, probe
agcgtgaccatcgaggatccaaagt

SEQ ID NO: 137268 - DNA, 25 bp, probe
cacctacacctgtgaccaaggctta

SEQ ID NO: 137269 - DNA, 25 bp, probe
agcctacctgtgagactgaaggggt

SEQ ID NO: 137270 - DNA, 25 bp, probe
agcgctaacgtgaagacgatgggat

SEQ ID NO: 137271 - DNA, 25 bp, probe
agcgctaacgtgaagacgatgggat

SEQ ID NO: 137272 - DNA, 25 bp, probe
agcctttctgtgaaccagatgtggt

SEQ ID NO: 137273 - DNA, 25 bp, probe
agcccttgttgctgtagatgtgcgt

SEQ ID NO: 137274 - DNA, 25 bp, probe
agcccttgttgctgtagatgtgcgt

SEQ ID NO: 137275 - DNA, 25 bp, probe
agcccttctggtagtacttgcagat

SEQ ID NO: 137276 - DNA, 25 bp, probe
agccctctctagtgaacagatgtca

SEQ ID NO: 137277 - DNA, 25 bp, probe
agcccatgtttagatccaggtctcc

SEQ ID NO: 137278 - DNA, 25 bp, probe
agcccgatggtaggattcagttctg

SEQ ID NO: 137279 - DNA, 25 bp, probe
agcgctccatgggggtatggttttg

SEQ ID NO: 137280 - DNA, 25 bp, probe
agcctaaggcagattttgttttgtc

SEQ ID NO: 137281 - DNA, 25 bp, probe
agccatcaagtgctttctttccaaa

SEQ ID NO: 137282 - DNA, 25 bp, probe
agccacaactggctattgttaccca

SEQ ID NO: 137283 - DNA, 25 bp, probe
accaccattgggtttggggatactg

SEQ ID NO: 137284 - DNA, 25 bp, probe
accaccttgtttatggcaggtttct

SEQ ID NO: 137285 - DNA, 25 bp, probe
accagtccttttatgacgtgggctt

SEQ ID NO: 137286 - DNA, 25 bp, probe
agccgaactttgttatggagggagc

SEQ ID NO: 137287 - DNA, 25 bp, probe
agcctgctacttggtgaaggagcgg

SEQ ID NO: 137288 - DNA, 25 bp, probe
agccgcacactgagaaagcaattgg

SEQ ID NO: 137289 - DNA, 25 bp, probe
agcccaaagtggtatagaaatgctg

SEQ ID NO: 137290 - DNA, 25 bp, probe
agcccaagatgggactcagaccctg

SEQ ID NO: 137291 - DNA, 25 bp, probe
agcccaaatgcttagcagtgcccct

SEQ ID NO: 137292 - DNA, 25 bp, probe
agcggaaacatattcttgcagccca

SEQ ID NO: 137293 - DNA, 25 bp, probe
agcgagaaactgcatggtcgcccat

SEQ ID NO: 137294 - DNA, 25 bp, probe
agcgaggagaaggttgtcacctatg

SEQ ID NO: 137295 - DNA, 25 bp, probe
accaagtggagtacgacgcctataa

SEQ ID NO: 137296 - DNA, 25 bp, probe
accaaaatacttcaggctcttaata

SEQ ID NO: 137297 - DNA, 25 bp, probe
accaagaaacaacagctccatttta

SEQ ID NO: 137298 - DNA, 25 bp, probe
ccgaccaaagacctacttttcatag

SEQ ID NO: 137299 - DNA, 25 bp, probe
agccactaacagagaactttaataa

SEQ ID NO: 137300 - DNA, 25 bp, probe
agccactaacagagaactttaataa

SEQ ID NO: 137301 - DNA, 25 bp, probe
cactcaataacagaaaccttggccg

SEQ ID NO: 137302 - DNA, 25 bp, probe
cactcaataacagaaaccttggccg

SEQ ID NO: 137303 - DNA, 25 bp, probe
acccaagtcaaaaccttggctccag

SEQ ID NO: 137304 - DNA, 25 bp, probe
accaccataaaacccttgagcacaa

SEQ ID NO: 137305 - DNA, 25 bp, probe
acctcatctataacctccttgaaaa

SEQ ID NO: 137306 - DNA, 25 bp, probe
acccattgaagtctccttgggccac

SEQ ID NO: 137307 - DNA, 25 bp, probe
acacgaataaagttacttgggcaga

SEQ ID NO: 137308 - DNA, 25 bp, probe
accaaagcaagacttactaacgcat

SEQ ID NO: 137309 - DNA, 25 bp, probe
agccatagcaggagttattaaccag

SEQ ID NO: 137310 - DNA, 25 bp, probe
agccaacatcctggttggggagcgg

SEQ ID NO: 137311 - DNA, 25 bp, probe
agccgactccctggtgagggtggag

SEQ ID NO: 137312 - DNA, 25 bp, probe
agcgcctcgcgaacgccgggctgga

SEQ ID NO: 137313 - DNA, 25 bp, probe
agcgccgagcgagcaggagcggcgg

SEQ ID NO: 137314 - DNA, 25 bp, probe
agcggcagaggctagcagcaacggc

SEQ ID NO: 137315 - DNA, 25 bp, probe
agcgaggaggctagcatctacgaca

SEQ ID NO: 137316 - DNA, 25 bp, probe
agcggaggctgggatctagcgagag

SEQ ID NO: 137317 - DNA, 25 bp, probe
agctgggccgcacaattggagaggg

SEQ ID NO: 137318 - DNA, 25 bp, probe
agctggggactggacaatttggggt

SEQ ID NO: 137319 - DNA, 25 bp, probe
acgcagggacgtgagttggagcggc

SEQ ID NO: 137320 - DNA, 25 bp, probe
accaaggggtggcttggagccagga

SEQ ID NO: 137321 - DNA, 25 bp, probe
accagaaaagcgtgtggacccagga

SEQ ID NO: 137322 - DNA, 25 bp, probe
accaaaaatccgatcacctcgaaga

SEQ ID NO: 137323 - DNA, 25 bp, probe
accaaaaaccttctgttcaatgaca

SEQ ID NO: 137324 - DNA, 25 bp, probe
accaaaaaccttctgttcaatgaca

SEQ ID NO: 137325 - DNA, 25 bp, probe
accaaatcaaccataggtccaagaa

SEQ ID NO: 137326 - DNA, 25 bp, probe
actaatttagcttctaggatccaag

SEQ ID NO: 137327 - DNA, 25 bp, probe
accaaactctgtgtactgaccactg

SEQ ID NO: 137328 - DNA, 25 bp, probe
accaaactctgtgtactgaccactg

SEQ ID NO: 137329 - DNA, 25 bp, probe
accaaccttggctaaacacaaatga

SEQ ID NO: 137330 - DNA, 25 bp, probe
agcccctttggctgggccaagaagg

SEQ ID NO: 137331 - DNA, 25 bp, probe
agcctccctttgaggccgacaatga

SEQ ID NO: 137332 - DNA, 25 bp, probe
agccccctgtatctggattgtaatg

SEQ ID NO: 137333 - DNA, 25 bp, probe
agccctgcttttctctatttgaagt

SEQ ID NO: 137334 - DNA, 25 bp, probe
agcccttgtcttctatagctgtatc

SEQ ID NO: 137335 - DNA, 25 bp, probe
agccaaatggctaaactcactgttt

SEQ ID NO: 137336 - DNA, 25 bp, probe
agccaagggcaaaacattcatgttt

SEQ ID NO: 137337 - DNA, 25 bp, probe
accactggactacacattcttctgt

SEQ ID NO: 137338 - DNA, 25 bp, probe
accactggactacacattcttctgt

SEQ ID NO: 137339 - DNA, 25 bp, probe
agccatgtgttccaaggcattttag

SEQ ID NO: 137340 - DNA, 25 bp, probe
accaattccaggtgttggtacatat

SEQ ID NO: 137341 - DNA, 25 bp, probe
accagattccaggtccaaagtcacc

SEQ ID NO: 137342 - DNA, 25 bp, probe
accaattcatcacaactaactccat

SEQ ID NO: 137343 - DNA, 25 bp, probe
accaaatctgcatagttaaactcca

SEQ ID NO: 137344 - DNA, 25 bp, probe
accaggtcttagatgtccaaccaag

SEQ ID NO: 137345 - DNA, 25 bp, probe
agccagggttggagtcttagcctcg

SEQ ID NO: 137346 - DNA, 25 bp, probe
agccagggttggagtcttagcctcg

SEQ ID NO: 137347 - DNA, 25 bp, probe
agccagggttgtctttatattcttt

SEQ ID NO: 137348 - DNA, 25 bp, probe
agccgtgcgtgcgcgttatttattt

SEQ ID NO: 137349 - DNA, 25 bp, probe
agccctctgcttgactgtatattat

SEQ ID NO: 137350 - DNA, 25 bp, probe
agcccaagcttgttcgtgtagcttc

SEQ ID NO: 137351 - DNA, 25 bp, probe
accaatacactgctaagtagttcag

SEQ ID NO: 137352 - DNA, 25 bp, probe
agccatgtcaaggttaagtctttcg

SEQ ID NO: 137353 - DNA, 25 bp, probe
agcccaatcaggtcaaagattttgc

SEQ ID NO: 137354 - DNA, 25 bp, probe
agcgcgacttcgtgaagatcttcga

SEQ ID NO: 137355 - DNA, 25 bp, probe
agcgcgacttcgtgaagatcttcga

SEQ ID NO: 137356 - DNA, 25 bp, probe
agcggaattccatgcagtgtcttgc

SEQ ID NO: 137357 - DNA, 25 bp, probe
agctggcaactcagagggtcttcct

SEQ ID NO: 137358 - DNA, 25 bp, probe
agctggcaactcagagggtcttcct

SEQ ID NO: 137359 - DNA, 25 bp, probe
agcccagagctcagggacgcattca

SEQ ID NO: 137360 - DNA, 25 bp, probe
agcccagagctcagggacgcattca

SEQ ID NO: 137361 - DNA, 25 bp, probe
agcgctatgcccaggagaacttcaa

SEQ ID NO: 137362 - DNA, 25 bp, probe
agcggatggtctgggagatcctcca

SEQ ID NO: 137363 - DNA, 25 bp, probe
agcggcggtaatagagacccctgtg

SEQ ID NO: 137364 - DNA, 25 bp, probe
agcgtggtccagagagacaccagcc

SEQ ID NO: 137365 - DNA, 25 bp, probe
agcgtggtccagagagacaccagcc

SEQ ID NO: 137366 - DNA, 25 bp, probe
agctgggttcgcaggagccagcctt

SEQ ID NO: 137367 - DNA, 25 bp, probe
agcgggtgtgtggagatggcgccct

SEQ ID NO: 137368 - DNA, 25 bp, probe
agcgggtgtgtggagatggcgccct

SEQ ID NO: 137369 - DNA, 25 bp, probe
agctgggatgttgggcagggtgcca

SEQ ID NO: 137370 - DNA, 25 bp, probe
agcggggctgacagcaggtgtgctc

SEQ ID NO: 137371 - DNA, 25 bp, probe
agcggggctgacagcaggtgtgctc

SEQ ID NO: 137372 - DNA, 25 bp, probe
agcggggctgacagcaggtgtgctc

SEQ ID NO: 137373 - DNA, 25 bp, probe
agcgaggccagcctagaggtggctt

SEQ ID NO: 137374 - DNA, 25 bp, probe
agcggcaggcaggattgggcttttc

SEQ ID NO: 137375 - DNA, 25 bp, probe
agcgtggacaggagcgatgcacttt

SEQ ID NO: 137376 - DNA, 25 bp, probe
agcgtggacaggagcgatgcacttt

SEQ ID NO: 137377 - DNA, 25 bp, probe
agcgggagcaggagatgttcttcaa

SEQ ID NO: 137378 - DNA, 25 bp, probe
agcgggagcaggaggactgctggga

SEQ ID NO: 137379 - DNA, 25 bp, probe
agcgcgaccaggtggacgcgagcga

SEQ ID NO: 137380 - DNA, 25 bp, probe
agcgccaccaggctggaggcggagt

SEQ ID NO: 137381 - DNA, 25 bp, probe
agcccccattgtggtcacaggaagt

SEQ ID NO: 137382 - DNA, 25 bp, probe
agcccccagtcgcctgaaggagggg

SEQ ID NO: 137383 - DNA, 25 bp, probe
agcctcccttcgatggggaggacga

SEQ ID NO: 137384 - DNA, 25 bp, probe
agcctgcacccctgtggggtggaaa

SEQ ID NO: 137385 - DNA, 25 bp, probe
agcctgcacccctgtggggtggaaa

SEQ ID NO: 137386 - DNA, 25 bp, probe
agcctccaccactaggtcagtgtaa

SEQ ID NO: 137387 - DNA, 25 bp, probe
agccctagccctagatagatagcta

SEQ ID NO: 137388 - DNA, 25 bp, probe
agcccatgagtccttgaaaatattt

SEQ ID NO: 137389 - DNA, 25 bp, probe
agcccagtgtggatgaactactcct

SEQ ID NO: 137390 - DNA, 25 bp, probe
agcccagtgtggatgaactactcct

SEQ ID NO: 137391 - DNA, 25 bp, probe
agccgtggcggaggaagtgaatgcc

SEQ ID NO: 137392 - DNA, 25 bp, probe
agccagggcctagtgggtcattggc

SEQ ID NO: 137393 - DNA, 25 bp, probe
agccgggactgctagggctggtggc

SEQ ID NO: 137394 - DNA, 25 bp, probe
agccagggatgtccagaggtcggtg

SEQ ID NO: 137395 - DNA, 25 bp, probe
agcgccgtgtcctatgaggacaggg

SEQ ID NO: 137396 - DNA, 25 bp, probe
agcctcgagtccgaggtatgacgcg

SEQ ID NO: 137397 - DNA, 25 bp, probe
agccacgagttctacgattcacatg

SEQ ID NO: 137398 - DNA, 25 bp, probe
agcctgggatcactataattcaacc

SEQ ID NO: 137399 - DNA, 25 bp, probe
accttcgtgcggaaattccacgaca

SEQ ID NO: 137400 - DNA, 25 bp, probe
accttccttggggatgttcatgggc

SEQ ID NO: 137401 - DNA, 25 bp, probe
agcccagccatgggggtttagggct

SEQ ID NO: 137402 - DNA, 25 bp, probe
agccccacaggacggtttatgagca

SEQ ID NO: 137403 - DNA, 25 bp, probe
agcgtgcccaggagatgttccagaa

SEQ ID NO: 137404 - DNA, 25 bp, probe
agcccaaggctgaagatttaagaac

SEQ ID NO: 137405 - DNA, 25 bp, probe
agcccggcagaggacagtaaaagca

SEQ ID NO: 137406 - DNA, 25 bp, probe
agcccgtatgatcacgtagacccac

SEQ ID NO: 137407 - DNA, 25 bp, probe
agcccgttcaggactttgaatgcca

SEQ ID NO: 137408 - DNA, 25 bp, probe
agcccaagtgataacttcgaagcca

SEQ ID NO: 137409 - DNA, 25 bp, probe
agcctgcaagtctccattcagaagc

SEQ ID NO: 137410 - DNA, 25 bp, probe
agccatgaaggtcatccacaaagct

SEQ ID NO: 137411 - DNA, 25 bp, probe
agccaggtttttcacttagctttca

SEQ ID NO: 137412 - DNA, 25 bp, probe
acctacttatttcagattcacctcc

SEQ ID NO: 137413 - DNA, 25 bp, probe
agcctcattctatttaactttgctc

SEQ ID NO: 137414 - DNA, 25 bp, probe
agcctcattctatttaactttgctc

SEQ ID NO: 137415 - DNA, 25 bp, probe
agccatgtgtctaattttctgggtt

SEQ ID NO: 137416 - DNA, 25 bp, probe
agcgcaatataaaaatcgtggactt

SEQ ID NO: 137417 - DNA, 25 bp, probe
agcgcaatataaaaatcgtggactt

SEQ ID NO: 137418 - DNA, 25 bp, probe
agcgccataacagcatctcggaggc

SEQ ID NO: 137419 - DNA, 25 bp, probe
agcccatgaacaaattcctgcttgt

SEQ ID NO: 137420 - DNA, 25 bp, probe
agccctgaacaaagcacctcaagtg

SEQ ID NO: 137421 - DNA, 25 bp, probe
agcccagacaccaaggaccggtggc

SEQ ID NO: 137422 - DNA, 25 bp, probe
agcccagacaccaaggaccggtggc

SEQ ID NO: 137423 - DNA, 25 bp, probe
agcccagaagcgaagagccctggag

SEQ ID NO: 137424 - DNA, 25 bp, probe
agcccagaagcgaagagccctggag

SEQ ID NO: 137425 - DNA, 25 bp, probe
agcccagagtgtgggagctaatggg

SEQ ID NO: 137426 - DNA, 25 bp, probe
agcccaagatgctgggtatcgaatg

SEQ ID NO: 137427 - DNA, 25 bp, probe
agcccatcacgctgtggtttgatga

SEQ ID NO: 137428 - DNA, 25 bp, probe
agccagtcaggcaagggatttgtta

SEQ ID NO: 137429 - DNA, 25 bp, probe
agccagtcaggcaagggatttgtta

SEQ ID NO: 137430 - DNA, 25 bp, probe
agccgtatgtgtactgtgatctgta

SEQ ID NO: 137431 - DNA, 25 bp, probe
agccgtaatggggactctccaggca

SEQ ID NO: 137432 - DNA, 25 bp, probe
agccgatgacatcatcgactccctg

SEQ ID NO: 137433 - DNA, 25 bp, probe
agcctggcagatcattgcacccagc

SEQ ID NO: 137434 - DNA, 25 bp, probe
agcctggctgcaacattgtgaccat

SEQ ID NO: 137435 - DNA, 25 bp, probe
agcctgtgctaggcatggtgtcttc

SEQ ID NO: 137436 - DNA, 25 bp, probe
agcctgactgacaaggctggccgca

SEQ ID NO: 137437 - DNA, 25 bp, probe
agcctggcaacaagatgaagcaagc

SEQ ID NO: 137438 - DNA, 25 bp, probe
acctccaattttgatgaaccaaaga

SEQ ID NO: 137439 - DNA, 25 bp, probe
accatcgagtttgttacccagcgga

SEQ ID NO: 137440 - DNA, 25 bp, probe
accatcgagtttgttacccagcgga

SEQ ID NO: 137441 - DNA, 25 bp, probe
acctggacttgtgtaactcgaccca

SEQ ID NO: 137442 - DNA, 25 bp, probe
accttctgaagtgtaaccctgtcca

SEQ ID NO: 137443 - DNA, 25 bp, probe
accttctgaagtgtaaccctgtcca

SEQ ID NO: 137444 - DNA, 25 bp, probe
agcctttaaacgagacggcgcccag

SEQ ID NO: 137445 - DNA, 25 bp, probe
agccattaataaaaggacgatctgc

SEQ ID NO: 137446 - DNA, 25 bp, probe
agcctgtaatagttcttgccgatcc

SEQ ID NO: 137447 - DNA, 25 bp, probe
agcgtggacaattaccagacggccc

SEQ ID NO: 137448 - DNA, 25 bp, probe
agcgtggacaaatctctcagccacc

SEQ ID NO: 137449 - DNA, 25 bp, probe
agcgtggacaaatctctcagccacc

SEQ ID NO: 137450 - DNA, 25 bp, probe
agcctgaacacagttttcaggactc

SEQ ID NO: 137451 - DNA, 25 bp, probe
agcctgtgtacatcgtcacggaact

SEQ ID NO: 137452 - DNA, 25 bp, probe
agcctttccctagcagtggaacgct

SEQ ID NO: 137453 - DNA, 25 bp, probe
acctacccctaccagggcaaggatg

SEQ ID NO: 137454 - DNA, 25 bp, probe
acctccccaatttagcgccagggag

SEQ ID NO: 137455 - DNA, 25 bp, probe
acctacgataattatacgacggaga

SEQ ID NO: 137456 - DNA, 25 bp, probe
agcccctgaagaaaattcacgtgaa

SEQ ID NO: 137457 - DNA, 25 bp, probe
agcccctgaagaaaattcacgtgaa

SEQ ID NO: 137458 - DNA, 25 bp, probe
accaagcagacgttatttacgtcaa

SEQ ID NO: 137459 - DNA, 25 bp, probe
agccggagaggatttggtccctcaa

SEQ ID NO: 137460 - DNA, 25 bp, probe
agcctgagagggcctgcgagtgccc

SEQ ID NO: 137461 - DNA, 25 bp, probe
agcgcgccatgatggtgcagacatc

SEQ ID NO: 137462 - DNA, 25 bp, probe
agccgccatgtctggccagataaat

SEQ ID NO: 137463 - DNA, 25 bp, probe
agcccgcatattaggcgcagataaa

SEQ ID NO: 137464 - DNA, 25 bp, probe
agccccttctatggagataagatga

SEQ ID NO: 137465 - DNA, 25 bp, probe
agcccttagattcagatagaagcat

SEQ ID NO: 137466 - DNA, 25 bp, probe
agccctaagattggaagaatggttc

SEQ ID NO: 137467 - DNA, 25 bp, probe
agcccaagaatttgtcaggaggtga

SEQ ID NO: 137468 - DNA, 25 bp, probe
agcccaggcaatagtgttgaggagg

SEQ ID NO: 137469 - DNA, 25 bp, probe
agcccagtttgttcatgtcagtgag

SEQ ID NO: 137470 - DNA, 25 bp, probe
agccgttttctatgctgcagagctg

SEQ ID NO: 137471 - DNA, 25 bp, probe
agccgactttcatgagctgctgagg

SEQ ID NO: 137472 - DNA, 25 bp, probe
agcccacggctaagaggctgctgaa

SEQ ID NO: 137473 - DNA, 25 bp, probe
agccagcctgccacaaggcagctag

SEQ ID NO: 137474 - DNA, 25 bp, probe
agcgcaggtcaattaagaagctgag

SEQ ID NO: 137475 - DNA, 25 bp, probe
agccctctgacattgatgagaactg

SEQ ID NO: 137476 - DNA, 25 bp, probe
agccctctgacattgatgagaactg

SEQ ID NO: 137477 - DNA, 25 bp, probe
agcctattgacagggatcacactgg

SEQ ID NO: 137478 - DNA, 25 bp, probe
agcctgttgctgccaggagacttgg

SEQ ID NO: 137479 - DNA, 25 bp, probe
agcctttggcgcacagaagggtcca

SEQ ID NO: 137480 - DNA, 25 bp, probe
agccttggggagtccacaggctccc

SEQ ID NO: 137481 - DNA, 25 bp, probe
agcctgagtgatgtggcccaggctc

SEQ ID NO: 137482 - DNA, 25 bp, probe
agcccaggctaaactgccaacatgc

SEQ ID NO: 137483 - DNA, 25 bp, probe
agccgggtttttgcaacatggtttg

SEQ ID NO: 137484 - DNA, 25 bp, probe
acgggttgcctcacgcaaatgtatt

SEQ ID NO: 137485 - DNA, 25 bp, probe
acgggttgcctcacgcaaatgtatt

SEQ ID NO: 137486 - DNA, 25 bp, probe
accaggttgactgccaaatgggttg

SEQ ID NO: 137487 - DNA, 25 bp, probe
accaagtctacttcactaatgacga

SEQ ID NO: 137488 - DNA, 25 bp, probe
agccaaattgactctctaaatctgg

SEQ ID NO: 137489 - DNA, 25 bp, probe
agcgcaaagtgacacgaacgatctt

SEQ ID NO: 137490 - DNA, 25 bp, probe
agcgcaaggtgacacgcatgatcct

SEQ ID NO: 137491 - DNA, 25 bp, probe
agcgacgtggtgaagatctgtgact

SEQ ID NO: 137492 - DNA, 25 bp, probe
agcgacgtggtgaagatctgtgact

SEQ ID NO: 137493 - DNA, 25 bp, probe
agcgcatccgggagatcatggccat

SEQ ID NO: 137494 - DNA, 25 bp, probe
agcccacactgctggacatggacat

SEQ ID NO: 137495 - DNA, 25 bp, probe
agcccacactgctggacatggacat

SEQ ID NO: 137496 - DNA, 25 bp, probe
agccctgaagcttgctgagaggcca

SEQ ID NO: 137497 - DNA, 25 bp, probe
agcgcagggagatgctgaaggaccc

SEQ ID NO: 137498 - DNA, 25 bp, probe
agcgcaggcgctcggagaagaaaat

SEQ ID NO: 137499 - DNA, 25 bp, probe
agcgcaagcgctcggagcgcaagat

SEQ ID NO: 137500 - DNA, 25 bp, probe
agcgacctgttgcacatgagcgagg

SEQ ID NO: 137501 - DNA, 25 bp, probe
agcgcactgctgttcagatagggga

SEQ ID NO: 137502 - DNA, 25 bp, probe
agccctgctgatccaaaaggctctg

SEQ ID NO: 137503 - DNA, 25 bp, probe
agccctgctgatccaaaaggctctg

SEQ ID NO: 137504 - DNA, 25 bp, probe
agcccatttctggtaagagcctgaa

SEQ ID NO: 137505 - DNA, 25 bp, probe
agccgcagacctactaaaacatgag

SEQ ID NO: 137506 - DNA, 25 bp, probe
agcccatcacaggccaacaaaatga

SEQ ID NO: 137507 - DNA, 25 bp, probe
agccatcaacatcacaaataatgaa

SEQ ID NO: 137508 - DNA, 25 bp, probe
agccacatatcacaaacgactacgg

SEQ ID NO: 137509 - DNA, 25 bp, probe
agcctcaaagtgcaccgactagttg

SEQ ID NO: 137510 - DNA, 25 bp, probe
agcgcccaagctcagcttagaagtt

SEQ ID NO: 137511 - DNA, 25 bp, probe
agccttctcaatccaccttgaagtt

SEQ ID NO: 137512 - DNA, 25 bp, probe
agccattaaaatcactgcgcaagtt

SEQ ID NO: 137513 - DNA, 25 bp, probe
agcctttaagctgaccacagagttt

SEQ ID NO: 137514 - DNA, 25 bp, probe
agccttacaccttaactagctgctg

SEQ ID NO: 137515 - DNA, 25 bp, probe
agcctatatactaactactagtgct

SEQ ID NO: 137516 - DNA, 25 bp, probe
agccttccagccactgagaatttga

SEQ ID NO: 137517 - DNA, 25 bp, probe
agccttccagccactgagaatttga

SEQ ID NO: 137518 - DNA, 25 bp, probe
agcccgctgaccatggaagatcttg

SEQ ID NO: 137519 - DNA, 25 bp, probe
agcgtggctaccaggagagcaggtg

SEQ ID NO: 137520 - DNA, 25 bp, probe
agccgtgtagccaggcaacagtctg

SEQ ID NO: 137521 - DNA, 25 bp, probe
agccggctgaaagcggagctgtctg

SEQ ID NO: 137522 - DNA, 25 bp, probe
agcccggacaggtgccaagactggc

SEQ ID NO: 137523 - DNA, 25 bp, probe
agcccgaggaggtgtctcaggctgc

SEQ ID NO: 137524 - DNA, 25 bp, probe
agcccgaggaggtgtctcaggctgc

SEQ ID NO: 137525 - DNA, 25 bp, probe
agccacgaggtggtagctctgagcc

SEQ ID NO: 137526 - DNA, 25 bp, probe
agccctggtgccttggcagagagac

SEQ ID NO: 137527 - DNA, 25 bp, probe
agccctggtgccactcagagtggag

SEQ ID NO: 137528 - DNA, 25 bp, probe
agccctggtgccactcagagtggag

SEQ ID NO: 137529 - DNA, 25 bp, probe
agccctggtggtagctgtagtggca

SEQ ID NO: 137530 - DNA, 25 bp, probe
agcccagacgagtagtgtgagctgc

SEQ ID NO: 137531 - DNA, 25 bp, probe
agccccactcatgatggaagtgcct

SEQ ID NO: 137532 - DNA, 25 bp, probe
agccctcatcttgaagggcccagga

SEQ ID NO: 137533 - DNA, 25 bp, probe
agcccctctagcagagtggggcgga

SEQ ID NO: 137534 - DNA, 25 bp, probe
agcgatcctaggtaggggtggctgg

SEQ ID NO: 137535 - DNA, 25 bp, probe
agcgttcttggaagcatggggagtg

SEQ ID NO: 137536 - DNA, 25 bp, probe
agcctttctgtaacatgcggccgtc

SEQ ID NO: 137537 - DNA, 25 bp, probe
agccctttggagaacgccagtctcc

SEQ ID NO: 137538 - DNA, 25 bp, probe
agccctattagaatatgctgccgtt

SEQ ID NO: 137539 - DNA, 25 bp, probe
agccctattagaatatgctgccgtt

SEQ ID NO: 137540 - DNA, 25 bp, probe
agccctacataggattctcagtgct

SEQ ID NO: 137541 - DNA, 25 bp, probe
agccctgagcatgctgtctgaaggt

SEQ ID NO: 137542 - DNA, 25 bp, probe
agcccatatcatctctgctgatacg

SEQ ID NO: 137543 - DNA, 25 bp, probe
agccacagacagcctacttgacggc

SEQ ID NO: 137544 - DNA, 25 bp, probe
agccgcaacccaagcagatgacagg

SEQ ID NO: 137545 - DNA, 25 bp, probe
accacaccttctacaatgagctgcg

SEQ ID NO: 137546 - DNA, 25 bp, probe
accacacgagcctcgtggtctacca

SEQ ID NO: 137547 - DNA, 25 bp, probe
accacacgagcctcgtggtctacca

SEQ ID NO: 137548 - DNA, 25 bp, probe
agccaccgacggaggcagacaagcc

SEQ ID NO: 137549 - DNA, 25 bp, probe
agccctggcctgtggagagaaagcc

SEQ ID NO: 137550 - DNA, 25 bp, probe
agcccaggtggacagagaaaatgac

SEQ ID NO: 137551 - DNA, 25 bp, probe
agccgaggctgccaccaaagaaatt

SEQ ID NO: 137552 - DNA, 25 bp, probe
agcctgggggcacctggaaaattca

SEQ ID NO: 137553 - DNA, 25 bp, probe
agccggtggacagcggaacatatga

SEQ ID NO: 137554 - DNA, 25 bp, probe
agcccagttggatcagtttgataga

SEQ ID NO: 137555 - DNA, 25 bp, probe
agcccaatcattttcagtctaagga

SEQ ID NO: 137556 - DNA, 25 bp, probe
agccgctgccattttattaaagtgt

SEQ ID NO: 137557 - DNA, 25 bp, probe
agccgctgccattttattaaagtgt

SEQ ID NO: 137558 - DNA, 25 bp, probe
agcctggcctcaactctaaaagtgt

SEQ ID NO: 137559 - DNA, 25 bp, probe
agcctgtgggacactatgaagaggt

SEQ ID NO: 137560 - DNA, 25 bp, probe
agcctgtgggacactatgaagaggt

SEQ ID NO: 137561 - DNA, 25 bp, probe
agccgcgggaggctggaagggctgg

SEQ ID NO: 137562 - DNA, 25 bp, probe
agccaccgccggcagaggagggtgg

SEQ ID NO: 137563 - DNA, 25 bp, probe
agccccccaaaagcgagcatggtgg

SEQ ID NO: 137564 - DNA, 25 bp, probe
cttcccgtaaatctcaggcttctgg

SEQ ID NO: 137565 - DNA, 25 bp, probe
cttcccgtaaatctcaggcttctgg

SEQ ID NO: 137566 - DNA, 25 bp, probe
accccgtataacatcatggtcctgg

SEQ ID NO: 137567 - DNA, 25 bp, probe
agccccttaaatatcttgtctacat

SEQ ID NO: 137568 - DNA, 25 bp, probe
agcccgaaaatctcttgtactacag

SEQ ID NO: 137569 - DNA, 25 bp, probe
agccctgaaagctgtcatttccttc

SEQ ID NO: 137570 - DNA, 25 bp, probe
agccctgaaagctgtcatttccttc

SEQ ID NO: 137571 - DNA, 25 bp, probe
agccctgataggctgtttgttcctc

SEQ ID NO: 137572 - DNA, 25 bp, probe
agccacggcagtgtttttggtctgc

SEQ ID NO: 137573 - DNA, 25 bp, probe
agccacaggccttatttcatatgtt

SEQ ID NO: 137574 - DNA, 25 bp, probe
agcccagccagatgagtgctctgtg

SEQ ID NO: 137575 - DNA, 25 bp, probe
agccctggcaattttgcactgtgtg

SEQ ID NO: 137576 - DNA, 25 bp, probe
agccctagccattggtgcacaggat

SEQ ID NO: 137577 - DNA, 25 bp, probe
agccctatgacttgtatgacaactc

SEQ ID NO: 137578 - DNA, 25 bp, probe
agccctgtgcaccagaagatctaca

SEQ ID NO: 137579 - DNA, 25 bp, probe
agccttgtgcagacaatgctgtgct

SEQ ID NO: 137580 - DNA, 25 bp, probe
agcctctgcacacacattggcgggt

SEQ ID NO: 137581 - DNA, 25 bp, probe
agcctgcgcagacgacaaggctcgg

SEQ ID NO: 137582 - DNA, 25 bp, probe
agccggacgagagcagcgcagcggc

SEQ ID NO: 137583 - DNA, 25 bp, probe
agcccgtcaagaggcagccgaggtc

SEQ ID NO: 137584 - DNA, 25 bp, probe
agccgcgtacataccaggctgggta

SEQ ID NO: 137585 - DNA, 25 bp, probe
agcgccaggactaagctggggtgct

SEQ ID NO: 137586 - DNA, 25 bp, probe
agccggagactttgcggattgttct

SEQ ID NO: 137587 - DNA, 25 bp, probe
agccatggtaccagggttcttttgc

SEQ ID NO: 137588 - DNA, 25 bp, probe
agccggaacctgcattgttttataa

SEQ ID NO: 137589 - DNA, 25 bp, probe
agccactgagacattcttgttttat

SEQ ID NO: 137590 - DNA, 25 bp, probe
agccttcagcacaccaatggtgtca

SEQ ID NO: 137591 - DNA, 25 bp, probe
agcctttgcactgctctatgcagct

SEQ ID NO: 137592 - DNA, 25 bp, probe
agcctttgcactgctctatgcagct

SEQ ID NO: 137593 - DNA, 25 bp, probe
agcctttgcactgctctatgcagct

SEQ ID NO: 137594 - DNA, 25 bp, probe
agcctgcctcaagctatgtgagctc

SEQ ID NO: 137595 - DNA, 25 bp, probe
agcctcttaaccatggcatctatgt

SEQ ID NO: 137596 - DNA, 25 bp, probe
agccccaagagcaactgtgattttt

SEQ ID NO: 137597 - DNA, 25 bp, probe
agccctccaaagatgagtctctctt

SEQ ID NO: 137598 - DNA, 25 bp, probe
agccgtacccagagggcttgcattg

SEQ ID NO: 137599 - DNA, 25 bp, probe
agccccacctgcaggggcttagtgt

SEQ ID NO: 137600 - DNA, 25 bp, probe
accagcccgttcaggactttgaatg

SEQ ID NO: 137601 - DNA, 25 bp, probe
accagcccgttcaggactttgaatg

SEQ ID NO: 137602 - DNA, 25 bp, probe
accaaccagttcagaatgatacgga

SEQ ID NO: 137603 - DNA, 25 bp, probe
acgaaccggccaagaggttctccat

SEQ ID NO: 137604 - DNA, 25 bp, probe
accaactcaacaaagcctgttcctt

SEQ ID NO: 137605 - DNA, 25 bp, probe
accaactgccacaataccaactaaa

SEQ ID NO: 137606 - DNA, 25 bp, probe
accaacgtcatcgttgccaacacaa

SEQ ID NO: 137607 - DNA, 25 bp, probe
accaacgtactgtgacctaggaaag

SEQ ID NO: 137608 - DNA, 25 bp, probe
acctactgaacgtgaacgaacagaa

SEQ ID NO: 137609 - DNA, 25 bp, probe
acctgaagacctctaacaaccggct

SEQ ID NO: 137610 - DNA, 25 bp, probe
accaggagttcctgaacgagaaggc

SEQ ID NO: 137611 - DNA, 25 bp, probe
accaaggtgtaaggaaagcaaaatg

SEQ ID NO: 137612 - DNA, 25 bp, probe
accagtggttaacaggcaataaact

SEQ ID NO: 137613 - DNA, 25 bp, probe
accagtggtagctccaccaaatcat

SEQ ID NO: 137614 - DNA, 25 bp, probe
agcctggactaggactcccataaat

SEQ ID NO: 137615 - DNA, 25 bp, probe
agcctggatgaagactccaaaatca

SEQ ID NO: 137616 - DNA, 25 bp, probe
agcctctaaaggccacaaagaatga

SEQ ID NO: 137617 - DNA, 25 bp, probe
agcctctaaaggccacaaagaatga

SEQ ID NO: 137618 - DNA, 25 bp, probe
agcctctaactggatcttaaggact

SEQ ID NO: 137619 - DNA, 25 bp, probe
agcctcgtaccaatcatcttgggac

SEQ ID NO: 137620 - DNA, 25 bp, probe
agccggctacctatttggcagtgac

SEQ ID NO: 137621 - DNA, 25 bp, probe
agccggctacctatttggcagtgac

SEQ ID NO: 137622 - DNA, 25 bp, probe
agccggctacgcactgtatggcagt

SEQ ID NO: 137623 - DNA, 25 bp, probe
agccggatatcgacacatttccctt

SEQ ID NO: 137624 - DNA, 25 bp, probe
agccggcagatccggcagttccact

SEQ ID NO: 137625 - DNA, 25 bp, probe
agccgcatgaaccggatgtctcggc

SEQ ID NO: 137626 - DNA, 25 bp, probe
agcccatgaagcccaagatgctggg

SEQ ID NO: 137627 - DNA, 25 bp, probe
agcccagcctgaccaatatgatgaa

SEQ ID NO: 137628 - DNA, 25 bp, probe
agccatgaccgaccaatatgttgac

SEQ ID NO: 137629 - DNA, 25 bp, probe
accaatcccagctctagtggcaagt

SEQ ID NO: 137630 - DNA, 25 bp, probe
agccttcgccaattcttggagagtg

SEQ ID NO: 137631 - DNA, 25 bp, probe
agccttctggttttatgggtcagag

SEQ ID NO: 137632 - DNA, 25 bp, probe
agccatgggggtttagggctggagg

SEQ ID NO: 137633 - DNA, 25 bp, probe
agcctgggctgtatgtagggtggaa

SEQ ID NO: 137634 - DNA, 25 bp, probe
agcctgtggtgtgacctggggagaa

SEQ ID NO: 137635 - DNA, 25 bp, probe
agccagtgtggggaccatggagaca

SEQ ID NO: 137636 - DNA, 25 bp, probe
agccatggtggagacctgcgttatc

SEQ ID NO: 137637 - DNA, 25 bp, probe
agccatgtgtggaaacccactattt

SEQ ID NO: 137638 - DNA, 25 bp, probe
agccattggggaccacttctataag

SEQ ID NO: 137639 - DNA, 25 bp, probe
agcctgtggggaccttatgctggct

SEQ ID NO: 137640 - DNA, 25 bp, probe
agccctggaggacgttggagactgg

SEQ ID NO: 137641 - DNA, 25 bp, probe
agccctggaggacgttggagactgg

SEQ ID NO: 137642 - DNA, 25 bp, probe
agccccgtggagatgtggaatgggg

SEQ ID NO: 137643 - DNA, 25 bp, probe
accgcctgggacggaagatcgggag

SEQ ID NO: 137644 - DNA, 25 bp, probe
agcccagcagggcctcaaagttggg

SEQ ID NO: 137645 - DNA, 25 bp, probe
agcccgaggagcccaagagatctgg

SEQ ID NO: 137646 - DNA, 25 bp, probe
agcgcccaggagggcatagggcagc

SEQ ID NO: 137647 - DNA, 25 bp, probe
agccctctggaggtagttggagcca

SEQ ID NO: 137648 - DNA, 25 bp, probe
agccctccttggagctggagagcac

SEQ ID NO: 137649 - DNA, 25 bp, probe
agcgcttctccaaggtgctggagga

SEQ ID NO: 137650 - DNA, 25 bp, probe
agcgcttctccaaggtgctggagga

SEQ ID NO: 137651 - DNA, 25 bp, probe
accattctccaagtgacgaacttgc

SEQ ID NO: 137652 - DNA, 25 bp, probe
agccctattctagaggatacttgaa

SEQ ID NO: 137653 - DNA, 25 bp, probe
agccctttattgacatggttctata

SEQ ID NO: 137654 - DNA, 25 bp, probe
agccctgtctcaagtcttgatgttt

SEQ ID NO: 137655 - DNA, 25 bp, probe
agccctatgctgagcttgtagcctt

SEQ ID NO: 137656 - DNA, 25 bp, probe
agcctctgcaggggctttgagcacg

SEQ ID NO: 137657 - DNA, 25 bp, probe
agcctctgcaggggctttgagcacg

SEQ ID NO: 137658 - DNA, 25 bp, probe
agccatccatgaggcatgctttgga

SEQ ID NO: 137659 - DNA, 25 bp, probe
agccgccagagccatgtctgggagc

SEQ ID NO: 137660 - DNA, 25 bp, probe
agcccctgatgacttgtgggtgctc

SEQ ID NO: 137661 - DNA, 25 bp, probe
agccccagcatctttgatgtggatt

SEQ ID NO: 137662 - DNA, 25 bp, probe
agccccagcatctttgatgtggatt

SEQ ID NO: 137663 - DNA, 25 bp, probe
agccctacacagatatttgagcatg

SEQ ID NO: 137664 - DNA, 25 bp, probe
agcctacacaaaaatctgtgaccca

SEQ ID NO: 137665 - DNA, 25 bp, probe
acctgaacaaatggtgcttaccctt

SEQ ID NO: 137666 - DNA, 25 bp, probe
accaagaccaatgggcagctggccc

SEQ ID NO: 137667 - DNA, 25 bp, probe
agcgctcaaaccagtgaggctgcac

SEQ ID NO: 137668 - DNA, 25 bp, probe
agcgccagagatccttaaatgctcc

SEQ ID NO: 137669 - DNA, 25 bp, probe
agcgccatggagacggtacagctga

SEQ ID NO: 137670 - DNA, 25 bp, probe
agcgctgcgaggaggtagaggccac

SEQ ID NO: 137671 - DNA, 25 bp, probe
agcctggagtgggagaaaaccacca

SEQ ID NO: 137672 - DNA, 25 bp, probe
agccagctgcacaggaaaaaccacc

SEQ ID NO: 137673 - DNA, 25 bp, probe
accacagccaagcagattaacccca

SEQ ID NO: 137674 - DNA, 25 bp, probe
acctcgaacagtcatcaaagcaccc

SEQ ID NO: 137675 - DNA, 25 bp, probe
acccgaggtcatcaaacagtcggcc

SEQ ID NO: 137676 - DNA, 25 bp, probe
accaaaggctctgcaaatgaccggc

SEQ ID NO: 137677 - DNA, 25 bp, probe
accacaaggtttcatagccctgtct

SEQ ID NO: 137678 - DNA, 25 bp, probe
agcccaaaggttcctaagcctggct

SEQ ID NO: 137679 - DNA, 25 bp, probe
agccaaaagaaaggccagcacctga

SEQ ID NO: 137680 - DNA, 25 bp, probe
agccatcaacagcaagcagctcacc

SEQ ID NO: 137681 - DNA, 25 bp, probe
agcccagacactgagtgccattctc

SEQ ID NO: 137682 - DNA, 25 bp, probe
agcccaggacatgagtgtctgtcca

SEQ ID NO: 137683 - DNA, 25 bp, probe
agccctggaatgtgcattcctgcca

SEQ ID NO: 137684 - DNA, 25 bp, probe
accaatggagtatgcttccctcttc

SEQ ID NO: 137685 - DNA, 25 bp, probe
agccaacaggtactcttctgtttgt

SEQ ID NO: 137686 - DNA, 25 bp, probe
agcctagaggtggcttctggcagcc

SEQ ID NO: 137687 - DNA, 25 bp, probe
agcctaggcatctctttggctgaac

SEQ ID NO: 137688 - DNA, 25 bp, probe
agcctgagaatgtgcttctggatga

SEQ ID NO: 137689 - DNA, 25 bp, probe
agcctgagaatgtgcttctggatga

SEQ ID NO: 137690 - DNA, 25 bp, probe
agcctgagtatgtgctcttggctgc

SEQ ID NO: 137691 - DNA, 25 bp, probe
agccacagaatatggcttggcctat

SEQ ID NO: 137692 - DNA, 25 bp, probe
agccaaaatcatagagcttgcctta

SEQ ID NO: 137693 - DNA, 25 bp, probe
agccataaagtgccagtttgcttag

SEQ ID NO: 137694 - DNA, 25 bp, probe
agccagactggcacagttttctgag

SEQ ID NO: 137695 - DNA, 25 bp, probe
accacaatgacgacctgttttgatt

SEQ ID NO: 137696 - DNA, 25 bp, probe
accacacagactacaagttccggct

SEQ ID NO: 137697 - DNA, 25 bp, probe
acgaacactacgagtaccggcatgt

SEQ ID NO: 137698 - DNA, 25 bp, probe
acgaacactaggcggcaccgttggt

SEQ ID NO: 137699 - DNA, 25 bp, probe
acgaacactaggcggcaccgttggt

SEQ ID NO: 137700 - DNA, 25 bp, probe
acaaagcaaaggcagtcccgggaga

SEQ ID NO: 137701 - DNA, 25 bp, probe
accggaaagatgctgtccttggcgg

SEQ ID NO: 137702 - DNA, 25 bp, probe
agcctgtgaaagtgatttatttgtg

SEQ ID NO: 137703 - DNA, 25 bp, probe
agccttgaagatgattctaacctgt

SEQ ID NO: 137704 - DNA, 25 bp, probe
agccgtgcaaatgcagctgaaacca

SEQ ID NO: 137705 - DNA, 25 bp, probe
agccgactcacagtcctgagagaat

SEQ ID NO: 137706 - DNA, 25 bp, probe
agccagaggccaatgctcagagaag

SEQ ID NO: 137707 - DNA, 25 bp, probe
agccagaggccaatgctcagagaag

SEQ ID NO: 137708 - DNA, 25 bp, probe
agccaggatggcccgaggaagaggc

SEQ ID NO: 137709 - DNA, 25 bp, probe
agccgagaacccaggcaacaggaag

SEQ ID NO: 137710 - DNA, 25 bp, probe
agccgaggaaccaggacaagcgcac

SEQ ID NO: 137711 - DNA, 25 bp, probe
agcctgcatggcaccaagtacaaag

SEQ ID NO: 137712 - DNA, 25 bp, probe
agcctgcatggcaccaagtacaaag

SEQ ID NO: 137713 - DNA, 25 bp, probe
agcctgctgtgtgccacaagacgga

SEQ ID NO: 137714 - DNA, 25 bp, probe
agcccgcttcatcgccaagagcggg

SEQ ID NO: 137715 - DNA, 25 bp, probe
actatcgatcttgccaaaggagtga

SEQ ID NO: 137716 - DNA, 25 bp, probe
actaccgtttcacaaggattgaaag

SEQ ID NO: 137717 - DNA, 25 bp, probe
accaactggtgatggaaggttacaa

SEQ ID NO: 137718 - DNA, 25 bp, probe
accacctatttataaggtctcacct

SEQ ID NO: 137719 - DNA, 25 bp, probe
taccaagtagttcaaaagtatttgt

SEQ ID NO: 137720 - DNA, 25 bp, probe
accaactactatcaccatgaccatt

SEQ ID NO: 137721 - DNA, 25 bp, probe
accagacacgtacaaaatccagcta

SEQ ID NO: 137722 - DNA, 25 bp, probe
accagacacgtacaaaatccagcta

SEQ ID NO: 137723 - DNA, 25 bp, probe
accaaggaacatcaacaaccagtca

SEQ ID NO: 137724 - DNA, 25 bp, probe
agccaaggggctgaagaaggcattg

SEQ ID NO: 137725 - DNA, 25 bp, probe
agccatagggtggagaaaggatatt

SEQ ID NO: 137726 - DNA, 25 bp, probe
agcctggggtcacttacggatgagt

SEQ ID NO: 137727 - DNA, 25 bp, probe
agcctggggtcacttacggatgagt

SEQ ID NO: 137728 - DNA, 25 bp, probe
agcctggggtattgtcaccgacagt

SEQ ID NO: 137729 - DNA, 25 bp, probe
agccctgagggaagtactcgcacag

SEQ ID NO: 137730 - DNA, 25 bp, probe
agcccggggaggatgagctcacaga

SEQ ID NO: 137731 - DNA, 25 bp, probe
agccctggaggaggaggtgctcacc

SEQ ID NO: 137732 - DNA, 25 bp, probe
agccgcatgagctggggaatccagc

SEQ ID NO: 137733 - DNA, 25 bp, probe
agcctgagagctccaaggaacaagc

SEQ ID NO: 137734 - DNA, 25 bp, probe
agcctgatcaagccagaggagaacc

SEQ ID NO: 137735 - DNA, 25 bp, probe
agccgcaaaggcagcaggctaccgg

SEQ ID NO: 137736 - DNA, 25 bp, probe
agcccacgtggatgcagatgtgcac

SEQ ID NO: 137737 - DNA, 25 bp, probe
agcccacgtggatgcagacgtgcac

SEQ ID NO: 137738 - DNA, 25 bp, probe
agcccacgagttgctgaatggcagc

SEQ ID NO: 137739 - DNA, 25 bp, probe
agcctccagatggtccaagatccag

SEQ ID NO: 137740 - DNA, 25 bp, probe
agccccatatctggccaagttcaag

SEQ ID NO: 137741 - DNA, 25 bp, probe
agcccctgttctggcagagttgaag

SEQ ID NO: 137742 - DNA, 25 bp, probe
agcctcctgagtagctgggactata

SEQ ID NO: 137743 - DNA, 25 bp, probe
agcctcctggtgactgatggacgag

SEQ ID NO: 137744 - DNA, 25 bp, probe
agccccatagtgctcaggaggcagc

SEQ ID NO: 137745 - DNA, 25 bp, probe
agcctcgacagtcgccaagtggacc

SEQ ID NO: 137746 - DNA, 25 bp, probe
agcctgcggcagagacaaatggacc

SEQ ID NO: 137747 - DNA, 25 bp, probe
agcctggctgcaaagaagaatcaac

SEQ ID NO: 137748 - DNA, 25 bp, probe
agcctagcatcccatgtcaaaaact

SEQ ID NO: 137749 - DNA, 25 bp, probe
agcctagcatcccatgtcaaaaact

SEQ ID NO: 137750 - DNA, 25 bp, probe
agcctagcaacattgttgtgaaatc

SEQ ID NO: 137751 - DNA, 25 bp, probe
agcctgagctacttcaagctcatgt

SEQ ID NO: 137752 - DNA, 25 bp, probe
agcctcagcatacttcttgctgctt

SEQ ID NO: 137753 - DNA, 25 bp, probe
agccgcagcgatgtctggagctatg

SEQ ID NO: 137754 - DNA, 25 bp, probe
agccgcagcgcagactggcggagaa

SEQ ID NO: 137755 - DNA, 25 bp, probe
agcccagtacacaggctgtggaacc

SEQ ID NO: 137756 - DNA, 25 bp, probe
gtgccaggttcccggttggaacctg

SEQ ID NO: 137757 - DNA, 25 bp, probe
acctggtctactgggttggatacct

SEQ ID NO: 137758 - DNA, 25 bp, probe
acctggtctactgggttggatacct

SEQ ID NO: 137759 - DNA, 25 bp, probe
acctaggttcacggtctgagtaaca

SEQ ID NO: 137760 - DNA, 25 bp, probe
acctgcggatctacgtgtacgtcaa

SEQ ID NO: 137761 - DNA, 25 bp, probe
accaaggtctacaactacgtgaaat

SEQ ID NO: 137762 - DNA, 25 bp, probe
accaagaccccaaaaagtgactcat

SEQ ID NO: 137763 - DNA, 25 bp, probe
accaaacacccagccaagcggctgg

SEQ ID NO: 137764 - DNA, 25 bp, probe
accaacaccagggtaagatgggtcg

SEQ ID NO: 137765 - DNA, 25 bp, probe
accaaagccggtggacagcggaaca

SEQ ID NO: 137766 - DNA, 25 bp, probe
agccaacgcctgtgggctgctaaaa

SEQ ID NO: 137767 - DNA, 25 bp, probe
agcccctgtgtgtgctcagtgccat

SEQ ID NO: 137768 - DNA, 25 bp, probe
agccccgtgctgtgtatgtaacaca

SEQ ID NO: 137769 - DNA, 25 bp, probe
agccctccaatatgctagtaaacac

SEQ ID NO: 137770 - DNA, 25 bp, probe
agccctcaagctatgctaggaaaag

SEQ ID NO: 137771 - DNA, 25 bp, probe
agccctatgcaaacccaggcaagaa

SEQ ID NO: 137772 - DNA, 25 bp, probe
agccacttctaagcacaaccagagg

SEQ ID NO: 137773 - DNA, 25 bp, probe
accactatgcaacctaaagccatgg

SEQ ID NO: 137774 - DNA, 25 bp, probe
agcctcaagcaaggataccgccatg

SEQ ID NO: 137775 - DNA, 25 bp, probe
agcctcacacaagcagaaacactcc

SEQ ID NO: 137776 - DNA, 25 bp, probe
agcctacaacatgctgagctacagc

SEQ ID NO: 137777 - DNA, 25 bp, probe
agcctacaacatgctgagctacagc

SEQ ID NO: 137778 - DNA, 25 bp, probe
agccctcagaagaccagctgtagcc

SEQ ID NO: 137779 - DNA, 25 bp, probe
agccctcagaagaccagctgtagcc

SEQ ID NO: 137780 - DNA, 25 bp, probe
accctcaagtctgacgatgacacct

SEQ ID NO: 137781 - DNA, 25 bp, probe
agccccaatagagcttatacacatc

SEQ ID NO: 137782 - DNA, 25 bp, probe
agccccagtagagcttatacatatc

SEQ ID NO: 137783 - DNA, 25 bp, probe
accagtcctagagcctgtagctgct

SEQ ID NO: 137784 - DNA, 25 bp, probe
accagtacaagagcatccctgtgga

SEQ ID NO: 137785 - DNA, 25 bp, probe
accaaaaagagcatccctatgggct

SEQ ID NO: 137786 - DNA, 25 bp, probe
accaaagacatgggtgcccaggccc

SEQ ID NO: 137787 - DNA, 25 bp, probe
acgcaaagctacaggcgccagggtc

SEQ ID NO: 137788 - DNA, 25 bp, probe
acgcaactgtctagtgggccaggga

SEQ ID NO: 137789 - DNA, 25 bp, probe
accatgaccactgtgggctacgggg

SEQ ID NO: 137790 - DNA, 25 bp, probe
accaaagacagtggtggtccggtgg

SEQ ID NO: 137791 - DNA, 25 bp, probe
accaaagtcagtgacttccgggagt

SEQ ID NO: 137792 - DNA, 25 bp, probe
gcccaaactaaagctttcgggagtg

SEQ ID NO: 137793 - DNA, 25 bp, probe
accagggtaagatgggtcgtgggtg

SEQ ID NO: 137794 - DNA, 25 bp, probe
accagcgaggaagaggtggggtggc

SEQ ID NO: 137795 - DNA, 25 bp, probe
accactgggtgtggacggtgtgggg

SEQ ID NO: 137796 - DNA, 25 bp, probe
accaagccggagcacgaggatcagg

SEQ ID NO: 137797 - DNA, 25 bp, probe
accatagtgcggaaaggcggaagat

SEQ ID NO: 137798 - DNA, 25 bp, probe
accagattctggtacaggtcaaaga

SEQ ID NO: 137799 - DNA, 25 bp, probe
actagtttgctttgctgaccaaatg

SEQ ID NO: 137800 - DNA, 25 bp, probe
agcctatttgcttagtgaaacatta

SEQ ID NO: 137801 - DNA, 25 bp, probe
agcctatttgcttagtgaaacatta

SEQ ID NO: 137802 - DNA, 25 bp, probe
agcctttatctatatgacaacacat

SEQ ID NO: 137803 - DNA, 25 bp, probe
agcctcatacctacatcagacaaaa

SEQ ID NO: 137804 - DNA, 25 bp, probe
agcctgcttcctgcatgcataaaat

SEQ ID NO: 137805 - DNA, 25 bp, probe
agcccgctcaatgcagaaaaactag

SEQ ID NO: 137806 - DNA, 25 bp, probe
agccctgcttactaaaagtattatt

SEQ ID NO: 137807 - DNA, 25 bp, probe
agcccctgaacataataccatctgc

SEQ ID NO: 137808 - DNA, 25 bp, probe
agccccgagaaatgcgagccatggc

SEQ ID NO: 137809 - DNA, 25 bp, probe
agccaacgggcttatgcagaccagc

SEQ ID NO: 137810 - DNA, 25 bp, probe
agccccgggcattattattattatt

SEQ ID NO: 137811 - DNA, 25 bp, probe
accacgcctggctaattttttgtat

SEQ ID NO: 137812 - DNA, 25 bp, probe
accaactgctgagatttttatgtat

SEQ ID NO: 137813 - DNA, 25 bp, probe
accaactgctgagatttttatgtat

SEQ ID NO: 137814 - DNA, 25 bp, probe
accaagtgctgctgttttttcaaac

SEQ ID NO: 137815 - DNA, 25 bp, probe
accaatgagatcatgctggttctct

SEQ ID NO: 137816 - DNA, 25 bp, probe
accatggaatttggcctttcagaaa

SEQ ID NO: 137817 - DNA, 25 bp, probe
accaggaatggatgtcgctaatcat

SEQ ID NO: 137818 - DNA, 25 bp, probe
agccaggaactatgtctgtgcaagc

SEQ ID NO: 137819 - DNA, 25 bp, probe
accacgaagacattttcgggctcac

SEQ ID NO: 137820 - DNA, 25 bp, probe
accaaacaacattatgttgggggat

SEQ ID NO: 137821 - DNA, 25 bp, probe
acctaaaatcaatgatcgagaaggt

SEQ ID NO: 137822 - DNA, 25 bp, probe
accgaaaatgctgatgtccagaagc

SEQ ID NO: 137823 - DNA, 25 bp, probe
accaaacaatcccagtggctcaatg

SEQ ID NO: 137824 - DNA, 25 bp, probe
accaaacaatcccagtggctcaatg

SEQ ID NO: 137825 - DNA, 25 bp, probe
agccacaaacccatctagtcataga

SEQ ID NO: 137826 - DNA, 25 bp, probe
accaaagacctacttttcatagaat

SEQ ID NO: 137827 - DNA, 25 bp, probe
agccaaaactttcccctgatggatt

SEQ ID NO: 137828 - DNA, 25 bp, probe
accagaagactttccgcgtggtggc

SEQ ID NO: 137829 - DNA, 25 bp, probe
accacaagcgttacctggtgggcac

SEQ ID NO: 137830 - DNA, 25 bp, probe
agccggactatgacatccgggccga

SEQ ID NO: 137831 - DNA, 25 bp, probe
agccaggactctgatccagggctgg

SEQ ID NO: 137832 - DNA, 25 bp, probe
agccgggactggacacaagccaggg

SEQ ID NO: 137833 - DNA, 25 bp, probe
accaaggcctgggatcaacctgggc

SEQ ID NO: 137834 - DNA, 25 bp, probe
acgcaagtttatggtcacccttgcc

SEQ ID NO: 137835 - DNA, 25 bp, probe
accaactgcttagcacccctggcca

SEQ ID NO: 137836 - DNA, 25 bp, probe
accaactttagagaacctgcctgag

SEQ ID NO: 137837 - DNA, 25 bp, probe
accaactaattgactaacaccacca

SEQ ID NO: 137838 - DNA, 25 bp, probe
ggcctacgaattggccgactacagc

SEQ ID NO: 137839 - DNA, 25 bp, probe
agcctaggaagtgccctcgagcact

SEQ ID NO: 137840 - DNA, 25 bp, probe
agccctgtgaagtgacctcagtgag

SEQ ID NO: 137841 - DNA, 25 bp, probe
agcccccacagataacatcagctga

SEQ ID NO: 137842 - DNA, 25 bp, probe
agcccccagcagtacaagaactgtg

SEQ ID NO: 137843 - DNA, 25 bp, probe
agcctctctcagcaaaaagccagtt

SEQ ID NO: 137844 - DNA, 25 bp, probe
agccttttggctataaccagtctca

SEQ ID NO: 137845 - DNA, 25 bp, probe
acctctgttcagtgtaaatagttac

SEQ ID NO: 137846 - DNA, 25 bp, probe
acctctgttcagtgtaaatagttac

SEQ ID NO: 137847 - DNA, 25 bp, probe
agcctctgttaaagtcattgacttt

SEQ ID NO: 137848 - DNA, 25 bp, probe
agccattgccaaaactcattgactt

SEQ ID NO: 137849 - DNA, 25 bp, probe
agccatcagccaagataaatctatc

SEQ ID NO: 137850 - DNA, 25 bp, probe
agcctcatcaatggaaacatctgtc

SEQ ID NO: 137851 - DNA, 25 bp, probe
agcctcatcaatggaaacatctgtc

SEQ ID NO: 137852 - DNA, 25 bp, probe
agcctcaagctttacacagctgtcc

SEQ ID NO: 137853 - DNA, 25 bp, probe
agcccgagattgtgcagctgctgat

SEQ ID NO: 137854 - DNA, 25 bp, probe
agcccgtgcatgaatgagggcagct

SEQ ID NO: 137855 - DNA, 25 bp, probe
agccgcttcatgagagtgcgcctgg

SEQ ID NO: 137856 - DNA, 25 bp, probe
agccgctgtcgaaatgggtcgagga

SEQ ID NO: 137857 - DNA, 25 bp, probe
agccactgtcaatgattagatcggg

SEQ ID NO: 137858 - DNA, 25 bp, probe
agccatgctttgtgactttcaagtt

SEQ ID NO: 137859 - DNA, 25 bp, probe
agccagctttgcaggttatcagaga

SEQ ID NO: 137860 - DNA, 25 bp, probe
agcctgtcctggctgatttcaggat

SEQ ID NO: 137861 - DNA, 25 bp, probe
agcctggccaagaaggtgatcattg

SEQ ID NO: 137862 - DNA, 25 bp, probe
agccgtggctgaggaggtgaacgcc

SEQ ID NO: 137863 - DNA, 25 bp, probe
agcctgggcgacagagcgagactcc

SEQ ID NO: 137864 - DNA, 25 bp, probe
agcctggacaacatgacctgcatcc

SEQ ID NO: 137865 - DNA, 25 bp, probe
agcctggataccaatgaggtgaccc

SEQ ID NO: 137866 - DNA, 25 bp, probe
agcctgcagtacatagagcgtgacg

SEQ ID NO: 137867 - DNA, 25 bp, probe
agcctgcagtacataaagtgtgatg

SEQ ID NO: 137868 - DNA, 25 bp, probe
accacgatcgattagactgggatga

SEQ ID NO: 137869 - DNA, 25 bp, probe
accacgatcgattagactgggatga

SEQ ID NO: 137870 - DNA, 25 bp, probe
accacgatcgattagactgggatga

SEQ ID NO: 137871 - DNA, 25 bp, probe
accacgatcgattagactgggatga

SEQ ID NO: 137872 - DNA, 25 bp, probe
accaatgattaccatgatgtcgtgg

SEQ ID NO: 137873 - DNA, 25 bp, probe
accaagatatcccaggacgtttgct

SEQ ID NO: 137874 - DNA, 25 bp, probe
accaagacgtgccaggtctgtactc

SEQ ID NO: 137875 - DNA, 25 bp, probe
accaagacgtgccaggtctgtactc

SEQ ID NO: 137876 - DNA, 25 bp, probe
accaagacgtgccaggtctgtactc

SEQ ID NO: 137877 - DNA, 25 bp, probe
agccatagagttggggcctctgacc

SEQ ID NO: 137878 - DNA, 25 bp, probe
agccatagagttggggcctctgacc

SEQ ID NO: 137879 - DNA, 25 bp, probe
agccaatgtggggggtcctgaagac

SEQ ID NO: 137880 - DNA, 25 bp, probe
agcctgtgtggggtggagccaaaca

SEQ ID NO: 137881 - DNA, 25 bp, probe
agcctgctggggatggtgccagctg

SEQ ID NO: 137882 - DNA, 25 bp, probe
accacgggtgtaagtgccatctggt

SEQ ID NO: 137883 - DNA, 25 bp, probe
agcctgtaggtgcagaggccctggc

SEQ ID NO: 137884 - DNA, 25 bp, probe
agcctggtgagtgacagcagcgcct

SEQ ID NO: 137885 - DNA, 25 bp, probe
agccttggacatggaggcctgacag

SEQ ID NO: 137886 - DNA, 25 bp, probe
agccttcagtgagcagtctgctgaa

SEQ ID NO: 137887 - DNA, 25 bp, probe
agccttcagtgagcagtctgctgaa

SEQ ID NO: 137888 - DNA, 25 bp, probe
agccttcatcgacagagcgctaagc

SEQ ID NO: 137889 - DNA, 25 bp, probe
agccttcctggaagaagccaacctc

SEQ ID NO: 137890 - DNA, 25 bp, probe
agccttctccacaaggaccagaggc

SEQ ID NO: 137891 - DNA, 25 bp, probe
agccttctccacaaggaccagaggc

SEQ ID NO: 137892 - DNA, 25 bp, probe
agccggcccagcaagatgaaacagg

SEQ ID NO: 137893 - DNA, 25 bp, probe
agccaatcccacagtgtaaaaattc

SEQ ID NO: 137894 - DNA, 25 bp, probe
agcctcctacacaggttagagcaac

SEQ ID NO: 137895 - DNA, 25 bp, probe
agccttcgaatccaggttcaagcca

SEQ ID NO: 137896 - DNA, 25 bp, probe
agccccaggaccaagcttaaggaga

SEQ ID NO: 137897 - DNA, 25 bp, probe
agccccatggaaatccccaaagagc

SEQ ID NO: 137898 - DNA, 25 bp, probe
agcctcctggaaagccaacgggatc

SEQ ID NO: 137899 - DNA, 25 bp, probe
agcctcctggaaagccaacgggatc

SEQ ID NO: 137900 - DNA, 25 bp, probe
agcctgcagctggattacgcaacag

SEQ ID NO: 137901 - DNA, 25 bp, probe
agcctcagcaggatgaccacaggca

SEQ ID NO: 137902 - DNA, 25 bp, probe
agccaatgctgggtgcagcccaagg

SEQ ID NO: 137903 - DNA, 25 bp, probe
agccagacgagcgagctggccaagg

SEQ ID NO: 137904 - DNA, 25 bp, probe
agccatgatagggaggaccagggca

SEQ ID NO: 137905 - DNA, 25 bp, probe
agccgcatcggcggagaccagggct

SEQ ID NO: 137906 - DNA, 25 bp, probe
agccgcatcggcggagaccagggct

SEQ ID NO: 137907 - DNA, 25 bp, probe
agccgcatcggcggagaccagggct

SEQ ID NO: 137908 - DNA, 25 bp, probe
agccgcaaggaccagatccagcggc

SEQ ID NO: 137909 - DNA, 25 bp, probe
agccaccagcaaacagacctgtggc

SEQ ID NO: 137910 - DNA, 25 bp, probe
agccatgggataaagatgcctggga

SEQ ID NO: 137911 - DNA, 25 bp, probe
agcctgggtgcaatgaaactgggag

SEQ ID NO: 137912 - DNA, 25 bp, probe
agccggtgtgcggtgaactctggca

SEQ ID NO: 137913 - DNA, 25 bp, probe
agccggtgtgcggtgaactctggca

SEQ ID NO: 137914 - DNA, 25 bp, probe
agccgttttggcaaactgctgctgc

SEQ ID NO: 137915 - DNA, 25 bp, probe
accagtgcttcttgcaaatccctgg

SEQ ID NO: 137916 - DNA, 25 bp, probe
accggcattttatgtactttgtcct

SEQ ID NO: 137917 - DNA, 25 bp, probe
accttcaatttatggtcttctgttt

SEQ ID NO: 137918 - DNA, 25 bp, probe
accttaagatttgtgatttcggcct

SEQ ID NO: 137919 - DNA, 25 bp, probe
acagttttatttgcctctactacgt

SEQ ID NO: 137920 - DNA, 25 bp, probe
agccataatttgaataactctacga

SEQ ID NO: 137921 - DNA, 25 bp, probe
accaaagttacatttcctgacagat

SEQ ID NO: 137922 - DNA, 25 bp, probe
actcaggtttccggctactgacagt

SEQ ID NO: 137923 - DNA, 25 bp, probe
accagcagaatttgccctacggtgt

SEQ ID NO: 137924 - DNA, 25 bp, probe
accagcagaatttgccctacggtgt

SEQ ID NO: 137925 - DNA, 25 bp, probe
accagaaattgctcgtatggcccta

SEQ ID NO: 137926 - DNA, 25 bp, probe
accagaactccacggtgagggccga

SEQ ID NO: 137927 - DNA, 25 bp, probe
accacaactgcccaggtagctggag

SEQ ID NO: 137928 - DNA, 25 bp, probe
accacaactgcccaggtagctggag

SEQ ID NO: 137929 - DNA, 25 bp, probe
accactacgcccagctaattttaag

SEQ ID NO: 137930 - DNA, 25 bp, probe
accactaccaagagctcaatgacat

SEQ ID NO: 137931 - DNA, 25 bp, probe
accaggacctcgagatcatcgtcat

SEQ ID NO: 137932 - DNA, 25 bp, probe
accaggacctcgagatcatcgtcat

SEQ ID NO: 137933 - DNA, 25 bp, probe
accagatgactgtggagctcctgtt

SEQ ID NO: 137934 - DNA, 25 bp, probe
accaataatgaaatagacctttatg

SEQ ID NO: 137935 - DNA, 25 bp, probe
accttaaacaagtagccctgtatgg

SEQ ID NO: 137936 - DNA, 25 bp, probe
acttctagctaacaactacttagtg

SEQ ID NO: 137937 - DNA, 25 bp, probe
accaaagctattgaactactaacgt

SEQ ID NO: 137938 - DNA, 25 bp, probe
acgaatagaattgaatgccgaaaag

SEQ ID NO: 137939 - DNA, 25 bp, probe
actgaatatgagaggaacgggagat

SEQ ID NO: 137940 - DNA, 25 bp, probe
accaatatgtgcagtatacgttgaa

SEQ ID NO: 137941 - DNA, 25 bp, probe
accaacgtcggtaacttgagcagtc

SEQ ID NO: 137942 - DNA, 25 bp, probe
accacacaattcttgatgacttgga

SEQ ID NO: 137943 - DNA, 25 bp, probe
agccaccgatccagattcattaaga

SEQ ID NO: 137944 - DNA, 25 bp, probe
agccagggtgcctgttcttgggata

SEQ ID NO: 137945 - DNA, 25 bp, probe
agccagggtgcctgttcttgggata

SEQ ID NO: 137946 - DNA, 25 bp, probe
accagttctccatttctaatggcca

SEQ ID NO: 137947 - DNA, 25 bp, probe
accttgcctccagattatgaaccag

SEQ ID NO: 137948 - DNA, 25 bp, probe
agccttccccagctaaagagcagag

SEQ ID NO: 137949 - DNA, 25 bp, probe
acctaactcactcgtcaagggaagt

SEQ ID NO: 137950 - DNA, 25 bp, probe
agcctaactctcagtccgtggagat

SEQ ID NO: 137951 - DNA, 25 bp, probe
accaaagtgctcaactacgtggact

SEQ ID NO: 137952 - DNA, 25 bp, probe
accaaagtctgccactacttggagt

SEQ ID NO: 137953 - DNA, 25 bp, probe
accaaagtctgccactacttggagt

SEQ ID NO: 137954 - DNA, 25 bp, probe
accaaggtcagcgactttggcctgg

SEQ ID NO: 137955 - DNA, 25 bp, probe
accagggccggagttagagaggcct

SEQ ID NO: 137956 - DNA, 25 bp, probe
agccagctcccgagcggttgggcct

SEQ ID NO: 137957 - DNA, 25 bp, probe
agccatgcctccgaaagagggccag

SEQ ID NO: 137958 - DNA, 25 bp, probe
agcctgagctagggggtgtggcctg

SEQ ID NO: 137959 - DNA, 25 bp, probe
agcctgagctagggggtgtggcctg

SEQ ID NO: 137960 - DNA, 25 bp, probe
agccaagtagcccagggcatggcct

SEQ ID NO: 137961 - DNA, 25 bp, probe
agccacatgtctgtgtgtgtgcatg

SEQ ID NO: 137962 - DNA, 25 bp, probe
agcctcagcctcctgagtagctgag

SEQ ID NO: 137963 - DNA, 25 bp, probe
agccacagtaccagccaggagaaaa

SEQ ID NO: 137964 - DNA, 25 bp, probe
acaaatggtccatggggaaaagtga

SEQ ID NO: 137965 - DNA, 25 bp, probe
accacggccgagcgggaaatcgtgc

SEQ ID NO: 137966 - DNA, 25 bp, probe
accacgcgtctgaaggagtacacca

SEQ ID NO: 137967 - DNA, 25 bp, probe
accactgctttacagaaacatccaa

SEQ ID NO: 137968 - DNA, 25 bp, probe
accgtcttgtagcatggttccaaag

SEQ ID NO: 137969 - DNA, 25 bp, probe
accacttttcagccatttattaata

SEQ ID NO: 137970 - DNA, 25 bp, probe
accacttttcagccatttattaata

SEQ ID NO: 137971 - DNA, 25 bp, probe
agcctctgtttctgcatttgtataa

SEQ ID NO: 137972 - DNA, 25 bp, probe
agccatttgtcctgactctgtgtat

SEQ ID NO: 137973 - DNA, 25 bp, probe
agccatttgtcctgactctgtgtat

SEQ ID NO: 137974 - DNA, 25 bp, probe
agccatttgtcctgactctgtgtat

SEQ ID NO: 137975 - DNA, 25 bp, probe
agccattttgtcctgttttcttggt

SEQ ID NO: 137976 - DNA, 25 bp, probe
accactttgtcaagctcatttcctg

SEQ ID NO: 137977 - DNA, 25 bp, probe
accaattttcactgcattttgcatg

SEQ ID NO: 137978 - DNA, 25 bp, probe
accaatgtttgcttcctggttggaa

SEQ ID NO: 137979 - DNA, 25 bp, probe
accaatattgtggatcctttcatag

SEQ ID NO: 137980 - DNA, 25 bp, probe
actctataatgtgaactttcccctg

SEQ ID NO: 137981 - DNA, 25 bp, probe
actctagttgtggacttttccccat

SEQ ID NO: 137982 - DNA, 25 bp, probe
accaagttgaggtctgttctgtcct

SEQ ID NO: 137983 - DNA, 25 bp, probe
agccaaagtcatggaccttcttcct

SEQ ID NO: 137984 - DNA, 25 bp, probe
accagaatgcttagactcttttctc

SEQ ID NO: 137985 - DNA, 25 bp, probe
agccagaatctgggcacattttgtg

SEQ ID NO: 137986 - DNA, 25 bp, probe
agccaaacaccggcattttatgtac

SEQ ID NO: 137987 - DNA, 25 bp, probe
agccaaagtcccagagatattgtga

SEQ ID NO: 137988 - DNA, 25 bp, probe
accaagactcgaaatgagattattt

SEQ ID NO: 137989 - DNA, 25 bp, probe
agccaatatttactcatcaggtcat

SEQ ID NO: 137990 - DNA, 25 bp, probe
agccaggcaattttccagccttctt

SEQ ID NO: 137991 - DNA, 25 bp, probe
agccaggtattttaagattctgctg

SEQ ID NO: 137992 - DNA, 25 bp, probe
agccaggagtgcatcaacgtgcttc

SEQ ID NO: 137993 - DNA, 25 bp, probe
acgcaagcatggttaacgtccctaa

SEQ ID NO: 137994 - DNA, 25 bp, probe
agcctcagtggagaagcttcctcta

SEQ ID NO: 137995 - DNA, 25 bp, probe
agcctattgaggctgagctcttctt

SEQ ID NO: 137996 - DNA, 25 bp, probe
agcctgtttctgctgagtttcttat

SEQ ID NO: 137997 - DNA, 25 bp, probe
agcctgtttctgctgagtttcttat

SEQ ID NO: 137998 - DNA, 25 bp, probe
agcctgtggcctttgcaatttgtta

SEQ ID NO: 137999 - DNA, 25 bp, probe
agccttggactagcaatttatgctt

SEQ ID NO: 138000 - DNA, 25 bp, probe
actttggtcccaaatatccatcttt

SEQ ID NO: 138001 - DNA, 25 bp, probe
actttggtttcagcaccacatttgc

SEQ ID NO: 138002 - DNA, 25 bp, probe
agcctaggtttcaagaggccttata

SEQ ID NO: 138003 - DNA, 25 bp, probe
acccgtccattcagaaagcttcaaa

SEQ ID NO: 138004 - DNA, 25 bp, probe
agcctctttttcgtggaagttcaga

SEQ ID NO: 138005 - DNA, 25 bp, probe
agccatctctgttctgcaggtgaga

SEQ ID NO: 138006 - DNA, 25 bp, probe
agccatctctgttctgcaggtgaga

SEQ ID NO: 138007 - DNA, 25 bp, probe
agcctcatcatgaccctggagagac

SEQ ID NO: 138008 - DNA, 25 bp, probe
agccttataccagtgcagtggacat

SEQ ID NO: 138009 - DNA, 25 bp, probe
agcctggctgaccgtgagggccaga

SEQ ID NO: 138010 - DNA, 25 bp, probe
agccaggtactgagggttgcatgaa

SEQ ID NO: 138011 - DNA, 25 bp, probe
agccaggtactgagggttgcatgaa

SEQ ID NO: 138012 - DNA, 25 bp, probe
agccagggcaccaatgggacctgct

SEQ ID NO: 138013 - DNA, 25 bp, probe
accaagctcaagaatgctggacgtc

SEQ ID NO: 138014 - DNA, 25 bp, probe
agccatcctcaaagtgctggtcgag

SEQ ID NO: 138015 - DNA, 25 bp, probe
agccatcctcaaagtgctggtcgag

SEQ ID NO: 138016 - DNA, 25 bp, probe
agccatcctcaaagtgctggtcgag

SEQ ID NO: 138017 - DNA, 25 bp, probe
agcctgagctcttggatgtggtcag

SEQ ID NO: 138018 - DNA, 25 bp, probe
agcctgcactgcgggggatgtgatg

SEQ ID NO: 138019 - DNA, 25 bp, probe
agcctccagactcacagcattgaga

SEQ ID NO: 138020 - DNA, 25 bp, probe
agcctcccaaggtcactatgaagac

SEQ ID NO: 138021 - DNA, 25 bp, probe
agcctcccaaggtcactatgaagac

SEQ ID NO: 138022 - DNA, 25 bp, probe
agcctccaaagtgctgggattacag

SEQ ID NO: 138023 - DNA, 25 bp, probe
agcctcccgagcagctgggattaca

SEQ ID NO: 138024 - DNA, 25 bp, probe
agcctcccgagcagctgggattaca

SEQ ID NO: 138025 - DNA, 25 bp, probe
agccttccaagtagctgggactaca

SEQ ID NO: 138026 - DNA, 25 bp, probe
agccattggcattgttgctggaatc

SEQ ID NO: 138027 - DNA, 25 bp, probe
agccacgtgcatctcgtggaagcgg

SEQ ID NO: 138028 - DNA, 25 bp, probe
agccacgtgctggccatgtggccag

SEQ ID NO: 138029 - DNA, 25 bp, probe
agccatcgtgctgttcacgtcagac

SEQ ID NO: 138030 - DNA, 25 bp, probe
agccatcggcatcatgagaaggctg

SEQ ID NO: 138031 - DNA, 25 bp, probe
agccatgtgacacgatgaaagtggg

SEQ ID NO: 138032 - DNA, 25 bp, probe
agcctctgaatatgaacggtgagca

SEQ ID NO: 138033 - DNA, 25 bp, probe
agcctcgttaggacaaggctgtgcc

SEQ ID NO: 138034 - DNA, 25 bp, probe
agccattatatgagacagatactgg

SEQ ID NO: 138035 - DNA, 25 bp, probe
agccatagagtacatcgatgccgtg

SEQ ID NO: 138036 - DNA, 25 bp, probe
agccatagagtacatcgatgccgtg

SEQ ID NO: 138037 - DNA, 25 bp, probe
agccaaatgtgacatcaagctccat

SEQ ID NO: 138038 - DNA, 25 bp, probe
agccaaatgtgacatcaagctccat

SEQ ID NO: 138039 - DNA, 25 bp, probe
agccaagttcacatcaagtccaggg

SEQ ID NO: 138040 - DNA, 25 bp, probe
agccaacctcaagtactgtatcaga

SEQ ID NO: 138041 - DNA, 25 bp, probe
accactccagaatacttccagaaaa

SEQ ID NO: 138042 - DNA, 25 bp, probe
accaaagtgatatgtattccaaaaa

SEQ ID NO: 138043 - DNA, 25 bp, probe
acctaagaatgtttacatgccaaac

SEQ ID NO: 138044 - DNA, 25 bp, probe
accatcaacagagactgactgccaa

SEQ ID NO: 138045 - DNA, 25 bp, probe
agccaagtatcagactgaccctcat

SEQ ID NO: 138046 - DNA, 25 bp, probe
agccacatttagggctatcacctcc

SEQ ID NO: 138047 - DNA, 25 bp, probe
agccagtcattactagtacctctgc

SEQ ID NO: 138048 - DNA, 25 bp, probe
agccacacatttaaatacagacagc

SEQ ID NO: 138049 - DNA, 25 bp, probe
agccaaatgtttgtaaatcacgtct

SEQ ID NO: 138050 - DNA, 25 bp, probe
accaatttcattgtattctcacttt

SEQ ID NO: 138051 - DNA, 25 bp, probe
accaattttagaccctctacattgt

SEQ ID NO: 138052 - DNA, 25 bp, probe
agcctattcttacttactctacagt

SEQ ID NO: 138053 - DNA, 25 bp, probe
agcctattcttacttactctacagt

SEQ ID NO: 138054 - DNA, 25 bp, probe
acctgagcctatttctagtataagt

SEQ ID NO: 138055 - DNA, 25 bp, probe
agccatacgtattttcttagaagta

SEQ ID NO: 138056 - DNA, 25 bp, probe
agccttagttctttcatctagatgg

SEQ ID NO: 138057 - DNA, 25 bp, probe
catgtgcgccatctatcttgacatc

SEQ ID NO: 138058 - DNA, 25 bp, probe
agcctctaatcctgataaggttgct

SEQ ID NO: 138059 - DNA, 25 bp, probe
agcctataatcctaagaacttctcc

SEQ ID NO: 138060 - DNA, 25 bp, probe
accaatcagcatgtttgcccatgtc

SEQ ID NO: 138061 - DNA, 25 bp, probe
accaatcagcatgtttgcccatgtc

SEQ ID NO: 138062 - DNA, 25 bp, probe
agccaccaggctttggcttctgatc

SEQ ID NO: 138063 - DNA, 25 bp, probe
agccactagggagccaatctgagcc

SEQ ID NO: 138064 - DNA, 25 bp, probe
actgcattgggacgtctgcacttga

SEQ ID NO: 138065 - DNA, 25 bp, probe
accaacctgcagcatgagcacattg

SEQ ID NO: 138066 - DNA, 25 bp, probe
accaatcagctgtgtcgcacttaaa

SEQ ID NO: 138067 - DNA, 25 bp, probe
accaatcagcttataacttgcaaag

SEQ ID NO: 138068 - DNA, 25 bp, probe
agccagatgatgtttttcatcttca

SEQ ID NO: 138069 - DNA, 25 bp, probe
agccaggagtatttcctgtgccagg

SEQ ID NO: 138070 - DNA, 25 bp, probe
agccagtgaggatgttttccagtat

SEQ ID NO: 138071 - DNA, 25 bp, probe
agccagaatggatgtactacacttt

SEQ ID NO: 138072 - DNA, 25 bp, probe
accagtatggagctgattgcccctg

SEQ ID NO: 138073 - DNA, 25 bp, probe
accactgcaggccagcagattccac

SEQ ID NO: 138074 - DNA, 25 bp, probe
agccacatcgcctgagattgacaac

SEQ ID NO: 138075 - DNA, 25 bp, probe
agccaaggcagctgatgaagggagc

SEQ ID NO: 138076 - DNA, 25 bp, probe
accacacgcacttatcaggaacgcc

SEQ ID NO: 138077 - DNA, 25 bp, probe
accacaaccattaatggatccacac

SEQ ID NO: 138078 - DNA, 25 bp, probe
agccacaatgttcttggcccatcat

SEQ ID NO: 138079 - DNA, 25 bp, probe
agccatctacttcttggctggctac

SEQ ID NO: 138080 - DNA, 25 bp, probe
agccatctttgatcgggtgctgaca

SEQ ID NO: 138081 - DNA, 25 bp, probe
agccttttgggcgaggagctgcccc

SEQ ID NO: 138082 - DNA, 25 bp, probe
acattttcaggggagcctgtgcccc

SEQ ID NO: 138083 - DNA, 25 bp, probe
accttcaaagtgggcagcttcccag

SEQ ID NO: 138084 - DNA, 25 bp, probe
accagtaagggttaggatgcagcca

SEQ ID NO: 138085 - DNA, 25 bp, probe
actgagttaagtcataggtggcctt

SEQ ID NO: 138086 - DNA, 25 bp, probe
acgcgttaagcgcattggtcctttg

SEQ ID NO: 138087 - DNA, 25 bp, probe
acgactcacaaccaggttgcccttg

SEQ ID NO: 138088 - DNA, 25 bp, probe
acgtaccaatcagtggtcgtcctgc

SEQ ID NO: 138089 - DNA, 25 bp, probe
acgcaagcgcaagttgtccttccgc

SEQ ID NO: 138090 - DNA, 25 bp, probe
acctaccagtattatggcttctcgc

SEQ ID NO: 138091 - DNA, 25 bp, probe
accaaccagttatactccttgagtt

SEQ ID NO: 138092 - DNA, 25 bp, probe
accaaccaaaatcacatcctaattt

SEQ ID NO: 138093 - DNA, 25 bp, probe
accatacgaagagccactcctggac

SEQ ID NO: 138094 - DNA, 25 bp, probe
accatacgaagagccactcctggac

SEQ ID NO: 138095 - DNA, 25 bp, probe
agccaaggaacagcaaccaagtacc

SEQ ID NO: 138096 - DNA, 25 bp, probe
accacaggacaaaaaccacctactg

SEQ ID NO: 138097 - DNA, 25 bp, probe
agccaggggcagacaaaaccctcaa

SEQ ID NO: 138098 - DNA, 25 bp, probe
accagtgggagttcaaggcgcccat

SEQ ID NO: 138099 - DNA, 25 bp, probe
accagtgggagttcaaggcgcccat

SEQ ID NO: 138100 - DNA, 25 bp, probe
accgtggaatgtccctggagtacta

SEQ ID NO: 138101 - DNA, 25 bp, probe
accagctcaaattccgagtgcagaa

SEQ ID NO: 138102 - DNA, 25 bp, probe
accagctcaaattccgagtgcagaa

SEQ ID NO: 138103 - DNA, 25 bp, probe
accagctcaaattccgagtgcagaa

SEQ ID NO: 138104 - DNA, 25 bp, probe
accagctcaaattccgagtgcagaa

SEQ ID NO: 138105 - DNA, 25 bp, probe
agccagccaaggtgctggggaactc

SEQ ID NO: 138106 - DNA, 25 bp, probe
agccagcagcacagtctctatggtg

SEQ ID NO: 138107 - DNA, 25 bp, probe
agccaggttgctgtgttgcagtgca

SEQ ID NO: 138108 - DNA, 25 bp, probe
agccaggctttggtggcagcatgga

SEQ ID NO: 138109 - DNA, 25 bp, probe
agccaggattctccggtctggaatt

SEQ ID NO: 138110 - DNA, 25 bp, probe
agccaggattctccggtctggaatt

SEQ ID NO: 138111 - DNA, 25 bp, probe
agccagaaacatcctggtagctgag

SEQ ID NO: 138112 - DNA, 25 bp, probe
agccagacactccagggatcagtag

SEQ ID NO: 138113 - DNA, 25 bp, probe
agccacagaagccatgggataaaga

SEQ ID NO: 138114 - DNA, 25 bp, probe
agccacagtagaagcggtagaggcc

SEQ ID NO: 138115 - DNA, 25 bp, probe
accaagctatgcaggtgacagagac

SEQ ID NO: 138116 - DNA, 25 bp, probe
acaagggagtaggtgaaatagccca

SEQ ID NO: 138117 - DNA, 25 bp, probe
accacaggatggggccaaaaggcca

SEQ ID NO: 138118 - DNA, 25 bp, probe
accagtggaggtgccagggaggccc

SEQ ID NO: 138119 - DNA, 25 bp, probe
accagtgtcatagtggcccggaagg

SEQ ID NO: 138120 - DNA, 25 bp, probe
accaattcatacaccgggacttggc

SEQ ID NO: 138121 - DNA, 25 bp, probe
accaaaaactttcgcagagatttct

SEQ ID NO: 138122 - DNA, 25 bp, probe
accaaatcccctcagcagagtgtgt

SEQ ID NO: 138123 - DNA, 25 bp, probe
accaaatacctcctcagtaatttat

SEQ ID NO: 138124 - DNA, 25 bp, probe
taccaagaaactcacgattaactta

SEQ ID NO: 138125 - DNA, 25 bp, probe
accaatgctgaaccccatgatttac

SEQ ID NO: 138126 - DNA, 25 bp, probe
accacagtaagatcctggttcactg

SEQ ID NO: 138127 - DNA, 25 bp, probe
accacaggaaagacctggctccttt

SEQ ID NO: 138128 - DNA, 25 bp, probe
accacaggaaagacctggctccttt

SEQ ID NO: 138129 - DNA, 25 bp, probe
accacattgatattctactggccat

SEQ ID NO: 138130 - DNA, 25 bp, probe
accacttgagaatttcatgagcact

SEQ ID NO: 138131 - DNA, 25 bp, probe
accacttgagaatttcatgagcact

SEQ ID NO: 138132 - DNA, 25 bp, probe
accagcattgagtatgtgacgcaga

SEQ ID NO: 138133 - DNA, 25 bp, probe
accatcctggaagtggcatgcaaca

SEQ ID NO: 138134 - DNA, 25 bp, probe
agccatccagtgaagagagagagac

SEQ ID NO: 138135 - DNA, 25 bp, probe
accaccacagaagatgaggacctca

SEQ ID NO: 138136 - DNA, 25 bp, probe
agccaacgggatcagaggaccatca

SEQ ID NO: 138137 - DNA, 25 bp, probe
accacatcctggtgaaagacgctca

SEQ ID NO: 138138 - DNA, 25 bp, probe
agccaccctgagtttgaagaagaca

SEQ ID NO: 138139 - DNA, 25 bp, probe
agccaggccgtggaagggcaacaca

SEQ ID NO: 138140 - DNA, 25 bp, probe
agccatgcccgtaagcagattgaat

SEQ ID NO: 138141 - DNA, 25 bp, probe
accaaatgctgtacacgattgcccc

SEQ ID NO: 138142 - DNA, 25 bp, probe
agccacattctgacttcagatcccc

SEQ ID NO: 138143 - DNA, 25 bp, probe
agccacattctgacttcagatcccc

SEQ ID NO: 138144 - DNA, 25 bp, probe
accacgtcgaccaagatctttcaaa

SEQ ID NO: 138145 - DNA, 25 bp, probe
accacgtcgaccaagatctttcaaa

SEQ ID NO: 138146 - DNA, 25 bp, probe
accacttagatagtagttttttcat

SEQ ID NO: 138147 - DNA, 25 bp, probe
accacttagatagtagttttttcat

SEQ ID NO: 138148 - DNA, 25 bp, probe
agccatcccaagctggttaaattct

SEQ ID NO: 138149 - DNA, 25 bp, probe
agccatcccaagctggttaaattct

SEQ ID NO: 138150 - DNA, 25 bp, probe
agccatcttattcttgtaaaatttt

SEQ ID NO: 138151 - DNA, 25 bp, probe
accaattacatctttgtccacgttt

SEQ ID NO: 138152 - DNA, 25 bp, probe
accaaatggctatcttccactgttt

SEQ ID NO: 138153 - DNA, 25 bp, probe
accaatatgatgaaaccccgtctct

SEQ ID NO: 138154 - DNA, 25 bp, probe
accattgtcatatacccggttcagc

SEQ ID NO: 138155 - DNA, 25 bp, probe
agccatatgtaatcccttgctttat

SEQ ID NO: 138156 - DNA, 25 bp, probe
agccatattaagtattttgcttgtt

SEQ ID NO: 138157 - DNA, 25 bp, probe
acctgttaaagaatcatctggatta

SEQ ID NO: 138158 - DNA, 25 bp, probe
agccagttaactttgcatcaggtct

SEQ ID NO: 138159 - DNA, 25 bp, probe
accagttatactccttgagttattt

SEQ ID NO: 138160 - DNA, 25 bp, probe
accagtttatgttcaccggctatgt

SEQ ID NO: 138161 - DNA, 25 bp, probe
agccagggttgttcatcaggatgtt

SEQ ID NO: 138162 - DNA, 25 bp, probe
agccagggctgggacaatggcagtg

SEQ ID NO: 138163 - DNA, 25 bp, probe
agccaagggtgcccagtggatgcgc

SEQ ID NO: 138164 - DNA, 25 bp, probe
agcctttgtctccacagtggtgacc

SEQ ID NO: 138165 - DNA, 25 bp, probe
agcctttgtctcaacgaggggcgta

SEQ ID NO: 138166 - DNA, 25 bp, probe
accttctgatcagtgacacggggga

SEQ ID NO: 138167 - DNA, 25 bp, probe
agccaatgacgagttcggacgggat

SEQ ID NO: 138168 - DNA, 25 bp, probe
agccattgcagcggcatttggtcgg

SEQ ID NO: 138169 - DNA, 25 bp, probe
accactcagccacatcatggcacag

SEQ ID NO: 138170 - DNA, 25 bp, probe
accactcagccacatcatggcacag

SEQ ID NO: 138171 - DNA, 25 bp, probe
agccacctgccacatggtgacagtg

SEQ ID NO: 138172 - DNA, 25 bp, probe
agccactctccgaaggtcaaggaag

SEQ ID NO: 138173 - DNA, 25 bp, probe
agccatccacccagaggcaagggag

SEQ ID NO: 138174 - DNA, 25 bp, probe
agccatctactctgagcaggacacg

SEQ ID NO: 138175 - DNA, 25 bp, probe
agccagtatctgtcatatgctgaaa

SEQ ID NO: 138176 - DNA, 25 bp, probe
agccagagatctgttatcaaaaatg

SEQ ID NO: 138177 - DNA, 25 bp, probe
accaatatttcactgtcgacaagag

SEQ ID NO: 138178 - DNA, 25 bp, probe
acctaaaggcagatccagaaagttg

SEQ ID NO: 138179 - DNA, 25 bp, probe
accacaacaggagtcttcgaaaccg

SEQ ID NO: 138180 - DNA, 25 bp, probe
accacatccagtccttgttagaaca

SEQ ID NO: 138181 - DNA, 25 bp, probe
accaacacagtgcttgattccaacc

SEQ ID NO: 138182 - DNA, 25 bp, probe
accgaacagctgattcatatgccaa

SEQ ID NO: 138183 - DNA, 25 bp, probe
accacaagcagtattctatgcggca

SEQ ID NO: 138184 - DNA, 25 bp, probe
accatcaacatgaagccccttcagc

SEQ ID NO: 138185 - DNA, 25 bp, probe
accacagtcattagccttcttctgg

SEQ ID NO: 138186 - DNA, 25 bp, probe
accaagttcgacgtggctgattggc

SEQ ID NO: 138187 - DNA, 25 bp, probe
accaatgttccgactggagacgggg

SEQ ID NO: 138188 - DNA, 25 bp, probe
accaatggtgccgggagtacttggg

SEQ ID NO: 138189 - DNA, 25 bp, probe
accatggggcgggccagtgagttcg

SEQ ID NO: 138190 - DNA, 25 bp, probe
accatggggcgggccagtgagttcg

SEQ ID NO: 138191 - DNA, 25 bp, probe
accaggtggccaccaggtggtaccg

SEQ ID NO: 138192 - DNA, 25 bp, probe
accaggtggccaccaggtggtaccg

SEQ ID NO: 138193 - DNA, 25 bp, probe
accagaaggtcgtcacctgggagac

SEQ ID NO: 138194 - DNA, 25 bp, probe
accaaggaattctacctgcaggaat

SEQ ID NO: 138195 - DNA, 25 bp, probe
gacgatggacaactgtttcatatag

SEQ ID NO: 138196 - DNA, 25 bp, probe
accaacctttaaagactgatattca

SEQ ID NO: 138197 - DNA, 25 bp, probe
accagaactgtttagagccaggtcc

SEQ ID NO: 138198 - DNA, 25 bp, probe
accaaggctgattaaaccaaggcta

SEQ ID NO: 138199 - DNA, 25 bp, probe
accaaggctgattaaaccaaggcta

SEQ ID NO: 138200 - DNA, 25 bp, probe
acacaccagccataaaacaagttaa

SEQ ID NO: 138201 - DNA, 25 bp, probe
accaccctcacataatcaaacttta

SEQ ID NO: 138202 - DNA, 25 bp, probe
accatgcccccagatgattttttta

SEQ ID NO: 138203 - DNA, 25 bp, probe
acctgtccggatatatttccctgct

SEQ ID NO: 138204 - DNA, 25 bp, probe
cccaccccagacatttttcctggtg

SEQ ID NO: 138205 - DNA, 25 bp, probe
accaccttcaatatcgagttccgga

SEQ ID NO: 138206 - DNA, 25 bp, probe
accacgcattgtaagttggtccccg

SEQ ID NO: 138207 - DNA, 25 bp, probe
accactgggcataatgcttccccac

SEQ ID NO: 138208 - DNA, 25 bp, probe
agccatttgtacatttcatcactca

SEQ ID NO: 138209 - DNA, 25 bp, probe
agccacctaagaatgtttacatgcc

SEQ ID NO: 138210 - DNA, 25 bp, probe
agccaccccaaacttttatgctcat

SEQ ID NO: 138211 - DNA, 25 bp, probe
accacccccattcctaaatatgtga

SEQ ID NO: 138212 - DNA, 25 bp, probe
accagcaccaacaccacggtagtgc

SEQ ID NO: 138213 - DNA, 25 bp, probe
accaaccagaccacctggacagggt

SEQ ID NO: 138214 - DNA, 25 bp, probe
agccaactcgaagtcatccatggac

SEQ ID NO: 138215 - DNA, 25 bp, probe
agccatatggagcatctacccagac

SEQ ID NO: 138216 - DNA, 25 bp, probe
accacaggacatgcaaccagagatc

SEQ ID NO: 138217 - DNA, 25 bp, probe
accatttgagctgcaattcaggatc

SEQ ID NO: 138218 - DNA, 25 bp, probe
accatttgagctgcaattcaggatc

SEQ ID NO: 138219 - DNA, 25 bp, probe
accacctgatgacaactcaggatgg

SEQ ID NO: 138220 - DNA, 25 bp, probe
accatcctggttgctctcaggaggc

SEQ ID NO: 138221 - DNA, 25 bp, probe
accactatggccacatcgaggagga

SEQ ID NO: 138222 - DNA, 25 bp, probe
accagcatagcactcatcgcatgag

SEQ ID NO: 138223 - DNA, 25 bp, probe
accacaagcctgtcagctcagtgtt

SEQ ID NO: 138224 - DNA, 25 bp, probe
agccagaacctgtcgcggttctttc

SEQ ID NO: 138225 - DNA, 25 bp, probe
accagagaaccgtggatgtctttca

SEQ ID NO: 138226 - DNA, 25 bp, probe
accatggaacactatgtgtattaat

SEQ ID NO: 138227 - DNA, 25 bp, probe
agccaggacacatttccactataat

SEQ ID NO: 138228 - DNA, 25 bp, probe
agccatgaaccatttcctggacatt

SEQ ID NO: 138229 - DNA, 25 bp, probe
agccatgaacactactgcctgtagt

SEQ ID NO: 138230 - DNA, 25 bp, probe
accaatcacagctcatgccgaggtg

SEQ ID NO: 138231 - DNA, 25 bp, probe
cccccaagttctgcaagttggccca

SEQ ID NO: 138232 - DNA, 25 bp, probe
accacctaacactcgagttggcacc

SEQ ID NO: 138233 - DNA, 25 bp, probe
accacctaacactcgagttggcacc

SEQ ID NO: 138234 - DNA, 25 bp, probe
accaccgagacagttggttttgcat

SEQ ID NO: 138235 - DNA, 25 bp, probe
agccacgcaaacatgggtgctcttg

SEQ ID NO: 138236 - DNA, 25 bp, probe
agccacgcaaacatgggtgctcttg

SEQ ID NO: 138237 - DNA, 25 bp, probe
agccacgcaaacatgggtgctcttg

SEQ ID NO: 138238 - DNA, 25 bp, probe
accacccacatcatcgtggtgtcca

SEQ ID NO: 138239 - DNA, 25 bp, probe
accagccccatcaggttgttgtgaa

SEQ ID NO: 138240 - DNA, 25 bp, probe
accaccgcgatgcaagtatgttggg

SEQ ID NO: 138241 - DNA, 25 bp, probe
agccacaccgtgcacgaagggggca

SEQ ID NO: 138242 - DNA, 25 bp, probe
accaactactcaccagaagggggct

SEQ ID NO: 138243 - DNA, 25 bp, probe
accacttatctcccatatgagagtg

SEQ ID NO: 138244 - DNA, 25 bp, probe
accactatgtccccaaaaagccgtg

SEQ ID NO: 138245 - DNA, 25 bp, probe
acctgccaggcctacgaattggccg

SEQ ID NO: 138246 - DNA, 25 bp, probe
acctcacttccctagagaaggcctg

SEQ ID NO: 138247 - DNA, 25 bp, probe
agccatcacaccattaaaaagcctg

SEQ ID NO: 138248 - DNA, 25 bp, probe
accagcgtcctcttaaaagatgcct

SEQ ID NO: 138249 - DNA, 25 bp, probe
cacccgtttcttaaaaggcagtctg

SEQ ID NO: 138250 - DNA, 25 bp, probe
accaaatttcgtgaagagccaggtt

SEQ ID NO: 138251 - DNA, 25 bp, probe
acgcaagtttgcgaccaaatccaag

SEQ ID NO: 138252 - DNA, 25 bp, probe
acgcaagtttgcgaccaaatccaag

SEQ ID NO: 138253 - DNA, 25 bp, probe
accattgatattgctccaaaccaca

SEQ ID NO: 138254 - DNA, 25 bp, probe
agccaagtcaatcccaacaaagaca

SEQ ID NO: 138255 - DNA, 25 bp, probe
agccaggtaggcgagacacaaaaag

SEQ ID NO: 138256 - DNA, 25 bp, probe
agccacggaccgttgcacaaaaagg

SEQ ID NO: 138257 - DNA, 25 bp, probe
accacgctgacaggtgtgcttgaaa

SEQ ID NO: 138258 - DNA, 25 bp, probe
accagcgcacacgctgatttgaacc

SEQ ID NO: 138259 - DNA, 25 bp, probe
accacacaacaacagttaacacaat

SEQ ID NO: 138260 - DNA, 25 bp, probe
accacacaaacttagttcatatgct

SEQ ID NO: 138261 - DNA, 25 bp, probe
agccatccaaagcatccttgcattg

SEQ ID NO: 138262 - DNA, 25 bp, probe
accagccaatcaatgttcgtctctg

SEQ ID NO: 138263 - DNA, 25 bp, probe
accacaaatgcttgcttggacttgc

SEQ ID NO: 138264 - DNA, 25 bp, probe
accaaggatgccctagatgagctag

SEQ ID NO: 138265 - DNA, 25 bp, probe
accaaggatgccctagatgagctag

SEQ ID NO: 138266 - DNA, 25 bp, probe
accaatggagagctgaatgttgatg

SEQ ID NO: 138267 - DNA, 25 bp, probe
accaagcggagacgcaaggcctgtc

SEQ ID NO: 138268 - DNA, 25 bp, probe
accacacggaaatttggcctgctgc

SEQ ID NO: 138269 - DNA, 25 bp, probe
accacacagggcttcatcgtaactg

SEQ ID NO: 138270 - DNA, 25 bp, probe
accacacagggcttcatcgtaactg

SEQ ID NO: 138271 - DNA, 25 bp, probe
accagcaggaggttctgggcctctg

SEQ ID NO: 138272 - DNA, 25 bp, probe
accagcaggaggttctgggcctctg

SEQ ID NO: 138273 - DNA, 25 bp, probe
agccagcatgcgggaactgggcctt

SEQ ID NO: 138274 - DNA, 25 bp, probe
agccagcagcacagccaaggtgcct

SEQ ID NO: 138275 - DNA, 25 bp, probe
agccaggcgagggcaagctcatctt

SEQ ID NO: 138276 - DNA, 25 bp, probe
agccaggcgagggcaagctcatctt

SEQ ID NO: 138277 - DNA, 25 bp, probe
accaaggtggctgactgcatctgcc

SEQ ID NO: 138278 - DNA, 25 bp, probe
accaagaagacggacattgctgcct

SEQ ID NO: 138279 - DNA, 25 bp, probe
accacgaagaacaagcttatgctca

SEQ ID NO: 138280 - DNA, 25 bp, probe
accacggagaaggagctgctcatct

SEQ ID NO: 138281 - DNA, 25 bp, probe
accattgggaagggcaactttgcca

SEQ ID NO: 138282 - DNA, 25 bp, probe
accttgaggacactcggtttgactc

SEQ ID NO: 138283 - DNA, 25 bp, probe
acctacagtgactctgagtagtcac

SEQ ID NO: 138284 - DNA, 25 bp, probe
accatgccgtggtcgtgggagtgta

SEQ ID NO: 138285 - DNA, 25 bp, probe
accagcctgccgtggcaaggactaa

SEQ ID NO: 138286 - DNA, 25 bp, probe
accactcccgggacaggatgcaaaa

SEQ ID NO: 138287 - DNA, 25 bp, probe
agccagtctccgagagcggattgag

SEQ ID NO: 138288 - DNA, 25 bp, probe
accaatctcctgaggcttgtggatt

SEQ ID NO: 138289 - DNA, 25 bp, probe
accaaccatctatggctgggctgtg

SEQ ID NO: 138290 - DNA, 25 bp, probe
accaactactagcgaggatgcagag

SEQ ID NO: 138291 - DNA, 25 bp, probe
agccacacaatcagtggggcagcca

SEQ ID NO: 138292 - DNA, 25 bp, probe
accaagcctcaagtggggctgacct

SEQ ID NO: 138293 - DNA, 25 bp, probe
accaatgtgtgcgcggggtatcctg

SEQ ID NO: 138294 - DNA, 25 bp, probe
accaaagatgtctgggaaatccctc

SEQ ID NO: 138295 - DNA, 25 bp, probe
accaacatggactgagggacttctc

SEQ ID NO: 138296 - DNA, 25 bp, probe
accaacatggactgagggacttctc

SEQ ID NO: 138297 - DNA, 25 bp, probe
accaacgtactgggggactcaattg

SEQ ID NO: 138298 - DNA, 25 bp, probe
accaacgtactgggggactcaattg

SEQ ID NO: 138299 - DNA, 25 bp, probe
accaactccacttctggaactactt

SEQ ID NO: 138300 - DNA, 25 bp, probe
accacacttagtcctgatgtacttt

SEQ ID NO: 138301 - DNA, 25 bp, probe
accacaataaggcatgatctggatt

SEQ ID NO: 138302 - DNA, 25 bp, probe
actagtaatccttatcaccatgacc

SEQ ID NO: 138303 - DNA, 25 bp, probe
accacaacaactcggagcggtccat

SEQ ID NO: 138304 - DNA, 25 bp, probe
accacaacaactcggagcggtccat

SEQ ID NO: 138305 - DNA, 25 bp, probe
agccaaaaacattctggccgctcca

SEQ ID NO: 138306 - DNA, 25 bp, probe
accaagaattctttgacatcgcccc

SEQ ID NO: 138307 - DNA, 25 bp, probe
accacaaattcttctgaacaacact

SEQ ID NO: 138308 - DNA, 25 bp, probe
agccagccaacaaactaacgatctt

SEQ ID NO: 138309 - DNA, 25 bp, probe
agccagcctgaaaagtgaactttca

SEQ ID NO: 138310 - DNA, 25 bp, probe
accacctcatactaagaattcctca

SEQ ID NO: 138311 - DNA, 25 bp, probe
accacacatctatgatataacccta

SEQ ID NO: 138312 - DNA, 25 bp, probe
acctcagttttgttcatacacctaa

SEQ ID NO: 138313 - DNA, 25 bp, probe
acctgaatttattactaactctggg

SEQ ID NO: 138314 - DNA, 25 bp, probe
accttttgtgttgtcagactttgga

SEQ ID NO: 138315 - DNA, 25 bp, probe
acctatgtatggtcatggaatacgt

SEQ ID NO: 138316 - DNA, 25 bp, probe
acccggcaagtctcaagactgtggc

SEQ ID NO: 138317 - DNA, 25 bp, probe
accaacatgaagaggcaaactgtgg

SEQ ID NO: 138318 - DNA, 25 bp, probe
accaaatgatagaaacagactgcct

SEQ ID NO: 138319 - DNA, 25 bp, probe
agccagagatgaagagacacagtct

SEQ ID NO: 138320 - DNA, 25 bp, probe
agccacaggaagtagcatgcagtct

SEQ ID NO: 138321 - DNA, 25 bp, probe
agccacaggaagtagcatgcagtct

SEQ ID NO: 138322 - DNA, 25 bp, probe
accagctggaggacatgctgctctc

SEQ ID NO: 138323 - DNA, 25 bp, probe
accaacgtgctgacgcatgttcatt

SEQ ID NO: 138324 - DNA, 25 bp, probe
accacaagctgcagtctgtagcact

SEQ ID NO: 138325 - DNA, 25 bp, probe
accaactcagccgacttaacattac

SEQ ID NO: 138326 - DNA, 25 bp, probe
agccaacatcacgaggtgtaatttt

SEQ ID NO: 138327 - DNA, 25 bp, probe
accagaccacagttgctgttgtgtt

SEQ ID NO: 138328 - DNA, 25 bp, probe
accacagccaagttcattgcttgtg

SEQ ID NO: 138329 - DNA, 25 bp, probe
agccaccgcaacgacatcatgttgc

SEQ ID NO: 138330 - DNA, 25 bp, probe
accactccaacatcatgcatgtggc

SEQ ID NO: 138331 - DNA, 25 bp, probe
accccaaaagccgtgatgtgcaatg

SEQ ID NO: 138332 - DNA, 25 bp, probe
accaacgacggcactggcgagatgg

SEQ ID NO: 138333 - DNA, 25 bp, probe
accaacgccaggacgtggcgcgacg

SEQ ID NO: 138334 - DNA, 25 bp, probe
accaacgccaggacgtggcgcgacg

SEQ ID NO: 138335 - DNA, 25 bp, probe
accaagccacgcaggtgacagagac

SEQ ID NO: 138336 - DNA, 25 bp, probe
accaacatcgacaaccggcatgaga

SEQ ID NO: 138337 - DNA, 25 bp, probe
accaacatcgacaaccggcatgaga

SEQ ID NO: 138338 - DNA, 25 bp, probe
accaagcttgaccgcattggcaaag

SEQ ID NO: 138339 - DNA, 25 bp, probe
accagcgaatgcaccattccaaagc

SEQ ID NO: 138340 - DNA, 25 bp, probe
accagtgaaagggcattccaaagcg

SEQ ID NO: 138341 - DNA, 25 bp, probe
acatctatgaaacggattactaccg

SEQ ID NO: 138342 - DNA, 25 bp, probe
acttagaagaagcagataaccaaac

SEQ ID NO: 138343 - DNA, 25 bp, probe
acttactaccagcaatgcaaaaaac

SEQ ID NO: 138344 - DNA, 25 bp, probe
tactaaagcacctcaaaaaaacagg

SEQ ID NO: 138345 - DNA, 25 bp, probe
accaagagacctacaaaagaatatc

SEQ ID NO: 138346 - DNA, 25 bp, probe
accacaagagacaagcaagtaggat

SEQ ID NO: 138347 - DNA, 25 bp, probe
accacaagagacaagcaagtaggat

SEQ ID NO: 138348 - DNA, 25 bp, probe
accaggcagagaactgaagtactgg

SEQ ID NO: 138349 - DNA, 25 bp, probe
accagcacaagattccgtgtcactg

SEQ ID NO: 138350 - DNA, 25 bp, probe
accagatgaagactccagccatgac

SEQ ID NO: 138351 - DNA, 25 bp, probe
accagctatagcgtgcagacgatgg

SEQ ID NO: 138352 - DNA, 25 bp, probe
accagcatggaggtcgacgtgcagg

SEQ ID NO: 138353 - DNA, 25 bp, probe
accagatgcctgtgcgggatgagga

SEQ ID NO: 138354 - DNA, 25 bp, probe
accaatgcctcagcagggtggagtg

SEQ ID NO: 138355 - DNA, 25 bp, probe
accaagcagctctcagcagggcttt

SEQ ID NO: 138356 - DNA, 25 bp, probe
accaagtctttcaacgtgatgttcc

SEQ ID NO: 138357 - DNA, 25 bp, probe
accagcgttgtagtacagaagttcc

SEQ ID NO: 138358 - DNA, 25 bp, probe
accagtgctactctcaacgagttcc

SEQ ID NO: 138359 - DNA, 25 bp, probe
accagtctttcgacatgggcgtggc

SEQ ID NO: 138360 - DNA, 25 bp, probe
accagcttgttcgcattgccaaggt

SEQ ID NO: 138361 - DNA, 25 bp, probe
accaccgtcacagatgccaaagagt

SEQ ID NO: 138362 - DNA, 25 bp, probe
accaacaccagggagaataagagcc

SEQ ID NO: 138363 - DNA, 25 bp, probe
accaatccctgaaagattaagccct

SEQ ID NO: 138364 - DNA, 25 bp, probe
accacccattgattgtattataacc

SEQ ID NO: 138365 - DNA, 25 bp, probe
accacccattgattgtattataacc

SEQ ID NO: 138366 - DNA, 25 bp, probe
accaccctatgacgaaaaagcagct

SEQ ID NO: 138367 - DNA, 25 bp, probe
accaccacctgatgacaactcagga

SEQ ID NO: 138368 - DNA, 25 bp, probe
accacgggtgatagccagactgctg

SEQ ID NO: 138369 - DNA, 25 bp, probe
accacggagaatacatagaccaggc

SEQ ID NO: 138370 - DNA, 25 bp, probe
accacggagttcacaacacagcagc

SEQ ID NO: 138371 - DNA, 25 bp, probe
accacggagttcacaacacagcagc

SEQ ID NO: 138372 - DNA, 25 bp, probe
accagaaagtgtatcaatattcagt

SEQ ID NO: 138373 - DNA, 25 bp, probe
accagaaagtgtatcaatattcagt

SEQ ID NO: 138374 - DNA, 25 bp, probe
accaataagtatatcatgcttgccc

SEQ ID NO: 138375 - DNA, 25 bp, probe
agccactcaaggaaacgcgtgcacc

SEQ ID NO: 138376 - DNA, 25 bp, probe
accacatctagtaaagggtgccatg

SEQ ID NO: 138377 - DNA, 25 bp, probe
accacatctggttcagaagagtgtc

SEQ ID NO: 138378 - DNA, 25 bp, probe
accaatgctgtgcctcaaagatgag

SEQ ID NO: 138379 - DNA, 25 bp, probe
accaatgctgtgcctcaaagatgag

SEQ ID NO: 138380 - DNA, 25 bp, probe
accaacgaactgtacatgatgatga

SEQ ID NO: 138381 - DNA, 25 bp, probe
accaactgagccaatgccagcagga

SEQ ID NO: 138382 - DNA, 25 bp, probe
accagaatagtcttccaccagtaaa

SEQ ID NO: 138383 - DNA, 25 bp, probe
accatggatggtttcctccaaggaa

SEQ ID NO: 138384 - DNA, 25 bp, probe
accatggcaggtgggctagccaacc

SEQ ID NO: 138385 - DNA, 25 bp, probe
acctgacccgggaagtcaggccatt

SEQ ID NO: 138386 - DNA, 25 bp, probe
acctgacccgggaagtcaggccatt

SEQ ID NO: 138387 - DNA, 25 bp, probe
acctgaccctgtgtgtacaatccag

SEQ ID NO: 138388 - DNA, 25 bp, probe
acctgaccctgtgtgtacaatccag

SEQ ID NO: 138389 - DNA, 25 bp, probe
acctggttgtgtcttcaattccact

SEQ ID NO: 138390 - DNA, 25 bp, probe
actcccttgtacttgtcaagtcgac

SEQ ID NO: 138391 - DNA, 25 bp, probe
acccagcggaactgtaacctgacac

SEQ ID NO: 138392 - DNA, 25 bp, probe
acccagcggaactgtaacctgacac

SEQ ID NO: 138393 - DNA, 25 bp, probe
acccagggatgtcaaaccctgaagt

SEQ ID NO: 138394 - DNA, 25 bp, probe
accaggtggtatcaggcccctgagt

SEQ ID NO: 138395 - DNA, 25 bp, probe
accttgggttgctggagctcaccag

SEQ ID NO: 138396 - DNA, 25 bp, probe
accacttttccatggggattcagaa

SEQ ID NO: 138397 - DNA, 25 bp, probe
accacttttccatggggattcagaa

SEQ ID NO: 138398 - DNA, 25 bp, probe
accactttttgttgggcaatatgaa

SEQ ID NO: 138399 - DNA, 25 bp, probe
accatcttctatagcttttgaatgt

SEQ ID NO: 138400 - DNA, 25 bp, probe
accacgccatgaaattcaatcatat

SEQ ID NO: 138401 - DNA, 25 bp, probe
accaagcatcagtcatttcacacca

SEQ ID NO: 138402 - DNA, 25 bp, probe
accaacatggcagctaacacatgaa

SEQ ID NO: 138403 - DNA, 25 bp, probe
accaagcagccagccaacaaactaa

SEQ ID NO: 138404 - DNA, 25 bp, probe
accaacctcagaaaagccaactcga

SEQ ID NO: 138405 - DNA, 25 bp, probe
accaaactgcaaaacatcccagatc

SEQ ID NO: 138406 - DNA, 25 bp, probe
accaaacgctatatgcctccagaag

SEQ ID NO: 138407 - DNA, 25 bp, probe
accaaaagcttgatatgacagagaa

SEQ ID NO: 138408 - DNA, 25 bp, probe
acctaaatgttcactgacacaaagg

SEQ ID NO: 138409 - DNA, 25 bp, probe
accaaatatattctctgctcactga

SEQ ID NO: 138410 - DNA, 25 bp, probe
accaagtgcaagatcatccacacgg

SEQ ID NO: 138411 - DNA, 25 bp, probe
accaaggcgcagagcaactatcagg

SEQ ID NO: 138412 - DNA, 25 bp, probe
accacagatggaattaacttcatgg

SEQ ID NO: 138413 - DNA, 25 bp, probe
accaagatggattgccaaactcttc

SEQ ID NO: 138414 - DNA, 25 bp, probe
accaatgcactgacccaaactgttg

SEQ ID NO: 138415 - DNA, 25 bp, probe
accaataatcatctcattgactttg

SEQ ID NO: 138416 - DNA, 25 bp, probe
accacatcaatattgtcattcctgt

SEQ ID NO: 138417 - DNA, 25 bp, probe
accaccaataatcatctcattgact

SEQ ID NO: 138418 - DNA, 25 bp, probe
accactagtgtctgtccatggagtt

SEQ ID NO: 138419 - DNA, 25 bp, probe
accacaagtgctttcccaagaattt

SEQ ID NO: 138420 - DNA, 25 bp, probe
accacaagtgctttcccaagaattt

SEQ ID NO: 138421 - DNA, 25 bp, probe
accaactgtcaatgccggaattttg

SEQ ID NO: 138422 - DNA, 25 bp, probe
accaaagtcaactgcacgtgtttta

SEQ ID NO: 138423 - DNA, 25 bp, probe
accaaattgaactcactgcttttga

SEQ ID NO: 138424 - DNA, 25 bp, probe
accaaattgaccacacattaatgat

SEQ ID NO: 138425 - DNA, 25 bp, probe
agccaattgtcccaaccattttgag

SEQ ID NO: 138426 - DNA, 25 bp, probe
accaacttcgtctatgcgcagtttg

SEQ ID NO: 138427 - DNA, 25 bp, probe
accaactgcacgctattgctgtgcc

SEQ ID NO: 138428 - DNA, 25 bp, probe
agccaaggcatcgctattgtctgta

SEQ ID NO: 138429 - DNA, 25 bp, probe
agccaattgcaactccagtgttgat

SEQ ID NO: 138430 - DNA, 25 bp, probe
accaatatcagccaccactttgagt

SEQ ID NO: 138431 - DNA, 25 bp, probe
accaatttgccagacattatcagac

SEQ ID NO: 138432 - DNA, 25 bp, probe
accaaggagccaataattgactatt

SEQ ID NO: 138433 - DNA, 25 bp, probe
accaaggaagataagctcgagctga

SEQ ID NO: 138434 - DNA, 25 bp, probe
accaagggagagatgctcgcagctc

SEQ ID NO: 138435 - DNA, 25 bp, probe
accaattggaggatgcctgcgagca

SEQ ID NO: 138436 - DNA, 25 bp, probe
accaattggaggatgcctgcgagca

SEQ ID NO: 138437 - DNA, 25 bp, probe
accagtttgagtttgcgctgacagc

SEQ ID NO: 138438 - DNA, 25 bp, probe
accagtattatggcttctcgcatac

SEQ ID NO: 138439 - DNA, 25 bp, probe
accagtattctcgaattctcttccc

SEQ ID NO: 138440 - DNA, 25 bp, probe
accagtattctcgaattctcttccc

SEQ ID NO: 138441 - DNA, 25 bp, probe
accagctggttcgaaaattaggccg

SEQ ID NO: 138442 - DNA, 25 bp, probe
accagctggttcgaaaattaggccg

SEQ ID NO: 138443 - DNA, 25 bp, probe
accaggtattccaaacaccattaca

SEQ ID NO: 138444 - DNA, 25 bp, probe
accagagttccctaaacttgcttca

SEQ ID NO: 138445 - DNA, 25 bp, probe
accacgttattaaaacttgatcagc

SEQ ID NO: 138446 - DNA, 25 bp, probe
accacgtgaaaatcaagcttgctga

SEQ ID NO: 138447 - DNA, 25 bp, probe
accaagcgggaattccagctgcagc

SEQ ID NO: 138448 - DNA, 25 bp, probe
accaagcgggaattccagctgcagc

SEQ ID NO: 138449 - DNA, 25 bp, probe
accacagcctgatattccagaacct

SEQ ID NO: 138450 - DNA, 25 bp, probe
accaccctgattcatccgagatcag

SEQ ID NO: 138451 - DNA, 25 bp, probe
accacatccgagacaatccagtaca

SEQ ID NO: 138452 - DNA, 25 bp, probe
accacgtctgagaccattcagtaca

SEQ ID NO: 138453 - DNA, 25 bp, probe
accacgattgtgacagcgtatgtga

SEQ ID NO: 138454 - DNA, 25 bp, probe
accacgattgtgacagcgtatgtga

SEQ ID NO: 138455 - DNA, 25 bp, probe
accacagactgcaacagcctgaatg

SEQ ID NO: 138456 - DNA, 25 bp, probe
accagcagaacattagcctgtgcaa

SEQ ID NO: 138457 - DNA, 25 bp, probe
accaagacctaactcctgcagagac

SEQ ID NO: 138458 - DNA, 25 bp, probe
accaaacaataaacaggctgagaag

SEQ ID NO: 138459 - DNA, 25 bp, probe
acctatgacaaaacgccgctggaga

SEQ ID NO: 138460 - DNA, 25 bp, probe
accattgctacgatactccgagaag

SEQ ID NO: 138461 - DNA, 25 bp, probe
accttcatcaagcggtccgaggtgg

SEQ ID NO: 138462 - DNA, 25 bp, probe
accttcatcaagcggtccgaggtgg

SEQ ID NO: 138463 - DNA, 25 bp, probe
accaccatagacaaggtgtcaggga

SEQ ID NO: 138464 - DNA, 25 bp, probe
accccagggtagtgcctgcagggat

SEQ ID NO: 138465 - DNA, 25 bp, probe
accccagggtagtgcctgcagggat

SEQ ID NO: 138466 - DNA, 25 bp, probe
accacccggggctgctgctgatgga

SEQ ID NO: 138467 - DNA, 25 bp, probe
accacacagccgagcatttgttgga

SEQ ID NO: 138468 - DNA, 25 bp, probe
accaccaccatgaagtttggtgact

SEQ ID NO: 138469 - DNA, 25 bp, probe
accaaatcctgacctattgggatac

SEQ ID NO: 138470 - DNA, 25 bp, probe
accaaatcactgaactttgctgagc

SEQ ID NO: 138471 - DNA, 25 bp, probe
accaaatcagtgaccatcgttgtcc

SEQ ID NO: 138472 - DNA, 25 bp, probe
accaagagcaagcgccgcttctttt

SEQ ID NO: 138473 - DNA, 25 bp, probe
accaagacagcacagtgcccctgtg

SEQ ID NO: 138474 - DNA, 25 bp, probe
accagaaccacaagcaaaccgtgaa

SEQ ID NO: 138475 - DNA, 25 bp, probe
acgcagaatacctcgaaccaggcgg

SEQ ID NO: 138476 - DNA, 25 bp, probe
accaaataccgagggatcaatctgc

SEQ ID NO: 138477 - DNA, 25 bp, probe
accagggtactggggtgcaactctt

SEQ ID NO: 138478 - DNA, 25 bp, probe
accatggttagagggaggcacactg

SEQ ID NO: 138479 - DNA, 25 bp, probe
accaggttgcgaactggtgacctgt

SEQ ID NO: 138480 - DNA, 25 bp, probe
accagagtctggagctgagctacct

SEQ ID NO: 138481 - DNA, 25 bp, probe
accatatgttgtgtctaatctcctt

SEQ ID NO: 138482 - DNA, 25 bp, probe
accatatgttgtgtctaatctcctt

SEQ ID NO: 138483 - DNA, 25 bp, probe
accactgagtgtcggtacctcgtgt

SEQ ID NO: 138484 - DNA, 25 bp, probe
accactgagtgtcggtacctcgtgt

SEQ ID NO: 138485 - DNA, 25 bp, probe
accagccagggggctgagttggatg

SEQ ID NO: 138486 - DNA, 25 bp, probe
accagtccgtggcctagtagtgtgt

SEQ ID NO: 138487 - DNA, 25 bp, probe
accagtggcttggcacttgtgtggt

SEQ ID NO: 138488 - DNA, 25 bp, probe
accagtggcttggcacttgtgtggt

SEQ ID NO: 138489 - DNA, 25 bp, probe
accacatggctcttcagttttccat

SEQ ID NO: 138490 - DNA, 25 bp, probe
accacatggctcttcagttttccat

SEQ ID NO: 138491 - DNA, 25 bp, probe
accacaggtctatgtgtgctggggg

SEQ ID NO: 138492 - DNA, 25 bp, probe
accagcggcgtctgggtgtggagct

SEQ ID NO: 138493 - DNA, 25 bp, probe
accacagcctactggaagctctgac

SEQ ID NO: 138494 - DNA, 25 bp, probe
accacagcctactggaagctctgac

SEQ ID NO: 138495 - DNA, 25 bp, probe
accacagctctaaggaagacttcaa

SEQ ID NO: 138496 - DNA, 25 bp, probe
accacagccgggtttacttcatgac

SEQ ID NO: 138497 - DNA, 25 bp, probe
accacagccgggtttacttcatgac

SEQ ID NO: 138498 - DNA, 25 bp, probe
acctctcctggcgtcttaggaatac

SEQ ID NO: 138499 - DNA, 25 bp, probe
acctcaccaaggaccttggaagagc

SEQ ID NO: 138500 - DNA, 25 bp, probe
acgactcggaggaccttaagccagt

SEQ ID NO: 138501 - DNA, 25 bp, probe
accattcagaagcacctgaactcca

SEQ ID NO: 138502 - DNA, 25 bp, probe
accatcgcacaacatacagaaccct

SEQ ID NO: 138503 - DNA, 25 bp, probe
accacgagacagacaacatgaacca

SEQ ID NO: 138504 - DNA, 25 bp, probe
accaccgacaatgacatcgcactgc

SEQ ID NO: 138505 - DNA, 25 bp, probe
accagcagctgaaaccaattggctc

SEQ ID NO: 138506 - DNA, 25 bp, probe
accagcagcacataccactgtgggg

SEQ ID NO: 138507 - DNA, 25 bp, probe
accacagcatcatgaccgtgaggaa

SEQ ID NO: 138508 - DNA, 25 bp, probe
accacagcatcatgaccgtgaggaa

SEQ ID NO: 138509 - DNA, 25 bp, probe
acctagatatctcagcttgggaatt

SEQ ID NO: 138510 - DNA, 25 bp, probe
acctagatatctcagcttgggaatt

SEQ ID NO: 138511 - DNA, 25 bp, probe
accaaatgatctgccctggagaggc

SEQ ID NO: 138512 - DNA, 25 bp, probe
accagatctacggtttcgagggtga

SEQ ID NO: 138513 - DNA, 25 bp, probe
accagctcaagacattttggaggat

SEQ ID NO: 138514 - DNA, 25 bp, probe
accaccaggacgtgctcattgagtg

SEQ ID NO: 138515 - DNA, 25 bp, probe
accaccaaattatccaactgttata

SEQ ID NO: 138516 - DNA, 25 bp, probe
accatccaaatgaggcctctatttt

SEQ ID NO: 138517 - DNA, 25 bp, probe
accaggccagagatagtcttctttt

SEQ ID NO: 138518 - DNA, 25 bp, probe
accagagtcagagatcagctccact

SEQ ID NO: 138519 - DNA, 25 bp, probe
accagagtcagagatcagctccact

SEQ ID NO: 138520 - DNA, 25 bp, probe
accacctggatggatctgctccatg

SEQ ID NO: 138521 - DNA, 25 bp, probe
accattctggtggtcatgatcccct

SEQ ID NO: 138522 - DNA, 25 bp, probe
accattctggtggtcatgatcccct

SEQ ID NO: 138523 - DNA, 25 bp, probe
accaaatgggcgagacacacctgca

SEQ ID NO: 138524 - DNA, 25 bp, probe
accaaaggaagagtgccatacccag

SEQ ID NO: 138525 - DNA, 25 bp, probe
accaaaggaagagtgccatacccag

SEQ ID NO: 138526 - DNA, 25 bp, probe
accagagcaggaaaccccatcgctc

SEQ ID NO: 138527 - DNA, 25 bp, probe
accagagcggtatctctggcaccac

SEQ ID NO: 138528 - DNA, 25 bp, probe
accacggccacattctgtggcacgc

SEQ ID NO: 138529 - DNA, 25 bp, probe
accagcagttcctggcaggcactgt

SEQ ID NO: 138530 - DNA, 25 bp, probe
accaccgagccatggcaggatcggg

SEQ ID NO: 138531 - DNA, 25 bp, probe
accacaagcacctgggcaacgagat

SEQ ID NO: 138532 - DNA, 25 bp, probe
accatagagccctggggcctcatac

SEQ ID NO: 138533 - DNA, 25 bp, probe
accttttcatgctggggatctacac

SEQ ID NO: 138534 - DNA, 25 bp, probe
acctccatatcctggcggttgaaaa

SEQ ID NO: 138535 - DNA, 25 bp, probe
accaccttcaggtagcggttgagtg

SEQ ID NO: 138536 - DNA, 25 bp, probe
accagccccgagggcgaggtggtgc

SEQ ID NO: 138537 - DNA, 25 bp, probe
accagccccgagggcgaggtggtgc

SEQ ID NO: 138538 - DNA, 25 bp, probe
accacctcgagctgtggcaggtttt

SEQ ID NO: 138539 - DNA, 25 bp, probe
accccagcccttaaaggcatgtttg

SEQ ID NO: 138540 - DNA, 25 bp, probe
accagctcagccacgtaaacttgat

SEQ ID NO: 138541 - DNA, 25 bp, probe
accagctcagccacgtaaacttgat

SEQ ID NO: 138542 - DNA, 25 bp, probe
accagccagctgactgcagagaaga

SEQ ID NO: 138543 - DNA, 25 bp, probe
accacatgagctcctacagaaactc

SEQ ID NO: 138544 - DNA, 25 bp, probe
accactggtcacaaatgaactgatc

SEQ ID NO: 138545 - DNA, 25 bp, probe
accactggtcacaaatgaactgatc

SEQ ID NO: 138546 - DNA, 25 bp, probe
accagtgagtcagtaggcagagttc

SEQ ID NO: 138547 - DNA, 25 bp, probe
accaggcaccgaaaatgctgatgtc

SEQ ID NO: 138548 - DNA, 25 bp, probe
accaggatctgcctattactgctgt

SEQ ID NO: 138549 - DNA, 25 bp, probe
accagagacatctatgaaacggatt

SEQ ID NO: 138550 - DNA, 25 bp, probe
accaaactcatgcaaagagagctta

SEQ ID NO: 138551 - DNA, 25 bp, probe
accaacagcctgtgaagatcagttt

SEQ ID NO: 138552 - DNA, 25 bp, probe
accagaacctcacatcttgctgttc

SEQ ID NO: 138553 - DNA, 25 bp, probe
accaggccctcaagcatgcttggat

SEQ ID NO: 138554 - DNA, 25 bp, probe
accatggctccagagctcctggagg

SEQ ID NO: 138555 - DNA, 25 bp, probe
acctcttcgaaagcctggaggctat

SEQ ID NO: 138556 - DNA, 25 bp, probe
accttgatcgtttcggctggcaagc

SEQ ID NO: 138557 - DNA, 25 bp, probe
accttatttttcactgtacagacac

SEQ ID NO: 138558 - DNA, 25 bp, probe
acctaagttctcttcgcttaaagat

SEQ ID NO: 138559 - DNA, 25 bp, probe
acctaagttctcttcgcttaaagat

SEQ ID NO: 138560 - DNA, 25 bp, probe
acctaatggtctctacctaatggac

SEQ ID NO: 138561 - DNA, 25 bp, probe
acctaatcttatcttccaagtggcc

SEQ ID NO: 138562 - DNA, 25 bp, probe
acctaatcttatcttccaagtggcc

SEQ ID NO: 138563 - DNA, 25 bp, probe
accagagattttcctctccaattgg

SEQ ID NO: 138564 - DNA, 25 bp, probe
accaggattccctctactatgggga

SEQ ID NO: 138565 - DNA, 25 bp, probe
accagcagagtcactttgacaatgg

SEQ ID NO: 138566 - DNA, 25 bp, probe
accagagagtgggctttcagaagag

SEQ ID NO: 138567 - DNA, 25 bp, probe
accagcgagtgtcgtggtgcaggca

SEQ ID NO: 138568 - DNA, 25 bp, probe
accagcgcgccatgatggtgcagac

SEQ ID NO: 138569 - DNA, 25 bp, probe
accagcttgcaatgggtcagcactt

SEQ ID NO: 138570 - DNA, 25 bp, probe
accagcttgcaatgggtcagcactt

SEQ ID NO: 138571 - DNA, 25 bp, probe
accagtagaaagtgtagtgtgtagt

SEQ ID NO: 138572 - DNA, 25 bp, probe
accagaagtaaaagtaatcccagat

SEQ ID NO: 138573 - DNA, 25 bp, probe
accttagaaaacatttgcctcagcc

SEQ ID NO: 138574 - DNA, 25 bp, probe
accagctaaacaccaatttcttcct

SEQ ID NO: 138575 - DNA, 25 bp, probe
accaggagaatgtgcaactttattc

SEQ ID NO: 138576 - DNA, 25 bp, probe
accagggctgttcgaatttattctc

SEQ ID NO: 138577 - DNA, 25 bp, probe
accattggccttggtacttatggca

SEQ ID NO: 138578 - DNA, 25 bp, probe
accattggccttggtacttatggca

SEQ ID NO: 138579 - DNA, 25 bp, probe
accatcagccccagtgaattcaggt

SEQ ID NO: 138580 - DNA, 25 bp, probe
accactgctaccagtagtgggcact

SEQ ID NO: 138581 - DNA, 25 bp, probe
accacattgtccgctttgtggccat

SEQ ID NO: 138582 - DNA, 25 bp, probe
accacgtgacacacttttggccaaa

SEQ ID NO: 138583 - DNA, 25 bp, probe
accacgaagctaccttttgggatga

SEQ ID NO: 138584 - DNA, 25 bp, probe
accacgaagctaccttttgggatga

SEQ ID NO: 138585 - DNA, 25 bp, probe
accttaagccagttatcgatgggat

SEQ ID NO: 138586 - DNA, 25 bp, probe
accattacagcctgtatttgccaaa

SEQ ID NO: 138587 - DNA, 25 bp, probe
accttaccgttcacattggagatat

SEQ ID NO: 138588 - DNA, 25 bp, probe
acctgaaccctgccattctaaaatt

SEQ ID NO: 138589 - DNA, 25 bp, probe
accatgtaccctggcattgccgaca

SEQ ID NO: 138590 - DNA, 25 bp, probe
accatggagcttgtgttctcagaat

SEQ ID NO: 138591 - DNA, 25 bp, probe
accagaggatcctatcttctcagca

SEQ ID NO: 138592 - DNA, 25 bp, probe
accagatgttcacattttatgccag

SEQ ID NO: 138593 - DNA, 25 bp, probe
accagctgctggggaatcttatgac

SEQ ID NO: 138594 - DNA, 25 bp, probe
accagcaccgcgtgtgctttgagca

SEQ ID NO: 138595 - DNA, 25 bp, probe
accaggccggaacctggtggcagcc

SEQ ID NO: 138596 - DNA, 25 bp, probe
accgtccaggaaacaggtctgcaag

SEQ ID NO: 138597 - DNA, 25 bp, probe
accagccgggaaacagatttgtgaa

SEQ ID NO: 138598 - DNA, 25 bp, probe
accacgctggtgcagggatcgttac

SEQ ID NO: 138599 - DNA, 25 bp, probe
accacttgtgtccatggagcatcct

SEQ ID NO: 138600 - DNA, 25 bp, probe
accactggcatcgtgatggactccg

SEQ ID NO: 138601 - DNA, 25 bp, probe
accacatggccctaggagtgaagaa

SEQ ID NO: 138602 - DNA, 25 bp, probe
accacatggccctaggagtgaagaa

SEQ ID NO: 138603 - DNA, 25 bp, probe
accactctccgatggaagcaagaag

SEQ ID NO: 138604 - DNA, 25 bp, probe
accactctccgatggaagcaagaag

SEQ ID NO: 138605 - DNA, 25 bp, probe
accacttctcagaaaatgcagcaga

SEQ ID NO: 138606 - DNA, 25 bp, probe
accagcattctcgaaattggaggac

SEQ ID NO: 138607 - DNA, 25 bp, probe
accactctcctaatgattggaacaa

SEQ ID NO: 138608 - DNA, 25 bp, probe
accactgtttgaataagccgcacaa

SEQ ID NO: 138609 - DNA, 25 bp, probe
accactgtttgaataagccgcacaa

SEQ ID NO: 138610 - DNA, 25 bp, probe
accagctggtgctttaacctcagaa

SEQ ID NO: 138611 - DNA, 25 bp, probe
accaggtgctgcttcttcagatgat

SEQ ID NO: 138612 - DNA, 25 bp, probe
accattggtgtcatgatcagaatgt

SEQ ID NO: 138613 - DNA, 25 bp, probe
accataatcgctgtatgaaatatta

SEQ ID NO: 138614 - DNA, 25 bp, probe
accacagttgctgtatggaactcat

SEQ ID NO: 138615 - DNA, 25 bp, probe
accagcagtgtctccaggacatctt

SEQ ID NO: 138616 - DNA, 25 bp, probe
accacatgtttgacagcggaaaccc

SEQ ID NO: 138617 - DNA, 25 bp, probe
accacatgtttgacagcggaaaccc

SEQ ID NO: 138618 - DNA, 25 bp, probe
accacagtcttaacgatgaccaccc

SEQ ID NO: 138619 - DNA, 25 bp, probe
accacagtcttaacgatgaccaccc

SEQ ID NO: 138620 - DNA, 25 bp, probe
accagtgattacacctggccatccc

SEQ ID NO: 138621 - DNA, 25 bp, probe
accacagttaattcggggatcctct

SEQ ID NO: 138622 - DNA, 25 bp, probe
accacactttgatttgggttcattt

SEQ ID NO: 138623 - DNA, 25 bp, probe
accagactattctctgcgtgttgca

SEQ ID NO: 138624 - DNA, 25 bp, probe
accagtaatcctgatggtgatatta

SEQ ID NO: 138625 - DNA, 25 bp, probe
accagtaatcctgatggtgatatta

SEQ ID NO: 138626 - DNA, 25 bp, probe
accagccagatcctcttggttattt

SEQ ID NO: 138627 - DNA, 25 bp, probe
accaccagttacttgagtgtcactc

SEQ ID NO: 138628 - DNA, 25 bp, probe
accaccagttacttgagtgtcactc

SEQ ID NO: 138629 - DNA, 25 bp, probe
accaccatcttattcaggattgctt

SEQ ID NO: 138630 - DNA, 25 bp, probe
accagctatttatgagcctctgccc

SEQ ID NO: 138631 - DNA, 25 bp, probe
accagcatattggacaacctcctgc

SEQ ID NO: 138632 - DNA, 25 bp, probe
accagcccatgaacaaattcctgct

SEQ ID NO: 138633 - DNA, 25 bp, probe
accagcccatgaacaaattcctgct

SEQ ID NO: 138634 - DNA, 25 bp, probe
accagagacagtacagaatccctgc

SEQ ID NO: 138635 - DNA, 25 bp, probe
accagagccggttgacttctctgct

SEQ ID NO: 138636 - DNA, 25 bp, probe
acctgtgggtgttcaccctgcatgc

SEQ ID NO: 138637 - DNA, 25 bp, probe
acctgtgggtgttcaccctgcatgc

SEQ ID NO: 138638 - DNA, 25 bp, probe
acctgggtcagatcacaaccatcag

SEQ ID NO: 138639 - DNA, 25 bp, probe
acttcggttacggcatagcctatgt

SEQ ID NO: 138640 - DNA, 25 bp, probe
acttcggttacggcatagcctatgt

SEQ ID NO: 138641 - DNA, 25 bp, probe
acctcggataccacaagtgctttcc

SEQ ID NO: 138642 - DNA, 25 bp, probe
acctttgtaccacagaatgttcatc

SEQ ID NO: 138643 - DNA, 25 bp, probe
acctttgtaccacagaatgttcatc

SEQ ID NO: 138644 - DNA, 25 bp, probe
accttcccaaagcagacatatttgc

SEQ ID NO: 138645 - DNA, 25 bp, probe
accacatcaccccagagaaatttct

SEQ ID NO: 138646 - DNA, 25 bp, probe
accccaaccagccgacgagattcgg

SEQ ID NO: 138647 - DNA, 25 bp, probe
accggccaccggatggagaggccag

SEQ ID NO: 138648 - DNA, 25 bp, probe
accggcagatccggggggagctcag

SEQ ID NO: 138649 - DNA, 25 bp, probe
accatggtactgtggggggccaggg

SEQ ID NO: 138650 - DNA, 25 bp, probe
accagttcctgttggacctgggcgt

SEQ ID NO: 138651 - DNA, 25 bp, probe
accagtctccattttgcaaatgctg

SEQ ID NO: 138652 - DNA, 25 bp, probe
accagttatctgttgctgcataatg

SEQ ID NO: 138653 - DNA, 25 bp, probe
accacttacagttgcttatattttt

SEQ ID NO: 138654 - DNA, 25 bp, probe
accatttacatgcaccttatatttc

SEQ ID NO: 138655 - DNA, 25 bp, probe
accattctaatgtatgtagtatttc

SEQ ID NO: 138656 - DNA, 25 bp, probe
accatcctgctcctagtgagtatct

SEQ ID NO: 138657 - DNA, 25 bp, probe
accatcctgctcctagtgagtatct

SEQ ID NO: 138658 - DNA, 25 bp, probe
accaccagctattcaaagatacata

SEQ ID NO: 138659 - DNA, 25 bp, probe
accaccagctattcaaagatacata

SEQ ID NO: 138660 - DNA, 25 bp, probe
accaccaagatgttatctgatccca

SEQ ID NO: 138661 - DNA, 25 bp, probe
accatccagaatgaacatgacttct

SEQ ID NO: 138662 - DNA, 25 bp, probe
accacccatatctatcctggattct

SEQ ID NO: 138663 - DNA, 25 bp, probe
accacacacactgttgctggatctt

SEQ ID NO: 138664 - DNA, 25 bp, probe
accacacgctgtctcttgagatttg

SEQ ID NO: 138665 - DNA, 25 bp, probe
accacatcgctcacatagtggagct

SEQ ID NO: 138666 - DNA, 25 bp, probe
accatgctggtccttgccatggact

SEQ ID NO: 138667 - DNA, 25 bp, probe
accatctgtgtgctctacacagacc

SEQ ID NO: 138668 - DNA, 25 bp, probe
accatgtatgtgtatctatagccac

SEQ ID NO: 138669 - DNA, 25 bp, probe
accatgtatgtgtatctatagccac

SEQ ID NO: 138670 - DNA, 25 bp, probe
accatgtgattgacgcgacgctcac

SEQ ID NO: 138671 - DNA, 25 bp, probe
accatcgatatgaggcagggccgta

SEQ ID NO: 138672 - DNA, 25 bp, probe
accatcgatatgaggcagggccgta

SEQ ID NO: 138673 - DNA, 25 bp, probe
accattttgacagtcgagaacgaag

SEQ ID NO: 138674 - DNA, 25 bp, probe
accaggattatagaggacacagcaa

SEQ ID NO: 138675 - DNA, 25 bp, probe
accatggtgtctaaagatataggaa

SEQ ID NO: 138676 - DNA, 25 bp, probe
accaggtgactgacaaggtggaaac

SEQ ID NO: 138677 - DNA, 25 bp, probe
accagaggactgatcacggcataga

SEQ ID NO: 138678 - DNA, 25 bp, probe
accagaggactgatcacggcataga

SEQ ID NO: 138679 - DNA, 25 bp, probe
accatgcacatagaatacggcacag

SEQ ID NO: 138680 - DNA, 25 bp, probe
accagcaatcaggaaagcacaacaa

SEQ ID NO: 138681 - DNA, 25 bp, probe
accatgattgatgatgaagccttaa

SEQ ID NO: 138682 - DNA, 25 bp, probe
accagtctcagcaagacatcctaca

SEQ ID NO: 138683 - DNA, 25 bp, probe
accattctcataagattctctcatc

SEQ ID NO: 138684 - DNA, 25 bp, probe
accatcctaaagatccagtccagag

SEQ ID NO: 138685 - DNA, 25 bp, probe
acccctaaaagttctgctcacagtc

SEQ ID NO: 138686 - DNA, 25 bp, probe
accaccttaatacagctttgagctc

SEQ ID NO: 138687 - DNA, 25 bp, probe
accactatgtatatccagttaactg

SEQ ID NO: 138688 - DNA, 25 bp, probe
accactctgtaccatctttgtaact

SEQ ID NO: 138689 - DNA, 25 bp, probe
accacttacacactctttttgattg

SEQ ID NO: 138690 - DNA, 25 bp, probe
accacttacacactctttttgattg

SEQ ID NO: 138691 - DNA, 25 bp, probe
accttttccttcggtttgatgctga

SEQ ID NO: 138692 - DNA, 25 bp, probe
accttttccttcggtttgatgctga

SEQ ID NO: 138693 - DNA, 25 bp, probe
cccttcttacttaacctgaagctag

SEQ ID NO: 138694 - DNA, 25 bp, probe
accgtatttccaacacacgatagta

SEQ ID NO: 138695 - DNA, 25 bp, probe
tacctttttactgaccgttgtgaat

SEQ ID NO: 138696 - DNA, 25 bp, probe
cagccttcgttatgaacttttggaa

SEQ ID NO: 138697 - DNA, 25 bp, probe
accttctggtcaaaaactcttgcct

SEQ ID NO: 138698 - DNA, 25 bp, probe
accagtgctggtttaaacattcagc

SEQ ID NO: 138699 - DNA, 25 bp, probe
accagctgccagattattacgacac

SEQ ID NO: 138700 - DNA, 25 bp, probe
accatgtgggaaatagctacgacgc

SEQ ID NO: 138701 - DNA, 25 bp, probe
accactgtggaatcgccacagcagc

SEQ ID NO: 138702 - DNA, 25 bp, probe
accatgctggaagtcaccatcactg

SEQ ID NO: 138703 - DNA, 25 bp, probe
accagcagctaagtgctgacacatc

SEQ ID NO: 138704 - DNA, 25 bp, probe
accagcagctaagtgctgacacatc

SEQ ID NO: 138705 - DNA, 25 bp, probe
accagcaggcacgttaactcgaatt

SEQ ID NO: 138706 - DNA, 25 bp, probe
accactggcagcaatttgactggaa

SEQ ID NO: 138707 - DNA, 25 bp, probe
accagctgacccagatcctgaaagt

SEQ ID NO: 138708 - DNA, 25 bp, probe
accaggcaacacataccgtacagag

SEQ ID NO: 138709 - DNA, 25 bp, probe
accaggagagcaggtgacacagtga

SEQ ID NO: 138710 - DNA, 25 bp, probe
accaggcagatgggggcctgctcca

SEQ ID NO: 138711 - DNA, 25 bp, probe
accagcacgatgtgccagtcattcc

SEQ ID NO: 138712 - DNA, 25 bp, probe
accagctcagactggcagtcgaccg

SEQ ID NO: 138713 - DNA, 25 bp, probe
accacgatgcgctgaaggaggactg

SEQ ID NO: 138714 - DNA, 25 bp, probe
acccgtcctgaacgggcgactgtgt

SEQ ID NO: 138715 - DNA, 25 bp, probe
acctctacctagtgctggaacggta

SEQ ID NO: 138716 - DNA, 25 bp, probe
accactactctgaggtggacacctc

SEQ ID NO: 138717 - DNA, 25 bp, probe
accactactctgaggtggacacctc

SEQ ID NO: 138718 - DNA, 25 bp, probe
acctctacgctttggggctaattct

SEQ ID NO: 138719 - DNA, 25 bp, probe
acctctacgctttggggctaattct

SEQ ID NO: 138720 - DNA, 25 bp, probe
acatcttacagaaaaccctccttgt

SEQ ID NO: 138721 - DNA, 25 bp, probe
acatcttacagaaaaccctccttgt

SEQ ID NO: 138722 - DNA, 25 bp, probe
accactaaacagcaccaatccttgc

SEQ ID NO: 138723 - DNA, 25 bp, probe
accactaaacagcaccaatccttgc

SEQ ID NO: 138724 - DNA, 25 bp, probe
accactgctaagggactctatccat

SEQ ID NO: 138725 - DNA, 25 bp, probe
accactccacagagaactctccaat

SEQ ID NO: 138726 - DNA, 25 bp, probe
acccacccttatgagatctccagaa

SEQ ID NO: 138727 - DNA, 25 bp, probe
acccacccttatgagatctccagaa

SEQ ID NO: 138728 - DNA, 25 bp, probe
acccacccttatgagatctccagaa

SEQ ID NO: 138729 - DNA, 25 bp, probe
accacctcaaatttatgatgcccag

SEQ ID NO: 138730 - DNA, 25 bp, probe
accacctcaacattggagacatcac

SEQ ID NO: 138731 - DNA, 25 bp, probe
accacccaatcattctaaagcagcc

SEQ ID NO: 138732 - DNA, 25 bp, probe
accagaccattccgcttcaaggcag

SEQ ID NO: 138733 - DNA, 25 bp, probe
accagtgccactcactgaaggagag

SEQ ID NO: 138734 - DNA, 25 bp, probe
accactgcgaccacaagaaggatga

SEQ ID NO: 138735 - DNA, 25 bp, probe
accactcggcctgaagagtttgacc

SEQ ID NO: 138736 - DNA, 25 bp, probe
accactcggcctgaagagtttgacc

SEQ ID NO: 138737 - DNA, 25 bp, probe
accagtcagagttcgaaggctttga

SEQ ID NO: 138738 - DNA, 25 bp, probe
accagtctgattttgaagggttctc

SEQ ID NO: 138739 - DNA, 25 bp, probe
acctttatccctacagggtatctgc

SEQ ID NO: 138740 - DNA, 25 bp, probe
accatatttacctatacggaggctg

SEQ ID NO: 138741 - DNA, 25 bp, probe
accagtctgtaaaatacatgtacct

SEQ ID NO: 138742 - DNA, 25 bp, probe
accagtgcagtttctaagcatgtag

SEQ ID NO: 138743 - DNA, 25 bp, probe
accagtgcagcattgacttgggtga

SEQ ID NO: 138744 - DNA, 25 bp, probe
accagtgcagcattgacttgggtga

SEQ ID NO: 138745 - DNA, 25 bp, probe
accaccagcatcgacatgtgggctg

SEQ ID NO: 138746 - DNA, 25 bp, probe
accagctcatgggcaatggggtgtg

SEQ ID NO: 138747 - DNA, 25 bp, probe
accactctgtgcacggagttggcat

SEQ ID NO: 138748 - DNA, 25 bp, probe
accagtgttgctcccaaagtggctt

SEQ ID NO: 138749 - DNA, 25 bp, probe
accatatgttgctccagaacttctg

SEQ ID NO: 138750 - DNA, 25 bp, probe
accatactgctcataataacatttt

SEQ ID NO: 138751 - DNA, 25 bp, probe
accatctttctatgaaaagctgtgt

SEQ ID NO: 138752 - DNA, 25 bp, probe
accactgcttcttgggaggagtggt

SEQ ID NO: 138753 - DNA, 25 bp, probe
accaggttgcttgtgagggatgagt

SEQ ID NO: 138754 - DNA, 25 bp, probe
accaggtttatcttgcagattatgg

SEQ ID NO: 138755 - DNA, 25 bp, probe
accggcatattattccatatctttg

SEQ ID NO: 138756 - DNA, 25 bp, probe
accgtggatgtgttccattttgcta

SEQ ID NO: 138757 - DNA, 25 bp, probe
accagtgtgatgtcaggccattgtc

SEQ ID NO: 138758 - DNA, 25 bp, probe
accagcttgtattggccatctggaa

SEQ ID NO: 138759 - DNA, 25 bp, probe
accagtatgtcagttcagtcggaac

SEQ ID NO: 138760 - DNA, 25 bp, probe
accacgatgtcggtgcagaacgaag

SEQ ID NO: 138761 - DNA, 25 bp, probe
accacgagacgctgcagcagatcat

SEQ ID NO: 138762 - DNA, 25 bp, probe
accacgagacgctgcagcagatcat

SEQ ID NO: 138763 - DNA, 25 bp, probe
accagcaggaagtagccgcatttga

SEQ ID NO: 138764 - DNA, 25 bp, probe
accagagaaagatgcaagacatgta

SEQ ID NO: 138765 - DNA, 25 bp, probe
accagggacaaccagggcattctct

SEQ ID NO: 138766 - DNA, 25 bp, probe
accagggacaaccagggcattctct

SEQ ID NO: 138767 - DNA, 25 bp, probe
accagggacaaccagggcattctct

SEQ ID NO: 138768 - DNA, 25 bp, probe
accaggagcaaaaggcggttcgtct

SEQ ID NO: 138769 - DNA, 25 bp, probe
accaggtgaacactgtggggatccc

SEQ ID NO: 138770 - DNA, 25 bp, probe
accagatgtggtttggggcagatct

SEQ ID NO: 138771 - DNA, 25 bp, probe
accagtcggtgagtgagcagatcaa

SEQ ID NO: 138772 - DNA, 25 bp, probe
accacctggtgaagacgctgtacat

SEQ ID NO: 138773 - DNA, 25 bp, probe
accacctggtgaagacgctgtacat

SEQ ID NO: 138774 - DNA, 25 bp, probe
accaccgagtgctgaaggatgaatt

SEQ ID NO: 138775 - DNA, 25 bp, probe
accaccgagtgctgaaggatgaatt

SEQ ID NO: 138776 - DNA, 25 bp, probe
accacctcagcgtgctggagaagac

SEQ ID NO: 138777 - DNA, 25 bp, probe
accagcctggccaacatggtgaaac

SEQ ID NO: 138778 - DNA, 25 bp, probe
accagcccgctcaatgcagaaaaac

SEQ ID NO: 138779 - DNA, 25 bp, probe
accagtatcgctcatagatcagcaa

SEQ ID NO: 138780 - DNA, 25 bp, probe
accagtacattgacgcagacacaga

SEQ ID NO: 138781 - DNA, 25 bp, probe
acctgtagctataccagccagactc

SEQ ID NO: 138782 - DNA, 25 bp, probe
accttacaaccatgctgctgattgg

SEQ ID NO: 138783 - DNA, 25 bp, probe
accttacaaccatgctgctgattgg

SEQ ID NO: 138784 - DNA, 25 bp, probe
accttacaaccatgctgctgattgg

SEQ ID NO: 138785 - DNA, 25 bp, probe
accttatcaaactacatgtttagta

SEQ ID NO: 138786 - DNA, 25 bp, probe
acctttggtacatgcctgttaatat

SEQ ID NO: 138787 - DNA, 25 bp, probe
accatttgggttgcttctgctaagt

SEQ ID NO: 138788 - DNA, 25 bp, probe
acctttagtgttactgaatcttagt

SEQ ID NO: 138789 - DNA, 25 bp, probe
accctttcatttactatatcttcga

SEQ ID NO: 138790 - DNA, 25 bp, probe
acccattgtgcatcttttactgaaa

SEQ ID NO: 138791 - DNA, 25 bp, probe
aactttttagttctcactacaatgt

SEQ ID NO: 138792 - DNA, 25 bp, probe
acctttgtaaaacagcctatagatg

SEQ ID NO: 138793 - DNA, 25 bp, probe
accttgagaaaatctaccgagaagt

SEQ ID NO: 138794 - DNA, 25 bp, probe
acctgttaacaatcatacttggaaa

SEQ ID NO: 138795 - DNA, 25 bp, probe
accagattacaatcctgaagggaaa

SEQ ID NO: 138796 - DNA, 25 bp, probe
accagatctacacacttgcagtttg

SEQ ID NO: 138797 - DNA, 25 bp, probe
accagatctacacacttgcagtttg

SEQ ID NO: 138798 - DNA, 25 bp, probe
accatgatttcatagcccagtatgt

SEQ ID NO: 138799 - DNA, 25 bp, probe
accagtttctggcatagcgctattt

SEQ ID NO: 138800 - DNA, 25 bp, probe
accagaccctgggattggctatggg

SEQ ID NO: 138801 - DNA, 25 bp, probe
accagaccctgggattggctatggg

SEQ ID NO: 138802 - DNA, 25 bp, probe
acctaccctgcggatggggaaatgg

SEQ ID NO: 138803 - DNA, 25 bp, probe
accttctcccaggtaggggcaggag

SEQ ID NO: 138804 - DNA, 25 bp, probe
acctttgaccgtacaggtacagaag

SEQ ID NO: 138805 - DNA, 25 bp, probe
acctgatgggctcctacaggtcggt

SEQ ID NO: 138806 - DNA, 25 bp, probe
acctatgggcgtaggcggggcgagt

SEQ ID NO: 138807 - DNA, 25 bp, probe
acctgaagacccaggggtgcggcat

SEQ ID NO: 138808 - DNA, 25 bp, probe
acccaagaccgctcgggaaatgcag

SEQ ID NO: 138809 - DNA, 25 bp, probe
accaccagatctgcttcaaggaaaa

SEQ ID NO: 138810 - DNA, 25 bp, probe
accaccaatctgtgaaagtaaagca

SEQ ID NO: 138811 - DNA, 25 bp, probe
accaccaacgcttgaatatggctga

SEQ ID NO: 138812 - DNA, 25 bp, probe
accaccatcctgagcacatatcagc

SEQ ID NO: 138813 - DNA, 25 bp, probe
accatctaccagatcatgtacagct

SEQ ID NO: 138814 - DNA, 25 bp, probe
accagtaccaatgattaccatgatg

SEQ ID NO: 138815 - DNA, 25 bp, probe
accaggactcctgaaacacagagct

SEQ ID NO: 138816 - DNA, 25 bp, probe
accagtacccttacatataaacact

SEQ ID NO: 138817 - DNA, 25 bp, probe
accagtcacggcttactgcaagaga

SEQ ID NO: 138818 - DNA, 25 bp, probe
accaggacgtgctcattgagtggct

SEQ ID NO: 138819 - DNA, 25 bp, probe
accagccatctacttcttggctggc

SEQ ID NO: 138820 - DNA, 25 bp, probe
accccatattcttttacatggcttc

SEQ ID NO: 138821 - DNA, 25 bp, probe
accccatattcttttacatggcttc

SEQ ID NO: 138822 - DNA, 25 bp, probe
acctttatgtaagtttatggccttg

SEQ ID NO: 138823 - DNA, 25 bp, probe
accatttattacatcgttcatccgg

SEQ ID NO: 138824 - DNA, 25 bp, probe
acctttaaacctatcttccaggcag

SEQ ID NO: 138825 - DNA, 25 bp, probe
acctttaaacctatcttccaggcag

SEQ ID NO: 138826 - DNA, 25 bp, probe
accttctttaccagatgctttgtgg

SEQ ID NO: 138827 - DNA, 25 bp, probe
acctctctttagctcaatttctggg

SEQ ID NO: 138828 - DNA, 25 bp, probe
accatcctgattggcgtctttgttg

SEQ ID NO: 138829 - DNA, 25 bp, probe
accacctgatcagctggttattgct

SEQ ID NO: 138830 - DNA, 25 bp, probe
accacctggacagggttgcagctca

SEQ ID NO: 138831 - DNA, 25 bp, probe
accagcttggaagggttgtgtcttc

SEQ ID NO: 138832 - DNA, 25 bp, probe
accatcttggttgttgtgcttgtcc

SEQ ID NO: 138833 - DNA, 25 bp, probe
accatttttgtaggcctgcattgta

SEQ ID NO: 138834 - DNA, 25 bp, probe
accattgttttagcagtgcgtgttc

SEQ ID NO: 138835 - DNA, 25 bp, probe
acctttttatacatggcttttgctc

SEQ ID NO: 138836 - DNA, 25 bp, probe
accttttcagtatgtcacctttgct

SEQ ID NO: 138837 - DNA, 25 bp, probe
accattgttcagaagacctccctgt

SEQ ID NO: 138838 - DNA, 25 bp, probe
accatgtcttgcaatgagcacctgt

SEQ ID NO: 138839 - DNA, 25 bp, probe
accattcagtgcatcatacctagtc

SEQ ID NO: 138840 - DNA, 25 bp, probe
accatgctagcctgctacttggtga

SEQ ID NO: 138841 - DNA, 25 bp, probe
accatgatgccctgtattggtccat

SEQ ID NO: 138842 - DNA, 25 bp, probe
accagtcctcaagtagtttctcaaa

SEQ ID NO: 138843 - DNA, 25 bp, probe
accagatcactatgttgtagttggg

SEQ ID NO: 138844 - DNA, 25 bp, probe
accagtgcctttaggtgagattcag

SEQ ID NO: 138845 - DNA, 25 bp, probe
accagttacttgagtgtcactcagc

SEQ ID NO: 138846 - DNA, 25 bp, probe
accagtttttgtttctcaagctcag

SEQ ID NO: 138847 - DNA, 25 bp, probe
accatgttcacattctttctaacca

SEQ ID NO: 138848 - DNA, 25 bp, probe
accattctccggattttatctcaga

SEQ ID NO: 138849 - DNA, 25 bp, probe
accagcctccgtatttcagactgaa

SEQ ID NO: 138850 - DNA, 25 bp, probe
accagcgcccagcgttagggctgga

SEQ ID NO: 138851 - DNA, 25 bp, probe
accacctcagagctgttcaggaagc

SEQ ID NO: 138852 - DNA, 25 bp, probe
accacctcagagctgttcaggaagc

SEQ ID NO: 138853 - DNA, 25 bp, probe
acctggtggagcatttcaagaagac

SEQ ID NO: 138854 - DNA, 25 bp, probe
acctttcgagactcctcaagcatga

SEQ ID NO: 138855 - DNA, 25 bp, probe
accttactaacttctccgcaagttg

SEQ ID NO: 138856 - DNA, 25 bp, probe
accttaatacctcttgtgacagtta

SEQ ID NO: 138857 - DNA, 25 bp, probe
acctcgaaacgtcttgcgggtgtga

SEQ ID NO: 138858 - DNA, 25 bp, probe
acctcgaagtagtggctgcgggtgc

SEQ ID NO: 138859 - DNA, 25 bp, probe
acctctaagccgagagaggaggagg

SEQ ID NO: 138860 - DNA, 25 bp, probe
accatcaacgccaacgtgcaggtgg

SEQ ID NO: 138861 - DNA, 25 bp, probe
accatcaacgccaacgtgcaggtgg

SEQ ID NO: 138862 - DNA, 25 bp, probe
accatcaactggccaggtgaatctg

SEQ ID NO: 138863 - DNA, 25 bp, probe
accagctggcaactcagagggtctt

SEQ ID NO: 138864 - DNA, 25 bp, probe
accagctgtcaaacaatgaggtgat

SEQ ID NO: 138865 - DNA, 25 bp, probe
accagtgcaacagctctgatggttg

SEQ ID NO: 138866 - DNA, 25 bp, probe
accagtgcaacagctctgatggttg

SEQ ID NO: 138867 - DNA, 25 bp, probe
accagctgaagcgcatcatggaagt

SEQ ID NO: 138868 - DNA, 25 bp, probe
acctgctgcaagccgtgcagcgcaa

SEQ ID NO: 138869 - DNA, 25 bp, probe
acctgctgcaagccgtgcagcgcaa

SEQ ID NO: 138870 - DNA, 25 bp, probe
acctgtggggagacaccagactggg

SEQ ID NO: 138871 - DNA, 25 bp, probe
accttcgaatacatccagagtgtgc

SEQ ID NO: 138872 - DNA, 25 bp, probe
acctggtgattactgtcctggtgga

SEQ ID NO: 138873 - DNA, 25 bp, probe
acctatgaactacggactgcactga

SEQ ID NO: 138874 - DNA, 25 bp, probe
accagaacactgtgggtgatctgct

SEQ ID NO: 138875 - DNA, 25 bp, probe
accagaacactgtgggtgatctgct

SEQ ID NO: 138876 - DNA, 25 bp, probe
accagaacctgcaggcgaaccatat

SEQ ID NO: 138877 - DNA, 25 bp, probe
acccatgaccagaggggatcctatg

SEQ ID NO: 138878 - DNA, 25 bp, probe
acctcatgaaggacggtacatcctg

SEQ ID NO: 138879 - DNA, 25 bp, probe
acctaccacatgaggatatcacttc

SEQ ID NO: 138880 - DNA, 25 bp, probe
acctactccaagagtaagttctgct

SEQ ID NO: 138881 - DNA, 25 bp, probe
acctcacttccgaatgtaaaaggct

SEQ ID NO: 138882 - DNA, 25 bp, probe
actccgtatacgtgtacaaggtgct

SEQ ID NO: 138883 - DNA, 25 bp, probe
acctcgttaagatgtagtgactgcg

SEQ ID NO: 138884 - DNA, 25 bp, probe
acccaatcgaaatatactgatccag

SEQ ID NO: 138885 - DNA, 25 bp, probe
acccaatcgaaatatactgatccag

SEQ ID NO: 138886 - DNA, 25 bp, probe
acgccgaaaaatgaagtgcacaaga

SEQ ID NO: 138887 - DNA, 25 bp, probe
acctcgggaaatgagaagacggctc

SEQ ID NO: 138888 - DNA, 25 bp, probe
acctcgggaaatgagaagacggctc

SEQ ID NO: 138889 - DNA, 25 bp, probe
accctggaggagatgccaaccgttc

SEQ ID NO: 138890 - DNA, 25 bp, probe
acccttcaggaagcatataccgggg

SEQ ID NO: 138891 - DNA, 25 bp, probe
acccattgattgtattataaccact

SEQ ID NO: 138892 - DNA, 25 bp, probe
accatgattgaacataatagcacga

SEQ ID NO: 138893 - DNA, 25 bp, probe
accagcagctgcaactgaaaagcaa

SEQ ID NO: 138894 - DNA, 25 bp, probe
acctgctgctgctcagatctaaaac

SEQ ID NO: 138895 - DNA, 25 bp, probe
acctcactgcacgcatcgaaggatc

SEQ ID NO: 138896 - DNA, 25 bp, probe
acctccataccctgatcatagcaga

SEQ ID NO: 138897 - DNA, 25 bp, probe
acctcaacacccttatgattcacac

SEQ ID NO: 138898 - DNA, 25 bp, probe
acctcaacacccttatgattcacac

SEQ ID NO: 138899 - DNA, 25 bp, probe
acctgcaacaaggctctgaaacccg

SEQ ID NO: 138900 - DNA, 25 bp, probe
accatcaccagaggcactaaaattc

SEQ ID NO: 138901 - DNA, 25 bp, probe
accatagcacagcactgctaaatac

SEQ ID NO: 138902 - DNA, 25 bp, probe
accaggctgcgatcatggaactaga

SEQ ID NO: 138903 - DNA, 25 bp, probe
accaggctggcatgaggaattctga

SEQ ID NO: 138904 - DNA, 25 bp, probe
accagctgcgccgggaaattgagat

SEQ ID NO: 138905 - DNA, 25 bp, probe
accagctggcagagaaggacgagtt

SEQ ID NO: 138906 - DNA, 25 bp, probe
accagcacaggaaaagcggttgtta

SEQ ID NO: 138907 - DNA, 25 bp, probe
accagcacaaatcgaagcaggaatt

SEQ ID NO: 138908 - DNA, 25 bp, probe
accatgccatttcgggcagaaaccg

SEQ ID NO: 138909 - DNA, 25 bp, probe
accatgctgctgattggtggtccct

SEQ ID NO: 138910 - DNA, 25 bp, probe
accatgctgctgattggtggtccct

SEQ ID NO: 138911 - DNA, 25 bp, probe
accatgcattcctaagaagtcccca

SEQ ID NO: 138912 - DNA, 25 bp, probe
accatgcattcctaagaagtcccca

SEQ ID NO: 138913 - DNA, 25 bp, probe
accttacctagatatctgctactca

SEQ ID NO: 138914 - DNA, 25 bp, probe
acctgaaagggatgattgccaacag

SEQ ID NO: 138915 - DNA, 25 bp, probe
accataaagtggtcacttccaccgt

SEQ ID NO: 138916 - DNA, 25 bp, probe
accatgtaagtggaagctttactgc

SEQ ID NO: 138917 - DNA, 25 bp, probe
accatgtaggaagagttctcctgag

SEQ ID NO: 138918 - DNA, 25 bp, probe
accattaggaaaatcttctctgcag

SEQ ID NO: 138919 - DNA, 25 bp, probe
accttcaggaaaacggctgcggcct

SEQ ID NO: 138920 - DNA, 25 bp, probe
accttagcaactacactggcggtcc

SEQ ID NO: 138921 - DNA, 25 bp, probe
accattcagtgcacgtgtgggtccc

SEQ ID NO: 138922 - DNA, 25 bp, probe
accatctcagtgaggggcaggagct

SEQ ID NO: 138923 - DNA, 25 bp, probe
accagcaagctgtgagagtgcaggc

SEQ ID NO: 138924 - DNA, 25 bp, probe
accagctcgcgcagagactggcgca

SEQ ID NO: 138925 - DNA, 25 bp, probe
acctcattcagcagctgacgctggc

SEQ ID NO: 138926 - DNA, 25 bp, probe
accagcatcgacatgtgggctgtgg

SEQ ID NO: 138927 - DNA, 25 bp, probe
accagcaatgacaacatgggcttct

SEQ ID NO: 138928 - DNA, 25 bp, probe
accagtctgtctactgtggtgatct

SEQ ID NO: 138929 - DNA, 25 bp, probe
accagttgcatcgtgcggggcaaaa

SEQ ID NO: 138930 - DNA, 25 bp, probe
accagatgatccagcgggaggacca

SEQ ID NO: 138931 - DNA, 25 bp, probe
accagatcacctggtggaggtaccg

SEQ ID NO: 138932 - DNA, 25 bp, probe
accagacagcctgtggaactgaccc

SEQ ID NO: 138933 - DNA, 25 bp, probe
acctgcacgacaactggatcctgca

SEQ ID NO: 138934 - DNA, 25 bp, probe
accagaggatgaatatgatgtcctc

SEQ ID NO: 138935 - DNA, 25 bp, probe
accagtgtgtgtttatgtgtgctca

SEQ ID NO: 138936 - DNA, 25 bp, probe
accaggtgacattgcaggtggccat

SEQ ID NO: 138937 - DNA, 25 bp, probe
accaggtgcgcaagaagcggcagat

SEQ ID NO: 138938 - DNA, 25 bp, probe
accatggtgctggtggtgctgacgt

SEQ ID NO: 138939 - DNA, 25 bp, probe
accatgacgacactgggctacggag

SEQ ID NO: 138940 - DNA, 25 bp, probe
accatgatctgatgggactactgga

SEQ ID NO: 138941 - DNA, 25 bp, probe
accattatatgcaaaagtactgtat

SEQ ID NO: 138942 - DNA, 25 bp, probe
accattgatgatacaaagagagctg

SEQ ID NO: 138943 - DNA, 25 bp, probe
acctagcaatcagtcagggctgcag

SEQ ID NO: 138944 - DNA, 25 bp, probe
accatggaagctgagaggccagacc

SEQ ID NO: 138945 - DNA, 25 bp, probe
accatgtaactctagtgtccttcct

SEQ ID NO: 138946 - DNA, 25 bp, probe
accatgttacactggactctaagcc

SEQ ID NO: 138947 - DNA, 25 bp, probe
accatgtctacatctggagaagaac

SEQ ID NO: 138948 - DNA, 25 bp, probe
accatgtctacatctggagaagaac

SEQ ID NO: 138949 - DNA, 25 bp, probe
accagaccacagcggagaagcagtc

SEQ ID NO: 138950 - DNA, 25 bp, probe
accagcagctactagggagaagtct

SEQ ID NO: 138951 - DNA, 25 bp, probe
acccagctcctagggtacagtctac

SEQ ID NO: 138952 - DNA, 25 bp, probe
acctacttgctggggtacagttgct

SEQ ID NO: 138953 - DNA, 25 bp, probe
acctaaatatgctggatatagcttt

SEQ ID NO: 138954 - DNA, 25 bp, probe
acctgatacaacagaaaagtttcac

SEQ ID NO: 138955 - DNA, 25 bp, probe
acctgaggccacaggccaagttcta

SEQ ID NO: 138956 - DNA, 25 bp, probe
actgctggggagagtccggtttact

SEQ ID NO: 138957 - DNA, 25 bp, probe
accagaatggagacgctcccatttt

SEQ ID NO: 138958 - DNA, 25 bp, probe
accataagggactgtgccagatgtt

SEQ ID NO: 138959 - DNA, 25 bp, probe
accagaagggatacagtgtgaagtc

SEQ ID NO: 138960 - DNA, 25 bp, probe
accagaggagatacagctgcttaga

SEQ ID NO: 138961 - DNA, 25 bp, probe
accagaggagatacagctgcttaga

SEQ ID NO: 138962 - DNA, 25 bp, probe
accatcctcagaacaggaacagcct

SEQ ID NO: 138963 - DNA, 25 bp, probe
accatcctcatgaatccgaaactct

SEQ ID NO: 138964 - DNA, 25 bp, probe
acctcccaggcacggaagactttgt

SEQ ID NO: 138965 - DNA, 25 bp, probe
acctatacggaggctgatgagagct

SEQ ID NO: 138966 - DNA, 25 bp, probe
accttactgtgaatttaggcatctc

SEQ ID NO: 138967 - DNA, 25 bp, probe
accttcagctgaaaccatatggccc

SEQ ID NO: 138968 - DNA, 25 bp, probe
accagtccaaaagtctgatgacctc

SEQ ID NO: 138969 - DNA, 25 bp, probe
accatggacaaatgcctatgaaatt

SEQ ID NO: 138970 - DNA, 25 bp, probe
accatggactggatgctttataaat

SEQ ID NO: 138971 - DNA, 25 bp, probe
accatgcccagctaattttataatt

SEQ ID NO: 138972 - DNA, 25 bp, probe
acctgcctccaagatttcagaagcc

SEQ ID NO: 138973 - DNA, 25 bp, probe
acctcctcagcctgtttgaggacac

SEQ ID NO: 138974 - DNA, 25 bp, probe
accatccaccctggtgttgactgac

SEQ ID NO: 138975 - DNA, 25 bp, probe
accattgcggtcgcgcggatcatga

SEQ ID NO: 138976 - DNA, 25 bp, probe
accatccgcgaggtggcggtgctga

SEQ ID NO: 138977 - DNA, 25 bp, probe
accatgccaggggtggcaatcggtt

SEQ ID NO: 138978 - DNA, 25 bp, probe
accatgccaggggtggcaatcggtt

SEQ ID NO: 138979 - DNA, 25 bp, probe
acctctcagaggcatgtcgatctga

SEQ ID NO: 138980 - DNA, 25 bp, probe
acctctcagaggcatgtcgatctga

SEQ ID NO: 138981 - DNA, 25 bp, probe
acctctcatgcactgatatgtccac

SEQ ID NO: 138982 - DNA, 25 bp, probe
accttcatggagatgcccactctcc

SEQ ID NO: 138983 - DNA, 25 bp, probe
acctgaaggtttccaacttgctcat

SEQ ID NO: 138984 - DNA, 25 bp, probe
accatgaagaaattcgaatctccca

SEQ ID NO: 138985 - DNA, 25 bp, probe
acctaagctcagtatgcaaaagccc

SEQ ID NO: 138986 - DNA, 25 bp, probe
cacctgaggcccttaactacggccg

SEQ ID NO: 138987 - DNA, 25 bp, probe
accagaggcccaacgactaagccag

SEQ ID NO: 138988 - DNA, 25 bp, probe
accatggtcggaacgccatactgga

SEQ ID NO: 138989 - DNA, 25 bp, probe
accaggtttgagaagccacgcatgg

SEQ ID NO: 138990 - DNA, 25 bp, probe
accaggccttgaaagcgctgcgggc

SEQ ID NO: 138991 - DNA, 25 bp, probe
accatggccttatgaggcaggtgag

SEQ ID NO: 138992 - DNA, 25 bp, probe
accagatgctccaaaagtgggtgat

SEQ ID NO: 138993 - DNA, 25 bp, probe
accagatgctccaaaagtgggtgat

SEQ ID NO: 138994 - DNA, 25 bp, probe
accagatcactcaaaaaggtgtgtc

SEQ ID NO: 138995 - DNA, 25 bp, probe
accatgctcaatgaaaaggtgattg

SEQ ID NO: 138996 - DNA, 25 bp, probe
acctgtcatcaggcccaacgtaggc

SEQ ID NO: 138997 - DNA, 25 bp, probe
acctgtcatcaggcccaacgtaggc

SEQ ID NO: 138998 - DNA, 25 bp, probe
acctgtcatcaggcccaacgtaggc

SEQ ID NO: 138999 - DNA, 25 bp, probe
acctcctggtcaccaacaccaggga

SEQ ID NO: 139000 - DNA, 25 bp, probe
acctctccctcataattccagagaa

SEQ ID NO: 139001 - DNA, 25 bp, probe
accattccctcatggatgaatatgg

SEQ ID NO: 139002 - DNA, 25 bp, probe
accatctccctcatgagtaagactg

SEQ ID NO: 139003 - DNA, 25 bp, probe
accatcccagtgactgatataaaca

SEQ ID NO: 139004 - DNA, 25 bp, probe
accatcccatctcctcaaatatgaa

SEQ ID NO: 139005 - DNA, 25 bp, probe
accatgcccgcataaaactgaaggt

SEQ ID NO: 139006 - DNA, 25 bp, probe
acctggcagtattaaaactgaatga

SEQ ID NO: 139007 - DNA, 25 bp, probe
acctgagcaaacacttactgaagaa

SEQ ID NO: 139008 - DNA, 25 bp, probe
acctagctaactgccttctatgaaa

SEQ ID NO: 139009 - DNA, 25 bp, probe
acctcaggaaccagctggcagagaa

SEQ ID NO: 139010 - DNA, 25 bp, probe
accatcatgtacagttgctggcatg

SEQ ID NO: 139011 - DNA, 25 bp, probe
accatcgatgaggtcttcggctttg

SEQ ID NO: 139012 - DNA, 25 bp, probe
accatcctgagcacatatcagctgt

SEQ ID NO: 139013 - DNA, 25 bp, probe
accgacggcatggagatgctgctgt

SEQ ID NO: 139014 - DNA, 25 bp, probe
accatgccctgcaaagaggctgatt

SEQ ID NO: 139015 - DNA, 25 bp, probe
accatcatctccatatgagagtgtg

SEQ ID NO: 139016 - DNA, 25 bp, probe
acctactatgcttcaggcatggtgc

SEQ ID NO: 139017 - DNA, 25 bp, probe
accgatcgtctctaggatgatatgc

SEQ ID NO: 139018 - DNA, 25 bp, probe
accgatcgtctctaggatgatatgc

SEQ ID NO: 139019 - DNA, 25 bp, probe
accagatcgacttgatcgtgcagct

SEQ ID NO: 139020 - DNA, 25 bp, probe
accagatcgacttgatcgtgcagct

SEQ ID NO: 139021 - DNA, 25 bp, probe
acgaatgatggctagatcgacgatc

SEQ ID NO: 139022 - DNA, 25 bp, probe
acgaattggccgactacagcaacct

SEQ ID NO: 139023 - DNA, 25 bp, probe
accatgcaagtggcgactgcacaga

SEQ ID NO: 139024 - DNA, 25 bp, probe
accatacatctggtgtctactggag

SEQ ID NO: 139025 - DNA, 25 bp, probe
acctgcatcaagtcttctgatctca

SEQ ID NO: 139026 - DNA, 25 bp, probe
acctgcatcatcatttgcttcaagc

SEQ ID NO: 139027 - DNA, 25 bp, probe
accatgcagtcaggattctccactc

SEQ ID NO: 139028 - DNA, 25 bp, probe
accaggcgttgaactccaccaacgg

SEQ ID NO: 139029 - DNA, 25 bp, probe
acctaggttggagtccagcctaatc

SEQ ID NO: 139030 - DNA, 25 bp, probe
accttgggtgaagcccttcagcatc

SEQ ID NO: 139031 - DNA, 25 bp, probe
accttgggtgatgccttcccagagt

SEQ ID NO: 139032 - DNA, 25 bp, probe
accttgggtgatgccttcccagagt

SEQ ID NO: 139033 - DNA, 25 bp, probe
accttggtgtgtgttatggacaatt

SEQ ID NO: 139034 - DNA, 25 bp, probe
accttcgtggtggaacaaatatcat

SEQ ID NO: 139035 - DNA, 25 bp, probe
acctaccgtctgaaatcatgttaca

SEQ ID NO: 139036 - DNA, 25 bp, probe
acctttttctgtgtctggctaatat

SEQ ID NO: 139037 - DNA, 25 bp, probe
acctgtttatctgttaactattatc

SEQ ID NO: 139038 - DNA, 25 bp, probe
acctgctggaattttggaatttttg

SEQ ID NO: 139039 - DNA, 25 bp, probe
acctcagtcaattctctactttttt

SEQ ID NO: 139040 - DNA, 25 bp, probe
acctaatccagaccaacgattttct

SEQ ID NO: 139041 - DNA, 25 bp, probe
acctattctgaccaaactatataaa

SEQ ID NO: 139042 - DNA, 25 bp, probe
acctttctgtgaagaacgcacaaac

SEQ ID NO: 139043 - DNA, 25 bp, probe
acctttctgtgaagaacgcacaaac

SEQ ID NO: 139044 - DNA, 25 bp, probe
acctctttgactaggtcccaggatc

SEQ ID NO: 139045 - DNA, 25 bp, probe
acctcgttgcactggatcccagtgg

SEQ ID NO: 139046 - DNA, 25 bp, probe
acctcaaatttatgatgcccagttg

SEQ ID NO: 139047 - DNA, 25 bp, probe
accttacatttatcagtcctgaagt

SEQ ID NO: 139048 - DNA, 25 bp, probe
acctacacttccatcaattctgggt

SEQ ID NO: 139049 - DNA, 25 bp, probe
acctcaagttccacatctacaacgt

SEQ ID NO: 139050 - DNA, 25 bp, probe
accatcaagttccaaccattaaggt

SEQ ID NO: 139051 - DNA, 25 bp, probe
acctaatcattccaccaagttattt

SEQ ID NO: 139052 - DNA, 25 bp, probe
acctaatcattccaccaagttattt

SEQ ID NO: 139053 - DNA, 25 bp, probe
acctgaaacagcttccagagtgtat

SEQ ID NO: 139054 - DNA, 25 bp, probe
accttaagcatttcccagctgtgta

SEQ ID NO: 139055 - DNA, 25 bp, probe
acctgatccagaatgtttccgtgct

SEQ ID NO: 139056 - DNA, 25 bp, probe
acctgatccagaatgtttccgtgct

SEQ ID NO: 139057 - DNA, 25 bp, probe
accatgacctgaaacctcagcgtga

SEQ ID NO: 139058 - DNA, 25 bp, probe
acctgcttctgaaagccaccgagac

SEQ ID NO: 139059 - DNA, 25 bp, probe
accttattcaaacatcaacaacagg

SEQ ID NO: 139060 - DNA, 25 bp, probe
acctcgtccaaacacaaggaggatg

SEQ ID NO: 139061 - DNA, 25 bp, probe
acctctcctaaacacagcagggctt

SEQ ID NO: 139062 - DNA, 25 bp, probe
accatccctttgtacacagcttggg

SEQ ID NO: 139063 - DNA, 25 bp, probe
accattctttgtaaacagttggatg

SEQ ID NO: 139064 - DNA, 25 bp, probe
acctacctcgtaaaagtctgatgag

SEQ ID NO: 139065 - DNA, 25 bp, probe
acctacctcgtaaaagtctgatgag

SEQ ID NO: 139066 - DNA, 25 bp, probe
acctcagcctcccaaagtgctggga

SEQ ID NO: 139067 - DNA, 25 bp, probe
accattcctggccacagaatgctaa

SEQ ID NO: 139068 - DNA, 25 bp, probe
accttcgctgacctgcgtagtgaga

SEQ ID NO: 139069 - DNA, 25 bp, probe
accattctggaccccaagatagacg

SEQ ID NO: 139070 - DNA, 25 bp, probe
accatacgctggcatcgaaaacact

SEQ ID NO: 139071 - DNA, 25 bp, probe
acctacagcggagtggtgaaaatct

SEQ ID NO: 139072 - DNA, 25 bp, probe
accatcgagggagtgctggaccacc

SEQ ID NO: 139073 - DNA, 25 bp, probe
accatcgaggtcctgatgaacacct

SEQ ID NO: 139074 - DNA, 25 bp, probe
accatggagtccctgatgattcgag

SEQ ID NO: 139075 - DNA, 25 bp, probe
accaggagagccctgggctggaggc

SEQ ID NO: 139076 - DNA, 25 bp, probe
accaggaagtcctcagcttcaagcc

SEQ ID NO: 139077 - DNA, 25 bp, probe
accaggaagtcctcagcttcaagcc

SEQ ID NO: 139078 - DNA, 25 bp, probe
aaaggaggctcctctgtacacttgc

SEQ ID NO: 139079 - DNA, 25 bp, probe
aaaggggtccaacagctctttgagt

SEQ ID NO: 139080 - DNA, 25 bp, probe
aaagggttctaacgagctcacactc

SEQ ID NO: 139081 - DNA, 25 bp, probe
aaaggcgttcaatacgtgcctctcc

SEQ ID NO: 139082 - DNA, 25 bp, probe
aaaggtcttcaagaagtccattctt

SEQ ID NO: 139083 - DNA, 25 bp, probe
aaaggtcttcaagaagtccattctt

SEQ ID NO: 139084 - DNA, 25 bp, probe
aacggtgtataaagaagttctccat

SEQ ID NO: 139085 - DNA, 25 bp, probe
accggctggtaaagcaattcctcct

SEQ ID NO: 139086 - DNA, 25 bp, probe
accgtggggagatcatcgacccctt

SEQ ID NO: 139087 - DNA, 25 bp, probe
accttggagagacacagcgtcccta

SEQ ID NO: 139088 - DNA, 25 bp, probe
accctggcagaacaaccctaccagg

SEQ ID NO: 139089 - DNA, 25 bp, probe
accctggtgagtcgaatcacggacc

SEQ ID NO: 139090 - DNA, 25 bp, probe
acctctgtgaggtgttccgagacaa

SEQ ID NO: 139091 - DNA, 25 bp, probe
accctacaggtttaccaaccagcat

SEQ ID NO: 139092 - DNA, 25 bp, probe
acctctcaatttactaactaccagc

SEQ ID NO: 139093 - DNA, 25 bp, probe
accttacatgttaccaatatcacca

SEQ ID NO: 139094 - DNA, 25 bp, probe
acctcagaacttactcatcagtcac

SEQ ID NO: 139095 - DNA, 25 bp, probe
accataaaccatatcacatgcctac

SEQ ID NO: 139096 - DNA, 25 bp, probe
accatagtactataagctcctacct

SEQ ID NO: 139097 - DNA, 25 bp, probe
acctgagttaatgaagccggacctt

SEQ ID NO: 139098 - DNA, 25 bp, probe
acctgagttaatgaagccggacctt

SEQ ID NO: 139099 - DNA, 25 bp, probe
acctcatgtctaagaacggggacca

SEQ ID NO: 139100 - DNA, 25 bp, probe
accttcttgaaggagctggggactg

SEQ ID NO: 139101 - DNA, 25 bp, probe
acctccatggattcagggaagggct

SEQ ID NO: 139102 - DNA, 25 bp, probe
acctacaggattggggcatggccct

SEQ ID NO: 139103 - DNA, 25 bp, probe
accatcacagcgctgagcgtcgagc

SEQ ID NO: 139104 - DNA, 25 bp, probe
accatgctgaagcggctcatcgaga

SEQ ID NO: 139105 - DNA, 25 bp, probe
accattaactggcctgatctaacaa

SEQ ID NO: 139106 - DNA, 25 bp, probe
accattaacatgcatctttggacat

SEQ ID NO: 139107 - DNA, 25 bp, probe
accatttcctggacattgggcctat

SEQ ID NO: 139108 - DNA, 25 bp, probe
acctttgcactgtctcagtggcgac

SEQ ID NO: 139109 - DNA, 25 bp, probe
acctctgtcacttccagtgaagtcc

SEQ ID NO: 139110 - DNA, 25 bp, probe
acctagaactcagaggattgctttt

SEQ ID NO: 139111 - DNA, 25 bp, probe
acctagacctcaggtggtctcttgg

SEQ ID NO: 139112 - DNA, 25 bp, probe
acctagacctcaggtggtctcttgg

SEQ ID NO: 139113 - DNA, 25 bp, probe
accgagtccccaaggactagtggag

SEQ ID NO: 139114 - DNA, 25 bp, probe
accaggtaccgatggactgactatg

SEQ ID NO: 139115 - DNA, 25 bp, probe
accatgttaccgtgaagaagcttac

SEQ ID NO: 139116 - DNA, 25 bp, probe
accttggcacttgagacagaactgt

SEQ ID NO: 139117 - DNA, 25 bp, probe
accttggcacttgagacagaactgt

SEQ ID NO: 139118 - DNA, 25 bp, probe
accgtgccatcttgcaaactacact

SEQ ID NO: 139119 - DNA, 25 bp, probe
accttgccttgaaatttacacagtg

SEQ ID NO: 139120 - DNA, 25 bp, probe
accttgccgttttgaaactcagtga

SEQ ID NO: 139121 - DNA, 25 bp, probe
accttacctatgttcatatatttgt

SEQ ID NO: 139122 - DNA, 25 bp, probe
accttagcattttgtgacttttgtc

SEQ ID NO: 139123 - DNA, 25 bp, probe
accttagcttgggtgagactgttta

SEQ ID NO: 139124 - DNA, 25 bp, probe
acctttgcatggtgggactcttctt

SEQ ID NO: 139125 - DNA, 25 bp, probe
accgtgtctgtgtcgggaatttgca

SEQ ID NO: 139126 - DNA, 25 bp, probe
accttgtttgtcagtgatttagatg

SEQ ID NO: 139127 - DNA, 25 bp, probe
acctctgagtgtcccttttgtaagg

SEQ ID NO: 139128 - DNA, 25 bp, probe
accatcatagagatcgattcttgta

SEQ ID NO: 139129 - DNA, 25 bp, probe
acctctggattaggtctctgttgac

SEQ ID NO: 139130 - DNA, 25 bp, probe
acctctggattaggtctctgttgac

SEQ ID NO: 139131 - DNA, 25 bp, probe
acctcatggatggggacctgggact

SEQ ID NO: 139132 - DNA, 25 bp, probe
acctcagcaatcagcagacacggga

SEQ ID NO: 139133 - DNA, 25 bp, probe
acctagctgtagcagacacgctgct

SEQ ID NO: 139134 - DNA, 25 bp, probe
acctagctgtagtgaccacattcta

SEQ ID NO: 139135 - DNA, 25 bp, probe
acctagctgtagtgaccacattcta

SEQ ID NO: 139136 - DNA, 25 bp, probe
acctcactgtggtggccatattcta

SEQ ID NO: 139137 - DNA, 25 bp, probe
acctacatatggtgctgcccaagaa

SEQ ID NO: 139138 - DNA, 25 bp, probe
acctcgcttggatgcctgtaaggat

SEQ ID NO: 139139 - DNA, 25 bp, probe
acctcgcttggatgcctgtaaggat

SEQ ID NO: 139140 - DNA, 25 bp, probe
acctcagcccgaccaaggacaagat

SEQ ID NO: 139141 - DNA, 25 bp, probe
acctcaactctacacaaatccagct

SEQ ID NO: 139142 - DNA, 25 bp, probe
acctactacttggactggatccacc

SEQ ID NO: 139143 - DNA, 25 bp, probe
acctggctaaagacacggacccact

SEQ ID NO: 139144 - DNA, 25 bp, probe
acctggctaaagacacggacccact

SEQ ID NO: 139145 - DNA, 25 bp, probe
acctggccagaatttggagtccctt

SEQ ID NO: 139146 - DNA, 25 bp, probe
acctaccagatgactgtggagctcc

SEQ ID NO: 139147 - DNA, 25 bp, probe
acctacctcattttagagcacacaa

SEQ ID NO: 139148 - DNA, 25 bp, probe
acctgaagtcatcactcgtgccaaa

SEQ ID NO: 139149 - DNA, 25 bp, probe
acctgaagtcatcactcgtgccaaa

SEQ ID NO: 139150 - DNA, 25 bp, probe
acctgaaacatgttctccggcagtt

SEQ ID NO: 139151 - DNA, 25 bp, probe
acctgaaacatgttctccggcagtt

SEQ ID NO: 139152 - DNA, 25 bp, probe
acctccaggtggactgcttggcagt

SEQ ID NO: 139153 - DNA, 25 bp, probe
acctccagaggaaatcgtagctatc

SEQ ID NO: 139154 - DNA, 25 bp, probe
acctccagggatcagctgtgtgtgt

SEQ ID NO: 139155 - DNA, 25 bp, probe
accattcagaggtgcagtgagttcc

SEQ ID NO: 139156 - DNA, 25 bp, probe
accatcgccaggaggatcggctcac

SEQ ID NO: 139157 - DNA, 25 bp, probe
accgcgtcatgtggagcgtcgtgtc

SEQ ID NO: 139158 - DNA, 25 bp, probe
acgccattgagttgagctggcctag

SEQ ID NO: 139159 - DNA, 25 bp, probe
accttctgcgggtcggcagcatatg

SEQ ID NO: 139160 - DNA, 25 bp, probe
accatctctgtggtgaagtcacagg

SEQ ID NO: 139161 - DNA, 25 bp, probe
acctggcttgcagtaagtaatagtt

SEQ ID NO: 139162 - DNA, 25 bp, probe
acctgagtatgcaatgactggacaa

SEQ ID NO: 139163 - DNA, 25 bp, probe
acctgagtatgcaatgactggacaa

SEQ ID NO: 139164 - DNA, 25 bp, probe
acctgagtcagcagaatctacaaat

SEQ ID NO: 139165 - DNA, 25 bp, probe
acctgaggtcacaagttgccatcta

SEQ ID NO: 139166 - DNA, 25 bp, probe
acctagaggcacaatcttgacttgt

SEQ ID NO: 139167 - DNA, 25 bp, probe
acctacgtcctgatcgacatggttc

SEQ ID NO: 139168 - DNA, 25 bp, probe
acctactgctccaagtcagatgtgg

SEQ ID NO: 139169 - DNA, 25 bp, probe
acctcactgccacattccagtggga

SEQ ID NO: 139170 - DNA, 25 bp, probe
accgcagtgcccattgggctgggca

SEQ ID NO: 139171 - DNA, 25 bp, probe
accgcgtgcaaatgaaggggacaag

SEQ ID NO: 139172 - DNA, 25 bp, probe
accggaactctgaggggtgacaagt

SEQ ID NO: 139173 - DNA, 25 bp, probe
accttccacctgagaggggactctc

SEQ ID NO: 139174 - DNA, 25 bp, probe
accatctccacagtggtgggggccc

SEQ ID NO: 139175 - DNA, 25 bp, probe
accatcccacaagggcgctgggggt

SEQ ID NO: 139176 - DNA, 25 bp, probe
acccccagccaccaggctggggcct

SEQ ID NO: 139177 - DNA, 25 bp, probe
acccccagccatctactggataaac

SEQ ID NO: 139178 - DNA, 25 bp, probe
acccccagcctggaatgtaaatcag

SEQ ID NO: 139179 - DNA, 25 bp, probe
acctacccttgttatgataattctt

SEQ ID NO: 139180 - DNA, 25 bp, probe
acctgtccttttgatgttagtattt

SEQ ID NO: 139181 - DNA, 25 bp, probe
acctttctttagcatgctacagtta

SEQ ID NO: 139182 - DNA, 25 bp, probe
accatgttctgacttgggtgaaatt

SEQ ID NO: 139183 - DNA, 25 bp, probe
accttgtgccactggaggagccagt

SEQ ID NO: 139184 - DNA, 25 bp, probe
accttgtgccactggaggagccagt

SEQ ID NO: 139185 - DNA, 25 bp, probe
accattgggcgccggagggccaatg

SEQ ID NO: 139186 - DNA, 25 bp, probe
aaccgaagcgcaatgtggtggtcac

SEQ ID NO: 139187 - DNA, 25 bp, probe
acctggttgatcctgccagtagcat

SEQ ID NO: 139188 - DNA, 25 bp, probe
acctgaatgtacagcaagtcctatt

SEQ ID NO: 139189 - DNA, 25 bp, probe
acctgaagccgcagaacatcctact

SEQ ID NO: 139190 - DNA, 25 bp, probe
acctgggccacgcaacatcaataaa

SEQ ID NO: 139191 - DNA, 25 bp, probe
acctggggacatgggctatcttcca

SEQ ID NO: 139192 - DNA, 25 bp, probe
acctggagtcaaagcagttccttca

SEQ ID NO: 139193 - DNA, 25 bp, probe
acctggattcagatgactcatcccc

SEQ ID NO: 139194 - DNA, 25 bp, probe
acctggatctattatgttatgtgtc

SEQ ID NO: 139195 - DNA, 25 bp, probe
acctggatctattatgttatgtgtc

SEQ ID NO: 139196 - DNA, 25 bp, probe
acctggttatgttgttattctcgga

SEQ ID NO: 139197 - DNA, 25 bp, probe
acctgttgtttattattattcggca

SEQ ID NO: 139198 - DNA, 25 bp, probe
acctctgtgattaaagattctttgg

SEQ ID NO: 139199 - DNA, 25 bp, probe
acctctctgattttgtttccttatc

SEQ ID NO: 139200 - DNA, 25 bp, probe
accgattatgctttctttggcctac

SEQ ID NO: 139201 - DNA, 25 bp, probe
acctgatgcttggcttcttttaggg

SEQ ID NO: 139202 - DNA, 25 bp, probe
accgttttcactattaatggaggca

SEQ ID NO: 139203 - DNA, 25 bp, probe
acgcacttcttcacaatctattgga

SEQ ID NO: 139204 - DNA, 25 bp, probe
acgcaggtttcccaaaactagctga

SEQ ID NO: 139205 - DNA, 25 bp, probe
acgggacttcctaaaactctatcag

SEQ ID NO: 139206 - DNA, 25 bp, probe
accgacttttctaaagctctgaaca

SEQ ID NO: 139207 - DNA, 25 bp, probe
accgaaattacccagcacctggaat

SEQ ID NO: 139208 - DNA, 25 bp, probe
accgatatttaaggaccccagagct

SEQ ID NO: 139209 - DNA, 25 bp, probe
accgaagattagtggagctctaagc

SEQ ID NO: 139210 - DNA, 25 bp, probe
accgaattcaagcgtggtctgccac

SEQ ID NO: 139211 - DNA, 25 bp, probe
accgaattcaagcgtggtctgccac

SEQ ID NO: 139212 - DNA, 25 bp, probe
accttattcaggcttatgtcttcac

SEQ ID NO: 139213 - DNA, 25 bp, probe
accttacttgaccatttgtttctgt

SEQ ID NO: 139214 - DNA, 25 bp, probe
accttgacttgaaatgctcttttgc

SEQ ID NO: 139215 - DNA, 25 bp, probe
acctttcttacattagcagtttgct

SEQ ID NO: 139216 - DNA, 25 bp, probe
accttgtcctaatacgctatgtgct

SEQ ID NO: 139217 - DNA, 25 bp, probe
acctatgctcctgggatacgctatg

SEQ ID NO: 139218 - DNA, 25 bp, probe
acctatgctcctgggatacgctatg

SEQ ID NO: 139219 - DNA, 25 bp, probe
acctcatgttcaaagaacacttccc

SEQ ID NO: 139220 - DNA, 25 bp, probe
acctcacttgcagaatatcttttcc

SEQ ID NO: 139221 - DNA, 25 bp, probe
acctcaaagatgtctagtttttcca

SEQ ID NO: 139222 - DNA, 25 bp, probe
acctgcataactttttgtctttaag

SEQ ID NO: 139223 - DNA, 25 bp, probe
acctgctaactacagtgtggcccta

SEQ ID NO: 139224 - DNA, 25 bp, probe
accttccacaagctggtggcctata

SEQ ID NO: 139225 - DNA, 25 bp, probe
accatctccaccatctggtaataaa

SEQ ID NO: 139226 - DNA, 25 bp, probe
acctctccaccttcatatgatagtg

SEQ ID NO: 139227 - DNA, 25 bp, probe
accttaattttgaatggcagcatga

SEQ ID NO: 139228 - DNA, 25 bp, probe
accttttcatattgaggctgcagct

SEQ ID NO: 139229 - DNA, 25 bp, probe
acctgctgtccaaagatggcatcag

SEQ ID NO: 139230 - DNA, 25 bp, probe
accttgctgccaacaagtttgtgca

SEQ ID NO: 139231 - DNA, 25 bp, probe
accattctgcctcaatcttttgcaa

SEQ ID NO: 139232 - DNA, 25 bp, probe
accattcaccacaatagctattccc

SEQ ID NO: 139233 - DNA, 25 bp, probe
accttcactcacagtctgagttctt

SEQ ID NO: 139234 - DNA, 25 bp, probe
accttcactcacagtctgagttctt

SEQ ID NO: 139235 - DNA, 25 bp, probe
acctgtccataaagtaattttgtga

SEQ ID NO: 139236 - DNA, 25 bp, probe
accgtccttgtcataactttgtgtt

SEQ ID NO: 139237 - DNA, 25 bp, probe
accgtggatctgtttaacgtggctc

SEQ ID NO: 139238 - DNA, 25 bp, probe
accgtggatctgtttaacgtggctc

SEQ ID NO: 139239 - DNA, 25 bp, probe
acgtgttaaattcagacgtactggc

SEQ ID NO: 139240 - DNA, 25 bp, probe
acgtttctcctacaacagatactgg

SEQ ID NO: 139241 - DNA, 25 bp, probe
acctttctcatgggccaactaatct

SEQ ID NO: 139242 - DNA, 25 bp, probe
acctttctcatgggccaactaatct

SEQ ID NO: 139243 - DNA, 25 bp, probe
accttttcattagccatctgaaact

SEQ ID NO: 139244 - DNA, 25 bp, probe
accccattaataatcctggccaact

SEQ ID NO: 139245 - DNA, 25 bp, probe
accccattaataatcctggccaact

SEQ ID NO: 139246 - DNA, 25 bp, probe
acccctatcagtatactagcacctt

SEQ ID NO: 139247 - DNA, 25 bp, probe
accttctctgcagtgataaccacta

SEQ ID NO: 139248 - DNA, 25 bp, probe
accttggagcactatacccacaaca

SEQ ID NO: 139249 - DNA, 25 bp, probe
accttggagcactgactgtacatag

SEQ ID NO: 139250 - DNA, 25 bp, probe
accataggtcactgtctacactggg

SEQ ID NO: 139251 - DNA, 25 bp, probe
accatcaggccatttgcatgaaatt

SEQ ID NO: 139252 - DNA, 25 bp, probe
accatcagtcctttcgcatgaattg

SEQ ID NO: 139253 - DNA, 25 bp, probe
acctcagctttctcaggacattttc

SEQ ID NO: 139254 - DNA, 25 bp, probe
accatagcttaagaagtatccctga

SEQ ID NO: 139255 - DNA, 25 bp, probe
acctccctcaacaaggtatacctca

SEQ ID NO: 139256 - DNA, 25 bp, probe
acctacttacagtcacgttactaca

SEQ ID NO: 139257 - DNA, 25 bp, probe
acccgttcatcgtgcagttcaatga

SEQ ID NO: 139258 - DNA, 25 bp, probe
accttgatgtatgttctgatacaag

SEQ ID NO: 139259 - DNA, 25 bp, probe
acctctgattacaattctgatgtga

SEQ ID NO: 139260 - DNA, 25 bp, probe
acctctgattacaattctgatgtga

SEQ ID NO: 139261 - DNA, 25 bp, probe
acctcacatgcttcttctgtgtgta

SEQ ID NO: 139262 - DNA, 25 bp, probe
acctgatcagctggttattgctaac

SEQ ID NO: 139263 - DNA, 25 bp, probe
acctgtgcatgagctgtattcttca

SEQ ID NO: 139264 - DNA, 25 bp, probe
acctgcgcagatagagacaatctta

SEQ ID NO: 139265 - DNA, 25 bp, probe
acgctcacagatgggctccagcgta

SEQ ID NO: 139266 - DNA, 25 bp, probe
acctgcaatctatgcttcagctgtc

SEQ ID NO: 139267 - DNA, 25 bp, probe
acctcagcatctacctgaacatcca

SEQ ID NO: 139268 - DNA, 25 bp, probe
acctatgagctcaacgagacagcca

SEQ ID NO: 139269 - DNA, 25 bp, probe
accatacacgcaaaagacaccgggc

SEQ ID NO: 139270 - DNA, 25 bp, probe
acctatgtcaccaaaaacctgcggc

SEQ ID NO: 139271 - DNA, 25 bp, probe
aaccatgccccatataacgcttggg

SEQ ID NO: 139272 - DNA, 25 bp, probe
acctcagcccgaggaaacatgctcc

SEQ ID NO: 139273 - DNA, 25 bp, probe
acctcagcccgaggaaacatgctcc

SEQ ID NO: 139274 - DNA, 25 bp, probe
acctcagcgggagaactggctccgg

SEQ ID NO: 139275 - DNA, 25 bp, probe
accttggggacgaagcgtatcagcg

SEQ ID NO: 139276 - DNA, 25 bp, probe
acctttgtgcagcttcgaggacagg

SEQ ID NO: 139277 - DNA, 25 bp, probe
acctctctggacagtaatggtgcag

SEQ ID NO: 139278 - DNA, 25 bp, probe
acctctctggccaagctaatgaaag

SEQ ID NO: 139279 - DNA, 25 bp, probe
acctttagcctcatcaatggaaaca

SEQ ID NO: 139280 - DNA, 25 bp, probe
accgttactctgatgaattgaatga

SEQ ID NO: 139281 - DNA, 25 bp, probe
acctttgcactggcattaaagagtc

SEQ ID NO: 139282 - DNA, 25 bp, probe
accttgctcacgctggatgactggt

SEQ ID NO: 139283 - DNA, 25 bp, probe
accgcttcatgccactgaatacgtt

SEQ ID NO: 139284 - DNA, 25 bp, probe
accgttaccacggacacagtatgag

SEQ ID NO: 139285 - DNA, 25 bp, probe
acctgtgtaccagacctaagtgaca

SEQ ID NO: 139286 - DNA, 25 bp, probe
acctgtacaccaaacttccaggagg

SEQ ID NO: 139287 - DNA, 25 bp, probe
acctttcctagggctgtggagtgag

SEQ ID NO: 139288 - DNA, 25 bp, probe
acctcgtccatgtggtgtcaggtgt

SEQ ID NO: 139289 - DNA, 25 bp, probe
acctcgtccatgtggtgtcaggtgt

SEQ ID NO: 139290 - DNA, 25 bp, probe
accatttcaatgagtttgcaggcgt

SEQ ID NO: 139291 - DNA, 25 bp, probe
accatttactacctggccaggctgt

SEQ ID NO: 139292 - DNA, 25 bp, probe
accatttactacctggccaggctgt

SEQ ID NO: 139293 - DNA, 25 bp, probe
acctcttattcacctgccgaagctg

SEQ ID NO: 139294 - DNA, 25 bp, probe
accttctgacaccctgcgagaagtc

SEQ ID NO: 139295 - DNA, 25 bp, probe
acctactgctcttactgcaggaagt

SEQ ID NO: 139296 - DNA, 25 bp, probe
acctcactgtgcaaaacagcataca

SEQ ID NO: 139297 - DNA, 25 bp, probe
acctcactgtgcaaaacagcataca

SEQ ID NO: 139298 - DNA, 25 bp, probe
acctcaaagataagacagtacagta

SEQ ID NO: 139299 - DNA, 25 bp, probe
acctcatgaagtaccacgccatgtc

SEQ ID NO: 139300 - DNA, 25 bp, probe
acctcatgaagttcatccgcagcac

SEQ ID NO: 139301 - DNA, 25 bp, probe
acctagaagctttgctgcaggatct

SEQ ID NO: 139302 - DNA, 25 bp, probe
acctagggctggactcaggagctgg

SEQ ID NO: 139303 - DNA, 25 bp, probe
acctcaggcactggaaatgagagct

SEQ ID NO: 139304 - DNA, 25 bp, probe
acctatcgcactccagagagggctc

SEQ ID NO: 139305 - DNA, 25 bp, probe
accttcgccagcaacaatgtgaccg

SEQ ID NO: 139306 - DNA, 25 bp, probe
accttcgccagcaacaatgtgaccg

SEQ ID NO: 139307 - DNA, 25 bp, probe
accttcgcatcaacacagcagacac

SEQ ID NO: 139308 - DNA, 25 bp, probe
accttcgcatcaacacagcagacac

SEQ ID NO: 139309 - DNA, 25 bp, probe
accttgcactcttcacacagaattg

SEQ ID NO: 139310 - DNA, 25 bp, probe
acctcagactcttcacagggtcagg

SEQ ID NO: 139311 - DNA, 25 bp, probe
acctctgccttctcagggacaagag

SEQ ID NO: 139312 - DNA, 25 bp, probe
accgtgtcctcgcacgatacgaagt

SEQ ID NO: 139313 - DNA, 25 bp, probe
accgtgtcctcgcacgatacgaagt

SEQ ID NO: 139314 - DNA, 25 bp, probe
acctgttctcggcaccttaaattat

SEQ ID NO: 139315 - DNA, 25 bp, probe
acccttgctcggtaccgatagcact

SEQ ID NO: 139316 - DNA, 25 bp, probe
accttttcttgattccagaaacata

SEQ ID NO: 139317 - DNA, 25 bp, probe
acctgtggtcggggccaacaacaga

SEQ ID NO: 139318 - DNA, 25 bp, probe
acctgtggtcggggccaacaacaga

SEQ ID NO: 139319 - DNA, 25 bp, probe
accttgatgtcaagcctgccaacat

SEQ ID NO: 139320 - DNA, 25 bp, probe
acctagacatcaagccagacaacct

SEQ ID NO: 139321 - DNA, 25 bp, probe
acctggtcatgctggtgacagaggt

SEQ ID NO: 139322 - DNA, 25 bp, probe
acctggtatggtcatggaaggggct

SEQ ID NO: 139323 - DNA, 25 bp, probe
acctggtatgggtttggccagcgtc

SEQ ID NO: 139324 - DNA, 25 bp, probe
accttttgggatgattgctcgattg

SEQ ID NO: 139325 - DNA, 25 bp, probe
accttttgggatgattgctcgattg

SEQ ID NO: 139326 - DNA, 25 bp, probe
acctttggatccatttgtcaactgg

SEQ ID NO: 139327 - DNA, 25 bp, probe
accttctgtacggatttgctctccg

SEQ ID NO: 139328 - DNA, 25 bp, probe
acctctttacgtatatgatgtggct

SEQ ID NO: 139329 - DNA, 25 bp, probe
acctgtacctcgaagtctatgggct

SEQ ID NO: 139330 - DNA, 25 bp, probe
accttaccactgacaggtcgtggcc

SEQ ID NO: 139331 - DNA, 25 bp, probe
accttactagtttgcagtgctgggc

SEQ ID NO: 139332 - DNA, 25 bp, probe
accttactagtttgcagtgctgggc

SEQ ID NO: 139333 - DNA, 25 bp, probe
accttaatggtcatgctgccgcagg

SEQ ID NO: 139334 - DNA, 25 bp, probe
accttaatatgcaagactctcaagg

SEQ ID NO: 139335 - DNA, 25 bp, probe
accttccatgtcaagattcagctag

SEQ ID NO: 139336 - DNA, 25 bp, probe
accgtcattgtctgtgactgctacc

SEQ ID NO: 139337 - DNA, 25 bp, probe
acctactgtgtcttggaatctagcc

SEQ ID NO: 139338 - DNA, 25 bp, probe
acctttgtacagacgcaatcggccc

SEQ ID NO: 139339 - DNA, 25 bp, probe
accttgtggaagaccacacatgggt

SEQ ID NO: 139340 - DNA, 25 bp, probe
accttgtggaagaccacacatgggt

SEQ ID NO: 139341 - DNA, 25 bp, probe
acctcactagacatccaaaggagat

SEQ ID NO: 139342 - DNA, 25 bp, probe
acctactgagaagagcaccctgaga

SEQ ID NO: 139343 - DNA, 25 bp, probe
acctcaatgaggtcataatccttag

SEQ ID NO: 139344 - DNA, 25 bp, probe
acctctgatgagctatgggccttgg

SEQ ID NO: 139345 - DNA, 25 bp, probe
acctctacaggcggaaggcctgggc

SEQ ID NO: 139346 - DNA, 25 bp, probe
accttctccaagcaaagccatatgg

SEQ ID NO: 139347 - DNA, 25 bp, probe
accttcccctgtgacagaagatgag

SEQ ID NO: 139348 - DNA, 25 bp, probe
accttagctccgagaagcaactaga

SEQ ID NO: 139349 - DNA, 25 bp, probe
acctaacactcgagttggcaccaaa

SEQ ID NO: 139350 - DNA, 25 bp, probe
acctcatcagccaggtgttggccac

SEQ ID NO: 139351 - DNA, 25 bp, probe
acctctcccctgacatgaaggcaat

SEQ ID NO: 139352 - DNA, 25 bp, probe
accttctccctgcagtatggcagtg

SEQ ID NO: 139353 - DNA, 25 bp, probe
acctgtgtccctgactcagggtggt

SEQ ID NO: 139354 - DNA, 25 bp, probe
acctattctcactaagatggggttt

SEQ ID NO: 139355 - DNA, 25 bp, probe
acctcatcccactgtgggggagtcc

SEQ ID NO: 139356 - DNA, 25 bp, probe
acctcatcccactgtgggggagtcc

SEQ ID NO: 139357 - DNA, 25 bp, probe
acctcaccccattgattggtagttc

SEQ ID NO: 139358 - DNA, 25 bp, probe
acctgacatcaccaagtgtggaatt

SEQ ID NO: 139359 - DNA, 25 bp, probe
acctggccagtggagtggtccatgc

SEQ ID NO: 139360 - DNA, 25 bp, probe
acctggtgctgggcagtagtttcct

SEQ ID NO: 139361 - DNA, 25 bp, probe
acctttgtgagaagccgtatccact

SEQ ID NO: 139362 - DNA, 25 bp, probe
acctttgtgagaagccgtatccact

SEQ ID NO: 139363 - DNA, 25 bp, probe
acctgttgctagcaggcaatctcca

SEQ ID NO: 139364 - DNA, 25 bp, probe
accgtgtataccatgcactatccct

SEQ ID NO: 139365 - DNA, 25 bp, probe
accgcgtgtgctttgagcactaccc

SEQ ID NO: 139366 - DNA, 25 bp, probe
acctgcgtgctttataagcctctca

SEQ ID NO: 139367 - DNA, 25 bp, probe
accggctgcttacacagatgctgcc

SEQ ID NO: 139368 - DNA, 25 bp, probe
accggtgctatcacatctatatcca

SEQ ID NO: 139369 - DNA, 25 bp, probe
acctggtctatcttctgcatgaacc

SEQ ID NO: 139370 - DNA, 25 bp, probe
acctgatgtcaaccttgtgacccag

SEQ ID NO: 139371 - DNA, 25 bp, probe
acctatgccaagtctcggaaggaca

SEQ ID NO: 139372 - DNA, 25 bp, probe
accttgccacagtagcgtaacaata

SEQ ID NO: 139373 - DNA, 25 bp, probe
accttcacagcactagctttttatt

SEQ ID NO: 139374 - DNA, 25 bp, probe
accttcacagcactagctttttatt

SEQ ID NO: 139375 - DNA, 25 bp, probe
accttccagttcctcatttttgaat

SEQ ID NO: 139376 - DNA, 25 bp, probe
cacgaaccatttctctggttccctg

SEQ ID NO: 139377 - DNA, 25 bp, probe
tacaggaaacttctcgtttccctcg

SEQ ID NO: 139378 - DNA, 25 bp, probe
actgcgaattttctgcgtggggtcc

SEQ ID NO: 139379 - DNA, 25 bp, probe
accgatttatctatacggtggtcca

SEQ ID NO: 139380 - DNA, 25 bp, probe
accgattatgtagctacgagatggt

SEQ ID NO: 139381 - DNA, 25 bp, probe
accttctggtgcgcattggcaagca

SEQ ID NO: 139382 - DNA, 25 bp, probe
acctgtgtttcagcatttggagaca

SEQ ID NO: 139383 - DNA, 25 bp, probe
acctagttccaggatccatgggagc

SEQ ID NO: 139384 - DNA, 25 bp, probe
acctatttggcagtgacgtggtggc

SEQ ID NO: 139385 - DNA, 25 bp, probe
acctcattctggccgagagtagggc

SEQ ID NO: 139386 - DNA, 25 bp, probe
acctctttaggtcactgatggtcac

SEQ ID NO: 139387 - DNA, 25 bp, probe
acctcagttgaggccagggtggtca

SEQ ID NO: 139388 - DNA, 25 bp, probe
acctcatattggtaataagatttct

SEQ ID NO: 139389 - DNA, 25 bp, probe
acctcatttggctttgtgaattgtc

SEQ ID NO: 139390 - DNA, 25 bp, probe
acctcatttggctttgtgaattgtc

SEQ ID NO: 139391 - DNA, 25 bp, probe
acctcattttctacatgtcgcttgt

SEQ ID NO: 139392 - DNA, 25 bp, probe
acctgcattgttaatgctaccattg

SEQ ID NO: 139393 - DNA, 25 bp, probe
acctcatccttgagtatctcagtga

SEQ ID NO: 139394 - DNA, 25 bp, probe
acctcatccttgagtatctcagtga

SEQ ID NO: 139395 - DNA, 25 bp, probe
acctgtctctgtggcagtgatccac

SEQ ID NO: 139396 - DNA, 25 bp, probe
acctttctgttgggcatgacatggg

SEQ ID NO: 139397 - DNA, 25 bp, probe
accttctccctctagcacaagggaa

SEQ ID NO: 139398 - DNA, 25 bp, probe
accttctctccagcacaaaggcatg

SEQ ID NO: 139399 - DNA, 25 bp, probe
acctttctgccaccggaagcagatg

SEQ ID NO: 139400 - DNA, 25 bp, probe
acctagaggccaccgagaaacatga

SEQ ID NO: 139401 - DNA, 25 bp, probe
acctatgaggtaagcgcagaagggc

SEQ ID NO: 139402 - DNA, 25 bp, probe
acctggactcagagccagacagggc

SEQ ID NO: 139403 - DNA, 25 bp, probe
acctgaggtcatcaagcagtcggcc

SEQ ID NO: 139404 - DNA, 25 bp, probe
accgaggtgttgccagtgctaagct

SEQ ID NO: 139405 - DNA, 25 bp, probe
acccagaaatggcagggacacttct

SEQ ID NO: 139406 - DNA, 25 bp, probe
acctactaagagcagcgggcctgtc

SEQ ID NO: 139407 - DNA, 25 bp, probe
acctaccgatgagacgctggactcc

SEQ ID NO: 139408 - DNA, 25 bp, probe
accgacgagtgggagcgggacctgc

SEQ ID NO: 139409 - DNA, 25 bp, probe
accgacgagtgggagcgggacctgc

SEQ ID NO: 139410 - DNA, 25 bp, probe
acctgacagacgagtgcaaggacct

SEQ ID NO: 139411 - DNA, 25 bp, probe
acctcacgatggtgctgaaaaccta

SEQ ID NO: 139412 - DNA, 25 bp, probe
acctacaatgtggtgcatatgaagg

SEQ ID NO: 139413 - DNA, 25 bp, probe
acctatcagagtatatacacatgag

SEQ ID NO: 139414 - DNA, 25 bp, probe
accttcaagagcattaagagacagc

SEQ ID NO: 139415 - DNA, 25 bp, probe
accttcaagcagctggtggaggacc

SEQ ID NO: 139416 - DNA, 25 bp, probe
acctgtacatgatcatgcgggagtg

SEQ ID NO: 139417 - DNA, 25 bp, probe
accttaccttcaaggagcaagtgaa

SEQ ID NO: 139418 - DNA, 25 bp, probe
acctgtacactgacttgagaccagt

SEQ ID NO: 139419 - DNA, 25 bp, probe
acctgtgccgctacaaggacagctt

SEQ ID NO: 139420 - DNA, 25 bp, probe
acctggctcctttcagaactcatat

SEQ ID NO: 139421 - DNA, 25 bp, probe
acctggctcctttcagaactcatat

SEQ ID NO: 139422 - DNA, 25 bp, probe
acctgcgaccttaagatttgtgatt

SEQ ID NO: 139423 - DNA, 25 bp, probe
accttacacttgaagtcattctgaa

SEQ ID NO: 139424 - DNA, 25 bp, probe
acctttttatcttgatgcattgtaa

SEQ ID NO: 139425 - DNA, 25 bp, probe
acctctttccagcagtgattcataa

SEQ ID NO: 139426 - DNA, 25 bp, probe
acctctttccagcagtgattcataa

SEQ ID NO: 139427 - DNA, 25 bp, probe
cacctacttccacattttcaaaatt

SEQ ID NO: 139428 - DNA, 25 bp, probe
acctccttccagttttacagcaaag

SEQ ID NO: 139429 - DNA, 25 bp, probe
acctctcttagatctggaaccaaat

SEQ ID NO: 139430 - DNA, 25 bp, probe
accccgtaaacttgctcaacgacat

SEQ ID NO: 139431 - DNA, 25 bp, probe
accccgtaaacttgctcaacgacat

SEQ ID NO: 139432 - DNA, 25 bp, probe
accccgacagacactgtgaacggaa

SEQ ID NO: 139433 - DNA, 25 bp, probe
acctgaacgcagtcatccggaaggg

SEQ ID NO: 139434 - DNA, 25 bp, probe
acctgaatgacgtcaacgcaaagcc

SEQ ID NO: 139435 - DNA, 25 bp, probe
acctgaaacaaatccattttgctgc

SEQ ID NO: 139436 - DNA, 25 bp, probe
acctgtaaaatacctcacatggttg

SEQ ID NO: 139437 - DNA, 25 bp, probe
acctgttggaatgcactaatgtttt

SEQ ID NO: 139438 - DNA, 25 bp, probe
acctctgtgtgattggactcgttta

SEQ ID NO: 139439 - DNA, 25 bp, probe
acctcactgagttggatgtggtctt

SEQ ID NO: 139440 - DNA, 25 bp, probe
acctctctgaatagtgtgtatgtgt

SEQ ID NO: 139441 - DNA, 25 bp, probe
acctcagctagctgttgcgtggtgc

SEQ ID NO: 139442 - DNA, 25 bp, probe
acctcatctacacgtgtcgggataa

SEQ ID NO: 139443 - DNA, 25 bp, probe
acctgatggacatgttcagggatcg

SEQ ID NO: 139444 - DNA, 25 bp, probe
acctaggaagacgcagggtctagat

SEQ ID NO: 139445 - DNA, 25 bp, probe
acctaggaagacgcagggtctagat

SEQ ID NO: 139446 - DNA, 25 bp, probe
acctgacaaaaccaagggtaacatg

SEQ ID NO: 139447 - DNA, 25 bp, probe
acctcagaaaagccaactcgaagtc

SEQ ID NO: 139448 - DNA, 25 bp, probe
acctcaacaagacagagtgtgacaa

SEQ ID NO: 139449 - DNA, 25 bp, probe
acctcaaaatctcttgattgatgac

SEQ ID NO: 139450 - DNA, 25 bp, probe
acctacaaactgaagtgcaaggcac

SEQ ID NO: 139451 - DNA, 25 bp, probe
acctccacaacgaatgaaatgctcc

SEQ ID NO: 139452 - DNA, 25 bp, probe
acctctacgcaccataagactctgc

SEQ ID NO: 139453 - DNA, 25 bp, probe
acctctacgcaccataagactctgc

SEQ ID NO: 139454 - DNA, 25 bp, probe
acctggacaccgtacaacatcatgg

SEQ ID NO: 139455 - DNA, 25 bp, probe
acctcccaggagtacgacaagatgc

SEQ ID NO: 139456 - DNA, 25 bp, probe
acctcccaggagtacgacaagatgc

SEQ ID NO: 139457 - DNA, 25 bp, probe
acctccacgactttctgaacagtgc

SEQ ID NO: 139458 - DNA, 25 bp, probe
acctccacgactttctgaacagtgc

SEQ ID NO: 139459 - DNA, 25 bp, probe
accccagaaccgctacacagcggaa

SEQ ID NO: 139460 - DNA, 25 bp, probe
accctaaacaacgttctatctggca

SEQ ID NO: 139461 - DNA, 25 bp, probe
acccgaaagcctggtgtctacacga

SEQ ID NO: 139462 - DNA, 25 bp, probe
acctcagaaccagcgattcattccc

SEQ ID NO: 139463 - DNA, 25 bp, probe
acccgtcaacaggctttactctgac

SEQ ID NO: 139464 - DNA, 25 bp, probe
acccgtcaacaggctttactctgac

SEQ ID NO: 139465 - DNA, 25 bp, probe
accgatgtacaggactttcctctaa

SEQ ID NO: 139466 - DNA, 25 bp, probe
acctttaagatgctgcttctctgcc

SEQ ID NO: 139467 - DNA, 25 bp, probe
acctcttgacagacctgattaagcc

SEQ ID NO: 139468 - DNA, 25 bp, probe
acctcattccaggccatttatggcc

SEQ ID NO: 139469 - DNA, 25 bp, probe
acctgcaggcgaaccatatttacct

SEQ ID NO: 139470 - DNA, 25 bp, probe
acctctgggataccttactacttgg

SEQ ID NO: 139471 - DNA, 25 bp, probe
acctcgggaatgaacttccgctttg

SEQ ID NO: 139472 - DNA, 25 bp, probe
acctgcaggtgacggacttcggttt

SEQ ID NO: 139473 - DNA, 25 bp, probe
accgggctacaattctttgagttct

SEQ ID NO: 139474 - DNA, 25 bp, probe
accgtgtcacatttactttggtcct

SEQ ID NO: 139475 - DNA, 25 bp, probe
accctgtctcagtgcattttgtttt

SEQ ID NO: 139476 - DNA, 25 bp, probe
accctgtctcagtgcattttgtttt

SEQ ID NO: 139477 - DNA, 25 bp, probe
acctgtcttcagttactttgtaatt

SEQ ID NO: 139478 - DNA, 25 bp, probe
acctctcttagggactctgtgatcc

SEQ ID NO: 139479 - DNA, 25 bp, probe
acctacatctagtttcatttcatct

SEQ ID NO: 139480 - DNA, 25 bp, probe
acctcatactaagaattcctcactc

SEQ ID NO: 139481 - DNA, 25 bp, probe
acctcatactaagaattcctcactc

SEQ ID NO: 139482 - DNA, 25 bp, probe
accgtcctatgagagtgtcactaga

SEQ ID NO: 139483 - DNA, 25 bp, probe
accgtcaacagtgtcgccactgaca

SEQ ID NO: 139484 - DNA, 25 bp, probe
accgtcaacagtgtcgccactgaca

SEQ ID NO: 139485 - DNA, 25 bp, probe
accgctcaaaagaagctccaagaat

SEQ ID NO: 139486 - DNA, 25 bp, probe
acctctcaaaagcattccgctcaaa

SEQ ID NO: 139487 - DNA, 25 bp, probe
acctctcaaaagcattccgctcaaa

SEQ ID NO: 139488 - DNA, 25 bp, probe
actgaaacaaacgattcccctagag

SEQ ID NO: 139489 - DNA, 25 bp, probe
actcaaaagcacttttcaccctaca

SEQ ID NO: 139490 - DNA, 25 bp, probe
accccaacaggtaagcaacctgaca

SEQ ID NO: 139491 - DNA, 25 bp, probe
acctagctaaggtctataaacatga

SEQ ID NO: 139492 - DNA, 25 bp, probe
acctggccaggctgttggaagctga

SEQ ID NO: 139493 - DNA, 25 bp, probe
acctgtgccaggctgaattacagtg

SEQ ID NO: 139494 - DNA, 25 bp, probe
acctcatccagacagaacgacagaa

SEQ ID NO: 139495 - DNA, 25 bp, probe
acctgagccagaatgatggcactga

SEQ ID NO: 139496 - DNA, 25 bp, probe
acctcagccagcagtgtgagctgct

SEQ ID NO: 139497 - DNA, 25 bp, probe
acctccacatgctgatgatgactat

SEQ ID NO: 139498 - DNA, 25 bp, probe
acctcacacagctgctgcaggtgct

SEQ ID NO: 139499 - DNA, 25 bp, probe
acctacagcagccgcatgagctggg

SEQ ID NO: 139500 - DNA, 25 bp, probe
acctaatgctggcctgactggttgt

SEQ ID NO: 139501 - DNA, 25 bp, probe
acctcaatgctggtcccatgttgtt

SEQ ID NO: 139502 - DNA, 25 bp, probe
acctgcactttgtccatatggtgta

SEQ ID NO: 139503 - DNA, 25 bp, probe
acctgacttcagtctctttgatgtg

SEQ ID NO: 139504 - DNA, 25 bp, probe
acctgacttcatttttaggatgtca

SEQ ID NO: 139505 - DNA, 25 bp, probe
acctatgttcatatatttgtattga

SEQ ID NO: 139506 - DNA, 25 bp, probe
acctcaggtcatagatcattttttt

SEQ ID NO: 139507 - DNA, 25 bp, probe
acctcagaatgacgaccattacgtc

SEQ ID NO: 139508 - DNA, 25 bp, probe
acctaaagggactacctctgtgcct

SEQ ID NO: 139509 - DNA, 25 bp, probe
acctacctggggccacagttggcct

SEQ ID NO: 139510 - DNA, 25 bp, probe
acctcgatagctaggccaagtttgc

SEQ ID NO: 139511 - DNA, 25 bp, probe
acctcgatagctaggccaagtttgc

SEQ ID NO: 139512 - DNA, 25 bp, probe
acgctggattccagagagttttcca

SEQ ID NO: 139513 - DNA, 25 bp, probe
acctgaacgccaagaagtttgtgca

SEQ ID NO: 139514 - DNA, 25 bp, probe
acctaaggccattgacgtggcctgc

SEQ ID NO: 139515 - DNA, 25 bp, probe
acctagcagacgtggggagcctgac

SEQ ID NO: 139516 - DNA, 25 bp, probe
acctagcagacgtggggagcctgac

SEQ ID NO: 139517 - DNA, 25 bp, probe
acctgagagaatcgggggacctgag

SEQ ID NO: 139518 - DNA, 25 bp, probe
acctggagaacgggccgagcgtgtc

SEQ ID NO: 139519 - DNA, 25 bp, probe
acctcaaaatcctgcctaatgatga

SEQ ID NO: 139520 - DNA, 25 bp, probe
acctcagtttcctcatctgcaaaat

SEQ ID NO: 139521 - DNA, 25 bp, probe
acctcaagtactgtatcagaacaat

SEQ ID NO: 139522 - DNA, 25 bp, probe
acccaagtacattctaattaccagt

SEQ ID NO: 139523 - DNA, 25 bp, probe
acccaagtacattctaattaccagt

SEQ ID NO: 139524 - DNA, 25 bp, probe
acccgcccacatttaattaacagct

SEQ ID NO: 139525 - DNA, 25 bp, probe
acctggagcccaagtataaagaact

SEQ ID NO: 139526 - DNA, 25 bp, probe
acctcggcacctacaataaaaccat

SEQ ID NO: 139527 - DNA, 25 bp, probe
acccgccagggacatacaaagcctc

SEQ ID NO: 139528 - DNA, 25 bp, probe
acccgccagggacatacaaagcctc

SEQ ID NO: 139529 - DNA, 25 bp, probe
accctactaagatcataaacccttg

SEQ ID NO: 139530 - DNA, 25 bp, probe
acctctaccaaaacatatgatacag

SEQ ID NO: 139531 - DNA, 25 bp, probe
acctccgacaacagcaagaagcaga

SEQ ID NO: 139532 - DNA, 25 bp, probe
acctcctaagtatcaagtatagaaa

SEQ ID NO: 139533 - DNA, 25 bp, probe
acctcctaggagtacaagtgcctgg

SEQ ID NO: 139534 - DNA, 25 bp, probe
accccttctggcaccagatggggct

SEQ ID NO: 139535 - DNA, 25 bp, probe
accccctcggagccaaatgaggcag

SEQ ID NO: 139536 - DNA, 25 bp, probe
acctcaactcgggcgtattcaacaa

SEQ ID NO: 139537 - DNA, 25 bp, probe
acctcaactcgggcgtattcaacaa

SEQ ID NO: 139538 - DNA, 25 bp, probe
acctcaactactgctggatattaaa

SEQ ID NO: 139539 - DNA, 25 bp, probe
acctaactgagcctcactcacatta

SEQ ID NO: 139540 - DNA, 25 bp, probe
acctctttgcacaagactcacacta

SEQ ID NO: 139541 - DNA, 25 bp, probe
acctctttgcacaagactcacacta

SEQ ID NO: 139542 - DNA, 25 bp, probe
acctcatggcactcagactaaagaa

SEQ ID NO: 139543 - DNA, 25 bp, probe
acctcatggcactcagactaaagaa

SEQ ID NO: 139544 - DNA, 25 bp, probe
gacccagggtactctaataggggcg

SEQ ID NO: 139545 - DNA, 25 bp, probe
acccacctggacactcgtaatgtgg

SEQ ID NO: 139546 - DNA, 25 bp, probe
accccttggcgagccagaactggga

SEQ ID NO: 139547 - DNA, 25 bp, probe
accccttggcgagccagaactggga

SEQ ID NO: 139548 - DNA, 25 bp, probe
acccctgtggattgggcagaactga

SEQ ID NO: 139549 - DNA, 25 bp, probe
acctcctgagaataggcatcacctt

SEQ ID NO: 139550 - DNA, 25 bp, probe
acctcaagccagaaaatctcatcct

SEQ ID NO: 139551 - DNA, 25 bp, probe
acctcaacctgaaagatctcttcct

SEQ ID NO: 139552 - DNA, 25 bp, probe
acctcggagctgaatacagcctgag

SEQ ID NO: 139553 - DNA, 25 bp, probe
accgcagcaggtgaacatgaccgtg

SEQ ID NO: 139554 - DNA, 25 bp, probe
acccaaagatgccacggactggtgc

SEQ ID NO: 139555 - DNA, 25 bp, probe
accggaagcagctagtttcggctct

SEQ ID NO: 139556 - DNA, 25 bp, probe
acctgcgagcagctaatgttctggt

SEQ ID NO: 139557 - DNA, 25 bp, probe
acctgtgagcacattggctgttggt

SEQ ID NO: 139558 - DNA, 25 bp, probe
accgtcgaacttcgctatgggtcgc

SEQ ID NO: 139559 - DNA, 25 bp, probe
acgaactgaactaggcctggtggaa

SEQ ID NO: 139560 - DNA, 25 bp, probe
acgattcggactcggacctagagga

SEQ ID NO: 139561 - DNA, 25 bp, probe
acgacgcctacaggttcgtgaagga

SEQ ID NO: 139562 - DNA, 25 bp, probe
acccagccctgaggttctggcaaaa

SEQ ID NO: 139563 - DNA, 25 bp, probe
acccagccctgaggttctggcaaaa

SEQ ID NO: 139564 - DNA, 25 bp, probe
acccctggcagcggttggtcaaaag

SEQ ID NO: 139565 - DNA, 25 bp, probe
accgccatgaagctgggcttcagta

SEQ ID NO: 139566 - DNA, 25 bp, probe
accgctatgagcatgggcgcttctg

SEQ ID NO: 139567 - DNA, 25 bp, probe
acctctctgatcaggacaagtcgag

SEQ ID NO: 139568 - DNA, 25 bp, probe
acctcatcgtcaaggaccagagggc

SEQ ID NO: 139569 - DNA, 25 bp, probe
acctcagcgtgctggagaagaccgc

SEQ ID NO: 139570 - DNA, 25 bp, probe
acctgactgctctggcaagaagaag

SEQ ID NO: 139571 - DNA, 25 bp, probe
accgcacagcactatgtgacagaat

SEQ ID NO: 139572 - DNA, 25 bp, probe
acctaagcacgtagagatgattcgg

SEQ ID NO: 139573 - DNA, 25 bp, probe
acctggattagtaatgtgcattcag

SEQ ID NO: 139574 - DNA, 25 bp, probe
acctgttgtcttaatgcatttattg

SEQ ID NO: 139575 - DNA, 25 bp, probe
acctgttgtcttaatgcatttattg

SEQ ID NO: 139576 - DNA, 25 bp, probe
accgttgcttgtggatttatagtag

SEQ ID NO: 139577 - DNA, 25 bp, probe
accgttcacattggagatattcagt

SEQ ID NO: 139578 - DNA, 25 bp, probe
acctgttcctgggactgtctgagat

SEQ ID NO: 139579 - DNA, 25 bp, probe
acctgctttccaaatctggcagatg

SEQ ID NO: 139580 - DNA, 25 bp, probe
acctctgagtccaaagcaggctggt

SEQ ID NO: 139581 - DNA, 25 bp, probe
accctgcagcatgacaagctcgtga

SEQ ID NO: 139582 - DNA, 25 bp, probe
acctgctgcaggtgaagatgcgcaa

SEQ ID NO: 139583 - DNA, 25 bp, probe
accccagccatcaaatgaccaaacg

SEQ ID NO: 139584 - DNA, 25 bp, probe
accccagccatcaaatgaccaaacg

SEQ ID NO: 139585 - DNA, 25 bp, probe
acctctcatcctgaggaacatgaaa

SEQ ID NO: 139586 - DNA, 25 bp, probe
acctctctgcccagaagactgtact

SEQ ID NO: 139587 - DNA, 25 bp, probe
acctcactgggcggcaagaggtctc

SEQ ID NO: 139588 - DNA, 25 bp, probe
acctcttggtgtggtgcagggatcc

SEQ ID NO: 139589 - DNA, 25 bp, probe
acctctgttgcaatctgaagaggat

SEQ ID NO: 139590 - DNA, 25 bp, probe
acctgccttgacatgtggggagtag

SEQ ID NO: 139591 - DNA, 25 bp, probe
accggttggagtgggcggagcctgt

SEQ ID NO: 139592 - DNA, 25 bp, probe
accggggtgcctggcacggagtttg

SEQ ID NO: 139593 - DNA, 25 bp, probe
accggggtgcctggcacggagtttg

SEQ ID NO: 139594 - DNA, 25 bp, probe
accgatggaggctgtatcaggattt

SEQ ID NO: 139595 - DNA, 25 bp, probe
accgcagctgggatctcccaattat

SEQ ID NO: 139596 - DNA, 25 bp, probe
acctcactgaggactttgcgaatat

SEQ ID NO: 139597 - DNA, 25 bp, probe
acctccatgaggctttgtgaagtca

SEQ ID NO: 139598 - DNA, 25 bp, probe
acctcacatggttgtttttacacat

SEQ ID NO: 139599 - DNA, 25 bp, probe
actgcacacggtgtctgtttatccg

SEQ ID NO: 139600 - DNA, 25 bp, probe
acctctagtgcaatttataagcaat

SEQ ID NO: 139601 - DNA, 25 bp, probe
acagccttgggggaagtgtacagag

SEQ ID NO: 139602 - DNA, 25 bp, probe
acctccatagacgtgtaaatagctt

SEQ ID NO: 139603 - DNA, 25 bp, probe
acctccacgaacttgaatcaattgt

SEQ ID NO: 139604 - DNA, 25 bp, probe
acctcctcagtaatttataatggct

SEQ ID NO: 139605 - DNA, 25 bp, probe
acctcatctggattaatcaaactgg

SEQ ID NO: 139606 - DNA, 25 bp, probe
acctctcctgaatacttatctgtga

SEQ ID NO: 139607 - DNA, 25 bp, probe
acctctccagaatccggattgctga

SEQ ID NO: 139608 - DNA, 25 bp, probe
acctctgaaggttttctgtgtgctg

SEQ ID NO: 139609 - DNA, 25 bp, probe
acctgcgaaggtattctaatctgat

SEQ ID NO: 139610 - DNA, 25 bp, probe
acctggagacggatctccagtctgg

SEQ ID NO: 139611 - DNA, 25 bp, probe
acctgtgacagcagccttcacatgc

SEQ ID NO: 139612 - DNA, 25 bp, probe
acctcaacatcaagcagttcatggc

SEQ ID NO: 139613 - DNA, 25 bp, probe
acctcatgaaatgagttgcagcaga

SEQ ID NO: 139614 - DNA, 25 bp, probe
acctctgcagacgtcgcttggagga

SEQ ID NO: 139615 - DNA, 25 bp, probe
acctgcaggaccagcatcatctgag

SEQ ID NO: 139616 - DNA, 25 bp, probe
acctcagagaccagtgacatgccag

SEQ ID NO: 139617 - DNA, 25 bp, probe
acctgcaggacgtgtccatcactgt

SEQ ID NO: 139618 - DNA, 25 bp, probe
acctgcaggacgtgtccatcactgt

SEQ ID NO: 139619 - DNA, 25 bp, probe
acctgcgaaggatgatcgcccgata

SEQ ID NO: 139620 - DNA, 25 bp, probe
acctgaaggagacgtaccgctgcat

SEQ ID NO: 139621 - DNA, 25 bp, probe
aactgacggagattaaccgtcggca

SEQ ID NO: 139622 - DNA, 25 bp, probe
accgaggagaggagcaccgggcagc

SEQ ID NO: 139623 - DNA, 25 bp, probe
accgacggaggcagacaagcccaat

SEQ ID NO: 139624 - DNA, 25 bp, probe
accgaagccaagtgataaagccaca

SEQ ID NO: 139625 - DNA, 25 bp, probe
acctgaactccacggaaaaatcaga

SEQ ID NO: 139626 - DNA, 25 bp, probe
acctgctccaaaacgaaacaagaga

SEQ ID NO: 139627 - DNA, 25 bp, probe
acctccagagaaacgacaccagcag

SEQ ID NO: 139628 - DNA, 25 bp, probe
acctcctgaagtgggcagccaacag

SEQ ID NO: 139629 - DNA, 25 bp, probe
accgcttcattgaggctgcaagagc

SEQ ID NO: 139630 - DNA, 25 bp, probe
acctcctctggcaaggctgcaaaga

SEQ ID NO: 139631 - DNA, 25 bp, probe
acctcctctggcaaggctgcaaaga

SEQ ID NO: 139632 - DNA, 25 bp, probe
acctcctctgtgaagcattcgagac

SEQ ID NO: 139633 - DNA, 25 bp, probe
acctcatccttggtgtcgcaggatc

SEQ ID NO: 139634 - DNA, 25 bp, probe
acctctcctctgctggcagattgta

SEQ ID NO: 139635 - DNA, 25 bp, probe
acctgcatctgctggagggtggtag

SEQ ID NO: 139636 - DNA, 25 bp, probe
acctgttgcacatgagcgaggcggc

SEQ ID NO: 139637 - DNA, 25 bp, probe
acctgtctcccagggagcaggggaa

SEQ ID NO: 139638 - DNA, 25 bp, probe
acctctctcccagagctggggggag

SEQ ID NO: 139639 - DNA, 25 bp, probe
acctctctcccagagctggggggag

SEQ ID NO: 139640 - DNA, 25 bp, probe
acctctcctcgcacaggcgggagag

SEQ ID NO: 139641 - DNA, 25 bp, probe
acccggcatggtccagacgaaggag

SEQ ID NO: 139642 - DNA, 25 bp, probe
acccccaggttcactgtggggagat

SEQ ID NO: 139643 - DNA, 25 bp, probe
acctcccggtgtatgcagtggtgat

SEQ ID NO: 139644 - DNA, 25 bp, probe
acctcaccttggacggaatgggatg

SEQ ID NO: 139645 - DNA, 25 bp, probe
acctcaccttggacggaatgggatg

SEQ ID NO: 139646 - DNA, 25 bp, probe
acctgaccattccaccgaagtgtaa

SEQ ID NO: 139647 - DNA, 25 bp, probe
acctctacatcccctggaagtacaa

SEQ ID NO: 139648 - DNA, 25 bp, probe
acctctacatcccctggaagtacaa

SEQ ID NO: 139649 - DNA, 25 bp, probe
acctccacagcaccctggagatgtt

SEQ ID NO: 139650 - DNA, 25 bp, probe
acctcatcaacaacctgctgcaggt

SEQ ID NO: 139651 - DNA, 25 bp, probe
acgccaagacagacacgctgcagat

SEQ ID NO: 139652 - DNA, 25 bp, probe
acctcagcaacggcagcgtgcagat

SEQ ID NO: 139653 - DNA, 25 bp, probe
acctcagcaacggacagatgtgtga

SEQ ID NO: 139654 - DNA, 25 bp, probe
acctctgcactactgacatgtgggg

SEQ ID NO: 139655 - DNA, 25 bp, probe
acccatctctaaagcaggacgcctg

SEQ ID NO: 139656 - DNA, 25 bp, probe
acctcatggcttaaggagacccagg

SEQ ID NO: 139657 - DNA, 25 bp, probe
acctcagtgggattgaaacccaggg

SEQ ID NO: 139658 - DNA, 25 bp, probe
acccctggttgtcagaccacaagct

SEQ ID NO: 139659 - DNA, 25 bp, probe
acccctgggtgtcagatgatgcctc

SEQ ID NO: 139660 - DNA, 25 bp, probe
acccctgggtgtcagatgatgcctc

SEQ ID NO: 139661 - DNA, 25 bp, probe
acctcattggcactgtccgatatgc

SEQ ID NO: 139662 - DNA, 25 bp, probe
acctgattggcactttcactgagag

SEQ ID NO: 139663 - DNA, 25 bp, probe
acctgattggcactttcactgagag

SEQ ID NO: 139664 - DNA, 25 bp, probe
acgtgcatattgccttgcaaagaag

SEQ ID NO: 139665 - DNA, 25 bp, probe
acctgacatctggctatcacacaga

SEQ ID NO: 139666 - DNA, 25 bp, probe
acctcctatggattgcaccaaaagg

SEQ ID NO: 139667 - DNA, 25 bp, probe
acctcctgggcatcactcagaagaa

SEQ ID NO: 139668 - DNA, 25 bp, probe
acctgcgccgtggacacagagaaca

SEQ ID NO: 139669 - DNA, 25 bp, probe
acctctggggcgtccaataacagtt

SEQ ID NO: 139670 - DNA, 25 bp, probe
acctcagtgggttcgttaaaatcat

SEQ ID NO: 139671 - DNA, 25 bp, probe
acctccggtgtgagatatacaaata

SEQ ID NO: 139672 - DNA, 25 bp, probe
accgccctggtaagaaacagtgatg

SEQ ID NO: 139673 - DNA, 25 bp, probe
acctgccccctaaagagtcaagcat

SEQ ID NO: 139674 - DNA, 25 bp, probe
acctcttcctctatcagggacagtg

SEQ ID NO: 139675 - DNA, 25 bp, probe
acctccgttgccatatgggtggtgt

SEQ ID NO: 139676 - DNA, 25 bp, probe
acctgtgcgattgctgtagcggttg

SEQ ID NO: 139677 - DNA, 25 bp, probe
acctgatcttctgcttaatgcagtt

SEQ ID NO: 139678 - DNA, 25 bp, probe
acctgaattacagcaaagatcttgt

SEQ ID NO: 139679 - DNA, 25 bp, probe
acctgaattacagcaaagatcttgt

SEQ ID NO: 139680 - DNA, 25 bp, probe
accgtattccatacaaggacacatt

SEQ ID NO: 139681 - DNA, 25 bp, probe
accgctttgtgcataaggacttggc

SEQ ID NO: 139682 - DNA, 25 bp, probe
acctctgtctagttacaggacggtt

SEQ ID NO: 139683 - DNA, 25 bp, probe
acctcttgtctgtcagaagagccgg

SEQ ID NO: 139684 - DNA, 25 bp, probe
acctctcagcagcatcaaagcagac

SEQ ID NO: 139685 - DNA, 25 bp, probe
acctctcagcagcatcaaagcagac

SEQ ID NO: 139686 - DNA, 25 bp, probe
acctctacgctctgatgaagatctc

SEQ ID NO: 139687 - DNA, 25 bp, probe
acctctacgctctgatgaagatctc

SEQ ID NO: 139688 - DNA, 25 bp, probe
acctccaggctctagatggcaaagc

SEQ ID NO: 139689 - DNA, 25 bp, probe
acctgccaaatatgatgacatcaag

SEQ ID NO: 139690 - DNA, 25 bp, probe
acctccaccatctagaagctgaaga

SEQ ID NO: 139691 - DNA, 25 bp, probe
acctcccacactggatgatgcagaa

SEQ ID NO: 139692 - DNA, 25 bp, probe
accccacacactgaagcagtagctt

SEQ ID NO: 139693 - DNA, 25 bp, probe
acccctgccactgtaatatctataa

SEQ ID NO: 139694 - DNA, 25 bp, probe
acccctgccaatgtatctcagcaga

SEQ ID NO: 139695 - DNA, 25 bp, probe
acctccagctactttatgccagaga

SEQ ID NO: 139696 - DNA, 25 bp, probe
acctctatgtcaggattaccagatt

SEQ ID NO: 139697 - DNA, 25 bp, probe
accctgcaaagcgacccaaatttga

SEQ ID NO: 139698 - DNA, 25 bp, probe
accctgagcaacggccaacgtttga

SEQ ID NO: 139699 - DNA, 25 bp, probe
accctgacccagatcaaagtgtctg

SEQ ID NO: 139700 - DNA, 25 bp, probe
acccaaactacttctggatggtcag

SEQ ID NO: 139701 - DNA, 25 bp, probe
acccctacatgagccagaaggtcat

SEQ ID NO: 139702 - DNA, 25 bp, probe
acccctacatgagccagaaggtcat

SEQ ID NO: 139703 - DNA, 25 bp, probe
acctcctataataccaagtgttgca

SEQ ID NO: 139704 - DNA, 25 bp, probe
acctcctcataaagaccgtggagag

SEQ ID NO: 139705 - DNA, 25 bp, probe
acctcctgcggaagaagctggaaga

SEQ ID NO: 139706 - DNA, 25 bp, probe
acctgccgtcgaaggagcgggacca

SEQ ID NO: 139707 - DNA, 25 bp, probe
acctgccggctatgtcggaagacga

SEQ ID NO: 139708 - DNA, 25 bp, probe
acctccggccatggtggaagaactc

SEQ ID NO: 139709 - DNA, 25 bp, probe
acctccggccatggtggaagaactc

SEQ ID NO: 139710 - DNA, 25 bp, probe
acctctggtcaagaacacacacact

SEQ ID NO: 139711 - DNA, 25 bp, probe
acctctggtcaagaacacacacact

SEQ ID NO: 139712 - DNA, 25 bp, probe
acctctgtgccatgaaaatcaccga

SEQ ID NO: 139713 - DNA, 25 bp, probe
accgcggcctaataatgagtgatca

SEQ ID NO: 139714 - DNA, 25 bp, probe
acctcccctggatgaagatggacgg

SEQ ID NO: 139715 - DNA, 25 bp, probe
acctccctcttcttcaaggagcatc

SEQ ID NO: 139716 - DNA, 25 bp, probe
accgacaacttctggaggagatgct

SEQ ID NO: 139717 - DNA, 25 bp, probe
accgacaatggtctggggtattttg

SEQ ID NO: 139718 - DNA, 25 bp, probe
accggaactgggatgcaggttttgg

SEQ ID NO: 139719 - DNA, 25 bp, probe
accggaactgggatgcaggttttgg

SEQ ID NO: 139720 - DNA, 25 bp, probe
accgtaatcagtcaccagttttgga

SEQ ID NO: 139721 - DNA, 25 bp, probe
accgtaactagaaccttgctttgtg

SEQ ID NO: 139722 - DNA, 25 bp, probe
accgtaactagaaccttgctttgtg

SEQ ID NO: 139723 - DNA, 25 bp, probe
aaaggaagctactctttgtccgtgc

SEQ ID NO: 139724 - DNA, 25 bp, probe
aaaggaggcaaggtcctggtccact

SEQ ID NO: 139725 - DNA, 25 bp, probe
accgcgggacaaatcctgagtcacc

SEQ ID NO: 139726 - DNA, 25 bp, probe
accgcgggacaaatcctgagtcacc

SEQ ID NO: 139727 - DNA, 25 bp, probe
acccaggaggactctgcatttacca

SEQ ID NO: 139728 - DNA, 25 bp, probe
acccaggaggactctgcatttacca

SEQ ID NO: 139729 - DNA, 25 bp, probe
acctctaaggactctagaaagtcaa

SEQ ID NO: 139730 - DNA, 25 bp, probe
acctgctaagtttccaagcagtaaa

SEQ ID NO: 139731 - DNA, 25 bp, probe
acctgcatagagtttgcaaagatta

SEQ ID NO: 139732 - DNA, 25 bp, probe
acctgcaagtgatctgcttggtgct

SEQ ID NO: 139733 - DNA, 25 bp, probe
acctgaaggtcagtatatggagtcc

SEQ ID NO: 139734 - DNA, 25 bp, probe
acctcgaagatttattggcagccca

SEQ ID NO: 139735 - DNA, 25 bp, probe
acctgaagaattgatgggccacccg

SEQ ID NO: 139736 - DNA, 25 bp, probe
acctggaggaagaggtccacgacaa

SEQ ID NO: 139737 - DNA, 25 bp, probe
acctgggtaaggacttgccagagaa

SEQ ID NO: 139738 - DNA, 25 bp, probe
acctggggagagcctgcttgggaat

SEQ ID NO: 139739 - DNA, 25 bp, probe
acccgtggaagtagctattggacag

SEQ ID NO: 139740 - DNA, 25 bp, probe
acccggaaactgatcagggcagctg

SEQ ID NO: 139741 - DNA, 25 bp, probe
actcatcaggcagcgggtagggcac

SEQ ID NO: 139742 - DNA, 25 bp, probe
acccagggacggccatgtgaagccc

SEQ ID NO: 139743 - DNA, 25 bp, probe
acctcggggggctgagagagcaaga

SEQ ID NO: 139744 - DNA, 25 bp, probe
acccgaggggacagcaatgcaaatg

SEQ ID NO: 139745 - DNA, 25 bp, probe
accctactgggagatgaccaatcaa

SEQ ID NO: 139746 - DNA, 25 bp, probe
accctcactgctggggagtccctgc

SEQ ID NO: 139747 - DNA, 25 bp, probe
acctctgaccaacaggctgttctgc

SEQ ID NO: 139748 - DNA, 25 bp, probe
acctctgggaagctgagcatgtggt

SEQ ID NO: 139749 - DNA, 25 bp, probe
acctgtgctggttgcacttgctttg

SEQ ID NO: 139750 - DNA, 25 bp, probe
acctctgctagttcagatggattgc

SEQ ID NO: 139751 - DNA, 25 bp, probe
acctgtcttgctcctatggagtcac

SEQ ID NO: 139752 - DNA, 25 bp, probe
acctggctctgacaagaagtctgcc

SEQ ID NO: 139753 - DNA, 25 bp, probe
acctggccagagccaagaaacactt

SEQ ID NO: 139754 - DNA, 25 bp, probe
acctggacatcgccaaagagaccat

SEQ ID NO: 139755 - DNA, 25 bp, probe
acctgcgagataccaacatgatccc

SEQ ID NO: 139756 - DNA, 25 bp, probe
accgcgacatggacatccagtacca

SEQ ID NO: 139757 - DNA, 25 bp, probe
acctcgacatgcactaaatagccgt

SEQ ID NO: 139758 - DNA, 25 bp, probe
acctgtgcactcagtaaaacgcagt

SEQ ID NO: 139759 - DNA, 25 bp, probe
acctgtgcactcagtaaaacgcagt

SEQ ID NO: 139760 - DNA, 25 bp, probe
accggcctcttgaggagtcgctgtt

SEQ ID NO: 139761 - DNA, 25 bp, probe
accggcctcttgaggagtcgctgtt

SEQ ID NO: 139762 - DNA, 25 bp, probe
accggcctcttgaggagtcgctgtt

SEQ ID NO: 139763 - DNA, 25 bp, probe
accggcctcttgaggagtcgctgtt

SEQ ID NO: 139764 - DNA, 25 bp, probe
accggcctcttgaggagtcgctgtt

SEQ ID NO: 139765 - DNA, 25 bp, probe
acccgagctttgattgactccgtta

SEQ ID NO: 139766 - DNA, 25 bp, probe
accccagtgattaatgtggttcagt

SEQ ID NO: 139767 - DNA, 25 bp, probe
acctccaggtctagcctgggtatga

SEQ ID NO: 139768 - DNA, 25 bp, probe
acctccaggtctagcctgggtatga

SEQ ID NO: 139769 - DNA, 25 bp, probe
accctgagagctaaccctgagttgt

SEQ ID NO: 139770 - DNA, 25 bp, probe
accctgaagccaggaactatgtctg

SEQ ID NO: 139771 - DNA, 25 bp, probe
accccaacgctggagcagtatatct

SEQ ID NO: 139772 - DNA, 25 bp, probe
accccaacgctggagcagtatatct

SEQ ID NO: 139773 - DNA, 25 bp, probe
acctccttccagcagatgtatctgc

SEQ ID NO: 139774 - DNA, 25 bp, probe
acctcgtttgagcctgaagcactgg

SEQ ID NO: 139775 - DNA, 25 bp, probe
acctcgtttgagcctgaagcactgg

SEQ ID NO: 139776 - DNA, 25 bp, probe
acctcgtttgagcctgaagcactgg

SEQ ID NO: 139777 - DNA, 25 bp, probe
accgttttgggccattgcctgagat

SEQ ID NO: 139778 - DNA, 25 bp, probe
acctgtgctttggtgacaacaaagt

SEQ ID NO: 139779 - DNA, 25 bp, probe
acctgtgctttggtgacaacaaagt

SEQ ID NO: 139780 - DNA, 25 bp, probe
acctggcttggcttgaaggcaatca

SEQ ID NO: 139781 - DNA, 25 bp, probe
acctggcttggcttgaaggcaatca

SEQ ID NO: 139782 - DNA, 25 bp, probe
acctggctcggctcaaggaaagcca

SEQ ID NO: 139783 - DNA, 25 bp, probe
acctgtgccgagctctatgaaaagc

SEQ ID NO: 139784 - DNA, 25 bp, probe
acctgagccagagctcactacacag

SEQ ID NO: 139785 - DNA, 25 bp, probe
acctgacctgctgcgagcaagggga

SEQ ID NO: 139786 - DNA, 25 bp, probe
acctgccctgctacaggaagagtgg

SEQ ID NO: 139787 - DNA, 25 bp, probe
acctgccgctgcttgagtggacagc

SEQ ID NO: 139788 - DNA, 25 bp, probe
acctgcacagctggatggtggaagc

SEQ ID NO: 139789 - DNA, 25 bp, probe
accgagcgcttgatgtgcgcggaga

SEQ ID NO: 139790 - DNA, 25 bp, probe
accgtgggctgagaggggatgatgc

SEQ ID NO: 139791 - DNA, 25 bp, probe
accgggagaggaaggtgagtatgag

SEQ ID NO: 139792 - DNA, 25 bp, probe
acctggggagaaagttgagtgtcag

SEQ ID NO: 139793 - DNA, 25 bp, probe
acctggagaagatcggcatgggtcg

SEQ ID NO: 139794 - DNA, 25 bp, probe
acctgcggaggctacggcaggagct

SEQ ID NO: 139795 - DNA, 25 bp, probe
accgtggatgatttctggcagatgg

SEQ ID NO: 139796 - DNA, 25 bp, probe
acctgcttgagctttctgtgcatgt

SEQ ID NO: 139797 - DNA, 25 bp, probe
acctgcttgggtatgcagcagcctg

SEQ ID NO: 139798 - DNA, 25 bp, probe
acctgcttgggtatgcagcagcctg

SEQ ID NO: 139799 - DNA, 25 bp, probe
acctgcttggatctagacagcatct

SEQ ID NO: 139800 - DNA, 25 bp, probe
acctgttggagactctgattgtcat

SEQ ID NO: 139801 - DNA, 25 bp, probe
acctgataggattgcctgcttagat

SEQ ID NO: 139802 - DNA, 25 bp, probe
acctgaatgagggcaatgctaagta

SEQ ID NO: 139803 - DNA, 25 bp, probe
acctggtgaagacgctgtacatgct

SEQ ID NO: 139804 - DNA, 25 bp, probe
acgcagcgggagaagcttacctttc

SEQ ID NO: 139805 - DNA, 25 bp, probe
acctgctggggtattgactatcatt

SEQ ID NO: 139806 - DNA, 25 bp, probe
accgagacggccattcagcttatgg

SEQ ID NO: 139807 - DNA, 25 bp, probe
accgagattgaccttcacgtgtatc

SEQ ID NO: 139808 - DNA, 25 bp, probe
accgagctgcgcagcattatcctgt

SEQ ID NO: 139809 - DNA, 25 bp, probe
accggctgcgcaaatggatgttcat

SEQ ID NO: 139810 - DNA, 25 bp, probe
accggtggagcagtgatgagtgtct

SEQ ID NO: 139811 - DNA, 25 bp, probe
accctggagagcgtcaggggcccac

SEQ ID NO: 139812 - DNA, 25 bp, probe
acccggaggctcacagggaacaaga

SEQ ID NO: 139813 - DNA, 25 bp, probe
accctccaccgcagaaggaaggcag

SEQ ID NO: 139814 - DNA, 25 bp, probe
acccacaccccaaagctggaaggat

SEQ ID NO: 139815 - DNA, 25 bp, probe
accccacctttgagctggaggagat

SEQ ID NO: 139816 - DNA, 25 bp, probe
accctcccttctatgacgagaatga

SEQ ID NO: 139817 - DNA, 25 bp, probe
accccgttatctatgtctttatgaa

SEQ ID NO: 139818 - DNA, 25 bp, probe
accccgttatctatgtctttatgaa

SEQ ID NO: 139819 - DNA, 25 bp, probe
acctggcagttgtttgcttatttta

SEQ ID NO: 139820 - DNA, 25 bp, probe
acctggccagatctttgtatgtctt

SEQ ID NO: 139821 - DNA, 25 bp, probe
acctgccggatccaactggaatatt

SEQ ID NO: 139822 - DNA, 25 bp, probe
acctgccggatccaactggaatatt

SEQ ID NO: 139823 - DNA, 25 bp, probe
acctgtcggacctggtgtctgagat

SEQ ID NO: 139824 - DNA, 25 bp, probe
accgccgcgacggcaagtggcagaa

SEQ ID NO: 139825 - DNA, 25 bp, probe
accgccgcgacggcaagtggcagaa

SEQ ID NO: 139826 - DNA, 25 bp, probe
accggcactacgccaagatcagcga

SEQ ID NO: 139827 - DNA, 25 bp, probe
acctgatgcacgtgctgaaagccga

SEQ ID NO: 139828 - DNA, 25 bp, probe
acctgatggccatggagaagagcaa

SEQ ID NO: 139829 - DNA, 25 bp, probe
acctgcatgacctgggcattgtaca

SEQ ID NO: 139830 - DNA, 25 bp, probe
acctgaaagatacgacattgctgag

SEQ ID NO: 139831 - DNA, 25 bp, probe
acctgcgcttgaaggacatcatcca

SEQ ID NO: 139832 - DNA, 25 bp, probe
acctgcgcttgaaggacatcatcca

SEQ ID NO: 139833 - DNA, 25 bp, probe
acctggatctgaacagagaccacag

SEQ ID NO: 139834 - DNA, 25 bp, probe
acctgtatcatgaaagcaaaaagaa

SEQ ID NO: 139835 - DNA, 25 bp, probe
acctgtcatggaaacaatcctagag

SEQ ID NO: 139836 - DNA, 25 bp, probe
acccaccagattacaatcctgaagg

SEQ ID NO: 139837 - DNA, 25 bp, probe
acccaccactcattaacctctggga

SEQ ID NO: 139838 - DNA, 25 bp, probe
acccatccactgatatttgtcctgg

SEQ ID NO: 139839 - DNA, 25 bp, probe
acccccaccctcatgttcagggtgg

SEQ ID NO: 139840 - DNA, 25 bp, probe
acccccacacgcactttatgaggga

SEQ ID NO: 139841 - DNA, 25 bp, probe
acccctcaactgtcactttatggac

SEQ ID NO: 139842 - DNA, 25 bp, probe
acctgccataaccctttgtgctggc

SEQ ID NO: 139843 - DNA, 25 bp, probe
actgaccaaacgcttattgtgtaag

SEQ ID NO: 139844 - DNA, 25 bp, probe
actggacaattgtcagtgaatttgt

SEQ ID NO: 139845 - DNA, 25 bp, probe
acctgaagatgttcgcgattatctt

SEQ ID NO: 139846 - DNA, 25 bp, probe
acctccatttagggatttgcttggg

SEQ ID NO: 139847 - DNA, 25 bp, probe
accccgcttctgtgtgattctgggg

SEQ ID NO: 139848 - DNA, 25 bp, probe
accccagctagggctggactctggc

SEQ ID NO: 139849 - DNA, 25 bp, probe
acctccaacagggaaggctctgtcc

SEQ ID NO: 139850 - DNA, 25 bp, probe
acccgaaagtggacactggctccgc

SEQ ID NO: 139851 - DNA, 25 bp, probe
acaccagaaaggtcacctgccttct

SEQ ID NO: 139852 - DNA, 25 bp, probe
accctgagaagttacttcacatttc

SEQ ID NO: 139853 - DNA, 25 bp, probe
accgcaaatagtcatctctctaatc

SEQ ID NO: 139854 - DNA, 25 bp, probe
accctacatggtcctacttagtctt

SEQ ID NO: 139855 - DNA, 25 bp, probe
accccagcagtcagctgtctttgtc

SEQ ID NO: 139856 - DNA, 25 bp, probe
accccagcagtcagctgtctttgtc

SEQ ID NO: 139857 - DNA, 25 bp, probe
acccgtgattccaagtgcttatcca

SEQ ID NO: 139858 - DNA, 25 bp, probe
acccgtgattccaagtgcttatcca

SEQ ID NO: 139859 - DNA, 25 bp, probe
actcaccagaagggggcttaccaag

SEQ ID NO: 139860 - DNA, 25 bp, probe
actccaaaagggcttcaatgcgaag

SEQ ID NO: 139861 - DNA, 25 bp, probe
acccgagcaagaggggtcattgctg

SEQ ID NO: 139862 - DNA, 25 bp, probe
actgggaaaagttggtcaggcgcag

SEQ ID NO: 139863 - DNA, 25 bp, probe
accgagacacacctgtggtcggggc

SEQ ID NO: 139864 - DNA, 25 bp, probe
acctgtacatcctctggaaggggcc

SEQ ID NO: 139865 - DNA, 25 bp, probe
accgtacaggtacagaagccgagga

SEQ ID NO: 139866 - DNA, 25 bp, probe
accgtgagcaggtagaagccagcca

SEQ ID NO: 139867 - DNA, 25 bp, probe
accgtgagcaggtagaagccagcca

SEQ ID NO: 139868 - DNA, 25 bp, probe
accgtatgaggtgaatggacagcca

SEQ ID NO: 139869 - DNA, 25 bp, probe
acctgcttagttaattggctcagaa

SEQ ID NO: 139870 - DNA, 25 bp, probe
acgctttatgccttcaatactcgca

SEQ ID NO: 139871 - DNA, 25 bp, probe
acctgtaggccatgttagcactgca

SEQ ID NO: 139872 - DNA, 25 bp, probe
acacttagccgctgtctcgccgtgt

SEQ ID NO: 139873 - DNA, 25 bp, probe
accctagcaagggtcctccatggtg

SEQ ID NO: 139874 - DNA, 25 bp, probe
accctgcagtcggggacctatggtg

SEQ ID NO: 139875 - DNA, 25 bp, probe
acccggctgctggaggtacgaggat

SEQ ID NO: 139876 - DNA, 25 bp, probe
acccggctgctggaggtacgaggat

SEQ ID NO: 139877 - DNA, 25 bp, probe
accctgtcgcgcttggaacgggatg

SEQ ID NO: 139878 - DNA, 25 bp, probe
acccttcgccttgggacaggaatgg

SEQ ID NO: 139879 - DNA, 25 bp, probe
acccttcaacatgcctggtttaggc

SEQ ID NO: 139880 - DNA, 25 bp, probe
acccttacagcctctgacttaagct

SEQ ID NO: 139881 - DNA, 25 bp, probe
acccttcccaatcagcactgaaaat

SEQ ID NO: 139882 - DNA, 25 bp, probe
acccaaaccaagtgtatgtattgat

SEQ ID NO: 139883 - DNA, 25 bp, probe
acccaaaccaagtgtatgtattgat

SEQ ID NO: 139884 - DNA, 25 bp, probe
accccaaaattctgcatagattatt

SEQ ID NO: 139885 - DNA, 25 bp, probe
accccaccagaatgtcacaatcatt

SEQ ID NO: 139886 - DNA, 25 bp, probe
accctccggaaacggctgtatctgc

SEQ ID NO: 139887 - DNA, 25 bp, probe
accctgggaaaagtgaagtatggct

SEQ ID NO: 139888 - DNA, 25 bp, probe
acccatgggaatacctgacctaggt

SEQ ID NO: 139889 - DNA, 25 bp, probe
acccatgggaatacctgacctaggt

SEQ ID NO: 139890 - DNA, 25 bp, probe
acccaggcaagcacggaacaagctg

SEQ ID NO: 139891 - DNA, 25 bp, probe
acccgtgtcacatcgtgaatattta

SEQ ID NO: 139892 - DNA, 25 bp, probe
acccggccgagaatatgtgttgtta

SEQ ID NO: 139893 - DNA, 25 bp, probe
acccggtcgagctattattcttaca

SEQ ID NO: 139894 - DNA, 25 bp, probe
acccgtgtatggcaccctgccatac

SEQ ID NO: 139895 - DNA, 25 bp, probe
acccgtgtatggcaccctgccatac

SEQ ID NO: 139896 - DNA, 25 bp, probe
acccctggatgcaaacaccagccga

SEQ ID NO: 139897 - DNA, 25 bp, probe
accccagaagcacaatgctagccta

SEQ ID NO: 139898 - DNA, 25 bp, probe
accccagaagcacttagttgctcct

SEQ ID NO: 139899 - DNA, 25 bp, probe
accccagaagccacgatgtgctctg

SEQ ID NO: 139900 - DNA, 25 bp, probe
accgcaagaagctgagccagcccat

SEQ ID NO: 139901 - DNA, 25 bp, probe
accgcaagaagctgagccagcccat

SEQ ID NO: 139902 - DNA, 25 bp, probe
accgcgagatagggcagatcactct

SEQ ID NO: 139903 - DNA, 25 bp, probe
accgcgagatagggcagatcactct

SEQ ID NO: 139904 - DNA, 25 bp, probe
acctgcatcagctacgtcaacagct

SEQ ID NO: 139905 - DNA, 25 bp, probe
acctgcatcagctacgtcaacagct

SEQ ID NO: 139906 - DNA, 25 bp, probe
acctgtccaacacacacagctattt

SEQ ID NO: 139907 - DNA, 25 bp, probe
accgatccaacctagagaccatttt

SEQ ID NO: 139908 - DNA, 25 bp, probe
accgtcctgacctataacctgtagg

SEQ ID NO: 139909 - DNA, 25 bp, probe
accgtcctgacctataacctgtagg

SEQ ID NO: 139910 - DNA, 25 bp, probe
actcagtttaccttaatgccttagc

SEQ ID NO: 139911 - DNA, 25 bp, probe
accctatttctctaagaccattcgc

SEQ ID NO: 139912 - DNA, 25 bp, probe
acccgcttggatcagtgaccatttg

SEQ ID NO: 139913 - DNA, 25 bp, probe
accccagggatatacccatcatggt

SEQ ID NO: 139914 - DNA, 25 bp, probe
acccatcagtgattcattcccaaat

SEQ ID NO: 139915 - DNA, 25 bp, probe
acatcaatggattctcgacttcaaa

SEQ ID NO: 139916 - DNA, 25 bp, probe
accctggcttccagcttcaagaggc

SEQ ID NO: 139917 - DNA, 25 bp, probe
acccaggttgccatcttgaagactt

SEQ ID NO: 139918 - DNA, 25 bp, probe
accctgtgattctgtccttagaatg

SEQ ID NO: 139919 - DNA, 25 bp, probe
accctgtcattacgtcaacgcaacg

SEQ ID NO: 139920 - DNA, 25 bp, probe
acccgtcagaagctcagagccttct

SEQ ID NO: 139921 - DNA, 25 bp, probe
accggctgcagagggtcaaggcttc

SEQ ID NO: 139922 - DNA, 25 bp, probe
accgtgctgcagtgcgtgaacgtgt

SEQ ID NO: 139923 - DNA, 25 bp, probe
acctgggccagagatggacgtgtac

SEQ ID NO: 139924 - DNA, 25 bp, probe
acctggaccagagacgctccagttc

SEQ ID NO: 139925 - DNA, 25 bp, probe
acctgcagacaattcccgtggatgt

SEQ ID NO: 139926 - DNA, 25 bp, probe
acctgaactgtgaggcgggcagtct

SEQ ID NO: 139927 - DNA, 25 bp, probe
acctgaataggcaagtcgaggcaat

SEQ ID NO: 139928 - DNA, 25 bp, probe
acctgactaggttctgtagagccaa

SEQ ID NO: 139929 - DNA, 25 bp, probe
acctgacggtgatcttgggcagaac

SEQ ID NO: 139930 - DNA, 25 bp, probe
acctgactgggagctaggggaccac

SEQ ID NO: 139931 - DNA, 25 bp, probe
acccctgtccaggatggagggtcca

SEQ ID NO: 139932 - DNA, 25 bp, probe
accctgcttccgggaaggtgtctca

SEQ ID NO: 139933 - DNA, 25 bp, probe
accctgcctctcagagggttttctc

SEQ ID NO: 139934 - DNA, 25 bp, probe
accgcatcctttttgaagaatttgt

SEQ ID NO: 139935 - DNA, 25 bp, probe
acccacacgtgtcctgaagacaaag

SEQ ID NO: 139936 - DNA, 25 bp, probe
acccacaaattattcttacagaaag

SEQ ID NO: 139937 - DNA, 25 bp, probe
acccacaattgaacttccaggaaag

SEQ ID NO: 139938 - DNA, 25 bp, probe
acccacaattgaacttccaggaaag

SEQ ID NO: 139939 - DNA, 25 bp, probe
acccagcagtttatccctgtgaaaa

SEQ ID NO: 139940 - DNA, 25 bp, probe
accgtggatgtctttcacgctgtga

SEQ ID NO: 139941 - DNA, 25 bp, probe
accgcagcgagtcctatacgtggtt

SEQ ID NO: 139942 - DNA, 25 bp, probe
accgcagcgagtcctatacgtggtt

SEQ ID NO: 139943 - DNA, 25 bp, probe
acccgcagagtttaggctggtgctg

SEQ ID NO: 139944 - DNA, 25 bp, probe
acccatcgggtaagatgctcctggt

SEQ ID NO: 139945 - DNA, 25 bp, probe
accctgcccctgaagatgcagctgt

SEQ ID NO: 139946 - DNA, 25 bp, probe
acccgctctacaatatgagccttct

SEQ ID NO: 139947 - DNA, 25 bp, probe
accgcgatcttaaatgtgacaacat

SEQ ID NO: 139948 - DNA, 25 bp, probe
acctggatgttcggggtgacactgt

SEQ ID NO: 139949 - DNA, 25 bp, probe
acctgggcattggtgagggagccag

SEQ ID NO: 139950 - DNA, 25 bp, probe
acctgggctctgtttcagagaacgg

SEQ ID NO: 139951 - DNA, 25 bp, probe
acctgggctctgtttcagagaacgg

SEQ ID NO: 139952 - DNA, 25 bp, probe
acctgtggcacggaatgaaaacaga

SEQ ID NO: 139953 - DNA, 25 bp, probe
acgtctggacaagatcaaaacaccc

SEQ ID NO: 139954 - DNA, 25 bp, probe
acgttaccagcagctgaaaccaatt

SEQ ID NO: 139955 - DNA, 25 bp, probe
acgttttgcagggctcagtacgagg

SEQ ID NO: 139956 - DNA, 25 bp, probe
acgttcttcagggtcaaaattcagt

SEQ ID NO: 139957 - DNA, 25 bp, probe
acgttcttcagggtcaaaattcagt

SEQ ID NO: 139958 - DNA, 25 bp, probe
acctgtttcaacttgaagacaccgt

SEQ ID NO: 139959 - DNA, 25 bp, probe
acctgtttgactttgaggtagtcca

SEQ ID NO: 139960 - DNA, 25 bp, probe
accgtgaatggttctgaggtccccg

SEQ ID NO: 139961 - DNA, 25 bp, probe
accgaaatactcataagccacctct

SEQ ID NO: 139962 - DNA, 25 bp, probe
acctgtgaaactactgaggccagct

SEQ ID NO: 139963 - DNA, 25 bp, probe
acctggaaggcgagatgagccctga

SEQ ID NO: 139964 - DNA, 25 bp, probe
acctggagggtgtcgtgaccaagag

SEQ ID NO: 139965 - DNA, 25 bp, probe
accggcaggagtttgtctgcctcaa

SEQ ID NO: 139966 - DNA, 25 bp, probe
accgcaggtcgaattgttcgtgaag

SEQ ID NO: 139967 - DNA, 25 bp, probe
accgatggactgactatggctcgag

SEQ ID NO: 139968 - DNA, 25 bp, probe
accgcatccacgtgaacttgagcac

SEQ ID NO: 139969 - DNA, 25 bp, probe
acctgaccaagatgacagcatggag

SEQ ID NO: 139970 - DNA, 25 bp, probe
acctgttctgaatccagcatggagc

SEQ ID NO: 139971 - DNA, 25 bp, probe
acctgtacttggtcatgcagctgga

SEQ ID NO: 139972 - DNA, 25 bp, probe
acctggacatgtatcagatgctgag
